United States Patent Application Publication US 2019/0348154 A1 - sequence listing, part 74

SEQ ID NO: 278821 - DNA, 1455 bp, Morganella morganii
atgaagcttacactaaaggttaatagagtaaaaagcatcaaagaatttagcttaactataatgataaatcaaggtgttcatgctatttcaggaaccaatggaattgggaaaagcacaataatgtctcttttagctgtacctttcagaccagcactgctgaaccatatattttatagagggcaacctaactcaactatcgagtatgaacttgatggggttgttgatacatatataaaaaaagagggaaaatggattatccctacaaaaaaaatatcaatcgatggttttattgaaggtagtgtaatctatggaactagattctccgactcaacgttaaagagtttagaattatctgacaatgtatcagaagcagatctggttgatgcggatgagtttattaattggaattttagttatattcttcatggaaaggaaaagtcatacccaaccataaagaagatcaaaaatcgcaggattgctcagaagttgggttttgaaaccgtaccatattttatgcaatatgaagacgcaagacttagtcaatattggttaagttccggagaaaacctccttcttagcttgctacatttcattaataacaaaattttccagcaaaaaaagaaaggcagtagtgaagtttcacttatattaattgatgagatagagttggctttacatcctgttgctattaaaagaatggtggaggttcttgctaaacttgctaaggaatttaatctgtcaatatatttctcttcgcattccaccgagttactcagggcactcaaagctgaaagcatttactatttacagtcattgcctgacaaaagcatagaagtgattaatccatgttatcctgcatatgccacaagatttttatataatcaagatggatacgactttcttttattagttgaggatgaacttgcaaaatttattattgaaaaaattgtcgttgaagagcagctttatgatgggaaattatatcatgttctaccttgtggcgactggagaaacactgttagattacacaaggaaatatttgattcaaaaataacaaacacttccgcaagaattatatccattttggatggcgacgttgaattggattttgagcgtgaaaaaataaaaaatggacatttaaatatgaatgtcgctttccttcctattcccagccttgaaaaatatttgcatgaaaaattagttttaaatgtaaacaaatccttctttagacggttgaacgatagattttttcgaagagtttctttagaccaagttgtatcaaattatacaaaaggaaaaattgatactaaaggtaaagtgttatggtcttcattagttaacgcaattgaatttgacggtttttcggagcgtgagtttctaagagaggtttgttcactgatctattcagacttaaaccctgataaacttatcgagagaattaaatcaatattttga

SEQ ID NO: 278822 - DNA, 234 bp, Morganella morganii
atggttaatcagccagccttcccggcgcagcaggatatgtatgtgctgcacgcagtagcggatgcgggtttccgctatttcccttatccgctgcgtgactgcgcggtcgtcacgccggctttgatagtggtagactgtgcggctctgcatcatcagacgacaaccacgccgcagcccgatacggtaggcctccagcacctcccgcttctgcgccgatctcagaactttttttga

SEQ ID NO: 278823 - DNA, 165 bp, Morganella morganii
atgcagtgcggtgtgtgccagtgggtttatgatcctgagaaaggcgagccggtgcagggcgtggagccgggaacaccgtggtcctgtgtaccggataatttcctgtgcccggaatgctctctcggtaaagatgtatttgatgtcctggcgacggaggccgcatga

SEQ ID NO: 278824 - DNA, 450 bp, Morganella morganii
atgcccgcagataaatccggtaataaaacaccatgccctgtcgcccgcagtgcagacttaattggtgatcgctggtcattactgattgtccgtgatgcttttgacgggatccggcgcttcggggattttcagcgaaactcaggcattgcgcggaatattctctctgacagactgcgtaaattactcagtgccggtattctggaaatgaaagatgcctcggacggaacggcttatcaggaatatgtactgacggaggaagggaaacatcttttccccgtgattgtggcgctgagacagtggggggaaatgcaccttttcgggcacgatgaaccgcattcattgctggtggaaaaagaaaccggcaaaccactggctgcaatggtgccggtttctcaggaaggccggattctggatccggatgaaacagaagttaaaaaagtgagcctgtaa

SEQ ID NO: 278825 - DNA, 972 bp, Morganella morganii
atgaagaacaccggtacagtacctgtcccggctgtaaatgccggtattacacatacgccattacccggcagtcttgtctggctgtttgctgcagcaagcgggctgagtgtggctaatgtctattatgcacagcctctgctggatgcacttgcccgtgattttgccatcagccatgcggctgtcggcggcgtaattaccgcaacacagatcggcagtgctctggcactgttgctgctggttccgctcggggacaaaaccgatcgccgtaacctgatgacctttcagttagccgcgttaatcctggcacttttcattgtcggcctggcggcaacccccgctgtactcctcggcggcatactggctgtcggcatgctgggcaccgcaatgacacaaggacttattgcatatgctaccggtgttgcagggccgggtgaacagggacgtgtggttggtgccgcacagggctgcgtctttaccgggctgttactggcaagagtgttttccggtgcagtcagtgatttagccggctggcgcggcgtatatatcagctctgcaataatgatgctgcttattttactgcctctgcgcaaacacctgccccgcatggcggttacacaagccacaggcagttaccggcaactgatagtctcaatggtttccttgctgaaagagcaaaaagtactgcaaatcagggggatcctcgcattcctgatgtttgcggcattcaatatattctggagtgcccttgtgattccgctgagcgctgcgccctattctttttctcacaccgctatcggggcttttggtctcgccggtgcaatcggtgccattgccgccggaagcggtctcggcgcaatcagcgctaccatgatgtatgcttatgcgggctggaatggtgtctgcctgctgggcgcattcgtcagtttgctggtattactcttctggcgggctacacttaatgttgccggatga

SEQ ID NO: 278826 - DNA, 1569 bp, Morganella morganii
atgttttccatgaatttttacaaaaaactcaaagacaaaaaacattatagtattactatatattcgttcttatctattttgatattgtcttatttatttttatttttcaaaaaagatagtgataatctttcatctatattttatatactcttgtttttatttacatatataactggtttcgtttcaaacaaaaataaaaacatttcatttttattttatattttagccttattatttgtattgtctgagtttgttactaaacggatgactgggttttatttcagtgaaataccttatgaaatcatatccattctttatgatacaaatatcgatgaaatgaatagctcaattaattttgataaaaaagaaataatagctatatttttaattggtatatgtatagtttcgatatttataaaaaacataaccaaggaaattaaaaagcattcgtacccagtcctctttctacagattttagttatttctatgtttttctcatttaccaataacccattaacaagagctatcgaaattataaaagaaaaagataaaatactttctgatactattgaaactcttaaggaacgaaaaaaatttacatggggagctaaaagcctaatacctgagaaacaaactgttgtgttattccttggtgaaacacatcgtggtgattttttagggttcaatggttacgataaagatacaactccattattagataaagagaatataatttcgtttaataacgcaatatctcaagctgcgtatactctaagatctactccaatgattcttagcagaaaaaacgtcaataataatgagggcgtttttaatgaaaaatcgattattgctgccttccgcgaggctggatttgaaacatggtatatatcatatgcatcaccagcattgattggtgataatgaaataaatattattgttaacgaggcagaccattacattcgctctgatgtgaacactgatacattaaaaaaagttttaaccaacaaatcaaataaaaaactaatagtttataagacggttggtagtcactttttatatcacacgcgctatcctgcagaatatgatatatttaaaccatcatttacaaatagtgattataaaacaccatcaattaatgatgtggagaaattgaaaaatagttatgccaattcaatacgttactccgtggataagcaggtgagtgattttattgatgtgcttaaaaatgagagtggtatagtctcgttatcatttatttccgaccatggcactgccatttatgacgatggtaaatcactttacggtggaaatacgaaaggtaattacagcattggcctatttttttggtttaatgatgaatataaaaataaattcaataaagatatatcattactagaatcaaataaaaataaaaaaatcacatcggaatattttgttgataccatgttgcacattggaaaaatagaaacaaacattaaaaaaggatgtagtttatttgataaaaaccttaaggaaaaagaacggttagttaaaaataaaaatatatataattacgacactgatctttaa

SEQ ID NO: 278827 - DNA, 252 bp, Morganella morganii
atgaaacaaaaatatgtgtatcaatcgcctgaaaactatgcagaaaaagtaaatgataatgacgggattaaacagctttccatcacatcgatgcttgaggaattactgcgggagatggatcgggatggtcatgatgtatcagggccgatgacagagctggtggcactgaaaaactacgttacacacacggagaagcagaacaagaccgtgcggaccgggctggagtttgtgctgtccgcactgaagaagtga

SEQ ID NO: 278828 - DNA, 1050 bp, Morganella morganii
atgaaagataaagatcttaattatgtaaaaaaaatgaagcatgagaatgtatcaacattaatttgcaaatcaataaaaagtatttttggtctggtaaggccgggggctcagattgttgcgttatatgaaaactacacgaaatatacaaatcagaaagaggtaataaagctatatgagtttttaaaaggcattggagatgaagatgcttctaacatgatcgaggcgttaggacctgaatacgcatcggaaattattgattgtgttataagtgaaatggaaaataaaaaatctattttttatcaaaatttagttgttaatttaatgaatggaaaagaggttgactttgctaaaaaaagtgaacttgttataattttaaaagatatgacttttgaggatattcaattagcaaaaaaatattatatttacaataaatatgatattaaaggatttcgagacagcgatgaacaaattgatagtttattaccacatggcaatggattatcattgaagtcaacaaataagcttgtaacaaatggccttgtttttattggtgaaaataaaacatggaagagtgataagtatcaatcaactgatttgcttgatgaatttattactatgattcatacgaaaaatgatctttcaccaaaaaattcagatttatgtgtaaaagataagttggatgcaataataggttttgagaaaagtataatagatggtaacgaaataaagaatgataaattcatctctgatttatctgataggttaagaggttatttagatgatactggtattgactgcatcgttataaatgatctggattttgaagttataagaaaagaaaagacatcagagcatcttattaaaataatatttaataatgactacactttttttacaaaaagatatatgtccgaagatgagtttgtaaaaaggactaaaataaattctgacgaagacgatgtttataaatttaattctgatgaaaaatcgatacaggattttattgaaagtgttcattatgatttacatgaagccaaatatgataattaa

SEQ ID NO: 278829 - DNA, 759 bp, Morganella morganii
atgaacaacctcagcatatctgtatcaaatcttccttctatcattcataacaacatgccagtgatcaccactgaactactcgctgatgtttatgaaaccggtatccagaatatcaaaacaaaccattcaagaaacagaaatcgctttaccgaaggcaagcattacttcaatttaactggttcaatattaaaggattttaagaacagagttactttaagtaaccctgttgatggctgcaaaacaggtactcgttacggtatcatcggaaagaacgccagaagcattatcctctggaccgaacgcggcgctgcccgtcatgccaaaatgctggacaccgatcgcgcctgggatgtatttgagattctggaagataactacttcaccaagtaccgcggcaccggtcggatcaataaatcattaccccgcaatgcctctaccgaggaactgctggcgctggtggatcagctgcaacgtaccattcatgaaggtgagttcatccctgccgggcaggtggcgcaggaatacagcttcccgaaaacgaagaagtcacgttcgcagatcctcaatgacttcctccggtcgccggaagacgacacgctccaccagcttctggcctacctgaaacgggatggccacaacgtggaagaagccgagcgtgtcctgatgtggctccgcgattatatgtgcgatatgggtaaaaccatcaacaccatcattacccacgctcagtacatcgaacacgctgtcagtaagttataa

SEQ ID NO: 278830 - DNA, 291 bp, Morganella morganii
atgaatgaagatattaaaatactagagtcagaatactatggtgcagacaatagcaaaaaatgggggatgtatatttccattgctggtgttattgcatttatagccaattcggtatgggggtggtcagatagcccagtatttgttggtatagttatcggtggcggcttgactggctgggctgttagttatgaaaaagccagaaaactcagaaatagattagataatatttgcatgtcaaaatatggtaagccatataaagattcgtttattgacatactgaacgataagtaa

SEQ ID NO: 278831 - DNA, 351 bp, Morganella morganii
atgtcacgatataaagtattgaagaaatcctttatcaatggccgcctgctttatcccggtgaggaaattgagttcatcggtgtggcgggaagtaacctgctgctgattgaaaccggtgagcgtgtagtggcggatgaaggtaccaatacaggtaacgataatcacagtggtgatggcggcggcggtgaaggtggtaccggatcctccggcggcgatggcggcgctgataatgaactgatcgcattgcaggatcagtaccagcagttgtttggtaagaagccgcatcataatgccggtgccgaaaaactccgcgcagatattgacgtgaaacgtaaagagctaggggtttaa

SEQ ID NO: 278832 - DNA, 561 bp, Morganella morganii
atgaccatcaaaagaccacgcaaaccaccagcacgaaagcctacaccgctgaacgcccagatggagcgcttctgtcaggaatatctcaaagcgcccgataatcagactgatgccgccattgctgccgggtatgctcccggcagtgcctgtaaacgtgcatcggtactgatggcagacccccgcattcaggaacgtatcgctcagcttatgcagcagcggaacaagcgcaccaagatgagcgctgacaccgtgcttaagcggctggtggatatgctggacgcggatatcgcggacatactcaatgagaagggcgatatcaaacccatcagcgaatggtcgccggtctggcgtaaatccgtggccgcattcgatatcatcgatatagatggtgatacccgcctgaaaaaagtgaagcttctggacaaactcaaggtgctggaactcatcggcaagcacgtcgatatcaatgctttccgggagcgcgtacaggtggacgtcaatatctcgctggcggataaactggcagcggcacgtaaacgggcagcagagggcattgagtaa

SEQ ID NO: 278833 - DNA, 636 bp, Morganella morganii
atggattgggttgcaggaaccgctctggcagttggtgttggctcattagctttgacttggcaatcgacaagggcggcgaaaagagcgattgacacatcgattaatatttatgaaaagcaaaaaaaagataatttttataaagaagaagatgctgccaatcttaaagcacttggaatggaatatattattaatgaactaacgacagatatattgatttttcttaaagactttaagtctatatttaattcatcaaaaggaatggtggggaaaatatcttttttaaaaaaagataatgtgtattattttggtcatatagctaaggatgagaaggttgttgatggatttaatctgtattttattaatatgcagttatatcatggttatatatttgaagccgcatgtattagtgataagagttatagtgatttagtaaaatcaatttctatatataataatgccgagaaactattaaagtcatttattttaaatttcagagtaaagagaagtattttgtataaagatagcctgccatctaaacatcgaaaagaattaaataattttatgaaagaaattataggaataaaaaaagggttaatgttctattctaaagtaaacaataaatctacaggtggttga

SEQ ID NO: 278834 - DNA, 867 bp, Morganella morganii
atgacatcattgaaaacatgcaagctttgtaaaaacaaaaatgaaaaattaatacttgggcacgtatactccagccttttattaaaatatttagctacccatgaggacggtaaagttcacttaagattgtccgatataccaaacaggccattgcaagatgggccaaagaaatatatgtactgcccttgttgtgacaatgaaatcctgagcaacattgaaaaaaaattcttcaataatgtttttaagcctttatatgaaacagtatcttccattaatgaaatcgatgaattctcaaaagaaaacaatatattactgaaaaaatttggagccatagcattactcaatggaataataacttcattaacagatgctggtataccaggaacagaaagcaaagggaacttaccgataaatgattataaaaaatcaatatataaggccgtgaaaaacttaagatcattaatacttcacaacactaccgttactaactttgacatatacgttggtttatacaaagattatatctccatagatacacaagaagatatatttaacaacattgactatgttaatcagtgccattcaatgtttatggggtttagttcactttcacatttaaatcactgtatttttcttatttctatcgggcgattcagcttttacattttcttaaataaagaatgtgtaccagaaacaccaagtaacgaagtaatgaaggagttaataaattcaaatgaatattactcttgcaaactatctgattcaattagtaaaaatatgtcagagaaccaaaaagaaaaaataaaaaacaaataccaccctgattgttatttagaaaatctaactcatttaaaaaacaagcactga

SEQ ID NO: 278835 - DNA, 474 bp, Morganella morganii
atgtggcagcgggcaaccgccggattgagtgacgaccagtttgagatgatattcacgttctgcctggatcgctgcatgaacggcaatccgtggccgcctgaactgtctgacgtgattgtgatgctgtcggataagctggtggactcaaacgcattcgggatcccgttcgacgacatgctgcgtgattttaataaatacatggcggagcggggctattaccgcagtgctgagatgtacccattccggcacccggtgcagtactggatcttcactgacctgagaaacagggtgcatgacctgcgactgactgagcctgaggttgaaaagcgcctggcgaagatgatccggcagtgggctgaccgtgtagccaaaggcgaaccaataccccgtcctgtgctgagtgtcgaagataaaacccggccgcctccggcatggatggaaatgctcgaaagaaagaaacaacgatctgcctga

SEQ ID NO: 278836 - DNA, 1029 bp, Morganella morganii
atgcgtgactacgggaaagtttcaccacaattctggatagggaagaccggtaaagagatcagggaaaaaggtcacgaagctcttattgtttctatgtatttgcttacaaatcctcatgccaatatgacaggcatgtattacctcccggtcatttacatggcgcatgaaactgggctgggtttggaaggggcttcgaaggggcttcgaaggtgtatcgaagcgggattttgccactacgatgaggatgccgaagtggtctgggtgattgaaatggcaaagtaccagatcgcaccggcgcttaaagcatcagataaccgctgtattggcatacaaagagagtatgacagtcagcctaaaaatcaatttttatcaatgttttatcagaaatataaagattgctttcatatgtcgtcggaaaggaaaccatcagagaaaaaagaaaggggcttcgaaggggcttcggagaccctcggaagccaagaacaagatcaggaacaagaacataaaacaactctctctggcgcgcgcgaagaaaattttattcctgttcctgaggcggagggctcaccggcagggaactggtcagattatccgggtaaattcgtgatgaccggacactggcagccggatcaggatttcagccgcaaagcggcacagtggggcgtgatactgaatgagccgtaccggcctgaggaattggccgagttcatcacgtactggcaggcggaagggaaagccaaacaccacgcacagtgggaaatgacatttgccaaaagcatccggcagcagcgcatgaaacaaccgaaacagagcggaggtcacaccgatgacacagaatttaaatttaacccatccagcgggaaatccagagcggtacaactcgtcgagcatgggatccggaaaaaatacgggcaggaatatctcgactctctggctgaagatgaccgagctgtatggggacaagtggacgggcaagaacgggacggaaccgtcatcgatgtggcagcgggcaaccgccggattgagtga

SEQ ID NO: 278837 - DNA, 258 bp, Morganella morganii
atgatcccattaaaaaaacctatcgacttcaaagaagtgaagcgcctcaccggcctgtcccgttcaactatttacgcctacgaaaaagcaggtaaattcccgaggcgtactgcatttactcagcgcacagtgcgttgggaagaaagtgaagtcattcagtggatcgccgaacgcggcatgcatccggcagttccggacgacactattcacaaagcccgggcaaaaaaggcggcaaagcatgaacagcgcgcgctttga

SEQ ID NO: 278838 - DNA, 144 bp, Morganella morganii
atgaacagcgcgcgctttgatatcgctgatgtgattctgtcaccgcacggaatcgcacttttgtgcgccatcagcggtgttatctgcgtgattgatggtgatggatttcagttgattgtgtccagcgttcaggatgaagcgtaa

SEQ ID NO: 278839 - DNA, 822 bp, Morganella morganii
atggttaacatacaacgatatatgtctggtgaaacagcgcgcaaagttttaagtgataacggtctatatttcaggagactcgactgccaatccgcagatccaacggaaggcgacagggagttttatggctcttttgagacttcaataaaaaatgcattaaaccatcaaataagcaaaccaactgataaattaacagataatgaatctgctgaaatatttttaaatttaatggaatccgagaagaaaaataaattcattcaatgctggtttttcagtaatgaatcatctccgcatatgtggaataggtttgccttatatgataaaaataaagattgtgcattatttgttgcaaatagatttattctatctgattacttatcaaaagtcttaccaatagggtatgactttaaattaatagaatacgttgaagataaacactcaaaaaacaacactgattacattaaagccaatacatatatagatgaaaatgaaattcggatattaattgatattagacctttaattttatttaaccgaaaaatattgcaaaacacatacaataaccaagaggtatattttaaagagaaccttggtgaaaatttaaaaaacaatggtgttgcagatgaaaacttattcatcgatgttgatgaaaaaggttttatactaaaagctccattaagtgaaataataaccaatgtatttattccaaatgatgcatcaattgaatttgagaatgagctgaatgaacttttatccttaaataactatagatttacatgtgcaagaataaatgtaaaaaatacagaaaatataaatagataa

SEQ ID NO: 278840 - DNA, 393 bp, Morganella morganii
atgaaaatacaaggcagattaatcagtagccagcgctatcttgacgataatatcgttatggataaagcactgcgatttaaggtttttattgttgacatcattccagtcattctgcgtggcaagcaatacaccctgttatgtaatggtcatcataattatgctgctgcaaagttaatcgggactgaaccgcaattcagaacacccaagaaattaaccaaagcatttaaccaatactcgcagagtgaaaaagaaacctttgtcattaataacctgaccgatagcgatttatatgatgtcaatacaggtgaggtcatacaagagttacttatgcctgacatgaataacggagtattccaaaacaaattaacaaaaggattgcgactttatcaatga

SEQ ID NO: 278841 - DNA, 603 bp, Morganella morganii
gtgaaaaaatataaattaattctcgcagacccaccctggcaatacagcaacaaatcctccaatggcgcagcagataaccactacaacaccaccgatttttattccctcacccgcttaccaatcgaaaaaatagcctttaacaactccgtactctgcatgtggtacacgggtaactttgcgcttgaggcgataaaactggctgaggcgtggaatttcaaagttaaaaacatgttctgttttgcatggataaaattaaataaaaatgcagaagacagaatagacaaaaatccgcctgaggattctttcgatttcatggagatattaaacagtgagacgaaaattaattgcggaaattacacccgccaaaatattgaaatgtgtttaattgctatccgtggcaaaggattgccacgccggtcagccagtgtccggcagatagtgtattcctgcctcggtgagcacagcgagaagccgaaagaagtacatcatcggctggaagagttatatggcgatgtcccgcgcattgaactgtttgccagggagaagtacggcgaatgggatgtgtacggggatcaggttaacagtgacatacaattgaggtaa

SEQ ID NO: 278842 - DNA, 1077 bp, Morganella morganii
atgccagacgtaatcaaaatcataattgccggtcggaatgttggtggttttggtggtacggaaactgtatttcggtcattctgcaggttactggctgaatctgagaaaaattatcaggtatcctttgttttttttaatgaggaagataatactgttaatgacgaatggcttggtgaaaataaattcattcgttttaattcatcaatcaaaaacagaaagataaaaaggatttctctggcatgccagttctcatcattaataaaaaaaacaaaaccagattacattatagcgtttgactcaattggttgttatatttcaagagtagctcttcgcctgtcattcagaaaagcgcatttattttcatggaatcatttttctgtcgctgattcatataaagcgaaatatcttcttatggcagataagcatctgtcaataagtagcggaatatcacagcagctgtcaaagatgggtgtatcttcaactgatatttacaccatatataacccgattgcaatccagcaaaaaaccataagttgtggtgataaaaaaaatttcctgtaccttggccgggtaatgagcggaggacagaaaaatatgaatgaattattccgagcactatccggagttagtaataactggactcttcacatcgttggttctggtgatgaatctgaaatagtaatattaaaaaatttagctcatgaactgaaaatcagtgaaaaaatcatctggcacggatggcaaaaaaatccgtgggattatgtggaaaatgaaataaaaaacgtttctgcgcttattttaacgtctgcctacgaagggtttccgatggtgctatgcgaagcaagcagctatggtatttatattgtcagctcagactgcccgacaggacctggtgatattattcagccatataaaaatggtgagttatattctatcggagacgataaaaaactggcctgtatactgcataaaattgcagccaacgaaacaacagtaaatcctgaaacaataaaaaaatcaatttccgcattctatgaaaatgaatatatcaatcgggtattggctatttttaaataa

SEQ ID NO: 278843 - DNA, 1062 bp, Morganella morganii
atggtttctgaaatagatgcggaattgcatctgctgaaccaatacataatcgaaggctatgatggagcagatataaaaaatctactttcaaagatcgcttcagctacagagttatttctcaagcgtgatgtgtttcctacgaaaagcaacagggataacttctactcattcattgaagagttaaaaacgcactctataagtcaagccaaagtggatttcattcacaatatcaggcttgcgtataatgatgccaaacacgatccaaatagtgttataagcgtactccaagttaagacgttacttgaaaatctgaagctggctgttgacgatattgtaacaggtgctattggccgagttggctcgtctgttcgggcagcaactacccgagtgttttggatttgcgcatgggatcattataccagcggtgaaactgaggttactgtcttcctgcctagtgaatatgacggctttctaggtgcccactctgtagatcatgtaagcattcatggattgaagtgggatgatttcaaagctgatctacccaattttggaactgtacttcctcataatggatttataccggaggggcaggtcgaattttggttctcagaaggtgattgtctaacaccattcgtgttcgaaggtgaatacagttctttaattatttgcctatcaaagtatctcaaagatgtaaatctaatctcaggtttagcgagagaagatgaccctgtaaaattactgcaaacagcagtaatggctgtaagcgatacttatgcaaacgaccctagcgcatcaaaagagattcaatgtgcgagcgcacttactctagcaaacagtcaatatgcagtactgccaaaattcaatgaccgcatagaatactacatcagtaaattggttgatttaattgatcaagctcctctacagataaaatccgctttaacagggccaatatggtccacgaaggactcctatgaatcaaatgaatcaatctatcgagatgattctattagaacgctcatcgattcaaaaaatagaattgtactgggcgtcagaaagctttaa

SEQ ID NO: 278844 - DNA, 885 bp, Morganella morganii
ttgtgctgtgcccgttcttctgtcggttgctggataaactggtttaccctgtacggaatcgagggcttacattcactatcagccggacgctcccgacgctggccgtttgaggccatctgtgcgctgttacgtgaactgataaaactgactcccggggattttggttatcagaggtcacgctggagtactgaacttctgactataaaaatcaatgaattaaccggatacagcatccatgccggaacattacgccgctggcttcctgcggccggaattgtctggcgcagagcagcgacgacactacgtatccgtgacccgcataaagaggaaaaaaccgctgcaataaatgaagctctcgggcaatgcagcgcagcacatccggtcttttatgaagatgaagttgatattcaccttaacccaaaaatcggcgcagactggcagttacgcggtcagcaaaaacgggtagtcactccgggacagaatgaaaaatattatctggcgggtgcgttacacagcggaacaggcaaagtcagctatgttggtggtaacagtaaaagttctgtgctatttattgacctgttgaaacacctgaaagcctgttaccgcagagcaaaaaccatcacgttaattgttgataattatattattcataagagccgtgaaacgctgcgctggcttaaattgaatccgaagttcagggtgatttaccagcctgtttattcaccgtggattaatcacgttgagcggttgtggcaggcgttgcacgatacaataacgcgcaatcatcaatgccggacaatgtggcagttactgaaaaaggtccggcattttatggcaaacgtcagcccgttccccggcggaggacatgggctggcaaaagtgtag

SEQ ID NO: 278845 - DNA, 1188 bp, Morganella morganii
atggaagacttctccttacctcccgatttaaatttacaggtcgtatctggttttgtatccattggtgggaacatgctaaaaaatcaagtggactgtatgcttgtcagtggagaagggaaaagatacggaagaactgacaattacatttatgacataggtcaagttttatgcatatttgaagtcaagaaaacgcttacgaaagcggcattatcagatgctgtagatcacctctctgtgattcgtaaatcttattccgagtactttgaagataaactagaaaaagataattatgttcctgatattgaaaaagcaagaactcatttcgctcagataactggaagggatggaccaaaacattactatgagataaatgaactttcagtcgaagatgcacttttattttatactcttgttcaagaatccctagctccagttagtattattcatggttataatggatctaaaacagaagaaggattgcggaccgcttttataaatattctcgaagataagttctctaatggtgataaatcttatggtgtaccatcgatacccacgcttatcacatccaacgagtattgcttagtcaaaacaagtggatttccttttgttgtttcgaatgttgattcagaatggattccattggtatcaacaagatttaattctgctgaggttattctagagacggtctggtccaagatatcacactattttcagcgtgctatgccatgggatgatggtatttatataaataatgttgcgccaatgttaatcgcaaaggtgggaaataattcagaaacgataggctggatatacaaaaccattgagccgacggaaaggacgttgttgagggaagataatatcacttgggaaccagaaaaaatttgggcagtacacatttctatgattaatttaatggctgtatatggagaactgtctctgtctgaggataatatatcttactttaaagataattattccgtagatttatatgaagagatgttgtttttatcaaaaacacgattattcatgatcagcagagatactttaaagcctataaataaaatgacaatagttttatcactcaaagatggttctggctatgtagcatcagaacgtgacagactagaaaaatggtgtgaggttaataacgtgtcgggaaccataatgaatattattaaattttga

SEQ ID NO: 278846 - DNA, 522 bp, Morganella morganii
gtggtattcgacagcaatggatttttgaaaaaatcctcaccagtcatcgttattcactctgacggtaactacgaaaccaacgatgaatccgaaggtgcagaagtccgccgtaccggcacaggccagtatcacatcaccggcatccttggttataactcagatggtgcctggggcgtaaacggtggtatctcggtaccgaaagacaataacggccttgagctggtttatgttgccgatcgcgtgctggaagatggcagtattatcatcgaaacctgtcaccgtcagcatacgcatttgccggaacgtttccagaactggcggctgaaagaggtcaccccggaaggtgagcgcgttttctatcaggacggcgagccctgtgacctgccggaatacacccgcctggatgtgcgcgtggaaatgccgcagggctcagtgtggaatgtgaaacagcgcgaattggctgaacagatggagcgtgaagtacgggaaacagaggaacaggccagagactcagaggaataa

SEQ ID NO: 278847 - DNA, 621 bp, Morganella morganii
atgggaccagcacagggaatacagggacatcaggcgattcagaccctgaataatgatatttacgattcagcgggcggtaacagttcatcatcgtatgtcagctcatccggaattaaatccgttttattaaatgcatggaatgccgttaaatccgctgtttccggtatgttgtcatcatttggtttgcatctcagcggacagcagggcagtgataaaccgggcagagaaattgtgatggatatgtcttcgcgccctctgccacagattccggcggatgatgacgatagtgattatgcgcaaatcagttttgatacagcgccacaggaagcatctgaattgaaagatgagtcaaccggggaatctgtctatgccactgtgaataaacattcatcactcagtgatgcagaaaaggcaaatattaatttgtgggaaggcatttcggatggcagcgaacccggagcaccaccggtgccggggtacacagacagaacaccactttatacacagacgccggagaacgatctgagaggagagagtgattacgccgatccgaaggaattgctgtttaatcaggaacagtttttacagcgcatgatgagcgaaagactgaaaacgcagtaa

SEQ ID NO: 278848 - DNA, 1245 bp, Morganella morganii
atgaacgtcgttccttatgtcatgatccatgataatcagaataataatgcttcgcctccccctgtaccgccaaggtcagtgcagcatcaggggcggacaatggcattacaggaaccatcaggccggcctccggctgtgccgccgcgtcctgaacataccggggatgttcagttgcgtcagaaaaatacaaacccgggttccgggttccgccatgcgatgtatgatgctccggcatcatccgcaaaatcgctgccatcgcctgccgggtcacaggagcggggccggatgccgttaccgggggaaggtattcatccgtcactggcacaacgcagagctgcacctcagttggcacctttcactccggatacaaaaacggaaatgtcattttccctgttacaggcaaaatctgaacaacaatttgtccggagtaactatatcgacaaaggtaatccgcaatactttggcgatttcaatgacagtaaagtagaacatcagcgttttggtgacattaatacctgcaaagcaactcagttgtttacagcaaaaggtattggtttacccgcaaatcaaatgaaagttgacggcgaaaaccttgcgatgcgcagtcagtatccggcggcagagaagcttggcagccatctgagcatgctcgcagagcaaaaaccggcagtgctggtgatcctttcatctgatgcggatctcgaagcaagaaatctccctgcatattttcgtgagactgaaggaaagcattataacgatgctaaatatgacaaggatccccatagtgcaaataagtatgatgatgtttttgttcaatgcaaaaagaatacactgttacctgtaaaaatggccggaaaccttagtgtacgaaactatcgtattgaaattacggtaaacggtaaaacaacaccgatatctgttatgcatgtcaataactgggaagatcggacaactgttgataccaaaacacttaaaacactggtagcggatattaatgcgaaagttgaccagaaaaccagagcagacagctcttatagtccgcagccatttattcattgcagtgcaggaatcggacgtaccggtgttgttgccgctgcaatggagttactgaaacccggcaataacaaaactccgctggatattgctttacaactgcggaaaacgggctgttcaaaaatggtacagacagaggctcagttcgatacactggtacacctgtatgacaatataaaatccggacactaa

SEQ ID NO: 278849 - DNA, 396 bp, Morganella morganii
atgccggatttattatcttttcaccgcacagccatgatgctgctgcgccatatcgggcttgacgtccctcagcccgccactgatcagcatacatttatgttaacaattgacagccggtattcattatctctgaccgtcattgatgagacagactggtatctgtcagcaaataccggggaattaccacacattacgcaaaataatgaattgctgcggaaagtcctgaagctgaatgcattaacacagctttccggacaaccggtgatttccctgaatgagaaaaatgagtgggtgatctggagtcgtctgtcactgaatggtacagaagatagccatattattgaattatttgaatatattttaaaatcagcggattacctgctggatcttcattaa

SEQ ID NO: 278850 - DNA, 8004 bp, Morganella morganii
gtggctgacggccaggcgaaaaacatcgccgtggcaacagtgactgaccagttcgataacctggtggaaaacttcccgttaacagccagagcagataacggtgcgacagtcactgatccgaaccagcagactgacagcaacggcctggtcactatccgcttcagcagtgaaacggccggggattccaaactggtggttgaaggaacaggcacctcgaagagtgtgactgcacagtttatcgcggatatcagtaccgcgaagatccagagtgcggtcgtgactcaggatggggcgaaagcagacggtaaagcgaaaaacgaggttctggtgactgtcacggacagccgcaataacccgttagccggtgcaccggtcaccatcaaagtgccgggaaccgcccgttatcagacccagccggtcagtggtctgacagacagccgcggtcagttgcgtgtcagtatcagcaataccaaagccggttctgataactataccttcagcattaacggcgatgatgcggtacgtgcactgaaatttgtggcggatgaaaccacggcaaccattacggacgccagcctggttatcgtcaccaataatcagaaagcagatggtgcggcagcaaacagtgtaagagcgactattgttgatgcttacaataacccggttccggggatcgcggtgcagtttgtcaccgatcacggcgcacttccgtctcagatgcagatcaatacggatgctgacggtaatgcactgtttgaactgacaaatacccgtgccggtaataccaaagtcaccgcacaggttaataccaaatccgcatcaaaaactgtgatgtttacagcggacagctcgacagcggaaattctggcatcgaacctgacgataaccgcagataacagcgcggcggatggctcatccgttaacagtgtgaaagcgattgtcaccgatgcacagggtaacgttgtgccgtatgtggccgttcttttcactgcggataatggtgcgtctccggcttcacaatcactgctgactaatgagcagggtgaggtaaccttcagcctgaccagtacccgtgcggtacaggttgcggttaaagcgaagattaacaccagtgaaccttctgtcactgtcacctttaaggcagacagtgcgaaccctgatgctcagaaatcctcgctgacagctgatccgatgacgatcgtggcagacgggcagacaacatcaacgctgcatttcatcttaaaagatcgtcaggggaacctgatcccgggccagactgtggtcttcggaactgcgctggcgggaacaacggtgagcggtactaccgaaaatccggatggtacttacaccgcgacactgaaaggtgttaaagccggggatgcgaaggtcagcatcacgctgaacggaaaagcgtttgcggttacaccggtcacagtaaaactgacggcggataacggtaacctgagcggcgataaatcaaaactgactgctgttcctgacaccattgtggctgatggcaagacgtcttcaacgctgactctgagcctgaaagacgtgaacgataatgccgtgagcggacaggaggtcgtattcagcaccacgctggcagataccgtattcggtacggtaagagataatgcagacggtacttatactgccacgctgaaaggcactaaagccgggactgcaaaaatcaaagtcaccgtgaataatgctgtgctggccgtcactgaggtgagtgtaaaactgaccgcagacagcagcaaactggataaagataaatcgtccctgaccgctgtaccggacaccatcgtggcggacggtaacacgacatccgcaatcaccctgacgctgcgggatgtgaataacaacccggttgcggggcagactgcattgttcagtacaacgctgaaagacaccaccttcagtggcgtaacggataatcaggacggtacctatactgcgactctgaaaggaaccaaatccggtaatgcacaaatcagcgttacgctgaacggtaaggcttttgccgtcgcaccggtgacagtcagactgacagcggacagcagcaatctggataaggacaaatcttcactgaccgcagcgccgctgagtattgtggcaaacgacactgcgacctcatcactgacgctgaccctgaaagacgggaacgataacccggttccggggcagacggtgctgttcagtaccacactgggcggtactactttcagtggcgtgacggataaccgggatggtacttatactgcaaccctgaaagggaaaaccgccggtgatgcggcactgaaagtgaccgtgaacggcgctgtgctggcggttgcaccggtaacagtgaaactgacagcggacagcggcaacctggataaggataaatctgtcctggaagcatctccgctgaccatcgtggcaaacaacaccacgacttcagcgctgaaactgacactgaaagatgccaacggcaacctggtgtccggacagacagtattgttcagcaccacgcttggcggcactaccttcagtggcgtaacggataatcaggatggtacctatactgcgaccctgaaagggaaaacggccggggctgcggagatcaaagtgaccgttggcggtaatgcgctgaatgtggcaccggtcaccgtcaccctgacaccggacagcaccaatctggataaagacaaatcctcgctgactgcagcaccgctgagtattgtggcggatgatgcctcagtatcggatctgaaactgatcctgaaagatgccaacggtaacctggttccgggacagaccgtgctgttcagcaccacgctcggcggcaccaccttcagtggcgtgacggataatcaggacggtacttataccgcaacgctgaaaggcagaactgccggtgatgcattactgaaagtcaccgtgaacggcacggagctggcggttgcaccggtaacagtgaaactgacagcggacagcggtaacctggataaggataaatctgtcctggaagcatctccgctgaccatcgtggcaaacaacaccacgacttcagcgctgaaactgacgctgaaagatgtcaacggtaacctggtgtccggacagacagtactgttcagtaccacgcttggcggtaccaccttcagtggcgtaacggacaatcaggacggtacctataccgcgaccctgaaagggaaaactgccggtgatgcagagattaaagtcactgtcggcggtaatccgctggatgtggcaccggtaacggttactctgacaccggacagcaccaatctggataaagacaaatcctcgctgacggcagtaccgctgagtattgtggcggataatgcctccgcatcggatctgaaactgatcctgaaagatgccaacggtaacctggttccgggacagaccgtgctgttcagcaccacgctcggcggcaccaccttcagtggcgtgacggataatcatgacggtacctataccgcgaccctgaaagggaaaacggccggtgatgcattactgaaagtcaccgtcaatggtgcggtgctggaagtggcaccggtgactgtcaccctgacagcggataacggcaacctggataaagataaatctgtcctggaagcggcgccgctgagtattgtggcgaatggtacggcggaatccactctgaagctgacgctgaaagacgtcaacggtaacctcgtttccggacagactgtgcagttcaccaccacactggcagataccaccttcagtggcgtgacggataatcaggacggcacctatagcgcgaccctgaaaggcactaaatccggtgctgcaccgctgacggttattgttaacggtaccggactggcagtggcaccggtaacggttactctgacaccggacagcgctaatccggataaagataagtcagtactgactgcgtctccactgaccatcgtggcggacaatgccacaacgtcttcactgaaactgaccctgaaagatacttacggtaacctgattccgggacagactgtgctgttcagcactgatctggaaaatacgaccttcagtggcgtgacggataatcatgacggtacctataccgcaacactgaaagggaccaaatccggtacagcggcactgaaagtgactgtaaacggtacggaactggcagtggcaccggtgagcgtgaaactgatcggggataaggatcatcttgatgaggataaatcttcactgacagcggcaccgctgagcatcgtggcaaacaacaccgcgacctcgtcactgacgctgacactgaaagatgtgaataacaacccggtgatcggtcagactgtgctgttcagcactgacctggcagacaccaccttcactacggtgaaagataatcaggacggcacttataccgcaacactgaaagggaccaaagccggtgacgcattactgaaagtcactgtcaatggtgcagtactggaagtggcgccggtcactgtcaccctgacggcggacagcagtaatctggacaaggacaaatcctcactgacagcggcaccgctgactatcgtggcaaacaataccacgacctctgaggtgaaactgaccctgaaggatgccaacggtaacctggtttccggtcagaccgtactgttcagtaccacactggctaacaccacattcggtacagtgaacgacaatcaggacggtacctataccgcgaccctgaaagggaaaactgccggtgatgcagtgattaaagtcactgtgggcggtaatgcactggaagttgcgccggttacggtgaaactgacagcggacagctcaaacctggataaagataaatctgtcctggaagcagcgccgctgagtattgtggcggataacgcaacggaatccacggtgaaactgacactgaaagatgtcaacggtaacctggtctccggtcagaccgtgctgttcagtaccacactggccaacacgactttcggtacagtgaaagataatcaggacggcacctataccgcgaccctgaaaggtaaaactgccggggctgcggagattaaagtgacagtgggcggtaatgcgctggaagtgacaccagtcactgtcaccctgacaccggacagcagcaaactggataaggataaatcctcgctgaccgcagtaccgctgactatcgtggcggatggtgcaacagagtccgcgctgacactgacactgaaagacgtcaacggtaaccaggttccgggacagaccgtgctgttcagtaccggcctggctgatactaccttcagtggcgtgacggataatcaggacggtacttataccgcgaccctgaaaggaaccaaatccgggaatgcgttactgaaagtgacggtgaacagtgctgaactggctgttgcaccagtgacagtgaaactgatcggcgaccaggataacctggacaaagataagtcagcactgacggctgatccgctgactatcgtggcaaacaataccacgacgtctctggtgaaactgaccctgaaggatatcaacgataaccctgtgaccgggcagacggtgctgttcagcaccacactggccaacaccacgttcggtacggtaaccgataatcaggacggcacctatacggcaaccctgcagggtaaaacagccggggccgctgttatcaaagtgactgtcggtggtaatgcgctggaggtggcaccggtaacggttaccctgacagcggacagcagcaaactggataaggataaatcctcgctgaccgcagtaccgctgactatcgtggcggatggtgctacagagtccgtgctgacactgacactgaaagatgtcaatgacaacccggttacaggacagaccgtgctgttcagtaccggtctggctgatacaactttcagtacggtgacggataacctggacggtacctatacagggactctgaaaggcactaaatccggtgatgcgttactgaaagtgactgtcaacgggactgtgctggaagtggcaccggttacggtgaaactgacggcagacagcagtaatctggacaaggataaatcggcactgacagcagatccgctgactattgtggcaaacaacaccgcaacgtccgcgctgaaactgaccctgaaagatgccaacggtaacctggtttccggacagaccgtgctgttcagtactgagctggccaacaccacgtttggtacggtgacggataatcatgacggtacttatacggcaaccctgaaagggaccaaagccggcgatgcgttactgaaagtgaccgtcaacgggactgtgctggaggtggctccggtcacggtgaaactgacagcggacagcagtaatctggacaaggataaatcctcactgacagcaacaccgctgactatcgtggcaaacaataccacgacctctgaggtgaagctgaccctgaaggatgcctatgacaaccctgtttccggacagaccgtgctgttcagcaccacgctggccaacaccacgttcggtacggtgacggataatcatgacggtacctataccgcaaccctgaaaggtaaaactgccggtgatgcagagattaaagtcactgtgggcggtaatgcactggaagtggcaccggttacggtgaaactgacggcagacagcagtaatctggataaggataaatccgtgctgacagcaacaccgctgactatcgtggcaaataacacggcgacttcagcactgaagctgaccctgaaagatgccaacgataacccggttgccggacagaccgtgctgttcagtaccacgctcggtggtaccaccttcagtggcgtgacggataaccaggacggtacttataccgcgaccctgaaagggaaaaccgccggtgatgctccgctgacagtaaccgttaacggaactgaactgccggttgcgggtgtgaccgtcacgctgacaggtgatgccgcaacagcgactatcacgaatgtgaaactcaacggtgcgctggcacggaagattgccaacggtacggattcttttgaatttattgccgaagtccgtgacgcgaacggtaacccggtcagtggtgtgacgactaactggaccagtactgccggtagtgcagctgtattatctgcgacttcacagcagacagatgcagcgggtaacgcgactgtcaaactgactagtaccaaaacaccggtctatgacattgtggtcagtgccgcacagggaagtcaggctgcggttaatgctgataagaaagtctcctttgaagagctgttctcaacgtcagtgctggttattgacgcgattgcagccggagataagccggttaacggcgcacacgttaagatcttctcggaagacggatcagaactgctgtatgagacaacaacggatgcaaccggtaagtttaaggttgatctggttggcgggaagtacgcagttaagatcacggcgaataattacgacgactacgatgactttatggacgtgaagagcggcgcggataccaactttaagtttgcgttatctccggcgctgggcacagagttcggtcgtattattctgcagtggagtgaaaacccgagagatctggactcttacctgcttgttccgccagcatcaggcagcggcagcagaattaaggttaactatcagaacaaaacaccgtcaggtgcagatgcctcccttgataaggatcagacaacagctccgggtattgaaacgatcacgatgacgaagtcacataagggaacttatacctattatgtacagaacttcgccggtccgaatgctaaattgtcaactgcgaaggtgcaaatcttcctgaataaggatttgacactgaaaccgggaacatccagaacaatgagtttcagtgcaccggacttagtcgtcgatgccaaagcgcaatggattgtgtttgatatcattgttgacagtaataatgaggtgcaggtggttaccagaggaacagtagatgcaaatcaacctaattaa

SEQ ID NO: 278851 - DNA, 1359 bp, Morganella morganii
atgctgaatacaccgcaactcagtctggctgaaatcaataataccgtgccggttgccggggcaaaatccggttttctgcgcaagctgtttgccttttccggcccgggtgcactggtggcggtgggatatatggatcccggaaactggatcacctcgattcagggcggtgcgctgtacagttatctgctgctgtcggtgattttgctgtccagcctgattgcgatgctgttacaggcaatgtgcgcaaaactcgggatcgtcaccggtcaggatctggcgcaggccacccgggcgcgggtcgggccgaagctggcggcgctgttgtggatcaccactgaactggcgattatggcgaccgagattgcggaggtgatcggcagtgcggtggcactgaacctgctgttcggcattccgctgatggccggtgtgctgctgacagtactggatgtatttctgctgctggtgctgatgaaactcggtttccgcaaaattgaagcctttgtgtttgtcctgatcttaacgattttcctgatttttgcctacgaggtgatgctgtcggacccggacatgagtgcagtattgcgcggctttattccgtcggagaaaatcttcaccgccacactggccgggcaggattctgccctgctgatcgggctggggattgtcggggcaacggtgatgccgcataacctctatcttcactcttctattgtgcagagccgtcagtatgaccgccgcagtgaggccgggctgcgcgaggcgatccgctttgcaacaattgattccaatatccagctcgggttttcatttattatcaactgtctgctgctggtgctcggtgcagcgctgtttttcggtaacgatccgtctgacctcggacgtttcacccagctgtatgacgcgctgcagaatccgggtatcgtcggcggtatcgccagtgccacgctctccacactgttcgcggtggcgctgctcgcctccgggcagaacgccacaatcaccggtacactgaccgggcagattgtgatggaaggctttattcatctgcggctgccgatgtggctgcgccgggtgatcacccgtggtctggccgtgatcccggtgattatctgtatttacctgtggggggatcgcgaggatgtggtggaaagtctgctgatttatacccaggtgtttctgagtatcgccctgccgttctccatgatcccgctgctgctgctgacctcgagcaaaaaaatcatgggggtgtttgtgaactcgcagctgacgatcatactcgggactgtttccactgtagcactggtgctcctcaatttacagttgatccgggaagtagccgggatgctgttccgtgcctga

SEQ ID NO: 278852 - DNA, 543 bp, Morganella morganii
atggataaccaagttggattttatataaatgtcgccgcctgcatcgggtgcaaaacctgtgttgtggcgtgcaaggataagaacgatctcgaagtcgggcgtaatttccgccgtgtgtatgatatcgaggccggggaatatccgcgcccgcgccgctggcatctctccattgcctgtaaccattgtgacgatccgcagtgcgtcagtcattgcccgacaaccgcgatgcataagcgggaagaagacggagtggtgctggtggatcatgataagtgtgtgggctgccgttactgtacctgggcctgtccgtatgaagcaccgcagtttgatccggcgatcggtatgatgaccaagtgtgatacctgcctggatctgcgggagaagggcggcaatccgatgtgtgtggattcttgtccgatgcgcgccattgagttcggccttatcagcgaactgcgcaaaaaatacggcaccaatgccgatatcggcggtctgccgagctcatccattacccggccgaacctggttgtcggcaccaaaggataa

SEQ ID NO: 278853 - DNA, 888 bp, Morganella morganii
atgacaaaacagtcagttaccagactgaagccaggtaaaatactcgacacactgggggcaatgaaaaatagcctgacgcgagtatcacagcgtattgctgaatatatcctgtttcatcctgttgaagtcactcagctttccatcgcacaactttcccgagcgactaaagctggcgaagcaactgtagtacgtttttgccgcactctgggctataagggctttcaggactttaaaatggatttagccattgaaatggcgacatcggatagtgaagaatcaccaatccttgatgctgaagttaaccatcaggatgatatccatactataggtttaaaattacaagcaaccatcaataatgtgttatcagaaacattaaatttacttgatatgacgcaagttaaaggcgctgtaaatgcgttgttatcatcgaattatatttttatctgcggcgtgggttcctcggggatcacagcagaggatctaaaaaataaactgatgcgtattggatatcgggtggatgctgttaccaataaccattttatgtatatgcaggcttccttattgaaaccgggtgatatcgcgatcggtatcagccattccggaaattcaccggaaacagttcatgcactgaaacttgcaaaagaagcaggggctaccacaattgtgctaacgcataatttaggttcacacattatggaatatgccaattattatctgattaatggtaatcgccaggggaaattacaaggtgattctattggtacaaaaacagcacaactgtttgttttagatttactgtataccctacttgtccaggctcagcctgaaatggtcaaagagcaaaaactgcgtacactaaatgcattgaaaagtaccaattcagcatga

SEQ ID NO: 278854 - DNA, 666 bp, Morganella morganii
atgcacatatcatcagaaactttatcggctaaatttcatgcgtttgaatcatctgtaaaatcagcagttaaaaacctgtttgcttcattacattctgtttctgatattaaaatgagcaatcataaaccggctgatttcagcgcaataaccttcagattagatgatgatatcggcgcaagaagcggaaaaactatcctgcaaggctattcaaataatttcagaggaaaaggagaagatgccatcatacttcatggcagtacagacggacggctgactgtcggtacaaaagccagtaaagtcattgaaaatggtcgcgaaataacaaaactggacacgtcacaaacacgtcatctcagagctgatgagttagtcgcatatattaaaaaagaatctgataaccaaattgatcttactaacaataccggtccgatacatctgctcagttgttatggtaagcgttttgctgcacaggagctggcgaacgccacaggtcgtgatgttattgcttattcccatcagcaaattcggtgtggtggcctgcaacaaatagagcgcattaatttttcagttgaaagtgcctacaaaaataaatatgacccgagaaaagtcatttatggctcagaagcttacccttcagttgctagaacttttcatcctgtgaaataa

SEQ ID NO: 278855 - DNA, 1539 bp, Morganella morganii
atgacagcgatagcgtctggtgccgggaaactgactttattgggtttttctgcgattactgcctctatggtcatggcggtatatgaatacccgacatttgcaacatccggttttagtttggtttttttccttttattaggtggtttattgtggtttattcctgttgctctttgtgcggcagaaatggcaacagtggaaggctgggaagagggcggcatatttgcctgggtttctaacactctgggtgagcgctggggatttgctgctatttcatttggttatctgcaaattgcaatcggctttatacctatgctctattttgtattaggggcattatcttatatccttaactggcccgaactgaataacgacccgatagttaaaactatcggtgctttggttatattatggatattggcatttactcagtttggcggtacaaaatatacagcaactatcgcaaaaataggtttttttgccggtattttattacctgcgcttattttggtattccttgctatacattatctcgtcagcggtgcgcctttagcgactgaaatcagcgcatcgacttttttccctgattttacaaaaataggcacattggtcgtttttgttgcttttatattgagttacatgggggttgaagcctcagcaacacacgttaatgaaatggaaaacccgggaagagattatccggctgcaatgtttttactgatgatagcggctatttgtttaagctcaattggcggattatcggtcgcggtatccattcctgtcagtgaaatcaacctgtccgcaggtgtggtgcagacattcaatgtgctggtatcaaattttaatcctgcgcttgagtggactgtccgtattattgcggcactcttattattaggtgtactggcagaaatagcatcatggattgtggggccatcccgcgggatgtatgttgctgcccaaaatggtattttaccgaaaagctttgctaaggtgaataaaaatggtgtgccggttacattggtgatttcacaattactgattacaactattgccatcatagtgctgaccaacagcggcggaggcggtaatacctccttcctaatcgcattagcgctgaccgttgttatttatctgtgcagttattttatgttgtttctcgggtatatgtgtttaatttgcaaacaccctgagaaaaaacgggtatttaatatacccggcggtaaaggttttaaacttgttgtggcatctgcgggttttatattatcggttcttgcctttgttgtttctttctttccaccaagttcattaccgggcggtgcaggcagtgaatcctatgtgatattacttggtatcagctttgtggttatttttctgctgccatttattatctatgcatttcataataagcaaggtaaaaaaaccggaatattaatgatacatattaaaacgcataatgcgccgtcaggtcatttctttatccatccacgggcacgatctgcatatcatttggttcatgatgataaaaaagatcaaaatgagtaa

SEQ ID NO: 278856 - DNA, 630 bp, Morganella morganii
atgcctcatcacactattatggttattgatgaccatccgttgttacgctatggttttaaaatgcttttacaaccggattatacgttaaccatcatgccggaatttactgacaacaatggtctgttcagccatatccatcagcatacccccagaatgattatattggatatcaatgtccgtgctttttccggtattgattttattaaaaaattacgccacaaaaaaatatccagttatatcctggtgttttcacaatcacgggaacggaatgatatatacgctgctattgatgccggagctgatggttatttattaaaaaattgcgatgttgattatttattaagtcagattgaaaatgcgtttaaaggaaaaaagattttcagtgaggcgatttataaaattttgcaggaacgtgaacactatcacgatccggtcagttacctgacacaacgggaagccgatgttctcaaagaactggcctgcgggatgaaaaataaggaaattgcacgggcgctgtttatttcggaagagacagtgaaagttcatatccgcaatatactgaaaaagctgaatgtctccacacggctcgccgccagcctgctctatctgaaataccggctgccccgctga

SEQ ID NO: 278857 - DNA, 363 bp, Morganella morganii
atgttaaagatatcattttcaacgagcataaatgcatcgccgtcccgtatatgggagcattacattaactttgagcttagaaaaaagtgggaagtggatttagagcaattatcttttgacggtgagataaaaagcggaaattacggcaatatggttttaaccggacttccgcctgtaaggtttttcttatcaaatatcattgtaaatgaaaattttacagatgtggttgaaataccaaatatagggactttggtattcagtcataaaataaaaatgataaaagaacaatccatcgttagtgtcagcgtgtcattggaatgtaatgaatataattcagacaaagaaaaagttttttgggtgtga

SEQ ID NO: 278858 - DNA, 507 bp, Morganella morganii
atgaaccaaaatactgaacaggggttgaatgccagaataggttttaatggcgatttttatcatgttgataccatgtccgggcatggtattttaattgtggataacctgtttgagtcttgtctgttatcaaaagataccacagcggaaatgctcggtttgtgtttaaagaaatgcctgaaacaaagccggatagtagatccgggaaattatgatttctttgactataaaaaagtaaaagaaagatatgaagaatggattaaaaacatcattcaattgcgcggatataaaaataaaaaaacactttttaaacaaatgaatacatgtaatgcaaggcaggttggtgaccttattacaataaaaccttcaaaccatattaaacttgaagcttgggacggtgatggtatatcagaaactgattatgtcattattccggtatcggcttcagatgaagagttgggtaatgccgttatcgaggcgttttcccgatgtaagggaaggcaattctga

SEQ ID NO: 278859 - DNA, 702 bp, Morganella morganii
gtgaacaagaagctaaaagtattaatttgtatagttgtattcacaagtagcctctttgttttttttgccagcacatcattgtatcagacgatccatgataacaaactttatgaaagagatttttgtctaagtagtcagtgtctggataattttgcaaaagaggtttcaggaattgcgctgtattttcaagcatttggttatctaataacgacttttgttactgtttttggtgtgattattgccttgatgacttattattctggtgttaagaataataacaatagtaattacactgctcacctcactatgtttcgcgaattctcaagtgctgaacttgccaaaagaacgagtatctatcctgaaggtgtaaacctatttcggtggtatagggtgatgtttccaaaggcaaaggatggggacatttccgtatcaaataattacttgtctataattaatggcattcaggatgttattaatgaagcgaatgcacacataactgatgaaaataaaggctacaaatataaagcccatcaaagaaaaatgataacagcacttagtgaaatgggcatacgcattagcaatgctcccaagaatactttcattgatattgagaggcaagtttttgaatatattgatacagtgaatctatcatttagtcatcaggttgttgagctgagcaaaattgaaagaaaatacatttaa

SEQ ID NO: 278860 - DNA, 1221 bp, Morganella morganii
atgggtagaccgtacgtaactttgtttggtgaaattatggacaaattcaaaccatacagtaaatcaaaagcccctattacaacacttcagaaactagctcaaactttatccatctcaattgatgagttgaatgaaattgcagaactatcggaagatgaaaaatacgtaagaaaagaacttccaaaagcagatggaagtaatagagtagtctattcccttcatccaaagatgagattgttacaatctagagttaacaagagaattttcaaagaattagtgattttccctccgtttctctttggttcagtacctagtaaaaatgatagtgcaaattccaacatcaaacgcgattatgtatcctgtgcaaaggctcattgtggagcgaaaacagttttaaaagtggatataagtaatttctttgataatattcataaggatttagttcgtgatgtatttgaaaatgttttgaatattcgagacgaagctttggaatatgtcacaaatttatgttgtaagggtgacttcgtggttcagggagcattgacttcaagttacatagcaactctatgtctttacgaacaagaagggagcgtgtatcaaagagctataagaaagaatcttgtatacacccgtttagttgatgatattactgtatcatcaaaaattaacggttatgattttacgcaaatattaagtcatattgaaaatatgcttgccacccatgatttacctgttaataaacgtaaaactaaaatattacactgttcatcagagccgataaaaatacatgggttaagagtagattataattcgccacgactacctagcgatgaagtaaaacgtattagatcgtctctacataatctaaaaaaacttgctgtaaaaaataacaccaaaacaagcatggcatacagaaaagaatttaacagatgcatggggcgtataaataagctagggcgtgttggtcacaataagtataagttatttaaagagcagttattggaaataaaaccaatgccatcaccaagagatattaaaattgttgagtctgctgtagttagcctcgaaaattcatgttcaaaaggcaatgaaaacaaacattggtataagagaaaatataaccttacattatataagttgattatactgactcgttcgaaagcatttgacgggatagtcaattcattcaaggaacgattaaaaaaggtaaggccggcgtga

SEQ ID NO: 278861 - DNA, 549 bp, Morganella morganii
gtgcaaaatcctggagaagaaattgtaggtgagtatcttaaatactttctgggctgcgacttcgttgagtacaacctatatactccggacgttcagggtgaaattgacgttgttggtataaatcctgaaaacaaagttgtttatatctgcgaggtcgctacccatttagtaacgggtcttcagtatgtcaaagattgccagtctgacaacgtgaatcgctttaccaaaaagttccgaaaaaacattcaatatgcaaacaagtatttcgagggctatgaaaagcattttatgctttggtcacccatagtcaaaaaccaaggtatgggtgcaaagaataaccaaatgagagatattgaagaaattcagcagaatttacgtacagaatttggtgttgaacttgaaccaatcataaaccgagcgtatttcaactgcttatcacagcttagagagtatgccgccaaagaaacaaaggagttaaaatcgcctattcttcggcttatgcagattgaggagaaattggctaaacatgtatctaggctaaacgtgtaa

SEQ ID NO: 278862 - DNA, 1734 bp, Morganella morganii
atgactacccgcttagaaaaattaaaagcatgtaattccaaaccagatttcgcacggcttttaggaattgacccagtttttatgacccgtgtcatatatataagaaatactgataatctatattcacaattcactattaaaaaaaagaatggtactgacagaatcatatcagccccagactctgagcttaaagaaatacaaagcaagctttctgatttattacaagactgtttaaataatctccgagaaaatttaaaagaagataattatttctctcatggatttgagcgcaaccgtagtattattacaaatgctgaaaagcataaatcaaagaaatgggttcttaatatagatctttgtaatttctttgatgaatttaattttggacgagttagggggtattttttaaaaaataataacttttctctcagtgcagagatttccacattaatagccaaaatcgcatgtcaccaagataagttacctcaaggtagcccctgctctcccgtaataaccaacttaattctagtttctttagacaggcggctaagtaatctatgtaatagtgttggttgtacatacacacgatatgctgacgatataacaatctcaactaataaaaaagaatttcctaagaaaatcgtcaaaagccaagatgagagattcatcaccttaaataataaatttcttaaggaaataatatcatcaggctttaaaattaatcagaacaaattaagacttctcgacaaaaaaatccgccaagaagttacaggattaactgtcaataggtttgtaaatgtagatagaaaatatgcaaaaatggctcgtgcaatggcacatagcctatttaaaaaaggggagtacacattaatagataaaaaaacaagaaatataagaactggcactatcaatgagttaaatggcatgctgagctttattgattttgtagacaaatacaacaacagattaccgcacgcgatcaaaccctcacataacaagcgtgaaaaagtatattcggattttctttactattctactttttgggcaaatccaaaaccaacaatcttgactgagggtaagacggacattacgtacttgagggttgctttggatgcgttatcagaaaaccaccccaatctaattgggaataaaaaaatgggtaataaagcagtacgagattatgggattaaattcttcaaaaacacgtctaaaacaaaatatcttttaaacttagacggaggaactcaacatctaaaagaattcattgttgcctttgaaaaaaagacaggtgcgtttaaggaaatcgtcaatcaaaaacctgtaattgttattttagataatgactctggaagcggtggtgctaagggaatcttcgacactttaattggaaaagcgttccctaatattacccttacaaaagatgaactaagaaatcagaaatggacgtgggttacaaaaaacttatatataatattcacccctcttaatggtttaaaagatagttctatggaagaccttttccacagttctgtattacaaaaaacgcttggtggtaaagtatttaaccgaactaataacaaatgcaaggataatgaatacggcaaagaattttttgctacaggtgttgtgttaaaacagcgtaaaacaatcgatttttcaaaattcaattacatttttgaatcgatttcagaaataattgatcataataattccagaaaaattaatcaaagttaa

SEQ ID NO: 278863 - DNA, 537 bp, Morganella morganii
gtggtattcgacagcaatggatttttgaaaaaatcctcaccagtcatcgttattcactctgacggtaactacgaaactaacgacgaatccgaaggcgctgaagtccgtcgtaccggtaccggccaatatcacattaccggcattcttggttataactcagatggtgcatggggtgtaaacggtggaatttccgtaccgaaagacaataacggcctcgagctggtttatgtcgatgaccgcgtacagaaagacggcagtattatcatcgaaacctgtcaccgtcagcatgcgcatttgccggaacgtttccagaactggcggctgaaagaggtcaccccggaaggtgagcgcattttctatcaggacggcgaaccgtgtgatctgccggaatccacccgcctcgatgtgcgtgtggaaatgccgcagggctctgtgtggaatgtgaagcaacgtgaactggctgaacagatggagcgtgaacatgcagagcgagaggagcaggaagcagcagatcaggccggagattcaggggaataa

SEQ ID NO: 278864 - DNA, 1938 bp, Morganella morganii
atgcacttaaaatcactttatattagtcaatacaaaaacctgcaagatttctcattaagcttcgatggcaacagttttattgatgtgtttgttggtaaaaatggaacaggcaagtcaaatatgtttgaagccttgattgagatatttcgtcatattatggaatacgacagaactaaggcggatattggatttagctatcgacttgtgtatgagattgacagctcggaaacctctatagaatggagctggggtgaaattgataatgtggcactccgtgaacgcccgaaagaacgcaatttagtcattaatggtcgtgagcgtaaaaccattggtaaaaccacagtccctgacaatgtgctgatttattactctgggcataataaaacagttgctagtttggtgtctcaatatgaagagagctttagtcagcgaataaaacgtgctgattttgatgaaagccgctttttcatcggtattgggccggaatacaaagaattgctgctggctgtattgttaatgcagcaagatacctgtaaagcacgccaatttatttgccagaagttgggtattgccaatgtcgcgacagaagtgcgcttagttttagagcggcctgaatatgcaacagatgctcgttttgatattgagctgaacgatgaaacagaccgctactggaagccagaaggcattaccaaaaccttccttgataaattagagcgctgcatcaataccgcgtcaggaagcctggtgaggtctgaggggtattttacttctgacgatcgctacgtgctttactttggtatcgataagatccagcaagaattctcggatttaagtccacaggaattatttcgtcagctagataacctgaagactttaggaatgctcgcggaaattaccattcctttacagctcgaaaatggctttgatgcttctgtttcccacttcagtgacggccagtttcagtcggtttatatctattccattactgaactgtttaaggatcgaaattgtataacactgctggatgaaccggattcttttctgcatccagagtggcaatttgatttccttaagcagattttcgaaattaccgaagatgcggcaaaaagcaatcatgtattaatgagcagtcatagcgcatcaaccatcacatcaacgagcgaagctatgataaatatcttcgagctctatgaagggcagatcacggtcactaaaagaaaacgatcggaaattatcaaaacgctttctgcgggaatgataactgtcactgaaaatgaagcaagattaaacatatctcacgtcctgaatagcactagaggggcggtgctgttcactgaaggtattactgatgaattaattattgcgaatgcttggtctaagttgtttccgaaagagcatcgtccatttgaggttcaaaatgctttcgatcgtacatttctccgcaatttgttttctcgtgatgagttgaagaacaatcatccaagccgaaaaatgtttgctttgtttgattttgacgaggcattcgacgattggaatggactaaagaaagaaaaagatgagtgcactgacccatttcggggattatctaagcagcttaagtacgttcatcattatgccatattgttacccattccaaatagtgatttccttaaacctcaggtactgaaacctgataatactccttggggtcgaggtagcgattcgcacatctctattgagcatcttttttacgagtcagtgaccgtggcagattggtttaaaacggaaccgacttcctgtggcgggcagagagtattatttacaggtgataaggtaaaatttgcaaaagaattggttccaacgttagacgttgaagccttcgaagtattccgtcctatgtttgagtttattaaatcaaagtgccctgtaccggcagaagcagtgacagccttggcgtga

SEQ ID NO: 278865 - DNA, 1698 bp, Morganella morganii
atgacccagcccgtgcatgatttacttgaacagcactttgaagtcgcctttgctacacccgatagcattaccaagttgcgcgaactgattttgacattagctatgcagggcaagttggttgagcagaaccccagcgactcgcctgttgaagagttgttaaaagaaatcgaagctgaaaaaaatcatcttctaaaggttggaaaaatcaagaagccaaaaattctctctgtaattgatcaggaaaatacaccctatgctctaccaaaaagctggatatggacccgccttggtaacattggaaatatcttcaatggcaacagcattaatgcgactgagaaagaattgaagtacacaggagttgatggtcttccttatatcgctactaaggatgttggctatggctatgatgcacttggctataaaaatggagtctatatccctgagtctgagaagaagtttaaaatagcccgccgaggtacagttctgatatgtgctgaaggtggtagcgcgggcagaaagtgtggaatcgctgagcaggatgtttgctttggtaacaagttattcgccaatcagcccttgggtgggattccgtcaaaatttattctctatttgtacctgtctcccatttttaaaaggtgcttcttcgaggctatgaccggtattattggtggggtatctgtcgccaaatttttggagctgcctgttcccatacctccgttaaaggagcagtaccgtattgtatcccgccttgatgagctcatggcccattgcaatgaattagagaaactgtgtaaagtgcgagagaaacagcgcattgttgtacacaaggctgctatcaatcaactgtttgagaacgctggaaatattggtctttcatttgtacaggaacacttcgatgagctctactctgataggataaatgtcacagaattgcgtaaagtcattctgaaactagctattacagggcgtctttctggcaaccttgatggagactcgtctgctgagaagttgttagagaaaatccataaggagcgagttgaattaaatttaaaagtgtcgcatgacaacagggaccaagcaaaaacaatagggtttgaaatacccaagcattggcattggagaaccctagggcaaatacttacttttggtccaaagaatgggtattcacctaaggccgttgattacaaaaccagcgttcgctctttaacgctaagtgcaacaacttctggtgtttttattggggagcactctaaatttattgatgaggatattcctggtgattcgcatctctggttaagtgatggagatatccttgttcagcgtggaaatactatcgagtatgtaggggtgcctgcaatatatagaggggagcctagggcttttatttatccagacttgatgatgaagcttcgagtttctgctcatattaacaccgaatatgtctattacgttatgagttctgagccatccagaagctttttgcgttcgcatgcatctggaacatctggaactatgcccaagattaaccaaaaggcgttgacagctctccctataccgctacctcctattgaggagcaactgagaatagttagtaatattaagaggcttttcgacctttgtaccgcagttgaggagaaaatagaggccttaaattctaagcagtctgaactattgaattctatagttgctcaggtataa

SEQ ID NO: 278866 - DNA, 1482 bp, Morganella morganii
atgtcattgacaaccctaattaaatccattcaggacatcatgcgcaaagacgtaggcgtcgatggtgatgcccagcgcataagccagatggtttggctgattttcctgaagatctttgatgacaaagagcaggaatggcaactcaccgtacctaattataagtcaccattacctagccgtttccgctggtctgcttgggcgaaagatccagagggtatcacgggtgaagagttaatcgacttcgttaacaacgacctattccctgcgttaaagaaattagcaaccgcagcgggggtagttcctcatggcaaagttgttggttcggtctttgaggatgcctacaactacatgaagtcaggtactttattgaggcaggtaatcaacactattgaagaagatgttgatttcaacaaatcgggcgatcgccatttgtttaacgatatttacgaaaaaatcctggctgatttgcagtcagcaggtaacgctggcgagtactacaccccgcgtgcggtgacccagtttattgtagatatgattgacccgaaattgggcgaaagtatcctcgatccagcttgcggcacagccggtttcctcacttgcgccattgagcacttgaaccaacaaatcaaaaaaaatgaagacaggcagcttctgcaagagacgatccacggtgttgagaaaaagcccctgccgcatatgttggccttaactaatgtcatgctgcacggcattgatgtacctaccaatattcgccatgacaatacacttgcaaggcagctacagagttacacccctaaagagcgagtggacatcatcattaccaacccgccgtttggtggtatggaagaagatggcattgaatcgaacttcttaaaaaaataccaaacccgcgaaaccgccgatttatttatggcgcttattatgcacctactcaagcaccctgagtctaataaagacggggggcgggctgccgtagttctgcccgacggttttttgtttggtgagggcgtaaaaaccaccttaaaacgcgaactattggaagaattcaatctgcataccattgtgcgcctccccaaaggcgtctttgctccctacacgagtatcgccacgaatattctattttttgaaaaaggcggccctaccaaaaatgtgtggttcttcgaacatccttaccctgaaggctacaaatcctattcgcgctctaagccattaaccattggtgaatttgatttagaaaaagcctggtggggggggaccgtacgtaagggccgtaaagtgacgaagcatgcgtggaaggtatcatccgaaaatttagcggagcgcaattacaacctagactgtaaaaacccgtatgaaatcgaagtgacgtatcaagacccaacggaattgatggacgactaccaagaaatcgtgcggcaattggaggccgcgcaaaaagcactaaaagaaaagttaatggcctgcttgggggcaaaagcatga

SEQ ID NO: 278867 - DNA, 2382 bp, Morganella morganii
atgaataaaaaacaactcacggagcgagacatctgcaccaagttcatcacgcctgcgcttgaacagtccggatgggatattgttacgcaaatacgagaagagttcccgctaaccaagggccgaattatcgttcgcggcaagctacatacccgcgcaaagcataaacgcgccgattatgtgcttttctacaagcccaacatccctatcgcagtcatcgaggccaaagataacaaccacagcttgggtgatggcatgcagcaagccttgagctatgccgagatgctccaagtgccgttcatctttagttctaacggcgatggttttctgttccataacaaaatagccaaagatgatacgattgagagagaactagccctgcacgaatttccatcggccgaaacgctatggcaatggtgggcggagcacaagggtctgaatcagcaacaaaacgaactggtcacccaagattattacagcgacggcagcaacaaaacgccacgctattatcaactgttggccgttaacaaaaccatcgaagccatagccaatgggcaaaaccgtattctattggtcatggcaactggaacgggtaagacctttactgccttccaaattatctggcggttgtggcgcgcaaaagccaaaaagcgcattttatttctggctgatcgaaatatattggtcgatcaaactatgactaacgactttaaaccttttggctctgctatgactaagattcaaaagagacaggccaataaatcctatgaaatctacctttctctttatcaggctgtcaccggcaatgaagaagagagaaatatctacaaacaattcagtccagatttctttgatcttattgtaattgacgagtgccatcgtggcagtgcagcgaccgattctgcctggcgagacattcttgagtacttttcctcagccacacagataggtctcacagccacaccaaaagaaaccaaagaagcctcgaacatcgactactttggtgaaccgatttacacctacagcctgcgccaaggtattgatgatggctttcttgcgccttacaaagtcgtgcgtattgatctggatagagatttgacaggttggcggcccgataaaggtatgaccgacaaacacggcaatcaaattgaagaccgcatttacaaccagaaagattttgataaaacgctcgtgctagagcagcgtacacacttggtcgcgagaaaaattacagagtttctaaagcaaactaaccgttttgataaagccattatcttttgcgaaaacatcgatcatgccgagcgtatgcgccaggcactagttaacgagaatgccgatttagtcgcgcaaaacagcaagtacatcatgcgcatcactggagacaacgaagaaggtaaagccgagctggataactttatcttcccggagagcaaatatccggtgatagctaccacctctaagttgatgaccaccggcgtggacgcccaaacctgcaagctcattgtgctcgaccagcgcattcaatcaatgacagagttcaaacaaattatcgggcgcggtactcgcatcaatgaagattacggtaagtactacttcaccatcatcgactttaaaaaggctactgagctttttgctgaccctgactttgatggtgacccagttcaggtttacgagccctccagttccgattctcctgtcccgccagatgagggtgctggggaatcgggttatactggtttggaataccgcaaacccaatttcgagtgcgactgggatagaattggtgaaaccggtaaagatgaggatggcggcgtgcgtcgctatgtcgtggcgaatgtgcaggtaaaagtcgctgcagagcgcgtgcagtattttgatgccaacggcaaactcattaccgaatccttaaaagagtacacccgtaaagcggtgacaaaagagttcgccacaatggatgattttcttcggcgctggagcagtgtagaaaagaaacaagccatcattgaagagctatccgagcatggcgtattttttgaagccttggccgacgaggtggggacaaagtcaggcaaagcgttcgacccctttgacttagtttgtcacgttgcttgggatatgccaccgctcacgcgtaaagagcgtgcagagcaggtgaaaaaacgaaattactttacgcaatacggcaaacaggcccgcaaagtgttagaagcgctgctggataaatatgccgatgaaggcgtggctcagattgaagaaacacagattctgaccatagcgcctttcacccaatttggcaccccgctggaaatcattcgcacctttggtggcttggagcaataccagcaagccataaacgaactggaacaagcgctgtatggctcttaa

SEQ ID NO: 278868 - DNA, 240 bp, Morganella morganii
atgaacaaaaacgagatttacgagcgcattaagcaaatactggcagatgcccctcgcaatcagtacaccgctgagctgcatctgcaaatgatcaaatatgctgatgagctgaagagcatcacagccaaagagttttgtgaaggagttggtctgcggagcagctttggtacggaatttagcaaaatgcgcaatctgactcagcgccttaaagctgcaggattacaaactgagctgatctag

SEQ ID NO: 278869 - DNA, 642 bp, Morganella morganii
atggactaccgcctccctctgaggttaactgaacaaaatatactcagcaggagcattatcacgaatgttatctatctcggtattgatctggctaaaaatgtttttcagctttgtggattaaatcaggcgggtaaaccggtttataaaaaacgcactgatcgtaaaacgttactacagactgtcgcgaatattccggcctgcctgattggagtggaagcctccacgggcgcattttactggcagcgtgagttcgaaaaactgggacataaggtaaaagtgatcagtccccagtatgtaaaaccctttgtccgcgggcaaaaaaatgacggtaatgatgcacaggctatcgcaattgctctgatgcagccaacaatgcagttcgtaccacctaaaagccctgaacagcaggatattcagactctgcaccgtgcaagacagcgtattgttaatcaccgcactgcggcagtttgtcaaatccggggactgctgcttgatcggggaataacaatcggcgcggcagtctcaagagttcgtcgtgctgtccgcttattcttgaagatgctgaaaatggtcttagcgttagaatgtgcaggacgattgcagaactttatgatctctttaacgatcttggtcgtcgtataa

SEQ ID NO: 278870 - DNA, 204 bp, Morganella morganii
atgcgtaaagcccgttttactgagcatcagatcatcgctgtgattaagccggacgaactgttaaagatgtctgccgtgacgccggtatatccgaagccagctactacatctatggactacctccgttttgtaagtactgaatcaggttttaggttgttgcttacatctatccggcatcagaaatatctgtgcccaaatgggtaa

SEQ ID NO: 278871 - DNA, 510 bp, Morganella morganii
gtgagtctacttgaattgattgaatcaaaaagggcacatatcgctagatattcctcagaaaatggaatattaggggaacatagcttacttgactcgcaatctttatggataaaaagacctaaagggaaagacatgaaaaatttgctagctgcactgaagcagtttgaagacattgaaataaaggcatcaagctttgattttatttctattcctgaaaatgtaagtgttgattttagtgatattagctccttggccagaatattaaaatcattaacttttattgaactaaaaacctgtaatcaaaaaagggttaccactcctgacttcaggaatttcttctttgccattactgaaaatgaaataatagcatcagaacttctcggtgataggcatatagttgtactacataacaaattaacgggagacaaattggtgacaacaataccagaaataataaaaagggccaattccaagaactggcagttgtctgtaagtcttgggtcgaaataa

SEQ ID NO: 278872 - DNA, 243 bp, Morganella morganii
atggtaactagagaaggcatgaaactatggatcatagagtgtcttcgggaacgtggtggtagtgcctggccacgtgaagtctcaaagtacgtatgggacagttacgaggctgagctaagagattccggcgatatgttgtatacgtggcaatatgacattcgttgggccgctcaacaattgagaaacgagggtgctctgaaaccagtaaatagacgcagagatttgccatgggagctcgtatag

SEQ ID NO: 278873 - DNA, 900 bp, Morganella morganii
atgcgacctgcggactatctgcggcttaccctgctggcggccatctggggtgccagctttctttttatgcgggtggcctccccgcagttcggcgcggttaacacggcctttctgcgtgtctttttcggctgtgccggacttctggtgatcctccttatcatgcgccgcaccttccggtttgacggaaaattaaaaccggcattattactgggcgtgattaactccggcattcccttttttatgtactgtctggccgcgcagtggctgccggccggttactccgccattctcaacgccaccacgccgctgatgggggcgctgatcggctttgctttctttaccgaaaccctgaccgcccgcaaatggctgggggtgatgatgggactggccgggattgtggtgatcaccacggtcggggaaagtcagtcttccgcccatttattatggggcgtagccgcctgtctgcttgccaccgcctgttacgggctggcgggattcctgacgcggcgctggatcagtgaaaaaggcggtctggatgcccgtctggttgcgttcggcagccagctcggtgccacgctgttcctgctgccgtttttcggcttcagtgtcacgaccggcccggcggttaactgggcacagccgatggtctggggcagtgtgattgcggtggggctgctctgtacggcagtggcttatattctctatttccgcctgattgctgatatcggcccgatgcgctcactgacagtgacctttctgatcccgccgttcggtattttgtggggttatcttgtgcttgatgagacactcagcccgaatttcttcctcggtgcgctgattgtctgtgtggcagtctggctgctggtcagccggggcaaacagcccgcagcggtaaaataa

SEQ ID NO: 278874 - DNA, 1185 bp, Morganella morganii
atgtctgatacattcactgcactgtttaaacaagcgctctatctggtggttaaatatactccatttttaatattattttccggattaaccatttggttctatctcagccatatcggaagaataaacatattccctgaaatcctgtcttcttattccagttttgtctcaattttagcctccttgttctttatcggaacagcatttagtattacatttattctgccaagcttatttctgatcctccttcatttaaccctcaaccaaaaagacaattttaagtatataaaaaaaacacctatcgttagtgcaatcatatcctgtgctttcattgtcacattattatccatatcagcctataatgtcagttataaaaaagatgtttctttcgatataacatggataatagtaacttcagcatcattactttacaccataataaatacaagcgtaaactacacctacataaaaagaaaatcattgactaaaaatacattgcggcttattggtatgataattactacaactgctttcatgtcaatatcatcattatcaatttcattccctatgctattgattttaaataaagttcatgctaacgatactgtgtcgatactttctctttcagcaattttattagcatttacttttttttgttttatacctgcatcaatttactatcgtcaattcgataacaaactaattaaaccagaaaaaaatgaaatatcattaatgtttattgctccccccttggttattttctttttggtttgtatgctggttcccggattatctgtcagcattatacacttatccctgaacacccttggcttttcagactctcaaccgcattattactatatcaacagtaaaaaatacacttcagatatgtttaataaaaatgactggaagcctgttacgctgggaacatttgacaaaaaaacatatattaaaggtattagtttattatcaatgtcagggaaacaacttatttgccctgaatatacgcgtaaacttcaaattggaacctacaaaacagacttatataagcaacattttgaactggataaagataaaatgaaacagcttaaggctgccacaaaaaactgtattctgtttaacaatgatgatatccagcaatgggatacattattcgatgacaacggaaaaataaaaggatctgaatga

SEQ ID NO: 278875 - DNA, 552 bp, Morganella morganii
atgctgtcgaaaacccagttcccggatatcgttatcctgaaattcgccttcttcggcccgttactgggtgcgctggcccgtccgctgggcggcttcctctccgataaattcggcggtatccgcgtaacctttattaacttcgtggtgatggcggtatttgccttcctgctgttcttcacactgccgggcaaaaatgatgccggttcatttgccgccttcttcggcgtctttatggtgctgtttttcactgccggtctcggcagcggctctactttccagatgattgcggtggtgttccgcaaaatcaccactgagcgcgtactggcacagggcggtaccgaaaaagaagcccagcatgaagccatcaccgaaagtgctgccgcactcggttttatctctgccatcggcgctatcggcgggttctttatcccgaatgcctttggtatttcactgacactgaccggctcgcctgccggtgcaatgaaagtgttcgttgtcttttatgtggtctgcattctgaccacatggctggtatacggccgtaaaaaataa

SEQ ID NO: 278876 - DNA, 300 bp, Morganella morganii
atgtctattgttaaatttaacagccctgtcactctaaaaaatggcaacgtcattaccgaagttacgattactgactctatgcgtcaggccggaaccctgcgcggcctgaaaatgtgggatgtcgccaccggggatgtgaattctatgatcatcctgctcccgcgcgtgacacagccgcgtctgtcagaacaggaactttcctcaatgccggttgattgcttttctcagttggttaacgaggtggcgaattttttagcaccgagtgccccggacgacgagacccgcgaaccggaagaataa

SEQ ID NO: 278877 - DNA, 1863 bp, Morganella morganii
atgtacgcaaataaaaatcgatttataaaatttataatattgatattcatcgatgtctctattatgctatcttcatattgggtaagcatgtggttaagactagacagagatataccaatatcaagttttatacattgggcttcaatatgctccaccattcctattactgtattcattctggttaaaattggtttttatcgtgcaatattacgctatgttaatatgagcattgtaaaatgggctgttgttggttcttttttatcttcgctgttgttaatagctttttctctctaccaggatgcttttctcccacgtacggtacctattatttatttcttcctattagttatactactatgcggaacccgctatttttatcgtaatattgttaatcttattactccaaaaggtttacctgttgccatttatggtgccggtgaatcagggcggcaattactgaccattcttcgggaacataaagaatataatcctatattttttatcgatgataaaaagaaacttcagtatcatacaattcacggtcttaaggtctatccttccgataatctggccaaattaatagataaatataatatctcaaaaatattattggccatacctagtgtatcttccgataaaaggaaaaatattttaaagaaattagaacctttacacagagaagttttaaccatccctgatttcaatgagttagttgatggaactgcacaaataggccatctaaataaagtatccatatccgatcttcttggtcgtgaacaagttgcaccaatcaatgaattattaaagaaaaatatttttgagaaaaatgtttttattagtggtgccggtggttctatcggatctgagttatgccggcaaattctatctcagaatccaaccttaattattctttatgagatatcagaattttcgttatacagcattgacagggaattgaatagattaaaatattctaagaaattaaatgctactatcatcccaatacttggtgatgttaaaaataaagaaaaaattgattttattattaagaaattttcaattcatactgtatatcatgccgctgcttataagcatgttccccttgtggaatataatatggttgaagggatccaaaataacatattgggtacactatccctggcacaatcagcaagtgaaaacaatgtcgagcgattcgttttaatatctactgataaagcagtcagaccaactaatactatgggtgcaaccaagcgttttgctgagctgatattacaggcacttgctcttacaccgtctgaaacacatttttcaatggttcgctttggtaatgttctcggttcatcaggctctgttgttccattatttgaaaaacagattgcaaatggcgggccaattacacttacccataaagatataacccgcttctttatgaccattccggaagccgctcaattagtgatccaggccggagcaatggggaaaaatggtgatgtctttgtccttgatatgggagagtcagtcaggatatacgaccttgctgaaaaaatgattaatctttcaggttttactattaaagatgaaaaaaatcctaatggtgatattgagataaaagtaaccgggttgcgtcccggagaaaagctttatgaagaactattaatcggagataatgttcagggaacattccatccccgtattatgaccgctaatgaaaaatatctcacttgggataaactctcacaattgattgctgaaattaaaatacactgtgagcaacgaaatctgacagctttacgcgagttattattgaaagcacctttagattttcatcctcgtgatgaaatctgtgatttactgaagtaa

SEQ ID NO: 278878 - DNA, 504 bp, Morganella morganii
atggactctaaggggcccatttttttccgtcaacgcagggttggtaaaggtggtaatgaatttatgatacataaattcagaagcatggctgataatacagaaaatctggggcaattaaccattggaaatgaccagcgtattacccgttctggtcactttatccgaaaatataaattagatgagcttgcacagcttattgacgtcatacaaggaaccatgagcctggttggtcccagacctgaagtgcctaaatatatgaacttataccctgaaaacatcagaaataaaattctttcagtaaaaccagggattacagatttagcagcaatcgagatgattgatgaaaatatcatccttgcaaagtatgatgaccctgaaaaggcttatattgatattatcatgccaatgaaatcagagtattatttaaagtatgtggatagtaagtctattatcctagatataaaaataatatttatgactatttataaaatagtaaaacgatag

SEQ ID NO: 278879 - DNA, 1155 bp, Morganella morganii
atgaataataaatttttgccattctcctttccagaaatcggtcaggaagaaattgatgaagtagtagactctctgaaaagtggttggattactaccggcccaaaagcaaagaaatttgaacaggactttgctgagtacttaggcgggaatgtagaagccatcgcaattaactctgctactgcaggtttacaccttgccttagaagccataggtatcggcccgggtgatgaagttattgttcctacttacacctttacaacaaccgctgaagtcgtacgatatcttggtgcagacccaatttttgtagattcctgtgatgatacattaaatatggatcctgcaaaatttgaagccgccattactaataaaacaaaagcggttattccggtacattttgcaggactagcctgtgatatggatacaatcatatctattgcccgaaaacatgatttaaaagtggttgaagatgccgcacatgccttccctaccatctataatgggaaacttatcgggacattagatactgatgcaactgtttttagtttctatgcaaataaaacaatgacaactgctgagggaggtatgctggtttctaagcatccagatataattgcccgggctaaagtaatgcgtctgcatggcatcagcagagatgcatttgacagataccaatccaaaacaccagcatggttttatgaggttatagaaccaggatttaaatataatatgcctgatatctcagcagcaattggtatccaccaattaaaacgcattaatgattttcaggtaaaacgtgaggctatggctcaatattataatgataaattaaaaaatctgcctttaattcttcctgtagatgctaaagataataaccagcatgcatggcatctttacccaattcggttaactgatagcgtaacaatttcccgagatgactttatcctggaaatgtcaaagaaaaatattggttgctctgtccattttattcctctgcacaagcatcctatatggcgtgataaatataacttaactcctgaacaatttcctgttgcagagaataattttcaacggataatttcaataccattatataccgcaatgaccagagaagatcaggatcgtgttattgctgctatcaaagagattattaagtaa

SEQ ID NO: 278880 - DNA, 735 bp, Morganella morganii
atgccttgttataatgcagaaaaatatatcgaagaatctataaactctgttttatatcaaaaagatgtagatgttgaattaattattattgatgaccactctactgataaaaccactaaaataatttcgtctatacgtgacaatagaattaaattaataacattaaaccgtaatttaggtgctggtaatgccagaaatattggtttgcagaatgcaaaatctaagttcattgcctttatagatgctgatgatatctggttatcccacaaattaataactcagataaattatcttcttgcacatcccagcgttggcgtaatatgtacagcatatcgctttatagatgatcactctgaattaatttctggtagcgttatccctgatagggtcatatccttagattcttacatgagaaatacttgcattggttgctccaccgttcttttaaacagagataatattactgaacttgagtttagcaacattcgattaagacaagatactcatctttggataacattattaattaataagacctctataaatggattggatcaatacttggtaaattatcgtataaggaaaaatcaaatatccggaaataaaataaatgcagccattaaaacatttaagctatactggggattcaaacaaatccctatttctaaaagaataataaactatattttctatgcatttaatggtgtatccaaaagattaaaaaaggacatataa

SEQ ID NO: 278881 - DNA, 552 bp, Morganella morganii
atgaggattgcatattttaatgagctagatacatactctgaaagttttggattggatacgaaacaaattattgaaggtgtctcgctagatccaagaattggaaattattataacaatccatcatttgggtacggtggttattgtctaccaaaggatacaaagcaattattagctaattatcaaaatgttcccaataacttaatacaagcaattgtaaactcaaatagaacaagaaaagattacatcgcagatacggttatatcaaaatctcctaatacagtaggcatttatcgattggtaatgaaaactaactctgataacttcagagcatctgctatacaaggaatcatgaagagaattaaggctaaagggatcaatgttattgtttatgaaccatcattgaaagatgataagttttttaattcaatcgtaataaatgatttaaatcaatttaaagctatgagtgatattatattggctaatcgtgctgtctccgatttagatgatgttttggataaagtctattctcgcgatttatttggtaatgactga

SEQ ID NO: 278882 - DNA, 435 bp, Morganella morganii
atgaatattaaatatttttctccgtctgaaaatgcattttatgccggagagcttaaagaaagctatatttcagcgggttcatggccttccgatgccataaaagttgatgaaagtttatatcttgagtttatcgatgaaccgccacccggctcatatcgtggagtagataatacaggtatgccctgctggcttgaaattccgcctctctctgccgaggaattggcctcgaatgcaaagagcatgaggcagcaattgatcgatgaagcaaatatctatatcaacaaccgccaatggcccgggaaagcagccattggccggttaaaaaatgatgagttggcacagtaccatcggtggctggattatctggacgaactggaggcggtggacgtatccaccgccccggatattatctggccggtgaagccggaggtatag

SEQ ID NO: 278883 - DNA, 465 bp, Morganella morganii
atgacagccattgtttcccctcatgtttgctgtaatgacgggattattacggatttatccggttatggctgcattcccggaaaccttggtttgagagacattaatacggctggtgttgcgactggtagtcttggctcagccggatatgccatattcccgataatgattagcggcatccgcaaaacattaattatgcaatggggaaaattggtgcctctgacatcaggtagcacagtggatattaatctgcctattgcttttcctactgccatcatgcaggcatatgcaactcatgataatgaggaacatgcagcacgccctactgtgtatgcaataggtgcaacgagcagaagtattattactgcgacggcaacgcaacttactgccggatcagcgggggcaactgtgacacgcggtagtgacggtgctgcatgttatggccgatattttgcaatagggtactga

SEQ ID NO: 278884 - DNA, 468 bp, Morganella morganii
atgagcggtaaaaccgctgtcaggccgggactgaaacgggcattaaaggccattcagccgggtgatacactggcagtgtggaagctggacaggctcgggcgcagtgtcaaaaacctgatagccctgatatctgatctgcacgaacgcggcgcacacttccggtcattgacggacagtatcgacaccagcactgctatggggcgctttttctttcacgtcatgtcagcgctggcagaaatggaacgcgagctgatagtagagcgtacgctggccggattggccgcagcgagagcgcagggcagagtcggcggacgaccggcggcactgacacagaatgaccgggagcaaataggccgactgctggataaaggatattcccggcagcaactggcaattatttacggtgtcggggtgtcgactatttaccggtattttccggctgaagaccggggaagaagtaaaacataa

SEQ ID NO: 278885 - DNA, 516 bp, Morganella morganii
atggccttaccgcataaactgaaaaacatgaacctgtttttcaacggcgacaactggcaggggaaagccgaagaaatcaccctgccgaagctgacccgcaaactcgaagcctaccgcgcgggcggcatgaacggtgccgcacacgttgatttagggcttgaagatgatgcgctggggatggaaataaccctcggtggtatggaagcacaactctataaacagtggggcattgccgaaattgacggtgtgccgctgcgatttgccggggcctatcagcgtgatgataccggtgagaccatcgcttgtgaggtagtcgtgcgcgggcgtttatctgaaatcgacccgggcagtgccaaacagggcgataacactcaggtgaaattcagctttaaaccaacctattaccggctggtctggaacggcactgatctcattgagattgatgtcgtcaatatggttgaaaaagtagacggtgttgaccgtctgtcagaacaacgcgccgctatcgggctgtaa

SEQ ID NO: 278886 - DNA, 309 bp, Morganella morganii
atgactgagcaagttaataaaacatcggcggttgtcgagctggatgaccctatcatgcgcggtgaaacaaaaattacccgtgtcactgtccgcaagccaaaatcgggtgctctgcgcggtgtgcgtcttgtcgcactgatggatatggacgtaacggccatgaccgaagtgttaccgcgtatcactgatcctgcactgacaaagccggagattatgtcaatgccgccgggtgatctgctcaatatgtcgatcgaggtggttaattttttgctgccgaagtcgatgcaggccgattaccggaacgattaa

SEQ ID NO: 278887 - DNA, 1110 bp, Morganella morganii
atgacggattttttcctcaccggtaccgagtgcgccccggcatattcgctttccgtcgggtccgtcaacatcaatgagcggattcaggggcggctgatttccctgtcactgacggataaccgcggatttgaggccgaccagctggacatcgagatcgatgatgccgacggaaaaatgatgctgccgaagcgcggcgaggtgttatcgctgcacttaggctggaagaatgaaccgctgatttttaagggtaaatttaccgttgatgaaatagagcacagcggaccgcctgacaagctgaccatacgcgggcgtagtgcggatttccgttcgtcactgaacgcaaagcgcgaggtttcctatcacgaaaaaacgctgggcgacatcatcaccaccattgcaaagcggaataacgtagagccggtgatcgagaaaaaactcgctgagattaaaatcgcccatatcgaccagaccaacgaatcagacggctcctttctggcgcggctcggtaaacaggagggggctgttgcggccataaaaaacggccggttgctgtttatgccgcagggcagcggaaaaaccgcgtccggaaaactaatcccaccgctgctgatcactcggtccgtcggtgacggctaccggttttcactggccgaccgtggcgcatataccggcgttattgcctcatggctgaacacccgcaagccgaagaaaaaagacgaggttaaagttaaacgcaagcggaagaccaaaaggaaaaacccggaaaaaatcaaaaaaccggatgagccgcagggggattatctggtcggtgacgaggggaatgtgctgacgctttctcacacttacgcgaacaaaaataatgctgaacgggcagcgaaagccgcctgggaaaaaatgcagcgcggcgttgcatcgctgtctctccagctggcaaaaggccgggcggatatctatccggaaatgccggttaaagttcagggatttaagccggaaattgacggcgcagaatggatactgacgaaagtgtcgcactccctgaatgacagcggatttacatctgcgctggaatttgaagtgaaaatctctgatgttgaaatgggtgacggataa

SEQ ID NO: 278888 - DNA, 219 bp, Morganella morganii
atgatgaaatgtcctctttgcggcgaacttgcccgcacccgcagttcccgcgatgtcaccaccgaaacgaaagaacgttataaccagtgtatgaatattaattgcggtgcaacgttcgtcagtcatgaatctctttcgcggttcattacaaagcctaatctcattgaagcggctattccgcatcccggggataataagcaggtatcgctcagtttttaa

SEQ ID NO: 278889 - DNA, 693 bp, Morganella morganii
atgcctaaccgtaagatggcggtgctgatttacctggtaggattttttttatttctcggactgggtgcagagctgtcaccggataaaacgggtgagccaataaagccacaggaacaaacccagcaaaacagcacacaggatcaaaccactcaaagtaacaacgctccggatatagccgttgatgaacaaaagcagcccgaagaactgctgtgcaaatccggttacaatactgccgccggtgcgtttgccgaccttaacgactactacacagataataattctctggaaattattagcgaagagccactacggatacgactatccaacgtggcattccctgaggatcaccgggacgttaaagaattaatggtaaaacgcgctgttatttatgggatatatcggtctttcattcatacaaacaaggatgaagtgacagttacttcatatctcattgatatgaacaataagaaaaaattgcccagctcaccagaatacagtgtgaaaataaccaaaaaacaggccctggatatcataaaaaaatatattcctgtgcaagatttcagtgatttaatttccaaggatggttacggctgtacattctcagatgactttaacaagataagatttgacgataaaaataaagatgtggtttttaatcagttcttcaatgatttgatgtccgcaaaaaaataa

SEQ ID NO: 278890 - DNA, 1359 bp, Morganella morganii
atgggcagttatgcatatgattatcttaacgattcactacttttagatggagcattggcatcacagctatactcgggtatatctgatttgaccttagggatggagctaaccagatatcgcgagtattgtcttaaaattcttccggaagtacgaaaagatgttaaagccggtaatgatgcgtttagctgtatggctactgatacgatgtctcatatctcacgacttaaacaagcagcattatacttagaggaagctatagtctcagatcctattttcaaaataactgactttagaagcgcttcgactgaagctataacttcattcatgggtgtgagatcaacaccaatgattgatcgcagagaattagctaatgctgcaatcaaacttattgaattgcgtccattagtagcgggtggttacgttaagttgtatcccgtaagtttcgagttagaacgtggtgaagagattcctttgctctattctgataaagggttcgaagattgtttagcatcaaatatcctgaaacaatacaaaacaaatgctgatgtacgaagtgtccaaaatgacaatggacgcatgttggttatgagagatctttatctatgcaggaatattagtattcactttaaaggcatggaaggtgggtttgagatggcatatatgcttaaccctactgaaattaaaccgacaaataaagaaaatgtatacaccttcatacaaaagaaatcaccagaaccaccatcagaagaagattttgttgcatgggtaagacaatctgtaaatcaaactgccagaaaccattatagcgatctgaataaacggatcgctctatgcgaatatcttggatgcatgtttggtactgagcatccgtttgaaagtaatttactaaacatgaaccttgactccagcgatatcaaagcaaatactttaaattgtactcttcaaatggatgttccctttctagaacaagtatcgtcggctgatttaatgtctatccgaaacaatgatggtgaagcatttcaatcgttccgctcggagctagagagaggtttacgtcaggctaggcatgaatcagatccgcgtcgtgtacgtgctattatcgaagatacacaacatgaactgtttgaagttcaaatgagtcagattgccccccaggttaggcacatgaaaaaaacacacttgactgaagttgctatcgcaactgctggtttagggctgagcgtgttgactggtggcactagtttactcgcgacagtgatcgcagtggcacacggctataagtcacactgtgactacaaatcaaaagtaacagcgaacccatgccattttttatggaacgtaaaaatgaaggcagaataa

SEQ ID NO: 278891 - DNA, 219 bp, Morganella morganii
atgaaaaatatttttaaatttgatgaatatgaaatgaccttaaccaacagaatgaacaagctggtagctactattcaccatctaaactcaagtgaccaaagtagtactcccatacatgctgataacgttaaggatctcattacacaaattaaagaacagcttagcattaacgatacaactcacctttacttagatttaatgaatagtggatataaataa

SEQ ID NO: 278892 - DNA, 447 bp, Morganella morganii
atgaactggaaagaagcggtaatagctgcaatgttcatctccgccgcctggtgggtatacgacacctaccgggataatcagcaactaaaatcagataacaaaaccctgagtagtcagcttgcagagcagatagcggtgaataaagactatcaggaacgcgcacagaaacttcatgaactggataccaggcatacacaggagctggcaaatgcaaaaactgaaattgaccggctgcgtattgctgctgaccgtaatcctgagcgggtgtacatcaaagccagttgtccaaagaccggcagcgataccgccaccggcatggatgatgcagcccccgcccgacctgatgacaccactatcagaaattattggttactcagagagcggattacagaatcagagcaaatgatcaaggggttacaggattatatccgaacggtgtgtttttaa

SEQ ID NO: 278893 - DNA, 159 bp, Morganella morganii
atgtcacggaaccctttaacgctgatcatcattactatcatcctgctgactactgctctgttggcagtttgttatctgtattcactcccgcatcactgtagtccgctgccaggtaacccgctggacggtgtgattcattataagtgtgaagcgccatga

SEQ ID NO: 278894 - DNA, 477 bp, Morganella morganii
atgaataaccgattatttaaaaaagtcatggctgcttgtgccgtcggggcgattgccggtgcgctggtgctgatccccgcatacgagggcgttgagtacaaaccttaccgtgatgtggccggggtgctcactgtatgttacggccataccggtagtgatattcagcccggcaagctgtacacggacgctgaatgcaaggctctgttgcatgatgacctgacgaaagtccggtgcgcggttgacccgatgattaaagtgccgattgatgacaatacccgggcggccatttattcatttgcatataacatcggaaccggtgcgttctcgcgctccactatgctgcgcaaacttaatgccggtgatatcgccggtgcatgtgacgaaatgaagcgctggacgtttgccggaggtaaacagtggcagggtctgattaaccggcgagaggcggagaaagcgatatgtcacggaaccctttaa

SEQ ID NO: 278895 - DNA, 192 bp, Morganella morganii
atgcgcatgtctgacaaatattccagccctacagcgtacgcctggggacttataacctctgcttttggcgttttatctctggaccagtgggctattgttgccgggatcatctgtactgtcgggacgttcctggttaactggtattacaaacggaaggaattccagctgaaagccggagaacatcatgaataa

SEQ ID NO: 278896 - DNA, 123 bp, Morganella morganii
atgagcctgtcgtattccaatgctcttattgttgctaatgacaaaaggccgcacatggcgacctttggaatttgttttatgtcacataagtggaatttcagtatggacgataaaattgagtaa

SEQ ID NO: 278897 - DNA, 594 bp, Morganella morganii
atggcacagcatagctttatcaaactccccaacgacactctcgcgccagcaaactcgacggcgagggattatctgcactcaaaagttaagtgcggtgatgtgctgtcagcagacttcaaaaaggcacgtaacccacgatttcaccgtaaatacttcgcactcctgaacctcggctatgaatattgggaaccggtcggcggcacaatttcgccggaagaaaaagaattggttcgcgggtatgtgaaattcctctcgtattacacggacaatgacgatgctctgcagtcagcggctgacgtctatcttgatgatgtagcacaaaagcgcgctcagaatattaccgcgacaaaatcattcgacgctttccgatcctgggccattgaacaatccggccagtacgacacctacgaaatgcctgacggcagcctgcgccgtgtcgccaaatcaatcagctttgccaaaatggatgacctgcaatttggcgaactctataaatccacgctcgatgtgctgtggaacttcattctgtaccgtaatttttccacgcaacaggcggctgagaacgcggcagcacagttattagattttacctga

SEQ ID NO: 278898 - DNA, 843 bp, Morganella morganii
atgaaacagaatccattcagcttttatgattttttaggatatctgataccaggagctacattcctatacattctaacttttatttttggatttaacattacttcatttttcgcgcttagtgacgggagtgacagtagcatcaaacatgaaatattatttttcattccaataataatatttacctacattgtaggtcatgctttttcattgttgtcttctttttttattgaaaatttctcaaaatatttttatagctatccatcaaaatttttatttaccgaaaaccatcatttttggtttttatcagaaaaagagaagaaacacaaatatattaacattgccagcagattttttttattaacatccttactacctatatccatcatattgtttatattgaaagacctaggcatatcgttatttgaccaagcaaaaatactccccagaaatcttggcgatattgtatttaaaaaatgcaatgaaattttaaccaaaaatctgagaatacctaaaaaatcaattagttgccagagagatattgatggattaggagatgattatttccgtataatttaccattttatatttgaaaactcagaaaaacactcatcaaaactacaaaattatgtagcactatatggattttgtcgtaatatatcatttgtatttatcattaacttctggttatctttatatttttccatgatagaaaaaagctgttgcatttatcttacaatagtctttgcaatatttagttttttattttttactggctttgttaagttttatagacgctatacattagaagccttgatgggagtaactgtatttaataaatactga

SEQ ID NO: 278899 - DNA, 1104 bp, Morganella morganii
atggaactgtttgattttaaatcgggctacagaggggataaattaagacttgctaggatggcaagggggctgtcatgtgaagaattagcgacagccttgggaaaaagtaaacagtatattagtaaattagaaaaagggtttaaaccttcagaagaactggcagacgaaatcgccaggcatctgaatatattacctgagttcttatttactgagcgtagttatcctattgaggatgaacagtgtcattttagaagcaaaaaatcgagaactaaaacgttaacaaacagtatattagcaagggctgagattctaagttctttaatttcagctcttgaagatgaaattgaatatccagagctaaatattcctgacatttcagatcgtccaacaaacacactggacgatattgaaagaatagcagagaactgccgccggtattgggacatggggcttggaccagttacatcaatggttaagttcatcgaaaatctgggaattattattgctcatgtttctgatgttgatgatcgagttgatgcttttactgtaaatagtaaaaggccaatcataatcaggaacgatgctaaaagttcagtatgcagattcaggtctgatattggccatgaattgggtcatattgttttacatgatgggattattacgggcgataatttgacagaaagccaagcgaatcagttttctagtgcttttatggttcccagagtttctttcatgaaagagtttcctaaaatgagaggccgttatttggactggactgctttaggtgattttaaattacgctggagaatcagtttaagaatgataatctacagagcgtcagcgttagggttaatcacaaaagatcaggctaggcaagggtatatgtatcttaacactaaaggttatactgctattgaacctggtgataatgctataccgccggaagaaccaacactgcttactagaagtattgaaatgctagatgacctgtcatggaataatattctgataaaaacaggaattacaagagaactcgttcgtgagttattttgtgttaataaaccgattagtgataaatcttcttttatttattcagtaagttaa

SEQ ID NO: 278900 - DNA, 630 bp, Morganella morganii
atggaagaaaaaaacttaatgccttgctgggagttgcaacctgaattagaagaaaaaccagtaatggtattacttcgctcaatagcaggtgtgttaatcgaaatccctcaacacgagcattacttggatagtaattggtcaactggagttcgggcctatgattgggtacgaaattacttgtgtttagccgccgaacagggaactataccagccttaaaaatgatatctaaacagcttgatttcgtttttgcgatcaatgaggttccgattcagttttctaaagattgtattggtatccctaaaaagaaacatcgactggttagaaatcatgctgaatttgaacaaatatcattgtttggcgcaagtgaaccagaggtagatgttatttggcgagttcttgctgaaccatattacattgaggagacagatgagtatcctcaatgggatgttgcgttagtaggaataaaccaatatggcgtaaaaataagcgaagtcagatatcacgaaacagtatctgttccgttgaatgatacctctgattcacggccagatgaagaaactattaatgatgctccattaaaacgtcgtaatgcaccagatgaaaccgtgaaaaaagatggaactgtttga

SEQ ID NO: 278901 - DNA, 666 bp, Morganella morganii
atggaatcaagaccaactctgcattcgaactacgttgtcatgctggaagaactacgcaacaagccttcccataggctgaaagaggtcggtgaccagtggcggacacccgatgcgctgtattgggggattaacgcgaagtttggcccgtttacccttgacctgtttactgatggtcagaacagtaagtgcccgaattattacaccgccgaagataatgcgctgacacaggactggtcagaaaagctgaaagaactgggcggggcagcatacggtaacccaccatattcacgggcaacctatcatgacaaacaggccataacggggatggttcatatcatgaaatatgcccttgcaatgcgggataaatatggtcggtatgtttttctgatgaaagtggcgaccagtgaaacatattggccgaaatgggctgatcacattgcatttatcgagggtcgtattggtttcgatttgcctgaatggttcgtaccggcagatgacaaacaaaagccatcgggcgcaatgtttgccggtgcaatcgtcatcttggataaggactggcggggagaaaaaatcagttatatcagccgcgatgagttgatcaccattggcgaactgtttatgcggcaggcgcgctggttggtggcgaaaacagggaaggcagcgtga

SEQ ID NO: 278902 - DNA, 234 bp, Morganella morganii
atgtccggacaatcaaattatttaccagcaggtctgcctcacaatcgcgccctgtggcccgttgagtatcaggaaaaagagcagcttgatttggctgccagtcgcctgattaagcagctcagaatgcagaaaatacacagaacggctgtactggtcgctatcgaaaaaacatcggcggatcagcaggcgtttttccgggagcgcctgaactactggcagggagtgatgaagtga

SEQ ID NO: 278903 - DNA, 177 bp, Morganella morganii
atgataatcaaagaccctgttacgcgcgaatctcttgtgcgtgataactatccctgcatgccggatgatggctgtgaccataccaactgtcacttagaccggctgcatgccgcgcgccgggcccagaaaaaaatcccgtatcagtcttcccttgaaccaaagaaacagggggagtga

SEQ ID NO: 278904 - DNA, 192 bp, Morganella morganii
atgttgtctgaaagagttaaagctcgtcgtgtagagctaaatctgactcagtcaaaactagcaagtatggctgggctgaaacaacagtcaattcaacagattgagtcaggtcttgttaagcgtccaaggtttattattgaaatagctaaagctctaaaatgtgatcctaattggctgattaacggctgttga

SEQ ID NO: 278905 - DNA, 1014 bp, Morganella morganii
gtggctgtaagcaaattacctaacggaaaatggttgtgtcagtgctttcctgatggtcggaacggcaaacgcatacgaaaaacttttgccactaaaggcgaagctctcagttacgaacgccggatgactcaggatgctgaagacagtgacgaatattctgtcaatgatactaatgcagtgcggatcagtgatctgatagcacgttggtatgatatgcacggaaaaacactgagtgacggcgcggcacgcaaaggaaagttagattcagtttgcgaacggctggaagatccacttgcctctgactttgataaaaatatgtttgctcagtaccgggaacttcggttaaaaggcaaatggaatgcgaaaggcagaggctcccccaagcaatcgaccgttaaccgtgagcaatcatacctgcacgctgttttctcagaactgaaacgacttggtgagtggaaaggtgagaatccgctggatggtgttcgtcaatttaaagaatcggatcaggaattagcgttcttatatggtgatgacataaaaagattgcttgccgcgtgtgatgattcaactaataaagatttgggttttgttgtcaggatttgtctggcaaccggtgcgcggtggggtgaagcacaaaacctcacgcaatcaaatgttatgccgtgcaaggttacattcacgcagacaaaatccaaaaagaacagaactgttcctatttcaaaaacactgttcgacaaattaccaaaacgcagaggcagactgtttaccagttgttacgatgcatttgaacgggcactgaaaaaggcaaatattgaactgccggcagggcagagaactcacgttttgaggcatacattcgcaagtcacttcatgatgaacggcggaaatatattagttttacaacagattttaggtcacagcacaattatgatgacgatgaggtacgcgcatttttcccctgatcatcttgatgcggccgtggcattaaatccgcttgatgaaatagaaaaataa

SEQ ID NO: 278906 - DNA, 216 bp, Morganella morganii
atgatgaaacaagcaaaagatcactcacggtcgcgtttaccgcgtactgctgaggaaaaaaaactcgttcctatgcggttactttgccctgaacatggtgagttagaacgtcttgctgaacgagacagccgatcaatgtcagcaatggcaagactaatttttctggaaggcctgaaatcattcaacgataaattagatgagcaaaataacgtatga

SEQ ID NO: 278907 - DNA, 201 bp, Morganella morganii
atggttacacaaataagcactcacagtcattcatatcgcggctttgttatcgttaccttgccgggtaatgtgaccagaccactgacccagtatcagattacattgcggaatggcgccgatgaatgtcattcattcggaaatgaaaactcattacaggaagcgattaaatttatagataatttatttataaataaagaataa

SEQ ID NO: 278908 - DNA, 222 bp, Morganella morganii
atgaaatcttttcctgatccgatatttacaccggtagctgaaaatataaaagctaaccgcgaagatgaacgtaagtctctgcttaaccggtttgctgatcgccagcgttcacttgcaacaaaaataatgaaagaaaaattagaacaggcagaaatctgtcagttactgatggacgatgccgatcgctttgaaaatgaagcgggagaactgaatcatgtctga

SEQ ID NO: 278909 - DNA, 222 bp, Morganella morganii
atgtctgatgaaatcgaccgcgccaacgaccacgccgcacttgtgctggaaagtcagatagccgcagcccggcaggtgatcacccgtatatccgtgtttgtgtgtgaaaactgtgaccgtcctattccggaagcacgcagaaaagcagtcattggctgcacgctgtgtgcggactgtcagttcatttatgaattaaaaaataaacattaccggagcgtgtga

SEQ ID NO: 278910 - DNA, 150 bp, Morganella morganii
atggatattcgttgccgttttggtctgcatgggtggaaggtttactacagttttcaccgcctgagtattcacaatattaaatataccgaatttcatgtcagatgcccaggttgcgggaaaatgaaaataataaaacggggaggctggtaa

SEQ ID NO: 278911 - DNA, 801 bp, Morganella morganii
atgaaaagaactatcctgaaatgggcaggttcaaaagtcggcattatggagcagttacgccctcacctgcctaaaacaaaacgtctgatcgaacctttcgccggttcctgtgccgtgatgatgaatactgattatgaacagtatttaattgctgatttaaataatgatttgattacgatgtatcagcaaataacctcagataatattggtacggttttatgcatggcccgaaacctgtttgaaatggacgtgtttcagaacggatattatctggaaagagagttttttaataattccaggcatgtattacaaccggaatttatcgcagcctattttatttatttaaaccgccactgctataacggattgtgccgatacaatcgtaaaggcggatttaatgttccctgcggacattacaaaaagccgtattttccggaagcagagatccgcacatttgcagataaagcacatcaggctgacattaaatgccagaactgggcagaaacactgttacatacccgcgccggtgacggcgtatattgcgatccgccctatatggggacaggtttcacgcaatatcacaccgccggttttaatgatgccgatcaggttgcgcttgccgaaacactggccgtcctgcacgaccaccgcgacattccggtcacggtgtcaaactccctcgcagcaaaagaactatatgcggatttaggcttcaccgtgcatgaaatagacgcaccgcgctcaattgccgcgaacgggaatcgtaaaaaagcacgtgaaattatcgcggttctgaattaa

SEQ ID NO: 278912 - DNA, 678 bp, Morganella morganii
atgaccattaaaattgaagtgacaaccgaattaattatgagcctgtatgccagactggatggtttattcccctggcagaagcgctggtatgagcaccgttttcagcgcaagcgttatttgcataaaggcagacagattggcgcggattcttattttgcacttgaagcggtgcttgatgcctgtcttaccgggcggaataaaatatttatcgaaccggcaccaacggagccggaagatacatttatttcaaatgccgctcagtacgctaccttgtttttagggcggatggttcaaacgcaatcacaaataattaagttaagcaacggcgctgaaatccggtttcttccggaaaataatccgtgctgggcgggtttatcgggcgatacctatatttctgaatgggcatggtttgataatccacgtgatatcattaaggtggttaagggtgttaccgcacacaagaaatggcgcaggacatattattcatcacgtggtgacggtgataatggtgccgggatcgtgttcagtgataaatcatatttttatgatgttgtcccgtttcagccatgcgaatgcagcgcagggcattgcaataaaattacctttatgttgagcgattacccggaatacttatttaatcaattgattttatgccagtcaccgaaaggaggctgttaa

SEQ ID NO: 278913 - DNA, 216 bp, Morganella morganii
atgcatttatacacaggtgttctgccggatgaccatatagtacggttgaaagcatttgttgataaactggaagtgcttttttctgaaggaacagtcactccggatgaattcatcggttgtgccgcagtggtgtataaaaaatacgagaacatagaaaatatcagtgaaatagcggcggaaattaaaagaattacgtcacttcagaataaacagtaa

SEQ ID NO: 278914 - DNA, 1020 bp, Morganella morganii
atgagccgtaaaaacagaaacaaacagcacaaacaaaagagtaccggcggcgtggaggcgttcacgttcggtgagccggtgtccgttctcgacagccgggagatttatgattatctggaatgtgcccgtatggatcagtggtatgaaccgccgatgagttttaacggcttgtccaaggcattccgggcggcaccgcatcacagcagtgcaatctatgtgaagcgcaatattctgaccagtacctttatcccgcacccgttgttagaccggaaaacgttcaacagctttgcgctggactttctgatattcggtaacggttatattgaaaaacgtcacaaccggctgggcggcatactgggatttaaacatgccccggcgaaatatacccgccggggtatcgatccggatcaatactggtttgtgaaatacggttacgacagtgagccgttcccgtttgaatcgggcgcggtgtttcatctgatcgaaccggatgtgaatcaggaactgtacggcctgccggaatatctggctgcgctgccgtcaacgctgctgaatgaatctgccacactgttccgccgccggtattacctcaacggcagtcacgccgggtacatcatgtatatcagtgattccgcccagacgccgggtgacatcgacaatatccgcaaagcggtgcgcagcagcaaaggaccgggtaacttccgcaacctgtttctgtatgcaccgaacgggaagaaagacgggattcaggtgatgccgctcagcgaagttgccgccaaggatgagttcctgaacatcaagaacgtcagccgtgatgacatgctggccgcgcaccgggtaccgccgcagctgatggggatactgccgcagaataccggcggcttcggggatgtggaaaaagcggccaaggtgtttatccgtaatgaactgatgccgttacaggccaagatgaaacagctgaatgactggtgcggtcaggaggtgatccggtttgaggattaccggttgccggatgattaa

SEQ ID NO: 278915 - DNA, 201 bp, Morganella morganii
atgttgaagagagatgttcttcattttttcggcggagtaaaaaaaacagccgcagctcttaatatcagtcatccggcagtttgccgctggaagaaaactattcccgaaaaacaagcgttaattattgagcggattacaaatggaggacttaagtacaaccctgcactttatcagcatagcagcacggaaaagcacggttaa

SEQ ID NO: 278916 - DNA, 660 bp, Morganella morganii
atgaaaacggaaatgaacgaacgcatcaaagctcgtcgtacgcaactcaatatgacgcaacaatccttggcaaaaatgctcggagtctcacgcgtatccgttacaaaatgggagacaggcgtcacaaaaccagatggtgaaaatcttcacatgctggctaaatcactggatgtctctcctgaatggttgctatttggcggaaatgaaccactttcgactgaactggtatctgcaagaaaaaccattgctgtcaaacaaatccctgttatatctgccgtacaagccggtgactggacatcaacatacgcatcagcaactattgatgatgtacttcgctgggttaacacaaccgcccgggtatctgaaagtgcgtttggccttgatgttaagggtgattcaatgacaaacccaaatggggcaccaacaatccctgaaggctcaacagtcattgttgaaacacaatttggaagtatagaagatctatatggaaaaattgttgttgcaatactcgatggcacatcagatgccacaatcaaaaaactagtctgggatgctccctatacctacctgattccgctgaaccccaatttcaaaccgatagtcgtcagtggtaactgtcgaatcattggcagggttattcaggttattcaaaacatctga

SEQ ID NO: 278917 - DNA, 234 bp, Morganella morganii
atgataatgtccgtctgccagccgcaattttttaaaccgccaataacaaattctattgaggagacagacgcaatggactttagtcagctgccaagaaatattcaggaaatcgctgtcgattttttggaggaaataagtccggatgataaagagccatccctgaaagtcatcacattgataagaaatggatttacagatatgtatcaggcaattgcatctgaaaatgctcagtaa

SEQ ID NO: 278918 - DNA, 228 bp, Morganella morganii
atgtcaaaacaggataacccaagtgttaagattaatattacagtgactttaaatgaagcgccctgcattaatgttgaggtaagtaaggaattcaatatacctgaaaatgcaccttatatagcctcttttttagaaaaaatcggtgaacatattgccagcgaagggacgactacagaggctataaaaaaagcaataaaagacaccattaaaaaaagaaatattcactga

SEQ ID NO: 278919 - DNA, 243 bp, Morganella morganii
atgaaaatgttaactttggatgaatgggcagaagaccggtacaggagccgcccgcctaaactgggaacattacagcggtacgcccgatgtggtctgtttttcccaccggcacagaaagaaggtggtatttggcgtgtgagagaagatgccgaacttgtcggtaatttaatctcaccggtaatcagcaaaagtgataatcccaggctgcaaaggattttaactgatggctgccagaccccgtaa

SEQ ID NO: 278920 - DNA, 1128 bp, Morganella morganii
atggctgccagaccccgtaaaaataatatcaatatccccaacctgtacccgtttttcagcaggaaaaccagcaaggtgtactggcgctacagacatcctgtcaccgggaaattccattatctcggtgacaatgaggaagaggccaaaataattgcggttgaggctaatctgcgactggctgaacagcggagccgtcaggtaatggcgataagtgatcggatggcgaaaataaaaggcaaagaaatcactgttaatacctggctggatcggtaccagaaaatccaggcagagcgtctggcagacggtgaaataaaacagaatacctttaaacagaaacaaaaacctgtcgctctgatgcgccatgcattgtcacaaaaaccattaccggcagtcgatgcccgcgatattgccgatattctggatcagtataaggccagtggtcagcaccggatggctcaggttgtccgttctgtattaatcgatgtattcaaagaagcgcagcatgccggtgaagttccgcccggatataacccagctctcgcgacaaagcaaccacggcgaaaggtcacccggcaacgacttagtctggaagaatggcagaaaatttatgatatcgcctgtaaggaccataaatatctcggaaatgccatgttgttggctgtagttaccggacaacgcctcggagatatttcagaaatgaaattccgtgatatatgggatgatcatctgcatgtcatccagcaaaaaaccggagcacggcttgctatcccactatccctccggtgtcaggcactcaatatcagcctgcgggatgtaattgccgaatgccgtgatctgtatgtcagcaaatatttagtccactacacacgaaacacatcacagtcacagcccggcggccaggtaaccgcaaataccctgaccaccaactttaaaaaagccagggataaaaccgacatcgattggggagaaggtacgcctgcaacatttcacgaaatgcgatcattgtctgagcgtttataccgggaacagggaattaataccaaaaacctgctgggccataaaaaccagcagcaaaccgataaatatcatgatgatcgtggaaaagattggataaaggtattgatataa

SEQ ID NO: 278921 - DNA, 990 bp, Morganella morganii
atgaatgaaaaacttgttcgtttgattgctgattttcaagaaaatgtccaaatcgcgctaaaactcatgcaacgatctggtatccaaatgccatttagccgaaataattggattgaatcgaatataccaaatactggtgaacttgatggtggtgttaaatattataagcatggtgcagggtgtctgataaaacttagtacgggagatgtagattttgattttggtgagcagggagaaattggagggtttaatttttggtggcttatacgcttcgcaggaaaaaagctaacagcttatggctttagaaatgaggatgaagtagctgaatatttggatgatgcgctagataagggggagctcatttgcccagatcatgacctttattatatctctaatgttccatacacctatgctgtggatatagacagtagttactcagatgagatgcttcctagccgcaatcgagatcgtatcaatattcttcagattcattattttcaaactgctgagcttatgttcgaaaattacgataaactcagccgtaaatcacataaaaatggtcatctaagtcaacgcgaaaaagtttacatgcggacttatctttttacctggttaggttttttaggggtggtttgcgagggatttcgaaacttaaatatacgaatcttacttaataataatcgtcctagtgaatttaaagagttggtaccaatttcagatagcataggaaaattgatgaaagaacatgctgattctctcagggaatttagaaataaagttttccatcttcgtgagaatactgactttgtgcataatttttttgataaaaaaatagagcgtcttccatgggcacgcgaattacatatggcccttgcgaattttttttctcaatatagaattctttgtgaagtgcattatgtaatgaatgagcgtaaaggtgagagtgattttctaagaaaaaaaaactttgagaaaataagaataatgtag

SEQ ID NO: 278922 - DNA, 1050 bp, Morganella morganii
atgacaaaaatcaaagtgtttgattttttttcaggatgtggtgggaccagccaaggattccggcaggctggtttcgatgtcgtctttggcctggattttgatagagatgcctccgcatcgttcaagttaaattttcctgaggctgaattcgtaaacgatgatatccgcaatattgactgtgatggtatatctcatctatttaatacggaaaaaaatgacggatacactttgttttcaggatgtgctccttgtcaaccctattcaaaacaaaattctaacaaaaaagatgatgacccgcgcttggatcttctgtcagaattttgccgttttgtagcccattatctgccagattttgtatttgtagaaaatgttcctggtcttcaaaaatttaatcaaaatgagggtacctttaagcagtttctcaatacattgagcgaaaatggctactctgtagatttcaaaataattccagctgcttggttcggagtacctcaaactcgtgagagattagttttgttggcatcgaaaaaatataaggttgagttgccagccaaaacacatggtacccaggataccccatactctacagttcgagaatggattggaaagcttccgcctatattagcaggagcgaaacatactactatacctgatcatgaatctgctagacttactgatttgaatctccaacgaataaaggcgacacctgaaggtggaggccgagaagcttggccttcaaatcttgtgttaaagtgccatcgaaaccacaaaggtcatacggatgtgtatggaaggttatcttgggataaaccagcaagtggtcttacaactcgttgtatcagttactctaatggacgtttcggacatcccacacagaatagagctctttctttaagagaagcagcatgcttacagacattcccaatggattatttatttactggttctctacagtctcgtgctcggcaaattggtaatgccgttccacctaaaatgtctgaagctatcgccaagcagattattaaattgatatcaacccctcttatatga

SEQ ID NO: 278923 - DNA, 1827 bp, Morganella morganii
atgagtgatcgactattggttgaacattgccgtagttttaaacgcggcatggagagtggtgagtttgaacctttcattcagcatattcgctttccttacttcaaaaacttagaacaaaatgcaagaatcgatttcagtttcccaataactgcgttggtgggaaaaaatggaacaaacaaaagttctgtaataaaggcattattaggatgccctcatggcaaaaacataactaggtactggttcactactgaaactgatgatgtacccgatttagttcgggacgacggctcggtacttaaaccaaggtatatatatggatataaaaattctgagcagagaatcattgaaattcttcaaacaagagtcaatgcaacaaagcaatctcttgattattgggaaacaagtcgcccgttagttagtgataatatggatagtgtatctgaggtttctggtgctgaaagtaatgctacacgttggaaaaaaataaaaaaaggattggtatatttagatttcagatctgaaattagtgcatttgaccgatgcatgtaccattctgattacaaaattaagatacacaaaaatggaaggaaattcaccaagcaagattatatcagaagtaaatcaagatatattaaaaaagcatttgatgataatttacaaacattacgactatggaataatgaacttatcgttaaaaatgtgattttaaaaaaagatcaggttgataaggtttcctatattttagggcggaagtataaaagtattaaattccttgagcatcgcttatggggtgctagaggtggaacggcaatgctatcaacggataaacttaattacactgaagcatatgctggaagcggtgagtttgccgttgtttctttagtaatgaacttattttctgcaaaagataaatcactaatacttcttgatgagccagaggtttcactgcatccaggagcgcaaaaaaggatgatggagcttatttatagtctcgtggatagcaagaagcatcaagttgtgttatcaactcactcgcctgtgttagtaaatatgttacccaaagaagccgttaaactttttatttatgatgaagatactgagagtgcaaaaatagcacaaaatatatcacctgatgaagcatttgttgagcttggacatgatttgtctgaaagaacaataataactgaagataaattagcaaaagaagtgattgttcgtgctattcaaaatgagcctagactgaattcgtttaatattcaatatgttccaggtggtgcggaagtaattttaggtaaacatttaccgagtcatgctgctgttggacggaatgatattttgtttttacttgatggtgataaaaatccgaagataaaaccaaaaaaaattgatactatatctgatgcagacttggttaataaaatgaaagaatattttgggtgtgaattaactgttaattccagtgggtctaataatattgcaaataagaaggaattaatatttttgaggcggtgtgcattagagtacgcgtttaaaaaggttctttacctaccatttgaaacgcccgagcaattactgattgaaaattgttgtacagttgagcagaccaaagctttagagagtgaagaatgggatttaaccgatgtaggaatatataagaaaaaaatagcttttcttactcaacaatttttggggcaagacgatgttgatagcaatgaaattttctttttccaaaagggtatgctttccaagctagggtcagattctcatccgatgacagccataagaaagatgcttacccaagcacttgatcgtggtatcattagatag

SEQ ID NO: 278924 - DNA, 1185 bp, Morganella morganii
gtgcaagtgcaacgttcggcctatttcggcctgatttttatcctggggctgttatcgatgctgatgcctctggctatcgatatgtatctgccaagcatgccgaccatcgcccgtgactttggtgtcactgagggcgatgtccagatgacactcaacagttacctgatcggtttcgccgccgggcaactggtatacggtccgatggcggatgcgctcggccgcaagccggtgatcctcgggggaacactgattttcgccctggcctccgccgggtgtgcgatgtctcaggatatcggcacctttatcgggatgcgcgggctgcacggctttgcagcggctgcggcaagtgtggtgatcaacgccctgatgcgcgatatgtttaccaaagatgaattttcccgcagtatgtcgtttgtggtgctggtaatgacagtggcaccgctgctggcaccgatcatgggcggtatgatgatgctctggttcagctggcacgcgattttctggaccatcatgattgccgcgctgatcgctgcactgctggtgctgttctttatccgcgaaaccctgccgaaagagcggcgtcagccgttccggctgcggatcatgctcggccagtttgttacactgttccgccagaagcgggtactgtgttatatggtggcatccggcttttcatttgccgggatgttttcgtttttatcggccgggtcattcgtttacattcagctttacgggctgacggagctggaattcggttactgcttcgcgctgaatattgttttcctgtttattatgaccaccattaacagccgttatgtccgccgtttcggtgcactgaatatgctgcgcaccgggctggtggtgcagttgctggccggatgctggctggtactggccgcatccgccgatctcggctttgtggctctgatgataggtgtggcctgctatgtggggaatattgccatgatcacatcaaatgccatggcggtgattctggatgattatccgcatatggccggtaccgcctcatcactggccggtgtgctgcggtttggtatcggtgcgggtgtcggtgcggtggtggcttcatttaacatgacaacggtctggccgatggtcggcgcgatggcgctctgtattctgattgccgcctctctggtgctgtacgcacggcgttttgcctga

SEQ ID NO: 278925 - DNA, 981 bp, Morganella morganii
atgtcaattaagaaactcgaagatggtcgctatgaagtggacattcgtccgactggccgcaacggaaagcgtgtcagacggaaatttgataagaagtttgaagccgttaattatgaacggtacgtgatggccaaccactcgaaagaatgggcgccgaagttaaccgacaatcgcctgttaagcgaaatagcgcaacaatggtgggatttatttgggagtcatctcgatcatggacgagatcaaaagaacagaattgatatgttttgccgcgtgatgtcagaccctgcaacaccaaaaatagacaaatcacttatatcccagtattgccagatacgcacggctcacggggtgaaagcgtcgtcgattaatcgtgaaattaccgcagtgcgcggcatttttacgtatttaattgatgctggtctttatctcggcgaacaccctttcagcggttataagaagctgaaagagcaggccacggaaatgtcatatctgacggatgatgatgtcagcagattgctgactaaccttagtggtgatgattataacattgccgttctttgcctcagtaccggtgcccggtggagtgaagcaaccaggttaaagcgggaacatgtgattcagaataaggtacgttttacatttacgaaaacccgcaagcctcggattgtaccaatttctgatgatgttgccgacatgatatgtgatggtaaaaacgggctgctattccctgatatatcgtatcagcgcttccggaaaattttaaaggaagtgaagccgacgttaccgggcgggcaggcaacacatgttctgagacacacgtttgcaacgcattttatgatgaatggcggtagtatcctgacgctacagcgattgctggggcacgctaatttatctcagacgatgacatatgcacactttgccccggattttctacaggatgcaatcgaccttaatccgctgaaaggcaaatgtcgcatttag

SEQ ID NO: 278926 - DNA, 225 bp, Morganella morganii
atggcaggcctgaactacgcaacttatcacggttatgaaagcgataaatcgaagatgacatttgaatccggagtaaaaatattttctactccgttattcagaaaataccgcgactggttcatgttcgacgaagttaatcctgaagctggccaaatagcaccggccctcgcacacaatgggcacgaagaaacaacgtcaccccgctcagacaagaaaactggttaa

SEQ ID NO: 278927 - DNA, 297 bp, Morganella morganii
atgacaaaggaaaacgtaaaggttgccgctgcattgaaagcaggttctgcggattatgtgaccgaagcccggtttgcagaaatgatcggcaaaacagcgcaggctgtttctgatatgcgtaaggctgggaaattgccttatgtggaaatgaaaaacccgaacgccagtcgcggcgaatattacattagcgtttcagcatggaatgagggtctggatcttgcacgtgccaccctgcccgacgaaatccgaaacggctggcttgtgtggctgggtctcggtaaaccgcaggttagttga

SEQ ID NO: 278928 - DNA, 198 bp, Morganella morganii
atggtcaggcaaatcagcacacacagccaggaatatcgcggatttattattatcaccctaccgcgtaacgcgacacggaaaataacgcagtatcacgtcaccttgtctgatggagctgatagctgtcattcgtttgggaagtttgacgcactggcgcaggcgacgggttttatagattcattgttcgataagaaataa

SEQ ID NO: 278929 - DNA, 396 bp, Morganella morganii
atgcgtgcaacggctgaattaattgatattacatcacagttacagagtggagatattaatcattcgctggctggcgttaagagttacaagaataacggtatgtcattttctgaaaggacagaaaaactaactgaggtcggagcattgcggacaactgtttttttcaaaaacaaacaggataatccagataatagagaactagccggatttcttgaatatatgcggctgtcagataaacgaatgttagacatgattttctttcttgctgaattgggtaataaagaaaggaaatatgcagacctgacaaaagaggaaaaacagcaattaattattgctattaataaaataaagtcactaacggcattaatgccgaaaaatatttcatacccgatttaa

SEQ ID NO: 278930 - DNA, 576 bp, Morganella morganii
atgaccactaaaaagacgacatactacctaggaatgtttcgctctgattacgcagagttttttccgtgtcagccgtcattatccatacaggatttattttacccgccagtaatgagccaagaaaatcgcccatgttgtcctgcactgcaaaaacgtctgtccttgcaggagctgcttccatttttccttccgagaacagaagaacagtctgtttcgacgccagaatcgaattatgaatatctgactctagctcttccttcgtgttccagtatgccgattcgcttgtacggtaatacacacaattgcggaacacgttttggtattcgcgctgtattagcgctgtccattctccgtgctctgtccacttatcaggacagctttgttttagaagccgggccaactcatttcgataatcttctgatggaatccagcgctcttttatccggcatgaagataaagccaggaaagcgtcgcaggcacggagcatatcgaatgttgataaaagccttacttcgccttgaggcgcagctgacggagtcaaaaaagcagggttccggacgggtggaagcatcatga

SEQ ID NO: 278931 - DNA, 813 bp, Morganella morganii
atgattgaaaaaactattttgaaatgggcgggttcaaaaatcggcattatggagcagttgcgccctcacctgccaaaagcaaaacgtcttgttgagcctttcgccggttcctgtgctgtgataatgaatactgactatgagcagtatttaattgcagatgtgaataacgatttaatcactatgtatcaacaaatagcctcagataatattgatgaggttataagaaccgcatacgatctttttgaattagaggctgttgagtcaggctattatgtagagcgcgatttttttaataaaagtaaacgtgtcttacaacctgaatttatcgcagcatattttatttatttaaatcgccactgttataacggactctgccgctacaatcagaaaggcagctttaatgtaccgcgcggaaattataaaaaaccatacttcccggagaaagaaatccgcgcatttgctgccaaagcagtaaaagccaacattcagcacctcgtatggcaggacacgttatcgctggtcgattttggtgacggtgtgtattgcgatcctccgtacatgggaaaaagctttactcagtatcacactgacggttttaccgatgcagataatgaagcgctggcctttgccctgaaagatttgaatgatattcagggcaacccggtaacggtatcaaattcactggcggcaaaagagctgtatgcggatttaggcttcactatccacgtaatagaagcaccgcgcaccattgcggctaatggtaaccggaagaaagcacctgaaattattgctgtgctgggtggttgccaatga

SEQ ID NO: 278932 - DNA, 735 bp, Morganella morganii
atgatttcttataaggaagtagtaagtatacatgaatatttaacaactcattacgatgaatcagaagacccgatttctcctcctggagtaaaagatcaagctttattagagtcagcaattgcaagaccatttatgactattaatggcaaagatgcatatcctgaacctatagacaaagcggcagcattatttcatggcataatatgcaatcatacattttttaatggtaataaacgagttgcacttttgacaaccatatgttttttagattccaatggttattggttggataaatgtgatgatgtggagttatatgagtttactaaaaaaacagccgcacatgaaatagcatctgatcggaaaaatgaaattaaaataattaagagtttcttaaagaaaaactcaagaaaaagaaagtatgatgaacaacagttaagtattcattctttaactcaacatttaaataacgcagggttcaatatcgttgatgagggcgattattatgtaatatataaaaacaaaaaaagatatacaaaaattataaagaaaggtggtgcaggtaaggaacattatgatgctccatatgttaaggctctgcgaaaaaaattattacttacgccaacttatgggtgggatagtatgcgattctatcaagcctcaccatcattaacagacaatattggggaatttcttcgattacggggagaagtaatgaattggttggctaaaacataa

SEQ ID NO: 278933 - DNA, 1020 bp, Morganella morganii
atgagccgcagaaacaaaaacaaacagcataaacaacagaataccggcggcgtggaggcgttcacgttcggcgagccggtttcggtgctcgacagccgcgagatttatgattacctggagtgtgtccggatggatcactggtatgaaccgccgctcagttttaacgggctgtccaaagcgttccgggcagcaccccatcacagcagcgccatctatgtgaaacgtaacatactgaccagcacctttattccccacccgctgttagaccggaaaacctttgacagcttcgcgctggattttctgatgttcggcaatgcctacgttgaaacccgttacaaccgcctcggcggcatcctgcggtttgaccacgccccggcgaaatacacccgacgcgggattgacggggatcagtactggttcaccaaatacggctatgagagtgaaccgtacccgtttgaacccggcgcggtatttcacctgattgaaccggatgtgaatcaggaactgtacggtctgccggagtatctggccgcactgccgtcaaccctgctcaacgaatccgccacgctgttccgccgccggtattatcttaacggcagtcatgccgggtacatcatgtacatcagtgactcgtcacaatcaccgggtgatatcgacaacatccgtaaagcggtacgcagcagcaaaggacccggcaacttccgcaacctgttcctgtatgccccgaacgggaagaaagacggcattcagatcatgccgctcagtgaagtcgccgccaaggatgaatttctgaatatcaaaaacgtcagtcgtgatgacatgctggccgctcaccgcgtaccgccgcaactgatgggcatcctgccgcagaacaccggcggcttcggtgatgtggaaaaggcggcaaaggtgtttgtccgcaatgaactgatgccgttgcaggccaagatgaaacaacttaatgactggtgcggtcaggaggtgatccggtttgaggattaccggctgccggatgattaa

SEQ ID NO: 278934 - DNA, 159 bp, Morganella morganii
atgacaaacgaaaatttcagctttgaagaatggtatgcttttttatctgagtacgcggcgcaaaaaggaggagcggcggcagatgctgatgcatggcgtgatgattatgagagcggcctgactcctgaagaggcatggagagaagcttggggtgattga

SEQ ID NO: 278935 - DNA, 699 bp, Morganella morganii
atgaagcgtaatattgatgatttcgacggaatgaaagattttattatcagcgttattactgtggtggcttgggttttaataggcgcgattgtaacaatagggtattttaccattgagacaaaaggcgaaagtgttatgctttcctttgtatcaacaatatttaccattatttcatcactaggaatcgcagcaactataggtgtttatttttggcaacgtaatgacactaaaaaaaggcaaaatgaatatgataaaaacttcttctcagacattaaatctgcagctaaagaactcataaatgcaagtaaaagatataaaaacgcatttgagacaatattgaaaaactatgataaaacgcacgacaacataataaaactcaaatcatactcaactttaataattaaagtcgagcgtggcaccgctttaaaaaaccttgcatttgtaacaaactgcgaaccaaccctagatttagaaaaaacaagaatggaccctgcattactaagtaatgaaaaatataaattttataatgaggcaaaattaacacttaaagaggtagatgattttataaaaggatttattttagataatgaaaactccctaccagtttatataccttttgatgaaaaaatgattttttatataaaaaataaatattgtgaatacataactaagttagaaagaatagttaatacagattaa

SEQ ID NO: 278936 - DNA, 159 bp, Morganella morganii
atgacaatcggatttgtattactactggtaatgcacggctctactgtgcctattaccgatgatatttatacgctcgaagaatgtgagagcctcgcagtgcaggtaaaggctgtgcgggatgttgacgtgatttgcggggaggttatccatggagagtga

SEQ ID NO: 278937 - DNA, 210 bp, Morganella morganii
atggagagtgaactaatcctggtaccaaaggatttattggaagaattagcatctgaatatcaatcaaaaatactttggtttatgcaggcttatagcggttattacaacatagtcggcactcgctggaaccgtgattataacgattatatcgataattttaatgccaccgctgagttattgggctggggtaagatggagaaaatagaatga

SEQ ID NO: 278938 - DNA, 339 bp, Morganella morganii
atgaaaaaatatcgtgacaaatcagacccagggattaataaggctgtattcgtagcagcaaaaattaatcatgacgataccgacctgaatggtagcaaagtgttttattacaatggtgctaaatggattgagttcgacccatgcaacaacccggcggatgcaatgccgattattattgagaatggaatatgcatgaattatatctataaagatattggttggggcgcatatcattttgatgaagaaaaaggcgagctggaaatttacgataaaaattattatcgcgcagctatgatttgctttctaatcatgaaggatgcggagaatgagaaagtatga

SEQ ID NO: 278939 - DNA, 1629 bp, Morganella morganii
atgagtaatgaatttgatagcaataaactggaaaattgtttcgatctcgcattagataatataatcagacacggagatacagatatttttccttatccattcgaaagccggctatttgaagaccgcaaggaaatcgtgaatgctgcattaatgcaaatatttaatgattttgaaaataaaaggacagaagttccaccgaatatgattaatagcttttctagtattggctattatggctacagatgggcgactcaaattgatccattctggaatgcattttttctaggccttgttttaaatataggcgaagatatagagaaaattaggtctgctagcactcaggtttattcatatcgtttcaaacctaaccccgcagtgggtgctatttttgataaagatatttcatggagaaaatatcaagaagacagcattattgaatgcactaaagatgaaataaattatgttcttacatgcgatatagcagatttttatccacgaatttaccaccaccgtctagagaatgcattagacagaatcgatcctaataaaaaatatgctgggaaaataaaaaaattattacaaacatttagtgagacaaaatcatatggagttccggtagggtgccctgcatcaagaatattagctgagttagctttggactctattgataaattattatcaatgaatgggattaattataaacgttatgttgacgactttattatcttttgtgactccagagaggatgctcataaaacattaactttgcttagcaaaaaattgatggaaaatgaggggctgactttacaaaaacataaaaccaatattgttactaaagaagagtttctttcagtaactaaagctaaattgcatggtaatgatgaagatgaagaatcacctatgaaggctaaatttatgagcctgccaataagatttgatccttattcagataacgcaattgatgaatatgaagaaattaaagaatctttaaaagatttcgatctattatctatgctgagtagcgaattacaaaaatcaaaaatcaaccagtcctttagcaaacatttgataaaggcattctcagcaacatcgaatgaagttacaagtagtgctttcaaagtgatgttcaataatttaaatgaattgtatccaatatttacaactataatccaagtagctaattctaactggaaaaaactaagtgtagaaaccaaaaaaatcatccttgataaaataaattcacttattaaagaagattcatatatcttaagtactgaacttaatttggcttatgtggctagaatgttatcaaaagaaaatactgaaaaatccacgctaattctgagtgaaatttataatcgcaatccacaaagtattctagtcaaaaatattgtgactcaatcaatggcaaaaattaattctcatgcgtggctttctgatatcaaaaagaattttgcagggatgcatccgttacaaagaagattattgattgtttccagttatttcttgggggatgaaggaaagcattggagagagcacaataaaaattcatttaattttatagaaaaaatttacagagactgggcaagccaaaggcaaacagcaagaaaccttgaggacgcactatga

SEQ ID NO: 278940 - DNA, 741 bp, Morganella morganii
atgatctctgaattaacattttctagaaaatttacttcattctggaatcaattacttccaaacgctaataatttcatacgtatcattaatggcagtcttatagaggatatctatcctcctctagacaatagcgctaacagagtaaataatgtttttgttaatgaatgtgcatttaacttgtattcagctatacaaaataattcaatagacaggaatataatttcagcacaagacttatttcaccgctcagaattccaagctatttttgaacagactaaagagtatttaaagaggttcagttacggttctaactttaaattacctttgagtatggccgagtatcatacaattagggaaatagcaaataatatcttataccgttatggtatgataaatcaagttgaagtatctccgcatttcgatgggtgcggagttataaataattcacatggtgatatttgctattcaaatattcttatcgaaataaaatctggagatagaaaatttagtgtatatgacttaaggcaagttctcatatatttcactttaaatttttattcaaaaaacaaaagaaatattaataagtttgagttgtttaatcctcgaatgggaattgtttatagtgattatattgtcaatctctgcaaggagctggcatttgttcaaccggaagaattatattttgaaattatgagttcaattacagagggtgattttatagagactgaaatgcaacgatag

SEQ ID NO: 278941 - DNA, 270 bp, Morganella morganii
atgaaaaaagcacgttttaccgagtcccagatcgtcagtattttaaagctggctgactccggcatgaagatcgacgaaatttgccgtcagaacggtatcagtaacgccatatattataattggaaatcgaaatacggtggcatggaagctgcggatattaaacggcttaaagagcttgaagatgagaatgccagacttaaaaagctgtttgcggaagtcagcctggaaaaccatgctatgaaggagctttttgcaaaaaagggttggtga

SEQ ID NO: 278942 - DNA, 369 bp, Morganella morganii
atgaccgaaaagaagatctgcgctaaggaattaactcaggcaggtttatcggtcatggtcgcctgccggttagtttcactgctcagaacctctttctaccggacaaacactgactggaaaattaaggatactccagttattgaagcgatttatgctgagctggaattatcaccacgggctggattctggaaatgttttcaccggatgcgacagaaaaagtattccttcaatcataaacgggtttaccgggtatattgtcagctgggcttaaacctgaaacggcgggtaaagaaaaaactacctgagcgaataaaagagccgttaattaccgcaacccgaattaatgaaagctgggcaatggatttgtga

SEQ ID NO: 278943 - DNA, 249 bp, Morganella morganii
gtgagcgacagtctgtactgcggtaaacgtttcagagcattgaatattatcgatgaaagtacccgcgagtgcctggcaattgagatagatacttcattaccggcagagtggattattcgtattttatcccggttaaaacaagaacgcgggctaccggaatatatccgggtggacaatggacctgaatttatatcggataaactagttcagttttgtacagaaaatgaggtcactctgaattatatttag

SEQ ID NO: 278944 - DNA, 774 bp, Morganella morganii
gtgggactgactattcagggaaataatgttctcgttgaccattcgcatacagactggctattaacccgcccggaagaaaaccctgttacagagaaagctggtgaccttatcatttactctgtttttaaaagaaaaaaattatctaataaacaacggcataataagcaacaacgacgtatcggagataactgccccattctctacgcactgaaaggtaaggatgcactgacaaccaatatcagcagcattaaaaaattaaagtggagcttcgatagtattgcagataaaatcaaagaaaaagaaccggatgggtttgatatggtcctgccgatgccatcatcatacaacatcagttatataacaggaaaacgatttgctcgttattttaatacgctgtactcccccgggtttttaagaaaaatttcagtaaataaagctattgatatattgaatagagcaactttaattcaccatgacaaaaagcggctgcaatttttgctccggttacaacaaaaagaaaatggtaaaaatgcgttgttttcactgaaaggtatcccgacccggtttcgctatattttttcacccgtagaaatctcaccgtctgctgactatagcggggtatctccggggcgaattcttattgtcgatgaccttttagcgaccggaacaaccctgatatccgccgctcaggcaattcaatgcctgttttcttcggcggagagccgcgctgcatgtcttttcagctcactcagcgaaaatcttgaccccgcgtaa

SEQ ID NO: 278945 - DNA, 504 bp, Morganella morganii
atgagaaaaaaatttggcaactctaacgcgcaaaaattcctaagaggatttgaggggctggtcagccttgattctgcggagtgcaatctagctaagaggtgtaaatttaatttttcttattttatgaccaaccagaaggtttgtggaaaattgtctgattgggataaggcaactatatgtgacttttttacaaagttaatagattattcctcgaagtccttaagtgaacttcagatgattggtttaggaaaaaaccggtataatttactttccatttatgattcttatcccaaacaaagtcgttttgaacagcctcggaatataccacatcaggctaggtggggacggattcggttagatcaaaataaaagattgattggttttgttgtacctgatgaatatcatggatgtcggcatgaaggtaccggcatgctttatgataaaaatacattctatgttgtttttattgataatgaacacgggttttatcctctaaaaaaataa

SEQ ID NO: 278946 - DNA, 1140 bp, Morganella morganii
atgattttaaattttggcgcgaaaaattttttcagcttcaaagaagggtttgatatatcctttgagctaagtaatacatgcccaaaagaaatttcaaggggtaaaaatgtaactaatatcctttgtattaagggtgcaaatggctctggaaaaaccaatatattaaaagcacttcattttataactagtttcattactagttcttttgaattaaagccaaattcatatttgcagtttgatccttactttacaagtaaggatgagtctgaattttatataacatttacattaaatgatataatatatagatatgaagcttcaatgacagatgttgaagttaaacgtgagacgctttacaggaaaagtaagagagagactaaagttattgaacgtattaatgacaccattatatttgcagttaaagaatatgaagaattaaaaaaaattaaaatgcgaaaaaatgtttcattatttagcatggcaatgcaatatgatgtcgattgcgtcaaattaattcatgatagttttttacgtataatatcaaatgtaagatattcaggattattaactgaagtacatgagttggaatatctgaatgaattttattatgataatcctgacgtttttgatttttgtaaaaaaataataatgaagtttgatccatctattcatgatatttatatagctaaaaatgttagtgaagatggtaaaaccacatatacaccttggtttatttttgaattcgacgaagagtctgatatcttgggtttcaatcttcaatcaagtggtactaaatccttatacagacaattaggaagttataaaattgtcctatctataggggggatgctagtgcttgatgaatttgatataaatcttcatccgcatatattaccccatttactagatatctttatcgatgaagaacaaaatccgtataatgcgcagttgatttttactacacataatacagaaattctggattttttagggaagcatcgaacttatttagtaaataaaaataatactgaaagttattgctataggctcgatgaaatcccaagtgatatcctgagaaatgataggcctataagtcctgcatataatcaaggaaaaattggtggggttccgaatttatga

SEQ ID NO: 278947 - DNA, 285 bp, Morganella morganii
atgctccgtattgaagttattttcagcagcaaccaaaaagagatgatgcctcctggcacatttgaagctctggaaaaggaaatagaccgaaagctacgggctcagtatccggatatgaacgttcgtattgcgtggggaaccaatgcgtcgatgtcagtaaccggtgggaaaaatgataaagacaataaaaaaataaaagagatactacaggagatttttgaggatggcagttgggtgcctgaaatggaaggcgcctctgatgatgtagaatattttgataagtaa

SEQ ID NO: 278948 - DNA, 330 bp, Morganella morganii
atggaatatttattgatatttacatttagagacttaattgcctttgtgattcctgcttttattgggatgttcatcttcattagaaggcgtaaacggaatgaagtcagggtaaactgccttttgctttggctttttttaataataggctctttttcagatatattttcaaccatttacacagaatattcctatagtcacttatattataatgataggccaactactatttttgattatgatcttgcaaggattgctttttttgtaattgtcatacttgtttctgccgttcttttttttcaggaactacgtttaaaaaaacacgttcattga

SEQ ID NO: 278949 - DNA, 537 bp, Morganella morganii
gtggcattcgacagcaatggatttttgaaaaaatcctcacctgtcattgttattcactctgacggtaactacgaaaccaacgacgaatctgaaggtgcggaagtccgccgtaccggcaccggccagtaccacattaccggtatcctgggttataactcagatggtgcatggggcgtaaacggcggtatttcggtaccgaaagataataacggccttgagttggtttatgtcgatgaccgcgtacaggaagacggcagtattatcatcgaaacctgtcaccggcagcatgcgcatttgccggaacgtttccagaactggcgactgaaagaggtcaccccggaaggtgagcgtgttttctggcaggacggcgaaccgtgtgatctgccggaatccacccgcctcgatgtgcgtgtggaaatgccgcagggctcagtgtggaatgtgaagcagcgtgaactggctgaacagatggagcgtgagcaggcagaacgtgaagcgcaggaagcagcagagctgggcgcagatacagaggaataa

SEQ ID NO: 278950 - DNA, 702 bp, Morganella morganii
gtgtttactcagcttcgctatattgccggtacttttgtagtgatcggcctgatcatgctgctggctgcggccggtcttgcataccagacttatcaggaagagcagagccgtatcatcaccaccgggctgattaccgatatcacccgttcgcgctcctatgaaaataaaccggttttctgcccggagatccgccataccgccggcggggaaacctatacattcacctcttcacactgtttcaacagccgcaactactatgccgctggtgactttgctgacattgcttatgccccgggagagccgcagaatgcggaaatacactcgctacccgcgctctacgcctggccaatcttttttatctttatgggcggcccttttgcactgattggctcactgccttttatcattatggcggtacggaaaaaatcaggaaaacacctgttgcaggcaggaacacctgtcagagcaaaaattacgggggtgatttccaatacaacaatcagtatcaacggccgcaatccgtaccagatcgaagcgcagttacataaccccgccgacaacaccctgaccttttattacagcaccaatctcggctttgatccggcaccttatattcatcaggaatatgcaacggtatatctggataaacggaatccccgtaaatatttcatggatatttcgtttctgccgcgttcggaataa

SEQ ID NO: 278951 - DNA, 543 bp, Morganella morganii
atgcatacaggtactggaagccacgggacaactaggtctagagctgattctatttgttcgtcagggtttatacctagcgaaataggtcgaaaaggtagtggcgtgtacttttggtatgcggaagaaatttgttgcgatgaggcaagaaaacttgccgttgcatggtacgaatcagagctaaaaagagggaactattcatcagatcaggagcaacgttgcgcagtattgtgggcagagttaacctgtgatgaagataatcttcttaatttgatgaaccctgcatatcgttcatacattcgacggcttttggagcagcacgttgttcctatggataaacagttaccagaagacattatatctagtgttcatgatgtatttatcaaacagattgcacaaaaaaaagcagtagatatagtgctggcaacagtaactgcgccaaaaatgtctgataaattgaaagtcgctgtaggggaaccattcgcatatattgtgaaaaacctagagtgcataaggttaaatcccgtattaacggaggttatgtaa

SEQ ID NO: 278952 - DNA, 303 bp, Morganella morganii
atgaaaatgaccatggaaaaagcaatggctttagcctttgaagagctgttagccatggattcaaatgattttgttaatgagctcattgcacatagagacggtgatgtcgtatctctactgaaatctgtatgtggattacatggggctcataattacaaggttttttctacaatgaagttacgtgaaaatgccccaatttcagtaacttctattgaagtctttaaaaaaatgctacttgattttgacagttggcagatagatttagaggcagcaaacgatagccattatctgatggcagcttaa

SEQ ID NO: 278953 - DNA, 456 bp, Morganella morganii
atgggaacattcaaaacgcacccaattcagatcgcctccattcatgtcgggaagttgtacattaatgtgaataacccaatggcgtttgaggatgatgcagaaagttatagcaacaattttgatctcgaggttgcagtttctgattttgatgatgttgatcgcctgatacatgtcagactgcgtgccaaaattgggattataaatggtgagggtagcgatgaattcattgacgataaagagagcccgattaacctgatggtagaacttcgtggcgcattagaagttgatacagaagcgtttcctatggataaattggagcacttttcaatgtataatgcaccattattaatctacccttatcttagagaacatgttatggggttaactaccagagctggtttgcgtggtttgatattgcctttatttgaagttcctccattcaagcttcaaaaatag

SEQ ID NO: 278954 - DNA, 255 bp, Morganella morganii
atgaatacaacatttttattaatggctgagtacgaaacatctcagatcccgctggcagtagttgcaaaaaaattcctgaatctgacagaagcagttgcagacaaaaaggctaacctgggtgagcttccctttccagtttaccgggacaccaccagccaaaaatcgatccgtatggtacacgttagtgatctggcagaatggattgataaacaaagaaaagcagctcaaaccgagctgcttttaataagatcataa

SEQ ID NO: 278955 - DNA, 843 bp, Morganella morganii
atgtcatatatagcaaccagtaccggaaatcatattgatttcaccaatatcactccggctcagatttgtatcgaagatatcgctcgcggcctgtcgaatgaatgccgatttgctgggcaactggaaagtttctattccgtggctcaacactctgtatatgtcagccagattgtaccgccggaatatgcactggaagccctgctgcacgatgctgctgaggcgtatatcaaagatatcccctcaccgctgaaagccatgctgccggactacaaggccgtggaaaaacgtattgaagcggttatccgtgaaaagttcggcctgccaccgataatgacagttgatgttcactatgccgatctggtcatgctggcgaccgaaaagcgggactttgaaatagaccccgtcaaccactggccgatactggattcagctccgccacatgatgacatcattatccagccactgacaccaccgcaggcatatcaccagtttatggcgcggtttgaaatgctgatttctggtaaacaacaaaaaactatttcatacataaaaccagaacgcgatcctgatggttactgggtgcatccggatgttccctgcctggaatccaatcaggaagtagagcagtggtgcgatgaaaataaccttgaatgccgggcagtgtattgccgtgacgacattgataacttccacccagtgtggttcagctactttgaagaaggtgataccaatgtttcagcgtgggaaccaacaaaacccgatggtgatggctggtttatcgtctggatagcagacaatgaagacggcccgatctgtatgtgggtcagacctaaaaacctctaa

SEQ ID NO: 278956 - DNA, 828 bp, Morganella morganii
atgtctaatttagacggaactgctatttctcagattcagaatatggccgttgcttcattaagtctggatgctgtaaataaatcactctgccctgctgtggttttaccgggtgatttcaatgttaaaagcctggagcaattacaggaaggacgctaccgcttccgtggtgcaatggatacaaccagtatcactgattttgtgaagtattccctgcaacacggtgttgaggaaggtgtcagctgctttattgatgctgatgagatgagtgcaaaaaccatcttcaatatcggcaccatcggtgaaccggggcacgctgataatacagccgtggtatcactgaaaaagacatcaccttttgcatcactgctgaatattaatggtgatcgcctgagtcagaaagcactggcagaatggctggaagactggcgcgataacctgatggcctttgatgccgaaggtaatgttattgatattaagcaggcaatcaatgctgtgcgcaaaatcaccatcgaagcaagccgctccgcagatcatgaagaccgtgattttggtgccagccgctcagtaatggaaaatgtggaagcaaaaagccgtgacatcatgcctgcggtattccagtttacctgcacaccatacgatgaactgtctgaacgtgctatcaaactgcgttacagcgttctgaccggtggtgaagtacctgtgctggtactgcgtattgttcagctggaaaaactagaagaacaaatcgcccaggaattccgtgatctgctggctgataaattcgaagaaactgaaatccagacctatatcggtaaattcaaagcataa

SEQ ID NO: 278957 - DNA, 363 bp, Morganella morganii
atgagcgaaaataaccgcatgaccagtgtaccggactttctctccgagttagacgccggtgtgtttgaaaacaaactttctgctgcactgaatgaagtcgctttcggtaccaataagaacggcggaaccggtgaagtgcatgtgatttttaaattcactcagtcagatgaagaccgggtgaagatatctcacaaactgaaaatggttaccccgaccaagcgcggtaaaaaatcggaagaggatacaaccgaaacaccgatgtgggtcggtaaaggcggaaaactgactattctgccagaagaccaggggcagttatttggtattgacggcagtatcgacgggaaattaaaagccattaagtaa

SEQ ID NO: 278958 - DNA, 210 bp, Morganella morganii
atgcaagcagaaccaatcatcaccaccagcctgtcagtcgacgaagtcgcagagtggatcactgaaaaggcccaagcctttaacaaactacagtcactccgtgctgagcgagaaagagagattcgagatcacgagcgcacgatggctcgcctcgatgaagacatcgccagatgggaagaccgctgttctttaacagtacaaccgcagtaa

SEQ ID NO: 278959 - DNA, 648 bp, Morganella morganii
atgaatacgctcggcgaaagaatcaaatttagaaggcgccagcttaagatgacccagagagatgtagctgagcgtgtgggcatttctgcatcagctgtgactcagtgggaaagtgattccacaggagtgtccagtgaaagccttttaaaactatcttcagtacttcgttgctctcctcaatggttacttttaggagagggagaattagatctcccatttccgccatatggaaatagctatgcacaaatccctgtcatttcatgggttcaagcaggatactggactgaggttattaaccagccagacactcattctcttaagtatattgatacatccgccaaagtaagcgccaatgcctttgcgttgatcgttaagggccagtcaatgacatctacatctggtgagctcagtattcctgaaggggcaatcgtggtagtcgagcctgagttcggatttgtcgatgatatgaataataagataattatcgcgcaattgagtgagtccaacgaggctactataaaaaaattcatcatagatggtcccaatagataccttgcccccttaaacccccaattcaatccaataccagttaacggtaattgtcgactcataggccaagttaaacaaataatcataaacttagactga

SEQ ID NO: 278960 - DNA, 465 bp, Morganella morganii
atgaagaatgaatcactgaaagaagtcgtaaaaaagatgtgctgcgccatgccgggtgggcgggaagcgctggctggtgcactggggatgtcactgacgacattcaacaacaacctgtacgagaagaacggctgccggttttttgacaatgacgaactggaagcaatggaagacctgaccaaaacccgtcacctggtcgaatatcacatggatcggcacggtattacgccgatgcaggacatagaccctgacaacattgatcaggttgagctgtttgatatccgcatgacccttgcggcggcacaggcagagctggaattacatattaagaaaagcctggaagacgggaagttaacccgtgatgaggtcagggggatttataaaaaatcagggaaagtattttcttactttttgggatttgtcgggagtcttgacgctgtattcggggttccggatgaaaagtga

SEQ ID NO: 278961 - DNA, 219 bp, Morganella morganii
atgatgaaatgccctctctgcggccacgccgcgcacactcgtacatcacgcgagttcacgaacgaaactaaagaacgttacaaccagtgccagaacatcaactgcggcgcaacgttcgtcagtcatgaaacgtttgtgaaatatattacgaagcctaatctgattaatgaagtgatcccgcacccagcaggcggacttcaatcacaacttattttttga

SEQ ID NO: 278962 - DNA, 1107 bp, Morganella morganii
atgacagaatcattcctcacgggtgttgaaagcacccctgactatgccctttccgccggaacggtcaatatcagtgatcgtattcaggggcggcttatttccctgtcaatgacggacaaccggggctttgaggctgatcagcttgacatcgagatcgatgatgccgacggcaaaatgatgttacctaagcgcggtgaggtgctatccctgcaccttggctggaagaatgaaccactgatttttaaagggaaatttactgttgatgagattgagcacagcggcccgccggataagctgaccatacgcggccgcagtgctgatttccggtcaacgctgaacacaaaacgtgaaatgtcttaccacgataagacactgggcgacatcatcacgaccattgccaaacggaataatgttgagccggtcatcagtaaagacctgtccggaattaaaatcgcccatattgaccaaaccaatgaatcagacggctcgtttctggcccggatcggtaaacaggaaggtgccattgccaccattaagaatggacaattattgtttatgcctcaggggggtggtaaaaccgcatccggccagcctatcccgccactgctgatcacccgtgcgattggtgacggctaccgcttctcactggctgacaggggcgcatacaccggtgttgttgcctcatggctcaacacccgcaaaccgaagaaaaaagatgaggttgcagtaaaacgaaagcggcgaaaaaagaaaaccagccctgagaaaaccaaaaaaccggatgaaccgcagggcgattatctggcaggggaagaaggaaacgtgctctctctctcgcacacctacgccaacaaaaataatgctgaacgggcagccaaagccgcttgggaaaaaatgcagcgcggcattgcttctctgtctattaatctggcacgcgggcgggcagatatttacccggaaatgccggttaaggttcgcggctttaagccggaaatcgacggcgcagagtggattttaacgcgggtgtcacattcgctgaatgacaacggatttacatcggcgcttgagtttgaagtgaaaatcactgatgttgaaatgcgtgactga

SEQ ID NO: 278963 - DNA, 489 bp, Morganella morganii
atggcaatggcagcactcgggctgtttgtctttgaacgccggacagtcccgtttcagggaatgcaggaagaaaaacaataccgtttcgcttataacaaccgcgtcggaaagcgcccgtcatggcaatatgtcgggccatccaacgacccgatcaccctgtcaggtaccctgtatccgtcattcaccggcgggcggctctctctgctgactcttgaactgatggccgaaacaggaaaagcctggtctctcatcggcggtgacggcactatttacggaatgttcgtcattgaaagtatcagcaaaagcaaaagtgagtttttcagtgatcatgctgcacgtaaaattgatttcactctaaaactaacccgcgttgatgaatcgctctctgaaatgttcggggatatcagtcagcaactggatgcagccgctgccgaactcagcaacctgggcacaaaaattactgacgggatcggaggactgttatcatga

SEQ ID NO: 278964 - DNA, 309 bp, Morganella morganii
atgactgaacaaactgtaaaaacacagacaaccgtggtattggatgagccaatcagacgcggtgagactgaaatcagagaagtggttgtacgcaagccgaactccggcgcactgcgcggtgtccgtttacaggccctgcttgaaatggatgtgaattacatgaccgacgttcttccgcgtgtcaccactccagcgctgaccaaaccggaaattctggcgatggacccgggcgatctgctgaacctgtctgttgaggtggtgaattttttgctgccgaagtcgatgcggacagactaccagaacagctga

SEQ ID NO: 278965 - DNA, 516 bp, Morganella morganii
atgggattacctcgtaaattaaaaaacatgaacctgttcaacgacggcgagaattatcagggcgttgttgaagaagtcaccctgccgaaactgacccgcaaattagaagcgtatcgcggcggcggcatgaacggtgctgttcagattgatatgggtatggatgacggcgcactggatatggaaataacgctcggcggtattgaggcgcaaatctataaacagtgggggatcgtgcaggttgacggtgtgcagctgcgctttgccggtttttaccagcggcaggacaccaaagagtcaacggcctgtgaaattgttgtgcgcgggcggctctcggagattgatccgggcagtgccaaagcgggcgaaaatacgcaggttaaattcagcttcaaaccggcctattacaaactgacatgggacggtgctgatctcattgagattgatgtcgtcaacatggttgaaaaagtggacggcgaagaccgtatgtctgatgaacgcgccgcactcgggctttaa

SEQ ID NO: 278966 - DNA, 1173 bp, Morganella morganii
atggcacaagattatcaccacggcgtgcgtgtcgttgaaatcaacgaaggcacacgccctatccgcacggtcagcaccgcaattgtcggcatggtctgtaccgctgatgatgcggatgcaaaacaattcccgctgaacaaacctgttctgctgacagatatccgcgctgcactcggcaaagccggggacaccggcacactggcccattctctccaggcaatcagtgaccagacaaagcccgtcaccgttgttgtccgtgttgaacagggagaaagcgaagcggaaaccacttcaaacattatcggcggttccactgacgacggacgcaagaccggattacaggccctgcttgccgctaaaacgcacaccggcgttaagccgcgcattctcggcgtgccgggtcatgacaatcaggcggtggtgtcaaaactggttactgtcgcacagtccctgcgcgggtttgcttacgcctcggcattcggctgcaaaaccattgcggaagtgctggaataccgcaaaaatttcagccagcgtgaactgatgctgcttttccctgactatctcgcctgggataccgtgaaaaatgccgaagccaccgcctatgcttccgcccgtgcgctgggactgcgtgccaaaattgaccaggagataggctggcacaaaaccctgtcaaacatcggcgtgaatggtgttaccggtatttctgcggatgtgtcctgggatttacaggacccggcaaccgatgcagggctgctgaacgaaaacgacatcaccacactgatccgtgaggacggcttccgtttctggggttcccgcacctgttcagacgatccgcagtttgcctttgaaaactacacccgcaccgcgcaggtactggcggacacaatggcggaagcccatatgtgggctgttgataagccgctgacgccgactctggtcaaagacatcattgacggcgttaacgccaaaatgcgcagcctgaccaataacggctatctgctcggcggggaatgctggttcgatccggacgccaacggcaaggacgacctgaaatccggcaagctggcgattgattacaactatacgccggttccgcctgccgaaaatattacgtttaaacaacgtatcaccgacagctatctgatggatttttcatcaaagattaagggttga

SEQ ID NO: 278967 - DNA, 429 bp, Morganella morganii
atgagtgatcattgttacagagatccggaaacaggtgatgtttatgaatatgacgatgagcaaatgactgttattaacagaataaatgcgcctgattttgataacgaaaaagaacagattccggctattttctttgaaattaacgagaaaattaaaggcatgcacaaaatgactaaaaaagaagttgaggtgcatatcaacccgcctgtgaccaaggagcagcagattgcagaaaccgaagccgaaaagcaacggctgattgccgaagtccacaccgaaacagaaatgctccgggttaaactggcacttaagcgtatcaagccagatgaagaagccctgttaatcacctggttggattatctggatctgctggaagccgtggacaccaccgatgcaccggatatcaactggccgcagaaaccgcagtaa

SEQ ID NO: 278968 - DNA, 1302 bp, Morganella morganii
atgacagcaaagtatttcgctatcctgacgaactacggcgcggcacagctggcgaacgctgtcgcgctgggtacgcagatgaacatttccgcaatgggggctggtgacggcggcggcacactgccggttccggacccggcacaaacaacgttaatccgtgaaaaccgacgcgcagcggtcaatcaggtatcggttgacgataaaaacccgaacatcatcattgccgaacaggtgatcccggaaaatgaaggtggttggtggattcgtgaaatcgggctgtatgatgataacggcggtctgatcgcggttggtaacgccccggaaacctacaagccgaatttacaggaaggatcaggccggacgcaggttctccagatggcgctgattgtcagcagcacacaggcaatcactctgaaagtcgatccgtccgtggtactggcaacgcgcgagtatgtgaccaaaagtattgatgcagcaattcagaaatcagagactaaagccgcaaaaatttacgccactaaaagtgagttaagttcgggattatcgggtaaacagccgacaggcgactatgcaaccaggacagaattaaataacggcctgtcaggaaagcagccaaccggagactatgccacaaaaacagaagttggattaaaactcgacaaaaccgcagttgttcacactaccggcacatcaaaaacaaacgtaatgagccaggatggttcaactaaagcatttatgcaaataggtgctcatggccttggagtcaggtctgtcggtgatgcaaacgtaccaaaagataattccggtgccggattttatacagtaggtaatctggggttcggagacattccgccaaattcggtattaatccgtatgcagggggaggctgaccggtttatcgggtgctcaactgacgggaaaggaaaaatatttttcaaagaccatgcgctgggtcagttgctctatttgtatcatgaagcaaataagcccccgagttttggtattggttacagacataaaaatgaaaaaagtaaccgtaaaaacgatacgttatacacaaactcatcggatgaaacgatctgggtcagcgtgtcgtcaaccacaacagatgttaatggtgtgttaacggcaaccatgtatgtcgacggggaaaatatctcccggatggctattggaggcggcgggagtatttcggtcacaaaagccgtatcagtatcaggaccggtagggccgggtcaaacggtaagggtaagagtcgaaaacggtgaaattggctattggacggagtttaaaaaatcatga

SEQ ID NO: 278969 - DNA, 828 bp, Morganella morganii
atgaataccataatatttgctgttgttcttcttagtggatatttatatgtaaattcagcagtttcctcaagatataaatttaagcgttctacagggtgggacgcttatttttatgttgctgtatggggcgttatttttacaatcgcctcatggtttttgtgctcggctttaagtttattgggcttttttagatatttatataatattttgttatctaaagaaattataacgcaggaaacattaaatagagtgtttcctttatcgttatcagatacattaaaattttctgatttgaaatttgccatattttgtgttgtatcattattgatatctttcgcttttgggcagtataaaaaatggtctataaataaaaatgaagataaaaagatagatgcattggtgaatgcggtacacaatgatcctttcgaaagtatgctaatagaggcatctgtacgtagctttcctgtaattgtaacattaagctccagaaaaatttacgttggattaattatttgtccgaaatttgagcacggaaaaacagagtatattcagcttttaccattgcttagtggatacaggaaccaagatgatttaactgtaagtattacaacaaattaccgccaacattacatagataatggaatagcaagtgatattggcgttggtctgtctatttcggattttagaacgttggtgcctaaagaagaagttgaaggggtatcgttttttgatgttaatacttatactaaatttaaagcgaaagagctgagtgataaagaaaaatgtacatctctcgataattcatttatccctaaaaataaagaatga

SEQ ID NO: 278970 - DNA, 222 bp, Morganella morganii
atgtcacttgcactaggatttgattttgacgtagctatgtttaattcagaatctagattgaaaaaagttctgaaagacaacagcggccattacactatttcgaaaaatggttatgttgagttagatttaacaaataaacatgttcagcaactgatcagtgataaaattcaagagattagcgatattgaggaagaaaagacaaaaggacaggccgataagtaa

SEQ ID NO: 278971 - DNA, 2733 bp, Morganella morganii
atggagcagttaacacccatcgattacgcctatgtcaacggcgacaagtgggaatatatcggcaccggggaaccgatgccgattttcacgtataacaaaaataccaacgaatatctggccggtatctataaagaacgtcagttatcagacccggctgaaatgcaggcgtatgtatcgcagcatgtccggtcaagggcgctggaagctcacattagaaatgcggttgagctggccaaaaaagaatggaaagaagagtgtgacggatgggttaaaagcccggaaacgatagaggccagattacagaaagagccttactttatccgtgcatggtatgagcggcggctctcctggctgaaacgcagtcgtgcacaaaaacacagtgatgctttcttaacgaaaaccgttaagcaagccttattgcgtctgacagaaacacgaaaatatcacactgtccggccttataaactcctgtcagcttactatcagaatctgtatccgcatctgccgggcatggataaaccgcgcattaaaaccctcgcgaatgaaatcgccgcccgtgtcgctgagatgcttgatgctgaaacagaacgcctcggcggaatggataaagtatctgaaaaagatgtcattgatgtgtaccggatgcttgcggcggaggtgttttctctgcgtgtgaacgtgccgggatggcaggtgctgaagccgaaaaaagaccggtgcggacgtgacaaactgccgccggttgatcctgcattcggtgcaatagccagaatggtcagtgcggactggtgggagcgtcagttatggcggttgcgctgcgactggcgtgaagatttattccgcgcgagtaatcaggttcacagaaaggcacatccttatatcagtcaggacggaatgaaggaatttactgagcagcggcagcgcaacagtgagttttttcgcaatcatgagctggaagacgaagacgggaaacgcgcctcacttcaggcaatggtactcggcagcgtcagtaatccggcattacgccgcaatgagctgatgaccagaatgcagggcgttgaatttgtggcacaggaacgtggggacgttggcgtattttatacgatcacatgcccgtcacggtatcacgccaccaatcataaaggccgcatgaatgataagtgggatcatacccgaccaccggaagcacagcggtatttatctaaattgtgggcgaacattggttcaaaactcggccgcaaagggctgcgtgtgtacgggttccgtgtggcggaaccacatcacgattctacgcctcactggcatttgctgctgtttatgcgcccggaagaaagaaaagagatcacccgcatcatccacacctacgcgacaaagatggatagagcggaattggtgccggatgctcgtgcccggtttaatgttaaacggatggatccgcgtaaaggcagtgcaacggcctatatcgctaaatacatttcaaaaaatatcgatggttacgcgctcgacggtgagattgatgacgaaaccgggaaaccgctgaaagacactgcgaaatttgcgactgcatgggcgagccgttaccgcattcgtcagtatcagccaatcgggcaaccgccggtcaccgtgtggcgcgagctgcgtaaactgaataaccagcttgtatcaatcctgatgcagaacaatcaatacgaccctaaaaaacccctgttggccgataaggcaatggacaatattctcgctgccgccgatgtgggctgctgggcttcatttgttgacctgatgggcggcgtgctgacaccgcgtgaaaactatgtcatcggcatcaggtatgaagacaaagatgagccaaacgcctacggcgagatagtcgaacgcatttacggcatctattccagaattgcgggtgaagcgtcaacagtctgcacccgatccaaaaaatggaaaattgtccctaaaaaatcaggcagcacagaagctgaagaacagggcacagataccacagataaggggtctttggtttttcttggcggctttgccgcccctaggagttctgtcaataactctccgttagctgaaattttaaacaaaaatgggagaggaattaacagaacggtgctaacggctcagtgtgtgtttacggttgggaaagaaagcgtttcagagaatggcgataactcgcaaccaactaaaaaacgtaagaaaaaacatctgagtaaaaaggtattgcatgtgattactgagggtatttcgtcagtaaatactaatttgactcaggagcaggtcgaaaagctggccgcagagggcagtattgaaatcggagcagaacgttacttcatttcactgaacgggagatgcctggacaatggccgcagaaaacagccattgagcaaaccgaaaccgccggtttgtgtgccgggttcatcgccggtgacaccagaaattaccaaattaacagaccagttggatgaattacttcacctgacgggtgtcactacgccaccggaagcactggcgcgtcagttactggcaggaaagccactgattttatgtgatgaacattattaccttgaaaacggcgtgatcagggtgatacggactgctgccgcccacaaaaaacggcagcaggtagttgcagcgaggttgcaggaaaaagaagtgaagcgaggacaaaaagccgctgaattgttagaacgaattgcggttattggtcacaacaaggtagtcaatatttga

SEQ ID NO: 278972 - DNA, 156 bp, Morganella morganii
atgaatattcgctgctttataggtctgcataaatggactgctttagatgaggtttattgggatatggttgccggagtcactttcgtcgagcgtaaattaggctgcttgtgttgcgggaagacaaaagttgtaagaaggaaagttgacaatgaataa

SEQ ID NO: 278973 - DNA, 222 bp, Morganella morganii
atgtctgacgaaatcgaccgcgccaatgatcacgccgcgcttgtacttgaaagccagatagccgctgcccgtatttcagcagcgggtgtgtcggcttttgaatgtgaggcatgcggtaagccaattcctgagcaacgccgccgtgctgtgatcggctgcaccatgtgcattgattgccaggcaattgatgagctgagaaacaaacattaccggagcgtgtga

SEQ ID NO: 278974 - DNA, 222 bp, Morganella morganii
atgaaatcatttccggatccaatattcacccctgtagctgaaaatatcaaagccaaccgcgaagacgagcgcaaaaccctgatgaatggttttgctgaccgtttgcgccatgtatcgcagaagatattaattcaccgtatggcgccggagcaggcaagtttattgctcaatggtgaggccgaccgtatcgaaaatgaagcgggagagctgaaccatgtctga

SEQ ID NO: 278975 - DNA, 273 bp, Morganella morganii
atgattcaagaaaacagcaatgtgaaataccccgtaaatgcagttcctttggctaaatttgcggagttaatcggtaaaactcatgatgcggtaaagcaaatggcgaagcatggaaagcttccgattattgagttctccgacccatcaaaaaagaagacccgtgccggtgaggtatgggtaaatatcgcagcattcaataaaggggttgatgatgccttttcaaatcgcccggttgaacagcgtgatgcctggctgctgtggctgaataactga

SEQ ID NO: 278976 - DNA, 978 bp, Morganella morganii
atggcaattaagaagctcaatgatggtcgatatgaagttgatatgcgcccgaacggtgttaggggacaacggctgcgtagaatttttcttcgcaaatcagaagccgttaactttgaacgtcatgtaatgggaaatattgaaaaatattctcaagatgcagcacaggcgggaagaattacgttaagtgagttaaaagagaagtggtggctttaccacggccagaacatgaaaacaggtaaaattgagaaacggcaattaagtaaaacaatacgcttactgaatgacccgacaattaaccgaatggataaacactatcttcttactcaccgtgcgatgcgccttgccgatggtataagcgcatcgacgataaacagggatatgtacaggctttcaggaatgatatccgccctgatcaaacttgatatttacaaaggaaaaaacccgctatctgggttgccgccattaaaagagaaggaaccagagctgactttcttaacggacacagaaataaaaactctccttcaatctctcagtggcgactataaaaatatagccctgctctgtttgagcactggcgcacgctggggagaagcagcctcactccgcagcgagcatgtcaaaaatgagcgcgtgacattcctgcaaacaaaaaatggtaaaacgagagttatccccatttctggacaattgcaggcacagctgaaaacaaagaataccggtcggttattcaatgttgactacaacacgttcaggttaaagctcaaggaagtaaaaccagatttaccgaatggacaggctacacatgttctgcgacatacattcgcaagccatttcgtcatgaacgggggaagcatagttgcactgaaagaaatactcgggcacgcgagcataaatcaaacgatggcttatgcgcatttgtcaccggattaccttcaattagcaataaagcttaatcccctgaatgggggtttagaatga

SEQ ID NO: 278977 - DNA, 1368 bp, Morganella morganii
atgctggggtttcttagtagtgcaatgtcatcagcaacgcaacgatttatatcgtatgaaattggtataaataatcaagataaattgacagttacatttagaacatgtttattaatctatttcataataatagtatttattatattaattagtgaaactctaggtatttggttgctaaaccataaaataaatataccagctgaaagaatatcggctgcatactgggtcttacaaggttcactcatatcgtttattttttcaattgccagcatcccctatatcgcaaatattatagcgcatgagagaatgggtatattcgcgttattaagcataatagacgccatatcaaaattattaattctatttgttattgacagcataaattttgacaaattaaagctatattcaatattcttaagcttaataagttttattatatttgcattatattacactatcaatagagccaaatataactttactacatttagatttgaatggaatagacctgttttttttgaaatatttagctatactggctggaatttatttggaaatgttgcagccgttggtgtaaaccaaggcataaatattattttaaatattttctttggccctatcattaatgctgccagagctatatctgcacaattgaatagtgctgtttatagtttcatttcaagtttgcaagttgcttttacacctcaaattgttaaatcatacgctgcaaatgaagtagaaaggatgaaacacttggtctttataagtgcaaagtattcatgctttcttgtatatataatatcgttaccaattttattgaaaacagaaatagttttatattggtggcttggttctgttccagattacacggctaattttgttaaattaacattaattgattcaataattattagcatctctggctcacttatgtctgcctttcaggccacaggaaaaataaaagcctatcaactaataattggcactataatactactaaatattccactatcgtattgtctactatcatatggagcacatcctgactatgtatttgtgacaataattatcatatcaacaataactttgcaattgcgaatattattactaggaaaaatttcaaagactataatttctggattttataataaagtcatatttcggataattttagttattgccatatcattaccacccataatgatatttaataaaattataaataactcaattatgggattaattatgacatatttaatcacaactataataactgccttttctatcatgctaatagggatgagtaagcaagaaaaaatttatgtaaaaaaatactttaaaaaatacttaaatcgtgagttgctataa

SEQ ID NO: 278978 - DNA, 267 bp, Morganella morganii
atgaatatatcaaaattaatcacattagctgcaataaccacgctgacagcctgcagccataacgtatacatcaaaccagtggattgcaccgggcatatgtttgaggggctggataaccggcattactcagctaagctgacaaaatatgcgccggacagtaaacggtttttcagtacaggtgatcctgttctggggttacatggctggatccgcatggatacgtttgacaaaattacatgtgttaaaggcaagagtacagaggactga

SEQ ID NO: 278979 - DNA, 3324 bp, Morganella morganii
atggcaaacgtcggtgaaatcgtatatcaggtgcagatggatgttgctcagttattgacatcacagcgtcaactggatcagcggctgcggaatatggaaggcagatttaaccgcacaacgaccgccgtcaatggcactgagcgctcaatggcctcgctgtcgcgggttgccgcatctctgactgcttacttgtctgtgtcagccgttaccagctacgcggaagcttggacggcgctgaataacaaactcgtcaactccataaagaccggagagacgctggcggtggtgaatcagcgcgtgtttgatattgctcagaacagtcgttcaagccttgacggtatcgcaacgctgtattcacgactggaaagagcgatgcgcagtgccgggctcagtggcgaagagttagggcagataaccaccactatctcaaaggcaatgaccgtttcaggtgccacagcagcagaatcagaaggtgcacttgtccagttatcacaggcactggcatctggtgtactgcgcgggcaggaatttaactcaatgagtgaacaggctccggcactgatgaaaggacttgcggattcactgggtgtcagcatcggcaagctgagggcgatggccgcagaaggcaaattaaccacggatgtactgttaaaagcattccgtgaaatgggaccagctattgagaaggagtttgcgaatacaacacaaacaatgtcgcagtctcttcagatcgccagcaataatattactaaattctttggcgaaaacaccactgttaagacatttataaacatcttcaacgacgctaccgtatctgccagcaacaatctggaatcactggctaacgtattgcttattgcagccggtgtcatggggtctagatatgttggagctcttacgctatcagctaccgctcaggcaaagaaagttaaagagacacttgccggtatggcggcgacaaaacaagcggtcagagttgagatcgaagccgccacggcaacaatcaacagaattgcagctgagaagactctggctgtgacagttcagcagtcgctgggtgcgcagctggcagcagccactactgaagcgcagagaaccagaattcgccgtgaattggcagtaaactcatcagtaataacaggattaacacagcaggaaaccgcagctacaaatagtctcgctgcggcacagaacagacttaacgttgcaagtgggttggcaagcaaagctctatccttgattggtggaccggttggtgctgcgatgttggccggagccgctgtgtattattttttccaaaaagctgaagaagcaaaaagatcagcacaagagtttgctgattcactaaatgaattgcgtgccagcatggataaaatgtctcgcaccgaactggcagcaaaaatagcagatgccagggacgagctcgaagttctgacggatgctcagcgctctgcagagcaggaggttaaaaatctcaaaacagcatacaaagcatattctgatggggtattacactttggcagtacccaggagaacctcgaaataatatccagaaaattagcaaaagcagaagccaatcttgagcgcgtgcaaaatgacagaagcaagactgtgaattttatcagtgcagcgcaagcgaagttaaacggggaattgttgcagggcgaggagctgctaaagcgagaggcgagtactttgctacctaatgccggagcagcacttcgcgcttacgggcttgaccttgacggagccacaaaagcaaaacaaaagttcaattcagcaagcctgaaagttgaatggtcagatgctggcgctgacatgaaaaagacgcttgaacgtgaaattgaaatggctggagcgaaggatgacgtagtaagacgtcaattacaggtcaagtattatgttgaagataaagggatatcagagcaggaagctaaaaaacttgctgaattagctgctaaagctggcgaggcaagcgaagcaaaaaaaaccggtattaaaatatcaagggaggcggtatccgaagcaaaaaaagaagcaacagaagcggaaaaactcaaacagaagataaccgacctggctaatgcgacgaaagttgcagagctggaaacaaaagggctgtcccgcgaggctgcaattcttgaagcagtacagaagcttggttcaaaagctaattctgctcagatcgccgaagttacagcactggccggtaaagagtacgaccttacgcagaaaatcaaagaccgaaaagaggcttttgagcaaaaccctcaggcaaaagttgatcaggacatcaaacatgccggtgagcagcttgaacggcaactgaaaggcaacctcatcaccgaggagcagtatcagaaacgcagcattgagttaaaagcggaacacgccagaaaaacggcagagataaatgcaaaatcagccgtcactcctgttcaggatatggtggctcaggttgatcctgttcaggcgctggctaatgagcacgctcagaagttggtactgattaaaaattttgaaaatcagaaagttattacggcacagcaaagtcttgcgctgataaatgcagcaaacactgagtatgaggaagcaagactgaatgctcagtgggaaatctggcgtaatcagagtcaggccaatcagtttctcgcagatggtcttgatgctctcggtcagcgctcatccaacgtactgacagggcttattaccggcgcacagagtcttaatgatgcattccgtaatgtagcgtcaaccattgttgatgaggctgtaggggcgttagttcagatggggatgcagcagattaaaaatatggttgttggtgaggccatgtcaacagcagcgcaggcatctactgttgctcaggccgtggcagtacaatcagcatgggctccagcggcaatgagtgttgctattgcaacgatgggggcggcggttacagccggttcagcgtcttacatgtcagccatggcggcgagtaaaacaatggctgtcgccggtgcccgttataacggtggccccgttgacgctaacaaaatgtatcgcgttggtgagaatgggcagcctgaaatattcaaggcatcgaacggtcatcagtacatgatccccggtgacagcggaaaagtaatcagtaaccggcagatgggtggcgatggtggtgtcagcatgggggatatgtacttcaattttcaggttcaggctcccaatggcatgacagaaaaggaagcaacaatgataaccaggatggttaaaggtactgtatatgacgttctgatgacagaaatcagaagcggtgcaatacaaggtaatcagcgctattaa

SEQ ID NO: 278980 - DNA, 207 bp, Morganella morganii
atggattattatttaacgttgactgagagtgatagtagttttgttttacataaaattacatgtcaaaagttacagcaggctaaaagtacagcgtatgtcggatatttctggggagagcatgcagctattcaacaggctgttgttatagcaaaagggcctgttgttttatgttcgctatgcctgagtcaggatgataaaaaaccataa

SEQ ID NO: 278981 - DNA, 681 bp, Morganella morganii
gtgacatttggatttacagttaatgacgctactaacagaaaactatttaccccgtcaggaaagtgctacgttttatatcgtgttatgaacgtaggctcaggaaaaaataaagcgtcatatcatgatacaggtataagtcgaaccagtgaccctgtcccgctttgctttgtccgcagtaccgagatgtatacatcatcaaatactccgccgcttggatgtgtttttcttggacgattcggcacttataatgatcaaaaccacattattactgcagaaaatacccgttcagtgatttacctgtttatgccgggtaactgggtggaaaacaaagaaggaaagcaaaaatggggagccaggttttatgatgaggatggagaggtcagcttttgtggctggcaaaaacctctgataattgatgggtatatttcatctgaagatggtacatcacaacaactcagaaaaaataccaatgcgatactgatgagggcattaggagagatgtctctgtatattccatcaatggatcccaccttgccggtgatattttttgtcaccgggactgcatacaacggaagaagtgcaccgttgttcaaaacagtcggattgcagggcggaggggctaattatggacggagttacaaaggtcatattccttatattgatgcatctatatacgaataa

SEQ ID NO: 278982 - DNA, 264 bp, Morganella morganii
atgccgggattcggaataaaggcatttgatgatcagggccgtgatacggtttatatgctgtctaattttgcccagccactgctgccgatcagcggcagtggttcccaaacttataatttaccggtcggagcaaaattatatgcttttccggtaagtggggtattcggtggtattgatattacagtcaaaggtaatacggtttcgtggaggaatattgtctcaccgaataagttaattattattttttcaatgggggtgctgtga

SEQ ID NO: 278983 - DNA, 282 bp, Morganella morganii
atgaaatttaaggtgcttattttatctgcgattattttgtctgctgccgggtgtgctgtcagcatgcctgctgttacagatgtggactgtgtggcttattaccgtgaatcaacgttccccggacctgttcataagcttcatctggtgaaaaagaaaaatgataaccggaagtatcagaacaggatctggtataagcaatccggtctgagtggtgtgaaatttaccggaggctggataccggaaagtatactggagaatatggaatgccgggattcggaataa

SEQ ID NO: 278984 - DNA, 3180 bp, Morganella morganii
atgacacaaatcacaggccgcaaaggtggcggtggcagcccgcgtacgcccgtcgaacaaccggacgacttacagtccgtagccagagctaaattgctgatcgccctcggtgaaggtgaatttgccggtgagctgaccgggaagactatttttctggatggtaccccgctgctgaatgctgacggatcagaaaactttcccggcgtggtgtgggaataccgtcccggcacccaggcacaaacctatatacaggggatgcctgcggcggagaatgaaatcaccgttggtaccaccgtgcagagcagcacactgtgggcacacgcattcaccaacccgcaactatccgctgtccgcgtccgcctgaaatggccgtccctgttccgccaggaggataacggggatatggtcggtaacgaggtggcatacgccattgatttacagactgacggcgggagctggaaaaccgttgtggacggacgtgtaaagggcaaaacaacttccggttatgagcgtacccaccgcattgatctgccgcagtcggccacatcctggacactgcgtgtgcgtaaaatcacggcagatgccaacagcgcaaaaattggtgacaccatggtgctgcagagttacaccgaggtgattgatgccaaactgacctatccgcataccgcgctgctgtatattgagtttgattcaaagcagtttaacggctccatcccgcaggtcacctgcgagccgaagatgcggatcatccgtgtaccgtcaaactatgacccggagcaccggacgtattccggtacctgggacggttcgtttaaatgggcatggaccaataacccggcctgggtcttttacgatatcgtgatttccgatcgtttcggcctcggtgaccgtatcaaaattcagaatatcgataaatgggagttgtaccgcgttgcgcagtattgtgaccagccggtaccggacggcaaaggtggcagcggcactgagccgcgctatatctgtgatgtgtatgtgcaggatcgcaatgaagcctataccgtgctgcgggattttgcggccatcttccggggaatgacctactggggcggaaaccagattatcaccctggcggatatgccgcgggatattgattacagctacacgaaagccaacgtactcgacgggaagttcacctattccggcagcagcagtaaggcccgttattcctccgcattggtgtcgtactcagatccgctgaacggctacgccgatgcgatggagccggtcttcgaaaatgagctggtttaccggttcggttttaatcagctggaaatgaccgctatcggctgtacccgtcagtcagaggccaaccgcaaaggccgctggggcattctgaccaacaacaaagaccgggtagtgacattcagtgtggggctggacggtaatatcccgcagccggggtacatcattgcagtggcggatgaaaacctgtccgggaaagtgaccggcggccgcgtcagtgcggtgaatggccggagtatcaccctcgaccgcaaaccggatgccgcgccgggtgaccggctgatgctgaatcttccgtccggtaaatcacaggcccgcaccatccagatggtcacggataacgttataaccgttaccacggaatacagcgaaacgccggaaccggaatgtgtctgggtaacggaatcagatgagctgtacgcccagcagtatcgcgtggtgagcgtgactgagaatgatgacggtacgttcacgatatcggcggccatgcatgatccggacaaatacgaccggatagacactggtgcggtacttgatgagcgtccgatcagtgttattcctcccggcaaccagttcccgccgaaagatatcaccatcagttcttattctgtcgtgaatcaggggatcagcattgaaaccatgcaggtaacctggtcaccggcagagaatgccattgcctatgaggcgcagtggcggcgtgatgacggtaactggatcaatgtgccgcgcaatgccaccacttcgtttgacgtgcccggggtctattcaggccgctacctggtgcgggtcagggcgattaacgcggccgaaatctccagcggctgggggtattcagaggaaacccggctgaccggcaaggtgggggatccgccggtgccgctgaacttccgtgcgtccacgctggtattcgggatcaaactgaactgggagttcgggaaattcacggaagacaccctgaaaaccgaaattcagtacagcaaaaccaacgacgggcagaacctgttgctgctggctgatgtgccgtacccgtccggctctcacgaactggccggcctggccgccggtaccgcgttttatttccgcgcccggctggtggataaaaccggtaaccagtccccctggactgactttgtgcgtggtgtgtccgagttcgatgcatcgaacattattgatgaagtggccgccggactgagcgactctcaaatcatcaaagacctgcagtcgcaggcggatgataattttgaggccatcatcaataacgccaacaacgcctatggccagtggaattactggcagcgtgaaaccggcgcgatgaaagcagaaatcatcgaagtccgcaactatacggtcacggaaacaacggcacttgcagagaaactggatgcggtacaggttaaagctgaagacggtctggcgctggcgcagaactccatccgcgcgcagtgggatatggcatccggtcaggcatccgtggtccacgatatgaaagtccggatccgttataacggtgaggattattccgccggtatggtgatcggggctgagctgaaaggtggtcaggtgaacacccttatcggttttaacgctcagcagtttgcgttttataatccggtgaaaaaatcgatggacatgttcatgtacatgaaggacggacaggtctttatgcgtgaggcgttcattaatcaggcatggcttaacagtgtggttgtcactgacaaaatgcagtcagagaactacgcgccgggtaaaacaggattcctgattgatgcgaaaaccgggaaaatggaaataaatggttctgatacctccggtggcaggatggaaattaagaatgaccagatccgtgtgtgggatgaaaaaggtcgtctgagagttgaaatcggaagattaacaggatga

SEQ ID NO: 278985 - DNA, 588 bp, Morganella morganii
atggtgaaaattgtactcggcggtgtgctgggtaaaacctttggcaaaatacatcagcgcctggtcagcacaacctccgaagcggtccgtgctttatgctgcacaattcccgggtttgaacgctatctgaataccagtaaatcccgcggcttaacgtatgcggtatttcgcggtaaaaaaaatatcggggtggatgacctcgtttttccggtgacggatgatgttatccggattgtgcctgttgtgatcggcagcaaacgcgggggattgctgcaggttattttcggcgcggtgatggtggctgctgcgttctggacaggcggtgcgtcagtggcggcatggggagcgatgcataccgggctggccatgaccggcgtatccatgatgctgggcggtataatccagatgttgtccccgcagccgggctggcttgccatgaaagaccagggcgaaaataaaccatcatatgcattcggtgcgccggtgaacaccgtttctcagggctatccggtaccgatcggttatggtaagcgccgcatcggcggcgcggttatctcagccggaatttacgtcgaagatcagcagtaa

SEQ ID NO: 278986 - DNA, 705 bp, Morganella morganii
atgatgcgtaaaaacattcaggcagctatttttgcacacgcagagcgtgaatatccccgcgagtgctgcggagtaatagctcaaaaatcccgtgtggtgaaatactttccctgccgcaatatcgcggctacgccggaagagcattttgtattatcgccggaggattacgctgctgctgaggattggggtacggtgaccggtattgtgcacagtcacccggatgctaccacccggccgtcagaacttgataaagcacactgtgatgctctcggtgtgccgtggtatatcgtcagctggccggagggggatctgcggactgttcagccgcgcggtgagctgccattactcggtcggccgtttgtgctcgggtttaccgactgctgggggctggtcatgagctggttccggcaggaacgcggcattgaactgccggattaccgggtggattacccctggtgggagcagggtgggaaccgttacgccgataactggcgggaagcgggatttattcaggttgacgacccgcaacccggtgatgtcatcgtgatgcaggtacaggcaccggttgccaatcatgccggtattttattgcctgacaacatgcttctgcatcacttatacggtcacctgagtcagcgggtgccgtatggtggttactggcgtgaccgtacagtgatggtactgcgtcatgagcaactgatatga

SEQ ID NO: 278987 - DNA, 180 bp, Morganella morganii
atgaaattactgactattaccgccctgctggtgggggttgcgggtgcctgtctgctggcgttcggtgcctggctgctgatgcctgctgccgggtttatcactgccggcggtttatgcctgctctggtcatatctggtatcaaaatcagcgggaagcctgaataacaacggaggatcataa

SEQ ID NO: 278988 - DNA, 1731 bp, Morganella morganii
atggcaaccgtagcagacgggatccggtacgccgagcaggtggttgccggagaaatagttacgggcgaactgatacgcctggcgtgtcagcggtttcttgatgatctggaatacggccctgagcgcggtatttatttcatggaggaacgcgcccggcatattctggatttttaccggttcgttccgcacgtcaaaggggcgctggcaggtaagccgattgagctgatgccgtggcatacctttattctgattaatatttttggttttgtgatcccgctggttgatgaactcaccggggcgattcagtacgatgatgacggtgagccggtgctggttcgccggttcaggacggcctataacgaagttgcgcgtaaaaacgctaaatccaccctctcatccggtatcggcctgtacatgaccggcgctgacggtgagggtggcgccgaggtttactcggctgccaccacccgtgaccaggcccgtattgtgtttgaagatgcaaaaaatatggtcaaaaaggccaaaagttcactcggccgcctgtttgaatttaataagctggcgatttaccaggagcgatccgcatccaagtttgagccgctgtccagtgacgcaaacaacctcgacggcctgaatattcactgcggcattgtggacgaacttcacgcccacaaaacccgtgatgtctgggatgtgctggaaaccgcgaccggtgcccgcctgcaatccctgctgtttgcgatcaccacagcgggatttaaccgcgagggcatctgctacgaactgcgggattacgccatcaaggtgctgcggggcgtggtggaggatgacacctttttcgcggcaatttacacaccggatgaggatgatgacccgttcgatgaaagcatctggataaaagccaatcccgggttgggtgtctgtaagcgttttgacgatatgcgccgcctggcgaaaaaggcaaaagagcagattgcggcccggcctaatttcctgaccaagcacctcaatatgtgggtgaatgccgaatccgcctggatggataccggtaagtgggacagctgccctgaaaatgcgccggatgatgagctgaaaaattacccggtctgggttggtgtggatctgtcaaacaaaatcgatgtgaccgcagccgttaaagtgtatgaggatccgcgcggacaactgcatatgaagtgcaaattttggctgccggaggacagagtggtgactgcaccgaagcatatcgctgacctgtaccggaaatggggagctgccggttatcttgaactgacggacggtgaggttgtcgatcacgacatcatcaaagccgacattctggcatggtgcgaaggtgaggatttacgtgaactcggttttgacccgtggagtgccgttcagttctcccgccgcctggcggaagaaggtattccgctggtggaggtggcacagacggtgaaaaacctgtctgaatcgatgaaaaccgttcaggccgatgtatattccggcaaatttcaccatgaccacaacccggtaatgtcctggatgatgtctaacgtgacggtaaaaccggacagaaataacaacattttcccgaacaaatcgacaccggaaaacaaaattgacgggccgtttgccctgtttactgccaagtcacgccagatggtgaacggcggggaacaggaacaaagtttgtccgatgttttatcttccaggggcttacgttcactctga

SEQ ID NO: 278989 - DNA, 474 bp, Morganella morganii
atgtcaggaccaccaagaaccccgacacatctgcgtttggtcaggggtaacccatcaaaacgcccgatcaataaaaaagaaccaaaaccaccgtcaggggtacccccaactccgaagcatttttctaaacaggaaaaatactggttcagacggatggccgaagaacttaatgatatcggcgtaattaccaggcttgacgggatggcactggaattaatgatcggcgcatacatcgagtggcgccatcaccgtgatgtgatcgctgaagtcggggagtcttatcagaccacgaccagtacgggtgacattattatccgggcgcatccgcaggtggctatgcgggaccgggcatttaacaatatctgcaaaatgatgtcagagtttggtatcactccggcatcccgggccaaggtatccggtaacacaccagccgaagaagaccctttcgaggcatttctgaaacaaagaaaatga

SEQ ID NO: 278990 - DNA, 159 bp, Morganella morganii
atgccacggaatcctttaacgctgatcatcattgctatcatcctgctgactaccgttctgctgtcgatttgttatctgtattcactcccgaatcactgtaaaccgctgcctgacaacccgctggacggagtgatccattatgagtgtgaagcgtcatga

SEQ ID NO: 278991 - DNA, 192 bp, Morganella morganii
atgcgcatgtctgacaaatattccagccctacagcatacgcctgggggcttataacctctgcctttggcattttatctctggatcagtgggctattgttgccgggatcatctgtactgtcggaacgttcctggtgaactggtattacaaacggaaggaattccagctgaaagcgggtgaacatcatgaataa

SEQ ID NO: 278992 - DNA, 1056 bp, Morganella morganii
ttgagccggtacggtatttatgttcagcccgagacgggttcaaagcctttttacctggacgatgaacaatgtcagccactggcaaaactggggcagtttaagttttatttcccctatgaatccgcaaaattaaacagagtggagccggaaggggtctgggaatacatccgggaccgcaaagcatggcgggctgtggttcccggtatgtccgactacaattgctttattgtggtgaaaaagggggctcacgccgccggaacttacggcctgaccggagttattcagttatggacagacaaactatggctggaagaaccatacatatatgtttatgcagaatgcggtgattactctgcctggggggatgatccctatggtaaattttttgtgtacgatgtgtatggcaccccaaaaccgaaatctgctgcgggtaaatatggcattcagcttcgtggcatgaatggtgtcacaacgctgacggatttttccaagctgggttactgtgtgtgggccggtacggtttacagcgatggtaaaaagggaagcggcgctaaaatacccggatacgacatcagcaacgaaagtcgctatacaatctatgtcagaccaaaatcccaggcctgcacaatgttgagattcaggaattcaatctggactgacgttcctgcctatctgaatgtactgttattcgatcacaaccctgatttatccgttctgccaaaatacgggattcaaatttgtaaccagaatggaaagacaacctatacgagcaaatactgcccgttgatgggagggcagctgttatctgcaatgtctggtaattccaaatacaagactccctattttaatctggcaaactacggcacgttcgtctcttccatcaagaataaaaactacgacctggcagcgcttggcctgtatgtcagcggtaattattacgatgtccggtttctggcaacagtggactccggctggatgggggatatgtggacaaataacggtaatgtgcaggggatttataacacccactgtatcgacggtgatttatatttataa

SEQ ID NO: 278993 - DNA, 579 bp, Morganella morganii
ttgcaacgatttggacgccgctttgatctgagtgtcagaacggctgctgaaggtattcatgggcttctgctccagctcccgcagttacggcagcgtatccgtgacggctggtaccagatacggatcgccggcagtgacgtttcccctgatgaaattcaccggcgttttaatgagccgcttccccggaacgctgtcgttcacatcgtcccgcgtattgaaggggcgaaaagcggcggggtatttcagtttatcgccggtgctgctgtgctggcaatcggatggtggaaccccggcggctgggccatcgggggggcgctgatgtcggccggtgcggccatgatgctgggcggtgtggcacagatgctgacaccggtagcgaaacagccggatatgtcgcggggtgaggaagagaagggtaatacctatttcagtaacctcgaaaataccgtggcgcagggcgtggccgtacctgtggcctacgggcggattatgtgcgggtcgcgggtaatttcacagtccattgagattatggatgacagcgacggcaccaatattgatgccggtaaacacggcgggtaa

SEQ ID NO: 278994 - DNA, 519 bp, Morganella morganii
atgaccagtctggaaatggttgattacatcaatgctgaccgtaaggcaaaagccgaggcggagggactgaagtttccatgtcgggaatacagaaaattaaggcatgaccatttcatggtcaaggtacccaaagtgttgggcgaaaatcaatctcctaaatttttgggagattacaccgactcgaaaggtcgttcctatccgtgctaccgattctttaagcgtgaagcctgcctgatggcaatgagttacagctatgaattacaggctctggtgtttgaccatatgactgaactggaggcggaatccggcttcgggttcactattcagcagctgcagcacatgcttgcggttgtaagaaaagcctccgatgaagactcgtcggatgccgggcggagactgaaaaaaagacagactgatctggtgcttctgaaacgtgcagaaagattgataggtgatttcagtcagatgacactcagcctgattggtggcggtaataacgcaattactcacaaacgatga

SEQ ID NO: 278995 - DNA, 279 bp, Morganella morganii
atgaccccgtttcagcagatgaagtcccggatggatgtactgacagcggaaaaaatgggggaagtcatttatctgaatgatcagcctgtctgtgctgttgagtttcattttcttccggaaatgggaccggtcagcggtgacggggtcagttacgtgattttcacaccgggcatcaccgcacgccggaatgacagggtcgttatcagcaatgtggagtacaccgtaacccgtgctctgcgctataacggcaagccccatatttttatcgagagtgagtaa

SEQ ID NO: 278996 - DNA, 342 bp, Morganella morganii
atggctaagaattttcagcagcaggggatgaccatcgcgattgttaacagcggaaccaaacccgttaccagcggttcactggtacaggttggttcactggccgcggtggcaattacagacattgccgccggtgcaaccggtgacggatttgccgaaggggttttccggctgcctaaaaaaaacgggctggtgcttaaagcgggggcggcggcttccgttaaagacggtcagctggtggataccggcggcgtggtgatcggcgttgcctgggaggatgcggctgccggtgacgcagatgccgctgtgaagattaacgtcttcccgccggcggcacagggataa

SEQ ID NO: 278997 - DNA, 2037 bp, Morganella morganii
atgccaaatcccgggacgatgacaagtaacccgaaagcatccgcaccggttaaaagctggttccgcatgaaagccgcggcggatacccaatcggcggacatttatatctatgacgagatcggcggctgggggatctcggcaaagcagttttcaaaagagctgctggcgctgggggatgtcagtcagattaacctgcatattcactcccccggcggcgaagtgtttgacgggatcgccatttataaccagctgaaaggccatgatgcaaagatcaccgtttatatcgacgggctggcggcctcaatggcctctgttattgccatggtcggtgacaccgtgattatgccggaaaacgctatgatgatgatccacaaaccgtggggaattgcctggggtgatgcggatgaaatgcgggattacgccgacctgctggacaagctggaaaatgtgctgatcccggcgtatgtcgccaaaaccggcaaaacggcggaagagattgccgccatgttagaagaggaaacctggatgaacggcgacgaatgtctgtcacacgggtttgctgatcaacttactgacccggtacaggcgatggcctgtatcacatccaaacgtatcgaggactttactgctatgccacaggctattaaaaaccaggtatcaccgaaaaataccgcacagaccacaccggtttccgtgccgaatccggcaccggtcacgcagcccgccgcaaccgtgactcagcctcagccggtcgcgcagccggataatgcagatgtacagaatcaaatccgcgctcaggaacaaacccgtctgaacggcattagggacttgttcgccatgttcggcggtaaacacaatgatctgatggtggattgcgtgactgacacgcaatgttcacttgaagatgcgcgtgcaaaactgctggaaaaactgggggcagaatccacaccaagcaacaaaaataatgctcatatctacgcaggtaacggtaatttcaccggtgacggcatccgtgcatcggtcatgacccgtgccgggcacgaagacgcacagccggataacccgtataacagcatgactctgcgtgaactggcgcgtatgtcgctgacggagcgcggtattggtatcagcaccctgaacccgatgcagatggtcgctgcggcattcacacacagcacttcggatttcggcaatatcctgatggatgtggcttataaatccctgctgacgggctgggaagaggcggaagaaacctatgataagtggacgaagaaaggtcagctcagtgactttaaaactgctcaccgtgtcggcctcggtggtttcccgtcactgcgtcaggtgcgcgaaggggcagaatataaatacgtcaccacaggtgacaaggggcagaccattgcgctggcaacgtacggggaactgttcagtatcacccgccaggccatcatcaacgatgatatgaatgcgctgaccgatatcccgaacaaactcggacgcgcagccaaagccaccattggtgacctggtgtatgccgtgctgacagagaacgggaagctgagtgacggcaaagccctgttcagtgcagatcataaaaatacgctgtccggcggcatggatgtggaaaccatcagcaaaggccgcactctgatgcgccagcagaaagaaggcgaacgtacgctgaatatccgtccggcctttatgctggtaccggcggcactggaaacacacgcgcttcaggttgtcggatccggcagtgtgaaaggggcggatgtgaatgccaatatcatcaacccgatccgtaatattgcggaaattatcactgagccgcgtctggatgataacagtgaaaaagactggtacatggccgcttctcagggcagtgacaccattgaagttgcctacctgaacggtatcgataccccgtatatcgatcagcaggaagggttcacctccgacggcgtgaccacgaaaatccgtattgatgccggtgtggcaccgctggattatcgcggaatgatccaggtgaaaggccagtaa

SEQ ID NO: 278998 - DNA, 525 bp, Morganella morganii
atgaaaaaggtaattactgtattgctcaatggctgggtgtgggctgtcgtgttcttcggtctgtggatgttcagcatgctgtcagccgaacaaacggaaggccaacacaaagataaggttatcactgaccagcaaaaggtgattaataacgcttacaccagtatcgatatctttgaccgcgtggccgccgcaaacgccagccgcagtatgcaggcagaagccaaatcacaggagaagcagattgaataccgcactattatccggaaagagcctacctgtaatttgtatattcctcagcctgtttctgacgggctgctcagccatgtctacgccatccgtgaatcagcaatgcgttccgctcccgacatcgctgacacaaccggtgctggcaccgctaccacccgccgactgacatattgccaggcggttgagtggatagagccgctgctgacggcactggatcaggctaacgggctgttgatggatatccggaaagcggatgcagagcgaaacagacgaaagtaa

SEQ ID NO: 278999 - DNA, 159 bp, Morganella morganii
atgccacggaaccctttaacactgatcatcattgctatcatcctgctgactactgctctgtcggcgggttgttatctgtattcactcccgaatcactgtaagccgctgccgggtaacccgctggatggtgtgatccactatgagtgtgaagcgccatga

SEQ ID NO: 279000 - DNA, 477 bp, Morganella morganii
atgaataaccgattatttaaaaaagtcatggccgcttgtgccgccggggcgatagccggtgcgctggtgctgatccccgcgtatgagggtgttgagtacaaaccttaccgtgatgtggccggagtgctcaccgtatgttatggccataccggcagtgatattcagcccggcaagttgtacacggacgctgaatgtaaggcgctgctgcatgacgacctgacgaaagtccggcgcgcggttgacccgatgatcaaggtgccgattgatgacaatacccgggcggccatctattcatttgtctacaacgtagggcccggtgcgttctcgcgttccacgatgctgcggaaactcaatgccggtgatatcgcgggtgcctgtgacgaaatgaaacgctggacatttgccggtggtaagcagtggcagggtctgattaaccggcgcgaaacggagaaagcggtatgccacggaaccctttaa

SEQ ID NO: 279001 - DNA, 192 bp, Morganella morganii
atgcgcatgcctgacaaatattccagccctacagcatacgcctggggacttataacctctgcttttggcgttttatctctggaccagtgggctattgttgccgggatcatctgtactgtcgggacgttcctggtgaactggtattacaaacggaaagaattccaactgaaagccggagaacatcatgaataa

SEQ ID NO: 279002 - DNA, 474 bp, Morganella morganii
atgatgattaacaaaaaagcactcgttgtagccgggctttcactggttatttctgcctgctcaacatcaccggcaaagaaaaacacggcagcagttaaaaacccgccggtaaaacagcaaacccgttccgcgacacctaatgtgaccggtaataacgcggcacaggcgtatgtgggaagcaaacaaatggcatctcaggggattgttattgcatccaccaataacgcctgtgtggacggatttaatttccttaaaggtgtaaaccaggccgaatttaatgatttctcatcaagctacggacgtattaatcagaactataccttcttaaacgtcaataaagaaattatggataaagactcccgtgaagtgttatccatgacgctgaataaaaaactggacactttatgtactaaagttcagtacgcaggtttcattggtgtgaaggataaaataaaagcactttctgacatttaa

SEQ ID NO: 279003 - DNA, 939 bp, Morganella morganii
atggctcagatctccgaaggcaaggcatcagcgggcgtcattaccgactggcgcccggaagatgaaaaattctggacagagagcgggcaccgggttgcatcacgcaacctgtggatctccgttccctgcctgttactggcattctgtgtgtggatgctgttcagcgccgttgccgtcaatctcccgaaagtcggctttaactttaccaccgatcagctgtttatgctgaccgcgctgccgtctgtttccggggcactcctgcgcgttccttactcctttgtgattccgattttcggtggccgccgctggactgcgttcagtaccctgatcctgattgtgccgtgtgtgtggctcggattcgcggtgcagaacccgtcaacaccatatgcggtgtttgtgattatcgccctgctgtgcggctttgccggggcaaactttgcctccagtatggggaatatcagcttcttcttcccgaaagcaaaacagggcggagctctgggtatcaacggcgggctgggtaacctcggcgtgagtgtgatgcagctggtcgcaccatttattgtgacattcggtgtgttcagctttatgggcggcaccggcgtgacccagccggacggctctgagctgtggttacagaatgccgcgtggatctgggtgccgttcctgctgctgtttaccaccgccgcctggctgggaatgaacgacctttctgctaacaaagcctcgttaaaagagcagttaccggttctgaaacgcaaacatctgtggatcctgagcttcctctatctctccacgttcggctcatttatcgggttttccgccgggtttgccatgtgtagcgcggcgcgattttttgcacagataggcgctcaattttgcactgtcggcagtaccgaaaaatgggcttttttgcacagtgcagaattgaatgcagattaa

SEQ ID NO: 279004 - DNA, 561 bp, Morganella morganii
atgattatcgggtatgcgcgggtatcaagtaaccatcaggacactgaacttcagctgcaggcgctaaaggctgctggatgtacgcatatttttgaagaaaaggcgtcaggccgtaaggctaatcgcccggtattgaaaaaggtcgttgatatgctggaagctggtgatgaattggttatctggaaattagaccgcattggccgtaacgttcttcatgcgctcctgaccttccagagcctctctgagcgtcatgttaatatcagatctattaccgatggggttgaccttagcacagccagcgggcgttataatttccggaatattctgtctgcggcgcagtatgaatcagacttgaatagcgagagaacgcttgccggattagcggttgcaagggctaaaggccgtataggtgggagaaaacctaagttcactgatgaacactgggagttatttaaacgtgagattatggccggtcactcacatcgtgacgtttctgttaaatatggtgtgagcctttctactttatacaaacattacccagttcaagttatgagcgattaa

SEQ ID NO: 279005 - DNA, 357 bp, Morganella morganii
atgaattattacaaggatattagtaatggtgatgtttatgcttacgatgatgaccaagtaacagaggggtgggtaaaaagtaatttaattaaaatgacaaaaaaggaagttgaagaccatatcaatccgccggtgaccaaagaggagttgatagctgaagcagaagccagaaaacaggcactgattaccgatgtaaacaccgaaacccagatgctgcaaacaaaactggcccttggtcggatcaaagatgatgaaaaggtgcggttaaacgcctggctggattatctggatgaactggaggcagtggacgtatccaccgccccgaatattatttggccggtgaagccggtggtgtag

SEQ ID NO: 279006 - DNA, 4776 bp, Morganella morganii
ttgttacaggccggtctgaacgaacagcagacaaaacaactgcaggatcagtctgaaccgcgccgcagtgaagccctcagcggagagtaccgaactctggttatgggtaaaccgctggcaaaccgtgatgatatctggcgtacactgctgattgacggcaaagtcagtgctgaaatcaccaccacaccgctggcggatgcgattgcagggattcagctctatatcaaccgcaccattgccggtgatgagccgggggcagacaacgctgtgcttgagcgtcagttctttaaagactgggatacctataataagcgctacagcacctgggcgggtgtgtctcagttagtctattacccggaaaacttcattgacccgactatccgcattggtcagaccgggatgatgaacaccatgctggaacagctttctcagagcgagcttaacagcgacaccctggaaaatggcttccgccagtatctcaccgcctttgaacaggtcgctgacctgaaagtggtcagcggttatcatgatgcggttgatattgatgaaggtaatacctggtttatcggtgccagccagactgagccgaaaaaatattactggcgtaaggcggatcacagcaaatgtcagaacggtcattttgctgccaatgcctggagtgactggaaagaaattacctgtgctgttaatccgtatcaggatatggtgcgtccggtgattttccgttcacgtctttatctgctatgggttgaagaacaagtacggaaagatggcgaaggtaaaaaggatatttcgtcttttaccctgaaactgacgcatattaaatatgacggcagttgggcatcaccgttcagttatgatgtgaccaatgaattcaataaccagccccagaagaagcaagataaagcgctatattgtgccacaaacacagccaaagatacgataaccgttgtctgctacaaaaaagaggatgagggcacattacccgggaatgcattcggactgcagatccggcccgatatgaccacagcccaactgctgaacagcaaagacctgctgacagcagtaaaattacagctggatacccttaatgttacccgcattaatacggaagaaagtgactataaggtatcaacgataacaccggaagaccagaaaggatattatggactggaaactaatatttttatcgaaaaaatagacagttacaaagaaggtaataaacagtttttaactgtgcaacccactttggaagccaaaattgatattaccgccatgccgcacatgttacgtcggctatttgccagagactatctgaatttcggatatgatttatatcagtatgagagtgtgacactggctcccggagaaaatgaactgccccggggcgactataacttttatatccttctcaatcactccacccagaattactttttttatctgagcattccgttcggaaaaaacgcaccggattacgctaaagatatcggcgtagttataacgctttctgacggcaccggttcaatcgaaaagctgaactgggaaggcagtgatacacaaaaccactattattccttgccgaaattaggaaaatttgaaccggataccaagtatcatcagatagtgaatttgcattcaggctaccaaggtataataggcaaactgaacgtcagtaaacaacgactggttctgagcaccccttcccgtttgaacaccggcatcaaactttataaaaacagtaacgtactgctggagctttccgaagttggtcataatgccgatacgaaacaaagcaccgcagagggaacccttctgttcacataccgatttagtgcccagaaactggatgtcacagaacacatcgtaagctcccagctggatttctccattctggccagtctgaagaatcaggataataccccggtacacggaagccgtaattataaattacatgttgaattggtgaaaaacgatgccccagtatcaacccgtgccatcgccctgcacaccactgaaggcggcgcccagtatatggaatgggatgcttaccgcacccggctgaataccctgtttgcccgtcagttaattgaaaaggccaaccgcgggattgatgccgtgctgtcaccggaaacccagaatctgcgtgaaccgaagccgggaccggggacttatgtgacactgacactgaaaccgtatgacccggctattcatggcagtaacaggagatttacaattcagcgtggtgatgtttttaagctatatgatgttttccctgttacggatgggatactcagtcaggattcagccacagagattaaattatttatcccgaatatagctggcgcttatagcaattattatgcggatactgatcaacctaaaaataatacatttttcctccgcgctaatttccagagtggtgattcatactggattagatttccacccgacggaaaaggcggatggtacttagataccagttatgatggacacaacggcaccttccccggtctggaatctgtctccggcctgtcacaacctgatgagccaatggacttcagcggtgccaatgccctctatttctgggagctgttctattacaccccgatgatggtggccatgcgtctgttacaggagcagaactttaccgaagccaaccgctggttaagctatatctggcgctctgctgcagatggtgccggtgactggcgcgtgcgtccgctgaaagaggatacctcctggaacgccgatccgctggattcggttgacccggatgccgtcgctcagaatgacccgatgcactacaaagtcagcaccctgatgaaattacttgatctgctgattgcccgtggtgacagcgcttaccgcatgttggagcgtgataccctcaatgaagcgaaaatgtggtatatgcaggcactggggctgctgggcgataaaccactgacaaccatcagtggtgcctggagtaacccggcactgagtgacgcggcagataaaactcaggcaaaacagttccatgacgaaatcagccgtatccgcagcggcggcctcctgccggaggtccgtactgccaataccctgaccggattgttccggccacagcagaacgaaaaactgctcggctactggcatatgctggaaatgcgcctgtttaatctgcgtaataatctctccattgatggccagccgttatcgctgccggtctttgccgcgccggctgacccggcagcactgctcagtgccgccgccgcagcctccggtggcagcaaagccttaccgtctgccgccatcccggcaatgcgcttcccgcaggcgctggacagtgcccgttcgctgaccggacagctgatgcagttcggttcctcgctccaggggctgattgagcgccgggatgcggaagcgatgagtgaactgctgcaaaaccaggccggtgagctgatgctctcctccctgcggatgcaggaacagtcactcaccgagctggatgccgagaagaaaacactggaacagagccgtgccggtgcacagtcccgctttgacagctaccgcgccctgtatgatgaaaatgtcagtgccgaagaaaaacggaccatggatctgtacctctcttccgcaatactgagcacatccgttgaagggctgaatatggccgccgccgctgccgatatggcaccgaatgtcttcggtatggccgtggggggcagccgctggggcggtatcccgaaagcgattggttccggtatcgcactggcagcctccgccaccaaaattaccgcggataatatcagccagtctgaagcatggcgccgccgccgtcaggaatgggaaatccagaaaaataatgccgaatctgaagtgaaacagattgatgcccagctggaagccctggccgtccgccgcaccgccacagagatgcagcgcgaacacctggaaatccagcaggcgcagactcaggcacaactggagttcctgcagcgcaaattcagcaataaagcactctacagctggctgcacggccgtctggcatccatctattaccgcttctacgacctgaccgccacccgctgcatgatggccgaagccgcgtttgcatggcagaccggtgaaaccacgcgctatatcaaaccgggcgcatggcagagcagtaatgccggactgatggccggggagtccctgctgctgaatctgacagagatggagcaggcatggctgaaatggaaccaccgtacgctgaaagtcacccgtactgtttcactcgccaaagtgtataaggagtatgacacaccggttaatctggcagagaaaattgctgagctgctgaaaggcagcggttccggtaatacaccggcagcaaccgggctctcaatgaccgcagataaagagttatatgccgcgtttaacctgaaggcactgaagattgcggaaaactaccctgcccgtctgggtaaaacacgccgaatcaaacagatcagcgtgaccttaccggcgctgacagggccgtatcaggatgtgcgtgccgtgctcagttacggcggcgatgtcagactgccggacggctgtaaagccattgccgtctcccacggtatgaatgacgacggtcagttccggctggatttcaatgacggccactggctgccgtttgaagggatcccggtggataatgacagcagcctgttcctgagcttcccggaagcaacaaaggatgagcagaaagccctgctgctcagtctgagcgatatcatcatccatatccgttacaccatccgttaa

SEQ ID NO: 279007 - DNA, 552 bp, Morganella morganii
atgcagccactgttccgggttatctgtctgctgacggtattgcccgtgtacgccgggctgtgtgacaacccactgcagacggccatcaccgtcaagatcagtcagcatcgcaccgtttttcagggcgggaatattatcgagccgctgcggtttatcccatattaccgcattgacatcatcgctcccggtatcacggaccggggcgcggtaataccatgcgccgctgtcctgatacaggatcccggaaataccttcaccgtgcagatccagatactgccacggctgctgcggattgagtttacccatctccggctgagaccactgcacagactccggaaaatcaaaggtctgccagccgaaggtcagcggcggcagagacagcattttgccgtcatcctcaaacgccatctgccgggcggcagtcagtgtggtgacaacgtgggtttcctgatactcaaacagcaggcgggaaaccagtgccggtacatccgtaccttctgctttttcagcgagcgtctccaggcggtggaacatcagcacctggcggcataa

SEQ ID NO: 279008 - DNA, 1740 bp, Morganella morganii
atgcttacttacggatctgtatgctccggcatcgaggccgcttcggtcgcctgggagcctgtcggaatgaaacctctctggttcagcgaaattgaaccgttcccgtctgccgtgctggctgcgcactggccgcaggtggataacctgggcgatatgacaaagcttgctgcagcgattcgcgccggtgatgcaccagccccggatctgctggtaggcggtacaccgtgtcaggcattcagtgtttccggtatgcgtggtggaatgagtgacgaacgtgggaaattaacactttcatatgttgagttggctgatgctattgatgataaaagagaagaaaacaatgcacggccggcgatcatcgtatgggaaaacgtgaaaggggttctcagcagtgaagataacgcattcggatgttttattgccggtttggctggagaagatgaaccgcttgaacctggtgcgcgacctgagcatggaaaatcaaaccaattctggacgtggaataaaaaaaccagtcagcacgttgcgagctggccggtcgctggttgtgttattggaccaaaaagaactgtcgcgtggcgggtgctcaatgctaaatatctcggagtcgcccagggtcgcccacgggtattcgttatcgcgagtgctggagaagaattcagtccaaccgaagtattacttgagtaccagagcatgcaggggaattgttctcagagctgcgagacgggggaaagtcataccggaaaagttggaatctgccctgaaaaaacaggcatcacaatctacagaataaggtcatttggtgaatacgttgaatccgatcacgcatcgacattgaaagcccgtgaccacaaagatagtaccgatctcattgttacagaagatcgcgtccgccgcctgacccctgtcgaatgtgagcggttacagggattccccgataaccacaccctaatcagctggcgcggtaaagatgcggctgactgcccggacggtccgcgttaccgcgctatcggtaacagcatggcggtaccggttatgcgctggattggtgaacgtatccttgccgcgctgccggtgcaggaaaccccggatctgcgctcagattacgtgattgaactggaagaactccgtaataaatctgcccacatgctgaaagaggtcggtgaccagtggcggtcaccagatccgctgtattggggcatcaatgcgaagttcggtccgtttactctcgacttgtttactgatgggcataacagtaaatgtcctaattattacaccgccgaagataacgcattgactcaggactggtcagaaaaactgaaagagttgggcggggcagcatacggcaacccgccatattcccgggcaacctatcatggcaaacaggccgttacagggatggttcatatcatggaatacgcaaagtctatgcgtgagaaaggtggccggtatgttttcctgctgaaagcggcgacgagtgaaacatggtggcccgagtatgcagatcatgttgcattcatccgtggccgtatcgggttcgatttaccggactggtttgtaccggcgaatgaaaaacagaaaccgtcaggtgctttctttgccggtgcggttgtcattctggataaggactggcggggagaaaaaatcagttatatcagccgcgatgagttgatcaccatcggcgaactgtttatgcggcaggcacgctggctggtggcgaaaacaggggaggccgcgtga

SEQ ID NO: 279009 - DNA, 399 bp, Morganella morganii
atgatgctttatacccgaattgcggaggatataccggctggtacggagctcactattccggacatcatggaaaaatacggagtctcttacacaaaaacccagtcggcgacgcgtgtgttagaaaaaatcaatgctgttgatgtggttcaccgcagaaaaggcagccagaccatattcagagtggtgccggatgcaccggtattagtcagaaactatgaaagcaaagtatcagcgaagcgggacactttcaaaaaaaagaaaaatccattcggaagaaataaaccctgcgggcaggatgtggccgagcgggaatttgtatccgtacataacagactattttcggtattagcagcgaaacgccgtgaaataaagaaaaacagcggggggtggtgtgagtaa

SEQ ID NO: 279010 - DNA, 1056 bp, Morganella morganii
atgaaaaacactgttaatttaaacagtattaatttggtcaacgacgactcactcagctacatcaaaacccttccggacaattgtattgatttaatcgccactgacccgccgtattttcaggtaaaaacgtgtgcctgggataaccagtggccggatgtttctgcttacctttcctggctggacgaaatgctggctgaattctggcgggtactgaaaccaaacggcagtctgtacctgttttgtggttcacgcctggcctcagatacagaaatactgttacgggagaggttcagcgttctcagtcatatcatatgggcgaagccttccggcccgtggcggcggcaaaacaaagaaagcctgcgttgttttttcccgtctactgagcggatcctgtttgcagagcattatcaggggccggttaaaggaaaaggcagtgagtaccatcagcggcgggaagaattgaagaaaaatgtgtttaccccgctgattgagtatttccggcaggcgcgtgatgcattgggtatcacggcaaaagaaattgaccaggcaaccagcaagcagatgtcttcacactggttcgggtacagtcagtggcagttaccgaatgaagcggattaccggaaattacaggcacttttccagcggacagctgcagagtgtcagcgaaataacccgttataccgtgaacataacgatttgatcagtgagcaacatacactcaggcatgaatatcacgaactggcagatcagtattcgctgttacgtcgatacttcacggtatcagttgatgtgccttataccgatgtgtggacattcccgccggttcagtattaccccggaaagcacccctgtgaaaaaccggctgcaatgatggagcacatcataaaagccagcagccgcgaaggtgatttggtcgctgatttctttatgggatccggagcgacattgaaagccgcactgaagcacaaccgccgcgttctgggtgtagagatggaagcagagcggtttgagcagactgcagcggaactggtgtgtgctgaggtattattcaggtaa

SEQ ID NO: 279011 - DNA, 192 bp, Morganella morganii
atgacaaccctctttgtcagagcacgtcagggtatccgtgtgtcgtatgaacaccagttccgccgttacatcacggaaacccctgcagaagttcctgacaccgcgtattaccgccgcatgatagcgtgcggtgatctgattaaaaccgcgcgtccgcgccctgtgaaagggaaaaaacatgatcacatttga

SEQ ID NO: 279012 - DNA, 651 bp, Morganella morganii
ttgatcacccgtattgagcagcatctgtgtgaccgtctgcgtcaggggatgggtgagatggtgcgtgaggtagccagctacagcggtgagatggatgatgacttaggtcgtatcgtccgggcttttccggcggcgtgggtcacgttcggcggtctgacaaacagcgaatacattgccaccaaccggcagaaggtaaaatgcaccggcacctttgtggtcattgtgggcgattacaacacccgtgatgatgagtccgcccggttcggtggtgttaaccgcaatgaaatcgggacgtaccggcttattcatgcagtacgcagactgaccaccgggcaggatttgggtctggaaattacgccgtttatgccgctgcgggtgcgtaccctctacaacactcaggtgcagagcaaagcactgtcggtgtttgcctgtgagtttgaaacaaagtggattgaatctgttctgggtaacggtctgtggccggaagtgacccgggacacggattcacctgattatatttttaacgagtaccggggaaaagtgaaagagcctgatcctgattttctcagtgtcggcctgcgctatgacccgccgggtatcggcacgattgatgacccggctgacctggtactgacaaggaaaaaaccatga

SEQ ID NO: 279013 - DNA, 450 bp, Morganella morganii
atgccggtcactattaccgccaaagttaacggattccgccgctgcggtatcgcccatccggacacggccaccacgtacccggatgaccatttcaccaaagcacagttagccgaactgcgtgctgaaccaatgctggttgtctctttcggcgctgagccggtaaccggtgcggacacggcagcagaggaacagattgccgccctgaaagcggaagtccgttccctgaatacggccgctgaactgttgaaagatgataaccgtaatcttaacagcatcgtcggtgacctcaccgggcagactgaacgcctgaccgatgagaatactgcccttcaggctgagctggcggcactgcgtgagcagaaagacacaccgcccgctcaggttaaacaggatgatacaccgcctgctgccggtggcagtaacagcggcaaaaagtcatccgctaaataa

SEQ ID NO: 279014 - DNA, 909 bp, Morganella morganii
atgattgtaaataaagcaaacctcgccccgctgtttaccggcatcaaactcgtgtttaacaacgcgctgaaagaagcagaaacaacgtgggaaaaaattgccatgaaagtaccgtccaccggtaaggcggagcagtacaactggctgaataatttcccggcaatgaagcgctgggtcggtgaaaaagcggttaaatcactggcggcccataaatacaccatcgtgaacgatgactgggaagccacgattgaggtcgaccgtaacgatatcgaagatgatcagaccggtcagtatgccattcaggcaaaaggtgccggtcgttctgcggcgatgctgcctgatgaaatcgtgtatgacctggtgaatctcggttttgaacgcccctgctatgacggccagtatttctttgatacggatcaccctgtcggcagccgctctgtgtccaacaaaggcacaaagaagctgtccatcgagtcactcgccaaagcggaagcctcattcggggcggcccgtaccgcaatgcgtaaggtgaccgatgaggaaggccgtccgctgaatatcaatcccggggtgctgctggtaccgcctgccctggaggatgtcgcccgtgccttaatgacggttgaccgtcttgaggacggtaaagccaatatctacaagggggctgctgaagtcgtggtctccgcgcgtattcagtcggatacacagtggttcctgctcgataccacccagccggtactgccgtttatttaccaggagcgtaaagcgccggtactggttgagcagaccagcctggaaaatgacgatgtgtttatgcgcaaaaaattcaaatttggtgcggaagcgcgtgctgcgggtggttacggattctggcagctggcttacggctcaaccggggaggaagcataa

SEQ ID NO: 279015 - DNA, 387 bp, Morganella morganii
atggatcgcaataccgctcaccgtcccggtgaactttttcccgtaccggttgcggccggtgcccgtatttacggcggacatgttgtctgcgctgatgcatccggttttgccgtgcccggtgtgcccggcctgacagtgctgggtgtggctgatgattttgcggataaccgcgacggggaacagggtgccgtccttgttatggtccgccgtggtctggcttttcatctcggcaatgacccggccaaaccggtcaagcagacccataccgggaaactgtgcgacctgaaagacagcaccaccgtctgtgcggctgcggaagacagcaccacaccggcaggccgcgttctggaagtcaccactgatggtgtctgggtactgaccgcttaa

SEQ ID NO: 279016 - DNA, 984 bp, Morganella morganii
atgaatgccgtcattgctgtggcgctgtctgcacagattaccggacaacgtaccccgctggtgattgattatgaacaccagaccctgcgctccgcgaagaacggacagcccgccccggcggcgggctggtttaagcagcttgagtggcgtgaaggtgacggactgtacgccaccggcgtggaatggacagagaaagccgcagcggccatcacggcccgtgaataccgttttatctcccccgtatttttgtatgacgaccagggtcaggtgacgcagctgcttcacgcggcactgaccaacacccccgcgctggacggaatgaacgaggtgctgattgcagcctcccgtcattttgccgcgctcaccaccacaccggaggaacacaccgtggatgaactcatcagtgagctgatcagcaatttacgctggatgctcaacctgcccgccaccgcaaccgctgaggatatcaaagcggaactgcagaaagcgattgacattatttccggcggtaagggaacgacggttgccgccgggcagagtctgactgacctgctgaaaaaccagacgcagcagattgctgacctgtcctcaaaagcctttgacccggcaaagtatgtcccggttgaagggtatctggaactgcaggcaaaactgaatgcagagcgacagcacagtcaggagcatcaggttgatgcactggttcaggctgcgctgtctgacggccgtctgatgccggcaatggaaacctgggcgaaagagctgggccgcagcaattttgccgcgttgtctcagcatcttgaggctgctgttccggttgccgcgctgtcatccacccagaccggcggtaaagcgccgtccggtgcggcaaaaacgcagggcgacctgcagtctccgggtggtgagttaaatgatgccgccctggctgtctgcagtcagttcggtatttcccctgaagaaatggccaaacaactcggaggtcagtaa

SEQ ID NO: 279017 - DNA, 426 bp, Morganella morganii
atgtcacgaggtatccgaaataataatccgggcaatatccggcacagtaaatcgaaatggcagggtttggccggtgtacagactgacagtcagttttgtacgtttatttcgcctgaatatggcatccgtgccctgatgaaactgttacgcacctactcaaaataccagggaaaaccgggggtgggatgcggaaaaattgataccgtggaagagattatcgaacgctgggcaccggctgcggataataatcacacggaaaactatattacccgcgtctgtaaagagaccggcttttggcgttacgagtgtttagatctgcatgacaaagccactgctgttgcgatggcaaaggctattattcaggtcgaaaatgcctcacaaccatacgccgatgctgtatttgaaaaggcgtatgcactgttatga

SEQ ID NO: 279018 - DNA, 909 bp, Morganella morganii
atgccaaccatcgacatcagccagttaccgccgccggacgtgatcgaaacgttagatttcgaacagattttcactgagcgtaaagccgcattgctggcctctctgccggaagaactgcgaacgccggtcgcccgcgtgctgcaactggaatccgagccgctgaccaaactattacaggaaaacgcctaccgtgagttgctgctgcggcagcgtgtcaatgaagccgcacgtgcctgtatggtggcttatgcctacggggcggatttggatcagctgggcgcgaacaacaacgttccccggctggttatccgggaggctgacgacaccgtaatcccgccactgccggccgtttatgaatccgatgctgatttccggatgcgtattccgcaggcgtttgaggggatgagcgttgccgggccggccggcgcttatgtttttcatgctcgcagcgcttccggactggtcgcggatgcttcggccatcagtccggagcctgcctgtgtgaccgtcagcgtgctgtcacgcgagggtgacggcacagcaccggcggaactgctgaccctcgttgataaggcgctgaatgatgagaatgtgcgcccggtggctgaccgcgtgactgtgaaatccgttgagataatcaattacaccattgatgcggtgctttatctgttcccgacaccagaatctgaaccgattgaagcggcagcccgggaacggatagcgcggtatgtgaaagagcaacaccgtatcggccgtgatatccggctgtcagccatttacgccgccctgcatgttgagggagttcagcgcgtcgaactgaaaagcccggcaaaagatatcgtgatcagcaatacccgggcatcattttgtaccgatgtgacagtgacggtcgggggttctgatgagtag

SEQ ID NO: 279019 - DNA, 1233 bp, Morganella morganii
atgcctatgccaaatgatgaccggttggaaaaaatcaccctgttggtgggcggtcatgcttattctgactggaaaacctaccgcatagacagtgatttcctgaaagccgccgatgcctggcagttatccctcggtattactgacggcgtatttaatgttgatgcggttcgtggtgcgccggtgaaagtcaaaatgggtgatgatgtggtgctgtccggccgcatcgataccgtcacccgggatgtgtcgcgcaagggtattaccctcagcctcagcggccgtgatgagggaggtatattaatcgactgtgctgctcccgtattcagtgcccgtcagctgaacctgagtgaggttatcagcagcgttgtccgtccgctcggcattacccgtgtccggattcaggctgataacatgatccgcagtgaccgtattcagaccgaacccggtgaacgcgcctgggataccgtgatgaaagcggccggaagccgtggcctgtggccgtggttcgcaccggacggcacgctgattatcggcgggcctgattatgataagcccccggtggctgacctgatactgacccgcagcggtgacggtaacaatcttatttcgctgtcagaaacccgtaatattcagggctgcttttccgaactgactctgctggcacaaagtcacgcctcgacaaccaaaaataaaaagctgcagacaaagccggtggatgtttcccgcagcgcacagacattccgtatcagcaccgaaagtgatgaggataccggggcggatgacggccagtcaggcacccataatatgcggataaaaatcggtgacccttctgttccgtattaccggccgcagattattaccgccggtgatgtggataatccggctcagcttcagtaccgtgcaaaaaaagcaatggcagatgcccgtctgtcagggctggatatcactgctgaggtgttcggtcaccgtacagacaaaggcgaactctgggagccggggcagcgggtcagaattaaaagtgagctgcacggtattgacgggattttctttctgatgggccgcacgtttaccggcggccgtccgggcgggccggtgacacagctgcggtttaaggaggatggagtctggataccggatgtctacacacagaaagccaaaaataaaaaagggaaaaagaaaaaaggcaaagaccagatccggccggttgcactgacagcagacggagggaaataa

SEQ ID NO: 279020 - DNA, 654 bp, Morganella morganii
atgtggaacaggattaatcagcgcattaacagcgcattaaacgccatcagaatgccgttcagagcgcgtttaaacagcatcgacagcagcggtaaagtacagaccattcaggcggaggggctggcaaaagaaccgctgcagggacaggagttattccagcagtacggcctgacctccaacccgccgccgggtacaatggctgttgtgatccctgtcggtggtaaaacgtcacacggtattgtggtggcaaccgaacacggcagctaccgccttgccgggctgaaatccggcgaagtggcactgtacaccgatgagggggctaaaatcgttctgaagcgcggaaaaattattgagacagactgcgatattttccgggtgaactgcaaagaatttgaagtaaatgcggaaagtaaagcggactttaacaccccggaagtcaccaccagtcagcgccttacggccatggaacaaatcaccggtaacggcggtatgtcaattaagggtggcaccggtgcggactttgagggtaatatcagccagacatccggcagttatactactgacggcgatgtgaaagccggtaagatatcactgatcggccataaacataccaacggcaacaacggcggcaataccggtaatcccgtcatctga

SEQ ID NO: 279021 - DNA, 285 bp, Morganella morganii
atgaatatcaaaattaccccgtccaatcagggtgttttaaaaacactgattcaggttgaatctgttgtaaaaagcctgggtgatcgtggtgtgacagtgctgggagtgtcaaccggcaatgataaaccccgtatcaaaatagcgcgtcatgcgtactgtgatcagcttatccgttccggtaaagcctgttatctgcaattcggtaacagtcgtcacggttactacaaacaaggcagctttactcaggatggctgccgtgtgttctggtctgaatcaatttattaa

SEQ ID NO: 279022 - DNA, 195 bp, Morganella morganii
atgtcccggttgtctgcgaagcagtttaatgaacgctatccggtggggtcttattttatctatcagccgaaccgtattttacgcggcggtacgatggtcagaacgttaagtcgggcagaggataaaaataaccggactatcgtggaaatcgatgatgagccgtattacatcgatattgattcattaaactgctga

SEQ ID NO: 279023 - DNA, 342 bp, Morganella morganii
atgaaatattacggttttcacgcactgaccggcgaaaacatcaccgatattgaccatgtgcgccagtcggtgcgcgatatcctgaaaacgcctgtcggctcccgtattgcccgccgcacctacggctctttactgttccggatgacggacagcgcggacaatcccgcatttaaattacagctgatggccgcgtgctataccgccctgctgcgctgggaacctcgcatcctgattgaaaaaatcaccattacatccccggaagccgctcaggttgtggttgaccttgaaggtacctattcagccaccggtcagcctttctctttctccgtacccgtgaggtaa

SEQ ID NO: 279024 - DNA, 639 bp, Morganella morganii
atgagcacaaacaccagcatcgcggaactgctccgcctgatccgaaacatcatccgaaccggggttatcactgatactgatatccgccgcggttgtcgcgtgcagaccggaaatctgcaaaccgactggcttccgtgggtcaccccccgcgccggggattcccgccgcagctttccgccgtccgtgggtgaacaggtggtgatcctgtctgtcggcggtgaactgaccactgccgttgtgctggccggactttttcaggatgaccaccctgagccgtctgaatccctgactgccgaccacgtgacctattctgacggtgcggtgattgaatacgaaccggcgaccggcgcactgaaagcgaccggtatcaaaaccgccctgattgatgccggggaaagcatcaccgcaaattcccctgttgtgatcgtgaatgcggaagaacacatccgccttgttaccccgaccgttatctgttcggacaatcttacctgcgccaccctaaacgtgatgcagggcggggaaatgtccggcagctttacgcataccggcgggacgttctcctcaaacggcgtggtgattgatgatcataatcacggcggcgtagagcgcggcggaagccggacggacggcccgaaatga

SEQ ID NO: 279025 - DNA, 618 bp, Morganella morganii
atgtcagaacagagccttgatgcactggaacatgaacttaccggactgctggcgcgggtaagaccggcagaacggaaaaaactgtcacgggaaattgtccgcgacctgcgcaacagccagattaaacgcatccgggaacagaaaaacccggacggcagtgcctacacccgccgcaaagcacagtttattacggtacagcgggaaatgaagttcatctggcgcggtcagcagcgcagcctgaaaaactggcagcagaacaagcggatgataaccggttttgatacggataagggcgcggtgcgatccttccgcaaaggtgatattcagcgttttgtgtccgtaaaaaaagaccggatcaaagtcaaaggtaaaaataaacaaacccgcatgttcaaacgtctggcaacggcccgttatatgcggatatttgccaatgaaaacgaggcatccgtttactttgccccagctgcggccaatatcgcggcagtacaccagttcgggctgaaagaacggctgcggaacatggatattcagtatccgtcacggcagttactgggctattccccggaagatgtccgccgtatcgaatccctgcttatcgactttcttgcctcctga

SEQ ID NO: 279026 - DNA, 468 bp, Morganella morganii
gtgccgcagaaaaggcaaggcaacatgaaaaaactgaacagcattaaagataccctgctgaaaaaaattcgttacctgagcgacaatccggaaaaactgtacctgttcgttgacgatggcggcattattgcgacaaatgaaccgtcactgtcctatgaatacagttacagcctgaacattatccttgaagcctttcccggtgatcagaatattgtgtttgccgtggtggttgaatgggtgaaacaacatcagccggatattctggccaacccggacaagcggcagaacggtatccgctttgaggcggatattctcaataacctgagtgccaatatcagcattgacctgaaactgaccgaacgggtgatcgtcacagaaaaagacgggcaataccacgttgacgccgtgtcggaaccggaaaacccgatggacagctgggagtatctgaatgtcagaacagagccttga

SEQ ID NO: 279027 - DNA, 549 bp, Morganella morganii
atgacgaccaaagcccgcattatcacgctgttgttcagcctgctgattgcgggcttattatcctttggtctgaaacattactacgacaaagccggacggctgaccgctgaaaatgacgggctgaaaaatgacataagcagacaggccggtgttatcgccgcacagtcatttgaatttaaccgctttaaccagatagcacaggcggcaacgcagaataatatctcgcagcgtgccgcctcggaggaacaccggattgaataccgcaccatccttaaaaaagatccgacctgtgatctgcctgtgcctcgcgctgtttctgacgggctgctccgtgacacgcaccgtctacgttcccgcacaatgcaccccgctgccggactcactgacaaagccggtgccgccgtccctgccgcccgtgttctgacctactgcgaattaccgctgtggattgatttgctgttagcggatctggatgaggcaaacacccagcttgagggcatccgtgccgcagaaaaggcaaggcaacatgaaaaaactgaacagcattaa

SEQ ID NO: 279028 - DNA, 426 bp, Morganella morganii
atgtcacgaggtatccgaaataataatccgggtaacatccggcacagtaaatcgaaatggcaggggctggccggtgtacaggctgacagtcagttttgtacgtttattgcgccggagtacggcatccgcgccctgatgaaactattacgcacctactcaaaatatcagggaaaaccggggatgggatgcggaaacattgacaccgtggaagaaattatcgaacgctgggcaccggctgcggataataatcacacggaaaactatattacccgcgtctgcaaagaaaccggattccggcgtaacgcctgcttagatctgcatgataaagcaactgctgttgctatggcaaaggccattattcaggtcgaaaatgcctctcagccgtacagtgatgctgtttttgaaaaggcgtatgcactgttatga

SEQ ID NO: 279029 - DNA, 312 bp, Morganella morganii
atgaaaacaatgaaagaacactgggctgatattctcgacacccttaaaaacgcatggccgcagctttccggtgtggcggttgccattctgatccgttatgcgtgcctgatttatgacggcgacacccgtaaaaacaagtgggcggaatgcctgctgtgcggtgcgctgtcgtgggccatcatcagcggcgcggagttcatcggcatccctaacggtgcctccggcatgatcggcggtgctgttggttttttgggtgttgagaagatacgcgaaattgcacaccgcatgattaataaacgactgggggactga

SEQ ID NO: 279030 - DNA, 204 bp, Morganella morganii
atgaaagtctttgccttacagggggaaacccttgacgccctgtgcttccgggtactcggacagactgccggtgtggttgagcagacgcttgaactgaaccccggccttgccgctcacggcgcggtactgccgcacggaacgcctgtcgaactgcccgatgtgactgaaccgcaacaaaaaccgatgatccaactctggaactga

SEQ ID NO: 279031 - DNA, 465 bp, Morganella morganii
atggacttcacatcagacaaaaccactgacataccggacgaaacactcagcagcggggattttttcccgggtatcagtctgcgggattatcagcttgcggtactgacggacggcaaagtcaccacggaacgcctgaaacacaccatcatcaccgccgtgattgaagtgaaccgcgagttagcggactggaaacaggctcagattgccgccggatttatgtcaatggcagcgatcccagctgaccacctcggcaatgaaagcgaactggttttactttaccgccgagcagtctacagccacacaaaagccagtctgacagaacgttaccgcgacactgacaccaccgacagcggcgaaaagaaagcgtccgcccttggtgaaaccgtagatgatctctggcgtgatgtgcagtgggcgatccagcgtatcaagggtgaatcacacaatatctgtgagctgatatga

SEQ ID NO: 279032 - DNA, 714 bp, Morganella morganii
atgagcggcagtattttccgccgtcatgtgatgctggtcagtgcgaaacaggatgcgcagcagcgcagccaggtcactcagaccggcacggcttacacacagatgatactgatgatgaacgctgaccgccgcagactgaaacgcattcagtcctttgagcgcaaagccgccaccaaacgggaaatactgccgaattacgccccgtgggtcagcggcatcctgagttcgggaaaaggtcagcaggacgatgttctgatgcgggtgatgctctggcggattgatgccggagactttcacggcgcactggatatcgcggattatgccctgcgccatgacctgaaaatgccggaaaatcacacccggactaccgggtgtgccgtggcggaagaaatcgcggatatggcggaaaaaatgtacaccgccaaaaccccggtaccgctggatgtgctgacccgcaccctcgatctgaccggtgatgaggatatgccggatcaggtccgggcaaacctactgaaatggctcggctatgcacagcgtgatgacgggtatttacagcctgccacctgttcatggttacgggcacttgaattatatgaccgtgtcggcgttaagcaggatttgcgccagctggaaaagctgatcgcaaaacagcaggaagaacgcgacgcggcacaacagaacgagccacagcgcctgggcggcacagcggaatag

SEQ ID NO: 279033 - DNA, 438 bp, Morganella morganii
atgggtaatggcgagagattcagtctcattgagatgttcggttctgtccctgtgcatccggaaagatttaagcaattagacataaaattaaaatggcttggcatctgtgaagaaggtaatagcttttgtgtcagttgcggaacaataacgccgtctgttccccgctctcatcatcctgaatgcctttcttatcgtgatattgattcatatccggaatataaaaatgagttaggaatttgtcctgactgcggttcagaagatggtctgtcgataaacagtaattgtgatcttggtatatcagaaatcagttgctgcgactgtcagttcattttccagaaagaaatgagcgaagaagatttaatatcttcatttaacaaaaaatataaatccacgttaaatagcgaggccatgtccggtaaaaggtttgctgatgactaa

SEQ ID NO: 279034 - DNA, 1497 bp, Morganella morganii
gtgagtgatgcggatgacggctacagcttttttgtggaaacctacttcccgcattatgtccgccatcattcccgcagccagctgcatgattacctgttttcccgtctgccgaaaattgtcgccagtccggccgctgaaagtgatgcgatagccgcgccgcgcggtgaggcaaaatccacgctggtcagtcagctctttgtgctgtggtgcattatccgggggattaaaaagtacccggtcatcattatggacagtatcgaccaggcctatccgatgctggaagccatcaaagccgaactggaatataacccgcgtctgaagaacgattatccggatatctgcggtcagggccgcacctggcagatgggcaccatcgtcacccgtaataatatcaaagtgacggtggcgggcagcggtaaaaaactgcgtggtctgcgtcacggcccgtaccgtcctgatctggtggtgctcgatgatatcgagaacgatgagatggtgcgtaatccggaacagcgggacaagctgcacacctggcttaaaaagaccgtgatgccgctcggtgaggccgggggtaaaaccgatattgtctacatcgggactatcctgcattacgactcggtactttcccgcaccctgaataacgcgatgtggcgcactgtccgctttaaagccattctgcagtggccggtcaatatgaaactgtgggatgagtgggaaacccttatccataacagactgccggatgaggctgagcgtttctatacggaaaatgaagcggccatgactgaaggggccatagtgtcatgggctgcccgcccgctgcttgctctgatgaaaatccgcgcccgtgacggtcacgacacctttgattccgagtaccagaacgacccggtcagcggtgaggatgcgattttcgccaacagtattatcttctggtctaaccatctggctgactggatttactacggagcctgtgaccccagcctcggcagactcagcaaaggccgtgacccgtccgcgcttctggtcggcggctttaaccggatgaccggtattctggatgtggttgaggcggatatccgccgccgtctgccagacaaaattattgaggatgtgatccgctatcagcgtgaatacgggtgtctcatctgggcgtttgagtccgtccagtttcaggagttcctgcgcacggagctggtgaaacgctccgctcagcagggtattccggttccggccattccggttatcccgcacaccgataaagcgctgcggattgaatccctgcagccgcacatggtcaacgggctgatccgtcttcacccgacacagcacaccctgattgaccagctgcgtcatttcccgaaagccgatcatgatgacggcccggactgtttacacatgttgtggtcacttgccgcctcacgcgcgggcagcaccgacatccgcagccgctctgtgcgtgacggcggaaaacgctttggtgcaggtgcctggtaa

SEQ ID NO: 279035 - DNA, 480 bp, Morganella morganii
gtgataactttgtgcggtccgggcattggtaccgaggaaatacagggtggcaccattcggcaggacaatcgggtcgcctttcaggtcaacatcgacttcgcgggcaatctcaatgatgtactgtttgaatacatgtgcctgtgccttactggcggaaagaaatatctgattgcggccggtcagcagcgcgtccataaaggcttcgcgggcaaaatagtaggttgcccctatctggcgggatttgaggatatcccggatgcggttctgtgccccggcgcggtaccagtttttctgatactcaaacatgttccccatgaaaatctgttccagcttttcgatctgttcgtcgctgaacacatttttttccggggccttacgttcaccggcgttgcggttcgccagtttcgggttgagatcggtctcattgccgccgttctgatagcgccggattttggcggcacgctcaagctgacggcctaa

SEQ ID NO: 279036 - DNA, 840 bp, Morganella morganii
atgacagcaaaatcaaagccggtgcgtatctgtacagagggtgccaccactgatggccgcaccgtacagcgcagctggctgaccgatatcgaaaaaaactacgacccgaacgtctacggggcgcgcattaatattgatcacctcaacatgtcctatatgccgcgactgggggatgtcgaatcggtgtataccgaagagattcaggacggtgcgctgaaaggcaaattagccctgtatgccacgctgaaaccgaccgccgacctgatcgaaatgaataaaaagcgtcagaaagtgtacacctctgccgaaatcgccccgaaatttgcggataccggcgccgcctacctcgtcggtctggcggtgacggataacccggccagcctcggcacgcagatgttgcagttcagtcagaacggcgggaaaagtccgttcgaagatcgtaagcagtcgaaagacaacgtgatcaccctggcggaagagacattcattgagttcaccgacgacaaaccggaagagcctaaaggaccgtccctgttcagccgcatcgccgaaacactgagcggaaaaaataaacaggacgatgcccgttttcatgatgttcacaggagcatcgaactgatcgccaaagccgtcgaagctattcagacggatgttgccgcactgacaacaaccacgcttacagtggatgaaccagaagagccggcggaactggccgcgttgaaaaaagaactcagtgaactgaaaacgcagctgagccggcaggataacaacggccataagcgcccggtgtcactcggcaataacggcacacagccggaagaactgctgacggactgctga

SEQ ID NO: 279037 - DNA, 438 bp, Morganella morganii
atgcgcttctgcatcggtgcggaccttttgcagccagccgatattgacgtcttccagcattttgtttgcagcacggtcagattttttggcacggtgtgtaccgttaaagccaatcatgatgcggtcaagcgcctgtctgcggataatggcattacggatacgcagctgaaaatctttgaacttcgcccacagatccagtttctggtaggtcagtgcggtgtcatagttggtctgctgacatacatactcaatgtcggtcatctcagacgggtcggtcgcttcgcgatcttcttttgtggtgtctgtggttccggcgatagtggagccgacgcccagcccgataacctggcctgttttttccggaaccgggacaatattgacaaggccgaggaatgccgcagactgctgaacgttatcttccagcgtctgtgcgactga

SEQ ID NO: 279038 - DNA, 480 bp, Morganella morganii
gtgataactttgtgcggtgcgggcattggtaccgagaaaatacagagtagcgccgttcggcagcacaatcggatcgcctttcaggtcaacatccacttcacgggcaatttcaatgatgtactgtttgaaaacgtgtgcctgagctttactggcagaaagaaacacctgattacgtccggtcagcagcgcgtccataaaggcttcacgggcaaaatagtaggtcgcccctatctggcgggatttgaggatgtcgcggatgcggttctgtgctccggcgcggtaccagactttctggtattcaaacatattacccatgaaaatctgttccagcttttcgatctgttcgtcactgaatacgtttttctcaggggatttacgttcaccggcgttgcggttcgccagtttcggattgagatcggtttcattgccgccgttctgatagtgcctgattttggcggcccgctccatctgccgccctaa

SEQ ID NO: 279039 - DNA, 840 bp, Morganella morganii
atgacagtaaaaacaaagccggtgcgtatttgtgttgaaggtgccacaaccgacggccgcacagtgcagcgcagctggctgaccgacattgaaaagaactacgatccgaacgtttacggggcgcgcattaatcttgagcacctaggttacgaatggatgccgcgttttggtgatgttgaatccgtgcatacggctgaaatcactgagggtgcgctgaaaggcaagctggccctgtacgcaaccctgcttccgactgacgaactgatccagatgaacaaaaaacgtcagaaagtctatacctccgctgaaatcaatccgaaattctccgacaccggcgaagcctatctggtcggtctggccgtcactgacagcccggcaagtctcggtactgaaatgctgcaattcagccagaaatccggcaacagcccgctgtctgaccgcaaacagtcaaaagacaacgtattcaccctggcggaagaaaccgtgatcgaactggcggaagacaagccggaagagcctaaaggcccgtccctgttcagccgcatcaccgaagtgctgaccggaaaaggtaagcaggatgatgcccgttttcatgatgtgcatcagagcgttgaactgtgcgcaaaagctatcgaaaccattcagacagatatcgccgggctgaaaaaaaacgcgctttccctgtcacagccgggtgaaccggcagggctggatctgctgaaaaaagaactcagcgagctgaaagaacagttaagaaaacaagacggcagcggcagccaacgcccggtatctttcggcaacaacggcacacagcaggaagaactgctgaccgactgctga

SEQ ID NO: 279040 - DNA, 267 bp, Morganella morganii
atgcagcggagcatcggtgcggactttttgcagccagccgatattgacgtcttccagcattttgtttgcagcgcggtcggatgttttggcgcggtgtgtaccgttaaagccaatcataatgcggtcaagcgcctgacggcggataatggcattacggatgcgcagctgaaaatctttgaattttgcccacagatccagcttctgataggtcagcgcggtgtcaaaattggtctgctggcaatcgtaggtgatatctgtcatatctga

SEQ ID NO: 279041 - DNA, 441 bp, Morganella morganii
atgatgctttacacccgaattgcggcagaggaaccggccggaactgaaatcacttccgggtacatcatggagaaatacggcgtatcacgcagtatcagccagtcagctgtcagggttttagcgaagattgaagcggtcacgccgacccggtggcgggggaatgaccggatggctttccgggtattgccggatgcacaggagaaagtccgcgaatatgaggaactggtggcagcctgtcggcggggagtaaaaaaggtccgctgtacggacccggtaccggaagataaccgggccactctcaccgaacgggaatttgtatccgtctataaccggttgtttacggctttcacggcaaaacagcgggaactgagaagaaaaaacggtctgcgatgtgaggcgcagtatacggctgcgcttaatgagcggagagataaacgatga

SEQ ID NO: 279042 - DNA, 792 bp, Morganella morganii
atgagcaatctgattattgttgacggtattaatgtgcgccgggacatggccggtcgctattgcctgaatgatttacaccgtgccgccgggggtgaagagcgccataagccatctaactttatgcggatggaatcaacacaggcattgtgttcagaaatcgaccgatgctcagatatgagcatcgcctctgtagacaccattcgcggcggtacggagcaggggacatatgttgcccgtgaggttgtttatgcctatgccatgtggataagcccgctgttcaacctgaaggttatccgtacgttcgatgcggtggccggaacacagcaggcggtacagctggccgataaggtacaggcaggcgctatcctgctggagtctatggcgaaaacgctgaatctgtcgaattcctcaaaactgggcgggtatcagaaactgcaaaaaatggctggtcttccggatctggctccctcctatgcgattgatgcaccggcgggcgcggtggatggctccagcagaccgacaacctctctgactacgctgctgaaaaatcacaatgccgcattgtctgcgaccagagcatacaaacgtcttgctgagctggggattgtcgaacagaaagcccgtccgggttcgaagggaacacaaaaactgttctggtctgttacatcaaaggggcttctgtacggcaaaaatatcacatctccggcgaacccgagggaaacgcagccgcatttctttgagagcaaatcagcggaactgctggcactgatgatgactccggcggtggcctga

SEQ ID NO: 279043 - DNA, 462 bp, Morganella morganii
atgacacagggtttccatcaccatgatctggaaaacgtcagcgctctgctgccgcagtcagtaaaagacctggctgatactgtcggatatccgttaaccacaaaacttatcagtcatttcggtggcgcaacactgtccgccaaaatggggctggcaaaagaccggagcggcggcgtttaccggcttcttcagaaggtgttttcagaaagtgaatgccgtctgctgatgcggtatttcggtgataccgccttttatatcccccgttgtgataaagcgttccgtaccctgcgtaaccagcggttcctgactgaatatgatgagctctgtcaggacgggtattccgggcgtcaggcgatggctcagctctgccctaagtatggtttcagcgaccgcatcggatgggacttgattgctgcccgcaccggacagcctggcgctgttcagcctggtttatttggttga

SEQ ID NO: 279044 - DNA, 186 bp, Morganella morganii
atgcctgacactatcacgcttacccttgaacagatccgcgctctggccgacttcgccgcacaggagggtcagccttcctacaccatcactaccggtattattccggcctttgacgaccagcctgaatatcaggggctgatagcgttctccggttcagaagaacacggtgtgctgcagctgggttaa

SEQ ID NO: 279045 - DNA, 339 bp, Morganella morganii
atgagtaccgcccctgtttatttcggacaaaaacaacaaggtagtcacatgggtgattttttcagtgacatttatgaacgggtctcctactggcttgccggtatcggttttgttctcagtggtctgtcactgtacgcatggggatttttaatcggcgtctttatcagttcgctgctcggtatcctgacttaccgcatgaacaagcgggaacagcagaaacgtacccggctgctggaaatgagtctgcagcatctgattaaccacccggcggatgaacgtgcgaaagaagttgtcgccgcgcttgccggagcctccgcccgttccccgaaggatttataa

SEQ ID NO: 279046 - DNA, 1914 bp, Morganella morganii
atgaaacagatgagcaatatgaagctcggcaatatcggcagtaatattgtgacggctgccggtggtctttatgccggagccagagtcgtcgcggagccggtgaaaaatcagatgtcctatgaggaacgtctggcttacatgagtaatacggcattcagtgatcgtaatgctgaaggccgcattgaaggtatcagagagcttgacgggctggtaagaaatgctgttcagcaaggtggcggtacaaaagaaagtgcggctgatttgctggataaaatgctggctaaaggtgtgttcagtacagatgaaatttatcgtatgatgcccgaccttcaggcctatgccactatgtcacaggtcagtggtgaagagcttgcaaccatggttgaggcgttaaaagatttcggtatcagtgacccgaacaaagtaatgaaggcgcttgatatgagtatcaaagccggacaggaaggtgcctttgaatttactaacatggcacggtggctgcctaagcagttagccagtgccaaagtgctgggttatgacaacctcgacggctacgccaaaattctgtcatataaccaaggggctatggcaacggctggttcacaggatgaagccggtaataacctgtctaacttactgtcaaaacttatcagcagtgatttggtcagtaccgcgaaagggatcaaggtcgatggttatggcatcgatatcaccaaaacgttattgaatgccagggaaaaaggtattgacccggtaacggcagttgtcaaactgacggatattattgcatcacagaaccctgaatttaaaaggcttcaaaatgagattgcaaaaacaaaagagaactcacctgaacgccagcgactgcttgaatctcagaacagaatcctagaaggatcagcagtcggtcagttaattactgatcagcaagcacgtatggcactgttggctatgcgtgcccgtcaaaattatgttcgtgaagtcgaagctgaagttaataaacaacagtatgctgcgcctggtcagggtgaaggagcaatacaaaaagaagtattgtttagtctgaattcatttaaagtcaagcaggcacagaaccaggctgactttgcttctatggactcagtaaagtcattatctgataccgtcggctctctctcggagcagttcactacgttcagtacagaatttccgacattcacagcggccctgatgggagcaaaaaccggtattgaggccatgacacaggccgccgtggcctttgccgcgcttaaatttctctttggtggtgccggtgcgggaagtaccggtggggttgccggaacggtgggcaccagcggagctgcagcagccagtggcggatggttaaaaccgggcgcatttaagctggcggggttagccactgtagccactgagtttgccacggccaacacaccggaagaaacagatgaactgataaatggtgaggcccgtatggccgcactacgtgcccggtatggtgataatatgattgccaaggctaaagagcgctttcagccgtggtatcagttcggttcaggctatgctgctgagaatgaggaatgggtcagtcagtacatccgtgagcaggatgagcaggctcagctggctaatgcagcactgtcacaggtgcgttttatgtcagagcgcgccggaatgaaaaccgatgccctgccgaaagagtttgtgccggattacgccagacctgtcagcgatgatgtgattgcggggctgatgctgccggtgcgtgagattgaaaccctgctgaaaaatcagcagaccgccccgcagccgatagaggttcgttccgtggtggaactggacggccatgtgattgcagaaaccgtgaacaatattaacggtaatgatgccggacgaaccaccggaggcggattatga

SEQ ID NO: 279047 - DNA, 1866 bp, Morganella morganii
atgggcaatattgcgaacgggttcgtgacagctgccggtggcctgtatgccggtgctcaggcatttgcagagccggtaaaaaatcagatgagttacagccgtcgtctggctgatatgagcaataccgcgttcaatgatcgtgatgagcagggacgtattgccggtaaagctgagttggatcagattattcagaagtctgttgccgccggtggcggcacaaaagaacaggccgcagatcttctgggcggaattttggctaaaggtgtgtttgatattgaggaaaccaaaaccttgatgccgcttctgcagcagtatatgacggcaaccggtgtcggtggtgaggaactggctaaggtggctgagtcccttaaaatgtacggtatcacttctgccgatgagatgatgagagtcatggatgtcgccatccgctccggacaggaaggctcgtttgaatttgcggacatggcccgatggatgcctgctattttatccaaagcgcaggccattggttataacggccctgaagacattgcaaaacttctggcctatggtcagggtatgatgaaaaacgcccccaatgcggatattgccggtaataactttgtaaacctgctgaataaaattcccagcagagatctggcaatgcaggcctcaaaaataaaagtcggtaaatacggcatagatatggccggtacactgactcaggcacaggaaaaaggtattgacccggtaactgcacttgtcaaactgacggatgttattgcagctcaaaatcctgaattccgtaagctggatgataaattgaagaacacggataaaaacagccctgaatatcagcgtctgctggaatctcagcgccgtattcttgaatcatctgaaatcggtcagttaatcagtgaccagcaggcactgatggcgctgctggccgcacgtgaatatcgcgggtacattcaggaagttgaaaatgaaagtaaaaagcaactgaccttaccaaaaggacagggtgaaggttatgtttcatttgcagtcgtcagcaatgaaaatgaattcaaactgcagcaggctaagaatcaggccgatttttcctcgatgggctcaatggaaacattatccaataccgtaggctctctctctgaccagttcacaaagttcagcaccgaatttccgacattcactgcggccctgatgggggcaaaaaccggcatcgagtctatgacgcaggccgccgttgcctttgccgcgcttaaatttttgttcagtggtaaaggcgggcttcccgggcgtggcggtgtatccggcgggaatgggggcataatcgatactatcaccggcagtgatgcagtaccggttaaaatcacgaactgggatggtatgcctgaccgtggggataactcattattcgggatgctgttccgtaaattcggcctttatgccgaaacaatcagcttctttaatgactcggttgatgagaagaaactggaagaaacacgaaataaaatcatcgataagacagacaaaaaatatatcgatgccggtattgatcccaaagaaaaaaacgggtggataccaacagatgcacatatctggtggaagaacctcgggcgtgatgatgccgacatcaggaaaaaacgggatgagctgatgtctgttccggcatacggcgctccgctggctcctgaagacatcgcgaaaaccagtgcttctgtcgcagtaaatgccctcagtgagctgataaaaaaccagcagaaagccccgttaccgattgagcttcgctctgtcgtggagctggacggccatgtgatcgcagaaaccgtgaaccatattaacggtaatgatgccggacgaaccaccggaggcggattatga

SEQ ID NO: 279048 - DNA, 966 bp, Morganella morganii
atggtggggaataatccggtgtcgttttttgatacgaacggattaagccggacgcagcaaataaatgattatgcagaatttatgggggcggcaaaagcggcaattcataaaattcacacctatattgatgctctggcgaatccatcccgtatggccgctgctgagctacgttctgtagcgagaaaagcaacgacgtacggacttaaaacagccggcggtattggcggggttgcagcaggtgttgcaattgcggcttctgttactgttgctcttcctgtcgtggcgccggttgttatcggtactgcagctgtgggggggatcataggggggatagccgccggagttgccagtgaaaaagcatttgatctgggggtcaatgctatttttgacaaaaataaattccagccgacccgggttcagaccaggaaaatgcaggaatcactggcacaggccggtggaaatttctttgccaatcaggttaaaggccagcttgatttaagagaacaaataaaaacacacgggtcagcaaaagcagcttcagcactggaagaggttctggatctgggcgttaagcttcctgtaaaagcacttttggatacaggattggagctcaatgatttcagaggaataacgatagcaaaaagggataaaatcacaggtgttctggatgcagtctcttccggactgtcatctgataaccacaatgaaattatgggactgtttgatgataaagggactgacagtgtcagaaaatatggtacgctgaacacagggcggattttccgtatgagttatacaaaagataaactttctgatatgcggactgagttactgaccagagtcagtgatgtcaggagaatgctgaataatccggatatttataaaggaaaagcagcaaaagctcaggtttccggggaagcattgtttttccatcagaaaacaataacccgcagagcatcaatttga

SEQ ID NO: 279049 - DNA, 213 bp, Morganella morganii
atgtctaatacaatgactggctcagtaaaatggtttaacgaatcgaaaggttttggcttcatcgcaccggctgatggcagcaaagatgtgtttgttcacttctctgcgatccagagcgacagtttcaaaacgttatatgaaggtcagaatgttaccttcaatattgaagacggggcaaaaggtccgtctgctgcaaatgtggtgggtctttaa

SEQ ID NO: 279050 - DNA, 441 bp, Morganella morganii
atgagtgatcattgttacagagatccggaaacaggtgatgtttatgaatatgacaatgagcaaatgactgttattaacagaataaacgcgcctgatttcgacaacgaaaaagaacaaattccagctattttctttgaaattaacgagaaaattaaaagcatgaaaaaaatgacggccaaagaggttgatgcacacatcaacccgccggtaactgaagagcaactgatagcagaggcagaagccaaaaagcaggcattgatcgctgaggccagccagaaaacccaactctggcagactcagcttatgctcggcatcatcacggatgaagataaagccagcctcaaagaatggatgctgtacgtgcaggaggtgcaggcagtagatccatccctcggggctgctgtggtatggcctatacctccggcttcaccggccagataa

SEQ ID NO: 279051 - DNA, 597 bp, Morganella morganii
atgagccaggatggttcaactaaagcatttatgcaaataggtgctcatggccttggagtcaggtctgtcggtgatgcaaacgtaccaaaagataattccggtgccggattttatacagtcggtaacctggggttcggagacattccgccaaattcggtgttaatccgtctgcagggggaggcagaccggtttatcgggtgctcaactgacgggaaaggaaaaatatttttcaaagaccatgcgctgggtcagttgctctatttgtatcatgaagcaaataagcccccgagttttggcattggctacagacataaaaatgaaaaaagtaaccgtaaaaacgacacgttatacacaaattcatcagatgaaactatctgggtcagcgtgtcgtcaaccacaacggatgtcaacggtgtattaacggctaccatgtatgtcgacggggaaaatatatcccggatggctattggaggcggcggcagtatttcggtcacaaaagccgtatcagtatcaggcccggtagggccggggcaaacggtaagagtaagagtcgaaaacggtgaaattggctattggacggagtttaaaaaatcatga

SEQ ID NO: 279052 - DNA, 138 bp, Morganella morganii
atgttcaacatcgaaaccaagcgattttattatgtgttcaagagcggcagcttggagtactgcaccgtagttatggtcagaatattgaaagttaataatgccaatttttttagtattcatcgtatgctttttaattaa

SEQ ID NO: 279053 - DNA, 258 bp, Morganella morganii
gtgtcggaaaccggcatcaccgaagaaacctattacgaacttgaacgcctgatattcgacgcaaaacccgtcagtcgtcacctgctcgggctgtccatcaacctgagtacacagggcaatatttactgtggtgccgccaccaacaccggcgacacgctgactgtttatccgtatatcccggaaaccgtccgggtggaaagcgcggactatctcggtgccacgctgataaccattgataaagtgagagtaaacccatga

SEQ ID NO: 279054 - DNA, 534 bp, Morganella morganii
atgcgcatcccgcaggcgtttgagggaatgagtgttgccgggccggtcggcgcttatgtttttcatgcacgcagcgcttccggacaggtcgcggacgcctcggccatcagcccggagcctgcctgtgtgacagtcagcgtgctgtcccgtgagggcgacggcacagcaccggcggaactgctgaccctcgttgataaggcactgaatgatgagaatgtgcggccggtggctgaccgcgtcaccgtgcagtctgtcgaaattgtgaattatgcagttgatgccgtgctgtacctgttcccgacaccggaatccgaaccgattgaggccgcagcccgtgaacagatagcccggtatgtgaaagagcagcaccgtatcgggcgggatatccggctgtcagctatttatgctgccctgcatgttgagggggttcagcgtgttgaactgaaaagtccggcaaaagatattgtgatcagtaacacccaggcatcattttgcactgatgtgacagtgactgtagggggttccgatgagtag

SEQ ID NO: 279055 - DNA, 372 bp, Morganella morganii
atgccggtcactattaccgccaaagttaacggattccgccgctgcggtatcgcccatccggacacggccaccacgtacccggatgaccatttcaccaaagcgcagctggatgagctgcaggcagaaccgatgctggttgtatctctcggaacggccccggagaccggtgctgatacggcggcagagaagcagattgccgccctgaaagcggaagtcagtaccctgagtctgcaggctgaacaactcactgccgaaaacagtgcgctgaaagcggcgctgtctgcagcggaaaaacaggccggtacggctgaatcacccgcaggcaaaccacccgctgccggtgacagtgacaaaaagtcatccgctaaataa

SEQ ID NO: 279056 - DNA, 240 bp, Morganella morganii
atgcatgatctgctttttgattactatgttttcggtaagacgtttattcagttggccaagaaatacgggtgctcagacactcacatagggaaaaaactccagaaggcagaagggctggtggaaggaatgctcataatgggagatataaaactggaaatggacggtacatcacatcgtggaggtatgcggacatttatgaacaaattacatgatttaaaaattaatactttacgatcgtaa

SEQ ID NO: 279057 - DNA, 438 bp, Morganella morganii
atgtcaatcacaaaagaacagtgggccgggattgaggggtcgttaaaagcccattacgtggtcattaaatttcagtatcaggatactgaaattgccgttacccgggtcagtgtaagcgaaggaagaacgaagttagcggtctattttaacggaaagattggtgccgcatggggtattcctgacagtgagcactttaacccactgtgtgagctattctggagcaagcgaaccaaatctctctactcaccggtacaaattaaggctctggagaaagcgtacgggaagcgcgcagttaaacgtgaaatacctgatttgtacacaaaatacacgtattacaggccacattttgataaagcctcagtgttggttcgccagttccggcgcatcaaggggctgaccgttgaaccaccgaaagaatgggtaacactccgtggctga

SEQ ID NO: 279058 - DNA, 264 bp, Morganella morganii
gtgaagtatgcccgtatccatcaggaaggcggtgaaatcgatatacccgcccgcagccagcgggcttactaccggatgggaaaagacggtactgtcggtaaccggtttgtgcgcaagtcgcgcagtaactacagtgagtggcatacattgccggcctataaaattaaaatgcctgcccgtccttttctgcagctggatgactgggagcagtaccggatggtgctcaccattgaggattatctgaccaggttaaccggtgagtaa

SEQ ID NO: 279059 - DNA, 210 bp, Morganella morganii
atggccggtaaacaggttatctgtctcggtgatacgactgaccacggcggcgtagtcatctctgcgttggataattacactatcaacggccgcccggtggcaacggagggcgattcggtctcctgtccgaaatgcaaaggtgtctttcagattgcttccggttcttcccttatgacctttcagggtaaaaaattgccctggagggcttga

SEQ ID NO: 279060 - DNA, 1512 bp, Morganella morganii
atgacggcagacagttatcttgagcttgtgctggtctttatgggctggctgatgaataacgcactgtggaatgttatcacggccacagggctgttcacgctgccgctgattttccgtatcgcggggatctggctggcactgcgtgaagccggtgaggatgaggatgcgaaagggtttgccgcgctggcacgtaccgagcacgtactgtatctctcctttgtggtgatgatgttctgtgccgtcccggtatgggatacggatctgtcggcaatgtattttgaccgcacccgctcgcagcagtgcggtgtgaatgttccggcaccggatgagtccggattcggaccgcttatcaccgaactgaacgggcagacggcgaaagtgccgctgtggtggtatctggtacatgcattgtcaaaaggcgtgacacacgcggcggtcgcctcggttccctgtggcagtgatttccggcaggtacgctttgaggtacggcacacgacactggccgatccgctgatctttcaggaagtgcaggaatttgcagcacagtgctatgcgaaagcatattaccgcctgaaacacagccgcagcgggctgaccgcagaggaagcagaggctgttaactggattggttcggactggtttctcagcacacccggctattacgactattacacttccgcatccccgcgctccgcatggccgtacagcgaggcgcgggacagcggttttccggataccggacggggtggttacccctcctgcaaagcctggtggggtgataagggccacgggctgcgggaccggctgctgagcagttatgacaaacgggcgctgaatgcagcaaaatcccgttttccggatacatgggaagaaactctgcttcgctggctggtcagcccgcagaatacaacgctgtccggcagcggcaccacctatatgaccggacaccagacggggcacggcaccggtatcgacaccggcatcaaacaggcactcagtagtctgggtacactggccgcacaggcgacacaacttccggcgtttgatgcactgcgtcaggcgctgccgtttgtgcacgcaatcctgctgatggcgctggttgtcagcatcccgccggtgatgctgttgggtgcttacgagccaaaagtggtggtcacactgactttcgcgctgttttccctgatctttgtgccgttctggtgggagctgggcggctggctggatgaccggctgcttcagttgctgtacaccggacataaaggctacaccggcggtttcagcctctggctggccagtaccggatcagacggctgggttatgaatctggtgctcggcgcgatgtatatcgcgctgccgctgttctggtttggtgcaatgagctggtgcggggtaagcctcgggcatgcgttttcctccgtgatgttagccgggccgaaaggcgcacaacaggccggagcacagggaacaggcgttgcaatgtcagccgtcagaatggcggcgggtagaaaataa

SEQ ID NO: 279061 - DNA, 396 bp, Morganella morganii
atgaaactccaaaacctattgatcccgttattgtttttcccgcttttctcaccgggtgcagtggtgttcactgaccgccatcatccgccgctgaatgtgggtcaccatcaggttgtttatctcgatgcgccagagcagttgcagtcgcagttcttcggggagctaccggtggacccggctgaagccggacgggtggtgaaggccggtatgcagtcaccggcatggttgacgatgcagcggcaactgatgcaggcgtatcagggggtactgaaagcatacagtctgaagctggcgaagtatccggcagtggtgtctggtgatcatcatgtggtgtacggtacggccgacgtggctgtggcggagcaattgctggctgagttccgggaggcgcggtga

SEQ ID NO: 279062 - DNA, 804 bp, Morganella morganii
atgaacctgaaacgatgtctgatgtggctgtgctgcctgactgcgctgccggtgcaggcggttgagctgatgaaatgggagcgcattccgctgtctgtgccgctgcatgtcgggcaggagcggatcatttttgttgatcgcaacgtccgggcaggcgtgccgccggaactgaaaggcaaactgaggattcagagtgcgggcggtgcggtgtacctgcggccggaagcccggtttccgtcaacccggctggtgcttcaggatgtggaaaacggcaccattatcctgctggatatcagtgcggtgaaaaaaaaggatacgccggagccggtgcgtctggtgtatggggacaacggactgaagccggaagagaaaaaatcgacggccggggcttctcagcctctgccgcctctgccggtggcgctgatccgctatgccgctcagacgctgtatgcgccgctgcgtaccgttgaggcgctgcccggtgtaaatccgttgtcactgccatcacctgagagtgtcacctcactgatgccgtcagttccggcggatatccgcccgctggccgcctggggggcgggtaattacagcgtgaccgcgctggaactgcgtaaccgcagccgaaaagtgatatcccttgatccacgctgtttagagggccggttccacagtgtggcattccagcatcaccggctgggggcggcgggaacgccggaagccgtgaccgtgctctatctggtgacaaaaggacggccggaaaacacatttacagccgccccggcgggaggcaaaaaagatgcagattaa

SEQ ID NO: 279063 - DNA, 1074 bp, Morganella morganii
atggataatttaaaatacttgccatttaaagatattaatttgaatgatacttttttcgactctttaaaatctgattattcacatggatttatagcttggttcaataagaaagctaatgacccatcagaaaaagcttatgtactatatgaagaaactggtaatatagacggattcttatatttaaagatagagagtggtagtgttgatgatatcgagccaccaataaaaaatggcttgcatttaaaaataggaacatttaaattctcacctaaaggaacattgcgagggcagcgatttctgaaaaaaatatttgataatgctctatcatataaagttgatgatatatatgttaccattttcagaaaacactcatatttaattaacttatttaaaatgtatggattcaatgagtgtgcaattaaaaatagcgaaaatggtgaagaaatagttttattaaaagatatggctttgcactcatcaactggtgacattctatttgactaccccagatttccatttactgataatcaaaataagtacatactctctatataccctgagtttcattcaatattatttcctgattcaattcttcacacagaatcacctgacatccttcaagatgtatctcatacaaacagcataagaaaagtatacatatgcggaatgagcaaagttgcagagataaaaccttatgatattattattatatataggacctctgacaataagggatcggcctactaccgttcagttgccacatcgatttgtattgttgaaaatgtgaaatcaatatttgacttcccctccgaagaaatattcattgactactgtataaaatactcagtctttactaaagaaaaattatctgaattatatagaagcaaaaagtacccttatattataactttcacttataatttagctttacctaaaagattaaatagagcagcattaataaataatgttgggcttgacgagaatgcttactggggtatactacaaattagtaacgatcaatttagcagaattataaaccaaagcgaaaccgatgaagatattattatcaattaa

SEQ ID NO: 279064 - DNA, 441 bp, Morganella morganii
atggtgagtaccacaatgggcgtcagactggatgatgaaacccgtgagcggatcaaagccgcagcgcaaaaaattgaccgcacgccgcactggctgatcagacaggctatttttgattacctggctcagctcgattctctgccggacggcacactgcctgctgcaggaacaccttccgcacaggaagatgacaccgcaccggctgagccgccggtcagctgccagccgtttctggagtttgccggtgatatcctgccgcaatccgtgacccaattaagttcctgtactgaatttatagtccgtcacgtatcagcattgcgtgtaccaatcgctgtacaggatgcgcgtcacaccggtgttactgtgttgcacatcgcctcagccatccctggtctgcacagacaatgccccgtcaattatcattatttgttaaatctgtga

SEQ ID NO: 279065 - DNA, 1113 bp, Morganella morganii
atggcacaggttatcaatactaacgttctgtctctggttactcagaacaacttaaaccgttcacagggcgtactgggctctgcaatcgagcgtctgtcttctggctcccgcatcaacagcgcaaaagacgatgcagcaggccaggctatcgctaaccgcttcaccgctaacgttaaaggtctgactcaggcttcccgtaacgctaacgacggtatttctatcgcacagaccgctgaaggtgctgttaacgaaatcaacgataacttacagcgtatccgtgaactgactgttcaggcgaaaaacggcactaactcatcaagcgacatcgcctctatccaggctgaagttaaagaccgtatggatgagattacccgtatttctgaccagactcagttcaacggtattaaagtactggcaagtgacaacgaaatgagcttccaggttggtgcaaacgacggcgaagttatcaacctgaaaatggacaaaatcaatctggaatcactgaacattaaagatttcaaagttccggttcctcagaaagatactgtactgaaaagcactactccgttagatgcgacagcattattagcggaagcagcaaaatctgatgcgacctttactaaagcacctgatttagatggtcacactctgctcgaaactgaatcaggttcagttgttgctaaaaatgcagcaggtgattacttcgaagttaaaggcttcgagaaaaaaggtgctacaggtgatgatgctattaccggtaagttagttgtaggtgataaaatcgaaggccgtgtcgataccaaagctaacctggatgcagcaggcccggcagtggatacagacaaatcactgaaaactctggacgatgcattaaccaaagttgacacctaccgttcaaaactgggtgcattccagaaccgtatgcagtctaccatcaacaacctgaacaactctgttaacaacctgagcgcagcacgcagccgtatccaggacgctgacttcgcaacagaagtgtctaacatgagccgtggtcagatcctgcagcaggcgggtaccgctgttctggcacaggcaaaccaggttcctcagggtgttctgagcctgttacgttaa

SEQ ID NO: 279066 - DNA, 645 bp, Morganella morganii
atgatcagaacgaaggaagagctaatagataaaataggaaatgactatatttggaggctaagagaaataaatgagatgaaaaatttaactaagaatgatattacatctcaccttcaaaaaaaggtactttgcagagcaggtatagctctgatgtatgctcactgggaaggtttcgtaaagaaatcaggtacatattttttagagtatgtgtcaacccaaagacattgcattagtgacctaaaaagtaattttgtaactctaattgtcaaaaatcgcattgatagtgctcatgagtcaaagaaatattcagcatttgatgaaataacaaaatatattctttgtaaccaacaaagcagagcacgaataccagtgagaaatgtagtagatactcaatcaaacctttcaaccacagtccttaaagaaatactttggtgtttaggtcttgattataatccatttgaatcgagagaaaaattaattgataataagttggttaatagaaggaaccatattgcacatggacaagagattgaaattgaattaagtgatttttcagaaatggctgatgaagtcttaggacttatgacaacatttaaaaatcaacttgaaaatagtactgtaacagaaagttataaagctgcgtaa

SEQ ID NO: 279067 - DNA, 1113 bp, Morganella morganii
atgtcattaattgatgaagtaaacgaaagaagaaaagaaattcgaacagatggttattccatttctattggtgaatggctctcattatatgaaaatggtgagattgatattcatcctgagtttcaaagaatataccgttggactgagattcaaaaaactaatctaattgaatctatcttgttaggaattcctatccctccaatatttgtaagtcaaagaagtgatagtgtttgggatgttgtagatggattacaaagactttctacaatctatcaatttatgggaaaacttaaagacgaaaataatcaagtattagcacctttagtcttatcaggtactaaatatctacctagtttagaaggaaaaaaatgggagggagatgaagagcttggtgatgaagatccaaactcgattggacaaaatctacgtttaacaattaagcgctccaagcttaatgtaagtattattttaaaagaaagtgatgaaaccgctaagtatgatctttttcaacgcctaaataccggaggatcaactcttagtgcacaagaagtacgaaattgtattttagttatgttaaataaagatttttacttttggctaaccgaacttgcaagttttgataaatttaaagaatgtatagctttgagtgatagagcggtaagtgaatcctatgatattgagttagttttaaggttcgtaatattcgcactgatcgatcctaaagatttagaggctatgggggatgttggtgtatttattacagagaaaatgcgtacaatatgcacagatagcaattttgatacaaaattatggagcaatttgttccaccaaacatttactattcttgcggatacttgtgcagataaatcattcaaacgatataatgttgccaaacagaaattttcaggcggttttcttgtttcacagtatgaggctgtttcatttggccttgcttacaatattaagcaaggaacaaataagcatgacatagagaattctatatctggactttggtcaaatcgagaatttactgactggtccggaactggaatgacagcaactagacgtttacctcgattaattccattaggaagagaggtgtttaaggaatga

SEQ ID NO: 279068 - DNA, 630 bp, Morganella morganii
atggatgccgttattcatttaatcaactgtgctgatttaccaggcaacaatatcaatttcatgcttgataatatgaattgtgaagtaaaatcttattcatctgagcaggcttttctgaaatattatgttaatacgccaaaagagcatgcccgtgaatgtattattctggaagtgggagaatcatctgctgaggcattctatcttatcgatgaactcaaacgcctgaaaagcattattcctgtgattgttatcaccgcttatccgtcttttgagacctgccgtcgtgcatttaaagcgggtattctggaattcttcaagaaaccgattaattcagagctgttagttaatgcgattcatgacgcatttaatcaatatgaaaatagcctcactaagtaccatggatatcaacgcgttaaagataaattcagcaagttatctgcccgtgagaaagaggtcatggatatgattctggaaggaaataccagtaaagaagctgcacaaaaattatcattatcgccgcgtactgttgaagtacaccgttctaatatgtataccaagctgcgtattaaatcattactacaactggtgcaggaatatgatttctataaaaactattcagattcaatctga

SEQ ID NO: 279069 - DNA, 240 bp, Morganella morganii
ttgatatacaagtggaccaaaggtgacaaaggcaatcgaggtctagatggcaaagaaagtattgatgagttaaaccgcaagaatgataaagacgtcgatatatctattgttaatagtaaagtagacagggtttactgcgaagctaatacgaaagaacaggataatgaagctgaggctaataccgagtctttaatcaaagaagccgaacagctcagcatattaacctggttattcaagtaa

SEQ ID NO: 279070 - DNA, 351 bp, Morganella morganii
atgaaaaaagacagaaacattgacttgctttatagcgtttccactaattcattaagccaaaatgctgggttgctaattaatgcgttaaggaaaaataaaaaaatcaacggtgatgttcttgctgggtttgttggtataagtcagcagcaaatatcccgttatgaaagaggtgaaacagaattaacactggagaaaataaaaaaattttccaccttctttaatattagcgtatgggaatttatggatatgctatatttattttatgctggaaagagtgatactcttcatgagatagataacattattttacagtcattttatgatagaaatcagtggtggggaaaggattga

SEQ ID NO: 279071 - DNA, 141 bp, Morganella morganii
atgtttgccgacggacgtacccggatcacgttgctggcggttgtgtttatcacctcaatgatgctgacgttttctgattcatttttttcagcgccggagagaatacgcacccgcagttatctgccggaaaaaaagcggtag

SEQ ID NO: 279072 - DNA, 531 bp, Morganella morganii
atgccggtgctggaaaagctgatggttcagcatccgcagctgatgatgagtatctctttccgcgaacggtttattgacctggcagaagaaggcgcggatctggcgatccgcatcggtgaaccgcctgacagcagtcacctggtcgcccggcaactgaccacacagacatcggtgctgtgtgccgcgccggattatctggcgcaagccggtaccccggcggataccggtgaactgatgcagcaccgctgtattaccggattccggcgcgataagccgttttactggtctttgtattgtgacggtcagcttttacgcattatccagccgccgttttatgaactggcggatggtgatgccatgctggcggcggtgctgggcgggcacggcattgcccagttgccgctgtggatgatcggtgattatctggctgacggctctctgtgccgggtactgcctgtgacggcacacagaccccggtacatattctccggccgcagacggcgcagttaccggccagaacccgttgcgtga

SEQ ID NO: 279073 - DNA, 150 bp, Morganella morganii
atgattaaatttattgatagtatttcctccagcaaccctcaacgttacatggatggtaaacttgtagatttttgggatattttaaatccgaagaaagtcgataatagtctaaaaaaaaatcaatttgtaaaaaattatcctcactattaa

SEQ ID NO: 279074 - DNA, 1023 bp, Morganella morganii
atggtagagtttgctcccatcagacctcataggctgtatagaaaaaactctgaagactttatccgtgcattcaagaaaagactcaatgacatgagcagccaagaaagtaaatttacctgcatgttaaaatattcatttttattacgaatgattgacgcttattttaattttaaactagatgaattacctttatctctatcttttatggagaaagaacctacagatgtattttttaatagatctattgattcaatgatacaattactctgtaacatggcagtagaatctaattttcttacagattttaatgaacaattaaagattgattacagtgatttacagaaaatagcagaatgcatagacaaaatttcaccttcatcgataaatagtcgctttggtgttaattcattatgtttcaagatcagatttaaccatgataatcatgatatagttaaaaaactatgtcatatattcggttctgacaacatcatgaggatgagttggattgggatcagttcaggtgctaaggcttatttgactttactagcagtacttaatgataaactgaaaggtacacgcaatgatacattgatttgtattgatgaaggggatttatatttacatccagcttggcagattgatttcttacataacttaaataagatgctacctaaattttttaatgctaaattacaattggtcctaacatctcattccccatttttgctaactgacttgcctcgtgataacgttattattcttaaggataaacatgtttttgatgaatttaagcccccagtgaggacgtttggttctaatctttatgaattatataataatgccttcttcctagaaggtaaacgatttggttcttttgctgaaatgcatattgataacataatgaacaaaatcaaagataatgagcttcaaggtacagaactcgatagcgttgaaaaattcatcgacatgataggtgacaaactccttagaaatgctttaaaaggattactaaaaaatgattaa

SEQ ID NO: 279075 - DNA, 1455 bp, Morganella morganii
atgaacacagataaaataaataaaaagtctatttctccaaagaaaaacataggctttactgaaactgaaagaaaattagcggctatttgtgataaaacttttctgaagctctggtcttggaccagtttatatagcgatgaaggtatcaagaaaaatggaaaagggaaggagatctgcgatcttctggtttattacaataatacagtcattattttttcggataaagaagttaaatacactgaagatagcgaaaaaaatattcctgaagaggatggtacttcagtagcttggaagcgttggaaaagaagagcagttgataattcagtaaagcagattgaaggtgcagaaagttggattcgcacacattatgaccgcatttattttactgaacaatgtttgttgagtgataaatttccgtttataaatagcgaaaacatcaatcaactaaatgtttatcgtgttgccatcgctaatggttgtcaatatccgctttatctaggtaatggtattcatgatggtattataactaactgtagagatcgtcatggtaactacatacacgtttttgatagctcaaccattgaagctctaacacaagagttaagtaccgtaaatgaattcgtaggatacctagaggaaaaagaactcgtagcacgagaaggattttttaccaactatgataagttgatagaacttgatttgttagcaacatatatcctaagcccatccataagtagaggtgcaggcttatactttaaggaaaaagggtttaaaattgagaggtttaatgagcttaacaaggctagtgattacttaaatggaaagaaggaagatctggtttcacttatttttgatgatttaattgagtatatctctgatcaatttgtaagaggagaagttatctgtacaggtttaactaagttcgaagcaaaccaaaaagtgttggaggttctatgtaattttgatcggttgagtcgtagagaactttccaaaagtattattgctaagttcaaagaaacctttgggcgggctattagtagtcgggctattttattgggagaggatgatccatcttatactcgtaattccatttttgctgttgttattttcccaaaggaagtttgtgaaaaaatgagtaaagtagaatatgaggaggaaagacgtttgattgcccaagcctacgctgttcattatcaacagaagatgtcaatgaacagagatattgtagtggctgtgtttgataatatttcagaatctctagtgatgtcgaacacaaactatagaagctttatggctagtgtatataaaaaagacttcgcgctggtttatcgtgagaagagaaatgttaccgagcaagaaattgaattatttcatgaaatgcaaaataaatggggtatattaaaatcctccccaataaatagttttcaagacagggtttatcagtatcatgactaa

SEQ ID NO: 279076 - DNA, 684 bp, Morganella morganii
atgactgaatggcttaatgcacattttggtgcagacacagctacctattttagcttattagtcggcgtactggcactgtttggtattgggggcggtgttacatatagaatcagacagcaaaacaacatcaaacagaaggcaaagaaaaccgagggtaatgtgaaccaggccgggcgggatattaatcagaccaccaacgtttaccacacatccaatgaatctgctgaggaccctgtaaaaaaaaagcaagatgaacatgatctgaagatcatcgaccagattcttgaattgctgccttatgaggatactactcaatgggttgagcagagctacctgagcggtatacggcaagatgtttgcttaaacattgaaaaagctaaaaactttagcggtgaaaagtatcggttattcaatactgaagtgaatgatgcgaaggatgcttttttggacgctatgaccgcatacgtagatagtacgctaccgtttatgagtgttgattacccgaacagaaagccagtgatgctaagccttccccatgactggaagagtaagagtgttgaatcggaggcaaacttccgctttcatcagcaaaatgtgcgtgaaacatcgggggtaatgattgcgcgttatgaggattttgtcaggacatttaaggctcatggattcataagcgataaactgtaa

SEQ ID NO: 279077 - DNA, 228 bp, Morganella morganii
atgaaaaaaatactactggccggtgtgattgctgcctgctctgcccctgcttatgcagtccctgatacctggtcaataggcgctgcccgggtgagcttcacgtctgccattcccaaagccgctgaatttgaagtgtatgtgaataacaaaccggcaggaaaatttaaaccgcgcgccaaaaacagtcagaagattttcagttattttgaatgtaccccggtggaataa

SEQ ID NO: 279078 - DNA, 1317 bp, Morganella morganii
atgaattattactggattaatattacaggctcagaggatgaagtgatcgacaatgatttcttctgggcgcctctgccgtatattaatgacaatggtcataaaatgaataatgcgggctgggctacgctggatcatgtccgaaccggtgatttgttcttctgcaaaagtggtgcaaatttcgagtatatagccgtggcaaccagtggtatgtataaggccgaacggccaaaaaataggaagtcagctaaaccgtaccgtgaagggcgcagagtagatatcttactcacaaaactgactaagccagttagtgctcaggccattattgacggcttgctggctaccgggccgaatgcctgtacaccaactgtcgtgacgaagaaagggaaattctggcaggtttatgcatcccgtctgagtcagaaggcaggggaatatctacggtcacagattgactatgatatatcagaacattcaaatggtgggaacggtacaccgcaatcttccctgcctaaattctattcgtggacagttgtcagtgacgatgttatctacaaaacggtggatgattcattgatcaatgattttagcaccggtattccgctggattgcgcatctttcttttgtccgtcagaaattcctgctggagacaggctggatatcactttgctgattaataaagatatatcgttgggttacatcagacgtaatgcgactgagcgatatatattatcgttatcaaaggcagccactttgctgaagctggataagctgaaaaaaggtgatacggtctggtttgaacgaattggagggcaggaaaataccttttgtgtctatacgatggcggaagatagttcagtatctgttttaccaccgcaaaatacatcatctgttgctacggttaatgtacggattggacaaagttattttaaagctgccacatcagttatttgcggttatcgctgcgtggttacgggtgttgcagatcaaaaacccagtattctgattggtagtcatattaagccgtggagtaaatctgatgatggagaacggatggatggccataatggtttgttgttggcaccgcacgtggataaactgttcgatagctatctgattactttttctgaggataacaaaatacgtgtttccacacggttgcaaggtaaaggtgatgtgctgaaggcctggggtattgatgcacagaagaaatatctgctgacgaaaaagcaacagaaatacatggaacatcatagagctgcttttgatgctctggagagcgaatgcgaaaaccgtgatatttctcgcataaaaaaatga

SEQ ID NO: 279079 - DNA, 252 bp, Morganella morganii
atgatttttaccaaaatcattaggggattcatcagcgctcagcccgatttagtggtgatcacccgcagcggtctggcttctctcggcagcaccggcaatctctggcagttaccggggctggctcagacacctgccggaaaacataagcgggtattggtggctgatgatatggggtttctcggcttcgggttacaaaccccggatacactgcatcagttacgtgaagcgatggaggcagcagccgtgttatga

SEQ ID NO: 279080 - DNA, 237 bp, Morganella morganii
atgccccgtataaccgtcaataatccgccaccggtgctggttgcagagaatgtcagtttttcccgtcacggacagccggtagtcagtgatatctccctgactttgcactgcggaaccatcactgcggttaccggcccgaacggcgcaggtaaatcaacccttcttcgtttactcagcggctattatccctgtgacagcgggcagatcatgctgcgcggaaaaccaatggcgtcctga

SEQ ID NO: 279081 - DNA, 963 bp, Morganella morganii
gtgaaaattgtgttcgaggttaatggaaagaaagtcccactaaaatctttaaaatacataagcaaaaaagatcaactcgaagtaatgaaaaactggttctttgaaaactttgaagatccggcaaatgcttgtccatatgaaagtagagaaggtggctatgcttacatatatggcggaccgtatgatgcaagcgaagaactacaagccatcttcgagcaatatgtcaaggctgagtatatcgaggaattagtagatgacttacaaacacaatgttttgactggtctggaaactcaaataatgtagatgattggtacaatgatgatatctacgatgctgtaacttcttccgacaatccgtattcaaaatttattgacaacatcgacaaaataaaaaaacttgcaaaagataaaactgaacaacagcaaaaagaccacttgcttagtttgctctacacgaatgttattacagctttggaaacactttatgttgaactattcattaactctatagagaaagatgatgtttacatagcaaattgtatagaaaaaggtaagactgaatttaaagtaagcaaagagattgcagcgttacctttcaagggtgaacccatcgagaatattaggggagagctaatcaggtcaatcaaggaacacctgatcagtgcaagctggcatagcactaaaaaggtaatcgaccgctatgaagccacattcgatataaaggtacaaaaagactgtccgatagaagctattgaattggcaaccctcaatcgaaatcacttagtacatcgtggtggaaaggataaagaaggaaatctcgtagtgattacggaccagactcttgaaacactgattgataatgcatcgaacctagcaattgtgctctacaacagtttaaatttagtaacgaataaagctaccatgttacaactagatgacaaacctttcattcatgaattttaa

SEQ ID NO: 279082 - DNA, 1002 bp, Morganella morganii
atggatattcgcacacgaaaaacaaattttttagattcgttagattcaactgaagtgatatgtaaagcagtaagtctcgctatagattgcatgattgataatcataatggtaatgaggatatccccttagttattaccagctatgatgacttctgtaggcgcgaggtattagattatatacagaaattttgcgaagctacgttccccgacatggataaatattactttagtcctaacatacttaacattaacagtaggactagtgaagaaacctgtattaacttaattaaactcttaagacgtacaaaaggcatgctattctggtcagattccccatcgtggtttggtagcctccccgacggattattccatgttgttagcattgatcaaaaaaacgttactcgcggccttaataagaaaaactctaagccgacaataatcaataaagagtacagcgtagatacactactatcagagctatttttgaatggcgtgcacatggagcaaactaacgtaaataaagtttctgaggcagacatgaagttctatgatgaatgccatgctggattaatcagaccaatacccgctccaatgggctcgtcatatgatgaagaaataacaattaattctccagattggcagaagctcgcgtgtgtagctttacgccgctatcagtcaaaggaatgtaatgacggaatgcactgggatacaaccgattgtggttggattgatgtagtcgcatatccgctcatcgaagaaatacaatcaatagataatagtggttatcgacaatgtttagttgggctagttacaataaacaattcgaatgcaaattccccgtgcctatctaccgtttggatacatccattttatcgcaggagaaggttattaagcaatttatggccaaaattacaagagcaatatggaagtaacttcgaaattgagcaacctaatgaaaatatgaaagcatttttgaaaagcgtgaaacatgcagactactaa

SEQ ID NO: 279083 - DNA, 666 bp, Morganella morganii
atgaaagtcgacaacttaagaataattgagagtgggaaatatgttttcgatatgttattggatagtggtgaattatacgatacaagtcatttttttgatacaagggaagatgcaaatagctggatggaagaatggcagacttgggcaaataatgtatcgagtgggaaagaaagtagtatttattatattttacaagtacctgatacttgggctggctcttcagatgaaaataatccttattcgggactttatgtgaaaataggacgttccaataatgtgctaaaaagattatctaacttacaaacaggtacatttggtcaattaatattacacgctttggaacctggtggttcaaaaaaagaaaattatctacatgaaaaatttagcaacgaaagacgtcaaggcgaatggtttatatgtactaaagaacttactaagcatatatttacaacatggtttagaaataagatgctcccaccagaacatcaaatgaaaataatgcaactcgcagatagaattggtatttattcgtacgtgcatcgtctaatgggggggaagcccgatttagtaaacccatcaattagtgaaccttggaaatgcgaaaaatatgttttcgttgatttggtttatagctctttagcaaagcaagttaatcgtaaaaaataa

SEQ ID NO: 279084 - DNA, 198 bp, Morganella morganii
atgtcatacattcgagtagagaaagatggcctgcagtatgaaggtgagtatttctgtgaagagaatatggttacagtctttggggttagaggagggcagtccagtgtggttcttaatgggatgacagaaattgctgctgctcgtactgcgttgcgaaatcttattagagaaaatcagatcgatcctctaactgattaa

SEQ ID NO: 279085 - DNA, 2052 bp, Morganella morganii
atgactatcccgcaagccccggaacgcccggtacagctcactgcacatggtgaaacccgaacagataattactactggctgcgggatgatacccgcagtgatccgcaggttcttcagtatctggcggatgaaaaccgctatacacagcagaaattgcaggcagcagagccgctgcgcgaagcgctgtatgaggagatggtcgcccgcatgccgcaggcggatgaatccgcgccatacagttacaacggctatgtttaccgcacccggtttgaggcgggcaaagagtatccgctgtatgagcggcgcaaaataaacagtgaccagtgggaagtgctggcggacggcaatgaacgggcacaggggctggcctattatgagctggtgtctcttgcagtcagtgcggataaccgccgtattgcgattgccgaggataaagtcggccgccgtgaatatcaggtggcttaccgtgatctgaccgatgaccactggcaggaatccgtactgacagaagtggccgacgatctggtctggtcagccgatggttcggttctgttttatgtccgtcaggatccgcagacattgctgccgttcgaggtataccgccatcatttcggcacagatagcgcacaggatgaactggtataccgtgaggacgatgaccgtttttataccggcttatccctgtcatcctcccgggaatggatttttatcggctgtcacagcccggtcacttctgaggttcatctgatcaatgccaatgatccgttacagccgccggtctgtttctctccgcgtcaggacgggtgtgagtatcacgtcgatcatctggatggtcagttttatatccgctctgaccatgaaaacgaactgtttggcctctaccagacggaggcgccggaaaatccgtggcaaactctgattgcaccgcagccggataccgatctggaagatttcacgctgttccgtgactggctggtattacaggaacggcacgccgcgctgccgcagatccgcattattcaccggcagagcgggaaagaaacacaagtcgggtttgatgatggtgcttactgcgcgtggctcggactgaacccggagccggacagtcagctgctgcgttacggttatacctcgatgaccacaccggcatcggtgtatgagctggatatggtcagcggggaacggacgctgctgaaacaggcgcaggtaaacggttttcagcgggataattatcacagtgaacgaatttgggttactgcccgtgacggcgtacaggtgccggtttcactggtctggcataaagatcactatcagcccggacacgattcacgaggacataatccgctgctgattgaaggttatggcgcgtatggtgccagcatggatccggatttcgacgccaaccggctgagcctgctggatcgcggttttgtttatgctcaggcgcatatccgcggcggcggtgagttgggtaaacgctggtacaatgccggaaagatgcagcataaaatcaacagctttaatgattttgttgatgtgacacgcgaactgattgcccggcgttatggcgcggaaaaccggatctacgccacaggcggcagtgcaggcggattgctgatgggagcggtgattaatcaggcgccggagctgtatcgcggtatcgtgacacaggtgccgtttgtggatgcactgactaccatgtctgatccgtccattccgctgaccaccggcgaatatgacgagtggggcaacccggaaaatgaatccgcttaccgggatatccgtgcctacagcccgtatgacaacattgaggcgaaagcctacccgaatatgctggtgaccagtggcctgcatgattctcaggtccagtactgggaaccggcaaaatgggtggcaaaactgcggaaactgaagacggatgataatctgctgctgctctataccgatatggaagcgggacacggcggtaagtcagggcggttcaactatttgtgggatgtggcgctcggttatgtgttcctgctgatggtggatgaacaacaggaatcgtga

SEQ ID NO: 279086 - DNA, 2493 bp, Morganella morganii
atgatgagaaaaaaacggggtattgataaaataagccacatttattacgaaaaacaggattatcttaaattttctgaatttgagcatgactgggggataagtcatacaccatacggagatatttatcattatgaccccggcaggttcggtggcggaagaaccggaggagactcattctctgatttgccaccgatatcgtattccccggatatttatccatacccggggaattcaattgatttaggagaaataacagtaaattcaggttatccggatacagaatcaacaggagaagatcctctgtatacggatgagccttatttgcatacggcacacgctggtcttgcaatatcaatgtatcctcagcaaaataccctgaaatttattcttgatatgcgtaatatctccgctattgttacaccaataaaaacctatttattactggcattagaaactgttcttccgattgcgggcagggtactgggaattgcgggcatattaatgccgtcatcaatcgcagaagagcctttggttatatactatcatgataatagttatggagatggtgatgatgatccttatattctgaccacgctaccggcaactcttgtcaccggtacttcaccagaaattttcgcaggggaaaaatcggtaccggcagacgttattgtatccctggccatcaatgagcaggaagggaagcatactacggtaattacacctgtaaaagataaaataattccggttattaaagcagagaaaacggatattcccagtgtgtatgatgtcaatataattccggatgccccccctgttcgaataacggttataaataatgtaaaaagtattattgtcaaaccggaacaggttagtcttacccctccggtaaaaaattatattccggcaagtccggagattaaaacacaccatgccattattgatttttctggtgagcatgaacctgtttatctgttcctgtcacaattaccattatttgaagaaattgaatctggaaatactatccgactctggcaggaacaatttccggttgaagcggcacggatagcataccaatcagcagaaactgaactgaataacaccacagaattacgaagaaaagccatatcggatcgcaaaaaccaccgggaaattgacctggaatctcatatgaaaaagctggcatattatcggagaatagcttcgcattccggatatttggaaagaaaatatgcaaagcaaattcagcaggatatcgacagacattttgatgttatcaaccagcataaaatcgcagaacgtaattttatgcgggcagggatacagaagaacagaactgaacgtcatctggcaatgattgttgccgggccggagtggcttcaccgtatccgtcattttgaaaaaagattaatatcactgattgaaaatccggatatatttctgattgacggaaataaaaccggggaacttcagatttcggtgaaaggcagcggaattatcccgcaacaaaatgaagaaaagcctttattccatgattacctgacgaacaaaaaaccggacaggaatgattcagaggatagtattgcggggtatcattcagccgtaataatgcaaatgaacagtattgctgggcaaatggcggtggccgttcctgccggcaatataagaatatcggatggttttgccgaacgagattgttgtggcttatggattcgtgacaaaaataccgaaaaattggtggtcatttttgatgttcaccagtatcgtcgcgggaaaatcccggttattaacgcagtaaaagatagtattaccggtgtatataaagcgtctctgccatcttccgcgaccattctgatcaaccctgttaatccgccaataccgcccggatttccggggggaatatccattcctgaactgaaatttcctttccatacaggaacatcggcggaaataccggtaacaccgatgaataccggtttcccgttgccggatgatatatccttcacggattttattctggtattccctgatggcagcgggctgaaacctgtatatattatgctcagcagcccttatggtgaaaccaatgccaaaggtaaattcagcggacgtgactaccatactgagcgggctggcggaccgattgaagtacttgactggcggattgcggtaatagaccgtgagggagtagacaaggtaagattacatatcagccggtttgaaagtagcactgataatgacattatgcttgaacgactggaatatattcttaccggaacgtttccggcgactgatacagataagcggttttatactcatgaaatccgtgagctggagcgttaccggaatctgggcataaaagacggagtacgacctgagaatgaaggggaggtttggaataatacacatacggctacattggaagattatcaattgagttcggataaagcattactgtatacagcagaggctctattttcaacatatgatgattga

SEQ ID NO: 279087 - DNA, 1668 bp, Morganella morganii
atgacgataaaatggcaaccttctgaaggcattacaccgacacaggagttaatggatattatcctttgtgatcaatccatttctgtacttgccggtgcaggagcgggtaaaacagaacttttagcgcaaaaatcgaattacttactgcagaccgaaaagtgcatgtggcctaaacgtatattatgcctttcttataagaaagaggcgcaggagaatatcaaagagcgagtgagtaaaagatgtgggcaaagaggcgagcgttttgattcgtatactttcgatgctttttgtaagagtattgttgaccgttttaaggatgctttacctgagaataaaagacctttaaatagttatgatttagtcttcaacaccaaagccagtaatggtaaggataagttatcttttgatttaattataaatttggctgtagagattttaaaaaatagagcagatattgttgatctattttcttttacctatccgcatgtttttattgacgagtttcaagatacacgttctgatcaatatgagttgattaaaattctttttaaagacagaggaacaaaattgctagctgtaggtgatatcaaccagagtattatgttatgggctggcgccagaaaaacagtgtttgaagactatgaaagagaatttaaaaccaccagaaaattattggtaaaaaattttagagccagtgaagaaattcaggaagtcttgagatgctttattcactttgtacaaaatgatgccaactttgaaccaataacaaagaatatcgataattgtactatccatcattataataatgaaatttctgaagctgatggtattgctaataaaatagaaactcttatagcttccggcattaaagaaaaagagatttgtgtactaaccaaacagcagtcagaacaatatacgaaaaaactccgagataagttaacgatgaaaggggttagaaaccttgatatgtcggaattgcaagatgtcttaaaagaaccattagggcgaatatttgccgatctgttcaaggtttatacatcacgatcgtcatcaagctatactgaactctgcgatttataccttactttacataaggttactcgtggagaggaaaaggaagactcgttgattaaaggactgtcggataaaatagcagcaaatagagaaatgttgggtgactcgcccacccctgatttattgatatattatattaaggatatgataaatttttttggtttgcaaaaaatggtggggcggtggaatcaatataagtcccctgattattggggtcaggtctggctcagtcttgaacgacacttgcgctatacaatagacgcaacatattctcttaacgaagctgcgctgatgtttcaggcagaaaattccgtacaagttatgaatgtacataaatgcaaagggttagaatataaggtggttatttttctgggtttagaggatcaggctttctggaactatgataaaaagaaatttgaaaatgattgcgttttttatgttgcgttatctagggcgaaggagaaaatattagtcacaacagctaagcatagagaacatagaataaataatggatatgacaatagaaaatctaactatcagttggttaggccggtatattcatttttgatagaacattgcaagttcaaattgtaa

SEQ ID NO: 279088 - DNA, 2046 bp, Morganella morganii
atgcaacttaagaaaatttttatctccggttttaaaagcatttcgaatcaaaatcctcaaatcattgaccttgacaatgaattaaccacatttattggccataacggtactggaaaaagtacggctatggaagcgctaaataaactgttttcggtggatcattcactgcgtagtatatcaataaatgatttctataatgcggatggtgggaaagatgaaaagagcaaaagtttaatcatagaagcttggtttagcttccctaaaccaaatgaaggcaaaatttctatccctcctttaattgaacacctcaccattgataaatctgatggaaccattctttttagagtgcgattagagagtaaactttcctttgaagcaaacccgatgggggatattgatgaagacatctgggtagttaacaccagtgatgacgtgattgaggagagcagtaaacagaagctttccgctgctgtaagaaacgccatccaagtgagttatgttccagccaatcgagatcccttattgcaattgaagtattcatcgaaggcggtgcttggtcggttgctaaaggcgattgaatgggttggagatagtcaggatgtcatagaggagcaagcggcgaaactaaacgcattaacgaagagcaatcctgcaatgaaagaaattgcggtggcgattaacgccagttgggggaatatctacaaggggcgttatttatcccaagcatcgcttagctttccacttgctaatatcgatgaaatactgaaattgattcagcttcagtttaatccagatgaaagtggcaacacagtaaatgtagaccgattaagcgatggacaaaaatcattagtctatttttctcttatcaaggcaatgtttgatattgataagaagacccgcacattgatttcctcaggagaagcttctaattttaatcctgaaaagatgaggttgccgatttttagtatgatatccttggaagaacctgaaaaccacctttcacctcattacttaggcagaataattaagttggtgaaagattatggttgtaatgaattatgtcaggttattatttcttcccattcttcttccattttaagtcgaattgagcctgaacaaatacgccatttcagactggataaggattcaagaagcacggtagtgagttcgttaattctgccggaaaaaaaagatgagctttctaagtttattaaagaagcggtaaaagcgtatccagagatctatttttccaaactggttatatttggtgagggagacagcgaggaaattataatacctaaggtgcttgagctacactcaacggaaattgatggtcattccatatctgttgttcctcttggcggacgtcatgtgaatcatttttggcgtctgttgaggtctttgcagatcccatttattactttgctggattttgatattgatagaaatggtggtggttttggacgacttaaatatactattgaacaattagctgaacttagtgaaattggcagcacctatatctgtaaagatattgctggacttataccgtcatgggatgacacacagaatccaatagagtttaccattaaatgcaaagatgaagcgacaataaatattgttgatgaattagaaaagtgtaatgtttatttttcttctcctctagatattgactatgcaatgattgaagctttccctgatattttttgtgagaaagatgaagtttatggtgaaagaggtccgcaaggtaccaaggaaaaagaaggtgaagaaggtgaagaaggtgaagaagatatactaataaaagcagtattgaaaaaaggaaactccggcattcgttacggatttccagctgattatttaaaatattttctgtggtatcgctatcgctttttatccaacaaaagtaaacctgcatcacatatcagaatgttttctaaaattgaagaaaagtatacgccagatgaaataagggcaaaattgcctccagtgctaattaggattgctgaaaagacagtagcattattggcggaggttattgaatga

SEQ ID NO: 279089 - DNA, 210 bp, Morganella morganii
atgcttaatgtcaacaaaatgagcttaactacacgcttgtcacgtaaattcttcaacagccagttgcctgctgtttccctgcgtcgcatctctcccttctgcgatcttcttgaccaactccccaatgaggaattagcaatgtccgctcttggcacaaacctgacttatgacctggaaaacaaatatacgagttcaactatgggccaatag

SEQ ID NO: 279090 - DNA, 663 bp, Morganella morganii
atgagtattaattcattcaatagcaattcgtgtttgcaattaaatactcatggctataaattcgcgtacatgaaaagcacacttgcagagcgcctcaaagaggctatgaaaatccgaggtgacatgactcaggcttctttagcggaggcatctggcgtcgctcaacccactatctggcgattggtgaacggaaaagccaaaggatcggtgaaattggtggatatcgcgaatgcgcttgcagtcaatatagactggcttgcaaacggggttggagaaatgagcagcccgaataaagagtcgccatatcaaattgataagtcactgaatattcctgtttggaacgagaaagggaaaactgaagatttcgtgctctcacctgtcggaaagccactttcttcataccgagcctacattataaaccgcaatacaggctgttctgatgtctcatccggaagcatagctataaccgattacgaaatatcaccaggaacaggtgatttagttatcgcaaaagtgggtgggaatatttctgcttataagttccttgacggtggtgagcatggatttctctcagttgacgatccgcgcgttccattagttgacctatctgccgcagaattcctcggtgtggtggtatttcttatccgagacttcagaagataa

SEQ ID NO: 279091 - DNA, 231 bp, Morganella morganii
atgaaaaataaagcgatccaaaaggcaatcagtatcgctggcggacaacagaaactcgccacgttatgtggtgtcagccagccgacagtatggcgttggcttcatggtggcggtattgatgccagattcgtgatgttgatcgttaaagctactaacaatgaagtctcccctctagatattcgccccgatttaaccgacttaatggcgatgcatcgaccgcagacagaataa

SEQ ID NO: 279092 - DNA, 195 bp, Morganella morganii
atgcctgaagaaacagctgacaatctgaaccggtattacaccgataagcggggacggaaagtccgtgttatccggtatgaccgggaaaacagccgggtgattttcatgcgtgatggttatgagcacccgtgctttgaaccgctgaaaatctttcaggaacggtatgcacgctgtccggatgaggtgaaaccatga

SEQ ID NO: 279093 - DNA, 1017 bp, Morganella morganii
atgaattacctgttaaccggctttgttcagaaagatacccggatcctggtgtttaatcccggtgctgagatttgcaacttccggaatggtgcccgttatgttgtcagtgcggctccccgttcaatggatggcattccgtccggccgcgttccggcagatgcacagccgctgctgacagatgagcgggtactgcgtttcctggacaatcccgccgtggtaaaagcggccggtggtttactgggatttcgtcattacgtttcatcagtaaatcattgccagattgacgacgaagcagatccgtatcatcaccatgaactgaccatgacccgccacaaagacggttttatccggacgtgctggcatcatgacaatattctcaggaaggaggaatgctgccagcagcaggcggacaaaattctgttacgcaaccagcgggcatttgcggcacgcagtatctttaccgatttacggctgcccggcggccatcttctgaatccttccgatttgttcacctggtctgtgatgcatcgtgtcagtgggcatcttccggccttcatctgttcttacattctgatgcagtcaccggaagaagagataaccggcaccatgacggagcattccatcgttcaccggacgtgctcacacagccggattgttcaggacatcgtagagcagataaaaccggtcgttgttcctgatatagagccggagccaccagcaagttttatgcggatcccgaagttaaagcgctgggagtgtccgaagtacctgcaatgggtgaagagtcagccgtgctgcgtatgtggtcagcaggcagatgacccgcatcacatcatcgggcacggcaccggcggtaccggcacaaaggcacacgacattttcaccatcccgctgtgccgtattcaccatgacgagttacaccgggatgtgaacgcctgggagcggaaacacggcagtcagcaggagttgttatttagatttatgaaccggtcatacgggatcggcgtttttggataa

SEQ ID NO: 279094 - DNA, 1080 bp, Morganella morganii
atgtatacattaataacattgatctttatctctttttcctgctatccactatttattgccggaaagttctctgagatttcagaacgtatgcagctggagtacaaaactcttagctggttttcgactggaatatttttcattataggtatcattaacctgtattttgtcgcggcaaatgccggacatagtttcactgatatattttcaatctctggcataaaagaaatttctatgcgtaactctgagattcgttatttcccggggtatgaaaataacaatagtggtaacccgtggttattttctatttccttatattccatttttcgagtagcattaaagagtgatactaagaaaataaaagtagtattgctttttataccaattataatgtatacattactgaccacagagaaatggcctacattcctgagtttagtgttttattttagtgctgtatcttcctcatatttaccgcgcgaaacatgcaaaatacttttatcaaatttaaagtatctaattattatcattatatttatgatagtatctttatcattgcgttatgctgaaaaccagaatatattgcatactataaatctgttattacattatattttatcaccttactatggctttggtgtatggctcacagaacacttcgacaaaattgatttaacttatgggaaaatgacatttattggtccactaagttatttttcttccattactgatgttgagagaccacccggtgtatttgatatcagctattatgtatacgggaatgcatctaacatatatactgcatttagatatttaatcgaagattactcagtattcggccctgtaataattaatactatttttagtctgatatactataaactaacaaaaaataaattattttatttgagcctccctctgaaaacgttatttatattctgtgcccttttatcactaacagtaacacctgcggttcacaattctgtattactcgctatattgttatgcctgacttatatattttatactgccatcctacctaacagagaaaaaaagaatgaatgttgtactatttaccgttaa

SEQ ID NO: 279095 - DNA, 543 bp, Morganella morganii
atgaatatctcaaaaacaaaaataccagatgtactaataatagaacctaaagtttttggtgatgaacgtggatttttttacgaaagttacaatcataaaaagtttgagcaagcagtcggtaaagaagtaaattttgtacaagataatcattcaaagtcaacaaaaggtgtattacgtggactacactttcaaaaggcaccttatgcccaaggaaaattagttcgctgtgttgttggcgaagtatttgatattgccgtagatatcagagaaaactcagatacatatgggcaatggtttggtacaaacctttctgcagagaataaatgccaactatggataccagagggttttgcacacggttttctagtcctcagtgatatcgctgagttcttgtataaaacaaccaactactatcatccagaaagtgaaagtggaattcagtggaacgaccccacactaaatatagaatggccaaaactatcaactgaatatattctttcagaaaaagacaagtaccatggctcatttttaaatctgaaataa

SEQ ID NO: 279096 - DNA, 873 bp, Morganella morganii
atgcgcaaaggtatcattttggctggtggctcaggtaccagattgtatccggtaacaatggctgtaagtaaacaattattacctatttatgataagccaatgatttattaccctttatctaccctaatgcttgcagggatacgagatatactcattataagtacaccacaagatacgcctcgttttgagcagcttcttggtgatggaagtcaatggggaataaatttaagctacaaaatacaaccttcacctgatggtctggctcaagcctttatactaggtgaggaatttattggtacagattcgtgcacgcttgttttaggtgataacatattctatggccatgatttacctaagcaattagaacaagcagcaaaacataatagtggcgctactgtttttgcttatcatgtacaagatccagaaagatatggtgtcattgaatttgacaaaaactataatgtgatttctttagaagaaaaacccgtattaccaaaaagtaattttgcagttaccggattgtacttctacgataataatgtcgtagagattgctaaaagtttaaaaccatcttctcgtggtgaattagagataacagatatcaataaaatttacctggagaaaaaaagtttatttgtctcaatcatgagccgaggttatgcttggttagatacagggacacaccaaagtctgattgacgcaggaaattttatacaaacattagaagagcgccaaggccttaaagtatcttgcccggaagaaatagcattcagaaagggtttcattgacaaaaataaattaatcgagttggcgcaaccattatttaagaatgaatatggtaaatatttaataaatttagctgagaaagactga

SEQ ID NO: 279097 - DNA, 900 bp, Morganella morganii
atgaaaatactactatttgggaaaaatggtcaggtcggttgggaactacaacgctcattagctccattgggagaaataattgcattagactctcaatcaaatgacttccatgcaaattttctggaaccagaaaaactgtcagaaacaattgaagaaatacaaccagatataatcgtaaatgcggcagcatatactgctgttgataatgcggaaaaagatcaagaaaatgcgtatacgataaattccgatagtgttcgtatattagcaaaaatagctaagaaacatgatatatggctaattcactattcaacagactatgtatttaatggaaatggaaataactattggaaagaaaatgacaagcctgccccactaaatatttacggattaagtaaattgaaaggggagtatgccataatagaaaattgccataaatatattatctttagaactagttgggtatatgctgctaaaggtaataattttgcaaagacaatgctcaacttaggcaaaaatcgtagtgagttatcagttattgatgaccaatatggagtaccaaccagtgcagagctattagcagactgtacttgtcatgctatacggcaggcattactgaaccccgatgttgcaggaatatatcacttagttcctaagggagaaacaaattggtatgaatacgcaaatttaatatttaatgaagcaaaaaaattaaattatccattatctatagaacacctttatcctattcctgcaacacaatatcctctaccagctaagcgcccttataactcaaggttagatactcaaaagtttgaagatacctttaaattgaatcttccaaactgggaagatggcgttatcaggctaattaatgaattaactcaggaaaataaaaaataa

SEQ ID NO: 279098 - DNA, 303 bp, Morganella morganii
atgtatatgaggttcaattttcacttttcaagaaaaaatttttcactcacccgtcacccggaatatttcctgacggtaccggacatccgcagcgttaaaggggattcaactgagtttcagtttccgatgacaagtagatggggccataaatacattcatcaaggggaaaatgaaaaaaaaacagattatttaaaagaaaatgatgaaacactgaaaaatgccgcgctgacagtcatatcagcacggcattcacacagcacggactgcggggtttatcaggagctgaacaccatcatccgctga

SEQ ID NO: 279099 - DNA, 699 bp, Morganella morganii
atgaaaaaaatcatcttaacattgttgttattaacagtgacatttgtcagtccggcaaacgttattattaattccacccgtgttatttatccgcagggaagtaaagaggttccggtacaattatttaacaccggaacacagcaggcattagtccaggcatggattgatgacggcaaccccgattccacaccggaaacggcgaatgtcccgtttatcctgacaccgccggtggttaaaatcgacggtaaaaatggtcagcaactgcgggtgaaaatgaccccggtacagcttccggctgacagagagtccctgttttatctgaatttactggatattccgccgctgccggaaaacagtgccgataaaaacatgatgcagattgctatccgctcccgcatcaaactgttttaccgcccttccggcctgacgctgagcgcggataaagcccacacccgtctgacattcacccgtgacggccagcactatattctgaaaaatgattctccgtatcatattaatattctcggcctgaaagagaccgcgaacagccgtgatctggcggaagaaggcacgatgattgcaccttattctcagtttacgctgcctgccgcagccggattaccggccggaaatcactattcgctgacactgatcgacgatttcggtgccatcaatacctatccgctgtcactgaactga

SEQ ID NO: 279100 - DNA, 612 bp, Morganella morganii
gtgctgtcgcccagcgccagcaggccaatcgagcctgccccggaaacattaatcgtgccgttgttttcaataacatccttaacacggttcgtgcctgacacccgcataccaacagtattggtacccgccacatcaatttcaccgttgttaacgacagtcagctgtgaatccgcattacggttcggcgttgatgccacgttaatgccgaccgcattactgacacctttgttaatatcgatttttcctttgttttcaatcgcatatttttcaccggcttttgcggtttcatccagcagtgcagccacggcgttcgacataatccgcatatcccaggtatcgtcttcacggccgccggacaggctgacatcgtctttacccatcagaatatcgccgttattgataaatgaagcgcccttgacctgcacgccggtcacggttccttcatttttgccgatccctttctgccccagcagcagtttgccgcccttttcgttggtgaccagagaaccgccggatgcagtcacaccggtgttggcaattacatctttatctgtcggatcattattgacgaggttgaaggcttcaacggcaatggtaccaaggttggtatag

SEQ ID NO: 279101 - DNA, 636 bp, Morganella morganii
atgccgttagtaccggcagtcacagtgccgctgttggtgaagctgaaatcgtttttcagcgcagtcagatccaccacactgtggtcagatgctgatgtcagtttaccgctctgtgtgatgtttttagtcccaccaagcaccaccagtgcggattccccttctgctgattcgatattcacattcattccgctgataacatcaccggaagtattggtcacaataccgttgccgcccttatcttttacattgatagtggtgccgccggcgccggaggtgtcgagcttgcttttcgccatcatcaccccgcctttgccgtcatccgcttccagcttcagaccggaggcattctcaccgctgacattgatggtgccggtgccggacagtttaaacgcgccgctgtcatcatcggtattcagcagatgcagaccgctgccgctgccggtgacttcaatattggcgttatccagtttcacgtttgagccggaatgggcccgtaccgcatccgccgagttttcaccgaggatcttacctttgccgccgatggtcattgaggcatctttattcagacggactgcggcggtaccgttattggcggtaatattaccggtgttatttaccacggaattccggccgtaa

SEQ ID NO: 279102 - DNA, 174 bp, Morganella morganii
atgggcaaaggtatcggctttattctgattgataaacagctcaccgccctgttttacggtgataccgtcatctgctgtcagttcattcagcgtgatatcggtattgcgcagttcaaaacggccttcctcaatattcagtttttcaaagccgctgattttgctgctgtcctgtaa

SEQ ID NO: 279103 - DNA, 573 bp, Morganella morganii
atgaatcctgtgaatgaatcacccaggttttcacgtttactttcttaccgcttcaatcctgcaataatccctgcaacggtaatcaccattactgcttacataaccagttgtaccggataccggaatcaattgctcctgctgcacatcgaagcagtcctgccggtggtacacagaaaatgcctgttaccggttttcaaaataatctccgtaaccctgctcatgttgctggcaaaatatatcaaccggtatttatatttaaaatcatggtcatacaaaaaatcggggggactttatcggtatctgatacatcatcgatcgcccgaaacgatcgaatttgttgattgttatatcttaagcattaatacacatacgtgtgaacagattcaaaacagcaaggtatccaatgatctgctgctggtagcgtataatgctcggtttgatcgccctttctttgagaaacggtttgctgcgttagaccatttagcttgggtctgttctgtcagtggcatagattggaaagctccaggctttgaaagtcgtcagcttgagtatctactgcttcacttaggctaa

SEQ ID NO: 279104 - DNA, 213 bp, Morganella morganii; identical to SEQ ID NO: 278670

SEQ ID NO: 279105 - DNA, 249 bp, Morganella morganii
atgccattgtttcatacaaaaactgaaacacgcctgctgcagaaaatccgcagtgaaaaaatgtcagataaagaaaaagaaaacttgtataaagaactcactgatgttcagaaaaacaggaaatttggtaaatcagttactgtcttcaaaaaagtgtggaaaatcatggtagcgtattctttctttgccgtttctcttattgttatagttgatacttattgggaaaatatcgttaaaccacttttttag

SEQ ID NO: 279106 - DNA, 1077 bp, Morganella morganii
atgactaagagcaataaagaacaatcaaaaaataattcaaatcgaaatcttaaaatagatggtttgagaggggtgttggcagtatctgtattttttcaccatacagtaatatcttactattggataaaaaatggtacttgggaacccattgataatattgcaattatgaacttgggatctgtaagtgtatcacttttttttatgataacagggtatcttttttataaaatcgccataaaaaataaaagcccaagctggagaactatttatttatcgagggtgttcagaatatatccagtatatattattgcagtggcattaatatttttaatctattttattaaatatggcggtctgaacgtatttgagttgataaaattgtgtatgaattggttattgtttcagggcgtagatataggtgactttgaggcaaagagagttatagctggcgttcaatggacgctggtttatgagtttgtattttatattagcttgccttttttaacatttatttattggcgaaaatttacgataagtaatatcatttcggcatcaatatcagccttttttgtaatgacatatgttctatattatgatgtgcagccagaaaagtttatattgtttttatttggttttttagcatatgaatttaagaactcaaagttgattataccacctgccacaggggacgggattattaattttatgctggttgtaattattagcataataattttttatacagaaccctatagtatgttgcaaagcatattgacaggttttatttttatttttatttgcagtaataatagaacagttatgaatttcatgaatcgtagagagttacttttattgggagaaataagctatagtatatatctgactcatggtatagtgatctttttaatttacactatatgcatcgaatataacatacataacattgattatggtttttatatttcattatttccaatttatttatctattgtggtttttatatcctattatctacataagaaaatagaaataacatggataaaaataggtaaagtaattgataagaagctatattaa

SEQ ID NO: 279107 - DNA, 507 bp, Morganella morganii
atgcttaatataattttatttgaacctgagatacctccaaatacaggaaatataatccgattatgtgcaaataccggatttagactgcatttaatctaccctcttggctttaccttggacgataaacggttacgacgagccggacttgactataaagaatttgcctcaataacgcatcatcacaattatgatgcctttttgagaaatgaaagcctagatacagataacatatcatctgccagcagagcaagaatatttgcattaaccacaaaaggcacaccacgccatagctcagtcagttatcaagagggtgattacctgctgtttggcccagaaactcgcggactgccgtcttatatattagataatatgcctgatagtcaaaaaatccgcattcctatgctatcagatagccgtagcatgaatttatctaatactgttgcaatcgttgtttttgaggcatggcgtcaactggactataacggagcattactgaaggatacctga

SEQ ID NO: 279108 - DNA, 1899 bp, Morganella morganii
atgtcaattatagattcatttttctcgatcccccgcccttataaaagagtggtaagtgtattcattgattttatattcatacaaattgctttttggggagctttttggactcgtcttggtacattacataataccagtagttcagattacatctatctatctttatttatttccattatcactattttttcttttatacgtctcggttactatcgggccatattacgatatttaagtataaatgccatcattacgttatcatggggaagttctatttccgcgatagtattccttctgacatcctatttttgtaatatttggataccccgttcagtaactataatttatttgggatatttattcttattgacaggaggttctcgagttacaattcgtatgtttttttctcagcgctgtattaaacaaaaagcaaatgttgtcgtttatggtgccggtgttgcaggacgacaactggttaacatactccggcaaggaaataaattaaaccctattgcttttatggatgataatcccaaaattaaaaacagcattattcaaggattattagtatattgtcgcgatgattttatttatcttcttaatagatatcatgtttcaaaggtgcttttagcattaccgagcgcatcccgtatacagcgtcgttctattattgaatctttagcggaatatcaaattgaagttctatccattcctaatttagatgatattacgaatgatgatgaaaatcttggtcatctgagggatgttcctatcgaggatttactgggaagagaacccgttaaacccattgattatcttatgacattaaatataaataaaaaatcagtaatggttacgggagccggtggttcaattggatccgaactatgcagacagattattaaacttaatccaactcagttagtattgtttgaactctctgagtatgcactttataaaatagaaagagagcttttggactataaaaagaaaaaaaaccttgacataaaaataattccactcattggctcagtgcaaaatatagaacgtttaaaaattgtaatgagtacctttaatgttaacactgtataccatgcagcggcttataagcacgtaccaatggtcgaatataatgttatagagggaatatacaataacgttcttggaacttactataccgccaaagcagctgttcattctaatgtccaatccttcgttttgatttcaaccgataaagcagtcaggcccacgaatataatgggaacaacaaaacgccttgctgaattaagtttacaggcattagctaatatacccggtataaccacacggttttgcatggttcgttttggtaatgttcttggctcttcaggctctgttatccctttattcaagaagcaaatcaggagtggcggaccaattacgataacacatcctgacattattcgttatttcatgacaatacctgaagcggctcaactggttattcaggcgggagccatgggacatggtggcgatgtttttgtattagatatgggtgaacccgtaaaaataatagatctggcaaaaaatctggtaaaattatctggtttagaaataaaatctaatgataacccttatggtgatatagaattaaaagttacgggtctacgtcccggagaaaagctctacgaagagttacttatcggtaataatgttgtaaaaacagaacatagtcggataatgacagccaatgaatcgtatatttctatagatgaatatgatgttctatttaatgatattattgccgcttgtgataatttagacctccaaaaaataagatatcttttaatttcagccccgacaggatttcagcctaagaataatatttgtgacttagtatgggcagaaaaaaataagtaa

SEQ ID NO: 279109 - DNA, 795 bp, Morganella morganii
atgaaaacaatgatattagataataatcttgataacatcaaaatatatgatgacgccggggtcagccggatttttatcgatttagaaattataggtaaagttgcacgtcagggggatatggatactgttataagtgaccataccatctctgatatcattaatgcccgcggaattattaaaaatgcagaactattggttcgggttaatccgatacacgatagttccgaagctgaaataaatgccgtcattaatgctggcgcagatattgttatgctgccgatgttcaaaactaaacaagaagtcgaaaaatttattactttcgtagataaacgggcaaagacaaatttacttctcgaaacatctcaggcctttgccagaatagatgatattctttctgttcctggtatagatgaagttcatatcgggcttaatgatcttcatcttgcttttggcttaacatttatgtttgaactaatgagtggttctttatgtgaatacatcacaaataaatttaaagaatacaatgtaccttttgggattggtggtgtttcaactataggtaccgggatattaaaatctgaggttatactgagagaacatgtcaggctaggatctgaagctgttattttatcacgttcttttaaaaaagaatgtacaagcttgactaatttcaaacatgagattaataaacttaatgacactattattcaggcaaaacaaatgagcagcaatgaattgaaaaacaacaagacgattcttaaagaaagcattgctcaaatcattgaggcaagataa

SEQ ID NO: 279110 - DNA, 798 bp, Morganella morganii
atgctgaaatttgaccggcttgccattgatgtcgcacagttcagctggctgcggaaaaaacgctggcagccgctgctgacagatatctccctggcagttcagcccggtgagctggtggcgctggtcggcagcagcggggaaggcaaaagcctgctgctgcaaagtgcactggggctgctgccggataatatgcgctgccggggtgctatctcgctggcgggggaaaccctgacggaagagagtaaacagctgcaccgcggcaacaccctgtgttacgtgccgcagggcgtgagtgcgctgaatccgctggtgcgggtcggcccgcagctggaacgcgcggccacactcagcggtatgcatgtgaagatgcacgacgtggcgcgccagctgcaacgttataacctccggcctgagctgacggatgcgtttccgaaccggctctccggcggaatggcaaaacgggtgctgacctgcggcgcgactctgaccggggcccagtatattctggcggatgaaattacatcctggctggatgacgaacatgcggggcagatactcgcgcatctgaaagtgctgtgtgcggacgggcgcggtgtgttgtgggtcacgcatgatctggcgatggccgcccgctttgctgaccggattgccgtgctgcgtcacggggttttacaggaaacactgacatcgcaggcattactgaacggggaaggcagcccgtggctgcagtcactgtgggacgcactgccggaacaccgttttctggcggggcggaaatataccgggatgaggcggtaa

SEQ ID NO: 279111 - DNA, 837 bp, Morganella morganii
atggggtacatctacgaaacgaatgtaattgattgggataaggctaatgcatatatcaattacagccgaataaaaagaatacttgatgagacggaagatgataataacgttgcggcggtaattaccattgaagaagctgagtatgttttaaaaaatcaaatcacacccacccctttcacatcccctgaagatacattatttggcattggtgattttatttcaaattatgccggaaacctgtatgaggctcacagggttacaagaataataaatgaattcaggaatttcaatatagtagcaattgagtataccggaccgaatggtaatacttacattcggttgtcaggacatccgggtgtaagagcctatctgaatgcaacccggtatttagctgataatccccgtattttatacatgggcgtaggtactcagggaatgggagcagtctcagcaggagcaacccggtttgcgatcgtgttttcattagcttaccgggtagttgaattgatattcaaagaagaatataccctggttgactttttcgttaatgtcacgatggatatggcaaaattagctgttgccactcaagtaacaaccttagtaaccggaagtattgtaacaggagcattaacagccggagttagtgttatcgctgtcgcggttggcgtatttgttgttggcgcactgattgcctacgctctctataaacttgatgatgagtacggaattagtgaagcaatcattaaagcattaaaatctcacagaccgccaaaacctgaaacaccttaccatccggatcaattctttacgttgttagggagatatagccgtggttaa

SEQ ID NO: 279112 - DNA, 1503 bp, Morganella morganii
gtgaccggcactggtacgcagtggaaaaagaacattcacggtgtggccccgggccagcttatcagcatcgagaacggtatagcaccggtcagcatgatgatccgcgcggtaaacagtgataccgaactggtgttgtcattcaatgccccggtaacgctcagtggtgcgaaatactccattgccaccacagtcccggataccatttcggatgcagcccgcaccatgtcagccaatcagggctatatcgtttactttctccaggcaatgcagcagtggatgacagacaccggccaggtggaaattgagttgccgaacgggcagaaggtgacactggaggatgtaaaagggctggcttcgagggaatgggtcggggagatgctgtataagccaaattctgctgttacccgcgtacaaagtccgaacaaaaggaatgttgttcagctggaagacgggggaacagtcggttttaaagacaccgtcacagacagatatcgttttgcgttgatttcggatggctccacccgctgctttagtgacggagaatatacaggactggatttagtaaagatcgatggccgctatgtgcgactggagacaaatcctcatgcgggtacagcatcaatgcttagcattgtgtatcggcaagctaacggcgaaaaccagcacattgtgacgataccatatgacaccggcgtagttgcgactcgctcctggattcagcaggcaaccggatgggggtcagtatacgcggactatcctccgtatatgacaaatttcactaataccaatttgcctaatggtatgtatagatttaaccagaacagtcaaaatcccccttctgtcataggagacagatttggaagcgttataacaactaggtattccggggatattggacaaaggatagtccttcccaactacggcgcgacgcacatggcgatacatcggtatactggttctgcatgggaatcggtaagggtgttgacatccaatatgtatatcgtagacggcagtggatattataaaaaatcgtcgccaatcgttcagatttaccctgatggccattacgacaccaacgacgaatccgaaggtgctgaagtcagccgcaccggcaccggccaatatcacattaccggcattcttggttataactcagatggtgcctggggtgtaaacggtggtatatcagtaccgaaagacaataacggccttgagttggtttatgtcgatgacagggtgcagagtgacggcagcctgattattgaaacctgtcaccgtcagcatgcgcatttgccggaacgtttccagaactggcggctgaaagacgtcaccccggaaggtgagcgcatcttttatcaggacggtgaactgtgtgacctgccggaatccacccgtctcgatgtacgtgttgaaatgccgcagggctctgtgtggaatgtgaaacagcgcgaactggctgaacagatggagcgggaggcacaggaaatagcggaggagagataa

SEQ ID NO: 279113 - DNA, 1359 bp, Morganella morganii
gtgtggggcgtctggatagcctggctgaaatacgcttatctgcccggtttaagtgaagattttaatgcccagcagatggtgattgcccgtggtgtctctgacacactgcgggaaacccccacggattccgccaccttcccgcagattgcccgtgccctggagagtatgtacgccaatgcgatgaaaagcggcctggaagaggaaaattatgatccgctggtcgctattctgcacagtacaacgggtgaagtgctgtacagtaataaaccggatgttcatattccgctgaaacctgacggaatcgagcgtttcaccgaggacggcgaaacctggtatcttgcttataataccgacccggatatgcagcgcaccgctgttatcggggaatccggcactgaccgccatatgctgatcggcgacccggcaaccggcaccgccgtcccgctgctgtttattctcggcaccatgctctcatccacgattatcaccacctatctcagtctgcgcccgctgcgtgaaaccacccgcagtatcgccacccgtaatcccggcaacctgacacccatcagcatgaagtatcagtacaatgaaatgcgtccggtactgcatgccattaaccagctgatgcagcgggtggatgccgccaatctgcgggaaaaacagtttatggcggatgccgctcatgaactgcgtacgccgattgccgccgtactggcacaaattcatctgctcaaacagatcgatgacccggcggagcgcaacgaaatcaccgcggatatggaaatcagtctggatcgcgcggtatcactgtcacggcaactgattgatctggcccggctggaaacggaagattatccgctgaaaatggaagagatcgacctgacccaggcactgagccacaccattgccatgctggtgccctacgccctgcgcaaaaatattgagttttccttcgacggtccggaaagctgcattgttgtcaccgataaacaggcgctgttctccatcatcaacaatattctgaataacgcggtgaaatactgcccgccggacagtcaggcagaagtctcgctggacaccggcaacccggaggaagtgcagattattatccgcgataacggcaacggcatcagtgagcagtaccgccaccgcctgttctcgcgctttttccgtgtgccgggctgcagtgagaacggcagcggtctcggtcttgccattgcacagaatctggcggaaaaaatcggcggttatctctccgtcaccgacggattgcagcagcgcggtatcgggtttgtgatccacattccggcaaaaaaccgtgaaatttccgctgcttcccatgacagttctgaaacataa

SEQ ID NO: 279114 - DNA, 213 bp, Morganella morganii
atgaaaaaacaatataatatacttatgagaaaagataactatcgactgaaacgtatctttttcatggcttttatttttttaccaagctcatatgcagttagcgatgaacagattgtatatattgatgatgaaatctcaacaaaagactgggctgtaactatttatgacagaggtgatttcttgttaagggtaaagatggaaaacaagaaataa

SEQ ID NO: 279115 - DNA, 2520 bp, Morganella morganii
atgggcattaataatgataacgataactttaattctagtcaatatgctattgcggagtttaaaaacttagatattaaacaaaactcagacgcatccactttaacactaaataatgcattaagggctatccaaggtgcttacagggattcaggtactggtccagcaggtaaaataattgttaatggtgatacatctatttatctaaatggcgcaagacaagaggctatttatgtatcaggtaaaggtaaaggctatgatggtaatgaaggtgtaattagttctgttatattaaaaggtaatgccaatatcatcctgaacaatgccgcaggaagtgataatagtgctattaaaattggaaagacaagacaaataggtacagggcaaggatattttgaatctatgggtgatttatctatagatatgcaaaattcaaaagggtctgctgtaaaattagctttttctggttctgaattaaaagcagattttgatagtagttcaactaatattaaaacaaatggtaatgcaataaatatagggcaaaatgactggggaactcaatcatcagctaatggcattaaagtatctttcaaaaatgctaactttgagacaacatcaaaaaatgattcattattgaaagtatttcaaaatcagggaagggtattatttaattttaatggtgaaagaacaaatctagtcatgagaggtgatcaaagttggttaattgatgtagataactcaaaagagaatgggtatgaaaataaagtaagtcttaacttaaaggattcggctaagattatggggttgtcaaatattggtgggaatagtgaactgaccttgaacctgagtaattcattatggcatcttaatgaaaataaatatggaggcatatcttcatttactactttgaacttgaatgatttctcaaagcttattgcagaaagtagtaacttcactttaaatggagatgtcaataatacatcaggcatcattgatttggtcaatcataaagatatcaatgataaaactaagttagttacattaaccattaatggaaattataccggtggtaatattaaaccaacggatgcaactccttttccagacggaaatagtcagttaattgttaacactatctggaataatgataacgactctgtaactgatcttctgcatatcaaaggtactgctaccggctacactcaggttcagacccaaaatggtattatcggtaatgtgacccgcggggatgctgaaaaatattctgttcctgttgtcacggtagacaaccaccagaaagggactaataccttctacggttttgcggataccaccggtgcggctcaggccattctggtgcagaaagatgccaataattacacctggtatctggctaaaaataatacacctgtagaccctgtagaccctgtagatcctgtaaaccctgtagatcctgtaaaccctgtaaaccctgtaaaccctgtaaacccagtgaagccggaagtttccggatttattcgtatgccgacggcgaatatggaaatggggtataaccttatccgtacattgcatgaacgggtgagtgagcaacaaacaatggcctgggatgattgcacccagtgccagtcaactcaccgcgatgatcaggtctggggtaagatgctgggcaacttagcacgggctgacggtgataaccgttatggttaccgttctaaaatgtggggtggtcagtttggctatgactttaacgttaactataacgagaataccggctcacgtcgtcattctggcatgatggtgacatatgcacacgacacgctgaaatttaatgatcgtcgttctgtattctttgatactggtaacggacagtatgctgaaaaggataagcgtacgggtaccggtaaaagtgatatggtggcgctcggggcttataccacgttctacgataagaatggcagctacttagatttagttggcaatctggattacactcataacaaatatgagtctgttcgcggctctgaatcaaacaatgattcttacggtgttgcggtatccggggaagtaggccggccttttgcgctgaccgataatggtgtcaataacggtgactgggaaattgaacctcaggcgcagtttatctaccagtaccgtaccttccgtaatttcaaaaccgagcatgatgtcagtgttaaccaaaaagaccgtcatggattaagaggtcgtgcaggggtaaggttggcgtataacaccggaacacaggaattgaaaaccaacacactctatttcgtgggtaacgttgtgcatgatttcatcgataatgaccagacggtgaaaattggttccgacagtatcaaagaaaaaaccgcctccacctttggtgaagtgggtgggggggttcagttaccgattggtgaaacatcctacctgtatatggatgctcgctacagccattccctgagtaacagtgatggtaaggctgataatgttcgcggtaaccttggttttaaataccacttttaa

SEQ ID NO: 279116 - DNA, 345 bp, Morganella morganii
atgaaaaaaattcttcgtaatatcattcttgctacagctctggtttctggttcagtattcgcagcagatagtagtcagaaggttgcactttctgatcttcattttgccacaacaccaaatggaatgcagcaaattgaaggtaatggtattaatactaccagtcaaacactaaagcatgtgttcgtgaaatttaaccttcttcaaaataataccgtagtggggcaaaccatcgctatggtagagagtttggaggccgggcagagctggaaagtacaggctccttataatagttttgctgttaagcctgatagttttaaggttaccgagattaacgttataaattga

SEQ ID NO: 279117 - DNA, 927 bp, Morganella morganii
atgacaatgtttcatgatgttcatctggaattgctggtcgacgcctattcacttcctcaggcagaacgacttgcgtacatagatctctgtattcgctatcttggcagcatctccagagctgaaattatggctgagttcaaggttgctcaggctgcagcatctaaggatcttgctctctatcgggagttaaaaccggataactgcagcattgatactgcaaccaaaagaactgttatccttgcagacagctataccccactaattaggattggtgtccacacggcccttaaccttattcagtatgggtttacacgctccgaattaatgcaaaagcgcccaatgctacctattgatgaagtggacccgctctatcagccagaacgtctcaaagaagaacaagtagcagcggtaacaagggcaataaagggacaatgtgccattagatgttcctacggttcaaaaagtggtgatcacagggaaaggatactgtttccgtcagcattgtttgttgaccgtaagaactggtatttcagagcttatgacagaaatgaggaacaaccacagcgcagtggttttaagaacttcaaactatccaggctttttgatgctcatttggaaacaacaatttcgccgactcttgctgagaagacggatagagagtgggacgaagaaatcacctttatcattgaatttaaaaaggatttaccaaaagaaacaattaatgagatatcgcgcgagttctccataaatggtaacgtccattccgtcacttgccgagcagcgttggcctgttatgtgaagaccaattggaaaattgacctgaccaatgatgaaaataataaatggttatactttgacgtactgaatgcagaggctttacaagaagttcagtgtttagcaccattgtttgaagaaaaaaatgggtaa

SEQ ID NO: 279118 - DNA, 1878 bp, Morganella morganii
atgaccagtcgcattggtagccctgatacacaggcagatattgatgttcgtgcttgtctggatagctcgccaccacgttcatttgtcatggtagccggtgctggttcaggtaaaacaacatctctcattaaagccctggcacatttggctgatacccgtggttctgctttacgtcgtgccgggcaaaaaatatcctgtatcacgtatacagaggtggctgtgggtgagattgccactgacgttggtaactcgcagttatttcatatttcaaccattcatagctttctttggttggtcatccgaccttttcatgtagatatcgcaaagtgggtcgtagagcgaatatatgaaaaaatagctgaaaagcaagcccattatgataagcccagaacacaagctaaaacaaaatctcgtcttgaagatgaaattgcctatctctctgctcaacttgagtgcattgatgatgttgataaatttatctacgggacaggaagtaactatgctaagggtattttagggcacgatgatattcttaaactcgtccctgcttgtgttgaggctcatccacttttgagaaagattgtagccaagcgctttccatttgtttttgtcgatgaaagtcaggataccgatcctgatgtgatctctgcgcttcgaactatttctaatgacaatcctgacatgtgcataggattttttggtgatccgatgcagaaaatatatatgagcggagctggtgccattccgttaagtgatgggtggtctgaaattacaaaaccggagaatttcagatgtccgacgtctgtacttggtgttatcaattcgattcgtgcttctggggatggcctccaacaaattcgtggccgaacaactatcgtagatggtgttgaacagactgtatcaggcacagtgaatcttttcatcttgccttcaaatgtggaacgaagtgcctatctcacatcggtcagacgttaccttgcaaatgaaactagcgatgaacaatggctaagtgatacacgtgaaggagatgttcgtcttcttgttttggtacatcgtatggcagctaatcgactgggattccctaatttattttctgctcttactgataaagcaacgatgagcttgagtgaaggggtgaatgatgggtcagcttggccgcttcgcccatttgttcagcatatccttccaatttttgctgcggctcaggcaaacgatcaatttcagataatgtcgattatgcgtaacgagtgcccaaagctggagcagtcacgactgcttggtcaagctatggcggcagttttaaatgaactacgacaaggcatcaatggcctgcttgcactgttggaagaaggatcgcaagcaacggttcgcgatatactgttacacgttagagactgtgaactgctacgtcttgacaatcgttttgataatcatttacgtgatgaaccagtgaatgatggtaatgatgacttcgaaaatgttcagaactatctaagatgcaatgcccatgaactttgggcgtatagacgctacctttcagaagagtcaccttttgccactcaccatggtgtaaaaggtgcacagtttgagcgcgtattggttgttatcgatgatgaagaggctcgcttcagccaatattcgtatgggaaatattttcaatacattcccctatccgacaatgatctagccaatcttgaagagggcaaagagtcagtactcgaccgcactcgtcgccttttttatgtatgttgctcccgtgcactgaaagacttggctgttgtcatctttgttccagatgttgccgtcgctcaagcggcaatcgttgagcaaaatttattcccagtatcggcaattctagggcagcatgatctaagttag

SEQ ID NO: 279119 - DNA, 2313 bp, Morganella morganii
atgtttttgaaaaagctgacaattcgtaatttcagaaggctacacgatgttgtaatcgatcttgcttcagacatttcaatttttgtaggggcgaataacagtggtaagacttctgtcggtcatgcacttcaactattcaccggtaaaagccgattcaatattcatgacttcaatgctgaatgttggactgacattgtcacatttggagaaggggtggatgctgcgtcgctaccttcactgggacttgatatttggtttgaagtaacaccggatgatgttcatcgtgtagtcgatcttctccccagcctatcgtggtcaggttctctggttggaatgcgcgttgctttttcccccatcaatcctgaagaaatccgttcgcgcttcctcgcggtacgtcaccttgctatcgatgccacacctaaagatgaaaatggaactcccaaatacgatccttcacctcgtaatctgtgggaatatcttcgcgatagactcaatgacgaatatgaactccgctattttgttcttgatcccgcacgtttcaatgcggaaatgagatccgaggaaggctatgagcctactccgctcacagggcgtgatcgaagtggtcgcgaaatactgaacagccttatccaaatcaactttttgaatgctcagcgtcatctttcagatggttccggaggttcccgttcggaggatctttctcgtgttctcagccgtttttacggacgaaatcttgaacaaaaaggtgaagattacgaagcattaattgctttagctgcgtctgaatcagctttcaatcagcatcttgaacgtgtttttgcacctacgctgaaaagtctggcgaaactcggataccctggactttcaaatccacgcatgatgattcgttcggccttagacccagcgcagatcatgaacaaccaaaatggggccgtaatacattacgcgctgggggaggatgacggtaatcctaccccaccaacactacccgatagttataacgggcttggttttaagaatctgatctttatggttgttgaattactcgacatccacaaccaatggttatcaatagaagaaaatcgaccaccagttcacctgatttttattgaagagccagaagctcatctccacgcacagttacagcaggcttttatacgcaagataatggaccttcttgccatggagactcaggagcttatgcactacaccactcaagtggtggttacttctcattcaactcatattctttacgaacgtggttttcagccgatccgttactttcgacggaagcgttcatcaaatatgtcggcaacagatgtgctcaatctctctgttttttatgataacactgatcctgaaattcgagactttcttgagcgttacttgaagctgacccattgtgatttgttttttgccgacggggctgtacttgtagaaggcaatgttgagcggctactgctcccgcaaatgattgctaccgccgcacctagattaaaatcctcttacctaacagtccttgagattggcggtgcttttggctatcgattccgaaaactaattgaatatcttgggcttactacactcattattactgatctggatagtgtgtattgtacccctccggtacaagatgcaacagaagctcgaacagatgagttagatggtcttgcagaaaatccggctgcaaatgatgatggcgaggaacctgatgatgaggaagaacaggccaacacagaaacaccaggaaaggcttgtattgccagtcatcctggagctatgacctctaatcaaacacttcggcagtggttaccgaaatgtgacaccgttgccgctttatgggaagcaactgaggaaatgaaaatacaaagccgcacagctgagagtgacgctttggttcgtgttgcttaccagtgccagacaaatgttacatggaatgaggaaacactggcacttgctggtcgtactttagaggaagcttttgcacttgaaaatctgtccttgtgtcaagatgtgggctgtaagccactcaagctacgtattgccagagctgtaagtatggatctactgcaactggcccagcgtattcacaagcgtgtgcaatcaaaaagcttcagtaaaactgattttgctctgaatttacttcttaaaaaaccggatgaatggtctgtcccaacatacattgctgaaggattaaaatggctcgaagctgaaatagccctgccggaactagaagttgcagaaggtcaggaagaggttgttgaggatatgtccgtcgctttggctgaaacagatggtgggagggttgcatga

SEQ ID NO: 279120 - DNA, 327 bp, Morganella morganii
gtggcaacatataaagaaattgcagataagtatgcaaagcgagtagctagatgtcgaaatttggttgagcgtcaccatgagttggaacgtattcgagctgaaatcgacagattgacggtagatggaaaggcaattagtgaacaacaaattgttcagttgctaagggaactcaaaaagtctcttcgtgaacttggttttgatgaaagcatcatttcattcgaaacttatattaatgaagaattttctaaatcttcatcttctattagcaatgacgaacttctctctctcatgagaatggtagccaaaggacgaagccatgacaaataa

SEQ ID NO: 279121 - DNA, 510 bp, Morganella morganii
atgacaaataacgaaattctcacattacttgtttcgggggctgcactattagtttccggctactcagcaatacaatatagactggccaatgaaaatgccaaaaaagctctcattaaagctgatgaggctcattcgactcaaaaggctgctttaagcttacaagaagcagcactggaaagtcagatcactagcagtattgcaactgctgcgggaatggtacaacaagccgcattggcattatccaatatagctgaaagcgcccataattatgacatttttaaaaaaaactatactacggcacaagaagtctggctaaatgctcatgatcaggcatgtatgagttaccgtgaagataaattaaataaaggcaccttcaaaaaaacatatcaagttccgattcggtctattgtagaaagtgaagatttagagcacttctttaatcccgcagatagttcgaaataccaatcaatccttactgtttaccgcgagtgggaaacgtcacaacgatga

SEQ ID NO: 279122 - DNA, 279 bp, Morganella morganii
atgtttcatcaacagagtgtcagtaagggtaatatgagcctttttgtggatcctcagtcaggcaggaataaacagcgtctatatattcatccagcaacaaaatacgggcaatacaaaatagttctcagcggtgtgactctggcagcgcgacaaaaagaatttgagcgaatcttcggcaaaaaatgtgaaggttatgcacatccagattcaacgtgcccttactggtatgtcgacgacccggtattggtcaaaacatccgcatacctttatatgtactag

SEQ ID NO: 279123 - DNA, 951 bp, Morganella morganii
atgcttataaagaacagcctgccggttttactctgtctgatttctttttcaccgccgttgtctgccggcagtaactgctggaacggcggtcccgctgatttcaattttggtgccggtactcaggggcaggggaatacaacaaccggtaaagtggtttttacctgcaacaactacgaaagcacaactcggtatatacgtgcctgtctgcgtctgcaggacgaagccccgttatccatgcggacaaacagctatcctgcatatcagcttttttttaatatttatccgctgaatgatcagagtgcacctctgagccgttcagcacaacagtatgcacagattgattatactctgccgccgtcatccacgcaggaagcatattttaatctgtctgcaaaaataataccggatcagacatcactggcagcgcagtcttattataattataactttatggccgtcattaaatttatggctgcggaaaagccggagcagttaccggtctgcaatgcgatgccggacaccaatatacggacggcaccgctgtcagcccgtacggaaatcagacagggatgtcgtatagacagggtcagtgatatgaattttggcgcactgtctccggtcagcgggaaacaattatcatcaaaaaccacagcgacaatcacagcgcaatgtccggcaggaacggcattttttctggggctggggtcaggattacattataaagataacagccggcagctttgtgacgggaaaagctgtgttacctatcagctttatcaggatgcggcaggttcagcgccgtggggggactctgttcatgtgaataccgtgagtatggtatctgataccggaagcagtcagagtgctacagtgtatggcgttattccgcagcagaactggccggatgccgggacatatacagacacagtggtggtaaccttattttattaa

SEQ ID NO: 279124 - DNA, 2316 bp, Morganella morganii
atgagcaaccggaacctcacagtctcactgtttatccttattaattcagggggatacccgtctacggttttcgcagaatcctcaccgcagatcctctatcttgatattactgttaatcagcggacgttacctaagcttgttcctgtaaaaaaagagggggacatcttttggttgtccgccggtgcagagcagtccctgcaactgaacagcggggtatttgtcaggcaggatggctggctgaaactgtctccccggcaggggctgatgctgaattataatccgctgacccagtcactttctgtcaccgcggatgcagacctgcttgcggggcatcagaacgaaccggcagccggccggggatttttactgaaagaggatcagatagcaccggtgataaaaggcggtgttattaactatgacctgtttgccggacgggacagatacagcgacagtatcagtgcttatacggaagcacggttgttcgggtatggcagcggaaatttttcatcttcatttaacaaccggatttaccgggcgaatgatgtggcggacagccggtttacccgtctgatgacatcatggacatacagtaatgtcgactctttaaatgtggtgacgctgggagacagtattaccgggggacaatcctggacaaaccgtgtaaggttcggtggttttcatgtttcacataattatactgtacagcctaattttaacactgcatcacagcctgtttacagcgatactgcggtattaccctcaacggctgacttatatattgagggtattaaaagcagctcgcagcgtatagaacccgggcaattcacattaaatacggctccttatttttccggtgcgggaaacgcccggttagttatcacggatattaacgggcagcagcaaaaaattgatttggctctttataatacaaatcagctgctgtcttccggtttgtttacctgggatatcagtgccggctggcttcgtgatgattacagtgaacattcgttcagttatgacccccgtttcatgatgacgggtgacggacgttacggattaagtgaccgggtgaccctgactgcacacagtgaggtaagcggtgtgcttcagaacagcggtgccggttatcactggctgatatccccttattttggtgtattccgtgcagatgcggcattcagtcagtattccggtaataacggatttcagtggggtgccggctggcagtggaataatccgcggttcagcatttctgttgatcatcagcagttcagccgggactatgcggatatttctgttatggccggaaacacactgccggaaaagtccggcagtgtgtttgtcagcggcacttctgacagggccggtacattcggcagcggctggataacccggcaatacccgtcagcaaaaacacagtatgccagcctttcctggtcccggacatggtctgatttatttacattatccgttaatgccacccgggagctgggagatcagaacgatcaggcactttattttatgatgaatattcctttttcctccgggcactatatttcacttcagaccggctatgaagatcaccgggtcagtcagcagattcagtatcagaaaagtcttgtgccggataaacccggctggggctggggagtgtcatcccggacagggcggggtaacagttttcatgcagacctgagtcagcgtaataacataaatgaatggcagcttggttataaccggaataacagtcaggacagctggtttgcggcggggaatggtgcagttggcgtcctggagggacaggtttacctgatgcggtcgctgggtaatgcgtttgccgttgccgatactgcgggactgccggatatcccggtatacctgcagaacgtcgaggttggtaaaacagataaaaacggttttttactgctgaatgacctgtatggttatgaaccgcagaaaatcaggattaatgctttgtcacttcctgccgattaccgtatcagggatacagaaaaaacggtgatattacgggaaggaaccggaacacgggtgatgtttaatgtgtatcggacacacgcaatattattgaatgttaaattaaaaaacggacagcctctgccgtttgcgtcagcagtcacaacaaaaaacagaacacaaaaaacggttgtcggctatgacagccggatttatctggagtcatgggagccggggcagcagattaatgtcacctggccggaaggacagtgtgatattctgataccggaaacaatacgaagctctgccgcttttactgaggaaaatgcagtatgcttataa

SEQ ID NO: 279125 - DNA, 714 bp, Morganella morganii
atgttcagactcatactgaaaacagtctgtctgtcagcgctgctgctgacaacagcatcagccgcaacgttacaggtttaccctgtcaatattgatttttcacaggatgaaaaagtcaaagcagtctatgtttccaataccggtgatacgccgattaatgcacaaatccgggtatttctctggcagcagcagggaaatgaaaatacactttccgaaacaaaagatatcattgccagccccccgctgacagatattccgccgcagcaacaacagctcatccgggtgattataccgggagatgttgcatcagaaggagaacaggcttaccgcctgattattgatgaattaccgggaaatgataacgcggaaaataacagcgcggtaaaatttctgctccgttattcgttaccggtttttattcatactccggatgccccggttgatccccgaaaaacggatgtccgcattgataatcatgtaaagccggcaatgttatttatccgtaacaataataaaaaacatataaaattaagtgatgtatttatcatcaataacgggaaagagcagattattaataaaggactgatgggttatgtactggctgacagtcagatgcagtggccattgccggataatatctctgcaggacagacattgaaagtgaccattaatgagcaaccggaacctcacagtctcactgtttatccttattaa

SEQ ID NO: 279126 - DNA, 474 bp, Morganella morganii
gtgattaaaataataaaaccgctgatttttgccgttgccatgagcacatccgtaacaacatttgccggaacgccggtatcagaacaggtcagtgccaacatgaatgtctatctgactgtgctgaaagcctgtactgtttctgtcagtgatatgaatttcggggagcagtacagcacagccggtgatttggctacggatgccaccgcgtctgtcacctgtacgccgggaaccggctataaactgaccgcggatgctgctgatgactatcttcttgacgacgggcacgggaacaaagtgacttattctctgttcacagaccaggccggaaaagtaccgatgacaaccggaatggcagaaacaggtaccggtactgcccagcagctgaaaatttacggtaagattgcctcaaattcactgcagcaggcacctgccggtatttataaggatacggtttcgattctggtcgattactga

SEQ ID NO: 279127 - DNA, 285 bp, Morganella morganii
atggataacgagactgtaggtattttatggttcaaaaataaaaaccagcacctgtcttacctgcatgcactaacggatgcaaatgaattaccccgcagctatacagcatggctcagccagaccagcctgtttatctcccaggccgaaagacagggccttcaggtaatgaaaattcacgccgaagtgcttgaagtttattcctggtgccataaaaataaaatcaattttgatacggatgcctgcagaaggtttgccatgctcagggcacgtaaaaaatgtcgttaa

SEQ ID NO: 279128 - DNA, 1575 bp, Morganella morganii
atgagacttagggtttgggaggaagaagatcgcagcgcagcccccactgcagtgctggatatagcaaaccagcctatagaggggttttcagaacaccgcaggtaccttatcgaatgcccggaagatctgcagtcatcgcagctttatgttgatgatgtctgcctgcagaaaatacccggttattggatatggcagccgggtttctacgcaggagaggttgatcttgaactaatcctgggcgatcagaccaccattataagctggcgtgtcgatgtgagtaatgacccggataaaagtggtaagcaatcttggcaacaatttattcaggatattattgattttgacagtataagacttgtgggaagtgaacccggccaacatcagttgggtggcatttcacgctttgctggggtatggctacgttacgcacgaatcaggcagttctttccgcgctatgctgaaggattaaaagccgtccttctaaacccggttcaaggctatgaacaacaaactcaacggtatacgctgggaagattgaaaaagctcactctatctactgtgcagcaactcattcaacatgccgatttattaaccaggacgggagttaataccagttccaccctcagagatattcaacatctgcaggtacaggcgactcatacaaataacacttgggacgcaccggcaaatcgccagctcaaattccagttaaatttaatagaccgacgagtaacacaggttctcactgacctgaaacgtgaactgaagataacagttaacgaaaactccggcaccagaaccagcctgaaagagagactaactcgtagaattaatcatctagcaataatcagaaaacacttgcggaatgtcgcccagcaactgcccttttcagccacagattctggaaaatcctatggggtagatttcgattctgtggtaggacatcctcactaccaattaacatggcgcatgggggtaagattactgcgagatggtatatctgaactagtcagtgatgagagccattatcttatacccagttgggaaatctatgaagtctggtgctttattgccttaacaaatggcctgaagcgaaagtttccatatatgaaatggaatttgtctcagcactccggaagactcacatttcgcgcaagacacgaaggtctcaatattaagctgcataatcaaaaatcattccgcgcaatattgcatagaccttcaatggatcctgatgttccccactccatcagtggaatgcgtcggcctgatttagtattggaagtggaaaactctggaatgactcagtttatttgcctggacagtaagtacacgtcacgaagcaaacgtattcttgaagagatggcatcagctcatatttatcatgacagcctaagatggcagcgaaaacgtcccgtgctttcgttgctgttggtcccccgtaatgaatatcttgctgaactggaatccgaatcttggtggcaggagcatcagaccggctgctttacaatgcaaaatggtgagagttcaagccacttgctagacaggttatgggcgcatctaaggataaactga

SEQ ID NO: 279129 - DNA, 2262 bp, Morganella morganii
gtgcgcactgactacactaacaaagaaaatcttaaagaacttcttaacacaattgacccctggaatgaaagtccgacgtggctgaacaaccttcatccattcctcattgaggtcagtcaggcggatttagaaacacgctcgtcttatgagtttcaacagcgattgtggaggcagaatccaatcagcaacgctgggcagggagcaatagatgtcagtaaagcgattgcggacaatacctttcgccattgggtagcagaaaaatcaatggaatcactggatgacaaaagtccagatgattgcgcaatttggctagatgacttttatcacgaccttctaaagaatattcgcccgttcactacagcaactccttatttgctggtcatgcgggctctggctgcattttggcctcgcaagctaacgagcgtgagtagttctacgccagcatatgaaatcgccaggatatggtttggcaatgtgcagttaaacatagtgagattgcagttggagataaccaagcacatgaatgaattgcttggggagccgggggaggatttaagggaagttgcagcacgaatgactttaccgtggctatcgttagtaacggttcgccagaatgaagacagcggccagccggaagctctgagtaaaaccggagagattaccctgcagcatcaacctgccgaacaacgtcgtaaaggactaacgtcacttaaaggcggtctgagtactatcaaaagtgtgctgtattttttagaggtacctaaatcacgcaatgatttaattgattttctacaggaagaatttcctgaatcaaaaagcagcactctgaataccattatcagcatcctcagcaacgaattctttgtgattgaaaaagagggggatatatttagcctctcctcccgtggggtagcgtttctccgaacgcaggatccacaagaactaatcccggtaatgatcacgcatatactgggtgtggatcatgtactgtgtgcgatgaaagacggaagcaaaagttttacgcagttattgcttttactccgcaaagttcattttggatggacctcagaaacagtaccccgttcaatactaagctggcttattcaactcggcttagttaaaaaggacgaaatgaaaaccttcagtcttacggaggaaggccttggatgggctaaccgcattacgtggcagcccgaattcttacctcaagcgcctatcattgaaacagacctggacgtggaagagatttcacctgagatcagtgttaattgtcttaaaataaatgccatcatcaatgacgtgataaaagatagtgcattccggaaacgtcaggttgagcaacttcatttgggactttgggcacacaaacagcggcacttcgcaatactggccggtctttcaggatcgggtaaaacacaactcgcgctgagatacgctcagtcgctaagcactcatcaccctgccccttcctctgataaagagaaaaaaacttggtttgttcaacccgtacaacccggttggtacgacccatctgcacttctgggctatataaaccctctgagaccagaaagttatacccgtaccccgttactgaactttttgctgaaagcggctaattcaccagaaatcccgttcgtcgttatactcgatgaaatgaatctctcgcacccggagcattatttcgcgcccttcctatctgcgatggaatcaggaacacaaataatgcttcacagtgaaggcgatatgtttgatggtgtgcccgctcgcctgcattatccttctaatgtcgcttttatcggaacattgaacatggatgaaacaacgcttaacctatctgataaagtgcttgaccgagcttggactatggagttttgggagatcgacctgaaaaatttcccaagatggggtagctacggactcagtgcagaagaacaggattacattagggatgttttaacttcgctgatggattacttaaagcctgagcgcctgcactttggttggcgcaccgtagaagatgtgctcagtcacatttcacttgcacgacagctgacttctttcaatcttatagatgcccttgatgatgtcatttatgcacgcgttttgcctaagcttcgtggctcagatagtgttcgtctgagaaaaatgcttcatgactgtcatgccctctgtctgaaactcaacttaccacggtgtgcaaataaactaatatccttatctgctgacctagaggatgcaggtatgatgaggttctggcgctga

SEQ ID NO: 279130 - DNA, 438 bp, Morganella morganii
atgaaatataaatcaacaatttttctggtcgctaaaatgattactatcatttttctgatggttatgtcgtttattcttggtgtttcttttaccaaaacagctgatattgaccccatcgaacaaacgaaaattaatatttcaactttgcttgaatatcaggggattgctgagtttaaaaatatcacttatttttttaataaaaaaatgcaaaacggagcgtttcatggctacatttgcggtgaagttttcacgtttaataaggaggagctatccgcaggattcaggcgattcgtagtaaaagtatatgagccgcccaaggggctgacgcttctctctttccctgttattgaggacggagatgatatgtttttatctggcaggaccggtgaaatatgggatatgttctgtcataacaatcaaaacgaatattcacaatga

SEQ ID NO: 279131 - DNA, 327 bp, Morganella morganii
atgaaaataaagaaaactaaaaaattatatccgataaaatatattgaaaattcaggactgacactgcaggagtgtgtcgggatattacttcgtaaactacggatagaaaaaggattgagtggtgaggaattagctttttatgtagggctgagtcagcagcagatttcacgttacgagcgggctgaaagtgaaatgacactgggacagttacagatgttttcagaagccttgggaatgagtatatggaaatttatggatatattacggttattattagattctgaagtctatgtaaataaaaaaagtaaacaacatgaatcatcataa

SEQ ID NO: 279132 - DNA, 429 bp, Morganella morganii
atgagaaaggctattttttcatcagtcttggttggggctgtgtttatcagtgggtgcgctacaattgttggtgataaaacgcagttggttcagattgaaagtaccccccccggcgctgattttttagttaaagatgagcagggaaaggttgttgctcagggaaagacaccgcagggtgtaacattacagaagtcgacaggtaactattttggtaaaaagcaatatgaagttaccctctcaaaggaagattcaaaaccagtcacgcttcctttaaaggctaatgctaatgggtggtatgtcggtggaaatatcatattcggcggattgattggctggcttattgttgatccatttaacggaggcatgtatacacttcatccggaaaaaattgatgctaacctggtaacccagggttctggcgttcagtga

SEQ ID NO: 279133 - DNA, 3258 bp, Morganella morganii
atggcaaagcttcgtgagcttattattaaaatatcggcaaattcctcctcgtttcaggctgaaatagcgcgcgcctcacggatgggggagaattattaccggacgctggagcagggcgggcgcaaagcagcatcggcatcacgcgaaacgaaacgggcaatcagtgaactgaataatgagctttcatcaataaaatccacggtaaccggtgtcatgggggccatggccggtgcttttgccacgcagcagcttatcagttatgccgatacctggagtcagttaagcggccgtctgaaactggcctctgtgtctgcggaggatttcagccgtgctcagcaggaactgatgtcactgagccagcgtaccggcacgtcactggcggcaaataccaacctgtatgcccgtattgcacagtcgatgcgtgatgtgggttatgcctcgggggatgtggcaaaagtcactgaaaccatcgcaacttcactgaagctgtccggtgcaagcactgaagaagccagctctgttataacacagctgagtcaggctctcggatccggtgtcctgcgcggtgaagaatttaacgcggtgatggagaacggcggacgactggcaaaactgctggcggacgggatggggaccaccatcggcgagctgcgcgatatggcacagagcgggcagctgaccacggataaaatcgttccgatcctgacaaatacggagcaactcagaaaagaatttgagcagttaccgcagaccgtcagtatggcttcgcaaaaggtagaaaacgcctttatggcgtgggtaggcggggctaatgaggcatcgggcgcaaccagcacactgaccggtgcactgaatggcattgcaggaaatatagacaccatcgccactgttgccggtgcgctggtcggggttggccttgcgcggtatttcggcgggctgaccgccagtgtgaccaaagcaaccatcggggtggccagtgccgcaaaaggcgaggtcgctcttgcacaggctcagctgcgcggggcacaaattgcggttgccagagcgcgtgcggcagagtaccgggcacagcaggcactcaccgcatcacgtggcacggatgcacaggctgccgcagaaaagcggctggctgccgctcaggcctccgttgcccgtaacgtgaatgcccgcaatattgcccagaataacctgaacaatgtcacgtctgtcggcacccgtctcctgggcggggcgctcggccttatcggcgggatacccggactggtgatgctgggggccggtgcctggtacacgatgtaccagaagcaggagcaggcgagacaatcggcgcttgaatatgccggagctatcgagcaggttctggcaaatctgaacaaaatgacgctgccggaaacgtcagataatgcgggaaaaaccaaagaagccctggctgcacaaaataaactggttgatgagcagcgtcagaaagtcgagggattaaaatcagagatagccgggtatcagcagatgctggcctcaccgggaccaagtatcaacggctatctgattaatcatctgatcagtcaggaggatgcggttaaatccctggcggctgcgcaggatgaactttctgttgaacagagcaggctcaatgagctgagcaaaaaatcggaagagattcagtcagcactgaaggcggtcgaaagtcagcgtgattttcttattcgtcagcagtctgctgcccagaataatatgcgtcattcattactgatggtgaatgcggagcatagcgaatttaaccggataatgtctgccggaaatcagatcctgactaaccgtctggctctggttaacagcccgatgcgtatcccggcagcgcctctcagcgaaaaacagcaggatttcattcagaaatcagagcgggacaaagaactgtccgcactgaccggggaagcccgtgttatccggcaggctgagtttgccgcagatgatatcggtctgctgaataaacccgaatttgccgataaccggcagaaatacattgataatcaggtggcagcctaccggaatcaggaaaagctgagtaaggaactgaaagcgggtaaaagcgcccagagtgctttcaataaagagcagaaagaagcggaacgtcaggcggagcagtatgcccgtaaaatggcggatctgagtgtggctacggaggttcagaaagtcagggccacgcagggagagaaggccgcagagctgtatgcggctgcgcatgaggccggtaccaaatggacggatgagcagcgaaaagcgatccgcgcatcctctgttgttctggctgaatggacacaaaaggccgatgaggcggtcagaaagcagcgtgaaatggatgatgcgctgaaagcgatgcgtgacggtgcccggaaattcagtgacgaagcggagcaaattgataaaacccggggaatgggcggaaaccggcgcagtctttacgatgagcgtcagcagattgatcgtgtttatgccaaatctgatcagggaaaaagtgcgaccgaagcttataaccgggagattgacgcactcaacctgaaatatcagaaaataaaggaggttcagtctgactggaccagcggggttacccgggggatggaagactgggttgctgaggccggagactatgcggagcaaaccgcatcagcagtgcagagcgccatgggcggtatggtgaataacatcactgacatgctgaacggaaataaagccagctggcgcgactggtcaatagatgtccttaaatccatccagaaaatactggtcaacgctgccatcgtgaacagcctgaaatccatgtcagatgccggtggctggattggtgctgtcggtaacttcctgggaggtgccgcggcaaatgccaaaggcggggtatatgattctcctggcctgagtgcgtacagcaatcagatagtcagcaccccgacttattttgcgtttgccaaaggtgccgggctgatgggggaggccggaccggaagcgattatgccgttaacacgggcggcggatggctctctgggtgtccgggcgctcggcggaaatcagaacagcggttcagcggcaccacaggtgtttattaccatcaacagtaacggcagcagccagacgcagtcgtcggctggttatgagcagtttggtaatgaaattgccgcattcgtcgatcagcgtttccgcgtactaatggacaaagacacccgccccggtggtgcagtctggaatatgactaaggggaaacgatga

SEQ ID NO: 279134 - DNA, 324 bp, Morganella morganii
gtgcaggccggaagattaaggcatcgcgtcacatttcagcgtgctgaacgggttatcttaccgtccggccagcgtgaaaaccaatggctgcccgttgccgtaacctgggcggaagtcagatccgtcagcggcagggaactgctgaccgccggagcggaaatgtcagaaatcacggtccgcgtatggatgcggtaccggccggatattcatcctgcatgccggatggtatatcgcggtcaggtctacgatattcaggctgtgatcccggatgtgaaatttacccggctggaactgctgtgtaaacagggggtgaaagatggctga

SEQ ID NO: 279135 - DNA, 303 bp, Morganella morganii
atgccgttaccgacactcgaaaaactgagaatgcagtgccgtattgatgaggataatgaccttgaggatgagttgcttctgacttacctgggagcggccgtgaagcgggctgaaaattatattaaccgtcatctttatgacacagaggttccggcatcagatccggacggattaccggttacggatgatatagaactggccctgctggtctgcgttggttacctgtatgaatcacgggaaaatgcggcaataccggcgggcttctttctgctgcttgaaccgtacaggttcatcaatttatag

SEQ ID NO: 279136 - DNA, 1218 bp, Morganella morganii
atgaaacttcatgaattaaaacagaaacgtaataccatcgccaccgaaatgcgtgcaatccatgaaaaagtcggtgacggtgttatgaccgaagaacagcgcgcggagtggaataaggccaaaacagagtttgatcgtctgaatgagcagatcacccgtgaagaggaactgcgtgcggcagatcaggcttttgtggatgatcaggagccggaacagcgcggaaaacagaacggtaatccggaaagtgaagccgcagagcgccgcgcagcggcatttgaccgctttctccgccatggtttcggtgagctgacagcagaagaacgtcaggccgtgagggaattacgggctcagggaacatccccggatgagaaagggggctataccgtcccggttaagatgctgaacaaagttgttgaacagatgaaagcctacggcgggattgtctcggtttctcatgttctgccgacggcggacggccaggatattacctggtcaacatcggacggcacagcggaggaaggtgaactgctgggggaaaacaccgctgccagtgaacaggatgtggaattcggcaccgccattctcggtgccaaaaaattgtcttccaaaattatccgtgtatcaaatgagttgctgcaggacagcgggatcaatattgaatcctaccttgccgcccgtatcgcgcagcgtatcggccgtggtgaggctaaatacctggtgaaaggtaccggtgccggtacgccggtacagccgaaaggcctggatgtttccgtgacaggaacggtaaacgcgaaaacagccgcattcagctggaaagacatcaacgcgctgaaacacgccattgacccggcgtaccgcaacagccctaagttcaggctggcctttaatgacagcaccctgaaagtgctcacggaaatggaggatggtaacaagcgtccgttgtggctgccggaaatcaccggtgttgctcccgcgacaattctgggtatgccgtatgtgattgatcaggcggttgacagtatggaagcaggcaagaaattcatcttctgtggtgactttgatcgcttcattgtccgccgtgtcacctatatgacgctgaaacgtctggtcgagcgttatgctgaatttgaccagaccgcgtttctggcgtttcaccgctttgactgttgtctggaagatacctcagcgattaaggcgctggtggcaaaagctgcctga

SEQ ID NO: 279137 - DNA, 609 bp, Morganella morganii
atgagcagtaatgaaagagaaacccgcagctacagcggtgagatccgggccgccccgggggaagaggataaaccggcccacattatcggtctggcttcggtgtttaactccctgtccgagccgatgtggggattccgcgaaattatcaaacccggcgcatttgacgatgtgctgaatgatgatgtgcgggcgctgttcaatcatgaccgcaattatatcctcggccggtctgcttccggaacgttatcactgagtatcagcgaacagggactggcctacgatattacggtgccggatacacaaactatccgggaccttgtggttgctccgatgttacgcggggatgtcagtcagagttcgttcgcgttcagcgtggcggtgaacggcgatgactggtatcaggatgatgacggcatggttgtccgtgaaattcaccggatctcccgtctctatgatgtcagtccggtgacttatccggcctatctggccgcaaattcaaccgtgcggtcaatggaggcgtggaaagaagcacgcgacagcggcggtatagccaaagctgtcaatgaaaaactggcgcgtgagcgtcttctcactttaatgaatgtataa

SEQ ID NO: 279138 - DNA, 1224 bp, Morganella morganii
gtgcttcttgatgcattattccgcgatacaccgaccagtattgagaatccggcggtacccatcagtgcagattctgttgatacagaggggctgttcaaagcagatgtctatgtcagcccggaaacctcgatgaaactggccgctgtatatgcctgtatttatgttatttcttcctcaatagcacagatgccgctgcatgtgatgcgcaaaaccggcgataaggttgagactgcccgcgatcatcctgtgtttcaccttgttcacgatgagccgaacgaatggcagaccagctataaatggcgggaaaccaaagagcgccacgttctcggctgggggaacggctacacgcaggtgatccgtaacagtcgcggtgaggtgaccagtctggaagcctgtatgccgtgggaaaccgcactgcttaacacaggtggccggtacacctacggtgtttataacgaacaggggaattttgctgtcagtccggatgacatgatccacatccgggcgctgggtaataaccagcggatggggctcagtccgatagtgcagcatgcggaaaccatcggcatggggatgtccggtcagaaatacaccagttctttcttcggcggtaatgcccgtccggccggtattgtttcggttaagggggaactgcaggaaaaaggctgggaccgccttaagtcaatgtggcagaaagcgtctgcagcgctgcgcagtcaggaaaacaaaaccatgctgttgcctgctgacctggattacaaagccctgaccgtttccccggtggatgctcagttgatcgatatgctgaagctgaaccgctccatgattgccgggatttttaacgtaccggcacacatgatcaatgatctggaaaaggcgacattctccaacatttccgaacaatccattcagtttgtccggtatacggtcatgccttgggtggtgaactgggaacaggagcttaacaggcggttgttcacccggcaggagcgctgcgccggattatatgtccggtttaatctggccggattactgcgcggaaccccgagagagcgggctgaattttatcattacgccattactgacggctggatgagccggaatgaggcacgggcatttgaggatatgaacccggttgacggactggatgaaatgctggtcagcgttaatgccgcacaaccggacggcagtaaatcagaaggtggtgaaaaagatgagcagtaa

SEQ ID NO: 279139 - DNA, 162 bp, Morganella morganii
atgaaaaacatacttcttgatctcaccgccctgacaggtttcggagcggtgctggcaggctgttacctgaaatacggcctgccggattctctggtgattggtgggtcagcaatggttatctattcactggctgtggccatgagggggaaacgtgcttcttga

SEQ ID NO: 279140 - DNA, 1731 bp, Morganella morganii
atggcaaccgtagcagacgggatccggtacgccgagcaggtggttgccggagaaatagttacgggcgaactgatacgcctggcgtgtcagcggtttcttgatgatctggaatacggccctgagcgcggtatttatttcatagaggaacgcgcccggcatattctggatttttaccagttcgtcccgcatgtcaaaggggcgctggcaggtaagccgatagagctgatgccgtggcatacctttattctgattaatatttttggttttgtgatcccgctggttgatgaactcaccggcgaggctcagtacgacgatgacggggatccggtgctggttcgccggttccgaacggcctataacgaagttgcacgtaaaaatgctaaatccaccctctcatccggtatcggtctgtacatgaccggcgctgacggtgagggtggcgccgaggtttactcggcggccaccacccgtgaccaggcgcgtattgtgtttgaagatgcaaaaaacatggtcaaaaaggccaagagctcactcggccgcctgtttgaatttaataagctggcgatttaccaggagcggtctgcatccaagtttgagccgctgtccagtgacgcaaataacctcgacggcctgaatattcactgcggcattgtggacgaacttcatgcccacaaaacccgtgatgtgtgggatgtgctggaaaccgcgaccggtgcccgtcttcaatccctgctgtttgcgatcactacagcgggatttaaccgcgagggcatctgctacgaactgcgggattacgccatcaaggtgctgcggggcgtggtggaggatgacacctttttcgcggcaatttacacaccggatgaggatgatgacccgttcgatgaaagcatctggataaaagccaatccggggctgggtgtctgtaagcgttttgacgatatgcgccgcctggcgaaaaaggcaaaagagcagattgcggcccggcctaatttcctgaccaagcacctcaatatgtgggtgaatgccgaatctgcctggatggataccggtaagtgggacagctgccctgaaaatgcgccggatgatgagctgaaaaattacccggtctgggttggtgtggatctgtcaaacaaaatcgatgtgaccgcagccgttaaagtgtatgaggatccgcgcggacaactgcatatgaagtgcaaattctggctgccggaggacagagtagtgactgcaccgaagcatatcgctgacctgtatcggaaatggggagctgccggttatcttgaactgacggacggtgaggttgtcgatcacgacatcatcaaagccgacattctggcatggtgcgaaggtgaggatttacgtgaactcggttttgacccgtggagtgccgttcagttctcccgtcgcctggcggaagaaggtattccgctggtggaggtggcgcagacggtgaaaaacctgtctgaatcgatgaaaaccgttcaggccgatgtatattccggcaaatttcaccatgaccacaacccggtaatgtcctggatgatgtcgaacgtgacggtaaaaccggacagaaatgacaacattttcccgaacaaatcgacaccggaaaacaaaattgacgggccgtttgccctgtttactgccaaatcacgccagatggtgaacggcggggacagcagcgacttcctttcctctctggatcctgacgaagaaattctattcctatga

SEQ ID NO: 279141 - DNA, 471 bp, Morganella morganii
atgccgggaccaccgaaaaccccatcacacttgcgtttggtcagggggaacccatcaaaacgtccgattaataaaaaagaaccaaaaccgccgtcaggggtacccccaacaccgaagcattttaccaagcaggggaaatactggtttaagcggataggtgaagaactcaatgcgatgggtgtcatgagttcgatggatgccaaagcactggagctgctgatcgaggcgtacaccgaataccggcaacactgcgataccctggacgaagaaggttacacctacacaacacagagtgatggcggcccactgataaaagcacacccggtggcggcaatgaaagctgatgcatggaaacggatccgcgcgatgctctccgagttcggtatgaccccggcagcccgccagaaggtaaccattaacacaccagccgaagaagaccctttcgaggcatttctgaaacaaagaaaatga

SEQ ID NO: 279142 - DNA, 900 bp, Morganella morganii
atgcttaaggctgactcgcaaaggaaaagagaattttatactgattatgtttaccgtaatttaaatgaagcgctgtcatcaacgttcaggtcaggaagaatattgggtgaaaatgaattaaatgatttaattagaaataacatggctgatgaaaaagaaagaagagatttcatcaggcgagcttgtatatcctataaagaatccctgacagaggaccggttttttgactggattaataatgaacgtattgcgctatatgttattcagtttatacataactatatatatgatgactaccttcagagcctggcagtaaaaacaggacctggatacagaaatcattatccgcattttggtaaaacaccccacatccggaatatggggctgccggaaacaccatgcggattaaggcaactgaaagacacaataaaatcatactttgacaggctggatataccacagaatgttaaggaattacttattgatcatatcaggactaattggttcaatcagaatacagactggctgttctggattgaaaacaaaaacaaggcacaagttgactgggccctggagtatattcgtggtcatttcaaatcagagaatgacgatgtgttgtattattacaatccatcatccgctttaaacagaatatacggtttctttgatatcattctgtcatcaaacgaatcgtgtgagctttttattattaaaatgaaaaaagcatggtcgcaggttcgttacagagaaagcattaaagataagaaagttataaacacgtatgtcagtaatgacgtaaaggaaaaactgaaagaaatcgtcagaatcagcaataaaaaaacaactgaaattatctctgatttaatcaggaaagaatatgacaggttgaaaaaaagataa

SEQ ID NO: 279143 - DNA, 1020 bp, Morganella morganii
atgaaagacgatataacccgtgaaatactggcgctgtcacaaacctacaataatggcacagagattactgatgacacaacagaccgtgagttatttcatctgatagcgttacataccactgcattaattaaaagaaagagtcagtctttacctttcaacgggtgcttatttggtggtaaattacaaataagggccactaaaacaggcctgttattttatggattgatacaaaacactctttctctttcccgggtaaccggtaaccggcgtaaattacatccggttattccgctgattgtttctcttgctgataaatatctcattcgtcctgttccggcgctgtcggaataccgccctgattcagaggaggaaattaaacagctaaatgatgcctattgtaaatttattcagtcagtggacggcagagagtataaaaccgctgtcagtacctttaagaacagtgcccgcaagaattaccgtttatgctgccgctatattgaaaacctgtttgagcgccatgcaaagctcctggtggtgcggacagatctgtcctacggaaaacaggtcagccacagagtcacttcccgggatttaacccgtcaccggattgccctgtacaaagcaatacagcggttaccccggtttaaacactgtgtcggctatatcctgaaactggaatacggccgtgagaaaggctttcactaccactgcctgtttttcttcaacggccagcatgtcagacaggatattacgatagccagactcatcggtgagttttggcaggaaaccatcaccgacggacaggggctctactttaactgcaaccgttataaatcagattaccgtatctgcggcattgggatgttacaccgcagtgagagccaccggcgggaaggcctgatgaccgcagtgaactatatctgcaaaacagaccagtgggtgaaactgcaggtgccggggatcgaccggacattctggcggggaaccatccggaacagacggcgtaaagcacgccggtaa

SEQ ID NO: 279144 - DNA, 222 bp, Morganella morganii
atgaatactatgaataccaccaccacctcttccctgcccgacgactcactcgtggacatgaaattcatcacccaatttaccggatcaacggacaagtggttttacaagctgatccaggaaggccggtttccgaaaccgataaaattcggcagcagttcccggtggttcagaagcgaggttaatgcctggttgcaggagcgtattgctgagtctcggagataa

SEQ ID NO: 279145 - DNA, 267 bp, Morganella morganii
atgaaaaagacacgttataccgaagaacagatagcgtttgccctgaaacaggcggaaaccggtaccagggtagaggaagtgtgcagaaagatgggtatttctgaagccactttttacaattggaagaaaaaattcggtggtatgggcgtgacagaacttcgccgcctgagacagctcgaggaagaaaaccagcgtctgaagcgcctggtggcagatctgagtctggacaaagagatgctgcaggaagtcatcaaaaaaaagttctga

SEQ ID NO: 279146 - DNA, 399 bp, Morganella morganii
atgaataaaatattcaaagtcgtaaaaaatcaacggacagggaattctgttgtcgcatctgaattcgcaaagggtgcaaagaaagggaaaaaactggcgctgttatcactagtaatgctgatgggaagcgggctgagtgtatctgcactggccgatgactcaactactgctgctgggcagtggttagaaactgagtatctccctgcacaatatgaatatgacagcacaaataaatcctggcaatgggtgaataattcaaataaaaagggaaaatcacgggttattgatggcggtgacaataaagttcttaatttaactaacgagaatacaaagtttactaataaccttcaatttgaagaatattatataaatactccaaccgtaacaccaaaaacttaa

SEQ ID NO: 279147 - DNA, 582 bp, Morganella morganii
gtgtcagttatcggctatatccgcgtgtcaactattgagcaaaacagtgatttacagcgaaatgctcttaacagtataaattgtgaccatattttcgaggataagattagtggtaaaacctctgtcagacccggtcttaaacaagtattaaaaactattaaggctggtgatacattggttgtgtggaaattagacaggctcggtcgtagtgtaaagaatctgataacgcttatatctgaattgcatgaacggggagcacattttcgctcgcttacggatagtatagataccagcacaacgatggggcgctttttctttcatgtcatgtctgcattggcagagatggaacgcgaactaatagtagagagaactcttgccggacttgctgctgcaagagaacagggccgggtcggcggaagaccgtcagcattaacacctgacaacttagcccaaattgagcgtttgataaataatggtcacagcagacaacaactggcaattctttacggagttggaatatcaacaatataccgatattttcctgtatataaacataaaaaccataatgaaaataatcgataa

SEQ ID NO: 279148 - DNA, 174 bp, Morganella morganii
atgggcaaaggtatcggctttattctgattgataaacagctcaccgccttgtttcacggtgataccgtcatctgttgtcacttcattcagtgtgatatcggtattgcgcagctcgaaacggccttcctcaacattcagcttttcaaagccgctgattttgctgctgtcctgtaa

SEQ ID NO: 279149 - DNA, 528 bp, Morganella morganii; identical to SEQ ID NO: 14800

SEQ ID NO: 279150 - DNA, 1497 bp, Morganella morganii
atgatcgttaagtttcatcccagaggccgcggcggtggcggcggtccggtggattatctgctggggaaagaccggcagcgcgacggcgccagcgttctgcagggtaagccggaggaagtgcgggagcttattgacgcctcgccttacgccaagaaatacacctccggcgtgctgtcttttgccgaacaggatttgccgcccggccagcgtgaaaagctgatggcgagctttgagcgggttctgatgcccggactcgataaagaccagtacagcgtactgtgggttgagcaccgggacaaagggcggctggagctgaacttcctgatcccgaacacggagctgctgaccggcagacgtctccagccgtattacgaccgcgccgaccgtccgcgcattgatgcctggcagaccatagtgaacggcagactggggctgcacgacccgaacgcgccggaaaaccggcgggcgctggttacaccgtccgcgctgccggaagcgaagcaggaagccgcccaggcgattacgcgcggcctactttcccttgcctcatccggggagctgaaaacccgtcaggacgtcactgaggcgctggaaagtgcgggttttgaggtggtgcgcaccacgaaaagcagcatcagcattgccgaccctgacggggggcgaaacatccgactgaagggagccatctatgaacagtcttttaacgctggcgaaggacttagagcagaaatcgaaagcgcagcagcagactaccggcgagatgctgaaagccgcattcagcgagcacgagaagtctgtcagagcggaactgagcgaaagcgagaagagaatcagcgccgccatcctcgaccacgaccggaagctgtcctcagccatgagccaacgcacgaaagggatgctgcgtatgatcagccagacgtggctgaccatagtcctggtctccgcgctactgatcgcctcgagcgcgggcattctgtggtggcaggggcaacagatactcgacaactacacgaccatccaggaacagaagagcacgcaggccatgctttcagagaagaacaacggcgtccagctcacgacctgcggggaggagagacgccgctgcgtgagggtgaacccggaagcgggaagattcggagaggattcgagctggatgatactggcggggaaatagcacatgacggaactggaaaaacagttgctgagcgcattagagcagctacagcaggactactcgaaaaggctggacgagtgggagaacgccttcgcggaatggcggacgatgtctgggcttatgcaacgggagaacgcggcgctgagcgagcgcgtcacgggcttgagcaggcaggtgcagagtttgagcgatcagctgcgccgattgtcgcaaggctgaatggcatcgaggcgcaccgggagcaggagcgcgcggcgcagcaccagaaagcgctggagctggaacgatcgcagcggcagaaaggttttgagcttggaatgtag

SEQ ID NO: 279151 - DNA, 345 bp, Morganella morganii
ttggcagaaaagcgcaacaaaatgctcactatgtgggtgacagaagacgagcaccgccgacttctggagcgctgtgagggtaaacaactcgcggcctggatgcgtcagatatgcctggacgaaaagccctcgcgtgctggcaaacttccatccatctcgccggcgctgcttcgtcagcttgccggcatgggtaacaacctcaaccagattgcccggcaggttaacgccggtggcggtactgggcacgatcgcgtgcaggttgtcgccgtgctgatggccattgatgccggactcgagcggctgcggcacgccgtgctggaaaagggggcagacgatgatcgttaa

SEQ ID NO: 279152 - DNA, 1479 bp, Morganella morganii
gtgaccggcaccggtacgcagtggaaaaagaacattcacggtgtggcaccaggccagcttatcagcatcgagaatggcgcatcaccggtcagcatgatgatccgtgcggtaaacagtgacaccgagctggtgttgtcattcaatgccccggtaacgctcagtggtgcgaaatattccatcgccactacggtaccggacaccatttcagatgcggcccgcaccatgtcagccaatcagggctatatcgtttactttctccaggcaatgcagcagtggatgacagacaccggcaaggtggaaattgagctgcctaatgggcagaaagtgacgctggaggatttaaaagggctggcttcgcgggaatgggttaatggcatgttatcaaacaatcccgacaatcaaactacagtggttagagctgtatctgattcgtatctgtgggtcagcggtggaggtcaattcggatatacatataaaaaacaaaacccgtttgttgttaatgcatccggcagctatgcgtcattgaacggaacgggagagtataccggcttcagactgacgaaatcagatggtcgttatgtgttattggagacaaacccgcacgcaggtacggcatcaatgcttagtattgtgtatcggaaacctaacggcgaaaaccagcacgttgtgacgataccatatgacactggcgtagttgcgactcgttcctggattcagcaggcaaccggatgggggtcagtatacgcggattaccccccgtatatgacaaatttcactaacactaatttgcctaatggtatgtataggtttgaccagaacagtcaaaacccaccctccattataggcgacagatttggcagtgttataaccacgcggtattccggggatattgggcaaaggatagtccttcctaactacggcgcgacgcacatggcggtacatcggtataccggttctgcatgggaatcggtaagggtgttgacatccaatatgtatatcgtagacggcagtggatattataaaaaatcgtcgccaatcgttcagatttaccctgatggccattacgagaccaatgatgaatctgaaggggcagaagttttccgtaccggcaccggccagtatcacattaccggtatccttggttacaactcagatggtgcatggggtgtaaacggcggtatctcggtaccgaaagacaataacggccttgagttggtttatattgatgacagggtgcagagtgacggcagcctgattattgaaacctgtcaccgtcagcacgcgcatttaccggaacgtttccagaactggcggctgaaagaagtcaccccggaaggtgagcgcgttttctatcaggacggtgaaccgtgtgacctgccggaatctacccgcctcgatgtgcgcgtggaaatgccgcagggctcagtgtggaatgagaaacagcgggagttggcggaggtgacggaacataaagaatag

SEQ ID NO: 279153 - DNA, 1056 bp, Morganella morganii
atgggtaaatttgatgtgcgagaaaaaataataaatgttatcaacactccagaatcttatgctcaaatagagtctgaccttagtgaagtcaataaaatacttaaacattcagattcaacattaattattacatttgattacctggataatattgttaaaccttttctttggaatgacgtaatatctccattagttaaaattgcggtgagatttccttatgaaaatatccaaccaaaattattccttcgtagagacttatatgagcggctaggaaatctaacaaataaaaattcatttagtagtagaatcattaatttagaatggtctcagaacgagatattttcttatttcctgaaaattattttcatatattcatatgatgacttttataaatttctatctaattcgctggaaagtaagatacttctaaaagatttacccaaaaaacttagaaacaaaaaaaccaatcataatcagttaccattagacacacatataattaaacctattgtcaatgcattttttggctcacctagacccaaaagaaatggcaaattaagcactgcttatgacgacctatatagaaacatacaaagtgctgataaaaccgttaacttacgtccttttattgatttaattactagtgctatagaggaacaagaaattcaagactttgaaaaaaaatacagaatgaactctataattggattggcatactgcacaagtaaacaagttagaaaaaaagcagttgtaaattatctagaagacttatggaacgaaaaaggaaatgagattgtaaaatacttctgtatggatttttccaataataagatagatccatcgtataaaaaaaacattctatctgaagagttgtttgagaaactactcattcaaataaaaacaaacaatagtggttctgatgatgctataaaaaatggaaccatcgaagaatttaagcaaattttaatagccaataaaataattactccttatatggttggaaataaaacaagatatggatttgcatatctgtatactaacttcctaggaatttag

SEQ ID NO: 279154 - DNA, 2139 bp, Morganella morganii
gtgacggtgaaaggcggggcggagaaaatcattatcaagtctgtggaatattctgccgccggacagaaacttcgtgaggagcacggtaacggcgtagtgaccacttacacttatgaaccgcagacccaacgcctgattgccgtcaaaaccgaacatccggcacggaaaaatgtatttcaggatctgcgctatgaatacgatccggtcggcaatgtgctgtgtgtgacgaatgacgccgaggagacgcgcttctggcataatcagaaagtggtgccggaaaaccggtacacttacgacaccctgtatcagctggtcagcgccactgggcgcgagatggccaatgccggacaacaaagctgttccctccctgatatttccccgtttaataaagcagattgtaccaattacacccgcaactatatctatgatcgtgccgggaatatgacgcagatccgtcattcagcacccgccactaataataactacaccacggatatcaccgtcagtcagcgcagcaaccgggcggtactgaaaaccctggcggacacaccggagaaagcagaagccctgtttaccccgggcggacaacagacacagttacagccgggacaaactctgtcctggacaacgcgcggcgaactgaaacaggttatgccggtggtgcgtaacggtgccgccggtgaccgtgaaagctaccgttatgatgcgggcagccagcgcatcctgaaaactgccgtacagaaaaccggtaacagcacacagacacagcaggtgatctatctgccggggctggagctgcgaagcggaaaagaaaactatcaggtgatctgcgccggtgttgccgggcgggcacaggtgcggctgctgcactggccggacggcaaaaaagatcaccagcggttcagttacgacaatctgatcggcagcagcggcctggaaacggacggcgacggtaaactgctgagtcaggaggaatattatccgttcggcggcacggccgtgctggtggcggatgcggacagcggtattgactacaaaacccatcgttactccggcaaagagcgggatgcgaccgggctgtattactacggtcaccgctattatcagccatgggcagggcgctggctgagttcagatccggcgggaaccgttgacggactgaatctgtattcaatggtggggaataatccggtgtcgttttttgatacgaacggattaagccggacgcagcaaataaatgattatgcagaatttatgggggcggcaaaagcggcaattcataaaattcacacctatattgatgctctggcgaatccatcccgtatggccgctgctgagctacgttctgtagcgagaaaagcaacgacgtacggacttaaaacagccggcggtattggcggggttgcagcaggtgttgcaattgcggcttctgttactgttgctcttcctgtcgtggcgccggttgttatcggtactgcagctgtgggggggatcataggggggatagccgccggagttgccagtgaaaaagcatttgatctgggggtcaatgctatttttgacaaaaataaattccagccgacccgggttcagaccaggaaaatgcaggaatcactggcacaggccggtggaaatttctttgccaatcaggttaaaggccagcttgatttaagagaacaaataaaaacacacgggtcagcaaaagcagcttcagcactggaagaggttctggatctgggcgttaagcttcctgtaaaagcacttttggatacaggattggagctcaatgatttcagaggaataacgatagcaaaaagggataaaatcacaggtgttctggatgcagtctcttccggactgtcatctgataaccacaatgaaattatgggactatttgatgataaagggactgacagtgtcagaaaatatggtacgctgaacacagggcggattttccgtatgagttatacaaaagataaactttctgatatgcggactgagttactgaccagagtcagtgatgtcaggagaatgctgaataatccggatatttataaaggaaaagcagcaaaagctcaggtttccggggaagcattgtttttccatcagaaaacaataacccgcagagcatcaatttga

SEQ ID NO: 279155 - DNA, 2052 bp, Morganella morganii
gtgacttatgatatcgccggattactgcgcaccagccgggtgacggtgaaaggcggtacggagaaaatcattatcaaatctgtgacgtattccgctgccgggcagaagctgtgtgaggagcacggtaacggtgtagtgaccacgtacacttatgaaccgcaaacccagcgcctgattgctgtcaaaaccgaacatccggcacggaaaaaaatatttcaggatctgcgttatgaatacgatccggtcggcaatgtgctgtgtgtgaccaatagcgccgaggagacgcgattctggcataatcagaaagtggtgccggaaaaccgatacacttacgacaccctgtatcagctggtcagcgccaccgggcgcgagatggccaatgccggacagcaacgcagttccctgccggatatttacccgtttgataaagccagttacaccaattacacccgcaactatatctatgatcgcgccgggaatatgacgcagatccgtcactcagcacctgctaccaataataactacatcacggatatcactgtcagtcagcgcagcaaccgcgcagtactgaaaaccctggcggacacgccggagaaagcggaaactctgtttaccccgggcggacaacagacacagttacagccgggacaaactctgtcatggactgcgcgcggcgagctgcaacaggttacgccggtggtgcgtaacggtgccgccggtgactgtgaaagctaccgttatgatgcgggcagccagcgcatcctgaaaaccgccgtgcaaaaaaccggtaacagcacacagacacagcaggtgatctatctgccggggctggagctgcgaagcggaaaagaaaactatcaggtgatctgcgccggtgttgccgggcgggcacaggtacggctgctgcactggcaggacggtaagaaagatcaccagcggttcagctacgacaatctgatcggcagcagcggcctggaaacggatggcgacggtaaactgctgagtcaggaggaatattatccgttcggcggcacggccgtgctggtggcggatgcggacagcggtattgactacaaaacccatcgttactccggcaaagagcgggatgcgaccggattgtattactatggctaccgctattatcagccatgggcagggcgctggctgagttcagatccggcgggaaccgttgacgggctgaatctgttccggatggtgaggaataatccggtgacgttaagagatgatgacgggcggaaacccatcagtgaaaacttcagtgaagaaaaaggtgatatggtttatggccttgccggtttcagaggaaaatatatttcttctgcactgggacgtccgtttttacctgacagcaaagacgcacctgcatcgataattgatttatataataatacggtatccggtcaggtattgatgagcgttgatatgaaaatattacagaatttcatgaaatcaccggataaatatgagaaaaagttatcgccaccggctgatataaaggaccgtgtacagaaaagcagaacatatcctttgtgggacagttatttttctgctggtgaaaaaaatgagaaatttaatatacactctgtttataaagaggtcagaaaaaatcccggaagtacgcaatatcatgaatggcatatgtccggggcacaatctgtaccgaaacttctctggaaaagaggtagtaagctggggatagaaattgcggcatccggtggcggtaataaaatccactttgctcttgataatttaaatataaaggaaattatcagtaagtcaggaatgggcggacagtctatcactgccagcgaattgcgctatgcttacagaaacagagaacggcttggcggaaatatacatttttacaaggatgataatgaggttgacgctccgtgggtatcaaaccctgaacagtggaacacgtataaacctaaattattatcggtatcaggcggacaattagtccggcggcataccggatttatgggccgtttacgtgcatcattcagtcgtactttcaggagaaattaa

SEQ ID NO: 279156 - DNA, 453 bp, Morganella morganii
atggtcgtaaatgctgaaaatatggaaaatggtctgtttaatacaaaagatgaccctcgaattacacgattaggtaattttttacgtaatagcagccttgatgaagtacctcagtttattaatatcatgaaaggtgatatgagttttgttggcccacgacctccggtaacctatgaattaggtagttacgatagctggaatgaagagttaaaaaaaagcttttctgtaaaaccaggtgtaaccggattagcacaagttagtggccgcaatgaattaaattgggatcaaaaaactgtatttaatttgagatatatagaaaatcagaaaaaatatggtttactatatgatataaaaataattttattaaccatctataaagttatcaaaaatgaaggtagccatgagctagaagataatgttgaacaagatcgaaaaagaatcaataaagactaa

SEQ ID NO: 279157 - DNA, 429 bp, Morganella morganii
  misc_feature (383)..(392): n is a, c, g, or t
atggactattcagtattaaataaaataagtaactcttatggtgattcattttatcttttagacactgaaaagttcaaagataactatactgaattacttaattcctttaagaaatattacaaaaatactaatatcggatattcgtataaaactaactatacccctgttctctgtaaattaattgatgataacggtggttttgctgaagttgtatctgatatggaatactcattggccatagctatcggtgttgctccccaaaatatcattgtaaatgggccttataaaacaaagaaattaattgagaaatacgtcttaaacaagagtatagttaatcttgactcatatcgtgaatttgaatatatcaaagaaattgctattgnnnnnnnnnnaccccagtgtaaatatagaatatggtatccgctgtaa

SEQ ID NO: 279158 - DNA, 462 bp, Morganella morganii
atgaaatatagagattatttattatcagctaaaaggcatagccatacttgtaggatattacaagaaaaaattgacgccacagatattactctgataaataatgatgatataaattatcttacattaagtttatattacctatcaggttatattatagaatgttcattaaaatttaaaatctttgaatcctttggatttgaacatgacttagaaataacaaaagatacatgtaacaccaaaggaataaactataaaaaaaaaataatgacccataacttttcaaaacttcttgaatacctacaaacaaaaatcccagatatatcatataacagtgacattgaagaaataaatgaattattaaataagtggcaacctgaactacgatacttacatacacacattgagtatgaaaaaattaaacagttatatgctcatgctaaattatttttaagaaaattataa

SEQ ID NO: 279159 - DNA, 333 bp, Morganella morganii
atgaacaatacagcagtacccgcgtcaccagcggccgtctggcagacactgctgacttacctgctgcaacagcactacggcctcactctgaacgagacggaatttagtgatgagcgcgtgattgaggcctgcctttgtcgcggggtgtcattgtgtgaggcactgaatgcctttgcggagaaatacgctctggtccgcaccgaccggcgcaacaacggtatcactgagccgtcacacagtatcactgcgaccgatattctgcgggcacggaaggcaaccggtctgataactcaccacagcagctatgccaccagcagacccgttaccgtataa

SEQ ID NO: 279160 - DNA, 441 bp, Morganella morganii
atgacattatcagcccttccgctgcaggagcccgcagccatcaaaagcaatctggttcatccccgtggcagagacacattctggcggttttatttcggcagcgtgccgggctggcagcgcctggaaggcgatatttttacccggatgagcgaactgtgtgatgtttattatggtgctttctgggaattcagtatgctcaccaatggtggtgtatttatctggccagacatgattgaaacgtcacttccgatggttaacccgcataacggtaataatgcggaactgagtccggaagccgcaggcattgccgtgtgtttaatgacgttcagtatctggtcattccggactgaaagcgaagtattagttgagtatttttatcagttacgggactacgccctgcagcatgacgagtgtgccgctatttttcatctgattgattaa

SEQ ID NO: 279161 - DNA, 249 bp, Morganella morganii
atgaaaaaggcaacattatctgcgtcaccggcggcagtctggcagacactgctgacttacctgctgcaacaacactacggcctcactctgaatgacacggagttttgtgatgaacgtgtcattgaggcctgcctctgccggggtatatcgttgtgtgaggcactgaatgcctttgcggagaaatacgctctggtccgcactgaccggtgcaacagcagctataccacccgcagacactgcaacgtataa

SEQ ID NO: 279162 - DNA, 441 bp, Morganella morganii
atgacgttatcagcactttcgctgcaggagcctgcagccatcaaaagcaatctggttcatccccgcggcagagacacattctggcggttttatttcggcagcgtaccgggctggcagcgcctggaaggcgatatttttaagatgatggataatctgtgtgacgtttatcacggtgcattctgggaattcagcatgctcaccaacggtggcgcatttatctggccggatatgccggagaccacgctgcttctgtttaatccacataacggcaatgacgcagaactgagcccggaagcggccggtatcgcggtatgtctcatcacttacagtctctggtcatttaaaaccgaaagtccggagatggtggagtatttttatcagttgcgggactacgccctgcagcatgaggagtgtgctgccattttccgtcttatcgattaa

SEQ ID NO: 279163 - DNA, 177 bp, Morganella morganii
atgaaccactttaatcgcatccggctgtttcagggtatctgcaccttcgccaccaacattattaatgttcagcgtggtcgcgccgtttttcccggtgtacacattaccgtcaaccaccagctggtcagtcattgtgtcttcgtgacctctgttcagcacagtattcagtgtgattga

SEQ ID NO: 279164 - DNA, 450 bp, Morganella morganii
atgaaaagaagtctgacactgcttggttgtttactgctgtccgccccggtttttgcactacgcatgcccggtgaggtacagcctgaccgttacacttattacctgaccccggaatacgggcagcagctgaaaatgcagaacgacggcaaaggccagaaacctgcgtttcagccactccctgccggagagctgaggagtgagaccagagcggatttgtccaaaggctatccggctccggtggctatgacctgtatcagcagtatttattataataccggagctcaggctaactggctgaaggtgggctgtatcgataataacggtatggagtacgaaaccagtaagaaatggccgccgaaatccgtcgcggagcgggtctgtaaagccggagagggagactgtgagtccttcctgcagatggatactgacagctggtccggtccgcagtaa

SEQ ID NO: 279165 - DNA, 267 bp, Morganella morganii
atgaatatatcaaaattaatcacattagctgcaataactacgctgacagcctgcagccataacgtatacaccaaaccagtggattgcaccgggcatatgtttgaggggctggataaccggcattattcagctaagctgacaaaatatgcgccggacagtaaacggtttttcagtacaggtgatcctgttctgggtttgcatggctggatccgcatggatacgtttgacaaaattacatgtgttaaaggtaagagtacagaggactga

SEQ ID NO: 279166 - DNA, 267 bp, Morganella morganii
atggccggtaaacaggttatctgtctcggagatacgactgaccacggcggtgtggtcatctccgcgttggataattacactgtcaacggccgcccggtggcaacggagggggattcagtctcctgcccaaaatgcaaaggtgtctttcagattgcttccggttcttccctcatgacctttcagggcaacaaaattgccctggagggcttgaaaaccacctgtggcgccacactgattgcgtcgcagtcattaatggtatcagagtaa

SEQ ID NO: 279167 - DNA, 2979 bp, Morganella morganii
atgtcagaaaaatcaaaaagtatctttggtaaattaatagatacagcagataaaaaccacacatgtatttatattaatttttcttcaggtgaagatattcagattaatgttattcaaaaaaacgaaaaatcagcggaaataaacgatgataataataaaaagctgacattattactgtcagatattcagtctcagtttaaacaacaaggcatttcgctgaacagggttcaggggcaaccggaagggaaacgtaaattaactgcggagctgaaaacagataaagtatcgctgtcagaaaccgaagtggccttgcaaaaaatgcagttccgggcacaggaactgggggctgaactggtgttaactgatcgcccggcggagatggcaaatgaacggtggcggttaccggcggtttccggtcaggagaaccgttctgagagcatgacggcggcagagggactggcgaaactggccgttgccgttcaggcggtgacggatcagtgtccgttacagattacactgatgattcagcctgatttacggccacaggtgatactaaacgtctctgccggtgaggtgaactggatttttgcggcaaaagagggccgttatccggtgaaagatttactggccaaaatggccggtaaaacgatcacgaatggctgggatgcggttgtggtataccagcgcggtcaggccaacatgctgcttaaacagcagcatattaagcggtttgttaccggcaatgtattagcgccgctgaatgaagatatcgattcatcagacgccacccggttacagacacataacctgacactgagtgccccgtatctgtcattcgacgctgcagacaccggggattcaatggcacgggtcggttgggattttgtcaaagggatgattatttatacacaggaagcggatgacggatcttaccgtgttaagaagattgaaaagatcaccccgctgaattccccgtttatcggtatgaaggtaccgttgtcaagagcgcccggctcagtaagtaagattggtgaagtacagtttgatattaaagagggggaccactttaccaataacctggtggtaaatggtatggggcaggaaatgatcagcaattttttcaagcggagatttgttgcaaccccggacgaccagcggatctataagctgggaaccatcagtaattatgaaaatcaacagcttcagcctgaaaaatttgatattcgcaccatgggggcgccgaatacccaatcacgcgggtcacaggatgaaggtgatggtgcggtggtgttatttgtgcagatgaaagacagtgactcgaaaccggtggaaaaggaaactgactggttattagcggatggttatagttcagcattgatcgtttctaatcgttttttatttgacagaataatcagaagaaaaacagaaaactcgttgggtaattatttagaatttaagccatatcaggaaattagtggaagcaataaatcatggcaattagtagcgaatagtggatatttggagtcatattattataaggtgattaatttttgctcggaagattcttgtcctttaggtgctcatattgttatgtcatgcagttttactctgaatttcggagaaaaagataaggctttagtaccgttatgtatttattctgatgaggaaaaatataatattaagatgaaatatggttttaatacagagggtatgacttatgaatttcagtatattccaagtgataatgaattagatcctgacaaagaagtttcagcgggagtttgtaaattaaaattgaatgtggaaacgtcatatgaaacaaaaattgaaaatgatttaattgtttttcagtgtgataaaggtaatattaaggttgaatcagagtgtagtgggttcaattctgaactgattaccagatttgatggaacagcaaaatacagtgatactattaatgaaggcgttaatgaaagggtagtaaaaataatttcagagtttaagctgaatgacattaatacctttgtattgcgaaatttattgtttcccgatagtaattacttccgctctgaaactgcttttgttcccggcgatctgttgcttcaggggcagttggctcccggctctgaatcatttgctgttacacccactgaaattaccattgttgccggttcggaatatcagtttacaaccccccctgaagtcagcggtgtgaaatggagcctctctgattctgaaaaaggcaataccaacgctgatttagggcatattgatgccaagacagggaaatataccgcaccacaagctaaggcaatcacagaaggtgtgcgccatgtggtggtttgtgctgaaaaaggggacaccaaagtgtatgccctggtctctgttcttgctcatagtgtaaatatttcaccggcgtatcaggttattttgccgggcaaatcctccgcgttaacggcggaatcactgaaccccggggaactgacctggacactggccgataacccgcagggttcagcactgacaaaagtcagcaataacgaatatacctatacagccggtaaaaagaacaagaaattaaaactgaatcttgaacgtatttcagtgacggatggaacgggtacaacgactgaagcaatgattttagtccggaatgtgctgttaaccggatatatccgggcatcatatgacaatatgccggaaaacagtgtacagctcacctatttccctgaccctgaaaatgcggaaacggcaataccggcggatgaagtggaatggacactgctggaatccggtggtgcaacgcttgatcctgaaaccggtattttatcctgcaaacaggcgacagataacggttttgcggttatcagtacaaaatatttcgacgaggatgaaggtgcgctttattgcgcgattgcgatcccgctgccgctgaatacctataaagaaacaatactggctgcctattctccggagcagtcataa

SEQ ID NO: 279168 - DNA, 423 bp, Morganella morganii
atgattgaaaaatataatcaggaagaagttaaaggtcataactttatatcagatccttattttgaagaatggggtaatggtgactgggaaaagggagagccaaataaatacacgaagaaaaaagaagggaacagaacttacctttatatcagtggcaaaggtagtgtttcacagtctgttattttaccgaaaaaaagttcgggggagtcaacagttcctcctttttattcattatcgtttgattactctgttaaaaataaagcatcggtgtcattaattctgacatatatgagcggagaaattaaacgggataaaaagaaatcacattgccggatacgaaagagtggtctcagcatgagttgttacttgatgcctccgctgatgatactgatatcaggcttgagttttacgccggaaaattag

SEQ ID NO: 279169 - DNA, 4596 bp, Morganella morganii
atgactcgtaatgtaaaacaaattctgaatcatctcgcagagaagaagcgggatgcgtatgtggattactttactaattatgtagtaggtaaagatgaaaatacagcaatgctgggaattaccgatgcagatgatctgtatgattattttctgacggatgtgaaaacgagtgctgactttgaaaccagctatgtttcggatgcactggccagtgttcagcaatatattaataacattcttaatcaaaaagagcccggctattcaggcgaatttagtgaagagcttcagcagtggtggtccggttatctcgggcatatttcactgtggaaagcctatcagaaaatggaggattatccggaggattatagtttaccggattatgttactgataaaacagagctgtacactaactttgcatcagaccttggcagtgacagtctgaatgatgcgggtatacaaacggctttccttaaatatttacgcggctatgaagcggttaatgctatcagtgtcatctccggatatgttgactatcccggacaacgaaatgaaaaagatacatttgatgggcatggttttctgaattctgactatttttttatcggtaaaaataactcatcaccagccggtttttactggcgtgaagcaaatataagagcagataaatcctccggatacatttctccgcgtgtgtggcgggaatggcagccattagtcatcactgaggatgcaaaagatattttacaaatgcggattgtcaaagtgagtggttgcctttttattgtgtatctggctggtaaggaagaaaaaattgcgggtgatgaaaaatcagagaaagaagtcagggttgaaaataagaaacaatataaggtctcacttaagttaagccgtatggggttggacgggaaatgggatattcctgaactattatatgaaaaaatctatgatagtaaacccgtgaagaaagatggcgataaaagggatccgttccggttaatatccgttgcattcactcaggatgaacagcgggatgattatctggttattgcatggctggataatcatgataagaataatgatcagaaaaatattattttttccgatattttgaatgtactcagacaaaaatcagttgtcgtgagtacggatattcttggcgcagaatggcagtcaaaattagcattccgattttttaaagaaacaaaagaagaaaaaaaagaagaagaagaaaaagaaaatatctgccagcaccgtatttttggtgttgaaaatgatatcagcagtatccggggagtcggtagtaatccaaatttatcgctggaggcattctatagtctcaagaataactgtcatcaattacgggtcagggggacttgccatcgttcagctaaaatacccgatcttatttcacttcaccttcaggcaacggtcagtgaatggagtaatggccgcattattgtcagcggagatcgtaataatattacagtcagagcagaggcaaccggaggtgcagaatatttagcattattactctttgataaaaaagtgattgagtttaacaagaaggactttgatgaacacaatggctggctttcagcagaaaaaacattcccgctttctcaggaacaatgtgacctgatagcggtaaaaaattataaagaaatacgcagtggcgccggtttttcctatcagataacctccggaggaacggtaaattcactggctcacgttaaaaaccgtgtcagcactgtgatgcagcctgttgttgttcctgctgagttatcaattttgaatgacaaccttggcggtttggataaagaagactgggaaggtgaactaatttatcagaaaaacagtcacacaccgtggtgtactttcagctgggaaaaaagcacagaagaaatcgatgatatccgctttaaattcggactgacagatgaaggtgatcaaggtgaatttatcattgaaatcagtaaattaaaagtaaaaatacctggtattaccacgtctgaagagcatcagcagtttttgattttcaatcaggctgatgcagaactgaaaaaagtacgtcttaattctgttcaggttcgtgatcttatctatcgtgcgcaaatcgcagtcagtcatatttttgactgggaggcacaaattacggaagagccgggagacactgataataaaaaagagaagctcgatttacacggggctaacagccggtatctgtgggaattatttttttatttaccttatctggtggcaagtcgtttttcacaaaaccgcctttattatcaggctcgtcagtggctgcattatattttttcaccttatgacggacaccgtttatctgcaaaagatgacagtgaatcgttgcctccgccttattggaactgccgtgtattaacacaggaagattcagaatataaaagtaatgactatgcattacctgatccttacgcaatatccgaagatgtgccttctcattatcgtaaggctgtgtatttaatgtatatcgataccctgatttccgaagcagatttaaattaccgtcagctcagccgtgacagtattacccgtgcctggggattttatcatcaggctcagggaatgctgggctatataccaaaggagcgcagtttaccgaaatggcagccatgcactgttagtgaactgcttaatgataaaacctattctgtacaggaaaataccagacctgaattattttcagaaatatatccggaaaatatgccaaaacagcttaggggatttttctggtacggaagtctgggcaatgaacggttccgtttgccggttcagacaagtttactgagcaggcagtcactcctggagcaacgcttatttaatttacgtcattatctggatattgaagggaatataatgaacctgccgttatatgcggctgcgtttgatccgttcgacctgctgcgttcccggctgggcggaacgtctgaactggcatattcacagtccgggtcattaagtattccgtcatattgtttccgaaccatgctggaaaaagcaaaagagcaggcggcggcactgattactttaggggataaacggctcagttattatgagcaaaaagaacgctatcacactgaaaatatacaattaaatgatgcggtcgcgcttgcggatgccagtgctgcgattcagtcatcgctgcgtgaccagcaaaaatctgctctgctctctctgaatgaagccaggacgatggctgagagcaaaaagacatattacggaagcctgagtacgagtacaaaagaatgtcgggccagaaatttattagtgagttcatccgtgtttcatggggttatttcaggtgctgctgttgcggcaggtattgtggctgctgttccgcgaatattcggtgtggcgcaggataccggcgaccatggtaaaacagcactgctctctggtgtggggggggctgctgcattaggtgcggaacttatgcgcggtactgcggagtatgttcagatagatgaacaataccgtcgccgccaggaagagtgggcatttttggcgtctcaggcagaaagtgaaataaaggtactggataaacaaattgatgctcagaacgtggctattaccgcagcagaaaacagtgttaaatatacaaagcttcttcagacgcaggctaataatttgtatgactatttcagtcagacccgtcaggttaatgaaagtttgtacgaaaaaatggccaatattattggcttattgcatgaccagttgtgttcactggtcagaacattttgtgcattaacagaagcatcctggcgttatgaaacggatgattataaacggaagacatttattccggccgatctgtggagtggcgataatttaggtattctggtcggcgttaaattacagaaagcgttgctggaaatggaaatggcgtatacacagcaaaatacacgccgcctgaatatcacaaaaacgatttcactgaaatcacttgtcagtaatcatctggttaaaacagatgaaacagcgctgacaacatgggatgaagtaaaagaagcattaaaaggagcaaaaaaactgtccttcgggttatctcatcaattttttgatacagattttcccggacattatgcccgaaaaattcactctttatccgtgacatttccgacattattaccgccatatcagaatatgcgggttcttctggagcagacatcgaatacgttattagtttcaccggatattgatgcggttaaatccctctatacaccagcagaggaaataaatagtgagtcaattatccgtaatctgcggattaatcagaaaattatactttcccgtggcagtgatgatagcggagagtttcaggaagatgcctctacaggcgggcaataccatagttttgagcattcaggcgctatttcgcactggcggatgtccgttccccgcccgcagaataacccggaacttattgataatcttaatgacattatcattaaacttaattatacggcgaaaagcggtaatgacgcctttgaaacagcagtaaatgatctgctggaaagtactgaatcagtaaaatcaggatgtgacgagaatgattga

SEQ ID NO: 279170 - DNA, 285 bp, Morganella morganii
atgctccgtattgaagttattttcagcagcaaccaaaaagagatgatgccgcctggcacatttgaggcgttggaaaaggaaatagaccgaaagctacgggctcagtatcaggatatgaacgttcgtattgcgtggggaaccaatgcggcgatgtcagtaaccggcgggaaaaatgataaggacaataaaaaaataaaagagatactgcaggagatttttgaggatggcagctgggtgccggaaacggcagacgcttctgatgatgtagaatattttgataagtaa

SEQ ID NO: 279171 - DNA, 174 bp, Morganella morganii
atgtcaacaacactcacactgcgggcagtcacaccggatgagatcgccgcactcagcaatgccggatattccgcgtaccgctatcatttttctgcttcccgggattcagaaacagaactgaatgcttacccggacaatgaatatcatccgcaggttacggaaaaaccactgtaa

SEQ ID NO: 279172 - DNA, 705 bp, Morganella morganii
atgtcagcgaaaaaacaaaacttaccccgggctccggatgatattaaccagttattatctcctgaaccactgcggatggaaatgggtctggaacgcagcgaagaagggctgctgacagtatctgtcagaaccgacctgcacggttgtaaagggcggatgctggagtggtggttcacgttttttgaaaccacgcagcatatccgctggtggcacccacatgatcatgtggcacatcacggctgggattcggtctggaaaaaaggggagagttatatcggggcgacaatccgtgcggttgagtctctcgggccgatcccgccggtcggcgcgacactgaaattcaacgatgcacaggatttctttgatgcggataaactggccgccgcgcggcagacgcatcagatttccggtgctgtttgcgcccatatcgggttcggggataatgtgaaaaccgatacgctgggttacccgatcgacggaaaaatgctgcatataacctatgatacagagttcggatgtgtgctgcgcagccggtttttactcggagcgtcactggcggatccgctgacggaactgccggatgagattggtttcgggctgatgaagcactgctataacgagtttacttacttgtcccgttttctgccgtcgctctattacggcgagcacggtaatgatgaaaaagcgccgctgccgtgggcataa

SEQ ID NO: 279173 - DNA, 339 bp, Morganella morganii
gtgatcggcggactgctgttcggcttcggtattgtgctggcgggtggttgtgaaaccggctggatgtaccgtgccgtggaaggtcaggtgcatttctggtgggtcggtctgggcaatattatcggcgcgacgatcctggcttattactgggattccgtggcaccgtggctggcgactgactacgacaaagtcaacctgctggataccttcggcccggctggtggtctgctggttacttacggattacttgcctttgcctttatcctgttactgatgtgggagaaacgcttcttccgccggaaaaaccaggctgacactgtcgccgctgccgcacattaa

SEQ ID NO: 279174 - DNA, 159 bp, Morganella morganii
atgccacggcaccctttaactctgatcatcatcgctatcattctgctgactaccgctctgttggcgggttgttatctgtattcactcccgaatcactgtaaaccactgccgaacaatccgctggacggtgtgatccactataagtgtgaaacgccatga

SEQ ID NO: 279175 - DNA, 477 bp, Morganella morganii
gtgaataaccgattatataaaaaggtcattgccgcctgtactgccggtgcgatagccggtgcgctggtgctgatccccgcatacgagggcgtggagtacaaaccttatcgtgatgtggccggagtgctcaccgtatgttacggccataccggcagtgatattcagcccggcaagctgtacacggacgctgaatgtaaggcgctgctgcatgacgacctgacgaaagtccggcgcgcggttgacccgatgatcaaagtaccgattgacgacaatacccgggctgccatctattcatttgtctataacgtcggccctggtgcgttttcacgttctacgatgctgcggaaactcaatgccggagatattgccggtgcctgtgacgagatgaagcgctggacatttgccgggggtaagcagtggcagggtctgattaaccggcgcgacacggagaatgcggtatgccacggcaccctttaa

SEQ ID NO: 279176 - DNA, 498 bp, Morganella morganii
atggcaacgctgaaagagagacacgaaatgatcattcgcgcacttaacaatccggacagacctatgtcagctataagtggggataagctgcaattccttggggatactattggttgggatcagctggccagtgatactaaatatttaattgccgcgggtttagttgaccgtgacgccatccgttttggcatcgacggcggttacgtgtttatgaccgattcaatggcgctaactgcaaaaggttttgattacgccaacattgataccgtcggaagtgaagtaaacgcggttaccataaaaattcataagaatacgctcgagcaaattgaggccattattaacgctaccaatttgccggactcagaaaagaaaacgcttatgcagttattgaaggagaaaggcgcggaaagcgtagtaggtaaatgcgtggatatccttttctccaacgcaggggccgctactcacgttctctccgaacttgctaaaagtgttttttaa

SEQ ID NO: 279177 - DNA, 501 bp, Morganella morganii
atgcgaatagatagagaactacaaaattcggtattaaccgtactatccgaaaattaccccaattttacggatagagcgctatggcaccaactacaggagttagctggtaatgacgatgatactttggtggcaaatcttttatatcttgagagtcatggtttagttatcagtggtattaaatctggtatgactgattatgctatcagtatcaacgaattaaaaataactcacaggggcctggactttttgcttaatgatggcggattatctgcgatactgaatgtcgttacagtgaaatttcatgacgatacgattaaacaaattgcagactttattgaccagaacgttgagaatcctgaagataagcagaaatttttgaatcagctaaaacagcttcctgccgatgccacaaaacacattgtacttcagcttgtgagtaaagggttggggcagatcccgaatgcagttcagtggcttcaaacagtgctccatcttggataa

SEQ ID NO: 279178 - DNA, 597 bp, Morganella morganii
gtgaaattcgatacccgtgaaggatggcttcatgctgcgacacaagagatggcgtcaacatttaaggaacttggcgcgccactaccgccaaaaatccgaatcgctataggttttccatcggcgggtttgcgcggtcgcgctatcggcgagtgctgggataaaaattgctccgaagatggacactttgaaattttcatccggccagactacagcaaccatgaaaatttcactatacaagtactggcaacactggcgcatgaactgatccatgctgcgctggggatcgaggaaggccacggccccaatttcagacgagtatataaagccattggcttaatgggccgagcaaccgccacatatgcaggaccggatttcattaactggatgaatcgcataattcccaaaatcggagaaatcccccacggaataatacaatcagaacgtggcgtgtccacgcgcaagaaacagcagaggaatcgctatcataaatgcacttgccccgaatgcggctacaccgtgcgcactgctaaaaagtggatcgaaatggggctaccttgctgccctttccatggtgagatgctaaccgaaacagagtaa

SEQ ID NO: 279179 - DNA, 864 bp, Morganella morganii
atgattaacgtcgtcagcttttcaggtggcagaacctctgctcacctcgcgcaccttatgcgccagcgcgaccccgatacgcgcttcatcttcatggacaccggtgcagaacacccagcgacttaccaattcatacgtgatgcagtaaaaaactggaatattgacttggtatgcctgcgtgtcgttgtcaatcctgaattgggaaaagcaaaccggtaccgcattcttgaccttgatgaaatcggccccgatctaaccccttgggtcgaaatgctaaaaaaatacggtactccatatataggaggcgaattttgtaccgaccgcatgaagctgggaccgttcaaaaaatattgtgatgaacaccttggcaggaaagcttatcacacctggattggtatccgaaccgacgaaccgaaacgccttattccgaaaccgcgtacaagttatctggctgatatatcaaatatcgataaacagggagtgatcgattggtggtcaaaacagcctttcgaccttcagatccccgaacatttaggcaattgtgttttctgcataaaaaagtctattcataaaattgcattggccgcaaaagatgagccgcagttagccaggcagtttaatgatattttgacagctgattatgtacgaaaaatgccaaacagatgtggtacagacctggttatgtatcgtggaaagaatacttttgaaggggtaatagccatgttttccggcgatacgagagaatcattagcctcccggatgccgtcacaaaaaccacaaagggccagccggaaagcggtcttccccctatctgatgttataaaacccgcttggtggtacgaggaaggatatgacctcatctaa

SEQ ID NO: 279180 - DNA, 276 bp, Morganella morganii
atgttaaaagtgattgctgaagattttatgcagccggatgccgttgagatcctgatgccgatgtatgaagaactggttgccgccacccgccgtgagccgctgtgtatcagttatgatctgtttgtcgatcagaaagacccggggcattttgtttttatcgaaacctggccggatcaggccggacggggaaaagcggagaaatttctcataactgctgccgcccggtacaaaggtggtcagctgttcatcaaacggaatattcagggctttcagtaa

SEQ ID NO: 279181 - DNA, 255 bp, Morganella morganii
atgggattaaaggtatatgtaaagtggtttgataaaaaaacagaagattttattaatgatgaatattcgaaagatcttggagatgacgacactgtgattactcagacagtaaatccaaaagaaaatatcatcaatgcaggtagttttgatgtcattcctgcatgggttccctaccttcagaagtatattactaataagattgatctgggtaaatacgattatcaggtatcattcgattatcgggataagtggtaa

SEQ ID NO: 279182 - DNA, 225 bp, Morganella morganii
atgcacaacatcgccaacctgcctcaagacgaaaaagacaaaattaatgccgatttggccgcatccggtatcgcgtacaaagaaagactcggactgccgtatgatctgtacgaaacagaaaaccagcagcccgagcacttacgcccgtactttaaagagagactggagcactacatagagatcgggaaaaggtttccgcgcgggtttgagtatgagaaggaatag

SEQ ID NO: 279183 - DNA, 1140 bp, Morganella morganii
gtgtcaaaaaaaataacattaatagttgcgtcattagcactagccatatctttattatcgccatcttcattgtttggcgcaaaaataaattatgaccgtgatttatcaaaaattaaggaatttattacgagtgggtcaatagaaagacatatgcatcaatctggcaataggtttggcgtaagtgaagaaatgattgagccgctcaattccggtatgacattgccaacagacttcttattcgatggtaaagggtgggaaattgtaacatcaacaggaattttcaatataaataataataaaaacaaaattgaaaaactcaatgtaaatggcgttggcctgactgacattgtaggcgttgataaaaaagcatgggttaatagtaattcaatatcaataaacaacacggcaatcgcatcgaaaagccataaattcacccctatattaccatctggagcagttcaggcgtttgagattattggcgataacaaaaagtcaatattaatttcacttaatggcatcccgagcgtgctgtcactctctgaatataaattagaaaaagaatatcctcagttaactggctatgaagtccagcacttatcaagtaaaaataactcatcatttttaatagctatgatgaatgggcagtggtcattattcaaggataatgggtcaacactatcacacgaagctcatcttaatacatatgctaatggactttatgctgtagatgaaagtcaggcaatcataggtaatcgcagtgaattatcactactcagaaatggagaaattcacaaattaatttctgggtttacgcacgtaatgagaataaagaaagtaaatagtgatatctgtattcttgactctgatgacccattattaatctgtttcaatgaaaatgaactattagatttaggtaataaaaatccagaatttaaagttattgccggaaaccttttttcttactcatctatcgttggcgtgtctacggatagcacatcagatagcatatttgtagccactcgaccagggagattgtgggagaaaaacataatcaccggcaaacaagaggtggttgctgggaatggaggcaacgcactgagagatcccctcataatttccccaaagcgtaaccatgtgtga

SEQ ID NO: 279184 - DNA, 183 bp, Morganella morganii
atgaactgcgcaatatgcggcgaaggactggccgacgatgaagtttatgtttgcgaccagtgcgccggtgaatgtccgcatctggaagtagtcgagaagataaaaggagatggtgagagtggcaaagcaaccgcggcgaaaatgcctgatatgccgcgactggtttcacccgaaattcagtaa

SEQ ID NO: 279185 - DNA, 453 bp, Morganella morganii
atgttctttaaaaacgatgatagcaagctgtgtattggctgtcagaacggtgacgctgataaagcgtcagccttctcagaaggtttcgggattgaagcaacacatggttgtaccaatcgccaaagccgactgtttggaggaaatatggcaataatcatagtgaaaaaatcacgcaagcctgaatttttacgtggcaactcagcaaacaggcgtcacgccaggagaaaggctgaagcgattgccaccaaaaatgtaaaaatgaagttggaggaaatattcagaactgaaccggacaaaagcccaatgagccgagtagaaaaagccacatccgcatgcagcaccccagtttatgattcaccggacaactgctgcttaaacacaactgccctgtattcaactaagcgatataagtcaaaaccaaaaacagaatttggtatcacggccagagcatag

SEQ ID NO: 279186 - DNA, 396 bp, Morganella morganii
atggcaattaacgtaattacagtcagcggcaatctcggaaaggattgtgagcaacgatggactccggcagggaaagccgttgcatcgttcagcctaccggtgaaacagggatatggcgagcacgaaaagacatcgtgggttacctgtaaaatgttcggcgcgaaagctgagaaattgccagaacacctgaaaaaaggaatgaagctgacggttactggcgagttcatcatggaggaatggacaggtcaggatggcaataaacgatcagcgccggtgattatcgtgaaccagttggatttcagcaacaatcaggcaggaagccagaagccgcagacgcagcaagctccagcacggaatgagccaccgatggattttgactatgatgttccgttttag

SEQ ID NO: 279187 - DNA, 219 bp, Morganella morganii
atgattttcgtcgctggcaggttctggtttttttctggtgatgccgatttcagtctctgcttccagaagctcagcatccagtgtgacggggatactgtagtgctccccggccagaggaacaaaaccatttttatctgccaggttatcaaacgattcaccatagcctatactaaaatgcgtcgcgtcttttatggtttcctttacactaaaattaactaa

SEQ ID NO: 279188 - DNA, 300 bp, Morganella morganii
atggaaaatcaccggacgcaccatatccccataaggattcaccgcacaggtaatttctttccagtcactccaggcattggcggcaaaacggccattctgacatttactgtgatcggctttgcgccagtaatattttttcggctcagtctggctggtaccgataaaccagctgttaccctgattaatattaaccgtatcatgataaccgctgaccactttcaggtcagcgacctgctcaaaggcggtcaggtactggcggaagccgttttccagggtatctttgttgagctcactttgtga

SEQ ID NO: 279189 - DNA, 876 bp, Morganella morganii
gtgatacccgatacacaccttgccgctgcgctgatagcggaacaattcccgcagtgggcacatctgccggtgacaccggtcgcgaccagcggctgggataaccggacatttcacctgggtgaagagatgctgatccgtctgccgtcttcaccggattatgccggtcaggtactgaaagaacagcagtggctgccgcacctggcagcaggactgagcgttcagatccccgccccgctcggtacgggtcagccatcttcccgctttccgctgccgtggtctgtgtaccgctggatcccgggagaaacggttgcggcacacccgccggcagataaaacggtttttgcccgtgatctcgcggattttctgacagagtttcagcgtatcgatgccgccggtggcccggcagccggtacacagaattttcaccggggcgataacttagctgtttatgacagcgaaacccgtcaggcgctggcaaacctgaaagaacgaacctgtgtcccgctgtttctgcggatatgggaaaacgccctgcactcccggcgaatagctgagccggtctgggttcacggtgatatcagtgcaggcaatttactcaccacggacggccgtctgaccgctgtgattgacttcgggcaactcggtaccggagatccggcctgtgatctggtaatcgcctggaccttctttgacagggaaagccgtgacgttttctttgaacgactgcggtgtgacgccggaacccgcgcaagggcaatgggctgggctctgtggaaggctctgattgtcagtgcagccccgcagaataccaatgtgacggaggccggacaagccgcccggacactggaacagattattgcggatgcagagccgtaa

SEQ ID NO: 279190 - DNA, 780 bp, Morganella morganii
atgaaacttgaaagcgcattaaaacaatttcacccgaagtcaccgacattcagtgacagctcaaactccacggccctcgacagactgaaaggcatggattcggcagcggcaatgggcatggcgtcacagcgggccgcgtttggtatgcatgcgttctttggtaagaatgacgtcagcattgaggacaaattcaggactgttgaagcactgacgcagtatgctctgcgcacggtaccaaagctggtggccaaagcggccggcaatcgcgttgctcagtgtatgaagattttggccgcaatggcatttgaggattacgcccgttcagcgggttctgtttgccagtgtcaggactgcggcggaaaagggctgatttatcgccggaaagaggtggtgaagcatccgggtatcaccaatatggaaggtactgtgattgttgagccggtagtccgtaatgagcgtgttggtgaactgtgcacgacctgcaacgggaaggggcagttaacccaccggtgccgctgcaaaggccgggggaaggtgtacgacgaagagcagagcgaattacagggtgcgccggtattcaaagactgcccgaaatgctcggggcgcgggtataagcgtgtgccgtcgtcagtggcttatcaggcgataaagcatctggtaccggagttaacacagccaacctggtcacggaattggaagccattttatgagagcctggcaggaaagtgctacacagaggaaagcgaggctgaggcatttttcggtaaaatcacacggtaa

SEQ ID NO: 279191 - DNA, 987 bp, Morganella morganii
gtgaatacagccgaagcagcaaaggggcagtggggaaagattttcgcgtactacgggctgccgccgatcaccgggaaacggcaccataaaggaaaatgcccgatatgcgagaaaaagggcaaattccgcatagacgatcaggacggccggggaacgtacatctgcacctgcagttccggcacaggatttcagttactggaaaaaacacagggtaagagctttaagcagctggcggatgagattgatcagctactcggaaataaccgggagaaagaggttccgaaaccggcggtaagcaatacccgttcagatcgcgaacgatttatcagttgctatgctcagatgccggatctgaaagacacctcagcggcgggatacctgcaaaaccggggcatatttacgttaccggcagaacatatccggttttgtgagagacagccaacccgtaaaggcatggcggttattaattatcaggccatgtgggcgctggccacggactcaaaaggtcagctgtgttatctgcaccgcacgtatctggacggtgaccggaaggccgatatcaacgtggtaaagcgcatgacaaggctgcaggaagataactatctggattatgccgaatcagtggcgatccgcatgtttccggtcgcatccacgctgggagtggcagaaggaatagagacagcactgtcctgtaaacaggtttacggggtaaatacctgggcaacgattaatgccggatttatggataaattcactgcaccgaaaggcgtgacccacctgattgtttttgctgatgcagactggggcagcgcaaccggacacgctgctgcatttgcctgcgccaaacgtaaccttgtggcaaacaatgacgtggagaaggttagcgtccgctggccggacaaaggtgattttaatgatctgatccgcgacggaagtgaagttcgtgaactgacattttaccgggaaaagcaccaggaggccgcgtaa

SEQ ID NO: 279192 - DNA, 1578 bp, Morganella morganii
atgttaactatcacaccaaattttgcacaggaaagagcactgcggttattgcgcagcgagtggaaatcacaccgcacgttcatgatcagcagtccgaccggcagcggtaaaacagcgctggctgcattcatcacgcacggttgcaacagccgtgatatgcgggtgatgtttgttgtgccgtatacgatcctgattgaacagaccgcagcacggtttatcgattacgggattccgatggaagatatcggttttgtctggcgtgaccatccgaactacgacccgactcggctgatccagatcgcatcggccgatacgctgatccgccgtgaattcccggataacatcgacctgctgtttatcgatgaggctcatctgcgccgtaaaaagctgctggaagttatccgcgataatgaatttaaggtgattggcctgtccggtacgccattctccccgtttctggggacgtattacgaaagactgatcaaacccaccacgatgaaagaactgatcgagcgcggggatctgagttcgtatgagttttacgccccgacaaagccggatctttctgcggttaaatcaaccagcagcgcagagtatggcagcgattacaaagaggctgagatagcggcaatcatgtcgggcgcggatctggtcggtgatgtgatcgataactggctggccaacggtcagaacctgccgaccatctgtttttgtgtgaccgtcagccatgcaaattttgtcacggtagcgtttaaccgggcgggtgtgaatgcagagatcatcaccgcagatacaccgcatgaagagcgccagcttatcatccaccgctttgaacagggcggaacaaaaatcatcgtgaacgtcggcacactggttgccgggtttgacagtgatgtccggtgcattatttacgcccgtccgacgaaatcggaaattcgctgggtgcagtgtctcggtcggggtctgcgtaaagcacaaggcaaagataaatgccttattttcgatcactccggatccgtacaccgcctggggtttcctgatgatatcgaatatgacgaattgccgggtaaaagtgacggtctggaggagtcatcttctgtccgtgaccaggaaaagcgggagaaaaagccgaaggaatgcacatcctgtcactacatgaagcctgccggtgtttacgtctgcccgaaatgcggctttaaaccgctggccggtgaagacgttgatgttgatacctcccggaacatcaaaaaaatgggtaaatccgaaaaggtttacaccaaaaaagacaaacagagtttttactcccagctcaaatattaccagaacatccgcgccaccgaaggaaagccggtcagtgacgggtgggtctccaataccttcagagataagttcggtgaatggccgcgcagcctgcacgccacaccgcaggaaataaccccggaggtatccaatttcatcacacacaaacgtattcagtgggttaagcgcaaacagaaaactgaagcactgatgccgcagagaatcgcagatttaaaacagcaactgaataaaaacgcacagcagggagaattattgtga

SEQ ID NO: 279193 - DNA, 228 bp, Morganella morganii
atgaaaaaaattactttatctgaatttgtttctgaggttggacagcaaaaagcagctgatgctttcggaatcagacagagcgctataagcaaggctatagaaaaaaatagaaatatttttgttattcaatcggatggggtggttttaagtgcggaggaaattaagccgtttccacgtaagtccttaggtaacttgaatgcatccgaaccaaaacacactgatgcctga

SEQ ID NO: 279194 - DNA, 711 bp, Morganella morganii
atgaaaaagaaacctctcactgatgaacagatagccgacgccatccggttaaaggcgatttttgatgccaaaaaaaaggggcttgggttatcccaagagtctcttggtgatgccattggaatggggcaaagtgcagtagcccagctgctaaatggcgttaatgctcttaacgcagagaatgctgccaaattggctgttgctcttgatgtctcggttgatgattttagtccgtcactttctaaagaaataagaacgatgtttaacgcggtgtcctcacaaaaatcggcacctattgtggatacatatcagtatccacttttcacaaaagtgcaggctggcgctttcacggaaaatggaaattcatacacggaaaaggatgccattgactgggtaccaacagccaaaaaagccagcagtaaagccttttggcttgaggttgaggggcattcaatgactgcgccacaggggggtcgccctagtttcccggaaggcatgttgatattagttgaccctgaagaggatgttgagttcggtgatttctgtgtggctcgcatgctaaacgacgaattcacgtttaagcgactgatcagggatggcggcattgaatatttagagccgctgaacccgcgctatgacctaataactatcaatggcaactgccagatagtggggaaagtagttaagtcacagtggcctgacgacacgttttag

SEQ ID NO: 279195 - DNA, 1017 bp, Morganella morganii
atgagtgaattaaactgtgataataccgatgtttatgtctacataggcgacataactagaacaggttatgataacctgtctgcacaaatagaaaacagagtaaaagaagataagatatctgaaaacgtaattttttgtatatctacttatggtggagacccgaacgcaggctatcgaatggggcgggcgttgcagcattattacgctggaaatgtttccgttcttgtgccaagcttatgcaaaagcgctggtacacttgctgtaatatcagcaaacaatttaattattggtgatcgcggcgaactggggcctttagatatacaactgagaaaggccgatgaaatgggggagtcaagttcaagcttagatatattcaaagctgtcgatcaactcgaatcaagaactttatccgcctttagacaatatttaacagatattaagtatggaagtggcattagcacaaggctatcagctgacatagcatcacagctagtaagcaacttatttcagccagtagccagccaaatagacccgcacaaaataggtgagcatcaaagagcgatgggtatcgccttatcctatggcgaaaggctaaccaaaaaatctaagaacctgaagggtgatgccttaaacaagctgatagttggttacccatctcatggatttgtaatcgacagaagcgaagctaaggaactttttagtaaagtaaattgtcctagtgggctatctgctactgtatacgaaattgttagtggctgggttacacagaacccagccatcattgggaatcaaccattagttattgattttgaagaaattttaaagaataaaatttccgaggaatctaacaaagagattaaagaaaatgacaatagagataatggaactgagccggaacctgtcgagggcgaaccagtcggaactgaatctagtgaagctggtgagcaaccagaacaaagagatgaatcgggaactaaaaaaagcagaacaacaagaagcaaaagtaaagcttcataa

SEQ ID NO: 279196 - DNA, 204 bp, Morganella morganii
atgccgaatatacattgtatgtcaaatggtgatacaccgaaacctgacacctatacagcggttaatatgatatttacgtatatcttcgtaaaccgcgacaactggaataagcgccgacatattgaagccaaaaacgatatcagcgcacaaaatatcgttggttctgactatatctttgcggctcgtttccgctgggcggtgtga

SEQ ID NO: 279197 - DNA, 189 bp, Morganella morganii
atggcgcatgaaattaaattggagacggcggccaataaagcagctcaattaaacgccttattgttcacgattagcggggaattcacaggtaacccgataaccgacaacctcattgaactggctcatgagttatctgacagcgtcgcctgctggttgattgaagaaaacgcacatagaaaggagtcgtga

SEQ ID NO: 279198 - DNA, 174 bp, Morganella morganii
atgtcacagaaagcaattcccgaccgtgcgcagctcatagatgtattaaccagagttaaggcatttacaacgactgcgcaatacctgacccgcgataaagaagaacgccggttatcactggaattactttgccaggcagaggccgaaattgatgaggtgcttgaaaatgaataa

SEQ ID NO: 279199 - DNA, 150 bp, Morganella morganii
atgaggtgcttgaaaatgaataatacacaattaaaagaagcagcctgcgatgatttaacttatgcaaaatcaaccttatcattaattattaataatgatgtgccatttgatacacatgcatttaatacggtcgagggtgtggttgaataa

SEQ ID NO: 279200 - DNA, 498 bp, Morganella morganii
atggatattcaaaatatcatttctcgcttggatttctctggacttaatgcgatagaaattcaaaaagcaatgaataacatggaattcactgctgattctatattatcaggcatttcctcattaggtaatatcatgttttgggtttcggctaatgatgattattctgattttcgtgaagatagtgccaatatcggtctgatgataaagcaaataaccttgattgccagaacactgactgagcaggttaatgatcttgattgcaaaacccgtttagcccccccccagcgcaatcaaaagcctgataaacagagaaatgaaattattggtgttattagcgatatcaacaacactgaattatcaatacagcaacttaaaagtgatttatacgaaaacgaaccagagaaagaaataatattcgcacagcttgatttagtgacatctaagttaagtggttcattagaccaactggaaataataacaggaaacaatcatgactaa

SEQ ID NO: 279201 - DNA, 420 bp, Morganella morganii
atgactaataaatttgaagcaatcgaaaatgcatcaaagggtgaaatcactatcgagatgcgccctgtgtatgttgtatcaggtgccaatcatgcttacctcagccagggcggcgcgctgaataagttggcctacattatcgctgaaaagcagttccgcgccgaaggtaagccaactaattacccggacgaagaaacagcgcttgaagacggcacaccggctcacaaaacaggagaaataacacctgaataccttgaacggaagaacgaagtgttaaacgaattaaaagcggcactgcgccgtgaaaacgaaattatgaaattaaaagctgagcataagaaagctattaaaaaagcaactgacgcacaagaagctttatcaattgcatcatggaaattaaagtcagccattaataaataa

SEQ ID NO: 279202 - DNA, 207 bp, Morganella morganii
atgagccagtttaatgaactgatgatatccggcagcagattagaaaagcggaagttatatcgccgtgcagcagagcaatataacaaagcatttcatttagccgcgcccggtaatggtgccgtattaagtaagcaggaaaaaacaagtaaacaggcaatggaacgctgcctgattaaatcaaaaattaaaatcgtagagggtttgtga

SEQ ID NO: 279203 - DNA, 480 bp, Morganella morganii
atgaaaaataaggaaatgaatattgacgaaatgattgagtttctgaaagacaaaaatgttcctgagtttctgttaaataaaaatgaaattgaggccaacatgcctatgacgcaggaggaaatcactgagtttgctgaatatattgtcggtaataaaagaaacattgttgccaacagatatttaacttcgtgcatggaacgattcggccctgggataaatgaaacctttgcattccgctataaagatatcgtcatggatctgagtgaaagggttattgaacggattctcattaatgagatcgagcgggtgattttggatgaatcagaagatgatgtttttgcactatggcggctctataccgggaatgaattaaaggaaaaagaagaagggagtacgtggatgcgtgactttatcgactctgtgctcatcgacgtagccaaccggctgaccgctgccagcgcaaaccagaccattcattaa

SEQ ID NO: 279204 - DNA, 795 bp, Morganella morganii
atgaaaaataaattaaccacgattgatgcaaccaccctgccggtcattgaatggaaaggtgtccgtgttgtaacaaccgaaacactggctgccgggtatggagccacatcacagcaaataacaaacaacttcaatcgcaataaaaaccggtttgaggaaggtaagcattactttcgtgcggaaggtgatgatattgaaattttgcgcaactcattaagaggtgtgcaaatttccagtaaagcacggtccctgtatctctggacagaacgtggtgccgcccgtcatgccaagatgctggagacagacgaagcctggtcgttctttgagaaaatggaagatgcttatttccgtcaggttcaagccgttccggctgaccctactgcaatgggattaccaaactttttagatcctgtttcgtccgccctcgcctgggcagaagccaaaaaggaaagcactcagctttctgttgagctgaaagaagtcaaacgcaccaaatcacagatcagccgcaaacgtgaagcttccgcgctgggaaaattaagtgccgccacccgtaaaaatcgtgagttagccgaacggctgggcgaaagtacaaaacaggcaactcttactgccgtgcagaatttgacgggcagggaatacagcccgtggccaatgcgtaagtggtgtaaagaacggggtattgttccggacattgcccccgacctgcgatgggggcaagtaaagatatggcctgctgaggcatggcttgaagtacacggtgtggatctgaaaaaactctttggtgtgaagtga

SEQ ID NO: 279205 - DNA, 414 bp, Morganella morganii
atggaaacgacaaaatacgcagtaacttacctgggcgattatccgtgtggacaccgtcatccgctgactatcacagtgacggctcaggatgcagattcggctattgaaaaagcgcaggaggcccttgaggacgagcggatcacctcaaccaataacatgcttcatgcagtggttccggtcgggttcagtaccagcatgatggctgaagtcgatatgtgcccgcctcgcagtgagattgagctacaaccctgccctttctgcggtaatgacgacatcgaactgaatagtaccgactgggatggtgaatacctgtataccgtccgctgtgactgctgcggctccagtcagccagaagactatctggaaacagccgtgcgcgtatggaatcagcgtgaaataggagaaaaagcatga

SEQ ID NO: 279206 - DNA, 222 bp, Morganella morganii
atgaaaatcgaatttatctcaaacagcaacatagccaaggtggtgatccattccttcatcaccgaacaccggaaactgaaccgcctggttgacgcggccctgctccgtactccggttcagcaatcaactaccggcctgttattccgcatgacgactatctacggcaagcagaaccatatccgccgggcacataagattatctgccgggaggtgtcacgatga

SEQ ID NO: 279207 - DNA, 318 bp, Morganella morganii
atgcaaacaactgatctgcacctggtgcaaattatcacggccgccggtcatgacccgtctgatattacagatgctgtctgggctgccggttaccggaaaacagactttaccactgagcaggttatcgaaatggcggttaatcagaccgccgatacggtgctgaacggcttccctgttgagacactacctaaaacgctggatgacctcagtcagtaccatctgaatgggattatctttgaagcaaagtgggaaggtacgcctgcagcagtggcaaatgcggtattggtgaacgggtataaaaaggagtgtgaaaaatga

SEQ ID NO: 279208 - DNA, 207 bp, Morganella morganii
atgagcgatatcagcaaacaggaatcaccgtggtttaaaaccagcgacctggcagatcggtatgatgtgaaacctcacactatcagggtttgggcaggcaacggaaaacaaaaacgcgaaggtttcccgaagccaaaatttaaatcaaaagaattaatttttctcaagcaggatatttttgactgggagaatggtaagcgattttag

SEQ ID NO: 279209 - DNA, 1224 bp, Morganella morganii
atggcattaacagattcatggctccgttcagtatcaggtaaaactgcggaaaaaatagtaacaaaagcagaccgggatgggttatcagtcagggtaaccccaaagggaaaggttatatttcagtttcgttaccgctgggatggaaaagccgaaagaattgatgtagggacataccctgctaccagcctgaaagatgccagggaggcagctctgttttatcgcggtgaacttgagcaattgcgaaacccgcgtgtcgtaaagcagaataaaatacagcaggcagttacggcgaaaactgttgagggagtaattcgtttatggtgggaaaaatccatggacggtgtgaaggttaacgccaaacagatcctccgctcctttgagattcatgtatttccaaaaatagggcagtatccgcatgatgaaactgatctgcatatgtggctttcattgattgaagcactggccgaacggtatccggcagtggctgataaagtattacaaaatacgaaactggcccatgcatgggggatcaggcgcgggatcattaataatagtccgttggcgaatgtatcatctgccgatcttggtattgttgagaatcagggggaaagggttctgtctgatgacgaaataaggctgttattttcattgatagatgagccgagctacaacctcagaaaccgctgtattattaaattgtgtctactttacgggaacaggattggtgagttgatgaaggccaaagttaagcattttgatttcaccgaacgggtctggactgttccaccagaaaaccataaaaccggacgcaaaagtaaaaagccaattttaaggccgataattgatccggctgatgtgttgctgcgtgaactgatagccattaacaatggtagtgaatatcttttgccatctcctaacggtggaaaattaacacagggtgggcacctttatattcccgtattgcttaataaaaaaatggccccccattttgatgaatacactacatggtctatacacgatctgagaaaaactatgcggacccgcatgtcagaaataactgcgccacatgttgcagaaattatgatcggccataaattaccgggggtatggcaggtgtacgataagtacacctacctgaatgagcaaagaaaagggtatgaggagtggtgggataaactgactaaaatcgcttaccattctcccagtcaaaaatatcctgcttga

SEQ ID NO: 279210 - DNA, 834 bp, Morganella morganii
atgaagacaattaaattaaccattttactattttctctggcaccattaccactggcaatggctgccgagactaatattgatatcattaataatacagcacagctaaacgatgataataacaaaaaaataatcaccgttttgaaaaaagataaccagggtatttcacatatcaggtataacgaatttaatgttggtaatgatggcgttatttttgataataaaattggttccggaactatcatcaatgaggtaatttcagattcaatatctgaattaaatggtgaaataaatataaccggtaaaaaatcacgtttcatgctgattaatcctaatggcattgtttgtgcctcctcatgtaacttcagaaatacaacacaaaccaatcttattgttggtcaggcgatgttatctgacggaaagaaggcgggccgttatgctgacagtacatctgcactgatcatcagaaattccacaaaaaaaatagcctcaaaattaatattgaacagtaaaaatatctatataaccaatagtgatttcactgctgattctttgatgtttaccaatatttataaccatctgaatggtagtccatcaaaaaataaaatcaccattgataaagacagcaaaataagagcgaaaaatattaagttttccactatggatactgatattactaactatgggtttatcgggggtaatattaatgggatggtaatcaattccggactgaataacccggggacattatccggtaagacactttcattaaagttctccggcagcggcggaattaccggggatggccgggtggcatttgataaccatgatttataa

SEQ ID NO: 279211 - DNA, 180 bp, Morganella morganii
atgcacacacaaaccatgccggttgaccggattattacagcggatgaaattgcccccgccacgttaaagttacttctgaatgaagaagacgatactttccggcctgcgggtatattcacacataatgatctggttcatatcaaacgttatattcactacggaatgacccttccccggtaa

SEQ ID NO: 279212 - DNA, 1578 bp, Morganella morganii
atggcattttctcaacttagtataagacaaattatccaaaaaattagtgatggtgagataagaataccggcgtttcagcgagattttgtatgggaaccagaccgtgtacagtttttaatggatagtatatacaaaggttacccaatcgggactgttttattctggagaagccgagaaaaattatcattcgatagagatttagggccatttacactacctgatcctaaaaaagagtatcctattgattatgtcttggatggacagcagaggataacatcaatctttgctacttttcagagtgagatgaataaaaatcctaaaagtaagtgggttgatatttattttgatatagaagctaagccaaatgctcaggactctcagtttatagctacaaatgataaaaatccgcctgcaaacttaattcccctgagagtactatttgatgttacgcaatatggtaaattaattagaactcttactgatgaacaggctggaataattgatgatcttcaaacaagatttaaagaggccagtattccagttgagacagtagaaactgaggaacattcaaaaatagcaataatttttgaaagaataaatagaaatggaatacctttaaatacatatcaattattatctgcatggacatggagtaatgattttgatttgcgagcaaaattcgaagaattaacttcattacttgatgatgttgaatatggagatttaggtgatgaggatgatttgctaataaaatgttgtgcggcagcaattagaagtgatagttcatcaaaaacaattgtagatcttaaaggggatgaggtcaggcgtcattttgaaagttttaagaaggggctttttggtgctattgatttcttaagaagagaatgcggtgttatttcgtttaaagtattaccatataaatcaatgttaataccattgactaggttttttgtaactgaaaaaaatgcgggaattcaagctaatcctcaacaattgattttgttaaaaaaatggttctggcatacttgtttttctagacgttattcaaatagtgttgataatgctgtttcgaatgatatatctgctatgatagatttattaaatggcaaagatgataaaataaaaagaaagccattggatatacctaagagcttttttattgaaaattcgttctctgtgacatcggttaatacaaaaacatttattttacttctggcgcagaataaccctatttcatttttgtcatcatctaaggttgatttggaagatgttcttgtctcgtgtaacaaaaatgaattccatcatattttccctgataattatttaaaatcaaaagttggtttattagataagtctattaggtattgtttggccaattttgcttttttatctcagaaggataatagaacaataaaggataaatcccctttagaatataaaaatgatatagcttctggttttatagattcagtttttactgctgcttatattcctattggtggtttagatatggaatatgaggaatttttggataaaagggctgagttacttagagaagctgctaagtctttagtgtaa

SEQ ID NO: 279213 - DNA, 996 bp, Morganella morganii
atgcagacgattaccccgccggttttcacttttcaggatttccggcctgaccgcctgatcgacagcctgagccgttacggtatctggcttgattccggtctgacggaactgaacagctatgaaaaccgcgtatatcagtttacggatgaaaaccgtacccgctatgtggtgaaattctatcgtccggcccgctggaatgaggcgcagatccgtgaggagcacgacctgaccctgacactggctcaggccgggctgccggtcgcggcaccgctggcctttgacggcgacacgctgctgtcacaggacggttatctgttcgcgctgtttccgtcggtcggcggacgggcgtatgagacggataatcttgatcagctggaaagcaccgggcggctgctcggacggctgcatcagataagccgggaacgctgttttgagcaccggccggcgatcggactgcaggaatatctgctgacaccgcgtgaaatcctcgcgcagtgcccgctgatcccgcaggcgcgtcgtgacagctttatcgcgacactggataccctgatccgtgagatatccgcccgctggcacgacgactggcacgccattcgcctgcacggggattgtcatccgggtaatattttatggcgtgatgaaccgtggctggtggatttcgatgatgcccgcaacggcccggcagtgcaggatctgtggatgctgctcagcggggatacggattcgcgccgttatcagctggatattctgctcgatgcctatcaggagttttgtgacttcgatacgcgggagctggcactgattgaaccgctgcgcgccatgcgcatggttcattttttatcctgggtggcacgccgctggcaggatcccgcttttccccgggcatttccgtggatggcggaaggtgatttctggtcacagcagcaatcactgatgactgaacagacagccgtactggcggagcctccgctgacgcgctttctgccttattga

SEQ ID NO: 279214 - DNA, 1209 bp, Morganella morganii
atgaaaaaattattctttattgcctatggtggcggacacataaaaatgctgattccgattattaaatattttcgtaatcataccaattatgatgtcactgtttttggattaacaactgcttgttctgtattagaaaaagaaaatataccatatatatcttatcaaacttttgccacgcaacatacaaatgatataggtatgaaattattaaaaaatgaagaaacaagcagtttgatatcaccaaatgaatctattgcataccatggtattaactatattgacctgattaatcagctgggagaaaataaagctgaattagtatggaaagagaaaaaacgacaatgttttaatcctattaacttctttataacgctactcaaagaaatcaaacctgatttagtaattgcaacaaactcaccacgttctgaaaaagcagccctggatgcatctcgatatttaaatataacttctatttgtttagtcgatatgtttgcattacaggaaataaactggctaagtcaaaaagattatgcatcaaaaatatgtgtactcaataactcagtccgggatatgtttattcagcatgggtgttctcccgaaagtgttgtcgtaaccggtaatccagcatttgatagtattaacgacaaaaaatactgcgacgatgctctgaaactccggcattcattatgtatgaataatgatgacaaattaatcgtatatgcgtctcaacctgaaccagagcaacatcctttttgtgataaaaaggggaaccccggtctgccgagagagatagaaatatacctgagaaactatatcaaaaataataaaaataaaaaactggttctcaggtatcacccaagtgaaaatactattttcaatgagcagaaaaatatttttcatagtaaaaaatccgatagtttatatacgcttctccatgcagcagatctggtcattgttactgcatcaacggttggtttagaagcaagcttaattggaaaaaatgttttatctatcgatacatcaatatttactgacgatgccccttttagcaaaatgggaatatcaataggtgtaaaaagaatatctgacttagaatatcatattaataaaatattagctccagcaaaccaaaacagaattaaatatgatatcaacgaagctgatgccacgaaaaaaatcatcaatgttataaaaagcataacttgttaa

SEQ ID NO: 279215 - DNA, 660 bp, Morganella morganii
atgtttggtaactatgtatgtaaaatttacgtaagtgataacctaaattttaataatccactcgaagccacagcatttggttttgatgatggtgtatgtaataaaatacttaccgcaggccacgttgttactgatgttctaggcaagatatatccagctagcaatactgtaagattatacgtcagatttgaaaaccataatggggtagtaaacccaatccccatcttagttgattttatcctcaaggattgtaatgacgcaaataactataccaataatattccttttgttgatagtgcagaattagtattaaatcaatctactatccagcctatatccagtttttttaaaaaaggctccgttatagaagggagtacaatcctcggtttgggctttccttttggtcaatctcaacttgctcaaattcaaggtacagctgggaaatatttcaatatgatttgtactaagcattcaggtggggggtgtattacatctcgtctattggtgaatcataatagtttacccggatgctctggtggcccctatattataattcataatgaagagccttttgtaattggtagcttaattggaatcatcgcgggctgtaatccattagtcaatccacataatgctattcaatcagcaaatgatttttaa

SEQ ID NO: 279216 - DNA, 312 bp, Morganella morganii; identical to SEQ ID NO: 16660

SEQ ID NO: 279217 - DNA, 333 bp, Morganella morganii; identical to SEQ ID NO: 190840

SEQ ID NO: 279218 - DNA, 468 bp, Morganella morganii; identical to SEQ ID NO: 103796

SEQ ID NO: 279219 - DNA, 2055 bp, Morganella morganii; identical to SEQ ID NO: 238143

SEQ ID NO: 279220 - DNA, 537 bp, Morganella morganii; identical to SEQ ID NO: 103799

SEQ ID NO: 279221 - DNA, 705 bp, Morganella morganii; identical to SEQ ID NO: 14478

SEQ ID NO: 279222 - DNA, 519 bp, Morganella morganii; identical to SEQ ID NO: 190834

SEQ ID NO: 279223 - DNA, 1296 bp, Morganella morganii; identical to SEQ ID NO: 103801

SEQ ID NO: 279224 - DNA, 285 bp, Morganella morganii; identical to SEQ ID NO: 14475

SEQ ID NO: 279225 - DNA, 591 bp, Morganella morganii; identical to SEQ ID NO: 14474

SEQ ID NO: 279226 - DNA, 1650 bp, Morganella morganii; identical to SEQ ID NO: 103804

SEQ ID NO: 279227 - DNA, 1353 bp, Morganella morganii; identical to SEQ ID NO: 103805

SEQ ID NO: 279228 - DNA, 432 bp, Morganella morganii; identical to SEQ ID NO: 14471

SEQ ID NO: 279229 - DNA, 873 bp, Morganella morganii
atgaccagaattgttccaattatatcaacaaaaggcggggccggaaagtcaaccaaagccagcaatattgcgggtttttgtgctgatgcagggttaaaaaccctgttgatcgacggcgatcattcccagccgacagccagcagtctgtttaaacttgaatatgaagcaccaaacggcttgtttgagttgttaatgcaactgaccgatctttcccggccggataccatcatatcacgctccgttatccctaatctggatatcatcatttctaacgatccgcatgatcgtctccctgcggctatattgcatgcacctggcggcagaatgcgtctgcgtaatattctgcaacatccgttattcgcttcttacgatgttattatcattgattcaaaaggcgcggcttcggtgatgctggaaaccattttgttagctgccaccgattatgctgtcgggataatcaaacctattttgccggatacgcgtgaatttttacggggaacactgggattaatcggcgggctggtgccgctgacggcttacggaattcccctgccggcaatacgtattcttgctaattgtgttgaagatacggtgttagatcgtgcaacactgactgaattaactcagattattgaccaaaaagcgtacccctttgcggagtcgatttctctttcgttactgaaaaccgctgttcccaaactggaaatatttaaaaatggtcatgcacagggacaaccggtgcatcgtctggaataccggactcagcgtaaaacaccggcagccgcagtcattatgcatcatcttgtttcagagctgtttccggaatggaaaacccgttttgatgatgtgctgaaacgggaggtgcgtccatga

SEQ ID NO: 279230 - DNA, 963 bp, Morganella morganii
atgaatgatattacgtttgaatacctgacagagcagtatttttacagtaaatcactgcgtccggcggcgataagcagttaccggaaagttgtccggacctttgaagcgtttacggcggttccgcctgcggacgtggatcatcatatcgtactgcgctggcgtaaccacgttctgaaagacgaaaaacgggcaccgagaacctggaataacaaagtgacccatatgagggcgctgttcaactttgcgatagcgcagggatttttgcctcatgagcaaaatccgtttcattacgcggtggtcagagcaggtaaaaagcggaaaaaaatcctgacgaaaagccagatggatgcgttgtaccggcgggttgatttttatctgaatatcgaaaaagctcacggttgctgtgtgctgtacaacggacgcgtcaatgccatgcatccggcgtggttctggggcacggccattaatgtgctgcgctatactgctatccggatgagtcaactgcttcatattcgtttgtgtgatgtcagcctggaagaccgctggatcgatctgagttcgggcgggtctaaaaaccacgatgaacaccgggttcctgttgtcacggcgctgtatccgtcgctggcctatttactggagcgggctgaagaagcagggatggagccggagcatcagctgtttaatgtgggctggtttgatctgcgccggaaatacaaatatccggaactgatggatgaacggccgttacgggcatttttccggcgcttatccagggaatgcaattttactatctctccgcaccggttcagacacactgtcgccactcacatgatgaaatcaccggagcgcaatctgtacgtggtaaagcgcctgctgggtcatgtcagtctggtatcaacactggaatacattgatgaaagtgttgacggattacgtaacatactggaaaccgagctgatgtag

SEQ ID NO: 279231 - DNA, 465 bp, Morganella morganii
atggcgacgacccttaaccccgatcatccgttagtttctgtttccttcaccgctgatactgattttactgtcctggctgaccattgcgccctgtttgctgaggttttgattgagtctgccgacccggtgcaaaaactggcattgtgcggcaggataagcaccggtctctctctgctgaaatccaggctcgctgatcccatcgctccccatcttgttgaatgtctgaccaccgatatcccccctgtcacttctcctccccgctttaatcccgacagcactgaactctgcaactattgtctggcgctgacgcaggttctggcagggcagggatttggctctcagacggcgatgcatctcagttggctgttgtatgaattactggatttttttaagacagatttgcagtcaccgcgctggttacggacagcagaaggaacccggtttcttgatgaaaggacggcatga

SEQ ID NO: 279232 - DNA, 1149 bp, Morganella morganii
atgctgaacctgaaatccttctttcaaatccggtcaatcccggagaaaacaccaaaaattcaggccggatactactctcccctcagtgcggaagcgttgctggaaacaccgcagcgtcagcgctggctggcttttctccgtgattcctcaccactgccgaaagctcagtttcggcactattatcagcagccgctgatgcgctgcctgacactgatgcagcagtttccgctgacagcggagggtacacacgcccgttcagggggaatggcggattatatgctggaaagcctgtcatacgcggtgcggctggcaaaggggcatatgtttccgcccggtgcgccgctggaagaacaggctgcacaaagtactgcctggcacgcggtgatggtgtatgcggccatattatccccactgggttatctctgtgatgtacatgttgagttggcaaacggaaaacgctggtttccgctggataatgcacctcctgagccttaccggttccggtttcttcccgcagcgccagatgatgcgcggcagagtgccggggctatgctggcgtggcggctaattcctgcggaggcgattcagtggctgaacaactatccggatgcgtttcgtgccttatcgttgtatctgagtggcttccgggaacagacgggtgtggttcatcatattatttctgaagcggtacaactgacaacagggatgactgcggagaaagaaaaacccgtcaatgctgtggtcagcagcaatgtgagtgaagcaccggaagaacttcctgacaatcccggaggtcagttctggcagtggctggtgacaggatgcaggagcagagaaatcgcggtgaatcagacggagaacagtgttcatctgaccggcggttatctctttctgccctcgccgtggatattccggcagtacctgactacaaccggcggcgagccgcaggaaaaagacgtgattcagaaagcgtttgagcggctccggtatcaccggaggagcagtgggaaaatggtcacctgtcatttatatcagacagaagacagggaagggccttaccggaaactgagcggttatctggttcccgccgggaaggtgttcagcggcggaattaatgacggggataatcccctgcttgctgttatataa

SEQ ID NO: 279233 - DNA, 930 bp, Morganella morganii
atgaaacagaaaactaaccgtaaacccgttgtaaaagctgacttattccgggaggtgaccgacaaaatgattgccgcactggagtccggtacaccaccgtggcgtcaggcgtggcagagcggaaatgaagggctgcccgctaatgcagtgaccggcaggcgttacggaggtatcaatgtgatgctgctgtggtcagatgcagtgaataaagggtatgaacgcaaccgctggctgactttccgtcaggcgcgggaagcggggggaaatgtgcgcagaggggagaaatccacgacggtggtactgttcaaaccgtttcagaaagcggaggcggatgagcacggccggatgaccacggatgaaaacggtgaccttgtcatgaggaattaccggatgatggacagctttcatctgtttaatatcgatcagtgtgaaaatctgcctgataagttgtgtccggaacaaccggtgctgccggaagcggaacgtatcgccggagcggataagatagtcgctaatggcggcgttccggtgagacacaacaacggcggacgtgcctgttatcatccggttgctgatcacatcattatgccgcaggccgcacagttccggagccctgcggattattacagcacgttgctgcatgaactggtgcattccaccggccatgtatcgcgtctggcccgggaaggaattgtggattgtccggcagataaacatgatccggtatacggatttgaggagctggttgcggagatgggcgcagcattcctgtgtgcagacctgggaatacagggcgatttacagcatgaaagctatatcgcgtcctggctgacgatcctgaaggaggataaacgggcgatattccgggctgcacgttatgcacgggaagcctttgaatatctgacctcagagacagaaacctgtcgctga

SEQ ID NO: 279234 - DNA, 909 bp, Morganella morganii
atgattaaggataaaaccaccatgtcaaaactcaccagacagctcacaacccttgcccggcagggcggcggcagttttaaaactgtggcggatcgctcaaagttgactactcgctttgcggcgaagatggccgcgctgaatatccagatccgcgatgtgaaacacatcaaaattcatcatattgaaaaatatatccggagccgtcaggcggaagggatttcaacacgcacgctgcaaaatgagatggcggcggtgagaaatattttgatcacggccggtcgcggtaagctggctgatccgcagcatgagaaactgagtaataaggcgctcgggttggcaggggctagccgtgacggcacgaaggtggcgatcagtgaggagcgttatcttgcggcagtgtcctgtgcggaaaaacaggatgccggtgtggcggcggcgttgcagcttgcccgttgtttcgggctgcggacggaagaggcggtgcagtcggtaaagtcgctgaaaacctggcaacaggtattgctgcgcggagaggcgagggtgcgtgtggtgttcggcacaaagggcggacggccgcgtgatacaacggtgatcgaccgggacaaaatgctgcacgcggtcaatcatgctcttacggtggctgcggcacagaacggtcgcctggttgatcggccggagttgaaatccgccattgatcgttaccgcaatgtcgcccgcaaagccgggctgaccggcaaatctgctccgcacagcctgcggtatgcgtgggcggtagaggcggtggagtttcatacccgcaacggcatgagtgaaaaggaagtcagcgcgatggtgtcgatggatctcgggcacggtgacgggcgcgggcgttatgtgatgtgcgtttacacgaaatcttcagaaagctga

SEQ ID NO: 279235 - DNA, 1266 bp, Morganella morganii
atgaatggtatttttaaagaggcaaaagatttgtctgaggtagagctagaattagcaaatataacatcagaggagctgattgatatttataatgattatattaagtcattaaaggaatttgaaacggaaggtatttatctaagtaataaattacaagcatgtgatgagataaattcagttagatggagagtaaaagacccagttcatcttttaattaagattgtaagaaaaagaaagaaagctatcagtgaagatgatacagagtcaagatatcttaatattaacacatcaaactataaagagataattactgacctggtggggttgcgggcaatatatttatttaaaagacactggatgatagttgatgaatttatttgtaaaaatttccacgtggatactgaagataatgttgttatttatcacgctccggaagatgagttatccttttattatgaaaataaatataaaaaacaacttaatggttctgaattaatatatattcaagaaaataaagaatcgaaatataggtcgacacattatataataaaagcaaacttccctcatttatttaagattgaacttcaaattaggtctattcttgatgaagcttggggggaaatagatcattcaataagatatcctaatcttcaggatgaccccgagttaaataggcaaatgactattttgaacggagcaatcaatggttgtgaggaattagcaactacctattttaaagggtttcaagaaagaagttatgatctaatttctgaagttgattctgaaattaaaaaaataaaagatgctgaaagtaaaaatgtggaagattcagtttttaaatttacggataacaaattgaaagagatcgctatttcttcggctgctagtaaatttataaaaacattaggtttcgttgatgcagctacagaatttattgattatgatgctaaggggcatgattctgaagagggtgtatataataccgaagagagagagggatctggaagggttgaacatgtaactaatttatcaaaaccagagcattggagcatgcaatttaacaatactattaatagaaaaattaataaagcaaatatctcacctgataaagttttatttgaaaaagatccggatatcatacaagcaatgggcaatattataagatttgctaataaaaaacgttcagtaaatattcgtgataattttatgaaaaataaatgtgaaggtatcgagaaggatagcaatggaggtaagaaagataattaa

SEQ ID NO: 279236 - DNA, 1179 bp, Morganella morganii
atgactgaacaggaagctgaactgaatgctatccgggaaattaccggatttttgctgattgatgataaaaaacggtacttaacccgactcgggctggtgatgacgtttttctttaaaaacggttataccccggagaaaaaagccgctattctgcgctgctactgccggttccgtgagcagtacgccggaaaactgcgctttcatacccataaccaaaaggggatgaaaaaatactctgaggaaaatattgaaaaactggagcagtatattaaggcatccgggcctaatgacgttgtggaatggtatatcagtgatgcgaaaaatggtgatgaagctcctgaatatgtgatgcgatgtctgaattcttatgaggtagatggtgcctggggaacttcgtatttatctttatatctgccgtgggatattttgttctccgaagagggcgcgcaggagtttcaggagtgggtgcagtttttatgccaagagtttgaaccggatcacggtgactgtggctatacgctggttatgccgcgtgattatgagctgtatatgccgcaagaatatgaactggcacaacgttatccggcaatggtcgtcaattcatcagtctatatagcagcctgtcaatatgaaaattctatccgtagtgtgcaatggctgacattcctggctgaccgttatattgaacgcctcggtggtgagactcatgtccgcaaaatattatctgctgatccggaaattaccctgacccgttactccggcgggttgattatccgggccggtgactatccggatctcacaccgggcacaccgccggaaagttattaccggattaatgaacttatccggccaatccgttatgtgcggcaggaaggacactctctgcattttctcggagaggggcattttacaggcgaaacaaccaggcagtggtatgagcgttatgaccgcggtccgatggtcgtttctccgttgtatgcgggtgaaccggcccgggttgacggttactggacgaccaaaggccgcgagaatgtggagaccatttttcttcagggcacaccggcgattgatattgaaggcaatccacccggacggacagaatggcggctgatccgcgaaattccgcacgatgatgaacgggatctgaccctgctggagcaaaaactcaatggccggtaa

SEQ ID NO: 279237 - DNA, 1407 bp, Morganella morganii
atgatgaacacgaatttatggctcaacgccgtggtgctggcgggatgtctggcactgagtcagccgtcacaggcagagcatacggttgtcagtaccgacagcagcgccgggctgaaaggggcgatcagtgattatctgttttacaccatcggcggcgggtcggtgatttcaccgccgcccgggcacagtaatatggaaaaattgagtatcggcgttggctggagcagcgacctgatgtgcggcaattttgatatcagtaccacggtgaaaaatcagctcaatggcctgacggatggcttcagaaacctgatgagtaatgtgatcagcagtgctaccggcgcggtggccagtctgcccgcgatggtgattcagcgggctaatcccgggctgtatgaactgctgaccaacggggtgttacaggcgaatgttgcctttgataaggcgcagcttaactgtcagaagatgtcggagaaaatggccgattttgcgtactccggacagtggacaaaagccgccgccggtgaggcgtttaaagagatagtctccgccacaccggatgcggtggccgccggtaaaaaactgaataacaccgctggaaaagagggtgtgacatggattggcggtcagaagcgcggcggcagcagtcagcccgctgtccggccggtatatgacctggtgaaagccgggtttaatatcattaataaacaatccgtcaccggcaatcagaccgtcagtgaatccgcctgtcgcggcgcactgtgcaggcagtataaaaacagtgaggaagcggcaaaggccgtagtgaccgtgctcggtgaccgcgcaatcagaacctgctcagaagccgcggactgccgcagcggcggggcggataatcagcccggggcatcggtacccggaaccggtttttcaccggtactggaagacacgacgcaggacaatctggttattcttacccgtctggtcaacggacaactgaagccggatgcgaagaacctcgccacgctgaaaagcggtgatctggcggtcacccggggtgtgattcaggcactgaaagatgatccggataatgccgcgctgatccggcgtctggccggtgaactggcgatgtcagaaacgatttcggtggcactcgggatgcgccggatgctgatggcgggtcaggcagagccgcatgtggcagatcagaaaatcgcgctggaagaatccgatcgccgcctggcctttctcgaccgcgaagtgcaggcactgaaaaacgaaatggagatccgcagaaccatcagcagcaacaccctgctgacggtactttcccgccaggctgaacgggatgtgacgcacggactgcgtcagccggtacatcagaatgacggcgcactgcaccggctgaatcataaggcggtgccatga

SEQ ID NO: 279238 - DNA, 471 bp, Morganella morganii
atgattaccaccaatccgctgctcgctccctatgtggtcaaagtcgtgaaaatgtggcgcaagctcggtgcctggctgtggctggcgacacagaacctggaggattttccggacaccgccaaaaagatgctcaatatgatcgaatggtggctgtgcctggtgatgccaccagaggaagtggaggagattgcccgcttccgtaaactgaccgacgaacagaaagccatgctgctctccgccaccaaaacaccgcgctgctacaccgagggcgtggttcttgccagccgcattgaagcgctgttccgcgccgtcccgccgagcctgtatctggccctcgggatgacagaaaaagaggaaaaagcagccagaagagagctgatgataaaacacgggatcagtgaactggaagccgcaaaacgggttgcgcgggagctggataaggggcgggggattgaagtgagtacaggataa

SEQ ID NO: 279239 - DNA, 186 bp, Morganella morganii
atgcccggcctgttaacgaaaaagagcggtacgctgacgcaaagtgacacagataagttatatccggtgaatccgtcattcacggattatctgccctgggcggaatacctgccggagagtcagtgcctgctgctcgatgacggggtatccgttggggcggtatttgaggtgatcccggccggatga

SEQ ID NO: 279240 - DNA, 459 bp, Morganella morganii
atgaatcaggatctcaacacacaggatctgtctgcaccggcagccggtattgacccggtagtacaggtcatgggcggtaacagtgatatcgcactggatttggtggtaattattgataccagcggctcaatgtcagatgagtccgccgatctgagccgtgaaatagacgcagcgatagagaaagcggcagcccgctgtccgtctcagctgcgggcgactttcctgggcattcagggtacctggaccggcacaaagtttgatcagacagtgagtgattatctgattggcaaaggcgcatccgagggaaacttacaggccagaaaaccatttacagaggctgatggccgtgaccatgctgggaataaggaggatttatgccgcgcggttattgatgccagtaaatattttgactggcgtcccggcgcccggcgcccggcgcgccatttttgtactgggtga

SEQ ID NO: 279241 - DNA, 918 bp, Morganella morganii
gtgtcactaattacccctgactacttcaaaaaaaaattggaagaaaacgccaaaaaaaatgcgttagttactggcatagtatctgttgtcactccatggataaagcccaacaatatgtatttttttcctgagtataccgagcatggatttacacatctgaacgaagttttacttagttcatccggcctcattacagatgaagcaagaaaaatactgacttctgaagatatcgccgcgaccattatctctactatattgcatgattgcgcaatgcatttaacacctgatagtttttattgtctgattagcgataaatatccgagaactgagtcacgctttgtcgatgaagaggaaagttggacaaacatgtggttatcttttatcgatgaggctaaaaaatttaactctaaacaacttgaatctatttttggtgataccacgccagtcagagaaatacctgataataaattagatttaactgacagagataaactacttattggtgagtttattcgccgaaatcatgccagaattgcacacgatatagccatcaatgggattccgggagtagatggcgacatagtcagactaaccacagctaagacagaaaatcactttatggatctttgcgggtttatcgcaagaagccataacatgggattaagacaggcagtagacagactggaagatgctaaaaaacgtcaacaccttggcgttaaaactcctttcattatgcttgtgttacgcattgccgactatattcaaatccatgctgaacgcgctgacaaagaactactccagattaaacacattataagcccaatatcccgtggggaatggaaaaaacacgaagcaataattgaaattattcatgcccaccaggacccagaggctatatttattgatgcagagccctga

SEQ ID NO: 279242 - DNA, 564 bp, Morganella morganii
atgaagttaggaacgtatgaacgaccaaaatattggggtgttgatggtgttatcggtgatatctactactatccggattatactttattctttagattaaaatataatggcagtccatctgataaaaactggtattatccgaaaaaagcagtcaataatcagttctgggattgggttgggtattaccccggaacgatatcagagcccaaaacttggcgtgaacccggaatcgagggttgcatttactatgagccggaatatggttatttacgtttgaaaaaagacggtaatccgtctgaacataaatggtattttccatctgatggcaactcaaatgaatattgggattttatcgactttagggcaggtaatcctgtggatcctaaatcttgggatgtagatgaaggccaggaaggtgattatttctatagtgcgagactgaattctttttttattttaaaaaaaaatggtaagccatcttcttttaactggtattttccggaaaatggacaggataatacttattggcactatatgggacctttgaaaaaaaatgttggctga

SEQ ID NO: 279243 - DNA, 393 bp, Morganella morganii
gtgctgatctggtacatcagcggcctggcatcctacattatactcgatggccatctgcggttgcaggcggcgtatgacgaaaatattccgccttcctttattgtgctcagccattaccatgaatgcagctatgagccggatcctgccgcgattgcaaaagtgcagcaggcaatagcgcatcagatggataaaaatccgcatccggatatccgcgggatcaaccagacattaatcagcctgtatcagaaccgctacgggcggcactccacccgcagccgggcaatactgggcgacggccgttcatgggaagaggatgtttcccgttatctgcgccgccacggagacaccgggcacctcactgctattttgcagcggacggaagaaaccgcgtga

SEQ ID NO: 279244 - DNA, 525 bp, Morganella morganii
gtgagcatatcacctctgttcaggtggccaaatttattaaaccactacactatcagtcatgagcaggccgtatccgcgtttgaacagaacatctctgcactggctattgcggctcaggttatcccgggtgcggtcgtgagtgtgatgaccaccgttctgaacatctttgcagttctgacagcattcttcggtatctatctgggcttccaggaatcagtgaaaggccttgcggttaacatcctttcccgcttcatggataaagagaaaatcaaccacaccgtattaaacatctgtatctctgtcttcatcgttgcattactgactgcatgggtgtcaacagggttctccgtggttgtcttcttccagattggtagtccgttatacgctatcgtttcctgcttaattcctgtttacctggtattccgtgtcgcgaaactgaaaaaattcaaagactggaaagcctggtgtgttatgggcttcggtatcctgctgctcatcgcaccgttcttcaaataccttgagtga

SEQ ID NO: 279245 - DNA, 333 bp, Morganella morganii
atgatgaagaaatatgcgatatccgaagctatcggacaggttatcagacaataccggaccaatgcaggtttaaccacaaagcagctggcacacagaatagggattagccagcagcagctctcgcgttatgagcggggggtaaaccgtattgatgtggatacgttgttgcgtgtcagtctggcctttaaactcacaccgggtcgtttctttgaggaaatgaatatgaccggcaccgggctggatgacattctttatgaaaatgaagaaggggatattcaggaaatccggatgagccttattgcggacagtattatttccccgcgcgatttttaa

SEQ ID NO: 279246 - DNA, 252 bp, Morganella morganii
atgaaattcttacagaatatcccgccttacctgttttttaccggcaagggtggtgtaggaaaaacttctatttcctgcgcgacggctgtccgccttgctgaacagggtaagcgggttttgctggtcagtaccgatcctgcctccaatgtcggccaggtattctgcaataggcttcagcgtgaaaacgtagcaactgggcattaccttgttgtatgttgtcgcaggagtggcaattcgcatactgtaaagtaa

SEQ ID NO: 279247 - DNA, 363 bp, Morganella morganii
atgaagacgttaacggtgtttgacccggcaatgtgctgcagtaccggcgtatgtggctcagatgccgatcaggttctggttgatttctctgcggatgtgcagtggctgaaagggcgcggcgtacaggttgaacgttacaacctggcgcagcagcccatgagctttgttcagaacgagaaagcgaaagcattcctcgaagcatctggagcagaaggtcttccgttactgctattggacggtgaaacggtgatggcagggcgatacccaaaacgcgctgagctggctcgctggttcggtattccgctggagaaggtagggttagctcccaccagctgctgtggtggtaatacttcctgttgctga

SEQ ID NO: 279248 - DNA, 345 bp, Morganella morganii
atgaagcccctacaactcttcaaaaacctctccgatgaaacccgtctagggatcgtactgctgctcagagagatgggagagctgtgcgtgtgcgatctctgtacagcgctggatcagtcgcagcccaagatctcccgccatctggcaatgctccgggaaagcggtctattgctggatcgcaagcaggggaaatgggttcattatcgcttatccccgcatattccatcctgggctgctcaggtgattgagcaggcctggttaagccaacaggacgacgtacaggccatcgcccgtaagctggcatcggcaaactgctctggtagcggtaaggctgtttgcatctaa

SEQ ID NO: 279249 - DNA, 2709 bp, Morganella morganii
atgtacactaatgtaggaagctattggtataaatttgattttcatacacacactcctgcctcatcagattacaaagcgccagcagaaacagcaaaagagtggctcattgccctgatggaaagagaggttgactgcgttgcagtaactgaccatgttagtggggcatggattgatatcttgaagcaagagctaaaagcgcttgaaacatcctatcaagaatatcgcccattaattttattcccaggatgtgaaataaccgtaagcaccgggcaatctagggttcatatattatcaatttttgacccctcttgtggcacagctaaaattaatggtgtgcttggcatgtgtgggattacggaaggacatggagatgcagagtcaacatgcgctaccgaatctgttgataaagtaattgagctgataagcaaggaaaatggaattgctattcctgcgcatattgatggtcctaaagggctattaaagggaataaaaaacaataactcagaaataagtacatgggcaaaaaaaattgttgcagcagaatttgtcgatttaaacttccttgatagcgtagatgtagaactacaaaagacatttcaagatataggtagagttaaaggttctgatgctcatgaaaagtctagactaggagctaatacctcttggatcaagatgggaaaaccaacaattgatggtttaaggcttgcattatacgataataaattctgcgtaagtaacgaaattgacgatcctaattctctaccaaacctgtcaattaacaacctaacaattaaaaaaatgacccactgtggaattatcccaggaaaacctgttgagataaaactgcaccctctcttcaatgctataattggtggacgtggcgctggtaaatcaacatttgttgaatcactacgaattgcgatgggtagatctgaagagttagtcggcttacaatctataaaaagagatctagattcttttattgatggagttactagagatgataccgaaatcagcgtaggaataaagaggcgtgatgatttatttaatgttatatggacaaaaaataataacattgaaataaagaaatttgaaaataaagagtggcaagatgctccgggcaaaccagaggaaagattcaatataagcatttatagccaaaagcaaatcaatgccttagcatctaatcctgaaagtttgctaaacatagttgatcgaacaccacaagtagatatttccagctggaaacagaaattagcttcccaacaagttacatcaattaatttagcaaaaagcattaggaaaattgagctgagcgctcttgaaaaaacctctattcaagcacaaattgatgacttaaactctgatatatccagctttgaaaagggtggacataaagatgtttttaataactatcaaacgctatcaaaaaaacaaacaaaaatagaagatagtttccaaatagaaagtttgagcaatgcattaaaatcaattattgattttaacacagtccctcttgatttatctaatttaggacatgagttagaaaatgaaaatgaagtaagtgaaattcataaaaatttcactactgaaattgataaagtcatatctgatatcaaatcatcaaaagcaaagattgataacattgtacagcaaaccgtacaagcactcgataactctgaatggaaaaaaaatagtaaaaaaatcattgatcggtataaggaagttgttcaagcttacgaaagcaaagggcatgaactgaaccctcaagaatatgaacaatggatcgaaaaaagaaataacacacaaaaacagttagatgaaatcgtagaagaagaaaataaacttgagtcttacaaaacagattttaatcgttcgatttccttgagttacattttacgtagacgcctacaaaaaaaacgagagaaattcatccgttcagtaattggaaataataaatatgttaaaatgtcaatcattccatttggagataaaaacaatattgaaaatgatttccgttctattctaggttatagcaatgggttcaattcatccatttatcaagatgatcgtgaagatagtttactttataaagtaataaatgatggtggagatttaagaaaaacgataaaatatatctcagaaataaaggatactatattcaaaattgcagaaggtgaagatgtaactatacatagagtcgatggcagatttaaaacatcgttatgtgaaaaaataaagtcgcagccagaaatattagaaagaataattaattggcttccacaagaccgtttactggtagaatatgcaagagatgttgaaaaagggaagttcgcctcaattgacagaggttctgcgggacagaaagccgcagcaattctcgcattcctgttaagtcatggagataatccaatagtagtcgatcaaccagaagatgatttagataatgctctaatcaataaattaatagtatctcaaatacatagcaataaaagaagaagacaaattataatcattacccacaacccaaacatagttgtaaatggagatgctgagtacataaatgttatgcattttaacggcggtcaggtgcaattactatctgcaggtggtttatgtgacactgatgtcagacttaatgtttgtgagataatggaaggtggtaaagaggccttcaacttaagatataatcgcttacttaaaatgtaa

SEQ ID NO: 279250 - DNA, 1353 bp, Morganella morganii
atgcagaaaggactgattaactttattgcatgcacatctacgcttgctcaaggtgtaaacttgcctattcgctatcttatcgtgcagggagtatatcagggggtaggacgtgtcaaagttcgcgacttccagaatcttattgggcgtgccggtcgtgcagggatgcatactgagggggttgtaatcttcgctgattcaacagtttgggacagaaggaaaaattggcgggaaggatggaaatttcaaagcgctgtggagcttctctctcctgatcgcgctgaaggcgtcaccagttcgctccttttattattaaaaccttttgcactcccccgtaaccaagtattgccttttgctgggggcgatttactggactttatggataaggaagttgactgggaaagctgggctcatctggtggcggattcagaccctcgcctcagtaagccgcaaaaagatgctctagtaaaagcgctgttgagctccttggcagaacggaaaaagatgacgcatacacttgaaagctatctaatggcaaactgtgctgctatggatgcaaccgcctttgaacagagggccggggaacttgcacgcgagacattggcgtactcgcttgcctctgccgaagaagctgagaaacttgaagaatacttcaggctggttgccagacgtattgagtcggttgagagttcacccttaaagcaggcattcttcggcaagacattgttgggcgcaaagcagactaaatttattgaagtatggtcaggcgaacatagagcaatgctgctagcgctggattcctgtcatgcatggctcaatgccgtctggccactactgaccgagctctgcgacaatcgttttttccgtagcgtcgagcctgcaggtgcagggttcgagatcgcactttcgtggatgtgcggaatgagttacggagaaatcttcaagaaagcatctctgatgcaggttaaaaagaaagccggtaagcgtaaacaaaaagtgagtgacgacgatattcttaagttcttggagagcacactggcatttgattgttcgctcattctggcagctcttgcacaattcctttttagtccagaggaaataatcggagagcaaggggcatcgctcgctcattttcagaagagcctaaaaaatggcctccctgacgcgctatccatgagtatatttgaggcgggatttgctgaccgttttatttctcaagctattcgcgacgctctcctccaggatggatatggaggcagctcatttgatgaggctaggcaaaatcatttaagcgttattgagcaagttgtcaaaggaacccctgcttatttcaattacgttttaagctcatactga

SEQ ID NO: 279251 - DNA, 183 bp, Morganella morganii
atgaaaaatagtcaccgctgcgaaatatgcaataaacggcttaatgaaagtgagcgattttattacggctacacctgtgaacaatgtgaacgtcatttcattactgagcatgaaggaaataaattcaaaaccgcactatcgctcatcaggctgtatttcagaaagctgatttactcagcgtag

SEQ ID NO: 279252 - DNA, 330 bp, Morganella morganii
atgatgaagcacaaagaagtgacagattacgaaattaataaagccgtagcgaaatatctaaaattaaacataatcgcatatgaccgcacgggaatcgttttattcgatgatatggacgcaatgccattcgacccatgcaacaacccagcggacgcaatgcctattattattgagaataagatatgcatgaattatatcgataaggatattggctggggtgcgcgtcattttgatgaagaaaaaggcgaacttgaaatatatgataaacattattatcgagcggccatgatttgtttcctgataatgaaagaggcggagaatgaaaaatag

SEQ ID NO: 279253 - DNA, 213 bp, Morganella morganii
atgacaggaaaaagtatgttcgtacacaaaataaagaataaatctcacatcaataagtacattgaagacaatggatgcctttttatcagcaggtataaagattcgcataccagagcaaggaagctggcgagaaaaatggcatcggaaggcatcattaaaatgcaagaggtcagtggtgggtttatttacagaaaacgagaggtaataaaatga

SEQ ID NO: 279254 - DNA, 159 bp, Morganella morganii
atgacaatcggatttgtattactactggtaatgcacggctctgctgtgcctgttaccgatgatatttatacgctcgaagaatgtgagagccgcgcagtgcagatgacgactgtgtggaatgttgaattagtgtgtgcggaggtggtgaggcgaaaatga

SEQ ID NO: 279255 - DNA, 645 bp, Morganella morganii
atgaaacgtaatattgatgatttcgacggaatgaaagattttattatcagtgttattactgtagtgacttggtttctaatagtgaccattgttattgttggttatttcaccgtagaaactaaaggcgaaagtgttataatatcacttatatcgatgttttttactataatttcagcattaggaattgtggttacaataactgtttactgccttcaaaaagattccaaaaacaaagagatacgtagagttaaatccgcacttgcagatgatttaagccaactaattgatacaattgaaagaatactagatttccctgttaatgatgatgccatgattttaaaaaacgagagcggaatatctattcataataataggtcgggagttgggttttctataaataaatttaacaatatagaccaacttgacatatataaagtaaaattaatgaaccatgacagattagcatccatggcaataagtcgaataaaaaaattcctaatggaatacaattcatctatagagaagttaataagtaaagcaagtgttagcggtggcttttatcatgaaaaatcaccattaattaatttatttagcggcaggcataacttagaaacaataaaaatgtggatatcaaccatcaaatag

SEQ ID NO: 279256 - DNA, 792 bp, Morganella morganii
atgactgcattttacaacgaaaacgatccgttcgctgctcagtggttacggaatctcattgctgccggtcatatagcgccgggtgtagtggacgaaaggagtattgaagatgtcacaccagatgacttacgcggattcacacaatgccacttcttcgccggtgtcggggtgtggtcactcgccctgcgccgtgcaggatggcctgatgatgaaccagtctggacaggaagttgcccgtgtcagcctttcagcgcggcgggcaaaggaaatgggtttgctgacgagcggcacctttggcctgcattcttccacctcatcagcgagtgcaaacctggcgttatctttggtgaacaggttgcaagcaaagacggcctcggatggctcgaccttgttcaaactgacttggaagcagcgaactacgccgtcggcgcagttgatttatgcgctgcgggcttcggtgcgccgcatatcagacagcgattgttctgggtggccgactccgacaacgcggggcgggaaagactgcggggatgtgagtcagtcattcttccggaaagacgggaggatgcggaacgatacgctgtaccgccagctatggctgcacatgtttgggatggatggcaggccgtcacgggagcagataaaaaatctcgaatgctgccacctgactttggcgagagagctgatgatgctgccggtcgggtgggaaaactccgcgcctacggaaatgccatcgtcgcgccggtcgcggaagagttcataagggcttatatgctgataacagaggaatga

SEQ ID NO: 279257 - DNA, 159 bp, Morganella morganii
atgacattttttattctcaacggcctgcacgtttttatcgtgtgcggcaaacaacagcagtttaaatcattccgtaccggcattaagtgggctttcaccaccaaaaccgccgcacggacagatcaacttataggtgagcacaatggcaacaaccaataa

SEQ ID NO: 279258 - DNA, 234 bp, Morganella morganii
atggaagtcatcaacagaaaaacagcggttcttaacgggcttgtccggttttatacgggtaagccatgtaaaaacggccatgatgctgaacgctataccagcaccggcgcatgtgtagtgtgtgcggccatacattctacggagtaccgaaaggaaatgagccggttactgaaactggcaaaggaactgaataaaacagatgggcgcattcatgagagtgaattcagggggtga

SEQ ID NO: 279259 - DNA, 423 bp, Morganella morganii
atgaccgggcactggcagccggatccggatttcagccgtaaggcggcacagtggggcgtgatactgaatgatccgtaccggcccgaggaactggctgagttcgtcacgtactggcaggcagaggggaaagcaaaacaccacgcacagtgggaaatggcgttcgccaggagcattcatcagcaacgcatgaaacaaccgaaacagagcggaggtcacaccgatgacgcagaattcaaatttaacccatccagcgggaaatccagagcggtacaactcgtcgagcatgggatccggaaaaaatacgggcaggaatatctcgactctctggctgaagatgaccgagctgtatggggacaagtggacgggcaagaacgggacggagccgtcatcgatgtggcagcgggcaaccgccggattgagtga

SEQ ID NO: 279260 - DNA, 294 bp, Morganella morganii
atgaaatatccaaaaatagatgatttccacaatggcattaaaccaatgccgaagttgttccgggttatcagtgtagaacttgacgttttgcgcgctcatttaggttctggcggtggcgttatatttgattgtgatgatgtcgaaaccaggaaagtaagacgggttaaacatgatggcggctggtgctggcagttggtcagagagcacaaagaccaggagcagtgggattactgtcttaatcaagacagggagtgcttggataacctgaattgggaatttggtctgttcagataa

SEQ ID NO: 279261 - DNA, 381 bp, Morganella morganii
atggaaacaaaaattatccacgtcaatttcaaagacgaaaataagccggtactcagtaccgaagtggaagataaaaaatccagaccgcaggagatctgccgtcaccacggtgtgaccataaatgagcaatatcgccgggtaacctgcaagcactgcaattgtgttgttgatgcatttgatgtgctgctttcccgcgcgaaagatgctgaacatgttgtccgtgaaattggtgagctgatggagaaacgggcggagctccgcaaatcagtggatgaactcctgaaagcggaaaagaacaccaaggccagattacgcagcgccagaacagatctgctttttactgaaaataaaatggctcaacttaaaggggaggtcggatga

SEQ ID NO: 279262 - DNA, 354 bp, Morganella morganii
atgaaaacagtaaaaacgagtgagctttcaggtcgggcgctggattgggctgtggctaaatatcaaaaaatcgaagattgcctagtgataacgcatgccagcaaaacaattgttctggatgatgttatttattctccatcgactaattgggcgcaatgtggcgcattcgttaaccagctatggatcgaaatgtcagtggaagaaatcgatggtgttgattattggtatgcatcaccgcctcatctggttggcgactatgcaacaggcagcacaccgcaggaagcaatttgccgtgctgtggccatggttgagttcggcgacacggtggaaatacctgaggagctgctggaatga

SEQ ID NO: 279263 - DNA, 888 bp, Morganella morganii
atggcgtctcttttttctgaaatacgaaatgatattttaaatccagaatcaaacataactgatattttacgtaaatgcgcagtattggcatataaaatcaataatgacgtttttatcaaatggacagagttggaattggaagggtatgacgattctgatgttcttccagattatcgcatagttggtactgtgattcgtggtgactttactgacggatttcgggtaagcgcgcctggaatggcaatcgacaaacatcttgttcctgattatctacaagatagttttgggtcgggaagattgtattatccagcctcatatcttgaaagcttattgctttattctggtgatgaagatcctaggcgggatatgcctatggccgcactgcataattttaaaaatttatatggtgatctttattgtataaaagcgtatgaaatattgcctagaatggggtgttatagtgtcgttgattctataaaaaataagatactaaaatttttattagaaatagaaaaaaagatagaaaatgtagaggatattaaattgtcaaaagaagatgagaagacgattactcagacttttactaacaatatttacggcaatgccaatattgccaacgccagtgaaaactttaaccaaagtatccagtctcaatctgatgagttaattaataaattagtaactgagttggttcagttaaagggacaaggcacagatacaaatattattgatgctgtcattcctcatattgaagaaatcaagcatattaaaaaccagaaaggtgtcatggataaggtagccagcataatgactattgctggtgggtctgcttcagtatgtactttgattgcgccatatatccccatgctttcaaatttgtttggttaa

SEQ ID NO: 279264 - DNA, 561 bp, Morganella morganii
atgaccatcaaaagacaacgcaaaccaccggcacgaaagcccacaccgctgaacgctcagatggagcgtttctgtcaggaatatctcatagcgcctgataatcagactgatgccgccattgctgccgggtatgctcccggcagtgcctgtaaacgtgcatcggtactgatggcagatccccgcattcaggaacgtatcgcccagcttatgcagcagcggaacaagcgcaccaagatgagcgccgacactgtactcaagcggctggtggatatgctggatgctgatattgcggacatactcactgataccggggatatcaagcctattaaggattggcctgctgtgtggcgtaaaagtatcgcgtcatttgaaattgcagtcgttgatgaaaatgtcaccgtcaaaaaggtgaagctgctggataagttgcgcgtacttgagctggtaggtaagcacgtagacgtgaatgccttccgtgagcgcgtacaggtggacgtcaatatctcgctggcggataaactggcagcggcacgtaaacgggcagcagagggtattgagtaa

SEQ ID NO: 279265 - DNA, 1485 bp, Morganella morganii
atgaccgataccgccaccgcgtcaccggaagaacagctgattgacgatattgctatgttcacgcatgacccgctcagttatgcgctgtacgcatttccgtggagcgaggcgggcaccgaactggaaacggccagcggtccgcgtcagtggcaggcggaggcgctgggtgaaatcggtcagcacttgcgcaatcctgacacccggcatcagccgctgctgctggcccgtgcatccggccacggtatcggtaaatcagcattcatttccatggtgattaagtggggcatggacacctgcgaagactgcaaggttgtcgtcaccgccaacaccgaaaaccagctgcgaaccaaaacatggccggagattgccaagtggcagcgtctttccatcacccgtgactggttcacctgcaccaaaactgctatctattccaacgatccgaaccacaccaacgcatggcgggcagatgccgtaccgtggtcagagaacaacaccgaggcattcgccgggctgcacaaccagggtaagcgcatcatcctggtgttcgatgaggcatccaacattgccgatctggtgtgggaagtagctgagggggcgctgacggatgagaacacggaaattatctggattgcgtttggtaacccgacccgtaacaccggtcgcttccgcgagtgcttccgcaagtttaaacaccgctggcgcacaaagcagatagacagccggacggtggagggcaccaacaaagaacagatcaaaaagtgggaagaagatatgggggaagacagcgacttcttcaaaatccgtgtgcgcggtattttcccgtcagcctctgaaacgcagttcatcccgaccggccttaccgatgctgccatgaaacggacggtgacggctgcggaggtggctcatgcgccggtaatcatcggcgttgaccctgcctattccggtgcggatgatgcggtgatctacatgcggcaggggctgcactgtaagtttttatggtctggtgccaaaaccactgatgatgtggtcatggcgaaacgtattgctgactttgaagacagcctccaggcggacgcggtgcatatcgatttcggctacggtaccggtatttattccgttggcatgaactgggggcgcgactggcagttggttcagttcaatggctcatcgactgatccgcagatgtataacaagcgcggtgagatgtataacagtgttaaaacgtggctcaagattggcggggcgctggatgatcaggaaactgccgatgatttatctactgctgaatacaaagtccgcctggacggaaaaatactgctggaatccaaagacgatattaaaaaacgcataggccgctccccgggtaaaggtgatgcgctggcgctgacattcgcctatccggtcaccaaaaaagacccgcaatttaaacagaacatctctcacggctcagtggttgccgacaacgattacgatccctacgcctga

SEQ ID NO: 279266 - DNA, 318 bp, Morganella morganii
gtgacagacgaacaggaaacctatctgctcactccgcaggaacaggctggacgcaatattgcgcatcgtgagcaggagaagcgcgctaatgctgacctgaaatcgattatgtcaacagaggaaggccgccggtttatgtggcggttactgagtaaaagtaacgtatttcactcatctttctcgccagatccttatgtggctgcctttaaagagggctgtcgtaactttggtttagagatgtttgatgggcttcatcgtgtctgcccggaactttatgcactgatggctgatgaagccgcgaaacaacaggagaaataa

SEQ ID NO: 279267 - DNA, 303 bp, Morganella morganii
atgtcacgatataaagtgttgaagaaatcctttatcaatggccgcctgctttatcccggtgaagaagttgagttcacaggtatggccggaagtaacctgtttctgattgaaaccggtgagcgcgtagctgcgaatgaaggtgccaatgccggtgacgataatcacgatggcggtgccagcactgaattaacagcgctgcaggatcagtaccagcagttgtttggtaagaagccgcatcacaatgccggtgccgaaaaactccgcgcggatatcgacgcgaaacgtaaagagcttggggtttaa

SEQ ID NO: 279268 - DNA, 561 bp, Morganella morganii
atgtgcgaaccaaccatgctggcagcggccgcaatcggcaccggcgctatgcaggcatacagccagtacacatccggtaaatttaatgcagatgtcgcaaaccagaatgccaaactgaatgaagcggcagctgatgactccattaaccggggtaatgctgaggccgcaaagcagcgttcacgcgcgcggcagctggcagggactcaggcggccaccatgtcagcaaacggcgttgatctcggtgctggcggtgcgctggatatcttcggcgacactgcggccatgggtgaactcgatgcgctcaccgtgatgaataacgcctcccgcgaagcatacggctataagttgcaggcggcaaatgaccggctcaatgcgaagatgtcgcgccgggaaggaaacataggagccattggtaccattttgaccacgccgttaaaggcatggggtgcgtataagattgctggtggtgagtgggatccattttctgatgccgccaagaaaacagcaggctcaggggcgggtccgaacatgttcagtaatatgcgctcaggcatcttttaa

SEQ ID NO: 279269 - DNA, 1119 bp, Morganella morganii
atggccgccgccgctgccgatatggctccgaacatcttcggcgtggccgtgggaggcagccgctggggcggtatcccgaaagcaattggtgcaggtatgagcctggcagcctccgccaccaaaattactgcggataatatcagccagtctgaagcatggcgccgccgccgtcaggaatgggaaatccagaaaaataatgccgaatctgaaatcagacagattgatgcccaactggaagccctggctgtccgccgtaccgccacagagatgcagcgcgaacacatggaaatccagcaggcgcagactcaggcacaactggaattcctgcagcgcaaattcagtaataaagcgctctacagctggctgcgcggtcgtctggcatccatctattaccgcttctatgacctgacagcggcacgctgcatgatggcggaaaaagcttacgcatggcagaccaatgatacggctacccgctacatcaaatcaggcgcatggcagagcaataacgccgggctgatggccggggaatctttgctgctgaacctggcagagatggaacaggcatggctgaaacgggatagtcgctcactggaggtcacccgtactgtttctctggcggcagtgtaccgtactgacaatgtgactctggcagaaggaattgctgacctcctgaaaggtaatggcagcgggaatataccggcatcaaccgggctttcaatgaccgccgataaccaattgcatgccgcgttcaatctgaaagcactgaacattaaagatgactaccctgaggctctgggcacaacacgccgtatcaaacagatcagcgtgacattaccggcactcgtagagccctatcaggatatgcgggccatattccgctatggcggtaactcgttgccggccggctgcaaagccattgcgctatcccacggtatcaatgatgacggcctgttccggcttgatttcaatgacggccgctggctgccgtttgaaggtatcccggtggatgatgataacagcctgaccctgagcttcccggacgcaaccggtgagaagcagaaaccactgctactcagcctgaccgacatcatcattcatatccgttacaccatttgttaa

SEQ ID NO: 279270 - DNA, 408 bp, Morganella morganii
atgcacagcgcaataactctgaccctcccgttcccgccgagcatgaacacttactggcgctccccatcgcggggagccttaaaaggccgggtgctgatcagcgaaaacggccgccggttccgtctgaatgttattgctgacatcctggatcattttaacggccggacaccgaaaccggtcaccggtgatatcagcctgaagctgttgctgttcccgccatcgaatcaccgccgggatctggataacttcatcaaggcgatacaggacgcactgacacatgccggtatctggaatgacgacagccaggtaaagcatcttgatattgaatggggtgaaaaagtcgctggtggtaaatccgtggtgacgatcagcccctatgtaaaacgcgcagtatacggctgcgcttaa

SEQ ID NO: 279271 - DNA, 396 bp, Morganella morganii
atgattctttatctcagaatcgcaactgatatcccggcgggtactgcaatcacgacccgctacatcatggacaaatacaaagtgtcacgcagtacaagccggaacgcattagctgttctggctcatataggcgccgctgaggaaataagccgtatccacacagagggtactgcttactcgctgtcacctgacgcggcagataaggcacagagatacagaaagctggtgatcatcatgcgggaaaacccgaatgaggtccggcgcaacaacggcccgatcctgtccagtccggcagatatggcagaacgggggtttgtatctgcgcataaccggttgtttatggcgctggcggcaaagcgccgggagatgaaacagagctgcggggtgatggcgtga

SEQ ID NO: 279272 - DNA, 1137 bp, Morganella morganii
atggattaccaactgattggcggccgctgtgaacatgccttaaaaaaccttccggataactcagtggattcaatcgtaaccgatcccccgtatggcatcgggtttatgtcgaataagtgggattattcggtgccgaccgttgagcagtgggcggaatgcctgcgggtattaaagccgggcggacacttactggcatttggcggcagccggacatatcaccgcctggtggtaaacatcgaggatgctggttttgagatacgtgatcaaattatgtggatttacggcagtggcttcccgaaatcgaaaaaccttgatggtgagcataagggcaaaggaacggcattaaaaccggcccatgagcccattgtcatggcgcgtaaaccgttcagcggcacgattctggataatgtcacggagttcggaaccggcgccctgaatattgacctgtgccgtataccgacagaagaaatgctggctggtggttcgggcggtttactgtctgatgttcgtgatggtaaagcaccagcagggaatgagtgggcacagaacaatgaggggcgctggcctgcaaatgtgattcatgacggcagccacgaagtgataactgcatttcctgatgcaaaagggcagcagggaaaggccaaaaatgactgctcagacaatggcaacagagtgtacggcgaacttaaaaatgtagtttcaaacccggagccacgcattgaatctgcaacatcagcggcaaggtttttttactgcgcaaaagttagtaaatcagatcgcgatgcaggtatggatcggtttgttgccgcctctgcttcagaaatgaccggtggccgcgcagagggcagcgttggaatcaataatccgagagccggtgccggacgcaccagtggcgccaaaaacacacatccgacagtgaagcctgtggatttaatgcgctatctctgccgtctggtaacgcctgcaggcgggactgtacttgatccgttcatggggtccggtagcacaggaaaagcggccattgcggaagggttccggtttatcgggattgagatggatcctgaccatctggttacagcagcggcccgcattggtcatgcagtgaaggaaatggagaaaacaggggaggctgcgtga

SEQ ID NO: 279273 - DNA, 249 bp, Morganella morganii
atgaacatgcgctcagaaagcaaagagatttacggcgtgagtgtgcttccggtgctggctgtcctgcatcaaatccgccggtggtgggtactgcatgacctgaaagaccactggaacagccgccataaggtaatccgcatttgccacagtcgtggctgggatgacctcattcggttccaaaatatcgagcggcagtatttcatgacccgcgccacagctaaatgctaccagcacaagggggttatctga

SEQ ID NO: 279274 - DNA, 885 bp, Morganella morganii
atgagtatgattttaactgcgcgggctttgcagataaaaaccggcaatgcgctacgcaaactggtactggtaaagctggctgataacgccaacgaccagggcgagtcgtggccgtccgtgccgtacattgctgagcagtgcgaaatgtcagagcgctcagtacagaaccacattaacgctctggtggaaatggggctggttcgtatcgaatcccggaaatcggccaacggtctgaaccagtcaaacatctatcatctgcgtctgaataccgccgttgtgagtggtgaatctcctgcaccatatggtgcaaatcctgcgggggtgagtggtgcaaatggttccgggactggtgcaggagattcaccaggtggtgcaactggttccggtagtggtgcaggagctgcacccagaatcagtaatgatccaatcatagatccagataataaaaatattaatcctgttcgcggaaaagcgaaaagcaaaaccgtgatgccggaaaacttcgccccgtcaccggaacacactgaacgggcaaaaactgccggattggatgttcaggatgagtttggcaaattcagggactaccacgccagcaagggcacccaatacgctgactggaacgctgggtttaattactggctgagacaggctgaaggatttaaacgcgctgcggactcaaagaacatcgacaccaccgagtgcgatgaagtcttcagaaaaatgttctcatcctccaactggaagccagaaaaccgcgtgcaggaactggtttacaagcataaatcacatattggccggatgaatgaaattgccggacgcgcagcatttcgcgggtactggaaacaggccacagagcaggccgcaaaagaacgggaggcagcatga

SEQ ID NO: 279275 - DNA, 465 bp, Morganella morganii
atgaagaatgaatcactgaaagaagtcgtaaaaaagatgtgctgcgccatgccgggtgggcgggaagcactggccggagcgctggggatgtcactgacgacattcaacaacaaactgtatgagaagaacggctgccggtttttcgacaatgacgaactggaagcgatggaagatctgaccaaaacccgtcacctggtcgaataccacatggaccgccacggcatgacaccaatgccagatgtgtcaccagaagatatcgacaaagttgaattatttgatatccggatgaccctttcagccttacgggcagatctggaattacatatcgataaaagtctgaaggacggaaagttaacccgggaggaagtcaggggtatgtataaaaaatcaggaaaggtatttgcttactttttggggtttgtcgggagtcttgacgctgtattcggggttccggatgaaaagtga

SEQ ID NO: 279276 - DNA, 207 bp, Morganella morganii
atgaccgcaaacgatgtcgaaatttacttcggaagcgccaacaaagtagctgatttttttgggataacccgagaagcattttaccaatggaaaaaacgtccgggagggctaatccctaaaagcagggcattagaagcagcctgtcgtactggcggaaaactgaaattcgacccctctttttacaaacagggtaccaaagctatctaa

SEQ ID NO: 279277 - DNA, 633 bp, Morganella morganii
atggatactgttggtagcagaataaaaaggctcaggaaaacaaccaagacaactcaaaatgatcttgggaagtactgcggtgtgtccggtgttgcagtaggttactgggaaaaggaccttaatttaccaaatggagatgccttaataagattggcaaagtatttcaacactaccgaagcttatatcctctatggtattccatcgaagcaggctaatgcagttgttaccacaatgaaaagactacctattttgtcatacgtacaagcagggaaattcactgaaagcatccctgcagaaatatatgatgaagctattgactatatcgaaacgtcaatgaaggtatcccctggaagctttgcgttaattgttagaggggattccatgacaaacccagcaggaatgccatccataccagaaggagttaaagttatagttgaccccagtgaagagccagtgcatggaaagattgttgtcgcccgcctagacggaaccagtgaagtaacagtaaaaaaacttgtttttgatggccccaataaatacctatcaccactcaacccacgatacgacaatatccccatcaacggaaactgcgaaattgttggtgttgtgaagggtgttcaatacgagctttaa

SEQ ID NO: 279278 - DNA, 138 bp, Morganella morganii
atgcaaacagaaccaatcatcaccactaacaacatgtcagtagacgacgttgccatgtggatcaccgaaaaagccaaggcctttcacaaactgcaatcactccgtacagaacgcgaaagagcaatccgcgatcactaa

SEQ ID NO: 279279 - DNA, 480 bp, Morganella morganii
atgaaacccatcctcgatatgtgctgcggcagccggatgtttatgcacgataagcaagatccgcgtgtgttgttcagtgatatcagaaatgaagaacataccctgtgtgatggccgtctgttggaaattacaccggatatcattgctgactttaaaaacctgccgttcccggatgaaacattttaccaggtactgtttgatccgccccacctcactcgggttggtaaaaatagttggatgtttaaaaaatacggctcactggataagcactcatggcgttctgatcttgctgccggtttcagagaagcattcagggtgttgcggccacacggcagtttaatttttaagtggaatgaaacgcagatatgggcaagccatattcttgagctgaccgaatataaacctaccattgtgcagcgtgtcgggaagaacgataaaacacactggatggtattctacaaaggggaagaaaatggataa

SEQ ID NO: 279280 - DNA, 1089 bp, Morganella morganii
atgcattcatctttcgattcagccgttggagaacccgctagctggattagccattatattgagttgcatcggggctttccccatgtgtctttctccgatcacattaaaaggcgacgtagtgaaagagccgcccgcgcgagatcgcttaaactgatttatcttgatacgaacgcatggaagtgcgtatcggacttcaggctgaacaaggcgagccttacacccgcaatgaagacgtttgggacaagtattgaacgagctgttcagacgggacgatttgtttttcccatcggtcttccgacatactttgagcttgactcgatgacagacccggcgacaagagaaacacttactcgactggttgatgaactttctcaagggatctgcatcgctcccttttccgaacgcgtcggatctgagttgcgcaaactgcgtatgagtaagctggacgaacctgaagggctagaagacttcttatgcagtcccatcgagttgatgggaataccgacgatttccacactcggggatgtagataaagaaacctttaacaaggctgtctttgatgccctgtcagaacagccattttcatttcagttggaaattgcgcgcacttctcttggggcgaagtgggataactctcgtggaattacagaactcaatgacggaaaggccaaacatcaatcagagatagcgaaccttaacaccggcatatttattgaattaactggctgcatcactacatggtttagagaggaagagatacccatttctttattcgatatcaaacgatacgcacttgaggcccaataccactggcataggatgccagactcacgagcaatgccaacgctaagggtattgagttcattatatgggttgatgcgatacgatccgaaacgccgttacaagaacggcgatccaaacgactttatggtggcggcatccgcacttcctgtagcggacgctctttatactgatagaaaactcgccaatctactgtccgataaaagaattgagctgaacagattctcagactgcacagtggtcagtgggtttgaggacatggcggcgcatctcgaggaacaactttaa

SEQ ID NO: 279281 - DNA, 1071 bp, Morganella morganii; identical to SEQ ID NO: 14536

SEQ ID NO: 279282 - DNA, 1593 bp, Morganella morganii
atgttaccgtggtttcgtaaatcgctttcccggaaagcggaagagaaaacattgcgtgtttccccgggaaacaggcaggaaaggccattatttatccgtgacagtgacggcttttatttaccgcaggcagctgacgtattgctgaccacaccgcagcggcaaaactggttacagcaaatcagccgggtggtagcgttaccggataaccagtaccgggcactttgcctgtctcctttgcagacgctggcagaacgacttcagtgtgtgccggcatcaaaaaccgggaaatatgccggcgaagggggattgctggatttaacgctgaatacgacagcctggtgtatgcggatgtcccagaaagagatgctgccccgcgggcttccgtcggaagagcagagccgtcagttcagcgcctggaatgtgtgtgttttttataccggactgttttactggttaccgttaacggcacagtttgagggacaactgaacagcctgtcggcgtggcagccggggatgagtgcgcccaccgtaccgtatcgttttcgctttcatgagccggtgccggatatgacgcattttcgccggacgacgggggccatgatggctttccggctattaccggagaaggtaatccactggttgtcgggtacaccaaaggcgcttcaggcgttgtctgacgtggtgaccgagccggtaaacggtgataatgatttacagcgtgtgctgaatgaggctctggctgcgttccccgccggtgcattgccggcattttcttccgttgtttctatgtcagcgcctgatgcttcgtcttcagtgctatcagggcagccggagaatgatatcgcgtcattggcgcctgctgaattggcgcaaaagccacaacctgaaactccgtctgtaacatctgtattgcctccggagtctgttacttcagaaaaaacagagaacggaattcactgcgatataccgctaatggtagttgcagaagcagaaggtgcggttgtccatggggcacttgattctgctgatgaaaaaactgtctcagatatgtctcctccgttatctgaggatatgaaatatgcacttgaattatcaggtttaatgccggaaatcttatctgatactcagacgggcaatcgtgatgagaaggatgaacagcgcgaaaactgtctgagtataaaaaatgaaggagaggctttctgggcgtggtttaagtccggattattgggcggaaaactggcaataaatacgccggatgcgaaggttcactgtgtcatggagtatttgttttgccagagtccggctgttttttatcagtacatacaggaggcgggtaaaaatccggatgatatcggccatattatttcttcttttgaatcccttaaattgcaccggattattcgtcatgatacccgacaaacagggcatttcagggctcgaatttatggtgaaaaactgaatccgctgagtgataacaaaacattaattacgttatcccataaaaaaatcaatggttacatgattaaaggacgtcagatttttggcatgaatatgccggaggaatcattgtttattcgtattgtcggaagttaa

SEQ ID NO: 279283 - DNA, 327 bp, Morganella morganii
atgagatgtgaatttgggcagggtgtgagggagtgggctcaggatttttggaatgaaattctgtttcctttttttgtcacagccggacttttgttgccactgattctggttgtgggcgttttcctggtctgggatgaacagcgccaggctgagtgggggcgttattacctgacggaatgtcagttggtggaaagaaacagaaatgcgggcttctggtcaggtcgggaaaatattctgcaatgcggaatgacccgggagcatgtgaatgtggacgcgtatgaaaaggccatccgtgcctggcagcagaaacagacagagacagaataa

SEQ ID NO: 279284 - DNA, 1002 bp, Morganella morganii; identical to SEQ ID NO: 238083

SEQ ID NO: 279285 - DNA, 513 bp, Morganella morganii; identical to SEQ ID NO: 103757

SEQ ID NO: 279286 - DNA, 357 bp, Morganella morganii; identical to SEQ ID NO: 103758

SEQ ID NO: 279287 - DNA, 318 bp, Morganella morganii; identical to SEQ ID NO: 103760

SEQ ID NO: 279288 - DNA, 195 bp, Morganella morganii; identical to SEQ ID NO: 190863

SEQ ID NO: 279289 - DNA, 300 bp, Morganella morganii; identical to SEQ ID NO: 16654

SEQ ID NO: 279290 - DNA, 408 bp, Morganella morganii; identical to SEQ ID NO: 16655

SEQ ID NO: 279291 - DNA, 1515 bp, Morganella morganii
atgatgacaaacagttatctcgagtattttctcacgctgctggcctgggtggtgaataacggattgtggtcggtactgaccagcaccgggctgtttgcgctgccgctggtctttaaagtgctggggatctggctgaaagtgcgggaagagggggaggatgagggtaacaaaggttcactggcaattgtgcgtatcgagaacgcgctttacggcgcctttgtggtgatcctgttttgttgtgtgccgttgatggaggtgagtgtcagtaccctgcaatttgataccagccggaccaaaacctgcggcacctggaccccggtgaagccggcggaatccggttacagcggcgtggtgtcgtcactggataatcagacagccaaaatcccgctgtggtggatgctggtacataagctgtcgaaaggggtgactcaggcggcggtggccagcattccgtgccggccggatttgcgtcaggtgcgttttgaggtgcagcacagcaacattaaaaatccggcgctggctgccgcacttcaggattttacggatgactgttactcacgtgccctgtatgactggaaagcgaaagatcagggaaaaacacaggatgaaaaaacgttacaggatatcacctggataggctcggccacctttatgaaaggggaatatcatcagatccagtcacggacaccgcgggcgggctttccctgggatgccgaccgggatgacgggtatgcgaatgtcaacggcaacggttacccgacctgttatcagtggtggaatgatgcgaatgcagggttactgaaacttgtcaaagagcagaccgatgaagggatgtggctgcgtgcccgggcggcgatgaagctgattaataaaaactcgaaagagtttgaggaggccatcgtccgccggctggtgagtccggcgaatctggatgtctccggcggccgggtataccggggatacgggggtaatgcggatatgacggtgatgaatgagctggccagaatgggaggggtagccgggacttcgctggcgtcactgggggcattccctgcctttgatacgatgcgacagtccttaccgatggtgcaggggctgatgttaatggcggtgtatatcatgatcccgatggtgctgatgttttcggcgtatgaatttaagacggcgataacggtgacgtttgtgatatttgcgctgaactttctgacattctggtgggagctggcacgctggatagacagctggatgatggaggcactgtataattccgatacgcacagtcagtggaatatgaacgggcttcagaacacgtctgatgatgtcattatgaacctggtaatgggaacgatgtttttggtgttgccggcgttgtggttgacagcatttggttgggctggagctaaagttgggtccgagctaggtaatatgacatctaacgcgacttcacctgcgcatagtgcgggggggaaaggaggacagttagcagaacaagctatttctaaaaaagttaactaa

SEQ ID NO: 279292 - DNA, 339 bp, Morganella morganii; identical to SEQ ID NO: 103768

SEQ ID NO: 279293 - DNA, 1443 bp, Morganella morganii; identical to SEQ ID NO: 190869

SEQ ID NO: 279294 - DNA, 975 bp, Morganella morganii
atgacccgacaatcacatcgccggcgtttggcgggggctttgttactcggttgttcactggtgccggtggcggaagccagtctgagtaccgccactctggtcgcttctgcggcctcaccgtcgtgtatcagctggcgtatcagcgggatttgctactggctgaagtgtggctggggcggctgccgtatccggacatctgtccgggtgtcacattttattccgcaggcggtggtctcggcctaccatgccccgggtgaaaacccgtggcgggaaatgtcactggtcagcggggcggccggcgggattgaaaatgccgtgaccggcgtgctgagcggggtatctgccgggggcggaaacagtgaacagaagtttgaggcaaaacgtaaaaccgccctgcactttttttatgcggatgctatcggtcatccggcaaccacccttatcggcggcagtattccggggtattcctgtgacagcgcagccacaccgctgtttccttattacctgagcacgctcgacagtgtgccgtggcggctcggtgtgccggaaatggcgtatccggaagcgataattcccgggaaacgggaaatcggggggcagagccggggcaacatgtggggaaatctctatccgcgcagcggttttgtcaaccagcaggacggggataaagcggcggctgtggtggcgcagcgcgtggcagatattatgacccgcaccgggcaggcgcatacctatgtgcccctgaaaggcaaccgccgggatggctattggccgccggacgcggtgacggagaataccgggacaaaaaaccataaatggcagcgcctgtcgccggggctgaaaaacagctgtgcggtgtttccggatgagggcggagcacaggcacaggacggtaattatgcctgggcattgtggcagccgtacagctgctgcaagcgcatggggcaaaaatttctgtacagcacaacgttttaa

SEQ ID NO: 279295 - DNA, 441 bp, Morganella morganii; identical to SEQ ID NO: 103771

SEQ ID NO: 279296 - DNA, 2076 bp, Morganella morganii
atgaaaacgacgggagttaaagtaacgcttttgtcgctggttgtcagttattcctgcgctttacaggccaaaaacgtgtcactgggggacacggccgtggccacggggcagcacagtacggctgtcggtgagggcagtatggcgctggggaacaatatgacggcggaacaggcgcaggcggcgatgaaagcccagaatgccctgttgcagaacagggcgcaggcgcatgagcagtacatgcagacgcaggccctgtttgacagtaaatcgctggcgaacagcaatattctggagcgtcaggaagcgatgaaaccgttgtggcagcaggggcaggctgaccgtctggctcaggaagtgaaaaaacgggttgagcaggatacgtcggtcagtaatgacacgcagttttatgtcagttatgttaatgcctatattgaagcgaaaaccagaagtgctctggttaatgaaaccatcaaagagaaaaccggttctcagattacgaccaactatcagggtgtggccctgtccccggtactgagtgccggccacagtgataaagcgatgctgtggtcggatgcggtcacggacagcgagcagaagaaacaattatcccgtttacacctgaataccgcggccctgaagggcgttgccggttatcaggaagagctggccaaaatcgccctgatcacctctgcggacgggaaaaagaatctgtatcaggcttatcagaaaaatgcccggcagcaaattgagcaggggctcaccggggtgacagaggccgggaagcagatcctgtcagagctgtatctggataacatcgatgaaggcacctttaatcagatggtcagcggtattttcacccgctatgagaatcagctgaactacctgatccagctggataaggtcaacagtttatcgccggacagcccggattatgccaaagagttacagcaactgctggtactggaaagccgtccccgggataacaccgtcgggctgaataccaacccggaggcgctgaaacaaaaagtggatcagtaccttcaggacaatgcgctcagtcacacacaggccatgtcgtcacaggccacacagctgaaacagcagttatcggcggaaaaagccgtcaccgatcaggcactgaagcaggcagaaacgcaactctcccggctggaaaaggatctctccgcgctggatacaaagttgtctgatttgcgtccgacgcaatccgagctggaaaacatccgggatctggagaaggtgaaagccgaactggcgcagaaacaggcggaatatcaggcggcggataaagccctgaatgaggcgcagagtacgctgagtcagggtaaacaggctgttgcggtcggggataagagtctggcgctgggcgaaaaatccgtggcactgagtgtggatgcccgggcgctggcgaaaaacagtgtggcactgggggacggcagcctggctgaccgggataacagcgtgtccgtcggccgtgaaggtcaggaacgttttctgacgcatgtggcggccggcattgcaaaaacggatgcggtcaacaaagggcaactggatgaggagcgggatgcgcgtattgccggcgataagcagacgctgaaacaggccatggactacaccgatgtgagcattcagtacagtgaggcgaagataaacaagcggattacggaagagcagcaggcccgtattgagggggaggaacagaccctggcggccgcaaaccgctataccgatgagacgttcgggcaggtgacccacacggtgctggacaatgcccggcagtataccgaccagcgtttcagtcagctggacaataaaatcagtcaggtggagaaacgggccaatgcggggattgccggggtgaccgcaatatcttccattccgtatgtgaacagtgagcgtttttcgttcgggatggcgatggggcattaccgtgatgcacaggcgatagccaccggggtgcagtataagccgacggccaataccaatgtgcgcctgaatgcgtcatggaataacggcggcgataccagtatcggcgccgggtttgcggtgggctggtaa

SEQ ID NO: 279297 - DNA, 2868 bp, Morganella morganii; identical to SEQ ID NO: 190873

SEQ ID NO: 279298 - DNA, 438 bp, Morganella morganii; identical to SEQ ID NO: 14572

SEQ ID NO: 279299 - DNA, 486 bp, Morganella morganii
gtgacgtattttgcgaagccgggggtgctggctgtgacgccggtgacgtttccgctggtgtttgtgttcagtgccggacaggccggttgtacaggaagtcatttttgcctgacggtggccggtcatcaggtgtttgatgaggagcaacagcagctgattgccggcatgtcaccggcgacgatacagctggcgtggcagagtaccgccggtgagacgcccggggcggttctgtctgtgggccgtcaccgggtggggctgagtgacaacgacattaccgtttaccggtttgccccgcgggatgaggcgtggccgcaggacagtgactgggatcgcctgctgtacaccgtttttaaaggggaggcgccggataaagccggctggcaatgtgtgcctttttcactatctgaactgagctgtcacggtgagtttgcccggctgacctgccggggggcgatcctgaagggcgcgggaggcgtcatatcatga

SEQ ID NO: 279300 - DNA, 1530 bp, Morganella morganii
atgaaagtgaaatccaatacgctggtcaaaattctggtgccgtccgcactggcgttggcggtgctgattggtatcaaaagctgccagcccgacacgccggtcaccggcagcggacaggacaacctgtctcagtcaatcaatgaccttgacccaggggagctgaagtcactcgggattgagggggataccccggccgatacactgaggacgctgattggcactatgaaaacggtacgtgaccgtcaggcggaattgatcgcccagaatgagaaattgctggaagagaatgcgcagctgcgtaaccggcagcagaatgtgtcggggcagatccagtctgcggtggcttccgtccgtcaggaagcggagagtcagcagcgtgccctgcaacaggagcagcagacactgatgcggcgtctggatagcctgggggaaacgctgacagcatcaggtggtcagccggctcagggcagcggacaaggcgatattccgctgggactggggctggataccgggggcagcggactgacggtgaaagacgggttgctgtgggctgagccgcaggatgcacaaccggctgaaccggggcggatggtgaacggacaaccggctgaaccggggcggatggtgaacggacaaccggctaaaccggcgtttccgacctcttttctggaggataacgccattacccgtcagaaagcggaactggaccgggtggccaaaaatcagcgcacgctctccggtacagtggacggtgaggcccataccgaaccggcgtacacgataccggagaatgccaccctggtgggcagccaggcgatgacggcgttgctggggcgggtgcccattgacggtaaagtgaccgatccgtatccgttcaaggtggtggtgggaaaagacaacctcacggcgaacggcattgagttaccggatgtggaaggggcggtgatcagcggctcggccaccggtgactggacattgtcctgtgtgcgcggggatatcacctcgatcacctttgtttttacggacggcacgatctgcacggtgccgaagccggctgaccggacggacggcggcagtcaggccaacagcggacagaatgcccgtaataacggcgggtcgctcggctggatttcagatgagagcgggatcccgtgtatcagcggtgaacgtaaaaccaatgccggcacctatctgccgaccctgtttgccctgacggcagcggcctcggccggggatgcgatgtcgcagagtcagtataccgcgcagaacaacgggtacggtatcacctcctcgctctccggggatgcggggaaagcggcgctgggcagtgccatcggcggcgggtttaaggatgtggcggactgggtgaaatcccgctacgggcagacctttgatgcggtgtatgtgccgccggggcagaaagtcgcggtgcatatcagccgtcagatcccggtggattatgaatcgcagggacgccgggtgaattacggtttttcactgacagagggtgaggaaggaggtctggagtga

SEQ ID NO: 279301 - DNA, 897 bp, Morganella morganii
atgagtataaaacgtcatctgacggcctgtgctctggggatttcggcggtgttttctgtggccgctctgccgctgccggtgcaggcggtagagctggtccgctgggagcgtattccgttaccggtttctctgcatgtgggggaagagcgcattgtgtttgtggaaaaaaatgtgcgtgtcggttttccaccgtctctgaatgagaaactgcggatccagagtaccggaggggcggtgtacctgcgggcggaaagcgccttcccgcagacccgccttcagttacaggatgtggaaagcggggaaatcctgttgctggatgtgacggccactgccggtaaagggaagctggagccggtgcgggtggtgtacagcggtgaagtcagtacgcagcgtgacagtcagagcgtcagacgcagcgggcaggctgcgggggcagcagccgatgccgtaccggaaagcgtggaccgcaaagcgaaaacccgttatccggcgccgttaccggtcttactgacccgttatgccgcccagagtctgtatgcaccgttaagaacagtggagccggtgtccggcgtacaacctttgccactgaccttaccaaaaacactgacagcactctacccgtctgaaccactgatcgcgcggccgctggccggctggcaggcggcggagtaccgggtggtggcggtgaaactgaccaatcagtccgctcagaaagtcgtgctggatccccgtcagttgcaggggcagtttgtcagcgccacgttccagcatcagtggctggacgcgaagggcacaccggaggataccaccacagtgtatctggtgatgaaaggcaaaccggataaggcgtttcctgcggagccgcctgtccggaggacgggagggaaagcccgatga

SEQ ID NO: 279302 - DNA, 645 bp, Morganella morganii; identical to SEQ ID NO: 103778

SEQ ID NO: 279303 - DNA, 417 bp, Morganella morganii; identical to SEQ ID NO: 14567

SEQ ID NO: 279304 - DNA, 369 bp, Morganella morganii; identical to SEQ ID NO: 103780

SEQ ID NO: 279305 - DNA, 240 bp, Morganella morganii; identical to SEQ ID NO: 103781

SEQ ID NO: 279306 - DNA, 327 bp, Morganella morganii; identical to SEQ ID NO: 14564

SEQ ID NO: 279307 - DNA, 609 bp, Morganella morganii; identical to SEQ ID NO: 14563

SEQ ID NO: 279308 - DNA, 750 bp, Morganella morganii; identical to SEQ ID NO: 14562

SEQ ID NO: 279309 - DNA, 2148 bp, Morganella morganii; identical to SEQ ID NO: 103785

SEQ ID NO: 279310 - DNA, 198 bp, Morganella morganii; identical to SEQ ID NO: 14560

SEQ ID NO: 279311 - DNA, 555 bp, Morganella morganii
atgcgaaataatcctgaagaaaagacaacgcgagccttttatcccctgcccgtcttggggatgctgctgttttgcgcagccggcggcagtcaggcggcattaacggtggtggcggattatggcgggcaaccggcagcacctttttatgacgcgataaataatgccccgaatgaatggacagcaaagccggcgtcccgccctctgccgtccgtgatggccccgtcaatggtgttgccggttgagacaccggaaatgacgccgggggaggtggatgaccgtgtcctgcatttaccggggattggggcactgtatctggtgggggatgatccgttatcccgggcatggctcacacagcacgcagcccagctgaatgcaatgaatgcggccgggatggtggtgaatgtgaaatcggaaaccgggttacaggcgcttcaggcgctggctcagggaggactgctctccccagcttctggcaccgatttagctcaccgtcttcagttatcacattacccagttctgatcacggaaaccgggttgacccagcaggtgaagtaa

SEQ ID NO: 279312 - DNA, 639 bp, Morganella morganii; identical to SEQ ID NO: 14558

SEQ ID NO: 279313 - DNA, 735 bp, Morganella morganii; identical to SEQ ID NO: 103789

SEQ ID NO: 279314 - DNA, 741 bp, Morganella morganii; identical to SEQ ID NO: 190889

SEQ ID NO: 279315 - DNA, 663 bp, Morganella morganii; identical to SEQ ID NO: 103791

SEQ ID NO: 279316 - DNA, 1938 bp, Morganella morganii; identical to SEQ ID NO: 14554

SEQ ID NO: 279317 - DNA, 528 bp, Morganella morganii
atggcactcaccgataaacaagaaatgttttgtcgtgagtacctcgtagatttgaacgctacacaggcggctattcgtgcggggtacagtgataaaactgcacgctcgcaggctaaccgaatgttgacaaatgttgacatcgaaaaacggattcaggaactgatgagcagccgcagtgagcaacttaaggttgatgctgaatatgtgctgaggcgcctggttgaaatagaccagatggatgttctcgacattatgaccgatgacatgagcataaggccggtttccgactggcctgcatcatggcggcgctacctgagcggcttcgaccttgctgatatgtttgaagggcgtggtgaagatcgtgaaatggtcggcatcctgaagaaaataaaatggcctgacaaggttaggaaccttgaattgctcggtaagcacatatctgtccaggcattccgtgagcaggttaaaaacgagcatgatgttgtcggaactctatctgacctgatggacgaactgtcgagcaaataa

SEQ ID NO: 279318 - DNA, 156 bp, Morganella morganii
atgattacaacaaccattagttacaaaatgaccctgcgccggtatatgaagccggtattatttatcgccgcctttctgccgggcacgtggttagcaagcctgtgttttaagaaagaaatcgtatttgaaaggcaggaggttgaattgaatggctga

SEQ ID NO: 279319 - DNA, 168 bp, Morganella morganii
atgaaacaggaacacgattcaatttctaaatctcctatcatcgggaaaagtcccgaggagatagtagagcatttcaataaatataacttcgtggacgatcacggacaccgacttgagttctgtcaggacttcatcgacttaatccgggcggcaacaacgcctcgctaa

SEQ ID NO: 279320 - DNA, 450 bp, Morganella morganii
atgagcaccgcaacaaagatatggctcggcgtttgcggaatactggctgtcagtctgctgcttatcctgcatctgtatggtggcttgaaggataactatcagttgctgtcctctcagtttgctgagcaggtcgccatcaacaaagactataaatcccgcattcagtcacttcacgaactcgacaccatgtacacgcaggagttaaccaatgcaaaaacggaaattgataacctgcgtgatgctgttaagtctggcaacaagcgggtgtacatcaaagccgagtgtccaaagagcggaaccaataccaccgaaagcggacgcgatgaagccgccccacgacttagcgaagcaactgaacaagattattggcgtctcagagaaatgatggctgagaacgaaaagcagaccctgtatctgcagggctacataaaaactcagtgtctgaaatga

SEQ ID NO: 279321 - DNA, 393 bp, Morganella morganii
atgagcaaattccgattcagtcagcgaagcgagaataacctgaagggtgtcaattccgacctggtgaaggtgattcgtcgcgcgctggagattacaccggttgatttcattgttattgaaggcctgcgcacacaagctcgccaaaaagaattggtcgcagctggtaaatcacaaacaaataacagccgacacctgaccggccatgcagtcgacattatcccagttaacaccaagtggcagattgaagaattcaagccgctgctgagagccgtcaagcaggccgctgacgagttaggtgtaaagctccggttcggcatcaactggaagaatgacccatcactgccgattgaaacccgtttcattgatgcgcctcacgttgagattccggtatga

SEQ ID NO: 279322 - DNA, 309 bp, Morganella morganii; identical to SEQ ID NO: 278310

SEQ ID NO: 279323 - DNA, 609 bp, Morganella morganii
atgagagacgaacctttttacctgttggcgcacgttgccaataaaaatgacctgcggcgggtgtggtgtggtgcccgtaaaaatatctctgacggcaagcgggtgtgggttcgttacatgctcatgacgtggggtaatgcgtacggtggcaatgaatacggctcaagcgagtgcagcgttattggtcgcctgatgatccgcactgagtggagtgatactgagggtgaaagaatcatcaaggtggtgaaagacctgcataaaatgggttatcgcggagatgagttgttcaaaaagtctcacgaaatacttaatccgaagaaaacaataaacgacatcattgctctcgccaaagaatcagatgatgccgcttttgttgaaaaggtaatgaccgacaggtttaaaaaagataacccaatccgtcatgtggctattaaacggtattgtgagcgcaaatacccgcaaaagatggcgcgtgagcttactttcatgacaggaatcagcatccagcagggaaccaggcgcatcgaatgggcagagagactactggaagaggagatgttttacgcaatggagcgcgagttaaaacgagaggagtgtccgatttcataa

SEQ ID NO: 279324 - DNA, 201 bp, Morganella morganii
atgcgacctgaaatcacatcgataccggaaatgctgattaagcactacgggaatcaaactgcattggcgaacgatctgggagtaaaccggcatacggtcaggaagtttcaccgcgatacccggtgtgaaatgcacgttatctacaacggcgtgctgatgaccaaatccaagatgaaaggcaaccaggggaaagagcaatga

SEQ ID NO: 279325 - DNA, 594 bp, Morganella morganii
gtggcaaagcaatcgcggcgaaagtgcctgatatgccgggcatggtttcacccgaaattaagtaacgaatggtggtgctgtccggagcatggcgctgagttggcaataaagcgacgaagcagggaaagggaaaaggctgaggccaaattaaaaaaggagcagcagcagaaaaaacgtgaagaaaaagacaaactcaaaatccgcaagttagcagtaaaacccctctcatatttcgcaaaacaagcacagaccgcattcaacgcatacatccgggaaagagataaagaccttccgtgtatcagctgtggtcgtcaccacacaggtcaatatcacgctgggcactatcgaaccaccggagccaatccggaactgcggtttgatgaggataacgtccataaacaatgcgccccatgtaataaccatctatcgggaaacatcgaaaactacacaccgcggctgattgagaaaattggtcaggaacgcttcgaccgtctgatgggtgttcatgaattgccgaagtggaagcgggatgactacgagcggatacgtgatgagtaccggcgaaaactgaaggagctgaagaatgcgacctga

SEQ ID NO: 279326 - DNA, 411 bp, Morganella morganii
atgacaaacaatatgtatatgcaatttgatttcatcatcagtgttttccgcaacaaaaaatcttttacgtctcaggatgttgctgatgccaccggctacgctgacgtcaccgcaagagcaaaaatcgctgaaatggtgagaatgggaattattcataaattgccgaaggttcttaataaagggctttatgttattgccccgatggcaaatgaaaaactggaatcatggcgagggatggagcggttcgcatttgagccggatgatgatgttttcgataaatatccgaagctgaatttcaccggtgggaaagtggtgaaaaaagccaatgtgaaagggatgggcagcgcgttcttaaagcgttttgattcgttgctgcgggaggtgcgctgtggaatgccaactgtgcagtaa

SEQ ID NO: 279327 - DNA, 198 bp, Morganella morganii
atgaaagaacctcacatacaccagcttctcaccaatgacgaagcagataacctctgcactcactacaggcgcaagggatataacccggttaagtcactgaatatcaaccatcagtatttcgacgttaccgtgtatctgccggtagtcaaatatctgaaaccaacaccacgagcaatggttaacaggatgtggcgatga

SEQ ID NO: 279328 - DNA, 447 bp, Morganella morganii
atggaaataagcatggtcaaaggcgctaacggcgtatttgtaccggcatttgagcacgacctaccgcgattaacaaagttcaaaaacggcgaaatgtacgccttcaatatcaaactctcccgcaatccatcctttcaccgaaaaatgttcgctttcttcaagttctgctttgaccactggtgtgcaaataaagcaggtctggagaatatggacgagtacagccagtttgaccgcttcaggaaggatttgacgatacttgccggattctatgagcaaacggtcaggttggacggaagtgtccgcacagaggcaaagagccttgcttacggcgatatggaatcagacgagtttgaacgctgttatcacgcgatagtcaatgccgcattaaaacacatcttccgggggtgcagtgacatcactgagaaccggttgctgtcatttttttga

SEQ ID NO: 279329 - DNA, 261 bp, Morganella morganii
atgaatgaaattatcaaatacgcgtccactggcctaatggcaatcggctatgtctggattatcgcaaaatcgtcagcgtggttttttggggaggtgctattcaggaaggcattcaagcgtaaggaaaaataccgcaaacaggcagcgataaacgagctgtatgatgcctatgagcttggcgacatgaagcccggagatgacctgaagattacaacaaaaggcggcttggtcgttttcatgtatcgcaggccggaggaatag

SEQ ID NO: 279330 - DNA, 375 bp, Morganella morganii
atgaaagcaatatcaatcagacagccgtgggcatggctgatagtcaacgggcataaagacattgaaaaccgcagctggcgcacgaagtatcgcggtcaggttcttgtccatgcatcacagggcgtaaaacgtagtgactatgacgctgcatattccttggcttgccgcctcggaattaagctgccgtaccgttcagagtttgaaaccggcggaattgtcggggtaacgaccatcaccgactgcgtggagcaaagtgaatcgccgtggttctttggtgaaaaaggtttcgtcctggcagatagccgaccgttgccgtttgtgcagatgaaagggcggttaagcttttttgaaacaggaatagagccggaggaatga

SEQ ID NO: 279331 - DNA, 201 bp, Morganella morganii
atgaaatggattaagtgttcggaaagaatgcctaagcacggactgagagtgattatagcttctgcatctggcgttacatcaggatatttcgatgatggtcgttatctgaaaaggcaggtaggcaaatggtattccgagaaccgtcttctcggtgaagacgtaacccattggatgccgctgccacaaccaccggaggagtga

SEQ ID NO: 279332 - DNA, 210 bp, Morganella morganii
atgaagggtaagggaacgaactttaaaacgctgatgtgggcgtataacgaagagcgcgtggcgcgcaaactgaaatatatcagaaactgcaaagactataaccggaagctgtataagccatacaggtgtgagcgggttatgtttcgccttttgcggctggattttaaacgtgttttcggcagggagttaaccaccaatgaaatggattaa

SEQ ID NO: 279333 - DNA, 285 bp, Morganella morganii
atggcagcaacaacgatattgcagttgctcgaaagatataacttccaggcattcatgttggccgacagacaggctccgattgatggaaaagacagggcgctgttccaccgactccatcgtgaacatgaaaaaaggctatacccacgcgggaaaacgttaacaaatctgataaggattcagcgggatttcattgaatatcgtcgcagtgaggaatatctgcaaaaactttgtgatgactacgccgtcaagcatggtggagccaccaaaagccaaggggaatcctga

SEQ ID NO: 279334 - DNA, 1386 bp, Morganella morganii
gtgattaaccaggttccgcaaagcctcgaggccgagcaaagtgttatcggcgcgttactgctagacccgcagggcgaccgcagccagatggtgctatccagacttcagccggaaatgttttaccagatatcgcaccggcagatttacgaagctatccgcgagttaaatcgcagtggtaagcccattgacctgatcactgtcactgacgcactggaaagtgccggaaaatcgaaacagacaggcgggtttgcttacctggccgaagtgagtaagggcacaccgagtgcggcaaacatcgttgcttacgcaaacaccatccgtgacaaggctattgagcggcaggcaatcgagaaggccggagaaatacagcgtctgtttaccgaagccagtgttctcagcctggccgaaaaaatcgatatggctcagacgatgctgtccgatgtggtggagagcagcaaaaccggccggcagtcaggactgacgaatatctctgccgttctggatgagtgggttatcgaggttgaggagcgattcaaagatccagatgctaaccgtggtctgaagactggcattgcgccacttgatgccatgcttgcgccgaagttcattgttcgtggatccctgttcattgttggtgcacgtccgaagatgggtaaaaccacagtccttaccgaaatggctaaaaacgtttcagattacggattgccggtcgcgttgttctcgatggaaatgaccaacaagcagctggccgaacggatgatcagccagaaatctggaatcagttccaatgccctgtatgacagcggtgatgagtacgagtgggggcttatcagcaaggcaatgggtgagttaagtgagcgtcctaacatctggcttgatgatactcctggaatgacgctggcacacattcaggcggaatgccggaaactgaaacgcaagacaggaaaaatcgggtttatcggcgttgactacctgacgctgatgaaggcaggcaaggcagaccggaacgatatcgcatacggcgaaatcacgaagggtctgaagcagctggcaaaagaactcgataccaccgttgtcctgcttactcagcttaaccgcaaactggaagacagggcagacaagcggcctatgccaagtgacagccgcgacaccggccaaatcgaacaggactgcgattactggctgggtatctacaaagattcagtctacaacgacaacgctgacaaaactctcacagagctgatcgtgcgccttaaccgacacggtaaagcgggaacggcatacgtcgagcagaaaggactgtgcatgtttgatatcgatcagactcaggcgatggtcagagccgaaccaccggcgcggcataacccaagacagaaggacttttga

SEQ ID NO: 279335 - DNA, 810 bp, Morganella morganii
atgaacagtaacgttgcatacgctgactttggagccgcacgacggcaagagaggccaacggtggcagatcttgataacggttacaccaggatagcaaatgagattttggatgctgtcatgattgccggactcaccaagcatcagctgttaatcatcatggcagtatggcgaaaaacatacggctataacaagaaaacagactggattggaaatgagcaaatggagctgatgatcggcattgataaaacgaaatgttcaacagcaaaaaatcagctgttcagaatgaaaatccttatccaggaagggcgcaaggtaggtattaacaagaacatttctgagtggaatacagatattgaccgaaacggtaaaacaattaccgaaacagtaaaggttagttttaccgaaacagtaaaatcggctttaccgaaacggtcaaacacaaaagacaataatacaaaagacaagaaagacactcccctaacccctcaagaggggaatggcgaaaaactgatttctgctaacagaaaaaatcagatcccctatctcgacatcatgaacgcattcaacgaatcagccggtgacagactgccgaacgccgaatcactgaatgacaaacgcaaacgggcgatatccaagttcctgaaagaactcaaagagccaacagtcgaagccgccagaaattattttgattatttcatgactacggcgaaggcgttttacttcggagagaatgattcaggctggagagcgagctttgattatctgctccggccggaaacggtattaaaaaccagggagggctcactgtga

SEQ ID NO: 279336 - DNA, 171 bp, Morganella morganii
atgaaacaacggtttaattacagcgctgtgcacaaaaacatcgccgaatacaacgagacacggagtgtcactgagaaaggcgcgaaagcactcagggcggcttttaacgatgctttattgcggaaagcccatagggaagaactgaccggaggtaaacggcatgaacagtaa

SEQ ID NO: 279337 - DNA, 327 bp, Morganella morganii
atggaaaatgcaaatccacgcaaatcgtttaaccggtttgtgtcaaatcatctgatggcaacagctcatcaggcgctgagaagcaccacacagacagtggttgcaaaactgctcggtgtacacgattcaacagtcttacgcagaacagaaaagttaccggagatatgcgagacattggccgcagccggtatcacagattttgttttgcctggcgagaagaaaatcagcgaggaagagtaccggtttctgtggaagcagatcggcgaactctctctgatgagaacaaaagaaaacgccccggctgttggagcagcagaggcgcattaa

SEQ ID NO: 279338 - DNA, 204 bp, Morganella morganii
atggataaaatcaaaaccccgttacagattgcacttgatgcgttcggcggaacccaaaaagacctggcgaaactggtcggaattacgccacagcgaatctcagcaatcaaaaagcatggcggaaacttgccacgcacaaaaatgaaagagttctcaaaggctactggtttgcctgttcaaaccctgtatccagacgctttctag

SEQ ID NO: 279339 - DNA, 708 bp, Morganella morganii
atggaactaacagagcgtttaaaacacctgctggcagcggagggattgaagcaaaaagacttagctgatcgacttaacaccagctcacagacagtgaataactggttgaaaagaaatgccatcagccgcgatgctgcacagcaaataagtgagatatatggatactcactcgactggcttctgaatggtgtgggtaatccaaagttggttgtgggtgagaatcagatccctgatgagaaggatttttttccaataaggacatgggatagcaaaaccccacttgataacgatgaggttgaaatacctttcttgaaagatatcgagtttgcttgcggaaacggctcttacagcgaggacgattacaatggcttcaagctgcgcttctctaaatcgaccatgcgcaagatcggagctaattcagatggcaccggtgtgattgggtttccagcacgcggtgatagcatggagcctgttataagcaacggaaccaccgtggcggtcaacacttccgacaaaaagattgtagacgggaaaatttacgccataaaccaaggaggtctgaaacgcattaagttattgcatcaaacctcagcaaataaaataataatcagaagttacaataagatagattaccctgatgaagaggttaacgcttctgacgtagagattattggccgcgtattctggtgggcagtaatggacgcctga

SEQ ID NO: 279340 - DNA, 267 bp, Morganella morganii
atgtgcaactgcatgaatgaaatgggcgggaagattaaaaagcacatttcacaacaggttcctgccggtggcgaaataattgattatgaaacagattgggataacaaaatgctgtctcttgaagatggaaaatcctacgtaatgctcaactacaaactcgcataccgggctaaaaagaaaagcggtgagatggcaaaaaatattacccgtctcagtaattgcgtaaaaatgtcttactgccctttctgcggcgttaagtatgactaa

SEQ ID NO: 279341 - DNA, 165 bp, Morganella morganii
atgccgatgtttaaagtaacgtgtaaatggaacgggaagccatgggaaaaggatatcgaggccgaggatgaggccgactgcacagaacacatgtatctgtttggtgtactgattggcaaagccgacatccaagaccttcagatcaccgaaatcacacagaagtaa

SEQ ID NO: 279342 - DNA, 942 bp, Morganella morganii
atggcaaacgaactggtcgttatcgaaccagcgacagcgctcgacctttttacagcgccggataaggttcaggtactgctgtctggtatccgggagagagcactcgcagaacaggcattactcgatactgatttatcgaaagccaagaatcgcgatgctatcaaatcactggcctacaaagttacgcagtcaaaaacatacatcgacaaagctggaaaggttgtcgttgatgagctgaaagagctgccgaaaaaagtggatgccagtcgcaagcagtgccgggatgaactcgacgcactgagcgaagaaatccgccggccggtaacagcatgggaggatgcggaaaaagcacgtgtagcagcggaagaattagctcgccaaattgagcgtgaccacgaagaagcgctgcagatgaatgagttgcatgacctgcgtaaagccgaagaagaacgcaaacgcattgagcatgaaaacgaaatcaagcgtcaggcggcagaacaggcacgaatcgaagctgaacaaaaagcacagcgtgatcgcgaagcggcggagctgaaagccaaacaggaacgtgaagctgcggaattaaaagcacgacaggaagtcgaggcagcagctaagcgcgaacgtgaggccagagaggcgcaggaacgcgcagaacgtgaaaagcaggaggctatcgcgaaggctgagcgtgaaaagttggctgcagttgaagcggagcggcgcaaggcagaggaagccgaacgcacacgactggcggagattgagcgccagaagcaggaagaattaaagcgccaggcgaacaaagagcatcagcataaatttaaccgcgaggctttacaggcactgactgaagcaggatttgacgataaaaccgcaacaaaattccttgagatggtgattaaaggcgaagtccctcacctctcaatgaactactaa

SEQ ID NO: 279343 - DNA, 135 bp, Morganella morganii
atgactatcaatcagaacgttttccgtctggcgcaagcacaggcgcgggtagctatacgccagaaatgcgatgacatctggtggttagcaatggaattactcagagaaagttacgggaggcaggcatgcagataa

SEQ ID NO: 279344 - DNA, 246 bp, Morganella morganii
atgcagataacttgcgaccacttcagcgtttccagcagaaccggcgagtcggtaatcactacccacggaaggacatttatcaacggccttgattctgaggctataggaaatagcgatgccgacatacaggagttagtcggtaactggatgcggaatatggatgagcaatcagcagttgagacgctacggaaagcagggctcaacatggacattatcgcacagcttgcaggaaggagcgcggcatga

SEQ ID NO: 279345 - DNA, 597 bp, Morganella morganii
atggaacagagaacggatgagtggtttgcggccaggctagggaaggtcacggcaagcaatattgcaaaagtaatggcgaaaggcggcggagcgacaaggaagaattatatggctcagttggtttgcgaaacactgacaggccagaaggaagagacctttaaatcagcaagtatggagcgcggtaacgagcttgaggcggtagcaagggaaatgtactgccttaacgaattcgacgccacggtaacggaaaccggctttattcagcaccccaccattgaacttttcggcgccagccctgacggtcttgtaaacgatgacggattaatcgaaatcaagtgcccgaacacggcaactcatattgagaccataaaaaccggaaagccaaagcgtgaatacatccttcagacgcacggacagatgatgtgcaccggacgcagatggtgtgactttgtcagctatgataaccggcttccggaaaatctcgcctatttcaaaacacggattgtttttgatgaagcacttgccagtgaaatagaaacggaaattcgcgaattcacgaaagaactcagggaagaaatcgagtttttaaccaaataa

SEQ ID NO: 279346 - DNA, 261 bp, Morganella morganii
atgggcgacatgggcgatatattccgcgcaatgcgtgaagatgccaaagaaaggaagcagcagagattaaaagaaaatacagggaagttatcaggggttgatattccgtttacacaggatggaagcggaacaattcatttttcaacaccagccggaaaggttctgttttatcccaccacaaacaaaattcagcacaagaaaaaggtcactcgcggcaatctggaaaaggctgtcgcactggctaaaagtcttggtgcataa

SEQ ID NO: 279347 - DNA, 201 bp, Morganella morganii
atgattgagaaaccaatttattacatgtcagcaaaaagaccaacagttgaagaaaatcacttcttacttcatatcgtttccgttactgatggaggcgctgaagatttaggttggaaaaaatttgcagtaaaaccaacaaagcggcaaatgcgaaaattgactaagtttgcgcttaaccatattaagcagattcaggagtga

SEQ ID NO: 279348 - DNA, 363 bp, Morganella morganii
atggatatatcacgacagcagtttgaggagtttattaaattccacgcagagccagcggagttggaacgggaattaaaaaaggccaataacggcattaactacctctacccagtaatcgatttaatgtggattagctggcaggcatcgcgtgataatctggatatcgataagctcaaaaaagagcgcaacgaagccattggtcatttaatttctgtatttgaccaatacgccggtctcgaccattcatttatgtcagccggagaggatgcctgcgagtttttggaaaaattaggttacggaaccgacaccggtagagtctttgcattaagcgaaaaaatactggaattaaataacgacgactga

SEQ ID NO: 279349 - DNA, 225 bp, Morganella morganii
atgaaagttagattattgaacgatggtgattacggtggaatgaaaaacactgagtttcctgccgttgtagatggtttttattatgtcggattagaccacgtagttggtgtttcttgcagtgaattaatcagggtcggtgctgacaaagatgcttttaatattggtggcgacctggcttttttgattggcgaagaatgtgaggtagtcaatgagcaaatatcgtga

SEQ ID NO: 279350 - DNA, 384 bp, Morganella morganii
atgagcaaatatcgtgacaaatcagactttgaaattaataaggcagtggctgaggaattaattcaatccggcttcattattggtgttgaatatcatgacaaacatatattagttatggataagtatgctaataattatccattcgacccctgcaacaacccggcagatgcatggccgattattattgagaatgggatatccataatttttgacacgggatgtaaggcatgggtagcgggtattgcttattgggtggatggttgcgaatggcaagtaagttacgaggtggaaagaatgaatcaataccgcgcagccatggaattatttttgctgatgaaggatgcggagaatgaaaaagtgggcggaagcgtagaaattaaataa

SEQ ID NO: 279351 - DNA, 201 bp, Morganella morganii
atgacaccacaggaagcagagaacggacgcagacgaatagcaagggaatgcctgaaggaattaatgcagcacacatctgacgaacaacacaccgcaatactcgacaaatacaccatcaaattcgctccgctaaatcacatgcgcttcaacaataaagacgtgttgagccattacgtgcgattactgcaaaaggagaaataa

SEQ ID NO: 279352 - DNA, 1179 bp, Morganella morganii
atgtcaatattccggagaggtaagatctggtacggggactactcgacgccaggcggtaaacgcatcaaggagtctcttggcacagaggacaagaagcaagcgcaggagctgcacgacaagcgaaagtctgagttatggcgtatagaaaaactcggagacttcccgagcgttacatttgaagaggcgatcgtaagatggttggaagagaaagccgataaaaaatcactggatgatgacaaaggtcggctttcgttctggcttgatcacttcgagggggttcagctaaaagacatcaccgaagcgaagatatacgccgccgtcagtaagatgaaaaacaggaaggttcgcgagcgatgggagaaacaagcagctgcagcgaaaaagaaaggtaaagaaataccggcttaccaggaggcgagagtatcaatcgccacaaaagcaaagcacctggcaataatgaagtcacttttacgcaccgccgaggttgactggaagtggctggaaaaggcgccggtaattaaagtgccgacagtgagagagaagcgagtccggtggcttgaatatcatgaagcacaacggttgataaaagaatgccctgaaccgctgaagtcggttgttaccttcgcgctggcaacaggtttacgccggtcgaacataatcagtctggagtggagccagattgacatgcagagaaaggtggcgtggattcacccggaagacagcaagtcagggcaggcaataggggtcgctctaaatgataccgcctgcggcgtactgagagcgcagatcgggaatcatcataagtgggtattcgtccacaccgagcagaaagtaaagcctgacggaacaaaaacaccggcagtacggaaaatgcgggtcgattctaacacggcatggagagcagcgttaaaacgggcaggcatagaaaacttccggtttcacgatctgaggcatacctgggcaagctggttaattcagtcaggagtaccgctttcagttcttcaggaaatgggcggatgggagtcagtcgaaatggtacgccggtatgcacacctggcaccaaatcacctaactcagcatgcaaaacaaattgacgttattttcggcaactatgacccaaaatgtcacagttccgtcccaaatacgtcccacatggcaaaagtggagaattttaaatga

SEQ ID NO: 279353 - DNA, 603 bp, Morganella morganii
atgctatttgtcttcttggttaatgataaactatataaaattggattgttggattgttggattgttggattgttggattgttggattgttggattgttgggttgttggattgttggattgttggattgttggattgttggattgttggattgttgggttgttggattgttggattgttggattgttggattgttggattgttggattgttgggttgttggattgttggattgttggattgttggattgttggattgttggattgttgggttgttggattgttggattgttggattgttggattgttggattgttggattgttggattgttggattgttggattgttggattgttggattgttggattgttggattgttggattgttgggttgttggattgttggattgttggattgttggattgttggattgttggattgttgggttgttggattgttggattgttggattgttgggttgttggattgttggattgttggattgttggattgttggattgttggattgttggattgttggattgttggattgttggattatggtagtcgtgaaaataaggaaatatataggtgtatggggtaa

SEQ ID NO: 279354 - DNA, 849 bp, Morganella morganii
atgagaagagatgtttttagaattttgtttgagttaacccacaaacagccatggttgatgaacaaacaagatatattagagcatttactatatgatgaatgtaatgatgatgagacacgagaactgctcattgagttaattaaccggtttgaatatttagatactgatagatatcaagagctaatgaggctaatcacattagaaattgttaccgagcctgaattacacgaaaaatctacgttaatagcagcaatgtcaattgggagcggtgtcgatagtggacaagcgatcatatattcattaaaagtattactgcaagaacaacaatggacaggccatcttgctataaatgatgcgatgcaagcatgtaaaacttttaataaaaacgctcaactccatgatataatcctagttgatgagtttgttggatcaggccaaacagtattaggtcgtgtaaaagcgatcaaagagcaatttaaaaactcgaaaattgattcatttactattagagtaaaagtcttagctgcaacaatgagtggaatattgaatgttcgttcacaaggcattgatataacttcgcaaattataattaaaaaaggaattagtgatttttacccagaagaagaatctctaagaaaaatagatttaatggtcaatatagaagaaattctatcgaaagaatataatgaaagagcattaccatctttaggctatggacaagcagaagcattatactacagaaaagatactaatttaccaaatagtgttttccctatattttggtggtctgaatataaaaataaaaaacaaagaaatacattattaattcgagcaatgggagacgcttaa

SEQ ID NO: 279355 - DNA, 417 bp, Morganella morganii
gtgaaaacttgtccgacaggcgcgattcatttcggctcgaaagaggatatgaaagcgctggccggcgatcgtgtgactgagctgcaaagccgtggttatgccaaagccggtctttatgatccgcagggtgtcggcggtacgcatgtgatgtatgtgctgcaccatgccgataagccgcagttatatcacggcctgccggagaacccggaaatcagtgctgcggtgaaattctggaaaggcgcgtggaaaccactggcagcagtcggttttgcggcgacctttgcggcggcaatcttccattatgtgggtatcggcccgaaccgggtatcaaaacgcgaggaagaagaggccctgaaagatattcaggatgttccggcaaagactgagcaatcagcaggtcaggaggagcagaaataa

SEQ ID NO: 279356 - DNA, 1383 bp, Morganella morganii
atgaacgaacgtgcattatacagtcagatacctgccattgacgggttattacatgaaacaccggttgccgcactgacagaacagtacggacagacctgtatcgtcggtgtgctgcgggagatgcaggatgatgcacgtgacgcgatccgtgagcggcagcagctgccggactggcacggttgctgggcggatgaactgtcccgccgtctggacagcgatcgggaagcactgcggccggtcattaacctgaccggtaccgtgctgcacaccaatctcggccgggcattacaggcggaagcggctattgaggcggtgaccaatgccatgcgctggccggtcacactcgaatattcccttgatgatgccgggcgcggtcaccgcgacagcattgtcgcggagcgcctgtgtcagctgaccggcgcggaagcggcctgtatcgtcaataataatgcggcggcggtattactggtgctggcgacgatggccgccgggcgggaagtgattgtttcccgcggtgagctggtggaaatcggcggtgccttccgcgtgccggaagtgatgagccaggcgggctgtcgtctggttgaggtcggcaccacaaaccggacccatctgcatgattataaaaatgctgtcagtgagcagaccgcactgctgatgaaagtccacaccagtaattatcatattgaaggttttacggcggaggtctccgggcaggaactggcggaactcggccgggaatatactatcccgtcggtgattgatctcggcagcggtgctctgattgatatgacacaatggggattgccggaagagccgatgccgcagcgctatctggcgcagggcattgatattgtgactttctccggtgataaactgctcggcgggccgcaggcggggattattctcggcaaaaaagcgtggattgaggcgatacagcgccatccgctcaaacgcgccctgcgggcagataaaatgactctggcggcgctggatgccacgctgcgtctgtaccgccgtccggaaaaactggcgcagacactgccgtcactgcgtctgctgacccggtctgctgacgatatttatgatatggcacaacggcttgtgccgaaaattcaggcatattacggtgatgaatgggtgatccgcgcagagccctgctcctcgcagattggcagcggatccctgccggtggaacgcctgcccggctgggcagtgacgtttaccccgcaaaacggaaaaggcagcgccttagccaccctgacgcagtctcaccgtcagctgaccattccggtgatcgggcgggtgagtgacgggcgtctgtggtgggatctgcgttgccttgaagatgaaaaccgacttttacaggcactgttaccatga

SEQ ID NO: 279357 - DNA, 162 bp, Morganella morganii; identical to SEQ ID NO: 277529

SEQ ID NO: 279358 - DNA, 918 bp, Morganella morganii
atgtctgaaaacttttcactgaataaatataatatttatttattccttttctcattattatttatattcatatctggttatctaaatataactatctttttagaagccagcagtgatggattttattctcaggttacttatgtcgtaagaaatataaataacccgtctgaatatagtccattatttatagttcattcactaagactaattattatacttccgttttatattgcttactctcttaatcttcctagctatgttgaatcaattatatttataatgtacttattacctttttttaaatctaatgatttagctataaaaatatccagtattatacttctatttcttcctcttgtatttagttatcgaactgttttgggtatggtaggcatgggatacttatacctgtgtttattttattataaaggtagatacttattgttatttacatctgctttattagcaaacttaagctcaggaattgtttttggttggttattttccatatttacatctattaaatatattaaaaacaactaccctaagtttttggttttcattattattatgatacttgggttcattggttcatttttgcataaatatcaatttatgatttctgatgttggtgccatgaagaatggaagtttttgggaaagaagtacactatatgaatcatatcaaaacaattattatagcaaatttattgtatatacatctgtggtaatggctattttggtaatactaacttaccctatatataaacagcagaaattaggcagaaaatggttattctttttaggtgctttaccgttggttctttttgagggcgtaggtttaatatcttatctattttgtattattgttgttattctcagcagtaacaatgatatatatcaaaaacaaagtatttaa

SEQ ID NO: 279359 - DNA, 1785 bp, Morganella morganii
atgtgcggtatttttggttatttttcttctgacttcagtcagatttcctctgaaatagtaaaaagtatgggagatgtaattaattatcgtggcccagacggccaaggtatatattatggtaatggactggctttaggaaatcagaggcttgccattattgatttgcaaaatggtaatcagccatttatatctgaagataattctattgttgttgttcaaaatggcgaaatttttaaccatatagagctggcaaaagagctggaagatagcgatttttattgtagaacacacagtgatactgaggttatactacggctctaccaaaaacatggcatcggcttcatccataaattaaatggtatgttctctattgccatatatgataaaaatttagataaattattcttaataagagacagggttggtgaaaaacctttatatttttataacaaaaataacacccttttattctcatctgaaataaaatccatattaaagaacaatatagaaaaagatgttaatataaatgcactagattcttatctaacatttaattatgtcacaccaccattaactttatttaaagatatttatcatgtcatgcctggtacttatctggatattaccagaaataatattagtgaacatacttggtggtctatagaaaataatactgagcttaataaaactgaggatgaatggataacggagtttaacggcatactcgatgatgccgtacgcatacgactgcgttctgatgttccattcggtgcatttctgtctggtggtgttgattcttcgacgattgtcggttatatgagccagcatttacaaatacctgtgaaaacgttttctatcggatttcaagatcctaaatatgacgagtcaattttcgcacaggaagctgctgaccgtttccatactgatcactatagtgaaaaagtagaagcaaatttattatctttatggaataaagctatttaccattgtgatcagccacatggtgatgtttcgtttatgccgacattaagagtcgcagaactagcctcgaaaaaagtcaaaatggtattaaccggggatggtgctgatgaacttttcgcaggctatgataaatataaagaatttattagctctagtagtgatactgtttctgatgatgtgtttttctcagagtattactctaagatatcactattcagagaagaagatagagaaaaactctataccaaggcattaaataaaataatttcaaaaaataaaaccaaagaaattttcaataacgttttatcaaaagttgaaaatttagatagaataaatagaatgttgtttattgatacctatttattattaagtggtaataacctggtaaaaccagacaggatgggaatggctgtatctattgaaaatagagccccatttctggattacagaatgattgaatacgcattttcaatgcctggtgaattaaagctacataaaaacgaaacaaaatatatatataaaaaagcagtcaaggatttgattggttcaaaccttgcctatagaaaaaaacaaatgttcactgttcctattggtgagtggttaaaatcagatctaaaaccattggttaatgaattactattctcaaagactactgaaaatcgaaatttatttaactactctcatattaaagacatgtatgataagcattgtagcaatgaaaaaaattatactcgtgaaataagagcactaatggctctggaaatatggttcagagagtttattccggagtatacgcatgtctga

SEQ ID NO: 279360 - DNA, 555 bp, Morganella morganii
atgaaaagagtttttgattttaccctttcattattagctttaatcatactatcacctttattcataatagttgctttgataataaaactaactgataatggccctgttttttttactcaaaataggattggtctctctggttctgaatttaaaatttttaaatttcggtcaatgaaaattgatgcggataaattaggaccatattatacaacagataatgataatagaattaccagaattggaaagtacctcagacgctcaagcattgatgaattgcctcagttgatcaatgtactgaaaggtgatatgagcttagttggtccacggcccaatgttctaagccagaaagaattatatcaacctcaggattgggataaacgaaatactgttcttccgggaataaccggattagctcaggcttcaattcgctctgatggaacacctgagcaacgattagaattagatcttttttatgtcaataatatgagttttctatttgacatgaaaataatacttatgactataaaacaaataattaaaaaaggtggaaattaa

SEQ ID NO: 279361 - DNA, 837 bp, Morganella morganii
atgaataatgaatttaaattaatgttaattacaaacaaaccagatgttgctgaatatgctgataacattggcgtgcacagaatttttatagatctggagatcaatggaaaagttaaacgacagggacatttagatactgttatcagtgaccatcaacttcaggatatactgccagtaaaaaaatcactacagaacgcagagttattagttcgtattaacccattatttgatggtacacaacatgaagttgattatgcaattgagtcaggcgctgatatcatcatgctcccgatgtttaaaaatgcacaagaagtaaacacagtttcccaattcatcaatggaagagcaaaatttattcccctggttgaaacagcgggagcagctgaatcattagatgatattgtaaaagtaaaaggaatttctgagttatttattggactaaatgatctccatcgagatcttggccttaactttatgtttgaaccattattaaatggtgttctggaaaaaatggtatcgactataacacaagccggactgccgtttggctttggcggtatcgctaatattggtcagggacaattacctgctgagttaatattaggtgaacacatcaggttaggatctggatccgtcattctttctcgttcattccataatcgttcagtgacacttcagcaatttattgattctaaatttgaagaagaaataaataaattaagcgtatgtctggatctaatgaaacatcgtaccagcattgaaactgaagctgataaaaataaattacatgaatctatttgttctattttacgaggcatgaatgaaaagagtttttga

SEQ ID NO: 279362 - DNA, 516 bp, Morganella morganii
atgttttctgattatatagtttctttagtgtatggttgggggaaaatatcagaagaagatatattggcgatctcatacattctaagaatagctattttttcattgatttttcaaggcattaactctattcttatttctgcctttgctgctaaagtagataacaaagcacctttaataataaattctgtcgttatcactatctttgccttctctgtttatactttaaatttaagtttagaatggctattttattcaatgaatgcttgctttatatctattagtattattatgctgatagttatgaaactaaaacataaaattagcctctattctttagttacaaaagataaattattgataatcacaatattctctttatctagctactctctttacttattaaataagtttctgaatataaacatctggactgcaatgttattatctgttttatatttactattaaatggtattttttatcttgttatcgaacgaaaaaattttattggaaattaa

SEQ ID NO: 279363 - DNA, 1653 bp, Morganella morganii
atgatttttaatgagtttcacacgaaaactttgtctatttttaatatactaaaagataaattctctgataccaacgactttgtaaaactaataatattttcattaggaaagaatcactatcttgataagatgattacaatacttgaaaatcaagaaagtaataatataacgagattaattactcaaataatgatttcatcaatttcaccagacctttcatctgataaaggaaaatatcgaagttttatcgagggtcagggatttggtttaatttcacatgtagaagatgctaatctagataatttcttaaaaaacatcaataaactcggtgtaatttatcatgatattcatccgccagtaactcaaaatgaaaaacacgcactatcttttttaactgaacacaaaatgtatccaatagataaaaatagctttccaattattgtttgtggattactaaataatgcagagttaactcatgataaagtaaatgaattaccatggaccttagtatgcaagcatcaattatcaagtataaaggagtatatagagaataacattgatgtttttgtaacagaaatatttatgaactcaaaagaaaataatgatgctataatttctatacttactcatccaaaactaagtgatgaacttaaggtatcaataataaaaaatatggaatttactgtggataacttagatgagttcccacgaaacattgaagtagaagataatgaatactcttattacgatctattttatctctatgaacatgtaataccagaatggaaaacattattagattatatcaatgaagaacaccatcctgatgtactaaacctatatcttgaaaataatgcacaatcactaagtgaaaaagagataagcgtacatgaaggggaactctatgaacttatttatataaatatcatatgcaataaccgacttagtgactctgcatacaatgcaattgtaaaaccgataaacataaatataaattactggaatgaaagactgagtttaattaacttcagccgattaattgaatccaataaagtagaactaaataaatctacgtttgattttgccataaaacactatattaacgatataaacaaagaaaactttgggccattaccattgtggttttctaaatttaaaaatcatttcattgataacaaagatgattacatccttaatgaacaaaatggaaataaccttgaaggaatattaacatccatttataactctgattacttcactttatcagaaaaggctttccttttacatagctattataattattatcaaccaacattcctagatgagttgaatttacccaatgatatcctacttgcattaatagagcaatctcatgacgacagctttaccattcttataataatacgattattaaaaaatagttattgtaagaaagaaaacattaagaccttaattgacaaactgaaagaaaaagagtttagaaaaatatttaggcacaaaaccacaacacttaacatcaataataaaaaagatgctgagctacttctacctgctttagaaaaagcttctctcataaaaaaatggtctctgaaagaagctggtaaatattacgtatactgttgttacgaagatgatgaaaatcttcttgattga

SEQ ID NO: 279364 - DNA, 2100 bp, Morganella morganii
atgaacatgactctactagaccgaataaaaatagccttctcaagaaaaaaaaacatttcatcaaatgcaaaccaacaaggtgcctacgatactttaactcctaaaataattaccgataacagtgtaaaaccttactttgacgctctagattttgcttttactaagtcagacgttaaaaacatagcaattacagggccttatggcgctggtaaaagtactataattttatcctacctacaaacacgcctgaaacataattttattaatgtgtcacttgccgatttttcattatcaggaaaaagtaacagtaatccgttagaaaactctgacattgagctaagtatactccagcaaattttatatacagaaaaaaaagataacctcccagactcacgcattgaccgaataaaaaatcgtgataaaaaacatattttctctttatttttttccatattaactctagcaatcccgttatttttattattagcatttctatttacaaaaaaaattctatctttttttagttacgatgaagcaacaattaacagcattattaacattctaccagaaagattaacaacaagtattattttaggaattattttattattttttattgttaggactgcctctaaaataggtatctttgataaaaaaataaaacttaataaaatagcatttattcaaggaagtgcagatatatccccccaagaaccaccatccctacttaataacagccttgatgaaatggtttatttttttacacgttcaaaatataaaatagtggtatttgaagatttagatagattaggcggcactgaagtatttattaaactacgtgaaattaatcagatagttaataacaatattaaaaacgagcccgttaggtttatttatgcctgtagagatgatattttccttggtgcagatatcagaactaaattttttgatttcatattacctgtaattccagtaatggatactagaaatgcatatactcatctaaaaaataaactaaatgactttcccgtcaatggacaaactctacttaaacaaatgtcgctatatataaatgatatgcgctcacttcaaaatattgttaatgaattcaatctatttaaaagagtagttgataataataaaaatcaagaaaaaatcttctcacttattttttataagaatatccatgcacaagattataatctaattgataagaaatttggtgtgctttatagcttcattcaagactatcgcttgaaaagattgcatgagaattatttcaactctcttgatgaaaaactagagcaattgacagctcagctagaaaaaataaataatgaatcagcaacatcaaataaagatcttcgtaaagaaattattagccgatttatcccacctaatttatggtccatcattcacttttcagagcgagatcactactggaataaattaacagttgttgaacctgaggatgtatataatgatgaagataaatttatcactctctttagcaaagatgtacctttatatacaggatgcggaaataataattataacatgggttatgttcccattgaaactaaaacaatcattaaagaatataatgagaggattaacatcataggagataataaattaaaggaatttaaaattatcactgaaaacattaataaaacaaaagagaaaattagaattagaaattcaatctcattagcagatttattaaaattaatcgaatttgatcaatttaaaacaatttgtgaaacctacattaataaatgtagcgatatttcaattattgattctgagcaattagagaccatccgtaatggataccgttttggtgggtttgaagctctttactatttgcttatcaatggttatatcatgcaagatttcatgacatttagatctatttttcatcaaggaactatatctataaatgataatgactacatcaaagcagttggccgttatatgggctgcgaagaggtaaaccggaacttttcacttgataatcctaaagatattttagatgaattagttagtcaaaattatcaatatcgaatcattcgatactatcatcaattattgatatga

SEQ ID NO: 279365 - DNA, 528 bp, Morganella morganii
atgaaaaaggcaatcacgatattacttaacgggtgggtgtgggctgttgtgtttttcggtctgtggatgttcagcatgctgtcagccgaacaaacggaaagccaacataaagataaggttatcactgaccagcaaaaagtgattgataacgcctacaccagtatcgatatttttgaccgcgtggcagccgcaaacgccaaccggaatatgcaggcggaagccaaatcacaggagaagcaaattgaataccgtaccattatccggaaagaggctacctgcaatttgtatatccctcagcctgtttctgacgggttgctcagccacgtctacgccatccgtgaatcagcaatgcgttctgctcccggcatcgctgacacaaccggtactggcaccactgccacccgccgactgacatattgccaggcggttgagtggatagagccgctgctgatggcactggataaggctaacgggcagttgatggatatcaggaaggcggatgctgagcgaaacggtaagccacgataa

SEQ ID NO: 279366 - DNA, 1026 bp, Morganella morganii
atgaaaccggactgggaggtgttacagcaacagttcctctccgagcattcagtaacgggaatatccccgaaagaatggtgtgagatacagggactgaattacgcaactgcgcggagacacattaaaaagccagctgcgcagagtgcgcaaaaaactgcgcaaaagaaagtgcgcactgcgcagaaaaaagaatgcgcaaatgaaccggtgcgcaatagtgatataccggatgcgcaaggcaacaaatccgacaatgcgcagaatgatgaaacagagttcgatctgcgcaaatacgggcttaacgatatgcaggcacgttttgtcactgagtatcttatcgatatggacaagacagcggcataccaaagagcgggatataaaagtcagggtgaaacaggagcagctgcagccagacgcctgtatcgaaatgtatcggtgaaccgggcaatacgggatgccctcacagcacgggaacgccggactgaaatcacccaggacgcagtgttaaaaatgtggtgggacattgccaccgcagatgtatctgagctgactgaataccgccggttatgttgccgctactgctggggctttggttttaactatcagtggcgggactcgatagagtttgaggacgctgtcagtgatgctatgaggaagagtcagaggccaccaaacgacaggggcggctacggttacgacagcacacttgacccgaatcctgattgcccccgctgtaacggtgttggtattggtcgtcctcatttccacgatacacgggatttaaggggcgcaagccgccggttatttgccgggataaaagaaggcaagttcggtaccgaagttatcacccgcaatcaggatgacgcgcttaagatggttgcgcagcatttggggatgctgaagaaccggacagaacttactggtgctgatggtggaccgatacagtcaacggggtttgaccttagcggtctgaccacagagcagcttttacaattgcgtgaaaaagcggggaaatatccgtcttaa

SEQ ID NO: 279367 - DNA, 570 bp, Morganella morganii
atgcctgtatccgactgttatcaaactcaaccagatggctatgtacgttttgatatacacggaaagccattggaaggtgagttttatcgatacgacttattcggttgtgatcttggcccaaccgttggatatatccgaccatttaataaaatactacgccaagaactgatcgactgcttacaatccgcccaaagcagagatctcataaatttcgtagccaatgatgaggtgattacctgtgatgcttatgtaaccgataagcaaatccaaggcggatatcaacttcttattgagcactttgattttattgatgaatcagacctatcaactgatagaaaagaaattagtagttgccgtgttgacttgctacaacgtcaatacatcttggccagcaacaaaaatgaaaacaaagaagttctgaataatatcgataaagaatttcaccggtgggttactcctttctgtatacctttacgttatgagagaacatggaaaaccaagaataaaaataaaatttacagttctatcctcatagttattctcgcgcttattgcttatgtggcgttctag

SEQ ID NO: 279368 - DNA, 1401 bp, Morganella morganii
atggatatcaatgtcgatctgtttgatcaagaagttcgcagagagatagcgcggcgcagcctgcatgaatttatccagtacattaacccggaatacatcaccagtcacttttcggaaacggtctgtgcatcactggataactttctgattgagatgatggccggtaagcggccgattctgattctcggcgcaccaccgcagcatggtaaatccgatattgtgtcgcggtatcttccggcgtatttcttcggtaagtatccggataaacgtgtaggcgcattgtcctattcgtcagatctggccagtgacatgaacactgatgttcagcgcatcatgtcgtcagatgagtaccggacgctgtttcctcaaagctggttaggtaataaaccgactgacggtgtggcggttaagcgtaataccgaagaattcgggattgcaaatcacaggggaacatacgtctgtgccggtgttggcggcccgctgacaggtaaaaaagttgatctcgggattattgatgacccgataaaaaactcaaaggaagcgctcagtcccacggttaaaaagtcaatttggaactggtacgcatcaacgtttaaaacccgcctgtcccggaacagcggcgagatcatcatggcgacccgctgggcgacagatgacctttccggccgggtaaaagagaaaacaccaaaagctagggtgctggcgttcccggccatcaacgaacagggtgaggcgctggtccctgagctgcatccgctggataagctgctcgaaacaaaagccattctcggtgattacttctggtctgccatgtatcagcagacaccgaaaccgggagacgggcagatattccacgaagaattcgcccggtactacctgccgaaagatctgccggacacctttgatgaagtcattcatagctgggatatgacgtttaaggacagtgacggcacggactacgttgttggtcaggtatggggcaagaagggggcaaatgcctatctgctgtatcagatccgcaaacgcatgagttttaccgaaaccctgaaagccgtgaaattactggttgataaatacccgcaggcgcggcgcaagctggtggaggataaagccaacggaccggcggtcatagatacacttaaaaccactgtatcaggattggtgcccatagagccggacggcagcaaaatcgcccgtgctcacgcctgcaccgccgaatgggaagccgggaacgtctggctgccccataaagatattgcaccgtgggtcaccgaaacggtggaagaaatcacaacattcccgtttgccgggcacgatgacaccgtggatgccatgacacaggcactgcggtatctgttccagaagaaaggcggcggattcttttcacgcaagaggacataa

SEQ ID NO: 279369 - DNA, 810 bp, Morganella morganii
atgctacccgaccatttaaaaggtttacatttaaggtcagcaggtttgataaccgttgaaggccggaccataaatgtttgggagttttcgcccccaactgatccggcgattcttgacagttgggcactgcattttcgtcggcaatactgtacagaccaggagcttcctgagctcttgtccgggacaggaatgacgatagaacagtatctaaatgcacatattttccccgacaaagtcaaggctcccgggccatcaattcgttctggtgatttcgctgaatttctcatttccgactacttggagttcacgctcaatctgtgggtgccccgaggaaaatacgctgacaaagccagcaacaatgagtccgtcaaaggcgttgatatactaggcttccatcagttggatattgctactcccaatcgaggggatgccctttatgcctttgaagttaaagcgtctctttcaggtagtatatatggtggccagctccaaaatgctgttgacgatggttctaacgatcaacacataaggcaagctttcacgttaaacgccactaaacgtcggtaccttcgtgaaggaaagacactggaagtgagccgaattgcacggtttcagaatcctgcagataacccttataaatattactcaggtgcggtagctgttctttgctacacagctttcaatgaagaagagcttgccaagacactggccgacacgcactcaaatgaggcagaactttatctgatggttgtgagagccgatcttcagatgaaactggttcatgaactttacgagagggcctgcaaatga

SEQ ID NO: 279370 - DNA, 558 bp, Morganella morganii
atggctcgtatcgcttgtcttggatggggttccttaatttgggagccaagaggtttacctgttcagggaaaatggtctgaggatggcccacttatatccgttgaattcgccagacagtcgttagatggacggattacgcttgtgctagtcgaagctgatcgattagtgccttccctgtgggcgataatggaatcagtggatcttacctctagtattgaggctttgcgttgccgtgaaggtatcccaataaaaaatattgaaaagcatgtttgcaggtggtctgctggtcagccttctccaaaattgatcccaggattgtctgaatgggctgataccaataacgtggaccatgtgatatggaccggtctccctccaaaattcaacggtaaagaaacccttccaacagccgaaacaattgtgaagtatttagaacaactatccggagaacaaagagatagggcggagcaatacattcgtcgtgcaccgcgtcagatcgacaccatgtatcggcgtattattgaatcatcgctccagtggcactcaacgggcggtgaatag

SEQ ID NO: 279371 - DNA, 1197 bp, Morganella morganii
atgaaacttaatgcgagacaggtagacgctgctaaacccagagaaaaagcctataagctggcagatggtgctggtttgtatcttgaggttgttccttctggttccagatactggcgaatgaagtatcgcttcaatggaaaagagaaacgtctggctttcggtgtctatccagcagtgcctctcgcacaagcgagggcgctacgtgatgaagccaagaaaaaactggccgagggtatcgatccatcgtttgccaagaaagaagaaaagctggttcgcgatgtgcaactcaacaacacgtttcagtctgtggcacttgaatggcatggaacgaaggtgagccgatggtcagaaggttatgcctcggacattatcgaagcctttaataaagatatttttccctatatcggccaacaaccggtgaatgaaatcaaaccgctggttctgcttaatgtgctgcgtcgaatggaaagctgtggcgcgacagagaaggctaagaaggttcgccagcgctgcagcgaagtttttcgttacgccatcgttactggccgtgcggaatacaaccctgcagcagatctaaccagcgcgatgtcagggcatgaatcaaagcattatcccttcctgactgttgaggagctaccagacttctttaaagccctcgcaggctatacaggaagcccgttagttgttcttgcagcacgtctgctgatccttacgggagttcgcactggcgagctccgaggtgcttcctggagtgagtttgatcttgaaaaagcggtgtgggaaatacctgccgagcgtatgaagatgaaacggccccatcttgtccccctttctacccaagcgctggaaatcgtacagcagctcaaagtgatgactgggcaatattcactggtattcccagggcgaaatgatccccgcaaaacgatgagcgaagcgagtataaatcaggtgttcaagcggattggatatacggggaaggtaacagggcatggttttaggcacacgatgagtacaattttgcatgagaaagggttcaatacagcgtggattgaaacccagcttgcgcatgtcgataagaatgcgattcgtgggacgtacaaccatgcgttgtatctggaagggaggagggagatgatgcagtggtatgcggattacatttataacattggtaaacttaatctaatcatagcatcataa

SEQ ID NO: 279372 - DNA, 222 bp, Morganella morganii
atgaataccatcaataccaccacagccccttctccgcttgacgaacctctcgtggacatgaaagagatcacgaaatttaccggattaacagacaaatggttttacaagcagatacaggaagggcagttcccgaaaccgattaaactgggacgcagttcccggtggcagaaaagtgaagtagaagcctggctacaggcccgtattgcagagtcccgtgagtaa

SEQ ID NO: 279373 - DNA, 984 bp, Morganella morganii
atgcgggaagatttcagatttatattcccctataaaaaagatattttttataaccatgaagtaagctcggtacggaagttttcagaggtaatgcaaagaatacgtcatgaatactgtctgaattgttatgatgaagatctgaaaacagatattgatttaatcagagttatagataatggtgagtatccaaaaatcattgacggagtaatgaggattagtttcggggaaaaaaccatcaggcaactggatggggttttcagagtaaaggaacggatgtataactccattatgaaataccacaaaaatattttaaaactaaataaaaagattgtttttctgtgtttttcattatccgttaacagagggcgtcagttcagtggaaatgaaacaccggaaaacatcaatgcttataatgaaatattaaagaagttcaggtctgacttttttaataacatcaggtcgcgtgcattctttaaaagaaatgttattggccatttctgggtgtcgttgcaggagaccggcggggagtatatgtatatccatatcaacttctaccttaaggacaggcaatacaattaccttcttggccgggaaataaacagtgtctggtttggaatccttgaaaaatataatataaccggacaggccagacattttacgataacggaaagctatgaaaacagcaaagcaagcaacagcgcaaaaagaaaaaagaaaattatctataaagcgtgtgagagcttcgattcccaaagtaaaaccaggcaggtcatggatatttatcctgatttaaacggaggaaatcaggatgccgaatatagttttactaataaatcaacaggtctgccatttagtttttatgttaaatcgctggtaaaaaaagcattccatatctcagggatgcgcagtttcggtacagcttctcttcagatggcgcagaaggcatctgcagaaagtggtaccgcacagatgaagcaaaaataa

SEQ ID NO: 279374 - DNA, 747 bp, Morganella morganii
atggcaacttaccgcatcgaccctgacctcgcgtttatcggtcagtgcagcaatgaagacctctgtctgctggtctccgttctgacacacgacagcaaagacggcaaaaagcgtctggcggagtctctgactgcctcaccggaatatcagctcttttaccctgaccatcagaagtactggcccgccatctgtgccgaactgcaggccttcggagccaacagtctggccacgctgctgcgtggcaacaaaggtgtgctctaccgtgaaattctgctggatgtctgcagcagaatgaaagtaaagcatgctaaggaggacagtacagaaacagctgaaatcaacctcctgatgcagatattgaaaaccagcatcagtgatatgtcgccggctgcactggctgccctgtctcaagaaatgaaactcaacctgactaatcccactccgcagctcgtcatgatggctctgcaggcagcggtaaatgtctccggggtggctgcgctggaactcgcttccatcgcctctttcggtgtgatacaggcaatggggggaatggcaaccacagccggtgcggccggaatggcttctgtattcttcggctcccgcattctgggcatactggctggtcctgtcggaattgcgctgagctcagcctggctgatagccgatatcgccggtcccgcttaccgggtcaccattccggcctgcattattgtggcgtacctgcgccagaaggccctggcggcctga

SEQ ID NO: 279375 - DNA, 1434 bp, Morganella morganii
atgcgtaaagatgccggtgttgacggtgatgcccagcgtttggggcaactgtcatggctgttgttcctgaaaattttcgatacccaggaagaagagctggaactggagctggatgattatcagttcccgatcccgaagcgctatttatggcgcagctgggcagcagatagtgagggtattaccggtgatgagttactggagtttgtgaacgacgatctttttccggggcttaaaaacctcatcgcgccgatcgataaaaatccgcgtggctttgttgtcagacaggcgttcagcgatgcctataactatatgaaaaatggcacactgctgcgccaggtgattaacaagctcaatgaaattgatttcggcagcagccgggaacggcatctgtttggcgatatttacgaacagatcctgcgtgacctgcaaagtgcaggaaatgcaggtgaattctatactccacgcgccgtgacgcgctttatggtcaatcgtattgatccgaagctgggtgagtcaattatggacccggcgtgcggtaccggtggtttcctcgcctgtgcgtttgaccatgtgaaagagcattacgtcaataccaccgaagaccacaaaatactgcaaaaacagatctgcggcgtagagaaaaagcagcttccgcatttgctgtgtaccaccaacatgctgctgcacggcattgaagtaccggtacaaatccgccatgacaacacactcaataagccgctttcttcctgggatgagcagattgatgtgattgttaccaacccgccgtttggcggtaccgaagaagacggtatcgagaaaaactttccggcagagatgcagacccgtgaaaccgctgatctgtttctgcaactgattatcgaagtgctggcagacaaaggccgcgcagcagtggtattaccggatggctcgctgtttggcgaaggcgtgaaaaccaagattaaaaaactgctcactgaggagtgcaatctgcacaccatcgtgcggttgccaaacggcgtgtttaacccgtacaccggtatcaaaactaatattctgtttttcaccaaaggtcagccaaccaaagaggtgtggttctatgagcacccgtacccggacggcgtgaagaactacagtaaaaccaaaccgatgaagtttgaagagtttcaggctgagatcgattggtggggaaatgaagccgacggttttgccgcccgcaaagagaaccatcaggcgtggaaagtcagcatcaacgacattatcgcccgcaacttcaacctcgacattaaaaacccctatcagggcgaaaccatcagccacgatccggacgaattgctggcgcagtaccagaaacagcaggcggaaatcagcaaactgcgtaaccagttgcgcgatattcttggcgctgcactggcaggcaataaggacgctgactga

SEQ ID NO: 279376 - DNA, 192 bp, Morganella morganii
atggatgtaacattactgacaccacagcgcccggtcgtggttatcggcgcggctttcggcgatgtgatgctggaagtgaatgcactgccgcacagcggggatgatatcagcgccctgccgctcgggcagcagatcggcggctgcgccctgagagatcccctcataatttccccaaagcgtaaccatgtgtga

SEQ ID NO: 279377 - DNA, 1272 bp, Morganella morganii
atggaaaagattcagtcaatcagagggatgagaagtgtgcttccggaagaaacaccggtctggcagtggctggaaaaccggatccggaatatcacttcccgctacggctatcaggaggtcaggctgccgattctggaaccggttgccctgtttgagcgcgcggtcggtgaatccaccgatatcgtctcaaaagagatgtataacttcctcgataaaagcggcgagcacatcaccctgcgcccggaaggtaccagtggttgcgtccggaccgtgattgagaacaacatgtgctacaacaccacgcagcgcctgtggtatcagggcccgatgttccgttatgagcgtccgcagaaaggccgtctgcgccagttcacccagttcggggtggaaaccttcggcatgccgggggcggatgtggatgcagagcttatctttatggtgaaagatatctttaaggcgctcggcgtggataaacacgtccgccttgagattaactccctcgggacaccggaagagcgctcagagcaccgtcagcagctggtgaattactttatgcagcacaaagcgctgctggatgaggacagcctgcgccgtctggaaaccaacccgctgcgtatcctggacagcaaaaacccggatatgcaggagatgattgaagcagcaccgcgcctgctggacttcctcggtgaggaatcacagcagcactttgatgatctgcgccgtctgctggacagtgaaaatattgcttatgtggtcaacccgcgtctggtccgcggactggattactacacccgtaccgtatttgagtggatcacggaagagctgggttcacaggggacagtctgcggcggtggccgttacgatggtctggttgaattgttcagcggcaaacagttaccggcttccgggtttgctatcgggatcgaacggctgttactgctgatccagactctcggcctggataaagatattgtgaatcagccggatattgtggtgacttatgaagatccggcacagaatgtggaagcgctgttactggctaacacactgcgccatcagttgccgcaatataaaatcctcaatgatttcaccagtgccaaactgaagcgtcagcacagcaatgcgctgaaatccggctgccgttacatcgtgacgctcaaccgtgacggccaggtcggcctgtgggatctggcggcgaacaccaatgaaaccctcaccgcagacaccctcgccaatgcgtttctgaataaaaccatcactgcgatggcctga

SEQ ID NO: 279378 - DNA, 168 bp, Morganella morganii
atgagtgattcctgtgacagtaaaaaaatcgacgcgttagaaaagcgagttacagatcttgaaaagcagcttgctgagacttcacaagctgctaatgacaaaatggaaactatcaaaacacatctggacaacgtatggatgatggtttctaagtcacctatcgcttag

SEQ ID NO: 279379 - DNA, 213 bp, Morganella morganii
atgagtaattaccagataaatagcatttcatatctatcagcaggacagacgaaaggaaaaatggaatcatctccttacccagtcatggtttttatgtccgttaatggcatggatataaaaatcgagttggacacaaaccagcatgacattatgaatctgactgtgcgtgagattggcgacctggcctatgcaaagtacttatctaagcgatag

SEQ ID NO: 279380 - DNA, 318 bp, Morganella morganii
gtgaatgtaaacgaggttattgtgagaaaattattgtgggtggcactgctattaccatttatggtacaggcaaatcaatcagagaaagattctgttatttcaatgattaatgatgtttgtgctgaacattcagaccccagtttctgtcgttggcagctcgataacattacagctatatcaggtattattgggctgagctattcagattgttatcggcataacaccaaaacaaaggagtgcaaggagacagatgaagcatttaattattttcagaaaaaatataatgaaaatatgactgaattaaagaaaaataaataa

SEQ ID NO: 279381 - DNA, 2715 bp, Morganella morganii
atgaatgtacagaaaaccaaattttcatctaaagaatttttaaggcgccgtcgccctgaaaagttttctgattcaacaatcagagagactggtactttagatagagttgtactggaacacttcctctctacgctaaatacaagaaatcaagaattacaattcgaggattttgcaaaaaaaatatgtgaaaaaataatttgccctaatctccttgaacagactggtcctgtagcagggggggatggtaaaactgacacacaaacataccctgtttcggaacagaataagcttctttggttcgaaggtgttaatgaagcatcaaataaagaacgttgggcctttgcggtaagtacacgtaaagactggaagaaaaaatgtcatgaagatgtacttaagataaaagaaacagagcgtgggtatactaaagtattttgcgtaacgaatcaatctgcaaagtccaatattcgttcagaggttgaggatacactaaaaacaaaaactggaatagatgtccgtatattagatattaattggctattagatcaaatttacaaaaatcattttgagcaattggtcattgattcattgtcagttccaacgcaatataaaagagaagttatttttggagaaaatgattataagaaacataaaaaatatgaagaattaaccgagtatattagagagaaaataaatcctgctgaaatttcatatgaacaagtggatatatttttagaagttgcagagttaagcgctgaacttgagaaaccactaattgaaacacaaggtctatttgaaagagctataaaaatctcaaaaaaattcgggactaatcaacaattgctagatgcgtattatcaatacgcctggaaatcccatttttggatggaagattttaatctcttcgaagaaaatcttcaattagcgtatgaaagtatagcatcatcaactaattcctcaaaatgggaaaaagttttaaatttagtaaccgttcataaaagttatattagacttaacaacgcaacatctacaatcgacattgagaatattgaacgtaacatgctcgccaaactagatgagatagctaacgatgattcacgtcccagtaatgcgctcacagcgagaactcacaaagccatttataaactgacaacgttttcagatgtagaagatgcttcggttgtatttgaagagttacatgaaatttttaaaaatagcgggaatttaataggctatccgtttgagaaaaacttccaacttttgaacgaactagatgacatttttttcgatgtagatgcatatgaaaatttattagactatatgactgagcaatctgctgttagaggtggtgaagttaaaggggcattattaaatctgcgaagaggtataaagaggcttcaaaatggtcacccttatcaggcaatcaagtatttaggaaaatcttttattccactctataaagaggaatcacgagataaatttatattagcattaaaagctattgcttatgcttacgaatccattggattactatggagttcacgttcatgcttgcttctatccgcttctttgattacagataacttctggaagtatgatgagatatctttaaagcaggctgaaatttattataatttatgtctaacagaaataaaactagggaaattagcacatgctcttttatggtatgaactgtttttaataattaacgagaatatcagtgatagctcgttcggcgataaagaaaatcagcaagtcgatttttacataagtcaactcattttgaacactgacctaaagggaataaatcgacagagtaatatccccgatgagctcgatagattaggcctttttgtatcatcgggatgtcttaaatatgctttaggttatattgaagattttgaacgtgagtacggagttactgccgataaagatcataatgatttcttgcaaaaaatacgtgactttgatacaggatttaatagtaagggcataaaagataaccatgacaaacgaggagtacatacatcttttatttttggatgcactatagaaattaactttccgaatcggtcaccatttatagagttttcaactaatgtcttatcacttttagagggtgcttttgcaacctgtacgattgacaacatctatcttaaagaagcatttttaattattgaagtaatagcagatgacgatgatgacttatccttatcacatgaaataaatagcaatagtggaaaactaaatcttacaataaattgcgctggttttgatgtaagtgattttagaatcgaggtacaacaaaaaatcactaatgaattcaaagaattagtgttcaatcttctccccgagttattttttataaaaaatacagaatacattgaaaaaatgatcttcgaagatgctgcattcgacagagcaattagttttggtgcctgtatcaaatctattgaaaatgttcttggtaatgatattgatcaacaaattaagaaaatttattccgccagttctgaaaagaaaacttaccctcttttaagagataaatcctgggatagtgaattttcgaaagtgttggagatcgaggatataaaagctccaacacccggtaaaggaagaatgcctgaagaggaacttaatttcgaaaatataacacataaagattattccatacaaagtcctgatgaatcccctaatgattttggtaaaaatcattaa

SEQ ID NO: 279382 - DNA, 735 bp, Morganella morganii
atgacgcggcgatacacaccagaacaagctgacaggatgcgtaaaagaagatactggttttacgttgatggtgagcgattcagcagtgcaggtgcagcgaacaaacacgtaggtgaacgcatctttcatgccacctggagagcgaacttaatcgcaaattcaggcggtgagtcgatgcaaattggcgagcgaacactccccgtccagagaggaaaatataccgttgtgcttgagcgacgtaaggatctctctgataaatccgtgcgtgattacgcagctgcacggaagaaactgcaatgcgctggttggacggacgatgaacttgacgaaatggatgatggcgagatttggcttgagtacaagagtgaacttgagcgggaaaagctcgacgtacctcattattccggtcataaaaaatatacccgagctgaagttaggcaagttcagggacgattcaggtgcgcagttctgaccaactgggaaaatcaatgcgcgatttctggtacacggcttgcgcttgaagcggcacatattatcagctacgcgagtgggggttcttcaagagtagaaaatggcgtctgccttgccgcagatttacacaagcttcttgatacaggccatatgcaaattgaaacgggctgggtcagactctccgatgaagcaaaagccgatccccgctatgcacatctcgaagggaagccgcttcgtaagccacttattaaggttacgttctaa

SEQ ID NO: 279383 - DNA, 3138 bp, Morganella morganii
atgggcaaaggtggtggcggcggaagcacgccgaatctggttgatgacaacctgaaaaataagcaatttctcaacattattgatttggtgtcagaaggtcctatagaaggaccggttggcggaatgcagggattcctgctgaacggaacgcctatagtcgataaacaaggtaatccgaatattcgcggggtcgaggttcagtggagatcgggtacgcagtctcagtctccgctcgatggtttcccgtttgttgagaaagaaatacctgtaaacgtggaagtgaaaaaagaaacaccgatattgcgtacggtatctgatcaggaagtcgatcgcattcgctttacattaggtgtttcggcgctggtaaaacaggacaacaaaggcaaccaggaaaacacttctgttcagatgcttgtcgagattaatgctggcagcggatgggtgacagaaaaaacaatcacaataggtcccgggaaaataagtggtcagtaccttgaatcacatattattaacgcgccaaagcaaaagccgtttcagataagagtatcgcgcctcactgatgacagtaaaagtgaccttcttaaaaacgggacggtgtgggccagctatacagaaattacggatgctaaattttcatacccaaactccgctgtggttggtatgagcattgataaatctcagtatggtgacacgcctaaacgtacatatcatatcaaagggctgattgttcaggtcccggataattatgacccggaaacccgcagctataacggtatatggacggggaggtttaagcctgcatggacagacaatcccgcatggattttttacgatctggtgaccaatgagcgttacgggattggttccgtgatggggcgttttggttgtgaccggtttgctttgtatgcgatagccaggtattgcgatgaaatggtttcggatgggtttggcggcaaagagccacgatttactttcaatgcctatattacctcacagcggaaagcgaaagacgttattgatgatttggcatccgtatttcgcggaatgcctttatgggatggagtgcagttaacttgctttcaggacaggcccgcagatccggaatggacatacacaaactcaaatgttatcggcgggaaattcaattatacatcaacagctaaaagtgcaaggcataatgcagttgaagtttcatggattaacccggataacggctggaaggaagagagggagtttatacaggatgatggtcagatcataagatttggcggactgaatgttaagaaagtaacggctttcggttgcaccagcagggggcaggctcatcgtgttggtaaatggattctggaaacagagaagcttgagactgaaagtgtaacattcacgactttcagggagggtattaattgtcttccgggtgacatcattgaaatagcggatgattcatttgcgggttcaaaagtcggtggccgggttttagatgttgttggcagcagagtaaaaacagatgcacctataaaatggtcttctggtgataagggatattttgcgtacctcggcggcagcgggaagttcatcagaacagaaatatcatcagtagatggcgatattgttatcctgaagagcgaaccagccggactgcaaaaattcggtgtgttttctgtatcgaaaaacacgctgattacgcgaatgttccgggtactgactattactgaagataaagacggtaactatcagtttaactgtattctccatgaaccaaaaaaggagcgcattgttgatgatggtgttaatttcaccggcaatccgcctgcacaaaatacggttcgaatccctgacattgaacgcctttccgtagcttatatcaatgacagctctcaggttcaggccagagttatgtgggccatggcaaccgctaaccgcaatatttcttacgttgtttctgtttataaagatgacaaggttgtctttactggtgaaacgtctgatcttgaatattatttcaacggattggccgctggggaatatcaggttggcgtacgcggcaaagataaaaatggaatgctgggaagcgagtcgacagtgctgatggttattggtgcaccagcggccccttcgtttatcagagttgagtcaggcttctttgaggtgaaattgataccacatatcagtgccccgcacacactgaatactgagtttgaattttggttttccggcgagcaaagaatcaccaacattaataacattgaacaggaggctgaattccttggcagggcaaaagtatggtcaaaaggtcagttaaagcccggacatgattactggttttatatccgaagtattaatgagtatggtaagtctcattttattgaagaaaaaggtcagtccaataaccatgccgatgaaatattcgatgtagtgcaaaaagagctcgaagactcagccatcattaaagacctgcagtctcaggcgaatgataacttcgaggccattatcaacaacgccaataacgtttacggtcagtggggttactggcagcgtgaaaacggtgcgatgaaagcggaaatcatcgaagtccgcaactacacggttacggaaacaacggcacttgcagagaaactggatgcggtacaggttaaagcagaagacggtctggcgctggcgcagaactccatccatgcgcagtgggatatggcatccggtcaggcatcggtggtccacgatatgaaagtccggatccgttataacggtgaggattattccgccggtatggttatcggggcagagctgaaaggcggtcaggtgagcacgcttatcgggtttaacgcgcagcattttgcattttataatccggtgaaaaaatcgatggacatgtttatgtacatgaaggacggacaggtctttatgcgtgaggcgttcattaatcaggcatggcttaacagtgtggttgtcactgacaaaatgcagtcagagaactacgcgccgggtaaaacaggattcctgattgatgcgaaaaccgggaaaatggaaataaatggttctgatacctccggtggcaggatggaaattaagaatgaccagatccgtgtgtgggatgaaaaaggtcgtctgagagttgaaatcggaagattaacaggatga

SEQ ID NO: 279384 - DNA, 279 bp, Morganella morganii
atgactacacgaagaaaccctcagtttaatgttaggattccaccagagctgaaggagaaggtcgtcgctttagctgagaaaaataaacgccccgtaaatgccgaaattaatgcagcccttgaaatgtgggtaagcatggatttcccgtcttcaccagcagaaggactggccgctttagctcagcaaatttctgagcttaatgaccttattgagaaaatgacgaagaaagcagcggaaagaatgagtgacgaacagtataaaaaagacgagaacaaatag

SEQ ID NO: 279385 - DNA, 816 bp, Morganella morganii
atgacaagtatatcaacaatcaacgtacctttccacggtgacaatctgtacttggtgagttatgaaggccagccatttgttgcaatgcgcccattcattgaaaatatggggctagattgggcatcacaatatacaaagataaaacaacgttttaagacctgtgttgtgaatatcacaatgcagcttccgtgtgataatcagcgccgtagcgtggtctgcttggcacttaaaaaattgactggttggcttcatacgatcaatatcaacaaggtcaggccagagatacgagataaggttgccgcttaccaagataaaagcgacgatgttctttatgagtactggactaccggcgaggtaaaaccaaagcacaaatctacagtgcaggacagaaacccgttaaagaacgccgttaaccttctcgtcagtaaaaagggaatgatgtatccagaagcttattccctagttcatcagcggttcggtattgccagtattgaggaactcgatatcgcccagataccgaaagctgtcgagtatgtgcataagttggctcttgaaggagagtgcattccgaaggaagacccgcgaggaatcacacatctccgcgttaataaggatttaaatgttcataatataaacgcgctggcgaagcactacgaggcgatttacaccgcatggaaaattgagttatatccggcattgcgcagtgtcgattctcctattgctagtcggttatatgaccgcttcaaggatggctatgcgttcctcatgctcttgcagaaaagccttaacagcaagcactctgcgttaatcaattaa

SEQ ID NO: 279386 - DNA, 534 bp, Morganella morganii
gtggattccttgccagggcaaagtaatcacccttctcagcacgatgtggtttcctgtgacgatgggagtgatacggaagtagctattcaggagattgaaagggttgttgtcgataacccacaggttctgaagcgcatacttgacaatccaaaggcagtttctgttattgaaaaaagagagtttttccgtggtccgctgccacaccctcggcagcttaagcaatataatgacacccttccgggtgccgctgagcggatttttcaattgactgaaagagagcaagcccatcgacataactcagaaacgaaggcccttaatggtgccatatctcgtgacaaacgtggtcaatggatggcgtattctctatccttattaattctcggtattgctgcatattttgcataccagggtgataagtggttcgctggtgtacttatcactggtaacttggttgcgctggcaaccgttttctctataggaaagagggcaggaaaagaaaaagagcaacctgctgacttaagtgaaattgaataa

SEQ ID NO: 279387 - DNA, 198 bp, Morganella morganii
atgacattagtaatgcgcaaatacctcagatcttttgggagcgtcatgaatattcgcccgtcaactgactatcgctcagtcattaaacaaggctccgatgtaagtaagatatcgggtgatgtggctgcgataggtaaagatatgcggcgcgttatcaaaaaagaggtatctcgtggattccttgccagggcaaagtaa

SEQ ID NO: 279388 - DNA, 468 bp, Morganella morganii
atgcttactgagcacattgagcaaaaattcaaaaatgacatgtttgagtttgtttacgcatatgcacgttttgaatactgcataaaaaagaacgtggagtatagcgatgaaaaaaaagtagaaggtaaggcagtccaacctaattgggatggtttagttagtctcaataagcgcagtcttacaatagacaatattccttctggcaagattttgattgatttaaagcccaaaaagcaggtatttagccgcgaagggtggaaggaaatagttgacactggtaactatttaaacaatgttgtttctgctttaaaggctgtaaggaataacctatttcacggaggaaaggagtgtgagagcgggttcgagtctagcgacagaaatatggacctcatccgaaccggtactaaggttataaatgagatggttgttgcgctgaggtgggataatgattttagcgcccggcactaa

SEQ ID NO: 279389 - DNA, 168 bp, Morganella morganii
atgccccacggtgggattggcttcaatgacgcacggtgtggcaataagttcggcaaattcttcctcgacaaatcggcacactctgcaaaacaggttgaagcgttccgctataacgatgaaggcattaaggcacttcgccatatcattcacggtcagcaggtagcttaa

SEQ ID NO: 279390 - DNA, 456 bp, Morganella morganii
atgagtagagaagacccgcaattacgcataaggcttccggttgaattaaaagaaaaaatagaagattcagccaaggcaaacactcgctcaatgaatgccgagattgtccagcgccttgatgtcagctttttgaatgaaccgccaagtgacaagctaatctccgcgcaagaagccgctcacattgccagtaaagcgagagaggaattatccggagttattcttaaaaagacatttgatgaaataaataaaaaaattcgtatcggccacacccaattttgcgtttcacttagtgagtttgaattggaatcccttgatgacgatgcgtttttttcagtcctagaccctacactcaacagactgaaagagcttggctacgaggttccacaaaaagcctttgattgcgaaggttttctaatcgagatacctagcaaaaaaaatgctcagaatacagattaa

SEQ ID NO: 279391 - DNA, 696 bp, Morganella morganii
atgtctgaatatgtagcaccaatattcaagggtgatgcgttccattgtccgcactgtaatgtactttcacatatgatatggggagcattatcgtcaaccagacatgacggacaatctcgttggactaattttttgtgctctacctgctcgcattgcgaacaagaaatgttttggcttgtcactgacggaggaagccctctcattccgcttttagctgctgctaaaagcggagttatggtatacccagacacaatgattgcaccaaccccgtctgacgatatgcctgatgatattaaaaaagactaccttgaagccgccaatatctgccaaaaatcccctcgtggtgcagcagcattactgagattagctactgaaaaaatgttcacggagctagaaaaagggcataacgctgttgaggactctaaaaagaaaacgcacctagccacgattatccaatcgtttaaggacaaaaatataatcaacgaaacgctgtttatggtggcagattcacttcgtcttgctggaaacggcgctgttcacccaggtaaaattgacagcgataatatatctgaaattaccactgaactatttgaatttattaacttgattgttgataaattaataaccgagcctaaaaaagccaaggaaatttttgataaaatcaaagcaaaaaaaacaaataacactaactcttaa

SEQ ID NO: 279392 - DNA, 192 bp, Morganella morganii
atgaaatacagaattacatatatgttaaaatcacaaaatatatcaggtacatatgattttgttgtagatgacatcgatgttgatatagaaaacgatagtgaactatttgatttggttctaagagactctgccaagtaccatcagtcaggcacatgctccgtaaatatcactaacacagaacctgttgaataa

SEQ ID NO: 279393 - DNA, 354 bp, Morganella morganii
atgccaccacgtataccccgcgcgtgccgcaaacgcggctgcgcaaagacaaccaccgaccgcagcggatactgcgaagaacatcgcaatacaggctgggagaaccaccagcagggtaagagccgtcacgaacgcggctatggtaccaagtggagccggttgcgtgctgtggtgctgggcagagataagcacctgtgccagcagtgcctacgtgaaggtcgggcaactgaggcaaagacagtcgaccacatcacacccaaggcacatgggggaaccgatgcggaaagtaatctgcaaagcctgtgctggccctgtcattaccgcaagacggcgacggaacgtaaccacgtctga

SEQ ID NO: 279394 - DNA, 471 bp, Morganella morganii
atgccgggaccgccgaaaaccccgtcacacctgcgtttggtcaggggtaacccatcaaaacgtccgatcaataaaaaagaaccaaaaccgccttcaggggtacccccaacaccgaaacattttactaagcaggggaaatactggtttaagcggataggtgaagaactcaatgcgatgggtgtcatgagttcgatggatgccaaagcactggagctgctgatcgaggcgtacaccgaataccgccagcactgcgatacgctggacgaacaaggctacacctacacaacacagagtgatggcggtccactgataaaagcgcaccccgcggcggcaatgaaagctgatgcatggaaacggctccgcgcgatgctctccgagttcggtatgaccccggcagcccgatcgaaggtaacgattaacacaccagccgaagaagaccctttcgaggcatttatgaaaaagcgcaaatga

SEQ ID NO: 279395 - DNA, 336 bp, Morganella morganii
atgatcgaaacattcacctggtgtccccgtgttaatcccacggaggacatcacctataaaatccgcagggcgaagttcggtgatggttatgagcaggtatccggtgacggtatcaacgcccgcagccagaagtggtcactggaatttaccggtcgcggggagtacatcacggctatccgtcagtttatcgaccgtcacggcggcataaaggcttttcagtggaaacccccgcttgaacctgtggggttataccggtgcgccgagcataaacttaccccgctcggcggtgacaactattcactttctctcacttttacccaggcgtttaaaccatga

SEQ ID NO: 279396 - DNA, 759 bp, Morganella morganii
atgatcacaaacgattaccagaagctggaaccgggtaatgccgtccggctttttgaggttgatggtaccgcgttcggtgcaccggatattttgcggttccatgcatacaatatcccgcacacagaggcagagattactgccgctggtggtgatccggaaaaattaccggcgaaatccatctggtggcagggtaatgaataccgcgcgtggccggtacagattgacgggattgaggcatccacaaccggatccggtgcgcagccgaagttatcggtggcaaatctggacggttcggtcactgcactgtgtctggcatacgatgacatgctgaaggcgaaagtcacgatacacgataccctggcgcactatctggatgctgataatttcccggacggcaatccggcggaagatccgacacaggaaaaagtctcggtcttttatatcgacagcaaatcctcggaaaccaatgaggttatcgagtttgaattagccagtccgatggatttgcagggggtgttgatcccgacgcggcaactgcatgcaatgtgtacctggtgcatacgcggcaaatacaaatccggtgacggttgtgattatgtcgggcagaacgggtatttcgataagcacggcaatcgtgtggatgatccggcacaggatcagtgcagcggcatgctgaacacaggttgcttcccccgcttcggcaaaaacaatccgatcccgtttggcggctttccgggaacctcattactgaggaaataa

SEQ ID NO: 279397 - DNA, 711 bp, Morganella morganii
atgatgcgtaaaaacattcaggcagctatttttgcacacgcagaacgtgaatacccccgcgagtgctgcggggtgatcgcgcaaaaatcccgtgtagtgaaatattttccctgccgcaatgtagcggtcacgccggaagagcattttgtattatcgccggaggattacgccgttgctgaggattggggtacggtgaccggtattgtacacagtcacccggatgccaccactcagccgtcagaactggataaagcacagtgtgatgcccttggcgtgccgtggtacatcgtcagctggccggagggggatctgcggactgttcagccgcgcggtgaattaccattactcggtcggccgtttgtgctcgggtttacggactgctgggggctggtaatgagctggtttcggcaggaacgcggcattgaactgccggattaccgggtggattatccctggtgggagcaggatgagaaccggtacgccgataactggcaggaggctggatttattcaggttgacgacccgcaacccggtgatgtgatagtgatgcaggtacaggcacctgtcgctaatcatgccggtattctgctgggtgataatatactgctgcatcatttgtacggacatctgagtcagcgggttccgtatggcggttattggcgtgatcgcacagttatggtgctgagacataaattgcacatgacaacgtga

SEQ ID NO: 279398 - DNA, 594 bp, Morganella morganii
atggtaaaaatagaacttggtggtgtgttaggtaaaacgtttggcaaaacacatcagcgtttaataagcactacatcagaagctattcgggcgctatgttgcactattcctggttttgagcaatttctgaataccagtaaatcgcgcgggctgacttatgcagtgtttcggggtaaaaaaaatatcggtgaagatgatcttgggtttccggtaacaagtgatgttatcaggattatacctgttgttatcggcagcaaacgcggtggcttattccaaacaatatttggtgcagtgctggtggctgcggctgtatttatgtcaggtggtatcggtgctgcttttgcggctggtggtatgaccggctttatggccacaaccggtgcggctatgatgctgggcggcattatccagatgctgtcccctcagccaaacgggatcgccatgaaagaccagggcgaaaacaaaccgtcctatgcgttcggcgcgccgacgaacaccgtttctcagggctacccggtaccgatcggttacggtaagcgccgcatcggcggagccgttatctcagccggaatttacgtcgaagatcagcagtaa

SEQ ID NO: 279399 - DNA, 3075 bp, Morganella morganii
atgccgacattaacaactgcacaaattaaatcatcactgaactcagctaaacaatcagcaggtaaaaagctgcaatcagctggagcatcaacaaaagatgctttaaaaaaagcagccgaacaatttcgtaatgcaggtaataagcttattttgtttatacccaaagattatcagggacagggttcaggtcttaatgatctggtcaaagcagcagatgaattaggtattgaggttcagtacgaggaaaaaaatggtacggcgatagcaaagcaagtatttggtacaacagaaaaactgtttggcctgactgagcgtggtatcgctatatttgcacctcagctagataagttgatgcagaaacatcaaaatatcggtaataaactgggaggaagtgcagaaaacttggggaataacctgagtaaagcagggggcgtattatcaactctgcagaattttttaggaattgcactgtcttcaatggaattagacgacttattaaaaaaacaacataaaggtgaagatgttagttcgaatgaactggcaaaagcaagtatcgagcttattaaccaactggtggatacagcagcaagtgttaacaataatattgatgcattttcagagcaaatcaataaattaggtggtttgttgtctaatacaaaacatttgaaaggtatcggcaacaaattacaaaatctaccggatcttggaaaattgggtacagggttagatactatttccggtattttatcagcaatttcagctggttttattttgggaaatgaaaatgcagatggaggaaccaaagctgctgccggtgttgaattaactacaaaaatattaggaaacgtaggtaaagctgtatctcagtatattctcgcacaacgtgtggcacaggggttgtcaactactgctgccggggctggtctgattgcttcagcggttgcattggcgatcagtccgctgtcattcctggcagtcgctgacaaatttaaacgtgcgcgtcaaattgaagagtattctcagcgttttaaaaaatttggttatgaaggtgatagcttacttgcttctttccataaagaaaccggtgctattgatgcatcattaaccaccatcagtacggtgttaagttctgtatcggcaggtgttggtgcagctgcaactgcatcacttgtgggtgcaccgataagtgcgttggtaggtgctattacgggtattatttccggtatactggaagcctcaaaacaggcaatgtttgaacatgttgctaataaaatggctaataccattgctgaatgggaaaaaaaacatggtaaaaactattttgaaaatgggtatgacgcccgccactctgcatttttagaagataactttaagttattatctaaatatagcgaggaatattctgttgaacgggctgttcttatcactcagcaacactgggatgaattaattggtgaactggccggtgctactaaaaatggagacagagctcttagtggtaagggctatgttgattattatgaagaaggaaagcgtctggaaaagaaaccagatgaatttaaaaagcaggtttttgatccattaaaaggaaatattgatctttctgacagcacatcttcgacattacttaaatttgttacaccattattaactccgggggaggaaacccgcagcagaagacaatccggtaaatatgagtatatgacggaattgttagttaaaggagtagataaatggactgtcaaaggtgtcagggataaaggctctgtatacgattattctaacttaatccagcatgctgtggttggtcataaccaataccgggaaattcgtattgagtcacagttaggtgatggcgatgataaaatatttttatctgccggttctgccaatatttacgcaggtaaggggcatgatgttgtttattacgataaaacagatactggttatttaactattgatggaactaaagcaaccgaagccggtcgttatactgttacccgtgaactggggggcgatgttcaaattctgcaggaagttgtgaaggaacaagagactaaagtcgggaaaagaactgagaaaactcagtatcgccattatgagcttaaacatatcaacggaaattctctgacatcagtagataatttgcattctgtggaagaaattatcggtagtagccgtggagatacgtttttaggcagccggttcggtgatattttccatggtgcagatggtgatgataaaattgagggaaatgacggtaatgatcgcttatatggtgacaaaggtaatgataccttaagaggtgataatggagatgatcaattatatggcggtgatggtaacgataaattaattggcggtaccggtaataattaccttcacggtggtgatggtgatgatgaactgcaggtacacggtagtaatacccggaatgttttattgggaggtaaaggcaacgataagctatatggcagtgaggggtctgatctgcttgatggtggggaaggaaatgatgtactgaagggtgggtatggtgatgatatatatcgctatctttcaggttatgggcatcatattattgaagatgaaggtggcaaaaatgataagctaagtttagctgacattgatttccgagatgttaccttcagacaggaaggtgatgaccttgtcatgtataaagcagagaataatgtagtttcgtttggtcataaaaatggtattacttttaaaaactggtttaaacaaacatcacatgaaatttcaaatcataaaatagagcagattattgataagaaagggagagtcattaccccggactcactaaaaaaagcacttgaataccaaagcaaaaataatcatttaaactatgtggatggacataatgtatcaacctatgaaaatgaaaataatcttaatttattaagaaatgatattagtaaaataatttcagcagctggcagctttgatatcagggatacaagacctgctgatatttcatcattactgacttctcatggtatcagtaatttttcttatagcaacagtgcactgaccgtaacctcattagtgtaa

SEQ ID NO: 279400 - DNA, 918 bp, Morganella morganii
atgaacaaagccgctgaggaagggcgcccccttgatgcggaggaatccgaaagttatgacgggctgacagatgaaatcaaatctgttgatgcgcatctggcacgtctgcgcgagatggaaagtacccaggcaaaagaggccaaaccggtggatgcagagcagaaatcattccgtgaagccgcccaactgcgcggcggtgtgattaaggcggacgaaaaactggaacccggtattgagtttgcccgttacgtgaagtgtctggccgcttccaaaggtaatacaacccaggcactggagattgccaggtcacagtatcctgagcagccgcgcctgcagaatgtactgaaagcggccgtcagcgccggaacaaccaccgaccctcagtgggctggtgctctgactgaatatcagcagtttgccggtgattttattgagttcctgcgtccgaaaacgattatcggtcagttcggtaccggcaatatcccgttcctgttccgtattccgtttaatgtccgtattccggggcaaatcagcggcggtcagggttactgggtggggcagggcgcaccaaaaccgctgaccaaattcgattttcagtctgttcagctgggggttgccaaagttgccaacattgctgtactgacggatgagctggtcagattcagtaacccggcagccgatacactggtccgtaatgcgctggcttcggccattattgaacggattgatattgactttatcgatccggctaaagccgaagtggcacaggtatccccggcatccgttaccaacggggtaacggctattccgtccaccggtaatccggaggcggatgttgaggcattatttgaagcgttcttgaaagccaacctgtccccgaggtggtgtatatctgtttgtttttattttggatgttaa

SEQ ID NO: 279401 - DNA, 252 bp, Morganella morganii
atgttcacaatcaaagtaactaccgcatcaggtaaagaagtcattgagtccggttacggcattcagtggacaccgtatgcatttaagctggattacaccgaccacaacaactgtggtgacgacctcgtattacagccgggtgacaaggctgaaattatcaacagcgccggtcatacagttgcccgctacgttaatgatattaaattacaggatgcactaatcagcatcaccagaccgggttctgcactgtga

SEQ ID NO: 279402 - DNA, 378 bp, Morganella morganii
atgaaccggaaagaaacggtaattgccgcgctgtttattgctgctgtctggtgggtatatgacatttaccgggataaccagcaactgaaggtgaataacacaaggttgtccggacaactgtcagcccaactggtgataaacaccaccacgctttcagccatcatcaccaatcaccgcgtatcactcgacaacatcaaagccaaacagatcgagggtacagagcatgtcaaggttaagacagttatcaaaacagtatttaagggcagtgaatgcgctgttactcctgttcccgctgatgttgtcagtgagttgcgcagatacgcgaccggaattaatacccgcaccggtgatatcgattccaccacaactgaccgctga

SEQ ID NO: 279403 - DNA, 420 bp, Morganella morganii
atgaataaccgattatttaaaaaagtcatggccgcttgtgccgccggggcgattgccggtgcgctggtgctgatccccgcgtatgagggtgttgagtacaaaccttaccgtgatgtggctggggtgctcaccgtatgttatggccataccggtagtgatattcagcccggcaagctgtatacggatgctgaatgtaaggcgctgctgcataacgacctgacgaaagtccggcgcgcggttgacccgatgatcaaagtgccgattgatgacaatacccgggcggccatctattcatttgcatataacaccggtaccggtgcgttctcgcgttctacgatgctgcgcaaactcaatgccggtgatatcgccggtgcatgtgacgaaatgaagcgctggacattttccggtggtaagcggtag

SEQ ID NO: 279404 - DNA, 276 bp, Morganella morganii
atgcttaaatctcttctgactttcgaccagatgataacccctaaacttattactgtactttactggcttggcctgattggtgttctgttttccggtattgcaactatttttgtcagtaatgcttacggtggcggttttttcagcggacttatcagcggactggctactatcatcttcggcggactaggtgtccgtatttcctgcgaactgattattctgtctttcaacatttacggaaaactcaaagagatcgcggaaaacacaaaaccacagtaa

SEQ ID NO: 279405 - DNA, 321 bp, Morganella morganii
atggcaaaatatccaagtcaactacaggataaatttaacttaaggcttccggacggaatgaaggatgctattgctgcgagagctgaaaaaaatggcaggtcgatgaattccgagatagtgcaaattcttcaggacgcactggatggctcatctactgatgttgacattgccaatattcataaactatccccatcggaaattgcatcacttttaaaaaaaatacaggcagatatcaataaactacaagataagtgggtggcggcattcgccatgcatgcctttaacgcgcctgccgactccatggatagtaacgatcaatag

SEQ ID NO: 279406 - DNA, 171 bp, Morganella morganii
atggatacactttatacccaacgagcaacagaaaaatataacttaagacttccaaagcgcgtaaaagagcgccttgagcaacaggcaaaggaagaggggctatcgcttaattcagcgattattcaacgtctggtgcggagcttgaatgatgaaaatcggatgcgtggttaa

SEQ ID NO: 279407 - DNA, 567 bp, Morganella morganii
atgaacagtgtagcgaaaacagacttaactttccagaacttcacgtttaacccggttactgaaaatggtcaggtgtggctgacttctgcggaattggcgaaggccattgggtataagaaaactgatgcgatcagccagctttattctcgcaatgctgatgagtttaccaacgcaatgacaacgaccctcaaaatgagtgtcgttagaaaaaccggtacagtcgatatggttgtccgccttttctcactgcgcggcgctcacctgatcgcaatgttcgcatcaacgccggtcgccaaacaattccgtaaatgggcgctggatattctggatcgtgaagtggcagttaacgggctggatgagcatcttctgttacggaacctcaccaccgcctataagcacatcaagcgcattaatgaaatatggggaggcatgctatcgccatcgttgcgcagactgaatatggaggttgattctgaaatgacagggcgcttaaaggacgtgcaaggcccgttgtttagttctttgaaacacatggagtggcattcaaaagcgaggttaacacattga

SEQ ID NO: 279408 - DNA, 735 bp, Morganella morganii
atgaacgaattgactttatcaaatagctttggcgttgtcacgggcaaagtaatcgatacgcaaaagctgctttccatgattaacatggctcgcaagtcgtgcgatgaaaatcaaatccgtaataacgtattgattgaacgggtaaaagatgaattggatggggagttttacaagatttttgtaaaaccctctggcgagtcaggtggtcgcccgacagaagttatcgaaatggagatcaagcaggccctgcgtgtcgccgcccgtgaatcaaaagctgttcgccgtgtgttggtcgataagctggagtcaatgcatattgcggcgcagaaaggcggaaagagccagtccggacttccggaataccgtcaggcgcggacactgaaaatgtcagtggatgcgattggcaacctgtttgacatgatgccaaatctcagcccggaagcaaaacagtgtgcggcagcgaatatcgttaatccaatcgtcggttttgaggctgttcctctgcctgttcttgagcagaaatattataccgccggtgaagttggtgagatgctggaagtgtcggcgaataagataggccggattgccaataagcacgagctgaaaactgatgagttcggcaaattcttcctcgacaaatcggcacactctgcaaaacaggttgaagcgttccgctataacgatgaaggcattaaagcacttcgccatatcattcacggtaagcaggtagcttaa

SEQ ID NO: 279409 - DNA, 453 bp, Morganella morganii
gtgaagaaggtattgattgcactaattatttcattagtgtcatttggttctcttgcgagagatctgacaccggctgaagttacagctgtagaaagagcagtaagagaagaaatgaaggacccagatgcggcgaaattttatcatggggattttcctaaaacagaaactaacagcctttattgtgggatggtgaacggcaaaaactcctatggagcatacactgggaaaaagttattttctgctttcattattgagaaagatgatggcggagttggagcgttatcgatggatagaaatatggcgagtggtgagccgttatctcaagatgtgatcgccgcttcatgtgcaggtgctggatatccaactaaagtaaacaaaatttttgtcgggaaagttaacgaggcaagaagtaaaaatgggcttccggcgctaacgaaagcacaaatagagtag

SEQ ID NO: 279410 - DNA, 228 bp, Morganella morganii
atgaacattaatgtcagcgttaaactctcctgccctgactgcggaaatgagtctttcgaaatcgactccgaagcgcgggacagaggggattacgagggagccatctgttccggttgtggccacaccatgacggcagatgatgtcgttgcttgcgaggtgaaatctgtcaaggatgcggctgatgacttcatccggaacagcctcaagcgaaccataggcagacgataa

SEQ ID NO: 279411 - DNA, 1908 bp, Morganella morganii
atgacaactatccctactcaaaatgcagtaccgagtgaagcagctcgcgacctgaaatttaacgcaggaaaaattgacgaatttgttacatcgctggagcgggaatataaagaccggtttggtcgctgtcatatgacaattgaaggcatgcgctggatatttgaacaattgatggagcgattcaaggttgatatcaaccacgcaattatagccgcaggctatattcctgtggatagtttccaaaagggtgctgatattacaaaacgcaatgagatattgcgtgatgaggaaaccgggctttattatcgctgggatggtgatttacctaagagcataccagccggttccacccctgaaaattcaggtggggttggatatggtgcatgggtggctatagaaagaacgcaagaccgtattttttacaaaacagtgtctgacatgatcggcaacaagtctattgttcctccaatgtatgtaaatacaggctcttattttgatggtgagaccgggggagcgacatatagaataatgtctattgccgatgcgcgctctttttttgaagatcagtcatggttacctgacaatatcattaaccataaaataactgatgatgttgtcgcggttattcaggttggtgacgccctcgatgtttctcaggctggcgctcagaatggcggtgttattgatgccactaaaaactttcaggccgcgcttgattatcataaaaatgtaacattttcaggcttgtaccttatagacccaagcgtttcaataaaattaaataccggcaactctctgacaggtttcggtcagcaacaatcttgtttgctggcaaaatataatacggcaggcagtgtaattcgccgggagctaatcgaagggcaaaaaaacagttatgtagagaatgtactgtgcgacagcttttctgtcttcctcaatcacattcaccaggaatcagtcccggataacattcaggcagcttttaatttcagagatatatcaaggtcagtcatatcaaactgctatgcagggaattacagaaccgggcttgctgagtcactttaccctaactccacaatcaagcagcgagccatgcggggaaatctgtttgtgataggaaaccgaccgtcaggtgacattgcttactgcggcggcgaggtaaataaaattattaattgccgtgcgtggtggggcaagaaaggtattgttctcgatgattatgaaacaaccggtggtagtagcgcagcttacgcaaccacagtacatggatgtgatatacagactgttgagaagggagtatctcaggagtcgcgctataataccggatgttcatttacggacaacgttatccaggatttgaaaaagagctctggttcgacggatccggtatacgcgtatcaggtttctggatatcaaaacaatatttccggcggttatattgaaactaatgattctggaattgatgcgtgcatattctttgacacagcttcacgtaacaacacagcagatatcctgtacagcacggtatctgacgctaagtttctccgtgatagtggtactgacaatattgtttcgtggacgggggataataatgtacgattttcgcatggtgagtgtaaggatgtcgcttatgtcgtaattaatggagctggcgacatactcaacggtaattatgtgcaaaaggttgtaagaaatagctcgggtgattataacattgtatggaaaagcaatcttggacttacggataattcacatatagacgtaacgctgcagtcaaatgcatccgcacaccctgtaaccggattcgtaagaagccatagcggatatacaaccagaatatgcacctataatattcagacgtcggcatatgaggatcttggcaaggtacatatatcaataaaaaaataa

SEQ ID NO: 279412 - DNA, 531 bp, Morganella morganii
ttggtttctgacaccgggaatcacaaaattaaaaaaatcagccatgacggtaaagtaaccaccgttgcaggcggtggcattaatgtagatgaaaataaagttggcgttaatgccacgtcattttcattaaaagagccattgtcagcatcaagtgacggtgatggaaatatatatattgcagactctcttgataacgtgattgtcagggttagcccgtccggcatagttgataaaataattggcgacatgatgagaattgattaccagggaacagggtatggtgatcatctgtttaacacaccatctggcgttacagttaaagatggtaatgtatttgtcactgacagctcatctgtaaaatgggtgaatattggttcaatagacaaaaaatcatgttggaaaaaaataagtgggtcatggtattacccaatgaatccaatagttataaatggaaatctatatatcaataacactggatcaaacgatgttacactgtcttcctggtcatcaactgacgacaagtgcaagtaa

SEQ ID NO: 279413 - DNA, 153 bp, Morganella morganii
atggaaaatatctctacgttgcagagcaacatggcatttaccgtcttgacacaactgatgatattgaaaaaagacggtttgaactatatgccggcgaccctaaatcttatggtgatatttcagatacagacagaatgtcagcccgctttctga

SEQ ID NO: 279414 - DNA, 498 bp, Morganella morganii; identical to SEQ ID NO: 277356

SEQ ID NO: 279415 - DNA, 246 bp, Morganella morganii
atgagcacaattcggagttggttctggagtaccagaaacttcgctgattcgccctctaatcctcagggtggcggatcaagtacttcaaaaccggaagtacgcgcacacagacgcgcaaccgcatctgtgcgggttgataagcgcggagctgttcacattccttcaagcgagctggcagagcttcctgaagttatagaaatgcagaggctcgcaagatcaatagtctgtaaagcaagaagccgctaa

SEQ ID NO: 279416 - DNA, 1953 bp, Morganella morganii
atgattttgataaaaatcattaggggattcatcagtgcagagccacaggatgctaaaatatatgttggtttaaaaaaattattccaggatatacaaaatgaattagaccaatgctggtctgtgttaggtgaaatttatggcaggtataaagaattttcaagcttaggaataaatattcgccggattcgttcatctttagatgatgaaaaaaaatacattaaagtaaaaaaacctggtttcattccaaaaatcttaagctttcgtactgctagttccgagatgatggagttacttatcgctccgttgtatggtgacaacccttatattggcatccgtgaacttttacaaaattcagttgatgcttgcaaagaataccaagactttcaaaaaaatttttcacatttaaattacagagaaaacactgaaccagatataaaaatcatactaacaataaataaaaatggaaaaggtcatcttgaaataattgatcatggtattggaatgactctggacactattaatgaatattttttgaatatcggtgcatcattcagaaatagtgatttgtggcgtaagaatcatgttaaagatggccattctactgttcatcgaactggtaggtttggtattggattactcgcagcttatttattaggagataccctccaggtaactaccaggcacataacacaaccctctaacaaaggcttattatttaagtgcacgaggggtgatacagaaattattgtaacccataccaatgctgatattggtacacgtatttcagtcgaaattgatgaagaaacagtttcaaaactaaatagaaatagaggcggctgggattggtatgttcatacagatttaaaaatagaacgaattatcgtacagaaaaacaaaacagccacattgccacagaaatatatattaccaagttgcaatagtactctaactgatgattggtatagaacacgccaccaagactttgatgatattatttggaaacatccaaaaatagaaaatagacgccctccaagatcaaaactattctgcaatggaattattataagtgaaaatgctgatatcttgcttaatgaaaaaatagggaaatacaatttatttcaatacaacacgcctgacattgtcatttttgatcaggatagtaaattacctcttaacttagaaagaacagcattaaataaaaaagaaccaccgtttaaaaatgaaattatgattgatatttctgaaaaaacagtatcaagtatattatccgcctttaatttgtatgaaaaaaaaccaactatagatttaatgcacgaccttattaattttaacattcaagaactagaagtcatctttgaatatagtaatttaaaaatatccagattcatgctatcaaatgaaaaaataataccactcgatattaaattactatcattagaaaagccacgaaaagttttagtgaattttatctatgaggatgatagttatataggggatatcacttcaataaaagaaagctatgattatatacttccaacatgtattaaaaataatagcaaatcacaattatcatcatgggttcgtgacatttttgagcttaattcatatagttatatgaaacgcactggattaccaatagtaggacgccgaattttaatttctaaaaaagaagtagaacgacttgtttctccctcatatgttcctaaaaccttttggaggactctaaacaaagagtgggaagataatgaatggattatgtacagtattggcaatatagataaatttgagggggatatagctgctattgtagctcatttcaaaaaaaatggtgaaatcatgtttgtacaatataatttagattgggatacgatcgacacaactgaaaatgaaggcaactatttcgcagatgcatggcttaaattaattaagaagccatttattagtataatataa

SEQ ID NO: 279417 - DNA, 2379 bp, Morganella morganii
atgaatatcatgaaaaaaagtaaactctctattattttacttatacttttgtcgtctcctttatatggaaaagagaataatcaagataaaagccaagaaaaagaaacatcaaacgatgttattactgttaaagcaacatcaataaaaaacaaagagacattctcctctttattactcaataatcgagaagagataaaaggaaaacaacttgaacaaataaaaacaaatacgattggtaataccgtttcaaaagttgctggtgtacaagcggaaggttttggcccaaatgcggcaaggcctgttattcgaagtctctctggcaatagagtcgggattttagttaataatcttccgattaatgatgtttcatttattagtgggaatatgcctattcctgttgatatgaatagaattaacgaaatatcaattagtaaaagctccgaagcactactttatggtggtagcagcagtggtggtgcaattcatttgtgggatgatcgaataatgacacagtttcctgaaaaagcaatttcaggtgccgtgacatttaatggtagcactaataatggtaacggtggatcagtaaatattaaattcagtaataaagaaaactggatttttaatctttccggtgctactaaacgagtctcaaaatataaaattccaacacgctctaaagttggtgcttgctatagctatcaacagctaaaagaccactctgcattacgtgatcaatgccaagtggatatgaaagtgtttactagccgtaaccctgaagcgtatccttacattagtgagttttggaaaaaatatcaggttgaatatgagttaagcgaggatgataaatatacctttaaagataaggactatttttcaggtattggttatgtagataatgaacctaacttacgatataaacctggtagccccacatctattgaacatgtcacacctccaaagcattatgttgaaaataataataacgaaattcccaatagctttttaaaaagccaaagtggtaacgcatcactctcttatatcggagatgacggttacttaggtttttctgtcactgattttcaaacatcgtatggagtgccaggctatgcttatctcacaactaaaacaactcgagaaaggtataaacctgtttcggtttcaaatagtaatcgaagaatagatatacaaggaaaacatgatcatttagcaccatttttaagagacagtgctttttattattcttattctgaatctaaagatgaagagttagtcggccaaattgcttcatcggtatttaatacaaaaagccatcagttagctttagaaactgcacatactccgctatttaatcgacttaatggtgcgtttgggatcaacggtaattatcgtgatctgaaaacgtctggttatgatgcttatttacccagtgtattaaccaaagagtacggaatatattgggttgaatcgctaaatttatctccttttgagctcactgctggatatcgtaaaggttacactcaacataatctcaatattccagcgaattataatcgtggtagagggcaaggttctaatttacaaaaccgtcattttgatacaagtgcaaatacactcgctctatcttttacaccaattgatgaatggacattaaaactacaacaaaatatttcttatcgagcaccagaaattaatgaactttatacacatggccctcattatgcttatttaattgaagaacaaggaaacagtgaatttaataccgaaaaaagcaaaagtattgaattatcatctgttattgagattggcaatttctctaataaacttaatttgtataaaacagactacagtggttttaaatttagacgattaacgggtatcagtcgtggtgctggtcctgttatggaatgggatgacaccgatcttgaaacaaaaggattagaatatgaatttaaatatttatatgaaatgcctcatgatcacaatctaacatttacactatttggtgattttgtcgaaaataaaagcaaaagaaaactgtttattgcaggtcactatttgccaaatttacctaatgaaaagcatggtatcagtatttattaccaacatgatgaattaactgcatttagtagtgcaacttactataaaaaacaaaaagaaagcggtgggttaatgtatggtggagatatggcctttccttcctatacgttagttgatgcggggattggcaaaaaataccaccttgataaggtagatgtttcggttgattttattattaataatctcaccgatactgaagcaagacctgcatcttctcaattgaaatatttagtcccattaccgggtcgaaattatgggataaatgtcaaaattgatttttaa

SEQ ID NO: 279418 - DNA, 177 bp, Morganella morganii; identical to SEQ ID NO: 14595

SEQ ID NO: 279419 - DNA, 348 bp, Morganella morganii; identical to SEQ ID NO: 190917

SEQ ID NO: 279420 - DNA, 207 bp, Morganella morganii; identical to SEQ ID NO: 16661

SEQ ID NO: 279421 - DNA, 1065 bp, Morganella morganii; identical to SEQ ID NO: 103821

SEQ ID NO: 279422 - DNA, 348 bp, Morganella morganii
atggaacgatggcttgccggccatcttatgaggaagctggggctggtgagttgtcagcagcctgttcaccgatatagacgtgggggacacgaacatattgctatcccgaatcacctcggacgtcagtttgcagtgacagtgcctgaccaggtatggtgcggcgatgtgacgtatatctggacaggtaaacgccggacttaccttgctgtggtactcgatctatttgcacggaaacccgtggggtgggcaatgtcgttctctccggacagcaggctgaccaccaaagcactgaaaatggcatgggaaagacgcggtaagccatccggggttatgttccacagtgattag

SEQ ID NO: 279423 - DNA, 303 bp, Morganella morganii; identical to SEQ ID NO: 190916

SEQ ID NO: 279424 - DNA, 135 bp, Morganella morganii; identical to SEQ ID NO: 103823

SEQ ID NO: 279425 - DNA, 144 bp, Morganella morganii; identical to SEQ ID NO: 29491

SEQ ID NO: 279426 - DNA, 276 bp, Morganella morganii; identical to SEQ ID NO: 5786

SEQ ID NO: 279427 - DNA, 378 bp, Morganella morganii; identical to SEQ ID NO: 146978

SEQ ID NO: 279428 - DNA, 477 bp, Morganella morganii
atgaataagcgattggttaaaaaggtaatggctgcttgtactgccggggcaattgccggtgcgctggtgctgatccccgtatatgaaggtgttgagtatatgccttatcgtgatgtggccggagtgctcaccgtatgttatggccataccggcagtgatattcagcccggcaagctgtacacggacgctgaatgcaaggcactgttgcatgacgacctgacgaaagtccggcgcgcggttgatcctatgatcaaagtgccgattgatgacaatgcccgggcggccatctattcatttgtctacaacgtcggccccggcgcgttctcgcactccactatgctgcgcaaactcaacgccggtgatatcgccggtgcgtgtgacgaaatgaagcgctggacattttccggtggtaagcggtggcagggtctgattaaccggcgggatacggagaacgcggtatgccacggaaccccttaa

SEQ ID NO: 279429 - DNA, 204 bp, Morganella morganii
atggctaatgtggcagaggagattggcagctcgcaggtaataaaaaacccgccggagcgggttgttgtgttttatttgctgaaatatttaatattcagtccattcagtatcccgggaataaaccggaatataatcttattgaaatataagtattctttctctgtcaaaaccatgttcaccagcaaagctgagatactcatttaa

SEQ ID NO: 279430 - DNA, 411 bp, Morganella morganii
atgaaatttaaaaataatattgctttaagtacggtactgtctgttgctatttttaactcagcaatggcatatgacggtacaattagtcttactggatgcactactggacaaaatggatctagtaatgtgaaagctttttttgaacccggagctaatactgactttaatacgaacaaactaaaaaatgcaagctctgacggagcacaaaatgttcaaattcagttattaaataacgatggtactactgctattcaattagggaaagactttgtcggacaggatgtccattcagaagctattaatagtgacgatgaagcgacactacgctatatggcccaatattatgctacaggaaaagcaattgtaggggatgtcatttctagtgttaattacactattgcctatgagtaa

SEQ ID NO: 279431 - DNA, 462 bp, Morganella morganii; identical to SEQ ID NO: 16667

SEQ ID NO: 279432 - DNA, 219 bp, Morganella morganii; identical to SEQ ID NO: 103816

SEQ ID NO: 279433 - DNA, 357 bp, Morganella morganii
atgcgtaaagcctgttttactgagcatcagatcatcgccgtaattaagtcggttgaaaccgggcggactgttaaagttgatgactttaaccgtgagacattgtcgattaaaatcattctgaatctgccagatctgcgaatgatccgtgtactcgacaggatcgcggcaaactgcggctacccgatcatgctgcacatgaataatggtccagaatttatctcactgatactggctgaatgggcagaaaaacatgcagtaaaacgggatcttatccagccaggtaagccgacgcaggacactttcattgaatactttaaccggacataccgtacatacgcgatttttatatattcatga

SEQ ID NO: 279434 - DNA, 1986 bp, Morganella morganii
atgaaaaaatctatttttaattatacaacattttttatttcaatgagttattccttatttgcaaatgcaagccctgcaataaaatcaactgaaaatcggaacaatgaggtattagaggtctattcaacacctttgcatactccgcaagagaaaatggcgatccccgtttctgttctgacacaagaagatctacgcgctaatcgtagtgcctcgattgctgaaaccttaacatccttaccaggttttcatgccagcttttttggtggaggctcagttcatccagttattcgaggaatgtcaggcaatcgagtcaaggtattacacagtggtagtgatcttatggacgtatcctctattggtgcagatcatacaatcaccagtgaaccctttttaagtcaacgcattgaagtattaaaaggcccttcaacattactttatggaggaggcacaataggcggtgcaattaatgttattgatagcaagattcctatgtcagtgcctgaaaaaggctatgagggtgaattgcattatcaatacgattctgtttctaaaggaaatacaggatcagtaggattaacgttaggagaaaataatttggcgcttcgccttgagggtactaaacgttatcaaagtgattacaaacaaccagaacctttacatcaaggagaaactagccgtttagcaggatcttatcaagataaccaatcggcaaatattggtgtatcctggctttttgatgacggttatatagggattggttatggtgaacaacatcgtcgatatgggctgcctggtcatacgcattttcatgatcatgaagatgatcaccatcatcacgccccaattcgccctcctttaatcggccatcatcatcataatcacaatcatgaataccctgatgaacaacatcaacatggtattccttatattgttatggatagcaaacgatgggatcttcgtggtgaaaaaaacaatccatttactggtattgaatcaatacgtttcagtgcggtcagaaccgattatcatcatgatgaaaaagaaggaaatgaagtcagtacctcatttaaaaacaaaggcgatgaattaagactgacatttacacatcaacctatttggggttggcatggtgttattggcgggcaatttaaccagcgtgattttagtgctcaaggagaagaagcttatgtaccgtcaacaaaaacaaaaaatcactcactctttttattagaagaataccaattaggtgattttcgctatgaattaggatttcgccaagagtggcaatcactgttaaatagagaaactcaaaaaaataataagcagagtgcatcttctatttctgctggattagcatggaattttacacaagactattttttaaatttatcactttcacacacgaaaagattacctgttgcagaagagctttacgcgaatggtgttcatgctgcaagtcgaactattgaaaaaggcgatcctaatttaaccgcagaggctgcaaataatattgatattggaataactaaagtaacaggtgatattcaattcaatatgagtgcctattataaccgtattaataattatatttacggtcaatttacggggactgaattaaataatggctatcgttcattacaatatgttcaaaatgatgcacagtttaaaggtatagaaggaaatattgattattactataaccaagatagcttaattggtatttctggtgattatgttagagcaaatttactacacaataagggaaatataccaagaataccggcttatcgtttaagtacttatattaaacatagttttacagaaaacgtaattggacaaattcgcattgatcattttggaaaacagaataaaacagcagactatgaaacatccacagaggcttataacacagttagtttaggtagtgaatatattggttctgtctcttatacacatctgacgctgccgacgactccttacgtgtag

SEQ ID NO: 279435 - DNA, 1485 bp, Morganella morganii
atgatttttattggtgcttataaaatgatgggacaagcccgtctaagaatagccgatcatttacgaaaaatcccgattggctggttttcttctcaacgcagtggtgatcttgcatcacggcttactgctgatttagagatcattgaaaatatctggtcacatttcttaggaatgtttatcagtactttagcgatgcctgtttttctctcactattcttagtatgggtagattggcaactcactttaattatattattttctattccaatcgctctgttcgcattatccataagccataaaataatgttaaaagctgcacaacaggcagctgatgctaatgccaatgtacaatccgaattactcgattatatccaaggaattatggttattcgtagttttgggcgacttggtcctgcatggaaaaaactaaaagcagccttagaaacacaaaataaaacccaaatagttctagattccaagcctgccccttggattgcactttatggttttattcttgaatcaggttttattttattaatgataataggaacaagccgtttaattagtggctcactttctccttctcaattcgtttttttccttgtattagcactccccatttatcgacaattctttgatttaggattatccagtatgttgttaaattatgcacaaaaatcattacaacgcatagaagaagtaatgaaagtggttccactttctgagcctaaatatactcaattaccaataagaacagatatctattttaacaatgtaagctttatttatccttataatagtcaattaacattagataatatatcttgctgttttcctgaaaaaagctttactgctattgttggccctagtggctcagggaaaagcactttactacagcttatttctcgtctatgggatgttaaccaaggtgaaatattgctagatgatattaatattaaccaaataaattccgataaactctgttcatatgtatcttctgtttatcaagatgtcgttttattttcaggaacaattaaagataatattttaatgggaaaaacagatgctcacgatgatgaaataataactgcagctaaattagctaatgcacatgagtttattatacaaaaaccacaaaattatgatactcctattggttacggtggtatgttactctcaggtggagaacgtcaacgtctttctcttgctagaactttattaaaaaatgcaccaattttactgatcgacgaagcaacatcgagtatcgattgttcatcagaagtattaattcaacaagctttatcattgttatcaaaagataagacaatcattatgattgcccatcgattaaatagcattaaaaatgccgataacattatcgtaatggaaaatggaaaaatagcagaacaaggaaaacatgctgagttacttgcaaaaaatggcttatatgcacatttatggttacaacagaaagcgttatgctaa

SEQ ID NO: 279436 - DNA, 144 bp, Morganella morganii
atgagtacgttagatgttaggtgggcttgggaaattgggttaaatgatgttgattgtattggggttaatttaaaagaagatgacccctatattcctaatgatgtagctgagatcccattattgcaattgataaacagtaaataa

SEQ ID NO: 279437 - DNA, 417 bp, Morganella morganii
atgaagcttgtcaagataaacgatgatacaattctgacattacctctgttcctggagcatgtccccgctgggtttccgtcaccagcggcggattatatcgaggatcgcataaacctgaacagtgcgctgatccggcatcctgaaagtacctatctgctcagggttgagggcagttcgatgattgatgccaatatctttgatggcgatgtggttattgtggacagcgcggtaactgcggctgaaggcgatatagtgattgccagttttgatggtgagtttactgttaaaaaattgcagctgtcaccggtacctatgctgatcccgatgaatccggagtatcagcctatcgtaatcagcagtgaacaggatttacagatcttcggtgtggtcacctacatcattcaccgagcgcagtga

SEQ ID NO: 279438 - DNA, 600 bp, Morganella morganii
atgccggtcgcgattacttacccggagatttgctcgttgaataataaaccattgataataattggtggcggaggtcatgccagcatattagttgatatattattatctcaaaagagaaagatactgggtattatttctccggataatatttctgggagacgaattttttcaggtatcccacattataaaaacgatgatgacatcaaacaattctctccggaaaaagtaatgctggtaaatggaattggcatgactccatattcgtccttgcaaaaaaaaataactcaatattatttatcacgtaattatcagttcgaaacaattatctcaaataatgcgataatttctgattatgcagaaatcagacaaggcgcctatataggaatacataatcatattgcgccaggagcaacgctatgcggaaatgtaaattctgaggatgatgtatacgtaggcgcaggatcctgtattatacaaaatgtaaaacttgcatatggcagtatcattgctgctggtacaactatcctgaaaaacacatccgagctaacattaactattaataaaatgaatcagataaacaagttggttaaaaatgactaa

SEQ ID NO: 279439 - DNA, 1074 bp, Morganella morganii
atgaccttaattattgcagaagtcggtgtaaaccataatggtaatgaagaactggctatagaactaattaatgctgctcacaaagcaggagcagatattgtcaaatttcaaacattcaaagcaaaaaatttagtcactgaagctgccaaacaggccgattatcaggtagtaaatacacaaaaaaaagaaactcaatttgctatgcttagtcggttggagttatcttatgaaacacaccacagattaataaaacactgtgaatatcttggaattgaatttttatctaccgcatttgacactgaaagcctgcatttcttagtcaatgacctgaaattaaaacgtctgaaattaccttcaggtgaactgacaaatgcaccattgatattacagcacgctcgtagcggaaaagaccttattgtttcaaccggaatggctacacttgcagaaattgaaatggcgctaagtgtaatagcattcggttatgtaatgcctcaggatacccaaccttctctgtttgcctttcagcaggcgtacgcctcagaagaaggacagagggcactcagagaaaaagtcactattctgcattgtactagtgagtatcctgcaccaatggatgaaattaatctcagagcgatggatacacttgctgcagctttcaatttacctgtcggctattcagatcatagcgaaggaatcgcaattccgatagcagctactgcccgtggagctgttttaattgaaaaacatttcactcttgataaagaaatggaaggacctgaccatagagcatccataaatccggaagaactgatcacaatggtcagcactattcgccggattgaggttgcactcggtaacgctgtaaaaacaccaacagtatctgaaataaagaataaatcagtagcacgaaagagcttggtcgctacaactaccataaaagcaggtgataaatttactgacaaaaatgtggcgatcaaaagaccgggcgacggaatgtccccttaccaatattgggatatactaaacagttatgccggtcgcgattacttacccggagatttgctcgttgaataa

SEQ ID NO: 279440 - DNA, 672 bp, Morganella morganii
  misc_feature (638)..(647): n is a, c, g, or t
atgaatattaaaaaaattgccgtatttacgggaacccgtgcagagtatggattactatattggttactgaaagacatacaaagtgaccctgaattatcattacagctgattgtttcaggtatgcattttgcaccggagtttggtgaaacatataagcaaatagaaaaagacggatttcatattgatgaaaaaatagaaatattactgtcatcaaattcctcagtgggtgtcgcaaaaagtatcgggctcggcgtattaggatttgctgatgcattttcccgtctgaaaccggatatcctggttattttaggtgatcgctttgaagcattggctgcggcccagactgcaatgatattaagaattcctgttttccatctgcatggcggggagattaccgaaggtgcatatgatgacgcaatccggcatgcaattaccaaattaagttatcttcacggaacatcaacagaagaataccggcaaagagtcattcagttgggtgaatccccggcaagagtcaaaaatatcggtgcgatgggtctggagcatttgaaacgaacaccattaatggatatttcagagctcggtaaatccctcaacttcaaattaaataaaccttattttttagtgacttaccatcnnnnnnnnnncttaccatcctgtcacattaggtga

SEQ ID NO: 279441 - DNA, 471 bp, Morganella morganii
atggtgctgtgcgcagatgaatacactgggaagcataccaaacatgttacaacaacagctaaagttccgcacccatatgagttcttccatgatgaacccggctttaattatcggatgccaaatattaatgcagctctgggttgtgctcaaatggaagtattagagcaatttttaaaagaaaagcgtgaactagcaaaaaaatatcgccaatttttctcaaactctgattgtacctttgtagaagaacctgattacgctcaatcaaattattggctaaacgccattatctgcaatgatgcggcacaacgcgatgaaattctgaaacaaagcaatgctgccggtgtgatgaccagaccggtttggcaattaatgcaccgactgcctatgtttaaagattcccttcgcggtgacttgaggtattctgagtttatcgaagcacacctgcttaatttaccaagtaccccagtctga

SEQ ID NO: 279442 - DNA, 1305 bp, Morganella morganii
atggggacaacagttgatctgccacttcccgcaaagctggtccctgtttttgctaaagagaatgtgagatatcgcggtgcatggggcgggcgcggaagtgcaaaaacccgtacgtttgctctcatgagtgccgtcagggcgtatcaggctgctgagcagggattgaggggggtgatcctgtgtggccgtgaatttatgaactctcttgaagagtcatcaatggaagaggtgaagcaggctataaggtctgtcccgtggcttaatgactattttgatataggcgaaaaatatatcaggacccggtgccgccgggtaagttatgtattttgtggtttgcggcataatctggacagtattaaatcaaaggcgcgaatcttacttgcgtgggtggatgaagctgaatcggtgtctgataccgcctggaagaaacttcgcccgacagtccgtgaagccgactctgaaatatgggtgacgtggaaccctgaaaaaagcggcagtgcaacagataagcgattcagaataaacccgccgaaaaattctattatcgttgagatgaattacagcgataacccgtggtttccggatgtactggaagaggaacgcagagaggatctggtaacgctggatccagctgattatgcatggatttgggaaggtgaataccttgaaaactcagagaagcaagtattagcgggtcgttatgaaataaaaccatttcaggatgatctttggcaaaaagcagacaggttattgttcggtgctgactttggttttgcgcaagatccgaatacgctgattcggatgtttattctggataaatgtctttatatcgaacatgaagtatacggtgttggtatagaacttaacgatatgtggaaattctacgcgggcagggatggggcaactaataatcagattaatgaatggtctgttttagatgaccgaaagttccccggaattccggaatcgcgaaaatgggcaataaaagcagactgttcccgccccgagactatcagccatatcaaaggtcagggatttaatatctctgcggctaagaaatggcaaggtagcgttgaagacgggattacctatctgcgaggattcaaaaaaataattatacatccgcgttgcaaagaaacggcaaaagaagctcgtctgtattcatataaaaccgaccggattaccggagagatactgccgataattgaagataaaaacaatcattgctgggatgcagtccgttacgggcttgatggttatattcaacgaaaatccggcggattcttttcacgcaagaggacataa

SEQ ID NO: 279443 - DNA, 1359 bp, Morganella morganii
atggggataaaagtatttaatacatcagatatatcagatatcgttaaaaaatatactattaagcaagtgttatttgctattccaagcatttccagaactaaacgaaaacagatctttgattcccttgtcgatcttcccgctcagatactgacagtccctgatatggaagatattgtagaagggaaggcgaagatagatgaactgaaacatgttgcaattgaagacctcttaggcagagagtctgtatcccctcagcagcctttaatggaagcgagtatcaaaaataaaattgttatggtcacaggtgctggtggctcaatcggttctgagatatgccgacaaattgtacagcaacaacctaacaagttaattttatttgaagtatctgagttcgctctttatcaaatcgatcgggaactaagacaaataatcaaaactcataatttagacattgagatcgttcctttattagggtcagttcagcgaattaatcgattacagatcacaatgaatagtttccatgttcaaacagtttatcatgccgcagcttataaacatgttcctctcgtcgaatacaatgcagaagagggtgtcagaaataatatttttggtacttactatactgcacaagcagcaatagaagcaggtgttgagttatttgtgttaatctcaacagataaagctgttcgccccacaaatgttatgggtgcgacaaagcggatggctgaacttgcactccaatcccttgcagaacaagaaaataataaagccaatggcaccaaattctgtatggtacgctttggcaacgtcttgggatcttccgggtctgttgtaccattatttaaacgccagattgaatccggtggccctgttacagtaacacatccagatataatccgatatttcatgacaattcctgaggctgctcagttagtcatacaagcaggcacaatgagtaaaggcggtgaagtatttgtattggatatgggagatcctgtccgtattattgatttggcaactaaccttatccaactatcaggtttagaagttaaaagctccgcaaatccactcggcgatatcgaaattcagttcacagggttacgtcctggtgaaaaactttatgaagaacttcttattggtgaaaatgttcaaaagactgcccataagcgaattatggcagccaaagaacgttttctgccatttgaggaatttcacaatattttaattgagctaaatgatgcctgccgtaatttggatcataaacgaattcgtgacatcttacttaatgcaccgaccggttttaatcctaccgatgatatcggagatcttatctggaatcatcaaaaaaataacatatag

SEQ ID NO: 279444 - DNA, 1191 bp, Morganella morganii
atgtcagatattttaacgcttattggtcgtgaccaagaattattttctcaggatatttcttcatatgaagaaaaattatcaacaatagtctctcaatcacgtttccttgttcttggtggcgcaggatctatcggtcaggcagtagtaaaagaaattttcaaacggaaaccacaaaaattacacgtcgttgatattagcgaaaacaacatggttgaattagttcgtgatatccgtagttcttatggctatatcaacggtgattttcaaacctttgctcttgatattggttctgttgagtatgatgcctttattgaatcagatggacaatatgactatgttcttaacctgtccgctttgaaacatgtgcgcagtgaaaaagatccctttactttgatgcgtatgattgatgtgaatatatttaatactgacaaaacaattcaacaatctattgaacgtaatgttaaaaagtatttctgcgtatcaacagataaagcagccaatcctgttaatatgatgggtgcatccaaacgaattatggaaatgtttctgatgcgtagaagtgaagaaattgctatttctactgcccgttttgctaacgttgcattctctaatggttctcttccgcaaagctttggtgagcgtttacaaaaaaaacaacctatagttgcgccaaatgatattcgtcgttactttgtaacaccacaagaatccggtgaattatgtctgatgtcatgtattttcggggaaaacagagatatattttttccaaaattaagtgaatcactgcatttaataacattcgtagatattgctattaagtatcttcatctaaaagggtatgccccttatttttgtaaaacggaagatgaagcacgtactctggtccagacattacctgagaaagggatatggccatgtttatttacaccaagtgatactactggtgaaaaagattttgaagaatttttcacagataacgagacacttgatatgtctcgctttgataatttaggtgtcataaaaaatgatcctatatacagtgaagaacttcttaatctttttgaagaaaagatcactgaaatgaaagctaaccgaaagtggaacaaagagcaactagttgaattattttataaaatgattccaaatttcggtcataaagaaactggtaaatatctcgatagtaaaatgtaa

SEQ ID NO: 279445 - DNA, 1659 bp, Morganella morganii
atggttggtgcaacatcttcactcaatattttagaaataggggcaggtacaggagctaccactcaaggtatagtcgcagtacttaagaatacgcattactcatacacctttactgatatatcacattacttccttgataaagcgcgaaaaaaattcactgctgtaggagaaatgcgctatcaactctttgatattaatgcaccaatacaattttctcatcatccagataatggctatgatctgatcattgcatctaatgtattacatgatgcatcacatatcggccacgcactaaaacggattagaagcctgttaaaacctcaaggctatttattatttatcgaagcaaccgagtgtcaaagtgctatgcaaatggcgactgttggctttattgagggattaagtgcatatcaagataagcgtatattgacgaataaagcgatgcttgatagtgaaagttggcatgatattttaatcaatactggttttgaaactattggtcaatggccccaaacagattcctcatctttgcgacaaacactctttttagcctctcccactcgtggaggaaaaccttatttaggtaaattacgtgattatttatctcattctcttgatcagaatatcgactcttttgagttgttccaatgtgaaaatattgaagcaacccttaatggcatagcaacatcatccgctcaagagctaaatgaacagatacaacctgttgcaatacctgatgtaccaaccaatatgattaatgaaatcattgcattatggtctgagttattaggtcgtgaggtcaatagtacaaatgatttcttccgttctggaggagatagtttgattgcaaccaaaatgatcagccaattacatcaacggggatatccagcaacattacaacagatttttacctatccatgcttagccgatttttgtgctcatttagagcaggaaaagcaatctcaacgagagtactcctctttgatacctctaagcgctgtatctgctccaaaaccttaccactactttatggtacatgcttctgatggtgatcccggtgtttacctacctcttgctgagtcgttaaataatacagtgtggggattaacagttacagatgcttcaaaactaactgatttggatacattgttatcattacatttatctagcataaaaacagcacaacagactggcccttatattcttattggttggtcatatggtgcttttattgccagttaccttgcagaacaactctcgcaacaaaatcattccgtattattagtattaatagatcccgtctatcgacatgattttattaaattttgtcatgatgactcagatagttcatcagatgaaaataagcagcttgcatgcactaaaagacttatgtcattcctacctgaaagtgacctaccattatctgatgatatcgcctgtttatggctggaagccaccaaccacccaacagaatggacatcacctgaaaaagagtggtaccaacgattaccgccacatacccaacatcactatttttcaggggagcactggtcaatactgcaagatcgcgctaccagcacacatctggccgaaatcattgatcagtgggtgcaacaaaaactttctaataacggatatccatccgaaggaggtaattaa

SEQ ID NO: 279446 - DNA, 2244 bp, Morganella morganii
atgagcaagtttttagacagattccgttattttaagcagcgcggggaaaccttctccggcgaccacggacaagagctgaacgtcaaccgcgactgggaagatggttaccgcagccgctggcagcatgacaaagttgtccgttccacccacggcgtgaactgtaccggttcatgcagctggaaaatctatgtgaaaaacgggctggtaacctgggagacgcagcagacggactacccgcgtacccgtcctgatctgccggatcatgagccgcgcggctgtccgcgcggtgccagctattcctggtatctgtacagcgcaaaccgcgtgaagtatccgatggtgcgcaaacgcctgatcaaactgtggcgtgaagccaaagctcagcacgctgacccggtcgatgcatgggcgtccattattaatgatgaggcgaaagccaaaagctacaaacaggcacgcggccgcggcggttttgtccgctccgactggcaggaagtgaatgaaatgattgcggcagccaatattgtgactgccaaacagttcggccctgaccgtattatcggcttctcgccgatcccggcgatgtcgatggtctcctatgcttccggtgcccgttatctatccctgatcggcggtgcctgcctgagtttctatgactggtactgcgacttaccgccggcctccccgcaaacctggggtgagcagactgacgtgccggaatcagcagactggtataactcctcttatctgattgcctggggttccaacgtcccgcagacccgtaccccggatgcgcacttcttcaccgaagtccgctacaaaggcaccaaaactgtcgcgattacgcccgattatgctgaaatcgccaaactgtgtgaccagtggctgaacccgaaacagggtacagacagcgccgttgcactggcaatgggacatgtgatcctcaatgagttccacgcgaagcgtcaggcggaatatttcactaattatgtccgcacttacagcgacatgccgatgctggtaatgctggatccgcgtgcggaaggcggctatgtgccgggccgtatgctacgggcatctgatctggtggattctctcggcgagaaagaaaatgctgagtggaaaaccatcgctattgatgaaaacagtcagcaactggtggcaccgcagggctctatcggattccgctgggacaaatcccgcaaatggaacctggagccgcgtgacggcaagagcggtgatgagatcaccatgcaactgagcctgctggataaacacgatgaagttgctgatgtcgcgttcccgtatttcggcggcattgaaaatgaattctttgaaggtgtggcactggatgaagtgctgatgcacaaactgccggtgaaagtggtacgtctggcagacggcagtgaagtccgtgtggcgagtgtcttcgatttaaccctcgccaactacggtatcgatcgcggcctggacgatgtgaactgcgcggcggattacagtgaaatcaaggcctataccccagcctgggcagagaaagtgaccggcgtcagccagcatcacatctcccgcattgcccgtgagtttgccgataacgccgagaaaacccacggccgttcaatggtgattgtcggtgccggtatcaaccactggtatcacatggacatgacctaccgcggcatcatcaatatgctggtgttctgcggctgcgtcggccagagcggcggcggctggtcacactatgtgggacaggaaaaactgcgtccgcagaccggctggttaccgctggcgttcgggctggactggtcacgtccgccgcgtcatatgaacagcacctctttcttctataaccactcaagccagtggcgttatgaaactgttcagccgcaggagcttctctccccgctggcggacaaatcccgcttcagcggcagcctgctggacttcaacatccgtgccgagcgcatgggctggctgccgtccgcaccgcagctgaacatgaacccgctgactatcgcggcgagagcaaaagaagccggtcaggatccgcaggcttacaccgcagaagccctgaagaacggcactatccgctttgcggcggaacagccggataatccacagaacttcccgcgtaacctgtttatctggcgctccaacctgctcggctccgccggtaaaggccatgaatatctgctgaaatacctgctcggcactgagagatcccctcataatttccccaaagcgtaa

SEQ ID NO: 279447 - DNA, 192 bp, Morganella morganii; identical to SEQ ID NO: 279001

SEQ ID NO: 279448 - DNA, 189 bp, Morganella morganii
atgagcctgtcgtattccaatgctcttattgttgctaatggtaaaaagccgcacacagctcttgtgttaagtgataacgaggtgattgatactgtggcggcgtatatgaaaaaaggccgcacagggcgacctttggtaatttatatccatatgatattacttacatttaatatctttaagtccttctaa

SEQ ID NO: 279449 - DNA, 921 bp, Morganella morganii
atgatttccactgtcggacccgataccgtaaaagaaattactcgtatcacattaaaaaagttaggcgatatttattggcatgttttagcaggcagtcaaactttccccgtgcaagttgcaactaaattaggtattcctttgatcatctggggagtaaatggctggttagatcaggtaggtatgtttagtcatcatgatcgcgtcgagatgacaaaaaagatcagaaaagaacatgctctgcgtggcatagatgccgaagaccttattggtacaagtgattctgtcagtgtaaaagacttacaggcctatatttatccttctgatgaacaattggaaaagtcacgtgttcgcggattatatataggaaattatgtcaaatgggattctcaaaaacaaatttcagatgttatagaacgatttgggtatgagagtaatatacaagaaagaacatataatacttatgagtcaataaactgcgccaataatgcaagtgttcatgattatataaaattcctgaagtttggttacggtaaagttaatgatcatgttgccagagatattcgattaaaacgaatttcacgtgaagatggcttagcattgataaagaaatatttaaccattaagcctaaagcattagatcagtttctatcatggattgggctcactgaagaagaattttatcaatatattgatcctttcagagatctaaatgtatggcataaatcatctgagggtgaatggattttaaaagactcagtattagatctgattttagaaccaacagatcaggaaattgcagtcgaagaccctatggagtaccaagtaacaaaattacttgaacctcagagctttgatgacgaatatattttgttaggtcgtacctatatggatgaagcaaactttaaggcaaaagaagggtaa

SEQ ID NO: 279450 - DNA, 303 bp, Morganella morganii
atgaaaaaacgaaatttcagtgcagaattcagacgtgaatcagcccagctggttgtggatcagaactatacagttgcagatgccgcgaaagccatgaatgtcgggctttccaccttgacgcggtgggtaaagcaattacgggatgaacgtgccggcaaaacacctaaagcctcccctatcacgccggagcaaattgagatacgtgagctgaagaaaaaaattcaacgtattgaaatggaaaatgaaatattaaaaaaggctaccgcgctcttgatgtcagactccctgaacaggtctcggtga

SEQ ID NO: 279451 - DNA, 678 bp, Morganella morganii
atggccacacacaggggcttccggatagggcgatggcttgccggtcgtcttatgaaggagctggggctggtgagttgtcagcagcctgttcaccggtataaacgtggcggtcatgaacatattgctatcccgaaccaccttgggcgacagttcgcagtgacagagcccaatcaggtatggtgcggggacgtaacgtatatctggaccggtaaacgctgggcatatctggccattgtactcgacctgttcgcaaggaaacccgtgggctgggcaatgtcattttctccggacagcaaactgaccaccaaagcgctggaaatggcatgggaaatacgaaataagccatccgggctcatgttccacagtgatcagggtagccactatacaagcaggcagttccgacagttactgtggcgataccggataaaacaaagtatgagcaggcgtggtaactgctgggataacagtccgatggagcgcttcttcagaagtctgaaaaatgagtgggtgccggtaaccggctacaccagcttcagtgaagcagcccatgcaataacggattatatcgtcgggtattacagcgaagtcaggccgcatgaatataacggtggattaccaccaaacgaatcagaaaaccaataccggaaaaactctaaaaccgtggccagttttagttga

SEQ ID NO: 279452 - DNA, 666 bp, Morganella morganii
atgttttccagtgttgtaaatacggctcttatatatgacgttccgctggttgtctggggtgaagatattgcttttgagtttggtggattacagcgggctgaaagtaaaccatctgcgattgaaataaataaaagtgaccttataaaagaaaaaaccatttatgattggctcgatgatgatatatccgagagagatatatttttctatacatatccagaatatgagaagttaaaaagtgcaggcattaaaagtatatatttaggccattttatgagatggtatggtcggaaaaattatgaatttgtaaaacagcgtggttttactggccgtaaagcgggtcctctgcctggaaactttctggattatgataatattgatgaaaaattgtgtgaaatcaatatttggtttaaatatcttaagtttggtttctggcgggcaacagatcaaacctgttatgatatctggaatgatagaatgacccgtagcgaagctgtcaaaatagtgaataagttacaaggtgaatttcctgggaacgatcttgaacattttttacgattccatgatattactgaacaagaattttgggaaaccgttgaaaaattcagaaataaagatatatgggaatatgtcaatggtgaatggaaactgaaatatatcctggcctaa

SEQ ID NO: 279453 - DNA, 123 bp, Morganella morganii
atgagagagaaacattggagcaacactactcttcagggcaactatacgggaagcgtcatttctattttatcggaagatattaaacctcatagcctgcaaaataacgaggtaatgtatgcgtga

SEQ ID NO: 279454 - DNA, 438 bp, Morganella morganii
atgcgtgatattcgccaggtgttagaacggtggggggcttgggttgttgataatcaggaatcagtatattggtcaccaattgctgccgggtttaaagggctgatccctgaaaaagttaagagtcgtcagcaatgtactgataatgatgcactggtgatatccggcattatggcaaaactgaacatccgcaacagcgatatgcatgatctgctttttgattactatgttttcggtaagacgtttattcagttggccaagaaatacgggtgctcagacactcacatagggaaaaaactccagaaggcagaagggctggtggaaggaatgctcataatgggagatgtaaaactggaaatggacggtacatcacatcatggaggtatgcggacatttatgaacaaattacatgatttaaaaattaatgctgtacgatcgtaa

SEQ ID NO: 279455 - DNA, 174 bp, Morganella morganii
atgtactacgtcttcaactttaatccggatgagcgtctgcgcgttctgcttgaaaacttcgatctgatgccgcgtccgtccggggtgggtgtcaaataccgtattgtggctaaaaaagccttcggccacggcgaacatcgtaaaaacttcctggaaagtaacttcggagaataa

SEQ ID NO: 279456 - DNA, 174 bp, Morganella morganii
atgtactacgtcttcaactttaatccggatgagcgtctgcgcgttctgctggaaaacttcgatctgatgcctcgcccgtccggggtgggcgtcaaataccgtattgtggctaaaaaagccttcggccacggcgaacaccgtaaaaacttcctggaaagtaacttcggagaataa

SEQ ID NO: 279457 - DNA, 345 bp, Morganella morganii
atgaagacctttgatgtgaacgggaataatgatctgttcaccggaaacgacggcaatattgccattgtcagtggtgaaccggcggtaaaaaacgtttgtgcgcagtatgtgaaagcgctgcgcggggaaatgctgcacaaacaggataaggggatcccgtactggaaaaccaccttcgggcgacaggctgatctgccgctgtttgaatccgcgttccgcgagcgtatgcgggaaattccgcaggtgaccgccgtggtgtcattcagagccacgctgaatgataacgaactgaactatgtggctgtcctgcagacagaatacgggagcattacgttaaatggctga

SEQ ID NO: 279458 - DNA, 234 bp, Morganella morganii
atgaaaaaaatattgttgtgcctttttttaattcacacggatactgcatactcagcgaattgtgagctcgatactcaggattcggcattatgcgaggcggcaaatggtggtgacgctggtgcccaggttacaatcggatcttattactactacggtaatggtgctcccatagattataaaacggcggctgactggtatacaaaagctgcggtacaggggaatgagtacgcataa

SEQ ID NO: 279459 - DNA, 384 bp, Morganella morganii
atgcgtccgacaatggcggaacaccggcaggaatacagacagcttataggcagagcagccaaagccgctgttaacggtagcatcactgtgacaaacgggttgaaccagatcggcgcaaaggtggccggtgatgttcagatgaccattcgttcagttcagactcctccactttcgatggttactctgctgatgagaaaacggcgaaaacaggaaggatttaaagccgggggtaaagccgtagggcaggcgtaccgtgacgctaactttaccggaccgcgaagtaagaaagataaaacgctggacatttccggagtcagtaccaagccattggttgatgaagggctgatgctgcaatccgtcacttttgccgtggaggataaataa

SEQ ID NO: 279460 - DNA, 348 bp, Morganella morganii
gtggcggcgattcaggaacttggttatccggccggggggatcccgccgcgtccgtttatgcgcccggccatgacagaacacaaaccggaatacagcaacctgattgtccgggctgtgaaagccgcagtgaaaggcaatatcgccatcactgacggactgacgcaagtcggcgcaaaagcagcaggtgatgtgaagatggtaattaaatctgtcaccacaccgccgcttaaggataccacggtagccgcccgtgcccgtcggcacagcaaagggaaagccaccagtaagccgctggttgactccggtctgatgctgcaatccgtcacttttgccgtggaggataaataa

SEQ ID NO: 279461 - DNA, 144 bp, Morganella morganii
atgcctactttgttagaagagcatataaagaaaaataataatatactgatgtttcctatacacgagtattggttggatattggccgcatggatgattttaaccgagctcaggttgatatccacacacttggattagattcgtga

SEQ ID NO: 279462 - DNA, 315 bp, Morganella morganii
atgtttttccctgacacgctcaaaggctggatgatcgacggtaaaaatgcggacgcactggtggtgcagtcaacagacggttctgtgtgcttatccctgcataatgataaagcagtctttgacggcccgaaatttatctctaatgcgccggaaaacgaatttaacggcaatgtgatcgtcaacggcaaccacgccgtaaacggtaacagtgaatcaaacggcggcattatgacgcataacggtaaaaatatcgggtctacccataaacattccggtgttcaggggggcaatagtgattcaggagagccggtatga

SEQ ID NO: 279463 - DNA, 315 bp, Morganella morganii
atgtttttccctgacacactcaaaggctgggtgatcgacggtaaaaacgcagacgcactggtggtgcagtcaacagacggttctgtgtgcttatccctgcatgccgataaagcggtgctggacacaccgttgtttgaggttaatgcaccggaaaccatttacaccggcaatgtgaccgtcaacggtaaccacgctgtaaacggtaacagtgaatcaaacggcggcactatgaggcataacggcaaagatatcggttcaacgcataaacacagcggtatccagcggggtaatgaggattcaggggagccggtatga

SEQ ID NO: 279464 - DNA, 606 bp, Morganella morganii
gtgatcccggcagcggcggcacaatcgcagcctgatttttccgtgattatcggcggtgcggtgaactggcgggatcagggacaattttatcaggggctgcgctacgcacagcagggaaaatcgccgggagacattaaacaattgctggcagcagaacaggcagagaatgaccggatatttggccgcaatggctcaaaagacccggcacaacgtagtgatatgacacccgaccgctttgaatttgtggtcaaaaattatctcagtgatgccaccccggcaatccctcagatgaacgggcgtgtgctggcggtatggggcgcggaagatctgaatgtcgatgcccggcagaattcctgccgttatcagtcacttttgaaagataatccaaagacaaaagtcattgtctttccgcaggccgggcacggtttattacaggcacccgcctataattatcagctcagcagcgactggccggtactgcgccagtggcagtttctgtatgccggacgggaagcctatcatccgggagcattgtctcttatcactgactggataaaaaacaaaatcccggatttgacagcctattacccggtttgtcagtcctga

SEQ ID NO: 279465 - DNA, 2973 bp, Morganella morganii; identical to SEQ ID NO: 56202

SEQ ID NO: 279466 - DNA, 480 bp, Morganella morganii
gtggcgcgggtgttcaccgacaaggcttctggcaaggacacccagcgtcccgagctggaaaggctgctggccttcgtccgcgagggcgacaccgtggtggtgcatagcatggacaggctggcacgcaaccttgatgacctgcgccgcatcgtccaagggctgacacaacggggcgtgcgcatggagttcgtcaaagaagggctgaagttcaccggcgaggactcaccgatggccaatctgatgctgtcggtcatgggagccttcgctgagttcgagcgcgccctgatccgcgaacgtcagcgcgagggaatcgtgctggccaagcagcgcggtgcctaccggggacgaaagaaatcgctgaacagcgaacaaattgccgagttgaaacggcgagttgcggcaggcgaccaaaaaaccttggtggcccgtgacttcggcatcagccgcgaaaccttgtaccagtacctgcgggaagactga

SEQ ID NO: 279467 - DNA, 1014 bp, Morganella morganii; identical to SEQ ID NO: 80749

SEQ ID NO: 279468 - DNA, 915 bp, Morganella morganii; identical to SEQ ID NO: 27201

SEQ ID NO: 279469 - DNA, 1260 bp, Morganella morganii
gtgcgctcaaaaaactttagttggcggtactcccttgccgccacggtgttgttgttatcaccgttcgatttattggcatcactcggcatggacatgtacttgccagcagtgccgtttatgccaaacgcgcttggtacgacagcgagcacaattcagcttacgctgacaacgtacttggtcatgattggtgccggtcagctcttgtttggaccgctatcggaccgactggggcgccgccccgttctactgggaggtggcctcgcctacgttgtggcgtcaatgggcctcgctcttacgtcatcggctgaagtctttctggggcttcggattcttcaggcttgtggtgcctcggcgtgccttgtttccacatttgcaacagtacgtgacatttacgcaggtcgcgaggaaagtaatgtcatttacggcatactcggatccatgctggccatggtcccggcggtaggcccattgctcggagcgctcgtcgacatgtggcttgggtggcgggctatctttgcgtttctaggtttgggcatgatcgctgcatctgcagcagcgtggcgattctggcctgaaacccgggtgcaacgagttgcgggcttgcaatggtcgcagctgctactccccgttaagtgcctgaacttctggttgtacacgttgtgttacgccgctggaatgggtagcttcttcgtctttttctccattgcgcccggactaatgatgggcaggcaaggtgtgtctcagcttggcttcagcctgctgttcgccacagtggcaattgccatggtgtttacggctcgttttatggggcgtgtgatacccaagtggggcagcccaagtgtcttgcgaatgggaatgggatgcctgatagctggagcagtattgcttgccatcaccgaaatatgggctttgcagtccgtgttaggctttattgctccaatgtggctagtgggtattggtgtcgccacagcggtatctgtggcgcccaatggcgctcttcgaggattcgaccatgttgctggaacggtcacggcagtctacttctgcttgggcggtgtactgctaggaagcatcggaacgttgatcatttcgctgttgccgcgcaacacggcttggccggttgtcgtgtactgtttgacccttgcaacagtcgtgctcggtctgtcttgtgtttcccgagtgaagggctctcgcggccagggggagcatgatgtggtcgcgctacaaagtgcggaaagtacatcaaatcccaatcgttga

SEQ ID NO: 279470 - DNA, 807 bp, Morganella morganii; identical to SEQ ID NO: 34948

SEQ ID NO: 279471 - DNA, 786 bp, Morganella morganii; identical to SEQ ID NO: 16905

SEQ ID NO: 279472 - DNA, 1515 bp, Morganella morganii; identical to SEQ ID NO: 52478

SEQ ID NO: 279473 - DNA, 1545 bp, Morganella morganii; identical to SEQ ID NO: 23311

SEQ ID NO: 279474 - DNA, 861 bp, Morganella morganii; identical to SEQ ID NO: 19455

SEQ ID NO: 279475 - DNA, 1680 bp, Morganella morganii; identical to SEQ ID NO: 10332

SEQ ID NO: 279476 - DNA, 426 bp, Morganella morganii; identical to SEQ ID NO: 25795

SEQ ID NO: 279477 - DNA, 276 bp, Morganella morganii; identical to SEQ ID NO: 25796

SEQ ID NO: 279478 - DNA, 366 bp, Morganella morganii; identical to SEQ ID NO: 122249

SEQ ID NO: 279479 - DNA, 456 bp, Morganella morganii; identical to SEQ ID NO: 25798

SEQ ID NO: 279480 - DNA, 1050 bp, Morganella morganii
atgcaaacggcactgaatgcgctgacagaaggcttttcgccggatgagcccggcgttatcgtcatggtacataccgataacggcgcaacatggtacagctgccggggcatggcggatgtggcaacccacacgccggtaacaccggacactattttcaacttagcctccgtttccaaacaattcaccgcattttcgctgctgttactggtgcaggaaggtaaagtttcgctcagtgattctgttttatctgttttaccggagctgggcgaatatgcacgtccggtgacattacgccacctgctgcaccacaccggcggcctgaaggattatatggatctggcttttgcccgcaaaaccggcttttatgatccgctgacaccacaggaaaccctggcggatctggtcagtcagacagaagcggattttccgcccggaacccgccatgattacagtaataccggctattttctgctatctcaggttattgagcgggtcagcgggcagtcatttgctgattttgcccgtgaacggatttttgcaccgctggaaatgaaccatacttttattgttgagcaatatccggcaccgcagaccattgccaccggctacggcaaagctgccggtcagtggcggatttctgaaagcccgtggacacacaccggcgacggcgcggtacattccagtgccgctgacctgatgaaatggggcgaaaactaccgcactgcccgtattggtggtactgctctgatacaacagatggcagaaaccctttccccgctgacagaaaacggcacacccgttacggattatgagccttatgctgcggggttacatacccttcatcatttcggtgagctgagtctggaacatgccggaggctggatgggtaccagtacttactttatccggctgacaaaatcagacaccactatcgtcgcgttatccaacagcgaagaatgcgataccgaaacgctggcccgagccgctgctgccgcctttctccgccctgcattccctgcgatgatcactgttcgcggggacgaagaataa

SEQ ID NO: 279481 - DNA, 975 bp, Morganella morganii
atgacaacctcttctgacacaacattccgtactttgtatccggctattgagccttatgagacagggtttctcgatgttggtcatggtcaccggatctattacgaacgcaccggtacacccggcgcgaaaccggctgtttttctgcacggcggacccggcggcggcatcagcccggaataccggcgctattttgatcctgcccgttatgatgtgctgctgtttgaccagcgcggttgcgggcgttcaacaccgcatgcggaaatttcccataacaccacatgggatctggtggaggacattgagcggctgagaaagcatatcggtgtcagtaaatggctggtattcggcggctcctggggttcgagcctcgcactggtatacagtgaaacgcatccgcagcaggtcagtgaaatcattttgcgcggtgtgtataccgtgacagaggcggaactgaactggtattaccaatttggcgtttcacagatgttcccggaagagtgggaagcctttttggcaccggttccggtgcaggaacggcacaatatgattgctgcctatcataaactgctgaccggtgatgatgttcaggttcagctggcggcggccaaagcctggactctgtgggaagggaaaaccaccacactgctaccggatgcagagcacgttggcgaatttactgatgaccatttcgccatcgcctttgcccggctggaaaatcactatttttatcaccggtgctggctggaggaaggtcagttgctgcgtgatattcaccggctgcagggtattccgggaattattgttcacggccgttatgatatgccgtgtccggcaacctttgcgtggcatctgcataaagcctggccgggatcggtgctgcacctgattgaaggtgcagggcacgcgatgtctgaaccggggatccgggatcagctgctgcgggccacagactattttgccggtcaggagccatga

SEQ ID NO: 279482 - DNA, 255 bp, Morganella morganii
atgtcttaccaatgtccgctttgccagcacccgctgacgcaccgctccggcagttacagctgcgaaaaccaccatcagtttgatcttgcgaaagaggggtatatcaatctcctgcctgtccagttcaagcgctcgaaagagccgggtgacagtaaagagatgatgcaggcgcgccgggcatttctggataatcaccattaccgcccgatgcgggatcaggtaatcgcggcatttgagcagtatttaccggcatag

SEQ ID NO: 279483 - DNA, 303 bp, Morganella morganii; identical to SEQ ID NO: 24284

SEQ ID NO: 279484 - DNA, 1494 bp, Morganella morganii; identical to SEQ ID NO: 13713

SEQ ID NO: 279485 - DNA, 225 bp, Morganella morganii; identical to SEQ ID NO: 13704

SEQ ID NO: 279486 - DNA, 738 bp, Morganella morganii; identical to SEQ ID NO: 13703

SEQ ID NO: 279487 - DNA, 333 bp, Morganella morganii; identical to SEQ ID NO: 13702

SEQ ID NO: 279488 - DNA, 768 bp, Morganella morganii; identical to SEQ ID NO: 13701

SEQ ID NO: 279489 - DNA, 507 bp, Morganella morganii; identical to SEQ ID NO: 13700

SEQ ID NO: 279490 - DNA, 1068 bp, Morganella morganii; identical to SEQ ID NO: 13699

SEQ ID NO: 279491 - DNA, 204 bp, Morganella morganii; identical to SEQ ID NO: 13698

SEQ ID NO: 279492 - DNA, 225 bp, Morganella morganii; identical to SEQ ID NO: 19405

SEQ ID NO: 279493 - DNA, 249 bp, Morganella morganii; identical to SEQ ID NO: 13648

SEQ ID NO: 279494 - DNA, 1428 bp, Morganella morganii; identical to SEQ ID NO: 13647

SEQ ID NO: 279495 - DNA, 237 bp, Morganella morganii; identical to SEQ ID NO: 13646

SEQ ID NO: 279496 - DNA, 780 bp, Morganella morganii; identical to SEQ ID NO: 52392

SEQ ID NO: 279497 - DNA, 189 bp, Morganella morganii; identical to SEQ ID NO: 13644

SEQ ID NO: 279498 - DNA, 882 bp, Morganella morganii; identical to SEQ ID NO: 13643

SEQ ID NO: 279499 - DNA, 828 bp, Morganella morganii; identical to SEQ ID NO: 13642

SEQ ID NO: 279500 - DNA, 222 bp, Morganella morganii; identical to SEQ ID NO: 13641

SEQ ID NO: 279501 - DNA, 1203 bp, Morganella morganii; identical to SEQ ID NO: 52387

SEQ ID NO: 279502 - DNA, 159 bp, Morganella morganii
atgccacggaaccctttagtgctgatcatcattgctatcatcctgctgacggcctgcctgttggcgggttgttatctgtattcactcgatactcactgtaagccactgccgggtaacccgctggacggtgtgatctgttatgagtgtgaagcgccatga

SEQ ID NO: 279503 - DNA, 192 bp, Morganella morganii
atgcgcatgcctgacaaatattccagccctacagcatacgcctggggacttataacctctgcttttggcgttttatctctggaccagtgggctattgttgccgggatcatctgtactgtcgggacgttcctggttaactggtattacaaacggaaggaattccagctgaaagccggagaacatcatgaataa

SEQ ID NO: 279504 - DNA, 255 bp, Morganella morganii
atggtgggggatttaaatactttccagtgcttccataatatcgtttttgcgatccggccgggattcgagattgatataaatgactttttctataaagctatgatcgagtgcgaaattctcatccgacataaaccgcttcagatccacgttgcctcctgcaaatacactgatgacataccttttattgccggtgaatattcactgaatgctaacggatatatatcaccggtcaatcgctgttgttcttattattga

SEQ ID NO: 279505 - DNA, 156 bp, Morganella morganii
atgaataaactaacgggcatgctcctgctcacttttgtgttgccgctgaccgctgtggccgcaacccccggccgctgtgatgatgcggcacaggatattaaccggcaaaatacatttattattaccggtgcgaaatattacgggccggtaaaataa

SEQ ID NO: 279506 - DNA, 1137 bp, Morganella morganii
atgaaaatagtgattgctccggattcatttaaagagagtctgaccgcccttcaggtcgccgatgcggtggaagcgggtttcagaaccgttttcccggatgcgcagtacatcaagttgccgatggcggacggtggcgagggcacagtggtctccattattgaagccacacagggaacactgaaagaaaccgaagttacggccccgctggggaataaagtgaccgggttttacgggctgtccggtgacggtaaaacggccattattgagatggccgcagcttccgggttacatctggtacctcctgcacagcgggatccgcgtgtgaccaccaccttcggcaccggggaacttatcctggcagcactggatgacggcgcggagaaaataatcctcggcatcggcggcagtgccaccaatgacggtggtgccgggatgatgcaggcgctgggggtggtattccgcgatgaacaggggaattcactgccgttcggcggcagtgcgctggcaaaactggcttccgcggatctatccgggctggatccgcgtctggcgaaaacagagtttgtggtggcctgtgatgtgaataatccgctgtgcgggccgaaaggagcatccgccaccttcgggccgcagaaaggcgcgacaccggcgattgtcagcgagctggatgcggcgctgcgtcattacggggaggtaattgaatccctgaccggtaagtcactgagtgatgtcgccggtgccggagcggcaggcggcatgggcgttccgctgatggcatggcttgatgcgcggatgcagccgggaattgagatggtgatcgaaacactggatctgaactcggtggtgaaagatgctgacctggtgatcaccggggaaggacggatggacagacagacgattcagggaaaaaccccggcgggtgtggcgaaagctgcaaaagcacggggaattccggtgattgcgctggcaggcgggatgagtgacgactatgccgtcgtgcatgagcacggtattgatgccgtgttctccgtgatcccgcggatttgctctctggatgaggcactggcacaggcggcggttaatattgaagtggccgcccgcaatatcgctgctgtactggcgatgaaaataggataa

SEQ ID NO: 279507 - DNA, 762 bp, Morganella morganii
gtgtcgttattctcctggcttcatgacctttttcagaacgcgctgttaagtagtgtgcggttatttgcggcgttctcttttttgccgtttctgaatgataaatttatcctcagccggaccacgcggggcattattatttttctcatggcgcagtgtctcagcggaaatggagactacccggcggcagagttctcagtggtcaatatactgagtgagatcattaccggcatggtaatggggttggtttacagcacgccgttttttattttttccgccttcggtgaatatattgataaccaacggggggcgaatatcagtgataccgctgatccgacaacagggaccgatgcatcaccgttttccacctttatgaatctgttttctgtctcgttttttttgctcaatgacggttttgtgttactgatgacatccgttcaggatagtttccggttgttaccgccgggtacattgctgacggaaatccattatgcggcggtatttgactggctgacaaacagcctgtcactctctttgctgttttgtatgccggtactgattatcttatttatttctgaagtcagcctgggcattctggccctgtacaattcacaactgaatccgttttccttatcactttcaataaaaagtattattgcctttctgctggcgctgctgctgtttcgcagcacaacgatgacggatgtgacagtgctgtttgatacttcccctctgactcactttttgagggggaacgatggctga

SEQ ID NO: 279508 - DNA, 348 bp, Morganella morganii
atgcattatgatacccatcagataatggactatctgagctgttatctgccggaaaaaaaagaaaataccaaacgcgcgattaaatgtcatttaattaatactcaaaatatattggaggttttaattgatgttgaatcctttttttctgaactgattggtgaaaatacgatcccctgggaaatcgttcctgaaaattatcttattgacctgataaatgaaaataagaaagagattcggctgcttttttttcagcggagagttattttcctgagttcaggacggaaaacatcgctgttaatccaacccgtaaacttgctttccgtcagggaaatattgatttcactctga

SEQ ID NO: 279509 - DNA, 783 bp, Morganella morganii
atgaatattaatcgttgttgcctggaagctgagcaagattttccggaaggtcatgttaatcaacgggtgactgattttttatccggaatgacaaaaaataaaaaagaaaataaacatgacagtgctatcccggtgatttattcactgttctgtccgtatgatgataaatgttatcatggcgatatattatatcccggggggatgataaaaaatcatagcaatcatcaccggaaagttcatgatgttatactggtatatccggaaaataataaaataaagaacagtatattcagggataatgtcgccacggaacctttcggtgatatctcacataacatgctatcagcggataaaccaaaaaacgttccggcagaggaggaagattattcaggcgctgatatctcagcagaagaaaagataccggcgggcagtgcaacaactgagttaccggaaataccgttttttctgaaccatccgcctccggggataaagacggaagtaaaaaatcagccattgcggcattatgaacagggaagaggtactcaggaaaaaatacccctgttcgtttaccatacggagaaaaatgcgttatctccggcgtacagcagagttgattattattgctcttatcatttcagacagaaatatcagccaccggaaccggttcatatttacagagataatccgggagggtttaaattagaaacatattcagaatccctgaagcgacgactgaaatcagcagtaaatataaacggaattgataatattgatataatataa

SEQ ID NO: 279510 - DNA, 1293 bp, Morganella morganii
atgctgaatgcactgctcagtcagcgggcatttccggtgcatatccgcgggtattatctggaagcgccgttgccggatgtctttatcggggaaatttgtctgttatggcaggatgttacctgtcgcgtactgctcggccgggctcaggtggtgggctttaatgaacacaacacgctgctgagtctgatcggacaggccgccgggctgacactgacaacggttatcgcaccgacgggtagtgcagtaacactgacattcacaccgcaaattccgggctcggtgattgatccgtccggtaataccctggcccgtctgagtgagataacagagccggataaccggagtatcatccgccccgtcagcggtgaggcgccggatgtgctctcccggcagcgtatcacggagattttgccgaccggtgtgaaagccattgatgctctgctgacctgcggaaaaggccagcggctggggatttttgccggtgccggctgcggtaaaaccgtgctgatgaatatgctgattgagcatgcgcaagccgatatttttgtgatagccctgattggcgaacgcggccgggaagtgaccgaactgattgatgaactgcgcaacagcccgcaggcggcaaaatgtatcctggtctgctcgacatccgataaaccggcggttgaccgctgtaatgcggcgctggtggcaacctcactggcggaatattaccgtgatgaggggaaagaggtgatcctctttgttgattcactgacacgctacgggcgggcgttaagggatgtggcactgagtgccggggaagttcctgtcaggctggggtatccggcatcggtatttgagcagttaccggcactgctggagcgcccgggggcgacgaaaaccggcgtgatcacggctttctatactgttttacttgatagcgagaatgagccggacggctttggcgatgaagtccgttccattctcgacggacatatttatctctcccggcgactggcgatgcagaatcactatccggcgattgatatcccggccagcatcagccgtgtcatgtcacagattgtttcaccgcagcatctggcggctgccgggcatttccggacactgctggcgaaacagaatgagctgaaactgctggtggagctaggagaatataaacccgggctgaatgcggagaatgataaagcggttgagctcactctgccgatgcgccattttttgtgtcagtcaccggcggaatccgttgcggcggatgaaacaggcagattacttgaacagctcacacaatga

SEQ ID NO: 279511 - DNA, 2061 bp, Morganella morganii
atgctgacaacttttattaatgcggtcaaaagcagaccggagatcgcggtactgctgattatggtgatggtgatcgccatgctgatcattccgctgccgaaaatgctggtcgattttctgatcgggctgaacatcgttatttccatcctgatgttactgctctctttctatatcacccggattctggggtttacctctttccccgcacttttgctgatcaccacactgttccggctggcgctgtccatcagtaccagccgtctgattctgctggatgcggatgccgggaatatcattcagtcattcggtgaatttgttatcggcgaaaatattgtggtcggattcgttatttttgccattgtcaccgtggtgcagtttattgtcatcaccaaaggatcggagcgcgtggcggaagtggcggcacgtttctccctcgacggtatgcccggcaagcagatgagtattgatgcggacctgaaatccggcctgattgataatgaagaagtgcgcaaacgccgtaaagagctggagcaggagagccagatgtacggtgcatttgacggcgcgatgaagtttatcaaaggggatgcaatcgccggaattgtcatcattttcgtgaattttgccggcggaattggtatcggtgttgcgcagatgtcgatgccgttcagtgaagcgctgagtacttacacactgctgacgattggggatggcctggtggcacagatcccggcgttgctgattgccatcagcgccgggtttattgtcacccgggtcagcggcaccaatcagaatttaggggccaatattgtcagggagctgttttcccatgattttaccctgatagtgaccgctgttctggcgctgtgtatgggaatgctgccggggtttccggctggtgttttcggtctgctggctgccgggctgctgttgttttacggaatgcgcctcagacaaaataagcagaagcaggcatctgatccggcaaaaagccgctctgacagccgttctccggcggtatctgcgtcgtctgcgggggattttgcgccgcgcggactgacggcggaaaataatgaagcgattccgctgattatcaccctccacacctgttatcaggctatgtttgaaaaacagaagatgacggcatggttgcaggaggaatttgccttccgtttcggtttctttttacccggcatcattatcaattacagccgtgagataccggaaaataaatcggtgatcttaattaatgagattcagtccggtgtgatttacagctatccggataaatacaaagtgacagaaataaatgatgcctttgagtcactggatattgaaccattcgtgattgagccggaaggcggggagaaaaccgtctggacggataaaaaacacgatgagatatgccgggcagccggcatgagaacagaatccggtgttatggtatttttcaatgaattcagccggataatgacacaaaatattcaggagctgcttggcatccaggaaaccaaaacattgctggataatattgagaataaatatccggagctgctgaaagagtgttaccgctatttatctgttcagcgtattgcggatgtctttcagcggcttatcgctgagcagatctctgtccgtaatatcaaaattatcctcggcgcactggtgcagtgggggcagaaagaaaaagatccgctggtactggttgagcacgtccgcagccatcttgcccgttacatctcagcgcattttgcctgtgatcaggtcctgcgggcggtggtgctgtcaaacccgctggaggagatgatccgtcaggggatccgccagtctgccggaggtacttttatcaatctcgaaccggcgcagctggatcatttttatgatgcgatgtcattggtgatgacgccgctgcggcaccggcgggatattgttttcctgacggcaatggatgtccgccgttttgtccggaaactgactgaaatgcactatccgggtattgccgtgctgtcattttctgaaattgttccgtcggcgcaggtgtcggtgattgactctgtttaa

SEQ ID NO: 279512 - DNA, 936 bp, Morganella morganii
atgtcatcatttcctaaatactatataaaaggtaacttatcagagaaacaaattgaagcagatgttgcctcattttttggttggtgtactccgccagaagcaaaaatcccatttagacttttagatattaatgagcaaacaacaggggcagataaactctatgacggcgcaactgcaatttatatgcaattcaaaaaatcaacggggttaaaatctacacacgatgtagcaatatcaactcgaaaaagaaaaagcccactagaaagcattcggcaatttcgtgatgcgcatcaattagagcaagatccaacgttgttcttccaactacatccaaaagcaaagaatgcaattgatttacaacataatgtgctactaagctatgagcgccagccttggtcacgagcaatctatgtagctcctcttttactggataaagagagttatagcaaagctctttttgattcaataaatagatttttcctagatccatttttttatcgaattaatcactcaattcaccaaaaaaattggattagctattttggttttacaccttttcttcgtgaacatgtttctattcctccacatgaaaaggttcaagatcataatcattattatgcatactctgaaacaggaacagatataagctggcattctccagctatagtagaaagagaaccaagtcgactatctgatttttttgataatctgatttcgacaatggtgaataactcagaggctatcctttcaccagaaattcttttggaagaaatctctggtattagttctaatttcggctttcaatctgataatcttagcggtactccaattgcaagactgagagagcatgggctctggttgagagatacctacggaattcgtcaatttattcttcttagtaatacagaatatcttaataaattacgtaataattga

SEQ ID NO: 279513 - DNA, 966 bp, Morganella morganii
gtggaaaaaaagaaaaccttcctgcagcagaaaagcggcttgcacccgcgtaaccgtcatcgctcacgctatgatttcccggcgctgatcgccagttgctctgcactggagccgttcgtcaagccgaacgcctggggcgacatttcggtagattttgccgatcctgcggcggttaaaatgctcaaccgtgcgttgctgcaacatttttatggcatcgaatactgggacattcccgccgattatctgtgcccgccgatcccggggcgtgccgactatttacaccatctggccgacctgctggcgaccagcaacggcggtgagttccctcgcggtaaaggcgtggcgatccttgatgtgggtgttggcgccaactgtatttatccgattattggcctgcgcgaatacggctggcgttttaccggttcggagattgatccggtatcgctcaatacggccaaaatgatcgtggagatgaatccgacactgagaaacggtgtgcgcctgcgtttacaaaaacaacccgaatttattttgaacggcatcatcggcgtggcggagaaatttgatgccacactgtgtaatccaccgttccacagctctgaacaggaagcgcaagccagcacccgccgcaaactgcgcaagctgggtaaaggcgaggtagccgacacgccggtacataactttggcggcaaaaataaagagctatggtgtgaaggcggtgaagaagcctttgtgcgtaaaatggtagaggagagcgttagcctggcgcaaaactgcctgtggttcacctcgttgatttctaaaaacactaccttgccttcgatttatcacgcgttgaagctggtgggtgcggccgaagtccgtaccattgaaatggcgcaggggcaaaaaatcagtcgcttcgtggcctggactttccacgacgcacaacagcaggtcgcctgggcgacagaacgctggcgttaa

SEQ ID NO: 279514 - DNA, 333 bp, Morganella morganii
atgttgaggctaaaaaaagcggaagaagaaaaaaaacgtcagggcgttaaggataaaggtcatgattaccatccggcaccgaagactgaagaaattaaagggttgggggagttaaaaccaggtaaagataaaacgccaaaacaaggtggtgcgggtacacgtaaacgatggttaggagataaaggccgaaaaatctacgagtgggactatcaacatggtgaaattgaaggctaccgcgccagtgatggacaacatcttggagcatttgacccgaaaacgggcaaacaactgaaaccggcagacccgaaacgcaatatcaaaaaatatttataa

SEQ ID NO: 279515 - DNA, 930 bp, Morganella morganii
atgtcagataagcatgacccttcagacggtacgccccatattaaagttactgtatacagcaccccttgtgagagtgaagagtggccgtctattgataattttaacgtattccagtatcccggtcgcaaccgcccgtccatcctgaaagaatatctcgatgaagcacgcagggaaccggagcggatggtctatctcagcagtgccgcagcagtcggccggagtgcattaatttttccggttaacggcactctggccgcaaccattgcatcctggattcagtctttcgatttcagtgctctgctggcaggactgagagatacattacccctggcggggcggataaccggtattgccgcattattgtggccgactaaaatggggaacgctgaattatatcagggtgccggaccccttattgatttaaaccgtgcgaaacttgtcgatatgaggcaggcggatatggttgtcacgctgccgtctgaactggtcaccacggtaaaaccggcagacatcaggggacaaaaaacggttcccgcaatggttgtggcacagggtgtggtggatgccgttaagcaggagcacacggttgcactcacaatggcggaaaatacggatattccggtcatcacggcacaaaaaacgaagaaaccgaatgtgtataccgcagaggttgtcccgggtatgaagccgctgcggataagaatggtgtcaccatcaggtaagcaggttcccccctcaaaaagtgtggaacttccggccgcagagcattatcttcctcagccggacagcagaaaaacccatcatgcgtttattgttttcggtgatgattatcagccggtttatatttcggtgacgcggaaggagtggcaggtaaagccttatgttgaggctaaaaaaagcggaagaagaaaaaaaacgtcagggcgttaa

SEQ ID NO: 279516 - DNA, 465 bp, Morganella morganii
atgacacgactgaaacaacaggaaaaacagcggctgcgggagtttcagaaagtggcggagcagcagcaacggaaacggcagcgagagcgggagcagcaggcactgcacgaaccggaaaaacgcagggcacagcaatccgttcatgatactccggccgcaccgtccgccggaagaggagccgcgcccggtcagattacacttcaccggcccggcactgattttcaccatccttctgttatttgtggtttatatactgtatttacagtaaatggccggcaccggttacatacggaataccgagtatttccatcgccagtgcattccacgcacggcagctgcggctctgatacccgccgcgcacaccggccagtgccagatcgtaggagagcaccgggtcggtcaccggcagcagtaccagaccatcagccgtgcgttcacgccacatgctgtccggcagcagcgtga

SEQ ID NO: 279517 - DNA, 174 bp, Morganella morganii
atgtccgtttattttgtgatttctgtactgattatttttctgattatcctgctgattatattaatgattaccaacaaaattgtgatcagccggaagaaaatagtttatctgtcactgattgcgctgtttagagtactatatgcgcctgcagcagtgggccaccgaaaatattaa

SEQ ID NO: 279518 - DNA, 780 bp, Morganella morganii
atgaaactcgaaagcgcattaaaacaatttcatccgaagtcaccgacattcagtgacagctcaaactctacagcccctgatcggcttaaaggtatggattcggcagcggcaatggggatggcatcacagcgggccgcgttcggtatgcatgcattctttggtaagaatgatgtcagtattgaggataaattcaggaccgttgaagcattgacgcagtacgccctgcgcacggtaccaaagctggtggcgaaagcggccggcaatcgcgttgctcagtgcatgaagattctgtctgcaatggcgtttgaggattacgcccgttcagcgggttctgtctgccagtgtcaggactgcggcggaaaaggactgatttatcgccggaaagaggtggtgaagcatccgggtatcaccaatacggaaggtaccgtgattgttgagccggtagtccgtactgagcgcgttggcgaactgtgcacaacctgcaacggtaaagggcagttaacccaccggtgccgctgcaaaggccggggggaggtgtacgacgaaaagcagagtgaattacagggtgctccggtattcaaagactgcccgaaatgctcggggcgcgggtataagcgtgtgccgtcgtcagtggcttatcaggcgataaaacatctggtaccagagttaacacagccaacctggtcacggaattggaagccattttatgagagcctggcaggaaagtgctacacagaggaaagcgaggctgaggcatttttcggtaagatcacacggtaa

SEQ ID NO: 279519 - DNA, 1887 bp, Morganella morganii
gtgacacctaacgaattatcagaaaaattatgggacagtgccgaacgggtagcgaaatacctgctgccgaacggtcgcgccgatggtcacgaatgggttgccggaaacgtcgatggtgaatccggaaaaagcctgaaaatcaacctggccggtaaaaaagtctggtctgattttgctactgggcagacgggcgatttgctggatctctgggtcgctacccggaattgctcactgcaccaggcgatgactgaggcgaaggaatttttgggtatcagggatgaggatcaccactttgcagccaaacagaaaaaagcgttttcaaaaccagatcgcaaagcgatgagtaagaatctgcgtaaacctgacgggtgctacgcctacctggaggggcggggtatttcgcgtgagattgctgagttatttaaggtcagtgacgcagtggtgtggtctcacgatgatggacgtgaacttccggctgtggctttcccctatgaacgtgacggagagttattacaggtaaaacggatcagcacagagcggccgggcggaaagaaagtgatcatggcagaagccggatgtgagccatgtttgtttggctggcaggcgctggatcataacgcacgggccgtgatcatctgcgaaggggaaatcgactgcctgagttatcgacagtatgggttatcggcgttgtcggtcccgttcggcggtggcaaaggggcgaaacagcagtggatcgaaacagaattccacaatctggaccggttcacggagatctggctgtctctcgataacgatgatgtgggacgtgaagcggcgaaagaaatagcctcacggctgggtgaacatcgctgccgtatggttaacctgccacacaaggatatcaatgaatgccttcaggccggagtgagcgagaaagacataatgacccgcctcgaaacagccgcttatttcgacccggaagagctgttttgtgcccgtgagttttatcaggacacctgggatgcgctgtacggaaaagaacagtatttattccggacgccgtgggagccgatgaactacaactttagtttccgggaatcagagctgacagtgcttaacggcgtgaacggacacggaaaaacagagattgttggtcatattacctgtgaagccatgaggcagggtgtaagagcctgcgtagcctctctggagcttaaaccagggatgctgctgaaacgtctgacgcgacaggttacctgccaggcaaaaccacctcagattgaatttgagtcgtcctttaaattttacgatgaccggctgtggctgtttggcctcaccggaaacgcaaagggtgaccgcctgcttgaaatattctattacgccaaccgccggtatgggatcaagttattcgtagtggacagcctgacaaaggttgtctgcggtgacgatgactacaatggccagaaagcatttatggatgcgctctgtgactttaagaacagaacaaacagccacgtcattctagtgacgcacagccgtaaatcagacagcgaagataaacccaccggcaaaatggacgtaaaaggaacaggggccattactgacctggccgataacgtgatgattatctggcgcaataaacgccgcgaaaaggcactggaaaaacaaaaataccacagtcaactgagcgaccaggatctggaagccatagacaaacccgggtcgatgttattactggaaaagcagcgcaacggggaaggttgggaaggcggcacagggctgtaccttgatttcgcatcgcatcagttcctgaccaaagaggacgcatcaccttataactatttcgccaacatgccatcttcagattatgacgaagtgtggaaaatgcagaatgtaactgaatactga

SEQ ID NO: 279520 - DNA, 930 bp, Morganella morganii
atgagcatttcgactccaaccaaagcagttaatcaaatcggcagattaaacctgtccggcaatattatcccttcaaactggtggcagcatgtgaagcttcagagcggaaaacccgattgcacggctattgttctgttgtccgatatcgtttactggtatcgcccgaccgagatccgggacgagttaaccggggagcttaagggatggcgtaagcggttccatggtgacaaattacagcgaagctaccagtcttttgccaaccagtttggcttctcaaagcgtgaggctacagatgccctgaaaagactgcgtgatgccgggctaatcacactggaacttcggactgtcaccactgctgatggcctcaccctgaccaatgtgctgtatgtagaagtcgtaccagaagctattttcgccatcaccaatgagccgttaaatcatacgggtgaagatacaaaaagtggaacacctattacgtttaaacgtaacaccccccacgttgaaacggaagcggacttacgttctgacgtaactggccctacgttgaaaagtgatacatatacagagattactacagagattactacagagattaataatggccgcgaaaacgcgggcaataaaaaatctcagcctgcaccaacaaaaaataaaaccaaaaaacacgccatgccagaggacttttccccgacagaaaaacatcgtgagttatctcaggagatcggggtggatttgcaggatgaatttcagaagtttaccgactaccacctgagcaaggggtcgttgtttgccgactggggtcgggcactgaattcctggctccgcaatgcaaaggcattccgtggtggatatcagcggcagcaacagccgccgcaaacgcgtggtggcctctgtcagctccctgacggaacgttcatcgtagacaggtga

SEQ ID NO: 279521 - DNA, 339 bp, Morganella morganii
atgcatccgaaccaaaacacactgatggggtggatcatgcttaagtatatcgatgtttatggttttgttagcaagcatccatttgaaaagccattacaccgcttaatcatgtatcgcgtgtgggcggctggcggatcagatggtcagggtgagcgtattatcaacaatgatgctatggctgaattttgctgctgtagtaaacaggcgctttacaaagaaactaaggtacttgagcgtcagggctttttagctgtgcgtaaaattgcgtctgtgactattgatgcaaaggcaaaaattgaacccgtgcgtgcttacactatcgtctatgggggcaagtaa

SEQ ID NO: 279522 - DNA, 225 bp, Morganella morganii
atgaaaaaagaaagcgtattaaattacttcaaaaaagtatcagcgattgcaaaagctacgggggttaccagtagcgcggtttcccagtggggaaatgtggtgcctgaaagaattgcattgctgttggataaagttaccaacggcgccttgaaatacgacccatcactttacggtgattcccatgcatccgaaccaaaacacactgatggggtggatcatgcttaa

SEQ ID NO: 279523 - DNA, 681 bp, Morganella morganii
atggataactcaacgataggaagtagaattcgctcccgcagaagagaacttaggcttacccagcgggaggttgcccaatacatagggatatcgtcatccgcggtgacgcaatgggagcgcgacatgacggtccctggcggccaaagtttagtttttttatccgaagttctagactgctcaccagactggattatgaatgggaaagacgcccccaatgaagtggtcagggtgcagttctccgcgtcacctgagtatattcgagagatacctgtaatatcttgggtgcaggcgggtcaatggacagacccttgctttgatgacatccgatcaacactaacggttaaagaagcagatgacacggtatttacaacaactaaagtgtctgatggagcctttggcttgaaggtcaaaggagattcaatgacctccccaggaggctcgctgtccattcctgcggggtcaactgtcattgttgatcctgagtttggcagcatagataacctggttgggaaaattgttattgttcagttgggcggttcaggagaagccacaataaaaaaattagctcaagatggtccaatttattacctgcttcccctaaatccagcattccgagcaattgaggttgaccaagattgcaaagtgataggtgtagttaagcaggtaatcattaatttttga

SEQ ID NO: 279524 - DNA, 255 bp, Morganella morganii
atgcctatatccacgggtgacttcccgctacgcttaaaacgtgccatgaaagaggccggattaacacagaaagaactggcagaacgcgctggggtatcgcaaagcgtgatcagtcggcttatcaccggtaaagataaaaccggaacccggtcaggcgtgttgtctcatgcgctgggggtaaattttgactggctgcattacggaaccggcgaaatgtaccctgctaatttttctgccgatgatcgtgaggtttaa

SEQ ID NO: 279525 - DNA, 207 bp, Morganella morganii
atgccgattatacattgtatgtcaaatagcagtacgccagaagtggatatccgtacagcgattagtgcgtccatgttcacttatatcttcgtaaaccgcgaaaactggaataagcgccgacatattgaagccaaaaacgatatcagtgcacaaaatatcgttggttctaactatatctttgcggctcgtttccgctgggcggtgtga

SEQ ID NO: 279526 - DNA, 834 bp, Morganella morganii
atgaaaaataaattaaccacgattgacgcaaccgccctgccggtcattgaatggaaaggtgtccgtgttgtaacaaccgaaacactggcatccggatatgcctcagatgtcaaaagcatccagatgaatctggcaaaccataaagcccgctttattgaaggtgagcactatttcaaactcgaaggtgacgaattacgccagcttaagaactgccccaatagtattgggtcagttaataaacacgccagaaacttgattttatggaccgaaaaaggtgcggcccgcatgtcaaaaattgttgatagcgacgaagcctggtcattctttgaaaaaatggaagatgcctacttccgcccggcaccgacagaagtcagccgcaaacagttagcccttatggtaattgaagctgaagaccgtgcagaggctttttcaatcgaaaacaaacaacttaatgccaccgttgaaagcctcgaaaaacgcttccgcaaaggcatgacaattacttcattttgcaaatcgctgaacggcgtcaacgtcagtaaggtgatgtcgtgggctggtgaacgcaactgggtgtttaattcacggcgtgaccagagcaaaagccctaaatggcgcgttgcctcatatgcccgggacaaatacctgacagaagaagaaacccagatcaccccgcacggtatggatgagtttaccaaattcacaccggtgttactggaaaaaggctgtcagcggttatttcagctttatatgaaaggcgaattaccgatgaaaaagacatggaacggcgaatacagccacgataaagccatttacgcagcggaaggtaaataa

SEQ ID NO: 279527 - DNA, 570 bp, Morganella morganii
atgaattttactgataccggcaatggtgtcctctctgacgacggcaccctgctcacttactcggattcggtcaacgcacttgaatccggccaatatgacgaagatttattaagcggtttgtatctggccgctgccgtcatgggaaagttagctgatgatcctgacacactgacacctgtgcaacgcgtttcaatatggcgctgggtggtatccgcctgctttatacgggagcagcaggaaaagaacggcacgagagaggtgccaaacggagagggtagtaccgatattgcgactatttacagtaacggcgaatcagcactgactatttacccggcatctctgcgcctttcactgagtgaagtgctggaacaaatcatgatcgatacattcggaaatgattactgggctgatttcactatcaaaacctatatagattttctggaaatatctgttgaacacggtgcacgactatcagaaaaaggccgtgaaggtttgtgccttcttcatgatgattatatccgcgagctggaagctaatggcggcgttcctgcaatgcctaccatgcactaa

SEQ ID NO: 279528 - DNA, 141 bp, Morganella morganii
atgaacaaacaatttgaagcgatgatccgccgcatgtacggcagccggtacagtttaaagcggggcatggaaggcaattatgcccgtgaaattgttcgccgcatgtttgaagtctggcgtgctgctaaggggatcaaatga

SEQ ID NO: 279529 - DNA, 2040 bp, Morganella morganii
atgacatatttaaattttgaagaaatatctaaagattgctctaaatataagactaaaaaattacttaacgcaatacatcttttcaatgaaaatgaatctatccgtagtttagtaaaatttcaaacacaaaattttaaaaatttccaacctcataatcataaaaaaagacaggaaagagatctttttttcgagtctctaataaaaaatattcaatgtgatactacggttaagcatctgtctaagatcctttccatatttaaagcatctgagattattattgatgaaataataactggtttaaaatctctgccactgatgaaagaagatattcagacattatgctgggctgtcatcaaaaatgccttagaagaaggttatcatttacaaaaactggttgaaactcatacatctaaagctgggaaaagtggaactccattcactctaaatccagaaaatatattaaatgataatggagccccgatttctcctgattccgccttggataaaatagttgaatttttaacattaactctgaaaatgcttgcatatgaacataaattaacaaaatcagaaaatgttataattcctgacatgatagatattgatgattctttggttaataatgcctcatcaattttttattattctttagcatggaacgatttgatcacatgtacaaaaagttgtatttattttgacaacgacatacagattgcacagcctaatcaaataccagaaaatataaaagaaaatggcatcactactgctatttttttcaatcgtactacagacaactttgagtattttgattcaatatctaatgcaagattatccagacgcctaaaccaaaatttctttgaggcaatttctaaattccaacttgaaaggaaactcccatcagatattagtcagtggtctggttgtttagatgatcacccaataacacttgaggaatatccatatttaaattctttgatggaggcaatctcaagtcatgacagtaatgacattgttttaggtttaagtttacgcgagtgggtgagagggtattctgtaatatcatatttatcaaaaaaagcaaaatacaagactatttacagcaaaggtgaaattataagtgtactaagattggggggatttacaaaattaaaagcagaaatttttataaaaagcattacatttggtaacgatagtcgggatatatatgattcaccactaattcaaacatcaagttcttcttttttattatttacaccagcatatacatctcctcttattagtaatataattctttcaaaattttcctctaaacaagcggatctttcgaagaaaggctatggctttgaaaatgacatgatagaaattttaaataaacatcaattagttaacagtcatttcaaatttaaacgaggacttgagcaatatgagtatgatgctgtttttttacttgatgacaaagcattcgttttggagtgtaagaataccacactatccggaggttcattaacaagagcatttcaaaagaaaaagttcattgcagaagcagccgcacaagtaaagaggcttgtgagtggtttagtatcaaatccagaagtatttaaagaacagttcgggaaaaatatagatgactatgaattagttcctgtcatcatgaataatcttcccttttcaattcccggaaaaattgacggtgtttatgttactgactcatcagccttcagcaggctcattaaatcaaaatatatagacattggtataattagtcatagcgatacttatcaaatcagcaatcaaaaacatgttttatctatgtgggaaggcgatatactaactgccaatgatattatcaaccattttgaaaacccagtgcagattcgtgattttttagaaagcaaggtcataaaaaaatacccattcagagttagccaagataaagtattcttcaatgttgtatatgaaacctgttacgattccatgagtgataaacaaaaagaaataatagcagataattaccctgacttaccttttcctttaagataa

SEQ ID NO: 279530 - DNA, 153 bp, Morganella morganii
atgggctggtttgaggctgctgacttaatcgttaaaggaatggaaggggcaatcgctgccaagaccgtcacttacgatttcgaacgtctgatggaaggcgctaagctactgaaatgctcagagtttggtgacgcaatcatcaaacacatgtaa

SEQ ID NO: 279531 - DNA, 417 bp, Morganella morganii
atgaaacttgtcaagatcaacgatgatgcaattctgacattgcctctgttcctggagcatgtccccgctgggtttccgtcaccagcggcggactatatcgaggaccgcataaacctgaacagcgagctgatccggcatcctgaaagcacctacctgctcagggttgaaggtagttcgatgatagatgcaaatatctttgatggtgatgtggttatcgtggacagcgcggtaaccgctgctgaaggtgatatagtaattgccagttttgaaggtgagtttactgtcaaaaaattgcagctgtctccggtgcctatgttgatcccgatgaatccggattaccagcctatcgcaatcagcagtgaacaggatttacagatcttcggtgtggtcacttacatcatccaccgggcgcggtaa

SEQ ID NO: 279532 - DNA, 1038 bp, Morganella morganii
ttggctgagttcactgaagtagaaattaaatatgggtttccgcttttctcaaaaccttcctctttagttaatctaggtaaaaatgaaaagattgtaatatcagatatttgggcgttctgggactatattataaaaaaaacaagtgatgatcgaaaaagggaggggtttttaaggtcacttctcgaacaggcaaaacacttttatataacagcagagagcagcccagtaaaaagccagcctcttctttattattattcatttctaaacctatcaaagataataataaatcttaccaatatgtatggtccaaagaaaatgtatatgcatggaatgaatgaaaatcataataataaattttcacagtcagtaataaaaaagcaaaaacaaaaaaaagatattgttcaagttgcacatgaaattgtttccatatttgatcctaatatagccaatacagacgttattttaaacgtaaaagatatcctaaatcactgcgtaggaattcatagaacctactctgaaatctatagtcaaactgaaatcttttacaagattgtgaattataaactattcaggaaaggaaaagagctaatcttcaaagcagaacttcaatgttcagatattgatatggcaagtctcacagctcaaggatactcaatatcaaaagatgatgatgggatatttcattatactgtcaaaataactatacctgcatacaggccaacacaaaaagattatgctgaattaagccgggaaatacaaaataaagggatttggtactttataggcaacactggttatacaatgtatctttcaaattcatctataggtcgttatagtcaagagtccataatttacatggtgatgttctaccttggttctataacacgttaccatccatatatgtttgatgaaatattttctgccaaggaacaatggttaatgagtgagtttttaaatacacaacctaaacaattcctatatttggcaactgcaagaatacttgggaaaagtgttctgaaagcctacgctagtttctaa

SEQ ID NO: 279533 - DNA, 705 bp, Morganella morganii
atggacgcgagtttgctaaagcagcgtggaactattttggattcaagtaatgtgacatttagaaactcactatacctattaatcggattttctgcagtagcttggatttctctctcttatatttatgggctagatctatccaatataaaaaattttttagggcttgttccaaaagtggtcagcattgaccttttggtggtagctctatttgccaaatggggttggaaacttaaaatatttagaggctggcttgttcttttcccaaatttgaacggaagctgggtaggttttatatattcagattggaaaaatccgaagacgggagaaaaggtaccaccaatacccgtaattcttacggtgaatcaatctttcttccatattagctgcatgatgcgtacgaatgaaatggaaagctcttcgtattctgagggttttattatcgatccagaacggcaaattaaaaacgtcgcatattcctatggaagcaggcctaggatcagcttgaccgaacgaagtattccccatgatggaactgcagtattcaaaattattgagaaaccaaaacaaaaattaatcggaagatattggactgaaagattaacaaaaggggaaatagttcttcaatatcattcaaaagaattgcttgaagagtttccagaaaattttggcgagcatcccgtaacagaagatgaaaatcgacgctag

SEQ ID NO: 279534 - DNA, 876 bp, Morganella morganii
atgaacttggaagaaaaattgtctggatggacaggtccttcgagtaataccgaacaggagaaacaagatagaacggagcggatgatccgcgaggcgattgactcacacgagccattcaataattgtacgttaaagatctatgcgaaagggtcttacgccaataacactaatgtgcgttcagatagtgatgtggatattgcagttgaatgtacagaggttcaatattgggaagaatcagagaaggggaaccatactcctggaaaaatatatgaggggatttggactccagcaaagctaagagccgaacttctttctgctatggaagctaaatttcctagacaggtagactcatcgggtactactgcaatacagataaactctaactcagcgagagtagatgctgacgttgttccatgttttacctatcgttactacatgaagaatgcatcgagaaaaggaacgaaaatatttaaaactgatgggagtagcatcgttaactatccggttcagcagatggataatggaatagagaaaaataaacgaactggttatgcctataaaaaaggggctcgcctgttaaagcgtattgaaaattcaatggccgaaaatggggtatatcacgaattgccatctttttttatggagtgtttagcttacaattgcccagatactgtatttgctcattcaacatggacagaacgtctccaatatatgcttattcatatttgggataacctacagggtgacgagccaactactgatcgctggttggaagtgaatgaatgtttttttcttttccacccaaatcaaaagtggactcgtgaagatggacgcgagtttgctaaagcagcgtggaactattttggattcaagtaa

SEQ ID NO: 279535 - DNA, 1863 bp, Morganella morganii
atgaaacgatttttcaccacgctgattattctgcttgtcgtgatagcggcgggcctcgcggccttaatcctgctggtgaacccgaatgatttccgcgactatatcgttaacaaggtgaaggaagacaccggttacgagctggtgatgaaagatgatatgcgctggcatgtctggccgaaactgagcatcatcaccggtaaaatgtccctgactgcccccgatgccgccgaaccggtggtaactgccgaaaatatgcgcctcgacgttgaactctggccgctgctgtcccatcagttatcggttcgtgaagtgatgcttgacggcgcactgctgaaaatcctgcctgaaaccgaatcaaaagagaagaaaagcgctcctgttgcgccgggtaatcagaaagcccgcccggtgcctgtcgaacaggaaaacaaatggtcgtttgatgttgaccgcatccgtatcgccaacagcctgctggtctggcagacagaagacggttcgcagatcaacatgcgcgatattaacttctctcttgagcgtaatactcctgaacgctatgtgatagcgctgaacagtaatattctgcgcaatcagcaggagctctctttcagcctgagttctgatattgacctctcccagtacccggtgcaggtcagcggcaatattaaccgcctgaattaccgtctgtccggtgccggtctgtatgccaacggcatcaacggcaacggtacgaccacctatacctggcacgaagcggtcggccaggcaccgcagtccctgatcctggaaaacctgaaactgagcgctaacgaaagccagctcagcggcacagtggaagcggcactcggtgaaaccccgcgttatgatatccaactgacctcctcaaaactgaatctggataatctgctcggttatgagcgtgccgtacatgcagaaaacggggaaaaaaccccggttgccaccaaaccggcggtggttaccaccggcagtgatgcggataaatatgatctgacctttatgaaccacttcaatgccactctggcgctgaatgtggattccctgatttaccagggaatggaaatcggccagctgacggtgaaagcagagaaccggggcagcatcacggaaatctccaaaatgaccggcaacgtgttcggcggccgtttctctctgccgatgacgatttattccgaaaaagttccggcacagctgcgtatcaaaccgctgttacagaatattgatgtcaaaccgttgctggcggcgtttaaaatgccggaaaaattcaccggacgcctgagttttgacggcgatctgcgtggtaccggttatgaccaggacgcggtcttaaacaactggcgcggtgacgtggcactgaccatcactgatgttaagctgctcggcctgaatattccgtatcttatccagcagtcgctctcccaggcgacagataaagtggcgcagccggaatcgatggatgctatgaccgaagcgaaaaaactggaagctatcggtaccctgaataacggtgaagtaaaaatcagtaaaattctggcggtatccgatgcctttaatatcaccggcagcggccggacgaacctggtgaaacagaatatggatgtgaacctgggggttcagatcttaaaaggctgggggaaaaccaatgacctggtgacctggctgcagtctgtccgtattccggtggtgctgttcggtaactgggataatattcagtataagttcgaagtggaaaacctgttgcgtaatcagatacagcaacgggtaaaacaggcagccggagagttgctgaatgaaaaaaccggaaaggatctcaaagctgtggaatccttgcttaaccggttataa

SEQ ID NO: 279536 - DNA, 1296 bp, Morganella morganii
atgaattttaagcctgttcagaaactgacggtaatgcggacattatcaacgggagagacaacagaagccggaacgctggtacagaaccggacaggcgttttttttcagtataacagtgattatctccggctcttcggtaacagttcgcccctgacactggagaccagcactgagcttcagccagcaccggccagcccgcatgatggcttacacggactttttgcagatagtcttccggatggctgggggcgcttgctgcaggacagagtattccggcagcagggcattgcactgcataatattactgcgatggacaggctggcatttgtgggacatcgtggtatgggggctttttcctattatccggaatcagattatcagcctgaagaagagggatatgcagaccttattacgctgggaagagatgctcaggcggtatttgagggtgagacggatgttgttctgtctgctctggtggcagcgggaagttccggcggagccagacccaaagcacagctttatttcaagcccggggatttttctgcctgttcaaccggtgaaattccgggcagtgaagcctggctggtaaaatttacgtcagcatcactgccgctggggcatgatgagggattatgtgaagctgtttatctggatcttgccggacgggccggacttaatccgccacagtggcgattgatcgataccggaagccggggagcagcaaaagcctggctggccgtaaaacgttttgaccggacagataatggtgcagataaacatcccggccgtttgctgatgcacagtgtgtgcggattactggatgcggatttccgcacgccgtcactggattatgaggatctgattcgtctgaacagaatgttatgccgctctgttcctgccgggcagatgcaattccggcgggcaatatttaatctgctggctgctaatcaggacgatcacactaaaaactggtctttcctgcaatcagatgatggtcagtggcagccggcacctttttatgatgtgacttataatccaaatggtatgaatgagcatacaatggctttcggcggatacggaagaacaccaccggcaggaacaatgaagcatctggctgaactggccggttttgataactgggaaaccgcgcgtcaggcaattgcggagatcgcggatgttgtggccggttttcctgagctggcaaaggcagccggtgtttcaccgggtatccgccgggaaatagaaagcacgctgacacagcggcggcaaagtaatcaacatttattgtctgtataa

SEQ ID NO: 279537 - DNA, 297 bp, Morganella morganii
atgctatcccggctgttattaactgatgcggatgtcagcaaagcatttgccgtctggctgcgcaaaaaacgcgaaagccggaaatggtcgcgtgacgctctggccgcccggagtctcgttcccgcatccacgataaaaaaatttgagctgaccggccgcatatcattccgtcagctcctgacattatggcagtgtctggatgatatcggtgtactttatgatgttgtcgatccgaaaaaacgcactgaggtgaagataccacagacaatagaagaggtactgaaagatgaattttaa

SEQ ID NO: 279538 - DNA, 2838 bp, Morganella morganii
atgtgtatctaccttaacttaatgattttgataaaaatcattaggggattcatcagtgccccagtatcaacccgtgccatcgccctgcacaccactgaaggcggcgcccagtatatggaatgggatgcttaccgcacccggctgaataccctgtttgcccgtcagttaattgaaaaggccaatagcgggattgatgcggtgctgtcaccggaaacccagaacctgcgtgaacctaagccgggacagggtacttatgtcaccctgacactgaagccgtatgacccggttattcatggcagtaacaggagatttacactttattacggcaatgttttcgcgagtcccgacaaatttccggtttacagcggtacactgagtgctgtcagtaatacagaggtgacattatttattccgcgaatggataacgcgcatggcaataaagataatttatatcttaagacggaataccagaaaaccacaacaaatccgatccgtctgcaccgcacaactgacaatacagaaaatccgcacggctggacactggataaaagccatcacaacggcaccttccccggccttgaatcggtatccggtctgtcacagcccgatgaaccaatggacttcagtggtgccaatgccctctatttctgggagctgttctattacaccccgatgatggtggccatgcgtctgttacaggagcagaactttaccgaagccaaccgctggttaagctatatctggcgccctgccgccagcggtaccggtgactggcgcgtgcgtccgctgctggaagatacttcctggaacgccgatccgctgggttcggttgacccggatgcggtcgctcagaatgacccgatgcactacaaagtcagcaccctgatgaaactgctcgatctgctgattgcccgtggtgacagcgcttaccgcatgttggagcgtgataccctcaatgaagcgaaaatgtggtatatgcaggcactggggctgctgggcgataaaccactgacaaccatcagtggtgcctggagtaacccggcactgagtaatgcggcagataaaactcaggcaaaacagttccatgacgaaatcagccgtatccgcagcggcggcctcctgccggaggtccgtactgccaataccctgaccgggctgttcctgccgcagcagaacgaaaaactgctcggctactggcagaccctggaaatgcgcctgtttaatctgcgcaataatctctccattgatggccagccgttatcgctgccggtctttgccgcaccggctgacccggccgcactgctcagtgccgcagccgcagcctccggtggcagcaaagccttaccgtctgccgccatcccggcaatgcgcttcccgcaggcgctggacagtgcccgttcgctgaccggacagctgatgcagttcggttcctcgctccaggggctgattgagcgccgggatgcggaagcgatgagtgaactgctgcaaaaccaggccggtgagctgatgctctcctccctgcggatgcaggagcaggcactcaccgagctggatgccgagaagaaaacactggaacagagccgtgccggtgcgcagtcccgctttgacagctaccgcacgctgtatgatgaaaatgtcagtgcggaagaaaaacggaccatggatctgtatctctcgtccgcaatactgagtacatccgttgaagggctgaatatggctgccgccgccgccgatatggcaccgaacgtctttggtctggccgtcgggggcagccgctggggcggtatcccgaaagccattggttccggtatcgcactggcagcctccgccaccaaaattaccgcggataatatcagccagtctgaagcatggcgccgccgccgtcaggaatgggaaatccagaaaaacaatgccgaatctgaagtgaaacagattgatgcccaactggaagccctggccgtccgccgcaccgccacagagatgcagcgcgaacacctggaaatccagcaggcgcagactcaggcacaactggagttcctgcagcgcaaattcagcaataaagcactctacagctggctgcacggccgtctggcatccatctattaccgcttctacgacctgaccgccacccgctgcatgatggccgaagccgcgtttgcatggcagaccggtgaaaccacgcgctatatcaaaccgggcgcatggcagagcagtaatgccggactgatggccggggagtccctgctgctgaatctgacagagatggagcaggcatggctgaaatggaaccaccgtacgctgaaagtcacccgtactgtttcactcgccaaagtgtataaggagtatgacacaccggttaatctggcagagaaaattgctgagctgctgaaaggcagcggttccggtaatacaccggcagcaaccgggctctcaatgaccgcagataaagagttatatgccgcgtttaacctgaaggcactgaagattgcggaaaactaccctgcccgtctgggtaaaacacgccgaatcaaacagatcagcgtgaccttaccggcgctgacagggccgtatcaggatgtgcgtgccgtgctcagttacggcggcgatgtcagactgccggacggctgtaaagccattgccgtctcccacggtatgaatgacgacggtcagttccggctggatttcaatgacggccactggctgccgtttgaagggatcccggtggataatgacagcagcctgttcctgagcttcccggaagcaacaaaggatgagcagaaagccctgctgctcagtctgagcgatatcatcatccatatccgttacaccatccgttaa

SEQ ID NO: 279539 - DNA, 1101 bp, Morganella morganii
atgtcagcacatgccccgcgctattcatttttaccgccctggatcctgaaaaaacgcctgcttcatgaaggggatcacgaagagacacagttatgttatcagcatatgcagcggttgctcggttaccgacgcctgccggaaacagaaatgatgcctctcagttatgctgctctgccggaatccggatgtacttcgcaggcacaccgccgggtgatgcatctgaaaaacctgaccaccgttccggacctgtattaccgcgaagaccggaaagcagaaaacccacagccacatatgcctgtgcggcaggatacagataccgataatatgtttgagtatcttgatatcatttacggtttttttgatgatgtctttgattacaaatcctttaatgacaacaatgccactatctccgccatgacacattacggacgcggctactgcaatgccttctggaacggcgcacatctggtgtttggtgccggggatgccggaatgagcgtcactcccctgtttctgagttttgcccagctggatatcgccacacacgaattttcccacgctgtgattgatcacctttccccgctgacttacagccatcagtccggtgctctgaatgaatcggtctgtgatgtgtttaccgtcatgctgggtcattaccaccgccgtcacgccagccatcagggggactggcatatcggcagaacattgtttaataaacaaagcggaattaaagcactgcgctccctttcgtcaccgggaaatgcctataatcacccagtgatcggcaaagataaacaggtagcacatatgagagattatattgagctgccggatgacccggagaatgataacggcggcgttcattgttactccggcatcccgaaccatgcattttaccacttcgcctccgccctcggcgggtacagctgggaagtggccggacagatctggttcgacacgctgcgcagaggcaacctgtcaccggaatgtaatttcctcaccttcgcccgcgaaaccctgactatcgctgatgagaactatgatgaggaagtgactgctgtgctgatgaacgcatggaaagccgtcgggctggagccgtga

SEQ ID NO: 279540 - DNA, 789 bp, Morganella morganii
atgaaaaaaacaaagataatttttattatattattttctcttaatatggtatacatgagaaatgctttttcatcagaaaaacaggaactattcacactggatgaaatatgcaaagctggcttatctactgtctatggtcgtaatgttgatataatggaatcacaatcaatatcagataaagtagtcagaataaaatatataagaagtcaagacggggcacatttatcgtacctctgcaaaaaagaatcaatgtcccgtcttagtactttagatgagcgcttaaatggtgctcgttggtatggctctgatttggcggattctcaaatatttttttcaactgttaatgatattttaacaattagagatgttaataatggaaaggtattagcatcaaatatatatactaagaaagattttattccaacggagacatctgagggaaatgacagtataatcgaatggttagaacaatacgctaataaaaaaacagaaaaatcaaaagaatggcgtgttaaatatattgacttaatacatacatccaccactcctgtaaatgtatatatgattcgctttagtacatctgataaaaatctatttactttacctgatgcagcaaacgactccgttgcatacgataaaaatatatcaagaattacaaagtggacagatcatttttgtactaaagaattatccgattttatgaggaaaaatggaattaatatggttccatcagaaatatcaagcaatgggaaagtacaatttattggcacctgttttcctaaccaataa

SEQ ID NO: 279541 - DNA, 1230 bp, Morganella morganii
atgattgcaggtgcgaaaagagggaaaaatgaacacaagggactccattcttggcatccctactatgcggggttttccgaatcatttgtagcttcagttttgcaaattgaagaggcagggccacaatctgttgtttttgatccatggatggggagcggcacgactggtattgtctgtcaaaaaaataatgttaattgtatcggcgctgatattaatccagtgatgagctatttcgctgcttctaaaaacaaagaaaatatttcagtgctagataattctggtgaggaactactaagagatattacattaggttttaacaaaattaagaataaaataaattctttatcaggtggggtgtcagttattgaacagcttcaatggttttatcagtctatcagtgaacagttcaataataaaatgtcactatatgaagtcaaccccataaaagcttttttttgtagcgttttgtttaatacaatacgaaatacatttgatgtcaaacaaggatcgaaccctacttggatttcgaaaaaactaactataaataatattggctttgatttgtgtttagaatatcggaaaaattatgaaaaaatgtcagggcaattaagagatttttactctaatagctattctaatgctaactgtactatatttaatgtcgatagtaaaaaaatgatgattgacgatagttcgattgatcttgtcatttcatcacctccatatttaactagaattgattatgctgtctctacacgccttgagttagagatagtattaggtactgatggttataactcattgagaaagagagttatggggactactacagtacctaaatttgcagatgctattaatccagcatggggagcattatgtttaaatgtactttcattagttacctctcacaattcaagagcatcaagcagttattatcttaagaataagataagatatttttatgatgcttataattccatggctgaaatttatagagtactgaaaccgggatgttctgcatatcttgttatacaaaactcgtactataaagaaatagaaattcctttgtatgatatttattgcgagatggcttgttcattaggtttttcaagttcgatatgtgtcagggaagacaaagtaaaaacaatactagggcaaattaacacaaagtccaaactttatataaatgataagcattactttgaaaagataattaaggtaacaaaatga

SEQ ID NO: 279542 - DNA, 1113 bp, Morganella morganii
atgactgatgtaaataaattactgtcacaaatagacgaaaaaagagatgaagtggttactgattcctataccgtatcttggcgtgaaattatcaacctttacaaagataatgaaataacgatttcccctgattatcaacgattatttcgatgggataatccacgtcaaagtcaattcattgagtcattattgctcaacatacctaccccaacattatttttctatattgataataatggaaagcaagaggtcattgatggcctgcaacgagttagtacgataattagatttttctcagaagatatttttataaaagaagaaattgataatgcaaaggaggttaattctataaatgatattagaaaccctactattctagaggatgctccaattatcacagagttaaatggctggactgcaaagggtttaccggacaaagttagtcggactataaaaaatgcaagagtgaatgttgtaattcttgaacaggaaaccaaaccagaaacaaaatacaatgttttcaaacgattaaatagatctggagtacgactaagcgatcaggaaattagaaactgtatggctagattagctggaaatgagtttgcggacagattgcggaaaatcgctgaaattgacggtattgtacaggcgctcggaatcaatttggaaggacaaaagtcccaagctgtcgaagaagcgttgcttagaatgatggcttctttgacgtatgcagataaattcaatcatggtgtttctgattttctcgatgaattcatgttttatgcggctaagaacaatataatagatattgattttgagttgaaaataaaaagaactttcgatttgataaatttggctggcttatcaggaaaggctttcaaattcagaaaaaatggtgttcctagcggttcctttagtaccaatttattagatgttgttgctgtaggtatccttagtaatgtggataatttgactcctgctgaggttgtaaaaagatttgatgaactcatgagtagtcaattcgaagagttgagagcttgcactggagcaggatctaataccagagcgaagctcgaaaaaagaattaacctaggtaaaaaggtatttggctaa

SEQ ID NO: 279543 - DNA, 762 bp, Morganella morganii
atgagaatatcagattttgaagattttaagattttattgactaaaaccaaagatgaaagcctcggcttccttaatagcattaaatctattaatgacttcatgataacctcaaaggagcgagataaagaagacatgtttaggattatatcagttccgatgatttattcatcgtgggaggggttcttcacggaaacgatgtctgtatgtctaaatactttgaaactttctgaccgagaagcattcagatattctgctgaaattcgtgcactttggttgcagcgtgaaccattttttagcagatatattgatatgataaaaaatatttatgatgcagactcgcataggagtgttttacacaatgctccacaaataagaaagaaggttactaaaggggcattcaagctcactagtgatgtaatacaacacattgatatattcaataagtcgacactatcagattgtgatgtttctgaactggttatgacattttcgaatgtgaatgaaatggtggtgaaagttaattttgacgctattggattagactattcatcacttgatttatctcaactgggtgaggttgttggacttagaaactcattaggacatggcgaatttaaaagcaatattaaaccaaggagatttagctcaattatttcctatgttgagggattgattaatgatttatatcaatgtgcactggagtggttggatagactagaggatgagataactgcgcctgagagagttgagattgttccatga

SEQ ID NO: 279544 - DNA, 264 bp, Morganella morganii
gtggtacggacaacacgccctctgaccaacaccgaagttctgcgcgctaaagcgttagagaaggatttaactctgcatgatggcggtgggcttttccttatagtgaaaaccagcgggaaaagctctgacgtttccgttatcaacgtccggcgacaaagctcagataaaaatgaagttagaaggacgtataatcgctcaatatatcttcaaaagagagtagagttgatggaatggcggggaactgagataaaaaagaagttttga

SEQ ID NO: 279545 - DNA, 348 bp, Morganella morganii
atgaacagtaaaacggcagcagccttcgcgttcctcggcattatctggggaacgaactttatttttatgcgccaggcaagtgagtggatttcgccggtacagattgtatttctgcgggtattatgcggctttgtaccgattgcggtgatggcgtggatgcagaaagcagtgcgccgcgagcacctgaaatacaccggacatttccttgtgatggcgcttctggccacggtgatttattactgggcgtttgcttccggcacctcattactgctctccggcgtctccggtgtgctcagcggggcaattccgctgttctcgtttattgtcgcggcgatttttctgcgttag

SEQ ID NO: 279546 - DNA, 132 bp, Morganella morganii
atgttcaggagttgtacgttttacagtataataaaggctgtgttcacttttgataaagatatttttcagcagtacaacatcagcatcaataaccagagtatcattaaaataatcggctattttcaaaaatga

SEQ ID NO: 279547 - DNA, 693 bp, Morganella morganii
atgaaaaaatggaaatctataggcctagaggaatttctcacggcctatcccaaaattagactaattgaagtccacacagataaagttgaactgcaaggtgagtatcaattaaaagcacagcttgatggaagtcatactatcgagaaaactttctctctaagaatagtttgtactaatgattatcctaataaactaccaaccgtttatgatgcttcaaattattttcctcgcaatcgagattatcatacatatgccgatggttctttctgcttaggttcagaacttaaaattagatctattttaaaaggcgattcatcgttaattactttttttgacaaaatagttgttaaatttttatatgctgtatcacatagaatcgaatttggtaattttccttatggtgatcttgctcatggtgagcaaggcctacttgatgactatgctgagttatttaaaattgatggaaaagcatcggtactattagctttaaaaatattagggattcgtaaacgaaatgccaataaactgcaatgcccatgtggctgtaactcacgcttgggcaaatgtaattacaggctttttttaaatcagtttcgatacattgagcgccgccgttggtttaaaattcacctggctgattcctttaccccaattcccaaaacgaaaaaaataaataaattatatggcttgtaa

SEQ ID NO: 279548 - DNA, 1188 bp, Morganella morganii
atgaataatactaaaagtaacgatgttttaaacacaattctggaaaaaattgagttaccagacagtgcttatgaaaaggctgaaaaacgctataaggatctaggtgattggttacatcgcccagagtcaacatgcgtgaattttgatccccacgtattttctcaaggttcctttcgtttaggcacggcgattaggcccgattcagaagaacagtatgacctagacatggggtgcaatcttcggcgtggcctggataaaaggtctatcactcaaaaacaactaaagcatctagtcggtcatgaattagagctttatcgaaacgccagaggaattaaggaagagctagccgagaagaaacgctgttggcgcttagagtatgctgatggtcttagctttcacatggacatagttccgtgtgtgccagaaagtgatataggaagaggccttttgaaaaagcggatggtcgaaaactctaagtttgatgaaaacttggctcaaaacgtgtctcagcttgcagtttcgattaccgacaacacagattccacttatgcagttgtggatgaaaattggcgtatcagcaatcctgaaggatatgctcgatggtttgaaacgcgcatgaagacggcacgattagtaataaacgaacgtgaaatgcgatttaaagccagtattgatactctaccattttatcaatggaaaacaccattacagcaggtaatacaactactgaaacgccatcgtgacaccatgtttaaggataatgaggatagcaaaccaatatcagtaattattaccacattggctgctaagtcgtataaaggggaaagcgatttaatctcggcattgaatacagtacttgctgaaatggatagtcatattaatgctcaaataccacttgtaccaaaccctgtaaatccagttgaagactttgctgataaatggtacgaccaaaaatctttgcaatacagattgaaagaaaacttctataaatggctttatcaagcaagagctgactttaaagcgctatgctcacaagatgatgctcaacgtattgttgacgctgcacaaaatggtttagacctaaaacttgattcaaaagaggtcgcactcgcattagggatctctgctgtaacggctaaaccaacatttgcaattcaaccatcagaccccaaaccatggtttaagtaa

SEQ ID NO: 279549 - DNA, 1155 bp, Morganella morganii
atggtcgctaaagtcacaagacccatagctcgtaaagttgagcgagaactttgggctcgtgccgctgctcgttgtcagtttagcgggtgtaatagattgctatacaaatcagcggtgactcaggaatcggtcaatatctctcaaaatgctcatatttacgcattttctgagaatgggcctcgtggttggggactctttaaaactaagccaaccagtttgaatgacgttagcaacctcatgttgctgtgctatgactgtcataaaaaaattgaccagaaaggcagcgaagataggtatccagccgacctcttgattagttggaaaatgcagcatgagcaacgtatagaaatccttacaggcattgcacctgatcgcaaatcaaatgttgttttatatggtgccaatattggaactgaaagatcaccgattaattatcacggttgtgttgaggcaatgtttccgaattggtatccggcaactgaaaagccagtgacattatccatggtatcagagctgaaggatcactctgaacaatattggcaatcagagtcgcaacacctaacgaagcgttttcaaagtaaaatttcatcgatcatcgaagaggattcttgtaagcatttttcattgttcgcgttagctcctcaaccattgttaataaaacttggcgctttgctcaccgacaaaattgatgtcgagacttatcagctgcatcgagagcctaaaggctggttttggcaagactgttcagatgattttgagtacatcatcaacagacctcaaaacatagagggaaagccagccctgatactttctttgagtgactatgtgtcgtatgagcgaattactcgggttatagggccagatacatcgatttgggaagtgactatcaagcaccctcataatgatttcatgcagtcaaagcagcagctctccttgttcaggaagtgcataagaaaactgattgttgaaatcaagaatacacacggcgatgcgacgcctctgcaaatttttcctgtgatgccagtatcgtgtgccgtcgaattaggacgggccagaatgcctaaggctgatatgccatggcttatttatgaccacgacataaaaacacaacaatttgtaatggcagtcgagcttcgaggtgatctccatgaataa

SEQ ID NO: 279550 - DNA, 552 bp, Morganella morganii
atgaaacagttaactcataaaattcttctttcagaagtcgtaggttctgaccatgcctttggtaacgatgaaggcagtgaagcctatgtgaagattaaaaagatcgttgatggtcacccatcatgcgatatttttgctattagcttggaaggtattcgattcactgatgcttcatttcctcgtgaaagtgtaatctcgttggctaaagcattgaaaggagaaaaaggtttttacctttctaatgtaccgagtcgtgaccttctggacaattggtcttatggcgctacagccaaggatcagcctcttctagtcaagagcgatagtggttacgaagtgcttggtgtgaaactcagtgcgactgtcaaagagcttctagattttgttattgcaaaaaagacagtgacttcgtcacatgtatctaagcactttgatatttcagcacagaatgccagtggtcgattaaagaagcttcatgctacaggtcttgtattaggtcaaaaagaagtggcagagtcaggtggactggaatttgtctaccgatcaattgtgtag

SEQ ID NO: 279551 - DNA, 1086 bp, Morganella morganii
ttgctgaaggtagtctcagagttattaggtgggtcaccaggcctgaaaggacgtcaaattgccaaggagctggggctggataagtcccaagtgaactcgtttcttcacaaaaaccaggatacgtttgtgaaaaactcaaatcatgaatggagcctgatacgggctcatcatgtggaaattgatttcggtacaggttggattgatgaaaaagcctttgagagtgctatcggtaagcttgcgtatcaaaaagatgcgaacaagataacatttagattcggcatcgattgtaagtttttgctgatagcattggcccgttttcttgctctcgcgaatcagcttactgctaatgggaaggatgtggtgatggatactacagcatgccctaatactcacagttttttcagcagaaatggcttctttgattatcttaatcaaagtgtaacttgtcttcctgaaaggcccgttttgtcagctgctaaaacttatcgggataatagcgataccttggtcgaactaggcgaaattgcacatccaatccaaaacaaagagcttgtaattcgtttgggcgacaggtttgttgagcattcttcagctagctatttcttagcggctaagactgttttttcagagcttgtaggcaacgttactgatcacagtgaatccaaaatacctggactagcaggcctgcaagtatatcgaccgtataataaaccaaagcatattcaaacagtcatatccgactctggtttaggtattgccgctaccttgagaacaacgttacaaagtgaacatccgaagttatacgcacagttttcagcggaaactgctgagaatgatattgcgctagttcaaaaagcttttacatctggtgaggttagtcgctttggtaaaggccgggggctaggctttaagagtagtcgagagcacgctagcaaagagaaagttatcattgttattaggcagctaactttctcattggctttggaatatgcgaagggtcaactcatcaatgtttctgaagatagagggttggtccctatcacaggaacccatatctgttttgacttctatgttgacaatttctga

SEQ ID NO: 279552 - DNA, 3024 bp, Morganella morganii
atggtcagtcaatccaatgaacaagcattagagtcggccattgagaaatgtctggctgggatcagtactgaagagctcaaagaggggttgagtcagcagtcactgggtactggatacttcattggtgctgctagtgactttaatatgcaatatgccattgatgaacgttttttctggcaatttctgcaaaagacacaagaagaagagttggccaagctgcaaaagaacaacccctcagattggcagcgtaagttacttgaacgatttgaccgactgattaagaagcatggcattcttcatttacttaagaaagggctaagcgtagacgatgctcacttcaatttgctctatccagcccctttggcaagcagtagtgagaaggtaaagcaaaactttgcagataacgtgtttagttgtactcgccaagtgcgctattccatggcaaatcccctacaagaaatcgacatggtattgtttatcaacggaataccattgataacgctggagttgaagaacgcatggaccgggcaaacagcacgttatcacggccaaaagcagtatcgagatgatcgagatgcaacgcaagccttgctgacctttggccgctgcctagtgcatatggcggtcgataccgacgaagtgtatatgaccaccaagttatcaggtggcagtacattcttcttgccgttcaataaaggtcacaatcttggacaaggcaatccgccgaatccatctggccataaaacggcatacctatggcaagaagtattcaccaaagaaagcttggcgaatattattcagcattttgtgcgtctggatgggtcaagcaaagatccattaccaaagcgaaccctgttctttcctcgataccaccaattggatgtggtgagaaaattagtagaccatgctgcccagcacggtgtcggtcagacttatttaattcaacactcggccggttcaggtaagtctaattcgattacctgggctgcttatcagttaattgaaacctatcctgcatcgtctgatgtggcaggcggaaaaagcttggagcagccattgtttgactctgtgattgtggtcaccgatagacgcctattggacaagcagctgcgggataacattaaagagttttctgaagtaaagaacattattgccccggcgaacaagtcatctgagcttaagcaggcgctcgaaaatggcaaaaagatcatcataacgacgattcagaaatttccgttcattattgatggtatcgccgatctcagtgacaagcgctttgcggtgatcatcgatgaagcacacagctcacagtctggttcggcgcatgacaatatgaaccgagcgatgggcaagtctgaagtcgaagaggcagaagatgctcaggataaaatccttcaggcgatgaaatcgcgcaagatgcgcgggaatgcgtcgtacctggcatttacagcgacaccaaaaaacagcactttggagaaatttggtcaacgccaagaagatggctctttcaagccgtttcacttgtattcgatgaaacaagccattgaagaaggcttcatcttggatgtgctggcaaattatacgacgtacaaaagttattatgagattgagaaatcaatcgctgataaccctgagtttgataccaaaaaggcgcagaaaaaactcagagcttatgtagagcgaagccagcaaacgattgataccaaggctgagattatgctggagcattttgttccacatgtcgtgaatgcgaaaaagctcaaaggtaaaggtaagggaatggtggtcactcaaaatattgagacggccattcgatactacaaagcgattaggcggatacttgaggagcaaggaaacccgtttaaagttgccattgctttctcaggaaccaaagaagttgatggtattgaatataccgaagcagatattaatggttttgccgagtcagataccaaagatatgtttgataccgatgagtatcgacttttagtggttgctaacaagtatctgactgggtttgaccagcctaagctttgcgccatgtatgtggacaagaagctcgctagtgtcttgtgtgttcaggcgctatctaggctcaatcgcagtgcacctaagctagggaagaaaacagaagacttgtttatcctggattttttcaactcggttgaagatattcaatcagcattcgatcctttctatacagcaacgtcattgtcccaagctacagatataaacgtactgcacgagttgaaagatgaaatggacgatgtcggtgtgtacgagtggtatgaagttgaagactttgtgacgcgttatttcaagaatgaagacgcccaaacactcagtccaatcattgatattgccgcagcgcggtttgaccatgaactagatcttgaagctgaagctaaagtggactttaagattaaagccaaacagttcgttaaaatctatgggcagatggcttctatcatgccttatgaaatggtcagctgggaaaaactgttttggttcctgaagtttttaataccgaaattgaaagtggaagatcccgatgcagatgctattgatgagcttctcgattctgtcgatctgagttcatacggtttgcaacgtgtgaagcttaaccacagcattaaacttagtgaccaagaagcggagcttgatcctcaaaatccgaacccacgtggggcgcatggcggtgaaaaagaaactgacccgctggatgaaatcattcgcacatttaatgagcgatggttccagggctggagtgccacacctgaagagcaaaaggttaagttcgtgaacatcgctgaaagtatccgcaatcaccctgacttcgaatcgaaatacaaaaacaacccagatccccataatcgagatttggccttcgaaaaaatgctcaaggaaatcatgctgcaacgccgtaaagatgaacttgagctctacaagttgttcgcaggagattcagcatttaaagcctcgtggacgcaaagtatgcaacgaatggtaggtagaaaggagtga

SEQ ID NO: 279553 - DNA, 687 bp, Morganella morganii
atgttagttgcggcaaactttcgcaaagaagtgaccagcaccgcgctgtggttattgggtcaaggcattagcattgcctgcttcaaaatcactccttattcactgggtgaacagctactgattaatattgaccagatcatcccaacaccagaagcgaaagaattgatgatcgggattaatgccaaggaagcggaagaaaaaaccaccgaagtggtccttaaaaaccgccatacggtgcgtcgcgagtactgggagcgtgccttagaggcgtttcagaaaagctcttgccaactctataacaacattagtccaagcaaagatcattggttatcagcaggctcagggctaagtggatgtccgtataacctgatatttctgcaaaaagagcttcgagtagagctttggatcagccgtggggttaccgaagagaataaatacctttttgacttgttgagtcagtccaaacaggacattgaacatacttttggtgcagaacttgagtggatgaggctggatgagaagaaatcttgccgtattcagttttcgaccaaagctgatgggtttaataaagagacgtggccccaagcggttgcgtggcatttagagcagatgacaaagttagaaaaagccttgaaaggaccgctgcaaaaagcggctgaggcaatgaaacagaagaattttgattaa

SEQ ID NO: 279554 - DNA, 192 bp, Morganella morganii; identical to SEQ ID NO: 278613

SEQ ID NO: 279555 - DNA, 210 bp, Morganella morganii
atggattattttttgacgttaccgggctgcgatacttgttctgttctgcataaaaaggcatgtccgaaattacaacaggcaaaaagtacagtgtatgttggatactactggggagagcacgctgcagttcagcaggctatcgttgtggcaagaggggcagtggttttatgtccgttatgcataaaccagcatgatgaagagactcagtga

SEQ ID NO: 279556 - DNA, 705 bp, Morganella morganii; identical to SEQ ID NO: 277446

SEQ ID NO: 279557 - DNA, 228 bp, Morganella morganii
atggatttaaaaaattacattgattcacttgaatgggggggagcgaagaatttggcggataagcttggtgtttcgaaatcttttctctcccaaatggcgtcgggtgccagttctatatctccaaaacgttgtgtagaaattgaagttgcaacatacggaaaagtaacgagaaaagatttgcgtccaagcgattggcataaaatttggccggagctggaaatcatttaa

SEQ ID NO: 279558 - DNA, 708 bp, Morganella morganii
atgagcaaaattcacaagataaaacttaaacttggcgggacaaagccagatgagttaccacaagcaaagcttgttcaatatcttgctgcacttacaaaaatgtgcggtgaaagtgatgttcatttttcatccgtagaagaaggctcggctgagttaatttcatacacgaaaagccagggtacttatggttcggtaatagcaaacataaacgcaagtattgctagtgaatcgaaagattatcgagatatagctaaataccttgccagagacaattatacggcacaaatactatctgaagataatatagttatcggcagcataactcctcacatagaaccaaaaccaattgccattacgaaaaaaacaaaagtgcaaggtcagttatataacataggaggtcgagatgagactattccagtcaagttactcggtgccaataatgaaattttaaattgcgaagcaaatcaacaaaccgctactcagctggcaaaatatctgttcaaaaaaatcagagttcatggtgttggagactgggaaagcatcaacggcatatggaaactaaaaaaacttaaaattgaaaaatttgaattacttaaagatatttcaataaaacaagcactatccattttaaaagaagatgaaaataacaagtgggatgaaatggaagaccgcgaagacattctacacaaggttaggagcatcaattga

SEQ ID NO: 279559 - DNA, 555 bp, Morganella morganii
ttgaaagttatcattgataccaacatcttaatttgcatgatgctagatgtagaacctcagggatcgtggataaaccctcgagataacacaaaggttgataatgtacacttaagggctaaagccctgaaagattacattgaacaaattggcggtgtaattattgtacctacgccagttttagctgaataccttgttggcatcgataaagagaagcatattgatcatgttaaccttatatcatcaatgtcatgctttgagttggtttcatttgatgaaattgcagctatagaatgtgctaaattaccgacacttcaagaaattaggcaattggcaagttccgcagaaaacacctctagtaaaataaaatttgaccgccaaatcatatcaattgctaaagcgaataacgtgaatgaagtatggagccatgataaaaatgtttttaagaagtgcactgatttagggatttcaataaaatctttagccgatatagccccacccccagagcaatttccgctttatccagatgatgaaacaggcactcacataacgcattga

SEQ ID NO: 279560 - DNA, 243 bp, Morganella morganii
atgaacgcatacgcagcacaggatgctcaggaagagcggcggctggagcatgcagcatggcaagatgccgtaaacgatgctctgtgtatggatgctgacgagttcatggatagactgcctgaacatatcttatcgccggaaatggaaaagataatggactctatcttcatcaaaaacggcaaatcactggatgcgttactcgaagggattcggaatgcgtacctcatcgggagagagcaatga

SEQ ID NO: 279561 - DNA, 924 bp, Morganella morganii
atgagtaccgcaatacagaaagtgtacgaaacaataaacccgctcaaaacggactttgagcaggtttgcagtgagccgagcatagcattcaaaagggaatctgagttcgctatgcaaatatttgccaataacaataacctggcaaccacggcgttaaataatctggtgtcggttcgcagtgcaataatgaatattgccgccatcggcatcagcctgaatccggcgcaaaagttggcttatcttgttccgcgagataaaaaggtgtgcctcgacatcagctacatggggttgatgcacattgcgcagcaatcaggcgcaataaagtggtgccagtccagcattgtccgcaaaaacgataacttccagctcacatctatcgatacagctcctcggcatgaatacaacgctttcgcctcggcgcaagagcgcggcgatattgtcggggcgtatgtcgtagtgaaaacagatgacggcgattacctgacgcacacaatgccgattgctgatatctacgcaatccgtgaccgctcatcagcctggaaggcgtggaaattaaaacaaaaatcctgtccgtgggtaactgatgaagaacagatgatcctgaaaacagtcgtgaagcaggccgctaaatactggcctcgccgtgagcgactagatcaggccatcgattatgtgaacacggaatccggcgaaggtatcgattttaaaggtgagcaatcacaggagcgtgatgtcactccggccggaaaaaatcagttacaggatatagctgatctgatgattaaagttgatggtgaatggagcgatacattcctcgcgttcatcagcaaaaaattcaaccgccctatctcccacccggaacagctcaccgtatttgaggccaacaccatcatcgacatgctaaggaagaaggcaggcgaataa

SEQ ID NO: 279562 - DNA, 699 bp, Morganella morganii
atgatcagtaacgacatcattatcagcaagaccggcatcgatttatcaaacatatcgcagggaagcgaagaatggatgtcactgcgtctcggggtgattaccgcctcagaggtatggaaagtgctcacaaaaccacgctcagggacgacatggagcgacaccaaaaagacgtatttcaatacgttgatcggtgaagtctgcaccggcgtaagcaaggatgttagcgcccattctctggaatggggaaaagattacgaactcgaagcacggatgacatttgagttttacagcagcctgacggtcacggaagacccgataattttcagggatgaatcactgcgaacggcctgctctcctgatggcatttgcagcgacggcgctggccttgagcttaagtgccccaaaacaacggaagtctttatcgacctggctttaaacggaattaaggccatgaaaaaggaatacaccgctcaggttcagtattcaatgtggatcaccggaaaggatgtctggcatttcgcaaactacgacccgcgcatgccgggaggaaaggaaattgtccacataccggtagagcgcgacgaaaaaatgatgcgggaattcgaccaacagataccagagtttattgaggcaatggatgccgcactaagcacactcggcattgagtacggtaatcagtggaaaggatttcagctttaa

SEQ ID NO: 279563 - DNA, 204 bp, Morganella morganii
atgactatcgaacagttacagaaagaaaacgaaaagctgaaagagattttatttgcagacgctttcgttatgaaaaaagcagttcatcaatacaacttcggtatcggtatggaagaacaagccaacgatttcattaaagatgccgagcagctgacaaaaaagatattgcgtgaattagatagtggcttagtcacatggatatga

SEQ ID NO: 279564 - DNA, 552 bp, Morganella morganii
atgtcttctgaatcaataactcttattattgccattttggctagtgttgtttctattgttggattggttattacaaaggaaaataaaatctcagaatttaggcagttatggataaatgatttaaggaactcgctagttaaattgaataaaaacatgtttatacttcaacaaatgtacattaccaatacatctgaaactgagataatgaatcaaaaagtcaatctaaaggaatcattggcagaagtgtacttgagaataaacaaacttaccccaaaccaagaagaactaaaactaattgacattatagaagaattagatttattcgttggagggtatggtaacaaagattacaatgattcagatgaaaaattaatagatgcatctgcatctgttttaaaattagagtggattagggtaaaaagaggagaaaaaacatataggttttgggttaaaatattcacttgtatgttttttattactctatattatttaataataagattaacccctgattttattgattctatattcaaattcttctccctgcactag

SEQ ID NO: 279565 - DNA, 234 bp, Morganella morganii
atgaaagttaaattattaaatgatggtgattatggcgacatggaaaatgtcagctttccagtgattgtctcaggaaggtactgcgatatgggtaatgaattgattatggttacaggcagtgaacttatacgcctagcgggtaaccataataaagaagacccatttgatcctgattatgaatatgctttttatgttggcattgagtgcgaggtcattaatgaacaaatatcgtga

SEQ ID NO: 279566 - DNA, 288 bp, Morganella morganii
atgaacaaatatcgtgacaaatcagactccgagattaatgaattagtctcttttagcttaggttacgtacacacaaaatcattcgccccatgtaataatccggtacaggaaacgccgattattattgagaataaaataagcgtgaattatatcgataaagatattggttggggcgcatatcattttgatgaagaaaaaggcgagctggaaatttacgataaaaattattatcgcgcagctatgatttgctttctaatcatgaaggatgcggagaatgagaaagtatga

SEQ ID NO: 279567 - DNA, 297 bp, Morganella morganii
atgaccgttctgacatttgctgtgatccgccttacgccagtaatattttttcggctcagtctggctggcaccgataaaccaggtattaccttcatcaatatcaaccgcatcatgataaccgctgaccactttcaggttagcgatctgttcaaaggcggtgagatactggcggaagccatcttccagggtgtcgctgttaagctcgctctgagaaagctgctccagcatggtgttcatcatcccggtctgaccaatgcggatagtcgggtcaatgaagttttccgggtaatagactaa

SEQ ID NO: 279568 - DNA, 195 bp, Morganella morganii
atgcctgaagaaacagctgacaatctgaaccggtattacaccgataagcggggacggacagttcacgttatccggtacgaccgggagaacagccgggtgattttcatgcgtgacggttatgagcacccgtgctttgaaccgctgaaaatctttcaggaacggtatacacgctgtccggatgaggtgaaaccatga

SEQ ID NO: 279569 - DNA, 1737 bp, Morganella morganii
atgtcattagaagaaataaaagcaaagctactgactgcaaataaaactgtggaaagcttgcttgctcaagtcagcgatttatacactcgggaaggatgttttgaagagagcattttggtagaagcactatctgaactgcataactcaggagaaattgacttcgtcaaaatagtaaaagaacttgatacaagttcctgcaaaaatgatttctttaaaattatagatacttttgaaaatacattacctttactaaactcaaaagttgaagatgtcctacattgtctggttcatcttacgcaacgggtcgatagtattggagtctatggggcctttcagaatttctgtcgtgcagaaccaaaacgttccaaagataccgttgaatttatcctgatgcaaagtgaacttagtgcatatgccccttttctttcctgctcaatcctagaatacgattcaaattgtatggttgaggctatccaaacaacaaaaagcctgattgctaacagcaatcaagcggtcagaaaccaagcctactttgttttggggaaactcaatatcgatgaaacacaggcaagtgtcatcttggagctacttatcagtagtgccatgagtgaggaagactctggttgttatgcttcgatactgagggcaatactctattttggagaaagatttccatcttattggtcgccaatagaagaatttttaactacctttattaaggattctcctccagaagttctcaatgtaatatcgcatattgtggcatttcaaagtggcgatctttcagaaagtgttattcgtcttctggtaaagaagttagccaatatttcccctgagcacacatgtaccatcaataacgttgatcatttattggtcaatttaattaaaagggatttatgctctcttgctatcgaattattggaatcaattttggctgtaggtgtaaaatttacatcactggactatttgtctcgggaactattgtgtaagcatcaatatcaagaactacgtaaccatattattacgaagtggtttttatcgggagaatcatcactttgtcatgcggtttcagatctgcttcatgatgtaatgggtaaggacatagaactaaaggcagatatggcattgctaggtgatgataagaagcaagtatttgttagtcacaaagcgatcggttggttatttactcggcctgtcgcggcagcaagtttcatactgtccatttgtgaaaccgcttcgataactacacttaacaatattgcgcaaattttgtacgatcctttacttttaagctatccaggagagcttgaacaattcttccagtcatacattgataaaaatgttcaaggacaactatgtgagcgtttgcttaggaaacttgaggcctatcatgctgatattatgaaagtgtctgaattaaatgagttaatggctcccagcgaaaatgtaagagcttattggaaagactgtgataaagacatgcagaaagcccacgaaaaagcatcaaagtcttctattattcagataattgcgacgactcagaggttattgtacggtaacagctcgatttactatatacatatgggtgatggaaaatccgtaagacaggaggctcaaatgcattctttttcccattcgactgaaatgccaagattgaacgttttagatcccgagtctctagattacgctttgcgcatataccgctacgagagaatgaaaaatgaagcttattcttaa

SEQ ID NO: 279570 - DNA, 1704 bp, Morganella morganii
atgaagcttattcttaaacaatatttggcttcactaaaagaacgagcagaattagatgccgtgttgccagacttattgagcagtatgggtctgaatgtgtttatctcaccgacgcgtggggttaaagagtacggtgttgatatagctgccgtcgggcgaatcagtggtgagaaagaaaaagtttatttgttctcagttaaatccggaaaccttactcgtgagacttggaatggtaaggcggatcaagttcttagaccttcgttagatgaaattcaagattcatttattcctagccgcctaccacctgaacatagagataaggaaatcgttatctgcttatgttttgggggcgatatcagttccgggattaggcaggaggtatccggctatgagcaacggaatacacgagacaatatatcttttgaagaatggaatggcgataaactttcagagtttattcaacaatacctgttgaaagaagagttactgcctagctctacccaggctttgttaagaaaatcgttagctctgctagaagaacccgagagctcaagcaaacacttttctctattgatcgataggattctgtcaaatgccactgatacagactctattgcctcgtctataatacgaataaatgtttgtttatgggttctattttcatggtgtcgtgatgggcggaatttagaggcagcttatctttcatcagagcgcgcattgctgttggcttgggataaggttaaagaaatctataccggaaaaaataaaccatcaaaatcatttaatagtattttagaaacttatcaacaaattactgattattatgtagatcaatgtataattccgtatgttgaattcagatatgctctttctcatgcagttcgttccccctgctctattgatgtaaatattaaactctttgatgtattaggacgtttatccgtcaaaggacactgggttttagattcactatcaaagagttatattgaaaatccgccaatagatggagaccatgaagaacaggaaaaattacgtctgcgcctgagaaaaatcacaaaatcaattaatctcttggttgttaataatccaatattactgtcgccatacaaagattcgcaagccattgatattgctctggctctaacgttgctttcaaataattcagaacttgacgaatttgtgcagagttggctctcagaaatagttgataggtgcatattttcttttgagagtaatggcatgtatccagttatacatgagtcttacgaaagcttgcttgaacatagaaagaaagataggactgacaatagttataagaataaagctaccgaagccagtattttatacccgttgctagtagtcttttgctctctgtataaattagattcaataagtcaaaaactagaaaaatttgccgcagataaactaacacattgtacgttacagtattggtacccaaatcaagacagcgaacaaaatatgtactcaaacgcagatatgcatggttcagcgtcagctcactttccaatgaatggaagcttagcaatagggcatatagttcaagagtgcagcaacgctgattcgttcaaaaaaatgtcggcttttaatgaagggaaggctccattgatcctgacagcctgtcgctgctaccgatatccagtacctttccattatattgaggattggctagtcgatcctctatag

SEQ ID NO: 279571 - DNA, 1329 bp, Morganella morganii
atggatgctcgtccagtcgtagattttaacgcaataagttatgccaaaataagtactgactgggatatcattagtgtagttataagcaaagaagatatagatgatatagtagttagagctgctgcattaacaattcaaggtggtgccccccctcttttcatggaagcaaccatcctagatttggaaagtttatgcacactagattatcgtcaattgccagagctaacaaaagaccaggtagttctgatggaaaaaaggttatcaggtgagactgactcggtaatagacatgttttttcttgagcttagatgtgcaatcacactcggatggaaggagccagaatctaatgatgatataagatccattagttatcacaatagcacttttaataatctcatctacaggaaagctaattttctagcatctaatttcggaagcaatagatacaatatgccttattggttgcgactcagtcaactcagaattatgagtcacataccaaataagttgatcaatgaagcacagcttgacgagatattctttttccctatccaccggagaggcctcaatgcaacaagttgttcaatcaacggacaaaaatacgttacagccaactttggactcaatgggatccttcatgaacttaaccgatttatttatcacttccagtcaacagaaatttatagcctagagaatagagagaagcgtgcgttacctgagataattccagtcgtgttgtattttttaacatcatgtagcccaaggtatttctatccacaatttctttttggcaaatcgagttggaaagtaaaaacttttactgattatcaacttgatttcataatcctacatgaaatatcccatcatatccttgaacaccctaaacgagtcagtttgataaaggattatattgaacgtcagaacaaaattaagcagtttgaatatgaagccgatacattagcaaatgtacttatggcttcgtcgattataacggatggaaatgacgaaccacgaagtaatcattcagtcattgtttatgcggacgcaattgaggcggtcgagcttctttttgaacacatgaattttattgaagaaatggaggagatcatacgtcatagatttgggtcatttataaatatttcatcgactaaaggtgcacatccggaagcatatactcgccttgagtattttcatagaatttttgataagaatagacaactctctgaaactgcactgtatgcaaggaatttatataaaagaatgaccaattattgccttgagctttctaatgacgaattggcgtcattgatgagagattatcttgtctga

SEQ ID NO: 279572 - DNA, 915 bp, Morganella morganii
gtggaatatttcagcgacaaagaaaggggccccgttcaacggacaaataacgaagtaaccactaaagtctgggctggacttgtttcatacattaatgttctggcaaacaacggatacttcggtaaagactttcctgaagaatgtcccgatgggcagggatgcgtaggcacagaggtcaaagacctcaaagccgcgttacaggctgagatcccaaatcttgactggccattggcaacagaagttgaatcagaggaatcgtcatcttggtctagggagatgataccttttgttccaaactatctggatgtaatggatttactccagttctgctataaacatgtggccatacctgttaaaggggactatcacagctatttcaggcattaccactttgacgattttcaaattgaagctggtaaagaagaatttagggaaaaggtaaacacaatatttgccagaaacggccttgcttacgagcttcttgtatcaggtgatatcacccgaatgctaagcccggaactgaagcaaatgatggcaagcataagcattcctgtagagaaagagttacgcagcatgctcatgcgcgcgaatgaaaaaataatcaactatgatgtcaccattcgttatgatgctcttaaagagctttgggacttttgggagcggctcaaaagcatatcttatccgactgacaaaagagagtctgtgaagaagttacttgatgcggcagccgatacatcggaatttagatcggttttagaaatagaggcaaaagcacttacagatattggaaatagttatttcattcgccataccgaaatgaaacagatcaagattcaggaaagtgatcatatcgaatatctatatcagcgcatgttcagtttgatacatcttttactaaaaacacttccaagttga

SEQ ID NO: 279573 - DNA, 438 bp, Morganella morganii
atgaaggatgaacatctggtgccattatcacgacaggttgcttccctgcttgagcaaattaaggaaatcacaggggagtcaatgtttgtctttgcaggcgcgcatccaatggataagccaatgagtgaaaacactatcaataaagcactgcgcgtaattggctacaacaccaaaaccgatgtctgcggccatggtttccgcacaatggcctgtagtgccctgaatgaatcagggctgtggtcaaaagatgccattgaacggcaaatgagccataaggaacgcaatggcgtaagagctgcttacgtgtataaagcggaacatttagaagcccgcatagaaatgatgcaatggtggtctgattatttagacgccagccgtatagaatatattgcgccatatatttatgcccgacaatataaatccataggtgccgcttga

SEQ ID NO: 279574 - DNA, 1881 bp, Morganella morganii
atgtcagatattatccctaatgtcgtcgtttcgatgccttcgcagttgttcacgcttgcacgcaaatttcaggcggcgagtaacgggaaagtatttatcgggaaaattgacaccgatcccaccatacctgaaaaccaaattcaggtgtatctggaaaacgaagatggtacgcatgttcctgcccctcaacctctgattattaaccaagctggctatccggtatataacgggcagattgcaaagttcgttaccgtacaaggccattctatggctgtgtatgattcatacggtgctcagcaattttactttcccaacattttaaaatatgaccctgatcagttcagcaaaatccttgctggtgaaaatgggttcacctttgttggtggcctgactgaaaactaccttcgcgttttcgataatgtcgctgaaatggtagcggaaacatcactgccacttggggcaacggttaaaacacgcggatattacacgatcaatgatggtggggaggctgagtatacagtaaccaacgttgcagctaatggcatcattgatattgcattgagcaatgggttaacggcgtctatgttaacctacggggatgttgatatcagaactgttggcgctgtacgtgatactgacattggcagcattcttgtatcaatgcaggatatttccagaatcaagacagtagttattcctggctattcatttgactgtaacaaaaaaataaatgtcaaaaagaattttctgtttaaatctggcgctcagataatcaacagaacattacgtgatgatatgtttgtatttgaaacagataacctattttttaaatctgaaaaaataggcggtggtcgcattgcagtggatactccgttgaaagcatggaatcataacgtcgcccttgtattgggtaaaaacaatcttcgtaatttgaatattgatggtgttaagctggttcctaactattcagatagaagtggaacatcattacgactaaggtgcgataatgttctggacggaacaaacgaccctgtaaaaagatggaactcaataacggcatgcaattttaataatctatttcttgaagagggggagaattgtcttgttattgaggtgtatgagccaactgatgactttgattataaggagtctacaaattgggtaacctcttgcaactttctcaacttgattattaagggggttaatggtgttaccattaagtgcgtgccaaaatcacctgggagatatgcgtactttacacaaatagctgcacttaacattgatttcgtccagcagtggacgcaagaaagcgtttgggcgatacaaatagatggtggcggcgcaaatgcaataaattcatatttgtgggattattcttattatggaagtcaagggaagtacatgatagatgttaggggtgatgatggaagggataacactatacgctctaatattagtacgtcacttgttaattttaacacaaagtcaaacacttacatccctaactcatcaattgagattaatgccattggccttcgtcgggttggtaatataataaataaatctggggtgataactcttaactcagaaaactatatacctagaggtataaccaaggcatataaagatccgggagataactacaacataattgtagagtatactcaggggattgacaactggaggccgtatatccagacgcagtcacttactaatagtcaaggatataaatactcactgataccagtatacaatcaatctggtgtgcaatcagggaaagcgtattttattgttataaataatgccaatcaggagctcgttccagtatcatcgctccctaatgacattgaatttaatattgaaattatctgcgcgaactaa

SEQ ID NO: 279575 - DNA, 342 bp, Morganella morganii
atgccaagagaaaaaccacctgctttagatgaaaaaataaccactgctagaggcgatgtcgaaaggttgtcgctccgcctcgcctcagaaaaagaagaggcttatcagctatcgcgtggtgacaattatgaggaataccacgcagtatgcgaacaaagggaaaacacaaaatccgaattatgtgacgcaaaaagtgaattatcagcactggtgagactccgtgatgagagaaagtcacgaatctcgcaggaaaaaagcgataaagctgattattttgtaaactcagccataatattcactgtggtttttactattgtttatttcatatcaaggcactattag

SEQ ID NO: 279576 - DNA, 2097 bp, Morganella morganii
atggctaaggcatggaaagacgttattgcctctcagcaatatcaagctctttcacctcagcaaagagctgaagcgcaggagcaatactttaatgacgttgttgccccgcgggcgggtgaagctgtgaatgaggcaaagcagcagttttacactgcatatccggttgagacagtgcagcaagagcagcagcctgctccggtgcagcagccggaagcgcagcagccggaaggattttgggctaatgtgaaagacatggttaccggcgagagtcgtatgacgccggaaatggagaaactccagtctgtatctgacgcgcctgaactgagcgagtttaacaaagatgccgccaaagttgcctgggctcagatgatggggaatcagcaagatcaggagatcatgctgagaaacctcggggcggaaatctcatatgatgcaaagggtaatgccattgtcaccatgccagaaatggttaagcagatgggatggttgccaaagcatcatgccgataagctggccgctgagtatggaggcgtggctgaagttgatggtgacgggaacactgttatcaaacttcctccgcgtcagtatgcgctaaacaaacctggcctatctccagaggatgtggcatcaggtgcggctcttgcagcatcattcacaccggctggacgtgcaggagggttggtcagtgccggtcttcgcgcggccggcacagatgcattaattcagggcaccacaagttacatgggcggaaccgacattgacccgtttcaggttggattatctggtgttctcggcaccggcggcaaggcatttgaaaatattgtcggcgctgcggctcgggcaataaaaggaaagatgtcaccggaggcggcagaggcggttaagtttgctgatgctaataacgctccactgatgaccactgatgctgttcagcctggcacattctctggccgttcagctcaggcactggctgagaaaatacccgttaccggcactggctcactacgcagaaatcagcaggaagcaaggagcaaactgattcaggaatactcagaaagctttgccgctccatcacctgatgaagtggttcagagccttcagagacagaccagcaaggttaaacaggcggcaggtaagcgcatgtctgaagtagactccgccatgcagtcggtaggcaccataaacccgacacaagccatcacagctatcgataatgaaatgagtcgactggcgcggcttggcggcgcggctgacactcaaaccatcaataaattacagacctatcgtgatgagttggtgaaaggcgctgattttagcctgctgagagacctgagaacgcagttcagacaggatgtgaaaggtgaccgcatggtgtggccttctcagtctcaaggggcggttaaccgtgtatatgacgctatgtcaaaagatatcaatcagtctgtgtctgataacctcggtgccagagtggcagatcgttatcgccaggcgaatgcggcatacgctcatgaggctcaggtggtgaataatacgcgcctgaaatccgttctgcagaaaggcgaactcacgccggaagttgctaacaacctccttttcagtaataagaaaagtgaggttcagcaactatacagatcactcgacagccgcggaaggaatgcggccagagcatctgttatcggcaaagcctatgagaaatcaggcggtagtcctgagaagttcctgaatgaaataaatcggctttcagcgcagacaggtatcctgtttaaaggtagcgagaagcaatatctgaatgggctgaaaaaataccttgagcagacacaaagggcatccagagctggtacggttacccctaccgggcaggagcttttgcaggtcggcataccggctggcgtggcatttgatgttgttaatggaggtacggcaactgtagctgcactgtcatatggcgctttagctagggtttacgaaagcaagtcaataagaaacatgatgttgagattagccaacaccccgaaaggtagcactgcatatgacaggacaatatccaatatttctcaggctattactgctatagctcaaagtgaaaaagataagtag

SEQ ID NO: 279577 - DNA, 1389 bp, Morganella morganii
atggcaacgtggaatcagggcggtattgccggaagtcttctcggaggaattggcggggtgaatagcaacgcgccccgcgcaaccgacgcaaacacagcactgtcgttaatccgtgagaataatgacattcagcggtcaggtgccaataaccctgtattacagggattgcagggattgtatggtgtcgcgcaaatgtaccaggcagaccagcaggcgcagagacagagcgactttcttcagaagtacggtgcagccagagcagacggcgacgtttcatccatgcgtcaactgttcgcagaattcccggaaatgaatgagcagatcgggaaaggcatggaaggtatttccgccgacacccgcgaatcactcggtaatgtggccgcaaactttcgcatggcagtcaatgccggaacaggtgatcagttcgttgccaaaaacgcggctgaactgatgcgtctcggtattgacccgaaagaagcgcagcgcctggctaaggctgacccgaaaggtgcagttgagttggctgacaccatcggcatgagtgcactcactcctgaaaaatactttgatgttattggcgataaagagaatcgcaaagtaaccatgcgagggcaggacattaccgcagaaggtaaccggctttctgccgaaaccacccgccgtggtcaggatatcagcgcggcaacagcgagacgcggtcaggatatatcagcatcaaccacccgacgtggtcaggatatggctatgcggcgatcaatgtcttccggtggcggagaaggggagcgaacggttcagctctctgatggacgcactgtcgggattgttggcaaggttcacggagccggagccaacgcatattacgaagggatagacaataacggcaacaccgtgcgagtgccagcgaactcgatagcagctcctgcaagctcatcagcgagtgcaaccaactatgccatgaagaaagacatcgatgccattctcaatgctgatcctgaacaactggacttcatgacgggcgtttccggcggtgttggtgctccggcggtgggtgctgattaccgcagccggtggaatggtaaagaacagcgtcagttttatactgctgcccagcgcgtacaggggagaatgcagaaccagggtattgcggccgctcgcgatatgggggcgagtggtattaacaccgtggcagaggcaaaaatgtatttccagggtatgccgcagatggactactcaagcccggatgccatgaagcagtctctgatggaaattcaggaatacaccaacaactataaccagcaatacaacgcggatgtcggtggtagtaagccgtcatcaaaacagcaaccggctcagcagcaatccggatattcatcattatggggtgattaa

SEQ ID NO: 279578 - DNA, 696 bp, Morganella morganii
atgtccggatatatttttaaactggcacgaaagattgccggtgaagaacctctattccctgaaaaaggcggaaaaggaggcggtgggggcggtggtggtgaagcgcaggcggatgctatcaataagcaaaccgagcttcagcgtgaacaatggaacatgattatgaacaatctgaagccattcacaccacttgctgagcagtatgttaacaccatgcaggggctatctacccttgaaggccagaacaaagcgttacaggggttctatggctcagatatgtacaagcagcaggccgaccaggctcgttatcaggcactgaatgcagctgaagcgacaggtggtctcggttcaacagcgaccggcaaccaacttgcggctatcgctccatcgctcggtcaggcgtggcttggcgaccagatgaacagcgcgcagaatctggcaaacatcggtctcggggcgttacaggggcaggcaaacgccgggcagaactacgctaacaatatgggctctctgtatcagcagcaagctgctttagcagcagctaatgctaaccgcccttcaggcttccagcaagcgataggcggtggggcatcaggggctatgcttggcggtggtattgcaagtgctctcggtatgtcaactccgtggggtgccggtattggtgctggccttgggttactcggcagtctgttttaa

SEQ ID NO: 279579 - DNA, 459 bp, Morganella morganii
atgatcacattcaaaccaacgaggaatatcgacctgattgaggccgttggtaatcaccctgacattattgccgggagcaacaacggggacgggttcgattataaacctgagcgcagacactttgaggttgatgttcacgggcaattcggcggcatcgtgtattacgaagaagtgcagccgatgacgttcgagtgtcacgctatgtacctacccgaggccagggggttcagcaaagatattggcctgtcattctggcagttcatcctctcatcaacttacgtccagtgcgtgacatcatttgcagcgcgtaaattccgccacggccagatgtactgcgcaagtatcggacttggccgtgtgggcaccatcagaaagtatttcaaaggcgttgatgacgtcactttctactcagcaacccgtgaagaattaaccgaattcctcagtaatcagcggagataa

SEQ ID NO: 279580 - DNA, 867 bp, Morganella morganii
atggctgatgaaagtttaaaagaccccatcgcagtgacgacagtcggaatcaatgctgcgtcgctccctgtcgtgttttctcctgcttaccggatgtatgtgctgtctcagtcacttgacttcaccagagtgacagggaaagcaaatgaggccggccagggggcatatgatgcgcaggttaaaaatgatgagcaggatgtagtgctcgcagaccatgaaggtaggattaccgctaacaccaatgcaattcagcttcttgatgtacgactgacaacagcagaaggtaagatcgacatactgcgcgatgatgtagattaccttctggataaggttatcgacattgaagctgaattggatgaccacgaaacgcggataaccgctaatgaaacggcgctggcaagccatgaaggtaggattgcagctcttgagtatgccacgacacgcaagaaatcagaggttgtttataccggcatatcacaggtaataccaacgacgccgactaaccttgtcactatgcttaagtcactgactccgacatcaggtactctggctccgttttttgacaccattaacgataaaatggtcgtttttaacgagagcaaaacgctcactttcaaattagcacttatcggtagttatcctggcggtactacaaaccggtctatgcagctaactttctccggcgctgtacctgacacattggtcgctagcagaaacgtagctaccactacggataacattctcctggcaacattcttcagcgtagataaaggtggcttccttgccacaaacggcagcacgctaactattcaggcaaatggcgctgcgttcacagccacgaccataaaaattattgcggagcaatga

SEQ ID NO: 279581 - DNA, 1419 bp, Morganella morganii
atgccaaagattcaggttccgatatcaagagggctgtcgaaagatttcaggactgctgattatgtcgactctctgccggtgaatatgctggcaacgccgaaggaagtcctgaatgcagccggttatatgcggtcattccccggagtcgaaaagcttcgtgatgctgacggcgtgtcgcgcggtgtccagtacaacactgcgaagaatgccgtgtatcgtgtcctcggcggcaagctgtatcgcggtgacagtgttatcggcagcgtgtccggcaaatcccgcgtatcgatggcatacagcgcaaccagtcaggctgttttgtccggcgggaaaataacgcagtatcgctatgacggcggagagaagacgatcaccaactggcctgtcgataccggatatatccagtatgacctcggagaggcgggtgacgttgcccgggttaaaggccggtatgtgtggtcgaaagcaggcactgacagctttttcatttcagaccttgaagatgaatctcaccctgacaaatacagcggacagtaccgtgctgagtcgcaacctgacggcattatcggcctcggcatgtggcgtgacttcattgtgtgcttcggcgcttccacgattgagtatttcacgcttaccggctcgaccactgtcggcgctgcgctttatatggctaacccgtcatatatggtcagcaagggcattgccggaacattctgcaaatgtaactacatggatgcgttcgctatcatcagccatccggcaagcggtgcaccgtctgtttatctggttgactccggccaggttaaatctatcgccacggcaactatcgagaagatactgcgcggttacactgccgatgaattatccggcggcatcatggagtcggtacggtttgactctcacgagctgctgatcattcaccttccacggcatgtactggtattcgacgcggcagcaagccagaacggccagcaatgggctgtgctgaaaaccggcctgtttgatgagccgcaccggtcagttgattttatgtatgaaggcaatcagataaccgtcggtgacaaaaagcagccggttgttggtcgtctggtgttcaatgcctcatcgcagtatgacgcgcaggcagagcacctgctgtacaccccactgattaaggccgataacgccaggctgtttgaccttgagcttgaggcatcgaccggtgtcgctcagattgctgaccggttattcctgtcggccaccactgacggcattaactatggccgcgagcagatgatttctcagaatgcaccgttccgttatgaccagcgcattatctggaagcggataggccgtatccggaaaaatgtcgggttcaaaatcagggtaataaccaaagcgccggtaacactgtctgacctgacagtaagggcggaataa

SEQ ID NO: 279582 - DNA, 513 bp, Morganella morganii
atggcgataccactgactaagggagaaattctcctgtttgcgcttcgcaaagccggagttgcttcagattcatcactgactgatgttgagccacaatctgtgagtgatggtattagcgatctggaagatatgatgtccgagatgcaaattggatttggcgacctcgggtatatcttctctgatgctgacgaacaaccatctcctgatgatgattcagggcttccgcgcaaatataagcatgtcatcggctatcaattattacttcgcattctctccgattatgggcttgagccgacaccaagacaggaggcgattgcggcctcatcttatgacgccttgttactcgacacacttagcgttccgtctgttaacagacggggtgatatgccggtcgggcaggggaataagtacaccacgctggggaattccgggtattacgtagaggatgaaggggatgccaaagattcaggttccgatatcaagagggctgtcgaaagatttcaggactgctga

SEQ ID NO: 279583 - DNA, 180 bp, Morganella morganii
atggaacgtaaaagcgtttttttatgggctgataatgatgctggttatgttcaggctgtcattgtttcagacgacttcccgatttttaaaaaaatgggatttgttgactctgctgatgaggttaaaaagccgaaacctccaaccaagaaggcggacaaacatggcgataccactgactaa

SEQ ID NO: 279584 - DNA, 1272 bp, Morganella morganii
atgccgaataacttaaattcaaacgtaagtcaggtagtcctgaaaaaattcctggctggctttatgtcagacctggttctgtgcaaaaccatcgaccggcagttactgtccggcgagatcaactccagcactggcgacagtgttagcttcaagcgacctcaccagttccgttctgaacgtactcctgacggtgacattaccggaaagacaaaaaacggccttatttcgggaaaggcaacaggccgcgttggcgattatattaccgtcggcgttgagtggaagcagattgaagaagctcttgagctgaaccagttagaccagatcctggcgccaatccatgctcgcatggttaccgacctggaaactgagttggctcattttatgatgaacaacggcgcgctgtccctcggtacgccaaactcaccaatcgccaagtggtcagatgttgcacaaacggcaacattcctgaaagatatcggcattaaggccggtgataactatgcagttatggatccgtggtctgcacagcgtctggcagatgctcaaacaggtctgcatgcgtcagatcagcttgtgcgtactgcatgggaaaacgcgcagattcctggcaactttggcggtattaaggcgctcatgtcaaacggccttgcatccagagcacaaggtgatttcggcggaacgctgacagttaaaacagctccggttgtggactacaccgcaatcaaagattcctatcagttcaccgtcaccctgaccggtgcgacggcgagtaaaacagggttcctgaaggccggtgaccagattaagtttactgcaactcactggctgaaccagcagagcaagcaaactctttataatggttctgcggcgatcagcttcaccgctaccgctctggaagatgcaaactctgatgcaagtggggatgtcactgttaagctctctggtgttcctgtttatgacgcaaccaacccgcagtacaacgccgttgaccgtaaagttgcagcaggcgatgaggttgttgttatcggtaccgctaagcagcaaatgaagccaaacctgttcttcaataaaatgttctgcggcctgggaaccatcccgctgccaaaactgcacagcattgactcagctgtcgctacatatgaaggcttctccatccgcgtacataaatacgcagatggtgacgctaacaagcagatgatgcgttttgacctccttcctgcatacgtatgctttaacccgcacttcggcgggcagttcttcggtaacgtctaa

SEQ ID NO: 279585 - DNA, 897 bp, Morganella morganii
atggaaaatgaactgatcattgatggtcaggctgtgcctatgcctgaaaatcacgaccagcagccgcagaatgaaactgagcagcaggataacggcagtgaggttgacacatccacttccgtaccggatgccgcagctgataatgcggaggcagatcagggtcaacaatcagggcaggaacaggattactccctgcagattggcgacgaagaaatctcattaagcgatgacgatgaaaacattgaggggaaaccagctccgcaatgggttaaagaccttcgcaagggatttaaagacacacagaaagaaaaccgggaactgaagcgccagcttgaggaaatcacagccaggcagacgcagcagccagcggtaaccgatgaagttgttccgccaaagccgactctggagtcgtgcgactggaacgatgaagtttttgaaacagctctgacggagtggcatgagaaaaaagtccgtgccgaacgtcagcaacaggaacgtgtgcgggcgcaacaggagattcagtcgagattcactgagcgcctgcaaaagcataatgaacgcgccaaaaaattacctgtgaaagattacgcagagatggaagaagtcgtgcgcgttgaagtgccgccgctgcagcaggaaatacttatccatgcagcagacgaaggcactgaattgattgcttacgctcttggcaaaaataaagaattgcgccagcggcttacagctgagaaagaccctatccgggcagcattcctgctgggacagattagccagaaagtgaaactggctcctaagcccaagaaatcacccaaaccagagccggaagttaaaggtggtgccggtaatgcagcctcagatgaatttaacaaactgtgccccggcgcaattatcgaataa

SEQ ID NO: 279586 - DNA, 2166 bp, Morganella morganii
atgctcaggtttgaccgtgcgcactcaccgcaagaggatgtgagggcgaagtgtattgaagcaacgcgcttcgctcgcgtccctggtggtcagtgggagggggcaactgctgccggtacaaaacttaacgaccatttcaaaaaatatcccaagtttgaaataaacaaaatatccaacgaacttaaccggatcatcagcgagtaccgcaacaaccggataacggtaaaattccggcctggtgacaaagaagcaagcgaagatttggctaataagctcaacggattgtttcgcgcagactatgaagaaacagacggcggagaggcgtgtgataatgcgtttgacgatgccgccaccggtggcttcggctgtttcagactgacgacgaaccttgtcaatgagcttgacccaaccgatgaccgtcagcgtatctttatcgaaccaatatatgatccgtctcgctcagtctggtttgaccctgatgcaaagaaatatgacaagtcagatgctgcgtgggctttttgtatgtactcgctgtctgccgacaaatacaaagctgaatacaacaaagacccggcaacgttagatattggcatcggcaggtcatgggattatgactggtacgacaatgatgttgtttacatcgccaagtattacgaagtgcgcaaagaatctgttgatgtggtcgcattcagaaacccatttaccggcgagtcagtgacctacgacagtgagcaattggaacaggtgcaggatgagcttgaggaaatcgggttcattgaggaagcccgcagaacaattaagcgccgccgcgtttatgtctctgttgtagatggtgacgggttccttgagaaagcacagcgtataccaggtgagcacattccgttaataccggtatacggcaagcggtggtttattgatgatgttgagcgagttgaggggcacattgccaaagcaatggatcctcagcgcctgtataacctgcaggtttctatgctggcagattctgccacgcaagacccgggggctgtccccattgttggcaagtctcagattaaagggcttgaaaagcattgggaagacaggaatacaaaaaggcctgcattccttcctctcaatgagactgtcgataagcaaggcaatgtaatagctccggcgtcagccattggctatacgcagcctcaaccacttaatcaggcaatggccgcacttctgcagcagacagggcttgatattcaggaggttaccggttcaagccaggccatgcagcagatgccaagcaacatagccaaagaaacagtaaacagcctcatgcaccggtctgatatggcctcgtttatctatctcgacaatatggcgaaaagcctgaaacgagcaggagaggtatggctgtctatggctcgcgaggtgtacgggtctgaccggcaggttcgcattgtcaatgaggatggcactgatgatattgcattgatgtcggtatcagtaaaagacagagataccggccgtgtggtagcgatgaatgacctgtcagcagggcgttatgatgtcacagttgatgtagggccatcatacacagcaaggcgtgacgctaccgtttcagtgctcaccagcctgctttcaggaatgcttccgcaagaccctatgcgcagtgttgttcagggtattattctcgacaacatggacggcgagggactggatgagttcaaagagtataaccgcaagcaactgcttacccagggagttgttaaaccgcgcaatgccgaagaggaacagattgtcgctcaggcaatgcagcaggcgcagcaacctaatgctgagttgttggcggcacaaggtgtgttcttgcaggggcaggcggaagtgcagaagacgaagaacgaagagttgtcaattcaggttaaagcgttccaggcgcaaaccgaagccagagtggcagaggctaaagtcgttcagcttctcgcatcagctgacagtacgaagcgcgctgaaatcagagaggcgcttaaaatgctgcataccttccagaaagaacaaggcgactcatccagggcagatgccgagttaattctaaaagcaactgacacgcagcataagcaaagcatggacgctgcaaaaacaatccagtcacaaagtaatcaacagtctcctgcggacttcccgcagagttaa

SEQ ID NO: 279587 - DNA, 1443 bp, Morganella morganii
atggaccagttaaatcgtgaccagaaaattgagcttctccggctccttgaagaaaaagcccgtcgcgccaccgtctaccgctataaaacctattacgacacccgttatccctggcagaagaaatttattgccctcagtaacgagtattcacagatagcactcattgcagcaaaccgtgtcggcaaaacagacacagcgacatacatcgatgctattcatgctatgggtgattaccctgacaattggggcggctacaggtttgaccacgctccgcttatctggtgccttggctactccggtgaaaagtgtcgcgacctgctacaggctccaatccttggccgtaaaacagataacggctgggaaggcgggctaatccccggagacagaataatcagcacagaagccgctcagggtgctgcaaacgctgtccgttctgcatacatccgccataaaagcggggatatagcaaaaatacagttctggtcatactcgcagggtcagcatgctctgatgggtgacagtgttgattggttccacatcgacgaagaaccgaaagacccgacgatttacccgcaggtgcttacccgtaccgctaccggtgacagagggagaggtgggcgcggcattctgacatttacgccagagaacggacggactgatctggttatcggattcatggataacccgtcaccggctcaggcttgcatgaacgtcggctgggatgatgctccgcaccttagcgaaaaagtcaaagaggatttgcttgcctcttttccacctcaccagcgtgatatgcgaacgaaaggcatccctatgcttggtcatgggcgtatctatgacttgggggaggactacattaagtgtgacccgttcccgatacctgatcattggtttgttatagatggcatggattttggatgggatcacccacaggctcatgttcagctggcttgggacactgagaacgaaacattctatttaaccagggcatacaaagccagacaggtttctccggcagaggcatacagcgcagttaagcagtgggctgacaacgttcctacggcatggcctaacgatggcctgcagacagaaaaaggttcggggctacagcagaaatcatattatgaagaggccggatttaacatgctgctcgaccccgcgcagtgggaagacggcagcagggctgttgagcctggcctgttcgaaatatacgaccttatgcggcgcggaaaatttaaggttttctcggggcttcgtgacttcttcgaggaatacaacttttatcaccgtgacgagaaaggcaagatcgtgaaggttcgtgatgacattcttgatgccgtacgctatgcctacatgatgcgccgttacgcaaccagatacgcagatatacgcaatcctccagaggacgaagatatctacgtcccttcatcttccagttggtga

SEQ ID NO: 279588 - DNA, 498 bp, Morganella morganii
atggcagatgaattgaatgagcaacaaacgagattctgccatgagtacattgtcgatttaaacggtactcaggcagcaatcagggctgggtatagtgaaaaatcagccgcacagatagcaagtgaaaaccttagaaaacctcatattagagcgcacataaagagattggccgctgagcgtaatgaagctgttggcctaagctcgcagtttgttatcgaggggataattaaaaacatccgtcggtgcgaacagggggagaaggttacatatccaaacggggagccagttttgcatgaaactgatgacggggagttaaacgccgttttccgctacgactcatctgcggttttgaaaggatatgagttgcttggtaagcaccttaaattatttactgacaaggttgagcactccggatcaattgagactatgtcagacgaagaaataaatgcaaggttagcaaagttggtgaggctaatagatggaccagttaaatcgtga

SEQ ID NO: 279589 - DNA, 225 bp, Morganella morganii
atgacagaaatcacagcacagcatcagatgcgtctggacttactgcgactggtgagcaatgacaccgccgcagctcaggccgctatcgagttcgttaaagacgatgcgctcaagtttgagcttttcaaagatgcttaccacaaatgccagactgaatcacagtttgtcgccagagcacaaaaggcagcaagagaggcgcaggaagcattagacctgttcgcatag

SEQ ID NO: 279590 - DNA, 207 bp, Morganella morganii
atgttcacaatcaaagtaaccaccacatcaggtaacgaagtcattgaatccgggtatggcattcagtggtcaccgtgggcgcataagctgaattacaccgatcacaataactgcggtgacgacctcacattgcagcctggcgacaaagcagaaatcatcaacagcgcaggtaaaacggtagcccattacgtaaatgactccaaataa

SEQ ID NO: 279591 - DNA, 408 bp, Morganella morganii
gtgactgataatgaaattgagaaagaaattcaggataaaggtaaaacggcggctcgcataacgccagaccatatcgataacgtaattcgcagcgaacactatttcactgcatatgatggtcgtcatggtgctctgtcagttggggcatacgttggcagagaaaaacctctcgatactgaaaaagatttattcccgcttcagttgctcacattctgtgttcttgtattagaaaacggcttcactgttaccggtgagtctgcctgtgccagcccggaaaactttgatgcagagattggcagaaaaattgcccgtcagaatgccgtaaataaaatctggccgcttgaagggtatctgctcaagcaaagccttcatatcgacggagcatcatcatgttcacaatcaaagtaa

SEQ ID NO: 279592 - DNA, 450 bp, Morganella morganii
atgagcaccgcaacaaagatatggttcggcgtttgcggaatactggctgtcagcctgctgcttatcctgcatctgtatggtgggctgaaagataactatcagctgctgtcctctcagtttgctgagcaggtcgccatcaacaaagaatacaaatcccgcattcagtcacttcacgaactcgacactatgtacacgcaggagttaaccaatgccaaaactgaaattgatagcctgcgtgatgccgttaggtctggcactaagcgggtgtacgtccgcgccgattgtccaaaggccggatcctataccaccgaaagcggaagcaatgaagccgccccacgacttagtgaagcaactgaacaggattattggcgtctcagagaaatgatgactgagaacgaaaagcagaccctgtatctgcaggactacataaagactcagtgcctgaaatga

SEQ ID NO: 279593 - DNA, 1131 bp, Morganella morganii
atgatcactcatggctatgcaaggggtaacttgccggatgaaaacattgagctggcaatactgcgagagcaggtgtggtacaaccctgaaaccggaatattctccagccgaaatcacagcggtgttcgcgttaaaggttttatgtggaatgggtatattggcgtaagtgtgaagtcgaaaaagttcatggcccacaggctggcgtggttctacatgcatggaagatggcctgcgaatgatattgaccacatcaacggcaatacatctgacaacaggctctgtaatttacgcgaagccacttctcagcagaatgcatgtaaccgcaggctcgggaaaaacaatacatcaggtgcaaggtgtgtatcacaggagagaaaaacaaagcggtggatagtgcaaataaaccggctcgggcacaagttttacctgggcagttatgaacacaaacaggatgcagtcgatgaagctaaccggttcctgcaactaacggatggtgaatttttcaactgtgttacgtcaaagcacgatttaccgaaagaccagatggcactactggcgttcattaaaaaatcaagagacatcagcccaacaagactgcttgaacagcacgaaagggtctggattagccatatcctgagcgggtggggttcgtgggcatatgacggccttgatgaaaaaaaccagattagcccaatcggtcgttttatggagtctgtttcaggtcggggggccataacagcagacggcataacagcgattatcgaagggcttcattcccgtggttacgttggggatgagcttatcaaaaaactttcgcaaatcatcgcaaatctgaagcatcgctcagttcctaagtgctctgacgagctcggcctttatgttgatgacatgctgatcagggtgttcggcggtaactcaccattggtcagggtagctgtgaattactatgtatacgggcaccggatggagtctatcgcgcagtatttaatgcgaattaccaaaggagcgctttcaatgccgcaggctcgtgatcgcgtcagatggtgcattagaataattgaggcgaagatgcataaggcaataatgcatgagctcaataacggaaaggggattgatgataattttgaataa

SEQ ID NO: 279594 - DNA, 444 bp, Morganella morganii
gtggaaaacttctgcctgcatgaatccaacaaaaaactgttttacgagcaactgaaatcactactgagtacccacccgaagttaagtatcaccgcaaaaccctaccgccctaaacgaagcctttcacaaaatgcactcagccatgtctggtacaaagaaatcagcgagtacctgattcgtgccggccggccgttttgcactgaagcatgggtgaaggagagcctgaaggcgacatatctcggatttgaaaccactgagtacaccgatgttatcaccggcgaaaaaacgcagcgtgagacactcaggcgcacttcaaaacttgataaaggggatatgcattactttcttcagcaaatcgaatcatgggctgcacagttcggtttaatactgactacgcctgaggattcggagtacatgaaactcaaaagggagcaggacgcatga

SEQ ID NO: 279595 - DNA, 180 bp, Morganella morganii
atgtacaaaataactgcaacgatacacaagcccggcggactgccggtgaactggatacgccggtcaccgaagaaactcagcaaacgtgaatgtgaaaacatgatttaccgcagcaaagaagctggccggtcattcggtgacaaagtcgtcctgactgattttaagtgtgagaaggagtag

SEQ ID NO: 279596 - DNA, 336 bp, Morganella morganii
atggaaattaagcaacttcagcagcagattcatcagcaaaacgtagatgctggttggtgggataacccaagagagaaaggcacattgctgtgtctcatccactctgaaatcagcgaagcaatggaaggtgagcggaaagacctgatggatgatcatctgcctcaccgaaagatggcagaagtcgaactggcagacgcggtaattcgtattctggattatgcacatgcattcggatacgacatcgaaacggccatttcagagaagctggaatacaacaaaaaccgcgctgaccacaagcgtgaaaacagagccaaggcacacggaaaacaattttag

SEQ ID NO: 279597 - DNA, 198 bp, Morganella morganii
atggagacgaaaaaagaaaccgaccgtgatgctgaaagaataattgagcgcaacagagctgcattgcttgaggtgatagctcggctatgcctgataactacctcaaatgaacaggatgaatttgacttgcggtgcgcaatgaaaatagcgaaatgccagttaacagaaatagcactttaccaggaggaggacttttga

SEQ ID NO: 279598 - DNA, 696 bp, Morganella morganii
atgaaatcactcaccacagccattcagcagcgtgatgctggagcattgcggtcaatggcaggggttgcaccaaaaccgcaacagaaagttccgcaggaagccattcaggtattcaacgagctgttccggcagctgaaagcaacattcccggccgcaatggcaaactttcagacacaggatgacctgaacgaatttcgtcgtcagtgggttctggcctttgccgaaaacggaatccggacggtggagcagattaacgccggtatgcggattgccaggcagcaggagaagccgtttctcccatcaccggggcaatttgttcagtggtgcaaacaggctgactgcgtggccgttggattgccggacgcggacgggctttacgacatgatcatgaagttcagtgctaaccgcagcatgtaccggacggcagaggattatccatggcaaaacaacgcctgttactggatggtcacgaagttacacgcgctgagtcgtgcgtccggcctgactgagtcagagctgaaaaaacgctgcgctcaggaactggcggtgatggcatccagaatccgatccggtgaagaaattccggcaccgcgtgtgcaaatccctaagctgcatattccggtaccaaaggaaaaagcactggcgcatatcgcagaattaaaggccaagttcggattccggacgcggacggcataa

SEQ ID NO: 279599 - DNA, 795 bp, Morganella morganii
atggcaacgctatcgcaatattacaagcataaagacaaaaacggcaccggcaccaccgttaagaaagcatttatggttccgtatgaagagctgtatctggagccgggcgataacattcgccctcttaatgaagaacacgctcggaaaatgtgcgaattatggaaatcagggtcagacctcccggcattatccgtccaggtgacagagaaaggggtgaagatcattgatggtcagcatcgctatatcggtgccggatacgctattgctgacggtattagtatcccccggattgaatgtaaggatttcattggtaccgagttagagcgcctcgcccatcaggctggtaccagtgaggggctggctattacccctgttcagcgcgcaaagcaatacaacagagcaaggaatgccggatacacaattcaggaaattgctgatgaattccacagatcaacttctgatgttgaaacccatctgcaactactgtcatccggtgatgaactgataaagctggttgaggcaggagaaatagcagcgacaacagcagttgcactatctcgcgaacatgggccgaaagctgactctgttgccacggggctgatgagcaaagccaaagcagccggtaagaagaaactaacccgcagcgcggcgttgccgcaattcagcgcagtgaaggccagaaagtttatccaggctgttgctgaggctgggttagagctggacggcgaggccggattgctcatggaagagtaccaggcatttttatctgaaaccagacaggaggtcggatcatga

SEQ ID NO: 279600 - DNA, 255 bp, Morganella morganii
atgaatccaacggagttcatcaggaagaacatcattagcgaactggaaaagctcgggtatcaggggggggtattagacttcgccgccgaccagggtttagaccattatcgccgctgctcacaggcaacacgccgtggcgggatgtttgatgactgccttcgggtagcaaagttatgggctgagaagtatggacagaagccaagcgcaggaacgaagaagaaagccaaagcatcacgacaggtatcgatgttttag

SEQ ID NO: 279601 - DNA, 333 bp, Morganella morganii
atggaaaatgcaaatccacgcaaatcgtttaaccggtttgtgtcaaatcatctgatggcaacagctcatcaggcactgagaagcaccacacagacagtggttgcaaaactgctcggtgtacacgattcaacagtcttacgcagaacagaaaagttaccggagatatgcgagacattggccgcagccggtatcacagattttgttttgccaggcgagaagaaaatcagcgaggaagagtaccggtttctgtggaagcagatagcggaattctcattgtggaaaacgggaggttttcatgaatccaacggagttcatcaggaagaacatcattag

SEQ ID NO: 279602 - DNA, 201 bp, Morganella morganii
atggaaaccatctctcaacgtgtaaaagctcggcgttgtgagttgaatctgactcagtctcaactcgctgagcttgttggtattaagcagcaatctatccaggcgattgagtctggttcaactaagcgcccacggttcatttttgaattatcaaaagccctgaaatgtagcgcggcgtggctacaacaaggcaaaaaataa

SEQ ID NO: 279603 - DNA, 633 bp, Morganella morganii
atgagtcttgccagcagagtaaaaagtcgtcgccttgcgctcgaaatgacacaaacagaggcagcagaaaaagcaggaattaaacagcagtcgtgggcgtctattgaagatggtaagactgttaaacctcgtaatataattgcgattggcgctgcattgcagtgcgacccagggtggctgatgacgggagataatattcagccaatcagtgaggtaaatacacggaagatacctctaattagttacgtacaggcgggaaacttggctgaaagcataccgatcagtgattgtgacgggtcttttgagtacgttcttaccgatcaggacttatctcataatgcgttcgcccttcgtattgaaggtgattcaatggagcctgatttcaaaaccggagatgtagtgattatcgatcctgagatagagccacatccaggggaatttgttgtcgcatctaatggtgaacaagaggcaacattcaagaaatacagacctacccatgtcatgattaatggcgatcagcactacgagttagtcccactcaatgacgactatccagtgctcgatagcgagaaaatcaatctccggataatcggcacaatggtagagcaccgaatttaccgaagaaaaaggtaa

SEQ ID NO: 279604 - DNA, 282 bp, Morganella morganii
atggcaacaattactgttattccaaaaaaagacaacgcgaagaaccgccggttagcaaagcaaatggcgttctgggacagaaagcgtgaggagtatgcagcgaagcctaaaagccgctcagtggaggagatttttgattcagttttcggccggccggcagacgaaaccgatgtactggcaaacttacttatcgggataaaagacacgcccgatgtacaacgcaagcaaccacggctacgcaagccgattatgagtgatggaagtgttacggcaaggggatga

SEQ ID NO: 279605 - DNA, 210 bp, Morganella morganii
atgagcccgaacatagaacaacacctaaaagaattcattctctttcttactgagagaggtattgatgcaaaagaggtatctacgaatgaatcaatgatgagcgagttaatgcttaaattctattatcaccaaatagagttctgtgatgctgttcttgaagcacaaaaacactcaccaacaagaataaagcaattattaacaattaattag

SEQ ID NO: 279606 - DNA, 177 bp, Morganella morganii
atgaaatttgaagagctaccaatcgacgcaagagccgccgcgatagatgcatacaagcaaatcgttattcgtgaaattggagcagttgaggctgattacgccaaagaccaaaaagccagatgtgaaaatctggctgaaacaatagctgccggttttatcaaaatgatggaaagttaa

SEQ ID NO: 279607 - DNA, 189 bp, Morganella morganii
atgtcagaaaaattagttaatttggaatattacccaatcgaggccgcgcatcaggcagttattgaactggctaaagctggcgcttttaatggaagttcagataagggtggtgcgtttgttgctacctttgaaaaaataaaagactgctttgtagaattgtcaaaaattgaaaagtcaaaaaaggaataa

SEQ ID NO: 279608 - DNA, 546 bp, Morganella morganii
atgcaattgagaatagacaaagcaacgcttcttgctgtcatggaatgcatggcggtaagagatgttcgttattacatctgcggaatctgcttccttcccgatggaaaggtggcaggcactgacggacacatgcttgcttacggtgagcatgataaccagattgaccacgaagttatcctgtctgtcggtaagttaccgaccaaagcattcgattatgcgatttttgatactgacgctggcatcgtgaaacttctgacagatgaagacgtaaccgttggtgtcacgctttgcggtgtcattgacggtaaatatccggatgtttccagagtaatgaaaaacgcaagaaacgcagatgagcagttaccgtcaaaaataggatttaacgctggatatatggcgaagctggaaaagatagccaagtacgttaatccgaaacttcctgcacttcaaattcaggtaaagacagcgtgtgacgaggttatttgcgacatcgtaaacccacataaaacacctgtgtcggtattaattatgccgatgcggatttag

SEQ ID NO: 279609 - DNA, 246 bp, Morganella morganii
gtggaacataaaatatcgctcttaaaaagagcaggggaatgtgcattcccggtaaaaatggatatgggagacggttccaggattgaaggcatgggtatgtcgctgcgcgattattttgcagccaaagccatgcagggaattcttgtaaacgcggagagaaatgaattttcattcggcaaggtggatgaaatagcatccaaggcttacgagctggcagacgcaatgctcagagcaagagagaaatag

SEQ ID NO: 279610 - DNA, 219 bp, Morganella morganii
atggccgataacaacggttggattagcgttaatgagcgcctacctgaaatcagagatgattctgtactggcttactggcaagggcatggcggcatggatatggttcatgttgaagatttttttggtgacataaccaatggccgcgacgaaaacggaaaccaaaaatacaccaagctttatctaagccatggaataactcactggcaacctatgccatag

SEQ ID NO: 279611 - DNA, 201 bp, Morganella morganii
atgcacaagataactatcgaatcaaaacacctggcgacaagcactgaacaggcaggatgcggaaatcagcgcgccgtcatttattttgaccgtaattcaagcgtggaaacaatggacgttgaaacgcttatcttgctgcttaatccggagaaggaaactctggaaaagatactcagggaacgatacggggaggcagcatga

SEQ ID NO: 279612 - DNA, 138 bp, Morganella morganii
atgaaatacgaagcagacattattaacggaaaaccagtcgttttacttgccgggaatttgatagagaaaggattcccgtcattatcagatgctcaggttcgcgctgatgaattaaataagcagattctggaggggtga

SEQ ID NO: 279613 - DNA, 294 bp, Morganella morganii
atgaacagtataaatatacagtttttacagccagatgatttaaataatctgaaaaggttcaatgaaacttgcgaagatagtcaagattacgacgtaccaaaagaaaaaatgcaccgcctggctaaattgggagttgtgcgtcgtcacagtagaaactattacagcataacatcattcggaatgtatgtacttaatcaaggtgacgaactatataaattgccacttaaaacgcagtctgattacgatgcggaattccgatttaatttagccaataaaattcgaggctcatcatga

SEQ ID NO: 279614 - DNA, 294 bp, Morganella morganii
atgatggatatatcacgacagcagtttgagcaatacattagattgcatactgacccgaaagagctggagcagaaattaaaaaaggcgaatagcggattaaattacgctgaccgggatgtggatttaatgtggattgcctggaaggaatcacgcgaaagtttaacagttgaactgcctttatctcagcgcgtaagagcctatgactattacacggacggctataacagtggcgtggattgctgcgaagttatattggaatctgcggggataaaagtaataagaaccgaccaataa

SEQ ID NO: 279615 - DNA, 153 bp, Morganella morganii
atgacaatcggatttgtattactactggtgatgcacggctctgctgtgcctgttaccgatgatatttatacgcgagaagaatgtgagagccgcgcagtgcagataaaggctgtgcggaatgttgaattagtgtgtgcggaggtggtgagatga

SEQ ID NO: 279616 - DNA, 225 bp, Morganella morganii
atgaaggttaaattattgaacgatggtgggtacaactcactggagactgtggagttccctgtcattgttgatgggttttattatgatgatgtaaagcactgtattggcgttcgaggtgatgaattactatcaataggtggtgatgcatcatgcattttttcaaaagatgacctttcttttttattgggagaagagtgcgaggtaatcaatgaacaaatatcgtga

SEQ ID NO: 279617 - DNA, 315 bp, Morganella morganii
atgaacaaatatcgtgacaaatcagactttgagattaataaggctgtggctgttaatattaatggctctgacgctgttgtagagaagttcggtagaatatatatcagtgacagtgatgcgatggtgagcttcgacccctgcagcaatccatatgacgcaatgccgattattatggataacaaaatcgacttaactcacatcgtcggcaacatggtatgcgcaaagcacaaagaatactggtgtattcgtaaaaatccataccgcgccggttgcgaggtttatttgctgatgaaggatgcggagaatgaaaaatag

SEQ ID NO: 279618 - DNA, 357 bp, Morganella morganii
atgttaacgccgttcggtaagacagtaaggaaaatgcgcatagatctaggcataactctgaagagtatggctgatgctatcggcatgacatcctcttacctttcagcgattgaaactggaaaaagagccgtaacacagcctattttaaatagtgtcatagatttttttggcgctgataacggaaaaaaacaagaattaatggatgcggctctagaatctcaacaatcagtggagattggcttgtctggtagagatggcaccgctcgtgatacagctatcgcgtttgcacgtagttttgatgaattaagtgaagaagatttaacgcaattgaataatattttaaataaatacaaataa

SEQ ID NO: 279619 - DNA, 534 bp, Morganella morganii
ttgagtggacaggattatcgtgtacccccacaaagtcgaagttcgattagggatggtgcgaagacactaagagaaatactaaggatctctagtgtttattttccaataatggaggtgttggaattagcgctaccaaaattactagatggatatgaatttgtggtgggaagccaagaggatatggaagggacgcatggattaacattcccgcaggaaaacagaattattttgcgtgaggatgtttatcatggtgcgcttgaaggcaatggtcgtgacaggatgacggccgctcatgaattaggtcatctccttttacacaaaaatatagcatttgctaggtcattacctggggttgatgttaagccatatgagagtagtgaatggcaagcgaagtgctttagtggtgaattattggtaccagcatcattctcggcatcattaatacacatggagcctgaacaacttgctttaacctgtggtgtctcaattgaggcagccaggtatcagttaaaggtattaaaaaacccctactag

SEQ ID NO: 279620 - DNA, 150 bp, Morganella morganii
atggcgttacgttctatcgtaaaaaaagcagccccaaaagggttccgctggattttctgtcgctaccgcaaggttcggggtaaatcaggcaaaatgctcgatgcgcatgcatacgggtatcaggcatgggccttcttggttcgttgctaa

SEQ ID NO: 279621 - DNA, 225 bp, Morganella morganii
atgatgaaaaggataattatcagtgcgttaatgatattcagtttttcggtgtatgcacagcccggagaagaggacggcgctattcatgatgaactgcggcaggtgatcggtaccgtggaaaatgctatcaacagcggtgattatgacaaaatgctgccggtgatgagtgaaaatctgcgtgccacgccatcacccaggagtttatctccggcaaagcagcaataa

SEQ ID NO: 279622 - DNA, 921 bp, Morganella morganii
atgcgtcttttactcaacagtattctgctgattttttcgatgactgcggcagcgtcctgtttatggggagtgagccatctcgcctggtattatgcactgcctgccctgatcggttttatgctgattaacaatatgccgttcgctattctgcatgaagcggtacatggtgtggccgcccgcactgccgccggtaatcgcgccatcgggattattgccgcgtgggcgtttccgacttcttttaccctgcagcgccgtgcgcatctgaatcaccataaaaataaccggacagataaagagctgtatgattattacctgccaaaccagccgcgctggctgcgcaatatctggatgtacggcggcaatctgctcggcctgtactatttttgcgtactgctgggcaatcttctctggtttattgctccgggcgtgtaccgttcacgggtgtttgtcaccaaaatcgccccggcactggggttcgggtcacaggtgccggaactggcaaaactgccgccgctgaccatctggagtgaactgctcggtgcatttctctggcaggcactgctgttttgggcgctggacttaagtgcggccggttatctgctctgcctgtgggcttttgcgctgcactggtcggccctgcaatatgcggatcacgcctggagccgccgcgatgtgatgaacggtgcgtggaacctgaaagtactgccgatctcccgctggctggcgctgaattatcactgccatctcgcgcaccaccagcacccgcaggcaccgtggtatgagctgccgtcgctggtggatgaccagccgcgcccgaccttctggcgtgtctatttcactatgtggcgctatggtgtgcggcctgccccgcagatgggagccgcagcggatctggattttctgtttccgccggaaaaataa

SEQ ID NO: 279623 - DNA, 1374 bp, Morganella morganii
atgtcagcagcggagcaggaagcaccggtgagaatattactgattttgccgtttgacaggacttaccgctaccggaaaagcgcgttttccgtggcgatcagctatgccccgctgacccttatcaccctcgccgccctggttcccccgcatctgaatgccgaactgaccctttgtgatgaaggcgtttccccgccggtcactgccggggattttgatctggtggtgatcaccgccaccgcctcctcttccccccgcgcctatgcgctgtgccgctactggcgcgaacgcggggcaagaaccgcaatgggcggcgcacacgtcacactgcagccggatgaggcggcacaacacgccgataccgtcctcatcggtgccggtgaactcatctggccgcaatttttacaggatatggctgacggacatccgcaaccgcgttatcagcaccgccctgagcgcggctttctgccgatgccggtgccgcgccgtgatctgctgccgtcccgcgcctacatgaatatcgccactattattgccgaccgtggttgtccgcttgcctgtgaattctgttcggtgcagcatcagtggggacgcaaaggcacagcacggccagcggcagatgtgattaacgagataaaacagagcggcagacagcgctggatattcctcgaccctaatctgtacgccgaccggcagtacagtctggaactgttccgggcactgatcccgctgaaaatccgctggtcgggactggcgacactcaatgtgacggatgacgacgaggttttccgggcgatgtgtgacagcggctgcgaaggcctgcttatcgggctggaaaacctcagtcagcagaccatgacggccaccggcaagaattgtaaccaggtcagcgaataccgccgtcagatccggcggctgcgcgataaccggattgccgcactcggctgttttgtgctcgggtttgatgaagacaccccggagagcatccgcgatacgatacggcagatcccgtctctcgggctggatctggtacgtttttctgtcctcaccccactgccgggtacacggctgtggcagcggatggcggaaaacggccgcttaatcacacaggacctgagcctgtatgacaacgaacatgtggtttttcagccgcaaaatatgtcaccggaaaccctgcaatccttactgcacgaagcctggcgggaaacataccgtctgacggccattctgcgccgggtattgcaccgtccgggcagccgttttatccgcctggcggccaatctcggcttccggctgtacgcccgccggttacgccatgaaaaaaccgggctgttcaacccggcaatagtgacgaataacacaaggaaaacagactga

SEQ ID NO: 279624 - DNA, 429 bp, Morganella morganii; identical to SEQ ID NO: 86449

SEQ ID NO: 279625 - DNA, 927 bp, Morganella morganii; identical to SEQ ID NO: 86448

SEQ ID NO: 279626 - DNA, 459 bp, Morganella morganii; identical to SEQ ID NO: 86447

SEQ ID NO: 279627 - DNA, 279 bp, Morganella morganii
atggatataaataaattaaaaaaacacgcgccaataattgaaccgtcagaaagcaagacggttaatgattttatcgcccaaggggataaaaagccgacaaaaaaagcagaatctatcatggtaggttttcgtatggatgaagatacgttagaacgtttagaccggctgactaacggactagggaagaaacgtattaacattttacgggcttcgctgcttgcctttgaatcactatcacctagcgataaggctaagtttttaatagagataatgaggtaa

SEQ ID NO: 279628 - DNA, 663 bp, Morganella morganii
atgattatagtttttggctcagataaaggtggagtaggaaaaaccacaattacggctaactcagcagtaatgttgcaacaaaaaacggcgtctgtagcattagtgcgaacagacaaaaacgaagatttgaacacatggcaaagtttacgacgagaacagcctgttcctgatatcccaattatgacttgttacggaagcaatacacataaagagattaacaaattgcacggcgttacggatgtaatattggtagacactgccggacatgatagcgtcgagcttcgtagtgcattacttgttgcagatgtatttatagctcctgtaagcccaacatctatgttagaagttgtcacattgaataaattatcatccattgtgaacgaagctaaaaaggaaaacacaaagctaaaagcctttgctttacttaatcgctgccctacttcaccatttaataatgatgcagtaaaaatcacacaatatcttaacgatgatcccctgcttctatccccattcaaaacccgtatatcaaacttaaaggcttttgaaaaagccataaatgaggggttgggagtacatgagcttaaaggtaaaaatgtaggatcagccaaagcacaattagagcttttattcgctgaactcattgattctgttcaggatagctaa

SEQ ID NO: 279629 - DNA, 951 bp, Morganella morganii; identical to SEQ ID NO: 86446

SEQ ID NO: 279630 - DNA, 354 bp, Morganella morganii
atgactatgtatcaggatctgccctctgtactgaatctgattaactgtgaatcaccatttccatgtaatcaggcttcttgtgctcagggtatcgcggacaaaaactcgtttgtcgaatttattgttacgcataaatcagcaggtaatttgcatgaatggaatttgtcttacgttgacaggttcaatcgtttgattaaggttttttaccacgatcacatgatattacatgcacgtattaacatgaaaacaggtattgtcaatctcattgcctataccgtgtttactgataagataagttcgcttgaagcagaatatcttgtcgaacaaatacgccaacacttagatcatttctaa

SEQ ID NO: 279631 - DNA, 582 bp, Morganella morganii
atggaacggacaacaattaatttcagaattaatgatgatacgctactagcgcaatttaatcacgcaatggctaaagaacagaaaaaatataaattcgccactgacgggataagaactataaaagatttagaaattattttcactgcctcaaaaattaaaaatttcagagataacgaacattacctcatagcgtcactggcacaaaaacaatcccctttaatactcaatgtattgaatgaattaaaagataaatttgaaaaaatctatcaggaagaaagaaacatcacaggtcaaataatctttttcaaaaagatattagaacaagttgaatatcacgataaaacacaagatattaatgtattaatttcacctcacgttatgttgtttattaatattacagcgttggctgacaatatcattaaacaattaagagtccagtatttgaatggctctatagatgaaaccaccttactgataaaaagaaataaaatactgaaacaatatgccgctttacgtgaaaaattgcatgaaatgaagcaggaaaggaaaaaattgtttaaaaaagtgaaagataacttataa

SEQ ID NO: 279632 - DNA, 453 bp, Morganella morganii
atgttcagattagccacaccagaggattacgaatatttaccggatatcggattatatgaactgacgtttgataaacgtccggtgcagggcgttcgatgtgaagatccaaaacagggagccgcagattacaataatttcagaaaaaaattcaaggcagttattcacaaagaaaaacaacgcaggaaaaatttttatcagctcactgagatttcttggaatgccgtttttgattgggcgattgagcggggaacacaggaagaatgtcgtttattacaggcaatgtatcatgccgaaaataacaaaaaatatcagcaactactccttgaattaagcaaacactacgggtttatcaaagaatcaaatttactcattccattgggattgatactttgcaaccaacggatcgcagatacagaaaaattaattgctaacagcgttaaggcaggtatctga

SEQ ID NO: 279633 - DNA, 567 bp, Morganella morganii
atgaagatattgatttttttagttttgatgattatgtcaaacacatcattctcaaaatcactttttatcggtgattctctgacttacagtctggcatcaagtttttcaaaaatcgaacctgtagatgcgaaatttttagaaagcacaggactgaaatccgataacattcttagctggactgactacatagaaacaatggatttaagcaactatgacagaatatatattgtgttaggtatcaatgatatgataaacgaaaatgatgaaatactttatcaagaccgtgtagatacctttataatgtcactattaaataaaaataaaaatattatctggttacttcctccggtacttaaaaacgcaaagcatgagtctatgttgctttacacaaggtcaatcatcaaagctgcatgtattgagcacagtgtagatttttttgatatgcgtgatgtactgggttataactttatgcagacagtgaatgacagaaacatcagaacagatgatggcattcacattaccccgtatggtgcagacagggtgatcactaacttgctattgaggtga

SEQ ID NO: 279634 - DNA, 231 bp, Morganella morganii
atggaaaatgtgaacaaaccaaataatgctattgaagaaaagatagaaaacttaaaaagtaaactcactgaactagacgaaaaacgagaaaagttaatcacaagaattgataaacttgagtcacagatgaacgctgaaaaagcacaaaaaattctcgatgataagagacaggagcttgagaatttactcggaaaggaaaatttagatctgctttttggcagtaaaaagtag

SEQ ID NO: 279635 - DNA, 2115 bp, Morganella morganii
atggatcaggggctttatggattcaggcagtttggttatgtgattgataacttttcatctgtatttttgtatcatcactggttagtgctttttgtcatttgggctatctttgttttgatggtcagtatcattgtcagaagtttaaatcatgttattttcatcggaatgtctgatgatgacagagaagattcaaggaatgtagaggttaatggtaagcgtcaaaaacgtggcgtgtttgcatctatgcaatatgacaaaccttacttttcgttattgcttttaaggcaggcaggtttttttattaaaatactgctgatttttattatagcttttatgactgcattttttattgttactctgatttctgctttttttgatattgattatgtgattacaccttacaaagcacaatattatcttttaactaaaactaatatgtatggattgtcaattattttagttggttcgcttgttggttatattgttagtgcattcttataccattcatttattaaaccgtttttcggagagatagatttaatctttaatgaagaagcgatttcacggcgcgaatcatcaaaaatgagagatgataaactaaccgatattcgaaattttaattttaaagacagtattaattataatcctgttgattactttcatgaggctaaaagtaaaaaaagtattttcctggggatcgacgaaaacaacaagccaatattaatccctaagttaaaatgggatgaaacaaatattcaggtgattggtaaaatggggagtggtaagggggttctttctaccgttgcgcttgttcagtgtgtggagttatataacgatattaatattatttttgaccctaaaaatgatgagtgggcataccatgtatttaagcatttctttaaagatgatttactctatattgatttaaatcgggggcagttgccacaggttaatccatttaaaggggctaattctgatgaaattaacgaattgttagttgccagttttggattgggtgaaaaaggaactgatgcagatttctacaagactggtgacagaaaggtatgccgtgatttatcacagcattttacgcaaggtacagatttgcgcggactgttaagcatcgctttaaatgaaaatttccgaaaatcatatgaccggacgggcgaaaacttttttaatcttcttgaagaattgggacaattagattctatcagtgctcatgatggcattgatttagtcgatatactgaataaccaaaataaaaagattatctatatcacaggttcgctgcgtgatgaggttgttgttaaggcacaaaaaatgctctttttacggatggtgcaaatccttgaaaaaagaaacagaaataaagatgttactcacgtaaatattatgcttgatgaaattaagtatcttatttccaaaagtgctcttgaagcaatggggacgctcagagataagaaggccaatattctttttacccatcaatccagaggtgatttagaggtttccaccaaagaaattgacgggcaaactgcaaggaaagtgattgaagatagtgcagggctacgctggatttaccggacagataattatgagagtgcaaaatgggcgagtgattttacagcgggtggtctggtagatgtagagcgtcgtaatctttctgttaatcagtctaatgttgaaatggcttcaaaagaagcgacaatatttaagcagaaagctaattatgttgatatttcagttattcaaaatcttccgtcacgttgcgggttaatagtgggggacggacaactggctaggctggcgtacagcagtccgatccttgtcgaaaaaagtgataaatgcgttacttcatttgaaacacaagcgatttcttcccgtgagtttttagccagtatcagagaaacaaatgataaaccgaaaacttcaagcgataaaaaagtgaaaaataacagaaatacaaaacctgttgataatccgcaatccggcacgatggttaaccgtgaacgagtaaacagtgctgtagatgcggatagggtagattctgttatggctgaattaaccatgccagatgataatcacggagataattatcatgagcatagctga

SEQ ID NO: 279636 - DNA, 1005 bp, Morganella morganii
atgagcatagctgattacggttcattgagtaatcaaaagcgactggaacaacgccaatttaatcaacataagatattaagttttttggcgcaggaacgcagcgttactattgacagtctgagccgtttgtttgatttttccgcaaaccaaaaaatctatttattacttaagaacctgataaataatgaattagttacctatttcgaggatggatttcttggcagaaccaaacggttttatcatctgacagcacaaggtcaggcttttgctgaacaagaacttggtattacaccacggttcaacggattaagtcgccgtgctcatgccccgtcagccctgctgcatacactggaaatgcagaactacacggcgttgctgatgaaagcaggggcgaaagtccgctatctgcatctgccggataaaattatggattactggtacggtggcactgcggcagaagtcgaacgcacgtttaaaagccaaaaacgttaccgtgatatttttcggaactactgtctgcggatgcgccgtaatgaccccattattaataccgtgatgtatatcctgcctgattcagctatgcgggataaagcggcagccctgttttacagttttgatgaactgatgattgaaggcattctgactgatgtcagaacgtatacagggcgttttctgtttgccacccgagccgaatatgaagcctatctgacggcgtttccgcaatccggtgtcagagtcgagatgaaactgccaaatgaggtgtggcaacgctggcagcgacacgcagcacaggctcaactgacaccggaagcgtggttaaccggtattcttaacagggaagtgccagttgtgatcaatgagccgatgccgtattcaggtgacggggtgctgattaacctgactccgacaaaggatgattacaaattctggctggcgaatgctgatgcctgtcataccagcctttcagcatggtgtgcagggaagcctgttcacttaaatttatag

SEQ ID NO: 279637 - DNA, 246 bp, Morganella morganii; identical to SEQ ID NO: 80432

SEQ ID NO: 279638 - DNA, 321 bp, Morganella morganii; identical to SEQ ID NO: 86445

SEQ ID NO: 279639 - DNA, 579 bp, Morganella morganii
atgttaaccctatactacttttcacgcagcttatgggtacggattgtgatcacaaacaatacactgaaacgtaagtttttaaatacccttctctttttcggcgttttgtccggttgcgttatgctttatcagcattatttcgttgtcaattttactaaaagtatgccgttaggagtgtacttcaaaagttatccagcatcttatacaaaaaatgatacggttttggtttgtctcgatgatgagatagcaagatggtctgttgatcatcacatcattgctgatggtttaggttgccggcattcagcaccgttactcaaaaaaatcgtagcaactgagggggacagggtaactgtgacccataaaggcattgttgttaatgatgttttagtcccgaatactgcgccaattgccaggaaaattaagcagtggaacattatcgatagggaaattctattaaaatcaacggagtatatcgttgtcgccaatcaaaataatctgtcttttgacagtcgttattttggtgtagtaacagaccggaatattaccgcaaaaatcagacctttttatttatttgactga

SEQ ID NO: 279640 - DNA, 540 bp, Morganella morganii
atgccgagtgtgtctgcatgtgcgccggagatagccgcagatacgttacagaaaattattatggttgaaagtggcggtaatccttttgccgttaatgtcaataaactgtccgccggaagccagcctaaaccgaaaaacgtggctgatgccgttgcagcgacacaatactggatagcaaaaggctattctgttgatgtgggtttaatgcaggtaaatagccgcaattttaaaatgttgggtattactgatactgatttaggctctgtttttgaaccctgcaataatgtgaagtacggagcaacaattttactttctgcatggaacatgacttcatccaaagaacaccagaacgaccggctgatgaaatcattgagtatttacaatacgggtaatgacgttaacggatttaaaaatggttacgtcagtaagtatgtgggaagaaacatttccggttcactggcaaaaacggttgtcactccttataacgcagattccagtgtagggtttaatgcagactctttttacggggatgatttatga

SEQ ID NO: 279641 - DNA, 945 bp, Morganella morganii
atgaatacgggtgatgataaaaaaatcagtgaccttgccaaaatgctttggcgggagttcgatattattgcgccttatctcagggatgaaaccactattgaaatcatgctcaatcctgacggtaaaatatgggttgaacagatcggtaagccaatgttcagtattggcgaaatgtcgttatataacgctcaatcattatttgccaccattgcacacagcatggggaaaacaatagataatcgccacccttgccttgagggaacgttgcttattaatgatgcgcgttttgaggggttctatccccctgtttcaagtgcgcccacctttgctatccgtaaaaaacctaaaaaaatattctctcttgatgattttaaattaaccgaaaatcagaaatcgacgatggttacatgggtgaaagaacgtaaaaatattttagtcgtcggcggaaccagtagcggtaaaacatctttttctaatgcctttattgacctgatggcacaatttacacctgatgatcgtatcgtcattcttgaaacgctggacgaaatccagtgccgcgcaaaaaattattcaaaactgattgaaacaatggatgtgacgatgaatcagttactgcgcggtgtgatgcgttaccgccctgaccgtattattgttggtgaagttgttgatgcagcggcgttatctatgctgaaagcatggaatacagggcatgacggagggttatgtaccattcatgccgacagtgcccttgaggggtttgaccgcctttacgatctgattgaagaaagcgggattaatatgtcagaaagggtgaaccggctgattggacgggcgattgacggcgttgttttcctgaaacgggaacaaggtgttcgggtagtcaaagaagtcgcaaatgtgacagaatttaacggcagtgaatttgtgcttgattatgttaattaa

SEQ ID NO: 279642 - DNA, 360 bp, Morganella morganii
atgttagagaaatattactatagccagtcgagactgacccagcaactgatagtgttaggtgcattgctactggtctgtatgttgttaagcagtcatgcaatggcaggtcagacgcaaggtttaccttgggaaagtccgcttgataaaatcaaaaacagcataaccggccccgtagcgggagcgatttcctttctcgggatttgcgttgcgggaatgatgctgatttggggcggtgaaatgtctgatttcaccaagcgtatcgtttatgtggttctggttatctctttaattttaggggcaagtgtggttatcaacatgtggcagggtaacggtgcattgatccctctgtctatggtgtaa

SEQ ID NO: 279643 - DNA, 2502 bp, Morganella morganii
atgaagttatataaaaaacaatacaatacatcactttcttttgctgacttactgaattttggcgtgatgattactcccaacttaatgttgggtaaagatggttcactgactgccggattagtttatacctgttgggattatgaaaattctgataattctgaattaaatgacctggttaatgcacttaatgcagcctatctccggttgggtacaggtatcacattgcattttacggtaataaggagtgaaacctcagaatatccgcagccggaaaaaagtcattttacgtcattactgaataaattaattgatgaagaacgccggatcaaatgggaaagcgcaggggcgcatttttcgagtgtgctttcattttcaattacttatttacctgaaagcatgtcaaaaagtcggttaagtgatttctttgttaccgacgaatccggcactaaaaaatcaaaatcattaacagataaacacattgaatactttgaaagcgttatttcagaactcagcggacaattaagcggaacgtttactctgcaccggcttggggtacgccatgataacgctacaggtgttgtttataatgatttagtccaatatttcaatcattgtatcagtggtgataattatccggtcattcatccggataatcagtttcttgatgctgttttgtctacggatgatttttatactgagcctcgccttaaaattggtaataaatatatcagtgtgctttgcattgatgcttatccggcaagttcagtgatggggatgctgcaatcgttatcaaatttaccttgtgagtatcgctggacgacccgcgccatatttcttgatccgatagatgcggataagcaaattgaaaaataccgtaaaagttgggggcagaaagttcgcggatttgtcgatcaacttatgggtaaacacagcgataatattaattatgatgcagccacgatgaaagaggatgcacagattgctaaaggtgaaaataactcaaatacggttcgctatctgtatcttacgcccacaatagtgattatggatgaagatattgaccgtttggatgaaacgacaaatcttatccgtaccacgattaaaaatgtcgtcaattttaatgcaagaattgagacagttaatgcaatggatgcctaccttggcagtctgccgtctcatacctatgagaatgtgagacgcccccttttacataccggaaatatgacgcatatagtgccctgttccacgttgtggacgggcgaagaaacatcaccctgcccgttctttccgccggacagtccgccgctgatgaaggtcagtacaacgggtaactccgagtttaatcttaatttgcatgaggacgatgtaggacacggcattatcggcggtaaaacaggtgcagggaaatcatcattagtcacattaatttcttctcaatatgaccggtatcctgattctcaggtatttacctttgataagggacgttctgcaaaagtgttctgcaaactatcgggaggaaagtattacgatattatgacgggcgagcattctcttaactttgcaccgctggcgcgtatagatgaaccgagtgagtttatatgggcgtttgagtggttacaggatattgccgaaattaacggcgtaaagctggattctgaaaaagttaaaaaactgaatgaagccctgaaaattgtctcaagaatggataataaggacggccagtaccgcaacattgattcactgattacaaaattgcaagaccgcgaattgaaagatttgttcagtcagtacggctccggcggggcatacggtgaagtgcttaatcagccacaagaacaaattacactcagtaactttaccgtttttgagtatggagaattactggacaggggcaataaaatcaaactgccggtacttttttatctctgccacctgattgagcgacaactcgacggaagaccgacactggttaatattgacgaggcatggaagtttttagatgaacctgttgcgggtaaacgccttttacaatggctgcgtgaatggcgtaaaagcaatgctgccgtggttatttccacccagaacctgcacattatcgaaaaagcctttccgctggtattttcagaaatcgctatggcttgcccgacaaaactgtttcttagtaaccccgccgccgaggaagaagtttcgatcaatgcttataaaattcttggctgcaaagccgctgaaatccgcagaatccgtcatttaacgccgaagcgtgagtattttgtgaaaaaaggtgattttcgccggacattcagcctcgatatggttgagggtgatatcggacttgctaccgttgccgcaagctctaaaaaggatttaaaagagatagataaattagattttgaacattccagtgaagaagaattactgcaccagtggcttgattttaaaggtgttgatagtggctatgtgcagtatctgacagacagactgaaatcaaggggtgaaatatga

SEQ ID NO: 279644 - DNA, 729 bp, Morganella morganii; identical to SEQ ID NO: 86444

SEQ ID NO: 279645 - DNA, 243 bp, Morganella morganii; identical to SEQ ID NO: 86443

SEQ ID NO: 279646 - DNA, 1608 bp, Morganella morganii
atgaaaaagattattttccttttctgtgtattgctaatgccatttttaacacatttagcatatgcggatgatgtaagtggattaactggtgaatggaagtcgccggaagaagtccgccgtcttattgatgaaagtagaagagaaacagctttaataaatcagtacactaatgagtgtgcaaagggtaataatcaaagttgtattcaattggaaactataaagtcaaaaaacagcaaaattaatttagatgcaaattttgtcaaaacttttagcgattcatttcaacaagaaataaaaaagtggctaccgcctttgcaaaaagcggccaaatatttactttttacacttgggattatcgcactggtcttaaaaatggttccactggttctaaagggtgctgatttaggggagataataaaagaacttataatttttgttttaattattggtatctggctggcatttataataaacgctaaagagtggactgatgcaatcataaatagctttatgaaactagctcaattagctaatcaaacatctatgcaagccacgcctgttggaatattaaaacaaggatttattgttgttggaaaggtgtttactgacccgataaaccctataacgttattaactcaagttatttgtgcgttaattataatgatcatttatgcgaaaattgcattttatttgctgaaagtcatgcttgagacgtacattgtttcttatggaggcattattctgttggggtttggtgggatagctttcaccagtgactatgcaaaacgctattttacctacgttatatcatgcggcattaaattatttatgacattactgattatcggttttggcggtaattttattgcctcattcctgactctcaattttactgaatttgcaaattgcgtcgcaattgttgctgttgttgtcatgcttatgatgctggctgaaggaatacccgacatggcacagtctatggtcactggtgccagcttaggcaatagcaatatgaatatcggcggctctcttgcaacaatggccgctgccgccactgcatttaccgctgcctgttatgccggagccgccgcctttaaagcggcaggggcggccaatgcagcaggaggaggcggagccgctacaggtggactttccggcggtgatttagcgaatgcgttaagcaaaggcggcggctctggtgttgccggtgggggcggttccggcggcagtagttcactgcctaacggggggaaatccggtgctcagttagtgaaagagggaaaagtacaatcgcctaataaaaatacgggtaacacagcaacgggtactgaatcaggaaaaccacaacaaagcagaacgggagcagccctgaaagctgtcgctaaatccgttggtgagggaatactcaataaagcggcaggaagcagaggctccacggcagcaaacattacccgtgcagcgttaaatcatgcggcacaaagtcaacagtccacagaaagccctcgtaaacctattgccagtccgtatgcaaaaagcaccggaaataatagtagcggaaccagtaaaatgcctaacaagggaaataatgatacaggggaaaatcaatga

SEQ ID NO: 279647 - DNA, 645 bp, Morganella morganii
atgagtgatgataaattcaaaaaatcgtccggctggaacagttttttaggcaagactaaagaacaagttacgttctaccgatggacgactatcctttgcgctgtcgcggctattatctctatttctggctgtatttatttctcttctcaggtgaaatatgtgccctttgttgttgaagtcaacaaagagtacgcgccgttgcaggttcatcagctagaatctttagggcaaagcaaagatgcggttacacgttcgcaactggcaacgattatcaaaaatatgcgggtagtctatgccggagataaagaagcgcaattagatgctattaaatcagtctattatttcatcaaaaccaactcgcaaccttacaaatatgttcaggagatgttctctgttgatgacccgatgaatcagaaatttttaaatcaggtggaaataaaagccattcttcctttaagtaaagatacatggagggctgaatgggtagaaaagaaagctatgcctgatggtaaaaatgttctgtcacgaaactattcagcggttattcaggttgagtatgcagatactatttctgctgaaatgattatcaataaccctatcgggttatatcttaaaaatatgcaaattacagaagaatataaatag

SEQ ID NO: 279648 - DNA, 915 bp, Morganella morganii
atgaaaaaaacaattttatttacctcattgctgatttcaggcgttgcattagctgatcctgttgtgccttctgtcagtaatatagaaaggattaatacaggtgcaacctctcaaccaacaacgccacagcaggctatgccatcttcaatgctcttaggtggtaaagacttacctttaagccgaaaagagcaacaggcgattaaaacagcaaatcaatgggttaacgggaaacagtatatttccaatggcggtcaggaggtagtgtacacatacggagcaggtcaggcggccattattgccacaccgctaaaactcagtgtttttgagcttgaatccggcgaacgtattgttaatgagggtattcagttaggtgattctgttcgttggcacgctacccccgtaaaacaggggaatcagacgaatgttattataaaaccaactgacacaggactatcaacggatttagttgtcgtcacagaccgccgtacttatcacattaagttaatttcaaacagtaaaaactatactccattagtcaaattcagttatccggaagatgaaaaccaaaaagcgtggaatgcgtactatcaaaattcaggtgcagataatagcagtatctcacttgccggaaataaaacgggacttgcccctgtaaattttgattataccattaaaggcgataataaaatgaaaccgttgcgggtttacgacaatggttctcaggtgtttattcaaatggatggaaaactacaggaaactcccgcattatttgtcattaatggctcaggaaaacagcaattagttaattatcgttatgtggataatacctttgttgttgaccgcttgtttaacaaagctgttctgacacttgatgttggcggtgatcaggaaaaagttaccatcacaaaggggtaa

SEQ ID NO: 279649 - DNA, 447 bp, Morganella morganii
atgaaatacaaattattctttgcctttgtatgtatggtattagcagggtgtgttagtaagcctaatatctcatcgtatgatggtacacagggaacgatagggaaaaacagcgttcaaaaaatgttatatggcgttgatgttattttttctaaacttcattcaaaaaatactattttttatattgaggattcacattctgatatagcaaatgcttttattgaaaatataaagcgaaaaggttttattgttatcgttacaaataaagaagataaaataaactataaaaaaataaatatgggcatgattgtgaagaaaataacgccggatatttattctctttcaattattacggataaatacagaattaaccaaccttatgactatcaattaaataaaattggtgaggtttccattcaaaataaaaccgaggatgttaatcatggctaa

SEQ ID NO: 279650 - DNA, 1215 bp, Morganella morganii
atggctaacccctcacaaaataaaaagctcactaaaaaacaaaaattattaatgacgataggatttgctgctgtcctcattatttttgttgtttttatttctattatgagtttagggactaataccgatagtcaaacgcaaagttacgaagatgccaaggataaatcaggtgatcctgctgacccatcctatgaggctaatctgtatcgttcccgattcagagaaaatactgatttacaaacaccccctgcaacaccagataaagccccatctgcaactggaacaatacaaacagcaaatgtgagtcagccgcaatctaatagcacacagactcaatcacaggaacgtgatcaatttgcggaaaatgttttaaggatgaagcaacaagcctatatggaggcactaaacagtaaaacaacggtgcgggttgatgcgctcagtgataataacagtccggagcgtggtagttcagccccagactatgcctcaattgcagagcaactcgccgccgcctcgaaagagggaaacggagaattgtatgccaacatgcagcaaaacaaagaaaaatttgtgaatacagaacgtacctttggctactcaactcagacaagagaagccgcgttgtctcagacagaaatcaaggccggaatgattttaccggcggtacttgttacagaaatcaattctgatttaccaggactaattaccgcacagataaccgaagatgtgcgtgacagtttgacaggcagaaaaatactgatcccaagaggttcaaaactcatcggctcttatgattcacaagtagctatggggcaagagcgcgtgttagtcgtctggaacagagtccagttcccagacacttcaacacttgcccttggtaatatggggggaacagatggcatggggcaatccggctttaacgatgaggttaacaatcattatttacgcatctttggaaatgcaacgttacttgcgattattggtgcagggttccagctttctcaacctgataataatagtaataacggcaacaatggtatgacggcaagagagcagatgattgctgaaataggtagacagtggtctaccgttggtacagaagttgtgcgccgaaatctgaatattcagccaacgttacacatcagagcgggttataaatttaatgtcttggtaaataaagacatcatattgcctgaataccagccaaaccattaa

SEQ ID NO: 279651 - DNA, 489 bp, Morganella morganii
atggctagcagaggcgtaaataaagtcattcttattggtaatttagggcaagatcctgaaatccgctatatgcctaatggtggtgcggtagcgaatctatcccttgcaacatctgaaacgtggcgggacaagcaaactaacgagatgcgggaaaaaaccgaatggcatcgggtggtgattttcggcaaactagccgagattgccggagaatacctgaaaaaagggtcacaagtgtatattgagggttctttgcaaacccgtaaatggcaagatcaaagcggtcaagaccgttattcaacagagattgttgttaatatcggcgggtcaatgcaaatgttaggggggcgaaatggggatgctccagcaacagatcaaagtggacagggacaaactcaagaatccccaaaattcagcggtggcgatgctcctgcgccagctaaacagaccaatgaacccccacttgatttttctgatgatatcccgttctga

SEQ ID NO: 279652 - DNA, 222 bp, Morganella morganii; identical to SEQ ID NO: 86452

SEQ ID NO: 279653 - DNA, 240 bp, Morganella morganii; identical to SEQ ID NO: 86451

SEQ ID NO: 279654 - DNA, 258 bp, Morganella morganii; identical to SEQ ID NO: 86450

SEQ ID NO: 279655 - DNA, 570 bp, Morganella morganii
gtgaataaattcaaacatctgatgattgaccttgaaactatgggtaataagcctgattccgctatcgtggctattgctgctgttccgttcgacatggtttccggtgtaaccgatgatgcacttttttatgaaattatcgacctgcgcagcagcgaaaaatacggcggtagtatcgacgcagacaccgtgctgtggtggctgggtaaaagtgaaaatgccaggggtgaaattactaacgccatgaaaatgattgatctgcctgttgccctgatcagacttaattcgtttgcctttgagttctgtgaagaacgcgttcaggtatggggtaacggaagtaatttcgataatgtgatcctgcgatcagcttacgaaaactgtgagataaatccattctggaggcactggaatgaccgggatgtgcgcaccattgtcgaacttggtcgcaatgccggcatcgacccgaaaaaagatttcccgtttgttggtgaagcacacaatgcactggatgatgcattacaccaggtgaattacgtggtcgcaatccaccagcatttattaaagaacttctaa

SEQ ID NO: 279656 - DNA, 726 bp, Morganella morganii
atgtcatatatagcaaccaataccggaaaacatattgatttcgtcaatatcaccccggatcagatttgtatcgaagatatcgcgcgtggcctgtcgaatgaatgccggtttgccgggcaactggaaagtttctattccgtggctcagcactctgtatatgtcagccagattgtgccgccggaatacgcactggaagctctgctgcacgatgctgctgaggcgtatatcaaagatatcccctcaccgctgaaagccatgctgccggactacaaggccgtggaaaaacgcattgacgcggttatccgtgagaatttcggcctgccgccgataatgaccgttgatgttcactacgccgatctggtcatgctggcgaccgaaaaacgggactttgaaatagaccccggcggccactggccgatgctggattcagtcttaccggatgaaaatttgatcatcctccaccaattttatccacctgtagcatatcgtttattcatggaaaggtttgaaacactaacaagaggcgattcatttccacagcttcttgagcttggactcagtgtaagggctgaaaattgccttaaacaggcaggggtagtaacaactgggctgttactgaaagaaacagaagtaagcctcttaagaataccgggaattgggggtactgtactcagggagataattaaatccattgaaccattcggacttaagttaaaaagaggatag

SEQ ID NO: 279657 - DNA, 837 bp, Morganella morganii
atgagtttattagcttcgcgttttggttctgctaacagtattcgccgtgagcgtccactgaccatcgaagagttattccgtactgtaccgagtgtgttttctgaagaaaagcacgattcacgcagtgaacgatatacttatattcctaccattaccttactcgatagcctgcaaaaagaaggcttttatccgttctttgcttgccagacccgtgtacgggatatcagtcgtcgagagcacaccaagcatatgttaaggcttcgacgccatgaccaaattacgggaatacaagtccctgaaattattttgctcaatagccatgatggctcaagtagctatcaaatgttaccgggactctttagagccgtgtgctctaacggtttggtgtgcggtgatgtattaggtgaagtgcgtgtaccccataaaggggatgttgtgggtaaagtgattgaaggggcgtatgaggtactcgatacgtttgagcaaatggctgaaaaacgcgaaagtatgcagtcgttattgttacctccaccagcccagcaagcctttgcggaagcggctttgacctatcgctttggtgaagagcatcagccagtgacacgggagcaagttcttcagcctcgacgctttgaagataaaaaagaagacctctggacagtgtaccaacgtctacaagaaaacctgattaaaggaggattatcaggcagaaccacaaaaggtaaacgcgctcgtactcgttcggtgaatgggattgatggcgatatcaagctaaataaagccctgtgggtgatggcggataccttatttagccaactcgctccccgccagcccaactaa

SEQ ID NO: 279658 - DNA, 426 bp, Morganella morganii
atgagtaacacaactgaatctgctattgcaatcacactcgttcccgatgaacaacgccttgatttttggttcaaccattttggtgctgttaaaggctgggtcacctttgaagtggttatctttaccacgatgggtcaattctgcgacgagtatcatggcggttactgggagtacgggatgctcagtaatggcggtgcctttatctaccccgatattaacatggacaccttaacgctatttaacatgcacaacggcaatgaagccactgtgagccaagaagcggcagggattgcggtgtgtctgatcctgtacagcatctggtcatttcaaaccaaaagtgaattgatgtgcgaccgcttttatcagctgcgtgaatatgccctacaacatcccgaatctgctgccattttccacttaattgattaa

SEQ ID NO: 279659 - DNA, 873 bp, Morganella morganii
atgaacgaatatcctgaattaggaagggttatttctgcctttcctgcttcatttaaaaatctgtttttcaaccaactcaatcaccttatcaactactctcctaccatcggactgatgggtaaaacaggggctggaaaatccagcttaatcaacgccctattccaatctgtcctatcgcccgtcagtaatgtctctggctgtacacgccaatctcaacgcttcagtatgacgatgaacaatcacacgcttacctttatagatttacccggcgtaggtgaaagccttgagcgagatagagaataccaccagctctatcataacttattgccagaactggatttaatcatttgggtactcaaagccgatgacagagcatggtcttccgatgaacagtgctatcgctttctcactgagcaatgtggttatcaaccaaaccgctttttatttgtgctgaaccaagccgacaaaatagagccctgtcgccagtgggatgaactgtgccaccagccctccccagagcaagcggctaacttagaattgaagcaacaagccgtaataacagcatttaagccgcatcatcctgtgatgacggtttctgctgtcgaaaactatcaactcactgagttagctgagcaattaattcaggcgttaccgacgcaagccagtagcggtgtcgctaggcaactcaacagcacttaccggacgcaatccgtggaagattcagcacgtaacgattttgggcaatgtgtcagtgatatcgtcgataccataatcgatattcttcccctgcctgtcttgataaaaagcacgattgctacagtcaaaaaccgcatcgtttccgtcactaaatccctgtggagcctgttcttttaa

SEQ ID NO: 279660 - DNA, 474 bp, Morganella morganii
atgaacaccgtttcacacttacaactgggttttgaacggatcgctatcgttatcagtattttgttatgcctttggatcactggcacattgttaacatatttccagcttatcgcccttatcatgaacccgtatgggatcacattgatgtacttcgttttatatctcttggcgttggttatcccacaactcttggcgcaattaggcttatgggttttaagcgcctttaaggggattgattataaaatccatttcaaccccaaattagttgccattatctcgtccatcattatcggattagccctctctagcctactgattatcatgtcatccggttggctatacggttttactgaaggtatcgccaccacaatattgctgattgatttgcttatcgccactggtatcgccttttatcttcatcgacgaattcgtcactgggtttcagtgcgactaaaccgccaaccatcacattaa

SEQ ID NO: 279661 - DNA, 489 bp, Morganella morganii
atgaaaaaatatgtagttgtggctgcattagcctcactgtggttgataacatcacccgcctctgccgccagccagccccctaaaaataccatctgggaatataaaggggatggtggtaaaaccttatggcaagtgtgtggaagccaaaataatagctgtaggattgtgggctcaaccaagcattatgttgctgtactgaatcataaatccgcatcaggttgtgcatttggtgatttttatatcgtggcaagaactgacggaaactggcaacaacgtgatacagggacttgtagccctaatgcttatgtccaaaaaggatacattaataacgggcaatattcgtcagttgatattggtgtcaacggtactatcgtcaaacgctatccgataggttattggaaccagcaaaaagaattatcaggtaaaaaacgtccacgttggaaagaaaaagaccgtactaaaggtggattgcaaaccaaccaacaataa

SEQ ID NO: 279662 - DNA, 453 bp, Morganella morganii
atgaatcagataaaaagcctatttgcgatagggctattggcagttagtgcatttagtttggctgaagagcaacagcgttatgcgagcatcacacataccagctcaaactttattaaccaaggctactgtggttactcatttaccctcgataatggcggtagccatatggttctagaccacgcggagtttggtgcgcttgaactaacgctgcaaatgaaagatgggcaaggaaaagtattaggggatgcgctactggaagtggaaccttttggtgattctagcgcaactcgtgccacctttgctggattggaaattccgtgtgaggatgttgctgagtttgaagtggttaaagcggtggaagatcaaaacgggcgtatggttgaattgccactatctatctttgaggctaataatccagagttagctaagatgagtgtggctgggggaaaataa

SEQ ID NO: 279663 - DNA, 1182 bp, Morganella morganii
gtggaagatattgaagagtattttgatgataaaggcagggctctgcatttagtttatgatcaatcatcggaaagattcattcgtgaaggcataagcataattcttaatggaatcccttatcttataaatgaagatactagagaaacctatttaacaccttttagcagcgttcttattgaaatgcttattaaagaggcaaaacttaaaggaatacaagaaattactatttccccaccaaaattgttcaccgagcaaagatttaaattttgtgataacctcccgtttaaatactctgtattggaatacttttcaatccctgggttagctcacgagcttagcaatgatggatttttggtgcctgtctacttcaatattgagatgttaaataaatattctcagaatccaaattatgaattgaaactaatgtcatcaacttatggaaatatttgctttaaagatgaatgggcaatttcatttggtgtaaatagaaataaaaacatcattatgtggctgggagatatagataagctaccaaagaaagaacagttttacttactatcagaaaatattgagccagattatgaagttcattctgagttttatgaaggacaaatatgcgtccaatgggctgaagcaccactggaaagtaaggtttttgaattacgagaaaaactatccgaattaatattaggtagatttggcaataaactgttcaagctcgatggtgagatttcaaaagtactttctgatctacaaaaacctgtcttctggcaagataagcatgtagctcctgtaatagaagctttaaatcgtatatttgtagaatcgctatgcgaaaaaaatatcaaagaaataatcaaaaatgaatctcctaatacggatatcaaagggtttaaaggcttgaaactattaactgtattacttaatgatgtactaaaaattgacaatagcgcagaaataatgtgcccattttttgttctttatgactatagggttgtgatgtgtcatttacaatctgaagagactgttaatgaaaaaatggatagtatttaccacaggctacatatcagtgataatgctaaacatcatgaaactgtttacatgcgtatttttgagcttatgaaagattcatttaatagagtcattgagcatataaaagaaaattctagcaagggccaataa

SEQ ID NO: 279664 - DNA, 639 bp, Morganella morganii
gtgagcgataaccacaaaatacttattcattttctactttctaatgatagtgttactgtagactcagtggcaaactaccttaatattaatcaagatgaagctcaaaatctaattaatgaatgcattgaaaagaaattgctcacaaacagtataaacaataatggtataaatgaatattatgtcgtggtggataatgctgaagcatatattgttgaaaattcagatgagcaaaaaatatcaactaataacgttgtgataaacgatggtaaaggttctggggaattacttgttggggctgtagcattaatagctggaattgcatttttgtgtttgttcctatactcatgtacaggaagagataaaacagatgaaccaattcgtgatttttgtactgatgatgattatgcatacatagccgctaaaaaatttatcaaagaaaaattaaaatcaccaagtagcgctaaattttcacatatcactgagactacagttactaaatataatggatgtatttttgaattctcaggttatgttgatgcacaaaatagttttggtgcaacgttaagagaagactataaaataaaagtaaaatatagtgaaaccaaagatacatattatttaattgatctaataatgtaa

SEQ ID NO: 279665 - DNA, 759 bp, Morganella morganii
atgattacaagcgattatcagaagctggaaccgggtaatgccgtccggctttttgaagttgatggttccgcgttcggcgcgccggatgttttgcggttccatgcttacaacattcctcacacagaagcagatattacggccgctggcggcgaccctgaaaagctcccggcaaaatccatctggtggcagggcgaagagtaccgtgcctggccggtgcagatcgagggactggaagcatcaacaaccggatcaggtgcacagccgaagttatcggtggcaaatctggacggttctgtcaccgcgctgtgtctggcatacgatgacatgctgaaagcgaaagtcacgatacatgacaccctggcacactatctggatgcggctaattttccggatggcaaccctgcggcagatcctacccaggaaaaagtctcggtcttttatatcgacagcaaatcctcggaaaccaatgaggttatcgagtttgaattagccagtccgatggatttacagggggtgctgatcccgacgcggcaactgcatgcaatgtgtacctggtgcatacgcggcaaatacaaatccggtgacggctgtgattatgccggtcagaacgggtattttgacaaacacggcaaccgcgtggatgatccggcacaggatcagtgcagcggtatgctgaataccggttgcttcccccgtttcgggaaaaataatccgatcccgttcggtggctttccgggaacctcattgctgaggaaataa

SEQ ID NO: 279666 - DNA, 351 bp, Morganella morganii
atgccagcacgcatacctcgcgcctgccgcaaacgcggctgcgcaaagacaaccaccgatcgtagcggatactgcgaagaacaccgcaatacaggctgggagaaccaccagcagggcaagagcaggcatgaacgcggatacggtaccaagtgggaccggttgcgtgctgtggtactgaacagggataaacacctgtgccagcaatgcctgcgcgaaggacgggcaaccgaggcgaagacagtcgaccacatcaccccgaaagcacatgggggtaccgatgcggaaagtaacctgcagagcttgtgctggccatgtcactaccggaagactgcaacggagagaacacgatga

SEQ ID NO: 279667 - DNA, 297 bp, Morganella morganii
atgaaagaaacaatacagccaagaagtagcggtgaattatgggcctggtttggtttgtcgtatgcatcattccttgtcttaccgcgagtgctgatgcacgaaatgcctattgagtggcaggacaaaatggctgctttactccatgagtacgatgaagcattcgatacatcatccgtttgtcattcagtcatagtgagcgcaaaagacaaaaacaaccggtttatgaagatgccggaatacatcctgaattaccggcacccggaaagggatgcgattgcacagctacggattaaataa

SEQ ID NO: 279668 - DNA, 159 bp, Morganella morganii
atgccacggaaccctttaacgctgatcatcattgctatcattctgctgactaccgctctgttggcgggttgttatctgtattcactcccgaatcactgcaagccgttgccggataacccgctggacggtgtgatccactatgagtgtgaagcgccatga

SEQ ID NO: 279669 - DNA, 192 bp, Morganella morganii
atgcgcatgtctgacaaatattccagccctacagcatacgcctggggacttataacctctgcttttggcgttttatctctggaccagtgggctattgtcgccgggatcatctgtactgtcgggacgttcctggtgaactggtattacaaacggaaagaattccaactgaaagccggagaacatcatgaataa

SEQ ID NO: 279670 - DNA, 507 bp, Morganella morganii
atgaaaagaatgcccactgtagttgttttgtttattttaacactgtgtaatgtggtgggctttggtgtgttgcatatagccaaaaacaccattcttgctggtgtggcattctctggtaatttaagtaaccttggttctgcattggtaacatactcaacagcaatgatggcgcttgttgtagcgatggttgttgttttatttggtataaacaatacgcgattgaaaaactttaaagaatcgggttatatccatgcaacataccttctctacatggctacttttgttgagcttggtgtgacaataactttctcattgctttgcatgtcaaacatcaataccgtaccggtcgcatcatactcattaacattcgcattaataacattttttttgatttgcatacttgctttgcagttgattggactgaagcggcaagaacaagttgaaactgaggaatctcaaagaatggctgcggccatgctgagtcagttcagtaaacagtctgaatag

SEQ ID NO: 279671 - DNA, 804 bp, Morganella morganii
atgaaaaccaactattttacgcatcgattgttccctgcggacggttcggttattagccagtcaatttctgattcattgcaagaaatgatatcaagtggcgctaactcaaccatgatggctggcgaatattatgtgattcaacacttgggtcgagatgtatacactctaataaaaacaaatagcaaggatgtttttagaaaactgaatgtaaaaaataaagcatgtgtagatttgtcaaaaattctcaattcagatgaaaaaattgcatttgcatcattttttattgtaaagggaaatgttgttgggttcagtagtactcttcactctccaagaataaataaattagctgaactgtatgatttatttatgttttcaaagaatcatgatcataatatcaactttactcctataactattggaataaccccgcatgatgtaatgcagtgtgctcatgtaggaaaaataactatgaaaatagaaaaaaatcagaagttgatagatggtctatccgcctttttctctggtaatgtcaagtatgatgatgttgattcctttgaaatcaaaatcatccctaagagaagaaaggatattaaggatacattttcaggtgtcattacccaactaccaccggaagtgatggctgttgcggtatcagcaaaggaaaagatgggtgatttagccactgacctcaatgtaatatcagcaaatacggtctatgatttagtcactgatagcagcacaattgtaacccagatggaagacaattttgctacaaacgctacactgcgcggattaggttattga

SEQ ID NO: 279672 - DNA, 384 bp, Morganella morganii
gtggcgaatccgaaactgtcattaaaagaactggcactcagtccaaaaaacgccttccgttcaaagatggtgaaggtacctgaatggaacggagtcaccgttattcttcgggaaccgtcttcggcagcctggctcagatggcgtgagctgatgaataccggtgcagacggtgatgaaaaattgtcagaggcagaacaggcgcagcgcaatctgcgtgcagatgtggtgatgttttctgacgtgctgctggatgaagataaagagcgggtgttcagtgatgacgacactgaagaagtgatggctgtttacgggccggttcatgcccgtctgctgaaacaggcgcttgatctgatgaccacgccggatgaagcggaaaaaaagtag

SEQ ID NO: 279673 - DNA, 1212 bp, Morganella morganii
atggctgttgatcataaagatatcagtgaagtggcaaaagagctgaaagcgtcatttgaagaatttaagtcaaaaaatgacaaacgtattgatgccatcgaatcagaaaaaggcagactggccgagtcagtggaaacgctgaacggcagattatccgaactggacgagctgaaatcgtcgctggaggctgagctggcggccgtgaaacgcccggcaggtggtgtggcaaacaaagatgttgctgagcacaaaagtgcattcgaactgtttgtccgcaaaggtaaggatgacggcctggccgaactggaacagaaagccatgcagattggttctgatcctgacggtggttatgccgtgccggaagaactggatcgcaatattatttctgctctgcgtgacgaggtcattatgcgtcaggaatgtaatgttgtctcagtcggcacgccgaattacaagcgcctcgtgaatatgggaggtaccggcagcggttgggttggtgagactgatgtccgtccggaaaccagcacgtcaaaactcggtaccattgaaccggtgtggggggaaatttacggcaatccggcggcgactcagactatgctggatgatgcctttttcaacgttgagcagttcattaccggtgaactgacaactgaatttgcagcgcaggaagacgcggcattcaccagcggagacggcagcaaaaagcccaaaggattgctggcctacggcagtgatgataaagcggataaggagcgtgactggggcaaattgcaacacctgttgctgaagaaaccgaccgaactgaccgctgatgaagtgatgaaactgatttataccctgcgaaaaccataccgtaacggtgctaagtttatgatgaataacaatacgttattcaaagtgcgcacactgaaggattcccagggaaattacctgtggcagccgggcctgcaattgggtcagccgtctgcattactgggatatggtattgcggaaaatgagcagtttgctgatatggctgccggtgctgttccgctggcgtttggtaacttcagacgctgctacaccatcctggatcgtatcggcatccgtatgctgcgcgacccgtacaccaacaagccgtttgtgcatttctataccacgaagcgtgtcggcagcatgatggtggacagtaatgctgtgaaattactgaaagctgcaggtgcaggaggctga

SEQ ID NO: 279674 - DNA, 471 bp, Morganella morganii
atgccgggaccaccgaaaaccccgtcacacctgcgtttggtcaggggtaacccatcaaaacgcccgatcaataaaaaagaaccgaaaccgccgtctggggtacccccaactccgaagcactttaccaagcaggggaaatactggtttaagcggatcggggaagaactcgatgccatgggcgtgatgagttcgatggatgccaaagcgctggagctgctgatcgaggcatacaccgaataccggcaacactgcgatactctggacgaagaaggttacacctacacaacacagagtgatggcggcccactgataaaagcacacccggtggcggcaatgaaagctgatgcatggaaacggatccgcgcgatgctctccgagttcggtatgaccccggcagcccgccagaaggtaaccattaacacaccagccgaagaagaccctttcgaggcatttctgaaacaaagaaaatga

SEQ ID NO: 279675 - DNA, 354 bp, Morganella morganii
atgccaccacgaatcccccgcgcctgccgcaaacgtggctgcgcaaagacaactaccgaccgcagcggatactgcgaagaacaccgtaatacaggctgggagaaccaccagcagggtaagagcagacaggaacgtggctatggcaccaaatgggacaggctgcggctggtggttctgagccgggataagcatctgtgccagcagtgtctgcgtgaaggtcgggcaaccgaggcaaagacagtcgatcacatcatacccaaagcacatgggggaaccgatgcggaaagtaatctgcaaagcctgtgctggccctgtcattaccgcaagacggcgacggaacgtaaccacgtctga

SEQ ID NO: 279676 - DNA, 123 bp, Morganella morganii
atgaccgatattattaatgtattactgattaaattcacctttgcgggtgtcgcttatgctctgcttttgaaatacaagccagagcacgcacttcctgtggctactgctatacttgacgcttag

SEQ ID NO: 279677 - DNA, 162 bp, Morganella morganii
atgaaacaggaacacgattcaatttctacatctcctatcaacgggaaaagtcccgaagaaatattagaatattttaataaatataacttcgtggatgatcacggacatcgacttgagttctgccataacctcattgatcttgtgatgcaggcaacaaaataa

SEQ ID NO: 279678 - DNA, 528 bp, Morganella morganii
atgaaaagggtaattacggtattgctcaacggctggttatgggcggtcgtgttcttcgggttatggatgttcagcttactgtcagcagaacaatcggaaggccaacacaaagaccaggttatcactgaccagcaaaagctgattgataacgcctacaccagtatcgatatttttaatcatgccgctgcagcaaatgccagcaggaatatgcaggcagaagccaaatcacaggagaagcagattgaataccgcaccatcatccggaaagaacctacctgtaatctgtatattcctcagcctgtttctgacgggttgttcagccacgtctacgccattcgtgaatcagcaatgcgttccgctcccggcatcgctgacacaaccggtgctggcaccgctgccacccgccgactgacatattgccaggcggttgaatggatagagccgctactgacggcgttgggccaggcgaacgggcagttgatggatatacggaaaacggatgcagagcgtaatgggaagcctcgataa

SEQ ID NO: 279679 - DNA, 477 bp, Morganella morganii
atgattaaccgattatataaaaaggtcatggccgcctgtgctgctggggcaattgccggtgcgctggtgctgatccccgcatacgagggtgttgagtacaaaccataccgtgatgtggccggagtgctcaccgtatgttacggccataccggcagtgatattcagcccggtaagctgtacacggacgctgaatgtaaggcgctgctgcacgacgatctgacgaaagtccggcgcgcggttgacccgatgatcaaagtgccgattgacgacaacacacgggcggcgatctactcatttgcatacaacaccggaacaggcgcgttctcacgttctacgatgctgcggaaactcaatgccggtgatatcgctggtgcttgtgacgaaatgaagtgctggacgtatgccggtggtaagcagtggcagggtttgattaaccggcgcgaaacggagaaagctatatgtcacggaaccctttaa

SEQ ID NO: 279680 - DNA, 810 bp, Morganella morganii
atgactattgaaaacagcgatcctggtaagttgagttggcacgtttcctgtgatgaatcagggattgacggacaaaaattctatggattcggcagtctctggatgaagtatcagagaagaggcgacttcgttcgtattattcgagaacttagacaaaaacataactgcagcgatgaaattaaatggcaaaaagcacactcaaaaagaaatgcggccttctatgctgatttggttgatatctttttcaaacacccatggcttgcctttcattgcataatcatagagaaatcaatcgtggaaaaaggatttcatgatggagactatgatctggccatgaggaagcattttaatctgcttatatatacaaaaatagataatgttatcaaggcgcatcccgagagagactgtgttttcagaattgaggttgatcccttgccatcacgctataaaaaagctgatgaggcatttcacgtaatatgcaacaacatgctcgctaaaaagcacggacgtaaagatataatttccagtgtcgtcactaaagattcaaaagcctcggagcacatacaaattgcagattttcttctgggggctgtaatgtgtgcataccaaggtaaggcatcttctgaagcaaaaattgctgtatcaaataatgtagccagttatttaggatgggatactcttttgcatgacacatggatgacagaaagaaaatttaacatatgggcttttttcgatccaacaaaaggccggagaaaaattaaaacccagccagtgaaattaaaatatcctcttccggacagaaagaaatga

SEQ ID NO: 279681 - DNA, 294 bp, Morganella morganii; identical to SEQ ID NO: 277742

SEQ ID NO: 279682 - DNA, 468 bp, Morganella morganii
atgtctagcaaatatgaaaaaacgcagggcacgaaaatcagtatttcaaaactgccggcaacagaagccaatcccgcatctgctgagtttctgccgctggcctgtgcggccaaagagatcggttataccggcggacagaagtcggacattgatgtcaccaccctgtgttcgactgagcaggaaatgactaatggcctggcatccccgggggaggtcacaatttctggtaactggtcaccggatgaggggcaggaagcgctgcgtgctgcctatgacaatgacacgatccatgcgttcaaagtggagtttccgtcaggtaatggttatgccttcctggcagaagtccgtcagaacagctggagtgtggcaaccagcggggtagtcaccgcgtctttcacgctgcgcatgaaaggtaaacctgttccgctgaaaaacggggcggtaactgagccgggaaagggggaataa

SEQ ID NO: 279683 - DNA, 336 bp, Morganella morganii
atgaaagaatctgatttgttttctttgcttgacccggtgctgccgggcagggtttttccgtatgtggctccgcaggatgagcctggaattcagccaccgtggtgtgttttttcattttatgataccggcggcgatgtgctgtgcggccgtgctgagacgatgagcaatattcagattgatgtgtatgcaaaaaccatcgatgaagcccgccggatcagggaactgtctgttgctgctgtttctccgctttcaccggctgagttcactgagaaacaggggtatgaaaccgataccgcgctttaccgggccacgctggagtgccaggtctggcaataa

SEQ ID NO: 279684 - DNA, 525 bp, Morganella morganii
atgaaaaaggtaattactgtattgctcaatggctgggtgtgggctgtcgtgttcttcggtctgtggatgttcagcatgctgtcagccgaacaaacggaaggccaacacaaagataaggttatcactgaccagcaaaaggtgattaataacgcttacaccagtatcgatatctttgaccgcgtggccgccgcaaacgccagccgcagcatgcaggcagaagccaaatcacaggagaagcagattgaataccgcactattatccggaaagagcctacctgtaatttgtatattcctcagcctgtttctgacgggctgctcagccatgtctacgccatccgtgaatcagcaatgcgttccgctcccgacatcgctgacacaaccggtgctggcaccgctaccacccgccgactgacatattgccaggcggttgagtggatagagccgctgctgacggcactggatcaggctaacgggctgttgatggatatccggaaagcggatgcagagcgaaacagacgaaagtaa

SEQ ID NO: 279685 - DNA, 579 bp, Morganella morganii
ttgcaacgatttggacgccgttttgatctgagtgtcagaacggctgctgaaggtattcatgggattctgctccagctcccgcagttacggcagcgtatccgtgacggctggtaccagatacggatcgccggcagtgatgtttccccggatgaaattcaccggcgctttaatgagccgcttccccggaacgctgtcgttcacatcgtcccgcgtattgaaggggcgaaaagcggcggggtatttcagtttatcgccggtgctgccgtgctggggctcggatggtggaaccccggcggctgggccatcggtggtgcgctgatgtcggccggtgcagccatgatgctgggcggtgtggcacagatgctgacaccggtagcgaaacagccggatatgtcgcggggtgaggaagagaagggtaatacctatttcagtaacctcgaaaataccgtggcacagggcgtggccgtacctgtggcctacgggcggattatgtgcgggtcgcgggtgatttcacagtccattgagattatggatgacagcgacggtactaatattgatgccggtaaacacggcgggtaa

SEQ ID NO: 279686 - DNA, 258 bp, Morganella morganii
atgttgtggtataccttccggcatcacatcgagggtaatctgattcgtagccggatagccggtcactttgatggttttcggcaggccggaaccatcggtgacaataacatgcgcatcacctttggccggtttttctatgttgcggtcaagcagcagcgttttcttttccgggtcaacagacagaatgcggccgccgatctgcatatccacccagtcgttatccgcaatctcgaaaatatcaccgggcgtatggcgtaa

SEQ ID NO: 279687 - DNA, 1140 bp, Morganella morganii
atgaaaagtgtgtttgaaatcgttcaggcaatgtccggtcagaaaaacgttattgtgataccggtgccgttcctggagttttttgccggtgatcagcaggcccatgcattaggtgctgtcctgaatcagctggtgttctggtccggcgtttcttccagtgccggtgatggctggttctacaaaagtcatgaggagctggctgatgaaattaagggattatccggagaagaacaggcccgtcgcctggttaataagctgcgcactaaatattttccgggcattatcgagacgaaagcaaagaaagttaacggcaccccggtaacgcactatcgtattgatggggaagcccttttactgaaaatattccctgataaaaccgaaacgtcgaaatcgacgaatggaaacgtcgaaagtgcggaatccaaacgtcgaaactgcggaatggaaaacgcagaaatgcaggttcctggaaacgtcgaaagtgaggtttcctatctttatacagatcttaaaacagatcataacttacagatcaatactgactcttcgtcgcagaattctgacgaatccagcgacaaccctcttaatgattttttaacacgtaatcctgatgccgctatctacagcgctaatggtcagaaatgggggacacaggatgatctggactgcgcaaaatggatttctgagcgccgcaaaggggtattcgcagagctcggcctgaaagagccaaaagagcctaattttaccgaatgggcgaatgatgtccgcctcatgcgtcagattgacgggcattcgcaccgtgaaatttgcgccctgtacaagcgtgtggctgctgataatttctggcgtaagaatattcagagtacccgttcactccgtgacagctgggatgatttaacccttcgcctggccgaaacacagcaattaaaaccgtctgtcgatatcgtggcccgcgagaacgcatatacccgcattatctgcagtcgctcaaaaccacagaccagaactgaagaaattgcccgcgatttggcaggcaaggcagggttgcgcggaatgaaggaatttgatgcccgccgtgcatgggttggtatctggtcacaggccacagagcaggccgcaaaagaacgggaggcagcatga

SEQ ID NO: 279688 - DNA, 249 bp, Morganella morganii
atgaacatgcgctcagaaagcaaagagatttacggcgtgagtgtgttcccggtgctggccgtcctgcatcagacccgccggtggtgggtactgcgtgacctgaaagaccactggaacagccgccataaggtaatccgcatttgccacagtcgtggctgggatgacctcattcggttccaaaatatcgagcggcagtatttcatgacccgcgccacagctaaacgctaccagagtgagggggttatctga

SEQ ID NO: 279689 - DNA, 537 bp, Morganella morganii
atggccggatatgcaagtaaaacagcccctgaacacaaggatagctggcaaactcccgaatggcttttcacggctctggatctggagttcggattttatctggatgccgcagcgagtgatatcaatgcactttgttcccggtacctgactgaacaggatgacgctctcaaatcggagtgggtcagttatggtgctatctggtgcaaccctccattcagcaacatccgtccatgggtggaaaaggctgccgaacagtcacgcatgcagaatcagcctgtcgtgatgctggtaccggaagatatgtctgttggctggtttctggaggcgttgaaaacggttgatgaagtacgggttattaccggtggacgtatcaatttcgttaatcccgtcaccggcgaggagaaaaagggtaacagcaagggctccatgtttcttatctggcgtccgtttattaccccgcgccgggtggtcaataccaccctgaaacaggagctggaagctatcgggaatcagtatctgtcggaggtatcagcatga

SEQ ID NO: 279690 - DNA, 396 bp, Morganella morganii
atgatgctttatacccgaattgcggaggatatcccggctggtacggagctcactatcccggacatcatggaaaaatacggagtctcttacacaaaaacccagtcggcgacgcgtgtgttagaaaaaatcaatgctgttgatgtggttcaccgcagaaaaggcagccagaccatattcagagtggtgccggatgcgccggtattagtcagaaactatgaaagcaaagtatcagcgaagcgggacactttcaaaaaaaagaagaatccattcggaagaaataaaccctgcgggcaggatgtagccgagcgggaatttgtatccgtacataacagactattttcggtattagcagcgaaacgccgtgaaatgaagaaaaacagcggggggggtgagtaa

SEQ ID NO: 279691 - DNA, 381 bp, Morganella morganii
atgagtcgtaaatgtatgttttgtggtggggaagctgatttgctttgtgatggcgtgatttgctacatcggaaaaagaagtgatgacggcactttatctggcttctcagcggcttatacgtgtgatgctcctatgtgtgcatcatgttcaacatttcacggaaacctgcactggcgcaaaggcaatactggcgggttcgattcactggattactgccctgtttgtgtgcgtcaggaaatcggatttggacgtaaatttatttttgacgagataggtcaggtgaaaattcatcggcaggcgcactatgcaaaatttaaatcaagaaagggcaatcatctgctgtcgctcaccggtggcggacagatctgccttgatatttaa

SEQ ID NO: 279692 - DNA, 126 bp, Morganella morganii
atgcctttcctctccaccagcggcccggtgcaaatcattcaggcaatagcgaccggccatatcccggcgcacattaataccatcgacaataatcagattgctcatcgttatctctccactcattaa

SEQ ID NO: 279693 - DNA, 609 bp, Morganella morganii
atgacagaagtaatgacacaaatcgaactcggcggaattctcggcaaaacgtttggtaaaacccaccagcgcttgatctgtacaacctcggaagccgttcgtgctttatgctgcacaattcccgggtttgaacgctatctgaacaccagtaagtctcgcggcttaacgtacgcggtatttcgcgggaaaaagaatatcggagtggacgacctaagttttccggtgactgatgatgttatccggattgtgcctgtcgtgatcggcagcaagcgagacgggttatttcagaccatttttggtgcggtgctggtggccgctgcagggcttatggctcccggcggcataatcgcagcctttagcgctggtggtatggctggctttatggccacaaccggtgcggcgatgatgctgggcggcgttatgcagatgttgtccccgcaaccaaacgggatcgccatgaaagaccagggcgaaaataaaccgtcctatgcgttcggtgccccaacgaacactgtttctcagggttatccggtaccgatcggttacggtaaacgccgcatcggcggggctgttatttccgccggtatttacgtcgaagatcagcagtaa

SEQ ID NO: 279694 - DNA, 708 bp, Morganella morganii
atgcgtaaaaacattcaggcagctatttttgcccacgcagaacgtgaatacccccgagagtgctgcggggtgatcgcgcaaaaatcccgtgtagtgaaatactttccctgccgcaatgtcgcggtcacgccggaagagcattttgtattatcgccggaggattacgccgctgcggatgattggggaacggtgatcggtattgttcacagtcaccctgatgctaccacccggccgtcagaactggataaagcacagtgtgatgctcttggcgtgccgtggtatatcgtcagctggccggagggggatctgcggactgttcagccgcgcggcgagctgccattacttggtcgaccgtttgtgctcgggtttacggactgctgggggctggtgatgagttggttccggcaggaacacggcattgagctgccggattaccgggtggattatccctggtgggagcagggtgagaaccggtacgccgataactggcgggaggcgggatttattcaggttgacgatccgcaacccggtgatgttatcgtgatgcaggtgcaggcaccggttgccaatcatgccggtattttgctgcctgataatatgctgttgcatcacttatacggtcacctgagtcagcgggtgccgtttggcggttattggcgcgaccgcacagttatggtactgagatataaaatattcatgacaacatag

SEQ ID NO: 279695 - DNA, 1326 bp, Morganella morganii
atgatttacaccgacggcactatagccattaaagccggttcaccgattgtgaccggtaccggtacacagtggaaaaagaacattcacggtgtggccccgggccagcttatcagcatcgagaacggtactgcacctgtcagcatgatgatccgcgcggtaaacagtgataccgaactggtattgtcattcaatgctccggtaacgctcagcggcgcgaaatactccatcgccaccacggtaccggataccatttcagatgcggcccgcaccatgtcagccaatcagggctatatcgtttactttctccaggcaatgcagcagtggatgacagacaccggacaggtggaaattgagctgccgaacggccagaaggtgacgctggatagcattaaagcgctgaatgatgctttaagtaatctgtcagatgtgaaaaagggattatctatcaatgataatggatatacagagatctatccgtcagacaaaaataaagcagggctttggcaaagaataaatacatatgtgtttgaggtgctcagtggtagtaccggaaaattttccgttgcgaatgactccgtaaagataggcggaacaatcgatgttaaaaccaataccctcggcaatgatcagtcaagggttgaaataacatcaccagatggcagatttagcatcggtatgtgggcgtataacgatggacgtacattagtttcgtgccgaaatacatcagggtggtctaacgtcagttttgcaaatatcggaagtggcagcgccgcagtaatcggcgggaatatttatgttgatggcagtggttacctgaaaaaatcctccccgataattcttgtgtatcctggcggcacgttttataccaacgacgaatccgaaggtgcagaagtcagccgtaccggcaccggccagtatcatatcaccggtatactcggttataactcagatggcgcatggggtgtaaacggtggaatttccgtaccgcgagacaataacggccttgagctggtttatgtcgatgacagggtgcagagtgacggcagcctgattattgaaacctatcaccgtcagcatgcgcatttaccggaacgtttccagaactggcgactgaaagaggtcacgccggaaggtgagcgcatcttctatcaggacggtgaaccatgtgatctgccggaatccacccgcctcgatgttcgtgtcgaaatgccgcagggctctgtgtggaatgtgaaacagcgtgaactggctgaacagatggaacgtgagcaggcagagcgtgaggcgcaggaagcagcggagcaggccggagaatcagaggaataa

SEQ ID NO: 279696 - DNA, 291 bp, Morganella morganii
atgcgcaacgtgaactatcaagtacgaaaaaaaattaacaggtctggtgccgatcttgagtaccttctggaatgctttggtgatcacctggctgagattcatgactacccgccggatgtttgtggctttgatgctgtatacctgtatctttgcgataagcatcactggccaatttctcagagtcggtcaatggaaaaagacgacatccggttagttttagcaaaagagatgaaaggctggctgcctcctcaggaagctcgttatcctggtctaatcccatcagacgattaa

SEQ ID NO: 279697 - DNA, 684 bp, Morganella morganii
atgagcattgcaaaacgactcgcagaagcgaggattaaagcagggttaagccagcaagaattggccgacatagttggtgtatcgcagcaatctatcggaaagattgaggcgggaaaaacttcgtcaccaagaaaaatagctgatatggccagagcgttgaatgtatccgtacactggttacaatttggtgctcaggatgaaaacgctaaaattgtagatctggcaattaaagattgggatgatgttcctgatgatccatatgaatttgtgagtattcctattttggatatagatttatccgccggctgcggcgccaatgctgaaattatagaaacagagataggaacatacccattccgcagagaagagctaaatcgttacggagttaacgctgagaatgctcgcctagtaaaaataataggtaacagcctctacccagtattaaacagcggggatatggttgcagttgatatcacaaataaaaggataaaagacggcgacctctatgccatcagagatggggtattgcttcgtgttaaaatattggttggtttgccagatggcggactcattgtccgtagctttaattcagaagaataccctgatgaagtgcttaattatgaccacaccagggcaagaatacacgttataggtagggttttttggtcatcaagacgctggtag

SEQ ID NO: 279698 - DNA, 888 bp, Morganella morganii
atggaaaatctaaaggtttcttataattacaagaaaaacagagataaattatttgctaacttaatcagcattattgacgggatattgtcggatggtgtacttcaagatgatgaaattctgtatttaagtacttggttgctagaagctgatgcaatagctgacaatgatattgttaagttattagttatgcgaatcaataggatacttgaagacggtattattacagaggatgagcgctcagagcttaaagaggagcttgcgagtatacagaaaaacttgatggatcttccaagtttagatctgtattcaaaagagtcagatattaacctcctaattggcctatgcaaggggcttatagcagaccggaagttatcggaacatgaggtgaggtatcttaattggtggctcaccgttaacggggcgttgaaaaataattacccaggaaaacacctgtatgaatgtgtcactgaggttttggccgatggcgtaataaccaaagatgaaagtgagtttttgtataatgaattagtagctttcactggttgtgatgttgagcttggggtcgttgatggtatgaccacaaaactgccaactgatcacatcgaaccatcaatgataaattcttcaacattctgtttaacagggaaatttttatcaggaaagcgcgacgatattgcagaaaaaataaaaaaacatggtggtgtaattgataaatctgtcaggcaaagaacaaattttcttgttgtaggcactttatcatcccgtgattgggtttactccagctttgggcgaaaaatagaacaaacgctggagtggaagacaagcggaatatcagatataaaaattatcaccgaagatcagttgatgaccgtactaccagcgtcttga

SEQ ID NO: 279699 - DNA, 201 bp, Morganella morganii; identical to SEQ ID NO: 277852

SEQ ID NO: 279700 - DNA, 237 bp, Morganella morganii
atgtttaaaaaatacggctcactggataagcactcatggcgttctgaccttgctgccggtttcagagaagcattcagggtgttgcggccacacggtagtttaatttttaagtggaatgaaacgcagatctgggcgagtcagattcttgagctgactgagtataaacctaccattgtgcagcgtgtcggtaagaacgataaaacgcactggatggtattctataaggatccgctatga

SEQ ID NO: 279701 - DNA, 156 bp, Morganella morganii
atgaaaccaatactcgatatgtgctgcggcagccggatgtttatgcacgacaagcaagatccgcgcgtgttgttcagtgatatcagaaatgaagaacatactctttgtgatggccgtctgctgcaaattacaccggatatcattgctgacttttaa

SEQ ID NO: 279702 - DNA, 261 bp, Morganella morganii
atgaaaactgaatacatttatatctgcgctcaggcgtactgcaatgcccagggtagcggcatcgaatattacaccgactatgagcgctttgataatcgaaatgatgccattaaaaatggatggaaacagcgggaatcagatgatttcaatatcggcgttttggttaatggacgactcgtttcggtcgactggatggctaaaccaattgataccgatccggatacattacggaaaatcgaagatcaactgggcctgtgttaa

SEQ ID NO: 279703 - DNA, 528 bp, Morganella morganii
atgtcatatatagcaaccagtaccggaaatcatattgatttcaccaatatcactccggctcagatttgtatcgaagatatcgctcgcggcctgtcgaatgaatgccggtttgccgggcaactggaaagtttctattccgtggctcaacactctgtatatgtcagccagattgtaccgccggaatatgcactggaagccctgctgcacgatgctgctgaggcgtatatcaaagatatcccctcaccgctgaaagccatgctgccggactacaaggtcgtggaaaaacgtattgaagcggttatccgtgaaaagttcggcctgccaccggcaatgacagttgatgttcactatgccgatctggtcatgctggcgaccgaaaagcgggactttgaaatagaccccgtcaaccactggccgatactggattcagctccgccacatgatgacatcatcatccagccactgacaccgccgcaggcatatcaccagtttatggcgcggtttgaagctctcacactcggggcataa

SEQ ID NO: 279704 - DNA, 828 bp, Morganella morganii
atgtctaatttagacggagccgctatttctcagattcaaaatatggctgttgctgcattaagtctggacgctgtaaataaatccctctgccctgctgtggttttaccgggtgatttcaatgttaaaagcctggagcacttacaggaaggtcgttaccgcttccgtggtgcgatggacacaaccagtatcgctgattttgtgaaatattctctgcaacatggtattgaagaaggtgtcagctgttttattgatgctgatgagatggctgctaaaaccatcttcaatatcggttccatcggtgaaccggggcatgctgataacacagccatggtatcactgaaaaagaccgcaccgttcgcttctctgcttaacgtgaacggtcgcaagtccggtcagaaagaactggcagaatggctggaagactggcgcgataacctgatggcgtttgatgcagaaggtaatgttatcgatattaagcaggcaatcaatgccgtacgcaaaatcaccattgaagcaagccgttccgcagatcatgaagacagtgatttcggcgctaagcgctctgtgatggaaagtgtggaagcgaaaagccgtgacgtcatgcctgcagtattccagtttacttgcacaccatacgatgaactgtctgaacgtgctatcaaactgcgttacagcgttctgaccggtggtgatgtacctgttctggtactgcgtattgttcagctggaaaaacttgaagaacaaatcgcacaggaattccgtaatctgctggctgataaattcgaagaaactgaaatccagacctatatcggtaaattcaaagcataa

SEQ ID NO: 279705 - DNA, 423 bp, Morganella morganii
  misc_feature (21)..(30): n is a, c, g, or t
atgagtgtgaagtcgctgacnnnnnnnnnngtcgctgacctgccagattttggttattaccccgttcctaccacggaaggcggtaaaaaaggtgagttcatcacttacgagaccaactcagacctgcgtgacacagaatctgttcccctacgtaaagacggagagcagcaaagcatctaccagtacttcctagacgaagtgaagccacatgttgatgaagcatggataaacctagatacagtaaaaattggctatgaaatcagcttcaataagtatttctaccgtcataaaccactgcgtagtttagaagaggtcgcaaccgacatcatcaacttagaacaaaaagccgatggtcttattgcgcaaatcttgggaatagagagtttgggtgtgaacgtggcggaaattcagggagaagcgtaa

SEQ ID NO: 279706 - DNA, 1689 bp, Morganella morganii
  misc_feature (1672)..(1681): n is a, c, g, or t
atggcctcaaagcaagttcttcttgatgtcgtcgagaagtttgtttccccttacataaacttaactcatgaaacggtcgaagacccggatggcaacaagatgcccgcccttaccaacctgggtatgggttacgtgttcgaagagttgatccgcaagttcaacgaagaaaacaacgaagaagcaggcgaacactttacgccacgtgaagttattgaactgatgacgcacctggtgtttgacccagtgaaagaccagttgccgcttaccatgacagtgtatgaccctgcgtgtggtagcggtggtatgttgactgaatctcaaaacttcattgaagagaaatatccaaacgacagccgagatgtttacctttacggcaaagagatcaacgacgagacctacgcgatttgtaaatcggacatgatgatcaaaggtaacaaccctgagaacatcaaagtaggctcaaccttgtctaccgatgagttcgcggcttcacgctttgactttatgttgtctaatccgccatacggtaagagttgggcgtccgaacagaagcacattaaagacggcagtgatgtgattgacccgcgttttaaggttagcctgaaagactattggggaaatctcgaagtggtggatgccacgccacgttcaagtgatggccagctgctcttcttaatggaaatggtcaacaagatgaaagatccgagcgtaagcccattaggcagccggattgcctctgttcataacggctcctcgctctttaccggtgatgcgggcggtggcgaaagtaacattcgtcgcttcatcattgaaaacgacatgttagatgctattgttcagttacctaataacctgttctataacaccggcattaccacttacatttgggtgttgaacaaccataaacctgaagcacgcaaaggcaaggtgcaactgattgatgccagcttgctataccgtaagttgcgtaagaacttgggtaacaaaaactgcgaatttgcacctgagcacattacggaaattaccgatacttacctcgcgtgtgtggacgttgaaagagcacttgatgcaaacaacgaccctatcggcattgctagcaaggtgttcagtaatgacgactttggctattacaaagtcactatcgagcgcccagaccgccgaagagccaagttcactcaagacgcaatagctccactgcgttttgataagcagctcagtgaagtgatggagtacgtgtacgcagagcacggcgaacatgtttacgaaaaaactggctatggttctgaccagaaaaagagcttcttgaaatccattgagaaggacattctttcttggtgtgaagataacgacatcagcctcaatgccaaagctaaggccaaactgcttgatgtgaaacactggctggcgcttaaagcattgcttgaaactgcacaaacgctgatggctgacatcggtagcaatgaatttgatgacttcaatagctttaaaacccaagttgataaatcgctaaaagcccatgctattaagctttcagcacctgagaaaaatggcatcctgaacgcggtgagctggtatgacgaaaccgccaagaaagtggttaaaaaggtggttaagttaagcggtgataaattaatcgacctgctggagcgctatgagtgtgaagtcgctgacnnnnnnnnnngtcgctga

SEQ ID NO: 279707 - DNA, 408 bp, Morganella morganii; identical to SEQ ID NO: 279270

SEQ ID NO: 279708 - DNA, 126 bp, Morganella morganii
atgcctttcctctccaccagcggcccggtgcaaatcattcaggcaatagcggccggccatatcccggcgcacattaataccatcgacaataatcagattgctcatcgttatctctccactcattaa

SEQ ID NO: 279709 - DNA, 534 bp, Morganella morganii
atgacaaaaaacgaattaattgaaaaagttggaagtataaaagaaatagaaagcaataatggaatagagcagtatttagtaaaaaatacaaacagcaagattaatgatttggatgtgtatagtgttggcgttgataacaagcatggactaacaaatgtttacatggttttcaatataaaaaacgatgaaagtggcactaagtctattgaaaaatataacatactgaaaaaagcattagtttcaaaatatggtgagcaatattctgaagaatatatgtggcgcggttacaataaagattttacatctttttctgattgtattattaatgtgcaatgcggtaagtatgaatcattatttggggatgataagggaggcagtattcagttgagacttctacctgactcatctggagaattttttaatatatttttattatataagtcaccggcaattaaattaataaaagaagaaatggaaaataactataacagtgaagtgcaaaataaagcacaggcattatctgattcgctatag

SEQ ID NO: 279710 - DNA, 315 bp, Morganella morganii
atgagcaaaagagacccacagttaaacattcgccttccaagcgaattaaagagccgattgcaagttattgccgagtacaataaaagatctgttaatgcagaggccgttgctgcgattgaaagggccgtcattgatgcagaaagggctatggttatcgatgataataatcaagtgattacactaaataaggctgactccgcacatttagcgtcacttatcggtcatgtaaaatcagttaatgatatagaaaacttactgaatgaagtaattgaaaaacttataaaattaaaaaaaatacatgggaaaggagaataa

SEQ ID NO: 279711 - DNA, 921 bp, Morganella morganii
atggtgattatagccaatattgaaaatactgacaattcagtcaagaatcttcccgcgatgcggtttaacggtttgccgatcataacaacagagttattagcccagctttatggtactgaaaccattcgtatccagcaaaaccacaaacgaaatgatgatcgattcatcgctggaaagcacttttttaagctggaaggtgttgagttatcagtgtttaaaaaagagttaaaggcactaactagcttaaagatagttagtggaaatacccgtcatctcatactatggacagaacgcggggcggcccgtcacgctaaaatgctcgaaacagatcaggcatgggacgtattcgaaaaactggaagatttctatttcagcaaaaaacagatgaatgacagcactccggttcatggttcaattacaggccatactgaaaaactggatcttctgcgctctgccgtaaacatgctggccgataaccgtggtatcagttaccaacgtgcatatagtttggtacataaacaatttggtgtcagacgcattgaagatatcgagccagaccgcctttctgatgcggtagcttattcatacaaagaagccattgaaggtgagtttgtcggcaaggaacaaccggtagccacattcagacgaaagctggcagaaaaagaacttaatgatctgatatgggtgtgggttgctgctaaacatatgttggatactctgacggaaacggaatctattctcaggaaagcagggtaccaatcggtagcaacggttcgcggaatgattcaggaatacccggcaacactcttggatgctgtggaatttctcagaaaagagtcggaccatatagttataaaatcggaaggttttgatgctcctggatggggacggatacttccggtaatcagatctttacactga

SEQ ID NO: 279712 - DNA, 285 bp, Morganella morganii
atgcttcgtatcaatgtactttttgacaggaaactaaaaaatactctacctgctggtattttcgacgcacttcatcgtgagattgaaaagcgtttatcccccaaatacccagagtctgatatacgaatatcctggggatcacaaacgatgctttcggtcgacggattaaagaaaggggataataaacaagatttggaattgcttatgcaggaaatttgggaggatgattcctggataccagaaatagaaaatgtttctgatgatgtagaatattttgataagtag

SEQ ID NO: 279713 - DNA, 189 bp, Morganella morganii
atgcgtgaagggcatgtgtgcggaacagtaaattcgaagaactcatatggtggttatgttggtaaaaagaaatacgtagtttacatcgaggttgatggcaatgaattgaaacatagcagcccagttaaaattgttcaggatgatgaccaagagggcttatacaactggaatctggtttgtaataaataa

SEQ ID NO: 279714 - DNA, 282 bp, Morganella morganii
atgacgaatacaaaaaacagcgtggacatcaacataggttgtaaaattaaagacgcgcgaatatctgccggaatgtccgggaatgaccttgccataaagattggtgtctcacagcaacaggtatcacgttatgaatccgggcaaacgccaatgaccataaacacggttataatgattgctcatgtgcttaatgtctctgtaaatgaattactgagtgattacctttcctcagagtacagtgacatcatgcttttaatgagcaatcgtaatacagaaaaatag

SEQ ID NO: 279715 - DNA, 1437 bp, Morganella morganii
gtggtgcgtaacggtgctgccggtgatcgcgaaagctaccgttatgatgcgggcagtcagcgtatcctgaaaactgccgtacagaaaaccggtaacagcacacagacacagcaggtgatctatctgccggggctggagctgcgaagcggaaaagaaaattatcaggtgatctgcgccggtgttgccgggcgggcacaggtacggctgctgcattggccggatggtaaaaaagatcatcagcggttcagttacgacaatctgatcggcagcagcggcctggaaacggatggcgacggtaacctgctgagtcaggaagaatattatccgttcggcggcacgtccgtgctggtggccggtgcggacagcggcattgactacaaaacccaccgttattccggcaaagagcgggatgcgaccgggctgtattactacggctaccgctattatcagccgtgggcagggcgctggctgagttcagatccggcgggaaccgttgacgggctgaatctgttccggatggtgaggaataatcctgtgacgttaagagatgatgacgggttaaaacctgttaataatatgccgccggcacctccgcttccggtctccggaggaacacctttaccgccgccacctcccgtgatgagcggagctccgttgcctccgcccccaatgccgggcggagcacaattacctccgccaccgccaacgatggcaggaggaaatccgccaccgccgccaatgatgggctcaaaaccaacaggagcaaaaaagaaatggactatcaaggaagaccctgcactgtataaacaacaaggcggagaatacccgtactattcatctttcagtatcactttgcagaaactgaatatcggccattacagtgaaattgatgatatggataaatttgtcagtgcatggagagataccggccgtaatatgaaacccgccgccagagatatcaatcatgagaaagccattgaggttcagtctgttatgggaaaaattgatgcggaatggtccgggtataataaagcaaatgtcagtgaaacatttcgtggtgatacgccggttattacaggaagttatccatggcttgccgattttattaaggaaaccggcaacagtgcggaggctgtgactaaagttatggattcggatattcggtctcagctgattatgtctacagcaaaagatccgggaatgggatatgtatcgaataaatcaattatgtggcattttgaactggaagaagggcatgccggtgtttctgaaggattgtatgcatcagaaggtgaggtgactttccctatctataacaaaatgaaggttacatcactgagttatattccggaaggacaatcttatatgaataatgcggaacggtttggtactgcacaccggtatattattaacgcaaaaatgttaccgaaatcataa

SEQ ID NO: 279716 - DNA, 465 bp, Morganella morganii; identical to SEQ ID NO: 279275

SEQ ID NO: 279717 - DNA, 597 bp, Morganella morganii
atgacaaaaatagaacttggtggtgtgttgggtaaaacatttggtaaaacacatcagcgtctggtcagtactacatcagaagctgttcgtgcattatgttgcactatccctagctttgagcagtttttaaataccagtaaatcacgcggcttaacttacgcagtatttcgcgggaaaaaaaatatcagtgaggatgaccttggttttccggtcacagatgatgtgattcgtattataccgatggtgatcggcagcaaacgcggtggcttgttccaaacaatatttggcgccgtgctggtggctgcttcagtgtggatggggccaggtggcatttctgcggcttttggtgctggcggaatggtcggttttatggccacaactggcgccgctgtaatgctgggcggcattatccagatgctgtccccgcagccaaacggtatagccatgaaagaccagggcgaaaataagccgtcctatgcgttcggtgcgccgacgaacactgtttctcagggctatccggtaccgatcggttacggtaaacgccgtatcggcggggccgttatctcagccggaatttacgtcgaagatcagcagtaa

SEQ ID NO: 279718 - DNA, 270 bp, Morganella morganii
gtggattatccctggtgggagcagggtgagaaccggtacgctgataactggcaggaggccggatttattcaggttgacgacccgcaacccggtgatgtgatagtgatgcaggtacaggcacctgtcgctaatcatgccggtattctgctgggtggtaacatgctgctgcatcatttgtacggatatctgagccagcgggtgccatatggcggttactggagggatcgcacagttatggtacttagacataatatagtcatgacaaaatga

SEQ ID NO: 279719 - DNA, 537 bp, Morganella morganii
atggccggatatgcaagcaaaacagcccctgagcacaaagacagttggcaaactccggagtggcttttcacggcattggatctggagttcggtttttatctggatgctgcagcgagtgatatcaatgcactttgttcccggtatctgactgagcaggatgacgcactcaaatcggagtggatcagccatggtgctatctggtgtaacccgccattcagcaatatccgtccgtgggtggaaaaagcagccgaacaatcccgcatgcaaaatcagcctgtcgtaatgctggtaccggaagatatgtctgttggctggtttctggaagcgttgaaaacggttgatgaaatacgggtcattaccggcggccgtatcaattttgttaaccccgtcaccggcgaggagaaaaagggtaacagcaagggctcaatgtttcttatctggcgtccgtttatcaccccgcgccgagtgctcaataccaccctgaaacaggagctggaagctatcgggaatcagtatctggcggaggtatctgcatga

SEQ ID NO: 279720 - DNA, 210 bp, Morganella morganii
atgagcactcaagcaattcccttattaaatgaccaattcgttgatatgaaatttataacccgcttaaccggattaactgataaatggttttataaattaatccaagatggagagtttccaaagccgataaaactggggcgtagttctcgttggttaaagagcgaagttgaaaattggttacaagcacgtattgccgaatccagagtctaa

SEQ ID NO: 279721 - DNA, 1137 bp, Morganella morganii
atgttaatatctttaactaacaagcctgataataacatagcaatattcagttttgacaaaaataattttaaattcaactctcggtcattatttgaatatatcattgataataaaaaagaagattttgaaataaaatatattataaatgatgatgccaaaaggaatgatctaataaaagaatatggtgattactttataacaacaaagtacaaagaagatataaaattaatatcccgagcaaaaatttggatcactgatggtggctttccgttaaaaacaccttttaatcataagaacagaatacttgtgaatttatggcatggaataccactaaaaaaagtgggcctaatgggttatagcggaattaataaactccgggtagcacttactctaaaaatgtttgcacggcattatacattattctcatcaacatctgataatcttgcagagatatattcaaaaagcttcttaattaagaattctgtcataaaaacgatggggcaaccacgaaatgataagctttttgaggaaccaaagaatttaagttactttattaaggatattccggagtataaaaaaattatactgtatgctccgacatggcgggcaggaatttatggtaaaagctggatcggggaagatacccaatttttcccatttgaagatttttcccagactcagttagagcaatttcttgaggaaaaccaatatttattattattacgtcctcatcatcttcaaaaaataaatatttcagaatcaaaatggatacgctctttcagttctgatgagtgtgaagagattatggatgttatgccccattttgatcttttaatcaccgattattccagtatatattttgatttcctattattaaataaaccaattatatttctcccatatgatattgaaacatatcaaagccaggtaggactgaatttcgactacaacttttccactccgggtcctaagccaaaaactcaaaatgagtttattcatgaaatacatcagtctctaactaataatgaatatttcctggaaaaaagagaacttattaataattactttaatcaagttaaatatggtagcagcaagcttatctacgactatattgtaaataaccttagaaataaataa

SEQ ID NO: 279722 - DNA, 324 bp, Morganella morganii; identical to SEQ ID NO: 277755

SEQ ID NO: 279723 - DNA, 579 bp, Morganella morganii
atgaaagcagaaattatcgaagtccgcaactacatggtcacggaaacaactgcacttgcagagaaactggacgcggtacaggttaaagctgaagacggtctggcgctggcgcagaactccatccgcgcacagtgggatatggcatctggtcaggcatcggtggtccacgatatgaaagtccggatccgttataacggtgaggattattccgccggtatggtgatcggggctgagctgaaaggtggtcaggtgaacacccttatcggttttaacgctcagcagtttgcgttttataatccggtgaaaaaatcgatggatctgttcatgtacatgaaggacggccaggtctttatgcgtgaggcattcattaatcaggcatggctcaacagcgtggttgtcactgacaaaatgcagtcggagaactatgtgccgggtaaacagggttttattctggatgcaaaaatgaataaatttgaaatgaattcgaatgatggaagtggtggattaacttttgatggttcaggtctttatttacgtgacgaacatggaaatcttaaaatagaaatagctctgaaatag

SEQ ID NO: 279724 - DNA, 288 bp, Morganella morganii
atgtttgtgtcccacgaattaagtgaaatgaagcaaaaaataatggctttggaaaatgagatgaaattaaatattgccgccagcaatttcatcttccatcacataatcgaaaccattaataccaaataccctgacagtgatttcatcgagtcactaaaaaagaatattgaaaatgacatccagaaaatcactaatccaacccataacctgaagaaagcaattaacaccttacttcaagatcctgtacgtcagatgtgcaaacccaaagatgagcctttcataaagtaa

SEQ ID NO: 279725 - DNA, 195 bp, Morganella morganii
atgttaaaacagagtgatatgacaacagcagcggcttgtttttttgaggtgttaccggacggggttttctctgtcagtgatgcggctgccttgtcaggactctccctgccgcgttgccaactgcttcttactcagttcagccttgccggtcttttgaaagactgcggcaacggtgaacgatttaaacgactttaa

SEQ ID NO: 279726 - DNA, 492 bp, Morganella morganii
atgccatatcagagatattttcatggcggcttgattcagcaaggacaattacaggcaggaaaacgaggtattgcaggccatcttggccataccattgctgatcctcatggccctatttgcggctgtggtcgttatggatgtgtcgaagctatcgcttccggccgtgccattgcttcacaagctgtaaatgaacttgcagggaaagatgcgaaagctatttttgctgcctatcaccagggaagccttcaggcgaagacaataattgaaaactcagcaaatactatagctaatttagttgctgatattaaagcaacaatagatgccgactgtgttgttcttggtggaagtatcgggttagcaaacggatatattgagctcgttcaaacagctatcagacaacaaccggaggcattacaggtgcctattttagcagctcactatcatcatgatgccggactttggggtgcggctctctgggccagagtaaactaa

SEQ ID NO: 279727 - DNA, 342 bp, Morganella morganii
atggctaagaattatcagcagcagggaatgaccatcgcgattgttaacagcggaaccaaacccgttaccagcggttcactggtacaggttggctcactggccgcggtggcaattacagacattgccgccggtgcaaccggtgacggatttgccgaaggggttttccggctgcctaaaaaaaacgggctggtgcttaaagcgggggcggcggcttccgttaaagacggtcagctggtggataccggcggcgtggtgatcggcgtagcctgggaggatgcggctgccggtgacgcagatgccgctgtgaagattaacgtcttcccgccggcggcacagggataa

SEQ ID NO: 279728 - DNA, 279 bp, Morganella morganii
atgaccccgtttcagcagatgaagttccggatggatgcactgacagcggaaaaaatgggggaagtcatttatctgaatgatcagcctgtctgtgctgttgagtttcattttcttccggaaatgggaccggtcagcggtgacggggtcagttacgtgattttcaccccggaggtcaccgcccgccggaatgacagggtcgttatcagcaatgcggagtacaccgtaacccgtgctctgcgctataacggcaagccccatatttttatcgagagtgaataa

SEQ ID NO: 279729 - DNA, 894 bp, Morganella morganii
ttgctggcaaataaagcggcagtactggctcagcatgagaaactggcgctgctgggtgatgaggttgttgcccaggaacgcctgaataagcttcaggaccaggctgacaaatatattaaacagcagattgaaaaaagaaacgctatccgtgacagtatcggcaaatcctccagggaggtacagaaatcactggaaattgcccagctcaattcggcatatgaaggaacattagatcacggaagggtattggctgacctcgagaaaaactatgcagcagaggaagaaaagcgggctgactggcttggtggtgcacagactgcgtggggggattaccgtgatgccgcactggattcaaatgcgcagatccagaatgccaccatggctgcactgaacggattttcaactgaactgacctctgtgctgacaaccggtaaagctaatttccgtgagttcaccacgtcgatactgaaaatgctgacagaaatttttgttaaaaaatcgattgttatgggaatggatgcgatggggtttaattttaccccaaatgccaaagggggcgtttatagctctccgtcactgagtgcgtacagtggccaggtggtacataccccgacaatgtttgcctttgcaaaaggtgctggtgttatgggggaagccggaccagaggggatttttccgcttcgtcgtggtcttgatggtaaacttggggtagtggctaaaatggctggtggaggtggtgaacctcttattcaaaataattatttcactattaataatgatggtagtaacgggcagatggggccgcaggcgacacagacgatcctgaaactggttgagcaaaaaacaaagcaggttcttgcatctgagcgtcgtcccggcggggcaatggggtaa

SEQ ID NO: 279730 - DNA, 891 bp, Morganella morganii
ttgctggcaaataaagcggcagtactggctcagcatgaaaaactggcgttgctgggtgatgaggttgttgcccaggaacgcctgaataaacttcaggatcaggctgataaatatgttaaacagcagactgaaaagcaaaatgcaatccgcgatactatcggcaaatcttcgcgcgaagcgcagcaggctctggagaggtcgcaaatcctctccgctcatcaggacaatccgcggctgaatgaaatgctggcggctcaggcagcaacgtatgcagcggaagaggaaaagcgagctaactggctggccggagcacaaaccgcctggggggattaccgtgatgccgcactggattcaaatgcgcagatccagaatgcgactatggcggcactgaacggattctcaactgagctgacatctgttctgacaaccggtaaggctaacttccgagaattcaccacatctatactgaaaatgctgacagagatttttgttaaaaaatcgattgttatgggaatggatgcgatggggtttaattttaccccaaatgccaaagggggcgtttatagctctccgtcactgagtgcgtacagtggccaggtggtacataccccgacaatgtttgcctttgcaaaaggtgctggtgttatgggggaagccggaccagaggggatttttccgctgcgccgtggtctggacggaaaactgggtgtagtggcgaaaatggctggtggaggtgatggtgtagttcagcattttaatatcaccattcaaaatgacggcagcaacgggcagatgggcccgcaggcgacacagcaaatcctgaagctggttgagcaaaaaaccaagcaggttattgcatctgaacgtcgtccgggcggagcaatggggtaa

SEQ ID NO: 279731 - DNA, 261 bp, Morganella morganii
atggatttacagggggtactgatcccgacgcggcaactgcatgcaatgtgcacctggtgcatacgcggcaaatacaaatccggtgacggttgtgattatgccgggcagaacgggtattttgacaaacacggcaaccgcgtggatgacctggcacaggatcagtgcagcggcatgctgaataccggctgctttccccgtttcgggaaaaataatccgattccgttcggcggctttccgggaacctcattactgaggaaataa

SEQ ID NO: 279732 - DNA, 135 bp, Morganella morganii; identical to SEQ ID NO: 34870

SEQ ID NO: 279733 - DNA, 336 bp, Morganella morganii
atgattgaaattttcacctggtgtccccgtgttaatcccacggaggacatcacctataaaacccgcagggcgaagttcggtgatggttatgagcaggtgtccggtgacggtattaacgcccgcagccagaagtggtcactggaatttaccggtcgcggggagtatatcgcagctatccgtcagtttatcgaccgtcacggcggtataaaggcttttcagtggaaacccccgcttgagccggtcggtctgtaccggtgcgacgagcataagctcaccccgctcggtggtgataactattcactttctctcacttttacccaagcatttaaaccatga

SEQ ID NO: 279734 - DNA, 336 bp, Morganella morganii
atgatcgaaacattcacctggtgtccccgtgttaatcccacggaggacatcacctataaaatccgcagggcgaagttcggtgatggttatgagcaggtatccggtgacggtatcaacgcccgcagccagaagtggtcactggaatttaccggtcgcggggagtacatcacggctatccgtcagtttatcgaccgtcacggcggcataaaggcttttcagtggaaacccccgcttgaacctgtggggttataccggtgcgccgagcataaacttaccccgctcggcggtgacaactattcactttctctcacttttacccaggcatttaaaccatga

SEQ ID NO: 279735 - DNA, 477 bp, Morganella morganii
atgggggcccaagttgcctttgaaactgctattcaattagaaaaaaatggctgggaattatctggactaatattatcaggctgccaagctcctcatattcaagcaaggagattactgagtgatttaaatgatgatgactttattaaacaattaattgccattggtggatgtgatgctgaattaatcaagcagccacagttgttaaaacagtttatgccattattacgtgctgatttccttgctaccgagcgttatttttttcaaaaaagcactaaacggctttttcatacccctgttttattaatgtatggtagtcatgatagtgaagctgataaaagcgaagttgaagcatggcaagattggatagataagcattgtattattaattgcatcgctggagatcacttttatccaattacacgtccaaatactttttgtcgttttattattgatttttatcaccaaatttatcaatga

SEQ ID NO: 279736 - DNA, 180 bp, Morganella morganii
atgttcacgataaatcatcaaaccaacaggattagtcctgttaggacaaagaagttcagtgagttgggttttactgagcgcaagcatcttcaggaatggttggcacacgagccttccgcactgggtgaagagctgctgattattcaaaaggagttcgatggctttgatgatttatcgtga

SEQ ID NO: 279737 - DNA, 207 bp, Morganella morganii
atgttttttgctatgaaaatgggttacccaagttatgaagagcaaaatgaaattatggcatatctacaagaacagactaagagaatagacttggcactagattctcggctggcgcaaatagaaaagctcaaagaatacaaaaccacccttatcaacaacgccgtgacaggaaaaatcaagatcaccccagaaatggttgagcaatag

SEQ ID NO: 279738 - DNA, 261 bp, Morganella morganii
atggatttgcagggggtgttgatcccgacgcggcaactgcatgcaatgtgcacctggtgcatacgcggcaaatacaaatccggtgacggttgtgattatgccgggcagaacgggtattttgacaaacacggcaaccgcgtggatgacctggcacaggatcagtgcagcggcatgctgaataccggctgctttccccgtttcgggaaaaataatccgattccgttcggcggctttccgggaacctcattactgaggaaataa

SEQ ID NO: 279739 - DNA, 285 bp, Morganella morganii
atgctccgtattgaagttattttcagcagcaaccaaaaagagatggtgcctcctggcacatttgaagcactggaaaaggaaatagaccgaaagctacgggctcagtatccggatatgaacgtccgtattgcgtggggaaccaatgcggcaatgtcagtaaccggcgggaaaaatgataaagataataaaaaaataaaagagatactgcaggagattttcgaggatggcaactgggtgcctgaaatggaaggcgcctctgatgatgtggaatattttgataaatag

SEQ ID NO: 279740 - DNA, 1194 bp, Morganella morganii
atgtccataataagtcttaaaagatcacctaagaaaacagatgcgcactggagtggcgtgtttgccatgacgctctgcgtttttgtactaatcgcttccgaatttatgccggtcagcctactgacgcctattgccagcgagctgcacatcacggaaggcctggcaggccaaggaattgcaatatctggcgcgctggcggtactgaccagcctgactatctcccatatcgccggagatttgaatcgtaaatatcttctgctggggctaaccgtcctgatggccatatctggattggttatcgccatggcacccggctatccggtttatatgctggggagagccctgattggcgtcgccataggtggattctggtcactctcagctgcaaccgccattcggctcgtgccgcagcatcaggttccccgtgcactggcgatttttaatggcgggaacgcgctggctaccgttgtggctgcgccacttggtagctatctggggacaactgtcggctggcgtggggcctttttatgtatcgtccccctggcgatagccgcgtttatctggcaatgggtcagcctgcccactatggaaagcgataaaaaacaaaagccacagggaactctgcttcgtctgttcagagacgccattgtactaacaggactgctggcctgcggtctcttctttattgggcagtttgccttatttacctatgtgcgcccctttcttgagaccgtgaccgacgtaggtcctgccgggctctctctgattttgctcgcaataggcgcagcaggttttgtcggcacattagccgtatcgacattcctgaatgcctggttgtatcaaatattaataatgatccctctgcttatggcaacggtagccggtacattattgctgttcggacacagcatctgggcggttaccgttttactaagcctgtgggggttactggccacggctgcaccaacgggatggtggacatggattgcacgggcgctgcccgaagatgctgaggcgggtggcggtctcatggttgcggtgatccagctttcgattgcacttggttcaacggcaggaggagtggtattcgacagtctgggatggcaaagtgctttcggcctgagtgggttattactgctgggggcggcagcgattacttacgtcacatatcttcaaaacagtaaagcgcactag

SEQ ID NO: 279741 - DNA, 1059 bp, Morganella morganii
atgagttatgcagatacaactaatccgaacgcgcctgtttccctggtcgaaaaatgggataaaacattcccagaaagcacgaaagtggatcaccgtaaagtgacctttcagaaccgttacgggatcactttagtgggggatctctacatccctaaggatcgtagtgagcgtaagctggcggccattgccattagtgggcctttcggcgcagtgaaagagcaatccagcggcctgtatgcacaaacgctggctgaacaggggtttattaccctggcgtttgacccttcgtatacgggagaaagcggtggctctccacgtaatgtcgcctctccggatattaatacagaggattttagcgcggcagttgacttcttaggtctgcaaaaagaggtggatcgcaatcgtatcgggctgctcggtatttgcggttggggcggcatggccttaaacgacgccgcaatggatacccgtgtgaaagcggtggcgaccagcgtgatgtatgacatgagccgtgcgatggggcatggtgtgggtgatggtaaagaccgctattccactaaagatcgtcgcaccgtactacagcatctgaacgcacagcgttggaaggatgcggaaaatggcacttacgcacccggcggccatgacattaatgttgatgagaaaggtaacgtcagtgcatcggatcgtgttttgccggaaacgttacctgccaatcctcatgctgttttgaaagagttctttgattattatcgcatgccgcgtggtttccatgtgcgttcggtcaattcaaccggggcctggaatgcgacgatgccgctgtcatttatgaatatgccgttgctgagttacgccaatgaagtcactatccctacacttattgtgaccggcgaaaaggcccactcacgctattttgctgaagatgcctttaaggccattggcagtaaagagaaagagctggtgattgtttcgggggcaaaccacgttgatttgtacgataacgttgcgggcaagatcccgttcgctaaatttgagcagtttttcaaagctaacttaagataa

SEQ ID NO: 279742 - DNA, 885 bp, Morganella morganii
atggcgaaacgggaaaactataacgatttgtacctgttcatgcaggtggtacgggaagggagctttacagccgcagcacatcgccttggcctggcacaatcaggaataagtcgttcagtacgggaacttgaagaacgactgggtgttcagctcctggtacgcaccacgcgcagattatcgctcacccatgctggtgaaaagctctaccggaccattgaagcaggattcgacgctttagatatggggctggacacgctggctcattatcgccagtccccatcggggacggtacgcatcaatgccagtcagcatgctattgataaattgcttctgccaaagcttgcggtgtttaagaagagctacccggatatccgacttgaacttattagcgaaagccgatttgtcgatattattgccgagaggtttgatgcgggtgttcgcctggggcctgaagtaggtagtggcatggttgctgtgcgtatttcccctgacatggagatggctgttgtcggcacgcctgatcattttcgtcgctatggctttccgcaagcccccgcagatttagcggttcatccctgcatcgcttatcagtttggcgacgggaaactgtactcgtgggaacttcaccataacggtaaaaaaatcacccatcggccgcaggggcagtggattttcgctgacagctatatggaggccaaagcagccaggctgggcctgggattggcttatgttcccgaagagttggtatctgatgatttagaacagggttcgctcatcagagttttacaacgttacagccaacgcctggaaggctcatttctatattatccgcaccgcaatgtgtcgcctgctctgcgagcagttatcgatacgttgagaatttag

SEQ ID NO: 279743 - DNA, 1143 bp, Morganella morganii
atgctgatctaccgggtgatttttgaacggaaaagcagggcgattaatatctgctttttctttaatgcgctgggctccgggttactgatgccgctggcattactttactttgccgggaaaacactcagtgaaaaagaaattctgtatctcggcacgataaagttctggtcattttcactggcctatttttttattattccgctgataagccggtttgacagtaaaaaaaccattgttttttcactattacttaaattactgtcactgtcgtttttgtttatcggacaaacattttatctgtgtcttgtggtgatgctggcaaacggtattgccacctccgtattttcagtagcagcaaaatactatattaaagccacctcggaaaatatcagcgaaagcttttcagtacggatgacgctgaataataccggtgctgcggttgcaccagtactcattacactgtgtgtctttttttcactgccttttacgtacgcattactgattctgactacgatttttatgattggcattctcttttcagtaaagctgcattcttgtcccggtgaaacgaaaaaccacttttattaccttcatttttctgatcttaccggcagagacaccgttctgatctctgtgctcagcattatttttgccatgctgtattacagttttgaggtcattgtaccgctggaacttatccggtccggctctgagtatctgatagggccggttttgctgtttaatacgttggttattatcgccgggcaaatcccggtataccgctacttcacggaaatgtggggtattattaccgcacttatggcggcaaccggtttgtgcatttttctgtttattccgtggttctccggtattgcagaacttcccggtctgttactgatagtgctgggtgtcacactgctggaaatgttttacggtgcgggtatcgataccctgatcacactggcggattcgccccggaaaattgcagtactcgatggtatctccggtatttcactggcaattggtgcggcaatgacagcagcggtttacagcgattcgatactgtttttgccgctggttattgcgctgtatctggttgtcgccggtatactggcatcgcgaaagggagtgggttaccagtga

SEQ ID NO: 279744 - DNA, 318 bp, Morganella morganii
atgaaaaaaaataaatctgattctaaaatgtatatttatgataccaataccgatacggtgaatatccctgagcagcaggcatttgccagtgtcgcttccctgggtatttccggtgacggcaagaccgttatcggcattgcagacgaaaaagctttccgctttagcggacaggacagtattacattattagatccgtcagaaaccgcaacatccaccgcaaacggcgttaattatgacggcagtgtaattgtcggccgatttatcagcggcagcggtcaggctccggtgataaaggcatggtttcactgggcacactga

SEQ ID NO: 279745 - DNA, 990 bp, Morganella morganii
atgcagtattccaaaaatatacgattagatcccccctcactaccaaaaggtggtggtgctatcaccaacattggggggaagataggcgctgtcgggcctgatggcgcagcgacactctcattgcctctgccgattacagcaggaagaggctattctccttctattagcctcaattacagtaatcaggcaggcaacgggccttttggtatcggctggtttattggactaccttcgattagccgccgcactcatatcggggttccaacctatggacctgcggatgagtttgttgcgcctgatggtgaggtgttagtacctttatcagatgacaaagctaatcttgttgttgaatccagggagactctgttagaaacaactctgaatactactttcaatgtaacgacttaccgttccagagtagagcatgattttagccgttttgaatattggcaacctgaagagggtgaaaatgcaaatgatttttgggtatgttacagccctgatggccaggcccatttgctgggctatgaatcacaagcacgggcagaagcctctgccgataatactcatacagcacaatggttacttaatgcgtctgtatctgcaaccggcgaacaaatttggtatttatggcaatcggaaaacgacgataattgcagttttgaagaaaaaagtgcgcacacaaacgcgactgctcagcgttacttaagcgaagtctattacggtaatctgaaggccggacgcacgtttccctgtttaaacgggcaagatgcacttaacgctggttggctgtttattctcatctttgactatggaacacgcagcaccaccgtcactgacgttcccggatttaccgcttctgcgcaatggccttgtcgccgggactgcttctctgactatagttatggttccgatcttcgtacccggcgactatgccgccaaattctgattgaatcgccacggataatccagacacttctgagccgttga

SEQ ID NO: 279746 - DNA, 1557 bp, Morganella morganii
atggctaaaagaaaattcggggagtcgatccagcgctttggccggacactgctcctgccaatcggggttctggctccgataggtatgattctggggatcagtggtgcattagtgcagacctacatgattgccaggttccctttcctcggaaatgaaacagttaacgcactgcttgtcagcatccgctctattgccggcgttatttttgacaacattccgctgctctttgctatgggggttgcctacgggatgagccagcgtgataaggggatagcggtctttgcctctgtggtggggtatttgtcgctgattatcaccatgaatatctggctggtactcaccggtaaactggctgatccggccattatgggacaggtggggcaaattaaggttctggggatccagaccttaaatatcagtgccgccggggggatcatcaccggtttaattgctgcctgggcaacggataagttctataaccttgaactgccgactgccttcgccttcttctccggtaaaaaatccgtttccatcatcatggtcggcctgatgattatggtcggcgcgacactgccgtttatctgggaagtgctggttcaggggctgatgaagctctctgctgtcttcctcagccctgtcggtccgttctttacggcgggcggtgagcgtctgtttattccgttcggcctgcaccacgtctggaacgtgctgttcagatttaccgaagcgggcggtacttatgtcatcgacggtcaaacctatgtcggtgttgttccggcgctgaccgaagtgttattcaaacagggaccgggaaccgaatactgggcgatgatgccaagtctgacgcgctttatggcgcagcagcaaatgctggtcacgctgttcctgttcccggcaatcgcattagctatctataaaacatcgaagaaagagaaccgcgcggaagtgaaatccatgctggtgacgatggtactgactgccatgctcggtaacgttacggaaccgcttgaatttaccttcgtatttatcgcaccgctgctgtatttaatttatgccatcatcgtgggtattggtgcggtattgctgtcattcgcaggcgttgcgattggttatatccgcggaaccatcttcgatttcacgattttcggcctgctgtacgagcgtacgaactggatattcctggtactcatcggtaccggtctggcggtggtgacgttctttatcttccgctgggctatcctccggtttgatattaaaacgccgggccgtgaagaatccagcaatctgaaaaatacgttaattaaagaaaaacgttatggtgaaattgcggaaattcttatcggggcgttaggcggaaaacaaaatatccgtaacgttgataactgtattacccgtatgcgtatcgatatcgcagaagtgaataagattgataaagagttaatgtcggaatcaggatgtactgcattcttctttccatcggcaaaccacgtccatgttgtttacggaccgaaggttgaatttgtccgcaatgctgttgatgaagcaatgaagaaataa

SEQ ID NO: 279747 - DNA, 225 bp, Morganella morganii
atggcaggtaaaaatcagcacgtagttaaaagaaatgacggttgggctgtgcttggtgaaaagaactccagagatacttcacatcatcgcacgcagcaggaagctttcgaagctgcgcgtgatatagcaaagaatcaaaggagtgaggttttcattcatggtgaaaatgggaaaatccgtgagcggaatacttacggtaatgatccttttccaccaaaaggctaa

SEQ ID NO: 279748 - DNA, 1659 bp, Morganella morganii
ttgagtacgttaataaaagtacctgcgctttccggcagggcggaaaattggcaccagattaactggcgtcaggtacaccgtcaggtcagagggctacagatacgaatcgcaaaggcaacggagcagaagcgctggcgtagggtgaaagccctgcaaaggatgctgacgcgctcgtttgcagctaaagcactggctgtcaggcgagttaccgaaaatcgaggcaaaaagacagccggagtggatcgccagttgtggaacactcccggaagtaagtggcaggcgataggtcagctaaaacggacgggttacaaaccgtctccgttaaggcgtgtttacattcccaagagcaacggcaaacgccgtcctctgggtataccgacgatgaaagacagagcgatgcaggcgttacacctgctggcacttgaccccgtctcggaaacaacggccgaccgcaacagctatggcttccgtccggcacgttcggcggcagatgcgattgagcagtgttttgttaatctcagtcgtaaaagctctgctgaatgggtactggaaggcgatataaaagggtgttttgacaatatcagccatgactggttacttgccaacattccgttggacaaacaggtgctcgggaaatggcttaaagcgggattcatggaatccggtcggttatacccgacggaggctggtacaccacaggggggcattatttcccctgtactggcgaatatggcactggatgggctggaagcggtgttagaaacccattttgggaagaaaaacaccaaagccagttacaaaaccaaggtcaattatgtgcgttacgtagatgattttatcattacggggatctctaaagagttgctggaagatgaagtcaaacccctcgttgaagcctttatggcggaacgggggctgcaattatcacccgaaaaaacggtgataacgcatatttccgaagggtttgattttctggggcagaacgtgcgcaagtaccatggcaaaatgctgataaagcccgctgccaagggactgcgtaatcatcttcagaaaatccggcaaatagtgaaacgaaatgcggcgtcaaaacagggtgacctgataaggcaacttaatccggtactgcggggttgggcaaattatcatcgtcatattgtcgccaaagagacgtttagctatatcgactttcgcgtctggaagttgctctggcgctggtcatgccgtcggcacggtaatcgcaacaagtactgggtgaaacggaagtattttcactctgtaagtagcgaaaactgggtattccagagtatcgatgcggataatggcctgcaaaggttagtctcctgcaaagatatccctataaaacgtcacattaaaatcaggtctgaggctaatccatatgatccggttgacgagttgtacttcgaacagcggcaggttaagcgctggaaagaaggtaaaatgcagcgaggaaaactgagattaatttgggagcgacaaggccatcggtgtccgatctgccaccagatattcagagataatgatgattgggatgtccatcacattatcagacgagtagacggtggtggtgatgaaatcgataatttaatgatgctgcatcctaactgccatcggttgatccataaccatgaagtggattag

SEQ ID NO: 279749 - DNA, 948 bp, Morganella morganii
atgaataaattaatgatacgcggggcggcactgttttttctgctgatagtgtcgcagggagccaatgcgattggttgggtgggcgcatctcttccttgtgtctctggcggtaagaatgtttttaaatctagtatttgtgactggaacccgaataccggtgcctattacgggaatggtcaaacaattagttttctgatggctaagggagggaatgccggggacggcaaagctttcgtccctaaaagtggctactacgcgacgaaggtttactggtgtgcttatcctgaaaatatggatacctgtagtaaagcaaaaggctcaatcatactggtcggggacagagtctggctggaacaatccaaatcgtttgatgagcagaaaatctataataacgatcaaaccaaaaaagcaccttctgctggtggttattgtttcactatagaagatacggaaacaggttacgaataccggggagatatgggatatggtccggatagccgcggtaaattctgcggagatgcacaccggttacccgtcgaaccaccaaaatgtactctgaatggcggtacggatttagatattcagctgggaaaattagaacgtacagatattgcagtaaaatccggtacaacaaccccggtgacaaaagatatttccattaaatgtgacggtaatatggtttacaacgctaatatgaaactggatttcacgccggttactgtcagcaatgaggaagtcgtcagtacgtcaaccaccggtctgggtgttgccgtgttatataacggaaaagccgtccggccgggagagacttttccgctgagttatcaacccggtattcataccctgacgctgggatttgaagcagtgcgtgacccggccgttgcagcgacagatctgaaaaccggtgactttacggcgaatgctgttttggttttcacggagcagtaa

SEQ ID NO: 279750 - DNA, 558 bp, Morganella morganii
atggcgcgcatcacacgccccctcactaacaacgaaatccttaaagccaaacctcgggaaaaagacttcacccttcatgatggtgacggcctgttcttactcgtcaaaacctctggtaaaaaactttggcgcttccgctatcagcgcccggtcagtagcagccgaaccaatttgagcctcggctcataccctgcacttactctcgcagcagctcgtcagatacgcgaccagcacttaaccacactcgcgcaaggtatggatccgcaacagcaacaagagcaagcttcagaacaacgccagattgagctggatagcattttctcaactgtggccgccaactggttcaaaatgaagagcaaaagcgtcactgaggactacgcgaaagatatttggcgctctttagataaagatgtgttccccgcaataggaacgatacctgttcaggaggttaaggccagaacgattgttgaagcattggagccaatcaaagcgcgtggtgcattagagacagttcgccgcctagtacaacgtattaacgaaatcatgatctacgcatga

SEQ ID NO: 279751 - DNA, 657 bp, Morganella morganii
atgatctacgccgtcaacactggcctgattgatgcaaacccggcatctggtgtcggaatggcattcgagaaaccgaaaaagcaaaacatgccgacgcttcgaccagaagaattgccaaaacttatgcgcgcactggttatgtccaatctgtctgtatcgactcgctgccttattaactggcagctcctgactcttgtacgtccgtctgaggcctctggtgcaaaatggtcagagatcgatctcgactcaaaactctggacgattccagccgagcggatgaaggctaagcgagagcatattgtccctctaactcctcaggcattagagattctagaagtgatgaagccaatcagtgctcatcgtgagcatattttcccaagcaggaatgatccaaagcaatcgatgaatagccagactgccaatgccgctttaaaacgtattggatatggtggtaagttagtcgctcatggcctgcgtgcaatcgcgagcacagcgcttaatgaacatggatttaacgccgatgtgatcgaagcagctctcgcacatagtgataaaaatgagatcagaagagcttataataggtcgacttatcttgaacaccgagttgacttgatgacgtggtggggatgtttttgcgaaaataaaaatggaaactga

SEQ ID NO: 279752 - DNA, 1155 bp, Morganella morganii
atgaacaatgatattctaacagcatttaaagcttcagatttggttgataaaaacatcaacttccttattggatctggcgcatcggcaggatacataccaactttatggataaaagatgatacatcatatgaagatatattgactgacactaaatataaagaaattgagaatgttatatatcactcttattataatgatattttatctaaaagtttctgcatccctccatccaatttgaaagaaaagttaaaattcagaaagactttcgtaaattacttacgctttatcaaaaatctttcttccttggttgataaaaaaagctccaatcaaattcgaagagcaaacatcttcacaactaattatgacctttttttagaaaaatcatctgacttactattaaaaaacaatactggatttatatttaatgatggcggaagaggtcttcatacacgccacctaagtatcagcaacttccacacatcaacctggcatcagggtacaaatgatctttataaatttgaaatccctacaatcaatcttataaagatgcatggatccatatcttggaataaagttaatgaagatactattagcatacgttatctcgacaacctccctgatgagctatctattgaaacagatcattacttagatataacagaaacgatagaaaaggtggatgaattatatttttttgatggtgccaaaagcgctattgagctttcccaagatgacgaagaaaaattacaacgatttagaaaagaatatgacaaactagcaattgtcaatccaacaaaagcaaaatttgaagaaactgttttccagcaacattattatcaatcattacgactattaagttatgagctcgaaaaaccgcaaacagtattaatttgctttggattttcctttaaagatgaacacataagagaaatcatccaaagatctctgagcaatccctctcttataatctatatattttgctatagattaaaagacaaagagagcataaaaaaaacaatcaatagcaagaaaattgttttcgtatcccctaattcttacacagatgaaaataatatagatttcaaaaaattcatttcatgcatattttcaagaaataatggagcagcattgcgggggttgacatgcaatttgtaa

SEQ ID NO: 279753 - DNA, 1776 bp, Morganella morganii
atgcaatttgtaataggagccgtaacttctgttaaaggaacatcagtcagggccctgattaaccctaacctttatcaaaccacatatattcacgatggtaaattatatcgcggagtatctatcaatgaatacattgtaataaaaaaagggtatcatgagatagttggtaaaattgaaggggaagaaataattgaaaaaaaatattataatcaagagcaatctaacgcggataaatatgatagattcatcgatcttaaaattattgggtatgtgcaagacaataatttccaaccaggaataaaatacctcccaatgattcaagacggcctttacctggcttcggacacattaataagtgccatctacacattcagcggtaaaattgactcaaaatcaatcgaaataggtaaatccttgttggaggatatacctattagaatacctataaatgggatattcaattcccatctcggtattttcggcaacacaggtagcggcaaatcgaacacccttgccaagctatatatagagctattcaactcgtttaaagataaaatttttgctagttcgagatttatgtttatcgattttaacggtgaatataggactatgcataattcatttattgattgcagttcatatgtagaacttgacacacatattcctgatggaaaagataaattatttttaaagcaatcagagttctgggatgcagaattactttcagtattattctctgcaactgaaaagactcaaaaaccattcttaaatatattaacaagaaatagaattgagtatggggaagagcttaatgattattttcagagaaccttgcagatcatgtttggtcaaaaccagcatagagaaacaataagtgttttgcgtagtatcataagaatcatcaatccagataacgaggaaggcataaactctgaacttgcagcattcagttggttctcgcgaggcgaaagcaacaaatactatttaggcgctaattttccaaatacgccagatgagtatttggcacatacacctatactcagaagtacctcgataaactccgagcaactttcagcatttgaacaattatcagtacgcgcaacattgcaacttatacagtcagtatcaagaaattatgttcaatatgaacacataagccctttaatcggaaaaataaatgcatctgcaaaatcccttgaaaaagtcatcaaaataattgcagatgttgaaattcggcctacaccattaacattcatatcactaaaaaactgtaatcaagacataaagaaaacaataccgatgatgattgcgaagtgttctttcttagaacacaagcgagttgaagaaaaagaaaagagctttcatttaattattgatgaagcgcataatatcctttctgaaagctcagtcagagagtctgaaacatggaaggattacagacttgagctattcgaggaaataattaaagaaggccgtaaatttggtttttttataaccatttccagccagcggccagctgatatatctccgaccattgtatctcaaatacataattatttcctacatcgcttagttaacgacaacgatatttttctgttaaaaaattctttaaacaacctcgatagttcttctcgatccctaattccgtcactgccttcaggtgcgtgtgtactgtctggtacggccttccacactcctgtagtaatacagattgagagactatcaaaagagctagccccggagagcgataccattgatttggatgcaaattggtaa

SEQ ID NO: 279754 - DNA, 273 bp, Morganella morganii
atggcacttaaatgtcccgaatgcggcacggttgcacatgccagaaccgccgcctatgaagcgccgtcggttaaacgctcatggtatcagtgtcagaatctggaatgttcctgcacgtttacggcactggagagtgtggacaggataattatgaaaccccggcgcaatgaacaggaatcagacaaagcacaaatgccggaaaaacaacagcaaactctcaatcgctatggctccgcgtcaaagctgtcaagccgtcagcaaattcctgtctga

SEQ ID NO: 279755 - DNA, 267 bp, Morganella morganii
atgcgcaaaacccgatttactgaacatcagattatcgccgttctgaagtccgttgaagccggacgtacagtcaaagatgtctgccgtgaagccggtatatccgaagccagctactacaactggaaagccaaatacggcgggatggaagcgtctgatattaaaaaattaaaagatcttgaggaagaaaaccggcgtttaaaacagatgtttgctgacctgagtcttgagtgccgggcactgaaggatgttatcgaaaaaaagctttaa

SEQ ID NO: 279756 - DNA, 138 bp, Morganella morganii
atgatcagcctgcggagcaaagcagacagagtcttatacgggaaagcgggaaaaacagagcggatgtggcggaacgtgcggaggtatgcggttcagaatacaccggctgacattagcggtgtggtgcgtcacgggtga

SEQ ID NO: 279757 - DNA, 1668 bp, Morganella morganii
atgacatttacactgaaaaccacagcctgtgcgctggcggtatccgcaatgctttttccggcgctggcgaatgcctgggaaaaagataaaacctacgacatcaccattttgcataccaatgaccaccacggccatttctggcagaacgatcacggcgaatacggcttatcagcccagaaaacccttgtggacggtatccgtaaggaagtggaagagaaggggggctcactgctgctgctctccggcggggatatcaataccggcgtgccggaatccgatttacagaatgccgagccggatttcaaaggaatgaatctggtcggttatgatgcgatggcgctgggcaaccacgagtttgataatccgctggaaacgctgcgcattcaggaaaaatgggccacattcccgttcctgtccgccaatatctataagaaaagtaccggtgaacgcctgtttaaaccgtatgcggtgtttgacaaacaaggtgtgaaaatcgcggtgataggtctgacaacggatgatacggcgaaaatcggtaatccggggaatttcccggatacggaattccgcgtcccggcagaagaagcgaaaaaagtggttgaaacactgcgtgaaactgaaaaaccggacattattatcgccgccacccatatgggtcactacgatgacagcaatcacggctccaatgccccgggcgatgtcgaaatggcacgcagtctgccggccggttatctggatatgattgtgggtggtcactcacaggacccggtctgtatgcagccggaaaataaaaattacaaaattgccgattacgttcccggcacaccgtgtgcgccggataaccagaacggcacctggattgtacaggcacatgaatggggtaaatatgtgggacgggcagattttcagttccgtaacggtgaattcacgctgaagcactatcagcttatcccggtgaatctgaagaaaaaaatcaccaaagaggatggcacatcagagcgggtgtattacaccagtgaaatcagcgaaagcccggaaatgctgaaactgctgacaccgtaccaggaaaaaggcaatgagcaactgaatatcaaagtcggttcggttgacagcaaactggaaggtgatcgcagcaaagtccgttttgaacagaccagcatggggcacctgctgctggctgcacaaaaagaacgggcaaatgccgatttcgccatcatgagcggcggcggtgtgcgtgattctatcgaaccgggcgatatcacctataaaaatgtgctgaaagtacagccgtttgccaatgaactggtgtatatcgatttcaaaggaagcgaagtgctgccgtatctgaccgctgtggcaaatatgaaaactgattcaggggcttacgcacagttttataatgtcggcctgacgctgaataaagatggctccgtaagtgatgtgacgattgacggtaaaccactggacccggcaaaaacctaccgtatggcgacactgaacttcaatgcgatcggcggggatggttatccgaaaattgattctcacccgggctatgtcaataccggctttgttgatgcagaagtgctgaaaggctatatcgaagcccattctccgctgaaagcggcagattatgagccgaaaggggaaattgtatataaaaataaatag

SEQ ID NO: 279758 - DNA, 135 bp, Morganella morganii
atggttttccggcagaaattatgcgtctgcgaatcggactgccatggtcatcaccggggcagtattgaagtaacacctcaggatcaggtaaaagtgccggacgggaaatttgctccggtggcgaaaccggactga

SEQ ID NO: 279759 - DNA, 141 bp, Morganella morganii
atgaatgcttcattcaaatactcactgcttactgttgctgttaagtcagcggccaccaccgcatatgccgcaaataaagacgacaccatcgtgcgccgtcttacatcctgtcagttaagtttttcttatttctgccgataa

SEQ ID NO: 279760 - DNA, 1191 bp, Morganella morganii
atgaagctgactgctcgtcaggttgaaactgcaaaacctaaagagaagccctacaaactcgctgatggtggtggtctttacctgctggttaatcccaacggcaaaagatactggcgtctcaaataccgttcattaggtaaagagaagctgctcgctattggcgtttaccctgatgtttctttagctgaagcccgaagtaagcgtgaggatgcaaaaaggacattagcggctggcaacgatccttctcttgaacggaaaattgagaaacttagtcgtcaacaagacgctgaaaattcgtttgaggctcttacgcgggagtggtatcagcgtcgctatgaccgctggtctgtgtcctatcgtgaagagatgatgagaacctttgagaaagatgtatttccttatatcggccaccggccaatcaaagatatcaagccgatggagttgcttgcagttctttcaaagatagaagcacgaggtgcaacggagaaggtacgtaaggttcgtcaacgttgtggagaagtctggaagtatgccgttgtgactggcagggctgagtacaatccggcacctgatctagccagtgccgtgactcctcatgaaaaagagcactatgcttttttaacccaggatgaattgcctgaatttcttcggactctgaacacctatgccggtagtgtacttgttaagattgcgatgcaattgcttattttaacgggagtaaggcctggggagttgaggcaagcacagtggcaggaatttgattttgagaaaaaggtttggaatgtaccagcggaacgcatgaaaatgcgccgccctcatctgatcccattatcaagccaggcaattgacctgcttaatcagcttaaacccatcacgggagcaggagcgttgttgttccctggacgtaatgatcctaagaaaccaatgagtgatatggcgttgactgtgttggtcaggcgtatcggctatgccgggcgtgttacgggacatggattccgccacacgatgagtaccattttgcatgagcagggatttaactcggcttggattgagttacagctggctcacgttgataagaactcaattcgtgggacgtataaccacgctcaatacctggaagggagaaaggagatgatgcagtggtatggcgagttgttatcttttatgtgtgatgtaagtacattaaaataa

SEQ ID NO: 279761 - DNA, 1242 bp, Morganella morganii
atgaaaaaatatgatcaggttgataaggcttttgattttttagtaggaaaggaaaatcggcaagaattttttactattgctgagttagcagtggctactggttggaaagttcagacatgtaaaacatatccaactaaaagatggagtaaatatatatcaagggatggcgctcaatataccacacttggattaaaatacttaagtaaggaagacttcagaaatcttcatagtcagaagagcgttgaaccggccaaaagtgagcgaagcattaatttaaaaaaagcaagagagttcgctatgcttgctgtttctgtttacaataatccatttacagagtttaaaactcatggttttatagttaatgtggttatagcatatacatcattatttcatgctatattcgcaaaaagaggtgttgattatttttacttgaatgatgatggctctcataaaattgttgatggtgacaaaaaagcgtgggaactgaaaacctgctgtgaaaaatattggcttggaagaaataccccagaaaaatcgaatgtgttttttttaataggtttacgtaatatcattgaacaccgaggtctccctgaaatagatacactaacttttggtgagtgccaggcttcaataaataactttgaagatattctcattaacgaatttggtgatgaaaatgctttaatggtaaacttatctcttgcaatgcaacttacaaggatgtctcagcaagcgcagatcgacgctttgaagaaagtccaatcaaaaaatttcactattgttaagaaatatatcgaggattataaaagagacttggagcaagagatattagaaagtcaacaatatcgactcagagctttgttagtccccttgataggtaaaaaggcatcaagttctgatatttctatagagtttatcaatgttaataatctcaccgaagatgaacttgagaaatttgatactggtattgctttcatcaaaggagtggaaaatcaatttaagttgaaacctaaaaaggtagttgagttggttcaaaaaaaacataagtcttttaatcttagtactcatgcaaagttttggaagcattttgatgtcagaccatctcatgtagataaaactctaaaagggaagtactgtggttatatcgaaggttttgatgggtatttatataatcaggaatgggtgcgtaaaatactaagtgtttattctgatagtaaagagttggataaggttttaggctga

SEQ ID NO: 279762 - DNA, 792 bp, Morganella morganii
atgaaagatgattattattggtgggatctggaggggactgctttcaaaggggtactttatgattcgattaatacatattttctgtatgatcattcctacgctgattggaatgagttctctaaagcagatccccatatggcatatgcgcatttgacctatattagatttaacgcattagaacaacaattcgtagatttaagagttatccctcaaatgctaggggttaataatttgccattggtttcaaaagtaaaaaatataaatcgatatgattggcttaaggcaattgttgatttggcattatttagattttcaagccttcgcgatataacctttcattttgttaatgaggttttagaacttaatatcccagattgctctttaaatattaaacaattcggtaaggttattaaagacactcatgctgatattttgagtaacttaaaaataattgattcctctggtggtcctctacgtacagatagaaatacaagagctcataagggattctgtaatttatacactgatgatgatgagatgtttaagaatatgtcgtggatagagggctatggttcacacttagaaggatatgatttaaatgtaatatatgaaaaatcaagagataaaatatacgatcttgtagtcaatgaaatacaaagtgctctctcttcttgtaaaaatattgtcgatgagctttatttttattatagagacaggcatgaagagctatctataaagtccagaagtggtgtatctgcacatttctataattatcatggaaagaaggagtaa

SEQ ID NO: 279763 - DNA, 252 bp, Morganella morganii
atgaaaacactacttattactacattggtcatggggtttatttcagtgaatgccgcctctgctgctcaggaaattaacaatgcagatgggaaagaaaagatcggtgtagtatcagtaagcaatgcctatacgcttgatgatttatctaatgcgctctctcgtaaggctgatgagcaaggagcaacgtcattcaaaatcctgtcgacaacgggggataacaggctacatggggttgctgaaatctataagtaa

SEQ ID NO: 279764 - DNA, 774 bp, Morganella morganii
atgagaatactcgttgcaggggcgacaggaagtattggccttcatgtcgtcaataccgctatcaaaatgggccatcagcctgtagcgctgatccgaaataagcgcaaagtgaaatcgcttcctcggggaacagatattttttacggcgatgtttcattgcctgaaacactcaccgaattaccgaaagatattgatgccatcatcttcactctcggttccgatggtcagggtcgtattggtgccagggcgatagattatggcggagtgcgtaatattttacgaatattcagggatgtatctgttcgtatcagcctgatgaccacgattggcgtgactgagcggctcagcacctggaatcaacgaactgaggttcatgactggaaaagacgtgccgagcgtctggtcagggccagcggtcacccctataccatcgtcaggcccggctggtttgattacaacaatgatgatgaacaccgaatcgttatgcttcagggagatcgtcgccatgcaggaacaccggaagatggtgtgatatcccgggagcaaatcgcccaggttctggtcagtgccctgacccacgacgaggcaaaaaataaaacgttcgagctggtggctgaacgaggtgaagcacagcaggatctttccccactgtttgcagatctgctggctgatgatccacaaaaaaatgatggggttctggacatagacaatatgcctctgcgtgaagaacctgagtgcatcattaacgagctgaatttgtattcaaaaaattaa

SEQ ID NO: 279765 - DNA, 1260 bp, Morganella morganii
atgttttcagctattcagtcaatcacacgatctgttttatttccgggttgtaccggtaataataaaaaagacgaaagttatacagctactcattttagtaaatcactgagtgattgggagcgatcagcattgccgggggaagaacgctgtcatgcggcggctgttatccgtgattgtcttgcggggaaaaaaacagaactgaatttgagtggcctgaatttatgttccttaccggatggattggcagatgttataaaaaatacagtaacatcgatagatatttcagataataatatcagaagccctgcgttattaacagagttcctgagcctgaaagattcagctgaactaatttatcataataatccggcctgttgttttgccgggaataactatgagctgaaagtattatcaaagaaaacacctgttgcatttcagtggcatgtgatgaataaaaatatggagtctgaaaaatacccggtaattaataccaaccaatatccttatctggataatatcctgaatacatgcaagacggaatccggccggattattggtttattaatcagtggtgatgtatcagaaaagcataaagcatcactgagtgagttgcagacacaatatagtaatctgaagattatttatgctgaacaacttgatagaagtgattttttccggattaaagcaattgattgtatcaaaaaaactatcgctgcaggtaaaagtaataacattcatcaggaagacatggatatgttatacagcgagcttgatgatgtatgttcatcagaaccggatattaccttatttgatgaattttccgaaagtggcggacattctgaaatggatttctaccgtaatttattgttattcaatggcggaggtgtttttttatccccgaatgacgataatcacggagcgttgatttatcttgactgcgatatgattattaataaaccactgggtgagattgttttagttgatggtattggcatttataataaatcaggcgttatggaaaacggtattattgcggttgatcgtgcccgtcatccggtattagaggctgggatggatatcatggaaaatgaccggtttaaagctcatccttattatgacggaatatgtggtggtttaagacaacatttcagctataaccaaagaattcacggaaaaggtaaactggctgagtttattgcattcccggttgataatatgtcaccggataccagcacaagaaccggatccagttcctggtaa

SEQ ID NO: 279766 - DNA, 1293 bp, Morganella morganii
atgcagggctgggggccgcagcgtcatatctgcggtgagcgcagtgcgcgcggggccacgctgctggcaacgattaccggtaatgtcggtgtgcgcggcggctgggcagcgggttacggcatggcacagaatccggaactgcgtaaaaccatcgccggaccgaagctgtttaataacccggtcaaagccaaaatcaacatcaccaattgggtgcaggcgtgcgaaaacaaaaacctggtcacgccggataacggactgaaaaatgcagacaaactcggcaccgaaatcaaaatgattttttcgatggcgggtaactacatgaccaaccagaacaccgatattcttcatgccgcaggcgtgctggaggatgaatcgaaagtcgaatttatcgtctgcagtgacctctatctcaccccgagtgcgaaatatgccgacctgctgctgccggaaaccagttttctggaacgctggaatatcggcggcacctggagttacggcgattatctgatcctgtccgaaaaagccattgagccggagtttgaacggcgcactgactatgactggctgtgcgaagtggcagagaaactgggtgtccgtgatgctttcaccgaaggccatgaaacagatcgcgactggatagcgtttctcgtcaatgacgcggcacagaagcgcccggaagataacatcccggcgtttgctgagctgctggtcaaacgccgccatttattaacgcatcgtccgcatacacagaacgttgcgtttgagcagaatattcaggatccggaaaacaacccgtttcctaccccgtccggcaaaatcgagattttctccaaacgcctgtatgacatgcacaatccggagatcacggcactgtctcattatgttccggcaacagaagggccggaagacaatctgaccgcgaaatacccgttacagctgatcacctggaaagggcgcaaccgcgcgaactccacccagtttgccaacccgtggttacaggaagtgcagcgccaggagctgtggatcaacccggcggatgcggctgatcgcggcatcagtgacggtgaaaaagtgaaagtgtataacgatcgcggtatcaccatgatcccggtgaaaatcacaccgcgcattatgccgggtgtggtggcattacaggccggcgcctggtggcagccggacagcaacggcattgatcagggcggatgtgccaacgtgctcacctcgtcacgcagtaccgcgctcacccacggcaacgcacaccagacactattagttgaggtggaaaaagcatga

SEQ ID NO: 279767 - DNA, 888 bp, Morganella morganii
atgaaagtggaatacctaaacgaagaaaaacttttaaaaagaatacagaaatcagaacctttttctttagtattaggcgctgcgttgactgcggaaatcgatggaaaggggattcccggtgttaaccgagtacctgattttgtccttgattatattataaaaaatgatgatgaaaaagattattacgagtatatcgggtcaaaatcttcacaagaaaaatatcaggcatcaatacaatacatttccgacatattcggccaaaatgcagttaatgaaattattagtgcagttgttcaatcaaatattgacgaatctactggtaaaagttacataccgcaatccataaaaggtcttgctaagctcatagaaattggcaaagtcaaaactattttaacaactaattttgataccttaattgaggaggagttaacaaacttaggagttggtcataattcaataagtattgtttcagactctactatacccaaaaatagtaatgagttaccaacaatagtccatcttcatggaaaatggagtgaaggtgatacaatgcatactgaaagtcaacttagtaataatagagaaaaaatacaaaattcaattagaggtattctttccaaagataatatttacataatggcttatgggggatgggaagatagttttacccgaactcttgcaagtattgttcatgataacgatgctaattatgaaatatcatggtgtttctttagttctaacgagagagagctggatagtactaatagtgaactatttgtaaaacttgcgcctgcaagagacagaggaagagtaaagttttttaaggggataaattgtcatacaatattcaatgagattgactttgagctggcaaaaaaaaaaggataa

SEQ ID NO: 279768 - DNA, 294 bp, Morganella morganii
atgcttacactggcactttacggcgcaccattccttgattcggggcaaaacgcagcggtcggcatttacatggcttgtgtaccgatgtttcccggctatgtctgtttcggttacgcactggcgcgtatcccagccagcaccgccgccactacaacgctgctggaaccggttgtcgccgcagccggctgggccggagtcgcactgattttcacctgtctggtctgtattacactgcctgcccagcgtaaggcacaggcagtgaatgtggcaatcgttaaaccgaatcaatgttag

SEQ ID NO: 279769 - DNA, 474 bp, Morganella morganii
atgcctgtttctattgatgcgggtgatgtaatagctggtttagcatttcttctttcggcatatgcaacctggcagaccgttagttttaataaaaagcaaagaagcctcgtggaaagtcaagaaaaattgaataatcgtcttttggaaaaagaagacgaagatgccttgaaagggaaacgagctgatcttggtgcatcttttataaaacttggaaatagcagatatcgactgaaaatttggaacaaaggtgctgctaccgcgaggaatgttaggttagagtttcccgaggggaacgatgtcgtaatcgattccgaagtaacagataaattcccaatggaaattttagagaggcaccaatctgtggagctcatcgcgacggtacatatgcaaaccaagagaaagcatgttgttcggcttatttgggaagatgatgcagaagcgtacaatgaaaagctttcctacccaactttgtaa

SEQ ID NO: 279770 - DNA, 282 bp, Morganella morganii
atgaatcctgacaaatataatagaagcattagtttgctatgccctacctgtggttgcacccagttttcatacgacgaaggagtccatgaggaaattcaggtgatgacttgtgcttcctgcgagagagaatttaatagagatgaactgattcacgaaaacagtgagaacatcaatgagcacttatctgaaatcaagaaggaagtcaccaaagatgttactgatgagattcgtaagtctttgaagaaggcgttttctggaaacaagaatataaggtttaaatga

SEQ ID NO: 279771 - DNA, 2595 bp, Morganella morganii
atggaagctccattcgttattaaatttatcgagaccaaatggcacgataagcaaaccttagtcagtgttagtgagtcggagtactcgctaaagcttgagcaaactgggaacaacgccttttccgcacacaccaccatttacccgaaggtcgatgaactacgttttgctcaacttgcgattaaaactaattatggtgaccattcaccgccttacattgccatgcccaatggtcagagaaggcagttagagtcgattatcgatcccgcttctaatactgtgtggtgggtcgagcctgcccattgggatgaaaaacggcgggtttggcgcagtgaagcgcggaggactgctggccaaatcatgtttgtcattggtaactcaacgctaaagcttgatattgatatctccgaacagactaaatcggatctttcacgctatctatcagattttaaagtggatctgtgggagatgatcctcgatgagaacagtcatattacgggcgaagcaaaaaactctcaggttgcagccgtcgatcagagaacgctgtcactggtcgcatcaattcttagcaatgcacaaacaattatcaaaaagcccaaagttgagctgaaagaaattcaaacattgaagccggtaaaagaagtgcgccccgtttcgcgcacgtttacggagatttacgccaaaggtttgcgtaagcatttaaccagtcgcgtatctgagccgagctacaacgtacctgaaaaccagtatgttttgtatgtcgtttctaccacgctgaatattgtgaagcaattggttagggtggcggagagtaaaacaagtcgtttctctggtgccgtcgaaaagcttaatgagcgtttaggcagtttaaaagactatcgtttaattaaccgtgacctggtggttaaagacttagagcggctgaaaaagcgctttgatacagacgcaattaatgacgacttagcggataagttagctgaaattaatgccaataaatatttgtcgccaaatcttgctgctaaaggttaccccaggttatacctcaggttagaaaaagccacaggttctgagaatgagtggtgggctaaaatcaaaccatccctaagtgctgattggcagcagtttgagcaggatgggtatactatttttagctctgcaggcccgtatgcgaccttgtttaagccttacagtgactatgagatggaggtgattatacctgctccgtccaggagaggaaaagcttcgattttgtgcccagaatacatatcccgcctaactcttctttcagattcgcgatcactccagagagatagagacaactttgccaagttacgcgaacaaggcattgctttaaatgaaaataactggaaaaagaagctaacaccggaagaactctctgaacaggaaaaagagcgtgctaccatcaataaacgcttgagttactttgtcactgaacgtgaaaaagtggaaatagtacacaaagcgcttaagccaaaaataaaacccttccaacaagtagaaaaagaatggcgtgaatacaaagtcaaaagtaaaagcatttttcccaactcaatgacttttgtacagaaccctgcgtaccaagcggtccactcaggttttaaaaagttaaaagagcagattggcttggcagatgaggacactttgctttctctggataagatcgaggcaattggactagtcaacattcctctgctctatgaacggtggtgtttgcttcaaatcatcaaggtgttgactcatgctttccgatatcagcctgaagacaactggaaacgtaagctgatatcgaatattcagggaaatgaagagcaaattagtattcagtttttcaaccctagtgtttcaagaaaagctaccttgcaatacgagccatttctagccaatggcaaacgccctgactttgttctggatgtggaagcgactaccaaaagtgattgccagatttcaaagcggttagtcatcgacgcaaagtactattctgctgcgtatctcaagcaaagaggtggaatcggaggggttatccatgaactttatagtggcaaggattatagcgaaggccaagagaacagtgtgtttgttcttcatcccgtgttagaggcagtggagaagattgtatccccgcaggaatgggcgaaagacagttatcttggagagctttccatgtttgactgggaacctgcttatcacgaacgccaagcaacaaactatggggctgtatgtgccaacccaatgaagtcgcagcgctatcttgatgaaattcagcgtatgcttgggatgtttctacagtacggtattgaagataactcgtcattccgaagagcatcggatgatactcatgccgtgaatttctgtgtttcttgtgggtcaccagacgttgaagatatctctaacccagtgaacaacaacaaaaaaaaacgttggtatcggtgcaatgagtgcactcaatttacggtttatactcattgcggctcttgcaatacgagactgataaaaaatggcgagtattggacatacttgtccttgatgccgatgtcatccattaacatcaaatgtccgaactgcgagtctcccgtatga

SEQ ID NO: 279772 - DNA, 2208 bp, Morganella morganii
atggtgtcagaaaaagttatctatgactttgacgaggttaaagggctctctgatgaagagctttatcaacgcctttacgatagttggggcttgaagaatcataaaattgaagtctggggtgaactgagtatcaatgacgcagggaactgggcaggtattcgtaacgcaaaaactcttaatggcaaccaaagcatagaatacccgttgactgattcgcatgatttgcaatcaggtgtatttttaagcccgtcagtagcaaaaatagtgctaggtaatgacactaaagggatggttgcatgtgaactaatgttagcgtctatcccgcaaagagctaaaaaaaacaacccatttctattagctgtcaatgataagactgttgagagattgacttacctacctgatgcattaactaacttagagcgccaagccttaattcatcatgaaaatgaaacgctcatacgcaaagttatttatgatgcagaaattaggcgtgttaaatataaaattgcctcagaaacagaagcgctagaggcggcgttacaagaagagcaacagaatatggctaacaagttggcggaattgtcagacatattcaaaagtacacaggataaaatcacaatatcaaagacagagcttgaaagttcaatcaagagaaacgaagaactaaataatgataatcatcggttaaatctaaagattcaggaaagtaaaactgagttagacgttgttatcaaaaagagccgaagaatagaggaaagtatgacaagaaaagtcgagaaacttacagagtacatcaaggagaaagctattttcctaaagaatttagagttcgtagatgacgaagatttcgatttttttgttggaaataccttgtctaatcagcaacgtggcgaacatatctcgttttcgaaatctcttgattcgaattacagttatgcagtttcttacattcaagcgcacctgaaagaacgagacattttgtatccgcgccatattattgagaactttctgacgttaattcgcacgaacgatctgatcattttggctggcgactctgggtctggcaaaacgaaccttgttcagtcgtttgccaaggcgattggtggggtttcgaaaatcatcccagttaagccaaactggaccagttcagaagacttgctcggttattacaacccgctagagaagaaatacttgacgacaccatttttagaggcgttgatcgaggcgagacaaaacccagagatcccatacttcatttgcttagacgaaatgaaccttgcacgagtggaatattactttgctgactttctttctaagttagaggaacgtaatgagcaaccaacgattcaactttactcagatgatgaagcagcacatgttcttgctgagctaaaaggggttgtttcgatcatttctaatgcgcaagagaaattcagcaaaaatggcatcgtggacttcgttgcactcatgcaagacgaagagattaatgcagagatgaagcgggcatttggctttagtgaaaaagattcactgatcaaataccacggtgacatcagacgtatgttggctggtgttctcggcacgccttcatcgatcaagattcctgctaacgtaagaatcattggtgctatcaacatcgacgaaacgacccattacctatcaccaaaaattctcgatcgcgctcatgtaatgaagtttaagagtcctttactgacagactgggatgccatttttgatgagattgactcttacgggctagacgacgttactttgccgcttgtctttgatattgcagagcttggtgagcgtgctccttatcctaaatttgaacgttcgaatgaattctgtgagttgttcactaccttaaaccgagacgttttcgacccacttggcgtggagtttggtatgcgtaccattcgacaaggtcttaactacgttagtttgtttagtgatgtaaacagcaataagtctctggctgttaataactttatcgttcataaggtgctgccaaaattcacttttgatggtgataagcaagtaggtgattacagcaaagctgagctcgttagccgggtattcttacctcgtcttgaatcgctgttggataaccaagcggagatagcggccgagttttcatgcaccaaatcggtagagcgtttggttaaaactgctgaatcgaatgatggcgttgtgaactactgggcataa

SEQ ID NO: 279773 - DNA, 903 bp, Morganella morganii
ttgctgttaaatggtattaacatgagtaaagatgattatatccttcgggcactatcaaaaatttctcacaagcgctgggaacactatatcatcaaccgcatttttcacaggttgaatgaccctgagcttgagttcgtttgccagcagtgtattcgaaaggaagggcattccggcaagatttaccttgcggatctgctttttccacagcttaaactgtaccttgaaatagacgaggcgcaccatgacagtgatgaagctaaaatggctgacgcgatccgccggttggatatcatggaagcgacagggtttattgaaaaacgaattccagccaataacataacactggacaagatcgatcatcttgttgacgagttcatccttcttgttagagatagaaaagtccaactgaaagcgcagagcttgttctgtccatgggactatgacggccgttataccgctcaaaagtatagggacgcaggctttattgaagcaggaccttatgctgcattccgatatcacagggatgctttgcagtgttttggttatggagataaaggacaccaccaatcaggtagctggcgggtacctgagactgttgtaaaggcgatcgggttggacggcgatgtgatagtttggtttccgcgtttatataaggccggggagtgggacaactcactgtccattgatggcgacctgataacggaaaaaagtcttaatccactgcgcaactacagggagacatggtgttatcgtatcgtaatggctcattcttgtgatgagctgaaccggacgctgtatcgatttcttggtgttttcactctagatgagcagttatcatctgaaggcgttaacgttttcaggcgggtagatacacgcataaaggtttatacaacacaaaagtag

SEQ ID NO: 279774 - DNA, 438 bp, Morganella morganii
atgagcaggtttttaccttttattggccgtcagtatgaagacagtatctacggggtcaaagtgatgattctcggattatctcattatggcgacccggaggatgcatatccggaattcacaagagacgtgatcgatgagaatgcgtactcaccgggaaaccggtttttcacacttctgactaatttactgcgtttatccaaagacgcgccggatgatactgaacgaagggcggcatgggagcaggtggctttttataactacatacaggatatcgtcgggataacaagccggatatcgccgacaccagaaatgtgggatgaggccaggcagccatttttaaacgtcgtgaaagaattaaaaccgcaaatcattatcgtcctggggacccaactgtgggaccagctaccggatatagacggtattgagtggtgctggtaa

SEQ ID NO: 279775 - DNA, 3123 bp, Morganella morganii
atggttgattatactaagcctatcgtggaatcgaatcggtttatcgtacttgatagatacaaccaagagtgccaagtggccgaaagttatcagagtgaaggcgatctagagcgggaattgatccagaatttggtcaaccaaggctatgaataccttcctgttctgaataatcctgaagctatgctggagaatgtgaaagaacagctgaaatccctcaacaatatagagtttttagagagtgagtggaaacgcttcgttgagacatacttggacaatccaagtgatactattgtaaataaaatccgcaagatccacgatgactatatctacgactttgtttttgatgatggcagcattaagaacatctacctagttgataaaaagaatatagcacgcaatacggtgcaggtaattaaacagtttgagcagaccggaacccatgccaaccgctatgacgtgacgattctgatcaacggtctgccactggtgcagattgagctgaaaaagcggggtgtggctatccgggaagcctttaaccagatacaccgttacagcaaagaaagctttaatactgataattcattatttaaataccttcaggtctttgtaatttccaacggaacagatacccgctattttgccaataccaccaaacgcgataaaaacagttttgatttcaccatgaactgggcccggtcagacaacaccctgattaaagacctcagcgacttcaccgccacgttctttcagaaaaataccctgctgaatatcctgtttcattacagtgtgtttgatatcagcaataacctgctgattatgcgcccttaccagatagccgccactgagcggattttatggaaaatcaacagcgcatacaaagcaaagcactggcgcagtaaagagggcggcgggtatatctggcacaccaccggctccggcaaaaccctgaccagttttaaagcggcccggctggccactgaactggattttatcgataaagtcttcttcgtggttgaccgtaaagaccttgattaccagaccatgaaggaatatcagcgtttttcccctgacagcgtcaacggctctgacagtacggccgggctgaagcgcaacctggaaaagcacgataacaaaattattgtcaccaccatccagaaactgaataacctgatgaaaagtgaagcggacttaccggtttaccgtcagcaagtggtctttatctttgatgaatgtcaccgcagtcagtttggtgaggcacagaagaacctgaaaaagaaatttaactgtttttatcagttcgggtttaccggcacccctatttttgccggtaaaaacgcattgggtgcggaggacactgccggtgttttcggcacagagctgcattcttacatcatcaccgatgctatccgcgatgagaaagtgctcaagtttaaagtcgattacaatgatgtccgcccgatgtttaaggcactggaaacggagacggacgaacagaaactcagtgccgctgaaaataaacacgccctgctgcacccgcagcggattgcggaagtcacgcactacattctgaaaaacttccggcagaaaacacaccgggcttacccgggggcaaaagggtttaatgcaatgtttgccgtcagcagtgtggatgcggcaaaagcctattatgaaacctttaaagccattcagcagcaggctgcggcgcagaacaccagctataaaccgctgaccgttgccacgattttttcctttgccgccaatgaagcgcaggatgcaatcggtgatattaacgatgagagctttgatgtcacggccatgaacagcagtgccagagagtttctggaatccgccatcggggattacaacgcccggtttaaaactaacttcagcacagacggtaaccgttttcagaactactaccgtgaccttgccaaacgggtgaaaaatcaggaggttgacctgctgattgttgtcgggatgttcctgaccggctttgatgccccgacactgaataccctgtttgtggacaagaacctgcgctaccacggactgatgcaggccttttcccgtaccaaccggatttatgatgccaccaaaaccttcggtaatatcgtcaccttccgtgacttggagcaggccaccattgatgccatcaccctgttcggaaaaagcaatacccgtaacgtcgtgatggaaaaaagctatgccgagtatatgaacgggtttacggacgcactgaccggtgagacaaaacggggctttaccgaaatcgtggctgagctggaaagccgtttcccggacccggccgctattgagtcagaaaaagaaaagaaagccttcgtcaggctgttcggggaatatctgcgggcagaaaatatcctgcagaactacgatgaatttgttgcgcttaaagccatgcagagactggatctcagtgacccggccgccacggaaacctttaaagcggaacactatctggatgatgagacatttgcggaactgcagatgatacggttaccggctgagcgtaaggttcaggattaccgttcagcatacaacgatatccgtgactggcagcggcgtgagcgatctgctgaggaaaaagagagcaccacggttgactgggatgatgtggtgtttgaggtggatttactcaaatcgcaggaaatcaacctcgactatattctggggctgatttacgactaccacaaaaaaaataccgataaaaccaccatgaaagaggaagtgaaacggttaatccgcgccagtctgggaaaccgggccaaagagggactggtggtcggttttattgaaaatactgatttcagtgacctgccggataaagaaagtatcattgaggccttctacgcctttgctcagcaggcacaggagcgtgaggcggaagccttaatcagggaggaaaatctcaatgccgaagcagccaggcgctatctgcgggcatccctgaagcgggagtatgcaaccgaaaacggcacggcgctcaatgaaaccctgccgaaactgagtccgttaaatccgcagtacaaaacaaagaaacaaacggtatttcagaagatggtggcttttattgagaaatttaaaggtgtcggcgggaaggtatag

SEQ ID NO: 279776 - DNA, 1170 bp, Morganella morganii
atgagcaagatgctagaggagattgcggcgcaattaagagaaactggcaaaaaaacccagttaatctacgccttcaacggcacggggaaaacacgcttgtcactggccttcaaggatctcatcgctcccaaaaccactggtgatgatgacggtgacgataaagagttgtctcgtaacaaaattttgtattacaacgcgtttaccgaggatttgttttactgggataacgatttagtggccgatgtcgagcctaaactgagaatacagccaaatacgttcaccgattggattcttaaagaacaaggccaagatcgaaatatcgttgccaatttccagcgttacgctaacgataagctgacacctaggtttaacgaagaatatatatctaaaaataaagatgataatgacattgtaattaaagctttttcagaagtgactttttctatggagagaggtaatgatacgtcatctcctaacttgaaaatatccaaaggtgaagaaaataactttatttggagtgttttttataccttgttggaacaagttattactattttgaacgtggcagagccaagcgaacgtgaaaccgatcagtttgatcagttagagtatgtatttattgatgacccagttagctcattagatgagaaccatttaatcgaattagctattgatttagcacaactcataagatctagtgagtctgacttaaaattcattgtttctactcataatcctttgttctataacgtactctataatgaggtaaaagccaagagtggctatattcttaagtgctttgaggatggcttatttgaaattgaagacaagaaaggtgattctaacaaaagcttttcataccatttgtacataaaacgccttatagaggaagctatcggaaaagatgaggtcaaacgctaccatttcacgctgcttcgcaacttatacgaaaaaaccgccaactttctcggctatccgcagtggtcagacttattacctgataataaacagtcttattcaaggctggtcatgaatttttatagtcatcgcacattgtcaaatgaagaagttgctgagccaactaaaccggagaagcaaacggttaagtttttgcttgatcacttgaagaatacatatggcttctggaggcaggaagaacataatggttga

SEQ ID NO: 279777 - DNA, 1239 bp, Morganella morganii
atgagtgaactgagttatctggaaaagctgttggatggtgctgaggtagagtggaagccccttggtaaaatgttatccagaaccagaggtaccaagataacagccggacaaatgaaaattatacatcaagataatgcacctttaaaaatatttgctggtggtaaaacagttgcctttgttaattttggcgatattcctgaaaaagatataaatcgagagccttcgattattgtaaagtcacgggggattattgagtttgaattctgtgacaaaccgttttctcataaaaatgaaatgtggtcttaccactctgcaaataaatacataaatatcagatatgtttatcactatctgaagttgcatgaagtatattttcaggggattggtagtaaaatgcaaatgccacaaatatcgatacctgatactgaaaaatatctcattcccattccttgtcctgatactccggaaaaatcccttgcgattcaatctgaaatcgtccggatactggatgtatttactgctcttaccgctgatcttacctctgagcttacagcacgtaagaaacaatataactactatcgtgaccaactgctgagttttaatgacggcgaaatggagtggaaaaccttgggtgatgtaacaaaaaaatggtactcgggtgggacaccaacagccggaaatccggagtattacgatgatggttatattccctggctaagaacccaggaagttaagttttcggatattaatgaaacagagatcaaaataactcctgcagccctgaaaagctcatcaacaaagtggatccctgaaaactgtgtaattattgcaatctcgggagcaacagcaggcaggtccgctattaataagataccattaacaactaatcagcattgtggttgcctagagatagatagtgaaaaagcattgtatcgatatgtatttcattgggttagttttaattatgaaaatataaaggctctcgggcagggagccagaggggacctgaattccagtattataaaaaacttcaagattccgctcccctatgctgacgatcgtgaaaaatctttggccgaacaagccagaattgtcagtattctcgataaattcgatacattgaccaactccatcactgaaggtttaccccgtgaaatcgaattgcgccaaaaacaatacgaatactacagggattttttgcttagttttcctaaatcagaagcggaggtagtggcctga

SEQ ID NO: 279778 - DNA, 246 bp, Morganella morganii
atgcgggtattcgacagtaaagccgatactgactatctggccaaatccgttcctgcagaagccgttgccgctaatgactataacctgtcagtcagcagttatgttgaagcaaaagacacccgtgaaattatcaatatcactgaactgaatgctgaactcaaaacgacggtcgctaaaattgaccagctccgtaaagacattgatgcgattgtcgcagaaatcgaaggtaatggggcacagtcatga

SEQ ID NO: 279779 - DNA, 1467 bp, Morganella morganii
atgtccacatccgcgcgtaataccatcggcaagttcggactgctgtccatgacctttgccgctgtatacagttttaacaacgtcattaataataatatcgagctcggactggcttccgcaccgatgttctttatcgccacgattttctattttattccgttctgtctgattatcgcggagttcgtctccctgaataaaaactccgaagccggtgtttacgcctgggtgcgcagtgccctcggcggccgctgggctttcctcgctgcttatacttactggtttgtgaacctgtttttcttcacctcgctgctgccgcgtgttatcgcctatgcttcttacgctttcctcggctatgaatatatcttcacgccggtcaccactgcgctgctcagtaccgtgctgtttgccttctccacctatgtttccaccaacggggcaaaactgctgggaccgatgacctctgtcacttcctcgatgatgctgctgctgaccttctcgtatatcgcgctggccggcgttgcgctggtggggggaattcagcctgcggatccgatcactgtggaagccatgacgccgaactttaactgggcattcctcgggatcaccgcgtggatctttatggcggccggaggtgcggaatcagttgccgtgtatgtgaatgacgtcaaaggcggcagtaaagcattcgtgaaggtgattattattgccggattattcatcggcctgctctattccgtctcctccgtggtgatcaacgtgtttgtaccgcgtgaagcactgaagtttaccggcggctctgtccaggtctttgaagggttatccacctatttcggtctgccggagatcctgatgaaccgctttgtcggcgtggtctctttcaccgccatgttcggctccctgctgatgtggaccgcggcaccggttaaaatcttcttcgcggagatcccgaaaggtgtctttggtgccaaaacagtcgagctgaacaaacacggcgttccggcacgtgccgcctggatccagttcctgattgtgatcccgctgatgtttatcccgaccctcggttccgataccgttcaggatctgatgaacaccgtcatcaacatgactgccgccgcttctatgctgccgccgctgtttattatgctggcgtacctgaatctgcgccgcagactggatcatatcccgcgtgacttccgcatgggttcacgcaccacggggattgcggtggtctccctgctgattgtgattttcactatcggcttcctggcctccactttcccgaccggtgccaacattgcgaccattctgttctataacgtcagcgggatcctgattttcctgggctacgcctggtggaaatacagccgttatgagaaaaccctgaccgcagaagagcggaaaatcgccgatgccccgaccgcgcaaaccgcgctggcccgcggcgaagaatccgtcgataatatctga

SEQ ID NO: 279780 - DNA, 1362 bp, Morganella morganii
atgagcgtgctccgtcagccggggagaaatatgatgagtgcttcaaaaaataaaatgagcgtattacagctcactatattaaccgcagtgaatatgatgggatccggcatcattatgctgccgacaaaactggcggaagtggggacggtttctattctgtcctgggttgtgaccgctgtcggctctatggcactggcttatgcatttgccaagtgcggtatgtacagccgccgcagcggcgggatgggaggttacgcggaatacgcattcggtaaatccggtaactttatggcgaattatacctatggtgtttctctgctgattgcaaacgttgcgatcgcgatttcagccgtcggttatggtgctgaactgatggatgcggcgatgacgccgctgggtatctgtattgccacaattgttgtgttgtggatttgtacggtggcaaacttcggcggtgcacggatcaccggacggatcagcagtgtgactgtctggggggtcattattccggttgtcggtatttcggttatcggttggtggtggttcagccctgaactgtatgttaattcctggaacccgcataattttccgctttttgaggcggtcggttcctctattgcgatgacattatgggcatttttaggaatggagtcagcctgtgctaacagtgaggcggttgataatcctgagaaaaatgtgccgatagcagtattgggcggaacattaggcgcagcggttatttatatcgtatcaacaaacgtcattgccggtattgtaccgaatatggatctggcaaactctactgcaccgtttggcctggcattctcacaaatgtttacgccgggtgtgggtaaggttgttatggcgctgatgattatgtcttgctgcggttcattgttaggctggcagttcaccattgcgcaggtatttaaatcatcatctgattccggttatttcccgaaaatcttttctgccgttaccaaagcggatgccccggtaaaaggtatgctggttattgttattattcagtctgcactgtcgctgatgaccatcagcccgtcactgaataaacagttcaatgtgctggttaacctggcggttgttaccaatattatcccttatatcctttccatggctgccatgattattctgcagaaagtcgccaatgtggatcctaagaaagcacggacaggcaatgtgattgcatttatcggtgctgtttatagcttctatgcgctgtattcatccggtgaagatgctgtgatgtggggggcgcttgccaccttcctcggctggacactgtatggttttgtttccccgcggtttgaaatgaaacaaaaccaggacgtaatgatgaaataa

SEQ ID NO: 279781 - DNA, 324 bp, Morganella morganii
atgaaatttctacctgctacaatttcgcgggcggcgaagccctgcctgccgcctgttgcaatctggcaaatgcttcttacacggctactggaaaaacactatggcctgactctgaacgatacgccgttcagtgatgaaatcgttataaaggaacatatcgatgccggtatcactctcgctaatgccgttaactttctggtggaaaagtacgaactggttcgtatcgatcgcagagggtttagctggcaagaacaaacgccatatctcacgattattgatatcatgagggcccgtcgcgatctgggtttaatgaatcgtaattag

SEQ ID NO: 279782 - DNA, 357 bp, Morganella morganii
atgaacaatcactcagaccccggtaacaaaccggagaatcccgcctgtcagcagtgggggcttaaacgcgctattacaccctgttttggcgctcgtctgatacaggaaggcagtcgggtacattttctcgctgaccgcgccgggtttaacggtgctttcagcgatgattacgcgctgcacctggatcaagcctttccgttgatactcaagcaactggagctgatgcccaccagcggagaactctcttcacggcatcagcattgtgtcaccctatatcacaatgggctcacgtgcgaagccgatacccttggtagttgcggttacgtatacatcgccatttatcccactcaacgttaa

SEQ ID NO: 279783 - DNA, 222 bp, Morganella morganii
atgaaaatcaccagtaaacgccaggcaatggctttgtaccgacagcatccaggctcccggctgtttcgcttctgtaccggtaaatataaatggtctggaagtatctgccattatgctggccgggaagttcaggacatacgcggtgttctggccgtgtttgctgaactccgtcaggaccgcaatggtccctatgtcattcttagaagtgtcactctcaattaa

SEQ ID NO: 279784 - DNA, 300 bp, Morganella morganii
atggtactctatctcgataatcagcatcgtttactggagagtgaaacgctgttcgccggttcggttaaccatgtacaggtccatccccgtgaggtgttgaagtcagcgcttcgcttcaatgctgcagctgtcgtgctggcgcataaccatccatccggcgacccggagcccagccaatgcgatcgcaacattaccggtaggcttaaagaatccctggcactggttgatgtgaacacgcttgatcatttggtcgtcggttcagatggcattgtgtcgtttgcggagcgagggtggatatga

SEQ ID NO: 279785 - DNA, 225 bp, Morganella morganii
atgaataccacattatccccggtgtcatcgcagtctgaactcttttcgctggcggttatggcacaacatgattgcctgctcccagcgatatctggattgacaccctatgcccaacgcaccatccgccgcgctatcaacttgctggataaatatcttcgtcagcccggcatatcctttacctcaagtacggcagcccgtgactggcttcggctaaagctggcctaa

SEQ ID NO: 279786 - DNA, 432 bp, Morganella morganii
atgactgacaccacaactgaactcaccatttccgccgctgttgttgccgacgagcagcgtatccgcttctggccgcagcactttggcatcatcccgcaatggataacgcttgagccccaaatcttcgcctggatggaccgtctgtgtaccgattatcacggtggtatctggaacttctcgacgctcagcaacggcggcgctttcatggctcctgagtcagagagcgatgagaagtggacattattcaacagcatgaacggcaatggcgcggaactgactggcgaagctgcggggatagttgcctgcctgatggcatacagccaccacgcctgtcgtaccgaatgtgacgcaatgactgagcactattatcgtttacgtgacttcgcgctgaaccatccggaatgcagtgccattatgtatctaatcgactga

SEQ ID NO: 279787 - DNA, 264 bp, Morganella morganii
atgaccgcgcagaaagaaaagggccagagcctgcttccggccggaccttttacccgccagcaggcggagtacgtcaccgcggcataccaaaacatcttcatcgaggatgaccagggaagccattttcgactggccctgcgtgatgcggatggccggatgctgtggcgggcctggaactttgaaccggaggccgggaccgggcttaatgcgtacatccgggactacggcatcctgcagggccctctctgccccccacgttcctga

SEQ ID NO: 279788 - DNA, 819 bp, Morganella morganii
atgaaattagccagtcgttttggcgcggtgaacctcgttcgccgtgaccgcccgctcacccacgaggagctggcgcactatgtgccgagcgtgttcagtgaagacaagcatgaatcccgctcagaacgttattcatatattccgaccatcaccctgcttgaaaacctgcagcgtgaagggttccagcccttctttgcctgtcagacccgcgtgcgggaccccggcaaacgtgaacacaccaaacacatgctgcgcctgcgccgtgaagggcaaatcaccggtaagcaggtgccggaaattatcctgctaaacagtcatgacggctccagttcttaccagatgctgccagggttattcagatcggtttgccaaaatgggctgatttgcggtgagagtttcggagaggtgcgcgtgccgcataaaggcaacgtggtggagaaagtcattgaaggggcatacgaagtgctggggatatttgaccgggtggaggagaagcgcgatgccatgcattcactcctgctaccgccacctgctcagcaggcgatggcgaaagcggcactgacttaccgttttggggaagagcatcagccggtcacggagtcgcaaattcttgcaccgcgccgttggcaggatgagagtaacgacctgtggactacttaccagcgtattcaggaaaacctaattaaaggtgggctgtccggtagaacgaccaaaggcaaacgggcccatacccgcgcagtgaaaagcatcgatggggatgtgaagctcaatcgtgccctttgggtcatggctgaaaacatgctggagctcgcatcatga

SEQ ID NO: 279789 - DNA, 540 bp, Morganella morganii
atgttattgaagcccggatattcactgacctgggcgtattcacttacagctgaaaccatgatgaaaataaaacaaacatcccaaaagattgtctctttgctgatactggcctgcctcgcaatgagcgccgatgtgtctgcggcacccgccgggaatgagtcccgactgattacagatgaggccggatatctggtctgccatcgatgtggcccggaccacaaggacagctatctgatagcggagtatccggcgggctcgcgggagaaatccgtgaattatcacctggtccgggatatgagtcgctacacctttctgatgtcttcggatgccccggcgactgcggcgaatcagacgccggatttctggtacatcgataagcaatcatccaccccggcgctgaacagcattgtctttgacgacgataattcggcactgtcatccgcagagcacatcaccgtgacagaggctggcggccagacccgactcaacgttatctgggcgaacgggaagcggaacatcttcatcctcgataatccttaa

SEQ ID NO: 279790 - DNA, 408 bp, Morganella morganii
atgaacatgttctctgctgccgccgccgtaatggcgttgctggcaggcctcgtctcatctgcggtaagcgcagaaaatgacgtcatcaaagtcgatatccagaaaagtggttgggagtgcaatgactgtgtctacgtcactgtgactgcccgcacggagcggattcagataaaaaatatcgatgtaaaccggggcaaatgcccgcagctgaagcagggcgtgaccaccattcagggtcagaagatggaggggtggtggcccaataaagacccgttcacgccccgtacgatgcagtttgctgacagcctgacctggcgatttggcaacacgctctggcagaagggtattacatgcaatgttattgaagcccggatattcactgacctgggcgtattcacttacagctga

SEQ ID NO: 279791 - DNA, 888 bp, Morganella morganii
atgaaaaatccttcgggttatgcactcatccgtcgtcacctgcggcgctatccacgttctttacgccagtccttaatccatgagctggaccagcttgttacctgcgaaccggtgattggcatcatgggcaaaactggcgtcggcaaatcgtcgctctgtaacgcgctgttccgcagtgaagtctgtgttgttaacgcggttgaagcctgtacccgtgagcctcaacgggttcgtctgcgctttggttctcactatttgacgctgattgacctgcccggtgtgggagaaagcctgcaacgtgatgatgagtaccgcgaactttatcaggaactgatgccacagcttgatatggtgctgtgggtgttaaaggcggatgaccgcgccttctcggtggaggagcagttttatcaggccgtttttgccggatacaacgggccactgcctcctttgatatgggtactgaatcaggcggacaagaccgaaccggcagagcaatggaactggtcttccgcgcaaccctcggcgttgcaggctgaacatattgctcagaaacaacaggcggtcgcccgcctgctgggaattgcagagcgtgatgtgctggtcatctccgtcagggggcgttaccggctgtctcgcctggtggaggctatgattacccgtctcccaaagcagacccgcagcccgctagtaccgcaccttcaaaccggctatcgcactgaagtcgttatcagcagcgcccgtaccggctttggcgaggcggtcgtggaggtgattgaccgcatcattgatttggccccgctaccgcaggttgcccgctcggccattcaggccgtgacgcatacagtggcccgcgccgcccgcacggtctggtccttcttcttcggttga

SEQ ID NO: 279792 - DNA, 714 bp, Morganella morganii
atgtatgttaatttacataacttgtatgttaatttacataacttgtatgttttaaaaatgaacagctactacttagctcgccaggccaaaagcatcggtaaatcctttacggcattattccagaatctttctgctgacggcttggtcaaggccctgaaattctcttttgtgataacacctctggatgggaaagccgcttatcctgacgacagaggtgctgaacatgcaaagaaggttcatcttgcactaaagctttttttgaaccacatgcgggtgcttaaatacgggaagtgtgttgccgggtattcatggttaatgtgcaacgaaaagcgcgcaaatcgaccctatatttatatgctgttttacataaccgggagcactagcgccgataaagttgcggaatgtctgcgcgatttatggatacgttcggttgaaaaggcgagcctgaaagaaggctggtacggttacccggtggtgttcaactataatcttgaattgggcaacaaggttttttgcaaaggtaatcatgcactgctggatggtcatgtcgagtgtcagagcggagcattcattttcgatgacctttgtggcggtacggctaattttaaaattagctcggataatccgaaattgttcctgagttacctgggttcactcagattgagcatgcgctcaatttccggtgtaagagcatggggctgctcgcagctataa

SEQ ID NO: 279793 - DNA, 588 bp, Morganella morganii
atggcttaccacgacactaccaatatcaatcttagctacgttcagcaccctacccttagccgaaaactgcgacgtcatcaggaccaattatttgagcgttattccaagctgttgatgctacgggtggacttctcgtatctgcaggacagcgattcgcatggtgatggagatattcactctacggtggccgatatcacattactgattcaacgcagtagggatatcaacgggctggtgggttacgcatgggtactggaacaaaccgaacagcatggctatcacatccacgccgcgttttacctcaacggtcagaagcatcgtcgggcatggacagtctttgaagcactcagggatacctggaagtatgtgacatggggagaaggacatacacaccgttgtgagcctaaagagcattaccgcgtgcgaggagaatgggtaacggcctacgacgacattaagggccgtaagagcatgcagtacatcttgagctatctcagcaagcaggagcagaaaactttaggcgttatctgccagttaagtgacatcccagctccactggcagcgggcagacggcggaagctcagttaa

SEQ ID NO: 279794 - DNA, 207 bp, Morganella morganii
atgacaactgattacaacgttcttaacgaccaactggtgacgatggcgtttatcacccagctcacaggcctgacggacaaatggttttatttccttataaaaaacggcgagttcccgaagcccattaagctgggcagaagctctcgttggttgcaaagcgaagtagaagcctggctacagcaacgtatcgaccaatcccgccagtga

SEQ ID NO: 279795 - DNA, 531 bp, Morganella morganii
atgaatgagcatgcggttctgaaattgcttaatgagctggatatatcttttcagtacatatcacatccggaagtgacgacggtcgctgaccatgcgagttttgctgcggattttccggcacaactgctgaagaacctgttactgaaaaatagttctggtaagcatttttacctgtatatccttgatggtaatcaaaaggctgatcttcgtgggttagcactccagctcgaagaatcacgcctgtctttcgcttcttcggatgagttatttgaaaccttaggtgttgaacctggtggggtgacaccttttgctatcccacataacaaggtgagagatattcgcatagtcattgatccttctgtatcaccgattcaaccactgggctttcaccctttgagcaacacggcttcagtctgtatttataaaaaggatttgttgcggctactggaattttacggcttcttccatacagatattcaaaccgatggaatgttctggttactcgcgcgaaaagcggacatgtacctgtaa

SEQ ID NO: 279796 - DNA, 609 bp, Morganella morganii
atgaaagttacatggaccgtcacgcctgtggggtatcagcgcatcgcgaagcggtgcccttcatgcaacattaaacgggacttcacgccgtcaggtgcatttcgggttaattctcaaaagaagctgctggatgtatggagtatctataaatgcacacactgcaattacacctggaatatctccctgtttacacgtctgcacgtgagcaaaattgatcgtgaactttatcaccgattgatggtgaacgatgtcgacacggttctatattttgcctatgacaaaactacgttgaagcgaaataatgccgagctctcggggcggcctgattttcgcattcaggaacagtggttaggcagcctttctcccggtaaacgggtcaaggttagcgtaaggatttcccgttcttttcatgtcagcctgctgtcgattttgcagaagcaactcatgctgagcaccggtgaaatcaagagacacgttgagtcagggataataagtggtatcacgatgaaaatgcttaaatcgcgaaagctgaaggccgcagaatataagtttcagctgtctgcggaaacgctgttcgcccagcgcaggatagttctgacacatcgttaa

SEQ ID NO: 279797 - DNA, 252 bp, Morganella morganii
atgacacagcacaagtggtttaatcaggcttgcggaatgccgatgtctgcgcccgatgcacacagtgccagtgatcaatattgtgcgtactgcagcgatagcaacggcaatctcaaaccctgggaagaagcggtatcaggcttagccagcttccttgattcctggcaaaaagtcggcacggaagaagcacagaagcgtgcaaaacgttatctgacggcgatgccagcctgggctcataaagcggacgagtga

SEQ ID NO: 279798 - DNA, 393 bp, Morganella morganii
atgttttcttacattatgcctggaaccaacgacctgccactcgccattacattctacgatccgctgatgaagatgctgggatattcccgtggaggcaggaatgaggacgtcgcatggtggggcgttttcaacagtagcaacacgacggcaatgggtattggcagaccttttgataaacaggacgccacgaccggaaatggtgtgatggtcgctctgattgcgcgttctgccgaacacacccagcaatttcacgtgctagctttaaatcacggtagccctgaagagggagcaccaggcctgcgtccgcattacggcgaagggttctacagtgcttacgccagagacatcgacggcaacaaattgtcttttgtgtattacacagcacaatcctga

SEQ ID NO: 279799 - DNA, 942 bp, Morganella morganii
atgaaaaataaaatcgacgttagcatcattatccctgcttacaacgccgctgcgaccgttggttgtctggtcaataaaatcctcagcgaaacccacgtagcgattgaacttatcgttgtcgacgacggttctaccgatggtaccggcaacattatccgccaaatccacgatgaccggctcattctcattgagcaggccaatcaaggtgtctatgctgcccgaaatgctgctctagccttgcaccagggagaatgggttttattccttgatgcagacgatgatattgccgacgggttcattgaaaaacgatggcaagcagctactgcgtcgcaagccgacgtcatgatcttcaatggctggcattctgatgctgaccaccaccatcgaagagcagtccaccgaaagcagccatatggggcgactctgtcaggacatgagtggataaggcactgtgtaacacgccgcgaatggccacattacctgtggctgcaaatggtcaggtcatcttatgtaaggcagcattcactgcgcttccggcccggcaggagccataaagacattctctggacggttcatcttgcggtgagcaatggccggttctgcgccttggatgttaaggactatatctatatcagcaataagacctctatcacgcaccgaccggattactatgatgttcgtgcaataagctatgttgaagtgatcgcgggaattacccagctagcggaacaggaacaaaaccaaaaaataaagttatttttgtacagacatgcgctggtggaggcccgtcattttttgggactttaccgaaagaaaattcagggcaagtcaggtgtggcactcaacttcaaagcaaacatttcccaggtttgccttgccaaaggcataagcagttttagcgatatattttttttcttaaaactgatgtggaaaattctgtaa

SEQ ID NO: 279800 - DNA, 1203 bp, Morganella morganii
atgctcaatcaacaggcacatacgcagactgctacagctaaaaaaaccggactctcatttctactcattctcagcgccctgatggctgttacctcgctatctaccgacatctatcttcccgccatgcctgtcatggcgaaagatttacagggtgatgcagagctgacaatcacaggattccttatcggcttttgcattgcccaactgatttgggggccgattagcgaccgttatgggcgtcgtctgccgctgtttatcggtttaggcctgttcatcatcggctcggtgggctgcgcgctatcaaccgatatcgggcaaattgtcttctggcgtgtttttcaggcgttaggtgcctgtaccggcccgatgctggccagagcaatgatccgcgatctctttagccgcactcgtgcagcgcaaatgctttcgaccctgatgatcatcatggccattgcgccgattgccgggcccctgatcggtgggcagatgattaaagtcacctcgtggcatgccattttctggctgctggcgattatcggaacgttaatgctgatgtctttattctggttaccggagacattacccgccgagaaacgctcgcaagcctccgtaaccaaagcctttcaaaattacttagccttactcaccaacaccagatacatgcggtttacgctgtgcctgaccttctattacgtcgccgcctacgcctttatcacgggctcaccgtttgtttacatcacctactttggcgttgatccacagcactacggttggctgtttgctgtaaatattgtgggattaatggctgtgagtatggtcaacaggcgcctggttcaccgctatcccctggaaatgctactcaagaatgccgtattcattgccactcttgccgcaatagtgctggcggtcacagtcggcctgggcgtaggtgggattagcgtaattgtggggaccgtattcgtcttcttcgccatgaacggcatcatcgcggcaacgtccacggcttgcgcacttgacgcagtgcctaatgttgcaggctctgcatcggcattaatgggggcgttgcaatacgggagtggcatcatctcttcgctgctgctggcgctctttagcgacggcacgccctggacgatgggctggatcattgcggtatttacggctgccagcgccttaatcgcactgattattccgataaaaaaatag

SEQ ID NO: 279801 - DNA, 1050 bp, Morganella morganii
atgaaactcacgcttatcggtgcaatgctactcacggcaatggccggagtgacctcagtcaatgcggctgattacaaacaaaaccctttcacactggcctataacggtgccatcactgagaacgtcaaaggcaaggtcaacattcaccccgtgaaatacgatctgcatggcatccagattgctgcgaatgtctatacccctgctaactatgatcctgccaaaaaataccctgcagtggtggtcgcgcaccctaatggcggcgtaaaagaacaggttgcgggtttgtatgcccagcgtctcgccgaacagggctacatcacgattaccgccgatgcggcttatcagggcgctagcggggggatgcctcgcagcgtggataaacccgctaatcgcattgaggatatccatggcatggctgactacatcagccagtatcctggtgtagataccgctcgccttggtctgctgggtatttgcggaggcggcgggtattcactggttgctgctgaaacggacaaacgattcaaatcgatcgccaccatcagcatgtttaattcaggccttgtgcgccgcaacggttttcaggattcacagctggatactatccaactgcgtcttcagcaggcttctgatgcacgagttcaggaagttgccggaggagaggtgctttactccggcgatgccaatctgactgatgaacagattgctaaattaccttttgccttgtatcgccagggctacgagtactactggaaaacccatgctcacccgaactccacgtttaaatacaccaccagcagtcttctggatttgatgagctttgacgtaacggaccatatcaatctcatcaataaaccgctgctgatgattgcagggacaaaagcggatacgctctatatgactgaagatgcgttcgcaaaagccaccggtacgaaagacaaagaactcttcctgatcgagggcgctacccatatcgagacgtattgggtgcctaaatatgtcgacgaggcgatgcaaaagctggacgtcttctttactaaaaatatctaa

SEQ ID NO: 279802 - DNA, 1167 bp, Morganella morganii
atgaaaagccagaatgacccagcaatgccagagcggcgcaagctattagtcgccggggcgggtattgccgccgcctcgctgattccccatgtatcggcagcgagccaatcctctccggtggattcatccagacaatcctaccatcgccctgttactcccggcaaacgtaaactcgggaagctggaagtttctgccgtcggtctgggcgtgcagaacatgagtcgtaaatacgacacctccgttccctggcgtcccgaaatgatcaatgttatccaccgggcatttgatgaaggggtaacgttcttcgacgctgctgaagcctacggcccgtttgaagtcgaaaaaattctcggggaaggcgtcgccccgttcagggacaaaatcgttatcgccaccaagtttggctggaacattgaccaacagacgggtaagcgtctaccgggccttaacagcaagcctgagcatatcaggcaggtcgtcggcaatatgctgaaacgcctgcgtaccgatcgcatcgacttactgtatcaacaccgggttgatccacagatcccgatcgaagatgtcgccgatgtgatgaaagatttaatggatcaagggaaagtcctgcactggggtctgtctgaaatgggcatcaacacgttgagacgcgcacatgcagcattacccgttaccgccgtacaaagtgaatactccatgctctggcgcggccctgaaaagcaggtgcttccggtgtgtgaagaactgggcattgggttcgtgccatggagtccactcggcgtccagtttttaacgggctggattgatgagaatacccggttcgctgccggtgatttccgcgcgacagaaacgcgtttctcgcctgaaaacttgccacacaacttacagctggttgaactactgaaatcctgggcaatacgaaaaaatgcggcaccgggacagattgcactggcatggctcctggcgcgtaaaccctggattgttcccatccctggcaccaccaataaagaccatatgttgcaaaacacagcggctaccggcgtatcgctgacttccgctgagatgaccgatctcacccgctcactggatgccattactatccagggtcaacgtctgccagatgctgtgcaggtttattccgatgttgaagcaccgttgaaaagttaa

SEQ ID NO: 279803 - DNA, 681 bp, Morganella morganii
atgcgcctgttgttagtcgaagatgaagaaaaaacgtcaacctatctcaaccgagcattgagtgagtccggatttacggtagatgtctctgcagatggagctgaaggtcttcattacgcgctggagttcgactacgacgcgataatcctggatgtaatgctaccgaggatggatggttaccgggttctcgagggtgtgcgggcaaccaaacagacgccggtgctgatgctctctgcacggggatcggtagacgagcgcgtgaaagggctgcgtcttggcgcagatgattatctgcccaagcccttttcgcttattgagctggtggcgcgtattcaggccctggtgcgtcgtcgttctacggatggcgtggacatcacccagctgcaaattcacgatctgcatctcgacctgctggctcgtcgcgtatttcgcgccggaacgcgactggagcttactgcgaaagagttttccctgttgagccttctggcccggcatcaaggggagattctgtcaaagatgatgattgcggagcagatatgggacatgaattttgacagcgatgccaacgtggttgaagtggccattaaacgtctgcgagccaaagttgatgccccgttcgacgtcaaactcttacataccgttcgtggcatggggtatgtcctcgaagtccggtcagaataa

SEQ ID NO: 279804 - DNA, 1458 bp, Morganella morganii
atgcctaagcgttccatctccgttcacctggcgctgatgtttgccttatccgcgctgctgattgtgtccgttatcggtatcctgctcagaagctctttgcatgattctttgcagaagcagatgcacaacgaactgctgttccgggaatcattaatgagcccgtggatcaccgcccgaacctcggctgacggctggtcgacgctggccaataaattcaccgtattaaccaattctgaaggtgaacgcgttcgctactggatagtgagcgataacccacgctttagcatggggggaacaccaccggtgggtgttcagtggtcttctttgcaggagggctttaataaagtgcccggcgcatcggaaagcgcatgctcactgtttctattagtaaaaactatccccgccaacggtgaaaggcctgagctgcgctatattgttgccatcgactctacaccgtacatgggcacactgaatgccttcaccaggacgctgctaatcatagccgcactgggcgtcgttattgtcgccttgctgggatacatcgtatcaaggatcggtcttctccccgttggggcactcagtaaagaggcccggcatcttgcaccgggagaccatggccagcgcctgaacacccgcgctttgcccgaagaactgcagcaactggcgtcatcatttaatggcgtgttagagcgtcaggaaatcgcctggcgtcagcttgacagctttaacgccgatgttgcgcatgaactccgtaccccgctgaccaaccttatcggccagacgcaactgggtctctcgcgccgacgctcgcatgaggaactggaagaattattgggttccaatctggaagaactggaacgcatgacgtctatcgttaacgacatgctgttcctgtcccatgcccacgcgggtgaacatgcgtcccagctgactaaggtgtccctgcgagaagaaaccctgaaaacagcggaatatgtagagccttcttttgctgaaaaacagctttctctggatgtagagggagatgtcaccgcgcacatagaccggcgactgttccaccgctcactggctaatttactggagaatagcgcaaggcattcaccacccaatagcacggttaccgtacgcttaagcgataaaggtcatcaggcctgtgttgaagtttcaaacacgggtgatccgatagcaccagagcatttacgtcggctcttcgaacggttctatcgcgttgacacctcccgagcaaggagtgatacccatcatgggctaggcctgtcgatcgtgcgtgccgtcgccattatgcaccggggcgatgtctttgcacggagcgaaaacggtatcaatacctttgggctgacgtttgctaaaaagcctgaccctatccgcacaaaggaaccaatgtcagagcgtcttctctctaagcctgctgacaaaattgtcagagagccgtcagtctga

SEQ ID NO: 279805 - DNA, 657 bp, Morganella morganii
gtgagaataaaaaaagtatttagcgggtttctggcgataatggtcatggcgcttctggggcaacccgcgttcgccgcagagaattcatccacaccgtctcgcacgctgattatctatttttcccagcccgaggaaatgaagactgatgccgtggacggtttttccggggccagcgtattacaaaaatacacgccggagaccggcagtacgcagtttgttgcgcagctgattcagaagcagactgacggtgacctgtatcgcattgaaaccgccaccccctaccctcgccagcatgatgcactgttacgggttgccgaaaaggagcagcaaactaacgccaggccatcacttaaaacgccactccccgacctcagcaattacgacaccatttacgttggttatcccatctggtggtataccatgccaatggtgatatatagcctctttgagcaaaatgactttgccggtaaaacggtcattccctttaccacccatggcggcagccggttagccgactccctgcgacaaatagcccgcatgcagccgcaggccagattagtcactcgtgcgctctcgatctcgcgcaatgatgtttcaggccctgacgtacccgcgcaggttgagcaatgggtaaaacaagtccagccacagcgttaa

SEQ ID NO: 279806 - DNA, 657 bp, Morganella morganii
atgacgttacttctgttggtactgatgggatttcaccttcacggcgaaatcgtgcatgaatgggcggggattatttttacgctgctcatcatgttgcatttataccttaaccgacatcgattatggtcactgtcaccgaatattccgttaacgatgcagatagttaacagagccattaatgcagtgacgttcgttgtcattctggccgctattgtctctggcatgatgctgtcccggcatattcttctggcgctgccgttccacaacccggcgaattgggtcagaaaagtacacatgacgtcggtccactgggggatgctcattctggcgctacatgtcgggttgcactggaaaatgctggcaacgtttttctgccgggtcctgaacatctccggcgactcatacgttgcaaatatcattatgccatgtgttttttcgctcatcgcactactgggattgtacgggttgctgaacacggactatctcgattatttgctgataaaggtcgatttctcctttttcgattacgatgaatctgcccttcttttttattcccactacctcgcaattattattttatttgccttaatgacgcgctttttgctttggttttttatatttagaaaatgcaaagcgatgtcacccaataggggttaa

SEQ ID NO: 279807 - DNA, 480 bp, Morganella morganii
atgatcagacatttacgttacctcgggctgttactgcccttcttcacattttcatcctggccagcggaacaaaactactctgtccatatcgccccagcaggaagtcagaacgcggtgttcgggccagccgagaactttaccggtcgagtcagggttgatcctctcttcaaaccggataacgacatccctgtttccggggcttatgtcacgtttgaacccggcgctcgttccgcctggcatacgcatccggcaggtcagcggctgattgtgacctcgggtgttgggctcacccaacaagaaggccagccggtgcaggttatccgcgccggtgacgttgtctcttgcccggcgggcgtcaaacactggcacggggcggcacccggcagcgcaatgacgcatctggcgataaccgggattgtggatggcaaaagcgttaactggatggagaaagtgacagatgaacaataccacgctcattaa

SEQ ID NO: 279808 - DNA, 762 bp, Morganella morganii
atgaacaataccacgctcattaaggcattagcggcagccgtagtgctgacctttggttttggtctcgcggcacatgctgcgcccctcaataaaggagcctcagaaatgaaccacgaacaaaaggtttcagatacgctgtcagcccgccaacaggccatcccgttgattgcggcatcgatggccagcagtcagatggataaactgaatgcagccctgaatcagggactggatgccgggcttacgataaacgaaaccaaagagattctcgtccagctttatgcctatacgggcttccctcgtagcctgaatgcgcttaatgaactgatgaaagtcgtcgaagcacgtaaacaacgtgatatcaaagacgttgagggtaaagaaccggttgccccgatccctgtcggggatgagcttcgccgtgtcggtaccgcaaaccagacaaaaatctcaggcgctcccgtccagggcccgctgtttgattttgcccctgtgattaaccagttcctgcaaacgcaccttttcggcgacattttcgcccgtgataacctcgactggcaaagccgcgagctggcaacggttggcgcattagcggccacgccgggcgtcgaatcacaactgctgtcgcatacgcgagcaagtatgcgggtcggcctgacggcgtcgcagctgcgccagctggcacaggttctgcgtgaacatggcgaaagtgatgcagcaacgcgagctgaaaaggcgctgcagcaggcgctcgcaaacaattag

SEQ ID NO: 279809 - DNA, 585 bp, Morganella morganii
atggagcatgatcccaaccgcagaatgttaatcaccgcacttgccgggctgacgctggcgaacgtttcttttgcatcagctgcgaccggaaccgcaaacgtgcagggtaaaagccgtgttctggtggcgtacttttcccgcagcggaaatacacgggtgattgcgggcatcattcaccgcaacctgaataccgatctgtttgaaatcgaaccggctacgccttatccggaagactattttcagaccgttgaacaggcgaaaaatgagcgtgagcggggagtaaaacccgcattgaaaaatagcgtcgcagatatctcacgctacgagaccctgtatttaggctttccgatctgggggaccagcgtgccgcctgtagtgcaaacatttctcagcagccacaaccttgcgggcaaattactcatccccttcattactcacggtggctacggtaaaggagacggcgacgacatccttgcccgtctcgccccaactgcgcgtcgggaaaaaccgctggtcattgaatgcgaccaggagcgaagaaccactgaaacggtcaccagttggttagagacaatacgcagttaa

SEQ ID NO: 279810 - DNA, 1065 bp, Morganella morganii
ttgaagacaatcttaaaaacgctggccatctgcgtaatggcgggtggcctggtggctcagtcggtctatgccgagccgctggtcattcaggaacagggaagcttttctgctggtggcactatcatcactgcccccgggaaatttgacgcgaagaagccgctggactctgctggtcaaacctaccatggcgatcatgcctcagtgttctaccaaattccggaaaatccgcataaataccctatcgtgatgctgcacggcgcaggtcagttctcccgtacctgggaaagcactccggatggtcgcgaagggttccagaacatcttcctgcggcgcggattctcaacttatctggtcgatcagccgcgtcggggcagcgccgggcgcacgacagtagaaggtactgttacgcctaaaccggatgaacagatgtggttcaaccagttccgcgttggcgtgtggccagagtattttaaaggtgttcagttctctcacgacaaagaagcactgaatcagtatttccgtcagatgaccccaaataccgggccgtttgatatcaatgtcatctctgatgcgatgtccgcagtagtggataaatccggccccgctatcctcttcacccactctcagggtggcggaccaggttggtacacggcgatgaaaaacaacaaggtcaaagccattgtcgccttcgagcctggcagcagctttgtcttcccggaaaaagaactcccaccccctatgccaagcgcgttcgacacgctgaagggtgagccggtgccgatggagcagtttatggctctgaccaaaatcccgattctgattatttacggcgataacataccggataagcctgtcaccatgcctgcgcaggacagctggcgcgtacgtctggcgatggcccgtgagtggcgtgacgtggtgaataagcacggcggggatgtgacggtgactcatctgcctgaagtgggaatcaaagggaatacccatttccctttctctgatttaaataatgtgcagattgctgatttggtgggtcagtttttgaaggaaaaagatctgcaatag

SEQ ID NO: 279811 - DNA, 987 bp, Morganella morganii
atgaactacaaacatctggggcgtaccggtctgcgggtgagccgcatcggtctcggtaccatgaatttcggtgagctgacggatgagtcggccagcttcaggatcatggatgaagccgtggatgcaggtatcaactttttcgataccgctgacgtctatggcgggccgcagtcgccggatatggcaaagggttacggaacatccgaagaaatcatcggtagctggctggcgcgtagtggtcagcgtgaccggatagtgctggccacgaaagtttaccagccgatggacacggggccgaacgacaaatacctgtctgcctaccatatccgccgggcctgtgaggccagcctgaaaaggctgaaaacggaccatatcgatctctatcagatgcaccatatcgaccggaacacgccctgggaggaagtctggcaggccatggaacagctgatccgtgagggtaaaatcagctatgtcggcagcagtaactttgctggctgggatattgccactgcacagtgcaaggctgacgcgcgcagcctgctggggctggcatcggaacagagcctgtacaatctgacccagcgcacgattgagctggaagtcattccggcgctgcgtcattacggcattggcctgatcccctggagcccggtcgggatggggatgctgggcggtgttctgaagaaaattgccggtggccgccgggcatcaccgcagctgcaggcacaaatcaaccgcctgcggccacaactggaggcctgggaaacactgtgtgatgagctgggggaagcgccatcagacgtcgcgctggcctggctactgcagaacccggtggttagcgccgtgctcagtggtccgcgtacagttgaacagctccgtcagaatctcaatgccctgacgctgtctctttcagatgatacgctcaaaagactggataccatctggccggggccaggcggagaggcacctgaagcttacgcgtggtaa

SEQ ID NO: 279812 - DNA, 1029 bp, Morganella morganii
atgaaaaaatttacgttagcgctggggctgttgatcagtgcatttgcttcctctgcggcggatatgtcccgtggggccgataatttttataaaagcgataaggtgacgcagcaaaaagtcacctttaaaaaccagtatcagatggccgtggtcggcaacctgtttatcccgaaaaagatgaaccagaatacccgacacccggcgatcgtcgttggtcacccgatgggagccgttaaggaacagagttcaaatctctatgcgcagaagctggcggagcagggttttgtcacgctggctatcgatctctctttctggggagaaagcgagggcaaaccggggcacctgatttcaccggaaatctacacagatgatttcagcgcggcggttgattatctgagtacacagtcgtttgtcgatccggataacgtcggtgtgctgggtatctgcggcagcggaagttttgttatcagtgccgccaagattgacccgcgtatgaaagccattgccacggtcagcatgtatgacatggggagtgcgttccgtaatggccttaatcattcccagacgggagaacaacgtaaggcctttatccagtcagccattgagcaacggttagccgagtttaaggggggcgagacggcttatatccctggcaccgtgaacaaactggatgactccacaccggatattcagcgtgagttctttgatttctaccgcacagaacgcggtggctacaccccgcagggtcagaaagaagaactgacgacgaaaccgatgctgagcagtattggcaagtttatgaacttctatccgttcaacgatattgaaaccatctctccgcgcccgatgctgtttattaccggcgatcaggcacactcaaaagagttcagcgaggacgctttcaaacgcgctggtcagcctaaagaactgtatgtcgtaccgggcgcagggcacgtcgatctgtatgaccttaccgacgtaatcccgtttaacaagctgacagactttttccgtaaaaatctgcaataa

SEQ ID NO: 279813 - DNA, 1047 bp, Morganella morganii
atgacagttaaagcttacggtgcccatgcgggcacattgccgctggagcagatggatatcacccgtcgcgcccccggtgctcatgatgtgcagattgatatcgcgtactgcggtgtctgccattcagatatccaccaggtacgcgctgaatgggccgggacgctctacccatgcgtgccgggacatgaaattgtcggtcgtgtagtggccgttggcaatcacgtctctggttttcgtgccggggacctggtaggggtcggctgcattgttgacagctgcaggcactgcggtgactgtgacgacgggctggagaactactgcgaccatatgacggggacttataatttcccgacgcccgatgcaccgggccacacgctgggcggatattcgcagcagattgtggtgcatgaacgctacgtcctacgcgttactcacccggaagcgcagctggccgccgtggcaccgctgctgtgcgcggggatcacaacgtactccccgctgcgtcactggcgggcgggtcccggcaaaaaggtcggggtggtcggtatcggcgggctggggcatatggggatcaagctggcgcacgccatgggcgcgcatgtcgtggcatttaccacgtctgagtccaaacgagacgccgccaaagcgcttggtgcagatgaggtggtggtctcccgtcatgccagcgaaatggaagcccatgcaaagagcttcgatttcattctcaacaccgttgctgcgccgcataaccttgatgttttcaccgcgctgctgaaacgcgatggcacgatgaccctggtgggtgcgccggccacgccgcatggctcgccagaagtgttcagcctcatcatgaagcgcagatcgattgccgggtcgatgattggcggcattcctgaaacgcaggagatgctcgatttctgcgcccaacacggcattgtcgccgacattgagcttatccgcgccgaccagattaacgatgcctatgagcgcatgctcaggggcgatgtgcattaccggtttgtcattgataacgccaccctggcttaa

SEQ ID NO: 279814 - DNA, 1218 bp, Morganella morganii
atgagtaataagacagacgaaaacagaaaaaaaaacaccggaagcgggaaacagcctgcgcactggagtggtgtctttgccatgacgctgtgcgtcttcgccctgatcgcctccgaattcatgccggtcagcctgctgacaccgatggcgaagacccttcgtgtcaccgaaggcatggccggacagggcatcgctatttccggggcatttgcagtggtaaccagcctgtttatttccgtgctggcaggcacgcttaaccggaaaacgctgctgctcggcctgacctgcattatggcaatttccggtgctgttattgcgatggcacccaattacctgacctatatggcgggcagggccctgattggcattgtggtcggcgggttctggtcgatgtcggccgcgacggcaatgcgtctggtcccggtgcatcgtgttccgctggcgctggctattttcaacagcggcaatgctctggctaccgtcgtggctgccccactgggcagctggctcggatcggttgttggctggcggggcgccttcttctgcctggtgccggtcgccatcatcgcgtttgtctggcaattactcagtctgccttccatgtcggtcacccgtcaggcggcggcttcccgcaacgttttcatgctgtttcgtcgccgggtggtcacgctgggcatgctgggtgtggggatcttctttgtggggcaattcacgctctttacctacatcaggcctttccttgagacggtgacgcgggtggatgacgcaacagtgaccctggtcctgctggttattggtgtcgcgggtttcatcggcactacgctgattggccgggtgttaaaacgcgggttctacccgaccctgatggccatcccggtactgatggccatcaccgcgctggcactgattgccttcggcagtcaggtagccatcgtgacggcgctgcttgggctgtgggggctgatttccacagccgcaccggtgggatggtgggcatgggttccgcgtaccttccctcagaatgccgaagcgggcggcggactgatggtggcgatggtgcagctgtccattgctctcggttcgacggtgggcggcctgcttttcgaccatcacggctaccagagcaccttcctggccagcgccgcgatgctgattatcgcaaccgtactgatcttcctgacctcgcgggcagacacttctgccgcagaccattcataa

SEQ ID NO: 279815 - DNA, 462 bp, Morganella morganii
atgcaaaacgcttaccgcagaacatcactgctgctccttgccggcctgcttttcgtcacgcagtccgctatggcgggtgacaacgaccggggagtggcgctggagacgcttatgaaaattgagatcattgtggagggagaaaccgccaccgccaccctctttgatacgccgacaggccgggactttgcgtctttgcttcccctcagcctgacgctggaagactatgacgatattgagcgtataagcgacctgccgcgcaggctttccacggtgcaggcaccgtacggcatgacgccggaagccggagatatcacttactacgcgccctggggcaacctggcgatttttgcccggggcagggcttacgcccgttcactgatcccgttagggaaagtggattccggactgccggtcctgcagcgccacggacctcttgcggtgcagatcagggtcgccaactga

SEQ ID NO: 279816 - DNA, 900 bp, Morganella morganii
atggccagacgcaatcttaacgacttactctctttcgtcaccgtggcgcgtgagggcagctttacgcgcgctgccgcccagctcggcgtgacccagcccgcactgagccaggcgatttccgggctggaagaacggatgcaaatccgcctgctgacaaggaccacgcgcagtgtgtcagtgacggctgccggggaacgactgctgcagtctgtgggacatcgtattgatgagattgaagccgagctggacatgctgacggcactgcgtgataaacctgccgggaccgtccgtattacatgtggacctaatgttctgaagaccacactgctgccaaaactgacaccactgttacgcgaatatcctgatattcatattgagtttgatgccaaccacgggttccgggatatcgttgcggaccgttttgatgcgggtgtacggctcggagatactattgacaaagatatgatagccgtacccattggcccgaaactgcgcatggcggctgtagcttccccagagtatttcgcccggtgcgccgcccctcagacgccacgcgatctgatgcaacactgctgtattaatgagcgcatggttcaatcggggaaaatttacgcctgggagtttgagcaggaaaacggcaaatttcacgttcgggttgaaggtcaattgacgtttaacacatcggaacacgttgttgatgcagctctggccggactgggcattgcctttttacctgaagaggagttcggcacacatctgcaggaaggaaaactgattcgtgtgcttgaagaatggtgccgtccttttcccggctactatctttattatcccagccgtaaacagccttccccagcgttttcactcgttgtggatgcgttgcgtattaaccggaaaatttaa

SEQ ID NO: 279817 - DNA, 1443 bp, Morganella morganii
atgactcaacatatcaaaggtcaaggcagacatcaggtgacgttgctccctgaagtgctggatgattttgtcacagaagacaaccctgtcagagttattgacgtctttgttgatgaactacagcttgatacacttggctttgagcgcgttaatgcaaagcaaaccgggcggcctggatatcatcccgcaaccatgctgaagctttacatttatggatacctgaaccgcatccagtcatcccgccggttagagaaagaagcccatcgtaacgttgaattgatgtggttacttgaacgattaacacctgattttaaaaccattgcagacttcagaagaaacaatggtaaaggcatcaaaaatgcttgccgcactttcattgatctgtgtcggcagatgcagatgttcaccgatgtggtggttgccattgatggtagtaagttcaaggcggtaaacagcaaatcgaacaatttcacgccccagaaaacaaaaggccacattgaaagggttgagcaaagtattgctctttacctgaataagctcgatgaagctgacaaggctgcggagcccgaaaaaaatgcatgtttaacaactgcgaaactggcatggctgcaaaagcgtctgaaagaactcaagaaaattcagcaggccgttgtgcagcaccctgataagcagctgtcactgacagatcctgattcccggttaatgaagataaacaatgttaaccgccaggtgagctataacgttcagactgccgttgatgctaaatatcacctgattgttgcgcatgaagtaacgaatacaccagaccgtggtcagctaacagcggtgaccaaattagcgcaggaagcagttggcaaagcggatattaccgtactggctgataaaggttattacagccggggagatattaaagcaacgcaggacttaggtgccgtagccttagtaccaaaaggcgatacctctggcgctgaccgtaaaggtcttttcaatcgttcattgttcaaatatgaccaggaaaaagatatttatatttgcccgatgggtgaagaacttcagaaccgatttacgatggttgaggatggtttagaacagcaaatgtactttaacaatattgcctgtcgcgattgcagtcagcggtcaaggtgcaccacatcaaaacgcgatccgaggcgtataaggcgctgggttcatgaagcagaaatggaagacatgcaagccaggcttaatgcatcgccacaaacagctgtcgtgcgaaagcaaacggtagagcatccgttcgggacaattaagatgtggatgggagcgactcacttcctgacgcaacggtttaaaaacgtcagcacagaaatcagtctgcatgtactggcttataacctgaagaggatgatgtccatctggggggccgaaggattggccattaagctgcgagaacgatgcagctag

SEQ ID NO: 279818 - DNA, 453 bp, Morganella morganii
atgtccaaaaatactaggataaaatacgttgttattactctcattatggggatcgtgttcctcactatgtatcaaattaatatctataaaccctctcttccccaccctactgcaaaggttatagagccgggcacactttacccgataaaaatgactcttgataacccaccgatttttggagccaggggtgtacaacaggattacctcgttccacttaatgcagagcaactatacagattcgagataagagtaaattggaccagtgtcggggcaacactcacaaataatcaaatagttttaggggaacttcactgtggatataacgcacgttgtcattttaccgtgaaacctgaacaagatactctggcattattgagagtctatacagacgatccggacaacgaatttactcttgatatcagaaaagaaaacaactctttttttcggctctaa

SEQ ID NO: 279819 - DNA, 282 bp, Morganella morganii
atgaaaagtaatcagaaattattgtgtgatctaggtgtattgatacggacattgcgtaaagaaaaaggaatgagtggtgttgacttgggggtggcaatcggcattagccagcagcaggtatcacggtatgaaaatgctaaaagtgaaatatcaataactactgtttttaatattttatctgtatttaatatgactcctactgagttttttatccgtttatatgaaaataacaataatagcgaaattgagtctgttagtcgctattcttcactatgttggtaa

SEQ ID NO: 279820 - DNA, 3780 bp, Morganella morganii
ttgaaactcagatactcaaagttggctctgctcattataggaacttattcctttcagagtattggtgcaactataattaatggcggaagttctcagacaataaactcagcattcactgacccaaacattactgtaggcaaagataccggcggcacactgaatatagataccggaggtattgtatcaactgaacacctgggtatagggctaagtggctcagagggtactgttaatattgttaatggcggacagttaaacatagaaggcaaaagctactcttatccgctggatatcggaggttcaactgatggctccggcacaacaccggggggaactgggattttaactatttcgggtaatggcagtacagtaaattttagttcagctgtaaacagttctgttaacgtcggtaaaaatggcggaaatggtattgtttccgtcacagatggtgggaaatttattattaattcatctgacgggatgtggattggctccagggcagacaaaggtaatgttgccacgcaaagtggttatgtcagcattgacggtaccggcagtgaattaatctccagcggacgtattatcgtcggaacttattcacggggcactctttccgtgactaacggaggatatgttcacaccggtgatcgtttaaatgtcgggaatcaggcagaaaccagtgcatttgataatttactttttattgatggagcaggctcagaagtatctgcagaaaagtcagttcaggttggcctgcaaggcaaaggaaccgctgttgtcagtaatggcggcacactccgtaccgacactatttttgttgcgaatggtgcaggtagtaacggtgaactggctgtcggtgcccgggaaggtgattcctctgctgccgcaggcaatattgatgcttcagttattacttttggtaaaggtaatggccggatcacattaaatcatactgactctgatttcctgttatcctctgatatcacaggcaccggtgtaattaacgcattcaatggcacaacccggcttgccggaaataatgcggcatacacgggtgatatcaatatcagtagcccggcgacgattattgtcagtcatcagaataatctgggtgacaataatattatcaatgacggtgaacttcgtatacaaagtgacactgactgggtttttactaatcccctttcaggttctggtatgctgacagcagacaccggaaataatcacttttcgtttaattccccggcacccggaacaatgttttccggaacggtaaatttactgaatacgttgtttgacctcagtgatattaataccggcgccctggcacaatctgtattattactggggcagggaagccataccaccgtcggtacaggagagcagcggattggcagcctggcctttaacggtggtactctgatttttggtaatatcaatcccggtgatgcggcaagcagggaatggataacgaccagcgatagtttggacctgaccggaaccggtcaaattcagatttcaagctccggtgtctttaataacccacctccggttccggcagcatctgttccgctcctgcagcaggatgatgggggcgttatgattcaactggcaaatagtcagggcagtgtaagcggcaatgccggaaacctgacgttagttgatcaagataataatgtaatctcagacgatacccgtgtttctgttgttcagaacggtgaagtcgtcgcaaacggcatttatgattaccggctgaccagcggtgaaaataatgatggcctttacatcaattacggattaacgcaggttgaattactggcacagggtgcaaacgcactgacgctcagtgcggaaggaaacagcggcaatgcggctgatctgagcgctcagattaccgacagtggcgacctgcgtattaacaccgatacaccactatcactgtccaacagcgccaacagctataccggcacgacctggcttgatgccggtacactgaaaatgggtaacaacaatgtgctgggaaatactcacctgctgaccctggctcagaacacacaactggatatgaatggctttgcccagacactgcagaacttgagctcagcggagggcagcctgattgacttaaaccagggtgcgctgaccgtgaacaacggtacggtggccggtaatctgaccggtgccggcagcctgaaggtgaccggcggaagcctcagcatcagcagtgataataccggcatgacagcagataccaccattgatgaagacggcagtgtatatatgcaggcgactcatgcattgggaagcggcagtgtcagtaacagcggcaacctggttatcggtactgactccgcagataataaccgccccctgccaaccggttatcaggttggctctctgactaacagcggtaccgtcgcagtcacccacctggctgccggaacacagtttcaggtaaacggaaactataccggtcaggatggtctgattcagttcgataccgttcttgaaggcgataattccctgacagataaaatgaccgttaccggagacacatccgggcagacatttgtcagtgtgaataatatcggcgggcatggtgaccagactatcaacgggattgagctgatcagtatttccggggattcagccggtgagtttattaaacagggccgtattgttgcaggaacctatgattactcgctggtcagaggaacaggcagccgggccggtaactggtacctgacatctgaaaatacagacgttgatcccggcactgatcctgacgcggacaaaaataatcgtccggaaggcggaagctataccgcgaacctggcggcagccaataccatgtttaatacccgtctgcatgaccgtctgggtgaaactcagtataccgatgcactcaccggtgaagaaaaagtgaccagtatgtggatgcgtcaggtcggcggacataacaactggcgcgataacagcgggcaactgaaaacacagagcaaccgctacgttatacaaataggcggggatattgcccgctggagtactgacggactggatcgctggcacctggggataatgaccggctacggccatgacagcagccgcacccgttcgtccgccaccggttacagttcaaaaggttcagtcaatggttacagtgtcggcacttatgccacctggtatgcgaatgatactgaccacagcggcttatacgcggacacctggttacaatacaactggtttaacaatgacgttaacggggaaggcctggcttccgaatcataccgttcccgtggtctgaccacctctgctgagaccggttatactcagaagttaacggaattcaccggcagtaaaggttcccgtaatggatggtttattcagcctcaggcgcagatcacgctgatggatgtcagagcggatgatcaccgggaaaataacggcacccgtgttgagggtaaaggcaacggaaatattcagacccgtctcgggatacgtacttaccttaaggggcacacccgtgaggatgacggaaaagacagagagttccagccgtttatcgaagccaactggatccataatacccgtaatttttccgccggaatggacggtgtgagcctgtctcagaaaggaacaaagaacttgggagaagtaaaagttggtgtggaaggacagatcaacccgcacctgaatttatggggaaatattggtgttcaggttggtgataacggctataacgacagtgccgccatgcttggcatcagatataacttctga

SEQ ID NO: 279821 - DNA, 6966 bp, Morganella morganii
atgaataagatttttaaagttatctggaatgcgcggatacatgcttttgttgttacatcagaactggctaaaggttataataattcaggttcattaagttgcgctgataatatcttaaataataaagtgttatttaaatttaatttggcgccaataccttttgcattatcttttttttgctgtggtgcttatgcagcagatatacaggtatataactttaccccacaaaatccatttgaagaggttattgttggctcaagcaatttaacggggagttttgctggtattcaaaagggagaaagtggctccaagtggaccacattggggcaagctaaagcagatggtctgatcactggcgatagcgctcaatgggttgaccatgatatttttagaattggttctcagactaagtctattaactacatagatcctgtgactggcaacaccgtgacgatgaaagtttatgataataacgatattcaaacggagcctgctgcagattttcgcataacaatctcaaccccagtgggaaaagatggtcaatatgtcgatagaaacttttaccagattggctctggtgcgtctcttgacgtcaatgttggtaaaaccacaggaaactgggtcggggcggcagaaaaccaattcaacgttattttgaaaagttcttctaagactaagaataattcttcagcatttcacgtgacagatggggggcaacttaactatctgtcgaagactgtcgttcagctcggtaataatgataataatatccgagactccagtaaccccgttgcctggatgacagcagcagactttgttggctcttttgatagtgtgattggcccacagaatattactaacattgatgagtttaaagcctataacgatgctttaattaaagccctgcaagacggtaaaattcagttaactgaggctgaatattctgctgaattgaacaaggccagagatcaaacattacatggtattgtcgttaatacagataatattgcttctgacgatgcagtaagagcgactgtcaatcgagacgtcgtgtcttatcttcatgctgaaggtgctggttctaatattaacattggcgatgacgctaacatccagctggtcggttcagatgccaccgttgttaacctcgagaatggggcgacattaaccaacgatggtacgctggggactgcgggcaatactttccgtggtgcttatgttgtggccgcccgcaatacctcctctgttgaaaacaatggggtgattgatgccggcacaaaccctgaaatggcagacttctttcagggcggagctgcgggagtggcgaatggtacccataccgcaatattagcgaatggtgcgtcggtagttaacaataatgacactggcgtgattaatgttgctgcaagaggtaactactatggtaataccggagtattactcagctcctctgctacgttaaataactatggcgcgatgaatattgcggctagcaaggaagcaggcagtattttgggcgaaggttctaatattggtgtggtcactcagcaaaacaccacatttaataatgaaggtacgttatatattggccgtatggcgcaacgatcgccatctgacagcactgatgatttggccataaaacaatcatcaataggagtgcacctctatggcaacggtacttataacggaaaaactaattcagaaattatcattggttctaaggttcagaatgcgaccgctattgatgctggtggtccggcaacattaaatcagcagggcactatccggcttaacggctcagtatctggagagtctgtctccagtaataccgggattcttgttcgcgagggtactaatgctaacaaagtgaccaatagtggcactattgatatgaatgggttgaatagtactgggattaaggtgttagctaatggacaaattacccattcagggacgatcaacgttaatggtggtcttgacccggtaacccattatgccaactatggtatttacgcccagggcgaaaaagcattggcgatcttatccggtaaagtgaatcttaccggtaatggcgctatcggcgttcatgccagagataaaggtgaaattgacgtaactcaaaatggagccgtgacgtttaacggaggtactaaccaaacgggttactatattttcggtgccggctcaaaaataaaaaacgatgccagtagtgtgcaagatgtatcaacgcaagactcaacgctctaccgggttgatggaggcgcctcttttgacggttccggtaatagtgctgcgcaacttaatgcctctggtgataatgcgaccataattcgcactacaggtgcggggagtcaattcagctcaggcaaattagcacttagcgttaccggagaaagggctacagggatccgaattgaaggcggtgcctcgggagaaattactgcagacgccgtgattgtaaaagtggcgggcaaagatacaactgcgggcattgtagacggtaattactatgaattggatggttctgagaacgccgctaaaaaaggcaattctgttcttaccagctacgccaatttggaaacagcgaatactgctgatggggcatttggctatattgcgcgtaacggcggaaaattgatccataagggaagtatcgattttaccgaggcgaatagtacgggagtattggtggacggcggtattttggacaaccgttctgccattacggttaatggtgtcgctgtaaatattcagggcgacagttctgaagtcaccaatactggaacggtcaccgcgaccgacggtactgcagcttatttagtcgggaaagacgccagccttaatctgaacggagacggaataacaactgctgcgggtaatgcacacggtattttactcgatgacggagccaaaggtctgacaattgatggcaccactataactatgagtgatacaggcagcggcagtgccatcgagaacaaagccaatattgcaggtattcagttaagcaataccaccattaatgtcggtaatggcattggcgtccacaccggagcctctatggctcaaaccaattccggaactgttaatgtcaccggcagtggtaccggtatcctgtttgaaaacatcgatggctcacagactgatcaaacactggatatgtccgattcaaaagatttggtgattaatgttcagcaggccggagggaaagggattgtgaccaatgcctcttctgacctgaaaaccggcgtgagtgttaatgtacttaattctgcgggcggtgctgctctgatagtcaaaggctccactcaaaaagttgaacagtcaggaaaactcacctctgagtcgacgacggatgctgtggttgatattaacaacggtagcgtgagtgaattcgtaaaccgtggtgatattctggctcttaatgcctctcttaaagcagttgaaacgacccgcggatccggcgttcagttcaccaatgctaatggcgggaacatcatcggacaggtaaatcttcttaccggtaataacgttgtgacgctggagtcaggcagcactgggactgattttaccaccggcaatggtagcgacctgttcttacttaaggatgttcaggagaatgaaactaacctgtttacatctcttaatggtgggacgggcgaggatacactgaaactggataattccggttatgtgttaaatcgcaccgatgccattaccggaatggaacatatcgacctcactaacggttcaatcttcaccttagataacgttctgctggcgctgggtgacggtcttgatgatagcgctgcaacgggctattccattgactctgcaagcactttagctgttaaaaatagcgcgggcgtcgcatttaatagccacttatccggcaatggactgataacgattgatacaacaggtaaccagtttgaattcacgtccaacaacgcggcagatggctttgccggaacggttgctgtggggaatacacgttttgagctggatagacttaatactcaggctttaaccaatgcaacacttcgtgctgacaacggtagcattacccatgttggtaccgggcagcaaactatcggcgggctggcgtttaacggcggtacagtgaagtttgacggtgtgacgcctggcgtgacagaggccgcaggaactattcataccactgataacatgaatctgctgggcaaaggtattgttcaggttgataccggcagcgtaagcaatgatcgtcccttaccaaatacaaatgtctccctgctggaacaggatgataccggcagcctgattaaactggctgattctgctactgcggttcagggcagcggcggtaatttagagctgcatgacgcagacggcaacataatttcagatagcgttacattagatattgtacagaacggaactgctgttgccaaaggtacttatgactaccgtcttaccagcggtgaaaataatgacggcctttatgtgaactatggtcttactcaggttgaattgctagggagtgataacgatgcattagtactcgatgcaaacggcaaaacaggcaatgccgctgatttgagtgccaaagtcacaggcagcggcgatcttgcattggatagccgacagggagaaacagtctctttatctaatatggataacgattataccggcgttactgatgttcgcagcggcaatttactgatgctgaacaataatgttctgggtttaaccagtgagctcaaactggcaccggatacagccctcgatatgaacggacatagtcagattataggaaaactggctgcggaagcgggatctctgctgaatatcaacgggggtaaactgacaataagccacggcggtgttgcttcgggggagttggctggcggcggggagctgtttattgctgcagataaattaacagtgaatggcgccaataaaaatttgtccgcaacaaccacgattaacctgggggcttcagccgagctgaataacactctgggtctgggtatcggcgatattgcaaataaaggtgagctgttgctgaatacagcggatggcgttctctataacaatatcagcgataacggtgcagtagctctgaaagatagcaatgtagtgcttgccggtgacaacagcaaattcgcgggcacattcactattgattctacttctcaattgactgcgggttctgcacagcatttgggagcggccgatatagaagatgcaggcgggctggtactgaatactcagtccgactggaatttgactaacaagatttccggaagtggttcccttatcaagcagggcagcggtaatgtgactcttaacgaaaacgtaacttataccggaacgactgacatccggcagggagctttgattctcggtaatgagaatacaccaatgacgcttgccagccggcaggtcaatattctcgagggagcgaagctctccggatttggtggtgtcgccggaaatatagataaccagggtttgctacagattggttcagatacccaaactgacggtaagacccaaactttcaccattggcaaagatctggtaaacagcggaaccgttatggtcggtaataataccggacatgcaaccgcgggtaatcagttgttggtgaaaggtgactacaccggtaatgatggacacattcactttaacaccgcacttggcgacgacaattcggttacggataagatggtcgttaccggcaatacctccgggaaaaccggagtcagcgtcagcaatgccggaggtaccggtgctcagacgctaaacggcatcgaacttatccacgtggatggggcatctgatggtgaattcaatcaggaaggacgtattgtggcaggcgcttatgactacacgttggcgcgtggtaagggagatagcagtggtaattggtatctaaccagtaagcaaaatggtgaaaatcctgatccgggcccaaatccagagccgggtgaaaatactgagcgtcctgaaggggggagttatattgctaaccttgcagcggcgaataatatgttcgtaacgcgtttacatgaccgtctgggcgaaacccagtataccgatgcgctcaccggagagcagaaagtaaccagtatgtggatgcgtcaggtcggcgggcacaataacttccgcgatgctgccggtcagttaaaaactcaaagcaaccgttatgtgatgcaaataggcggcgatgttgcccagtggagtaccgatgggctggatcgcttgcacttaggtgttatggcaggctacggtaagaaccacagcagcacgtactccaacatcagtggttatggctcgaaaggttcagttgatggctacagtagcggtatctatggtacgtggtatgccaatgatgctgagaaaacaggtacctatattgatagttggttgcaatatagctggtttaacagccatgttaacggtgaacaaattgcctctgaatcctacaagtcacgcggaatcactgcatcggtagaagtggggcataccattaagtttaatgagtttaaaggcagtctcggtagcactaatacttggtatgttcagccgcaggctcaggctgtttggatgggggtcaaagcgaaaaaccataccgaagtcaacggcactcgcgtaagtagcgatggcggcggcaacctgatgacccgattgggcgtaagaacttatctcaaaggccatcatgccgttgatgaggggaaaggtcgtgaattccagccatttattgaggccaactggatccacaacactaaagatttcacgactacattgaatgggattgctgttaaacaagatggcgcccggaacctgggagaagtgaaagttggcgtggaaggacaaatcaatccgcacctgaatttatggggaaatgtgggtgttcaggttggtgataacggctataacgacagtgccgccatgcttggcatcaaatataacttctga

SEQ ID NO: 279822 - DNA, 525 bp, Morganella morganii
atgagtacacctaaagacctgcaggtcagacctttaaaaaccccttcagatttatctccggaagcaactaaatcaattagcgccgcgatgaatgcgatactcgctgatatttttgctatttatctgaaaacgaaaaattttcattggcatatgagtggtcctcacttccgtgattatcatcttttgctggatgagcatagtgagcagctatatgcaatgacagatccgattgctgaacgtgtccgtaaaattggtggtatgacattacgttccgtcagccagatttcaaaaatgcaaagaatcaatgataacaacgcggattatgttgaaccgttagatatgctcgctgaactttgcgaggataataaacagttagctgcagaattcagagaagcacatgaattaacatccgggtatggtgattacccgacaaccagcctgattgaaaactggattgacgaaacagagcgccgtgtttggtttttattcgaagcttgtcgcgaagcaaaaacatccggccactaa

SEQ ID NO: 279823 - DNA, 237 bp, Morganella morganii
gtgcgtacaagagtttttcaccacgcgacgggcacgattttacatgagaaggtctataactctgcctggattgagacacagcttgcccacattgataaaaactctattcggggaacgtataaccatgctcagtatttggatggacgcagtgaaatgatgcagtgctatgctgactatatggatgagttggagggaagtttggataatgttgttaatatgaattctaagcaacattaa

SEQ ID NO: 279824 - DNA, 2001 bp, Morganella morganii
atgacgggaatatcaaatctgtcaaaaccgttttatcagagcttattgccatatccgggccggggtaaccaggtattacgtaccatcgtgtcgtgcatattggtgattttaatttcattaggattgcagataccctggctggctatttcgcttgtagtggtattttttgtaacacagacaaatattattcttaccaaggtaaccagttttttatttcttgccgctgtaaccgcttcaattggcagtgccattattgtgctgattgcaacctggaacgtaccttttctgcggttgcttatttcgatgctgattttgctgtccagtatttttctgatgcggacatcaaaggcaggcgttattttttttctggttgctgtatttgtatcctacggtcagacactggctgatacttcaccagactctgatttggtgattcgtaagctgttatggctttggatggcgatggtgtattcgatatctgtcactttaattgtaaatacacttttattacccgttgagccaaggaaacaattacaggatgcaatatttcgccagctatctgtggttgcaaaatgtctcgtttccccggcagataaaaaacaggcagaccgggatactgtcagtatcggtattaatttgcaggcactgtataaatatttgcgttttacagtaatgcgcgatgatagcggaacgtttaatgaatcacgcagtatggacattgtcacattcacatcagaattgcgggcattatccggccagttacctgaatcttttgataatttgcaggatgcgcaggccgcacaacaactcagccgggaaataatgacgttctgccgtctgtttgccggcggtgagaatcatcggcagcaaccagtttatcttgcaacaaataacctgatattacaggagatggctcaattactgacagcgctgatacaaagttcagccacgacatcagaagtacccggagcggtatgcaggataacaccggggccggcatcattttttatctctgatgcattcacaaacagcaagtatattttattttcactgaaaacattgctgacagttgtactttgttatcttttttatattgcgactgattggaacggcattcataccattatgataagttgtatcattgtggcgcagccggggttgggaaatatccggcggaaaatgtttctgcgtttgggaggagcagccatcggttctttatttgcattactggcaattattctggtgatcccgcaagttgattctgtgttcggtttattattgctggtagcacctgttttattactggccgcctggataacaaccggcccggagaatatcagttatgccggtattcagatagtcgttacttttgcgttggccgttcttgaatcaaacgggcctgtgtatgatcttactgaagtccgggatcgccttattggtatttttgccggaattgtttttgcagggatggttcatacattgatttctccggaacgggaaggggctgtactgatcgaaaaactggcctgtctgctggatgctgtgcggaaaaaatggctgacaccttcccgtgaattacgaaaccaccgtgcggatattctgatgaagatcgcggattgtggtgaacttatttcccgcattgctctggaacctgcatggacaggagcagagggggcgcatgatgcactttgtcaaagagctcaggaagtttttatgacagtaaaaaatcttgttcttgttgctgacaaagtttcactggcatatcaggaatacagcaggcaatgcagtgattctgccaggcaggatatgagcaggataatggtgatactcggacgcaatctggacattattacagcccgcctgcggggaaaactgacggaagacgtcagttatcctgagcttccgcagacgctgaatgccggtttcagcgctgcggttgcggaattatcccgcggggttgaattatttttccgtatcaccgggcgtcagcacaacatgtaa

SEQ ID NO: 279825 - DNA, 1014 bp, Morganella morganii
atgttacacatacgaaagctttacacggcattactgattatcagcacgctatcggtcctcggtatcgtgatatggaaaaccggaaatgcgccgcggactgatgatgcttatatttatgcggataccatcaatgtagtaccggaaatcagcggccggatcactgctttaccggcggaagataatcaattggtgaaaaaaggagatttactgtaccgcattgacccgcgtccttatcagaatgaactggatgttgctgaggcgaaacgggcaacactggaagcacagattaaactgacgcaacgctcagtcaatgcccaggaacataatgcacaggccgttgctgaccaggttgagagtgcccgtgtacaatttatccgggcgagggactcttatgaccgcaaactggcattggtaaatagaggctatatttccggtgatgaaattgacagtgcccgaatgctgaaaagcagtaccgaagctgcctggcgggctgcacagtcacaggcccggcaggctcgttcggctatcagcggtaccgatgctctcgaagctcagcgtcgtgaagtccttgctcagataaaaagggctgaactcaatctgcaatataccgaagtccgcgcaccatttgatggccgggtaacagcactgaaaacaacagcaggccaatatgcttctccggcacagccggttatgacgctgattgacacccggcactggtttgtcgaagcaaatttacgggaaacggatttagcggatatacacaaagggactccggtaaaaatctttattatgagtgataccggtaagtcattccggggcgtcgtggattcagtcagttttggtgttcagccgacagatggcggtacaattaccggcggattaccggctgtcagccggagtattaactgggtacatgtttctcagcgctttccggtcaaaatccgggttgataaaccagacccggacttgttccgtatcggtgcttctgccgttgttattctttatcgtggttaa

SEQ ID NO: 279826 - DNA, 615 bp, Morganella morganii
atgaaaaataatcccgttgtgacccagcgtaaaccagctcagaaacgcggccttgaacgtgtacaacagattttggatgcagccgaaatcttgattaccgagaaaggtacagaaggtataacagtcagagaattatcagcacgttcagcgacttccgccggttcgttttatcattttttcgcagacactgatgcggtacttctcatgctgaaaaagcgttatgatgagaaaattgatcaattactaaaacaaattacagcatcctgtacaccagaagagtggcaaggaaaaaatgctgtcggttttatccatgatctgttttcaccttatgttcgttttatcatcgcaaaccgggcatatttgcatattgcgctggatggagaatttaattacagcgaatccgtttttcatacctcactggtctccatgatgaaaacacgacaaccatcctggccggaagacagaattatccttgagtcccgcttcatgcactccactgccctcggtgttatccaacaggtttttttgcgtgatacggaaatggcgtacacatttctgccaaaagtgatccggttattgggctgggaactcgagatgatagaaaaagagccttaa

SEQ ID NO: 279827 - DNA, 174 bp, Morganella morganii
atgactttatgtaatttgttaccgggaagtattgggttggctaaaaaacagtataaaaaaagtaaaaatagaatgaatataattaatgaaaataatttagttatcatatttatctgcaaatggattccattttctgaagccccggtcacccgcccagccatcagtaacatttag

SEQ ID NO: 279828 - DNA, 600 bp, Morganella morganii
atggcatcacgacttgatattgaaaaatccagattaatatatacacaggacattggctggatagatcgcaatcatgcattaggcggggatgcgcgcaacctgtgggcgcaactgctcacagagaataccacaccctattacaaagattattttctggtcagttacgatcagtttatgggaaaatttttcattaaaatgggcgttacttcctgctggcttgtgaaaaaaggactcagagaagaagacaaaaaatcaattgctctttcaataatgttttatatctccacgctatttgaaactcatcaggggcgatttttattttccggcctgttagacagcgacagcggattcagcggggaagaccttatttccaaccttcttggtttttattccgtgattgaaccccgtgattactggtcactgataaaaccggttcccactgaaaccgcactgcgtatctgggatcattatatgaataccattcagccttttaattcctatgaaagtgatattgtaattaaactaaatgttactgatggctgggcgggtgaccggggcttcagaaaatggaatccatttgcagataaatatgataactaa

SEQ ID NO: 279829 - DNA, 303 bp, Morganella morganii
atgaaaaaacgaaatttcagtgcagaattcagacgtgaatccgctcagttagtggtggatcagaactatacggttgcagatgccgcaaacgccatgaatgtcggactttccactatgacccggtgggtaaagcagttacgggatgaacgtgccggcaaaacacctaaagcctcccctatcacgccggagcaaattgagatacgtgagctgaagaaaaaactccaacgtattgaaatggaaaatgaaatattaaaaaaggctaccgcgctcctgatgtcagattccctgaacaattctcgataa

SEQ ID NO: 279830 - DNA, 672 bp, Morganella morganii
atggggcgatggcttgccggccgtctcatgaaggagctggggctggtaagttgtcagcagcttgttcaccgatataaacgtaggggacacgagcatattgctatcccgaatcacctcggacgtcagtttgcagtgacagagcctgaccaggtatggtgcggcgatgtgacgtatatctggacgggtaaacgctgggcttaccttgctgtggtactcgatctgtttgcgcggaaacccgtggggtgggcaatgtcgttctctccggacagcaggctgaccaccaaagcactggaaatggcatgggaaagacgcagtaagccatccggggtcatgttccacagtgatcagggtagtcactatacaagcaggcagttcaggcagttactgtggcgataccggatcaggcaaagtatgagcaggtgcggaaactgctggggtaacagtccgatggagcgcttcttcaggagcctgaaaagcgagtggatgccggtgaccggttacaccagcttcagtgaagctgctcatgcaataacggattatatcgtcgggtattatagcgaactcaggccgcacgaatataacggtgcgaatcggaaaaccgataccgaaaaaactctaaaaccgtggccagttttagtggaccactacagatggatgaaagccagaggatga

SEQ ID NO: 279831 - DNA, 552 bp, Morganella morganii
gtgcttactttgaatgacataggaacgattaccagaaataatgttcagttaattttagatcagttaagaatcaacctcgcggttggcgacataaacgatgatgattacagaattttgtgtggtggatttggtgaactaaattgggatgagttcattagtagcattggtaatcatgaagatagatttgagttttgcattaaaataaaaacagtagagggcggtgtggctaccggtgttcctgcaggaatagcgttatgcctctactcaataagtgaaaacagttttgatatctacgctgtggagaacttctgtcgtaacaagcctgaccatcccttgcatggaaaaatgattcaactcacattgatggccgcctaccttttttcaaccgcggttaagtgtgctacaataagaattattgaaccagtgcaagaattgcttgacttttatgcacagtacggatttaatctacttccttgtaaatccatcatgcaggcagatgttcatatgttctctgacattatcagcaaaatggctggaaatgacacaaattga

SEQ ID NO: 279832 - DNA, 168 bp, Morganella morganii
atgtcaaagcagaaactaacccgtgatgaacaaaagttcagcattcaggaaacttattctgaaattggtgctgcggttgacctgttaattaaagccgctcctggcatgtttaaaaacaaacctgctacagagctgcaaggcagatgcaaacaccgtcaagctgcctga

SEQ ID NO: 279833 - DNA, 1122 bp, Morganella morganii
atggctttaattgaagaaattaatgatgcaagaatgcaagttcatgctgattcatatccgatgtcaattggtgagcttgtcaatctgtatattgatgaagagcttgaaattcatccggaatttcagcgagtttatcgatggacagaagaacaaaaaagcaaattaattgaatcaatattgttaggtataccattaccgtctatttttgtgtctcaaagacaggacggtgtatgggatgttgttgatggtttacaaagattatctactatattttcttttatgggggaattgaaagacgaaaatgggaataaattacctccattagagctaaaatcgacaaaatatttaccttcactatctggtaaggcatggaacaaacctagtgatatagataatgagcttgatcttgatatcaagagagttttcaaaagagaaaaaatagatataaagataattaaacgtgaaagtcaagatgatactaagtttgaattatttcaaagactaaatactggtggaacaaagttatcggatcaagaagttcggaattgtatgttacttatgataaattctgaagcatttaattggctgcaagaaatatctaaaaatgaagattttattacaacaactccaatttctagtagattagagcaagagagatataatcaagagttagttttgcgatttatagttcaaagaaattatagtgaaaaattacgtaaagcacattcagacttaggcccatatttagatgcagaattaaatcgtatttttaataaacaatcacctgttattgattatgaagaagaacaattaatttttgagaaaacattttatgtattaaataatgcccttgaagataatgcttttaaaaaatacaataatgaaaaaaatcgtttagaaggacctatttccatccccgtttatgaggcgttatctacaggagtttctttctatatagaaaataataaaaattacattgagaaagatttggtaaatataataaaatctgccagtacagagatatcttcacatcatgatttcactgcaaccttagaaaaaaatattcgtccattggatagaatggtcgcaatgattaatctggggaaggaattaattaagtga

SEQ ID NO: 279834 - DNA, 1575 bp, Morganella morganii
atgaaaaaaattgtcatactgggcagtagtggcgggaacctgtacaacctcggtggtgcagatcctgaaaaacttctgagcgaaatctacacacaatgtcagtccgccggtgtttctgttgctgcggtgcagtttattgcagcacaggcgtcgatggatgttgccaaaccctctaccgccgccgcggtctacaccctgacagaagcagatgccgtgcctgcggtgacgttctccggcacccttgcagaagtcaatgacgccgtgcgcggcagtgatgaacagattgcccggctgatagaacagggcgatatcgacggcatcattattatgagcggagatccgcacaacgccaaccgcctggcacttcaggctgcggcggaaaagaaagtgccgatcgccggtaccggcggcacctcgatggcccatatcgccgccgccggtgccaatgtgattgccacctcgggtaccaccggcaccaccagcagaacccgggctatctcgtttatttcctccctgtgcaaacactggggtattaaattccgtccggtactgggcagtgcaggcagcaccggcgggccgtccgacaagagtctgcttaagcggatgaatatccgcggcattatgatcccggctctgcccggctttattgccatggcgattgtgctggcgctgagccacatcccgggactggaaagcctggatgcgatcttccagctgctgctcaaagggctgccggtgattgtggcggtgattgctgccaaacaggtttccgaactggatgaggtttcgattgtttccggggttgtcgccggggtgctctcggtcgagggtggtctgatcggcgggatcgcaggcgggatcatggcgggtatttttgtccgttacctgtttgccctgtgcatcagctggaaattcccgatgaccaccgtcaacatcgtggcgggcgggatttccggtctggccgccggtcttatcatgttttatttcctcagtccgctggcgctgctggccggtaactacatcaaactggcgctggaaagcaccctcgccttcagtccggttctggcgggactgctggccggtctggttatctggcctgcgatcctcggcggtgtgtatcacgcagtgatcctgccgctggtgctgcttgagatggaaaaaaccggtgtcagcttcctcggcgcggtggatatggtcgggctggtgatggtggccgccggtattaacctggcaaacgttattgccccgcgtgaacgcagtgaggccgcggtcgccgccccgggactgcttatcaatctgggattcggtacctttgtggaatcggcgtatcccttcatgtttgccaacaaaatcgtgttcggcggtgccattctttccgccgggatcggcggcatgatgctcggcatgtttaatgtcaaaggggtggcgtatgtcccggcgtttgcctctccgttcttatccagtaacgcactttacatggcgctgaccatgaccgtgattctggttttaacctgcgccataactgtcattgccaaccgtttcagtgccgtgacaaccgcgaaagccgcaggctga

SEQ ID NO: 279835 - DNA, 756 bp, Morganella morganii
atgaatccgataaaaagaaaggaatacatcctcgatctgctgaatcagcagggggaagtcagtgtgcaggatcttgctgatacactgaatgtcacctctgagacgatccgccgtgacctctccattctggagaaagaaggcgagatcatcaaaattcacggcggggcgatgaagaaaaagagtgtcagcgaaggcagttttgaacagcggctggaactgaaccgtgaggaaaaaatgaccctcgcgcgctatgctgccgggctgatttccgagcacgacacactgtatatcgattcctgttcgacaacgctcctgttttccgcgcagttaccggcaattgcatttaccgttttcaccaattccgcccttattgcggataaaatcgcctcacagaacccgcttgcaaaagtgtatgtgctgggtggtgaatacaaccatgaattccgggccaatctcggtgcgaaaaccctgcatgaaattgatcatatttatgcggactttgcgtttgtcggcgcaggcggtgtacgtgatgaaggcattctggtcaaaagtgttgaagaaggcatgattgcacggaaaatgctggaaaaaagtaagcagaaaattattctggccgactccagcaaattcggccagcaggggattttaaaaatcgcggagattgccgttatcgataaaattatctgtgacgataaatggcagaaagcgcacgaattccgtgaaaaatatccggaaaaagtcattatcgtgccgtaa

SEQ ID NO: 279836 - DNA, 678 bp, Morganella morganii
atgacatattatcttctggttatcgttaaatttatcatcggctttgttattgtgttaacgcacatgaatatctccgggaaaacccaattatcacaaatgacaccggttgattttattggaaactttgtactgggcggcattatcggcggtgttatttacagtgataccattccgctgacgcaatatattattattctgctgatgggggtgagttttatcagcataatcaattgggtcagcaaacatatcagtgtactgcgcgcggtgactatcggtaacccgatcccgattattaaaaacggggtatttatcatggatagcattcatgagaagcgcaataagatcgatattctgaatatcacctcccgaatgcatgcacaggggatctattcataccgcgatgtgtattatgcgcagatagagccggacggccagctgacggtgatttgtgaccagtcacagatgccgtctgtcattgtgatgaaagacggcgtaccgcgtaaatatgaactggaacagattggtcatgatgagccgtggctggcagaccgcctgaaacagcagggaattgacgaccctgagtctgttttcctggcggaattttataacggcagcctcaatgtggtgatgaaggacgggcggatgaccggccatcacagcgagccgtcacagccgtaa

SEQ ID NO: 279837 - DNA, 456 bp, Morganella morganii
atgaaaaaagcattattaagttcactcatccttgcgggggtatttgcgctggccaccgggtgtgacgacagcagcaaaacagaccctgctacgcagaaagcacaggaaggtgccgcgcagattaaggaagccgcagagcagaaagccgctgaactgaaacaaaatgcaacagaagccgcaggtgatgccaaagaaaaagccggtgcggtgatggctgacgccaaagagaaagcagccgaaatccgtgacagtgccgatgctaaagcggatgagctgaaaaaagaggctgatgccctgctggccgatgccaaagataaaggcgaagatgccaaaaaagccgcggaagaaaaagccgcagagctgaaacagaaagcggatgaagccaaagccgccgctgataaaaaaattgatgagctgaaacaggatgtcagcggaaaacccgcagatgctcagtaa

SEQ ID NO: 279838 - DNA, 159 bp, Morganella morganii
atgaaggacaagccgcacgacgacgcaatggccgatctgtaccgggagcggccggcggaagcgttcgccatgttccgggcgctgctgctcgatggcggccagcctggggaatggcgcatcttctggcgtcacgtccggcttgcgctacgtcggcggtaa

SEQ ID NO: 279839 - DNA, 303 bp, Morganella morganii
atgttcacgctgatggaacacgatgccctgttgcgcctcatgcggctttccaccggcttcatttctgacagtcggcgcgtggctcactggctgcaagagtgggagcggtcggacaatcctcgggccatcaaggcgcgggtgtctggcctttccggccacaccgccagggacatgcaggaagtcgcccaggcggcgaagcggacaggggcgaagccctccaccctcggccgcttggaatacagctacaacatggagaacatcgcgcgggcctacccgctgccggtgatggagtacgaacgatga

SEQ ID NO: 279840 - DNA, 1083 bp, Morganella morganii
atggacccgatgatttttcagttcataggccagtacctcgacgcggcgctgaatccgttcatcaccggaaccgtgggtgaggtcatttcgaccttcaccctgtttttcatcggcggggccaccattcacctgacgctgatgggctacgccatcggttggggctatgtcgaactgcccttctccacgttcatgaaaacgtgcgccaagtacctgttcatcggtgccctggcgctgaacgctgcaacctactcggattgggtcgtcggtagcatccagtcgctggaaaccggctttacgtcggcctttgccgggacaggtgccggggcaagcccccccacgtcggtctattcggtcgtggatgcggcgcttggcaaggggtggggaatcgccgccgacctttgggaaaaggccggcaatcgcggcataaccgagatgggcacgatgttcggggaatacatcaatgccgccatcatcgcagttgcaacgggcctgatcggcgtgccggccggcggcatgatcgtggtggcgaaagccgccctgacaatcatgctcggcatcggcccggtgttcgtggccctgttgctctggcccgccacgtcgaagttcttcgatagctggttcgggcaggtgatgacctacatcctgcgcatcgccctggtggcggccgtcatggggttggccttcaagggctttgacgcggtgataaacagcgtcgatctggacagcgaccaaaacacgctattcacgtccctggtgctgattaccttcacgctggttatgttctggctcctggccgaagcaaacaacgtcgccggccagctcgcgggtggcatcagcagcgcagccgtgacactgcgcggcatggctcaaggcgctatgtcaccgatgcaaggcgcggccaacgtcatcaatcgacaaagcacgcgccgcgatatgcaatccggcatgatggtgacggctggccgcctgaaccatttggccgccggtaatacgcttgtgaaccctgcgtatcgcgcgcatgtgatggcaaaccttggcaaaaactggggcaaagctcccggcggtaaggtcaagggggactaa

SEQ ID NO: 279841 - DNA, 261 bp, Morganella morganii
atgaaaaagctcgccctctccctagtcgtcgcggccgtcctggccggctgcggcgagaacacgcccgttcaaaccgtcgattggtacaaggcccatgacacggaacgaaaggaaatgatcgccaagtgcaagagcaaccccggcgaactggcggcctctcccaactgcatcaacgcgcagcaggcgcagaacgaaaaagacctgtcgcggcgtggctacttgaagctgccgccggtcgatttcaacaagaagggggaatga

SEQ ID NO: 279842 - DNA, 480 bp, Morganella morganii
atgatttcctattttcatgctcccctggtggcgctctgcttcttcatcctgctggcaatgtggcgcttctggtcgtgcattgaccgcatgggcttcatgcgcgaggtcagccggcgcgcaccctcgatgctgcacggtgatcttgtcgccggcatcctggctttcatgcccttcctgctcgccctggtcgattgggcaggcatcacgctgccgcgccaggacggccccatttcgccctatgcgtcggtgttcctctccctgggctgcctgcttgggtgcatgttcatgctgcgccagtccggcgaacgcttcgcgggccattgggccggcacgcgggaaagcgccctgcgcacggtcgcggcgctgcgcatcatcgacgcggccgagctggcccacgccctggacgtggcgcagcaacacgaagcccgccacggctccggccgtgtcatcgacgcggaaacgcgcgaggtgcgcaaatga

SEQ ID NO: 279843 - DNA, 714 bp, Morganella morganii
atgaaagcgttctctgtctctatcgttctggccgccggcattgccatgtcgtcggccgccttcgcgcaaatcccggtcacggatggcgcgtctatcgccaacagcatccagcagcaaatcgagacgattgcgaagtggaagatgcagtacgaccagatgaccagccaaatcaaccagatgaagcagcaatacgagtcgctgactggttcgcggaatctcggtcaaatcctgaataacgccgccctgcgcgactacctgccgaacgactggcagggcgtctatgacgccgtgaagtcgggcgggtattccggcctgagcggccgggcgcagtcgatctacgaagcaaacaaggcattcgacgcctgcatggttttcaagctcgtagatcaacgcaccgcgtgcgaagcccaggccgtcaagggtgcccaggacaaggcttttgccctggacgcctacgacaaggccaagtcgcggctgacccaaatcgaccagctcatggcgaagatcaacgacacgcccgaccccaaggccattgccgagctgcaaggccgcatcgcggccgagcaggccatgattcagaacgagcaaaccaagctccagatgtatcagatggtcgcggcggccgaagatcgcttgcaggaacagcggcaacgcgaactgaacgccaaggcaggcgcacggcgcggctggattcagccccaagtcacgaattga

SEQ ID NO: 279844 - DNA, 1608 bp, Morganella morganii
atgaaaccagctcttgccctgacgctcgttatcctggccgcctcggccttcttcctggcccgcaacgtgttcggcacggtcaagggcaagaaccggggcgcggtcgcctgggtggtgtggttctggctcggcctgtgggctgcggccctggtctatggcatcgcctcggccgtgccgcgctggctcgcctcgggcgaatcctcggcgctcctggcgctcggcgtggccgtcgtgtcggtgttctgccaaacgcgcctatggggccactacgtcgcccgcgcgaactatgcgccacacggtcaggaaaccgtcgtgcgcggcacggaagttgtcggcggcggcgatctgcaagcccgcatgtacggcgacaaggccaagccggccgacgtggatattgaaatcggcggcgtcgtcctccctcggatgctggaagcccagcacatgcttttcagcggcaccacgggcgcgggcaagacgcaagccatcaatcgggtgctgcgggccgttcgccagcgcggccagcgagctttgatcgctgaccctgccggcggcttcttctcccgtttcggccgccctggtgacgtgcttttcaacccgtttgatcggcgctcggtcgattggtcgcccttcgcggaaatccgccatgactacgattgccagcgcatcgccaaggcggccgtgccggacggcaccggcgagggtgccgagtggcaccactacgcgcaaacgctcctgggtgaaacgctgctcgccctgcaccagcgcggggaacactccgtaaagcgcctgctgcactacgtcagcgcggccgacacgaaggaactaggcgagctgctggccggcacgcctgcggccatcctgacggccaagggcaacgacaagatgctgaacaatacgcgcggcatcatcgctacctatctcggggtgtggcgctacctgcccgacaatggccgcttctcggtgcgctcctgggtgcaggacgaaggcggcgacgggtggctgttcgtcacctaccgcgacgatcaaatgggcctgctgcgcgggctggtcgcctcgatcttggagcttggcattgtcgaaggcttgagcctgtcggagaaccaagagcgcgggctatggttcgtgttcgatgaggtcgattccctgggcaaagtgtcgagcctgcgcggcggcctgacgaagctccgcaagtacggcgggcggtgcgtcctgggcctgcaaacggtgtcgcagctccgcgaaacctacggccgcgatgaagcgcaaacgctcctggcaaacctttccaccaagctgatactgcgggccggcgacaacgaaacggccgagtatttcagcaaggaacttggcgaacaggacattgaccggctgcaaatgacgacaggccagggcaccagctcgggcggggtgctcaaccctgggcactcgtcggaatccagcaacaccagctacaacatgcagcgcgttcggcaggcggccatcctgtcgtcggaaatcctgaacctgcccgatctgcacggcttcctgaaaatccccggccagccggtcggggcggtgcaggtcgagtatcaggccatgcccgaagtgcagccgggctttcaggggtga

SEQ ID NO: 279845 - DNA, 540 bp, Morganella morganii
atggataacacgctccttaaaagataccgcgaatatgcccgcactgaggaagcctatgcagtcctctttgtgaagcaaaatttgccgcaatcaaaagggcattggatagatatatccaactgccggcgctatgaaatgtcctcggacaatctgcacttcagatttgttacgggtgggctatacaagaggaaaattcacccgcaatacccgccgaaatcctcatacaccactaatggcaagtttgatgaacgcggctattacttgatggctcgcgccatcacatgggaaaccgcgcacaaggatatagagcaacagaagtcaaagcgcgtgaagcccgtaaagtttgagattacaggcgtcagctacgacaagaacaaagataaaaagggctacttccgcgacgatgcgccagaagaaattaaggcgctggcgaagaacctcaacgaccggactaatccactttgggatagggccatgcaatatatcaacgaaccggaattcgtctatgaagtccgccaagcgaggctcattgaacgatga

SEQ ID NO: 279846 - DNA, 453 bp, Morganella morganii
atggacagacgaaaatacatcgcggagctggtcgagaaaaccggcatccgcatagacgaagatgacccggcctttgtcctggtgctgctgaaccggcttgttctccaagaccaaaaaaccgagttggaagccctcgtcggccaactggtgaaggtcggcggggccgtccgtggcgaggtaatcaagcaggtcgaggaacaatgcaatgccacgctgcggcaattgcaggtcgaggcggccacgctgaaaaccgatctgcaacgcgagcacgcgggctatcgggaagccacgaaagaggcgctgcgccaggaaatcggcggcaccgtcgcccgcgcggccggtgccatgcaggacgcgcggcgctcgatcatggggccggtctggctggccgccactgccggcggcttcgttggtggcgtcgtcgtcgccctggtcgcctacctgctgcgctag

SEQ ID NO: 279847 - DNA, 729 bp, Morganella morganii
atgcagaacaccattcatttcatcctgcaaggcaagggcggtatcggtaagtcgttcattgccgtcatgctcgcgcaattcttcaaatcgaagggggccgatctgaaagccttcgacaccgatcaggaaaacacgacgttttcccattacaaggcactcggcgcgcagcatatcccggtgatgaatgaatcccgcaccatcgacgcgaagcggttcgatgcgctcatggaaaagctgctgaccgaggacggtactttcgtcatcgacaacggcgctaacaccttttcgccgctgctggcgtacatggtggaaaacaacgtcatcagcttcctgaccgaaaacgggaaaaaggtctatctgcataccgtcgtcggcggcggtgacacgctcgcggataccgcgaacggcttcaattccattgcccagggcatcgaagatgcgccggtcgttctctggctcaatgaacacttcgggccgatgaaaaccgacgaaggcaaggacttcaccgacacgaaggttttcaaggccaatcaggcccgtttgcatggcgtcgtctcgctgcaagcacgcaatcatcagacctacggcgacgacataaagaaaatgaacaccaagcgcctgacggtcgaggaaatcatgcagtcgcccgacttcgcgctgatggaaaaacagcgcatccgcaacgtggctaaggacgtgttcggccagcttgaaaaaatcgagttctga

SEQ ID NO: 279848 - DNA, 402 bp, Morganella morganii
atgacgaaagatgaggtatccgcgcgcttgcgggccttggcgaccgacgacaagcgacggtctgaaacggcccgcctgcgtgatgtttttgacgacgtggaagccacgctaaacgcgggcgtgacacaagccgatgtgctggccgagctacacgctttgggcttcaccatgacgatggcgagcttcaaaagcgccctgcaacgcatccgcaaggaacgggcaggggataggccggcgcgtagatcggcaacgcctgcgcccgctccgcttggtcatgaccaaacaccgggcgaaacggcaccagcggccccggcgactgacaagaaggccggggggtttgaaatccccgtcccgaagcgattcacccacaaccccaaacctgacgacgatcttttgaaataa

SEQ ID NO: 279849 - DNA, 363 bp, Morganella morganii
atgccccgcaagcccgcagacggccagaagctcacccggccggtgagctttcgccttaccgacaccgaccatgccgcctatctggcgaaggtcgaggcgtcgggcttgaagccgtcagagttcttccgcgagtgcgtcttgcagaaccgcacccaggttgtcgcccgcgtgcccacgagcagcgacaagcgccggctgctgtacctgttcaacaagaccagcaacaacatgaaccagctcgcccacgcggcgaacgcggccgagctggccggcacggccactcctgcgacctatgccggcatcctggccgagctacaggccattgccgacgcgatgcgggaggccgtcgaacatgctgattag

SEQ ID NO: 279850 - DNA, 2391 bp, Morganella morganii
atgctgattagggtgcgtggcggcgaggccggaatccgtgaatatctggaagaaggccggaaggacggccgcgactacaaccgcgccgagctggacgagcgcgtgatattggccggcgacctgaaattgaccgacgccatcatcaacagcatggacaagcagggcgaacggtatttgcacatcacccttgctttcaaagaggacgaaatcagcccggaattgttgcaggcgatcaccgacgagttccggcaattcgccatgacggcctatgacatggacgaatatagcttttacgccgaggcccatttgcccaggctgaaaagctacaccaaccagctaacgggcgagttcatcgagcgtaagccgcatattcacatcgtcattcctgaatacaacctattgagccagcggaatctaaacccgttcggcaaggtcgatcagcagaccaaattccttgaagcctttcaggaacacatcaatgccaaatatgggcttgccagtccgaaagataaccggcgattagagttcacagacgaaagcgcgatgatcgccagatacaaaggcgattatttcaagggcgcgaaccacgaattgaaagagcgcatcttgtccgtggtgcttgaccagggcgtgaccgacttcgaccagttccgggccatcgtggccgagcatggcgacaccaaggcccgcaacgcaggcaagaccggcgaatatctcaacgtgaagcccgagggcgcggccaagggcatcaacctgaaagaccacgttttcagccgcgaatttatcgagctgccggccgacgagaagcgccgccggctggccggcgagctgcgccagggatacgaggacgcgcaagcgccccgccctaccccggccgacattgccgaccgcttgaaggagtggcacgaagtcagggccgccgagctgaaatatctcaacagcgggagccgcaaggcatacgccgcctatcgtgagggcgaccccgagcagcgccgggcgatgctggccgagcgtgcggccagcttctacgccaagcacagggccgcccaggagatcgagccgcagcccgagccaccgacgccgaccagggcgcagcagcaggccagggagccggcccccctgccctcgcctgcccaggagcgcgacggccgcccggcggataccgtcgtcggccagcgcattgccgagcggcacgaagcggccacacgcagccaggaagccggccggggcgagttcgacaccatcaagcgcgagctggacgccgcgcgcctgctggcgaccgtcagccgcacgcatggcgtgatgcccgacaagtacgaggtgacgaaggcgaaggacggtagcgaccggatacggtgcggccggcggaacctgaacgtgaccgactttcttacccaggagctgcatttgtcctggcgcgaggccgcgccgatcttgcgcaccacctatgccgagcagcagggccgcgaagtgcagcagccggcccggagcgccccgcgccgcgacctttgggccgactaccggcgggaatggcaaccgcagcagcgcgagcgccgggaacaggattggcagacgcagaagcatcgggagcaggagcgtcgcgccgagcagcgccgccagtatcaggccgagcgccgagccatccagaacgacggcaccatgaaagcgacagagcggaaagccgccctatccctggcacgcatggagaaggtgaagcgcgaccttgccttgcgcgagcagatcgaggccgagcgcgtcgagctgaaagcccgctaccggatgaagccggccgaccagtaccgcgcctatttggccgagcgtgccggccgtggcgatgccgacgccctggccgagttgcgccggcagcgcatgaggcagccgcaggcggccacgcgcgagcgcatcgaggacaaggacggccgccaccccgaggccgcgccgatcatgaagccggccgcgccggccggctacaaggtcgatcaggacggcaatgtgacctactacgaccagcagcgccgggccatgttcaccgataccgggccggcggttgagttcagccagaccgagcgcgacacgctggaaaccggcctgcgcctcgccctggcgaagttcgggccgagcatccggctacgcggcggcgatgaggcatacaggcacgcgatggccgacattgcggccgataaggggctttacgtcgagttcagcgacaagggcttgcaggagcgatacgagcagcgccgggaagcgatcaaggccggccgggcctatatggcccaggccgagcgcgccaagcccgcccagggcggcccaggccgcacggccgagccggaacagcagcgcgaccaggaacagcagcagcgccggccgcgcgacaccggccgcagccggtag

SEQ ID NO: 279851 - DNA, 630 bp, Morganella morganii
atgcaggttatcgccgtactcaaccagaaaggcgggtcaggcaaaacgaccatcgccacccacctagcccgcgccctgcaactggacggggccgacgtgctgcttgtcgattcagacccccagggcagcgcccgcgattgggcggccgtgcgcgaagatcagccgctaaccgttgtcggcatcgaccggccgaccatcgaccgcgacttgaagaacgtcgcgcgcaaggatttcgtcgtgatcgacggcgcaccccaagcggccgacttggccgtgtcggccatcaaggccgccaatttcgtgcttatcccggtgcagccatccccctacgacatttgggcgaccgctgaccttgtggagctggtcaagcagcgcatcgaggttacggacggcaagctacaagccgctttcgtcgtgtcgcgggcgatcaagggcacgcgcatcggcgcggaagtcaccgaggcgctgaacggctacggcctgcccgttctggaatcccgcattacgcagcgcgtgagctacccaggcaccgccgccgccggcagcacggttatggacgccgagccggacagcgatgcagcggccgaggttcgcgccctggcgaacgagattaagcaaaaactcatttga

SEQ ID NO: 279852 - DNA, 216 bp, Morganella morganii
atgagcactaaaggaaccaccctcagcgccggccgcccgagcgccaagaccaacaaggccgccaccctcgccagccttgccgacaaaggcgcgaccgtgcgggttaatttcgacctcgaccgcgaccagcacatcaagctcaaggtgtatgccaccaagcagggaaagagcgtcaaggaagtgctgaccgacttcgttgcacaactccccgagtaa

SEQ ID NO: 279853 - DNA, 699 bp, Morganella morganii
atgagcgaaaacttaaacgagccagccgccgacgagctgcccaggctgcgcgaccagtgcggcacgctggccttggagctggaacgcgaaaccgacccgacccgacgcgccgagctggcccgcgagctggccgagtgccggcagcgcgttttccaggcagagcaggccgaccggccacacgaccgcgaccgagaagccggcgggcctgccggcgacgtgccgccggcccaggtgatgcgcgaacgcatcgagggcggcagcatcgaggccgccgacccccgcccggactatgccgggctgtacgcggccgagcgggccgaaaatgccgagcttcgcgccgagctggccgcgacggaagggcagggcatcagcagggagcgcgagcgcctgcattccgccgtcgagcacgcccaggagcagcagcacgccgaggaattgagccatgccggcgttagcccggaactggcggccgagtacgaggcgcgaatcctggcgcgtgatgaatcgttctcgggcgaagtggtgcagcagatcgagcgcgacgacgagggccgggccttcgtcatcgaggccgacggcgaccgcgtgatggtgccgcagatcgagggcgcggaaatggacgtgggcgacgacgtggaagtgagccgcgaccaccagggcaactatgaagcggaaaccggctacggttacgggcgttga

SEQ ID NO: 279854 - DNA, 189 bp, Morganella morganii
atgagcgaaaatttacaaactcaaaaaatcacggatgaagaacgccgcaggcgtcagaaggcggcagacttcgcccgtgcatccgtgggccttgaagggttcaagccatcagaagaagcagaggcccaaatgcgccgccatataaacggtgaaatcagccttgccgatctggtgaagcccgcccgctga

SEQ ID NO: 279855 - DNA, 642 bp, Morganella morganii
atgaccggcatgaaggtcgcgcgcatctatctgcgcgtgagtacggacagacaggacttgcagcgccaggaaagcatcgtggaagccgcgaaggcggccgggtactacgtcgccggcatctaccgggaaaaggcatcaggggcgcgggctgatcgccccgagctgctgcgcatggtggccgatctgcaagccggtgaaaccgtcgtcgcggaaaagatagaccgcatcagccgcctacccttggccgaagctgaaaagctggtcgattccatccgggccaagggtgccaaactggccgtgccgggcgtggtcgatctgtcggagctggccgcgtcgtccgatggtgcggcgcgtatcgtgctggaagcggtgcaagacatgctcttgcggctcgcgctacagatggcccgcgacaactacgaaacgcagcgggaacggcagcgccagggcatcgaattggcgaagcgtgcgaacaagtacgccgggcggccaaccgacaacgccatgcacgaacgcattgccgccctgcggacaagcggccatagcattgccgatacggcgaggctggccgggtgcagcaccagccaggttaagcgagtgacggccctcatgcgggccgccgatggtgacaaagcgagctga

SEQ ID NO: 279856 - DNA, 465 bp, Morganella morganii
atgcaaagcatgaccattgaacagcttcgcgccgcgagcgatgccggcggcgtcgagggcgtgaccctgaaagggcagggcggggcgttccttgtccagatcgccacgcgcagcggggccgccgccttgctggcgaaggcccgcagcaacgaaccgcgccggttcggcaatcccgttgccgccttgaacgtcctgcgcgacgtgggcatcaccatcggccagttcgacgccagcgagtggaacccggccgagaaggaagaaaccgccggcaaccgtggccgggccgaggcgatgcgcaaggcgcaccaagccgccgcctacacggaatggctggccggcgagattcaggaggccatcgacgacccccggccgaacatctcgcacgatgacgtcatggccgaaatggatgccgacattgccgccctgatggccgaacgcaagccggccgcgaggaagcgcgcatga

SEQ ID NO: 279857 - DNA, 363 bp, Morganella morganii
atgaaggagcaaccgcaccagcccgagggcatcccgccggccatcctggccgcgctggcggccgagccggccaggaacatgaccgacgccgagcaagcggcgcttgagcgccttatccgcatcgccaaggccgacaccggccagagccggcgcgttgccgatttcctgctggcgtggtggaacgccggcagttgcggcagcttcgaccttaccgcgctatgggcgctggacgatgcaatcacggccgacatggcgaccgtgtttgccttcatcgcccgcgttagcaagtaccccgacagcctgggctatgaagccgacttcaaggccatcgtccgcgcatggcgtcccgagctggccgactga

SEQ ID NO: 279858 - DNA, 309 bp, Morganella morganii
atggcgaaggcaaagaccccttaccgcatcgagtggcggccgaaggcccgcgaggatttgcgcggcatcgttcgatacatcggcaaagacaacccgaccagggcgcgcagcttcggccaggagctacgcgacaagaccttgccccttgcacagcacccggagcttggccgcaccgggcggcccggcctgccggactatgtgcgcgagctggtcgcccatcggaattacatcgtgttctatcgcgtgctggacgaaacccgcaccgtggaaattttgcgagtgaaacacgcggcgcagcaaacgccgtga

SEQ ID NO: 279859 - DNA, 375 bp, Morganella morganii
atgaaccagcaacaccaggactttgaaaactcgggtatcccgcaagagcagatcggcgctttcgtggatgccttctttgaccagttggagccgaagcccaggaaggggcggccttggacgttcgaccgtttcagcgcggcgtgcgacacgcccggccgggagccggtgcaagccgtgctctatcccgacgacgaggccggtttcacgctgtacgcgcgccaggggagggcgctgcacgctgtcacctacgacggccgcccggtgcgcttccgcacgttcgagaaggcgctttcgacgctggccgacgtggcgcaccttgcgccggaaatcatcgtggattcgtccaactggcgcgaggcggccgggccgatgtga

SEQ ID NO: 279860 - DNA, 1188 bp, Morganella morganii
atgaccaatcttagcaaaaatggcggcagacagacagccttagacttgggcgacagcccaaaaaaaggcgctgaccagttcgatgaagcgacctaccgcgccgagctgatcgccgccggcatcccggccggcgatgccgccgccgtggcggccaagacggccgaggcccgccggcagcgcgactatgtaccgggcaacgtcggcgcttcgctcaagctgccggcggccgtcaagcgggccgtgcagaaggtcgaacgcgcccaggaaaacgccgtgccggcgaagaaggcgcgcagctcgcgcgccgtggtgctcacgccgcaggaaaacaagctgctggacgtggcgaccgacattgccaccacgccgccgagcggcgaggacatggctttcacccatgccgtgctttgccaagtcggtttgcctcgcgcgaaggtcgagggccgcgagttcatgcgccagtccggcgcggcctgggtgaatgtgcaggccggctatctggacgagggcaaggggccggtgcagcagcctatcccctatggcgtgatgccgcgccttgccctggcctgggtttcaacctacgccgtgcgccacggtgcgcgggaaatccccatcggcgacagcgcggccgagttcctgcgcctgatgctcggggccgataccgtcagccagggcgcgcgctatacgaccttgcgcaagcagatgcacgccttggccgcgtgccgcttgcagctcggtttccgaggccgaacgttcaacggccagcccgtcgagcagttcgacgcctgggtgtccaaccgcgacagcagccagcggccactatggccgggcgtgatgacgctttccgaccactatttcaacgagctgcgcgatagcgccgtgccgctggacaatcgcgctctgcacgcgctgaaaggctccgcgctggccttggacgtgtatgcgtggctggcccaccgcctgcaccgcatcgagggcaagggcgtggtgctgcattggaagtcgctgcgcgagcagttcgcccaggaatacaagggcaaagaccccgacaaggatttcaagaaggagtttttgccggtgctgcgcagggtgcaggccgtctatccgaacgcgaacgtcaagcaggtgacgggcgggcttctgttgcttggctcgccgccgcccatcccgaagaagctcacgaagtag

SEQ ID NO: 279861 - DNA, 1224 bp, Morganella morganii
gtgcttcttgatgcattattccgcgatacaccgaccagtattgagaatccggcggtacccatcagtgcagattctgttgatacagaggggctgttcaaagcagatgtctatgtcagcccggaaacctcgatgaaactggccgctgtatatgcctgtatttatgttatttcttcctcaatagcacagatgccgctgcatgtgatgcgcaaaaccggcgataaggttgagactgcccgcgatcatcctgtgtttcaccttgttcacgatgagccgaacgaatggcagaccagttataaatggcgggaaaccaaagagcgccacattctcggctggggaaacggctacacgcaggtgatccgtaacagtcgcggtgaggtgaccagtctggaagcctgtatgccgtgggaaaccgcactgcttaacacaggtggccggtacacctacggtgtttataacgaacaggggaattttgctgtcagtccggatgacatgatccacatccgggcgctgggtaataaccagcggatggggctcagtccgatagtgcagcatgcggaaaccatcggcatggggatgtccggtcagaaatacaccagttctttcttcggcggtaatgcccgtccggccggtattgtttcggttaagggggaactgcaggaaaaaggctgggaccgccttaagtcaatgtggcagaaagcgtctgcagcgctgcgcagtcaggaaaacaaaaccatgctgttgcctgctgacctggattacaaagccctgactgtttccccggtggatgctcagttgatcgatatgctgaagctgaaccgctccatgattgccgggatttttaacgtaccggcacacatgatcaatgatctggaaaaggcgacattctccaacatttccgaacaatccattcagtttgtccggtatacggtcatgccttgggtggtgaactgggaacaggagcttaacaggcggttgttcacccggcaggagcgctgcgccggattttatgtccggtttaatctggccggattactgcgcggaaccccgagagagcgggctgaattttatcattacgccattactgacggctggatgagccggaatgaggcgcgggcatttgaggatatgaacccggttgacggactggatgaaatgctggtcagcgttaatgccgcacaaccggacggcagtaaatcagaaggtggtgaaaaagatgagcagtaa

SEQ ID NO: 279862 - DNA, 162 bp, Morganella morganii
atgaaaaacatacttcttgatctcaccgccctgacaggtttcggcgcggtgctggcaggctgttacctgaaatacggtctgccggattccctggtgattggcgggtcagcaatggttatctattcactggctgtggccatgagggggaaacgtgcttcttga

SEQ ID NO: 279863 - DNA, 276 bp, Morganella morganii; identical to SEQ ID NO: 275992

SEQ ID NO: 279864 - DNA, 303 bp, Morganella morganii
atgtcgttaccgacactcgaaaaactgagaatgcagtgccgtatcgatgaggataatgatcaggaagatgaattactcctgacctatcttcaggcggcaaaaaagcgggctgaaaattatattaaccgcaatttgtatgacagtaacattccggagagcgaccccgatggcctgattgtttctgctgatattgagctggcattgatggtctgtatcggcagtctctatgagtcacgggaaatcggagcaataccggcgggtttctacctgttgcttgacccgtacaggtttataaatttgtaa

SEQ ID NO: 279865 - DNA, 354 bp, Morganella morganii
atgccaccacgcataccccgcgcctgccgcaaacgtggctgcgcaaagacaaccaccgatcgcagcggatactgtgaagagcaccgcaatacaggctgggagaaccaccagcagggtaagagccgtcacgaacgtggctacggaacgaagtgggaccgtctgcgtactggggtgctgaacagggataaacatctgtgtcagcagtgcctgcgcgaaggacgggcaaccgaggcgaagacagtcgaccacatcacacccaaggctcacgggggaaccgatgcggagagtaacctgcagagcctgtgctggccctgccattaccgcaagacagcaacggaacgcaactgcacctga

SEQ ID NO: 279866 - DNA, 234 bp, Morganella morganii
atgaacggcaaaaaagtaccagtacagcaaaccagccttcgcgaaattgatattgagatagcaaaggctgcatacaaagactatgcgcggagatatggcgctgaccagtcattcgagctgacaatgaagcgcggtgggttttgctgggctgaaattgcggatcacctgtatggacagattcagcaccttgagcgggcaatacgggagatagaagcggagaggataaaaaaatag

SEQ ID NO: 279867 - DNA, 378 bp, Morganella morganii
atgaactggaaagaggcggtaattgccgcgatgtttattgttgccgcgtggtgggtatatgacacctaccgggataaccagcaactgaaggtgaataacacaacgttgtccggacagctgtcagcacagcggacgataaataccatcacgctttcagccgtcgccatcagacaccgcgcagcactcgacaacatcaaagccaaagaaacggagggcacggagaatgtcaaagttaaaaccgttatcagaacggagtttaaagacagtgagtgcgatgttactcctgtttcccctggcattgttgggaagttgcagcaatacgaaagagacattcgtgcccgcgccggtggtgccgatcccgccacaactgacggctga

SEQ ID NO: 279868 - DNA, 159 bp, Morganella morganii
atgccacggaaccctttaacactgatcatcattgctatcatcctgctgactactgctctgttggcgggctgttatctgtattcactcccgaatcactgtaagccgctgccgggcaattcgctggatggtgtgatccattatgagtgtgaagcgctatga

SEQ ID NO: 279869 - DNA, 477 bp, Morganella morganii
atgaataaccgattatttaaaaaagtcatggccgcttgtgccgccggggcgattgccggtgcgctggtgctgatccccgcgtatgagggtgttgagtacaaaccttaccgtgatgtggccggagtgctcaccgtatgttatggccataccggcagtgatattcagcccggcaagttgtacacggatgctgaatgtaaggcgctgctgcatgacgacctgacgaaagtccggcgcgcgattgacccgatgatcaaagtgccgattgatgacaatacccgggcggccatctattcatttgcatataacaccggaaccggtgcgttctcgcgttcgacaatgctgcggaaactcaatgccggtgatatcgcgggtgcctgtgacgaaatgaaacgctggacatttgccggtggtaagcagtggcagggtctgattaaccggcgcgaaacggagaaagcggtatgccacggaaccctttaa

SEQ ID NO: 279870 - DNA, 192 bp, Morganella morganii
atgcgcatgcctgacaaatattccagccctacagcatacgcctgggggcttataacctctgcttttggcgttttatctctggaccagtgggctattgttgccgggatcatctgtactgtcgggacgttcctagtgaactggtattacaaacggaaggaattccagctgaaagccggagaacatcatgaataa

SEQ ID NO: 279871 - DNA, 312 bp, Morganella morganii
atgaaaattgaaaatgatgcattggttattcaggataagaccaataaaacagtatgcgtggttggtcgattaccggcagtaaacaatataacagacagcgctcggcatggtggtgatatagatttgagcgcgtgtaaaaacagtaatgataaaactgaaatcggcgatacatggtcacaccacgatcatcctctgcttgatctgtgggattcatttagcgaacagcaaaaatcggccataacgcaggtgattttgtcatatcgtgcagaactgttcgatctggaatgccagatagacgaaagcaacatataa

SEQ ID NO: 279872 - DNA, 555 bp, Morganella morganii
atgaatactgatatttttgaccgattgtttgattctgataaaactatagagtccatagtgactatatgcagatctgaggcgcctcttatttcggtactcaccctgcatctgacctgtgaaagcttccttgaagcatttatatccggaagacttgatatatgtgatttgttctcaaacaagccggacaaccccgatgacgtcagtttcagaatgacattcgaacataaaaataaactatctcagcgccttggaatgcccagggcggcatacgacgctttatttgaactgaatcagattcgaaatcaatttgcacacaaattacttcacgctgagataccagctgataaaacagccaggatcattgatttggtcaactctattaagtcagcggaaattgaaattgagttaagtgaagaaggaatagtgtatcatcctgataatcatgacgattctttcacatataggatgtcagaccaaaacactccggtaatggttaaattatgcatagcatatttttctttattccgaagggttgccttgaaattcgctgagtaa

SEQ ID NO: 279873 - DNA, 1356 bp, Morganella morganii
atggatataaatcatattaagttgagattatgtataaccactctgtttgttatttttgttggtttatctggcagcgtttttgcaaaaaatatttacaccttagagtcaatcaatggaaatggagtaatcaaagtatcattgaacctcccaagttcacacggaccgatttttttgaaggcaagaggagtcgattgggggttacaacctcagatagacaatatgtattgcgataacgtacttatactacagcaagaaaaaggcgtttggcgcatgcctgcgaaatgtaaaatagcatcatgggaagtgtacccaaatacagggagatttgggaatacagatgcatctaggcaagaatcgatattcattcctggcgctacggataaaaacatcttattctctgagccaacatcattagcacgtattattgatgaagatgatgccattttaacgactggaaatgatattaaattactgggtgccactaaagcgacacaagaaaactcgcaagcaagtccatcatggatgatacctgcatataaaaaagcaccggaattttatcttattggagatctgcaattctttacgagtgagcttactgatcttaatgtgacttattttagtgataatccttttcttacagatgagttgcatttaaacgagtttcataaaaaagccattggttttttgttagactctataccggaatttaaagaaaaactagcttctgagaaaattaatcttcttgtcgtttggctgggaagtaatgctcaaaataattttattggtggtgccgcgggataccgtagttttgtttcaaattatctatacggtgacaatgttgatatccaaaagaataatctaaaaacacttacagtaatcacccatgaacagtttcatcaactgattgaattgatacgtggaaacaatgagagccaaccagtctggattgaagaagggttggctcagtattatggattaaaagcactaaacaatattcatgatcctaataatcaggatgtaagtgaaattacttcatcatttattaataaaaataaacccatagatttctcatttacagaattaaataagcaatttaaagaaggtaataatggggtttacccattattttacacacaaggtgctactttttggtccatgttggacgcagcattgctggaaagttcgcagggaaggtatgggcttgatgaatctatttgcctgcttataagatcaaagccagatgaaaagggcggtttacctgttgaatatgaaaggaagatagtagaaataggtggtggtaaggttaaaaaacttattgatatgtatgttgaaggtaaaaataaaagtacaaaataa

SEQ ID NO: 279874 - DNA, 180 bp, Morganella morganii
atgttaaaacataaagatatgacaacagcagcggcttgtttttttgaggtgttaccggagggggttttcttcgtcagcgatgcggctgccttgtcagggctttccctgccgcgttgccaacttcttcttactcagttcagccttgccggtcttttgaaagactgccgcaacggtgaatga

SEQ ID NO: 279875 - DNA, 1017 bp, Morganella morganii
atgaattacctgttaaccggctttgtccaaaaagatgcccggatcctgatgtttaatccgggtgcggagatctgcaattttctgaacggtgcccgctacctggtgagcgcggcgccgcactcgatgaatggcattccgtccggcctggtaccggcagatgcacagccgctgctgacagatgagcgggtactgcgtttcctggataatcctgccgtgataaaagccgccggcggtctgtccggttcccgtcattacgttaaatctgtgggctactgccagattgatgatccggagaacccttatcaccatcacgaactgaccatgacccgccataaagacggttttatccggacatgctggcaccatgacaacatcctgcgggcgggtgatgtccaccagcagcaggtggacgaaattctgttacacaaccaacgggcgtttgtggcacgcagcatctttaccgatctgcggctgccggctggtcatcttcttaatccttccgatttgttcacctggtcggtgatgcgccgcgtcagtgatcatcttccggcctttatcagttcctacattctgatgcagaaaccggaggaagagataaccggcaccatgacggagcattccatcgttcaccagccgcgctcacacagccggattgttcaggacatcgtcgagcagataaaaccggtcgttgttcctgagatagaaccggagccgccagcaagttttatgcggatcccgaagttaaagcgctgggagtgtctgaaatacctgcagtgggtgaaaagccagccgtgttgtgtgtgcggccagcaggcggacgacccgcatcacatcatcggtcacggtaccggcggcacaggtacaaaagcacacgacatttttactatcccgttgtgccgggttcaccacgacgagttacaccgggatccggcagcatgggaagcaaagcacggcagtcagctggagttgttatttaaatttatgaaccggtcatacgggatcggcgtttttggttaa

SEQ ID NO: 279876 - DNA, 789 bp, Morganella morganii
atgagcaatctgattattgtcgatggtattaatgtgcgccgggatatggccggtcgctattgcctgaatgatttgcaccgggcagctggtggagaggaaaggcataaaccaccttactggctgagaaatgcacagacagagcaacttattgccgagttgcaaatctgcgactcgggtacacagccggtaaatgtgctgcgtggtggcaccgaacagggcacctacgtgtgcaaagaattggtttatgcctatgcgatgtggatcagtccttcattcaatctgaaagtgatccgtacgttcgatgtggtggccggaacacagcaggcgatacagttggctgataaagttcatgccggagctatcctgctggagtcgatggcaaaaacactgaatctgtcaaattcctcaaaactgggcgggtatcagaaactgcaaaaaatggctggtcttccggatttggctccctcctatgcaattgatgcaccggcgggcgcggtggatggttccagcagaccgacaacatccctgactacactgctgaaaaatcacaatgccgcattgtctgcgaccagagcatacaaacgccttgctgagctggggattgtggagcagaaagcccggccaggctcacgtggtacacagcgcctgttctgggcgataacgacgcggggactggcgtacggtaaaaatatgacatccccggcaaatccgcgggaaacgcagccgcatttctttgagagtaaatcagcggaacttttggcactgatgatgactccggcggtggcctga

SEQ ID NO: 279877 - DNA, 402 bp, Morganella morganii
atgattctctatctcaaaattgcaactgacatcccggcaggtaccgcaatcacgacccgctacatcatggacaaatacaaagtatcacgcagcacaagccggaacgcattagctgttctggctcatataggtgcagctacggaaataagccgtatccacacagagggtactgcttactcactgtcacctgacgcggcagataaggcgcagaaatacagaaagctggtgatgatcatgcgggaaaacccgaatgaagtccggcgcaacaacggcccgatcctgtccagtccggcagatatggcagagcgcgggtttgtatctgcgcataaccggttgtttatggcgctggcagcaaagcgccgggagatgaaacagatctgcgcagtatacggttgcgcttaa

SEQ ID NO: 279878 - DNA, 192 bp, Morganella morganii
atgagcagattaactcatttggcaggctttgcgcaactccgcgttgctcctgttaagggtggtaaagaccctgccgcatttgtttatacggtaagagtaccggaaggtttctcagaaacaaactaccagtttgtgaagtgggcggtaggtgattttaaccgtctgggtaagacggcgggagctggggcatga

SEQ ID NO: 279879 - DNA, 201 bp, Morganella morganii
atgcataaaaatcaagttttagcctatttcggtggagcaactaaaacggcacttgttttgggaatttcccatagcgcggtgtgtcagtgggtatccgttgttccggaaaaacaagctttgaaaattgagcggctcacaaacgggaaactcaaatacaaccctgcactttatcagcatagcagcacagaaaagcacggttaa

SEQ ID NO: 279880 - DNA, 198 bp, Morganella morganii
atgcaaacagaacctaccatcaccagcaatatgtccgccgacgatgtcgctcagtggatcaccgagaaagcaaagtccattaatcagttgcaggtgctccgtgattcgagagcaagccaccagcgtttaattgagcgactggataaagagatcgctgagtgggaagtccgctgtgctttaacagtacaaccgcagtaa

SEQ ID NO: 279881 - DNA, 324 bp, Morganella morganii
atgacaactgaaaatgaaaaaagcagccaggcagtcgttgacccggctgatatgacaggcattgagttatatgaccatttatcaaagcggttttacccgttagttcgattccaccgggaggcaggcttagttaacgtttatgtcagacaacttgagaaccaggtggccgatgcgatttatgcagctactcctgctttagaagtggccgaccagtacccagaatccaacctccaaagggatctgtctcaaaatcatcagaagctactggctctgagagattttttaagtaactttgagccgtttccggaagtaaagcctcgctga

SEQ ID NO: 279882 - DNA, 843 bp, Morganella morganii
atgtcatatatagcaaccagtaccggaaaacatattgatttcaccaatatcactccggatcagatttgtatcgaagatatcgctcgcgggacatccaatatctgtcggttcgccgggcaattagaaaacttctactcagtagcccaacattccgtgtacgtcagccagattgtaccgccggaatatgcactggaagccctgctgcatgatgccaccgaagcatacatgggtgatatagcctcaccgctgaaagccatgctgccggactacaaggccgtggagaaacacattgaagcggttatccgtaagaagttcgatttaccgccagtaatgacggttgatgttcattatgccgatctggtcatgctcgcgaccgaaaagcgggactttgaaatagaccccgccagccactggccgatgctggattcagccccaccacatgatgacatcattatccagcctctgacacctccgcaggcatatcaccagtttatggcgcggtttgaaatgctgatttctggtaagcaacaaaaaactatttcatacataaaaccagaacgcgatcctgatggttactgggttcatcctgatgttccttgtttggaatcgagtcagaaaatagatcagtggggcgatgaaaacaatcttgaatgcctggcggtgtattgccgtgatgacattgataacttccacccagtgtggttcagctactttgaagaaggtgataccaatatttcagcgtgggaaccaacaaaacccgatggtgatggctggtttatcgcctggataacagacaatgaagacggcccgttatgtatgtgggtcagacctaaaaacctctaa

SEQ ID NO: 279883 - DNA, 1260 bp, Morganella morganii
gtggaaaagttagctcaatacaataagtatttaataaaaaaaataaagttattagagactgattttttcccaaggttagttgatcttgattcaatcgatagcatacttcgttctattcttcctctaaaagaaatgagggaagctggctgcttttttactggggaaaacttatcatttaaaactatagactcattctttgaatcgatatcctctcaatctattatattagatcctacatgcggtgcaggtaatttactaattgcatgctcacgaaaattaaaagtaaaaaatacactttcagaaacattagaatcatggggacatatactaagaggatatgatttgtattcagagttagttacgacagcaaagctaagaattattatcgaagctcttaatagaggtacagtaagtgattgctctattgatgatgctttagagttactgccatttattcagacaaaagatgcaatgactgcaacttatgaagatgtagaaaagattacccatataataatgaatcctccattcaatagctggccatcaccaactattggctactggaaaaaaggaaaagtaaattctgctggagtaatttttgatcattacattagaatattacctattaactgcaatatcagtgctatacttcctgatgtattaagaagcggaagtagatatcatagttttagagattttatttcttcagaaatgaaagctttttgtaaaatttatggtcaatttaattcacaaacagatgtggatgtctttatattatctggtataaagagcaaaaataacttaaaaaaaatagaatggactatagatctaggcaactacatttcgttatctaaactttttgatgttcgcataggtcctttagttgcatatagagatccacaagaaggcaacaactatccttactttcatgctaaaaatagtattgcatggtccgaaatttctacggcaacagagtttcgtaaattttcaggaaaagtgatttttcctccatttattttaattaaaagaacatctagtccatcagataagtatagagcttcagcaactctgattaatttatcagaaccagtagctgtagaaaatcatatgatagttttaattcctaaaacaggcaagttaagtgactgtagaaaagtgatgactatacttaaatctaaaaaaacaaatcaatttttaaattctcgagcaagaatgagacacctgactgtaaattcagtgaaagatatccccattggttga

SEQ ID NO: 279884 - DNA, 393 bp, Morganella morganii
atgacaactgaaaatgaaaaaacagggcagcaagtgccaccctatggtgatgagccttttatctactcaggaaatcttgatttagatgcactgatccgctggatggaggatgaggccaataaattaaaagtaaccagacgcgcaataattgaatcaagaaaattacttggttatctcataaaagaaatgcacggcgtcattcagtgtcaggccctgataaataatctgcgccatcacccagattccagcttactttcagattccagtcaatattcgcgtgttctgaattcagctctatcacatttaaataatcacgagctttattacaaaagttatcagggcgtaggtcttcaagaagaagaaaaaccatctcatgaagagtcaggaaattga

SEQ ID NO: 279885 - DNA, 462 bp, Morganella morganii
atgaaaaccagtcaactttctgcgctatttcaagatatacaaagcaaggtatattcacattatggcgctgcgtatggcataaatagtagtgtcggagataaagatagcgctaagttgcattcctacatgctattacttcttgaaatttatatcgctgattacaaagaaaaattaaacttaagtatgatgccttttattactcttggtggtgatacagcactgaggcattcaatattaaccaagtaccggtatacaccagagaaggtcaatttcctgactcttcatgagatggtttttcttcttcttgaagacctacgccctgataacttttgtaataaagctcgtgattatttaaatgtgatagagctgaattcagaacacgcgaatattgactggaatctgaaagtaagctggaatctgggtgatggcgcagattatttatcagggcctgacactgaatga

SEQ ID NO: 279886 - DNA, 129 bp, Morganella morganii
atgagcgagaataaccgtatgacctatgtcccagagtttctctccgggttagataccggtgtgtttaaaaaccgatattcaaaacctataccggtaaattcaaagattaattattttatgccgctttaa

SEQ ID NO: 279887 - DNA, 1128 bp, Morganella morganii
atggctgccagaccccgtaaaaataatatcaatatccccaacctgtacccgtttttcagcaggaaaaccagcaaggtgtactggcgctacagacatcctgtcaccgggaaattccattatctcggtgacaatgaggaagaggccaaaataattgcggttgaggctaatctgcgactggctgaacagcgaagccgtcaggtaatggcgatcagtgatcggatggcgaaaataaaaggcaaagaaatcacggttaatacctggctggatcgataccagaaaatccaggcggagcgtctggcagacggtgaaataaaacagaatacctttaaacaaaaacagaaacctgtagcactgatgcgtcatgcgttgtcacaaaaaccattaccggcagtcgatgcccgtgatattgccgatattctggatcagtataaggccagtggtcagctccggatggctcaggttgtccgttcggtattaattgatgtattcaaagaggcacagcatgccggtgaagttccgcccggatataaccctgccctcgcaacaaagcaaccacggcgaaaggtaacccggcaacgacttagtctggaagaatggcagaaaatttatgatatcgcctgcaaggaccataaatatctcggaaacgccatgttgctggctgttgttaccggacaacgcctcggagatatttcagagatgaaattccgtgatatatgggatgaccacctgcatgttatccagcaaaaaaccggaacacggcttgctatccccctctcactccggtgtcaggcactaaatatcagcctgcgggatgtcattgccggatgccgtgatctgtatgtcagcaaatatttagtccactacacacgaaacacatcacagtcacaacccggcggccaggtaaccgcaaataccctgaccaccaactttaaaaaagccagggataaaaccgatatcgattggggagaaggtacgcctgcaacatttcacgaaatgcggtcattgtctgagcgtttataccgggaacagggaattaatacccaaaacctgcttggccataaaaaccagcagcaaacggataaatatcatgatgatcgtggcaaagattggataaaggtgttgatctga

SEQ ID NO: 279888 - DNA, 1464 bp, Morganella morganii
atgaatttcttaaataattgctctaccgacgaactttcaacgatagagaatttatttgatgatgtatattatgatgaaaatttatcgaagaatactcgtgagcatattgaattacttgcaaataatcctaatagatttgatacgtttttgttattaaaaattttagcagttcttaaaaatggtgaatccataaaaacgatcaggaaaacaaagattggtgctagtattaacccaagaaatactcaagaacttattagtttggagttagcgacgtctgtcacaatcgattcaacgacaaccatcattagattgaatactattgttaaagattacgtattaaaaatcacacctattcaagaaataaatgatatctcacgtgaatttttgcctttaacaataattgttggtaaagaaaaaatagttttgagctcaataaatagaaaaacaatggagtttgggttaaagaccgaagaggataatgctgtaactttactaagaaataatattggactagtgaaagaacatttgacatcccaatccttagatgaatccgaaagaagtgatctaaccatacagttaaatagactaatgtatttatctcgttcttatatatacggactttttaattcttctagatttactgaagttacaactgctattcatgcgttactcaaagatattgatgacgtaattgataataaaaagcatgttttttatgcatatttagcagcatctcaacgtatattaggtaagcataaagttgcattagagtatatcaagaaagcgaaagagatttgtcctatcgatgataaaagtaccttacgagaaatagcaatcgatgagctttatttacttaataagctatcacctaacgaagcatactctctagccaaattattaaaaaatagtaataaagcgaattcagaaatttacataatttctgatgttatattatctaatctattggtggcaaaagataaaattaagaagcttaattttaatgaaagaaaagcaagaagactaaaatattacacaacagcaaataatatacttcttatgttgaaccagtttttaaagggaccagagaagctaaaagctataaatactattttgtcatcagaaaaatctgcttataatacgtgtagggcaaaaataataaagtatgaaattttatttgagaatggtgagattgaaaaaataactgaaaaatcaatatttgaacttaaagatatttataactacttgttttttcaaggccttgaaagcttgtttaatcgttgccatgatttattgtggaaaattgcagcacaaagggaaattaatgatttgattgaggatatatttttccggggtatattaatatggcgactgagcaatgatgtagaatctgaaactaaatataatcagttatataatgaaagagaaagtgctataataattgaagataatcagctattaaaataa

SEQ ID NO: 279889 - DNA, 156 bp, Morganella morganii
atggttaatctcctgaccgaagaagccgtcttcgataatgtgattatcaaagtgttttttagcctgcagcaacagagagccggagcctgccgccgggtcatagattttattcacctgcttctgaccgtgcagtgccagctgagcaatcagttttga

SEQ ID NO: 279890 - DNA, 189 bp, Morganella morganii
atgacaagtttgcagcaacgtgctgaattacaccgccaaatctggcaaatcgccaatgatgtccgtggctctgttgatggctgggattttaaacaatacgttctcggtgcccttttttaccgttttatcagtgaaaactttgtcagttacattgaagccggagatgacagtatccggttatccgtctga

SEQ ID NO: 279891 - DNA, 192 bp, Morganella morganii
atgacagcagacacctccattgatgcggacagccgtgtgtatatgcaggcgactcatgcattgggaagcggcagtgaccctgcgggtgataaccgtttactgccggacagttatcaggttgactctctgactaacagcggtaccatagaagtcacccgcctggttgcaggcccgtattacggaatcctgtga

SEQ ID NO: 279892 - DNA, 1431 bp, Morganella morganii
atgaaacaacaacttctggacgcgcaatcagcacttgaacaactccgctcccggcgtggtgacgaattctatcctgactttcatcttgccccgccggccggatggatgaatgatccgaacgggcttatctattttaacggatattatcacgccttttatcagcatcatccggttaatgcagactgggggccaatgcactgggggcatgcaaccagcaaagatatgatccgatggcagcacgaaccgatagcgctggctcccggggcagaatatgaccgtgatggctgtttttccggttgtgctgttgatgataacggtgtgttatcactcatttataccggacatgtctggcttggtgatgaaggcgatgacagtgctatccgcgaggttcagtgtctggcgacaacaactgacgggatacatttccggaaacaaggcgttgtgctgacaccgcctgatggcatcatgcatttccgcgatccgaaagtctggcgtgaagataatgtatggtggatggttctgggggcccgtgatgcctcagatacaggacaggtattactgtatcgcggaacgtcactgagagagtggcagttcgatcgtgttctggctcatgcggattatggcgacagttatatgtgggaatgtcctgattttttccgctgcggtgaacatcactatctgatgttttcaccacaaggtatgcagcctgacggttatcaataccgcaatcgtttccagagcggtactatccggggacactggcagcccggtactgtatttgcgcaaacacagaaatttcaggagctggatcacgggcatgacttctatgctccgcagtcttttaccgcgcaggacggacgccgtatcgtcatggcatggatggatatgtgggaatcaccaatgccgtcaaaacaggaaggctgggccggatgtatgacactgccgcgggaattattcgaacgggatggccggttatgtcagcgccctgtccgtgaaacagcgttattacaccgggaaagtaccccggtaaccagcggtatactacatggcaaaaaagtattagctgaaaatatcggtgcgacagaactggaaataacctggaataccgaagagagtcatgccgaacgttatggtatacggctgggcaatgccatggaattatatgccgataatcagcaaaaacgcctgatactgtggagatataatcccggcgacaattcaaacagttaccgcagtattgcattaccggaaggagagcaactgacactccgtgtatttattgatcgttcatctgcggaagtctttgttaatgacggggatgcaacgctgtccagccggatttacccgcaaccgggtacccgcgaactcgccttatttgccgacgggggaagtgctgtaatatccgcaggcactctgcggaaactgagataa

SEQ ID NO: 279893 - DNA, 1260 bp, Morganella morganii
atgagtaataaaatacgtattaatcgctatgcttacatgactctgagcggcctgttattcacattcttctggacatggtcatcagtgttttctttggtatcactctggctcagccagaaagtcggtctgaagggaacagataccggtattattttttccgttatcagtctgacagcattttgtgctcagccgctgtacggattcattcaggataagctcggtttacgtaaaaacttactgttgtttatcggcttactgctgcttatcagcggtccgtggtttatttttgtctgtaccccgctgttacggtggaatattgtttccggtgctatcagtctgggtgtttacgtcggggcaactttttttgcaggtataggagcactggagtcttatactgaacgggtcagccgcattgccggatttgaatatggtcgtgcccgcatgtggggctctcttggctgggctggtgccacatttttagcagggatattatttaatatcgatcctaacctgaactttgcaatgggatctgtttctgctgtcctgtttctgattttattatggacgctgcgggacgtacggcctcacgcaatgaatgaacttgaattcggaaaaagcaatgcactgacatactcagatgcctttgctctgcttcgtatgcgttcattctggtcactggttatatttgtctgcggggtcagtgtctataatgtgtatgatcaacagtttccggtatatttcgcttccatgttcaccgatgcgaatgaaggaaatgaaatgttcggatacctgaattcccttcaggtttttctggaagcaggcggaatgttcctcgcaccttttctggtaaaccgcgtcggagccaaaaatggcctgcttatcagcggatttgtgatggcgttacgcattttcggatcaggccttgcagcggatgctgtcactatttcactgatgaaattactgcatgccgtagaacttcctatccttctgatttcattatttaaatatatcactactgtatttgataaacgcttatcagcaactatttatctggtcggattccagtttgtttcctcactatgtgcggcgattctgtccccgctggcaggttacggttacgataccctgggcttcgccgatacctatatgattctcgcctccatcgttctgatcatgacgatagtatcaggactgctgcttaagcaaaccggcacacccggaacccaccacatcaccattgaaaaacggacggtaatatga

SEQ ID NO: 279894 - DNA, 996 bp, Morganella morganii
atggtatttctgaaggatgtggctaagctggctgaagtttccatgatgaccgtatcaagagctatcaacaagccggataaactaaaaaaagaaacgttggctcgtgttcaggatgccatccgtaaaaccggctacacgccggatttgtcggcgcggatgatacgcagcacccgttcagggcaggggccgcggacgataggtgtgttagcactggataccgcaacatcaccattctgcgttgatattattttatctgttgaggaaacggcacgctcgtacggctggaacagttatatcgtcaatatgctggcagaggataatccggaatccattgcggatcttttgctctcgcatcgcccggacggaataatttttaccacaatgggtctgcggcaggtcgaaatttcaggacggatgctgaaagttcctttggtgctggcgaattgtgaaagtgttaacacatcgacagcgtcttatgtaccagatgatgaaagcggacaatatgatgcggtaagtgccttgctgaatgcaggccgccggcggcccctgtgcctgtatctgccggctgaacatccggcgacagcccgccgtataagaggtctgaagcgtgccttccgggactatggtgaggatacaggaaacttaccgcatcattatttatctgatgaatattatgccgatattccggatgtggtgcgcaggtatatccgtcacggtaaaccggagtttgattctgttatctgcggaaatgacagaatcgcgtttattgtatatcagattttactggcctgcggactgaatattcctgctgatgttgctgtgaccggttatgacaatatggtcgggatcggagggctgtttattccgccactttcaacagtgcaattgccgcattatgaaataggaaggcagagtgccctgcatattattaacggtgaaacgcaccgtgatacagtttatatttcttcaccgtggctgagccgggcctcagtgtga

SEQ ID NO: 279895 - DNA, 924 bp, Morganella morganii
atgacatcaaaagtatgggttttaggtgatgccgttgttgatttattaacggataaaccaggttatctgttgcagcttccgggaggcgctccggccaatgtggcagccggtattgctcgccttgacgggaaaagtggctttatcggccgggtgggggatgatccgtttggtcgttttatgtaccggacgctgacaaatgaaaaagtggatacagcgtatatgatccgtgacccccgccaccggacatcagttgttgtggtggaacttgatgagtatggtgagcggacattcacgtttatggttcgtccttcggctgatctttttctggagcaggaagacttaccggtatttcatgaaaatgaatggcttcatgtctgctctattgcactaagcgccgaaccatgccggagtacagcatttcaggcgatggctcagatatgtgatgcaggggggcgtgtcagctttgaccccaatatccgtaccgatttatggcaggatgaaacattactgcgggattgtctgcataaagcactgacgtttgcatctgttgtaaaattatcagaggaagaactcttttttatcagtggtgaaacgaatattcagcggggaattgatctgctggcggcgaagtattctcctgatctattactggtaaccctgggaaaacagggagtcatggtctattggggcggaaaaacacaacatttcccggcaacacctgttgttactgttgataccaccggagccggtgatgcatttgtggccggtttattggcaggtcttgcaatatacggactggcggaggatgagcaggtactcagtacgataatcaggcaggcccaggtctgcggtgcactggcgacaacagcgaaaggggctatgactgcattaccttaccggcgggagttgctgaatagtctttaa

SEQ ID NO: 279896 - DNA, 594 bp, Morganella morganii
atgaatgacgatataacctgtgaaatactagcactgtcacaaatctacaataatggtacggagattaccgatgacacaacagatcgtgagttattccggctgatcgcgtcacacaccactgcattaattaaaagaaagagtcagtctttacctttcaaagggcactacttcggtgataaattacaaattaaggccactgaaaccggtcagttattttataaattaatacaaaacattctttctctttcccgtgttaccggcaaccggcgtaaattacatccggttattccgctgattgtttctcttgctgagaaatatcatattcgttatgttccgatgctgtcggaatactatcctgactcagaggaggtaattaaacagctaaatgaagcctattgtgaatttattcagtccgtggacagtaaagagtataaaactgctgtcagtacctttaagaacagtgcccgcaagaattaccggttctgttgccgctatattgaaaacctgtttgaacgccatgcaaagctgttggtggtacggacagacctgttttacggaaacgggtcagtcacagagttactgccggggatttaa

SEQ ID NO: 279897 - DNA, 1008 bp, Morganella morganii
atgaacgataaaagctatgagattgatgagttgctcaaagtgaaagacctgaggaaagcgggtgtttttgtatttttcatgtcaacagagcccaggtttgaatgggttgaaaataaatatttctcaggtgacagaaatgacaaaacacgtttaagagatttaatcaatgaagttattggcatggcgaacagtaattacaattaccttaccaatgaagttttaaatcatgtaaataataatcttattagtattgacaagtttgaatggattaaagaagacagcattgcctctgcatattgctgggtaatgttaaataatataaaaccattaacctccacaaacgataaatatactcaggcaattcaacaggcaacagtattaaaacctgctgccaatagttggttaagtgataatgaattcagagatttacctgtatcacagcaaataaaacacatcaaaagaaaatttggtataaaagataatcatgtcagtactgaagagatgtatcgcgatttccagactatctttgatcatatgaatctgattcctggtgagaaagaaaacattataaacatgcttaaggatgaatggataaaatccttcgcagcagtaaaaaatataaaatggctgagtaaggatgatgatgatgcctgtaactggatatgggattatatctgtaactactctgtcgataatataaagatacctgtctggcctctccggttctttaaccccgaaagttccggagataaatatatttgtttttatgccgccctgcgggcatggaatgataaccccggagggaagaagtattttttatactctcttaaaaaggcatggcagcagcgttctttccggaaaaaacaaaaaaataaaaaaacactgagctgcagtctggatgatgaagtaaaaaaacatctggaagaattggctgaaacctatgaaatgacgatcaccgatttggtgacccggttaattgagaacgagtacagaacaccgaaaaaataa

SEQ ID NO: 279898 - DNA, 195 bp, Morganella morganii
atgccgatgtttaaagtaacgtgtaaatggaacggaaagccatgggaaaaggatatcgaggccgaggatgaggctgactgtacagaacacatgtgtctgttcggtgtactggttggcaaagtcgatattcaagactcgcaattaactgagataaaggaaaaaaaacaatgtcagggcacccacatgcagacctga

SEQ ID NO: 279899 - DNA, 1785 bp, Morganella morganii
atgtatttatcaaaactcggaatccgcaactttagaaattttgaggcggctgatattcccctggcaggtaatgttgtgttattaggggaaaatcgtgtcggtaaaagtaatctgcttttcgcaattcgactggttattgattctactctgcctgattcagccaggcagcttaagctgtcagatttctgggatggctgcgaccttgaatcaaaccctcaaatggaggttcaccttgaattcgccgatttcgacagtgacccttccctctcagctctgttgaccgatttccgcatcgcagaggatcctaccgtagcaaggttgagctacatttttcgtaaaaaggaagaagtcgatagggctccacgttcgggtgaggactgtgagtttattgtttttggcggaggtcaggaatcgcgagccattcctggacgcgtcaggcggcggatctccattgatatgctggacgcgttacgcgatgcagaagcacaacttgcttcctggcgaaactctccgctacgccccttattggaagatgcattctcttcactgagccgagccgatttggatcgcgtagcaactgagcttcaggcagcaacggaaactatggagaagttcccatcaattaaggatctcgaagattctctgcgtggtggcattcttgacctggctggaactgctcacgatttagatgctcgcctccgttttgcacctgctgacccgctcagattgatgcgttctatctctatgttcattgatgatggaaagcgaggcattgttgaagcgagcctaggttctgcgaacgtggctctgatatcactcaagctagcagagtttgcatggcgacgtgaaaagaatgaacgtaatttctccctgctttgtattgaagaacccgaagcacaccttcacccacagcttcagcgcgctgtttttgacaaactcttcaataatgccgccaaagatcagtctttgattgtaacgagccattctcccacgctggcaaccattgctcctcttcgttctgtcgttcgcatttgcagggatcctgaagggcgatcgcgagctttttccctagctgaactgccagtaaccagtgaagaactcgacgacattgaacggtatctaacagcaaccagatcggagctgctttttgctaacggtgtaatatttgttgaaggcgatgctgaggaggttttacttccaggtttcgcacaggccatggggatcaatctcgaccagcttgggattacggtatgtaacgtagcgggagttaattttgaaccatacgtgaagctggcagccagcctcggactacccttttccgtcgtaaccgactgggacccacttgatggtacgaaacaaccgatgggtaaaacacgttcaattggtatctggcaggcatttagcgatgtatcgggaaaacttaaaaaactaactcctgggaatattaattggctcaataatggttcttatgaagagtgtaagcctacatttgaaaagattggaatttttttaaacgatcagacgtttgaagtcgccgtggccaatacgacagggctcaaagaagcgctactggatatcctcgatgaacagggatttggtgtgttacgttcatcaaggattgcttcatggcgtgccggtatggttccagacccgacgcaacttctcgcgatgatatctgacataggtaaaggacggttggctgccaagctgaagcaaaaagcaccagggcttgcgccgccggagtatattgcttcggctattcaatatgtggtgtcgaatgtctga

SEQ ID NO: 279900 - DNA, 1641 bp, Morganella morganii
atggcacgtgccctgattgaagaggtcgctgatccccgaggggtggcctgtattacttacaacaatgaatgtgcttctgaacttgaaggacgtctggcatgctttaacgtcattggcgatgatcggaactttattggtaccgtgcatagcttcgcattaaatcaggttttaatcccctactcacgatgtataccgggtttgctgccggatgattttcgtgtggcgaccagagatgagagtcgcgcggctgttgaagtggcttaccaggctagattcggagctgtaggagatcctcatgctcggtggaaatttgcagaagagaaacgacgccgggatgtgaaccgactcctaccggcttggcggaataacaatccggagctggcagattttattgaaggttatgaggcagaacttcggcgcttaggactgattgacttcgatgatatgccactcatcgcttttcgtattattagcgagcatgaatgggtacgtaatgctatccggtcgcgctatcctgttttgtttgtagatgaatatcaggatctggggcatgctcttcatgagctggttctactgctgtgctttaacggtggaatacgattatttgcggtcggtgatgcagatcagtccatttacggatttaatggtgcaaatccagggctactggatagtcttgtttcacgggcagatgtaagaccgttccgccttcgcttcaactatcgatctggtgcgaaaattattagggcatcactaggggcgctgggagaagaccgcgattatgttggccccgatggtaatccagagggtgaattaggattccatgggattaatggcgattatgacgcacaggcgcattttatcgctcatgatctaattccctcgttgtttgaaagagagtttcagcctgaacgcatcggggttctttaccgggcagcctggcttggcgataaagttgcggatgagttcaaggccagaaatattgccataatacgtgctgacagtaatgctctcattaagcgcaattctcgtcttgcccgtttcatcgaagcctgcagtcagtgggtaactgggggatggaaagaagcctctccaccatttaatctcttactgggtcaggcgctctttcttgtttatggccgccgcgcgagccgtgctgaagaacaattactgaccgtacagctcatcacttttttacgaaacggaattgataaagcggaaagtgctcacgagtggctgagacgtttaaatgatgagatcttcaccgactggatggatatctcacagaacactcagcaggaatgggatgtcatatctgagttactgaaacgaaccgatcccctcaggggactggatgtggctttggatgtattcgctgggaaagtagaaggaactgggcgcatcactcttagcactcttcatagtgcaaaaggccgagaatttgatgtagccataatgtttggggtaaataaatatgacttcccgagtaagcgagatctagcttcagataatgcccttcgcgaggcccgtcgcctcttttatgtaggagtcacccgtcccagaaaagagctgcacatggtttatgaaaagggtaaacattcaccttggattgctgaactgtatcatcgcagccagcagatatag

SEQ ID NO: 279901 - DNA, 303 bp, Morganella morganii
atgcctaagcgttccatctccgttcacctggcgctgatgtttgccttatccgcgctgctgattgtgtccgttatcggcattctgctcagaagctctttgcatgattctttgcggaagcagatgcacaacgaactgctattccgggaatcattaatgagtccgtggatcaccgcccgaacctcggctgacggctggtcgacgcttgccaataaattcactgtgttaaccaattctgaaggtgagcgcgttcgctactggatagtgagtgataccctgaagtttaatgtgcatgataggatgtag

SEQ ID NO: 279902 - DNA, 681 bp, Morganella morganii
atgcgcctgttgttagtcgaagatgaagaaaaaacgtcaacctatctcaaccgtgcgttgagtgagtccggatttacggtagatgtctctgcagatggcgctgaaggtcttcattacgcgctggagttcgactacgacgcgataatcctggatgtaatgctaccggggatggatggttaccgggtacttgagggtgtgcgggcagccaaacagacgccggtgctgatgctttcggctcgcggctcggtcgatgaacgcgttaaagggcttcgtcttggcgcggatgattatctccccaagcccttctcgctgattgagctggtggcgcggattcaggcgctggtgcgtcgccgcgctacggatggcgcagacatcacccagctgcaaattcacgatctgcatctcgacctgctggctcgccgcgtatttcgtggtggaacacggctggaactgaccgcgaaagagttttccctgctgagccttctggcccggcatcagggggagattctgtcaaagatgatgatagctgagcagatatgggacatgaactttgatagcgatgccaacgtggttgaagttgccattaaacgcctgcgagccaaggtggatgcgccgttcgacgtcaaactattacataccgttcgtggcatgggttatgtcctcgaagtcaggcctgaataa

SEQ ID NO: 279903 - DNA, 1050 bp, Morganella morganii
atgaaattcacgcttatcagtgcaatgctactcacggcaatggctggagtgacctcagtcaatgcggctgattacaaacaaaacccttttacactggcctatgacggtgccatcaccgaaaacgccgaaggtaaggtcaatattcaccccgtgaagtacgatctgcatggcatccagattgctgcgaatgtctatacccctgctaactacgatcctgccaaaaaataccctgccgtggtggtcgcgcatcctaatggcggcgtaaaagagcaggtcgctgggttgtatgcccagcgtctcgccgaacagggctacatcacgattaccgccgacgcggcttatcagggcgctagcggcgggatgcctcgcagcgtggataaacccgcgaatcgcatcgaagatatccacggcatggctgactacatcagccagtatccaggtgtagatacttcccgcctcggtctgctgggtatttgcggaggcggcgggtattcactcgtggctgccgaaacggacaaacggttcaaatcgattgcaaccatcagcatgtttaattcaggccttgtgcgccgcaacggttttcagaattcacagctggatagtatccagcagcgtcttcagcaagcttctgacgcacgtgctcaggaagccgccggaggcgaagtactttactccggcgatgctaacctgactgatgagcagattgctaagttaccttttgccttatatcgccagggctacgagtactactggaaaacccacgcacacccgaactctacgtttaaatacaccaccagcagtcttctggatttaatgagctttgacgtaacggaccatatcaatctcatcaataaaccactgctgatgattgccggtacaaaagcggatacgctctatatgactgaagatgcgttcgctaaagccactggtacgaaggacaaagaactcttcctaatcgatggcgctacccatatcgagacgtattgggtgccaaaatacgttgaccaggcaatgcaaaagttagatgtcttcttcgataagaatatttag

SEQ ID NO: 279904 - DNA, 960 bp, Morganella morganii
gtgccgctgtttatcggtttaggtctattcatcgtcggctcggtgggctgcgcgttatcaacggatatcgtgcaaattgtcttctggcgcgtttttcaggcgttaggtgcctgtaccgggccgatgctggctcgagcaatgatccgtgacctgtttagccgtactcgtgcagcacaaatgctttcgactctgatgatcatcatggccatcgcgccgattgccgggtccctgatcggcgggcagatgattaaagtcacctcgtggcatgccattttctggctgctggcgattatcgggacattaatgctgatgtctttattctggttacccgaaacattacctgctgaaaaacgctcgcaagcctccgtaaccagagcctttcaaaattactatgccttgctaactaacgctaaatacatgcggtttacgctatgcctgacgttctactacgttgcagcatacgcctttatcaccggttccccgtttgtgtacatcacgtacttcggcgttgatccgcaacactacggttggctgtttgcagtaaacattgtgggattaatggctgtgagtatggtcaacagacgtctggttcaccgctatccactggaagcgttgctcaggaatgccgtattcatcgccactattgccgcaatagtgctggcggtcaccaccggcctgggtgtaggtggaattaccgtgattgtcggcgctgtgttcgtattcttctccatgaatggcatcatcgcggcgacatccacggcttgcgcattagatgcagtgccaaatgtggctggctccgcatcggcgctaatgggggcactacaatacggcagcggcatcatctcttcactgcttctcgctctgttcagtgatggcacgccatggacgatgggctggataattgcgttgtttacggcagccagcgccttgatggctctgaccgttcatctaaaaaaatga

SEQ ID NO: 279905 - DNA, 1611 bp, Morganella morganii
atgactgaaaaatacgaagtcacagccaccaaaaaggacggtacgacatatcacggactgaccactacagtagaagctaaaggacaagctgatgataataccgaagccatcctcgatgaattatcagggcagattgggcgagaccaattagctcaagacttattgggtgagattaacagtaaagctgaacaatcagctgttatggcgctaaataatcaaattaaagctaaccacgatgcaattttagcggagaaaatagaacgaggtacggcgattgaacaaagtgaaaggaaactggatgaaacgggtaagttattatccgaacggcttaatcaggtttcaaccgcgacggaagcacaagtggctgctattaaacaagaggaacaatcacgtattgagggggataaaaccgaggcgcaacaacgacaatctttagccatacaacttcgtggtgattataccggtaatgatttatcccaattaactgctggtctcatctcagcagagaagcaagctcgtattacgggtgaccaggcggaggcaaaagccaggcaatcactggaaacccggatgaatgggaatgtttcagtaattaataaatcattagaagcgctcacgtcaaaacagcaggcgcaaacgcaagagctttcaatcctcaattcaaatcttaaagggaaagcggatagtaactcggtaaatgaattaaatacgcgcgtatctgatattgatggcaaagtgacgtcagcaacttctcgggtgcaaacgttatccagcaaattagacaaagtaaaggccgatttatcagagtcagttgttgatctggatctgtcagcattagatgaaagtacttattacccggttattctccctctgacgacctcccgtcgctattacttcagggtatttcgtacgctggggcaatacggagataacaaacccggttatgcaactcacggctccggcggttttgccatgattgttgagtggcaggtgagcggttcaggaagggtcacatcaacggttcagcaggtgacacgtctggaaagtcaggtcggggcggattcggcaaaaattgaacaaacctcaaaggttcttactgacttaaacggcaggatttctgcatcgtggacaatgaaagtccagttggacagcaaagggaataaggtcattacaggtatcggactggggtttaatgctcagggaaacagtcagtttcttgttaatgctcaaaattttgcagtgatatcgtcactgaacgggaaagtagtaaccccttttgtcattcagaacgggcaggcattttttaacgatgcgctaatcagccaggcaacgattgataagttactggtcggggatgttgcagtggctgcttcatatcctcacgtcttggtacaaaatatccatagtggtcgtggcgggtggacaacggcaacgtctgtaattacgtatgcaggcggaatgccttatgacatgacgttggtactcccttcgataactgccattattgaggatgatacggggggcgtccacgtccggttgagggagaactgcggttcagtatacgtgtggacggggtcggtcagcaggcaacttctcagtggtcagaattga

SEQ ID NO: 279906 - DNA, 930 bp, Morganella morganii; identical to SEQ ID NO: 278092

SEQ ID NO: 279907 - DNA, 192 bp, Morganella morganii
atgcgcatgtctgacaaatattccagccctacagcatacgcctgggggcttataacctctacctttggcattttatctctggatcagtgggctattgttgccgggatcatctgtaccgtcggtacgttcctggtgaactggtattacaaacggaaggaattccagttgaaagcaggtgaacatcatgaataa

SEQ ID NO: 279908 - DNA, 219 bp, Morganella morganii
atggagtgttataacgatgtgccgggtactgcgtgtcactcgggcctggttttatacgtggttgcaaaaccagtctcatcacgggataaggataaccagcgcttgctggcactcatccgtgacttttattcactgagcagaagtatgtacggttatccaatgaaaatgatgaaattcgttgatttaaaaaaagatttactgaagaacaaagtatattaa

SEQ ID NO: 279909 - DNA, 1023 bp, Morganella morganii
atgatcacttttgagattcgtatggaaattaaagtcctgcacaagcggggaatgagtatccgggccattgccagggaactgggtatttcgcgcaatactgtccgcagccacctgaaagccaaatctgaaaagccgcagtattcaccacgcccgacatcatcatcactgctcgatgaataccgcgattacatatctaagcggatcagcgatgcgcatccctacaaaatcccggctaccgttattgccagggaaatcatggagcagggctatcgtggaggtctgactatcctgagggagttcatccgttcgcagacacaccccgtacaggcagagccggtcgttcgcttcgaaaccgagcccgggcggcagatgcaggtcgactggggaaccatgcgaaacggcaagtcccccctgcatgtgttcgttgccgttctgggatacagcagaatgctttacatcgagttcaccgacaacatgcgctacgacacgctggaagcctgtcaccgcaatgcgttcagcttcttcggcggtgtaccgcaggaagttctgtacgacaatatgaaaacggtggtgctccagcgggatgcttaccagaccggacagcaccggttccatcctgccctgtggcagttcggcaaagagatgggcttttctccccggctgtgtcgccccttcagggcacagactaagggcaaggtggagcgaatggtgcagtacacccgcaacagcttctacatcccgttaatgacacgcctgcgcccgatggggatcaccgtcgatgttgaaaccgcaaaccgttacggcctgcgctggctgtacgatgtggccaatcaacggaagcatgaaactatccagacccgcccctgtgatcgctgggtggaggaacagcagtccatgctggcactgccaccggagaaaaaacagtatgacgtgcaggtcgacgaaagcctggtgaccttcgacaggcagccgttgcatcatccgctgtccatctatgacacgttctgcagaggagccgcatga

SEQ ID NO: 279910 - DNA, 780 bp, Morganella morganii
atggtcgaactacaacatcaacggctgatggtgcttgccgaacaactccagctggacagtcttatcggcgcggcgccggcgctgtcgcaacaggcagtggctcaggaatggagctacatggacttcctggagcacctattacatgaggagaaactggcccggtatcagcgtaaacaggcgatgtatacccggatggcagccttcccggcggtaaagacgttcgaggaatacgacttcaccttcgccaccggcgcacctcagaagcaaatccagtcgctgcgttccctgagcttcatcgaacgtaacgaaaacatcgtgttactgggcccctcgggcgtgggaaaaacgcacctggcgatagccatgggctacgaagctgtacgggcgggcatcaaggttcgcttcacaacagctgcggacctgctgttacagctgtcgacatcccagcgtcaggggcgttacaaaacgacactcaatcgcggtgtcatggccccaaaactgctcatcatcgacgaaataggttatctgccgttcagtcaggaggaagccaagctgttcttccaggtcattgccaaacgttacgagaagagcgcgatgatcctgacctctaacctgccgttcgggcagtgggaccagacgttcgccggggatgcagccctgacatcggcgatgctggaccggatcttacatcactcacacgtagtccagataaaaggagaaagctatcggctgaagcagaaacgaaaggccgggattatagcggaagctaatcctgagtaa

SEQ ID NO: 279911 - DNA, 222 bp, Morganella morganii
atgaataccatcaataccaccacagccccttctccacttgacgaaccactcgtggacatgaaattcatcactcaatttaccggatcaacggataagtggttttacaagcagatacaggagggcaagtttccgaaaccgattaaactgggacgcagttcccggtggcagaaaagtcaggttgaagcctggttacaggagcgtattgacgaatcctgtgaataa

SEQ ID NO: 279912 - DNA, 156 bp, Morganella morganii
atggttaatttcctgaccgaaaaagccgtcttcgataatgtgattatcaaagtgttttttagcctgcaacagcagagagccggaacctgccgctgggtcatagattttattcacttgcttctgaccgtgcagcgccagctgagcaatcagttttga

SEQ ID NO: 279913 - DNA, 999 bp, Morganella morganii
atgatttataaagaaatgcgggaagatttcaggtttattttcccctataaaaaagatattgtttataactgggggttgaatccggtgcgggaattctcagaggtaattcaaggtatacgtcatgattactgtctgaattgttatgatgaagatctgaagacagatatcgatttaatcagagttatagataatggtgggtatccaaaaatcattgacggagtaatgagtattggttgcggggaaaaaaccatcaggcaactggatggggttttcagagtaaaggagcgaatgtataactccattatgaaataccacaaaaatattttaaaactaaataaaaaggctgtttttttgtgtttttcattatctgttaacagagggcgtcagttcattgggaatgaaacaccggaaaatatcaatacttataataaaatattaaagaagttcagggctgaattttttaataacatcaggtcgcgtgcattctttaaaagaaatgttattggtcatttctgggtgtcgttgcaggagacaggcggggggtatatgtatatccatatcaacttctaccttaaggacaggcaatacaattaccttcttggccgggaaataaacagtgtctggtttggaatccttaaaaaatataaaataaccggacagagcagacattttacgataacggaaagctatgaaaacagcagagcaagcaacaacgcaaaaagaaaaaagaaaattatctataaagcgtatgaaagcttcgattcccaaagtaaaaccaggcaggtcatggatatttatcctgatttaaacggaggaaatctgagtgctgaatatagttttactaatgacccatcctatataccgtttagttcttatgttaaatcgctggtaaaaaaagcattccatatctcaggaatgcgcagtttcggtacggcttctcttcagacggaacagaaggcatctgcagaaagtggtaccgcacagatacagaaaaaataa

SEQ ID NO: 279914 - DNA, 774 bp, Morganella morganii
atgaaaatactcgttgcaggcgcgacaggaagtattggtcttcatgtcgtgaataccgctattgaaatgggccatcagcccgtggcactggtcagaaataaacgcaaagtaaaattgcttcctcgtggaacagatgttttttatggcgatgtttcaatgccggaaacactaaccgaattgccgaaagatattgatgccatcatcttcacgctcggttccgatggtcagggtcgtattggtgccagagcgatcgattacggcggagtacgtaatattttacgaattttcaaggatacgtctgttcgtatcagcctgatgaccacgattggcgtgactgagcggctcagcacctggaatcaacgaactgaggttcatgactggaaaagacgtgccgagcgtctggtcagggccagcggtcatccctataccatcgtccggcccggctggtttgattacaacaatgatgatgaacacagaattgttatgcttcagggggatcgtcgccacgcagggacaccggaagatggtgtgatatcccgtgagcaaatcgcagaggttctggtcagtgccctgaccaacgacgaggcaaaaaataaaacgttcgagctggtggctgaacgaggtgaagcaccgcaggatcttaccccattgtttgcagacctgcagactgatgatgcacaaaaaaatgatggagttttagacatagacaatatgcctctcagggaagaaccggagtgcattgttaacgagctgaatttgtattcaaaaaattaa

SEQ ID NO: 279915 - DNA, 588 bp, Morganella morganii
atggcaaaaattgaactcggtggtgtgctgggtaaaacctttggtaaaacacaccagcggcttgtctgtaccacgtccgaagccgtccgtgcattgtgctgcactgttccgggctttgaacagttcctgaataccagcaaatcacgcggcttaacttacgcggtatttcgcggggaaaagaatatcggggtggatgacctgggttttccggtgactgatgatgttatccggattgtgcctgtcgtggtcggtagcaagagtggcggattgctgcaggttattttcggtgcggtgctggtggccgctgcgttctggaccggaggtgcgtcaatggctgcgtggggggcgctgcaaacagggatggctatgaccggtgcatccatgatacttggcggcattatccaaatgctgtccccgcagccgggaggtcttgccatgaaagaccagggcgaaaataaaccgtcctatgcgttcggcgccccaacgaacaccgtttctcagggctatccggtaccgatcggttacggtaaacgccgcatcggcggcgccgttatctcagccggaatttacgtcgaagatcagcagtaa

SEQ ID NO: 279916 - DNA, 372 bp, Morganella morganii
atgaagaagatactggctgttactgttgtgttacttttatctggttgtgttacgccaccgacaagtattgaagtacaaaatgcggattacggcgaaaaaccgagcaaagaattatacgaatcaaaagtgaaagcgtatcaggaggggcaattaaaagaccctatgtcagcagtatattcattcagtgagccaaggaaaggctggtgtatattccacagtaaagtgaatttcggttggattgttgattatacgctgaatgctaaaaattcgtatggtggctacgttggagcaaagccgcaatttacgatcattcagaataacactgcatggcatataccttattttttaaaggataattgtggttaccaataa

SEQ ID NO: 279917 - DNA, 708 bp, Morganella morganii
atgcgcaaaaatattcaggcagccattttttcacatgccgaacgtgaataccccctcgagtgctgcggggtgatcgcccaaaagtcccgtgtggtgaaatactttccgtgccgaaatgtcgcggtttctccggaggaacattttgtcttatcgccggaagattacgctgcggcggaagattggggcacagtgaccggtattgttcacagtcacccggatgcaaccacccggccgtcagaactggataaagcacagtgtgatgctcttggtgtgccgtggtatatcgtcagctggccggagggggatctgcggactgttcagccgcgcggtgagctgccattactcggtcggccgtttgtactcgggtttaccgactgctgggggctggtcatgagctggttccggcaggaacactgcattgaactgccggattaccgggtggattatccctggtgggaacagggggaaaaccgttatgcggacaactggcaggaggccggatttattcaggttgatgatccgcaacccagcgatatgattgtgatgcaggtgcaggcaccagtggccaatcatgctggtattctgctggatgataatatgctgcttcatcatttatacggacacctgagtcagcgggtaccatatggcggttattggcgcgaccgcacagttatggtactgagacataaaatcttcatgactggctaa

SEQ ID NO: 279918 - DNA, 759 bp, Morganella morganii
atgatcacaaacgattatcagaagctggaaccgggtaatgccgtccggctttttgaggttgatggttccgcgttcggcgtgccggatgttttacggttccatgcttacaacattcctcacacagaagcagagattacggctgcaggcggtgaccctgaaaagctcccggcaaaatccatctggtggcagggcgaagagtaccgcgcctggccggtgcaaatcgagggtctggaagcatcaacaaccggttcaggtgcgcagccgaagttatcggtggcaaatctggacggttctgtcactgcactgtgtctggcatacgatgacatgctgaaagcgaaagtcacgatacgcgatacactggcgcattatctggacgcagcaaactttccggacggtaatccgtcagcagatccgacacaggaaaaagtctcggtcttttatatcgacagcaaatcatcggaaaccaacgaagttatcgagtttgaattagccagtccgatggatttacagggggtgctgatcccgacgcggcaactgcattcaatgtgcacctggtgcatccgtgggaagtacaaatccggtgacggctgtgattatgccggtcagaacggatatttcgataagcacggcaaccgtgtggatgacccggcacaggatcaatgcagcggcatgctgaataccggctgctttccccgttttggcaaaaacaatccgatcccttttggcggctttccgggaacatcactactgaggaaatag

SEQ ID NO: 279919 - DNA, 336 bp, Morganella morganii
atgatagacacattcacctggtgtccccgtgtaaaccccacggaggacatcacctataaaacccgcagggctaaattcggtgatggttatgagcaggtgtccggtgacggtatcaacgtacgcagccagaagtggtcactggaatttaccggccgcggggagtatatcgcggctattcgtcagtttatcgaccgtcacggcggcataaaggcttttcagtggaaacccccgcttgaacctgtggggttataccggtgcgacgaacataagctcaccccgctcggtggcgacagctactcactctccctcacttttattcaggcatttaaaccatga

SEQ ID NO: 279920 - DNA, 210 bp, Morganella morganii
atgctttacatggtccaggatattacggcatttgataatgaaaatggtgctggaattgtagcaacggtgcatgtttatttggatgatgatacaccactttccgacatccaaattagtgtgcgactccctttaatgaaaaatagcacgttgtcagatatagaggtggcggctattgaacaggccaaggataaactacacaaagcacaataa

SEQ ID NO: 279921 - DNA, 441 bp, Morganella morganii
atgacattatcagcccttccgctccaagagcccgcagccatcaaaagcaatctggttcatccccgtggcagagacacattctggcggttttatttcggcagcgtgccgggctggcagcgcctggaaggcgatatttttacccggatgagcgaactgtgtgatgtttattatggtgctttctgggaattcagtatgctcaccaatggtggtgtatttatctggccagacatgattgaaacatcacttccgatggttaacccgcataacggtaataatgcggaactgagtccggaagccgcaggcattgccgtgtgtttaatgacgttcagtatctggtcattccggactgaaagcgaagtattagttgagtatttttatcagttacgggactacgccctgcagcatgacgagtgtgccgctatttttcatctgattgattaa

SEQ ID NO: 279922 - DNA, 672 bp, Morganella morganii
atgcatacgtcagattcacgccatgaccggcttgcgtcacggctggccatgattatcagccgcctgttccgcggcgaaacactgtatccggcacagctcgcccgtgagtttaatgtctctgcacgcacactgcagcgggatttcagtgagcgtctggtctttctggatacggagccgtatcagggcggataccggctggccgccggtcagcgcccttaccggacagacagcgatatcctgtactttgccgatatcacccatattaccccgctgttcccctcgcttgaccgcaggctgctgtccgttctgctcagtccggaaaacggcgctccctgcctggtctaccatgaaccgccgcagtccgccccgacactgttcggcggcttttatgtggtgacgcaggcgattgtccgcagacggctgctcagcttccgctgtgacggtcaggaccatgaggggatggccccctacaagctgatttactttcagcgggactggtatctgtgcggggaatggcagtctgccctgcgggtgttccggttcagtcagctgcagaatattgccgtgtccggacgccgtttccggcaggacaccgttatcgcacggacagtcacccggcccgaatttatcaccgcattaccccattatcagtttatccgttcattaccttaa

SEQ ID NO: 279923 - DNA, 408 bp, Morganella morganii
atggcaattaacgtaattacagtcagcggcaatctcggaaaggattgtgagcaacgatggactccggcagggaaagccgttgcatcgttcagcctaccggtgaaacagggatatggcgagcacgaaaagacatcgtgggttacctgtaaaatgttcggcgcgaaagctgagaaattgccagaacacctgaaaaaaggaacgaaggtgacggttattggcgagtttgtcatggaggaatggactgatcagaatggcagtaaacggtctgcaccagtgattatcgtgaatcaactggatttcggcggcaatcaggcaggaggccagaagccgcagacgcagacgcagacgcagcaagctccagcacggaatgagccactgatggattttgactatgatgttccgttttag

SEQ ID NO: 279924 - DNA, 507 bp, Morganella morganii
gtggttgataacggctttgtcgatattgttgaggggcgttttgatgccgggatccgtctgggcgaaagtgtggataaggatatgattgcggtaagaattgggccggatatgagaatggctgtggtaggagcgccgtcttatttcgctgcaaatcctgcacctgaaacgccgcacgagctacaaaatcatcggtgtatcaatatgcgcctgccgacagccggtgggctttaccattgggagtttgagaaggaagggaaaccgttaagggtcagagtgaaagggcaggtcacgtttaatctgcaggcggaaaggattgatgcagcgttatccggttttggtatcgcctgcatacctgaagacagggtgcaggattatataaagtcaggagagcttattcaggttctgcaggactggtctccatctttccccggatattacctctactacccgagccgtaagcagcatccgcccgcttttgcactgatgatcgatgcacttcgctactag

SEQ ID NO: 279925 - DNA, 990 bp, Morganella morganii
atgcaaaaacgttatctgggtaaatcccgactcgaagtttccgcgcttgggctcggttgcatgggcttaagccacggctacggcccggcgaccgatacccgacaggctatcgagctcattcgcgcagcggttgaacgtggcgtcaccttcttcgataccgccgaagtgtatggccccttccttaatgaagaggttgttggcgaagccttaaaaccgtttcgtgaccgcgtggtcatcgccactaagtttggatttacttttggcggcgacaacaagcagcagattttaaacagccgtccggagcatgtccgtgaggcggtggaaggctcattacgccgtcttaagactgatgtcattgacctgctttatcaacaccgtgtcgatccggatgtcccgattgaagatgttgcgggaactgtgaaagacctgatcgctgaaggcaaagttaaacatttcggtctgtccgaagcgggtgcgcaaaccattcgtcgtgcgcatgccgtacaaccggtcactgcgctgcaaagcgaatactctatgtggtggcgcgagcctgagcaggagatcctgccgttgctggaggaactgggtattggttttgtgcccttcagcccattaggtaaaggcttcctgacgggctcgattaaaccaggaactacttttgggaaagatgattatcgcagcaccgtaccgcgtttcgccgaacaggcgattgaagccaatgaaaagctggtctcattgctgggtgaactggcggcagagaaaggcgtgacgtctgcacaaatcgcgctggcatggttgctggcacaaaagccctggattgttcctatcccaggtaccaccaaactacatcggctggaggaaaacctgggggctgccgacatcattctttcgcaggatgactcacggcagataacccaagcgcttgaaacgattaaagtcgtcggcgaacgttactctcctgagcatcaggcccgtgtaggccattaa

SEQ ID NO: 279926 - DNA, 819 bp, Morganella morganii
atgcccctgctgggctttggtgtgtttcagatgtctgatgccgctgaatgcgaaagagccgttattgatgcaatcgatacgggataccgcctgatcgataccgctgcgtcttaccagaatgaaacccaggtcgggaacgctctgaaacaaaccggtatcgcccgcaacgaactctttgtaacgaccaaactttggctgcaggataccaattacgaaggcgctaaagcccagttcgaacgctccctgaatcggctgcaacttgattacgttgatctgtatctgattcaccagccttacggcgatgtccatggggcatggcgtgctatggaagaactgcaacaggcaggcaaaattcgcgccattggcgtcagcaacttccatcctgaccggctggccgaccttatcgccttcaataaggttgcccctgcggtgaaccagattgaagttaacccctttaaccagcagttgcatgcggttccatggaatctaagccatggcattcagccggaagcctgggcaccgtttgctgagggtaaaaatggcctgttccagcatcccgtgttaacagcgattggccagaagtacggcaaaagtgtgggtcaggttgtgctgcgttggatcttccagcgaggcatcatttcactggcgaaatcggtgcgcaaagaacgcatggaagagaacatcaacatcctcgattttgaactcagctctgaagatatgctgcagattgccgccctcgacaccgcaaccagcgccttcttctctcaccgcgacccagcgatggtggaatggctgactggccgcaaacttgatgtttaa

SEQ ID NO: 279927 - DNA, 600 bp, Morganella morganii
atggtgaagtggccaaggcgaaagtgcctgatatgccgggcatggtttcacccgaaattcagtaacgaatggtggtgctgtccggagcatggtgctgagctggcaataaagcgacgaagcagggagaggaaaaaggccgaggccaaactaaaaaaggagcagcagcagaaaaaacgtgaagaaaaagacaaactcaaaatccgcaaattagcagtaaaacccctctcatatttccggcagcaagcacagaccgcattcaacgcatacatccgtgaacgggataaagaccttccgtgcatcagctgcggccgtcaccacacagggcagtatcacgccgggcactaccgaaccaccggagccaatccggaactgcggtttgatgaggataacgtccataagcaatgtgccccatgtaataaccatctatcaggaaacatcgaaaactatacgccgcggctgattgagaaaatcggtcaggaacgcttcgaccgtctgatagggaaacatgagttgccgaagtggaagcgggaagactacgagcgcatccgagatgagtaccggcggaaactgaaggaacttaaatcattatgttggagttag

SEQ ID NO: 279928 - DNA, 468 bp, Morganella morganii
atgccgagcaaatatgaaaaaacgcagggcacgaaaatcagtatttcaaagctgcctgcaacagaagtgaaccccgcatccgcagaatttctgccgctggcctgtgcggccaaagagatcagttataccggtgggcagaagtcggatattgatgtcaccaccctgtgctcaacggagcaggaaatgaccaacgggctggcctctccgggggaaatcacgatctccggtaactggtcaccggatgaaggtcaggaagttctgcgtactgcctatgacaaagatactattcatgcgttcagagtggagtttccgtcaggtaatggttatgccttcctggcagaagtccgtcagaacagctggagtgcggcaaccagcgggctggtcaccgcgtctttcacgctgcgcatgaaaggtaagcctgttccgctgaaaaacggggcggtaactgagccgggaaagagggagtaa

SEQ ID NO: 279929 - DNA, 222 bp, Morganella morganii
gtgtacatccggggaaccaatgccgccggaaccaacagcgacaacacactgaaagcggacgacccgcgtaatgcgttttactggcgttttctggaaaacggcacatccaaaatggcaccacaaccgtttatccgtccggcatttgacggtaaagcggatgaggcagcggatctggcgctgagcaaactcagtcaggctatcgataaggtgctgagcggatga

SEQ ID NO: 279930 - DNA, 789 bp, Morganella morganii
atgggttatagcggaattaataaactccgggtagcacttactctgaaaatgtttgcgcggcattatacattattctcatcaacatctgataatcttgcagagatatattcaaaaagcttcttaattaagaattctgtcataaaaacgatggggcaaccacgaaatgataagctttttgaggaaccaaagaatttaagttactttattaaggatattccggagtataaaaaaattatactgtatgctccgacatggcgggcaggaatttatggtaaaagctgggtcggagaagatacccaattttttccatttgaagacttttcccagactcagttagagcaatttcttgaggaaaatcaatatttattattattgcgtcctcatcatcttcaaaaaataaatatttcagaatcaaaatggatacgctctttcagttctgatgagtgtgaagaaattatggatgttatgccccattttgatcttttaatcaccgattattccagcatatattttgatttcctattattaaataaaccaattatatttctcccatatgatattgaaacatatcaaagccaggtaggactaaatttcgactacaacttttccactccaggtcctaagccaaaaaatcaaaatgaatttattcatgaaatatatcagtctctaacaaataatgaatatttcctggaaaaaagagaacttgttaataattactttaatcaagttaaatatggtagcagcaagcttatctacgactatattgtgaataaccttagaaataaataa

SEQ ID NO: 279931 - DNA, 765 bp, Morganella morganii
gtgcgcggtgtggccgagtttgatacagaggctattctggatgatgttgaagcgatcctggaagactcaaaaattattcaggaactcagcaataacgatatggactcattcgaggccattatcaacaacgccaacaacacctatggccagtggatgcacctgcagcgtgaaaatggtgtgatgaaggctgaaattatccgcgttgataactatgtggtgacggaaaccaaagcgcttgctgagcaccttgatgcggtacaggccaccgcagataaaagccttgcccgtgcgcagaactccatcaaagccgagtatgacatggagaaaggcacggcttcggcaatctggaagtcgctggtcagtattgtgtatgacggcgtgaattatgatgccggtatggtgattggcgcagagctgaaaggcggtaaggtcgataccatcatgggctttaacgctcagcagtttgcgttttataacccggtgaacgggaaaatggatctgttcatgtatatgaaggacggacagattttcatgaacgaagcctttattaacaaagcctggctcaacagcgtggttgttactgacaaaatgcagtcggagaactacgtaccgggtcagcagggttttattctggatgcaaaggctaataaattcgagttctttggcgggacgacaacaaatggaacctctattacagcagatggtattaaggtgtatgacaacaaacgtctgactgttattgttggtgatatatcggggtattaa

SEQ ID NO: 279932 - DNA, 198 bp, Morganella morganii; identical to SEQ ID NO: 275340

SEQ ID NO: 279933 - DNA, 258 bp, Morganella morganii
gtggcggcatggggagcgatgcataccgggctggccatgacaggtgtatccatgatgctgggcggcattatccagatgctgtccccgcagccaaacgggatcgcaatgaaagaccagggcgaaaataaaccgtcctatgcgttcggcgcgccgacgaacactgtttcccagggctacccggtaccgatcggttacggtaagcgccgtatcggcggggccgttatctcagccggaatttacgtcgaagatcagcagtaa

SEQ ID NO: 279934 - DNA, 207 bp, Morganella morganii; identical to SEQ ID NO: 278980

SEQ ID NO: 279935 - DNA, 477 bp, Morganella morganii
atgaataaccgattatttaaaaaagtcatggccgcttgtgccgtcggggcgattgccggtgcactggtgctgatccccgcgtatgagggtgttaagtacaaaccttaccgtgatgtggccggggtgctcaccgtatgttacggccataccggtagtgatattcagcccggcaagctgtacacggacgctgaatgtaaggcgctactgcatgacgatctgacaaaagtccggcgtgcggttgacccgatgataaaagtgccgattgatgataacacccgtgcggccatctattccttcgtttacaacgtagggcctggtgcgttctcgcgctccactatgctgcgtaaactcaacgccggtgatatcgccggtgcgtgtgacgaaatgaagcgctggacattttccggtggtaagcggtggcagggtctgattaaccggcgcgagacggagaaagcgatatgtcacggaaccccataa

SEQ ID NO: 279936 - DNA, 141 bp, Morganella morganii
atgctgatcatcatcgcgatcattcttctgacggcctgcctgctggcgggctgttatctgtattcactcgatactcactgtaagccactgccgggtaacccgctggacggtgtgatccattatgagtgtgaagcgccatga

SEQ ID NO: 279937 - DNA, 150 bp, Morganella morganii
atgaaaaagacacgttataccgaagaacagatcgcatttgccctgaaacaggctgaaaccgtcccctgggtagaggacgtgtgcagaaagatgggtatttctgaagtcactttttacaattggaaaaaaaattcggtggtatgggtgtga

SEQ ID NO: 279938 - DNA, 711 bp, Morganella morganii
ttgttggaggcctaccatatcgagctgcggcgtggctgtcgtctgatgatgcagagccgcacggtctaccactatcaaagccggtgtgacaaccgcgcagtcacgcagctggtaagggaaatagcgaaaacccgcatccgctacggcgtgcaccgcatacatatcctgctgcgccgagaaggctggctgattaaccataagaaaacccaccgtatttattgtcaggaaggactgaatctgcggacaaagcggcctcggcgacatgtcacagccaggcacaggcaggagtgtgcggcagtgacggcagccgatcagtgctggagtatggatttcgttgctgataatctattcaacaggcgtcgggttcgggcgctgactgtagtcgataattttagccgggaatgtctggcgatagaggttggacagggcctgcggggtgacaatgtcgttgcggtaatggcacgtctgaagcagttacagcaccgtgttcccaaacagtttcagaccgacaacggcagcgaatttatctcaaaagcgctggataaatgggcatatgagaacggggtaacgatggacttctcccggcccggaaaaccgacggacaatgcgttaatcaaatcctttaatggtagcttccgtgacgagtgtctgaacgttcactggttcttgtcgctggaagatgcgcaggaaaagatcgagtgctggtggtag

SEQ ID NO: 279939 - DNA, 1761 bp, Morganella morganii
atggttcatagaagaaactatttgctacttaaacaagctaaaacaaaacctgagttagcttcgttattggacgtttcagcagcctttcttacaagaaccttgtacagacctggagaattatcgcacgtaaactctcactatcatcaattcgatattactaagaaatcaggtggtgtcagaaaaatcagtgctccgtcggatgaattgaaagagcttcagcgtagattgtcagatttactattggattgtaaagaggtaattcattttgacaataaagttgaatgtactctttctcatggctttgaacgagaaaaatcaatcattacaaatgcgcgaattcatcgtggtaaaaaaaatgtattaaatttagatttggcagatttttttggaagcttcaactttggcagggttcgtggatattttatttctaataaagactttaaattggacccccatatagcaacgactcttgctcaaatagcatgctataagaattctttgcctcaaggaagtccatgctccccggtaattgctaatctcataactaatagtttggatattaagttagcaaaattagctaaaagaaatggctgctcgtatacaagatatgctgatgacataactttttcgactagaaaagaaatctttcctaaagatattcttaaaaatgttgaaaatacaatattaggttcaaaattacttggcgaaataagacgttctgggttttctgtaaatcctactaaaactaggttgcaatttaaagactcgagacaggaagtaacaggtttagttgttaataaaaaagtaagcgttaaatcggaatattggcgcttaactagggctatggctcattctttattcaaaacaggaaagtttcaaattattgaacaagatggttcttacaggaatggccatttatctgagctagaaggccggttaacttttattgattctgtcgatttttataacaacctagaaaaaaagaaaaaaccagaaccaaaatatgaacctaaggtacatactgggattaataaatttcgagggagattaaattcaagagaaaaaatttatgggatgtttttgcaatacaagaatttctttgcaaatgaatatccaacaatattgactgaagggaaaacagataatgtttacttaaaaagtgctttaagtcagcttcaagctttgtaccctaatttagttaattctaaatcagctacaacagagtattcaccgaagttaaaattccctgatttaaatcgtaagacaatgtatttactcgatataggcgatggagcaacaccttttgttcgatttgttcaaagatatgttgatgatttaaaaaactttgaagataagaaagctaagaatccagtaattttaatactcgataatgatagtggccctaaagatttgttaaatcacttagtgaaaagtgttaagtcatgccctaatgatatactaatgctaaaaagcagcggctttattcatttgttccataatctgtatcttattttgactcctctcaattctggcggaaaagactctgctatggaagacctatttgattctacaactcttgcaacagtgattgatggaaaaacattttcaccagaaaagaatatagacataactaagcaatatggaaaacatattttttctacaaaagttgttcgttcaaacaaagcaaaaattaattttgataaatttaagtatctctttgatgaaatcgagaaggttaagctgcattttttaacattgtaa

SEQ ID NO: 279940 - DNA, 1089 bp, Morganella morganii
atgagaaacgaagtttcaagcatcaatgaagaactggatagaaaacttattgagattatcaactctgacgatgaattagatgttcaggcgaaagaagcgctcataaatggaataacagagtttggttggaagggagtagagctcatcccgataattggtggttttgttgagtcaatcagaggaattgtgggatttgctgcggcaagacacaaactaaaaaatcaaattaagttatttaagtatttttcaggaataaaaaagtatgatgaagatatgcacaaatatataaatgatgaaaatatcaccttcctaatagagaaactactgagagatgatgagagtgtcaaggtaaaacgatatattaaatttaccgtgaatagtacaaaaaataacatattaaaccaaaatagctatttgcgtatcttaagcgctttaactagtgatcaaatagaactgatgagggtttactatatagcaaaacactttgatttggaaggttttcgaaatgggtatgaaagagaaatgaacgttcaccataaggatgagttgttttcatataataaaggagttttagaatcctatggattaattgactcatcatcaacatttcaatcaaaaagtattgttagtgatcttctgactaaaatgtgccatttgatttttgatgaagaagagctttttccaaataaaattggccttaaagaaaagaatcaagtagatattgctatagatattgatcaaccattttcatatgtgtatgaagataaattattagaaggattaaaaggtaagctagttgcaataaagcttgatgagaataataaattaaattataggagtaagtactatgtatgcagtgaaattataacaactccacgcggagatgtctctaatattaagattaatcttcatcagggtattctatttgaaaatatagatttaatagataataatgcaaattacaatgataaagttattttatcagcagatatccctgctgtttacagaggtaatgaatttaatgagtcagatgtagataagcacattgatattttttgtgataagatacaatcaatactatttaaatag

SEQ ID NO: 279941 - DNA, 942 bp, Morganella morganii
atgtttaataaggataataataatcaatcatctggtgataattctttgaatgttttatctggtagagatactcatgtacatcaaatagctcccgaagttttgagaagcacaataatgggagtgttatgggagtcatttcctcgattacgtgatgaagcaataaacgaggcgaaaacccatgtgaatgaattcattaatgatgtttttgatagtttaattgattcaaaattaaataatttacaagatagcttaaaaaatcctgataaatttaccacaattacggaaacactataccatgttgcaaaaaaaacaaataaagcagataaggcaacattaaaaaaacttttaatagataagataaacaccactgatgaagaagatgaatcaaatttaataatagatagagccatagatatatcagcaagaataagcaaaacacacatagcttttcttgggttcattcatttcatacaaaggttatctgtaaatatagagagtaacacccaaagagaaacgatgaattttatacatgaggattatactgaaataaagagaagtaacgaggtttatatttgcaagaatgatttcgaggtaaagaaagtaaactttcatgaacaacaaaaacggctatataaagagtacttattaatggcattcgttaaagcttgtaatgatgggttagtgaaaaatgtaaaccagaattatctagcatcgatgggatgctttactcgaatgtataatggtgataattatgcaactgctataagtaaaaatatagggattgatataaattctgaacagggaaaacaagagtttaattttctccattatttaactaccgaatttggacttaaaaatatagatgatattgaatcaccgaatctaacaccagttggacataaaataggagaagcatttttatcgaattacttagaattataa

SEQ ID NO: 279942 - DNA, 261 bp, Morganella morganii
atggtgagaatattacgattactgattgtgtttgtggctatcgtgggaatttgttattcaatttatatatatagttcctcagataatactaacttatccgctatattagcaggagtatcaacattacttatggctatttctggttacatcgaatggaaaaacaagaataaaaataataacaagggtaaactgtatataaatcaaatttctggtgataatagtaaaaatatatattcaggtagagatacaaatattaagtaa

SEQ ID NO: 279943 - DNA, 2124 bp, Morganella morganii
atggatttctataataaaaatgattatgggttatatgctttggaaatattggcacagtaccataatatttctgttaatcctgaggaaatcagacacaaatttgatattgatggtaagggcctggatttaacatcatggctgcttgcagcgaaatcgcttgaactaaaagtaaaatcagtaaaaaaaacatcagacagattaggttttgtttatcttcctgctttaatttggcgggaagacggaaaacattttattctgactaagattaataatgaatctggtcgttatttgatttatgatttggaacaacgcaatcctcgcgttcttgaaagagatgagtttgaaaaattataccagggtaatgttattttaattacctccagagcatccgttattggtaagctagctaagtttgattttacctggtttattcctgctattattaaatacagaaaaatatttattgaaacattagttgtttctgtttttttacaattatttgccttaattacaccacttttttttcaggtggtaatggataaagtattagttcatagaggattttcaacattaaacattattactatagcattagctgttgttgtcttgtttgaaataatattgagtggattaagaacatatatttttgctcacagtacgagccgtatagatgttgagcttggtgcaaaacttttcaggcatttattagcattgcctatttcttattttgagaaccgtcgtgtcggggatactgttgcgcgagtcagagagttagaccaaatccgaaattttttaacaggacaagcattaacatctgttctggatttattattttcatttatattttttgctgtaatgtggcattacagtccgaaacttacgttagttattttattttcattaccttgttatgcggcatggtcgatttttatcagccctattttacgacgccgtttagatgaaaagttttcccgtaatgcagataatcaggcgtttttggttgaatctgtcacagctattaatacaattaaagctatggctgtttcccctcagatgactaatatatgggataaacaattagctggttatgtggctgccgggttcagggtcacggtattagcaactattggtcagcagggggttcagttaatacaaaaaacagtgatggttatcaatctttggttgggtgctcatctggttatttctggtgatttaagtattggccaattaattgcgtttaatatgttagctgggcaaattgtttctcctgttatcagattagctcaaatttggcaggattttcagcaggtaggtatttctgtgtcccggttgggggatgtgttaaactctcccactgaaagttatcagggcaaattagcattaccagaaattaagggtaatatcacatttcgtaatattcgttttcgttacaaacctgattcacctgttattttgaatgatattaatctggatattcaggaaggtgaagttatcggtattgttgggcggtcaggttcaggaaaaagcacattaactaaattaattcagcgtttttatatccctgaaaatggacaggtattaattgatggtcatgatcttgcattagctgatccaaattggttacggcgtcaggttggtgtggttttacaggacaatgtccttcttaaccgaagcattatagataatattgcactggctgatcccggtatgcctgtggaaagagttattcaggctgcaaaattatcaggcgcccatgattttatttctgaattacgtgaaggttataatacgattgttggggaacagggggctggtctgtcaggagggcagcgtcagcgtattgctattgccagggcattagtcaacaaccccaaaattttaatttttgatgaggccactagtgccctggattatgaatccgagcatgtaattatgcgcaatatgcacaaaatttgtcagagcagaacggttatcatcatagctcaccgcttatcaacagtaaaaaatgcagatcgcattattgtgatggaaaaaggacaaattattgagcaaggaaaacacaaggatctcctctgtaatcctgaaagcctttatcactatttatatcagttacaatcagattag

SEQ ID NO: 279944 - DNA, 1437 bp, Morganella morganii
atgaatacatggttaatggggattcgtgattttcttgcacgttataaattagtttggagtgaaacctggaatatcagacatcaattagatactcctgtacgtgaaaaagatgaaagtgaatttttaccggctcatttagagctgattgaaactccggtatctaagcgacctcgcctggtggcttattttattatggcatttctgagtattgctattattttatctatattaggtaaggttgagattgttgctacggctaatggtaaattaacattaagtggtcggagcaaggaaatcaaaccaattgaaaactcaatagtaaaaaaaataatggtaagtgaaggcgattttgtaaaaaaaggagatgtattactggagttaactgcgctgggggctgaggctgatacactgaaggctcagtcttcattactacaggcaaaattggagcagtttcgttatcagactttgtctcgcgccatagaatcaaatcaactggtagagattaaactgcctgatgatcaggatcttagaggagtttctgatgaagaaattttccgtctgacatcattaattaaagagcaattcttaacctggcaaaatcaaaagcatcagaaagaattaaatttaaataaaaaaatgtctgaaaaacaagcaatactcacaagaataaacagatataatagtttatctcatattgaaaaaagtcgtttagatgacttcagaagtttattgcaaaaacaagctgtttcaaaacatgctgtacttgagcaagaaaataaatatcttgaggcatttaatgaacttcgtgtttataaatctcaattggagcaaattgaaagtgatattttgttagcaaaagaagattatcaacttgttactcaatcattaaaaaacgaagttttggataagttgcggcaatcaacagataatattaggttattgacactggagttggataagaataaacaacgccagcaagcctctgttattactgctcctgttaccggaaaagttcagcaacttaaggttcatactgaaggtggtgttgtcacaaccgctgaaactctgatgattatcgtcccggaaaacgacatactggaagtgaccgcattagtacaaaataaagatattggttttattaatgttggtcaggaagttattattaaagtagaagcatttccttataccagatacgggtatttaattggtaaggtgaaagatattaatttggatgccattgaaaatcagcagttgggtctggtatttaacgttattatttcaattgagaaaaataaactttcaattggtaacaaaaatattcctttaagttcaggcatggctgtaatagcagaaataaaaacaggaatgcgcagtattattagttatcttcttagtcctttggaggaatctgtaacagaaagtctacgggaaagataa

SEQ ID NO: 279945 - DNA, 1050 bp, Morganella morganii
atggctgaaaaaaccgaaaaacccaccagtaagaaactaaaggacgaatcgaaaaaagggaatacgttcaaatataaagaactgctctccacaaccggctatgtgacgggaatagcgtatctgctttacgttgctgactggtcagcattctcccgtttttatcagacggtattgcgtaatgtgaatcacttgtcactctctgtttatatacagatgttatcggatatcttttttcagatggtgttaccgctgattatattatgcggagtgagtgtcagctttgtttctctgatgcagacccgttttgctgttgcgacggaagcgattaaatttgatttaaagaaaattgatcccatcgccggattcaaacggatttttaccaaaaaatccctgaaaaatctggtaaaagcactgatatcactcattgtgtatttatctgccggttatacctttattactctgtataccggcgatatttatcagttaattacggcacttttctctgaagtgagtgagagctttctctatttcaccggccgctatatctttatttttatcctgctgctgatgccactgctggtggttgattacatcgttgaatattttttcttttttaatgacatgaaaatggaaaagcatgaagttaaacaagagtataaaaacagcgaaggtaatcaggaaataaaatcagcccgcaaacagcagcacagagaattgctgaatgcggaaaccaaagcattgataaagaattcggatatcgtggtggttaacccgacgcatattgccgttgctatctatcttgatccggaaaacggcgttatgccgctcattaccgtgaaagagaaaggcgtgtatgcgctggctgtgcgctgctatgccgaaaagcacagggtgccggttgtccgggatatccgcctggcccggacgttattccggaaatatcatgtctttgacaccattattgatgatgatctggataagtttctcgatctcttactgtggctgaatgacgcagagcaggctgcacttgccgatagtgaaccgcactaa

SEQ ID NO: 279946 - DNA, 1488 bp, Morganella morganii
atgcgtttggaaaataggttgaaagtaaataaagaagttgatgatctcagttataattcctcattgcataatgattttatgaggcttgggataatatatgatgcgctcacggttacagagagaattccgtatgatgatgctgtgaaatatataagagaatactacgatatagtaaatgatagtaactttaaaaataacattaaaaataaagttgtaatgcatgaagagtgtgcagaattgattaataaaacgaggatgattgttgatagaattgaacaagaacagattaaatctatggcgggtagattttgggagcacttttatgaagataaagtaaaacaaatttatagcgaattagataggattaattatattctgtcggatcctgacactacaagagaacaagcattaaaagaacttgaagcatatgatatattaatgaaggataaagaaaatataaaggcaattaataatgctggtgataatatttcagagaaaataagattgataaataaaggtattcaggagtattttatcattagggatatggtcacatttggttactttgttgagagaatggataatgtcagtgtgtatgcttatgatatttcagttaaatatcagcgcgaaggtatgaacaaatatgttgattattataaaagcgtagcaacaaaattaaatacatttggtgattatattgatgagcccatcaatgatggaaagcagaataaggtatataaaagaaagttttatactgaattatacaacactatgaaaccttatttttattatggagattctgttggccatactttatatacaggtagtatgaagatagttaaggtcggtgacgataaatttaatgttctggttgatgataaagtaatagaagaaaatttatcatataaagatgcatatggaaaaatggaatatttcttttcttgtcatgagccggttattaaagggactaaattatgtaaaatatttaaacccgtactggatgaatttaataatgttattggcttagaagggaaggttgaacagtttctatttccttatgaactttatagttttatggacttagcgagcgatgaaaaaggacttaatcgtataaatgaaaattttgataaatgtttcaaggataaatcaccaaatttatcaaggtggaataatgttaatgaaaaatcaatagcggctaccagtgatgtaaaatataccagggaaattttgaaaaaaaactatgatgcaggattcattagttattatgaaaatgaagaagaaagaaatgaatattctaagttttatcaacatgaaataaatagtatgaatcaaaaaatagatggggctaagaaaggacttcaattaacgttggatgaatacactcagcggtataacactataaatagtaactatgacaatatgctgagaacaattacaacaatgattagcgaattggctcaggaattaaagggatttttaagattctga

SEQ ID NO: 279947 - DNA, 666 bp, Morganella morganii
atggttatattaactgctctgactggtggtttactggcaaaagcactggccgcagtgattgtggttgtcactattattagtgaaattgttaaggcggcgggtggcccggatattatggcaacaataatgacaccggtgacaaaattggtggaagttgtccagaagtttattaaagatatggctatgaaaattggccaaaaacttgggctgccaccggctgagttaaaaaaactggaagaaaaaatggaaattattgccatggtacttgcagttgttgttgtgatggcggtgtttgctgctgcaggtgctgttgccggaaaagttatcggtcaggtggtatcagaatcggtaaaggaaatattgagacaggtaatggtggaggttaaaagattattaatttcaatgatgctgacatctactgtcgttaacggtataaattcagtcactcaggcagaacttaataaagatgtaatgaaattaaacgctgatatagatttagatcaggaattgctggataagttgatggaattgatggaaaaaataatggcagctttttcagaatcacagcaggatttaaataaaatgaaagagcagttaggtaagataggaaaagacgattttcagcgtaagaaggctattatacagtcagggccattagctgtttaa

SEQ ID NO: 279948 - DNA, 1344 bp, Morganella morganii
atgaacgtcgttccttatgtcatgatccatgataatcagaataataatgcttcgcctccccctgtaccaccaaggtcagcgcagcatcaggggcggacattggcattacaggagccatcaggccggcctccggctgtgccgccgcgtcctgaacatacagagaatgttcagttgcgtcagaagaatacggcgcagagcagctccccggcgcgccatgcgatgtatgatgctccggcatcatccgcaaaaccgttaccacagcagcctgtgtttatgcagcctccatcccgtccggcaccggttccgccgtcacggatgcgtgaatttatgacacctccgtcatttcatgcaccatctgttgctgtgtcacaggagcgcggccggatgccgttaccgggggaaggtattcacccgtcactggcacaacgcagagcggcgcctcagttggctcctttcactccggatgcaaaaacggaaatgtcattttccctgttacaggcaaaatctgaacaacaatttgtccggagtaactatatcgataaaggtaatcctcaatactttggcaatttcaatgacagcaaagtagaacatcagcgttttggtgacattaatacctgcaaagcaactcagttgtttacagcaaaaggtattggtttacccgcaaatcaaatgaaagttgacggcgaaaaccttgcgatgcgcagtcagtatccggcggcagagaagcttggcagccatctgagtatgctcgcagagcaaaaaccggcagtactggtgatcctttcatcggatgcggatctcaaagcaagaaatcttcctgcatattttcgtgagactgaagggaagcattataacgatgctaaatatgacaaggatccccatagtacaaataagtatgatgatgtttttgttcaatgcaaaaagaatacactgttacctgtaaaaatggccggaaaccttagtgtacgaaactatcgtattgaaattacggtaaacggtaaaacaacaccgatatctgttatgcatgtcaataattgggaagatcggacaacggttgataccaaaacacttaaaacactggtagcggatattaatgcgaaaattgaccagaaaaccagagcagacagctcttatagtccgcagccatttattcattgcagtgcaggaatcggacgtaccggtgttgttgccgctgcaatggagttactgaaacccggcaataacaaaactccgctggatatagctttacaactgcggaaaacgggttgttcaaaaatggtacagacagaggctcagttcgatacactggtgcacctgtatgacaatataaaatccggacactaa

SEQ ID NO: 279949 - DNA, 2253 bp, Morganella morganii
gtgttcggggccgaccgcctgaaatacccgatgaaacgcaaaaactgggcgccgggcggcggggacaaaaccctgcgcggacgtgaccagtgggtgcgtatcagctgggatgaggcactggatattgtggcctccgaaaccaaacgcatcaccggacaatacggcaatgaatccctctgggttaccggcggtaacggtacggatttccagagtgtgttctccgccgccgggggctttaccggtgactggggcaccacctcctggggcgcatggtttgaaaccccggcccatctgggcctcctggaagggttctacaccttcggcaccaatgaccgttttgatatgcgcaactcacaactgattgtgatgtggggcgcaaacccggcgtggtccagcccgggcagcccgacttataactattatcaggcgaaaaaagccggggcacgttttatcagtattgacccgagttataccgccaccgcagagctgatggatgcggactggtatccgatcaacccgggtacagaccacgcgctggcgctggggattatgcatgcactgctggagatggacagcccggagaatccgctgatcgattgggaattcctgcgacgctgcactgtcggttttgatgagagcaatatgccggcaggggcggatccgaagaaaaactttaaggattatctgctcggcacctacaccggcaagccaaccaccccggaatgggcggcagacatctgcggtatttccgcatcggacatccgctcgctggcgcgtcagatcggcggcacacagcgtgtggcgctgttaaccggttgggcaccggcacgtattcataacggtgagggatgggttcaggcattctcaacactcgggtttatgaccgggcatatgggccgtccgggccgcatgaccggcgcgtgttgtcactatgccgccgggaacaatggtacccgtctggtgatggccggtgcgaatggcttaccggcagtgaaaaacccggtcactctgaaaatcaaccacaacgaactgaaccgtgccctgctggagaaaaaattccgtcagcgtggcgtgggggatgtggatgccaatattcagatgattttccacccgtttaacgccactttacagacccgtgccaacattatgcagggaatcgaggcttaccgcagcggcgtggaatttatcgcgaccgcagcgtatgtcccgcatacctgcgcgaaatattccgatgtgatcctaccggtgacaaccgaatgggagcgcgagggaaccattcttaacccgagtaaccgtgaagtcatcattgctgcggtgaatgtgactcagccgctgtatgaagcgaaaagcgaccagtggatcgccaaagagctgggtaaacgtctgggtgtcaatgtggatgagatcttcccgatctccgaaaaacagcagttcttcaataaactcaacggtgcaaccatcattactgaggatggtgtcaccaaagcgccgctgtttaccatcactcaggcggatattgatgagtggcaggtgaccggtacgccgcaggaagggcgcatcacgctgaatgaattcctgaccaaagggaagtatcaggtggagcgcacgccggatgataattacggctatatcgcgtatgaggactttatccgcgatccggcggcgaatccgcgtccgacgccaagcggtaagtttgaaatctactgcgaaaccctggtggagaaagcgaaagagtgcggctggacagaattaccgccgatcgccgaatacatcccgtcagcgagcggctatgaagccagctttaaagatttcagcaaaaaagagaaaggggattatccgttccaggtttataacccgcactatctgcgccgttcacacagtaccctggataacgtgccgtggctgcgcgaacagtggccgagcccgatctacattaatacctctgatgcgaaacgtctggatattaaacagggcgaaaccgttctggtgaccagcccgcagggtaaaattctgcgtccggcgctggtgacccagacgatgaaaccgggtgtggttgcactgccgcacggcagttggaccaatgtggatgaaaccaccgggattgatatggccggggcggataacaccctgaccattcaggtaccgaccggactgggtacctccgggtggaacacgatgctgtgtaacatcgaaaaatggcacggtgagcaattaactgacgatgcgcgtctgccgcagcggattatcggataa

SEQ ID NO: 279950 - DNA, 192 bp, Morganella morganii
atgacatccttgaccagtacgaaaaacatattcacttcctgcatctgctcggcaagaagtaagcctgtcactgtaaaaatgccgctctctgagcggcattttttattcttcgtcgttatcgcgctgcggcagtgcaaccaggtcatccagcagtgcatagagctggcgtaccttctccggcgtgaactgtaa

SEQ ID NO: 279951 - DNA, 2001 bp, Morganella morganii
atgagtcatcaggacactgaacaatccgcaaaaaaaatgaagattaacccgccggttttttatatttcggccctggttattcttctgattgtcggctttgccgccctgtttccccagacggcggacatacaccttaaagcccttcagaccagcctgtttaaaaatgccagctggttctatatcctcgccgtcgccctgattttactgagcgtcacctttatggggctgtcccgtttcggtgatattaaactcggccctgaccacgcccgtccggcatacagttatatttcctggttcgccatgctgttctccgcagggatggggatcgggctgatgttcttcggcgtcgccgaaccggtgatgcactatctttccccgcctgtcggcacaccggaaacggttgaagcggcaaaagaggccatgcgcctgaccttcttccactgggggttacacgcctgggctatttacgcggttgtggcgctgatccttgcgtttttcagctaccgccacggcctgccgctgacactgcgttccgcactctacccgattatcggtgaccgtatttacggcgcagccggtcacgcggtggatattttcgctgtggtcggtacggtattcggggtcgcgacctccctcggcttcggcgtgttacaggtgaatgccgggctgaatcatctgttcggcctgccgcagacagaaactgttcaggtggtgctgattgtggtgatcacctcactggccacgctgtcggttgtgtccggtctggataaaggcatccgttttctgtcagagctgaacctcggcctggcggttctgctgctgattatggtcggtgtattaggcccgaccgtgctgctgctgaaatcctttgttgagaacaccggcggctatctttctgaaatcgtcagtaatacctttaatctctttgcctatgagccgaagtcagacgactggctgggcggctggaccctgctttactggggctggtggctgtcgtggtcgccgtttgtcgggatgtttatcgcgcggatttcacgcgggcgcaccatccgtgaatttgtcttcggcgtgttgtttgtcccggcgggctttaccctgctgtggatgaccttcttcggtaataccgccattgatctgatcaaaaatcagggtgcaaccgccctcgccgcggtggtgaaagaggatgtgtcactggcactgttccagttcctcgagtatttcccgttctccacggtgctctctttctttgccatgctgatggtgattgtcttcttcgtcacttccgctgactccggcgcgatggtggtggataccctggcctccggcggggatacccacacgccggtctggcagcggatcttctgggccggactgatgggcgtggtggcgatcactctgctgctggccgggggattatccgccctgcagaccgtaactatcgccagcgccctgccgtttgcggttgtgctgctgttctcgatttacggactgatcaaagccctgcggattgatgtgcataaacgcgacagtcagcaactggcgaccattgcaccgaccgccagccgcaacccgatcccgtggcagcgccgtctgcgtaatatcggctatttcccgaaacgttcgctggtcaaacgctttattgatgaagtggtgtcagaggcgatggacatggtgtctcaggagctggaaaaacagagcacaccgagccatatcgaccgcagccgcgacgaccggatcacctttgaggtcgatctgggggatgatatgaactttatctatgaaacccggctgcgctattacaatcagccgtcctttgccctttccgggatgaccgacgaggaaaaagatgaggagcaccgctattaccgcgcggaaatccatctgaaagagggcggacaggattatgacattatgggctggaataaggagcagattattcatgacatccttgaccagtacgaaaaacatattcacttcctgcatctgctcggcaagaagtaa

SEQ ID NO: 279952 - DNA, 756 bp, Morganella morganii
atgaatccgataaaaagaaaggaatacatcctcgatctgctgaatcagcagggggaagtcagtgtgcaggatcttgctgatacactgaatgtcacctctgagacgatccgccgtgatctctccattctggagaaagaaggcgagatcatcaaaattcacggcggggcgatgaagaaaaagagtgtcagcgaaggcagctttgaacagcggctggaactgaaccgcgaggaaaaaatgaccctcgcgcgctacgctgccgggctgatttccgagcacgacacactgtatatcgattcctgttcgacaacgctgctgttttccgcgcagttaccggcgattgcatttaccgttttcaccaactccgcccttatcgcggataaaatcgcctcgcagaacccgctggcgaaagtgtatgtgctgggcggtgaatacagccatgaattccgggccaatctcggcgcgaaaaccctgcatgaaatcgatcatatttatgcggacttcgcctttgttggtgcaggcggtgtgcgcgatgaaggtattctggtcaaaagcgttgaagaaggcatgattgcgcggaaaatgctggaaaaaagtaagcagaaaattattctggccgactccagcaaattcggccagcaggggattttaaagatcgcggagattgccgttatcgataaaattatctgtgacgataaatggcagaaagcgcacgaattccgtgagaaatatccggaaaaagtcgttatcgtgccgtaa

SEQ ID NO: 279953 - DNA, 228 bp, Morganella morganii
atgacgcaaaaaacccctgccggatataccccgctaacctgtggcacccttcccgcttacctgtccgcacatttaccggatgacattttaccaggcggcacgccggaatcctggcagacagaggaagtcggtgacggtaatctcaatctggtgtttattgtcagaggcagtgagcggactctggtggtcagtcaagcaatcactgccgtatgtccgtgcggccggtga

SEQ ID NO: 279954 - DNA, 294 bp, Morganella morganii
atgaccggtaagatgatactccgtcccggagagccggtaagtcagctgcgcagtgatatcctgaaatattattctcaggagcctgaaactgtatttatcggttatagtaaaaacggacggacactgggggtgggctatccggatccggtggtttctgtttatatatcagacggtgtaaatgataagattgatgaagaggttatcagccggacgagcaatgtaaaacagatcgctttattatccgtggtgaccatgttttgcagtaccgcaaacagggtgatttcgcctatgtga

SEQ ID NO: 279955 - DNA, 627 bp, Morganella morganii
atgacaccaaataaccgaaaattacctgtttttaaatatcatcccgatcctctcgaaaccggtgctttttcagtcgataagacagttaagtgtgattgctgtcagcaacctactgatatttattatgaaagcccgttttattctgtcgctgatattgatgcattatgcccgtggtgtattgcggatggttccgccagccagaaatttgagggtgaattccaggatagcgccagcgtggaaggaattgactgtgaatatgatgacgatggtgaattttcacacaccactaacccgtatccggatgaaatgctggatgaactggttaaacgcacgcccggttaccggggatggcagcaggaagtgtggctggcacactgcaatgagccctgtgaatttatcgggtatgtttgctgggatgatataaaagaccggctggatgaatttgtttctctggaagatgatatcaggaatatggtttttctgttgaagagttatccggcctgttacataaggacagcgatgcacagggatatttattctgctgtctgcattgtaaaaaattacgcctgtattttgattttagttaaaggctgcagagcggagcaattcagctccgctttcaattaa

SEQ ID NO: 279956 - DNA, 1920 bp, Morganella morganii
gtgcggcaacattcggattcacgctgttgcagaaaaccacacaccctggaaaacctgcttgataaagcccgccatgatgagctgacgctgacgccggatatcattgatgtcttccttgataccaaagatgtgatgggctcgcagctggatgcctataagagcgacacactgccggatgaagaaagctttaaccgcatctgtgaagtactggggcatgtggagcagagtgtggcggacgccgctgttgtcacggaaaccgccgcgccggaaccggtcagtgaaaccgcagaaattactgccggctcagaagagagcagcacagtaccggaaaccggtttttcacatcatttcacgttcacgctcagtaagttaaaggagagcgaagtcgctctgctggccgatgagctgtcgctgttcggcacggtatacaaaactgaacagggtaccgataccctgaaagtctggctgggcaccaataccgcgattgatgacatcagcggcgtgctctgctttgtggtggatgattctcagattgcgtatgaggaaacaccggcagcggaattaaccgccatgctggccgcagacaataccccggcagaggcggaagaagaaaccgtcagcgcaccggttgctgtaccggcaccggcagcagcatcgtcatctgctccggcggcgcgcaaagcaccggctgcggcggcaaaaaataaaggtgacagcggcagcatccgtgtggcggtggaaaaggtggatcagctgatcaacctggtcggtgagctggtgattatccagtcaatgctgactcagcacagccagcaggtggatcaggccgaatatgcggaactgctcagttcgattgttcagctggaacgcaactcgcgggctctgcaggaatctgtcatgtctatccgcatgatgccgatggattatgtcttcagccgcttcccgcgcatggtgcgcgatatcgcctcaaaactgaataagaaaattgagctgaaagtggagggcagctccaccgaactcgataagagcctgatcgagcggattatcgatccgctgactcacctggtgcgcaacagccttgaccacggtattgagaaaccggatgtccgcgcggcaaacggcaaaccggaagccgggactctgaccctggcggcggaacatcagagcggcaatatctgcattgaagtgcgggatgacggtgccggtctgaaccgggagcggatcctggccaaggcccgtcagcagggcatggatgtgcacgacaacatgaccaacgatgaaatcgcgatgctgattatggcaccgggtttctccactgccgaagtgatcaccgatgtgtccggccgcggcgtgggtatggatgtggtgaaacggaacattcaggacatgggcggccgtattcagattggtttcaccgaagggcgcggcaccgtgacccgcatcctgctgccgctgactctggctatcctcgacggtatgtccgtcaaagtggccgatgatgtctttattgtgccgctcagcgccattatcagcacactccagccgcgtcaggaagacatttaccgccttgccggtgaggaaaaaatgctgctggtgcgcggcgaatatctgccgctggtggaaatgcatcaggtcttcggtatcgaagaagcggagcgtgatctggcgaaaagtatcgccctgattgttcagaacgccggtaaccgttacgccctgctggttgacagactgatcggacagcagcaggtggtggtgaaaaatgttgaaagtaattaccgcaaaattccggggatctctgccgccacgattatgggtgacggttctgtcgcactgattattgatgtggcggaactgcagcggatgaacaacgaaattttgtgcaaaaagaaaatgaacacgtcacacgtcgtgatgcaataa

SEQ ID NO: 279957 - DNA, 129 bp, Morganella morganii
atgtaccgagactattttgtgaccgcagactggctgcacacgcacctgaatgacgacaatcttgttgtgctcgatgtcagcaaagcgccgcccggtcagcccgcagattgccatcagttatggctttag

SEQ ID NO: 279958 - DNA, 507 bp, Morganella morganii
atgacagatcacgaaattaaactattaattagcttatgtcgtcaaattgataaatatggcattgacacttttattagcttagtaaaaaaactaaaagacacagatactttacaggatcttgaacttcttatacctatagcaaaaaaaagaatcgccatcactactaattcaaaattgaataataaaaaagcaattgaactaattgaaaatgcaaaaaaagaaggaaaaaaatacagtgataaattaataaatatttatgaaacactgaaaagcaacaattcaacatcaacaataagtgaaataaatcacttcttatccattcatgggaaaaaaaaaccgacactcaatggcaaagaaagattaataacttacttaataaatgaattactaaacaatgaagacttactgatagaagctagtcatttttttaaaaatgatgatagatcattatctgcatggagtgatattattatgaaaaacaagcttccttctgataaaggtagatag

SEQ ID NO: 279959 - DNA, 846 bp, Morganella morganii
atgactaaagttgtatcgttaataaatatgaaaggtggagtagggaaatcaactctttcagttaatttagcgtggcatttagctgcctattctaattggaaaaaaaaagtattagttattgacctagatcctcaattcaatgctagtcagtatctggtcggtgtaaataaatacaatactatgttagaagatgacaagccaactacttgggatatatttgaacagcacacaagaacaccaggaaataaatcttcaaaaaaaataaaagcagaggatataataagaaatgttgttcgatataagggagggggtcgaatagatttaattccttcaagattggaattatctctttctctaaaaagctcttcacaaaaacctcacttactaagcaagttaattaatgatgtaaaaaatgactatgatatcgttttaattgattgtgctccaacagaatcaatgctcacaacagctgcctatatctctagtaattacattcttataccagtaaaacctgaatatttatcaacaattggtttgcctcttctaaaaagctccattgaaagctttctagaggaatatagtgataataaattagaagtattaggtattgtttttaatggaacttcgggataccttccagaagaagataaatcgaaaaatgaagtaaaatctatggctttaaaaaataactggccaatatttgattctgaaataccatactctcgatcataccctaaaggagccagagaaggaaaacctatttttggaacatcctatgcaagaacttcgcaatgtgataacttccgagaattcgcaaacgagtttgggcgtagagtggggttataa

SEQ ID NO: 279960 - DNA, 720 bp, Morganella morganii
atgaacaataaagaacctgaatggtttatttcatcattgcgctggtcattttcagctattgctttgattttattatttttaggtgtttattcttttatatattactcaacaataagcttagatagcaaaatatcatcattctttagtttcatttcagcatttggaattgcagccactatagttgtttatttttggcaaaaaagagatgcaagcaaatcaaataaagagtcattaaaaaagatagcagaaagccactttgtaattttagaaaaatactctagcaagatagagagctctgttgatagcttaataaaaatgaatgaattaatatctcaaaaaataaacaaaaaaaactatagccaatacgttataacctaccgtattgatgacataatagagtttgaattatttgagttgtttggatacaataatttatcaatagatgcattcatgattaatagaattgatatcacacctctatcaataatatatgcgaactcaatatcaataggctccaaagaggcttcagcagcttggttcgtgtatgaaatcagcttgcttttaaattcaatggtagaccaattaataatagcaatagagcgtgataatagttgggaaaacgtatcatcaaagatatcaaaattaagtttgaataaatttaatgacaaggttaaggaaaatataaatgattttaaaagttacttagactcattacagtag

SEQ ID NO: 279961 - DNA, 261 bp, Morganella morganii
atgcagggatgcagggatgcaggggagaataatatgaaaactgaatatatctatatctgtgctcaggcgtactgcaatgaccagggtagtggcatcgaatattacaccgactatgagcgctttgataatcgaaatgacgccattaaaaacggctggaagcaacgggaatcagatgattttaatatcggtgtcctggttaacggtcgccttgtttcagtcgattggatggctaaaccaattgataccaatccagaaacatga

SEQ ID NO: 279962 - DNA, 402 bp, Morganella morganii
atggcaattaacgtgattacgatcagcggcaatctcggaaaggattgtgagcaacgatggactccggcagggaaagccgttgcatcgttcagtttgccggttaaacagggatatggcgagcacgaaaagacaacgtgggttatctgcaaaatgttcggcgcaaaagccgaaaaattaccggaacacctgaaaaaaggaataaaggtgacgattactggcgagttcgtcatggaggaatggacaggtcaggatggcaataaacgatcagcgccagtgattatcgtgagccagttggatttcggcggcaatcagacaggaagccagaagccgcagcaacggacacagcagccaccggtacagaatgatccgccaatggattttgacgacgacattccgttttaa

SEQ ID NO: 279963 - DNA, 669 bp, Morganella morganii
atgctgcacagcgggtcacgcggtgtcggtaatgccatcggcaacctgtttatctcgctggcacaaaaagatatgcagacgcacattgccaatctgccggatcgcgatctggcgtatttcgaagagggaagcgtgcattttaacgattatatggaagcggtcggctgggcgcaggattttgcccgtcataaccgcgaagtgatgatgcaccgcgtgctggaagccctgtcccgtgaaatcaccaaaccgttcaccacacaacaggaagccgtaaactgccaccataactatgtgcagaaagaacagcattttggtgaggaagttctggtaacacgaaaaggggcggtatcggcacaaaaagggcagatggggatcatcccgggctctatgggcgcgaaaagctacattgtgcgcggacgcggaaacgaagaaagcttctgctcatgcagccatggtgcaggtcgtgtgatgagccgtaccgaagcgaaaaaacgcttctcagtggcagaccagcagcgcgctactgctcatgtggagtgccgtaaagacagcgatgtgatcgacgagatcccgatggcgtacaaagatatcgatgcggtgatgaccgcacagtcatcactggtggaaattgtgcatacactgcgtcaggtggtgtgtgtgaaggggtaa

SEQ ID NO: 279964 - DNA, 1557 bp, Morganella morganii
atgacaagcacccaacaacgcgccgcattgcaacgccaaatctggcagattgccaacgatgtacgtggtgcagtagatggctgggattttaaacagtacgttttaggcgctctgttttaccgattcatcagcgagaattttgccagttacattgaaggcggcgatgacagtgtcaagtatgcaacactcccccggagtgtgatcacccctgaaatcaaagatgacgccattaaaaccaaaggctatttcatttacccagacgatttgtttgttaacgtcgctgcaggtgctagtactaacgaaaaattaaataccgatttggctgacatcttctcggctattgaaatgtcagccagcggatacccttcagagaacgatatcaagggtttgtttgctgattttgacactaccagcaacaggctcggcaatacggtaaaagacagaaatacacgtctggcggcggtgctcaaaagggtggcggaattagattttggcgattttgagggtagtcatatcgatctattcggggatgcttacgagtttcttatctccaactatgccgccaacgctggcaaatctggcggtgagttttttaccccgcaacacgtgtccaaacttattgcacaattggctatgcacaagcaaaccagcgtcaacaagatttatgacccagcgtgtggttctggctcgctgctgctgcaagccaaaaaacactttgacgcccacattattgaagacggtttttgggggcaggaacttaaccacaccacttacaacctggcgcggatgaacatgttcttgcacaacatcaactacgataagttcaatatccagctcggtgatacgctgcgtaatcctcattttggcgatgacaaaccgttcgatgccatcgtctccaacccgccttactctgtgaagtggataggctcagacgatcctaccctgatcaatgatgaccgttttgcaccggcaggggtgttagcgccaaaatccaaagccgacttcgcttttgtgctgcatgcactcagttacctttccagcaaaggccgtgccgccattgtttgctttcccggcattttttaccgggggggggccgagcagaaaattcggcaatatctggtagataacaactacgtcgaaaccgtgattgcactcgcgcctaacctgttttttggcacaaccatcgccgtcaatattctagtgctgtccaaacacaaaaccgacatgaccacccagtttattgatgccagcgggttgtttaagaaggaaagcaataataatacgctcactgaaatgcatattgagcaaattatgcaatcatttgatagtaaaacaaatgttgatcattttgctaaatcggtgagctttgaagatattaaggccaatgattacaatttgtcggtaagtagttatatcgaagccaaagacaaccgcgaagtagtcgatatcactacactcaatgccgagctgaaaatcattgctgctaaaatcgaccaactgcggacggagattgatacgattgtgggggaaattgaaggtaaggagccgcaagcatga

SEQ ID NO: 279965 - DNA, 1290 bp, Morganella morganii
atgagcaaaatgggctttatggaaaagctgctggatggtgttgagattgcctggaaaccgttgggggaattggctgaaatatatggcggtcttaacggaaaaagtaaatctgattttgaggacggcaatgcaaagtttgttacatataaaaatatatttgccaatatagatgttgactttaattctctcgaatccgtcaaggtgtctgatgctgaaaaccagcataaggttaaatacggtgatgttttatttacaggttcctctgaaaccgctgaggaagcaggtatgtcttcgtctgtcactatacagcctgaagagccagtttatctgaacagtttttcatttggagtcagattcaatgaaaatgctatgctgactcctgaattttctaaatatttattccgcagccgtttcatgcgttctgaaattgcgaaaactgcaagtggtgtaactcgattcaatatttcaaaagaacgttttaggaaaattctagtcccgatcttctgcccggaaaaccctcaaaaatcgctcgaaatccagagagaaatcgtccgtattctggacacttttacctctcttacagccgagcttacagccgagcttacagcccgtaaaaaacaatataattactatcgcgagcaattgctccgttttgaagagggagaggtggagtggaagacactgggggaagtaactaagaaatggtactcgggtggcactcctacagctggaacacctgaatattacgagaatggggagataccatggctaagaacccaagaggttaaattttctgacattgaagaaacagaagttaagataactccttctgcactgaaaaattcagcagccaagtggattcccgaaaattgtgtaataatcgcgatttccggagcaacagcgggcaggtctgcggtaaataaaatacccttaacaaccaatcagcactgcggttgcttggaaatagatagcacaaaggcgctatatcgctatgtattccattgggttagctttaactatgaaaatattaaggcgcttggacagggtgctagaggtgaccttaactctagcatcataagaaatttcaagctccccattccacatgctgattctcctgaaaaatcgcttgccgaacaagcccgcatcgttgccatcctggataaattcgatgctcttaccagttccatcagtgaaggtttgccacgtgaaatcacattacgccaaaagcaatatgagtattatcgcgatttgctgttgagctttcccaagtctgaagaggtagttgcctga

SEQ ID NO: 279966 - DNA, 1191 bp, Morganella morganii
atgagtaagacgctagcagaaatagcccagcagcttaaagacgccaataaaaagatacagttgatctatgcttttaatggcacggggaaaacacgcctgtcgcgcgaatttaagcagcttgttgtccccaggaatgagggcgatggagtcgaacagtctgagctatcacgaaataagttcctgtattacaacgcgtttactgaagacttattctattgggacaacgacctggaacaggatgccgagccccggctaaaaatccagcccaattcgtttaccgactgggtgctgaaagatcaagggcaagatcgaaatatcatcaccaattttcagcgctacgccaatgaaaagctaacaccaaaatttaatgaagaatataaagtcaaaggcaaggacgacaaagagatcactgtaagggctttctcagaagtgactttttcccttgaacgcggtgacgatgaacattccggaaatctgaaaatctccaagggcgaggaaagcaatttcatctggagtattttttatacgctgatcgagcaggtgatagacattatcaatgttgctgaaccctccgagcgtgaaaccaacgcgtttgaccaattggaatatatctttattgatgacccggtaagttcgctggatgagaaccatttgattgaattggccgtagatttggcccaacttatcaagtcaaacaattctgatgtcaaattcattatcaccactcacaatccgcttttttataacgttctgcataatgaactcaacagtgatgacggtggttacaagaaaagatggcttgataagtatcggatgactaggcttgacgacggcacatttcagttagaccagcaacccaatgactcaccgttctcatatcatctttatttgaaatcagaactcgaaaaagccatcgagagtggtcaactgagcaagtatcactttaattttttaagaaacattctggaaaaaacctccacatttcttggctataagaaatggggcgatcttttgccaaaaactgatgacggaaaaaccaatccgtatgaggctcggattattaatatctccagccactcgaaacatgcgggcgaagaagtggccgaactcactgaagacgacaagcgtgttttgcggtatctggttaatgaaattaatacgatgtatcgctttcagcaggctgaaaaataa

SEQ ID NO: 279967 - DNA, 3099 bp, Morganella morganii
atgtacgaatacaaggctgttgccgaatcaaatagctttatcgttctcgataaatacgccagggaatggcagcttaatgaaagttaccagagcgaaagtgacctggaacgggagttcattcaggatttgcgtaatcagggttacgagtatgagtctggtttaaatacgcctgggaagctgctggccaacgtgcgcgagcagttgcaaaccttgaacaacatgcagtttgctgatgctgagtggatacggtttgtggagacctggctggacaagccgagcgacagcatcgtcgataaaacccgcaaaattcacaacgactatatccatgattttgtgtttgatgatggtcatatccagaatatctacttggtagacaaaaaaaatattgcccgcaataaggttcaggtcatcaagcagtttgagcaacagggcagtcatgccaatcgttatgatgtcactattctggtgaatggcttgccgctggtacaggtggaactgaaaaagcgcggcgtggcgatccgcgaagcttttaatcaggtgcaccgctacagtaaagagagttttaacagcgaacattccttgttcaagtatttgcagttgtttgtgatttccaacggcaccgatagccgttattttgccaataccacccaacgcaacaaacacagtttcgacttcaccatgaactgggcgaaagctgataatagcttgctgaaagacctcaaggactttactgcaacttttttccagaaggacaccctgctcaatgtgctgctgcattattcggtatttgatgtgagcgatgcactactggtgatgcgcccttatcagattgccgctactgagcgtatcttatggaagatcaacagcgcctatcaggccaaaaactggagcaatacggaaagcggcggttatatctggcacaccacaggttctggtaaaaccttgaccagcttcaaggcagcgcgcttagccactgagctggagttcatcgataaagttttcttcgtggtggatcgtaaagacctggattaccagacaatgaaggaataccagcgtttttcgccagatagtgtgaatggatctgacagtaccgctggactcaagcgtaatctggataaagatgacaataaaatcatcgtcaccactatccagaagctcaataacctgatgaagagcgaaaacgacctgcccatttacaacaaacaggtagtgtttatctttgatgaatgccaccgtagtcagtttggtgaagcccagaagaacttaaagaaaaagtttaagaagttctatcagtttggctttaccggcacaccgatttttccgcaaaacgctcagggggccgataccacggctagtgtattcggtcgggagctgcactcttatgtgataaccgatgcgattcgagatgaaaaggtgcttaagttcaaagtggactacaacgatgtgcgcccgcattttaaagcctttgaaagcgaacaggacgagaaaaagctcagcgagacgaaatacagggaagccttattgcatcccatccgtataaaagaaatttcgcagtacatcctgaataattttcggcaaaaaacgcatcgcctgcatgcaggagcaaaagggtttaatgcgatgtttgccgtgagtagcgtggatgccgccaagctgtattacgaatcgctcaaggatttgcaaaaagacagtgataagccgctaaaaatcgccaccattttctcttttgtggccaatgaggaacaggatgccgtaggcgatattctggatgaaggttttgatgtatctgcaatgaacagcagtgccaaagagtttttaagtgccgccatagctgactacaacgcgctgttcaaaaccaacttcagcgtggaaggcaatggttttcaaaactattatcgcgatctggccaagcaagttaaggctaaggagatcgacttgctgattgtggtcggtatgttcctgactgggtttgatgcgccgacgttaaacaccttgtttgtagataaaaacctacgctatcacggtttgatgcaggcctattcacgcaccaaccgtattttcgacgcaaccaaaaccttcggtaatatagttacctttcgtgatctggagcaagcgacaattgacgccatcaccttatttggcgataaaaacaccaagaacgtggtgcttgagaaaagctacaaggagtatatggaaggctttaccgacgtagtaaccggtgaggcaaggcgtggctttgtggacgtggtaagagaattagaacaacgctttcctgatccttctgtcattgagaaagagtccgacaaaaaagcctttgtgaaactctttggcgagtatttacgcgttgagaacgtgctgcaaaactacgacgagtttaccagcttgaaagccttgcagaacattaacatcaatgaccctgaagcggttgaggagttcaagaccctgcattatttaagtgatgaggatctggcgacgttacaaacgatagaaatgccgtctgaacggaaaatacaggactaccgttcaacttataacgatgttcgtgactggctgcgtcgggaaaaatcttccgctgaaaaagaaaaatcgactattgattgggatgacgttgtctttgaggtagatttactaaagtcgcaagaaattaatctagattatattctcgagctgatttttgaacacaaccgtaagaataaaagtaaagcaggattaattgatgaagttcgtcggttaatacgtaccagccttgggagtcgagcgaaagaaagtttagtcgttgatttcattaatcaaaccgaccttgatgaaattagtgacaaggccagtattatagacgccttttttgcttttgcacaggtagagcaacagcgcgaagcacaagagttaattggagccgagaatctgaatgaagaggcagctaaacgttatattaccacttctcttaaacgagagtttgccagcgacaatggcacagagcttaatgctgttttgccaaaaatgagcccactaaatccccaatacctcacaaaaaagcaaagcgttttccaaaaaattgcagcgtttgttgaaaaatttaagggagtgggtggaaaaatatag

SEQ ID NO: 279968 - DNA, 297 bp, Morganella morganii
atgaagctcagaacaacaattaaaatatttacagcttctgtggttgcagttattcagataaataccgcatttgctgaagaagccgttaactttaatacatcatttttagactcagacagtcaggaaattgatttttcaaaattcagccgggctaattatgttatgccgggtacttatcttctggcaactaaactcaataataatgttattaccagtgatgagaatatccttttttatatcccggaatatgatcctgaaataacagtcccctgtattacccctgaattatttgcataa

SEQ ID NO: 279969 - DNA, 3396 bp, Morganella morganii
gtgacagatgctccggtgctgaacatccctgaagtggcagatggttatgcaaatgctgatgagctgaaagacggtttgcaggccgaagtcaccttgccggcaggcaccgtggaaggcgcagaaattacattaactataactcgtccggataaatccactgaaacagttacacacactgttacgaaagatgaagtaacggcgggtaaagtgtcaatggatattccgaaagatgcagtacaaaacggccaaaacagtgttgatgtcagcttaactcaaggtaataacccagccaaaccagggaataaagtggagtttgccgttgacggacaaattccgggcgataccgacggtgacggagtggtggatacaacaccagtagtcactattccggaagcggcggatggtgtgaatgctgatgagttaaaagacggcgtacaaactgaagtgaccgtaccgggtggtagtgcagcaggtgacactttgacactgactgtcacaaaaccggacggttcaactgaaaccgtggaacacaccttaaccgcggatgaagtggctgcgggcaaagcagatgtgactattccagcggataaagcaactccggatggtaactattcagttactgcggaaatcaccgatcctgcgggcaacaccagcggaaaaggtcagccaactgactttactgttgatacgcaaattccgggggatacagacggtgacggcactgtagatacaacaccagtagtgactattccagaagcggcaaacggtgtgaatgctgatgagttaaaagacggcgtacaaactgaagtgaccgtaccgggtggtagtgcagcaggtgacacactgacactaactattaccaaacctgatggcactactgacaccgttgaacacacactgacagcggatgaagtaacagccggtaaagcggatgtcactatcccagcggataaagcaactccggatggtaattattctgttaaagcagaaatcactgatcctgcaggtaacaccagtggtcaaggtcaagcaaccgactttactgtcgatacggttgcaccatcggcaccagtattaaatgcggaagataacggttctgtttccgttgaactgcctggagatgccaataaaggtgatactgttgaaattacgtttgaagatgaaaacggtgataaacagactgtaacaatggagaaaggggataatggctggacatccagtgatcctaatctgatccctgacactaatggcaacaccaccacaattccgtctgacaatgtgaaagacaatagtgaagtcaccggcgttgccaaagatccgagcggtaatgaaagtgatccggcaacagcaacatcaaaaacagatgtgttaccgacagtgagcatcagtgttgagacaacatcaacggatgataaaggcgataaagttggtgcggatgcctctgtttccggcgaggtaatggaagttccggcaactattgaggacaatgatgatacgaccggattagtgtataccgtagcgctggattacgttgcatcacaggatgtgaccgtgacaatcaccttaacaaatggtgcgggttatgcgagtgcgccggactattcaacactcgccggctctcagcacgacggaaaaataaccttacatggtgacaccggtaaagtgacatatgacggggcatcaacagtaacggttgttattcctgccggctcgaagagtgtgtcatttatggttgatccaacaatggaagctaaccagaatgcatttaatgcagaaggtatggagaaagtggttgcaaccattacgggaacgtctgataacgcaatggcggtaacggatactgtaaataatgcgggcgcttcagcaaccggtgttatttatgatggtaacccgatttcattgcgtaatttggacggtgatttaacactgaaatattcattatcctcatcagaagctgcaggtggtgatttcggttataccatcggtgttaacagcggcaagcaagacccaatggtaaccaccaactataacgatactgtttatgtcggttattatcaggatggtaaggaaacatcatcatacagtaacgtggccagctctttggataatggtgcggacggggctaaaacagatggcagtgcgagtatcactacggttgacttaggcgcgggtgatgacctgatggttatccgcggtaatatgttaaccaatactcgggtctatgccggtgagggtaacgatacctttactatggatggcatgaatacagcaatgcgtgttatgtattcaggcagttatctctttatggaatccggtgatgacactgttaccattaaacaaacaggaaacttggctaatgccggtcagatctatctgggctcaggtagtgacacctacattcagggagatgcggcgactgaaaataataccgaattgtctggtttattagacttgggcagcggtactaaagacaaatcaaatctgccgaaagagtatctttctgtttatcaggacggcagtaatttaagcttgggtaatgacaacaatattgacacagccacagatgttaataccgtcactatttacggctctgtatccggtgaaattttaggcggatacggtagtgataatattacggtaactaaaaatctgaccggtaatatttctgtcggtgacaatgcggataccttaacggccggatggatttatggtggcaatactgtttctatgggggacggcaatgatactgttaccgtcactgatggtgcatataacacgactatttcactgggggcgggagatgatgtatttgatgccacttctggcgtaatgggggattctgcttatgccactgtcgttaatggtgaagacggcaatgatacctttaaattaggcacaattgccaaaaatctgaccattgatgccggtgccggtgatgatattgttgttctgacaaaagactatgactccacctcctccggtaatcagggttatattaacggcggggaaggcagtgataccctggttctgacaggtacaatttctgtcaatctggcggccggtaaaaatgaaggtattgccggcttcgagaaagtggatatgactgttggcagcgatctgaaagctgacaatgcagctcagttggtcaagttgacagtatcggatgtattggggatgaatgagaattctacgctttatatttccggtgatgccaatgacaaagttgatttgggggctgatggtgcaggaagtctgggaacattcactgcaacggccacaacggttaaagcaactgcgttagatggcactgagcatacttatacactttacagcagtgctggcggagccaatgtctatattgataataatattatcgataacggaggtgtcctttaa

SEQ ID NO: 279970 - DNA, 1251 bp, Morganella morganii
gtgttttctataaataaactcataataataattattatttttggaggcgtattttttaattcacatgcacattcgttgaaatatatattaaataactcattaaataatacgccggaattattggaagcaaaggctgagatagatgtcgctgttgcccgtgttaatcaagcacatgctcagcatttccctgtattcagtgtgaccggaaataaattattagggcaatatcatcgcgataaccgcgattatgatgataataattttattcccgggctcaggggggaattaaatctctattcttttggggggatagaaagcgatgttgagcgcaacgaaaaagaacagctatattatcagtttaaatataatgaaaccaaagaaaatgtagcttacaccatatcagacctctatttaaaagcgttattagctaaagagtctattgcggtaaagaaaaaaagtttagacagacataacagaattatatctgaattaaatgtgatagcccgtaatgatgaagggcgtgtttctgaatatgttcaggcagaagcaagaaaaatattagtggagcaggatattaattattatgaaaaagaattaatgacaacgttaagtacgttatcaaaatataccggatttccggtcggcgaaagtgatcttgttaatccttttgagggtatgacggtcagtgatatgtaccgggaatataccgcagaaaataataatcaaaatccggcctatcttgtcagtcaggcggatatagaggctaaaaaaatgggtgtggaagttgaaaacaagaaacagcttccgagaataaacctgaccggaaatataactaaagatgatcgccagataggcattgatgtgacatgggatattattaatttctcatcaatgtattctgttgatgaaaaagtcagtcagttgaatgcagctcagcagagaatggatcgcgtcatcagagatattgaagaagcaagacgcttatctgtaattaatattcaaaaaagtactcaaaaattaaagatattagatgcacaaattttatcatcggcaaaagtcgtcgatttttatcaattgcaatttaatgttgctcgccgttctttgttagatgttctgaatgcagaaaaagagctatctgatgttgaattatcttatgccaccacattgagcgatcttaggtatggaatgcttgattatttatatgcgcaaggaacactttctcactgggcacttaattcactcgcacattaa

SEQ ID NO: 279971 - DNA, 2166 bp, Morganella morganii
atgaaattgatcatagaaggtctttctctcacaactcagttattaggcacacatttatccgtggctacactgactgcgcatacaatccgtaccgcaaagatgggaatcgatttttcatcactgatagagtatctgaaaagtgaagggtttgaaaatacattatcacaacgtgttctggatgatattccgtctctggcaatgccggtattattgttattaaagaatgaagaaagtgctgttttaactgagatttcatttgatggggctgggctgcgtaaatataaaattcagcaggtagatggtttatctttatggttgacacaggctgaattaagtgaaaagtatttaggttattgctggtttatcaaaccccgtgttacagctgatgtacgctcggaactgcccgagtatacaatgcctaaagcctggttttttaaagtgatatggcgttttaagaaatattattatcaaattattattgccactttcattattaattttctggcacttgtcagttcattatatgtcatgaatgtttatgacagagtaataccgaataagtcttatcaaacactctgggttttaagtatcggggtaattattgcgatattatttgaatttacagcaaaaatgatacggggccgattaactgatattgcgggtaaaaaggcagacttaattatcagttctgctttgttcagaaaggttaccaatcttaagttacaggaaagacctgtatcatccggatcctatgttaataatttacgggattttgagtctgtacgcgattttatgacgagtgcgagtttattaacattagtggatatgcctttcttaattttatttgtctctgttattgcgcttgtcggaggcagcctggcttttgttccgctgatgataattcctctggttattattatcggtcttttagctcagctcccgttagcaaaatatattaatgaatcgatgaaggaatcatctcaaagacaaggattagcggtagagtccattgagggaatagaaacattaaaaacgaataatgccatgagctgggcacaaaaacgctgggattattacacggcaaaaacagctgcttcatcaatgaaagttaaaaatatcagtaattttgttatatattttgctgttacgatgcagcagttaaacacgatatttttagttattatcggtacctatctgattcatagtgatgatcccgccaataaaattacaatgggggcgttaatcgcaacggttattttatcaggtcgggcgttatcaccattaggacaaattgcaggcctggctgtacgttttcaacaggcctgggtcgccttaaaaggtgtaaatgatattgttgagcgaccttcagagcgggaaccggacaggaaatatattacgttaaaacaaattaacggaaatataaaattccataatgtctcatttgcttatagtcaggataccagcagtgtagttaaaaatttatcatttgaaattaaaccgggtgaaaaagtcggcatactcgggcgtattggcagtggtaaatctacgaccttaaaattagctgccggactatatccggcggcgcagggaagtatcacactggatgatatcgatatccgtcagatagatcctcattatctgcgtaatcaggttttattattagaacaaaatccaaggctgtttttaggaagcttaagagagaatcttgatttagcccgtatggatggcttttcgaatgatcaggatttaatcatggctttaaagcggtttggactggataaagtaatcagaaagcatccgagaggattagatatgtctctgggggagaatggcttgggtctttccggcgggcagaaacaaattgtggctctggccagaatgacaatgagagatccccggattgtcttactggatgagccaacaacagggcttgatcaatattctgaagttcaggcattaaatgcaatagcagcatggtgtcgcaccagaacattactggttgttactcaccggcctcaggtactgagtatcgtcaaccggataattgttgttgataacggtaaagttgtgatggatggctccagagatgcagttttacaacagttggccaaaaatgaaaaagaaaaacaaatagctgttcactcaaaagccaaaacagataagtaa

SEQ ID NO: 279972 - DNA, 1260 bp, Morganella morganii
atgaatgaattaaatagaaaacacgtgataccctcgggtcaccctgaagaagctttttctgagaaggacttggcacttctaaatgacctgcatgcagcacttcagaacgaaaaacatcataaaagctttatgatgatcacaatgttgctgatctttttggttattttggttatttgggcatggaacagcagtcttgaggaagttacccgcgggcagggtagcattattcccagcagccgggaacagattatccagacactggatgccggcatattaaaaagtatggaggttaaggaaggggatattgttgaaaaaggacaggtattgctgactctggatgatacccgttcgtcggccattttgagggaaagtgaagcgaaagttgataatcttgaagccatccgggcaagactgaaagcggaggcttattctgcgggactgacctttccggagggattagcggctgatttagtggcgcgggaaacaacggtatacaatatacgtaaagaagcgctggaatcagggataaataatttacaaaaaagcaaagctttattagacagagagatagcaataacaagacctattgttgcacagggggctatgtctgctgtggaattattacgaatggagcgtcagtcagctgatattcagtcacaaataaatgaaaagaaaaataaatatctgactgaagccagtgctgagttagtgaaaaccgaagctgaattagctcaggccagggaaaatatggctgggcgtgctgaccctgtcgagcgggcattaatacgggcgccattaagggggattgtcaaaaacatacgtattaataccgtcggtggggtgatttcagctggtcaggatattatggaaattgttcctctggaagaccagttattagttgaggcatatatcagcccgagagatgtcgcttatgttcgaaccggaatgcctgcattagtcaaactgaccgcatatgattatgcgatttatggtggactggacggtgttgttactttggtcagccctgatacattacatgatcaaaagagacccagtgatttaaagcttaatcaggatgaggctttttatcgtgtattggtcaccactcagagcagccatcttactgacaaaaacggaaaggaattgcctgttattccggggatgattgctggtgtggatattaagaccggtgagaaaacagtattccaatatttgattaagccaattaccagaatgaaacaggcgatgcaggaacgttaa

SEQ ID NO: 279973 - DNA, 582 bp, Morganella morganii
atgacgaaatcgataatcatgttaattatttccggcggacttatggtgactgtacctgcgtctgcgaatactcagactttttctgtggggtacgcccagagtaaagtgcaggattttaagcatatccgcgggataaatgctcagtatcgttatgaatggaacagttctccgttgagtgtgatcggttcattcacttatatgaaaggggacgactcgaacagttattatgatgaggagggggattattataaaaatcacgcagatgtgaaatattactcgttacttgccgggccggcataccgggtaaatgactattttagtttttatggattaattggtgttgcccatacgaaagcggacggtggttatgaatggctgaacagtgtgggtagtcatgaactggatggtcatgagagtggcaacctgtcaggaaaatcaactaactttgcttttgcggctggtgttcagattaacccaacagctaatttatctgttaatgtgggctatgaaggcagcaacgctgatatttatggaaagcataaaattgatggtttcaatgtcgggtttggttatcgattttaa

SEQ ID NO: 279974 - DNA, 270 bp, Morganella morganii
atgaagaagacacgttataccgaagaacaactcgtgtttatcctgaaacaagctgaaaccgctatcctcgaggaaaaagtggcgtcagaaatatgggcatttcggacgccactttttacatctatggactacctccatttcgcaagtactgaatacactgctgctttacttcagttaaaatcgataaccaaacccgacattgaaaccatcaattttatgctttccataaatatcagcgttgctgccttcatagcccacattaacagataa

SEQ ID NO: 279975 - DNA, 528 bp, Morganella morganii
  misc_feature (471)..(480): n is a, c, g, or t
atgcatggtgatttaattgatagtgtccttgattgggttgaggataatataaatatgcctatctctcagactgatgttgttaaaaaatcagggtatagtcaaagatactttcaggatatctttttagaaaaaacaaaattaagtattgctaagtatattctggcaagaaaactgtccttatcctccgtattacttcgcttaacaaatctgtctgtttttgaaatatcaactatttattcatttaattctcagcaaagtttttcgcgagcatttaaacggtatttcagggttacgccgaatttattcagaaaacgtgagttttgggatttcagatattattttcctcagcaccggtttttgaattttaaagatatagagcacaagcctgtttctttatgttctgtatattatacagacgatgaatttagtaaaattaagtcatttgatatcactattccttttgagtttaannnnnnnnnngacttgcatttaaaaataaaaatcaaattaatcatattaaaacactaa

SEQ ID NO: 279976 - DNA, 480 bp, Morganella morganii
atgaaaaataaatcgctgaaagaagtcgtaaaaaaaatgtgctgcgccatgccgggtgggcgggaagcgctggccggggcgctggggatgtcactgacgacattcaacaacaacctgtacgagaaaaatggttgtcgctttttcgacaatgacgaactggaagcaatggaagacctgaccaaaacccgtcacctggtcgaataccacatggaccggcacgacattacaccgatggaagcaatcgagcctgagaatatcgatgaagtggaattattcaaaatacagacaaacctcagtgcgcatcaggggcagctttccgagttaatcaaaaagagcctggaagatgacgttctgacggaagaagagatgacggctatctacaaaaagatgaacaaagtgttcgcatacgcccgtgggtttattgcgtcactgaatgtggtttacggggtcggaaatgattcaggtaaccagaaagggtga

SEQ ID NO: 279977 - DNA, 291 bp, Morganella morganii
atgaacagagagcgttatcaaatcagacacaacatccatcgaactaccgccgatcttgattacattctggagtgttttggcgattacctgtctgaaattcatgactatccgccagatgtttatggctttgatgctgtgtatctgtatctttgcaacaagcaccactggccgattgctcagagccgtgcaatggacaaagaggacatccggttagttcttgcaaaagagatgaaaggctggacacttccgaaagaagctcgtcatcctggtcaagtcccaactgatgattaa

SEQ ID NO: 279978 - DNA, 213 bp, Morganella morganii
atgcaaaccgaaccaatcatcaccactaacaacatgtcggtagtcgatgtagcgcagtggatcaccgaaaaagcccaggcttttcacaaactgccatcactccgtaccgagcgtgaaagagcaatccgcgatcatgaacgtgctctggaccgctttgatgaagacattgccaagtgggaagtccgctgtgctttaacagtacaactgcagtaa

SEQ ID NO: 279979 - DNA, 2577 bp, Morganella morganii
atgtcggttgaaagtgttgttgactgggctaacaagttaaagaaaaacctttggtggcgcctagccattaaattagcagctgaaaaaggcgaactagaacgagatgattttgaacttatttttacggttgctaaaagtgaacatggactcgaacctcagtcagagtcttatgcagattacgttgcgcctttaaatctcactggttttggtgaagagaaaaatgcagtaaacctaaaaagtattagcaaagtaggtcatatttctgctcttgtctctgactcgtcgcttgagtttgcaactgatgggttaacagcagtttatggtgacaatggctcaggtaagtcaagttatgcaaagatccttaaaaatgcctgccttactcgtggagataccccgcaaattctacccaacatttacgaagaagagcagggtgaacctacagcagacattgctatcactattgggcaagaacaatatgatattgcttggggattatcaactgcagcccaggaagacttaaagtctatccgaatcttcgataatacctccgccgctcactatatctctggtgaagatactattgaatacaaaccagttggcatgaaattgttatcacagctaatacgagcctgtgagtttgtgcgaaccagcaatgacaacgagaaaaaaccgtatacaacagctaaccttttgccagcattcaaatctgaaagcaaagtttttgcttttatctcaactctttcagacaagactaaagctgaagatgttaatgcattttgtctaagcaaggaacaagaagaatcgattccgaattactacgcggagttagccaagcttaaaaccagtactcctgaacagattcgaaaagtctacagcgaccgttgcaaaagcttgcagccactactagaacacctagtaaagctaaaaaacaaattagaccaagagtgtttcaatataattaagggctcatttgatggttataaggctaaacttgcagcggcagagcttgctcgttctcaggcattagatggacatgagctttcgggtatttgctcaccggaatggatcgcaatgtggaatcacgtaaagtcgtttgtacagactcataatatgggacttgctttcccaccggctgaaggagccccatgccctacttgtctccaatcaatatcaggtgacgcgtcaaaaaaactaaagttattcaatgactatcttcaaaatcaaactcaagttgaagcaaccaaagcgaaagaagtatttgattcatttattagtaaccttaagttgctgagattcgatctcaaaccttatgaatttgctttaggtatgatccgggaacataatccagaatatgcagaaaagattgttgacctgaacacaaaccttgaagctctacgtgataatataatcaaaattgaaccggattttactccgttcaaaattgagtttaatgcggtggattggatcagtggtcaaattggatcttggaagaaaaaagaagcagaggtagcaactaatgaaggattagtgaaacagattaccgctctaacacttttaatccaagaacttgaagataagaaactatttacgtcagcaaaacagaatatccttgcagagataaaacgctaccaaatactttccctacataacaatctatctagttcttgtcagtccacactgattactactctaacaaactcaatagctaggagtggggcgattggtcatttgcagaaagcatttacagacgaacttaaaaaatttggttttgaaaacttagatatctgcaccgaaactcgtggtttacgtggaaaacagatgtttaagctttacctcactggtaagacaaatagcatcatggaaatagcaagtgaaggtgaacaaaaatgtgtcgctctagctagtttcttagcggaattaactgtagatgatagaaaatcagcgattatttttgatgaccctatcaactcacttgaccataaatggcgccgaaaatttgcaaagcgcatagtagaagaatcgctagctcggcaagtaattgtgtttactcatgacatgccgttccttaagatgctggaagaatctagtgatgaggctaattcaacattaaatattatctcaatcgcaaagtatggaaatgttgcaggattcccattaccagaaccaccttgggatgccaaaaatacattatcgagaatcggttttctgaaaaactcattaccggatcttaaaaagatggaaatatctggtgaccctagatatgaatttaatgccaagcatacttataatatgatgcgtgaaacatgggagaggcttgtcgaagaatggttattaaggaaagtggtagagcgtttcgctcgtgaagttaagactcaaagtcttaaagtcatcatagacgatataactgttgaagataacgacatcattaatgcagcgatgtctaagtgtagtacttttatgtatggacatgataatgcaactgggttagctgttgattgtccctgttataatgaaattgagcaggatgtgactagactagatgagtactttaaggcacttaagaagcgccgtacctaa

SEQ ID NO: 279980 - DNA, 252 bp, Morganella morganii
atgatatcaggtgaatatgagataaattatgagcctgtggacggaaattcagctgagtttaatgatattgttttctttaatgtcgatacaaagagaaaccatgaactctttgactatgtcaaacggtcaggtttctcaaagaagtttgatcagtaccggaagagagaacgatgggttaaggataatacaaaaattgatattatcatcaatgaagcggagcaaaccacatcgtttctggtagaaaaaaattag

SEQ ID NO: 279981 - DNA, 738 bp, Morganella morganii
atggaagatattattttcttgattgcggttgtctctttcctggcttttgttattggcatgatcaaaccacaggccgttaaaatgcccggcagaggcaaggctgctttggtttatcttggcgcgtttctggtttttgccgtcattggctcgcagttatctcccgataaaaaagaagaaaaacaggcgcagcaaaacgaaacagcagcagtaaccaataagcccgaaatccctgcattcaaatacccgcgtatgacactgaaagaataccgcaatgaggctcaggcgacccggcaggatattgttaaaaactacctggcaagtgtgccgttcgatggttctcacttcgatattttttatagctgcctcagtcaaatgagttacacgaaaaatacagatctgacattggccgaggttctcggctggtgtaaagctgactttgaccgttctgtcagcgcactgaacgaccgtgttaacctagataacttcgtatctaaattttcttcttttgacggttcttaccggccattagaaaaacagattaaaaatgatatgaatgatagccgcagctattcccacgaatcgacaacctaccgaatggatctcagcgcaaaaccgccggttgccacagtcataacaacctttaccgggaagaatcaatataacgccaccgtaaaacagagagccgtggcaaaagttgatatcatcacaggggatattatttctttcgactacgaataa

SEQ ID NO: 279982 - DNA, 774 bp, Morganella morganii
atgtttacatgtcaatataaaagaaatggattgagaatacttgaagttcattatagtaacaatatatctaaattacatgatcaaattaagtcagagcaaaaatttgatatattaaaatgctatcaggtagatgcgaatcttaaaaatttatctgagttcaatacattgcatatagatttgaatcaggatgtcgatagtatagttaaaagtttcgccaaaaacacaagaaatgaaattaataaatgctatagagatgatggggtgaatttctgtattaatgataatgtaacagatgaagatatttcagagtttattacattgttccgtgattttgataaatttaaaggcctcaatacgaatatagatgaattacgagcaagtttaattagaaataagaataacgtcgctttctgtaaggccttgaaagataatgtgattgtggtttttaatgtttattattttgatgaaaacagagcaagattaaaatgctctgtatctattcgtggtgaggataaccaggaaaggaatttaattggtcgttgtaaccgtacttcatacctggaggctattaaatattttaaaaataagaattgtacagttttcgacttaggtggtgtatcattgactgatgataaagataagaaaaatattgactcatttaaatcaaagtttggtggtgttcctgtcatcgaatacgaaggtaattgtcctgtaagcttaaaaggatatttgtttatgatgatatataatttaaagaagaaaataacatcgtag

SEQ ID NO: 279983 - DNA, 411 bp, Morganella morganii
atgacagagcattccattgttcatcaaccgcgctcacacagccggattgttcaggaaatcgtagagaagataaagccggtcgttgttcttaaagtggatccggagccgccagcaagttttatgcggatcccgaagttaaagcgctgggagtgtcagaaatacctgcagtgggtcaaaagccagccgtgttgtgtgtgcggccagcagtcggacgacccgcatcacatcatcggtcacggcaccggcggcacaggtacaaaagcacacgacatttttactatcccgctgtgccgggttcaccacgacgagttacaccgggatccggcggcatgggaagcaaagcacggcagccagctggagttgttatttaagtttatgaaccggtcatacgggatcggcgtttttggttaa

SEQ ID NO: 279984 - DNA, 441 bp, Morganella morganii
atgagagatattcagattgcattagaccgttggggcggatgggcttcatcagacaactgcggggtagactattcacacatagcagcaggatttaaagggcttattaccagtgacagatcagaacgacagtcatgcagtgatcacgatggccgcgttatcgaccaggcaattacgaagttaaaagctgtcagaaaagatgaagagctcgatctgatagttgctcattacatgtacggggtatcaaaacgggcaatagcccgtaaatggaaattgagcgaagggcgtatcaggcagatgcttcaggttgccgaggggtttgttgatggttatctgtatgccaccggtgcagttcttgatatggatttagagatagaaaaagctggggtaataaatcgcagtaaaaaagtattagtgcgctacgcaaattcggtgctactgtga

SEQ ID NO: 279985 - DNA, 477 bp, Morganella morganii
atgaataacggtctggttaaaaaagcaatggctgctgtcagcggtggtgcgattgctgttgcgatggtgctgatacctgcatttgaggggatgaagttcaggccttatcaggatgtcgccggagtatggacagtgtgtgcagggcatacagggccggatattcagcgggataagatttacacgcaggcagaatgtgatgcgctgctggaaaaagacctggctattgttgcgaaaggggtagaccggcttatccgtgttgatattcctgtctataccagaggggcactctactcatttgtatataacacaggtgtgggcgcattctcccggtcaactttgctcaaaaaactgaatgcaggtgacagaaccggagcctgtggcgaaatgaaacgctgggttttcgccggcggcaagccgtggaaaggactgatgacccgccgggagatcgaggaggtcgtatgccacggaaccctttaa

SEQ ID NO: 279986 - DNA, 378 bp, Morganella morganii
atgaactggaaagaggcggtaattgccgcgctgtttatttttgccgcctggtgggtatatgacacctaccgggataaccagcaactgaaggtgaataacacaacgttgtccggacagctgtcagcacagcagacgataaatactatcacgctttcagccgttgccatcagacaccgcgccgcactcgacaacattaaagccaaagaaacggagggcacggagaatgtcaaagttaaaaccgttatcagaacggagtttaaagacagtgagtgcgctgttactcctgtttcccctggcgttgttgggaagttgcagcaatacgaaagagacattcgtgcccgcgccggtggtgccgatcccgccacagctgaccgttga

SEQ ID NO: 279987 - DNA, 336 bp, Morganella morganii
atgaaagaatcaatacagccaagaagtagtggtgaattatggacttggtttggtttgtcatatgcatcattccttgtcttaccgcgagtattgatgcatgaaatgcctattgagtggcaggacaaaatggctgctttactgcatgagtacgatgaaacattcgatacatcatccgtttgtcattcagtcacagtgagcgcaaaagacaaaaacaaccggtttgttaagttacctgagtacatcctgaattatcggcgcccggataaaggtgcgttaaatagtctgcggattaatccggcaatacgggagattgaagcggagaggataaaaaaatag

SEQ ID NO: 279988 - DNA, 3267 bp, Morganella morganii
atggcgaagcttcgtgagcttattattaaaatatcggctaattcatcctcgtttcagtctgaaatagcccgcgcctcacggatgggggagaattattaccggacgctggagcagggcggccgcaaagcagcatcggcatcacgcgaaacgaaacgggcaatcagtgagctgaataatgagctgtcatcaataaaatcgacagtaaccggcgtaatgggggctatggccggtgcttttgccacgcagcagcttatcagttatgccgatacctggagccagttaagcggtcgcctgaaactggcctctgtgtctgcggaggatttcagccgtgctcagcaggaacttatgtcactgagccagcgtaccggcacgtcactggcggcaaataccaacctgtatgcccgtattgcgcagtcaatgcgtgatgcgggttatgcctcgggggatgtggcaaaagtcactgaaacgattgccacctcactgattttatccggtgccagtgcggcggaagccagttccgttaccactcagctgagtcaggcactggcctctggtgtgttgcgcggagaagaattcaactccgtcatggaaaacggcggacgactggccagactgctggcagccggaatgggtaccaccatcggcggtctgcgtgatatggcgcagagcgggcagctgaccacggataaaatcgtcccgatcctgacaaatacggagcaactcagaaaagaatttgagcagttaccgcagaccgtcagtatggcttcgcaaaaggtagaaaacgcctttatggcgtgggtgggcggggctaatgaggcatctggtgcaaccagcacactgaccggggcactgaatggtattgcaggaaacatagacaccatcgccactgttgcaggggcactggtcggggttggccttgcacggtatttcggcgggctgaccaccagtgtgaccaaagcaaccatcggggtggctggtgccgcaaaaggcgaggttgctcttgcgcaggctcagttgcgcggaacacaaattgctgttgccagagcgcgtgcggcagaataccgggcacaaaaatccctggctgctgcacgcggaaccgatgcgcaggcaggcgcagaaaagcggctggccgctgtacaggcctccgttgcacgcaatataaacgcccgcaatatcgcacaaaataacctgaataacgtcacatctgtcggttcacgtcttcttggtggtgcgctggggctggtcggtggtattccggggctggtgatgctgggtgccggtgcctggtacaccatgtaccagaagcaggagcaggcaagacagtccgcacttgaatacgccgccaccattgaccaggttcgtgccaatcttaataaaatgacgctgccggaaaccgctgataactccggtaaaaccaaggaatcactggctgcacagaataaactggttgatgaacagcgtcagaaagtcgagggattaaaatcagcgatagcaggatatcagcagatgctggcctcacccggccccagcatcaacggctatctgattaaccatctgatcagtcaggaagatgcggttaaatccctggcggcagcgcaggatgagctttcggttgaacagagcagactgaatgagctgagcaaaaaatcggaagatattcagtcagcactgaaggcggtcgaaagtcagcgtgattttcttattcgtcagcagtctgctgcccagaataatatgcgccattcattactgatggtgaatgcggagcatagcgaatttaaccggataatgtctgccggaaatcagatcctgaccaaccgtctggctctggttaacagcccgatgcgtatcccggcagcgcctctcagcgaaaaacagcaggatttcattcagaaatcagagcgggacaaagaactgtccgcactgacaggggaagcccgtgttatccggcaggctgagtttgccgcagatgatatcggtctgctgaataaacccgaatttgccgataaccggcagaaatacattgataatcaggtggtagcctaccggaatcaggaaaagctgagtaaggaactgaaagcgggtaaaagcgcccagagtgctttcaataaagagcagaaagaagcggaacgccaggcggagcagtatgcccgtaaaatggcggatctgagtgtggctacggaggttcagaaagtcagggcctcgcagggagagaaggccgcagagctgtatgcggctgcgcatgaggccggtaccaaatggacggatgagcagcgaaaagcgatccgcgcatcctctgttgccctggcggagtggacacaaaaggccgacgaggcggtcagaaagcagcgtgaaatggatgatgcgctgaaagcgatgcgtgacggtgcccgtaaattcagtgatgaagcggaacaaatcgataaaacccgtgggatgggcggaaaccggcgcagtttgtatgaagagcgtcagcagattgatcgtgtttatgccaaatctgatcagggaaaaagtgcgaccgaagcctataaccgcgagattgacgcgctcaacctgaaatatcagaaaataaaggaagttcagtctgactggaccagcggggttacccgggggatggaagactgggttgctgaggccggagattatgcggagcaaaccgcatcagcagtgcagagcgccatgggcggtatggtgaataacatcactgacatgctgaacggaaataaagccagctggcgcgactggtcaatagatgtccttaaatccatccagaaaatactggttaacgcggccattgtgaacagcattaaatcaatggctggtgctggcgggtggattggtcagattggaggatttctaagtggtggcattacagcgaatgccaaaggtggggtttatgattctcctggactgagtacatatagtaaccaagtcgtcagcagcccgacactgtttgcttttgctaagggaggtgcgccgagcgctggactgatgggcgaagctggaccggaagccattatgccccttaaacgcgggccggacgggaatctcggtgtacgggtatatggtggtgatggcggcggcactggtggtttttccgtcagtataggagatattcattttgaaaaaacaaatggtggtgatggttcatcatctgatgccgccgggataaagcagcaattaaagactgctgttatcgagactatcagtgatcaggctcagagaccaggcaccccgctctggaatgcaataaacggtaggagataa

SEQ ID NO: 279989 - DNA, 336 bp, Morganella morganii
atgatagacacattcacctggtatccccgtgtaaaccccacggaggatatcacctataaaacccgcaaggctaaattcggtgatggttatgagcaggtgttcggtgacggtatcaacgcacgcagccaaaagtggtcactggaatttaccggtcgcggtgagtatatcgcggacatccgtcagtttatcgaccgtcacggcggtataagggcttttcagtggagtccgccgcttgagcctgtcggtttgtaccggtgcgacgagcataaactcaccccgctcggcggcggcaactattcactttctctcacttttacccaggcatttaaaccatga

SEQ ID NO: 279990 - DNA, 1056 bp, Morganella morganii
ttgagtcgatacggtatatatgttcagcccgagacgggttcaaagcctttttacctggatgatgagcagtgtcagccactggcaaaactggggcagtttaaattttatttcccctatgaatccgcaaaattaaacagagtggagccggaaggtgtctgggaatacatccgtgaccgcaaggcatggcgtgctgtggttcccggtatgtccgactacaattgctttattgtggtgaaaaagggggctcacgccgccggaacttacggcctgaccggagttattcagttatggacagccaaactatggctggaagaaccatacatatatgtttatgcagaatgcggtgattactctgcctggggggatgatccttacggtaaattttttgtgtacgatgtatatggtaccccaaaaccgaaatccgctgcgggtaaatatggcattcagctccggggtatgaatggcgttacaacgctgactgatttctctaagctgggttactgcgtgtgggccggtacggtttacagcgacgggaaaaaaggaagcggtgctacaattcccggatacgacatcagcaacgaaagtcgctacacaatctatgtcaggccaaaatctcaggcatgcacgatgctgaggcgtggtaattcaatatggacagatgttcccgcatatctgaatgtattgttattcgaccataaccccgatttatctgtgttgccaaaatacgggattcaaatctgtaaccagaatggaaagacaacctataccagcaaatattgcccgctgatgggagggcagctgttatctgcaatgtccggctattctcaatataagaatccttattttaatcttggtaactatggcacgttcgtctcttccatcaagaataaatactacgacctggcagcacttggcctgtatgtcagcggtaattattacgatgtccggtttctggcaacagtggactccggctggatgggggatatgtggacaaataacggtaatgtgcaggggatttacaatactcactgtatcgacggcgatttatatttataa

SEQ ID NO: 279991 - DNA, 318 bp, Morganella morganii
atgagtttgagaggctatatgacagctgatgagattttaggacaggaaatccggtcgctgagaaagggattgtccatgactggacgtgaattagcgaaaaattttggtatcagtcaacaacatctttcacgaatagaaagaggagaggttcagtggagtatttctttcctaattaaggtatgttctttttttgatattcccatgatttattttattaaattgatagaaaaagaaacatcttgtttttctttcgataaacaatacgtttatgaaagtaatgaggttacaacagtatccaatcatacagataggaggtaa

SEQ ID NO: 279992 - DNA, 777 bp, Morganella morganii
atgaattacaacactgataccaatacaatattaacatttaaaaatatcaatttttcacattatgttttactgttaataaaaggaggaaaaaacacatcaatcaaaaaacaaaatgaaaactaccccttattaactgatagtcttgtctttataaaaaaaaatacaaccatagacatttcatactcaaaaaatcacaaaccagaatatctgcttttatcttatgaaatacttttggaaatattaaaattaagtataataaacaaaatgtgtaaacaagaggccactgtgaatactttcataaaaaaagcggataaggaagacgcgctatttttcatgaaattaaaatcagcatttaatggaaaagaaataacgctcaaaaatactaatgcaagccaactacttaaaatatcctacttgctattaggatttgatatgccacaatgcatttttaaggttgaattattttctgataaggtaaaaaaaataatcaatactcaattaaattacccatggacattaaaagacattagcaataaattatttatgagccaatcatctctacggaaaaaacttgagtcagaaaaaacaaacttcatgacgctactaaccgacatgaggatgacgcatgcaatgcatcttttagcaacaacagaattacccataggcaaaatatcagagttaactggttataagagcacatcttattttataaaaaaattcaaagagtattataaaaaaccaccaaaaagattaaaaataactaaaaaacagggataa

SEQ ID NO: 279993 - DNA, 453 bp, Morganella morganii
atgaaaaagacacgttataccgaagaacagatagcgtttgccctgaaacagactgaaaccggtacccgggtagaggaagtgtacagaaagatgggtatttctgaatccactttttacaattggaagaaaaaattcggtggtatgggtatgacggaacttcgccgcctgagacagctcgaggaagaaaaccagcgtctgaagcgcctggtggcagatctgagtctggacaaagagatgctgcaggaggtcatcaaaaaaaaagttctgagaccggtgcagaagcgggaggcggtaacctggtcactggaggcctaccgtatagggctgcggcgtggttgccgtctgatgatgcagaaccgcacggtctaccactatcaaagccggcgtgacgaccgcgcagtcacgcagcggataagggaaatagcggaaacccgcatccgctacggcgtgtag

SEQ ID NO: 279994 - DNA, 1020 bp, Morganella morganii
atgaatgacaatataacctgtgaaatactggcgctttcacaaatttacaataacggcacagagattaccgatgacacaacagatcgtgagttatttcggctgatagcgtcacataccactgcattaattaaaagaaagagtcagcctttaccctttagtgcgtactattttggtgataaattacaaataaaggccactaaaaccggtcggttgttttatgaattaatacaaaacattctttctctttcccgtgttaccggcaaccggcgtaaattacatccggttattccgctgattgtttctcttgctgagaaatatcatattcgttatgttccgatgctgtcggaatactacccttactcagaagacgatattaaacagctaaatgaagcctattgtgaatttcttcagtcagtggacagtaaagagtataaaactgctgtcagcacctttaagaacagtgcccgcaagaattaccggttctgttgccgctatattgaaaacctgtttgagcgccatgcaaagctgctggtggtacggacagacctgtcttacggaaagcgggtcagccacaaagttacagccggggatttaacccgtcaccggattgccctgtacaaagcaatacagtggttacccctgtttaaacactgcgtcggttatatcctgaagctggaatacggtcgtgagaaaggctttcactaccactgcctgtttttcttcaacggccagcatgtcagacaagatatcacggtagccaggcttatcggtgagttttggcaggaaatcatcaccgagggacaggggatctactttaactgcaaccgctataaatcagattaccgtatctgcggtattggcatgctgcaccgcagtgagagccgccgccgggaaggcctgatgactgccgtgaactatatctgcaaaacagaccagtgggtgaaactgcaggtgccggggatcgaccggacattctggcggggaaccatcagaaacaaacggtgtaaaacacgccggtaa

SEQ ID NO: 279995 - DNA, 156 bp, Morganella morganii
atgaagtgtttttatcatttaatttacatagttatcctgaaaatactgggtcaggaagtattttttacaggaaaaaatgatgctcacgattacttatctttttcccgtgactatttctgtgaggagactaactttcagatatcttgttcattgtga

SEQ ID NO: 279996 - DNA, 837 bp, Morganella morganii
atgacccgtttagcttcccgcttcggcagggcgaatatcattcgtcgtgaccacccgttaaccaccgaagaattatactgcactgtacccagtgtcttttcagcagaaaaacatgaatcccgcagtgaccgttatacctatattcccaccattaccctgcttgagagcctgcagaaagaaggcttttatccgttctttgcctgtcagacccgtgtccgcgatgacagccgccgggagcacaccaaacatatgctgcgtcttcgccgccataaccagattaccggtgtccaggtaccggaaattatcctgttaaacagccacgacggcaccagcagttatcagatgctgccggggttattccgtgcggtttgtcataacgggctggtctgcggtgatacctttggtgaggtcagagtgccgcacaaaggtaatgtcgtcgataaagtgattgaaggggcttatgaagtgctggaaacgtttgatgcggtggctgaaaaacgcgaacagatgcagtcgctgttgttaccaccaccggcacagcaggcgctggcgcatgccgctatcacgttccggttcggggatgaccaccagccggtcacggaagaacaggtgctgcaaccccgtcggtgggaagataagaaagatgatctgtggacggtttaccagcgtttgcaggagaacctgattaaaggcggactgtccggacgtacagccaaggggaaacgatcacacacccgggccgtgaccggtattgatagtgatatccgtctgaataaagcgctgtgggtgatgacagagaaaatgtatgaacacttcactgatcgtcagcaaatctga

SEQ ID NO: 279997 - DNA, 624 bp, Morganella morganii
atgccgggaatgggttttagtggtgcatttaccggcgatatcaatgtgaaatatatcaaagggatttctatttcatcaggtgccggaagctctgacaccggccagatttatgttgacccttatgctgttgtgaccgcgcgttatttaaataataacggcagtatacgtgagaaccgcatagtgggtattccggtcggcgcaaccatagaatggcagtcaacagccgccatccctgaaaactttttagtgaatgatggtcgttcatttagtgcatccatttatccggcacttgccaaagtcttcccggggctgaaactccctgatgatcgaggtctgtttaaacgggcactggacagcggaaaaggttatgactccgggcgaacgctgggcagcgtccagagcgacgctatgcggaacctgaccggacgctttggtaatccgacgattgagggcggagatttttctgagggagtcttccggcattccgtcaattccggcggtcgcgctgccggatcaggcggaaactctatagcgtactcctttgatgcatcccgccaggtaagcacagcaaatgaattcagaccggtaaacaaagcggttatttatattacaagggttatttga

SEQ ID NO: 279998 - DNA, 630 bp, Morganella morganii
atggcagattacaacactgaaattcagtacgcagtatttgatgaaaacgggctggccacggttccgggatgggcagaggtgtactgctgccacccgctgacacgggaatataccggcaaaagcatggatgaggtaccgctgggattcagtctgaaagctgatgcctatccggataaaccggaattacccgcaccgggatttgccattgtccgcagtgaggacggtaaacgctggctgcatgtggaagaccatcgcggtaaaaccgcttatgacaaaaccacaaaagaaaaagtcctgataaacaccgtcggtgcactgccggataacctgacattacttgagccgcaaacgccttttgataagtgggacggggaaaaatgggtgacagataaagcagaacagcacacgcatgagatcgctgttgccgaaagtcagaaacagtcgctgttggcagaagctgaacaggaaatttctatgctggagcgcaaggtgcgccttaacatggctactgatgaagacaaggtgaaactgagtgagtgggaaatttatagcgtgaatattaccgataccgacacatacgccggtatcagtacagaatggcctacatcaccggcttcaccggccagataa

SEQ ID NO: 279999 - DNA, 354 bp, Morganella morganii
atgagatattacaaaacaaaaaataatgaaatttatgcacttgaagatagtgactctgcaaaagagtggataaaagaaaaagtgactgaaatcaccaaagaggaagctgataacatcacaaatccgcgaccaacgaaagagcaattgatcgcaaaagcggaatacgataaacaagcgctgattacggaggttcaggctgaaactcagttactgcaaacaaaattagctctcgggcgtatcacccctgatgaaaaggcgcagttaaacgcctggatggattacctggatgaactggaggcagtggacgtatccaccgcctcggatattatctggccggtgaagccggtgatgtag

SEQ ID NO: 280000 - DNA, 684 bp, Morganella morganii
atgaccgccattgttttccctcatgtttactgtaatgacgggattattacggatttatccggttatggctgcattcccggaaaccttggtttaacggaattgctggataagaagttcgataagaccggcgggaagatcacaggacagacggatattgaggcgccgggcggtcgcacccagacactgaaagcaaaagctggtacatcggtataccaggagttgtaccttcaggatatcttcgctgcatggtgggggattaccgctggtaacaagttaagcctggaaaacaggattacaagaaatacgctaactatcggatctgatggtttcaaaattgacggtaaagatattgcaactaccgatcagcttttcggtgccagtcagacctacagaaacctgacaaccagtcgtcaaaataaagtctggtacaccaacaccgacagtaagcctcgtatcgttcatatcgaaacgaacagaacgggcactcagtatcctttcagtattgatattcaggtcattcatgacggaatacagcatcgtgcggattatcgctggacaactgctgatgaagttatttgcctgactgctttaataccacctggagcgcgattcagtgttaacggtgggtgggcgcagcctaccgagtggggggtcatcagtaattggttggagttttcactatga

SEQ ID NO: 280001 - DNA, 462 bp, Morganella morganii
atgagcggtaaaaccgccgtcaggccggggctgaaacgggcattaaaggccattcagccgggcgatacactggcggtgtggaaactggacaggctcgggcgcagtgtcaaaaacctgatagccctgatatctgatctgcacgaacgcggcgcacacttccggtcactgacggacagtatcgacaccagcaccgctatggggcgctttttctttcatgtcatgtcagcactggcagaaatggaacgcgagctgatagtggagcgtacgctggccggattggccgcagcgagagcacagggcagagtcggcggaagaccagcggcactgacacaaaacgaccgtgaacaaatcggtcgtctgctggataaaggatattcccggcagcaactggcgattatttatggcgtgggggtgtcgacaatttaccggtattttccggtaagttttcaaggcagattgtga

SEQ ID NO: 280002 - DNA, 1665 bp, Morganella morganii
atgcttggaatacctgataaattacacgagtgcttaacggtcagcgatttatataaatttcttggttgcgacgaacaaagtactggcgattttttatacggatctagtcttaagtaccgtgcgtttactataccgaagaaaggtggtggtgagcgtaatattgttgctcctgtaaaaaagcttaaacaactacaggataaaataaaaactgagttggagtcttactataaaccaaagaactgtgtacatggatttattcctgaacgaaacgttgtttctaatgctcagcctcatattgggaaagagtatgtactgaatatagatttagataatttctttaattcaataaatttcggaagagttagtaaattatttcaaagccatccattaaatctcacacatcctgttgcaagcgttctggctcatatatgctgttataataaagcattacctcaaggagcaccaacctctccaattatatctaatatgatagcatttaaacttgacagacaattaaaagatctagcaagtaaatctaaatgtacgtataccagatatgctgatgatattagtttttcttttacaaaaagaaaaaaacatttatcaacatctatagctttttttgataagaaagacaatctaatattaagcaacgtgctgataaatataattgaaagtaactggtttaaaataaatgaaaaaaaaacaagaattcagcatcgaactcaaaggcagtctgttactaacattacagtaaatgaaaaaataaacgttaatagaaagttcatacgccaaacatcttcaatgttgaacgcaataattaaatatggccctatagaagccgagcgagaatactttgaaaaatatcataaaggatatatagcaaaaagacaacatataaaaataaaaaaaagcccaggtaaattattcacccaaaaagtgagggggcggataaattatattaacttagtgcgcggaaactcatgtgatatgtggcgtaagttaatgtataaatatactatcgcaataggtaacccgaatgaaaagtataataaaagcctttgggatatcatttcagaatcaacttatattatttatgacatatcagatgaaaatgattcgcagggcagtggttttttattggaaaacattggattaattaccaatcagcatgtaataagtggtattaaaccagataacatagcagataaattgataatttcatggcttcccaatcaaaataaatcatttattaatttaaacttagcttggaagaatactgagaaagatttagcagttattacatctcctattatgtttaatgatgtaactccactaacagtagaaacttgcccagattattcagtaggaaccgaagtttttactatcggctaccctgcttatgatgcaagaggaaaaaatagccatacaaccattagagctaaaataacaggagaatgtacgagagaaggacagcctagaattaagattgataaggcgattattcatggacatagtggtggcgttgtcttaaatgtaaatggtcgagtgataggtattgtagcaaatggaaatgcagaaggagagatacaaatggcacctaatgcatttattccgatatcaacacttcttgaagaacatgaaaaccaaacaagagctgaatag

SEQ ID NO: 280003 - DNA, 936 bp, Morganella morganii
atgcactcagtccacatgtcagcctttcgagtattgactaaagccagagctagaaaggcttttaagcttggtgagttaaacaacgatcaagcaatcaaggcgtatgacatagtaaaaaatattataaatagtaacttaaatactccccttgaggatgtagacacaaagctaattgtatctatacctactggtaacctaacttttgacgatcacaaaagaataatttatggctatgtaaatgctggaagatatggagaaaactatacagtcaggcaaaaattacttgcgtcaacaaatcataagcgagtaactcatgatgaagtgacggagaaaaaaagatacgtatttatgtatctgccggatagtttagatactggcattatagcctttcatgagacatcaagattgaatgctagaacaccaataaaaaaaataatagagtcaggcttcgactccaacattccctcttttcaagcgagagtacgtccgttgcttcatcagagtataccaaatggtataaaaaatgcagaggtacttgaaataaaagctgtgggttataaagttcctaaggatattgctgatgctatgcgtttaattggaaatagaactactgctgatgttgttataaaaaataaaggttattcaatggggactgtttctgattacttgggaaaaaatatatctcaaaacaatctactcgatatcatagaaccggatagcgaaaaaataaaaatcactgctcaggttaatggtaaaaataaaatatatgaacttagagatattattgctaagggcatttcaattaccttagatgatacaatcttaaatataaatcctctaactcaagaaccagattctcaggcattacataacgctataaaagcagagataaacgactatcttgcagagatttatgggagtgggtacagtatatga

SEQ ID NO: 280004 - DNA, 537 bp, Morganella morganii
atgaacaaaataaacatctattgtttaataaagaaccatgtggctagcttaaaagaaaatggagcgacatcactatctaaaccagatctatggttgcactttattttcccattaatagtatctttacttatttgtcttttctttaaagtaatgcctacatcagttgttggtatactggtgaattttggttctattacaactgcattgctaatgagtgcagttgtaatggtttacgatcaaaaaagtaaaataattgaaaaaaaagaaaaagagattattgaagataagaaagaaacatacagtaaaaatatagaattatataatgaactatgtcagaatatttgcttcgcaatattaacatcaataatgatagttattttatctgtaatactttccttttatgatgaaaaagtaacaacttctttttactcggctttttttatcgtcatttcttttttttgttatgctttttttatttcaacaatgattacatttctaatgatattaaaaagatttagtatcatactggataattaa

SEQ ID NO: 280005 - DNA, 594 bp, Morganella morganii
atgaattataccgctgatgattacactcaggccatgatcggactggcaccgcagggcatggcgtgggactggcgccctgggtcgaatatgcatgctgttctccgggcgctggcgcgcggctatgagtcctcggatattgacgctgttcagctgcttgagggggcatttccgaagacggccacaacgttattaccggagtgggaaaaaacgctcggcctgcctgatgattgtggtatcggggagatggacaccattccgaaacgacagtcagcggttctttcaaaactgctgcgtaccggcgggatgtcgaaaccctactacatcagcctggctgccgagatgggttacaccatcaccattaccgaattccggcaggcaagggcggggctgtcagcctgcagtgatgcactgaacggtgatgaatggccgttcgtctggcgtatcaatgccggaaacacacaggtgacatacgcggtcgccggcggcagttactgcggtgacccgctgcgttcgtggggggagcattacctcgagtgccagtttaaccagatttccccctctcatacgatccttcaggtcggttacggccagtaa

SEQ ID NO: 280006 - DNA, 1140 bp, Morganella morganii
atgccgtttaagcgtaaaacactgacggagctgcgggagcagaaccagaatttcctgcgcaatgaactgaaagagcccggtgcgctgctgcggtattccaatatgcgggtactggcggatatggatgccggtatggcacatctgcattatgcctatctggattacattgcaaaacaggtaaccccgtttacagcaacagatgaataccttgcgggctggggggcgctgaagcgggtttaccgtaaaccaccaaacaaagccaccggtacaaaggtgcagtttgacggcgtgccgggcaacgtcattccggccggtacggcgatgacccgtggggatggataccggtaccagtctgttgctgaggcccatattgatgccgacgggaaaggcttcacgtctgttgaggccatcctgcccggcattgacgataatatttacggcggcggtgcggcgggtaactcaccggccggtacaaaactgacgcttgaagtcgctatttccggggtatcttcggaatgtgttgctgttgagccgatcaccggcggcagtgatattgagaatgaagaggctttccggcagcgtgttctgcatgcgtaccagaaaccaccgcagggcggcagcgatacagactatgaaggctgggcgaaagaagtgcccggtatttcccgtgcctgggtcaaacgccgcctgctgggtgccgggtcggtcggcatttacattatgtgtgacggcaacagcaacggcggctttccgctgggaactgacggaccggctaccaaagaaacttattcagttcatgcgaccggtgaccagttacgggtcgcagatcatatctgggatgtacagacggtaacggcgctggtgtgggtctgttcacctatcgcaaaaaagatagattttgaaattgaagggctgagccgggcgacctcggaattacatcagttgatagccaaagccattgatgatgtgtttttccgggacagcgacccgaccggcggcgcaaaaatctatctttccgatctgcagtatgcaattgctgatattcccggtaccaccggctttgttctgaaaaaaccgtctgagaatattgttctgggcaccggggagctggcgcagcgcggggaggtgtcatacacatga

SEQ ID NO: 280007 - DNA, 438 bp, Morganella morganii
atgtctgatatttcttcctggtggaacgcggacacactgcgggcggactggaaacccggcaatggcgacctgctggccggcgatgatttgcagtcagcaattatgatcagtctgttcactgaccggctggcgcacagcgacgatgattatgacgatgagtaccggcgaggatggtgggccgataccggaacggatgggtttatcggctcccgtctctggctgctgagacgtcagaaactgaccactcaggtggcaaagaaagcagaagattacgcccgcgaggcgctggcatggctgataactgacggggtcgtgtctgatattcagatccggacacaaatagtgtggccgcagcggctgaatatggttatccgttatcaccggccggattccggtgcggaagatctgcgtttttactgggtatgggagaaacaataa

SEQ ID NO: 280008 - DNA, 588 bp, Morganella morganii
atgatgagtgaccaggtccgtgatttaaaaacccggatgtcgatgatgatcggtgccggtaaatccagcgtcaccaaagatgacggagcgattcagaccctccagtacagcaccgcgctggaagtccgggacggcacttatcgtatgacggaatttggtttttcgtcctctctgccgccgggctcggatgttctgatcgcctatctcggcgggaaccgctccagtgcggtggttatcggcagcaatcatcccggctcccggcataccggcctctcaccgggtgaaagcgtggtgtacaacctgtggggtatgtacatccacatgacagaggacggcattgtgattgaggccaaagataaagatgtgaccattaataacgccgataaggtgacggtcaatgccaaaacagaggtcgtgctgaatacgccgatcctgaaagtgtccggtgatgtgattgataactacgaaagcaacccgtccacactgaaagacctgcgggacagctacaacaatcacaaccatgatgtgaaaaatgtcgaaccgggcagtgccacccgaaccagcaacccgattaaggagaaagtctga

SEQ ID NO: 280009 - DNA, 1071 bp, Morganella morganii
atgacggaagaaacgaaaaaaaccgaagaattatccctggtgataaacggcaagcgtatttccggctgggacagtgtccgggttacccgcggtattgaacggctgccgaacgattttgaaatcagcctgatggattactacccggcaacggatgaaaagcagttgtttaaaccgggcgacccctgtgaggtgtttctcggtcaggaccgggttatcaccggttatatcgacacctggaacgggcagatcaacaaaaaccaacaccagataagcgtgtcaggccggggtaagtgccaggatttggtggactgctcagccaactggccgaataacgtaatcagtcagtcaaacgccctgcaaatcgcgcagaaactggcgcagtggtacggcattgaggtgtcgagcacggtttctgatggcgggttacagattgtcccgcaattcacactgaactggggggagtcctcacagcaggtgatcgaacgctgctgccggtactctgcgctgctgtattacgaacagcctgacggaaacctgctgctgacccgcgtcagtgacaaagtggcggccagcggcgtggagcagggtaaaaatatcgaaagtgctgatttctcggattctatggcagaacgctattccgattataccggcgtatcgctgtctgttaccccgtttgccggagatgtgtcagcggtacagaacgcctcagcgcgggacccggaagccgggaaaatgcggtaccggaattacatcacgattatcgaaagcaccctgatcaccgccaaacgggagcaggaaagtatcgactgggaaatgaaccgccgctacgggcgctcaaaaatcctgagcgtgatggtcgacagttggcgggatgcttccgggaaactgtgggagccaaatacgctgatcccgataaatatccctgtccttggggtaacggataaattctggacgctgtcggatgtgacctatctgcgggatgccggcgggacacgggcaacactacagttgatgccgccggaagcattcattgccgagccgtatgaattttaccaggtaataagggtgtga

SEQ ID NO: 280010 - DNA, 1401 bp, Morganella morganii
atgccaattatcaaagacgccatatctgatgtactcggcattgagccggactggaattggtcagaacacctgcagcaggcttcattccgtggtgtgccgttcggtgtgatcagcggtgaaagtgttttcggccgccgccaggctattcacgaatatgcgtaccgcgatcagtcctggatagaggatatggggcgcagcaatcggcggatcaccataaagggattcctgattcaggacagtctcgtttatgacgcgccggacgttattacccagcgtgacaatctggtagccgcctgcgaagtcggtgaggccggaacgctggttcacccgacactcggggaaatgaccgtcagtgtgactgaaagcggcctgcgggtgtcagaaaatgcagaaagcggcagggtgtttgaatttgagctggtggtgatcgagtccggcctgaaagtgttcgccatcaccggcagtgaaaaaaccggtgaactgacgttcgggcagtggctgaaagaagcggcacataccaccctgaagacgatcgccatgattaaaggtgaagtccggtctgtcacacagatgatgaagacgctgaaacagactgcggatttctgggtaaatatggtcagcagttcagttgatgaggtcactaatctcagtaactcgctgaacagcgtgttcggaagcaataaatacgggcgctatcagaaaggcagcgcaggcggggcggtgtccggtgcgaccggcaagcgcatacatcagggtgatgctgatgaccgtgaaattatcaataaaacactgaaccaggccattattgaccggcaaaggctggacgaaacactcagcgcggtcagtgatgcagcatccccggaagatgtgatcgcacagatacagcaagtgtttgtcatcctgatcactatggacggtgacaccggtcagaagatgcagatcctgaatgcgttatcccgtttccgcaatccggaatatcagcagacggagcaggataaaagaattgccgcactgactgaaatgatgctggttgtactggcggcatcggcgctttcggttgtggccggacagtctgacccgacaaacagcaccggggccgccggatatcagcgggaggtctgtgaatctcttgatgatgccatgactattaccggggatctggcgctggatgacatctatcttactctcctgaaccggcgcgaacaggttgttattttcttcaccgataaaggctcagaacgcggccgcctgtcgtcttacgccctgccgtcggtgctgccgtctctcaatgtggctaaccgcctgtatcaggatgcaacccacagcgaagagctggtgatggagattcagccccggcatccggcatttatgccggtcagatttaaggcactgaaaaaatga

SEQ ID NO: 280011 - DNA, 468 bp, Morganella morganii
atgagtttattaaaaactatatccgcattgactatgttagttcctgtaattgcattttctgcatcacctatcgtttgcgaaaatcaagcacagggaaatacaggtacatccatatggccatcactttatatgcaggacacaaacaccctttgttttgacgtgaaaggctggcctgaattttcaggtacaaactgcgtaaaaaatggcaaaacagcgaagtggaccggattagtaatcgtgtgggaagacggagaatcacaggggcgtgattcaacaaattttcgcgttgttaatcctgtagtcaatgatgatcaaattcaataccgcatagaatggtcgcgtggcgatgaatggcgaacaatgcaaaatgtagtcattaatcggcttaccggtggagccgtaagttattttgtgactgagcatggtggtgaaagttatcaatgccggatgactcaaaaagctatttaa

SEQ ID NO: 280012 - DNA, 1881 bp, Morganella morganii
atggcgggtaatgcctttgattttgaactgaatgctgatgatcgcgccagtgcgcagattatttttctggaagaaaaggttcgcagtctgactccgaccctggacgaagcgcgggaaaaactgaaactcggtggtgatgaatcagtaaccgggttgcgtgggctcggtgatttgctccggggcgtatcagatgaagcaaaggctggtgttcagaatatcggggacatgatcccgccgctgaaaaatttcggtgcgcttgccggtaaaatgatgggagtgggtggtattggtgccatcatcaccggtggcggaaaactgattactggcatggctgaggatgggttaaatcgcacaacatcagctgctaataccggcatgacagttgaagaaagcacccgcctgattggaacattacaacagcgtggcatgagcgagaatgatgcccgtaacactatggaaggtcagtacgagaagtttagtagtgctattactgcaggcggggataatgaaacgttagcggctatcagatctatcggggctgatattgttcagcgcaaagatggtagcgttgacatggaggcgacgcttaaaagccttgaatcggcaatcaaagtgctgcctgagcacagaaattgggagcttcgggataaattgaaattaccccccgagattgttgcgttattgcgggagggaaaatttcaggaaagactaaataaatcggatcagtacggcctgactattgacggtgattacgcccaaaaaatgactgaggtaaacactcagttaaatgaagccagtgcaaaattatcgggaacaatgaaccaggtacagaggtcgctttatgagtttattgattcacccagcatcattcctgactttggtgatcttgatggcgccatgaagaatatccgtgaatcagagaagcgtataaatgatacagaagataatttttatcatggtgataagcgtcaggatattattcggtgggctgctaaagacaaggagtacagagattcactaagttggtttgaggacttgcggatgacggccctcgatcctgacgacaaaatgtatagtgacatctataacaaatggagtgataaatgggaagaacagagggaacgagccgaagccggtaaaagaaaaccagcattgaatggtaaggtgcctgataattgggttcaggatgagcaatacaatccaaaccggcgtgggctgcgtaacaagaaccccggcaacctgatagcagccccaaatagtgtcgggtatgactatggtaataatcaccgttacgtaaaattcgcctcgtcacgggatggtaatgctgcattgtctcgtcaaattatgctggatgccgaacgtggtctaaatacccttgatagccttctcaggaaatacgctcctgctagtgttggtaataatactcagggatatatagacagagtttcaaaaggggctggttttaatccgtatgagcgacttgatatgcatgatcctcgcgttttagaaaaaatcattccatacattatcaaagttgagaatagcgaacagccgtacagttatgaagaaataacagcatccattacagactctattatggatgatcgctgggctggcggacgaaatccttaccgggttcaggaacagcgaaatgcgcttatgatgcaacaagagtccgagtcagcaggtcccgattttaaaatagaaaaggacccaactcaggcgttactggctttcactgagcaattatcccaagtgcttcaggagaataaatctggcggtacattggaaattgttctgactaatatagaaaccggcacaaaaaatactgttagcgtaaaacctaaagggcgggttacaactgcgatgaatataccgtag

SEQ ID NO: 280013 - DNA, 264 bp, Morganella morganii
gtggaaacaaccaaaactatcacactgagtaaaccgctggagtccaatgacggcaaagtccgttatgaggaggttaacctgcgtgagccgtgccttatcgaagtagagcagttttatgatgtgcagaataaggccagcaactcgcttcccggtatgcgccggctgatttccctggtcagtgaaattccggaaacagaactgaaaaaaatggcgatcacagacttcaaacagtgccgtgattttctgaccccttttttggcataa

SEQ ID NO: 280014 - DNA, 369 bp, Morganella morganii
atgggcgatacatccaaccgcctggcgggaacggctcacgtctccgtcaacggtatgtcaatcatggtggcggcggactttaaatacagtccgtccacggtcacccgcgaaaccctgaccggtatggactatgtccacggttacaaagaaaagccggtcgccgggtttatcgggatgcgtgtccgtgattccggcggtaccaccgtggcggattttaacggtatgaccaatgtgaacgtggtggccgaactggcgaacggcaaaaccattatcggtcaggggctctgggttgttcagactcaggaagttaacagtgaagacgccgtgtttgacgtgcgttttgaaggtcgttcggtaacggagaactaa

SEQ ID NO: 280015 - DNA, 1482 bp, Morganella morganii
atgacagtgccatttgccactattccgcagaatctgcggactccgctgtttttcgttgagtttgataactcgatggccaacacagcaactgccacgcagcgcacgctgttaatcggccagatgctggaaggtgcggcgggcaaagacagcattcctgagcgtataacatcagggacgcaggccgcagagcgttttggtcgcggatctatgctgcacaccgaagcggatgcgtatttccgtaatgacacggccggtgaagtgtgggtgttaccgctggcggatactgaatcgcagacagcagctgccggtaaactgaaaattaccagtgctgccaatgataccggtgtgatttcactgtatatcgcgggtatccgtgttcagatggccgttgtggccacggacacagcagaagtgatcgcaaccggactggctaaagtgattaaccgcaatgcgaacctgccggtaaccgcggcggcagagacagatacggtgattctgacggccaaaaataaaggcgctcacggtaacgggattgatatccggctgaactacctcgggctgaccggtggcgagtcgacaccgtccggttttgaaatgaccgtcacggccatgaccggtggtaacggctcacctgatttgcttaatggtctggcgaacctgaaagaccgatcctttgattttatcgtaaatccgtatactgatacggcgtctctcgatgtggtgaaaacctttctggcagaccgctgggcgtgggacaaacagttatacggccacagctacggggtgatcaccggcacttatggccagctggctgattttggtgaaaagcgtaacgaccagcatgcatccctgctcggtgtcaatggttcaccatcgccggattatcagtggagcgcagcctataccggtgccattacacagagtttgcgtaatgatccgggccgcccgctacagacgctcgttatcagtggtgtgctgccgccggacgacacaaagatttttgaactgactgagcgcaacaacctgctgcacagtggtatctccacatttaccgtggatgatgacggtaccgtgcggattgagaatatcatcacgacctaccagaaaaatgcctacggcgataatgacgacagttacctgcaggtggaaaccctgtatctgctgatgtttgtatcacgctatctgcgcacccaggtgaccagtaaattcgggcgtatgaagctggcagaagatggcacccgctttgcaccgggggcagcaatcgtcacaccgaatgtcattaaagcagaactgatcgcccagtatggcttcctggaatttaacggtcatgtgcaggatgcgaaaggctttgccaaaggcctgaaagtcgagcgcaacagccagaacccgaaccgtgttgatgtcctgtggaccggcaccctcattaaccagctgcgcgtgtttgcgctgcttaaccagttccgcctgatgccgggcaactaa

SEQ ID NO: 280016 - DNA, 168 bp, Morganella morganii
atgtttgtaaaacctgtaaaaggccgcagcgtccgctgcccggtcaaaggggagcttttgcctgaatccgggcaggacgtccccgataatgttttctggcgcacccgtctgaatcagggggatgtcgtgccgagtaatcctcagaaagtgaaggagcaaaaagcatga

SEQ ID NO: 280017 - DNA, 549 bp, Morganella morganii
atgaatgccgccagagttcgtgagctggttgttgctgccctgaagggggaaaccaacgcggaagaccgcgtgtattccccgcaggactggccgaccaccaatgcggaatacccctgcattatcgtgcagaccccgtttgatgaaaaacattcactcggccgtaatgttccgcagttcaacacagtgaccacggtccgcgtcacaggccgcctggaagagttcgatgaggaagaccagaacggcgccataaaagcagagctggctctcgaagccctgcgggaacagattgaacgggcggtgattaacagctatgagctgacccggcaaattcagcagttcctgaatatccgctctcagataaacatcagtgccgccggagaggggcatatggcgcaattgctgatggatctggatatcgaatactaccaggggccggaggagttttacccggttgacgcggatccgcttaccagtatcgatatcaatgttcagatgcctgacggcagcccggaacatcacgtctccatcgacctgactaatcaggagtaa

SEQ ID NO: 280018 - DNA, 339 bp, Morganella morganii
atgggcgttgactgggataaacacctgctggggccgctgcataacgtctttgcggaaaaagcgtgctgggaaccggtgaaaagtgccaaaggcgcagaattttacgacatcgacggcatttttgatcgggcctatttccagaactacgaaagcactgacggtgaaagcggtatcaataccacccgtccgatcctcggtgtgcgcgatgttatttttactgtgccgccggcgaaaggggatcgggtgtttatctacagcgtcagcaccctgtttgtggtatccgatgtacagccggacagccacggcgggacgcatctgatcctgaataaggtgaaataa

SEQ ID NO: 280019 - DNA, 414 bp, Morganella morganii
atggcgaataaaaaaaatacgtcggagaaaccacaggaaccgggcggcctgccgcccgaactgatggtgaacggtcagagtagtaacccggaatcacaacagaacgattctggtgataagcagggtaacaaaaccacagcggaactgaataccgcagccgattccggtgacgggaatgcaggtgatggacatggctcagatccggaacagggggctgacaacgtttatgtggtggctaaaggccgctgtgtacagcatgacggcgagctgtaccgggaaaaccagcagatcctgctggatgataccgatgctgtccgcctgattgacctgggtgtggtaatgacgctggaggcagtgcgggaaatgctggcgaaagccaatccgcccggcactgtaaccattaatgggcgttga

SEQ ID NO: 280020 - DNA, 1047 bp, Morganella morganii
atgaatattttcgataccaacgtgttaattcaggtcgtcccaaatctgatgaccagtcagaactggctgctggataagtttttcccgaatatcgtggaatccgataccgaagaggtttccattgatgttgatgtcggcctgcgccgtctggcgccgttcgtttcaccgctggtggaaggtaagctggtggagccccgtaagtttcagaccaacagttttaaaccggcttacatcaaagataaacgtgcaccggatctgcgcaaacctatccgccgtcagattggtgagcgcattggtggtcagtatactgctgctgagcgtgaaatgctgaacgtgcagtttgaactgacagaccagattgacatgattaaccgccgcctggaatggatggcatccagtgcgcttcagaccggtacggtaacagtaaccggtgagggttatgaaactcaggtggtggatttcgggcgctcgtccgatctgaccattgccctgagcggtgcggataagtggccggtgaaagttgatgtcggtaaaaccaacactcagccaagtgatgatattgaagactgggcgcagcgcatgctgaaagaatccggtgcggtagcaacagatatcgtgttcaccaccaaatcatggaaggctttccgtctggacacatcaattaaagatagcgccattgtatttcccgcgctctctccgtttggtaaccagattaacccgggcacccaggttcagaaaggcgcagtctataaaggccgctggggcaactatgacctgtgggtatacaacgactggtttattgatccgctggacggcaaagagaaaccgatgattgcagacggatcggtgattatgtccggcgctgacctgatgggaacccgtgcatttggtgccatcattgacccgaaatttaattacggcccgatggcgtatgcaccgaagtcctggcttgtagaagatccggcgcagcgtttcatcatggtgcagtctgcaccgctggttattccgagccgtgttaacgcatcactgtgcgccgttgtggtttaa

SEQ ID NO: 280021 - DNA, 393 bp, Morganella morganii
atggaacagttctcacagaacccgtttcgtccgggtgtgacccactctgtatttaatccggatcaactgatctccggtccgcttcaggttgttaccgataccggcattattgccaaagccggtattctgaagcgcggcaccatcctcggtatggtcactgcctccggggaatatgtgatcagcaaaaaagatgcaacagacggaagtgaaattccgtgcgctatcctggttgatgatgtcgataccacgacggatgccgtgaacggcggcctgtacctgatgggtgaatttaaccagaaccgcattatctttgataacacctggaccgctgtcgatcttaaagcagcaatgcgcccgttctctatcttcctgcgcgacagcgtgcaagcctga

SEQ ID NO: 280022 - DNA, 594 bp, Morganella morganii
atggcagacaataagtttacctttgcacatctgatcggcctaggtaaaaaagccagagcctcggaagaggatgaagataaaaaagtgcgcaaagccaaaggccgtacagcggaagaggatgagcgcgacgaagatgcggaagacgatgaagatcgtgaaaacgcggaagatcaggacgacgaaaagcagggccgtaaagccaaaaaagccgaagacgatgacgatgacgcagatgcggaaggcgatgaagaagatgccgaagatgatgatgaaaacaaagatgtaaaaaaaggccgccgtgctgaacgcaaacgctgtgcccgcatctttggcagcaaggctgcagccggtcgtccggatatggccgcacacctggcattcaatacccgcatgtcttcatctgaagcgatcagcaccctgaaagcgatgggtgcggttcagcctccaacacagcgcgcatcgctcgacagccgcatgcgggcagaacagcaggtacgtatcagcccggatgcacaggcaccggcagccggttcagctgccgcgctggctcagcagatgaccggcctttataacagcaacaagggagcgaaataa

SEQ ID NO: 280023 - DNA, 855 bp, Morganella morganii
gtgaatttaccccacctggcacagaagctgtttaacacgcctcttgccatacacccgcagaaagcggaagtgattgtgtcatcactgacagaacggctcggtatcacgcagatccgcagcgccatgatggaagacgatgacgagtatttcagccgtaaagcccggaaggacagagggtatgacgtactggaaggcatcgcgattatcccggtctacggcacgctggttcagaaactcggcacactgcggccgtacagcggcatgaccggttatgacggcatccggagggtatttctgacagccattaatgacccggaggtgaaaggcatctgcctggatattgattctcccggcggtgaagtggccggttgttttgacctggttgatttgatttatgccgaacgcggcaaaaagcccattcacgccattctgtccgaaaatgccttttccgctgcctacgcgattgccagcgctgcggacaaaatttttgtcccgcgcaccggcggtgtcggttcggttggtgtgatcgttattcactgtgactggtcacagcgtatcaaggatgacgggctgaaagtgtccattatcacctacgggaaccgtaaagcggaaagtaacccgtatgtggcgctgagtgatgaggcgaaagcggccattcagcatgatgtcgatgaaatggggcgtctgtttgtgagcactgtttcccgtaaccgcggactgtctgagacagtgatccgcaatacacaggccgcctgttatctggcagccgagggcgtacatatggggctggctgatgtggttgccagtcctgatgtcgcatttcaggaactgatgaaagaatccggagtaatttaa

SEQ ID NO: 280024 - DNA, 1653 bp, Morganella morganii
atgagtgtacaaatcttaggagcggacgggcgcccgctaccgccggctgctccgaaaattaagtacggggctctgtccggcagtggcagagtaccgtatgacgcggcggattcattcagtgatcagatggcgaactggcagcccgcgctgtggtcgcctgataatgaaattaacatctaccgtgaccgcattgtgtcacgtatgcgtgatctggctcggaatgacggctgggcgtccggctcgataacccgcgtcctggataatgcggtgggtgcctgttaccggccggtattcaaaccggactaccggatgctccgccaactgaccggaaacaaagcatttgatgcggtgtgggctgctgaatacagccggtttattaccgcgcactggcgctcatgggcgaatgacaaaggccggtactgtgatgttgaacgtaaacagaccgtatcacagatgctgcggctggggttccgtcacaaattgctggacggtgatgcgctggcagttctgcaataccgtcctgacagactgggccacggtaaagcccgttatgccacgacggttcagattgttgatccagaccgcctgagtaacccgcagcagaattttgacatgccgaatatacgcggcggggtggaaattgacagcgacggtgccccgatcgcctatcacatccgggaagcccatatgggcgactggtgggccggtaagaaaaccatgacctggaaacgcattcagcgtgaaacgtcatggggtcgcccggtggtggtgcatgattttgatatggagcgcggtgcacagcaccgggggatcggcatactggcccccatcgttcaaaagctgaaaatgctgattaagtacgatgaatcagaactggaggcggcgatcctcaatgccattttcggggcgtatatcgaatccccgtatgatgcgcagatggtggcttcagccctgggtgatgccggcgattttaccggtgatgaacttagcgcctaccagacacagcggacagaatactatcaggacaagcgcctcaatcttcagaacggcgcacgtatcccgcacctgttcccgaatgaaaaaatagtcacactgtccgccgcccggccgaccagtaattttgacggctttgagagtgcggtgctgcggaatatttctgcagcaaccggcctttccgctcagcaggtcacacaggactggtctgatgttaactattcctcagcccgcgccgccatgctggaagcctggaaaaccctgacccgccgccgtgatgatttctcaaacggtttcgcacaaccgatagcggtggcctttgccgaagaaattcacgatgtggaagatgttccgttgccgaatgatgccccggactttatggacgcatcagcgtcctactgccgcgcgcggtggatggggccgggtcgcgggtgggtagacccggtcgcggagaaaaagggcgtcattctcagcctggaagccgggctgtctacgcttgaaatggaagtggctgaaaatatgggtgaggattgggaagagcaggcagaccagcgggcgtatgagcttaagcggtttgaagagctcggattgccgccgccgagttgggcagtggcagatacctttgcaccgaacccggaaaacaaacaggaggcgaagtga

SEQ ID NO: 280025 - DNA, 252 bp, Morganella morganii
atgtcacgaattaccacgctgcttaccggcatgaacgatgcacagttaaaacaggcactcgctcaggcgcagcaggcctatatcgacctgtcaaccggtgccaaaggtgtttcattttcctatacacagggtgacgggacgcgatcggtgtcctatcagcagaccagtctgggtgatttgctggcactgatccagacaatacaggccatgctggggatctcccgcaggcgtccaatcagggtgaggtactga

SEQ ID NO: 280026 - DNA, 1974 bp, Morganella morganii
ttgaccacagtgaacaggggggataatgcatggcaacaattcacccgtgcactgagtcagaaacgcgctgtcgtcagacctccggaagccttatcgctgagcgagtgggcgaacaaatacgcggtgctgtcgaaagagaacgccgcacagactggccgcttccggtcatttaaatatcaggacggcattatggatgcctttaccgatccgtcggtaactcaggtgtccgtgatgaaatccgcccgtgtcgggtataccaaaatcctcgaccatgtgatcgggtactacctgtcgcatgaccctgcaccaatccttgttgtccagccccgtgaaagtgatgcggaagattacagtaaagatgaaatctcacccatgctgcgtgatacccctgtactgaaagcgatagcgggtgagactaaagcaaaaaacagtaaccagaccatcctcaaaaaacaatttaccaacgggtcaagccttacgctggtgggtgccaattccccagcggggtttcgccgtataacccggagaattgtcctgtttgatgaagtggacggattcccggctggtggtgccggatctgagggtgaccagattgcattaggtattaagcgctcagaaacattctggaaccggaaaatcggcctcggctcaacaccgaccgtaaaaaacgtcagccgtatcgaaaaagcctataacgagagtgatcggcggcactactgggtcccgtgtccgcattgtggcgaatttcaggttcttgaatggggtgatgaaaaaacatcctacggaatgaagtgggataaagataaagatggcaacgggcttcccctcaccacgtattacgcttgccgccacaatggctgtgttattcacgataaggataagtacgcgatgatcgagcgtggtgaatggagggcagagaagccattttccgggcatgccgggtttcatatctgggcggcgtacagtctgttcccgaatgcgtcctggccaaacctggtgaaagaatggctgcgggtaaaagatgatccgctgatgaggcagaccttcattaacaccacgctcggtgagccatatgaggaccggggcgaaaaatccctgagtgagcaaaaactgctggaacgctgtgaggtgtgggcggcggaagtaccggacggtgtcactctgctgactgccggtatcgatacacaggatgaccgctttgagattgaggtggtcggctggggccgcagtgaggaaagctggtcagtcgcacacgatgtgattgaaggggatctggaaacaccagagccgtgggagcgtctcgatgcgtacctgaaacaaatctggcgtcgtgccgatggtcgcggatttgccattatggcggcctgcatggactccggcggtcaccacacccaggctgtttatgatttctgtaaagctcgcctcggtcgcaggatttgggctatcaaaggcgaatccgcccgtggtggtaaacgctcaccgatctggccgacaaaacgtattacgtcccgttcgaaagccggatttaaaccggtgattatcggtgtgaacgcggccaaagatgcggttcgtggtcgtctgcacttggagccaccggcagcaggcgaaccggcaccggcgtatatgcacttcccggttgatcgtgatttgcagtatttcggtcagctgctggcagagcggtcagtaattaaagtgtccggcggtcagcgataccgggtctgggagcagataccggggcgggcaaacgaagcactggactgccgcgtgtacagctatgccgccttgtgcggcctgatgtacatggggctgaaacttaatgcgctggctaatgctgttaccgttaatccggaacgtcttattgcgccggcggaaaatccggaaaccaaagttaaccttcgcttcccgggagcaatcatcccggaggaaaccaatgaaaagcctcagcggaagcggatatcccagcttttgccataa

SEQ ID NO: 280027 - DNA, 582 bp, Morganella morganii
atgaccacgatgaatatttccgactatgcgaagcatgcggatgtgaaccgcaagacgatcacccggtggatgaagtcaggaaaatacattgtgatgtccggtgatgaaatcgacgtggaggccagtgaccggaatctgaaaaagtaccgggacagcaaagacccgcgcacgaaaaatgcggcgaaaaaatccgatactccggagaaaaaaccggcgaaagaaaaaggcgattttcagcagcgcgccgaatcggtgtatgcaggtctgatttccggcgatgtaaaagtccgggatctggaagaatcgaaagctatcaaagagcactactttgcggaactggccaggctggagtacgaagagaaatccggactggtgctgccgtggcaggacatgatcgataaagtgggtgaggaatatcacgccatgcgcacccgcctgattgcgatagcccctgaacacggtccccgcctgcggtctctggcactgacttcctctgatacggagtttgtggccgcgctgcaggacattattcatgaggcgatggaggaattaagccttgaccacagtgaacaggggggataa

SEQ ID NO: 280028 - DNA, 210 bp, Morganella morganii
atgcggttacaggaaaaagaaaacgtcgatatttattgcaagtttacggatgactggggtgggatggtgctcagaattttttgggtccttcctaagcctttgatattacacgggcattgcgcgccgcgttctgtggctagctgtgaaattttgattttgtgtcccatgtcccatgacagcgggcaggtgctttcatttctgattcagtaa

SEQ ID NO: 280029 - DNA, 576 bp, Morganella morganii
atgaaagtaaaagtagagcataacggcaaaaccatttggtgccgtgacagcgagagtggtactggtatgacatcacgcggatatctgacagacggtacacagcagaagattgttaccgccctgatcactgcactgacgcaggctaacggcgaaatgtcattgtcctgtccggtgggtgaggcttgcctgacactctcagatgaacaactgaaagagattgcagaagaattgagagcacatccggcatttataccactactgtatcctgcacagaaagagatgaaccttgctgaacaagcaatactggacagggccagaggttgtgaaaaacgtccggttgtgtggattgttcaggtgggtagtgatgacgtatggttcagtcgggtaacaaacgggcgcatagattatgactacgcgcccgtcagcagaggcaaagctaatgtgtatgcatcagctattctgaatgatcttgaaccaccaagacatcttcagaagtccgataaaccgactgttcaaactcaatctgaacaacatcctcatccgttttatttacacagcgaaaatccagtccgctga

SEQ ID NO: 280030 - DNA, 645 bp, Morganella morganii
atggcaaacctcacagacctgagcaaccagctccgaactctgcggaagcagataccctttgccaccgctcaggctatgacagttgttgtcagaaagattgaagatgcgcagaaagtggcaatgcagcgcaatctggataatccgacaccattcacggtgaaaagcgttaaaagtcgcagcgccagaaaaagcgacctgaaagcaaaagtgttcgtgatgaataccgctgctgcataccttgagccgtttgaaatcggcggggagcataaactcaacggctctgcactgctgaacccgaaagacatcaaactgaataaatacggcaacctgccgcgcaataagatgtccgggctgaaatccaaagagaataccttcatcggtgatatcggtggtgttaatggcgtatggcaacggaagaaagcgaagaagggtaagaaaggccggaagcgtttgcagcggtcgccgaacggaacccgcagagacaggaataaactaccgatgccgaaactgttaatccggttcggtgatgctctgcctgtcgaaccaatgctgggatatcaggacagggcaatgaagatgacacaggcgctgttgcctcaggagattaactgggcaatagcagaggcgatacgaacggcgaggtga

SEQ ID NO: 280031 - DNA, 192 bp, Morganella morganii
atgcgcatgtctgacaaatattccagccctacagcatacacctgggggcttataacctctgcttttggcgttttatctctggaccagtgggctattgttgccgggatcatctgtactgtcggaacgttcctggtgaactggtattacaaacggaaggaattccagctgaaagcgggtgaacatcatgaataa

SEQ ID NO: 280032 - DNA, 153 bp, Morganella morganii
atgagcctgttgtattccaatgctcttattgttgctaatggtaaaaagccgcacacagctcttgtgttaaatgataatgaggtgattgatactgtggcggcgtatatgaaaaaggccgcactgggcgacctttgtaatacgtattacttttaa

SEQ ID NO: 280033 - DNA, 1041 bp, Morganella morganii
atgaaaagcactgttaatttaaacagtattaatttagtcaacgacgactcactcagctatatcaaaaccctcccggacaattgcattgatttaatcgccacggacccgccgtattttcaggtaaaaacatgtgcctgggataatcagtggccggatgtttctgcttacctttcctggctggacgaaatgctggctgaattctggcgggtactgaaaccaaacggcagcctttatctgttttgtggttcgcgtctggcctcagatacagaaatgctgttgcgggaaaggttcagtgttctcagccatatcatatgggcgaagccttccggtccgtggcggcggcaaaacaaagaaagcctgcgttgttttttcccgtctactgagcggatcctgtttgcagagcattatcagggaccggtaaaaggaaaaggcagtgagtaccaccagcggcgggatgaactgaagaaaaatgtgtttaccccgctgattgagtatttccggcaggcgcgcgatgcattgggtatcacagcaaaagaaattgaccagacaaccggcaagcagatgtcttcacactggttcgggtacagtcagtggcagttaccgaatgaagcggattaccggaaattacaggcactttttcagcggacagctgcagagtgtcagcgaaataacccgttataccgtgaacataatgatctggtcagtgagcaacacacactcaggcgtgaatatcacgaactggcagatcagtatcagttgttacgccgctactttacggtatccgttgatgtaccttataccgatgtgtggactttcccgccggttcagtattatcccggaaagcacccctgtgaaaaaccggccacaatgatggagcacatcataaaagccagcagccgtgaaggtgatttggtcgctgatttctttatggggtccggagcgacactgaaagccgcactgaagcacaatcgccgtgttctgggtgtggagatggaaacgaagcggtttgagcagacgaagactgaaatagcgttattgtga

SEQ ID NO: 280034 - DNA, 678 bp, Morganella morganii
atgattgagcacgatttgcagtacctgcgggatatggcgactatcgcaatgactgaccacagcagcagaaccaaaggccagcttgaagcatttgagggatttgtattgggaaacacaacgcgctacccacgtaaaaagccccgtgatattaccgtgaacggcagaaaggtaagccgggaaaccgaggcggtatcctgctggtcaacacactattccgtgttaccgatgccacctattgaccgggtggactatcagaactgttcctggcggcgggcaattatggaactggatgaggctgagcagtcctggctgctgtattgctatggtaaagaattgaagttctcacaccagacggctatcaccgcctatgtatggagcgaaatgcaggaacggattaaaggccgtcgggtgtcgaagaaagtaaaagaacgactcaggtcgctggtatggctggcagtgcatgattacgccctgaataaagacgggtattactatcagtctgagctggccgagctggtgggggtagcttctgataactggtgcaggaactacaaaacacactggcaggaactgttgcttatctgtaaaaccctggactgcggggcactacggaaaatgagaaacaacagggcagaaatatggcgcaaaaatgcagctaaaacttgcaaaagtcaataa

SEQ ID NO: 280035 - DNA, 291 bp, Morganella morganii
atgcggatcccgaagttaaagcgctgggagagtctgaaatacctgcagtgggtgaaaagccagccgtgttgtgtgtgcggccagcaggcggacgacccacatcacatcatcggtcacggtaccggcggcacaggtacaaaagcacacgacatttttactatcccgctgtgccgggttcaccacgacgagttacaccgggatccggcagcatgggaagaaaagcacggcagtcagctggagttgttatttaagtttatgaaccggtcatacgggatcggcgtttttggttaa

SEQ ID NO: 280036 - DNA, 999 bp, Morganella morganii
atgggcttgatgttgttggatgggttacaggatatcccaactgtacattatgatagtgaatataacagtattactttgcccaataactacctatccccaggatttatagcggttttagctgcattttgtaaaaaaaatcaaattagtgagcgtgagttttatactgttaacgataatcaatctggttacctccaagctatagaatattataaagcaatatggggtaacgatggctatgagcaaattagagttaaccaaggtaaaaattatagtggattaacccatctctatgatgaagatcaagttgattctgcaacaacatgtatcaatagctgtcttcggtcgtttgtcagtaactgtgagaatgaaccgcatggacttcaggagctattattcgtagttggggaacttcatgataatgtttggtcgcatgggaaagcatctggattttcattagcacaaaaaagtaaaaatccatccaactgggctgaccaagtaatcgaatttgcattagcagatcatgggttgggttttttatctgagttaatgcgttctgggttagcggcacagttgggtattacaactcacagagatgcattaaattggtgtttgcaggaaggaaattcctctaaacatgcagataattacgatggttgggaacaaagtgttccgaaggattttagtgggcaggcattttcttctggagttagtatcagggattgtgataataatcatcaaggactaggattggctcatctgatcaaactcgtaaaaaggtataatggagagttgcagatagcatctggtgatgtatgtctggttgtttctggagatgtaaggacttaccactctctccctgtcgactggaaaggtgttgcaatttcgtgtagactcagtttagaagagcttgctaccgatagcaatcctgagtccgtagaaggtgagacaagtgatgaactgtctcagataatgagtctgcttcaaagtggagatgactaa

SEQ ID NO: 280037 - DNA, 342 bp, Morganella morganii
atgagtaacgttaatattaagctacctggaggtgatttggcttcacgtcgtttagccatacctaaacgttaccaaatcgaaaatgcaattgatggcgtaagtccggttttgttagacctttcagatgttaagtctatatctgaatcttatgctgatgaattatttggtgtattaaccgtaaagtacggtcatgaatttttattaaaaaacattaagattattggtgcacctaagtcagtaatccaaaatatagctatagtgatccaacgaagaaagaatgagatgcaaaaaaagaataatttttctttgccgttgaataacacgttttcattagcttattga

SEQ ID NO: 280038 - DNA, 843 bp, Morganella morganii
atgtcatatatagcaaccagtaccggaaaacatattgatttcgtcaatatcactccggatcagatttgtatcgaagatatcgcgcgcggcctgtcaaatgaatgccggtttgccgggcaactggaaagtttctattccgtggctcagcactctgtatatgtcagccagattgtaccgccggaatatgcactggaagccctgctgcacgatgctgctgaggcgtatatcaaagatattccctcaccgctgaaagccatgctgccggactacaaggccgtggaaaaacgcattgaagcggttatccgcgagaaattcggcctgccgccggtaatgacagttgatgttcactatgccgatctggtcatgttggcgaccgaaaagcgggactttgaaatagaccccgtcaatcactggccgatgctggattcagccccatcacatgatgacatcattatccagccactgacaccaccgcaggcatatcaccagtttatggcgcggtttgaaatgctgatttctggtaaacaacaaaaaactatttcatacataaaaccagaacgcgatcctgatggttactgggtgcatccagatgttccttgtttagaatcgaatcaggaaatagagcaatggtgcgatgaaaacaaccttgaacaccaggtggtgtattgccagaatgacattgataacttccactcactgtggttcagctattttgaagaaggtgataccaatgtttcagcatgggaaccaacaaaaccagatggtgatggctggtttatcgtctggatagcagacaatgaagacggcccgatctgtatgtgggttagacctaaaaacctctaa

SEQ ID NO: 280039 - DNA, 300 bp, Morganella morganii
atgtcaatagattactcaaaaaaactgctcgcgatcaggaagtcagaagacctgacgcagcaacaattctctgatttaacagggatatcagtaagtacgattaaaaagtacgaaaccggacaccaaacagcaggagctgcaacgatggaggcagtaataaatcaccccaaaatgaaaaaatatgccatgtggttaactatcggtgaaacctttgaacaggcaggacaaatcagcccgactctctcccctgatggtgcagacgtaattccgtcagaccactcagagcggaaaattggttag

SEQ ID NO: 280040 - DNA, 291 bp, Morganella morganii
atgagcgagcaaaacacagacggttatatgcaggtaaattacccgattgatgcagtaacacctccgaaatttgcagagttgatcggaaaaacgccagccgcagtacagggaatgattgaaaaaaataagcttccgctgatcaaatggactaaccctgattcaaaaggtgatgtgaaaacacgcggtgagaactggatttacattccggaatttaaccgcgcaatgcgggacgcattccagaacagaccaaaagaattacgtgacgcatggctgctgtgggttggtttatga

SEQ ID NO: 280041 - DNA, 222 bp, Morganella morganii
atgaaatcaattccggatccaatattcacccctgtagctgaaaacatcaaagccaatcgcgaagacgagcgcaaaactctgatgaatggttttgccggtcgtttacgcaccatttcatacaaagcattaagccagaaaatgacaccaacagaaatttatcacctgctcaatggtgaggctgaccgtatcgaaaacgaagcgggagagctgaaccatgtctga

SEQ ID NO: 280042 - DNA, 189 bp, Morganella morganii
atgaatttattagattgtatggtcactaaggttatttctgcgcctatccatcgtatcagtgaaaaaaatgattattggtatgtggcggtagaaagcgagtgttgcggggatctgtcggaaacccgtctgacatttaattcaaaagaagaagccgaaaaagtagcagttggcttccggttcttggggtaa

SEQ ID NO: 280043 - DNA, 219 bp, Morganella morganii
atggtgcatttatacacaggtgctccgccggatgataagacggtacggataaagtcatttattgataagctggagctgattttttcagaaggacaggtaacgccggatgaatttattggttgtgctgctgtggtgtataaaaaatatgaggatatagcgaatgttactaaaatagcggcggaaataaaaaggattatgttatttccggataagcagtaa

SEQ ID NO: 280044 - DNA, 405 bp, Morganella morganii
atgatcgaccgtaagaatctgaagtttatggtatcggaactaaaacgcgggcaggctatttggtttgctccggatcaggactttggaactaaaggtactatcttcgccccttttttttcggtagctaatgcttctgcattaaaaggagtggcagctatagccaaattatcgaagtcgccgatacttactgcaacgatgataagaaataatgaaagtggtaagaggccttatgaattaacaattggtaaagaaatcactgagtttccgcgtggagatgacctggcagatgctgagaaactaaatcagattattgaggcagaaatcctgcatgctccggaccaatacttgtgggcacacagaaggtttaagaccagacctccgggagagaattctctgtacaaataa

SEQ ID NO: 280045 - DNA, 276 bp, Morganella morganii; identical to SEQ ID NO: 279404

SEQ ID NO: 280046 - DNA, 384 bp, Morganella morganii
gtgactggcaccaaaattatccacgttaatttcaaagacgaaaataagccggtactcagtactgtggtggaagataaaaaatcccggcagcaggaaaggtgtaagcaccacggtgtaatcatcaatgaacagtatcgccaggtcacgtgtgagcactgtaattgtgttgttgatgcctttgatgtgctgctgtcccgcgctaatgatgccgaacatgctgtccgcgaaattgtcgagctgatggaaaagcgggaagaactccgtaaatcagtcgatgagctgctgaaagcggaaaagaacaccaaggcaagattacgcagcgccagaaccgatctgctttttactgaaaataaaatggctcagcttaaaggggaggttggatga

SEQ ID NO: 280047 - DNA, 2022 bp, Morganella morganii
atgagcctgacttacggatctgtatgctccggcatcgaggccgcttcggtcgcctgggagcctgtcggaatgaaacctctctggttcagcgaaattgaaccgttcccgtctgccgtactggctgcacactggccgcaggtggataacctgggcgatatgacaaaacttgccgcggcggttcgtgccggtgatgtgccagcgccggatctgctggtgggtggtacaccgtgtcaggcattcagtgttgccggattacgcggtggtctgagtgacgaacgcggacaattaaccctttcttacgttgaattagcggacagcattgatgaaaaaagagaacaaaacggtgagcaaccggcaatcattgtctgggaaaacgtccccggtgtgctcagcagcaaagataacgcctttggttgcttccttgcaggacttgccggagaaagtgaagaactcaagccgacaggggaaaaatggacaaacgttggttatgtgtctggacccaaaagaactatcgcgtggcggatcctcgatgctcaatatttcggagtcgcgcagcgccgccgtcgtgtgttcgttgtcgcaagtgctcgaacagacatctgtcctgcagaaatactttttgagtacgacagcatgcacggggatattacgccgtgcggagaaacggggcagacagttgccgctcttactaaaaacggcgttggtgcaacaggcgcagacgacaaccaggcacaggccggacatctgattgcattcggtgggggtaatacttccggtgaaatcaaagttgccactacctgtacagcacatggcgcccgattagattttgatactgatacttttgcagtacacggcacccaggatccggatgtaaatcacgaactggcgcacacgctgggacgtaaccacgggcaggaaaatgcctgtatttcatttgcagaaaacagccagggagaaatcaggctgcagggtggtgacggtcagatagtcgggcctttatctacaggcggtggaaagccggggcagggatatccggcagtagtttcattccaggaaagaggcagggacgacggccgtaatttagaaatcggcggtgaattagcatatgccctgacatcacccgcaggcggtgggcgtggacaggaaagaaatatagcggactttaacaccatgaccgttcgccgtttgacccctgtcgagtgtgagcgattacagggattccccgataaccacaccaaaatcagctggcgcggtaaagatgctgctgactgcccggatggtccacgttatcgcgctatcggtaacagcatggcggtaccggttatgcgctggattggtgagcgtatccttgccgcgctgccggaaacccaggatctgcgctcagattacgtgattgaactggaagaactgcgtaataaaccagctcatatgttgaaagaggtcggtgaccagtggcggtcgccagatccgctgtattggggtatcaacgccaagttcggcccgtttaccctcgacctgtttacggatggccagaatagtaaatgcccagactattacaccgccgaagataacgcactgactcaggactggtcagaaaaactgaaagagttgggcggggcagcatacggcaatccgccatattcccgtgcaacctatcatggcaaacaggccgttacagggatggttcatatcatggaatacgcaaagtctatgcgtgagaaaggtggccggtatgttttcctgctgaaagcggcgacgagtgaaacatggtggcctgagtgggctgatcatgttgcattcattcgtgggcggattggattcgatttaccggactggtttgtaccggcgaatgagaaacagaaaccgtcaggtgctttctttgccggtgcggttgtcatcctggataaggactggcagggagacaaaatcagttatatcagccgcgatgagctgatcgctatcggtgaactgtttatgcagcaggcgcgttggctggtggagaaaacaggggaggccgcgtga

SEQ ID NO: 280048 - DNA, 189 bp, Morganella morganii
atgaaagaaacagctgacaatcttgatcggtattacaccgacagccgcgggcggaaagttcacgttgtccggtttgaccggcaaaacagccgggtaattttcatgcgtgacggctatgagcatccgtgctttgaacctctgaaaacctttcaggagcggtatacacgtgtggatgaggtgaaaccatga

SEQ ID NO: 280049 - DNA, 132 bp, Morganella morganii
atggtgtgtacagatacccgcgaggttttttactttctccgcctcactgttacctgcatacacaaagcgctcggttacctcagctttctgcccggcggtctgttccgtgatactcagcagacgcccggctga

SEQ ID NO: 280050 - DNA, 438 bp, Morganella morganii
atgcgtgatattcgccaggtgttagaacggtggggggcttgggttattgataatcaggaatcagtatattggtcaccaattgctgccgggtttaaagggctgatccctgaaaaagttaagagtcgtcagcaatgtactgataatgatgcactggtgatatccggcattatggcaaaactgaacatccgcaacagcgatatgcatgatctgctttttgattactatgttttcggtaagacgtttattcagttggccaagaaatacgggtgctcagacactcacatagggaaaaaactccagaaggcagaagggctggtggaaggaatgctcataatgggagatgtaaaactggaaatggacggtacatcacatcatggaggtatgcggacatttatgaacaaattacatgatttaaaaattaatgctttacgatcgtaa

SEQ ID NO: 280051 - DNA, 123 bp, Morganella morganii
atgagagaggaacattggagcaacactactcttcagggcaactatacgggaagcgtcatttctgttttatcggaagatattaaacctcatagcctgcaaaataacgaggtaatgtatgcgtga

SEQ ID NO: 280052 - DNA, 387 bp, Morganella morganii
atgaatacacaaataatcactcagaagttttttaaggactcatccggaaatatccggtgcattgatattatgctgatgaatcaggattgctgggaatcagaaatacaggaagattggacggctgtcagcaaggatgaagcggataagatagccaatcctccaccgacaaaagccgagctaattgaacaggcagaaacccaaaagcaatacctgattgctgaagtcaacgccgaaacccagctactgcaaacaaaactcgccctgaaacgcatcaaacctgatgaagaggcattgttaatcgcctggctggattatctggatgaactggaagcggtggacgtatccaccgccccggatattatctggccggtgaagccggtggtgtag

SEQ ID NO: 280053 - DNA, 195 bp, Morganella morganii
atgacaactccaacaaattacccaatagcattccccaatggggtatgggctgtactgtgtacgaaaacaacctatgtccagattatcgcaagctgcgaaagtgttaccaagcagggatttaacgttgttacggttaaagctgttgaagcaccgacaacagaatcaaccattaactttttagctatcggatattaa

SEQ ID NO: 280054 - DNA, 669 bp, Morganella morganii
atgatcttttcagtatttgataatgtagtgtgtttatttaaaaatacagatacaactcctgaatgcgttatagatgagaaaattacatttattgctaatccatgcccacttgaaatatataaaagagacctatctcaggagaataaaacggtatcatttattggccgagtcacgaaagaaaaaggtgtagatattttaatacaatcgtggaaaagcattgaaaataaacaccctgattggaaattatttattgttggagatggtaaagataaaagtagctttgagtctttagtcgatacactaagcttaagaaatatcgctttttatccttcaacaaacaatataacacactatttgagagaatctgacattagtgtcttaccttctttatttgaagggtttgggctatcactgattgaagcaagatcacaagggtgtgcattaatttcaacaagaactaatggtggaaataaaatcattactgactacaaaaatggacttttagttaatattggtgatataacagatttaacaaataaaattgaactattaattacagataaagaattgcggaatacattaatttgtaatggctataaaaatgctggtaatgatgatataaacagtatagctaaaaactgggtaggtgttctcaataatgatctctga

SEQ ID NO: 280055 - DNA, 1077 bp, Morganella morganii
atgtctgacataaccaaaatcatcattgccggtcgtaacatcagcggttttggaggcatggaaaccgtattcagtacattcagcagattactggctgaatccgggaaaaactatcagatatctttcgtcttttttaatgaactgaataatagtgttgacgatacgtggctcggtaataacccgtttacacgcttcagttcatcactaaaaaacgggaagctgaagagagtttattttgcctgtcaattcgcttctgttattaaaaaaataaatccggattatgtcattgcctttgattctgttggttgttacatttcaagactggctttgcgcttcgcatttaaaagaattccattgttctcgtggaatcatttctctgtcaccggatcatataaagcaaaatatatcaggctggcggataaacacctgtccatcagtagtggcatagcaactcagttatcaggaatgggtatcaagtctgcagatatttatacgatctacaacccggttccggaacaatctgaaacaatcacctgtggcaatacgataaattttttatatgccggtcgcttaatgtgcggaggacaaaaaaacatgagggagttgttcagcgcattatccggtgttcatggtgactggaaactgcatatcgtcggctccggcgatgactctgaaataaaaacattaaatagtctggctcatgatctgaaaatagacaataaaatcatctggcatggctggcaaccaaacccatggcattatatagagaaagagataaaaaatgtctctgcacttcttttaacatccgcatacgaaggattgccgatggtgctgtgtgaggcaaacagctatggtatttatactgtcagctcagactgtccgacagggcctgctgatattatccagccatatgaaaatggtgaattataccctgccggagatgataaaaaactcactaccattctgaataaaatcgtttccggggaaacagaaataaaccattctgtgataaaaaattgcatttcacggttttatgaagatgaatatcttgcaagggtttcagatatatttaaataa

SEQ ID NO: 280056 - DNA, 144 bp, Morganella morganii
atgatttcatcatcactgatttttttgtttttgtttgccatgccggccagcccgggtgtgatcattgatatattgtatgctgccggccggataccgtataaggtatccatgtttaaaaataaatcatgcagagattatctgtga

SEQ ID NO: 280057 - DNA, 693 bp, Morganella morganii
atgaataaacctaacagtgatatggccagtgacggcagtctggccgggcagtttgcggctgcgttccgcagtctgctgatgaatattgacgacatgctgccggccacggtggtcagttatgacgacaccagtaaccgggccgtggtgaaaccgctggtgatgatggtgacgaccgccggaaagaaagtcgggcgcggtgcgctggctaatataccggtgtttcgtttcggcggcggcggtttttttatccgcatgccggtaaaaccgggggacttcggctggctgaaagccaatgaccgggatatcagcctggttttccagcgcggcggactggaagatgaacccaataccgcacgtctgcacacattcagtgatgccatgttttttcccgatacactcagaggctgggtaatcgacggcaaaaatacggatgccctggtggtgcagtctgcggatggtgctgtgtgtttatcgctgcacggggacaaagctgtattggatacgccgttgtttgaggttaatgcaccggaaaccatttataccgggaatgtgactattaacggcaatcacgctgtgaatggtgacagtaatgcggcgggcggtaccctgaaacacaacggcaaagacatcggttcaacccacaaacacagcggtattcagcgcggacatgaggattcaggagaaccgctatga

SEQ ID NO: 280058 - DNA, 357 bp, Morganella morganii
atgtcatcatatgcagaacatatcaccacggcgcacatccagtgcgatgcggaagaagcgctgctgccgctgttaaaagaactgaccgataaacagatgctgggcggctggcggttgcgcaaacatgaaataccgcctgccggggcagtttccccctggtatctgctgaaagataatgcacaaatcgcattgctgccgacacatcctttcgctgctgtttctgtcgcggatgccgctattgcggatgaggccgaaattacggcgcataatgaccggattgaacatctcagtaatgctatcaactccacttacggtattttatattgccatctgtcgtttaaggcattagcggtatag

SEQ ID NO: 280059 - DNA, 552 bp, Morganella morganii
atggctttttctgaagaaactcaatccattatcaattcaattctgccggccatccgcgaattagcggatttgctcaacagcgactgtgattatgcggacgatgcctgcgatacctttgccggtcagttgaatgagcacattgaggaaatgggcgaggatgaattctgtcagtatcacgatgacggtatgaccggctatgccctggcggaaatggtggataacagcgctatcggcaatagttttatggtggactggaaagacagggaatccgccattgcgctgctggcggacgcaatggattatgaggatatttcactggcctttgattatggcacggacgacccggaaaataatcttgccgtacatcagatttttgtccgcagtaatctgcagctgaatactatcggctggcatttactcggttttgaaaccggtgctgataattaccgtgaaattttattgcccgcttctctgctggatgaatttctggatattatgaacatactgggtgtggaaattgatatgaacgacgaagagtgtgcagaattttaa

SEQ ID NO: 280060 - DNA, 252 bp, Morganella morganii
atgatgataaaaaaagttaatgctgtcgcagggatactcctgtttattactctttcctcaggaagtgcgtcatccggaaaccgggaactgtcaggtgactggggaatatatgacagtaagcctgaatccgtatttaagccgcttggtgataaatgctataaggcgcgttttgagaatgccgccaaatattttattgctatctataatatgaataatgatgttaatgatttttgtttgattggctataaatag

SEQ ID NO: 280061 - DNA, 1398 bp, Morganella morganii
atgagagcaacacattccatattcaatttttcacttgatgaagagattctgattcagttctcgtttgctaatgtcttagttgaaacagttgattcaagttctgaattacttaaaaaagaaatacgaattagcatccaggagaaagtagagatttttgactctgcacatgagagcgcaagatatagtagacctaagctccttgttgcattaggtgttcttagctttataactgggcggaatttttctgtttatgaagtaaccagttcaagctcttccgtttcgagtataaaagagaacaaaataaaggatgttaaatgtataatcgaaggagatgattattcaagtcaacttgaggctatttgtaatagtataaatgacgaaacaggttcaaaaaataccttatttttttcattgttagacagatggagaaaagcgcagtatcaattaatagaaagtgaaggggaagggctttttgaagatgagtctctattatcattttttcatattttagagctattggttagtgagtatcaagatgaacaaaaatcggaagcaatagaaaaaatagacatgtttataaatgaattaatgagtacgaccttcaaatatagaggtccgtcgttaaatgaaaaaattaacgagaaaaataaagtacttaaagacattttgcttagtggtgatttgagatccattggttcaaaaataaactatatgtttgaaaaacaggggcttcttgatgagcgtgttcaatcccttttacaggagtttatcgctgccagaaatgctattgcacatggtcgacaggtttttagggagagtttaatttggccattacctcccttttttatgcttcatgccaatcatttcaatttgggctatttcatttgtgttttaactgcaagatctattgcttgccactataagctagacttgtggaaaagtgaatgggagaatattcttcaaaaattgccacctccattggatgtcattaaatcatttatcaaaaataaacattatcaaggtttatccaccgaaagattttatagtggagctatagaccatgttactcctgcttcaattgtagatgcctatattaaagggaaaataaagtttccagattttgagagttgttttatcgaacatattaataacatcaatttgacctgtgaaaatactactgggacagatgagccattatatatattaatgatactagcagactctgagagcaaagaaatctcggaatatagtaagaaaaatatccaatcaatttatgataataaatctttttttatgccaaacatcaaagactatttgcgattcgttgagcactataatattaaattaaattggtttcgggaatggattgttaaggggatgcgatatgagcctaagtaa

SEQ ID NO: 280062 - DNA, 1347 bp, Morganella morganii
atggctatattttctgaatcgccggataaaccggttaccatgagtaaaaatgaaatcgacaaaacataccgttactggcgtttgcatctgatgatcgtcagttatatcgggtatgctgtcttttatttcaccagaaagagttttaacttcgtcatgccggaaatgctggctgacctgggaataaccaaagcagatatcgggatggtcgggacggctttctatttaacgtacggggcatccaagttcctttccggtattatcggtgaccgttctaacccgcgctggtttatggggttaggccttattatgaccggtgtggtaaatattttgtttggcctgacatcttctattccggtatttattgctttgtggatggttaatgccttctttcagggctggggctggccgccatgttctaaaatactgaatacctggtattcccgtaatgagcgtggtttctggtggtcaatctggaatacatcccataatatcggcggtgctattattcctatcctgtcagggagtgtggcattgtggttaggctggcgttacgggatgattattccgggggtaattgcgattgttgtcggtctgctgctctgcttcttattgcgtgaccgtccgcgctcaatggggttaccgactgtcggtgagtggcgcaatgaccaggtggaaattgcccatgaagagcagggactcggtttatcacgctgggctatcctcaaagagtatatttttaaaaacaaaattatctgggtactggcgctttcatatgcggtgatttatgtcatccgcaccgggattaacgactggggtaacttatatctgattgaaacgcaccattatgatctgttaaccgcgaatgccacggtaatgatgtttgaaatcggtggtttctttggcgcgattgtggccggctggggctcggacttattgttcaagggcaaccgttcacagatgaacgtgatttatactctgggtattatcatctcagcggtgtgtttatgggcagtcccgattgacagtaaatatgtgttctccgcgctgttctttataaccggtttctttattttcggaccgcaattcctgattgcgatggccgctgcagaaaactcacacaaatatgcctccggcgcatcaaccggttttgtcagtttatttgcttatatcggggcatcagccgccggttatccgctgtcaaaagtgattgagggctatcagtggaacggattctacgggttgctgctgatattgtctgtggtactggtggtattgctgtttattgccatgcagctgcaatcggcaaaagccagaaaattgcagaaaagcagtataataacgaagtaa

SEQ ID NO: 280063 - DNA, 369 bp, Morganella morganii
atgaattggaacacagaggctgcggtgtcacatctgagaactgcagccaaaggcacatcaggtagccgatgcgcacaatacacgcgcgaagcaatagaggcgggaggcgtcaggatcgacaaaatggcccatgcaaaagattacggaatatcattagagcgggcgggatttagtgaagtactacaaggctcaactattcaggccggagatatcgcgattattcaaccttatacgggcggaaatccaagtggtcatatggccatgtacgatggaatcatctggatttcagatttcaggcagcgttctatgtaccctggtcccggctatcgaagaactcagccctcattcaaaatctataggatgcactaa

SEQ ID NO: 280064 - DNA, 456 bp, Morganella morganii
atgcgtgtagctatttttcttatcgcctgtcttttatccgcctgtagcctggcaacgaccaatcagccggcagagcaggtaagaaatttttataactactatctctctaagttctccacccttccacctgattacagggatccggaattacagcgttatgtgtctgaaaatacacttaatcgtctgcatagtgtaattgctgttccggaacaggaaattgtgacatcggactatttcacctacacccaggactatgacccggcatggataccagcactaaaaattggtgcagtgcatgacaaacagggatataagattgtagatgtatatctgggcattgaagatgggaaacatctgcaccttgaagcctgtttagagcaggattcaggggtatggaaaattgccagaattcgggatgtcacgaataattacgaacaaaaaatctttacgaagtag

SEQ ID NO: 280065 - DNA, 546 bp, Morganella morganii
atgcttttatctaaatatgcacttttaattatcgatatgcagcaggggctttttcatggccctgtttccccgtattccgcaaaccaaatcctgtcaaatatttgtcttctgattgaaaaagcccggcaggctcaggtacctgttttctttgcccggcacacaggccccgacaattcccctttcgcggagcagagcccgctgacacaactgatacacgaaatgaacgttaacactgagcgggatatcgtgttcgttaaaaagcaccccagctgtttccgggataccgggctgcagcttcagcttagccagagaggcgttaaagagctggttattgccggtatgaaaacagaattttgtgtggatacgacctgccgcgcagcaccggaactgggattcaggacggtgctgatttctgatgcgcatacaacaatggataacgaacatttgtcagcgggtgaaatcatcggtcatcacaacgttacgctggccggaccgtttgtgactctcgcaaccgcagctgactggcgttttcattctgaaaaataa

SEQ ID NO: 280066 - DNA, 792 bp, Morganella morganii
atgattaatacatatcatcgcgtgggtaatggtccccactccgtcctcgttcttcacggctggttcggtgacgcgcgctcatttgaagagattgaaccctggttgaatacccgcgcgttcagttacgtgttcatggattatcgtggctacggaggcatgcaggcagtgcacggtgcttacacaatcgatgagatcgccgccgatgcgctggcgcttgctgacgctctcggtattcacgaattcagcctgatcggccactcgatggggggaatggcgattgagcggattgccacgctgtcgcccgatcgggtgcgggcactcgttgctgttgcaccggttccctgcggtggcatttcgtacgatgctgcgacacgccgcctgcttgaagatacagccggacaatcggacaaccgcaaaaccatcatagaccgaagtaccggcggacggttaccttcatcctgggtcgaatggaaagccgcatattcgctgtcgcattcctctcaggaagcattttcagcgtattttcatgcatgggccgatactgatttcagtgatgagattgtcggatcgcatccggtaaaagtgctcgtgggtgagcacgatcccacattcaatgccgggttaatgaccaaaacctatcttcggcgctatccccgtgcaactctcgggattctggaaaacgccggccactatccgatgaacgagacacccctcgcgcttgtcagggcaatcgaatccttccttgccgaaataataagcgccgcggattcgctgaatctccgtataccataa

SEQ ID NO: 280067 - DNA, 1032 bp, Morganella morganii
atgtctgcaactatattaaacaaccgcgaagttaaacttatccgccatgtgcagggagaaattcaccccggagatttcgccatcacagaaacggctattcctgcacccggaccgcatgaagccgtagtccgtaatcgctggttccgtgtatccatctcaacaaggttaatggcgcaggaggatgcaaaagccgccgaaggcattccgttcccgcctctcaaccccggagacacgctggcggacggcgcgataggtgaagtgatcctggccggatcggcctgcagcctccctgttggcagccttgtcatgcatccattcggctggcgggaacatgcagtggtccgcgaacacgactgtaagctcattgattgccgtgaacctgacccggcggcttatctcggccatggctggacggcctatgccgcattgacccggggcattcaggtgaaaaaaggtgacactgtgttcgtttccggcggcgcgggggccataggctcgatggccggacagatagcccggctcttcggtgcgacacgcgtggtcggcagtacaggtagttccggcaaggcccgctggatgcaggaggaattgggctatgatgccgtcgtcacccgcgacggcgaccccatgatcgatcaactggcaaatgccgcccctgaaggcattgatgtcatcgtagatatggtgggaggagagcagctcgcagctgccatcaggctggcaaggtatggtgcccgcggcgttctgctcggtgcgctcaccgctgagctgaacgcagaaaaggcgtctttacaggctccggttaccctggacagctttcagctcatcttcaaagggataacattacgcggcttcagcgcggatcattcacctgaggcgtttggactttggttgcgtgatctcagcacatggaagcgtgacggacacattcatcttccgtccacgaccttcaggggtattgaaaacgcgataccggcattacaggaagcctgcgccggtcgcctcaaaggcgtggttctggtcgaactgtaa

SEQ ID NO: 280068 - DNA, 633 bp, Morganella morganii
atggctactcgcattcccgcagaacaccgtgcgatgcgcaaacgccctaaacagcagcgttcccggagcacggtggagagtatcatcgaggcaggcgctcgcgttttggcaaagagaggctgggcaaacttcacgactaacgaggtggcgcacactgccggcgtcagcatcggatcgctgtatcagtatttcccgaataatctggcgattgccgaggctatccgcaaacggcatctcgctgaaatcctgcaggcgcttcctgatatcagggcgcaggaagaaaaggttccgattgaggagcatattggccggttgattgatgcggttgtcgcacttcatgcgactaaccaggatctgcatcgcattctgatcgatgaggttccgcttgcaccgagggaattctatgacacttttgagcgtgaatatcatcgccgctatgaagacctcatccgcgcagcggccccgtcagacgataccggaacggatcacccggtcgcggcccgtattctcgcagatgcgctggaaggcattgttcattccgcctcccgccgcaatgaacttatgtcgcctgttataaagagggaagcgacgaagatgataatgttttatctcggggcacgggagcggacctga

SEQ ID NO: 280069 - DNA, 993 bp, Morganella morganii
atgagcgacttaacagaagattacaaaaatagcaagcatttatatgaaagtctattaatacaggcaagacataccataacatccttactgagaaacactgacattgaaatattttcaatagaatcaagactaaaagatgaaagttcatttaaagaaaaattacaaagaaagtcaggctataaagttcttagtgatattgaagacttgtgtggattaagaataatttgttattatgagtccgatttagaaaatttggaaaaattactcagcgaaaatttcaccgtattatcatcatcagataaaaaacaggaaactgatgtcgataaatttggttattcgtctaaccattttattgttaaatttaaagatgattggctaaatattcccatgtacaatactcttgagggattaaaatttgaaatccaaattagaacaatgttaatgcatacgtgggctgcaattagccatacagtgctctacaaacatgagtcagatgcaccacgacatatgcgaagaacatttagccaattgagtgcactcattgaactagctgatgaacaattctcaagaattaaagaaatgaaactagactatattaataatatttcatctagtgatgagaattactctaatttagaactaaattcagacacattgctttcacttataaataattacttcccagatagagacgtgattaaagataacctaactgaactcttggctgacattaaaaactatgacacccttgttaaaccattcgaagaaaaaataaaagcttgtattaattacctccctgaattagaaaaagacattgcttcattatttaatatttcacctccaatttggactgcacatggtatgtgtttcgctgtactagctctgaccaatccacaaaagctcatgaagctaatggacaataattctgaacttgatctaaatatgcatgaaatatatcagagttatgcagataaaattaattacactgcttaa

SEQ ID NO: 280070 - DNA, 630 bp, Morganella morganii
atgaaacctggtttccctgtaacagcaacgtctccggtacatatttcttatccgccacaggctgtggccgacctcgcggaatgcagaaatacatcagatgttcatctgataaaatattgcgaaaatctcgaatttcatgacattcatttttttaaatttatgcgttttgaagccgcaatggatatgattaacagtactgagtccggacacacgcttcttaattgtattgaaacactgttgcagttcaaatcagaaaaactgttggtatatcttacatcatcaatattgggcgccagtccgctttgttctgaagatgccataaatggccggggaacaggatcctgtttacattgcaattttgaactcgctgaacaacggccggatcttggtcagggaatggatgaaaaacagctgcaagccgttattttatatcacgaactggtgcatgtactgcataatcttcagggagagcgtatcgatatttttccggctgatggtattaaagataaccgcatgccgttatgggaagaagagtttcgtaccattggtctggatatgttcagcgctgaagatatatctgaaaataaatttcgcggagaaataggcgttccgctcagaatcagtttataa

SEQ ID NO: 280071 - DNA, 747 bp, Morganella morganii
atggatcaacggactaatcatgaaaaaacattaaatgataaagattacaataagttatttgatgttcataatagggattcaaaaactctcgaagcggcatttaaacaagcatctgatatacgaaagtttgagatagaactttattggaaaagggctacgtatttttgggcattaattgtagttgcttttgcaggttatttttctgttctatcgatagaagataacaaactggatgataagtatttggtttctttggttatatcatgcacaggttttgtttttacttttgcatggtttttatctggtaaagggagtaaatattggcaagagaattgggagaatcatctggatctacttgaaaataaaataactggaccattatataaaacaagaattggccgtgaaaatgaaactagatttatagaaaaatatattacagggccatcagaagtttcagtatcaaaaataaatcaatgggttgctctttatgtgtgcattacatgggcttttctatgcatttattcctcctgtaaggtagtaacaaagatagtggagaatgagttgcctttaatgttgttgtattttatcttattgattttattggctttgatgacgatattaatttgtttgctcatgtcacggaaaggaaaaacacatgtagattcccataatttaaaagtagtattgcgagaggtaaatattacatcagaatcaactttagatagtaacgataaccaacacggttaa

SEQ ID NO: 280072 - DNA, 1371 bp, Morganella morganii
atgaaaacaaaatcactctttcttctgataccgttattactatccggttgtgaccagacggtggtaaaagagatcggcattgaagaattgtcggagaacctgaacaacccggaatatattattatcgatacccggccggacagtttatatttcggctttaaagataaaggtgcggcccgcggcggccatattaaaggtgcgatgcagtttaccaccggctggctggattttatcgatgagaataagttcgatacgtttgtcgaagaaaaggggatttccaaagaaaaaaccctggtattttacgacagtgacccggattcactggaacgtattaccgccgaatttgctgccaaaggttttcaggtcagggcatttaaatcctttatccagtacagcaattctgatctgccgatggataaatacccgaattattttctgagtgtttctcccacctgggttcaggccgcactgaacggtgaaaaaccggaaagttataccagtgatcaaaagccggtgatatttgaagtgtcgtggggggatgcagaacaatccaaatcctatgcaacgcatattaaaggcgctttccattttaatactgactggatagaaaatgcgccggtctggaatttatccgaacctgacgttatcaaaaataacctgctgaaaaacgggatccgcaaagataccccggttgtcgtctattctgaaaatcagatggcagcattgcgggtattatgggcactgaaatgggcgggtgttgaagatgtccgtttcctgaacggcggtttaaatgtctgggcggatgcggaattaccgactgaaactaccctgaatattccggtaccggttgcggatttcggcgcagaaattccggttaatccgcaggtcactattgccatgccggcggaagccatacagggtcagaaatccggccttaaactcatcagcaaccggacatgggatgaatataccggcaaaatctccggttatgactatattccgcgtaagggtgaaccggccggggcaatatggggattcggcggcaaaaattctaatgacatgtccgattactatgacccggacggcacattacgtaatccggaagagatttttgctttatggaaaacccagggtattgaaccgacagaccaggtcgcgttttactgcggtaccggctggcgggcaagtgtttcctggtttatgacccaactggcgggctgggaaaacagccggatttatgacggcggctggaatgcctggcagatggatccgacattaccggtattaaataatattcagagccaaaaaccggcggcactgaatgattatggtgaaataatcaaaaaaccgggacaatcctgtaaaagctga

SEQ ID NO: 280073 - DNA, 516 bp, Morganella morganii
atgaaaaagctgacattgttactgatattattttctgcggttgtctccgcccgcggcggaggttaccgccatcaacctgatacgatttatatctgcaggttaacgccctttactgatttccatattgaggcgggcagcacggaagatctggcgcggaaaaataccgcacgccgctgtcagatgacacagggtgacggcagtattttctgcagagaagccgatgcgaaatgttcggtgagtaaattaattaccagagagtcagatttgcgcaaagccgttgttatttatgcggaaagctggcagaagggaaattatattgagatcagtgaagatatcccggatttatcccgcaccgatttcagcggcactctttcttcggtggttattccgccgggctggaaggttcgtttttatgaaggtgagaatttcaccggtgaatctcatactgaagtgagcggaaaaaagaatgtgactgattatggtaaaaaaatccgctctgttcaggttatccgctga

SEQ ID NO: 280074 - DNA, 1152 bp, Morganella morganii
atggtgaaaccgtcactttcgtcagaacgtaaacagcatctgttccggcaaattctggacggatacaaaacgcaggcagtgatcacccgtaaagggcttgcgatcaccaacaagctgcgtccggcgacggtgacgcagctgatcggcgaaatgatccagagcggcattattgctgaggacacgattaatcatcagcccggaccggggcgcccggaagtcggtattattccggatttccggttactgaccgccatttttatctgcattgatgcccgcaatatcacggcgtcgctggtggatatccggggtgtggttctcgccggtgtgcatcagccggttcacgatgataatgctgacagcgaaacactcctgaactgcttccggacactgatcagccgtctgctggaaaactgccgggcggatacccgtgtgcaggggattattatctctctgccgggagttatggacgcggaacactgccactggctctacaccaaccgctggccgaaagcccgccatatggatttatcacagctggctgcggagttttccattccggtctgcctggtgaaaaacttacaggcggagctgaatgcctttgtccttgaaaataatgaactgtccgccagacgcgtgctgtatgtccactggggggaagggattggcgcggcgagctattcaaaacagcagatcaatgccaaccagcaggggttgttcggcgagctcgggcagctgacgttcggcaattcacagacgattgaacaaatgttttctctgtccgcactgcgcggtgtgctgagtgaggcgctgcccggggatttaagcaatgaacgggcagcagcaaaaacattacagcatgcggatattacggccattccgtgcctgaaaacagcggcggatatctgggggcgggtgctggcaaatatctattttattctgttcccggatgtcattattttctccggtcctttcacgcacaatgaggcattattccgggaaataaccaccgggttcagtcagcatgtcccggattattttgagcagaatgtcactttcaccatcaaccacaaatcctatatgaatgaaatgcacggcgcattatccccgttctttgatgcgctggtggcggaatattgccaccagggaagttga

SEQ ID NO: 280075 - DNA, 1491 bp, Morganella morganii
atgcaaacgccggactggataacactcgcacttttcttcattatcatgataggtatcggcttaaatgcttaccgtcgtgttaaaggtactaacgatttttatgtcgcgggcggtggtctgccctggtggctggccgggatttcccatcatgtgtccgggtattccggtgtggtgtttaccggttatgctgcccttgcctatgcgaccgggtttaacctgtatgtctggtgggcgctgaacgtcactatcgcctgtctgctcggtgcgtggctgattgttccccgctgggcccggctgcgtgatgcgttacaggtgcagtcaccgacggaatatctgaaaatccgttacgatgtgaaaacccagcaggtgatcgcctggttgggcgttctgctgaaactgctggataccgccgggaaatacgcggcgatcggtgtgctgttctatggctttaccggtattccggtgatttacggtgtgctgatttccggtgtggtggccatgatttatgtcaccgtcggcgggctgtgggccgataccatgaatgattttttccagttcctggtcgggattgctgcggggatcattatgtttttcgtggtgcagtcacagctcggggatatcggcaccaactatctggatatgtgggacagactgccggccggtaacagtgactggttcaacggccagtacagcccgctgttctttgccagcttcgcgtttgtctgtttcctcagctataacggcggcacctggaacctcgcatcccgctttatcgcctcaccggacggtaaacaggcacgccgcgcgatgattttgtccgcgtctctctatctggtctggccgctgatcctgtttgcgccgatgtgggcagctccgttgctgatcccggatgttccggcggatcagcagacacaaatctactccatgctgacgctgaaatatctgccggccgggtttgtcggggtgatcctagcttcaatgtttgccgccacactgtcgatggtggcctctgatgccaacgccatcagctccgtgctatcgcgggatatcctgccgcttatctcgaaaaaagtgaaaagagccaacggcgaaactccgctgtggatggcgcgtactgtcaccttcacctttaccctctgcactattgtcctggcactgaatcaagagcatttcggcggcattatcggactgattgtggtgtggttcggcggattaatcggaccggcgtcgattccgatggttctgggtctgctgccgttctataagcattgcggtccgaagattgccattacctctatgctgattggtttggcagtctttgccggaacaaaactgtttgtcactgctccgtcaatggcgttatctgtcggcggtcctgtcttctgctctctggtgttctttaccctggcggccattgcggcacgcaaaaacccggtaaaaccggaagtggatgccctgatgcacaaactgagccgtgacggaggcaactga

SEQ ID NO: 280076 - DNA, 1269 bp, Morganella morganii
atgggattaaccgcgcaacagaaagcacaatgccgcgccttatggcagcaggagctggaacagaacatcctgccgttctggctgcgggcggttgatacagagtccggcggcgtgtttacctgcttcagtaatgacggcggcacgctgctgagtgagaataaatttacctggtcccaggggcgttttctgtggaatgagagccgtcaggcggcgctcatccgcagcgggttgtgtcagggggatgccgcccccctgctggcacatgcaaaacagacagctgatttcctgctggatcatgctttcctcgataacggccattgcgcctttttactggatcgccatggcaacaagctggaaatgaagccgggcgagggatatgacacctcgttttacgcggattgctttgtggtgatcggcctgtgtgaatacgcctttgtctccggagaaagcgggtactttgagcatgcgctggcgctgtatgacaatgtcagtcagcggctggcatccggccgggtgcggagtgaaccgtatcccgcgccgccggggtttgaaccttatgcctatgaaatgattatgctgggaacagtaacggaactgctgcgttatgccctccgttatcagcacccggcgctttcccggctgacaacccggacacggcaaagtctcaggcggatttttgcagagtttcacgatccggaaaccctgatcccgctggagatgaaggttactcctgagcaccgcgataccctgcttgcccgccataaaacaccggggcacaccctggaaaacatgtggttctgcttccatgccgcgcaactgctcggtgagacagagacgtatctgcccgccattgcgaaaattacctcgctgatgtggcacatgggctgggatgatcaatacggcgggttgttccgttataccctggcagacggctctccgccggccggacggttattaggcggtgacccgtatgaaaccctgatagcggacacctggagcagtaaaatctggtgggtgcattcagaagcactgtataccctgctgctgatggcggaacagaatgacgatccgcaatttttcagcctctatcagcagacggcagactatgtgctgagcaccttcccgaatcgtgaacagggagaatggacacaaatccgtgatcgcgaaggcgcgccgctgaataaggtggttgcgctgccggtgaaagatccgttccatatcatgcgcaatctgcaactgattgtctcactgtgcgggcagccgtcatga

SEQ ID NO: 280077 - DNA, 1284 bp, Morganella morganii
atgatcctcggtgtcagtaaaaccgatattacaccgtcactgccggtgagactgggcgggtttgcgttccggcatcagccgtgtacacaaattggcatgccgctgtatgcccgctgttttatctggaaccggcagtatgccgttgtcagtcttgaactgctgtttaccggggataaccttgaccgccagatccgcacggcactggctgacatcccgcaactggccggactggatctgatcctgactaccacccatagccactgtgcaccgcagacagcggataaccactcgccgcaactgggtgaatgtgacccgcaatacactgcgtttatcatacaacaggttattaccggcctgcagacagcgctcgccgccggaaagccggtaacagcacaggttgcagagtcagactgccctctggcggttcaccggcggctgatggtcaacggtgaaatcactatggcaccgaaccgggatgaacccgcagataccaccgccacactggtgcggtttacagatacagagcaaaaagtgtgtgcggtgctggtgcataaccagtgccaccccactattaccggcgacaatattctctccggggaatatccgggtgtggtgtgtgatgaaattgaaacggcgttcccgggggccgtctgtatgttgctgcagggattctgcggcgatttgcgccctgacctgagccgtgacgggcagttttaccgcgcggattatgctcagatggaaatctgcggaaaacagctggccgccctttttctcgatgcgctggaacagcctgatttgccgcttcttccgctgaccatcccgctgtatttccggcagtgtcaggtttcgctgcccttacaaccagtgatgaatgacgaacaactgattcagttccgtgatgaacatgcgccggacacgattgaacatgaatgggcggtttacaagctgaagcagaccgcacgcgggatcccgctgcgggcaacacaatccatcactctggcctgtctgcacctttcaccacagctgaaactgctgaccgtcagtgcggaagttgttaatcactaccagcaattattacgcgccaaagggaaatatttcctggggatcggctacagcaacggcatggccggttacctgccgtcagcccgccagatcgccgaaggcggctatgaaccacacggttcagcatactacttttatcttgatgccccgtttgcaccacaggcggagcacctttttaccggggcgttattcaatctgtcagaggaaaataataatgactga

SEQ ID NO: 280078 - DNA, 777 bp, Morganella morganii
atgactgattctcttgtcactgccggtcagaaagacctgctgcactatgctgtttatgcaaaccgtgatgcgacgggacgcgcggcggctgaaaaagcccgcgatattattgttcagtgtcaggcatcacagccggaagtccgtattatttttgcctctgcaccgtctcagaatgaatttttgcagcatctgcagacattcccggaaatcgactggtcaaaagtcacggcatttcatatggatgaatatatcggtctgccacccggtgcaccgcaggccttcagtcactatattcaggatcacctgtttgatgcggtgaagccggctgccgcacactttatccgggcgcatgccacggacagtgacgccgaatgccgtcgctatgcagagctgctttctgccgcaccggtggatctggtgtgtctgggggtcggtgaaaacggccatattgcctttaatgatccgtgggtggcggatttcagtgacagcgcggttgtcaaacgggtgcaactggatgaacagtgccgtcagcagcaggttaatgacggctgttttgcgcggacagatgatgtcccgatgtatgccctgaccctgacaatcccggccctggtcagcgcccgtcatatggtgtgtgtggtacctgctgccagcaaacggcaggcggtcacccggatgatccgtgatctgatcagtgaagatctgcctgccaccattttgcgccgccataacagcgcatttctttatctggataccgattcaggagcggatttatgctga

SEQ ID NO: 280079 - DNA, 1155 bp, Morganella morganii
atgctgacacaaatctgcggtaaaaccctgaacggcaagccggtaaccatcacagcagacaatggcgttattaccggtattgagccgctgaataccgataccccggaaaatctgccgtatgttgctgccggactggtggatttacaggtcaacggctatgcgggaaccgattacaacaccctgccgctgcatcgggatgatgtccgtcacagttacgaacgattgtatcagaaaggcgtaaccagcctgtgcccgacggttatcaccaacagtgatgaggcgatttcacagctgatggctgattttgccggcttttgtgccgccgatccccgtattagctcctcaacggcgggtattcatctggaaggcccgtttatttcgccggtcagcgggccgcgcggtgctcacgataaagcctgtgtgcagcattgtgatactgaaaaagtccgtcactggcacagagtatctcagggactgctgcggatcctgacactctccccggagcaggaagacggactggccggcaccatccgcttttgtacggagaataatatccgggtctccgtcggccataccgctgccacaccggagcaaatccgccgtgccgcagagctgggcgcgaccatgtccacccacctcggcaacggctgtgaattacagatgcaccgccataacaacccgatctgggcacaactggcggaagacagtttatggagcggcattattaccgatggttttcatctgccgccgtcactgatcaaagtgattttgcgcgccaaacagggaaaaattctgctgaccagcgataccaccgcattcggcggcatggcgccgggccgttatcacacccatatcggcggtgatgtggtactgacagagcaaggccgtctgcatctggccgcaaatgaggaattgctggcgggatcggcgcagtcagctcttgaatgcatcagctttctgatccgcagcggactgagtgacgcagaacaggcctggcattacgccgccgaaaacccggctgccttcctcggtctggccgacagaggcacactcgctgccggaaaacgggcggatatcgtggtactggatatacagggcagcacattgcaggtgctggaaacctatcttcagggggaggcggtttaccgcgcataa

SEQ ID NO: 280080 - DNA, 774 bp, Morganella morganii
atgaatacaacgactgatccgctggcgttatccgctgagtatctcggcaaaatcaccgcgcacctgcacacggtgctggacagcaaccgtgacacactgccccgggccgccgccctgctggcagagcagatagcccgcgacaatttgatccacgtagcggcatccggcgggcattccaatctcggccctcaggaagttttcttccgcgccgggggattgatgcacattaatccgatcctggatgaaggaacgctgctgacaaacggcgcactgcgctcaatggcggttgagcggctgccgggattcggcagaattgtaatgaataacaacccggtacaggccggggaagtgatggtacttatcaatgcttacggtattaatgcctcggtcattgatattgcccttgaagcgaaaaagcgcggggtgacggtgatagcagtaacgtcggttgcccacgccggggaaacaccggcagatcaccccgcgcgccaccctggcggacaaaatctgtgtgatatcgccgacctggtgctggattcacatgtgcaggtcggtgatgcggttatgcagatcccggggataacccagcaggtggcagccatgtccacctttgccaatgcattcctgctcaatgccctgataaccgaaaccatcaatcttctggcacaacagggaattgaaccgccaatctggaaaagcggcaacgccaccggcggtgatgactggaaccagcagtttattgaccgtttccggcaccgcatccgcttattgtga

SEQ ID NO: 280081 - DNA, 408 bp, Morganella morganii
atgactgctatcgcgttatataccgtctcagttctgctcgtgcttgtggcactgctgcatttcggctgcttgtttaccggcgccgccggataccgttttcttggtgccggtgagcggattgccgggctggcggagaaagggcactggtatcccgcattcaccgccatcagtgtcggggtgtttctgaccgttgttgcggtatatgcctttgtgacagcgggcagaacaaccgcgctgccgtatgcatatctgctgctgtcggcagccgccacggtgtttctggtgcgatcggcggtttttccgctgatgaaaaaccgctttaaaggaaacagtgaccgcttctggtatatcagctcattctgcagctttattttaggcgcgttactggctgccggaacctggttttaa

SEQ ID NO: 280082 - DNA, 1089 bp, Morganella morganii
atgaaaaaccgtattttgatagtgaccacactctttttattttctgtatcacctgccggccgggcagatgatgtgcgggtcagtgtgacgcatccgcaaataatccactctgcaccagtcattaccttgccgggaaaatttgtggcgaaaaatgaaattgctatcggctccccgctgcagcaacagacggtaacggcggtatttgctgaggaaggtcagccggtggagaaaaatcagttgctggcaaccctggaatcccctttgcaaagtgccgctgtcagacagttgcaggctgaaacggaaaaagcagcggcgtatatccggcagcaaagtgtactggcggcgcaatctcagcgtgatctgacccggatgacaaaactcgcccgcagcggcgtaatttccgccagtgaatttgaaaaagtcaaatcagacacccaggcccagcgggcactggttgatgccgggcaggcagaactgcgtcagttacaggcgcaactggcacgggaaaaaagccaggaagataaatcaaaaatctatgctccggccgccggaattatcagtgagcgccacgcggtacagggcatgctgtctgataacagcctgctgtttaagctgatcgaaaacggtgagatcgaatttgaggccactgcgggggctgatgaactggcgcaaatgcaggaaacttcggcagtcacgatgaaaacggcgaataaccggcaactgaacggcactgtccggtttatttcaccggtactttcctctctgacacagtccggccgtgtgcggatcacggttacggacggtactgatttacgacagggacagacaggtgtactgacatacaccgctgcgccccgtgagtatcaaagcctgccttacagtgcggtgcgcaccggcgcaaaaggtgaacgcacagtgtttatcgtgaaaaataacaaagtgatgcagcagccggtgcagaccggcgctattgataacgggcagattgcggtcctcagcccgctgccgtcagatgcggatgtggtggtcaatgcgcaggcatttttaactgataatgataccgtcacaccggtgaaggccgcacaatga

SEQ ID NO: 280083 - DNA, 414 bp, Morganella morganii
atgataaaacaccggctgttctctgtttttgcactgtttttattgctgcccgcctccgccggttatgcggagaagacacaagataacctgtatgcgtcatgccgccagcttaatgaaggcgaagtctatgacggactgaacacataccgctgtttctttattaagcaaaatatccgcggagtctattcccgttaccggaacgatttttatcagccggatgatctgaaaaaatcgctgcccgcaaaagacatgacctaccagacgacggatgcagaaatccgctatcgctggctgtcaccggataaactggagatgacggttactcaccgtgtggccattgaagaataccggtatctttttaccgaaaaaccagacggtacggtgctggatattgaagcggagacggggtattga

SEQ ID NO: 280084 - DNA, 390 bp, Morganella morganii
atgttcagcgctaatcaggtgtcagccggaaataaactcattgttgtggtgttattgttgccggtgattctcaccggctgcgcttacagcaccactttatccccgccgtcagacaaccggaatattcatttttctgctactgttccggttgatttggaatctctgccgttgtcggccatgtaccgctcaaaaaaatgcacccgtacccgaacaaacggtagcggtaaatcgtatgaagttccggggtttaacagtgccagatacccactgaccgtcactgcgaccggtgacgtgactacggatattcctgtaaatggtggcgggtattgtgactggcagctcagtaatactaatctgtgttatcgtaattgttataacgtattgatttaa

SEQ ID NO: 280085 - DNA, 774 bp, Morganella morganii
atgcgcggattatttgttccgctgttattgttgccggtgattctcaccggctgcgcttacagcaccaccttaaccccgccggcagacagccggaatattcatttttccgccactgtcccggcagacctggaatcgctgccgttatcggccatgtaccgctctgaaaaatgtacccgcacgcgaacaagcggcagcggtaaatcctatgaagttccgggatttaacagtgccggatacccgctgaccgtcactgcgaccggtgatgtcaccgcagatattccggtcagtggcggcggatattgtgactggcagctcagtaatattaagtttgaagtcaggctgaaaaatcctcagacaattgaccctgagatcacaaaaaatcatagttttaagacaatattcattaccgataataatgccccgcaggcgtttaatggcggatatatccctcatcagggggactttaatgagtcattgttattatttccatttataagtgaatattttcttggcggacataaaaaaactattgaggtcataggtgaaagcgatacgctgacctaccgcttatcaggtactgataatgttcatctgaccgtaaattatgaaagcgatatgtttagttactggactggtgtcaaagaaaaaaaagaaggaaacaaaacagttattacttatccgaatggtgaagaagaacgagaatcagaaagctatcccgattataaaaaactgctgaaaatctatgaagagcgtaaggatcatgttcagcgctaa

SEQ ID NO: 280086 - DNA, 783 bp, Morganella morganii
atgaatttacaaaataatgtacgccttaccgtgttattgcccgcgatggtccttaccggctgcgcttacagcaccactttatccccgccagcagacagccggaatattcatttttccgccactgtcccggcagacctggaatcgctgccgttatcggctatgtaccgctctgaaaaatgtacccgtacccggacgagcggcagcggtaaatcatatgaagttccggggtttaacagtgccggatacccgctgaccgtcactgcgaccggtgatgtcactgcagacattccggtcagtggcggcggatattgtgactggcagctcagcaatattaagtttgaagtcaggctgaaaaatccgcaggtaattgaatcaggtattactgataattttggatttaaaacagtattcattaccgataataatgccccgcaggcgtttaatggcggatatatccctcatcaggggaatttaagggaatctctattactatttcctcttatccgtgaacgatttctcggaaaacatgaaaaaatattctggctgataggtgagaacgatacgcggacgtaccgcttatcgggtactgataatgttcacctgaccgtaaattatgaaagcgacatgctcagccgctggacgggagttaaagaaaaaaaagagggtaactcgcctatcatgacctatccgaatggtgaaatagatccagacccggaaatttatccgaattataaaaaattactgaaaatccgtgaagagcgcaaaagtaatgttcagcgctaa

SEQ ID NO: 280087 - DNA, 1935 bp, Morganella morganii
atgcaatctgaaaatacaggatccgtacaacataatgatcagtattgtacaaattgtaatgcccgtaaggcatggattgaaatcgttctggttgatgagctgaatcgtccgattgccgggatcccctataccttagccgtttcaggaggagaaacacggacaggaatatccggtccggacggcctgatacgggaagaaaacctgccgctgacctccgtggtattaaaaacggatgcacaaaaactggcggatgagatggaaatccggccgctgcgtgaagggcgcggaccggagcactcagaggtaaaagccctcgcggcactgaatgaccacggttaccgttatgcggttatcggcgagttatgtgaccgggcaccggagattaaaaaatggaacaaaaacgccttcggcctgccccgttatcactttaaaagtgagaccggttttaccggaatacggttttccggtaaagattttaaccgccgccatgttattgaaatctgcccgttcagagcctggtcgctgatactgaaccatacctccatgtatgacctggtgaacgctcataatctggggtttctggcactattgtcctatcgggatgaaataatgctggaccctgatgagccgggtaccgatatgcgcccatccctggatatcagaaataccgtaacctcctttttttataatacctgttttgacctgtctgagattccgtcgtttgaggacggccgccggttttacggtattgcgacagatgttccttttcgtgagcggtattctccggccgtttttctggacagctcacaatcggaaaacagggaatttttcgagcacgacacccagatgttctttgtggagaacaacacccagattattgtctcctggcggggaaccgcagggaaacgggacctggtgactgatatatcttaccatccggtgccgtatcccggcgtgaagggcggcaaagcacattacggatttttaaatgcttatcagtgcatggagaagtattttaaggaaaaattaaaggctataaacgatgccgcggataaaaaacaattatttctctgtgctcacagcctggggggaacggccgcattactgcatgccgcggatttaaaagcccaagcaccggttgtgtatacttacggaatgccgcgggtctttaccaaaacagccgtggaggcgctcagggatgtcaaccatttccggcacgtgaatgatgcggacgcagtcaccaccgtgccgtcagacactaatatggataactggttttttgaactctgggggccgttcggcgcgattctgggaacggcctggactattgccacggccccgaccctgccggtacagaaaatgctgccggatttaggggaggctttctggcaccacggcaaaaccgtttccttttttcaggccaggcaaatcggtgaggcatacatgccggcaggcaacggctcggcactgacacgcgcccgctggcgctttgactccggctataaattttatctggtgccggatatccggaaagacctggatgaggatttaagacaacagcaggaataccttatcagtaccgttgataaaaccgtgctggaaaagatttttcctcagcatactaacccggaccttgatagtgtggtattcagctttctcgaccattccatggtcagcaactatatgtcccttatcagtaatcaggtgctgagacagcttgatgaaaacaacacaccgtatgcaaaaagaaagcgtgacgattttatttcaaaaatcgatcatagtgatgcctatccgccgaacgtggcgcgtaataatacctttatccatctggaaagtgtcctcggtgagctgtttaaacatcagcacagtaatgcagtcagccagaccgcactgacccggtttacggagaaagcccatgaatttacaaaataa

SEQ ID NO: 280088 - DNA, 801 bp, Morganella morganii
atggcgacgacctggcgtacgtggatagccaatgtcagacaaggtgacgtatattttttacttaacaggctggcacactctgacccgaccgctcttttttatcatcataactggattgatgaggccgttccgctgtatgcgggaacgccgttatcgcatctgggcacggcaggtccctggcttgtcagggcaaaatggcaggcattctccggtatggctgaaatcctcgataccgggccgttttcagatgacagctggggatgggcttatcacagtgaggatagctgggaaaatcagatagcacactggcaaaagtatcagctgataacgtttgaaggggaagaacgggttttgcgtctgtttgatcccagagtagcagctgtactgattccggcctgtaaaccggcggactggtcatctctgctgaggccgctggctgattgctgtattccgtcctcacaggggaacagggtcgttaaccgcctgccatccaccggttattccactgtgccgtcacgatttgaaccgggcgtacatctgatgcaggcatggaaccggtctgagcaggcccgcaggaatgtggcagataattttcagattaccttctgggaagaatatccggagttggcgttaactcttgatgaaccgccgggacgtcttttttctctgattaacagctgtatggatgactatgagaatgaccttgtggatgtcgtctggctgaaaaatgatatgtttatccggtatctgaaaaacaataatcttatgaaaaattattcagggacagtcaatgcaatctga

SEQ ID NO: 280089 - DNA, 1995 bp, Morganella morganii
gtgataccatccatttctgagttattgccggggcagtccgggctggtgtttacctgtaaaatcggccggttaccggagcagacctttcaggtcaccgaattctcgctcagtgaatccctttcttcactgttttcactgaccatcagcgcggtcagccagctgccgtcgatcacctttgaagaacatttaggctccgccgcctcactgacggtcacccgagacggtgtcaaagtccgcaccgtgcaggggctgctggcctctgccgaacagggcaataccgacggtaacaaaacctggtatcactttctgatccgccctgaaatgtggatcatgacccttaaccaggacagccgtatctttcagaagcaatccgtaccggaagtcctcgctacactgctggatgaagcgcatgtcaaaaatgagctgaaattttatcaggacgaactgcatcagaaacgggattacatcactcagaagcgcgaatccacctatgatttctggtgtcgcctggcctttgaggaaggaattaatttctggttcgaggaaggtccgaaactgttttacagcgacaaccacctcggcatgacagccggtatcaatctgacctataacccgcaggcggataccgatatcagcgacagcacggcgttttcctggcgctacgccgaacagctgtgcagcgatgttattatccagaaagattacaacccggatcgcccgtcttatccgttccagcatgaagtcaccggtggtgtgcataaacagcacccggtgtatgaaagctatggccgctaccgcgacgatgagaccggtaagccattcacgcagctgcgctatgagcagtcacagaaccagcgccagaccggcaccgcaggcaccaactgctttgcactgatgccgggtaaaatcttcgccctgaaaaaccatccgtcggctgcgatgaatcagtcgtggcaggttattactgtgaaccatcatggtatccagccgctggcggataacggcggcggagagggaaccaaatttagtaataccgttcagtttatccccggtacccgcgaatggcggccgccgtaccgtttccgtccacaggcggacggcgacgagctggcaaccgtggtcggcccggaaggggaagagatttacaccaacgagcagggcgcggtgaaggtgtatttccactgggatcgctatggcaacccagatcacagtgcttcctgctgggtgcgggtggctcacggctggaacggtgacggattcgggtttatgtcgatcccgcgtatcggtcaggaagtgattgtctcgtatctcagcggcgacatagacaggccgattattatcggctgtacctataacggacgcaataatcccccgctgaacctgccgaaagagaaaacccgcactaccttccgcacgcggactcataaaggtgagggatttaacgagctgcgttttgaggattcagccggggaagaagaaatttatattcatgcccagaaagatatgaatgcgcatattgaacacgatgccacctggcatatacagcatgatttaaagcggcggattgataacaacagtcacaccgaactgaccggtgatgagcatgtcatcatcaaaggctcgcagaaacaccagaccagcgggaatgtttcgctgcatatcaaaggggagcagcacacccgcgcggacaaaaacctggtaacggaaagcggacagcaaacccatcacctcagtgacggtaaaattatcatcgaagccggaacggagatcactctcaaagtcggcgacagttttgtccgcatcacacccggcgcgattttcacctccggcaacctgaatatcggtgacagcggtccgggcaacggtgtcccggtcagactgatgccgccggagggggtaccgccggccccggaaccgtatccggtaaaaaaatactgtgcggtggcagcgcagcattccggcagcatgctgattaaaccggcggaggaagagtga

SEQ ID NO: 280090 - DNA, 519 bp, Morganella morganii
atgccaactccatgctatatctccatcgaaggtaagactcagggcaatatcactgccggtgcgtttaccgctgaatccgtcggtaacatctatgtgcagggtcatgaagatgagatgctggtgcagcagtttgaccatatcgttaccgtgccgacggatccgcagtccggtcagccatccggccagcgtgcgcatcgtccgtttaaatttaccgttgcgctgaacaaatcggttccgctgctgtacaacgccctggccgccggtgaaatgctgccgaaagtgcagctgaaatggtaccgcacctcggttgagggtaagcaggagcatttcttcaccacgtcgctggaagatgcgactatcgtcaatatcgactgcaaaatgccgcactgtcaggatccgcaaaaaacggactacacgcagctgatcgaagtgtcactctcttaccgtaaaatcgactgggaacataccgttgccggtacctccggtgctgacgactggcgtgcaccaatcgaagcgtaa

SEQ ID NO: 280091 - DNA, 1287 bp, Morganella morganii
atgcaagacagcattcagacaggtgcaaatgcaaatagtgatttaaaaaagataccctttaccaaatatgatgccggatgggttgtattatgtatcgggatggcgatcggttccgggattgtttttatgccggttcagatcggtattaaaggtatctgggtatttattgccgccacattattgtcatatccggcgatttactggctgcagaatttatatctgcggacattatcggaatcagaagaatgtgaagattatgccagcgttatcacgcagtatctggggaaaaactggggggttgcccttggtatcgcctacttcctgatgctgctgcacggcatgttctcctattcgctcgccgtgacctttgacagtgcctcctacatcaaaacattcggtttaacagaaggattgttatccgattcggtgtggtacgggctgattatcctgacagtactggtggctatcgccgcacagggggagcgcctgttatttaaggtctccggcccgatggtaatagtgaaattcgggatcatcgtattactcgggattgtaatggtgccttactggaactttgccaatatcagcgcgttcccggacttcctgccgttcctgcgggatgtgttcctgacattgccgtttaccctgttctccattctgttcgtgcagattttaagcccgatgaatattgcttaccgcagactggaaaaagacaagcgtatcgcaacttaccgcgcggtacgggcaaaccgggtggcgtatattatcctggccgttgctgttctgttctttgccttctcgtttacgttctcgataagccatgaccaggctgtctccgcgtttgagcagaatatctcggcactggcgattgccgcacaggtaattccgggatccgttgttaaagtcatgaccgctatgctgaatattttcgcgattctgaccgcgtttctcggcatttatctgggtttccaggaagcgattaaaggtatcgtggtgaatatcctgacccgctttatgccgcaggagcgtattaatcagaccgtactgcattacggtgtgtgtatcggggtgatcctgtccctgtggttctgggtctccacccgcttctcgattctgttctttatgcagctcggcgggccgttattcggcgtggtttcctgcctgatcccgtgctatctggtttaccgcgtgccggtcttacataaattcaaaggtgcaacagtctggtttattatcttcttcggcgtgctgttgtgtctctctccgttctttaaatttttcgaataa

SEQ ID NO: 280092 - DNA, 768 bp, Morganella morganii
atgtctgaattccgtaatgccaaaaataatgtttatgatgatcctgttttctttgaaaactaccgtcgtctgcgtcagaacgataccggtctgaacggtattctggaagtacctgcgctgcgtgcgttacttccctgcctgaagcataaacaggtgcttgaccttggcagcggcttcggtgattttgcacgttatgccagacaaggcggcgcggcatccgttaccggcatagagttgtcggaaaaaatgtttacggaagcacagaaactgacaaatgatccgcatatccgctacctgcacggttcaatgacctgtttacccgctgagctgaaaaattttgatattattgtttcttctctggccattcattacattgctgacttcaccgcactggcaaacgacatgtatacaaggttacagcccggcggatattttgttttctctgtggaacatccgatgtgtactgctttatgctctgcatctcagaaagatgaaaatggccgctttgtctgcatgccggtggataattatcaggacgaatcccgccgtctgacacactggtttgtggatgatgtggtgaaatatcaccggacagtgcaaagctatgtcactgcattgctggatgctggttttgaactccgcgccttacaggaaccgaaaattccgcagaagtggctggatattcgtcccgaaacagacaaatttaaccgttatgcgccgtttttattgctcagcgccggcaaacacaatgcaagggcaaaaaattaa

SEQ ID NO: 280093 - DNA, 1047 bp, Morganella morganii
atgtttattctgccttgcgaacatttaccgcacaccgccacctggatggcgttcggcgcggacccggccatctggtccgcttctcccgcggaaaaagtctgccgcgatcaggccgcacttgcgttagcgattgcccgctttgagccggtcaatatgctggttacccgtaaaaacaaaaagctggcacagcaactgatgggtgacactgtcacttatatcgaatgcccgctggatgacatctggctgcgcgacagcggggcaaattttgtgtatgacaccacaacaaaacgccctgctgccgtcagctttaattttaacggctggggcggaaaacaaccggcaaaacgggattcacaggtggctgctgtgatagcggattacaccggtttaccgctgcatatcagcccgctgacactggaaggtggtgccgttgaggtaaacggaagcggcaccggtatttttacccgcagtgccattctcaatgataaccgcaatccggggatgagccgtcagcggacagagcaattgttatcgcactatctcgggctgaaaaccattatctggctgaatgggatccgtaatcatgatattactgatgcacatattgatttttatgctcggtttgtcagtgaaaaatcactgattattgcgatggaaaataatccgcagtcgtttgagtatgatgtcacccgcgaccatgccgctgccctgcagacgctgaagcagcataccaacctgattgatgagatacatatcctcagtaatccgcgggttacgcgggtaaaccgcgaaaaaacaccggactttgccgccggttatattaattactatccctgcaacagcgggataattgtgccggaattcggggacgccgccgcagatgaacacgcggtacagttgctggcatcactgtatccggggcgaaccgtggttcaggtcaatattgacggaattgcctccggcggcggcgggatccactgtgcgaccatgcagcaaccggattttacttcttttactaccgacggacagacacatgacaccgattaa

SEQ ID NO: 280094 - DNA, 1044 bp, Morganella morganii
atgacaccgattaactggcagactgccgccctgcacgacctctccccgcagacactctaccgcctgctggcactgcgcagcgcggtatttgtggttgaacagacctgctgttatctcgatccggatggcgccgatctcacggcactgcacgtttgggcggaacaggacggtgaaatcatggcctgctgccgtattcttccgccggaaaacagcacggcaccggcagccatcggccgggtggtgatcaatccgcaattccgcggacaaaaactgggctatccgctgatggctgccgccgttcaggcggtataccggcatttcgggacacggcgcattgttatcagtgcacaggcacatctgaccgctttctatgaaaaatgcgactttaccgtttgttctgacgtttatgatgaggacgggattccgcattgtgatatgttccgcccgccactgttgctgtcggctcaggagcggcaggatgtgatgaccttcgcggacagtgacccggatgaaaacccgtgggttgccggaaagcccctcacagctgaaattacggtcagtgaatatgatcccgcctggcccgccgtttatgcacaggaaaagcaacgcattctggatgttctgggtgataaagctctgcatatcgaacatgtcggctcgactgcggttcccgggctggccgccaaaccggtgattgatatcgatctgattgttgccgacccggccgatgaagccgcatggcttcctgcgctgatcgccctcgggtatgaacatacggtccgtgagccctcatggtatcagcaccggatgctgaaacgggatcaaccgcaggtcaatctgcatgtatttgccccgcgctgcccggagcatctgcgtcatattttgttccgcgactggctgataacccatccggacgatctcgcagcttacgcacaaagtaaaatgacggcaaaaaacggcgtcagtaacaccatggattacaaccggaaaaaacacgacaccgtacagcagatttatgcccggctgtttgccgctttgccgtaa

SEQ ID NO: 280095 - DNA, 1593 bp, Morganella morganii
atgaaatcatggttcagtaatcttttctccggcaaaaaaccggcctggccggtggtatgggatgacactcttccgtcagcgtatcagcagttactgccctggcgcggggaaccgggtccgctgccggaaaatctgcgcaggctgccggataccctgccgcgcaaagagaatgaaatcagctggtctgacggcgcgctggacggtgttttttctcatcatatggccggtggtgatgaaacggatgtgcaaaagatccgtgacttactgaaagccgcagcggagaaaggggataaggcatctgtttccgcgtttctggcggctgtcagagaggaaagcccgctggggtacattgacccgctgttacaactgatcgtggagcagcagggcattgatgcggataaactggctgatttcagtgcatggctcgcgcagaacagcccggagcggaatgttatcaagctggcgatgtctgtactggcttttttcccggggcaggaaaacagcgatatcctgtttgtgctggcggcccatgatgagtttacgctgtatgccattgtggcacaggccgcaatgacagaaaatccgcaggcgtatgaagcgctctggtggcatatggccagacgtgttgatggctggggacgggtgcatatgattgaacgcattccggaaaatcccggtaaaccgctgtgtcagtggctgctgcgtgatggttataataatgccgtgatgaatgaatatacggcgtggtattgcgccacacaggggcgtctggcggaagcactgacggaaccggcagatgcggaactgctgcacggtgcaacagagatccttcaggcgctgtttaacggtggccctgcacaggatatttcagactatgacgaccgcgcacagtgctgccttcgttaccttaaccaactggcacacactgagcctgcactggagcattacagcctggtatggtcggtgaatgactacctcagcgataacccggtgcagttcggtaacacagagatactgaaagggctggcggctgaattgctggcaagtccgcggatagctcagcttgtcagtgagcaaatccgcagcacagatgaacagattcgttatcaggctatccgcgccgggcggttgttccggatcgatatctggcccgaactgtttgtgcagcaacagcagaatgccggaaatgatgactggctgacgctgatgcagactgatgatccggaacgggcccggcaggtgacggaactggcagagcagcagctaccgctggtggcgatagcctccggaccgtcagatgcgatgggattagggccggactgggaaccgcacagcaagctggactccgtattacaggaattgcaccgttttccggatatcggctggccgctgatccgctgcgggctgcaaagcccggttgtccgtaaccgcaataaggcactgaatgcactgtacgtcagagcccgcgaaagctggccgcaggatgtggccggattgctggaaaaaggggtaccggctgaacctgataatcaggtaaaagcgcggatgacagccttactgaagggtgaaaaagatccggcagacagagattaa

SEQ ID NO: 280096 - DNA, 981 bp, Morganella morganii
atgaccggaaaacagagatatatctgcgaggagatgattattgcgataaccagatgcggtctgttaacgctcatctttctgctccccggatgtggtgacgaaacacagcccgacgcacctgaactgagccggtattactatagtaatattaccggggatgatctgttttttacggtaaacggaaaaagttatcaccttgctcatgacgcagagggcattgtttatctgccgtccggcctgaataagctggaaaccccgcagggacaacagatctcctttatggcttatcccgggaacagcggcgggatcctcaatccgtcccgtgcccgttattattcctataccattcatgacggcgatacgctgtattcaccgcaatttaattccatggtgaagacatttaaatttgacggccattattatcagggaccgttgcggaccagtaatgccgacgttatcgataataacctgtttaaatgccggtatccttccgatgtgccggatataaaagccgtgctggacagatttgttgccggggaaaaaggaatgatgacaatctgtatgaatgaaaatgaatttcgccggttcctggaatacaatccgcgcggtgtcagtttattaccggataatacggtgatcacaccggaacaggatgcggataccggtaatactctccgcccgcatgatattcagtttcaggatgcggaattacgtgaaggtgctgaggaaattgcgggtattgtgacggagttccggcatcagaccgatgtgacaaaaaaatatgaaatatacagccgttatcacacggtactgatgcggatggctaatcgttaccgtcagatactgctgcaaagcgataaagagaataagacagataaagaagagagccggaagttcagtgaatttgtgcaagaaaccggtgaaattttcggtgccggggttttaccgctgcaaacggatgaaacgcccccggcacactga

SEQ ID NO: 280097 - DNA, 603 bp, Morganella morganii
atgtctgattttttattattttttaaagataattcagtgtctatcactgttgtcattactattacaagcgtttttgtaacattttggttttcaagaaagaattacaaattagccaaggacaagcttgaaaaggataacgttgctatacaagctaaaattgaagcagacaaaaaatctctccgccagcaaatgattacaaataacattgcacctatgaggcaggcttggattaatgatgtcagagaaaaatcagctgaattattggctgatttacacttgatactatatagtaaaatatcacgtgccaataacaatgatataattaaaaaccaagaggaatcagtaaaggatttaattaaaaaaatacaatacaaatggtcttatttaagcatattacttccattaccaacaaaaaacaacccagagggaacatcacaaaaaataataacctgctttaatgcgctaatggaattaacatacttaccaaatgataaaataaacaaaagtgatataaataaatcattaggagaatgcactgtatttttacgacaactacttaaagaggaatgggaagtaacaaaatcacttaaagaaatagaataa

SEQ ID NO: 280098 - DNA, 369 bp, Morganella morganii
atggaactggcactactgacaggtcagaaaatcaatgagatatgcaaactgaaatggattgacatcaaagaagggatgctatgggttcagcaacaaaaatcagggaataaacgtgctacagacataacggtatcgcctgagtgtcccggcatgtcctcggaagatgtgattaagaaatattattccgtatatagcggatgtgataaccttatagcttcatctttcaggaaagaaataacgaccataaccgtttccggggaattcgtgaaagcaagggaagccacctcagttaaccggggagacaacccgcctggtaatggttttgatcgaattttgaatgatagtgacttatcgattctaatttattga

SEQ ID NO: 280099 - DNA, 831 bp, Morganella morganii
atgactgattttaaccgtttacccccggcactggcgccttatgctgatgccatccgtgccacggaaaaaccggtggcagagatgacactgacaccggctgatgatttgtcgctgtgggaaagccatgttggcggaaatccctatctgccgctgacagaaagctatccgctggacagtgaaggtgttccgctcagtctgcttatccagattaattttgcacagatgccgccgctgccggattatccgcgcagcggtattctgcagatttatcacgcaggtgatgatttgtatggtgctgattttgacaatccgcaggaacagaatgatttccgggttctttattttcctgagataacggaagacccggcacagttgcatcaggatttcagtgctgtgcaggcggcccgcgaagatgaaaactactactcgccggtaaccggacagtaccgcatcagttttacaccgtcggtgcagtatatcagcaccggagacaccgcattcggccgcaccattttcaaccgtgatgaactatatgattttgaggatgagtttgagggcggggatttctatgaagaatgggttgaaccgtatgatgagcatttcccgggggaagggcaccatgtcggcggttacccggcatttacccaggccgatccgcgtgaataccgcgacgaactgaagccatatgtcctgttgctgcagcttgattccggcagtggtgacgtggatatcctgtggggggactgcggtatcggcaacttctttatccgtccggaggatctgaaaaaagcagatttctcccgtgtggtctataactgggactgcacctga

SEQ ID NO: 280100 - DNA, 1134 bp, Morganella morganii
atgaaaattacccgagtccgtctgaaaaactggaagaatttccggaatatcgatatcaaaatgaatgaccgggtatatatcatcggccctaacgccgtgggtaaatctaacttcctggatgttttccgttttatgagtgacctgtgcaaggatggcggcggcttacagaaagcggttaatgatcgcgggggtatcactaagctacgttgccttcaggcgcgtaacgatactgaagtggctattattctggatttatctgatgatgataatgaatgggtgtatgaattaaaattcaaagcatccggtaaagggaagcaattaattcatattaccagtgaaaatgtcacccgtaacaatgagaccatattgtcccgtccgaacactaatgatcaaactgacgagatacagcttacacaaacgcatctggagcaaattttagcaaaccagccattccgtcctgtggctcagttttttgcctctattacctatttgcatattgttcctcaactgcttaagttcgctaaagaaattggtgtcaccaaaattgaggatgatccctttggtcagggatttctggaccggctggcgaatacgaatgcgaaaacccgcgatgcatggctgaaaaaaattcaggccggtttatctattgcagtaccgcaatttaaagaactccgttttgagcgcgacagttccggtcagccacacctggaagcccgttacgaccactggcgccctaatgcaggatggcagaaagaagaccagttttctgacggcacattaagactgattggcctgatgtggtcacttcttgaaaaaagacaattgctcctgctggaggaaccggaactttccctgaataatgaaattgtccggtatatccctgaagtgattgaaaatacgctgaaaggagcacgaaaccaaaaacagatccttatcagcacacacagtgtttcgctgttaagcaacaacatagacggtaatgacattattctgcttctgccctctgaaaacggtacaacggcacgttcgccggatgacgatgaactggccgcaatgcgggctggtctgacagccgcagaaattatgttaccactgacagcaccagccaatatcagaaaaatgccagagatataa

SEQ ID NO: 280101 - DNA, 606 bp, Morganella morganii
atgaaaatttcgatcgcgacagaagatattttaacagaagaagttatggtcaaaatactgtcttctgtcagcgatgttgatatcccgtttaaattagggaagaagggctgtggttatctgaaaaagaacattgataaattcaatgaattatcttatcgtcataatgtccttgttgttttcgattcagacttacaaactaatattaacgaattccgttcatcaatagaaaaagaaataaaaaacaaaagccggagcctggatatcattattccggtacgggaaatcgaaagctggattttagctgatcgcgaaggattaagtgcatttttgaatatttccggcgataaactctgccggtcaccggatgatttacttgacccgaaagagaaaattataagtctggcgaaactgtctaaaaatgcggatatacgcaaaggaattccgcctaaaaaaggtgcagcctcaaaagtcggtctgtcttacaacacgctgctgacccgttttgttcaggaacgctgggatattgacagagcaaaagtgcattcacccagtctgcgtaccgcgctgatgacgattaaccgtattgtcagtcaggttgactcataa

SEQ ID NO: 280102 - DNA, 987 bp, Morganella morganii
atgatgcattcagacaccagtcctgaacatatcacactggctcatcttaaagccggaattcatgaaatcagtaatgacacagaaatattatcactccctactgctgatttacatattcagttccgcgatataaaaaaatggcagacacggatgctgaatattatttcatcagaatccaccgctatttattctcagctgcatagttttgaaccggatagtttatttttcgcactcccgccggaggcgggattaaatcctgtttcactgcctcatgaaaaacagatttatgaatttctgctgagtcagattaattcagtctgtcactcagtgaatacggttaacactcagtttaatactgaatatgacgccaccgctattccgatgcttcagggagggttattacatcatcagtcttttctggacagagctatcactgttgcgctgccggatattgagaaatttacctgcgataaattatattgggaagaaaaactggcggtggttattcagtcagaagagattattcatcagcgcggattccagtctgttttcggcacgacaaccctgccgactgccgaacaactgaaaaatgtggaactatcctcttccgagcggtttattctggatgagctccaccgcattatttctgctgtcgtaaataccctgacagaggggctgagctatgttcagctggtggaaacccggaccacactcagccagcggatatatgatctcagtaagctcatccgcaatctgaaaaaagacctgaagctcctgcaggagcagatgcaggaagtcagtaatgctctggtattactgccgaaactgcgggaatttaacaaccggatcaataccgtattattatactggctgcgaagtgtcagtcagtatgagccttatttaagccagaatgtccctcttcccgggctcgatagccttattctggcgcaccgccgctatttttcggtctttatcggtatggcataa

SEQ ID NO: 280103 - DNA, 996 bp, Morganella morganii
atggataatctaacaaggaatcagcattttatatctcagacagagcagcgcagtaactgcattgatgagagcaaaccaaaagataagaagcgaatctacaaatttgaaattgcagatcgagaaaatagtgttgttcgcttgacaaatgctgaaggcgtcaaaataaagactaacctctcttttaacgatctctttagttttgatgtgaaaagctcaaggttaagaaagaatttagagaatttctttcataaatttgaaatggacttagctccagcaactggcctccttatctccgagtccaagttaaatcctggaagcgatgttttgaagggcgccgctgaacgagtgctcaaagcaaagttcatggggtggattcgaaacccttatttgattgctcaaacaattaatatatataaggaattggttgggatgtatccaacggatcctcttttgctagtccacttctccgacattcgtgtgggagaaaaacctcacctaactgaggtttgcgcagagttcggggtgacgagtgagctgtatttccagtggttggagattctttttctggcgttaatgaccccacccggagcaacaaaaagtatcctagagtcgactgttgattggattgttgagtcaaaggggaaaatgggccatttgatagtcgcaacctttgacgacattccaggttgtagagtagcattacccgatacaggctaccttcaaggaactaatgatccccatcataatatgtttctttttaatttgagtcgtagtgcgtttgcttcattcaatgtggtggacttgtcaaagcagaaccttgtaaatattccgccacaaataaaggggaaagtagagtcgttcaacataaaattctcagcacagcatcatcacaatgatatgaggttactaggattttttaacgggctggccacctatcaagccaattctcatattttttgtgctgaccctaagattttcggagttaccactatttaa

SEQ ID NO: 280104 - DNA, 837 bp, Morganella morganii
atgaacggatcatgcgccaaaaacattattactcgctacgtaggtttgctatcagacctcatatctcctgcctatgaacgcaagtctattgatgagactcaagtggcatggactcctgaaaaattaaatcttgtccttgctgatatagtggcaaaatctcttgggtacagtggcggatcgaaacttaatcattacctcaaattttcatctgaaaaagatcattcatcattaattgcaaaacttaagagtgttaaatttgtcgaaagtgtgaaagggtcaatagagtcattatttgatattgaaacacaccataccctagacatactttattttttaaatgaaatgttgactttttcagttaatcttcacccatccggcaatcatacccttatgtgcaaaagagaaagcgaacctttgccgtttgatataattagtccggttttttcaggtaattctgatgagcatttattttactcagcattattacgtctaaatcaccttttaattgatattggttcagatgtgaaattaaactcagtgagattacctcatgattttaagggtgttattttacacatggacaatgatgagctttatttgatacgattgtggatacataggcgcttttccaaggatgcagatattgaagccagaaaggctataaatgaagccttacgcaatttacttatattaaatgacatgattatcaatgagaagaaatttggcttaaacattattgataacctcatatttagtacatacagtggtacaattgttattccaaagtattattttttaccaagcagaatagacggaatgactttgcataatttgtaa

SEQ ID NO: 280105 - DNA, 126 bp, Morganella morganii
atgcttgcatttttgttaagtcagcacaagaaactgcttcttgcgctgactgaattaatcttttggctggttataaattacaaattatgcaaagtcattccgtctattctgcttggtaaaaaataa

SEQ ID NO: 280106 - DNA, 843 bp, Morganella morganii
atgatcaatattgagtcgtgttgcagtgatccggaactggttttccggggtgatagagttaataaaaaagccattgattttttatccggaataataaaaagaaaatcaaggaaaaaggaaggtaataatgtttcggagtattattaccttcggtgtcagtatgacaataaatatcatcatgggaatatacctctctctgtttctgaggtaaaaaagagagattgtcacgttccggaagattatgatattactctgatgtattcatcacctgataaaataaaagacactgtgtttaagaatagtgtcagtcaatatattgtctgtaaaaatacgattgctggaccatctgatgtacctgctcatagttatgctccggataataccactcaggataacacgatagcgccggaagaagcaggaaacatgccggcagaaaaagaatactatcccggtactgattgtggtgacacaaacagcattccggagcagggtattgctgcaacgttgccggaacaacctgtttttatgaactatcctctgtcaggagtaagcccggaaagagaaaatcatctgttgcggcattatgaaccggaaaaagcggctcaggagaaaacatctcagacagtttatcatcccgggaaaaatcagttgtctccggaaatcagaaaagctgattattattgctcttattatttcagacagaaatatcagccaccggaaccggttcatatttacagagataatccgggcgggtttaaattagaaatatattcagaatccctgaagcgacgactgaaatcagcagtaaatataaacggaattgattatattgatataatataa

SEQ ID NO: 280107 - DNA, 579 bp, Morganella morganii
atgacattcataaaatgtgcgcatgctttattccttgccgcgctgttacccgctgcggtgagtctgacaacatttcccgcatcgggtaaaaccggcgatgaaaaccggctgaaaattaatatatcgggcacggtggtggccactggtctttgtatatttgcggatcctatgccgaaagatattagcttcggagatatccgttattcttcagctgcaggagtgaataatctgaccggaagttatgtcaggacactggacagccgtatgcactgctccggggatattgccggaaacacgcattttcgttttgaatcacgcagcggacccccggtcagtgacggcagccataaattattgccggtcagtgtcggcagcggaacaaatccgtcaaataaaaacctgggtatccgtcttctggtcaacggaaaaatacaggatgtggattcggatttcagtgtagatatgaaaaatccacccacactggaagtcgaacttgttcagattcatccggatgataatacctggtcaaacggacaatcaattacatcactcgcaatattgacactgagttttgactaa

SEQ ID NO: 280108 - DNA, 510 bp, Morganella morganii
atgaagacgaaaaaaaataaggtgctgatattgtctgtccttttaatgatggtggctttgccatcacaggcagagcaaaaaggtgatactacaccatacagtttcagcggtacattacgtgccatgaccatttgccgggtgaataatgaccagataattaccgccgattttaaaaacgtcggtatcaataaactggaaacagaagtctacagcctgccgcttgattacacactggattgccccgggataaaaccggccaatacgctgcggatgacctttatgacatcccgcccggctgtgtctgatccgtcgtcgattgaaagcgatgtcagtggtttgctggtacggatactgaaagacgggcagccgcttgaattaaataaattcttcaaaatagatgatgctgcgcagccgccaaaactggaagcactgctggtgaaagtaccgggtatcgatttaattcagtcaccgttccgcgccaccggcacgctggtggcggaatatttgtag

SEQ ID NO: 280109 - DNA, 1134 bp, Morganella morganii
atgaacttagtcagtattacatcgaaacaacagaaaataacacctgaagaaaaacatctgaaccgaatgtcaaaactgccctttatgaataccttactggaaagagtgtcgcatataaaaaatacagatgcagaatttgaagggaaatatattaacatctgtacagacataggaaaactaagccaaagattgttatctttccaatacaccacagaattaaatagcctaaaaaaagaaagtaactcaacaaaggaaacaggaaaaaacaccagagaagaattaaataaaagagtgacaaaatggtatttccaggaaaaaataacaacacctgcagctattattttccgggaaattgatcagatatgtgcagagaaaaaaataatattatccactacagaaaaagaagaaatactggatatcgtcaatgaaaaatatacaaaactagacacattaaataaggatgcatctgtcatttcaatactcagccctttaaaatcatacatggatgaaaaaataaatgtacaggaaataaagaaaaatttgattacagatatgaagaaagaagtaccggagcaattcagaatattggtcgatacgtttcataaaaataagacagtaccgcaaaaagaggaattgatgacgcctgtggaaagcctcatttttaatgatatcccggtcgtgagggaaatagccggcaaaatggtatcagatgtctatagcggtctgattgaagaaatttacaatatattatttcgtgataaatccaaagaacagcctttggattttaatgcgataaagatggaagcaagaatgcaggcagaacgtatcgtacaagataaaaaaccatctcaacgcaatgagataaatcctgaagatattatccgccggaaatttgaatctaaagtaacactaacaacatcatctccggaaaaaaaacttgaagatttctttgatatgcttggtgaaaaacagataaagggtgatattcctgaccagcgcgctacatttaaccacggggtgcaaaataatataaaaccccgggatattgatgccatttttgacattctgaacagacccgcctttacagacagaaacgacgatcaacgagcatcgttaggaaataaaacaatctaa

SEQ ID NO: 280110 - DNA, 2778 bp, Morganella morganii
gtgttgttaaacaccaccacgggcaaaaaaatgaaactcaataaactttcctttctgatactttccgcaatggggatgtcgtacgcctctgccggttatgctgtaacgcctgagccgattcccgcatttgacttcagcgatgaatcaaaacgtattgatgatattaaaaacggcggcagctataccaatgcggatgctgatgtgctggcggatgtcagtacgggagccggattcacggtaaaaggttataaatacctgaccggcattgacatcaattactcggcggcagaaaaaccgaatgtaagatttcaggatgatacccacctgatcggcacaactatcgggcactccacgacccacctgggcgattcattcagagcaacccccttcgataacagcagcgttatcggtattacactgaaagggattgatgcgggccacgtcgctaacctgcaaatgtataacggcacaacatcctacaacacgacagtggatgccttcggtgtgatggagttgcgtaccgcatctgacaccaaacagcgggtatcggcttataatacgcgtgtgaataaagacggtaacctgactgtcagttataacgcatatgccgaaaataacctgattgacggcggtgagctctacctccctgtcgataatccgggtgcagaaacccaaagtacccttattcagaatggcggtacctatacacagaacagcggaacagccaccaataactatattaccggtacaggaagctatcacgcggtttccggactggcgctgaataactatatctatgacggtggttatcagtcagtttatgtcaatgaccgtaccggtgccaaaaataccacaatctatgcaggcggcacacagcgggtacgctccgggacggttgaggataccgtggtatatggtcagcaactggtgacaaaccatgacggtgactggaaagacggtcagtgggttgagaacagcaatcctgatgcaaaatggggtaatgatccgacagctattaacacacaggttatgacaggtggtgttcagaatgtcggactgaacggtaaggcctccgataccactatttataaagacggccttcagcttgtcggcaaatatgcggaagcggccactaccctggttgacggcgggatccagcatgttctgacttacggcggcacagaaggtaccaccattcgcaacggcgggcagaccatcctcgattacggtgcttactccttctataacctggatgtggaagacggttctctggtaatggaaggcggcgatcagcatccgtggctcagcaacttcggcaaaggctcgtatgcgcagaatgtgaatctggccggtgataaagcgtatctctatatccgccataacggtgacacaaacgaatccgttgtcactatcgataatctggttaacaacggtgtcaccgtcttcggtgaaccgggcagcagtaataccggacgtaacagtcagctcaacatcaaagaactcaccggtaacggcctgtttgtgatgaataccagcctcgcagacggcagcggggatttcctcagtatctcggataatacagacggtaagtttggtgtccgtgttatggattcaggtaaggcgctggtcagtaataccaccgaaccggatcgctatcatctgatccacgccgccggcagtcagaacgatacttttaccatgaccaacaagagtgtggatctcggggcgtataaatattatctgacacaggataaagattcagcggatgaatggtatctgtcacccaccaaagaaactacgccggtagatccggatccgaaaccagatcctaaaccagatccgaaaccagatccaaaaccggaactgcctgatctctctgagccaagtaaaaccgcaatgatgattgccaacgccctgccgcaaatctggcggagcgaactgagcacattgcgcgcccgtctcggcgagctgcgcaataatccgcaggtgaacctcggtgtatggtcgaaagtcaccggcggacgccacaatatcagtaataatgaagtcgcctaccgtcatgatatcagcgggattgtcgccggtggtgacaaaatgacagaactggaaaacggctatctctggagcggcgttgtcgccggatattctcactcgtccctgaaaatggataaaaacgacggtaccattaacagttacagcctcggcgtttacaccacctggcagcataaatccggtatttatgtggatggcgtggtgaaagccaaccatttccgcagtgattatgacgcacagtttaatgacggcaaaacctccgccaacagtaacaccagcggtatcggcttctctgttgaaaccggtaagtacttcgaaaaagagaattactttatcgagccgtacgccatggtagccgccttccgcggccagggcgcagattaccgctacagtaatgagatgagcatcaaagccgatgctgcccgttcgttcagcggtgagctgggtgccaccttcgggaaaaatttcgtgctggaaaacggcacgcaaatcaaaccgtatatccgcgtggccgtgaaccatgaattcctgaaaaacggcgatgtggaactgaataaacaagggaaacggaccaatgatatgtccggcaccaccgggaaatacggcattggtgtggatgcaaaactgaataataactgggccatctacggcgaattcaactacgccaacggcagtaaacaggaaacgccgtacagcggcttcctgggtgtgaattaccggttctga

SEQ ID NO: 280111 - DNA, 927 bp, Morganella morganii
atgaacttagtaatttatatcatcatttgcctatgtattggtatttggatatgtgtgcagcgtgataagtttatgttgaactcagacagtttacataaacagtggctatttagattagctattatttttcctttagtttcaagcgtttattttatattatggctaggtgcaccatatccatggagatttgatgcttatggatacagcaccttcttagagataaataaattctcattgggaatattagctttatctccaatattaggtgcttttgttgtatccgcacataggtcaattcagactactaagcagattgaagtaactgagaaaaaaaacaaagttgatatatattttagtactagaaaatacattaatgaacaattaaatttattcaaaacaattgataatgaagaaattcaccaaccaaatgcactatataataaagcattcaatctaacaaacaatcatgaagatacacctaataaagaattctttgattatattgacaatagcataaagactttagctgatttattcttatccgtaagagataacataattgacatccgtttatatagagaagaagatgaattcagaatggacatttctacaagcaggatgtcatatcaaatgagtaatttgaagaaatatctagatataggaagtaattctgaatttgatttaatatcaaagtgtgcggattaccttgaaagatataacattgaaatactaaatgataaaagtaacttttatgaattcaactattcattacttatagcaggtgaaatttattcttttttaaattcaataaaggaaataattttaatattatcttcagaaaaaaatattgataccgtactacctaactttagctatgctttaggttcttgtactttaaaaagcatgacggtatcacttgctgaataa

SEQ ID NO: 280112 - DNA, 324 bp, Morganella morganii
gtgacaatccggcgtggtttaaaaattgtttatatcacggtggttattatcagcaatatcagttcggctgaatttaatctgatgcccgggtctttttttatcattatgtttattctgttatttttcggggttgatatgtctgaattaaaagaaattgcaataccggacctgacggatgtaacagtgaataatatgaaacagacactgcatcgctgttctgtgtgtactctggctgcaattgctgaatcagaatacggaaaagggaaaatattcagctgtatctcagatttaatggcggatttacaggatggcggagacaattga

SEQ ID NO: 280113 - DNA, 432 bp, Morganella morganii
atgcacttgtatccaatagttattatcaccgttatattttttgcattacctgtaatgactcaggccaggtctgtaaaaaatatagaaatagaaaattcaggaattactgtcataaaaaatccaccggcgggcgaagttaatgcctgtaaaaaattcacaccaaataaagaacaactgatcaattatttccggtcagcagaaacatcgtcagacatatcatgggatcacgattattattcatcctgtatttcatacggcagtcttgaacttgaaaatggtcagacaggtgaatggcggatatcatcaggcggtgccggcgatatccgctttcctgatggtaaatatatctacctgttccgcgaaaagaatgaatgggttgactcacagcaagatcacattcacaccaaaaatggtttcatggctatcatttaa

SEQ ID NO: 280114 - DNA, 138 bp, Morganella morganii
atgctgttaaatcatatcagtatggaaataaaaaaagataatcgtctgaaaaaatcaccggcattttttttcacagacttacacagcacaaaaaataaccacacccggtgttatccacagattgtgacttatccgtga

SEQ ID NO: 280115 - DNA, 174 bp, Morganella morganii
atgtcagtttattttgtgatttctgtattgattatttttctgattatcctgctgattgtattaaccattaccaacaaaattgtgatcagccggaagaaaacggtttatctgtcactgattgcgctgtttagagtactatatgcgcctgcaacagtgggccaccgaaaatattaa

SEQ ID NO: 280116 - DNA, 618 bp, Morganella morganii
atgaagactattgccatcgtaatttttgatgaatttactgatatcgattactttctgatgcgggatatcttcggacgggaaaaacaggcgtggaaggtccgcgtgctcggcacgaaagcggttcatgtctccgcgctcgggcaggaagtgaaaacagacgggccgctgtctgatgcggctgatgcggatgcagtactgtttaccagcggtcagaaggggatcccggcggcactggcggacccggcatttaccggggcattacagctgaatccggaaaaacagttgctgggttcggtgtgtgccggttcatttatcctgcataaactggggctgctggaaggtctgcgctcgacaacacatccggatgctatggcgaatttcagagccgaaggggcagagccggaaaatacacctatcgtaatcgccggtaatattggcaccgcaggcggatgcctgtccgccatgtatctgaccggctgggtggcacagcgcctgtgtgatgataacaaacgccgggagatccaccgccagctgatcccgggcggtcaggaagctctgtttgaggaactaatctcacaaaccctggccggtgcttataccattccggagacaccatga

SEQ ID NO: 280117 - DNA, 150 bp, Morganella morganii
atggcaaaacagggtgtttttgcagcagcaaacctgacggcgatcacgatttatccgatttctgattacatactgcacgcagatggtgataatcagaacagggtgactaaaattacaacgaacgatcattttctttcgaaaaagcgttga

SEQ ID NO: 280118 - DNA, 246 bp, Morganella morganii
atgcgcacgctggccggatggctgaccggactgcggatcagtcgggacggtaacgatatggtcaaactgctgcaccagcatctcatcttcatgaccctgcacatagatgttaccgacggattcagcggtaaacgcaccggcagtgatattgccctgggttttaccttcgatggagatatagcatggagttggcatgataaaattccttatttattaacaggtaacaaatcgttaccggacgagtaa

SEQ ID NO: 280119 - DNA, 177 bp, Morganella morganii
atgaataatacagaaaaagaagcatttttaaaccatattatggagtctaaaaaaatagttgacgggtggccggcatggaaacgggaagacagtgatagtctccggaacaataatcatgagaattcactttatgagtgtcagtctgccgggcaacatcatactgaagcagagtcctga

SEQ ID NO: 280120 - DNA, 1515 bp, Morganella morganii
atggattgtaattatgatggttataatgattctgaaataattattggtttggttggtgctgttggtattgatttaaatcaggttttcaataaactaaaagataaatttggttcattttcttatgaaactaaactgataaaagtatcagaagatattatatccgcttttggtgaaagtgcaaataatataaaagataatcatgatcgtatagattatttgatgagtcaagggaatctattaagaagtaaatcagaagataatgcttttatggcgaaggcgtcagcagcaaaaattagtattataagaaatattataaagaaaggggatgaaccgctaggcagaacagcttttgttatttcatcattaaaaacaccagaagaagtaaatgaactgaggaagatatattcggaaggattctatctcataggtgtttattcatcagaagatagtcgattaaaatatttaacaaaaacaaaaaatataaataataaggccgcctcttctttgatggaaagggataaagatgaatcaaataaatatggtcaaaaaaccagagatacttatcatttatctgatttttttataaactatgatggtgatacaaataaattaacaaatgatatatggcgaataattgatttgatatttggtcatccattcattacaccaacatttgatgaatatgctatgtatatggctttttcagcctctttacgctctgcggatttatcaaggcaggttggtgccgtagtaaccaataataatcagatattatccacaggtgctaatgatgtcccaatgtatggtggagggctgtattggcctgagtataataaggattttactgaaattgaagatgtgccaaatggaagggactataaaaagggatatgactcaaataaagaagagcaaagaattattattgatagtattgtttctgatttggaaggtgacagtaaaataaaactaagtaaggcccagataaaaattataaaagaaaaacttaaggtatcaaagataaaagatataacagaatacggcagggtagttcatgcggaaatggaagctattctatcctgtgccaggaataatttatctactaaagattcagtgttatattgcacaacattcccgtgccacaattgtgctaaacatatagttgcttcaggtataaataaagtattatatattgagccgtaccctaaaagtaaagctactgaatttcatcaggattctatagaattattagattctggtgaaaaacaggaacttcatgagcagagtaaagttatttttaaaccatttgttggtgtagggcctaagtcattttttaagttattctcaataaatattggaggtggtaatgttattaaaagaaaagataaatcaggaaaaatagtgaaatttaatcctgaaagtgctagaattaagacggtaatgcttccttcatcttatattgagagagaacgttatgcagtatcacaattatttgatatgatggagaaaataaaatga

SEQ ID NO: 280121 - DNA, 1134 bp, Morganella morganii
atgaaacaatgcaatattcttctgtccccgctgctgttactgacagccggaacggtatttgcctcaccggcagcggacaataatatcgtaccctcacagagaatcgtctataaagacgatattgcttatcagcgtgccaatcagacctttagcggatctgcggtaaaatattgtgtccgcaacgaaaacaaccagaaaactgtaacggataatgcagagcattattatgaatttcacgacggagaactgaatggcaaagctattgattatgattgtcacagcggcttaattaccgaaatccggcattataaaggtaataagcaatatggctggactatccgttatgcctggccgggaatgccttatgctataacgtggtatgataacgactatctctctcccgtcccggaaaataaaaaactcaccccggatgattttccgccggtttattatcagaaatcagataacactgttaatgttaatacactcgcatctttggatgaactgtattatcagatagtacctgctccctttacgggtactacggctgaatactgtgttgtctatgatgagaacgataataaatccgaagataaagcaaaaataaaattaaccgctgaatataaaaacggccttaaagacggaaaagaaactgactacaactgcggcgacggaaaagtaagcggatatacagactaccggcagggcatgaaaaacggtattcagataacctttaatacagacggcagtgtcagaagcaaaatacagtatcaggatgataaaaaacacggcgatgctgaatactataccgacaatatcctggctaaaaaagagcactacaagaacgatgaattagacggccggagtgttgaatataacaaatacggagatattacttattttcgtgattataaagacggtctcagtaacggattttattttgtgaacaaacgcatgacaaaatacatgatgtcagagcgtaataaccggagacacggctggacttacgattatgatgatgacggtaatgtaacccataaaaactgttctgtaccggataaaaataacgtcacatatgatgattgtgccggaatgccgctgccgccggaaaaaatcataccggtaaaccgctga

SEQ ID NO: 280122 - DNA, 510 bp, Morganella morganii
atgaaacggaatatattgaccggcatggcggttacctgtgcgttgttatttccggtgatatcacaggcggaaaccaaaaccaccaaagtgtatgtatctgaagttgatgatgtacagtatggctcggtggccggttatattctggtggattttaaaggcaggaaagtactggaaaaaccggatgagttcagtgtatataatgataataaaagtatgctgattgcggcatataccggttatccgttcagcacacatttcctggtggaaggggatatccgttatggcgattatgatcttatcccggttcaccataactaccgctacggcgaaacattccggttaatgaccaatgaagggaaactgcgggactacatcagatataaaattattaatctgtgtgacccggacgatacctataccggcatgaccggcgctaacggattaacggtcaggttcaccacggaaaaaccctgtgatgtccaactgctgacaggcgacgatattaagtga

SEQ ID NO: 280123 - DNA, 1620 bp, Morganella morganii
atgaacatttcagatgggaaatttatggatttaaatgatgaaaagagagtgctcttagagctaaatgtttttaaagggaaaatactaaagtcacttaaaggtcgaggtggtctgatatatatagttgagagaaattgcattccaaaattcgttgcttataaaaccactcaggaatttgaaaatctggatatttcgaatattagagccgaatccattgtaaatatcgaaagggaagcagggaattggtttagatattccaatcatcctttgctaataacaccattttcagtaacattagtcaatgatttccctataatttgcatgccctattgtaatggcgatcttagtttcttcactcggtctgagcaagaatttatcagtgttatttttttatcattgcaaattattaaaggattgatagaggcgaataaagcaggtctaaaacaccatcaagacttaaagccggaaaatatactctatattgatctaagtgaaaaatttaaaaactacccacctatagatgttgatccctttttgaggtactcagttagaattgcagattttggtgtggcaaatgcatatctaaatggtcaccctggcgggacaaatgtatataaggcaccggaacagtatgatattgaaatgttttcggggtgtttcgagccagatatttttgctgtaggaattataattgcagaacttttccaaggctaccatccagctgccttagataaagataacgataagaaaatcaggaattggacgggtaaaagacttaagaattggacattatctgggataagaaactataaagctgccgagagtgacaatgaagtttctttaataaaattaatagatgaaatgttatcgcccaatcctagtttaaggccatccttcgagtcatgttatagcgtcttgagtgagattctaaggttgtcagatgcaaaaagctttgagtttttagatgcgctaatttctcattatgatcgaatttccaatataagtggcattcaaggaagattatttaatttaataaaattatcaaagattaaaagccaattaacttcaatcttagaagaaatatcttttgaacttgatactctaatgagcactaacatatataatgccaagaagatgatagccatttttcattatgcgaaaacgctatatataatatcccatgacaatggagttaaagagtttcatgcgctaataatttctgcttttgaaagtatagtatatttcttactagaacaccctgaagatattacctcatctcaattgtatccagtcattgataattcaatctctatcggtagcgattttgaatcgagcgctgaagtctttaatgaatcattaaaaatcttatctttcttgaattatgctggggaattaaatattttaatacgcaattcaactgacaacgtggttaaggcatttgttattttcggtgttgctcaggatttaaggttggctcatcgtcacgacgaggcttatcagaaactttccgaattaagattattaattcctataaattcaaagtttgaagaggtttttgctcattggaaaaaagaaattattttctggagtaaattcaatcaccgtactgaggatgaataa

SEQ ID NO: 280124 - DNA, 414 bp, Morganella morganii
atgcgagtaactttctcaccgtcagaggcggaaatcagtgtggtgcaaaatggactgcgcagccattacaccgcctttttcgatgaaagcgagcataccgaactggctgttttccatgaggtaaacggcgaaatcaaagccggactgaccggtgatatcatcggtaactggctgcggataaaatatttatgggtggataaatccctgcgcggacagcgtatcggtacggcattaatgcgtcaggcgcaggaaagtgcgcgggagcgcggtgcaaagtttgcccaggtggataccttcagtttccaggcgcgccctttttatctgaaaatgggttttgaggaagtgctgacactggaatcctatccccggacgcatgagcgtatttacttccgcaagacgttagaacagccgtga

SEQ ID NO: 280125 - DNA, 1185 bp, Morganella morganii
atgaataaacccgctgtcatcgcgctgctgattacactgctggacgcgatgggaattggtctgatcatgccggtattaccgtcactgctgcgggaatatctcccggaagcggatgtggcaaaccattacggcattctgctggcgctgtatgcggtgatgcaggtctgttttgcaccgttgctgggcagatggtcagataagctggggcgcagaccggtgctgctgttatccctggcgggtgccgcgtttgattacacactgctggcactgtccaatgtgctgtggatgttgtatctcgggcggattatctccgggatcaccggtgccaccggcgcggttgcagcttcggtagtggcggacagcacggcggtcagtgaacgcaccgcctggttcggccgtctcggtgcggcgttcggggccggactgatcgccgggccggctatcggcgggctggcgggggatatctcaccgcatctgccgtttgtgattgcggcgatactgaatgcctgcacttttctgatggtcttttttatctttaaaccggcggtacaggcagaagaaaaaccggcggagcaggaaaaagaaagcgcaggtatcagctttattacattacttaagccactggcgctgctgctgtttgtcttttttaccgcgcagcttatcgggcagatcccggccactgtctgggtattgtttacggagagccgctttgcctgggacagtgcggcggtcggtttttcactggcaggactcggggcgatgcatgcactgtttcaggcggtggttgccggggtgctggcaaaacggctgagtgagaaaaccatcattttcgctgggtttattgccgatgccacagcgtttttactgatgtcagctatcacttccggatggatggtgtatctggtcctgatcctgctggcgggcggcggaattgcactgcctgcattgcagggcattatctctgccggggcatcagcggcaaatcagggcaaattacagggcgtgctggtcagcctgaccaatctgaccggcgtggcgggcccgctgctgtttgcctttatcttcagtcagacacagcagagtgcggacggcacggtgtggctgattggcacgacactgtacggtctgctgctggcaatctgtctgctgatcagaaaaccggcaccggtggcggccacctgctga

SEQ ID NO: 280126 - DNA, 876 bp, Morganella morganii
atgaaactgccaccgctttccgcattacgcttttttgatgccgccgcccggagcggcagttttgtccgtgccgcagaagagctgcatgtcacccacggtgctgtcagcaggcaaatccgtctgctggaagaggaactgggtatttcattgtttgagcggcgcaaccgcgcggtgttcctgaccccggcggggcagacgctgtttcagaccacagggcggatcttcactcagctcgcacagacagtggaaaaaatacagcatcagcagcaggacaatgtcatcactctctcctgtgagccgaccattgccatgcgctggctgatcccgcgtctcagtcatttttatcagcaccatccggcgattactgtccggcttgtcacggcaggcggcgcgattgattttcagaaaaccggcgcggatatcgcgctgcggcgcaatgatttcaaatggcgtccggatattcatgcggtgaaattatgccgggaatttatcggccgggtgcagcgccccggggcagaatccggtgatgcgttactgataccggcgacacggccggatgtctggcagacctggcagcaattatccggggatgattctcaccggctgcggacagtgtcttatgagcatttttatatgtgtcttcaggcggcgctggcggggcagggaataacggttgcatcatttctgatggcggcagatgaattaacctcaggacagctgaccgcaccgggcggatttattaccgataacacatcgtattatctgttatttccgtcggcgccggaaaaagaaagtccggaatggatttttacattgtggctgcggacacaaattaacgcaagtctggccgcattatcattaaccaccaccggataa

SEQ ID NO: 280127 - DNA, 615 bp, Morganella morganii
atgaatgaaattattgcagtcgcggtgatcaccacactggcggtgatcagtccggggccggactttgctgccgtcacccgtaacagttatttgtacggcacaagaaccggtctgttttcagcactcggcattgcgtttggtgtgcaattgcatgtgatttatacggttttcggcgtgacactgttaatcatgcagtcaccggcgttatttaccgtgattaaatcgctggggattatttatcttatctggctgggatttaaatcctttaccaataaaacccggattactgtgaacagtacagataactccgccctgtcagcgtttggcgcattccgtaacggcttttttgttaatgccctgaacccgaaaaccatgttatttgtggtctcggtatatactcaggtgatcagcagtcataacacattaatgatgaatttcggctacggcgtgtttatttcctttgctcactggctgtggttcagcttaattgcgctgttcttttccaacccggctatccgtaataagatcctcagccgtcagcttctggctgataaaattatcggtgttttattaatgctgctcggtgtttccctgatttttttcacccttcactga

SEQ ID NO: 280128 - DNA, 1386 bp, Morganella morganii
atgaaaactaaaaaggctgttacgtttaacccgtttgtactcttattctccatcattgttatctgtgtcattgtttcttattttgtcgaatccggcgcctatgacaggatcgtgagtgatggacgaagtattgttgtcccgggtacttatcaccttgttgaaaaagatcctgtttccttttttgacatattccgcgcggtacctcatggtttaatcgccggctccagtatcattttcctggtgctgattgtcggtggtgcaattgaggtatttaaccaaaccggcgcaattcctgtcggtattgcgcgacttgttgctgttgccggtaaaaaagggggcacttttgttttagtgctcatcttcagtatttttgccgtgctgggcggttttctgggctggattgaggcggcaattccgtttgttccgttagtcattcctattattattgctttaggatttgatgcaatgacggcggttgccgttgtgatactcggcaccatggtggggttcgccctgggtcccaccaatatgtataccatcggtatcgcccaccagattgcagagttaccgatgttttccggatttggtctgcgcttcatcgcctatctgtgttttacggtaacagcactgtgctacatcttattttatgcttaccgtgtaaggaaaaatccggagaagtcactggttaaggatattgatttatccgatattcagctcagctatgagggcgaaaaagataaaagtcttacgttaactcagctgttctctttaatcgtgctgattgcaacgtttgtttgtgtcgtttatggcatgaccgaatggggctggaatattaacgatatgagtgccgccttcctgtttgcaggtattgttgccggtatttcagggcggatgggcgccggtaatatcgccaacgcgtttattaatggtgccaaaggctctatgggcggcgcgatggttgtcggtgttgctcagggcgtcggctggatattaaataaaacgggcttaatggacccattaattcatgttctttcaggacatattgatggtttatcaccattaggatcggctatcggtatctttattatcgtcatattactgaccgggctggtggcatcaggcagcggaaaagcagtggcactgatgccgattttaattcctctggcggatttggttggtctgtcacggcaaacggctatttttgcctatcagctgggagacggaattgcccatccggcctacttcacttacgggacgctacttatctttttatcctacgctaaaattccgtatatgcgatggatgaaatttgtactgccgcttctggtcatctttattattcttgctgttatatttttaaagattgcagtatcgatagattactga

SEQ ID NO: 280129 - DNA, 1194 bp, Morganella morganii
atgaaaaaagtattaaatgaatttgcagataaatattttgatgaaattgttcagacagcaagtgaaatgatccaaattcccagcctttccggaaaagaaaaagaaatggctgaatacacgataaagaaaatgcatgcgcttggttacgatgaggtcattgttgatgaatttggcagtgtgaccggcgttatgcgcggtaccggcggtggtaaatcaattatgtttaactgccatctggatgttgttgatgaaggaccacatgaaaactggaaatatcctcctttcagtggcgccgtggctgaaggcgcaatttggggaagaggggcgagtgatacaaaagggacttttgctatccagctttatattccctatatcctgaagcaggagcaaatgatgaccaaaggggatatttatgtcgtgggtgttatccatgaagaatcctcaggctttggtgcaatgaaaatggcggcaggcggctttaaaactgactatgcagtcatgggggaagccactgaaaatgatctggcgattgcctgccggggccgggtggggattgaagttgttattacagggcgttcctgtcatgcaagtattccgcatgaaggcattaatccgtttgaattcctcggtccttttttgctggcgctgaaagattacagggtttctgagaatccggtctatggctcttctttgattactgcaacacgcatctcttcttcagaggccggtaccaacgttattcctaactcgatccggctgagcctggattaccgcagcgttcccggcgaaaccaatgaaagtattattgcgcagttaaatgaaattgcacaaaagacgtgtaaagccgatggcgtcaaagttgatattaccccggcctatatcccgatcagctgttataccggtgcgacagggcagggtttaatgggggagccgccttatagtattgacgaagacagtgaaacggtacaaacggcacgggctgccctggaagacgttttcggacgcaaaataaaaattaagccatggccttttgcaacggacagcgggcatttttcccggattggcgtgaacgtgattggttactctccggctgaggttattaaatgccataccgtagaagacaatattttattagatatgctccgtgacggtattgcaggaaatctggcccttgcaaaagcactgtgtgattaa

SEQ ID NO: 280130 - DNA, 888 bp, Morganella morganii
atgaaaaataattttctgatactcaaaataatcattgtgatgattgcgttctcagcaaactcactgttgtgccgggtggcactgaaggatgcgcatattgattcgctgacattcagtatgatccggattgtgagtggcgctgttgcactgctgccgttattactgcgcagacattatcatattcagtttaaaaaaatccacgtcatcagcgggataagcctgaccgtttatatcgtggcattttcactggcttatgaacagattgatgccggtatcggcgcgttaattctgtttggtgtcgtgcaactgacgatgattatttacgggttatgcaaaggtgaaacactcagccggacaaaactgaccggcctgttatttgccttcggcggattggtgtatttactcgtcccttcctccgtcagcacaattcatttaccgctgttaaatgttatctttatggtactgtcaggctttgcctgggcggtgtattcactggccggaaacagtaaaggcagtacgccggtgaacaccgcttataatttcctgctggccgttccggccggcgcggtgattttattgatagtgtcgttactgattccgggggattatcacgccgatatgcgcggtattattctggccgtgttatccggtgcggtggcttccgccgggtcgtattatctctggtattccgttttaccttatattgaatccatcactgccagcacggttcagttaagtgtgccgtgtttatctattcttctggcagttgtattcatcggcgagatattaacagcacagattattatcgccaccacattggtccttaccggcatatttattgttattaaagacagaaagaaaaaggtacacaccaaaacagaaagataa

SEQ ID NO: 280131 - DNA, 1185 bp, Morganella morganii
atgacaggtaataatgaagcaggaatgatgacaaagctggctgctgactggcatgatgaaagcgattattcatatgccaaagtttcacccatttccatgagcagctcatttgtttttgacaatattgatgatctcgatgaagtttacggcgggaaagaagggtatatttattcccgtattgataatccgtcgacaaactatgttaataagctgattgccggtattgaaggctatgatgaagcggtgacattcggctccgggatgtccgcgattattacggcaatcctttcctttgttcagcagggtgatcatgttattgcatcaacggtattatacggtggcgtacatgatttcctgaaaaatgaattaccgcgttttggtatcgacattacttttattaatttcgttaccgacaatgtggaagattatattaaaccgaataccaaaattgtttatacagaaacaatctccaacccgctgattgaagtgatcgatttgcagacaattgcggataccgcccataagcacggcgcactgtttattgtggataacacttttgccacgccgtccgtctgtaagctgattaattttgatgtggatgtgctgctttacagcgcaaccaaattcctcggcggccacagtgatattacctgtggtattgcactggcaaacggcgaccacgcagccgctatcagaaccaaaaagaatttatacggcggtattatcagcccgtttgaagcctggttattaacccgcagtctgcgtaccctggatttacgtgtccagcgccactgtgataatgcactgaaactggcggaatatctggaaaaacacccgaaagtgaagaaagtgtattatccgggtctggcatcgtcacccttccgtcaactggcggaaaaacagtttgaacataaccgtttcggcggaatgctgagtgtggaattcaccggtggttatgacggcgtcgataaatttatccgtgaatgcaaactgattaaatttattccgagcctgggcgggtacagtacatcactgacctacccggcgaaaacctcgcaccgcggtcatactccggaagagctgaaagcatcgggtatttccaccggattactgcgtttctccgtcggtctggaaaatatcggcgatattattaatgagatggaaaacgtactgagccagatttaa

SEQ ID NO: 280132 - DNA, 975 bp, Morganella morganii
atgaatactgatgatgcccgccggattattgaacgtgcagataaattaccgttatatctgcatgcctacgcctatcatctgaatatgcgttttgaaaaaatattaccgggtgacttacttgatatcgcaaacgaacatcatttgccgggcgtcaaaatacacgtgctggatggtgaaacgcaatctctttcaaccatgacagacaaacagcttgaggcttttgcagagaaagcaaaacgctatcatctggatattaatattgaaaccagcgcctccgataataaaaccctggatgatgcagtcagaatcgcactgaaaaccggggcaagctctgtccgtttttatccgcgctatgaaggtgcgctgtctgacgtgctgcgccgtatttccgcagatatcggttatttaaaaacacactatcagcactccggtctgacatttgttctggaacagcatgaagatttaaaaagccacgagctggttaaactgataaaagaagctgatttcccggaactgacgctgttatttgacttcggcaatatgatcaatgcctgtgaattaccgatggaagccctggcagtcatgcaggatcatattactcaggtgcatatcaaagatgcagtgattctggaggaaggtgatggtttcggccataccgcctgccgttccggggaaggtaatctgccgtttaaagagatgctgcgggaattaatatgtctgggtaaagagaaaccacaggttatttcctacggactggaagaagaagtggattattacgcaccggccttccgttttaaaaatgaggggaatgatccgtggatcccgtggcgtcagctgagtgaaacaccgttacctgaaaatgaaattgaagaacgtctcgcccgtgaaaaagaagatgccgtcaatcagctgatttatgtccgtaacgtcattgatgaaataaaaacagaggcacttgccgttattaataaataa

SEQ ID NO: 280133 - DNA, 1059 bp, Morganella morganii
atgatgacagatgctgtcagccggcgtattgcggccatcaaagatcacctgtcggaaattctcagccgtaaaccggtattttccaccgatccggccacacactcattctgtcagatgcgtctgcaatggctggcggacacccgcgccattgataccgcggcagaaagcatcctcagcggcacacaatggtatgcggcagaacgtgccctgattattgataacggctataacccgctgaccacagcggagctgatcatcgccgcttatatcaccggtaccgctgtccgtatcagaacccgcaaccacagcgactggctcacgatgctgtgcggacagccgggtgcagacaatatcatttgtgaatttgccgatccggcgcagagtgatgccgcactgctgcgcaataccgataccgtgatggtgaccggaaccgatgccctgatccgccactggcggaaaatcaccccgccgcatatccgcctgaccgaaaacgggccgaagatcagcgccatggcgatctgtggttcggatttacctgccccggaactgatcctgtgggatacctgcctgttcttcaggggagtgagcaactcgccgcgctttattctgctcgacagcccgatgatggcggaacggctgtacagctcgctgtcacaggtactggatgaactgccccgtctgccgcagcatatccgtctgctgcagatggtgaaggcacgggagctgacactgcgtcatgtgctggcaccggatttccggccgccggtttacagcacggtatccggctgggggctgacattgcagagggaatttgaaccggcacactggctgccgtacggttttaatctgattgccggtgacccagcagagcacctgaaactggcggcaaaacactggccgggtcagttacagacgctcggctgtcacggccgcgccgatctgctgccgctcagggcatcgcgctttctgcgccactgtaacaccgggcagatgcacaatcagccgttcagcttttccgcgctgataaccccggtacaaaatgacatccgcctgcggtga

SEQ ID NO: 280134 - DNA, 333 bp, Morganella morganii
atgatgttatatcggtttaaatacaaaacatctgaaatattacaaattattaccacaatatgtctgttcacaagtttaaagcgtaaatgcaaattaacacacattatgagtaattacaggccgaatagtaatttatccgataaaaaagacagaatatattgctgtatacaaaaatattatatcaatcatgatattgcggagtggtttacggcaagcctaaaggttattatcggcggttatccggaaaactttagatttttcggtggttgcgctataaaagcagaggggctgaacgccgtcatttttcattctgagaagggaggtaacctatga

SEQ ID NO: 280135 - DNA, 312 bp, Morganella morganii
atgttacttcaggttggtgaaattgctgagaagaccggactgactgtccgcacacttcatcattatgaagagataggtttattacaccctgtaagccggaccggtgccggttaccgcctctataatgctgacagtatcgaacgccttacccggattcagatattgcggcagataggcgtcaaactgaaggacatcggtaaaatactcgggggtcacgacggggatatggcgaatctgctgaaagagagagtcagtgtattaacggcgcagatgcaggaaatggcggtaatccggatttcttctgccggctga

SEQ ID NO: 280136 - DNA, 303 bp, Morganella morganii
atgcatctgtcagataatgaatttgccgcatcatccggtattacagagcagatgatagaatttgtcgcggaaagcttcagtgaatatcagctttctctgtttaagccccatgtcacgccgcagcagttcgcctttatgcagcagcattatttccgtgtcggcgctgtctggccggatttaattgccgggctgtatactgccatgaaatcgggagaagacccggctatatccaaaggaacccggatgacaccggaaatcggacaatatctgtttacggctattcaggcggtattgcaggaataa

SEQ ID NO: 280137 - DNA, 135 bp, Morganella morganii
atgacgcgcatgctttttatttctctgcccgccatccggattattgcaccggcattgttacagacaaaacacctccccggaggtgttttttttgcactgcaatacattgtcacagtaacagggcgttatttttaa

SEQ ID NO: 280138 - DNA, 1128 bp, Morganella morganii
atgaaacgcaatattcttgcagtggttatcccggctctgttagttgctggtgcagcaaacgcagctgaaatctacaacaaagacggcaacaaagtagacctgtacggtaaagttgacgttcgtcacatgttcgctaagtctgatgacaacggttctaaagaagatggcgacgattcacgcgttcgtttcggcatcaaaggtgaaactcagatcactgaccagctgaccggtttcggtcgtttcgaaaacgaaatcaaaaccaacggcactgaaggcgacaacaaaaacaaagtacgtttagcttacgctggtttcaaattcgctgaattcggttcaatcgactacggccgtaactacggtgtggtatatgacactgcagcatggaccgacgttctgcctctgttcggtggcgacaccatggcacagaccgacgtttacatgaccggtcgtaacgctaacctgctgacttaccgtaacagcgacatgttcggttacgttgatggcctgagcttcgctctgcagtaccagggtgctaacgatgataattctatcgctgctcgcggtatcgattctaaaactggtaagttaatcgatgatgctaaagctaacggcgacggttacggtttctctaccgcttacgacctgggctggggcgtaactctgggtggtggttactctaactctgctcgtaccttaggtcagcagtatcattctgctgctgaaggtaaacgcgctgaagcatggaacgttggtgctaaatacgacgctaacaacctgtatctggctgctctgtacggtgaaacccgtaacatgaccaaatacggttctgctgatacaatcgctaacaaaactcagaactttgaattagtagcacagtaccagttcgactttggtctgcgtccatccatcgcttacctgcagtctaaaggtaaagacctgaacaacggtaccaaaggcagcgaagacctggttaaatacatcgacctgggtgcttactactacttcaacaaaaacatgtctgcagtcattgattataaaatcaacctgctggacaacgacgaattcacccgtggtgctggcatcaacaccggtgacgttgttggtttaggtctgacctaccagttctga

SEQ ID NO: 280139 - DNA, 861 bp, Morganella morganii
atgaaaactgacgcactttttaatttattatctcctgccgatatggcacatgttgcagacgatgtgggtgtctataaagcaacgaaagcccctcacatcacatacttatctgcattcatggcaggaattttcatctcagtaggttttgtcttttatattacagccaccaccggtaccgcaggcatagtgccttttggtatcgctaaacttatcggtggtttatgtttctcgctcggtctgatgctggttgtggtttgcggggctgatttattcacctccaccgtattaaccagcgtggcaaaagccaccgggcgcatcacctggggacagatgtttgcaaactggacccgcgtgtatttcggtaacctggtcggcgccctcttctttgtcgccctcatctggtacgccggacagtatatggcagccgacgggctgtggggattaaatatcctgcaaacagcggatcataagcttcatcacacctttattgaagccgtctgtctcgggattctggcaaacttaatggtttgtctggcggtatggatgagctacgcaggccgtagtctgaccgataaacttttagctttagtcttacctatcggtatgtttgttgccagcggatttgagcacagtatcgccaatatgtttatgatcccgatggggattgtgattaaaaattttgcaccttctgaattctggactatggttggttcgtcgcctgaacagtttccgtccctgacagtttctgatttcgtgattaacaacctgattccggtcaccatcggcaacattattggtggtgcagttttagtaggtctgacttattggctgattcatttacgcggtgaccagaagcattaa

SEQ ID NO: 280140 - DNA, 549 bp, Morganella morganii
atgcgcgttaaaaagactctgttaattgcatctgtggttgctgcttcattttccggcaatgtttttgccgcagcggaaaatgtcaataccgccggaaaaatccatttcaaaggccagtttattgattccacctgccaggtggaaaccaataacgaaaataaaacggaagggactgtacagctgggcacctggatgacacaggcattctcaaagaccggtgaaaaaacagaagccaccccgttcaccatcggcctgagcggctgcccggcaaccctgggtaaagcccgcgtaaccttcggcggcacagagcatgatgacaatgcggatctgtataaagtggataacgccaccggcgtcggcatcggtattaccggcagcgccaccagcgaaactttttaccgtccgaacactgaagcagacggcattgagctgggcagcgataaccgcggccagaaaacctattacgcccgttatatgacgaccgctgatgccgtaaccccgggtaccgcaaatgctgatgttaccgtcactgtccagtacacccagtaa

SEQ ID NO: 280141 - DNA, 678 bp, Morganella morganii
atgaaaaaatcactgatcacgttatttcttctgagtactgcagtgtctgcggccaatgcaagtgttgttctgggcggaacccgtgtgatttatgaaggcaataaaaaagaagcctcgattaccgtcagaaatgatgaaaaaacaccttatctggtgcagtcatggatcaataactttgatgacaaaaatacggccaaaccaccattttctgtgacgccgccgctgttcagaattgagccggaatccgccaatgccatacgtgttgtattaaccactccgggactccctgaagacagagaatctgtttactggctgaatgtaaaatctattccgccatcagatcctgcggcgacaaataacctgaccatttccgtcaataacaaaataaaactgatttaccgcccggccggattaccgtccgcagatgccgccaccgcatatacccaactgcgttttgaaaagaaaggcagtgtattacaggcaacaaacccgacaccttattatgtgtcattcggtgaattaaaagccggtaataccgaaattgaacattccggcatggtgccgccgaaaggaaccgcatcatggaatatcagcggtattcaggcaaacagtgtgacctggaatgcagttaatgattacggctcaataacagaaaataaaacccagccattacattaa

SEQ ID NO: 280142 - DNA, 2547 bp, Morganella morganii
atgacgttcacctgtgaaaagccttatcggaatgctgataatgccggataccgttttcagttaaacagaattgctattgccgttaccgcgctgatcttcagtgcaggcagcagtatttcgtttgctgaagactatttcagcgttaattcactcagcatgactgaagggcagaatatcgcagatcttcagagtcttgatctattttccgctcccggcggacaactgcccggtgattatcatgtggatgttgtggttaacggcgtgacaaccgatgcccgcacaatcacctttaccggcaataatgacaataatggcctgtcaccggttctgaccaaggccgacctggctgcatggggaattaatactgatgctctccctgagctggcagcgctgtcaccggagcaggaaatcaccgatatcagccgctatattccggatgcatccgccacaccggaaattaatcatcagcgcctgctgatttctgttccgcagattgccatgaataataccgttgccggtggtattcctgaagctcagtgggaaaacggcgtcaccgcctttatcctgaattattattacagcggctcaaataattttaataatcatgcaccggacagcgatgcccattatcttaatttacgcagcggtctgaatctcggggcatggcgcgtaaacaattactcaacctattccgtcagtgccggtgaaaaaaaatggaaaaatatcgataccagcctggaacgcggtattaactttataaaatcacgcctgattatcggggattcatccaccccgggcgatatttttgacgggtttcagtttcgcggcatacagctgcaaagtgatgaatccatgatgccggatgctgcgaaaggatttgccccggtgatccgtggtattgcgcagtctaatgcggaagtcactgtcagacaaaacggctatgttatctatcagacctatgtcgctccgggcgcatttgaaatcaatgacctccatccgacaggcaccaacggtgatttaaccctggttatcaaagaagctgacggtacagagcgcaccagtattgtgcccttctcatccgttgccattatgcagcgtgaaggacagctgcgttattccctgaccggcggtaaattcagaacggcaggcgaaggcaaagagccggactttctgcagggcacactgatttacggcctgccgaaagggatcaccgcctacaccggcacaattttatcggataactatcagtcttatgcggccggaaccggtatcaatatgggtaatttcggcgcattttctgccgatgtcacccattctgccacccgtcagttacgcggcaaagaatcccgtgacagcggacgttcttaccgtgctcagtattcaaagaatatgatgaccaccggcacctccgtcaccctggcaagctaccgctactccacggatggctattattcctttgaggaagccaataaaaaccgtgcggaaatgtaccgcgacaataaaaagaaccgcatgcaggtaaccatcagccagtcactgaatgaatacggcagtgtttacctgagcgcctatcagcaggattaccggaaccgagccggtaaagagcgttccgccagtgcgggatacaacaacagccatgaggggatcagttataacctcagctacagctattccgataatgtatggcagcacaaggcggataaccagttttcattttccgtaagtattccgttaaatacggcagcgggcagcaatgccacctttaataccacgatgacaacggatagtaacggacgcatcgatgtgatggcgggtatcagcggtaacttatctgacgataaccgtttcagttattccgttcagcaatcctatgccaataaaggcaccggcgcgggcggtaatgcctctgcctcttaccgcggcagttacggtatcgccaatgccggatacagttacgataaaaactcacagcgcctgaattacggcttaaccggcgccattattgctcatccttacggggtgacattatcacagccggtgtatgacgcattcgccatcatccgcgcgccgggagcagaaaatgtcgccgtgaccaaccgcagcggtgtatccacagactggcggggctatgcgattgtgccttatctcaatgcctatgcaaaaaatgaaatcgctcttgatgtcagcagcctgccggccaatgtggagctgaaatcaaacgctgccaccgttgtaccggtaaaaggtgctgccgttatgatcaattatcagacacatgtcggttaccgcattctctttacggtcaccaaagatggctcacctgtgccgtttggtgcggttgcgtcgtcagaacagaatggcggcagcgataacagcaccggtatcgcagatgaaaacggggatgtttacctcagcgggatgccggaaaaaggctggatcaacattcagtggggcaacagcccggataaacagtgccgtgcggattatcagctgaccaaatcacagactgagcagcatttgccggttgtccctgttacctgtcattga

SEQ ID NO: 280143 - DNA, 1008 bp, Morganella morganii
atgaatacgactaaacgcttctttttttgtttgtatgccggtctgttttctgctcaggctgacgcttttaccgatctgacgtatatgacaagtgtcacgattgacagtgctgcgcaacagcagtccaccggtaccactcttggttcctggcaggatttaagcacatcaataagttgtaccggaagtatggacgcagatacttaccgtttcagtaataacggctataccaccaccggaataacactgtctgacggcggaaaaagctacccggtatttaagacctatattgaaggcgtcggcgtggcactcgcgatacgtgaaaaaggcacatccgcctggcatccggtcacagcagaccagacaaaaatttcactcagtaaacccggcagtaatacgtcatttgacgtaaaaggtatttatgtgaagacgcaaaagacgttagtgccgacaaacgttgcacaggagatcagcctgataaaaaccgaatgcctgttttacaactcacccacatggatgccggaagaattatcagtacgcagtaacggtgcaaagcagaaagccgaaacctgcagtgtcaccaataaaacccagtctgttgatctcggcagccatgagctgatggcggtcagaaaactgaaagtgggtgagaatttcggccacgcccgcgccggacttaccgtgaaatgcgatgccgggatgaatgtcttttttacactcggtgatcatctgcattccgggaatattaataccgataccctgttccctgaaaatcataataccaatcccggattcggggtgcagatatttgaacctgaaaaatcagagccctatatgttaggcggtgataaaaaaaccggttcactgcatgtgtaccccttttataaaaccggaaacagttccgctgaaaccatcacaaaatatctggactttaaatatgtaaaactatcagacgatgtcaaagcaacggaagggaatgcgcaggcaacaatgacgcttatctataaataa

SEQ ID NO: 280144 - DNA, 537 bp, Morganella morganii
atgaaaaaaatacgctctgtttttttatgtctgctgtttttatcaccctgtgctctggcggataccaatgtaaaagtcaattacagcgggacaattaaaataccggcatgtgatatcacaagcacgaataccaatgttgatctgggaacctggttattaaccggtaacggcagtaattttcctgccggcagcacgactgactgggctgaatttgaacttgtttttaactgccacagcagtatgagccggatttccggttcacttcagggaaccgccgcatccgataatacctcctttgaattggataagatccccggtgccgccagcggcatggccattcagattgaatatttctccgcgcccgctaatcgctgggaagcggcagatgccaataaaatcagtcagtttctggcagtaaaacaaactcaggcaggaacaaaccggctgaaattccgtgcccgttataagcagttagccgccaaagccaccaccggaaaagccaatacatccgtgacatttgttgtggaaaataaataa

SEQ ID NO: 280145 - DNA, 540 bp, Morganella morganii
atgttaacgataataaaaaaatctgcctgtatacttgctgttctgtttttctcttttaatgctgcggcctatgatgctatttataaaatatccggccgtattcagccgggttcctgtaccttagtttccgcatccaccgtcaatgtaaaaatgaatgatgtgcatctgagtaataacgggctgggcagtaaacctgattctgtcagtgataaagctgaatgggatattgttctggaatgtccggcagatatcccggtcattattaatccggccggtaccaccgtgtccggaaaaaacagtctgctggccattgccccggccgcagatgctgcatccggtgttggtattgaaaccgaatataaagccgctgacggtacctggaaagtcttagaactgaataaaaccaatacgattgtcagtacagtaaaaaatgacggtattctgactttaaatttcagagggtattaccgccagaccgcagcggaaattacacccggtaccgcaaatgcaacattagatctgaatattgtgtataaataa

SEQ ID NO: 280146 - DNA, 144 bp, Morganella morganii
atgttctgcaataatatcgttttcgcctgttttttatttaaacaaatttatttattcagatgtgaattagtatatgcgctgcacaatatcgcattattacaaaacagagataaaaacgtttatcactgggtgaaaatcatttaa

SEQ ID NO: 280147 - DNA, 132 bp, Morganella morganii
atgagttatctgtatttggcaacagaagttgaacaggataataataaggataaaccatccttaccggtcgagcttttccggcttattatcaggcataccgaaaacaacatagactggtatatttttaagtaa

SEQ ID NO: 280148 - DNA, 813 bp, Morganella morganii
atgacagagaaatatgacggagccgtctccgctgcaatgcggaaacggataaaagagacactggcgcagatcgaaaaaacacatcgcgtaaaagtgctctatgcctgtgaatccggcagtcgcggatggggttttgcctcaccagacagtgattatgatgtgcgttttatctatgtgcatcagccggactggtaccttgctctcgacaaaaagcgggatgtgattgaaaaaccgatcgatgatgagctggatgtggcaggctgggagttatcgaaagcactgagattgctgagaaactccaacccggcactgattgagtggctgagttcaccggtggtgtattatcaggatgaagcattcaccggggaaataaaagcgctcgcagagcagttttattctgtccgcaaggcacgctatcactacctgtcgatggcaaaacgcaacacgcaggagcatttgctggcagagcaggtcaggctgaaaaaatacttttatgtcctgaggccggtgatggcattgcgctggatagccgccgggaaaggtctgccgccgatggcatttgactcgctggtggcgggtacgataaccgatacggatgtgctggctgagatcagagaactactgatactgaaaacgtcgtccggtgaaagtcactatggtgtgcggcggccggcggttgaccggctgattcaggatgtgctgaatgaggctgagaacccgttaccggaagcgccgtattatcacgacagccggttactggatcggtttctgatgaaaacagtcactgcatatacagaacatgcccgcgcctga

SEQ ID NO: 280149 - DNA, 1128 bp, Morganella morganii
atgaatattattcaacaaaaacaaaagcccgtggcaatcgatttgtttgcaggagctggaggattttctctagccgctgttaatgcgggcttttctttagcactggccattgaaaatgatgcttatgctgtgaaaacttacaaaaaaaatatcgttagatacgcaggggcaaaggacgtcacagttctcgataagagcatattggaatacacacctgaaaaagtgtacaaagagcatttggctggaagaggttgtgatctccttctgggtgggccaccctgccaaggtttttcgactcaccgaattttagatgcaggaattgatgatccgcgaaatgagctagtactcgcttattttaggtttgttaaagcatttcatccccgcgtttttttgatggagaatgtaccgggtatactctgggaacggcataaaagttatctggaagccttctacgaggaaggtactaaagcgggctatacagtttttgagcctgttgtattagatgcacgagactttggcgtacctcaaagacgtaagcgggtattcatactaggcattagggatatagtcgatatacaggactttgtctggcccccagaaccaacacatgcaccactggacaaagtgaaaggagatttaaaagtgtgggctgcctgtgaaagcgtatttagtcctgcacccgatggagatgaaaacgatatacacatgaatcatgggcctgagctggtaaaagctttttcaaatacaccaccaaacggtggaagccgaaaagattcaggtcgggtgctcccttgtcatgcaaagcatgatggccataaagatgtttatggacgaatcaatcctgcattacccgcaccaacaatgacaacagcgtgcattaatccctctaaaggtcgtttcgttcatcctatcgagcaccatggtattaccctacgacaagctgcaagaattcagacatttccggatgattatatctttactggtgggcttacagcggcaggccggcaaattggcaacgccgtaccggtaatgatgggaacatacctcatccgatatatcaaacaacatctgctgaaaaacaatgatgctcatctatataacggtactccggcagattctgataaatga

SEQ ID NO: 280150 - DNA, 2970 bp, Morganella morganii
atgattcaaacactcgcatttcgcactcaagccaggacggtcgatcatcttgggcgtgaacaaattgccgattgtcctaccgctatttctgaactctggaaaaatgcttatgatgcttatgcacgaaacgtaagccttcatctttttgatgaaaaagagccggttgcagccgtattcgatgatgggcatggaatgaactttgaggagtttgtaaaccgttggcttgttgttggtaccacatctaagtatgagaacaatacgaaggatgatgaagatcgtgacggattgccaaagcgaactcgccaaggccagaaaggcatcgggcgtctgtcatcagcaaacctaggtccgttacttctcattgtaactaaaagaaaaaatgctgatttcgttgcggctctaattgactggcgaatttttgaaaacccttacttggtactttcggatatagaggtgccagtcaccgaatttaaaaataaagatcagttatttgtaatccttccacaattgttcaatcgtctattggataacatccaaggtaacaaagaagatactccccgttctcaaaggcttaagcttgcttgggagacttacgaccgcgtggttcaggaaaatagtccctcctcacctaaaccatcagcagttatagccagcactatagtcaatgcccgctttgaagagcatcatctgactccatggtctgtctgggagggtagctcttcccatggttcagcgttgattgtatctgatattaattacgatcttcgagctcaactcccttcagttgaaccggatggaaatgttaataaaattcgagaagccctcgtttcaactctttctgctttcacggatccctacgttgataatgacgcaattgaatttaatgccttcgctcctgaattttcttatgaagtcaggatttggtcaggtgttgtctctaaaatgattgtggaagacgagcgtagatcaattaatcgcgatgtactggaagaagcagaacacttgctttcaggaaacattgatgccgaaggtattttcaaagggcaaataaaggcatttggtcaatggctttttcagggctctgactacatcatttatcccccaaaagattttaaaccaccatctggtcccactacgctagtcggtccgttcagcttgactgttgcgacctacgaaagggttcagcgcaatactacattgtctgaaactgattgggccagattcgaaaaactcgctgatgaacacggtggttttttactattccgtaatggtcttcgggttctcccgtatgggcgaactgataacgatttctttgaaattgaaacccgccgtagtatctcagcaggtcgtgaattctggaatgctcgtaggatgtttggtcgtgttgctatatctcgcgaacaaaatcctaacctgaaagataaagcagggagagaaggttttattgataaccgaagcgcaaaagcgctgcgtgcattggtcattcatattctgcgcaccgcagcctaccagtattttggtcaggcatcggaattacgaaatcaggtactgccagatatacaagataaaaatgacaaggaaaaggcagataaagaacggcaagcattgtccgcaaaaaatacgagccgcttccgttctaacctccggaagaatttgcccttgttaaatgagatatatgccgaaacggaaaatatcctctctgaaacaaaaattgaaaatgaacaggatcttcttaatgctcagtcattaatcactaggctcactgaaaacatggccgatctgcgcctacctggaccacctgccaaacttggtgcaattgaagatgactatcgtgcatacagagccatgtatgcagaaataactataaaaataaaagagttagagggtaggcgggcaactgcaattgagcttataaaaccagctaagcccgaggaaatagcacaaaagcagctaaacagccactcaagtcgtcttcaagtacgtcttagaacttggcgtaaagccattgaaacgatccagaatacagaaagcgaacgagttgcgtctctgtttgacgaacgaaataaagcatttcatcaggaagccatgcccttagttgagaacgtccgccttggccggcgcggtctagacgaagcgcttgccgaaatgaaagcaatttttcaaaagcttgatagtgagaatgaagatacctttcagtcatacctttatgcgttagaaatcatgagcgaaaatattaatattgaacttatcgcgcgacaaggcaccgctgaaaatgtgacgttacgagaagatctaaacaggctcaatcaagtcgctcaacttggcatcaccgttgaaatactcgggcatgaattagcaagtaatgaacggatggtttacgaaggtattcgtcagattcagcaggcagggcagtttgcaggaaccgaactcattatcgaagggtttgaagctttgagtcagcaacttgaatttctttcaccgctaaaagtctctggcaccaaagccaggcggttaataacaggtagagaaattgaagattatctgaataaattttttggtgcagtaatacgcaatagaaagatcaatatccatgcttcagaagagtttcgacggtttgcactttatgaacaaccttcccgtatatatccggttttcgtaaatttagtaaataatagcgtttactggatggttaactcccacacggatgaacctgaagtttttatttcggtggaggaaaagaaaatcattgtatctgacaatggaccaggcataaatcccgttgaccaagaacatctttttaagatgttttttacccgaaaatcgggcggcggcagaggtattggactttacctatgtcgcacaaatttacaggctggcgggcattcaatagcgtataccacggagcgtaagttcagacgtctcatcggtgctaatttcatcattgatttcaagggggccacttttgactga

SEQ ID NO: 280151 - DNA, 1890 bp, Morganella morganii
ttgactgaagcaacaacatttaatgatctggtcaacgaggcttttattctaccgcttcgctccgttttaattgttgatgaccagtaccctacgtgggaagagattttctctgaaaaagtccaaggcgcacctagtgacggctcagagacagatgtggtgacgaagaaaaactggcgttcctccgcaactgcacaggaagtcacgcgcctcatcagacaatttcgagaacataagcctggactaatcattgatattcatgatggtgtgtcaactaatcatgtggaagaagaaaccagaagcgagtcccctgaagaacttgccgatcaccttcatcaatcagatttactcattcttgattataatcttgaaggtccggaggccggaacaggcggagatactgccagaaaaatccttgcatctgttttaaataatcaacattttaatcttgttgtcgtgcacacaagtgaagatcttgataacgttattcatgaatgtttgcgatccctattgacaacttgcacatctcagtactgtgtagagataaagaaacaaattgatcttctagataataaaattatggctcaagaagatcatgggctatttgatcgcagcgtcatacttgaaaagttggatatggcaacttatatagcagccaggcatcctgctaaagagttgcgaaaagtacttggcgaatttatgtccggtaaaggtgcctttatgcaactaaatgaatgggcgaatgaactgcgattacagccagcacaacaaagaatattcttttactgggctattgagcaatttgaaaaaaaatacatcaacgatttcagttcccatcctccaccattacttgactggaatattacagatacctgcaaatggttgcgaacgtcacgaggttttgtgtgctttgtgaataaaggtgctgaaaacttgatggatgagttggaagctgcattactgaactggaagcctaccccatcccggcttctttctgcaaaattccgtaatgaaataagccgtttcggcgcagaagtcgaagaaacgtctctcaagcaaaagcatgcctatgcaaaattctacgaaacgatccgtaatccgggaagtaatgaacttcccgcagaacatatagaacttctgcgcacataccgtttaaaaaaccatgttgcacgtcagtcggaaatgctctccttcttagtagaagatacagtggctgatttcggcagaaaaatttatcaggtagatgtagccagcggatccacttatcatgaacattaccgtgttgacctcagcaaagaagctgaaaaaaaacaggcaataaatgaatataatcgctacgtctgctgccttccttctagaatcagtgaagatggcaaaagtacgtcagagcagttagatagtggacacatcttcaaattaggtgatacctggtgggtctgtgctactcctgcatgtgatttacaacctggccaaagtattatagccttcaataaaggtggtgatgctagtttgcgaccatttaccgctatcagacttcacccttccagcccagataacctgacccaaaatcatattaacagcggttcttattgttacgtcgaatatgacggaaatataataggtttggggatacgctcaccaaaagatgatatcagcagcccagcaatccagaaagttgattggcgtgcatttattgcagaacaaggtggaatgattaaaaatagaatattatcactccttgaaatacaattagagtttaaagacaacactattaaaagtctaccccaaaaggcagaagtagtagcgaaactccgatatgaatatgctctgaattatattcagagagttggtgcgagtgttagcagaattggacttgggtatgttgcgttgtaa

SEQ ID NO: 280152 - DNA, 801 bp, Morganella morganii
ttgctggaggcctaccgtatcgggctgcggcgtggttgccgtctgatgatgcagagccgcacggtctaccactatcaaagccggcgtgacgaccgcgcagtcacgcagcggataagggaaatagcggaaacccgcatccgctacggcgtgcagcgcatacatatcctgctgcgccgggaaggctggctgattaaccataagaaaacccaccgtatttattgtcaggaagggctgaatctgcggacaaagcggccccgccgacatgtcacagccaggcacagacaggagcgcccggcagtgacggcagccgatcagtgctggagtatggatttcgttgctgataatctgttcaacgggcgccggatccgggcgctgactgtagtcgataattttagtcgggaatgtctggcgatagaagttggacagggtctacggggtgacgatgtggttgcggtaatggcgcgtctgaagcagttacagcaccgcgttcctgaacggtttcagaccgacaacggcagcgaatttatctcaaaggcgctggataaatgggcatatgaaaacggggtaacgatggacttctcccggcccggaaaaccgacggacaatgcgttaatcgaatcctttaatggcagcttccgtgacgagtgtctgaacgttcactggttcttgtcgctggaagatgcgcaggaaaagatcgaatgctggcggcaggaatataaccggcaaagaccccattcctcattaaataaccagactccggaggaattcatccgaagtctgcaaaaaggtccggatctctga

SEQ ID NO: 280153 - DNA, 186 bp, Morganella morganii
atgaaaaagacacgttataccgaagaacagatagcgtttgccctgaaacaggctgaaaccggtaccagggtagaggaagtgtgcagaaagatgggtatttctgaagccactttttacaattggaagaaaaaattcggtggtatgggcgtgacagaacttcgccgcctgagacagctcgaggaataa

SEQ ID NO: 280154 - DNA, 783 bp, Morganella morganii
atgaatcttgccgacgaagaattgttagaagtcgcgtggtatttgtcaaaatatgggtataagaagcccccagtcgcgctgggagttgagaaatggaaagatgctgttgcactattttatcctcgatttggggcgggtaaatcattcacagagttttataatagtttaaaaaatcatcgtgatcactacgatgcttggatgagcaatatacgcattggctggcgcaacgacgatggatcaccacgagatcttccctctacatcacaaagagtgttgcagaggatgtgtttgttgtctgatgctcaaattgaacacaagattctaagtaagctgactgatataactgatattcaagaaaaatacgatattgacttaatcgttaaagatcaatcaattgatgagactacaaaagaacgcctgattgcggctagacttggccagggaatttttagacagagatgcttaaaacttttcccagcttgtgctgtgacaggatatacattccctccattacttcgggcgagccatatcaagccttggtctgcatgtgaaagtgccaaggaacgtcttgacccttacaatggtattgtactagctgcacatatcgatgctcttttcgataaaggttggatttcattcagtaatgacggttacattttactcagcaaagagcttgatgaaactatcgtaaaacaactttctttagctgggcgaaaaattaaaaaatttccttcactttcacacgattaccttgagtggcatagagaaaatctattaagataa

SEQ ID NO: 280155 - DNA, 3030 bp, Morganella morganii
atggaaaagaaacagaatcaccgtactgtttattgtttttttttacttttagccgcgtcagccagtcatgccgtaacgataaaaaatggtgaaaccaaagagctggatgacaaatccgcgacgctgaatctcggcaatctgtctgttctgaacggcagtgtcattattaaaaacggcacgcttgaaacacagggtgcaaccattacagaaaaagccggagaaaccgggtatgtcacgctttcgggcagagattcacggtggaataacaccggaatgctcagactaggtatcatcgacagacctctcgattttgatcatatcgtatcgcatgccagcctgaaaattactgatggcgctaatgtgataactgatgatttcgttatgggaaattataacgaggccaggatagatgaaagcggattttatgaattaactgttagcggaaagggatcaaagttaaaagtaaataataatatcctggcatcaacctataattccaacagacttccgaatggcacggtcaccataaatattgatgatggcggcgtaattgaagctgaaaacatgtctgtacatgagatgaaccgtattagccgggatacgtcggttaacacaacgttaaatataaaaaataacggtgttctgaatgtacataaagacttttactttgcaaaatatactcaaaccggacacgctgacacaccgtcagagctgaatgtattatccggcggaaaaatcagggctgaaaatttttatgccggtatacatgatgccggtaaacataattacgaaaatcatacattccccgtttctgtattaatatcaggtaaaggatcatcggttgaggtaaccgataattttgttaccggcggtaatccccgcagttttttaaaagtggcagacggtgctgaaatcagcgctgcaaatatcattatggccagcggaggaacctcttatatcatcgatgacggcaaaaaagccgctccggaggttcttgtcaccggcgcacaatcaaaaataaccgcacaaaatacgatggtgctgggcgatgaagttgacaacgtcatcaccgttgaacagggaggcgcattatctgcccggaacattatcatcggcaataaaagcgcagtcacaacgaataccggcagttacgtcaacctgcttgccggaggtgaaataatcactgacggcatcagcctgaataaggacagttattttgataatgccgttattttttatggcaacggcggcaatgccggtacgttaaaaacggattatattgcaggttttaccggtaataacaaatacatccccgataccggaaacgcgaatctgaaatccggattagtgtttaactatcaggacagcaataacttttcacccgacctgataaacaccatcaatatcattaaagaaaataccaacaccatcacactgaccggaaataacagccgccacagcggaatggttgtgattgatgacggaacattaaaagcaggtaatctgaattcattcggcaacggggttaatgttcacaacagagggaattttgaccttaacggatttgatcagaccatttcctcactggataaccgtggtgttgtccggctgtcaaaaaataaccagacacagacaacattaaatataatcaacaacttaaactccgataacggaacgattatttttaataccgaactgggtggtgataactcagtgaccgataagttaatcatcaataaaaacagcaccggtaataccaccgttcaggtgaataacattaatggccgcggcgaaaaaacagaaaaaggtattgagctgattacggtatccggcgattcatccggggaatttaaacaaagcggacgtattgtgtccggggcatatgaatatacattgcagcgtggcggctatattgcaggaacagacaataaaaactggtatctgaccaacctgtatgtggagccgccggtcaccccggtgccttctgatccctctgttcctcctgaaccttcagtcatcccggtgccttccgaaccgtcgcttcctgttattgaccctgcaaccggcagttacgccgctaacacactggcggcgaataacctgtttgacctgcgtcttcacgatcgcctcggggaaacccgttatacagatgccctgacaggagagacgaacgttacatcgctgtggctgcgccaggtcggcgggcataaccgcttccgtcagttacaggggcagttaacaacgcaggacaaccgttatgtcgcacaaattggcggcgatctggctcagtggtcaaccgatggtctgaaccgctaccatgccggcgtcatggccggatttgcagatcaaagcagcaaaaccaaaaaccatattaacaactattattcaaaaggaaaaacaaccggttacagtgctggcctgtacggaacctggtatgcggatgacgcggataaatcagggttatataccgatgtctgggtgttatataactggtttgatcatgaagttcacagtgagcagttttctgcggaaaaatacacatcacgcggagtaacagcctcggttgagtccggttatacctttaaagccggggaatttatcaccgccagtgacaccgtaaataccttcttcctgcagccgaaagcacaaatcacctttcagggtgtgaaagcgaaaaaccacaaaaacgccggcgactcagatatccgcagcagcggggataataatatccgtacccgtctcggtctgcgggcttatctgcacggccataatgtcattgatgatggtaaagggcgtaattttgaaccttttgcagaaataaactggatttataacagccaaaaatacggcgtcagaataaatgacgaccagtttgatatcgccggtacccggaatatcggggaaataaaagccggtgttgagggtcagattaataccaacctgaatctctggggtaacgtcgcccagcagatcggcgatgccggatacagtgatacacaggctatgctgggtgttaaataccttttttaa

SEQ ID NO: 280156 - DNA, 450 bp, Morganella morganii
atgccaccaaaaatcgaaaaaacagttacaaatcaaaatatagcatcacttgatgctaaggataaggcctacaagttttctgtgggtaaagggctatatctgttagtgaaacctaatggtgctaaatactggcgtatgaagtaccgaattgacggaaaagaaaaaagcttatcctttggtgtctaccccgatatatctattgaacaggccatacagttaagggatgaagcgaagagcaaattgcgtgtaggccatgatcctgctttagacaaagcaatcgacagagaaagtaaacgaatcgaaaaagcgaaacaagtttttcaattctcgctctctgataacggtgggttaaccataaaactaaaaaatagtaagttagcacttacaccggaccaaacggaagcagtgcgtctattcttaaatgcaggagtaactcatggcactgactga

SEQ ID NO: 280157 - DNA, 1218 bp, Morganella morganii
atggcactgactgatgcaaaattgcgaacattgaagcccaaagaaaaagtataccgacttggtgacagtgccggtttgtatatagaagttgcagtaaacggttcgcgctactggcgcatgaaataccgtttcttaggtaaagaaaagagattggcattcggtgtctatcccgaagttaccttagctgaagcacgagaaaaaagagatgcagcaagaaaactactcgcttcaggaagtgatcctgctgaagcaaagaaaatagcaaaagctacccaacaggcaaatgctgaaaatacctttgaagccgtagctcgtgaatggcatacctcgaaagcagatcgctggtcactgcgttaccgtgatgaaattatcgatacctttgaaaaagatattttcccctatattggtaaacgtcctatcgctgaaattaaacccctggagctactggaaaccctgcgaaaaatggagaagcgcggagccttagagaagatgcgcaaagtccgccagcgctgcggagaggtctatagatacgcaatcattacagggcgagctgaatataaccctgcaccagatcttgcatctgcattaactcctccgaagaaacagcacttcccgtttttaaccgctgaagaactaccttattttcttcaagatttagctggttatacgggcagtgtgatcaccaaaacagcgactaaaattattctgctgacagctgttcggacgcaagaactccgctttgctcgttggcaggatattgatttagaaaaagggatttgggaaatccctgctgaagtgatgaagatgaagcgcccacatattgttcctctgtccgagcaagtcgtcatgctgtttaaacagttagaaccaatctcgaaacatcatccactggtctttatcggtagaaacgatccacgcaaacctatcagtaaagaaagcattaatcaggttattgagctacttggttataaaggccgactaacaggccacggttttcgccataccatgagtaccattctgcatgaacaaggctttaactcagcatggattgaaactcagcttgcacatgtcgataaaaatgcaattcgtggtacctataaccacgctcaatatcttgaaggtagacgagaaatgatgcagtggtatgccgactatatcgattcattgagaaatggtggaaatattcttcatgggaattttaatcgccaaaaagcatag

SEQ ID NO: 280158 - DNA, 285 bp, Morganella morganii
atggaaaattacatttgttgcccggtatgcgattcaacccatattcgcgaacgccatattggtaaaaagggcggtgctgttgctggtggcgtttcaggggcattaagcggggcagctatcggctcagctatccctgttgtcgggactattgccggtgcggctgtaggcgcgttatttggacggtttgtggcaggagcagctgcgggagcggtgacgggggctactttagatggggtagtgtttgatcgctatgagtgtgtgaattgcgaatacacattcgactga

SEQ ID NO: 280159 - DNA, 3072 bp, Morganella morganii
atgaaacttaaattcaaacatcagccctatcaggttgcggccgtgcaggctgtcgtcgatatttttcaggggcagccaccggcctctgatgcggctatgagctatcgccttgaccctggtaataccaaaaacggcatgggtgatctgtttgcggtagatactggttttaaaaatgctgagttaatcctcagtgaggttgccttgcttgataacatccaacaggtacagcgccagcaaaatctgccgttgtcggagagcgtggtcaagactaaggtcgctaggctaaatcttgatatcgagatggaaacggggacaggtaagacctactgctacatcaaaacaatcttcgagctgaacaaacagtacggctggaacaagttcgtcatagtggtaccgagcattgcaatccgcgagggagtgaccaagtcgttggaaatcacggccgagcactttcaggagacctaccacaagaaggcgcgattctttatttacaactctaagcagttgcaccatctggagagcttctcctccgatgccggtatcaatgtcatggtgatcaacgtacaagcgtttaacgccaccggcaaagataaccgccgcatctatgaagcgctcgatgattttcagtcacgtcgcccgatcgatgtgatcagcgcaaaccgccccatcttgatcctcgatgagccacagcggatggagggaggtaagacgctggattccctggctaatttcaacccgttgatggtgttgcgctattccgctacccacaagaccacacacaacaagatccaccgcttggatgcgctcgatgcctacaaccagaagctggtgaagaagattgaggtgcgcggtatctcggtgaagggactggcgggaaccaatgcctatctctatttacaagccatcgaaatctcaaacaaaaaaccgccagtcgcagttgtggagttcgaacagaaactcagcggaggaaacatcaagcgcgtcactcgcaaattgggcaagggagacaatctgtttgtgctatcgaacgagctggatcaataccgcgatgggtttgtggtatcggacatcaatgccaatacggacacctttagctttaccaatggtgtagagctgatggtgggtgatgcgactggtgatgtttctgagatagcgctgcgccgcattcagatccgtgagacgatcagggcgcactttgataaggagatggagctcttcgataaaggggtgaaggttctctcgttgttctttatcgacgaagtagccaggtaccgggattactccgctgccgatgaaaaaggcgagtacgcaaaaatctttgaggaggagtacgctaagcaccttcaagaggcctttgctaatgggtttatggagggggatgccccttatgctaaatatctacgccgcattgcggccgataagacgcacagcggctacttttccatcgacaagaagagcaagcgcctcaccgatcccaaggtcgctgcgcgcggtgaaaatgctggcttgtcggatgatgtagatgcttatgatctgatcctcaaagacaaggaacggttattatcactagctgagccggtgcgttttatcttctcacactcggccttgcgtgagggctgggataatccgaacgtgtttgttatctgcacgctcaagcatagtgataacaccatttcacgccgccaggaggtcgggcgcggcctgcgtttgtctgttaatcaaaatggtgatcgcatggatcacccgtccattgttcatgacattaacgtactgacagttgtggccagcgaaagttacaaggacttcgtgactgccttgcagaaggacattagcgagtccttgtcagctcgtccgcgtgtggcggataaggcctacttcacgggcaagatgctgaacacgaaagaaggcccgattacggtatcggacgaccaggccacggacatcgagttttatctgatccagaacggctacgtcgataagaaacgcaatatcacggagaagtaccatcaagctaagaaagacggcacgctggaggcattgccggatgaactgcaaccctatgcagagcagatatttcagctgattaatagcgtattcagcgaaagccaactcatgcagatagacgatggtcgtaagcctaaaagactgcagaccaacgccaactttgaaaagaaggaattcaaagcgctgtgggggcgaatcaatcgcaaggctacttacaacgtgttgtttgatgatgttgagctagtgaacaatgcgatcaaggcgctcaatgataagaatgctgggttgcgagtgacgccgttgcaatacaccattcaccgtggcgagcaggctgatacggcaacttacgatgacctcaaaaagggtaatgccttcgagttgaaaattaccgaaacagaatcgcacgacgcctccacccactccgctgtgcagtacgatctgattggtaagttagcagaggggactctgcttacaagacgcaccgttgccgaaattctaaaaggccttaatgctgatatcttcgcacaattcaagagcaacccggaaagcttcattgctgaggccattcgcttggtcaacgaacaaaaggccaatgtcatcatcgagcatctggcctatgacacgctagaagataagtttgatttggacatctttaccacgggtcagagcaaacaggatctcagtaaggctgggaataaattgcaaaatcacatctatgattacgtacttaccgactctgcgattgagcgtaaattcgtcgaagagttggataccagcaaggacgtggtggtatatgccaagttgccacgtggttttctgatcccaacccctgtcggcgattacaaccccgactgggccatttccttcaaagaaggttcggtcaagcatgtgtatttcgttgctgagaccaagggctcaatgtcgtcactggatttacggcctattgaagccaccaagattaaatgtgcccgtaagttcttcgatgatatcaacaagaagtttgctccagaaaacgtgaagtatgacgtagtggatagcttcggtaagctgatggaagtagtgaagtaa

SEQ ID NO: 280160 - DNA, 1857 bp, Morganella morganii
atggaaaaactaaaaatgcattcacccgctctcacgcaggacaacatcgcctacattcgcgatctgtttccaggttgtgtcaccgaagccaagggcgaggatggcagcgtaaggctggcggtggatttcgaccagttacggcaagagttgtctgagtcgattgtggaggggcgggaggaacgctaccacctgaattggccgggtaagcgcgaggcgcttttgacggcgaatgcgccgattgccaagacgctacgcccctgtcgcgatgaaagcgtgaacttcgacaccacgaagaacttgtttatcgaaggcgataacctcgatgcgctgaagttgctgcaggagacctatctcggcaaggtcaagatgatctatatcgacccgccatacaacacgggaaatgatttcatttacgaagatgactttgctgagggcactgaggagtttttgaagagatcaaatcagaaggatgagaaaggcaatcgcttggttgccaatacatcatcaaacggacgattccattccgattggttatcgtttatttatccacgcataaggcttgcaaggcggcttcttgctgaagatggatttatctttgccagtatcgatgatatcgaaatcgataatctgaagaagatatttgacgaggttttcggtcaagaaaatttcgtagggacttttgtgtggaaatccagagttagcgaggacacaagggcagtaagtggcctgtctactgaccacgaatacatcgtctgctatacaaactcgactggtgcgtcgcttaggggaagtgagaaggacctggataaatttaagaatccagacgatgatccgcgcgggccatggaggagtgctgacatgacagggcttgctacacgagacaagcgacctaatttgcacttcgacttaatcgatccagaaaccggtatcaactacggatgccccccgaaaggctggcgttttgagcctgccacgatgaatagaaaaatcgccgaaaagcgggttctatggccttctgacacgcacggcagacctcggcagaagctttttctgaacgaaatggagagtatctttaaaaacatatcttcagtgatacaaaatatttcaactggcgatggaacaagagaggtcaactcgctaattgggagcggcatcttcagtttcccgaagccgactcggcttattgagattttccttgagcaagctacagataaagattcaatcgttgtcgatttttttgcaggttcagcttcaactgcgcatgctgttctgaagaaaaatgcagatgatggtggcaatcgtcgtttcatcatggtgcagctgccggaggcatgcatagaagattctgaggcattcaaggcaggctacaagacaattgctgaagtgagcaaagaacgtattcgccttgcagggaaacaaattaaagaaggcgggaggtcgatagagaccggttttcgcgtcctcaaaattgctccatccaatatggccgacgtttattatgctcctgataggactcagcaagacttactctctgaacaaatcaacaacatcaaaccagaccgcacacccgaagacctgctgtttcaggtaatgctggactggggcgtcgatctgacgctgcccattgccacgcaatccattcaaggaaaagaagtgttctttgtcgatggcaatgcgctggccgcctgcttcgatgccagcggcagcatcgacgaagcttttgtgaaagaactggccaaacatcagccgttgcgcgtggtgttccgcgacgcaggctacaaaaacagtgcggtcaagatcaacgttgagcagattttcaagctcgtgtcacccgccaccgaagtgaaatgtatctga

SEQ ID NO: 280161 - DNA, 2700 bp, Morganella morganii
atgacacagagctttaatgatgagtcaaggatacacatcgagcagatcgctgttgaagcgttggcgcaactcgaaagtatcgctgaaaccgctaggggcaagctcaacgacgggcggacacctagttcagatgcgctggcaaacatcaacacaatgacgtccagttcagccatccaaaggctggataagatcagccaggcgaaccgcgaaagctatcaggtactagtgacagagcctgccattgctcgagttgtggtgagcgatgaagagggtgatgaaaaaacctactacatctgccgcacgatgccggtatcaggctttcccaatttgtctagttaccgtgcgccggttggacgtttggcctcgttggcaattggcacagagttcacgctccccaatggaaccgtcgttgaggttcttgagcgggctctgcttcggcccaatgcgcttgcagatgggtgggactctcgagacaccgtcgttgaagccgagcattttgggccgttcaccatcgagtcgctgcgtgcgctgctgaccgaggttgctggggaggctgtcaccgaagacattctgggccaattgctggccgaagagaccgccaaggccaacattatcgacggcgttcgccgcagcgttatcaccaagatgggactgcgggatcagcccatcctcgatcaataccaggacgagattttccgcctcccgcttgacgagcgcttgttgatcctgggcccgccaggtacaggcaagacgaccaccctgatccgccgcctcggccaaaaactcgacaccgcctacctggatgaaggcgaacaacgtctggttgaaacaatcgcttcagcccaaggcattgcgcacgccaacagctggctgatgttcacgcccacggaattgctcaagcagtaccttaaggaggcttttgcgcgtgaaggtgttcccgcctcagatcagcgcatcagaacgtggcaagactatcgacgcgagctggcccgaaacgcattcggcgtcctcagaacggcttcaggtggaggtaccttcgtcctgaaagacggactgaccaacctgaccgatgccgcattagagcgccccattcaatggtttgaagatttcgatgcatggcagcgcaaggcctacgtgcaggagctgcgtgagtccgcagcacagctccacgatgccaaagctcccgaagtcctaagtatcggtgcacgactgcaagacatcttgtcgcgggcggccgacggcgcactggcaacaatgtttggctcactggcggtggagactgccaaagtgcaggcactcttcggcagcctgaaggaagactcggatgccaagatcagagccgcactcaacctgcagctcaaccgcaacagagcttttcgggatgagttggcccacgtgatcgacagcctacaacaagcgcaagcgactgatacggacgatcaggacgatccggatgccgatgaagaagacgccacaaccccccgcacaggccgtaacgctgcgctcaatgcctacatgcaagcagtgcgcgcccaagcccgggcggcagcatccaagcgcacagtcagtaaagcctctcgtaatggcaaaatcatcgagtggttgggagatcgtggtctgacagaagcggatcgcgctgaggtgggtgcaagccttctggtgcaagccagtgcacgccgcttcgttaatccggtcaagcgctacctcgatgacattccgaagcgctaccgtgcattcaggcgcgaacatcaaccggcgaacacttggtatcgccacgaaggttttgaggcccgcgacatccatccactggaattggacatcgtcttgctcgcaatcttacgcgccgcaggcgacctgatcagtcggcccaacgttcagcgcaacattgatagccccgcctggtcatcgctccagcccattctggggcattactgcaaccagatcctggtggatgaagccactgacttctcgcccattcagctggcgtgcatggcggcgctggcgcatccccgactgcgctcattctttgcctgtggtgactttaatcagcgcctgaccgcctggggcacacgctctgccgacgacttgaagtggatctttgaggattttgatatcaaggagattactgtctcctatcggcagagtaagcaactgaacgatctggctcgcgccatgatccgcgctgtcggtggcattgagcaaaacgccagcttgcctacatatatggacagcattggtgttgcacctgccttgctggagcacgcgaccaacgcagaaaccattgtcggttggttggcagaccgcattcgcgagattgagcgctttgtcggtcagttgccatctaccgccatttttgtaaataccgaggacgacgtagtcccggctgccgaagcactcaacacagccttggcggagcacaacatccaggtcattgcttgccgagagggccagactgtggggcaggaaagcagcgtgcgcgtattcgacattcagcacatcaaaggcctggagttcgaggcggtgttctttgtcagcattgaccagctcgccacgctgcacccggcattgttcgacaaatacctgtatgtcggcaccacccgcgcggccacctacctgggcgtgacctgccagggcagcttgccatccgccatagaaagtctgcgtccgcacttttgccaggactggcaacaaggcgactga

SEQ ID NO: 280162 - DNA, 702 bp, Morganella morganii
atgagtcagcccgtccaatttgagtcgaataccgcgttcatcaactatccgaagcaagctgtctttgggcgtaccctgccaaagaataagatctacgaacacagcggtgccaatacaaggctgaaggacttgttcgtcgagcaggtggagcagatcgtctggcaatacaagttggctccggaaacgatcaacctgcccgccaggccgggagtaccagagcttcagatcttctcggtccggctcaagacatcggagctgaatctggacgttttgcgttgcatcgatggcgcagtgcagtttcccatcatcttcgagctgagctttgacggccaaacaaaggtgatcgctgcatacaagcgaccgaatgagtcagacaccagccgttgggtcatgagtgactactttacgacagcctggttgccgagtgactgtgagcgcgccgctatgcctttagcactcgacttgggcggcttgtatgagcagacacttcatcgcctaatccccacgcctgcgcgcccacgagaaagtctcgctgacttggtcgtacgcgtcgaactggttgaagccaagctgcgtgaggttgagaaagctgccagcagacttgccaaagaaaagcaattcaaccgcaaagtggagatcaacgcgcatttgcggcagcttaaaaaagaacttgaagaattgaccgggagtgagagtgcatga

SEQ ID NO: 280163 - DNA, 3279 bp, Morganella morganii
atggaactgatcgacaatatcaaccgcctgctcggagacgacctaaagcagacgctcaaacctggtgctcgcctgaagatcgccgcctcctgcttttcgatgtatgcgttcgaagccctcaaagcagagctggaaaaaatcgacgaactgcaattcatctttacctcgccgacgttcaccgccaacgaggttaccgataagattcgtaaggtacgcaaagaattccacataccgaaggctgaccgcgaacagagtctgtacggaagtgagttcgaaattcagctgcgtaacaaactgactcagcgcgcaattgcaaaagagtgcgcggactggatgcggcgcaaggcaacatttaagtccaatcgcagtaaggcaccgatgcagcagtttgcttgtgttcaggccgcagctgcagaggctgcctacatgccattgcacggttttacagccgtcgatcttggctaccagcagggtaacgctgtctccaacttcgtcaacaagatggatgagccgacgtttacggcgacctacctcagtctgtttaaccagatctggcaagaccctgagaagctggaggatgtaacggcgcagatctgcgaccacattgcgtccgtctaccaggaaaattcgcccgagagcatctacttcctgatgctctacaatatcttcaatgagtttctggacgacatcaacgaggatgtcctgccgaatgaccgtacgggctatcaagacacgctcatctggaacaaactcttcaattaccagaaagatgctgccaccgggatcatcaacaaacttgagagctacagcggctgcatcctggccgacagcgtgggtttgggcaagacttttaccgcgctggccgtggtaaagtattacgaactgcgcaacaagtcagtcttggtgttatgccccaagaagctggcggacaactggctgaactacagccgcaacctcaagaccaacatatttgctcgtgaccggttcaactacgacgtgctttgccataccgacctcagccgtacgagcggtgagtcgttcggtacaccgctgaatcgcatcaattggggcaactacgacctcgtcgtccttgatgagtcgcacaacttccgcaacaatgacgcctacaaggacaaggaaacccgctaccagaagctgatgaacaaggttatcaaggagggcgtgaaaaccaaggtgctgatgctttcggctaccccggtgaacaaccgcttcaatgacctgcgcaaccaactggcactggcctacgaaggcgattccgaaaacctcagcaagaagctgcgtaccggcaagacaatagaggagattttccgtggcgcacaggccagcttcaatgcatgggcaaagcttccatcggaagagcgcactgcgcgggctatcctggattcattggacttcgacttcttcgaattgctcgacagcgtcaccattgcacgttcgcgcaagcatattcagaccttctacgacaccaaggaaatcggccaattccccgagcgccgcaagcccttgtcgttccacagtccgctcacgcagcgaacggatgtgatgagcttcaacgagatcttcgagcagttgtcgttgctcaagctcgccgtttacgccccgatcagctacatcctgcccagtcggctcaagaagtacgaggagatgtatgacactcaggtcgcaggcaaaggcaaacttaagcaagtcgaccgtgaaaagagcctgcaggcattgatgacgaccaacctgctcaagcgcctggaaagctcgattgagtctttccgcttgacgctcaagtccctgcgcgcgaaccacacgaatacgctgaccaagatcagcactttcaatgaaactggcggcctcagtggcattgacagcagaataaatgacctgaccgaacagttagaaaacctcgacgtggacgatgacctgccaagcaatggtgacagtgagatcggtggcaaggtcaaaatcagcctcgccgatatggacttgccttcttgggagcacgagctgaaggtagatctggagatcattgatgccttgctgacgtcgatgaacaagatcacggctgccgatgatgccaaactgcagcatctcaagacactggttctgaagaagatcgcagcaccgctgaatcctggcaacaagaaggtgctgatcttcaccgccttcgccgacactgctgactatctgtatgcccatttagctccggaattgctggccacacagaccttgcacagtgcgaaagtcaccggcaaagggggaccgaagagcacgctcaagaagggctatgacttccaggaactgctcaccctcttctcgccgcactcgaaggagaaagccattgtgctgccaaatgaggcagcagagatagatttgttgatcggcaccgattgtatctctgaaggccaaaacctgcaggactgcgactaccttattaactacgacatccactggaaccccgtgcgcatcatccaacgcttcggccgtgtggatcgcatcggctcacccaacagcagcatccaactggttaactactggccagacatctctctcgacgaatacatcaacctgaaggaacgagttgagagccggatgatgattgccgatgtcacagccaccggtgacgacaatgtgctgagcgcccaagccaacgacgtgtcttatcgcaaagagcaattgcgacgtttgcaagaggaagtgattgagctggaagacctgaaaaccggagtgtcgattactgatctcgggctcaatgacttccgaatggacttgctcaactatgtgaaggccaatggcgaattgagcaacgtgccaagcgggatgcacgccgtagtgcctgccaagccagagatgggcctgtgcccgggtgtgatcttcacgctacgcaaccggaatccaagcgtcaacgtcagtcagcacaaccggttgcacccttattacctcatctacattaatcgcgagggtgaagtcattcacgatcacacggaggtcaaacgcttgctggatctggtacgtacctgctgtaaggggcaagcccagcctattacagatgcatgtctcctgttcaacatggaaacggctgatggccgcaaaatgcaggtgtattcggacctgcttggcaaggccatccgctcaatgattgaggtgaaggaagagaaggatctggacagcctcttctgcgcaggcaaaacctccgcgctggttaataccatcgccgggctggacgacttcgaactgctcaccttcctcgtaattcaggaggccggatga

SEQ ID NO: 280164 - DNA, 399 bp, Morganella morganii
atgacaagtttgcagcaaagtgcggagctacaccgccaaatctggcagattgtcaatggttcggtgaatggatgggatttcaagcaatacgttctgggcgcactgttctatcattttagtagtgaaaattttgccaatttcgcgccttatccacgcgttgaacataccttgatcatcaagatggactactacgggatgaccgatggctcaatcaggatgcgcgttcgtgcggcggtggtggactatatgttgcagcgctggcgggtggactgctcacccgatcattgccttcgtggaccggagtaccggttatggctcaaagatcatctcgcaatttatggcgtaaaaaatgtcttactggcaccaggctatagcgccactaagaaggctgactattaa

SEQ ID NO: 280165 - DNA, 228 bp, Morganella morganii
atgacgattcaaacagccttaaccaacagcctgctgaatgaccagttcgttgatatgaaatttattacccgctttactgggcttactgataaatggttctacaagatgatacaaaacgggaagtttccaaaacccattaagctggggcgcagttcacgttggttacagagtgaggtggcggcgtgggtgcaggcgcagattgatgaatcacgcccactgagccattga

SEQ ID NO: 280166 - DNA, 534 bp, Morganella morganii
atgaacacttacaatctgaatgaactggaactcggtatcgctgaattacctgatggccgcctgacgaatgtgtttaaagagcaggaacgctggcaacctgcgctgccactatccttttactgtccgcactgccacttaccggtgtatctggatcgccgtaaacggcattttttctttacacaccccgttgataagaagtacctcgactgcccggaggtcaaagcggctatcagttatctgacgcgacaatccgaacaagctgaacagttctccgagcctcatcccataaagcccatcactgagtggtattgcgtctggtgccgacggttttacaccagccaacagcgagcggtcaggaagtgctgtccgaaatgcagagaggggatttacagcataccggcttgtcaggttaccgaagaccacaactattttcattacgcgctgaataatcagggtattgaatcgttggtacggaccccattgctgcggctgactgccaccagtgaaccggatgttatcgatgagacgcaataa

SEQ ID NO: 280167 - DNA, 369 bp, Morganella morganii
atgaaaaaaattttagtattggtgttgtttacgttatctgcggcggccacagcagatacctttgaatgcgatgccgtatctcagcttaaccgccctgcccccaacgggagtcgttcagtgcagcctgttacctttgagttcagcaaatacggcgcttatcagcaggacagtaataatgggtctaaaacccattatggcgaagcggaatatgacggcatcgggtattaccatacgtcggaggatggacgggttaatctgcgtcaggaagtcgaacccggtaataaccgtccgattgtcatcgcttattttgtcggcacagatgccgctacggtctacagcaactgtaaactcacggcaacagaagaataa

SEQ ID NO: 280168 - DNA, 567 bp, Morganella morganii
atgagtttaattttcattcctgcattacagaagtcattacatcgtcaacagtcagcgttatttgagcgttattccaaaatattgatgatacggacggacttccattggtctgataataccgaccgttttcattacggagatgaacatcaattcagtcgggatatgagtatcctgatgttacgtctttcagaatatcccggagtaataggttatgcctgggtattggaagaaagcctgagtggtaaattacatgctcatgcagccatctacgtcaatggtcagcggcattgtaagaagtggggctttcaggatgtaacagaagccctatggcgtgaggtcaccgacagggaaggctattgttatcattgccctgataaaaaggattatcgttattccatacgtcggccggtctcctttgatgatgtaaagagccgtaaagccatgcgttacgtggtgaactatttcaccaaaacagaacagaaacccttcgaaccgatttaccatatctcccgtccacctgatgcgaatgataaacggcttggtcgtccccgctctcgtcatcgctaa

SEQ ID NO: 280169 - DNA, 858 bp, Morganella morganii
atgacaaataaaaaagataacagcaggtaccaattcaatactaatgatataaatgagtctcgttatattatcgagatgatatacagagatatattcaacaccagaaaatcatatagaaatatttatgaaatgagcaatgatgaaatctccgcaaaaataaacagacttattcctgagaaagtaggcatcatccaaataaaggcatactcagaaagatataaagaagaaatgaaaagattccgtgaaaaaaatctctcatgggttgagggtaattttcactccgctctctacttatggttttccctctttatttgtaggagaaaaagatattcagacagagaactaaacagcattactttccgaggaaaaaaagcaacacctgaaacaataaaaaacataataaacgatattttagagttttcctcatcggaatttagccagttaaaacgaatagaggatgagataaacggtattcatgaagaatatcaaaacctaacaggtcacaagcgactcacttggttgaaagatgacgaggaacaaataagttgggcgtaccagtaccttaaggaaaaggatcggtacttctcaagaaactatgcagttgaccacatacatgctctcacctgtatcaaggtctattatgatttaaacataaataataaagaagtattatatactttcttggaaatgagcaatgcttggaatcaaaaacgatatcgcgaaaaaagaaagaatgataacaaaaaagcattgagcggatatattagtaacgaagcaaagaatagattaaaagaaatttcaaaaaaagaaaaaatgtctgaaagtgaaatgatagaatttcttattatgacctactga

SEQ ID NO: 280170 - DNA, 435 bp, Morganella morganii
atgtttaatcttcagactcaagagcctgaactcatcaaaaccaatctcgttaactcccgtggccgcactaccttctggcgtttctatttcggcactgtgcctgtctggaagcgtttggaaagcgatatctttacactgatggataaaatgtgtgagctctatcagggagccttctgggagttcagtatgctatctaacggtggagtgtttatctggcctgatatgcccgaaacctcgttacatctgtttaacccacataacggcaatgaggcggagttaagcccggaggcagccggtatcgcggtgtgtctgatggtttacagcatcaggtcctttaaaacggaaagccctgtactggtggagtatttttaccagttgcgtgattacgctatacagcatccggagcaggctcagatatttcgcctgatagactga

SEQ ID NO: 280171 - DNA, 837 bp, Morganella morganii
atgtctcgtttagcttcccgttttggcaatgcctgcactattcgccgtgaccgcccgttaaccaccgaagaattatactgcactgtacccagtgtcttttcagcagaaaaacatgaatcccgtagtgaccgctacacctatattccgaccattactctgcttgaaagcctgcagaaagaaggtttctatccgttctttgcctgccagacccgcgtcagggatgacagccgtcgggagcataccaaacacatggtgcgccttcgccgccataaccagattaccggcatccaggttccggaaattattctgttaaacagccatgacggcagcagcagttatcagatgctgccgggattatttcgtgcagtctgtcagaacggattggtctgtggtgatacctttggtgaggtacgtgttcctcataagggtgatgtcgtgggtcaggttattgaaggagcgtatgaagtactgaaaacattcgatgctgtggctgaaaaacgcgagcagatgcagtccctgctgttaccaccaccggcacaacaggctctggctcatgctgcgattatttatcggttcgggaatgaccaccaaccggttacggagggacaggtactgcaactccgccgatgggaagataagaaggatgacctgtggacgatatatcagcgtttgcaggaaaacctgattaaaggcgggttatcaggacgtaccgctacaggaaaacgttcccgtacccgatcagtgaccggtatagatggtgacatccgtctgaataaggcgctgtgggtgatgactgaaaaaatgtatgcgcatttcggaagccgtcaaccaatctga

SEQ ID NO: 280172 - DNA, 549 bp, Morganella morganii
atgatgacacttctcacgagacagcttgaacgacaggaaatagcgcaggtctggtcaatcgaccggaccgagctgattgaacatttgtatctgcaccggaacggggagctggtgctctccgcgcagcgctttgacatgcgcgactggccggagggcgaggcggagcattacacgccgatcctgctggacagttttgatcgcggtgcgccgtttttcggggtgtttgacggagagaagctggtggctgccgccagtgttgatccgcgtccggtggcatttgaggaagatgaaacagcgctgcgtcagctctccttcctgcatatcagcaaggcgtaccgtgggagagggatcggccgtcagctctttgcctgttgtgaaacggcggcaaaagagatgggcgcaaagggattttatatttcctccatcccgtcagaaaataccgtgcatttttatcagcatctgggatgtgaactgatcgcaaaaccggatccggcactgtttgcccttgaaccggaagatattcatttcgtgtctcttttccggaactga

SEQ ID NO: 280173 - DNA, 255 bp, Morganella morganii
atgacattgacgttttcgtctcaggcatgggaagactatctgtactggcaaaatacagataaaaaaacgctcagacgtatcaatgaactaattaaaaccgcacagagaacacctttcacgggaatcggaaaaccggaaccactgaaaaataatctttccggctggtggtcgcggcggataacagaagaacaccggctggtttaccgtgttactaaccagggagttgaggtggctgcctgccggtaccattattga

SEQ ID NO: 280174 - DNA, 1383 bp, Morganella morganii
atgaaaaaaagtctgtttgcattaattattacacctttgttcgcatacgcagaagatgctgtgaataaccatcagccaaactcaacgataacggaagtaatatttagtcctctgtattatggagaaccacctgtatatgcagataaaaaatctgaaggtgaccggtcagcaggtatctctgaattaaatcagcttcataattatatgcgcagttatatcattgaaaataatgaatctgcagggaaactccatgaggaaatcgccctgaatcaaaggctggcaatggatgacacaggaaaactggatgataaaataacattagtcagtgatcttgtgaaaaaaacagatcaaaaaataaatgaatttatggtggatattacagaaaataaactaccggaatataccaaaaatatctttcctgagttagtaaaaaatgaagttggcagccatatgactgcggtactggaaaataacattaagcccttagaagagcgtacaggggcactggaaagtcaaacacagcagttagatatacaactggatatcacagcgcgaaaagcattgcacaataatgagcttctcggcactatccccggtatgatcaaaaaagagatagaaaatgttaattttcaggttaataacctgagaaatacagtatttcaaaatacattacatttacagaatgaacaaaataatactgattcagcggcacttctgacgcaggaattgacagttacagcaactgaaatgaaaacaagcatcgatttattaaaatcaaaggttgaatttaatgaagagatggcaataaaagcgaattatgaagccgatgctaatgaaatcagcatcagcgaaaatagtaaacagcttgatattcatgcaacagaactccagcaaaataaaaagctgctggcgtctgccaaattagtgacatcagcgattaccgatgcaaccttagcgctggaagcggatgtgaataaactggatctccgtatcagtaatgcatcgagaaaagccggtactgccacaaatgtggctaatcaaaacacacggcatattgctgagcagaaagtgaaggttgaaaaaaacacccaggatatcctgaaaaaccgccaggatctccgttcactggaaaatgatttacgtgaaaccaacgagcgccttgataacggtctggcggccagcgccgcactgaacggtctgttccagccgtacggtgtcggtaaactgaatatcactgcggcgatgggcggataccagtccactcaggcagtagcagtgggaaccggttaccggttcaacgagaacatcgctgtgaagaccggtgtcgcatacaccggttcgaacgatgtgatgtacaacatggcttttaaccttgaatggtaa

SEQ ID NO: 280175 - DNA, 192 bp, Morganella morganii; identical to SEQ ID NO: 275993

SEQ ID NO: 280176 - DNA, 792 bp, Morganella morganii
atgagcaatctgattattgttgacggtattaatgtgcgccgggacatggccggtcgctattgcctgaatgatttacaccgtgccgccgggggtgaagagcgccataagccatctaactttatgcggatggaatcaacacaggcattgtgttcagaaatcgaccgatgctcagatatgagcatcgcctctgtaaacaccattcgcggcggtacggagcaggggacatatgttgcccgtgaggttgtttatgcctatgccatgtggataagcccgctgttcaacctgaaagtaatccgtacgttcgatgcggtggccggaacacagcaggcggtacagctggctgataaggtacaggctggcgctatcctgctggagtccatggcgaaaacgctgaatctgtcgaattcctcaaaactgggcgggtatcagaaactgcaaaaaatggctggtcttccggatctggctccctcctatgcgattgatgcaccggcgggcgcggtggatggttccagcagaccgacaacatccctgactatgctgctgaaaaatcacaatgccgcattgtctgcgaccagagcatacaaacgccttgctgagctggggattgtcgaacagaaagcccgtccgggttcgaagggaacacaaaaactgttctggtctgttacatcaaaggggcttctgtacggtaaaaatattacatctccggcgaacccgagggaaacgcagccgcatttctttgagagcaaatcagcggaactgctggcactgatgatgaccccggcggtggcctga

SEQ ID NO: 280177 - DNA, 2838 bp, Morganella morganii
atgaatagacctttattcagtaagaccccgacagtctcggtactcgacaaccgaggcctggtcgtgcgcaacatcgcgtatcaccgtcaccctgatgctcctgaggtgacaaatgagcgcatcacgcgccacgggtacgatgcccgcggcttcctgatgcagagcaccgacccccgcctgcacgataacgaactggtgaacttcagctacctgacgaatctggccggtggcgttctgcgtacgcagagtacggataacggaactatcgtcagcctgaatgactcagcagggagaccttttatcgtcgtcagcaatatcagtaccgcgggtgatggcacggaggacagaagctcggcagttacccgcacccggcagtatgataatgccggtcgtccggtgaaggtgaccgaacaggtcggtgatcagcccggccgtattacggagcgtttcgtctatgccggccatacggatgcagagaaggctctgaacctggcaggaacatgtatcagccactacgataccgccggactggtgcagacggacagcattgccctgaccggcgtgcccctttccgtcacccgccggctgctgaagaatgcggacagcactgacaccgtggctgactggcagggagaagatgtatcagtccggaacgacctgccggacaatgaagcatatatcaccctgacgactgcggacgccaccggatccgtgctgactaccaccgatgcacagggcaatatgcagcggatggcatacgacgtggcgggtctgctgtcgggcagttggctgacggtgaagggggatacggagaaagttatcgtggcttccctgacgtattcagcagccgggcagaaactacgtgaaaaacacggcaacggcgtgataaccacgtatacgtacgaaccagagacacagcgcctgatcggcattaaaacggaacgtccggctggtcacgtgcagggtgtgaaggtactgcaggatctgcgttacacctatgacgctgtgggcaatgtactgaacatcactaatgatgctgaagagacccgtttctggcataaccagaaagtggtgccggaaaacacgtacgtctacgacagcctgtaccagctggtcagtgccacagggcgtgagatggcaaacgccggtaaacagggttgtagtttaccgcccgccacagttcctcttcctgcagacaactccgcatatacgaactacacccgtacatacacatacgacaatgccggcaacctgacacagatacgccacaccccggcaacgggcagcggctacacaattaaaatcaccgtaagcgatcgcagcaaccgtggcgtgctgagcacactgacggaaaacccttccaatgttgacgcgctgtttacggcaggcgggcagcaggtgcagttgcagaagggacagaatctgttctggacaccacgcaatgaactgctgaaagtgacgccggtgacgcgtgaaggggagaccggtgaccgggaaagttaccgctacgacacgaacagccggcggcttttgaaaatcagtgtacagaagaccggtaacagcacgcagacgcagcgtgtgctgtatctgccgggtctggagttgcgtacaaccaaagccggcagtacggaaacggaaaaactgcaggtgattactgcgggtgaagcgggccgggcacaggtacggatgcttcactgggaaagtggcaggccggataaaatcaccggtgaccagataagatacagttacgataatctcattggcagcagtagcctggaactggacggtgccggcaatattatcagcatggaagagtactatccgtacggtggtacggcggtgaggacggcacgcaatacggtggaagcggactataagatcatccggtactcgggtaaggagcgtgatgcgacgggactgtattattacggttaccggtattatcagccatgggccggccggtggctgagtgcagatccggcgggtacagtggacgggctgaacctgttcaggatggttcagaataatccggttactttgtatgatgataatggtttagcgccgtcagacaatatttattcacgggtattgaaagccggtttttcgggtaatgaggaagagatgttcatgataatggccaggcctcaaagcctcaaaaaacagaggaaaatagccgggcaaactgaaaatgaagcaaaaactcttatggaaggaaaagaccagaatactctgaagatcgtcagagattatacaacagacagcagtcaggtaaatgccggcatcaggtcgggggctggtttcagtaaagtaaaagattttgatgaagcccttaacctcttatctgatggccagagaaggataacttacagggtaaccacatatcttgacggaaactcaccatgggattcaggtaacaacagccatatagcagaaggcgacattgtaaaggatacaacatatctttctacttctgcccacagaggctttttaacgtataaaaataagaaggaaaatgctgatacgaaatacgccaggtttgcaataatttctgattcgtcggcaaatgtttccggattatcgaagtataataatgaagctgagcgacaaatttttgaaatggagaacaaccttcccgggaaaagtgtattggagaaggtaaggtctaagataaaaggccctgagtcaggtcaggctgagtatttaatgcccagaggcattaatttcagaattgataagataaaaaatgagggcaataatgcctacattttaatgactgaggtttcccgtcacgggaaagcgataaaaaatatttatagcggagcacctgtaactcactaa

SEQ ID NO: 280178 - DNA, 135 bp, Morganella morganii
atgtcagacgatacgtacaggcaaaaactgaccggcttccgggacgcccttttgattcgtctgggtttagacagcaaaccgtccgggaagttttatgatgattccggtttatgtttgttcagctggttccggtaa

SEQ ID NO: 280179 - DNA, 1203 bp, Morganella morganii
atgaaatggagataccggctgggtgccgtggcagggaatgcactggagtattacgatatcgcagtttttgcggcaatctccgtatatctcagtgctgagcttgaaagattgggctatgaatcagcgaccgaaatggtctggggaatatttgcactgcgttttctggcacgtccgatcggcggctatattatcggacgttatgcggacagagcaggaaaacgatcggcgctgatattaaccagcctgataacaggtactgcaacgttatgtatggcgttacttccggttaacgtattaggatcttatacacctgtcgccgttttagttttgcaaatgacattgtcgttcagttttggcggtgagtatccgtcattaattacgtatctgttcagtaatgcaaaagataatgaacgggcaaggctgtcatcactcattgtggcgagttccacacttggtgtgattatctctctcgggttggttttgtttctggagaagatgcttacaccagagatgatgcaaagtattggctggcgcattccgttattggttggtctggcgaatattatgatgagtttctggttccgtacacgattaccggaattgcctgttaaaccggtaacgggcaaacaggttaacggctatcaggcgctgcttatctttctgatgacgattccgggttccgctgttttttattcctataacatgtcttcctcactggtccgtgaacagattaagatagacatattgaaagaaggttatgcaatatactcatcctgtttcctgttcatctctattcttatctgcgggtggctgacggacaaatacagttcagcggaacgtatttttaaaatcagtgccggatgtctggtgatattatcggtgccaatctatttcttactcagcagcgaacaaaccgccctggtcattaccgctcagttgatcctgaccattaatgcgtcctgtatctcctgcacactggcatcggtgattgccggtatttcccgtggttacaccaccaccttaagcctgggatataacctggcatccaccctgatcggcggattcactccgttaatcatcggctggctggtgtcatataacctgacatacgccggggtgtatattgccgcctccggtctgacagtcatgctttcttaccggctaatgcggaatggtgatgtaaaagcatacgcttaccggtaa

SEQ ID NO: 280180 - DNA, 795 bp, Morganella morganii
atgagccaatatgaattagattattcattcagtgaagcatatcaaagtaccctgcgtaacatatctggtgaactccggaaacaagcagaagaaatcgcgtttatgcatctgcacaatcccggcgtgagactgaaatttctcagcgacatcgaccagttcatcgcaaaaaatgaatgggaagtaaaaaatgcctgcctgagcttatctgccggactggataacatcgaagatatgagagaactcctggcacaacagcacagagctattcagttacgggaggtcaggcaatatgcttacgtcgaagctgttaataatgaaaaaaatggcatcacaacccttcttttaaagcaggtgggttttgttggcggtggtatgcaggttatcgccggttacggtgcatgtgctgccagtgttggtttgctgtgcagttcattgagtgtcggactgattgctcagggcacgaataatatgtatgaaaatggttattatcttttgttcagggaaaataccagcggttatctgagagatggctacagatacgctgcgaaagaaatggggtacagtaactatgaagcagatatggcctacaatattgttgacctgacattatcagcaggaagcttggctaacccggtattgaaacccggagctttcaagttattcagttactatgatattgattttataacctcttttcaacaaatgggaaagataggtattggttcagaaatattttttgattcagtcactatttattctgcatataaattaaataaagataataaaaatgaatga

SEQ ID NO: 280181 - DNA, 474 bp, Morganella morganii
atggcgaataatatttatatgaaaataaaagggtgtgcccagggaggaatttccgacggctgttcttcctataaatcattgggtaacaaatatcaggcatctcatactgatgaaatcctggtgattgcggtttcttttgatgtatccagagcacaaaacctgattcacggtcctgtttcgataacgaagtatgtggataaagcaacaccattgttacttactgcagtgacgaataatgaaataatggactgtgaaattgattattaccgcacatctgatacgggtgctcaggaaaaatacatgaccattcttttacggaatgcgagtatcattaatttctcccagaatcatgccaatgctcttatgcaaaatgatgtattaccgagtgaaacgctgactattcgctatgaaagtattacctgtaaccatattatggcatcaacctcaggctacagtattgccagtgtgatatga

SEQ ID NO: 280182 - DNA, 543 bp, Morganella morganii
atgcatattattattgctgcaatttcagcgttagctgcgcttgtatgggcgttacattcattacaaaactcaggtgtagacctgaactcgtttaatccgtttacctgggcccggcgcagaaaatggcaaaaacaatacggggtgaaacctatttataatttaccgacggcaacagaagcggctgcggttattattgtcggtacactgaagcaggaaggtgaaatatcccgtgaacaaaaacaaacggtaattacgctgtttacggataattttaacctggaaaatcaggatgcggcggacttgttttcttcatcgtcacatctggtacatgataacgagctgaattttgatcagagtgttccccatatacttaagttaagtatgaagcaattcacacctgaaatgatcgtgacattcctgtcgttattggaaaatgtggcgacattagagggacaaccaacaaaagcacagacagatattattgaaatggtacgggatgtgtttaaaagcgcaaataaaaataacgtaaactggaaacactga

SEQ ID NO: 280183 - DNA, 2526 bp, Morganella morganii
atgaaaacaaaaaagaaaatattacacctcgctattctgtctgttattttcactacagcgccttcattggttatggctgaaacattctgtggtgacagaagcagtatcacttacggcggaggctcaacactgaccggagaactcaccgcagaccagtgctatgaggttggcgcgtgggttatcggcgatcccacagactatgtcggagtcgccaaagatctgaccctgctgagcggcagtaaactcagtgtactcggcctgtttgaggattctcaggttcagagcggcgctgaagtctggattgataaaacaacccatattgccgtagatggctatcacaccggtttcccggccaccggcagccgtattgatattcagagcggcggattaatccgtgttctggacggcggtacattaaaagattccgtactcaacggcggaaccgtttatgtcagtaataccggtaaagcagatgatccgggtcagtctgtaaataataccgtcaacagcggcgggaagttatttatttaccttggcggggaatcaaccggtacacaggtgaatgacggtggttatgaatatgttcagcaggacggcaaatccctgaatacggtcgtgaataacggcggtgcccagatgctgaaatccggcggttttgcggacagcaccattattaatgacggcggattacagcaactgcacggtaaaggttttgccgataataccctcgtgaacgccggagcacggcaatatgtggttgatgattccaaagcaaccaatacaactgttgatggcggccagcaatatattttcagtcagaatgccactgcgactgccggtatcgcggaatttaaccgggtaaaaaatggcggcgcccagattattaaaggcggcggacaagccattaataacgaattatatgacaccgccgtgcaaagtatttacggcggctcctccgcgacagataccacactgaatgatcgcgccaaaagctggctggcggcaggggcacagctcctcggcgtcactacggttaatcagcagtcgcaggtacagctgacggccggttcagaagacagactggctgcggatgccggggcttatgcggaaaatgtcatcttatccggcccggacagcactctgctggtgatcaccggtgataccgggaatgccgcctttgccggttcgctcagcggacagggccaggtccggtttgttgcaccggtcaacgccgggtacagccatctgaccattgataatctctccggcagccagacattttatatgaacacagccattgcggagcaacaaggtgattacctcactatccgtaacggcagtggtgatcatgctctgaacgtacaggattccggggctgaaattacccgtccggatgaatcacgtcttgatttaattactgacgaaagcagcaatgcacagttccgcctgagcgccctcgacggcaccaatatcaatgcggtggacggcggtacttatatgtactcgctctatcagcgtgatgagcaggacggcaaaatctggtatctggcggctcagaaagatgaacccggcgagcctgaaaagccggttccgccggttgttccggacgataaaaccacaccatccaccgatgcgatgttatccatggctgccgcgccgcagctgatttttaatcacgaactcgacaatctgcggttccgccgcggcgaattacgggataatcagggcgatgcgggtgtctgggtgcgtctgaccggcgacagaacccgggcaggcaccggacacacacactttaaactgaaccaggccggttttgagctgggtgcggataaatccgtcccgctggaaaacggcaaattatggctcggcgtctttaccggctataacgatgtcaaactgaagcatcagcgcggtggcgaaagcagcatcgacagtatcactgccggtggttatgccacctggttttcggataacggctggtacctcgatggtgtgctgaaatataaccatttcaataatgagttacgtgcagtatccaccaaccgcagcagcatccgcggggattattcacagaatgcttacggcgcatccgcagaggccggttactcctttgatctgccggaagccttctgggccgaaccgtatgcccgcctgagctatatgcgtgcaaacagcaaacaggttcacctgaacaataatatgcaggcaaaactggatgcacagcagtccctgcaatctgaactcggcctgcacgcgggtaaagatttcaccctgaacaatcaggtgatcatcaccccttacgccacactggcctggcagcatgagtttatcagcaataatgatgtgaccattaaccagcgcaatacgtttgacaccgatttctccggcgacagcctgaaagccggcggcgggttaactgtccgtttcacgccgcagattcaggcgtatgcggaaatcgattaccgcaaaggcgacaaaacagaatcgccgctgcacggcaacatcggcgtgcgctacaacttttaa

SEQ ID NO: 280184 - DNA, 1377 bp, Morganella morganii
atgcccaagaatattgcagtaatattagcatctggtacaggatcccgttttgaatctcgtataccaaaacaatttgtaaaattagccggtaaacctgtaattcaatatactattgaagccttcgagaactgtagtgcaattgatgaaatcattatcgtaagcaaagatgaatatattgattttatctatgaaattgccacaagaaatgaatttaaaaaaattagcaaagttatttctggtggtaaagagagatatgattcgacttgggctgctttaatggctactcctgctgaagattgtaacttaattatccatgatgctgtaagaccctttgttagtgaacgaattataactgactgtatttcagccttattgacatataatgcagtagacgttgttgttgatgcagtggacacgattgtcgaagtggaaaataacttcattgcaaacattcctgatagacgccgactaaagcgaggccaaactcctcaggcttttaaaaaagaaacattactaaatgcatataataggtttcttaatgacccaaataaagcagcttctgacgactgtggaatagtaaaaaaatatttaaacaatgagtatatttatactgtatcaggagatgaatccaatttcaaattaacccacccacaggatttatatttagcagataatttaataaaagatggattaaataacagaagtcaatcgaacaagaatatcatttatgacaaattaaaatataagacagttgtcatcattgggggcagcagtggtattggacagagtttggctaatctatgttcagaccaagaaatgaaagtttttatatgtagcagaaatctaaataatgtggatataacaaacaaaagttcaattgataacttcttaagtgatgtaaaagaaaaagaaggaaaaattgattacatcattaacaccgcaggattattaatcagaaaaccgcttacttcactgaatgaaaaagaaattatagatagtatagatattaattataccggtgtaattaatacaactttgtcatcgtacccttacctaaaagaaagtaaaggaatgctaattaactttacatctagttcctttacaagaggtagagctaactatgcaatttattcatcaacaaaggccgctatagtaaatttcacacaagcaatgtctgaagaatggttaccccttgatatcaagataaattgcattaatccagaaagaactgatacaccaatgagaagatctaactttggtatcgaacctcctgaaacattgctttcatcccaagaagttgcgatgttcactttatctgcaatgacatttgagcacaccggtcaaatatatagcatcaaaaatgatcttaactcataa

SEQ ID NO: 280185 - DNA, 1182 bp, Morganella morganii
atgactcaagtagttggctacttgagtcctttattattatttccatttctaagctcaaagcttggtactgaatcacttggcttatatattttttccctatcagttattacactatctaatataatcacaaactttggatttgatatctctgtatcaaaagatatagctgaaggaaataacaacagagaaaaactatcttattattttacgctaacaacagtcagtaaatcactattatgcttaatatcatgtgcagttatttatacaggagtaagcctgactcattactatacaaacaagtatgtacttataaacatattaattataataacctttaattcattttcaataaattggttatttcaaggccttgaaaaactatatatttatagcagaattaccattctaacaaaactagcattattaatattgacgtttatttttataaaaaacaaagatgatgagttatacctttacattatatcaagtatacaagcagttatgtcatggttgatttcatactattggataataaaatacaagctgtcattcaaaaaaataaaaattagagaaatatataatatactagctgagtcatcgcaattttttcttgctcgtgccagcgtatccttatactccgtattgggtagctttttcctaggtatcttctctggttcattatatcaagttgctatctatggtgtcgctcaacaattatataaagctggagtttatgctatatcagccatatctacacctttaacaccttatatggcaagaacaaagaactataacgtatttttcaaagttacattctttagtattttacttactatcttaggagctgtagtcggctttatttttggtagcgacataataaggttaatttttggaagtaaccttattggagctaaaccagtacttgatatatttatggtaacgatagttatcagtatcattggtatccattttggatatccagctctaattccacttgggaaatcaaatgtagctaactatagtgtaatcgcatcagggctattgcagcttagtataattgcattattataccttacacattataatgtaactgcggtgacaattgcggtttcctacttactctgtgatttattaatgacagccatcagactaattagtttttataaaaattactcgcaatga

SEQ ID NO: 280186 - DNA, 1173 bp, Morganella morganii
atgatattcacatatatactatataatacaattttattttcaaatatagcctttctatttttggcagaaaagacaaaacactataaatatatattcttatttttatcttttctgataatatttttccctgctgctattcgctataacataggtgcggattatttttcatatgtcaatatatttaatgaaataaaatcttcccctgaagggtatcacaaagagttagggtttctatggataaatcaacttttgatttatttaaatctaggcccgcaatccctctttgtctttactagttttataatatatatttttacatacctcagcttcccccaaaagaataaactattattttcctttatttttatcaccaccttctatttagtaagtttcaatttagttagaacagcaattgtatatagtatttccttagcaatattcagcaatatttactttaaaaaaaacaacctcatactaaatacgttattatttatatttggatttttaattcacaaatccattttacttattcttgccatcccaataatatcctttttaattccgagtaaattactaaaaaatagattatttataatagccacatatatacttgtgcttatattgttctataatagaaatgaaatgatctctatattgatgtcttttgattttataaaaaacatagggtatagtagatatataaatagcgtttatctaagccaaacaaaaataaactctggaattggaataatattatctataatcccatttatatggattacaatattctctagacacctaattacattcaataataaaaacaaatacattgttatatcctctcttatatatatttttgctattatgtgtagctctagtttcgttttgctttcacgtatagagagaacatttatttttattatacctatatctatttatgctttttactcatgtggtaatatacgaaaaatagttaggctttcatttacaatttacatcataatctggtatcttttactctttgaaactaatatcaatattttccgatctgatgtttgtgcaggttcaagagtatccccatacgtgtctatttttaataaagaagatgataaaagcttaaaaataatccactctgaatgtttaaaaaatgaaattaaaaaaaacgctcattaa

SEQ ID NO: 280187 - DNA, 1002 bp, Morganella morganii
atgaaaaaatatatttatattgccggtatactgcttgtcagtattttttttatcgcacagatggccggcggcccggagtgtattgaagattacggtaataacgtcagaaaaatatgcaccccgaaagaaaatgttattttgtgggagcagaactttgggcaatctgcggataatgacgctgtcagaaaagtaaaatacgacaaagcggatttaaacgatttctttttcagcgaaaatacccgggttcattttctggcagagaacggcaaggtttatcatgtcgcgatggacacattgcgtgacccggattgccggggcagcagcggggatttttcaattactccgctggttacaccgcgttgctggtttggtgataatatccgtgaatatcgtatccggctggacctggtcagtgaggacgcggacagtttcaggttgtcccccgaaaatacacgctattacaattatgcgtatgataaagagcatgtttatttcaatggtttttatcgttcggacgatgcggatcctgccacattccgccgtgtggtcacggacaatccggataaaaagctgccggaaaaactgtacaccgataatcagcatctgtatctcgattaccggaaaatagccgatgaatcatgggatgacctgaccgatatccgtattattccggtgtcagtgaactggaaaaccctgatgagcgggatcgtattaaggggaaaccgtgctgttgacgataacagcggttttaccctgaaaaaaggcagtaagaccggagcgttatatctgttttccgatgataatgttgccgtgtcaaccgctgcggatattccggtaacggcagatcagcaatgttatctgaacaatatcgtggtttgtcatatcggcggtgatttttataaaataagctaccgctacggtgacccgctgtttgaaaaaataacggattcaaaccgatcccgtatcagtaaagagtgggataatttattattttattactga

SEQ ID NO: 280188 - DNA, 426 bp, Morganella morganii
ttgaaagatatatttacctgctttggttataacggcacaccaaagcaggtaaatcacctcacatcactccccgagcagcgccttaactttaagcctgaacgcggtgatttgggcttgttattgctgattttgctgctaattgtccggatatcctcactgtccgagattaataccaaacagtcgtttaaaatcttgacggtaaatgtgaaactggtctcaaattctgccgctttcagccagtgtaagcatcccggcttccgttacgaccgcttcgggcggctgaaagcgctggttaacgaaaaagaagaatcataccggtttgaatatgacgcactgcaccgcctgattcgggagaagagccggttatccctccggctcacatccattaaaaattatttaaaaatccataattattttgataaataa

SEQ ID NO: 280189 - DNA, 453 bp, Morganella morganii
atgggcggggtgaatctgtatcagtatgcaccaaatccggtggggtgggttgatccgtcggggttggcgtgccgcaattcactaaaaagatttaataagagagacaggataactaaacggtatgttgatttattgtcaggaaaaaaaacatctgatgtggaagtatatttaaatagtaaagcttggaaaactacatacccacaaagtgcgacacctcaaaaaacacagcatgttgtatttgaaaaaaacacaaaatcaggtgaagtatatcatcttgattacaatccatcgggtaaaactcataacagtaattattggaaggtaataaaacctaacgatcctgtagagtctgtttatggacgaattggacatggtaagtttaataattatgataggataaagaattcacctgtgtatattgatggttctttaatgaacccttggagtaagtaa

SEQ ID NO: 280190 - DNA, 285 bp, Morganella morganii
atggatgcgaatttgaaatttcaaaaagctctttttttattggatcacaatcaattagagaaaggtcggtttctattggaagatgttgttctacaagctgaaaatgaaaacaatattatcacattagttcaagcatcagtatgtttaggtgaattgctgtgtgaaataggattaccgcatgaagctaaaccgattttacaaaaaatattaaagtataaaagtaatgatttaggcttagagtatgagtttgaaaaaacctcggaattattatcaacagataattaa

SEQ ID NO: 280191 - DNA, 4677 bp, Morganella morganii
atgggcaatgagtttcacgcagccaaaaaggaggataagctgtttcatgagtccatgatagctgatttcgtcaatggcgttgttaaaggtgcagcttatgcagggttattttttgcagcgggcgcgttaactgtcggtaccggggggctggccggacctttagcttttgggatcgctgccgctggtagctttgttttaggtgaagttattgatgaagctgcggattgcgcttccgaatttgttaatgatgcattgaactttattgggtttgggcggggggaagacggaacaattgtttctggttctcctgacgtcaatacaaagagcaaacctgctgcacgtgctgccggtattattccgcatgaaaaattgactgaatccattatggctgatgtgcaaaacccaccaaaaggtaaagcgcggcatctcgcggagggtgtattgcagcgggcttatttgttgactcctcttggtatgggaacagcagcttataattatgtagcagaaaaatttaacccggcagaacccgttaaaaatgatcctttcaaaaaatatccttcaccagaacgtggttttttcgaaggatttttttcaccgactgtggcaaataaaaatatttatgctgaacctgttgatgaggacaaaattacctgcaaaaaatggcatattgcctcgaagccctattatctcgctgagggatcgaaaaaggttcagataaacagtcagccagcctgccgaaatggcgatcgaagcacctgtgaagctaaaattgatcatactcaggaatccccgattgtccgcattggtggtaataaagaagtcgtgcgggatattattagtggacgtaatccactttgtacttttgctggtgaggctcttggtgctgtatttggcgggtgggccggattgatccgcaaagggggaatgccggcattacgtaaatgtttgagtaaagcggggtgttcattagcttcagaattcattagcaatgttgctggtggtttagctattgcagcgcttggtcgtgcctttaatgcaattacccgccccgtccatgccgccaccggcagtaaagtcctcagtggtgatgaggaactcgattttgtgctggaaggccgttacccgctggtctggcaccgtatctatcaaagccgcaatacccgtgaaagccgtctgggaacaggctgggcgctgccgtttgatgtcagtattgaaatcgattataccggcggctctattgaggatgcaccgctgtattatcatgataagtccggccgccgtctgtcgctgggggaactggcgctggggcaggatgcattctatgtggatgaaggcttccgggtttatcgcagcctgcagaatatctttttgctggagtcagataccggtgattatcagctgtttgaaactgatccgcagcgcaacggctggttacgccttgcgcagtcacacgatcgtcacggcaacaccctgttttaccgatacagtccggaagggcaactctgcactattcaggataacagcgggctgattaacgttcagctgcattatacagatgatgggcagcgcctgctctcggtatcacaaccggattcagatagtgagcggacactggtcagttatcagtatgatgaacatcagtttcttgttgccgtcaccggtgctgacgggaaagtgacccgccgtttttcccaggatgatgacaccgggctgatgaacatgcatatcaatgccgccgggttacaaagccattaccgctgggcacagtttgataatgaaacagatgataacgggcagccggtataccgtgtggcagagcactggctgcagaccccggacggcggacggcctgagcacacattactgcactattctccgcaagagagaactctgcgtacagagttgatcggactgggtgaaaccttccgccgctggaatgaacagcatcagatcacggaatttacagatgaaagcggtgccacctggctttttgactgggatcagagccgtaaactgaaaaaagccaccgatcctctcggccatatctggcaatacacctacgatgaacgcggtaatctgaccgctgaaacagatccgaacggcgacagcaccaccacggagtgggataaagattttgcgtttccgctgattcaggtgatgccgaatggtgcggcgcatcactggttttataatgccaaaggggatatccacctgtatatggatccgctggggcatgccacccggctggtatgggacgagcagggggactgtcttcagcagactgacccgggcggcagtatcacccgttaccgctacaatacccgggggcaactgacccgctataccgactgctccggttatcacactacactggcctatgatgatcgcgggcaactggttacgatcaccgatgcactgagccagaccacccgctatcactggtcggagggcgggcagctgctgcgggaggaattaccggacggcagggataaccgctattcctatgacgatgccgggcgtgtcaccgggtttactgacagcggcgacaagaaaatcaccttcggccgtaatatcttcgggcaaatcacagagcgtaccgatccggcgggacaccgtctcggcttccgttacgaccgcttcgggcggctgaaagcgctggtcaatgaaaaagaagaatcataccggtttgaatatgatgtactgcaccgcctgacccgtgagcaggatctgatcggccagcaaaaacagtatcagtatgatgcggggggtaatcttatccgccgtgaggagatccccgcgcaggcgggagaagagccggttatcacacagtatggctatgatgcggcaggccgcctgaccacacgggaaaaccgtgattaccgcacggagtatcagtacggcaaaacggcactgacactgcggcgggcaccgctgacggtctggtcagcggcgcagctcagcggggaggatgtgccgtggcaggatatcctgaaatttgagtatgacctgaacggacagatgttgtccgagcagaacagcgccggggtataccgtcactgctatgatgataacggtaacctcagcagcacagagctgccggacgggcaggcgctgagttatctgtattacggctccggtcaccttcagcagatgaactggcgggagcgcggaaaacagacggtactggcggaatacagccgtgaccggctgcaccgggaaaccaaccggctctccggcgggcttgaccagaggacggagtatgacagcagcggacgcatcaccgcgcagatagcacggctggcaaacagtacgcgggtcacggcggcaaccattgataagcgttatacgtgggacaaacacaataacctgacggagcgcagcgtcagttacggacagaccgattccccggccactcagggtcactggcattatgaaacctaccgttatgatccgctggggcagctgacccggcgtctgaacgggttcagtgaagagctgtttctgtatgatgaggcagcgaacctgctggggcatcagcggcaggtggcgtttaataaccaggtcaccaccagtgaggaatacgactacacgtatgacggtttcggccgtatggcgcagcgccgggtccgtgacagtgcggtttgccagcattatcactatgatgcggagcaccgtatcactgtcgtgacctttgagcatgacccgcagggaaaccagcgggcagaatatgattacgacatcctcgggcgcagaaccggcaaacgggtctggcagtcagcacaggcacagcggctgaagcagtccccggaaaaccgggcgccggaagagacggtacagttctgctggaacggtctgcggctggcgggggagaagagcagtaaatccgcgcatctgaccctgcattacgtctataacagcggcagttataacccgctggcacggatagaaagctttgatcatccggaaaaacagtcaacggatatcagctattaccacatcgcccttaacggcctgccggaagaagtgacggacagccagggacgtattatctggcacggtgactacagcctgtggggaaaattaaaacgggaacagcacccggcaccgggattccggggtcagcagaatttacgttttcaggggcaatatttcgacagggaaaccggactgcactataataccttccggtactacgctccggatacaggacgctttacccagcaggacccgatagggctgctgggtgggttaaatctgtatcagtatgcgccgaatccggtgggttgggttgatccgtggggttggactacaggacaaacaacaggaggtatgtctagaactacttcaacatggagagatcgttacggtccagcatctatgcgggatcaccatttgattcctcaagcgatgatgaacgatgaagcatttattaaacaaatgaaaaatgcggggattaaagatcccgccaattatattcatcgtcaaatatcacgtataccaaatgcattgcataataatgtacatgcagaaggttggaataaccagtggaaagaatggtttaagaaaaacccagagtttactaaagcagaccttcaaagtaatattaaaaacatgatgactgaacataatataccaaaatcatcgagaaatttcgctaaaaaatatgggtgtaagtga

SEQ ID NO: 280192 - DNA, 417 bp, Morganella morganii
atgaattataattttcaggaaggttttattacattaccttcatcagattacttagataatagcctgaatattattaagttttcaggaaaaaaaaccagtctgtcgctgacgcgtgatagtttgccggaaggtaaaactgcgaagcagtatttagcggaacaaatagcagtgatccgcaaagaggtcaagttatatgcagtgactgatcctgcatcatttacaaccacctcaggagtacagggatgggctttttactgtgaacccgaacaaaaagggatacatctttatcagtacattgctggttatgagttggagaatagtattttggtaatgacatattgtcagttgcacccgtttactgatgctgatttacaggactggcaggtactgaaattaaattttacccgcaccgcttaa

SEQ ID NO: 280193 - DNA, 744 bp, Morganella morganii
gtgtattttcactgggaccgctatggcaaaccggatcacagtgcttcctgctgggtgcgggtggcgatgggctggaacggaggcggctatggtttctccgctgtaccgcgcatcggccaggaagtgatcgtctcttatctcaacggcgacattgatcgtccgatagtcaccggctgtacctacaacggccgtaacggcccgccatcctctttcccgggcagtaaaacccagaccgctttccgcacacaaacccataaaggtgacggtttcaacgaactgcgctttgaggatgaaaacggtaagcaggaagtctttatgcacgcccagaaagacatgaatacggtggtgcagaatgaccgcagtacatcggtggcggccaatcacacggaaacggtcgggcagaatcagagcgtgacagtgggcggagagcagacgacggcggtgcaggcagataagaacatttcagtgtttggcaaaatgaaaacagaggtattagacgaatgtgttgttgcgtcagcaaaggaaataaagtttgtatgtggcagttcagtaattcatatgactgaggccggagctattaatatcacttgtaataatttcaacatatcagcattaaatgacgggcaaattaacacaggaaatatattggatttaaacatgaaagatggtggtccggcaaaaacggatatgtcgccaacgcccgccgatattgtaaaaaacaaagataatttattcccagaatag

SEQ ID NO: 280194 - DNA, 465 bp, Morganella morganii
atgatcaataacgtgtttattggtcattcaggactggttcttgatgaaggtgaatattcatttttgtatgatccggctggtagttatacagggtgtaaaaataataaatgtgagggttcggtaaaaagtttcagagggtctggtgactattttgaatatcctgattttaattgggatgattaccttcagtaccagctggatgatggtgaggatataattgtatttgaatttattgttcctgatgatcaaatgaaaaatatgaaagataatatccttaattattctgatttcgccactgacttcacctgtgcaactaatgttgcccgcgtattacgtgagagtggcggcatattctctgacattgatgatggattttttactccatgggggttaaaaggtgcattgtttgaaattcaggtaaaaaaaggaattatgccttatgcccatgttcccgtaccgcaataa

SEQ ID NO: 280195 - DNA, 495 bp, Morganella morganii
atgcccatgttcccgtaccgcaataataatcattgttcggcattgatatcatatatatcactttgtttaggtggtgttttttattatcttgaagtggtgcatcagttattctttgtaatatataaggatggtgcaaaccatattcaaattacgttagtttaccataaggcacttagtttttcttttcttgtttatttggttatattagctcctgtatattatttttatcttaaaaaacacattaatataatatatcgttttttattatacttcattatacctgccacgatttctctgattctttggtatttttatattttccggagctatccgattggttcgtttattatgtcaaaaagtacatatgaaacatttaagtacatcatgatagtcagttatctgagcggactgacagctattatgacattagtgactgtagtggcagattgcgtcattaatctgagcagaaaaatcatcattttttttgataactga

SEQ ID NO: 280196 - DNA, 960 bp, Morganella morganii
atgtctcagtatcatctcgaatttgaaaaaccaatcattgagctggaagaaaaaatcgccgcattgcagtcatttaaagagcgcagcagcgatttgggatttgatccggatgatgaaattgcctgcctgaggaaaaaatgtgaaaagctgacccaatcgatttatgcggatctcggtgcatgggagattgtccggctggcccgtcacccgctgcggccctataccctggattatatcagtcttatttttacggattttcagatacttgccggtgatcgcgcctttgcggatgataaagcgattgtcggcgggctggcacgccttgaaggccgtccggtgatggttatcggtcaccagaaagggcgggataccaaagaaaagttactgcgcaatttcggcatgccgtcaccggaaggttaccgcaaggcgctgcgtctgatgaaaatggctgaacgttttcatatgccggtgctgatgtttattgattccgccggtgcctatcccggcgtgggtgcggaagagcgcggacaggcggaggcgattgcccgtaacctgctggagctgtcgcggctgaaaaccccggttatctgctccatcaccggcgaaggctgctccggcggggcgctggggattggggtcggcgatcgtatcaatatgctgcaatacagtacctatgcggcgatttcgccggaagggtgcgcctccattctgtggaaaagtgccgataaagcgccgcaggctgctgaaaccatggggatgacagctccgcgcctgaaggcgctcggcattattgataccattattcccgagccggcaggtggtgctcaccgcaactatcagcaggcggcggataacctgcgtgagcagctgttgcaggatctggcggcgttatccgccttaccggaagatgaattactggtgcagcgctatcagaaattaatgtctttcggctattgctga

SEQ ID NO: 280197 - DNA, 1029 bp, Morganella morganii
atgcaaaaaatgatgaaacgctggcaactgaccgccaccgggctgaataacctgacccttgccgatgtgccggtgcctgtcccgggagagcatgaggtactgatccgcgtatccgcagtctccctgaattaccgcgatctgctggttattgacggaaaattgttaccggagctgccggaaatgccatttacaccggcctcagatatggccggagagattgtcgcggccggagaaaaggtcacccggtttcatagcggcgaccgggtaaccggcaatttctggacacagtggacagataacgccccgccggcagaaatggcacatcacgggttgtcactcggcggcccgctgcccggcgtactggctgagtatattgtactgaatgaggaaaccctggttgcggttccgccgtcactgactgacgaagaagcatccacactgccggtcaccggactgacagcctggtttgccctgaaagaaagcggggatctgcagcccggacagaccgtattactccagggtaccggtggtgtatcactggccggattacagatagcactggcaatgggtgcggaacccgttgtactgacccgttccgcagaaaaaattgcccgtctgaatgcactgggtgtcacccgtattattgatacccgggcgactccggcatgggcggacgcggtaatgtcactgaccggcggtcacggtgcagatcacatcctggaagttatcggcggggaaaacctgcgtcagtccgtggccgctctggcgccgggcggacacattgcacagattggttttatgcagagcgaagaactggtgatgccggccgttccgctgatgctgaaacaggcaacccttcaggggatcactgtcggtcaccgccgggcactggaacggctctgcgccgccactgagcagtatcagatcaaaccggttattgataccgtctatcctttcggtgatgttccggcagcttttgcgcaccttcagcgcggcccgttcggtaaaatagttatccgtgtaaaatag

SEQ ID NO: 280198 - DNA, 933 bp, Morganella morganii
atggcgaacctgaatctgtattcacaactgcaaaatatggcggcattcgtacacaccgtggagaccggcagctttacggcggcagcggtacggatgggggtatccaaatccgcaaccggcaaaagtgtggcgaaactggaggaacgtctgggagtacgattgctgcaccggacaacgcggagtgtcagcctgacggaagaagggcagatttattatcagagctgtttatcggtgctggatgagctgcatcaggcggaatcattgctgtcagcccgccgtcaggccgtttccggaacattacggatcagtctgccggtctcttacggacggctgtatgtgatgccggtactgacgcaactggcaaaattacacccggaattaaaactgatggtcagctttactgaccgcagggtggatctgatagaggaaaataccgatctcgcggtccgtctcgggtatccggaagacagtaccacactgattgcccgccgtctgggaacgcagcatgcggtcatttgcgcatcgccggattatcttgcccgccggggcacacctcagacagcggaagccctggcagagcatgattgtctgggatttatatcccggggacagattctgccgtggccggtaatgaacaaagacggcacagttaaccggctgattatccgcccgaaacatattatcagtaacggcgaagccctgcgtgatgccgcagcggacgggctggggatagcgtatctgaccacctggctggcggcacgggatattgaacaggggcggctgcgggtattgccggttgccaccccggaaggtgatgcgcctgcgcctgtctttgcggtatggccgcgttcgcgtgatctctccccgcgcatccgcgtggtggtggatgctctgctggcggcacacaatcctgacccggaggtaacagaatga

SEQ ID NO: 280199 - DNA, 624 bp, Morganella morganii
atgtccgcaactgatgcccttcttgcttattctctcgctgctttactgttaaccctgacgccgggtcttgataccgcactgatattacgcactgcggctgccgaaggcggaaaaaaagcctttcaggcggctctcggtattgatgcgggttgctttatctgggggcttttcgtggcgctgggtctcggtgcgctgctcgccgcgtctgccacggcttacgatatcgttaaatggtgcggggcactttatctgctctggctgggtattcagttaattctgcccccccgccagtcattcagcacaacacaaggggatgtttctgccccgcaaagtaactggtttatccggggaatgccgggtaatgtgctgaacccgaaaatggggatattttatgtctctttcctgccgcagtttattcctgccggacaaccgctgatagcccggacatttctgctcgtcactattcatgtggttatcggtacgctctggtcattgactctgattatggtgaccggttacgcctcgcgcctgctgaaatcccggcgctttatccggtggatggatcgcctgaccggcggactttttatgttttttgccgtgaagctggcactcagtcaccggtaa

SEQ ID NO: 280200 - DNA, 477 bp, Morganella morganii
atgaacagtaataagcactctccgcaatatattgaattaatgaacgccattgttttatacaaaaaagagatgtttgactggtgggattctttacagaaaaccagagtcggggaatgggtatttttattaacactggcttgctggggtgtccccgacatccgtttccggcttgccggatttcttatcggggccgcatttttcatggaaaagtttgccgcaatagccggaaaaagcagttatacaacaaaaactgaaacacacctgctacaaaaaatccgcagtggaaaaatgtctgataaagaaaaagaaactttgtataaagaactatcctatgcccagaaaaacagaaaatttggtaaatcagttactgtcatcaaaaaaacgtggaaaatcatggtcgcgtatactttctttgccagttcactttttgccatagttggcactaattggggcaatatcgttaaaactcttttttag

SEQ ID NO: 280201 - DNA, 942 bp, Morganella morganii
ttgtatgatttgcggcgctttaaggaaaaagggtttttttttggggtttttatggctaaatatcaaatatttgcagatgaagcatggacacatggaacaccaccaccaaatagatatcactgtttttttggtggaataataggtcttgaatctgatattgacagtttacaaacagctttactgagtataaaagctcgtgctggtatacttcatgaggtaaagtggtctaatgtatcagcaaaaaacctaaactattatattgaattaattgattgtttaaaacattacatactaagtcgagacatcaaatacagacagatgtttcgagatcgctcatttcatgttacacccacccctgatatttcagaattagatgtccagtttaaaatttactatcagtatattaaacatatgtttgggataaggtttttgcctgaagataattctagtggtattgagattttagtaaggttagatggtcactctagtgaaaaacataaaactaaactcaaagattacattgaaagactccctcaaacactaaatagacatgatataactctcaatgtcacatatgaaaatagcaaacactctatgagattacaggtttgcgatctaatgatgggtgctgcgggttattatggcaataaattccatttacgcagagaaaatggccgtagaggaatgactaaaaaacaaaaaataaaaaaggctctagctaagcatatttacaacatgcttaaagatattgatgccgaaactagaggttcaaaggcatttaactggtttgaatctacaggtaccaacggagacactgaaaattatctccatcataatataagaatttggaaatttgagcctacaggttacagaataaataaaggctggcaaaatgataacctcgatagacaaggtaggtttatcagagataatttcacctaa

SEQ ID NO: 280202 - DNA, 570 bp, Morganella morganii
atgactaatagtgttttaccaaatgatctgcaactgctgatgagtcagatcgataatggaaagttccattacgccggacgggaggatgatattcgggattttaaagaacatctgaatggtgccaacttcaccatggctaaaatcaaggctgaacgaattattgaatttcaacaaaatgctcagttacttcaatcgggggctctgccaaatgagctgcaactgctgatgagtcagatcgataatggaaaattccattacaccggacgggaggatgatattcgggattttaaagaacatctgaatggtgccaacttcaccatggctaaaatcaaggctgaacggattattgaatttcaacaaaatgctcagttacttcaatcgggggctctgccaaatgaactgcaactgctgatgagtcagatcgataatggaaaattccattacaccggacgggaggatgatattcgggattttaaagaatatctgaatggtgccaacttcaccatggctaaaatcaaggctgaacggattgttgaatttcaacaaaatgctcgtcgattaaacggatag

SEQ ID NO: 280203 - DNA, 231 bp, Morganella morganii
atgtctaggggtacacctttggtgtacatgccaaacatgcgctatcgtgattcactctgcaatgctctgatagtaaaaaagccggcagatacagagcatcagccggcttatggttgtgtactgagttactgtgaaatgttactcaatattctgaatctgctcacgcatctgctcaatcagcactttcagttcaatcgcggaactggtgatatcggcattgatggattttga

SEQ ID NO: 280204 - DNA, 675 bp, Morganella morganii
atggataacataaccggaaatacggcactgatgccgagagaaaaactgattgcttacggggcatctgttctgagtgattcagaactgctggctatttttttgcgtaccggcacccgtgagcggccggtgcggcagtttgcggagtatctgctggaggtcttcgggtcactgcaccggttgctgacagcagggtatgaggagtttaaacctctgcccgggataggggacagtaagttttgccagatgcaggcgattgtcgagttgtccaggcgctacttcagcagtcagtttcaggaaacacaatttctcagcagtgcctgtactgtaaaggcgtatcttaaccagcggatggccgggcaggagcgggaagtctttgcagtgctttttctcaataatcagaaccagcttatccgttatgaggagatgttttccgggacggtaaactgtgtggaagtacatcccagagaaattttgcgcctggcgctcaaagtgaatgcagtttctgtgattctggcgcataatcacccctccggtaacgaaaaccccagccgggctgaccgtctgctgacaaaaaaaattgttcaggcatgtgagctggtggggattaacgtgttggatcacctgattgtcgggaaattcaatatgttttcgtttgcagaacacgatctgatctga

SEQ ID NO: 280205 - DNA, 729 bp, Morganella morganii
atgttggttaatatagtaaactatcttactgaaaaagagcagggtatacttcagcatatcaaaacggatgtatcaggtgaacgcatgaaaattgttacagtattaaaatccgggggagactataatgaaaaccatgtccggtggttatatagtcagctacctgagggttacgaaaaagtatgtcttaccgatctttctattcctgatattcaaacgatcaagctaaataaaaacctgccgggatggtggtctaaaatagagatgtttgatccggataaaatacaagatgatattttttatttggatcttgatatggttatcttagatgacattagtgaattactgtctaacaaacagttgactatgttgagtgacttttttttcccggaaaagacaaaaaactcagcgattatgtatattcctcatgatgaaaaatataaagtatgggatagttttaatcgttatccggatctttttatgagaagatataaagaaggaggggaccaggaattcattaataaaatatatcctcatgcaaaaacatggcaagaactatacccgggtaaaattgtcagctataaaaaacatgttgtgaaaaaatctaaaaaaaatgagcatgcaaccgggaatggagatattccgcaaggtacaaaaattgtttgttttcatgggaagccccgtccatggagttgtggtgaaaaatgggttcctgaattgattattaaataa

SEQ ID NO: 280206 - DNA, 1233 bp, Morganella morganii
atgttaaagctcaataagattttttcaccattggttttattgtgtcttcttatcctgacatctgcattggcattaccggataaaatagtaggcaggaatttattctatatttctactgtatttttaattatttcatatattttaaattataagaaaatagtaattaaaaaggaaaatatactattatttttatcatttttagccgtttctgttagtcagtttatatgggtcaagttatatccgccagtatcctctgaatatataatggctaactctaattacccaagaacagcgctgtatttatttattggttcatttatagtattgctatctccctcattattaaatctggttcagtataataaaaaaaattgtaaaatagttatttatgttgctctcatttcattgctttacatgggaggaaaagggctgttttatatgatctctgatcctacaggaagactaagaattagcagtgctgcgacaatgtccgcatacttatttatgctgcaaagcctatttacattatacattataaatataatttctttcagaaataatattctttatgtagggattatttttattttctcatttattgttattttatgtacacaaacaagagccgtcattattctctatccggtcgtagttttattatattttatagtaaacagacaattttcatttaaaaaactaatatttagtggagtgatagtagctgcattaggatacttattcattggacacttttttcaaagtgttgaagacagaatgtatagtgcgtatcatgaaatttctggttatagtgaaaataataacagctcttttggtgcccggataaccatgtggaaatcaggattgtatgttgcaaagatgcatccgacagggcagagtactgatagccgtttacaggaagtaaatgaatatatatcacagtatgaaaatggaaatccggaagcaatacgaaatttaacctatcatcttcacaatgacattatcgaaagtgcgtcgttacagggtatctggggtgttatggcactcatctttttatttatatcgatgaatatatttttttactataaaggcacctggttgagtgcatttccattacttattttagcagtgagtggagtaagtatggttgatacacttttcatcgatgatagatttattattatgttttgtattttaacagtattatttactacgagaataaagtcaaaatcatga

SEQ ID NO: 280207 - DNA, 900 bp, Morganella morganii
atgagagttttcttcaagcaactatacagatatacgcatcgacgttcatatcggcataatgaaaacatttggccttattttaaaataaccagatcagaaaccggtgaaatatcaaaattaacttaccggaagaaatcaatcgcgatcaccacattaagtgaccttaaagattactactgcggtactgttttattactggctaccggcccttcaataaaagacatagatacctcacttatcccgaaaaatatgcatgtaatgggcgtaaatggtgcctatcatctggctgataaagtcaacttttcattgtatacaattgttgatatggctttttttgacaataatataagcctcgtagaatcaattgtttttgacaaaaaaattacgttatttacgactatacatggtatgaaaaggatttttgacagatatggaattaatgtgcattgtaagctcgctcttatagaagatgctctgtttaaaatatatgaagaaaaaaccactcctgaaaattatagggatatggaaaacatttacttcaatgactcatttaaagatatcgttttttcatcagatatcagaaaagggatatttgatgcaggaacagtttcttactggtcattacagatattaccattcatcggatttaatgaaatattaatagctggtttagatatgaataatttcgaaaagccacggttttatgaaaataacgataataaagcaccttcataccttagtaacaaattatttgatattatcattccagccatgtcacttgccgggtctatactcgacaaaaaaaacatatccataataaacttatcatcaataagttccatacctgattctatttttaaaaagcatgattttaattattatttaaaaaatagagggtga

SEQ ID NO: 280208 - DNA, 627 bp, Morganella morganii
atgtgtataagagacagacctaaaactgcgtggcttgctgactcagagcaaataaaaataaaaagcaaatctaactttaatattttatatgctccgacttggagaccatacgcaaaaacagaattatttccatttccagatcaagatataaatatattaaatgacttccttgaaaaaaatggtatagtaatatggttaagactccaccctgactttaacgatgataattctgttagaaatataataagcgataatataaaattattttcctcgcatgattatcctgatataaataaatatttaaaatctttttcttgtctgataacggattactctagcatttactttgactacttattactagatagaccgacaatattcctcgactatgatgaggatatctataaaaaaaacgtaggccttatttctaattataaaaaaataaaacttgacacatcagttaaatcactcaatgaatttaaaaaaatcatactgtctattaaaaaatcccctaatctataccaacatgacattgaaaggattaataaatccacgtcatatccaatcccaatcgatgatatatacaataaaataactgaaataattttttctcctcggagtaaataa

SEQ ID NO: 280209 - DNA, 207 bp, Morganella morganii
atggctatcaaaaaataccttcttgtatttgaagcatactccgcggatatggagttaatgtttaagggcaatgccgcatcgcagattgataatgaaaaacacgctgatgaaatcggcagattttttgttaattgcgctatcgcagaagctaaagcgactgattcattagtgaaaagagttgtggtaactaatgctttcgagatttaa

SEQ ID NO: 280210 - DNA, 222 bp, Morganella morganii
atgtttgatgatacgccgttagagtcggaagagttaattgaccagtgccgtgcacttgtttatgcggtggtgaatccggataaccaaatggtgaaagaaattctgacgcttaagttgtgtgagcagattgaactcgtgcatacgcgttatctggaggacccggaccgggtttgtgaacccgcagagttttctgatgataaggtggttgcgcagttttgttga

SEQ ID NO: 280211 - DNA, 1290 bp, Morganella morganii
atgaaactcaatactctgacggttaagaactttcgttgttatcgggagaaatcttttcagttccatccgaacgtcaatttgattgttggtcagaatgcgacggggaaaacggcagttttggatgctgttgctgtcgcaatagcaacctggatattgggttttaaaaagaagaacgataaaaagagtttggaacccactgatgcgacactgacttatgttgaaaaaagcggtgagcctcagtttgttgaggcgtggccggttgtggtggctgcgtcaggtgttgtcaaaggacagtctgttgaatgggagcgctccaaagattctccgaaaggaaatacccgatacggaaatgccagcgagttaatttcgttagccaaggagtgtgacagtcatctggaagatgatatttccctgccgttaatcagttattacggaacaatgcgcctgtggcaggaccctaatgcatccagagtccagccatcgctgactaagtctgcaaaaccttcccggttagatgggtataagcattgtgtagacccccggattggtttaaaagagttgattgcatggtttgccaggcaggagtggcgggcttttcaggcaggtacagagtccatcatgctgatggttgttcgcaaagcggttatcagttgtatcgagaatgctgaaaggctgcattacgacccgaagcggaaagagttaatattaaaattacgtgaggcagagccgcagccattcagtatgctgagtgacggacagcgatgtgtgttagctctgattgcggatattgcccagaaagccgttttactaaatcctcatttaggggagtctgtgctcgaaaaaacggaaggagttgtattaatcgatgaactcgatttacatcttcatcctaaatggcaacggcatgttattgaggatttacggacaacatttccgaatattcaatttatttttacatcccattccccatttttaattcagtctcttcgttcaagtgaagagcttattatgctggatggtttagctcctgctcaattggctaataagacgcttgaggatattgccggcggcataatgcaggtaaatacccctgaagtcagtcatcgttatgccgaaatgaagggtgttgccactgagtatctgaagatgcttgatgaggctaaagcggaacctaaagaaaaattacaacagtatgttgatagattagctgactctttggcaccttacgctgataatcctgcttttcaggcatttttggaaatgaagcgtgtggctaagttgggagagtaa

SEQ ID NO: 280212 - DNA, 738 bp, Morganella morganii
atgcgaccagttaataaaggaagctcacctgtttccggtgattttagtgattacgaggctgcaaaaccagatttaataagtcgtttaggaaagtactgtagttattgtgagagaagagttcagtcaatgctggctgtggagcatatcgaaccgaaggatagcgattacggtaaaccggaattgataggccgttggtctaattttttattagcgtgtgttaactgcaattcatgtaaaggcaagaaagaagttgattttgagcaattaatctttcctgacagagataatacattccatgcatatgtctatgaagaagatggcaatattgctttggcacaacatctgacgccagcacaaaaggtaatggccggaaatacgttgcgtttggtaggtttggataaagcaatgcaggtttatacagattcaaatggtgagcaggtggctcttgaccgcgtagcacagcgaatggagtcttttgcaacagcgcaaagtgctttgtcagatatgaatgatgctccgaattgtataaatttgaaaaattctattaccagaaatgccttaagtgatggtttttttagtgtgtggatgacggtttttaatgattatcctgatatgaaattacgatttattcgcgcatttacaggtacggaaggtagtgggtgttttgatatgaatactggcgataatattactccggcgccaaatcataattgtttggattgtggtgggaaggtttag

SEQ ID NO: 280213 - DNA, 816 bp, Morganella morganii
gtgaaagtctatttccactgggaccgctacggcaaaccggatcacagcgcttcctgctgggtacgggtagctcacggctggaacggtgacggtttcgggtttatgtcgatcccgcgtatcggtcaggaagtgattgtctcatatctcagcggagatatagacagaccgattattaccggctgtacctataacggacgaaatcgtcccccgctgaatctgccgaaagaaaaaacccggactattttccgcagtaaaacccataaaggggacgggtttaatgaattacggtttgaagacttagccgggcaggaggagatatatattcatgcccagaaaaatctggctgtcaatgtcctgaactcacgcggagagcggattaattacgacagaaccaccagtatcggacataacgatgaactggttattgccggtaaccgcactgttactgttgaaggaactcaggctcataaaacgacaggtaattatcaggagctggttgatggcgatcgccaccggattttggccggagattgtgtggaacgcatacagggggcggtcagtacagatgcgaatggagatatcacgctgcagagtaagggaaaaataacgctgaaggtcggcggcagttttgtggttattcatagtggtggtgtcgatatcaaaggaccggttatcaacctgaactcgggcggcagtcccggtgatttgttacaggcgatcaatcctgcagtgctgaaagcagccgccggcagtggtgccgcctttgttgcgcattgtccggtgaaggaagcacaggaggatacggataatggctaa

SEQ ID NO: 280214 - DNA, 936 bp, Morganella morganii
atggctaaaccggagatttgttatgcaatcattgatgccgcttcagagccggatattttttcactgctggatgaatacaacccgccggtgtgttgtctgtacagcgagcctctgcaaccggaaatagctgaactggcaccttatctggttgaggtcacggatgatgtcaggaaatggctggatgcacggcagacgccgtgggggatctatgtctgtacaacggtaaatatgcgtgaattgcggcatcatctgcggaaattcaccatggtgattattcctgatcaggaaaaaccggttttctggcgtttttatgatccgagaaatatctgggaaattttagcgacatttgatgactggcgcttacatacttttctggggccggtaacaaaactggaaacgaacctgtgggggaataaaaaatctgaccggtttgaggaacagagaaaacgttatccggaacaggcaaatatgagcggaatatttttgaagttcagtcagcagcagtatgatgatatcaatcggatcttcatcaataaatacgtggaaaaaatagctgtttttctttcccgcgatctgatgtatttaaatggcctcattagtacagaatatacaattgcagataatgtttcgaaggttatagaaaataacaacatagatatcatcagcgaaagaaaatatattcctgaaaatatttactctgaatcagaatgggtggcaaaaagccttgttgagtttttaattgaaaacggcattagtgatattaactcgattggtcttatcgcatatcttttggcgtataaaaagataagggaatttagttcagttcctgatgaatggcatgagatactgactcagtccggtcagccgggatattataaagtgaattgtcttatgctgaaggaattcggccatatacctgctatatataaaggttaa

SEQ ID NO: 280215 - DNA, 1752 bp, Morganella morganii
atggaaataatacaaaaaataaaaacgattatctatgacgcactgtcatcatgtcagtcctgtggtttgccggagccgtgttaccatgaattggttatcgatgaaataacagcgttaccttttgatgaattcacacggaaaaaagtattccattggccgcgtgataattttttaatctcaccgacggtcatacgaactgagagtcaggatctgaaactggctgtaaatatacgggagttacaccactcggatatacatacagcgctcattgccagtgaggacggacactatcagaaagagcttattattaatcaggataatcatgttgatttacctcttcatacagaaccgtttgaatttacaccggaatatatgtgggacatgatactcagcagatttacaccgatagatgtattcaaatcaaccactttttatataaaaatggtccggtgtgataattttgttttaacgaagatgattctcgtcaggccggctgtaaaaatcggattctcggtaaattttacctatgatttggaaaccgggacacgtgaagacagtgacagaaaaaaagagcagcgcgacaagaaaatagaaacagcaaaagcgaataaccagacattgcctaaaaatatgaatcatcttcatcagggatggacattacatacggtgccattttttaagacagcaacaacgtcaatggaaatgaagtttctctgtgaagttgccgggagagagtattcattctcgccttataaaagtgaaagctcagaaataacattactggataatgttaaaaaactggcaaaaatggataaggttatttctgtctttaaagagaaagttatcaatgtttcaccaacggctaaaaagagtgaaaaaaaagaatttccgattttctcattagcaatgaaacccattgatattggtatttctgtttattatgaagataaagaaaatccgtccaaaacaaaaatggcgatgggtataaaaggcgatccgttcttcggcattgaaatgaaaattgatgtactgcaaatcattgcatcccttggcggtccgggtgtcaaaaagtttgtggaaaaaatacgcgccacactggatgatcgcgacgacttttatcagaaacataaagatgatgcacttgcgctaagtgcaggaataaaagcagatattgttttattcaccgatgtgactttttttatcggagtatccagagaagaaaatggtccggcacaatttgaatgtgatgatacagcgatcggtgtcgggttccgcggagaggttagtgcacatctgaatacaaaagtattatgtatcattgcatcactggatgccggatttaaaatagagacgaaaggtaaaatagaaatagataatcatgatgatggcgttgatgctgtgttatgtcatgatggtatcaccctgaaagcatggtttaatgcagatatttctttggctgatgatgagaaagataagtcaatagaagaaaaagttgaatatgcaggtgagccatattcctgtgctttggcagataaactggataaggaacactctcatgcacggataaacattatcggaagtgaaagaagggttcctgaccgggagtcatttactccggtgctggtgaaaggtgcagttaacgatatagacgaggcaaaagctgttgaggcagcagaaacggtagccgcagcagtagctgtagcaggagcggcagcgaccaaaacagcaggagtggtaaagcaggggagatga

SEQ ID NO: 280216 - DNA, 1047 bp, Morganella morganii
atgcagatactaaaaaagtgtagcagtatgaaattcaggcacagagttttactctcattacttatgctgacaggggcagctatggcacaggcaaaagaacgcaatattgaaatccggaccgccattgactccaaataccttttttgtgaggtcaaaaccaacggggtaccgggatatgataaccgggcaagtgcgctgagaggagaaggcgcgggtaccaccagcacaaactcttatatcgccatgagcaacggagccaatgaattaacagtggaagtggggtcgctggactggtttgccgaaaatgccgcagagcttgagaataaagagaaatttaatccggcggcatattgcaaagcggtgatgacactggtcgattatgataaccgccagacggtgaatcttgccacgctggatatcagaattaatcaacagggactgccggaggcgtacctcaataatgaaccggataaaacggctatttttaagaaaataacctcacacccgacagagagagtaacaaaaaacaaagcaacctccggaaatataaccccgcgtgcgtacccggataatatgaccctttatcagtttactcagccttttacggtttccgatcttccggactggcagtgggtgcattcggagccgtataccggcagtccggaacaaattgccctgctgaaggaggcctacagtgagctgtggctggcattaaaaaataaagatattaaaaaagtaagaacgcttcataccccggcggcagaatcgtgggccatcacgacacgaagtacggcagaagaaattctggattctcagcgctataatactatttatgatgaaaaaaatgcggaaatgaagacgatagactggggtaatttttatattattccgatgaacaacggaaaaatggtacggatggtctataaagaaaacttacggttttcaccggtaggtataagctatattgatagtgacggtgataaaagttcatactttttttcccctattttttcattggtgaacgggaaatatattccggttatctga

SEQ ID NO: 280217 - DNA, 966 bp, Morganella morganii
atggcacaggcaaaagaacgcaatattgaaatccggaccgccattgactccaaataccttttttgtgaggtcaaaaccaacggggtaccgggatatgataaccgggcaagtgcgctgagaggagaaggcgcgggtaccaccagcacaaactcttatatcgccatgagcaacggagccaatgaattaacagtggaagtggggtcgctggactggtttgccgaaaatgccgcagagcttgagaataaagagaaatttaatccggcggcatattgcaaagcggtgatgacactggttgattatgataacggtcagacggtgaatcttgccacgctggatatcagaattaatgaacagggattgccggaggcgtacctcaataatgaaccggataaaatggccatttttaagaaaataacctcacacccgacagagagagtaacaaaaaacaaagcaatctccggaaatgtaaccccgcgtgcgtacccggataatatgaccctttatcagtttactaagtcctttacagtttccggtcttccggactggcagtgggtgcattcggagccgtataccggcagcccggaacaaattgccctgctgaaagaggcctacagtgagctgtggctggcattaaaaaataaagatattaaaaaagtaagaacgcttcatactccggcggcagaatcctgggcggtcacgacgcgaagtacggcagaagaaattctggattctcaggactataacaccatttatgatgaaagaaatgcagaaatgaagacgatagactgggataacttttatattattccgatgaataacggaaagatggtgcggatggtctataaggaaacgttacgattttcacctgtgggtgttagttatattagcgaaagaggaaagaaagcatcatactttttttccccgatattttcattggtgaacgggaaatatattccggttatttag

SEQ ID NO: 280218 - DNA, 270 bp, Morganella morganii
atgccttctgtcattctcatcggagataccggtaccggccatgacagccataaaccaactaaagtcatatccggctccggcactgttaaagcggacgataaagcaattgcccggctgggcgattctctggaatctcatggcaatcacagccggactattgtcagtagttctgcgagcgtttttgttgacggaaaaccagctgcgagaagtggtgacaatattaattgcggcggggtcctggttggtaattcaacggtcagggtcgggtag

SEQ ID NO: 280219 - DNA, 336 bp, Morganella morganii
atgacactccccgttttcaggccgttaatgatatccgccacttttgtattatgcagcgcattcgccggtaactgccgggcagaggcagatctgccatgtgctgtgaccctgcaaaacagagccatcatgctggatggtgaaacatgcatcagcaaaaagcggttaccgggctgccctgtgctatgccagccgtcagaggttctggaaaaaaaagttgagctttcctgtttccgtccgggagagcctttacctttcagcagaactgcagatgttactgtcccggtggcctgtgaaatgatactccctgtggatgtctcaccggacaccactccataa

SEQ ID NO: 280220 - DNA, 474 bp, Morganella morganii
atgccaaataataaaatcactatatacatcaatggattatcattaactattggcactgttgcatattttatcatagtggttcgccaatcattttttcgggtatatggttattatggaaacatgtatgaatctgtatcaggctattatagtgggataggttttttttatttattttattctatcattattattttcttgttaaattttcagatcataaagttgtctcctgtcagatggggagctctgtatattatactccctattttgataccaatgacagtctggtatttccacacatgcctgaaaccatcaatttaccagaaatcatgcattgatatgtcattatatgactttcaggtaagggtattaatctcattcataggttcttattcctatgtttttgtcacattttctatttccatttttatattgctttcagcaataaaaaatttagttctgaagtgtaaaaattaa

SEQ ID NO: 280221 - DNA, 555 bp, Morganella morganii
atgatccggcctattattgatgttcataaaaatagtcatgacgtgccggtaatcttagcctcagatccactttatactgcaatgattgcagatcctataaacatctacgttatggtagataatgatgatttggggcatgtcggattagtcattggtgatggggaactggctttgttatatgatccttctggtggctatatagggtgtggagaaaagtgcctggcaaacgagatagctcgtcgtggttccggagagtttttgccatatcccgattttgattgggatacttatctttcctatcatcgctggagtagcgacgatattgttgtaattcaatttattatacctgaagaacatgcagaacgactcaggagtatcattctcaataatgactactcatattactttcattgcgcaacaaatgtcgccagagtactaagagagagtggaggtatatttgaaaatttggaggatggcttcagagcaccctggggtgtaaaaaaagagttgttagacatgaaaccaccagaggcttcaccctcaaatgccaaataa

SEQ ID NO: 280222 - DNA, 480 bp, Morganella morganii
atgtcagacataatttatttaacattaaagggacgaattcagggattaatctcagcaggttgttcaagctatgattccattggtaacagatatcaggatgggcatgccgatgaaatactggtgtactccactaattatgatgtaatccggcagcagaatgtatcacatgctcctttcgtattaacgaaagcagatgacaaatcaacacctctcttactcacagcaatatctgataatgagattttagattgtgagttcaactttcatcgtatcgataagagcggggagttgcagcactataaaactatcaaattaggcaaagcttcaattatcagaattgcaaacgagcatccaaacttacaattgaagaacgaattgcaaccatttgaaatggtatcattacgatatgaaagcattacaataaatcatattatagcaagcacatcgggttacagtattagccagacggcaggtaaataa

SEQ ID NO: 280223 - DNA, 2835 bp, Morganella morganii
atggataatatcgatatacggggcgcccgcacccacaatctgaagaatatcaacctcattattccgcgtgataaactgattgttatcacggggttatccggctccgggaagtcgtcccttgcctttgatacactctatgccgaggggcagcgccgctatgtggaatccctgtccgcctatgcacgtcagttcctgtcgctgatggaaaaaccggatgtggatcatattgaagggctttccccggcaatttccattgagcagaaatccacttcccataacccgcgttccaccgtgggaacaattactgaaattcatgactatctgcgtctgctgtttgcccgtgtgggcgagccgcgctgtccggatcatgatattccgctgacggcacaaacaatcagtcagatggtggataatgtgctgactctgccggaaggcaaacgcctgatgctgctggcgccggtcgtcaaagagcgcaaaggcgaacacaccaaactgctcgatagcctggcggcacagggctatatccgtgcgcggatcgacggggaaatctgtgatctctctgatccgccgaaactggaactgcagatcaaacacaccatcgaagtggtggttgaccgcttcaaagtccgggatgatctgacacagcgcctggcggaatcctttgagaccgcactgacactgtccggcggtacggccattatcgccgatatggaagataacagcgccgaagagctggtattttcagcgaactttgcctgtccggtctgcggatacagcatgagtgagctggagccgcgtctgttctccttcaacaacccggcaggtgcctgcccgacctgtgacggtctgggcgtgcagcagtttttcgatcctgatcgcgtggtacagaacccgaatctgtcactcggcggcggggctatccgcggctgggatcgccgtaatttctattattatcagatgctgatgtccctggcggatcattataagtttgatattgaatccccgtattcagagttaccggccaaaattcagaaagtgatcctcaacggttcaggccgcgaatccattgagtttaaatattccaatgaccggggtgatgtgacagtccgtcatcatccgttcgaaggtgtgctgcataatatggagcgccgttataaagagacggaatccatggcggtgcgcgaggaactggccaaatatatcagcaaccgcccgtgtatttcctgcggcggcacccgtctgaaaaaagaagcccgctttgtgtttgttgataacaccacgctgccgcagatttctgatttcagcatcgggcatgcgatggatttctttaataacctgaaattcagcggccagcgcgcaaaaatcgccgaaaaagtcctgaaagagattcaggatcgcctgaaattcctggttaacgtcggcctgaattacctgacactctcccgctcggcagaaactctgtccggtggcgaggcacagcgtatccgccttgccagtcagatcggtgccggtctggtcggtgtgatgtatgtgctggatgagccgtcaatcggccttcatcagcgcgacaatgaccgcctgctggaaaccctgattcatctgcgcaatctcggtaataccgtgattgtggtggagcatgatgaggatgctatccgcgccgctgatcatattatcgatatcggcccgggcgcgggtgttcacggcggggagattgtcgcccaggggtcactggaggatattatcagcacgccggattccctgaccgggaaattcctcagcggcgaacgccggatcagtatcccggaaaaacgtaatgtggcggatccggccaaaatgctgaccatcaccggtgccagcggcaacaacctgaaaaatgtgaccctgaatctgccggtcggcctgtttacctgtatcaccggggtttccggttcagggaaatccaccctgatcaatgacactctgttcccgattgcccagacacagctcaacggcgcgaccaccattacgcctgcaccgtataagtctgtcgaaggtctggaacatttcgataaagtgatcgatatcgaccagagcccgatcggccggacaccacgttcaaacccggcaacctataccggcgtgtttacgcctgtccgcgaactgttcgccggcgtaccggaatcccgttcgcgcggttacacaccgggacggttcagtttcaacgtcaagggcggccgctgcgaagcctgtcagggtgacggcgtactgaaagtggaaatgcacttcctgccggatgtgtatgtgccgtgcgaccagtgcaaaggcaaacgctataaccgcgaaaccctggaagtgaaatacaaagggaaaaacatccacgaagtgctggatatgactatcgaggaagcccgcgaattcttcgatgtcgtcccggcgctggcgcgtaaattacagaccctgatggatgtcggactgtcttacatccgcctcgggcagtcggcaacaaccctctccggcggtgaagcgcagcgggtgaaactggcgaaggaactctccaaacgcggcaccgggcagacactctatatcctcgatgagccgaccaccggtctgcacttcgctgatatcgaacaactgctggcggtactgcatcagttgcgcgaccagggcaacagtattgtggttatcgaacataacctcgatgtgattaaaactgcggactggattgtggatttaggtccggaaggcggcagcggcggcggtgaaatcctgatcgccggtaccccggaagaggtggctgcatgtgaacgctcacacaccgcccgcttcctgaagccgatcctgaaaagagggtattaa

SEQ ID NO: 280224 - DNA, 237 bp, Morganella morganii
atggtggtggatcgttcttcttgccttcccgtgtattacccagctctttttttaacaacccaaatccgcaacagaggggatgctttttcaactatgctagcggcagctagcaaccttgttgtgctgctacgcttcttagaaagtcgtggcattgacctcgagcagcgctttttgaccaaaaacttcttcaaatattacgaactggacgatctgtgggattttgctcagcgcaagtaa

SEQ ID NO: 280225 - DNA, 1089 bp, Morganella morganii
ttggatttaacacttttgcagcaattgcctcgggatggtcagattttcattctgaccgggccgaacggatctggtaaaacgcgtgccctagctcatatgacggataactatctagaggatatgcgaaataactcttctgccgtaagccgactaatctgcctatctgggaccgttctggataaatttcctcggcatcctcacgcggcctatgcgtacttcggtcgacgaaccaattcgaatatgttctcagaggttgccccataccggcgccttgccgaatttatgatgaacgactgcaccgattgggtagaacgcgcagccgtggcgagagacctacttaaatccatatctatcggtcacataatccatttcaaatttcgccgcgggcgcaacaccaaagacactatcccccaggcaacttcggagaatcttgacatttctattgatctgagtcttcccttccataagcaacgtagttgcaaaacacgagtagggcaactcaatggcaacaaagtgcatgtcagcggcgtttcgttcaccaaagattcacaaaaattcgatattgcagatctgagttctggcgaacgtagctacgttctgtcgatccttgcgatagctttcagcgtagtcgatgcttcagttgtgatttttgatgagccggaaaactcattgcatcccaagtggcaggctaccatcattcgcgatatctggatggcaatgtccaaggtttccaaaagctcaacacttgttattgcaactcattcgccactcatcgtagcaggcgcgaataatcgtctgacctatgttcttgatcttgcctcaaccgagaactggtctcaatcggagatgtttggaaatacaagtgactcggtcttgaaggaacagtttggcctcatctcaccgcggtccatatccttcttatcgctcgtacgggaatgcctcaagactatgatcgaaatgcaaaataactcgcagccttttcgtgatgcagctgatcaactacttgcaatgaatgtacaacttgatcaagaagatccactgtttctaactctggaaaatatcaaggaagcaagggaggctctcgtatga

SEQ ID NO: 280226 - DNA, 699 bp, Morganella morganii
atgacgctcggacctgctcaacttcctgttagcagcaacctcaaccgtgtgatactgcggagaagggaatatcgcctcctttttaaaaatttctttgatgaaaaaattacatggggtgattcgtcactgtccaccataaagaaaacgctgcgcatgaatttacgagcacaacaggatggtcgctgcatttactgtcgaagacttattttgattgagcgacgcaatgtctacgaggacatagagcattttctggacaaatcccgagctcagtaccgccggtgggctttcaattatcttaatctctcactagcgtgccatgcctgcaactttgagaaaagtacgaaagatctgggagttccaggtagccaaacctcttcgagatatctctccggagtgggcatctatagatggctacacccttattttgatgactatcatgccaacgtgacgataggcaaggggtgggtctacacggtgcgacaaggtgctccggccgcagtgcaagctgctcgcatgattatggagtgtaagctcagtgagattgaaacgatcgaagcgtatggcgaggtaataaaaaaaagggtccaccgattaactgtcttaactgggaaagctatcaagcatcaacgttacgcactcgctagcagactggttgatgaatcgcaacggtaccaagatgagcaatggtactgctactga

SEQ ID NO: 280227 - DNA, 261 bp, Morganella morganii
gtgactgcctataaaacgaagaaagaggtgctcaaagggcgggggcccaaaaatccgcgtccagcaagtttgaacattgctgctgccaggattgtgaatcttgaaagcgaaatcgaagagcttaaggaagagaaccggaggtacaaacaacagcttgtgatctggcaatacaatacatacaaacatggaatgacagaacatcaacttaatgcgcagctgacaaagattgaccgtgagcgctctgatggagaaagaagatag

SEQ ID NO: 280228 - DNA, 4764 bp, Morganella morganii
atggtcaaaccaaactgggataactttaaagctaaatttagtgagaatcctcaagataattttgagtggttttgctacttgttgttctgtcaagaattcaaaatacccgcaggtatatttagatataagaatcaatctggtatcgaaactaatccaataaccaaagataatgaacttatcggttggcaatctaaattctatgatacaaaattgtcggataacaaagctgatcttatagaaatgattgggaaaagcaaaaaggcttatccaggattaagtaaaatcattttctatactaatcaagagtgggggcaggggagaaagtctcatgaacctgaagacgataagaacgctgataattattttgaaactgtcggaaatagtaacgatccaaaaataaaaattgaagttgatcagaaagcatatgagtcgggtatcgaaatagtatggagagttgctagtttttttgaatcaccatttgtaatagttgagaatgaaaagattgcaaaacatttcttctcccttaatgaaagcatctttgatttattagaagaaaagcgcaagcacacagaaaatgttttatatgaaattcaaaccaatatagagttcaaagacagaagtattgaaattgacagacgacattgcattgaacttctacatgagaatctagttcagaaaaaaattgtcatcgtcagcggagaaggtggggttggaaaaacagcagttatcaaaaaaatttatgaagctgaaaaacaatgcactcctttctatgtctttaaggctagtgagtttaaaaaggacagcattaatgagctattcggtgcgcatggcttagccgatttctctaatgctcatcaagacgaattacgtaaagtcatagtcgtagattctgctgaaaagcttttagaattgaccaatatcgatccttttaaagaattcctgactgttttaataaaggataaatggcaggttattttcacaaaccgtaacaactacttggcagatctgaactatgctttcatagatatttataagataactcctggaaacttagtaataaagaaccttgaacgcgacgagctaatagagttatctgataataatggatttagccttcctcaagatgttcgattattagaactaatcaaaaatccattttatctaagtgaatatctgaggttctataccggtgaaagcatcgattatgcgagcttcaaagaaaagctttggaataagattgtcgtcaaaaataaaccttctcgggagcagtgtttcttagcgactgcttttcagcgggctagtgagggccaattttttgtctctccggcatgtgatactggaattttagatgcgttagttaaagacggaattgtcggctatgaagctgctggttacttcattacacatgatatatatgaggaatgggcattagaaaagaaaatttccgtcgattatatccgtaaagcgaacaataacgagttcttcgaaaagataggagaatcacttcctgttcgccgtagttttcggaattggatatctgaacgattgcttttagatgaccagtccataaagccttttatcgcagaaatagcctgtggagaaggaatatcaaaattttggaaagacgagttatgggtagctgtccttctttccgacaattcaggcatattttttaattactttaaacgatatttacttagtagtgaccagaatcttttaaaaagacttactttcttattgaggcttgcttgcaaggacgttgattacgatctgcttaaacagttaggtgtaagtaattcagatctactttccattaaatatgttcttactaagcctaagggaactggttggcagagtgcgatccaatttatccatgaaaatttagatgaaattgggttcagaaatattaattttatacttccggtgattcaagagtggaatcaaagaaacaaagtgggtgaaacgactcgattatctagtttgatagccctaaaatattatcaatggactatagatgaggatgtctatttatccggaagggataatgagaaaaatattctgcatacgattcttcatggggcggccatgattaaacctgaaatggaagaggttttagttaaggttctaaaaaataggtggaacgagcacggttccccatatttcgatcttatgaccttaatccttactgacttagattcacatccggtttgggtatctctcccggaatatgttctacaattggcagatctgttctggtatcggccacttaaagaaaaaggcgaacgttatcaccatatggatattgaagatgagttcggtctatttaggtctcatcatgactattatccagaaagtccatatcagactcctatatattggttactacaatcacagttcaaaaaaacaatagactttattcttgattttacgaacaagacaacgatatgttttgcccactcccgctttgctaaaaacgaaattgaagaagtcgatgtctttattgaagaaggaaagtttataaagcaatatatatgcaatcgtctgtggtgctcatatcgaggaacacagatttctacctacttactttcatcaattcatatggcattggaaaaaatttttcttgagaattttaaaaatgcagactcgaaagtgttggaaagttggcttctctttttgttgagaaataccaagtcagcttctatctccgcagtagttactagtattgtacttgcattccctgagaagacattcaatgtagctaaagtactattccaaacaaaggatttcttccattttgatatgaatcgaatggttctagacagaacacataaaagttcattaatctccctcagggatggctttggcggtgcagattacagaaactctttgcacgaagaagatagaattaaagcttgcgatgatgtgcatagaaatacttatcttgaaaatcttgccttgcattatcaaattttcagaagtgaaaatgtaacggagaaagatgccatagaaaggcaacaagtgctatgggatattttcgacaaatactataatcatcttccagatgaagctcaagaaactgaagccgataagacgtggaggctctgcttggcaagaatggatcggcgaaagatgaatataactactaaggagaaagatgaagggattgagatatcattcaatcctgagattgaccctaaactaaagcaatatagtgaggaagcaataaagaaaaattccgagcatatgaagtatatgacgctgaagctatgggcaagctataaaagagaaaaggatgaacgttataagaattatggaatgtatgaggacaatctgcaaattgcgatacaagagaccaaagaaataataaacaagcttaatgaggaggaggatgaagatttccgactattaaacagtaatataccagcagacgtttgttctatattactattagagaattttaatcagctgaataatgaagagagagaatactgtaaagatattgttctagcgtattctaaacttccgttgaaggaaggctataattatcaggtgctagatggaataacctcggcaatttcagccttacctgtgatttattataattatccaatcgaaagggagactataaaaacaatattacttttggcactgtttaatgaccactctattggaatggcaagtgggcgctactcagtatttcctagtatggtgattcataaattatggctagactattttgatgatatgcagtctctattgtttggttttttgattttaaagccaaaatatgtaatcctttcaagaaaaatcattcatgaaagttatcgtcaagcagactatgacattaaaaaaataaatattaataaggtgtttttaaataactataagcattgcatatcaaatgtcatcgataataaaatatctatagatgatttgggaagtatcgataaagttgatctgcatattttgaacgcggctttccaattaattccagttgatactgtcaatattgaacataagcaattggtttccttaattgttaaaagattttctacaagcctattgtcaagtgttcgagaagatagagttgattacgctcttcggcagtctttcttggaaagatttgcctactttacgcttcatgcgcccgtgagcgatatccctgattatataaaaccttttcttgaaggtttcaacggttcagagcctatttcagagttatttaaaaaatttattctcgtcgaagatagattaaatacttacaccaaattttggaaggtttgggatttgttttttgataaagtggttactttgtgcaaggatagagataggtattggtatgtagataaaattataaaaagttacctttttgctgaatctccatggaaagaaaattcaaatggttggcacacatttaaagataacaatagtcaattcttttgcgatgtatctaggactatgggtcattgcccttcaactgtatattctcttgccaaatcattgaataacattgccagttgctatcttaatcaaggtataacctggctttcaggaatattgtcggttaataaaaagttatgggaaaataaattggaaaatgatactgtttattatttggaatgtttggttaggcggtatatcaacactgagcgtgagagaattagacgaaccaaacagttgaaagaagaggtcttcgtaatattagattttttggtagagaaaggatcggttgttggttatatgtcacgggaaaatattctgtga

SEQ ID NO: 280229 - DNA, 129 bp, Morganella morganii; identical to SEQ ID NO: 235309

SEQ ID NO: 280230 - DNA, 822 bp, Morganella morganii
atgagtgctatagaaaaccaagaaacagttatacaagcagttaatagtttacatccaacaacgttgtttcactttactaaaaatgaagaggcattctatagcattttaacagaactctattttaaacctttccttgcccgtgaacgcatagtcggagtaaaaggaagaagaaatttcgcagtaccaatggtttcattctgtgacatcaagctgtctcagattaaagatcatagtggaaaatatggtgaatttggatttgggttaacaaaagaatgggctgagaaaaatgatctccatcctgttctatacatgaatcaaggcagtgaattattttcaaagtataataaaagaattagaaaactaaaggatgcagtaattcctctatggtcgaaaaggcatatccttgataataaagagcgtaagtattttgaaagccttaaagaagagtacgctgacctttataatttattacgttatatgaaaaattataaaggaaaattagaaaggacgaacgaaaaacccattgagaattatatctacgctgacgaaaaagaatggagatatgtaccgcatccatttgttggcgatttatggcctagcctaaatttagagcgagtggtggaacctaaccagaaggccgtcttaagtaaaaagttctctgaatttggtattagtttttctttcgatgacattaaatatatacttgttcctgatgatagccacatttccaaattgataacttgccttatgagtataagaaattatgatccttatataataagtaaagttttaacgatggataaggtaaaacaagatttttaa

SEQ ID NO: 280231 - DNA, 555 bp, Morganella morganii
atgaaaaagacatatcggatagcccggatattgccgggtgttctgctgttgttacttagcggatgtgataatgggagtgctgaagcgccggagaatgtcccggcgacagaacaggccaagagcggaaactggcaggtaaaaccggagacactcacgtccggccgggctgaggatattaaggctgatttgtctcagcttaacccggtactgaataaatccaatgaagaaagtatccggttattaaatgagattgataaggtcagaaatgaccgggaaaaagtgaaaaccatcctgattgagaattttaagaatcagtctgatattgaacagaatatcctgtccatgacatttaaaagtgcggaggtacagattatccgtattcagatcctcagtaatattcagctggcacggaaaatatacgggattgtcggcacatccggttttgatattgccagtccgggtgatgaatttaaacaactgagcgcaaaatcatttcagatgcagcagcagattggccgggcgctggatgatttgaatcagaagtatggtcaataa

SEQ ID NO: 280232 - DNA, 174 bp, Morganella morganii
gtgaaaaaaatagtattgcttgtgtgctttaccttttcggtcagtgcattcggttatattacttatgatccgaacgatccgaatataaaagccgtgtgcagagacggctcttattctacctcaaaaggacggggcacctgttcacatcacggcggtgtggatcactatctgtga

SEQ ID NO: 280233 - DNA, 480 bp, Morganella morganii
atgtcttttctgatttacctgacactagaaggaaaaaaacaaggcctgatctcatccggttgttcaacacaggattccatcggaaacagatatcagtccggtcatgagaatgaaatacaaatactgagcctgaatcattcactatccagagcgcagaatacaactcaccatcctatacaattcacaaagcctatagataagtcatcgccacttttagcttcatcaatcgactcaaatgaactgatgagtgctcgctttacattttacagaaccagccaaagcggacagctggaaaaattttatgaaataaaattatctgatgcgtcagtgactgagatatcctgtgtttacccgaactccattgatagtaatgaatgcatgccatttgaacgcatccagcttaattacaaatctatctcgtggggacaccttatggcaaatacatcatcatacagtatttgtgataaccgggtactctga

SEQ ID NO: 280234 - DNA, 474 bp, Morganella morganii
atgttccaacaggggatattaatggtgctcttcatatgtgggggggaatcagtcgtggataaaccaataatcagtaaagttaagttgttttttggggttgtttttattttttccttgtctgtttcggtttttttgatattcgcttattatactgctgattatataaatgagagtgaagttgttaaagtatacccaccattgttttttgtgttttttgttccgctattaatgtacttctcttttattattcttattgtaatgatcaataaagaaattattgtttccagggtatcaatttttagacgtatttttaagttccttgctttttttgcagttctttcttttgtttttatgataatagggcctatgtatatgggtagtaatcttatatcaaaaggttatattaaatgtcattcaacaccaataaaattacagacggtttatgttattaatgaaagtttatgtgggaagtaa

SEQ ID NO: 280235 - DNA, 858 bp, Morganella morganii
atggatctctatttcgggcgaaatgaagctgaagaaaaatatatacgtaagtttgcagccgatgagcagtacaaaaaattagaggctcaattagccggaattgctgatgaaaatattcatgcgctcctgacaatagaagaggctgaacaatttgtttcaataatgaaagatcccgcatcttacaagccggaaagcggaaaagaaatttttttcaggtatgccggtatagctacctcttttacgggtaactatttagacgcttatggattgggaaagttgattgctgaagtcaaaagctttggtgtcaaagctggtgagtatatcggcagggatggtaacaggtatatcaggctaacaggagaatctagtttaaggaaatatcttactgcaacgatttatcttataactgatccgaaaatgcttgaatttggtatcggggaagtcggctttgaaaccaatctggctaagggaacaagattctgtatttatttttcagcagcatacaggggtattgaattgttattcaaggatgaatatgacttgactgatttttttgtcaacgtttcaatggatgcagcaaaaacactggttagtgcaggtataatgtggtctataagaggtgcaattataactggggtaggtattttatttggggggagtgttatagctaccgcacttgtttttactggtattgccgttggtcttggtgttcttatgtatcatattgataactcttttaagataaatgatagcataattaaagtgcttaaaaatagtaagcgagcggctaaaaataatgttccaacaggggatattaatggtgctcttcatatgtgggggggaatcagtcgtggataa

SEQ ID NO: 280236 - DNA, 600 bp, Morganella morganii
ttgtgcctgagtctgcgcctgctggatttccaggtgttcgcgctgcatttctgtggcggtgcggcggacagccagggcttccagttgggcatcaatctgtttcacttcagattcggcattatttttctggatttcccattcctgacggcggcggcgccatgcttcagactggctgatattatccgcggtaattttggtggcggaggctgccagtgcgataccggaaccaatggctttcgggataccgccccagcggctgccccccacggccataccgaagacgttcggtgccatatcggcagcggcggcggctatatccagcacgccaacggatgtactcagtattgcggacgagagatacagatccatggtccgtttttctgcggcactgatattttcatcatacagggcgcggtagctgtcaaagcgggactgcgcaccggcacggctctgttccagtgttttcttctcggcatccagctcagtgagtgcctgctcctgcatacgcagggaagagagcatcagctcaccggcctggttttgcagcagttcactcatcgcttccgcatcccggcgctcaatcagtccctggagggttga

SEQ ID NO: 280237 - DNA, 156 bp, Morganella morganii
atgttcagtgataacacagtgatgtttatcgcgggtcagatgtcgttccccggtcagcggattatcgcggacggtaaccggcagcaggaactgttccggtgcaccgtaagtctgatgaccggagcgcgtaatccagaccttttttcctgtttctga

SEQ ID NO: 280238 - DNA, 327 bp, Morganella morganii
atgcaggctggtcgtctgagacatattgttgtatttcagagagctgaaatcacaatactcccgtctggccagagagaaaagttatgggttgatattggcccgtctgtgaatgcggaagtcagacccgtcagtggccgggaactgctgaccgccggagcggaaatgtcagaaatcactgttcgtgtatggatgcggtaccggccggatattcatcccgcatgccggatggtatatcgcggtcaggtctacgatattcaggctgtgatcccggatgtgaaatttacccggctggaactgctgtgtaaacagggggtgaaagatggctga

SEQ ID NO: 280239 - DNA, 2460 bp, Morganella morganii
gtgactcagactttccggtatgaaggtgcggattcagccgggcgtccgctgagtatcgcggaacagaccgccgggcagaaagttcaggtgactgaacgctttgtgtatgcaggcaacagtgaggcggagaaagcaaaaaacctcgcgggggtttgtacacatcattatgatccggcggggctgatgcagacggagagtattgcgctgaccggcgtgccgctgtcagtgacccgtcagttgctgaaagatgcggataacccggatacccgtgttaactggccggaagctaatccggacagtgcattatccgctgaaaaatacaccacgcaaaccattgcagatgccaccggtgcggtgctgaataccacggatgcggcgggtcaccagcagagagtgacttatgatatcgccggattgctgagcaccagccgggtgacggtgaaaggcggggcggagaaaatcattatcaagtctgtggaatattctgccgccggacagaaacttcgtgaggaacacggaaacggtgtagtgaccacttacacttatgaaccgcaaacccagcgtctgattgctgtcaaaaccgaacacccggcacggaaaaatgtatttcaggatctgcgctatgaatatgatccggtcggtaatgtgctgtgtgtgacgaatgacgcagaggagacgcgcttctggcataatcagaaagtggtgccggaaaaccggtacacctatgacacgctgtatcagctggtcagtgccaccgggcgcgagatggctaatgccggacagcaaagcggttccctccctgatatttccccgtttgataaagccagttacaccaattacacccgcaactatatctatgatcgtgccgggaatatgacacaaatccgccactcagccccggtgaccggtaataattacaccacggatatcaccgtcagtcagcgcagcaaccgcgcggtaccgaaaactatggcggacacaccggagaaagcggaagccctgtttaccccgggcggacaacagacacagttacagccgggacaaactctgtcctggacagcgcgcggtgagctgcaacaggttacgccggtggtgcgtaacggtgccgcaggtgaccgcgaaagctaccgttatgatgcgggcagccagcgcatcctgaaaactgctgtgcagaaagccggcaacagcacacagacacagcaggtgatctatctgccggggctggagctgcgaagcggaaaagaaaattatcaggtgatctgtgccggtgttgccgggcgtgcacaggtacggttgctgcactggccggacggcaaaaaagatcaccagcggttcagttatgacaatctgatcggcagcagcggcctggaaacagacggtgacggtaagctgctgagtcaggaagaatattatccgttcggcggcacagccgtgctggtggccggtgcggacagcggcattgactacaaaactcatcgttactccggcaaagagcgggatgcgaccgggctgtattactacggctaccgctattatcagccgtgggcagggcgctggctgagttcagatccggcgggaaccgttgacggactgaatctgttccggatggtgaggaataatccggtgaggtatagggatagtgacggattggtcagtattgatacatccgatatagatgttaatatcattaatggagtaattccatttcttgacaaagatataatgaaattagatccgtcaaaaaataagtttgtcaaatataaagaaacatatgttactgaacttttagaaagtcataaacatggtatggtcagtcttgatgaggcaagatcagcgctgaaaagctatgcagatacatatcataagttagataaggaattttctctcgataaaaaaaatatggaacttggagtcagtatttccatgaggataatggagggtattaactcttatgagcatcattttattaattccgcaggtgccggagagggaagccattcctctgattatgatgtcaatgggtataataatcgggaaataaagtatttcgcactcaaagataaaaataagaaaaatatttatgcgatggctgcggttgttgtcttgtctaatttcatgcataacagagttgcagtcagtattgaaaatctggtctcaaaccccttaacccaattacggggagaaggcatttcattctataaacaaaataatattgacacggattttattattaaaggtgcgggtaacagattggtagcaaaaatcttacaaaacctgtcacaaaaacacattatagaaaggatatctactgatgcagttagtcctcgttccgcagcaatagcaacaagaatgcacaaaattgcaacatccggagacatatcatccagattgaaaaaaagtttccttacatcggttggcaaggtacggagtttaatgcctaaaaaatcaacattagactaa

SEQ ID NO: 280240 - DNA, 1515 bp, Morganella morganii
atgaagaatttagttctggttgattcatttggtggcacagacgcagataatgatgatattttattaaaagcatttgaggatcatgaagcatatcaagatattttaaaatttaaaaaattccttattatcggtaagaaaggtagtggaaaaactgcaatttttaaaaaaataataacaacacgtgaagatgatactttctcattgggccacactttttctgattatccatggcattttcatcagcaacaggcaaaggctggaatatccaatgatgataaattcacgcatagttggaagtacttgatattaatatcattagctaagataattttgaatcaggataattctttgccatgcagtgaattatcgagagaatctatttcaaaactagagtcatttataattgatgcatatggtagccgtgatcctgatttaactcagatatttaaccctcaaaaagaaataaaaataaaaccacactttgaagtggattttaaattattaaaacttggcgctagtgctgaaaggatattaatatctgatttacctattgttattcaggaaattaatgcgcaactaatgaaattagttatgaatgcattgaacccagagcataaatactttattgcttttgaccagctcgatttagggtttgagataaaatctcaagactatatcagtcggttaatagggttgttgctagcaagtcgagatattaatatttacgctaagaatttgggcgttaaatttttagtaacggtcttcctacgtgatgatatatataatatattgcgatttgaagataaaaataagataacagaaaacttcatgtcattaatagaatgggatacattaagaacaagtaaaacattaaaatctcttatggaaaaaaggtttgctattgttgctgaagatataggagaggagggggctattaagtgggatgatgtttttaatgaaaatagggaaatgcctagtcatcagagtaaatatgatcatattaaagatagaacatatcttaggcctcgagatatgataaaatttgcaaatagtgcacttgcaaaatataaagaaagaatcagattgtcggaagtaaataatattccatctaaagatgatggacttaagattgataatattgatgtgcataatgctaggtctgattatagtgagtattttttaagggaaatagaagatgaggtacataagcatttcccagaatatgataagtatttagacgttcttcgaggtataggaacttggcagtttgataagcctgcctttgagtcaaatttagggaaaatacacccaaagggtagtaaaactgctgaagaagcattagaagaattatatgattattcatttataggtttttatcgtgctggaggaagtggatatggggggtcagagtatatttttaaatatagagactctcgtacttcattttctcatgcatctgcgaggtttcgtgttcatcctgggttaattgaagttcttggccttaaaaaattgtaa

SEQ ID NO: 280241 - DNA, 531 bp, Morganella morganii
gtgaccggtattgtgcacagtcacccggatgccaccactcagccgtcagaactggataaagcacagtgtgatgcccttggcgtgccgtggtacatcgtcagctggccggagggggatctgcggactgttcagccgcgcggcgagctgccattacttggtcggccatttgtgctcgggtttacggactgctgggggctggtgatgagttggttccggcaggaacacggcattgagctgccggattaccgggtggattatccctggtgggaacagggtgagaaccggtacgccgataactggcgggaggcgggatttattcaggttgacgatccgcaacccggtgatgttatcgtgatgcaggtgcaggcaccggttgccaatcatgccggtattttgctgcctgataatatgctgttgcatcatttgtacggtcacctgagccagcgggtaccgtatggcggttactggcgcgaccgcacagttatggtactgagatataaaacattatctaaaaatgacattttattatag

SEQ ID NO: 280242 - DNA, 594 bp, Morganella morganii
atgcacatcgccggtgacttcatgtttaaacggatacgacgggcgatccgggttgtaatctttctgaatgatgacatcgctgcacagctgttcggcgtagcgccaggaaaacgccgtgctgtcactgatatcggtgtccgcctgcgggttataggtcagattgataccggcggtcatgccgagatggttgtcgctgtaaaacagtttcggcccttcctcgaaccagaagttaatcccttcttctgcggccagacggcaccagaaatcaaaagccgattcgcgcttctgagtgatgtaatcccgtttctgatgcagttcgtcctggtagaatttcagctcatttttgacatgcgcttcatccagcagtgttgcgagaacttccggcacagattgtttctggaagatgcggctgtcctggttgagggtcatgatccacatttcagggcggatcagaaagtgataccaggttttgttgccgtcggtgttgccctgctcagcggtggcgagcacaccctgcaccgtacggactttggtaccgtcacgggtcacggtcagagaagacgctttgcccagatgttcatcaaatgtaattga

SEQ ID NO: 280243 - DNA, 141 bp, Morganella morganii
atggaaccgcaaaatatccggcgcaccgaatgcggtaccgtcaacctcaaaaagccggacggcattacccggttccagcttctggtagtcatttgtgatcatggtttaaatgcctgggtaaaagtgagagaaagtgaatag

SEQ ID NO: 280244 - DNA, 336 bp, Morganella morganii
atgatcgaaacattcacctggtgtccccgagttaatcccacggaggacatcacctataaaacccgcagggcgaagttcggtgatggttatgagcaggtgtccggtgacggtcttaatccccgcagccagaagtggtcactggaatttaccggtcgcggggagtatatcgcggctatccgtcagtttatcgaccgtcacggcggtataaaggcttttcagtggaaacctccgcttgagccggtcggtctgtaccggtgcgacgagcataagctcaccccgctcggcggtgacaactattcactttctctcacttttacccaggcatttaaaccatga

SEQ ID NO: 280245 - DNA, 336 bp, Morganella morganii
atgaaagaatctgatttgttttctttgcttgacccggtgctgccgggcagggtttttccgtatgtggctccgcaggatgaacccaaaattcagccgccgtggtgtgttttttcactttatgataccggcggagatgtgctgtgcggtcgtgctgagacaatgaccaatatccagattgatgtgtatgcaaaaaccatcgatgaagcccgccggatccgtgaactgtctgttgctgctgtttctccgctttcaccggcagagtttacagaaaagcagggctatgaagcggatacctcgcttttccgggccacgctggagtgtcaggtctggcaataa

SEQ ID NO: 280246 - DNA, 513 bp, Morganella morganii
gtgaccggtattgtgcacagtcacccggatgctaccacccaaccgtcagaactggataaagcacagtgcgatgcccttggcgtgccgtggtatatcatcagctggccggaaggggatctgcggactgttcagccgcgcggtgaattaccattactcggtcggccgtttgtgctcgggtttacggactgctggggtctggtaatgagctggttccggcaggaacgcggcattgaactgccggattaccgggtggattacccctggtgggagcagggtgagaaccgttacgccgataactggcgggaagcgggatttattcagattgacgacccgcaacccggtgatgtcatcgtgatgcaggtacaggcaccggttgccaatcatgccggtattttattgcctgacaacatgcttctgcatcacttatacggtcacctgagccagcggataccatatggcggttactggcgtgaccgtacagtgatggtactgcgtcatgagcaactgatatga

SEQ ID NO: 280247 - DNA, 585 bp, Morganella morganii
atgtgcaaatgtaataccgtcacccgcgacgatattccgtttgccatctggtcagagcttcgccccgacaccccgtatcagtgcgtacgtgctcaatgtggtttcctgttctcttccgcttcctcgcccactcgctcactaacgttcggtcgctggggctgcggcgagcggtgccacctctcgcatgctgtcggtgattccgctgttgttctttcggggatgagtcgtcagatagcccttcaaacgcgctcagaagctctcagacgcacgaggcggggtttaaatgcccgtcagggcatggaaggcgcgaaaaacgcttacagagcgtttcaggaggtcaggcgcgccgatacccctagccaggggctttcaggtcgccaggaaccgcgccagccccctgcaaagcccatttgcacggtacaagcagccactcggttggtaggtggtcgtagaccgtcggtgttacagcgatgggggtctggggttctccccagacggtttccggttgcgctcaaggcgctgccggaaccgtggcggctcggtcgttctggagatcggggagcaaaaacacgcaagggattttga

SEQ ID NO: 280248 - DNA, 240 bp, Morganella morganii
atgcatactgggctggccatgaccggcgtatccatgatgctgggcggtataatccagatgttgtccccgcagccgggcggacttgctatgaaagaccagggcgaaaataaaccatcatatgcattcggtgcgccggtgaacaccgtttctcagggctatccggtaccgatcggttatggtaagcgccgcatcggcggcgcggttatctcagccggaatttacgtcgaagatcagcagtaa

SEQ ID NO: 280249 - DNA, 240 bp, Morganella morganii
atgcataccgggctggccatgaccggcgtatccatgatgctgggcggtattatccagatgttgtccccgcaaccaaacggaatcgccatgaaagaccagggcgaaaataaaccgtcctatgcgttcggcgcgccgacgaataccgtttctcagggctaccctgtaccgatcggttacggtaagcgccgcatcggcggagccgttatctcagccggaatttacgtcgaagatcagcagtaa

SEQ ID NO: 280250 - DNA, 723 bp, Morganella morganii
atgttcagactctcccgcacctttattgcaccactcctgctgttattttccgcctcgctgtttgcggcagccgaaaccaagcctgcggcaccggcagatttggatctggtttttgttctggataaaagcggttccatgtccggttttgaacaggacaccatcggtggttataactccgttcttgccgaaaaccgtaaaaaagaaggcaatatttacgtcaccaccgttttattcaaccacgaaaacagtacgctgcataaccgcgagcctatcagcaaagtcaaaaacctgacactggatgattattctgtcggtggtaataccgcgttactggacgctgtcggtattactattgataaaatccgtgaaaaccgcaaaattaccaaaaataataatgtgttatttgtgattattactgacggtgcagaaaacagcagcaatgaatatagtcgtgataagattaaatcaatgattaattctgcagagaaagaagataagtgggactttattttcctcggcgccaatattgatgctatcgcagaagccggtaatatcgggattaaaagtgacaacgccaccggttatgtgcaggataaagccggttacggcaaagcgtatgacgccgtaaataaagcagttgaagtaaaacagcaatcaaaaccaattacgtccgaatggaaatctgaagtcgaaaaagataacaacgaacgcagtaaaaaataa

SEQ ID NO: 280251 - DNA, 708 bp, Morganella morganii
atgaacgaattaatcagcacccacatatcaatgaccagtattgatatcgccgatctcgtcggcagccgtcactctgacgtaaaacgcagcatagaacgccttgtggactctggcattatccggaaaccgccaacggcgttctccgaaaatatcaataacttaggcttcgcagttgagcaacagcattatgttttcgaaggtgaagatggtaaacgggacagtattgtcgttgtcgccagactgtcccctgaatttactgcccgcctggttgaccgctggaaagagctggaacaggaacgtgcccgtccaaaatcacaggctgaacttatcgcagcaatggcgatggccaatctggagcaggaacgtcgcatggccggtattgagcaaaaggttgtccatgttgcggaaaccgtcgagcagataaaaaaaggttccatgcgcgaaggctacgccggattcagccagttaaaagcaaaaagcggtctgactgacgcgaagtgccggactttggttaagcaatatcagatcccgactgatacccacgagttccttacgccggacggcctgctttcacgccgcgctattgtggccgtgcagccgttcatgaacacactgcaacaggtaatgaaggaagcggagcgccggggaacaaagtggtatcacccgaatatgggcctgtttcaggctatcggctgggaggaaaaataa

SEQ ID NO: 280252 - DNA, 216 bp, Morganella morganii
atgggcaaaagaaaacgcagcagaacgcaacaaggtttcgcgggcatgactattgctcaggggatgagtttagaaagggatgaagttaaagattataccaatgtctgcaaacacttatctcaatttgaaaaatgtggcgatgaaattcggatgccattaaacagaaagcaacgccggttagccaaaaaattaaaaattgaattaaaggaagtttaa

SEQ ID NO: 280253 - DNA, 348 bp, Morganella morganii
atggaaaataataacattttatcaaacagaagaaagtcattcgctgatgctttctttcatcacctgaaaaagaaaggtaagtcagcatcgtttaaacgctctgtagatggtgtgaaatatcagattgatttagatgctgaggtactgacacaagcgctgatatcgctttatgaaaacaaagcatgcaaagacgcagggtatacagaacaacagataattaactcatacgcaaattattacaacaaaaatggaaatatcacaccagatggtgaaatgtttatcagtttaatcacagagttaattgctgaaaacatgcacagaaaggaatttaagaatgagcctgtttaa

SEQ ID NO: 280254 - DNA, 231 bp, Morganella morganii
atgaaagaacaatatgaaatcaaaattacagtaacttatgacggtgacgacgttaatctctctgccgaatcaaagcatgttacacccgcacaaccatcaatattttttatggcgttaactaagtttttaaatcagcaaatacgtgcaggactgaaagataagcttgcattggctgatgatattgctgacctgattgttggtatctctgagcatgtaggcacaggtgattaa

SEQ ID NO: 280255 - DNA, 255 bp, Morganella morganii
atgaattatattaaatgtaatgaactcattacccgaaaaataatgaatacgccagcagctaaatttatcactgaatttagacagagtagttcaatacgttgggagtgtaacctatataagttggttaatgatgattatgaattagttgattcattttcagagccccataaagcatcaggacaagcaaagataattatgtatttacgccctgaaattggaaatcgcatatctgcattgtttaactctggagaataa

SEQ ID NO: 280256 - DNA, 219 bp, Morganella morganii
atgtcacagaaaataattataagtcacaacaattctgatttatacaaaacagctacctatgccagtaattacgcgaaggaattaagagccgaaatagcaccattgataaatagactgtctgtagattatccggcagaagcagcacgttataacggacttattaacgaactggttttaatgacaggaattactgccagtggaattaagaatcaaatttaa

SEQ ID NO: 280257 - DNA, 228 bp, Morganella morganii
atgccgattatacattctatgccaaattgtgatgcgccgaaacctgacacctatacagcggttaatcagatgttcatctttcggttctttgccgtcaagcgtatcgaccagaacgcaaaaccagaatgcaaagaggttcaggccacagatttacggtccgcaaaattacagcttgtccgtgattatattttatcactggcaacacaaattccagtcaaggcggtgtga

SEQ ID NO: 280258 - DNA, 342 bp, Morganella morganii
atgttcggtaaagttgcatctgttcagtatgatgacttggaaggcagtattgccctcgataacgatgatgttaattcaatttctgcttgggctattgcgcaaggtttaattaataatgatgaacatgtatttggctttgaagttaattaccaaaaattaactaagtccttcactataactttgaacacttccaccgagtcatttgatgctatcaaaaattcacaaaacaaggctcagctcatatccgacaagcaagtaaacttatctgactatcaatttattgatttaattacaagtaattttaaaagaataaacattattgcttctaaaaaaggcttgtaa

SEQ ID NO: 280259 - DNA, 321 bp, Morganella morganii
atgactccggacgtttattaccgtatcaccaaacagggacagaaatataaagcgctgaaaggaaaaacagtcacatttgcgatgcatgaggaactaactgacggtaaagtaaccgtgtcatatccggtaaatgcaccggcggttattccgttcaatgaattaccgggtgacctggctaaattcgtttcacttgccggcgcaggcggtgcggttgatgtgtatataaaaccggaaggcggttatggtgtcgccggtattgaagggcagataccaccgaactcaatgtctatgatcaaactgaacgtgctgaaaatagaataa

SEQ ID NO: 280260 - DNA, 792 bp, Morganella morganii
ttgaagttgccgctcgtttacagcaacgaactactgcgattatgcagctttgctgtgcagagcggtttaattgactacaaccccgcgcaagagattgccggtgcggttgctacggcgaaaagacagcatcgtgctgctctggaacttaatcgcatacctgaattacttcaccgcatcgatcactattctggcagacccttaactcgattggctgttgcactcactttgttggtcttcattcgttcaagtgaactacgttttgcccgctggtcagaagtggattttgaaacggccatgtggacgatactaggtgagcgtgaaccgatggaaggtgttaaacattctcagcgtggttcaaagatgcggactcctcacgttgttcctttgtcccgtcaggccttagctattttggaaaagatcaaaagcatgaatggaaaccgagagctgatcttcgttggcgatcacgatccgcgtaaaccgatgagtgagaatacggtgaacaaggctttgcgagtgatgggctatgacacgaaaacggaagtctgtgggcatggtttcaggacgatggcgtgtagctcattgattgaatcgggtctatggtcgagggatgccgtagagcggcagatgagccatcaggagcgtagctctgttagggctgcctacatccataaagcggaacatctgggggagcgcaggttgatgctgcagtggtgggcggattatctggatgcgaatcgggagaagggggtgagtccgtttgattttgggaataatggtaatttgttaaaatga

SEQ ID NO: 280261 - DNA, 3513 bp, Morganella morganii
atgatgactaaatccaattttgagttcctgaagggcgtcaacgatttcacctatgccatcgcctgtgcggcggaaaataattacccggatgatcccaacaccacgctggtgaaaatgcgtatgtttggcgaagcgacggctaaacaccttggcctgctgctggatatccccctctgtgagaatcaacacgatcttctgcgtgaactgggcaaaatttcctttgttgatgacaacatcctttctgtattccataaattgcgccgaattggtaaccaggccgtccacgaataccataatgatttggatgatgctcagatgtgcctgcgcctgggtttccgtcttgccgtctggtattaccggttggtaaccaaagattacgactttcctgtgccggtttttgtgctgcctgagcacggtgaggatcgctaccacgccgaagttctcaccctcaaacagcaactggaacagcagacacaggaaaaagtacaaagccaggcagaactggaagctcagcagcaacgattaattgcactcaacggctacattgccgttctcgaaggcaaacagcaggaaaccgaagcacaaaccaaagcacgcgtggccgcactggaagcgcaactcgccgccaaaaacgccgagttagcaaaacaaaccgaacaggaacgcaaggcatatcataaagagattaccgaccaggctatcaagcgcacactgaatctcagcgaggaagaaagccgcttcctgattgatgcccaactgcgtaaagcgggctggcaggccgatagtaaaacgttacgtttctccaaaggtgagcgtccagaaccgggtgtaaataaagccattgccgaatggccaactggcaaagatgaaaccgggaagcaaggttttgcggattatgttctgttcgtgggccttaagcctatcgcagtggtcgaagcaaaacgtaaaaatatcgatgttcccggcaaactcaacgaatcgtatcgctacagtaaatacttcgataacgcgttcttacgcgacacgttgttagaacactactctcctgatgaagtacatgaagcggtacctgcttacgaaattagctggcaggacaccagcggcacacagcgttttaaaatccccttttgctactccaccaacggtcgtgaatatcgcgcggcaatgaagaccaaaagcggtatctggtatcgcgacgtccgccacaccaccaatatgtcgaaagcgctgccggaatggcatcgcccggaagagctgctggatatgctgggcagcgacccgcaaaaacagaatcagtggtttgccgataaccccggaatgagcgaactgggtctgcgttattaccaggaggatgccgttcgcgcggtagagaaggccattgttaacggccaacaagagatcctgctggcaatggcgaccggtaccggtaaaacccgtaccgccattgccctgatgttccgcctgatccagtcgcagcgtttcaaacgcgtcttgttcctggttgatcgtcgctcgctcggcgagcaggcgctgggatcgtttgaagatacacggattaacggcgacacttttaacagcattttcgatatcaaaggattgactgataaattcccggaagacagcaccaaaattcacgtcgccacggttcagtcgctggttaaacgcacgttgcaatcagatgaaccgatgccggtcggccgttacgactgtattgtcgtcgatgaagcacaccgcggttacattctcgataaagagcagaccgaaggcgagctgcagtttcgcagccagctggattacgtttccgcctaccgtcgcattctcgatcacttcgatgcggtaaaaattgccctgaccgccacgccagcgctgcacacggtagatattttcggcgagccagtttaccgctacacctaccgaacggctgtgatcgacggctacttgatcgaccaggatccgcctattcagatcgtcacccgcaatgcgcaggatggggtctatctttccgagggtgaacaggtggaacgcctgaacccacagggcgagctgatcaacgacacgctggccgatgatcaggattttgaggtcgccgattttaaccgcggcctggtgatcccggcgtttaaccgtgcggtatgcggtgagctcaccaactacctggatcccaccgggcaacaaaaaacgctggtgttctgcgtcaccaacgcccatgccgacatggtggttgacgagctgcgcaccgcgtttaagaaaaagtatccgcagctggagcacgacgcgattatcaagatcaccggtgatgccgataaagacgcgaagaaagtgcaaagcatgatcgtccgcttcaacaaagagcggctacccaatattgtggttaccgtcgatctgttgaccaccggcgtggatatcccgtcaatctgtaatattgtgttcctgcgcaaagtcaaaagccgcattctctacgagcagatgaagggccgtgccacgcgtctgtgcccgtcggtggggaaaaccagctttaagattttcgactgtgttgatatctacagctcgctggaaagcgtcgataccatgcgcccggtggttgtgcgtccacaggtggaactgcaaacgctggtcaatgaaattaccgactcagaaacctacaaaaccattgaagcggatggccgcagttttgccgagcacagccatgaacagttggtcgctaagctgcagagaatcatcggcctcgccatttataaccgcgatcgcagcgaagctgtggataaacaggttcgccgtctggacgagctgtgcctggatgccgcgggcgtcaactttggcggtctggcctcacgcctgcgggaaaaaggaccgcactggagcgccgagatttttaataagcttcccggctttatcgtgcgcctcgaaaggctgaaaaccgatatcaacgcactgcgcgaggcccccattttcctcgatattgacgatgaggtggtgagcgtcaaatcgctgtatggcgattacgacacgccgcaggatttcctcgaagcgtttgatgagctggtgcaacgctccccgaacacccagcccgcgctgcaggcggtgattaatcgcccgcgcgacctcacccgtaaagggctggtggaattgcaggagtggtttgacggccagcattttgaagagtcatccctgcgcagcgcgtggaaagcgacgcgcaatcaggatatcgccgccaggctgattggtcatatccgccgtgcggcggtgggcgatgcgctcaaaccgttcgacgagcgtgtcgatcacgcgctgacgcgtatcaaggccgagaacgactggagcgatgaacagctaagctggctcgaccgtttagcgcaggcgctaaaagagaaggtggtgctcgacgacgatgttttcaaaaccggcaatttccaccgccgcggcggtaagccaatgttacaacgcacctttgacgacaacctcgacagcgtgttggataagttcagcgattacatctgggatgagctcgcctga

SEQ ID NO: 280262 - DNA, 1590 bp, Morganella morganii
atgaacaataacgatctggtcgccaaactgtggaaactgtgcgacaacctgcgcgacggcggcgtctcctatcaaaactacgtgaatgaactcgcctcgctgctgtttttgaaaatgtgtaaagagaccggccaggaagcggactacctgccggaaggctaccgctgggatgatctgaagtcgcgcattggccaggatcagatgcagttctaccgtaacctgctggtccagttaggcactgatgagaaaaagctggtgcaggcggtgttccataatgtcagtaccaccattgagcaacccaaacagctgactgagctggtcagctatatggacgcgctggactggtacaacggcaaccacgggaagtcccgagacgacttcggcgatatgtacgaagggctgctgcagaagaacgccaacgaaaccaaatccggcgcgggccagtacttcactccgcgtccgctgattaaaaccattatccatctgctgaagccgcagccgcgcgaagtggtgcaggatccggctgcaggtacggcgggcttcctgattgaagcggatcgctacgtgaagtcgcagactcacgatctggacgatctcgacggcgacacccaggatttccagatccaccgcgcgttcatcggccttgaactggtgcccggcacccgccgtctggcgctgatgaactgcctgctgcacgacattgaaggcaacctcgaccacggcggcgctatccgtctgggcaacacgctgggcagcgacggcgaaaacctgccgaaggcgcatattgtcgctaccaacccaccgtttggtagcgccgcgggcaccaacattacccgcaccttcgtacacccgaccagcaacaaacagctgtgctttatgcagcatattatcgacaccctgcaccccggtggtcgcgcggcggtggtggtgccggataacgtcttgtttgaaggcggtaagggcaccgatattcgtcgcgacctgatggacaaatgccatctgcacaccatcctgcgcctgccgaccggcatcttttacgcccagggcgtaaaaaccaacgtgctgttctttaccaaaggcacggtagctaatccgaatcaggataaaaactgcaccgacgacgtgtgggtgtatgacctgcgtaccaatatgccgagcttcggcaagcgcacgccgtttaccgagcagcatctgctgccgtttgaaaatgtctacggcgaagatccacacggcttaagcccgcgtaccgaaggcgagtggagctttaacgccgaagagacggaacttgccgacagcgaagagaacaagaacaccgaccagcaccttgccaccagccgctggcgcaagttcagccgtgagtggatccgcaccgccaaatccgattcgctggatatctcctggctgaaggataaagacagcatcgacgccgacagcctgccggagccggatgtgctggccgcagaagcgatgggtgagctggtgcaggcgctgggcgagctggatgcgctgatgcgcgagctgggggcgagcgatgaggcggatgcgcagcgtcagttgctggaagaagcgtttggtgaggtgaaggcatga

SEQ ID NO: 280263 - DNA, 1518 bp, Morganella morganii
atgaatggggggaaattgccggaggggtgggctaaaagcacaatcaatgaaatgtgcaacctgaatcccaaacttaaacttgatgatgacttagatgttggatttatgccgatggccggtgttccgacatcctatttaggtaaatgtaactttgaaaccaaaaagtggagtgaagtaaaaaaaggatttactcaatttcagaacgatgatgttatttttgccaaaatcacgccatgcttcgaaaatggaaaagctgttgtaatcaaagaatttcctaatggctatggtgctggtagcactgaatattatgttcttcggtcaattaatgggttaattaatccccattggttgtttgctttagttaaaactaaacattttttaactaatggtgcacttaatatgtccggttcagtcggccataaacgtgttactaaagaatttgttgaaaagtattgttttcctgtccctccgcttgccgaacaaaaaatcattgccgaaaaactcgatacgctgctggcgcaggtagacagcaccaaagcacgtcttgagcaaatcccacaaatcctgaaacgttttcgtcaggcggtgcttgaagaagctgtcagtggtagattaacggaaaactggagagatgcgagcattagtgaaaaatcagcggaagaacttctcgttaccataagtaaaacaagaaaaaaaaatcttaccagtggcgcagactctctagctacagagtctaagcgatatcttgcaaagattgacgcccatcattttaatattcctgatgttattcttccagttggatggaaatggactactttcttacaatcgatggaaaaagtggttgactgtcataacaaaacagcaccatatacagagaaaggtatttatcttatcaggacacctgatattcgtaacggtattatttcattaaaaaatactaaatatgtcaatgaagacacctataatttttggtcaaaacgatgccccccaagaagtggtgatataattttcacacgagaagctcctatgggagaggctggaattgtacctgagaatacacgtctctgcatgggacaaagaatgatgctacttcgccccatgcagagctatctcagcaataaatatgttttgctgaatattctatcaattagttttcaggcgagaatgttgtctcaggcaataggtactggagttaagcaccttcgggtagctgatgtcgaatcattaatgtatcctttaccaccactcccagaacaacacgaaatcgtccgccgcgtcgagcaactcttcgcctacgccgacaccattgaaaaacaggtcaacagcgccctgacccgcgtcaacaatctcacccagtctatcctggcaaaagccttccgcggcgagctgaccgcccagtggcgtgctgaaaaccctgatctcatcagcggtgaaaacagcgccgccgccctgctggaaaaaatcaaggccgaacgcgccgccagcggcggtaaaaaaacctcgcgtaaaaaagcgtaa

SEQ ID NO: 280264 - DNA, 6321 bp, Morganella morganii
atgactacacgctatttttcgtcacttattgaacaatcgttgtctcgttcaactgaagcaacactgagtatcatgggggtcacaaacccgcagttgcgtgagcacctcgcgcaacaaatgggcgccgattgtgggaaatcaggctcattccttgcttctcccgttttccaacaaatgtttggctggaaagcgtcaaacaaaacgatgcgtagcctgacggaaggcaaggcattgctcagtaaagctgtggttgattcgctggatgatcagaacaatggacgctatcgttttggtgctgactggaaaccctttactcaccagctagccagttggaaggctctgctggaaaaaaaacattctgtggtagtgaccagcggtacgggttcaggcaaaaccgaatgttttatggtgccggtgctggaagacctctaccgggaattacatgaaaatggcaacaacccacttatcggcgtcagggcccttttcctctatccacttaacgccttaattaattcgcaacgtgagcgcctggacgcttggacacgtggttttggttccggaatccgatactgcctctacaacggaaataccgaaaatctacacgccgcagtgaaaagcgaacaggtaaaaagaccgaatgaagtactctcgcgcgaaaaaatgcgtgaagaacccgctccaattctagtgaccaacggcacaatgctggaatatatgatggtccgccagatcgacgctccaattatccagcaatctaaatcacaaaaatcattacgctggatcgtattggatgaagcgcatacctatgtcggctcgcaggccgctgaactggcgctgcagttacgccgcgtgatgacggcctttggtgtgactccagatgatgttcgctttgtagcaacctctgcaaccattgccggaagcgatgccgaaaagcaattaaaaaaattcctctctgaattatccggtataccgcaagagcgcattgacgtactggacggaagccgggttattccggaactggaaccatgcaaacacgtttttattccgttagaagaaattgagcaaatccctgatacagacatgaagggcgtaagcccagagcgctttgatgcacttacgcattcacctgaagcgtattacttgcgcgacatgctagttactcaaccgaatccaatgaagttggatgatatgacgcagcggttgaactcgctaacaaaacagcattatagccagcaggatgtgttgcgctggattgacgtctgctctggcacacaacccaatactaaggatcccgcatttcttaaggtcagggcgcacatattccaacgcaatacccagggggtgtgggcctgtgttgataaagaatgcagattaaagcacggtaccccgctggaaaagggttggccttttggctatgtgtatgtgaacaaacgccaaaattgcgattgtggaagcccggtttacgagctggcattctgtaatgaatgtaatgagccacatcttctggcgcgggacaaaaagggaaaacttgtccaatgggaaaataaaggcggtgatgagttctctttgcaagatgatgtgcatattgaaaatgatgccgcagaagaaaaagttgataaagagagtcgttttcagcccccactcattatcgccgcagagaagaccagcgaggcgggttataccctacagcgtctggaccgtcagacacgtcgtattggtgttattaacaatgacagcatcccgctggttattaacgacattgaacaagtatgtagtgccagtagctgtggctacagaggcgcgagcggaaaacaaccgttccgccgagccttattaggtgggccattttacgtcaccaatattgtgccaaccgttctggaatattgtcaggattttattagtgaagaaggaaaagagggcgtcggacctgattcgttaccaggtcgaggccgtcgacttattacctttaccgacagccggcaaggaacggcccgaatggcggtgcgcatgcagcaagaagctgagcgcagccgcttacgcggtagtgtggtcgaaatcctgagctggcatcaacgaacacagacttctgcaacaccgaatgccaatgccgatctggaaaagttagcgacgagggcaaaacaggcccgccatgaggcgaaagaatatagaagctggggaatgccggaacaagcaaaactggctgaagcgcaagccgaacagcttgaacaggctattcaggccgcgaccggtggcaaagctgcgactattctggtttcgcggacctggattgaaatggttaatgaacttaaagagaaagccgatattcgcggtcctattctgcaatataaccactatctgaagcctgaaattttcaatgaaaatggcgggccgctgaagctttctgaaatgttgttattccgggagtttatgcgccggcccaaacgaactaacagcctggaaacgcagggattagttcaggttggttatcaggggctggagaagatccataagatgccggtgcattggcaagagaaagggctgacgctggatgactggaaggattttcttaaggttacgctggatctctacgtacgtgaaagcaacttcacacaactggacgatgagttgaaaaactggattggtagccgtttttcatcgaaattcgtccgtaacccggacacaaaagatcccgaagataatcagaacagacgctggccgcaaattcgtaatggcaatatatcccatcgtttagtgaagttattaatgcttggcgcaggattcaaaaccgtaaatacggcgacgatggatattatcaatacgtggctgaaagaagcgtggacccaacttactgggccacttgcagtgctgaaacctgatggtaaccgtttctatctgccaaaagagcacatgactttttctttaatcacagatgcctggatttgtccggtaaccaataagattctggatacggcctttaaaggcttaaccccttatctgcccacccacatttcgtttgaacaccttaccaagacacaatatgacgcttttgtcgcacaaaaggtcaccatgccggaaatctggaagctggatcgttcgcaagaagactacgctccgggtctggcgaaggtacgtgactgggttagtaaagaaccactgatcgcacaattacgttcggaaaacgtctggacggatatcaacgatcgtgtcgttgaaggtggcttctactaccgcactgcagagcactctgcccagcagtcttcagaacgtttgcaaagctacgaaaagatgttcaagaacgggcagcttaatgttcttaactgttctaccaccatggaaatgggggttgatatcggtggcattaccgccgtagtgatgaacaacgtaccgccccatccggctaactatttacagcgtgccgggcgagccgggcgtagtcaggaatcgcgtgcgatctcttacacactatgtaaagggaacccgcacgatcaacaggtttttgccaacccactctggccatttgagaccatgatccccgcgccaatggtggcaatgaattccgcccggctggtgcaacgccacgttaatgcgctattactgtccgactttttatgtcacgtcattggcgaaacggataaagaaaaaaccagtctcgatagcctctggtttttcggtgaagacgacgggcaatcaaagtgtgaacgctttaaagtctggctcgagcgtccggttcttgatatcgacgcggcgctggaacggctggtgaaaggcacagcattacatggtgccagacccgacctgttgcgagataaaacaatccatgcgattacgttcatgcagcagcgatggctttccgtctaccgcgatcttgtagcccaggagcgagagtcgcagccacaaacaccttatcgcaagcgcatagaactggagaaaaaacgacactgtggcgagtatttgctgcgtgacctggcggccaggactttcctgccgggatacggcttcccgacagatgtggtgacgtttgataacttcactatggaagactatatccgtgaaaaatcacagaaaaaccgggataaaaaagatcgcgaagataatgtgtcacgttataagggacttccctcgcgtaacctgggcgttgccatccgtgaatatgcaccaggtgcagagatcatactggatggccgggtcttccgctctgctggcgtctcactgcactggcacaatattaatgccgataccaatgaagcccagcgtctggattgcgcctggcgctgtcacaaatgcgggaccataggctatgaagaggggttgagcagttccgggacgctattttgcaccaacagcgcctgtggtgaaaaaatcatcatggataatcgtcgccaggtgctgcagccagccgggtttgtaactgatgcgcacgcgccggtgacgaacaatattgaaaccatgaaatttatcccggttgtccctgcctgggtatttgttaaagcagaacccgcatcgctacccaacccgataatggggtatatggcatctggcgctgatgggcatgttttccagcaaagccttggagaaggtgggcatggttacgcactttgcctgagctgcggtcgcgcagagtcgatgttgaacgcaaacgatgcgccgaaaagtatggaagcccactacccgccgcgtccgggaaaagcggatcgcgacagccagaatcaacgtctaatttgccccggttcgacggcgctcatgaagaacgtcacgctgggggcattggcgcgaacggatgtctttgaaatggttctacgcaagccgcaaaacggtgaatatctgccggatagcacggaagaaggccggattgttgccatgactctggcggttgccctacgtcaggcgctggccggggttttgggtatctccgcggcagaactgggctacgccgtgcgtccggtcagactggaagatggacaatcagtattagccgttcaactctacgatgtgattagcggtggtgcaggttttgcatccagtgcgccaatgcacattgaggccattctgttgggaatggtgaagcagttgggttgccaccactgcgatacggcatgcagtgaatgcctcctcgactcccagactcgccacgatcacgatttgctggatcgtaaagcagcacaggcatggcttggtgatgacttctcgtactacatcggtttgccggatgatgaaacattctcgctaccggatgcccgatattgcccgggagccattggcgatacccttcgtcgggcgattaacgagggtgctgaaaaactcacactgtggatgaatgggccactcaatgagtgggatctttatgcccgtcaattccgggcggctattcagaactaccggattaaagacaatgttgcggtcgaccttgtcattcctgctggcgtcgatgatccggagctgttgcatgagctttcgcagtttactgctttgggcgtgcgtttgtgtcatagcgaacaggctctggaattgccgattgttgcgcaagtcgcctttgccgatcgcgtaatgacgctggcttcacgcagccagcaggcaactatcccagggccaggctggcacctgaatgacgaactggtcgttcgcagcctcggctataacacggtaaaactgaacgagtttgttttgccggggaaagcagcgaacgcggttgagcgtgtcaaagacatagagattcataaacagttaaatggtccactttcgcagttcggacaacgcttctgggatttgctgtgtaacaaccatgaagaagcacagtcactgatgaaaaaccagcgaatcaccagcgttcactataccgatcgctatctgcaaaacccggttgcgctggcactgctgagggcgatactgaaaccgctaaaaacaaagctgaccgatgacgcggagcttgagcttgatactctgtttaagcccaaagatcgttcaggaaatcgcccctctcatgactggatgagcgaagcggattttcaggatttcgccgaccagtggtttactgcggcaatgggcagagcggtagaactgacggtgttcgattcgccacgtgatattccacatcatcgtaagctgacggtgacctttgaagatagtcagatgttgaagattcgcttcgaccagggaatgggatactggcgtatcgacttcccgtatgcatggcgtaactttgactttactgatgatgtgacttatcagctagtaaaactggcgcaagcctgccaggagggcaaagtccttaatagcgaggaaagctgggcaacggatgtgctggtagaggtgatgccgtcttaa

SEQ ID NO: 280265 - DNA, 3288 bp, Morganella morganii
ttgagtcaatcagaatgcatttcttgggtaaaatgtacttcctggctaagtaactttcttaatcgtagaggattgagacaacctgatagccgtcccctatatgaatatcatgcgaccaatgatgaatacaataatctaacacaactacttcgtgcagttggtcaagtacagagtaatatcgatgataaaggttacgctgcctgttttgtccttttttgctctgaatggtatcgcagagattatgagcgccattgtggttggatgtgggaccctatatatagagcattgggagtatcattaacgtcgactgaattaaggattattatccctaaagggatggaaggttactggaaccgcccaatccgattttacgaatcggaacgacgtaattttctcggaacattgttcagtgaggggggattaccattccgcttactgaaagaatcggatagccattttcagaatgtattctcccggattctcaatcaatatgggcaggcacaactggcaggattttccatactttctctagtaagaactgtcatagaaaaatcagccctgccaactgtttttagcgaagacacttctgtagaactcatcagccatatagcggaaaaactcagctcgctggttctaatgtacaacctgagcaatcataccgaacccgtgaagcagcttgataaagtgcatccaaaatggcgtgatgagttccctatgcctttggatgatgaaacaggtactcgctttcttaatgggttgctatgtactgcctccgtagaggctaaatcccacttacaaaaaaataagggttccggttgtcaattctattggtcggaaaaccatcccaatcaaatccaggcgataatttcgctgcctgatgaactcaccttcccaatcatcagcactccctcaacgacgcgatttgaacttgccatttatgaagatggtgaagaagtcacctgtctcggccccgcctatgcatccctggagaacgcccatgccaaagttcgcctgcgtaaaagtgagtcgagatttgtcagacgccagccagctgcgagcttaacgattgttgcacgaactggaggaatgattgttggcaccataaaacttgaagatagtgaaatcgccgttggcgaggtaccacttacttttgttgatgatgaggaacgctggttattgcaagggcaagcttcttgtactgtacgtaataacaatgttcttattgccttacctcaagaaaaaaccactatttcagggtgtgaaggctctccaggtacagcgtcgttattaggactcagaacactgtccgtaaaaggacgccaagatataaccatttccggagatgaaacatacaggatccgcaccgggagggaacaatctaatcagagcggatttgatttttatggaaaacatgttacctggaattgccatcctgatgaaacattccttggtgtacctaaagttacggcgaaaaacctgaatgctgaagatatacaattcaaacgttacctgagtggcatatcgttagatgaatgtcaggtacaagagatgatgggtacgcaatatgtttctgtcagaaatactcacaatgaaactctactgcgtcgaaaaattgggatcttgccggcagattttaacattgaaataaagggtggtgagctagccaatgaaggttccattgttatctcaacgcaacatccctgcatgtctgtcttaaaagataaaacactagaggttgctcgcaaacgctcagcaggacaaacagaaatattacttaaagcagaaggaatacctcctgcgtttgtctctttgcagatttacccaaatttgggtgcagccccagtagagatgactctacctttccctgcaaaaggttgcctggcccttgatgcaaatggatgcactctggataaaaatattactctgcatgatttgctgggttcgagagcctttttatttggtaaaaatggcgatccgacacgtttttcactggaattacatttacgttccaaaagtgggttacaggcatggcatgaatggtgttataccgcgggggaacaccccgtcgaactcaatttatacagcctgagagagcatattgaaaacttactgtctcttgagacaggaattgaccaggttgttgagatgcaaatcaaaggcgcaggtgctgtaatgagctggcagattcgccgctataaatacagtttacgctatgattatgaaagagaacttctcatcagccagtcaacccattatcgtaccgggcaaatgtcttcacctgacatcatgttattgagtgagccggagagaaaaatcaccccattatcatcaagaatgagcgaaggtgttccgacaggtgaatatgaactgagttcggttattaacaaaaatgggccgtggttagtcgtccccaaacagggtgaggaaatggcgtttcgcccctgcttcattcgtggggaaccgtcgttacctgtggatgaaagtagtattcgttcattgcagaaagcgacccagctttttaatccccagtctgaagttaataccattacactggtacttgaacagatggctaacgatcccgctcattccggctggcaatttatgcgttgcctgtacgaccaatttggttatctgccgctggcaacctttgaagtttggcgtgcgctagtacagcatccacgagcactggcgatgtcgctatttaaatttgagatgtcagctgagtatctgagccgcattgaaaatgagttccctattttatgggagttcttccccatcttcgaaatcaaaactgcagccgatcgatttaaattgttcctgagccaaaagggtgcaccggaagaaacccagaatttactggtgaagagcttgtatcagcgattggggctcgtttttccgacatatgccgacgaaattgagaaatggttaagttatggacaattccctccgcccattccagagttcttcattcgcgagtggtatcaggagcttttacgtgagcatagtgaagctcgctggccagagtacggcagcaagcggctgcatagctggatgacatcacaaaaaaatccagtgatcagcattaatcctgacgcagaataccgctattccgttgcctggttacccgtcttcgccgcagctgtagcaagcggcaatacctcttttgaagccgtatttgaccgtaaaccgggtgccgtatttttcctgagacaggtcagggacttcgattcccgctggtttaaggccatcttccagtgcagcctgttgcgttattttgctcaaaaataa

SEQ ID NO: 280266 - DNA, 225 bp, Morganella morganii
atggaagacagcatcatgacagaacaaatttctttgcttgatgaccaactggtggatatgcgcttcatcacgaagcttacagggcttacggacaagtggttttacaagcttataaaagatggccaattcccaaagccgatcaagttgggccgcagttcccgctggaagcaaagtgaagtcgaagactggctactgcaacgtattgcggactcacgaggcggttga

SEQ ID NO: 280267 - DNA, 579 bp, Morganella morganii
atgcacacaccttacccctttaaccccaaatatactatgaactggtttctactgtctctactcaatgaccacctgaatcagctactgaaccgatactcacgaatacaggcactcagactcgacctgttctatcagaaaggtacagagcgctataaacgtcattcatggaatgaaaccgagcgagaggtgcgcatgctggttgaacgcaccctgcagcacacaaatctggcaggatatttctggatactcgagaactctgtagaccacgggtgccatgcccatttcgtgttctatctcgacaggcaccttaatcaggctacctacccaatagctgaaagagtaggaacaatatggcgggaaataacgcaacgagaaggctattacaaccgctgcgaatacaaaccctcttatgaagtcagtattgataagccagtgaactacgatgataccgaagccatcgacaacctgcgctacatcgtcagctaccttgccaaagaagaacaaaagcacggtcactatcactacggagccagtgaggtatcgccgcccagcggactggggcgtcctcgcacggtgtaa

SEQ ID NO: 280268 - DNA, 918 bp, Morganella morganii
atgttgcattacgatatgatccgctacgagataatgtatctaaaaatgcttggtgcgctttccaacactgattactccttacagtggagtacttatgattcgccggatcagtttcgacgtttaatctctgagatccttgaacggcatttcctgggcgatcaggacaggatcaaagttggtcggaaaactcttaaagaatgggctgagctgctactgattgataaagattattttgattgtttcaaaggtacaccaagagcattgtggtttgctcaccattatatttttgaatacccagtattatctgcagggctgacgcttggtgggttggggaatgacctcggtttttcaggaagatttaattctcttttaatggataataatatcttcacaaatcttgatttcgctaatttgaatatcgagctggacggtattgatttggacctgataacaaatccacaggcaattgcttcgaaaaaaacgaaacgcgttttctcccgattttatctgaacgcgggagcaagtaccgatctgtacaaccctactccggtaactgagcgtgaactcatcaatggtgtgatgaggtacattgatgaagctccatgctcacttggagataagatcacttatttcaaaaaactgcatgagcgctggcttgagcaatatgatttttttctgacagattttgactggatatcacgtgaaaatgagactcagttagtatatctctgggactatctcaaaggaaaagaacgaatagcaggctatcttcgcccatataacacgtctatgcgttatgacatgattattgcggctatagatgtgtggaacgtccaacctgaagagaagctggagtttattgagaagatgaaacatgcctggcagtcatcaaaatcttatcggcgatccgctaaatag

SEQ ID NO: 280269 - DNA, 1347 bp, Morganella morganii
atgcaacatttccaagctcactctaccgatgacttgagtcatttaatcgctgaatatgggcaaaatgcactatttcgtggacaaaccacccattacggccaaccaagttacccctctgttgtcgcatcctccgatcgtaaaatatgtcatcctagtacaatgttaaaatggtgtacctactctcgaaatgtccttgagactttccttggtaggcataaaaacgagccacatttcgtccaagctcttctccagcattatggatggcggtcgttttacgttgattgttctgcaaatcccgcagtcagcacatggttcgcgagtcatatataccgcgaagataaacgtattgagatgagtgaagactgtgatgaagagcctgtcttacttctcaaacgcctcgcatcatatgattttgaggacggtgacggtcatctctacattatcgacaaagaagaggcctcaaaaatcggattagccgatctctcttctgtgacgcttcctggctgtcgccctcgtacagtcgctcaggaagcttggttactaggaccattattaggaaaccccgtccccaaaaaatgttttcgtgctcagattacagccccgcgttcagtcttacgggactatgcattttcctctggttttacttgcatagatgatgtattcccatccatcgtagaagatccaatcctcaatgctttactgagtttaccttggagggaagtcaaagaagtatgggatcctcatttccctattccttggttcagacgaaccctgagcctccctgaatatcaggatagttttgtaaaaattgcatggcctcgtaccgcatttttccggggaacacgtctgtctgaacggtttaattcggtcgatggaaatgcttctggcggaattattattccagttccggacgtcgttttttttggtactgcacctgaaaccatccctcttcgttttcctgaacttgaagccttattgcttaagtttggttctgtcattcttgaactggatggacttatccagcacaccagtatgcaaaacctcacttcctaccaaaaaggtgtcggtgtcgtaatgattgaagccgaccttattcaggtatcagaactgatggttgaacatcccggacaagaaatgacagctgcgggattactctatggctggtattaccaaaaaagtgaaagcggattatggtcaagagtaacgcattctgatgaatgtccctgtgatgatacctttacacacaatcggcatttatcagcactgaaaattgctgaggattttctccgtagctcgccatttgtggaggaagctgatgcaccttcaaaccaaagagagtatgaatga

SEQ ID NO: 280270 - DNA, 159 bp, Morganella morganii
atgagcctgtcagaactttatgagatagcggaaaccgttacttttgggcctgaagagaaccgggcgcttgaagaaaggttgcgtgaaattgagcatgaagccaatgcccgcagtaaaatcatgacggaagaattcttgtctcgctcatacagtctttaa

SEQ ID NO: 280271 - DNA, 2079 bp, Morganella morganii
atgactccattcctgatttgtaagtttgaaaagcaaacactcaccaatcttgtaaaagaatcgtttggttctgaattccctgaaatctacaataaaaaacaaatcgactatatttggcgctacctgctggatttaaattgccagaccgtgctgctggaatccgaatatatagatcatgattatctcgaagactatacacgatattatgtcagaggatttaataatgcaggttacaaatgtgctagattacatttttttagttctgaatttgaccatgaaaatatcgatctgatgttgcaatctggcaagacagaaatgcatgaatcgcttaggatgcattatcttgggtttgtcatcattaagcccctgcctaaaacctttattggcagaacctgcctgaaaatctatggctcgctgcaaaaaagtgaagaaaaaaacctgctgacacgccagtatgaagccaacctctttggcatcaaattactggtgaatagcatcgcttttcaggagcaggataaagttgttgctgcctgctcatccacctcggtttggtctgctctgcatgccgttccctggaagaaaacccgggatattccttcacgtagtgaaatcacctcaaatgcgataaaccacatcgacggttccagcaatagttttcccaataaagaactgaccaataaacagatcctcagagccatcgattcggaaaaactccgccaccttttttcggacctacacaattacagctgggatgcgttgttgaaggtgataaaaattcacatcgacagtgagctgccgttaatcttgggggctcaggtctacagtattaacgaaaataccctagtgcatcaaggaggtcacgctgtcactgtgctcgggtataaagaccagcgagataaacccgctctgtacgttcatgatgaccggcttggtcctttcgtgcgcgcaagctttgtaacgctcaacatgttcacttgcctggacgatatttcagctgattggggtgttgtaatacaggaaaaagatgatagaaagggctggaaaacggcgcatgaagtgctaatccccaacagcctaatttcgctgaaacaccccaaggtgagaattccctacacctatccgctgaacacctgtgaactcatcaaaagcatatttcagcagtttgttgaggccgctaaaaaatatccagaggatgagcttgaaacggagttagcctacacgattacattgaaagaactgtctagcataaaagagtcttacagcacttttgatttcagtggtgagggcaggaatccatcaggaattatttccgacctgcaaaaagatcgcgctgattttctaagtaaaaataatgccagattccaatgggtgtgttcattttcgtatacggataagacgcctatttttgatctgctttttgatgcgacggatattcctcagggcagtgccgttacggctattctggagaaaaataaacaggcatcagagcttttttaccgcatcattaatgccgcattacctgaagttgtggtcaactttctcaacaatgagcatttttacagtccattgaaaaacttgatcagcgttaaaaaatccggcattagtaggcaaaatgcaaaaaacatcagcattgaagtatggcttgatcatacctatggaaaattacgtgctcctaaataccttaaggcagaagaatttaatgcggatggtatcacggacaatccttccgtcagaaaattctatgacgtggccgacattacattatcggagttcatgggtattgctccatcaaatagagacggctatccacagctcctctgggctatcgctcatgacggcgcgttgttaatgggcattgagtctgataatcagggacacccctgtctgaccgggttcaaacctgcccgtattgctggggaactgttcttacgcgatggcgaatactatatcaactcaaaatctggccgttacagccggggttataacaacaccgcagtcttgctaagcaacgccgtcaaaaaattcaggtctacattcagtgaagaaaaaattcaaatgactcctgtacttcttaattag

SEQ ID NO: 280272 - DNA, 876 bp, Morganella morganii
atgaataaacctgacggccttcaggcctttgaacaaccgctcgcgtcgcttccgcgcacgcttcgccagcttattcttgaacgtatccagaacctgactcactacgagccggtgattggcatcatgggcaaaagtggtgctggtaaatcctctctctgcaacgaacttttccggggcgaggtgtccccggtgagtgacgtgaacgcctgtactcgcgacgtactgcgcttccggctgcgcagcggtcgtcacagcctggtgattgtcgatttaccgggcgtgggcgaaaacgggcgatgggatcatgagtaccgggccctgtatcatcgaatgctgccggagctggatctggtgctgtggatcattaaggccgatgatcgggctctaatcgtggacgagcagttctggcacggtgtgatgcaaccttacaggcaaaaggtactgtttgtgattaaccaggccgacaaaatcgaaccctgtcatgaatgggataccctcaccagcaagccttcaccgcaccaactggaaaatcttaaagcgaagcaggcagcgattatggcgatgtttaaaccgcatcaaccggtctgtgtggtgtccgcccgcactggatggggcattgaggagatggtggcagccatgatgcgctgtctgcctgaccgcgccaccagcccggtggtgacacagctgcaagggagactctgcacagagccggtaaagtcgcaggcccgtgacagtttcggtgaggctgtgagccgggttttcgatacggctgagtcatcgtcgttcctgcctgcaccactaaaaacggtgattcataccgtgcgtaatgcggtggtgtcggtcgcacgggccgtctgggactggatattcttctaa

SEQ ID NO: 280273 - DNA, 717 bp, Morganella morganii
atgacgcttcaggagcggcgacatgaccggcttgccgtcaggttgtcgttgattatcagccgcctggtgtccggtgaaactctgtttattcgcaaactggcaactgaattcggggtgtcagagcgcacgttacgtcgtgactttcgggaacgtctgatgtatctcgacctggattactaccaggggcagtgcagtctgcgctcagatattcacagtacgcggcaggaaatagatattctgacctttgctgaccgcacggggttggccggggttttcccgggctttgaccgacgactggtcagcagcctgctggactgtgatgatcgaccctgtctggtatggcatcaggacagacctcatcccccggcaggaaagctttgcttctacaggctggtcagagctatttcgggatgtcagcgcgtcacaattctgactgaaggagagcgtcatgaggccgttgcaccttaccggctaatcgctctggacggttactggtatctggtcgctgaacataacaggcaattatgtgtcttccggctggatgagattcatctggtaaggccatcccgggaaacatttattcgcagtgagtttctccatcaactgtcggaggacaaacattttatctcagccttacctcatttccgttttattcaacagtcgctgaattcattttctccatcagaaagccgggggcaatccggacaaactgattaa

SEQ ID NO: 280274 - DNA, 453 bp, Morganella morganii
atgaaaaaaatgaaattattgtttttactgctaatcatgttgttccccttacttatcgcaggtaatgctcacgcagcacgtccttatagcgggttcctgcctgcggcagtgaataataagagtgggaatatcttctggtgcgatgctcaccgacaggtcagaaaactgtgtacagcgacggaagtggattcaatgggatggtttattgttgttcgctcgaaaccttccagagattgtccgggtggcatatgggggtggatcactcccagtaaagacgatgtggcaatagggtataccattacgccaggtaaagaattcaatctgaccataaaggatatgtgcagtccggatatgaaagtaacgttccgcccgaataaaaaggaccctcgttatgacgatctcgtcgggatttatgccgggaaagaagcgtttcgctacaaacaaataaaataa

SEQ ID NO: 280275 - DNA, 474 bp, Morganella morganii
atgcgactgccttacgtaatagttacattagctatgctggcttctgtatcaacagcacaggctattcccaatatgtggacgagtggttttgggatgggcgtgaccgaatatatcattaccagcccggataaggtggtgtttaatctgaactgtactggcaatccggatgcgcagaatattctgcaacacggtgttgatctcaccctgcctgatggaacatcagtaagttctcatgacgacgggacggaaataacggtcgtcatggataacagtcagtatccgttaccgtcatccctgggctggcgaaacggtgacaatgcctgggggtcatttattgacgccctgagccaggctgcgaattttgatgtttacgtcaacgataaaaaagtcggcaccttcagtccggggctgaagaatacgcagaaagagctgtctgacctcagtgaatgccggaccacacattacagcgattag

SEQ ID NO: 280276 - DNA, 732 bp, Morganella morganii
gtgttcgggagcgacaagcatgaatcacgctcagaccgttacacctacatcccgaccatcaccatccttgaaagcctgcagcgtgagggctttgagccgttctttgcctgccagacaaaggttcgcgaccagagcaagcgggagcacaccaaacacatgcttcgcctgcgtcgtgccggtcaactgacagggcatcaggtgccggaaatcattcttctcaacagccatgacggctcatcaagctaccagatgctgccggggctatttcgtggcgtttgtactaacggcctggtctgcggtcagtcattcggcgaagtgcgggtaccgcataaaggtaatgttgtcgagaaggtgattgaaggggcttacgaagtgcttggggtctttgaccgggtggatgagaagcgcgatgcgatgcagtcactggcgttgccagcccctgcccgtcatgcactggcgaatgccgcactgaagtatcgatttggggaagaccaccagccggtcacggtatcgcagttgctgactccgcgtcgtcgggaggactacagcgatgacctgtggactgtctaccagcgcgtgcaggagaacctgatgaaaggtggtctgtcagggcgaaccgcgcagggaaaaagtaatcgcacccgtgctgttaccggtattgatggcgatgtgaagctcaatcgcgccctgtgggttatggcagaaaacatgctcgaatttttcgggcgttaa

SEQ ID NO: 280277 - DNA, 441 bp, Morganella morganii
atggatacacaaaaccttcagttcgctgagcagacagcaatcacggcctcagtggtccctgacgagctacgcatcggcttctggccgcagcactttggctccataccacaatggataacccttgagccccaaatcttcggctggatggatcgcctgtgcgctgattacagcggcggcgtctggagcttttacacactcagcaatagcggcgcatttatggctccggagcctgacggtgagaaatggacgttgttcaacccgatgaatggcaacgatgcggagatgagcggagaggctgccggtatagcagtctgcctgatggcttacagccaccacgcctgccgcaccgagtgtgacgctatgactgaacactattatctcttacgcgactacgcgctaatccatccggaatgcagcgccattatgcatctaatcgactga

SEQ ID NO: 280278 - DNA, 222 bp, Morganella morganii
atgaaaatcatcagtaaacgtaaggcaatggccctgtaccggcgacatcctggctcccgactgtttcgcttccgtacgggcaaatataaatggtcaggcagtatctgccattatgctggccgcgaggtggaagatgtacgcggcgttctggccgtatttgctgaatgtcgtcaagacctccatggtccctatgtcactcttcgaagcgtcactctcaattaa

SEQ ID NO: 280279 - DNA, 357 bp, Morganella morganii
atgagtaatcgctccgaatccggtaccaagccggagaatcctgcctgcccgcagtgggggctagtacgcacgatcactccctgttttggcgctcgtctggtgcaggaaggctgccgggtacattttctcgctgaccgggccggattcaacggtgctttcagcgacgatgacgtgttgcacctcgaacagatatttccgttagtaatcaaacaactggagctgatgctcgccagcggcgagctcaatccccgctatcagcactgggtcacgtgttaccacaacggactcacctacgaagccgatacgcttggtagttgtggctacgtatacatcgctgtctatcccactcaacgttaa

SEQ ID NO: 280280 - DNA, 1818 bp, Morganella morganii
atgatcgatgaacttcaagccagcaaatcttgctatttctatcgccaaaaagcttcaatcacgacagctgcgatcacggcattgttccgagctattagaaaggcgcaaacttccccttccaacaatcttttctcttttattcggcagccccacgaggcgtcaatttggtctgctttatgctttcagtttgacaaggcaccggcttttctgcctggcactcaaagtgtgatcgaccgggtaaccggatattttctgatcgtcgagcatcgcgattatattgccattttcaaatcccagatcgatatccctgcttatttctccaagcgtcacttgcagcgtataagcgcccaagatatcgaccggggactgacaagtaaggactcggtatttgcccgtgtccgactgaggcatatgaatctatcccgctttgcattacgcagcaagacgctcgaaggcgaaaacctccagaacaatgtaggtatggcgtcctcggctcgatttgccccgctgggttacagctttactgaagaggacgaacatttttcaacgacgccgcgaaccgggcggatatcgcttcgcgcggatcgctcgggctatttggatttagttgattatgcctgccaaatcattgatcgcttacatcctcgtcctggaagaccatcctcttcccctttcctagcagcttttgcgcggccgatggagctatcagatctgacggctagccctacccaatttgctgttgataccgccattctcagacaggccatctttgatgacaaaatcatccgcttggtcaaacctgacggagggggctttcgtgagctgccaaaggctgaagtcgatttgatactcacggagctaacagatatcttgtacgtcgctaaaaacgatactggcaaacacatggtttcccagcagggaacaggtgtagaagtaggtgagatcgcgatcaataaaacgcgtatagctttgaaacgccttacactgcctttgctcgtcgatgtatacgtagaggatactcaatttgcacttggtgcagacgataactgcaccccgcttaagcagtttatcgacaaacaggacacgtttatcgtcttatttgaccagccgaaatttgcctatctagatggcagcctttaccaagacgactcattggtcaacggtggcacacagttcttgggctatcttttcggtaatgcagagttagcaactgtcacagatgaaaaaggtacctttactgcagctcatcgtacgttcgatccagactctacatttggtgctgtactgtcgacgatcgcccacgaagacgatgtcatagtctgcgatgatcttggtgatgaatgggcggatttcgttgggtttaaaacggatcctgcttcaccaagagtcaccttctatcatgcaaagcacggtgagctgactcttggtgctggagcatttcatgtatcagtaagccaggctatcaagaacctaggcaacctcacattgcccgccccagccatgggtaaaaaatttgcacgttgggggcgattttacaccaacaacaaggtaaggactggcattcatcggacatgccgtggcacagctgctgagtcaaaggctgctgtggagttttgcaggaatgcgcctcacacctccaaacgggtggccatcgtgacttcatcactgagcaaggccgcagttgagcaaatattcaaggacattgaagcgggccatactgccaatccatatttcgtccagctatattggttgctatcatcctttttcgctgcctgtactgaagtaggagcattcgggtgcgtaatatgccaggaataa

SEQ ID NO: 280281 - DNA, 876 bp, Morganella morganii
atgaattatgaacaacgtattgtagcatttattgacattctgggttttaagtcattacttaatgatacccttgataaaaatggaaatgataaagaagaaaaaattgatgcggtaatatcggcatataatgcaattagagaaatatgggacttagattctgtgcctcaatacttagatgttaagattgctgaaacaaaaaaaatatcaatattttcggactgtttagttgtttcttttgccatcgaacagccaggaggggtcttttctactctacttgaaattaagatgttgattatgagactaatatctaggaaaattctatgtagaggagcggtttcaataggaaaatttattcatacagatgattatttatttggtcctgcattagtagaggcttacacgctagagtcaaaagcggcaatgtatccaagggttatactagatcattcagttatcgaagccggggctcagaataggaatcaagatcatgactttactgaagagaaagaatacgtgcagtctttgcttgaacaagattctgatgggatgttttatatagattatttcttcaaagctcaaaatgaactagatgaccctgagtatgattttcctgattacattgaaaatctagcagatgttattagaaaaggtttaatgggatctagtcatcatagcaaagcagatataagagttaaatattcttggatgagagagcgatttaacaaaatgatagatatagtaaccagtaaagaaaatctcataagattaaataattccggtgagcaggaactcgctgatttttacagtaatcttaagaagatcagccctaataaatacactaatttatttaattcaaaaaattcaaaacatcagtga

SEQ ID NO: 280282 - DNA, 543 bp, Morganella morganii
atggtgtatgtaaaaacatgtccgcaatcaaaatacgaacgccataataatttcaaatttatgtattgttctaattacgactcacatttatatatttcaatcatttatcttataaataaaaaaataaatttattgagtaatcttttattgaaaataaatccattccataataagaaaagtctatcaaaactgcatggggatttatttgatataatctgtgagtttaaagttattgacagttggatcaaaacattaatgaagaatggcacgcatcgcatatcaacaggatatcaaaaatttttaaataattcattaaatcacatgcgtgatagagttgatagcttacatgaaacaacaaattctatatactcgttatcagagaatagagttcaaataagcaatattaaatataatcaactgtattcagtggttgtacttattttggtaattactcaaataatattggcggcaatgactattaaatggtcagataaagatgcatggtatgcatctttattaaattggattacagatataatataa

SEQ ID NO: 280283 - DNA, 1599 bp, Morganella morganii
ttgaagtcaaaaataggtgcaattaataatttaaatgttcaggctaaagagaaaatttattcacgtgaaagtacattggtagcgggtaagtcattatcattaacagcagatagtattgaacttgaaaataccaatataaagtccggtgagctgtctcttattgcaaagaaaggcgatgtaatatactcaacaggaatcaggcctgtatttacatctgacatttctgcgctgcctctgttacatgcacctggtggcatctatgcagatgcaggaggtgatattacattcaaaaatatagcattcacattaaatagtcatgtggatttatcttcccgaaaaaatatactgattgattttgatccgaaaacgatatcaggaatatccacaaaaaaggcagattatgaaataaaatcactgtcagataaatttcaggaatggacactttcagattatatcaccctgaatgccggaagtgatattgctattaatggtacagatattagcagcaaaaatgatataggtttttattccggcggaaatatagatattacctttgataaaaaatgggaaggccgtagtgatatctatgcaagatatttaaggcccaaaatacgcattcattcagaaagaaactttattattaactctgccggagatgtaaatctattgaatgcaggcctgcatgctgatgagtctttattattgttttctggcggggagtttagcctggcagggattccttattcagcaataaggtattcttatgatgattacattgataatcgctatgtaagttcttatcttacagcaaagaaaaatattacattagtggcggaaggtgatgttaatctgcatgcagcaatactctcctctgatgatgatatatatattcatagcagtggaaatattcagttgggatctgaaaaaatacactatcgtcagaaaagacgtgattatctggaagatacatatcgccatgtcagtacactggtaaaaagcaagaataaattaacactattgtctgaaggcagtgttttatttcagggtgctgagcttatttctgatggtgtaatggatatctcggcaaagggcgggtatttatatgcacaggcaatggaagaaacgagtcattatgaagataagaaaaagaaatgtaatcgttggacattctgtataacaaaaaaagaagttacaaaggtaaagcatgaagtaaaaaataaaacgacagaatttacatcgaaagaagatattaatttaatcgccctggatgatatcacacttgaagctgcaaaaatttcagcagctaaaaatgccaggctgaaaagtatctcagggaaaattaattttaaagctgttaacgactcactttatgagcaaaccgtcagccattcaaagggtttttacattacccgccgggatcaggggcactcgctgagccgctggcggttgccgcagatttattacggcggaaatttatctgttgatgcagcaaaaggcataaccgcagacagtaaaactttcagcattcctgaatttaaagaatccgcaatgatgctgagcactgatgaatcccctaatgattttggtaaaaatcattaa

SEQ ID NO: 280284 - DNA, 2967 bp, Morganella morganii
gtggtgtgggaataccgtcccggcacccaggcacaaacctatattcaggggatgccggcggcggagaatgaaatcaccgttggtaccactgtgcagagcagcacgccatgggcacatgcgtttactaacccgcagttgtctgcggtccgcgtccgcctgaaatggccgtccctgttccgccaggaggataacggggacatggtcgggaatgaggtgaaatacgccgttgatttgcagactgacggcggcagctggaaaaccgttgttgatggccgcgcaaaaggcaagaccacctcgggttatgagcgcacccatcgtattgatctgccgcagtcggccacatcctggacactgcgggtacggaaaatcactgaagatgccaacagcgccaaaataggcgataccatggtgttacagagctacaccgaggtgattgatgccaaactgaggtatccgcataccgcgctgctgtatattgaatttgattcaaagcagtttaacggctcgatcccgcaggtcacctgtgagccgaagatgcgggttatccgtgtgccgtcgaactatgatccggaacaacggacgtattccggtacctgggacggttcatttaagtgggcgtggaccaataacccggcatggatattttacgatatcgtgatttccgatcgcttcggcctcggcgaccgcatcaaaatgcagaatatcgataagtgggagctgtaccgggttgcgcagtattgtgatcagccggtgccggatggtaagggcggcagtggtaccgaaccgcgttatgtctgtgacgtgtatgtgcaggatcgcaatgaagcctatacagtgctgcgtgattttgctgccattttccggggtatgacctactggagcggcaaccagattatcaccctggcggatatgccgcgtgacattgattacagctacacgaaagccaacgtactcgacgggaagttcacctattccggcagcagcagtaaggcccgttattcctccgcgctggtgtcgtactcagatccgctgaatggctatgccgatgcgatggagccggtgtttgaaaatgagctggtttaccggttcggttttaatcagctggaaatgaccgctatcggctgtacccgtcagtcagaggccaaccgcaaaggccgctggggcattctgaccaacaacaaagatcgcgtggtgacattcggcgtggggctggacggcaatattccgcagccgggctacatcatcgcggtggcggatgaaaacctgtccgggaaagtgaccggcggccgtgtcagtgcggtgaatggccggagtatcacactcgaccgcaaaccggatgcggcgccgggtgaccggctgatgctgaatctgccttccggcaaatcacaggcccgcaccattcagatgatcacggataacgtgctcaccgttaccacggaatacagtgaaacgccggaaccggaatgtgtctgggtgacggaatcagacgagttgtacgcccagcagtaccgggtggtgagcgtgactgagaatgatgacggcacgttcacgatatcggcggccatgcatgatccggacaaatacgaccggatagataccggcgcggtactcgatgaacggccaatcagtgttattccgcccggcaaccagttcccgccgaagggtatcactatcagttcttactctgttgtgaatcaggggatcagcattgaaaccatgcaggtaacctggtcaccggcagagaatgccattgcctatgaggcgcagtggcggcgtgatgacggcaactggatcaatgtaccgcgcaatgccacgacttcatttgacgtgcccggggtctattcaggacgctatttggtgcgggtcagggcaatcaacgcagccgaaatctccagcggctggggatattcagaggagacccggctgaccgggaaagtgggtgatccgccgatgccgctgaacttccgagcgtccacgctggtattcgggatcaaactgaactgggagttcgggaaattcacggaagataccctgaaaactgaaattcagtacagcaaaaccaacgatggtcagaatctgttgctgctggctgatgtgccgtacccgtcccgctctcacgaactggccggtctggccgccggtgccgcgttttatttccgtgcccggctggtggataaaaccggcaatcagtcaccctggactgagtttgtgcgcggcgtggccgagttcgatgcatcaaccattattgatgaagtggccgccgggttgggcgactctcaaatcatcaaagacctgcagtctcaggctgatgacaacttcgaagccatcatcaacaacgccaataacgcctacggccagtggggatactggcagcgtgaaaccggcacgatgaaagcagaaattatcgaagtccgcaactacacggtcacggaaacgactgcacttgcggagaaactggacgcagttaaggtgaccgcagacgacagtttcgccatggctcagaactctatccgcgcacagtgggatatggcatcaggtcaggcatcggtggtccacgatatgaaagtccggatccattacaacggtgaggactattccgccggtatggttatcggggccgagctgaaaggcggggaggtgaacacgcttatcggctttaacgcgcagaaatttgcattttataacccgtccagtaaatccatggatctgtttatgtacatggaggacgggcagatctttatgcgcgaggcatttattaaccaagcctggcttaatgaagttgtcgttactgacaaaatgcagtcggagaactatgtgccgggtaaacagggttttattctggatgccaaaatgaataaattcgaaatgaattcgaatgatggaagtggtggattaacttttgatggttcaggtctttatttacgggacgaacatggaaatcttaaaatagaaatagcactgaaatag

SEQ ID NO: 280285 - DNA, 324 bp, Morganella morganii
atggcgaagaaacctgtttttaatgtatatcacgataccggtgagatagataatattatagattcactggcatttgttattcactctgaaagggtggatttttccaaaacaagcatgtcgtttgacagtcgctacctgaagggcggtgaaaagataatagccgttccgatagtgactcaccgttcggaaatgaacggaaattatcccacggtaacaaatgtaaaagtaaacggtaatacagtaacgtggacatacgagcatgacagcggcatggctagtgccacggtgccgataattcacgtatttaaactgatggggaggtga

SEQ ID NO: 280286 - DNA, 1317 bp, Morganella morganii
atgatttacacagacggcaccatagccattaaagctggttcaccgattgtgaccggcaccggtacacagtggaaaaagaacattcacggcgtggcacccggtcagcttatcagtattgagaacggcatagcaccggtcagtatgatgatccgcgcggtaaacagtgataccgaactgatgttgtcattcaatgcccaggtaacgctcagcggcgcgaaatactctatcgccaccacggtaccggataccatttcagatgcggcccgaaccatgtcagcgaatcagggctatatcgtttactttctccaggcaatgcagcagtggatgacagacaccggacaggtggagattgagctgccgaacggccagaaggtgacgctggatagcatcaaggcactgaatgatgctttaagcaatctgtctcagggattatccatcaatgataatggatatactgagatttacccatcagacaaaaataaagcagggctttggcaaagaataaatacatctgtgtttgaggtgctcagtggtagtaccggaaaattttccgttgcgaatgactccgtaaagataggtggaacaatcgatgttaaaaccaatacccccggcaatgatcagtcaagggttgaaataacatcaccagatggcagatttagtatcggtatgtgggggtataacgatggacgtacattagtttcgtgccgaaatacatcagggtggtctaacgtcagttttgcaaatgtcggaagtggcagcgccgcagtaatcggcgggaatatttatgtggatggcagtggttacctgaaaaaatcctccccggtaattcttgtgtatccgggcggtacgtttgataccaacgacgaatccgaaggcgccgaagtcagccgtaccggcaccggccaatatcatattactggtatactcggttataactcagatggtgcatggggtgtaaacggtggtatctcggtaccgaaagacaataacggccttgagctggtttatgtcgatgaccgcgtacaggaagacggcagtattatcatcgaaacctgtcaccggcaacatgcgcatttgccggaacgtttccagaactggcgactgaaagaggtcaccccggaaggtgagcgtgttttctggcaggacggcgaaccgtgtgacctgccggaatcaacccgtctcgatgtgcgcgtggaaatgccgcagggctcagtgtggaatgtgaaacagcgtgaactggctgaacagatggagcgtgaacaggcagaacgtgaagcgcaggaagcaacagagcaggacgtagactcagagcaataa

SEQ ID NO: 280287 - DNA, 282 bp, Morganella morganii
atgacaaatacaaaaaatatcgttgacatcaacattggtcgtaaaattaaagacgcgcgaatatctgccggaatttccgggaatgaccttgccataaagattggtgtctcacagcaacaggtatcgcgctatgaatccggacacacgccaatgaccataaacacggttataatgatcgctcatttgcttcatgtttctgtaaatgagttactgagtgattaccttgcctcagagtacagtgacatcatgcttttaatgagcaatcgaaatacagaaaaatag

SEQ ID NO: 280288 - DNA, 600 bp, Morganella morganii
atgaaaaagtatgacttaattctcgcagatccaccatggcaatataacaacaaatcttccaacggcgcagcagataaccactacaacaccatcgatttttattccctcacccgcttacccatcgaaaaaatagcctctgacaactccgtgctctgcatgtggtacacgggtaactttatccgtgaggcttacgaactggctgaagcgtggggatttaaagtgcgtaccggcttcgggttcgtgtgggtgaagctgaacaaaaacgctggaggccgtattgatgctaaacctccggaagatatgttcgacttcatggacacgctgaacgcagagacgcgcatcaacggcggcaactatacccgcgctaatgcagaggtatgcctgattgctaccagaggacgtggacttgagcgccagtcggccagcgtccggcagatagtgtattcctgcctcggcaagcacagcgagaaaccgaaggaggttcatcaccgactggaagagttatatggggatgtcccgcgcattgaactgtttgccagggaggaatacggcgaatgggatgtgtacggggatcaggtggacggaagcgttaagttataa

SEQ ID NO: 280289 - DNA, 192 bp, Morganella morganii
atgtattttgttctcatcaaacaagcctatttcactatctattactacggcgtaagatttgttgtgtatgcgagaatatggcaattaaagttcctgctgtgtttaattccgccgttattatgtgaggtgctcgatgttaacgatgtccctcgcgtaagagtgatttttttaactaatgaagtggctaaataa

SEQ ID NO: 280290 - DNA, 1647 bp, Morganella morganii
atgtctgcatatagatggttaattaataccattgaccgcgtcgccatggtggaagaagtcatcaatgaattttcggcctccgaaatcagcattaattccatggaagtctttccgtgcaaaatttatgtcaaattcaatacggagtgcgagcgggatgttaagctgctgctgagcaaactcctgcttaatcctgatgttatcagtgtcacccgttccaaattacagccctacgagcgtaaagaaaaagaattacaggcgattctggaatccaccacggacggcattatcggtatcaataatcagggtaatatcaactacttcaacaaagtggcggaagactttttctcgatctcacgggaaaatattgtcggcgtcaatatcagcaaaattctcagcggcaaaaaccagtcggtgctcaccaaactgctcggcggcaacagtttcgatcactatcagatggtcaccagtacgccgaaaggggagttgtactatatctgctccggccgtccgattctgagtgaagagtctcaggtgatgggggcggttatcaccttcaagagtctgcgctcagtgcagcaaatggcgtcttcggtgaataaaagcctgccgttcagctttgatgacattatctgtgaaagcgaaatcatgatgaacctgattgatttcgctaaaaaaatctcaataagcccgtatacggtactgatccgcggtgaaaccggtaccggtaaagagctgtttgcccgcgccattcataacgccagcgaccgcagcgctcacccgtttgcgccgattaactgtgcggcactgccggaaaacctgattgaaagtgagctgttcggttatgagggcggcgcgttcagcggcgccagcaagggcggaaagatggggttgtttgaatccgccaaccacggcaccgtgtttctggatgaattcggcgagctttcccttatcctgcaaagtaaattactgcgggtattacaggaaggcgtgatccgccgcgtcggcgggcacaaagagatcccggtggatgtgcggatcattgtcgccaccaaccggaatctggaagagatgatcgagaacaaatcgttccgtgaagatctctattaccggatcaacgtgatcccgattaatatcccgccgctgaaagagcggaagacggatatcccgctgttactgcagcgctttatcagcaaatacacgacagagctgaataaacagctcagtctgtcccaggatgcatatcaccagttaatggcctattcctggccgggtaacgtgcgggaactgcaaaacgtgattttgcgggccatccatctggcttccggccgggaaattaccgtcggggatctgtggctgccccatgaggaagtgatggcctctccggtgctcaggccgcagccggtaccgaaaacggaaataccccctgcggtattgccggtgcaggaagatatcaacctgaaagagtctcttgcgcggcaggaaaaaagcctgctggaagattatctgcgccgctacggttcggcccgcaaagtgtcccgtgaaatcgggatgtctcacaccaccgtactgaataaagcccgttactataatctggagcatctgctgacctacagcactgtgcgccggtcagcagacaaaacagattaa

SEQ ID NO: 280291 - DNA, 369 bp, Morganella morganii
atgatagagggcataaaaatatcactgacactaacgcaccgggtggaagagcaaggtgtgatattgggattcattaaaccggccgagccgactcagaatgcttttatcgggcgttttaaccggacataccggactaaaactctgagtttttatctgttccgggcactgaatgaagtacaggagatcacggaacgctggctgagggaatataaccaagagcgcccacatgaaactctgaataatttgacaccggaggaataccggttattaactaaaaataacgcccccagaaggagtgtggaactgaaacaggtgtgcttacaatctgccacaagcatttctgttaatgtttacccgcgaacattatga

SEQ ID NO: 280292 - DNA, 1668 bp, Morganella morganii
atggagccaattacttgttttttccatgatttatgctttgttcctcccaatcttacaacctctggtatgaaaatatttggtttctcagagtttttagcctctcttgcattactagtggttgtttttacagtaaccgatatacgatataaatttagaatttctatagctccaatccctatttataaaatcacatttgttgttattactttagttgggttaataagtttaataaccgatatttggagttctgctaaatggtgggtgcttgacactagtttcgaaataaaaatcatgattcaagcaactctcggactttcatttttaatatgcttcatgttatggatttattatgcgtttttagctccacctatttttgggaaaaggaatagcaagaaatattttgacgcactttataaatatattgttaaaggcattgaacctgaactggcaattgtatgtgatgagctatctcgctctgcagattcattagtaaaatttgctggtgatgataaaaaaagagtaactagaacagcaaataatattttatatcttatagggaacagaaatttctgtagagtacttattgccacttcaccgcagacagcagcatacttattcttcgccacaacaagatacaataaataccgtatacctcttcaccagttctcagcaaatatttcacaagaagcaattaacaataaaaattcaattatctaccatgaggatgatggctatcactcgggtttccttggtcacttccaagattggtcaaagactatttacggaaattatttgttagtagaagaattaaatcgtagtcatttatctccactaaacttcagttataaatatttcatgaaatttgatagcgagcagtggggagcttactttagaggtgcaattatttacttagaaagcaaacttaaaaatgataatttcattgatacacattgcaccttgaattcaatccttgagaacataaagatatgcacaaagcaaacttatttaattgataaattagaagataccatagctaaagatgaaataattagcaagctgtcaacatctgttacatttataaaaaacctcatcaagttgacatcaaaatttaaaacgaaatcattttatgagtatagtgtcagagatagagaaagatgcatctttgatatacactatttcgtctcagacgttttaatagaacttatttttaacgcttccaagtgtcaatcgaataactttacaacatggcacattcaaaataatattgtctggaatggtattttttctattccagagggaatggatggtgacttctacaaaaagaccaaaaagaaactcatcaggaaactgtacgatgagataaaagacatcgatagaagagctaactttaaaaatgcatatatagcaggtatgattttaaatgtattaggattaaaaaccgaaccaaattatttttttagaaaagataaggaattgatatttatacaaaaaatcacccagaaaattattaaagaaaatttcactaggatagtaaaagaccaacctcaggtcgcagatagcatgcttcctaaaaacataactttcgatcaagataaaaattgccttataaaaacatactccgcaggcatcaaaaaagaagcaccaaaagaatatctctatttagattaa

SEQ ID NO: 280293 - DNA, 1482 bp, Morganella morganii
atgactgatacttcaaccaaaaaaccgtcttccggtgcagcaaaactgactgtcggcacacttatcgtcatgaatattgtggcggtggtgagcctgcgcggtttgcctgccgaagcggaatacggtctcagtgcgattttttattatctgtttgcggcagtgtttttcctgatcccggtatcactggttgctgctgaactggccaccggctggtcagagaaaggcggggtgttccgctgggtcggcgaggcgttcgggccgcgtctggcgtttctggcgatggcgatgctgtggattgaggtgacggtctggttcccgaccgggctgacattcggggcggtatcactcgcctttatcgatccgcatcagacattcgatgaagcgctggcggcgaataaattctttgtgctcggtattgtcctgtttatctactggctggcgacctttattgcctttaaaggcgtgggcgcgtttgcccgggtatcaaaatggggcgggattatcgggacgattgttccggcgatcattctgattgtacttggtttctcctacctgttcagcggccagacgccgcagattgaccttgcgtgggatcaggttctgccggatttctcaaacttcgataacattgtgctggcggccagtattttcctgttctatgccggtatggaaatgaacgccattcacgtaaaagacattgataacccgaccaaaaactacccgaaagccatcattctggcggcggcgggtacggtggctatctttgtgctgggtacgctggcgatcgcctttatcattcctcagtccgatatcagcctgacccagagtctgctggtggcttacgatgacatgttcaaatgggcacacattccgtggatggggccgattgtcgccgtcatgctggctatcggtgtgctggcgagtgtggtgacctgggttgccgggccgtcttccggtctcctggaagtggcgaaagcgggctatctgccgcactggttccagcataccaacaagaacgggatggcaacacatatcctgctggtacaggctgtgctggtctctctgctggcggtactgtttgtggtgctgccgtccgtgcaggcggcttatcagatcctcagtcagctgacggttattctctatctgattatgtatatgctgatgttcagcgccgcgatttacctgcgcttcagtcagccgcagcgtgcgcgtccgtaccggatcccgggcggtaatgcggggatgattatcctcggcggtatggggctgctcggctcattaaccgcgtttctgttcagctttatcccgccggctcagattgcggtcggcagcccggaagtgtatgtgggggcgctgatcggactgaccgttctgttcgttcttcttccgtttgttgtttatcagatccgtaaacccggctggcgtgatccggacagtgatttcgcaccgtttacatgggaaaacaaaggaaaagcatcatga

SEQ ID NO: 280294 - DNA, 393 bp, Morganella morganii
atgtcgcgtgacgagtgggatgatgaaactgccctcctgatccgtgtgaccattggtaactgcaaaaagcagggatattccggcaacgaactacttgaaaaggtaaaggagattgtctcaccaaacaaatcaacgctcggcgcacttcgactcgccaaagaaaaagatgacgccgacgctgttgaatcctgtatcaacaaagcttttcctctgaacaacccgcttcgtgatgtggttattaaacgatataagaaccgcaaaagcccgcaaaatgttctcgaatcattatccagagagactgggatagatattgactcagcaaagcgcagggttaggtgggcggatgccatcattgaagatgtgatttattccacggtaatcggtaatcagtag

SEQ ID NO: 280295 - DNA, 180 bp, Morganella morganii
atgtacaaaataactgcaacgatacacaagcccggcggactgccggtgagctggtttcgccggtcaccgaagaaactcagtaagcgtgaatgtgaaaacatgatttaccgcagcaaagaagttggccggtcattcggtgacaaagtcgtcctgactgattttaagtgtgagaaggagtag

SEQ ID NO: 280296 - DNA, 195 bp, Morganella morganii
atggaaccaacggattttgaaaagtggtacgcgaaagagcttcacgtccccgtcagtatgatcacaagcttcaggagagagcatcaggacgggcattggacttatgcactcgcgggaattgaaaccagataccgcgcctacatggccggagttcgcagcaggctgccgtaccagacacaaccaccggaggagtga

SEQ ID NO: 280297 - DNA, 171 bp, Morganella morganii
atgatggaatacctgagagacattcttggaaccttgtttgtttgtcttgttccgattaccgggtttttatctgtggcgttcctgatttaccacggtaaagacgggtggggatggctgctgattgtggtcgtattgatatccggcagtctgaaagtaagttacgggaattaa

SEQ ID NO: 280298 - DNA, 912 bp, Morganella morganii
atgggtaacgtgtcatatgcactacagaagcgcgtagagcagcctgttaaatcaggcaaggggtttgcctttatgcacagacaaattgttgactgtgacttttacaggaaggattcagaggcagtgcacttgtggcttcacctgatcatgactgcaagcagtaagccggaggtggtggaaactgatatcggcatgatttcaatcggacgtggacagatgatgagaagccgtccggtgctgacaaaagaaacaggtatttctgataataaaatccggtcacttttacgcagttttgtgacaaaaggcatgatcagtatcgatgccaaaagtaaaaaaatcagcatcattaccgtgctgaaatacgacgaatatcagggtcaaaattgtccggagaatgtccggaagttgtccgatgcaaaaccagtaacagcaacacctgagcgggtagagtgtccgacgattgtccaagagttgtccttatacaataatataaataatataactacatctaacgatgtagttggtgggctttctgacgaaagccacgatgaccagtcagcagaaatcaaatctaaaaaatcaccaccggttccctaccaagccatcatcgacgcataccatgagatccttcctgaaatggcaagaatccaggttgttcgcggaacacggaaaaataaaatccgttcgttctggcagaaatgcaacagcgagtacatgaaatcacacaacagaccgttcacgctggaaaactggcgcggatatcttgggtatatctcgcagcactgccgctggatgaccgaagtcagacctaacggaaagggcggcttctggagagccaaaaatctcgattacctgatcaccgatgagtgttacaccgccgtcaaggaggacagagccaatgaccggaaataa

SEQ ID NO: 280299 - DNA, 168 bp, Morganella morganii
atgaaacaacggtttaattacagcgctgtgcacaaaaacaacgcacgtgaccgatttaaccgaacagtcaccgaacagggaattaagtgtattcgccagatgtttgaggaggcgaaagtaagaacggaacacagggaagaattgctgggaggtaagcggcatgggtaa

SEQ ID NO: 280300 - DNA, 228 bp, Morganella morganii
atgaacgaagcaattaaaaccgccattgatattgtgggaacacaaaaaaaacttggcgaagcatgcggtttgacgcagcaggcagtttttaagtggcttcacaacaaggcgaaggtttcccctgaatacattccgctaatcgtcaaggcgaccaacggacaagttaaaggcagagacctaaggccagacctcccgcacgtttgggaatttggcaatcagtactggtaa

SEQ ID NO: 280301 - DNA, 708 bp, Morganella morganii
atgaaaacgactcttgcacaacgactaaaacaagccagaaaacacgctggtctttctcagaaagaacttggcgaggctattggtgtatctcaggcggctattcagaaaattgagtctggcagcgctcagacgtccacaaagctgatagaaatagctaaagtcctgtcagttccggcggaatggctttcatctggtgccggggataatccattactcccctctgatggtgctggtacagtgaaaatagatcttgtcactcctgcagcaatagagacttacaaagtggaaatcctcgatgttgaagccagcgctggccctggcgttatggttttagatgattttattgaaaccatcacggcaattgagtattcagcggaagaagccaagaggctgtttggcggaaggccagctgataccgttaagatgatcactgtgagaggtgactctatggcggacaccttcgaaccacgcgatcagatattcgttgatatgaccgttaaccattttgacggtgacggaatttatgtcttcatactggacaatcagctctacattaagcgcctgcaaatgcagtacaagcgccttgctgtgatatcagataatccaaaatatgaaacatggcacttgaatgaagagtctattgatggcgtattcatacaggctaaggtactcgtgagccagtcaattaagtataaatttcacgggtaa

SEQ ID NO: 280302 - DNA, 579 bp, Morganella morganii
atgacaaataaagtctttgatcctgaaaaatatacaatatcagtaaagaaaaccaccgaagatggtgaggtggtttttgtggctagcgtcgccgagcttcctgatatcagagagtatgcagatactgctgacttcgccagagagttagcaattgattcaatatccaccgcatatgaagtttttgctgagcaagggatgattttccctcaaccaagtgatgattctcaaattgaaagtgtcagcggaagagtaactttgcgtctgccaaaatcaatccacgccaaatgcataaaagcagcggaaaatgatggcgtcagtttgaattcatacttaacaacctgcataacaagctactctgcacagaatgaaattaaaggcgagattcgcagccagttaacccaggtgaaggcgctaataaagtctcacggcagatcagatacctatagcggaagaatggttgatagaggtggaaactcttgggtttcatcactggatgcaaaattttctaaagagagtgacaccctggaaagggatagtgaaattcaattatctggcttttattcggagttatatcaatga

SEQ ID NO: 280303 - DNA, 441 bp, Morganella morganii
atgagtattatgtcgtcagtcatattaaaatccgcaacggtcacttctaacaccatggattttgtaagaccagatattgatgtcgccaaagtggctgtaaaatttaaactgcacaacgccttagaagaagatgaagagtacaaatattgcaggttagcattctccggtgatgttattggaaaattaaccgatgaagatgaacctgatttcgatttagttgaccatgagtttaagtttggcatctccgttgattatgaatttgaaatcaacgatcgagagaaatatctatcactaactaaagatgaaaaagctgaattgtgtgcaaatttagtttatctagattttagaaggcgcatgacgctaaatgcaaataacatagggataagcagctttagaatgccactatcgttaatgactctaacaaagaaatcagaaaaataa

SEQ ID NO: 280304 - DNA, 204 bp, Morganella morganii
atgttcggtgaaattccagcggctattgctgctatcagagaaagccttaatctatttaacgccgttaatgacgctaaaaatcaggctgttattgacaatgcagtctatgaaataaatagaaaacttcatgatattcaaatggaaaacactaagcttttagagatcataaatgagaagcagaagtcgataatgctccttgagtag

SEQ ID NO: 280305 - DNA, 237 bp, Morganella morganii
atgacagataaaacaggtggatcggcgtttccaatgcttggaagtgtggcctacaactcagactgggatatcgacccaggaatgacgctgcgggattattttgcagcaaaggctatgcagggaataattaccacagctgcagcgccaattttaacatccttggcaggtcttgatgacgacatcgcaaaaacatcttacgagctggcagacgcaatgctcagagcaagggagaaatga

SEQ ID NO: 280306 - DNA, 234 bp, Morganella morganii
atgtcagcacgcccattaaaagttaaatgtattcgtgataatggttgcccgttttggactgagggtaatgaatacccggctaaattttacatgtccggatttctcatgattggagatgatgataaccctgacgccgaatggtcagcatcactcgttgatggcagcgaattttatacagttgacggccttgattatttggctcagttcgaactactggatagcgcggaaaaatag

SEQ ID NO: 280307 - DNA, 201 bp, Morganella morganii
atgcacaagataactatcgaatcaaaacacctggcgacaagcactgagcaagcaggatgcggaaatcagcgcgccgtcatttattttgaccgtaattcaagcgtggaaacaatggacgttgaaacacttatcttgctgcttaatccggagaaggaaactctggaaaagatactcagggaacgatacggggaggcagcatga

SEQ ID NO: 280308 - DNA, 792 bp, Morganella morganii
atgactgcttactataacgaaatcgacccgttcgctgctcagtggttacggaatctcattgctgccggtcatatagcgcctggcgtagtggacgaaaggagtattgaagatgtcacaccagatgacttacgcggattcacacaatgccacttcttcgccggtgtcggagtgtggtcacttgccctgcgccgagcaggatggccggataacaaaccggtatggacaggaagttgcccatgccagcctttcagcgcggcaggcaaaggaaatgggtttgctgacgagcggcacctttggcctgcattcttccacctcatcagcgagtgcaaacctggcgttatctttggtgaacaggttgcaagcaaagacggcctcggctggctcgaccttgttcagactgacctggaagcaacgaactacgccacagctgcagtcgatttatgcgctgcgggcttcggtgcgccgcatatcagacagcgattgttctgggtgggcaacgccaacaaccagggaatggaaggaatgcggggatgtgagtcagtcattcttccggaaggacgggaagatgcgaaacgacacgctataccgccagctatggctgcacatgtttgggatggatggcaggccgtcacgggagcagataaaagctctcgaatgctgccacctgactttggcgagagaactgatgatgctgccggtcgagtgggaaaactccgcgcctacggaaatgccatcgtcgcgccggtcgcggaagagttcataagagcttatatgctgataacagaggaatga

SEQ ID NO: 280309 - DNA, 285 bp, Morganella morganii
atggcaatagttcagtattacgttgcgtgtaaaaaagatgaagacccggcatccgtcactgagaattttcgctgtgaattatcagacgaccataatttcagcgctgatgatgacgacttcgaattttgcatagaaacatgcgcagaagattttcacgacagatgcggcgggtgggagcgtcattggcctttattattcatgctgtggattgatggtaaatatatcggcatgtttgaagttgaacgcgaatatgagccaacattctcagttaacaaggttaattaa

SEQ ID NO: 280310 - DNA, 366 bp, Morganella morganii
atggataacgaaatttacagaccaaaattgcaggtgtggcatattccacagattccggggaaagcattcaatgtcgatgttgagtcggttactgaagcagtgaaagtcatggaaaccctggctgcatacgaccagtttcagtatgacaataacatcaagcctgattactcaaatatgaatggtctgaatatattcaacgaaatagaccaggaatattattcatgggatgctgagtgtgatttattttatacggactcaccaaaagagttcctgtcactgttaattgaaaataacatgacagaggatgagtttaataaaaaccaccccgctcattatgacttcatgcggacaacttcactgaaataa

SEQ ID NO: 280311 - DNA, 375 bp, Morganella morganii
atgaacaaatatcgtgacaaatcagactttgagattaataaggctgtggctgaagttattaaccccggaaagatattcactcaggcttactcattcggtgatacctgcggaaactcagtgcagtggataggtggctatgctgaatatattcatgtcgattattgcaacaatccatccgatgcaatgccgattgttattgagaatggtatttcattattcgcaccgggattgtctggcatgtggacggctgggtatgttgattatgaaaccgaccgcgaatatggcgttgataattacgaagctataaataaaaacccataccgcgccgctatggaagtattcctgatgatgaaagaggcggagaatgaaaaatag

SEQ ID NO: 280312 - DNA, 1269 bp, Morganella morganii
atgaatacagcaatcggcattctcgggatcgtggtactgctgggaataggttatttactgtctgaaaaccgccgcgcgattaatctgcgcacggtggtactggcttttaccattgaactggcgctgggcggattaattctctattccccggccgggcagcacgttttatttgtgatggcagaggcggtcaccacggtgatcaacttcaataatgccggaacatcctttattttcggcggtctggtatctgacaaaatgtttgagatcttcggcagcggcgggtttgttattgcgctgcgggtattgccgattattgtctttttctccgccttgtcagcggtactttattatctggggattatgcagatcctcgtgcgctgggtcggcggggcgttacagcgcctgctgaaaaccagtcgtgcggaatcgatgaactctgcggccaatattttcctcggcgtgacggaagcccctctactggttaaaccctatctcggcagtatgacccgttctgaactgtttgccgtgctgtgcggcgggctggcatctatcgccggtactatgctggtaagctatgcttcgctgggggtgaaaatggaatacctgctggcagcttcctttatggcggcaccgggcgggttactgtttgctaaactgatgatcccggaaacacagcagacggccgatgaatccggcgccaaaccggtgcaggaaaaccgcccggcgaatattattgacgcggcggcggaaggggcgattaacggcctgaatatggcgctggcggtcggcgcaatgctgctggcgtttgtcagcctggtggcgctgttaaacggattgctcggcggtgtcggcggctggttcggtctgccggatctgagcatggaactgatcctcggctatctgctgtcaccgctggcgtggctgatgggtattccgtggaatgaagcgctgacatccggtgccattatcgggcagaaaattgttatcaacgaattttttgcctatgccaacctggcggaatatctgaagggcaatgaagtcgtggctgccaccggtctgccgatgactgagcggacacaaatcatcctctcgttcgctctgtgcgggtttgccaacttcggtactgtggcaattgctatcggcggtatcggtagtctgatcccgaaccggcgcaaagaaattgccaccctcgggatgaaagcactggtcgcaggggtattatccaacctgatggcggccacaattgcggggctgtttatcggcggataa

SEQ ID NO: 280313 - DNA, 492 bp, Morganella morganii; identical to SEQ ID NO: 276659

SEQ ID NO: 280314 - DNA, 1209 bp, Morganella morganii
atgccgttaacagtccgacaggtagaaactgcaaagcctaaagagaaatcatataaactctttgatggtggaggcttgtaccttgaagttacttcgaaaggttcacgctactggagaatgaaatatcgttttggtggtaaagaaaaaagattggctttcggtgtatatcctgtggtaacacttgcgaaagcccgtgaaatgagaggagaggctaaaaaaatattaaattctggaggtgaccccggagaaataaaaaaagcagaaaaagcaactcaaaggttgaatacagaaaatacgtttgaagctctagcgcatgaatggtatttttctagagtaaatcgttggtcgttaaactataaaaatgaaattattagaacatttaagaatgatgtttttccatatataggaagtttagttatttctgatataaatccgttggatcttctagatgtattaaaaaaaattgaaaaacgaggggcattagaaaaagcaagaaaagtacgtcaacgatgtagtgaggtattcatttatgctataaatacaggaagggctgtttataatcctgctgctaatctatctaatgtacttacgcctccccaatcaagtcattatccttttttatcagtgagtgaactacctgattttcttagattattaagttcatattctggtagcgaaataactaaaacggctacgaaaataattttattaacaggggttaggacaaaagaattaaggtttgctcgttggagggatatagatttaagaaaaggtatttgggaagtaccagccgaagtaatgaaaatgaaacgtccacatattgtaccattatcaacacaagttatagatttattcaattcactcaaaccattgtctgagcagtatgaattagtatttgtaggtcgcaatagttataaaaagccgattggtaaagaaagtgtgaatcaggttattgagttactagggtataaagggaggcttacaggacatggctttcgccacacgatgagcacaattttgcatgagaaaggatataactcggcatggattgagactcagcttgcacatatcgataagaatgcgatccgtggcacgtataatcatgctcagtatttggatggacgcagagaaatgatgcaatggtatgcagactacatggatgagttggagggaagcttggataatgttgttaatgtaaattttaagtaa

SEQ ID NO: 280315 - DNA, 297 bp, Morganella morganii; identical to SEQ ID NO: 278053

SEQ ID NO: 280316 - DNA, 207 bp, Morganella morganii; identical to SEQ ID NO: 278054

SEQ ID NO: 280317 - DNA, 210 bp, Morganella morganii
atgcaaacagaacctaccatcaccagcaatatgtccgccgacgatgtcgcactgtggatcaccgaaaaagcccaggcacttcagaaactgcaatcactccgagcagaacgtgacagagaaatccgcgaccacgaacgcaccatcagtcgactcgatgaagatatcatcaagtgggaagagcgctgtgctttaacagtacaaccgcagtaa

SEQ ID NO: 280318 - DNA, 738 bp, Morganella morganii
atgagtatagagcaaatatctgaaattctaggaaaaatacaattcaatcaaactttatcaccatcaacttatattctaatagccttaatcactgctgctgtatcttttatatccgtttatacatcacgatattttagcgaaaaatcaaatttaagatttattaaaaataactttgaggaaataactgaacaattaaagaaaaacacagagacaacaaaaaacatagaacatcagttcattcataaaacatgggtgtcgcaacaaacttgggttaaaaaacaagaaatatatgaggatatttttaaattatttatcagaattgataaatatttaactcatgaagaacatgaactaaatgaatattattggtaccaccatggaatatttcagtatttgtatactgatagaatcacatcagaacaagaaaaagaattaatgcaggagcaagaagagtatattaaatctcaagaaagcactgagcaaaaagaaaaatcatccgatattaaaaaattaaagaaagatatatctgatactcttgctagtattcttcaaataaaggctatatttttatctgaagaatctgaaaatatcatttcacatattgtaaaaatgattgaagcggaacctaataatgatgaagagtggaatcagtatgtaacagattcgatagaaaactttaaaaaatataaaggagagtttttaattgcagctagaaaagagctatccttgtcagtgtga

SEQ ID NO: 280319 - DNA, 963 bp, Morganella morganii
atggatgatgttacctttaagtacctgactgatcagtatttttacagtaaatcgctgcgtccccgatcagaaaaaagttacctgaaagttgtccgtacattcgggaatttttcggctgtctcacctgcagatgtggatcaccatgtcgtgctgggctggcgtcatcttgttttgcaggagcagaagcgggctccgcgaacctggaataacaaagtggctcatatgcgggctttgtttaatttcggtatcgcaaaaggatttttacctcacgatgaaaacccgttttattacacgcaagtccgggttggtaaaaagaggaaaaaaattctgacgaaaaaccagatggaggcgctataccggcggattgagctgtatctggatctggaaagggttcacggtaattcgttacttcacagccgtcgtccgaatgccatgcttcctgcctggttctggagcacggtcatgaacgtgttgcgttataccgcaatgcggttggggcaattgctctatatccgctggtgtgatgtcaatctggaggaacgtctgattaatctgtgttctgaaggttccaagaatcataatgacagccagataccgattgttgatgcactgtatccgtcgctggagtatctgatggtgcaggcagagaaagctggaatggaaccgaagcaccagttgtttaatgtgggctggtttcaccccggccataaacgtaagtatccggaactgatggatgaggcgccgttacgttcattcttccggcgcctgtcccgtgagtgtaaattcaccgtcacaccacaccgttttcgccataccgtcgcgacacatatgatgaaatcgccggagcgcaatctgtacgtggtaaagcgtctgctcggccatgtcagcctggcatcgacgatggaatacattgatgaaaatgttgacggcctgcgtaacatactggaaaccgagctgatgtag

SEQ ID NO: 280320 - DNA, 930 bp, Morganella morganii
atgaaagaaaaattattacatgcaacaggtattataaacgggttttttaactttataaatggacagaaaatccttttaattaaaagtgatagttcaaaagtagcatattattttgattgtgttgggcatttttattgggtggctaattttaattatcaatatacacacttctttatttttcaaacttttttcgatttactggatatatattgtgaaaatagatttaaaatgaatgatactaacttttgccaacgatatcaagaggtaagaagatccgtcaggcaggataatattgaagatttattcataagtgaactatatgatattgcaaaggattggcgcaatggtatagtccatcatgactataaaattgaaaataatgaggttgttttaactacaagaaaaggaaaaaaaccacaagtaaagaaaatacattttcgctattttaaattaatgaatgagttgatatatcagcttgttacgtgtggtgttgtcagtaaatccttgtatggtataaatgcaaaatattctggttttcttattcttttggataagttttatcctcataggcagagtaaattaagaatattattggcaaatgattgtaattttacaaaaattaagtttcccgattacagatggcataggcatttcagtttgaatatatctgaagatgaaagtgttattctaaatacagaaggtgttaaaagagagtctttagattttgaaatttatgaagcagacagtgaaattagaattttagttacagctgagggggagagaatttcctgccctttaactataaataatactgtttatactttaacaaataatggtatgacatatctttttccttcggaagttattataaataatcctgatataaaattaaaggatatgaataaatggatattaaatgaatctgcttaa

SEQ ID NO: 280321 - DNA, 1266 bp, Morganella morganii
gtgattgccctggttgatgtcaactcgatgtttgcctcctgtgaaactgtatttcgtccggatctgaaaggccgcccggttgtcgttctgggtaacaatgacggctgtgtgattgcccgttctgcggaagccaaaaagctcatcaggatggggccgcctttttttcagatccggcacctggttaaacagtacgatatcgccgtgttttcgagtaattttgctttgtacggcgatttcagtgaccgttttgtttctgtcctgtctgaatttaccccgcttctggaacgatacagcattgatgaatgctattgtgacctgcagggcatcaccaacgattacctggattatagccgtaggatgcaggaaaccgttctgcgaagaatgcatttacctgtcggcgtaggtattgcaccgacaaaaacactcgccaaactagcaaattacgctgcaaaaaaatggattcaaaccggcggtgttgttgatttgacgttgcgtgagcgacaaataaaactcatgccacttgtccctgtcagtgaggtctgggggatcggccggaagctgtcagaacgtctaacggctatcggtatacgaacagctcttgatctcagccggattcaccctacggaagcccggaagctgcattctgttgttctggaaagaacagtcagagaactgaacggcgaaccctgccttaaaactgaagatatccagccggcgaagcagcagattatttgttcccgttcattcggaacgaaaactggagagtatgaacaggtcagacagtcagtctgtgccagagcggaacgggcagcggaaaaactccggcaggaaaatagattcttcaggttgatatccgtctggctgtacggctacggaaaagaaagttacggcggtaacctgtatctacatcagacagctgcactgcattatcccgttcaggattccagagacattatccgggccgctgtgggcttgcttgataccttatggcgtgatgatgtgacatacggtaaaagtggcgttatgctgggcgcattcagtgaaaacggaatatgtcagccggacttgtttgatgcggaacggccgtcaaagaacagtgaaaaactcatggacattatggattacattaaccgtagtggagccggtgagatctggctggcaggtcagggaataaaagctagtaaagtagactggaagatgaaacaatcgcgcctgtctccacactggactacaaaatttcgtgatattttaagagtaagttgttaa

SEQ ID NO: 280322 - DNA, 390 bp, Morganella morganii
atggcaaaaattcctttgtttgattctccggtatcctgtggatttccaaatccggctgatgattttgcagaacggcgtatctcgctcgacggggaattgatccgctatccggaaagcacgtatttccttcgtgcctcggggcattcgatgaaagatgccggaatttccgacggtgatttactggtcgtggaaagttatgaaacacctgttgacggcgatattgtcattgcggaacttaacggggaatttacctgtaaataccttaaattataccctgttaaagcccttgtgcctgccaatgatgcttataagtcagtcatcatcacggatgatattgatatccggatttttggtatcgtccggtatgcagtgcatcagaccggacgttaa

SEQ ID NO: 280323 - DNA, 159 bp, Morganella morganii
atgtatacaaatcagcaattaaaaagaatggttgataacagaattgcacatttagaatcaaaactatacacgcagcctttaactgcacaagagcagaatagaatacaagacatggtattattttataaatactggtcatatagactgagttattattga

SEQ ID NO: 280324 - DNA, 396 bp, Morganella morganii
atgaaatcccaaaacctatttatcccgttattgtttttcccgcttttctcaccggctgcggtggtgttcactgacagccttcatcctccgcagcatgcggataatcatcaggtcgtttatctcgatgcgccggagcagttacaggcgcagtttttcggaatgttaccggcggacccggaggaggctgaacgggtggcgaaaaccaggatgcagtcactgggatggccgcggatgcagcggcaactgatgcagacatatcagggggtactgaaagcatacagtctgaaactggcgaagtatccggcggtggtgtctgatgatcatcatgtggtgtacggtacggctgatgtggctgtagcggagcaattgctggctgagttccgggaggcgcggtga

SEQ ID NO: 280325 - DNA, 759 bp, Morganella morganii
atgacgacgataaccacagcaaataatacgaagcaggtttattcaccggaaattgatagtattatttcagtaaaaaaagatttacaggaaataaatattgatcctgaagttataaaagagattacaaaaaataacagtataaagagcacagaagttacagatgagcaaatttctgctgagatccgtacccgtgcaggctcgctgatgccctctctgttatctgtcagtgatcagaaatggatgaaattagccatagaattatgcaaagtactgaatgatgattcactgagccagcaggaacgccagaataagctggatgtagctgttattgaactggcaaaagaattaaaaaatatgaaatataaggaagccgaacttcaggtcaaagcagccgtcaccggtgcgttagtttctattggtatttctattgtcggtgctgctatgtcaataaaggggattgatgtggctaatccgacggcaccgacacccggcggaatagcggggcaggccatgtccggactgtcccagccggttagccaggtattcgtacaatttattcagaagcaggttactgagttacagggtgatgctgaagttgttcgcgcgcaaaaagatctgaagctgaaaagcggttccgttcatggtaaagcttctaatgacgcgcatgaattaaataaaaaagtaatggatatgtttaaccgttatcttgataacaagcaggcgacatctggtaacttgcttaataatatgcggacataa

SEQ ID NO: 280326 - DNA, 465 bp, Morganella morganii
atgaaagtacgtatagtgtttattttcttaatatctttatttttatctgcctgtaactcagtatctcataaaaaaaatccgacaattaagaataaagagataatagatgaaaccagattatcaatacctaatatttccaaaaatttatcagcgcaggaatatgtcgaaaaaaaacagatggcatcgcaaggaattgtgattgcatctactcggaacgcatgtgttgatggattcaattttctcaaaggatttaatcaggagcaatttgataaattttcgtctcattatagcaaaattaatcaaaactacatttttcttaatgttaataaggagattatggataaagactcaaaaaaattactgtcgatgactctaaataaaaagctggatacgctatgtgctaaagtacagtatgctggtttcataggtgttaaagaacgcctgaaaactttatccgataattaa

SEQ ID NO: 280327 - DNA, 2097 bp, Morganella morganii
atgagtgaccgctatgtgattgaagcgatgctgcgtccggcggtggagctgaataccgctgcggtggctgctgccgcagcgtatctctgtgccactgcgccctgggcggtggcgctgacgcctgccgtcagtggcatcaccgcagccggatttgcgttgttttctctgatacgtctgcggcaggggctgtctatcctgcggtaccggcgtaatatccggtgtctgcggcgttatgaggtgaccagcgcggcggtgccggtcagccatcagcggctgttcctcggtaaaggttttttgtgggagcagaaacacacgcagcggctgctggataccctgcggccggaggttgctcggtatgtgaatccctcttggttgtatcagatggcccggcgtgctgagcagtcttttgagcaccgctttccgccgctgtgccggttgctggcccgggattccgtgctgaatccggttcgtccgctgccgccggtaggcgggtatcctgcgctgcacggcatagaaccggatgagcgcgatgtcatgctcagtctgactgaacgggttgggcacatgctggtactcggcacaacgcgggtcggaaaaacccgtctggcggaactgctgatcacgcaggatatccggcgcggtaacgtgacgattgtctttgatccgaaaggggatgcggatcttctaagacggatgtttgctgagtcccgccgggcgggacgggcagaggaattttatgtttttcatctcggcagaccggaaatcagcgcccgttacaacgcgatcggtcgtttcggacgtattacggaagtagcgtcgcgaattgccgggcagctcagcggtgagggtaacagtgcggcattccgtgaattcgcctggcgttttgtcaatatcattgcgcaggcactggtcacactggggcgacggccggatttcatgctgatccagcgctatgtgaataacatcggcgaactgtatgagatctacgccgaaacctgcctgacgacacactccccggcactgtggctgcggattgaaaatctggcgcagatcctgactgatcgtgacattccccgtcacatggaggggcgttcgctgcggggggtggcgattgagcaggtgctgaacagcgatgagggaaaacagttttacgaaccggtgctggatgcgctgcgtgcggctgtccgttatgaccagaaatattacgacaaaattgttgccagcctgctgccgctgctggagaaacttacctccggcaaaatggcacagctgatctctccggattaccgggatatggccgatctgcggccggtttttgactggatgcaggtgatccgcaaaggcggcgttgtatatgtcgggctggatgcattatctgatccggaggtagccgcagcggtcggtaacgcaatgtttgccgatctggtcagtgtggccgggcatatctacaaattcggcgtgaatgacgggttacccggcgaggaggataaaaagatcccgatcagcctgcactgcgatgaattcaatgaactgatgggggatgaatttatcccgctgattaacaaaggcggcggtgcgggcgtggaagtgaccgcttacacgcagacgctaccggatatcgaagcccggaccggcaatgctgcaaaagccgcacaggtagtcggtaattttaattcactggtgatgctgcgggtgcggcacaccgaaacggccgaactgctcacccggcaactgccggaagtggatgtgtataccaaaacattgatatccggcgtgacagacattccggaaaccggtactggcagcgatttcacatccaatacccaggaccgcgtcagtaccgtgcgcactccgctggtgacggcggccaatatcatctctctgccgaaagggcaggcgtttgcactactggagggcggtaaactgtggaagatccgcatgccgctgcccgctgcggaagacgacgcgctgatgccggataatcttcgtcagatagcggacgatatgcagcggaactaccggaccagtgatacctggtggtctgacactgttttgccggaaactaatatgtcctgccaatataacgatggtgagtga

SEQ ID NO: 280328 - DNA, 537 bp, Morganella morganii
atgtctgatgaccagaaacgtcgtgccggagcattgttcggtgaaatgcgtatcgagttacatacccactatgcagcgggggtctggaatgggcgtccgggcaccgggacaaaaaagaagctgattggcgtcccctcgtttcttaccctgatttcccgtattcataacgatgcactgaccggtaatttggcggcaggctttgtattatcagcgctggaggaaaaattaatttcagccggtaacgcctttcagcagtggcagcatgagctgagtatgatgattgcagggctgccggtgaatatcattgtctccgatgtcgtttctgctcagccgctgaccgttgcggtacattgcctgaaccctctgggctatcgctttgcctgtttactggccgaatttgaccagttggctctgcggattctgcaggcgtatcacaatggtttgatttcaatgaaagagaagaaagcacggctgcattattgcagccatcagataaggcgtatctttgcggtggtattacagtatcacccggaatag

SEQ ID NO: 280329 - DNA, 1953 bp, Morganella morganii
atgaaaattgatcaatgcctatttggctacgatgatgggcataggttattagcatcctctttgcccttaggagctgaaacatcgcttctcacagaacttagcgatcttgcacctggagctgtattcggctgctcagagggatattggaccggtttacctgcccctcaaattggtcgttatgcacttatgcatacatggcccgcgcctgaaatgtcacggcctggttgtgtatggactcatgcgttattaatcgaccctgttttacttgagtctattgatgatctttctgtgctgcagacaataatgagtcgcccgaagagccctatagataaagatcgttaccgcgagcctattgatgttactttttctagtggctattactcaaactcgctgctagatgatagctatattagaaaattaattatctccctttatgaaacaaataatatggcggttgaaattgcgtctccaggtgagttggatgacgcattgtttgcggtatggtcacaacaatggccacgccttagacgtaattttcgttttcaaacagcggcttctagggagtatagtcatagcatttccactcgttttgatgttaacacagtgcttgcttctcgtgaaagcgggatcgatacctctgaaaataatacatcttcttggctatctattgccgcacaggatgttaaaaatggtttaaatggaacactacgtcctttcctatggcgttacggacgggatgtcaggcgacagcgaggttcatttagacccttagtcgaaattaatatatttgattgcgaaataaaaattaattcattaaatgaaataatttcgatcgtgtatgagtcatttccaactcaaggggatgcttataccttgaaacaggacttaatagatggagtattaatgtctcatgcgcaggctaagtggattaaattcctagtgaagaatgaagggggggggaatggaatttttccactaccaacacctgaaggaatggaaaaattaaaaaaattatggcctcagcaatccgatgaaattcttcaacttgttgaaatatctgctggtacagaaaagccattaggtaaatttatatttgaaaatgttataaatattgttcaaacaccagagttttggcctctgacggaattatatccttatgtccgtcaactcatagttaaaacaaatccaagtatattgacggattctgattatatattagagaccaaaaatctagtagaacttattcctttagttccagaaaatacacagcacctcaaaagttttgtttctcggttgatgtctcgtaatgatgaggagcttattagtgtagtaattgataaatttcccaaattgacagcaattgaagtggtgttattaaaaaatgatagaaatattgaattgggagatttatggtttcagagggtaattagtagacctgatttgattcttcaaactgaagttatgggcctaatttctaaggcaagcgtgctctatgaagttgcagagaaactaggttggatttcatcacgtgtaattacctttggtgtaactccttggaatgcagctcttataaatatatccaatgatattcaggagcatcaggaagatacccttaagtgttttcttctggttctggcttttaaatctaacaatgaagatggatatgaaataattgaaaaattttataaagatatacacagtaaaatattgaaatctaaattatctaaaaaagcaaacgagatattatcgactcacttgcctgaacttagttggttactaagttgtaatcttggccctcgttttcgtttagcagtcgctgatgcttatgttcgccataagtggccaccacaaagttacgcaaaacttgccgatagtagtaaagagagggatttgcttgccagtgcagcgtccgagatttctggaggctacatgtatttcaaggcggtgttatga

SEQ ID NO: 280330 - DNA, 897 bp, Morganella morganii
atgagctcaaattttgtaattatggggttgcctgcatctgggaaaaccacttttttggctgcgctctggcatcttgtggaagctggtgaaactgattgcctccttaaactggatgggtatcaaggtgatcttcagtatttaaatcttattgcaagggcgtggcgtactttccaacctgtaccaaggacctctcaggttggtgataaaaacgtatcaattatgctacgtaattgtaagacaagtgtgccaagtacggtttttttcccagatttggctggggagacatttgaccgccaagttgaggaacgaagatgtcggactgaattcgtagaggggtttgttgaggaagacggcattttgttttttattaatgccgatgtgaaagaagattgtctttcaatcgatgaatttaactcaagaatgccaagtacagacgaattggaagttacacgtgccgaggtcagtgttaatactgataatttagaagcagagggtgctactgctttgttacgtgaatgggagccaaagctgttgcctgcacaggtcaagatagtacagctactaagtgatctagtacggccgcctttcgcacctcgcagtcgacgagtagctgttttaatatccgcctgggatctaactcgtaatatgagccttacacctacgcaatggcttgctgccaatatgccacttgtagagcaattcctaagagctaatagtaatttttttgagcatcaggtatatggagtttctgcacagggtgttgatctgaaggatgattctgctgtagatgaagtagcaaagcttacgccgagtagacgtattcaaattgttggtcctgaaggtgaaggacatgatttaactgagccccttgtttggttaatgtcgggagacgaatga

SEQ ID NO: 280331 - DNA, 948 bp, Morganella morganii
gtgatagatggagctgatgatatcgagacgggggtcgatgaagatatcgacgtttttgataaatcaaatgtgaaccaagtcgcggatcaaaacttacattggacaatgttacctccatcagaaatgcttacattggaggacgccgatcgactgttgcgatggcgcaatgccgcagtaattgctgttgtcggcgaacgatacggtggaaaaacaacactcgttacagaaatatatgggagttttctgcgtggggtttttgctgattctttattttgtcacagccttagccttttagggttcgagaaaaaaagctttcagtcgcgtgctgcatcaggggcatcacatgctgacaccgcaaggacttcactctcggaaggtttgcgcttcttccatcttgcagtatgtgatgaggttgatcttcaccgtcgtgaccttctaatttctgaacgagctggcgaggtatatcgtgatgctcgtgatagacctgaccttgctgttgaaatgattgaattacgtaaagcgacagtggtggccttcataattgatggtgggagagttgcagtacctcgcaatcgagcagaagttttcgcttctgttcgaaatactattcgagcaattgttggctcaggaaacattgcagcaaatacgcaaatacagcttgtaactaccaaatacgatttgcttgaaggtgactcaatgattgatgcacgggaggcattatcggaatttgaacaacaaattatcacgatgcaggctgaaaaattcaaagttttaacatttaggacggcagcccgtaactcaacatccagttccaactctacatcaggtttagatcttttattaaaaagctggttaaaaccaaagaataccaagttgcttgaaaaacccaagataccaaaattatcaaatgaatttgataagcttttattgaggaggatggttcaatga

SEQ ID NO: 280332 - DNA, 1074 bp, Morganella morganii
atggctaaatttacatttgcagatcgatatgctgaggctgggttagcgccgactgctcaattaataatttctagacaagaaccagccaaacgtatcattgctggtatcactgaaactcaaattcttgacttggccaatgtatattacggtagtactgatgaagatttagactggttcagagatgagtttactaaagaagatgcaagtttcagttttgttaataatgagcgtgaagctcgtttacttgcggctcttatacttggtgaactaatcactgagcaagaaagtgagattgctattttagcggtcagtgtagggggggttagaggaatacggataccagaacaatctacttggcttcagctctgcgctgaggaagcttttaatcagatctcagtagcagatagaatatgcacaaatattaagactaaaataactccaatacagacagatacacttactgatgaactagcagaacttacccaaattaatgactggccgacactcattgatcttcttggaaaaattagaaatgaagcattatcatcggcaactaaaactgcaactgaaattacaagtgcattaaatgattttgacggtcaaataaagatgatgcgtgaggaaagtcagatgctctggtggttaatcggtggccacagtagaacgtttgaacgtagctttactacctttttacctcaacaggctgctcttgttggtgcagttgacttagggttattaactacctattcaacattgggtccgatcgcaataccagcaatgctagaacgtgtgattgcttctgctaagaaaacgaaaggacagcaaccaaaaggattagcaggagcagttgatagttttactgttgacgatcttgggcttttggtaatcccaacacagttgccagctaggcttgcgccgattagttttgcgatcgaatccgctcgaacgttgggtattggtgtttggcattcacgattcaatactaaaacgggacttgaatcctccatacagttagaacctgtttcattagcggagcaactgtatcgtgaacatcttctggggcaattattgtga

SEQ ID NO: 280333 - DNA, 1269 bp, Morganella morganii
ttgcttatacttcatttgtcagatatccattttcgaaaagctgagatcggcacagcacaagatcccaatcaccatctgcgccacgaattacttcgtgacgtggttcagcagtgtaagcagctaggcgctccagatgtgattgtggtatctggagatatagcgtttgctggcgacccagaagagttcgcatttgccacagaatggctggctgaactatgtacttctagcaattgccctcaagcatcagtattcgttgtaccaggtaatcatgacgtagtccgcgatctggcggatcgtaaccttgtccaaatgatccatcgcgcaataaaaacagcccagaatccaagcgccgaaattgctaggcaattcagagatccggatgcactgcatctgctttatgaaagtctcgctaattataaccagtttgcacttcaatacttttgtgatctacatccacctgaaagaacacgtgcaaagagagatctcaaacttaatgatggttcaatcttacgtttgtggggattgaacagtacatttacatctagtagtagagatcaagaaagaagtctgtttgttgatcctgcgagcatgcaaatcactcgtgaagatggtgtgattaatttagtcgttactcaccatcacctttcttggttaggacaggctcgagagtttgaagatcatctgaatgatgtagcacctattcagttttttggccacattcataccaatcgggttgatatgaaccgagattacatgaggctgtcagccagtgcagcacatccggatagatatgaggcagattgggagccgggttataattttgttgagttatcgattcagggtgagcaggataaacgcaagctacatgttaaggcccatgttagggtttggcagaaagcgccaggcggatttcgggctaaaatggacaaaagttctacggtgttcgaacacatcatagggctagacccttggattcctccaacaatttctaccgtgactccgagtaatttaatggagtcaacgcccgaagcttctacgatgcctagcgaggaagggaaggtaatgactaccctccgggagcttggtctacgtttttatcgactttcgtttagcaaaaaatccgaaatagctggacgattagaactattggaagaggatgatatgcgtttgcctgactacgagcgtttccggcgtgtattcatcagagcgcatgaacgagataaacttgatgcactcgcgaaagccgtgattgcatctgaacaactataa

SEQ ID NO: 280334 - DNA, 399 bp, Morganella morganii
atgaaagcacttatcggcgtaatgagagaagaactcatccgcaagcgtgcgcttgcaattgtcaagggtgagtatgtcccacaagcaggggagcctaaagtttggttcacctccatgattgcgctggctcaggtattaagcaacgataatgttgatctgctgagaatgatggatgagcagaagcctgaatcaatcacagagttggccatcctgtcagggagaaaggtaagcaacctttcgtctacgctaaaaacacttagtgggcatggctttgttaagctggaaaaaatgggcaaatcagtaaagcctgtggctaaatttactgaatttgagattaaacttgagaaagatatcgctgagagaattgaagaggcatgcaaaaagccagaagcagcgtaa

SEQ ID NO: 280335 - DNA, 378 bp, Morganella morganii
atgaacgacaactttgagtctgagttagacattctgatggaactggacgggaacagggtcaaccgcgaggacggttactggtggaaagttgaggtgtggcgagtccagcaaacgaagatgataccacacggcctgcgttataaccttacgttacacgacaagtacaacacaagagtttttggtatggataacgcccactccatatcacccccaaaaaaggggatttataaagggcgaaaagtatatgaccatatgcatagaacgcccatagacaagggggttccatatgagttcacatcacctctgcaacttatgcaggatttctttaccagcatagatgaagtgatagcagagagagagcaacgaggcaaaaaatga

SEQ ID NO: 280336 - DNA, 1005 bp, Morganella morganii
gtgaaagaaaacgttaagattgattacatcgattcaatacgagcgttcggtgctgtagctgtggtactaattcatgtgagtgggtattatgtctcaatgctgagcaatggatatggtgttagctggaattttgcaaatattgtagactcaatgagccgggtagctgttccattattttatatgatatctgggtttatatttttcaataataaagaaccaaaacttaagaactttataaaaatatcaatcatcattgttttttatagcctagtttcaattttcataataaaattactaactatttacattggtgaatcaccataccctatatacctaaacttacttaaaacaccatcttattatcacttgtggtttctatatccattaattggtatctatataatatcaagcttagtaaaaatacgagaaaaagattcagtacgcgcattgctaataattgcattgatatttgtattttttaataaaaacacagcaagcttgatttttacagcccttggtgttaattcttatttttactttatgttggatggtgatttcatattttaccttttgtatgctatatctggtgcatacataaagcatattaaagtaaaaaatagttacttatctttatctgtattgatgtatgtagtatcaattgcgttaatttccataccaaccagcatcataagccaaagtgataacaaaataatagaggtgtcatataactttaactccccgttggtttttttctctgctgtgtcagtcttcattatactcaaatcaataaaagtcaagaataaaataactaatttattatcttctcgatctctcgctatatatggatttcacgctcctttattgttggttattcagtctctatttccatacagcgatataaactcgttagtaggaataccattaataacaatagcattgataattgtatgcctagctctttctgaggtgactagattttttgatagatggagaattgtatcttaa

SEQ ID NO: 280337 - DNA, 1884 bp, Morganella morganii
atgtcagaacaaatcatccctaatgtcgtcgtttcgatgccttcgcagttgttcacgcttgcacgcaaatttcaggcggcgagtaacgggaaagtatttatcgggaaaattgacaccgatcccaccatacctgaaaaccaaattcaggtgtatctggaaaacgaagatggtacgcatgttcctgcccctcaacctctgattattaaccaagctggctatccggtatataacgggcagattgcaaagttcgttaccgtacaaggccattctatggctgtgtatgattcatacggtgctcagcaattttactttcccaacattttaaaatatgaccctgatcagttcagcaaaatccttgctggtgaaaatgggttcacctttgttggtggcctgacagaaaactaccttcgcgtgttcgataatgtcgctgaaatggtagcggaaacatcactgccacttggggcaacggttaaaacacgcggatattacacgatcaatgatggtggggaggctgagtatacagtaaccaacgttgcagccaatggcattattgatattgcattgagcaatgggttaacagcgtctatgttaacctacggggatgttgatatcagaactgttggcgctgtacgtgatacggacattggtagcattcttgtatcaatgcaggatatttccagaatcaagacagtagttatcccaggttattcatttgactgtaataaaaaagtaaatgttaaaaagaatttcttatttaaatcgggttcgcaaatcatcaacaggacgctgcgtgatgatatgtttgtgttcgagacagataatttgtttttcaaatcagaaaaaattggtggtggacgcattgccgtagataccccgttaaaagcctggaatcataatgttgctttggttcttggcaagaataatcttcgtaatttgaatattgatggactgaaattcattcctaattattccgacagaagcggtacagcgctaaaggttcgttgcaataacgtcatggatggaaccaatgacccagcaagaaagcaaaactcaatttgctggtgccattttgataatctccatcttgaagatggggaatatactttagttattgaagtgtatgagccaactgatgactttgattataaagtcgtaaccaactggatcactgcatgctcatttaaaaatctcgtagttaaaggaaattatggcccaattttaaattgcataccaaaaacaccaggaaaatatgcataccatactcagatcgcaaatttggaaatagattatgttcagcaatggactgacacaagcatatgggcgttgctgatagatggcgcaggcgcgaataatatcacttcgtatatttgggattactcatactatggtaatcaggggcagtatcttgttgatgtaaaaggcgcagacggacgcgataacagagtgcaaacaaacctcaaaccaagcgaggtgaatttcaatgggtttagtaatatgtatatcccaaaaaatacagcgcaggaagtgaacgcaattggattgagaagaatatgtcatatctttaaaaaagatggcatttttctcataaataaatcatattatcagccgatgggtatatcttccgttaagattgttgagacggactcatatgcattggaagtcagttatacaaaagggataggctcttggtttccatacatatttactcagtcgtataaccagtctaatgggtttaaatatacattaataccattctataaccagactcctgcatcatcaggaatagcacgtttctatataattaataattcatcgcaagctcttattctcccatcagaattaccggatggttgtgagtttggtattgagataatttgcgtgtaa

SEQ ID NO: 280338 - DNA, 2193 bp, Morganella morganii
atggccgcaccatgggagaactaccaaaatcaggccgcatcacagcaatctgaaaatgatgctccgtggcttaaatacaagccagtgagtcagccagagcctgaaaatgattgggttgatgatctgaaatacggcgtgaaagaagcaggaaaatcagttgctcaagctggcgttaacaccgcgaatatcataccagaagtcggtgattcaattgctagtgcagcggcatgggctggtgagaaaatcgggcttggtgatggtacgtataccccggcaatgcggttttcacttcctgaagatatgcgaccagagacaacaggagggaagatcgcctctgaggtaatcccgtatcttgtccctgctatggggccagaaaaagcggccgctgctttaggtactgctgctgatgctggtcgtcttgagcgcggagcttccaaagttgccgatcttgctcaggagaacatcattggcgcacttgctcagaatagccagcgcaatgattctggttcgcttgcttccgaccttggtttggggatgactgcatccggtgcggctcgactggttactccgcttatcggtaaggcatacaacgcagtatctcagaaggtaggcgacatcctcggcagaaaccaacctccgccgggtggtggcggtgctggtgatgttgagactgttctcaggcaggctgcggcagataaaaatccagatcttgccagcacgctcaacggtctcgatgtaaaaccaaacgccgaggtagctggagcagctgaaaggcttggcatgacagacgatctgttgccatcgcatctttcaggtaatcagcagtaccaggcggtagagcaggcaattaaatctcgacccggctctgcacttaaagcgcaggaagatcaggcgatcatgaaactgtcagagaatgtcggaagactgattgatgatgtcgcaagtgttcctgatgcgctatctctaaaccaaaaagtgattgggcagtttgatggcagaatgtcagctctggaaggtaaaagcgatcagctttacaggcgtgttgataatgcattgccagctaacgcaagagtatctgcaaacaacacagcggaagcgctggagaggaaagcggatgaattaggcggatgggaaaacctggacacgattgagaagaatgtgtttaaggcagtcaaccccggtcaggatggcgttctgacgtatgccaatctcaataagcagcgccggttggtggggcaggctctttataaaaaccgtggcccatataaagacgcagacgagggtgcgctcaaatatctgtaccggcagctatctgaagatcaacgtgctgcgctcggtgaggtcggagtaaggcgtgactttgaggttgcacaaagactggttcaaatgcgtaaaaacatggaagaccagatggtggctctgcgcggtaaaaaccttacaggcgatgtcgcaaacaaaggctctcttgctgttgcttcgctggctaaaggtaactcaaagcaatttattgatctgatgaatagcctccctaccagacaaatgaggcaggaggttgccggtgtggctatacgggatatgttatcagccggaaagcgcggtgccgattttaatccggctggctttgctgactggtaccagaacctgagagcatcagggaaccttcgggtgctggctaaccatatgccgaaggagttcatgtcagggcttcacgatacgtatgtggtagcaaacgctattcgcagggcaaagtcattcgagataactaccggaagactgaacgacttcactaaacgttttgatgcggttactgctcaatatgagttcgcagccaagcatgctgaaaaacttggttctgtggttggcgcaaatgccgggccacttggtgcgcttgcgggaggttcactcggtgcaagaatagccgctaaagccaggaagctcggcggggctgaatcaagtgccgcagctgaaaaacttatagcatcgactgagtttcagcaggctgcaaaaggattatccacaccagcaccacgcggtcggtcacgcatcggacagatgtttgatgaggcaaagttaagaacgtctcaggcatggcgtgatttttatgatgtgctgccagtaaaggacaagcgcattatcgccagaattggttttctgtggtggctgatgcaggatagtcaggaagaagagcaataa

SEQ ID NO: 280339 - DNA, 1389 bp, Morganella morganii
atggcaacctggaatcaaggtgtaaactcaggcgggctactggctggtatcgggcagtccaacattaatgccccgcaggctggtgacgttaacgcaactcttggcatgatccgtgagaataatgagcgacataggggcggtgctaacaatgtggggttgcaggcattacagggtttgcaggggataagtgagctttataaggcggaccagcaggcacagagacagcaggagtttttccagaaatatggaacagcacgcgctgccggtgatactgcgtccatgcgtcagctgttcgcagaattccccgaaatgaatgagcagatagggagaggcatggaaggaatctcagccgacacccgcgaatcactcggtaatgtggccgcaaactttcgcatggcagttaatgccggaacaggtgatcagttcgttgccaaaaacgcggctgaactgatgcgtctcggtattgacccgaaagaagcacagcgactggctaaggctgatccgaaaggcgctgttgagttggctgacaccatcggcatgagtgcgctcactcctgaaaaatactttgatgttattggtgccaatgaaggccgtcagattgaccgtgagaaactggctgaaacagtgcgcagcaatcaggctggagaggctcttactgccagaggtcaggatgttcaggtaagaggccagaacctaagttaccagtcagcaatgacagggcactctattgccagggaacgactgaatctcgaccgtgaattaaaagcgatggagacacaggagaaggtattagaccgcaggttagccagggaaacaaacgaactcaagaggactgagcttgagcaaaaacttgatggcattagaacccaaaaagaagcagccaaggcagagcggtatgacaccgttgcaagtcaggttgattcggcagacagggcaataaaaacggcgcagagcatcattaattcacctggttttacaggatattttggggtgaacgtaaacccgtttggtagccggtttttacctggtactgatgcatcagacacctcggccatggttgatactctgaaatctcagggctttatgtctggcattcagcagatgcgaggtatgggggcgctatctgatgctgagggtcggaaggttatggatgcaattggtagccttgattccggtatgtcagagaagcaggcaaagaaatcaattgagggaattatagaaactttcgagcagggaaaaaaacggttggaaagcagatatcctgatgaattcagcaaatactcaggcgagcttaaccagagtaaatacggcttgccgataggccaccaggaaggcgggtatacgtataaaggcggagacccttcagataagaataactggagcaaataa

SEQ ID NO: 280340 - DNA, 660 bp, Morganella morganii
atgctgattatttcagagaaattcagaaactcactgcaaccaatgcatggttacatgaaaggcggtggtgatggcggcgcgggcgctcaggctgatgctacccgcgaagctactgcgctacagcgtgaaatgtggcagacgaacatgcagaaccttgctccgttcactccaatggcagagcagtacattaaacagcttcaggggctttcaacgcttgaggggcaggggcaggcattacagggttattacggttcacagcaatataaagacatggctgatcaggcgcggtatcaggctcttaatgcggcagaggcaaccggcggtcttggttcaaccgcaaccggaaaccagcttgctgcaatagcccctacactaggtcagggctggctgtccggccagatgaataactaccagaatctggcaaacatcggtcttggggcgttacaggggcaggcaagcgctgggcagaattacgccaataatatggggcagctgctgcaacagaacgcagcagtacaagcagcaagtgctaaccgaccgtcaaaattcggtggaatgatgaccggcgcgatgggtggggcggcggctggtacggcgatcatgcctggatggggtaccgcaataggcgcaggaattggcgcgctggggtcattattctaa

SEQ ID NO: 280341 - DNA, 462 bp, Morganella morganii
atgaaaataaaactaatcgataacattgctcgcctgcgttctttcctcaatgaccggactaataccggaaacattgtcgacgaaggcgatcattaccaaataaagcaggatgctgtttatctcggaatctatgagggtttaattctcaccggtgttcatgaagtgcgtaatttctggcactcagttgttgagtgtcacgctgtttatgatgccggattccgtgggcagtacgctctggaggggcacaagcttttctgtgagtggctgcttaaaaacagttccttcacaaactcggtaacaatggttccggacacgactaaatacggtcgcgttattatccgcatgctcggggctaccagaatcggacacctggatgatgcttatattagtaatggttcgcctgtaggtgtcacgctgtatcagctaaagagatctcaatatgaggagttattaaaatgctga

SEQ ID NO: 280342 - DNA, 744 bp, Morganella morganii
atggctgacgaaagtttaaaaaacccaatcacagtgacagcggtaggaattaacgctgcgtcgctacctgtcgtgttttctcctgcttaccggatgtatgtgctgtctcagtcactggatttcaccagagtgacagggaaagcaaatgaggccggtcagggagcatatgatgcacaggtaaaaaatgatgagcaggatgtagtactcgcagaccatgagctccgcattcagcagctgcgcatagaagttgatgaccatgagctccgcattacggccaacaccaacgcaattcagctgcttgatgtccgcctgaccacggcagaaggccagatagtcacactgcgcagtgatgttgattacctggcaggaaaggtcgtcgaaattgaaggcgacatggtgtcgaagtctgctgccactgaccaggttattcagtctgccggcgggtcattcattatcggcaatgcggtaactccaaccacggataaattgcaggttattggcgatattactgcctcatcatcgtacaaggtcagcggcgttaaggtggtaggcagtcgtgttaccggcttcactgcggcaaccggttcatcgctgaaaggtgcgtttaatgccagccaggcatacacggtaagcgccacatatacgcaatcagaagtacaggcgatggcttccggccttactgctgcacgacagcgcataaaagcccttgaagatgccatgcgttcacacggactgattgactga

SEQ ID NO: 280343 - DNA, 441 bp, Morganella morganii
gtgacaaagaaaaacaaaggtggtcgcccgtctgattacttaccggaagttgcagaggatatttgcagtcttcttatgcagggtgaaagcctgagaaagatatgcgcaaggccaggaatgccagcaatcagcactgtgatggtgtggctgcaaaggcatgaagagtttatggaacaatacgcgcgcgcacgcgaggttcaggctgagattttagccgaagatatcattaagttagcagatgccgcagttgaggaaggagcggcagttgccaaggctcgattgcaggtagatgcccgtaagtggtacgcctctaaaatggcacccaaacggtatggtgaccggattcaacatgatcagcggataactatcgcagatatgacagacgaagaattagacagggctattaaggagaaaatgaatggacagggagcagaaaattga

SEQ ID NO: 280344 - DNA, 372 bp, Morganella morganii
atgccctggaggataataagaggggaagaaagttatgcctcccgcttcatctggctgatgtgtgagaaagaaccacagctgaaaatagcacagcaactggcgttggacttttaccggatcttgaaaacgaaaaacaagccacagctaagcaggtggttcactcatgtcagcgaaagcggtctggttgagcttcaacgtgttgaagccgggatggaagctgatgcagcagcaatatgtgaagccattaccagcaaatggagtaacggtgtagtcgaggggcatgtgaatcgcctgaaaatgctgaagcggcagatgtacggacgtgcagggttcgagttactgaggcgtcgggtgatgagccctctggcttga

SEQ ID NO: 280345 - DNA, 486 bp, Morganella morganii
atgctagcctgtgcgacagggatacccgccctcagtacactaatcagtctgccgcagggaaaacccgcttttcccagtacctctctgcccggcttcagcatcagccatagcggtgatctgattgctttagcgctgatccacggagcagaaatcggtctggatatcgaagttaatcgtccgcgtccggttcatcgtattcacaatctggcctcacgctggttcagtccggaagaacaacagcgccttcggtctatcccgaatgacgcagaagtacacactgaattctggcgctgctggacggcacatgaggcggtaataaaacaacggggagatgtagtctggaaaattcgtccggaagataccacagcagccactctggctgagcaaaaacaggcactacatacttggtatacttctgagtatgtagtatcactgtgctgtcctaatcatctgactgttaccacaccccggtttattgattggtag

SEQ ID NO: 280346 - DNA, 1227 bp, Morganella morganii
atgatgcatcgggttgttatcacaggtatgggtgggattagtgccttcggtgaagactggagttccgtaaaatcccggatactgaaaggcgaaaacgccgttcaggtcatgccggagtggtcagaatttgacggactgaacacgcaactcgccgccccggtacccgaattcattttgcctgaacactacacacgtaaaaaaatccgctcgatgggaaaagtatctctgtttgccacccgggcctgtgagctggcactgacggatgccggacttatcggtgatccggtactgaccagcggacaaaccggtattgcctacggttcatctaccggcagcaccaaaccggtcagtgaatttgccacaatgctgacagaaaagcacacacataatatcaccggcaccacctatgttcagatgatgccgcacaccactgctgtcaatgcgggactattcttcggtctgcgcggacgggtgatcccgacctccagcgcctgtacatccggcagtcaggcaatcggttatgccagtgaagctatccggcacggctatcagaccatcatggtcgccggcggcggggaagagttgtgcccgtcagaatcagcggtatttgataccctttttgcaaccagtcagaaaaacgatgcgcccaaaaccacgccctccccgtttgacagcagccgtgacggcctggtcattggtgaaggtgcaggtaccctcattctggaaaattatgaacatgcggtcgcgcgcggtgcaactatctacggtgaaatcatcggatttgcaaccaactgtgatgctgctcatatcactcagccgaaagtggaaaccatacagatttgtattgaaaaagcactgaaaatggccggtgtccagccacaggatatcggctacatcagtgctcacggcaccggaaccgaacgcggggatatagcggaaagccaggccaccgccaatattttcggcgccaacaccccggtttcctcgctgaaaagctacttcggtcataccttaggtgcctgcggtgcactggaagcgtggatgacactggcaatgatgcacgaaggctggtttgcgcagacgctgaatctgaataacccagacccgttatgcggcgacctagattacatcatgcacgaaccacgtaaaattgataccgatctgattgtcaccaacaacttcgctttcggcggtatcaatacttccattgtcatacgccggatttaa

SEQ ID NO: 280347 - DNA, 744 bp, Morganella morganii
atgatgataaacagtaatcgtacagtcttgattaccggagccagcaaagggataggtaaagcgatcgcagtgaagctggcacgggacggatttaatattgtggttcactatttgcaggatagtaccggcgctcaggcaaccctggcggatatcaggtctgcaggcggccacggccgtttactgtcatttgatgtatcactgcgggaagaaaccgcggctgtactgacacaggatatagatacacacggagcctattacggcgttatctgtaatgccgggattacccgtgacggcgcattccctgcgctgtccggtgatgactgggacagtgtgttgtcaactaatctcgacagtttctacaacgtgattcatccgtgcatcatgccgatgatcggattacgccgcggcggacggatcatcacactgtcatccgtttctgggctgaccggcaaccgggggcaggtcaattacagtgcagccaaagcgggtattatcggcgcaaccaaagcactggccacagagctggccaaaagaaaaattacggttaactgtatcgcaccgggtctgatagagaccggcatgatagcaatggaaccggcggcgcttgaacaggccatggcaatgatcccgatgaaacggaccggaaccccggaagaagttgccgggctggcatcgtatctgatgtctgatattgccggttatctcacccgccaggttatttcacttaacggaggaatgttatga

SEQ ID NO: 280348 - DNA, 480 bp, Morganella morganii
atgacatacggtaaaccagcagagtatctgccgcatacagctccgatgatattgctggacaacgtcatcagtatcactgatgaaagtgctgagtgtgaagtcaccatcagtaaacagggtgttctggcgcgctttctcgacgcagaatgcaaccttcccggctggtatgctattgagttattagctcagacggtcggggtatggtcaggctggcatcagcagcaaaaacctatctcacagccggaaatcggactgctgctcggcggcaggggcataaaatgcagtaaaccggtatttaccgtcggaacccggctgcgggtacgggtcagattactgctgaaagatgataacatcggcagtttcgaaggtgagatccttaccggggataccgtgctggcaggcggacggctgacaacctgtcagccggctcaccatgatttggttacattatttcagcggtcaccttaccgctgcagataa

SEQ ID NO: 280349 - DNA, 1188 bp, Morganella morganii
atgatttatattaatgcagttggtatgattaatgcgctgggagatgatacggacactatccgccgtaatctgccgcagcatactgccccgggaatgaaatcccgggaaggctggttacaatcaggtcacgcctgcgtactgggcggtacagatgccgaactgccggaaatcccggcacatttgcaggcacatgacagccggaataaccggctgctgctgagcgcactcaggcaaattcagcctgaagcggaaagaatggcggcacaatacggagctgatcgggttgccgttattctcggcaccagcacatctgggctggatgaggccgatcattttattgatgcccgtcatcatgaccgtgacgctgaaaattatcactactttcagcaggaactcggcgatcctgcccgttttttgtccgcgtatctcggattgaccggtcctgcctatactatttcaaccgcctgttcctccagcgcccgggccattttgtccggacaaagactcattgacgccgggctcgcagatgccgtaatcgccggcggggctgataccctgagccggatgccgatcaacgggtttaacagtctggaagcattgtctccggtactgtgccagccctttgctcaggacagaacgggaattaccatcggcgaaggtgcggccctcctgctgctgagcagggaactcgctgacgtggcatttctcggcggcggtgaatccggggacggatatcatatgtcagcaccggaaccggaaggacgcggagcggaactggctatccgtatggcactgaagaatgcggggcttaccccggaagatattggttatatcaatctccatggcaccggcacaccactgaatgatgcgatggagtccacagtcatcagccgcctgttcggaaccgatgtcccgtgcagttcaaccaaaccgctgaccggtcatatgctcggcgctgcaggtgcgggagaagccgcactgagctggctgatactgaaagagaatctgccgttgccggtacagacatttactgataaaccacaggataccaccctggctccctttggtcttctgacccgcccggcaacattacgcaagccggtgatcctgtcaaactctttcgcttttggcggcaataattgcgtgctgatcgtcgggcgttctgatacgcgcggagtcaattcatga

SEQ ID NO: 280350 - DNA, 567 bp, Morganella morganii
atgcgctcactttgctttctttttttgctgatcctcacaggatgcactgcaccgccaaaagacacacaaccccgtgcctggctcaaacccggcgtgagtgttgtcctgccatcgccgggactggaatcccccgtcagtgaacaacaacttctgaccgcaaccgtccgcgggaaatcacattcgctggtggcactcctggatgttgataacacaaaactgacactggccggtctttcctccatgggcgtacgcctgtttttactgcgttacgatgatacggggatctcgacggaacaatcagtcattctgccggaactgccgcccgccggacaggttctggctgatattatgctgagctactggccggtggcgcgctgggctccgctgctgcctgccggctggacactgaccgataaaggctcacaacgtgaattacgcgatgaacaaaatacactggtcagtctgatcacctattccggagacactggtacacgtattccggtccggattgataatcagattttcggctatcagattgttatcgctcatctggatcccacaccatga

SEQ ID NO: 280351 - DNA, 2325 bp, Morganella morganii
ttgactgaccgctttcccgtaactcccgggaaaatctgggttacctgttgcctgctgctcaccatactgcttatctggctgctgcctcagtcccggatagcctacggtgtgatgtcgctactgccggccggtgtgatcagtgatacctcaccagcgttatctgagggatttctgtcacggctggacaaacaactggtctggctgatcagtccgccggggaacacgcaggcacaacgggacaacgctgctgcggcctggcttgatttggtaaaaaaacaagcattcattgctgatgttaacgggccggtaaccgccggacagcaacaagcctggggcgaattttattaccggcaccgcaatgccatggccgatgaacagacacgcagcaggttgctcaacggcacgcagcaagcggactggatcatcgcccaactgttttccgccttctccggggtcagtgccagtgaactacagcatgacccgatgcttctggtccgcggctcacaactggcactgcagcaggctggcagtaaatttatgttacagaatggctggctgaccgtagccggtccggacggccggacctggtatatgttccacggtgaactaaatgataatgcgggtgatcttaaacaaattcacaatactgccgcctccctgagaacattgcagcagcagtggctgactcagtatcccggcggggagataaaagtacgcggcagcctgtattacagcgactatgccgccgcacaggcgcaatcagacatgagccgtctgggaaccgtcactgttctgggcgtatttctgctgataatcttcgttttccgctcggtcagaccactgtttctctgtctgttctccgtacttactggcgcactctgcggtgtggttgccacgctactggtctacggtgaaattcaccttctgacgctggtcatgagtatgagtatcatcggtatttcagtcgattatgccatttattatctgacagaacggatggtatacggtacacaaaacacgccggaagaaagtatccgaaaagtacgcaccgcactgctgctggcactgggaaccacggttgccgcttatctgattatgatgctggctcccttcccgggtatccgccaactggcgctgttcgctgcagccggtctgaccggtgcctgcctgaccgtcatcacactctttccggtgctggtccgtggcttacctgtacggccggttccgttcagattgcttctgttgcgctggacagggttgtggcgccaccataacggtatccgttacggtctgccgctgctggcgttgctgctctcggttaccgggatcagtcagttgcggataaacgatgatatcagtgcattgcagtcactgccggagcatcttgcccgccaggacaaagagattggtgaaatgaccggacagcgcagtgatcaaacctggtttttgatcaccggttcttctccggaagaagcactgcagcgcctcgaaggcatgcagcctgctctggatgtactgcagaagaaaggcgcattcactgccagtcagcgcctgccgttctattcacagcagcggcagactgaaaatgccgcgctgatccgtgatgccgcacccggcgtcatcgccaggctcgaagctgccggtgccgaatcaccgttcattgataccaccccgatgaatgtaacggtacaggagtggttatcctctccagtcagtcaggggtggcgcctgatgctgctcacgttgccggacagcggggaaacagggttgttactgccggtaaccggtgtccgtgattcggcagcgctggcgcaactggcagaggagaccagcggtgtaagctggattgcacggaaggcacaatttgatgaactgttcggtttttaccgtctggtactgagcatcctgctggccgtggcatttacagttatcgtaaccacatattgtcttcgtgaaggactaagccgcggacttatctgtgtgatcccgacagccttatcgctgctggtcagcctcggtgctctcggtatcagcggaatgccgctgaatctgttctcattgctggcgctggtgctggtactcgggataggcattaactacagcatctttttcagcaacccgaaagggactgtactgacatcactgctggccgtcaccgtagcactctgcacaacactactgactctcggtatgctggtcatgagttcgacacaggcaattcagggcttcggtatggcactgtgcagcgggatcttcagcgcctggctgttctccccgttgacaatacctcctgccggcagacgacataaaaacaggaataaataa

SEQ ID NO: 280352 - DNA, 600 bp, Morganella morganii
atgaaatatattgtggtaatactgttactatttgccggtatggcacaggcgctgaccattgatgagttgcgtgaggctttcgcaaatcagaaaacggtccgttcttcatttatccaggaacgtcagattaaaaatatcagtaagccattaatttcaaaaggacaaatgcttttatctcaggaaaaaggactctggtggcaacaacaggttccttttgtcaccacactgatcctgcgtgacaacgagatgatacaacggatggaaggtcagcccgatcaggtgataaccgcagaaaataatccgcagatgtttcagtttaatgccctgatgcgggcactgatcaaagcggataaagccgttctggaaacccattttacgacgacctttaccgatcaggggcagggaaaatggcaattagatctcatccctgtcaccactccgctcgacaaacttttttcttctgtacgcctgaacggttcacaggtaatagagcgtgtcgttctgaccgataaacaaggcgacactacaactattacattttcagatcaccggctgacaccggaaatactgacaactgatgaggcacactattttgactga

SEQ ID NO: 280353 - DNA, 423 bp, Morganella morganii
atgttatctgatctgcgttttaccattgatgtggacatttttattccgtttcatgactgtgatccgatggggatcgtctggcacggaaattacctccgctattttgaagtggcccgcgagcaactgttgaatcagtttgattacggctatcgacaaatgctggactctggttatgtctggccggtagttgatgtaaaagtaaaataccgccgttcggcccgttttgaacagatagtatccgttcatgccacagtggccgaatatgaaaaccggctgaaaattaattatgtcatcagtgataaaaataccggtgaaaaattaaccgccggttacacaattcaggtcgcggtagatcaaaaaaataatgaaatgctgtttgtcagcccggatatcttatttgccagaatgggaattcaaaaatga

SEQ ID NO: 280354 - DNA, 1740 bp, Morganella morganii
atgtccctgaattcgcatgaaaccgtatacgatccggtatttaaactctgtgcgctgctcccctgctacaaccatggaaagacattaggttcagtggtaggtacgcttactgcgatgggcattgactgcattattgcagacgacggcagcgatgcggaaacacagaaagatattgctgccgtacagaccgcattcccgtgttgccggatattccgtctggcggaaaataccggtaaaggcggggcgctggaagctgggttccgtcgggccgcacaatggggttatacccatgcgctgcaggtcgacgctgacggacagcatgacctcagtgctgttcccgcgctgctgaaaatggcagaggaaacaccggataaactgatttcaggacaaccggtttatgatgaatcagtgcccaagtcccggctttacggacgctatatcacccatgtctgggtgtggatagaaacactgtcgctgtcactgaaagacagtatgtgcggtttcagggtatacccgctggctgccaccctggcagtcatggacaaagtccgggtcgggcggcgtatggattttgatactgaaatcatggtgcgtctttattgggacggcactgatagccgttttttgccggtacaggtgtattacccgcatgccgggatctcacattttgatacggtaaaagataatgtgcggatctcaaaaatgcacacacgactctttttcgggatgctcccgcggttaccacaactgctgaaacgcaaacctgcaatacactgggcagcgtcggctgagcgcagaggtgttaccggcatgagatttatgatccgggtgtttacacttttcgggcgaaaaccatttcagcttttgctgttttttgtcacagccgtgttctggctgacgggcgggaaacagcgcagggcttcccgtgactatctgacaaacgtccgcgcccgcttccgggctctgaatatgcctatccctgccggactgaacagctaccggcatttcctgcgttttggcagttcgatgctcgacaaagtcgcgggctggagcgggaaactgacatgggggaaagatgtcgtcttcgctccgggggccgctgacgtgctgaatgcaccttcacccggcggaaaattgatcctcgcctcacacctcggtgatatcgaggtatgccgtgcactggcagaaaccggaatgatcaaacggattaatgctctggtcttccgcgaacatgcagccctctttcagaaagtgatagcggaagttgccccgcagtcggtgctgaacctgatttctgtcgcagatattactccaggtttagcaatcatgctgcaggataaaatccgtgccggagaatgggtggctattgtcggtgaccgcattgcgttgtccggttcgcaacagaatactcggcggatcacattcagcccgtttctcggaaaagcggcgccattcccgcaggggccttttattctggcttcgttactgaaatgcccggtggtgctgatgtttgccctgaaagaacaggggcagctggtgatccacagtgaggaatttgccggacaaatcgttttgccgcgcaaaaaccgcggggagacattacaacactatatcagtcattacgctacacgcctggagtaccacacactgcgctcgcctctggactggtttaacttttatccgttctggcaacttcctgcagacccggcatcagaggagaaaaaacatcatgttatctga

SEQ ID NO: 280355 - DNA, 360 bp, Morganella morganii
atgttgccgattgaaaaatcatctgaattagtcagcccttatgaactgattgtgacgctgaatattccggcgtcactgtcatggtttgaaggacattttgagtcacagccggtattaccgggtgtggcacaaatcagttatgtgatgcattacgccgcacaacggctgaatgtatccaccgcatttttatcactggaacaggtgaaatttctggtaccgatactgccgtcagatgacatcgttttgcacctgaccactgatgaaacacatctgaaattacaatttcgttatctggccgattcttcaccggacgctgatccgatactgatgagcagcgggaaaatccgtttatgtccctga

SEQ ID NO: 280356 - DNA, 1353 bp, Morganella morganii
atgaagaatcattaccgccccgtatcacaatggcttgccgcgcctcctgacactccggtgctgagcagagccggacacattaccactgccaccggattggcacagcaggtaaagagtctgtacgcccgcctgcggcagcatccggcggagtgttgtgtgctctgtttccgcgattgcggccattttatcgccgccctgctggcagtactccatgcagggaaaaggcctgtcttaccgggtagtcatgatccgtcattgtgcctgccattaccggagggtgaaaacagtctgctgctgacggacggttccctgccgccggatagtgagggctggtttactcctcatgagcagaatatccccgcctcggaaatatccctgccggacattccggcagatagcattctgactctctatacctccggttcaggcggcacaccaaagcgggtggataagacggtttctgtgatggactgcgaagtacgctggctggcagaatgccgccgcgataaaccagacgcagtttatgtccgcagttcggtcagccaccagcacctctatggcctgacattccgtgtctggctgccgttgtccctgggattggtgacagacatcattccggcggaatttccggagcagttaccctttcctgaaccctatatttttatcaccagcccggcgttcttacaatttatcgaccacacattggcgcctccgcactggtcattgatcatctccgccggaggtaaactcagcgatcaactggctgatgccactcagcgctgggggaacaccgttatatatgaaatatacggcagtaccgaaaccggtgtggtcgcccggcgggaacggcacgaaagcgataacaactggcggccgtttgcgggtgttacgctgaccgcggctgaagaaccgtcccgttattatctcacctccgcattgctggcatcatccgtaccttttttactggatgataagctcagtattgcccctgacggcaggtttaccctgacagggcgtgcggataacatcttgaaaattggcgaaaaacggatatccgtcacggcggtggaaaaccttcttaccggacatcccgcgatttcagaagctgcagtggttccggtgaaccgtggcgggcgtacttatctgggggcggtcattgtcaccggacaaaccatgtctgaccaaaaaatcagtcagtccgcattattcacgcagctgcgtgcttttttgcgcgggaatactgaccctctggccattccccggttctggcgcgtggtgccgtctattccgctaaatccacaaagcaaacgttcgtgggctgtattgcaggagctatttaatgttgccgattga

SEQ ID NO: 280357 - DNA, 621 bp, Morganella morganii
atgaaaaaagcagtacggttcaccggtgtatcacgggttatccgggtggcagatatcattctgatggttctgtggccctttgttgttctgtacctgctgcaggccggaaaaatacggctgaccggcgcagtactgctcggttattttgtgattcgtttcatattgttatccggtactgcccgccgcaataaacatttaacgctgacgtttgctgccactggtatcatactctgctcactgagtttgctgtttaaaagtcatcaggcactgctgtattacccggtagccgtaaataccacgctactggtcgtttttggtatcagtctgtaccggccgccgccggttattgagcaacttgcccgtcttcagataccggttctcacccccgcggcacagcaatatactcgccgggtaactcaggtctggtgcctgttttttatgtttaacggcacggtcgccctgctgaccacactgcaggatgatgtgacactctgggcatggtggaacggctttatcagttatttgctgatcggtgttctgtttgctgcagaatggtgtatccgccgccggatacatcggcgtgaatatatccgggaacatcataaaattaatccatcataa

SEQ ID NO: 280358 - DNA, 249 bp, Morganella morganii
atgaagcaggaagaaatttactcggaaatcagtgcactgctgacctcattgttcgaagttgacgccagacagatcacgccggaagcccgtctgtatgaagatttggatctggatagcattgatgccgttgacatgattgtttatttgcagaaaaaaacaggtaaaaaaatcaaaccggaagactttaaaaacgtacgaaccgttcaggatgttgccgatgtgctgagcgggctgttcgctcaggagtga

SEQ ID NO: 280359 - DNA, 264 bp, Morganella morganii
atggctgatatattgtcaatgcagaatgcattaaaacaacttattattgaaacacttaatcttgaagacatttcaccggatgaaatagaaacagaagcaccgttattcggtgatggactggggctggattccattgatgccctggagctgggactggccataaaaaatcagtatggtgtgttattgtcatcagacagcgatgaagtccgtaaacatttttactccgttgccacattagcagcatatattgactctcaaaaataa

SEQ ID NO: 280360 - DNA, 765 bp, Morganella morganii
atgtatatattacaccgcgcggaacagctccgacgtttgtttaccacgctgttctgtttcgcactgttcggtaccggcggattactgctgtcccttatctggtttaacggactgtatttactctgccgcaatacgtcccgccgggtacggatagccaggcgtacggtctgttacagtttccggttttttttatttatcacccggattctcggtgtaatgacttaccggattgagggtgctgaaaaactaaacggcgataagggctgccttattctcgccaaccaccccacgctgctggattatgtgctgatagcatccgttatgcctgatgtggactgtcttgttaaatcaaaattactgcataatccgttcatctccggtgtgatacgggcctgccgttatctgccgaatgatcagcatgatattttgctggcagagagcagcaaacgcctgtcgcagggtaataatttattgatctttccggccggaacccgtaccacacccggtgtacgttccgcatttcagcggggagctgccaatattaccctgcggtgtcactgtccggtgcgtttcatttatatccggaacagtgagacagcactgacaaaacaaagcaggtggtatgatgtcccgcaacgtaaattacattacactattgtcgtcggtgaacgtatgaccgcagatgaactgacagacccggcaataataccaacatcactgcgggcgcgtcatctgacccgagcttttgaagaaaagttattataa

SEQ ID NO: 280361 - DNA, 738 bp, Morganella morganii
atgggcctgagttttaatgtctctgaccggaccgcacttaccccgggacttaccacagaggccggctggctggcttttgtccgcggttcacagtcacatactgaagatatgcatgccccgctgcctgcatgtcctcagctaccgatgatgacagcacggcgtctgaacagcggcagtcgtcttgccgtaaactgcgggctggaaatgttgcgccgtcatcctgatgtcgatgctatcgtattcagcagccgtcatggtgaactggaacgtaaccaccgtattctgagtgaacttgccacgcaaacccccgtctcaccaacaaatttcacaatgtctgtacataacgcagcagtggggtcgctggccattattgccaaatcggtcataccggcatcatctgtctcggcagggaaagagagtttccagcagggactttatgaggtatcgtcactattgcacggcggtcatcagtgtgtgctgtttgtcgattttgacggtatcattcccagtatctatcatgatgtgctgccggacggaaaaccatttcctccttatgcctgcgcgctgatactgacaccgggaaaccaatggcaatgctcgccgcaaccgtccgctggtgtgagcggagataataacgaactgccgcagagcctgcagttttattgtgggctcatcagcgaaaaacgccggttcactgttaccggtgatacacatctgtggcactggcagaataactga

SEQ ID NO: 280362 - DNA, 258 bp, Morganella morganii
atgaagcccggtgccagaatcgccattatggagttattctgggattgccagccacatcctgccggtgcattcagcctgaacgcgtcatcactctattttacctgtatggcgaatggtaacagtcgcttctacaagctgagtgaatttgaaaaactgctgaaacaggcaggtctggttattgaacggatcgatcataaccaggggatcggacatacactgatgatttgcaccgcagaacaccctgccccgcaagaataa

SEQ ID NO: 280363 - DNA, 381 bp, Morganella morganii
atgaaaaaaatgaaaggtgttcttactgccctggcagtgactgcattattaggcggttgtgcccgtactgcgccaattatgacgccggaaacggctattactgcaaatgtatctgcagataaagtcaaaaatgcaattcttgaagccggtcggaaacgtgactggattatgacccctgtctcaccgggtgttattgaaggtaaactgatcgcccgcgatcacagcgtctgcatcaaagtcacgtataatgcaacctcttataaaatcggctacgttgacagccagaatctgagagctgacgatggaaaaatccacaaaaattataatcgctgggtgaataatctggataaagatattcagattcgccttgcggcacaataa

SEQ ID NO: 280364 - DNA, 222 bp, Morganella morganii
atgaataccatcaataccaccacatcctcttctctgctcgatgaaccactcgtggacatgaaattcatcaccaaatttaccggattaacggataagtggttttacaagctgattcaggatggtcagttccctaaaccgataaaattcggcagcagttcccggtggttcagaagcgaggttgatgcctggttgcaggagcgtattgctgagtcacgtaagtag

SEQ ID NO: 280365 - DNA, 579 bp, Morganella morganii
atgaaaacatataacccgtattaccagcaaagaacagagggtgtgattaataatgctctcagtgaattaacccgcattatggcactgcgtgttgatcttcgtttaccacccgattatccggacagcccggatgactctaaagtaataacccgattctttgactcactgaaagctaaactgcgttatgacacagtccgtaaagcgtcccgctgggggcgtaatctcaataatccgctttattatgtctgggtacgtgaatacggtgaaattaataaccgcaggcattaccacctggtcttattcgttaataaagacatttatcattcaccgggagtttataacggagaaaataatctggcctcttttattcagcaggcctggtgcagtgccaccggtttaaggtacccggcgtattcccgtctggttcatttccctgagcacggagtcgtttacctcgacagaaacagccctgagctatctgcacagctcgcagccttaaaacaacggacggactacttagccaaagatcacaccaagccttaccacgatggtttccggtcattcggaaccagccggtaa

SEQ ID NO: 280366 - DNA, 954 bp, Morganella morganii
atgatttataaagaaatgcgggaagatttcagatttctgttcccctataaaaaggatgttgtttacaatgatgtattcaatccggaaagaaatttccgggaaaccatcaataaaatacgtaatgaatactgcctgaattgttatgacagtgagtacaaaagggatatcgatttaatcagaataatagataatggtaaatttccggaaatcactgatggagtaatgaggattagtggtggtgaaaaaacgatcagacaactggatggggttttcagagtaaaggaacggatgtatgacaccattatgaaataccacaaaaatattttaaaaataaataaaaaggctgttttcttatgtttttcactgtcagttaacagaggtgattcgtttcataaaaataaatcatctgaaatcaccaatgcttataataaattttttaagaagttaagaactgacttcttcaataacatcaggtcgcgggcgttttacaaaaaaaatgtcattggccacttctgggtgtcgttacaggaatccggtgaagagtatatgtatgtccatatcaacttctaccttaaggataaacaatacaattatcttcttgggcgggaaataaacagcgtctggtttgaaattcttaaaaaatataacgcaaccggacaggccaggcattttacgataaccgaaagttatgaaaacagtgaggcaaacgacaatgcagaaagaaagaaaaaaattacctgtaaaaaatatgaactcttcgattcccaaagtgaaaccagaaaggtcatagatatttatcaggacttaaacggaggaaatcaggatgccgaatatagttttactaataaatcaacaggtctgccgtttagtttttatgttaaatcgctggtaaaaaaagcattccatatctcaggaatgcgcagtttcggtaccgcacaggcgcagcaaaaataa

SEQ ID NO: 280367 - DNA, 747 bp, Morganella morganii
atggcaacctaccgtatcgaccccgacctcgcatttatcggtcagtgcagcaatgatgacctcggtctgctggtctctgttctgactcacgacagcaaagacggcaaaaagcgcctggcggagtctctgaccacctccccggaatatcagctcttttaccccgaccatcagaagtactggcctgccatctgtgccgaactgcaggccttcggagccaacagtctggccacgctgctgcgcggcaacaaaggtgtactctaccgtgaaattctgatggatgtctgcagcagaatgaaagtaaagcatgcaaaggaggacagtacagaaacagctgaaatcaacctcctgatgcagatactgaaaaccagcatcagtgatatgtcaccggctgcactggctgccctgtcacaggaaatgaaactcaacctgactaatcccactccgcagctcgttatgatggctctgcaggcagcggtaaatgtctccggggtggctgcgctggaactcgcttccatcgcctctttcggcgtgatacaggcaatggggggaatggcaaccacagccggtacggccggaatggcttctgtattcttcggctcccgcattctgggcatactggccggtcctgtcggaattgcgctgagctccgcatggctgatagccgatatcgccggtcccgcttaccgggtcaccattccggcctgcatcattgtggcgtacctgcgccagaaggccctggcggcctga

SEQ ID NO: 280368 - DNA, 675 bp, Morganella morganii
atgcatacgtcagattcacgccatgaccggcttgcgttccggctggccatgattatcagccgcctgttccgcggcgaaacactgtatccggcacagctcgcccgtgagtttaatgtctcggcccgcacactgcagcgggatttcagtgagcgcctggtctttctggacactgagccgtatcagggcggataccggctggccgccggtcagcgcccgtaccggacagacagcgatatcctgtactttgccgatatcacccatatcaccccgctgtttccctcgcttgaccgcaggctgctgtccgttctgctcagtccggaaaacggtgccccctgtctggtctaccatgagccaccgcaatccgccccgacgctgttcggcggcttttatgtggtgacacaggcgattgtccgcaggcgtctgctcagcttccgctgtgacggtcaggactatgagggcatggccccctacaagctgatttattttcagcgggactggtatctgtgcggggaatggcagtctgccctgcgggtgttccggttcagtcagttgcagaacattgccgtgtccggacgccgtttccgtcaggatgcggttatcgcacggacagttacccgtcccgaatttatcaccgcattaccccattatcagtttatccgttcattaatcacataa

SEQ ID NO: 280369 - DNA, 441 bp, Morganella morganii
atgacattatcagcaattttgctgcatgaacccgcagccatcaaaagcaatctggttcatccccgcggcagagacacattctggcggttttatttcggcagcgtgccgggctggcagcgcctggaaggcgacatttttaagatgatggataatctgtgtgaaatgtatcacggtgcattctgggagttcagcatgctcaccaacggcggcgcatttatctggcctgacatgattgaaacgtcactcccgatggttaacccgcataacggtaataatgcggaactgagtccggaagccgcaggcattgccgtgtgtttaatgacgttcagtatctggtcattccggactgaaagcgaagtattagttgagtatttttatcagttgcgggactacgccttacagcatgacgagtgtgctgctattttccgtcttattgattaa

SEQ ID NO: 280370 - DNA, 333 bp, Morganella morganii
atgaacaatacagcagtacccgcgtcaccggcggcagtctggcagacactgctggcttacctgctgcaacagcactacggcctcacgctgaacgacacggagttttgtgatgaacgtgtcattgaggcctgtctctgccggggaatgtcgttgtgtgaggcactgaatgcctttgcggagaaatacgccctggtccgcactgaccggcgcaacaacagtatcactgagccgtcacacggcatcactgcgaccgatattctgcgggcacggaaagcaactggtctgacagtacaccgcagaactcacaccaccagccgatacacctctgtataa

SEQ ID NO: 280371 - DNA, 1167 bp, Morganella morganii
atggaaaaagtcatgataattgatggtctccgcacctcaatgggccgctcaaaaaacggtatattccggcatgtccgtgcggacacactctcagcagaagtgatgagtgcagtgataaagcgtaacaatatcaatgcagccgatattgatgacattatctgggggtgtgtgcagcagaccggggaacaggggtttaacatagcccgtcatgccgccctgctgacagagatcccgcacaccgtgcctgccgtcactgtgaaccgcctgtgcggttcatcaatgcaggccctgcatgatgccgcccgcctgattcagaccggtgacggtaaactggcacttgcaggaggtgttgaacatatgggtcatatcccgatgacacagggtatcgatatcaatccggctgccgcactgcacacggccaaagcgtccggcatgatggggctgacagccgaagcactggcacgacagttttctgtcagccgtgagtcacaggatgaatttgctctgcgttcacatcagcgggccgcacaggcattccgtgatagcagattcagccgtgaaatccatccggttcagggtcataaccaggccggagtacctgtcattgccacccgggatgaaaccgtacgcgataacggcagtcttgctgaactttcggcattgagtccggtatttgatccggtcagcggtacagtcaccgccggtaattcctcagcaatctcagatggtgcatccgtaactctgctgtccggggagcactatgcccgtgagcatggtttatctccgcgggcggtgattcgggcgatgagtgttaccggctgtgaaccggcactgatgggatacggaccggtacaggcaacacaggcagttctgaaaaaggccgggctgacgctggcagatattgatgttatcgaactgaacgaagcatttgcggcacaggcacttgcctgcctgaaaggtatgggattatctgactgttatgatgacaaagtgaatctgcatggcggcgcgattgcactcgggcatccgctcggctgttccggcacccggattatcaattcactgctgacggtcatggagcagcgggatgcgcagttcggcctggcaacgatgtgtattggtttcggtcaggggatagcaaccgtgattgaacgtgtccgcagctga

SEQ ID NO: 280372 - DNA, 303 bp, Morganella morganii
atgaaaaggatatgcaaaggtctaatcgtaatttttactgtgtcctggctgacagcacctgcgtatgcatctgacccttgcgcctcggtactttgcttatatggaaaagcagtcgggcaaggtgggggaagtgagtgcagaagtgctgaaaaggacttttttaatattctgaaaaagaaaaaagggagtattcgctggagtaaaacatttgatgctcgtaaagattttttaaatcagtgttcaacggctgatcctgctgctatatcgaaaatcatgagtaagtttggtcgtgtcagaggttaa

SEQ ID NO: 280373 - DNA, 414 bp, Morganella morganii
atgaaaaaaatacttatgatcagtattcttctcctcacagcctgttcctctccacctgaaccgccacaggttgaatgggaaaaaacgcctgaagttatgaatacacaaataatgaactggaaaccaacatccggtgttattaaatcagataatataaattccttatggagtaaggtgttgcctgattttaaaccagaaaatcgtctttacgatgattctgttttttatgcagttgcccactctgaaaaaatagttgtaaggacatcttcttttgatagttactggtcagcgaaagactggctaagaaaaaatggtgcaacaggtgttattgaatatcagccactaaaaagatggttgaataatgactatgttgaaatctccctttcgagaataaatgttcagaggttgccatga

SEQ ID NO: 280374 - DNA, 1836 bp, Morganella morganii
atgtctttaaaacttccagataaaggccagtgggtttttatcggtctggttatgtgtctcgtgacctattatgctggttctgttgttgtttatttcctgaacggaaaaacaccactgtatatatggaaaaattttgattccatgttgctctggaaaataataacagagagtaatatacgtacagatatcagactgactgccataccttctcttttgtcaggtatggtttcgtctctcattgtgcctgtttttgttatctggcaactgaataaaatggatgttgctctttatggtgatgcgaagtttgccagtgacaatgatttaaaaaaatcaaaactgcttaagtgggagacagaaaatgatacggatattctggtcggcgcgtataaaggaaaatatctgtggtataccgccccggattttgtatctcttggtgcaggaacccgcgccggtaaaggtgccgccattggtatccctaatcttctggtcagaaaacactctctgattgcgttagatccaaaacaggaattgtggaaaatcaccagtaaggtgcgtgaaatactgctgggtaataaagtttatcttctcgacccattcaacagtaagacacatcagtttaacccccttttctatattgatttaaaagcagagagtggtgctaaggatctgcttaaactgattgaaattctgtttccgtcttacggcatgacaggggcagaagcgcactttaataaccttgctggtcagtactggacaggactggctaagttgcttcatttctttattaactatgagccgtcctggcttaatgagttcgggcttaaacccgttttctcaatcggttctgtcgtcgacctgtacagcaatattgaccgggaactgatactcagtaagcgggaagaactggagggaacaaacggacttgatgaaaacgcgttgtatcatttgcgcgatgccctgaccaaaatcagggaatatcacgaaacggaagatgaacagcgttcaagcattgatggttctttccgtaagaaaatgagcctgttttatctcccaaccgttcgtaaatgtactgatggtaatgatttcgatctccgtcagttgcgacgggaagatatcactgtttatgtcggtgttaatgcggaagatatatctctggcttacgattttctgaacctgtttttcaacttcgttgttgaagtgacattgcgtgaaaatcctgattttgatcccaccctgaaacatgactgcctgatgtttcttgatgagttcccttcgattggttatatgccaattattaaaaaggggtcagggtatattgcaggttttaaacttaaactgctgacgatttatcagaatatcagtcagctaaatgaaatctatggtattgagggagccaaaacgctgatgagtgctcatccatgccgtattatctatgctgtcagcgaagaggatgatgccgcgaagatatcagaaaaacttgggtatattacaaccacatcaaagagcacaagcaagagccggggacgatcagcttcacagggcgaatcagaaagtgaagcccgaagagcactggtgcttccacaggagctgggaacgctggactttaaagaagaatttatcatcctgaagggggagaaccctgttaaagcagaaaaggcactttattaccttgatccatattttatggacaggttaatgaaggtcagtcctaaactggcatcattgacgatggaactaaataagacgaaaaaaatatttggtgtgaaagggcttaaatatccgtcaaaagaaaaaatgctctccgtaggggagctggagtctgaggttttgctatga

SEQ ID NO: 280375 - DNA, 1032 bp, Morganella morganii
gtgaataacgaaaacagacatctgatttatgatgtggttaacgactatttttatcactggctgaatgagattgatggtgtcacggaaatcgctgttaaccgaccaggagaaatatttataaaggtcaggggaaagtggcaatggtatgaacaaaagatgagttacagtgattgtctttcttttgcatccacactggccgattttcatgacggcggttctgtgactcctgaatatcccctgcgttctgccacgcttccgggtggagaacgtgttcaggttgtgatcccaccggcaactgaaaaagatactgtttctataacaatccgtaagccgtcaggtatttttatcagtcatgacaaatttataaaacagggattttattcacgcgtcagtggtttaagtgatgactctgttatggaagataatatttctgctttaatcacttccggatattttgaacgggttatacctgaatcactgagtcaggggaaaacgatagttttctgtggaggaacagggtcaggtaaaaccacctttgcaaatgcctgtctggaatatataccgcatcatctgcggtgtatttctattgaagatactgatgaggcaaaattcagatttcacaaaaaccatgtaaaactttactatccggcagagggggagagtaagattattacctcagcgagtcttctgcgttcctgttttcgtatgaatccggacaggattctgatgacagaaatcaggggagctgaggcatgggattttctgaaagcatcgagttcaggccatgcaggaaacattaccaccgttcacgaaagtagtcctgaatatgccgtgcttgggattgtccagcgatgttatatgaatcctgaatgtcagaatctaccattcaatgtcattttaagacgtgtactgagtaatattgatattatcatgagtattaaataccttgatgatgaagattttcggttcgcttccggcatttactacagacaacttcattttgatgattatttcagaaaactgaaggagtga

SEQ ID NO: 280376 - DNA, 1206 bp, Morganella morganii
gtgactgaacaggaaaataaaatcccgactgcaaccgaaattgaacagcagctacgggaacgcagacagaaagaactggaacaggccgggaagactccggtagaagagcctggcaagccagcattgcagcttggtattgaaaaacttaaaaagtcacgtaaagggatgattatcctcgtcgtgggttttcttctgcttgctgccggtgtttctgtttattatatcccgtccattatccgttctgtgtcgtcaggggatgagaaacccgcaagtcagccgcttgcaaccggagcggctaaacgtcagaccggactgagcgaagatatcgatccttttaataccgcccagaaaaaaacagagaaacctgaggaagaaaaagtcatttcttctgaaaagactgaaccgccggtaaataaacagcagagtttcagccgtgcacttgacgtttctcttgatggcagcctggcgggaaacagccgcagttcagcggaaacgtcagcctcacatactgcggccagtgagccagaaagcgataaaaaggatgaagtaaaagcaaccgcgcagactaccgaatctgtaccactggcgaaaataacgaagctaccgtatgacccaaatttgtttatcccggaaggaagagcaattccctgctcactggacaggcgttttgtttctgatctggcggggaaactggaatgtacgatcaacagcgatatatacagcgccagcggcaatgtaaaacttatcgaaagaggaaccgccgcaaaactgatgtataaggccgggtctttaaatcatggacaagggcgtgtgtttgttatggcttacaagctacgtacccgcagtaagccttttattgatattcccttggttgactcacaggcggctggcgcgttaggcgaagccggtgcttctggctggattgacactcatttcagtgaacgttttcttggtgcaatgatggtcgggatgataccggatttaagtcaggcggccagtggtattgctcagaataacagggacagtcagacggactatacagcgaacagccgccaggcatttgctgatatagcacgcgaagcattttctaatagtgtgaatatcccgccaacgctttataaaaatcagggagaaattattactctgattgtcggtcaggatctggatttttcaggtatttataaactgaaaatgaaagggggttaa

SEQ ID NO: 280377 - DNA, 903 bp, Morganella morganii
atggcgcttctgatggcggcgcacgtctgtcatgctgctgttcttccttcaggcagtcgctttgacccacgcaatcagatagtcagttataaccccaataataccaccataattaacagtgccgttggatacaccaccacactggtatttgatgaagatgaaacagttatcagtgccagaactggttttccgcagggatgggcggttaataaagaagataacctggtatatctggaagttcgtcctgttaaacagactgttcagaaaaataatacggatgaaaacggtaatacctcttctgaatccgtcagtgttgctcttgacccggaaaatgagcttgaacgctggcgaacgaatctgtttgttcgcaccacgaaacgtaattacagcatggagctgaacgccagaacgttccgacagccggagaaaattgcgtttgtggtgaattaccagtatccgcaggaacgccggaaggaacaggccgaaattgagaagaaacgcacagaggctcttgccagacgccaggaggagcaggcaatcaaccgttccctggaaaatgcgaaatcgccccgtaactggcagtactggaagcgggttgctgaaggcagccaggatatcagccctgattatgcatatgacgatggccgttatacctggtttggcttcagtccgttaaagaaaattcccagcatcactgtgatgaacggtacacaggagacacttaccgatcctgtggttaaacagagcgggagttttacggtagttggcgtaccggtagataagcgttttgttttacgtcttggtgagcaggtggtggggattgagaaccagggcttcggaaaagtacgtttaccagccggagatacggtatccccggatgttaagaaagaggtgatccagtga

SEQ ID NO: 280378 - DNA, 714 bp, Morganella morganii
atggaatttaaacttcccggatttaaaaataaaaaagacgttactgactcatcagttttgtttgaagaaaaaaacattgcactacaggagagaatgaatcgtatttataaattcggtggtatcggaggcatgttaattggtgggctgtctttacttgcattaaatgcagcattaccactgaaaacaacagttgttgatgcctaccttatcgataaggttacaggcgtggctgaacgtctgacttctgttaaaaaggaacatctttctgaaaacgaagccattgcccgatattttatcacccagtatataaaacatcgtgaaggttataatttttttagtctccagcatgattatgattatgtaatggcttacagcgcggagaatgtcgcggcagattataacgcattatttaacagtgaacaggcaccaaaacttgtttataacaaagcagaaaaaacggcaatggttcaggataatccatctgtcataatttcaccttcgtcacgggcagatgataaagatatcggtgcgtatattcgttttcgtctgaccatcagggatgttgctaccggacaaacccgccaggagttctggaatgttcgcctgacttatcgtatcgaaccgcaggttgaaatggtgtcaggggaacgtaataacaatcctcttaaattcgttgtaacaagctacgttcgcgataaagaagccagaggttaa

SEQ ID NO: 280379 - DNA, 1134 bp, Morganella morganii
atggggattgtcactggtataccggatggtactgatttatcaggtaatgtaacctctcccgcaaatgcgggaggtgttcctgggtttgattctgatttttttcagacaactcatgaagttatatttaatattctcaataagagtatatctggaaaattaagtgaatattcagatgtggcttatactcttggtaaatatggagtttctctgtatgttttatggtatgcctttactgtattagcaaggaaacaacagacacctgtacctgattttatctggaatatctgtaggttttacataatattgctttttgttaagaatacagggggaatacttacatcagcaacagatgctattgatggattgaaaaatacattggcagggggagatccgtgggtatggatggatcagttatgggtgaaggttatacaagttgcaactcttatttttgataaagatacatctactgtgcctgttgccggtgggattggtgctttattaacttatgttggtggtgttttggcattattgctttgttctatagtatttgcatctgctgaattaacattactattactttctgtcactgcgccaatatttatcatgtgtttgatgtttggtttccttcggcaaatgtttaatagctggctacagcttaattttagctcgttactggtttttctatttgcagcattagcactaagagctgggacatggcaattaaacatggcattaagtacgtctattgctacagcatcagaaaacaatcttcttcaaacgggagtaacttcattagctgctggcattttcatggcctggattatctggcaggcgaaaagttatgcttcacagattgcaggtgtgggtgttgaaggtgccatgcagggcgcagccgctatggggattggtgctggcgttttcggtgcatcccgtatggcgcgtggcgcacttggtatgggcagaaatgccggtattggtgcatggaaaggtctgcgtcgtcaggaaggcgggtttggacagtctccgggaataacgggtaagaccgctaacctggccggacagggcgttaatattggtgccaaaaagcttcgtcaggcagctattgagagggcaaagaaaatgtatggagggtga

SEQ ID NO: 280380 - DNA, 759 bp, Morganella morganii
atgaaaaagcaaattatggcggcagtcgtcgcttccctgattgttatttccggcgctcaggcggggatacctgttgccatcgacgccaacccggaatgggcgattgaagccggacgatggacagaacgccttaagcaatgggcggaaacggtaaaacattacgaaaatcagataaatgcgtacaaacaggagctgctgtcaaaaacgggtatccgtgatgtgcagggactggtgcagtccgcacagtcagtgagtcaggaactgatgcagatttatgatcaggggaatgcttttattgacgattacataaaaaatcctgaaggggcgttatcggaacaggccaaatcgttattgtcagattacagggtaacggatacctgccagaacctgggatattccggcgacctggtacggggatgtgaagcgacgttcctttctcaactggcaagcgtggaatacggtaacaagctggagagcaagcttcgtcaggacaaccagacgatgaaagaccttattgatcaagtcaaaaatgcgaaggatacgaaggccacgcaggatgcaacaaacgctgttgcacttgaacaactgaagttcgagaagctcaaatttcagtatcaaatgtatcgcgataagcaacgagatcttgcagaatataaagagaagatggctcaggcttctttcagaaaacagcaacgtgaagccgtgcctccttcttacagaaaagcttatatggcaatgaaatcatatgaggatgattaa

SEQ ID NO: 280381 - DNA, 2754 bp, Morganella morganii
atgagtactctttttaaaggtcttacgcgccctgctttaataagggggctgggcgttccgctctacccctttcttggaatgtgcattatttgtgttctgcttggtgtctggattcatgaggctatgtacgccctcattcttcctggctggtatgccatcaggcgtgtaacacagtttgatgaacgcttttttgaccttctgtatctgagaacccttgtcaaagggcatcctttatcaaacaagcgattcagcgcagtccattatgcggggagccagtacgacgaagttgatatttcaaaagtggataactttatgaagctgaaagaccagtcttctgttgaagagttaattccgtactcttcacatatcactgacaatattatcgttacaaaaaaccgggatttgctggcaacctggcagatagacggtgcttactttgagtgtgttgattctgaagatttgtcaattctgacagatcagcttaatacgcttatacgtagctttgaagggaaatctgttacgctttatcctcatcgtatcaggtgtaaaaagggcgtcagaccagtatttaacagtaaaattccttttgtgaacagagtaatgaatgattattacgagtcattccctcagtctgaatttttcgagaataaattatttctgacaatttgttttaaaccttttactacggaagataaagtaacacatttcttttcacgcagtaaaaaacaaaaagatatctttaaagagcctgttaatgaaatgaatgaaatttgcgacaggttgaatacctatctgtcccgttttcattcccgacgtcttgggctttatgaagatcatggggttgtttattcagatcagttatctctattccagtatctgctttctggtcgatggcaaaaggtcagggttagcagtagtccgttttatacatatctgggaggaaaagacctgttctttggtaatgatgccggacaaattaccgcgtcagaccatgcccggtattttcgttgcatagagattaaggattattttcaggagacggatgccggtattctggatgctctgatgtatctccccgttgagtatgtcgtgacatcgtcctttactgcgatggataagcagtcagcgattaaggcgctggatgatcagatcgataagctggaaatgacagatgatgctgccaaatctttgctggcagatctgaaagtcggactggatatggtttccagtggatatatttctttcggaaaatcgcatcagaccctggttgtctttgcggattcaccggagcgtctggtgaaagacaccaatatcgtgacttccactctggaagatttggggctgattgtcacttattcaacactgagtcttggcgcagcttattttgctcagctaccaggaaattatacgcttcgccctcgtctgagtaccctcagtagtcttaattttgccgaaatggaaagttttcataatttcttttcaggaaaagaaaaaggaaatacctggggggaaaaactgattactcttcgggggtcaggtaatgatatctaccatctgaattaccatatgacgactgaacatcagaatttcttcggtaagaacccgacgctggggcataccgaaattctcggtacgtctaacgtgggtaaaaccgtattactgatgacaaaagcatttgccgcccagcagttcggtacgccggaatcattccctgcaaacagaaaactgaaaaaactgaccacggtttttttcgataaagaccgggcaggtgaagtcggtatacgggctatggggggatcttattaccgggtgaaggagggagagccgacaggctggaatcccgccgcactgccgccaacaaaacgtaatatcgcttttatgaaggacctggtgaggctgctttgtactctcaacagtgagccgctcgatgattaccagaacagcctgatttcagatgcggttgaacgtcttatgcaacggtcagatcgctcttatcccatcagtaaactacggcctcttatccaggagccggatgatactgaaaccaaacgtcatggacttaaagcccgtcttaagccgtggacgcagggggaagagtttggctgggtgttcgacaatcgggaagacacgtttgatgtcgataacctggatgttttcggtattgatggcacggagttcctggataataaggtgctggccagtgcagcttcattctatctcatctatcgggttaccatgctggccgatggtcgcaggcttcttatctacatggatgagttctggcaatggatcaataacgaagcgttcagggactttgtttacaacaagctgaaaaccggacgtaaactcgatatggtgcttgtcgtagccacacagtcaccggatgaactgattaaatcacccattgcggcagcggttcgtgagcaatgcgccactcatatttatctggcaaacccgaaagccaaacgtagtgaatatgttgatggtttgcaggtcagggagctttattttgacaaaattaaagctattgatccgctgtcccgccagttcctggttgttaagaacccacagaggaaaggtgaaagtgatgattttgctgcttttgccagactggagctgggaaaagcagcgtattacttaccggttctcagtgcatcaaaaccccagttagaactgttcgatgaaatctggaaagaaggaatgaagccggaagagtggcttgatacctatctggaacaggcgaacctgatttga

SEQ ID NO: 280382 - DNA, 297 bp, Morganella morganii
atgtcgaaattaaatctgaataaacgttatttaacgctttctctatttatggctgcgttgatgctttgtgttgcagaacctgcttttgcggatgatgtgtctacgaagacaactggttttttacagaaaataattgattttttaacggatgttcgtaaaccggcaattacaattatggctcttgttattggatatattgcattattttcgcgtcaacataccgcatggatagtcccactcgttatcggaattatcatctttattgttgcaccatatattcctgactggcttgcgtaa

SEQ ID NO: 280383 - DNA, 648 bp, Morganella morganii
atgttatctacttctacttttcttgcgcttgccatgcaatgcgctgccagcgttcatcccgacacaacgcacgaagttgccagggttgaatcaggttttaatccatatgcgattgcggaaataataccaaaggttaaacgcaaacctggtgataaaggcgtagtatcttactttcctgaatcaaaggaggcagcacttagtatcgttaaaaacattgaatcacggaaccatcgttactctgtaggacttatgcaaataacgagtaccaattttgcaaagttcggtacgacagcagagaaaatgtttgatccatgcgaaaatcttaaggtatcagaaaaaatactggttgactgttataaacgaggtggcgacttagtgcgcgggttgagttgctattattccggcaatccagaaacaggagtaaaaccagaacctgaatttaataatacaagttatgtacaacgtataggattcagccctcctgataacaaaaaaaattttattgttccctctgtaaaggacatgattaaaaaggagaacaagacgactatcacacctgaagaaatcattatatatcctcaatacgccatacgtggcactgtatcgaatgaaaaggaaacaaaagatgtcgaaattaaatctgaataa

SEQ ID NO: 280384 - DNA, 222 bp, Morganella morganii
atgactgttacccggaaaaaaagcgcaacgagacgcaagccccaacgtaatacactctacctaccctcaacttctcgtgaggaactggataaaattgctctggagattggctatcgtagggggcggcgtatatcaagctctggtgttgtccagtacctcattaaaaaatattccagtcaggctattgaggagctgataaacgaagacgacttcgatgactaa

SEQ ID NO: 280385 - DNA, 507 bp, Morganella morganii
atgaaatggtatgttttgcaattcaccactacgagatttgcagcggtttttgcgcatctcgaacgcctgagcttttcttacttctgtccaatggaaacagaaaggtatcgtcgcccggataagatagtttcatatcgagaaagatgttttccacttttccccggttatctttttgtccaagcagattttgaagaggttcattctactataataactgctatcccttacgtacaacgctttatctcatttggcggtgaacctttacctgtatcagaagatgtgattgaggtgcttttgcggagacaatcgcaatccgctcaaacaaatcttttgaggaaatcaattccacacgaatttgctgaaattctccttatggaaaatccacaacaaagaagtatggctttcatccattatctcactgagagaagcttaacccacaaaatgaaacggaagaaaaatgactgttacccggaaaaaaagcgcaacgagacgcaagccccaacgtaa

SEQ ID NO: 280386 - DNA, 1167 bp, Morganella morganii
atgggcgtttacgttgataaagaatatcgtgttaaacggaagtcatcagaaaatggtcgtaagtcagctttcgctcataaagtcaaaaatggtggaaagaactatagccgcaatgttcaggaacgtatcaatcgcaagggagccagtaaggaggtcgttgtcaaaatatcaggaggtgcgattacccggcaaggagttcgaaacagtattgactatatgagccgtgagtcagagctaccagtgatgagtgaaagcggtcaggtatggacaggtgacgaaattcaggaggctaaagagcacatgatagatcgtgctaatgatcctcagcatgtgataaatgataaaggcaaagaaaataaaaaaatcacacagaatattgttttctcacctccggtttcagcgaaagtaaaacctgaagacttgctggagtctgtcaggaaaacgatgcagaaaaaatatcctaatcaccgttttgttcttggataccactgtgacaagaaagaacatcctcacgttcatgttgtttttcgtatccgtgataatgacggtaaacgtgctgacatcaggaaaaaagatttacgggaaattcgtacaggtttttgtgaagagttgaagttaagaggttatgacgttaaagcgacccataagcaacagcatggacttaatcagtctgttaaagatgcacataatacagcaccaaaaagacagaaaggtgtttatgaggttgttgatgttggctacgaccattatcagaacgataaaacaaagtctaagcaacattttataaagctaaagactcttaacaagggggttgagaaaacatactggggggctgattttggggacttatgttcgcgcgaaagcgttaaagcaggagatcttgtcagactgaagaaacttggtcagaaagaagtaaaaatcccggcgctcgataaaaacggtgttcaacatggctggaaaacggttcacagaaatgagtggcagttagaaaatctgggggttaagggtatagacagaacaccttcagccagcaaagagctggtactgaacagccctgatatgctgctgaagcaacaacagcgaatggcgcagtttacgcagcagaaagcatccacgttacagtcagaacagaagctgaaaacagggattaagtttttgggcttataa

SEQ ID NO: 280387 - DNA, 546 bp, Morganella morganii
atgaagcaagttaatttcagactggaagaacaacagcatgatgaacttcttgattgtcttaaaattctttatccagatgagccagctttaacagtagcgaaaggcatgaaacttttagcaagtgctttattaaaaagtaaagctggcagtaaggatataaatacattttttgataataaagattttatcaaaacaacgatgtacttaacaggtaaacaaagggctgatattgaaagagctgctaatcgtcacggatggacgttatcacgggaatgtcgttaccgcatacagacgacacttgaaaatgaactggatttctttgaccaggaactgctgatgatgaatcgttgccgtaattcaattgataagatcggtcgtaattttcattatatcattgttaatgatcagaccagggttcttgataaagatggtttctatcaggatgcggagcgtcttacaacagaaatttttaatcttaagaatcagtttgagaattacattatgttatgtaaagggagaactgtttcaaataaagtggagatgtga

SEQ ID NO: 280388 - DNA, 273 bp, Morganella morganii; identical to SEQ ID NO: 152711

SEQ ID NO: 280389 - DNA, 312 bp, Morganella morganii
atgatcacggaatcggatatgcttactgaagctaaaaaaatggcagtagagatgatgttctggcctgcttgtcctgtagatgatgattattgtttcgacgctataatgtatacatcagttattgacaggaagtttgaagatgaacatggggtatatcttcatcaggtttacaaagaactatgctcaatacccgaattaaaaaagtttctaaaaaagaaagcaataaaattgattgcttttaagcacgatattgatcttgattcagctaacaagattttaatgaaaaatatgttaaggaggattgaaaactga

SEQ ID NO: 280390 - DNA, 375 bp, Morganella morganii
atgaaaagtgtttatgttgttggcaaaggtttaatcgttgccggtaataaaattaccatcgatggaaaagagcatgtctcggtagaaaatagtgaaaacattgttgtcactgatgattgtattaaaattggtaataaaacagtggtttttaaaggcaggagtattaaggtagaaatacatggaaatgtaaataaaatagtaaccgaaaatgctgatgtcagtattcatgggaatgctggggatgttgaaaccgtgagtggtgatgttgattgtcatcaggttaatggcgatataaccactgtaagcggtgatgttacttgtggagatgtttctggtgacgtaactactgtcagcggagatataagcagaaaatga

SEQ ID NO: 280391 - DNA, 300 bp, Morganella morganii
atgaaatgctcatctgtttttacttcaaccactaatcatgttttcacgttcgaacgagtaacgctttgcactattatccttatgcataaggatacgggacaacagtatgttgtcatatttactgataacaataaaattcgtgaatataaaaccggaattgttcctcagtttggcgaacttaagcagagtgatgttgatttagtccttttctacagggacgaatatgaaaaatattttgattcgttaaaagatggcgatgaatgcttaagttttaaagattttattgagtgccttcgttaa

SEQ ID NO: 280392 - DNA, 228 bp, Morganella morganii; identical to SEQ ID NO: 12412

SEQ ID NO: 280393 - DNA, 252 bp, Morganella morganii; identical to SEQ ID NO: 12411

SEQ ID NO: 280394 - DNA, 543 bp, Morganella morganii; identical to SEQ ID NO: 12410

SEQ ID NO: 280395 - DNA, 516 bp, Morganella morganii; identical to SEQ ID NO: 12409

SEQ ID NO: 280396 - DNA, 351 bp, Morganella morganii
atgacagccaccaaaaatgtgaagtcgcagaaaaatgattatccggcatccgttgatcacaatgccgccatgattgaagaattgcgcgcagatcctgattatgcaaacgcttatcttgctaatgccctggaagaaataaacgagcctggtggtttaggtggttttcttgttgcgctacgtcaggtaatcgaggcgcgaggggggatttccgaagctgccaggaaatctggccttgcccgtcagagtatttaccgcgcattatcccccaacggtaacccgaccatcacaacgcttgcacaacttacatcggtagccggattacagttcactctcagtaaatccagccactaa

SEQ ID NO: 280397 - DNA, 336 bp, Morganella morganii; identical to SEQ ID NO: 82465

SEQ ID NO: 280398 - DNA, 897 bp, Morganella morganii
atgccaataagaaagatttctgagaagacaaaaattagacatcgaaatgagatcaataaaacgcttgctcagttacctctttctgcaaagagggttttgtgtctggcattggtgtctgttgatacgaaaaaaccgcttgaaccaggtatgatttttaaaattaccgctgatacctatacatctattacaaaagtcaaaccttcagttgcatatcgccagttaaaagaaggagctgaattacttaatactagtaaactttcactatcaagtgatgatattttggcattatctactgaattaggcttacctgatgcaatgcgtaagagtttagaacgcctggatatggggattactgattattgtgcatatagtccgaatgaggggtatgtcgttctaaaatttacgcatacaattcacccttacatttcaaatctaattggcggtgaaaataaattcactactcaattgcttacttcagcaatgagattaagtggtcaatactcatgggctttatatcagttaataagaaaaaactattccaaatttagaacaaagaattatttttcaatacatctgaacgaattaaaagatgagttaatcgcatatactatagaagacgatgaggttgtttataaatatcctgagtttcctatattcaaaagagaagtgatcaataaagcaataaaagagattaaagaaaaaacggaaatagaattcctgtcctgcttaatagaaagtaaagaggggcgtaaagttagtgttttacgctttgaatttcttgtttctgaagataaatttacaggtattgataacgaaactcatgaatttatgaatgatgatgatgctgctttcctgacagagtttgacaaagtcgttccaccaaaaaagaataagtga

SEQ ID NO: 280399 - DNA, 444 bp, Morganella morganii
atggctaaaatctatcaattcccgcagggagccgaacgaagtaagctgaaaaaagaaatcatcctggaacgtaaaaaacgattgcgagaaaagaacggtaacccggttatccggcacgctaaatggttctggttttatctacgtcttgcaacggctggcgcactgcatttagtctctgttattactctggcagtcctgggggctttcagtaaagctattttctggattggtggcctgctctgtgttgttacatggttccaccttgagcgccagttctggacgccgcaaaatttcacgattccagtaatcgtaacgctgtggggattaagtttgtttgccactcccctgatagagctgcttaacaaaaaaatgccgtggtatcgtcttctggttcctgatgcaaaggacactagcactgaggcaaccaatgatgatcagctgtga

SEQ ID NO: 280400 - DNA, 354 bp, Morganella morganii
atgaaatatcaggtgaaagagtttgttaatgaaaaatattctaaggctattaacattttaaaggataaccttaaagaaaactatcatgttttttatggagtaagattaagtgagattctttttcctgccagtgagtatggcactgatgcattctttaaagagtttgaatcaataaatagtattactttaccattaattatttttgaaatgaatgaacgtaagcctgtagctatcatcagctttgagcaagttgctggttctgtttttgtcggacaatttgatattaatgttttggttgttggcgacctgtctgaattgctgactaatgaaacgctggattcattatacaactga

SEQ ID NO: 280401 - DNA, 285 bp, Morganella morganii
atgctcataaagatcattaaatctgtattcaatttttacacgctctgtgtgcagcctttacttggattatttctcgtgggttacagtatatggagcttctcaggtgacggtatctgtacggcagacaaagttatagcctgtgatatatcaatatatctggaaccagcattttaccttctcattggcactgttgttttgtttgtatggtatatagcatggcagacagaacgctcgaaagaagaagagtttaaatcaagcataaaaccagaagattttgtgaagtga

SEQ ID NO: 280402 - DNA, 303 bp, Morganella morganii
atggcaaagatcccaaagaaaatagatcaggaaattaaaccactggatttacgccagtttgtaagttctgctgcacaaaaaccagcatcggcatccgcagtaacgcgtataaatctgactatgacagatgatgatctggatacagcgcaggtgttccagaacaagtacggtgcaagccgtgctgaagttatcagagcagcactggcagcgttacgtctggtatcagcagaagaacgtcggaggctgtttgatgatataaggaaaaacagcccgaaagcaggaagaccaaccgtaaataaatag

SEQ ID NO: 280403 - DNA, 660 bp, Morganella morganii
atgggaaaaatcattacagttgcagggcataaaggcggcataggcaaaagcaccgtgctttgttccttatgtgtatgtgtcataaagaaagggaaaacagcctgtttcctggaaacagactcacagggaagtatcaaggatttcatcgaggatcgtaaaaccaacgccagactgtcagaaataccgtatttcgaatgctacacggatattccggctatggcacaaaagctggccgcccgctttgattatgtgtttgttgatacaccaggcatgaaatctccggcgttcgttaaagctctgagttgtgctcacattcttttcacattcattgagccaggatcaggcattgagatcaacacactgggacggctggttttcgacattaaaacagcacaggccggagtcaatccgtcaatgaaagcatggattgtcctgaataaatgctcaactaacccgtcagacagtgaagcgtcagaactgcgccgacaactcaatgatgatccagactggcttccggttccccgccaacgtatctatatgcgtactgcgcataaaaaagcctataacaacggtatgggcgtacatgaatacgatgataaacggggaaacaaagctcgtggcgagattgagttattgttaaaagaaacggatattctgtaa

SEQ ID NO: 280404 - DNA, 825 bp, Morganella morganii
ttgagtcacttacccgccagcattttccagatttcacgtagcgacgcctggaatttaaccctctctcccgatgcagcccgtcatatgcgggatctggcagcacagattggcgcaggaatgccgaaatatctgatagcaccggaagtctcactgcttctctcctacattgatgatctgagcatccgtatgtactttgagacgctctggaataccggagcacgactgaacgaagctctggcgctgaaacctgccgattttatgctgactccgacgcggcagtacccacaacccgtggtgatcctgaaaacactcaagcaacgtctaaaagaagcagaaagaagaccaggacgcccgaccaccaggcatccaccattacatcctgatccgcgatacagaaaaccaccggagcctgctgtaaggctggttcctgttctggatgccggatacgcattgcgtatgcgggaatacctggcgacctggaaaaagcggatcaaacatcagcctgtgtgggacataacatcgagacagacaccgctgaactggataaacaccgcagtggcacgggcagagcgtgacggcgtaacattttcggttccggtcacgcctcacacgttccgccacagttacgccatgcacctgacaatgagtggcgttcctccgcgcgtcctgcaatccctgctgggacaccgttatgcaagaagcaccgagatttacacccgcgttttttcgctggacgtccttacaggaagtggcctgtctttcacctgcgatccacagcgtgcaaaacaacttctcggataccctgaacgcattaataatgagtaa

SEQ ID NO: 280405 - DNA, 312 bp, Morganella morganii
atgaaattaaagaaggataaagatagcacaattactaaaaacgacactgttttccctgttaacagtttctttgtcgttttaactcttgtgtcttccctggttaactctgccggaatatttttccccatgatatctcattctggtaatattattgagatgtgttttttcgtgatgttttcagtattactggctgcattcagttttgtaagtacaatggggcttgcgaacgcagcagcacccattaaaaatgtgtttccgcttttgttgttggttattgtcttaattactaattataatatttacttccgataa

SEQ ID NO: 280406 - DNA, 435 bp, Morganella morganii
atgagcgaactgactaaagaagatgaatacggcattatcagccggactatgatgaatattcgttcattgcgtgtgtttgcccgtgaagttgattttgagcaattgctcgaaatgcaggaaaaactgaacgttgttgttgaagaacgtcgtgaagatgctgaacgtgaagcggctgaacgagcagagcgtgaacggaaacgtcaggaactgcttcagttaatcgctggagagggtttctcaccggaagaactgcttggcattaccgaagatgcgccaaaaacacgtaaaaaaacgttaccaaaagcgccgcccaagtatcagtttgacgaaaatggtgaaactaaatactggtctggtcgtggacgtgcgccaaaaccgattgctgaagcactggctggcggtcgctcccttgatgagtttctcatagagaaatga

SEQ ID NO: 280407 - DNA, 2154 bp, Morganella morganii
atgagactttttatcgcagaaaaacccgcagtagcaaatgatattgttaaggcacttggtggcaattttacccgccatgatggctggtttgaaagtgataacgccattgtgactaactgttttggtcatattatcgaatcacagccgccggaaaactataatcctgaatacaaagcctggaaggttgaaacgcttcctttacgtctttatcccgtgaagtatcagcctgttgaaagtgcagcaaaacaggttaaaacgattctcgaacttatcagacgtggagacgtgactgaaattgttcacgctggcgatcctgatgatgagggacagctacttgttgatgaagtcctggaatatgcaggaaacacaaaacccgtgaagcgcgttctgataaacgacaacacgcttccggcagtgaaaaaggcactggcaaatcttaaagataatcgtgatttcaaagggctttaccttaaggcgctggcgcgttcagttgccgatgccgtctatggattctccatgacgcgtgcttacaccattcctgcaaaagccagaggatatcagggcgttctgtctgtcgggcgcgtccagacacccgttcttggcctgattgtgaatcgtacccgtgctaaccagaaccataaatccagtttttactacaccatgaccggagtttttcagcgtggtgctgatgttctcagggcgaactggaaaccaggtgaatttgctccgctgaccgaccgtaaattacttgataaggcgtgggcagacggaacggcagcatcccttgcaggaaaaccggctacagttgaagcagcagcaactgatgataaaaaaacggctgcgccgttgccgtttaacctggtcagactccagcaatacatgaacaagaagtttaaaatgacggcacaaaaaacgctggatattacgcagcaactacgtgaaaaatataaagcaattacttataaccgctcagattgctcatatctttctgatgaacaattcagtgaagcgccgcaggttatcgatgccctgaaatcagtctttcctcagtcgctggatattgattctgcacgtaaaagcaaagcgtttaacagtgcaaaggtgactgcacatactgcgataatcccgacagccagtgtgcctgatgttaacgcactcagcaccgacgagcgcaatgtttacctggcgatcgcacaacactatcttgttcagttcatgcctgaaaaagcataccaggaagtatcggttgccattcagtgtggtgatgagtcgttctgtgcccgtgccagaaaaacaactgacagcggatttgaggcgtttcttggcgcggaaaccacagacgaaggtgaatcagaagataatgatgattccgcttttgaactgctctgtaaaattcgcacaggagaaacactgacgacaaaagaagttgtcgttaatgagaagaaaacaacaccgccgccattatttaccgaagcctccttgcttgctgcgcttgttcgcgtcgcggattttgtcactgacccaacgattaagaaattgctgaaagataaggataaagataaaaaagatgaacatggtggcattggtacgccagctacccgcgcagccattctggaaacactgaagaaaagaaactatatcacgctggaaaaagggaaacttattcctactgataccggatatgcgcttattgatgccctgcctggtatagcggttaatcctgatatgacagcattatggtctgaaaagcagacagccattgaaaatggcgacctgacggttgaagagtttattaatgagctgtacggtgaactgacaggcatgatttctgatgttgacctgggcgagatgaagattgaacccgctgcgccagcagggcagtttcaacgcctggactctccctgcccttcctgtggtaaacatattgttatcagaccaaaaggttatttctgtaccggatgtgaatttaaaatctggagtgagttttctggtaagaaaatcacccaggcgcaggcagaaaaactggttaaatcagggaaaaccgatttgattaagggatttaaaaagaaaagcggtggaacgtatgatacagttcttgttcttgaggataagaaaacagggaagctggggtttccggcaagggctaagaagtga

SEQ ID NO: 280408 - DNA, 576 bp, Morganella morganii
atgcaatatgcattgtttgatggatttgaacgaaagtttttgctggatgctcttgaatttggtgttctgaaggactggaaagaaaatccggtaaaagaacttcctgatattgatgaagctgttcaccccttccatgtctgctatggtggatatttattaaatcctggtgtttcagattcagatattagcagaaaaataaaagaccagacaggattctggctggcagctattgatgatacccgcatggattgtcattcaatagcttattatgatattcacaccctccctttgatttcgtgtggacatcaaaagatagttccttttgccgcattaataaaagctgatgaatgcatcatttcaaaaattgcttcatattctggttttgctgtaacagcctttttgagaattaaagaccaggatatcgcaacgaatatacttaaccgtgagggaatttttgcctttaatggctgtgagcgcagattcagacaacctgtaagtgaagataactggcaacaggcagtatcagaagaacgcgctattcgttgtgcaaacagattaattcaatgtaaaggataa

SEQ ID NO: 280409 - DNA, 330 bp, Morganella morganii
atggtaacgataataataggtgtgtcgagagttattgactataaaacggcagaaatgtcggttgatatccccccattccctgaatggaacagtggtcattatatcgaaattccaggagaaggtattgtattcacaggtgaaaagagtgatgacggtagccgttgttattctggtgtcatcgaatctcattacagcactgatgactggccgtttatcctttctgaatacaaaaactggctgaaagataaggaaagaaagttttcttatctgtttgtcttacgcaatggtgaactggttcaccatgaggtcaacaaatcagagcttctttga

SEQ ID NO: 280410 - DNA, 753 bp, Morganella morganii
atgatgacaaaaaatgataaagaacgattcaataaaagaatcagtggtgaagttcagattagtgctgatatccgtgtcagtgatttaatgacagaaggtgcagcttacgtcactataacggaatcccccctgtatgagcgagtctgtcactatgccttgcaacatggtgaagatttacaggggatgtttaaggatgaaaaatatgaatatatgtcctgttttgttcgtgatgtggctgcattcagaagtaattttgaaagcgaagagcttttaaaacctctgtttaaccatgataaaggtgatactgttgagtttgttatcagcgttcctgaaaaaagagtcgaggattacggtgatatagtcagaaaagagttcgtagatataattcagaagcatgtaataaccattaataataagctctggaagaaattcgtaaaacaagccatgacggggacaactttatatattggttttgatattaatacaggtgcaatggtggaccctgaagatgaacgtgacaccatattaaaatcatcacgtcaggagtttgtcagaacaacgactttcgattcatttcagccttattactatgttgagcgtttatattctggtgcaaaagaaataggcaatatcaatggttttaatgtctggttcaatgaaagaggattttatttttactggaatgaagaaacggaattcctgattgagagttggttgacgtttcctgcatatccatatggctggtttaaatga

SEQ ID NO: 280411 - DNA, 516 bp, Morganella morganii
atgagaattttgttaagcgttattttattcctgtttactgtttttcagtctgcaaatgcaggcggaataccttatacattaaaccaggaaattcttcaggggaaagttattcgcgttctcgatggcgacaccatagaagttaaaacgctacccgcgaaaattgttgtgtatgaagttccgattcgggtccgattgataaatatcgatgcccctgaaaagaaacaaccttttggacgatggtcagcaaatcagcttaaagctctgattgcaggtaaacaggtgacagtctcttatacacagagagaccgttatgggcgcattgtcggtcgcgtatttacgacgaacggcacggaggccagccgctttatggttcagtctggcgctgcatgggtatatgagcgttacaacacagataaatcattaccggctttgcaacgggaagcgcaggaacaaaaacgcggtttgtgggccgatgcaaatccggttccaccgtgggagtggcgacataagcattaa

SEQ ID NO: 280412 - DNA, 435 bp, Morganella morganii
atgatgaataaattcagttatgtcaatcgtatgcttcggcgcgtttttgtttttagttttatcacggtcccatcaatagctttatttgttgtttttatgtatttttcgtttaataactcaattgctggttcatttttaaaagaggcaaggaatcttatagacaatactccttctgataaggttaacgtctgtcttttcgaaaaaggagcaccacaggatgttgatttgacaaagtcaccacctgaacccgtgttaaaaaataaatgtataacaacgttagttgatgctgctgactggcaggaatctgttgacggttctattcgatatttttattggtcatcagttattgttggctttgtggcctggcttacctttaatttttctgcgctggaagaattattttatcgtagaaacagaaaaggagacgttgaatga

SEQ ID NO: 280413 - DNA, 249 bp, Morganella morganii
atgaatgtaactagatttgtaaccgcaccatctgatattaacaaggttaaagagactcattctgatgacgagttaaaccgtttgctggaagctgttaatcagaattgcccagccagaattgtgttgggtagtgtggagagggggaaagaaacaccactcaagtggtgttttagaacaataccagagcgtatttcaattgaagaaatcgatgaaataaaatttatcaagaatccttctgaacagagataa

SEQ ID NO: 280414 - DNA, 228 bp, Morganella morganii
atgaaaccattagtttatgcaatgattctgtcactgacgaccttttctgcttttgcaaaacagaactcggctaacagtcagaaaacaggtgtaagtaatatcgaaagacaaagctatgagaataccgatgcggggaaaaaacaagctgaatggatgaaaggtaagttagttaaatctgattgttctccagccatgaaccgtattggctggtcagaaggctgtaagtaa

SEQ ID NO: 280415 - DNA, 477 bp, Morganella morganii
ttgaataccaatatcaacaatgccaaaaatgaggcaatcagcacatcaaacaactatacggataagaaatatcaacaaggtatcagttataccaatgaaaaatacgagcaaagcatactgtatgctcagaatgcagccgataaagctgaactaaatgcgaataactatacagataaccgattcaatcagttaagcaatcaatcaaatcagcggttcgaacaattaaacagtaaaattgaacgtgcggaaaaacgtcttaatgccggtattgcaggtgtaacagcaatatcatcaatcccgtatgttgctgaaaatagtttctcatatggtattggtgttggtaattatcagaatggaaatgcgattgcagcaggcattcaatataaaacgtcattaaatacaaacgtgcgccttaacgtttcatgggattcatctcataacactgttcttggcgcaggttttgcgggtggctggtaa

SEQ ID NO: 280416 - DNA, 249 bp, Morganella morganii
atgaccgaaaaaaagacctgcattcaggaattaactcagtcaggtttatcggttatagtcgcctgtcggttattctcactgcccagaaccactttttacctgataaatacaaactggagaattaagaatgatccggttattgaagcgagttataccgaactggaattatcaccatgggtcggattctggaaatgttttcaccggatgcaacagaaaaagtactcttttaatcataaacaggtttattga

SEQ ID NO: 280417 - DNA, 807 bp, Morganella morganii
atgattagtgaaattacaatgaatggcactaaaataaaactaagaaatattagtgataatgacattaatatttatgacatggattctttatctttacttattggtataaatggttcagggaagaccaaattcttatgcagcgtaattaactattttttccctaaaaacaatatgcaaataataggcgaatgtacaatattaaactctcgcggagaaagaatagatcattctgaaattagaagctggggggttatatatttcactccattgccgtttagaccaaagttggatatcagagataataggtttattaacgcatctccaagtccgaatggaaaaaatactgtatttgaccttgtcggatataaggacttaatatctgactttggtatttatccaaaagttgttgccatgaagatgacaaatattagtaaagttgcaagattaatacttaatattgctctggataataaagatcttaaccagaatagtatactgctgaatcacggtctccttgatattttatcattgcgtgaaaaaattgatgctaatatggatggtaataattcagacactataaagtacagtgccaataaaaatattcaagcagaaattgatcatattatgcagcgttgctccgcccatctgattgatgaaatacttcataatgcaggtgaagaaaaactcttttacatattcagcataatagattgggcaagtacaaagaaacaattcagtgataacgtagtaattccattattgaacaaatattttaatttaaatattcgtttaaataaaaagttatag

SEQ ID NO: 280418 - DNA, 225 bp, Morganella morganii
atgagaacgctcaaagtatattgtccgcaatgttcatcaccatcaaccatacgcaggattgaaacagaggggcgggttatccctgaactgtattgcagctgtgacgatcttgagtgcgggcatacttatgttatgacaatcacgttttcgcacactattcatcagagcaaactggatgtgccgctgcctcaccgggggatttgtatcagggttatcggcagataa

SEQ ID NO: 280419 - DNA, 690 bp, Morganella morganii
ttgtgtgtcgaccttccaggttacgggtttaaaaagctgtttcagttcctgcgcaggcagggcaacgggtggaatcataagcgtattcaccggatctattgtctgctgaagctgaactttagccgtaaaggcaaacaacgtctgcctgtgcgtaatccggcaccactggcaacgccggaggcactgaatcagagctggtcggttgattttatgcatgatgcgttgatctgcggcaggcgtttccggacgttcaatatcgtggataattttaaccgtgaagccctagcgatagaaattgatttgaatatcccggcccaacgtgttgtccgggtattggacagaatagttgcaacacgcggatactcggtgaaaatgcgaatggataatggtccggagcttatatcactgacactcgcacattgggcggaagagcatggagcaatactggaatttattaaaccgagtaaaccgactcagaatgcctttatcgaacgttttaaccggacattccggaccgaaatactggatttttatctgttccggacacagaatgaagtactggagatcacggaacactggctgagggaatataaccgggagcgtccgcatgaatccctgaataatctgacaccggaagaataccggttattagctgaaaataacgaaatctcaaaaagtgtgtggaactga

SEQ ID NO: 280420 - DNA, 1578 bp, Morganella morganii
atggtaattccgctgagtaccgtctcccgccggagactgacagtgctgatttcattaattctgaccggtatcccgcaggcagcttatccggataatcaggatgttgaatttaatactgatattcttgatgtaaacgataaacagaatattgatctgtccgatttttcccgtgccggctatatcatgcccggcacctacgacttttttatccgggtaaataacagtgagttacctgacagttatccggtctcttatattgtgccgccggatgatccgaaaggcagtgccgcctgtttatccccggagctgatagcgcaggccggactgaaaccggaatgggcagagcgcctgcgctggtggaataacggcaaatgtctggatacggcgtcactgccgggtatgtcggtgtcaccgaaactggcggacagcgagcttatcctgacactgccgcaggcttatctggaatacaccgccgctaactgggatccgccttcccgctgggatgagggaatttccggcgtgctgtttgattacaacgtgaatgccggtattaatgacccggcacacggcaaacagacacagcaggtcaccgggaacgggaccgccggggcaaacctcggggtctggcgtgtccgtgccgactggcaggcgaatctccgtcacaccaccggttccggggatcgctccgaacataactggacatggagtcagacctatctctaccgggcgattgcctcattacaggcaaaactgacgatgggggaaaccttctcgcgctcggatattttcgacaacttccgctatatcggggtcaatctggccactgatgacaatatgctgccgccgaatctgcgcggctatgcaccggaagtgaccggcgtggcgaaaaccaatgccaaaattaccgtcagccagcaggggcgggtgatttatgaaactctggtcgcgccggggccgttccgtattcaggatattaatgatgcggtcagcggcaaactggatgtccgggtggaggagcaggatggctctgtacagtcatttcagatggataccgccagcattccttacctgacccgtccgggccgggtgcagtacaaactcgccgccgggcagccgtccgaaatcggccgtcacgggaaaggccctgtctttggtatgggggaattctcatgggggatcagtaacggctggtcattatacggcggctccctcgttgccggggactataacgccgtttctcttggtgttggtcgtgatttgatggcctttggggccatctcttttgatgccacccagtcttttgcccgtctgccgcaggaagacaaacagtatcgcggcggctcataccgcctgagttattccaaacggtttgaggagctggacagccaggtcacgttcgccggataccgtttctccgagcgcgactttatgagcatgaatcagtatctggatcgccgctacagcgataaccgcgcggataacaataaagagctgtacaccatcatgttcagcaagcagttcccggatatcgggctgagcactgatgaatcccctaatgattttggtaaaaatcattaa

SEQ ID NO: 280421 - DNA, 603 bp, Morganella morganii
atggaattttatggcggcgagaagaggactgcatatataggttatggctctgagtcaaccacggcgcttactataaacaatgaaaaaacaaacgtcattgtcaggatatcagatggtcttactgtcaatggatatcgcgttcttactgaggaagacactcgagtccctatagggggttccgttatctggaactcaacagcacctataccgggcaacttctggcctaatgaggggaggtcattttcagcatctgactatcctgaacttgccaaggtgttcccttctatgaagctacccgatgatcgcggatatgctatccgaattgctgataatgggaaaggaattgattccggaagggctgtaggaacttaccaggatgatgcaatgcagcctatgagtggttggatgggcgggattcagacaaggggtaattcatatggcactggtgtattctcaaatgaaccaacatcaacaaagtctgcatttagtgaaggtgcttcagctgtacaggacttcacatttaattcaagtaatcaagttcgcacagcaaatgaaacccgcatgaaaaacgtatctaaaattttaattacgaggattaaataa

SEQ ID NO: 280422 - DNA, 630 bp, Morganella morganii
atgtcttatacaacagatatccagaaagcacagtttgacgaaaacggactggctgttattccgggctgggctaaaatctaccgtgctcatccatatacccgcgaatatattggtgcagcgatggataatgtcccttacggcggctccgtggtcggtgatgcttatcttgatgaacctgaaatcccattagtgcctaatatggctatcattcgctcacctgacggaaaatcatggctgcatactccggattatcgtggttctgtggcgtatgacaaagagacaaaacagcaggctgaaatcacagaactgggcaaactgcctgataacctgacactggacgcacctaaaaccccgtttgataaatggaacggtaaaaaatgggtgacggataaaactgagcagcgggcgcatgaggtcgccgttgccgaaagtcagaaacagtcgctgttggcagaagctgaacaggaaattgccatgctggagcgtaaaatacgtctcaacatggcaactgaatcagatcggacaaaattgacagaatgggaaatttacagtgtgaaagtcactgataccgacacctctgccggtgccgctactgaatggcctacacctccggcttcaccggccagataa

SEQ ID NO: 280423 - DNA, 354 bp, Morganella morganii
atgagatattacaaaacaaaaaataatgaagtttacgcacttgaagacaatgattccgctaaagaatggattaaagaaaaagtgactgaaatcaccaaagaagaagccgataacatcacaaatccgcgaccaacgaaagaacagctgatcgcaaaagcggaatacgataaacaggcgctgattacagaggttcaggctgaaactcagttactgcaaacaaaattggctctcgggcgtatcacccctgatgaaaaggcgcggttaaacgtctggctggattatctggatgaactggaggcagtggacgtatccactgccccggatattatctggccggtgaagccggaggtgtag

SEQ ID NO: 280424 - DNA, 909 bp, Morganella morganii
atgaaaaaaattggtgatgtcaccagtaccgccgataaaaacggcgagtggacaaacggcaatgtggccgccggtatcgcgcctaccattcttgatgctgcctggcttaattccgtccagcgggaaattcttggtgtgattattgctgccggattacagcaggataaaaatgatgacactcagctttctaaagctatcagcaaaataatctccggcggtaactacgccacagcagaagacctgaagaaatatctcgccaaagaccagaacggcgcagacattccgaataaagatacctttatcaaaaaccttggtttaccggaattgctggataagaagttcgataagaccggcgggaagattacaggacagacggatattgagtcgccgggcggtcgcacccagacactgaaagcaaaagctggtacatcggtataccaggaattgtaccttcaagataccttcgccgcatggtgggggattaccgctggtaacaagttaagcctggaaaacaggattacaggcaatacgcttactatcggtactgatggtttcaaaattgacggtaaaaatattgcgaccacagatcagctttttggtgtcgggcaaacctacaaaaatctgacgtccagccgtcaaaataaagtctggtataccaacaccgacagtaagccccgcattatccatgtcgaatcaaacagaaccggcacacaataccatttcagtattgatattcaggttattgatgcgaatggtaataacagggttgattatcgatggacttctgcggatgaggttgtttccctgaatgcactggttcagccgggtgagcggtacagtgttaacggtggatggggtcagcccacagaatgggttgttattaacagatgggtggagttgtcacaatga

SEQ ID NO: 280425 - DNA, 594 bp, Morganella morganii
atgaattacaccgcagatgattacacacaggcgatgatcggactggcaccacagggcatcgcgtgggactggcgaccgggctcgaatatgcatgccgttctccgggcgctggcgcacggctatgaagcctcggatattgacgctgttcagctgcttgagggggcatttccgaagacggccacaacgttattgccggagtgggaaaaaacgctcggactgccggatgattgtgcgatcggggagatggacaccattccgaaacgacaatccgcagttctttcaaaactgctgcgcaccggcgggatgtcaaaaccctactacatcagcctggccgccgagatgggttacaccatcaccattatcgaattccggcaggcaagggcggggctgtcagcctgcggtgacgcactgaacggtgatgaatggccgtttgtctggcgcatcaatgccgggaacacgcaggtgacatacgcggtcgccggcggcagttactgcggtgacccgctgcgttcatggggtgagcattacctcgaatgccagtttaaccagatttccccctctcacacgatccttcaggtcggttacgaccagtaa

SEQ ID NO: 280426 - DNA, 1140 bp, Morganella morganii
atgccgtttaagcgtaaaacactgacggagctgcgggagcagaaccagaatttcctgcgcaatgaactgaaagagcccggtgcgctgctgcggtattccaatatgcgggtactggcggatatggatgccggcatggcacatctgcattatgcctatctggattacattgcaaaacaggcaaccccgtttaccgcaacagatgaaaatctggcaggctggggggcgctgaaacgggtgtaccgcaaaccaccgaacaaagccaccggtacaaaggtgcagtttgacggtgtgccgggcagcatcattccggccggtacagtgatgacccggggggatggataccggtaccagtctgttactgaggcccatattaatgctgacgggaaaggcttcacgtctgttgaagccattctgcccggcattgacgataatatttacggcggcggcgcggcgggtaactcaccggccgggacaaaactgacgcttgagatagcgatatccggagtatcttcggaatgcgtcgctgttgacccaatcaccggcggcagtgatattgagaacgaagaggctttccggcagcgtgccctgcatgcgtaccagaaaccaccgcagggcggcagcgacacagactatgaaggctgggcgaaagaagtgccgggcatttcccgcgcctgggtaaaacgccgcctgctgggtgccgggtcggttggtatttacatcatgtgtgacggaaacagcaacggcggttttccgctgggaactgacggaccggccaccaaagaaacttattcagtgcatgcgaccggcgaccagctgcgtgttgcagaccatatctgggatgtacagacggttacggcactggtatgggtttgttcacctattgcgaaaaagatagattttgaaattgaagggctgagccgggcaacctcggaattacatcagcagataaccaaagccattgatgatgtgtttttccgggacagcgacccgaccggcggcgcaaaaatctacctttctgatctgcagtatgcgattgctgatatcccgggcaccaccggctttgtcctgaaaaaaccggcggaaaatatagttctgagcactggtgagctggcgcagcgcggggaggtgtcatacacatga

SEQ ID NO: 280427 - DNA, 438 bp, Morganella morganii
atgtctgatatttcttcctggtggaacgcggacacactgcggacggactggatggccggaaacggtgacctgctttccggtgatgatttacagtcagcgattatgatcagtctgttcacggaccggctggcacacagtgacgatgattacgacgatgagtaccggcggggatggtgggccgataccggaacggatgggtttatcggttcccgtctctggctgctgaggcgtcagaaactgaccacacaggtggcaaagaaagccgaggattacgcccgcgaggcgctggcatggctgataactgacggagtcgtgtctgatattcagatccggacacaaatagtgtggccgcagcggctgaatatggttatacgctatcaccggccggatgccggtgcggaagatctgcgtttttactgggtatgggagaaacaataa

SEQ ID NO: 280428 - DNA, 588 bp, Morganella morganii
atgatgagtgatcagatccgcgatttaaaaacccggatgtctatgatgatcggcgccggtaaatccagcgtcactaaagatgacggagcgattcagaccatccagtacagcacggtgctggaagtccgggacggcacttaccgtatgacagaatttggtttttcttcctctctgccgcccggatccgatgttctgattgcctatctcggcggaaaccgctccagtgcggtggtcatcggcagcaatcacccaggttcccggcacaccggactctcaccgggtgaaagcgtgatgtacaacctgtggggtatgtacatccacatgacagaggacggcattgtgattgaggccaaagataaagatgtgactatcaataacgccgataaggtgacgatcaatgccaaaacagaagtggtgttgaatacgccgatcctgaaagtgtccggtgatgtgattgataactacgaaagtaactcgtccacactgaaaatgctgcgggacagttataacaagcacgaccacgatgtggaaaatgtggaaccgggcagtgccaccaaaaccagtaatccgattaaggagaaagtctga

SEQ ID NO: 280429 - DNA, 1071 bp, Morganella morganii
atgacggaagagacaaaaaaaaccgaagaattatccctggtgataaacggcaggcgtatttccggctgggacagtgtccgggttacccgtggtattgagcggctgccgaacgattttgaaatcagcctgatggactactacccggcaacggatgaaaaacagctgtttaaaccgggtgacccctgtgaggtgttcctcggtcaggaccgggttatcaccggttatatcgatacctggaacgggcagattaataaaaatcagcatcagataagcgtgtcaggccggggtaagtgtcaggatctggtggactgctccgccaaatggccgaacaacgtgatcagccagtccaacgccctgcaaatcgcacagaaactggcgcagtggtatggaatagaagtgacgagcaccattcctgatagtgaattacagattgttccgcaattcactctgaactggggagaagtttgccagcaggtgatcgaacgctgctgccggtactctgcactgctgtattacgaacagccggacggaaacctgctgctgacccgcgtcagtgacaaagtggcagccagcggtgtggagcagggtaaaaatatcgaaagtgctgatttctcggattctatggcagagcgctattccgattataccggtgtgtcgctgtctgttaccccgtttgccggggatgtgtcagcggtacagaacgcctcggcgcgggatccggaggccgggaaaatgcggtaccggaattacatcaccatcatcgaaagcaccctgatcaccgctaaacgggagcaggagagtatcgactgggaaatgaaccgccgttacgggcgctcaaaaatcctgagtgtgatggtcgacagctggcgggatgcctccgggaaactgtgggagccaaatacgctgatcccgatagatattccggtgcttggggtgacggataaattctggacgttgtcggatgtgacctacctgcgggatgccggcgggacacgtgcgacattacagctgatgccgccggaagccttcattgctgaaccgtatgaattttaccaggtaataagggtgtga

SEQ ID NO: 280430 - DNA, 1401 bp, Morganella morganii
atgccaattatcaaagacgccatttctgatctgctcggcattgagccggactggaattggtctgaacacctgcagcaggcttcattccgtggtgtgccgttcggtgtgatcagcggtgaaagcgtcttcggacgtcgccaggccattcatgaatatgcgtaccgcgatcaatcctggatagaggatatgggtcgtagcaatcgccggatcaccataaagggattcctgattcaggacagtctcgtttatgacgcgccggatgttatcacccagcgcgataatctggtggccgcctgtgaagccggtgagtccggaacactggttcacccgacactcggggaaatgaccgtcagcgtgactgagagcggcctgcgggtgtcagaaaacgcagaaagcggccgggtgtttgaatttgagctggtggttatcgagtccggcctgaaagtgtttgccatcaccggcagcgaaaaaaccggtgaactgacgttcgggcagtggctgaaagaagcagcacataccaccctgaaaacgatcgccatgattaaaggcaaagtgcggtcagtcacgcagatgatgaagacgctgaaacagactgcggatttctgggtaaatatggtcagcagttcagttgatgaggtcactaatctcagtaactcgctgaacagtgtgttcggcagcaataaatacgggcgttatcagaaaggcagcgcgggcggggccgtgtccggtgcgaccggtaagcgcgtacatcagggtgatgctgatgaccgtgaaattatcgataaaacgctgaaccaggccattattgaccggcaacggctggatgaaacactcagcgcggtcagtgatgctgaaacccccgaagatgtgatcgcacagatacagcaggtgtttgtcatcctgataacaatggacggtgacaccggccagaagatgcagatcctgaatacattatcccgtttccgcaatctggaatatcagcagacggagcaggataaaagaattgccgcactgactgaaatgatgctggttgtgctggcttcctcggcactttccgttgtggccggtcagtccgacccgacaaatagcaccgaggccgccggatatcagcgggaggtctgtgaatcccttgatgatgctatgactctcaccggggatctggcgctggatgacatctatcttaccctcctgaaccggcgtgaacaggttgtcattttcttcactgataaaggctccgaacgcggacgcctgtcgtcttacgctctgccgtcggtgctgccatctctcaatgtggccaaccgcctgtatcaggatgcaacccgcagcgacgagctggtgatggagattcagccccggcacccggcgtttatgccggtcagatttaaggcactgaaaaaatga

SEQ ID NO: 280431 - DNA, 738 bp, Morganella morganii
atgcgactgatattagttatttttactctgtttatatctctgaatgcttggtctgtatcctgtactgaagattatcagaaaagaggaggtgataatttttcatttcctgatgcaaattacatgattgacagaagtgtgaatggaaagatttgttacaaaggaagggatgtaacaagttgggcgacaggtgacggaatggaagcaacgacatttatatttcctgaaaaaaataaagcgttagcattaataacattaaatgaaataaacccaacgtcatataaagcaaaaagtagaataagagtaatacttataaattcacggggtcaacctgtaaaatatgattttattaaagaatattattcgaatgaccatcctgaaaaagaactaactgatatgcgctttaccggttatgactttgaaaaaggaatcgtttactttgaatctccagcgtgggcgacaagcatggcaattcatgcatttgaagtccctttcgatggtgattatagtaaagtaaaagagaaatttataatcgatggaagtattaaatatcatgtgatgtcaactatgacattaaaagataaagaagatttttttagatatctgatagtaactcgcggtgtttataaagaaggtaaaggtcgagaatacattgattatattgtatctccggaaggaaaggtaatttgtgaagctgaaacagatgatccggattggaaattaagagttagatgtaaatag

SEQ ID NO: 280432 - DNA, 1878 bp, Morganella morganii
atggcgggaaatacctttgattttgaattgaatgctgatgatcaggccagtcaggaaattgccaatattgaagctgagttaaataagcttcgccctgttttaaaggatgtgcgcgaaagccttaaaatgggtggtgatgaatcaatttccggattgcgggatgtcggtgaaagaattcgcgatatgtctgatttttcgaaaaaaggcgctcaaagtatcggagatatgatcccgccattgaaaaatttcggagaattgtccggtaagtacctcaacatggcgaagaaaatcggcggtattggcgccatcggctacgccgggtatcaaatgatcagccaggtaccggaacaagccaggaaagcgactgaagtctcaaccagcgccaaaaatatggggatgagcgttgaggaaggcacacgtcttacgggtacgcttattcaaaaaggatctacagaagatgatgcccgccaatcatttgaaagcctgtacggttctctgaatgacgcggtcagagggaataacaacgaattactggcgactatccgtagtattggtgccagtattattcagcgtgaagatggaagtgtcgatctgacaaaaacactactcagcctggaaaaagccatccagaacattccggaaagtcgcaatactgaactgcaaagcaagcttgggttatctccggaggtgcttgctctgctccgtgaagggaatttacaggagagactagataaatcagaccgcatgggacatacccgtgacgatgctgttgtagagcaactcagcaaaatggatgaggtacttaaaaacatttcagctgcatacgagggagcaaaaactaaaaccggtgatgcggtcgcaggggcgttactttcggatgggtcagtaatcgacggcctgaatggtgtagagcaattattgacatacggtcctgataacgtagcacttatgcaaacaatgggttttctgcatggcaatgattctgacattctgcgaaccacatataacacaccggagctttacggtaagttgggcatgtgggatcagtcgatggtggatttcggtattatgaccgatgaaatccgcaaaaactatgaggagtgggagaagcagcgtcatcaggcggaaaccgcgaagcaaaaatcggcgctgaacagtaaggtgcctgataactgggtgcaggatgagacgtataatccaaaccggcgtggtttacgcaataataacccagggaatcttatagcagctcccaatagtgtggggtatgactatggaaataatcaccggtatgtgaagtttgcttcatcaagggacggtaatgcggcattgtcacgccagatcatgctggatgctgaaagggggctgaatacccttgatagtctgctcaggaaatatgccccagccagtgttggtaataacacgcagggatatatagacagagtttcaaagggtacgggatttaacccctatgagcggcttgatatgcacgatccccgcgttttagagaagattattccgtacattataaaagttgaaaatattgagcagccatacagctatgaagaaatatcagcaggtattacggattctattatggatgaccgctgggctggtggcagaaatccttaccgggttcaggagcaacgcaatgcatttatgatgcaacaagagactgaatcagtggtacctgacttcaaaatagaaaaggatccgacccaggcattactggccttcaccgagcaattatcacaagttcttcaggaaaacaaagcgggtggtacactggaaattgtcctgaccaatgcagaaacaggcacaaaaagcagcgtcaatgtaaaacctaaaggcagggttacaactgcaatgaatatgccatga

SEQ ID NO: 280433 - DNA, 291 bp, Morganella morganii
gtggaaacaacaaaaactatcacgctgagtaaaccgctggaatccaatgacggcaaagtccgttatgaggaagttaacctgcgagagccgtgcctgtttgaagtggagcagttttataacgagatggataaaacggttggttcccttccggctatgcgtctgttgatcgtgttggtcagcggggtgccggatcaggtggttaagcgaatggcaatttctgactttgtggaatgccgtgatttcctgatggattttttgactttaacgcctggcaaaaatatcagcaaatag

SEQ ID NO: 280434 - DNA, 369 bp, Morganella morganii
atgggcgatacatccaaccgtctggcgggaacggctcacgtctccgtcaacggcatgtcaattatggtggcggcggactttaaatacagtccgtccacggtcacccgcgaaaccctgaccggtatggactttgtccacggttacaaagaaaagccggttgccggttttatcgcgatgcgtgtccgtgattccggcggtaccactgtggcggattttaacggcatgaccaatgtgaacgtggtggccgaactggcgaacggcaaaaccatcatcggtcaggggctatgggttgttcagacccaggaagtaaacagcgaagacgccgtgtttgacgtgcgttttgaaggtcgttcggtaacggagaactaa

SEQ ID NO: 280435 - DNA, 1482 bp, Morganella morganii
atgacagtgccatttgccactattccgcagaatttgcggaccccgatgtttttcgttgagtttgataactcgatggccaacaccgcaaccgccacgcagcgcacgctgttaatcggccagatgctggacggtgcgacgggtaaagacagtattcctgagcgcatcacatcagggacacaggccgcagaacgtttcggacgcggatccatgctgcacaccgaagcagaggcgtatttccgtaatgacacggccggtgaggtgtgggtgttaccgctggcagatactgaatcgcagacagcagctgccggtaaactgaaaattaccagtgccgctaatgataccggtgttatttcactgtatatcgcgggtatccgcgtacagatggccgttgtggccacggacacagcggaagctatcgcaaccggactgactaaagtgattaaccgcaatgcgaacctgccggtaacggcagccgcagaggccgatacggttactctgacggccaaaaacaaaggcgctcacggtaacgggattgatatccggctgaactacctcgggctgacagggggcgagtcaacaccgtccggttttgaaatgaccatcacggcgatgtccggcggtaacggcgctccggatctgcttaatggtctggcgaatctgaaagaccgatcctttgattttatcgtgaacccgtataccgatacggcgtctctcgatgtggtgaaaacctttctggcagaccgctgggcgtgggacaaacagttgtacggccacagctacggagtgatcaccggcacctatggtcagctggctgattttggtgaaaagcgtaacgatcagcatgcctctctgctcggggtcaacggttcaccctcaccggattatcagtggagtgcagcatataccggtgctattgcccagagcctgcgtaatgatccgggccgcccgttacagacgctggttatcagtggtgtgctgccgccggacgacacgaagattcttgaactgactgagcgcaataacctgctgcacagcggtatctccacatttaccgtggatgacgacggtaccgtgcgggttgagaatatcatcacgacctaccagaaaaacgcctacggcgataatgacgacagttacctgcaggtggaaacgctgtatctgctgatgtttgtctcccgctatctgcgcacccaggtgaccagtaaattcggacgtatgaaactggcagatgacgggacccgcttcgcaccggggtctgcaatcgtcacgccgaatatcatccgggcagaactgatcgcgcaatatggcttcctggaatttaacggtcatgtgcaggacgcgaaaggctttgccgccggtctgaaagtcgagcgcaacagtcagaatccgaaccgtgttgatgtcctgtggaccggcactcttattaaccaactgcgtgtgtttgcgctgcttaaccagttccgcctgatgccgggcaactaa

SEQ ID NO: 280436 - DNA, 168 bp, Morganella morganii
atgtttgtaaaacccgtaaaaggccgcagcgtccgctgtccggtcaaaggggagcttttgcctgaatccgggcaggacgtccccgataatgttttctggcgcacccgtctgaatcagggggatgtcgtgccgggtaatcctcagaaagtgaaggagcaaaaagcatga

SEQ ID NO: 280437 - DNA, 339 bp, Morganella morganii
atgggcgttgactgggataaacacctgctggggccgctgcacaacgtctttgcggaaaaggcacgctgggaaccggtgaaaagtgccaaaggtgccggattttacgatattgacggcatttttgaccgggcctatttccagaactatgaaagcatggacggtgaaagcggtatcaataccacccgtccgatcctcggtgtgcgcgatgttatttttactgtgccgccggcgaaaggggatcgggtatttatctacagcgtcagcaccctgtttgtggtatccgatgtgcagccggacagccacggcgggacacacctgatcctgaataaggtgaaataa

SEQ ID NO: 280438 - DNA, 372 bp, Morganella morganii
atggcgaataaaaaaaatacgccggagaaaccacaggaaccgggcggactaccgcccgaactgatggtgaccggtcaggctaatccggtgaaggatccggagactgccggcagtgtgccggtaactggaaatacctcagagcaaaagcctgttccggaacctgacccggaagccgatggtgtgtatgtggtggtcaaaggccgctgcgtacaacacgacggtgaactgtaccgggaaaaccagcaaatcacgctggatgatgccgatgcagcccgcctgattgacctgggtgtggtaatgacactggaggcagtgcggaaactgctggcgaaagccaacccgcccggcactgtaaccgtcaatgggcgttga

SEQ ID NO: 280439 - DNA, 582 bp, Morganella morganii
atgaccacgatgaatatttccgactatgcgaagcatgcggatgtgaaccgtaagacgatcacccggtggataaaggccggaaaatatatcgtgatggccggggatgaaatcgacgtggaggtcagcgaccggaacctgaaaaagtaccgggacagcaaagacccgcgcacgaaaaatgcggtgaaaaaatccgatgctccggagaagaaaccggcgaaagaaaaaggcagttttcagcagcgcgccgaatcggtgtatgcgggtctggtttccggcgatgtgaaagtccgtgatctggaagaatcgaaagccatcaaagagcactactttgcagagctggcccggttggagtacgaagagaaatccggactggtgctgccgtggcaggacatgatcgacaaggtgggcgaggagtatcacgccatgcgtacccgcctgattgcgatagcccctgaacacggtccccgcctgcggtcgctggcactgacttcctctgatacagagtttgtggccgcgctgcaggatatcattcatgaggcgatggaggaattgagccttgaccacagtgaacaggggggataa

SEQ ID NO: 280440 - DNA, 645 bp, Morganella morganii
atggcaaatctcacggacctgagcaaccagctccgaactctgcggaagcagataccctttgctaccgctcaggctatgacagctgttgtcagaaaaattgaagacgcgcagaaagtggcaatgcagcgcaatctggataatccgacaccattcacggtgaagagtgttaaaagccgcggtgccagaaaaagcgacctgaaagcgaaagtgttcgtgatgaataccgctgctgcataccttgagccgtttgaaaccggcggggtgcataaactcaacgggtctgcactgctgaaccctaaagacatcaagctgaacaaatacggtaacctgccgcgcaataaactatccagcctaaagagcaaagaaaacactttcatcggtgatatcagtggtgttaatggcgtgtggcaacggaagaaagcaaagaagggcaagaaaggccggaagcgtctgcagcggtcacctaacggaatccgcagagacagaaagaaacaaccaatgccgaaactgttaatccggttcggtgatgccctgcctgttgaacccgtactcggatatcaggacagagcgatgaaggtgacacaggcgctgttgccgcaggagattaaccgggcaatagcagaggcgatacgaacggcgaggtga

SEQ ID NO: 280441 - DNA, 237 bp, Morganella morganii
atgcgtaaagcccgttttactgagcatcagatcatcgttgtgattaagtcggttgaagccggacgaactgttaaagatgtctgccgggaagccggtgtttctgaagccacttactataattggaaagccagatacggcggaatggaagcatctgatattaaaaagattaaggagcttgaggacgagaaccgggcgctgaaggacgttatcgaaaaaagctttaaagcccgcttttaa

SEQ ID NO: 280442 - DNA, 555 bp, Morganella morganii
atggcggtcatcggctatatccgcgtatcaacaactgaccaaaacagtgatttacagcgaaacgcgctcatcagcataaattgtgatcagatttttgaggacaaaatgagcggtaaaaccgccgtcaggccgggactgaaacgggcattaaaggccattcagccgggtgatacactcgcagtgtggaagctggacaggctcgggcgcagtgtcaaaaacctgatagcactgatatctgatctgcacgagcgcggcgcacacttccgatcactgacggacagtatcgacaccagcaccgcgatggggcgctttttctttcacgtcatgtcagcactggcagaaatggaacgcgaactgatagtagagcgcacgctggcaggattggccgcggcgagagcgcagggcagaatcggaggacgaccagcggcactgacacagaatgaccgggagcaaatcggccgcctgctggataaaggccattcccggcagcagttggcaattatttatggtgtgggggtatcgactatttaccggtatttcccggctacagcgtaa

SEQ ID NO: 280443 - DNA, 285 bp, Morganella morganii
atgctccgtattgaagttattttcagcagcaaccaaaaagagatgatgcctcttggcacatttgaagcactggaaaaggaaatagaccgaaagctacgggctcagtatcaggatatgaacgttcgtattgcgtggggaaccaatgcggcgatgtcagtaaccggcgggaaaaatgataaggacaataaaaaaataaaagagatactgcaggagatttttgaggatggcagctgggtgcctgaaacggcagacgcttctgatgatgtagaatattttgataagtag

SEQ ID NO: 280444 - DNA, 531 bp, Morganella morganii
atggttaacataaaatttaattcagaaaaggctttagaggccattctgtatgttgcctcaaaagcgccaattccagacatttatcacgttataaaggtgctgtactttgctgactttgttcatcttgagaaatatggcagattaataactaatgacacctatatagcgatgaaagatggacctgttgcaagtaatgcttatgacataatcaaggtggcgagaaattgcgggcgcatgatccctaacgggcttgaggtcagagacatcatgtcatcactagttgtcgatgagattatggttaagccacttcgtgctccagaagaagatgtatttagtgactccgatgttagttgccttgatgaagctattaaaaatgtaggtcacttaaaattcagtgatatcaggacaatgagccacggtaaagcatggcggtcagctaatgaaaatggagagattgatattctttccttggctgatgagtgcagtcatgggaataaggacctcattgactacataacgacaggcgcataa

SEQ ID NO: 280445 - DNA, 465 bp, Morganella morganii
atgtctatggctgacctattcccagatgcgtttaagaaaaatcacattgatgagaaaaagttagccgtaggtaatgtgttatatctgcactgcgatttcactactccgccaaaagttaaatatttggttgtctgttgctgtaatccactgttagttcttactgtaaattcagagattcataattatattaagaacaatgatgagcttttggcatgccaggtcgatattgtaaaggatgaccacgaatttcttaaatgggactcatatatttcatgcattgaggcgcaccaggcattcacacttaatgaggtgatggaagagctaagaaccaactattcaagtgtgtatgttggcgatgttgcggattactgcatgaggagtgtgtatatcgccgttggaaatagtccagtcatgtcgaggcgacaaaagggacagatattatccgccatgtcagaataccaataa

SEQ ID NO: 280446 - DNA, 2832 bp, Morganella morganii
atgattaaaaaatataaccagaatgaagttaagggacgtaactttatatcagacccttgttttgatgaatgggataatgaagtctgggataaaggtgagccggggaaatatgcaaggaaagaggacggagacaaaacttatcttcgtattcttggcaagggaagtatttcacaatcagttattttaccgaaaagaaattctggtaatccggtattgcctccttcttattcattgtcttttgattactttattgaattcaaggcggctgcatcaataatactgaaatatataagagggggggatgagagaaataaagaagagattttcttacagaatgaaaaagagtggtgtcagaaagaattatcacttaatgtatcagaggaagataccgaaataaaatttgagttttatgccgggaaatcaggcgggaataaagcattgaatctgactgccgttgatatgcagttacatattggcggatttagtccggaatccattgtattcgatcatgaaaatatcccggcagataagccacagttacggcttaactatgggcgtaaacacattctcaatatcaggccgtctgatgacagtgcatggcgtgatcttgactgtgtactgaagtgggggagtgagactccgccatctaactatccaatcagttttgatcctgaactgaacaccgtgcaatccttaaaaaaagagggaagtgattggaaaatatcctgtttggctcaaaaagtcagcggaattccggagacattcaacataatgctggcgtcagaatacagtgcagtaccttttgttttcgatgcggaaataggcgattacctttataaatttacggaaccgaaaatcaccgggattgccgttattgctcaaaatataccggctgaagtcagtattcgtgttgtttgtgattatgatgaagaatatccggataagccgggcgtacccgatgttgatgttctctggaaaattgacggcggaaagagtatcagtacgaccaaaacagataatgatggtatggcggctcttacatttttaccggagcagggcgggaattataaacttgttgccgtaataaccgataaagcagggcgcaaaagccgccatcagtttgatattaatgtttatgaccgttctccatggctggatgatacccgtattgatattaacagtaccggaatcgactatcaggatgatgcggcttatctgatgaccgggacaacgacggttattcatctcaactgtgaaaataacgaaaatattttcggccgggttaagctcgaaaataaagagggaaataccggtaccagtatcataccggcggaaggtcgtgatatttcaccggaaggattgtcctgggatgttaatatcacaggcagagacagcagagaactgacactattattaaccagtgatcagtttgatatttcacaggaaatcggtgttattacattgcagcctgattgtgataaagaaattcagtcgttgaaagtgaatggtgaggaagcgaataaaaaaacaccgttaattatcattccggcaacaccggtaacactcaattgcagggtcaataaattattgtcccgtttgcaggctgaactgaacagtgaagaaagtaaattgctgacagcagaaccggctttcgggcaattacaggtactgaacaacaatgcagcagaatgggtattaagaagtgccggcccgcagggaggattctttaatctggatctgaacattccgccactgacaattccgctgacgctttccggccgtgcactgccgcaggaaatcgcctcaggaattgagctcattacgctgaataatacgccgctaacaaccccgggaaatttatttcttgcgccggggcggggctgtacactgacagtgaaacctcatcctttactgaaggatattcctgtttcattagttgcagaaaccagcaatgaggtttcggttatcagtaatccgccgtttggtcaggaagtcagtctggcagaaaacggaacctcctggcagatatctgctgacccagcttctgcacgcggaaaattctcattgcagattcagagtcagtggggcggagcaccggttcatctggatggtgtggtattgtctgcggatttacaggatgaaggctctgtctgtgtcactgatggtgacatgggcagaaaatacgatattgattttaatattggttttgcttttctggctttggaactctattcactggatctgaaacttctgccggataatttaatcagcggacaaaccgtttcctgggaactgacggaaggagacaatcaccgggatactgtttcttttgatccggagatacctataatattagattcaccggaaactgattgggaattcagttattccgaagaagaaagcactcaattcgatttagtattaaacagtcaggataagtttagttataaaattccgtgccatatttttagcgatgaaaagtatctggaaaaaagtcaatgtatttttatgttgaatgattcggttattaccccgggtataaataataacaaccttgaatataagaaagagatatcacttaaactgaaattgtcacaagaaatatcagcatttttgaatggaatggtattggcattagttgttcataaaacagatgatgaaggtgatagtctgaatataacctcagataaattaatcactgttgataaaaataaacctgaccttgagtggagcgttgaaaccgatgtggcagtcggtcaccgttttacactggagattgttttggaaaatttaaaaaatatccgtgctgttatgaaatttacctcagtgtaa

SEQ ID NO: 280447 - DNA, 4578 bp, Morganella morganii
atgcctcgtaatgtaaaacagattttgaatcatctcgcagagaagaaacgggatgcatatgttgattactttactaattatgtagtgggtaaagatgaaaatacagcaatgctgggaattaccgatgcggatgatctgtatgattactttttaacggatgtaaaaacaagtgctgattttgaaaccagctatgtttcggatgcactggccagtattcagcaatatattagtaacattcttaatcaaaaagaaccgggttactcaggtgagtttagtgaggaacttcagcagtggtggtcaggttatctcgggcatatttcactgtggaaagcgtatcagaaaatggaggattatccggaagattataacttaccggatcatgttactgaaaaaacaaatctgtacactgactttgcatcagaccttggcagtgacagtcttaatgatgccgctatacaaacggctttccttaaatatctgcggggttatgaagcagttaatgcgatcagtgtcatttccggatatgttgattatccgggagagcgaaatgatcaggatacattcaaagggcatggttttctgaattctgactattttttcatcggtaaaaataattcatcaccagccggattttactggcgtgaagcaaatataagagcagataaatccaccgaatatatttctccccgggcgtggcaggagtggcaacctctggtcatcactgaagatgcaaaagatattttacaaatgcggattgtcaaagtgagtggttgccttttcattgtgtatctggcctgtaaggaagaaataattgcggatgaagcaaaaccagagaaaggaagcagggttaaaaataagaaacaatataaggtcacacttaagttaagccgtatggggctggacgggaagtgggatattcctgagcagttatatgaaaaaatctatgatagtaagcctgtgaaaaaaccggaagataatgcggatccgttccggttaatatccgttgtattcactcaggatgaacagcgggatgattatctggttattgcatggctggataatcagaaaaatattattttttccaatgttttaaatgtactgagacaacagttagctatcgacagcaagggtattctcggcaatggatggcaggcgaaattagcatcacgattttttaccggaaaaaatatctgtcagcaccgtatctttggtattgaaaaggatataagcagtatccggagaatagacagtgatccgaatttatcgctggaggcattctatagtctcaaaggtaactatcatcagttacgggtcagggggacttgccatcgttcagctaaaatacctgatcttatttcacttaactttcaggcaacggtcagtcagtggagtaatggccgcattattgtcagcggaaatcgggacaatattactgtcagagcagaggcaactaaaggagcagaatatttagcattattactgtccggtgaaaaattgattgagttcaataagggagactttaaggaacacaatggctggttttcagcagaaaaaatattctcactttctcaggaacaatgtgacctgatagccgtaaaagattataaaaaaatacgcagtggtgccggtttttcctatcagatagcatccgggggggcggaaagttcactggcgcatgttaaaaaccgcatcagtacggtgatgcaaccggttgttgttcctgctgagttatctatttttgctgacgaactagccggactgaaaaaagaagactggaaaggtgagttgatttatcagaaggatagtcacacaccttggtgtaccttcacctggagtaatgacgaaaatgataaaaacaatgaggatattaatgttcgttttaaatttggattaacgaagaaagatgtaagcggtgagttcagcgttaaaatcagcaaattatcaaattcgattccatatattgagacctttccggaacatcagcaatttttaacgcttaatcagtcagatgatgttaagctaaaaaatattcgtcttaattctgttcaggttcgtgatcttatctatcgcgctcaaatcgcagtcagacatatttttgactgggaagcacaaatcacggaggaaccgaaatatgaagaagataaagaagataaagaagataaaaaagaaatactcgacttacatggggctaacagccggtatctgtgggagttatttttctatttaccctatctggtggcaagtcgtttttcacaaaatcgtctttattatcaggctcgtcagtggctgcattatatattttcaccttatgacggacaccgtttatccataaaagatggtaacgaattattacctccgccatattggaactgccgtgtattaacgcaggaagatttacaatataaaagtaatgactatgcattacctgacccttatgcgatatctgaagatgtgccttctcattatcgtaagtcggtctatttaatgtatatcgataccctgatttccgaagcggatttaaattaccgtcagctcagccgtgacagtattacccgtgcctggggattttatcatcaggctcagggaatgctgggttatataccaaaggagcacagcttaccgaaatggcagccatgtactgttaatgaactgcttgataataaaacctattctgtacaggaaagtaccaggcctgaattattttcaggaatatatccggaaaatatgcccaaaaagctcagaggatttttctggtacggcagtctgggcaatgaacgattccgtttgcccgttcagacaagtttactgagcaggcagtcagttctggagcaacgcttatttaatttacgtcattatctggatattgaagggaatatgatgaacctcccgttatatgcagctgcgtttgatccgttcgatctgctgcgttcgcggctgggaggaacctctgaactggcatatttacagtccgggtcattaagtattccgtcatattgtttccggaccatgctggaaaaagcaaaagaacaggcagcggcactgattactttaggggataaacggctcagttattatgagcaaaaagaacgctatcacactgaaaatatgcaattaaaggatgcggttgcgcttgcggatgccagtgctgcgattcagtcatcgctgcgtgaccagcaaaaatctgctctggactctctgaatgaagccaggacgatggctgagagcaaaaagacatattacggaagcctgagtacgagtacaaaagaatgtcaggccagaaatttattagtgagttcatccgtgtttcatggggttatttcaggtgctgctgttgcggcaggtattgcggctgcgattccgcgtgtatttggtctggcgcaggataccggcgaccatggtaaaacagcactgctctctgctgtgggggggactgctgcattaggtgcggaacttatgcgcggtactgcggagtatgttcagatagatgaacaataccgtcgccgccaggaagagtgggcatttttggcgtctcaggcagaaagtgaaataaaggtactggataaacaaattgatgctcagaacgtggctattaccgcagcagaaaacagtgttaaatatacaaagcttcttcaggcgcaggctaaaaacctgtatgactatttcagtcagacccgtcaggttaatgaaagtttgtacgaaaaaatggccaatattattggcttattgcatgaccagttgtgttcactggtcagaacattttgtgcattaacagaagcatcctggcgttatgaaacggatgattataaacggcagacatttattccggccgatctgtggagtggcgataatttaggtattctggtcggcgttaaattacagaaagcgttgctggaaatggaaatggcgtatacacagcaaaatacacgccgcctgaatatcacaaaaacgatttcactgaaatcacttgtcagtaatcatctggttaaaacagatgaaacagcgctgacaacatgggatgaagtaaaagaagcattaaaaggagcgaaaaaactgtccttcgggttatcccatcaattttttgatacagattttcccggacattatgcccgaaaaattcactctttatccgtgacatttccgacattattaccgccatatcagaatatgcgggttcttctggagcagacatcgaatacgttattagtttcaccggatattgatgcggttaaatccctgtatacatcagcagaacaaaaaaacagtgaatcaattatccgtaatttgcgggtgaaccagaaaatcatactctcccgtggctgcgatgacagcggagagtttccggaagatgcctttaccggcggacaataccatagttttgaacacagcggagctatttcacactggctgctgtccgttccccgtccgcagaatagcacagagctcattgataatcttaatgacattatcattaaacttaattatacggcgaaaagtggtaatgatttctttgaagcggcggtcaatgaattactggaaaatacggaatcaataataaaagagtgcagcgacaatgattaa

SEQ ID NO: 280448 - DNA, 3558 bp, Morganella morganii
atggaaagtgataaacataatttacttttttcacggatagttgagcaggcacttccgggattttcagataaattatcagcaagaaaaaatgaaaaatcggttattacccgtctgaagcagggaaaaaaagggctgatggctgactatcccggactcggatatccggatgctgaaatattgcataatcgtctggcagttgcagttcatactgtggcccgtaaacaacgggaattacgtcagatcagtgagtttcgttcaccgcgcgaagaaaaaggactgaaagcattaacccggcaattaacttatgaagatcaattctcgccaaactgggcgggaaatactttaccggatgcgatagattcaggccacggcgctgttgcttatctttatgacctgcttacatttgtggaaagaatgattgaaccgaagggagacagtgataaagcgattacactcaaacagcgcagaccggatatttataatattttactgaatgaagagaatgtaaacggaagtatttccaaaattcagattattaatcaaatcatgagtactgcaataagtcagcaggaaaatagtgaagatcctgagaaactgatgctgaatgcacgctatccttaccagtttccgtttgaaaactatatgaatcagatttatgccgtactggatgaatatgacctatctataggtgatattaaacggcattgcgatcccgaggcgccttatttcacacagccggttttgcacggaaagcgttcagattctgctctctggctggatagtcgtttagggcctggtctgcgtaatattttgctggccggaccacaaatacaaaatagcaagaaagaagataatgagaaatattttaagagaaattttggtgttgaacagtttacggatttactgaataccacggttttctgtcagcaattaaaacttgagcgtgtagatctggaatcattgttttcctgtggtgaatatacaccacatttatccccgaatgttataccggaaataagtaacagatatgcggataaggagccggggcgtgaggtatctccggctgtttacggttcggtatttattaataatggtgtaatgcctgctattagtgttaatgaaaaaatacacagtttcaatgaactgaatgaaggaagatgcgaacgcattgaacgttttctgcgtctgtcgagggcacttaatcttccttatgaaaaacttgataccttattgatatctattttaaaagctgaaaataaccagagcggtcacaaatgggatattactacaaataccctgagagctattggcttgttcacgcaaatgaacagaaaactaaaatgtacagccagtcagttttctgttttatatgatggtatttcggtttacagccggggaaaagatatcagtgattttgaccggttatttaataatgatgaccgctttaattaccgttttattcttgatgacaaaaaaatggaagaacgggatattaaccgtatctgtagtgtttttggtattaactacgatactttttcttatctggcactcctgacccgtgaagttatgggactgaatgtattaacccgcagccgggatgttatttctgcaatttatcgtcctgtggttttggctgacctgctgaaaataaaacccctggaattactcgcattaatgaaatcaatgaatcctgatgctcagtttggccgtttatttacagggataccggaaaaccaggtgtacggatcattcggacaggcggatattaccagtgcaatcagtgcactaatcagtcttcagacatggcggaaagagaataaactgtctgtagcacagatctttaattggatcacacctgcgattgtcgatgaccaggaagataaaactgagcgggaactgttccgccagattaaagaaaatacagacagtgcactattcagtaatgaagtcttgtatcttgctggtgtaccgaaggatataaactgggtttcggcattacaggaactggtcgatgaccagggaattctgaaggatgctgatgatggtctcgactgggacagttataaaaaaaatgcattaaaaataattacttccaagtcggaagaaaaattaaaaaatttaacatcggaagaaagaaatactatcgttaatacgattctgtccgtccttttggaaaaaagagcagcacagtggaagagtgtgagtggattactggaaggatatcttggaaataaaactgacagtattacaccggcattgtactggtgtggtagtaatacaggtgagtttctgaaaaatatcagagcactgcctgataataatatgttgtccgctaaagataataacgtcatggtgttattgtcatctctgcggcgttatagtgatattattgcacacttccgtcttgagccagctatgatgtcacagttattatctcatgataataatcacaactggtacaaactgaaaacagaaaaacctgatttacagttgctttaccggctttcagtatatcggaagcttattgatgatgctaaacaaccggctgataaattattaaactatctttctcttattaattcactcccgatagatagccgcagtgatgaaatacgcctgtatcgtgatcaggcactgaataaattatctctttttatgggatggagtattaatgagttattaactgcagcacagtatgtcgcgccggaaaatgccatcatccggacattgccgcaaattcttctcgttaaacaaatccattccgtctgcctgaaaacggggttgagcgcccgcagtgttatttcgctgtttaatctggatgaaagcagtgaatcatcactgtatcaatctgttgccggccaggtaatggaaagtctggcacagcaggatgtatcactttacagcaacgatgaatccagtcagggagacctgaccgcaagtgtttcagccgggaagacaacactgctggtttacagtgaaaatcagcaggaagaagaggaagagaatggggaagataagacattgctgacagttaccttacagacactggaaagtacaccgttggagggagtacccgttgtatggaaaaatatatccggactgggtgaattaactgatactgaaagtaaaaccgatacatcaggccgggcatcggtgacattaaaagcggggaaaaagcagggagttgcattaattaaagcatattatggtgtgaagaatatttcgctgcctcttatccggattgattgcgacagcagttcgttgggtgctaccgatattcagaccgtaccggaaaaaccggtagatattccggcagacgggatatcagctgttgaaataacagtacttttcagagaccaatacgataacccgggtatggataaaaatattcgctgggaaacaaccggaggccgttttatccataaggagaacattacggatattgatgggggctgtcacgcgacactggtcagtgataatcctgcagatattgcggtgaatgtgttctatgaaaataatcctgaatactcgatgagagttaatatctcttttatttaa

SEQ ID NO: 280449 - DNA, 1101 bp, Morganella morganii
atgatttttaccaaaatcattaggggattcatcagaacgaagtatgcatttccggaaaaagataagaaagaagaaatcatctatgcagcacaacgggacataacgaaatacggaactcaggaacaattttataaaccgatgtcttaccgtgctacaaacctgacagaattcaataaacttaagtgggataaatatttttgcgtggttgttaaatatacggattcagccgggggaataactaaacctgaatataattttaaatatttgtctcccgttaaaataacggatattaataataatgtatcttctttaacgtataacgggacagggcaggttgccagtgtccggttttccggtacagaacaggggaaaaaaactggatattctgatactgcattaacaatccctgatagtattgcagatgcacttagcctgactacccgtttaccggtatctgagttgtttctgtatgaaccaaacagctggatgctaaaagtttcccccgaatttatggcgccggagtatagtgatattatctcaaagctgcaaaatgataatatcattacagaagatggttatgtcagtgcattttcccgttatcgtattaatgaagataaccgctgcttaataaaagccgtgattataccgggtgaaaaaaggttgccgccacatgtattacagttaaaaactgatcgttatgataatgacaacgctcagcaaatacggcagaaagtgactttttttgatggcctttcccgtcagttgcaaacatctgtcagagttgaatccgataatacggttatacgaaatggaaaaggcagtcactctccgaaaaaacataattctgatttccgctggtcggtaaccggccgtaaagaatataataataaaggttttattattcgtgagtatcagccttattttattaatgactggaagtatgatgttgactttatttcaggaaatgagcggtggtcagatactaattattatgatccgctggggcgccttatcaaagttgtgacagcaaaaggttatttacgtaacaccatatatacaccctggtttattgcacaggaagatgaaaatgacacggtatga

SEQ ID NO: 280450 - DNA, 1080 bp, Morganella morganii
gtggacgaacttcacgcccacaaaacccgtgatgtgtgggatgtgctggaaaccgggaccggtgcccgcctgcaatccctgctgtttgcgatcaccacagcgggatttaaccgcgaaggcatctgctacgaactgcgggattacgccatcaaggtattgcggggcgtagtggaggatgacacttttttcgcggccatttacacgctggataaagatgatgaaccgttcgatgagtctgtctggataaaggctaatccggggctgggtgtctgcaaacgctttgatgatatgcgccgtctggcgaaaaaagccaaagagcagatagccgcccggcctaactttctgaccaaacacctcaatatgtgggttaacgcggagtcgatctggatggactcaggaaaatgggacaactgccctgaaaatgcgccggatgatgaactgaagaactaccctgtctggatcggtgttgacctggcaaataaaatcgacgtggccgcggcaattaaggtttatgaagatccgcgcggacaggtgcatgttaagtgtaaattctggctgccggaaggccggatagaaaccgcaccgaaccatattgccgatctgtaccggaaatgggcggctgccggacatcttgaactgacggacggcgaagttattgatcatgacatcatcaaagccgacattctggcatggtgcgaaggtgatgatctgcgtgaactcgggtttgacccgtggagcgcggtgcagttctcccgccgcctggcggaagagggtatcccgctggtggaagtggcgcagacggtaaaaaacatgtccgaatccatgaaaacagtacaggccgatgtctattccggaaaatttcaccatgatcacaacccgatgatgtcctggatgatgtcgaacgtgaccgtaaaaccggacaaaaacgacaacatcttcccgaataaatcgacaccggaaaacaaaattgacggaccggttgcgctgtttacggccaaatcacgccagatggtaaatggcggggaagataagcaggatctctccggattctttgaaaacccaattatggtaggtatttaa

SEQ ID NO: 280451 - DNA, 354 bp, Morganella morganii
atgaataacccatcatccattatactaaattcaattagaaaccttgagtttaaatttgaagataataaaaaatataaaaatcactctgattatataaaggcgaacaaatatttatcaaagctcgatgagataatgactgaattagaggcaattaatggtatcaacattgctacgactttgacgcagacaacattcttaccattagagttaataatagacaaatataatgatgatgattttattaataatttaaaatctttagtatcgataaaaatgaatacggataatgttttaaatatttatgattactatgtttttttaaaagaatcaaaaaacgcatcaaaacatagttaa

SEQ ID NO: 280452 - DNA, 2691 bp, Morganella morganii
atgcccggcctgttaacgaaaaagagcggtacgctgacgcaaagtgacacggataaattatatccggtgaatccgtcatttacggattatctgccctgggcggaatacctgcctgagagtcagtgcctgttgctcgatgacggggtatccgttggggcggtatttgacgtcattccggccggaaccgaagggcggacagcggcacgactggatgagatccgcgatattgtggaggatgcccttcaggacagttttgatgaacgcgacagtcacccgtgggtgatccagtttttctgccaggatgacccggaggtgacggtgtacctcgataccctgcgcggctacatccggccgcaggcacagggcacggcgatgacggcggactacctgcgggaaacggaacgccacatgcgcggtctggcggtgccgcaggggctgtttaccgacaaagcggtgacgggggcaccgtggcgcggtcagcagcggcggacacggatggtgatttaccgctatgcggatccggcggtgtctgagccgctgtcaccggaggatcaactgaatcaggtgtgtgaccggctggcctccgcgctggccggggcgggcattgccatactccgtcagaatggggcacagatccatgcatggctgctgcgctggtttaatcccgcaccggactggacggacaaagagacgctgtaccgcaccgccgcccatgaggacaccaggcccggggaactgccgctggtgaatgatttcagtgagatgctgctgttcagcccgccgcgtgccgatgcggaaaacggggtctggtggtttgacggtctgccgcactgcgccgtcactattgaccgtatccgccgtgcgcctgccgtcggtcacctgaccggtgaaacccgcagaggggagcatattaatgcgctgatggatctgctgccgccgggcacggtgatttccctgacactggtcgtacagccacaggatgtactggaagcgcggttcacgcatctggcgaaaaacgcgataggggaaaacagcgaatccgcgcgggtcagagctgatgcggaaacagcaaaaagttaccttggcgaacggcataaactctggcgcggcagtatgacattttatctctccgcctcttccctgcaacaacttaaccggcagcggcgggaaatgacggcggtgctgctgaatgccggattgcagccggtcagaccggaatacgatgtggctccgctgaatggctggctgcgggcgctgccgatgtgttttgatccggccagggataaaaagcactggtatacccggctgatgtttgtgcagcatctggcgaacatgctgccggtgttcgggcgggactgcggcaccggccatcccggattcacctttttcaaccgtggtggtacaccgctgacgtttgatccgctgaacagcgctgaccgttccaaaaatgcgcatctggtgctgttcggcccgaccggctccggcaaatccgccaccctgaacagcctgttcgcccagttaatggccgttcaccggccacgcttgtttatcgcggaagccgggaactcgttcgggctgtttgcggattactgcgcggctctggaactgaccgtgcataaaatcagtatcaaaccgggttgcgggatctcattggctccgtttgctgatgcgcacaagcttgccggtatgccgcaaaacagcggggaactgagcgacgatatcggaaccgatgatagcgaaacggaggagcgcgatatcctcggcgaactggagatcgtcgccagactgatgatcaccggcggcgaggcaaaagaggaagcacgtctggcacgggcagatcgcggcatgatgcgcgaagcgattctgactgcggcgacgcaggcaaaaaatgcgcgcaggcagatgatcaccgcagaccttcaggcggcattttatgcctttgcggacgaccccgcacggccggaagcccgccgtaccagggcgcaaaatatgggagaatccctgagtgtgtttatgcagggatttctcggcgaactgttcaaccgtgagggcagacactggccggaggccgatatcaccctgattgacctcggcacgctggctagggagggctatggagccccgctggcggtggcctatacctctctggtcaacaccatcaataatatcgcggaacgtgaccagtttctggaaagggaaatcgtctttgccaccgatgaagcgcatatgatcacgaccaatccactgctcgccccctatgtggtcaaggtcgtgaaaatgtggcggaaactcggtgcctggctgtggttggcgacgcagaacctggaggatttcccggacacggccagaaagatgctcaatatgattgaatggtggctgtgcctggtgatgccgccggaggaagtggaggagattgcccgtttccgtaaactgactgacgaacagaaagccatgctgctctccgccaccaaaaccccgcgttgctacactgaaggtgtggttcttgccagccgcatcgaagcgctgttccgcgccgtcccgccgagtctgtacctcgctctcgggatgacagaaaaagaggaaaaagcagccagaagagcgctgatgatcaaacacgggatcagcgaactggaagctgcaaagctggtagcgtgggagctggataaggggcgggggattgttattgaataa

SEQ ID NO: 280453 - DNA, 1428 bp, Morganella morganii
gtgctgttcagcaccggtctggaaaataccactttcagtgcggtgaccgataatcaggacgggacttacacggcaggcctgaagggcatcaaagccggtgatgccttactgacagtgaccgtcagcggtacggagctggcagtggccccggtgacggtgaaactgacggctgacagcagcaagctggataaggataagtcagcgctgaccgctgctccgctgagcattgtggcggacaataccgcgacctcagcgctgactctgacgctgaaagacgttaacggtaacctggtctccggccagacggtgctgttcagaaccggtctggaaaataccactttcagtgcggtgaccgataatcaggacgggacttacacggcaggcctgaaaggcaccaaggccggtgatgccttactgacagtgaccgtcagcggtacggaactggcagtggtcccggtgacggtggaactgacagcagataataacaacctagacggaagcctgtctaagttgacggcgacaccaaacactataatggctgatagtgcagatggttcgacagtgctgcttgacttacgtgatgtgaacaacaacccagttccggggcagacagtagtattttatagtaatttatctcgaactaaattaagtacagtcactgatcacaatgatggaatttattccgctgttttaacaggtactctagcgggaacgtcaaatataacagtggaaattaatggtgtttctttatcaccaacagcaagtgttaaattaaaagctaataattttttaagtattgatttgggtaacatgagaaatgtgaatgttaatcaaggttttccaacaactggatttaaatatgcgacatttacacttatcacccctccatctgttaatgctgaatatgattgggtgagcagccacccttcatatgcttcagtcgacagtcaaggtaaagtaacatttatttccgaattcccagcagggataggtgaaataacaatattagctaatcctaaaagttcatctcttgatgatgtaaaatcatatgggtatacgattaatgttaaaaagtggtttgtacacaatcagagtgtcgcagggaaatggaatgatgcaaataattattgtcaagggttatcaggaggatatgaccttagcaattatggtttacttacacctgcgcttgctactaatacaggaaatccaagttcaccagtggggccgggaggagatgtaaaaataggaacactttatggagaatgggatacaccggtattctatgactcgggctggcaatctaacagttactgggcaaaagacggatacaatactactaagtatagagttagtttaaggaatggggatgtgatgaatatatctccatctggatataatatgctgatggcatgtgttaaaaatatctag

SEQ ID NO: 280454 - DNA, 891 bp, Morganella morganii
atgaaaaaactctctgggttaatcgctgcacctcatacaccttttgctgccgatggcagtgttaattatcctgtcattgataaaattgcagaacatcttattgctactggcgttacaggtgcttacgtattaggaacaacaggagaaggtatccattgttctgtagaagaacgcaaaaaagtcgctgaatactgggctgctgccagtcagggacaattagatataattgttcatacaggtgctctcagtattgcagacactatagagctatcccgtcatgctgaaacattagatattcaagctacatcagtgattggcccttgtttctttaaaccgggcaatgtagatgacttagttgaatattgtcgtttagcagcgatgaactcgccttctaaaggcttttattactaccactctactatgtcgggactaaacattgacatggaaaaatttttacaagcggcaggaaaaacaattccgaatttatccggaatgaaatttaattctcctgatatgtacgaatttcaacgttgcttacgtgttgatggcggtaaatacgacattccatttggtgtagatgaatttataccggcagggttagcgtgtggggcattaagcgctgtaggaagcacctataactatgctgctcctttatatcttgaaataattgataaatttaacaatggtgattacaaggggatcactgcgtgtatggataaagtaattgcaattattcgtgtgctggtagaatacggtggtgttgctgcaggtaaagttgcaatgcaattacatgacattgatgttggtgacccccgccgtccactacgcccattaactgcagcacaaaaaacggatgcactggcaaaatttaaagcagctggtttcctataa

SEQ ID NO: 280455 - DNA, 888 bp, Morganella morganii; identical to SEQ ID NO: 277671

SEQ ID NO: 280456 - DNA, 411 bp, Morganella morganii
atggttacgctttggggaaattatgaggggatctctcagtgctgggcacctaactgttatggagctgtcggttttgacccgaaaaccggccagacatctgcgggtaccgattattcaactgcccgggaagctgaacaggcactgaaagaggattgcccgtcctgcgagtatatgacattcaataactcttgcggcactattgtgtattcccgccgttatgatttcaccggaacatattatggcggcagtgatcgggatctccgctcatatgcactcacacagtgcgaagagaaaataaacgatatcaatctgaataaaacccgtaatgataaacgccgttccaaagtacgcagccttgcagaaacagactgtaaaattacagttttagcctgcacgtaccgcgtctattaa

SEQ ID NO: 280457 - DNA, 579 bp, Morganella morganii
atgccacagactgataccattatttccattttaactgaagcaataaagaatccacatgtttttcaaaaactactcaatcttaatttatatttttacaaccgaaagcatgaaaaccaaattcgagacgaaattagccttgttattaataaaaattcaaattatttagctataactgaacacccaaaaaataagcatggtgcagtagatttatctctttataaattgaccaaagaagactctagtttaattgccactattgagtttaaacatcactacccaaaagatttagctattccagcaatacaaaacagtattatctctgacttaactcggagtgtatctaatcaaacaagtcatttcgttcacattattcagcaaagagtggtgcacaaaaaaccacctgttggtgatgttaaatttttacagcgaaactcagacgatatagataattatgtccatattttagaaaaactagaaaaattcccatctaaatacacaaaaactcgtcattcgataacagtaaagtctgaatttattacttctatttatacttttgatatttactccctcatacaataa

SEQ ID NO: 280458 - DNA, 477 bp, Morganella morganii
atgaataagcgattggttaaaaaggtaatggccgcttgtactgccggggcaattgccggtgcgctggtgctgatccccgcatatgaaggtgttgagtatatgccttatcgtgatgtggccggagtgctcaccgtatgttatggccataccggcagtgacattcagcccggcaagttgtatacggatgctgaatgtaaagcgctactgcatgacgacctgacgaaagtccggcgtgcggttgacccgatgattaaggtgccgattgatgacaatacccgggcggccatctattcatttgtctacaacgtcggccccggcgcgttctcgcgctcgacgatgctgcggaaactcaataccggtgatatcgcgggtgcctgtggcgaaatgaagcgctggacatttgccggtggcaagcagtggcacggactgattaaccggcgggatacggagaacgcggtatgccacggaaccccttaa

SEQ ID NO: 280459 - DNA, 588 bp, Morganella morganii
atggcaaaaattgaactcggtggtgtgctgggtaaaacctttggtaaaacacaccagcggcttgtctgtaccacgtccgaagccgtccgtgcattgtgctgcactgttcagggctttgaacagttcctgaataccagcaaatcacgcggcttaacttacgcggtatttcgcggggaaaagaatatcggggtggatgacctgggttttccggtgactgatgatgttatccggattgtgcctgtcgtggtcggtagcaagagtggcggattgctgcaggttattttcggtgcggtgctggtggccgctgcgttctggaccggaggtgcgtcaatggctgcgtggggggcgctgcaaacagggatggctatgaccggtgcatccatgatacttggcggcattatccaaatgctgtccccgcagccgggaggtcttgccatgaaagaccagggcgaaaataaaccgtcctatgcgttcggcgccccaacgaacaccgtttctcagggctatccggtaccgatcggttacggtaaacgccgcatcggcggcgccgttatctcagccggaatttacgtcgaagatcagcagtaa

SEQ ID NO: 280460 - DNA, 708 bp, Morganella morganii; identical to SEQ ID NO: 279917

SEQ ID NO: 280461 - DNA, 336 bp, Morganella morganii; identical to SEQ ID NO: 279919

SEQ ID NO: 280462 - DNA, 453 bp, Morganella morganii
atggctggtgctggcgggtggattggtcagattggaggatttttaagtggtggcattacagcgaatgccaaaggtggggtttatgactcccctggactgagtacatatagtaaccaagtcgtcagcagcccgacactgtttgcttttgctaagggaggggcgccgagcgccggactgatgggcgaagctggaccggaagccattatgccccttaaacgcgggccggacgggaatctcggtgtacgggtatatggtggtgatggcggcggcacgagtggtttttccgtcagtataggagatattcattttgaaaaaacaaatggtggtgatggttcatcatctgatgccgctgggataaagcagcaattaaagtctgctgttatcgagactatcagtgatcaggctcagagaccaggcaccccgctctggaatgcaataaacggtaggagataa

SEQ ID NO: 280463 - DNA, 708 bp, Morganella morganii
atgcgtaaaaacattcaggcagctatttttgcccacgcagaacgtgaatacccccgagagtgctgcggggtgatcgcgcaaaaatcccgtgtagtgaaatactttccctgccgcaatgtcgcggtcatgccggaagagcacttcgtattatcaccggaggattacgccgctgctgaggattgggggacggtgaccggtattgtgcacagccacccggatgccaccactcagccgtcagaactggataaagcacagtgtgatgcccttggcgtgccgtggtacatcgtcagctggccggagggggatctgcggactgttcagccgcgcggtgaattgccgttactcggtcggccgtttgtgctcgggtttaccgactgctgggggctggtgatgagctggtttcggcaggagcgcggcatcgaactgccggattaccgggtcgactatccctggtgggagcagggtgagaaccggtacgccgataactggcgggaagcgggatttattcaggttgatgatccgcaactcggtgatgtgatagtgatgcaggtacaggcaccggtcgccaatcatgccggtattctgctgggtgataatatgctgctgcatcatttgtacggacacctgagccagcgggtgccgtatggtggttattggcgtgatcgcacagttatggtgctgagacataaattacacatgacaaaatga

SEQ ID NO: 280464 - DNA, 309 bp, Morganella morganii
atggcaaagatggatgacaaagacctgaaagtcaccggtacagcatggggtgtcatatttgccatatccctttacggtggcttagcccggtacattattgacaacaaacgcaacggctaccgctggagctggctgggggcaatcatgcagatgatggtttccgggttctccggcctgatgggtgggctgctttctgtggaactcaacgcttcgttttattacacggtatttgctgccggtatgtgtggcgccatgggttcttttgcactggacttcttttggtcaaaattctcaggcggtaaaaaatga

SEQ ID NO: 280465 - DNA, 393 bp, Morganella morganii
atgagcaaattcagattcagtcagcgaagcgagaataacctgaagggtgtcaattccgacctggtgatggtgatccgcagggcgctggagattacaccggtagatttcatcgttatcgaaggtctgcgcacacagactcgccaaaaagaattggtcgcggcgggtaaatcacaaacaaataacagccgacatctgaccggccatgcagtggacattattccagttaacaccaagtggcagattgaagaattcaagccgctgctgaaagccgtcaagcaggccgctgacgagttaggcgtaaagctccggttcggtatcaactggaagaatgacccatcactgccgattgaaacccggttcattgatgcgcctcacgttgagattccggtatga

SEQ ID NO: 280466 - DNA, 225 bp, Morganella morganii
atgagcggcaaaaaagtaccagtccagcaaaccagtcttcgcgaaattgatattgaaatagctaaggctgcatacaaagcctatgcgcggagatatggcgccgaccagtcattcgaactgacaatgaggcgtggtgggttttgctgggctgaaattgccacattcctgtatggacagattcagcaccttgagcgggagattgaacaacaacgcctcgctaaatag

SEQ ID NO: 280467 - DNA, 789 bp, Morganella morganii
atgagcaatctgattattgtcgagggtattaatgtgcgccgggatatggctggtcgctattgcctgaatgacctgcaccgggccgctggtggagaggaaagacataaaccgccttattggctgagaaatgcacagacagagcaacttattgccgagttgcaaatctgcgactcgggtacacagccggtaaatgtgttgcgtggtggtactgaacagggcacctacgtgtgtaaagaactggtttatgcctatgcaatgtggatcagcccttctttcaatctgaaggttatccgcacgttcgatgctgtggccggaacacagcaggcgatactgttggctgacaaagtgcaggctggcactatcctgcttgaatctatgacgaaaacattgaacctgtcgaattcctcaaaactgggcgggtatcagaaactgcaaaaaatggctggtcttccggatctggctccctcctatgcaattgatgcaccggtgggtgcggtggatggatccagcagaccgacaacatccctgactacactgttgaaaaatcacaatgccgcattgtctgcgaccagagcatacaaacgccttgctgagctggggattgtggagcagaaagcccggcccggatccagaggtacacagcgcctgttctggtcgataaccacgcgtggactggcatacggtaaaaatatgacatccccggcgaatccccgggaaacgcagccgcacttctttgaaagcaagtcagctgagcttctggcactgatgatgactccggcggtggcctga

SEQ ID NO: 280468 - DNA, 885 bp, Morganella morganii
atgagcatgattttaactgcacgggctttgcagataaaaacaggcaacccgctgcgaaaactggtactggtcaaactggcggacaatgccaacgaccagggggaatcatggccgtctgtgccgtacattgctgagcagtgtgaaatatctgaacgctcagtgcagaaccacatcaatgccctggtgaaaatggggctggttcgtgttgagtcacgaaaatcggccaacggtctgaaccagtcaaatatttatcatctgtgcctggatgttaccgctgtgagtggtgaatctcctgcaccctgtggtgcaaatcctgcgggggtgagtggtgcaaatggttcccggactggtgcagcagatgcaccgggtggtgcaaatggttccggtagtggtgcaggagctgcacccggaatcagtcatgatccagtcatagatccagataataaaaatattaatcctgttcgcggaaaagccaaaagcaaaaccgtgatgccggaaaactttgcaccgacaccagaacacattgagcaggccaaagccgccggtctggacattcaggacgagtttcagaagttcagcgattaccacgccagcaagggtacgcagtatgtctgctggaactccggtttcagatactggctgaatacggccgccggatttaaacgctctgcggactcaaagaacatcgacaccaccgagtgcgatgaagtcttcagaaaaatgttctcatcctccgactggaagccagaaaaccgcgtacaggagctggtcgcaaaacacaaatcctacattgggcggatgaatgaaattgccggacgagcagcatttcgcgggtactggaaacaggccacagagcaggccgcaaaagaacgggaggctgcgtga

SEQ ID NO: 280469 - DNA, 555 bp, Morganella morganii
atgattatttcaattaaaaacaactgggaacaagcaataaaaccacatacacattatttaaataatttgatatgcgattttttggataaaactactcatcgttctgaaggactagacgaagctaaaaaatttattatggatgtacatcatttattaatacttgcaggtaaacaagatatattggagagtattgatatatacagagcttacaaaaatagattgttaataacaccagatatatcgaagcaatttgacaaagaaataagatctgtttttaattacaataaatttgttagaaaaacaggatcatggaatgcatatacgttatgtaaaaaatcaataacaagaacatgtccgtattgcaatcaagcatatgctttttcgatacaaaaaaagaatcgagggtttcgtcctacattagaccatttttatagtaaggatgactttcctcaccttgcattggtaattaataatttaatcccaagttgtagctcatgtaactcaagccctgtctcttatacacatctgacgctgccgacgaatagagaggtgtag

SEQ ID NO: 280470 - DNA, 471 bp, Morganella morganii
atgccgggaccaccgaaaaccccgtcacacctgcgtttggtcagaggtaatccatcaaaacgcccgatcaataaaaaagaaccaaaaccgccgtcaggggtacccccaacaccgaaacattttaccaagcaggggaaatactggtttaagcggataggtgaagaactcaatgcgatgggtgtcatgagttcgatggatgccaaagcactggagctgctgatcgaggcgtacaccgaataccgccagcactgcgatacgctggacgaacaaggctacacctacacaacacagagtgatggcggtccactgataaaagcgcaccccgcggcggcaatgaaagctgatgcatggaaacggatccgcgcgatgctctccgagttcggtatgaccccggcagcccgccagaaggtaacgattaacacaccagccgaagaagaccctttcgaggcatttctgaaacaaagaaaatga

SEQ ID NO: 280471 - DNA, 228 bp, Morganella morganii
atggccgaccggcagccgcagatcaataaatatgctctgcgccacaaatgcccgttggttacgcaacagtatttcatccgcctgctgctggtggatattcccctcccggaagatgttgtcatgatgccagcacgtcctgataaaaccgtctttatggcgtgtcatggtcagttcgtggtgatgatacggatctgcttcatcgccaatctggcaatgacttaccgatga

SEQ ID NO: 280472 - DNA, 150 bp, Morganella morganii
atgaataaaaattcggaagccattaaatatacaccgatgaaagatggtaatactatcatcattaaggaagtatatattttatttataagcaataaaaattccgcgcggttagtttttgcaagtatagataacctgggtaaagtaacttga

SEQ ID NO: 280473 - DNA, 435 bp, Morganella morganii
atgggaaaaacagatgctcacgatgatgaaataataactgcagctaaattagctaatgcacatgagtttattatacaaaaaccacaaaattatgatactcctattggttacggtggtatgttactctcaggtggagaacgtcaacgtctttctcttgctagaactttattaaaaaatgcaccaattttactgatcgacgaagcaacatcgagtatcgattgttcatcagaagtattaattcaacaagctttatcattgttatcaaaagataagacaatcattatgattgctcatcgattaaatagcattaaaaatgccgataacattatcgtaatggaaaatggaaaaatagcagaacaaggaaaacatgctgagttacttgcaaaaaatggcttatatgcacatttatggttacaacagaaagcgttatgctaa

SEQ ID NO: 280474 - DNA, 213 bp, Morganella morganii; identical to SEQ ID NO: 279049

SEQ ID NO: 280475 - DNA, 558 bp, Morganella morganii
atgttgaaaaaacatctatttgtttgcgtcatgataagttcattatccgcttgttcagtcagtctcagtaaagcacctgaagattatacaggtcctgatgcttcaagaatcagggctaaaaattacatgccgccgctttcaatggaaatatatgaaaaagagggaagctgttacaaaaaagtatcagacaaaagtctgggacctggttttaatatcgttggtataaaatcaacatttaacaaaagactaccagagatgcttccgccatcagagcaattaaagggggctgatgcccttgaatacaggctcaaagcgaaccaaagacttaaaataacttacactcgtgaaacattcagaagtcagtacaaccaagaatatacaacttatacatataacttcattccccgggaagggcatgattatgatttgtatccaaccaatacaggaataggaataattgatttaaatacacagcagtccgttccgaatagctggggtgatgataaagaatgtgagtttgaaaagaactggtttaccggcggtaagagttacaaataa

SEQ ID NO: 280476 - DNA, 138 bp, Morganella morganii
atggcaaacaaaaataaaagaatcagtgatgatgaaatcatatccgtactctccgtgattatcgttccgccactctatcattttacctggcggccggaatccgccatttcaacagaaaaatctgaatacatcacataa

SEQ ID NO: 280477 - DNA, 459 bp, Morganella morganii
atgggggacgaaaagagcttagcgcatacgcgatggaagtgtaagtatcatgtcgtttttgcaccaaaatatcggcgacaggccttttacggcgagaaacgcagggcagtaggcagcatactcagaaagctgtgtgagtggaaaaatgtgaatattctggaagcggagtgctgtccggatcatatacatatgcttttggagatcccgccaaagttgagtgtttcaggttttctgggttacctgaagggtaagagtagcctgatgctgtacgaacagtttggcgatttaaagtttaagtatagaaacagggcgttttggtgccggggtttttatgtggacacagtgggtaagaatacctcgcgaatacgggaatacataaaacaccaattggaagaagataagatgggagagcaactgtcgatcccgtatcccggtagcccgtttacgggcagtaagtaa

SEQ ID NO: 280478 - DNA, 558 bp, Morganella morganii
atgggtattattacgcaggaaaataagaagaaagaaataaaagaaccgatgctgaggcaaataacgcttggtgaaatggcaatggctaaaactatattcggaaattcaatgtcatataatgtttgggttcattgcgacagttatcttccgtttggtatgcagtcagataatgtagcaatggcacctaatggagatatttactttagagcagcgctgtataagcatgatttttcggaagaatcaattattaataaacatatgtttattcatgagcttacgcatgtctggcagcatcaaaatgggatgtgggtcagaacaagaggactgtttagtaactttgttgactacaactattcacttgatagaaagaaaaaattaagtgattacggcatggagcaacaagccagtatagtcgctgattattttattctgaaaacgtatggtatcgccaggtttatttatggtgttcaggatggctatattcgtatacgtaataaaatagatactgataccatacaggatatctataggtcagtactaccaagttctattttatag

SEQ ID NO: 280479 - DNA, 429 bp, Morganella morganii
atgcgtaagtttataattatccctttgatttttatgcttggtgcgtgctggcatactaatgacccaaggccaacaatagtcaatggggatgttagtattgatacaaacaaaatttgtgtgaaatcaccgacatcttttgatgatgaatatattcaatttatagaaatttttagttttaaagaacaaaaagaaattgcaagagttgattacacatcaaacttaataaaattagaaagcaataaatgtctgccgatccctgactttcagtatcaggcgggaaatagatacagttatacggctgttactgttttaaaagaaaaacaaaaaagaggcactaaacctgatcgcagagctattgatgtttcatttcttatcgaggatgtcaatgggaaaatagaagcagtaagtagtacaaaaagaaagcaatga

SEQ ID NO: 280480 - DNA, 423 bp, Morganella morganii
atgcacaaatttataattattcctttggtatttctgttgagcgggtgttggcatgcaaatgatccaagaccagtaatggttaatgctgatgtgagcactaacgctggcaaattatgtgttaaagcaccagatgtatctgatgatgaatatattctttatgtggatctttttgattataaagaacaaaaagacatagccactatcgattttagtgcaaaccctgttaagttagatgaaaaaaattgtttgccatcacctgatattcaatatgaggtaaatggtaaatatgcatacagagcctctacggttttacagaaaaaacaggcaaagaaaattaacccccacagacgaacaattatggctacgtttttcataaaagaagttaatggtgagaaacaagctgttgatgctttaaatatgtaa

SEQ ID NO: 280481 - DNA, 846 bp, Morganella morganii
atgaaaaacggtaacaaattaacggccctggtattatgtttaatggcaatcggatatgcgcaggcaggtcctgtggatgaaggtgatgttcgtgcacttaactcgaatgctattggtgcaaattcaatttcagatcaaaaagatactgtctctgtcgggaagaaaggacaggagcgccggatcacgaatgtgcaggaaggtatcaaatcaacagatgcagcgaacgtgtggcaggtgaatcacgcgaaaaatgaagcagtggaatatacagatttccggatcaatcaaaataataaagagatcaacacgacaatagaaaataccaaacagagtgtgattgataagagtcagaaatatacagaagaaaaaatcacaaagtcagaagaagaaaccaacaagaatattgataacgcgaagaaaagtgccattacatcagggaaccaattcacagagaatgcagtgacagaagcaaaaaaagaaataaatacaacgatcaataatgccggacgcgaaactgtttctgtcagccgccattataccgacagccggattgaacaaattcagacagctaataattcacgttttgattcactggaaaaacgtattgaccgtaacgcgcaacaggctaatgccggtattgcatctgttgcggccatggcgaatatcccgtacacgccggacaccgatttcagtgccggtattggtatcggcaattaccgcaatggtaatgcgttagctgcgggtgcccagtatcaggtccgccgtgatgttaatttacgcggctccgtatcctggaatgactcggacagtgccgttctcggtgccggccttgctatcggctggtaa

SEQ ID NO: 280482 - DNA, 2898 bp, Morganella morganii
atgccaaccacgcgccctttattttcagaaaaagttttcaataaaaatatattatataaatgcattaatacagcactgataacatcattatcgctgaccagcctgtctgccattgcagcaaatgcaactgttattgataatggctcatctgaaacggttccgggaactcagcctgcaacatggatagtgccgggcgccatttatgcaggccaaagcggtacgggttcactgaccatcggtcaggggggtatggttcagtcagggacggataaaaatggtactaccggctctgtgctgggttacgataaaggaagtcagggaacgattactattgatggcggtgcctggtacgatggtgtcaataccgataatacgtctgtttctaacggaactacggctgtcggcggcggcggaaaaggcagcctgaacattatgaatggcggtaaggctgctctggtatttctgaacatcggtcagaacggaacaggtgaaggttcagtcattgttgacggagccggctcggcgcttttggcgacgacaggagcgtcatccggaatcacggtcggaacgaacggtaacggtaaacttagcatcagcaatggcgccaaagttgcgggaaattcagggatgtcgattggctaccagccgggttcacagggtgaggtcatcgtcagcggtgccggatctgaactgaacattaatgacggtaacatcagcgccggcggcggtggtgacgggcgtatgactatcacggacggcggtgttgtaaacagtgtcggcggcggtattgctactgctaaggcttccggtacagtcattgtggatggtaaagggtcattatggaatatcggcgaccataccctggatatcggaggagatgagaataatggaaatcctgccggcaccggcacattaatattatccgatcagggaaaactgacagccggaaaaggcgttttctccggagcaaaaacaggacgcgttgtgattggcgcattaccggaagatgcgccggcagcagcaggtatattagatacaccgttgttaactctggataccgcggacaataatctgatttttaaccatacagacaatacagggaattatattttctcttcaaaggttgaaggcgaaggtaatatttcacacctgaacgggacaacagtatttaataatagcaatacctataccggggcgacggaaattaaaggcggtacactcatcgccggggattcggctaattccggcgctgttcttaatggtaaaaatgcggcggcagtgactatttctgacggcggtattttatccggaaccggtacggttaatggcatggtgataaataacggactggtagccgcgtataataccttgtccgggcagagtagtgcaggaaacagcaatttcacgcttgcggaaggccttacgaataataatacgataaatctggcaggaagcacgccgggtaatacgctgacaatcgggaaaagctataccggaaataacgggaaaattatccttaacaccataatgggtgatgataattcacggacagacaaagttatcctgcaggatgcagatgctgccggtaataccgcactggtattcaaacgagcaggcggaaacggtgcccggacagataaaggtattctggtgattgacgctcagggcaccagtaaaaccggcaatgatgcattctcgctgtcaccggactcggatggctacagacagggcgccggcacaattgccgccggtgcatatgattatactctggccaaagggggtgataacggtgacgcggaatcttggtatctgacatcacaggaagtcaaatcattgatagaccctattccgccaacacctgctccgggtgaggaaacgggcgtaacagaagagaaaccgaagaccggcggattacgaccggaaattggttcatacatcagtaacaaccgtgctatgaatacgatgttcttgatgacattacacgatcgccttggtgaaactcagtatctcgatgcattaaccggtgagaaaaaggtaacgtcgatgtggatgcggaatatcgggggacatactaagcagaaatcaggaaacagcacgattgaatcacaggcaaaccgctatgttattcagattggcggtgatgtggctgactggtccgcagacggaatggatcgttatttaatcggtctgatgggcggttacggtaatcagaaaagtaacagcatttccggtattaccggattacgttccgaaggcagcctgaatggttatcatgcggggatttacggaacctggtatcagaatgatgctgataagcaaggcctgtatattgatacctgggcgatgtataactggtttaacaacactgcggacggccaggggctcagcagtgaaaaataccgctccaaaggttttacggcatcggttgaagcaggatacaccattaagctcggagagtaccgtacggaagtcaataacatgacgaacaccgtctatattttaccgcaggcgcaggttatctggatgggtgttaaatctgatgactttaccgacagtacaaaaacacagatatcattcctgggcaataataatattcagacccgtgcagggataagagcgtttattaatggccgcagtacatcggaacagggtgaaaatacagaaattcagccattcattgaaacaaactggatccataatacagaatcttatggtgttaagcttgacgacgtaagaaattatgcgaacggtggtgaaaagaatatcggtgaaataaaaattggtgttgaaagcaagcttaataataactcggcagtatggataaatgcagctcagcaattcggaaagaatggctatagtgatactcagggaatgttaggtatcaaatatgcattttga

SEQ ID NO: 280483 - DNA, 720 bp, Morganella morganii
atggcagagaataaaatttgtttttctgatgttaaaatggcagggaatatggaaataatcaccgctgcggataaaaccgtatatggttttaccggtgataatgagacagagaactacgaattattaaccgcactatttcagctgcgttattttgctaacagcattatttatcatcagcaacgggaaaatgatattcacctgatattcaggagttgcacagaatacaccccggttgccaggacactgcatacagataattatattgttcccgccgcagatattgctgatcgtttccggccatttgttcatgaccatccggtggtatttctcgacccgccggctgatgataccccttccgccataaccgatgccgggttaaatactattttgccgctgttgccgcaatccgggaatacatcagatccgggatttttctcaatggtgatattaattcagcgtattatcgccggatacggtgaatttaccactacggaaaagccggaagagattaacggtatcgtatatatctctatgccggaacatcacctgaatatcccgtggcatgaacattgtgttgcactgctgaaagccatctttccgcagaccgttttttatcttgcaacacaatctccggtgatattgtcgcaactgaatgacggtgaggcataccgtttattgcgggacagcgatgatattatccgcacacagaaataccgctga

SEQ ID NO: 280484 - DNA, 438 bp, Morganella morganii
atgtggaataacttttccaaaatcaatgtgagtgtaaaagaggttggaaataaaataggcggtaaagtacagtacaacattgataagggtatttttgagaatgcttgtgcaatacggatgagttatgctttgaaccactcaggaacgaatatcaacagaagttcccgctgggcgacatcctcaggtaatgataaaaagtggtatatatataaggttgctgatttaatttcttttttggaacatactttcggtaagccggatatatcgattaagtctggcgttaatatgagtgcatttaaaaataaaaaaggtattattgtttttaatgtcggctggcgtgatgcaacaggacatgccacgctctggaacggcactggttgttcggattcctgttattttgaactggctggtgaggctatgttatgggaattaaaataa

SEQ ID NO: 280485 - DNA, 366 bp, Morganella morganii
atgggaattaaaataaatttatctgtattatcgctggctgctgttatttttttaccggcgtcagttgcccaaaaaaatgagccgctgaaaaattctctggaaaattttactcttagttattgtctggctcaaagcgggctgggagatgctttgcagcaggaggcaaaagcggcggtgggcgcttatgttgaaagaggtgcatataccgccgaagcttatgatgaagcaactgatgtggcaaaaaaatacctggataaaacgtatctcagcaaaaaacaaaatatcaatctcacagtaatgaaatgcatcgatgcatctcaaagcagtgaaattgctgacataaaaaaacgttaccgggctgattag

SEQ ID NO: 280486 - DNA, 2454 bp, Morganella morganii
atgaatacaaataatatatttgtacttctgcttgctatgcaggcggggatggcttacgccgataagtacacactcccggtcgatttgacaacgataaaactgaaagcgggtgatattgttgaagtaaaagagaacggttatgcggtatcaggatacaatatcccattgaattttcagggaggaaatataaacgtcaaattagataacagtaaatacagtggtacagcctacggcattaaattaagcggaaaacaaaagcatgacttaggtaatggatctgttatcacaatgaggtcgttatcaggcggcagtggcctttatcttgagaatggtgagttaaaatcagataatctcgaaattaatgcagaatctttatctgaaaaaggaagcgcgaatggtatttatgctaaacgagctaatctgaatctgggaagtaacagtaaaatcactgtgaataatctcaaaaaaaccaccacgtcgtggagtgattctgccgcaatttttctggacaatagttctgttttaaatgcgaataatattgaattaaatgcaaacggttcaacatcgggtattttaatgctggatagctcacaagccaatttaggtgcgggctcagtcattaacaccggcgttatgggagttgcacttttagatgacagtaataataaatttgaagcaaacggccttactgtaaatttaaatgctgttcctgggtttgattcaggtaaaaactctgacatcagagcaggtatctatgttaatgacggatatagcaataaagcagaattaaaaaatacccatattagtaataagggagatggaagttttggtgtactccttcacggtggtactcttacagcagaaaatctgtccatcatatcggaaggtgaaaaagcgtatgctgttcagacagatcttcacagtattgccaatataaatggacatactgaaatacagggtgatattgctgcttatcaatacagtaagataaatctggtaacaaacaggagtgaacagagtcagaccgttattacaggaagtatcagggaaaatggcagaagtcagattaactggagtggtacagactcggtatggaacgtgaccggaaattccaacctcggtaagctgtcactgagtgataacagcgtggtcgatttcactcattcaactgaatataacaatgtttctgtcaaaaaactggatggtgccgcattatggaacttcaaagttaactttgataataataccagtgatactttgcgcgtttccggtacatcaaaaggcgcacatcaggtgggattggtaaacgatggcagcatgaataccaatggcaccgagacgaaagacattatctttacaactgacggagttgctacttttactgctgttcatgactatgaattcggcggatatttatacaccgtacaacgtaaagataatgatcccgacagtacaatatgggaagttgcttcagtcggtaaagttccgccgggagataaaatacctccggaagaagataaaccgtcagaagggacaaaaacaccggtagcaaaaaccagtgttaataccgttgtcggaaattattatttaaacctggctgagcaggaaaatttacagcggagaatgagttcattacggaataatccggagggaagtggtctttggaccagaacttaccatggtaaatttgattcattccaaagtggaagtctcgataaatttgatatgaattactcaggcgtccaggttggttttgatcatattcttcaacctgaaagtgcagactactggatgctcggcggttctctgaattatactgattcctctcaggattacagtaacggagatggtgatcagaaaagttattcttttgccggctatgcaacatatttaagtgaaagtgaatggtatgcggatttttacggtaaatactcatattatgataataaattagatatgagagatactgcggggatgcaggttaatggttccggaaatggttattccttaacagcttcagcggaattgggtaaacgtatttatatcctgaatcaaaaggaaaaaacgttttatgttgaaccaaatgctcagatgacactgagtcacattagcagtaatgatatcaacaacagcaacggattaaaggtcaaatttgataaccagttatcaacgattggccgtgttggtgtaaatacaggatacaatattcacagtacctctccggtaacagtatacgggaaaataaatattgctcatgaattcaatggtgaacaggtatattatctgaataatagcagggagcgtttaatgctggcaggttcatgggttgaatatggtgccggtgcggatattactttagataaacagcatttgttatttattgaatatacaggaagcaatggctctaaatttaaccagaatgattttaacctgggatatcgttacctattttga

SEQ ID NO: 280487 - DNA, 753 bp, Morganella morganii
atgattaaatacatattaaaaaaagacacattacttcttgctataataaccagcgcatcatattgtgccgcttatttttatgaatttggttattcgaattacttcaattaccccaaagaccttatctccataagtataatgaatttgttacaaatgggatttggtatttttatgtttacattcataatgataggggtcatagatgtagctgtaagcctaataaaaatatctggtgtaataggaaaaatagcagcaaatttgatttcatatttactgttagccatcattatgttactgatcctttatctggtagggagtgtgagttttaaatatttttctattgccataggcgtttttttactccttgtaataattgtatcaatcccatacaaaaagaaatcaaagaatgttttagaaagtataaatgagagcattgaagataatcttaaagatagacgtgatagcgttaaagaaataagaaaaacaacagagttgttatctgtattttttctacttatcttatcatcattgttaattacagcgataggaacatatagcgcaagaactaaagaaaacttttacactattgaaaaggataacatccgatatgtgatagttaataagtatgacgattatttagttgccaaagtaattgatggtaataaagaatttggagaaaaaacatatatatttaatataggcgagttgaatggtaagccaatggaaaaaatcaaaatagtgacaaacaactga

SEQ ID NO: 280488 - DNA, 189 bp, Morganella morganii
atgtcaaattttgatagagatatggatgcaattatttttcattatgcgggcaaaggagctgcattattcgggatgttaacatgtttaatggcattaataacatcaaaaacagggattttcgaatggaaatatacattatacttgggagctgtaactgttttatgcttattgataagatggaaaatgtaa

SEQ ID NO: 280489 - DNA, 192 bp, Morganella morganii
atgccaacaaagcacataaacgaaaacacatggcgattggttgaaaaagaaacagtaaaagccgtaattgagttgaaagcccctgtaaaagatacagaggtactggattgggtgatccgcaaaggactcgaatcgatcacagaggacgactatcgaaaattttcgaagtctgcgggagacaagaaaagctga

SEQ ID NO: 280490 - DNA, 198 bp, Morganella morganii
atgatgaatattgtttattttgactttatcgaggggtacgggatcaatgccagagtgggtattgactgggatttttaccgttcctttgatgaactgattaaagaatgttccttttttttcagtgaaaattttatacttgcgccgacaacggccagctcagggaatttcatcggttatcaggaggtttataatgcctga

SEQ ID NO: 280491 - DNA, 1128 bp, Morganella morganii
atgcctgataacagccataatcgttctgtttttattgattttcttgcattttctgcaccgctttctgttatgaaagacgttcatacttttccggaaagggggtttgagtggcgtaaattccggtttttaccttcctgccgccactaccagacccgtagggcggacgcagtgtccgggtatccggactttcccgaaccggctgcaccggttatgacggataaacagcgggaacgctatgagtctgatgtggcagagtgttatttctcccgtttaaaaacgtggcttgcagctgtttttggtctggtgatgggatgcccgcgcggaaaaggcgggtttgcctatcaggattcagcggtgttattcagtgatgagggcggcgctgatcattgcggcgtaatttactggggcggtaataacggaacattttatgtccagatatcaggtaagggatgtgtacacgtattcagcggcacgacaccgcagaaagtccataaatggctgacatttttggatatttacaccctcaaacgactggatttggccacggatgattatgacgggatctatacctgtaatgccgcactcgatgcttatcgtgatgatgctttttacggtggtaaagggccgaaaccaaagctggaaacgtcgcagggtattgattctgatggttgtcctgtaaaggaaattgtcagtattggctcacgtcagtcacgggtgtactggcgcatatacaacaaagcgctggagcagaaagttaccgggatatggtaccgatcagaagtggaattaaaggaaatttcagcggacattctgctgaatattaccgggatttatgttggcctctgttcttatgctgcccagattaaccccggtgagcctcagtcactgccggtgatgctcggcagaaaagccgtggattcaatagaggcaaaagtccggtggttacggaaacaggcatccgccaatattgccagagtcgttcatttttttgatggtgatattaatactgtgctttccatgattatccgggaagaacatctttgtaatatgaatctcaggtttgatataccgccggtatatcagacattactgaatgagaaattaaataccagtcagtgtcctttctaa

SEQ ID NO: 280492 - DNA, 273 bp, Morganella morganii
atgttgaaaattgaaattaatactgttgacggaaaagtcaatacgaaacaggttgtctcaaaatctaccggggaggtattaacattccgggaacagactgcctatatttataatggcggtgtttatccggaaaaattcacgattaatctcgataaggatgcctcaccgtatcccgccggattttatacactggatgacagttcttttagtgtcggtgattttggttcactgaaaataaaatccgttaaattaataccggcgtcagataaataa

SEQ ID NO: 280493 - DNA, 228 bp, Morganella morganii
atggaaccgctgaataatatcacggtgacgggaacactctgttttccgtcaggagagcaatgtcagacggttaatctgacggcagctgtccctgttccggagccggtttccggtattgattttgcagtcgcatcgcaatactggggactggcattcacctcggtcattttcctgtatttattctctctcgggattggccagatcttaaaactcgtcaaacatgcataa

SEQ ID NO: 280494 - DNA, 243 bp, Morganella morganii
atgaatattatcggtactaaaaaatatattccggcagcactgcttctgctgacttctgtaacctccggtgcagcactggccgccggtgaaagtggtggcggcgttgatctttcacagctgacgaatgcggttgatttcggctcggtactggtcgggattatggccgtggcttctgccattattgccctgtatgccggatttgccggtgtacgctggattttacggatggttaaaggcgcataa

SEQ ID NO: 280495 - DNA, 1449 bp, Morganella morganii
atgcgcgtgggcggtcattctcggtttaaggggctgatgctgatgctcattctgctgcccggtctgttttatccgtattaccgtgctcaggcagcatttccgctgcttgttgcaagagcggtgattccggtcattctcgggcgggtaattatgaaacgggcgatgcaggttgcagcaaatgatgcggtttatctttcactggtcagaaatacaaccagggcggtttctgccacgacacggacaaatgctgtctccgtcggcagtaaatcatttttccgttctgccggcggggcacttacgtgggcaggtgtgggatatacagccggtgatatatcttcagattatttttccggcaagggggatattatgattgccacttccggaaaatcagtcggtaacgggaaatatgaagtggaaattgacggtaaaacatatattactgactttatgcccagtgaaagtaacccgttcattgccattccggtaaccggtgataataacagcagaattgttccggaattaacaagtgcgatgcaatggtatcagataacaaatactgagcctaaacaatatatcaccggttcagttgaaagtgttgccagaggttattttaattacggggcagaacggggagggtatgattgtccggccggaaaaggacagtgcagttatgaatttataccaacgaaaatttcagtcaatcagggagccagctccacagtaagttataattttattgcccggtatacaaataaaaacggagaggaagcagagcggcgttattatcctattcaggccatacaggtatattataacaaaaattacattccggataataatgcggaagataaagaatacatgattgccggtgatgaggatggtttttctgcgctggaaaagctgaaagaatatcagcttgatttggataaactggcatccgtaattaacaatcttctgtatcagtcagcaactcagccggattatgacggagtgcctgtaacatcttctgatccggtaaccgcagatgaaatccgtgcggtttacccggaacacggaaaactgacagactttgatttgttatacccggcacaggtcagccccggtggtgatttggtgattaatacgcccgggatttcaggcggggctgaaaacacaggcaaggtggaaattgagttgggtgattatcctgacgttgctgagccggagctggatgaaccgccaaccggcaaagagatactggctccgctggaaaacctgttcccgtttgtcagaaatatgcagctgccttcaaaagaggccgcctgtccggttgccgaattttcggtgctggatacctcttaccggctggattctcattgtccgttactggagcagaacagaaagctgtttcagctgatggccgggattatctgggcgtttttatcactcaggattatattgagcgcataa

SEQ ID NO: 280496 - DNA, 288 bp, Morganella morganii
atgtttcgttttttcctgtctcttgcttatacctcactgcggtttgtattccggacactggtgattaaatttgtgctgtttttcgccctgttctttgctgtgcatgaactggtgtcggttatggtgttctggctgcctgatcatacggatttaccgcagttattttccttattgccggacagtgtctggtattttatgaatctttttctggtgccctacggaataacactgctgctgagtgcactgcttacccgttttattatccggcgtattccgttaataggatga

SEQ ID NO: 280497 - DNA, 1050 bp, Morganella morganii
atggcagtatctgcttatgttggtgttcctggcagcgggaaatcctatgaagttgtcagcagcgtgattattcctgcatttatgaaaggacgtcggatagtcaccaacctttacggtatttcacaggagaaaatcacagaatactgccggttacaccggaaagccgatgaatcctctctgggcagtattgtgtatgtcagtaatgaacaggtcatggatgatgatttttttccctatatggaaaacgatgtactgacggataaatcattttgccgggcgggtgatcttatctgtctggatgaaatctggcgtatctgggaaagtgataaaaaaattccgaaaaatcatcagtcatttattgccgaacaccggcattttgacggtgagaacggagtgacctgtgatttggttgtactgaatcagtcagtggccggtctgccgaggtttatcaaagaccggattgaatccacattcagaatgaccaagctgacggcactcggcttgcggagccggtaccgggttgatgtgttcaccgggataaaattgtttaaatctgcaaaggtaagttcttatcagtgcaaatatgacaagaaaatttttcctctttatcagtctcatgtgaacgggcagggagctgaacaggttgttgataaacgtcagagtgtattttcctcgcctaaagttcttattgcactgtgcggttttccgcttctgctgggcgtcagtttatggtttctttatcagttttttaaccggtttgatactgacaggacacaggaaacaacaccggaaattaaggccgccgctcccgcagggatatcatcatttcctccggaaaaaccggttcagccggttactcctccgccggtttcagatacctggcgaattgtcggcaaactggaaaaatcaggccgggcgtgggttgtattgcgggatcgtcaggggcgtctgcggctggagcctgcatccggatttatgctgaaagggatgatgcagtcaggagtgattgacggaaaaattgtcacggtttattcgggggatgcgtcatga

SEQ ID NO: 280498 - DNA, 1221 bp, Morganella morganii
atgagaaagatgattaccgcagcattactgtatctgctgtcactgaatacatatgccaaaaatatcgattttgaactgcggggtgtaccgttaccggaagcggtcggtttactttacagcgaggtgtttaaccgtccgtttatgttatcgccggagctgattaatgatgagcggaaagtctattttcacatcacgccggatatcgatgaaaaggcatttatcacccggtatttttccaacatgaatatccgtatctggcaaaaaaacggcgttgattatatctcgtcatttacaccgaaagcaccggaaatcaaacgtgagacatttgtttatcagccccgttaccgcagtgtggcgtacctgtcagatatgttgcgcggtcagtttcagggacagttcaatcatcagggaggaattggttcatatgcggataataccgtatctgaagctgttcctgacagtgcaacggattttctcaaccggcatggtgatgtgctgatttattacggtacgaaagcggatattcagcgtattcagtctgttttgccgctgattgatactgctacggaagaggttgtggttgccgcttatgtatttgaggttcagaccgctgagcgtaatggttcaggtctggctctggccgctaaactggtgtccggtaaattcagtgtcagtacaggggctgaaagtggttttgataattttatccgtttcagaaccggttcactggatgctctgtatgagctgtttcgcacagacagccggtttcatgtggtcagttcaccgcgcctgagagtcagcaacggagcgaaagcatcattttcagtcgggtcggatgtgccggtgctggggcaggtgagctatgccggtgataaaccggttcagtcagttgaatacaggtctggcggggtgatcctcagtgttcagccgcatatccggcaggaactgattgagctgagtatcgatcagcagttgtccaattttgcaaaaactgaaaccggcgtgaataacagtccgacactgataaaacgtcaggttaacacgcaggtcagtgtggctgacggcgatattattttactgggcggactggctgaaaataaagtaacagaagccgaaaccggtttttctttcctgccgaaaggctggttcaccggatcatctgatgaaaacagcaagactgacattctggtgatgttgcaggtcaaaaaagtgagccgctga

SEQ ID NO: 280499 - DNA, 405 bp, Morganella morganii
atgaataatacaatcacaactgatatgctgaatgatgagggtatccgttcagcactggagcttttgcagcaacaggtttcacgttacgatgctgttcagcagaaacggtatatcccgggtgagaaaactatcactcatcagcttcccgcatattatgtgaatgaattcattctgttatccaaaaaacttaaaagccggcgctatcacgttttactggcatcgctgatactgatgatgaatttaccggaagatatccagatatgtctgataaaaaatgcaggaaagcagtttaatctgctgcgtgattccgaacaggagtcgttcaatatccgtcagatggaacagttaacggaagagatcagcaggctcgcatccggaatctttgatgcccgacagggcatgtaa

SEQ ID NO: 280500 - DNA, 285 bp, Morganella morganii
atgaataaattgacgacatattcggcgctgaaaaagacctttcttgaagacccggagttccgggcaatttatgaggctgaaagccggtgcgcagaacctgattatcagattgtccggcatcatgatgacggtactgaagaagtggtatttgattcgcgccggtcagaaaactggtgtgattatttttctgatgcagaaccggcagatgaggattttctgattgatagatcggacgtcattactgacagagccgatttttttgatgatgagccggaagataactaa

SEQ ID NO: 280501 - DNA, 531 bp, Morganella morganii
atgaaaaaactaacgttattgttgatgttattctccgccattgcctctgcccgcagcggaggacacggcggttatcgttatgaacctgaaactattttcatctgcagattatcaccctttacggatatgtatattgaagcaggtattacggaagcgctggcacgaaaaaatacatctcaccgttgtcagatgtcacagggtgacggcagtattttctgccgggaagatgaggcaaagtgttcggcaagtaaattaattaccaaagagaacgaaatacgcagcgccgttgttctttatgcggaaaactggcagcggggaaactatcttgaggtcagtgaagatattccggatttatcccgcacagattttgacggcacgctttcttcggcgattattccgccgggctggcagatccgtttttatgaaggtgaaaatttcaccggtgaatctcatactgagatgagcggaaaaaagagcgtactgaattatggtaaaaaaatccgctctgttcagattatttccagacgctga

SEQ ID NO: 280502 - DNA, 303 bp, Morganella morganii
gtgctgctgtcccagttacaggcacaactggcacggaaaaaaagccgggaagataaatccaaaatctatgcccctgccgccgggattatcagtgaacgccatgcggtacagggcatgctgtctgataacagcctgctgtttaagctgatcgaaaacggtgagatcgaatttgaggccactgcgggggctgatgaactggcacaaagacaggaaaccgccgcagtcacgatgaaaacgactaataaccggcaactgaacggcactgtccggtttatttcaccgttactttcctctctgacatag

SEQ ID NO: 280503 - DNA, 798 bp, Morganella morganii
atgagtgaaaacccgcgcacacggccggagttggctgattttttacgaacaaaacgcgaaagcctgaccccggaatgtgtggggctaccgcacacttcacgccgccgtactccgggtctgcgccgtgaggaagtcgccgcactcgccggtgtgggtctgacctggtacacctggctggaacagggacgtgaaatcggagtatccacccgctttctggacaatcttgcgcggacattgcgtctgaacgaggcagaacgccagcacctgtatctgctggcccatcagcgggcaccagaagcgtccggagatacggagcatcatgtgccgccggttatcacccggatgctggatgattttccggataattatctctgttatgtgctgaatctgcactgggatgtgctggcgtataatgaaaaagcagatcgttatctgcacttctctgaagcacagcccgggatgtgtaactttctgtatttactgtttaccgatccccgttatcaaacccgctttattgactgggaaaccgatgctcagcgtctgctggccagtttccgccgggattatgccagaacaaaacatgaccccaatattcagcggatgatcacggcgttatgtcaggagtctgcggcttttgacaccttgtggaataaacacgaaatctaccagccctgtaacggtatccgtgaaattgaatttaacggcagacgggaaacctacgagtatgcgtccctgacatttgatattgataaatccaaccggttactggtgtataccccggttaccggtgaggattaa

SEQ ID NO: 280504 - DNA, 636 bp, Morganella morganii
atgaccggcaatttgcagggtattttggggctggtgatcaccagctccgtgctgattgccattccggggccgagtattctgtttctggtcggccaggcgttatctgccgggaagaaaaatgccctgaaaggcgtggcgggaaatgccatcggcatgtacagcattgcggtattactttctttcggaattggcgcagtactgatgtcttctccgcagatcctgatgcttattcgtctggtcggggcatttgtcctgttactgattggctggcagtatgtccgggcatcccgtatcagtatggcgatagatgtgccggcgaataaaggccgtcagtcgttgtttgccggtattattgtcggtgccgcaaacccgaaatccgtgattatgttcggtacgattgtccccggatttaccggtgaaattccgccggagatgtctgcgaccactgtgttgctgctgatgtcgctgatcccgatagtgctgggtattgttatcgatattatctgggtttatgccgcacatgccgttaaatccgcgtcatttttccggggaaacagtctgcgctggtttaatctgtgcggcggtatcctgatgatccttatggcattactgctggcggtagcatcggtgatttaa

SEQ ID NO: 280505 - DNA, 975 bp, Morganella morganii
atgacaacctcttctgacacaacattccgtactttgtatccggccattgagccttatgagaccggttttctcgatgttggtcatggtcaccggatctattacgaacgcaccggtacaccgggggcgaaaccggcggttttcctgcacggcgggcccggcggcggcatcagccctgaataccggcgctattttgatccggcccgttatgatgtgctgctgtttgaccagcgcggttgcgggcgttcaacaccccatgctgaaattgcccataacaccacgtgggatctggtggatgacattgagcgtctgagaaagcataccggtgtcagcaaatggctggtattcggtggttcctggggctcgagccttgcgctggcatacagtgaaacgcatccgcagcaggtcagtgaaatcattctgcgcggtgtgtataccgtgacacaggcagaactgaactggtattaccaatttggcgtttcacagatgttcccggaagagtgggaagcctttctggcaccggttccggtgcaggaacgccacaatatgattactgcctaccataagttgctgaccagtgacgatgttcaggttcagctggcggcagccaaagcctggacgttgtgggaagggaaaaccaccacactgttaccggatacagagcatctggatgaatttaccgatgatcattttgccatcgcctttgcccggctggaaaaccactatttttatcaccagtgctggctggaggaaggacagttgctgcgtgatattcaccggctgcagggtattccgggaatcattgtccacggccgttatgatatgccgtgtccggcgacctttgcgtggcatctgcataaagcctggccgggatctgtactgcatctgattgaaggtgcagggcacgcgatgtctgaaccggggatccgtgatcagttgctgcgggccacagactattttgccggtcaggagccatga

SEQ ID NO: 280506 - DNA, 1308 bp, Morganella morganii
atgtttgcagacggacgcacccggattacgcttctggccattgtgtttataacgtcactgatgctgacgttttcagattcgtttttttccgcgccggacagaaaacgcatccgcagttatcagccggaaaaagaaaccgtaaaattatcctcacgggtcatcagctcttttcagaacggagtgatgataaccggtgtcagagatgctatgcgggttgatttggagagctgcgacagggaaacccgcacgtgccgccacagtaaaaatgtgggttttgacccggtaaaagacacggatattccgctgctgaacctgaaaatatctccggataaaaaagcgatcagtgattatctggaaaaacaaacctatgaactgagacgcagtgaagtctacggcagcagaccgctggtgccggtaacctatattatgacggagcaggacggcgatttgcgggtcagtgccatgtttatgggacgggcagaaagccaggcctgtgataagcagggtcagtgcctgatcctgtttcaggattacggctcgtataaaaattatgttttctattccggggacggtggtcagaactggcgctggttatcgcagtggcagatgccggaagtcgcgggtgatgcaaagattatcgccgttaccgcaccgggcagcggacttatggttcagaacaacacactgtatcagacgcgtgattacggacaaaactggcgcctgttgttcagtatgaaccaccgcaaaaaaagaaccaccgaccgttacgggcaccggtatgtcagcctgaaaaatatttactggcactacaacggtaacgggcaggtcgtggcatggatggcggatgaaagaaacgacccggaaaatgttgccctggtctgctttaatacccggacactgaaaacggagtctgatctgcttatcccgggggagataggtgcactggacagcacaaccggcggtgaattttatttcacactgacagaaaaagagcgcaggcgtcaaagtgtgaatcatctgaactgtaacggggattattcgccggtactggaaaccggcggcagttatatttccggtttgtatgccggcactgagctactgatagctgagttacattcagacacccgggtatcggatgatggcgggcagaactggaatagcgcagcggcactcacgaaagcatacggggaaaccgcgttatttgataaatggcacaaccgcctgttttattttcctgacggtaactacagcagtactccgaaaggaaaccgtgacggactggagtataccacctcacctgtgcagtaa

SEQ ID NO: 280507 - DNA, 1266 bp, Morganella morganii
atgaaaaaagtctgtttttttgatcttccctttgtccggcaggatcacaacgctaaaccggaacataattaccgccgtatcctggcgggtgactacgtgttttatacctttgcttctcagttcagtgacaaagccgtgctgaaaaaattgcaggagggggaccgggtctttatcggtgcccgtccgctggctgacggcagttactggctgcactggctggtatcgccggagcacggtaatctggaaccggtgacagagggcaccggtaatctgcgtaacctgaaaaaactggcactttccctggcgatggtcattttatctgtctggctgttttttacacaactgtcgggtgtgattgccgcgctgatactgatgctcgttttcggcgcgggattgtggatgctggcatcgtcagttcaggcactgctggtgaccaacagcagaaccatgaagcatcttctgaacggtctgacacagattaaagcggggaataccgctatctgttctcaggctgaatatctgctgcccggtacaacgaaaaatgcccggtcccggaagccgggggatgaagaacgtttcaatgaactggattcggtccgcccggaagattaccgctatgccgaaaacctgacactgaccggtgtgcagggaaccgttaccgatctccgttctgtccgcgattttaccggcagcggtaaatcccgccgcgactatattgaatattattttttgtgcagcggcgttccgttcacactgcgtaactattacagctcaatgacagaagatatcaatccgctgtttttccgcagccatccgttttttattgccgcggatgatcctgtcaatctgattgtcaatcagcagaaaggtgtcattaccggtctttataatgaacgtgatcacagcgcttaccttaaaccggacggcatggcgatatcctcacagcaggtgaaactgatgtataaggtgtttaccggtatttttctggtgatgatgctgctgatgatgatttttatattcaatgatttgtggagtattaaaggcaccccggataaatgggactggctgcatgctgcaaaatcactgggtggtatggcactgatgtttatgatggttatcagcggaattctgctgctggttgaagtggtgacgctgcttgtgcggaaaaattcagcaggggcggcccgttttgtttttgtcaggcagatgctgatacagctcagaatccggaacggcaaaaacacagttgtacaggaaattaactga

SEQ ID NO: 280508 - DNA, 156 bp, Morganella morganii
atgctgacacttattttaagcagttcattaatggttcacagttatttccctaaccctaaaagtgatgagccaaaaccggatgtctgggaaccaaaatcagcgcagtatattcatgatacatgccctaaagataaaccctattgtcacatgctgtga

SEQ ID NO: 280509 - DNA, 636 bp, Morganella morganii
atgaaaaagctttctgcagtgtgtttagcactggcaactgttttaccgtcagtttcaatggcacaccaggccggtgattttatcgttcgtggtggtactgcgactgtacgtccgaacgtcagctctgataacgttctgggtttaggttcttttgaagcaaataataatactcagttaggtttaactttcagttatatgatcaccgataatatcggtgtggaattactggcagcgacgccgtttgagcataaaatctctgttccgggtgcgggcgaaattgcctctgccaaacatttaccgccaaccttaatggctcagtactatttccgcactccggaagataaactgcgtccgtatttaggtgtgggtgttaactataccttcttctttgatgaaggatttaacgataccggtaaaggcgcaggcttaagcgatctgagtatgagcagctcatggggtgtggcagcacaggcaggcctggattatgaattagaccagaactggatgctgaatgcttccctctggtggatgaatatcaaaactgatgttgatttcaaagccggtggtgccagccagtcttacaaaactaacctggatccatgggtattcatgtttggtgtcggttacaaattctga

SEQ ID NO: 280510 - DNA, 873 bp, Morganella morganii
atgcgcacagataatgatatttaccggtcaatacagggctatgtccgtgcagatgataatatccgcgcggctgtgctcaacgggtcacgggcaaataaacaggttgccgccgataaatatcaggacttcgatattgtcttttttgtgcacaatattgaagctgcaaagtttcccgccctgcgggagtcatttttcggcgttccggtattacagcaatgccctgatgatatgcttttgggtaatgaaggtatgccgccccgtgcggcgtataccctgctgatgatctatgaggacggacaccggatagatctgactctgtttccgctgacgcattttgcctcagaatataaacatgacagcctgacggtgcttctcgcagataaagacggcctcttcgccggtatcgccccggcagatgaaagcagttattttatcacgcagcctgacgcccgtttatttgccgaaaccgccaatgaattctggtggtgtgtgacaaatgtggccaaaggtctggcacggcgtgaaatcaccttcgccaaagccatgacggaaaatgttgtccgcccggcatttatgcagatgcttgactggaaaaccggttatacccacgggtttaatctgaccaccggaaaagacggaaaatatctcccccgttacctcaccacaagtgagatgcaaaccgtttcgggaacctattctgatgcggaaccggaaaataactggcaggcattgtttctgatgtgcagactgttcagggaatatcagacgaccattgctgagctgtctgggtttgaaatcaatacccgggagtgtgatgcctctgtccgttatctccggatggtttataacgacagcctctcatcttctgtgtga

SEQ ID NO: 280511 - DNA, 378 bp, Morganella morganii
atgcattctgataaatatcaagagctgcttattcagcaacggaacttcaaaaaaaaacttcaggttattatagggcaagagataaaagcattaaggaaatccaaaggcatcagcggttatgagttaggcgatattatccgcatgtcccagcaacaaatatcacgctacgagtgtggtgacagtgccattcagatagacacattaatattaatactcaggttatttaatatatcgcctgaaaaattcattcacagaatactgtttttagtaaacagagatattgaatccggtaaattattatcagtaatgtcaaatcactttcacatatattctgacagtaattacctggagacatttgaacaatataaacacaattaa

SEQ ID NO: 280512 - DNA, 756 bp, Morganella morganii
atgcagccagtttcaacagggcagaatgtcagattaaccggttatatttcgtatcagggaactgatgctatgatcgatgacttaaaagaatcagcatccgtaaaacaatcgggtttatctgagcggttcactgagatccgtaacagtgcagcagagttttttacagcagtgaaaggcaaaataaataatgtgtttgagccattagggaacctgataaataagatagcaatctgggaagacaaaacgcaacctgatgcgaatcagggcgcacagatggtgctggaagtagcgcaggaaaaagtgccggtttatttagatgaagtccgcgagtttctggatacaaaaacatctctggatgctgcttcactggtgaaattctcaggaggaacactgagaccattagtcacatttttgactggtatgaataaactaaaaggtgcggataaaccagcagagacattcatgcccggatttatcaacaaagtaaatagcttgttatccgctgctgccggttgcggcctggatccctctgaaccagtaaatcagcttgcgtcaatcagtgatattaaaaaggcccaaaattatttagacacaaagaattttgaacaggattttaaagcaagaatgatgacactgatgaaggatattgaaaagtcgattctgcctgatttgctgtcgatcaaaccttcggaggtaatcgccccgcatagtcagcagcaaccggaggaaacctggcgccggttacctgataactga

SEQ ID NO: 280513 - DNA, 1650 bp, Morganella morganii
atgtcagaaaaagtaaagatatcaacaggcatccttctgattttaataatatttcttgtaattcaatttatatcatcattttatttttttcgatttataaactcacagaatgaaataaataatacgataaccgttcaatcgaaaaaaaactatgctcttgacaaggtatggattgggtttttagaaaacagatcattacttaacattatatccaaagggctgatgaaacgtgtttatgaaaatgacgcacaaaaaaacaaacgactggattatgctgaagaacagataaagaaaacagaatcggattggttgaaattcaaatcaataccaacaaaaaccggcacagaaatcgaaagaaacatggaatctgccttcaatgaatattacaacgctcagcttgagttagttaattatttacgaaacaacatgctggataattttgataaccaccccaccggtgactatcaaaatgcattcggaaagttatatgaggattactatgcggcagatgagaatcattatcaaaaacttattcaaaatagtagtgacaatgaaaaattgacagtctggataacaatattactgctttccggtatctgcattactatcgttttagtctgggttggtattcgtcgcttacttattttaccgatgaatcactttctggaaagtattcagcatattgcaaaaggtgatctggtaagaccgattaatgttacagggagttatgaaatcaaaaaactcgctgaaacattacgcgacatgcagcacgagctttcaaaaactgttggtgatgttcgtaatggtgcaaataccatttacagcggtgccggtgaaatcgcagccggtaataatgatttatccgcccgtacaaagcagcaggccgcttctctcgaagaaaccgcagccagtatggaggagctgacagccagcgtccgtcagaatgctgataatgcccgtcaggccagtcttctggcactgactgcctccgggatagcagagcacggtggtaaggtggttaatgatgtcgtggataccatgcgcggtatcggcgacagctcgaaaaaaattgcggatatcatcagtgtaatcgacagtattgcatttcagacaaatattctggcgctgaatgctgcggtggaagcagccagagcgggtgaacagggccgggggtttgcagtcgtggccggtgaagtccgtagtcttgcccagcgcagcgcacaggctgcccttgaaataaaaacactgattgagaattctgccggcaacgtggatgccggttctgtactggttgaacgtgccggggagacgatgaatgaaattgtcagcgccgtcaccaaagtgacagatattatgagcgagattgcctccgcatcggatgagcaaagccggggaattaaccagattggcgtggcagtgacagaaatggaccgggtaactcagcaaaatgcagcattagttgaacaatcagcagcggctgccacatctcttgaagaacaggcgggcaggctgacgcgggcagtatccgtatttcagatacaggccggagagcagaagaccgctgcgaaaaccagcattatagcgccgctgcaacaacctgttcccaaaaaaccggcagataattcagatgatggctgggaaacattttaa

SEQ ID NO: 280514 - DNA, 507 bp, Morganella morganii
atgaaccaaaatactgaacaggggttgaatgccagaataggttttaatggcgatttttatcatgttgataccatgtccgggcatggtattttaattgtggataacctgtttgagtcttgtctgttatcaaaagataccacagcggaaatgctcggtttgtgtttaaagaaatgcctgaaacaaagccggatagtagatccgggaaattatgatttctttgactataaaaaagtaaaagaaagatatgaagaatggattaaaaacatcattcaattgcgcggatataaaaataaaaaaacactttttaaacaaatgaatacatgtaatgcaaggcaggttggtgaccttattacaataaaaccttcaaaccatattaaacttgaagcttgggacggtgatggtatatcagaaactgactatgtcattattccggtatcagcttcagatgaagagttgggtaatgccgttatcgaggcgttttcccgctgtaagggaaggcaattctga

SEQ ID NO: 280515 - DNA, 921 bp, Morganella morganii
atgtcacataaaaataaattaccgttatacttatttatcttcctgtcaccctattcagttgcgaaccattcatatacctatgagtcaggagaacaaataaaactgaaaagtcacaatgccagtatttcagaaaagaatggcaaaccagtactgatgctgaaaggacaaaaaaatgaaacgcatattaactttgataaattaagtgtcggaaataaaggactggaaatagataatagcattgacacctcctatatcattacggaagttatttctgaccgcccctctgtgtttcgcggagaaataaacgtcactcaaaaccccgcaaaattaattattatcaatccaaatggttttgaaatgaaagaacaatttggaatatccggaacaatttacaataagattattgccggaaatgctccggatgatattgttgattatgatgatattaatatgcatgagcttcagagtaacggaagcaaaatcacgatatccggtgtaaataacaaaaatcgcttcagtgagacatcactactgagcagaaatgttagcataagagaaagtaatttatattttgataaattatatattggaaatatatttattaatgagggagaaaacccggggaattcaaaaatcactattgataaagattctgtaataaatataacttcattatcaggtgattttgtcggtgcccgtttttatcaacatggtaacattaccggaaacgtgaatttcacgctgaatcactcacatttaaataacaccggaaaaatgacaggagattatggaaaaataatacttaaagataatatttcctctgtcacaggaacagaaaacatgacatatacaaacagtgatgtcgtcagcggagaaaatttatctgaccagtcccctgtcagagtcggccctcggtggtaa

SEQ ID NO: 280516 - DNA, 687 bp, Morganella morganii
gtgaaaaaacgcattctgagtggcgcccggctgattggcttatccggtattatttgtctctcattgataacaatggcgaacggtatggcagaaacacataaaactgatctggtcacagcggcagaaaaaggcgatctggttacggttcagcagttaatcggagagggcggggatattgagcagcgggataaccgtctgcgcacaccactgatggcggcagtacacggtaaccgtaccgtcgtggcgcgctatctgattgaacagggcgcaaatgtgaatgctgcagatgccattatggatacgccgtatttatatgccggagcgcgcgggttacaggatattctggaaatgacgctcagtcacggggcagacctgaaaagtacaaaccgttatggtggtacggcgctgatccccgcgtcagagcgcggacatgtcaaaacggtgaagacactgattgatgccggggtgaatgttaaccatgtcaataatcttggctggacagcgctgattgaagcgatcatcctcggcgacggcagtcagaagtatgcggatatcgtcacgttgctgattgaaggcggagcggatgttaatctgccggatggctccggtgattcacctctgaccctggcaaaacgtcatggctaccgtaatctggccgctgttctggaacaggcgggagcacactga

SEQ ID NO: 280517 - DNA, 189 bp, Morganella morganii
atgaaatcatcacagtccggttcgttccgttttttccttacccgccatctccgccgccgtatttgtcagcgcggctacgcactggcacctgaaataaatgcattatggcagcagcatggcagttctctgacatgggggcggctgatgcttttttgtctggtgatggttgcgggagtattgtggatttaa

SEQ ID NO: 280518 - DNA, 987 bp, Morganella morganii
atgacgcattctgacattaatcctgaacatattactctggcacacttaagagctaaaaatcatgatatcagtaccgatgccgaaacattatcactgcccgcagccgacctgcattttcagatccgtgatataaaaaaatggcagaccagaatactgaatatgatttccgctgagtccgccattatttattctcatctccataattttgatcttgaaaacttacttggcacattttctccggatacagggatgaatttgttttcactcccccatgaaaaacaaatttatgattttttaaccagccagatgaatacgatttatcattcggtgaacagtattaataccctgtttaatacggaatttgatgccaccactattccgctgctacagggcgggttattgcaccatcagtcttatctggacaaggctatcagcaatgcactgccggatattgataaatttaaatgcgataaactctattgggaggaaaaactggcagtcattattcagtctgaggaaattattcatcagcgcggattacagtcacttttcggtaccaccacgctgccgacaaccgaacagctgaagaatgtggagatgtcctcttccgagcggtttattatggatgagctccaccggattatttcagcagttatcaatacattaaccgaaggattgagttatgttcagctggtcgaaacccggacgacactcagtcagcggatctatgacctcagtaaacttatccttaatctgaaaaaagacctgaagcaattgcaggatcatatgcaggaaatcagcagcgccctgacattgcttccgaaactgcgggaatttaacagccggatcagtgcggtattattattctggctgcaaagtgtcagacagtatgagccgtatttcagtcaggatgtgccccttcccgggctggatgctcttatccttgcccagcgccgctacttctcggtatttatcgggatggcataa

SEQ ID NO: 280519 - DNA, 1239 bp, Morganella morganii
gtgaaaaaacaacaggacgggcacccgttgtggtcgccttccttatggacgcattttccggctctgcaacagccggaatattcggagccgtctgcggtcagctatgcagtccggcaattgcagacagcaccgccgctggtgaccgcagcggatattatctcgctgagacaggcactggcgaaagtcagtgcggggcagggaattgtgctgcagtgcggggattgtgcggagtcgtttgccggttgccgcgaggatgtgcttactgactggacggagacggtcagcaccatgtcggcgattatcagtgacggtttctctctgccggtactgaaaatcggacggattgccggccagtacgccaaaccgcgcagcaatcctgatgagacccgtaacggcgtgacactgccgagttaccggggagatattatcaatgactacgggtttactgccgctgcgcggatcccggcaccggaacggatgctgaatgcctattaccgtgcggcggtgacactgaatgccctgcacggtcgtgagcgggaaggcgaggggacggatccgctatttgcaccgttttatgtcagccacgaggcgttactgctgcattatgacagcgcgctgacccgtctcagcccggcggatcatctgtggtacaactgcgcggcgcataccgtctggctcggcgatcgcaccagtgaaccttcccatgcacatgtgcaatatctgcggggtattgaaaacccggtcggtatcaaatgcggaccgtcaatgaccggtgaaaaactggggcggttgctggaattactggatccgggcaaacagccgggcaaaattatgctgattgtccggatgggggctgctcagatagcggagaaactgccgccgcttatccgcgaagtttccgcgcggcaaagcccggttgtctggctgacggacccgatgcacggtaatacccgcagtactgctgaggggctgaaaacccgcgatttcccggtcatttgtgaggagatcaggttgtttgtgcagctcctcagggaagcggatctgtatcccggcggtctgcatctggaaatgacggggcaggcggtgacggaatgcaccggcgggccgcaggcactgactgataaggacatcgggcagtgttatgaatcgctctgtgatccgcggctgaaccgggagcagtcagttgccctggcgcgggtggcggcaggataccggcagagtgataaacaggaaggataa

SEQ ID NO: 280520 - DNA, 399 bp, Morganella morganii
atgagtttaattccgggaaatgaactgctttcttatgatatggatttaacccgcaatgaaggggaagagagtaaggcgcaggctaaatttattcacggcactgcttttaccatgacgttctggtcgtttaaaccgggtgcggtgatcccgcagcaccagcatgaacacgaaaccctgacaacggtgctgtccggctctctgcgcctgacggtggacggtaaaaccatgatcctgagagcaggcgattccgggctggtgccatcatgggcgattcatgatgcggaagtgcttgaggaatctgaagtcattgatgtgtataccccggtgcgggaggactatgtcgcacgtcaggaagggcggtttgaaacctatctcgccacgtcgcaggaacggaaataa

SEQ ID NO: 280521 - DNA, 525 bp, Morganella morganii
gtgttaaccattcatacactcggcccgaacggaacgaactgcgaaaaagcagcatatcactggctgagtgaaaataatattaaaggcagtgtgaaattatacccgacattagaaaccgcgactgaacacgtcagaaaggataaagacggcgtgctgctgggttgtattgtatatcctgatctgcacaatattgtttttcagaatttaacctggctggaattaaaagcctgttttgttctggacacacacaacatgttatttgcctcgcgccatacggattataacgatatccgccatgtggggtcacatccggctccgcagcacttatttgatgaactgccgttgctgaataaagaggtgcggaaaactttatttacctccaacagtgaatccggtgtgcagtgtgcgcacggtgcggtggatggctgcattaccacactcagcacggcacaaaaatatcatctgcatattctgcatgattttggcccggtaccgatgggcttttccattcatgcccctaaataa

SEQ ID NO: 280522 - DNA, 696 bp, Morganella morganii
atgaataagataaatacagatttatcagagaaattaaaattactgaaaataagcacgtcaacgtttgttgatattatggatggacttaaaaccggcagtgtattaagccataaattacaatcacagaatctgacagattattactttgccggacaggcttacaccgtacagtggaaaattgtccgcaagagtaacaatattcttgaaccgtttccgtcaacctgggaacaggtaaaggattttctggtgcctgaattacatacagcagaaaacctggtgtatgttgccggcagcggggagtgcatttgtgacgcggcattagccggcgggatgagctgtacctattttgaaaagctcggttttgccggtgtgataaccggcggcgcagtccgggacggacaggatcttaatgcattatccatgccggttattgccacgaatttaacgccgactgatacacaaggtgcatattatgtgtctgaaaccgggggcagctgtcagatagaacagaccaccattcacaccggtgaccttattgttgcggatattaatggtgtggtggtgatcccttaccgggatattgatgctgtcatcagtaaagcgcttgaaataacagagattgaaaataacatgctgaataaaatacggcacggggagcggttgccggatttaatcagtgtcaccggaagaatataa

SEQ ID NO: 280523 - DNA, 216 bp, Morganella morganii
atgcataaagctgctgtttcactgatttgtttgaccgtgctgacaggatgttccacctggccggaggtcgggcacaacaaaacggattggccgcaaccccataaaaattcacgtacagcggagcagaaaagggctgacagggcaccggtgcatgaacagcagcgggctgttatgagaggggagcgccctgattatgaggtatttgaccgctactga

SEQ ID NO: 280524 - DNA, 573 bp, Morganella morganii
gtgaaaggaaaaaacgttattattgttcacggttatactgcatcaccggcagataactggtttccgtggttaaaaaaagagctggaattgcttggtgccacagttgccgttcctgcgatgccggaaccgcattctcctgatccgcaaaaatggcaggaatgccttatcggcaacaatctaatcgcggatgaaaatacaatttttgtcggacacagtcttggttgtattacggtactgcgatatatcgctgaacatattccggaagggacaaaattgggtggctatattttagtctccggttttgattgcagtcaggaaacattacctgagctggaggcgcatgttcagtatccgccggattacactaaactgattgcgatttctgataaaagaatttcagtcatatcttctgacgactgggtggtcagtccgcaggcatcgaaaacgctggcggagtcgttgcagactcaggttattattgaaaataacgccggacattttctggacagggaaggatatactgagtttccggcgctgcttaatatattcagaactgtcttttcagtttcctga

SEQ ID NO: 280525 - DNA, 1053 bp, Morganella morganii
atgtttattcagatcaacgcattatgccgtgccgggctttttctgtgtctgacagccggactgagcttgtctgccaccgcagaggaaaattgtacattgataacaccggaaaccatattccgtattcccggcgggattatcaacgcggcacatcatgtgccggttggcggtgttatcggggagataatactatctgacagtattgatgtttatcagtgccggattgagcccggtaaaaatattgaatttgtgctggtgggcggcatgccgggtaacagaacacaaaatgcatccggacacacgatttatgaactctccggcgggatcggctacagtctgggggcggtggcggagcatccggaatgtatgaaatcgtcgcactatgtggacggtcgtgattcaccggacaacaacagtgccaataaacggctgtgtacgatcagcaacgggatggatccgtctcagccataccgggtccgggttgcggtcaccctttataagctgaagccgcaaataacggcacatcatcccgggggctacctggggcaggtctcaatgcgtgttgacggacaatggccgtgggaacggtatcatattgttgaatcagggttacatctgggcggatttacggtccggcaaaattcctgtgatcttgatccgcagacagacacagagatggatttaggaccggtatcgcggacagacttcagcggtaaaggcactgttgcaccgggaagtgtccgtaatctggccatcgcactgcggtgcagcaaactgacacaggcggatattcgtctgaccggcaatgcatttgccgcacgtaacagtcccggaacactaaagctgctgcggaaaaacggcagtgcctcaggtgtgggtgtcaggttgctgcataaaggcagaccggtcacgttcgacgagctgctttcgtttgatgaagtcactgatcagcgggctgtactccggttgcaggctgcctttgtgcagacgaaagataatatcgggccgggcacagcggaaacgatcctgaattacaccatccgttaccagtaa

SEQ ID NO: 280526 - DNA, 2403 bp, Morganella morganii
atgcaactgaaaacaccttatttttttcttttggtgctgcttcctgtttttttttccggaaagacccgggcggcaccgtattttaatccggcggcactgggtctgaacggtgataacccggtgatggatcccgtgcagtttcagtatctgcgtgaacggcagtttcaggaagaagggcgctattttgtgtcagtcagggttaatcagcgcagagtaagcagcggctggctggaatttcattatcatccgcaacacaaaaagttgctgccgcaagtcacccgaaaacaatggctggtctggggattacggcctgatgcatcgccggcatttgctgaaacggaaaacacggcaccggttgcggatattgccgggctggtcagcggggttgtgcagaattttgatgcggtacaacaggctctggatattacgatcccgcagcggttttttctgacagatgaacaacgggcagcggatgcttcattatgggaacccgggattactgcatttatgctcaattatgattaccgtgtctcccggcagagcagcaggttcagcgatcacacaggacataccctgttactgcagagtggttttaataccggattctggcggcttcgccatcacagcagagcagaataccggaaccggaaaatgacatggcagtcagaacggctgtggatgtaccgcgctattgcacctctgcgcagtgagttacagctgggggagctgttcagcggtgatgtgttgtttgacagccgcgcattcagagggatcaggctggcttcacaaggggatatgtatccgctgaatcagcaggggtatgcaccggttatcagtggtatcgccgggcagagtgcggaactgactatcaggcagcagggtatggttatccgtcgtgaaacactaccggccggtgagtttgttatcgatgatctgaacacatcttttcagggaacggaactggatgtcaccattgaggaggctgacggcactgtacagcattttacccggcacggagccgcagtccctgtcatgcaacgggaaggcaggctcagctacacgctggatgcaggaagatacagcgggaacataaataataacaaagacctgtttgtgaaaagtacggcggcatacggcattaattctgtcctgacgctgtacggtggtggttatgcggcacagcatgccctgagcagcggtgcgggggcgggtgtcaatatgggagcggcaggcggggtttccgctgatattctgatgcgtcacacaacagcaaaacactatccgcgttaccggctgaattatcagaatttttttccgctgaccggaacgttacttaatagcggggcgactcatgatcagcaatcaaggcactggcaggtcaggctgctgcaaccgctgccgggagataacggtgcgttatcgtcaggatatcactacaaccgtaccggccatgacgggcgcggataccgggtactgatcagcagagatgccggctattccggtcatattggcccggtgcattatggtgtgaatgcacaataccgtaccggcgggcagtttcggaaagcggataaacgagtctctttttcgttgtcagtaccgctggattttgccggtcagcaggcgcgcagccattttcattaccaccggcgggcaggtaaatcctctctgcaaacatctgttaatggtttgctgggtgaagagcagcgctttgcgtactcagttacacacagttatcagcagcagagtacagcacattaccggggtgcggaactgcgctggcgacatgatctggcggatatccgggggcgtatcagtcacagtcacggacacaataccctgagcggggatattcagggcggcctgattattcatgacaacgggatcacgctgtcacgcccgcagggagaaacccgcggactggtggataccggcggcaccgggggagtaagcctgacctctcggaccgccgcacggactgaccatgccgggtacagcgtcattcctcagttgaatcattatcatcagaatattgtccgtatcgatccggaaaccctgccggataatgcggatgcggatgacccggtcgttcaggtgatcccgtcaaaaggtgcagtggtaccagtccgttttgcggtgaacagcggtttccgtgcaattcttgcattgagaaccccgcagggtgccgtaccgttcgctgcccgtgtcaaaatcagaaaagcagacggcagcagcgtcagtggtattaccggtgaggacggggaggtgtatctcagcggattaccggcgcaggggcgcttacaggctgtctggggtaaaggagtgcacgaacagtgtgaagcggatttttcaatcccgccggaacagcagggattgatcactttcccgctggtgtgtcagtaa

SEQ ID NO: 280527 - DNA, 669 bp, Morganella morganii
atgaaaaactatttcacttctattattcttatctttctggtcactgggcaggcaatggcgggagttgttgtcggcggaacccggtttatttatccgcaggataaaaaaatgatcactatccctgttgataataccgataaaaaaacagcgtatttaattcagggctggattgaaaaagcggatggcattacaaaaagtaaggattttattctcactccggttctttttcagctggatgcgggaaaaaaaggtatcctgcgtgtcatgcttaaacaagctgcttttccggatgacagagaaacattactctggctgaatgtccgcgggatcccggaaacagacgaacaccgagaaaataaacttcaggttgttatcaattcaaaatttaaatttttttatcgtccggcgggattaaccgagcctgattataataacctgatatatgaactaaaaggaaataaaattaaaatcattaataacacccctttccatattactgtcagggatatcgtcgttaataataaagaacacactgtttcagacatgattgttccgtttgaatcattaactgtaccggtaacggctattcatcataatgacacgatcacagccagttatatttctgatttcggcggaattatttctaaaccagtgacgtttaaaaaataa

SEQ ID NO: 280528 - DNA, 567 bp, Morganella morganii
atgtctttgttgaaaaataaattatttatttcttctttattcttactgtcagttaattcattcgctgcagatgatgatgtaattctgggtgaacagcctgctgaagatccggttgagattaatggtaatattatatttaagggcgaaattacagattcaagttgtgatatcgctcaaaaggatattgaggttgacctcggtacccattctgcaaagctgctgaaaaccagagatgacagaacatcggaaaaagaatttgatattgttgtggctgattgctcattatcaatggcatcgttaaaaatcaaaatgagtggtacagcacataaagataatcttgcattattcgcactggatgatggtgagaaaagtgccggtaacgtcggtattattgtaatcgacaagcagaatcagccggtaacaccgggcgcggcttaccagaatattacactgaaaaatgattcacgggattacacgctgacctatagtgcagcctatcaggctaccggactggcaacaccgggcacgggtaatgctaccattaattacaccgtttcttacgagtaa

SEQ ID NO: 280529 - DNA, 504 bp, Morganella morganii
atggattttgttttaacaaaaataatgcagacagattggcctttttttaaagggctgtatatgaacaatgacgttatgaggttcatatcagatccgatgccggaagataaaattaaggagtctttcggaagccggttgccttcatgggatatcatgtctcctcactggttgtgctttgttatccgtgataagggcgacaataccccgatgggactgacaggtcttaaaattgtcagtgaaggcgggcgcagaatcacagaggtgggctacatgatatcaccggaattcagcggaaaatcgttagcaaccagatcgctgaccaggttgatatcactgcctgaactggctccgctaaatgagttttgtgcagttgtaacaggcgggaatactgcctcggaggtcgttttaaagaaaaatggcttcattcttactgaagtcattgaaaacaactatgtgataggtaataaaacgtttgatgatcatatctatacattaatccgataa

SEQ ID NO: 280530 - DNA, 366 bp, Morganella morganii
ttgctgagatattccctgcttttgcttttaataacgatgtctgccgcacaggcgaaaattgatattacggctatcggacagtgtaaatacagcgggcagttaacccctgaagatattgccgggcagcccggcgacggtgaaattcatcttatttaccggacagacaccacgggaagagcctatccggtaaaaataaccaaaaacacctgtgatgaaagatgtaatgcccgggatgctgtgcgtattttgcggaaagtaagatgcccgccggctcctccccgttataaccgcagaatgattattaaattctacagtgatacagaaaagcatactgacaaatttacgccccgcaatctgatggtttga

SEQ ID NO: 280531 - DNA, 339 bp, Morganella morganii
atgtctgtttttcccgataacggaattatttccctcagccgtctgcgtcagtccgccaaacaacgcctgcgccgtatcaaagccggtgaagagcctgtttcgctgctgcgcctgcaccagatgaatccccgcgctgaactgaatcttgccgctgttcagtggttaatcgccaccgaaatggggtttgacaactggccggccctgaaagcacataccgatgccatccgttttgctgcgcaatatcccgggtttgaggccggttctgacctccgcaactctccgccggacattatccgggtaactctttttatttataaaataatgataatttcggattaa

SEQ ID NO: 280532 - DNA, 309 bp, Morganella morganii
atgaatattgattttgatgagttaaaaaaaacagggttcacacaaaaagagttagataaaataacagaaaatacccgtatgcatggtggatccattgcggaagctattaatgacctggcaaacagatttaaaatatttttatggttctctgttttttttgcaatcgtatttatagtgttactcatttggagttctgaatcaaaaattattggtggtagtattggtttgctcgccggggtgttcattatatcactgacgtttccggtacctctgggatataaagcctggaaataccggaaaaaaagatga

SEQ ID NO: 280533 - DNA, 402 bp, Morganella morganii
atgatatcaacgatgaccccgatcggtgtcttagctggtgcggtattagttgtcgatggtgttaatggcataacacgggaagcgattaaccagtggcagggggatatgacatattctgaagggatttttgctgatgcggccatggaagcggctgaatttatggggttcaaagcagagaccggttttgcgttctataatgcggtatctttatcagccggtatttatggtattttagggttaacattaagatccggagcccggcggttattcagatggattccgactgattattatcggaaggtcagcaaaatgagccgtcctaagctggcaatgaaaatagcgggttttggattgaaatctaaagtaatctttgatttgatatccatagatcaaaatgactga

SEQ ID NO: 280534 - DNA, 381 bp, Morganella morganii
atggatgaagctatattctcgatgataaaagataaaggaagaaataaaagttgggctgaaacaatggtttttcttgaggcggagaaactgatatatgaggctaaccgagtatcaatgcttcatctgtcagatagttttgcccgaatggattttgtcaaagaaattaaggatgtggttgaaaatcaatttgatattgcgcgtaaggcaaaatctgatgaagaatgtatgcagtgtgtccgtgcattgaggcaggaaactgaagcactgaaggaacaagactggcaattacgttccaaagcagcacagctttatgccaaagttggtttgtcagagaaaacaacaaaattgtcggatacattatttcagctgtgtgtgttgtaa

SEQ ID NO: 280535 - DNA, 519 bp, Morganella morganii
atgaaaattaagtatgctgttttaccaactgctattgccctgttattcagtgcttcatcatttgctgacaataccggcaaaattttctttaccggctcagtgaaggcgcctacatgtacagttaataatggcgccaagaatgtttatattgacatgggtgttcacgaaaccggtgaattccctgctatgtatacaatggttaaaagtgatgaaaaagtaattctttcactgacagaatgtgatggtaatacagcaaatctggcgttgacagcgaatgaacgtgacggtaacgatataattaaattaaaagacacggcaaacagtgccaaaggtctgggtatcgtgttagttgattcagataccaatacctaccgtcaggtagatggtacagttaccggtaaagcaattgtcagccgtgaagctacttttgagtttcagccgtacctgatcagtcttgcagatgtagtgacagcgggtcgcattaatgcaacggtagattatactattacctataactaa

SEQ ID NO: 280536 - DNA, 675 bp, Morganella morganii
atgattaaatcaattaaaatagttatacttatcttttcatgtatatttattaataacagttttgctgatatatctctgggttcgacgcgtatagttatcagcgacggaaagaatgaaggtagtgtaagtgcccataacagagataaaataaactatcttattcaaagctgggttttggatgaaaatgataaagaaactgataagtttgcaataacaccgccattatttaaactggaaagtaatacatcgagcagcctccgggtggtgatggttggtgatttgccggaagatcgggaatcgctgtattggctgaatgtaaaatttattccttcaacggataaagatataaatacaaataaattgacatttgccgttaataatagaattaaagttatttacaggccgaaatcattatctttctctgaaccagtggaagtgtttaaaagagtttccgtccggtatgttgatggtaatatagaatttaaaaatccgacaaaatacttcattaatattagtgaagtcaaagttaatgatgtgattttaaaatcaccaagttatatagagcctgagtcttcagtgttggtttctgtagggaataaaaagaagccatccagggtagggtatacattaattgatgatttaggaaaattaaatctgtttcaggctgaattgtga

SEQ ID NO: 280537 - DNA, 2547 bp, Morganella morganii
atgaaatcatcagaaagaacattgtcttacagttcaattctgattgttgtgttgtttggtgttaacattgcaaaagctgacgactactttgatccggatttcctgaccagcccgtcgggtgaggcgcttaatgtcgatttatctgcatttgaaaaatcatcttttatacccggaacttaccgggttgatgtctatttgaatgaaaaatatgtcaatacgcaggaagttctgctaaatcttgataaaaatacaaataaactacagccttgcttttcagatgttcaattagccgactacggaataaaaccggaatattattcattattagacaagtccggggattgtgttaatttgagcgggattccgggagctgatgctgaatttaaagggaatattggccgtttatatctcagtatgccacaggtggcttttgatcagaaagcgctggataccaggcaggagttactatggaatgacggcattccttcagttttcactgattacagtttttccggtctgcatatggaggatagtaaaaaccacagttcagatgattctctttatctgagtttgcgttccggaataaatatcggcagctggcgctaccgtaacaacagtacctggaataaaaatacgaatggctatcaaaaatgggaaagccagctgaattatattgaacgtccattgcgatcaataaaaagtaacgttctggttggtgataatttttctgattcagatatttttgataacgtagaattccgtggaataaaactatggtctgatgatcagatgtatccgcaatatgccagtatatattcaccgactatcaccggtgtggcaacaatagattccacgattgaagtatatcagaacgggtatgttatttaccggactaatgttcccgcagggccttatgagttaacagatgttattccgctgaacagcggagagaatttgtatgttgtccgtaaaggtgttgatggcagtgagttccgttccgttgttcctttttcatctctgaatttcatgcagcgtaaaagtcgctataaatacagtatcactgctggtgagtacagaatgaatcattacaggaattcggaggggacaggtgataaaacaaaattcatgcagacagatgtattttacggattaaccgacaatactacggttttcggtggtgtgcagacagcatcccgttatcaggcctatgatgccggtcttgggatgaatattccggttattggtgcggtagctgcggatattatgttcaccagagcacgtccggattttattgacgatatggacggcagagcatttcgttttcgctattcaaaatcattggaaagcacaggcacaaatattagtttcgccggatatcgttatatgagtggtgattatctcaccatgacagatatgtttgattattacagcggtcaggctgatacgtcggcatatctgatgcgtaaaggacaatttgaactgacagtgactcaggatttaccggatgattttggtacactgaatgcgacagtatcccatcagacctataatacatattataataatgaagaaaaaagtacggaatcctataacgttggttattcgaatatatttgatgatatatctctgaatgttaactacgcatattataaaaattcactcaacagcaaacgttatacaacagatatatttgaaacagaacgtaataatgaccatgttatttctgtaaatatcagtattccattgcatggccgctttaaagaccagtgggtaacttatggagcatcgtataacaaagacgggaactttgataattacgcaggaatcggcggtatcattctggatgaaaagaatctctcatggaacgttcagcaggggtatgggaataaagggagcggtaattacggcagcgtacacagtaggtataaagggcgttatggcgatgtgaatgccggttattcttataagaaagataatcggcaggtttcttatggcctgagcggctctcttattatgagcgggtacggcgtcgtattatcacggccgctgggtaataccaacggattaatatatacaccgggtgcagaaggtgtccatattattaacagtcccggtgtggcaacagacagctcgggcctggctgtcgtctctaatcttattccctaccgtaataacagtatccgtcttgataacctgaccttgccggaaaatgctgaaattgaagcaacaataaaagaaatatatccgacccgtggcgcaattgttttaattgattataaaacgacactcggaacaaaaattctggtcacactgcgggacgaagatggtcagctgattccgtttggtgcttattcagaaaatgaaaatgacaatgagcgcagttatgtcagtaactatggacggctttatctcactggtgcaaaagataaaaatgatatccgggttacctggggagataaaaatcagtatcaatgcagtttttcttatgatattgacggaaaacgaaaagtaaatggattttatattttcgatgcagtttgccgctga

SEQ ID NO: 280538 - DNA, 945 bp, Morganella morganii
atgatagggaataatcaaaatagatggctgatgctggtattacttatgctttcaataccggcttcagcggattgcggtaacaccactgccgtattcaaaacagcagaatcacatctgctggcgcgtatcgaaggcaaaatcagcgcaggtgcattgctggctactgatacattacaggtagataatatttccacctgtaataacagtacatatgaagagttatggctggttacgacgcagctgaacagtgattcatcgcctgagtttttcagaatgattaacggtgtacctgcatattatcttaataaggactatgcctattctgtccgtcttgacggcgttcagccttattcatcacagggtgtggctttttctgcggaaaaccggaacggtattatgtacattccccgtgccaccatttccatctatgcggcaacagataatcctgaaccactgagattatcttcatcacaagtcgggttgataaaaaataacgggcatgaaacgatagcgagactgaaattatccgccaatatcgataccgttgaaacatgtgttattgatactccgcagatagcctatgatttccgtgacctggagatttctgattttccggcagaaccgggcagaacaggtatccgctctgataatacgctttcagtcagttgcagtaatgaaaaaacagccaaaagtgtttcgattatattaagtgagacaacgcgttttgcacaggcggataaatcagttatcgcctcaacgaatccggctatcgggtttgtactttattatggtgaggaacaaattactgcgaaaaacagggcgtatctcggcgatatgcaaaaacagttaaatgcgtcagtcacggcctatatttataagctgaaaagccggattgagccggggccgttctcaggaactgcggaatatatcatccggtttaactga

SEQ ID NO: 280539 - DNA, 1209 bp, Morganella morganii
atggcgcgtacaacagttccactcagtgataccaagcttaaatcagcaaaacccaaggataaagattatacgctgcaagatggaaatggcttatatctactaatcaaaacaacgggctcaaaaatatggcgctttaactactaccgccctataaccaagaaacgagcgcttattagctttggtagctatcctacagttagccttttagatgctcggcttaaacgtgaaaacgcacgggagcttctagctaaaaatatagatccacaagaacacaaaaaagctgaagaacaacgcttattcgaagaaaaaaataatacttttgaaaaaatagctcagcagtggttcgaaatcaaaagtaaatctagcttgcaagaatcaactttgaaagatatttggcgttctcttgagctgcatgtacttcctcatgttggtgatatagcaataactgatttaaaagctcgccattttattagcgcattagaacccttaaaagcacaaggcaaactagaatcagttaaacgagtagcgcaacgcattaatgaagtgatgttttatgctgtgaatgttggctttcttgatgctaaccctgctgcaaaaattaccgctgcctttgaaaatccagttgtaaaaaacttacctgcattaaaacctgatcagcttcctgaattgatggctgcaatccaaggagtcaacattgagcgacaaacttactgtttgctgcaatggcaattattaaccatgactcgcccagctgaagcagccgaagcggcatggagtgagatcgatcttgataataaactctggactattccaccagcaagaatgaagatgaaaagagaacatatcatccctctgtctcctcaagcactggcaatattagaaactatgaagccaataagtggtcatagggaacatgtttttcctagtatgaaatcaccacatactaagccaatgaatagccaaacagttaacgccgctatcaagcgtgttggctttgctggtcgccttgtagctcacggattccgttctattgcatcaacagcattaaatgagcatggttttcaacctgatgtgattgaagcagctttagcccatatcgatagtaatgaggtgcgacgcgcatataaccgagctatttatcttgaacaacgacgtgaaatgatggactggtggggagaatttgttgatgatgcggtcaacaaacgctaa

SEQ ID NO: 280540 - DNA, 780 bp, Morganella morganii
atgaggtataatgtgagcattgtggatagtagtcagttcataaaatcagtcaaaaagaacccagaaaatttttttattgttcactattcctgccaaaatttaaatgatgataacaaggctctatcgccaagaataacctctatcgctataaatcatttctcttccggtcaatcggtaagcttttcgactcattcaatctccgaggagatgcatattcctcgagatgaagtgctacagcgttttgatgaagtagagcgagagttattagcccagttttaccgatttatcagagatcggtgtgataaattttgggttcattggaacatgcggaatctaacatatgggtttgagcatttagagcatcgttatcgagtacttggtggagatgacgcctgcgtaattgctgtagaacgtagattaaatctgaacgatcttatagctgatcgatatggacccgactatgctaagcaccctaagatgctttcattaatggagcaaaatggtggcatacatagagatttacttaatggtgaagaagaagtcaaagcctttgaggataaagcttttttacgtatgcatgcatccacactatcgaaagtcggtttttttagctcagccatgagaaaatttgtaagtggtaaacttaaaaccgcctcaaaagggtatggagtaatactcgataagctttttgaaggtcgcatagttaaatcgctggggctaatctcaattataattggaataatagtagctatctggcaattgtacctttggctaaagtaa

SEQ ID NO: 280541 - DNA, 354 bp, Morganella morganii
atgaaaatcaaaagtcttgaagatctgcaaaagagactggctgactttgccggggccagaaactgggatcaattccattcaccaaagaatctttcaatagctttatctgttgaagccagcgaattactcgaaatattccagtggctgactgaggaagagagtaagaatctcaattctgagcagttaacagagaccgaacaagaagtagctgatgttttattatacctactgcaactttcggataaattaaatatcaacatcctcgaagctgcttataaaaaactcgacgctaacgataaaaaataccctgttgaagcctgttttggttctgcaaagaagtacactaaactttag

SEQ ID NO: 280542 - DNA, 852 bp, Morganella morganii
atgtggacagtatatatatcagataaacctcattcgaaaattaattttcatattggtatgcataaaggtgtttggggagtaaaggaggcaaagaaaggtactgttcagaatataaaaaaagatgatctggttgcctttgtctactctatttcctggctaaaagccgagggagccgccccttcgggcttctcccgtgtgggtaaagaacagctgcaaaatttccgcggattggtgaaaaaaatcataattggtcaggtaacaagagcctattatactgcttctacaaaagtttggcctgatgaagagtatccgcatcgcttcgacttcaaaattattcaggattatggtgaagatatctactttggtaccgagtttttcaatgacgcattcgttgaagctgtacgttattctgcctgtacacagggttcggttactcaagctgacacgataacactattggcagacattagccgtgatgtggatgagcaagctgatgaaacgccacctgctgtcgtctccggttatgaaggtaagcccatcatgaggttacaccagtcccgggaaagagatcccaaaatcattaagcagaagaaagaacaggtacttaaggaaacaggtaaacttaagtgtgaaatctgctcaatggattttgaagaaacatacggaatactcggccacggttttgctgaatgccatcacaaaagccccctggctcttcgggataaaaacgaagaaacagatctttgtgatctggcaattgtctgtccgaattgccatcggatgcttcacagaaaacgcccatggctgacacttgatgatctgaaggcaatttatgaaaatcaaaagtcttga

SEQ ID NO: 280543 - DNA, 891 bp, Morganella morganii
atggcaggcagccgcctatcccgcgaagaaacacaattacttcaccgggcggcaatcaaagagaaacagaacaacattctgtataccgcccgtgcgctcacccgcgataaacatcactgtgttatcactaaacaccgcgatgctgacgggctggagataaccgcaaaatatgactggcgcttcctgtctgtctgcgaaatcaccgatgccaatgacaatatcagtcaggtgcagactgatgcgctgggccgggtgatcagcagtcgtctttacggcacggaaaatggtcagaaaaccggctacagtcagaaaccactgattctgccggcgtctgtacaggacgcggtggatatgcaaaaacaactgcctgctgcacagtgttttgtctatgccgcagatagctggatgcacagcggtacagataaactgccgccacatgtgctgacactgacaaccgatcgctatgatgacgaaccggcggataaaaacacgcagcaaattcgtcagcaagttaccttcagtgacggttttggccggatagtacagcaatctgtccgttttgaggacggtgatgcatttcgccgtaataaaaacggctcactggcggccggaaaccggaaaagtgagaaagcagcagcccgctgggcggtatcaggccgcacagagtatgataataaagggcatgctgtgcggacgtatcagccttactttgtcaatgactggaaatatgtcagtgatgacagtgcccggcaggaactgtacgctgacacacgcttttatgatccgctcggtcgtgagcatcaggtgatcactgctaaaaattaccggcggcgcatactgtacacgccgtggtttgtggtcagtgaagatgaaaacgacactgcagaataa

SEQ ID NO: 280544 - DNA, 855 bp, Morganella morganii
atggatctctatttcggacggaataattctgaagaagaatatatacgtaagttttcagcagatgaacagttcaggcaattagaaaatcaattggccggaattgctgatgaaaatattcatgcgctcctgacaattgaagaagcagagcagtttgtttcagtaatgaaagatcccgcatcttacaagccggaaagcgggaaagagacttttttccggtatgcgggtgtggttacctcttttacgggtaattatttggatgcttatggattaggaaagctcattaatgaaataaaaagttttggggtggaagctattgagtatatggggaaagatggaaacaggtatgtcaggttaacaggagaggctggcttaagaaaatatcttacggcaacactctatcttataactgatccgaaaatgctggagtttggtatcggagaagtgggatttgaaaccaatctggctaaaggaacaagattctgtatttatttttctgcagcatacaggggtattgaactgttattcaaggatgaatatgacttgacggatttttttgtcaacgtctcaatggatgcagcgaaagcattgattggaatgggagttgcgttattagctaaaggcttgattaatacatttgtgggaattattggaggagggcttattgctattagtgcaggtgttttcgttgtgagtttatttgctgcgttcggcctttacattttggatgactattttggtataagcaaaagtataattgatgagttgaaaaatagtaaacgaggatctaaagcacaagatttaaggcatgattttcatcagggatttaatttaattgggcggtatagtcgtggataa

SEQ ID NO: 280545 - DNA, 519 bp, Morganella morganii
atgccaactccatgttatatctctattgaaggcaaaactcagggcaatatcaccgccggggcttttaccgctgaatctgtcggtaacatctatgtgcagggccacgaagatgagatgctggtacaggaatttgaccatgttgtgactgttccgacagatccgcagtccggtcagccatccggccagcgtgcgcaccgtccgttcaaatttaccgttgcgctgaacaaagcggttccgctgctgtacaacgccctggcggcgggtgaaatgctgccgaaagtgcagctgaaatggtaccgcacttcggttgaagggaagcaggagcatttcttcaccacgtctttggaagacgcgactatcgttaatatcgactgcaaaatgccgcactgtcaggatccgcaaaaaacggattacacgcagttgatcgaagtgtcactctcttaccgtaaaatcgactgggaacataccgttgcaggcacctccggtgctgacgactggcgtgcaccaatcgaagcgtaa

SEQ ID NO: 280546 - DNA, 423 bp, Morganella morganii
atgaagtatctctgtcaggaaggaacagttgttttaccgtccgtgcagtatgaggatagcagcatcaatatcctgaaatttccggatcgtcaggccagtatgacactgacccgggatcgcctggctgaagggcagagtgcggagcagtatctggcggcacaaaccgtcatgctgcgaaaaggaatgaaaatatacacgatcacacagcctgtcatatttgaaacggatgccggaacgacgggaacagagttctattgtgagttagaccagcagggacaccacctctggcagtatattgctgcgtacgaactctgtggtcatatttttgtgatcacgtactgtctgacccgtccgttcaatgaggctgatttacaggactggaacaatatcaaactgggttttacaccgtcattacaggcgtaa

SEQ ID NO: 280547 - DNA, 561 bp, Morganella morganii
atgctgaatatcaaattaatcgcaaatatagatagtttatcacaacacaatgttatcgggcgtattggagggaatatccctgagtgtttgttgccatatcataataaaattaaggatttttatttttatgttacattccaacacccagaaaaaaaagatgttttcttaagtgtatttacaccaaaaagttatgatactatggttgacaataatatttatccaaattgttcagtaagggttttttctcatggtttttctaatgagagtgataatttaaattatacaaacaaagggattaatgaactggaaattgttggatatgatgaatcggaaagtgatggtttcattacagtaagtgataatcttgattttattcaggatgaggattttttctatgagagtctaattttggatggatatgagccatttattaaaatagatgaggactattatcctgatgaagtaatttctgattcatatatttttgggtatggagcactatatttatataaacatactagtacagatgaggttattgctggtttttggcaaatgtcttga

SEQ ID NO: 280548 - DNA, 447 bp, Morganella morganii
atgaaagagctcgcagaagagaatatagaattagaggaaaaagtagtctctattatagaagaaggaaataactttaatactattggggattttgactctgcattaaagtcttatgaaacagcatggctgttattgccagaacctaaactagaatgggaaatgttaagctcttggttatctggttctttttatactgcgtattttaatcttgcaatttttgaaaaggctaaacattgggcggaagcgcaacttaaagctacaagttctagtattgatactgctccattgattgacctcggaatggtctgttatgagctaaagcaatatgacgaatcatataaatattttgacgacgcttatagttatggtaaggctcgagcatttaaagaacgacctaaaaaatatcttgaattttatttagaaagaaaaaataaccctataatataa

SEQ ID NO: 280549 - DNA, 252 bp, Morganella morganii
atggaaaattcagcagcaattgaattgcagtcgacactgcgttgtccggtttgcggatcagaaaaaacagaaacgatgccggtgaatgcctgtcagtggttttatgaatgtgagcactgccatacattattaaaaccacttcagggtgattgctgcgtattttgttcttacggcacggtggcttgtccgccggtgcaggaagccgcactgacaggtaaaaaatcctgctgctgcccgtcatccggggaataa

SEQ ID NO: 280550 - DNA, 354 bp, Morganella morganii
atgatgaaagcaaaaattttgatcccggtactggcagcactgccgctattcttctccgcagcggcaatggcctgcccgtactgtggtaaccagtataataatggttatcacaaccgttattctgataacaattctgaggcagtacaggagttccgtcagaaacgggccgaactcaaccggctgtatgatgaaggtgtggcggaaacggatgataaagccgctgcactgattaatgacctggataaactcagcgaaaaaatccgggcggaatcacggcagaaccgaaatcagtcatatcgtcacaatgatgattatgataacggccgttatcaccgtcgcggcggttgctggtaa

SEQ ID NO: 280551 - DNA, 573 bp, Morganella morganii
gtgaaagactacgaacgtcgtctgcgggatgcgattgatgctgaatatgtctatctcgatcatcagatgaaagcactcacggaacataatcactatctttctgttcttcccgaagtacatgacaacatcacagaatataacattgaaattaacggatattatgatcagcaaagaatttctgatctgaaaaccgttattgaacacctgataagtgatacctcaaccactatagacggatactataaacaaatagcgttactggaaaaattaaaatccccccggcaattgcatactgcaataccggccaatacactgatttccggtattgacgatattatcagtatgctgcatcagaaaatttctgacctcaaaaccacgctggagagttacacactgttcactgctttgctggataatatcagtaatctgtcgcaaatgtgtgtcgccgtcagtcatgtctggcagcagaaaatggccgatattgcgccgcttttactgccggatgcctcacctgaagcgctggagctgcgggtacaggcactgatcagttatttcaattatttcggtagctga

SEQ ID NO: 280552 - DNA, 123 bp, Morganella morganii
atgacattattcagcatcagctcgattattttcatgctttcggacattaatattaataaggataccgatgcccggtatcctgttaatacactgacatcttatgatattgtcaccggcgtataa

SEQ ID NO: 280553 - DNA, 657 bp, Morganella morganii
atgttattaaacaatgaaattacattatcggatttgcacgaacaatcagaagatattgaaacctaccagagcagcattaaagaaatgccgtatcgcgaccaattagagaatattaatcactacctgaaaaggatacatattacaatagagcgcggatacgataatcttcaccgggaacttaattcattatccggcgaggatttccctgttgatattctgaaatatatgcaatccggtgccaatgagctgtatgcaattaatcatcactgttacaacgccatggaaataaatgaactaaccgaaagaaacagtgactatatttataaactgtcagaattaattgatgaatatacccggcaactggaacaactgaaaaaaatgacgtcagtgcataccggcagcgaccatactgatgataccattgacgtactgaataaaaaaatcaatgatctccggtatactgtcagtgatgccgtcagatttgccattctgctgagcaagatcaatacgtatatgctgaacaccttatctgtcaccggattctgggtacaattaatggccctttacgaaccttactttaaacaaggtgcaccaacggatggtctgaatgacattattcagcatcagctcgattattttcatgctttcggacattaa

SEQ ID NO: 280554 - DNA, 168 bp, Morganella morganii
atgtacgagtttttcagagacaactggtttctgcttatgctgctgatttgcccgctgatgcatttctttatgcacaaaggacacagttcacatagtcattgcgaccataatcagcataatgagaaaacaccggccccgcaggaagaaaaaaaacatatcgatgcataa

SEQ ID NO: 280555 - DNA, 240 bp, Morganella morganii
atgtcacatccagtaggtaagtatatctctaaatcacaagagcatgaattgaatcattggctttcaaaacaaggatttaaaaaaactgatgataaccgacattcattaaaaatactaatcgacgcggcgaaaatatgtaatgataaaaaagaaaatgaacacttagagcatgatgttctggatgattattttaatacaaccagagatatatggagctttgaaaaagctgaagaaaaatag

SEQ ID NO: 280556 - DNA, 477 bp, Morganella morganii
atgtctgcaaaagatgaatttttcaaaaaaatagaagataacactaaaaagaaacaagctagtgatgatgcttttaaaaaagatgtactggaatttcaaaaagagaccgaaacgctttttaatgaaattaaggggtggtttgatggctcgtcggtaatatctcagttttcatctgctcgctttgttgaagatggcgtgagtattgaaatgaaaacaatgaccttatcccatgataataaaacactaaagattattcctgaagggctttattactggggggtaaagggagctttacaggtatccatttataatccgaatagggcgccaggcacaactaaatttactctgcattggaaagatagcataagtaattatgatggctgggtcatggtttcagaaagttatggtaataattcacctgatcgtattggatttaatcaagaaagcttctttaggatgattgagtcatttgcttaa

SEQ ID NO: 280557 - DNA, 954 bp, Morganella morganii
atgccgcgccattttgatgacctgatgctgggaaccctggaactgttctgttgtgccgctgaacagaaaagttttaccggcgctgccaaagccatgaatatttcaccggcggcggtcagtaaaaccattttacggctggagcaaaaactcggcagtacgctgtttctccgttccacacgacatatccgcctgacagaagccggagagcaatatctcagttactgcaaaaccgctttacaggccatgtacacggctgaagaaacgttgctggatatgcgcaccatcccggccgggaaaatccgcgtcagcctgccgaatgactatgcttaccgcaaagtgtttccgctgatgccgaaattccgccaccgttacccgcagattgaggtcgatttccatctgcgcttccgtattctgagccaggaaaccaccgagtgtgatgtggttgtcaccagctggattgaccggctgccggactgggttgccaccaaaatagattatgcccggttctggatcctggcctcaccggactatctgaaacatgcgccgccgctgaacatcccggatgatctggtgcatcataattgtctccagatgcatctgccggaacatacccgcccgctgccgtggccgctggtgatcaatgataaggttgtgcatgttgaaaccaccggcgacatggctttttttgaggatgtgatggcggcttattatatggcggttgacggtaacggcccggcaatgatgcacgattttattgcccgtaaggcggtggagagcggaaaactggtacgggtgctggaagattacgccaatgtctcacacatctattacctggcctgtccggcggatgcccgccattcaccacgtatccgtgcttttatggattttctgactgaagaactgaaaccggaaggggattttccggatcactgggtgatagccccggtacgctga

SEQ ID NO: 280558 - DNA, 219 bp, Morganella morganii
atgaatatagccaaagtttcttttattatttcgatggtcagtctggtactgatgcttgtcaccttcaatatcaatccgacagttataaccggagttgccggggtaccgggaagtcatgtttttcttttcttcgctattttcattatttcactattaataagcatcctggctattattgtgagagccgtttcggacaaagtgaaagaaaaaaacaggtaa

SEQ ID NO: 280559 - DNA, 783 bp, Morganella morganii
atgaaaagattattatccgctttacttattatattttcactgaatgcttattcaaatgaaaatcaggattttgaagggatctgggcaatggtaccgcttaaaaacgggatcgccaatgttgtacagtataatactgacggaacatcttcgttgtattcgtttaattgtgcaaaaccggatgagaaagaaccggttgaaacatacacctacaccgtcgataaagaaaacaagactatcatactgacatccggcacttatcagaccagcctgaaaatagtcaaaataacgaaaagaacaatggcgctggaacagaaaattaatgacgatttcagcgtatcactgctgtatgcaaaagtctctgacatcgccccgctttgcggcctttataccggtgaagttaatccgccgccgaaaacagcctatcagcctgcggattttattccggatccggttattccgccacatccggaactcagccgctttgaaggaaagtggatgtacgataatgtcgttcagattgaagtgacaaaaaacagtgacggtaattttatgctgaaacttgacagtaatcagaactggaatcatctgtataatcaggttcactgggtgggtgatgaactgcattttaaattctatgcatattcggataaagaatcattatatgaacatccgtatcataaatcccggtctgatagtattctccgcctgacatcagacaccaccatgacacattcccacattatcggtaaagaacgctacgatacagaactgataaaacaataa

SEQ ID NO: 280560 - DNA, 354 bp, Morganella morganii
atgaagagatataaaatatcagtgacaagcgtgataatcctggccggtttttatttccgtgtgtggttgtatacaacaaccggcatgatactggttaaatggataaataataatctgcgggagccgccggtttccgctggtttctgggattcggtatatctggtcagtaaatttctgctggtcattctgctgctgatattgtcgggggatttgctccgtgtttaccgcaatatccggcgtaacccggtaataaccgtaccccggtcccgtttttatctgatagctgccgcactggcaggtggtgtggctatttttctgctgaccgtcagttattggtatccgttctccgtatag

SEQ ID NO: 280561 - DNA, 882 bp, Morganella morganii
atgctaaatcttaatgaactcttgaacacagcaccaagaacgccagcagtcactggcgagtgggcatcagtgtatctggaaccaatgattggttctggagagagacttacgattgtagttgctgcaaagtgtgcagataaattaattgatgtcagacctgctatacgacaagagattatagatattatgtatggccaacgtagtgaggcattttcctctatggttgacgtcatagcaacaagcctcaaactgcatttagaaaaaacaaggtcatttcacacttgggttcctcctgtaagtggagtgacattaggtaaggtaagaaaagctgcatctaaagatttggttggcattttaagacaggcaataacattatcatccagcctttcaagtctattggatgataagtccgagttgaattccaccaaaaaacaaaccagaacagaaaaagacaggtggacaacacaattacaacaggcagtaataaggtctgatgcaaggcgacaaggctactttaatgcaaaatatgattttaaaaacaagcgaatggcagcatccgtattttatttaagtgaacatgcggcaatcaataccggtaaacttcttccaagctcactcagtaatttggtcgcgcatagtaaggctaaaatagcggatttatctctgataagaagtcatccagacctgttacctagagaaactcatgagtttatagtgtttaaaccaagtgatgatgacccacgttatcaagacagtgaaatcgcaaaagtaaacagtgcattccttattcttcaggatctagccgaaaaggatgaaataacactgaccgctgtcacagatatccaagaaggtgcaatgcgcatactaagaacagcagcataa

SEQ ID NO: 280562 - DNA, 762 bp, Morganella morganii
gtgataagagttggcagactccatcctggtggtgaacgcataggtgaagggcagcacaatccaataaaaggggttgcatctttccaagcgggtgatgacatagaagaactagtcgtattcgcaaaagaattatcagatagagagatgtctattgaaataatttgtgcaacattaggtagaaaaattggattgccgataccagagccagttattctttttgataatgatgaaaaaatattttttggcagcattgatgcagaataccctagccttgcgcattacataaaagatacaaaagacccatccatcgaacttaagctatcgacatggggtggactaagccaagctgcattctttgacgaatggatcgccatggacgatagaaataacggcaacctgctgtttgatggcgagggtttcattcttatcgatcatgagtcagccataccttctggccttcagtctgaccagtccggaattgatttttacttcaaccaattacttgacatactcctatgcaacctagatagaaacaacgaaatcgaagttcaaaaattagctaacgatgccagggcatggtcacaacaaaattcagaagacccgactagttacactgataattttttagagaaaacaatcaacgagaaaaacagaaatcagttgatgtcttttttatcatcccgcatagaaattttgggaaccatgctttatcatcaaataaagccaaatcaaatgcagatgcaatacgatgctaaatcttaa

SEQ ID NO: 280563 - DNA, 1149 bp, Morganella morganii
atgaggcgcttcgcaggcgcatgtcgtttcgttttcaatcgtgctttggcgcttcagaatgagaatcatgaggccggtaataaatacatcccttacgggaaaatggcttcctggttggttgagtggaaaaatgccactgaaacgcaatggcttaaagattcgccctcacagccattgcaacagtcactgaaagaccttgagcgggcttacaaaaacttcttccagaatcgggctgcttttccccgattcaaaaagcggggacagaatgatgcattccgctacccgcagggcgttaagctcgatcaggaaaacagccgtatttttctgccgaaacttggctggatgcgctaccagaatagccgtcaggtcacgggtgttgtgaaaaatgtcactgtcagccagtcctgcggtaagtggtacatcagtattcagacagaaagtgaagtatcaactcaggttcacccttcagcatcaatggtcgggctggatgctggcgtggctaaactcgccacgctgtcagatggcacagtctttgagcctgtaaacagttttcagaaaaaccagaagaagctggcgagacttcagcgacagttaagccgcaaggtcaaattcagcaacaactggcagaagcagaaacgcaaaatacagcgactgcattcctgtatcgcaaatatccgcagggactaccttcacaaagtcacaacgaccgtcagcaaaaaccacgcaatgatagtcattgaggatttgaaggtcagcaacatgtcaaagtcagcagcgggtacggtcagccagccggggcgcaatgtccgagcaaaatcaggtttaaaccgttcgatactggatcagggctggtatgaaatgcgccgccagcttgagtacaagcagctctggagtggcggtcaggtgcttgctgttccgccagcgtacacaagccagcgttgcgcgtgctgtggtcatacagcgaaagaaaatcgcctgtcacaaagtaaattcagatgccaggtatgtggatatacagcgaacgccgatgtaaatggcgctcgtaacattttagcggcggggcacgccgttcttgcctgtggagagatggtgcagtcaggccgctcgttgaagcaggaacccaccgaaatgattcaggcgacagcctga

SEQ ID NO: 280564 - DNA, 636 bp, Morganella morganii
atgaggctatttattaacggatggaatgcggaggtgattgctaacgtccggtattcatcaggagaaatgaaatggaatacattgtgggggaatgctaatacgacagtggatggcaacggatttataaaacgctcatccccggttatccagatatatcctgacggtaactacgaaaccaacgacgaatccgaaggcgctgaagtccgccgtaccggcaccggccaatatcacattaccggcatccttggttataactcagatggcgcctggggcgtaaacggcggtatctcggtaccgaaagacaataacggccttgagctggtttatgtcgatgaccgcgtacaggaagacggcagcctgattattgaaacctgtcaccgtcagcatgcgcatttgccggaacgtttccagaactggcggctgaaagaagtcaccccggaaggtgagcgcatcttctaccaggacggtgagtcgtgtgacctgccggaatcaacccatctcgatgttcgtgtcgaaatgccacaaggctctatgtggaatgtgaagcagcgtgaactggctgaacagatggaacgtgaacaggcagaacgtgaggcacaggaggcaacagagcaggccggagacgtagaggaataa

SEQ ID NO: 280565 - DNA, 336 bp, Morganella morganii
atggaatccttacaactgtttaaaatattaagcgaccaaacacgattgaatatcatattactgcttaaagcatctggtgaattgtgtgtttgtgatatttacacagcactaaatttgtcacagccaaaaacatcaagacatctcgcaatgctcagagagtctggactacttctggactctaaacacgggaaatgggttcattacaggttatctccggcattgttaccatggattaaaaatatcatcgaggtgacatattccaccgagaaaaacagagtttcacagttactcgctgccataaacaacaaaaatacagcaggtaactgtcaggcataa

SEQ ID NO: 280566 - DNA, 366 bp, Morganella morganii
atgaagaagctggaagtgtttgatcctgccttatgttgcagtaccggcgtctgcggaacagatgtcgatcaggcgttagtggattttgccactgattttgattggctgaaaaaacagggtgccaatgtccgccgttttaatctgggacaagagccgatggaatttgtaaataacgcaaaagctaaagtatttctcgaaactgccggcgcagatgcactgccattactgcttcttgatggcgaggttgttctgacaggacgttacccgaaacggcatgagttagcccgttggtttggtattcgcatttctgatgaaaaatcagtcccgtcagccggttgctgcggaaacaataagacatgctgttga

SEQ ID NO: 280567 - DNA, 1752 bp, Morganella morganii
atgaaatttctggataacgtgcccgattacttattttttactggtaaaggtggtgtgggtaaaacatcaatttcatgcgcaactgcgattaaattggcagagagcgaaaaaaaagttcttttggtcagtaccgatccggcgtccaatgtcggacaggtattttcacaaactatcggcaatacgattacaccgatttccgccgtacctaatctgtccgctatcgagatagacccccaagccgctgcggaagaataccggaaaaaaatcatagacccgataaaagacagtttaccggcagccgtaattcagagtatcaccgagcaactatccggtgcctgtacaaccgaaattgctgcatttgatgaatttaccggcttactgacagatacaaaaatcacaaatcagtttgaccacattatttttgatacagctccgaccggccatactatccggttgttacagttaccgggtgcttggagtgatttcatcagtgataatccggacggtgcttcctgcctcggcccgatgtccggacttgaaaagcaacgtgaacaatatagcatggcagttgacgcactgagcaataaacaattaacccgcttaattctggttgcccgccctcagtcagccgcattgcgtgaagttgcccgtacttatgacgagctttcagcattaggtgtaaaaaatcagcagctgataattaatggtgtattcccggaatcagcgatgacagccggagacaaattatcgcaggcgctccgtaaccgtgaacagactgcaatacaaaatatgccggatatactccgcaacctaccgacagacatgttgatgctacgtgtccgaaatatggtcgggatcgaggcactaaaagaattattatctgacaaagaacaaacattgccggctattcacaatactaagcctgacctgtcattgcagccactattgtctcttgttgacgagattgcagtgcagaagcacggactggtgatgctgatgggtaaaggcggtgtcggtaaaaccacaattgccgcgtcaattgcagtaaaactcgcagaacagggcgctgatgttcatctgactacctcagacccggctgcacacctggaaaatacattaaacgggagcctgcctaatctgcaggtcagcaggattgaccctgttgcagaaaccgaacgctaccgcaactatgtactggagacaaaaggaaaatctctggatacggaaggccgggcattgcttgaggaagatttgcgttctccgtgtacagaggaaattgctgtattccaggcattctcacgcatcatccgtgaagccgggaatcgttttgttattatggatacagcaccaaccgggcatactctgcttctgctcgatgccaccggtgcctatcacaaagaaatcgcaaaaaaaatgggtgaaaaaggccatttcctgacacctatgatgcaactgcaggatccggaaagaaccaaggtcatcattacgaccctggcagaaacaaccccggtacttgaagccgaaaacttacagaatgatcttatgagagctggtattcatccgtgggcctgggtcatcaataacagcctttctgtcactgaaacaacatctccgttattactttccagagcagagcatgaaattccgcagatcaaaaaagtgacatcatcgctggcaaaacgagtagcaatcgtaccgctgcttgaaaacgagcctgttggtatcgtggcactgagccggttggctgattga

SEQ ID NO: 280568 - DNA, 1290 bp, Morganella morganii
atgcttgttgctgcattaatatttgttctgaccattacctttgttatctggcagcccaaagggctgagtataggctggagcgcgaccctgggtgcgttagctgcactcttatccggagtaattactgttcaggatatccctgttgtctgggatatcgtctggaatgcgacagggacttttgtcgccgttattatcatcagccttattctggatgagagtggtttttttgaatgggctgcactccacgtagcaaaatgggggggcggaaaagggaagctattattcagttatattatcttgctgggcgcgagtgtggccgccttatttgccaatgatggtgcagcactcatattaacacctatcgttattgcaatgttactggcactgggatttagtaaagggacaacattggcgtttgttatggccgcaggattcatcgccgatacagccagtttgccgctgatagtctcaaacctggtaaatattgtctctgctgatttctttaatatcggatttacagaatatgcttctgtcatggtgccggtagatattgttgctattattgcaacactttttatgctgcactggtttttccgcagggatattccaaaatactacgatacgtcaaagctggttattccggcatcggctatcaaagatctgaaaacatttaaggcgggatggtttgtcctgattttactgctcattggtttctttgttctcgaaccgctgggtattccggtcagtgctattgcggcagtgggtgcatctgttttatggcttgttgcgtcacatggcaaaataattaatacacggaaagtgttacgtggtgctccgtggcagattgttattttttcgctgggtatgtatcttgtcgtctatggtctgagaaatgccgggctcacaaattacctgtcagaaatacttaattacctcgctgacaagggaatatgggcagcaacactgggaacaggctatatcattgcttttttatcttctgttatgaataacatgccgaccgtccttgtcggggcattatcgattgatggtagcaatgcaaccggtcttattcaggaaaccatggtctatgccaatgttatcggtgcagatttaggtccgaaaattacgcctatcggaagccttgcaacattattatggcttcatgtcttatctcagaaaaatatgactatcacatgggggtattactttaaaacaggcattattatgactgttccggtcttaaccattactctaatcactttagtcataaggctttcgtatctcaattaa

SEQ ID NO: 280569 - DNA, 300 bp, Morganella morganii
ttgataaaactcattgcaaaaatgaagattacagtaagagatctgctgcgtaaaaatgttgaaccttacaaaaaactggaacttgataatggtcgattcacagatacacagcttatctatttcatgctgaagtatcctcttctgattaacagaccaatagttgttactccattgggtgtaaagctctgtcgtccatctgaattagtgttggatattttaccgagtaaattacagagtgaatttgtgaaagaggatggagaagtgattactatccgtacagtaaaaagtaaggtaacttaa

SEQ ID NO: 280570 - DNA, 156 bp, Morganella morganii
atgcgtgtaaacctgctggtggaactgttttttttcgggagagttcctatgatgtcaggttttaccgcaaggattattatcagcgcagtttcacgatcggtctgttgttctgccgccgcttctgtctctcagatgacacagcaggaggccgaatga

SEQ ID NO: 280571 - DNA, 141 bp, Morganella morganii
atgaaaattaaattatggtttaaaatcatgctgttatttgtgtatttgctgccaccaccggaaaacgggctgccgggattcattagtaatattcaggggattttattatccgccggtattttatcttgccggagggaataa

SEQ ID NO: 280572 - DNA, 765 bp, Morganella morganii
gtggatctgaagcggtttatgtcggatgtggattttgcatttgatcatgatttttttgagaaggttatttatatcaatcttacatcacggccggatcgcaaattcgatattctggaagcactggcaaatattgaaattccgcaccataaaattgtctgttttgaggcgatcgcgaaaacaccgggatttctgggatgtgcgctttctcatgctgctgtgatgaaaatgatcatggaaaatggctgggggccggtactggttgtcgaggatgataataatttttatcatgatgatgagcatatccggcaggcgaatgtttttttatcggctttgcgggaaagagactgggatgtcgcgttactgggcggaaattattattatgcctatgagcatgaaccggaaatatattctctcagtcttaaatatgcatattgtgccaatgcttatattgtgaaccggggttatgcggaaaaaatgatgcatgtttttgagaaatcagttcatctgattacggcaaacggtgaaccggatgaatcgaaaagtatcgatgttatctggcatgacctgatggaaaaagataactggttcggtttgtatccgtgcattgcgtatcaggcaaaaggattttctgatatccgcggtgcgtcaatgaattatgaatctctgtttaataagccgttatccggcctgacattttttacccgtgacggcaaagtgaaagaagcggaaacagaaacatccgccggggcggatgtttcacaatag

SEQ ID NO: 280573 - DNA, 360 bp, Morganella morganii
atggacacactgcaacaggtattacaccggtcattacagaccgttcagaccgcgaatttcccgtcactggtacaaagcggacaattactcaattttataccatcacaaattccgcaattgcaggatgacctgcagtgcctgtacggcaatccgctgccgcgttttcctgaacctcaggatatcagcggcaagctggcggcggtacaacgtctgcaccggcaaattccggctcagaacgggattttatggcagcatttccggcaaaatgccgcagaactgaccgccgcagatgatgccgcactgaccgatgtattactccgctggctgttcacccgcctctctgccgcagaccatacctga

SEQ ID NO: 280574 - DNA, 1119 bp, Morganella morganii
atgatgaaaagatctgtgaaatccgtttttatcccggcagtcatggccgctgccctgatcgcgccgcacaccgctgatgcctgtacccggtttgtgtatcacggtgaaaatgatctgcatatgaccgcacggtcaatggactggtcaaaacccgccgggactaatctgtggattttcccccgcggtatgcacagggaaagtgttcccggtgagcggggcgtcacctggacatcccgctacggcagtgtgatcgcgacggcttatgacattgccacgatagacggcatgaatgaaaaaggattatccgtcaatcagctctggctggatgaaacaatctaccctgaagacaaccggcaacacaaactcatgccggtctctgtctgggctcagtatgttctggataattttgccacggtaaaagaagcggttgaggaattaaaaaaagaaaccttcgtcattgttactgaccaggaaccgggcagagaccggctggtatcactgcatttatctgtttctgatagccgtggtgacagtgcagttattgagtatactgacgggaaattagtgatttatcagaatgatggtaccgatgtgatgaccaattccccggtattcagtgaccagcttgctctcggccgctactgggaaaccgcagacggactgaaagtactgcccggctcacgccgttcggaagaccggtttgtcagggcaacattttacagcagtcgtattccggaaaatctgagctctgatgaggcacttgctgccgttctcagtgttatccgctatacatccactccttaccgctcagcacaaacccggaatgcggttgtcagcggtgaggttgatcctctctcttccacccgctggcgcacagtggcaaatcaccggagcaagcgctacttctttgatgccgtgatggctcccgcagtgatttgggtggatctcagtgagatcgacttctcagcacagaccggtacggtcaggaaactggcgctgggaaataaccagcagcatcgctttaccgggaatgtgacagagtatttccgggcatccgaaccgttcagattcgccatccccggcgatgaaacagagccgcattattcaggcggcgaataa

SEQ ID NO: 280575 - DNA, 834 bp, Morganella morganii
atgggaccaacacagggaatacaggaatatcaggcgattcagaccctgaataatgatatttacgactcggcaggcagtaacagttcatcatcgtatatcagctcatccggaattaaatccattttattaaatgcatggaatgcggtgaaatccgccgtttccggtatgttatcatcattcggttcgcatctcagcggacagcagggtagtgataagccgggcagagatatcaccatggatatgtcttcacggccggcaatgccattaccgggtattgatgagcagtttgacaatatgttttatggaagcagtggcgggaatgtttatgctgccgtatcagagcgtccggagaatttttacgcttccgttgatgatggtgcttttgttcgtgagcctgtggcatctccggtctccggcgcacagcgctcgtcattaacagaattgatttacagtgaaattgaagaaccgcagtatgaggaaattggtgaaggcacggcacagactccgccgccggtgaatctttcaatccccccgttattatccgaatcgctttacagtgaaattgaagaaccgttgtatgcggaaattggtgagggtcaggatcagactccgccgccggtaaatctttcgacccatccgtcattatcgcggttacccggctctggtgacggtatttacgcagagccgcgtgacagcctgaaagctgacggcagagcagaacaggaaggtatggatccggaatatgcatcattacatgaaaatatctattctgagccgtataagcccggagatacgatcagtacaccggagaatgatccgcgggggagacagtga

SEQ ID NO: 280576 - DNA, 1152 bp, Morganella morganii
atgaacttaatcagcatcacatcgaaacaacaaaaaataacacccgaagaaaaacatctgaacagaatgtcaaaacttcccttcatgaataccttactggaaagagtatcacatataaaaaacacagacatcgagtttgaagggaaatacattaaaatcactgccgatatagggaaactaagcacggatttattatcttatcagtacaaaacagaattaaatggtctgaaaagagaaaataactcaacaaaggaaacaggaaaaaatacccggaacgaattaaataaaagagtagaaaaatggtattccgaagaaagaataacaacacctgcagctatcattttccgggaaattgataagatatgtgcagagaaaaaaataacattatccggtacagaaaaagaagaaatactggacatcgtaaataaaaaccatatcaatataaaagagttagaaaagaaagcatcggtcagctcaatgctcagtcctttaaaatcagacaaagatctggaaagaaaaataaacgtgccgaaaataaagaaaaatctgattacggatatgaagaaagaagtacctgaacaattcagaacgctggtcgatacgtttcataaaaatgatgctgcaccacaaaaagaggaattactgacacctgtggaaagtctcatttttaatgatattccgttagtcagggaaatagccggtaaaatggcatcagatgtatatggtggtctgattgaaaaaatttacaatatattatttcgcaatacagaaacagaaaagcatctggattttgacgcaataaaggcggaagcaagaacgcaggctgaaaatatcataaaagataaaaaaataccgcaaagaaaggaaataagtgttgaggatactgtccgccaaaaatttgaatccaaagtaaatgtaactaccccatcccgggaaaatgatcttgaagctctctttgatatactgaatgaaaaccagtcaaaaagtaacattctcgggcagcgtgccacacttagtcacagcgtactatccacctcttcaaataagatacaaaatcaggatattgatagtattatggatatcctcagcagtcccgcctttacagacagaaacgacgatcaacgatcatcgttaggaaataaaaaagcctaa

SEQ ID NO: 280577 - DNA, 156 bp, Morganella morganii
atgaatgataaatgggaattttacaaggatgaagctggcaagtggcgctggcgaagaactgcacctaatggcaacatcacaggtgcatcgacacaaggttatgtaaataaatctgattgtattgagaatgcccgcaggaatggattcaaaggttaa

SEQ ID NO: 280578 - DNA, 1272 bp, Morganella morganii
atggcacttactgacgctaagattcgggctgcaaaaccacaagaaaaaccctataaacttgctgattccggcaacatgtttttacttgttcatcccaacggctcacgttactggcgactccgttaccgctttcagggaaaagaaaaaacattggctctgggaatttatcctgaattatccctttctgacgcacgtgataaaagagacagcgcacgtaagcaaattgctgagggtatcgacccttgtgaacagaaacggataaagaaagctttaccagatgcttcacaaagctttgaagccattgccggactttggcataaaagcaacaaaacctggtcagaatcccacagggaaaaaacctggaaaagccttcagacccatgttttcccttatattggttcacaggatattacatcactgaaaacacctgatttactcattccggttaaagctgctgaagcaaaagagatttatgaagtagcagcccgccttcagcaaagaatctcagctatcatgcgatatgccgcacagtccgggatcattgattataatcccgctaccgatatggcgggggcgctggccacggttaaacggcagcacagacctgcattgccactgaatcggatatctgagttgctggaacgtcttgatacttaccggggacaaatcatgaccagactggcaacacagctttctttgctgatatttatccgctccagtgaatttcgctttgcccgctggccagagataaattttgagaaagctatgtggactatccctccggaacgaaaaccgattgaaggtgtaaaattctctcatcgtggctcaaaaatgcgtacagagcacctggtaccactttcaactcaggcactggatatcctgcgggtgattcacactatcagcggtgagcatgaattaattttcacgggtgatcacaatccctggaaaccaatgagtgaaaatacggtaaataatgcattacgacttatgggatacgatacgaaagttgatgtttgtggtcacggtttcagggctatggcctgcagttcattgatcgaatcaggattatggtcaagagatgcggtagaacgccagatgagtcaccaggaacgtaatggcgtacgtgcagcttatattcacaaagcggagtttcttgaagaacgcagactgatgctgcaatggtgggctgatttcctggatgctaacagagagcaaaccatttccccttttgattatgcaaaagtaaataacccaatggatatcaataaatag

SEQ ID NO: 280579 - DNA, 4278 bp, Morganella morganii
atgaataaaatctatcgggttatatggagtttcgctgtaatggcgtggatcgctatttctgagctgggacatggtagaactaaatcctcatcttctaaaacaataaaacgtcttcggacatactgctgtggcaccctttcatctgtgctgttggttttttccggaaatgcctctgcattagatgttaataattatttaaattttccatcctcaacagatataaccgatggtttaacgtggacgaatacggcaactgtacaagttgataatgggattaatgttacaatctcaggtggtaatccaaccatagatatggcgccttcaaacggcggaaatacatctttatggataaatggaggaagcctgacagctacagaaaacagcacgttactcatgggtaacaatagcatgttacaggtcggcggttctaaactggggggactgacatctgaacaatcatcaggtactgcaggcattctttccgtcgggaatatacagacgactgccggagcaaaaaatgcaactatctggatgtttggttcatcttcttcaacggccaagctgaatgcttcagacatcaatttaacagcagataaaaataatatatggctggctaatcccagtgattcagagttaggtgctgatgttaatgtttccgggaatatgaccgtagtgaataccagtggtggtacatttatgatgattggtaattcttcattaaaggtcggcggagatttatatcttgatacaacgaacggttcatttttagctactaataataatacatcagaggggatattcgttggtggtgatttaacacttacaaataacgttaagttatccaatataaatagcgttagcactgaggcaggtatttactctacagctgtaaatgtcattggtgatatcaatgtaacgggtaaaaatatcggtaataccggacttcagattattaacgcgagtaagacaggtataacaacgaatagtaattttaacatatcatcattagttagtggtaatacgacagatgtaatttttggtcattctgcgaaaataaccacaggtgataacattaatcttagtagtgtacagggtggaaaagtaaatctttatatcggagactcccgttatggtgcacctaccgatattatagccaataatataattatgagcggggatggtgataataaagttatttttaataacaataaaccaattcaccccggcgataatggttatttatttaatgtatcaattaatggtaatggttctgttgaacaacaatccgggcatacaaccctgagtgcagcctctaattacagtggcggtacggtaatcaatggcggattgctttcaatagctaacaataaagctttaggtaatgagattgtctctattaatactgaccaaaatgataactcttccggactggatattgcctatactgatggttcttctttcaaaaatatattatctggtaatggtaatacaacggtttccggaaatgcacaaataaccggagccaataactcatattctggtaactggaatataatcggtaaagcattaactgataatactgtatcctctactctgaacaactttggttcaggtaacatcaatgttgaaaatggtggttacctggtcgctggttcaactggtgaatttagtttcgataataaactttccggcaccgggaatattgttacagataataatggtaatgagcttaagttcagtgctgctgcaggaactgattttgcaggtaatgttattctcagtaataacttgtttgcattagaaggtactaatacctcagccctgacaaaggcaattctccacgttggtaataacaattccacatttgtcggtacaggaacacaaaacattggtggactggcttttaatggtggcacacttatattcggcgacgttactcccggagatataaccagtgataattttattgaaacaacacgggaactgaaccttacagggagcggacagattcaaatcacagacggtggcgattttgagaataccctgcaacacccagatactactttgccattactccagcaggatgatatggggggcatggttcagttagctgatagcaagggtacagtaacgggggctggcggaaatctgagtttgattgaccaaaacggtaatgttatttcacaagcggtgacttctaatatcgttcagaatggtgaaaaagtcgctaatggtaagtacgattaccggctgaccagcggtgaaaataatgatggcctttacatcaattacggattaacgcaggttgaattactggcacagggtgcaaacgcactgacactcagtgcggaaggaaacagcggtaatgcggctgatctgagtgctcagattaccggcagtggcgacctgcgcattaacaccgatacaccgctgtcactgtccaacagcgccaacagctataccggtacgacctggcttgatgccggtacactgaaaatgggtaacaacaatgtactgggaaatactcacctgctgaccctggctcagaacacacaactggatatgaatggctttgcccagacactgcagaacctgagctcagcggagggcagcctgattgactttaaccagggtgcgctgaccgtgaacaacggtacggtggccggtaatctgaccggtgccggcagcctgaaggtgaccggcggaagcctcagcatcagcagtgataataccggcatgacagcagataccaccattgatgaagacggcagtgtatatatgcaggcgactcatgcactgggaagcggcagtgtcagtaacagcggcaacctggttatcggtactgactccgcagataataaccgccccctgccaaccggttatcaggttggctctctgactaacagcggtactgtcgcagtcacccacctggctgccggaacgcagtttcaggtaaacggaaactataccggtcaggatggcctgattcagttcgataccgttctggaaggcgataattccctgacagataaaatgaccgttaccggagacacatccgggcagacatttgtcagtgtgaataatatcggcgggcatggcgatcagactatcaacgggattgagctgatcagtatttccggggattcagccggtgagtttattaaacagggccgtattgttgcaggaacctatgattactcgctggtcagaggaacaggcagccgggccggtaactggtacctgacatctgaaaatacagacgttgatcccggcaccgatcctgacgcggacaaaaataatcgcccggaaggcggaagctataccgctaacctggcggcagccaataccatgtttaatacccgtctgcatgaccgtctgggtgaaacccagtataccgatgcgctcaccggtgaagaaaaagtgaccggcatgtggatgcgtcaggtcggcggacataacaactggcgcgataacagcgggcagctgaaaacacagagcaaccgctacgttatacaaataggcggggatattgcccgctggagtactgacggactggatcgctggcacctggggataatggccggctacggccatgacagcagccgcacccgttcgtccgccaccggttacagttcaaaaggttcagtcaatggttacagtgccggcacttatgccacctggtatgcgaatgatactgaccacagcggcttatacgcggacacctggttacaatacagctggtttaacaatgacgttaacggggaaggcctggcttccgaatcataccgttcccgtggtctgaccgcctctgctgagaccggttatactcagaagctaacggagttcaccggcagtaaaggttcccgtaatgaatggtttattcagcctcaggcgcagatcacgctgatggatgtcagggcggatgatcaccgggaaaataacggcacccgtgttgagggtaaaggcaacggaaatattcagacccgtctcgggatacgtacttaccttaaggggcacacccgtgaggatgacggaaaagacagagagttccagccgtttatcgaagccaactgggtccataacacccgtaatttttccgccggaatggacggtgtgagcctgtctcagaaaggaacaaagaacctgggggaagtaaaaattggcgtggaaggacaaatcaacccgcacctgaatttatggggaaatgtgggtgttcaggttggtgataatggctataacgacagtgccgccatgcttggcatcagatataacttctga

SEQ ID NO: 280580 - DNA, 3780 bp, Morganella morganii
ttgaaactcagatactcaaagctggctctgctcattataggaacttattcctttcagagtattggtgcaactataattaatggcggaagttctcagtcaataaactcagcattcactgacccaaacattactgtaggtaaagataccggcggcacactgaatatagataccggaggtattgtatcaactgaacacctgggtatagggctaagtggctcagagggtactgttaatattgttaatggcggacagctaaacatagaaggtaaaagctactcttatccgctggatatcggaggttcaactgatggctccggcacaacaccggggggaaccgggattttaactatttcgggtaatggcagtacagtaaattttagttcagctgtaaacagttctgttaacgtcggtaaaaatggcggaaatggtattgtttccgtcacagatggtgggaaatttattattaattcatctgacgggatgtggattggttccagggcagacaaaggtaatgttgccacgcaaagtggttatgtcagcattgacggtaccggcagtgaattaatctccagcggacgtattatcgtcggaacttattcacggggcactctttccgtgactaacggaggatatgttcacaccggtgatcgtttaaatgtcgggaatcagccagaaaccaatgcatttgataatttactttttattgacggagcaggctccgaagtatctgcagaaaagtcagttcaggttggcctgcaaggtaaaggaaccgctgttgtcagcaatggcggcacactccgtaccgacactatctttgttgcaaatggtgcaggtagtaacggtgaactggctgtcggtgcccgggaaggagattcctctgctgccgcaggcaatattgatgcttcagtcattacttttggtaaaggtaatggccggatcacattaaaccatactgactctgatttcctgttatcctctgatatcacaggcaccggtgtaattaacgcattcaatggcacaacccggcttgccggaaataatgcggcatactcgggtgatatcaatatcagcagtccggcgacgattattgtcagtcatcagaataatctgggtgacaataatattatcaatgacggtgaacttcgtatacaaagtgacactgactgggtttttactaatcccctttcaggttctggtatgctgacagcagacaccggaaataatcacttttcgtttaattccccggcacccggaacaatgttttccggaacggtaaatttactgaatacgttgtttgacctcagtgatattaataccagcgccctggcacaatctgtattattactggggcagggaagccataccaccgtcggtacaggggagcagcggattggcagcctggcctttaacggcggcactctgatttttggtaatatcaatcccggtgatgcggcaagcagggaatggataacgaccagcgatagtctggacctgaccggaaccggtcaaattcagatttcaagctccggtgtctttaataacccacctccggttccggcagcatctgttccgctcctgcagcaggatgacgggggcgttatgattcaactggcaaatagtcagggcagtgtaagcggcaatgccggaaacctgacgttagttgatcaaaataataatgtaatctcagacgatacccgtgtttctgttgttcagaacggtgaagtcgttgcaaacggcatttatgattaccggctgaccagcggtgaaaataatgatggcctttacatcaattacggattaacgcaggttgaattactgggacagggtgcaaacgcactgacactcagtgcggaaggaaacagcggcaatgcggctgatctgagtgctcagattaccggcagtggcgacctgcgcattaacaccgatacaccgctgtcactgtccaacagcgccaacagctataccggtacgacctggcttgatgccggtacactgaaaatgggtaacaacaatgtactgggaaatactcacctgctgaccctggctcagaacacacaactggatatgaatggctttgcccagacactgcagaacctgagctcagcggagggcagcctgattgactttaaccagggtgcgctgaccgtgaacaacggtacggtggccggtaatctgaccggtgccggcagcctgaaggtgaccggcggaagcctcagcatcagcagtgataataccggcatgacagcagataccaccattgatgaagacggcagtgtatatatgcaggcgactcatgcactgggaagcggcagtgtcagtaacagcggcaacctggttatcggtactgactccgcagataataaccgccccctgccaactggttatcaggttggctctctgactaacagcggtactgtcgcagtcacccacctggctgccggaacgcagtttcaggtaaacggaaactataccggtcaggatggcctgattcagttcgataccgttctggaaggcgataattccctgacagataaaatgaccgttaccggagacacatccgggcagacatttgtcagtgtgaataatatcggcgggcatggcgatcagactatcaacgggattgagctgatcagtatttccggggattcagccggtgagtttattaaacagggccgtattgttgcaggaacctatgattactcgctggtcagaggaacaggcagccgggccggtaactggtacctgacatctgaaaatacagacgttgatcccggcaccgatcctgacgcggacaaaaataatcgcccggaaggcggaagctataccgctaacctggcggcagccaataccatgtttaatacccgtctgcatgaccgtctgggtgaaacccagtataccgatgcgctcaccggtgaagaaaaagtgaccggcatgtggatgcgtcaggtcggcggacataacaactggcgcgataacagcgggcagctgaaaacacagagcaaccgctacgttatacaaataggcggggatattgcccgctggagtactgacggactggatcgctggcacctggggataatggccggctacggccatgacagcagccgcacccgttcgtccgccaccggttacagttcaaaaggttcagtcaatggttacagtgccggcacttatgccacctggtatgcgaatgatactgaccacagcggcttatacgcggacacctggttacaatacagctggtttaacaatgacgttaacggggaaggcctggcttccgaatcataccgttcccgtggtctgaccgcctctgctgagaccggttatactcagaagctaacggagttcaccggcagtaaaggttcccgtaatgaatggtttattcagcctcaggcgcagatcacgctgatggatgtcagggcggatgatcaccgggaaaataacggcacccgtgttgagggtaaaggcaacggaaatattcagacccgtctcgggatacgtacttaccttaaggggcacacccgtgaggatgacggaaaagacagaaagttccagccgtttatcgaagccaactgggtccataacacccgtaatttttccgccggaatggacggtgtgagcctgtctcagaaaggaacaaagaacctgggagaagtgaaagttggcgtggaaggacaaatcaatccgcatctgaatttatggggaaatgtgggtgttcagatgggtgataatggctataacgacagtgccgccatgcttggcatcagatataacttctga

SEQ ID NO: 280581 - DNA, 678 bp, Morganella morganii
atggcgacccagagaggctatcagatggggcgatggcttgccggccgtctcatgaaagagctggggctggtcagttgccagcagccgactcatcggtataagcgtggcggttatgagcacgttgccatcccgaatcatcttgagcgacagttcgctgtaacggaaccaaaccaggtgtggtgtagtgatgtgacctatatctggatgggtaaacgctgggcatacctcgccgttgttctcgacctgttcgcaagaaaaccagtgggctgggcaatgtcgttctcgccagacagcagactcaccatgaaagcgctggaaatggtatgggaaacgcgtggtaagcccgtcggagtgatgttccacagcgatcaaggcagtcattatacgagcaggtcgttccggcagttactgtggcaataccggatcaagcagagtatgagtcgacgtggaaactgctgggataacagcccaatggagcgcttcttcaggagtctgaagaacgaatgggttccggtgacgggctatgtaagcttcagcgatacagcccacgcaataacagactatatcgttggatattacagcgtactaagaccgcacgaatataatggtgggttgccaccaaacgaatcggaaaaccgatactggaaaaactctaacgcggtggccagttttagttga

SEQ ID NO: 280582 - DNA, 135 bp, Morganella morganii
atgaaaagaagaaattttagttctgaattcaaacgcgaatccgctcagctggttgtcgaccaaaattacaccgtctctgacgctgttaaggcaatggatgttggtcttttcacgatgacgaaatgggtcaaataa

SEQ ID NO: 280583 - DNA, 177 bp, Morganella morganii
atgatcacgtttgagatgcatatggaaattaaaatcctgcacaatcagggaatgagcaacctggcgatcgtcagaaaacagggaacttcccgcaatacggtaaggctctatctgcgtgcccagtgtgagccggtgaaatatacgccacgtcccgcagcggttgaagtggtcaactga

SEQ ID NO: 280584 - DNA, 672 bp, Morganella morganii
atgcatacgtcagattcacgccatgaccggcttgcattccggctggccatgattatcagccgcctgttccgcggcgaaacactgtatccggcacagctcgcccgtgagtttaatgtctcggcccgcacactgcagcgtgatttcagtgagcgcctggtctttctggacacggagccgtatctgggcggataccggctggccgccggtcagcgcccttaccggacagacagcgatatcctgtactttgccgatatcacccatatcaccccgctgttcccctcgcttgaccgcaggctgctatccgttctgctcagtccggaaaacggtgccccctgtctggtctaccatgagccaccgcaatccgccccgacgctgttcggcggcttttatgtggtgacgcaggcgattgtccgcaggcgactgctcagcttccgctgtgacggtcaggaacatgagggcatggctccctacaagctgatttattttcagcgggactggtatctgtgcggggaatggcagtctgccctgcgggtgttccggttcagtcagctgcagaacattgccgtgtccggacgccgtttccggcaggacacggttattgcacggacggttacccggcccgaatttatcaccgcactaccccattatcagtttatccgttcattaccttaa

SEQ ID NO: 280585 - DNA, 324 bp, Morganella morganii
atgtcatatatagcaaccagtaccggaaaacatattgatttcgtcaatatcactccggatcagatttgtatcgaagatatcgcgcgcggcctgtcaaacgaatgccgttttgccgggcaactggagagtttctattccgtggctcagcactctgtatacgtcagccagattgtgctgccggaatacgcactggaagcgctgctgcacgatgccgctgaaagccatactgccggattacaaagtcgtggaaaaacgtatagaggcggttatctgcgagaagttcggcctgccgcaggcatatcaccagtttatggcgcggtttga

SEQ ID NO: 280586 - DNA, 291 bp, Morganella morganii
atgcctgattctggtcagtattttattgcagtgctactgagttttgtgaatatcatatatttcagaaagataatactaaaacaaaaaacaataaatagagttattatatctgtaattgtatcaacgctatttgttacattgtttcctcttttaaagacaagtgtattaaaagagatgtattttaatttttcattttacacagatattaattattctatctcggttattacagggagtgttattaatctgatctcactatgggtatccgattctgtaaaaaggattaaataa

SEQ ID NO: 280587 - DNA, 750 bp, Morganella morganii
atggaaatagatactctaagcgataaagaaaaagccgaggctctcatatatatacttatagcccgagctacaggaggtaattactctgttcctgactataaaatctttagagattttttaataaattcagataattactcaccattacttccctcatttgttagaacatgtcgtgaccctgatcaattttggagttttattaagccaagattcaatacttacgatgacagacgtaattatatctggcaggaatttgaaccgcttctaagttatatagaaggaaaaggaaaatctgccgcagatactaccatcaccgaaggcctactcagttatgatgaagttggagtgaatgcagcgtgggccaaggctcttgaaagaaggcaaaccgatcccgatggtgcaatcactgcttccagaacactaatcgagactgtgtgtaaacatattcttgatgaacaaaaagtagaatataatcgaaaccttgatttacaagatctgtacaaactcgttgctacagaattaaaaatatcagccaaccagcacgatgaaattgtatataagcaaatcttgaaaggatgttcctctgtcgtaaatggattaggaacactgcgtaatcgacttggcgattcacatgggcagggaaaacgaggggttaagccatccccacgtcatgccgcacttgctgttaatatggctggaactatgtcgttgtttttaatagagacatggctacacaagtataaacagtag

SEQ ID NO: 280588 - DNA, 303 bp, Morganella morganii
atgcaaaaaatacatgaagcagtacttaaacactttaattcgttaaacacatcagtttcggctccgaactcaattgatgaatgcgatattaaagatacgctgaaatttctcaaaaaagaagaatgtccactttcacctgaggaccttactgcatgggcatcatctaataactgggatagtaagtttactaaaaaagttaatgaatggctggtaaaaataaactctggtgggcgagttgttataaaacataaagggtatggattaagtgaacaatttaaaaaagaattgctttcactaaaatga

SEQ ID NO: 280589 - DNA, 351 bp, Morganella morganii
gtgaacgcaaaaccgcagttatggccaacgggtgagcaattcacccgtgaggtaattattcagacaaacactgacccggtagcggtgatgatcacctacaccgtgccaccttttgaggcagttgtcgaagcctggcagaatacggacccggcaaaaagctacccgcagttacgacagtttattatcggctgggatttacaggaaacactgacagatgatgtgcttatttcgtttcttgtcacgtacagcgggacatacaaagcaattctggatggctggagtgagcatatgaaagatacgctgaccattaatcagtctctgttttcagatacgctccgatctgttaactga

SEQ ID NO: 280590 - DNA, 624 bp, Morganella morganii
atgacaactgcaattgataacgatccgctggtgataatccgcctgggcggtgttctgggaaaaacattcggtacggttcataaacgctgcgtggggtccacacgggaggcaatcaaagccctgtgtgtgactgtgcccggttttgagcaattcctgaatagcagccgtcagcggggcctgacgtatgccgtatttcaggggaaaaagaatctgagtaaagaagaactggaactggcgcagggaacggatgaaatccggattgtcccggtgattatcggcagtaaacgcggcgggatgctccagactatttttggtgccgtactggttgctgtgggggcattcggtgcttttacgccgtggggagcagctttaggtggcagtacatggggtacatatgccatgcagttgggcggggcaatgatggcgggcggtgttattcagttactgtccccgcaggccgcagggttagccatgaaagaccagggtgagaataagccctcgtatgcattcggtgcgccgacgaacaccgtttcccagggctatccggtcccaatcggttacggaaaacgccgtattggtggcgctattatttcagccggtatctacgttgaggatgcaatgtga

SEQ ID NO: 280591 - DNA, 1662 bp, Morganella morganii
atgaatgcctgggaacagtacgctgaggatgtcagaaacggcagaattaccgcctgtaaccggctgaaacaggccgttgaacggtactattctgacctgaataacccgctttacacgtttgatacggcgattgtgacgcgttttatcgggttctcccgtgtctgtccgcatgttaaagggcatctgcggggtaagccgatagagcttgagccgtggcagcagttcgcgtttgccaacctgctgggatttaaggtacgggcgaccggccgccggaaataccgcagtgcctatattcaggttccccggaaaaatgccaaatcaacggtggccgcaatactggcagactggtttctggtgatggaggacgggcagcaggatatttataccgccgccgtcagccgggatcaggcccgtattgtgtttgatgatgcccggcagatgtgtctgctggcaaaaccgctgaaaaagcgggtacagatacagcagcataaagtcattaatccgaagcgcaacagcttgttaaagccgctggcggcaaaagcggccactatcgaggggactaacccgagcctggcgatcgtcgatgagtatcatctgcacccggataatgcggtttactctgcccttgagctgggaatgggcgcacgtcctgagggcattctgtttgctatcaccaccgccggcagtaacgttatttcagcctgcaaacagcattatgattactgttgtcagatcctctccggtgaggagcagaacgattctctgtttgccctgatttatgaactggatgatgaaaaagaaattgatgaagaacggctctggataaaagccaatccgaacctgaatgtgtcagtggacggtgatgccctgtatgacacgatacaaaaagcccgcggcattccctcgcagtggactgaaatgttaaccaaacgcttcaatatctggtgtcagggggaaacgccgtggatgggggaaggtgcgtgggctgcctgtgcgctggactatgaggaaacagatctgcgcggcatggagtgttacgccggtatggatttatcatcaactggtgatataaccagtgtttgttatactttcccggtggaaaatgaactctggttactgacccggcactatatcccggaaacactgctgcagaatccggccaataagaaccgggcgatttaccggcagtgggtaaaacagggctggctcaggacaacgccaggtgactgtatcgactatgaccgtatccgtgatgatattttacgggacagccagcagttcagtatccggttaaccggatttgatacctggaacgcgacccacctccggacacaattacagggggcggggctggatgtggagccatttccgcaaacctatatgaaattcagcccggtatccaaatcagccgaggtgtttgttaaccgcagaatcatccggcacaacggggatccggtgctgacctgggccatgtccaatgtggtgatggagacggacgcgaacgccaatatcaaaccgaacaaaaagaagtctgccaacaaaatcgacccggccattgcttttctgatgagtttcgggacatggcagattgaacatgaggactttgctttcagcctgaccggtgaacagcagcagcgccttgatgcatttaacggcatttaa

SEQ ID NO: 280592 - DNA, 354 bp, Morganella morganii
atggcaagaccacccaaacccccggcttacctgaatccgatagccacggagcagtggaaagccaaagcccggattttaaaggaccgggacgacctgaccccggcagactggaacaatctggaactgtactgcgtcaactatgccatgtaccgcaaagccgttgaggatctggataatcgcgggttcagcattatcaacagtcagggcagtgaaagccgcaacccgtcactgagtgcgaaagcggacgcagaaaaaatcatgatcaaaatgtcttcgctgctgggatttgatccggtatcccgccgtaaaaacccggtggaaacagacgaagaagatgacctggaccgcttatga

SEQ ID NO: 280593 - DNA, 447 bp, Morganella morganii
atggcaatgcaaccgctcaggcgctgtacttatccgggctgccgccagcgtgtgaagtcaggccggtgtgatgaacataagcgggaagccagacgacagcaggacagcagacgcggaacccgtaccgaacgcggctacagtaaccggtggggcagataccgcctgatgtatttaaaagcgaatccgttatgtgtgaattgtttcaaatctgatatctacactcccgccactattgtcgatcacattatcccgatagacggtgagcaggatgtgctgttctggcctgaatggaatcaccagccgttatgtcacacctgccataacattaagacatttaatcacgacccgctcactaagcagaagcgcaggaacggagcataccgtgaggaggaagtaaaagcctcacaccgtactgactggactcatgagtataactgcaatgcataa

SEQ ID NO: 280594 - DNA, 297 bp, Morganella morganii
gtgactaaacctgaaatcagcctggaagatatcagacggcactgccgtattgacgatgactttgaggatccgctgttacaggtatatgcggatgccgcgctggaggtctgtcagcagcatatcggcagacggtttgaggatggtctggcatttaccccggcggttaaagtcggctgcctgatgtatatcagcctgctgtatgaaaaccgggagatggtgggaagcgacggactgaaagaggttccgctggctgtcaattctctctggtctgtctaccgggatccgggagtgtattaa

SEQ ID NO: 280595 - DNA, 339 bp, Morganella morganii
atgaaaacagggcggttaaggcaccacatcactatccagaaatcagagcggagtcagactccgtcaggttcagttattacgcagtgggtggatgtggccaccgtttccgccgaagtccgtccggtcagcggacgggaactgattgcgtcaggaatgcaggtcagtgaacagacaatctgtatctggctgcgttaccggtctgatatcacaacctcacaccggattgtgtatgacggactgaatgccgcaggtaataaattaaatattgtggcagtcatcccggatgtccggcacacccggttagagctgctctgtaaggaaggagtaatgagtgactaa

SEQ ID NO: 280596 - DNA, 1218 bp, Morganella morganii
atgtggccgttcagacgtaaacagccggaaacccgcagtatgacgattgatgagctgctttctctggcgggtgttcccaataccagatccggcgaatatgtctccccgtccgttgccgagggattaccggcggtgatgaacgccgtgacggttatcagcgaggcggtagcctcgatgccgtgttacctctaccgctctcacaacgataaaggccgtgagtcccgtgagtggctgaatgatcatcccgttgattatctgctcaacgaaaccccgaacgactgccagaccgcctttcagtttaaacgcacgctgatgcgtcactgcctgctgaacgggaatgcctacgcggtgatccgctggggcagagacggccagccggaatccctgcacccgtacccgcctgcggcggtggtactgaacaggctgggcgatcaccggtacagctacaccatcacggaggcatacagcggcaaggcacgaacctatctgcaggaagaaattctgcatctgcgttatgcgaccgatgacggttatctggggcgctccccgatcactatctgccgggaaacgctgggcttagggctggcgcagcagcgtcacggagccagtattatgaaagacggcatgatggccgccggtgtgattaagtccggcgaatggctggacggcaccaaaggtcagaaagccctcgatgcgctggaacggtataaaggtgcacgcaatgccggtaaaacgccgatccttgagggcggtatgtcgtatgaacagttagggatgagtaatcaggatgcggagtggctggcttctcggaggttcacgattgaggatatcgcccggatgttcaatatcagcccgatattcctgcaggagtattccaacagcacatacagtaatttcagtgaggcatcccgtgcgctgttgacaatcaccatgcgcccgtggctggcaaactttgagcagcaaatcaaatcagccctgctgctggcttcccaggtacccggtatccgttaccaggtggaatttgacaccgccgatttactccgtgccaacccccgcgaacgttttctcagttatgaaaccgccattaaatccggtgtgatgtgcccgaatgaagcccgtgaacgtgaggggctgccaccgcgtgaaggtggtgatgagttcagccaggcatggaaacagacggtagaggtaaagaaaaagccggaggctgacgaatga

SEQ ID NO: 280597 - DNA, 555 bp, Morganella morganii
atgaacaattccgatttagaaatccgcaccgccaccctgtcagccagtgataaaaagctggtgggctacgttatcaaatggaatcaccgctctcacgttctgtgggacgagtttaccgaacagtttgccccggatgcgtttaaagccagtctgcaatccggtcatgatgtccgggcactttatgagcatgaccataccaatctgctggggcgcaccacatcaggcactttacagctttccgaagatgccgccgggttacgttttgagttaaccccgccggatacacagttaggccgggatgtgctggcactggttgaacgcggtgatattgatggcatgagctttggtttccgcgccataaaagatcagtgggatatcggtcaggagccgtatgtcagaacggtacttgaggctgaactgcgggaaatcacggtgaccagtattccggcatatccggacagcggcgtggaaatagccagacgttccctgactgcggcaaaaccgccggcggatggtctgcgtgatcgctggctgcaactgtctgaggtggaataa

SEQ ID NO: 280598 - DNA, 1170 bp, Morganella morganii
atgaaaaaactccttgaattacgtcagcaaaaagccgcattaaccgaacagatgcgatccctgctgaacaaagccgaaaccgaaagccgctccctgaccactgatgaagcaaaaaactttgatgaattgcgtaatcagtcggaatccctcaatgccgaaatcgcccgttacgaagccttggccgatgaagaacgctcacaggccggtaaacctgcgggtgatgataaaaagcccggtaacgatgagttacgcagttacatcctgaccggtgaaacccgtgcattatcgacaggggttccggctgatggtggctataccgtcattcctgaactggataaacagattatgcagcaactgacggacgaatccgttatgcgtcagatctgtacggtgaaaaccattcacagcaacgaatttaaacagcttgtttctgccggtggtgcggtggtgaatcacggtgaggaaggtcaggcccgcactgaaaccggtacaccgaaactggaagaagtcagtatcaagctgtatccgatctacgcctatccgaaaaccacccaggaaattattgatttcagtgatgtggatatcctctcctggctggcaaccgaaatcggggacacattcaccgataccgaagaaacggatctggtgaaaggtgacggtacgaaaaaagcaaaaggcttcttggcttaccctcgtgaagccaaagccgataaagatcgtgcattcggcacattggaaaaactcgaagttactggcattgacgttgatggcattgatgcagataacttgattgacctcaaatttaaactgcgtgcgaaataccgcaaaaatgccgtctgggtgatgaactccaatacggcggccaaagtgcagaaactgaaaaacgggaacggggattatatctggcgcgaacgtttacaggccggtgatccggatacgctgctggggctgccggtgtattacctcgaaaacatggcggacgatgtgattgcgctgggtgactttaagcgcggttatttcattgttgaccatgaaaccgggacccgtacccgtcctgacaatattactgagccgggcttcatcaagatccacaccgataaatatttaggtggcgggctggtggactccaacgcgatcaaagtgctggaagtgaaagccgccggtaaataa

SEQ ID NO: 280599 - DNA, 270 bp, Morganella morganii
atgagtaaaacatgttcagatgctgagtattcaaagagacatatagctgaaatatcaacccacaaagaaatgttcgggctgcctgaacatatcggggatatgaatgaaaccgattaccgctcatcggttgaagcaggggcatttttccatgtggatcaccatgagcggttacgttctgagttttccggggaggtactggctgaaacccagtggcaggtggatatcctgatcagtcaactggagacactgagagaaaaactcaaaaagtaa

SEQ ID NO: 280600 - DNA, 216 bp, Morganella morganii
atggttaaagcagaaacactggcaacacaggcgaccaaaacggcgtatgactggatggttgatgccaaaagcgcaatagacagcgtttttggtgacgggtatgcagcaggtcatccggaactggtctccgggtttatgcaggcggcagcactggatcaggcaggtatgtatttgcgtgcaatcgccgagtcactggaaaacaataaggcggattaa

SEQ ID NO: 280601 - DNA, 1377 bp, Morganella morganii
atgacagcacaggtacagacagaaccggtgatgtccgatgcactattttcctgcgtttaccggtggattaacgggcataccattaacgaaattgacacggttgcggccatgcaacggcataagcatgaagatccgctgagtctgctggcaaagcgcctgaaatcattgtcacccggcaatactgattatgaccggatgtgtgatcagggttatatccagacggatagtgataaacaacggggaaagcgcacagagctggttctggaatatcttacgccggagtctcttaacagcctgctggcagatacggatcggttaaaccgtctgtttccgcctgagccaaagacagcacgtaagacaaaactcccgctgagtgtcgggtcagtcggatatgacgcacggcaggactatgtgattaaaggttatctgcctgctttatcactgtgcagtatttacggccccagcgggtcatacaaatcattccttgccgtgtcatgggcgtgtcatattgcatccggcaaagcatggtcaggtaaacgggtatcccccggcgcggtgctgtatgtggttggtgagggcgggatcggtgttccccggcgtatcaaggcatgggaaaaggtatataacggggataagccgctgacctcgctgtatctggttaaccgtcctgtgttcccggtacggcatcaggaggttgatgagatactgctggcggtacagaacgtgcaggaggctaccggtctgaaagttgaactgatagtccttgatacactggcccgttgctttggtggttctgatgagaatgatgcccgcgatatgggtgcattcattgagggttgcgacaccatcaaacggaaatcaggtgctactgtgctggtggttcatcactccggcaaggatgaggcaaaaggtgccagggggtcgagtgcgttccgggcggcactggatgcggaatttaatatcaaacgcgaggatgagaataaggccctggtactgacgtgtaccaaaatgaaagacgcggaagagccccagcggtgcgcctatgatctgcggacggcggagttattccatgatgaggatgatgagttaatcagttccctggtggtaatggacacaccgcgtgaggttaaagagaacgatcctgcactggctggcattacccggctttcagataaccatgttgcactgtggcagtccatccgcagccggacagcaaaaggtgaagcctgtacccgggcactgctccgcgatgatctgaaagtggtgctgggtgaggaaaacgtcagaaaaggttttggccggtggctggagaagctgaaaagcgagggcttaatcggaatcgagggtgaaaatatcacaccgcttaattctgactaa

SEQ ID NO: 280602 - DNA, 360 bp, Morganella morganii
atgatcagcaaattacagtttaaccaactggcagagcagatacgcctgtatgaaatccgcctgacagaactggaacaggtgatcgccactatgcagcgtaaacactcagttccggagggaatggccccgctcaccacactggcggcggaaatgggcttatccaccagcaaggcagaactactggcccgtaattgtggtgtgctggtggtgcgtcagggaaatcagcttattgtgaatgaatcacggtaccgggaagccgctactatcgttatcaaaggcgcaaagcggaaagtcgggagtaaatactggtatcacccgctgatcggtaaattcatcatgacaaaagggaaaacattatga

SEQ ID NO: 280603 - DNA, 300 bp, Morganella morganii
atggctgatatttatgatgcagttgtccgtcacgatatgaacctgctgagtaccgaagccctgaaaaatattatcagggattcagaggaagcctgtaatggccttgcactggcaatgaaaacggtcggccagttggcattccattctctgaacggtgatgactataccgatcagcaggcacgggatcacctcagcggattaagtgacctgatgatgtatctgccgcggatagtgaacggcatacagcagaatttattaacagcacagtacgaaatcagccgccgcggggtgcagtcatga

SEQ ID NO: 280604 - DNA, 231 bp, Morganella morganii
atgcataatcagcagatgaactattaccagacaccgagcgatttactggcgccgaccacagtcaccggtgacttactgaaactgatgaaagaaattgcctgtaacggttcgcccgaactcaaccggtttattccgacactggcaatactggccaccgaaaattgcgacagacttatgcaggatattgattccggataccgggctgcggatcaggaggtgaatcatggctga

SEQ ID NO: 280605 - DNA, 1338 bp, Morganella morganii
atgaatggcatggctatgcataacctctccaacggatgggttgattatcagaatcgtacctgtccgaataccgcggactttaactccgccattggcggggttaaaaaccatacagaaatcacaggtcataattgcgggtttggaatcctgataatcctaacgccagatctggcgtttcactctgctggtggaattaaggcggaataccgttgctcatatttgagcatcgagtcgcagatctgcaactcgcccagcaatcaatcagctaaaactacagctgatcaatcagggcaatatttcgcggctctcaaatatgaaactctgagctatccaaatctggatatcccaaattgtggagagattacaccattcgctaaaggtgatttttctcacctttttaatgtcgggaattcccgccatttatcacgtattgaatatttattagtggatactacgcggtgcattatcgagttttcgcagcctataaaaaaaggcagcactgcgaatgctaccttcttctatgccaacttttgtaaaagtaaaaatttgctcaatcctaatcccttggtaacaaatttttatcattacgctcaggagtcggtagtcctttctcttgaagaatttctaagagcttcggttcaagtgaatgtgtccatccatcccaattattatcccagcagctatcacaacaaaatataccaccatataagcgcaaatggtgcccattatataaatgaggaccgtgtctttcatccttaccacatatttcacatggtatatagatatgtccatttttatcgattttcatctgctagcccccattttcaagttggagatgaaattcctcttgattgtagttcttttcttataattcgctttatccaagcagctaaagattcatctccatcttgctcttgggctaactccatcatttctcttaattcaggatctaatctgaattggaaaggaggattaccacgtctttcatttttgtgtgttgacacgtcaattacacctatagtaatgtgcttatgtgtcattacacattacatacagttatcagaaaaagcaatgccctgtggtgcgtcaacactcacagggcatctgaccaccaacgataatttaggtatcgaggtagctatgcaagatcatatcacacccgcaacagggcgggacagtttcactccaaatattaaatttctatggcgtttcttctcatgtcagcagtccagatatttcaccgttgaagcccgcagcgaacaggaagcgcgttctatgctgcctgatgcgccgtgccttttctctgcccggatccgtcagggggtgaaccatgcataa

SEQ ID NO: 280606 - DNA, 576 bp, Morganella morganii
atgaaaaacaaaaataagaccgttaccggtcagggcttcgttcaccctgaaatcagtcaaagcgatatttcagttatccgctttgaaggtgttcaggttcgggttattaaaattaacaatgagccgtggtttattgctaaagacgtttgtgcagcccttgaattatcaaattctcggatgtctttactggctcttgatgctgatgaaaagggcgtaagtttaacttacacccctggtggcaatcagaaaatgaatactgtctcagagtcaggattctataagctgattgctcgtagccgcaaagccagcactccgggcacttttgcacatcgtttcagtaactgggtattccgtgacgtgatcccgtctatccgtaaaaccggtgtctatggcgttccgttcggggtgctgaatgactttacccggcgcagcaatgaatatcagaaagtttcgtcacagcgtggccgggatttgcaatcctgcaaagcagagaaaatcagcttagagactgaggaaaagaaactctgggatgaatatcagcctcagttgccagctatggcaggggagaaatcctga

SEQ ID NO: 280607 - DNA, 204 bp, Morganella morganii
atgcaactaataaaatcagacaaaaaactctccagaaaagaagctgcaaaagagctttgtgtcagtcctcagactctggctaactgggccagtaacgggaggattgatattccctatcataaaattggtaaaagaaaggttttttattaccagtcagatatcgatgcctatattgcatctaccagaacaactcatgctgagtag

SEQ ID NO: 280608 - DNA, 603 bp, Morganella morganii
atgaacgctgaagatacagccgctaaattgctcaacgagattgatgattatatcgtttcatatgcaaataaaaaaaccagaagccatacccatgaatcacttttatcatggaaagatattagtatggatgaacgaatatcaatggcccgtagaatagatgaaaatgatatgtcaaagattcttattaatgataaaggtaatattgctggttccatgataacgacagtacttttattgaggctgatgggattaaataatacagctgataggatggagtttttaactcacgcatcactattacatgcacaatttaaaaatacagttgaagatattaaattaaaagataggttgtcgaaaaaaaatagaaaaaatgcggcaggtcctaagaataaatattatgatgaggttatcgctatcatggttaatacatggaaaaaatatccattagcaagtaaaaatggaatgaaagataaaatcgtttctcattatggtaaggataaaattagtgagtcatcagttaagagatggataaaagaaaatagtttaggtccacagaaagaagctaggccaccagttaatttttcccttgttattggttcataa

SEQ ID NO: 280609 - DNA, 1425 bp, Morganella morganii
gtggatacgttcaaattcacgaaagcaaaacttgaaagtctgccgccggcagaacgtggacagattgagtatggcgatacagtcgttaacggtctgcgtatccgtgtaggtgtcagcggagtaaagagcttttgcatctccagaaaacgaaacggtaagttcatccgtgcaacgctgggacgttttcctgatctgacaattgataatgccagggcaaaggctctcgagctgctgggggatgttgcagccacaggacagaatccgaacgtggtgaagcgtacccatgagaaagcagccgtatcactggcggaggctttggatacctacgttgaaaaccgtggtgagaggctggggccgaaaacagcaaaacagtatcgctctatcctgcagaacttttccggcgactggatgaaacagcaactcgcatctatcagccgggaacgggtcgaattacggcataaagcaatcactgacggaacggtatggttcggtgaggataaatcaacactacgggccggagtgggtacaggaagtaaagcacaggctgatctctgggcgcgggttctccgggctatctaccgtttctcacatgatcattaccgggatgatgatggaaatattctgctgccagatccgcccacaatggttctcagtacaaaacgtaaatggcacggtattgtcagaaaaacggagcgaataagaaccaatgatcttgccaggtggtttaatgccctgagcagtgtccgtgaacaggccgaacaggaacgtgatgatattgccgccgcggtatgtgacgccgtggaaatgtctatttttaccgggttgcgtaaatctgaaatattagagctgacgtgggaccgggttaatcttggcgggcgttatttctggatagataccacaaagaacggtgatccgcttgagctgccgataaccaatacgctcttagcattgttccggcgcagggcacaaatgaaatcaggtgatggtacgcttgtctttcctggtgataaaggtgttatcaaagaataccgccatattatcgaccgtatcagtgcgaccacggtaccaaaaccaaatccagatttgttacagcctattccgtttaaatggcatgatgggcggcggacgtttggtacggtagctgagctggtgggtgtaggtagctatattctgaaacgtctgttaaaccaccggacaatgagaagcgctgatgttactcaggggtatttatatttttctgctgatgaactgagagagcccgcagaaaaaatagagtataaaatattacaacattcagatttattagaaataaatagcggcataaatgctcatttactaacgattttagaaaaaatgagtaatgaagaaaaacgccgtttgttatttaatataataaatagtaaggatattaaaaatgaacgctga

SEQ ID NO: 280610 - DNA, 4689 bp, Morganella morganii
atgacaaaacaacgtaaactaaggattgctctgcttattgctattgcactgtccggcggggcctggctgacgtattctgtgacatccggcagcacccctgcagataagggctatgagctgtatttatccggggatactgacggggcattccgctatttttcttcagaagcggaaaaagatcctcaggcggcctatgcgctgtccgtgatgtatctcaacggcaatggtgtaccggtaaatgcgttgctgggttatcagtggctggaacgtgccgcaaaagccggtaataaaaatgctctgtataacctcggttattaccgctatcacggtatggcaccttataccggacaggacccgcatggtattacgtcactgaaagcggcggcacaggccggtgtacgtgaagctcaggaattactgggtagtatttatctgctcgataaatatgaaactacgccgtcagatgttgagcaggcacgcaaatatatgacggctgccgcagaccagggatcgttttttgcaaaatttgccctgggttatatcgcttacgaatatgatgaggattataaaaaagccgttgagatcctcacacctctgctcagcgaacaatttctcttccccgccatgttactttcccggatatatgacactggtggtcacggaatagaagccgatcccggactggcaaaaaaataccgctatatggccttttcacaaataagctcactcagtgaagaagatattatgccaaaagcgttatcactctacggtgcagaaaccacagatgaaacagcagcccggctgaaaaaactggaaaaaatggcagaaaacggcaatcttcatgcccgttacgctctctatgatgtctatatgcaaggtatgggagccatcaaaaataaagaaaaagccctctcctatttgctgccgctgattaatcaaaaagatccgaaagccctttacacctggtatcttgataccaaaacagagccggattatctgaaagcttctgctgaagccggatatcctgatgcgctttatctgctttatcaaatccaccgcaatatccgttatgacgatgcattcgattatgaccgggatctctcggatgaatacctgaaacgggcagcggatgccggtcaccgggatgcattaatcgacataatccgcaatattacaaatagttaccaatttccggataatgaaactaacgcgatagtatccgcctatttagcggtattactggaaaaatatccgaatgacgccgaagtgctgatgctgggttcacagcgttacagtgacaaggacgggaatatttatgatccggttcgtgcttttgagttaaataaaaaagcggcagagttatcaccactggcagattaccgggacgaactggcctataaatacgccacggggtttggtgttgagcaggatatgaaaaaggctgtcgggatctataaatctctgctgaaaaataccgcttatcaggatcaggtttaccgccggttaaccgctctctatttttcttttgataccggcggtgagattgatgaaaaagagattatcgcgttcctgaaaaaagatattgaagagaatgaaaactatcgccaggcgcatttttacgccggttatctgctgcggaacgatccggtaaaaaaccgtgaacaggccatggaactgtataaacaggcccgtgaatatactctgagttcggatgttcatcaggctaaaacacttatttcccttaacagcggcgataatcagcaggcgctgaatctgatgatggatatgctgaagaacagcgatccccgcgataatcttccgccggaagagtggaatgatgtgatgcaggttctgctcacggccggaaaagaaaacgtccttgccagacagtattgggtacagtttgcattgcatgataataatgctgaggcgcaaaaacagatcgagccgctgattggtcacgacccggatgttacctattactacgcgctgctgaaactggaagaaacagagcaaaagccggacttcactgatgatatgctgcgcccggatattgagctgatgcagaaagcagcggaagcgggtaatcagaatgccgctgaatacatcgtgaatcgcttacagagcgcagcgggttccggaacgcaaagcaaccggaatcaggcctttttgcggatcaccggactgacggagcgcgatatagtgccgcgcctgaagcaatgtgctgacaccggaagccaggcctgtatgtatgaattaggcgaaatctattacgaaggtaaatatggcgagaaagccgatatggataccgccattgcctggtatgaaaaaattccggatcgtgattaccgttttaccgaatcacgtctgaaaaaagcggaaaacagcaaaaaaacgcttattgatctgaacgcccgtgtacaaagaggggatgctgacgccgcctatgagttggcttacgcatggaagaacggcgattacggcctgatacagaccccggaaaaatggcgctattacctgaaaatggcagccgaaggcggtaacgaaaatgctgtcaccacactgattgatgactacaaaaacgcagacacgctcagtccggaagataaaaaattgctgctgtcgctgtatgacaaacttcccggaaccggtaataacagctatctgcgcaacctgggtatgcagtatctggaaggcagcaatcttgtcagcgccgatcgcctgaaagcccgcgagtattttaccaaagccggtgattacggtaagagcgaactggcggcaatgaataaatttgaattaaacctaaaactggcagatgaaagcccgaatgcggcctatgaaaccggttatgcctggctgcttggccgtggtgtccgtaaagatccgcaaaaagccctgttatacctgcaaaaagcgtcagataccggccatgatcgcgccactatcctgctggcagatacctatgcaaaaggagagtttgataaaaatacacagcagcagattatcgaaccggactgggacaaagccattatcctgatgcgtgcttacaaagggcggcgtgatgtatcagacagcctcgcgttctacgaagaaacgataaaaccggcacaagccggggacggtaaggccatgctggccgccggtatgcacgacaagaattacggtaattatgatactgcccgctactggtttgcaaaaagtacagagagcggctatctgcccgcattctgtgttctggctgacgcaacggaaaaccccggcagtaaaatggccgtattacgccgcggggctgaaaaaggtgacagttgttcagatatacaactggctgccatgcagctcagagagagcagcctgacaccggattcaccagagtggtccggcattatcacccggctggaaaacgggctggaaagcagtgatacggtggtttccggaaccgcattcagcacactggcggatctgtataacggcacgctccgcaataatgagggtaagtacctgtataacgcggataacaaaaaatatctcgcgttaatggagccggcagcagaaaaacggactgatgcacaattagcattgttctcttattaccggcagaacaacaatatggataaggcactgtcttatctgcaaaaagcacatgacagtggtgacctttctgccacacaggcactgtacaaatactttatatcgtcagaatactgccgccgtgacgacgcggaccccgctaaagcggaacagtatctgacagcgtggctgaaaaaatcggactatccggaaaataccgataatcagatggttatgccaccggaaaatatgaccaaaaccatgggcgatgcatggcttgaaggcttctgcaacaaagcaccggacccggataaagccatcgcgtggtatacccgttcgctggaatataacaatactcacgccctggaaggtatgtataacgcttatgtcagtaaaaaagatgctgcagaagcgtattactacggttcacttgccggtgtcagttcccgcgagggagacaaactgactgacaccctgacagatgcagaacgtgatgcggtgctgcaacggattaagaaaaaacaggaatatgagcaatacggccgttatgagcaggaaattgatgcacaacggcagaaagcggaaagcggtgatgccatggcggcattctcgctgggggtcaactatgcccgtggtgaacgcgttccggaagatacggaaaaaatgctctatttctatgaactcgccggtaaaaacggctacgccagagcgtataacgtactggggaatctctaccgcaaaccgaatgagcgcggcatcccggtggacggcaaaaaagcgctcgcgtattttgatgcgggtgcaaaactgggcgacagcaataccgctcacctcgccggtgatatgctctacttcggccaggccgggctggaaaaagattatccgcaggccgcccgctattatgaaatgacctcccttgaacagggcagtcaccatgaactggcgaaatacaaagtcgcgtggatttattatcacaagctggcgggcaccggcagtgatgatgatctgcgcaaagcgcgggataacctgatcctctcagaaaaatacggcaataaagatgccgcaaaagccttaaaagagtgggatttttcccgtatcagcaaaccgaaacaggataactaa

SEQ ID NO: 280611 - DNA, 1002 bp, Morganella morganii
atgaaactgaaatatcttgtgctttttttcccgtttgtattagccgcatgtggtgaaaaaagtgaaacgatcggatgttcctctgacatatccacatcaggatttattgagacgctgaaaaaaacagcgtttgaagaactgtctaaagaaacggataattatggtgacgtaacgaatcagataaaaagagcagcactggaagaaattacgttcagtacttctgacgttattaccaaatccaatgatcctaacagcacaatgaaaacctgttctgcaatggtgacagtgacagtacagccggatacttatcagatgttaagtgattattcccgtacagaactgaaccggaatctggataaaatgatggataatctttctctggaacagaacgcgaacacattctctgccagggttgattacactgtccagccgacagatgataataaaaccgtgtttgtaaatataccgcgtaatgcggcatcaaccggtgcggcatttatttctgcattatcggtactgaaaccgattaaggaacagcagaaattacagcatgagcagcagcaacaggcatatgccgcagagcgggagaaacagttgcaggagcaggcattacaggagcagcagtatcaggcagaacaactgaaactgcagcagcaacagcggcagtatgaccagcaacagatcaaaatgcagcaggatcaactgcagcaacagcaacaatacctgcagcaacagtatcaggcgcagcagtcacaacaggccgtgatgacattaacacaggcgaaaaatgactttctgactgcggattctgatcttaataaccgctggcagcagttaagcagcgaaagcagaaaagcattattattaagccagcgtcagtggattaaaaataaagacttaatttgcgggaaagtgacttcacagggaacagaagcagaactggcaaaaatttatgcctgtcatgctgaaaccatcagaagccggatccctgaactgaattaa

SEQ ID NO: 280612 - DNA, 156 bp, Morganella morganii
atggcttataacacggcggtgctctataccgtgattgatatgctgctgatgtggcggacggactatcttattgtcgatctgctgagttttgcggtcactattctgattatcctggttccttccggatatctgactaaaaaagaattatcttcctga

SEQ ID NO: 280613 - DNA, 159 bp, Morganella morganii
atgaagaactgtgcagaaattatgatgaattgtgcagggattatgatttcaccgtcagaaagggtaaaacggattgtcttatataccggcatcggcaatgatagcgccaacagcaaaacagtgcttcagaaaattaactcaaaaggaatattaatatga

SEQ ID NO: 280614 - DNA, 735 bp, Morganella morganii
atgcttaataaaacgacctgtcatctttatctgtcagatgatgaaatatataactcagaagacgcttgtaaagagaatgatttattatctaaatatctgacacgtcagcagacagactatttaaaaaaaacggattggttccgccgcagaaagaaatggaatattccttttcagtatcgtgacctgaccatgatcagacaaacaatacaggcttatcctgataactgggatacctgtttgtctgacaccattatattatccgggtcccgttactgggtgagctggttattaaatgaaacttatgaatactggataaaagacacacaccgtgagttgtgcgatctggaagaagaatacagccggagccggataataaacagccagctgtcggccctgtatacactgtacagtacatattatccgcaaccggaacagacagagctgtcagatattaaaaactgcctcactgaatccgtacagaatctttcccggacacagcaggatatttatgctctccgccgggaaattccgttcacactgcgtcattttattaatgtattccgtgatgttatttatcatcataaacccttaccggataacggcatcccggactatttccgcacagccgtacagctgattttgcagctgaaaaataacaatgatgataatcagctgtatctgtggctgaacaaccgcaatatctgtctgacggcagataaaatacactggtgctga

SEQ ID NO: 280615 - DNA, 939 bp, Morganella morganii
atggatttttcgctgttaccggtgtttattgcgatcaccgagcaggggagcctgacaaaagcggcagagtatctgcatatgaccaaatcggcggtcagtaaaaaactggcggcgctggaaacacaaaccggcatccggctggtcacccgtaccacgcgccatttgcagctgactgaagccgggcagctttattacgcctatctgaagaaagcccatcaggccgtgctggacgggcaggatgcattgtcacattacagccgtgaggttgacggcacactgaaaatcagtgccccggcggtgttcggcagtctgcatctggccaacataatgcctgaatttttacagcgctggccgtcattacaggcggaactggtgtttgatgacaaactgacagatttggtcggtgaagggtttgatctggctgtccgtatcggtgaattacaggattcctcgctgattgcccgtgtgttatctccctgccgcagtgtgttgtgcgcgtctcccgcctatctggcacgacacggtacacctcaggatctgactgacctgaaatctcataactgcctgttttacagctattttcaggccggtcagtcatggacgtttctgcacccgggggacgtcgtgcgttttaccccgcaggggacattgcgcgccaacaacagtctggcgctgcatcaggctgttttacagggaacggggatctgtcagttgccgcagtttatcgccgcaccggatatccgagccgggcggttgatcccgctgctgccggaatacccgctgccgctgcatcatatctatgcggtttatccggatcgtgaatatctgccgaaaaaagtctccgcatttttacattttctgcaggatgcgctgggtacggaagggcactatcagaaagaatatgaacaggatttatccttttttaaggcagcggaataa

SEQ ID NO: 280616 - DNA, 876 bp, Morganella morganii
atgagtgataaacatgagcacggtgatataaaatcactaccggaatcacggttacgtattgcgtttgcattaacattttcttttatgctggtggagttcatcggcggttaccttacgggcagcctggcgcttatttctgatgccatgcatatgatgacagatgcttttgcattattgctggcactcattgctatccgtgcaggaaaaaaagccgccgattatcttaaaacttatggttatgttcgtttcgaaattcttgctgccatgctgaacgccgttattttgctggcggttgctttctatgtgttatacgaggcttaccgccggatttcagcaacaccggatattcagtctgccggtatgcttattgttgcgtcggccggcctcgccgttaatctgattgctatgcagctactgaaaaacagtaaagatgacagcctgaatgtaaaaggtgcgtatcttgaagtctgggccgatatgctgggctccgtcggtgttattatcggtgcggtaattatctggctgacaggctggttaattgtcgattcagttattgcagtccttatcggttttatggttttcccgagaacctggattttattaaaatcctgcatcaatattctgttacagggcacacctgaaaatattcgcatcagcgatattactgatgaaataaataaatatgacgggattgtcagtacccataatgttcatttgtgggcattaacacaaagcaactatgtactgactgctcaccttatctataaaaaagatgctgaccataatactatccgcaaattactaacggatagtattcacaggaaatttaatattgataacatcaccttccaaatggaacaggagaagcctgaataa

SEQ ID NO: 280617 - DNA, 168 bp, Morganella morganii
atgaaaatcctgattaatctgttcagatattcattctttttagccctgattattgttgctgttatttatcgtgatgttctttttcagttttacaaccggattgtttcccaatccggtacaatctctcagatagcggacagcatcagcagtattatggcctttttttaa

SEQ ID NO: 280618 - DNA, 381 bp, Morganella morganii
atgaaaaagttattattagcaggattgcttggcggcgcggtatttggtttatcagctaacgtgttggcaaacgtgaatcataacaatcagtcggcaggcggcgggtttgcttcacagacggcacaggttgtcagtgtttcaaatgcaaataatcagccggatgacagcagagtaattatcgaaggttttattatcaggaatatcagccacaatctgtatgaatttaaagatgactccggtattacccgtgtaaaaattgataaagataaatggaacggactcattgtatctcccgatactaaaattcgtattgaaggccggattgataaccatttgattgatcatgaaattaatgcagaaaaaatctatccggctgagtga

SEQ ID NO: 280619 - DNA, 705 bp, Morganella morganii
atgagaaaaatgctccgcatactaaacacactggtttttctgatgtttttatttccgttttctgcggttgtatatgcggcagaaaatacagctgtcagagccgataatattaagcatgctgctgaaaacggtaatataaaagcacaatccgcacttggtctgatgtattataacggcgaccatgtcacacaggaccctgtaaaagccagatactggtatgaaaaagccgcacatgccggtgatgcaaatgctcagggtcttctggcgatgatgtattttaccggggatacggtaagccgggattatcagcaggcgttattttggtttgataaagccgcggcacaaggtgataccgaagccatggcatttatcggtgaaatatacctctatggaaaaggaaccgaaaaaaattacaccaaagcagctcgttatctgcaaaaaccggcagaggccggtgatgcttatgctcagggattactgggtatcatttattactatggcaaaggcacagaacaggattatacccgtgcccgtgaatggtttgaaaaagccgcacaacaaaatgataaaaaagcacaacttgcactcggacttatttatgccaaaggccacggtgtaccggaaaacagatctgccgccaacacatggttccgtaaatcctgtgataacggcttgcaggcagcctgcgacagagtgatgaaataa

SEQ ID NO: 280620 - DNA, 324 bp, Morganella morganii
atgacattaaaaattaccggcctttttattctgaccgcactggctgaaatcgccggttgttactttccgtatttatggttaaaaaaacagggaagtgtgtggttactgctgcctgctgccgccagtctggttgtatttgtctggctgctgacattgcatccggaatccagcggcagaatttatgcctcgtatggcggaatctatgtggtgactgcactgatatggctgcgggtggttgatggtgtatcgctgtcagtatcagactggactggtgcggctgtcgttcttgccggggcggggattattatcagcggatggcggtga

SEQ ID NO: 280621 - DNA, 201 bp, Morganella morganii
atgtactgtgccgctgctgcctcagtcagtgatgaagccgtcacagaacacagccgggcgtgttctgaaatcgccggattctataatttaattcaatttcccggcaatacccttgtcccgcactttaccggctttggtctgatagccagcctcatgaatccgttcagtaatggcacgcccgttatccgctctctcagataa

SEQ ID NO: 280622 - DNA, 507 bp, Morganella morganii
atgaaagttttcacatggttatttctttattttattgcggcggaatctttcgctgatgttgattataacgctatgttatcggaaatcaggagtaagcctgaatacgtcctgttgctcccggaggctcaaaaaggagacccggttgctcaaaaaaaaattggtgatatatattatgaaggtgacggtacttttgcgtttccggctcaggcgctttactggtatgaaaaagccggaatgcagggaaatttaactgctcagatactggccggagactgctattattcaggaacgggtgttcataaaaattattttcttgcaaaaaaatggtacgaaaaagcagctgaacagggaaatgtaagggcacaaataagccttggggatttatattccacaggtggttattttttcccgaaaaataaactaaaagcgaaaaaatggtatagcaaggcgtgtgagtcagggtcttttatgggatgtaatttaaaaaaatcaattcaggataaatga

SEQ ID NO: 280623 - DNA, 336 bp, Morganella morganii
atgttaattccggttttcggtatggctgaaggggaatctgacgttgtttacacctccttagagctattggagatgaccgccggcaataaaataccggacagcgaaacacccattttggataaatctgatagctccaaaatgttatttaatgaatgtaaatcaatagcgaagaaagtaatctcaagtttcagtaatgcttacccgacagtgattgacgttgatagcggcacacattttaaagtaagaatcggatcaatcaatgaggtgtttaccctggaatgtgttaatgatgagaaacgggtttacagggctaaatacaaatccaaaagtaattag

SEQ ID NO: 280624 - DNA, 780 bp, Morganella morganii
atggcactaacgggtaaagtggttctggtcaccggcgctgcacaggggattggtcgtggtattgcactgcgcttagctaaagaaggggcggatatcgcgctggtggatctgaaagaagaagggctggcgaaagtcaaaaaagaagtggaagccctgggccgcaaagcggcaacattcaccgcagatatcagtcagcgcgatcaggtttttgcggttgttgataaagcagaacaagcattgggcggttttgatgttatcgtcaataacgccggtattgcacaggttaaagccattgaagatgtgctgccggaggatatggatcgtattttccgcattaacgtcgatggtacgatgtggggaattcaggccgcagcggccaaattcaaagcacgcggacagaaagggaaaatcattaacgcttcatctattgccggacatgatggttttgccttactcggtgtctattccgccacgaaatttgcggtccgtgcactgacacaggcggcggccaaagagtttgccagcagcgggatcaccgtgaatgcttactgtccggggattgtcggcacggacatgtgggtggaaattgatgagcgtttctctgaaatcaccggtgcgccgaaaggggaaacctacaaaaaatatgtcgatggtattgcgctgggccgcgcccagactccggatgatgtggcggcactggttgccttcctggcaagcgacgactcggattacatcaccggccaggcgattctgactgacggcggtattgtttaccgctaa

SEQ ID NO: 280625 - DNA, 429 bp, Morganella morganii
atgacaacatttcgtataaaacagccggtgaaggtggtgatctttattctgacggtaattaacagtgcctgcgcagtaaataatgcaccggatatccgtgtgaccagcccggttgaaaaaacgatgcaggaaaccacggataataccctctctgcggcttgccgcaactgggctccggacagtgatgccattaaaacggtatttacgctgagccgggaatatgcagaagaaccgtattctcagttttatcagactccctgtgatgcctccggtgaactgactgctgacggacaacagtggcacttttctcttaacggcggcggaataatgacactgaccagcggaaacaaaactctgtaccggggatgctctgatgagcggtgcgctccgtatattttactgctgacagatgcgatgtccggtgagtga

SEQ ID NO: 280626 - DNA, 627 bp, Morganella morganii
ttgttgagtggtaattctgcaatgattgacaaaaaagaaagcgttgctcagtttagtgaacgattgagaacaattgttccacctggtttcgggcgagagttcgctaaaaaagcaggaattggctacagcactgtacataactatcttcaggctatttccagtccgactttggaaaatttagtacggcttgcaaacgcaggaaatgtttcagttgaatggttagctacaggaaatcatatcaatgcaatagcaagtgacaattctttatataaagtaccttttcatggtagtggcgattactttttattggatagcaatgcttttatcatgcctccaattgatgtagctcatctagttgccgttagagttgatagcaatgttatggagccaacttttagggctggtagtgttctgattgtaaacaaggagcagaaacagctaagggatagcaaaatttttgtactatataaggctaatagctatttgtttaagagaatacaagttatcccaaatggttatagccttaacagtgataatgatttgtataatcaaatagttatttctgataattcattgttctcatttgagattattggagaagtcatactagcttgcactttaatgtag

SEQ ID NO: 280627 - DNA, 561 bp, Morganella morganii
atgaagtcattaactcgcggtcaaaagattttttttgttattgtaatcatagtcataattggtgcattcaatcgttcattacaaactaattatggtgtagattcattaagtactcaatatttaagcaccataactgattacaagaatgatcaatttaaaaaatctaattttgataaaagctttaaagcttttggtggaactttacctgcaactattgaaataaactcatccggtggtaaaggaaaaaatgtagcacgtatcgggtttattaatgaaaaaaatgatacagttaatatagtttattcgcaaaatgaagcaaacgagcacttacacgcattaatatcggcaaataatgaattacaaaataaaaatttatcaagcacatttaaagttacaggaaatagcaaaataaactatacatatactggttttaagcaagggccactaaaaatcattcaagtttgtcaaactagaaaaagttctgaaatatgtgcattacttgatgaggttgggatttttcaatactataatcacttgaagaaatttaattctacgcattga

SEQ ID NO: 280628 - DNA, 711 bp, Morganella morganii
atgaaaacaacacaaactgcagctgatcttgccagagagaaactcgatgccatgctgaccgccggtgttatcacgcccggcgataaactgcctgccgaacgcccgctgacagaacaactcggtgtcaaccggatgtcactgcgtcaggcattactcagtctggaaagtgacggaaaaattttccgtaagaaccgcagcggctggtttgccgcgctgccgaaatttaattacaacccgaaatccccggcgagcttcaaccaggctgccagggcgcagggtcgtctgccatcgtgggaatacacagacaagcagatgctcaccggcgttccggcagaaatcaccggaacactgggactggccgacggcgatccggtgtgctgtatcagcggctggggcgcactggacggccacaaagttttctggcaccagacgtacattaatccgtctgttgctccggattttgcggaaaaactggataaccactcttttgcggctatctgggaaaacgaatataacatcatcacaacgacagcccggctggcatttaaacctgcgcggatgccggaaacagccagcaaggccatcggctgtaccgcgaattcccccggcatccgggtggaaaaataccgctgtgatgcggagcataatatcgttcaaatcgacattgagtactggcggtttgaatctgtttatttttttgttgagctttag

SEQ ID NO: 280629 - DNA, 255 bp, Morganella morganii
atgaaaaccggattaaaaaccgcacttattgttacgctctttgcctcactctgtactatcagtacggcgaatgccactcagcaatcccgggaacgtcagcaggcgcgggatgtgcgccaggatacccgtgacaagtcccgcgataccaaacgtgactgtatccgtgatgataataaaagtaatcatgactgccgtcaggaaaaacgtcagaccaaacaggatggccgtcaggaagcccggcggattaaatattaa

SEQ ID NO: 280630 - DNA, 924 bp, Morganella morganii
atgagcggactggaagaaaacctgggtgatttgtactatttcactctggttgcacaacacggcggctataccgcagcaagccggataaccggaatagcaaagaataaactgagcagacgggttaccgcactggaagaacatctcggtatccgtttatttcagcgtaccaaccgtcaggtatcactgacagagaccggtttccgcctgatggagcacggcctggctatcctgtctgaaacagaggcggcacagaccatgatttcacgcagcttgtcagagcctgccggactggtcaggataagctgcccgtcactggcaacccgtctgctgctcagcggctgtatttcagagtgtatgacacgctacccgaaaatcgatattcaggtacaggccacagacaggcgctgtgacccggtctcggaactgattgatatcgctatccgcctgcgggaaagaaagtatatggagcagggatttattgcccgggagctggggaaaagtgtccgtattctggttgccacaccggaatacctcgctgcgaacggctatcctgattcccttattgaattatgcgatcatccgctgatcacacttatcgcccatgaacatgagcagccgtgggaatttaccgatactgaaaacaatattgctgtaatccatccgaaaccacacttatcatgcagtgaatgggatattgtgcagcatgtgacgtattcacatcagggaattgccctgctgccggatatggtctgcggtgatgcgctgcgggcgggaaaacttatccgcgtactgccgcagtggcaccgtcagccgctgattgtgcatatggtatacccttcacggcaggggatgttgccggcggtcagggtgatgattgatctgctggcggaacgtgtgcctgcattactgctcgaggggatttaa

SEQ ID NO: 280631 - DNA, 942 bp, Morganella morganii
gtgaaagctgttgttgttgaccggttcggcgggcaaccgtatatcgctgacattcccgtcccggaaccggcagaaaatgaagtcagagtcagaatatatgcagccggcctgaatccgctggactggcggatagcggacggcatgctgcaaaacagccttccgcatcattttccgctggtattggggctggatggcatgggcgtgatcgatgcagtcggaaaacaggtttcccggtttcagcccggtgaccgggttgtcggacgttttctcagtaatgaagccggcagaggttgtttctgtgagtatcagacactgtctcaggacgggatgctggtgacagtaccggcatcacagtttctgccggaactgactatgctgccgacagcgggtgtcagtgcgttacagatagcggaacatatgaatgtaccggccggcagccgtatcgcggttatcggcgcagccggcggggtcggtagttttgtgacgcggattctgtcacagcgcgggtacaaagtgattgcggtggccgggaaacagcagacacgttatctgaaaaaaatcggtgcttatgatgtcatcgattaccggaacggtgatgttcttgcacagttatatgaccgttatccgggcgagggcgcggggattgtcgatctggtcagcggcccggatgcttttatgcgcaacctgttatggatagcgaacggcggaatagcgctcagtacggttcatgccgcgtcgtctgagaacgcacatttggtctctgtggtgaattttgaattttcgccggatatcgcggcattacaggacatggtgaatatgcagtttcgtggtgaaactgacggtatccgctggtctgaaatcacgccggaggatattccggcctgtctgcagaaaagccggaaaggtcacggcaccggcaaaatgatagcccggtttatctga

SEQ ID NO: 280632 - DNA, 1098 bp, Morganella morganii
atgaaaacacgtgcagcagtgcattataccgatacacccctgctggcgcccagtgagctgacgctggatgaaccgcaggataacgaagtactggttcacattaccgccaccggtatttgtcatactgatattgcggtgattaacgaccagatcccggtgccgtcaccggtagttcccgggcacgaaggtgccggtgtggtgttgcggagcggcaaaaaagtgacgcacgttcagcccggcgaccatgtggttctcacgctggccagctgcgggcactgccatccgtgcaccacagggcggccgacttactgcgcggagcatcaggcgctcaactggcaggccgcccgggcggacggttccgtcagtttgcgggacggcagtcatgcggttcacagccattttttcgggcagtcttccttttcacagtacgtggttgcggatgcatccggtgtgataaaagtccctgcagatgcgccactccgttttctcggtccttttgcgtgcgggtttatgaccggtgcgggggcggttctgaacagtctgtcaccggaagcgggcagttctctcgcggtttttggtaccggagcggtgggaatggcggccattatggcagcacggatagccggatgtgaaccggttattgcagtggatattaataatgaacggctttctgccgcagcggatgccggagcaacacattgcatcaatccggcggaaacggatctgatgacagagattaaccgtatcactcagggccgcggcgtaaactattctgtcgagtctgccggtcatcccggcgtaatgaaaaatgccgtccaggtactggcggagcagggaagctgtgtgctgaccggtgtggttgccgcagatgcggtgctgccggtggatattatgcatctgatccgggggcggacagtaaaaggctcaattatgggggatgcggagccgtcagtttttattcctgaactggttaatttatttttacaggggaaattccccgcagataaatttattcaattttattctttcggtgatattaacaaagccattgaggattcccgcagcggaaagtgtattaaggccgtaattgaaatgtaa

SEQ ID NO: 280633 - DNA, 558 bp, Morganella morganii
gtgagaatacaatacaacgcagcatggttattatatctttcttcatttgcgtttgccggtccggttaatgacaatcatattcaggaaaaagacggatattattatcttcagaaaggatacacggacaaggatgccgctgaattctactggcgcagcctggagggctggtctgaagttccggataacgtagcccgttattttacaaaaaacggccggtttgaattaccttatgcaccggttcatgattttccgtatttattttcttcagcatccggtggtcgtgataatatcacccgttatttttcaaatatgagtcagtatctcgggaaattaaaatattcagcaccggaaacatgggctattattccggctaaagaaccggggttatatatttttgaatattcaagccgtggtcaggtcaggctgacaggcaaagattacagacagcaatttatcgcgattgtgaaaatacaaaatggtcagatttcacgggcccgtgaatactgggacccgtatgtggcattgcgggattttgatttgatcaaaaaagcgaactga

SEQ ID NO: 280634 - DNA, 1347 bp, Morganella morganii
atgcatcagtctgatgtgacagagcgcgggctcttttccttaagctggccgatttttatcgacctgttattacacttttccaccttcctgattaatacctggatggtcagccatgtgtcgtcaaaatatctggcggcaatggcggtcggcaaccaggcgtttgacctgtttatcactattttcaactttatcagtgtcgggtgcagtgtggtgatcgcccagtatatcggggcgggcagacgggataaggccagtcaggcgattcatatttccatcgcgtttaatctgctgctgggattattgtccgccgggtttactattattttcggctataaaattctggaactgatgaatacgccggaacatctgatggaagatgcctttaattatctgcatattctggggatctgtttaattccggaagcggtaaccatcattctggcggcctgtctgcgcgtttacggcagagccaagcccgctatgtatgtcacgctggtcgccaacgtggtgactgttgtcggtaactgcattgtgctgtacggcctgttcgggctgccgcagtacgggctggtcggtgtcgcctggtccaccgtggccggacgtctgatcgcggtggcgctgctgtgcggcctgctcttttacggcctgcggattaaattcgtgccgcgcatgctgtttcactggtccaaaaatatgctgaagcagatcctgcatgtcggtctgccgtctgcaggggaaaacctggtctggatgctgcattatatggtcgcgatcgcctttatcgggctgatgggcgagaccgcactggcggcgcagactatctacttccagctatcactgtttattatgctgttcgggataaccatcagtatcgggaatgaaatcttggtcgggcatctggtcggggcaaaacgttttgaggatgcctatcagcgcggcatgaaaagcctgaaaaccggctttttcagcaccatcccgattgtctttctgttctggctgttccgcgaccacctcgcttacgggctgagtgacgaccaggcggtgataaaactgctgctgccgctgttcctgctgtcagtcttccttgagccgggacgcacgctgaatattgtgatggtaaacgccctgcgtgccgccggtgatgcccgtttcccgctctgtaccgccctgttctttatgtggtgtgtggcactgccggtcggctatgtgctggggatcaaactggagatggggatactggggatctggattggttttctgtgtgatgagtggctgcgcgggctcgtcaatacctggcgctggcgctcgaaaaaatggcagtcaaaacggctggatattgagggctga

SEQ ID NO: 280635 - DNA, 9681 bp, Morganella morganii
atgcgttatgccagtgaacttaaaaaatcggataaaaagccaacagaaaacgaagattttctcactaataccgaaaatgaagcagaactttccgctgaggatccgtcaacccatttcacagagcgtttagacgaagaaattgaagccgacatggccgaactgagggcacatctgcaagccgttatcagcggcgccctgcccggattttatgagttccggcaggccggatataacctgttgtatcctaaaaatgtcgatatcgaagcattgcaggcacgggtcagcacaatgcaggtaccggtatcgatacaaccacagcacaagttactggaacaagccgccaacgcctttctggaccggttcaggttgttcagaaaagagagtgatttacataacaatgcgctggagtttatcaagtttcgcctagaggtgaacaaagcgggctgggatgagccgcaaagccgtgattatcaccaggcgcttaagcatagcaaccgtctgagcggctatctctcggaaactctggacctcatgagtatcttcagtgagaaggtggaacggcaggctccgtgggaaaccatcaggcaggcaaattacgatgaacttttcagtgaacttcttccggtaaatgctgatacggataataatcaatatactgccaaaacgcgcggaaatctgacagggaagcagcctgataacataaaattcaatgctatcgtggattcagttacgttggatgaaaggatatcccgtgaggcactgaacacagagacagagaggctgtcggcgagattattaagtggtattacactgaccagaaattatgcggcaaagcccggtgaaacaggtgaaaccagcgggattaaacgcgacatcgattttctctgccgggttctgcagtcagttatcggtgtcgttcagtatgccgggcaacaaatccggcctgaaacgtatcagccactccgccagaaagaagtacgcactaaacgggaaacagtaacgcatgagctgggaaaagtccggaatgcagtgggacagaaaatgtcgggggtcaaagcctctgtcaaaatgctgtctgataaaggtaacaaaagtaaacaccgcgttgcacatgccctgtccggttctgctgcctctgataagaatggtgacagtcataacataaacaaagctgtttttcaggtcggtataagactgcttgatgaaattcagcagaccacatccggcatgtataaggccatacaaacctcccggccactacagcaagctgtatcgcattacagtgagcttgatcagatgttatcgggtatgccgaacaattcagttctggatgcaaagttacgtgctgagtccggcagatggcggcaaaaagcagaagcgttaaaagaacagctgcaacaattactcggaacaatcacgacactgtcagatgagagcataaaacaaagatacctgtctgcgctaagagaagaactaaacactgtcaccaacccgatggcctccaataatattatccgtgattttgatacacagataaaagccactgttgagggcttatccggcatccatagagtactgggccaggcgttgttacgtctttctgagcatggtcaggccggtggtaaagagttggataaacagaccgtgtcctggttacagcagctgaagagcataaaagacaatctgaaaaccgggatcacacaggccaccgggcactcaattaacaatttttcccgccaggggatgttagtcaggtggatggcggaatggcatgaagcggagaagcagcgctatttgggcccgctttccgcaggagcgcgggcggcaactgaaaagcactatgacaatgtgttttttgaggtgatcccgcactatcttccccagttatccaaagaatcagatccgcagggagaaagacttctgcagcggctgcgtcttgaagtgggcaatgccgctcagggtaccactctctaccctgcgacgatggctgatattcttgcaggtatgaagagccgtgagcaggcaataagagactggtcagaaagaaaactgatcagaggggcgtttcttgcagcctgtctgggaggcttcaaactgataccgaacttagtcgcactaccgctgcgaatatcacttaaatttgttattacgggaacaaaagtggcctgggcgtcccataaaggtcgacaggggatacgtggaggtgaaggtgatgtcagggatgaaatcgccgaatacgcaaaggaaagttacaaaacggcggccatcaaaatcgtactctcgcttcccccggggctggcaatgacggtcggggccgcctcgattgcgtgggaggtttacgaaggtggcctgaaaggtgcaggggaaaagatagcgaagaatattatcggggaggcgccctggtatgctcttgatgtaggggggagaactgctgttaatgcgtacaccacgacattggtagatgatgcggtgaaagaagcagaagagcaagaaaatgacgaacagaataagattaaaaataagtcgcctcagggagaaacagtagaaacactcactcggttaagtaccagggatgaactgttacgtatggcaggctcttcagatacagagctgcaaatgctggctacagagttactgaaacaacgcgatattgatactatccccttgtggcgtacaagtcttaagagccgcagcttttatagcctatctgagcgctcgataaaattgggtgctgacgcctctgattgggaaatactgcatgaattggctcatgctctgacggcacataagatcctctatggcctgaaggcccctcaatcagaggcggggctgtatgttgtacagcttaacgcattacgccagaaggcgtcagcgagttatcagggtaaggatccacagacactatactatttgaacaatattaatgagtttgtagcagggctgtactcaggaaaccgtgattttattaaccatcttaggactattgatgtggagggcaaaagcatcatcacactcatagtggagcttattgcacaactattgaatgttcctccagaacgggagtgcgccttaagtaaggcgatggagctgagcgattcattaataaatatggaactggatagcaccgaggaaagtgtggagggagtgctatttgcagaaaatgcacaggaaagcacaattagtgttaatcttgcttctgtaaatgaagaagaaaggaagaaaacttctctggaggatgacaggaaatattggaaattaggaaatgttgttgcaatagataatatatccggagatgaacgcaaaaaattagttgcgtggcttgccggattgaataatgaatcaaggagatactggttttcaacaaggaattttttaaatggacttgataccatttttaaaatggaccttgttgagtttcactcaatttatgatgatatggttagtggtagtgatcagattgaatggcttaaaaaatttaagggatggaataatgtccgcactccggaacttaagaatgtcgtgggaatgatcagggatccagtacctgcaaaaatttttccttccggacagagttccctgtttacgctgaaagatgataaagggaatattttattttcaaaaaaatacatacctaagggagaccctgaagccattaataagcctgacgtgtggaagctgaatatactatctcaaattgaagatgatatgaaaattcagccagactctaaaaagatttctgtttataatatcgaaagggacagctatagttctgataatcccgtattcattcccggtgcagcatttggacggaacgtgttcatagcacctgctgggagtatgattaaaaatgctgagtttaagtttatagactcaggtgaaaattataaatatgccattcagtccataacatttcatgaaattcaggatgaaataaaaaatctcagaaatgaaataactctgttagaggttaaattgaatgggagagatctaagtgactatccttcttataagtctgaacaagatgtgaaagcaggttattattgttatgaaggtgtaagttatcagacaagtgaaactgatgattacccatacgtttacaaaaagactgggatgctgctatcaaaatttatcattagaagaaaccctgttaaagtgagagagcatgataaagagcagaatgaaatattgcagaccaaaatcagaattggtgagctgaaggagaaaattaaaaactgtaatcagttagctgcagaggtgaaaggattagcgcttgattggtatttaaaccgggattctggtgagcattctgaatttatggttccgagggttgacgaagtaaacaataatcaaaataaatactgtataataaaaaaccataatgggatgtatgagttaatgcctcttagtaaaacggatgatttaaacgttgtattaaacgtaaaaataatggatgtagatgataataccacagggcacaaaagaatcgttgttgttgatgatgaagatgttcttgataagtatgataccatggtcaatgtatggagaatcagtgaccacccggtagggggggctgatgatgatgtgggtgcctttgctgtttttggagaggactatccggaaaaattcatgctcagtgaatcggaaataataaaaattaattcatctgaaaatatagataaattaataaatgtgattgatgccaggttgtcttccatcaatattcgttcggtggatataaaagaacaattcgaaatgctgaaagcataccttaaggaattaaataaaaatgataattttaacgaaataagacatcacacactaaaaaataactatcatgatattatatttgcgcaagaacttgctgtgaaaatatctcaggaagcaagctgggttatggactcatccgggcgggagttgctggctgctttgatatataaagcagcatgtggtgatgatataaaaaaaatagatatcggttctgtgttaaatgagtatcaattaaaaaaagaaagtctgagtccgtataaaaaccttgccatccgaaacattcccgatggatatacaaggctccgtaatctaaaagacagcaattcttttgaattcacaaaagattttaataatcaattttacgattatcgggataaatacagtgatattgaagctaaggtttcagcacttacggctataaataaccttgacctgactgcagaagagattatcgacactccaaagagtgttaatacatacactttacttggcagggataaagcaaatttcagagtgcctgataacaaaggtgggcggcgtgatgcgcattcatatgaaaaaccttatatttatattccgggccggataacagttactcagctttcatccgggagatatattgtgcaggctaatctattagttggtgataaaacggttatcctttctcaggaggaaggcgataaactatacctgcctgaatataataaaaattggaacgcacctgtaaaatcctggaatattccatttatgggcgggcagaatattccatcgactcttcgtatcagcaataatgatgttaacggttcggccggaaagattgtcaatgccttatttgacagtgattgggataaaaatccgctaaagaatatttctgaaaatgatttcaccctttcaatggatgtaaaagaccgtagcagttccaatgggattacaagtggtgctgatgccttatatcgcggttttagagcaggattaaatgccaatgctgatacgcttcatggtattttaagaataaaatctgtggcccagttggcagctgaaactgtaattccgttctatgaaaaaatatataattcaaatactgacaaagaatttaaagctgatagctttgatgctttaatagagttgtcctttttaattcctgctgccaaaggagcgggagctgtttcaaaaacagccaaaaaattcagtgaaacttcaagacgtatcattgcaaaaaatcgggcagccggactttccggtaaggcattatggcataaatcaatgtctcaaatagctccccttgccaggaaggcacttactgacagcgcttcagccatagggacagccgtatatgatgcaattgaacctgttccgcttaaagcaggagcaagtaaactgatatctttgtacaaaaaagggttgcgtacaaagccagtaaaggcactgacattaccggatagcaagttatcccctgaagaaattgactcctttgagttaatgagtgatgacacatataaagaccgccaggggcgtttttggatttttgatacaaatgaattctattctgtaagaaaggacctttcgacgggtaaaatattacttaacaatattaatgacaggctgattgaggttaatcaaattggtgatcgatggggaggagtagaaactggaaaggcctcaatttcggtaaaacctcaaacagagcagagtactatggcaccggtaagtgatgacgctatacttccgtcaaatgacaatcacaatagaggttcagtcttcgaagcaagtaccggggtcacctctgcaggttttcgttctgactgggtggttaaaaacaaagattttaccactacctcaccagataatagtggtatatataaaatcaaaaatgatgagcctcaaacgatgcaggattatgataattttatcaaaaaagatgatgtttattatcgtgttaaatttgatgaaaacaatcaaacctggaggcttattcatccatccaatcctgaaaatattggataccaggcgcctgtgcggcgaaataacgccggtgaatgggagatacacacagatgtaggattaaaaggagggtgtttggaggatttgttcgatagaactagatttcctggcaagtcacaacaattaaaagcatttactgatattgtagaacatgaagctaataaatggcctaaagagtcaataaataaaaaaattcatatgatatggattggaacaaacaatatatcggaaaaaaatattagcttatctattggaacagcgcaaaagaaccctgattacaatacatttgttatgtatgatagtgaaattccagggtatgaaaatgctaagaattttatgactgaaaaattcgaaggcagtaatgttatggttgctgatttcagaaataaatactacttgaatgaactgaagaaagagcccgtttttccttactatgaagaggccattcgtgataagaagtatgcacaggccagtgatattttaagattactactgttaaaatatgaaggtggtatatacaaagacattgatgatattcaagtgaagggatttggagatttggaatttccaaagggaattggagttatgagggaatatgcaccggaagttggtaaatccacggctttccctaatacgccaattgcggcaacaaaaaataatcagataattaacagaacattggaaatggcggcggaaaattaccgtaatggagaaacaaacgtcttgcagttagcgggacccaatgtttttactcaagcactctatgagactatacccggaatgaaccctaaggttttaggccggcaattggagcagttcgagcaggcaaaacgaaaagtattgggactgcctctggaaaaaaccaagaattttgcggatgaacaattgacattgcaggaaaaatcgaaaatcagtcgtccttatgacgatatgcgagggttatccggatacgttgagaatggagcagaccattcttggactactccaaagaaaaacataactaataacgatacaccgtctacatcgacacaaataatagaaggcaatcccagtagttctgatttattaatagaaccagaactcaatgtgcacatatataatactttatccgacattgaaagtggcataattaataatacctattcactattaaagacaaatttaggaagtaaatatgatgaatttttatctaaacctcacgaaaaatgtgcaaatgctgccactgaagtggcaaaagaactgagacagaataattacactgaagtcaaaatatttgagttgggtatatggccaaatggtgggatagatactatgcctaccaatcattatgttgttatggccaaaaaaggcggtgtagagattgttgttgacttaactgcgggtcagtttgagcgttacggattcactggtaccattattgacacaaaaaacaactggatatctctatggaaaggaaatatgaaatctaaagaaagaactttggtgaaacttgcccccctcagtggagggattacaacatctccatttaatatggattatgtaaaccctcaaaaagtcgtaccaaatggaactcttttacagcgcccgacctggtataaaaaagatgtaaatactcctacgatcaatcccgatgtaaaaagtgccgatgttccttctaatggtattcaggataaatcgaaaatcagtcgtccttatgacgatatgcgagggttatccggatacgttgagaatggagcaggccattcttggactattccagagaaaaacataactaataacgatacaccttctacatcgacacaaataagagaggggaattccagtaattctaatcagcaaaatattcccgcgacaacggtatcttcagaaggcaatactacattgcaagtgatatctgaggctgatttaaatattcgttctcatttaccagaccgttcatcaattgatttgaatatcaatgaggatccggatacacaccatttgccaaatagtcctgataaggattctgtcactttctctccagaccatgaacatgcaacaagtgacacatcagacacatcaaaatccggacaaactcctgtggttccgacgctgcgggaattgtccaggcaagccgcggctcctaccaggaactacggttcccgtgatgttgtagaatattcaggcggtattagccagattggaggacattcatatgctgctggctatgaaaaagcagatgctttactgaccagcaaagacggcaaaccgaaggttcccccgcactctttaactctgggggaagctgcggataaagtgctgtcacctacgataaataaatatcatccaaaagaacaacgcagagcgtcaccacctcctggtcctaacgcggacatgagtggtctggttggcgttcctgcgcacggcacatcagtcagattcaatattccgttggaatctgatgtagatggtaatgagattttatatcgtacgatgtcgcccgaacatgccctcactcttcgtgaaacaaagaagttaagtccaacgacggaaacgtcagttagtccggccatgtcttattctgagggatacaatggagtgctgatgcgtataacagtaaaaagcggcaccatagagcagttgaaaaatattggtcgaggggttaatccttcagctcaaaaaacacaaggacttcctaaaattgaatcgggatggggagataaatatgctggatttaagcaggagggtaatcagacgacggtacatttaggtacgggggctgcactagatatagtaaacgagaatatcgtcgccgttcacgaaatgaaaataaaacatgagcatagtgcttcgttaacaggtagctcttctgatagtagtcaagcggcagccattcctggcccaaatgaaccgggagtaggagtgaatccttaa

SEQ ID NO: 280636 - DNA, 882 bp, Morganella morganii
atgtctgattatcaaaccctgctagacgtgaataacgcgatgaataagatactgcgcgcctatgtgaatgaggacgtggcaatccgctttgatttaccggatgtgaataccacgcagtccgatgccgcaataagcgtgtttctttatgatatccacgaagacctgcaactgcgtactgccgagtcccgcgggtttaatgttggcacaaaacggttgtcacccggctgggtcaacgtgaagtgcaattacctcattacctattgggaatcaaccggccccgccacggatgccggcaacccggacagtcagcccgacaaccaggccataaaagtcatgtcacaggttctggcggcgttgattaacaatcgccagcttgccgatattcccggggcgtatacgcaggttatgccacccaaagaaaatctgaacagcctgggtaacttctggcaatcactgggcaatcgtccgcgcctgtcgctcaactattgtgtcaccgtaccgattagcctgagtgataagggcgaagaagtgactccggtgaaatccgtgtctgccactgttgagccaaaagcgcccgtttctccacaggccatttccgacgtactgcgggagaaattaatgggggcgctgggtggtggtgatgatgcccgcctggcgatgacacacgttaatctggatgcctcaccggttgccgcgtcaaacggaagtgtggctgacatcagtgtgtctctgcgggtgtccggtatgacgcgaacagaatacgttgcccggatgacccccgtttttgaagaatggacaaaggatggggctgcggcggtcacgccggatggctaccttatttatatcactgcagttgataacacagacctgacagagatttaa

SEQ ID NO: 280637 - DNA, 2091 bp, Morganella morganii
atgacgctttcttcagcacttcagcccgcgtttattccgcagggtgattgccagctatcgcttttatttagcgagctggaacgtatcgatctgctggtacagcattattattaccgccattcatcgcatcacgaaggccttcatgcgtttctgctcagcgaagaggaggtggaggcgcgtatgcaacacccggccggcaggcctcattgggccgctgtcacgcagtctgtataccgtgcggaaaacgaacagccattgttggcagaaggcttaacggacctgattgatcgtttcgaactcaccgactttgaacgggacacggtgctattgggattgctccctcattttgacagccgttattatgacctgttttcccggatccagcagggaaggcaaagtcagctgcccagtttttcattggccctctcgctattttgcccttcagacagggaaaagcgggcacagcaagccagttttctgcctcaggcgccgttaatgtgttgtcagctgttaacgattgaggagaataaaaacaatccggcctggagccaaacccgctttatgaccgacagcagtgtgtaccattttttactcgggcattactatttggcaccggcgttagcatcgtgggcggaatggtcagcgccgccagtgctgccgttttatcctgccggcttaaaagacgcgctggccggcgtgttactgactgatgatattgagccgcgccccgtggtgttgctgcgcggtatgccggggagcgccagagcccatgcggtgtcgggaatttttgcttctgaaaaccggcagacgctgcagatcgatatcggtaagtgcaccgagagtgatgacgatgcgctgttactgcatttaacctgtctgatgcgcgaagcccgtatgcgcggcgcgggcatggtgatccgcaacctgcaggcacggatggaaaagagctcgtcactgccggagaggttgtctgagcaactgaaccagccgggattaagggtggtgtgcctgatcgaaccctatgctccgccgttatggctgaaaaaaacgcccaccctgcagacagcgatgccggtgttgacgcaggaggaaaaaacgcacctgctcagggattgcctgccggagcgacgtgcggcagatatggaccttatcagtctcagccagcgctacacctttaccccggaaagtctgccgctgattatgcaagaggccgaactgtaccggcagcaacgtgaaccggcggatgttctgcaacagtgtgatattcgtcaggcgctcaatttacgcacccaacagaattttggcgcgttagcgcaacgcattacgccggggcggacattaaatgacctgttggtatcagaaagcctcttgcaacagctccgggagatgttgacggctattcgctaccgggaaaaagttctggccggtggttttaaagataaggtgggctatggtgtcgggatcagcgcgctgttctacggcgattcaggaaccgggaaaaccatggcggcggaagtgctcgcccataccctgggtgtcgacttaatcaaggtagacctctccacggttatcaacaaatacattggtgaaaccgagaaaaacctttcccgtatctttgatttggcagagcaggatgccggcatcttgttctttgatgaggctgatgccttattcggcaagcgcagtgaaaccaaggatgcccatgaccggcatgccaatattgaagtttcttacctgttacagcggctggagaatttccccgggctggttattttatccaccaataaccgcagccatcttgacagtgcatttaaccggcgctttacctttattacccgctttgcttatccggatgaaacgctgaggtatagcatgtggaaaaaaatatggccaaaaaatatcaaaatctcaccggacgtggactttgaaaaattagcgcagagagccaatattaccggcgccaatatcaggaatattgccctgctggccgccttctttgccggggaaagtgacagtcacgaagttcgtcaacatcatatcgaaacagctttgacccgtgaactggctaaaacaggacgactgtctatttaa

SEQ ID NO: 280638 - DNA, 1320 bp, Morganella morganii
atggtgacatccagtgccgctgaatcaagtgtgttacctggcgggtatcacactgatggtgaggggctcatccatcttgcacgttgctgtctgacgcctaaaatgtttgagacattattacaggatagtccggcatgccagcttcagcagtttctaaaaaggctacttgaaggagcatggcaatccccgaaaatgctgccggtatgttggtatagccgggtgaccgccgaccggttgtcgatagccgccatattgtacttactcaaaagtcaacgggggcatgattggctgatgcatcagcacgcccctgccgccagccaggtgactgactgggcaaaggcgattgatcagggagaggttccccccgaacaggtcgaggagttactgatcggcaatcggccttccgacagcatattgcccggacaacctgcctatcccgctctgatcgtgatgcgttggttgttgccattgtggcgacaaccagccgtgcgcaaggtgattcatcgactgaaaggcgggcggggtgtgcagcgccttgatgcttatcttagtcactgtttacaacgccaggatgatgtcatgcaggaagaaaaaaggatgcactcccttcccgatcaaggcgcatcactgcaggataatacggtgttatctccggacgggggaatagagtccagcgctcagcaggttgtgcgcccggagtataacgccactctgccgcagcgcgaggaaatcccggcgacatccagaggcactatgcagccagggaaaggtggcctccgttcgccgggtgaatcacgctcatcgagtctggggatcagcaacgccggtttgcttctgttgtggccgctattgccgcagctgttttcccggctgggtctgtgggaggaagagcagtttgtcagcgatgcggcgcggcagcaggctgtgtacggtctcgaccgactggtctggggagactttgaccagccggagggccggttgacgctgaatcaggtgttatgcggggtgtcgtgttcaacctctgtaccgccgtcgataccgcttagtctgttgcagctgcaacagattgatgactggctggccgctatcggccaacaacttcccggttggcaaaaattgagtctgacagacattcggcaattgttcctgcagcgggcgggtgaaatcagcacggaagggccagtcccccaaatcagtgtgtggccggaaccctatgatttcttactcagagactggccgtggccaatgacgctggcgtctttcccctggactgaacaaccactgaccatcgtctggccgctaaacggcttcacaggataa

SEQ ID NO: 280639 - DNA, 1578 bp, Morganella morganii
atgacggataaaaccccgcaggacaaggcagaaaacccggtaaataccccgacaacctttgccggtaccacgaacacggcgcgtgagggcgagccaaagagcagagccttaccccaggttgatgagttgaaggcgcgctttcaggcgggcagtattccgctgcagacggactttgctgatttgattgacatggcaaatattggtcgtcaggcagttggggatgaggctcgaggctttggactgacaaaagataacaaaaacagactgtattttgatccgagtaaaatcgcctatttaaattatgatctttccccaagtaaaaaaaatgaacaaataacgttaaatgacatctattcaggtgtgataaagaatcataaaaaggtggcacttctcgcattaaacgatcaaattggacctatttcagcgaccaagacccaagttggaaattcaaccacgtataccgttggtgctgtgaaaatagattcgaatggagttagaagttatcagtcggttaatattattgccgacaagtcaatcggaaaaggctctggtttattaccctttgagtatgtgcagaatacaggtgcggactattctttttggtataggtttactcttgacacctctgttgaggactttagtaactgtacactggttatcgatccattgactctgttcgtgaaacatattacagatttttccaccctccctcttgatggtgagattatctcgttactcaacgtcagctttatctatcatggcgtcattatcggtgatggtcttcagaaggataatacgaaaatttcagctaaagttgatgtgagtaaaggactgcaagtaaacagcagtggtattggcgtttactcaggaaatggtattgcggtaaatagcagcggtgtaaacgtaaaactggcgaaaggttcccacactaacagtgatgaaggacaaggtgaaaatgggaccactgatggtaatgccggtggactggtgttaagttcgactggattgtccgtagatgcaggggatggcattcaaatcaatacgcgaggcgtaagtattaagctggccaccaatagcgggctgagtgccgatgagacgaatggtttgagggtagtgccagagcaacaattccagagaggaatgattataatgttttctggcaccagcgcaccttctggctgggtattatgcgatggaaataatggcacgccggatcttcgcaataaatttattaaagctgcaagtggattttcaacctcggcaggaggaagtaataccgtaggttttacgccgaaaggaacggtaagcgtagacaaccatacacttacgatcaatgaaatgcctaaccattctcacgagatcttaaaacgcttcgacgacatttatgggtcaggtctttactatccatcaatgggattgacttcaaaagattctacggcttcggattttatagcctctaatctcagctattcggggggcgggaaggggcataatcacacagcctcctttaagggggaaacaagcagcattaaaattgaaccagaatttttttcattggcttttattatgaagttataa

SEQ ID NO: 280640 - DNA, 2898 bp, Morganella morganii
atgtctaaagaaaacgccctgttcccggcggtgaaggacgcgattgcgtttgaggcgctgtggcaacaggttcacgaaaaagtcactgcgctcagtggtgatatctggacggataccggcgatcacgatccgggtgtcaccctgctgcagtccgcaacctggaactgttctgacctcagttaccgcgcgtcgctgccgctgaatgacctgctgactcatcaagaccggaagccattgtttccggaagagttcagtcctgaacaggtactcacctgcaacatggtgacggcagaggattaccgccgggccatactggacctgcacagtagcgatattgacaccctggacaccgatgagcaggattttttattcagcgatgtcagcctgacgcaagaacctgaagcgcaccgttttcactggtggtataacgcggaaaaacgcgaatacagttttacggagccgacggtcacccggcctgaagataagaagatgttgtttctgcgggggaatcagtggctgacgctggtcccgacccgctatacccagtccctgtcatccgggaaccgggcggcagtggagcaatacctggtagaattccttgcggatcaccgtaatctcggcgaagcggtatcgcgctttacctggttgcaaccggcgacctttagcccgcagatgacgattgagctggccgataatatcggcgacatcaatcaggtggcggcgcagatttatcaggttaccgacgcgttcctgcgcccggcggttgtccgttataccaccgaacaacggcgtgcgttcggtgatgccgatgatgccattttcgagggaccgaagctgaaacacggctggcagcaaacggcaccctcgcagatcacctccggggggtacgttctcaacctgggcccgctggtgaacctgttgctggccatcccaggcgtggcgagtctgagcaccttgtcggtcggtaaaggcgatggccacattacggccgttaccggggacaactggcgctggcaggtggctgacggttattaccccctgctgtggggggaggcgccgctgaggctgctggcgggtgacgatagcccgttaaccctggtgtcgaaaggcggtattcgcaacacgctggagagtgaggcgatagcgcgctacctgacacaggcagacctgattgaaacgacgttcacggtgttacccgccggccgctttcgcgatcagacgggctatattcccgtcgggcagcgcctgcccgaatgctatgccctgcagcagcccgatgccgtgattggcgacaagatacgcgcggtacaccagtttttgctgcctatcgaccaactgctggtcgacggcgcggcagagctggcgcaactaccaaccttactggcctttaaagaccggggtgacgtcattcgggggacccgctggccctatacgaacgcgatggtgcaacaggctattcatcagccctacgcgaaaacgctggaagcgattgcgcagcaggatgcagctatcttcacgcagggtaagcagtctgtggggaccaattttgcccgcgaactggattttattcagtatcttctggggtattttggcacccagcgggccgccctgccgctgacgctggatatggctgattttctggcgacgcagcgtgcgtatctggcgcagcaaccagccttaggttacgaccgcattaatatccgtattgaccgggtctccgccctgcaaaagcgtattgcggcgcgcatcggccttgacagcatctgctttgcggataatccggacctgagtcaattgccgttttacctgattgagcatcgtcaactgctgcccctgactccggacagcacctttgacagtgaacaggccccgtctggttttgtggtggccgggtctgaaattaccctgacgaaggcgggtagtgtcggcagggtggtccaggggcagcttatcgacctgattgcgattgagggagacagtcggctgcatgtcaggcggctgttggttattaaggccgacggggacagttttaccgtcagtacggaaaacagtcagcaactgcacaatactctgtcacggcttgaagcggcctgggcggctcacaacctgctctggaaaaacagcaatgtctggctgcaggatatggattaccggctgaattatgccgaggcaaaactgcaaccggctaatccacaacagcgcttactggcgagtaacgcgcaaagcccgtaccccgtcatggtcagcgtcggggacaacattgtcatacgccctgccggcctgcagtttgcccagccgggaacgaaggcctaccgcgcggctaaggcggatacgggctggcagcttgcggcgaccgtgaaagccgtcgacccgattgcgggcacgttacttattgaaaaaactgccgacagcaaagaggattttccctcagctgagaacagtttccgttatatgtgggcgtttagccatgcaaactatgcaacaacagaccggttctcctttgtggtcagcgcggtacttaatcgccgtctgattgagagccccaatatcgtgcctgaccagttggttgcctgggtacaggaaactatcatggcggagtttccggcccacgtgtccctgattaatcactggcttgatgaggccacctttaacaactttgggatgacctatgcacgctggcaaaacagcggcatgccgctgggtgatgatgcctttgcgctgatgcagatgctgactttaggccatctgcctgtgacccaactggacatcggcctgatgcgcatcgccaccgaggcacagcgcaccgaggttatcggtgacggcagccagtggcacgaagacgttattctgcgagaagagctgctctacgtgccacaagacgtgccaactaccctttaa

SEQ ID NO: 280641 - DNA, 1818 bp, Morganella morganii
atgtctgacctggagcaactgaaacagagagtgggcaacggattaaccgaccagactttcctgctggagccacgaacagggaaggacctgcttaatctggtagcaaaatatgccgaagcggtgccctttgccggccatgccgacgctgactggaaagacttctggttggccggctacacgccgcaagcgctgagtgacatttatcagcgtcccgaactggcagagaaaacgctgccggtacagcaggcgttcctgctggcgctgctgcatctgctcgagacacccaaagctctgctgaatacggtgccgcaccggcaccgctcactttactaccggaatttattgggattttctccccgtgccccgcagccggacagcgtggcggtgagctttatgctgcaaagaaatgcgtccccgtatgcgttacccgccggcagcctgctggatggcggccaggacagcgcagggaacagcatcacctatcagactgacgacagtctgctaatcaccggccagcaacttgaacaactgtgctggacggctcgggttggggatacgtggaaacggtataccgccatcgatactgctgcaggcgttacgttgccggctgaagggttgcgtctttttaccgaagcaggggaaggcgcggatacccaagagaaaacctccgtgctttatctggggttcagtggggttgctgcgcaggataccctgtcggtttactggtctgtgcgcgcctcatcggcgttggatctggcctggtgttattacaacggcacagactgggccccgttggatgcggagctgcaggatgagacggcgggcctgtccgtcagcaacctgtggcgggcacggctgccggcggacagtgagccgggctcgccaaagaatgacggtctgcaggaggccgggtattactgtatcaaaggtacgctgaacgaaaagaaagcggcaaaggacgagagcgcacccgctggggccataccgaaactgcaggccgtgctggccaatgcgatgaccgcgaccctgaatatgacgcaggcgatagatgacagccactttacccagcccttgcctgccaataccatcagccagctggttacaccggttgccgccatcagcgacgttcgccagcccctgccttctgtcggcgggcagccacgggaaacggaggctgcgatgttgctgcgcgctgcgacccggataagccaccggcagcgggcgatcacctggaacaatatgagcagcctgctgatggagcattacccggagatttttgatgtccgttttcccgatgtggacaaactgagtcgtctgccggcgcctgaggtgcaatcactgatggttattcctgacggccgttatggtgacaacgatgacgtgctgcgcccggcgctcagtgacggaaagctgacccggatggcacagtggctggggcagtacacctcactgtgggcggcgccggcgctcaataacccgaaatatatcgatgtgacagcccgctatagggtgacgttcgtggcgggtattcatcctgattatggctatcgacagctcgcggcgcagttacaacacgactatatgccgtgggcgaccgatcggcgccaggcggtcacgccgggcaatcaggtgaactactaccggctgctggccacgctgcaacagtcaccgctggtgcagtccgtgaacgcgctggtccttattcacgacgttattgatgaaacgggcaaactcacctcggtggaaacacaaagcaccgtcaccgccagggatgacgaggtcctgattttatgtccgcaaggagagactgatgtctaa

SEQ ID NO: 280642 - DNA, 423 bp, Morganella morganii
atgagcaacctggtggtcattgacggtgatgcgctgatattcaacccgcagttggacgcgattacgataacgcctccgccccagccacagatccggggtagcggcgaggtgagcatcgaaggtaaaaaggtctgcattgtcggggatgaagagcaggtctcctttaccgttgactatatcaggcctccttttgtcgccgccccgggaaaagggacgcttaccatcaaagcgttggcgtccgatcagcaggctgcgtttgcgacggcgccggcaccgatgatcctcgtcggcagccagtttacgacgcaatttcagcccactacacctgcccaggatccgcaaggaaaaccggatacgaatctgaaggctgtcaccggggtggggacatttatcaacagccagacatttgtcaccgccgggtaa

SEQ ID NO: 280643 - DNA, 420 bp, Morganella morganii
atgagtaacgacattttgaccgcgaccctggggcaatgctgggcatttccaccgcagtttgagcccgacggagtgtccctgacggcgggcgttgaggcggtgatgcagagtctgcgcgtgctgtttatgacggagccgggcgaacgcattatgcgtgagagctatggcgcgggtatgcatgatttcgtttttgagaatatcaccgatgaactgctggccaacatccacaaccgcatcgaagagagcattctgcgccatgaaccccgtgcgctgctcagggacgtcattattcagccggggacacaggacgcgagccgtctgcgggtacagatcactgtgtctctgtcgggcacggatctggtcgagacggcggacgggacgctgaacctccatgacggccagacgctgaggttactatga

SEQ ID NO: 280644 - DNA, 1665 bp, Morganella morganii
atgaatcacatcaccctggacattgcgggcaagccgagcacattggggatccgtcgtttgcgggtacagcaactgatcaatgagatcccgctggcgcagttggagctgcgtattcccacggataaccatggcgcagcggatagcgcggtacaacgcgaggtcagccgttttagcctgggcgcccgggtggtgattgcccgggataacaagccactcttcgacggttatctggtgcaaaagaagatgcatctgaagggcaaagactggtccgtgcggctggaggcgcgccacgcgttgcagaaactgacgtttttgccccatagccggatatttcgtcagcaggatgacagcactgtcctgaaggggctgttgcagtctgcgggggtgaaggtgacgcaaaaagcggcggcgcagctgagcagcaaacacgatcagctgattcagtttcgcctaagtgactggcagttcatccgaagccggctgctgtccaccaactgctggctgctgcccgatgccgccggcgatacggtggtgatccgccccctgtccgacgcggcaactgcttcacggcggctgactcgcgacagtcgcgactatacgctgtatgacatcaatttgagttttgataatcgctttacgcctgacagcctgtcactgcagggatgggatattgccgcacaaaagctcacgccggcgcaaaaaagcatggccggcgcgtttcgtccctggaagccagaggagcagtccggtctggctttcgccgggcggcaggactacgccctggcgttcagcatgctgcctgaagccacgctgcaagccctgtcgagctcctggctgaactatcaacaaatgaccggcgtacagggtcacattgtgctggcggggacccgggatttcgcggcgggcgaaagcatcaccctgagcggttttggggcggggctggacggcacggcgatactgagcggggtcaatcagctgtttgataccaaagatggctggcgcagcgagctggtgatggggctgccggcctccatgctggagcccgcgccaccggtgcggtcgctgcatattggaacggtagcgggttttaccgccgatccacggcatctggatcggatcgccctgcatctaccggccctgaatctgcccgactcgctgatttttgctcgcctgagtaagccctgggccagtaaagcgggtggattttgtttttatccggagcccggtgatgaagtggtggtggggtttatcgacagcgatccgcgctacccaatcatcctgggagcgatgcacaacccgaaaaatacggcgccgttcccaccggatgaaaagaacaaccgtaaggggctgatcgtgagtcaggccgaccagacacaggcgctgatgatcgacactgaggaaaaaacgctgacgttgatggccggtgacaatgcgctcactttaaccggtgagggggacattgctctgcatacgccgaatgccctgcaactgcaggccgagggcaagttgtcaatcgcgggcaagcagcaggtggaggtcaccagcgagggagaggttaccatgcgtacgccagaagccctgcaactgcaggcagacagtaacctgtctatcaacggtaaacagcaggtggagatcaccagcgcaaaaattaacatgaaaaaataa

SEQ ID NO: 280645 - DNA, 690 bp, Morganella morganii
gtgagcttacttgaacggaggctgtcaaagctgaccctcaacgcctggaaagatcgcgaagggaaaatccctgcgggcagcatgagcgcgatgtataacccggagacgattcagctggattatcagacgcggtttgacaccgaagataccatcaacactgcgtcgcaaagcaaccgctatgtgatttccgagccggttggtctcaacctgactttgttgttcgacagccagatgcccgggagtactaccccgatagagatgcagctggcgatgttgaaatccctttgcgccgtggatgcggctaccgggtctccttactttttgcgcatcacctggggaaaaatgcgctgggagaataaagggtggtttgctgggcgcgcccgtgatttatctgtcacctacacgctgtttgaccgtgacgccacgccgctgcgggctaccgtgcggttaagcctggtggcggatgagagctttgttgttcagcaatcccttaaggcgcaaagcgcccctgaccgtgcactggtcagcgtaccggatctggcctcactgccgctgctggcgctgagcgccggcggggcgctggccggcagcatcgatccgttatctctggcctgggataacgatttggataatctcgatgattttcagtccggagacctgctgcgggcgacgaaagggggggaggcatga

SEQ ID NO: 280646 - DNA, 168 bp, Morganella morganii
atgaccgtcgaaattcgtgagttgattgttcaggttgaggtcaccgtgccggccccttctgctccggccctgccgtttgcgcagtaccgtgagtgggacgacgagcggtgggtggagaagattaaacaagcggtactggaacagctgcttgaaagggggcatcagtga

SEQ ID NO: 280647 - DNA, 453 bp, Morganella morganii
atgatgaatacacctgcgatatcccaccgttttctcgtcaattttttatttaacgacattcccagtccgtttgacatcgcgttccagcgcgtttccgggttgtcgcgcacgctggaagtgagccagtaccgggaagggggcgaaaatgcccgcaacctctggctggccgagcagattaaccatggcagtctggtgctggagcggggggtaatgaatgcctcccctcttacgctgcagtttgaccgcgtgttgcgccgggaaagcacgcagtgggccaacgtggtgataatgttgctaaacgagctttcatcaccggtgaccacctggacgttaagtcatgccctgccggtacgctggcaaatgggcgacctggatgccggcagtaaccaggtgctcattaacacacttgagctgcgttatcaggatatgcgcatgctgggggtaaaactatga

SEQ ID NO: 280648 - DNA, 1260 bp, Morganella morganii
atggcaatggttcttcctggggttttgtacgatgaaacgctgttaacgcaggcgtcaaacgacgatccggtgacgatgcccctgtttattggttataccttccctgatgtggcgataccggtcacggcgatgcagcccgtcagcgtgggatcactgacgcaggcgatcgcccactttggtcaaggtgggacgatggcatactccctgcgccacttctttgagaatggagggcggcagtgctacgtgctgtccctcgggccagggcagggagaaccggccgcgcgtctgcgcgcactgattgccgcattacaggcaccgcagatgctggagacgctgttggcggatgataagaccggcctggtcctggtaccggagctgagtgagctcaatgagctcaatgagctcaatgaggtgaatatgttcgagggcgggggtacggctgaggttgatgtcggtgccctgtggtatcagggctggcaagcattactgacgctgtgtcgtcaggccccgcagcgctttgccctgctggagttaccggactccccggcgcaggcggtgaggctggccgggcaatctttttccgcagacttgtgccagcgcggggcagcctggtggccacggctggaaaccagttacgaagatggggcgtcggcggccgttgtgttgtcccccctgccggccgtcgcggcggccattcagcacagcgcccacaataacggggtctggaaggcgccggccaacctcccgttggccaaaacccgtcgacccacccaaagtatcctgacgtctcaggcgttgctggataatcagggggtgtcctgcaatctgatccgcagttttgccgggaaaggtgtgcgcctgtggggatgccggaccttgctcaacgaggataatacggcctggcgctatatccagacccgtttgctggtcagcagcgtggagcactacctgagcaaactggcgcgcgcttacctgtttgagccgaatacggccccgacctggatgaaattgaagggccaggtctggacgtggctgcggcagcaatggctggcaggggcgttttttggcacggtggaggatgaggccttttcactcagtatcgggctggatgaaaccatgacacaagacgatattcgccagggcaagatgattctgcaggtccgcctggcgctgctggcccccgcggaatttattgctgtcagcctgacgcttgatttgcatgacggcacggccagcgcgcaaaccggaggccaattatga

SEQ ID NO: 280649 - DNA, 1365 bp, Morganella morganii
atgcctacagatacaactgtaccgggtgtttacattgaagaagatgcctcgccggcgatgtcggtgagcgcgggatcgaccgctgtgccgttatttgttgcgcgttttaccccgctcaagtcagaactggcggaagtcatcacccgcatcggcagctggctggactataccaccctgtttgacagcagcgtgccttcttccgccactgtcaccgtgacgtcaacggaggctgaatccaaagaaacgaaaaaagcgtcgtctacagcggcagcgcgcgacggtgaggcgacgaaacagtacacctatcagattaataagactgaggtcgttgaccagacagcctccgccgcactgcgcctctatttccagaacggcggtggcccttgctacctctatccgctggaaaaagcaaacgataaagacacactggccgcgctgccgggccttatcgatgaggtgggagtgatcacactgctggcctgtccggagcctgatgaggattatcgtacggcagtgtatggcgcactggccgcctcactgggtttgcacaaagggtacttcctgctggccgacagcgctaatggcgacgcgcctggtgcggtcagtggttccgcccaggtggcggtgtattacccgaacctggaggtgccgcatacccggacgctggatgataagcaagtcgctatcaccggctacaccaacgggacttcgacgaccatctccacgctggccgacctgcgtgccgctaacgccgactttgccggtaaaattgataaaaccctggttgaaaaacgaaatgctccgttgttggttacgccttccgctttgatggcgggggtgtacggcaagactgatcgtgaacgcggggtgtggaaagcgccggcgaacgtggtgctcaatggcgtcaacgacgtcagcatccgggtcaccaatgagcaacaggcggagctgaacccgaaaggcatcaatgttattcgtcatttcagcgatcgcgggctggtcgtgtggggcagccgcacgcagaaagatgatgatgactggcgctatgtcccggtgcgccgcctgttcgatgcggcagagcgtgacatcagaaaggctctgcaaccgatggtatttgagcccaacagccagccgacctggaaacgggtgcaggcagcgattgagaactaccttcaccgcctgtggcaacagggcgccctggccggcaataaggcggaagaggcgtattttgtacgcgtcggtaagggtatcaccatgacacaagacgagattaaccaggggcaaatgatcattcaggtggggatggccgccgtgcgcccggccgagtttatcatccttaaatttactcaggacatgtctcagtaa

SEQ ID NO: 280650 - DNA, 1065 bp, Morganella morganii
atgacagtgacaaccacttaccccggcgtttatctcagtgaagatgccgcatcgggcttctcggtcagcggtgccgccaccgccgtgcccctgtttgcgtatgacagtaatagtgccgttaccacgaataccccgattcagattttccgcaactgggcggaatttaccgccgtgtaccctacaccgttgaaagacgctttttataccagcctgagcctgtggtttatgcacggtggtggtaaatgctatctggtgagagagactggtatcgccgacgcagtggcgcaatatgatgatattacgctgattgttgccgcagggacgggtacccctgtttatgatgcgttcaacctggtggtgagtcagggttaccgtatttttggcctgtttgatggcccgcaagacaaaattgctggtacagataagccggatgaggtcatgaaagcctatcctacctccccgtttggcgctgtgttttacccgtggtgcaccctgacatcgggtgagacggtgccgccgagcgcggtcgccgcggccgccattgctcaaaccgaccgtacgcgtggtgtgtggaaagcaccggctaatcaggccgtgaatggcgttatccctatgttcgccgtcagcgatgattttcagggcacgtataaccagggtaaggcgctgaacatgatccgtacgttcccgggccagggtaccgtggtgtggggggcccgcacgctggaggatagcgataactggcgttatatcccggtacgccgcctgttcaacgcggtggagcgggatattcaaaaatccctgaataaactggtgtttgaacccaacagtcagccaacctggcagcacgtcaaagccgctgtagacagttatctgcacggtctgtggcagcagggcgcgctggccggcaatacccctgctgacgcctggtttgttcaggtcggtaaagatctcaccatgacccaggaagagatcaatcaggggaagatgatcatcaaaatcggcctggctgcggttcgcccggcagaattcatcatcctgcagttcagtcaggatatcgcgcaataa

SEQ ID NO: 280651 - DNA, 450 bp, Morganella morganii
atggctataacaactgatgaaattgcagtgcagtaccctattcctacctatcgttttattgtgaccctgggcgatgaacaggtaccgtttaccagtgcctccggtcttgacattaattttgacactattgaataccgggatggtaccggtaactggtacaaaatgcccggccagcgacaggtgcctaatattacgctgagtaaaggggtctttccgggcaaaaatgcgatgtatgagtggattaattccattcagcttaatcaggttgaaaagaaagacatcatgatcagcctgaccaatgaagccggcacggaagtgctggtcagctggaatgtgagcaacgccttcccaacctccctgacttctccgtcatttgatgcgaccagtaacgaaattgcggtacagcaaatcacgctcatggccgatcgtgtgaccattcagactgcctaa

SEQ ID NO: 280652 - DNA, 147 bp, Morganella morganii
atgaagaaagtacattttaccggggcgcagattgtcagtattttaaaactggctgactcaggtatgaagttcgacgggatttgccgtcagaacgggatcagtaacgccacgtattacaactgggaattgaaatgcggttgtgattaa

SEQ ID NO: 280653 - DNA, 864 bp, Morganella morganii
atgctattatctaaatttttaactgtttttatgaatacagcaacgaccggctcagtaaaagttactgccgaaaaaataaatgtctctcccgcagctgtcagcgcaatgataaaaaaaacagaggacatcttaaatttaaaactgtttttttatcaaaatggccggatgaatctgactgactatggtttatacctttacaattctgcacgtcaaccttatgatgtactaagtaatatagatagtgctcttaggagttcaatcatgttaacagtggaggtcgaagatgacatcttttttatggcggataaaattcgctaccacagcctaaaacacataaagaaaaatataaacataaactttcgtagtataaccgatagcactactagccctgacctcatcatcaaaggtcatcgaattaaggcagatgagtttgatttagtatctactatatcaataaactatatacatatatcccctaaaaacatttcacaatgccagcatgttgtgctagacaatgaaattacaagaacgacatataaaagaaaaatcctagaccacattaaaaatatgtatcctaattacatcttactgtacgaagatgatcttggagttaaatcccagtggtttaatgatggtcatgcaataatcatcacgcaagatattacatcgctccccttactcataaacaaagaaacatgcccttactcgataaaggaaaccccatttcatgtcccatcttatttctatattcataaagacacaactatagaaaaagtaaatataatcaatgagattataaaagatttaaaaactaaaacacgtaatcatgcatccccctccagtcgatctgtagtggcacagtaa

SEQ ID NO: 280654 - DNA, 654 bp, Morganella morganii
gtgcagcgcatacatatcctgctgcgccgggaaggctggctgattaaccataagaaaacccaccgtatttattgtcaggaagggctgaatctgtggacaaagcgcccccggcgacatgtcacagccgggcacagacaggagcgtccggcagtgaccgcagccgatcagtgctggagtatggatttcgttgctgataatctgttcaacgggcgccggattcgagcgctgactgtagacgataattttagtcgggaatgtctggcgatagaagttggacagggtctgcggggtgacgatgtggttgcggtaatggcgcgtctgaagcagttacagcaccgcgttcccgaacggtttcagaccgacaacggcagcgaatttatctcaaaggcgctggataaatgggcatatgaaaacggggtaacgatggacttctcccggcccggaaaaccgacggacaatgcgttaatcgaatcctttaatggcagcttccgtgacgagtgtctgaacgttcactggttcttgtcgctggaagatgcacaggaaaagatcgaatgctggcggcaggaatataaccggcaaagaccccattcctcattaaataaccagactccggaggaattcattcgaagtctgcaaaaaggtccggatctctga

SEQ ID NO: 280655 - DNA, 309 bp, Morganella morganii
atgggtaaagaccgcttacatgatgatgcaatggttgaaattttacgtgacgaccctaaatttgccaaagcatatttacaccaggcttttcttgatatagacgaagaaggcggacaagaagcatttttaatggctttacgtcatgttgttgaagccaaaggtggaatggcaaatattgcacaaaaagcgggagtttcaagagaaactctttatagaacattatctcccgcaggtaatccaacgctaaaaacattacgtagcgtggtaaatgctactggatttcaattttcatcattagttagtgcttga

SEQ ID NO: 280656 - DNA, 738 bp, Morganella morganii
atgtttgagcaatttataagtgcgcacttacttgcgccggaatatctgggatggctggggcaggggtttgtgatcaccctgcttatctcattctggacgattctcgcggcgacactgctgggttttctgctggtggccgggcgggacagtcagctcgctccgctccgctggtcagtcagtgcttacaccagtgtattccgtaatacgccgctgctggtgcagctgtttttctggtatttcgcctccggggaaatcctgccgcaggcgctgaaaatctggctgaatacgccgcatgaaattgaactggccgggctgacgctcgcatggccgtcatttgaatttatcgccgggtggttcgggctgacactctattccgcgccgttcattgcggaagagttacgggcggggattgccgggatcggacggcaacagaaatccgccgcgctggcgctcgggctgacaccgtggcagtccatgcgttatgtggtgctgccgcaggcggtcagaatcgctatgccgccgctgctcgggcagtatatgaatgtggtgaaaaactcatccctgactatggcgatcggtgtggctgaactctcttatgcatcgcgtcaggtggaaagtcagtctttgcaaacctttgaagccttcggggtcgcgacgatcctctatatcgccattattgccgtgatggaagccttcgggcagtggcggacacaacgggcactggcacaggggcattaa

SEQ ID NO: 280657 - DNA, 717 bp, Morganella morganii
atggataactggctgcctcctcaccggcgcctgcttcttgcggttatctgggcttttctgctcagcggtatccggcagaccgactggcttattgccggtctgtcgggtgcttttctgctgtttattatctgccgccgccgtcagttgggccgttcactgctgacggtgctgaaactgaatatttttatcctgtttgtctggctgacactgccgtggaaaatcgaaagccaggggatcgtgcagtcaccggcaggcgtgtttctcgccctgcaaatcacgctgaaaatgaatgcgattctgctgtttgtctctgcgatgctgacaaacatgacagatatcgatctggcgtgtgccgtgaagcgttaccccctgcccgacaagctgattaagctgtttattctgacgatccgctatatcgcgattttcagtgaaaccaaacaacagcttgaaacggccatgaaagcacggggattccgtaaagggatgaataagcggacatttaccatgttgtcccaattagtcgccctgctgctgatcaaagccatgcacaaagcggaaaccactgaaatggcgctgaaagcccggggtttttacgcgcgcccgtcttctgttaatacaaaaaggtttgttaatgacgtccccaaatcccctgattcaggtcagcaatctggttgtcagccgcaacaatgtacccataattcaggatctgagctttga

SEQ ID NO: 280658 - DNA, 1839 bp, Morganella morganii
atgacctcgccttatgcgctgtccgctgtcggactggccgtgttttccgcgttatcgtttagcgcttctgctaatactaaagatgatcagataattgtttctgctaaccgcttccagcagccggtttcgtccgtgctggcgccggtaaccgttgtgacccgtgaagagatagataagtggcagtcgaattctgttatcgatattctgcgtcgtttgccgggtgtggatgtgactcagagtggcggattaggtcagaacagtaccgtatcggtacgcgggacagatgcaaaacatttactggtattaatagatggtgtccgtctgaataatgccggtatttccggtcagccggacctgaatcagttcccggtggcactggtacagcgggttgagtatatccgtggcgcacgttctgcggtatatggctcggatgctatcggtggtgtgctgaatatcattactatccgggatgatatcggttctaatatcacagcgggtatcggttctcacggctaccagaattataccggaaccacccagcagcagattggcgaaaatacccgggtaacagccgcagcggcgtatacttattccaaagggtataaagtcagagagaatttaccctatagcagtggtgattttggttttatgaataaaacctactggctggatgttcatcataagctggatgatcgttttgcagtatatggacgcgcgtacggatttgataacagaagtaaatatttaacacctaatcaaagtagccgtgaattggaaaaccggacttatgatgctggtgttacttttaaccaggatgattactcctctcagcttattatgagctttagccatgtcaaagattacaactttgaaaatcgttatggccgctatgggcaagatgcaactctggacaactcaaaacaatattccgttcagtggggaaataactatcgtattggttatggcagtatcaatgccggggttgattatcaaaagcaggaagttgaacccggaacggcatttaccgccgaaagtaaatcagtgtcagatacaggtctgtatttaaccgggcagcaggaaataggcagtgtgattctcgaggccgctatccgttctgatcaccattcagaattaggctggcatacaacctggcaaaccagcgcaggctgggagttcattgatggttaccgggtgattgggtcttatgcaaccggttataaagcaccgaccatgggacagctatacgcttataaccccgtttgggatctgaaaggtaacccgaatctgaaaccagaggaaagtaaacagtgggaattaggtctggaaggattaaccgggccgttatcatggaaactcaatgcatatcataatgatattgataacatgattgatttttacagtgatcccatcacttatgcaggaacttattacaatattaataatgccaaaattaaaggggtggaatggacaggggaatttgatacctggattctccatcatcagatgacttatcagtatctggatgccagagataaagatactgacaagcggttggcacgcagagcacaacagcaagtgaaataccagttggactggaatatagccgacgttgatatgggagtaacttatcaatacataggaaaacggtatgacgacaggtataacaccagaaaactcggcggcgtcagtatttttgatatcaccgccgcatatccgatcactgaccatctgacaattcgtggtaaagtagctaacctgtttgataaagactacgagactgcgtatggctatcgaaccgctggccgcgaatacttcctcacaggaagctacaacttctga

SEQ ID NO: 280659 - DNA, 528 bp, Morganella morganii
atgtctgcatttctccgccctctgatgtgcctggtgataacctgcgcggttctgaataatactgcactggccggtgataccgtatcgctcagtgtgaccggcaatgtcctggcggctccctgtgatatccgcagcgacagtgtgaccaaaaccgtcgatctgggggacggggcaccggttcaggccggattgctgcaaaccccggggtctgccacaaaatggattcctttcacactgggactggttaattgcccggggggaacaacaaaagccacgattgaattttcggggaaaccggatgcagttaatcctgaagacttatatgaaaatacagggactgccgggaatatcgccatacaattgcagggagcggggggagagccgttcggaaacggtaaacgtttcaccggggacattgcggccggaagctatacgtataatctccgggccagggtttattctgaaaccggcaaagtgacggcgggaacaattcgtgcggcagtcacaaccacattcacctatcagtaa

SEQ ID NO: 280660 - DNA, 990 bp, Morganella morganii
atgattaacgttctgaaattatgtgtttttacgtggctgatgctggctttttcgctgtcttacggtgccacctgtacggcaaagccgccttttttggtgagtccgtcaaatattgttgttcagcgtgatacaccggtgggaacaaaattgctggaggttaatggtcccaatgcgatagcctggaattgcagtggttctgcttcatcaaatggtgtcggaattaagacatatggtcgttatgtcagcaatattggcggagaaaatatctatgcgactaatatccccggtatcgggtattcattcggaacccgggcgggtggatgcatttctgatgttcgttttttggggtataacgccgttagcggcagagaccagctaattacgtgctggacaaacggcttattgggtggggggactattcacgcccaggcctattttgcattttataaaacaggtaataccggctcgggcgcggttaacagcggaaatcttggtgtatttattaatgagctggattcagcctggcaaccagaagtctctgtcaatatagccggatttaacgtaaccacactggtgtgcaatatcaccacaccatcactgaattttccgatcggtgatatatcggctgcaaacttccgcggtggtatcggcagtattcctgcgggtacggaggttacccggaatttaggtcttgattgtgatgccggtgctaatatcaatgtgagccttcagggaacacagaatccggatgtcagtaacaccagtgtactgtcgttaagcggtcagggcagtaccggtgtggcacaaggggtgggcgttcagttgttatataacggggcaccgctggaattaaacaagcggctgcttctgaaaacctcaggcggcggcaaagaaaccttcccggtgacagcgcgttactatcagacgaaaacaaccgtgattccgggcaaagccaatacgtccgcaacactcgatttaacctatcagtaa

SEQ ID NO: 280661 - DNA, 990 bp, Morganella morganii
atgattaacgttctgaaattatgtgttttcacgtggctgatgctggttttttcgctgtcttacggtgctacttgtactgctcaggctcccttttcggtaagtctgtcaaatattgttgttcagcgggatgcgccggtgggaaccaaattgctggaagtccgcggaaacagggctgttgcatggaagtgcagcggttctgtgacatctcagggggtgggaattaaaacgcatggacgctttgttcagaagctgagcggaagaaatatttatgcaacaaatattgccggtatcggatatgcattggggactctaatagatattcccggttgtgatggaacagtgttttacctgggatacggtaatagcacaaatcagttaatggcatgcggaggtggtgcgttacttagcggaggtaatgcctattttcagccagaggttgcattttataaaatcggtaaaagcgattccggcaccatcaacagcgggagtctggggatgcttataaatgagttgcagtcggcatggcaaacagaagtctctgtcaatacaaccgcttttactgtaacaaccctggcgtgcaatatcaccacaccatcactgaattttccgatcggtgatatatcggctgcaaacttccgcggtggtatcggcagtattcctgcgggtacgaaggttacccggaatttaggccttgattgtgatgccggtgctaatatcaatgtgagccttcagggaacacagaatccggatgtcagtaacaccagtgtactgtcgttaagcggtcagggcagtaccggtgtggcacaaggggtgggcgttcagttgttatataacggggcaccgctggaattaaacaagcggctgcttctgaaaacctcaggcggcggcaaagaaaccttcccggtcacagcgcgttattatcagacgaaaacaaccgtgattccgggcaaagccaatacgtccgcaacactcgatttaacctatcagtaa

SEQ ID NO: 280662 - DNA, 2538 bp, Morganella morganii
atgctgaaagaaatctgcggtaaaaaaaagcagtttcagccttcccggctggtgtttttaatcactgccgtcctgagcggttatagtggtgcggcaactgaacatgattactttaatccggaattactggaaccgggaaatccgggcgcggggcgggctgatttatctgtctttgaatcaggtgaccaggcaccgggtgtttatcatgtcgatattatacttaatgatcagattgttgattccggaaatattgatttctcattatcagatggtcttctgacaccgtgtcttacggccctgcaattaaaagcgtggggggtgaaaacagaggctttcccggaattaaatacgggtgacacctgtacagatatcagcgctgttcctgatattcaggctgattttcaattcagcaatcagcaactgatacttcatgttccccaggcggcaacagaagtgcgcgcccgcggttatgttccgccggagcagtgggataacggcattacagccgtgatgcttaattacagtatcagtggttctcagcgcagggagcacggagacaggaataacgaaagcagtctgtatgctaatttgcggccgggtatgaatatcggcgcatggcgtttacgtcactattccaccctgagcagaaatagtgcggggcaaaataaacgggaaagtatttatacctacgcacagcgttcggtgatcccgctgaaagcacaactgacaattggtgacagtaccgcaccatcagacgtgtttgacagtataccgtttcgcggaggacaactggcatccgatgatgacatgatgcccgactcactgaaagggtatgcgccggtagtcagggggattgcccgcagcagttctcaggtggtgatacgccagaatggttatcagatttatcaggcttatgttcccgccggggcttttgaaatcaccgatatgtacccgacagggggcgccggtgaccttgatgtaacagtcaaaggggatgacggtagtgagcagcattttattgtgccgtttgcctcactgccggttctgcagcgtgaaggacggctgaagttttcggtgaccggcggacagtaccgttcttatcattcccgtacagataaaacccattttgctcaggtaacgggtatctatggtttaccccgtggttttacggtgtatggcggcatacaggagtcaaaacagtaccagtctctggcaatcggtgccggtaaaaatatgggcggacttggtgcgttatcctctgatgtcattctggcccgcgctgtgccggcgttacaacaacggcagcaggggcagtcatggcggctccgttacagtaaaaacttcgcacagaccggaaccaatttcacgatcgccggttaccggtattccacgcgtggtttttacgccatgcaggaagtactggattcttacgggaataaccgtatagcggcggatcgccgccgcagccgtgaagagctgacgttgagtcagcaactcggggaaaacctgggatcgctgtccgtcagtgccgttaaggaagattactggaattccggtaacagcatgacatcactgagcgcgggttataacaatacgcttggcggcatcagttatggtttgctctggaccggaagccggaacggccgcggcggtggcgtaaacggtcgtcccgtttatacgaatgaccagacattcgctgtcaatatcagtattccgctgaatgaatttatgccgcagacatgggcgaattacagtatgaataccgatcagcacgggcgcgcggtacataccgccgggatcagcggcgtggcgggtaaaaataatgcactgagctggaatattcagcagggatatggttcagatggcgctgactataccggcagtatgaatgccgattacaagggcacatacggggaagtaaatgccgggtattcctatgacagaaacagtgaacgcctgagttatggtgtacagggaggaattgtgatgcatgaaaacggtatcacattatcgcagccgctgggggaaaccaatgtgctggtgaaagcaccgggagcgggcggcgtcagtgtacagaatcaggcgggcagtaaaaccgatttcaggggctataccacggtcagcaatgtgatggcattccggcaaaatgatgtgatgctggataccgaaacattgccggacaacgccgagccggagctgacaacacagacggtagtaccgacacggggcgcgttggtcagagctgattatagggtcagtgtggggcggcggttgttattgacgatgacacagaaaaatggtcagccggtgccgttcggcgcagttgtcacaaccgtgagctcagaccggcagggagcgattaccggacgtgacggacaggtgtatttaaccgggataaccggtgatgaaaaattgtatatcacatggggccctgccgcagcagaaaaatgcactgtccggctgaaaaatatatctgagggtaccggcgtgttacaggcagatgaagcttgtatttctgacaggagcaataatgattaa

SEQ ID NO: 280663 - DNA, 675 bp, Morganella morganii
atgaatgtgtttataaaaatagcagccgccatttctcttttttatttttccgcagccaatgccggtgtcgtgattggcggtacgcgcgttatttatgaaggcaataaaaaagaagcatctattaatgtcagtaatcaggactcgataccttatcttattcagtcatggattgaatcacctgataatcatagtgaaaaaccaccgtttattattacgccaccactttaccggctgaatcaggggcaaaagaatgtggaacggattgtgatgacgggagagttaccacaggataaggaaagtctctactggctgaatattaaagccatcccgtcctctgacccgaaagataatacattacagattgccgtgaaaaccagaatcaaactcatctaccgcccggcagcacttcatgattccttaccggaggcgctgacaaaccagcttagctggcactgtcagggaaatcagttggtcgtatcaaatccgacaccggtggtgatgaattttaatgaaattacggttggcgggaaaagtatcgcaaatgtcagttatgtactgcccggagataaaaatcactttgaattaaaggaatgtgccaaagggcatgaggtgatatttaaaatcattaatgactatggcggtatggggcagtctgttcattcccggattcaatag

SEQ ID NO: 280664 - DNA, 522 bp, Morganella morganii
atgaaaaaaatattatcagcgacagtcattggtattatgtcaattatacctgttgctgcctcgtttgccgcaaccggaaccattaatttcacgggatcaatcaccgataatgcctgtaccctgaaagggagcggtacagcaataagtgttcctatgaacaaactgagctctgcagattttgccgccgcaggcgatacaagtgcagcacagaaattcactattgtgatgaccaattgcccggcagccgtagcggcgacggttaattttgacggaaaaccggatgcttctgatcctgcactgctggggctctcagggtcaggaaccgtagcgaaaggcgttgctattcagttaatgtcttcggataaaacaccgcttccgttaaacacagccagtgttccgtattcattaaaagcaaccggcgataatgaattggtcttttttgtccgctataaatctaccgcaaagactatcgtcgcgggtgatgctaatgcaacagccaatttctcggtagtgtataactaa

SEQ ID NO: 280665 - DNA, 1167 bp, Morganella morganii
atgttcagaatcacaggctcaccctccttaccagcatctgtcagtacaccggacatattatccccccggacttcttccgataccgcagccgtattcccggggctgataacagaccggcaaaccgtcatttcacagacaggtatcgctgcagagcatcttgctccgcttcaggcattagctgaagagcagcaactggtgatcagcttccgtccggttgaggcaaccgcaaccggtcttatcagtgccggttatccgacaaagaattttaatatcaaaggaaaaagcgctaactggggaccgatggccggatttattccggttaatcagttttacagcaaactgtgcggtgagaaacataaaattgaactgatgaacaaaaaggttgcagaatgcctgcgggacggtcacgccaccgcaaatattctgcaaataaccggttcacgtattaacgaactggttgatatgggattacttacccgccatcatccggataaaaacggatttatcacgctcgaagctaagtcacctcataatgacacacataagttcaccgcaaaaccggcagcagatgatctctattccatctatgtacaggaagatgatacaccgatacaggttctctgtttcccgcagctaaataaaccactgacggccgactatgacctgatgattgtagctccccgtacagaagatttcggcagtcaggacattccgcataacccggatgtcagcgcagacgcatttgcggaaaaacgaccttatctgttgcgccgcgggtcgacaaaagaaactatccgccgggaactgctggagcgggaagatccccgcctcggtaataatacaccgagaatcgccgcgctgatcccgctgattaatgcgtctttatttcgtgaggacggtaaagaagtcgtgcatcacagtatggatgccactaaccctttttccgatatgagtgccaatttccctgtcaccttttttctgccggagccgctggacggattaccgaaaacgctgctggtgaacaatattgagggtttgcggacaatgctccatacgctggaatgtaatgacttcatggtaccgcataacccattgtggagtgatgagatcccgtcactgcaccgggagagttttgaaatgacccggagactatttaataccctgtaa

SEQ ID NO: 280666 - DNA, 147 bp, Morganella morganii
atggcacatccgatttatttgacgttaaccggtaagaatcaggggctgatttctgcaggatgttcatctgttgattcaataggtaaccgttatcaggccggacatgaaaatgaaattctgatacttaatttaagcgcagggcgttaa

SEQ ID NO: 280667 - DNA, 1929 bp, Morganella morganii
atgtcatatcaggataagaaagcaactctcgcagatgtgtctgccatcaaaattgataatccggtaggtaatggatttaccatggaaggtaaatctaatgatacccttatgggtactaaactgattaatatttttattggggaaaatagtgctggcaagagtcggtttctaagaaatatttttttaaaaaaaattattcaatttgatgttaattcaaaattcaaaagtgaattaagtctccaccttaaacctttacttaaaaacacctcacgaaatataagaagtcgttattttgatttattaaaatacaatatagaaaataacaagttatatttatttgacagcgaagtgtataattttataaatacattatttgaaaatgacttaaataaaataaagtctatgtatacaataactgaagtaatagaaaataggaatatggcactaaatcccaatttagccaacaaactagataatcttaataaaagctgtgaggaaatttcagggcaacttgaaaataaactttacattcccattttgcgaggtttgcgtcctttaatagaaaccgatgacacctacaaaactaggactataaatgactattttgtaaaaataaattataatattgatatatatactggatattcactttacgacgatcttacatatgcacttttaggtatggagtcagagcgtgaaaatataaaaaaattcgaaaattacttatcacttcatttctttaaaggtcaacagataaccctgattcctaaaaaagacaaaaaagatagtccaaaacaaaatgatgttgtctacatcaagataggtgacgaacctatgcttccgatttaccaattgggagatggaatacaagcacttattattattactatcaaaccatttttgacaactaaacctacgatgttttttattgaagaaccggagcaacatctccacgccggaatgcagagagcacttatagaagcattgcgggcatgtccgcaacataaatatttttttactacccaatctaatcattttattaacttatctatcgaatctcatgacattgctctattcagtgtcaaaaaaacactggatattaatcacaaagctaactctgtgattattaaccagcaggatcgttctgatattttaaaagaccttggtgtactggcttcgtctgttctgctggctaactgctctatttgggttgaaggaattacagataaactttatctaagagtatatctaaatcgcttcattaatgacctgaaagaaatatcagaatcagaaactcactcacctgaagaacgagaaagaaaccgaagtcgctatcataaactacgaagttttaatgaaaatttacattatgttttcattgaatatcaaggaagcaatattacgcattggaatttctttgactctgatgatgaaaaatccactccggcaaaaaaaataaataaagatattcttttgatcgctgataaagacatcaattccaaaggaactcgtgttgacactcttaaatctgctctgaatgataactttcaattattgaattataaagaaattgaaaattatattcctcagaaaatcattattgaaacagctgaaaaacgttgggacacattcaatggcaaaggaaaatgtagaatagatgcagctaaattacataaactcaagttcgataatatatctactggcataggaagaacactggagaaagcagttatctattcagatgacgtaaaaaaagatcgaaaattttttgaagataaatcaggtaccatcaaagataaagttaagttctgtgaaacagcctgccatctgatggaatccggcgagacagattgggaattaactgatgaactcagaacactgtgtgacactatctggaaatttatagaaaaacacaaccaagttcattag

SEQ ID NO: 280668 - DNA, 291 bp, Morganella morganii
atgattaaattaaataatttacagatagctcaaatatcaggtggcggaacggagcgtatgcctgataaaacacaggctaatgatgccggtatcggtatgatagcaggaacattaggagctgttgtctttggattgggcccgttgggggttgccgttggtgcagttggtggtggtttaggatacgctatgtcatctggaagtaacagtccgtaccgaccagagcctcagatgccggaaaacattgattttaatgatatgtactgccctaatcctgattacaattattattaa

SEQ ID NO: 280669 - DNA, 225 bp, Morganella morganii
atgaaagaattaattgattatgttaaaagagaattccataaggtttttgagattaaatttatcgcgatgatgagtagtttaatgctgacgccgataatgatatctcattcatctctgcggatagtttatcctgataattcaatgtgtgatgtatttcttgcatttattatttacatcggtattttttcatttaccaaaacaatattaacgcttctttttaaataa

SEQ ID NO: 280670 - DNA, 1161 bp, Morganella morganii
atgacgacatctcactccgcccgtcagacaacggcgcttcatattgcagtcagtggttttcttgcgctggtggtagccatgggaatagggcgttttgcttttaccccgcaggtgccgctgatgattgatgagcaccagcttgacctgacaactgccggtattgtggctgcctggaattacctcggttatcttgccggatcctttgatgccatgcgggcaaaacgcggtattgagttgcggctgtgggctggtttatggggtgcggtgattatcacactgctgtcagcggtgatttccggcgcggtactgcacagtatcgcacgcttttttatcggctgggcgagcggctggacactggtgttagcggctgcctggactaatgacgcactggcaaaactcaaccgtccggcactgagtgtcgcggtttacggcggcaccggcaccgggattttgctgtgcggactggcggccatcggtattcagggcttatcactgaccgcctcacagggctggtggatctacggcgcggcagcgctggtattcagtttgtatgtcagccgctatctgccgcgtccgggggagctgagcagcagcaattccccgcacagtaaacctctgatgaccccgaaaatccgccgtttattatggagctatgcgctggccggattcggctatattctgcctgccacgtttttatcgcaaatggcggcagcacgtttccccggcagcctgtttgctcagtttgtctggccggtattcgggatagcggcggtcgccggtatcgtggctgccattgccacccggcgtttttttacaccgcagaggcggctggcaatcaccctctgggcacaggcagcgggtattctggcggcggaagtcatgcccggaatcagtggtctggcagtcagtgcctttctggtcggcggcggcctgatggcggcggtgcagctggcattccagtgcgggcgcgaacttgctccggagcacggccgctatatggccgggctgctgaccacctggtatgccgtcgggcagctcggcggcccgctggtatcctcggtttcggcgtattttaccggcaaactggaaccggcactgtgggtcgcctgtgcggcactgattaccggtggtttgctgatttttcgtgatcgcagtagttaa

SEQ ID NO: 280671 - DNA, 810 bp, Morganella morganii
atgaacataggatttggtgttgaccgtgaaaatgaattacgcgtccgggccggaattgcagtcaattcattagagatcgcagcagaatctgtcgcgaataaacacttcagtgatccctttatcagggataatttcaggcgggatgtatctgattttatcactgcaaatatgcgtttttttgatagcaccagtaatgacagggatcgcagggaagtaatttataatctcagtgaagaaaaaaacagcctgctgcgacaatctaatgacctgacactgggtaatgctaaagtttatgtctctgcaaaaatagaagaaattaataataaatacggatatttagttgatggtatttgtattttgttgggaacaagccaaatgattgctggtggagtcatagttacaggctctttagcgatagcgaatccaattggggttgtgataggtgctcatgttgttttgtctggtgccagttcaacaatcgaatcttttcgccacttactgggtaacgagacagcagttggatttatgaaaaaagcctatatgagtagtgctgaattcttaggattcacacgtaaagaaggactgatagcctattacgctattgatggaatgacttcactctatggcgctgccagattgatcgtaaatcccagtgcaaggcgtttatttcactatatgccggctgaatatgtccggaaatttacaactctgggtagaactgaacttacactggaattcggcaaagctctttataagggagcaaatacgtataatattaaagaaagcgaaaccggacagtttgattactaa

SEQ ID NO: 280672 - DNA, 357 bp, Morganella morganii
atgaacgaagagaaaaaagatttgcaactggagaaggaactgctctcttgtggttttacccaaaatgatgtggttaaaatttatgaagcggctgatagcccggcaccccatgatgtaattaaaagggtcagagttttaagttcaacatccattgttatgtttattctgattatcattgctatgacaggaatgatatggactttggatagtgacgaatattttatgactgacttaatttcgtcagtagttgtactgattttaatggcatcagttattaactatatgatgccatttaaaataggagtgaaagctacattatttttaataaaattgaataaaaataaataccagcattag

SEQ ID NO: 280673 - DNA, 888 bp, Morganella morganii
atgggatataaatatgacccggtacgaaaaaccgtcatttcatcagacacaccgtatagttttgaacaacggcctgattacgatgaattaaatcatcaggcaacattactgaaaataaaatcaatactgggtgatacaaccgatgacgcgaatgtcgctgcgctgattacggttgaggaagctgagtatgttttaaaaaatacaaatacgtcaaacccctttcagtcagcaaaagagacattatttggtatcggtgatttcgtttccaattattccggaagcgtttacgaatcaggccgggttttccggattattaatgagtttaaagatctcagtattaaagcgacagaatataccggtaaaaacggtaaggtttatatccggttatccggccatgccggagtaagagctttcctgaacgcgacccggtatttagcagataatccgaaaatactgtatatgggcgtcggcactcaggggcaaaatgcggtttcaatcggcgccacccggttttcaattgtgtattctctcgcttaccgtgtggtcgaactgatatttaaagatgaatatacgctgacggatttttttgtgaatgtgacgatggatatggcaaagctggctgtaagtgtaaagctgggtgctatggcagtcggagtactcacaacagccagtgcctttgctgccgggagtgttattgttgtagcttttgggatattcgttgcaggtgcttttatttcttatggtttatatgctttagatgattatttcggaataagtgaatccattatcagagagttgaaaaagccgcgtaaaccaaggtctgatggagatggccgatatcatgccgataattttttcaccaacttcaataggtacacacgtggatga

SEQ ID NO: 280674 - DNA, 441 bp, Morganella morganii
atgccgataattttttcaccaacttcaataggtacacacgtggatgagataaaaccaattaagatgtattttatttctgctattttgattttttttgtagtaattggcgtatatggttcggcaagtggttatgttgagtattttttaaaaactgatattatttcattttcatttgtagtaggttttcttattttttgctttccctttctctcgtggttatcatatttaatattcatggtggcgtatcgaaaaagaaaactgaaagtaaataacaaaataactaattaccttgcagtaatagcaatgtttggtattgtttttagttttgttttctccttttatgttgagtatgacttaacatcacatggctatgtcaaatgccatagaacatcaattcatgcaccaactaaatatgttatttcaaaggatatgtgcgaatag

SEQ ID NO: 280675 - DNA, 477 bp, Morganella morganii
atggcacatccgatttatttgacgttaagaggtaagaatcaggggctgatttctgcgggatgttcatccgttgactcgataggaaaccgctatcaggccgggcacgaagatgacatacaggtactgaatttaacagtcggtgcattccgggcacaaaatgcggcctataaagaacttatattcacaaaaccaatggataaagcatttcctctgcttttctcttccgtcgataataatgaggttctggaagcaacctttaaatgctacagaacaagccggcacggacagcttgaagtttacgccatatataaacttaccggtgtatcactggttgatgtcgatgatgttcacgcgaacttaattagtgacagcggcgaagatccttaccagcgtgtcaaaatgagatatgtatctatctcaagagaacatgtaaaagcgagtacgtcaacatacagcatcaatagcgagctggtttaa

SEQ ID NO: 280676 - DNA, 1452 bp, Morganella morganii
atggcacatctgcacatcacacaagggatcttccggtcaggtacggataaacagctttctgttccgtcattacagctggaaagcggtcagcatcatgcctttatcggtgccaacggcagcgggaaatccactcttgcccgtgcgctgatacaggaacttccgctgctttccggggagatgagcaccactttccgccgtccggttctggtcgcgtttgagaaattacaggcgctgattgatgaagagtggaaccgcaataataccgacctgatggacggcgatgacaccgacaacggccgtaccaccgccgatatcattcaggcggagcaccgagataatgaacgctgcctgcaactggcggcgcaattcgggatttccgatcgcctgtcacgccgttttaaatacctttccaccggtgaaacccgcaaaaccctgctgtgtcaggcgctgatgacagagccggatttgctggtactggatgagccttatgacgggctggataccgattcccgccgtatgctcagtgagatgctggcagagcttgcagagggcggactgacggttgttctgatcctcaaccgtttcagtgatattccggactttattacccgcgccggattgctggcagactgtgtgctggcaccggcggataccttatccgcgctgttacaggcacagcttgcccgcagtgagcagacagagcacctgacgctgccggagcgggacgacccgtccgcagagcgccttgcgccggatattccgcgggtgatccttaatcacggctgtgtcagctataacgataagcccattctcaatgatctgacctggcaggtgctgcccggcgagcactggcaaatcaccggcgagaacggcgcgggtaaatccacactgctcagtctgatcaccggtgaccatccgcagggctacagcaatgacctgacgctgttcggccgccgccggggcagcggtgaaacggtgtgggatatcaaacgccatatcgggtatgtcagcaacagcatccacctcagttaccgcgtcaatatcagtgtgcgtaacacgctgatttccggctatttcgattctgtcgggctctatcagaaaccgtcagaccggcaggtaaaactggcggatgagtggctggcgctgctcggtctgaaagcgtaccgtgacgccccgttccacagcctgtcgtgggggcagcagcggctgatactgattgccagggcactggtaaaacaccctgcaatgctgatcctcgatgagccgttacaggggctggatacactcaaccgtctgctggtgctgcgttttatcgatataatgataagccgtggtgatacccagctgctgtttgtcagccatcacagcgaagataccccggcctgtatcaaccggcggctggcgtttattcctgataacggtagttatcgttacgaaatcaatacgttgtaa

SEQ ID NO: 280677 - DNA, 1371 bp, Morganella morganii
atgattaacattgctattattggtggtggtgtcggcggtatctctgctcttgctcagttaaccgagaagaatataaaagctaactttacaatttatgaaaaggcggaaatagcttattcaagctcaatgctatcaaaatactcatcacacatctgcaataccagctcactggcaaactcactgtataataaaaaacctgatgatttcgccgaatatcttatactaaataaaaaagtgaccgatgataatacattcgttccacgcggaatatttattgactatgtatatgatacttttgaacagtcagtaaaaaaagcaaccaaggcagggtcacacatccgtatagtaaataaaaaagcagcatcattgacagtagaagataagaatagttgttatatttttgatgaggatggcgaaaaagaacactatcattttgtttttgtcagcaccggtcccggcctggaggatattgcacaatatattcagccggcggggaaaacggttgttgcaaatacggagccggataaactttctgcttttatcccggataaaaaaagtattgctatactgggcagtaaacttagtgcaatagatgccgcactgttcattgcagaggagtctccggacaccaaaatcacgatgtactcctcatcaggagaactcccgtctgtcagagattatttttttaataaccccgaagccgcaatggagctgcatgcatttcctgagccaaaaaacagagatgacctgatattaatggccaattatatcattgaaaagaacaacattcccatcagcgactacagtaaaataccggagacattattgcatgaggagatcagtacttgtgaaaaacacaatccctcatgggaaaaatatatcaaagattttgctgaaattgctaataatgttacacttccggataataaattctataaaaatacacaggaaataaaacgatttatttcacgatatatatcatcattcccgctttccaatgcgaaaaaaatattagccctgataaaaggaaaaacactggagataaaaaaaggggagaaagacgatttctttcttaataaagacaaaatagcctgcaagactgaccagagagaatatgacggaattatattatcttccggactgacaaattcatttctgaagaaagataacaacctctacactatcacgtcatccggcgatgatcatgataaagagataactccggaagatatttccgcattaaataaaaacggaatctggttgtcaggctcattactaagtaatcattatccattagttaactatataggattttgtgttaagcaggcatttctgttttccgaatcagtaaaagaacaaatatcagcgtga

SEQ ID NO: 280678 - DNA, 642 bp, Morganella morganii
atgaaaatcaccggtcaggcagtatctgttacagaactcattaaggatacgtcagagcgattcggaaacggcggactcagtcgttttatctcagggatacaaaatgtgtcagagccacagttttgctgcacaaaagagcaggctgagattttcaggataacggattttgccgcactcgggagtctgttcagggaagatattgtgagcatggatatggatatgactccgtttaaaaatatctcagacgaaattaataccctccggaagagccaatcctctttctcacgtttctgcaaaggtcgtgctctggataaaattcaggaaaaatgcacaaatattattgtcatggctgaatacttcagtcgtctgactgagttacaccgcgataccacattgcctgattcagtgaggtacagcgccggggatgtcccgaaagcgtattctgacattccgcaggaatataagaatatcgggaagcagtcatctgaggacgggggtaatacaaaaaaaatggttccaccgggaaatcgtgcccccgaaatcgatcctaatgatatggacaaattacctaaagcgaagataactatcggtgagattgatcttaccgagctgaagcagttatatgacaacaatccggactaa

SEQ ID NO: 280679 - DNA, 1335 bp, Morganella morganii
atgaaaaaaagtatattagctttaattatctcacctttatttattcataccgctaatgcagcgcgtacggatgttgtacctcttccgcttgcaaaggaaattggtgcaccactgtttcatttcgcaactgacaaagcggtaggagaccgtgaggttgggatctctgaattagagcaggtcacagagcgtatcggaacacacctctctgaagcctatgaatatattgatgatgtcagaaaagacagtgaaacgagagacactgttttagagaaaaaaataacgcatacccatcaggtggcaacaagtacccaaaaattggttgatacatttatcgatgacgcaggaaaaaaaatagtccctgagcagattaatcgtatcttaccggacgcaattaaaagcgaattgtcaccgctggaagaacggactgaatttttagaaaataaaacgcaggcgatggatgctcagttggatatcacagccagaaaagcggagcataacaatacacttatcggtacccttcctgggctaataaaacaagaagttgagaaaaaatctgaagcacatcagaattatgttaatgaacagattatgccgctgaaacatgcgctttattcaaatgagcgtctgttacgcgaagagcaggatagcgctaaatcagccaaagtcgtcactcaggcactacttggtgcaacagaagacctggaaactgacgttgataagctgaaaaataaagtccttgctgtggagttgcaggccggttttgcaaaacattcggcgtataccagtgagaaggatatccgcgaacacaagaatcaacttagcgcacagtcccgggatattgcacaaaacaaaaaattgcttgaatccgctaaactggtaacctccgctatcactgacgctacgttagcgctggaagcggatgtggcgaagatggatacccgtatcagtaacgcatcgaaaaaagccggtacggccttaaatgtggctaatcaaaacacaaagagtattgatgggcaaaaagtaaaagttgagaaaaacacgctggatatcctgaaaaaccgccaggatctgcgttccctggaaaaggatttgcgtgaaaccaatgagcgtcttgataatggcctggcggccagcgcggcactgaatggtttattccagccgtacggtgtcggcaaactgaatatcactgcagctgtgggcggatatcaatccactcaggcagtcgcagtgggaaccggttaccggttcaacgagaacatcgccgtgaagaccggtatggcatacaccggttcgaacgatgtgatgtacaacatggcttttaaccttgaatggtaa

SEQ ID NO: 280680 - DNA, 813 bp, Morganella morganii
atgtcgttatatacaatatttggtagtagcggatttattggttctgagtttataaagcatttatctagcacggataactcaatttatactcctaaaaaaaatgaccttaatatatataaaaaaccattaggaacagttatttattgtgcagggtatggtgattgtaagtcagacccatttaatgttattgacgctaatacttttttagttaaagaaattctgcaaagtgctagttttgacaagtttgtctatatatcatctaccagggtttatatgaaccaagatatctcctctgaggattcgaaccttacagtgagttatgatgataatagaaaattatttaatctatcaaaattaattaccgaagaactatgtttaaatagcaaaaaaaattgcctagtaattaggccaagtaatatttatggcttagcattaaacagtaaattatttttaccttcaattatccgcaatgctattaataacaatataatagatatgtatgtagataaaaattactcaaaagattatctctcagtacatgatttaattgatgcaacactaaggttgttatctgttaagaatttaccatctatagtaaatatagcatcaggaaaaaacacaactgcggaagaattagcttttgtattagaagaagaaacatcatgtaaagttaattggcatcaaccacaatctacatgcgagaactttcctatcacagatatctcattaataaataaattaattgattttcaaccgcacatggttttagatgatatgagagaaatgatcgcttcatataaaaatacaatatga

SEQ ID NO: 280681 - DNA, 555 bp, Morganella morganii
atggatatcatagaaagtaagctaaaaggttgcatgatcattgaaccaactatttattatgatgaaagaggttttttttatgaatcataccaacaagaaaaatataaaaaaatcggaattaaagaaatatttatacaagataataggtcacgatcaagcaaaaatgttctgagaggactacattttcagaaaaaatatccccaaggaaaattagttactgtaactatgggtaaagtattagatattgctgttgatttaagaccaaattcaccaacatttggtgaatatgaatctgtaattttaacggatgaaaataaactacagttttatgtaccaccaggatttgcacatggattctgtgtcctcagtgatattgcagatttcgcatataaatgtactgattattatgtacctacagacgaatgcggcatacgatgggatgacccaactataggaataaaatggcctatagataacccagtattgtctgaaaaagatctcaagcaaccgttcttaaaagatatagaaaaatgtataattaatggatggaaataa

SEQ ID NO: 280682 - DNA, 828 bp, Morganella morganii
atgatcccaggaataaaaaacgcgccccatacaccagagacaacgccgaaaccggaacctaataagtgcagtatcttcaattcgttcctgcgtttattgcagtgcgccgtaaacagttccgcgcccgtgcctcataagccggaaacacaccacggactcacggctctctctcactacttccggatacctgacaatattcatccggccgtgatatacggtgactctgaagcacggacacaatacacatggtcagaaaacacagaacgttatattccgtccggcagtgatgctgtactgaccgaaacatcattctataatccgcccggcagccatcctttatcagatggtacggattgcagcgtgactgaacagaaaaaaactatccgcctttgttacacgttttgtgctgactccggttatcagcaaccgacttccggcagtgaagaatacggacgtatgacatatcattacatctccggaaacggagaaagcaccccgctgaacagtgacgaaaaaatcagtcgttttttttcggagattggcgttactgatgctactgaaatctcaaaaattgcgcatcagggacatgccagcatggccaatatccgttttactgagctactgaaatcccaaaatgataccgatgatatcttgtttatcgcgccgggcggcagtaaaggaaagatgactattcagcaactgtctccgggtgattaccagataacatcggaagctgactttattttacgcagtacaaatcaggaagccgcgtgttatcagaacgactacgatgaaaggaatacgtgtaactcatttcagtaccactga

SEQ ID NO: 280683 - DNA, 669 bp, Morganella morganii
atgcaattaaatggaatagtacagcaaagaatggatgaaaaatctgtaaatcagattacagagcaaggccgcgatgcttttcaaatgacagcggataagtttgtcgctgttgctaacagcgatgagacaatcttcgcggggtgcagagaacagaaagagtataatattatgactgcgtgcggtgcattattggcgcaaacacaggtgaagcgggagtattatactgaaggtctcacaggagactgtgtaaaaaaacttaatatgacatcgcctgctgagattcttgccagaagtaaaacaggtgtgcccggcagcgaatttatcagcagatggtctgatctggaaggattggagtactccgctcaggatctgtatgacatgctgagtaaagagctgcataaacaggaatcctcaccagagatgctggaaaaaatacgaactgtgctgaagatggcagaaaaagattcaggtagtgaatctatccgggggacagaatacgcagagatagttgaatgctatggggatgagataaaaaacgccgtgatttccgacatattaatagctaatgatattaatgaggctgagcacgggccggtattagaagagacagatattattcagctggaattgatgaaagatatttcatttcattcactgaataattactga

SEQ ID NO: 280684 - DNA, 144 bp, Morganella morganii
atgaataaagcacaagactggcatccggcggatattattgcccttgcccggcgctggccgaaaggcgaaaagattattgcggatttcctgaatgtatcactggctgaaatatggccttcgcgttatatgcaaaaaatatactga

SEQ ID NO: 280685 - DNA, 1287 bp, Morganella morganii
atgccaaaaatagtaaagctgtccgttatcagcagtgcccttttactcgctcagtttgcctctgcagcggagattaccgttaaccctgcgtctgcggaatcgactcaggtcgtccgtcagggaaacaacaccacgattaatatcgccccggcaaacacacacggtgtttcttataatgcctacgatcagtttaatgttgatcagcatggtgtggtatttaataaccgtgaagccggtgcagagatgattattaacgaagtgctttcaggtgaaaaatcacacctgcacggcaatatgcatgtagatggtcaaaaagcccacctgattatcgccaacccgaacggtattgcctgtaacggatgcagcgtatccggcacagatcaattcacattgaccggcggaaaaataatattatctaaggaagggacattattgggttatcacaatagtgaaaataacagaaacatttatattagtaacaccactgagaatgctttttcttcagtaaacaaattaaatgtgattgctgaaaatatcactatttgtaacagtaaaatcactactcccaacctgacgttgttcagcggccatgaattagtaaaatattcaccagatacagtccggggcctggaagccttgcccggcaacagtggcattcaaaaaagcaaattgctcatccaaaaagacagccatgttaaaacggataatatgtatatcagtacaaataatactgatataaaaaatcacggtataattacagttggtccggttggtgatgaacagaagcaacgtgttatgaacagccaactgacgatggatttggttaactcacaactgattaatggcagcacaggtcatatccgtgtaactgatgcggattcaatactggaaaatagccaaattaccaacaacggtaacatccatattgataacaaacataaaatgctggaaatcagcagcgctgttatcaataacaaagggaatatgtcatcagatctcactgaaatctccggtttgaatagtattaaatcaggtgttggtattaataactatggcaatctgacaggcagtttattggttaaagcaaatcaaatcgcatttaacaataaaaaacatctggaagcgctggatatatcaatggatagtgatgttcttgtctatattaatgatggcgagataacgaatgaaaccgctaagttcaaaaccgatgttctttaccattccgataatggtaaaattacatcaaaacctgtatttgaatataaaataaaaaaaaccatcccgtaa

SEQ ID NO: 280686 - DNA, 450 bp, Morganella morganii
atgaataataaatgtgtctttcccgggaataaccgggaaatttaccgcagtttgctgatgccggttattccgctgcttattaccggatgtgtttataaaccggaaggaccttatttaccggcaaaagtggtggtcgtgtcaaaccatgtgtgtctgcttacccgcccggaaggggatgagaaaattatccgcctggatattaatgaaatcggcagtgaaaataaacggctgttaacgcatacctttaccccggagcaggcggcggtcagccggaaccactgtatttcaacgcagaattatcccttccggagcggatattcctatactgcgctgatcacggtcgggtcagacgttcagcaccgcctgaatattcatcccggaacgcggaattttgaaacccgctttcagctgactgattattttggtcagttaagagcaacggagttttaa

SEQ ID NO: 280687 - DNA, 1767 bp, Morganella morganii
atgattagtaatttaagcttaagtaaaaatgctcaattttttgagctaaataaagcacttaccaaaaaatcaattgaagatgcattcaaagaaatatctaaagaacgtgttggaaactacctgataaacgctcctaaaatcaactatacaacagtttctggcaaccaagttgtatactcaatcgtttcatacaagattgaagcagaaccttcgtttttagctgggacttcagtcaaagaacaaaggtatgcttatttgttgttaattgaatgtgatgatgccttggtgattttgaagaaatacgttgattcaccagaaaaatatttttcctcttttatcaatgattttgattatgaaaaattttgtcattttcatggtgataaaaagcctgaatatgaaagagttaccatgaagaatatgagtatatcaaatgctgttataaggtcacgttcattagaagctaaaagtttaaatggtattctttcatctaattcgtctagccgatcaatcccaagtaactttagaatgaaagtcggagaagattcatacactctaacaccaggtacttctagagttagccatagggataaaaaatcagcatttgacagactagtcgactgggttgttgagattaaagaggaaataaagataactaccaatcaaagtgaatttcttcgtaattttgcttctcctatttgtttaaaagatattatcaatttaggtcatcaagttgttgccattttaatagatttgagtgagatagaaaataaaattctggagggggtcgcagttttaaataaggctgatggtagtccattgagtagtagggaaattaataatttattcaatttattgaagtctcctgttgtggtcaatgggagtttaatgaaagttaaaggtgcaattctatccggtaaacttttatactcaaaaaatttaattacaattagaaataaacttcttgatagtatttacgtagttgagaatggttgtgaaatctatacgataggttcatatataaataaagaaaaaccattttccgctgtgtttgattcacccaattattcatattattcaaggttatgctttgaggataagcacttaataaataatatcccatcgatacttaatgtatttgatgatagctataactttagtggtacacttagtgaaaaagaaaagccacatgccaccaatttaggtcggttcccgaccaattctctattccggaaagtggaagatcagtattgttcagcacataacattgtgatttgtgatgatatgaatgatgaatgggccgatcatattgccatagatagtaatagtgctattccatctatctcatttatacattcgaaatttactaataaagacacgtatggtgctagtgcctttcatgatgtagttgctcaagcgttaaaaaatattggtcgaactcaggctgaaaaacagctatttaaagataaatatgataatgaatggtacaaaaattatgaaaataccaaaatcagcagagttactggcgctcagaactggcaagaaatagaattagctctcgatgcagtaaaccaaaatcctaattctataaaaaaaattgtactggcaactccttttttgagtaaggctaagttggcaggagagttaagtaaattagcctctggtaacaagtgtaagccacactatgtacagttaatctggcttataaatacgtttataagttcatgtaaagattttggggttcaagctcacatattgtgcaaaccatag

SEQ ID NO: 280688 - DNA, 672 bp, Morganella morganii
gtgctacggtatttaactttcattatcgcgctcagcaccgtatcactacctgcggcggcgatttacatcgggaatatcacgttcacgctgccgtcagatcagaatttcacatcaaaaaatgttctgaataataaccagagcgcacggatctatcaggtcagtattatcgggatagacagccccggtgaatcagaaacccggaccagacccgctgatggtgaattactgtatgcaccgaaagcaatggcactgagcgccggacaatctgactattttaaatttttctaccatggtccgcaggatgataaagaacgttattaccgtgtttcattccgggaaatccccccggaaaaccgggccggacaaaataccaccggcggaaaaatcaatatcgcgccggtcatcattatggattcaatcctggtagtacgtccgagaaaaattcatttcagttatgactgggataaaaaaaatcatacgctgaccaacaacggaaatacctattttaaaatactgctgaaaaatggctgtcattcatcagaagaagacagcgacagctactatttacgtcccggtgaggtattacgcagcccggcactgcaacgttccggtgaaaaatatattctttataatgagaaatttatttcactttctgatgaatgcaataaatag

SEQ ID NO: 280689 - DNA, 1647 bp, Morganella morganii
atgaaggttaatcattttgttacttcactgatactggtcattgccatactgagcagcaccccgtttttcgcttctgcggcaatcaccaaaaagcagctccctgatggtgcggaaaggcagtttgcttttatcgaaaataatacagataacaactattttgtaacccctctcggtccccgtgatccgcgaatggggggggctaaccgatggaccgggctgaaatatcagggttccggcaccatttaccagcaaagcctgggatatatcgataacggacataatacccctctggctgccggccgccggttcgatatgtggctggaaaataccccgatccggaatcctctgctcggacttcgttgtatcaactggtatgccggctgcaatatagaaaccagtctgatacccccgcaggcaactgacagtaaaggtttttatggcgcagttgtcaccagcggcggcgcaaaatggatgcacggcatgatggccgacccggtttatgaatatctcaaaggtatggcggtcggtgacatgctgaatatggagatcaatacctgccagacagctgatcagtatgatgccacccggggtgagcgttgtattgatcagaaaaccggtacatggaatgctgccgtcatgcaccaccggaaaggagcacatatgtcactgcataatactaattcgctctccgaagtatttattaacagtgatggtattccgctgattggtgaaggaaacagtgactgtaaggtcatgaccattggccggaagagcgggcttgcctgtaaaatggtgaactacaccctgcaaaccagtatgagtaacctgacaatccacatcttcccggcgattaataataccgcgctggcctccgcgattggcgctgatgacatgcagttcagcctgaatggctcaaactggaaatacgtgcgcaataatagctattactacacgttcaatgatctgaaatccgcagattctgtctatattttcatgtcgagtgatttttttaaacagatggtcaaactggggatcgcagattcaaatacccgtgacttatttaatatccgttttcagaatacagagtcaccggaatccggctggtatgaattttccacatcaacggcactgattataaagccacgcgactttggcgtcagtattatatcaaaagagtatgagcttcatccgcaccgtgaggggaaagttgaacatatggctcctccgctcgatttcgaatatattgtgacaaccagcggacggacgaaagcagaccaggttttaattaatgtcaccggcccgtcacaatcactgggcggaaaaagttactgtatattttcctctccggacaaaaacgtcaacgttccgtttccgggctacctgagctttataacgcaaaacggaaaacaagtgaaagatgccggatgtaacggcacctggtatgacatgacagatgcattatggacagccactccgtggacagacatctccggtgatccgggatttctgaataaaaccaccgttatgttcagcattccgatggataataaaatatcggaacgaaccgtggaaaataacggctggtttggtgaggtcagtgcatccggcgaaatacacgtgcaggcaacatggcgtaacgttcagtaa

SEQ ID NO: 280690 - DNA, 2547 bp, Morganella morganii
atgaacaggtatattaatcagactattgcggcatttcttaccgcaggaatagttactgttatacctgtatccggatatgccggtaaaccatcatcctctgctatccgggtcggtgatgttgttattcctcaggcatttggtaatgcactgcgcgacggaatgagtattccgctgtttattcatctggacgataataaagacaaaaattctgatattcgtattggtactgcctttctctggctggacggcgataaactgacaatacgtaatatcgaaccggataatgataactcactgcttaataccgatacccataagcaattaaccactttaagcgaacagccgtttaatgatgagcttcgtattcctgtttcgtcagacagcgaattatatctggatctcaaacaactcaatttacaactggtgatcagcaaatctgcattaggtacagtgatgcagtccaaaagctcagatatcggtgaatccggtgtcagccagctcagcagcaccctgaattataacctcggcgtttataataaccgtgcacgcaacagctcaagtaatacatccggttatctgtccctggaaaatatcacagcattacttgagcatcatattatcctgaacggcgcactttacggtcttggcagcgggcacaataccagtacgctctacaaagccttatatgaacgtgactataatggtcaccgcttcgcagccggtttactcgacagctggagtctccagtccctcgggccggtcaccgcgatcccgtcaggaaaagtgatgggattttcatggggaaaccgggccgattcaaccatttttgataataaccaatctgtcaccccggtggtggtttttctgcctgcggccggtgaagtttatctctaccgtgaaggccggttactgagtatccagaattttgatatgggtaaccatgaggtagatacccgctcactgccttacggcagctatgatattgatgcggaagtgatggttaacagtaagataatcgaaaaaagaagctaccgaatcaataaattattcacccgtaatggcaataatgcaccgttcagctggcagttctggggcggcagtctgaagatggatcgctggtatcccggcggcaaacagacctcagataagatcaccgctgaacatactgctgttgaacgcgaaaaaaccacgtctcttgccgggatttccggctccggttctttcggggttttcagctggtcagcaaccgcctatggctatgacaaaaacgctattctggaaacacaggcatccgttccggtttccgataaaattaatatcaatatccagaatatggttgccaatgacggctcacacagcaatattgccaatatcagcacaacattgccgggcgatttcagttctgtctggataaccagagagaaaaccaatatcggggatcggatacgccgcagtgatgttgacagcctctctgtcgggggaacaataaacctgggcgcagtctggtcaccactgggtacactgaccgcaagttatactgatgataaaacacatgaaaaccgttattacaccgtagattataatcagaacctgtattcgggttcatggggtaatctgagtatgcgggtcggcatgcaggcctataacaatacgaataataacaataccggaaaatatgtttcactggatttctcattgccgctcgggaattggttcagtgcaggtatgacgcatcagcgtggttatactatggctaacgtctccgcccggaagcatttcgatgacggcgcggtacgtactctcggtgtgaacgcatcacgggctgtttccggtaataccggcgatgataaaacactcagtggtggtgcatatgcgcaatttgatacccgttacagcaaaggcaccgtcaatatcagcagcggagccgacggatacgtcaataccagtctgacagccagcggatctgccggctggaatggtaaatatattggcgccagcggtatgacagacggtaatgccggtcttatttttaataccgctatcgataatgacggcttattaagtgccgatgttaacggccgcagagtggaactgaaaaacggatataactacctgccggtatcatcctatgctcaatatgatattgaaatcatgaacagtaagaagtccaccgccagttataatattgccggtggacggaaaacaaaagtaaccctctatccggggaatgtggctgttatcgaaccggaaataaaacagatggttacggtatttggcagattcagagcggaagatggcaccttactcaccaacgcacatattaataatcatatcggccggacacgcactaacgaggcgggtgaatttgttatggatattgataaaaaattcccggttattgatttcagttacggcaataatcagaactgtgaagttgaactgaacttaaccggcagcaacggcgcaatctgggtgggtgatgtggtctgtaccggtctgaaaacgtatgcacaaacacaatcatcagggaaaaattatgaaggttaa

SEQ ID NO: 280691 - DNA, 678 bp, Morganella morganii
atgaaaaagtatctggctgccttcagtttgctggcaggcataatatcaccatcctacgctattgatgtcggcgatatttcaacttttatttacagtgataaagacagcgtcagcaaagaaattaaaaatacaactgacagcggacgactgattaatatttctgttgaacgaatctcatcaccactggaagacgggcgggttatcccgaaagaaagtaatgatgaattattattgtctccggcaagtttattattaccggctgaatcaaaagaaaatattcgttttttctatcatggtccgaaagataacactgagcgttattatcgtattgtctggtttgatcaggcactgagtgatgcacagagcaataataataaccgcagtgcaattgccaccgcttctgcacgcgtcagtacaattctggtggtttctccgcggaatataaattacggctaccgttatgataacggcaaactgaccaataccgggaacggtacgctgcgcgtgattgcctatggcccgtgcctgaaaccatcaaaagacaatccggaaaacgagtgtaaagaaaattattatttaatgccgggtcgtgaccggatattttctgttgttgatgtgaccgataaaaaaggccgcgttgcattgtggcaggctgagcaatttatttccgtcaaataa

SEQ ID NO: 280692 - DNA, 588 bp, Morganella morganii
atgaaaaagcatttaatcgttgctgctttaatcgcgtccttttcaggtatcagtgcagtgcaggcagcggatgttacagctcaggcagtagcaacctggtctgcaaccgccaaaaaagataccaccagtaaactggttgtcacaccattaggcagcctgtcatttcagtatgctgaaggtgtgaaaggttttaatactcagaaaggtttatttgatgttgctattgaaggtgatactaccgcaaccgcatttaaactgacttcccgtctggtcagcaatacattaactcagttagataactcaggttccacgctgactgtcggcgtcgattacaacggcgaagcgattgagaaagcgcaggatacaaccctgattgatactaagacaagtaaactgggcggcaatctgagcgcactggctcagggctataaaacgaccggccgtactaccgcacaggatgcattcacattctccatcatcggcggcacaactgacggaacaactccggcaactgactattccacattaccggaaggtatctggagtggtgatgtcagtgttcagtttgatgcaacctggaccagctga

SEQ ID NO: 280693 - DNA, 183 bp, Morganella morganii
atgatgccggatgctaaggctaaatcattcggtttgcagcaaggcagcaagcagaaggaaccggggagcatacatcagtatgtgacccggttcgtgacgcgcagcgaacaccgctgcaggccgaaggatgacgccttagtgggcttcgtcccaattggcacctacccctgcctctacttttaa

SEQ ID NO: 280694 - DNA, 162 bp, Morganella morganii
gtgaaggtgggaaaggggatgtactcaaaacgcgacatttctgagataaaaaaaatgagtatcaaagagcgtaaaatggcagctatgcgccggttgaaagcatcttttgaccaggctggtcgtgaaggaaaattacggattaataaggttgatactctgtag

SEQ ID NO: 280695 - DNA, 1425 bp, Morganella morganii
ttgttccggcaggaagcgctcgataacaggaaaatgaaatggcggggcaaagcattattgctgcccggaattccgttatggataattatgacggcatgttccgtattcctgatggtttttcttatttttattattttcggatcttacacccgtcaggttaatgccacgggtgaagtgaccacctatccgcgcgctgtcactatctatgcaaatgcccagggatttgtcgcaaaacaatatgtccgtgaaggccagcatattaaaaaaggcgatccgatctatgttattgatgtcagcaaaacaacctccagaggcgtggtgagtgataatcagcgccgtgaaattgaaaatcagcttttgcgtattgatagtatgatttcccgcctggaggataataagcgcgataccctcgatgccctcgaaaaacaaaaatccctttatgttgatgcctataagcgctctgaaggcattgtaaaacgtgccgaagaagggatcgccattatgaaacagaatatggagagttaccggggctatcagaaacagggattaattaataaagatcagctgcttaatcaggtggtgacttattattcccagcagaacagcctgctgaacttaagcggacaaaatgagcagaatgcgctgcagattaccgcgctggagagccagatcctgactcaggccgctgagtttgataaccggatttatcagatggaactgcagcgctatgagttgcagaaagaaatggtgaatacggatgtcggcggcgagattattgtccgcgccctgacagacggccgtgtggattccctcggcgtgaccgtcggtcagatggtcaatccgggcgataccctgctgcagatcctgccggaaaatatccgtcagtactggctggtgctctgggtgcccaatgacgcactgccttatctgaatgtcggtgatgcggtgaatatccgttatgaagccttcccggcagaaaaattcggccagtttgccgccaccattcaggtgatttccaaaacccccgcctccgcacaggaaatgatgacctatgccggcgcgccgaaagtcagtcagatgccgcaatccatcccctattacaaagtgattgtgcgccccgagaaacagatgatcgcctatgatggccgcgaactcagcctgcaaaacggcatgaaagccaataccaccctgtttctggagaaacgcaaaatctatcagtggatggtatcgccgttctatgacatgaaacagagtgcctccgggccggtggcattcaccgcagaaacgccgctgaccgacgctgccggggaaacagaaaaaccggtcacagcggctgagatcccgcagccggctcacacaaaggacaccacgccggggaggaactctctgggcgcgttcggcacaacaggagcagacacaccatga

SEQ ID NO: 280696 - DNA, 297 bp, Morganella morganii
atgaaagaattaacagttcaggaaatgaatgaagttaatggtggtttattaggtctgggtctggtattcggtggtatcggtgctgcaatggggacaactatcggcggtatcgttgatgcaggttgtgctgccggcggttatcagactaatttcaaagcatccggtgcaatgctgggtggcggtatcggtgcggctgtcggtctgagcccgatcctggcaacagcgggtatcggttttggcgtgaccagcattgttgataatgcaaaaagcattaaagcacagaaaggccgtgcataa

SEQ ID NO: 280697 - DNA, 483 bp, Morganella morganii
atgcggctgtcccatacctttatcagagggctgtctgtactgctgctgtgcgggatgttaagcggttgcggggtattttatggtgccatgtgcggcagtatgaccctgtttacgccatcagaatcggtgacaaaaatcgcgctgcctgatgcggtgacaggtcagccgtatgatcacaccattgaaatcgcccggaataccgggatgatcccgttttacgtcagtgaaaaaccggactggctcacggtcacgctgatgtcaaaaaatgagaccggtgaatggcttccgctgatcactgatgaggagtggcagacacgggtgatgaaagcagatgaacgtccgctgatcgccgcccgtttgcagggaacgccgccggagcgcggcaacgtccggataaacatcaaaggtgcagcctaccgcaccatgtgcggaagttctgatccggtctattccctgcggctgactgtgaaaaaagcggagtaa

SEQ ID NO: 280698 - DNA, 252 bp, Morganella morganii
atgacgtatcagatactcagtaatacggctgcaagtattactgatttaaaacgtaatccgatgggaacggtacaggaaggtgaaggtaatccggttgccattcttaatcgtaatgaacctgcgttttattgtgttccgccagagttatttgcctggtatgtggaactggcagaagatgctttgcttaatcagttggcggatgaacgcatgaaatcacctgagatcgtgagtgtatctctggatgacctataa

SEQ ID NO: 280699 - DNA, 282 bp, Morganella morganii
atgacctataaacttgcatttgaaaagaaagcactgaaggaatggcacaagcttggtcatcctgttcagatgcagtttaagaaaaaactggcagaacgtctggaaaatccgtatgtcccgtcagcacgactgagcggatgcaataaccgttataaaattaaactcaaagcgtccggttatcgtctgatttatgaagttattgatgactgtgttgttctgttagtaattgcggtcgctaagcgggaaaataataccgtttatcttatagctgatgaacgctga

SEQ ID NO: 280700 - DNA, 552 bp, Morganella morganii
atgaaaaataatgaaatttatatatccgttgatgtggaaacgtcgggtccggttcctggtgagtttagcctcctgtccgttggagcctgcttggtacacaacccgacaaaatctgtttatatcgaattgcaacctgatagtctccgccacgatgctgaatcactggctgtgacgggtttaaacttggaacatcttcagcaacatggccttcatcccgtcaaagcaatggaacacctttctgaatggatcaatacggtaaaacaaccggaaatgaagataattttcgttggactgaatgctccttttgactggtcgtttatcaattattatttccataagtatcttggaggcaatccattcgggtttactgcgattgatatcaaagcatattacatggggtttacggggtgttcctggtctgaaactaaatcttcattgatgtccaagaggcttcgccccatcactcagcctagccacaatgctctggatgatgcaaagtttcaggctgaattattcgcgttgatgactaataaagatcagaaaggctgttga

SEQ ID NO: 280701 - DNA, 1089 bp, Morganella morganii
atgagtggatactggaagcatcagctttccaaaattatcgattatatgacccgtcaaaaacgtcctggtgtggttatgatggctacaggggctactcttgcggtgagcccgaagatattgagctttgtgtttacggggacttttcgcggaggggctctttctattggcaccgctgaaggtaatgtggtgagtgactatatcgtgcctattataggtggaatactcattctcgcaggtctaatttttttatctatcggtgaatatcagtccatcaagcaaaactctcgcaaacatatcttacttattacaggtaatggcctaaggactactaatgatactggtctggataaagttgtccgaacagtattgaaaggcatgattcaggcacgggacattgatattacccagcgcatccgagacggagttattatcgagcctgaatcaactttccagaggcagatattgcccgaaaaagacatcattactcaaattttatgtaaaaatgactctaatctgacacaagttgcttatggtggatttctccccgtaccgtttaccttcttccttgggaatgttctggatgataaaggggatgtcaccgtattcgactgggatcgcaaggatgagaaatggaaatatatctctacaaacaacctcgatgatggtgaaagctttgtgcacgaaaccatcactgaaccgacttcagataagatagtgctggttgtttcttgctcctacagagtaaatatcgagcaagtggccagaagttttcccggccaaggcattgagcatctgtatctggaaactaacacgttcgataatcactggtcgctgacaaagcaacgccgtctctctttggagtttgctgaaaagattaaaacgctttcgattcagggtatccgtactgtgcatctgatcctgtcggcgcagagtagtatcgtcctcaattttggccgacgttacgataacaggaacatggccgatgtgattgtttaccaatttgaacagtcaaataataacccatatccatggggtgtgtatggtttgtcacacagacatgaaaacagcgggattgttatgcgtccctga

SEQ ID NO: 280702 - DNA, 528 bp, Morganella morganii
atgaatgtattcagacctcatcggcgtcttacgctggctgaacaataccacgggcttcgtgcccactttcctgatggcaagtgcacgattatgggcaaaaacaagaaacttgtctgggagggcatacttaagccgactccattcagccgggggtataaaattcggctggaatacgcccctccttctgctccacgttgttttgtggtttctccggaactgaaaaaaatatcaaatggtaagaagatccctcatacctatgcttctttatcatcatcgaaaattacacagctatgcctgtatttacccagagcaaggcaccctgataaatatgctgagtggctaccgcagtaccatctgagtgcaacaattcttccttgggcttcactgtggcttttttactttgaacagtggctacattcgggtgtatgggaagggggcggcgcacatcctaacaacgatgacgacggggtctattatgaaaaaatcccacgccgaaagacctactcacgagaccgaaaaaagtcctag

SEQ ID NO: 280703 - DNA, 1281 bp, Morganella morganii
atgagcaaatccaattcggctttaagtatcagtaaagaaaaaaagcaatatgttggtgattttctggattgcattgtggattctttagacctgactgacactcaacacaagcatattaaaagtgcttaccatgccgtaggaaagtacctttctgaaggggacaaccctgtacttaatggagccataatttattcacaaggtagcgtcagacttaacacgactgttaagcccaaaggcagtgaacagtatgatgtggatctgctttgttatttaccaaatgctagccgttctactggttgggcgcaagtgcttgacgccgtccatgagcgtctgagcagccataaaacctactgtgaaatgcttaacccgcttccccgaggttatcgtatcaggtatgcgggcgattatcaccttgacatcacacctgggattgactggagcactgacccaacggaggaaaatcaccctctccttgtgcctgacgctcgcctcggtggttggaaagaatctaaccctgcaggttatgccacgtggtttgacaatatcactgaaaaacttcccatgtttttaaagcgagttgtcgcctgcgaaagcttctccgaagctgcatcagtaagacccttgccggatcacatgcataagaagctcctgaaccgaattgtccagatttttaagcgccatcgcgatgtctgggccgcaagcctcgggaaagattacattgagtccaagccaatctcagcgattattacgacgttatctgcacacgcatataactgtatttgtgaccagaaaaaagtttacgataccgactttgacgttatccttgatgttctttatctgatgccgaaattcattgaggtcagcacggggtactatcacgtatctaaccctagcatgcccgcagaaaattttgcagaaaaatggaataacccagaaggtggaaagggtaagaatcttaaaaattgctttgtcatgtggcatcaggctgctatagagaacatcaatgagattgcagcctccgatggcgaagatgaattgctagataacctgagtaaatatttcggggaacgaccggttaaagccgtacgcgaagcaatgcttgtgaatattaataccgcccggagccaaaatggtttgaacgttctccccttcaccggagcgctgtcagcaggaacgatgagtggagccgccgcaggccgatctgtacctgcgaataccttttatggtggggagacagcgccatctatcgtcgtgcaaaagaacaccttcttcggggattga

SEQ ID NO: 280704 - DNA, 327 bp, Morganella morganii
gtgaatgtcctgtttatctgcagccgcaaccaatggcgcagcccgactgccgaacatcactggcggaatcatccgcagtggtctgtccgttcagccggtaccagccgcaatgcaaaacgccgggttaccccggcgttacttcagtgggctgatgtgatttttgtgatggagcaaaaacataaaaaccgcctgaaagcagagtttacccgcctgctggatcataaaccccttcatgtccttgagatcccggatgattatcattacggtgatccggcactgatcgccctgctggacgatctggtgccgccgtatctttccgctgtctga

SEQ ID NO: 280705 - DNA, 231 bp, Morganella morganii
atggataacacccgaaaccgcgcctggcgcagattcaaaaaccgtatcaataagtcccgtgatcagaaacatgacgcatcgttatatgattatccggcagagaaatgttggaaaatgatgtacggacgcagtgaaaagatgatccgggcggctcagttaggcatggcatatccgcagatcagtcaggcggttctgacacgtaacgcctgcgacgaggaaaagagtctgtga

SEQ ID NO: 280706 - DNA, 558 bp, Morganella morganii
atgccggttcccgttcgtcaatacctgatttgtgtaaatccatgcaattgcacagtttttcaccggagcatactgttttatacggatcaccgcacacgacacacggtctcccgcaacgcgctcatccgtttcagggcgcggtttgtttttccagatcaagcagataaatcatggcctcatcccggctctccccgcacatttcccgcgagggctgtagtccgctgcaaaccgccggacgcagaggcgagccgaaaatcagacacaaattctgctcagataactgaatgcagcgggtattggcgggtttgccgtccggcattcccgggatcggggatgaaatggacggcgcggtgcagcaggcaccacagccgctgcggcaggcggtcagctccgccagatgcacgggttcgccccttttttctccgccagatccagacgcgcctcgtgcgcggcaatctcttcatccgtggcatacaccacacgcagaccgctctgcgggcgggtaacgcgctgaatagtctgaacgttctcttcgccgctgttctcattatctgctga

SEQ ID NO: 280707 - DNA, 876 bp, Morganella morganii
atgtttttatcaagacagctcattcaattttttgctgttgctgaaaattccagcctggcagaagccgcagaaaaacttaacctgacaccatcggcgcttagccacggcattcgtgatcttgaatgtaaaaccggtattttattaatcaaacggtcaggacaaaaatcatcattaactattgccggaagagatctctatcatcaactattaccctattacattcggataaaacatatttcagataatctatccggaaagaaaaaaaacaataactcgcttactattaaaacggatagtctttgttacccgccactgaaagataaaataatatcattctgtaaggaaaattcgaatctcagcctgtcactggaatcacaagaatacattgatatcaaacatgaaatacccagcaaaaacacagatattgttatctcttcagactgcagtacagataatgacgatattcaccatcttgatcttccacctgaagaaacaggtattattgctcatgatagcttgttaaagaaatatgcttcactctctgcttttgtgatgaatgaaagactcataaaaataaaaacaaaaattcacgaacatatattaagtgagtttttatcaaagtttaaaataacgttaaacgatcatctctcaattactgtaccggctgaatataatatttctgattttattgcatctgctgcaggatttagtctgctgccagaaaactccatccttattgataaccttaaaaacagagggtgcagatttataaaactccctcatcactataatagtgtaattaagaaacgtatttatttcagcgaaatacacaaccaaacaatctccgattttatattaaaaatacgcagcaattaa

SEQ ID NO: 280708 - DNA, 480 bp, Morganella morganii
atgcttaaatccgtaccagatcctgtcaatacgacagtgaaaacggcaccggttaccgcaccacaatccggtgtaagcggtgacattatcaatgccgccgggactgaatggattgattccggtatccgcgatcagaaaaatgaattcagtctttttttcaccaaagaaagcccgaaaattgacagcacgctgaatatcaccttttcgttcatggttcagactatcggtgataagaaaattgagatgttggataaaggaaagcctagcggtatgttttttaaccgggtggtggatacctggtcgctggactgcctgaatttttccggtcatcagctttccaaagtgtatatgatgaatgaccgtattatttacgcccgcaggcttgatacccgtaatgagaatatcagtaaggtagaaaagctgtcagtattcccgaatacagatgtttataacgcagcaaaacattactgcggacggtga

SEQ ID NO: 280709 - DNA, 1464 bp, Morganella morganii
atggaagctgaacaggaacccgaactgaccggggacagcggagaggatgtcagaccggttaccggaaaaggggtgacagcgtctgtgcctgccccttcagtggcaccgctcgtaccgctgaccggcgacccggttgcatctgaaacagaaatcatccgccagcgttcgattcagaataacctgctgaaatcacaaccggctgcaaccggtacggcaacagccgcggcagccggacaaaataaccttcccggcggcctgacattacaggatgcggtgatcaaatccctggactgggatgcggggctttccgggctggtaaaccagtaccgtgctcagctggaagctgtgtatcagaaagaaactgagtattacccgcaaccggggctcggtgtttcccgcagcctgaataacagtgataaaggctatgtcaccactgccagtgtcagtcagctgctctattcattcggccgggtgtcatcacagatagattcccttacagcccgtagtgatcagtcactgctgcgtgtttttgtcaatgccgatgaagtggcggaaaaaaccgcgatgctgtatctcgatatcaaacgttaccaggactatatcgttctggcggaagagcaactggtgtcggtgcagcatattactgatctggcccgtgagcggaccgctgcaggtgcggcttcccgtgccgatctggtacaggcggaagcccgccttgatactgcgcggctgcagctcaatgccctgaagctcgagcatgaaaaccagatcctgaatctgaaccggatgaccggggtttctgtcggtctgctctcctcacagccgatagatgccgcactgtacagccggcagtgctattcgcaggatattgattttaatactgttccggttgtgctggtggcaagggccggtttaacgatagcgcaaagtgaccgtgaggcagccaaacgtgagtcgatgccgagcattgcattacagggatcctatcagcagcggtttgatgcaaaagataccgaccgttacggccgggaagatcacagtgttgaactgacggtgaatgtgccgctgtcgaatttttacaccagcggatccaaacagcgtatggccggatatcaggaaaatgcggccaatgcggagattcagcacacgcaaaacgtggttgaaaacaactggcgcaatcagcaaatccgcctgaatgaactggaacagcgcatgaaactgctcgattcccgtaacctctctctgaaagacgtaacccgtctttatcaggagcagtatgtggcactcggccagcgcagcattattgatctgctgaatgcggatcaggaatggcatcagtcccggcgcgattatgcagcggcaaaatatgactacctggcgaccagcatcagctgctcctctcagttaggccgtttccgcgaaagtttacaattatccaatgaatctcttcggagtctccggtga

SEQ ID NO: 280710 - DNA, 2151 bp, Morganella morganii
gtgatctcagagcaaaaaaacgaacacagtgaaagctggctgcaggcgttattgcttgctgcccgccattatcgcctgccggtctcggaagagaatgtcagagttaattttacctacagcagcggaaccgaacaccggacggaacttcagcgcctggcccgcaataccggactgaccctgacgtgggtaccgctgacccgggagatgctgaatccctggtatttgccgtttattgtggctctccctgacggaaaagccatgtatgcggaaagcatctccgcggacggccgtgtgcaggtgatcctgcagggggacgggcagcacaaaaaccatgttacgatggatgacctgctgaaactgacacaaggcggtgacgttatcctgacgcggccggaacgcaacgtgccggatgcgcgggtggatgactacatcaaaccgtttaaaaagagctggttttgggacattgttctgcgcgaccgcaaatatttcacttcggtgctgatcgcggcactgctggctaatgtgctggcactgagttcgattctgttttcaatgcaggtttatgaccgcgttattccgggaaaatccattccgaccctgctggtgctgtttattggtgttctgatcgcgatgggatttgagttcaccatgcggattatgcgggtacggctgatcgaccttatcggtaagcgggcggatctgaaaatcaccgataccgttttcggccacgcactgcgtatccggatgaaagagcggatgcgctcaaccggtacttttgtgtctcagttgcgcgagctggaaaacgtccgggaaaccattacatcaaccacggtcactgccgcatctgatctgccgttcttctttctgttcctcgtgattttatggctgatcgccggaccgctggcactggtgccgctggtggctctgtttgtcatgatcctgccgggcctgctgctgcagccgaaactggaagttcttgccaatgaagcaatgcgtgagagcacgctgcgtaatgcgtcattaattgaggcggttcagtgtgcggaagatatcaaattccatcgcgcagagccgcgttttcagcaggaatggaactatctgaacgagaaagtgggtgataccaacctgaaagtgaaatttatcactcaggggctgatgacctggagccagaccatccagacgctggtgtttgcggtcacggtactgtgcggggcattcctggtgatggacggagcgattaccaccggtgcgctattgggggcatcgattctgagttcgcggatgatggcgccgatggcgcaaatctccggtcttctggcccgctggcagtccgccaaagtctcgctgaaaagccttaatgaactgatggaaaaaccggtggatgcgcagtacggcacccggctcgtccataagccgtcactgaccggtcattacgaatttgaaaacgtggcgatcagctatgatttgcaggccagtccggtactgactatcggctcgctgactatccgtcccggcgaaaaaatcgcgattctcggccgtaacggctctgggaaatccaccctgctttatgcactgagcggcttactggatccggtagccggacaggtacggctggacggtattaatctggcggcgatagatccttatgatgtccgccgggatatcggctatctcggggcaaactcccgcctgctgcacggtacactgcgcgacaacatgacgctgggggcaccgaaagcagacgatgcgcagattatccgggcattgcagacagccggggtggcggatctggtcagcagcagcccgcaggggctgagccgtgtgttgtgggaaggcgggatcgggttatccggcggccagcgccaggcggtattgctggcccgtactatcctgaccaatccgaatatcgtgctgctggatgaaccgacatccgcactggacgaaatcgcagagcagaagctgatcgccgggctgaaaacctggtctcaggataaaaccctgattgtcaccactcaccgcaccagtgttctgcagctggccgaccggattatcgtgatgaacaacggacggatcgcgctggacggtgcccgtgatgaggtgcttaaaaatctgatgtccggctcagatgcaccggcaaaggcggagaactga

SEQ ID NO: 280711 - DNA, 1224 bp, Morganella morganii
atgaaaaaattaaatcctcaggccatgaagcaggagccggaaaccaatctgcggggcgtgccgtttttctacggcggccggcacgaaccaagcctgccgcgtctggcacggctgattggggtgatcctcggtttttttatcattctgcttatctgggcggcactgtctgatgttgatgaaatcaccaaagggcagggcaaaattattccgtcatcccgtgaacaggtgattcagtcacttgagggcgggatcctcgcctcactggaagtgcgtgagggggcgattgttgagaaaggccaggtgatagcctatctggatgaaacccggtttgaatcctcactggatgaaagccgcagccgctataaggcaaaccgtatcaaagcagcacgtctgacggcggaagtctcttccggggcgtttgtcattccggatgatgtgaagcaggatactgaactggtgaatgccgaacagcgtctgtacaagtcccgcaaagagcgtctggagcagtctgtcaaaggggtttctgactccctcgcgctttaccgccgtgaagagatgatattgcagcgcctcgtgaaatccggtgcatcgggtgaagtggaattaatccgcctgaagcggactatttccgaactggaaagtaaaaagcaggagctgcgtaacgaatatgtggtgaatgcacgggaacagctggcggaagtcaataaagagctggaagagctggaatccgtcatgcgggcgcgggatgatgctttacagcgcgccaaagtcgtctcaccggtacgcgggattgtaaaaaatatcgaagtgaataccatcggcggggttatcgcgccgggcgggaaaatcatggatattattccgctggatgatcagctgattgttgaggcaaaaatatccccgcaggatatcgcgcatatccgtctgaatgaccctgcactggtcaaaatcacggcctatgactatgcgatttacggcgggctggacggggaagtgatcctgatttccccggatacgctgaaagatgagattcagcgtgaccatgtctattaccgcgtgctgatccgcaccagtcgtgatgtgctgattaataaagcgggtaaagagtttcagatcttcccggggatggttgcggaagtggatataaaaaccggcagcaaatcgattctccgttatctggtcaaaccgctgaaccgggctaatgaagctctgcgcgagcgctga

SEQ ID NO: 280712 - DNA, 894 bp, Morganella morganii
atgacagacagacaagaggtcttaccccagcgtatcagcgcgcggattaaagatgtcggcggtgtgccggtatcccgtgcattaccggtaaaagagcgtcgtcagataggcgcctggtgttttctggatcatgccggcccggcggttttcaaaggggatgacggtatgaaagtcgggccgcatccgcacatcggcttacaaacgttcacctggatgctggaaggcgaggtgctgcaccgggacagcctcgggtcagaacagattatccgcccggggcaggtgaatctgatgacagcaggacgcggtatcacacataccgaagattccgccggcagaaacgcccgtctgcatgccgcccagctctggattgccttacctccggcggacagtactatcgcgccgcgctttgaccattatccggatttacctgtctggcatcacgaccaggtgagtttcacactactgaccggcgaatatggtgatcaccgttcgccggttctgcatttttctccgctgatcggcatggatttgctggcacagcaggcaacacaaaccacactggatacccggccggattttgaatacggcttctttgtgctggaaggacagctgacgtaccgcggcgaagtttatactgctgatgagctggtgtatgtcggtgaagggttgtcctctgtcacactgacactgatgaaaggctcgcggttgctgctgctgggcggtacaccggtgcaggaacggataatgatgtggtggaattttgtcggctacgatgtacagacactgcagcgggctgtcagtgactggaacaatggtgatgcccggttcggtactgttgaaaatgacctccgcgagccgctgccggcaccactgtatcccgcatcccgcctgtaa

SEQ ID NO: 280713 - DNA, 486 bp, Morganella morganii
atgagtaagaataacgagtacattattcctgaaggcagttttattacatcaacgcctgaccttgataatacaatcaacattctgatttaccgcgatcctacgctgaatgaatataatattattgttcaccgggcatttctggatcaggatgaaacggttgaggaattctgtgaaaatgaagtcacgaactttacccgtgatttacccggtttccaggaagaaggtaaaatgatcacccatgaactgggaccgatgaaaatgaaagtggtgcagattgccaacagttatctgaaagaaggtgagagactgcaacaggtgcaatctctgattaagctgccttatcataaagataccaacccgaataataaccggctgattatttttaccctgaaccgtaccggtgaatttacggaatatcagcgtaagcattatgttcgtgtgttaaacagttttacaccaaattcaacctttggattgctgggctga

SEQ ID NO: 280714 - DNA, 1641 bp, Morganella morganii
atgaaaaattttgccgctgtaaaaaaatggctgataattttattcactctccttgtgcttatccaggcagggctggctgtttatgataaagctcatctgtttatctggctgagcggattatgtatttcacttttcatcatagccgttatttctgctgtccgtctcagagaacatagcggagtcactgttcatgatgatgatgagccggataccacaacagcaccggaaatcgtttttattctcggcccttatgccagagcctggttcagcaggcaaaatgaggatgatacccttcggtttgataacagaatcatctggatgctgatcaataaaccggatgatattcataaacaggttgaggcaatcagccggaaacactgccattatcagattagtgctatctttccggtattaccggacggcaatgattccgatgcccttttgctgaataaattacagggctggaaaaactcattttcccgtaatcagtttgaacaggaaattccgtgcacattaattatttattcacgcctgagcaaccagcgatttgctcatgatcctgataatgctaactgggtcgggcaatttaatctttatgatacaaaatcccggttgctacgcgatgaaataactgtgctgcgcaaagaactgaataccgtttatctgcaaccgcatgccgttgcagtaaagcaccgcaatgcactggcactcgccaccctgaactggctagacgaagccggcctgataacagaaatagaatctctgttttcggagagtgtgctcagttttaccaatctgatgttttctgattacggaaacggcccgacccgtcacggtgcctggtcccgctggatccagaaaaagtttacgctgctgccgcggatatcctcttatctcacgcttcctccattaccggtcaataccggggaaccgccaccgcatatcagaaaacaatcggttgaaatgacaccggttccttatcagaaattacgctactcgttactgtttattccggtactgatagccggtgcaatcgcaggcagtctgctctggtcactggactttaatattcagcgtaccgcaacagtcaataatctggtcgctgaatttgatgcaactccgcccaatgcattacagcagcgtgttgctcttattcagcagatgaaaaaattatctgatgcgattgcacatcatgataaaccgtatttctttatcatcgaactgacaccatccgggatatttatcagtaaactggataaatcaattacagagttttcccgtagcccgctctatgtggcacatgataaaaatattgtttttgatatcggcagttcacagttaaagaaagaaagtacagaatatcttatgccggtactgacatttattaaacaaaatccggatatgaaaattttaattgaaggttataccgataataccggcagcgataaagttaatattaatttgtcactgaatcgtgcagaacaggtaaaacactggttacaggaatcctcaggattacctgacactcactttgttaccaggggcttaggtgcccaaaatccgattgcagagaatgattctcaggatggcagagaaaagaaccgccgtgttgaaatcaaaatttatcaggaaaatcagtaa

SEQ ID NO: 280715 - DNA, 630 bp, Morganella morganii
atggtaaacagtcaggaagtctttaataaaataatgtgtattgatgcacttattgacctggaggctattatcccctctttatctgaactgcagatgaatttatccactgctgttcagcagttccgcgactgtctggaactggaagatccctattttgaacattctgaaaatttctgccgtctgctctgtgtttatctggataaaattatcctgaaatatacggacagccagcagctttcctgggcaccttatttactggaaaactatttttacggatttgatcgtgaaccttttgatgttgcagaacaactgacattcttttcatccgtaaaacgtaatgctgtttttttaccggcttatcagatggcgctgcggctgtccggattgccggaatataaaactgtactgaaacctgtagttccgctgtttgaaaaacggctgccaacgctgcctgtggctgaacctgtaccgccggtaccggaaatacctgaagccactgaatatccgccgccggtaagttaccggacagtcaatatgccgcttatttttgctgcagagatcctttgcctgatatcgattctgatttttgtctggctctatattcgcgacacactggataccctgatttaa

SEQ ID NO: 280716 - DNA, 1347 bp, Morganella morganii
atgaaaaatacaatcttcgtcagcatagccagttatcgggatccggaactgatacccactatcaaaaatatgatagctcatgctgctgctcctgagagaattgttatctctgtatgctggcaggcagaagagaaagatatttctgtatttacagacattggtgcaacgaagatagaatccggttcagataaccccgatatattttgtcttaattatcagggtgcaatactacatatccactacatcaatatttatcaggcacggggtgcctgctgggcgcgttattgtgcagaattggcatttaaccatgaagattattttttgcaaatagattcacactgtcgtttcatcaagaactgggatagtgaaatcattaattactatctcaaactcagtgaagaggtcgaaaaacccgtcattaccggataccctccatcatatacaccagcgactgcagataaagaagaagttttgactaccggaacatgtcgtattgtttttaacgaatttaatgataccgacattccggcatttaaacctattgcaattactgataccagcaattatgaacacggaagttatatcgccggcgggtttgctttttctgccggtaattttactgttgacgttccgaatgatcccaacctgttttttttgggagaagaaatatcaatgtctgccagggcttttacccggggatataatgttatttatccggaaaaaatctttgtctggcattattatacccgagaggagtgtaataaaatctggggagaccttaatcaggaatctgttgagaaaaaactggtaaaaaaaggctggtgggagtgggatttagtatccaaacagcgagtcagatatctgttaggcataaaaattgatgaggatgttgatctcggtaaatattgcctcggaaatgttcgctctctggaacaatttgaatatctgaccggaatttattttcgtgaacagttaattgttccggaactgattaaagatccaaaacctgctatattcagcgaaattccggaatcccgggatgcctggctggcccggctttattctccgttttaccaggcagtcactattgagaaatcagagcttgctgccaataatgataatgttgattactggtcattgggtgtatttaccgaagataaccagctgattgcaatgcagcgactgaccactgaagaaatggctgaacaggaatccggtgataataaaggaagctataaacttgaaattaaactgaaagataaatcccatcttattcctaaaaaactcaggctggcccccttcttcgccgattgcggctggggagaaacggtggagaaaatatggtaa

SEQ ID NO: 280717 - DNA, 1014 bp, Morganella morganii
atgaaaataaaattactggcggctctggccgctctgggaatgtccggtaatgcgctggctgtagtatgtaccccgaaggaccccaagggatttcagacggaaacgctatccgctgaatccggagtaattaaattacgggctgatgctgcagtttcaacgggcacaaatgattatatcggacgcgctaattcaccatcacttagcactgtagttatatataactgcccgggagagattgtctatggttctcgcccattagatgctgcacttgttccttacgacaattataacaatatgtacaggaccaacattgagggtattggtgtcagatttgttgcaacgcctcccaatggggatgaaggtgcagtgctgccaatgttaccatattttgccggaggcgagagcggagcgagctcaacagatatcagagcaaaccagggacgatttgtcgcttatttttataaactaagtaatgacataaaattaagtaaaccaaatatgagcgataacctgctctataccaaaaagaacatcggttataataaaatagaagatacaaccgtctctatatatgctatcgagaatatatacatcgttggtgttcctgtatgtactattgataagcctttaccagtcgacttcaatacagtcaatgcatctgatgtccggagcggagtggatagatcctttgagtttggtataaattgtaaaacagattacgggaactatgatgtcgttgcatctatcagagctgataacagaactgatgatgataattatataaaagtaactgataacaatagtaaagatgacgccttagttatagaaatcactgatggtaacaacaatcgaattaaagttaatggcaaggaagaattacgtgccagcaatatttccagcggacaaaaagctgctttcagatggcatgcaaaattgaaaaaaccaaatggacagccgtatccggcacaagggccatttcatgctgaagcagtaatcaccttaaatataaaataa

SEQ ID NO: 280718 - DNA, 1128 bp, Morganella morganii
gtgagcgaagaactgcattctacttttcagtccgatttttacacagagatcctgacgccgctggaagggaaattcgtctgcggcgaaagtatcgaatatgacccgttatacatcacgttacagtcaaaaatggcaccgaaaatgggtgcggaatacggcgattttgttgaaacaacagaaccggtcaactggcgtgaaattgaaagtgactgtctggagctgctgaagaaaagcaaacatatccgtctgattgttctgttaatccgtgcccgcagccgccagattggtctgttcgccctcgaagaagggcttatcgccctttatcagctgctgaaagacttcccgaatgaaattcatcctcagctgtatgatgaggatgagtttgaaccgtttatgcgggccaatgccatttccgaactggaagatactgacggttttatgctcgatttccgtcagatgacactgccgaaaatcaacgggctgcaactgacaatcaaagaagttgagcgcgcgtttgccattccgaaggaagagaatgccctcgcggaagagagtgtcaccggaattctgaatgaatggcgtctgaacggtgataagaccctggcttccctgaataatgcagcgctgattgtggatgccatcaaaaagctgacccgtgaaacactggaaaatgaaacaccggcactcccggcactgactcagctgctgtccttattcaataaggatttaactgctaatggcaaaaaaccggtaacgggtgtctcccctgcggatgatgccgatttaacctctgaattagtctttgccggtgatgacccggcggatgaaacccgcagtcagtcagccgattctgtcagcagcacgacagaaaccgtggttgacggcgacaccacaactgtgacaaccgaacgggttgtctatcgtgacaaagtaattaacacccggcaggatgccctcgaaaggatccgtgaaacgcgcgcatggtttcagcaaaccgaacccggtaacccgattattttactgctgagatatgccgaagaagcggcgggaaaaaatttcctccagctcagtaaattattccctgctgacatgctggcaattttggatatcaataaggatatgtcatga

SEQ ID NO: 280719 - DNA, 1017 bp, Morganella morganii
atgagccatctgcatcacaacatgttaagcgacctgtcgcactggtatgacgaaaacgagccgtggaacagcggctttatcagtctgatgcgggcagttgcggcgaaatatcccgatatgccgccaatcgggacggcgtcacgtccgcggcaggaaccttaccggctgggacagacgccgaatatggcgtttgccccgcgtgagatagcagatatctctcacgacggtaatttgtgccatatcgatctctacagtctggggatctgggggccgcagggtgcgatgccggtcaattttaccgaacaggcctttatccgcctggagcatcaggacacgctgctgcgcgattttgtgaatatctttcaccaccgcgcattgtcactgttttaccggaactggtttgtttcacaggatgtggccacgctcgatcgcaaagatgatgagcggttctcgttttatatcggcgcactcatcggcctggtgccggatgagatctgcaattccgtgctgccgacacacgcccgcctgtcctccgcctctcacctgatccgtgaggcacggaatccggaaggactggccggcgcactggagtattactttggtatccgggtggaactgcgggaattcaccaagcagtggatttttctggaaaccgccgatcagacccggatgggggatctgaattcctcattactgttatcggaaggtgccattctcggtaataccgtccaggacagacagcataaattcagtctgattctgggtccgttaacactggaacaatatatgcgctttagtttgtggggggaggatttgccgatccttaaagagtgggtccgcagtttcaccggctttgaatacgcctgggatgtacagctggtgctggccccggatgcagtgccgaaagccaatctcgacggcagtcatcagctgggttatgccgcctggctgccgcgggagaaacaggacgaaccgatatccggcatgagttttgatcctgaaactcacctgaactga

SEQ ID NO: 280720 - DNA, 1878 bp, Morganella morganii
gtggatcagaaatttcttgatttttacaatcgggaacttacgtttatgaaagaaatgtccggtgaatttgcggaaaaacatccgaaaattgccggtcgtctgggcatgaatggtattgaggtcgcggacccttatgtcgaaaggctgattgaagctttctgttttatttcggcacgctcccaggtaaaactggatgcggagttcccgaaatttacccagcgtttcctggatgtcatttaccccaattataatgcccagaccccgtcgatgggtgtggtgcagctgcatcccaataccaaagaaggtgatctgtcgaacggctatcacgttccgaagaacagccagatgtttacccggttattacccggcgaacagtcacgctgtgagttccgcagcagtcaggatctgacattatggccggttgagattgaggatgtccggctgacatctatcccgccggatatttccagcctggaaaaataccggataccgtattcacgcctgaaaggcgcactgcggatcaaactgaaacttgacagtgataacctgttctctcagctggaaaatctcgacagactgccattttatatcgatggtgacgaacgtgttgtttcccatatttttgagctgatccacgcccattatgtcgccatgattgtccggaccggcggcgatgagaaaaaagataccacgattgttaacggcggtgtttctttcgaaggtttgcagcctgaccaggcgttattgccggttcagtggaatatgttccacggtcataacctggttcaggaatattttgcctgccgccagcgtttttatttctttacgctcaatcacctgcgtgaagcattacgtaagaatgaaaccaacgaagcagaaattattattctgctggatcgttttcctcaggatcttatcagtcacattgataaagaccgttttctgctgttctgcacgccggtcattaacctgttcccgaaacgaatcgataaaatcgaaattaaccgtgcgctgaatgatttccatgttgtgccggatcgcagccggccgctggattatgaagtcttttctgtcagtaaggtgatggggcagcaggcagaaaacagcagtgaggtggtgttcaacccgatttatcagacccgccacagtgattccggcaacttcggccgctatttctcactgcgccgggaaacccgagccagcggcagtgcccgccgcaaatatgaaacactgacgccgtatatcggcacagaagtctttatttccctggtcgatcagcaggaagccccgtttgatgatgatatccgttatctgtcggtggaagctctcgtcactaaccgtgacctgccccgcctgatagaccggagcaatgactatgatttaacactgtcagactccgttcctgtgtacggcgcaaatttcctgtcacagccgagcccgccgcacccgccgtttgcccgcggagagtccgcctggcggcttatccgtcagctcagttttaactacctgccgctgcacgatatggatcacagccgcggcggggaatcgctgcgtaatctgctgcgtctgtttgtcagcccggcagatcaggaatccatgacacaaatcgacagcctggtcggcagtaaaaccaaaccggttatccgccggttaccgggtaatgaactgctggtctacggccggggtattcagtgtgttctgactgtggatgaagccggattttccgggttaagtccttatttattcggattagtgatggagaactatttatcccgccacgcggcagttaacgtctttaccgaaacagaactgcactcaatgcagcgcggtctggtagccaaatggacaccacgtccgggcaagcgcgggaatttataa

SEQ ID NO: 280721 - DNA, 2781 bp, Morganella morganii
gtggctttcagcagacaaagtttattcggcaaactcgatacgactttattccggagtatcgaaagtgcaacgacactatgcaaattaaaaggtaacccatacgttgagcttgtccactggatggttcagctgtggcaacaggaacaaagtgacctgagacaaatcgtccgtcactttcaactcgacatccagtcaatggaaaaaggaatggagcaggcactgctgcggttaccgtcaggcgccagttcgatttctgatttctcctatcatattgaaatggctattgagcgtgcgtgggtatgtgcgagtctggaatactcagaaagcgccatccgcagcggccatttattacttgcctgcctgacaacaactgagttgcgccgggcgttatccgctatttcaccggtatttgacaagatcccgctggatatcctggcatcggatctggcatttattaccaaagattcaccggaagcagagcagaatgccacggataacagtgatctcggcggcaaaaacagcctgccgggtgaagccagcaatgcgatggccggtgagcagggtaaagcaaccctggcgcagtacaccactgacctgaccgcactggcccgtgaaggcaaaattgacccggttatcggccgtgagcaggaaatcaacaccatgattgatatcctgttgcgccgccgccagaacaacccgttactgaccggtgaagccggggtgggtaaaacggcgctggtggaaggcatggcgctggcgattgctgccggagatgtaccgccgccgctggtgaaagtccgcctgctgaacctcgacattgttgcactctctgcgggtgccagcatgaagggggaatttgagtcacgcctgaaatcggttctggaagaagcggtcgcttcgccgaatccggtcatcctgttcgtggatgaagtccatacgctggtcggcgcgggcggtaacagcggaaccggtgatgcagcaaacttattaaaacctgctctggctcgcggcaagctgagaaccatcggtgccaccacctggagtgagtttaaacgtcatatcgagaaagatcctgcactgacccgccgtttccaggtgttacaggtcgaagagccttcggaagagaagagcgtggccatgttacgcggcctggtgccgatgctggagaaacaccacagcgtctggatcatggaagaggcccttcagtcagcggtgcggttatctcaccgttatattcctgcgcgtcagctgccggataaagcaatcagcctgctggataccgcctgtgcccgtgttgcggttgcacagaatatcccgccgaaagatctgcaggaactgaaatacaaaacacggacagcttcttcggaattgtctctggcagaaaaagccctgcatttcggccgcgaagacagcagcacactgaatgccttacaggatgatattaaggctcaggcagcactggcggaagaaatggaaacccgctggctgaaagagaaaacaaccgttgcggcgattgtggaaatccgtggtcagattcaggccttaatcagtggtgagaaaccggctgatgttcctgcaccggccgctgaagaaccacgcgcagcagcagcgaaagacggcgatatcgccgtggctgaagctgaaactatcactgaaacagttgtactcagtgataaagaacagctggctgagctgcaaaagcaactggcagagctggaaaaagaacttgagaccattcgtctgaacctgcgtgaagacgcggttattcaggcggaagtcaacgcagcggttgtggcatcgattgtcgcggactggaccgggatccctgtcggccggatgatgaaagacgaactgaacgccgttctggaattaccgaatcatctggcagagcgggttatcgggcagcagcatgcactggatattatcagtgaatctatccagacctcacgcgccgggctggctgatccacgcaaacctatcggcgtcttcatgctggccgggccgtccggtgtcggtaaaaccgaaactgcgctggccattgccgaacagctgtacggcggtgagcagaacgttatcaccatcaacatgagtgaataccaggaagctcacacggtatcgtccctgaaaggttcacctccgggctatgtcggttacggtgagggcggtgtgctgacagaagctgtccgcagaaaaccatacagcgtcgtgctgctggatgaagtggaaaaagcgcacccggatgttcacgaactgttcttccaggtctttgataaaggccgtatggaagatggtgaaggccgtgtcatcgactttaaaaacaccatcattttgctgaccagtaacaccggcagtgatctgatttcaagcctgagtgcggacccggataccatcccggatctgaacggaatgcgcaccgcattacagccggaactgctgaaagtgttcccggctgcgttcctcggacgcctgagtgtagtgccgtactatccgttacaggatgaatcgctgggccggattgtgcgtatccacctggacagaattggtcatcgtctgtctgcacagcacaacgcggtatttgaatacggcgacgatgtggtgagttcaattatcagccaatgttccgtggctgaaaccggtgcgcgaatcctgattcgtttcatcgaacaaaatattttaccgaaaatcggtttacatattttaaaccggaacacggaatccgcaattcagaaggtcattctggaatgtgataaccaaaatggatttaccgtaacttcggagtaa

SEQ ID NO: 280722 - DNA, 576 bp, Morganella morganii
atgaacaaattaaagttagcattattagttgctggtgctttggttgcaggtgtaagtacctctgcttcagcgtttgcaccggaaggtcagggtcttgttcactttgaaggccggttgattgatgaaacctgtaaaatcaccagtcaaaaagagcagactgttaccctgaaagcggcatctattaaaacgctgacgaaggtgggtgatgaaggtggttttgaaccattccagattgatgttgaatgcccggtaccactttctgcagcaacagatcctgttaaaactgtcggtattcactttgaaccgatcagcgaaacaacagactgggatacaagcaccggtaacctgaaaaacaagttaacagatgcaaccggcgctaaaaacgtacagattaaaatctatgatacaaccggcggtacccggactcatcagaaaattggtacaacaggtactatggtagaaccaaaaggtgacggcaaaatgtccttcacttatgttggtggttattccgcagttggtcagacatctgtcggtttagttaaagcaacagtgatgtacaccttactgtataagtaa

SEQ ID NO: 280723 - DNA, 765 bp, Morganella morganii
atgtttttaaactcagtaaaaacactgctgattttttgctttttttccggcttcgcctacagtgcggttgttgtggaaggaacacgcattatatttgatggcggaaaaaaagagcaggttgtccggattaataacaaagatgaaactatgcctgcacttattcaggtatgggttgatgatggtattgatgttaataatataaataatccgaagatcccttttatcattaccccgccaataacccgtattgaaccgggtaaaggccagagtatcagaattgtttataatggtatgacacttccacaggataaagaatcggctttttattttaatgttctggaaattccgcaggaatcagaagcaagtaaaagtgcagcacagcgtctggatgtcgcatttaaaacaagaattaagcttttttatcgcccggaatcccttcgtaaatcatcagtatcagatgaaacaggtaaaataaaatggagtgttgtggatgttccggggaaaggtaccggcctgaaagcagaaaacccgtcaccactttatatttcggttgctgcggtaaacacaaaaattaacggaaaagaggttgttctggatggtgatatgatcccgccgatgtcctcagctgtatacactcaaaccggagactctcagaaattaagcggaactatatctgagtttactttcgtcattctgaatgactttggtggccaggttgcaacgaaagttgttaagtcaggagccggatttgctgtagcaaaataa

SEQ ID NO: 280724 - DNA, 2583 bp, Morganella morganii
atgagacaatgtcaatggagattaatgctctgttcttttttatttccggctgtatcattcggtaatactactccatcgacggatgaagcagatactgacaatgataaagtggaatataatgccagttttgttcagggtattaatgttgatgtcagtgattacagttatggtaatcctgttcctgaaggaacgtataccacagatgtgataatcaacagcaataacagaggaaaacgcagtatcccttttaaaattacaacaaataataagcaggcggatgcgtgttttactctggagcaaattaaagaattaggtattattcctgatagtgaacagggagctggtaataacagcaatgttgctgaaacaggaagctgccatccgctgccgttttttgtcagttatgcgaaggtttattataacacagcagatttgacactgaatattactgtgcctcaggcaagtctggcacagggatattcggattatatcgacccgtcccgctgggatgcaggagttactgcactgtttgttgattataatctgaacagttatttgaccagtaataaaaacgggaacagtaaagatactgattataataccaatattaactggattgcgggttttaactatggtggctggcgcttcagaaaccgcagtaactctgtatggtcaaaagataaaagtttcagcaataaaaatattcagctttacgcggaaacagatattaccccctggcaaagccggttaacgctgggtgaaacctttaccagtggtcgtatttttgattcctatggcatcagaggtgcaattcttggcacaaatacgaagatgcggccggactctctcaataactttattccggttattaccggtatagccgacagtaatgcccgcgttttattacggcagaatgattacaccatttatgaaacaactgttacaccagggccgtttgagctgcgggattatggcgctctgggaaataacggtaccttacagctggtgattattgaagctgacggacgtgaaaaagttcaggatattgttttctctgcaccaccgatgatgttacacccggacacgattcagtatgcgatttcagcaggtgaactgcgggacgattcagccggttcatctcctgtcgtggtggaaggcgaattcctccaggggatcaataactttttaacctggtataccggttttcagctatcggaaaattatcagtctgttgctatcggtaatgcactgaataccccgcttggtggtatttctgtcgatatgacacatgccaaaagtgaactgaaagatacatcacaatccggtgaatctttccgtatcagttacagccgtctgtttgaggatacgggcagtaacgtagtggtatccagttaccgctactcaaataatggctatctgaattttcgtgatgcgacaatgatccgggaacgcggtgaaaattatgatgagcgcagaacggatgaaaacggccggataattaacagttatctggcagtcagagccaaaaaccagtatgcgctgacatttaatcagcgtttatgggataacagttctgtctctgtgatgggtaactattatgattactggaatgccagagatccgtcgtcccagtggacaatgtcttatcagcaatcgttaggttttctttcatacagtctggcttatcagcgcgccaaaacaaatgaaaacacgtatgacaatacctatgtggttaatgtcagcattccgttgtatcgcggatataactatcaaccggcatttaataatctgtcactgtctgcgacccgtaatgcggatggtaatacggcgtttcatacctctgcttcaggaacacagggggagcagaatgagttcagctacggtattggtgcgacggcaaactcacattccgatgtcagtgacagcctgagcggttcggcaagtgtcagaacagcactgggaacctatggtatcaccggctcgatggataacagatcaagccgccagggctctgtttccgcaaacggcagtattgttgcacatgccggcggggtaacactgggtcctcctgtcggtgatgctccttttgccattattgaagctgaaggtgcagagggagccgctgtactgagcggcagcggcagtaaagttgatggcagaggatacgctattgcaccttatctgaattcatacagagaaaaccaggtgggtcttgatcccggtaaagtcagtcaggacgttgacctggttgatgacctggcggtggtggttccgcgtgatggcgccgttctcgctgtgaaggttaaaaccaatgtcggtaaaccggttgtcctgattgttaaagacaaaaatggcgaatttttaccaatcggaaccaatatttataacggcagcggtgagtatcagactattgtcggtcaggcagggatggcgtatctgcgtggctgggatggcagcagcggtgcattatcagtcaaatcgggatcagtgggtgaatgtgtgattaatccggaaccgggtattgcacagaaaatatctgctgcaactgacacagtggttcaggtggaggttaaatgtatttaa

SEQ ID NO: 280725 - DNA, 609 bp, Morganella morganii
atgtatttaatgaatatcatcagaaattgcggaatatcattaccttcctgtgcaatatcattatttatgcttttaggaatatttacatacgctaatgctgaagctctgtgtgataataatgtcgattgtagtttggttggtgtggatgttaaatttaaaggggtctatcaggaagatacctgtgctatttcaatcaatggcgcatcatccgaagaaactgtaatattaccaactctttcatataaaacattatcagctgccggtaaagaagcaggaactaccgaatttacggttgctctgaataattgcccgactaatgttgaaatactgcttttttttaaaagttccggtggtaatttaagcccggtaacggaaaatctgaagaatgataccggtacagggttagctgcaaacgttgaactcaggttgcgggatgataagtttaatcacattaaaatagacaatccgtcttcaggattggtttatcctatccccggtgagaattcatcagtagcaagaaaatattatgtttcttatttttccggtgataacgttatttctcccgggaatgtaagggcgaagtcagtactcgaagttgtctataaataa

SEQ ID NO: 280726 - DNA, 534 bp, Morganella morganii
atgagaattaataacggtagtgctcagaagttcatagcaagaaaccgcgctccccgcgtgcagattgaatatgatgtcgaaatttacggtagcgagaaaaaaatcgaattgccattcgtgatgggtgtattagcagatttatccggtaagccgttagagccgctcccgcctgttactgaccgaaaattcctgagcatcgatattgataatttcgatgaccgcatgaagagcatgaagccgcgcgtggcttttgctgtaccgaataccttaaccggtgacggtcagctgatggtcgatatcacgtttgaaagcatggatgattttgcgccggatgcgattgcccgcaaaatcgagccactggctgagctgctggaagcgcgcactcagttaactaacctgcaaacctacatggatggtaaggcaggggcggaaggtctgatcatgcaaatcctgcaggataaagaactgctgaaaaccctggcgtctgcaccgaagcgtgaagacaaagtttcagatccgtctcaggacgattaa

SEQ ID NO: 280727 - DNA, 1506 bp, Morganella morganii
atgttagctcaaaatactcagaaaaatgcgggcgcgaaagcgacgcagacgcacgaacaaagtgatttcagctccctgcttgcgcaggagtttaaatcaaaaactgaacagtcaaaaacggcggttcagaatgcagtgaaaacgctggctgaacaggcactggcgaactctattacgatttcctatgacgcgtataaaaatatcgagtcaatcattgcggaaatcgatctgaagatgtcagaacagattaacctgattctgcatcataaagagttccagcagctggaaagtgcatggcgcggcctgcattacctggtcaataacaccgaaaccgacgagaaactgaaattacgtttcatggatatctccaaggatgaactgcgccgtaacatgaaacgctacaaaggcgtggcatgggatcagagcccgctgttcaaacaggtttatgaagaagaatatggccagttaggtggcgagccgtacggctgcctggttgctgactactatttcgatcatactccgccggatgttgatctgctggggtctatcgcgaaagtggctgcatctgcacacgtaccgtttatcaccggtgcatctccgtctgttatgcagatggattcctggcaggagctgtccaacccgcgtgacctgaccaaaatctttacccagaacctggaatacgcagcatggaactcactgcgccagtctgacgatgcccgttatatcggtctggccatgccgcgcttcctggcgcgtctgccgtacggtatccgtaccaacccggttgacgaatttgattttgaggaaaccactgacggctctgatcacagcaaatattcatggtcaaacgcggcatatgccatggctgtgaacatcaaccgctcattcaaacattttggctggtgtacgcttatccgcggtgtggaaagtggtggtgtggtggaaaacctgccgtgccataccttcccgagcgatgacggcggcgtggacatgaaatgtccgacagaaattgcgatttctgaccgccgcgaagcggaactgtccaaaaatggtttcattccgttaattcaccgtaaaaacacagactatgcagcgtttatcggtgcgcagtctctgcagaaacctgcggaatattatgatccggatgcaacggctaacgccaacctgtcagcacgtctgccgtacatgtttgcctgctcccgtttcgcgcattatctgaaatgtatcgtccgtgacaagatcggttcattcaaagagcgtgatgacatgcagaaatggctgaacgactggctgatgaactacgttgacggggatccggctaactcttcccaggaaacgaaagcacgccgtccgctggctgccgcagaagtggtggttgaggatgtggaaggaaatccgggttactaccaggcgaaattcttcctgcgtccgcacttccagctggaaggtctgactgtttctttacgtatggtcgctaaattaccgtcactgaaaggtgctgcgtaa

SEQ ID NO: 280728 - DNA, 486 bp, Morganella morganii
atggctcaagatatgtttttaagaatcgcaggcatcgatggtgaagcacaggatcactcacacaaggatgaaattgaagttctgtcatggcgctggggtgtaaaccagcagtccaacatgcacagtggttcaggcggtggttccggtaaagcaactgtggaagatttcacatttgttcactataccgacaaagcaagcccgaacctgctgagctactgcttatctggtaaacacatcaaagacatccagtttactgtccgtaaagcgggtggtactccgctggaatacctgatcattaaattcactgacgttatcgttactgatgttgcaatgcagggttctatcgaagacgaaagccgtccgcgtgaagtggttaaattctctttcactaagatgactcaggaatatgttattcagaatgctgaaggtaacaaagcaggtactatcgcagctacctacgatgttaaagctaacctgatcagctga

SEQ ID NO: 280729 - DNA, 561 bp, Morganella morganii
atgtccgataatacagaaaaaaatcataccatttttaaggtaacgaatatcctgtttgccctggtaatatcctttctgataaccgggtgcagttttttcagtacttcaaagtcaaccccggctgaagctaactccgcatcagaactaaaaattagtttggtggccagcgctgaaatcaataaaagtaaaaaccaactgccatcaccactgaacatatttgtttatgctgtgaaatcaaaacaatcgtttttaagtacggattatttaacatatttatataaaaaccagcctgaccctgaaaatgaaatgcttattctggaatatataatcaggccgggcgaaacgaaaataatcaattataaaattaattcagaatttccctatatcggggtgatcgcagcttataaagatatcagtaacgccaaatggagtgccgtatatccgttatcaaatttgcgcggcgcaacatggactgaaaagtacattttatttaccgggcctgaacatgaaattaaagtcttattttcaaattcagttgtgtcaatcaaagagaatggatga

SEQ ID NO: 280730 - DNA, 1347 bp, Morganella morganii
gtgagaacaaataaagtcgtatggagtgagggattgttcctgcgccctcagctattccaacagcaagaacgttattttgaatatattgctcataaacgtgcagcgaccattagtccgttcttctggggttttgcacaatacgagattgatcgtgaggcattgtcttatggcaagctggtcttacgttcagggcagggggtcttccctgatggtacgccattcgggatcccgggccatgatgagcagcctgaacctttaaccattacagccgaacatctcggaaagatgatttatctggctgtaccgctgcgtcttgataacagcgatgaaacgatttttgatgaatttgataccagttcattagcccgtttctcttcgtatgaagaagaaattaatgataccaacgccgtgcgccagggaccgaaaccgatccagctggcgcgtatgcgtttgcgcctgatgccggaaacggaaatgacagaatcatggattggtatctcgctggcgaaagtcaaagctattcagccggacggcagtgtgctgctgcattttgaggatcatatcccgccggttaccggttatgccgccaactatctgctgatggagtggatcacccacttaaacgggctggtaaaaatgcgggcggatatgctggcatcccgtctggcgtccagtgacggcaaagccagtgccagtgcggaagtggtcgattatctgttattgcagatcttcaacaaatatgagccgatcttaaaccatctgcgtcatattccggaaaccgcgccgattgtgatttatgaggaactggcgaagtttgccggtgaattatccacattcctgcgggcgaaaacacgcaggccgaatgtggcgccgggctatgaccacgcaaatctgtatgcgtctatcagaccgctggtggatgaagtgcacggtctgcttaaccagatgctggtgcgttccggtcagagtattccgctggtgcgtcaggagcacggtgtctggacggcatcggttattccgagcgaactgcgcgggttctccaacctggtgctcgccgcatcatcgcagctgccgcaggatgttatgcagcatcagtttgtggcacagaccaaaatcagctcgccgcataaacttcaggaactggtccgttcccaccttccgggtctgattttacgcaatctgccggttccgccgagacaaataccttatacctccggatatctgtactttgaactgatgaagcaggggccttactgggaaaatattctcaacagcggctcgctcgcccttcacgttgcaggggacttcccggggatacggcttgagctttggggcgtgagggattaa

SEQ ID NO: 280731 - DNA, 1383 bp, Morganella morganii
atgaacctgttcaatgacaattacggtgatgatgacgatcaggacaaaaaaggtcctgatggtgcatcggcggatcatcatgaagagcaatccccccagtcaatgggggcttttctgcatgatgacggcagtttttttgcgccgctggacagtgatccgctggccaaagatgaaatcgattaccgtgatcttgcaattaagagcgaaagtatccaggcccggatccagcgtgtcagccgggcggaagatccgttacttgagactgtgcagccgctgctgcgggcactgagtgaactgccggaacaggtcgctgacctgaaacaggtggagatcctcaaaaagagtctgaaaaacgaaatagccacttttaccgctgtatgtgatgcggtgagtattccgtggcagaaaatggccattatccgttatgccatttgtaccgcaatcgatgaatccatccactccaaagcctggggactggcttccggctggtcgcagagcaacctgctgaaccactttgaaggggataacgacggggggaacaaattcttcctcctgataggccgtttgtccatgaacccgcaggaatataccgatgtgctggacattctgtcccgtattctcggtctcgggtttgaaggccgttacagcatcatcgaaaacggcgatcgccagctgaataaaatccgccagcgtctgctgtcgttacaacagagtacccgtgactcagtgccggcagcgttatcgccgaatgcgatagtgacccgggaagatcatgaagtgcgccggatatatctgccggtacgtatttccctgattatctgtgcatttattctcatcagcctgttttccgtctttaaatactggctctccgttgatctcggggaatttaacgaccgggttgcatcactgaaacgtggtgatctgaaacatactcagctggctgtcagtgtgccgagattgcgtctggctatcctgctcaaagatgaaattgccaaagggctggttgaggtggatgaaaccggcccgcaaagtattgtgacgttccgtggtgatgcgatgttcctgtccggacggaaagaagtcaaacctgaaatggacaaaatcctcacccgtgtggcggatgaagtgaagcgtgttgacggtaaggtggtgattgccggacacacggataacgtgcctatcggacgggctaagtttgccagtaacgaggagctctcgctgaaacgtgctgaagctgtgggggacttctttgtgaaagcggggatcccggcacagggcattgagacaaaaggcatgggggcttcactaccgatcagcagtaataaagatgaacaagggcgtgcgcttaaccgtcgcgttgtcgtttatgttacctatctgtga

SEQ ID NO: 280732 - DNA, 3897 bp, Morganella morganii
atgtcattctggaatcgaacatttgcactgcggtttttaaaaagatttctgatatttctcttctttttattagcagccgccatcatatggtacctgggaccgacattcggctatggtgagatccgtccgctggaagacgcggtaccgcggatcatcttcattgttctgctggccgttatttttatcggactctggtgccgtgttccctgttttctgctcgcggtactgacgctctgcgtgacattctgggtcttctcgccctatctgctgctcggagagtcctatccgtttgaggaaaccacaccacgcctgattgttatcggggtcattacgctggtgacactgctgtattgtgtctggctgctgatctccatgctgcgttacaacccggaaaaactggatcgcttttttaagaaaagcaaaattgatccggtccgcacgactgagcactaccgggaagtggtcgcggttatcaataatgcagcccgttatgtagcgcataccggccgtaaaatttcccgctggagtcatttctggcgcccgaaaaaggtggtttacgatctgccgtggtacatgatgctgggtccgaaggactccggtaaaaccactgcagtgctgtcatccggccaggaattcccgttaccggaacaattgctgcgcgtttcccgtgaaagtacaccaaccgcaaactgcgaatgctggtttaccaacgaagctatctttgttgatacttccggtaaatacattgatgaatcagatgaaaacgcgggtgagtgggaagcgctggttaaggcgattaagaaaaaccgtccgctgaaatcactcaacggtgtggtggtcaccattccggtgactgacctgatggggaaagataagaaagagctgtacgccttatcatcaaaattcagaacacaactggatatgctgcgccatgaattaggggtgcgttttccggtgtatgtgatgatcaccaagatggatatggtgtccggttttgatgaatacttccgctcgctgactgtggaagaacgcgatcagatctggggctttacgctgccgtttggtgagaaaaagaaaaaatccgatgcgattgtcgagatccgcgatgtcctgcgcaatgagttatccgcgctggagagtcgtctcgataaagacatgaccgcacgtatgctggatgaatatgatgtcaccacgcgtaaacgtatgtatcagttaccgcaggatttccggttactggcagactctattaccgagtttggtcagaacgtcttctcgccgtcccgttatgacgatacgcagaaatttacctctctgcgcggtatctactttgccagcagtacacagtcaaccatgcagtctctgctcaacccgaacaccattgttcagaaatggcgggatatggcaaacagcctgggggatgtggttactgacaaagcggaggatacggaagatcgcctggttcaggaaaccgtcaacggtaagcatttcttcctgaagcagttgtttgagaactttatccgcgaccgcaacctggtgcgttataacctggcactgaccgccaggtaccgcttccagactctggcaggacatctgctgacaatcctgctgacggtctggctctgttatgcgctggtgatcagttatcacaacaaccggcactatctggatgatgcgacggtgaaagtggagcaggtatcaaccgtgctggatgagtatctggaaaataacagtgacggcctgctggcgaagatgctctctctgactcaggatattccggtgctgggggtgtttgactttaaagatccgcgtctgtcttaccgttacggcctgtatgtcggctttgatatccgcgaggaatcagacaagatttatcagtatttcctgcagcgctggatgctgttctcactcgagcggatggctgagaaatccctgtttgatgccgtgaccgccgatgattcagacaccatttacgacaaactgaaaacctatctgatgctgcacggtgaaggtaaatttgataaagattacctgattaaaacgctgacagaagaagcccaggcaaaccggatgatcgaaaactacggtcagaccattgtctttgtgtctcacctggaagagctgtttaacgatccgcagtggaatcagtacaaccctgagattaatgaccgccttgtggctgccgcacgtgtggttctgcaaaaaaagccgttagcctctcgcctgtaccagaaagttaaagaacaggcgatgacggaggcgcctgaaaatataacactgaacaagctggccggtgaccagctgggcagtattctggaaatcagtgatgaatcactggcactgaacggtatccccggcatttttaccaatgccgggtatcatcaggtttttaaaaaaaaactgacggagtacgtgaagaatatccagagtgaggacagctggatcaccggacagaaaagtgaaacccgtccggtcgatatcaagcagctggacggcttttatatgacggagacagaagaagcggtactgaaactctatcttcaggaatatgtgtcagtctggaatcagttcctcaccggtattcagctgaagaaaatcgtgccggatgcggcggtgggaaacgataccacatttgatatgtatgctttgcagatcctcagtgcgccggattcaccgctgattgatatggtcacacaaatcggccatgaaacggcattatccgtcgattttgccaaacaggaatcgcaaatgccggatctgtccaaaactcaggccgggcggaatctgacaaccgggcgtctggggtcggtcacccgtaacctgaaagatattcagacagtgaaggacgcattgtcacagcgggaaaccaaaatcctgtatgacaatgtggatcgccgtttctcatcactgcaccgcttaattaatctggatacctcgccgcagcccggaaaccggaaaataccggcaggacagggcggggataacgggctgaataaaatcgtcagtatgctgggggatcagcataactatctggtgatcacggaatcggcaatggaggacggcagtgcgctgccttacccgtcagaggcggaaaaacgtctgaaagcggagtcccggctctggccggcgccgcttaaagcgatcattatgccgctgctgggcggaatatccgtaaagctcagtcagcagttcacgctgcaaagtaatgaagcggtcaaaatggaattaggcgacatgtgtgtcgcctcttttcagggtaactatccctttgcggacagcgaagaggaggtcagcctcgaagagtttgaggtttttttcggccccaacggcatagtggatgcttattataaagagaacctggaaaagctggtggataccagtgtgtcaccatggcgttataaacgggaagatctgcgcggaaatgaagaccgggaggtgctgcgttttttcgaacaggcccgggagatcaaaaaagccttttttcgtaacgggatgagtgagaatgtttctttcagttttaccgcaagtatcccggcattatcgccgcggattctgcagtttgggattaatattaacggaacagcactgacttacaaacacggaccggtctggccgaaatcatttaaatggccggagcaggatacggaaaataccatcacgatgaatgcggtttccgccgataattctgataacaccgaagaacgcgttcttatgggcgaatgggcattgttacactggatggatatggcgggcgagcaaaaaaatacatcggcggccaaacagactctgatttaccggctgggtgatcaaaaggtcagtataaatatcaacggattaaattataaaggaaagccggttaataaaatcctgaagaactttaagtgtccggcgaatatttaa

SEQ ID NO: 280733 - DNA, 657 bp, Morganella morganii
atgaaaataaagacaattttctcaggattgggaaatagttcaggaagaaacagaattaagggtaatcacgtaattcagcgtgttatccgccagtgcagccaattaaatatcaatcaatcgcttaacagcagagtgattacagaacaatttccgtggtgttttgttgtaccggtatcagaaaagaaagacgcattttatctcggtgctttcagtttcctcagtgatgataaatgtgtggttctgtacacgaaggctgcggataaatggacaatcagacacctgagtacggtatcaaatgttattttctggtgttcacggataatcgcatttcatattgaaaatgaaaattgtgtgattgatgaaaagaaattaagaaactgggttacgtcgctgcaacgatattactctccgctgtgggaatcagttctcctgaaaccccggtttcagtttaagaacaattcggacgttctgatatctgaaatgacgtacacggattgtaatatcaatgacaatggaggagttagcgcgatgccatggatgaattggcctcattgtattaagtcttttgactctgcctggctatggcgtctgaatcggcagggaaacattttagactcaattaagacagatatcagaaacacggatgtctccgtttaa

SEQ ID NO: 280734 - DNA, 2466 bp, Morganella morganii
atgcctcgaacaataactttgtattgctcggcaatgccggaactagccggtgagccgggcttagcaatatcaacgctggagggcgaggaagctctgtcagcgttgtatcagtataaggtggttgcgaaaacacccgcaaacccggccattccgtggcaggttgcggcaaaccttgatctgaaaaaatttatcgggcagcagatgaccgttattatcgagctggatggtaacgggctggaagtcggacgtggttccggtaagggacacagagaggttacggggcttgttgagcgtgcccgttttgtcggccgggatgaaaaccaggcgatgtatgaatttatcatacgtccgtggctgaatctgaccacactgacctctgactataaaattttccagcagaagtcggtcgtggatattcttgatgaagttttaacggattatcacttcccgatcgaaaagcgtctgtctgccatttatccgccgcttgattatcaggtgcagtatggggaaaccgactttgatttcgtccagcgcctgatggaagagtgggggatctactggttttatgaacattcggatctgaagaaccgtctggtgcttgttgaccatgtcggcgcgcataaacggacatccagtccggcgtatcatacattgcggtatgagtcagataagccgaaagatggtcaggaatatatcgatcagtttggtgctcaggaaacggttacctcaggacgttggtttacctcggattatgactttaaaaagtcccgtgctgatatttccgcgctggataaaaagccgcgtaaaaccaactataacgaatatgagcaataccagtggccgggggattatgatgatccgcaagtgggcgaattcctggcgcgtgtccgcagtgaggagcaggggtgtctgggttccagagctgccggttccggtgaaattcgttctgttgtctgtggtacaacgtttacactggaaaactatcctcagtctaaagcaaaccgtgaatatctggtgatttcaaatcagttgcgggcaactgaaattaaccagcagtctgacagtgatgatttcagtatttacaccagctttgtggtgcagccgacaacgaaagtttaccggccgccacagactatcgctaagccgtttacccgcggcccgcaaaccgctctggttgtcggaccggaaggtgaaacggtctggaccgatgaatatggccgggtaaaagtccgctttatgtgggatcgctatggtaaaaataccgacgcggattcctgctggatccgtgtcgggcagtcatgggccggggataattacggtggtatttacattccgcgcgttggtcaggaagttattgtggattttctgcacggggatccggatcgtccgatgattatcggcagtctgtacaataacgcaacaccgccaccgtgggatctgccggcaaaccggacacaaagtggtttaatcagccgtactatcggcggtggtaaaaccaactataacggtattcgttttgatgataaaccgggactggaagagtattgggaacaggcggaacgaaacatgtcccgagtgaccaaactgaatgagtcccagcttatcggggtcaaccattcccagactattggtgtgaactcggattccactatcggggtcaaccgcagtgaaacggtaggggtgaacaagagcagcatggtaggggctaacagcagccagattgtgggtgctaacttctcccaggatgttgtcggtatggcctcccgtattgtcggtctgtcggactctattattatcggcggggcgttcagcgggatctacggtgccggacattcaatgaatattgctgcagccagttcctataacgtaggtggtgcttatgccatcaacgtcggcggggctcattccaccaacgtcggggggtatcactcgattgcggttggtggtgcaatgcaggttggtgtcggtggggcgtttgcactgacttccggcggtgaactggcgattggttgtctcggttcgctggtgattactgcggatcatatcaagatcaaagctaaaaatggtttgattgtggatggggcaaacacctaccttaacccgggtgttaatgcgcacgcccgcgggtttggtactcagccgggcagtccggtggctgtcggtgctccggccatgccgggattaccgggatttttcttcttcctggttattcctgtaccgccaattacaccgccgacatttaccacaccgccaccaccgacaacgccgacgacaccgtcgataacgacgccgacaacaccgtcggtaacgacgccgacgacaccgtcggtaacgacgccgacgacaccgtcggtaacgacgccgacgacaccgtcggtaacgacgccgacgacaccgtcggtaacgacaccgacaacaccgtctgtaacgccgacaaaaacaggaacaggatctataccattctga

SEQ ID NO: 280735 - DNA, 834 bp, Morganella morganii
atgttactgcactttaactggccgacccgtaaagggtcggtcaaactgacagaacaaaatagcattgataatccggttgctgttaatgcgtttactgcggatgtgatatctcattccggtgcagcgcgggatactgatgttctgttttattacaccaataccggtcctgttttacagaacaactgcagggaattagtctgtgttgttaataaacaacaggttgcgtttggttcgaaagtccggctgatatacggttctgctattcagattggtcatttttcactgtcatttgtcgcagctgagaataaccagtcagcctctgttattgaagcgttaacggagctggcaccggcaaaagtggatttcacgaaccttgaaattaatgaaatattaccgcagggtgcgggttttatttcgatggaatatgcagcagaagagagccggaaaaacggtgatgaattaaaaaaactggaagttgaatataaaaaatttctgttatggggcgaaattgattcccctcaggtggaaaattacgcggttgctgaagaggcaaaattatctgccgcagacgacgacggcagttttgattcactctgtgagcagataaaagatctgaacctgacagagtgtatttttgaaacgtcggcatttatggatcgtgtctggcgtgagttgtccacgatggaagaagttgatttaacacaggatgagcatgagaactatgacattctgagaatgctggcaccggacggaattattccgtatgcgaaggactctgtttcctcacttgtttcgaaggaactctataaattaggcttagacagccgtttataa

SEQ ID NO: 280736 - DNA, 831 bp, Morganella morganii
atggccacaacacaaaaactctccgatattcttgccaactcatcgctggatgaattttttgatgagactcttaataaggtaaaacaaaaaccgaatgacttagttattcgtgagactttatttaaattgtgttgcctgaaaggttactgggaaaaagcgatggttcagctggaaacctggtcattaattgatggccatgatgatgaccggcagcttgagctgtataaaaacctggtattcagtgaaattctgcgcgaagaaatcctgaaagggaaacgcgaaccgatgacattacagcaggaattaccggagtggatgaaatcggtctgggaagctaataaattactgattgaaaataagccggataaatcagaagcactgcgtttacaggcattcgaaaatgcaccggccgccggcggcagtggtgagaaaatcggtgatttcacctggatggctgataatgacagccggctggggcctatctgtgaatttattgtcgccggtggttaccgctgggtgccgtttgcggatattgaaaccattaatattgttaagccgcgcgatttactggatctgatctggatccacgctcaggttaaagtaaaaaatgatattttctatggttatattccggcccgttatccagtccgtgataccgacagcgataaaattaagctgggttttgaaacgcagtgggaacaggtatcagagtatttcctgacagggaaaggcggaaaaatggtcattactgaccagggagagtatccgttatctgaactgaataaagttaccatgacaatggccggtgctgaaactgaacatgcaggataa

SEQ ID NO: 280737 - DNA, 495 bp, Morganella morganii
atgcaggataataaaaagcaatatatgcctgcattgcttgaccggctgattgatgatcatccgaaagagcggcgtgagcccgttgataaattttacttcgattcacgtaaaatgcgtgaggtgatattgcgtgatctcctgacgattttcagtactgaaaatacggaaggcgaattgcaccgttacagtaagtcaccggttgttgactccgtgattaattatggtatcgcgccgttaaccggcgcgtatgccaggcaactgggctgggaacaggtcgaggaaaagttacgccgggctattctgcgttttgaaagccggattattccggattctctggttattacgccgctggcgggaaaagatcagtatgcgcaatatggcattattgtttttgaaataagaacactgatttactgggatccttatccgctggatctgcgtatcaaaggttcttatgatatggaaacccagcaggtcagtctgagttaccgctga

SEQ ID NO: 280738 - DNA, 831 bp, Morganella morganii
atggaaaataaagcattacctgaatttgatatctgtataacccgtggtgatcaccgctttttgctgacttccggtcctgattacatcagtggtgtattacgcggcggagagctctggaatgccacctcaatcaatatcagtcagcggctgctggaatttgtggcagcaccggttatttatgatattggtgctaaccttggctcctggacaatcccggtgggaaattattttcagcaccgtaatggcattgtttattcttttgagccgcagcgtcaggtctataatcaactctgcggcaatatttatctgaataaactgaaaaactgttatacctttaacagcgccatcggcaattatgatggtgaaactgatgttccggtgccggatccgtataccgataataatctgggggccgtctccctggataaagccatctttctggagcaacgctgcggctcagaatttccctcagaaaaagggacaatcaatatgctggacacactgaatatgccgcatgccagcctgctgaaaatagatgttcagggtatggaactggaagttctgaaaggcggcagaaaatggatacaggcatccggttacccttatattattttcaccacatggggcgactatatgaaatccaccatagataaaaataaacaacttttttctttattacaggatgaaatgggatatgagttgcttcagatagataatttctttgttgctcagcataaaagcaatgaaggcggaaaactggtgatgacgccaaacggttatattgtaaaacgtgagacatcacagtttggtatggattttttaagcttctga

SEQ ID NO: 280739 - DNA, 1407 bp, Morganella morganii
atgcctatcgttatcggtgttgttgataaagcaacacgcgtgacaaaaaaagcctcaaccccggtcaaggatggggttaatgtgctgaaagccgttccgggagtggattatgtgctggtcgataaacaaaccggtgctgcacctcagaaagtgatcatgatccgcgacggtaataatctgaaattattcctgatgggggaagaagatccgtctgtggtgattgaggattattatctggttcccggtcagattattggtgaatccgctgataaacaggtgcatgactatacaccgcaatctgcggtggagcatgacaatatcggcagtatggcggataaacaggcggcggttcagcaacccggtgaaaaactgctggcaccgattacctgggaatcatccggcccgggctgggagttgctgactttcctggggctggccgtggccggagggactgctgcggtgatcgccaaaaataataattcagatgatgatcataaaaacaatgattcatccgctgataataaagataacggcaataccaatgccggtgagaaagataacggaaataccgctgctgatgataccggcaacggcaatgccggtacggatgataaaggtaacagtaacgccggaactgaaaacagcggtaagggcaacacgggtacagacgataaaggtaacgataataccggaacagaaaacaccgggacagagaccggcggtaagagtcacaccggcgcggatgatcagggcaacaacaataccggtacgaatgataacggtaacaccgctccggatgatcaggagaatacggatgttccggctgatattaccgcgattgctgctattgatgatgttgcggattctgctgaatttgatcctgaaaacctgtcagcgatgacaccggtattaagcgggcatcttgaccatgcgctgacggaaggccaggtggtggttatctcccgtgacggtaatgtggtgggttatgccacagtggaaaatgacggtaaatggagcttcaatgataccaccggcggttttgagcagggacagacttatcattacaccgcacgcgttgaaggtaatggtgtgagcggtgcggagtccgatccgttcagcattcactatggcaccagcggtcagcacgaagcaacagatatgcctgcgctgccggggtctgaagatgcggcggcactggctgccaccgggctgctctccggtcatgaaggctccgtgaatctggataaactgctgagtcagttaccggagcaggataccccggcggaaaattataatgcagcggtcagcacaccggaatatctgcaaccgtctgcggaatttaccgcgcatgagatggtgcatccggagctggcatcattaacggaaactcagacctcactgttctga

SEQ ID NO: 280740 - DNA, 1362 bp, Morganella morganii
atgagcaatcatagtgtggatcaagcacaggaaccggttaagcccgttattgacgaagttgaagaaatattacctgcgggaaaactgatgatgctgggattacagcatgtgctggtgatgtatgccggtgcagtggcggtaccgctggttatcggtgaccggctgggactgagcaaggaagtggtgacactgcttatcagttcggatctgttttgctgtggtatcgtgacactgttgcagtgtatcggtatcgggaaatttgccggtatccgtctgccggtgattatgtctgtgacattcgcggcagtgacgccgatgctggcgatcggtgccaacccggatatcggcctgatggggattttcggtgccactattgcggcgggggtactgacaacgctgattgtcccgctgatgggaaaactgatgccgcttttccccaatatggtcaccggtattgtgatcacctctatcggactgagtatcatgcaggtgggaattgactgggcagccggcggtaaaggcaacccggaatatggtcatccgctctaccttggtatctcatttgccgttctgctgtctatcctgtttatcaccaaattctgtaaggggtttctctgtaatatctcggtattactggggattatctttggttttgtactatcgctgatgtgcaatgaggtcagttttgacggttatgcggatgcgccctggtttaaactggttactccgatggcgctgggaacaccaacgtttgagccgatctctattatcaccctcagtgtggtgctgctgattgtctttattgaatcgatggggatgttcctggcgctcggggaaatcgtcggccgcccggtcggaaaagatgacattgtgcgcgggctgcgggtggacgggatcgggacgattatcggcggtctgttcaacagtttcccgcatacctcattttcccagaacgtcgggctggtgggcgtgacaaaagtccacagccgctgggtatgtgtggtctccggatttatcctgattatctttggtctgctgccgaaaatggcggtggtgattgcctctattccgcagtttgtgctcggcggggcggggctggtgatgttcggcatggtgctggcgacggggatccgcattttgtcccgtgttgattacagcggcaataattacaatctctatattgtggcgataagcctgggggtcgggctgacgccgacactctccggtaatttctttgccaaactgccgatgttcttacagccgctgctgcacagcgggatcctgctggcgacggtcagcgcggtgatcctgaacctgttttttaacggttatcatccgaaaaaggaaagtccggcaacgtga

SEQ ID NO: 280741 - DNA, 501 bp, Morganella morganii
atgaaaaaacgttttttgttgttatccgcctttattctgagcggctgtgtgatgagtgacggggaactccgtgagcgttatgccgcacattattcacagtccccggcatatgtcgccgcatttaaacagcgcattgatacgatgagtgtcaatgagatagcggcaatgggggcggaaaatgaccgggcgcggatgcaggggcagccgcgtatgaaagtggatgacaccgtatatattgaaaaaattgaggcaaaaggcagtgatgtgatttatcactattccctgtcggcggagtggctgaataaaccggcggcggcgcgggaaagtgaccagaaaaatatgcagaaagatctgatttaccgcacgtgctcgttacagaccgtgcgtctggcgcaggccaaagggctggcagaaattcattattattacgatgactatcccggccatattttatttacgctgaacgccaataaagccgtctgtgagaagaacgggttttaa

SEQ ID NO: 280742 - DNA, 900 bp, Morganella morganii
atggatatacggacattgcgctattttacggaagtggtgcagcttaacgggttcagccgggcggcagatgccctgtttgtgacacaaccggctatcagccgcagtattctccggctggaagaggagctgggatttaccctgctgacacgggaaccggatggtgtccggctgacagacaagggcgcggttctgtttgatcacgcaacccgtattctggcgcagtttaacagtatgaacaaagcgttacaggataaatcggggccgctgaccggcactctgaatgtcggattaccgccggttatcgcatcgacctattttgccggcatcattatggcgttcagtacccggcatccgcaggcggaactgaaaattcttgaactcggtacagaacagatggcggaggcgatggcagaaggcagtgtggaaaccgccgccgttatgctgccgtttgatgatacccgttttgatttacagcgctttgcaaccgatcgcctgatgctgctggttaatacccggcatccgctggccacccgggagcaggtgagtttccgcgaattaacggatgagaagtttgtcctgttttccgaagatttccgtatcaatgagcttatccgtaacgcctgtggtatttaccattacaagccggtggtggcagggcggagcaatcatctggatctgattatggcgatggtcagtgccggggtcggcgtcacgctgctgccggagagtatgtggcgtatacaccggacggacgggctggcggcggtcagtgtggcagacccggtactctcttatgatcttgcgctggcaaatatgaaagggtatcagagccgcagttgtctggcctggaatgcgctggcgcgggaaatgctggggatcacgcccggcgttccgtcatga

SEQ ID NO: 280743 - DNA, 429 bp, Morganella morganii
atggtaaataaagtatatattttattcctgttgatttgttttttttctaatccactaaaggcaaaggaactaaataaaattaatatttataaaacaggtgctgtttatcagaatcataatgataaatatgaaattgacacctgcaaaaaatttcttccgaccaaagaacaaatcatcacttactttacacacgcagaagaatcaaaagaaaacagttggatgcatgagtattattcagcttgtatatcaaccggatatgttgaatttaaagatggaacatccggtaaatggacgatacagtcaagtggttatggatatgtcattttcaatgatggcagttctgttgattttctctaccgaaataacaaatgggaagaccctaatgcctgtacatacgggttaagtgatgaaccggagccgggctgttag

SEQ ID NO: 280744 - DNA, 606 bp, Morganella morganii
atgctttatatagatgacaatggattagttaaatcaaatcgcattaaaattaaaatatttaataatattgaacaagggagaatggacaaaattaatggtattattgttcaccaaacagatacccctgaggcaagtcatgtttttaatagttatagtcatcctaaatctaacggcgctcattttttaatagatagagacggtactatttatcaaactgcatcactactgaaaataacatggcatgttggaaaaatgaagtcaagatgccttgtcacaaaaaaatgtgagcctgctgaattaaaaaggatggctgatttagaaaaaaaactgacagctaaaggtttttccgatattgaaaaaataaaaccatttcctgagcgttaccccaccaacgttgacagcattggaattgaaattgtgggtaaagctcaaaaagagaatgaccaagaccctgtatatgaaacagtaaacaatcaacaaaactcagcacttaagtggcttgtatctgagctattagaaactctggatatttccgcatccgaagtatacaaacatcctgatgttgccagaaaaaataaaactgaagcgagcaccgcatcatggtaa

SEQ ID NO: 280745 - DNA, 309 bp, Morganella morganii
atgattaacattctgctgatgagtgatacggggatttccccgcagatgctggcgcaaaaaatgcgtgatgaggcacaggtacgcggtattgatgccagcattgagtgccggtctgtttttgattaccgcgaatgcgcggcagagtatgacgccgctctgcttgccccgcagtcccgccatcacctgcgcgagtgtcagcaaagcgcggcagctgccggaaaaccgctggcctgtatcgatccggatatgttttgggatctgcaaagcgctgcggtactggatttggcattgtcgttattgaagaaatag

SEQ ID NO: 280746 - DNA, 411 bp, Morganella morganii
atggtaaataaattctctatcctgttacttacgatagctctcactcctgaagcaatgaatgctatgtctgtaaaaaatatagaaatagaaaattcaggaattaccgtcacaaaaaatccccctgcgggcgaagttaatgcctgtaaaaaattcacaccaaataaagaacaactgatcaattacttccggtcagcagaaatatcgtcagacatgtcatgggatcatgattattattcatcctgtatttcatacggcagtcttgaacttgaaaatggtcagacaggtgaatggcgaatatcatcaagcggtgccggtgatatccgctttcctgatggtaactatatctacctgttccgcgaaaagaatgaatgggttgactcttatttatgcggtgacgaacccgattgctga

SEQ ID NO: 280747 - DNA, 606 bp, Morganella morganii
atgttatatattgatgataacggattagtaaaatcaaaccgcattaccattaaacgattcagtaaaatcgagcgcgacccgatggataaagtgaatggtattattgttcaccagactggtacgcctgctgaaacacatgtctttaatagttacagtcatgcaggcagtaatggcgctcacttcttaattgataaagaaggcgtgatttatcagacagcttcgttgtttaaaacaacgtggcatttaggaaaaatgaaatcgagatgtgttattacaaaaaaatgtgaaccatctgaactcaaaaaaatggcagacctggaaaataaattcagaactaaagctatctcagatatagagaaggcaaagtcatttccggatcgctacccaagtaatactgatagtatcggcattgaaattgtcggttactatgaacgtgacagtgataataatgacatatatgacgcagtgaacagcaaacaaaatgcatctcttaaatggctgatatcagaacttttagaaacattggatatttcaatatctgaagtatataaacatcctgatgtagcaagaaaaaatacaactgaagcgagtactgcatcatggtaa

SEQ ID NO: 280748 - DNA, 1149 bp, Morganella morganii
atgaacatgtatttttcacgtaataatcgtggttattttatttggcaaaaatctcatcatcgtaagctcatacgttttgatctcagaaccaaagatttccacaccgcaatgttacgttccaaagtattactaagtacttattaccgtttaaaatccaataatctttcaatagaagaaataaaagagagcctgattatggaaagagagcgttacattgagtatgaaacgcatatgcaagtagctcaattctgctgggggaatacctctattcagaaagttcaggaagatatacctaaagaacataaaattagtatagttgcagaggagtggtacaactatatgtcaggtgaatggcgtccgttaacattgaaagggaaccaggccgcagctcttttctttattaaatggtatggcgataaaacaattgagtcagtgactaaagctgtggtaattaagtttaaagattatttagaaaataagtatgaatcagagatatcacgacaaactatgtttaaacgggtatcagcactttttaatttcgctatagaaaaatgtgattatatttcaaaaaatccatttaatggattaggatataaaagagctaaaaacttacgagttaaaaaatcaatatcattagagttacatgaaaccgtactatctcgtatgatggagggaactcacgattggtggctattacagattttatactatacaggtatgagactcactgaagttattcaactaacagatgatgactacgtgacagtacttgataatggtagtttgattagctgcatcagtgttaatgataataatggtaaacgagttaaaaataaaagtagtataagaacaattcctattcattacaagttaatagaaaaaggaataatgaatactaagcccacatttaagtggaaggttcataacccagcatctaatttaatttctaagttgttcaatacggaaggttataaacatagtgctcatgactatcgctatggattgagtgatagacttagagatatttcagggttaccagatcatgttcgctttagtatccttggtcatagcagtaatacagtaacagatagtatttatcgtggaaaggaaccaatatatttaatgaaacaagcaatagatcttacataa

SEQ ID NO: 280749 - DNA, 1143 bp, Morganella morganii
atgaaaattgatttggaaaattttgtcagtgaattcaataaagataaattcccgagttattacgtcagagatgcacaaatgtatggctgggaattagcctgtattgaaattgaaaccggggtatttaaggttgcgctcgatattgatttcagaggaaatgtctggctggtattcagggattatgaatcactggctctttttcagaagagccttaaacgtgattttgattttagaacactgatttatgacggccggaataagagatatgaattcagccggatcccgctggatgaaacagatactgtctccattgtccgcgggatagccagggatattatcggtttttataatgacatctctgttgatttctatgccgcaaaacagaatgaactcagcaaaaagattgaatcgcatttataccagagtcgggtagcgaaagtactggatgatacgtaccatttcttcaggggaaaacggttatccgttctggaaacggtgagatggatgaaagaaaataaatgcgggatcagccggtttggtgatggtgagctgatgctgatgctggaactcggtatttattatcagagttcggataaaaaactgatgtatgaattgcggagtatttgttccggaaagcgtaatacacttgtttgtatgcctgattctggatcagaagtcaaattctggcaggatttctgggtgaactactggtttatctgtaaattttttattgatcagccggtatacggtgacacggctgtcagtcgtccggaggggttttatcagtgtggtgaagaactggctgatgcctggatggaattatgggaaggaaaaaatgtttgtattgtgacgggcaaagattcacgtctgaataccgaacactacttactgtctaatataaagaataaagatgttctctggtcaaaaaacaaggatgcttatgacgatatcgaccagttaactgaacagtgcctgatgaaagagaatattgatctgtttttaattgcgttaggccctgccggtaccgtattgtctgccagactgacagataaagaaaagatagcatatgatatcggacatctgacgaacagctacgataccgtcttttcaggggcagccgtaccggagcagctgcctttctga

SEQ ID NO: 280750 - DNA, 984 bp, Morganella morganii
atgcagggagcattatcttcagataacacatcatttttccgcctgccgctgttatttgtgctggcctggctgggggcaggatacctctgggtatatgttattctgccgaaactgctgacggggtatgtcttttattatctctggccgctgattcagcttaacagcatcacggagtggattgtttacagtccgctgttctttgtggtcacgtcatttgttttcctgcagcggcatttcagccgggcagattccggggcaattatccgcatcattattatggcggttatctgttttgtcctgattgaagcagccggttttctgcagctgatgatgacattacccggtatggaaaaaaggccgcattttgcccctccgccggtactgatgatgacactgcactggtttttaaaattgctggtggcggttgccgttgtatggctgacgacgtggctgatgacccggacgtgcagtaaaaatacccccgcaccccggctgacaccgcagaatcaccgtctggtgaacagtgtgttactggtgataccgatgctgatcatttattttctggcgtcatttctgacttttatgaccacggcggacagctcgtcccgtgaggggatcatacagttcgtgcttattctgtttacctccggattcacggatttattgctgcaactgctgattatggcctctgttctgattgcgatactgtacagtgctttcggatacagcggggaacaactgcgggtaaaacgactgttgctgacagccgtggccggtgcactggtgatcggtctggtgtattacgggctgattttcatctcgttttattttaccggcgctaatgcttacggtaacccggatgcaacggaaggctcagttaccgtttcccgttatctgagccttgtgattgccgggtttattctgcggatgatggtgaaaaaactgttccgggaaataccggcagcggagccgatgacgaattaa

SEQ ID NO: 280751 - DNA, 1542 bp, Morganella morganii
atgaccaccaacaaaccaatactaaaaaaaatcactctttctcttctggcgttaattgtaattttttatacctctaaattaatgctaaaaggcgtgggttcgcattcatccgaaggcagtgcttttttgttgagtattctgattattatctttaactcatcaaaaaaagcattttggagtgtgatattcccgatcacacttctctatgctatttattcacctatcgggctgatttttggctcgcctaattatcagtatgtggcgtcgatatttgccactgatttactggaaagtaaggaattcttttcgcaacttccgctctataattatttatgtccttttattattatctttggtttactgctgtttcgttttttaacggtgaaatataaaatagatttttataagaataaaactatcttatgtatttttattttctttgctctgttggaacagtcccctttttcttactttaagtcgatacttagttctgctcaaaaagtaaaagatgaattggtcaatctcaactataccaaagctgaaagcacctggggtgaatctgttctgacagataaatcaacgtatgatacctatgttctcgttattggtgagagtgccagaaaagactaccatagtgcatacggttatccggttattaacaccccttttatcagtaccgaaaaaggtctgttggttgatggcttaacgtctggtggcccgaataccatttcttctctgcgtcttatgctcacttatcccgataaaaacaactgggaaccggactatacgaaaagctttattgatttagtcaattctgccggtatagaaacctactggatatcaaaccagggctatattggtgagtttgatactccgattactgctatagccaagaatagtgctcataaaaaattcctgaagtacaatgagtacaaatcaaaaaacacccgtgattttcaattactcccctctatccgagaagccattgagtctcatccccggaagaaaaaactcattgtcgttcatttatacggttctcacccacaggcgtgtgaccggatagatgattataagcttatcgttccggtgcaggatcagaaatacagctacctcaattgctatatctcatcaattaataagaccgatgattttcttaaggaaatttacggccttcttgaaaatgaatacaaaactcagcatgcctcattctctatgatctatttctcggatcacggtttagcacaccgggagatagatggtgtcattcactttaataataatcggcagagtaagctgcattatgaaatcccgctgtttatgaccagctctgatgcggctgaacataaagcctgtaagtcatcgaaatccggactgaattttactgatggtatcgcaggatggttaggcattaaaaatgcgcatcttcagtctgactacagtttatttgattgtcaggatgaccctgatgactacggtttgcgggaaaaaattcaaaatttccccgaagagcttgacccggccattgatatacggggaaaatag

SEQ ID NO: 280752 - DNA, 1368 bp, Morganella morganii
atgaatcatttaacatgtttcaaagcctatgatatacgaggccagattggcaataatctagatgaagatattgcctatcggattggacgtgcatattgtgcatacctgtctccttcagacgttgttgtagggtgtgactgccgaaacagctcagaagcccttaaacatgcattaatcaggggaataacagattccggatgcaacgttattgatattggtatagtcggtactgaagaagtttattttgctacaagctatctcaatgctgatggtggtatagaaataacagcaagccacaaccctattgattataacggaatgaaactagtccgagaaaaatctaaaccgatcagtggtgacaccggattaaatgaaatcaagcgactggctgaaaaaaatctatttccaacttcctctaagaaaggacttatttccctgatatcaaatttatcgccatatgtagaccatcttttttcctacctcgattcatcttcaatcaaaccgctgaagttggttattaattcaggaaatggtgttgcaggccatgtagttgatgaaattgaaaaacgatttcagtctttaaatattccaatatctgttgttaaattatttaataatccggatggtaactttcctaatggcatacctaatcctttattgcctgagtgcagaaaggatacacaagatgcagtgatacaatataaggctgatattggcattgcctttgatggtgacttcgaccgatgctttttctttgatgaaaatggtgcctttattgagggatattatattgttggtatgcttgctgaggttttccttcagaaagaatccggtgcaaaaattatacatgacccaagacttagctggaatactattgatatcgtcaataaagcaggaggtacccctgttctgtcaaaaacaggccatgcttttattaaagaaaaaatgcgtaaggaagatgccatttatggtggtgaaatgagtgctcaccactatttcagagatttttcttattgcgactcaggtatgatcccatggcttttagtcattgaattactcagtaaaaaagccgtttctttatcacagttagttaagcaatatattgctgattacccagcctctggtgaaataaattcgcttcttgatgaccccaataaatctatcattcgtgtaactgaatattttcaaaatgatgctattactatagatatgactgatggcattagtatggagtttaatgattggcgctttaatttaagatgttctaatacagaaccagttgtccgattaaatgtagaatctcgtgctgatattaaactaatgcacgaaaaaacaaagcttattcttgatcttcttcgaaaagaataa

SEQ ID NO: 280753 - DNA, 1401 bp, Morganella morganii
atgaaaaatattttacctgtaataatagcaggaggatccggaactcgactttggcctagctctagagaaaattatcctaaacaatttctatcaatttttggtaattgctcttttttacaaaacacactctctcgtcttgattctttagaatgtgctccacctttaattatttgtaataatgaccatcgttttctcgttgcagaacaattaaaatattctacattgtccggtataattcttgaatcaacaaaaaaaaatacagcacctgctattgcattagccgcttttaatgctatcaaagatggaattgatccactacttttagttttaccctctgaccatattattaaaaataataatgagttcattgatacaatcaataaagcaaaaaaaatagcctccgatggttatttaattacgtttggtattgttcctatatctcctgaaactggatatggctatattcagaagggaacttcgattgttgaagaaatattcaaagtttcttcatttaaagaaaaaccagatcatgaaactgcgataaattatgtttcatccggtgattactattggaatagtggaatgtttttatttaaagcatcggtctatctaaatgagttaaaaaaatactcgcctgatatttataaatattgtgaacttgcattacagaaatcccgacgtgatctcgattttatccgcgtagatgaagacgaatttaagctttgcccttctgattcaattgattatgctgttatggaaaaaacagacttatcagcaatgatacctctaaatgcgggatggagtgatattggctcttggtctgcgctctgggaaataagtgataaagataaatatggtaatgttattagtggaaatgtttatacaaaaaatatttctaactgttatatatcttccactgaacgagttgttgcagctattggcctggataatatcgctatagtagaaaccaacgatgccattcttgtcactcataaggatcaggttcaattagtcaaagatattataaactccctcaaggaagataataaatatcattatattaaacatagaaatgaattgaaaccctggggctcacaagactccatagatgaaggtgaacgttaccaggttaaaaaagtagttctcaaacctagtaataaaatttccttacaagttcaccatcatagagctgagcattggattgttgtttcgggtacagccaaggtaactaaaggtgattcatcttttatactgacagagaatgaatcaacctttataccgatcggtgaaattcattcaatagagaatccaggtaaaattcctctagagttaattgaggtccgttccggaagttaccttgatgaagatgatattttaagattaccggaagttaaaaaataa

SEQ ID NO: 280754 - DNA, 213 bp, Morganella morganii
atgaaaaaaaacaacgaaaagcaattagaactcccgatattatccgaagttaattcgggaaagttctatgcaaataccagaaatggtcagcaaaatacgaagctatcttcttgttttaacgatgatgttaaggctgcggatgctgatgacatcaaaatttatcattcaattagtaatgattattttagagcattatcaacaaaaaaacgttaa

SEQ ID NO: 280755 - DNA, 1185 bp, Morganella morganii
atgtctgatacattcactgcactgtttaaacaagcgctctatctggtggttaaatatactccatttttaatattattttccggattaaccatttggttctaccttagccatatcggaagaataaacatattccctgagattctgtcttcttattccagttttatctcaattttagcctccctgttctttatcggaacagcatttagtattacatttattctgccaagcttagttctgatcctccttcatttaaccctcaaccaaaaagacaactttaaatacataaagaaaacacctgtcgtcagtacattcatatcctgtgcttttattgctatattattatccatatcagcctataatgtcagttacaaaaaagatgtttctttcgacataacatggataaccgtaacttcagcatcgttactttatgccataataaatataggaataaactacacctacataaaaagaaagtcattgactaaaaacacattgtgttttattggaataacaatgactgtaactttttttatgtcaatatcatcattatcaatctcattccccatgtcattgattttaagcaaagtctctgctgataacgctatatcatcattttttctttcagtaattttattaacatttactttcttttgttttataccggcatcaatttattatcgtcaattcgataacaaattaattaaaccagaaaaaaatgaagtatcattaatgattacttccatacctttggttgttttctttttggtttgcatgctgattcccggattatctgtcagcattatacacttatctctgaacacccttggtttttcagactctcaaacacattattactatatcaataacaaaaaatatacttcagatatgtttaataaagatgactggaatcctgtcacgcagggaacatttggcaaaaaattatatattaaaggtgtcagtttgttttcaatgtcaggaaaaaagcttatttgtcctgaatatacgcataagcttcaaattgaaacctacaaaacagacttatataagcaacactttgaactggataaagataaaatgaaacagcttaaggctgccacgcaaaactgtatcctgtttaataatgatgatatccagcaatgggatacattattcgatgacaacggaaaaataaaaggaactgaatga

SEQ ID NO: 280756 - DNA, 864 bp, Morganella morganii
atgacaacattatcatttccgttattaatctgtcagtcgcagcgccgccgggatgattaccgtccggatgatatgcgcagcggtgattttgacttacttcagctccgtgatctgttgcggctgcatgatgtctccgagcaggtggatccctggaccatgcagaaaccggagacggacagtcatctgctgctgatgggacataactacacgccgcaggtttttaatctcggcgcgaaagcgaccagccggatactgtttgatgaaatgcggcagttatcctcacaattgacctggtccggcggttatccgggcgtgctgaaaaaactgatcacccatatgcagaatgctaatggcaggccgtatcgtgaccgtgcgctggattatgctttcagggataatatcctggctcaggatgcactgaatccgatgcaggcggcagtgaagaaaatcattgccgcacagattgactggcagggcgtgaagatccgcgaagaggctgatttgcagcatctgctccgggaagggctgaataaaacactgtttccggcctgtaaccgctggcaggatctgaaaaagaggacgccggtgatactcaatgatacctgggcaacagaaatcaccctggattctcttcacatcaaaagtaatcacttcaccgcacaactgagttatcagcttcagggacatttcggcctgagtaccgcagatatgaaacggtacagggattcccggtttttccgcatctggtatgtgctgcagcgttataaaaaattcgcgtttaaaccgtttgttatcaatatcagagcgaccacagaaatcagcggaaaagcgccgggcagccggacagaaaataaagaaaattaa

SEQ ID NO: 280757 - DNA, 564 bp, Morganella morganii
atgaataaccggtttgatatacaaggcgccgttgcacgggttatgtaccagccggcggattatctgcacagcagccgcttattcagcggattgccgccggaagcgcaatctgcgtcataccgcagaatgtataatgcggccattattgatcactaccggctaccgcgtgagagggattttgatctgttatctccgctgactatcccgctgttgcgccattggcaacagcttccggccgtcagccgttacctggatatgttcatccgccatgcttatggtctgccggatgataccgtgcctgattcataccaacaggcatttttgtcactgagccccgtgctgccgctgccggcgtggccgcaggcacaggtaatgcaggatatcccggcaaccctgcccggcctggttgccatgacgcaattattatccggtttttcccccgcgctggcggcccggtttcagctgatgacggatgcgtccttatcaccggcagaaatacatctgccgcatctgccctgttctcttttacctttggtattacattatgtgccgtttactgcctga

SEQ ID NO: 280758 - DNA, 306 bp, Morganella morganii
atgtcatcatttaaccggactttacctgtcacaacgatcaccgggatcacggagttactgactgatctcagcggccgggagcaggcggcttatcagaatatcgtattacccggaaccgcaaaaaaagacctgcgccggaaaacacaggcactgagcacagggcaaacaaccacagacaccaacgatgtcatgatgatgctggaaaaccaggccgtgatggccaaatggcatacggagatcagtttttattcccgtatgctgcatctgaccctgaatgccgcagatacggtaattaagggtcagtga

SEQ ID NO: 280759 - DNA, 1047 bp, Morganella morganii
atgcaaaatctttatactctaatcataatttccgatgaaggattacaaaaagaaataaccattccttccgggagatacggcatcaataatgcagtcaatcatgacaacaacctgattaacctgaatatcacagataccggtttactgcctgagcagacagacgctgaactgtatgacgatcattatcgtgtctcttttaaaacatgtaatggtgaattaataacacaagaaattagttataactccccttttatatgtcagggaaaatgtcttttcgctatcaaaaatcaatccgatgaatggtgtaaaaacataatgttatcaggaaaaaaagtgagacaccctgctcgtcgctatcttcttcccgttatgattctgctattattcataccaataaccggattgatgttctttcaatacagcgacaacagaataggaaaccctgataaaatagacaaaataaatattataaacaaatatatcgaaaacaatgattatattattaatgaaaatgatattcttattttatccactaatgaacatataattaagatcatcagggatacgcttcccggccaccatattcacagaataaataaatcaaaattaaaaataaacaataatgatattatcctgacgcctgatttttatcacagaaaagagatcatatatatacgacaggataataataaaacaccgttaaccctgttggccatccctgatatattcaggaaaaatatcactataagatatttttcattcgatgacataaccaggttaataaataacagattcagtcatcttccgattcgatactctgtgaaaaaatcacataacagcattatcatttatggcgaaaaaaggagagataaggaaacagacaatattataaaggatatcaatactgcgatatcctcagcaccagaaaacacgctggtacagtacagggaaataccataccgtgatacacctccgggagtatatggttcagtaaattatattcacctgtctgataaccacacaaaatttacctctgatgataaataa

SEQ ID NO: 280760 - DNA, 969 bp, Morganella morganii
gtgaatattgaatgttattacagtgatcctgagtctggtttttgtacggagatggtaaataaacaggtggccgatttactgtcagtgatgacaaaaagaaaagaaaaaaaacagtgtgataatgatatcccggtaatctattcaacaattcaacattattatgataaatgttacagtggtaatgtattatattttattccaaaaaaagaaagaggtgattatcatttccgcgacaagggtgatgctattatgaccttggtctcaccagcagggaagataaaaaaaataatatattcgaatacgttacctgactatattttatataaaaacacggcagataaataccctgatacgcatcctgatgatgtgatttctgcaaaagaaccgaaaagcatggcagcagaaagaagaacggtggaaaacatcccggaatcagcaaatattccggagacagaatacacatctggagcagaatacacaccgaagacagaatacacaccggagacagaatacacatctggaacagaatacacaccggagacagaatacacaccggagacagaatacataccggaggcagaatatacaccggaggcagaatatacaccggaggcagaatacatgacggcagcagatatgacgccggagcttctggttttccggctctccggcgccacaccggagaaaaagagtctcacgttacggtattatgagcaggaaaagggggcgcaggaaaaagccgctcaggttatcggctataccggaaaaaatcaggctgtcccggaaaactgcagacctgattattattgttcttatcatttcaggcagaaatatcagccacctgaaccggtgtttatttaccgggaaaagccgggccggtttaaactggaaaccggttcagaaacgcttagccggcgactgaaaacgatgaacgctataaatggaattgatagtgttgatatattataa

SEQ ID NO: 280761 - DNA, 858 bp, Morganella morganii
atgtattatgatgcatgtcaggcaatggattacctgagttgttaccttccggaaaaaaaagagattaatgggcgtgtcattcattgtcatctgattaatacacagaatacattggatgttttaattgatgctgaatcatttctccattatctcatcggggaaaatactattccgtgggaaattattccggaacattatttatctgaactgattaatgaacataaaaaagcgatcagactgcctttcttttcaccggaatgttatttccctgaactctgtactgtcatttctgcggcgaatatcacacgcaggcttgcattcagcgggaacggtattgatttctgtctgatcggggcaaaagggcggtttgatattaccggcatgccactgacagcggatctttctgttccggtgaatgcgggtatttatatcggttcaactctgacatttaccggggtgattcagcaaatcaatgaaggcgatatctttttcattacacaaaaccagcaatttctgagagcaggaggctattttcagatgacactgaaacaggagcaggacgaaacggttatcactgaacgcgggatcattccgcaagcgccggtcactccaccggaagcagccgtttttgacagccgcagagtgccggttcaggtggattttttgcagtaccgcagggtgtttccgctatcagaactgatggcgctgcaaccgggcgataaactgacgctgccggcggcggataatcatctgatcacgctggaaatcagcggccagcgttttgcacagggggagctggtgcgtatcggggaacagtacgccgtggaaattcatcatatctttcaaaagggtaaatga

SEQ ID NO: 280762 - DNA, 468 bp, Morganella morganii
atggatgatagtattaattcagatataaagtcgcttatggagcaaattttttcttacctggaaaatggctcattttctgatctttttaaaaataataaagagcatgatttcagtaatgtttattctctggcctgtgattattatgataaaggattgattgagcaggctgaaaaaattttccgatctttgtgcctttatgatttcagtaatattgattatttactcgggctggcagcggtaaagcaggttcagaaacaatatcagaaagccattaatctctattctttggctatcagtctgaatgaagataatgcatcctgttatttttacattggccagtgttatttgttttccggggagaaagatttggcaatgtcgggtttcaggcaatgtatctcaatggcatgcaatgaaaatgaaagagagcaatcattacattatatatcaatgttggagagtgagcgatga

SEQ ID NO: 280763 - DNA, 2973 bp, Morganella morganii
atgcatttaaaaatagatggaagagattatgttattctggatattgaagagtcacaaagtgataagggtgtatttcctgatgtttattctatcgccgactttataaatcaagaatcaaaaagtgtttgctttgaacttaaatatgcatcgatttcttatattacttttaatgccaggaaggttggtctcttattttgcagggatttttcttctgtttctattaatgcaagattcaaacttaatgatacgtacactaattacaatgagtctcagtggcttgaagcaaaaaataaggttggctctgatggttttgagtacatttcaaagggtaagttattctctacttcatttgaatcaaaggatgttgataattatcgggataaaaaaataaattttgatattgtcggttacgttgattccacattagcatttatatataagtgtacgtgttatatcggtttgtttgatagtgcctataatgtagttagtataaaatctaatagcagtaaagcacagtatcttgaattccataataaagacagtagtgtagggaggcgtatccggttgaatacattatttgctaataagttggtgtctatggcaaataaaggtattgataatgtattactgctaagtaatcagggtcttattgagccggatattaattctggtgatactataaatcaggttccaatggattttcacggtgccaatgcactttatttttgggaaatgttttattatgcaccgatgatgattgcggatattttacttcagcatcaaagttacaatgaagctgaacgttggttacagtatatttttaatcccgccggctatatcgagaatgatatatacacaggtcggtactggaatgtcagaccgctggcggaggatgagcaatggaatgagtcgctgccggatgataccgaccctgatgcaatagcactggcagacccgatgcattataaaatggccacctttatgaagacgctggaactgattattgccagaggggataaggcgtatcgtgagctggagcgggattcgctgaatgaagcgaaatcctggtatatacaggcactatcattgctcggaaaagaaccggttacattgctgaataaaaactggtcttcacctgacctggctggtgcggcaaaggcaacgatgcaacgtttattaatgcaggtaaatagtccggccgattcatcttttatctccgtaaacagtgcaaatacgctgactaacgtatttaaaccacagttaaatgagaaactcatcgcctgcagagagacgataaatcagcgactttttaatttacgtaacggactgtcgattaatggtcagcgcctttatttaccaatattttcatcaccggcagacccgcggaatatgctggagtcacaggtcaacaatataaatagtgaaaaaataattataaataaaaaaacgttgatgtatcgtttcccggcagttatcgaaaatgcaaaaagcctggtgtctcagttgattgagtttggtgataagctactgagttttaatgaaagcagggataacgaacagttctctgagttacttattcatcagggcaatgacttactgtcacaaaatatcagaatccaggatgaggaaattaaaagtctgctggcagaaagaaaatcgctattggctcagcaaagtgaaattattaaccgggaaacacattatagtcagttgtattctgaaggtatatcaacagaggaaaaattagcattaatgctgaatttgtcttcggcagcaatacgatcaggcgctgcatttattgacgggaatggtaaatatctggatttagcaccaaatacatatggtacatcggtaggcggttcaaaatggagtgcggctactggtggtgtatccgaaataatggagggaacagcattactgacacaatcctgtgcggatgctattgaaaaaagtgcggaatatagcaggcgctcacaggagtggcaactggaagcagaatcagccagagaagaaaaacaacaaattgctgctgagctggaagcaatggatatgcaaataaccgcagcgaagatgcagaaacactatatcgtgacagagcagcggcaaaaccagcagcaattacagtttttgcagcgcaaatttacccgcgcggaattgtacggttggttacgcgggcggctgatggccatttattctcctttttacgatctggcggtttcccgttgctttatggcagaggacgcctatcgctatgaaatgaatgttaatgcggcagaccgttcatttatcaacatctcggcatggaggggggcatactccgggctgatggccggtgaaagcctgatgctgaatctggtacaactggaagaggcgtatctggaaaaagataaacgggttctggaagtcacccgtactgtctcactggctgaggtgtacaactctgagagaatgggaaataacaaattcagttttgctgatgttaccgcgctggtcgaccggggagaactgaaaaaaataggcagcgaaaataactatgttgcgttgattgatggcaaagagcaggccaataacaaggaactacaggcagttattcagctgaatgagctgggtattgatactgattatcctaaggatttaggtgatcaccggctgattatgcaaatcagtgtgacattacccgcgcttattgaaccctatcagaatgtccgcgcgctgcttgaatatgaaggtgaaggtgatagccaattgccgcagggatgtaaatcgatagccgtttctcatggtatgaatgacagcggactttttcacctgcaattcggggacagtacttatctgccgtttgagggactgtcagtaaaaagtaacggtaaatttaaactgcggttttttgatgttggtggcggggaccagaaacggttattacagaccctgacggatatcgtactccatatccgctataccatttacaaatag

SEQ ID NO: 280764 - DNA, 4464 bp, Morganella morganii
atgaataatacagagcaggtgaaaattgaaacgccgtcactgccgaaaggcggtggtaccatcagcggtatgaccggtgcaccggggaatatcggtccggatggtgctgcgaccttttctgttccgctgccggtcagcaaaggacggggttatgcaccggaaccggtgctggcatacagcacccgtaacggtaatgatgctttcgggcttggctggacagtcagtctggctgcggtcagccgcagagtggtgaaaggtgttccccgctataataatgaggatgaatttaccggcccggataatgaagtcattattccggttttggatactgccggtaatccggtggtctcccggaaaaattcactgttaggtgactcgctgaacacaatataccgggtgaccgattttcgttcccggctggaaaccacctttgacaggctgcaatactggcaggcagaaagcgaggtacccggaagcccgtctgaattttgggtgatgtttgccgccgacgggcaggtccatctgttcggctatgaggattcagcccgtgtatataaaccggataaccggcagcatatcgcccgctggttaatcaatgcctcggtgtctccgcagggagaacagatttattaccgttactgtaatgaaaacggggataattgccctgatgatgaggttcgcagtcatccggcaccggcataccggcaccctgacaaaatctgctacggcaataaaaggagcgcccgccgcttcccttgcgttaacagtagtccggatgataacgcgtggctgtttttcctcgtctttgattatggtcagcgcagttgtgcgctggcggatattcccggctggcaaatactgtccgggcagtcatggccgctgcggcaggatagcttttccggttatgaatacggctttgagatccgggtacggcgtttatgccgccaggttctgctttttcaccgtactgcggatttggctgccggaagcagtcagccgggtgatccggcgctggtttcccggctgatcctgacctatgacgagtcaccggttatcaccacattgattgccgtacgccgggctgatttcagtgatccggccgaccaggccggtatgacgctgttaccaccgcttgaatttaactggagcaaaccggaaaaatggctggaacatcaatgggaaacactggaagcaatcgggaaactgaactctctccagccctaccagtttctggatttatggggggaaggcagcgcaggggttttatatcagaaccggggtgcatggtggtatcgttcacctgtgcgcaataaaaaaagcagtaatccggatgccatcacctgggatacgccgcagttactgcctgatattccggcattaggtaaacacacgctgctgattgacctggacggcgatggccgtctggaatgggttgttatccatcagggggctaacggttattatccgcaggataaagacaatgcagaaaaatggctgcgtttctcatcactcagtggtctgccgacagagtttcattacccgactgcacaattaattgattttaccgggaaagggctgtgtgacttagtggtcatcggtccgaaaagtgtccggttgtatccgtcagaccgtaaaggctggaaggccggcactatcattgagcagcctgatggtgtagtgctgccggtattgggatcggatgaacgttcttttaccgggttcagtgatttactgggtaccggccagcagcatctgatacgaattaatgcagatggtgtttattactggccgaataaaggtaatggctattttggtcatccggtttatatcccgggctttattcccggtgaacattttgatcctgaaaatctgtatctggcggatattgacggcaatggttcggcaaatattatttatgcacattccgattacctggatatttatattaaccagagcggtaaccgcttttccgagccggtgaaattgccgttacctgaaggtatccgctatgatcatacctgtgaactgcagtttgcggatattcaggggaacggcgttgattgcatgatcctgaccagaccgctgccggaactgcatcactggttattcgagttttccacaaaaaaaccgtggatcctcagcgaaataaataacaacatgggggtgaattattcactgagttaccgcagttcagcgcagctctggctggatgaaaaagcggaatcagaatatcagaaaaccccggtgtgctatcttcctttcccggtgcattgtttatggaaaacaaaaaccagagatgaaataaccggtaatacgctgaccagtcaggtgcgttaccgtcatggcgcatgggatggtgcggaacgggaatttcgcggatttggttatgttgaaataaccgatacacagattacggctgattcagataataatccggaaaatgccatgccgaaacaaacccgtacctggtttgccaccggtattgatgcgcttgataaacgtttttccgccgaattctggaaaggtgacaacgtggcgtttcccggttttacgccgcgattcacacaaaattcaggcgaaaatgaaacagactgctccgctgagaatatgcagaaaacggaatactggctgcgccggggattaaaaggacagttattacggcaggaaatttacggacttgataattcagccctgtcaccggttccttatgaggtaacagaacaacgcacggctgtccgcctgattgaaccccgcggaagttatcctgttatctatccgtcggttattgagcaccggcattatatttacgaacggtttgcgcctgatccgcaatgtaaacagcacgtcattctaagcagtgatcagtatggcgcaccactgaagcagatcacaatcagctatccgcgccgccctcagagcggaattaatccgtataaatcgcttgatagtctgccggaaagcacatggcagagcagttatgataatcagcaaacgcaattgcacttcgtattacagcaaaacagttattatcaccttgataatcctgatcaaaatatatatcaactgataatagcaaatgcacagcggcaggacatggctgagtttcacggcgattatatgccgcggcagggttatactctggaaaatttattacagcggggcagtctgattcagtatcagaattacttcatattcgccggacagacgcggatcggatatatagacagtaaaggacagccggggctgtttccacctgattttccggtccgcattgcctatacggaagaagcggagtttgacagcagttatcttgtacaactacagaaatattacccggataaggagccggagtctttattatacgccagcggatatcagagaagtgattatgctttttcacgtaatcacgaacagggaaaatatgttttttctgcaaaacgggcgttgataacatatggcaatgcagatcaattttatgtcccctcattttacagaaaaacagaattaacaggatataaccaactgatatgggacaatcattattgtgctgttacccgttatacagacgaaaacagattaataacagaagcaaaatataactggagtttattacgtccttatgagctgaaagatgctaatgataataccacccgggtaacgtacagcagttccggtgaaatcataaccggcagcttttggggcacagaaaatggtgtgaaatccggctattctgaaacagtgccggttttaccggttgatattacagaggccattaaatcagtaacgtcattatccgtttcacagatgtttatatatgacagaaacagttggatgagaaaggtctcacctgaatttatgacgccggaatacagcgatattatctccagattgaaagataatcatcttattaccgaagatggttattttagtgcattttccggcgaacatattaacgaggaaaaccgttgtttaataaaagcggtgatggtaccggataaaaacagattgccgccacatatattacagctaaagagtgaccgctacgataatgataaggcacagcaggtgcggcagagcgtcctgttttttgatggttttttacgccggttgcaggagtctgtcagggtgacatccggtaatgcaggtgttcgtaatgatgacggtgagctggataagcacaatgatggtgcattaatcacagaaaataccgatttccgctgggcggtgaccgggcgcaaagaatataacaataaagggtatgtgatccgcgaatatcagccttactttttgaatgactggcgatatgtcagcgatagttctgcacgcagcgatcagtgggctgatacccattattatgatccgctgggacgactcgcccgtgttgtgacagcaaaaaaatatctgcgtaataatatatataccccctggtttacggtgcaagaggatgaaaatgacacaatataa

SEQ ID NO: 280765 - DNA, 3564 bp, Morganella morganii
atgggaactgaaaatcataatttacttttttcacgcataatcgaccaggcagttccggggctgaaaaaaacactatcagcaaaacaggctgaaaaatccgttattacccggctgaagcagggaacggcagggctgatggctgactatcccggtctcgcgtatccggaggctgaaatactgcataatcgtctggcggtggctgttcacgctgcggttcgtaaacagcgggaattacgtcagcttggcgtatatcgctcgccgcgtgaagaaaaaggacttaaagcattaacgcggcaattaacctatgaagatcagttcaagccaaactgggcggagaataccttaccggatgcgatagattcaggtcacggcgcagttgcttatctttatgatcttcttgagtttacagaaaacgtgattgaaccgaaaggagacagtgataaagcgatcacactaaaacagcggcgcccggatatttataacattttactgaatgaagaaaatgtaaacggcgaaatttctaaaattgacattattaatcagattatcggtaccgccatcagtcagcaggaaaaaggagaagagccggagacgctgatgctgaatgtgcgctatccctaccggtttccgtttgaaaattacatgaatcagatttacgccgtcctggatgaatatgatttatcaatcggtgatattaaacggcgttgtgatcctcaggcaccctattttacacagtctgatttgcacggagatgattccgattcctctctctggctggacagccatttaggaccggaactgcgtgaaattttgctggcggcaccacaatcccggaatagccggacagaagaaaataccccctattttaagcaaaactttggtgttgaacagtttacagatttattgaacagcactgttttttgtcagcaattaagccttgagcgcagtgacctggagtcgttattttcctgcggggaatatgtaccgcatttatcgccgaatgttgacccggaaacgattaccggctatgacgctgaacagggaagagcggtttctcctgctgtttatggatcggtttttattaataataatgaattacctgcgattacaaccggcagtgacgcgggtgatgatgatcacacattcagtcatctggatgaaagccggtgtgagcgtatcgaacgttttttacgtctttcccgtgcgctggatctgccgtatgacgagatggatacattactcacttctgttatacgtgctgaaaatagtcaggcggataacggcctgatgatcaccggtaatacattacgggccatcggcctgtttgtgagtcttaaccgaaaactgaaatgtactgtcagccagttttctgcactttatgatggcattacgatttacagccggggaaaagagatcagtgattttgaccggttatttaataatgatgaccgctttaattaccgttttattcttgatgataaaacaatggaagagcgggatattaaccgtatctgcagtgttttcggtattaattacgataccttttcgtatctggcgctgctgacccgggaagttctgggattggaggtattaacccgcagccgtcaggttatttctgcactttaccgccctgtggtattggctgatttgctgaaaataaagcccctggaattactcgcattactgaaatcaatgaatcctgatgctcagtttgaccgtttgtttaccggggtaccggaaaaccgagtctataaaatatttgaacaggcagatattaccagtgcgatcagtgcgctggtcagtattcagaattggcggacagagaataaattatcggtggcacaaatctttaactggatcacaccagcgattatcgacgaccaggaagataatacggaacgggaactgttccgccagattaaagaaaatacaaacagtacattattcagcaatgaagccctgaatcttgccggtgtaccgaagggaactgactgggtttcagtattaaaaatactggtcaatgagcaggggattctgcgggatactgaggatggtctggactgggacagttataaagactacgcactggctattattacgtctgcggcagaaaaagaattaagcagtgcaacatcagaagaacgaaaaacaactattgctaccattttgtccgtgctgctggaaaaaagagcggcgcagtggaaaagtgtaagcggattacttgaagggtatctcggcaataaaaccgacagtattacccctgcattgtactggtgcggcagtaatactgagtcatttctgaccagtatcagaacgcagccggatgacaatatgctgtctgcgggaaaaaatacggtcatggaattactgtccggtctgcgtcgttacagtgaaattattactcacttccgccttgaaccagccatgatgtcacaattattgtctcatgataataatctctggtatgggctgaaaacagaaaaacccaccttgcagttactttaccggctttcggtataccggcagcttattgatgatggcaaacaaccggctgaaaaactgcttaattatctgtcgctgattaattcgctcccgctggacagccgcagtgatgaaatacgtctgtaccgggatcaggcactgaataaattatcactttttatgggatggagtattaatgagctgttaacggcagcgcaatatgtcgcacctgataacgccattatccggacactgccgcaaattcttctcgttaaacaaattcattcggtctgcctgaatacagggctgagtgcccgcagtgttatttcactgtttaatctggatgaaaacagcgagtcatcacggtatcagtcggttgctgaccaggtcatggaaagtctggcaccgcaggatgtatcactgtacagcaatgatgaatccagccagggtgacctgacagtcagtgtgtcagccggcagcacaacactgctggtttacagtgaaaatcagaaggaagacgaggttgctgaggatgaaacacaactgacggtgaccctgctgacgctggaaagcacgccgctggagggagttccggttatatgggaaaaagtatctgaacagggagaattatccggggcggaaagtaaaaccgataaatcaggccgggcatcggtaacattaaaagcagggctgcagcagggggttgtattagttaaagcccattatggtgtgaagagtattccgttacctctggtcagagtggactgcgatatcacaacactgggtgcaaccggtgttcagaccgtaccggaaaatccggcggatattccggcggacggcaaagcacaggtcgaaattaccgcatttttccgcgacagctatgacaatccggggattgataaagctatccgctgggaaacaaccggaggtcgttttatttataagggctcccttaccaatgatgaggggaattgctctgccgtactggtcagtgatgaacccggcgatattacggtccgtgtattctgtgaggatacacctgaagaatacacagaagctgatatttcgtttatttcagcatag

SEQ ID NO: 280766 - DNA, 4515 bp, Morganella morganii
atggcacgtaatgtaaaacaaattttaaatcgtctcgctgagaaaaaacgggatgcttatgttgattatttcactaactatatagtgggtgagaatgaaaatacagccatgctgggaattaccgatactgatgacttgtatgactattttttaacggatgtaaaaacaagtgctgattttgtgaccagccctgtatcggatgcactggccagtattcagcaatacatcaataacattcttaatcagaaagaacccggttattccggtgagtttagtgaggatgttcagcagtggtggtccggttatctcgggcatatttcattgtggaaagcgtatcagaaaatggaggattatccggaagattataatttacctgattatatcactgataaaacccaactgttcagtgattttgccgcagacctgggcagtaacagtctgaatgatgccggaatacaaactgctttccttaaatatctgcgcagttatgaggccgttaatgcgatcagtgttatctccggctatgttgattatcggggagaacgaaacgataaagagacattcagcgggtatggttttctgaattctgactactttttaattggtaaaaatagttcatcacccgccggttttttctggcgtgaagcaaatatcaaagcagataaatcttccggttatatttctccgcgggcatggcatgaatggcagccgctcgtcattactgaagatgcaggtaatattttacaaatgcggattgtcaaagtaagtggttgcctttttattgtctatctggtcggtaaggaagaaacgcttgcagagaaagaaaaaacagcggaaggcgtccggagtgaaaataaaaaacaatataaggtcacgctgaaatcaagccgtatgggattagacgggaaatgggatattcctgaaccgttacatgaggaaatctatactgagggaaaaccggatgggtttaaattagtctccgttgccttcactcaggatgaacagcgggatgattatctggttattgcatggctggatgatcaggaaaagactattttttccgatgtattgaatgtgctcagacaaaaatcagcgactgacagctcagctattctcgggaatggctggcagaacaaattagcatcccgtttttttgacgataaaaaaaatagctgtcagcaccgtattttcggtattgaaaaagatatcagcagtatcatacgtactgataccaacccgaatttatcactggaggcgttctattgcctcaaagggaatcgtcatcagttacgggtcagaggatgctgccaccgttccgctaaaataccggatcttatttcacttaacctgcaggcaatcgtcagtggatggagtaatggtcgtattattatcagtggcgaccggaaaaatattacggtcagagcagaggccacccaaggggctgactatttagcattgtccctgcctgatggtaaaacagaggtgattttcaataaaggtgattttactgaacatgacggctggctgtcagcagagaaaaaaatatcactatctcagaatcaatgtgacctgatagcagtaaaaaattataaagaaatacgcagcggtgccggtttttcttaccagataacatccgggggctctctgcattcagtggcgcacgttaaaaactgtgtcagtacggtaatgcaacccgtcactgtccctgctgagctattggttcttgatgacagtattcaggggacgggctggaagggtaagctggtctatcagaaggacagtcacacaccgtggtgtacttttagctggagcggggacgccgataaagtccgctttaaattcgggttaacagaggaaagtattaaaagtgagtttacggtttcaattaaagcgttatcaaaaaatattcctttcattgaaacgttttcagagcatcagcagtttttgacgtttaatcagtcagatgcctcactgaaatatattcgtcttaattctgttcaggttcgtgatcttatctatcgtgcgcagattgcagtcaggcatatttttgactgggatgcacaaattacagaagagccggggtatggcgataagaaaaaagagagacttgatttatacggcgctaacagccgctatttatgggaattgtttttttatttaccgtatctggtcgcgagtcgtttttcacaaaaccgtctttattatcaggcccgtcagtggctgcattatattttttcaccgtatgacggacaccgtttatccgtaaaagatggcagcgaattattaccgccgccttactggaattgccgtgtattaacacaacctgatctgaaatatcagaataatgatcatgcattaccggatccttttgcgatctctgaggatgtcccttctcattatcgtaaatcagtttacttaatgtatgccgatacgctgatgtccgaggcggatttatattaccgtcagctcagccgggacagtattacccgggcctgggggctctatcaccaggctcagggcatgctgggccgtatacccaaagagcgcagcttaccgaaatggcagccatgtaccgtcagtgaattgctggataataaaacagacgttgtacaggaaaatatcgttcctgaattattttcagcgatatatccggaaaatatacccaaacagctcagcggctttttctggtacggaagcctgggcaatgcgcggttccgtctgccggtccagagcagcttactggacaggcaatccgttctgaaccagcgtttatttaatctgcgccattacctggatattgaaggcaatatgatgcagttgccgttatatgcggctgcacttgatccgtttgatctgctgcgctcgcggctgggcgggaccgctgaactgacgtatttacagtctggttcattaaatattccgccatatggtttccgtgccatgctggaaaaagcaaaagaacaggcggcggcactgattacgttaggggataagcgcctcagttattacgagcaaaaagaacgctatcacatcgaaaatatgcaattaaaggacgcgacggagcttgcgcaaaccaatgccggtattcagtcactgttacgggaccagcaaaaatctgtactggactccctgaaagcagccaaaaccatagcggagaaaaaacaaacctattacgaccagttggttaaagacggtacgagtgcaaaagagcgtgatgccagaaatttattactgacctcatcggtctttcaggggattatttcgggtgctgctgttgccgcaggtattgcggctgcggttccgcgtatatttggtgtggcgcaggataccggtgaccatggtgtaagagcattgcttggcgtgggaggaaccgccgccctcagtgcggatattatgcgcggtacttcggactatattcaactggatgaacaataccggcgtcgccgggaagaatggatattttctgctgaacaggcaaaaaatgaagtcacagtactggatgcgcaaataaaagcccaggaagtggcaatcaaagccgctgaaagcagcgtcaaatatacgaactcgatttatgataaggcaaaagcgctgtatgactatttcagccagacccgccaggttaatgaaagtctgtacgaaaaaatggtcattattatcgggtcactgcatgaccagttatattcattggtcagaacgttttgtttattaacagaagcgtcctggcgttatgaaacagatgactataaacgacagtcgtttattccggatgacctgttgagaggtgataatttaggtgctctggtgggtgttaaattacagaaagccctgctggaaatggaaatggcgtatacacagcaaaatacacgccgcctgaacattacaaaaacgatttcactgaaatcgctggtcagtaaccatctggtgaaaacggatgaaactccgctgacaacatgggatgaggttaaagcggcgttaaaagatgcgaaaaagctgtcatttgatttttcccatcagttttttgataccgattttccggggcattacgcacgaaaaattcactctctgtcagtaacatttccgacgttattaccgccgtatcagaatatgcgggttctgctggaacaaacatcgaataccttattggtttcaccggatattgaggctgtgaaatcgctctatacaccaaccgaaaaaacagacagtgaatcccttatccgcaatctgcggataaaccagaaaattatattgtcccgcggcagtgatgacagcggcgagtttccggatgatggctttaccggcgggcaataccacagcttcgaacataccggtgcggtttcacactggcggttatccgttccgcgaccgaaaaactgcccggaactccttgataatcttaacgacattattattaagcttaattatacggcgaagagcggagatgaaacatttgaaaccgcagtaaatgaattgctggaaaaaactgaatcagtaaaaggatacaacgagaatgattga

SEQ ID NO: 280767 - DNA, 2823 bp, Morganella morganii
atgattgaaaaaactaatcaggcagaggcgaaaggccataattttatatcagacccttatttcgaggaatggggtaacggtgactgggaaaaaggggaaccgaataaatatacaaagaaaaaagacggtgacagaacctatctctatatcagcggtaaaggcagtgtctcacaatctgttatgttaccgaaaaaaagctccgggaaaccggatcaaccacctttttactcattgacttttgattactcggttaaaaataaggccaaagtctcattaattctgacatatctgagcgggggaagtgaacgggataaaaaagaaattacgctggaggataataaagagtggtctctgtatgaattattgcttgatgtctccgccgaagatactgaaatcagagttgagttttatgccgggaaaacagcagggaataaggggattaatctgaccgctgttgatatgcagttacatatcggcggattgaatacggaatccattgtatttgatgatgaaactattccggcggataagccgtcagtgaaactgaattacggacgtaaacatgttcttaatatcaaaccggctgctgacagtgcatggtgcgatcttgattgtgcgctgaagtggaacagtgatattccggcatctaattatccgatcaattttacgcctgagctgaatacagcacaacctttacataaagaagggagcatctgggaaattgcctgttcagcgcaaaagatcagtaatgttccggcaacattcagcgtaatgctggcatcagaatacagctcagaaccgtttattttcagcgcggaaatcggggattatctctataaattaacggaaccgaaaatcagcggaattgcggttgttgctcaggatattccggctgtcctcagtatccgggttgtctgtgattatgatgacgcgtatccggatatgccgggcgtatctgatgttgatgttcgctgggaaataaacggcggggagattatcagcacaattaaaacagatactgatgggatggcagctcttacttttttaccggagaaaggcgggaattataaacttgtcgcattaataactgataaaacagggcgtgaaagccgccatcagtttgaccttattgtttatgaccgttcaccgtggctggatgatacccgggttgctgtcaataatactgatgttgatctgtcgggagacgccggatatctgatgagcggtgaggctgtggttcttcacctgacgtgtgataaaaaccgcaatatcttcggccgggttacgcttgaaaataaagcgggaaatagcggtgtcattatcacaccggcggaaggacgtgaaattccgccggacggtttgtcatgggatcttaatatcaccggcgacgacagcagagaactgacattcttattaaccagtgatcagttcggtatttcacaggaaatccgggttattgcattgcagccggatatcggaaaagaaattcagtcactgaaaattaacggtaatgtaccggcagatctgactcagttacgtgtcggtccgtcagaaagtatgacgctgaattgtaccaccaataaattattatcccgtttacaggcggaactgaacagtaaagacagtaaaacactgaaagcagaaccggctttcggacaattacaggcactgaaaaacagtgcagcggaatggaaattacacagtatcaatccgcagggcggcttctttgagcttgcgctgaatattccgccaatgacgaatccgctgatactttccggtcgtgtactgccgcaggaaattgcctcagggattgaaacgatcactctgaataatgcaccggtaaccgcgcccggcgatttctttcttgcaccggacgaaaaatatacgttaacagtcaaaccgcatccgttactgaaggatattccggtttcattagtttctgagacaagtaacggcgttgcggtgatcagtaatccgccgtttggtcaggaagtcagtctggcagaaaacgggtcttcatggcagatctctgcctccgcacgcggaaagttcgcactgcaaattcagagtcagtggggcggcgcaccgcttaatctggatggtactgtattgtctgcggatttacaggacgaaggctctgtccgggtcactgatggtgacatgggcagaaaatacgatattgattttaatattggtttcgctttcctggcttttgaactctatacactggatttaaaacttctgcaggataatttaatcagcgggcaaaccgtttcctgggaactgccggaaggtgaccatcaccgtgatgctgtttcgtttgatccggaaacaccggtagcactagatttaccgggtgctgagtgggaattcagttatagcgaagaagaaagtactcaattcggtttagcattaaacagtcagggaaatttcagttataaaattccgtgtcatattttcagtgatgagaaatatcttgaaaaaaataattgtatttttatgttgaataattcagtgattgtcccaggcataaaatataatgatcttgaatataagacagcggtatcacttaaactgaaattgtcacaggaggtatcagcgtttctgaatggtatggtattggcattagttgtccataaaatggatggtgagagtgatagtctgattataacatcaaatgaaaaattcactgtcgataaaaataaacctgactttgaatggacggttgaaactgatgtgaaccccggacaccgttttacattggagatcgttttggaaaatttaaaagatatccgttctgttatgaagtttacatctgtgtaa

SEQ ID NO: 280768 - DNA, 4494 bp, Morganella morganii
atggaaaatactatctggtccggcgacacggtcacaatcacgccgccgtcattacccgccggaaatattacgccgggaggaatggaagaaaccgtcgcgggggccggtgctgacggcatggccaccgcagcgattcccctggcggtatgccccggcagaggaacggcaccgtcctgcgggctttattacagttcggcatcgggcaacggtgaaaccggtatcggctggtcattgcagaccgcctgtatcgcccgcagtacattgcacggtgtgccgcgctatcaggatgatgatgtttttcttgatcccgctggtggggaactaacggcatatcgtcaggataacgggcagccggatgtcaggaaaaatagtctggtttgtcaggggataacccttgaacagccgtataccgtcagccgttaccgcgcacagacggaaaaccgctatgagcggattgagcgctggacgggcgaaaccgatacctcacaacaattttggctgatttatcacagtgatggtgcgatcacctgctttggccattccgccggtgcgcgggtggcagacgaagcggataagctgcggatcagtgaatggtatcaggaagagtttctggccgttaacggtgagcatatctgctttcactaccgccgcgaggatgataccggggtcagtggcggggagcggcctggcggcaatacccggctttacccgcagcggaccgattacgccaatgttaaagcgcacggcagcctgtattgcctggcgggggaaatgcccgcgccggaaacgtttttactgcacattgtctttgattacggcgaaagaacattacagaaagcggaagtgccgccatgggctgccgccccggaatccggctggctgctgcgcgaggatccgttttcactctattccgccggttttgaaacccgctgccgccggttgtgccgtcagatcctgacgttttcccgcaaagcagatgacctgaaacgtgatccggtgatggtgaaccgttatctgcttgaatataacgaaagccccgccatgagttgcctgagccgtattacccggctggcgtatgaaaccgtggggggggccctccgtgttgccgaaaaaccgcctgttgtgctgacatatactgatgcaaaactgaccaccgggcaggcggattacgttccgctgatgaactggccggaagtggatcgcggtatcgggctgctggtggatttatacggtgaaggttacgccggatggctttcccggcatgagggtgtgtggggataccaggcaccggtacgcagtgatctgacacctgacggtgccgaatatgccgactggcagccgctgccgttaatgccgtctgagcagggggatgaaaatctgctggccgatattaacggtgacgggttcccggaatgggtggtgttgcgcccggatctgaacggcttttttacactcaatccgcagcaggagaaaaccggttttacgccgttctccgcttttccgcctgaattttttcagccgcagagccagtttgcggacttagccggtaacggattgatgggcattgcgcttatcggtccgcataccgtgcgtttttatgccaataaccgcgagggttttgaaccggcggtgatcacctgtaatgatgaatgcctgccgttacccgcttctgatgcccgtgaatgggttgcactggcgaacccgcttggcagcggcggggcacatttaacccgtatccgctataacagtgtcagctgctggccgggcaacggctacggacagttcggcaaagcgattgaactgcatctgccgggagagattgataaggaaacgcagttccgcccgcagcacctttatatgacggatattgacggcagcggtactgatgatcttctctatgccaccccggcgggactgaactattaccggaatctatcaggaaacggctttgcggaaccactgctgatcaactggccgcagggttttgcctgggatgatctcaatacactgcaatttgctgcactgagcggacaaggagtcagtctggttgtcagtgagcgccacatgaatgcacaccactggcggctgaatctgacatcccgccagccgtggctgctgaaaacgatgaccaatcacagcgggttttatacgcagttcagttaccggagttccgctgattactggctggatgaaaaacaggcgcagccatcacgccggagtcagctcccgctgcgcttatcgctgctttccggtatatatcgccgggatttgatcaccggtcaggagcgtcatacaacctattgctatctgggcggacgttatgatgcggataaacgccgatattgcggctattaccgggtggatgaaacggatacctgtagtgacagccacaaccgcaatgacatcccgctgcaaaggccgcgtctgctgcgccgctggtatcacacaggtgcgccggatgacgccgtaaaacgcgacgggtatttttcatcaccgctaacgtcagattcattgctgacacgctggcaggagagtaaagaccagacagtgacggataactgcgtcccgtctctgcattatgccctgaaaggtgcattattacgggaagaactgttcgattcagacgatattacggttccgttttccgtacaggaataccgttatcaggctcgtctgctacagcagcatgaggacattatctgtgccgcgccgctgttactggaaacgctgagtattaattatcagcagtcggagaaggatatcgcctgtcagcagcatattgtgatggattacgcggagtacggcgaagcgttacatgagataacggttttcctgccgcgtcagcatacagacggggacagcccgtatccggcggtcacgccgcttcagtggcagaattcatttgatgatgcccaatccctgtgctggtttaccgaaacccgccgccgctcactgagtatgatcacgcctgaccgctggctgccggtactgccggaatgcacctggcaggaaagtgtttcgctgaccggcagtgaaatgaagggcaatatcgtattcagccgggaaatattacaggcgaaagacagtccgctggcgggtaaatcgcggacactgctggcatggcaaaaagctatctatcagcaggacggcgcagagatcaattatccgccgcggatcaccgggcgggaacaggcggtatttaatgacatcacattgcagccataccacgcacatctcagtgatgatgaactgactcaacaactgagcgcagcaggctatcagaagcgaaccccggaagaactggggcagtctgtctgggtctcatccggaaacacgctgacctatctggatgcggaagggttttatttaccggcggaaagcaaaaatacacgtggtggcgttcagctttttcattacaacagctattacagaacagcagacggttttaccgatgaatttggccagaaaacgcaggttacggatatcgatgaacgattctggcagccggtgcgtatctgcgacatcaacaataacaccagcgaagtccgtttaaatgcattcggtaatattgttgccgccagtcagtacgggaccgaggggggaaaagccaccgggtttaagccggtatctgaatttacgccaccggaaccgcagaccttagcgcaggcgattgagaaatcagacgtgctgttaggcggtcagtcctctgtcaccttgtatcatgaaaatgaactgacgggagataaccggcaaccggcatgggtgatgaccatcagcgcgtcagattaccccggaacaccggacatgccgccatgccgcattgatattacctattttgacggggcaggacgtctgcggcagcaatttagtctcgatgaacccggcgcggcttacccttgtgccgatggtgtgttattgcaggacgataaccaactgaaagaagtcatggcggatacccgctggcggatcatgcaggcggcggaatcaacgttatccggtaatgctgtccgccgtttcagaccctggttttctgaccattatgagcctgttattgatacccgtttgtcagatcttattccgtgtgaggtgaccggatatgatgcgcagaataagccggtatttgtacaggatgcagaagggtatttacgctgtcagcgttattttccctggtttaatctgaactatgatgaaaatgacacactcacttccggttttgattttctgcggctgtttcagtatcagcgtgatatatcagcagatcccggaaaccgtgacgcattatttatggatcggggaatttacgggcaaatgacggaaatagataaaccgtattcagcgaaacggtatgccgacaatattcagcgttattattttaacggcggcagggaaacctggttaccggatgccggtatcacgctgacaccgggggataatattcttaatccctatgcaatgccgcaggtacagtacagacagaacgaaaatgataactaa

SEQ ID NO: 280769 - DNA, 4266 bp, Morganella morganii
atgctgattaccagtaatgtatttaaccggattgactggtcagttaacggtgttgaacactgtactggctgctatattcaaaatatagagcttggttttattaaaacaaattttatgaatgaaccggatttttctccctgcatacggttcaatcagtatgacaacagtgatgaggggttcggaaccggatggaacctgaatttatcctgtattaaatcaataaataacagaaagctgctgcatctcggaaatggttctgtctattggatgaaagaacagagccagccagtccctgcgtcagggcgtacgttagaactggaagaccaatattgcaaaacattttattgcacggaatatccggataacctgatttctgttttttataaaagtggtatcagagaagatatccaggatgggtatttatcctctgtgctttatcctaacggatattgtctttattttcagtatcaggatggttgtcttatctcaatttatgatgggctcaaaaatacaccgttatcgatcagttatgacaggcggaatagcgataatattgtcgtttctgttaccagtcagcgccgaaaggatgattactatctcaataaaaacaaatcggggttttatgagttaaattcggtattaacaacatctgaatcaggaagtgaagcattatctctttatacttttcagtatcaggtctatgaaagtaattatcttttgattacatcactgacatcagcgttggaacataaccgaaaagaaaacattcgttatgaagaattaaaacggccttccgggctatcgtcagtaattaaaagtgtatctgaaaatgatatttacagcggagcatcggaagatgaaaaactgtatgtaactgtaaaatatgaaacaacagataatttcaattttcttggtgccggtgctggtggtgtaacacaatggcagaatgaaaaagataacctttttttactgacaggttataaaatatcacgcaaagtaatatccggaaatcaaaccgtcagctatgtttataataatgactaccttattactgaaaaagcgatatcaccttcaggacctaacaagaaaaaaaataaaattattacagcgtatagttacctcagagaagatccggatcatcagggagaaatatggtcttctttttttctcccggtgaatatcaaagaatatgctgaaaataataaattaagcggtattccggcagttcaattctatcgttatgataaatatggtaatatcctggagtatcaggatcgccggggaataaaaacgatctttacttactatgacggaaagaagggagaacaggataaatgtccgccggatccatttggatttgataattatatcaaagagaaaattgttattcctgctggtaatgatataccctataaaaagagtatggtatatcactatagtacattaagaaattgcactctggtaaaagttaaacataaagaaaaagcagttgaatataatgcaggcaacagcagggtggttaatgaaatcaaggattttgattatttttccggagattctggcgcagtaagtatactgatgtctggcgtgttaaaagaagaaaaaacatccattgtaaatgatggtgttaagaatgaaatagtcatgtctgacatttatcagtactctgtggatgtgaataaaaaaacaatttcttactcaaaggatattgtatctggtgaggtaagttttaataaggtcacaggaataaccaccaattaccataccggcgatacagaagaagaaaaaaaagaaggcgggaagactatccggtatgtatttgataaattaggaagaaaaaaagaaattatcagtttttattcagatataaacaataatatcaggtgtgtatacacttatgatgataaaaaaggatcagtaaatagggttagcagtgacaaaagtaatgtggttaattctttagtctataaccgaagaggtaacgttatttctgaaaaaataaaagtatctgaatatgagatttttttaaggaaatcatatcaatatgatggccgtaaccgaattataaaagaaattacatatgattattcttttgatggtaataaaaaataccccatacttatttgtaacgaaaataaaatctataaatggaattacaatgatgatgttattatgctgggcgggagtgggttgataagaaccaacattaattatgattatatcaaaagagtaaaaacggttaaagaaaacaaagggaaaatggtcagaagtaaaataaatgtatcaggtgatatttatgaaaaaataacggttatgaaaaaaagaacggaaaaatatacgtttaacgggtttgggttgtgttcagagaaaacaattatagaacacggtaatataaaatctaagaccgtattattatataatgagcaagatggtttatcagaagaaaaaataaccgcagatggtcgtgaccggattcagctatacagttatgataaacgctttggtaatgataaattatcagcgcactatcttaataaaaaacgtattgaagccaatgaatatgatttgttgggccgggtgatattaaaagagagaaatcagtgtgttcagcaattaagatataacccggtcggctcttcctctcatcctgaatgtataaaaacaggttcgggaaatgaatggagatacacaaggacatcgggtgataaacttaatgaaatcgtgttgtcaacaccatcgcttccgcatcgtgactggaaacaaagttttacctataatgataagacgggggagttattaaaagaagaggcggtttgtgaactgaataacacaggacgttatatattaagtgaatcatattcggattcaggctataacataaagaaaaaaacaatagattatcagttttgtaaaaatgaatgcaagcacatcgaatatttattatcagaatgtaaatacagttctgagggtaaagtaatttcatccgggaatgatgcgtatcgtgagatttataaatataacagaagcagtggtaatatagagagtatatggtatgtgatcgatgggacggtaaggtgcttctgtaaaccggcgtatgataagaataaccggatgatcaatgttgttgtgtatacttatgtggctgatgacaaacagagaaatacgcggttatatacaaaattacgttatgactattattataacgccagaggtaatatacataaggctgaaatattatcggataatagtctgattggatcttccggagaaagaaaaagtggtaatctggaacaattaagtacactgattttaaattatgatgttaatgatcgcattgaaatgacaaaaattgatttgttttcacctccggacaaaagtcgtcaccatgaaaaaaggagtgagcgtcattataaagaatcatatcattttaataacctggatgaactgattgattgtaaatacagtggtgatttatcactgacgaacaacacaggcaggatactatccggtcagagccataaatataacgaagacggattaatcattctcagtacccggcgtttcagttcggggggcagcgatattgtcagctatgattatgatgataaatcagccacactgaatacactgacacattgtccttttaaagccgggtggccggaaacagaaaagtatgcgtggaataaggacggcatgctgatttcccgtatccgttctgatggttataaagaagaatatgaatatggcggagagcaaaatgttgccagaatgacaataacagatccggataacaggaaaaccataaaaacatttctttatgattgccacggacatccggttattcagattattcagtcacctccgctatattccgatggaccggctgttttccggcagattcatgatacctacaataatgaccatcttatgatccggaagatttttgatcgggagcttgttgatacgtctgttatgcctgaagaaacacattattatcactggcttcagaatcaggttattgcggtatcagtacaggataacgccggtaatataaaaacgcatttcaattttaaccggccggatggcacgacaatatgccggtgctcaccaacaaatcagctccggtatgtaaaaccgggtatctttgattatcgtcttaaaatggagtggatcgcacaggatcagcagggattattttatcagccggaactgattgagttacagcaggtatgttttgaaatgaatctgactccgccgaaagtataa

SEQ ID NO: 280770 - DNA, 2820 bp, Morganella morganii
atgaatttatctgacattggtgagctgtgtgcggataccccgcggatgacagtatttgacccgagaggtctgacagcgcgggtggttgattttaaccgcaatgaacgtgcggatacacctgaggcgttaattacccgttatcagtacggcgcaagaggggaaatgcagatgtgtgccgatccgcgtttcagtgcctctgcacaggaaaatgaacacagatatcagaatctggtttccgccacagatttactgcagcgccctgtccgtcaggtcagtatcgacagtggtgaatcattaagtctgttacatgcggatgggcagccggagtggataacaaaaaatcccggagaaggtgctgtcagccagcatttttcctatgaccgtaagggacgtttgctgtcactgcgtagtctggacggcacagaggcgatcttattacagacccggcgttacagtgacggggttgataatgctgaagaatataattgccgtggtcagtgcaccgaaatacagaatggcgccgggactgaaacatttacggagtttgatatcgccggtaaaaataaatcattcagccgccgtttctggtcggtacgggaccggagtgtggatttgaatcacccgcctgaagcggagacccggacgtgggtcagccgcaatgatttatctgcctccggtgccgtccggcagttatcgttgtcctgccatgacgcggagcaggaacgttctgtttatacacgccgcaacgggtacaaccggcgcgggcagcttatcagcagccatctgaccgatgcgggcgggaaccagcatgcgttgctgacatcagccggttatcatgcaaatggtgcgtgtcagcaggaaatgctgggtaatggtgtgacccgctattatgcgcaggaacatttcacaaaacggctgctgcgtatttcaacgtggcgtccggcggagaataaaacccgttatccgattcaggatatttcgtatcagtatgaccccgccggtaatgtcactgaacgttatgatcagggccgggaggatcagtatttcgataatctgcggatcaccgcgcataaccagtatcattacgactcctgttaccggttacgttatgcggcgggccgtgaagcgctgaatggcggcaaaagtaccataacgccgcttatcagcgggtcgcagcagttagtgaattatcagcgatggtatgactacgataatgcgggcaatatgacgcaacttcgtcacagcgccgggcaaaacaactggactcaggttttctctgtctcaccggagagtaaccgcagtttaccgcagccggtctctccgtatgaagtagaacggttttttgatagttttggtcatcttaaagaaagtaacggcgtacgtttttaccgtgactcacaacagcagcttatccgcgcagatggcgtacggagggcaaacggtgcgacagattatgagttttatcagtatgacagcagcggccagcgttgcagtaaactcagcagccggattgccgacggtatcactcaggcccgccgccgggaaacggtgacgtatatttccggtatgcgtttgtgtgagtatgactatgacggtaaatcacagggcagtcattactcactgagcttcccgctggccgggcattcagcggtggtatgcctttctgaacgggaaccggaaaagaaagacataccactttctctgatgcgttataactgccttgatgcgcagggctcggtcgcgctggagctgagtgcggagggcgatattattacgcaggaggaatattatccgttcggcggcacttcactgttcagttcgcggagtgagagtgaggcagattataaatatcaccgctacagtaataaagaacgggataacctcaccggactttatgactacggtttccgttattatgcgccgtggttgtgccgctggatctcgccggatccgctgggaatagcagatggtatgaatgcctattgtatggtgcataacaatccggtgacatacagggatagcgccggtctgatggcctggggacaagaatttgagatgcaggagtcgcgggctccattccggtatcaaagaatggcatctcaggtatataacaccaccacagaaccggtaccgcagaagagtattggtgaccggttacgcagcgccggcagagtactgagccgtcctttaaccgttattgcacagggaatcgcccggatagggcgggcaatcagaagtgttgtcagcgggatccgttctgcattacagcgtttcagaggtacaggtaatggcgttgaagatctggaaatggcgccattgttaccggcggaggaaggagcagaggacagaatctgtgtatccgagacgactctgatacatgcaccggaaaatatggagtgggataactccgctgatctcaatgagtaccttggtagcggcttagagtttgactggattgatattgaggaaacattcgctattccggatcggcagggggcaatgcaggttacagagaattgggataatgccggctgggatgatatcgaaaggatgagtatcgtgagtgttgacgaatctgactctgattcttttatatctgacaccgattcttttatatctgatactgattctgttatatccggcagatcttcccgtatatatgaaacttttaatattgcggaaggctgggaagatgaaaatgcaccgcttctggccgcttcacataaccgaatcacaccggccatctcatcactggcattatctgccatgatattcggcttactgtggtggtatcagtctcagcatacttaccgccgctga

SEQ ID NO: 280771 - DNA, 2784 bp, Morganella morganii
atgacatttaataattcagtgctgattgcactgttttccgcttctttcagcgcttatgccacggaaccaccaccaccttatcagtcagaagtcgaagtccctgatattaataccattctcagcagtgccactgatggctggccgaccgcaaaagataagtgggataataaatatcagtcaattatcaccggtaaccaatatattaatggtcagacattaaccagaacctggttcccggaacaatttctttatgttgaaaataattcttacagcctgaataacaccattgattccttccagaccacattccggagcggtagtatcgctatcggaaatatagtcaaaggcggaattaccaatccgtctgatccttccaaagtctatcgcggctttatgtcgatgatggaagattccatagcgtataacaccattgttgaagataacggcagcctcagtctgggaaatgatgccaaagcgtataacaccaccgtaaatgccggcggcagaatggttgtcggtacacggggctatgcgcaggcaattctgatcgacggcggttatctggagcaatccgttaccagcacctcaaataccaaagatgtcattgtcgtgaatggcggccagcatattatctacggcggtacggcaaccaacagtcatatcggcagcggcagctatcagatgagcagcggtaacacaatcgatacagtgctgtatgacggcgcagttcagcagatctatgccggaaaggacggtgtgaccgaccgcaatacccttgttaaccccggtgcattacagtttgtaacccacggtaatacagaagatacccgtgtttacggtactcagattattaccggtgttgacggggaatgggaaaacggtgaatggacatccgacgattctttccggattgatgatcagacagccaaaaatgccaccatttatgcaggcggtgtacagcgtattcagaccggcgaggctattgatactcaggtttacgggcagcagattgtcagcggaaaaaaaggcggctggaccggcggacagtgggttgagcaggacgcctggattggcaaagatcaggttgcgaccggctctgtgatccatcagggcggtgagcagattgttgaatactatgccgatgcggttggtacgctggttaacggcggcacacagctggtcagggagtttggtcatattcaggataccaccgttgaaaatggcggttcatcctttattgcctatggtgcatattccaccggtgaactgaatgtgaataatggttcagtaaccatggaaggcggcagccttcacagctggaccggcgcactggatgcaaaaggcgcttatgttacccgccttaatctggctggtgataatgcgtttatgtatctgcagcataatgacaccaccagtgaatccgaagcgaccattgaaaaactggctaacaacggaaccgtggtattcggcagcagcaacggcagtgatgcgggtaaatacagccgtttacagatttcagatctgaccggttccggtacctttgtgatgaacaccaatattaatggcggtaccggtgatttcctgaatatcagcaacagtatcagcggtgagtttaatgtcagagtgatggattccggtcaggagctgaaaagccgcggcggtgtgaatcctcatcatctgatctttgccaacggcagtgacagcaacagctttgcactggtgaacggcagtgttgatctgggtgcttataaatattacctggtacagggtgatgagcaggacagtgataactggtatttatcaccgaaagcaaatgaaccggcaccaaatccggacccgggtcctgatccggaaccaaaaccggaaccggagcctgaaatctccgagagcggtaaaaacgccatcgcgatggcaaacgtaacgccaactatctggaacagcgaattatccacactgagaacccgcctgggcgatctgcgtgataaccagacggcacaggatggcgtgtggggcaaatatatcggcagccgtaaccgcatctcaaccagtaatgtcggttacacccaggatatgaacgggctgatgctgggcagcgaccacgcgattgtgctggataacagccgcctgctgatcgggggaatgttctcctatacccattcagaactggatgcccgcaccagtgacggcaaggtggacagcttaggtcttggtgtctataccacctggatgcacaacagcggctattatgtggatggcgtgctgaaagccaaccatttcagaaccaaaaacagcgcgcagtttaatgacggcaaaaccacggccaaagataacaccaacggcatcggtttctctgtggaagccggtaaacacatcaccgcaggcagttactttatcgagccttatgtgctgggatcttacttccgcggcgaaaaaacagcctatcgcttcagcagtgatatgaaagtgaaagcggacgctgcagagtctgttaaaggtgaaatcggtaccaccttcggtaagacatttgtcactgaaagcggcggactgattaaaccttatgcccgcctggcggtcagccacgagttcaaaaagaacaatgacgtggtgattaacgatacggaatcattcagcaatgatatgtccggaaccgtcggtaaatacggcgtgggtctgacagcacagatgaataaccagtggtcagcctatgctgagttcaactatgccaaaggcagccatgtggaaaccccttacagcggcaacctgggtatccgttacagtttctga

SEQ ID NO: 280772 - DNA, 879 bp, Morganella morganii
atgacttctgcaatccgtacctcactggtattcagcgccctgatgggtgcctcttttgtcactgccgccgcaccgctgtcgctggaagtgtataaccccggcgaaaaaagtatctttccggtttcctcggaaatcatcagcggcaaaaatgaggtggttctgattgatgctcagtttcagaaagatgatgctcaggtactggcggataaaatccgtgcgaccggcaaaacactgaccaccatttatatcagccattctgatccggatttctatttcggactggatgaactgaaaaaagccttcccgcaggctaagattgtggccactccgcagaccgtcgcactgattaaagaaagcaaagacggcaaactggcttactggggaccggttctgaaagagaatgccccgcagagtatcgttgtgccagagccgttagagggcaacagcattatgctggaaggggaaagtattctgattgaagggctggacagcccggcaccggaacgcagttatgtatgggtgccgtcactgtctgcggtaatgggcggtgtgctggtatcagaaaatatccatgtctggctggcggatacccagaccccggaatcccgtcaatattggcagcagtcgctgaaaagtatgcaggacaaacatccgtccaccgtggtgcccggccattatgtcggtaacagccatttctcaccggcagccattacctttaccgccgattatctgacccgtgcggaagctgctctgaaagagagtaaggactcacagcagatgatcagcacactgaaagccgcttacccggccctggcggatgaatcaagcctcgaactgagtgccaaagtgctcaaaggtgaaatgcgctggccgcagtaa

SEQ ID NO: 280773 - DNA, 480 bp, Morganella morganii
gtggccaacatcatctatctgtcagtaaccggtaataaacaaggattgatttcccggggggcttcaacgattgattcgatcggaaataaatatcagtcgggacatgaagatgaaatactggtgtttgaagtttcctccggtatctcgatggggcagaatgtcaattttcagccgttagatatccgtaaaccgattgataagtcatccccgcttctcgctcaggcgctgacaaataatgaaatattgacgtgtgatttttcattttaccggacagggatgaacggcagtatggagttatattacaaaataaaactgaccggggccgcaattgtcagtcttaactgtttctatccgaactctgtcacacataacgattcacaaccggaagaaagcctttcaatccgctttaaatccataacgtgggagcacgttatggcaggaaccagttcttacagtatctgggatgacaggagtttctga

SEQ ID NO: 280774 - DNA, 927 bp, Morganella morganii
atgccaacagcccgtgtattatcgacgcaacccgcttacaaccgtgaattcgatgattattgcaataagctgaaaacgctttctgaacgcgcggcatcctatcttttatatgacccggaagtaaaaataatttaccgggaaaatatccgcaaggcgatagcgtatttacgggaagaattttaccggaagcggagttcggctgaggatcattatacttacaggcaaggccgggataatgcgtttaatggccttgtttatttgtaccagagtgaagaggctgattaccaacgtggcagacggaatgactggtctgtttatgaagcaactgaacaatttgaagagcagggatggcttttttatgcaaaagaaggacttcagattcttggcggggttgttcaaacagttggaggtggtattacttttagaaccggcagcttattaaagtcaaaaacactaaaaggaatcggtgctttggctttcgcaacaggggttagcaatatttatgagcatagttctgttattcaatatgagataacaaaaggtgagtccggtggatataacaataattatatgcaaaatgctatggcggatatttccgaatatatggggtatggaagacgaagtggtgaactgacttacaaaactgtcgattttagtgtcagtttatttctttcatttggtgccttggttaagttaaaaaacccaagcaggctattacatcttcccgtttcaacccgaaatggtgttgtttatccaacgttagtggaacgttggtttggtgataaaggcgggttttttctttggcatgcgctgcgttctgactttacatttaaggttaatcaaatgtcgaagcctttttttctatataatacagggattggggggaataaactaaggttattactttctgattatatgagtgattaa

SEQ ID NO: 280775 - DNA, 354 bp, Morganella morganii
atgaaatgccaaccagaaaaggaacgccctgagaagtcaggcagaatgctaaatagagaagaaaaaaaaatactgaaagagctaaagaagaatatactatttgttaatataaaatcaagtgtgtcattcacattaaaaatggtgatattatcatttattgctggtatttttatacaaaaaaacaacaacgctgagattgtcattgatatttccatttctttttttatatcgttattgatatacgtaatcatggctgcattttttttcaaaaaaataacattgtgcataaagctaacaagtatctacatcaaaataaaatttaaaaaattaatcactcatataatcagaaagtaa

SEQ ID NO: 280776 - DNA, 288 bp, Morganella morganii
atgaatatgatttcatattggaaaaagcataaagaaattcatgaagatgatggaatgattttaatcaccggatggtatgaccataagaatgaaaataatggcggtgaaaaaacactgggagtgcactggggaaattaccctcagtccagaggcgttttaagcccctgtgttataccaaaagcaacatctgacgctatcttagccggattactgcataaagcagtaatcgaaaataacgaagaagcgattgcaacactgactagcgctatctcttttctgaatagttaa

SEQ ID NO: 280777 - DNA, 1089 bp, Morganella morganii
atggcggtgcgcagtccggtgtttcactggctgagctggctgtttccgctgatgttgtttgcactggtcagtgccaacttctcggaagggacattactggacttaccggtttccgccattgattatgaccacagcccgctctcacgcaccctggtgcgtaacctgaacgcggcatcacatgccagcatcacgccgcaggatgatcaggacgttgcgcttgagcgcatggggagtgcggaagattacgccattctggtgatcccgccgcgttttgaaagtgatgtgctgtccggtaaacaaccgacaacccggatgttttttaatgccctgttttatgcttccggcagctacgccacccaggacttcagcggactgattgccgaactgaacggccagtaccggtctgtcctcgcttctgaaatggggaaaaacgtcccgaaactggcacaggtgacgatgtcctatgacactctgtttaacgccagcggcagttatatttattatcagcagtttgccgccacgatccatatgcttcagttatttgtggtgacctgcacgatttacaccatgtcacgcagtaccatgctgcaatccattaaaccgctgttcagcggtgtactgggcaagctggcgccgtataccctgtttttcacagcactgctgatgatcgaactcgctgtcctggtcacggtgtttgaggcgaaggtaaccgggaatccggtttatatgctgatgatcggtttcttttatgtgatggccgcccagagtatcggcctgctcctttatacattcacccgtgatccgatgatggcttacagtatgatcgggatgctggtgagtatggcaatggccttttccgggatgactgtgccggaactgtcgatgattctgccggcacggattatcgcgaacatcgagccgctgacacatgcgctgaacgccatgtttgatattttcctgcgggaagtctcgctgcagcatatcctgtatgtctgcgcactcttactgctctatccggtgggtgccactttccttatccgtaaccggctgccgaaacggctggcattgcagggaggacgcgcggtatga

SEQ ID NO: 280778 - DNA, 1215 bp, Morganella morganii
atgacaaataacctaactatgattgacctatttgctggggctggtggcctttctgaaggattacataatgcaggcttcattggtctatatgccaatgaaattcaatcggtatatgctgaaacacatgctctgaatcaccctaaaacatatgttgatcaacgtgatataagaactgtggatgctgcaaaaatcagaaaaagacttggccttaaaaagggagagttagatttagttgcaggaggacctccttgtcagggattttcaataaatgcccctatccgttctgtaactgatgaacgtaataatttatttttagaatttttaagattcgttgatgagtttcagcctagagcagtattaattgaaaatgtaccaggtctcgtatcttttgaaaatggcgcgacactcgatgctatccttacatcgctcaaaaaccatggttacacttctgatgtaagaattctttatgcacctcattatggagttccgcaaactcgttggagaacaatcattattggattaaaaaataatgatgatattaattctatttttccggaccctatataccatgcaccagtaagaataaactttacatcaaatttttgtgggaaaaatattgtatctcttcccaaagcaaaaaatatagagcttccatcatttacgtccgttcgtgatgcaatagatgatcttcccattttaataaatggtgaatctggtgaagaggttaaacaatatcgtttagaaccacaaaatgattttcaaagagtcatgagatatgcatcgactggtgtaactaatcatcaggcctctcgtcttagtaaaataaatttagaacggttatcttatattccagctggtggtaactggacaaatattccttttgagttacttcccaaaggaatgcaaagagctcgacgtactgatcatactaaacggtatgggagggttgaaccaaatggactggcatctactattttaacaaaatgtgaccctcattggggagcttattttcattatagtcaagaccgtacatttactgttcgagaagcagctagaatacaaacgttccctgatacttatcgttttgtaggctctcgtgctgagcaatatgaacaagttggaaatgcagttcctccattccttgctgctgctattgggcattctatatctaaagcgttaaaattaaatactaacaaattaaaggatgtcatataa

SEQ ID NO: 280779 - DNA, 903 bp, Morganella morganii
atgactgctactatatgggaattctttggttatcgttctgataatatgtctgaggctgctattgatgccgctaatcttagaatatgtccgataataaatgagatatgtgaaaaaacctttaacgataatgttgtttcaggtgtgtgtacagtaaaaccaattaactctgggccagtaatttgttgccctatacgtatgtacgcagaaaattatcagcttttgcagaatatagccgatagagcttttgggaaaggatttccacttataccaggcaaggaagcaattcagtatgcaataaaatctaaatcaccatgtattgctgtatttggacagcgatggggaggggaattaagattacctcaaaaatctgggcgtggtggctattttgttgattgggttcaggcaaaaattaactctgaaggtgagctagaagaatttattgctattgaagtgcaaactatagatacaactggaacctatagaaatggttatgaatcattaataaagaatagagagataataaaaacaacagcaggtcttaactgggaaaatgtatcaaaacgaatccttcctcaattgatctataaaggtcaaatacttcaaagagaggatttatgtaaaaaaggtctattttttgtttgcccagagccagtttttgagagaattatggctcgattaggagggcaagaaagccttactagctacgctttacaaccagcatctgttacttttttggtttataatcataatacaattactccttcagaatctgaaattattcatctagaagaaaaaatagtacattcaacaacggtttataaattacaagaggctttcaataatgttacccttccggaagggaatgcctataaaagtgcattaatgaaagcattgaaaaattaa

SEQ ID NO: 280780 - DNA, 150 bp, Morganella morganii
atgaaaaaagcacgttttaccgaatcgcagatcgtcagtattttaaagctggctgactccggcatgaagatcgacgaaatttgccgccagaacgggatcagtaacgccacatattatatctatggacttcctccgttttgcaagtactga

SEQ ID NO: 280781 - DNA, 588 bp, Morganella morganii
atgaagaccgatatcaagccactctacgggagctggaaagcagggttcgccctggataaacacactgaatggagcagaccactgagtgaaaacagtgccgggcacatgcagtttaataccaaaagaacagaagtgggtgaagcgctgtacaggctgaaatataaacaggactggtctcagcttgacccgctcgcccgctgcctctcagataacataaaagcccgttttccggatgcccgttttgtccttcccatgcccgcctccaccgcccgttcccgccagccggtaacagaaattgtccggatggtttcaggcatgacaggactgccgtattttgatcatttgctgctgaaagaatccggtggtacgccgctcaaaaatctgactgacaagcaggaaaaactggatgccatcggtgacagctattctgtttttgatcaaattcaaaatgacggatgctggaatgtcgtggtcattgatgacctgtaccataccggtgcgtcactggagtcagcctgtcaagttcttcgcggttatagtaaagtgaataacatttatgtggcgacactcacctggagaccggcatga

SEQ ID NO: 280782 - DNA, 558 bp, Morganella morganii
atgacgacgattttcgtcgcaggatcgattaaaatcaaagtattagacccgttggtcactgaacggctgaaaaaaataaccacccggcatctccgtattattgtcggtgatgccgccggtgcggattccgctattcagcaatttctgaaacaatccggttatcatcacgtcactgtcttcagcagctccccgaacccgagaaataacctcggaaactggccggtgcaggtgacagaaacctcttatgcgccgggaagccgggctttttttaccgcgaaagacttagcgatggccgctgaagcggactacggactgatgatctgggacagccgcagcacaggcacactcagcaacgtgctggaattattaaatcagaaaaaatattctgttgtttttatccgcgataaaaaacagtttattgttgtaaaatcaccggatcagctcagtgaactggtcagtcatatgccgccggatgcctttgccgccgcagaaaagaaaattcagctatccgaaaaaatcacccggctgaaaaaccggcaaatcacgctgttcggctga

SEQ ID NO: 280783 - DNA, 492 bp, Morganella morganii
atgaaaaatgccggaaaaccgatcgattccgcccgggtgctgacggtgggggaagtggctaaacggagcggtgtgactgtctccgcgctgcatttttatgaggaaaaagggctgatcaccagcacccgcaatcagggaaaccagcggcgttacccgtcggtggtgctgcgctatgtggcgtttatcaaggcggcgcaaagtaccgggatcccgctgaaagagattcaggcggtactcagtcagtttccggccaacagtaagctgacctcagaacagtggcgcattctgtcgtcacgggtgcgccgttatctggatgagaagatcacccgcctcacccggctgcgggatgaatttgataaatgtatcggttgtggttgtctgtctctgaccgattgtccgctgcgtaacccggaagataagctcggcgctctgggagcaggcgctcagattctgaaccgtccggtggatgatgaggaatttacggcgggataa

SEQ ID NO: 280784 - DNA, 1113 bp, Morganella morganii
atgaagaaaaagtatgtgatcggttccgcggctgccgcggtgctcctggccggtgccgccggtacctatgtaatggcctccgggcaggatgatgccgctgacggacaatatgttatgccgccggtacaggttgcgctggcaccggttgaggaaaccgggctgaaccggacactggcgggtgtcggggaactggaggccgcccgccaggtgctggtggcaccggaaaccgcagggcgtattacggctatccgttttgtctccggcgatacagtcaaagaaggtcagccgctggtacagctcaatgatgctatcgaacagggagagctcgcgaaattgcaggcacagctgcgcaataccgagcagcttcataaccggacctcacaattattcagtaaaaatatggtggctgccgcacaggtggataatacccgcgcagaacgggatatggcacggggtgctatccggcagacacaggcgcagatcgcacaaaaaataatccgtgcgcctttctccggcacactcgggatacgtcaggttcatgaaggtcagtatgttcaggcgggtgatcctgtcgtcagtctgatcaacgccgacacactgaaaatcaacttttcactggatgagcaggctgttcctcagctctataccgggcagccggtcaccgtgctggcagatgcctggccgggtgagacgttctccgcaaaaattgtggccgtcgatcctctgatcgacaaatcccggactgtgcgggttcaggcagaactgccgaaccatgacggcagactgaaagccggtatgtatgcgggtgtgcaggtttcgcagaaagaagcctccagggtacttgccgtgccggaaactgcggtaacttacagtgcctacggtgatacggtgtttgtggctcagaaaagtgaggataaccggctgattgcccgccgtactgcggtcaaaaccgggaaacgctgggacggcaaaaccgaaattacagaagggctgaccgccggtatgcaggtagtgacatccggccagctccggttatctgacggcagccccattgtacagagtgacaacgacacgctggctgccgcgcagacaaccgcatcccggaggaagtga

SEQ ID NO: 280785 - DNA, 3093 bp, Morganella morganii
atgacttttactgatatttttgtcagacgtccggtgctggcgctggttgtcagcgccctgattgtgctgctcgggctgtttgcattaagtaaattgccgatccgtcagtatccgatgctgcaaagctcggctatcaccatcaccaccagctatccgggagcatccgctgagctgatacagggtttcgttacccagccgattgctcagtctgtctcttccgtggagggggtggactatctcacctcctcttctgtacaggggcaaagtaccgtgacagtaaggatggaactgaaccgtgatccgacggcagcccttgcccaggcaatggccaaggtaaaccaggtgcgctataaactgccggaacaggcatatgatccggtgattgaattatcatccggggaatccacggcggtcgcctatattggtttttccggcggtgatatcggattaccggcgctgactgactatctttcccgtgtggttgaaccgcagttttctgcgattgagggagtgtccaaagtacaggttttcggcgggcagacgctggcaatgcggctgtggctggatgcggaacgccttgccggacgcggtctgacagcggctgatatcgcagatgccgtacgtcgtaataactaccaggcggcacccggcaaggtcaaaggcgagtttgtaatagccaacgtgtatgtgaataccgatctgaccagcgtcgatgagttccgcgacatggtgatccacagtgacggcaacggtctggtccggctgaaagatgtggcaaccgtcgaactcggtgcggcatcagccgaaaccagcggcctgatgaacggcgaatctgcgatttatctgggccttttctctacgccgtccggtaacccgctggtcattgttgacggtatgaaaaagttactgccggggatcgaaaaaacgctgccgccgggtgtaaaagcagagatggcctttgaaaccgcccgttttattgaagcctccattgatcaggtaatgcagacactgctggaagcgctggcgatcgtgatcgcggtgatctttctgtgtctcggctccctgcgcagtgtgctgatcccggtactggcgatcccgctctccatgctgggtgcggcaattatcatgctggcggccggtttcagtattaacctgctgacattgctggcgatggtgcttgctatcggcctggtggtggatgatgccatcgtggtggtggaaaacgtccaccgccatattgaggaaggtaagtcaccggtgctggcggcgctgatcggtgcccgtgaagttgcgggaccggttattgccatgaccattactctcgcggcagtctatgcgccaatcggcctgatgtccggactgaccggcgcactgttcagagagtttgccctgacacttgccggtgctgtgattgtttccggtattgtcgcgctgacgctgtcaccggtcatgagctcctttatgctgaacgccggacagaatgaaggccggatggcggcgggtgcggagtatgttttcagctcactggctgcgggctacggccggctcctgaattttttactcgatcaccgctggatcaccggcctgtttgctgtcgccgtctgtatcagcctgccgctgctttaccagcaggcacagcaggagctggcaccggcagaagatcaggccagtattctgaccgccgtcaaagcaccgcagcatgccaatctcgcctatgccgagcgttttaatcagcggctgcatgaggtcatgatgacactgccggaaagtgacagcacgtggattatcaacggcacagatggcccgtccgccagtttcggcgggatcaacctgtctgactggtcagcccgtaccacatccgcagcgcaggttcagcagtcactgcaacaggcggtcagtgagatagaaggcagtcagatatttgtcttccagctgccgccgcttccggggtcagccggtggcctgccggtccagatggtactgcgcagcccgctgggttatccggtactgtatcaggcgatggaggacatcaagcagcaggcgagggagagtggtttatttatggtggttgacagtgatctcgattacaacaacccggtcgtgcaggtgaagatcaaccgtgaaaaagcgaatagtctggggatccgcatgagtgatatcggcgaatcactgaatctgctggtcggggagaactatattaaccgcttcgcgatggatggccgttcctatgatgtcattccgcagagcacccgcgaacagcgcctgacaccgcaggcactggagcgccagtatgtgcgtacccgggataatcagctgatcccgctttctgccattgtgacaatcagcaccacggtcgaaccgaataaactgacccagtttgatcagcagaatgcggctgtttttcaggcaattccggcccccggtgtcacacttggcgaggcggtaaatttcctggagcaggccggacaggctctgccggccgggttcagttatgactggcagtcagacgcccgtcagttcaaacaggaaggaaatacactgatgtttgctttcgcggcggcacttatcattatttatctggtgctggctgcacagtatgagagcctgacagatccgctgattattctgatcaccgtgccgttgtccgtttgcggtgccctgctgccgctggcgctcggctatgcgacacttaatatttatactcagatagggttggtgacattgatcgggcttatcagtaagcacggtattctgatggtggaatttgccaatgaactccagatgcatgaaaagcttgatcgccgtcaggccattatccgcgccgcacagatacgtctgcgtccggtgctgatgaccacggccgcgatggtgataggacttatcccgctgctgtttgcttccggtgccggtgccaacagccgtttcggtctgggtgtggtaattgtatcagggatgatggtcggaacactctttaccctgtttgttctgccagccgtctacacccggctcgcccgggatcattccggtatgaatgccacggaacgcagccgggcattacaggccgcagaaaaagcactgaaacaaagcctgtaa

SEQ ID NO: 280786 - DNA, 768 bp, Morganella morganii
atgaatatttcaaataatagcgataatatcaatatttcatcttcgggttatatacctgaggatgttgttattgtaaaagaaaaatcggcactgccggttaatcagattaatcaaagaatggttcagtcagttgctgatagtcaatattttcagcaggaaacaccagccggtaaaacagcggaagaggtcatcaggccattctcacagcatgtgatccccgcactgttaaatgattatgataataaacgtatgagtattgtcattgaattatgcaatgttctgttgcttgatgcgattaatcagcaggaacgccggaatacgttagaaaaacaggccgtgcagcaggcaacattattaaaagagctgaaatatgaagaagccgattatcaggttgcagcggcggttgccggggcgcttgtgtcggtggcggttgctgtcgttggcggcagtatgtcaattaacgggattaacccggctaatccgggcgtattatcggcgcaaagccttgccgggcaggcaatatccggtttgtcacaatctctcgggcagcttgcttcccagcctatcgcggcaatgggaacccggtcgcagggggatgcggaagtggtccgtgtcaggaaagatgttctgctcagcgcaatgtcaactcataataaagtgtcagatgatcagaaagcgtttcagaaaaaactgctggatatgctgaccagtgaattggagaaccgcaaaagtacaacacagaatctgattaataatatgaagatataa

SEQ ID NO: 280787 - DNA, 1719 bp, Morganella morganii
atggatgtatcagggattaaatcagcgcaattaatcacttccggtgctttagccggagaaataaatgaaacagaaaaaagcaaggttgttaaccaatcagaggagatatctttttctgaaaaaatcgttgaggaattgggtgagagatatagccgggaaaacagtaaaaaaacaaagccacagcttaacggacagcagacaggtaaacaaaatagtggtaaaacatcagcaaaaaggatgtcaattaatgaactgtttgcccggttatctgatgaccttttgggtgagcagattaaaaattcaggtataaataataatattaacagtagtattttaaagaacatctggtctccgcagcaggaatctgagttagataaagatattataaagtattttgatgtattatctgtcagggttaatgatatatcagagtattactataatatcatcaatgataataataaagattatgacgatatccggttgttttttaccggaggtgaagatgtcaatgtcagtgataaaaaagaattccttgttcatttttacaataaacttggttttggtaatattctgaaaattatgtcagataacgcaggggactgcaaagaaaaaacaaatttaattaagaagttgctgaatgatattatcagtctgccaaaagtaaaagaacaacagtggataatagatcctgatgaattagttttactgaaatcagagtcagtactgttgcataatacagcagaaacgttagcttcagcaagagattgcctgtctgcagcacaatcactggtcaatatgaataataaaaatacgattgagtataataattcgcttgaagtattgatggggaaactggctgatttacgtgatcagatggctcaaaagaagctggaaaatgaccgggagttagcccgggtacaacagttggcattgcagaccaaaacagataaagatgccgctgatatagcagagaaaataaaaaaagcagaacggttgcaggccttgtttaaatggctggggccattgctgattgccattatgtcagtattaacagcactgaccggcggattactggcaaaagccctggcagccgttattgttgtgatgactctgatcactgaagttgtaaaagcagccggtggcccggatattatggcaaaaatcatggagccggcgatgaaactgatagaggcagttcagaaatttattaaagatattgccatggcgataggtaaagcacagggaaaatcaccggaagaactgaaaaagctggaaaaaaccatggaaattgtcgctatggtactggctgttgtggtcgtggcagcattatttatggcggcggcgtcagcagttggctcaattgcgggaaaagctataggtagttttgcatcagaagcaatgcagacagcaataaagagtgctttagctcagatacaaaccatactgattaatatcatgatgacatcaacgattatcaatggtgtcagttctgttacaaatgcagtattacaggctgatgcggcacggctgcgggcagatatggatcttgatttggaatttctggacagaataacagaaatgatgaatcagataatggagactttttctgaatcacacaaagagctcatcgcactaaatgaaaaactaagcaaatgcggtaatgaatctttccagagaatgaaatcaataatacagcaaggtcaattagctgtttaa

SEQ ID NO: 280788 - DNA, 345 bp, Morganella morganii
atgacacttcccgttttcaggccattaatgatatccgccacttttgtcttatgcagtgtatttgccggtaactgccgggctgagattgatttaccctgccttatgagtcacaagctcaaagttgagaagcaggaagatcatgtttgtgtaagtaaacagccgttgcctgcctgccctgcattgtgtcacccgtcaaaaagtgtgaaaaaaacggaggcgttttattgtatcgactctgacaaactgttacccgataagaaagccaatgccgttttggatgtcactgttccggtgagttgtgaggcgacacttcctgtatttgcagtaccggacaccacaccataa

SEQ ID NO: 280789 - DNA, 189 bp, Morganella morganii
atgggtattgccgttctgcttacagtaattatgcttgcattactgttaattctgttttgtgtcgctgctgtccggtacaggacaaataaaactgatctttgttttctgatcctgctgctctccggcacaggatcagttgctgtattgggttatttattatatgtgcttcatctggtacgggttttttag

SEQ ID NO: 280790 - DNA, 2220 bp, Morganella morganii
atgaacatatacgttattacagctgcaactgtattgttatcattcagtgcggtttcctctccggtacttaatgaaaaaacgaaaggtgatttaaaaatacatgatttaggcacattccatcctgagaatgaaggcacttcatatataaccggtatgtcttctgacgggcgttttatcacaggtaatacatcctctgaaatcgattatgattcacctcatggtttttattacgatactgacacctcaaaaaagataagtatcgattctttccgcagtgataaaagcggcatgacgataacatccggaatatctgccgatggcagtgtcatcaccggctcagctgaaaccgatgacggcgggatgcaggcattccatttccgccatgccggcggaaaaataacccggctcggtacattacgcaccggtaataccggtaattcttatgtcagagctgccagcgctgacggacgggttatcgccggtatttctcagacggatacgtccgcgacagggcaggcattccgctataaagaaggggataccggaattaccgggctcggcacgctgcgcagtgataactccggatcatctgatgccaggctgatatctgcagatggccgtgtgatcgccggagattctaacgtcgacggcagtgatattatccgggcgttccgtcacaacgacggtgacgcaagactgactgcgctcggtacattacgggcagatggtgagggtaactcatgggcgatggccatcagtgctgacggacgcaccattacagggcacgccaccaccgaaaatagcgaaattcaggcatttcgccatactgaaggccggacaggtatgatgtcactcggcacattacgtcaggataacagcggcaactcctacggacgggtaatgtctgctgacggaaaagtgatcgcgggagcggcagataccgataaccattcacgccaggcctaccggctcagtgagaatgacacgaaaatgatttcactcggtacattacgcagcgataacagcggtgattctgatgcacttgcgatatcgcctgacggccgtgtcgtcgccggtaaagcagaaaccgataacggtgatgaacaggcctttgtgtatcgctcagctgaccagaaaatgaccggcctcggcacattacgctcagatggtaccggacgttctgaagcaaaccgggtatctgctgacggcgaggttattgccggtatttcacagtcagataccgagttccggcgggcagttttgtgggtccgcgataaggttacagaagaggaagtgattatagacgaaggcaaaaccggagacgcgattgctgaaaccggtaaaacggcattttctgtcctggatctgtatcagagcgcattatattccctgtcagaaagccgctgtcagattggcgatagtaattattgcgtcggggctttctcacagtttgataatgtccgcagtaatcaccgggtcgctaccggcatatttggtgctttccgctttccggctgaaaactgggtcgcgggtgcttcactgaacttcgccaataatacccggctgaccgacggatatgatacccgaggcagtaataacccgggcgtgggggcttatatccgctatcaggaaaacaaagacaataccgggtccggggcagagttatccggtgcatttttaaatcaggatgtcaccattacccgtaatcacctgaaaaatacggaagccggccgcggtgattcatcgataaaagcgtatcgctttaaagcagccgttaattatggcgttaatctcagtgagacaacgcaactgattccgaatgcggcaatcagtcaccataatgtcacccgagacggatacacggaaaacagtaataccaatctggcggcaacatatggccggatgggtaacaaaagtactgatttgcgtaccggtctcgatatacgacaggctctgacgccggatattgatctctatggtggcgccggaatagatattaacctgaataatcagcgcgatgcatttaccagccgggtaaattacatcggtacttatacatttgataacggtaattcacgtaatgtgaagccatatgcatatgctgaggtcaatattaatatgacagcgaactcagcaataggcatcaatatcggctggcatcagacagattatactaatgacgctgctcaggctggtctgaactattcttatcgctggtaa

SEQ ID NO: 280791 - DNA, 339 bp, Morganella morganii
atgctgcgcaactcaccggagaatgaaacgcccggccagttcgaaaaacggcttaaagcatcgaaactgatagccggtgatcgctataccctgcgggggatcttacagtcactggcattaacaggcgtgataccgaatcagttcatgactctgtctctcagccggtggactgacttcggtgatattgttattacagagaatcagttgaagaatacaaaaggccgctctgatatggaaatgccgtgggcgggatggaaaggtaatctccgcatcaatgatgaaaaagcagccggatattttgatggcaatctaaatccggaagataaaaaaaatgcctga

SEQ ID NO: 280792 - DNA, 678 bp, Morganella morganii
atgagtattccggcaaactttaatggtcagcgtcctgttattaatcctgatgatgcactgatgctgttaatcgatcatcagagcggactgttccagactgtcggcgatatgccgatgacggaattacgcgccagagccgccgtgctggcaaaaatggcaacactcgccaatatcccggtgatcaccaccgcctcagttccgcagggtccgaatggcccgctgatcccggaaattcatcagaatgcgccgcatgctcagtatattgcgcgtaaaggtgaaattaatgcctgggataacccggaatttgtggctgcggtgaaggcgtccggtaagaagcagttaatcattgccggtaccattaccagcgtctgtatggcattcccggcgatcagcgccgtggctgacggttatcaggtgtttgcggtaattgatgcttccggtacttacaccaagatggcacaggaaatcacgctggcacgcgttgttcaggccggtgtggtgccgatggatactgcagcagtggcttctgaactgcaaaaaacctggaaccgtgcggatgcggcagaatgggcacaggcatacacgcagattttcccggcctatcagttactgattgagagctataccaaagcgcaggacgttgtgaataacagcgagattttagattcacagcgctga

SEQ ID NO: 280793 - DNA, 417 bp, Morganella morganii
atgataactaaattattctcattaattatactcattctatttttaatttttttatactgttttttgtcgccaactcaatactttccggtgacaaattatataaagtcattattttttacctccgattttattcgtaatgctcctgataaggagcaggcaacttattattatcacttttggggtgaccggggtcaggaatcatattcttctgtttattattgtcaggatgttaactcatttaccgaattaaaaataaagcttcatcagtacgcaaactctcgcagagcattaatccccataagtgaaataacatacaaaaataaatataatgaaaatttatttatttctatttatgaagcaaaaaaagaccatgaggattgcctgttgttatctgaatacgaataccgctatgattaa

SEQ ID NO: 280794 - DNA, 333 bp, Morganella morganii
atgatgttatatcagtttaaatacaaaacatctgaaatattacaaattattaccacaatatgcctgttcacaagtttaaagcgtaaatgcaaattaacacacataatgagtaattacaggtcgaatattaatttatccgataaaaaagacagaatgtatcgctgtattcaaaaaattcatatcaatcattgtgttgtggtgtgtattacaggagggctacaggttattatcggcagttatccggaagactttagatttttcgggggttgcgctataaaagcagaagggctgagcgccatcatttttcattctgagaagggagaaaacctatga

SEQ ID NO: 280795 - DNA, 462 bp, Morganella morganii
atggaattcgtgatgattaaaaataaactggctgttccggaaactacctggctggcactgcggcaaaaattatggccggactgtccgccgcagaaacacagggatgaaatccgcgatattatccgcaatccgtcactgtgtgcttttttcctctgtaccgcagacgggcaaactaccgcgtttgcggaagcctctgtgcggacagattatgttaacggctgtaccacatcaccggttgcctatcttgaggggatttattgtgaggaaagcgcacggcggcagggatttgccgggcaactgattgcacaggtgaaacagtggggagctgaaaacggctgccgcgaactggcctccgatacctcaccggataacaccgcgtcgcagttgttacaccgggctctcgggtttaccgaaaccgagcgggtgatcttttactgtcagccactgctgccggagaaataa

SEQ ID NO: 280796 - DNA, 456 bp, Morganella morganii
atgatgacaagtagccggagcaccggggagatatccccggcaacggaacaggatctcgctgcgttaattgcccttgataccgttgcggcacaggagccgcaacggtgtgaggcgatccgccgctggattgagcagaaaatctgttttgtgctgcggcgtgaaggcaaaattaccggttacggcgtgctgcattatcactttttcggctgcggatttattgagttactgatggtggatccggtgctgcgcgggcagggagtcggcagtacattgctggcggcattgcagcagcagtgccggacagaaaaactgtttacctccgtgaatacctcgaataccggtatgcaggcgttgctgctgcgtcagggctttgtgctcagcggacaggtggataatctggatgacggtgacccggaactgttttatttccgcagactgagttgtaaaaatgattaa

SEQ ID NO: 280797 - DNA, 291 bp, Morganella morganii
atgaaaaagttaattttagctgccggcctgttatcactttcttctgctgcattttctgctcagttatctgccacctgtgaagattactttaaacaggttgatgggtatatggaactgctggccaaaaatgatgcaatgaaaggtcagattgacaccatgaagcagcagtatgctgatgctaaaaagcagtttatggatttacctgctgaagcacaggattctgcatgtaaacaaggtattgatgcgttagcccaggctaaggccatgatggaacagcaaatgccgaaataa

SEQ ID NO: 280798 - DNA, 588 bp, Morganella morganii
atgctgaataaaaggcgggaaaagggttcattgctatttgaaatgctggcgggaatggcggtcagtgcaattctcctggtcacggtaacccgcttttttccggcgctggggcgggatgtgctgaacacataccggcaatataagctggatacgataatgcgggaaacccttttgcggctggaaaaagatctccggcggacggcattctgccgggggcactgtcagggtaaaccgctggaaattgccgcccggcgcggtgaggcagacggcagttgcatcattgttgcttacgatctcaatcacaatggccgctgggagcggaatgtccgtaaaatcggggaacatttcggctaccgtctgaataagcaggcactggaatggacacgtaacgcccgcagctgcctggattccggctgggaaaaggtcacggataaccgctatgtgaatgtttcccggtttctggttacgccggtaaaattatacggaaaacaaggcctgaaactgaccctgacactcaccgggcaggacatgcctttaatacagcgaaccggagaaagcctgattgtcatgccgaattaccacctgtag

SEQ ID NO: 280799 - DNA, 2076 bp, Morganella morganii
atggttaattttttttatttcaaaccttcagctatcacacctcatgttttcgttgccctttgtgctgtacctgcgtactcacaaacagcaaacagtaatacttctgacactgttgttgtcagtgccggggtgctgaaagttgacaccgcattacaggaaacaccgcaatccgtttctgttattacgcaaaaagagctggaaacccgcgcaccgcaaaaactggatgaagcactgcgctacacctcaggggtaacagctcagccttacggtgcggataatgatactgactggtttaaagtccgtggttttgatgccgcgacctatctggataacagtcgtttatttcgcgacgggtattatacctggctgcttgaaccttatggtttcgaacaaattgaagttgttaaaggggcatctgcggttctgtttggtgaatctacccccggtggtgctgtaaacgtagtgactaaaaagccgctgtttgccccgaaaggggaatttttccttgaagcaggaaataatgatcagcgtgggtttggttttgatgttgccggtcatgccagcgatgatggtgatgtccgttaccgggtagtcggtttgatgaaacaggcggatggtgaactggataaaacggataacaaacgaatttatctagcgccttcgcttgcgatggctctttctgacgataccatgctgacactgatggcaacgtatctgcatgatgacggtacaccaaccaacccgtttttccctgcagccggtacactgatcgattcaccttacggaaaaattaaaccgtcagcgaatcttggtgagccggattatgataaatacaagcgctcacagttttccgccggatatctgctggaacacgatattgacacgacctggcgtttctcccagcgcctgaattatggttataattcactgacactgcgcagtgtgtatgcatttccgaacgcagatacatctgcaacctctctcgcccgcggtgttgtattccgtgacggtaacagccagagtataacattcgataacaacctgacgggacaatgggattcagagcgtctggagcacaccctgctggcaggggctgaaattcagtatcaccggacaaaaggtgatgaacaggacagttatgcattcagtccgatcaatccgtggaatccggtctacggacaatacgtaccactggacccggctgacaatattaaccggacaataaataaaactcaggcaagcctctattcccggtaccaaatcaagctggacggtaaatggattggtgttgccggggtgcgctatgatcaggtaaaaactgagaataaaaatcagacagctcataatgataaatcccggaatgatggtgaggtgagtgtcaatgccgggctgatgtatctggcggataacgggttatcaccctataccagctattcacagtcatttgaagtgatgagcaccatcgaccctgcgaccggtgatttgtataaaccgctgaaaggtgaacaaattgaggccggagtcaaatatacgccttcattcctcgatggttatctgaatattgcctggttcagtattgaacagaaaaatgcactggttaccaatccggatacttctgttgccacacagacaggaaaagtcacatcaacgggggcagaagctgaaggatttgtgcaattgactgataatgtcaatgttcaggcatcctatacctacacaaatgccaaaacagataataccggtggtcagggacgtaaacagactgcgcttatccctgagcacatggcatccgcctgggtcaattacacactgccggtaaccggcagcggagaactgacactcggctccggtgtccgctatctcggtaaatcaaaagacaatccggcgagcagtgatcgtactgtgtccgctgctgcattatgggatgctgcggtcatttataagctgaacaaacagtggcagcttcaggtcaatgtgaataatctgctgaataaagaatatatttctgcatgtgattattactgctattacggccaatcccgttctgttgtcgttcagaccaaatacagctggtag

SEQ ID NO: 280800 - DNA, 210 bp, Morganella morganii
atgcgcaaagcccgattgactgaacatccgattatcgccattctgaagtccgtcgaagccggacggacagtcaaagatgtctgccgtgagaacggtatatccgaagccagctactacaaccgggaagccggtttcccttttcggctgtatcccggtatattttatgattatttccgaaagcggctgaccagcattaaccccaggaaatag

SEQ ID NO: 280801 - DNA, 288 bp, Morganella morganii
atgaaagagttaagtattcaggaaattgaagcagtttctggtgccggttttattaaagatggtttagtgggtgtcggcagcaaaattggtgatgcggcattccgggtatttggtccttatatgaatgtgaaagtgcctctgtttggtcagattaatatcgcacaaaaattcccgggcttaggtaaagatctgggatctcagattggcggtaatgtaggtgataaaatcgaatcacgcttaacatctttaccgggtgttggtggtttatttaaaaaactgctcggttaa

SEQ ID NO: 280802 - DNA, 357 bp, Morganella morganii
atgaaaaaggcttttacagcagctatgttgttttgtatgtctgtttcttcaatagcggcagtacctgatgggaaaatcgaaaaaccctttattgttggcaaggaagttatttgtttgaaagagatccagaagaaaattacgccttatctcaagtcatttgaagaagaaagcggggttaagtataagtacaatgttaaatcaggtttatcgtacaaagatactgtagggctacggttacagatcaaccgtgtggattcggggctggatgtgcgtgtagccgatcttgattattactggctacaggaacggggcagtatgtgccaaccagcgtatatggtacttgatcgttcgctgtaa

SEQ ID NO: 280803 - DNA, 516 bp, Morganella morganii
atgatgcctgatccgacagaagctaaattgtgtgagtcgctattagatattactgggaaagatatacataacgctagagaatacgagagtttatatcaatttgtactcagaggtatatcaagaaattttgaaagcactgaggtacagatcgtttatgtatttgataagtatcaggctgaatcattaactacaaatattgaacacattcctggagtactggaaaacgtggagcctggtgtaccgggaaggccaaagggagctaaaaacgttagcagactacccgcattgagcggtacaaaattgaaacgttttagtcgctggaaaaatgataatccggggcttgaaatagattcgttccgtaagtttctgaacagtgatactaaccgcgatctcagtaccgaagataaagatgccatgttgagccgattcgaaaaagcagtacaaaaaaaagctgtggatgcagtccgaaacaccgacatgaaaaacaatgggatgtccaaaaataaccccttataa

SEQ ID NO: 280804 - DNA, 315 bp, Morganella morganii
gtgatccatcaccagttgtgtgccgaccggcataatcaggccgatggcctcaatcaccacagagaaggcgaagattttcagcagggcttttttcagcccgtgaatattgccgataagcttgcgcaggctgagttttttcaccacctcctgttttgtgaaggtgctgccgggccaggcttccagtgccacgccggtaaaattgcgcgacatttcctcaataccgaccacccggcggccatacgccgggtcatgcaggatgaatttgttgccgctgatttttaccagcaccagaaagtgattgaaatcccagtgtaa

SEQ ID NO: 280805 - DNA, 285 bp, Morganella morganii
atgaccgccgtagaggatcatcatgataaacacgccgatcagcatgataccgtccatgatcgccccgaccacgctggtggtaaaggtggtgcgcaggatatccagcgagccgaaacgggactgaatatccccgagtttgcgccgctcaaaatagctgagcggcagccgcagcagatgggtaaacagcccggactgccactggacgttgatcagcgtttccataatcacactcgcccaggcgcggcacatactgaccgccgctttcagcaggataaagaacagtaa

SEQ ID NO: 280806 - DNA, 357 bp, Morganella morganii
atgcaggctcatgatgcgcagttgcagcaggaactcaatgatggaggcggcgcggtcagaaaactgctcgcggtaggcgctgaacgcgacaaacatcccgagggtcatggcattgtcgatcaccagacccgcgccgatccacagaatcgctatctgatcacaggccatgataaaggtattcaccccgccgaacatcagattcattttggtcaggcggataccggtgttgatagaatcgactttcagattcagccagtgattaccccggcgctcgctcatgccctgggttttcaccgtggtgataccgtagagggattccataaagtacgacccggcgcgtgcctctttgatcagtga

SEQ ID NO: 280807 - DNA, 1050 bp, Morganella morganii
atgctattctctattggtgtattttcacccttagaagcaaggcgtgaaaatctcaccaaaattagtgggttaagcgttatcgatattgctgaattaatcaatactgactccggtgaagaatttgatcatggacagtcagtacgggatacctttccaaaatgtgactattttttacgtgttgataaaggtttgtctgaaccaaataatgctgaagcaaaaggtcagattttatctaaactggaacgtttttttaaattaatttttaggagctctgttatttccccaacagaagaagaaaatgctatgtatgcagcttcctctgcggcacggaattcagcttgtctatcgcggcaggtaggtgcggcggtaacgtcttcatctggggagttactttcaactggatggaatgatgttcctcgtaatggtggtggactttatggtaaaccatcacttcgcttaaaagtaatgaatcctgataatagatgttatgcattagacaaaagaaactgttcgaatgatatagaaaaacgaactttagctgaagtagttattgatagtttagtaaatgagaagattattgcaaaaaataaaagagaggtggctgttagaaccattattaagaattcacggctaaaagatttaattgagttttctagagcagtgcatgcggagatgcatgcgattctaggtgcttctcgagttgctggcgagagaatcttgggtgggaaaatatttgtaaccacttatccatgccattcatgtgctaggcatatcatagcttcaggaatctctgaggtttatttcatcgagccatacagaaaaagtttagctttaaagcttcatgctgatgctatgactgaatcagttatagatagtgatgataaagtgaaattgattcagtttgacggtgttgctccaactagatttgtaagtatcccggaaaaaagttccattcactttcagagatcttcatccatactgatatgtattctgaggagatcgctatgcgcaaagcccgatttactgaacatcagattatcgccgttctga

SEQ ID NO: 280808 - DNA, 465 bp, Morganella morganii
atgcaaagcatagctttagataaaagtcaaggatttaaacttgtcggtaatgatgattttagcgataattcagctatcaatgctacccaggaaattaaagatagtattactcctgagataataattgcactgtgtgggccaattggctctccactgcatgaaacaactgagcaaatatctgcatcccttaataaatatgggtataaaacatataatattcgtctgagtgatttaataagaattaatgctaagtcgacaagtattgatattgatgaagcctcgaacttacgtaaatttaaatcattaatatcagttggtgataaattacgagaaatttacggtagtgatattttggcaaaactggcaattgcaaagataagtgccgaacgtactaaagtttttggtgattttgatgatgttgttaatgagtctaataagagtgataataataaaataaagaattaa

SEQ ID NO: 280809 - DNA, 561 bp, Morganella morganii
atgattattgggtatgccagagtttcgactaaggaacaaaatctagatcgacaattagcggtacttgaaccgttatgtgataaagtcgttactgaaaaacaatcggcgaaattaattgccaataggccagaattgctaaatttattagctcatctccgtaaaggggatactcttgtaactcattctattgatagacttgcacgtaacactaaagaacttttagagctaattgatgatcttattgcaagaggggttacagtcagatttttagttaattcaatggtgtttgataatagccctcaatctcggttgatattgactatgatgggtgctgccgcagaatttgaaagagggatgattgccgctcggcgtaatgagggtatagctattgctaaagcagctaaaaaatataaagggaaacaaaaaaacatagagttacataataagattatttcgatgcttaatgctggtaaaaatacaccagatgaaatagctaaattatgtgactgtggaagagctacagtgtttagagttaaaaaagaattatcaaataaggtatga

SEQ ID NO: 280810 - DNA, 150 bp, Morganella morganii
atgagcaaagcccgatttactgaacatcagattatcgccgttctgaaatccgtcgaagccggacggacagtcaaagatgtctgccgtgaagccggtatatccgaagccagctactatatctatggactacctccattttgcaagtactga

SEQ ID NO: 280811 - DNA, 783 bp, Morganella morganii
atgggttccggaatattatcaatatctattggtgttcttgttagtgtcttcattgatagaatattagtaagaaaagctgtatttaataaaaaagctattgaaacaatagctgcatttaacatgcacagtcatgcaaatcaaataaaaaccatatggagcaaagccaaattaatgggcattgttcagattggtaacttcatgacaacaaaatgtagtttattaatagtttcatccataattggcttagaagcggcagcaagttatggatttactttgcaattgactaacatagctattgtagtttcgtctatgtattttggtttacaaatgcctcgacttagtgctgaatatataacaggaaacctttctaccatacgtagcatttttataaaatcaattggtatatcttggtacctattcattctatatagtctatcgcttctatacataggcccaattattttatcaatcatatctgaaaatacaaaattgttaccaactgctatgttagctatttttttggtatcatcatttttagaaatgaattactcacaatgtaccgcatatctcacgacaaagaatgatataacatttgcatatccaatatttattactggcatcttaattgtattatgctcatatatcttgagtccaacctatgggctttggggagttatatcatctcaatttatacttcagttcctatacaataactggaagtggccaactctcgtttttagtgagttgaatattacgtggagagatcctttactaatcaagtga

SEQ ID NO: 280812 - DNA, 441 bp, Morganella morganii
atgactctatccacacctccgctgcaggagcccgcagccatcaaaagcaatctggttcatccccgtggcagagactcattctggcggttttatttcggcagcgtgccggactcgcagcgcctggaaagcgacatttttaagatgatggataatctgtgtgacatttatcacggtgcattctgggaattcagcatgctcaccaacggcggcgcatttatctggcctgacatgattgaaacgtcactcccgatggttaacccgcataacggcaatgacgcggaactgagccctgaagcggccggtatcgcggtatgcctcatcacttacagtctctggtcatttaaaaccgaaagtccggagatggtggagtatttttatcagttgcgggactacgccctgcagcatgaggagtgtgccgctattttccgtcttatcgattaa

SEQ ID NO: 280813 - DNA, 150 bp, Morganella morganii
atgcgcaaagcccgatttactgaacatcagattatcgccgttctgaaatccgtcgaagccggacggacagtcaaagatgtctgccgtgaagccggtatatccgaagccagctactatatctatggactacctccgttttgcaagtactga

SEQ ID NO: 280814 - DNA, 381 bp, Morganella morganii
atggaagaaaaagacaccagcgcggctgctccggccgctgcggttcctgacaccctgttgtacggtgtgaattttaacggcgtgctgcactttgattatgccgtccgcatcccggtgatgcgtgatatttatgatgcgctggatgaaacggaagaagtcaccggttcggccaccggcggcaagtctgatatttactaccgcatggccctgctgaagcgcactatcacgaagctcggtgatattccggcagatgatatcaccactgatttgctgctggatgaactgctggaggaagattacagcattctggatgccgcacagaccgccgctaaaaaaaagcggagagatctgaagaacgtcgcagatccttccggcaaatag

SEQ ID NO: 280815 - DNA, 1425 bp, Morganella morganii
atgatcacatttgacaatatcccggacagcctgcgcaaaccgggtaaatatctggagtttaacctgcgcatggcaacccgtgcgctgccgggcaatccgcaggtgatgctgattgtggccccgatgatgaaaagcgggcttgcagagccgctgacaccggtgaacgtgtttgatgataccgaagcagcggtggcattcggggccggatcactggcacacatcatggcaaaagcggcgattaccgccaacagttatctgcagctgcaggttattggtgttaaggaaaatccggccggtaaagcggctgccggtacactgacggtgacagggcatgccaccaacagcggcaccttttacctgacggtatgcggtgagcgtctgaatgtggccgtcaccgccggtgacagcgcggatgatatctgtcaggccatatcagatacggtaaatgcacagatggctctgccggttaaggcggcactgaccacaggtgaaagtgacaacaaattcatcacactgaccgcacgccagaccggtgagtacggtaatgacattctgctgtcagcctcctgtacggccaaaggtatcacgcagaccctgacggccatgcagggcggtgaaaataacgcggatattcagcctgcgctggatgcggtctttgctgccggtcacaacatcattgtgccgccgttctctgacaaagatacgctgctgaagctgcgcacccacctggaaaaaaccggggggccgctggagcagcgcggcgctgtcgcggctgccggatggacaggtacgctcagtaccggcaccacactggctgcggatatcaatgacggccgcaccacgattgcctggtatccggggtcggcaaaactgccgtgtcagctggccgccggttacggtgcggtgattgcctctgaggaagacccggccagaccgctgaataaccttgaaattaaagggatggatgttgctccggtaaaagcctgggcgggccgtaatgaacaggaaaatgcactgcataacggactgacaccgcttgaggtgggtcccggcaataaggtgcagattgtccgtgccatcaccacctacacgaagaatccggagggcgtgaacgatacggcgctgctggatttaaccactatacgcacgctggattatacccgtgtggcgtgccgtgagcgtatctcgcagcgttttccgcgtgacaaactcaatgaacgtacccgtcagaaagtccgttctgagctgctggatgtgctgattaaacttgaggaggaagaaatccttgagaacgttgaggccaacaaagaactgctgcttgttgaacgtaacggaaaagacgctaaccgccttgatgcacagattccggcggatgtggtgaacggtttacatattttcgcgggtcgtattgatctgtacgtctga

SEQ ID NO: 280816 - DNA, 909 bp, Morganella morganii
atgattgtaaataaagcaaaccttaccccgttgtttaccggcattaagctcgtgtttaacaacgcgctgaaagaagcggaaacaacgtgggaaaaaattgccatgaaagtaccgtccaccggtaaggcggagcagtacaactggctgaataatttcccggcgatgaagcgctgggtcggtgaaaaagcggttaaatcactggcagcccataaatacaccatcgagaacgatgactgggaagccacgattgaggtcgaccgtaacgatattgaagatgatcagaccggtcagtatgccattcaggcaaaaggtgccggtcgttctgcggcgatgctgcctgatgaaatcgtgtatgacctggtgaatcagggttttgagcgcacctgctatgacggccagtatttctttgatacggatcatcctgtcggcagccgctctgtgtccaacaaaggcacgaaaaaactctctgttgagtcactggcaaaagcgcaggcttcatttggtgctgcccgtaccgcaatgcgtaaggtgaccgatgaggaaggccgtccgctgaatatcaaccccggggtgctgctggtaccgcctgcccttgaagatgtcgcccgtgccttaatgacggttgaccgtcttgaggacggtaaagtcaacatctacaagggggctgctgaagtcgtggtctccgcacgtattcagtcggatacacaatggttcctgctggacaccacccagccggtgatgccgttcatttatcaggagcgtaaagcgccggtactggttgaacaggtcagtcttgagaatgatgacgtgtttatgcgcaaaaaattcaagttcggtgcggaagcgcgtgctgcaggcggttatgccttctggcagctggcttacggctcaaccggggaggaagcataa

SEQ ID NO: 280817 - DNA, 204 bp, Morganella morganii
atgaaaaacgatgaactgactattgaacaaaaactggcagttgcaaacattgccaaagaactggttattaccgtattaaataataagctcatcaacaacgcccccatcctagacgctaaaaataaatcagactggcgggctggtagcgtagatggcttatacaactgcctttacgacaacataatcaataaaattaaagcgtaa

SEQ ID NO: 280818 - DNA, 204 bp, Morganella morganii
atgggtgataaaaaaacagatttattcggactgggtaatgttgaaatgcgtgtgcagtttgtgacggatttggtgacttacctgagaggtaaatacggtgatgatgcctgtggttcatcagtgatgccggaattgttacttctgacatcactggtattaagcggtaagtacgccacagaaagttacttctgtaataaccgttaa

SEQ ID NO: 280819 - DNA, 276 bp, Morganella morganii
atgacaaactatacgatgctgggtgagtatgttgctttttctgaacaggcaaaggatgcggccaaccgccgctttgctgaaatgcataatctcgggcaggagctgatgcgtctggccggagagccggagcgcaattttgatgaaaccgaaatgcagcgccgtctgaaagcgatctccgcagcagatgcggaaatgaaagcggcactgcagaaagtgaatgaggcggcaccgctgtgcggaaaacccgccatccatccgtcatcactggcccgctga

SEQ ID NO: 280820 - DNA, 447 bp, Morganella morganii
atgacagacctggaaaaagttgaacatctgttgccggacacgttgcgtcagattgctgccttaaccggctacccggcaacactgaaactgattgatgcgttcggcggcacaacgttcacttttgtgaaggggctgcatcctgcagggctgaaacggctggagcagttatcgtgcatcgtcggcagggatgccgccgttgcgctcagtgcgcatttcgccggaacggaggtgtatatccccaatgcggcagcggcaatgcgtgaaatgagaaacaggaattttatcacagacgtgacatcactctgcagtcgcggatattcccgcagacaggctgtccgtgagttgtgtccgcggtacggattcagtgatcgtatcggctggaaattactgacttcggtttccggtggcggatgcggcgctgtaccagtacaatccggtttattctga

SEQ ID NO: 280821 - DNA, 195 bp, Morganella morganii
atgtccaggttgtcagcgaagcagtttaatgaacgctatccggtagggtcttattttatttatcagccgaaccgtattttacgcggtggcccgtcagtcagaacactaagccgggccgaagataaaaatagccggactattgtggaaatcgatattgagccttattacaccgatattgattcattaaactgctga

SEQ ID NO: 280822 - DNA, 195 bp, Morganella morganii
atgtcattcagacattatgcaaccgttgcggccatcgcagagcgcaacggccgttataacgaagccggacgtaactggacagatgcggccggactggcaaaaaaatatgaaaaccggcagtgggcggaacgtcgtgctgagttttgtgtcaaagcaggaggtcgtaatgtccaggttgtcagcgaagcagtttaa

SEQ ID NO: 280823 - DNA, 639 bp, Morganella morganii
atgtccattaatgataagcagttcactcagcatgaagttcctgacggatactggcgtgatgccagaggttgtctgattccggttgatatgctcaaagaaattgaccgcgcccgtgatactgtggtcggtgatattgtcagacttgcagaagcacagcaggaagctcttaaaacctttaaacgttatgcttttgatgaagtggatgcattccgtgaactgtcgtcagagcagtatggcgtggtatcaggaggtaaaaaaggtaacattcagttgcacagttttgatggtgaatatcgtgttcaggtggcaattcaggatcacctggcatttgatgaacgcctgcaggccgccaaggcactgattgatgagtgcatccgggactggtcaaccggtgcccgccctgaaattatggcaatcattgaggatgcctttaaagttgatacggcgggcaatatccgcacaagggatattctcaaattacgccgcctgaatatcacagatgaaaaatggctcagggccatgactgctgtcagtgagtctgtccagactatcagcagcagccgttatatccgtatctacaaacggagcggtactgacggtaaatatattcagatttcattagatatcgcaggggtgtga

SEQ ID NO: 280824 - DNA, 213 bp, Morganella morganii
atgagtacgagagtcgttatcaccataacagataccggggacggaaaaatgaccgccggtgtggcaacagaaacgcggaaaaccggttacacggacagcgaacaacttgttgcccgctggctcatggataaggtcaatgaatgcatcacaaaagaattaaaagcaacccgcagtattcttatcaaccataaggaaaattgtaatgtccattaa

SEQ ID NO: 280825 - DNA, 267 bp, Morganella morganii
atgaaaacaacagagacactgaaagaaaagtatatccgctgggttaaccggttaaaggaacagaaagtggttctggttagttttacgtgtccgcactgcggtgcggggattgaaacattaccggcatcaggtcgtgaggtatgggattctctggcttcctgccctttttgtgagtcagtttttatgaaactggtttcaggaaagcgggttataacagccagatttttcgctgaaaccagcatagcaacaggagaaacaacattatga

SEQ ID NO: 280826 - DNA, 285 bp, Morganella morganii
atgaatattaaaaatgcttccgacaatcagaaagttttagatgttctgtttcaggttcgttcagctgtgatgagcctgaacgaacggggtattaaagtgctgggagtgtcaaccagcggtattaatacggtgatcagaattgagcgtcatgcatgctgtgagcagtttatccgttcaggtaaagcctgttatctggagttcggtaacagccgccacggctattataaacaaggcgtttttatgcatcgcggatgccgtgtgtactggtctgagtccattcattaa

SEQ ID NO: 280827 - DNA, 2055 bp, Morganella morganii
atgtatgttgtcgtaaaggagttaatgggtatacccggaatgccttcgacaacgaaaggtattcgtcagagcttagacaaaatcgctaacggtaccggcttaaagcgtaagcgtaaaggcactaacgcattcgaatatcacattgactgcctgccatccgcggtacaggaagtgattaaatcccgcttttatgctcaggctctggaagctcagataccggcaacaacggaaccggaagaggtaaaaacaccccgttccgaaaagctggcgggtgaccttgacattatgcgtcagtgtcccgctctgcttgatgccagagtgggagaactgaccggcaatcagaaagatattgcggatgcccgcgccatgctggcacaggaagttttaaaactgatccggctgggttccagcagaacggcagcggtgaatctgatatcagatcagtccagaacagagacgctgccaccacacctgcagcgggcggctgatgcggccaatgcccgcaaaggctcaagccgtaaagggttcagtccccgttctctgcaggagtgggtcactatttatcagaccacccacaacggtggtgagcggctggctctgcttgcccccggtcatcagaaaaagcgcaagcctgagcatattgcctggctgcctgattttctggtgttctggcgtgacccgcagggattcagcatgaaggtctgtcatgaaaaattctgtgatgcctgggagattcgttataaagaccagccagccatgctggctgctgtaccggggtatgacgcggtacgcagggcattaaacaagatgccgaagcgtgaacgtctgcgtggccgtgtcaccggatccgctgctacagcgctggagccttaccagaaacgtgactggtcacagctgcctgtcaacggttgctgggtatctgacggtaagtccctgaatatgaaagtcgcccatccgatacacggacgtccgtttacgccggagttaacactggttattgatgcccggacacgctttgttgtcggctggagcctgtcatatgcagagaacgcgctgggtgtggcagaggcttatgcctgcggaatgcgccattacggtaagccgctgattgtgtattccgataacggcggcggccagactaacaatatgttggatgatgaattactgggtattttttcccgtttgggtatcgacagcggcgatggtgagcatattaccggcatcccggggcatcctcaggcacgcggcattattgaacggctcaacggcgttattccgctgaggattgcccagtctttcgccacctataacgggaaacgggctgaccgtgaacatgtccgggtgcttgaccgcgcgattgagtccgctgtcaatgctgctgacaagggtaaggcgttgtctccgcgtcagacttccgccctgaaaaaactgccgtcatggggggcgttgctggatgctgttaagtatgaggttgatcgctataacaacagccatgagcacagtgagttaccgaagtataacggccggtatttaaccccggcgcagtaccgcgaagccgtgctggctgctgagggtgacgatattgagtacctgtcagaaatggagctgcgcgaaatgtttaaaccgcagtttgtccggacgtgcagtcgcggctggattaattttgacaacaacgattactttgcctgggagctggcagaccatgacggtcagaaagtcagaattggtgtggatatcaacaatccggatgaaatcaatgtgtaccggatggatggcagctggatttgtactgccctctggaacggtaacaaacgtgcggccattccggtcagtatggttgagtctgcgaaacagaaacgcgccagacgccagattaataaactggaagggaaaattaaggttatccggcaggaaacacagcctgttatcgaacaccggcctgatttcagtggtttcattcccgctgaatcaccggtgccgtcagggcgtaaacccaccacgttcttacagactgagtatgagcacctgaattcccgaaaagccggtaaccaataa

SEQ ID NO: 280828 - DNA, 258 bp, Morganella morganii
atgatgaaaaaaaatgaagcgaaacaatctgattggcaccctgcagatatcaaggctgagatttcaaagcgtggatttacttttcgggagctgtctatcgcggcaggttatgcgccagattcattaaaaggtgttttaagagcgccgagtgttccttatgaaaaaatcatttcggatgttatcggtgttccagctgaggagatctggcccagccgttacgagttacgtaagcgcggtcagatgaataaggtgtcttaa

SEQ ID NO: 280829 - DNA, 573 bp, Morganella morganii
atgaaaaaagaaccaaatagttcttttggctccagtgaaaaagaacctgttattgaaagagttttccaattagttgagcgctatccgtcgcgaagtgctgccgctagagcatggggtattaatgtaaatacattgaagaactactatacaagaagagacattgagccagtcccaaggaagcctcagctaatcaaaatagctgaaactgaaggggtaagtttagattggctcttacacggtgtaggagaaaaacctagtataatcagcgaaataaaagctgataatataaattgtgaggcaaaagaaaaatcaatgaatcactcaactgaatcgaaaagtgacaaacttatagaattactatcactactcactgatgatgaaaaaaatcaactatatgagtctattgcaagaaagggagtggattctatccttcaattgatatttgaatttgcaaacttaccaccaagtgaatttgatagagctatccgcttagccaagcaaattagagagggggcttttgaagggggtcaggaagacattatagcccatcaggtaaaaaaccaggtggggtga

SEQ ID NO: 280830 - DNA, 240 bp, Morganella morganii
atggataaagtcagagtggcaatcacatgcgaattacgaagtaagtactgcaagtatgtagacatgagcagagacgactttgaaaagtacgaccagttaattaactccgacatgaaaaatcacgaaattgactcaaagttatccgatatagcagcgaaatacggattttcatgccgcgatgaaaactggcttgatggtgatgagccggaagaatttgagtttgaattagtcaccgactga

SEQ ID NO: 280831 - DNA, 144 bp, Morganella morganii
atgaaaatagcagtggatgtgacagaagatgagctgatggatatggaaatatcatcagctgaattacatacattcatcattcaggctcttgatgaatacggtgatttttgcggcttcgacgttgaaataaacgtcactgactaa

SEQ ID NO: 280832 - DNA, 381 bp, Morganella morganii
gtggaacatacgattaaagtttataaaaactcaccggaacatggtgattacctcaaagcacgttttccagacggctcacgcagtaacagtacgtttgaatatgcgggtcaccggtggggttatcggtacacatcatttgacgataaaggtgattatgacctgctctatcgctttgatgatgagccaggcgtacagccattgacagttaatgatgcaacgctgcgcgattattttgcagcaaaggctatgcagggtgatttagctgcacaggatgagagtatgggctatttcgaaaatagcactcctgataaattcctagaggacagggctcaattttattaccgcatggcagacgcaatgctcagagcaagggagaaatag

SEQ ID NO: 280833 - DNA, 942 bp, Morganella morganii
atggcaaacgaactggtcgttatcgaaccagcgacagcgctcgacctttttacagcgccggataaggttcaggtgctgctgtctggtatccgggagaaagcattagcagagcaggcattgctcgatactgatttatcgaaagtcaagaatcgcgatgctatcaaatcactggcctacaaagttacgcagtcaaaaacatacatcgacaaagccggaaaggctgtcgttgatgagctgaaagagctgccgaaaaaagtggatgccagtcgcaaacagtgccgggatgagctcgacgcactgagcgaagaaatccgcaaaccggtaacagcctgggaggatgtagaaaaggcgcgtatagcagcggaagaattagctcgccaaattgagcgtgaccacgaagaagcactgcagatgaatgagctgcatgacctgcgtaaagccgaagaagaacgcaaacgcattgagcatgaaaacgaaatcaagcgtcaggcggcagaacaggcacgaatcgaagctgagcaaaaagcacagcgtgagcgtgaagccgtggagctgaaagccaaacaggaacgtgaagctgcggaattaaaagcacgacaggaagtcgaggcagcagctaagcgcgaacgtgaggccagagaggcgcaggaacgcgcagaacgtgaaaagcaggaagctatcgcgaaggctgagcgtgacaagttggctgcagttgaagcggagcggcgcaaggcagaggaagccgaacgcgcacgactggcggagattgagcgccagaagcaggaagaattaaagcgccaggcgaacaaggagcatcagcgcaaatttaaccgcgaagctttgcaggcactgactgaagcaggatttgacgataaaaccgcaacaaaattccttgagctggtaattaaaggcgaagtccctcacctctcaatgaactactaa

SEQ ID NO: 280834 - DNA, 138 bp, Morganella morganii
atgactatcaatcagaacgttttccgtctggcgcaagcacaggcgcgggtagctatacgccagaaatgcgatgacatctggtggttagcaatggaattactcagagaaagttacgggaggcagaaatgcacaagataa

SEQ ID NO: 280835 - DNA, 168 bp, Morganella morganii
atgatgacaaaagatgaaatgagctttccggattggcatgacctattaatgcaggtagccgctgaccacggcggaagtgccgcagatgcagaagcatggcgcgaagattatgacgccggtaaaacaccactagaagcttgggctgatgaatggggtgatgatgtctaa

SEQ ID NO: 280836 - DNA, 273 bp, Morganella morganii
atgaatggggtgatgatgtctaaattaacgaaagaggaaattaaatgggtggaaaaagtgcaaaaagcactgaatgaatgcccaagcaaaagaattggttttttcaccataggcgatagtgacgtgaccctatatgacactgaaaaaatggacgaaataatgagttatttcgacgctggcaagtcggagtacggcggggcagttgaaaaagttggcgcattatttggccggtctcttgttttcccaagctgcgttgacagtacatctggctga

SEQ ID NO: 280837 - DNA, 279 bp, Morganella morganii
atggataatatgtatgcagcattttgcgcgtggtttaaagtttatcacgggtataatccgtcagtagcgtcagaggatagccaccttgtcggttctcgcagaatagcgtttgaggctgggtataaagccgctcttaatgccgtaaatattaaactgccagcaaaagaagaaaacccatcagatgataataattatgcgcatggatataaccgcgcaataaccgagtgctccgatgcaattaagcgtcaggggtttactgtcgaattaattctgaaataa

SEQ ID NO: 280838 - DNA, 336 bp, Morganella morganii
atgaacaaatatcgtgacaaatcagactttgagattaataaggttgtggctattgcgattggcaaggttgtaggcataaggccagactccaatattatatatttaattggcggcgatgagcttataggattcgacccctgcaacaacccaacggacgcaatgcctattattattgagaatggcatcagcctaatttcagactggaacgagattggcgtgtggggcgcgaccaatcagccgtggtttacatcagaaaataaaaacccactacgcgcagccatggaagtattcctgatgatgaaagaggcggagaatgagaataacaacaacagttaa

SEQ ID NO: 280839 - DNA, 588 bp, Morganella morganii
atggcaaaaatagagctgggcggcgtgctgggcaaaacgttcggcaaaacgcaccagcggcttgtttgcaccacgtcagaagctgtccgtgcattgtgctgcactattccgggctttgaacagttcctgaataccagcaaatcgcgcggtttaacttacgcggtatttcgcggaaaaaaaaatatcggggtggatgacctcggttttccggtgactgacgatgtcatccggattatgccggtggtgatcggtagcaaaagcggcggattgctgcaggttatttttggcgcggtgctggtggctgctgcgttctggactggcggcgcatcaatggctgcctggggagctctgcaaacagggatggccatgacaggtgcatccatgatattgggtggcattattcagatgctgtccccgcagccaaacgggatcgccatgaaagaccagggcgaaaataaaccgtcctatgcgttcggcgcgccgacgaacactgtttcccagggctacccggtaccgatcggttacggtaagcgccgtatcggcggggccgttatctctgccggaatttacgtcgaagatcagcagtaa

SEQ ID NO: 280840 - DNA, 522 bp, Morganella morganii
atgaagacaacaggatattggatattagggatatgctcattatttatagttatagccttattgatgtggttaaaaataaatgatgaatatgatttcgccaggtctttttcaacaattattacgttgtcgtctattggtagttttgggttaatagttggctctatattagctggttgcgggtcgattgttagtgaaattcggttactaagaacagggagcgctactgaacctgcaaacaagtacactacaccaggtaattccgtgggagaggattctggtgaggcattctcatttaagaagtggacagcatcaagttttgttattcgcggggacgccggattactttttgatgaaggtgcagtaacccgttttattgacgacatgaaaagatcaagaccggaaatgactatgcagcaactgactggccactataaaaatggtatcgactccattatcaatgggttacctgatgcccttaaaaaagagtttgctgctgattttctgaagaaaaccagtgactaa

SEQ ID NO: 280841 - DNA, 303 bp, Morganella morganii
atgtcaaagttaaaaccgttatcagaacggagtttaaagacagtgagtgcgctgttactcctgtttcccctggtgttattgggaagttgcagcaatacgaaagagacattcgtgcccgcgccggtggtgccgatcccgccacaactgacggctgattgtccgctgccggttattccggatgaactgacatacggcggcgcaatcctgttgttggccgatgcaatgaagtcgatagcagactgtaatcacgataagcgggcaatacggaagattaaagcggagaggttaaagttcaagaattaa

SEQ ID NO: 280842 - DNA, 1044 bp, Morganella morganii
atgaaaaagtatctgattgggtttattgctgtcattttttcattctccggccaggcggcgcgggagtttacagatcagctggggcgcaaggttgttattgatgatcatgttgagcgcgtggctgttcttcagcatcagacactgaatttactggttcagttggatgcaacggacaaaattgtgggcgtgatgggaaactggcgtgagcagctcggtcaaaattatgaacggctggcacctgaattagtgaaagtgcccaatgtaggcgatctgaaaagcgtcaatcttgaaagtctggtgcagttgaaaccgcaggtagtttttgtcactaattatgcgccacaggaaatgatcgataaaattacgcaggtgggtatcccggttatcgccatttcactgcagaaagacaacagcagccacgctaaaaataatgtgaatcctgagcttgataatgaagagcaagcctacaatgacgggctgaaagaagggattaccctgattggtgatatcgttaataagccggacaatgcaaaagagctgattaaacaaacctttgacagcaggaatatagtgacccaacgtctgaaagatatccctgagaatcagcgtgtcagggcctatatggcaaatccggatttaaccacttacggctcaggaaaatataccggtttaatgatgcagcacgccggcgcaatgaatgtcgccgctgcgaccattaaagggtataaacaggtttctctcgagcaggttatcagctggaacccggaagttatttttattcaggatcgctacccgggcgttgttgacgaaattaataacgacccccgctggcaggttattgatgcagtgaaaaataaacgtgtctatttaatgccggaatatgccaaagcctggggatatccgatgccggaagcgatggcaatcggtgagttatggatggcggctaaattgtatccgcagaaatttgccgatattgacgtggatgctgatgttaataactggtatcagaaattctatcgcactcaatatcagggcagtcattaa

SEQ ID NO: 280843 - DNA, 849 bp, Morganella morganii
atgattgcaattaccggtgcgacaggcctcctgggtcagcatgttattgaaaatctgctgcaaacagtcccggcaggccagattgtggcgattgtccgtaatccggcaaaaggtgcatccctgagccggaaaggaatttctgtacgtcaggctgattacaatgatgaagcatcattaatcagggccttacagggggttgagaaattgcttttgatttcttccagtgaaatcggacagcgtgtcacgcaacatcgtaatgtgattaatgcggcaaaatcagctaatgtgaaattcattgcttacaccagtttgttacatgccgacacctctccgctgggtttacatactgagcatgtggaaacagaaaaaatgctggctgattccggtatccggtatgcccttctgcgcaatggctggtatacggaaaactatctggccagtgtacctgctgcacttgagcatggtgtctttattggtgcggccggagaaggcaaaatcgctttcgctgccagagctgattatgcggcggctgccgcctgtgttatcagtgaagacgggcatgcgggtaaggtgtatgagcttgccggagatgaggcccggacattaagccacctggcgaaagaactgactgaacagagcggaaagaatgttgtgtatcagaatttaagtcaggctgattttgttgccgcactgaaaaatgcgggcttgcctgatgagttgtctgaaatgcttgctgactctgatgttggtgcgtccgtaggaggattattcgatgatagtcatactctgagtaaactgattggacgaccaacaacaacacttgctgagagcatcaaagatattctgtaa

SEQ ID NO: 280844 - DNA, 1002 bp, Morganella morganii
atgccaaactggtgctcgaaccgacttgacatcaccttacacaacgcggcggatatgccggctcttaaacactggatatatgcggatgatgggatacccgcctggcagacggcgatagcacaaagtctgcatttgttgctggccggctgcgcggggatactgaaaccggtcagaccgctgtcttttccgccgttaccggaactgacttcatacggtgcaaccgggcctgtttccccgggaaacacggctttcacgcactgggttgacctgctgatgactgcaccggatttgacaccgtcatgttgtcagcaaatccatcagtggtatcagatgtggttatctgaaggcggggcgtaccattcctgggactcgctgacggcgacgcagaaagcgagactgtccccgttgttatcgggaagcagttttgactggcttaaccggtttaccggagaggatgagagccgggtggcgacagcctgggaggatattcagtaccttcgcagtaccggagaagccataccgatggatatgcggactctgttaccgaccagccttgcggctgaattacacggttttaacggctgtttatggaaaacaccggaggtcatctggcggcaggcgcgctggcaggcgtttgcccccggtaacagtacatatcacctttatcagtgccgttatggtgtgaaatggtcgaacggcagtggttttcactgtattgatggcgggtatgcgacggagttatccgcagagtttgatactccgtgggggccgccgtcagcagcggttttgtgtgctctgtctgcgcgtttccgctgtcaggtccgtcatgtctatgccgaagaaggctgtggtttctgcggatacagcgagtatgaccatggccggttaaccgaccatgaatctgatgagattgagttcagtgatgaagagaatgaggacggtttccaggatgtgacgggaccggactatattcttgattcattgccacattacggagggtga

SEQ ID NO: 280845 - DNA, 423 bp, Morganella morganii
atgatttatggcattacccgcggactgttctttgtggccgatcacgtctgtcgctattcccggagttgggaatggctgatgtggctggttgaggaagcccggacactgcgaaatgttgaggctgatttgaaactggctgaaaggtatgccggtgagcaaaaccgccctcattccatttcgctgatgaagtgtacgctttatgatgccggatttgcttacggcagattattactgtggcgtgcggatggtctgatgagaccctggtcggcatgtctgcttcgccgtttacctgatatcggtcagcggattgatgcagtgatctggcagaaaggctgtgaagccggcttggatgagaccgtcagtgaatggatggcaatggagatggctgatgaataccttgtcggtatcgaactgagcgactga

SEQ ID NO: 280846 - DNA, 195 bp, Morganella morganii
atgacagaactccgttcgtccttgaaattgacggagggtgataacagaatagcgttatcatcaggattatttttacgcaacgcttcatataacctgcccgctgacgggaaaatcacccgtcatcagggaatttctccgttttttcaggagaaattcaatgaaggtatctacatttccggaatcgtctttttttga

SEQ ID NO: 280847 - DNA, 945 bp, Morganella morganii
atgagaagtggcaaaaaaagcattcttacgcctatcagcccaattataatcactgataacaagtcgtattgggctacgcatttttatagtattttaaaatgtatacatagccataaaaacttaatgtactctccaagaagatttcaagatttccctgtttggtcattgagcttgcttagggggaatctcccacctaatttttttgatcaaatcgaaacctacattaggaactggggtgtacagtatttctttgctagcctatttaatcaaaaaatcggaggtcatataataattgagttaattgaaaggttagaaagattatatgcaatttgttttaacaaagatttagatttgttttcattttatgtttcaggaaatgattctagtttaagttataaattatcagaacgatttactgagatttttccatttagagatatgaaaggttctatatctgatttgatcggctattcagatctatgccttgttttagacaacacttttactggttcttctgttggaatttttggcgaagtggaagggacttacggtaacaaacttagaacagaaagctactggggaaaaaaacaagaattttgtgtttttagtgttggcgttgttgatggtaatcaaaagctaatttattttgaggaatctaaccacaaaggcataccaagagttcaccttatgtttgaaaaatcgcattttttcattagcgattttttagaagttctaaactgttttaaattcttatttttatatgggcctaccacaaattaccgttgcccagatgatgaatttggttttttcctaactgagataaaaaaaatgtggtctatccccatagatcaattgtttgcttttttggaaaaatttatagatggtggcgatttagtgggttataacgatggggctatatcaattatcacagacctccagtcatag

SEQ ID NO: 280848 - DNA, 1578 bp, Morganella morganii
atgatttacaccgacggcaccatagccattaatgccggttcaccgattgtgaccggcaccggtacgcagtggaaaaagaacattcacggtgtggcccccggccagcttatcagcatcgagaacggcactgcaccggtcagtatgataatccgcgcggtaaacagtgataccgaactggtgttgtcattcaattccccggtaacactcagcggcgcgaaatactctatcgccaccacggtaccggacacaatttcagatgcagcccgcaccatgtcagccaatcagggctatatcgtttactttctccaggccatgcagcagtggatgacagataccggtcaggtgaaaattgagctgccgaacggccaaaaagtgacgttggaggatgtaaaagggctggcttcgcgggaatgggtcaatggtatgttatcaaataaccccggcaatcaaaccacagtggttaaagctgtatctgattcgtatctgtgggtcagcggtggaggtcaattcggatatacatataaaaaacaaaacccgtttgttgttaatgcatccggcagctatgcgtctttgaacggaacgggagagtataccggcttcagactgacaaaatcagatggtcgttatgtgttattggagacaaatcctcatgcgggtacagcatcaatgcttagcattgcgtatcggcaagctaacggcgaaaaccagcacgttattactgtgccgtatgattccggtgtgctggccactcaggtgtatgtgaaatacagtacagggtttggtatcggttctgaggcgggtggtaaaggaattacagattttaatagtttcgtcacgccaaccggtcagtactggtacggaaattcctcctcaaatattccccggactgttgtgggatttggtaccgcactggttacacggtattccaataatatttcgcatcatctgattattccgaactatggcggagggagttatctcgctatcagacgtaacaatggcggggcgatagaggatgtcgttgccctgacatccaatatgtatatcgtagacggcagcggatattataaaaaatcgtcgccaatcgtccagatttaccctgatggccattatgaaaccaacgacgaatccgaaggcgcggaagtccgccgtaccggcaccggccaatatcatattaccggcattcttggttataactcagatggcgcatggggtgtaaacggcggtatttcggtaccgaaagataataacggccttgagctggtttatgtcgatgatagggtgcagagtgacggcagtctgattattgaaacctgtcaccgtcagcatacgcatttgccggaacgtttccagaactggcgactgaaagaggtcacgccggaaggtgagcgcatcttctatcaggacggtgaaccatgtgatctgccggaatccacccgcctcgatgttcgtgtcgaaatgccgcagggctctgtgtggaatgtgaagcagcgtgaactggctgaacagatggagcgggaacgggcagagcgtgaagcgcaggaagcagcagagcaggccggagacacagaggaataa

SEQ ID NO: 280849 - DNA, 687 bp, Morganella morganii
atgaaacacggttttatatgttttggtgacaccggccggatgcaaattgacggcactaatacagcgttagggttaatcagaaagcagtcgtttcattgtccgaaagtgcaggatgccggacagggaaccattaaagaggtttatttcccgaccagagttcatccgaacacacaaatgatcgcagccagagcatcattctgggtcagaataggcggtcaggcgtttgacaatacgaataacaatgcttttgtctcgatgcctttccgcgacggtcccggcggaaatatagaaatctgggagtttggcaacgctcctgttaaggtgcgtaatcaaagaacgggaatagttgtgataaacccggtaaccaatcaggtagtatataatactaactggggcgttgcaaatatactgcatgttcagcggcttaaactatggcctgatacaatgtggtctatgacaatgcctaataatggtaataactgtgcagttgtatttggcggtggtgctcagaaaagaacaaattatgatgaatatatggaattcgagtcttatttctggcgaatgaacggttctaaactggaagtacgtctgttggttgatacgtattccagaccgcatgcgtcacaatcttttgaatcatgtgatataccgctatatataatgataatagatacaacggagatataa

SEQ ID NO: 280850 - DNA, 321 bp, Morganella morganii
atggctcacgggattattgtatatgatgagcgcggtaataaaatattagattccggtaaaagactcggtcgattcgtcggttggcatgatattaatcctgcaccggtcggtcagtttaaatacagctgggatcacaggaatctgctcccgatgggggagatttttgtctgggttaatccgagcttttggtttaatcacaatggctggtgtgattgccgggttgaaaatggcgttattatttttgagggtaatttaaggcgaaacgacgaacagagagccagggaaacttatatgcgtatattatatggtgtaaaatcatga

SEQ ID NO: 280851 - DNA, 477 bp, Morganella morganii
atgaataaccgattatttaaaaaagtcatggccgcttgtgccgccggggcgattgccggagcgctggtgctgatccccgcgtatgagggcgtgagatacgagccatatcaggatgtcgccggagtctggacaatttgctacgggcatacaggtagcgatattcagctcggtaagttgtatacggatgctgaatgtaaagcgctactgcatgacgacctgacaaaagtccggcgtacggttgacccgatgataaaagtgccgattgacgacaacacccgggcggcgatctattcatttgcatataacgttggagccggtgcgttctcgcgttcgacgatgctgcggaaactcaatgccggtgatatcgccggtgcctgtgacgaaatgaagcgctggacatttgccggcggtaagcagtggcagggtctgattaaccggcgcgaaacggagaaagcggtatgccacggaaccctttaa

SEQ ID NO: 280852 - DNA, 288 bp, Morganella morganii; identical to SEQ ID NO: 279724

SEQ ID NO: 280853 - DNA, 570 bp, Morganella morganii
atgaaaaaattaacagtatccataggcagtctgggtagcgcggctgccggtgattatgtgagctttaatatctggcagggcaaacgactactggtcagtgacaagattgcaggtaaacattccggtacattccatcgtgagtatgatgtggattatacccagggtgagccactgcgcatcgaaagcaacgcaccggctggctgttctgtcggggtgaatgtgaccccatctgatgatgtagtggctgacactgacgcttcagctgtatttaacggtgtgctgagaattaaggataaccagattttcatacgtgaaacattcatcgatacagcatggcttaatggcgtgacacctaactttactttcgtggctcatagtattacccctgactctgatacagttacagcatatgttgatgttaaagattccatgttaccgctgatgagtatattttccctgcaggtaacgatggaacgaaacgacgaactgtcactgggacagtatgaatcggcggctatccggcaagctaaggccttgattattgctatcgcaaaagaggctgccttgtga

SEQ ID NO: 280854 - DNA, 969 bp, Morganella morganii
atgtttaatccgggtgcggagatcggcaatttcctgaatggcgcccgttatgttgtgagtgcagctccccgttcaatggatggcattccgtccggtcgcgttccggcagatgcgcagccgctgctgacagatgagcgggtgctttgtttcctggataatcccgccgtgataaaagcggccggcggactatccggatcccgtcactacgttaaatcagttggctactgccagattaacgatccggaaaacccctggcaccaccacgaactgaccatgacccgccacaaagatggttttatccggacatgctggcaccatgacaacatcttgcgggcgggtgatgtccaccagcagcaggcggacgaaattctgttacacaaccaacgggcgtttgtggcacgcagcatctttaccgatctgcggctgccggccggtcatcttcttaatccttccgatttgttcacctggtcggtgatgcgtcgcgtcagtgatcatcttccggcctttatcagctcatacatcctgatgcagaaaccggaggaagagataaccggcaccatgacagagcattccattgtccatcaaccgcgctcacacagccggattgttcaggacatcgtggagcagataaaaccggtcgttgttcctgagatagagccggagccgccagcaagttttatgcggatcccgaagttaaagcgctgggagtgtctgaaatacctgcagtgggtcaaaagccagccgtgttgtgtgtgcggccagcaggcggacgacccgcatcacatcatcggtcacggtaccggcggcacaggtacaaaagcacacgacatttttactatcccgctgtgccgggttcaccacgacgagttacaccgggatccggcagcatgggaagaaaagcacggcagtcagctggagttgttatttaagtttatgaaccggtcatacgggatcggtgtttttggttaa

SEQ ID NO: 280855 - DNA, 537 bp, Morganella morganii; identical to SEQ ID NO: 279719

SEQ ID NO: 280856 - DNA, 885 bp, Morganella morganii
atgagtatgattttaactgcgcgggctttgcagataaaaaccggcaacgcgctgcgcaaactggtgctggtaaagctggcggataacgccaacgaccagggcgaatcgtggccgtctgtgccgtacatcgctgagcagtgcgaaatgtcagagcgctcagtacagaaccacattaacgctctggtggaaatggggctggttcgtatcgaatcccgtaaatcggccaacggtctgaaccagtcaaatatctatcatctgcgcctgaatgctgccgttgtgagtggtgaatctcctgcaccatatggtgcaaatcctgcgggggtgagtggtgcaaatggttccgggactggtgcagcagattcaccaggtggtgcaactggttccgatagtggtgcaggagctgcacccagaatcagtaatgatccagtcatagatccagataataaaaatattaatcctgttcgcggaaaagccaaaagcaaaaccgtgatgccggaaaactttgctccgacaccagaacacactgaacgggcaaaaactgccggactggatgttcaggatgagtttggcaaattcagggactaccacgccagcaagggcacccaatacgctgactggaacgctgggtttaattactggctgagacaggctgaaggatttaaacgcgctgcggactcaaagaacatcgataccactgagtgcgatgaagtcttccggaaaatgttctcatcatccgactggaagccagaaaaccgcgtgcaggaactggttgccaagcataaatctcatattggccggatgaatgaaattgccggacgcgcagcatttcgcgggtattggaaacaagccacagagcaggtcgcaaaagaacgggaggcagcatga

SEQ ID NO: 280857 - DNA, 189 bp, Morganella morganii
atgaaagaaacagctgacaatctggatcggtattacaccgaccaccgcgggcggaaagttcacgttgtccggtttgaccggcaaaacagccgggtgattttcatgcgtgagggctatgagtatccgtgttttgaacctctgaaaacctttcaggagcggtatacacgtgtggatgaggtgaaaccatga

SEQ ID NO: 280858 - DNA, 195 bp, Morganella morganii
atgcaaaccgaaccaatcatcaccactaacaacatgtcagtagacgatgttgccgcgtggatcaccgaaaagcccaggcatttcacaaactgcaatcactccgtacagaacgcgaaagagcaatccgcgatcacgaacgtgctctggaccgctttgatgaagacattgccaagtgggaagaccgctgtgctttaa

SEQ ID NO: 280859 - DNA, 726 bp, Morganella morganii; identical to SEQ ID NO: 279656

SEQ ID NO: 280860 - DNA, 495 bp, Morganella morganii
atggatataaaacaatattaccttgaggttgcggaaggtaaaggtaagaggatgacgtcggaggttgtggcattctctccctcgcggctcaacctggcagagttagaagagcgtctggcatcacaaacctttttcacacagggtgatattgaatacgcggaacatgatgagaacagcttttattacacctgtcattacggcgatgaagaactgctgtttctggtgtcactggcaccgcgggcaccggaactggaaatcaatccttactattcaactgatccgctgtctgccggactgctggccgaagtcaaccagaccgggcaggacatttatgttgaatgccttttacagaatgacgtgctgcgaagttaccggtaccagctgaagatggtacagattctggtgccggatttattgctgggtatcgatatctcggcagccgggcgcggttttacccgtgagtggctcaattttcagctggaaaacgacgtgtag

SEQ ID NO: 280861 - DNA, 2511 bp, Morganella morganii
gtgaaaacacaacactgcctgccgattctgattattgccggattatggagctatccccgcgaaggtttcacggaagaatttgataccaccctgctggccggtgaatccgctaaaggggatatttcacgtttatatcaggaaaatacactgccgtccggcgatcagctgatggacgtttatgtcaataacacctggaaaggtcagtttaccgttgaagtaggggagcataataatgccctgaattttcagccggaggatattaataagctcgggctgaatctttctgataatgcgaaaaaattatccgcagagaaacagccggttccggtaaatgaactgacatccggactgacttatcacctgaataaaagtacattacggttagatttgtccgtgccgcaaatcggggtaaagaccgctgatgccggatatatcgacccggaattatgggatcacgggcagcccgctgttattctcggctataacgtcaattactataacgccagacaaaaaaagaataacaaacagagcaatgacagcttttttgccacggtaaactccgggctgaacctcggtgtctggcaattccgcgatgaatcggtttacacctcttattccggcggacataaaggctggaaaaataacagccgttatctttaccgtccgatcagccgtattttatctgcgctgacgctgggggatttttatacgccgccttctatgttcggcagctttaaattcagaggcgcatcactgggaacggatatgaatatgctgccgccgtccggccagggattcgcaccaatcatccggggtgttgctcagaccaacgccctcgtcagtatttaccagaacggcaatcttatttttcaggaaaacgtaccgccgggtgagtttatgttccgtgatattcagccgaccggcggcagcggcgatttttccgtcattattcaggaagcagacggacggaaagaatcatttaccgtccccttctccgctgtacccgatatgctgaaagagggaatttataattacagtctgaccgccggtcaggcacgcctggataatacacactaccgcccggagtttgtgcagggggaattccgttacgggctgaataataccgtgacactgtataccggcgggattgccggaaaagattaccgctctcttttggcgggcagtgcctggaatctgccgttcggtgcgctttctgttgatgtgacacaggcggatgcggactttaaaaccggccacaaaagcggccagagctaccgtatcgcctacagtaagtttgtcagcaccacctccaccaacctgactctcgcgacataccgctactccaccgggaatttttacagtttcaccgatgccatctatcagcaggataactaccgggcgtgggatgcttaccgtaatgagcaggaaaacctcaccgataacacgccacgtcagataccggatctgatgacaatggatgccatgcgcggtgctcgcgctaaaaataccttcaccgtgaatttaaatcagtatctgggagagaaccggggggtgatttatatctccggcacacaccgggattactggaattccggcggcagcaaccgggaatatcagcttggatattcaaacagttataacgagatcagctataccgtgtctgcatcacgcacccgcaattttgatgataaaaatgaaacccggttttacctgaatgtcagcgtgccgatttctgttttcggtaaaagtgcatcactcagcagcggtatttacgccaccgattcccgttatcagcaggctactgtcagcctgagcggcacagccggtaaagatgatttggttaactacacgctgaccggctcaaaccagaacggcggcagtaatcttgcaggcgcgaaccttacttaccgtaacccgtacagcaccctgtccggctcattcagtgagggtaacgattaccgtcaggcgggcgccggggcaaaaggaactatcgtcgcgatcccgggccacatcgccatgtccggtgacaccggcaatacctataccattattgatgccccgcaggccggtaaccggatggtgaattcggataaagcatccctgacaaacagtgatggtgtggtgctgatgacacaatctgttccttaccgcgccaattcttacactctgtcagacacagaaaaaagttccggtgccgaagtgaccggtaatatcggccaggtcagcccgtataaaggtgcggtcagttatatccgcatggaaaccgatccccgtcagactttcattctgcgggcggcgcgggaaaacggcagcacactgccgttcggcacagaagtgactgatgagcagcatcagccgctgggatatgtcgggcagtcagggctgctctatctgaaaagcgggcagttgccgtcatcactgatcataaaactgacggcagacgggaaacagcagtgtgttatccgcaatccggtggtcacaccggataaaaatcacaatatctgccggtaa

SEQ ID NO: 280862 - DNA, 1122 bp, Morganella morganii
ttgaaaaaacacccagaggacgcccctttccggcagtcacccgaggataattgcagattcacttttatcgatctttttgccggcatcggcgggatccgcctgccctttcagcaacagggcggtcgttgtgtgtttacctctgagtgggataaattcgcccagcgcacctattttgccaatttcggtgagatgcctgacggcgacatcaccaggatcgcggcaaaagatattccggatcacgatattcttctcggcggttttccgtgccaggcattttcacaggcgggggcgcgtcaggggtttaacgacacccgtggtaccatgttcttcgaagtccagcgcatcatgacagaaaaacggccgaaggcatttctgctggagaacgtcaaacagctacgcggccacgacggcggccggacattacagactatcctcgatattctgcgcggacagtatgaacaggctgtgccggataatattccgctgagtgaagagacccgcagcgcgttgtcgcaaaaattgaactattgggttgatttccgcgtgctgcgtgctgccgattttggtattccgcagaaccgcgagcgtatttttattatcggttttgaccgcgaccagtttccggatgcggactttgacaccttattttcctggccggaaccgactcatcagcctacctgtctcggtgatattctccagagcaaaaaagcgctggcggaagatgcggtgcgctataaaaaagatcgttttaccatctccgataaattatgggccggccatcagaaacgcaaaagagaacataaagccagaggtaacggcttcggatattgcctgtttaataaaaacagcgaatataccaataccctgagcgcccgctattataaagacggttctgagatcctgattgaccagtcgcgggacggtaaaaacccgcgcaaactcaccccgcgtgaatgtgcgaacctccagggatttccggaaaactatattaccgatgctgtttcccaggggcagatttataaacagttcggcaactccgtctgtatgaccgtcgtcgaagccatagctgaacaactcacggcggcattagtccgggccggtgcaataccgccggtaaaataa

SEQ ID NO: 280863 - DNA, 459 bp, Morganella morganii; identical to SEQ ID NO: 279240

SEQ ID NO: 280864 - DNA, 387 bp, Morganella morganii
gtgaagaaaatttttattacaggcttggttcttgcgactgttgttcttggtggctgtgcttctgctggtaatcattcaattaaaaatgaatcacaggaatcagtgcaatcaaaacttgtaaaaggaaaaactacaaaagatgaagtgcgtcaattattcggcgctcctggaatgacaactttcaatgctgaacaaagtgagcagtggatttacacgctggcaaatacacaggttaaaggaacgtcattcattcctttttatggtttgtttgatggcggcgctgatacgcaaacaaaacagctcattgttatattcaagaatggtgtagttgatacgtattcattatcagattcggttatggaaacaaaaaccggattattgaattaa

SEQ ID NO: 280865 - DNA, 783 bp, Morganella morganii
atgagtcaaattacattagcaaacaataatgcagttgtcacgcaaagtcgctttacggttcctgaagtctactaccgtgatcagaaggtaatcactactgaatcactggcggtggggtacggagcggaagtaaaaaatattcaaaataactttatcagaaatgacggtcgctttgtcgagggtaagcattactttattgtgcagggtgatgaattaaaagagttaaagaacttaccatctttaagagggttagttgataaacgaacacctaaattaacactctggactgagcgcggagcatcacgacacgccaagatgctagaaaccgatcaggcatgggactacttcgagttactggaagaaacctactttaattcccgcagaaagaacgcagatctgataagtaaaaaagacctggccttgatggtgattcaggcggaggaagaaaaagaaattgcatacgcccagcgtgaccaggcgatagaaacaaaagcgtggattagccgccgccgtgaagctacagcaatggctacggcatcggcagctgtgcgtgaaaagaatgttctcgccgcgaaacttggtgcctgcaaaaaacacgctacggttttggcggttgagaatatgaccgaaacaaaattcaaatggcatccgctcaagaaatggtgcgccgacaatggagcagaggttttatctgtccctgatgagcgctacgggaaagcgaattcctatccggctgcggcatggaaagcggttcataatgtgaatattgcaaaattattctaa

SEQ ID NO: 280866 - DNA, 732 bp, Morganella morganii
atgaacagtgtagcgaaaacagacttaactttccagaacttcacgtttaacccggtttctgaaaatggtcaggtgtggctgacttctactgagatagcgaaagtgctcggctacagcagaacggatgccatcagcaagatttattcacgtaatcaggatgaattttcaagcaccatgtcaatgaccgtcaatatgacgttcaacgggattaacaacagcttacgtaacaaatcggtcagagtttactcactgcgcggcgcacacctaatagccatgttcgcatcaacgccggtcgccaaacaattccgtaagtgggtactggatattctggatcgtgaaattgaactcggtaatcattcgccagcgtttcactatcactacccgattgagtccgctgatgtgcatgaccgtaaattccagaactcctggttaacagcgcgccggttgctcgatgaaagaaacccagcgccagatctggcgttactcgaccagttagaagctgatggttttgatgtaacaggtgcaaaggctcgtatttatgcactgtacaacgtagctgaaaccaccgtcagcatggaggatgtttttgcagagtcagggaaaatgctgcaaagactcaaggataattttaaatggggagccaaaacagggggattgaacgtaacttttgaaggaaacgaaaaaggattggtatatggcggatttaaaaagaggcatatcggatgccactaa

SEQ ID NO: 280867 - DNA, 171 bp, Morganella morganii
atgaacaaagaagagaagcgccaaaaattgcttcgcacgccggagagccttgtcttaaaaattaagaaagccgctgcacggagcaagcgtagcgagaaccaagaaatgttaatgcgtctggagatgtcgtttgacgaacgcgtagagaaggtgatgagagaatgcctataa

SEQ ID NO: 280868 - DNA, 339 bp, Morganella morganii
atggcaaaaaaagacgttcagttgaacattcgcatgacacaagagttaaagaatcgcattgaaaaatcagcaaaaaaaaataatagaaccataaatgctgaggcgattactctcattgaattcggccttgataataagttgcctggatttaataatcgcgttcagagtgcggctgttgagattagcgaacaagttaacctatcacccaacgagatagaaaaattaatccacgaaacattagggcaagaaatatcaaaggccctatcgatctctttagatgaggttctctctaacgccaaattagcactcgtgcgcgaaattgaaaaacatagagaataa

SEQ ID NO: 280869 - DNA, 423 bp, Morganella morganii
atgaaagtctgtttaattattttgtttattaattttgctttttgttttccgttaatggcgaagacgttatttttaggtgattcattaacggctgtttatgaaatgtcagcaaaatatgttttggatgaaaaaataaaaacagaatatgtttccggttcggggttaataaataaaagtaaaaaagattggatcgctttcgtgaataatttcgatttgcgggagtttgataatgtgattattagtctcggaacaaatgattttgttcaatatggttcggatgaatggctgaaatattacagtctggtatttcaattcattgctgaaattcaaagtgaaaatccgttagcgacaattgtctggatatctccaccacatttaaaaaatccggaacatgaacgttatttaatacatacccggcactga

SEQ ID NO: 280870 - DNA, 1899 bp, Morganella morganii
atgactgattatttatcattacctcaaaaaaatattgttaatgctcctatggggactgcaatacaagtactggcttcagctggttctggtaagacaagggttttaactgaaagaatcaggtatatacttgataattcagaacgagggagtgttattgccctcacatttacaaataaagctgctgatgaaatgcttgaaagattagatgatggcagcgaaaatcgcgagcgtatttggattgcaacaatacattctgttgcacaaagagtacttgatagttacggatatactataggtttacctaaagaattacatatattcgagcgtgagcaagatagaatggaggtatttcttcattctctgaaagaacaagggatagatattgatagttatttaaatattgaagatgctaaagaaaaacgtaatcgtgaaaagttattaagtcaatatcttaatgttttttctgaaattaaaagggagtttttaactgaagatgaagtaagggaaaaatataaatcgaatccccgaatttggaatatctatcaagattatcagtcagcactattggaaagtggaggtgttgattttgatgatatcctattgtattcgcataagattcttttaaatcaagagtctgtgtccaggatatatcaaaaaaaatatattgctttatttgttgatgaagctcaggacttgaatcgagctcaatatgaatttataaaggttctttgtggtgagaaaataaaaaacatcatgatggttggtgatagtaatcaaatgatttatggttttaatggttcatcatctgattattttattaaatcatttggtaatgatttttctcctgtgatttatcgcttgaaggaaaattataggtcttctcgtgctgtgatagaattagctaataaaattaagccgaatagtcaggttagtattaatgctgccattgatggatttaaaacttttaaggtattggaggatgagcaatcagaagcagtttgggtctgtgatacggttgaaaacttacttaaattaaaaaaacatcctgaaattgaaggtgatattgattgttcgaaaatggttattattggtcgtaatagatttgtttttaaatctattgaggatgaaatgaaactaagaggtattaaatacttcttaaagcgtagtgataggaatgagcaaccagtgtctttcattggtaaattaattgacttggctataaaaattaaaataaattcaaaagactgggttgatggaaggagattgtataaattaattggtatagagcaatttactaaaataaataatgattacaaaattagtgaaatcataaaagaagtaaataattcaaatgtggatgataagagcttaataagtttaattttggattatgtggaaaatctttcttttgaatctcctaatttattgaagttttgttcagagcttaagtctaatttaataaatttgggggcagcagtaaatgactcttctaaagaagatgatattgctcttggaattagagatatagaacaacttcaatctatgtgggggcgttttaaacgtaaaggacttggagataatctgtcctcatttagaaatgcattggctttagggcaacttaataacgatgctttgggtaaaggaatcatgttaagtacagttcacacaatgaaaggccttgaaaaagatattgtttttcttgttggaatgtgtgaaggcgttttcccggactaccgggctaaaagtaatattgatttggaagaagaaagaaataatgtatttgtggctattacacgctctcggcggtggatttacattagttatccagaaaaaaggatgatgccttggggggattataaataccatgcagcatcaagattttatcttgatatgcaataa

SEQ ID NO: 280871 - DNA, 1776 bp, Morganella morganii
atgtcaattcttattaattgtgtaagaatttcgggttttagaggtatcagtgaggttgaggttgagctagggcgagtagcgattttgctgggaacgaataatgccggaaagacctcttttcttaagtctcttcaattagctctgggtgattatcagcgttacttcagtgatgaagattttcacatagatagtactggtagaaaagtcgatgaagttattgtagatttgatgattatacctacaaacagcatgtatattagagctgatgaatttgatgataaatgggttgatgtatttggtgataatattgccttagatgctaatggtaaagactttgttgctattcggacaaaagtacagcctgatgaaataaaaggtgggtttaatactcaaaggtattatctgaatgaatggactgaatttgatatatggaaaaatgtaactcctagcgagaggaaaaaagtaagatcaaaaattgatgctatcccttatatttgtattgaagctcaacgagatatccataatgagcttaaagataagtcatcatatataggtaaagtcttatcatatattaaatatgaggatgatgacgtcgctactcttgaagaaatgatcaattccataaatgaaacagcagtaagtaaaagtgaacctctccaaagtttaaaagattcacttcagggattaaatgagtcttttcttggggcaagctatactgaaataacgccatttcctaaaaaaataagagatttatctaagcaattttcagttcactttggtgatgaagaaaatcattcattttcaatggaatatcatggtactggaacaagaagttgggcttcaatgcttacagtccaatcatttttaggattcatgcatgagcgtcatgataatgaaaataaagcgttacatcctataattggagcagaagaacccgaggcacatcttcaccctaatgctcagaggacattattcaagcaactaacatcctctcaaggacagattatattaagtacacattctccatacttaagtgccatggcagaaattgaagatataaagtcatttatcaaaaaaacggatggtgtaacggttagttgccttaaaaaaagaatagagcatgatgaaaagaacgctataaaaagagaaattatgttaactagaggagaactgcttttctcaagagctttgattttatgtgagggagttactgaagaacaattgataccttcaatgtttgagctttattttggaaaaacaatgtttagtgttggagtcaattgtgtcagtgtaaatggtaaaaattaccctccgtttattaagcttgctagtaacttaggaatacctgtatgcattattagtgataatgatggtaatactaaagatgaaataactcgtcaaattaatcgattggaaaaacaggatggactgaatctaaattcttcttgtttctctttaaattttctagaaaacaataatgatattgaagcagaattgtataatgaattgaatattcatgatgaaataattaactcattagttcttagcgaaaccaaggctagcagtaaccaacagtatttagaagcaaaaaggcgtcaactggaagagttgtctgatacggatataattgcaaaaatgcgtgattcaaaggctagctatgcaggatatttggggccgattctggttgaaaatgctaatcgaaaggaatttaaagaactattaccatcatcggttataacagcatttgatatggttaaagggtggcttgaattatga

SEQ ID NO: 280872 - DNA, 414 bp, Morganella morganii
atgagcaatgaaacaaccgtttccagaggggagcattggggaataaaagcagcttataaaacaaaatggctaatcaaaaaattaaaagcattcgataagagttgcgtggcaagagtcaaaagcaaaaatacgccgggttggctggggcatattccactggtatccataactctcgcggtcatcgcgttactagcttatttcagtttgtacatcctatttgcttttggaatactggtaattttgttttctgcggtagaaaacattgggaatagcattccggatattataaatactgaagatactgctgattccttaacaaactcagatgataattatggttctgtatatatgaacggaaatcaaggtgatggatggtatacagatgattcaggaaccattaaattggatgattag

SEQ ID NO: 280873 - DNA, 441 bp, Morganella morganii; identical to SEQ ID NO: 14575

SEQ ID NO: 280874 - DNA, 2226 bp, Morganella morganii
atgaaaacgacgggagttaaagtaacgcttttgtcgctggttgtcagttattcctgcgctttacaggccaaaaacgtgtcactgggggacacggccgtggccacggggcagcacagtacggctgtcggtgagggcagtatggcgctggggaaaaatatgacggcggaacaggcgcaggcggcgatgaaagcccagaatgccctgttgcagaacagggcgcaggcgcatgagcagtacatgcagacgcaggccctgtttgacagtaaatcgctggcgaacagcaatattctggagcgtcaggaagcgatgaaaccgttgttgcagcaacaggagaccctggcgggtcagcgtaccgcgcaacagcagcaggtgacacaggcacagcaggtcgctgaccggatggcacagatttatgaacgcaatctgggggcggtttcacagattgtggatgagaattttgtggcgttgtggcagcaggggcaggctgaccgtctggctcaggaagtgaaaaaacgggttgagcaggatacgtcggtcagtaatgacacgcagttttatgtcagttatgttaatgcctatattgaagcgaaaaccagaagtgctctggttaatgaaaccatcaacgagaaaaccggttctcagattacgaccaactatcagggtgtggccctgtccccggtactgagtgccggccacagtgataaagcgatgctgtggtcggatgcggtcacggacagcgagcagaagaaacaattatcccgtttacacctgaataccgcggccctgaagggcgttgccggttatcaggaagagctggccaaaatcgccctgatcacctctgcggacgggaaaaagaatctgtatcaggcttatcagaaaaatgcccggcagcaaattgagcaggggctcaccggggtgacagaggccgggaagcagatcctgtcagagctgtatctggataacatcgatgaaggcacctttaatcagatggtcagcggtattttcacccgctatgagaatcagctgaactacctgatccagctggataaggtcaacagtttatcgccggacagcccggattatgccaaagagttacagcaactgctggtactggaaagccgtccccgggataacaccgtcgggctgaataccaacccggaggcgctgaaacaaaaagtggatcagtaccttcaggacaatgcgctcagtcacacacaggccatgtcgtcacaggccacacagctgaaacagcagttatcggcggaaaaagccgtcaccgatcaggcactgaagcaggcagaaacgcaactctcccggctggaaaaggatctctccgcgctggatacaaagttgtctgatttgcgtccgacgcaatccgagctggaaaacatccgggatctggagaaggtgaaagccgaactggcgcagaaacaggcggaatatcaggcggcggataaagccctgaatgaggcgcagagtacgttgagtcagggtaaacaggctgttgcggtcggggataagagtctggcgctgggcgaaaaatccgtggcactgggtgtggatgcccgggcgctggcgaaaaacagtgtggcactgggggacggcagcctggctgaccgggataacagcgtgtccgtcggccgtgaaggtcaggaacgttttctgacgcatgtggcggccggcattgcaaaaacggatgcggtcaacaaagggcaactggatgaggagcgggatgcgcgtattgccggcgataagcagacgctgaaacaggccatggactacaccgatgtgagcattcagtacagtgaggcgaagacaaacaagcggattacggaagagcagcaggcccgtattgagggggaggaacagaccctggcggccgcaaaccgctataccgatgagacgttcgggcaggtgacccacacggtgctggacaatgcccggcagtataccgaccagcgtttcagtcagctggacaataaaatcagtcaggtggagaaacgggccaatgcggggattgccggggtgaccacaatatcttccattccgtatgtgaacagtgagcgtttttcgttcgggatggcgatggggcattaccgtgatgcacaggcgatagccaccggggtgcagtataagccgacggccaataccaatgtgcgcctgaatgcgtcatggaataacggcggcgataccagtatcggcgccgggtttgccgtgggctggtag

SEQ ID NO: 280875 - DNA, 267 bp, Morganella morganii
atgtcgcgaccaatcgacttaattgcagatatcacggatgggtatatcgctaagcattttgaaggaacgaactacgggcacactaactatcgggacgttattggtaaaggatgcctgaatgctatggccggatatcacaatggatataccacgcagtgcatactgataaatatggggctgaccacagagaagttacggctgacgaaacgcggtcgtgaatttctgttctggcattttaactatcagccggttaatgggcggaaatag

SEQ ID NO: 280876 - DNA, 369 bp, Morganella morganii
atgatacacgaagcgtttgagcgttatctgaaccgcgtcggcctgctggatgatttcaccgttcagtacctgacatggacggaagaaccggagtcacgcacacagcaatatgctgttattcagcctgacggcggcagcggcagatttgctgaccttggcgcagatgacaatgtaatgctgattctggtgtccgcacagaatgatccggagccggtgttaaccagggcgaaagacattctcagtttcgtatccgagtttccggacgattgcgaactaaactcagtttacaaccttggcggcatgcctaagccggtaccgacagaagagggccggttcatcatgcagatggcttttcgctgcacatcctga

SEQ ID NO: 280877 - DNA, 441 bp, Morganella morganii
atggcggcgaagattaaaggtatcaagcaggtaagcgataacatcaacgcgcttatcggtgacattcagggtaaaaaagctgtaagagctattcaggccgggatgttgattggtggtgctcaggcggcaatatacacccccatcgacacatcaacgctgattaactctcagttccgtgaaatgactgtcagcggcaccaggttaacggggaaggttgggtactctgcaaaatacgccatgtatgttcatagcgcatcagggaaactgaaaggccagccacgcgctgatttcggtgttaccagggcaggggttgcctttggcggcggtacaggaaccggaaaatactgggaccctaatgccaagccaggattcctgaaagcaggctttgaagagtcccgtcagcagattgaggcggcaatggagcgggaaatgaagatatga

SEQ ID NO: 280878 - DNA, 342 bp, Morganella morganii
atgagttcagttgctaattgggcgtatacctcatgggctacgttgtggcggcttgccggaaaggacagatacggtaagcccgaattttcggaaccggtccattttctgtgtggctatggtagcgagcttaagggcggaaagattgatatcggctctgaaatcactatcaaactggtgttctggactgagtacgctgatgcgaagaaaggtgattttatcgctatcggaaggctctcaggtgatccggtatctgctggtgctgacgaaatcaaattcatcaaacgcgatgaggatgtattcgaacacatagcggatgattacaccctgataacggcggtgtga

SEQ ID NO: 280879 - DNA, 372 bp, Morganella morganii
atgcagataactcttgatgacgtaaagccgatgattgcggaactcgggtttacattgcctgattctgtgctgtcgctgttactgagtcaggttaatgcaaagtccgggtgtctcgaagccaactacgacgaaaccacgcagaaactgctgctgatttacaccgctgtccggttggcctcgctgtctggcgcacgaaagatatcatcacagagcgctcctaacggggcgtctcgttctttcgcatatgattctgccggtactgattatctgctgaaccagatccgcgcatgggacagtgccgggtgtctctctgatttgccgttgtcgagcaaaacggttggcttcttcggtgtggtcggggggtatcaatga

SEQ ID NO: 280880 - DNA, 225 bp, Morganella morganii
atggcactggtaaaagtcgtttcaaataacttcttcgccggtgccggtttccagcctgtggaagccggtagccaactgacaatgtcagatgaaagcgcgaaagaatgggaaaaggctggtctggttgagattatcgcatcgggtgatattgaagtagcatcgcctggtaacgacgattctgaacagcctgaacagccaaaggcaaaacctaacggtaaaaaataa

SEQ ID NO: 280881 - DNA, 1077 bp, Morganella morganii
atgttttattattcaaaagcaaaggcgaccgaaaccggcaaccttgaagcaaatatggcgcagtttggcgaactgcagattgcccgtgacgcatcctcacaggctgttgctgagttcattatccgtgccaattcacgcggtaacggcgcaatcagagttgatgccgctaacgcagttgatgatatccgccgcctgtataaagcatatgaccagactgttctgtccgagtttcagccgaataccgagtttaccctgctgaatgacctgatggggctttcccgctccgttcgtctggaagaatccgtgtatgagtatgctcgtaaaggcagcggcggtgtggctcatacgtcaatgtccggtcagatcggtgcgttgctggatgccggtgcattcacctttgacggcactatggtgccgattcacgataccggctttaagttcggcttccgtgacccgatcttcgcgaaaggttccgcactggcctctctgtccgatgcgcagtctgattccgtcgatactgtccgccgcaagtatgttgattttatctggaacgggttccgtgattccgaaggtaatttcatcaagtttgacggcaagtcatggaaaggccttcgtgctgatgagcgcgtagcacaagtgacactgacggtaaactttaccactgagcaggacggcaaaaaaatccgcgcagaaatcatcaaactgcgtgacgtactgaaactgcaaaacctgcaatacggtgagcaaacctggtatgtgtcaggtgaaatcctgtcaaattgggaaagcgtgtatttcgacgttaaccagacccgcaccatcctggacgaagtgaagaaaatcaccggcatcaaagacatcaaagaagattacgagctgaaaggcaatgaaatgctgatcgttccgctgggtgctggtgttatcgctccgattgtcggtcaggcgttcggtaccgtcgcagacccgcgccagttctataactctgattacgtatggcgcacatggggcgctgctggtctgatggttaagcaggatatcagcggccatttctcagttgttcacgcgaaaggtaattaa

SEQ ID NO: 280882 - DNA, 438 bp, Morganella morganii
atggcgaacaaaacaaaacgtgtgattcatgctggcggtatctttcctaacccgctgttaaatcgtgaaggcgaggcgttagcagacattaagcccggcacggtaggctttttcgatggcggcaagttcaaagcctcagtagatggtaaagagtcggcgatcctgtacgtggcaaacatggattatctgcgctgcaaaggtgtagatgacgacctgaaggccggtgattgggtggtgacaatccagccattgcagggattattcctgaacgtccgggctgctgccggtacgtacaaaaaaggccagccggtgattgttgccaacggccagatcacagcggccaccgctgcggaaggtgaagttgtattcgcctatgtcgaagaagattcagcactgaccgctaaggcgggtgagctggttcgcgttgtgttcaagtaa

SEQ ID NO: 280883 - DNA, 1404 bp, Morganella morganii
atgaagctttcgggtattcatgttaaatcgctggctatcaattcctccaatatctcaactgaaatcatcgacggtgacgagcatatcgtcattcgcggcgttgtgcctgttgttgatgacgttgtgatgaacggggggctatatccggccagcgaaattaacagcagttttcagtcgatggaggggaagcagtgcccgtacggacaccctaaaatcgacacagattacgtatcggctgacacgccgagagcagtaaaccagtttcacatcggcgcatgggctgagaatgtccgcaaagatggtgaaagagtcgtcatggacgtgaaggtcaaccgacgtttcgcggatgccacagagaaagggaaagagttccttgcccgtgtggatgacatcattgccggtaacagtacagacccgatccacgtctccaccggattactgctgcagcgcgagcagaacaaaggcaagtcaaagggcaagccgtatacatgggtagcccgaaacatgcactttgaccacatcgctattcttccggcgagtgagcccggcgcggccacacctgatgacggtgtcgggatgttcgttaatgctgacgggcagaaatgcgatatcgaaaatgtcagcctggttgatgcggcgaactgcatgaaagaaggcattttcaacaaaacgaagttcttcttcaccaacggctcaaacttctctttcgaggatatccacaaagcactgcgcgatgccctgagagagcaatcatcaggtgatgactggccttatccggaaacagtctggcctgacaaattcatctactacaaatcaggtaaaacctaccagcaaaaatacctcattgacgataacggcgtagctgaatttgtcggtgagcccattgaagttgtgcgcaagccaacagagtacgaagtaaaaaccaataaggaaaacgacccgatgaaacaactcatcacaaacgcgctgaaggcaaaaggcatcgacacagacggaaaatccgatgctgagctgatggatgcgtacaaccagatgatcgccaatgaatccaacggcgaagaaacgccggaagagaaagcggcgcgtgagaaagcggagaaagaggccaaagacaaggccactaacacagatgacgtcaccgcagcagtgaatgccgcactcaagccgctcactgatgaaatcagcgcacttaaaagccagttaaacgcaaacgctgacaaagaaaaatcagccatgcgtgaagcagttaaggccaaattcggcttcacagaaacagctgtgaatgcgctggacggcgacccgctgaaagagctgtatgcgcagtgcgcaccggttcaggggctgaatggctcgttccattctcagcataactcttccacctcagtatcagaaatgccggagtaa

SEQ ID NO: 280884 - DNA, 756 bp, Morganella morganii
gtgaatgctggtgtttattcgtatgacctcgctgagcggcctgatgagtacgcgcggttccttgaacggctgcaatctattctggatgagtacctgcttgagggtgggaatgaaaatctgtgggcgttcagccatgttgcggcggagtatgatcgcggcacactgaatgcgtataccaatctgtcactacagtcagatgtgtacgcatcacagaccacgctcacttacctgatgtcgcagcctgcataccagaaccagatagccgcagcgtttatctcaacgttcagcgactggaaaggtatttctgatgccgcccgcgccgatctgtcgaacatcataggcacatcgatagccagaggtgttaatccgagagaaacagccagaatcgttagtcagcggctggatgtctcaatgagcaatgcaaagcgcatagctcagacagagcaggtaggcgcgttacgccgtgcaaactggaacgaaaccacatgggcgagtgagcggctcgggctgcgcaccggtctgctgtggttatctgcactgaaaccgacgacacgcagctggcatgctgcacgacacggcaaagtgttcactgtcgaggaggttgagtcgttctacgctgacggcggcaaccggtttaactgctactgcgcgacacagccggtattactgaatgacgacgggacgatttacaacaaaggtattactgaccggctgacagcagagcggaaagcctggtcaacagacaaagattcataa

SEQ ID NO: 280885 - DNA, 408 bp, Morganella morganii
atgcgccggtttttctcccggagtgtactggtactgatatgcaccgtgccgccggtgacagcgggatcactgaattcgttacagatagtgcagagtgcgctgtcgccgtcgtgtatggagtataaaatcaccggcatgtgctactggctgttctgcaccctgtacggctgtacggtgaaaacctttgtaaaggtccggcactatattcccgatgcggtggtatccgcctataaccagaccggccgcaatccgtggtctgaaatggcttttaccggaaccggcattgccggtctggcggagggcggcggggccaatgagcaaaagcgcccggggcataaaaccaatctgcggtttaaaaatgcggatgtgattggtcatccggcactggcctcaccgctgtttaattag

SEQ ID NO: 280886 - DNA, 375 bp, Morganella morganii
gtgattgagcatctggacagagataccgccattgagctggtcagatatatcctgaccaacatgaatgataatgcccgcttttttatcagtacgccattgtggttttatcctcaggacacaatacaggaaggtgatcttgaaaagcaccttatcggtgtgccggtatcctcaatgatggcaatgctgccgcaaatgtattcagtgaataatccccttataggcgggtttatttacggcaaagtcagtcttgattatgcagatatgttcagcccggtcacgaatccggcattttctcaggagcagggacaggctattgcccgcgcgatcaattttgactgcacgccggggaaagtcacccgtctgcagtatgaataa

SEQ ID NO: 280887 - DNA, 255 bp, Morganella morganii
atgggccgccacggctattgcagaagaagccggggctgggaatgggaagtgacgccgggaagttattataaaatgggggcagatatgggaaaacgtaacccgccggcacatatcgtcatcgaactggaaaaaaatggttcgggaacacacatgtatatcacttacagcgcttcgtacagtgataccctgactccggagtttgttcaggaaatatttaaaaccgcgaatgacgttgcagccggaaaaaggaggtag

SEQ ID NO: 280888 - DNA, 873 bp, Morganella morganii; identical to SEQ ID NO: 14470

SEQ ID NO: 280889 - DNA, 270 bp, Morganella morganii
atggcacttactgacgctaagattcgggctgcaaaaccgcaagaaaaaccctataaacttgctgattccggcaacatgtttttacttgttcatcccaacggctcacgttactggcgactccgttaccgctttcagggaaaaaaaacatcggctctgggaatttatcctgaattatccctttctgacgcacgtgataaaagagacagcgcacgtaagcagattgctgagggtatcgacccttgtgaacagaaacggataaagaaagtgtaa

SEQ ID NO: 280890 - DNA, 1587 bp, Morganella morganii
atgatttatacagacggcaccgtagccattaaagccggttcaccgattgtgaccggcaccggtacacagtggaaaaagaacattcacggcgtggccccgggccagcttatcagcatcgagaatggtacagcaccggtcagtatgatgatccgcgcggtaaacagtgatacagaactggtattgtcattcaatgctccggtaacgctcagcggcgcgaaatactctatcgccactacggtaccggacaccatttcagatgcggcacgcactatgtcagcgaaccagggctatatcgtgtattttctacaggcaatgcagcagtggatgacagacaccggccaggtggaaattgagctgccgaacggccagaaggtgacactggaggatgtaaaagggcaggcttcacgggaatgggttaacaatatgctcctgataagcggggagctgacacagattcagtcaccggccaaaacgagagggatttatgttaatgataacggggatatcggcggaaacctcggtcctcatcagaactggaaggtagacgggaatgcaaaagcccatttccgggaattagaagtaaaaagtccgggggattacaccggtattaatctggtaaaaggtgatggccgatatgtactgatagaaaccaatccgcatgccggtagtgtatcgatgctgacgtttgcatacagaaatgcatcaggagaaaaccagcacgttattactataccgtatgactcaggtgcgctggccacgcagacatatgtgaaatacagtacaggttttggtatcggttctgaggcaggtggtaaaggaattacagattttaatagtttcgttacgccaaccggtcagtactggtacggaaattcctcctcaaatattccccggactgttgtgggatttggtaccgcactggttacacggtattccaataatatttcgcatcatctgattattccgaactatggcggagggagttatctcgctatcagacgtaacaatggcggggcgatagaggatgtcgttgccctgacatccaatatgtatatcgtagacggcagcggatattataaaaaatcgtcgccaatcgttcagatttaccctgatggccattacaaaaccaacgacgaatccgaaggcgcagaagtccgccgtaccggcaccggccagtaccacattaccggtatcctgggttataactcagatggtgcatggggcgtaaacggcggtatctcggtaccgaaagacaataacggccttgagctggtttacgttgcagaccgcgtactggaagacggcagtatcatcattgaaacctgtcaccgtcagcatgcgcacttaccggaacgtttccagaactggcggctgaaagaggtcaccacggaaggtgagcgtgttttctggcaggacggcgaaccgtgtgacctgccggaatcaacccgcctcgatgtgcgtgtcgagatgccacagggctcagtctggaatgtgaagcagcgtgaactggccgaacagatggaacgcgagcaggcagagcgtgaggcacaggaagcagcaaagcaggaagagagcgcagaggaataa

SEQ ID NO: 280891 - DNA, 375 bp, Morganella morganii
atgactgaaatagagcaggctcgctttgagaagatagttaatattgttagtaacacactcaacgatttaactggattatttgaagaatttggtattgatggtatgcacgagttaactaacccatcaattgatcagttaaaaaagttggtttcccagatgaacagctatgccagcgcatatgagaaacagcttttaacttccgatgacgaaaatgccattacagcaaggatgttcctgcaaaacgtaaagcaaggactactgtacgcagagtctttgttaattggtgttgaaaaattcaatattgatgcgtgcaataaagcgcatgatgatattagaaacaatagcttagtgacaccagcatggactaactcttaa

SEQ ID NO: 280892 - DNA, 699 bp, Morganella morganii
atgtttattattgaacctatggtacaaatagataatgcgcgagaaaaattcgccaaccggctagcgcaggccgcaaaggaagctggttacagcgaccacggtaaggcgacagaaatagcagagagactaggcttgagccctaaagcgatcagtaagtggtttaatgctgagtccatgcctaggcaggatgctatggaaaatctcgcaaagctgctgcgtgtagatgtggtgtggctgcaacacggaaaagcatcaggccttgactctaatgtttcaggcattcatccatacaaaccatccccaaaatatccagtgataagtcttgttcaggccggcgcctggaatgacgcatgtgaagcctactctcttgatcagatcgatgagtggtatgagtctgatatttacgtccagggtgccgcattttggcttcgcgtagagggagattcgatgacatcacctgtgggtattagcgttcccgaaggatcattggttctcgttgataccggaagggaggccataaatggaagcttggttattgcaaaattaactgaatcgaacgaggcgacatttaagaaactggtgatagatggcgggagcatgatgctgagaggtctaaaccccgcatggcctatcgttccagttaatggaaactgcaagatcattggtgttgttgtgcagatgatgatgcgctttgtctaa

SEQ ID NO: 280893 - DNA, 228 bp, Morganella morganii
atgcagaacatacaagagccaatcaaagccattggcgttgcagaggtagcaaaggcatgcggagtaagcgagcgagccgtttataaatggattgctaacggttttcttccaaaaactgagttttttcaaaaaactaactatgcggaaaaaatcgaagaaatctcaaacggaaaatatcaagcaagcgaattactcaaattaagcaaacagcagcttcttgcaccataa

SEQ ID NO: 280894 - DNA, 327 bp, Morganella morganii
atggaaaatgcaaatccacgcaaatcgtttaaccggtttgtgtcaaatcatctgatggcaacagctcatcaggcactgagaagcaccacacagacagtggttgcaaaactgctcggtgtacacgattcaacagtcttacgcagaacagaaaagttaccggagatatgcgagacattggccgcagccggtatcacagattttgttttgccaggcgagaagaaaatcagcgaggaagagtaccggtttctgtggaagcagatcggcgaactctctctgatgagaacaaaagaaaacgccccggctgttggagcagcagaggcgcattaa

SEQ ID NO: 280895 - DNA, 786 bp, Morganella morganii
atgagttctttatcgctgcattacaagtcaaaagataagaacggtacggagacaacggtcaaaaaaacgtatctggtgccggtttcagagttgtacgtcgaacccggatataacgtccgcgaaatcgatcaggatcatgttgctgagtttcgtgacgcatttgtggcgggggagtatatcccgcctcttgctgttcaggtgacagagcagggcatcaagattatcgacggtcaccaccgctattacggcgcactgatggctatcgaatccggtaccgaaatcccgcgcattgagtgtaaggattttgtcggttcggatgctgaccgtatcgcattcatgatcaccagctcacaggggaaagcattatctccactggaaagagccgcggcatatcagcggctgattaatcagggatgggaaccggcagaggtggcgaagaaagtaaaacgctcactggccgatgttgatcaccaccttcagttactggcgtgtggcgatagcctgattgagatggttcgtactggtgaagtatcagcgacaacagctgttgcattatcccgcgaacacggcactcaggcatcagcagttgccaccgagcagatgagcaaggccaaagcagccggtaagaagaaactgacccgcagtgcggcgttgccgcagttcagcgcagtgaaggccagaaagtttattcaggctgttgctgatgcagggttagagctggacggcgaggcggggttgattatggaagagtaccaggcatttttatctgaaaacaattctgactaa

SEQ ID NO: 280896 - DNA, 171 bp, Morganella morganii
atgaaacaacggtttaattacagcgctgtgcacaaaaacatcatgcgggaacgtgaggcgagagccgtaacggagcagggagcaaaggcactcagggcagcatttgatgatgcgaaattacgccttgaacaccgacaggaactgaccggaggtaaacggcatgaacagtaa

SEQ ID NO: 280897 - DNA, 1089 bp, Morganella morganii
atgaacagtaacgttgcatacgctgactttggagccgcacgacggcaagagaggccaacggtggcagatcttgataacgggtatagcagaatagcgcatgagatactggacgctaccatggcgtcaggattaagcgaaacagaactctgcatcatcatggctgtatggagaaaaacatacggctataacaaaaaaacagactggataagcaatgagcaatttgagtcgatgattatgaagcattccactcattgctcgacggctaaaaatcaacttatcaacaaaaaggttcttatccaggaagggcgcagagtgggcattaataagaacattggtgagtggaaaacaaagaataacggattctgcaaaacattagctaaacctgctaaggaaaccttagcaacatcagctaaagcaactaagcggaaggtgctaaacacaaaagacaataatacaaaagacaagaaagacaataacccccttacccccgagggggaaaatattgctcttgaaattctcgggtactacaacgagctgaccggttcaagatgccaatcaatcgcaccaatcctgaaagcgcttaacactgtcaagtcgaaaggcgagagcttcactgcagacgaaataaaactggttatggaatgggcggtgaagatatggaaaaacggcaagtccgttaagcctgaaaacatctgcaggatgacgcggttcgacggatatctttctgacgcaatgaagtggaaatatcgtgacggaataaaccctgagccatgcccgcatgaagagctgattaaatcctggaaccggcatgttcctgaacgcgccgttgatctgcgtgactggacaaaacaacgcccggcatacagccatctggaagaggtctggaatggaaaaacaaacaaagaccagtggcgggaagtgaaacacgtcgatacctgtttccgtctgatctcacagtcatcgctgtttgccggactgagtgacaagaagtggctgagtatcgattgggtgcttaatcctgcgaagtggctgcaggtgtacgagcaggcgaagcgggaatacaaggaacggcagagcggagttaactaa

SEQ ID NO: 280898 - DNA, 1377 bp, Morganella morganii
atggaaaataaattcacagactacctggcagaaaaatcagttatcggtggggtactgatcgcaaacaatgagacagaagaaatcgccatatctgcaatggagtcactgaccgaagatgattttacgtctgcagcgcacagaatcatattcaaggcgatgcgccgaatgatgagcagcggcgtacgggttgacctgattttgcttagtggggaattagaccagtcgggagaatcaggagttacgggcggatttgcgtacctggccgaatgcgcaaaaaacacgccgagtattacagcgctcccggcgtatgtgcagaaaataaaagatctgacaaatgccagaaaaacactcgcagtccttcatggcggaatatccaaaataacggccgcaggcgttaacaaccttaccgatgttgtcggagaggttcagtcgtctatttcatcgatggacactggttccgttgttgaaactcagcacattatggacggcgtaactgagtcgataaacattctggaatctatgctgaacggtgacatctggaagcataaaacgcagtttggcctgcaggatatcgattcttctttcggcgggttcaacaatacggattttatcgttgttggcggtcgcccaggcatgggtaaaaccatgttcagtacagcaatcacgaaaaccatcgggcttaaacagcgtaagcctgtcgtgttttacagtcttgaaatgccgacctggcagatatcagagcgtatcgcgtttcatcatggccgcgttgataagcagtcattgctgggtgacgacaaagcgaagataaaccaggaagaagcgtgggctaagttatcgaacgcgctgggagatattcaggaatccccgatttatatcaatgaccggccatcaatgagcattcatgagatccgcgcagacgcacggaagatgcacaaaaagaccggcgggctgggtgtgatcatcgtcgactatctgcagaagatgaaaatgaccaatccggagaatatgaatcagtcagtgggagagatagcaactggcctgaaaaacctcgccaaagagcttaagtgccccgtagtggcgcttgcgcagcttaaccgtaatcttgaacagcgcgttaataagcgtcctgtgaatgctgacctgagagaatctggcgttatcgagcaggaggcagatgtcatcttcatgatttaccgtgatgaaaaatacaaccctcaaaccgacctgaaaggtgtaacggaagttatctgcaccaaatcacgccacgcgccaggcgctgaaaaaacgtattacttcacgaatacccacggcggactagaccaggcggatttaacccgcatcaatacatctggttatcaggacgatatcgagtgctaa

SEQ ID NO: 280899 - DNA, 165 bp, Morganella morganii
atgactacagaacaactcgcagaattaaaacgtattgcactggaaaaacaccgtgaagctgaaaaggcaatgtatgcctatgcaaaagagtgtgacggcgttgagcgcgtggaagcgtttgaagcatacgaaaacatcagaacagcaacgcgggttcgcggatag

SEQ ID NO: 280900 - DNA, 264 bp, Morganella morganii
atgaagggcacgacgctgactgatttaaataaggcgtacagcaagcaaggccgctatatcgcagctcgttacatccgggctcaaagccatttttttaaaggtaagacggattcggtattttttgaatgtcattgcgcagcagaaaatcaccagccgagaggacgggcataccagcggataatctcacttgagaacgcggcaaataccaggcgctttgctgaactacagcgcatgataaaggaggccactaatgaaatggattaa

SEQ ID NO: 280901 - DNA, 243 bp, Morganella morganii
atgaaatggattaagacgagtgagcaattgccagaaatggaagtgccggtgttagccggatggtttagcgagtacagaggtaaatttgtctggcactgttttttgcggtcagaccctgatggtgagggctggatatggtctataagcaccgataattttctgagtgatgaaaattggttcgtgcaggatgatgattatccaataacccactggatgccactgccacaaccaccggaggagtga

SEQ ID NO: 280902 - DNA, 447 bp, Morganella morganii; identical to SEQ ID NO: 279328

SEQ ID NO: 280903 - DNA, 624 bp, Morganella morganii
gtggcaaaggcaaaacagccaaagccgaagaaatgtaaagtctgcgacaaagaattccttccctatctatccactaaaaaagtttgttccatcccatgtgccatcaagtttgcagccagtgaagtgcagcgaaaggctgaaaaagaacgcaggcggcaggactccattgagcgcaaggaattacgcgaacggaaagacaaactcaaatccaacggcgatttagcaaaagaagctcaggtagcatttaacagatatatcagggctcgtgaccgtggaaagccttgtatcagctgtggatgcaatttggttgatgcttctggatatctgacaggaagtgctacagacgcaagtcattacaggtcaagaggtgcggcaaaacatctcagattcaatgtttttaatgttcattcatcgtgcaccaggtgtaaccggcagctgagcggaaacgctgtcgagtaccgaatcaggctgatacagaggatcggtatcgaaagggttgaagctatcgagtcagataactcaccacggagattcagcaatgaatatctcaggagggttaagcagatatttgcaaggcgggcccggtggtatgaacgcaggcggaaactgatggaggcggcgtaa

SEQ ID NO: 280904 - DNA, 201 bp, Morganella morganii
atgttcacagacatagcggcagcaatcgaagaagccagatatctcatgaacaccagtggtcaccatcatgctgtggtgcaatccagcgctggcgtgatgttggtaaggcttctttacgggcttggtgtagcggccagaagaaaggtgatgttttcaactgatgttgatggcatgggcgttgttattccggaggtaagatga

SEQ ID NO: 280905 - DNA, 504 bp, Morganella morganii
atgagctatatcggagaaaaggaactcaccaaagagcagcacgactggttgaatcagtggctggagttgtggggggcatgggtatattcaggccggattgatattcgcatgatcaacatgatttataagttcatgcagactgtcgagccggataaaaacccaacaagaccaatgtgcaatgacgatgacggaatgttgatttctcaggtcgtagattcagttatcgccactgacacacaggcttacggaatactgctcagttactatgctcacggctcatccaagctgtcgattgcatcttactatcacggagttgcaaaaccacgcaaaatgcaaacgagaggcggaaataggatcagaaagccatcactcggaacatgcagaaatgaagttgacgaaaaactcaaggctgcgcagtggttactgtatgaaccgcttcgaactgctatgaataatcgcaaacgcgtcgataaaatacgtaaaataactgaattttgctattga

SEQ ID NO: 280906 - DNA, 159 bp, Morganella morganii
atgacgaattcgaaggattctaaatacccgaccagagcagacgctgccaaagcaccgccttatactgagcgtaacaagttatcagacgaagagcaggcggagcgaagccgaaagttcaatgcgactctactttttggtaattggtatttcgagctataa

SEQ ID NO: 280907 - DNA, 651 bp, Morganella morganii
atgggtatgaagaaaataaacgaaatcatcggcgaaaggctgaagtctattcgcgaatcaaaagggttaagccaggcgcagcttgctaagttgtgcgggtattctgctgcctcaagaatcggtaattatgagcttggggaaagaaagataagcgcagacgatgccatgatcatcagtgaggttctgggggtgtctccggctgagttaatgttcggaagtcaagctgaacaggtagtgagaaattactcatacccgcttttcaccaaagttcaggccggatgctttactgaaaacggaaactcatacacagacagggatgctgaagattggattcctacagcgaagaaagccagcaataaggcgttttggctagaggttgaagggcattccatgactgccccgcagggcgggagaccaagcttcccggaaggcatgctgatacttgttgaccctgaagaggatgttgagttcggtgatttctgtgtggctcgcatgctaaacgacgaattcacgtttaagcgactgatcagggatggaggcattgaatatttagagccactgaacccccgttatgagctgattcctatcaatggcaactgccagatagtcgggaaagtagttaagtcacagtggcctgacgacacgttttag

SEQ ID NO: 280908 - DNA, 210 bp, Morganella morganii
atgaacaacattgcagaacagcgaaaaaaattaggaatttctcaagctgttttggcttcatcaatcggatggggtcaatcacggattgctaactatgaattaaacactaggactccgggattgagtgaatgccgtcagatcgtagaggcgctacaaaaacttggcgccaaatgctcgttagatgacgttttcccaccgcaagctgcataa

SEQ ID NO: 280909 - DNA, 327 bp, Morganella morganii
atggaaaatgcaaatccacgcaaatcgtttaaccggtttgtgtcaaatcatctgatggcaacagctcatcaggcactgagaagcaccacacagacagtggttgcaaagctgctcggtgtacacgattcaacagtcttacgcagaacagaaaagttaccggagatatgcgagacattggccgcagccggtatcacggattttgttttgccaggcgagaagaaaatcagcgaggaagagtaccggtttctgtggaagcagatcggcgaactctctctgatgagaacaaaagaaaacgccccggctgttggagcagcagaggcgcattag

SEQ ID NO: 280910 - DNA, 171 bp, Morganella morganii
atgaaacaacggtttaattacagcgctgtgcacaaaaacatcatgcgggaacgtgaggcgagagccgtaacggagcagggagcaaaggcactcagggcagcatttgatgatgcgaaattacgccttgaacaccgacaggaaatcaccggaggtaaacggcatgaacagtaa

SEQ ID NO: 280911 - DNA, 837 bp, Morganella morganii
atgaacagtaacgttgcatacgctgactttggagccgcacgacggcaagagaggccaacggtggcagatcttgatgatgggtacaccagacttgcaaatgctctgtatgaggccctgataggcgctgacttaacaaaaaatcaggccaaggtagcacacgctatttgccggaaaacttacggcttcggcaagaagtcggaccgcattgctgacagccagttaagtgagctgaccaacctgccccggcagaaagttaacaaggcaaaaaacgagctgatagcaatgcgtgtagtcgttatggatgggccgagaatcggaccaaacaagaacgtgagtgagtgggaaataacagggtgtcactactctggtgacaatgtcaccaaaacagtgacaaaaagtgtcaccaaaacggtgacagcgctgtcaccaaaacagagtcacacaaaagaaactattacaaaagaaaagaaagaaactaacccccacacccccgtcgggggtgaagtggaagggttggttaaacctaaaaagcgccgggcagtgaaaatcaattacgatgaatatctcattgcctacaacgaggaagttggtgatcgcctgcctcacgctatcgatgtcactgagaagcgaaaacgtgacctgaagaaaataataccgaaactggcaactccaaacgtcgacggatggcggtcctatgtgcgggccttcgtcaaactggctaagccgttttattttggcgacagcgatacgggatggaccgcagatatcgactatctgacgagagaaaccacactcacagcggtccgtgaaggaaaaccaagtctcacagggaggtag

SEQ ID NO: 280912 - DNA, 1368 bp, Morganella morganii
gtgattaattttgaagttgaatcgagtgttatcggtggcctgctgattagcgggttaacgcaggatgccagtgatgttctcgccacgatggagcctgaattcttcgggtccggattttgccgcagaacctatgaggttatcaggaagcaggcgaaggcccgtggtctgattgacgttctgatggttgccgaggaaatgggtgatcagttcagtaacgtgatggaggccgcgaaaaactgcccgagcgcagccaacctgaaaggctatgcgaagatggttatggaccttcactgccgccggaagatgattgagctgatggactctgtgcgcggacaaatcgaacacgggaccgtagacgcagcgactgaagcaatggaccagtttctggcaaaggcatctgaaatccgggccccgcaggatgagattcggcccgttcacctgaaggaaatagccgaagactacgcgcagatgcttgaaaagcgggtccagaatggcgatgaatctgacacgctgaaaaccggcatcccggaccttgatgatattaccggcgggataaaccctgttgacctggttattgttgcggcccggcccggcatgggtaagacagagctggcgctgagaataaccaaaggcgttgcttcacagaccattcgagggaccagccagaagaaaggcgttttgattttctcaatggaaatggattcacagcagattatcgagcgtcagattgcaggtgccgcaagcatgccggtttcatccctgcgcaatccggcgaagatggaccaggaagactggacaaaggttacagtcggcatgggccgcatagtggatctcgatgtgtgggttgtcgatgccagtaaattaacggtcgaacaaatccgtgcgatatcaggtcggcacaagcgggccaatccgaatttatctctcatccttgtcgactatctcggcctgattgaaaaaccaaaggcagagcgtaatgacctggctattggtcatatttcagcaagcctgaaagcaatggctaaggacctgcggacccctgttatctccctcagtcagttatcccgtgatgtggaaaaacgcccaaacaagcgcccgacgaatgcggaccttcgcgattcaggaagtgttgagcaggatgcggatgccatcatcatgctgtaccgggacggcgtgtataatgagaattcccccgcagcgaactatgccgaaattatcgtaacaaagaaccggttcgggaaattagggaccgtgtatcagctattcaaagacgggcactttctcgatacggaccaggctatggccgcaaatatctgtcagcagagcagccagccagcacaacgcagatttaaaggagcagatgtatga

SEQ ID NO: 280913 - DNA, 267 bp, Morganella morganii
atgagtttaaaacaaatggataccggcgaagttaaagccaaatacgaagaattgagcaagattttaacagtcgatggcagtcattttgttttccggttgagtgatgacgaaatcgaccagtatgagataagaattcagtcctgcgatacggctgaaaaattaatttcatgggtgtttcatctcaccgaaaaacagtggatgacagtcgatttattacgttatttcatccaggtagcaagtaaaaaatcaaacattaatatccggtag

SEQ ID NO: 280914 - DNA, 210 bp, Morganella morganii
atggaaccaacggattttgaaaagtggtgtgcggaagaaactggccgccccgtcaatctcatcacgagcttcaggcgggaagatcaattcgggtattggaattatgcacacaaagaaattgaaaaaagatatcgggcatgggtggccggagttcgcagcagactgccgtaccagacaccgccaaaaggagatgaagatggaatggattaa

SEQ ID NO: 280915 - DNA, 258 bp, Morganella morganii
atgtttggcgggagcttatatcttccgcaaaaagaaaatatggatggtggtaatgctgatatgacagagaaaacacagaaacttaaaccgtgtccgttttgcggatgtgttgatatcacgatacacagccccagcagccacggcctgacgctgtacggtgttgcctgtgatggatgtggcgcgcggattaagaggtttgatgaagccgaggcaatcgccgcctggaaccgcagagaaccacaatgtgagaaggagtag

SEQ ID NO: 280916 - DNA, 258 bp, Morganella morganii
atggatgaaattatcaaatacgcgaccatcggcctgatggcagtgggttatttttggattatcgcaaaatcagtcgagtggtttctgagtctgatattcaggaaggcattcaagcgcagagaaaaagaccgtaagcaggcggcgataaacgagctgtatgatgcctatgagcttggcgacatgaagcccggagacgacctgaagattacaacaaaaggcggcttggttgttttcatgtatcgcaggccggaggaatag

SEQ ID NO: 280917 - DNA, 444 bp, Morganella morganii
atggaagcagaatttctcttccacgaatcaaccaaagatgcagcctggcaacacctcaaagaagcactcgcaacaaacaaaccccaccgagtaatcattaagccctggaaatctacccgctcactatctcagaactccacgtttcatatgtggtgcggtgagataagcaagtatctgtgtgacaacggttctaaattcacgcctgagacagtcaaggaaatgcttaagcatacattcctgggctacgaggtcactgaaatgatagatgccaccacgcagcatacagagcgcgtaaggactatgagaaaaacatcaaagttagacgccggggaaatgtttcacttcatggggcaggttgagcgctgggctacaggcatcggttgttttgtgacgatacccgagaattcggaatatatgaaactcaaaagggagcaggacgaatga

SEQ ID NO: 280918 - DNA, 192 bp, Morganella morganii
gtggaatgccaactgtgcagtaaagaacttgccgacgatgaaacgtggctgtgcgatgagtgcgccagtgaatgtccgcatctggaagtagtcgagaagatccgtgattgcacgaacgcgttaatcaaagcggcaccggttatgtttgaaaatatgccatctgtagaaatgcagagcaaaaggagagagtga

SEQ ID NO: 280919 - DNA, 201 bp, Morganella morganii
atgaaacctgaaatcacatcgataccggaaatgctgattaagcactacgggaatcagactgcactggcgaacgagttgggagtaaaccggcatacggtcataaagtttcaccgcgatacccggtgtgaaatgcacgttatctacaacggcgtgctgatgaccaaatccaagatgaaaggcaaccaggggaaagagcaatga

SEQ ID NO: 280920 - DNA, 456 bp, Morganella morganii; identical to SEQ ID NO: 14596

SEQ ID NO: 280921 - DNA, 171 bp, Morganella morganii
atgccacggaaccctttaacgctgatcatcattgctatcattctgctgacggtcagcctgttagcgggttgttatctgtattcactcccgaatcattgtaagccgctgccgggcaattcactggacggtgtgatccattatgagtgtgagaacccacgggggctgctgtga

SEQ ID NO: 280922 - DNA, 333 bp, Morganella morganii
gtgaaacttggtgagtgggcggtagtggcggtgattgccatgatgatcgctgtcggttttggctggcaggcaacccgcatcgataagctgaaaagtgagcgcgattcactatctgaaaaactgtcagcccagcaggtgattaataccaccacattaaccgcagtcgccacctttcaccgtatctctggagaaaccatagatgccaagcggaaaaacacactggacgcacagactgccaagaaagacgtcaaagttattcttgtgggtaatgactgtgcttccgctgctgctcctagtggtctcattgaccggatgcggcagtacaaaaactga

SEQ ID NO: 280923 - DNA, 852 bp, Morganella morganii
atgagcaatattattcctctcgaatacgacggacatcctattcgttttaatgatgatggatggatcaatgctacagacgtggcagctaagtttgataaagagcctacggcatggctgaggcaaatagatgtgctggaatatctttcggctttaagcaggaagctattttccaattctggttttgtgacagaattaagcgaaatcaaaaggttatgttcaacatcttcggcatcacgaactaaggtgcttagatttgttaaaagaacagggttagtcaaaacaaaagcggggtctcaaggtggaacatggctgcaccctaaactggctgttcgctttgcccgctggctatcagtagagttcgaaatctggtgcgatgagcagattgacggcttaatcagaaacaacgcgccgatttatactgacgacagaatcaatgcgatctttcttcttgataagccaacggcatgggaaaagcgttttcagcacccgttctatcaggctcttggtcgcatgaccggcttgccttattccgggcatgttggtggctgtccgtcactcttcgggatgataacggcgaaatgggtatatcaggttgtactgcccgaatcggtctatgaggaagcccgtcagatggctaaggatagcggcgataagattcatcagtatctcaagcctgatgctcagaggctggttgaaaatcaaatgactgcaataacagtgctggcaaacagttgccttgactataaggatttcgaggctcgctgcatccaggcatttggtaaaacagggatgcaaatgcagatgatttatccggttgaccaactacacagccatgcaacaacactccaatag

SEQ ID NO: 280924 - DNA, 552 bp, Morganella morganii
atgagttattcacaagccgataaattacagttacttatgttgtgtgatatttaccgtgcgcttggcattgaaaatagctttaatccagatgttatcgaagaggctattaacacaagcaactattgggctatcagttgggacaatgaagcactaagtgatggaacagaattgccagaacgggttaaattcgttgttgatactattgaaatgtactcattgcttgattacacctacagtaacatgagcgatgacgacaggcagttggtgtcaaacgaagttccatacttttctcaggctcactcaaccacattccccggctttgatgggaataatgagtatgaatacattcaaattgccagacttcttaggatgcttggctgttttgagggttctgacatcacaaaaaactcacaccatccatcaattgacacttatcacagaatgcttgaggttttcttacctataagagatagcttcgttcacgaagtaggaatatcaactcaagattttattcgtgtttatctcgcaaggacgcaccccagcaataggtaa

SEQ ID NO: 280925 - DNA, 1776 bp, Morganella morganii
atggcacaagtaggcgaaatcgtatatcaggtgcagatggatgttgctcagttgctgacatcacagcgtcaactggatcagcgactgagaaatatggagggcggatttaaccgcacaacgacctccgtcaatggtacagagcggtcaatggctgccttgtcacgggttgccgcatctctgactgcttacttgtctgtatcagccgttaccagttacgcggaagcttggacggtgctgaataacaaactcgtcaactccataaaggccggagagacgctggcggtggtgaatcagcgcgtgtttgatattgctcagaacagtcgttcaagccttgacagtatcgcaacgctgtattcacgactggaaagagcgatgcgcagtgccgggctcagcggcgaagagttagggcagataaccaccactatctcaaaggcaatgaccgtttcaggtgccacagcagcagaatcagaaggtgcacttgtccagttatcacaggcactggcatctggtgtactgcgcgggcaggaatttaactcaatgagtgaacaggctccggcactgatgaaaggacttgcggattcactgggtgtcagcatcggcaagctgagggcgatggccgcagaaggcaaattaaccacggatgtactgttaaaagcattccgtgaaatgggaccagctattgagaaggagtttgcgaatacaacacaaacaatgtcgcagtctcttcagatcgccagtaataatattactaaattctttggcgagaacaccactgttaagacatttataaacatcttcaacgatgctaccgtatctgccagcaacaatctggaatcactgactaacgtattgcttattgcagccggtgtcatggggtctagatatgttggagctcttacgctatcagctaccgctcaggcaaagaaagttaaagagacacttgccgatatggcggcgacaaaacaagcggtcagagttgagatcgaagccgccacggcaaccatcaacagaattgcagctgagaagactctggctgtgacagttcagcagtcgctgggtgcgcagctggcagcagccactactgaagcgcagagaaccagaattcgccgtgaattggcagtaaactcagcagtaataacaggattaacacagcaggaaaccgcagctacaaatagtctcgctgcggcacagaacagacttaacgttgcaagtgggttggcaagcaaagctctatccttgattggtggaccggttggtgctgcgatgttggccggagccgctgtgtattattttttccaaaaagctgaagaagcaaaaagatcagcacaagagtttgctgattcactaaatgaattgcgtgccagcatggataaaatgtctcgcaccgaactggcagcaaaaatagcagatgccagggacgagctcgaagttctgacggatgctcagcgctctgcagagcaggaggttaaaaatctcaaaacagcatacaaagcatattctgatggggtattacactttggcagtacccaggagaacctcgaaataatatccagaaaattagcaaaagcagaagccaatcttgagcgcgtgcaaaatgacagaagcaagactgtgaattttatcagtgcagcgcaagcgaagttaaacggggaattgttgcagggcgaggagctgctaaagcgagaggcgagtactttgctacctaatgccggagcagcacttcgcgcttacgggcttgaccctgagagatcccctcataatttccccaaagcgtaa

SEQ ID NO: 280926 - DNA, 141 bp, Morganella morganii
atgatggaacacatcataaaagccggcagccacgaaggcgatatggttgctgatttttttatgggttcaggggcgacattgaaagccgctctgaagcacaatcgtcgtgttctgggcggagatggaagcggaacggtttga

SEQ ID NO: 280927 - DNA, 192 bp, Morganella morganii
atgcgcatgtctgacaaatattccagccctacagcatacgcctgggggcttataacctctgcttttggcgttttatctctggaccagtgggctattgttgccgggatcatctgtactgtcgggacgttcctggtgaactggtattacaaacggaaagaattccagctgaaagccggagaacatcatgaataa

SEQ ID NO: 280928 - DNA, 330 bp, Morganella morganii
atgaaagataaccctgttgttgcgctgagccgcgtccccggactgatgaacggtctgggtgatgtgtcaggggctctcgggaaaagtttccctgcttttgatgcgctttcagagtacatgcctgatgccgtcagcctggccagagctaccagtgatgcggtcacgtatgtacagcaggctcactcctcgctcagcggggcggacagcagcaatatagccgcagcactggatgctgtttccggtcagctggattctgccggtaccacattcacccgcatgtccccggcattaagtaaaatggccgccaaaattatgaccaggagtgtgtga

SEQ ID NO: 280929 - DNA, 387 bp, Morganella morganii
atgtcaggacatccacacgctgaccttatggctaaggcagcagagatagcgaagacagataaagagtggtggcggcactttgagtttaaaaatactaccggtagctggatgggcatgacagaaaatactggattttatgattttgctgaataccgcctgaaacctcgcttcatcgacattaatggacatcaggttcctgagccggttcgggagcctctggaagacgaccaagattactggatagctgacattcgatatgcgccatctgtttttaattgggagaataatgacgctgactatcgctggcttgaacgcggcatcattcatctaaccaaagaagccgctgaatcccacagttcagccctgctctctttcacacagaagtaa

SEQ ID NO: 280930 - DNA, 357 bp, Morganella morganii; identical to SEQ ID NO: 14608

SEQ ID NO: 280931 - DNA, 558 bp, Morganella morganii
atgataaaagaaatcaattattactataacgcaagtcatccgttacatcctctcatcgggcagggctatgcaaacgagggatctctcccgccactgaatgcgctgcgtattgaacctgattttaaagagggtttctgtccgtgtgagaaagatggtgcatggattaatatcccggactatcgcggcgtgacagcctgggataaagagacggcgcaggcggtaattattgatgatgtgggcgagttgccggacaatctcaccaccattgcgcctgatgtggaatttccgaagtgggacggcggaaaatgggtaacagacaaccgggcgaaaaagaaaagcgatactgcggcagcggaagaacgtaaacaatatctgttgtcggaagccactgccactcttgccccgcttcaggatgcggctgatttggacattgccactgcggaagaagccgccgccctgaaagaatggaagagataccgtgtactgttgaatcgtattgatacctccctcggagctgatgtgatatggcctacaccaccggcttcaccggccagataa

SEQ ID NO: 280932 - DNA, 354 bp, Morganella morganii
atgaaatattacaaaacgaaaaataatgaagtttatgcacttgaagataacgactctgcaaaagagtggataaaagaaaaagtgactgaaatcaccaaagaggaagcggataacatcacaaatccgcgaccaacgaaagaacaactgatcgcaaaagctgaatacgataagcaggcgctgattacagaggttcaggctgaaactcagttactgcaaacaaaactggcacttggccgtatcagtgataatgaaaaggcgcggttaaacgcctggctggattatctggacgaactggaggcagtggacgtatccaccgccccggatattatctggccggtgaagccggtggtgtag

SEQ ID NO: 280933 - DNA, 231 bp, Morganella morganii
atgctgtactccgttatgaatgacctgaatatcaatactgaaaggatactgagtacctgttctgttcgtttcgacatgaacaatccggggtttgctgtcggtgttggtgtaccagactttattttgacggctggtcgtcaggtttctgtaggtctgaccaacaccgaaaagttgctcagtagtcgcaatgtctttaccgtcaattttgaaaccatcggggccaataattaa

SEQ ID NO: 280934 - DNA, 1668 bp, Morganella morganii
atggtgggtctatgccttgccgtagttgaaggtctttttgctactattccgtatattctactctattttttattaattgatctttttgccaataaaatcacactagctcagttattttattactttttatcaatactcttatctattgttctgcgtattgtcattggtacttatagtatgccaatgatttttattggtgcttataaaatgatgggacaagcccgtctaagaatagccgatcatttacgaaaaatcccgattggctggttttcttctcaacgcagtggtgatcttgcatcacggcttactgctgatttagagatcattgaaaatatctggtcacatttcttaggaatgtttatcagtactttagcgatgcctgtttttctctcactattcttagtatgggtagattggcaactcactttaattatattattttctattccaatcgccctgttcgcattatccataagccataaaataatgttaaaagctgcacaacaggcagctgatgctaatgccaatgtacaatccgaattactcgattatatccaaggaattatggttattcgtagttttgggcgacttggtcctgcatggaaaaaactaaaagcagccttagaaacacaaaataaaacccaaatagttctagattccaagcctgccccttggattgcactttatggttttattcttgaatcaggttttattttattaatgataataggaacaagccgtttaattagtggctcactttctccttctcaattcgtttttttccttgtattagcactccccatttatcgacaattctttgatttaggattatccagtatgttgttaaattatgcacaaaaatcattacaacgcatagaagaagtaatgaaagtggttccactttctgagcctaaatatactcaattaccaataagaacagatatctattttaacaatgtaagctttatttatccttataatagtcaattaacattagataatatatcttgctgttttcctgaaaaaagctttactgctattgttggccctagtggctcagggaaaagcactttactacagcttatttctcgtctatgggatgttaaccaaggtgaaatattgctagatgatattaatattaaccaaataaattccgataaactctgttcatatgtatcttctgtttatcaagatgtcgttttattttcaggaacaattaaagataatattttaatgggaaaaacagatgctcacgatgatgaaataataactgcagctaaattagctaatgcacatgagtttattatacaaaaaccacaaaattatgatactcctattggttacggtggtatgttactctcaggtggagaacgtcaacgtctttctcttgctagaactttattaaaaaatgcaccaattttactgatcgacgaagcaacatcgaatatcgattgttcatcagaagtattaattcaacaagctttatcattgttatcaaaagataagacaatcattatgattgctcatcgattaaatagcattaaaaatgccgataacattatcgtaatggaaaatggaaaaatagcagaacaaggaaaacatgctgagttacttgcaaaaaatggcttatatgcacatttatggttacaacagaaagcgttatgctaa

SEQ ID NO: 280935 - DNA, 1107 bp, Morganella morganii
atgaaattttgttcaaattgtgttatgcctgataccaagcctggtattgtcctggatgaacgtggctattgtaatgcgtgccgaactaaagaagtaaaagaaaaaatagattgggaagcccgttataatgacctgtgtgcaattgtcaatgacgttaaagcacaaaaccatcccttctacgactgtatcgttgcagtaagcggaggaaaagatagttggtatcaggctgcagtactggctgaaaattttgggttaaaggtattatgtgtcacattagctgctcatttacctacaactgaaggtattgataatctgaataatatgataaaagatttaaacgtcgatcatatgaagattactataaagccaagtgtattcagaaaatttcggaagaaatgttttctgcgacaaggtgagcctaactgggccgagcattgtgcaatgttttccagtgttgtaaatacggctcttatatatgacgttccgctggttgtctggggtgaagatattgcttttgagtttggtggattacagcgggctgaaagtaaaccatctgcgattgaaataaataaaagtgaccttataaaagaaaaaaccatttatgattggctcgatgatgatatatccgagagagatatatttttctatacatatccagaatatgagaagttaaaaagtgcaggcattaaaagtatatatttaggccattttatgagatggtatggtcggaaaaattatgaatttgtaaaacagcgtggttttactggccgtaaagcgggtcctctgcctggaaactttctggattatgataatattgatgaaaaattgtgtgaaatcaatatttggtttaaatatcttaagtttggtttctggcgggcaacagatcaaacctgttatgatatctggaatgatagaatgacccgtagcgaagctgtcaaaatagtgaataagttacaaggtgaatttcctgggaacgatcttgaacattttttacgattccatgatattactgaacaagaattttgggaaaccgttgaaaaattcagaaataaagatatatgggaatatgtcaatggtgaatggaaactgaaatatatcctggcctaa

SEQ ID NO: 280936 - DNA, 762 bp, Morganella morganii
  misc_feature (682)..(691): n is a, c, g, or t
atgcattgccactatatcgttaacagcctctatccacataataaagcaggacgtttatggatagaaaacacacagaagatatatcagcaaatacaacaacgaccagtgtggggacaaattatcacaagcaggcaattaatttattccgccttagatatatattgccaagcaatgaaattacaccctaatgatattacagtcacattagaaaaagataataccccgctacaatttctacgactatccaaccctactggtgatttgcttttatgcctacaaaaacatttgtcatctaacgatcctgatcagcatagcctcgtgatgcatcatatgatattaggctggccagctggttatttaactctcgctggaagttatgggccagtagaatggaataatgcgctttatattcatcatcaccaagatagtaaaaaagccatgtatcaatctcctgccacgatggagcttgatgaaccactgtttcattcatttcatactccaccaaatagttggcaggatgtgatggaatgtgaagcaccagaagctattaattacttactggcagagatagataaatgctggcaattacctaatgataaaaaaccaatgattttacaaccccattaccaattagctttatctcaattatggataaaaacattgcaaacagcaggtaaagccnnnnnnnnnnaagccattgatggcacaattgcgccatttaagcgaatgaacttcaccaaaagtagtggacggagaaaataa

SEQ ID NO: 280937 - DNA, 1020 bp, Morganella morganii
atggtatttagtgggatattaacagcgaatctcgttattatagcaccagtaggtgggtggatgtatttaaatcaaaatattgatttatctacttatattttatttttaatgacatcccccctcgtacttgcgccgttattacgactaacatttgtgctaggagaacaagctcaacgaaaacaaaccttaaaacatatcagtatgatccttgaactttcagagcataaacaacatgataaacattttactctccctaaaaatagtgatattacttttaaagatgtctgtttggatcatggtgataaaccgatattagagaaaattagttttaatgcccaagcgggtacaacaactgcaattgtaggccacagtggtgcaggaaaatcctcattattaaaactaattccccgtttttatgattgtacttctggccaaataaaaataggtcaatatgatatcaactactggccagaaattgatttactttctcaaataagtgttgtttttcaagatgtatatctatttcatggaactattttagaaaatttactcatagcaaatcctaatgccttatttgaggatattatcaaagcaactaaagcagccaatattcatcatgttattgaaaaactcccagcagggtataatacattaattggtgaacaaggaaataaactttcaggtggagagaaacagcgattatcaattgcaagagcactattaaaaaactctccaatcctacttctcgatgaaattactgccaatgttgatgctgaaaatgaaattttgatctatcgcgcattaaagagtctatgccagaatcggactgttattatgatcactcataacctacatactattattaacgcagataaaattattgtgcttgataatggaaagattattgatacaggtacacacacccatttattaaaccaatgcccaacctatcaaaaattatggaatgattatagtcacactattcattggcaattaatccaggagaataataatgattaa

SEQ ID NO: 280938 - DNA, 810 bp, Morganella morganii
atgcttaaaacaaggctaataccatgtattatcacaaaaaatgaacttgttgttcaaagttttggtttcaaaaaataccttccaattggcaatgttaaaaccgcgattgatttttttgttaactgggacgtcgatgagattgtagtcattgatatagatgcatccaagaatagcagatatcctaatatagacctaatcaaaaaagccacaaaagaatgttttgttcctcttactattggcggaggcatcaaaactattgagcatatccgagatttactcaaagcaggaacagataaggtttcaattaattctgaagcattaataaatcccgccttcataagagaagcttctaatatatttggcagtcagtgtattactgtatctatcgatgctatacatatcaataatgaatacaaagtatttaattatttgactcaatccccgcttgacttagatatcgttacatgggcaaagcaagttgaatcttttggtgctggtgagatattattaaattcagttaacagagatggcagtcgccaaggttatgatactgaactattaagatctgtcagtgacaatgtatcgataccagttattgccttaggtggtattggcagatttgatcagcttgctgacggtgctattaaaggaaaatgtcaggctttagcagccgctaatatttttcaacatatggaacacagtacaattgcagcaaaagcacaaatgagacaagcaaatcttaatgtaagacttagttccgaagtgaaatacgaaaattttgacttagattttcttggccgcccatattga

SEQ ID NO: 280939 - DNA, 375 bp, Morganella morganii
atgtgcggtatttttggttatttttcttctgacttcagtcagatttcctctgaaatagtaaaaagtatgggagatgtaattaattatcgtggcccagacggccaaggtatatattatggtaatggactggctttaggaaatcagaggcttgccattattgatttgcaaaatggtaatcagccatttatatctgaagataattctattgttgttgttcaaaatggcgaaatttttaaccatatagagctggcaaaagagctggaagatagcgatttttattgtagaacacacagtgatactgaggttatactacggctctaccaaaaacctgtctcttatacacatctgacgctgccgacgaatagagaggtgtag

SEQ ID NO: 280940 - DNA, 411 bp, Morganella morganii
atgaaaggtgatggcagtgatgtgattcaggggtatatgaacttcacatcatggtcgatggagttccctaccaaagaaatctccacgtactccggtgaactgaaagtcgcagacgctgacagctttgaatggctgcaggaagaaatcgtggttcagagcatcgcagccaaccccgcgacactgactgtgaaagccggtgaaacggcaacattcacggtcggatttaatccggttaacgcgacaaacaaaaattacgaggtggtcagcgataagcctaacttcgctaccgtcagtaagctactgaatgttgtcactgtcaccggtgtcgcagccggtaccgcgaatattacagtcacatcggaagatggcagcaaaacggcgaagtgcgtcgttacagtcactgcggcctaa

SEQ ID NO: 280941 - DNA, 297 bp, Morganella morganii
atgagcgaaacaacatataaggcagtctcatggggtgaagtaaaagccgatgtctattctggtgaatcctgcaacgaacatcgcccatttattgagatgctgtgtgatggtgacatggaatcatgcattgaagatgaagttacattcagagccagtcgctggccggtgggtacgaaaattaccgtcgaagttccgtgttgcccagtctgcagtttggatgccgagtatcaggataaagccgggagatgcgaatgcggctttgactggaaagaatgggctgaaaacaagtattcatga

SEQ ID NO: 280942 - DNA, 654 bp, Morganella morganii
atgtcacaccagatgacttacgcggattcacacaatgccacttcttcgccggtgtcggggtgtggtcactcgccctgcgccgtgcaggatggcctgatgatgaaccagtctggacaggaagttgcccgtgtcagcctttcagcgcggcgggcaaaggaaatgggtttgctgacgagcggcacctttggcctgcattcttccacctcatcagcgagtgcaaacctggcgttatctttggtgaacaggttgcaagcaaagacggcctcggatggctcgaccttgttcaaactgacttggaagcagcgaactacgccgtcggcgcagttgatttatgcgctgcgggcttcggtgcgccgcatatcagacagcgattgttctgggtggccgactccgacaacgcggggcgggaaagactgcggggatgtgagtcagtcattcttccggaaagacgggaggatgcggaacgatacgctgtaccgccagctatggctgcacatgtttgggatggatggcaggccgtcacgggagcagataaaaaatctcgaatgctgccacctgactttggcgagagaactgatgatgctgccggtcgggtgggaaaactccgcgcctacggaaatgccatcgtcgcgccggtcgcggaagagttcataa

SEQ ID NO: 280943 - DNA, 561 bp, Morganella morganii
atggcggtcatcggctatatccgtgtatcaacaactgaccaaaacagcgatttacagcgaaacgcgctcatcagcataaattgtgaccagatttttgaggataaaatgagcggtaaaaccgccgtcagaccgggactgaaacgggcattaaaggccattcagccgggcgatacactcgcagtgtggaaactggacaggctcgggcgcagtgtcaaaaacctgatagccctgatatctgatctgcacgaacgcggcgcacacttccgatcactgacggacagtatcgacaccagtacggctatggggcgctttttctttcacgtcatgtcggcactggcagaaatggaacgcgaactgatagtggagcggacactggccggattggccgcagcgagagcacagggcagagtcggtggaagaccggcggcgctgacacagaatgaccgggagcaaatcggccgtcttctggataaaggatactcccggcagcaactggcaattatttatggtgtgggggtatcaacgatgtatcgatattttccgattgggcggcgtagatag

SEQ ID NO: 280944 - DNA, 534 bp, Morganella morganii
gtgcacagaatttttatagatctggagatcaatggaaaagttaaacgacagggacatttagatactgttatcagtgaccatcaacttcaggatatactgccagtaaaaaaatcactacagaacgcagagttattagttcgtattaacccattatttgatggtacacaacatgaagttgattatgcaattgagtcaggcgctgatatcatcatgctcccgatgtttaaaaatgcacaagaagtaaacacagtttcccaattcatcaatggaagagcaaaatttattcccctggttgaaacagcgggagcagctgaatcattagatgatattgtaaaagtaaaaggaatttctgagttatttattggactaaatgatctccatcgagatcttggccttaactttatgtttgaaccattattaaatggtgttctggaaaaaatggtatcgactataacacaagccggactgccgtttggctttggcggtatcgctaatattggtcagggacaattacctgctgagttaatgccttga

SEQ ID NO: 280945 - DNA, 789 bp, Morganella morganii
atgacagccattgttttccctcatgtttgctgtaattgcgggattattacggatttatccggttatggctgcattcccggaaaccttggtttaggagaaatttatgccacctgggaggatgtagggcaaaaactggataagtcaaaggtaactaactcgctgattaacagccgggaacttgttccgactactgcactgatgattgataatctggcgctgaaacagcccgtcggtgattatcagccaaagggtgaatatgcattgttaagtgatttaaagtcactcatcaagccgggtttcactatgcagacaatccttgatgaggcggatattgccccgccgtggtatttgatcaacggtgacagatacgggttagacaccccgcagggaaaagtattgcgggcattttctgctgacctcaaagcgcgctggaatatcactcagacagcagaaacaattaccttaccaaaaactttacaatctgatggacggatgccgttcccgcgcccggtaaacggaacaggccgtaaaacaggttcagtttccggggatactatccgtaactttaccggtgaattaggttatgaagccaactacggcctgacaaccggcgaacgtgatgtgagtggagtgttccgtgcttatggtgcatccaaaggctcatttacgggtggtggcggcggcagaagtctcaacattatgtttgacccgtcaacagttgttccgaccgggccggaaaacaaaccgctcgatgtgggcgtaacctggattatgtatttaggagtgtaa

SEQ ID NO: 280946 - DNA, 546 bp, Morganella morganii
atgaaagatataaactattactataatgcagagcatccgttacatcctctcatcgggcagggctatgcaaacgagggatctctcccgccactgaatgcgctgcgtattgaacctgattttcaggaaggtttttgtccgtgcgagaaagatggtgcatggattaatatcccggattatcgcggtgtgacagcctgggacaaagagacggcgcgggcggtaattattgatgatgtgggcgagttgcctgacactctcaccactattgcgcctgatgtggattacccgaagtggaacggcaaaaagtgggtaacggataaaacagcaaaaatggaaaacgatattgcggaagccggggcgaaaaagcagtatctgatagcagaagtcaatacagaaactcagatactgcaaacaaaactggcacttggccggatcaaagatgatgaaaaagcgcggttaaacgcctggctggattatctggacgaactggaagcggtggacgtgtccaccgccccggatattatctggccggtgaaaccggtggcgtag

SEQ ID NO: 280947 - DNA, 630 bp, Morganella morganii
atggcagattacagcactgaaattcagtatgcggtatttgatgaaaacgggctggctacgatgccgggatgggcaaaaatctacagggcacacccgcttacacgggaatatacaggcaccgctatggactacgttccgtttggtttttccgtagtcggtgatgcttacacagacgaaccggaattacccgcaccgggatttgccattgtcagaagtgaggacggtaaacactggctgcatgtggaagaccatcgcggtaaaaccggttatgacaaaaccacaaaagaaaaagtcctgataaacacagtcggtgcgctgccggataacctgacattacttgagccgcaaacaccttttgataagtgggacggggaaaagtgggtgacagataaagcagaacagcacgcgcatgaggtcgctgttgccgaaagtcagaaacagtcgctgttggcagaagccgaacaggaaattgccatgctagagcgtaaaatacgcctcaacatggcaactgacacagaccgggcaaaactgacagaatgggaaatttacagtgtgaaagtcactgataccgacgcatctgccggtgccgggacagaatggcctacgccaccggtttcaccggccagataa

SEQ ID NO: 280948 - DNA, 609 bp, Morganella morganii
atgagtagccgcctgctgccgaccggttccagcccgctggaatttgctgccgccgaagcgtgtgccgcgatagagcgcgtgccggtgccgataaaaaccctggtcaatcctgatacctgtccgctgcatctgctgccgtatctggcgtgggcgtggtcggttgatcgctgggatgcagactggccggagcggacaaagcgggatgtgatcaaatcctccatgttcgttcacaaacataagggcaccatcggggcgctgcggcgtgtcgtggagccgctcggctatctgatcagcgttactgagtggtggaaaaccggcgaccggaacgggacattccgcctgacggtcggcgtgtcagaaagtggtatcactgaagaaacctattacgagcttgagcgcctgatatttgatgcccgtccggtcagccgtcacctgctggggctgtctatccggctgagtacatccggacatttttactgcggtgccgccaccaataccggcgacacgctgactgtttatccgtatatcccggaaaccgtccgggtggaaagcgcggactatctcggtgctgcgctgataaccattgataaagtgagagtaaacccatga

SEQ ID NO: 280949 - DNA, 909 bp, Morganella morganii
atgccaaccatcgacatcagccagttaccgccgccggacgtgatcgaaacgttagatttcgaacaaattttcactgagcgtaaagccgcattgctggcctctctgccggaagaactgcgaacgccggtcgcccgtgtgctgcaactggaatccgagccgctgaccaaactgttacaggaaaatgcttaccgggaaatgctgctgcgccagcgggtcaatgaagccgcccgcgcctgtatggtggcttatgcctacagggcggatttggatcagctgggcgcgaacaacaacgtaccacggctggttatccgggaggctgacgacaccgtgatcccgccactgccggccgtttatgaatccgatgctgatttccggatgcgtattccgcaggcatttgaggggatgagcgttgccgggccggtcggcgcttatgtttttcatgcacgcagcgcttccggactggtcgcggatgcctcggcaatcagtccggagcctgcctgtgtgaccgtcagcgtgctgtcacgcgagggagacggcacggcaccggcggaactgctgaccctcgttgataaggcgctgaatgatgagaatgtgcgcccggtagctgaccgcgtgaccgtgaaatccgttgagataatcaattacaccattgatgcggtactttatctgttcccgacaccggaatccgaaccgattgaggcggcagcccgggaacggatagcgcggtatgtgaaagagcaacaccgcattggacgtgatatccggctgtcagccatttacgccgccctgcatgttgagggggttcagcgtgttgaactgaacagccctgcaaaagatatcgtgatcagtaatacacaggcgtcattttgtaccgatgtgaccgtcacggtcgggggttctgatgagtag

SEQ ID NO: 280950 - DNA, 267 bp, Morganella morganii
atgacaattaaaaacgatgacccacggcactattttatggtgacgcttaactttttactaaatggaaactttggctactcaaatctgttgtcatcaaatagcagaccgtcagaccaagttattctggactttgacgcgcgtcggtcaattattgacgatttcaaaagaaataatccaagatatgttaacccgctgattgtgaacgtgtcatatattgggtatgaaaggccgtcagtgatgcaggggccgaatggcgagatacagtaa

SEQ ID NO: 280951 - DNA, 684 bp, Morganella morganii
atggcaattaaaattgaagtaacgacagatttaattctgagtttgtacaatcggctgaatagtttatttcagtggcaaaatcgctggcatgagcaacgttttcagcgtgcccgtattttgcataaaggccgtgagattggggcagattattattttgcacttgaagcgatacttgatgcctgtcttaccgggcgaaataaaatatttatagagtataaatcaccagatcctgaagatgattttatttccaatgttgctcaatacatcggattttttttgggacgtaaggttaagccagaaaccagaacaattatactgagcaacggagccaaactaaggttttatccagatagcgccagttcatgggctggactgagtggcgatgtctatttatcagaatgggcatatttttctgactcatggagtgccattcaagcagcaagtgcaatgactgcaaatgtgaaatggcgattaacattgtattcatcaattgatgattttgccccgggcaaggatataaaattcggcggggacaggtggtaccacgattcagtaccgtttctgcctcacgagtgtacagtgcgacactgtgagaaaatttccgatatacgctcgtatcagtcggatagtcatttccggcaggtagttttgtgtcagttgccgaaagggagtaaaccattatga

SEQ ID NO: 280952 - DNA, 804 bp, Morganella morganii
atgaataaaaccatcctcaaatgggcgggttcaaaagtcggcattttggaacagctgcgcccgtacctgccaaaaacaaaacgcctcgttgaaccgtttgctggttcctgtgctgtgatgatgaatactgactatgagcagtatttaattgcagatgtgaataacgatttaattaccatgtatcagcaaatagcgtcagataatattgatgaggttataagaaccgcatgcggtctttttgaattagaggctgtcgaatcgggttattatatagagcgcgatttttttaataaaagtaaacatgtattgcagccagagtatatcgccgcgtatttcatatacttaaaccgtcactgttacaacggattgtgccgctacaatcaaaaaggtggttttaatgtaccgtgcggaaattataaaaaaacatactttccggaagaagagatacgcgcctttgctacgaaagcacacaaagctgatattaaatgccagggctgggcggcaacgctgttacagacctgtgccggtgacggtatttattgtgatcccccttatatgggcaccggttttacccggtaccacaccgcaggtttcaatgatgccgatcaggttgcgttggccgaagcgctgcaagcgatacatgcgaccaaaggctatccggtcacggtgtcaaactcgctggccgcaaaagagctgtatgcggatttaggcttcacgctccatgaaatagaagcaccacgaaaaatatctgcgaacggaaacagaaagccggtcaccgaaatcattgccacactcggggcgtaa

SEQ ID NO: 280953 - DNA, 699 bp, Morganella morganii
atgtcacaccaaatgacttacgcggattcacgcaatgccacttctgtgcaggaatcggagtctggtcatatgccatgcgccgggctggatggcgcgacgatagacacgcttggacagcaagtctgccgtgccagcctttcagccaggcaggtaaaggagatggatttgatgatgagcggcacttatggccggcattcgaccacctcagaagagagtgcaagcctcgcgttatctttggtgaacaggttgcaagtaaagacggactcgcttggctcgaccttgtacaagctgacctggaagcaacgggctacgccatcggggcggttgatttatgcgctgcgggcttcggtgcgccgcatcaaagacagagattattctgggtggccgacaccattggcggggagttaccggggggcggggatgtctggacggcagggtggaatgaaccttcaaaccgccgcgcagctggcgggatggacaacaccaagtgcatcggatggaagccggggaggaacaggaataacgccgggaatgacgggcagcagtttagcccaacagtcaaaaatggctttaccagtccgacaaaaggctactggagagatgctgactggttgttctgcagggatggcaagtggaggccagttgaacccggaacattcccgttggctaatgggattacctccagagtggggaaaataa

SEQ ID NO: 280954 - DNA, 222 bp, Morganella morganii
atgtctgacgaaatcgaccgcgccaatgaccacgccgcacttgtgcttgaaagccagatagccgcagcccgtattactgctgcgggtgtgtccgcatttgaatgtgaggggtgcggtaagccaatccctgaaccacgccgccgcgctgtgatcggctgcaccatgtgcattgattgccaggcaattgatgagctgaaaaacaaacattaccggagcgtgtga

SEQ ID NO: 280955 - DNA, 252 bp, Morganella morganii
atgaccagacctgtatctgtttttatgccagccgaacactcagaaacagataacgccgtagttatcgaatgtgtaattaaacaaaaccgcatggatgaacgtcgtactgttgctgatcgctacgcatcacgtatgcgcacatttgccgcaatagccgtacgggacaaattggattgctatcaaatggctcagttacttgaaagcgaagccagtgaatcagaacgccagattcaggaatggagccatgtctga

SEQ ID NO: 280956 - DNA, 348 bp, Morganella morganii
atggaacaggcttatgatatcggtgaacaacgtgcatttcctattccaatcagtaagcgtgccgatggtttaaatcatatagcaaaattacgttctgagcgtttcggaattgaaaataaagaactggaatcattttttaaagaaatgcgtgaccgttttgatccgatgtatcaggataataaaaaattccttggtgtcattttatatatggccaacatcgaaaaagaaagacacgaatgcgattacaatgatttcagtagtaaagaaatttttaatattgtaaaagcaattaatcacatcagagcaatcagcgcgatattaccgaaacacctagttttaccacagtaa

SEQ ID NO: 280957 - DNA, 297 bp, Morganella morganii
atggcaaaggataacgtaaaggttgctgataccaagattcatggcattgcaaattatgtgacagaggccaagttcgcagaaatgatcggaaaaaccacacaggctgtttctgatatgcgtaaagcaggaaaattaccgtatgtggaaatgaagaacccgaacggtagccgcggcgagtattacatctgcgtttccgaatggaacgagggtatgaaccttgcgcgtgccaccctgcccgacgaaatccgaagcggctggcttatgtggctgggtctcggtaaaccacaggttagttga

SEQ ID NO: 280958 - DNA, 300 bp, Morganella morganii
atgtcaatagatcaaagtgaaaaacttaagttaatccgtgattccgaacgaatgaaaaccaaggaaatagctgatttagttggaattaattactattcctatcatggttatgaaacaggtaaagcaaaaatgccgatggaagccggaattaaattattcaaacacccgcgattcagaaaataccgtgactggttcatgtttgatgaggtcaaccctgaagctggtcaaattgcaccggccttagcacacaatgggccgtacgaaacaacgtcatcccgctcagacaagaaaactggctaa

SEQ ID NO: 280959 - DNA, 1203 bp, Morganella morganii
atggctaagatcaagctcaccaagtccgcagtcgatgcggcacaaccccaagcgcaagcgatcgagctgcgcgacaccctcgttcccggcttcctctgcaagattacgccggctggtcgcaaagtgttcatgctccagtatcggacgaacgccggcgagcggcgcaagccggccttgggcctgtttggcgaactgaccgtcgaacaggcccgctcgctggcgcaggaatggcttgcccaggtgcgtcggggcggcgatccgggcgcggacaaggccgaggcgcgccaggcgcccaccgttgaggagttgtgcaagaagttcatggaggactactccaagaagcgcaacaagcccagcaccagagtcggctaccaaggagtcatcgaccgctgcatcatcccgctgctgggccgcaagaaggttcacgacgtaaagcggccggacgtcgccgggttgatggagaagctttcttacaagcagacggaggcgaacaaggcgttcagcatcctgcgcaagatgttcaacatggcggaggtatggggctatcggccagacggcaccaatccttgccgccatgtcccgatgttccctgccggcaaatccacacatctcatcagcgacgacgacatgggcaagctgttccggcagctcgacaagatcgaggcagacgggcttgagaaatacgtcatccccctggcgattcgcttgcaattcgagttcgccgcccgccgctccgagatcgtcacgctcgaatggcaatgggtcgatctggagaatcggcgcgtcgtctggcccgacagtaagaccggcggcatgtccaagcccatgagtgaggaagcctaccggctgctttcgacggcatcgaggcaggacggaaatccctatgtgctgccgtcaccacgacatccggggcagcacctgaccacgggcgagtattacggcggctggtgccgcgctctcaaggcagcgggtgcgacgcacgtagggacgcacggcatccgccatcgctctgcgaccgacattgcaaattcaggtatcccggtcaaggtcggcatggcgctgacggcgcataaaaccgtcgtgatgttcatgcgctatgtccataccgaggacaatccggttcgcgaggcagccgaactggtggcgaaccggcgcaagacgatcaccagcgccaagcaacctccagcggaggcgacagcatga

SEQ ID NO: 280960 - DNA, 1068 bp, Morganella morganii
atgaccaggcgcaaggtatccgcaccttcgcccgcagcgccggcggcgctgttgggcgacattcgagtgctgatcgaggcggcccggcagcgcgccgcctcagcggtgaatagcgaactgacgatgctttactggcgtataggccagcgtatccacacgcaggtcttggaggggcgacgggctgactatggcgaagaggtggtgtccactgtggcagcgcaactggtacacgaatatggcagcagcttttcggtgaagaacttgcgccgcatggtgcagttcgccaccaccttcccgaatgagcagattgtcgtatcactgatacgacaattgagctggacacacctcatcgcccttattccgctgaaagacccgctccagcgggactactacgcgcagatggcgagcgcggaacgctggagcgtgcggacactgcgcgagcgcatcgactcgatgctgtacgagcgcacggcgctgtcccaaaagccgggcgagacgatcgcgcaagaactggcgacgatgcgcgatgcgcaacgtatgtcgcccgccctcgtcatgcgcgatccgtacatcctcgacttcctggggctacgggacacttggcaggaaggcgacttggaggcggcgatcatccgtgaaatggaagccttcctactggagctgggcgcggggttcagcttcgtggcccgacagaagcgaatacagattgacgatgacgatttccaccttgatctgctgttttacaaccgcaagctgcggcgcttggtggcggtggagttgaaggtcggtgacttcaaagcggcctacaaagggcagatggagctttaccttcgctggctcgacaagcacgaacgcgagccggaggaagcatcgccgttggggatcatcctgtgcactggtaaaaagcgcgaacagatcgagctactggaactggataagtcgggtatccacgttgccgaatacctgacgagcttgcctccgcgcgaaatgctgtcagagcggctacagcaagcaaccgcacgtgcccggctgcaaattgaaaagcgtgacgacatagctaagcgatga

SEQ ID NO: 280961 - DNA, 1776 bp, Morganella morganii
atgaccggcattcagggtctaacagcagagcaggaagcattcgccgcacacgttggcggtgccttcgttcatgcttgccccggagccggaaagacccgcacgatcattgcgcgcctagcaaggatcgtcgctacgttgccaccacgccgtggtgtggctgtactctcgttcacaaacactgccgtcgatgagtttcgcgaacgctgccaggccgcagggctcgacgctctcttgaagcatcctagtttcatggggacgcttgatgccttcgtgaggcgtttcgtggtgctgccaagttgcgcggcaacaagcacgacgcgaccaatcatcctcgatagttgggatactctcggtatcgagatccggttgtctggacagttcgcctttcgaggtgatcccgtaagtctggatctattcgacccggaaaccaatgtcattgatccagcaaagatcgggcacgccggattgcaaaatcacgtacgccaacatcaagctcgatatcaacaggctgcggcaatccggcgacgcggcttgctgcaggcaggctatctgagtgctggcgatgcccgcgttcaaacgctgcggttgattcgtgatccagtgcatggcggaccgctagtccgcgcactttcggcacgcttccacgaagttatggtggacgaaggccaggattgcaatccgctcgatctacacattctctcgtggctaagagcaaacggcgtgcatgtcaccttcgtatgtgaccctgaccaagcgatctacgaattccgcaacggcaatcctgcaggtattcaggaattcaaggaaacgtaccccgttgagtcgcatcggaggttaacaggcaattttcgtagcagccctgcggtctgtcagttagccgccacgcttagggacgctggccaggtggaccagtccgttggtgacaccgcgaatgttgagcacccaattttgcttctgacatacggtggtcgaggccctacggcgacgatcggtcaggctttccttgatcgggttgctgaacttggcttggattcaacggacgcgattatcctggcgcattctggcaaggtcgctcagcgggccgctggcacggctcctaacgattcgaacggtagctcgcggatcgagtcgcttgctcgtaaagtggcggagttctggtcaccaaccgcgacggcgagatcgagggaagctgttgttcaagtcgtggagactgttctactagaccttatggggctacgccaaccaaacgagcatctgttgagagccgccgaacgcctcggtctggatcgccgagcgcatcgaagatgtgtactgagtttcctaatgagccttcccaaagagtgcggaaataccgacgccgatcggctcaactggattgcccgtgtgcatgcggagacggaacgactgaacctttccctaccggctggtgtgaccgtgcgtaatttttttcggcgaccaaccaatgcgcaatggtcaaaccatcttcaattgccgatcgatcttggcattgcatgtgccaagattcacgaggcgaaaggccgtgagtacggtgcagtgtgcgtcgtgattccacccaatcgtgcgcctgaaaaccggagtgaggctctgttcgggtcgtgggaagcacgcgccgacgcagagtccaagcgcgtgctatacgtgggtttgacgcgtgctcagcatctgggggtgcttgcagtgccactcgccttcgctaatcgttgcgttgcggtgctgaccgcaggtcaagtgccccacacaagaagagacttataa

SEQ ID NO: 280962 - DNA, 1752 bp, Morganella morganii
atgtatttgggcggcataacaatttctcgctttcggtcttgcgacaatgtgaccgtcagcctccgtcctgatctgacggtcttggtcggtgagaacaatggtggaaaatcaaacgtcgtagatgcgattcggttgctcaccttgccgttaagcggacgccgggagcggtatccggaggatgaagatgtacgacgccacgcgacagtcccgaactttcagatcgagggtgctttccgagaactcagcgatacgctgaaaggactgctgatctcggcggtccctgatcccaccaaggacgaagccatcttcggctatcggtatgaggcacggtccgagcgcgcgccgcgtggcaagaccactatttgggccgggcgcttcgacgccaacgaaccagaggctggttcctctgaactgatccggcatgtctatctgcctcctttacgcgatgcgcatcaagcgcttggcacaggtagcggtacacgggtcatggcgctactgcgcaacttcctgccaaaggatcaagaacaagatttcctcgctggcgtcaggcgcgcggatgatcggcctgagattctgacaacgatgaacacggagattggtaccgccctaggtttgctgaccaatggggtccgcccgcaaacagcagccctggactttggcgccgaatccttacttgatgtcgcccgtgatttgaggtttcgtctgggcgattccggtctagtgcccgaagacatccgggcctcaggtctgggctactccaatctgctctacatggcaacggtggtcgtcgagttggccaaagccaaggaagccgacctcacaatttttcttgttgaagaacccgaagcacatctgcacccacagttgcaggtgctggtgctcgaattcctgttggatcaagcacgccaatcggctagtcgcgccatcgagcctggcaagccggaaggccgcatccaaatcgttgtgacgacccattcgccgaacctaacagcttgggtctctccgatgcatctagtggtcatgcgttcgcgtcgtcgcgaccaaaacggggtagcggtctcagagtcggtcagtgtgcccatcgctgaaatcgggctcaagccaaagacactggataagatcagccgctatctggatgtgacgcgctccgcgctgcttttcggcaacagggccatcctagtggaaggaatcgcggaagcgctactgttgcccgtgttggcgcagaagcttgttctcgtcggtgatgctgatggatggcttcggttcaagggtgcggttatcgtgccgatcgaaggcgtggacttccgcccctacgtagaggtgctgctacgtccacatggcgatgcacgcatcgccgaccgactgattgtgataaccgatgcggacccaacggtgttgggaaaccggaaggttgatctggaaaacctcgctgcaacgcatggtgcaccccaggcactgactgtgctaaccaatcaacacacgttggagcacgagattttcagcgctggaaatgaagcctttctcaagggcgcgtttctgcgtctgcatcgcaactcacggcgtgactgggaagatcggatcgagagagttccattgcaggaccgtcccaatgcctttcttagactgatagagacgaagaagacccgcaagggggacttggcccaggccatggcttcacgcattgctgcgggcgagccgtttgttgtcccgccctatctcgcagatgcgattcgtggcgctgcacaagcatga

SEQ ID NO: 280963 - DNA, 1059 bp, Morganella morganii
atgaccaagggacagcaagttttgctcaaaggcccccggatggaggagttgttgcgaagctatttcctcaaagccggctactacgtagttagaggggttccgtttgtctatgaaggttttgacgtcaccgatattgatctgtggctctatagtcgtacgtcatccgtgtcacgtgaaatcactctagtggatgccaaaaacaagaagacaccacaagctatagagcggatattctgggttcatgggcttcgcattgcgaccaaagctactaatgcggttgtcgcgacgacggagaagcgtcaggaagtaaaggattttggtcgagagttgggaatccttgtcctcgacggaacctttctgagcaagctagacaaggcggatgcgcccaacgcgttaaggctctctgacgaagaattcttctcaaggattgatgaatactctctgagtaagctcgatggcgattggcgcggtcgcatggctcattccaagagcttgctggcgaaatcactttcgtttgacagttgcaatgaatggctcatgcaaggcaagttttttgtggagcaatcgataacaaagaacaatcagcgtgaggttgctttgcgctgcctgtacatggtttgttcgttcattgcggtcgcagtggacttttgcatgaaagagatttcgtttcacgagcaatcggagcgcagtgcactcatcaaggacggattcacttatggctcgaaaggtagtgcgggtctcaagaagatattgactgtctcgatggggcttattgagcagcatgccaatgatggagctgccactgccaggcaagttcggtccagcattgaacgccaattggcggatctcaacacggccgtcctcggcgagttttttgcaaagcatgacgtctccagaacgctcttcgctgtggcgaaagagttcgagcaactagcaatgagcagggatttttcctccgacgcgacggcgacgcccgagcttcgtagcatgctctattgcctcctcgactactgggaggttgatcgagttatgttttcaagcgttttaaaggacagttag

SEQ ID NO: 280964 - DNA, 1263 bp, Morganella morganii
atggacaagaagaccaaggggtcgtggttaattcatcacaccaataaactccagggaataacgaatcaagccggctacgacaagacctttctagcgggtaaggctggcattttgctctctgcaatatcgtcaaataaccatgcaacactcaacaatgatcgtctgaacgttttagcgcaagcggcgaacatcaacacgacttttgagcttcctaaactcattgaagttctgaagcagcagcaactagttgataccgcaaacggtggcgttgctgttcttggcgtcacaactgcgaagacccttcaacatacatcagatatattcgacgctctcatgccaggcgcatctgaggtcgcttcgattgctcttgcggaaaaagcatcggtagagcctgtgctgtcaggccatgtctccacggaattggctgacttttataagctagcaaagcccgatattcagcggctgatgtctgatgctgaacaaattggattcgtggatgccgaggatctcggtgccggacaaacattgttatttaatgggaatctcttccgtcgtgaaacgacccgaaaaataaaagctgttcttgactctctttcatcggccgagcaggaaaaactcaatgagcttactgatacattgaaaaagcgtgcctgcgtcagcacggactacgcgacgcaacttctcggggagccacttttcaagaaggtcgcggcaattgggttgtttgatatcagcgtcgtcagtaatacaaccgaggatgccggatttctgacgctgccatctgccttctcgaagtacagcaattcgatggtcgatgacgcatttgatctggctaaagcgtttgtcagttccgtgacctatgggatgaccaagagcaattatgccaggggacagattcagatggttgacgcgctactgagcgccctggttcggggtgaaagcgtgggaccggtgaatgccattgcgcaagactataaagtgctggaattgaaaggcgttgtcgaagttaagcatggtacgaaaaagggtcgcagcggcccaatgctgaagttgttaaaaacggaagttggtgaacttgctctgcaagccatcaggcaaggcgatgtcagcgagcattctctcaactcacttccgactgcggcagtcactatattcaacggccctgaacacaatcgtgagaaagttcggcgagcacaaatcaaagcaagccccaaggctaccaacgacatgctctctatccttcgcacaggagggggcatatga

SEQ ID NO: 280965 - DNA, 363 bp, Morganella morganii
ttgcgactaggacggggactggaatacgggggcaacatcacgcccacgggggagcacgagttcgatcagttgtgccaagcgctggggattgagcaccggctgaccaagcccaaaacaccgcaaaccaatggtatggtggagcgcttcaatggcaggctcagccaggtgctgcgctcgcaccacttcaatagctctgaggatctgcagaagacgctgcaccggtttgtatggctgtacaaccaccacttgccgcaaaaggcactggggcatgtcgccccagtgcaagcgctcaaagcttggaagatgaaagcccttgatttattcgtcaagaacgtgcgcaatcatccgggacctgacacttag

SEQ ID NO: 280966 - DNA, 894 bp, Morganella morganii
gtgaagacggtctgccgcacgatggggctggcgcgctcgcatgtacgtgagctgagcagacgcgacgatagttggacagacgggcggcgccaccgcacgcccaagggggatgcccagttgctggacgagctgcgccaggagattgcccagctgcccagctatggttaccggcgtgcctgcgccttggtgaaccgccaacgtagcgccacaggcgatgtgcgggtcaatgccaaacgcgtctatcgcgtcatggcacaggcggggctgttgttgcccaaggccccgcgtcggcgccattcatcgcgcgtgcatgaaggccgtgtggcagtggcacacagcgacctgcgctggtgctctgatggcttggaaatcaagtgcgactcgggtcagacggtgacggcaacattcaccaaggactgctgcgaccgcgaagttctggcctggcgtgcatgggagggcaaagggctgccgggggagccggtgcgcgagatgctcattgaagccgtggagcggcgcttcggggcggccgatgccatccctgcaggccaccaactggagtttctgagcgacaacggtggtgcctacatcgcggcagaaacgcgagcgctggcacgctcactgggtctcaaacccatcaacacacctgtctgcagcccacaaagcaacggcatggccgagagcttcgtgaacaccttcaaacgtgactacgtggcgcgtatggaccttcgagacgtcaagacggtgttggcacagttgtcggccgcctttgagcacttcaacgaggtgcatccgcattcatcactgaaaatgcgttcgcctcgggagttcaggaggcagcgggccaaacaagtgagccaggagccatcgaagaaccaggcggtttattgcgactag

SEQ ID NO: 280967 - DNA, 393 bp, Morganella morganii
atgaatatgactaggcatacggagtcggtggaggtgatttttaaagaccagcgccgcaggcgctggtccctcgccgagaaatcagccctggtgcggcgcacctacgaaccgggcatgagcgtctcgctggtggctcggcaggaaggcgttgccgccagcttgctgttccagtggcgtaagctcgaacggcaaggcgcactgaccgccgtctctgctggtgaggcagtggtgccggcatccgagttggcagcggcccgagcggaaattgccaagctgcagcgcgtgctgggcaagaagaccttggagaacgaaatcctcaaggaagccgtggagtacgccgccgaaaaaaagtggattgcgcgctcgcccttgttgcccggggaagaccagtga

SEQ ID NO: 280968 - DNA, 663 bp, Morganella morganii
atgttgattgccttgcacaagaacgccacgacaacccctgccacacgcttggcactgcagcaggccagcggcactgaccgggaattggcccagcagtacggtattggcgtggataccgtgcgcaagtggcgccaccgcagcaccgtgcaggacgccagccatacggcgcaccgactgcaaaccaccctcaatgcagcgcaggaggagttggtgatctatctacgcacccaactactgttgccacttgatgacttgctgtcagtggtgcgggagttcatagagcctgccatgagtcgctctgcattggatcgactgctgcgcaggcgaggccatagcaggttacctgcaccgcccaaaccagacagcgagcacaagcccttcagagcctatgagccgggctacgtgcatatagatgtgaagtacctgccccagatgcaggacgaagcgcaacgccgctatgtgtttgttgctatcgacagggcaacacgctgggtgttcattgccatcaagcagcacaagacggcagcgtctgccaaagccttcctcgcagcggtgcgcaaagctgcgccgttcaggattcgcaccatcctgacggacaacggcaaagagttcacagaccgcttgtttggcgggcgcagccacccgcctgagatagccccctga

SEQ ID NO: 280969 - DNA, 1722 bp, Morganella morganii
ttgattcatcacattttcagcacgctacccagcttcaagagcctggaagacctgaagccaggtctgaatgttttgcttgctcagaaaaccgagggggcaagcagcaagcagacgcgcaatcgggcgggaaaaaccagcttcgtagagctggtgcattttctgctcggcgccgacgctggtcctgaatcgatcttccgcacccaggaactggttgagcactccttctgcatggacttcgatctgaagtcggagcgcaccgttgttgagcgcagcggtggcaccaaagcaaaaatctttgtgactgccccgcctgctgcgaaggtcaagttttcggctactgagtggtgcgcattcctaggcgagcagatgtttggtttgaacagcctggaagctgccggcagcaagccgccgtcgttccggtcgctgttcgcctacttcgtgcgccgacaagcgagtggagccttcacgacgccggaaaagcaggccacgatgcagggcactggcgacatgcaaatggcgctcatgtttctgcttggattggactggcagattgcgcgcgattggcaagcagttcgagaacgagagaagacgctggaagagttgaagaaggcggctgggaatggtgcgttcggatcgatcatcggcaaggcggccgacttgcgcactgagctgacgctgcgcgaggcccgtctcaagaagcttcatgcagaagtagagacgttccacgttctgcctgaataccgtgagctggaagttgaaagcgccgcactgacccgtcagctcaatgagttggccaacgccaacaccatcgacttttcagcgatccgggatctggaaagcgcactcgcgtccgaggttcctcctgatcttgaagacctgcaggccgtctatcaagaagcgggcgttgtgcttcccggcctggtgaagcgccgctatgaagacgtgaagagttttcatgaatcagtggtccgcaatcgcaaggactacctatccagtgaactcgaagctgcaaagttgcgtatcgaactacgcgatggaaaaaaggcgctgctcgaccgacggcgtggtgaagtgttgggcattctgaagagccatggtgcgctggaacagttcctcaagctgcaaggagagctgggccggctggagtccgaagtggagtcgctgcggcaacgcttcgaggcagccgaacagcttgaaggtacaaagaacgaactggagattgagcgcaatcgcctcaccatccgcctgcggcgcgatttcgccgagcagaaagatcgacttgcggaagccatcgttgcttttgaggagacctcgcagcgcctgtacgaatcggccggcagcatgacggtggacgaaacgtccaatggaccaatgttcaagtttccgatgcaaggtcaacgcagcaagggcatcaagaatatgcagattttctgctttgacatgatgctgatgcgactgtgcgccaagcggcaaatgggacctggattcttgattcatgacagccatctgtttgacggcgtcgatggacgtcaagtcatcagcgcgttgcgtctggggtcggagatcgcgcaggagctaggcttccagtacatcgtgacgatgaatgaggacgatgccttcaaagagaccatcgatggtttcgaccttaacgactatgtactgcccaagcgcctgaccgacgccactgaagacggaggcttgttcggaattcgatttggatga

SEQ ID NO: 280970 - DNA, 249 bp, Morganella morganii
atgattctgccctccaagcatctgcaacaggatcgagcactgttgaccgtcggcgcccacgttttgacctaccttgtgcggccaaagacagtctctgcgttgtgggaggaactgaacaagcatgaaccaggtgtagccacgatgcctcgcaaaattacctatgactggttcttgctcgcgctcgaccttctgtacgccatggggaccatcgaactcgaaagcggcctcgtggctcggagggcgccttga

SEQ ID NO: 280971 - DNA, 921 bp, Morganella morganii
atggatcgcttacagcagctcaattacgaaaaagatttccgcatcgccttcttggaatccaaaggggacggttttcagcgtctgttcgagaagctgatgtcgaaagtccatctcaatgatttcatggcatgccgcccgtggggcaatgttggcgatcggaagaatgatggatacctgccgtcggcgcgcatcctctaccagagttacgctcccaatgaattgaccgccgccgaagcaatcaagaagatcaatgaggatttcgacggcgccaaagaacactgggaaaaatatttcgatgagtggacctttgttcacaatgcgcaggatggccgtttgggccctcacatcatcgaagcgctggcgaaactcgggcaggacaacccgaagatcaaaatctgccactgcggttatgaggagatgctggcgaagtttcgccagttgagcttacaagatctggaatcctggttcggcccgtcgctgacgatggaagcgaatgtcaatttgggatttggagacctggtggccgtcctcacgcacatcagcatcacgcctgtgcccacggccagcgaagtgaaagatgtatcgcgcggcaagatcgaagcaaacctgctgtcgcaggctgtcgccgactttctgaagatcggtatgcagaagtcaacgctcgttgcgcagttcttcaataactggaagaacccgacctacggcgaacagatcgcgcaggcgttcaaaagtgaatacgtgatgctgcgagaccaggttcccgcactgcaccccgatgagatattcggccggctcgaaacgtgggccgggggcacagccaacaccacgccgacacataaggcggcagtgctggccgtcatggcatatctgttcgacaaatgcgagatttttgaagatgctcaagcggtgggggctgcatga

SEQ ID NO: 280972 - DNA, 192 bp, Morganella morganii
atggcatccagtgacgttgttcgagcccggattgacgggcatatcaaagaggaggccacaaacgtgctggccgggatgggcttgtccgtatcggatgccatccggatattgctgactcgaattgcggctgataaggcgctcccatttgatgtgaatcggggacagcagcagacgaataccaagaagcaatga

SEQ ID NO: 280973 - DNA, 510 bp, Morganella morganii
atgtcgcaactgtccttttcctggttcgattcctcgttgatggttcgtgacgcgcatgggcgctatctgccagcatcggccgacgacattctggaagctgcccgtcaaatcatcgaccagaagatgcagcgcggggctgagttcacttcgccagcgacggtcaaggagtaccttcgcaccaagctggctggcttcgaccatgaggtgtttgcagtgctcttcatggatacacgtcatcgtctgatcgaatacagggagatgttccacggcaccatcgacggtgcttcggtgtatccgcgcgaggtggtcaaggaggcgctgcggctcaacgcggcggcgatcgtcgtttcgcacaaccatccgagcgggaaccctgagccgagcgcggccgaccgggcgctgacccagcggctcaaagaggcgctagggcttgtggacgtgcgcgtgctcgatcacatcatcattgcaggcaacgcatcggaatcgttcgccgagcgtgggctgatctag

SEQ ID NO: 280974 - DNA, 303 bp, Morganella morganii
atgcctgaaatcaagaaaagtgacctgaactacgacgattacagctggactgctgtgccgggtgacgatccgaagaagacgaaggaagatgcggatcgcttcagccgcaaggaaggctatgaggtactcaccctgctgaactccctcactggggagaacaaagccgatctctccgttcgcgttcgccaagtctgcgagtggatgattcatgagaaattgccctccgacattcaaggccgctccaaggtgaagaattggattggcaaaaactattcggaactctctcccaagtatcctcactga

SEQ ID NO: 280975 - DNA, 1602 bp, Morganella morganii
atgacagcctccgctcaaattgacaccaccggcctactcaccatattgggcgtcatcgctgcagtgtgggcgctcatctctcccaccaaccgactccagcttcgcttctgcacgacttgggtggattggatcgtgggcggatcggtgcttcttcttgttcactacttgacgttcgccccgacccttgagcaacttgggctgtactacagcttgggaccttggaaatggggactcgacagttccagtgcggtgtatctgctgctgctctcggtggcactgtactttttttggcgaacacgctttccgacgctggcccggggccgagtgcacgtttttcgtgaattgatcgaaaacttgcacctcaccaggcgctatgacgagctggtactgctggtcgaaccccaactacccgcactcatttccatgacacggcaacagtcttggctggtgcgctggatcgaaaaccgcggtaattccaaggaagaactggcggcgctcttgcgcggggagcaccccaaacctccttcagcttggagcaagcagtggcgccgctttctgcacgcattgaaatccagatgtgcagagcgagaccaagccagctcacaagcccgggagatcctattgaatctacttacctcacctgagttgactattcacttggcgcaagcgcacccacatttctgtctcaagcttctgaaagcggacgaagcgatacgttctgactttattgcgcagtacatcgacgcgctgctggaagccacgggaagccgcctctacgttgagctgaagaacaatcagaacctcaatggcggaagccgtctttacctgacggaaagcaatcgactgcttcgctttttcttcgccgatgcagcgatggcggtaaacaacgacgtggagtctgccataggcgattccgtacgccgtcgattgggcgaagacaagaatttggccgaaaagctcaacgaaccattgggctcctaccaagagttcgggcgttttcgctgcccgatcaattcaggcataacgctctttgagatcatggtccatgaaggcatccaccaagggctgcaagaccatatgtggctgcactacttcgggcacttcgccgagaagatcctcaagcagatgcctggcgcccccgacgaagaggcctatctggagtggccaacgccatttcactaccttctcggccgcctggttggcgtcgctatggattgggctgagcagtgcgcgcgcatagatgattccgaaatcccacaggcaacccgttgtgccgttaatttcgatcgccactacatatccaagcaagccaccaaggtaataggggcgatgctgcaaggcatcattccgagtgagaagctatcggcgtcattcaaggcgcatctgctggaaatcgtcattcgcagttacgtaaggctccagagcgatccgaggatggccgatgtagcagcgtcattcctgaaggccgtgatcgtcggatcagatttacctacaaaggacgcttaccggcaggagcttcggaaggtattcggaaatctggatcacgttctgcgagaccaggcgtccaccttcaaaacagcgctggacgcctcactgccttga

SEQ ID NO: 280976 - DNA, 1140 bp, Morganella morganii
atgcgctatacatccgaagacgaatcattccagggacagaatcgagacatgaccaccgtctatattgatgaaagcggccacagcggggacatgattaacagcggcaatgcttacgatttcaagggacagccttactttgccctggccggcattggtcttgaggacggtcatgactgggaagatcgcatcaatgtgcttcgaagccgtcaccgcattccagccggcgaactcaagtccaagtcgctgacagccaagccaagattttcggctgacgtcatccatggattgctcgatcaacgcgctccgcttttcatcgagctggtcgacaagcgcttctttatctgcaccagcatcacctcgttccaactcttgccagcatgtcttggctataccgagtccgtggagctccacttcatcaagaacacggtggcagacttcctgtactttcacgcgtccgaacgcgtcctcgatacattcgtcgcctcgtgcctggcgccgggtgacgggacgctccgcgcctcattcgccgtgctgcgcgacatggccacagatttgggctataccggatcggccgtgcaaatcgcggaaggcattacccacatggtgcaggaggctgaagccgaatacggcgagcaacgtgataacggtggcgaggcttggtcgcggtttcttccgccccccgaccttaacaaacatgcgaaacaggtctggatgttgccgaacctgacgtcattcacgagtatctacgccaggatgaatcgctattacggcaggcgcttagccggcatccgcttggtacacgaccagcaattggagctggagaacattctgcgccacggaaaaattacggccgaaagcctgagtcactctgtcgatctgccctacacaccgcagtctgactaccggttcgaggaagaagccagcatcgagtttgcgcagtcgcatgaggccatcggcgtgcagctggccgacatcgttgccggcaccgtgatgcgctactttcgcgacaccgacgccggcacgcaagtgtcgagcgaactgcgcgaggccatggtgcgactcattgacgagggtgatgaacgaaggggctatggcctcaatcaagtcgtagccactgccaacgtccggcatgccgaataa

SEQ ID NO: 280977 - DNA, 831 bp, Morganella morganii
atgcaactcgcatcccgtttcgcttcccgttccccgtcgctgcgcagcgattacccgctgtccgacgatcagattcatcgcgtagcgccgtccatcttcgcggacgcgccgcatgaaagccgttcgcagcggtacgcctatatccccaccgccgccgtgctggccgagcttcgcaaagaaggtttccagcctttcatggtgacgcaaacccgcgtgcgcgatgaaggcaagcgcgagcacaccaaacacatgctgcgcctccgccatgccagccaggtcaacggtgcggaagccaatgaaatcgtgctgctgaactcgcacgatggcaccagcagctatcagatgctggccggaatgttccggttcgtttgcagcaatggccttgtgtgcggcgacaccgtggccgatgtgcgtgtgccccacaaaggcgacgtttccgggcatgtcatcgaaggcgcttacgaagtcttgcgcggcttcgaccgggtgaaggattcccgcgatgccatgcgggctatcacgctggacgaaggcgaagccgaagtgttcgcccgttccgcgctggccttgaagtacgaccctaccgacaacaagcccgcgcccatcaccgaatcgcaaatcctgatgccgcgccggttcgatgaccgccgcccggacttgtggagcgtgttcaaccgcacccaagaaaacctgaccaaaggcggattgcatggccgcagcgccaacggacgccgccagcaaacccgcccggtgcagggcattgattccgatgttcgcctcaatcgcgccctctggatgctggccgatggcctgcgccagttgaaagcctga

SEQ ID NO: 280978 - DNA, 2067 bp, Morganella morganii
atgaacgccattacccaaaccgaagcccgcgccctcaacaccgccgccgctatcccgctggaagccgccgacccgaccaagaacctgattttggttccgctgtcgcggctggtgtcgcgtcctgctggccgcaacgtgcgcaagaccccgcgcatgtccattcccgaactcgccgcgagcattcagcgtgtcggcctgctgcaaaacctcatcgtcattgccgccgccgatggcgagcattacgaagtcgtggccggtggccgcaggttggccgcgttgaagctgctggcgaagaagcgccgcatcagcaaggaatgggaagtgccttgcctgttggtggccgatggcaccgcccgcacggccagcctcaccgagaacgtgcagcgcgaagccatgcaccccgccgaccagttcgaggcattcgccgcgctggtggccgaaggccgacccatcgaggacatagccgccgatttcagcgtcacgccgctggtggtgcagcgccgcttgaagctggcgaacgtctcgccccggctgctggccgactaccgcgccgaagccgtgacgctcgatcagttgatggcccttgccatcaccgacgaccacgccgcgcaggaaaccgcgttctacgacgcgccgacgtggcagcgcaacccttcccaattgcgcgaccgcctcaccgagcgcgagattgacgcataccggcatccgctggtgcgtttcgtggggctggatacctacggagccgcaggcggtggtgtgcgccgtgacctgttcgcggaaggtgacgcgggcgtgtatctgaccgatgccgcgctgctggaacggctggcgcaagacaagctggcaggtatcgccgccgaggtgaaggacgaaggctgggcgtgggtggatgccacccccgccgtgacccatgccgacctgcacgccttccagcgtgcgccgagggagcgccgcgaaccgaacaagcgcgaagcgcagcgcatcgagaagctgcaaaccaagatgcacgaactggccgccgccgtggatgacgcgcttgataccgaggacgaggaaaaggccgatgccttgcaggaagaaggcgaagccgtgggcgagcagttgcaggcgctggaagatggcttgcaggactacggcacgaccgtgaaggccgcagccggtgccatcgtcaccatcgaccgcaacgggcaggcagtgattcatcgcgggttgatgcgcgaggccgaggccaaggcgctgcgcacactggaacgcctgcgccaaggtttcggcagcgaaagcgaagccgggaacgacgacgaaggcgaggacgacgagcagcccaagaccgccgccatgtccgacaagctggcgcagcggttgagcgcccaccgcaccgccgcgctgcaaatcgaagtcgcccggcatccgcaagtggcgctggccgcgctggtgcatggcatggtgcagaccgtcttgcagggcagccactacggccacgacttgccgctgggcgtgagcctgaaagcgcaagaccggctggaaggcatcgccccggatataccggattcgcccgccgccgtggcgctgcgcgagttgcagcaggtagcaggcgaaggcttgccggaggacagcgccgaactgttcgccgtgctgctagcgaagtcgcaagatgaactggtgcggctgctggcgatatccgtggccgtcacggtggacgtggtgacaccccgcgccacgccgcagcaaccgggcgcggaactggcgcaggctgtcggcttggacatggccgcatggtggaagcccaccaatgagggttatttccggcatgtgccgaaggccgcgattctggaagccgtggagcagtacgccccggcgcacgtcacccggctggcgaagttgaagaaggccgacattgccagcgaagccgagcggctggccgatggcaccggctggatgcctgccatcttcaaggccgaaggcaccgacgacaccacggcgcaggatgcgccgcaggcggtgacgaacgacgagccggaagccatcgacaacgacgacgagcagcaggcccacgcactcgccgcctga

SEQ ID NO: 280979 - DNA, 315 bp, Morganella morganii; identical to SEQ ID NO: 199651

SEQ ID NO: 280980 - DNA, 333 bp, Morganella morganii; identical to SEQ ID NO: 199652

SEQ ID NO: 280981 - DNA, 351 bp, Morganella morganii; identical to SEQ ID NO: 159041

SEQ ID NO: 280982 - DNA, 768 bp, Morganella morganii; identical to SEQ ID NO: 199654

SEQ ID NO: 280983 - DNA, 285 bp, Morganella morganii
atgcgacccgctcccttgcggcctgccgccgctgctgtcgctgcgcctgcgcagccccaacgctacctgaccaacgacgaagccgccgagtacctgcgcctgtcgccacgcacgctggagaaacagcgcgtgatcggcggcggcccgaagttccgcaagttcggccgccgcgtcatgtacgcggtgtccgacctcgatgcctgggccgaccagcgcagctacgaggcgacttccgacccggaatatgccgaacgccacgcgggcgattaccgtgatggccgctga

SEQ ID NO: 280984 - DNA, 843 bp, Morganella morganii; identical to SEQ ID NO: 161439

SEQ ID NO: 280985 - DNA, 639 bp, Morganella morganii
atgatcctcgctctgctcaaccagaaaggcggtgtcggcaagaccacgctcgccacgcacatcgcgggcgaactggcgatgcgcggccagcatgtcgtcctgctcgatgccgacccgcagggttcatccctggactggacgcagcgcagaagccagcaaggcttgccacggctgttcagcgccgtgggcctcgcacgcgaaacgctgcatcaggaagcgccagaactcgccaggcgggccgatcacgtcatcatcgacgggccgccgcgcatcgccgccttggcgcgctccgcgctgctggcggccgagcgcgtgctgatcccggtgcagcccagcccctacgacctctgggccagctcggaaatggtttcgctgatccgcgaggcgcaggtgttccggccgctgctccgcgcggccttcgtcatcaaccggcgcgtcagcaccaccatcatcgggcgcgaggcgcggcaatcgctcgccgaacagccgctgcccgcgctgcgctcggaggtgcatcagcgcatcgtcttcgccgacagcgtggccgctggccggctcgcacgcgagacagcgcccgacagtgccgccgcccgcgaaatcaccgccctggtggacgaactgctgcggtggccgacatga

SEQ ID NO: 280986 - DNA, 276 bp, Morganella morganii; identical to SEQ ID NO: 265137

SEQ ID NO: 280987 - DNA, 546 bp, Morganella morganii; identical to SEQ ID NO: 199319

SEQ ID NO: 280988 - DNA, 600 bp, Morganella morganii; identical to SEQ ID NO: 199320

SEQ ID NO: 280989 - DNA, 444 bp, Morganella morganii; identical to SEQ ID NO: 158962

SEQ ID NO: 280990 - DNA, 1983 bp, Morganella morganii; identical to SEQ ID NO: 158961

SEQ ID NO: 280991 - DNA, 1389 bp, Morganella morganii; identical to SEQ ID NO: 158960

SEQ ID NO: 280992 - DNA, 618 bp, Morganella morganii; identical to SEQ ID NO: 158959

SEQ ID NO: 280993 - DNA, 336 bp, Morganella morganii; identical to SEQ ID NO: 158958

SEQ ID NO: 280994 - DNA, 3117 bp, Morganella morganii
atgaagatcacagaaatggcgctgcgcgccagcagactcacctaccttgccgcggtcatcattcttgttgccggcattgccacgtttctcaatttcccttcgcaggaagagccatcggtcacgattcgagatgcggttgttgccgttctgaaccctggcatgccagccgaacgtgttgagcagttgatcgcgcgtccgatcgaggagcgtttgcgggagctggccgaggtcaagcgtgtaaccacaaccgttcgcgcgggcggggccgtcatacaggtcacgatctgggagcggtacaccgacctagcccccatatggcagcgcgttcgcgcgaaggttgccgatgctcagcctctgcttccacagggtacgttggggccatttgtcaacgacgacttcggccgtgttgccgtggcctccattgcggtgaccgcgccgggctactccatgggcgaaatgcgtgtgtcgttgaaagagatgcgcgatcgcctatacgcgcttcccggcgttgatcgcatcagcttctacggcttgcaggaagagcgcgtctatctcgaatttgatcgaccaaaactagcccagcttggattgaccccacaaggggtgatcgatcaactcgttaaacaaaacgtcgtgctttcaggcgggcaaatcgccatcggtggcatcaacgcttcgctggctgttagtggagaggttcgcgacgccgcttcgctgcgcgcgttgccgatcatgatggcgcaagctcagggtgcgcgcggtgcttcgcctgctccttcaatctcactgggagagcttgcgcgcgtgcaggtacaacctgcagatcctcccgagtctgctgcagtctataagggccagcctgccgtagtgatggcagtgtccatgacctcgggccagaacgtggagcaattcggcgtagccctcaaatcccgtgtggccgagcttgagaaacttctgcccgcaggtttcgagctctcctatgtgacattccaggcagacgtcgtcaaacgtgaaatgggcaagatgaaccaggtgatgatcgaaacgattgtcatcgtgctcggcgtcgtcgtccttttcctgggatggcgcacaggattcatcgtcgggatgatcgtgccgcttaccattctgggggcactgatcgtgatgcgcgcgctgaacatcgagctgcaaagtgtttcgatggcagccatcatcatcgctttggggctcttggtagacaacggcatcgtgattgccgaagacattgaacggcgcttggcagccggtgaagaccgcaaacaggcttgtctcgaagcgggtcgtaccctcgcactgccgctgctgacgtcctcattggttatcgtcatcgccttctccccgttcttcttcggccagagtgcgacgagtgagtatctgcgctctctcgtcattgtcctcgcgctcacgttactcggatcttggctgttgtgtctgaccgtcactccactgctgtgctaccacttcaccaaagtgcatcatcaaccggcgaatgacgcgcaaacctacaacacacgcttctatcgcggctatcgcaagttgcttgagtgggtgcttgaccacaaggcgatctacgttggtgtgatgacgggtgcattggccgtagctctgtacggattcacgacactgccatacgacttcttgccgaagtccgaccgagttcaattccaaataccggtgcagctcgcccctggaacggattcacggctcactcttgccaaagtgaaggaagtgagcggctggctcggtgatcaagaaatcaaccccgaaatcacggatcacattggctacgtcgctgacggtgggccgcgcttcatccttgggctcaatcccccattgccagcatcgaacatcgcgtactttgtcgtgacggtcaaggcaggcaccaacattgacgtcgtgattgcccgaactcgggcttacttcgcgcagcatcatggagatgtacgcgcagagcctcagcggttctcgctaggcactaccgaagccggcacagccgtctaccgggtcagtgggccggatcatgaggtgctgatgaatgcggcggcgaaaattgagtccgcgctacgggagctgccaggtacggccaacatcaagaacaactgggatacccgtgtcggccgtctcgatgttcgggtcgatcaagatcgtgcgcgacgtgctggcgtcaccaccgacgacatagctgcctggcttggcacccgctacatcggccagtcgatctctgtgatccgagatggcgataccagcgtgccaatcgtgatgcgcgggacgtccaatgatcggcgcagcactgcggacgttggttcgacgaccatctatccagcgtcgggtggccagccggtttccctggcgcaagtggccgatgtcacgctcgctagcgagccgtctgtgatccagcgccgcaatctcattcgtacagtcacagttcaggggcagaacaccgcatacaccgcgcaagagatcgtggatcacctcgcacctcggatcgccgcaattgaactacctgcaggctatgccatagagcttggtggagaaattgaggaatcggctgaatcgaatgcatcgctcacgcactacatgccgttcgctcttctggcgatgttgctgctattcatctggcagttcaactccttccgcaagctgatcgtgattctcgcaacgattcccttcacgttgattggggtcgtgattgcactgaaggcaacaggcactcctttcagcttcatggcgacattcggggtgcttgcgctgttcggaatcatcgtcaacaacgccgttcttctgctcgaacaaattgaacacggcctctcggaaggtctcgcccgacatgaagccctggtgggagctgcgatgcagcggctgcgtccaatcgtgatgaccaaggtgacctgtatcgcgggtctcgtgcccctgatgttgtttgcggggccgctgtggaagggcatggccatcggcatgatcggtggtctcgcacttggcacgctcgtgacgcttggcctgattccgttgctctacgaggtgctgttcggaatgaagtggccgggcagcaaacggagtcacgaggcggtacaacaaccagtgcaaccggtctga

SEQ ID NO: 280995 - DNA, 1167 bp, Morganella morganii; identical to SEQ ID NO: 265145

SEQ ID NO: 280996 - DNA, 636 bp, Morganella morganii; identical to SEQ ID NO: 158955

SEQ ID NO: 280997 - DNA, 1299 bp, Morganella morganii; identical to SEQ ID NO: 199328

SEQ ID NO: 280998 - DNA, 945 bp, Morganella morganii; identical to SEQ ID NO: 158953

SEQ ID NO: 280999 - DNA, 276 bp, Morganella morganii; identical to SEQ ID NO: 158952

SEQ ID NO: 281000 - DNA, 2004 bp, Morganella morganii
atgcaaggtacgaatgtgctgttcggtcagatagccgtggtattcggcatcgtgatcgcgggtgtgtggggcgccacacaatggacggcagcagcccttggctatcaggtacgccttggctccccctggtttgatttcctcggcacaccgatctacctcccgtggaagctgtttgagtggtggttcttcttcgatgcctacgcgccacgcgttttcgacacgggcggtgccatagcgggtggcagtggcttgctggcggtggtggtcgcagtctgcatgtcgatctggcgctctcgtcaatcacgcctagtcacgacctatggctcggcacgctgggcaagtacggaggacattcgcaaagccggccttacgcagccgatcggcgtgttcctcggtcagcacgatggcaagtaccttcggcatgaaggcccggaacacatcctcactttcgcgcccacgcgctcaggcaaaggcgtcggccttgtggtgccgacgctgctttcttggcctgcatccgccgtagtccacgacatcaagggcgagaattggcagatcaccgcaggttggcgctcacgctactcacactgcctgctgttcaatccgaccgatgcgaagtcggcggcctacaacccgctgctagaagttcggcgcggcgcacatgaagtgcgtgacgtacagaacatagccgacattctggtcgatccagaaggcgcgcttgagaagcgcaaccattgggagaagacttcgcacgcgctgctggtcggggccatcctgcatgtgctctacgcgggcgaggacaagacgctgcgcggcgtcgctaatttcctgtccgacccggccagcccgttcgagctgaccttgcaccggatgatgactacgaagcacctgggcgatgcaccgcactctgttgtcgcgtccgctgcgcgcgaagtgctgaacaagtcggacaacgagcgttcgggcgtgctgtccacggccatgtcgttcctcggtctgtaccgcgaccccacggtggccgaagtcacctcgcgctgcgactggcgtatcgccgacctgatcgcatccgagcatcccgtctcgctgtacctggtggtgccgccttcggacatttcccgtactaaaccgctcatccgcctgatcctcaaccagatcggccggcggctcaccgaatcgctcgacggttccgacggcatcgagcgccggcacaagctgctgctgatgctcgatgagtttccggcgctgggccgcctggacttcttcgagacggcgctggccttcatggccggctacggcatccgcagcttccttatcgcgcagtcgctcaaccagatcgacaaagcttacggccagaaccactccatcctcgacaactgccacgtccgcgtgacgttttccaccaacgacgaacgcacggccaaacgggtttcggaaacgcttggcaccgccaccgaactgcgcgcccagcgcaactatgccgggcaccgattggctccgtggctggggcacctgatggtgtcgcggcaggagacggcccgcccgctgctgacgcccggcgaagtcatgcagcttccgaccgacgaagccgtggtgatggtatccagcgtggcaccgatcaaggccaagaagctgcgctactacgccgacgcgaatttcaagaaccgcgttttgccgccgcccgcgctcgcggcggggcagtacgccgatgcgccaccggcccggcccgacgactggagcggcctggcgattcccgctgtaccagcggccccggctgcgagcatgtccagcgatggcgcaggcaccgccgatgacggcggcccacgccgccagccagagctatccgaagtcgccgaatacagccccgaaccgcagcccgccggcaatgacctggcgctgctcgatgacgacgacgacctgccgctgccgcttcccggccagctcgacccggccatgcagcgcacggcccggctggcttccctcgaccccaacgacggaatcgacctatga

SEQ ID NO: 281001 - DNA, 465 bp, Morganella morganii
atgagccaataccgcctcaacctgttcatccagcccgagcacgccaagcgcctcgaagaactagccgccaagaaaggcgtgtccaaatcgtccatcgtcgcggcggcgctcgcatcgtggctgtcgcccgatgcaggcgaccagcgcgaggcggccatcgccaagcggctcgatcgcctgtcgcgccaggccgagcgcctggagcgcgaccagaacatccagatcgaaacgctggcgctgttcatccgctacttcctgacggtcagcacgccggttcccgaagcccatcaagacgcggcgcgcgcccagggccgggcacgcttcgagcaattcgttgaacagttgggccgccacctgctgcgcggccgcagcctggtgcgggacgtagtggaggaactgcaccccgacccggtgcgaatggatgacgcggcggcgctggccgaagcgcaggagcgtgcctcatga

SEQ ID NO: 281002 - DNA, 1068 bp, Morganella morganii
atgagcgccgttccgcagacccagcccgaacgctcatccaccgcggcttcgctggatcgccgcatccaaatgctgcgcacggcaatggggccggtcatcgccagcgcgctggccgatcccgacgtggtggaaatcatgcttaaccccgatcgcaccctatgggtagatcggctgtcctcgggccgcatgccgctgggcgtggaactgtccgaagacgatggcgaacgcatcatccgactggtagccgcgcacgtcggcgcggaggtgcatcgcgggcggccgctgctgaccgccgagctgcccgaaaccggcgagcggttcgagggcatcttgccgccggctgcgcctgggccagccttcgcgctgcgcaagcgcgccgtgagcatcatcgggctggatcgctacgtcgccgatggcatcctgaccacagcgcaggccgagttcctgcgccgcgccgtgcgcgagcgccaaaacatcctgatcgccggggcgacgagcagcggcaagaccacgctcgccaatgccttgcttgcggaaatcgccgccacgggcgaccgcgtgctggtgctcgaagacaccatcgagctgcaatgcgcggcccgcgaccatgtgccgctgcgcacccgcgcgggcgtcgtgtccatgaccgagctggtgcgcgccacgatgcgcctgcgccccgaccgcgtgatcgtcggcgaagtgcgcggcggcgaagccctggacttggtgaaggtctggggcaccggccaccccggcggcatcgccaccatccacgccggttccgcgctgggcgcattgctgcgcctggaacagttgattctcgaagtggcggtgaacccgccgcgtgcgctgatcgccgaggcggtcaacgtcgtgatccacatcgccgggcgcggccgcaagcgccgcgtcgaaagtatcgcccgcgtcgtcggcttcgacggtgtgggctaccgcctggcggacgcgctggaaacgccgtttcccgagctgacgccggttcctctcgcagccgatgccgctgcgccttccttgtcccctgaccaacctggagaactgccatga

SEQ ID NO: 281003 - DNA, 384 bp, Morganella morganii
atgacgcagatgcacattcctgcttcccgtatttccgtaaatccggcttcgaccatcgcacgcctgcggcggctggtcggccccgcgcaccacggcctgctgctggccgccgtcatgctgatgacggcgggcacggcgaaagcatccggttcctcgatgccatgggaaggcccgctgcaaaccattctggagtcgattcaggggccggtggcacgcatcgtcgcggtcatcatcatcatcgccaccggcctcgcgctggccttcggcgacacatcgggcggattccgcaagctgatccagatcgtgttcggcctgtccatcgcgttcgcggcttcgagcttcttcctgtcgttcttcagcttctccggcggggccgtcgtatga

SEQ ID NO: 281004 - DNA, 273 bp, Morganella morganii
atgagcgggccggacagcttcgcggccggcttcgaggtgccgctgcatcgctcgctgaccgaaccgcttttgatgggcggcgcaccgcgcaccgtggcgatcgccaacggcacgctggccgccgccgtcggcctgggcctgcaactctggattcccggtgtcgtgctctggatcgtcggtcattcgctggcggtgtggggcgcacgggtcgatccgcagttcatgcaggtcttcgcccggcacatcaagcacaagcctctgctggacgtgtag

SEQ ID NO: 281005 - DNA, 2451 bp, Morganella morganii
atgctgaaccttgcagagtaccgtcagcggcccgccttgctggccgattggctgccctgggcggggctgatcgcgccgggtgtcgtcttgaacaaggacggcagctttcagcgcacggcgcgctttcgtgggccggatctggacagcgcaacgcagggcgaactgatcgccaccacggcgcggctgaacaacgctctgcgccggctgggttcgggctgggcgctgttcgtggaagccgagcgccagtcggcggcggactatccgcattccgatttccccgaaccgctgtcgtggctcgtcgatgaggaacgccgcgccgccttcgaggaatcgggcaatcacttcgagagcgcctatcacctgacgctggcctacctgccgccggaagaatcccgcgcccgtgcggccaagctgctctacgagcacgcgccgggcgatggcgtggactggcgcggtcggctcgatgccttcgtggcggaaaccgatcgcgtgttcgacctgctcgatggcgtgatgccggaaatcgcctggctcgatgacgcgcagacgctgacctacctgcacgccacggtttcgacacggcgctaccgcgtaggcgtgcccgaagtgcctttccacctagacgcgctgctggccgattccgcgctggtcggcggcctcgcgcccatgctgggcgaccagcacctgcgcgtggtgtcggtgcggggcttcccgacctcgacctggccgggcctgctggatgacctcaaccgcctgggctttgcctatcgctggagtacccggttcctctgcctcgacaaagccgaggcggaaaaggagctgggccgcctgcgccgccagtggtttgccaagcgcaagaacgtcatcgcgctgctgcgcgaaaccatcttccagcaggaatcgccgctggtggacacggatgccagcaacaaggcagccgacgcggacgcggccttgcaagagctgggaagcgatcaagtcgcgttcggctatctcaccgccacggtgacggtgctcgataccgacccggccgtggccgacgagaagctgcgcatggtggagcgcgtgattcagggccggggcttcgtcaccatccccgaaacgctcaacgcagtcgatgcgtggctgtcgtccataccgggcaacgcctatgccaacgtgcgccagcccatcgtctcgacgctgaacttggcgcacatgatgccggtgtccgccgtgtgggccgggccggagaaaaatgcccacctcgatggcccgccgctgatcgtcacgcgtaccgatggcgcgacgccgttccggctggtgacgcacatcggcgacgtggggcacacgctggtcgccggcccgaccggtatgggcaagtctgttctgctggcgatgctgaccttgcagttccgccgctatggcggttcgcgcatcttcgccttcgacatggggcgatccatgcgagcgacggtgctgggcctggggggcgaacactacgacctgggcgcggacggcggcattgccttccagccactcgcgcgcatcgacagcgaaagctaccgcacctgggcggccgaatggatcgaaggccgtttagtgcacgaaggcgtgaccgtcggccccgacgagaaagccgctatctggtcggcactgggaagtcttgccggtgcgccaatggaacagcgcacgatgaccgggctttcggtgctgctgcaatcgaatgcgctgcggcaagcgttgtcgccgtatgtgctgggcggcgcacacggcaagctgctggatgccgaccgcgaccggcttggcagcggcgacgtgcaaggcttcgagatggaagaactcatgcacagccccgcggccgtgcaagcggtgctgcgctacctgttcgcccgcttcgatgcgcgtttcgacggtgcgcccacgctgctgatcctcgatgaagcgtggttgttcctcgatgaaccgtccttcgcagcgcgcatccggcaatggctcaagacgctgcgcaagaagaacgtgtcggtgatcttcgccacgcagagccttgcggacatcaaggattcgaccatcgcgcccgcgatcatcgaaagctgcgccagccggattttcttgcctaacccgcaggcgaccgagccgcagattcgcacgatctacgagggcttcggcctcaacagccggcaaatcgaaatcgtcgccaccgcgcagcccaagcgcgattactactaccaatcgcgcctgggcaatcgcctgttcgacctcgacttggggacgactgcgctcaccttcgcgagcgcatccacaccgcaagaccaacgcgacattgaccgcgtgttgatgcaggccggcgctcccggcttcgccggtgcgtggctacgccatcgcggcctcgattgggccgccgatctgctgccgtcctcgccggcggcggcttctttcctttccaaaccacgacaggagaacctgccatga

SEQ ID NO: 281006 - DNA, 738 bp, Morganella morganii
atgaagacccgtgtgctttccgtttcgctctccgccgcgctggccggctcgctgatgctcgcccagccggcggcggcactcaccttcgttgatcccgtcaacttggtgcagaacacgctgactgccatccgcacgctggagcagatcaacaaccagatcaaccagctccagaacgaggcgcagatgctgatgaaccaggcgcgcaatctggcgaatctcgacttcaacatcgtcaaccggctgcgctcgacgctcgccaccaccgaacgcctgattgccgaggcgcagggactggcctacgacgtgcagaacatggatcgggaatttgcccggctgtacccggagcagtacgcggccaccgtcagcggcgaccagatgctgcgtgatgcccgcgagcggtggaagaacacgcttgacggcctgcacaccgcgatgcggatgcaggcgcaggtgtcgcagaacctggcgcaagacgaaagcgcgctggccgatctggtcagccagagccagtccgcgaccggcgcgttgcaggccgcgcaggcgaccaaccagcttctcgccttgcaggccaagcagtcgatccaggcccagcagctccagatcacgcaagaccgggcggcctcgctggaactggcgcggcaggcagcggcgaccgaacgcgcccgcgaagtgcggcggcgcttcctcggcaccggtacgccgtacacgccgcagtccgtcaacttctacaacaactga

SEQ ID NO: 281007 - DNA, 327 bp, Morganella morganii
atgcgatgcgttcctgtcctactggccgtgctgctgaccgcttgcggccagcagccggccgaagacctggccgcgaccttggccgccgatcccgtgcggctcaaggcgctgcgcgcccaatgcgcggccgaccggcaagccgcaggcgaagacgcctgccgggccgccgccgaagccttccgtcggcgcttcttcgccggccacaccgggccggacgaatacggctcgctggcagaactaccgccaatcccggcgagcttcgacacgcccgacgacgacgcgcagcaaggcgaggcgccgctcgccgctacggaggacacgccatga

SEQ ID NO: 281008 - DNA, 1239 bp, Morganella morganii
atgaacgacgtgaccatcatcgaccgcttcctcgatacgttttcgcgctacatcgactccggcttcgggctactacaaggcgaagtggcgttcctgacatccacgctgatcgtcatcgacatgaccatcgccgggctgtattgggccatgagccacgccacaggccagggcgaggacgtgatcgccaagctgctgcgcaaggtgctctacgtcggtgccttcgcctacatcatcggcaacttcaactggctgtcgggcatcgtgttccggtcgttcgccggtttgggcatcaccgccaccggctcggccatcacgatggagaacttcttgcagccgggccggctggcgaagaccggcatcgacgccgctgcgccgatcctcgaccagatcggcgacatggccggcttccccgaagtgttcgtgaacctcgaccccatcgtggtgctgttcatcgcttggctggtggtgatcctctgcttcttcgtgctcgcggtacagcttttcatcacgttgatcgagttcaagctgaccacgctcgccggcttcgtcttgatcccgttcgcactctggaacaagacgagcttcctggcggaaaaggtgctcggcaatgtggtttcgtcaggcatcaaggtcttggtgctggcggtcatcgtcggtatcggctcgggcctgttcgcggagttccaggttcatcccgacgaaccttctatcgaccatgcgctggtcgtgatgctggcctcgctcgcgctgctggcgctgggaatcttcggccctggcatcgccacgggcctcgtgtccggtgcgccgcagctcggcgcgggcgcgatggccggcgccgccgtcggcgcggtaggcacgggcgttgccatcggtgccgccgcgactggcgtgggcggtgcggtcatggcgggcgcacgcatggccccggccgccgccaagctggccggcagcggcgcgcgcgctgcatcgggtgtgtccgctgccgggcagaaagtggccggttccttccgtgcgggctggaacggcgcggatgccggcgctgccggttccggccatgccgccgggggcgaaggcgcagacagcgccgccagcacaccgaagcaggagcaacccgcctgggccaagcggatgcaccgccgccagcagatcacccatgccgcgacgaccgccgcccatacgctgcgcgggggcgacggcggcggctcggggcaaggcccgagcctgcgccccgatgaatga

SEQ ID NO: 281009 - DNA, 705 bp, Morganella morganii
atgcgattcaaacgcccgcaggtgcgctatgccgatacgccgcagcctgccaccccttatcaatccgccgcgcaggtgtgggacgaccgtattggatcggcccgcgtccaggcgaagaactggcgattcatggccttcggctgcctcacgctggcgctggtgatggccggcggcctggtgtggcgctccgcgcagtccatcgtcaccccctacgtcatcgaggtcgatcaggccggccaggtacgcgccgtgggcgaagccgccaccccataccgacccgccgatgcgcagatcgcgttccacttgggccgcttcatcggcatggtgcgctcgctgtcgatcgacccgatcgtggtgcggcagaactggctcgacgcctacgactacaccactgaccgcggcgcggccgtgctcaacgactacgcccgcaccaacgatccgttcgcccgcatcggccgcgagtcggtgacggtgcagatcaccagcgtcgtgcgcgccagcgacacgtctttcaatgtgcgctggacagaacagcgattcgtcaacggcgcacccgctggcaccgagcggtggaacgccgtgctttccaccgccctgcaaaccccgcgcaccgaacagcgcctgcgcaagaacccactggggatctacgtcaacggcctgtcgtggagccgcgaactggattcttccgaaggagccaagccatga

SEQ ID NO: 281010 - DNA, 993 bp, Morganella morganii
atgaacctgcctttccgcttttacgctttgccgttgatcctgctgaccctcgccggctgcgcctcgcagggcaagctgccgccgtccatctcgctcgatgagccggtgcaggcacagccgctgcccgagccgcccaagccagtcgaagtcgttgcggtgcccgaaccgctggcgctgccggcgcagttgaagccgttgcccgaagcagatgcggccccgaccgtgccggagccggccgacgagaaagtgcgcgtgtcgcgggccaacgcggaggcgcgcatcgcgccgacccgtgagggttacgtcaatgcgattcaggtctggccgtacagcgacggcgcgctctatcaggtctatgccgcgccggggcgcgtgacagtggtttcgctccagccaggcgaggagcttgtcactgtcgccgccggcgataccgtgcgctggatcgtcggcgacacgtccagcggcagcggcgccgacctgcgcgtgaacgtactggtcaagccgatccgctcggccctgaaaaccaatctggtcatcaccaccagccgccggacgtacctgctggagttgacctcgaccgagaaggcgtggatggcgtcggtgtcctgggactatccgaaagaccggatgctggccttgcagcgccaggcgcagggggcaagcgccgctgcgccggtcgataccggcctgtcgctggagaagatccgcttccgctacgcggtgtcgggcagcaacccgccgtggaagccgctgcgcgccttcgatgacggcgagaaggtctatatccacttcccgccgggtatcgcccaaggcgagctaccaccgctgttcgtcattggcgcgcagggcgacgggcaactggtgaactaccgcttccgcccgccgtattacatcgtggatcggctgttcggcgcggccgaactgcgcctgggtggcgatggtggcgacgtggtacgcatcgagcgcaccgatggcgtggcgcggaggaactga

SEQ ID NO: 281011 - DNA, 1269 bp, Morganella morganii
atgagccaggacgacactcccgacctctccacgccacaggcgggcaaggtcgcgcccgaggcggtggcgctgcgcgcacaaccgcgcccggtcacgcgcctgaatcggcgcacgctggccatcctcgccggcaccctctcggtcgccgtgttcggcgcactaatgtggtcgctgcaaccacagcggcgcggtgccacggagcagaccgagctttacaacgtcgatcgcgtctccaagtcggaagggctggacgcgctgccggcggactactccaagctgccgccgaaggtgccggagctggggccaccgttgccgggcgatcttggcccggccatcgtgaagtcgcagcagccggtgacggctgcctacgcggcccctgggcacgaccctaacgacgcgttgcgcaaggaggccgaatctgcagcggcatcgtccgtgtttttccgctcaggttcgcagaaggccgcgccggttgcgcacacgcaggtggccgcagcgccgggcttcgccgccaatgcggccttcgacccgctggcggctggcccggcctcgacggcggcccagcctgccgacccgaccgccgtacagaaccggcaagatcagaaagaggcgttccagaaagccggaaccacggaaacccgcaattccggcaatctgaccttgccggcttcgccgtatcaggtcatggccggaacggtggtcgccggggcgctggtgacgggcatcaagtcggacttgccgggcgacgtgatcgccacggtgacggagccggtctatgacacggccaccgggcacttcctgctgattccgcagggttcgcgcatcctgggcaaatacaacagccaggtcagctacgggcagagccgcgtgcaggtggtgtggaaccgcattatcttgcccgatacgtcttcgctaacgctcgacaacttggtcggcaccgacccggctggctatgcggggctggaggacgacgtggattaccactggggccgaatcttcgctggggcggtgctgacgacgctgcttggtgtcggtgccgagctggccgcacccgagaaccggcaggacggcaaccgcatcgtcgtcgccgggcgcgacagcgcccaggaaagcataaatcaggtcggccaggagatgacccggcgcaacatgaacatccaacccacgctgaccgagcgcccaggcttgccggttcgcatcatcgttaaccgcgatctggtgctacggccctaccagccgcttttcttcaacagaggagcctcacgatga

SEQ ID NO: 281012 - DNA, 243 bp, Morganella morganii
atgacgacgcgcaagctgcggctggggccgctgccaaaaaccgaatccacgaagctgacctttgcctgctcggcagccctgaaagcagaccttgatcgctacgccgcgctgcacgcgcagacctacggcgaggcggtcgatgcgacgacacttatccctcacatgttggatgccttcatggctggagatcggggattcaggaaaggaggcgtgagcaaggccacgccgccgaagcctagctga

SEQ ID NO: 281013 - DNA, 618 bp, Morganella morganii
atgtcaacgcaatatggtttctacattgattcaagtcgctgcaccggctgcaaaacctgcgagctggcctgtaaagactttaaaaacttatctccggaagtgaatttccgccgtatctatgaatatgcgggcggcgactggacagagcaggatggtgtgtatcagcagaatgtgtttgcttactatctctctatctcctgtaaccactgtgatgatccggcctgtgccaaagtctgcccgagcggtgcaatgcacaagcgggaagacggctttgtggtggtgaatgaggaagtgtgtatcggttgccgttactgtcatatggcgtgcccgtactgtgcaccgcagtttgatgaagtcaaaggccacatgaccaaatgtgacggctgctatgagcgcgtcgcggaaggcaaaaagccgatttgtgttgaatcctgtccgctgcgggcactggatatgggaccgattgaagagctgcgggctaaatacggcacactggcggaaatcgcgccgctgccgtctgcggaatacacacatccgaatatcgttttaaaactgaatgccaacagccgtcctgtcggggataccacaggccatctggcgaacccggaggaggtataa

SEQ ID NO: 281014 - DNA, 366 bp, Morganella morganii
atgggatcgggaattcatgaatggccgctgatgttttttaccaccatcgggcagagtgtggcaggggcatttattgtgatggcggcagtgctgctgtccggaaaactgtcaccggaactgaaccgtaaagtgcattacagcatgttcggcctgtgggtgctgatgggcgtgggtttcctgctctccatgatgcacatgggcacgccgctgcgtgcgtttaatgcgtttaaccgcctcggcagttcatcgctcagtaatgaaattgcggccggttcggtcttcttcgctgccggtggtttttactggctgctggcggtgctgaacaaaatgccggcggcgccggtaagctctggctgctggtggtaa

SEQ ID NO: 281015 - DNA, 210 bp, Morganella morganii
atgacaccacaagaagcagagaacggacgcagacgaatagcaagggaatgcctgaaggaattaatgaagtacacatcagacgaacagcacaccacaatactcgacaaatacacaccgaaatttaaaccacttaatcacctgcgctttccggcaaagagagtgctcgggtattacgtgcgtacgttacagaaggagatgaaggatggataa

SEQ ID NO: 281016 - DNA, 225 bp, Morganella morganii
atgaaaaaagttgaagcagtaacgacactggttttaattaatggcgaaacatatcaaatagcactaccgaaaaacatagtggcacttcaggcaaagcaagtattaatgatggctcagtcatttggcgggataatagttccttgtgattttgccagcatcaagccaatgaaggcagacgggatgccgtttgatataaatgacagcagggaagagaatgaaaaatag

SEQ ID NO: 281017 - DNA, 450 bp, Morganella morganii
atgagcatttcttttacactgatttcatgtcagatggatttcatatttataatggtgataacaatgaacaaatataacgacaaatcagactttgagattaataaggctgtggctattgcgcgtggagctaagccttttcatgatgacggctttaaaaaatctaccggttattttcataaagatgccgtaattatcaaggcaaaattcaaaatcggagcattcgacccatgcaacaacccggcggacgcaatgccgattgttattgataataaaatttcattatatgccccacgacttaatgaagattggatggctgaatatgccggaagtaccgaagatgttaatgacgggtttcaggtagattattttgatgcgcataatcaaaatccattacgcgccgctatggaagtattcctgatgatgaaggatgcggagaatgaaaaaagttga

SEQ ID NO: 281018 - DNA, 504 bp, Morganella morganii
atgaaattcagcaacaaatacgtgaaatcaaactttaaaaacatcggttatgacaataccaacggatgcttatttaacacagagactggtgacccatacacggcatggatagaccacaggggatacaaaaggctaaaccttcctgtggttggcactgtaatcgaacacagggctatatgggcggtggttcatggcaggtgccctgatatgcatatcgaccacatagacaacgacaaacttaataacagaatcgaaaaccttcgtgtttgcacacacaaccaaaaccaacataaccaagggatacgggcaagcaacaaaagcggatacaagggtgtcagctggatgaagtcagtaaggaaatggcacgcacaaatttgctgcaatagcaaagttacccacctcggattatatgcctgcaaaatcgacgcagcgaaagcctatgacctggcggcaaaagagcttcacggcgaatttgcatggttaaacttcccgcatcaatcgtga

SEQ ID NO: 281019 - DNA, 327 bp, Morganella morganii; identical to SEQ ID NO: 280894

SEQ ID NO: 281020 - DNA, 861 bp, Morganella morganii
atgaataccgcattaaacaacgtgtaccggttccccggcagagcgccggaggagcggcctgtaacgccggataaatcggagggcaacgtggcaagccttgatgatggatatttccgcaccgcaacaagcatagggaaactgaagccaaaactgaaaatgtcaggccaggagcaccaagtgtttgacgcggtgatcatgtgcacattcgggtggaataaatccgaagacaaagtgacaaatacctatatcgcggacatgacagaccttgatgattcagatgtgaacaaagcactgaataagctagccaacagacgaatcataaatttaagaaaatcagggctgttcaaaattatcagcgtcaataaaaagctggatgaatgggttcttaataggcaaaaaacagagaaagttaaaccacccaaaagttcgggtgaaaccacccaagaagttgggtgttttaacctttcaagtttggtggaatcacccaacaccaaagacagtcttaccaaagacaataaagatctaaatacccctatatcccctaaacctgaaaaacaggctaagccagaaccgtttgacgctatggggcacccgcttcctgattggctgagtcgtgatacctgggtaggttgggttacctaccgcaaagacctgaaaaagccgatcaagacaaaacagacgcttaacgggctgatatccaagctgactaaattctacgaagctgggcactcaccggaaagcgttatcgaagagtcaatatcaaatggctggacaggcctgtttatgccgaaatcaccgccgacacggcagcgcattgttcagcctaagcgcgttcagcaattcataccggaggacttctga

SEQ ID NO: 281021 - DNA, 729 bp, Morganella morganii
atggcaacagcagcgcagactctggcgcggtttaaccgcatgaagccggagcacatcaagccaaaattcacgaatgctgctgagctgatggcgtggcagcgtgagcagggagctatcgatgcgaaacggatcgccgatgaaaatcgtgttacccgtctcaataaaatcatggggcgttccggcatcagcccgttacaccaggaatgcacgttcgataactatctggcgacaacaccggagcaacagcgggctctcagtaaatcacagcagtacgcagctgagttcggtaaatcatttggcggatttattttcagcggtaatcccggcaccggtaaaaaccatctggcggcggctatcggcaaccagataatccggaacgggaaaagcattctgatagccactctgccagacctgatgatgcgtgtccgtgagacataccagaaaggggcaaaaactactgagtcgcagctgatcaacgacctgtgtgaagtggatttactggtactggatgatgtcggcgtacagcgtaataacctgaacgaagagctgattatcttccaggtggtagaccgccggttatcgaataaaaaaccggtaggcgtgttgaccaatctcaattttgacgaactggcaaaagcattgggtgatcgggttattgaccgcctgagaatgggatcgccgaccgttatcaatttcacctgggaaagcttccgcagacaggttaagtag

SEQ ID NO: 281022 - DNA, 279 bp, Morganella morganii
atgcgaaaagcaattcatatcgaagattatatttgcggcaaacaacggttaccgaagatgttccgcgcagtgcctgttcttgttgatattagcgatgaatacgattacgacgaatatatggaagctaccgtgatgattcgacgcgtaatgtcatcttgcggcggctggcgctggcaggtgataaaagaccgcacccaaaaagatatctggcaatacatggatgatctggagcggctacgtgagcggtttgaatatcattactcagtgtatttcatttga

SEQ ID NO: 281023 - DNA, 207 bp, Morganella morganii
atggaaccaacggattttgaaaagtggtgtgcgggtgagatgggttatacacctgagttcatcatgaaatggcggatgacaaacattatcggcgagacctattacaagcgcggttatattcacatcaggtatcgcgcctacatggccggagttcgcagcagactgccgtaccagacaccgccaaaaggagatgaagatgaagggtaa

SEQ ID NO: 281024 - DNA, 177 bp, Morganella morganii
atgcacttacatcctgatgtgggacgaaagaataaaacaggcggattaatccataaaaccgccctttccccgctaaaacagcaagatcacattcacaccaaaaataattctcacgactatcatttaaccccccgaattccgaaccaaaaaatcagcatattagtaactttccgttaa

SEQ ID NO: 281025 - DNA, 1494 bp, Morganella morganii
atgaaactggtctgggcgaccatcgcgctgtcgatggccacctttatgcaggtgctggactccactattgccaacgtggcgatcccgaccatttccggcgatctcggtgcttctgtctctcagggcacctgggttattacctcattcggggtatccaacgcgatttccatcgcgattaccgggtttctggcaaagcgtttcggggaagtacgggtgtttatctggtccaccgggctgtttaccctgacgtcactgctgtgcgggttatcagaaagcctggaaatgctgattttcttccgcgtgttacagggcggggtggccgggccgattatcccgctctcacaaagcctgctgctgaaaagttacccgcccgccaaacagaataccgcgctggcactctggtcgatgaccatcattctggcgccggtgttcgggccgattatgggcggctatatcagtgataacttccactggggctggattttctttatcaacgtgcctatcggtattgcggtggtactggtcagcctgatgctgctgcgcggtatggaatcgaaggtgacaaaggttccgctcaatgtgattggcttgtcgctgctggtggtcgggatcggctgtctgcaaatcctgctggataaagggaaagatctcggctggctggagtcagatgaaattgtcgcactggccattattgcagccgttgcgctggtcttcctggtgatctgggaactgacggataaaaacccgattgtcgagttgtcgctgtttaagtcgcgtaactttaccatcggcacactgtcggtcagtctggcgtatatggtctatttcggcgcaattgtactgctgccgcagctgctccaggaggtgtacggctatacggctgaatgggcagggctggcgctggcgcctatcgggctggtgccgatactgatttccgcgtttgtcggtaaaatctccaatgtggtggatttgcgctggattgtaacctttagtttcgtggtgtattccgtctgtttctactggcgcgcctatactttcgagccacagatggggttctatgcctcggtctggccgcagctggtgcagggttttgcagtggcctgtttctttatgccgctcaccaccatcacgctttccggtctgccgccggagaaactggcctcggcctccgcgctggccaatttcttccggacactggcgggatctatcggtacatcgatcaccaccacgctgtggagccgtcgcgaatcgttacatcattctcagcttacggaatccatcaccgcgtataatccggaatcggtacagatgtatcaggagatggcgcagcacgggttatcagaagcgcagacctccgcctatctggcgaaggaaattaccgcccaggggctgattatcagtgccaatgagattttctggctctccggcggcgtcttcatcggattgattgttcttatctggtttgcccggccgccgtttgccacaaaatcctga

SEQ ID NO: 281026 - DNA, 3075 bp, Morganella morganii
atgccgacattaacaactgcacaaattaaatcatcactgaactcagctaaacaatcagcaggtaaaaagctgcaatcagctggagcatcaacaaaagatgctttaaaaaaagcagccgaacaatttcgtaatgcaggtaataagcttattttgtttatacccaaagattatcagggacagggttcaggtcttaatgatctggtcaaagcagcagatgaattaggtattgaggttcagtacgaggaaaaaaatggtacggcgatagcaaagcaagtatttggtacaacagaaaaactgtttggcctgactgagcgtggtatcgctatatttgcacctcagctagataagttgatgcagaaacatcaaaatatcggtaataaactgggaggaagtgcagaaaacttggggaataacctgagtaaagcagggggcgtattatcaactctgcagaattttttaggaattgcactgtcttcaatggaattagacgacttattaaaaaaacaacataaaggtgaagatgttagttcgaatgaactggcaaaagcaagtatcgagcttattaaccaactggtggatacagcagcaagtgttaacaataatattgatgcattttcagagcaaatcaataaattaggtggtttgttgtctaatacaaaacatttgaaaggtatcggcaacaaattacaaaatctaccggatcttggaaaattgggtacagggttagatactatttccggtattttatcagcaatttcagctggttttattttgggaaatgaaaatgcagatggaggaaccaaagctgctgccggtgttgaattaactacaaaaatattaggaaacgtaggtaaagctgtatctcagtatattctcgcacaacgtgtggcacaggggttgtcaactactgctgccggggctggtctgattgcttcagcggttgcattggcgatcagtccgctgtcattcctggcagtcgctgacaaatttaaacgtgcgcgtcaaattgaagagtattctcagcgttttaaaaaatttggttatgaaggtgatagcttacttgcttctttccataaagaaaccggtgctattgatgcatcattaaccaccatcagtacggtgttaagttctgtatcggcaggtgttggtgcagctgcaactgcatcacttgtgggtgcaccgataagtgcgttggtaggtgctattacgggtattatttccggtatactggaagcctcaaaacaggcaatgtttgaacatgttgctaataaaatggctaataccattgctgaatgggaaaaaaaacatggtaaaaactattttgaaaatgggtatgacgcccgccactctgcatttttagaagataattttaagttattatctaaatatagcgaggaatattctgttgaacgggctgttcttatcactcagcaacactgggatgaattaattggtgaactggccggtgctactaaaaatggagacagagctcttagtggtaagggctatgttgattattatgaagaaggaaagcgtctggaaaagaaaccagatgaatttaaaaagcaggtttttgatccattaaaaggaaatattgatctttctgacagcacatcttcgacattacttaaatttgttacaccattattaactccgggggaggaaacccgcagcagaagacaatccggtaaatatgagtatatgacggaattgttagttaaaggagtagataaatggactgtcaaaggtgtcagggataaaggctctgtatacgattattctaacttaatccagcatgctgtggttggtcataaccaataccgggaaattcgtattgagtcacagttaggtgatggcgatgataaaatatttttatctgccggttctgccaatatttacgcaggtaaggggcatgatgttgtttattacgataaaacagatactggttatttaactattgatggaactaaagcaaccgaagccggtcgttatactgttacccgtgaactggggggcgatgttcaaattctgcaggaagttgtgaaggaacaagagactaaagtcgggaaaagaactgagaaaactcagtatcgccattatgagcttaaacatatcaacggaaattctctgacatcagtagataatttgcattctgtggaagaaattatcggtagtagccgtggagatacgtttttaggcagccggttcggtgatattttccatggtgcagatggtgatgataaaattgagggaaatgacggtaatgatcgcttatatggtgacaaaggtaatgataccttaagaggtgataatggagatgatcaattatatggcggtgatggtaacgataaattaattggcggtaccggtaataattaccttcacggtggtgatggtgatgatgaactgcaggtacacggtagtaatacccggaatgttttattgggaggtaaaggcaacgataagctatatggcagtgaggggtctgatctgcttgatggtggggaaggaaatgatgtactgaagggtgggtatggtgatgatatatatcgctatctttcaggttatgggcatcatattattgaagatgaaggtggcaaaaatgataagctaagtttagctgacattgatttccgagatgttaccttcagacaggaaggtgatgaccttgtcatgtataaagcagagaataatgtagtttcgtttggtcataaaaatggtattacttttaaaaactggtttaaacaaacatcacatgaaatttcaaatcataaaatagagcagattattgataagaaagggagagtcattaccccggactcactaaaaaaagcacttgaataccaaagcaaaaataatcatttaaactatgtggatggacataatgtatcaacctatgaaaatgaaaataatcttaatttattaagaaatgatattagtaaaataatttcagcagctggcagctttgatatcagggatacaagacctgctgatatttcatcattactgacttctcatggtatcagtaatttttcttatagcaacagtgcactgaccgtaacctcattagtgtaa

SEQ ID NO: 281027 - DNA, 141 bp, Morganella morganii
atgctgatcatcatcgcgatcattcttctgacggcctgcctgctggcgggctgttatctgtattcactcgatactcactgtaagccactgccgggtaacccgctggacggtgtgatccattatgagtgtgaagctccatga

SEQ ID NO: 281028 - DNA, 297 bp, Morganella morganii
gtgctcaccgtatgttatggccataccggtagtgatattcagcccggcaagctgtatacggatgctgaatgtaaggcgctgctgcataacgacctgacgaaagtccggcgcgcggttgacccgatgatcaaagtgccgattgatgacaatacccgggcggccatctattcatttgcatataacaccggtaccggtgcgttctcgcgttctacgatgctgcgcaaactcaatgccggtgatatcgccggtgcatgtgacgaaatgaagcgctggacattttccggtggtaagcggtag

SEQ ID NO: 281029 - DNA, 849 bp, Morganella morganii
atgtcacgcgaattcttccgaaaagttgcggataagcaacatataaaacttacttacatcactcatttctattgtaatcagcaagatatttctgaagttatcaatttgcttcgtgaatatgaaagcatgccggcatccgtgctggactatgttcagtttgtcattgttgatgactgctccccgcttgagtatgaaattcctgaatttgatttaaatctgacatggctgcggatcacaaccgatattccgtggaaccagggtggttcccgtaatctgggggtgacctatgcggcgtcagacaaaattctgatgaccgacctggatcatgtcctgccggtttcgacgtttacttatctgattaatgcggcaaacccgggccggacattctataaactctaccgccggggtgagcaggggaatctccgtaaagggcattccaatctgttctttatgtcccgcgcccgcttcttccgtttttacggttatgatgaagagttttgcggccattacggcgcggaagattaccgttttgtgaaactgcagaaatatcacggctcccgtcagcgctacctgccgaaatcggtgtatgccacagagcggattgtggatcgtgataagtcttatcatacgctggacagaagtctggaatacaacacgccggttgataaacgcaagcatgaggaagtctgcacgtatggtgcggaatccggtcattcccggctgttcctggattttgaatggaaaattctgcggtcggtctgccgtacatcgccggtagtccgggagaaaaatccgggctggaaagcccgctggtggctgcgctggttatttgcgccgctggcaaaataa

SEQ ID NO: 281030 - DNA, 543 bp, Morganella morganii
atgataaaagaaatcaattattactataacgcaagtcatccgttacggcctctcatcggtcagagctatgcaaacgaggggtcactgccgccgctgaatgcactgcgtatcgctcctgatattaaagaaggtttttgtccgtgcgagaaagatggtgcatggattaatatcccggattatcgcggtgtgacagcctgggacaaagagacggcgcgggcggtaattattgatgatgtgggcgagttgcctgacactctcaccactattgcgcctgatgtggattgcccgaagtggaacggcaaaaagtgggtaacggataaaacagcaaaaaaagaaagtgatatcgcggcagctgaggcgaaaaaacagggattactagcagaggctaccgttatcattgacccgcttcaggatgctgtagagttggagatggcaactccggaagaggaatcagccctgaaagaatggaagaaataccgggttctgttaagtagagtggacacatctctcggttctgatgtggcatggccgatcaggccttaa

SEQ ID NO: 281031 - DNA, 438 bp, Morganella morganii
atgtctgatatttcttcctggtggaacgcggacacgctgcgcgccgactggatagccggaaacggtgacctgctttctggtgatgatttgcagtcagcgattatgatcagtctgttcacggaccgtctggcgcacagtgacgatgattacgacgatgagtaccggcggggatggtgggccgataccggaactgatgggtttatcggttcccgtctctggctgctgaggcgtcagaaactgacaacgcaggtggcaaagaaagcagaagattacgcccgggaggcgctggcctggctgataactgacggggtcgtatctgatattcagatccggacacaaatagtgtggccacagcggctgaacatggttatccgctatcaccggccggacgccggtgcggaagatctgcgtttttactgggtatgggagaaacaataa

SEQ ID NO: 281032 - DNA, 585 bp, Morganella morganii
atgagtgatcaggtccgcgatttaaaaacccggatgtcgatgatgattggtgccggtaaatccagtatcaccaaagatgacggagcgatacagaccatccagtacagcaccgcactggaggtccgtgacggcacttaccgtatgacggaatttggcttttcttcctctctgccgccggggtcggatgttctgattgcctatctaggcggtaaccgttccagtgccgtagttatcggcagtaatcaccccggttcccggcataccggcctctcaccgggtgaaagcgtgatgtacaacctgtggggtatgtacatccacatgacagaggacggcattgtgattgaggccaaagataaagatgtgaccatcaataacgccgataaggtgacggtcaacgccaaaacagaagtggtgctgaatacgccgatcctgaaagtgtccggtgatgtgattgataactacggtagcaataaatccacactgaaaacgctgcgggacagctacaacaatcacaaccatgatgtgaaaaatgtcgaaccgggcagtgccacccgaaccagcaacccgattaaggagaaagtctga

SEQ ID NO: 281033 - DNA, 1071 bp, Morganella morganii
atgacggaagagacgaaaaaaaccgaagaattatcactggtgataaacggcaagcgcatttccggctgggacagtgtccgggttacccgcgggattgaacgactgccgaacgattttgaaatcagcctgatggattactacccggcaacggatgagaagcaactatttaaaccgggcgacccctgtgaggtgtttctcggtcaggatcgggttatcaccggttatatcgacacctggaatggtcagataaacaaaaaccagcatcagataagcgtatccggcaggggcaaatgtcaggatctggtggactgctccgccaactggccgaacaacgtgatcagccagtccaacgccctgcaaatcgcacagaaactggcgaagtggtacggcattgaggtgtcgagcacagtttccgatggcgggttacagattgtcccgcaatttaccctgaactggggggaatcctcacagcaggtgatcgagcgctgctgccggtactctgcgctgctgtattacgaacagccggatggaaacctgctgctgacccgcgtcagtgacaaggtggcggccagcggcgtggagcagggaaaaaatatcgaaagtgctgatttctcggattctatggcagagcgctattccgattataccggcgtgtcattgtctgttaccccgtttgccggagatgtgtcagcggtacagaacgcctcggcgcgggatccggaagcgggaaaaatgcggtaccggaattatatcaccatcatcgaaagcaccctgatcaccgctaaacgggagcaggagagtatcgactgggaaatgaaccgccgttacggacgctcaaaaatcctgagtgtgatggtggacagctggcgggatgcctccgggaaactgtgggagccgaacacgctgatcccgatagatattccggttcttggggtgacggataaattctggacgctgtcggatgtgacctatctgcgggatgccggcgggacacgtgcgacattacagctgatgccgccggaagcattcattgctgaaccgtatgaattttaccaggtaataagggtgtga

SEQ ID NO: 281034 - DNA, 501 bp, Morganella morganii
atgaaaaagctgttgttatgttttatggttttatttatgtcctgttcagccagcgcggcgtgggaatctaatgctcaggataatatctttggtgaaagggatgctttattgataggacaattaaatgtctcaaacgcagtttccttattcagatgttctggggatgatttgtcattctcatatgttgaatttatcaaagatgctgatgttaaagataggcctgctgatctcttgtttaaagtggatggcaatagcgtgattaagtttgatgcaacgttcggagttaaaaataataaggctgtagaagcgatatcttatgatgaggggcagatagttaaggcgttaaaagaactcaagtctgctaacggaaagtatctgataggtgtcaatatcaaaggagcaactccagaagatgactacaagatatcgcacccaggaaatattgcacggtctactgcagaagtaaataaattcgtaaaagcctgcgatattaaattataa

SEQ ID NO: 281035 - DNA, 1890 bp, Morganella morganii
atggcgggtaatgcctttgattttgaactgaatgcggatgaccgcgcaagcggtcagattacggttcttgaagaaaaaatccgtagtctgaatccggcactggatgaggcacgggataaactgaaactcggtggcgatgaatcagtaaccgggctgcgtggtatcggtgatttactccgtgatgtatccgaggaggcgaaatccggcgttcagagtatcggggacatgatcccgccgctgaaaaactttggtgcactggccgggaaactgactggtattggtggtatcggtgccattatcgccggtggtggcaagctgattacggggatggctgaggaaggtaaaaatatcactacatcagccgccaatacaggtatgacagtagaggaaagcacccgtctgagcgggaccctgcaacagagaggggtcagcaacgatgattcccgcagccaaatagaagggtattacgaaaaactcagtcaggctgttattggtaaggatgatcagttgctggcatcaatccgaagcattggtgctgatgtcgtccgtaggccggatggcagtacagatgtgacaaacaccttactcagtattgaaaaagcaattaaaacactacctgagcaccgtaactgggaattgcgtgacaacctgaaactgacacccgatatgattgcgctgttacgtgagggagatctgcaggggcgactggacaagtcggataaattcaacctgactatggatggggaatttgccgaaaagatgactgaggtggacactcagttaaatgaagccagcgcaaaattgtccgggaaaatgaatcagattcagaaatcgctttatgaatttattgattcacccagcatggttcctgattttggtgatctacctggcgccatgaagaatattgaagagcaccagaagcgtattaatgacaccccggataatttctaccacggtgataaacgcgaagaccttattcagcgtgctctgaaagatgatgattataaagataccctgagcgggttcgaaaaacttcgcctgattgcaaaagacccgactgatgagatgtacagcgagatttataagcgctataacgagcaatgggaaaaacaaaaagcgcaggccgaagccggtaaaagcaaaccaacgctgaatagtaaggtgcctgataactgggtgcaggatgagcaatataatccaaaccggcgcggattgagaaataacaaccctggcaacctgatcgctgcaccaaacagcacggggtatgattacggtaacgaccatcggtacgtcaaattcgggtcatccagagacgggatagcagcaatgtcacgccagctaatgcttgatgccgaagatgggctgaatactttcgacggactcctgcagaagtacgcaccagctaaggcaaaaaataacactcagggatacatagatcgggtatcaaaaggcactgggtttggtccgcatgagccgcttaatatgcatgatcctaatgtactggctaaggtcattcctcatatgattaaggtcgaaaacatcgagcagccttacagctaccaggaggtaatggatggcataatggattcaattatggatgaccgctggaaagggcttcgtaaccccgatagggtcagagaacagcgtgacatgatagccatgcagcagactcaacaacaagagactgcatcagcagcgactgactttaaaatagacaaagacccgaccctggcactactggccttcaccgagcaattatcacaagttcttcaggaaaacaaagcgggtggcacattggaaattgtcctgactaacgcggaaaccggaacaaaaagtaccgtaaacgtgaagccaaaaggaagggttacaacagcgatgaatatgccgtag

SEQ ID NO: 281036 - DNA, 369 bp, Morganella morganii
atgggcgatacatccaatcgtctggcgggaacggctcacgtctccgtcaacggcatgtcaattatggtggcggcggactttaaatacagtccgtccacggtcacccgcgaaaccctgaccggtatggactttgtccacggttacaaagaaaagccggtcgccgggtttatcgcgatgcgtgtccgtgattccggcggcactaccgtggcggattttaacggcatgaccaatgtgaacgtggtggccgaactggcgaacggcaaaaccatcatcggtcaggggctatgggttgttcagacccaggaagtaaacagcgaagacgccgtgtttgacgtgcgttttgaaggtcgttcggtaacggagaactaa

SEQ ID NO: 281037 - DNA, 168 bp, Morganella morganii
atgtttgtaaaacctgtaaaaggccgcagcgtccgctgtccggtcaaaggggagcttttgcctgaatccgggcaggacgtccccgataatgttttctggcgcacccgtctgaatcagggggatgtcgtgccgggtaatcctcagaaagtgaaggagcaaaaagcatga

SEQ ID NO: 281038 - DNA, 339 bp, Morganella morganii
atgggcgttgactgggataaacacctgctggggccgctgcataacgtctttgcggaaaaagcgcgctgggaaccggtgaaaagtgccaaaggcgcagaattttacgacatcggcggcatttttgaccgggcctatttccagaactacgaaagcactgacggtgaaagtggcatcaataccacccgtccgatcctcggtgtgcgcgatgttatttttactgtgccgccggcgaaaggggaccgggtgtttatctacagcgtcagcaccctgtttgtggtatccgatgtacagccggacagtcacggcgggacacacctgatcctgaataaggtgaaataa

SEQ ID NO: 281039 - DNA, 393 bp, Morganella morganii
atggatcagttctcacagaacccgtttcagccgggagtacgccaggcggtatttaatccggatcagctgatttccggcccgttacagaccgtgacagataccggcatgattgccaaagccggtattctgaaacgcggtaccatcctcggtaaagtcactgattccggtgagtatgcgctgagcaaaaaaggggcggctgacggcagtgaaattccgtgtgctatcctggcggatgatgtcgataccactgacagcagcgtttccggcggtgtctatctgatgggtgaatttaatcagaaccgcattattcatgatgaaagctggactgcggcagagctgaaagatgccctgcgtaagttctccgtcttcctgcgcgacagcgtacaggcctga

SEQ ID NO: 281040 - DNA, 582 bp, Morganella morganii
atgaccacgatgaatatttctgactatgcgaagcatgcggatgtgaaccgcaagacgatcacccggtggatgaagtccggaaaatacattgtgatgtccggcgatgaaatcgacgtggaggccagtgaccagaatctgaaaaagtaccgggacagcaaagacccgcgcacgaagaacgcggtgaaaacatctgctgctccggagaaaaagccggcgaaagaaaaaggcagttttcagcagcgcgccgaatcggtgtatgccggtctggtttccggcgatgtgaaagtccgggatctggaagaatcgaaagctatcaaagagcactactttgcggaactggcccggctggagtacgaagagaaatccggcctggtgctgccgtggcaggacatgatcggcaaagttggcgaggaatatcacgccatgcgcacccgcctgattgcgatagcacctgaacacggtccccgcctgcggtcgctggcactgacttcctctgatacagagtttgtggccgcgctgcaggacattattcatgaggcgatggaggagttgagccttgaccacagtgaacaggggggataa

SEQ ID NO: 281041 - DNA, 285 bp, Morganella morganii
atggctaattttactgttcgggttgaactgcgcgatgctgacagttcagactacgacgatctgtatgacagaatgtcagataatgggttttctaaatttattaccggtgacagtggcgccgaatacaagttgccgagtgctgaatactcatattcatctagcaccgaagacagaagacaggtaagagacctggtattcaggattgcccgcgaagtaaatgacgaccctgccgtattagtcactcagtcaaatggccgttcgtggaaggggttggagccgaattaa

SEQ ID NO: 281042 - DNA, 240 bp, Morganella morganii
atgagcactgcaacaagaaagattatctatcgggaaggcaagccagcaacacaatttcatggactctcagaagagtcgcagcaaaaagcgcgtgaggtattagccgggatgttgttagccaaataccaaagcggattcgatttaccggacaacacagtgaactatttgggccacagagttcgtgaagcctttgtagcccttgaaacagagaaaccggcccgcggaagcgatgaagattaa

SEQ ID NO: 281043 - DNA, 645 bp, Morganella morganii
atggcaaatctcacagacctgagcaaccagctccgaaccctgcggaagcagataccctttgccactgcgcaggctatgacatcggtcgtcagaaagattgagggtgctcagaaggttgctatgcagcgcaatctggataatccgacaccattcacggtgaagagtgttaaaagccgcggtgccagaaaaagcgacctgaaagcgaaagtgttcgtgatgaatattgccgccgcataccttgaaccgtttgagatcggcggggtgcataaactcaacgggtctgcgctgttgaacccaaaagacatcaaactaaacaaatacggcaacctgccacgtaataaactgtccagcctgaaagccaaagataatacctttattggtgatatcggtgacgttaatggtgtatggcaacggaagaaagcgaagaagggcaagaaaggccggaagcgcctgcagcggtcaccgaacggaacccgcagagataagaagaaacaaccgatgccgaaactgttaatccggttcggtgatgctctgcctgttgaacccgtactcggatatcaggacagagcgatgaagatgacacaggcgctgttgccgcaggagattaaccgggcgatagcagaggcgatacggacagcgagataa

SEQ ID NO: 281044 - DNA, 528 bp, Morganella morganii
atgaaaagggtagtcacggtattgctcaacggctgggtgtgggcggtcgtgttcttcggtctgtggatgttcagcctgttatcggctgaaaaatcagaagggcagcacaaaaacgatgtaatcaccgatcagcaaaaggtgattgataacgcttacaccagcatcgatatctttgaccgcgtggccgcagcgaacgccaaccgcagcatgcgtatcgaggccaaatcacaggagaagcagattgaataccgtaccattatccggaaagagtctacctgtaatttgtatatccctcagcctgtttctgacgggctgctcagccacgcctacgccatccgtgaatcagcaatgcgttccgctcccggtatcactgacacaaccggtactggtgccattgccacccgccgattgacatactgccaagcggttgagtggatagagcctctgctggtggcactggataaggcgaacgggcagttaatggatatccggaaagcggatgtagagcgaagagataagtcacgataa

SEQ ID NO: 281045 - DNA, 159 bp, Morganella morganii
atgccacggaaccctttaacactgatcatcattgctatcatcctgctgactactgctctgttggcgggttgttatctgtattcacttgaggctcactgtaagccgctgccgggtaatccactggacggggtgatccactatgagtgtatagcaccatga

SEQ ID NO: 281046 - DNA, 354 bp, Morganella morganii
gtgctcaccgtatgttatggccataccggcagtgatattcagcccggcaagttgtacacggatgctgaatgtaaggcgctgctgcatgacgacctgacgaaagtccggcgcgcgattgacccgatgatcaaagtaccgattgatgacaatacccgggcggccatctattcatttgcatataacaccggaaccggtgcgttctcgcgttcgacaatgctgcggaaactcaatgccggtgatatcgcgggtgcctgtgacgaaatgaaacgctggacatttgccggtggtaagcagtggcagggtctgattaaccggcgcgaaacggagaaagcggtatgccacggaaccctttaa

SEQ ID NO: 281047 - DNA, 408 bp, Morganella morganii; identical to SEQ ID NO: 280885

SEQ ID NO: 281048 - DNA, 444 bp, Morganella morganii
atggaagcagagtttctcttccacgaaacaaccaaagatgcagcctggaaacacctcaaagaagcactcgcaacaaacaaaccccaccgagtaatcatcaagccctggaaatctacccgctcactgccacaaaaccgcctctttcatcagtggtgcggtgagataagcaagtatctgtgtgacaacggctctaagttcacgcctgagacagtcaaggaaatgcttaagcatacattcctgggctacgaggtcactgaaatgatagacgccaccacgcagcatacagagcgcgtgaggactatgagaaaaacatcaaagttagacacaggggaaatgttccacttcatggggcaggttgagcgctgggctacaggcatcggttgtttagtgacgatgcccgagaattcggaatatatgaaactcaaaagggagcaggacgaatga

SEQ ID NO: 281049 - DNA, 288 bp, Morganella morganii
atggataatcacaaattaccagacgaaatccggcgaacgatagcagagcacccggtgtttgttgaagtggtggaagaatgcctgaccactgacgaacttgttgagcaattccagcgcctgtacaacgtatctctgccacgcaaaagcggtaacccactggttgacatggttgatgaagcgaccggatttaaggaatcacaaacatgggaatttctgtctcatttcgtaccatttgttcaccggtggatttggctaccactgtatagcgagggaaaattaggaggctaa

SEQ ID NO: 281050 - DNA, 1398 bp, Morganella morganii
atgaccggaaataattttaaccaggttccgcaaagcctcgaggccgagcagagtgttatcggcgcattactgctagacccacagggcgaccgcagccagatggtgttatccagacttcatccgggaatgttttaccaggcatcacacaggctgatttacgcaacaatccgtgagttaaaccgaaccagtaagccggtcgacctgatcacggtaacgtcagcactggaaagcgcaggtaaattaacactggcaggcggattctcatacgtcgctgagatcaaccaccggacaccaagcgcagccaatatcgtggcatatgccaatacggttcgggataaagctgtagagcggcaggcaatcgagaaagccggagaaatacagcggctgtttaccgaagccagtgttctcagcctggccgaaaaaatcgatatggctcagacgatgctgtccgatgtggtggagaacagcaaaaccggacgacagtcaggactgacgaatatctctgacgtgctggatgagtgggtcatcgaagtcgaagaacgattcaaagatcccgatgctaaccgtggtctgaagactggcattacgccacttgatgccatgcttgcgccgaagttcattgttcgtggatccctgttcgttgttggtgcgcgtccgaagatgggtaaaaccacagtcctgaccgaaatggctaaaaacgtttccgattccggattgccggtcgcgctgttctcgatggaaatgaccaacaagcagctggccgaacggatgatcagccagaaatctggaatcagttccaatgccctgtatgacagcggtgatgagtacgagtgggggcttatcagcaaggcaatgggtgagttaagtgagcgtcctaacatctggcttgatgatactcctggaatgacgctggcacacattcaggcggaatgccggaaactgaaacgcaagacagggaaaatcgggtttatcggcgttgactacctgacgctgatgaaggtaggcaaggcagaccggaacgatatcgcatacggcgaaatcacgaagggtctgaagcagctggcaaaagaactcgataccaccgttgtcctgcttacccaacttaaccgcaagctggaggacagggcagacaagcggcctatgccaagtgacagccgcgacaccggccaaatcgaacaggactgcgattactggctggggatctacaaagattcagtttacaacgacaacgccgacaaaactctcacagagctgattgtgcgccttaaccgacacggcaaagcgggaacagcatacgtcgagcagaaaggcctgtgcatgtttgatatcgatcagactcaggcaatggtcagagccgaaccaccggcgcggcataacccaagacagaaggacttttga

SEQ ID NO: 281051 - DNA, 189 bp, Morganella morganii
atgaacggattagatactgccatcaaaaaagcaggcggcgtccctgcactggctaagttgctcaaaattagcgatcaggcagttaggcagtgggagcaaaagggctatatcccgccagccagatacaaagaaattaaccagttgctgggcattccatttgaagaattagtccatagcaaaaaacagtaa

SEQ ID NO: 281052 - DNA, 678 bp, Morganella morganii
atgcatgacagaatcaagcaagcgagacttgcgaaaaaaatgacccaggcagagctggcggaaaaggttggcgttactccccaatccgttcagcagtgggaaagcgttactgagccaaagaaaaaccgagtggttaaaattgcggaaatactaggagttgaggctaattggttgctttttggctccgatacccgagacggcatacctgtaaaagactttaagccgagagaagtcgctgaatgggatagcagtacgcctcttgatgatgacgaggtcgaagtgccgtattacaaaagcatagagcttgccgccggtaatggatgcaatggtgggagcgataataacggctacaaactccgcttctctcgctcgacgcttcgtcgctatggtatttcaccgaaagacgtcgcttcgtttcttgtgcatggagagagcatgtcgccggtgatcccgaacggcaccaccgtattcgtgaactgcggcgataagaccattgttgatggtgggatttatttcattgagcaggacggcctgctgcggattaagcagctactgcgccagccgggaaagctgatcattcgtagctataactcaatcgacttccctgatgaagaagctgacccgacgacggtaaaaattgttggcagagtctttaactggtctgtgatggcgtattag

SEQ ID NO: 281053 - DNA, 837 bp, Morganella morganii
atgacatttcggtacgacgggcttgatgctgaaaaacacactcttgaacttggttcgctaagtgagtcattgaagggcttctccaaaatacttgtaacggttggaacattcgctgcaacgcaaaaatatataaaaaacaccccgtcacaggaagtaaaaatatacgcaaaagaggctagagcaaattgctttagtcttgatactgtcatggactttgttaatcagtatcagttgctctccggaggtttcggtgcaatattaaccgtgttagtttcatacgttttcgccaaaaactcacaaaaaaaagatgaaatgaaagcccttaaagattcgctggataaggccattgaggccttaggaaacaaagacagagataccatcgacggtctattgaaagttatagacaagatggccagcgacctgcggccagccgttaggctggcatcatccccaataggcgtttcatgtaatgagatgtcaattaagtcaaatatcccagggcataagccgaccatcatcactcagaaagacaaagaagaaattgataaattagaagatgatgagttgataggtatagcggaatatcgtgtttttgtaaccaatgtcgacgttgtaaataaaacagccaaggtgatttttgaacacgatgagagccacaagagagtcaatgctgatgtcatagaccctgctttttgtttaaaaaatagcccatatataaatgcacttagcaagtttaactcatcagggcagtcaacagactctatagttaccattacagctaaggcaactgccaagggtggcagaattaacaagctgtttatcgttgacatatcctaa

SEQ ID NO: 281054 - DNA, 285 bp, Morganella morganii
atggcaacaattactgttattccaaagaaagacaacgcgaagaaccgccggttagctaagcaaatggcgttctgggacagaaagcgtgaggagtatgcagcgaagcctaaaagccgctcagtggaggagatttttgattcagttttcggccggccggcagacgaaacagatgtgtttgcagagctgattatcgggctgaaagatgcaccggaaacaccacgcaagcagctgagaatgaaccgcaagccgattatgcctaacggtggcattacagcaagggcataa

SEQ ID NO: 281055 - DNA, 624 bp, Morganella morganii
atgacacggttaaccaataacatcaaatcagaaatcatcagaaatgccttggtaaaagcgggcattcaggaagaaaaagagctgttaagagcagaaaaaagcacattggcgaacgatgtcagaatagcggctctcggtggcgctgaaaatgctaagaaaattgatgataaatacgcgacagcgctagcaattgtaaaagaattgaaaagtgatgttgatgaatatatccacatcggtaacgccacggatgatgaaatatatccggcatttggaggtcagcgcacaaggcttcgttatgggcgtgacgaccaaggagcggtattgcgtcttctcactccgcaaaacagcaaatgcttattccctgctgaccatgagctaagcaagcggtttgctcaaatcgttgataaagaatccagcattgagaaaaaagaagctgaaataaaagcgaacgtaaaagccgctctggactcggtgactacgattaaaaaacttatttcagtatggccggaagtaaaagaaattctcccggaaggtgagcaggagcaacaggcatcactgcctgcggtaaaagtcgaaaatcttaattctcttattggcctgccaacagaatcagaagccgcatga

SEQ ID NO: 281056 - DNA, 597 bp, Morganella morganii; identical to SEQ ID NO: 279345

SEQ ID NO: 281057 - DNA, 477 bp, Morganella morganii
atgaaagacagaatcaaattcagcgacgaaatgttggccgctgttattgacggcaggaagacgcagacgcggcgactgattgagcctcaaccagaggtcacggaagactcgttgcgtgaacttggcgcgtggcaggacggctacaccctttctgagcaggtatgcgcagcgtggcgacacatgggtgatgactgtccgtatggtaaagccggtgacgttatcccgttcgcagacaaggatggcaatatcaaagggaaaattgagattgtcgatgtctggttacagcgggtgcaggacgctggtgataacgattttaaagcggaaggatacccgctggaacgcgaattaaccggcggtagtgctgatgccttctgctggtttcgtcacctgtgggattcggtcagcaagccggaatttaattatcaggctaacccgtgggtgtgggttatcacgtttaagcagattcaggaggggtga

SEQ ID NO: 281058 - DNA, 249 bp, Morganella morganii
atggataaattaaccaaaagtgaaacacaggtattaatcgattacgtaaaagggatgattcaggataataaagagccagagaaaaaggcagttattgcactgtgtgatgagttggatagagttaataacttaaagattgttggttatataaatcagcaaaatgtagacgcaatcaggaaaggatatacaattatatatgataaccaactttctgatgaatatatagcactctaccgcctagacaaataa

SEQ ID NO: 281059 - DNA, 222 bp, Morganella morganii
atgaaggttaagttattgaatgatggtggatatgctgggctggagaacattattttcccagtggttgttgaggttaacaatcattatgactcagggtttgatgttgccggatcggagctaatcctcatcggcggagatggagagcatttaaatatcaatttcgattactatttttctatcagcatcggagaatgcgaggcaatcaatgaacaaatatcgtga

SEQ ID NO: 281060 - DNA, 330 bp, Morganella morganii
atgaacaaatatcgtgacaaatcagactttgaaattaataaggcagtggctgaggaattaattcaatccggcttcattattggtgttgaatatcatgacaaacatatattagttatggataagtatgctaataattatccattcgacccctgcaacaacccggcagatgcatggccgattattattgagaatgggatatccagtttattcaacggtgacgaatggatttgtagcgccttggatggtgaatttctttccattaatgaaaatttataccgcgcaggttgtgaggtttttatgatgatgaaggatgcggagagtgaaagctga

SEQ ID NO: 281061 - DNA, 540 bp, Morganella morganii
gtgaaagctgactacggcgggagtacaacaccaaaggaattgcgtgatttgtggcaaactcccctcccgttattttcagcattggacgctgaattcggtttttaccttgatgccgccgccgataaaaataataccctctgctctcattacctcacagaaaaagacaacgcattaaactccggctggcaaagctacggctcaatatggtgcaacccgccgtattccgatatccagccgtgggtaagcaaagccgccgaacaatgcagggagcaattacagccgatcgtgatgctggttcctgccgacacttctgtgggatggtttaaatcggcactggataccgttgatgaggtcaggtttattaccggtggccggatatcgtttattaacgccggcacaaacaaatcaaagaacggaaacaataaaggctccatgcttttaatctggcgaccgtttacccagccccgccggataattaccacagttgaccgtgatgacctgatggatatcggcaaccggttactggaatcacaaatctga

SEQ ID NO: 281062 - DNA, 1485 bp, Morganella morganii
atgaagccagagcatttagcgttactgcgtaataagcaatggcgtctgaataatctgtactggatcaccgataaagaaggtcatccgtttcgcttcaaaatgacgcctgagcaaacagaatatttcgaaggcatccacaaccgcaatatcattctgaaagcccgtcagcttggattcacgactgaggtctgcattatccagcttgacgcggccatatttgaatcagctaagtgcgcactgatagcgcacaccttaccggacgcaaaacgcctgttcagggagaagataaagtacgcctacgagcgacttccggatgaaatcaaagcggccaatcctgcgagcaatgactctgccggtgagctggtattcagcaaaggcggctcggtgaccgtgtcggtatcgtttcgtggcggcacgctgcgttacctgcatgtatcggagttcggaaagatatgcgccaggcagccggaaaaggcccgtgagattgtcacaggtgcgtttgaggcagtatcaacggaatgtttcactacgattgaaagcacggcagagggtcgggctggttatttcttcgattattgccaactggctgaaaaagcgcagatgcagggcaaattattatctccgctggactggaagtttttcttcttctcctggtggaagaatccgcagtacgcaatcgaccctgttgagcaacttccgcaacgcctgtctgattattttgctgagctatccggcaagtacggaattacgctcaacgaccggcagaaagcctggtactacgccaaagaaaaaacactcggcgacgatatgaagagggaatacccgtcaatatcttcagaagcatttcagcagtctgtggatggtgcgtattacgccaagcaattccgctggctgtacgagaataaacgcattggcgaaatccctgataactcacatctgccggtgcatacgtactgggatatcggtgtgggtgactccacttcaatctggtttgtgcgtgaagtcggtgaagaatttcacatcatcgatcactactcaaacagcggtgagggtctgcggcactacatgaaagtactgaaagacaaaggctatgaatatgccagccacaacgggccgcatgatatcgacaaccgcgagttcggttcagacgcgaaatcacgccgggaactggcacaggaagggtacgaaattgacgggcaaacctactccatccgctttgaggtggtgccgaagctatccgttgatgagggtattgaggcagtgcgcgaaatcctgccgctctgtgtattcgatgagaacaagtgtggcgaaggcattacccaccttgaggcgtaccggaaagaatgggatgacaaacgcgggtgctggaaagataaaccacttcacgactacacatcacacgatgctgacggattccgttattttgcggtcagtcgccgcaacgccaaacgtctgacaaagtctctgacattcaactggaactga

SEQ ID NO: 281063 - DNA, 429 bp, Morganella morganii
atgggggttgcaactaaacccactttaaccagaggcagagccctaactttatattggccgacggtagacgcctacccgatggatagccgtgaagcctgtgccttcatgggaatatcttaccctaccctgaaaaaatggattgattccggcaggctgtccggctcgagaaaagatccgcttaagcccaaatcgccgtggcagtttacccgtgcaaattgcattgcagccatcaactacaaaatgcacaatacgccggaaagcgtgattagtgcggaagaggaaaggatatgtcaatcttccggaggggcgagatatggtacgccagttactcgcacaatggtaaaagaattaaggagtcgcttggtacaacggacaaaaaacaagcgcaggagttgcatgataaacgaaaggccgagctgtggcgcgtaa

SEQ ID NO: 281064 - DNA, 396 bp, Morganella morganii; identical to SEQ ID NO: 279186

SEQ ID NO: 281065 - DNA, 615 bp, Morganella morganii
atgtctgaagtctataaggcaataagtgccgtagccaaggaattggctgagacaggcatcaaaaaagggagcaggaattcacaacaggggtttatgttcaggggtatcgacgctgtatacaacgcccttgccccagcgctggttaagcatgacctgattatccttcctcgcattatggagcgttctgtcacggagcgacagacacaaaaaggcggcaccttattttatgtcgtggtgaaggctgagtttgatttcattgccacgaaagacggcagcaaacacacagtgaccacctttggcgaagctatggatagcggggacaaggcaaccaacaaagcaatgtctatcgcctataaatacgcagctttccaggcattttgtattcccaccgaagaaactgcgattgatgctgacgcagaggttcacgatgttgttccacgtaatccagagcagattttgggtgactataccgaatttcttaatgtcacaagtgacacaaagatgattgaggctgaataccggaaagtatggcgaatgctgaacggcagcgacaagcaggatgagtgtaaacgactcaccggcatcaggatcaacgaacttaagcaggcggcataa

SEQ ID NO: 281066 - DNA, 363 bp, Morganella morganii
atgatggaatatccacgccgcatagggaaacgttcaggctccggcgggacgtatgatgaaaattatcaacgcgccctgaaatcagcaattgagcaaatggatttgcaacggcggggaaagccaaccaaggaaccatcactgtcagagcaacggattgccgagacacttcacaacatctgccgcatcaccgcccttcgctaccctccactacctgagcatatcaaagcagcacggaaagcagctgaagctaaggtgtggagagaatggaaaactaaacatggaaaaactaccggtgtcggtggtgtcgattattacggcggcgggcgtacggaatcacgccccggccagagattgggagattaa

SEQ ID NO: 281067 - DNA, 165 bp, Morganella morganii
atgaacacatacacaatacaggatgctcaggtagaacggcaacggattgccgaacagcgcagaaaacgagagcagaaagaaaaggatgattactggtttcgtgaaagtgtcggattgccaaacggacgggtaccggcagaatttttaagcggagaattcacatga

SEQ ID NO: 281068 - DNA, 177 bp, Morganella morganii
atgtcgctgatgaccgcaaaacaaaaacacaccaaggaacaggttattgagttgttcaatcaggctgacatggatgaaaagcagattgagcagattgtgtcggagtggcgttggcgcagggagaacgctaaaacaagccgcattctccatcaatgcagaatgaggctaccggcatga

SEQ ID NO: 281069 - DNA, 549 bp, Morganella morganii
atgccgatgtttaaagtaacgtgtaaatggaacggaaaaccatgggaaaaggatatcgaggccgaggatgaggccgactgtacagaacacatgtatctgttcggtgtactgattggcaaagccgatattcaagacctgcaattaactgagataaaggagaaaaaaacaatgtcagggcacccacatgcagacctgatggctaaagccgcagagatagcgaagacggataaagagtggtattcacaatttcagcgcttgattggcggtgaatggcagtcccctatcgccgagtttgtatttctacctgaaatagaataccgcatgaagccgcgctatatcgacattaatggatatcaggttccagaaccggtgcaggagtcactggagtacggaacgggttactgtgttgtggatctcgatggtattgattatcaacgctggtgcgatgatgaagacgatgaaaatctacttaaacaagggcgcattcacctaaccagagaagcggcagaagcccaccgttccgccctgatctctttcacacagaaataa

SEQ ID NO: 281070 - DNA, 264 bp, Morganella morganii
atgagtgagctaataaaaaaagtaatttttcgattcataaaagctcccaaagtaataaaaaatttcgatgatgaagaacgcgcattactgatatattttcttaatggaaaatacaaaaaaaggaaaatcagaatttataaaaaagcagcaaagcgtttgattgataaagatgttttggaagttgttgaatccagcgtccgccccggggttaatctaattaagatatcagactgttactattctattctgaagcagaaaatataa

SEQ ID NO: 281071 - DNA, 210 bp, Morganella morganii; identical to SEQ ID NO: 277429

SEQ ID NO: 281072 - DNA, 453 bp, Morganella morganii; identical to SEQ ID NO: 279185

SEQ ID NO: 281073 - DNA, 198 bp, Morganella morganii
atgagtgacgaacgagaactgatttacagtgaagtatgcagagtaacaggcagagcggctattatgttactggattcacggcagatgataacgaaaggaaatatcaggcaattgctgtactcccataaagaacaagaaatagacagatttatgaatgaggtttatgaggttgctatcgacctgatgagcgataattga

SEQ ID NO: 281074 - DNA, 342 bp, Morganella morganii
atggcattcagtgacactgaagtcgtacaaattaaacaatgtatgaactatttcatggaaaagcgtcgcccaccaaaacatatccgggatgaacatgaccttcagtatcgtattgaagacgatagcgtaatcattttcgaggttagacaactgtcctggagcaccggacgtgcggaagaaatgctggccaaaataacaaacaacagaaacagcaactcgtggtctctgttctggtctactgagaataatgaatggcgacactacgacggccgaatgataggcagtttttctgacgcaataaaaattattgatgaagatgcaaatcatcgattctttggctga

SEQ ID NO: 281075 - DNA, 648 bp, Morganella morganii
atgaaaataggaacaaaaattagagctctcagaaaacagaagggattaacaatcctgcaattagccactgctattgatagcgacgtggggaatatctctcgccttgaaaggaatatccaaggctactccgagagcacattaacaaaaattgcggctgctcttggtgtcacggtagccgacctattctccgataccactacacagcaacaagatgataatgttgagtttgttggattcgtccccaatggcatggttaaagtagttggggaagcattcctggggattgatggcgcagtggatatgatagaggcccttgagggatgggttcaaatttacagcgatgataaggacgcttatgccctcaaagttaagggtgacagtatgtggcccaggattcagtcaggtgagtatgtggttgttgagcccaacacagtagtcagatccggcgatgaggtctttgtgcgcactgttgaaggtaagaacatggtaaaaatactgaataaaaccagagatggtagttaccaattcaccagcgtcaacaatactcacccgccaatcacagttgatccacgtgaagtggaaaaaatgcattatgtggcagcgattgtaaagccgactaagtttatcgataagtgcgagcaatcataa

SEQ ID NO: 281076 - DNA, 210 bp, Morganella morganii
atgcaaataacgcctttaaggaaaattcgtttggaaaagcaattaacaattgcagaggtggcggccgcaattaactacgatgtcgggaacctcagtcgtttggagcgtggcgctcagacggcatcacttgagattgctgaaaaattggtgaaattttacgaaaaaaaaatcactgaaatgcagattttgtatccgcagaggtatatgtag

SEQ ID NO: 281077 - DNA, 327 bp, Morganella morganii
atggaaaatgcaaatccacgcaaatcgttcaaccggtttgtgtcaaatcatctgatgacaactgctcatcaggcaatcagaaacaccacacagacggtagttgcaaagctactcggtgttcacgattcaacaatcctgcgcagaacagaaaagttaccggagatatgcgagacattagccgcggccggtatcacggattttgttttgcctggcgagagaaaaatcagtgaggaggagtatcggtttctgtggaaacagattggtgaactctctcagatgagaatcaaagaaaacgccccgactgttggagcagcagaggcgcattaa

SEQ ID NO: 281078 - DNA, 792 bp, Morganella morganii
atgaatacagcggaagtgtatgaattccctgttaagcaggagcaaccacgagtggcagacctggacgatggttacactaaactcgccaacgaactgctggagtctctttcatgctgcaatctgacagccagacagttccgggtaatgttggcactgatcagaaaaacatacgggttcgggaagaaaaatgaccggatagcagattctcagctgtcggaaattaccggcctgtcccgtcagaacgttaacaaggcaaagaacgaattaatttcaatgaattacatcgtgaaagatggcaataagattggggttaacaaggaggtttcggcgtggaaaaatcaacttagagacactgtctctaatctggagacaaaaaaagtctctaagttagagacaaatgatgtctctggtttggagacacacaaaagaaatactttaaagaaaaaagaaaatatatatacccctatatcccctaaacctgaaaaaccgtccaagccagaaccctttgatgcaaatgcacacccgctgcctgactggttgagccgtgatacctgggtgagctgggttacctaccggaaagacctgaaaaaaccgatcaggacaaaacagacactaaacgggctgatatccaggctgactaaattttacgaggctgggtatacacctgagagcgtaatcgacgaatcgatatcaaacgggtggactggcttgtttatgccgaaatcaccaccaacacggcaacgcattgtccggcctaagcgtgttcagcaattcataccggaggacttctga

SEQ ID NO: 281079 - DNA, 729 bp, Morganella morganii
atggcaacagcagcacagactctggcgaggtttaaccgcatgaagccggagcacatcaagccaaaattcacgaatgctgctgagctgatggcgtggcagcgtgagcagggcgctatcgatgcgaaacggattgctgacgaaaaccgtgtggctcgactgcataaaatcatggggcgttccggtatcagcccgttacaccaggaatgcacgtttgagaactatctggtgacaacgccggaacaacagcgggcactcagtaaatcacagcagtacgcatctgagtttggtaaatcatttggcggatttattttcagcggtaatcccggcaccggtaaaaaccatctggcggcggctatcggcaaccagataatccggaacgggaaaagcattctgatagccactctgccagacctgatgatgcgtgtccgtgagacataccagaaaggggcaaaaactactgagtcgcagctgatcagcgacctgtgtgaagtggatttactggtgctggatgatgtcggcgtacagcgcaataacctgaacgaagaactgattatttttcaggtggtagaccgccggttatcgaataaaaaaccggtaggtgtgctgaccaatctcaattttgacgaactggcaaaagcattggatgatcgggttattgaccgcctgagaatgggttcgccgaccgttatcaatttcacatgggaaagcttccgcaggcaggttaagtag

SEQ ID NO: 281080 - DNA, 444 bp, Morganella morganii
atgcaaaaacagacattccttctcaggaatatacagatactcagaaatctcaaggcagagctcgacaatctcccgcttaacgaagaattccccctcgaagtaaaaatatccgatccgaagcgaacccttccccaaaatgacatgtttcatgcgctgtgcggcaatgtagcagagcagggcattgtatgggctggcaatacgtggggattgcaggactggaaatgtattttcgtatccggacatgcaaaggcgacaggccgtgacgggacgcttattccgggacttgagggagagattgtaccgctggcaagagaaagtaccgcaaacatgagtaagaagcgcatgacaagcttaatcgaatattcgcaggcgtgggctataggtgaaggtataaaaccccgcgccgcgcgatacaggtttaatcattacggacatcaggaatag

SEQ ID NO: 281081 - DNA, 198 bp, Morganella morganii
atgaaagaaccgcacatacaccgacttctcaccaatgacgaagccgataatctctgcatttactacaggcgtaaggggtataacccggtgaagtcactgaatatcaatcctcagtatttcgacgtcaccgtgtatctgccggtagtcagatatctgaaaccaacaccacgggcaatgattaacaggatatggcgatga

SEQ ID NO: 281082 - DNA, 477 bp, Morganella morganii; identical to SEQ ID NO: 239698

SEQ ID NO: 281083 - DNA, 1260 bp, Morganella morganii; identical to SEQ ID NO: 239697

SEQ ID NO: 281084 - DNA, 1533 bp, Morganella morganii
gtgccgcgcctcgccacatcccggcggcaagccgcgggatgcgcgccactgccgtccgcccacaccggttcgcggtacgcgcgccacgcgcccgagcgcacgctgctgtacgcgttggtagaggcgcactacccggacttcattgcacggatcgaagcggagggccgctcgctgcccgggtatgtccgcgaggcgttcgatgcctacctgcgttgcggcgtactcgagcacggcttcctgcgggtggtgtgcgagcactgccgtgcagagaggctggtggccttctcctgcaagaagcgcgggttctgcccgagttgcggcgcgcgacgcatggccgagagtgcgcggcacctggtcgaggaggtgttcggcccgcggcctgtgcggcaatgggtgctgagctttccgtaccccttgcgtttcctgttcgccagcaagccagaagccattggcccggtgctgggcatcgtgcagcgcgtgatcgccggctggttggccgatcaagccggcatcgaccgcgccagcgcccagtgcggcgcggtgacgctgatccagcgtttcggcagcgcgctgaacctgaacatccacttccacatgctgtggctcgacggcgtgtacgtggaagccaccgagctgccgcggcgcgaactgcgcctgcaccgcgcccgtgcgcccaccaccgcgcagttgacccagctggcagctaccatcgcgcaccgggtgtgtcggcacctgacgcgcaaaggctggctcgaaggggagggcgaatcggccttcctggcagacagcgctgcaggcgacgacagcatggatgggctgcggatgagttcgatcacctaccgcatcgccaccggccgcgacgctggctgcaaggtcgtcacgctgcaaacgctgcccggtgacgccggttcgctggagggcgaagccggcaaggtcggcggcttctcactgcatgccggcgtggcggccgaagcacacgaaagccacaagctggaaaagctgtgccgctacatcacgcgcccggcgatcagcgagaagcggctgtcgatagcgctccagggcagggtgcgttaccagctcaagaccccgtggcgcaatggcaccacgcatgtggaatgggatccggtggatttcatcgccaagctggcggcgctggtcccgccacctcgcgcgcatctcacccgcttccacggcgtattcgccccgaatgcaaacctgcgtgcgcagctgacgccctcggggcgcggcaagcggcctgcgggcgatgcggcgccagtggacgtcagcgcccacgacgcgccgcgcagccccgaggagaagcgccgtgcgatgagctgggcgcaacggctcaagcgggtcttttccatcgacgtcaccgcctgcgtccactgcggtggcaccgtgcggatcgtcgccagcatcgaggaacccaccgccatccgcgccatcctcgcccacttcgagaagcacggcgcgcgggaagaagcgcactacaggcccgcagcgcgcgcgccgccagtgcaagccgcgtga

SEQ ID NO: 281085 - DNA, 1542 bp, Morganella morganii; identical to SEQ ID NO: 30088

SEQ ID NO: 281086 - DNA, 501 bp, Morganella morganii; identical to SEQ ID NO: 105788

SEQ ID NO: 281087 - DNA, 570 bp, Morganella morganii; identical to SEQ ID NO: 34949

SEQ ID NO: 281088 - DNA, 669 bp, Morganella morganii; identical to SEQ ID NO: 36186

SEQ ID NO: 281089 - DNA, 1014 bp, Morganella morganii; identical to SEQ ID NO: 80749

SEQ ID NO: 281090 - DNA, 597 bp, Morganella morganii; identical to SEQ ID NO: 119679

SEQ ID NO: 281091 - DNA, 633 bp, Morganella morganii; identical to SEQ ID NO: 16794

SEQ ID NO: 281092 - DNA, 321 bp, Morganella morganii; identical to SEQ ID NO: 67344

SEQ ID NO: 281093 - DNA, 234 bp, Morganella morganii; identical to SEQ ID NO: 279458

SEQ ID NO: 281094 - DNA, 369 bp, Morganella morganii
atgtattttcagggggagggagtgcaacaggattaccggcaggctattgagtgggttcataaatcaggtgagcagggaaatgcattttctcaataccagcttgcgaaaatgtattattatgggaagggaatagaacagaattaccgcgttgcagcggagtggtataagaaagcggccgatcaaaaatatgcatttgcactggcaaagttggcaaagttggcaaagttggcaaagttggcagagatgcatctctctggggaaggcattgaaaaaagccaaccaaaggccgggtcattgtatgatgaagcatgttttggtgggtttcaatcggcatgtgacagccttgcgaagctgaataaaaaaaactag

SEQ ID NO: 281095 - DNA, 186 bp, Morganella morganii
atgcgcatgcctgacaaatattccagccctacagcgtacgcctgggggcttataacctctgcttttggcgttttatcccagtgggctattgttgccgggattatctgtactgtcgggacgttcctggtgaactggtattacaaacggaaagaattccaactgaaagccggagaacatcatgaataa

SEQ ID NO: 281096 - DNA, 354 bp, Morganella morganii
gtgctcaccgtatgttatggccataccggcagtgatattcagcccggcaagctgtacacggacgctgaatgtaaggcgctgctgcacgacgatctgacgaaagtccggcgcgcggttgacccgatgatcaaagtgccgattgatgataatacccgggcggccatctattcatttgtctacaacgtcgggcccggtgcgttctcgcgttcgacgatgcttcggaagctcaataccggtgatatcgccggtgcctgtgatgaaatgaagcgctggacatttgccggcggtaagcagtggcagggtctgattaaccggcgcgaaacggagaaagcgatatgccacggaaccctttaa

SEQ ID NO: 281097 - DNA, 453 bp, Morganella morganii
atgagtaatagcaacttgtttatagataatgaggtgcatatctggattggtaatctacaaacgataccatgtttaagtaaagctaaatccagaatgcacatcttaaataacgatgaaatttcatcgttattcgactacccttttataaaacaacgaaatatttttttgctatcaagagtcatgttacgcgatattttatcattttatttaaaaatttcaccagaagatgtaagattttcaaaaaatgagtacgggaaaccatttattttaaacgaatcaaaggaaagcatttacttcaatttatcacattcaaataattgtgttgctctcgctatttcaaatacatcatccgttggtattgatattgaatatttcaaccgtgatatagaaataaatagcattatagattattatttctcaaaaaaagaaaaaaaaatacctatcttattttga

SEQ ID NO: 281098 - DNA, 840 bp, Morganella morganii; identical to SEQ ID NO: 6027

SEQ ID NO: 281099 - DNA, 816 bp, Morganella morganii; identical to SEQ ID NO: 195523

SEQ ID NO: 281100 - DNA, 966 bp, Morganella morganii
atgattttgataaaaatcattaggggattcatcagtgcagagccacaggatgctaaaatatatgttggtttaaaaaaattattccaggatatacaaaatgaattagaccaatgctggtctgtgttaggtgaaatttatggcaggtataaagaattttcaagcttaggaataaatattcgccggattcgttcatctttagatgatgaaaaaaaatacattaaagtaaaaaaacctggtttcattccaaaaatcttaagctttcgtactgctagttccgagatgatggagttacttatcgctccgttgtatggtgacaacccttatattggcatccgtgaacttttacaaaattcagttgatgcttgcaaagaataccaagactttcaaaaaaatttttcacatttaaattacagagaaaacactgaaccagatataaaaatcatactaacaataaataaaaatggaaaaggtcatcttgaaataattgatcatggtattggaatgactctggacactattaatgaatattttttgaatatcggtgcatcattcagaaatagtgatttgtggcgtaagaatcatgttaaagatggccattctactgttcatcgaactggtaggtttggtattggattactcgcagcttatttattaggagataccctccaggtaactaccaggcacataacacaaccctctaacaaaggcttattatttaagtgcacgaggggtgatacagaaattattgtaacccataccaatgctgatattggtacacgtatttcagtcgaaattgatgaagaaacagtttcaaaactaaatagaaatagaggcggctgggattggtatgttcatacagatttaaaaatagaacgaattatcgtacagaaaaacaaaacagccacattgccacagaaatatatattaccaagttgcaatagtactctaactgatgattggtactga

SEQ ID NO: 281101 - DNA, 297 bp, Morganella morganii
atgagcgaaacaacatataaggcagtctcatggggtgaagtaaaagccgatgtctattctggtgaatcctgcaacgaacatcgcccatttattgagatgctgtgtgatggtgacatggaatcatgcattgaagatgaagttacattcagagccagtcgctggccggtgggtacgaaaattaccgtcgaagttccgtgttgcccagtctgcagtttggatgccgagtatcaggataaagcagggagatgcgaatgcggctttgactggaaagaatgggctgaaaacaagtattcatga

SEQ ID NO: 281102 - DNA, 705 bp, Morganella morganii; identical to SEQ ID NO: 8686

SEQ ID NO: 281103 - DNA, 426 bp, Morganella morganii
gtgggttttgtagtcaatgccgctgtccgtaccggccaccagcacagctgtgccgccgaacggataatattcctcctgactaagcagcttaccgtcaccgtccgtttccaggccgctgctgccgatcagattgtcataactgaaccgctggtgatcttttttgccgtcctgccagtgcagcagccgcacctgtgcccgcccggcaacaccggcgcagatcacctgatagttttcttttccgctgtgcagctccagccccggcagatagatgacctgctgtgtctgtgttctgctaccggtttcctgcacggtggttttcaggatacgctggctgcccgcatcataacggtagctttcgcggtcaccggcggcaccgttacgcaccaccggcgtaacctgttgcagctcgccgcgcgcagtccatga

SEQ ID NO: 281104 - DNA, 168 bp, Morganella morganii; identical to SEQ ID NO: 103842

SEQ ID NO: 281105 - DNA, 282 bp, Morganella morganii
atgacgaatacaaaaaacagcgtggacatcaacataggttgtaaaattaaagacgcgcgaatatctgccggaatgtccgggaatgaccttgccataaagattggtgtctcacagcaacaggtatcacgttatgaatccgggcaaacgccaatgaccataaacacggttataatgattgctcatgtgcttaatgtctctgtaaatgagttactgagtgattacctttcctcagagtacagtgacatcatgcttttaatgagcaatcgtaatacagaaaaatag

SEQ ID NO: 281106 - DNA, 285 bp, Morganella morganii
atgctccgtattgaagttattttcagcagaaaccaaaaagagatgataccgcctggcacatttgaagctctggaaaaggaaattgaccgaaaactgcgagctcagtatccggatatgaacgttcgtattgcgtggggaaccaatgcggcaatgtcagtaaccggcgggaaaaatgataaagataataaaaaaataaaagagatagtgcaggagatttttgaggatggcagttgggtgcctgaaacggcagacgcttccgatgatgcagaatattttgataaataa

SEQ ID NO: 281107 - DNA, 456 bp, Morganella morganii
atggataacgatattacgcttattttttctgcggatatgctttcaaataaagaaatccggtcatcttatgaagcattacaggaaaaaatagctatgtatgagattgatataaaaagaaaaagctataccttgggtgttaaggacacatcaggtaagttgcctgtttattatctgaatgtggtaaagcggatcgctgcacgagtgggtatacaacaatttcatgttctttcagcaggtgtgttattgttaactcaactgcctgaaaatattcaaaatatactggttgaaaatgcagcgaaacagttaaacctgttggggtactcaaaaccggaaaatctggatattgaaaaactggagttattgatttctgaattggaacaaatcgcgcagccgctcagaaaggctgttgaaatgccgtcaggcatggaaggcggcacacagcagccgttgatataa

SEQ ID NO: 281108 - DNA, 222 bp, Morganella morganii
atgaaacgtaacaataaaaaccggaatgtgataaatcctgatgttatatctcaggaaaatcacgataaatctgctgatatcattcaggatttctctgtcaaaggattatcagtaatagaattcgagccgcacagaattttaatatttaaacctgtttatctcacttccggtgatgatggtcgccccgaatttcatcattatgttgacataaaaggaaattag

SEQ ID NO: 281109 - DNA, 174 bp, Morganella morganii
atgactgtaacacaacgaacaacgtcgaacgttaccctgaacgcagaccctgacgataaaaaacaccattacgaagcgaaaaagtggcaggaagaaaacagtaaagcactggagtcacttaatcgttttcacgatgaacacggttgttttagcgatgaatacagaacattctaa

SEQ ID NO: 281110 - DNA, 1050 bp, Morganella morganii
atggcggtttattttgttacaggggcgttaggttcgggaaaatcattaatttccgtgtccaaaatacaggacagactggcaaaagggtgtcctgtggccactaatcttgaattgcgtctgtttaatatgccgcgggtcgggaaaatggcaaaaaaaacgcgcgtttatcgtctgccggataaaccatcaattcaggatttggaactcatcgggcgtggtaatcagtcttatgatgaatcacgtaatggtttactggtactggatgaatgcggtacatggctgaatacccgtacatggaatgataaaagccgtcagcctgttctcgactggtttttacatgcccgtaaattaggctgggatatcatttttctggttcagaatattactctggttgataaacaggcaagggaggcactggctgaacatgtggtttactgccgtcgccttgaccgcctttctgttccgtttgtcggtgcggttttcagcctgatatttggttttaaattacccgcgccaaaaattcatctgggtattgtcaaatacggtgatgcacagcattcacctgttgttgaacgctggttttaccgtggcacagacctttactatgcctatgatacaaaacaacaattttcttctttctatgacaggggcgtttacagtgtcctcccgccgtatctgacacatggtcgttatcatcattctttaacggtaaggcaatttatgcgtttaacccgaatttatctgaaacggatctcacgtttccggctgttactgatgggagcggtgctgggtgcggcgggagcttattttctttccggtaataccgctgagccggcacagttacagacggcatcttacagttcagtaccggatttaaaaatacagtcttttaagcggtttggttctgattcttatattcagtttattgataaaagcggactggtcattgattccaacaggctgacagcacagggctataacattgaagtcattaattcatgcaaaatgcggatatacaggggtgcagaaaatgcgatggttacttgttag

SEQ ID NO: 281111 - DNA, 342 bp, Morganella morganii
atgccatttttattaggtatacctgcattactgcgtttcctgatggggttagtaccgctggcattaggctacattgcttctttactggcaaaactggcaacccgcacagggctgattgcatttgcgttggttgctttaattaccgtcacgataaccactctgattaattatttatctgaccttttacaggtgagtttgccgccggatttttccaatctgatggcatcggtattaccggataatttcagattgtgtattacggtgattatgacaactcgtgtaacgatatttttattcgatttaaaagaaaagtttttaaattatgcaaacaggatagtttaa

SEQ ID NO: 281112 - DNA, 1209 bp, Morganella morganii
gtgaaaaagttattttttattttcctgcttgtttctttctcatcatattctgcgattgattataaaaaacagtttcttaccggacgcgctaatttctttgcagaaaaaaaatggggctctgacatatatgtaataaaacagtcagatattgataaagcttgctctgatgcctccaaagatgcacttgatacatatgaaacgtttaaaaagcattttttggctcaaatgcctgatttgcaatttaaatatgagatggcggaatcctgtaatactaataatgtaacggctggcgagtttaattcagatcccggcattaaaacggtcacatgggatttaactatgttttacggtgaggagtccaaagaaccggaaaaacccacaccggaagaaatttgcaaagcaaaaccgtctttttcggggcaatacaataatgtttatcctggtaaattaatttatgtcgatggttgtgagtttgaagcaactggggtcattgtttgtaattcggcagggacttcttgtgcggctgactggaaatcaacgggcaacgtagctgatacctctgttactccttccgttcctgatgatggcagtggtggtgataacggtggaggcggggataataatggtaatggtggtgataatggcggaggaggtaataacggtggcggtggtaacggcggaggcggcggttcatcattatcaaaaaatgatgtgattgatgcggtcagaacagccactaaagatattccgcaggagattggcaggcaattaactgaagagacaggcaaagattttattgatgaaagttttcgtattgaaaaagagaagaaagcagcaatttccggtatttcagattctctgggtaacttaacccgtggggcgggtcgttttgcagacccgtcgcggggtgaaaattatggtaaaggcgagtccgcactggatacagcaactgaatttgccacttcacaactggaaataaaagataataacaattcgttatggggttattttttccggcagacggatttattacccacgggtaacggttgttctgattttaaattttttgaaggtgatgtttatcaggtcactatcagttgtgacaggctttcatcaataaaaaccatgctgacatgggtaatgaccctttccacaatctggtatgtgtttgtttcattaacgtcattattaagaaaaggcggtgaatga

SEQ ID NO: 281113 - DNA, 249 bp, Morganella morganii
atgaatctttccaaagttaaaaattacgtttctaataagtatcttgctgcatctttatttttcgtttctgggctggcagcggcagaaggcgggacatcaggtgtgccggattatgcaggtcaggcaatggattcactgttaacacaggcaaatacccttattggcaaagtctggccggttgttgtggcggttgtcggtgcaggtctggcaattcgtctgttcaaaaaattctcgtccaaagcggtctga

SEQ ID NO: 281114 - DNA, 267 bp, Morganella morganii
atggtaaaaattgaaattaatgaaaatgacggaaaggttaataacaaacaagtcgtttcaaaatcaacgggagaaatattaacgttcagagagcagattgcgtatatctataatggtggtgtatatcctgaaaagttcattattcagcttgataaagatgattcaccatatccggcgggtttttatactcttgatgattcttcattctcaattggtgattttgggtctcttaaaatcaggaaacctaaattaaagccttttaaataa

SEQ ID NO: 281115 - DNA, 195 bp, Morganella morganii
atgaatattgtctactttgacttcattgaagggtttggtattaacgccaaagtaggcgttgaatgggatttttaccgttcctttgatgagttggttaaagagtgctcatgcctgttcggtgacgacttccttcttgcttcaacttcaacaaaatcaggtgattttgtcagctatggggatttttatcatggctga

SEQ ID NO: 281116 - DNA, 252 bp, Morganella morganii
atgaagggtacgaacaaaatcaaaagaaccagtatggcaatcacagctacaagaaaattgaagctagaaagagcggctatagatctaagtaaaaaagtaaatactacaatatcatggacttacatagttaattttatgattgataactatacaaagaatgcatgtgatgatctggaagaagccgtcaatgaaacgatggaagaacaagaacgtttacagcaagagtatctaaaaagtctactagacgaataa

SEQ ID NO: 281117 - DNA, 297 bp, Morganella morganii
atgttagtactgagtaccgatacattgccatccaatatgaaagtcgttgaaatacatggattcattgaaaaaacttatcccattgaaatttctgataaaggtttgattcgtggatttatggaacgcaaaagaaatgagcatcaggaagcgtatgacgctttcgttagctcagcaggaagacaaggaaatgttatatatggagtaaaagtatctacttctgtagggcaattcaaaaacggcagttttctttacattacttattatggaaccgtagctacagtagaatgtactgattaa

SEQ ID NO: 281118 - DNA, 222 bp, Morganella morganii
atgaagcgatttaatgacgaagtgtatggcatccttaacgcagcagaagctcacggtatgattggcgactctgctacagcaaacaaaatattggccgcagccaaaaagtattatcagtccggtagcgagtcagacaaaaaagaaattgaggagaagctaatcgcactggggaaagagcccggcattgtcctccctgtgaattacatgcaattcgttaagtaa

SEQ ID NO: 281119 - DNA, 333 bp, Morganella morganii
atgagcaacaaaacagaatttgcacgaatagtcccgtcgtggattcaggaaaaggcggttgatttggttatcagtgctgtacaggaagatattgaaacaatcttgtgcgaaggcgatgctgatgccgcaaataaggcataccggttagctgccttcagaggacaggtaatgaacattgcaatgaccgcgttgttttctgatgcgaaaaatgaaatcgccaccgagcaatcatcgccagattccaatgtaccgcaacgttctggcggtaacgatatcagcgagcagcaagaggttccttactttcgcactcacatagtaataaccccagactaa

SEQ ID NO: 281120 - DNA, 537 bp, Morganella morganii
gtgaaagcattcaatattttgattggtgtgattttggtttttgcgctatcgttttctttttattcatttgaaaacaagcacatagtatatcctccttctgttcatgaaaaaatcatgtacggggtattatgggatgtggatgtcgcgcacagtgaaaataatccggttaattgtcgctctcctgactcttttctatccagccagtgctatgtggttcttcgcgcaggtgatgattttccgaaaaatgcatccagcattgatataagaataaaaaataagttatgggggaaaagcggaaaaggatactgcttgtcttacatgtctaactctgatgagaaattgaattacaacaaccatctctcacataatgaaatttggtttgacggagaaaacagaaaaataagttataccactgcaactatcccagttattaataacaaggtaacatttggcatagggaagcaaatatcaggaaattgtgtaattgaaacagtgttctaccttgagggatatactaaaaaataccttccgtggtaa

SEQ ID NO: 281121 - DNA, 1155 bp, Morganella morganii
atgaaaataataaataaaataccttatctctttttcaccataatactgtcttcaccaatattctcatcgaccagctttgctgataaactccctgaccttcctgtggcattaaaaaatggaaccggagtaattagtcaaaacattatttacataggtttaggtagtacaggaaactcatggtataaacttgatcttaatgaaaataaaaaatgggaaaaaatagctgatttcccgggtacgccaagagaccaggctatagcaattaatttaaataatgatatttatatatttggcggagcgggaaaagaaaatattgagagtgaaacaataagctcattaacagatatttatcgttattcaccaagtgaagacaaatggagaaaaataaacaccagttcaccttatggcttggttggtcatgcaggagttagtatcagaaccaataaagccatcattctcggaggagtaaacaagcaaatatttgataaatatttcattgatttaaataatactaaaaacaattcacccatgaaaaataaagttattaatgattactttaacaaacctatagaaagctatttttttaatagagtaatactgacttataatgcagataataatcaatggaattcattaggtactattccttttaatggaactgcgggttcttcattagtaaaaaataacaatacaataaccttgattaacggcgaattaaaacccgggttacgtaccagtgaaatacaaacggctctattaaaaaataatcaactacagtggaatactactgtacagaaacttcctccaccatcacctgagcagcagcaagatggcttagctggtgcatttgcaggttatagcgctcatactttacttgttgctggtggtactaactttccgggctctcaggctaagtattcacagaaacattattttgcacatcaggatttagataaaaaatggcacaaagaaatttatggtttgattgatgatcaatggaaagtaattggtgaactgccgatccctcttggttatggaatcactattgagcatggtaattcactatatttaatcggtggtgaaactacaaaaggtgaggcagttaattctgtaatcactttaacaataaaagataaaaatctaattattaactaa

SEQ ID NO: 281122 - DNA, 387 bp, Morganella morganii
gtgctgggtatggaaaacgagatcggctcgctggtggccgggaaaaaagcggacatcattattatccgccacagagatggttttgtggcaccggtgcacgccgcaggcagtgtggtgcagatgacacataccggtgatatcgatactgtgctggccgacggtgtgatccgcaaacaaaacggcatgctgaccggttttgagcttccggaagtgacccggttatcccgtaacgctctggctgagctggaaacacgcatccgcgaccggaaaatcctcaatgcacaggaagtggaagcgttcttccgtctggcggagcggatggcctccttccacttcgcacaggcttacagtgatgaattttttactcaggcgatgaataaggcctga

SEQ ID NO: 281123 - DNA, 1416 bp, Morganella morganii
gtgactacagaggcagcaatacaggtacgctacccgaaaatgatgctgagcgtactgatggccgggacatttaccggtctgttcggggaaacagcattaaatatggcgctcaccaatctgatgagccagttctctctctccgccggtcaggcacagtggctggtgaccggctatctgctgaccctggcggtgtttgtgccggtatcggcgtttctggtgcgctggtttaataccagggtgctgatcctcacggcgctgtgtgtatcgctcgccggttgtctgattgccgcactggcgcccggttttgcggtactgcttctggggcgggttattcaggctgtcggtaccggggtgatattgcctgtgatgatgagtgccgcacttctcattttcccggtctatcagcgcgggatggtgatgggaatggtggggattgccattaccctggctccggcactgggaccgacaatctccggctttatcatcaccctgttcagctggcatgccattttctggctcagtgcgctggtctatgccgccatcattttacttgctgtgaagtctattgcgccgattggggacatcaccagaccgcgtattgatattctgtctctcctgctttcctccgccggattcagcggcatcatctacgggctggctatcctggcggaacacagcctgcgtgatcccgctgtctggggctccctgctggcgggggttctttgcctcgccgtatttgcccgccgtcagacgcacatggcgatgccgatgatccacccggatgtgttccgtaatccgctgtttattattggcctgatcatgatgatcctgagcatgatgagtgtgctctccgccgcgattattcttccggtattcctgaaagatgtgctgatgctgagcgcggcaatggccgggatcctgctgctgccgggcaatattatcaacgtactgttctcaccacttatcggttttctctataaccggtttgactcgcgcccgtttgtggtctgcggctccctgtttatgctgatgagttctgcgctgtttctgtatgccgtcggggagaactcaccagtgtggcagattgtcgccgcctttatgctcctgtgtctgggtgtcacctgtgtgattatgcccgcgcagactaccgcgatgagtgctttacccgcccggttatatgctgatggctctgctgtctggaataccttttatcaggtagccggcgccgtcggtaccgcatcggccatctctctgatgtctttttaccgtgatgcggcagcaacacagcagacagcaaccgcggcactggcgtcggggatccatgccgtattctggctgagcctgctgctcggtctgttatcactggttttcgccttcttcctgaagaaaccgcatccgcagaatgatgcggcgtaa

SEQ ID NO: 281124 - DNA, 1344 bp, Morganella morganii
atgacacttccggaaatgataaaaatgacaataaaaccatcaccattcagcatcagggcggtcagttctgccattgtgctggcactcgggctgacagcggcaccggccggggcggcagatctcactcttgatctgccggaacaggcactgagccgttcactgaataccatcgcgcaacagggacaaatccagttactgtacgatgccggacaactcggcacactgcgggcaccggctctgcacggcagctattccgcacagaccgccatccagacactgctggcaggctccggcctgacactggtgcagcagggcagcagctatgttatccgcccgctgacaaccgaagcggaaaccattttaatcccggaaacccgggttcagggcgagctggcttaccatccggccacggatgtcatgtctgccccgcaatacattactgcggaggagatccgccagcgcaataccggtgacggcaacgtcacggaactgctgcgcaccaacccggcggtgcagtttgccggtaatgacagctcgtccctcaaccagggcgaaatcaaaccgtcgcggatttctattcacggcgcatccagtttccagaacgcctataaactcgacggcatcagttttaacaacgatttcgacccggcaaaagataccctgggcgaaacctccacccgtctggacagcggcgaccagggcatgtatatcgacagccgtctgatcgacagcgtgacggtttacgataacaacatcccggtggaattcggcggctttaccggcggcagtgtggatgttaccagccgccgctgggacggcgaaaacagcggccatatgtattaccgtactacccgctcctcctggaatcatctgtttgaggattcttcacagccgatcgattcatcaaaaaatgacatcagccatcctgcccgtttccagaatgaatataacaaacacgatttcggcggctggtttgaagtcggtgtaaccgaaaacagcggcctgacagtatccgcctcccgccgtacctccaccatcccggccaatacctcggtactgatggcggtgatggaaggtgaagaactggtcggttatgagtttgataagcgcaaacgcaaccagaaacgtacctcagacaacctgtttgtgaagtatgcaatggatctctcgccggtcaccacggcggatatttccctgaattattctgactacaaggcgcgtttattcgcctccaatattgtcaactccggttatgacaataaccacaaagggttaggtgtgaccggtgttctgaaacaccagaccagccctgagagatcccctcataatttccccaaagcgtaa

SEQ ID NO: 281125 - DNA, 1035 bp, Morganella morganii
atgaaaaaaaatgaaaatgaattaacattatggattgattttcttattgatagaggaatttcttctgaacaaatagccctctatgttccatatatatctaagttattagagtctaacttacccataatttttgaaaagcaacatctggctcatcttataggtattgatgaaaatacgctcaataaaatgacttcatctcctcatagtttctatagaaattttaatatacctaaaaaacgtggaggttttagggaaattttttctccctatccatctttgcatatgtgccaaaaatggatatataaaaatattttacttaatgataaacctcacaatgcttgtcatggttttactccatctaaatctattattacaaacgcagcaatacacattggtcaatcatctttattaaagatagatttaaagaattttttcccatcaattccgattaattggattattaatttttttaagcgtaaaggatacactcataatgtttctttttatttagcatcattatgttgtaataataaagtaatggcccaaggtgctcctactagtccttatctttctaatttattactaaaagggttagataaacgcctttataacttaactaaaaaatacaatataaaatactcacgctatgctgacgacatgtttttttctggcaattatataccatatgatttcattcgtgtaattactaatataatcgaagattatggattaaatataaacaaagataaaactgcatttttaattaatgccaataaaaaaataataactggaatttcagttaataacaatactctatctttacccagagaatacaaaagaaaattaaagaatgaattgcatttcataaaaaaatatggatatctttctcatattaataagcaaaaaataaaagatcctaattatcttttctctatacttggaaaaataaacttctggcttcaagttgaacctatgagtaaaaaagctatagagagtaaaaagcttataatatcaatattaaaaatgggggcataa

SEQ ID NO: 281126 - DNA, 201 bp, Morganella morganii
atgaaaaacgatgaactgactattgaacaaaaactggctgttgccggtatcgccaaagacctggttgttgcagcaatgaacagtaaaaccgcaaaccatcacattatcagcgaaacagatgatccacggtggtacggcaatagtattgatacactgtatgattacttttatgagcatataactaataaaatcaaagagtag

SEQ ID NO: 281127 - DNA, 204 bp, Morganella morganii
atgggtgatgaaaaaacagatttattcggactgggtaatgttgaaatgcgcatgcggtttgtgacggatttggtgatttacctgagagaaaaatacggtgatgatgcctgtggttcatcagtgatgccggagctgatgtttctggcatcactggtactgagcggcaagtacagcacagataatgtcttctgtacccgtcgttaa

SEQ ID NO: 281128 - DNA, 381 bp, Morganella morganii
atgacagataaaaaagccataacaccagcagcggtacgcaagcgccgtcagcgtaaaaatcagcagaaagatggcctgtaccggcatgaaatcgcactgaacgaaaaggaaaacgacatgctggaatatatccgccatcaccgtaatcccggacgtgatccgtatgaccgtaacgaactcatcgccctgttgttactgtgtgattttgagcgcctgaagcgtcaggaagccagactgggtaaatgtcctcattgcaatgatgaattacccgaaggctgtaacagtttatttaaaggtgattcatcctgctggtttacccgtgactgccgaaaactgaacctgacaagcgtgaccggtcacgcaaacattgaggatgaatga

SEQ ID NO: 281129 - DNA, 432 bp, Morganella morganii
atgtcaagcacaaaagaacagtgggccgggattgaggagtcgttaaaatcccattacgtggtcattaagtttcagtatcagggtactgagattgccgttacccggatcagtgcaggtgaaggaaaaacggtattggctgtctggtttaacgggaaaacgaattgtgcctggggtattcccggcagtgatcattttaatccgttatgcgagttattttggcataagcgcaccaaatctctctattcaccgaaacgcattaaggaactgcagaaagcgtacggtaagcgggcggctaagcgtgtaattcccaatattgaggcgaaatacacatattacatgccgtatttcagcaaagcatcggtactggttcgccagttccggcggattgaaggtctgacagttgatgaccagcaaaaatggatggtgctatga

SEQ ID NO: 281130 - DNA, 231 bp, Morganella morganii
atgagcaggattaatcagattcgcctggttgcctctgtctgcagggaaatcgccggacagtgtccagggatcaagatcagccagaaacagctggctgccgtcaccgctgccgctgattctggctgcgcggcctttaatgaaccggatatgtgtgacagctgcagtgacaaactgcgcgggggctgcctgccgacatgcaatcagtatcaggggagtaacggccatgattag

SEQ ID NO: 281131 - DNA, 498 bp, Morganella morganii
atgagtaacaattcaactgacgcaatgaagaagcctaaatttgtattcacggctaagccggtttgtttcgtgcgtgaagccactccgttaacgcctcagattgatatttcccgcgtccggacagatgaattttgtatgccggtttatgcagacatcagtgatgatgatatccgactgacgaatgaatacatcgcggagttgcaggctcagggcgtggataagctggctgattctatccgggatattcacgacggcctgatagataacggttatgacaatgacattattatgatcttgcgtaatgaaatccgccgctgtcttttttttgctgaaagattgcgcaagccttctgttcatatctgcaattgcgacagctgcatctgtactaccagcactaacgctttgtgtgaatcggtcatgaccgggcataaaaacctgtgtgataactgccaaaacaagctgaacgatgacggtctgcatcagggagaatcatcatga

SEQ ID NO: 281132 - DNA, 198 bp, Morganella morganii
atgtcatttaaaaatatcaccactaatgccgcacaggctgaacgcgacggccattacaaggaagccggacggctttggattgaagcctcattccttgcgaaaaaaacggataatcagcagtgggcgaaacgtcgggctgagttttgtgccaaagcagcaggaggccgttatgtcccggttgtctgcgaagcagtttaa

SEQ ID NO: 281133 - DNA, 639 bp, Morganella morganii
atgtccattaatcaaaaacagtttactcagcatgaagtcccggccggttactggcgtgatgccaaacggggtttgacccctgttgatttacttaaagagatcgacattcaacgtgatgcgcttgtgggggacctggttgtccaggctattcagattaatgaattgctgcgtcagtttaagattgctgcgttcggggatatcgaagccttcattgcattgtcagctgagcagtacggtatcagtgttggtggtaaaaaaggcaatgtaaccctgttttgttttgacggccgttacaaaattcagcgtgctattcaggacagaattgcctttgatgagcgtttacaggcggctaaagcactgattgatgagtgtttaaaagactgggttcagggagcacgaccggagatccactccatcattgaccaggcatttgcagtggacaaagaaggtaacatcaataccggtgctgtactctctctgcgccgcctgaatattgaggatgcccgctggataaaagcgatggaggccatcggtgaagcggtgcaggttgtaggcagtcgccagtacgtccgtatttatgaacgggtcggcgacagtgaccagtatgtgccgatttctcttgatatcgcgggggtgtga

SEQ ID NO: 281134 - DNA, 1341 bp, Morganella morganii
atgtttgggttaagtgcccttgagcttgcgcgaattcagttcgccttcactgtgtcgtttcatatcattttccctgcaatcaccatcggcctggcgtcattcctggcggtgcttgaggggatgtggctgaaaacccgcaatgaggattacaaaaagctctttcatttctggtcagccatctttgccgtgaatttcggcatgggggtggtttccggtctggtgatggcctatcagttcggtaccaactggagtttcttttctgagtttgcgggatcaatcaccggtccgctgctcacttatgaagtactgactgcgttcttcctggaagccggtttcctcggcgtgatgctgttcggctggaaccgtgtcggtgaaaagctgcactatttcgccacctgcatggttgcgctcggcacactgatgtccactttctggatcctggcttccaacagctggatgcagacccctcaggggcatgaggtgatcaacggtgttgtggtaccggtggactggttcgcggtgattttcaatccgtccttcccgtaccgcctgctgcacatgacaaccgccgcatttctggcatccgccttctttatcgctgcttctgccgcctggcacctgttgcgcggcaacaaatccggtgccatgaaaaagatgttttccatgtcattgtggctgattgtggttctcgcaccgctccaggcactgattggtgatgcgcacgggctgaacacactgaaacatcagccggttaaggtagcggcaatggaaggtcactgggagaacaaacccggggaggccacaccgctgatcctgtttggtattccggataatgcacaggaaaaaacccgctatgccgtggaaattcccgggctggccagcctgatcctgacacacagccttgataaacaggtgcccgcactgaccgagttcccgccggaagacagaccggacaacgtgttcgccgtgttctggtcattccgcgtgatggtcggcctcggcatgctgatgctgctggctgccgccctgagcctgtggctgcgttaccgggggcgtttatatgattcccggcctttccagcgctttatgttatggatggcaccgtcagggcttatcgcgattctcgcgggctggtttgtgactgaaatcggccgtcagccgtgggtggtttacgggttacagcgcacaacggatgccgtttcagcacacggtgagatgcatatgagcatcagcctgctgatcttctttattgtttatggttctgtgtttggtatcggctacatctatatgatgaaactgatccgcaaaggtatcgcgccggaggtgtctcatgggcattga

SEQ ID NO: 281135 - DNA, 3141 bp, Morganella morganii
atgtccggaaacaatcctgaaacccgtgccggcggcccgtcccgcctgtttattctgcgtccggtcgccaccagcctgtttatgctggcgatcctgctggcggggattgtcggctaccgcatgctgccggtttcatcgctgccggaagtggattacccgactatccgcgtggtgacactctatcccggtgccagtccggatgtgatgacctccgccgtgaccgcgccgctggagcgtcagttcggtcagatgtccggactgaaacagatgtcatcgcaaagttcgggcggcgcctctgttattaccctgatgttccagctctccctgccgcttgatgtggcggtacaggaagtgcaggcatccatcaacgcggcaaccaatctgctgccgaatgatctgccgtatccgccgatttacagcaaagtgaacccggcggatccgccggtactgacccttgccgttacttccgatgccatgccgatgacgcggttacaggatatggtggagaaccgcatcgcccaaaaaatctcccaggtggaaggggtcgggctggtaacactcgcgggcggccagcgccctgccgtgcgggtgcagttaaatgccaatgcggttgccgcttacgggctggacagcgaaactatccgcaccgcaattaacaacgccaacgtcaactccgccaaagggagcctcgacggcccggcgcgttcggtaacgctgtccgctaacgaccagatgaaatcggcggaagattatcagaacctgattgtcagctacaaaaacaatgccccgatccgtttgcgggatgtggcaaccgtacaggaaggaccggaaaacactcagctgggtgcctgggttaatgataaacaggccattgtcattaatgtgcagcgccagcccggcgcaaacgtgatttccaccaccgataccatccgtgctctgatcccggagctggtggaaaccctgccggaatccgtcaccgtaacggttctgactgaccggacagatgctatccgcgcctcggtcaaagatgtgcagtttgaactgttcctggcgattgcgctggtgatcatggtgatgtacctgttcctgcgcaatatggccgcgaccctgatccccggtgtggcggtaccgctctcgctggtcggtacattcgcggtgatgtatttctgcggcttttccgtcaataacctgacactgatggcactgactatcgccaccgggtttgtggtggatgatgcaattgtggtggtggaaaacatcgcccgctatctggaaaaaggcgacaagccgctgaccgctgccctgaaaggtgccggtgagattggctttaccattatctcactgaccttctcgctgattgccgtattaatccctctgttatttatgggggatatcgtcggccgcctgttccgtgagtttgccatcacccttgcggtggcgatcctgatttccggtgtggtgtcactgacactgacaccgatgatgtgcgcccggttcctgaaacctgaatccgctcaccgtcataaccgctttaaccgcgccactgaacgcttttttgagcgggtgattgccggttacggccgctggctgacatgggtgctgcgccatcagtggctgacactcggggttgcgttcagtaccatggcgatcaccgtcatgctctatctgtttattccgaaaggctttttcccgatccaggataacggactgattcagggcacgctggaagcgccgcagtctgtgtcgtttcaggccatgagtgagaaacagcaggcggtcagccgtttgctggcggatgacccggcagtcgccaatatcgccgcctttgccggtatcgacggcagcaatgccacactgaacaccggacgtctgcaaatcaccctgaaaccgctgtctgagcgggctgaccgcgcggaagctatcatcacgcggttgcaggagaaagctgattccctgcccggcgtgaaactgtatctccagccgtctcaggatctgacaattgatacccagacctcccgcacccagtatcagtttaccttacaggccaattccctggaggagctggatctgtgggtgccgcgtctgatgacagaattagagagcagtgatgccctgaccgacaccggcaatgactggcagaataaggggctggtagcctatatcgatattgatcgcgacaccgcgtcacggctggggctgaccatgaccaatatcgataacgcgctgtacaatgcgttcggtcagcggctgatctccacgatttatacccaggccagtcagtaccgcgtggtgctggaaaataacaccgcgctgacaccgggcgcagatgccctcagcagcatccgcctgaccaataaagacggcaactccgtgccgttgtcagcctttgccactgtctcgcagcgcttcgggccgctggcgatcaatcatctggctcagttcccgtccgccaccttctcctttaatatcccggcgggcggttcactggaagcggctgtgaatgcggtgaaatcagcggagcagcgtatcggcctgccgaaagatatcaccacacaattccagggggcgaccctcgcctttgaaaatgccctgtccaataccttgtggctgatccttgccgctgtcgtggcaatgtatattgtgctcggcattctgtatgagagttttattcacccgattactatcctctccaccctgcccactgccggggtcggtgccctgctggcactgattatggcgggtaatgagctggatgtgatcgcgattatcggtattattctgctgatcgggattgtgaagaaaaacgccattatgatgattgacttcgcccttgcggcagagcgcgaacaggggctgtcaccgtatgatgcgatttatcaggcatgtcttctgcgtttccgcccgatcctgatgaccaccatggccgcgctgttcggtgcagtaccgctgatgctcagtaccggggtcggtgccgagctgcgtcagccgctgggggtctgtatggtcggcgggctgattatgagccagatcctgaccctctttaccaccccggtgatttacctgctgtttgaccgcctgtctcactggcgcgataacgcccggtttaccccggaaagtgacaacacgggagcctcatcatga

SEQ ID NO: 281136 - DNA, 252 bp, Morganella morganii
atgggcgatatattccgcgcaatgcgtgaggatgccaaagaacggaagcagcagagattaaaagaaaatacagggaagttatcaggaattgatattccgtttacacaggacggaagcggaacaattcatttttcaacaccggacgggaaggttctgttctaccccaccacaaacaaaattcagcacaagaaaaaggtcacacgcggcaatctggaaaaggctgtctcgctggctaaaggtcttggtgcataa

SEQ ID NO: 281137 - DNA, 294 bp, Morganella morganii; identical to SEQ ID NO: 277241

SEQ ID NO: 281138 - DNA, 351 bp, Morganella morganii
atgccactgtcgtcacagtttgaccgggatgccgattactgggctaccttactgcatgaactggtgcacagtaccggtcatcagtcccggctggcccgtgaaggcattacctcatcgtccctgaaatttggtgacccgctgtacagctttgaggagctggttgcagaaatgggcagcgcttttctctgtgcgcagttaagcgttgagggagaggtgaatcatgaaagttatcttgacagctggctgcgggtactgaaagcggacaaaaaagcgttgttccgggcagccgggcaggcccgtcaggcctgtgagtttttactgaatacggccgcctcccgacaggccgcgtag

SEQ ID NO: 281139 - DNA, 762 bp, Morganella morganii
atggaaagagataataaaaaaattgcagttttgattgatgcagataatgcacaggcgtcagtgttagaaagtattcttaatgaagtttcattaatgggagatgctacagttaaacggatttacggtgacttcactaaccaacaaagttcatgttggaaatctattttgcaaaaaaatgcaattaaaccagttcagcagtttgcatacacaacaggaaaaaatgcaactgatgggacattaatcatagatgcaatggatttattatatactcaaagatttgatgcattttgtttggtatctagtgatagcgactttactggattggcattgcggataagagagtcaggcctcgatgttgtcggattcggtgagctgaaaacaccaatggcattcagaaatgcgtgcaataaatttattaatacagaaatatataaagataaacaagaatcatttacttcggataaaagaccaagaacagccgttgagtcgactgaattaatacctaaagaagaaatatttgagacgttattagatatagcaaataatctctctgatgcagatgaagaatggattcaccttggtgttctgggggggatcatgactaagagaaagcctgattttgatgcaagaaattacggataccgaaatttatcaactatgatgaaaagtaggcctgatctttttgaggtcaaaaaaggtgccgaaattggtatatccactgctgcccacctcccttatatgaagacaaaagtaaaggagtga

SEQ ID NO: 281140 - DNA, 777 bp, Morganella morganii
atgaaaacattgtcagaaaggctgagcaaagtaaggcaagaattgggccttacacaacaagaacttgctgacagagcaggggtaaccagagtcgctatcagtaaggcagaacaagggcttaccaagtcttttaattctgatacgctttttgatatagcaaaagcgcttaatgtagacccgtactggcttcagttaggaagtgataaagctgataggcgatcttataccgatgccatcttcaagaaaaaactgaagttaaagctggcggacgatatattaagcaaacaattgcaacgacccctcccaatttcaggtcaaaacgacccatcaatcatagactgtaatataaaacctcatgataagcagcctgacagcaaatacagttatccgaaaataaactgggttcaggctggggcatttgctcgcaatggagatgactatagtcaatttgaaattgaaaactggtacgattcaataaaatatgcaggggagcgaggttactggcttgaggtgaaaggtgactctatgtcatcaccggtcggtatcaccttcccagaagggatgattattttagtagaccctgaaaaagatccgtaccccaattgctatgttgttgcagagataaaagacactaacgaggctacatttaaaaaattcatatgcgactctgggcgtgattatctgaagccattgaaccctaactatccactaatcccaatggacgaaaaaataaaaattattggtgttgtggtagatgcaaaatgggatattttttaa

SEQ ID NO: 281141 - DNA, 453 bp, Morganella morganii
atgtacacaaatgaagatattttgaacgaatgccaaaaagctcagcttttggttaagttgtatgagttcagcaaagaaaatggtgagttgagtgaaaatgaagatgcgctatctgtacgcatgatcgcagaaattatcaattcaatcactactaccgcaacggcaccgcaaaaaccagatgcgctgaatgatgtcacaccatcacacagcagcttcccgcagcgcttaaaacacgccatgaaagcggcaggattaacacagaaagaactggcagaacgcgctggggtatcgcagggattcgttagcaagcttgccacaggaaaaaccactgactcacgcaatatctacatcaaactgattgctgatgcgctgggggtaagttttggctggctgcattacggaaccggcgaaatgtaccctactaatttttccgccgataaccgtgaggtttaa

SEQ ID NO: 281142 - DNA, 207 bp, Morganella morganii
atgccgattatacattgtatgtcaaatagcgatgtgtcagaagtggatatccgtacagcagttggtgcatccatgttcacttatatcttcgtaaaccgcgataactggaataagcgccgacatattgaagccaaaaacgatatcagtgcacaaaatatcgttggttctgactatatctttgcggctcgtttccgctgggcggtgtga

SEQ ID NO: 281143 - DNA, 342 bp, Morganella morganii
atgaataaagccatgctgaaaaaatcggctgatgaccagttagtatttgcaagacaaacattgtctatgattgccaacggtgaaattaaagccgaaaaatcaattaaacctattgaagcagcgatcagcaatattagcgatgctcaggtgtttttaaatggactcggcgatcaaatgagtagtcacagaataaaactcgaaagcatcgtaatgaaaattgataacctgacgcttgccgctattgtgcttgatgacgaaggcgacagcgaattgcaacttgatttattagataaagtgcgtgaggtcatcaacaaagaattaaagcccgccatattcagctga

SEQ ID NO: 281144 - DNA, 243 bp, Morganella morganii
atgattgatatgcaaaaatacaacaaggtcactgatgatatcaataatattttagcagtagttggcatgcattattttcctaatagcactcaacgccacattgaagaaataaaacaactactactaaatatcaaatgcagtgttatcacaaaagacactgacattgaatcattacacttctggattgatggagtgttaactatcatcagtatcgaacaatttcaaaataaggtcacatcatga

SEQ ID NO: 281145 - DNA, 306 bp, Morganella morganii
atgaatatcggtgaattactcgaaattgacaatccatctgacttagaaataaataaacttaaaaacatttccatttacagcagtgatgccgcagtgaacttaattgaaggcataggagctgttggaacattaatgtttcagcactcatgcagtaacaatgataatttaaataaggatatcatcgggaagcttgggctattaattcaggagtcaatcattattgccagcgctctcaatagtaatgctgatttagctgatgatgaaataaagtctcgatcagccccccctacgcaatcaaaagcctga

SEQ ID NO: 281146 - DNA, 348 bp, Morganella morganii
atggaaaataacaatattttatcaaacagaagaaagtcattcactgatgctttctttcatcatctgaaaaagaaaggtaagtcagcatcgtttaaacgctctgtagatggtatgaaatatcagattgatttagatgctgaggtactgacacaagcgctgatatcgctttatgaaaacaaagcatgcaaagacgcagggtatacagaacaacagataattaactcatacgcaaattactacaacaaaaacggaaatatcacaccagatggtgaaatgtttatcagtttaatcacagagttaattgctgaaaacatgcacagaaaggaatttaagaatgagcctgtttaa

SEQ ID NO: 281147 - DNA, 186 bp, Morganella morganii
atgtttaaacatgaattaggtcaggttgtgcaggtcaccatcagcggcgaagaaggtcatgtgaaagcccgtgctgaatatcataacggtccgaatcagtatctcattcattatctggcagcggatggacgtggaactgatggctggtttgaagaaggtgagctgtccccggcagaaccacaataa

SEQ ID NO: 281148 - DNA, 189 bp, Morganella morganii
atgtcaaatccaattatgaaatattttgaatacctgcatctgccgcctcatctgcaggaagtgagcaagcctatcggtgatctggctaaacagatggatgaacagttaccagatggtgcggagaaatccgccggtctccgtaagttgcttgaagccaaagactgccttgttcgcgctaaattaggttaa

SEQ ID NO: 281149 - DNA, 537 bp, Morganella morganii
atgccgggtatgaaaaatatttctgatgggctgaggctcgataaagaacgtgaagagtggttacaaaactggttatctttgtttggtgcctgggtttatagcggaagattagaaaagcgacagagcagtatgatagcccaatttatggctactgtagagcgcagagattaccccgatcgtccagtttgtaatgatgatgacggtctgctaattaatgaggtggtaaagctgatttaccatattgatacggaagcctttgatatgctgctcagccgatacgtttattgtgcatcagacagggcaatagcccgtgcacggcatggaaaatacaggctaaaagccatcatcgcacaaaaaaacgggctgccagcaaagaaagtaccatcattatctacatgccgccgggaggtggacgaaatactaaaagcagctgagtatttattataccaacctctggtagatgcgtttaaaaggaaggaaaaagaaaagatcctgatgcgaaatagcaaaaacatgttgacttctttgaaccagtga

SEQ ID NO: 281150 - DNA, 816 bp, Morganella morganii
atgattggttcgaaatgcaatcattccgtggttcattatcacggaacaccagtatggggcgacaaaggctccattcacaggatcgcggtcacgggagctggggcgtttgtttcttatctccgaatggatcaactggccgcttcatttaaatatgcagagaaagtcggtattgataacggagccttttctgcatggcgaaggaacatacatatagattggaatgatttttataaatgtgtcgaaaaccatattgataatgagaaattggaattttttgttattccagacgtcgtggaaggaggtgaaaaagataacgacgaattgataaaaaaactaccaaaacatttatctaaaaaagctgttcctgtatggcatcttcacgaaagtatcgaacgacttattcacctctgtgaaacatgggaaagagtctgttttggctcttctggtcagttcgcggtcatcaggacaaaagcatggcacggaaggatgagtgaggcttttaatgccattcatgctaacggccttaacaccaaaatacacggcttgcgaatgctggatggtcgtgttttgggtaactacccattatcaagcgcagacagtaccaatctggcatgtaacgtaccgaagtacgaagcaaaatacccagaaataacaaataacgtcagaaatgcggactatgcaaaaaatgtcggtaacgacgacttaaaagttttaattctgaagactcgctgtgccgttttgaaatcagcaatagagaaagtgaacccgccgacattaattgaatggtttacaaaaaatgagaggcaagaccaatga

SEQ ID NO: 281151 - DNA, 390 bp, Morganella morganii
atgcatggaaccggagagaagcatgctcagaatatgaaaggaatcaggataatggctaagtccccggcagaacgcaaagccgcacagagagcgcggcaaaagaaaaccggtatcgttaaatttgaactgctggtggatgagcaggaactggaaatgctgcagcgcaattgtgtgttgcggcggccaggccgtgaaccttatgaactgaacgagtacctgacgatgctcatcagaatcgatgactggtcgctaaaatctgaaattgaggaactgagtaagaaaacatgccggaaatgtggcgaaaaactgcctgtgtcggaatgctgtatggcaggtgatgctgagtgctggaatacactcggatggcatgatttaaagctccgcatataa

SEQ ID NO: 281152 - DNA, 666 bp, Morganella morganii
atggaatcaataccaactcagcgttcggactacgtcgtcatgctggaagaactgcgcaacaagccatcccacatgctgaaagaggtcggtgaccagtggcggacgcctgatgcgctgtactggggtatcaacgcgaagttcggcccgtgcaccctcgatctgtttactgatggtcagaacagtaaatgccctaactattacaccgccgaagataacgcgctgacacaggactggtcagaaaagctgaaagagctgggtggtgctgcatacgctaacccgccatattcccgtgctacctatcatagtcaacaggctgttacagggatggttcatataatggagtacgctcaggctatgcgtgagaaaggtgggcggtatatttttctgataaaagccgcgaccagcgaaacgtggtggccagagtatgcagatcacgttgcatttatccgtggccgtatcgggttcgatttaccggattggtttgtgccggcgaatgaaaaacaaaaaccgtcaggtgctttctttgccggtgcggttgtcattctggataaggattggcggggagaaaaaatcagttatatcagccgcgatgagttgatcaccatcggcgaactgtttatgcggcaggcacgctggttggtggcgaaaacaggggaggctgcgtga

SEQ ID NO: 281153 - DNA, 234 bp, Morganella morganii
atgtccggacaatcaaattatttacctgcagatctgccacataatcgtgctctgtggcctgctgagtatcaggaaaaagagcagcttgatttggctgccagtcgcctgattaagcagctcagaatgcagaaaatacacagaacagctgtactggtggctatcgaaaaaataccgacggatcagcaaccgtttttccgggaacgtctgaattattggcagggggtgatgaagtga

SEQ ID NO: 281154 - DNA, 225 bp, Morganella morganii
atgctgaatacaaccgaaaaaatcacctaccgcaacggatttatgcataacggcgacccgacggacattgaaacaatacggccaatttttgagggacgacgtgctgcggctctcagtatctgggaacagtacgagcagatgaaagcaaaattactgcagcgcaatctgacccctgaacagtatcagaacgcatgccgcgatattgccagagcactgggggtgtga

SEQ ID NO: 281155 - DNA, 222 bp, Morganella morganii
atgtgtaacacgacgaacgaaatcatcaagcgagctattagcatcgtaggctctcaaagtgaattagcccgtaaaataggtgtaaaccaatctactgtgagcaaatggctcaacggtgctgatattggttcccgattcattaaatcgatctcgattgccacagatggccaaataagcacatctgaaattcttaactctatatcttacgatggcttcaattaa

SEQ ID NO: 281156 - DNA, 597 bp, Morganella morganii
atgaaaactttaaaagaaagattggcgtatgccatgcaggtcactggcaaaacaaatcagactgagttagggaagcaagcgggggttcctcaatcttctatttctaagatcttgcgcggtgatagcgaaacttctcgtcactctggaaaacttgcagcggcccttggtgttagcgctgattggctcattaatggaagtggttcaatttttggttctgtagaacataaactggcaaccattgatgtatcaaaaaatgtaaaaatctatgattgcaatggtgatacgggtgaatacatttcttggtttagtcctcttcccgaacattttcgagcttatgtaatcaaggtacaaacaggtatttctcaggcaccatctggtgctatcgttatagtcaaccctcaagaaaccatttcaactaacgacctagttttagttaagctaaaagaatcggtatctgtatttcgatatcacatcggtggagatggtaatggatatttatccgttgatgattcaaggattcctttagcgccagtctctgatctatctactgttgttggtcctatcgtccaaattttcattccagaattaaccaaatga

SEQ ID NO: 281157 - DNA, 396 bp, Morganella morganii
atgaaatttacagagctaccgaacaatgcacagcatctcgcggcaaaagtactgactgatattttaaatgacggttgtcatacagaagaacaagcaatcatcgatgcagccaaaagagtaaaagatgcgtttgccgaactgtatggcagagccggttctgatattcaggtaggaagcgtaacagtacactcaaattcaggagcgaaagattctgtcgaagatgtaatggcagatttccagcctggtgagttaagcgtatttcacattgtgaaaatagccaatgaagtcaacctaaccatcaggaatcaattagctccttatcacagcgatagtaatgactcaagttcaacagcaaggaccatattaagaacagcccttgcagcattggattcctaa

SEQ ID NO: 281158 - DNA, 201 bp, Morganella morganii
atgggtaataaaaatatttttcctgaaatttctattgagcaatttgcttatgacgtggcactatctttaaccagcaaagaccccgatataaaaaccccggaagagttcaccagcaaaatgcttgagttgattccagagtgtcaaaaagtagcggaaattaacctacctaaagtcaccggttttttttcaagaaaacgttag

SEQ ID NO: 281159 - DNA, 333 bp, Morganella morganii
atgaaagcacaacctgacatcctcaaagttacactctacattcacgcacaaaagcaatatgacagcagcattaagtacaacgtgtctgcatgccgtttctctcctgagacaagacttggctttgtggttgctgaacatcagattgagttaccagctccgaatatcacaaaagcggatctcgttaacgctgagatagacagcctgcgtgatgagcaaaacaaaatcctcgcaaacgcccaggttaagtcctccatgattgaagatcagattcaggcgctgctgtgccttgaaggcgaggttatttccaaagacgacgaagcattaccctactga

SEQ ID NO: 281160 - DNA, 216 bp, Morganella morganii
atgatgaaacaagcaaaagataactcacggtcgcgtttaccgcgctccgccgaggaaaaaaagctagtacctatgcgattgctttgctctgaacatggtgcattagagagcctcgcagagcgcgatagtcgttcaatgtcagctatggccagactaatttttcttgaaggcttaaaagcctttaacggaaaaaatgatgagcaaagtgacatatga

SEQ ID NO: 281161 - DNA, 810 bp, Morganella morganii
atggttgagaggacgatccttaaatgggagggctcaaaagtcggcattatggaacaactgcgcccacacctgccaaaaacaaaacgccttgttgaaccgttcgctggttcctgtgctgtgatgatgaatacggactatgagcagtatttaattgcagatattaatgatgatttaattaatctatatcgtgaaattaaatccggcgattatcagcgtattttaaatactgcatacggactttttgaacttgagtcatttgaatccggttattatgtagagagagagtttttcaatagaaataaaaaattcataaatccggctgatgctgctgcctattttatttatcttaatcgtcattgttataacggtttatgcagatacaaccagtctggtgcgttcaatgtaccgaaaggaagttataaaaaaccgtatttacctgaagaagaaattatcagattctcaaaaaaagcagtgaatgcagaatttaaagcacaatccgcaggaaaaacattacagagcgtgaaactgggcgatggtgtttattgtgacccaccgtatttaggtacgttctctggctattcatcaggtggtttcagtgaaaaagagcacgaaaatttagcatacgcccttcttacattgaatttatcaatggagacacctataacggtatcaaattctatggccgcaaaagagttgtatgcggatttaggattcaccatccatgaaatagaagcaccgcgcaccattgcggccaacggcaaccggaagaaagcctctgaaattattgctgtgctcgggggttgccaatga

SEQ ID NO: 281162 - DNA, 2208 bp, Morganella morganii
atgcagaaattaactctgctgaaaggattgccatgctttaaatttaacaagataatgttaatgctttcatgtgcaatgataaccggcaacatggtcattattaagaacggctatgcagatgaattttttaaccctgcatttttgtcagataacggtaatgaagttgctgatttaagccggtttgataaggggctgggacaggctgcgggtgaataccgggttgaagtttttcttaacggggagtatgtggcaacacaggatatcctgtttgtcagcaatgaaaaagaggacgaaataaaaccgggcacagatgatagcggtttaattccctgcttaaccacggattggtttaaaaaatacaatattgataccagtaacgcggtattactgaatgacagttgtgtggattttagctcaacttacgataaatcacagacccgttttgattttgaagaacaaaagctgcgtgtggatattccgcaggctgctttcatcaataatatcagagggtatatcccgccatcagaatggcaggagggaatcaaagccctgttgctgaactatagttttaccggcagccacagtaaaaacaccaaaaatgatgaacgatataataactattttttaaacctggacagcggtattaatctcggtgcgtggcagctgagaaataccagtacctggaattacacatctgaccggcgtacagataacagccagtggaataatatccgcacttatgtgcagaaagcgatcgttccgctgaaaagtcagctgaccatcggtgacagttttacggaaaatgacattttcgacagtgtgggattcagggggataaaactcgcttctgacgataatatgctgccggacagtatgcgcggctttgcgccgactgtcagaggggttgccaacagcaatgctcaggtcactatccgtcagaacggctatgttatttatcagtcttatgtttcccccggcgcatttgaaattaaagatctgtatgcaacgtccagcagcggtaatttggatgtcacggttaaagaaaataacggtacgatcacacagtttacagttccgtattctacggtgccgatgttacagcgtgaaggccggacaaaatatgaagtaaccgcaggggaataccgttccggttcatccatgcaaaatagcccggatttctggcagggaactatcagccacggtttttcagaaggtgtgacggtatatggcggaacacagttatcggataactaccgggcattttctgccggtgccgggaaaaacctcggtgtatggggggcgatctcagcggatattacacaggcaaacagccgcttacccaatggtgagcataaacaggggcaatctgtccggtttttatatgccaaatcactgaacgaactgggaacaaactttcagttgatgggataccgttattccaccaaagggtattacacattaagcgaaaccagttataaacagatgagcggctataatatcaaaacccaggatggccctgagtttaaagacgcagaaattattgattatcataacctctattataccaaaaaagggcagtatcaaatcaatatcagccagcagtttgatggttacggctcggtgtatattaccggcagtcatcagacttactggggaaccagtgaaagtgatcagtcatttcagcttggttttaacggcaactgggaagatatcacctatggcgtgaactggtcacaaaataaatcggtcggactggcagataaagataagcggattgcctttaatatttcggtgccgctgagtcgctggttcggtggcggggatgctgcggatattaccggatcccggaataacatttattccacgtatacgctgacaagggatgataagaataaagtctctcagcagctcgggatatcaggaacgttacttgaggataataaccttaattataatgttcagcagggatatgccaataaaggtgaaggggcatccggcagtgcatcggttaattatcagggcggatacggcgaggctggtgccggttataactacggcagaaactggcagcaggtgacttatacggtccgcggcggtgttctggcacatcagaatggtattacattaagtcagccgctcggccagaccaatatattggttgaagcaccgggtgctgagagatcccctcataatttccccaaagcgtaa

SEQ ID NO: 281163 - DNA, 702 bp, Morganella morganii
atgtacaggtcagtatttactatgagaaaaatactattttcttttatcatcgcattcctttttccggctgtggcatcggcaggcggaattgctctgggtgcaacccgtattatttatccgatggaggcaaaacaggtgtctctggcggtaacgaatacagatgaaaaaaatcgctttctgattcagtcctggatagatgatgcttctgataaaaaaacaaaagtattcacagtgactccgcctttgtttgtcagtaaaccaaagagtgaaaatacaataaaaatcattaatacaggtgctgagttacccaaagacagagagagtttattctggctgaacagtaaagcgatcccgtccgttgagcgtgaacaggttgcagataaaaacgtcctgcaaattgccgttctggccaggatcaaaatgtttgtccgcccggccggtttaccggtgaaagcaggtgacgcttataaaatgctgaagttcaacagaatcagcggcggaataaatgtgactaacccgtcaccgtattacctgaccgttgttaatatgatgattggcaatcagaaaattgaaagtttcatggtcgcaccatttgctgaaaaaatagttaatacagcacaaccagctgccggcggaatatcatatcagacaattaatgactatggtgccaatacgccggtaattaacgttaattcatattaa

SEQ ID NO: 281164 - DNA, 174 bp, Morganella morganii
atgattaccaccaatccgctgctcgctccctatgtggtcaaagtcgtgaaaatgtggcgcaagctcggtgcctggctgtggctggcgacacagaacctggaggattttccggacaccgccaaaaagatgctcaatactgatgaatcccctaatgatttttatcaaaatcattaa

SEQ ID NO: 281165 - DNA, 1956 bp, Morganella morganii
gtggaagatgcccttcaggacagtttcgatgagcgcgacagtcacccgtgggtgatccagtttttctgtcaggatgacccggaggtgacggcgtacctcgatactctgcgcggctacatccgaccgcaggctcaggatacggcgatgacggcggactacctgcgggaaacggagcgtcacatgcgcggtctggcggtgccgcaggggctgtttaccgacagggccgtcaccggggcaccgtggcgcggtcagcagcggcggacacggatggtgatttaccgctatgcggacccggcggtgtctgagccgctgtcaccggaggagcaactgaatcaggtgtgtgaccggctggcctccgcgctggccggggcgggcattgccgtactccggcagaacggggcgcagatccacgcgtggctgctgcgctggttcaatcccgagccggactggacggacaaagagacgctgtaccgcaccgccgcccatgaggacactgcccccggggaactgccgctggtgaatgatttcagtgagatgctgctgttcagcccgccgcgtgctgatgcggaaaacggagtctggtggtttgacggcctgccgcactgcgccgtcaccattgaccgtatccgccgtgcgcctgccgtcggtcacctgaccggcgaaacccgcagaggggagcatgttaatgcgctgatggatctgctgccgccgggcacggtgatttccctgacactggtcgtgcagccacaggatgtgctggaagcgcggttcacgcatctggcgaaaaacgcgataggggaaaacagcgaatccgcgcgggtcagagctgatgcggaaacagcaaaaagttaccttggcgaacggcataaactctggcgcggcagcatgacattttatctctccgcctcttccctgcaacaacttaaccggcagcggcgggaaatgacggcggtgctgctgaatgccggattacagccggtcagaccggaatacgatgtggctcctctgaatggctggctgcgggcgctgccgatgtgttttgatccggccagggataaaaagcactggtatacccggctgatgttggttcagcatctggcgaacatgctgccggtgttcgggcgggacagcggcaccggtcatcccggattcacctttttcaaccgtggtggtgcgccactgacgtttgatccgctgaacagtgcagatcgctccaaaaatgcgcatctggtgctgttcggtccgaccggctccggtaaatccgccaccctcaacagcctgttcgcccagttaatggccgttcaccggccacgcttgtttatcgcggaagccgggaactcattcgggctgtttgcggattactgtgcagcgctggaattgaccgtgcataaaatcagtatcaaaccgggctgcgggatctcgctggctccgtttgctgatgcgcacaagctggccggtatgccgcaaaaaagcggggaactgagcgacgatatcggcgctgatgacgcggaaacggaggagcgcgacattctcggtgaactggagatcgtcgccagactgatgatcaccggtggcgaggcaaaagaggaagcacgtctggcgcgggcagatcgtggcatgatgcgcgaagctattctgacagctgcacagcaggcaaaaaatgcgcaccggcagatgatcaccgcagaccttcaggcggcattttatgcctttgcgggcgaccccgcacggccggaagcccgccgtaccagggcgcagaatatgggagaatccctgagtgtgtttatgcagggatttctcggcgaactgttcaaccgtgagggcagacactggccggaggccgatatcaccctgattgacctcggcacactggcgcgggagggctacgaagccccgctggccgtggcctatacttccctggtcaacaccatcaataatatcgcggagcgtgactag

SEQ ID NO: 281166 - DNA, 186 bp, Morganella morganii; identical to SEQ ID NO: 279239

SEQ ID NO: 281167 - DNA, 1125 bp, Morganella morganii
atgtccaaaaaacttaaacataaactggttaatttattcttacagatttatacgcgccgccgtgatttttcgcactccgtcgctgcctttaaacagctgaagactatcgacttccggaatattgttatttattcgacaacggcactcggggattttctgatgaataccccggcaattcatgaagtcagaaagcgttttcctgatgccagaattaccgttgtttccggtaataaaatggcaccttatatccgcaccggtatcggtaaagactgggacgatgtggtgtgctggaacagcaaagtcaataccgtactgaaactggtcagggatttaaaagcgcacggaacaccggatctggttctgattatgcactcacataacccgtatgattatctgagcgcagtcatgaccggggcaccgtttgttttccgctgtaatcatccgacaaacccgtatatggagcgctggctgacaaactcgacccgctttgcacaccgccattcagtacaggtccgccttgatctgatcactccgctcggctgccggtttaccgaaaaaagtgttgagatgcgggtaccgtgtgaggtcacaaaagtaccgtcaccggtaagacgggttggttttcagatgggcgcttccagtgaggaacgacgctggccggttgagaattttgtcacactcgcacgcactctgcttacccggtaccgtgacctgaatattgttctggtcggcgcgccgaatgaaattcgcctgtccgatgaatttctcagtttacttgagccggaatttcacaaccggattgagcctctgatcggtaaaaccaccgtcgaagaattaacacaaatcgtaaataaccttgatcttctggtcacaaatgacaccggaaccatgcatctggcatttgcgttaaaagtccccagtgtcagcatgcatgtcagcacctgcccgcaattcaccggcccttatcaggactatgaattacatgaaattatttccgggtttgcctcaaaattactactggaagagggagagcatgaaatggcctcaatttctgcggatacagtaattgaagcaaccgttaaatcattatctgcgcggggaatattgccggtatcagaggaataa

SEQ ID NO: 281168 - DNA, 141 bp, Morganella morganii; identical to SEQ ID NO: 281027

SEQ ID NO: 281169 - DNA, 186 bp, Morganella morganii; identical to SEQ ID NO: 281095

SEQ ID NO: 281170 - DNA, 144 bp, Morganella morganii
atgttatacgaacggacaactaagaaaaacactgagattgactatgccgctatcaaagcgcagaagaatgcaatccttcagcgtttcctgctggcgaagaaaaaagccgaacagtccggtcaggttgtcactaagcctatctga

SEQ ID NO: 281171 - DNA, 543 bp, Morganella morganii
gtgattagcgtttttgacatgtttaaagtggggattggtccttccagctcccacaccgtagggccgatgaaagccgggaagcagtttgctgatgagttggttgaaaaaggtctgatttcccgcgtgacccgcgtttctgttgatgtctacggatcactctccttaaccgggaaaggtcaccataccgatatcgctatcattatgggtctggccggtaacttgccggcaactgtcgatatcgatggtatcgccggttttatccgcgatgtcgaagagactgagcgtctgtccctggccaatggtcagcagactgtggacttcccgcgtgaaggcggcatgaatttccacaccggtaacctgccgctgcacgaaaacggcatgagtatcaccgcatttgccggtgatgaagagctgtacaccaaaacctattactccatcggcggcgggtttatcgtcgatgccgagcatttcggtcaggataacgccaacgaaacaccggtatcccggtatcctacccgtatgcctcagcggaagagctgctga

SEQ ID NO: 281172 - DNA, 528 bp, Morganella morganii; identical to SEQ ID NO: 281044

SEQ ID NO: 281173 - DNA, 255 bp, Morganella morganii; identical to SEQ ID NO: 280887

SEQ ID NO: 281174 - DNA, 648 bp, Morganella morganii
atgaggggatctctcagcgcctggtatgtctcttttgttgacgtgttcgtgtacatggttcgtttcgggatcatcagctggctgccgatttacctgctgaccgagaaaaacttcagcaaagatcagatgagtgtggccttcctgttcttcgaatgggctgcgattccgtccaccctgctggcaggctggctgacagacaaactgttcaaaggccgcagaatgccgctggcgatcgtctgtatgaccctgattttcttctgcctgatcggttactggcagagccagtccctggccgtcgtcaccttcttcgctgcggttgtcggttgcctgatttatgtgcctcagttcctggcatccgtgcagaccatggaaatcgtcccgagcttcgcggtcggttctgcggtaggtttacgcggtttcatgagctacatcctgggtgcaaccttgggcaccaccctgttcggtttcattgttgaccgtatgggctggcacggcggtttctatctgctgttaggcggtatcgtctgctgtatcatcttctgtattctgtctcacttcggtgcgctggaactggaacgtaaccgccagcaggcactgtcagaagaaaaagaaacaaaaatcaaattagaacctgcttctgcaaactga

SEQ ID NO: 281175 - DNA, 7278 bp, Morganella morganii
atgaataaaatattcaaagtcgtaaaaaatcaacggacagggaattctgttgtcgcatctgaattcgcaaagggtgcaaagaaaggaaaaaaactgatgctgttatcactggcaatgctgatgggctgcgggctgagcgtatctgcactggccgctgatcctgcgggccagtggttagaaactgagtatctccctgcacaatatgacagcacaactaaaacgtgggttaataattcaaatgaaaaagaacaatcccgggttattaatgacggcagcgttaaagatcttaatttaaataacgaaaagactaaattcaccaataatcttgattatcatgaaacctggttttcattgcaggaattatgggcaaaaaacacggatgcaaataaggttatttcgattaccgaataccgtgacggacagccgcttccggggaacgcttccctgaatgcgattgaagactggcaggtcccggacaacccgtctgcgatggaagaaattacctggaagaaggaagacggggaaatcgccgtcatgcaggcctacaacaccgatgccttcaaaaaaaacatcgatccgcagctgggtgtgtatctgctggaaaaacagccggaattatcccctttctatcatctgacactggcagaagttaaagacggtacgctgaatatgacagcggctgacaatgttgactgggatatcaattacatcaaagacagctcactgtttgtggctgccgcagacagcggaaaatccgcgactattgataccaccagcaaactgcatgtcacattcggtgaagcttacggcatgtatttatcttccggtgaatacaaatacaccttccagccgcagaatgaactggttgagagtgtcgctatcccgaaagagctgaacgggttcacatcgaaaggaaaaacgtatgcccttggtgacacttttgccatcggcaatgcacagggactggcggcgtataacgcgttactgattgacgcagtaacacataacgtattacccggggcggaatacaaagcgctgattgaagcgacggttgtcccgcgtccgcaggataaagattattttgacgttaatatcgacctgaaaggtttggaagataaagatatccgtctgaatgacgccattaccgccaatatcggaaaacgctccatttttgaggccgccggtgacggcagtgtgctgaatattaaagacggtgcggatatccgtggtgaaacttcatcaaattcaggtcgttatcgtgcgtaccatatttttgcgcatgatggcgcaaaagtattccatgatgccacaacctctgtgccgaattacaaagggcagaatgcgttaatcgacaatgcggaatttaccaaccgcggtacgttactgctgggcgacggtaaaacccgcatctacggtgatcaggtcaccggtgaaaatgcacactataccaaccttggtaccattgccgttgaagccttcaacctcgtcaataatgatccgacagataaagatgtaattgccaacaccggtgtgactgcatccggcggttctctggtcaccaacgaaaagggcggcaaactgctgctggggcagaaagggatcggcaaaaatgaaggaaccgtgaccggcgtgcaggtcaagggcgcttcatttatcaataacggcgatattctgatgggtaaagacgatgtcagcctgtccggcggccgtgaggacgatacctgggatatgcggattatgtcgaacgccgtggctgcactgctggatgaaaccgcaaaagccggtgaaaaatatgcgattgaaaacaaaggaaaaatcgatattaacaaaggtgtcagtaatgcggtcggcattaacgtggcatcaacgccgaaccgtaatgcggattcacagctgactgtcgttaacaacggtgaaattgatgtggcgggtaccaatactgttggtatgcgggtgtcaggcacgaaccgtgttaaggatgttattgaaaacaacggcacgattaatgtttccggggcaggctcgattggcctgctggcgctgggcgacagcacgattactcaccacgggcaggtgattgccaccaacaacggaaccaccaccggcggcaccaaaccggcacgcactaccggggtacgcgcggatgatgcgaaagtgattatcgacggcggaaccgttgagctgaaaggcaataacaccgtcggggtctttgcccgtgtaggcggtgaaatcgaccttaacagcggtcacgttatttttgataaaaactccgtcaaccagaccggttactggatcgccgggcgtaaaggggcagatgaaaccttcagttcgcggatcaatttcggcgcaagtgatgtagctctgacactggataataacgattccacgttattccgtgttgaccagaaagcgcagttcctgggtgacagcagcaaaggcacaacttatacctttgatatcaacggcgaaaaaagccgtggtttctatattgcggataacggtactgaagtaaaaaccggcaatatgcaactgaatgtcaacgggaacgacgcgaccgggctgtatctggctaatggtgccggggcggacggtaaggttgttctggataaagagactaccatcagtgttaccggcgaaggcggaaccatcgcggtgattgacggtaactattacgatattaatggtaatgcgaccgggaaaaaatcagataaaaccacactgacctcaaaagcacacctgaaatcaggcggaaccgatgacaatatcgcgaaaaacgcgatcggttataagctgatcaacggcggtgtgctcaatcacgacggtaatattgatttcagcaaagcggataacgccaccggcatccgtgtggaaaccgggacggttaataacaccaccgatattaccgtgaatggtgtgggtgttgatatttacggcaaaaattccgtggtgaataacaccggtaatatcaccgccaataacggtaccgccgcagtccgtctgaataaagatgcctcaatgaccatcggcggcaaaggtaagatcctcggtgaaaactcggcggatgcggtacgggcccattccggctcaaacgtgaaactggataacgccaatattgaagtcaccggcagcggcagcggtctgcatctgctgaataccgatgatgacagcggcgcgtttaaactgtccggcaccggcaccatcaatgtcagcggtgagaatgcctccggtctgaagctggaagcggatgacggcaaaggcggggtgatgatggcgaaaagcaagctcgacacctccggcgccggcggcaccactatcaatgtaaaagataagggcggcaacggtattgtgaccaatacttccggtgatgttatcagcggaatgaatgtgaatatcgaatcagcagaaggggaatccgcactggtggtgcttggtgggactaaaaacatcacacagagcggcaaactgacgtcagcatctgaccacagcgtggtggatctgactgcgctgagaaacgatttcagcttcaccaacagcggtactgtgactgccggtgccagcggtatggcggtggatgcacatcagaacagcaatatccgcttcaccaacggcggcacgatcagcggaaaatcggtgctgggcggcggtaataacaccatcgcgctgagcggtaacaccagtgatatcgcgacaggccacggtgataacaccattgaaatgctcgaaaaagcggtaaccggcattctgacagccggtaacggcaacaataccgtgacactgaacggcggtaccaaattacagaccggtactgtcggtaatggtcagaacaatgtgattctgaaaaatgtttctgaagcacaaagtgatgccctgttcggcaatctgaaggcgggcagcggcggacaggatgcactgacgctgcagggcaaagcaagccactatgtattacaggacagcagcaaaatcagcggctttgaaaaactgaatattgaggaaggccgttttgaactgcgcaataccgatatcacgctgaatgaactgacagcagatgacggtatcaccgtaaaacagggcggtgagctgtttatcaatcagaataaagccgatacctttgcccatcagttgcagggggatggtctggtcaccacctcaacagcgggtcaggcgtttgactttaataataagagcgcggcttttgcgggggataacttcaccggcacgctgcgtctgacaaacggcacctttgatatcgccggtgataacacccgcgcgctgcaaaaatcccgtctggatatcggtgataaatctgttgcaaccgtccgcgcaggcgtcggcacacagtcatttgatcgcctggcaatgagcggcgggacactggcctttaacgacaatatcaccggcagcagcaaggcggatggtcatctcagcgtgaactccctcgaactggacaacgcgaaaggcactgttcaggtgaaagcggacggttttgataatctgccaacgccgtcggtagataacaaagtgccgctgctggagcaggatgaagggaattccgtggtgcagctggtcaattccggtaaagcctcggattataccggcgggctgaatctgcaactgacggataaagacggtaatgtgatcccgtcaaatacgaagacagaacaggatctgcgccaggacggcaaagtggtggcgaaaggcacctatgattacggcttacagaccagtgcaaacgccggcggtaaagcggacgggttgtatgtggcttatcagctgaccgaagtagatctgcagggcaaaggcagtgatgcactggtgctggcggcacagtccggaaaatccggatcggcggctaaccttggggcgaaaatcaccggacagggcgacctggcaattgataccgcgagtgaatacgtcacgctgtctaataacagtaatgattacaccggcagcacgtttgtccgtcacggcaaattacgggcagaagcggataatgtgttagggaatacgcagttactggatctggcatccggtaccgcagttgaactgaccagcacagccggtgccggtacagagcagaccgccgggaaactcacgtctgcggtaaacagcctggtggcattgggtaacggcaaactgacggtgaaaaacggcggtgaggtaaacggttctctgagcggtactcaggcgggtcagctggtggtgaataatgacacactgactgtcaccggggcaaatagcgggatgcattccgcagtgactatcgatcagcctgcacaggtcactatccgtaatatcgcgggtctgggagacagcctggtcgccgtggcgggtacactgcgcacggaaggcgcgcaaggtctgctgcgtaatcagctgaccggcagcggcaccaccgaaatcgcacagaaatcggatgctcagctgacggcagataacagcgggttcagcggacgtttcaccacggatgcagacagtacactgcgtgcctcacaggcagagcatatcggcagtgcggcgatcgaaaacgccggtacgctggtgctgacgcacaatgacggcaaacagccgtgggatctgaccaacagcgtcaccggggcagggacactggtgaaacagggtgtgggccgtatcacgctgacagataaatcggcgcagtacaccggtaccacggagattgagaacggcacattacaggcggggagctatgattccgcgctggtgatgaacagccgtcaggtgaatatcggcactcagggaacatttgccggtcagggcacactgaaaggcagcgtgaataacgccggtcagttctatgtcggtgaattggataagaaagatctgggacaggcaacggattaccgcgttgacggcaactttgtcaacaacggcggcagcatctggcttgcgagtcagaaagagaccgaaagccgtctgaatgtcggcggggatttcactgcgaacggcggttcgatcacactgaataccgtgctgaacagaggtcacgaagacacaatgactgaccagctggtggttgacggtaatgtgtacaccgggaaaaacggcgcgaccacgctgaacattaataatgttggtggcgaaggtgcagataccctgaaacagccggatgcgattaaagtggttcatgtcagcggaaaatccgataaaaatgcctttaaactgggcgggccggttgctatcggggtatacgaatacctgttacacaaagggtataaagatgacagctggtatctcgactcttttgataccaatgtctatccgccggatgaaaacaaggaagatccgaaccgtaacgtgaacccggaaatcggcggacacatggctaaccgcatggcagcgctgggcatgttctccatgaccctgcatgatcgcctgggcgagccgcactatgccgacagctttaaaggggatgaaaacgcctcttctgtctggctgcgtatcaccggggatcgtcagcgtcaggatgcggtcagccgttcactgcgtctgaaaggggatacctacaccacccagctgggcggcgatattatcaactggaacaatgatgcacaggacactacgatccgcggcggtatcatgggcgcaatcggtaagtctgattacaccagcagcgccaaacggaccggtacgaaagccgatgcaaaaattgatcgtgcttacagcgtcggtttatacggcacctggtatcagaaccgcgaagatgaaaacaatgcctatgcggatgtctgggcacagtattcctggtttgataataaagtctccatggccggcagttcatcggattataagagccgcttagtcagtgcttctgttgaaaccggctacagcatggcggtgtacaaaccggatgcggataaacagtggctgttaacaccgcaggcgcaggttatctttaattcgtatgattctgatgacagcagcagcggcaccggtctggtgatgaaaggcgggcgcagtaacagtgtggatacccgtctgggggcccgtctgacctacgcaaaccagaagcagtcagataaatccgcgcagccgtttgttgaggtaaactggctgcacagtacggcgaagagtgatatgacctttaataaacactacaccttcagtgatgatcgtccggcgaaccggtttgagatcaaagccggtgtggaagggcagatttcaccaaactggacagtctggggtaacgtttctcatcagatgggcgcggatgattactccggtgaccgtgcgatgatcggcgtgaaataccagtggaaataa

SEQ ID NO: 281176 - DNA, 279 bp, Morganella morganii
atggtgaagtggccaaggcgaaaatgcctgatatgccgcgactggtttcacccgaagtttagtaacgaatggtggtgctgtccggagcatggtgctgagttggcaataaagcgacgaagcagggaaagggaaaaggctgaagccaaattaagaaaggagcagcagcaaaaagaacgtgaagcaaaagataaattaaaaatccgcaagttagcagtaaaacctacctcatatttccggcagcaagcacaaacagcgtttaaccaattcatcagactctga

SEQ ID NO: 281177 - DNA, 213 bp, Morganella morganii
atgtctaatacaatgactggttcagtaaaatggtttaacgaatcgaaaggttttggcttcatcactccggctgacggcagcaaagatgtgtttgttcacttctctgcgatccagagcgacagcttcaagacattatttgaaggtcagaatgttaccttcaatattgaagacggggcaaaaggtccgtctgcatcaaatgtggtgggtctctaa

SEQ ID NO: 281178 - DNA, 369 bp, Morganella morganii; identical to SEQ ID NO: 281094

SEQ ID NO: 281179 - DNA, 231 bp, Morganella morganii
atgggcagacaaaaagcggtagtcagagcacgcaaagaggcaaaacgaatgagccggaaagagtcgcgcagggcacgttttaatgatgataatgtggcggtttttatcccggcgggtgtagcgcggcgcgaaattctgcactatcaggcgcgaaattctgcactgcgaggaatggtgaaatcagcgcattttgcacagtgcaaaattgattcaatattcctcgctatctaa

SEQ ID NO: 281180 - DNA, 639 bp, Morganella morganii; identical to SEQ ID NO: 14558

SEQ ID NO: 281181 - DNA, 606 bp, Morganella morganii; identical to SEQ ID NO: 27137

SEQ ID NO: 281182 - DNA, 267 bp, Morganella morganii
atgagtttaaaacaaatggataccggtgaagttaaagccaaatacgaagaattgagcaagattttaacagttgaaggtaactacttcgtttttcgtctaagtgacgacgaaattaataattatgaaatcaatattgaggtctgcaatacagcagagaaactgatttcatgggtataccacctcacagaaaagcaatggatgacagtcgatttattgcgttatttcatacaggtagcaagtaaaaaatcaaacattaatatccggtag

SEQ ID NO: 281183 - DNA, 171 bp, Morganella morganii; identical to SEQ ID NO: 279336

SEQ ID NO: 281184 - DNA, 327 bp, Morganella morganii
atggaaaatgcaaatccacgcaaatcgtttaaccggtttgtgtcaaatcatctgatggcaacagctcatcaggcactgagaagcaccacacagacagtggttgcaaaactgctcggtgtacacgattcaacagtcttacgcagaacagaaaagttaccggagatatgcgagacattggccgcagccggtatcacggattttgttttgccaggcgagaagaaaatcagcgaggaagagtaccggtttctgtggaaacagatcggcgaactctctctgatgagaacaaaagaaaacgccccggctgttggagcagcagaggcgcattag

SEQ ID NO: 281185 - DNA, 993 bp, Morganella morganii
gtgacgctgatccagcgtttcggcagcgcgctgaacctgaacatccacttccacatgctgtggctcgacggcgtgtacgtggaagccaccgagctgccgcggcgcgaactgcgcctgcaccgcgcccgtgcgcccaccaccgcgcagttgacccagctggcagctaccatcgcgcaccgggtgtgtcggcacctgacgcgcaaaggctggctcgaaggggagggcgaatcggccttcctggcagacagcgctgcaggcgacgacagcatggatgggctgcggatgagttcgatcacctaccgcatcgccaccggccgcgacgctggctgcaaggtcgtcacgctgcaaacgctgcccggtgacgccggttcgctggagggcgaagccggcaaggtcggcggcttctcactgcatgccggcgtggcggccgaagcacacgaaagccacaagctggaaaagctgtgccgctacatcacgcgcccggcgatcagcgagaagcggctgtcgatagcgctccagggcagggtgcgttaccagctcaagaccccgtggcgcaatggcaccacgcatgtggaatgggatccggtggatttcatcgccaagctggcggcgctggtcccgccacctcgcgcgcatctcacccgcttccacggcgtattcgccccgaatgcaaacctgcgtgcgcagctgacgccctcggggcgcggcaagcggcctgcgggcgatgcggcgccagtggacgtcagcgcccacgacgcgccgcgcagccccgaggagaagcgccgtgcgatgagctgggcgcaacggctcaagcgggtcttttccatcgacgtcaccgcctgcgtccactgcggtggcaccgtgcggatcgtcgccagcatcgaggaacccaccgccatccgcgccatcctcgcccacttcgagaagcacggcgcgcgggaagaagcgcactacaggcccgcagcgcgcgcgccgccagtgcaagccgcgtga

SEQ ID NO: 281186 - DNA, 5982 bp, Morganella morganii
atgcaatgtttatatattttccaaaaaaatggttatgctataacattaaaagatttgtatttaaatccaacaataaaaggatggtataaaatattaaaaaaatcagatataaataaaaaagaaagaaaagataatatatatacacataaaacaataaaaaatgctggtgagttttcacttacacctatacaacatgcctattttgtcggccgtttgaataaacaaactcttggtggtgttgcttgccaaatttatcaagaatttgatggcatccctaaatttactccggaaagtctagagaaagcattagtattattatcaaaacgtcatcccatgttgaatatagtatttcaccaacagggtacacaattttggtctcctaacccaaatagaaaatatgttacatatcatgattttagtaaattaccaaaagatgagtatgagaaaaaacttttacaattacgggaaaaattaagccatcaggtactaaatgttgaaagcggtcagttaattgattttcacatgatatcgctacctaacaacagatatcgtttatgtactaatattgatatgttgattgcagatggtacaagttattcattactctttactgaactttgtttattattgagcggagaaatactgcctcagttagatgagcactatgacttttaccattatttacaagataaaaaacagtatgaaaacaaagaatcagcatatcaatattggaaaaataaaatcccaaacctaccagactctcctcttctgccattatatatggatccagaaaaaataaataaaataaaaattaaacgccttagctggacatttagctcaaaagaatggaaaaactttagtaatttggctaaagaaaataatattacaccttccattgcattagcaacctgtttctcatctgtacttgcaagatggactggccaaaatagcttattactcaactttacattatttgatagaaagccattagcccctgcagttaataatattatagctgattttactaatgtcattcttttagaaatgaaaacagacaatcgaccattaatttcattatctaaagacaatcaaaatacatttattgaagcttggcaacattctgattattctggtattgatatcattagagaccttcgtaaaaatggcacccatccttatgggtgtcctgttgtctttactagccatattaatcaaccacttattgataaaaatatagaatctgtattaggttctataggatggggaatatcacaaaccccacaagtttggcttgatcacatggcaattaacaaaagtggaaatattgttttacagtgggattataacaatgacttgttccggaatgatgttataacaacaatatttgatgtttatatttctcgtatacgccaacttgccaacgatcctaatgcctggattgaaacccaacctgatttaattcctaaaaaacaattaaaaaatagaatatcagttatcaaaaaagataattcactattaccacatacactgcataagtctattttccataattattcaaattcatcaaaaattgctgtcattgatatcgactctcaggaatggagctacaaaaaattattatctaaagcaacaatactcagtgatcaaataatacaacaaggttataaaccagaagacagaattggtgtatgtatgccaaaaggagtagggcaaatcattagcgttctggctattttattaatggggggaacttatgttccgattgatgtactacaaccagaagaacgtataaaccgcattgctaaaaatgctcagctttcattactcatcgtatctgatagcgatccatcctattcaatctatgctacattttgtaacaggattgtttggcaaaaagttcaaccctccgagaataaaccactacacaatatagatatatctcctcatcaagcagcttatgttatttatacttcaggttctactggagagcctaaaggtgttgttgtatcccatgccagcgcaatgaatacctgccttgatctcaatcggcgatataacatttcagacaaagatcgggtacttgccatatcagcactacattttgatctgtctgtttatgatattttcggtgttttaaatgccggagggactcttgtattagttaaagaagatgagcgccgtaatcctgatgcatggttacgacttattaaccaacataaaataacactttggaacagcgtacctgcactgtttgatatgttactaacctatgcagaaggaatagggtcatccattccacaatcgctgctattaatctatctctctggagattggattgggcttgatctcccgacacgttactataatttctgccctgatggacaaatagtcgccatgggaggtgccacagaagccgctatttggtctaactattttaatgtcacaacattagacccatcctggagctcgataccttatggatatcctttatccaaccaacgttatcgtattgttaatgctagaggagaagattgccctgattgggtatcaggagaactttggattggtggtgcaggcgttgcgttaggctacctaaacgatcccgaaaaaacagcacaacagtttgtaaaacaaaatggtgaaaattggtataaaacaggtgatatgggaagatatctccctggcggtatacttgaatttttaggaagacgtgaccgccaagttaagattggcggataccgtatagaaccaggggaaattgatgctgcattcaataagcttcagggtgtgcaaaatgcgattacactatgccttggtaatggtaataaagaaaaagcattacactcttttgtgatactaaattcgggtaattaccagaatattatcagttcaaatagcaccttttctcccctctactatctgcgctcaaccccaataaatgtacaacaacaatcccaagaaacggcaatcatagctggatttttatatgattatcttactgaacaaaatattgatttcgacaacctcttgtcagaaaaaaaatcagcagatgaccatagcattatcgctagctatcagtcattaatggctaattggctaaatttaatagcacaatatccacaaactacactcaattcccccccaactaatagtacccagcgaacgctaatagaaaatttgcagcgccacaaaaacaatttaacagacatactcaaaggtaaaaaatcagctctaacactatttgatgatccctattggtcaccagaacaagtcactatgcgtattgatggaatgcactactccttagaaaatttactacaacaaataagagaacttcatcattcactaaaaaggccaataaaaatcattcaattaggtgctagaagcggtatttcagcaaattatattctgcaacgattacccaataatatggttaccctactgctaactgatgagtctctttcaatggtaacgcaagctaaccaaaatttatcagattatcaaaatagttatgctgagcctcttacagaagtatttcttcataaaaatcgatatagtgcagatatcatttggatgaacaattatcttcatcgattagacagcccacaaaaagagatacaaaaattcgtttcactctgtgctccgagtggaatgatttttatacaagaagtgttacatgcccctgcacaatcactgataagcatctctttattacaacaaaatggtagtgatcctgctgatgaattattaacagcaaaaaaatgcaaagatatctttagcgcttctactgcgacttataaaagtgaaggagttaacggcgaaatattgacacagttataccaagcaccagaaaaaatttatttaccagataaaaataagctagagcatgatttgcgccaatttttaccagactatatgatcccaaaacatatttattttctaactgagttccccttaaccgcaaatggcaaaatagataaccaatcattaaaattgtattgtcaggaataccaagaagaatacctaaatcaacaacctatcaatggtaaagaacagatcatcataacaatatggcaaaagctccttggcaccaacaagatacaccgtcacagtcatttctttcgtgaagggggagatagcctagttgctattcgattgatctctgatttaaaccatattggctaccaagttgaactggagcatatctttgcttatccgatcctttctgattttgcacaaaatataaagcagagcgaagttttcgaaaaacagccagcaatttcacataacgaggcgtatagatacaatccatttccactcactgatattcagcaagcttacttagttggacggcaaaataattttacacttgggggtgttggtacacatttttttgtccattttatagcggaaaatttagatgtacctaaattagaacgtacaattaatcagttgatttctcgtcatgatatgttacgtggtgtcattattaatggacaacaacaagtacttaaaaaagttccttattattccgttaaaacgcattatatccctacagaaaaaagtgacgcttttctagtattacgagctcaacttgctaacattgtttatgatccagaaatttggcctttatttactattcaagttatcaagaccaaagaacaaccagatcatatttttattagccttgataacttattccttgatggaatgagtatgcagatatttttcagtgagctaaaaacgctatatatggagccaaatcaccaatttatccctctagatattacttttcgagattatattgattgtgatgcctatccgattaacacacaaaatgattgggaatattggttaacgcgtttaccacaattaccaccagccccacaattgccactaataaaagatccagcacagattgtgcaacctcgcttctcgcgtttacaaacatcattatctacttctgtttggcaagcactacaacaagttgctcagcaaaataatgttacgccagcagcacttttgattgctgcttattgcgccacattatccgcatggagtaaaagccctgagttaacaattaatttgacattatttaatcggcatcctgtacatcctcaaataaatgaagtacttggtgattttacctcattacaattactcgattggtatacctgtgatctttggtcaaacagtatctcaatgatgcaaaaacgtttacataaagatatgcaacatcgtagtgtttcagccattaaagtaatgcgtgaaatggcaattcaacgacagatgtctcatatagagatacctgtcgtttttacctgtgcattgggctataaacatgatgaaggttttctttctcatcattcatggctaaaacctgtttggggaatatcacaaacaccacaaacatggctagatcatcaagtatatgagtcagacggtgaattatatttaaactgggattttgtcgaacaattatttgactacacaaccattttttccatgttccagcaatatgaacatatactcactaaactggctactgaaccacaatcttggcaattgccactaaataaacttataccaagatgcaataatctcgtcatcaccccagttttcaatgccaaaaataatcaaaacacacattataaacaatctactgatacacaaaaaacaggtcagacaatacaaaaactacaacaacttgttaagcaagttattggaataacgttagcacctgaaacaaattttttcgaagcaggtgccagctctttacaattggttcaacttcatgcagcactacaaaaaaatggctatagccatattacaattactgatctgttcgctagtccaaatctaagtacattagcgcaattgctttggcaaaacacttcaccaacatgtgagcaatattccgaccgagacaaacacaaaaacaagagaaagaaacggttacaactacgaactcatagtagataa

SEQ ID NO: 281187 - DNA, 165 bp, Morganella morganii; identical to SEQ ID NO: 33404

SEQ ID NO: 281188 - DNA, 306 bp, Morganella morganii
gtggtgtatctggatgcgcctgagcgcttgctggatgaggtcctgcttcagccggggacggaactgaaggaggcggatgctccgcacatcaccgccctgttacaaagtccggcctggcaggccagagaggcggcattacggcaggcttatcagggggttattcaggcctgggagctgggggtgacccgtctgccggcggtggtggtggatgcgcagtgggtggtttacggcaccactgatattgagcaggctgtgacacagatacagcagtaccgggaacaacaggaaggaggaggtcaaccatga

SEQ ID NO: 281189 - DNA, 852 bp, Morganella morganii
atgacagccattgttttccctcatgtttgctgtaattgcgggattattacggatttatccggttatggctgcattcccggaaaccttggtttgggagaagcggcaaaaagtggtgtggttcaggggactggttcgtcaacaaaagatgtcatgagccagaaaagtgtgactgatgcgcttaatgaaaagcagcctgccggtaattattatcgcttcagtgaaattaatgaaatgcccggcagaggatttaacggggtcttttccggcggtataggtgtgaaatatatcaaaggaatttctgtttcatccggggggcaagctgataccggccagatttttgttgatttcaatgccgttgtgacagcgcgttatttaaacagcaacggcagcatacgtgaaaaccgtattgtggggattccaatcggggcaactatcgaatggcagtcaacagcgactatccctgaaaactttttagcaaatgacggacgatctttcagcgcttctgattaccctgaactcgccaaaatattcccggggctgaaactccctgatgacaggggattatttaagcggggtttggacagcggtaaaaacattgaccccgggcgagtgctgggcagtgtccagagcgatgctatgcagaacctgactggccgctttggcaatccgactattgagggcggggatttttctgagggggtattcaggcactcagtcaacattggcggacgcgcagccggagcaaacggaaactctattgcatactcctttgatgcctcccgtcaggtaagaacagcaaatgaattcagaccggtaaacaaagcggtcatttatattacgagggttatttaa

SEQ ID NO: 281190 - DNA, 630 bp, Morganella morganii; identical to SEQ ID NO: 280947

SEQ ID NO: 281191 - DNA, 1329 bp, Morganella morganii
atggcggtcggtgacggtggcggaacgctgccggttcctgatccggcacagacaaagttagtccgcgaaacccgcagggcggcagtcaatcaggtatctattgacgagaaaaaccccaatttcatcattgccgaacaggtgatccctgaaaatgagggcggttggttcatccgtgaaatcggcctgtttgatgataacggcggtctgatcgcggtcggcaacgccccggaaacctacaagccgaatttacaggaggggtctggccggacgcaggttattcagatggtgctgatggtcagcagcacacaggccatcaccctgaaagtggatccgtccgtggttctggcaacccgggagtatgtgacaaaaagtgttgatgccgcgattcaggcatcagaggctaaagctgcaaaaatttacgcaactaaaacagagttaagttcagggttgtcgggtaaacagccgacaggcgactacgcaaccaggacggaattaaataacggtctgtcaggtaagcagccaaccggcgactatgccacaaaaacagaagtaaacagcaaacttgccaaagaccagaacggcgcagatatcccgaacaaagatacctttatcaaaaaccttggtttaggagaaatttatgccacctgggaggatgtagggcaaaaactggataagtcaaaggtaactaactcgctgattaacagccgggaacttgttccgactactgcactgatgattgataatctggcgctgaaacagcccgtcggtgattatcagccaaagggtgaatatgcattgttaagtgatttaaagtcactcatcaagccgggtttcactatgcagacaatccttgatgaggcggatattgccccgccgtggtatttgatcaacggtgacagatacgggttagacaccccgcagggaaaagtattgcgggcattttctgctgacctcaaagcgcgctggaatatcactcagacagcagaaacaattaccttaccaaaaactttacaatctgatggacggatgccgttcccgcgcccggtaaacggaacaggccgtaaaacaggttcagtttccggggatactatccgtaactttaccggtgaattaggttatgaagccaactacggcctgacaaccggcgaacgtgatgtgagtggagtgttccgtgcttatggtgcatccaaaggctcatttacgggtggtggcggcggcagaagtctcaacattatgtttgacccgtcaacagttgttccgaccgggccggagaataagccacttgatgtaggggcggtattgaaagtgtatctcggagttaaaccatga

SEQ ID NO: 281192 - DNA, 912 bp, Morganella morganii
atgacatcccccctcgtacttgcgccgttattacgactaacatttgtgctaggagaacaagctcaacgaaaacaaaccttaaaacatatcagtatgatccttgaactttcagagcataaacaacatgataaacattttactctccctaaaaatagtgatattacttttaaagatgtctgtttggatcatggtgataaaccgatattagagaaaattagttttaatgcccaagcgggtacaacaactgcaattgtaggccacagtggtgcaggaaaatcctcattattaaaactaattccccgtttttatgattgtacttctggccaaataaaaataggtcaatatgatatcaactactggccagaaattgatttactttctcaaataagtgttgtttttcaagatgtatatctatttcatggaactattttagaaaatttactcatagcaaatcctaatgccttatttgaggatattatcaaagcaactaaagcagccaatattcatcatgttattgaaaaactcccagcagggtataatacattaattggtgaacaaggaaataaactttcaggtggagagaaacagcgattatcaattgcaagagcactattaaaaaactctccaatcctacttctcgatgaaattactgccaatgttgatgctgaaaatgaaattttgatctatcgcgcattaaagagtctatgccagaatcggactgttattatgatcactcataacctacatactattattaacgcagataaaattattgtgcttgataatggaaagattattgatacaggtacacacacccatttattaaaccaatgcccaacctatcaaaaattatggaatgattatagtcacactattcattggcaattaatccaggagaataataatgattaa

SEQ ID NO: 281193 - DNA, 1728 bp, Morganella morganii
atgattaaagaattaattaaatcaggttatttgctttctaataaaaaagataaagatttaatggtgggtctatgccttgccgtagttgaaggtctttttgctactattccgtatattctactctattttttattaattgatctttttgccaataaaatcacactagctcagttattttattactttttatcaatactcttatctattgttctgcgtattgtcattggtacttatagtatgccaatgatttttattggtgcttataaaatgatgggacaagcccgtctaagaatagccgatcatttacgaaaaatcccgattggctggttttcttctcaacgcagtggtgatcttgcatcacggcttactgctgatttagagatcattgaaaatatctggtcacatttcttaggaatgtttatcagtactttagcgatgcctgtttttctctcactattcttagtatgggtagattggcaactcactttaattatattattttctattccaatcgccctgttcgcattatccataagccataaaataatgttaaaagctgcacaacaggcagctgatgctaatgccaatgtacaatccgaattactcgattatatccaaggaattatggttattcgtagttttgggcgacttggtcctgcatggaaaaaactaaaagcagccttagaaacacaaaataaaacccaaatagttctagattccaagcctgccccttggattgcactttatggttttattcttgaatcaggttttattttattaatgataataggaacaagccgtttaattagtggctcactttctccttctcaattcgtttttttccttgtattagcactccccatttatcgacaattctttgatttaggattatccagtatgttgttaaattatgcacaaaaatcattacaacgcatagaagaagtaatgaaagtggttccactttctgagcctaaatatactcaattaccaataagaacagatatctattttaacaatgtaagctttatttatccttataatagtcaattaacattagataatatatcttgctgttttcctgaaaaaagctttactgctattgttggccctagtggctcagggaaaagcactttactacagcttatttctcgtctatgggatgttaaccaaggtgaaatattgctagatgatattaatattaaccaaataaattccgataaactctgttcatatgtatcttctgtttatcaagatgtcgttttattttcaggaacaattaaagataatattttaatgggaaaaacagatgctcacgatgatgaaataataactgcagctaaattagctaatgcacatgagtttattatacaaaaaccacaaaattatgatactcctattggttacggtggtatgttactctcaggtggagaacgtcaacgtctttctcttgctagaactttattaaaaaatgcaccaattttactgatcgacgaagcaacatcgaatatcgattgttcatcagaagtattaattcaacaagctttatcattgttatcaaaagataagacaatcattatgattgctcatcgattaaatagcattaaaaatgccgataacattatcgtaatggaaaatggaaaaatagcagaacaaggaaaacatgctgagttacttgcaaaaaatggcttatatgcacatttatggttacaacagaaagcgttatgctaa

SEQ ID NO: 281194 - DNA, 1218 bp, Morganella morganii
atggcggtccgccgtccgcgtctgtttattgcggaggccggtaactcctttggtttactggcggactattacgccagtctggggctgagtgtcaataaggtcagtgtcaagcccggcagcggggtgcgtctgccgctgtttgcggatgcgcatcagctgctgatgatggatgaacagcgtctggcactgaatgtggatgaactgcccgagacggacagtgaatctgaggatgatgacgggcagcgtgacattctgggggaaatggaaatctccgcccgcatgatgatcaccggcggggatgtgcgggaagaagcggagctgaagcgggctgaccgggcgatgatccgccgggcgctgatggcgggggcccgggcgtcttatgccgccgaccggcagatgctgccggcggatttgcaggaggcgctgtatgccctctcccggggggaaggtgaagaggaagggcgggcgttaaatccgcagcgccgggcgaaagcggccgaaatggcggaatccctggggatgtttaccgaaccgggcagttttgagcatgagctgtttaatctgccgggggagctgtggccggaggcggatgtgaccctgattgatttggggcacctggcgcgggaagggtatgaggcccagatggcgctgacgatggtgagtcttatcaactccatcaacaatattgccgagcgggatcagtaccgggcccgggacattaattttgtggtggatgaggcgcatatcgtgacggtcaacccgctgttatccccctatgtaaccaaagtggtgaaaatgtggcggaaactgggggcctggctgtggctggcgacccagaacctcgatgactatccggactgtgccgagaaaatgctcaatatggcggagtggtgggtgtgtctgacgatgccgcagaaagaggtggaggcaatcgcccgctttaagacgctcagtgaggagcagaaacaggtgctgctgtccgcagccaaactatccggctgttacacggaaggggtggtgctggcgcggaaagtggaggcgctgttccgggtggtacagccgagcttatatctggcgctggggatgacggaaaaagaggagaagcagcaacggcgggtgctgatggagcaatacggatgcagtgagctggaagcggcgttcagggtggcagatgaacttgaccggaaacgggggttaccgccccgggcgccggggtga

SEQ ID NO: 281195 - DNA, 840 bp, Morganella morganii
atgccccatcgccatcccgaacgaaaaacgctcactgttcacatacggaatggaagatattgtggtcaccccggcaatccccgcattggcccgtttctccacctgactgattttattgtccagctgactgaaacgctggtcggtatactgccgggcattgtccagcaccgtgtgggtcacctgcccgaacgtctcatcggtatagcggtttgcggccgccagggtctgttcctccccctcaatacgggcctgctgctcttccgtaatccgcttgtttgtcttcgcctcactgtactgaatgctcacatcggtgtagtccatggcctgtttcagcgtctgcttatcgccggcaatacgcgcatcccgctcctcatccagttgccctttgttgaccgcatccgtttttgcaatgccggccgccacatgcgtcagaaaacgttcctgaccttcacggccgacggacacgctgttatcccggtcagccaggctgccgtcccccagtgccacactgtttttcgccagcgcccgggcatccacacccagtgccacggatttttcgcccagcgccagactcttatccccgaccgcaacagcctgtttaccctgactcaacgtactctgcgcctcattcagggctttatccgccgcctgatattccgcctgtttctgcgccagttcggctttcaccttctccagatcccggatgttttccagctcggattgcgtcggacgcaaatcagacaactttgtatccagcgcggagagatccttttccagccgggagagttgcgtttctgcctgcttcagtgcctgatcggtgacggctttttccgccgataa

SEQ ID NO: 281196 - DNA, 423 bp, Morganella morganii
atgatttatggcattacccgcggactgttctttgtggccgatcacgtctgtcgctattcccggagttgggaatggctgatgtggctggttgaggaagcccggacactgcgaaatgttgaggctgatttgaaactggctgaaaggtatgccggtgagcaaaaccgccctcattccatttcgctgatgaagtgtacgctttatgatgccggatttgcttacggcagattattactgtggcgtgcggatggtctgatgagaccctggccggcatgtctgcttcgccgtttacctgatatcggtcagcggattgatgcagtgatctggcagaaaggctgtgaagccggcttggatgagaccgtcagtgaatggatggcaatggagatggctgatgaataccttgtcggtatcgaactgagcgactga

SEQ ID NO: 281197 - DNA, 1221 bp, Morganella morganii
atggcggttcgccgtccgcgtctgtttattgcggaggccggaaactcgttcggtttactggcggattattacgccagtctgggcctgagtgtcaataaagtcagtgtcaaacccggcagcggggtgcgtctgccactgtttgcggatgcgcatcagttactgaatatggatgaacgccgtctggcgctgaatgcggatgatctgccggatatggacaccggatcggaagaggatgaacagcgagacattctgggagaaatggaaatctctgcccgcatgatgatcaccggcggggatgtgcgggaagaagcggaactgaagcgggctgaccgggctctgatccgacgggcactgatgatgggcaccaaagcggcttatgccgccggccggcagatgctgccggcggatttgcaggaggcattgtatgccttgtcacggggggaaggcgaagaggaagggcgggcattaaatccgcagcgccgggcgaaagcggctgaaatggcggaatctctgggcatgtttaccgaaccgggcagttttgagcatgagctgtttaatcagcccggggaactgtggccggaggcggatgtgaccctgattgatttggggcatctggcgcgggaagggtatgaggcccagatggcgctgacgatggtgagtcttatcaactccatcaacaacattgccgagcgggatcagtacctggcgcgggacattaattttgtggtggatgaggcacatatcgtgacggtcaatccgctgttgtccccctatgtgaccaaagtggtgaaaatgtggcgaaaactgggggcctggctgtggctggcgacccagaacctggatgactacccggactgtgccgagaaaatgctcaatatggcggagtggtgggtgtgtctgacgatgccacagaaggaagtggaggcgattgcccgttttaagacgctcagtgaggagcagaaacaggtgctgttatcggccagtaaactctccggctgttacacggagggcgtggtactggcccggaaagtggaggccctgttccgggtggtgcagccgagtctgtacctggcactggggatgacggaaaaagaggagaagcagcaacggcgtgtgctgatggaacgctatggatgcagtgagctggaagccgcgttccgggtggcggatgagcttgaccggaaacggggattaccgtcccgcagaagggaatgttgctaa

SEQ ID NO: 281198 - DNA, 204 bp, Morganella morganii
atgaatgtctttgcgttgcagggtgaaacccttgatgccctgtgcttccgggtgctcggacagacggccggtgtcgttgaacggacactggaactgaaccccgggcttgccggtcacggtgccgtgttaccgcacggaacaccggttgaactgccggatgtggcggaacagccgcaaaaaacaatgatccagctttgggactga

SEQ ID NO: 281199 - DNA, 312 bp, Morganella morganii
atgaaaacgatgaaagaacactgggctgacattctcgacacactcaaaaacgcctggccgcagctgtccggcgtggcgatagccatttttatccgctatgcctgcctgatttatgacggcgacacccgtaaaaacaagtgggctgaatgcctgctgtgcggtgcgctgtcatgggcgattatcagcggcgcggagtttatcggtattccgaacggtgcctccggcatgatcggcggcgcggtcgggtttttaggtgttgagaagatacgcgacattgcacaccgcatgattaataaacgactgggagactga

SEQ ID NO: 281200 - DNA, 426 bp, Morganella morganii
atgtcacgaggtatccgaaataataatccgggcaatatccggcacagtaaatcgaaatggcagggtttggccggtgtacagactgacagtcagttttgtacgtttattgcgccggagtacggcattcgtgccctgatgaaactgttacgcacctactcaaaatatcagggtaagccgggcacgggatgcgggaaaattgataccgtggaagagattatcgaacgctgggcaccggctgcggataataatcacacggaaaactatattacccgtgtctgcaaagagaccggcttccgccgtgatgcctgtttagacctgcacgacaaagacaccgctgtcgcgatggcaaaggccatcattcaggttgaaaacgcctcgcagccttatgctgctgatgtatttgaaaaggcgtacgcactgttatga

SEQ ID NO: 281201 - DNA, 549 bp, Morganella morganii
atgaccaccaaagcccgcattatctcgctgctgttcagcctgcttattgcgggcttattatcactcggcctgaaacattactatgataaggccgggcagctggccggtgaaatcacagcgctgaaaaaagaccttgaccggcaggccggtattatcgccgcgcagtcatttgaatttaaccggtttaaccggatagcgcaggccgctacgcagagtaatatttcgcagcgtgccgcctcggaggagcaccagattgaataccgcaccattcttaaaaacaatccgacctgtgatctgcctgtgcctcgcgctgtttctgacggcctgctccgcgacacgtaccgtctacgtgcccgcacaatgcaacccgctgccggactcactgacaaaaccggtgccgccgtccctgccgcccggactctgacgtactgcgaactgccattgtggattgatttgctgatcacagatctggatgaggcaaacacgcaactggacggcatccgtgccgccgaaaaggcaagacagcatgaacaaactcaacagcattaa

SEQ ID NO: 281202 - DNA, 261 bp, Morganella morganii; identical to SEQ ID NO: 27108

SEQ ID NO: 281203 - DNA, 465 bp, Morganella morganii
atgtggcagaacttccgtaaacatctggacaagctctatcaccactatctggccaatcccatatccgcagagcagatttgcggcggatacccagataaacctattgtgttgtgtgatggcctggaggaaaaccggctgaatgatggctcattattcaccgacgacggtgaggcgctttgttttaacggtaatgcggctgatgacatgaatcatgagacgtttattgttcagcgcgaaatccccgtagaggactactgggatttctgcaagacagcatacaaaccctatgacgtgtttgtagtcgcggcattactgttgttgtacaacctgtgcccgggatatttttcggtctcttctgacggggatatccgggactggcagccggtgctggactatgtcagtcaggtatttccttatcttatcctgacgttaccggaagggataggtttaccggaggcaggataa

SEQ ID NO: 281204 - DNA, 273 bp, Morganella morganii
atgaaaataaaacgcaaaattcacaataaattatttcccacccgccgcctggcattttatcagcattctgttctgtctgacgatggctaccttgaatgctattacgataaatggtttctggtgctgtcgtttctgccggttctttttgtcggaacgtttatggatggcttcccgcgcgcatggcgagcaatcacgccgtactttactgattggtattctatggacgggctgactaaagaacaaattcaggaattgaaggagctacagaaatga

SEQ ID NO: 281205 - DNA, 648 bp, Morganella morganii
atggtgtcagcaactttctgcgcctcaccttttgccgctttgacttcggcgatcattttttgcagttcgccgctgcctgcctggtctgtcagtaccgacagggcagaaaatgcttcctcacccgcaatgtgtttgaagtatccggcgcgctgcgcggtacccattttctttgtctttttatccagatcagcaaggatttccggcaggccacgtaagttgcccttggcatcacgggtcttgatgttcagttcttccagtgcgtcagcagcctgttttggcggctcagcgaggcgaccaagaatagatcgcagactggtaccggccatactgccctgtataccggcatcgcccagtttaccggcggcaacagcggcggtttccagatcaacccccagcccggacgcgaccggcgcgacatatttcatcgtgtcgcccagcatattcaggttggtgtttgaccgggtaaaggtggcaacgagcgtatcactgacgcggttcatttcgtcagagttcagtttgaacccggtcaggatattggatccgatatcggctgtggtggcgaggtcgatatcaccggcaagggacatcgacagggtgcctttcatggcgttctgtatctgctccggtttaaatccggccatagcatag

SEQ ID NO: 281206 - DNA, 363 bp, Morganella morganii; identical to SEQ ID NO: 27106

SEQ ID NO: 281207 - DNA, 282 bp, Morganella morganii
atggcaacaattactgttattccaaagaaagacaacgcgaagaaccgccggttagcaaagcaaatggcgttctgggacagaaagcgtgaggagtatgcagcgaagcctaaaagccgctcagtggaggagatttttgattcaatcatcaagcctgaatgccatttcgaaacacttgttcaggtggtgattgaaatgaagaagttgccggaagcaccacgcaagcagctgagaatgaaccgcaagccgattatgccgaacggtggtattacggcaagggcatga

SEQ ID NO: 281208 - DNA, 189 bp, Morganella morganii
atgacgtgtagcaacaagtactgcaatgacggtattgagtttagcatttgctgtccgggaatagactgcggatgcatgggtcaaccggtagcggcaacaaactgcaaagagtgtaacaaagagaacagaccgccgacagataagcgtgttcttgagttgctgaattacgtcgagtggcttggcgactga

SEQ ID NO: 281209 - DNA, 1230 bp, Morganella morganii
ttgatcagcagagagcagaaagcacgtattgacgcattaaatgcagaaaaactggctcgggaacaaggtgatgccaataccctgacatcagctaatcaatatactgataaaaaagtatcagagagcaatacacggactgacagcttaatcagcaaagagcagaaagcacggacagacgtattgaatgcagagaaactggctcgggaacaaggtgatgccaataccctgacatcagctaatcaatacactgataaaaaagtatcagagagcaatacacggactgacagcttaatcagcaaagagcagaaagcacggacagacgtattgaatgcagagaaactggctcgggaacaaggtgatgccaataccctgacatcagctaatcaatacactgataaaaaagtatcagagagcaatacacggactgacagcttaatcagcaaagagcagaaagcacggacagacgcattgaatacagagaaaactgttcgcgaacaggcggatattaacaccctcaaaaatgcaaaccaatataccgacttaaaaatccaggaaaataacgagttactttcagcggatattgagcaagccagaagtgactttgatgacaatcttaaaacaacaaaagcagcgttagaaaacaacatttctgatgttaatcggtcattaacaaacagtgttaatcgggcgaaaaaatatttatccgataatctggataaaacccgtcatgacctgagtgccagtattattgccagtcagaatgacagtcatcttcgcactgacagattgatcagcagagagcagaaagcacgtattgacgcattaaatgcagaaaaaactgcccgtgaacagggggatgttaccacgctcaataatgcaaacaaatacaccgatcatcgtattcgctcattaggtttaaatgtttctgatgcgttaaatgattttcaacaaaaaacagatcagaaatttgctcatctcgataacaaaattggccgtgtggaaaaacgggccaatgccgggattgccggggtgaccgcgatttccaccattccgtatgtgaacagtgagcgtttttcgttcgggatggcgatggggcattaccgcgatgcacaggcgattgccaccgggatgcagtataagccaacggccagtacgaatgtccgcctgaatgcgtcatggaataccggtggcgataccagtattggtgccgggtttgcggtgggctggtag

SEQ ID NO: 281210 - DNA, 300 bp, Morganella morganii; identical to SEQ ID NO: 14540

SEQ ID NO: 281211 - DNA, 288 bp, Morganella morganii
gtgcacagtaccggtcatccgtccaggctggcccgtgaaggcatcacctcatcgtccctgaagtttggtgacccgctgtacagttttgaggagctggttgcggaaatgggcagcgcttttctttgtgcgcagttaagcgtcgagggagaagtgaaccatgaaagctatcttgacagctggctgcgggtactgaaatcggacaaaaaagcgttgttccgggccgccgggcaggcccgccaggcctgtgagtttttactgaatgtggccgtatcccgacaggccgcgtag

SEQ ID NO: 281212 - DNA, 294 bp, Morganella morganii; identical to SEQ ID NO: 277241

SEQ ID NO: 281213 - DNA, 288 bp, Morganella morganii
gtgcacagtaccggtcatcagtcccggctggcccgtgaaggcattacctcatcgtccctgaaatttggtgacccgctgtacagctttgaggagctggttgcagaaatgggcagcgcttttctctgtgcgcagttaagcgttgagggagaggtgaatcatgaaagttatcttgacagctggctgcgggtactgaaagcggacaaaaaagcgttgttccgggcagccgggcaggcccgtcaggcctgtgagtttttactgaatacggccgcctcccgacaggccgcgtag

SEQ ID NO: 281214 - DNA, 267 bp, Morganella morganii
gtggtgtatgaaatcccggggcgcgggttcagtgaggataaagtccggatgattgaccgggatcactggatagtgcgtctggatttggtcgcggatgaatatttcagcgccgagccggtcaagcgggcgacggtgcgctatccggtgaaagtggtgcgctgggagggggatccggaaagcaatccgttcgggctggccctggactgctatgacgggacacctcagcgtctggaagccgcggagcagaataaggaggccagtcaatga

SEQ ID NO: 281215 - DNA, 267 bp, Morganella morganii
gtggtgtatgagatcccgggacgcgggttcagtgaggataaagtccgggtgattgaccgggataactggatcgtgcgcctggatttggtagcggatgaatattttagcgcggagccggtcaagcgagcgacggtgcgttatccggtgaaagtggtgcgctgggagggcgatccggaaagtaatccgtttggtctggccctggactgctatgacgggctgcctcagcgtctggaagcggcggagcagaataaggaggtcagtcaatga

SEQ ID NO: 281216 - DNA, 630 bp, Morganella morganii
atgccgagaactgacaggctcagtttcagtattgcgaccgggccgagcatcgcggccagcatcagaacaatcgcgccgcccacggcgaggattacgcccagcgccagggcaatttttgtcagcgtgttcgccagttccggattgcgtttcgcccagtccccgaccttactgataatatcggtaatggatttcgcgatatcccgcagcgggctgtcaacgccgccgaatatctggatacccacattttcccatgctgatgtgagattcttcaggtcaccattgagattatcgctcatagtttcagcgattttttgtgcctcacccctggccgctttgacatcggcaatcatgttttgtaactcgcctttaccggcctgttcagtcagaacagacagtgctgagaaagcttctgtaccggcaatatgcttaaataatcctgctcgctgcgcagtgcccattttctgcgtttttttatccagttcggtgagaatatcaggtaaatgtcgcaagttaccgctggtatcacgggtctctatgttgagtttttccagcgcctccgctgcctgttttggcggttcagcgaggcgaccgagaatagatcgcagactggtcccggccatactgccctga

SEQ ID NO: 281217 - DNA, 546 bp, Morganella morganii
atgataaaagaaatcaattattactataacgcaagtcatccgttacggcctctcatcggtcagagctatgcaaacgaggggtcactgccgccgctgaatgcactgcgtatcgctcctgatattaaggaaggtttttgtccgtgtgagaaggatgggacatggattaatatcccggactatcgcggcgtgacagcctgggataaagagacggcgcgggcggtaattattgatgatgtgggcgagttgcctgacactctcactactattgcgcctgatgtggattgcccgaagtggaacggcaaaaagtgggtaacggataaaacagcaaaaaaagaaagtgatatcgcggcagctgaggcgaaaaagcagtttctgattgccgaagtcaacgccgaaactcaaatgctgcaaacaaaactcgcgcttggccgcatcagggaaaatgaaaaggcgcggttaaacgcctggctggattacctggatttactggaagccgtggatacctcccccgcgccggatatcgactggccgcagaaaccgcagtaa

SEQ ID NO: 281218 - DNA, 288 bp, Morganella morganii; identical to SEQ ID NO: 281049

SEQ ID NO: 281219 - DNA, 618 bp, Morganella morganii
atgtcagaaaatagtcttgatgccctgaaccatgagctggccgggctgctggcccgggtcagtccggctgaacggaaaaaactgtcacgggcgattgtccgtgagctgcgcaaaagccagatagcccgcatccgtgaacagaaaaacccggacggcagcgcctatacccggcgtaaagcgcagtttattaccgtgcagcgggagatgcgttttatctggcgcgggcgcgaacggcggctgaagaactggcagcagaacaagcgactgatcaccggcactgacattgataagaatgcgcagcgctcattccgcaagggtgatattcagcggttcacagccattaaaaaagaccggataaaggtcaaaggcaaaagcaaacagacccgcatgtttaaacgcctggcaaccgtccgttatatgcgcgtgttctccagtgaaaacgaggcggcgatcttctttgcccctgccgccgctaacattgctgcagtacaccagttcggtcagaaagaacggttacgcaaccttgatattcagtacccgcagcgtgaactgctgggcttttcgcctgatgatacccgcaggattgaagcggctattatcgacttcctcgcatcctga

SEQ ID NO: 281220 - DNA, 441 bp, Morganella morganii
atgctcatcagaaaaaattcccggcagcacaaccgccgtggtcagttcgccgccgacagagaggatcaccacctgttcgcctacagacggcatccagctgctgcgggtagttccggcacgcagtgtcacaaccggcaaccagtctgtttccagatcgccggtctgcacacggcaaccgcgaccgactttaacagcggtgacaacgccggtacggatgatatttctgatcaggcggaggagttccgcgattttggtgtttgcgctcatggggacagcctgccaccgaaccggggattaatgcaccggctcagtgttgtatgtccgtcagatacaacatcaggatgcaaggaagtcgataatagccgcttcaatcctgcgggtatcatcaggcgagaagcccagcagttcacgctgcgggtactgaatatcgaggttgcgtaa

SEQ ID NO: 281221 - DNA, 231 bp, Morganella morganii
atgtttaaacgcctggcaactgtccgttacatgcgcgtgttctccagtgaaaacgaggcggcgatcttctttgcccctgccgccgctaacattgctgcagtacatcagttcggtcagaaagaacggttacgcaacctcgatattcagtacccgcagcgtgaactgctgggcttctcgcctgatgatacccgcaggattgaagcggctattatcgacttccttgcatcctga

SEQ ID NO: 281222 - DNA, 642 bp, Morganella morganii
atgtctgaaaaactgactgcaactggtgtagatattaatcagaacaatgtaactatcgataaattagatataaccaatgaagaggatgtgaaaaaatttttcacattaactgataatattgatggtgcagttaacactgcatacccacgaaataaaaaatatggaagtcatttttttgatgtaactctggatagtttcaacgaaaatatcaacttacatcttggtagtgcatttttatttaatcagcaatgtgctgtttatttcaatcgacataaaaaaccattttcactgataaatatatcgtcaatatacggtgttattgcaccacgatttgatatttatgaaaatacccctatgacaatgcctgttgaatattcagcaattaaatctgcaattcagcaccttagtaaatatatcacagcatatgttgacgatagtcgttttagaataaactgtgtcagtcctggcggaatatttgatcaccaaccaaaattattccttgaagcatataaaagtttgacgcatggtgctggtatgttagatgtcaaagatatcacaggctcaattatatttttactatcagatctatcacaatatgttacagggcaaaacataatagttgatgatggatttagtttataa

SEQ ID NO: 281223 - DNA, 693 bp, Morganella morganii
atgtcctacatgccgcgcctgggtgatgtcgaatcggtgtataccgaagaaatcaatgacggtgcactgaaaggtaaattagccctgtatgccacgctgaaacccactgacgacctgattgaaatgaataaaaagcgtcagaaggtatacacctctgctgaaatcgccccgaaatttgcggacaccggtgccgcctatcttgtcgggctggcggtgactgataacccggccagccttggcacgcagatgctgcaattcagtcagggcgccggggaaagcccgttcgcagatcgcaaacagtcgaaagacaacgtgatcacactggcggaagagaccgttatcgaattcaccgaagataagccggatgaaccgaaagtgccgtctctgttcacccgtatcgccgaagtactgaacgggaaaggcaagaaggacgatgcccgttttcatgatgtgcatcagagcgtcgaactgatcgcaaaagccgtcgaagccattcagacagatgttgccgcactgaaaacaaccccacttacggtggatgcaccggaagaaccggcggaactgaccgcactgaaaaaagaactcagtgaactgaaagcgcaactgagccggcaggacaacagcggccataagcgcccggtgtcactcggcaacaacggcacacagccggaagaactgctgacggactgctga

SEQ ID NO: 281224 - DNA, 609 bp, Morganella morganii; identical to SEQ ID NO: 280948

SEQ ID NO: 281225 - DNA, 609 bp, Morganella morganii
atgagtagccgcctgctgccgaccggatccagtccgctggaacttgccgctgctcaggcgtgtgcagaaatacagcgcgtgccggtaccgataaaaaccctggtcaatcctgatacctgtccggtgcatctgctgccgtatctggcgtgggcgtggtcggttgaccggtgggatgcgcactggccggaacggacaaagcgggacgtgattaaagcctccatgttcgttcacaagcataagggcaccatcggggcgctgcggcgtgttgtggagccgctcggctatctgatcagcgttactgaatggtggaaaaccggcgaccggaacggaacattccgcctgacagtcggtgtatcggaaaccggtatcaccgaagaaacttattacgagcttgaacgcctgatatttgatgcgaagcccgtcagccgtcacctgctggggttgtctattaacctgagcacatccggacatttttactgcggcgcagctaccaacaccggcgacacgctgacggtatatccctacatcccggaaaccgtccgggtggaaagcgcggactattttggcgcagccctgataaccattgataaagtgagagtaaacccatga

SEQ ID NO: 281226 - DNA, 240 bp, Morganella morganii; identical to SEQ ID NO: 14565

SEQ ID NO: 281227 - DNA, 342 bp, Morganella morganii
atgtttgccgccgccggtgtcggttgtgtgggcgggagcgttatcagtatcccgctgttaccgctggccgggtgggtgatcctgccgaccggcgcgttgataatgccgctgttggtggtgttttttggcggcacttttctgacccgtatcaaacgcggaaaaccggaaaattatctctaccgccgattgtcctggaaactgcaaaccgggtttgcccgcacattgccgctgaccggacggctgactgaaaaatccctcatcaccgtatctcagggctggtttttacgccggacgcaggcgctgtcactgtgccggtatatcgccggaggccgccatgagtaa

SEQ ID NO: 281228 - DNA, 432 bp, Morganella morganii; identical to SEQ ID NO: 14471

SEQ ID NO: 281229 - DNA, 321 bp, Morganella morganii
gtgaaatggccgaacggcagtggttttcactgtattgatggtgggtatgcgacggagttatccgcagagtttgatactccgtgggggccgccgtcagcagcggttttgtgtgctctgtctgcgcgtttccgctgtcaggtccgtcatgtctatgccgaagaaggctgtggtttctgcggatacagcgagtatgaccatggccggttaaccgaccatgaatctgatgagattgagttcagtgatgaagagaatgaggacggtttccaggatgtgacgggaccggactatattcttgattcattgccacattacggagggtga

SEQ ID NO: 281230 - DNA, 243 bp, Morganella morganii
atgccggatcaggtccgggcaaatctcctgaaatggctgggctatgcacagcgtgatgaagggtatttacagcctgccacctgttcgtggctgcgggcacttgaattatatgaccgtgtcggcgttaagcaggatttgcgtcagctggaaaagctgatcgccaaacagcaggaagaacgcgacgcggcacaacagaacgagccacagcgccggggcggcacagcggaccagccgaccggctaa

SEQ ID NO: 281231 - DNA, 141 bp, Morganella morganii
atggggcattaccgtgatgcacaggcgatagccaccggggtgcagtataagccgacggccaataccaatgtgcgcctgaatgcgtcatggaataacggcggcgataccagtatcggcgccgggtttgccgtgggctggtag

SEQ ID NO: 281232 - DNA, 309 bp, Morganella morganii
atgaatgaatacgttaataaaacatcggctgttgttgaactggatgaacccatcaaacgcggtgaaacagaaatcacccgtgtcactgtccgcaagcctaaatccggcgaattgcgtggtgtccgtttacaggtactgatggaaatggatgtcatctccatgacagaggtgttaccgcgtatcacggatcctgcactgacgaagccggaaatcggtgcgatgacgccgggtgacctgctcaatatgtcaatcgaggtggttaattttttgctgccgaagtcgatgcagaacaattacccccaagactga

SEQ ID NO: 281233 - DNA, 258 bp, Morganella morganii
atggtaaaaaaacttgacaatggttttattgagctggttaataatcctaacaataatgttgcccgccgacaggattcaccagaagtttttgatataacaacggtcgtttatgcaacaacaacccaatttgtaatgaataactatggaatattttccggaaaagtaacatgtattaatgttcctaaaaatagagccgttgatattgatgatatttatgatttcaaattagctgaaactatcatcagggagggattataa

SEQ ID NO: 281234 - DNA, 246 bp, Morganella morganii; identical to SEQ ID NO: 279344

SEQ ID NO: 281235 - DNA, 177 bp, Morganella morganii
gtggcggactgggtgaaatcccgctacgggcagacctttgatgcggtgtatgtgccaccggggcagaaagttgcggtgcatatcagccgtcagatcccgattgattatgaatcacagggacgccgggtgaactatggcttttcactgacagagggtgaggaaggaggtctggagtga

SEQ ID NO: 281236 - DNA, 546 bp, Morganella morganii
atggctggagcagcgcctgggaaattcctcaagtttggcggcgcaaagagtgactcatgtctgatccttaatgggacagatatgcgattttcatgggaagaaatgcgaaaagatacagagaaatatgacggggtaacctaccttaaaggtgcaaagccagttatatgcagaagaaacggattaaataatccctctgctggaaacacatatgctgactggaaaaatacaatcatcgatgattatcatatggctaatgggtataggattaaaacagtaattggtggttggtatgatatctatgtttccgtagttcttagtgcagaatcctctggtgtcattgtattaaaagttgctgataatgaaacatctgacggtagtgattatagcgtttcacaagtaagtaaaagtgaaaataagaaaacggtaactttaaatttcaaagggaggttacctgctggaaaatatgtgtacgtttcattaagcagcgcacagttcgaatcttcgtttgatgaggattctcacataacagtgatgctatctaactag

SEQ ID NO: 281237 - DNA, 1164 bp, Morganella morganii
atgctgacaataaaacagatagaagcggccaagccgaaagaaaaatcataccgattgtcagatagcggcgggttgttccttttcatctcaaaaggtggggggaaaatttggcgattccggtaccgaaaagacggaaaggagcaaacccacgtcatcggctcatatccggaaatatcattaatagaagcccgtaagcttcacgcctcagcaaaatcaatccttgccaccggcggatcgctggaaacaaagaaagaagcatcacaagaagaaagcatcataacttttgaaagtgtgttccgtgaatggtacgagttcaaaaaggaggtgtggtctgccggttacagaaaagaaatgctatccatgtttaatgatgatgtcttaccgattatcggagaggaggacattgcaactatagatccgctacgtgttgtagatgtgatacgccacttcgaaagccgtggcgcaatggaaagagcgagcaaagcccgccgtcgctgcggggaggtattccggtatgcggttataacaggtcgctctaaatataacccagcccctgacctggttgatgccgaacgcggttaccggaaaaagcactacccattcctcaccaaagagcagatacccgcatttaacaaagcactatcaactttctcaggaagtgctatcagtaagatagccacgcaggttttgcaatacactgcactgagaaccaaagaacttcgctctatgcaatggtcagacatcgattttgaaaacagggttatcaccatatctcccgaagtgatgaaaagcagaaagccacatgtcgttccgatgtcaaatcaggttgtcgcgctgatggagcaaattaagcctattacatcaggaatttcagatttggtcttccctgggagaaatgacaaaagaaagccaataagtgagaatgctgtattactagtgatccggcaaataggttttgacggaatagcaagcggtcacggattccggcaccagttcagcactatacttaatgaaaacggatttgaccgtgacctgatagagcgtcagcttgcacacgttgaccgtaacgcaatacgcggcatctataaccatgccgaataccttgatcagcgcagaaatatgatgcagtggttcgctgactatattgatgaaatctcaaagtaa

SEQ ID NO: 281238 - DNA, 762 bp, Morganella morganii; identical to SEQ ID NO: 273862

SEQ ID NO: 281239 - DNA, 1041 bp, Morganella morganii
atggcaagaaatcgaaatacagtaaacaaagggcttccgcctaatttgtatctgcgcaacggttattattcataccgcgacccgagaacaagaaaggaatacggcctcgggcgcaacagaacactggcaattacagaagcaatacaggcaaatattgaaatattcggccacggcgaatctctcgttaacaaaattaacagtaaagctgtgataacagttggtgtctggtgtgaaaaatatgatgttcttattcagcagcgcggattaagcgcggtaacattagtcaataaaaggcatcttattaaatcaattcctgaccatatacgggaaatgccaatatcaacagtctctgtaaaagatatcgcagatctactttctgaatatattaataaaggagccgcatcaatggcaaaagtcctcagagcagagttgcgtgatttattccgtgaagcgatggccgatggtctgatcatgacaaacccagtggagggcacacgaaatccgcggacatgcgtctcccgctctcgtttgtctattgatgatttcagggcgattttatccgtagcagaacaaacaaagccagcgtggtttacccacataatgaaagcggcactcgttaccgggcagcggcagggggacctgtgtaggatgcacaggaataatattgataatggcaggctgtatgtcgaacagaaaaaaaccggggcaaaactttccattcctctcgacctggaaattgcaggaataaaactacgtgatattacagataaatgtggtaatgattatctgttttcctcaacaccaggaaaaacacagagcgaacaaatggtcagaaaatactttctatcagctcgagaggctacagggcttacgtggaacggaactccgccaccattccacgaaattaggagtctggcagcaagattatatacagaggaacgcagtactgagtttgcgaagcagcttttggggcataaatcagtgacaatgacagccatctaccaggacaccagaggcggacgaacggatattgtattatga

SEQ ID NO: 281240 - DNA, 279 bp, Morganella morganii
atgacgagagacaacaatgacttttttacagttaacgaattcgccataaaaacaggacgcggagaagaaaccgtcaggcgctggatacgtcagggcattatttaccctgccccgcagtttgacggatatcagtatcgaatcccggggaacgcaagaaaaattaccaattttgaaaaattaaatcccagcgttcttttaaaaaaagaatccggcctgttaaaaaggattaaaacagatggcaagaaatcgaaatacagtaaacaaagggcttccgcctaa

SEQ ID NO: 281241 - DNA, 255 bp, Morganella morganii
atgtcagaacgcccattaaaagttaaatgtattcatgatgatggttgtcagttctggactgagggtaatgagtatccggctaaattttgcacgtccggttttctcatgtccggatctctcatgattggagacgacgataacccagatgccgaatggtttgtatcactcactgatgacagcgaattttatacagttgacggacttgagtattttgtacagttcgccctgctttcaaccgtacagaaaattgattaa

SEQ ID NO: 281242 - DNA, 189 bp, Morganella morganii
atgatatacggattattcatgctgatttgctctgccaccagctgcgaatatcagccctacggctacgtttatccggatgagcaaaattgtctgatggataaaaaaacactggccgtgaagggtattttgtcagaatgctatctgattgatgaaattatctcggccgattttgttcaggctggtaagtga

SEQ ID NO: 281243 - DNA, 168 bp, Morganella morganii
atgctaaaacaccaacactacaaagaccggccggtaaagctcacgttccctgacggcagtcatggctacatccgtactgatcgtcgatgcgatgtgtattacgacctgcctccgcaggtgaaaattgaggcccgtaacgaaccgcagcagaaggatgaaagcaaatga

SEQ ID NO: 281244 - DNA, 498 bp, Morganella morganii
atgagcacaaccgcaattgcattagccgcagactatgaaaagctgcaacgactggtagagaccggtgaattcaccccagaagaaatagccgacacactggaaggtatcgagggcgcactcggcgataaactggatgcgattatgatccacgtccgtaaccttgaagggcaggcaaatacgctgggtgaagaagccaaacgcctggcggatcgtgaaaagtcatttaagcgtcaggccaaagacctgaaaaaatatgcactaacctgcttactggcatccggccaggacaaactgaaaacagtgaaaaacacatttactgcggcaaaaggtcgggcatcagtagttattgacgatgaatcacttatccctgattcactcgttgatgtacaaaccatcgtgtcaccggataaaaaagccatcaaagaagcgctggaaaatggtgttgaagtccctggcgcccgaattgaaattggtgaacgttcactgatggtccggtaa

SEQ ID NO: 281245 - DNA, 1998 bp, Morganella morganii
atgaccaattatatctgtgcatttaatcccatagatgcggcacttaaagacggcgctgtaactgtagcaatcactatttccgccaattcagaaaagatggccagagcaatggcagcggtgatgctggaagaaacttacccggaaaatacgggaaaatttgatgtggcggcagcaatagtctgcgaagctcaggcaggcaaacctgcaccggccggcgatagttttgatgaacattttgccaaagagtacgagttcaacggtaccgactggcagaaacgtgaagaagaaatggtagtgtttgcaaaaacggcaccagtcgtccgtattgcggcgatcatgctgtatgaaagaacacaattcacccgcagcgaatacagcaaagcggtcgagtttgttcatgaaagcgacgaatatccacagctccggaatatcgcaaaaggtattgcggccacacgaacagtttcccttatgaatgaacaggatctggaagcgttagtaaacagtgttatggaaaaagctcaggacggcattaccgaagaagaggcgcagaagctggcagaagaatacctgttccctgctgaaccaaccattgggcagatccccgtcccagagcacaagcaacgcgattttacccacaattactcaacactcgacaaagaaattgctcttgcacttattcccggtgattttgacccatgggatattcagccgagcaaacttatcgctgcgaataaactgatccaaggggaagatgaaagctggcggcgctggtctactgagttccgtattatcccgaccgcattgcagatcccgcgtgaaacagtctttgctgtcgttcgtgaaggaaaagaattacctgacctgatgagcgatgcggcagcccgtaaacagtttgtggctgaccgtatcggcataacgccggcagaaagcagtcatgaccaggaaacaggccggtccggtccggatactacggaagataaaccacccgtagcagcaaagcaggaaaagaccaagcgcacacgtactaaaaaagcagataaaccggcagagaaaccagctccggaagtagcggccaacgatgaaccggctaccatagcccaaacaccggaaccggctcatgccgaggaaccagctactgatgacttccgcagccgcgccgaagtgattgccgaggttctggcagacacgaacaatctgagtatctggaagcaggtacagcgcacagatccacgctttaccaagcctttagagggagcgggatttcagggtaccagcattaacagtaactacatgtttatgcgtgctaccgaaattttcggaccgatcggtgaaggttggggctatgaggtggttgaagaaaaattcctggacggcaaaccgatgactgaacctgttctggaaaacaacaaacaggttgctctgcgttacctgcgtgacgcagacggttctctgttctgcgagcaaaatcattcaataaaaatccagttttggtaccgcagcaaagatggtaagtgctgttattttgaaagctatggcgcgacaccataccgctatcagacccaatacggcataaaagttgatagtgaagtcatcaaaaaatcactgacagacgcgattaaaaaagcactgtcaatgctcgggttttcttctgatgtgttcatgggtatgcacgataaccctgaatacctcatcaaaaataaaatggaatttgaaatcaaagcggccagcgagaacgcagaggacagcgtccggatccgcgaggagctggacgagaaatttaaacgcaacacgaaaactatgcggacggcagtcacgaccaatgagctgcgtggtatcgcatccactctgtcacgggaaatttcggtgcatatcagcaacgccaaatcccgtggcgataaagaacatcagaaatacctcgaaggccgtctgcgccgcctgaaagctattgaagatgaatgtttaaccgcactgactgaaaaacaagaggcagaccaatga

SEQ ID NO: 281246 - DNA, 249 bp, Morganella morganii
atgaacgctgtggaacacgcaatatcagcaattttagataacgagctatcagttatcgaacacgaaaacaacagcgatacctgcatagatgtgcagcacatatcaatcatcgggggtaaacgcagggttgagtattacccgaaaactgggaccgcattctctaattcagtacgtggaaaatatgaaagcatatctatcaaaaatgcaggcattaaaagagcaatcaaattagctaaatcaggaaattaa

SEQ ID NO: 281247 - DNA, 333 bp, Morganella morganii
atgaaagcacaacctgacaccctcaaagttacactttacgttcacgcccgacgcctgttcgacggcagtattcagcatgctgtactcacctttcacgcatctccggatctcggaatgggttttgtcgtcgctgaacatcagattgaattaccgtccccggtggtaaccaagacagatcttgttaacgcagaaataaacagcctgcgtgatgagcagaacaaaatcctcgcgaatgcccaggtcaaatcctcgatgattgaagatcaaattcaggcgcttatgtgcctggaaggcactgttatctccaaagaagacgaaaaaatccctttttga

SEQ ID NO: 281248 - DNA, 642 bp, Morganella morganii
atgagcgaccgcataaacctgagaatgcgggagttgaaattaaaaagtaaacatctgatggatgcgacaggcgcatctaagggaactgttagccagtgggttaacggaggcaccgagccgtctgcaaaattcctgtcatcattggctactgcacttaaagttacagaaaaatggcttattgatggtggtttgatcgatgaaattaacggtaacgcaatccctgggccagatattacacgcagggttcctttgatatcctatgtgcaagcaggacactggaaagagatgcttgagcaaaacccagatgagtttacagaatggattgaaacaacagcaaaagtttcaaataaagcgttttcacttcgtgttgtcggaagttcaatggttgatactacaggacaaggtagaatatcaatcccagagggagccatcgtaattgttgaccccgaaaaagatgtatacaacggtagaattgttgttgcacgattgaagcatcaaaatgaaacaaccgtaaaaaaatatgttattgatggtccaaatgaataccttatgcctctaaaccctaattacaaacccataccacttgatgctgcatgtgaaattgttggagtttgtgtccggatagagcaagatcttatctaa

SEQ ID NO: 281249 - DNA, 186 bp, Morganella morganii
atgaaaaagcaagatgtgctgaaccatttcggtggtacgacaaaaaccgctgttgcattaggggtctcgaaatcaacagttagtctgtggaaagaaaatattccatggaaatatgcgctactggtggaaaaaatcaccaaagggtcactgacagctaatttaccaacaaacccaatattaaactga

SEQ ID NO: 281250 - DNA, 402 bp, Morganella morganii
atgatgctctatacccaaattgcaacagatattccggctggtacggagataacccgcaagtatattcaggaaaaatacaatattaaccgtgatcaggtacaagcggtaatcagtgtgctgctcaaaacaggagctgtgaaggtgacggaatggcgaggaaaattgcggcatgcctttgaagtattaccatgtgccggggaggtgacccgtgcatacgaaaagaaaactgcatcctggaacaggccggcggagaggaaaagtaaacctctgacacctcgatcaatggatcgcactgatatagccgagtatcagtttacggaaaaacaaaaccggctgatctctgaatttacagcagttcagcgggaactaagaaaatcgaatggagcgtatctcaatggctaa

SEQ ID NO: 281251 - DNA, 1017 bp, Morganella morganii
atgaaaccggattggggggtgttacagcaacagttcctcgccgagcattcagtaacgggaatatccccgaaagaatggtgtgagatacagggactgaattacgcaacagcgcgtaggtacatcaaaaagccaactgcgcagagtgcgcaaaaaactgcgcaaaagaaagtgcgcactgcgcataaaaaagaatgcgcaaatcaccctgtgcgcaatagcgatacaccggatgcgcagagtaatgaatccgacaatgcgcagaatgatgaaactgagttcaacctgcgcaattaccggctcacagacttacaggctcgtttcgtgactgagtatattatcgacctgaaccggactgctgcatataaacgggcagggggaaaatgtgaggggcataacgcctacgcaagcgcaagtcagttatatagaaatattgaggtgaaccgagcgatacgggacgctctcgcagcacgggaacgccgagccgaaatcacccaggacgcagtattaaaaatgtggtgggacattgccaccgcagatgtatctgagctgacggaataccgccggttatgctgccgctactgctggggcttcggctttaactatcagtggcgggactcgatagagtttgaggacgctgtcagtgaagcggccgcaaagaagcagaaggaaccaaatgacaggggcggctacggttacgacagcacactggatccgaatcctgattgcccccgctgcaatggtgccggtattggccgttctcatttccacgacacacgggatttaaggggcgcaagccgccggttatttgccgggataaaagagggtaagttcggtaccgaggttatcacccgtaatcaggatgaggcgctaaaaatggttgcgcagcatttggggatgctgaaaaaccggacggaggtcaccggcgcagatggcggcccgatacaatcaacgggatttgacctcagtgggttgacgacagaacagcttttgcagttacgtgaaaaagcggggaaatag

SEQ ID NO: 281252 - DNA, 294 bp, Morganella morganii
ttgaaagagataacgattaacacgataccgaatcagagactgagggtaactctgggcggcagagagtgggatctgactatcaaagctgcgcggggtgtaatgtgctgtgatatccggtgtgatgatgtggttcttattcaggctgtccgaatgatgccgggacaaccgctgatcccgtaccgttatcttagtcccaggggaaactttgcattgctgacgaccggggatgaacttccctggtgggaggaattcggcaaaacacaaacgcttgtatggtggggggatgatgattga

SEQ ID NO: 281253 - DNA, 429 bp, Morganella morganii
atgatgacatatttatacagtgcaaaaacaaacagcttttatccgcttgaaatgaaagaattatatcaagaatcaggtacatggcctgtttctggtattttagtaaacgatgaagttttcagtgaattcgctggttctgagcctccgcgcggaaaaatgcgcggcagtgacaaggaaggctatccgtgttgggttgatatccctccgctgactcatgaagagcatattgagatagcagaacgcaaaaaacaaaacctgattgccggagtcacccaggaaaccgaaatgctccgggctaaactggcacttggccgcatcaaagatgatgaaaagtcgctgttaatcgcctggctggattatctcgacgaactggaggcagtggacgtatccaccgccccggatattatctggccggtgaagccggcctga

SEQ ID NO: 281254 - DNA, 702 bp, Morganella morganii
atgcatgtgaattggttaattaaaatattaatgatttacatttcatggtctcttgtatattttatttatttaaaatatttttccaatgatagaggtggcgcttattacttattagaacaaataacaacgggatggtatcacttgtggtacttccctgctcttattatgggctacataattgcttaccacatgagacatagaagtttacgcagtatatcatcaacaattatactattgctttctgttttattttacttgcaaattaaaaaatacggtgatgtttcgttgatttcatatagaaactttctttttaccgctgcaccatgcatcatgtcaggactgattatttatagggttagagatatgtacacgttgaaaggtatatcgaaaacgctacccatgataaccggtgcaatcataatcataagcttaatttcttataattatggccttattattgaggtgccactatcatcgctaattatggctatacttattgtttcaatcacaacaaaaacaaagccattaatatcacatagtaaaataaacataagtaaattatcaaccgtgatatatttaactcacccgttattcataggccttgcaaatacgcacaactacataatatcatatttattaatattaacctgctgttttatttcctttgttttccttagcttaattaaatttaaatatatataa

SEQ ID NO: 281255 - DNA, 174 bp, Morganella morganii
atgctatcgattatatttggtaccacacttttatttaattcatcaaacagttgtgaacccagcttaccggaaaaatgtgatgtatggtcgcaggtcagtcagtattatacagacggacactgccctaacaccagaccttactgtgatacgcgtgaaccagagcagtcacattaa

SEQ ID NO: 281256 - DNA, 285 bp, Morganella morganii
atgcaagaaaaagtactcgcatctctcggtaatcttgaaatttatggtcctgttctgacaagaccttatgttgatacagttaaaaattctcagtatccgaatatgaaggaattgagaatctggcatgcaggtcgtgcgatacgtgcattttttgcctttgattctgaaaggcaggccattgttttatgtgccggggataaagggaagaataaacgattttatcagacgatgattcgtattgcggatgaacaattttcctcatatcttgcagcagcgaaggaataa

SEQ ID NO: 281257 - DNA, 138 bp, Morganella morganii
atgattatccagccggagagccagatttcgttatttcactcactggttcgcataatgtatattatgttaaatgatgtatggaaggtgctggtgctgattagatacaataatatcaatatgtattatatcgttcattag

SEQ ID NO: 281258 - DNA, 300 bp, Morganella morganii
atgaaaacaatagttttctgtgctgcattaacgttagtgaccggcagcgcttttgccgatgaatatctgtataactaccgttatgacggtgatccttatggctataattacgatgtctccggtacggatgattacgggaatagtgttgaagggaatattgatattcagggtaaatacggaagcggtgtgattacgaataccgaaggtgaagaggttgatgtggatgttgaatgggatggctacggtgttcttgtcgcggaagatgagtctggaaatatctacgatcttgaagttgaataa

SEQ ID NO: 281259 - DNA, 561 bp, Morganella morganii
atgaaaaaatggaatttagccgccttatttcccggtttttttatgctgagtcagcaggcgattgctgagccggctgtgttgccggatagtgccggttctcttttacctgaggacctggtgttttcaccgcttaatacagaaacccctctttatatcgccgggcaccggagtcacagttcacacagaagtcacagtagtcacagttcacaccgttcatcttcaggtggcgggtattatcgttcatccccggtatattcctcaccagcgtattcagaaccgtcaggaaattcatcacaaagagccgccgggaacactggcagacgggatttttctcagaatattaatcagaccacgacgacaacggaacaacgtaagcggttgattatgcgggttcagtatgcattatttgaacgccattattttggcggaaacatcgacggtgtgatgggaccacaaacacgtgatgcaattacccgttacagaaatgcaaataagttacccggtaatgtgtatattgatgcagacctgcttaattcattaagtatttacgcaacaaactga

SEQ ID NO: 281260 - DNA, 1095 bp, Morganella morganii
atgtgtgaagtaaaaagaaaggatgcatttgaatcagcggataacattccttccggttactatcagctttacaaaaataagctatcttcacctgaattttactttgataatattattgtttctggtagtcaggatgaaccttgtgatatgacaggcgcagtgtactgcattgttgaccctgtcttgtatgatagtatcgaaaatggctacattgtatctgttaataataaaagaatgcgggttattctctcagggaaggcaaatcataataccctgttggtaacagaacgttgtaataatctctgtcttttttgttctcagccacccaaaaaagataatgacgactggctgttaaatgtcgcatcaaaggcaataatcgcatttaaatcaaagaaattaatcggtatcagtggcggagagccattactgtatggtgagcagtttattcaattcttacaatattatagcccggatacccctctgcatattcttacgaacggcagagcattcggcgactttgattttacaaaaaaaatagcggctgtagtagatggtatgtcagtatcatttggtatcccgctttattcagtgtcagcagaaaggcatgatgaaataacgggcagctcaggttctttccgggatacagtcagcggaattatcaatgccggaaattccgggattaatattgaattaagatttattccggtgagtatgaattaccgggatttaagtgcagtaacagaaatggcaggacggtttttttctaatataaatcagatatctgtaatgaatcttgaagctcagggatgggcacggaaaaactgggaacaactgtatcaggaacctgaagtttataaaaatgatttgtcagttgcggtacaaacagccgaaagatgccaattaccaatagtattatttaattatcctctgtgccatataccggaaactctgtggccttatagtgtacaatctatttcagactggaaaaattactatcctccggcgtgtagcggatgccggaaaatggatgaatgtggtggttatttcagttcttcttacggaaaatatcatcagttaccgagggcttttttatga

SEQ ID NO: 281261 - DNA, 1386 bp, Morganella morganii
gtgaatcttttgccgttcaactttaatcgcattagtgataatcgattttttatcagtaacttagctggtttttcatcagttattgatgagagttcactgaatgaacttattgaccacggtaaaacaaaaaacagtgatataaatcgaggtctggaagaaaaattttttattagtgatgatctttttacggcagaaaaagtactagctgcggcattgggaaaaaaaatggccgcagaaatgaagtttgcacctatttttatgatagtcccgacactgcgatgtgatcatacctgtaaatattgccaggtcagcagggcatcattaagtgcaaaaaatatggatctgaaagatgagtatattccggttataatatcattaataaaaaagttatcgtcggcaccctataaaattgaaatacaagggggagaacccctgctgcgctttgacttaatagtgaaaatatatcaggaagcatcatcgcagttgggtgaaaataattttgaactcattattgcaacaagcttgtcattactcaatgatgaaatggtaagttggtctgttgataaacaggtttattattcagtttcactggatggaaatgaattagtacataacaaaaacaggatattgccatcaaaaaactcgtatgcgctcgctgtgagtaatataaagaaacttcaggatagtataggaaaagataaagttgcgacaataactacagttacaagggcattaatatctcagccggaagctattctggatgcacataaagagctgggtatttatgatttattcatccggccggtcagtccttacgggtttgcagaaaagaaagatgaatattcaatggctgagtatcttcttttttacagaaaattactggatattatcgttgactgtaatcaatcagggattaggtttaccgagcattcagcagctattcatatcaagcgcttgtataatcctttattttgtggttatgcggatttgaagtcaccgggagggctggtatttaacagcttactgtttaactatgatggaaaattgtatggcagtgatgaaagcagaatgctgcaaaaagtttatccggaaatcgatttttcaataggcagtattaatgatctctcattccgggctaatgccatctatccccatctgttaaacaactcgtttaatatggtacaggcaggatgtgaaacctgtgcatatcagccattttgtggggtagatccctgtcagaatatcagtctgtttggtgaaccggttggtaacaaaagtttatcccgcttttgtcgttatcataaaggaatgtttgatctgctgatatccggaatgagtcgggagtcatatgaagcagaattgctgaaagggtggtctcatgtgtga

SEQ ID NO: 281262 - DNA, 279 bp, Morganella morganii
atgatgaaaatagtgatgctggataagaaaaaatactctgaatctgttataagacaatcattatattgggtttcttcagaatcagcatggaatttaaaagaaagtaatgatttttttgaagttacacttaaaaatagtaacgaaggtttaatttttacatttgagcgactgcttaatgattatttactacgtgagaaggctgaacggcaaacaaagctgataagagaatcaatcataaataaggtattgatgagtattgatgcgaggttatcaaagtga

SEQ ID NO: 281263 - DNA, 672 bp, Morganella morganii
atgaaatctgataaactatctataatatttcagaagcaaggttatgtatcatttaatatagaaaaattttttcctaaacttaatatattctctgaagaatttcataatattgacgaggaatattggtcatggattattaagaacaagaatggtgagcatgatttttatttgaaaaaacacgatcaattattgattgagaatgaaaagacatctgcattatctgattatgaatcagggctgttttcattttcattcagaaggataattgacaatgatattggtaagtcggtagcttgctttcatcaaataaagtctattgttaatagtatgcgctttttaaaatttttggaacatattacaggaagagaattaaagaaaaatacggtgatttatctcaacaaatttgattgtggtgattttttaacagtgcacagtgacccggggcaaagtatcggattggtaattaattttacactaaactggaatatgactcatggtggtcttacgatgatattagatcagtcaggtaaaaaaatcattgatactttgataccggataatatgacagctttaatatttgatacaggtaaaaaaaatattccacattttgtttcaatggtaacagcaaaaacacagaataaacgcattgccttagttgcccgctatgactga

SEQ ID NO: 281264 - DNA, 471 bp, Morganella morganii
gtgaaaccaattaatattgaagtttttcttttgagcgaagttgaaaatggtattgaaatactcaaatcaaaggtcaaccttcttaagaaaaaaacaaaaattatcaatatgttgactcttttacttggtggactgattactattacattagggcttactctggatgcctaccaagaattgcaacgaaatttagctctttgtcttagtgccatacttactgctgtaaatgggtggagtataatttttgattataaaaagctctggatcagacaaaagtcaacattactgaatttatatcagctaaaaaatgatatttgtttctctcaatcagcaggactgctgtcacatgataaacagttagagttgtttgaaagataccaatgtatttgggaaagcaatggcagcgagtggcgtaatataaaccgtaaatcatctcatgctttcacttcagcccaaattacaaatgactga

SEQ ID NO: 281265 - DNA, 1107 bp, Morganella morganii
atgcatttaactcacttagagatagataaaatttgtattcatcagatttttaaaagaaatcctgacggttctaagaaaactccagaaaaaagttcagaacttgttagattcgatgctgttgctttggaaaccttcaagcaaagaataatttatgctcttggttctcaatcgaaggctgtcgatatgaagatcattgcacaggataaagacaaagcaccatgtctttttacgtctctaagaactgttacagactcaaaatttgttgatatgtcctacgagttagcagataagcttgctgatgctcaaaaaagtaaaggtttatctggcggtattgttgtagtattcctcggctcttttggctcaatcgatgcttctggaagaaaggtgatagtgggcgttataaaagctgatatttacagcgcatatcagaaaattgaagatgcaattacccgagaaatctcactaaagtatgtaaaagaagcattattaacgccatctactaagttattcaaaactgcagcatttgctgaaaaatatcctaattcgagtaattcattaacccctgacttgaatgatagctggctagtagcaatatcagattatcaaatcagtcaagtagatggaaaagctgcagctcagtatttctatgaaacattccttggttgcgggtatccggaatcaagtgcaagaaatactcaaaatttctttgattcaactaagagttttatcaaagatctcgacctatctaatgaggaaaaatatgaattaaataatgcgcttgtatgttaccttaaacttgataaatcaggaattatatcaccggaccagtttgcacagacttatttctcccctgacactgccgatgattttatatctcacctcgcagattccggagtacccacaacttcatttacaaaagatacacagtacgttgatagcagacttaaaattcaaaaagtatcatttggacaaggtattcgtttgctggctccctcagaaattttcaaagaaaagataattatggcgtcagtagagtccgatgaagatggcaatcccgtgaattggacaaaactagttataaaagaaaagctggccttaccacagtga

SEQ ID NO: 281266 - DNA, 984 bp, Morganella morganii
gtgaatcagaccgaatttctagataaatggcatagcgaaaaactcgtctaccaagcgtggggggatttcgttgtatccaaagttaattcctccattaagtcgcttgggcataaccttagtagttatgtaaaaattacaccttttgctagaattaaagacgataactcacttattgacaaagccttttatagaccgaataaatcatatgaacatccgtacgatgatattgaagataaagtgggttgccggttcgttgtgctgcttgttgaccaagtagagcaaattgctaatatcattagagcggatacttcttggattgcagaagagtgccgacatttcaacgttgaacggaatagtgcacccttgctgttcacataccaatccgttcattttgtagttaaggcaattgggtgtttagagttcaatagtgtaaagattccagacggtacaccatgcgagatacagattcgaactttactacagcacgcatatgctgaattaactcatgattcaatttataaatctaaaaaaatcgttaaaccagaaatacaacgaactgtagctaagagtatggctctaattgaaactacggatggtttttttaaagaagtaagtactagcttgaaagggcctacagagcagtatgagattgtattaatacttgactcactatacagcgaatttctatcttcaccaccgttagagttgcagaagtcatcctattttattttagatgcatttgaggatctttttgaaagtaaattccaatcaagaataagacgagtaattgcaaacaccgattatgacttaattaatgtaataaatgctaattcatctagagatccattttataagcaaagtatctcaatatttactgcttggttaataatagaacgaagaagcagagttatacgtgattggcctttagattttaatttgttagaggagtttgcgtcagctctttcagtatctcttgatgtataa

SEQ ID NO: 281267 - DNA, 144 bp, Morganella morganii
atggatgagccggtgaagaaaaaatatagcgctcgcggtattattgctgattatgctatccgctgtttatatatggttatcatcggtttactttctggactatataatcttccgttagctgatatccgtcagaataaacagtaa

SEQ ID NO: 281268 - DNA, 411 bp, Morganella morganii
atggtgaagtggccaaggcgaaagtgcctgatatgccgggcatggtttcacccgaaattcagtaacgaatggtggtgctgtccggagcatggtgctgagctggcaataaagcgacgaagcagggagaggaaaaaggccgaggccaaactaaaaaaggagcagcagcagaaaaaacgtgaagaaaaagacaaactcaaaatccgcaaattagcagtaaaacccctctcatatttccggcagcaagcacagaccgcattcaacgcatacatccgtgaacgggataaagaccttccgtgcatcagctgcagccgtcaccacacaggtcaatatcgtatttggtcacagtgctcttcttattgctttcccgccgctggtgggattccgaataatgccgcagccacctcactttaa

SEQ ID NO: 281269 - DNA, 288 bp, Morganella morganii
atgccgcagccacctcactttaacctgtttaaaacatataacccggttgcggcattttcctatcactcaacatacggaacactccgcaggggggatatgcgcatgtctgacaaatattccagccctacagcatatgcctgggggcttataacctctgcctttggcattttatctctggatcagtgggctattgttgccgggatcatctgtaccgtcggtacgttcctggttaactggtattacaaacggaaggaattccagctgaaagccggagaacatcatgaataa

SEQ ID NO: 281270 - DNA, 477 bp, Morganella morganii
atgaataagcgattggttaaaaaggtaatggctgcttgtactgccggggcaattgccggtgcgctggtactgatccccgcatatgaaggtgttgagtatacgccttatcgtgatgtggccggagtgctcaccgtatgttatggccataccggcagtgatattcagcccggcaagctgtacacggaagctgaatgcaaggccctattgcatgacgacctgacgaaagtccggcgcgcggttgatcctatgattaaagtgccgattgatgacaatacccgggcggccatctattcatttgtctacaacgtcggtcccggcgcgttctcgcgctccactatgctgcgtaaactcaacgccggtgatatcgccggtgcgtgtgacgaaatgaagcgctggacattttccggtggtaagcggtggcagggtctgattaaccggcgcgagacggagaaagcggtatgccacggaatcccttaa

SEQ ID NO: 281271 - DNA, 159 bp, Morganella morganii
atgccacggaatcccttaacgttgaccatcattgctatcatcctgctgactactgctctgttggcgggttgttatctgtattcactcccgaattactgtaagcctctgccgggtaacccgctggacggtgtgatccattataagtgtgaagcgctatga

SEQ ID NO: 281272 - DNA, 486 bp, Morganella morganii
atgaaacccatcctcgatatgtgctgcggcagccgaatgtttatgcacgataagcaagatccgcgtgtgttgttcagtgatatcagaaatgaagaacataccctgtgtgatggccgtctgctggaaattacaccggatatcattgctgactttaaaaatctgccgttcccggatgaaacattttaccaggtattatttgatccgccccacctcgttcgggttggcaaaaacagttggatgtttaaaaaatacggtgcactggataagcactcatggcgttctgaccttgctgccggtttcagagaagcattcagggtgctgcggccacacggagcgctaatgtttaaatggaatgaaacacagatacctaccagggaaatactggctctcaccgacgaaaagccaacagcagttcagggagtcgggaaaagcgataaaactcactggatgacattttataaaggtgctggggatgaaaaaatatga

SEQ ID NO: 281273 - DNA, 735 bp, Morganella morganii
atgaaagagcgcagaataattttcaacgcagagatggtgcacgccattctcgatggcaggaagacgcagacgcggcgaatcatgaagccacagccagtgcctattaacagtggcgctaatcatgtgtggtattgcgaaaaaatagatgcgagccttgatgttaaagatgctttacaagatggaaatgttggctggtatggtttgatttcttctgtttgcccactcggtggagttggcgaccggctttgggtgcgtgaaacttttgcattacttggtaacgaagatggtgtttgcgtcgattggaatgaccgaattgtttatgacgaaaaagaagctgcccgaatttatagagcttcctgtgaacaaaaagacggtgattacggcctatggtcaatccctgatgacgctgactggaagcctcatactgacaatcataaatatgatggaacatggcgaccatctatccacatgccgcgctgggcttctcgcatactgctggaaattaccggcgttcgtgttgagcggttgcaggatatcagtgaagaagatgccgtagcagaaggcgttgcgcctctgcacggtggttactggaagcattatcagcctgactggactcagcaccagcttagtgcgagagggtctttcgtaacactctggaattcaattaacggtgttgatgcctggtataaaaacccgtgggtgtgggttatagaatttaagcggattcaggggtaa

SEQ ID NO: 281274 - DNA, 237 bp, Morganella morganii
atgacagataaaacaggcggatcggcatttccattacccgcgacagaatggaacggcgctgacgaaggtatgacgctgcgagattattttgcagccaaagctatgtgtggtgactgggcgtcacaaaacgaaggtagtggttatttcgcaggtagaagagatgataattcacttaataaagcagctgaaatgtattacctgatggcagatgcaatgctcatagcgcgggagaagtaa

SEQ ID NO: 281275 - DNA, 234 bp, Morganella morganii
atgccgaagttatttagaccggttcgagtcgaatttgattcactgagtggcgatggtggatatgagcattgggttactacaatcaggcatgtaagacgagttagacacgctgatggttggcgctggcagttgatcaggacgaatcataagggtctggatcgctgggattcccacctagagtcagacaaggaagctcttaacgatatcaattatgaatacggactggtgaagtag

SEQ ID NO: 281276 - DNA, 282 bp, Morganella morganii
atgactctttctaatacacaggggaattttctgcctaatgatccgaagtggcgaactatctcccgcatttcaaaacagccgatacatcttgtgctggctgcctacattcaccttttgatgacaaccgacacgcatggttatgtatctatcgttccggaagatttggctagtgctcttgatgttgaggacgaccagatttcagccgttctggatgctatgcaggggcgcgttcttgatggtgaaaaaatatccgggtgggagttgttaccggaggtgatctga

SEQ ID NO: 281277 - DNA, 264 bp, Morganella morganii
atgaaatggattaagtgctcggaaagaatgcctgctacaagccagaagataattattccttatcgcgggtcatccacgatggcctatttccgcaatggtaaagtattccatgtttatttaaacagaaagcgactcaatccaagcgatgtgaaattctggatgccactgccacaaccaccgcagcaggaggtaaagtcggcgctggaaataggtatgtcccgttacgaaggtgctatgcaaaagctcgcagagggaggtgattga

SEQ ID NO: 281278 - DNA, 339 bp, Morganella morganii
atgtcacgatataaagtgttgaaaaaatcctttatcaatggccgcctgctttatccgggtgaggaaattgagttcatcggtgtggcgggaaataacctgcagctgattgaaaccggtgagcgcataacggtgaatgaagatgccaatgccggtggcgataatcacaatggtgataatggcggtggtgaggggggggccggttcttccggtgctgacgctgaattaatcgcgttgcaggatcaataccagcagttgtttggtaaaaagccgcatcacaatgccggtgccgaaaaactccgcgcagatattgacgcgaaacgtaaagagcttggggtttaa

SEQ ID NO: 281279 - DNA, 291 bp, Morganella morganii
atgggcgggataatcacgccgctatattggatattaaatattgtccagatcgcggccgtaattgccggttttcatgattggcttgagtggaacattgttgtttccgtcattcttgccgtggttgttggatggatgccgctggttggtacattcctcggagttatgggggcggtgtacgggtggggctgggaatactggcaggcgatacttttgtttgcctggccgataatctttatccttttcttcggtgcagccggttccatttcgagaagtttttctgatcgacggtga

SEQ ID NO: 281280 - DNA, 756 bp, Morganella morganii
atgaataacctcagcatctctgtatcaaatcttccgtctatcattcataacaacatgccagtaatcactactgaactactcgcagatgtttatgaaacagaaatccagaacattaaaacaaaccactcaagaaacaaaaatcgctttaccgaaggaaagcattacttcaagttaactggttcaatattaagagattttaagaagcaagttactcaaagtaacctggttaaaaatggtatggcaccacaaaactgttacgtcaataaaatggccagtcacctcatcctctggaccgaacgcggcgctgcccgtcatgccaaaatgctggacaccgatcgcgcctgggatgtatttgagattctggaagacaactacttcaccaagtaccgcggcaccggccgtatcgacagagcgttacctcgtaacgcctccaccgaggagctgctggcgctggtggatcagctgcaacgcaaaatttacgacggggagtatatccctgccgggcaggtagcgcaggaatacagcttcccgaaaacgaagaagtcacgttcgcagatcctcaatgacttcctccggtcaccggaagacgatacgctccaccagcttctggcctatctgaaacgggacggccacaatgtggaagaagcagagcgcgtcctgatgtggctccgcgactatatgtgcgatatgggcaaaaccatcaacaccatcattacccacgctcagtacattgagcacgcagtcagtaagttataa

SEQ ID NO: 281281 - DNA, 885 bp, Morganella morganii
ttgctggcgttattaattattcctatcttggttagcggttacattatgatgaccgctaacccctaccatttctttcggctccatcgccacgatgggcagcttttgtacctcaaggccgcatattatggcactttatgtcttattgcttctgtagcatctgctgtcatcattaagctttatttccctgacttccatcccatcaacgagattcttaaaaaattttctatttctactgctaccccaagcaaagattcatggagtcaggacagaatttacgcttggcttattttgctatctgtgtgttcaatagcatttgctggcatatgggtaatactggtgtgggcaaaaaatagcatcaaaggcaaaaagcacaaagacaagcacaaactctataaaaaaatgagacaagctcggcacgcaaaggtgttaagaaagactttaccaaccggttcctttcatatgatgctgctggatgcccttgaatcatcaccaaaaaaagccgtgttgattaatatgtcctcaattaataaagtttatgtcggagtcattaatgggttatctgagcctaatgaaaaagaaggccccagcaaatatatttctatttaccccgtaatgtctgggtacaggcataaagacactcaattaatttattttacaaataattaccctgagagaaagcgtgatgataatgatgatcttcgtattttaatttcatccgaagacatatcccacatctcttggtttaactttgccatttataaatgtacaaataattcagtggcaaaaaatacgccgcaaaaacaagtaaatgaaccatccacgccaacagccatcactcccgaaaacaaacctacaggcctattctccaggttgtttcggcactaa

SEQ ID NO: 281282 - DNA, 225 bp, Morganella morganii
atgccagaattcatctctaatttatttagaagaaaaacggcagcacaacctacctcttgtacagaacagcacaacgttatcaatagggttgcatatgtacgagtggacagggatggttctgcctacattcactctaatgagctgtctcagcttcctgaggttcaggaaatgcaacgccaagctgctgaaattgttgccgaatactataaaaatctagataaataa

SEQ ID NO: 281283 - DNA, 588 bp, Morganella morganii
atgctgcgccttcgccgtcataaccagatcaccggcgtccaggtaccggaaattattctgttaaacagtcatgacggcaccagcagttatcagatgctgccgggattattccgtgcagtctgtcagaacgggctggtctgtggtgatacctttggtgaggtcagagtgccgcataaaggtaatgtcgtcgataaagtgattgaaggggcatatgaagtgctgaaaacgtttgatgcggtggctgaaaaacgagaacagatgcagtctttgttgttaccaccaccggcacagcaggcgctggcgcatgccgctatcacgtacaggttcggggatgaccaccagccggtcacggaagaacaggtgctgcaaccccgccggtgggaagataagaaagacgacctctggacagtgtaccagcgtttacaggagaatctgattaaaggcaggctgtccggacgtacagctaaggggaaacgatcacacacccgggcagtgaccggtattgatggagatatccgtctgaataaagcactgtgggtgatgacggagaaaatgtatgagcattttaaccggggtcattacgcgtga

SEQ ID NO: 281284 - DNA, 570 bp, Morganella morganii
atgtctttattaaaaagagaattaattatttcatcgttacttttattttcctttaatgcattctctgcggatggtgatattcatgaggtcgttccggaaatcgatgccgatgccaaagaaataacagggaatatcagatttacaggaaaaataactgactcaagctgcgatattacacaaaaagataaagatgtttatctgggtgagcattcagccgctaaactgaaaaaaaatgatgacagaacagaagaaaaggcttttgatatttctctgattaactgttcattagcaatgacatcgctgagaatcaaaatggaaggcacggcgcatgcagacaatgcaacgctgtatgcattggatgccaatcaaaaaagtgccggaaaagtggggatcagcattgcgactgcagaggggcagcaggtaacgccggcaggtgattatagtaacattcctctgcaggcggattcccgtgattatactcttaattataccgcagcgtatcaggctaccggcctggcaacaccgggtgaaggcaatgcaacggtgaattacactgtttcttatgagtaa

SEQ ID NO: 281285 - DNA, 672 bp, Morganella morganii
atgaaaatcggtttcactttccttattattattttttttctgaccatgagccgggcaactgccggagtggttgtcggcggcacccggtttatttatccgcaggataaaaaaatgatcacaatccctgttgataatactgataaaaaatcagcctatttaattaagagctgggttgaaaaagaagatggcataacaaaaagtaaggattttattctcacaccggttattttccagctggatgccgggaaaaaagggattttgcgtgttatgctgaaaaaaacagaattcccggatgacagagaaacactgctctggctgaatataaaaggcattccggaaacagatgaaaacagagagaataaacttcagatcgttattaattcaaagtttaaattattctatcgccctgagggattaactgagcctgattataataaactgaggtatgaacgaaaaggaaacagaataaaggtcattaatgacttgccctttcatatcactgtcagaaatattttggttaataataaggaatatactgtttcggagatgattgttcccttcgaatcattaacggtaccggtaacaactattcatagtaatgacaaaataaccataagctacatctctgattttggcgggattatttcgaaacctgttgtttttgataaataa

SEQ ID NO: 281286 - DNA, 1530 bp, Morganella morganii
atgcaattgaaagcaccttatttttttcttctgtctgtggtgatcgttttttccccggtaactgtttttgccgcgccttattttaatccggcagcgcttggcctgaacggagatgatccggtgatggatcccgcacagtttcagtatttgcgggagcggcaatttcaggaagagggccgctattttgtggcagtcactgtcaatcagcaggtagccagcagtcaatggctggagtttcgttatcatccgcagcaaaaaacattgctgccggtggtaacccgtaagcaatggttggtatggggactgcgccccggtgcatcgtctgcatttgctgaaacggaaagcacagcacagattacagatattaccgcgctggtcagcggggtttcgctgaattttgataccgcgcggcagtcgctggatattacgatcccgcaacgtttttttttgacagaagcgcagcggaccgcagatgcttcgttatgggaaccgggcattactgcatttatgctcaattatgattatcgcttttcccggcagagcagcagattcagtgatcacaccgggcataccctgttactgcaaagtggttttaataccggattctggcggcttcgccatcacagcagagcagaataccggaaccggaaaatgacatggcagtcagaacggctgtggatgtaccgcgctatagcgcctctgcgcagtgagttacagctgggggagttgttcagcggggatgtgctgtttgacagccgtgcgttcagggggatccggctggcttcacaaagtgatatgtatccgctgaatcagcagggatatgcgccggttatccggggaataaccggtcagagtgcggaactgactatcaggcagcagggaatgattatccgccgtgaaacattacctgccggtgaatttgtgattgatgatctgaatacgtcttttcagggaacggaactggatgtcaccattgaggaagcggatggcaccgtacagcgttttatacagccgggagcctcagtcccggttatgcagcgggaaggccgtctcagttacacactggatgcaggaaaatacagcggtaacagaaataataacaaagacctgtttgtgaagagtacggcagcatacggcattaattcagtcctcacactgtatggtggcggctatgcagcacaacacgccctgagcagcggtgtgggggcaggtatcaatatgggagcagcaggcggagtgtccgctgatattctgatgcggcatacaacggcaaagcattatccgcgttaccggctgaattatcagaaattttttccgctgaccgggacattggtgaatacaggggctgcacatgagcaacaatcaaggcagtggcaggtccggttgctgcaaccattgccgggggataacggtacgctgtcggcaggatatcactataaccgcaccggccatgacgggcgcggataccgggcggtgattagcagggatgccggctattccggccatattggccggtacattacggtgtga

SEQ ID NO: 281287 - DNA, 1059 bp, Morganella morganii
ttgaatctgagcaaagatggctatccacaggggccgttattacgtgcagtatgggagtgttgtgatgagctctatgagaaactaggtcgagctccctcccgacaggaattttataacgaaattgacaaacgcgaaccacatcgcataggtattagtacacattctcgccaatggggagagtggatgcgccatcataatttctcaacatatgtagctagtgtgccgggtattatccctgaagaaatgcactctccacaatatctccgtgtatggtatgccgtgacacaactcggttcagcctctgccgctgatattgtcaagtggatccataatagcaacgcccctttgaaagagaccgagattcgcattcagctggatgcattaactgttaatagcaattcccgacatcgatatcttggtagtcgtactagcgctcgtagtgacttgggtaacccatgcgacttgttatttcgtacgggaaacctacgaaatacacgatatgaactatatacccaggaactgcacggtacatgggacattggcgaagatggtagaacaccgattcagatagctgttccaagaccatgtgatcgactagtggttgaggtaagagatgaactattcactgaattacctgtggatgaaggtgactttcgtctgaaggctctacgtgaagttattgttcgggaaggacaacccgtatttagacgaaagctcattgaagcttatgagggcaaatgtgcggttacaggttgttcgatccaggtgttgcttgaggctgcccatatcaccccctatgcaggtgcctggcatacccgagctcagcatggactgttactcaaaacagacattcatactctttttgaccgtggtttgctctggattgataccgactttaaaataaggatatcagaacggctagccgggacagaatatgcagagttgaatggtcgatgcctaatgttaccaaaagataaaaaaaactggccattaacaactcatttgataaatcatcggcaatattggaatgaaaaacataatgacgatgaacgcacatag

SEQ ID NO: 281288 - DNA, 1824 bp, Morganella morganii
atgaagcttgtatctgtagaaatagaaaatattcgctgttacaaggaccctgtcaaagttcagattgatgatcttactacctttattggaaaaaatgatatcggaaagtctacggtcttagaagctttagagatcttttttaacaatgataccgtgaaaatcagtcaagacgatgcaaacatctctaacgcgaataaattagtatgcattacctgtgaatttacgaatcttccagacagaataatcctagatagtgggtatgatactactctaaaagatgagtatttattgacgtctgagtcaaccttgaaaattaaaaaggtttttgattgcgggaagaaaagcataagttgtgatgtttttattattgctcagcaccctactgctgctggtataaataacttacttgaacttaaagaaaaagaccttcagaaaataataaaagaccaaggtattgctagtgccctcaaaggcaatcctctaatgcgaagggctatatgggacactgttggaaacctagaacttcaagaagtcgagatccccgtgacaaaacctaaagaagacagtaaaagggtctgggatcagctcgacaagtatttaccattatttgctttgtttcaaagtgacagaagtagtaaagattcagatggtgaggttcaagatcctatgaaggcggctgttgctaccgcaatagctgaagttcaggatgatatcgaacgaattcaacagagagtaaaagcccgaactgaagagattgctaataatactcacaaagcacttgaaacgatagataaaactctagcatcagaactggtaccagattttacccctccaactccagcaaaatggataggattattttccgtgagccttagtacagatggcataccattaaataagcgtgggagcggtgtacggcggttggtcttagttagcttctttaaagctgaagcagaaagactcctcactcaaagtagcaaaaaaggaatcatttacgctgtcgaggaacctgaaaccgctcagcatcccaacaatcaaaaaatacttcaacaggcctttttagatcttgcgaatgaacataattgtcaagtcatacttacgacccatagtcctggatttgccagcgacctcccaattgaaggtattcgtttcgtaacacgaaatgaaaatgcaaaaccttgtattgaaagtggtgtagatgtactcggaaaagtagcagaagcccttggagtgacgccagatagccgagttaagttaatttgctgtgttgaaggcccgacagatgtcaaagcactaaaagcgctaagtcatgcattacacttagaagacaattcgatacctgatttaactagtgatgatagagtcgctttcgttgttcttggcggcggcaatttaaaacattgggtgaatgataattatctgaaaggtttcggacgccctgaattgcacatctacgatgcagatgtgtcaagctatgttgatataattgaaaaagtaaatactcgtggggacggttcaatcggttttattacagaaaaatatgaaattgagagttatctgcactcggatgcaatcaaagcggcttttgatgtagatgttgttgtaacagatcaaccaaatgcagagggaaaagcaacgcctaaaattttcgcggaagtatattctgctgcacagggatatgatggcattatgaaagacaacaatgccaaaattcgtcttgctgaaagagcttttccacttatgactgcggacttaattcatgaaagagatccgaacggagaggtaaaaaagtggttcactacaatgattagttttctaaactag

SEQ ID NO: 281289 - DNA, 189 bp, Morganella morganii
atggataacattaacgatgattctttaattgacatgaagttcatgacgcgagatgctggcttcacttccaaatatttctacagccagatcaataaaggcaaccttcccaagccgataaaaatcggtgaaaggtcacgctggaaaatgggtgattaccgcaagtggaaaaactctttttcatgccgttaa

SEQ ID NO: 281290 - DNA, 369 bp, Morganella morganii
atgaacaaatatcgtgacaaatcagactttgagattaataaggctgtggctgttaatattaatggcactgacgctgttttagaaaagttcggtagcatatatatcagtgatagcgatagaggtgcgatggtgagcttctccccctgcaacaacccggcggacgcaatgccgattattattgagaataaaataacggtcgcgtatgacaaactgcatgaaacctggtgcgctcatgtatggtctgtaatgagtggtgatggtgggtgggattattctattgaaccagtaataaactattgcgacgataattactatcgcgcagctatgatttgtttcctgataatgaaggatgcggagaatgaaagctga

SEQ ID NO: 281291 - DNA, 225 bp, Morganella morganii
atgaaagttagattattgaacgatggtgattacggcggaatggaaaatactgagttccctgtcattgtaaatggtttttattatgacgggttaaaccacgtagttggcgtttcttgtagtgaattaatcagggtcggtgctgacaaagatgattttaatattggtggttacctggcttttttgattggcgaagaatgcgaggtaatcaatgaacaaatatcgtga

SEQ ID NO: 281292 - DNA, 477 bp, Morganella morganii
atggatatatcacaagtaggaattgaattaatgcagcacgctctcggtattaaccagcaaaacagaaaaccatataggaactacttcctctcatccggcaaaaatgaagaatgggagagtttaattaaaaatgggcttgccacatcaaatccagcaccaaaagaattttgtggcgatatttattatcaggttaccgatgccggaattaatatagccatatcaaaactaccagcacaaaagaaattaactcaatatgatgaatttcttaatgcagattcaggcttatcatttgccgaatggttaggtatcgagttaccggaatacgaataccggaatcgcggtgataaatgtgaataccgcatgtatcgcgaaaaaaggaatcaatggtgggatttaacgcgcatagaaggcgaatggatgccaactatgaaagcggccaaagcaagttataaagaagcacttaaagccagcaggtag

SEQ ID NO: 281293 - DNA, 174 bp, Morganella morganii
atggcaatagttcagtattacgttgcgtgtaaaaaagatgaagacccggcatccgtcactgagaattttcgctgtgaattatcagatgaccataatttcagtgctgatgatgacgactttgaattttgcatagaaacatgcgcggaagactttcactataattgtgacgggtag

SEQ ID NO: 281294 - DNA, 267 bp, Morganella morganii
atgtcgcgaccaatcgacttaatagcagatatcacggatgagtatatcgccaggcattttgaagggacgaactacggccacactaactatcgtgacattgttggcaaaggatgcctgaatgctatggccggatatcacaacggatataccacgcagtgcatactgataaatatggggctgaccacagaaaagttacggctgacgaggcgcggtcgtgaattcctgttctggcattttgactatcagccggttaatgggcggaaataa

SEQ ID NO: 281295 - DNA, 747 bp, Morganella morganii
atgtcacaccagatgacttacgcggattcacgcaatgccacttcttcgccggtgttggagtgtggtcactcgccctgcgccgtgcaggatggccggatgataaaccagtctggacagggagttgcccgtgccagcctttcagcgcggcaggcaaaggaaatggatttgctgacgagcggcacctttggccagcattcttccacctcatcagcgagtgcaaacctggcgttatctttggtgagcaggttgcaagcaaagacggcctcggatggctcgaccttgtacaaactgacctggaagaaaaggactactccacagcagcggtcgatttatgcgctgcgggcttcggcgcgccgcatatcaggcaaagattgttctgggtgtccgacacctttggcggggagcagccggggagccggaaccaacggcaggcagggaggaatgaatattcaaacagctgcgcagctggcaggctggacaaccgcgagcgcctcggatggagagcgtggagggacgggaataacgcagggaatgactggcagcagcttgacccagcagtcaaaaatgacactgccagtccgactaacggccaatggcgagatgctgattggttgctctgccgggatgacaagtggcggccagttgaacccggaacattcccgctggttgatgggattgccggtcgagtgggaaaactccgcgcctacggaaatgccatcgtcgcgccggtcgcggaagaattcataa

SEQ ID NO: 281296 - DNA, 591 bp, Morganella morganii
atgaatgataacgtaattttcacctataaccaggatgacgcagtagcagcaggacaaagcggatttatctctgagtccggcgcttacatcattaccatcaccgaagcaaagctcatgcacaatgaaaaaggtgcgaagtatattgagttctcgggtgaggctgacgatggccgtaaagttaattacctgagtgtgtacagcatcaaaaatgacggcaatgtgaataagttcggtcacaatatgattaacgccataatggggtgttgcggtattcagcgcctgacatcaaaaatgataacggtcagtcatcatgtcgcccctgaattcaccggaaagcgaatcggccttgtgttacagaaagtcctgcgtacaaaacagaacggtgatgacacttacggttttgaaattcgcattccgtttattgccgatacccgccagacaatcgcagagaaaatcagtagcgcacagccggaaacggtagagaaaattctctcaaccctgaaagaccgtgatgagcgcaaaccaaagggtaaccagcagagtcaaccgcaatacgatgaccagtatagcgataattttgcacccttctga

SEQ ID NO: 281297 - DNA, 681 bp, Morganella morganii
atgggaacagcaacgctgattatcggcgagtccggcacagggaaaagtgccagcatgcgcaatctgaatccggctgacacgctgctcattcagtctgtaagaaagccgctacctttccgctcgtccggatggaaggcatggaacaaggaagaccctgccacttctgtttttgtctgcgataaatgggatgttatcgctgaatccattaaacgggcttccggttacgggaagaaagccatcgttatcgatgattttcagtacctgatggctaacgagtttatgcggcgctcagatgaaaagtcgttcgataaatttactgaaatcggcgctcacgcatggaatgtgattaacgccgcaatcagcgggacgcctgatgatgtcagggtttactttctcgctcacacggaagaaacacagctcggtaaagtaaaaatgaaaaccatcggcaggatgctggatgaaaagataaccgtagagggaatgttcactattgtactgcggacactggttaaggatggccggtatttattttcaacgcagaacagcggttatgacacggttaagtccccgatggggatgtttgagacggcagagattgataacgacatggatatggtcgattcagcaatctgcgaatactacggaattgaaaaaaccaatacagcggagcaagtagcatga

SEQ ID NO: 281298 - DNA, 693 bp, Morganella morganii
atgaatatctatatcgacattgaaaccatcccatctcaaaacccggtgattaaacaaaaattcattgaggaggttcaggctcccggccaatacaaaaagcaggaatctatcgatgcatggctggctgaaaatcgtcagtcagttggtgaggaaaactggcgtaagacaagttttgacggcggtcttggtcatgtctgtgtcatcggtgtagcgattgatgatggtgatattaaatcactctactccgctgattacttagccaatgaaaagcagattattaccgacctgttcacgatgatcgatgagcattatgacccggcaaaaaacgttcctcctgtgttcatcggtcacaatattgcagagtttgacctgaaattcctgtttcagcgtgctgttgttcttggtgttaaaccgcctcgcattatcccattcggtgccagaccatgggataaatcactattcgacacaatgaccgtgtgggctggtcataatggtcgcgtttctctcgacaagctctgttctgttctcggtctggatgccaaggggtctgaaaccggcgaggatattgagggaagtaaagtgtgggatttcgtcagtgccgggaggattgatgtcgtggccgaatactgtaaaggcgacgttagccgagttcgcgatattcacaaaagaatgacatttcaattaaccgcctga

SEQ ID NO: 281299 - DNA, 168 bp, Morganella morganii
atgaacgcatacgcggcacaggatgctcaggaagagcagaggctgattgccgaacagcgcaggaagtgcgaacaggaagaaaaaaaggaattagaccatcgttattatgtcctcggcgagcagggattgcccgtgtcgtgggatgaattctcaggaaattttaattaa

SEQ ID NO: 281300 - DNA, 234 bp, Morganella morganii
atgtccgataacaacggttggattagcgttaatgaacgcctacctgaaatcagagatgattctgtactggcgtactggcaagggcatggcggcatggatatggttcatgttgaagatttttttggtgacataaccaatggccgcgacgaaaacggaaaccaaaaatataccaagctttatctaagccatggaataactcactggcaacctatgccagaggcaccaaccaagtaa

SEQ ID NO: 281301 - DNA, 219 bp, Morganella morganii
atggcatggcaaaagcgcatgtggtgctcaccactgagcggaaatatttatttcggtaatgtaaacactgacaccggaaaggcgacaaaaggaaaagttgccgtgactgatgatgccgttcgctcagtggccgagcatctgtatttaacaggtaacgaagaaaaatacacaacaaatgatggagtgaaaataaccatcagtgtgaaagtggagaaataa

SEQ ID NO: 281302 - DNA, 270 bp, Morganella morganii
atgacaatacatagtttccacaatggaaagctacccatgccgaagttatttagaccggttcgagtcgaatttgattcactgagtggcgatggtggatatgagcattgggttactacaatcaggcatgtaagacgagttagacacgctgatggttggcgctggcagttggtcaggacgaatcataagggcctggatcgctgggattactacctagagtcagacaaggaggctcttaacgatatcaattatgaatacgaactggtgaagtag

SEQ ID NO: 281303 - DNA, 345 bp, Morganella morganii
atggactacagcaagtgcaactttgtatccgcgctgagctttatgaaaaagcaaacacgcgggccgataatgaacgtcaatgttaaaagcggcaacgcaacactaacgcgcattgttaatgatgggatgccgtttgtgcggatatcaatagatgagaacgagaaaattgttcgtgtcgaaatgtcaaaagttgacggaattagcgtcaggcatagtcacaatatcggccacatgtatctgccaaaagtgtttgcaaaaatcattatcgacggatttaactcagaaaaatcgaaaaccatcaccctggaaaaaggcggtgacggcgcttggtacggtaaattttaa

SEQ ID NO: 281304 - DNA, 291 bp, Morganella morganii
atggaaatttggttcaaggaatttcaatcgcacggtagacaagtattggttaagaaatcacatgatgctgatgaatctaaactctgcgtgcacatgtgctggccagaagaaaaatttgatgtcgaattcgggccagcctttattttcgatgatgaagatgaagatagctttaataaagcaaaggaactgagagataaggcctttgataatttcggacaaagtgaagtcgatcagtggatagaaagcgttatgcctgaaatcgaaaaatgctctgatgcattgccggaataa

SEQ ID NO: 281305 - DNA, 906 bp, Morganella morganii
atgtctaaaaatgatggtggcggatccctacagcagatgcgcttattccccgtggttgaaactgttgctgacgatattccaatgggggtacttaatgatggaactccatatttaaccctatatggcctagcaaaactgtgcggaatagacgacacaccactccgcgtttttacctctaactgggaaacagaaaaagttaagccacgcgggcaaaaggtgtcttcttatttggagtccagggggtatagcaatgttgataaattatatacaagagttatcaactcagccggaatagagacccatgcctatccagattacatctgcatggccatactgcgatattacgcttttgacgcatccaattttgataacagcatagccattgataactttgctcggcttgctgaatacactttaaaaagaatgatatatgagaagtcaaactacaggccaagtagttcacaggacatctcattcaataattatcgcgacagggtaatgctaaatgaccaactaccgattgattatttttctgttttcagagaatgcgcagatattattatccacttaattaataaaggattccctgtaaacgacaccactatgccagatggtagcgtcggccagcactgggggagatattggaatgataatctgctacatgaaaaatatggagacaggattaaatatagtcacactttccctggtaactataggcaggcagctgccaattcctttgtaaagccatggatatatccaatagacgccttgggtgaattcagaaagtggctatacaacaactacgccatggaaaaactggaagactacctgaaatacaagaaattcgagaacatagatagcttgctagaggccgttagacgaccagagctgccaaataaaaaataa

SEQ ID NO: 281306 - DNA, 729 bp, Morganella morganii
atggcaacagcagcgcagactctggcgcggtttaaccgcatgaagccggagcacatcaagccaaaattcacgaatgctgctgagctgatggcgtggcagcgtgagcagggcgctatcgatgcaaaacggatcgccgatgaaaatcgggttacccgtctcaataaaatcatggggcgttccggtatcagccagttacaccaggaatgcacgttcgataactaccaggcgacaacgcaggaacaacagcgggctctcagtaaatcacagcagtacgcagctgagttcggcaaatcatttggtgggtttatttttagcggcaatcccggcaccggtaaaaaccatctggcggcggctatcggcaaccagataatccggaacgggaaaagcattctgattgccactctgccagacctgatgatgcgtgtccgtgagacataccagaagggcgcgaaaactacggagtcgcagctgatcaacgacctgtgcgaagtggatttactggtgctggatgatgttggcgtgcagcgtaataacctgaacgaagagctgattatcttccaggtggtagatcgccggttatcgaataaaaagccggtaggtgtgctgaccaatctcaattttgacgaactggcgaaagcattgggtgatcgggttattgaccgcctgagaatgggatcgccgaccgttatcaatttcacatgggaaagcttccgcagacaggttaagtag

SEQ ID NO: 281307 - DNA, 429 bp, Morganella morganii
atgaaaaccgtaaaaacgattgagctttcaggtccggcactggattatgcagtggcgaaggcagttggtagttatgagttaatacctgttccgcctgatgctgacgggaaaaacgaaggatgggtattagcgccgaagaatttactatccagcgggtatgctttcccgccgaagggtaagctacctattaattttttcataagtcgatattcaggagattgggctgagtgcggtaggcttttggagcattacatgattgatgtttcgtttgatcacgatgaagagcatgagccgtggagtgctacatcaccattgttgatgggtgaatacttcaccggcaaaaacgcgaaagttgcaatctgccgtgcggtggttggaatgtcaaaacttggcgacacggtggaaatacctgaggaactgctggaatga

SEQ ID NO: 281308 - DNA, 201 bp, Morganella morganii
atgacagagaaaacacagaagcttaagccgtgccctatgtgtggcagtgatgacattaaaatccaccactatccaactcaggaaataatgatggattgtgtcatgtgcaggcgatgcgggcttaaaattgagcgtgaaacctggcttcataccgcaatcgccgcctggaaccgcagagcaccacaatgtgagaaggagtag

SEQ ID NO: 281309 - DNA, 294 bp, Morganella morganii
atgaaatatccaaaaatagatgatttccacaatggcattaaacctatgccgaagttgttccgtgttgtcagcgtggagcttgacgttttgcgctctcatttaggttctggtggtggcgttatatttgattgtgatgatgtcgaaatcagaaaagtaagacgggttaaacacaatggcggctggtgctggcagctggtcagagagcacaaagaccaggagctgtgggattactgtctcaatcaagacagggagtgcctggataacctaaattgggaatttggcctgttcagataa

SEQ ID NO: 281310 - DNA, 171 bp, Morganella morganii
atgaagaaatcaaatttacttatggctctggctgttggcttgtcggcgaatggccttgcctgggcgctgcgtgatagcgcaagaggttatcactatccactgtcacgcaaccgcattaccggtcaccggaaactgaaccggcaggcgcagaagcggaggaaagcaaagtga

SEQ ID NO: 281311 - DNA, 327 bp, Morganella morganii
gtgacaagggggaagaaaacttatatcaaaactgccgaacagaaacaggatgtgtgcctacggatagtccggaatcttcgccagttggacagtttcacggtgaaggcggtttcactggccgctgagttaaaaatcatgatggcgaccatgtttgtcaaaatgatggaagatatcgatagtgtccacgtcagccacaaacacggaaagcaggtctattacgtttttgacgattatgccgtatcaaaaattaaggctcacttcagcagctttccagataaaaaattcaccggtacgaaggcgaaaggagagtgttatggattatcgtga

SEQ ID NO: 281312 - DNA, 315 bp, Morganella morganii
atgaaaatgaaagaaaacccagacgtttgggatcaggtactgatgtatctgtctcagtacaaagaccagggcatatttgccgctctcgctgggtcggtggctatccttcgtggtcgctataacggcggaggatggaagaagaccatttttgacgggctgatgtgtgcaatcttcgcgtggttcgtgaaggacttgctggcgctactcggccttaatcctgatttggcgtatctgaccagtgtgttcattggttatatcggtgtggatgcgctgagcaaaataatcaaaggaaaggcgggggtgaataatgactga

SEQ ID NO: 281313 - DNA, 483 bp, Morganella morganii
atgactgaaccaaaatggattactgaagcccggaaagaaatcggtgtatcagagcacacagcagcaggttccgcagcagtagaccagatgtggattgacagcaaactgcgcgggctggttggcaccgcgcgtaaagtgccgtggtgtgctgggtttgtgaatgcctgtctggagcgcgccggcattcgttcgacccgctctgattcttcccgctcatatctggcgttcggtgacatgctgaaagagcctgcatatggctgcattgtcacattctcccgtaccggcggcggtcatgttggcttcgtggtcggtaagacagaatcaggtcaactgatggtgctgggcggcaaccagtcagacgcggtaaatatcaaagcattcggcactgaccgtgttaccgggtaccgctggccgtcaggtgttcctgtagataatcgcccgctgccgatcggtaacgcggcactttcagtgaaagagtcatga

SEQ ID NO: 281314 - DNA, 195 bp, Morganella morganii
atgaatattggtgatttagaccctattgttcagtgcgaaatattacggctggcgcacaactacgcaatcaaccggcgagagcttttgtctcgagacagaagagcgccgaaagatgagcacaagtggtacggagagcagataaccgaagccacaaagcgaatggtatcactgtacgaacaagcaacgcctcgctaa

SEQ ID NO: 281315 - DNA, 492 bp, Morganella morganii
atggccgcaccaaaaggaaacagattctgggaggctagaagcagtcacggacgaagcccgaagttcgagtctcctgatgatttatggaatgcatgctgtgagtatttccagtgggtagaggataacccgctgtgggaaatgaaagcatttagttatcagggagaagtgacgcaggagcctatcgctaagatgcgagcaatgacgctcacagggctttgcctgtttctggatatagctgatagcacatggcaattgtaccgcgctcgtgaagattttatggcagtcacaacgcgagcagagaaagtcatctatgaccaaaagttttccggtgccgccgctgacctgcttaacgcaaacattatcgcacgtgatttaggtctcaaagatcgccaagaggtcgaggatgtaactccggacaagggagaccgtgacaagcgccgctctcgcattaaggagttattcagccgtggaaaatctggatcagatacttga

SEQ ID NO: 281316 - DNA, 1500 bp, Morganella morganii
gtggaaaatctggatcagatacttgataacctgagcgacgacgagcaatacgagctgcttgagttgctggaagaagaagacgaatacagaaagacgcatcagctgtttgaatattctccgtatgcaaagcaacgtgagtttattgatgccggtagtgagtattttgaacgctgctttatggccggtaaccagcttggtaagtcgtacaccggcggtgcagaggtggcgttccaccttacagggcgttatccgggcacgaaaggttatccggaagacggagcatggaaaggcgagtggagcggcaaacgatttcttgagcctaacgtgtggtgggttggcggcgaaacaaacgagacagtaacaaaaaccactcagcgtattctctgtgggcgcgttgaagaaaataacgaaattgggtacggatccatccctaaagaggatgtgatcagctggaagaagtcaccgttttacccgaaccttgtcgaccacatacttatccggcaccacaacgccgatggtattgaagatggcatgtctatctgctacttcaagccgtattcacaaggccgcgcaagatggcagggggacacgatacacggtgtctggttcgatgaagagccgccatattccatttacgcagaagggctcacccgtaccaacaagtacggccagttttccatcctcacttttaccccgctgatggggatgtcatcagtagtagaaaagttcctgaagaacccatccaaggctcagaaggtggtcaatatgactatctatgatgccgatcactacactgacgatgagaaagaaaggattgtcgcctcataccctgaacatgagcgtgaggctcgtgctcgtggtattccgacaatgggaagcggacgcatctttcagatacctgaagagataatcaaatgtcagccgttcgaatgcccagaccacttctacgttatcaatgcgatggactttggttgggatcacccacaggcacaaattcaactttggtgggataaagacgcggacaccatgtatctggcaagagtatggaagaagaaagagcatacagccgtgcaggcttggggagcagtaaagccgtgggctcagaaaataccaactgcatggcctcatgacggaaaccagcatgagaaggggggaggtgagcagcttaagaaccaatactctgatgctggattcatgatgcttcctgagcatgccacatggcctgatggtggtaacgccgtcgagcctggaattaccgagttgcgcgacatgatgcttgatggacgcttcaaggtattcaacacctgtgagccattctttgaagagttccgcctgtatcaccgcgatgaaaacgggaagatcgtcaagataaacgatgacgttctttcagccgtgcgctacggctacatgatgagacgcttcgcaaaaatgatgcgcgatatcaaaaagccaaaacagaaagtaattcccgccccgattaagcctatcaggagacattaa

SEQ ID NO: 281317 - DNA, 2088 bp, Morganella morganii
atggtcgataaaaatgagcggctgaatagcatattgcgcaaattcgacctcgattactccgcgtctgaagcagcacgaacggaggcgaggaatgatttgtttttcagtcgcgtttcacagtgggatgactggttagaaaactatgtcacattgcagtatcgcggacagtttgatgttgtgcgccctatggtgcgtaagctcgttgctgagatgcgcaagaatccgatagaggttcagtacaggccgaaagatacagcctctcctgatgctgctgacatcctcatggggatgtaccgcacagacatgcgcaataacagctcaaagatttctgtcaacgtggcagtccgtgagcagattgaatgcggtgccggtgcctggcgcattgtcaccgagtatgaggacgataacccgaccagcaataaccaaattatccggcgcaaacccatccatgagtcatgtactcatgtgatatgggactgtaacgcgaaggagatggataaatctgatgccaagcgctgcacgataattcacgctctcaacattgacgggtgggaagaattcgcagagcaatacgggttagaccctgataatgttccgacattccaatcgcccaacactgactggttgttcacctggtcgagcggcaaaacaatttatgtcgccgaacactacgaggttgaggagaaaaacgagaaggtattcgtctactacaacccgacagtaatggactttcagagctactacgccagtgagattaaagatcacattgagcgcctgtcagctgaaggtgccgagaaagcaggtgagcgcaaagttaagcgccgcagggtgtacaaatccatcatcaccagcacggcgattctgaaagacagaattccggttgccggtgagcatatcccgattgtgcctgtgtatggggagtggtcgttcttcgatgatactgagctatatgagggcgttgtccgcctgtctaaagatgctcagaggctgcgtaacttcatcctgtcaaagggcgctgatacggtagcaaaatcaccgaagaaaaagccgttcttttatcccgagcaaatcgcagggtatgagcacatgtacagcggggatgatgattacccctattacattctgaacagaacggatgagaacagccaggatttaccacccgggccggtctcctatatggaaaatccggagatatcacccgctgatgccgggatgcttgacgctgctacacaggcagcaaaagaggttgcccgtatcggcgttgacccgtctgccgcaaatggtcaggtggcctttgataccgtcaatcagcttaactcccgcatcgaccttgagacatacgtgtttcaggataacctggcaattgccatgcgtcgcgatggtgagatttacgcttcaatcgccagtgagatttatgacacaacgcgaaccgttgtcaccactgccgaagatggcaatgaaagcaacgttgagctgatgtctcaggctgtcgacttccagcagggtcaggtagtaactaaaaacgatatccgtgggaagtatgaaacttacactgatgtcggcccgtcattccagtcacagaaagatgcagcccgcactgagataggcgacctgatcaccaaggttccgcctgagcatcctatgtggaatgtcatgatgctgacctatgccaacatgatggaaggcaaaggcgttgagtacatccgcgactacgctaaccgcgagctgatagttaacggcctgaaaaagccggagactgatgaagaacagcagtggttaatggaagcgcagcaggcacagcagggcaagcaagacccgatgatggttgcagccatggcagaacagaagaaagccgaggctgaacttgtcagcgctcagacaagggcgcaggaaacacaaatcaaagcatttactgctcagaataacgcacttgaatcacaggcaaacactacattgaccttggctaaggccgaggacttgcagcagggcgcagtgatgaaagccatcgaacttctgaacaaggttgcagatcagcaacaacaaaacatcccttccggctcaccagccgagatacctcaaaccatgtaa

SEQ ID NO: 281318 - DNA, 915 bp, Morganella morganii
atgagcacaaccaccgaaattcagaaccagactgaagaattaaacctgtccggcgatcaggcggcggcatccgcagatggctcagttgtcgataatgccaacgacaatgcaggtcaggatgaaggcttcgacattgtactgaaagacgatgaggggaaacccaaacaagacccggcaacaaacgcggaatttgcccgtcgccgcattgagcgcaagcgtcagcgtgagcttgagcagcagatggaagcagtgaaacgcggtgaattgccggagcacttacgggtgaatcctgagttaccaaagcagcctgacccgaacgatttcttctctgatgaatcgcttgccaagtatgactttgaccagaatcgcgcactggccgcttttcagcaggccaacagtgactggcagatgaaggccatggacgcacgaagcaatgcggtagcggagcaggggcgcaagactcaggaatacacccaacagtcagcgcagtatgtggaagctgcccgtaaacactatgacgctgcggagaaactcaacatccctgactatcaggataaagaagatgcgtttatgcagttggttccgccgcaggttggcgctgacatcatgcgcctgttccctgagaaatccgcagctgtcatgtattacctgggctcgaacccggagaaagctcgccaacttctggcgatggacgggcagtccgcactcattgagctgacacgcttatctgaacgattaactctcacgccacgcggtaaacagcgttcagacgcaccgcctgctgacgaaccattaagcggtgatgtttcagcggctaatgtcgccggacttcagaagcagatggacaaagcagccagtgacggaaacgtaacgctttaccgccaaatcaaggcgaaattacaaggaattaaataa

SEQ ID NO: 281319 - DNA, 1284 bp, Morganella morganii
atggctttaaacgaaggtcaaatcatcacctatatggtggatgaagtagtaaacactatcgaaaataactgcccgatggctcaacgtgtcagtaagtacacgccgccagcggcagacttacagcggtctcagaatacaatctggatgccggtagagcaggaggcgccaacccagcctggctgggacttaaccaacaaggcgacaggtattgtagaactgtccgttaagtgcaacatgggcgttcctgataacgatttcttcacgcttcgcgctgacgatacccgtgatgaaacatccatccgccgccgcatgaaggcatccggcctgaagctggcaaacaacattgaaacgtctatcgcaaaacaggctgctgaaaccgcatcactgattgtgactgatattgaccacgtggctgttgaaaacaaagcatgggatatgatgtccgatgccgaagcgctgatcttccagcgtgagcttaaccgtagtcaggggctgagttacttctttaacgccgatgactacaaaaaagcggggatgtctctggctggtaaagacatgtacggccgcattcctgaagaagcgtataaatcaggaaccatccagaagcaggttgccggatttaacgatgttcttcgctcccctaaactgccaacactgacagcaggaactgcgaccggcgttaccgttgatggcgctcagaagtttaaacccgaagcttggaaagaggacgttgacggcaaccgtgagaacgttgataaccgcacggcagtagtgaaagtgagtgacggtacagcattcaaacgcggtgacaaaatcagctttgccggtgtgaaattcatctcacaaatggcaaaagacctactcactcaggacgcaacgtttgcggtagttggtgtcgatggcaacaacatcaccatcatgccgaaacctattgctctggatgatgcagcgctaaagccggaagagcgcgcatatgccaacgttaacacctcgctggcagcgggtgcggcaatcagcgtcattaacgtgaagacggccaagactaacatcttctgggctgacgactctattacgctgctgtctcagccaatccctctcaaccacgccctgtttagcggcatgaaaacagaggcattcaacatcccgtcagtcggcctgaatggtgtcgtcgcttatcagggtgatatttctaccctcgaaggtaagtgccgtattgctgtgtggtattcagcatgcaccaagcgcccggaagctgtcggtatcggtctgaccggtcagaaataa

SEQ ID NO: 281320 - DNA, 231 bp, Morganella morganii
gtgtttttaaaaataagccaaaaaaaatgtatcaccgcagaatactggccgattaagtcagtggtgacgattatcactgttgaggacggtaatttcgatagtggtgatgttgtcgcccaggtcaaattcaataatgaaaccatcaatatttacaagcatcagaatgcgtggcttgtaaatgacactggtgtggttcttgaggtgatcaaccgcgattacatttggagctaa

SEQ ID NO: 281321 - DNA, 237 bp, Morganella morganii
atgagcacgatgctttataaagccaatggcaatgtaaaaatctggggcatgaaactgcaaatcatcacggttgaagatgatgagattgaaaattatcttgatgctggatggtatatgcacccggaagacactcaaactatgccagagccagagccagagccagagccagagccagaaaagaaaccgcgcaccccgcgaaaaaaggcggtgaaagatgcagatactaacgaagggtga

SEQ ID NO: 281322 - DNA, 498 bp, Morganella morganii
atgcagatactaacgaagggtgaattagtcgttgcggcgcttcgtaaaatcggcgttgcttctgatgccacactgacagacatcgaaccgcagtctcttgaggatggcgttaatgatcttgaggcaatgatgtttgagtggtacgaggacggtaaaggcattattaccggctataaatttgcaccagacgacactccgattgatcagggtgacgaccacggtatcagcaaagcagccatcagcgccgttatctacaacctcgcattacgaattgcgccagattaccagattgccccgctcgataaggtcatcactaccgcccgttatggcaaagagcgcctgttacgcactgtttcattgcgcaaggccagagaggccagatcgcattacccgaacgggttcccgattggctcaggaaacaggctggcaacgatgaacgggtatcgatacttccaccggagtaaagacaatgccgaagattcaggttccgatatctag

SEQ ID NO: 281323 - DNA, 2301 bp, Morganella morganii
atggctaaaaataaggcaacagatcggatatcggcatgggagcagaaaagatctgagttttctggagaagtaaaaccagcgcaaaatgtgaactcatcttcttcgtgggaagaaaaaagaaagaaatttttaagtggtgagttgcctaatgcgaattcaccacaagaaagcattgctgagtcaaatataacttacgaccctaaatatataacaggtgatttagccagtgatatcaagtatgggctggcagaggcagggaaatcagttgctcagatgggtgttaatgcggcaaatatcatacctggggtaggagactcaattgtcagtgctgcggcatgggctggtgataaaataggtattggtgatggcacttataccccagcaatgcggttttcacttcctgaagatatgaggccagagacaaccggaggaaagatagctgctgaggtaatcccgtatcttatccctgttatggggcaagaaaaagcagcggttgctttaggtactgctgccgatgctggtcgtcttgagcgcggggcttccaaagttgccgatcttgctcaggaaaacattattggtgcacttgctcagaatagccagcgcaatgattctggctcgcttgctgccgaccttggtttggggatgactgcatccggcgcagctcgactggttactccgcttatcggcaaggcatacaacgcagtatctcagaaggtaggcgacatcctcggcagaaaccctcctccgccaggtggtggtggcgctggtgatgttgagactgttctcaggcagacggtggctgaaaagaacccagatcttgccagcacgcttaacggccttgacattaggccacagcctgatgttgtggctgctgctgatagacttggcatgacagatgatctgctgccgtcacatctttcaggaaaccagcagtatcaggcggtagagcagggcattaaatcacgccaaggttcgatactgagagtgcaggaagatcaggcaataatgaagctggcagagaatgccggaagactgattgatgatgtcgcaggtgtgcctgatgcgctgtctcttaatcaaaaagtgattggtcagtttgatagcagagcgtcagcattggaagggaaaagcgaccagctttacaggcgtgttgacaatgcgatgccagctaacgcaagagtatccgcaaacaacacagcggaagcgctggagagtaaagcggatgaattgggtgggtgggaaaacctcgaccctattgagaagaatgtgtttaaggcagtcaacccagggcaggatggtgttctgacgtatgccaatcttaataaacagcgccggttggttgggcaggctctttataaaaatcgcgggccatacaaagacgcagacgagggagcgctcaaatatctgtaccggcaattatcagaagatcagcgcgccgctcttggtgatattggcgcaaggcgtgattttgaaattgcacagaggttggttgaaatgcgcaaaaacatggaaggccagatgttgtctttgcgtggtaaaaatcttacaggggatatcgcaaataaagggtcacttgccgttgcttcattggctaaaggtaactccaaacaatttattgagctaatgaaaaaccttccaaccaggcaaatgaggcaggaggttactggtgtggccataagggatatgctgtctactggcaaacgcggcgctgtatttaatcctggagggtacgccgattggtaccagaatttgaggcactcagggaatataagagtcttggcgcgacatatgccaaaagagtttatgtcaggtcttcatgatacatatgtggttgctaatgccattcgtaacgccaagttgttcgaggtgactacagggaaaatcaatgagtttacaaaacggcttgatgcggtcactgctcaatacgagtttgtagcgaagcatgctgacaaaataggaacaatgattggagcgaaagttgggccgctaggtgcggtagttggcggttcattcggagccaaggtagcagcgaaagccagaaagctcggagggtctgaatcaagtgtcgcagctgaaaagcttatagcatcaccagagttccagcaggctgcaaaaggattgtccacaccggcaccacgcggcaggtcacgcatcggacagatgtttgatgaggcaaagttaagaacatctcaggcatggcgtgagttttatgatgtgctgccaataaaggataagcgcattatcgccagaatggggtttttgtggtggctgatgcaggaagaccaggaagaagggcaatag

SEQ ID NO: 281324 - DNA, 687 bp, Morganella morganii
gtgaaaaacttgtcatctttactaaaaagaatagcctttgttatctttctggctatttctggattctttttctctctaggtgagccgggtggcattgctattggcttgcttttctttggtttgcttttgtgggtttcagaaaaaatatactccgaatacaaaaacaggaaagggctgtcagcaactcaggagggagatgttcagcatgagagcaaatccatagaacaaaaaagggctgaatacacaaggtctgctgagatttttatctttgccttatctaacaaaattaccaatcaaatagctatagagaaacgaatacttccataccaaatggaagatgatgataaatacaaattatgccaatacttctttggggctattgattatgtcaagcacctttttggcaaggaagtaaatatagacgaaaatttatacatatcgcacaccagagtatcatgtatttgttatggacgcataaataacgaatttatacaaaacaatgcaagattatcacttgatgatgactctagtgatgcataccttgagttttattccgctggtattaatgatatgaaaagattaataagtgatatattgggggatgggaaatctatagatgaaattgatagctttctaattgattttgaagctaccttcatgccattgtataggttatcaaataactaa

SEQ ID NO: 281325 - DNA, 342 bp, Morganella morganii
atgatggttcctctttttgagtctggatgcattgtgttctgtgactcactggagaagtgggtagacctgcataacagactcggcgtttatgccggagatggtgaggcaaatggcatgagccatacggtaagcaacgatgggcatgtaattcatatcatcggtctgtttaatggtaaatcatcaacgctggcgcatgagtgctctcatatggcattcgatatttgtcaccgtgtcggcgtgaatgttgaggcgggggcggcaaatgaaacattttgtcatctggtgagccgcatggtggatttttgcagtgagcatctaaaaagccgggcggtaccggcttaa

SEQ ID NO: 281326 - DNA, 180 bp, Morganella morganii
atgagtaagaagccaggcgaaaacacagggaaagatggcggcatttaccgcgaagttggccctcgtggtggtgcacgtgataattatgccaccgtgagagacaacgagagattgccaccgaccactgaaaaaggtaactcttgggttctggataaaagaacgcctgatagtaagcgttaa

SEQ ID NO: 281327 - DNA, 255 bp, Morganella morganii
atggcacgtgacgatacgcagttcaatctcaggcttactgccgagacaaaagagaagctgaagcaaagagcgaagatgaacgggcgctcactgaatgctgagctggttcacattattgacaattatcttgctaccccatcacaaattatcggataccgtaatgaggccgaacggatggcagatcaccatgccgagatgttcaaaaagacagtgttcgataccttggtaaaattgtacggcaacaaagataagtaa

SEQ ID NO: 281328 - DNA, 489 bp, Morganella morganii
atgattactcataaagaattaacctcttcactcaactacaacccagaaacaggcatcttcacttggaagatagcttctggtagcgccagtatcggaaaggttgctggatttaagacgaactcacaggccgactacttatcaatacggattaatggaaaatcgtatctttgccaccgacttgcttggttttatatgaaaggatgctggcctaaagggttaattgaccatattaatggggttaaaaatgacaatagaatttcaaacctcagagaagtaaccagaggtcagaataaaaccaacagcgtttcatcatccaatacaggtataaaaggagttcatcttcttaaagggaaaaacacatataaagttatgttcaagctaaaaggtaagtctatttgccttgggtataccgatgatattgagctggccgaattgatgtctattgcattcagggaaaaatatcatggcgagtttgcttgttttagataa

SEQ ID NO: 281329 - DNA, 285 bp, Morganella morganii
atgctccgtattgaagttattttcagcagcaaccaaaaagagatgataccaccaggcacatttgaggcgttggaaaaggaaattgaccgaaagctacgggctcagtatccggatatgaacattcgtattgcgtggggaaccaatgcggcgatgtcagtagccagcgggaaaaatgataaggacaataaaaaaataaaagagatactgcaggagatttttgaggacagcagctgggtaccggaaacggcagacgcttcctatgatgcagaatattttgataaataa

SEQ ID NO: 281330 - DNA, 282 bp, Morganella morganii
atgacgaatacaaaaaacagcgtggacatcaacataggttgtaaaattaaagacgcgcgaatatctgccggaatgtccgggaatgaccttgccataaagattggtgtctcacagcaacaggtatcgcgttatgaatccgggcaaacgccaatgaccataaacacggttataatgattgctcatgtgcttaatgtctctgtaaatgaattactgagtgattacctttcctcagagtacagtgacatcatgcttttaatgagcaatcgtaatacagaaaaatag

SEQ ID NO: 281331 - DNA, 573 bp, Morganella morganii
atggctaaattaacagtcattaataacgcattgtccgcagaggggcagccaacaatgaccagtctggaaatggtcgactacatcaatgctgatcgtaaggcgaaagctgaattaacaggtggaaagtttccatcaaaagagcattcgaaattacagcacaaacatttcttaaagaaagtacccaaagttttgggtgaaattcaatcagccaaattttcgtccggttacaccgacagtaaggggcgatcatacccatgctacaagtttccgaagcgcgaagcctgcctgatggcaatgagttacagctatgaattacaggccatggtgtttgatcatatgactgaactggaggcggaatccggcttcgggttcactattcagcagctgcagcacatgcttgcggttgcaagaaaagcctccgatgaagactcgtcggatgccgggcggagactgaaaaaaagacagactgatctggtgcttctgaaacgtgcagaaagattgataggtgatttcagtcagatgacactcagcctgattggtggcggtaataacgcaattactcacaaacgatga

SEQ ID NO: 281332 - DNA, 291 bp, Morganella morganii
atgaaaaaattaatactggctttgttactattaccctttttagctcaagccgaaaaatcagataaggactggataatcgaaagaattaatgacatatgcgctgagcattccgatccaagtttttgtcgttggcaggtggaaaatatagcagctatttcaggtatagtttctctgaaatattctagttgttcgcgtcagaataataataatgatgaatgcaaatcatttgttgaagcatttgattatatacaaaaaaaataccaagaaaatatgagtgatactaaatattaa

SEQ ID NO: 281333 - DNA, 399 bp, Morganella morganii
atgagaacgcattcagctatccgcagagcggtcattaatgcgctgtctgatcatgtcggtgacattgtcgtgcatgatggtcgtcctgtttttctggaagaggatgagttacctgtggttgcggtgtatctcactgatgcagcgccgacatccggggtgttggatgatgatcagtggcaggccgttctgcatattgaagttttcctgaaagcgagtaatccggactcaaaactggacgaatggatggaagataaaatttatcccgccatgcagtccgtaccggcactggccggacttatcgaaacaatgtcagcggcaggctacgactatcagcgcgatgatgaaatgtgcctgtggggctcagccgatctgacatatcacctgacgtattcaatgtaa

SEQ ID NO: 281334 - DNA, 564 bp, Morganella morganii
atggacggtctggaacaggcaattgcaaatatgagatcactgagctcatgggcggtgccgatagcatccgtccaggcagttaaccgcgtggctgtacgggctgtaagccgcagcgtgaaacgtgtttccggtgaaacgcagctcaggcaaaagcttatccgtcagcgggtaagactccggcgcgccaatactgagcagtcaaccccccgggcacggctgctggttaaccggggtaatttacccgcaatagcaatcggtcctgcgaaagtgcagctgtcacgaaagcggcgggataaaaacggccgcggcagcgtgctgaaaatcgggcgttttaagtttgaaaatgcgtttattcagcaactggcaaacggccggtggcatgttatgcagcgcaccagtaactcacgttatccgattgatgtggtgaaaatccccctggttactccgctgacaaaagcattcaccgcagaaaccgagtctattcttcagacggatatgccgaaagagatgatgtatgcactgaaaaaccagctccggctgtatatcaaaggaaggttctcatga

SEQ ID NO: 281335 - DNA, 276 bp, Morganella morganii
atgagcgaccaaatgattaataaacttattggtgatatcaataaattaaacaaggccattgaaattattaacaataatgaaaaaattcatgcgatccgactggaaatgctgggtactatattttctgcattaatcgcagccggacaaataaacaaagaaatagcagagcaggcaatttccatttacagcactagtgatagtcagttttctgatgattttatacagcaacaaaaagaagccatgattaatttgttaagtgctataaaggttcgttga

SEQ ID NO: 281336 - DNA, 318 bp, Morganella morganii
atgatcaacatgaaagataaatttatgtgcatatctatccgtcaggatggttatgaaatgttatctaatggcgggtgggcgagctatgacaaagatgggaaaatcacaggtagctgcggcgatgtggattcatttccggcaaccttaaacgtctctgtcgccggaaagaaagaatgtgatactgataaaacactggaacggcgtgttgcagatctggaaaaacagcttgctgatatgggaaaaccaacaaactgtttgtttacagtcccggtgagaggggtgtttgttaattcggttgttctcaacgaacctttatag

SEQ ID NO: 281337 - DNA, 930 bp, Morganella morganii
atgtattctcagaataaattttctatcaggtttcttcacccaaggtacattttaacctttattggtatcctattacttttctgtttggttcaaatgccttattcatggcttgtgtttttaggcgataagttaggtcgtttttctggtttattcctgaaaagacgggtatccataattaaaaaaaatttagaattatgttttcctgataaagataatgcacagatagagagtatagtcgcaagtaatctatcgtctttggggattgcattatttgaaacaggtattgcctggttctggagtgacaaaagaattaaggcaatatttgaagtatcaggcagtgataactttactggtgtatatgacaaaatggatggcgttttaattattggtatacattccatgtcgttggagcttggtggcagagtcatgagcctatgttttcctgtaaatgctatgtatcgtcctcacaacaatatagcgatggagtacatacaaactaaatgtcgtagtcgttccggaagtgggatgatcgaccgtaaaaatttgaggtttatggtatcagagctaaagcgcgggcaggctatttggtttgccccggatcaggactttggaactaaaggcactatctttgccccgtttttttcggtagcgaatgcttcgacatcaaaaggagtagcaactatagctaaattatcgaagtcgccgataattactgtaacgatgataagaaataataaaagtgacaagagaccttacgaattaataattggtaaagaaatcactgagtttccaagaggtgatgacttggcagatgctaagaaactaaatcagattattgaggtggaaatcatgaatgctccggaacagtacttgtgggcgcacaggagatttaaaacaagaccaccaggtgaagactcgttttacaaataa

SEQ ID NO: 281338 - DNA, 786 bp, Morganella morganii
atgagcatgaaattagaatcagcactgaagcagtttcacccaaaatcccctatgttcagtgattcgtcacactcgacatcccccgatcggcttaaagggatggatgctgcagcggcactcggcatgacacaacaaaacgctcgtttcggcatgcatgcgttctttgcgaagaatgatgtcagcacagacgataaattcaaaaccgttgaagagctgactcagtatgcaatgaaagtggcacctaaactgatagttaaagcatctggcaaccggttggcacagtgcatgaaaattctgtccgcaatggcgtttgaggattacgcccgttcagcgggttcggtctgccggtgtcaggactgcggcggaaaagggctgatttatcgccggaaagaggtggtgaagcatccgggtatcaccaatatggaaggcactgtgattgttgagccgatagtccgtactgagcgtgttggtgaattgtgcacgacctgcaacgggaaagggcagttaacccaccggtgccgctgcaaaggccgggggaaggtgttcgacgaagagcagagcgaattacagggtgcgccggtattcaaagattgcccgaaatgctcagggcgcgggtataagcgtgtgccatcgtcagtggcttatcaggcgataaaacacctggtaccggagttaacacagccaacctggtcacgaaactggaagccattttatgagagcctggcaggaaagtgctacacagaggagagcgcggctgaggcatttttcggtaaaatcacacggtaa

SEQ ID NO: 281339 - DNA, 1251 bp, Morganella morganii
atgaataatttattaaaaaatatattctcaggcaatatagatataataaaaaacattacttctcttttattagagaaactattaacaatagtactgattttttacacagaaggattaattagccattatcttggcgtggaactatatggaaaatggatatactccatcaacattataataatattatcatccattgctttaatagctagttctgaagttataattccagccctatcaaggcattttaagcttcgctgggaaataatatctgccgcatttataattagaatggctttcgccttcataacttatatcatatcaaatatatacttttattttttcatccctgaccaagaaataaaagatatgttgatggctatctccataatgttattatttacagagccctttggagtagtaacaaattattatcaatcgcgaatcagaataggaatcatctcttgcgccagattactatcccttgtagttagagccggatttatctctataatatttttagtcccttcatatatatttatttattactcaagagctattgaggcaatttttttagccttattccttttcactataataaatcactctggctttgagttcaagatatcaaagaatgtatttagagttattataataagaggactaaaaatgtggctccctcttattcttatgctcatttatatgagagcagaccgattttttgttgaacattaccttggatttgatgatttagcactatatggtgtagcagttcaaataattgaacaggccattctcgtgctcggcatgataatacaatctatcgcgcctaaattcttgttcaaaaagaacactccccctatatacaaaataataattggtttgattttaatatccatattattacaattatgtgccataatactactagaaccatttattacttttatatttggaccttattactataagtctatacaaatgactatcagtttacttcctgcattaaatttttttgttgtagatagtatattaatgcaattaatttacagggatttacagtacaatctaattatattcaagtggttaattatgctcatagtcagtttttcaggctattacatatggtttggaataatggacaacactaacgtagcacccgtatttgttcttaattatgcaataatgatgacactcacctatttaattagaaagattaaaacaaagaaatcaaaaccttgttgtattgcttaa

SEQ ID NO: 281340 - DNA, 810 bp, Morganella morganii
atgaatataaaattcactatatttacaccaacatacaatagggaaaattacctattgagatgctataaaagtatagtatctcaaagcgtatcatcgttagaatggatagttatagatgatggctcaactgataacacaaaaaacttgatatcacaacttatagaagaaaaaaaaattaaaatacgctatatatatcaagagaatgcaggaaaacaagctgcatggaatagagctataaatgaatcaaatggaacttactttatttgcttggattctgatgatgccttagtaaataactcattatcactgatagaaaaaaaattatatttactagaaacaaatgatactattataggatttagatgtcttgcaattagtcaaaaaaaacaaaaaccggacagctcatttactcctcaaaaaagtgatacctgttcttggtttgatgaattctccagccgtatatttggagaaagaattgatgttctaaaaacccgtataattaaagattttttatatccagtgaaggataatataaaattcattcctgaaatttggttttatgttatgacagctaagtgtggatatacattcatttatcttaatgaaccagttcgtattttttatgataaccatgaacacctacgcctaagtaaaagtaatctcaaaaaaaatgctcatgggcattatatagcaagaaaagctatgctgaaatatatcccagcatccgtattttttaaaaaccccatagcactcattaagacaagtatacgatactttcagagtatatatttcatgtacaatagaaaataa

SEQ ID NO: 281341 - DNA, 210 bp, Morganella morganii
atgtttaaagtcggagtgcttaggggcagcattaaatcccccgtagtcagaaatgccgcaagattcaagatatgggaacgattagatagcggtgagtcacttgaaagtattaaagaaaatccgccgcagatgacaaatgggacagtgacgaaagcgagcaatattgatattgaacattcacaatgggtcacatggtctcgacagaagtaa

SEQ ID NO: 281342 - DNA, 282 bp, Morganella morganii
atgcgcacataccgaaaaacaaagcccatcacagccacagtaaccggcactgtcactaaaccacctcagcgggttaagacggccaccggtaaggtaatggcaacaatgaccattcatgcagaaagtgaacaccgcagcccctatccgctgaagctggtggcatttgatatgaacgcactggaactgatgacctgccagaaaggaagccgggttattgccactggtcggtatgagtggttcaatggatatcagcttactgggacgcagatacttaataactaa

SEQ ID NO: 281343 - DNA, 438 bp, Morganella morganii
atgagcaattctaaccttgtcgcctttcgtctccccgcagaactccagaccatgtttaatgacgctgtaacggcttctggcagcgataaaacatcatggatagtctcagccattaaagagaagctgaaccgtccagaggggaatactgatgcccgtatgctgacgctggtggaaagactggaatccgccgccgcttccctgattgcaggtaaagccgatattccgcctcatgcctacaatgaaccggtaatcgtcgctgtggtgaatcaggtgctgtctgagggggtggataacgggcgtgtcattgctgaacggattaacgaggctggctatcagactaaagcaggtaaagcgtgggacaaggatatctattcagcgtggaagcggcacaagaatattgccgggaaattggtggcaaatacaggaaaaagtgaatag

SEQ ID NO: 281344 - DNA, 918 bp, Morganella morganii
atgagcttcgatggcttatcgcatgaacaagcagtaaaaaaaatcacaaatattggttattaccgactctctggatactggtatccattcagaaaacttaaaataatcccaccagaatcgcctcttgaagcaagacgagaagaaaacttcaatgaaggaacgacatttgccagagtatatgaaagttacttatttgacgtaaaactaagaactattattttttatggtattgagcgtattgaaacctttattaaagctaaactagcttatgaattaggtaaattatcccctaccatttatcaaagtaaagatattatccaacaccaacattcccggaatcatgatgtttggttagataaactggatacactcatagaccgaaataaggataaggactgtattcgttggaacttagaaaaatatggcgaaattcctatatgggcaattgttgatatttgggattttggtacgatgtctaagttatatggtatgctggatgataagtataagcatcagatttgtaagtctttagggtttgacaaacccaattcgtccggggttaagctgggattaaaaacggcacttgagcatttgaatatcgttaggaacagatgtgcacaccactcaagactctggaatactgatttttcagattcgaaaatcactatcgatattctcgataatatcgaccacagcgcaacacagctaactgataaaagtcctgagttatcacgtatggctgggatcatatacttaatatggagcttaacgaaacgtataagctgtaattcgttatggttaaaaactatgagtgaccatataaaagctcacacagatatcgtgtctttcaatgctatgggattcgataataataatattactggtttaatatcattacttgaaaaagagtcagaataa

SEQ ID NO: 281345 - DNA, 447 bp, Morganella morganii
atgaggggcactgttggtattaatcatacccgatatctttatgttgtccaggtcagtaaggatcatacatttgtaaatatttgttttgttttgaacgaaaacacaagatatatagctgtaactgtagatttctcccgtacatgttgtgctttagcaatttgtgcggcttacacaaatttcggtgcccgcgttttcttggtacctcaacatttctatacatccatcagcgcgcaatccggtactgattttattactaacccctgtcatgtctggctttggaaggggtcgcactgcgcagttttcgggtttcgttttgcgcagttcagcgcgcacaataccgatacattccgatacatgcgaaccggaaacatttatagattttttaagggcgcggcggggatctgcggaggtatttaccttatcaaaccttatcacccgaaacgttag

SEQ ID NO: 281346 - DNA, 126 bp, Morganella morganii
atgtctatatttgtcgctattcagcccgctttcacgggcttcctgacgcgtccgaaaatcatcaaagctgtcaacctcgcgcgcgtgcgcgtactggtgtctaaatcatcaaagttcacgctctaa

SEQ ID NO: 281347 - DNA, 192 bp, Morganella morganii
atgcagaaaagcacaaagaaacagacaaaccgttactttaacggtacaccgacaacacgcctgatagtcacctgtgagcagtctgtcattgacgcggtagatagtcacattaagcgcggcaggtatacacggggcaatcgtgcggagttcgtcagacaggcaatcattgagaagttagagcgtgaactttga

SEQ ID NO: 281348 - DNA, 357 bp, Morganella morganii
ttgaaattaaaatttattgcgctcgttttatcagtattgccactggcggccaccgctagtgttatgacgatgacttgtggtaccgatttcattcagctatttgaagaaaatgactatattaatgaagtcagagtaaatgatgcccctaccaatattgtaattatcagccataaagttaacaaaaatggcaatgtagattcatatcttttttatggatttaaagggaatagaaaagtatctcaactccaccattcaggggataccggaataacaacacatcggtattttttatttagtcaggacggctcaccggaacgtcccggcaaaccgatatcttcccctgtcgtttgtaaataa

SEQ ID NO: 281349 - DNA, 2403 bp, Morganella morganii
atggcaacaataattgatgcgctgatcgtatcgctcaggcttgataatagtggtttcagcaatgaagccaaaaaatcgacggcagagaataataaattatcggcatctgttgaaaatgtcactaatgcgtccgccgatttaaccatcacgataaaaaacctcggcaacgaaaccaaaaaggcgacgaagaagcaggatgatttcacgaagtctgttaacgaaggagtgaaagctgtcggtgcgcttttctcggctattctggtttcttcggggctggcgaaactcatctctgaagttaaccgggcaaatgaccagctttatttcctgagtaaaaacctcggcatgagcgccactgaaattaaaaagtggcagaacatggcggagatgtccggcggatctgcggatggtatggcggcgagcatgtcaaatctcagcaaatcgctgtgggacttggtcactatcggggattcctcggtgctgccgtacttcaatgcgctgaatgtcggcgtggtggattctggcggcaagctgcgcgacctggacgctatactgctggatgttgccgacagcctttccggtatgtccagaccgcaggcgtacaacattgcgaaaaacatgggctttgatgagggaacgatcaacaccctgctgcaaggccgtaacgcaatgcaggaaatgctggacacgcagcgcggcctggttatctccggcgaggaagaactggaaatcagccgtcagctcaacaaacagaatgcgaaggttcggcaaggctgggaggggcttaaaaccctgctggcaaactacctgatgccgacactgctgaaattctctgaggtgatcaccggtgtgctgatgttcctgaacaagaacagggacacggctgtaatggtgtttaagggcatcgggattgtgctgggtgtcttgcttatcccgatggtgataaaagctgctacggcgtttttaggcatgttcgcggctatcggattggttcctcttgcgctgcttgctctcggtgccggtctctggctgctatatgacgacttcaaaaaatggaagagcggcggcgagtcattactgggtgagtattggaagaagtgggataaaactattacgcctatccttaaaaaactggatgagtttgaggcatggtttaaaacaactactatcggcaagtggtttaccgaccaggaaggaaatctcaataaactggaggcggcgtttgctgcgtttgccgcatacatcgctaccaagtgggcggcgaaaatgctgggcgcattcgggcgggtatcaaggggcgcaaccaaagtcggcaaaggattaggtaaaggatttattggtaaagctggtggagtggcggcagcgacatacgtagcctcggatttggttgattatgcgctgaatgaagctttcggtgagtttgactggtttcagcggtttagaacagccccaacgtggggatatgcaggtaaagccattattggtgaaggggatgcccgctgggtggatggtgtttgggttgataaccggggaaaacaaaacggggcgcgcttaactgaaaacacactggatatacctacaggtgatcctgaaagagatacacttgctgccaaagtgtcaaaaggtgaattaagcctggacgaggctaatgatatcctgatgaatggttatgatatttcatctgataccgatggtgaggacggcagcgttgccagaaatcataccgagagaggtttgcgctataacagtccgctaaaccttgcttatgctaatcagcagggcgcagataatatcggtggctgggctaaatttgatacggaatacaacggaatacgagccagtgcaaaccagttgaagatgtattatgaaggaacatcacgcgccgccggttatcagaaactgcaaacagtgtgggatattattcacaaatgggcacccaaaggacacggtaaaaatgatccggtcgcatactcaaatacagtggcttcagggatgggggttggcgttcacgataaaattaacctgaatgacccgtcggtgatgtatgacctgatgaaagaaatgtccaaaatggaaaataaggggaaattcccgtattccaaagggctggttatgtctgccattaatggcaccggtgatccggctgtaaatctggcaaataaaatcaatagttttaatgactttatttccaatcccattgcgccgaacgcagccgcaggaacccggcaaattatggctaattcacagatgcttcagtcggggaacaaaaccgttaataaccgtgttgaggctaatttcggagatattaatatcaacacctcatcagcgacagtcagcggtaacgtggcagatgcgaccacatccgcccgcgaaaacatgttccagctgatcacaccaatgagttaa

SEQ ID NO: 281350 - DNA, 213 bp, Morganella morganii
atgagcaacaataaacgggacatgcatcctattcttatcgaactggactcaatcgaacgggttaagcagatacaaaaagccgcacagtccaccagccttatcagcctgaatatcacaacatccgaatacattcgcgggttactgaataaggcgattgaacaggcagagaaatcactgaatatcatgaaggaggaaagcgtatggcaacaataa

SEQ ID NO: 281351 - DNA, 462 bp, Morganella morganii
gtgagcagagaaattctcaccccaaagaaaagtaacaaaacgataacagttcaggccgataccagcacaccaaaaatcgcaccggataaaacgcagcaggaagccacacagcagccgcagaagaaaaacaaggcagaggcacatgcgaagaagcggaaacgccgcacagaccggatagcgcagcactggcctgtattcaccctgcagggagccagaccactggcaataggtatcagggaacagatgattgccgatgctgaggcgcgggggctggatattaccgtttcacacatcaaacaggggctgtacgactacattaaccgcagggtgtatctgaaagcccttactctgggcggcagtcgctttgatatgaccggacagccaaacggtgaggtaacaccggagcagcggcaggacgcacagcggaagctggataagtggcagagggttgataaaaagtaa

SEQ ID NO: 281352 - DNA, 2691 bp, Morganella morganii
atgaaatccattgatgttatccgtgaggtgaaactgaaagccaacgggcaatggcagggcattctgtcagccgtgggcgcggatgtgccggtaaatcatcacacggcgtgccccgcgtgcggcggtaaagatcggttccgttttgatgataaggacggtaacggcacgtttatctgtaacaagtgcggcgccggtgacgggttagacctcgttcagcgtgtgctgggcatgggtgtgacggaggccgcgaaagaagttgccgggattatcggtattgatacccgttcagaccatcagcccgccagagaacggactccggtcagtgcgcagcagcagaaagaagccggtgacgcagcagagaaacaaaaacgcttcacagtgcgttacaacaggctgttaccgcaggttcagcagggagaatccgtttatctggcaggtaaagggctgaccggcttcacgctgccgttactgcctgacgggtcaatcctgatcccgctggtgaacgcgaccggcaccgtcaccggcgcacagaccattaaaccggacggcgggaaacgcctgttaacggacagcacgaagaaaggcagttattaccccgtcaatacgcctgagaacgtttctgaggtgattattgctgaggggttggcaaccgccctgacgtgtcacttaatccgccctgatgcgctgaccgtggcggcaatagatgccgggaacctgatccacgttgcgaagcactttcgagaccagtacgcgcgcgcgaccctcattattgctgccgataatgacgcagataacacggttaacaccggcagagagaaagcagaagcggcagcacgggctgtaaatggtcaggtaacgatcccaaccaccagcggggactggaacgatgtgtatcaggctgaggggctggatgccgcagcacaggcatttaatcagggaatgtatcagccggaaagcagcgacagcggacaggcaccggaaccggcagagaaacccgccgcagccgaccagatgaagccccggattgaaacccgtgataacggtgtctttcaggtgatcccgaagctggataaagaaaccggggaaatcattaataacgagcagtggctcagtgacccgctgacggtggtggctgcgggtgttaacgatgtgaatgagtcattcctgataatggactgcggcagcggcaccacaaaagcgatcccgatggcggatatcggtgagcgtgagggctggcggacactgaaagccagcggtgtgattgtcaccaccaaaccggcgttacgggcaacactggcagactggctgatgcgcagccgggggcgggatgtgtggagcgtgacccataaatccggctggcacaaaggcgcgtatatcatgccggacggctccgttatcggtgagccggataagcctgtgctgtttaacgggcagagtgcggccgcaactgcctatcaggtcagcggaacagcggaaagctggcggaatgaggtggcacggctggctgacggcaatatcttcatgatgtttgccatcggcgcagcactggcagcacccatgaccgggatcacaatggccgacagcttcggtattcacctttatgcccagtccaccgccggtaagagcaccacggcggatatggcggtcagtctgtacgggcatccggatttacagcggctgacgtggtacggcaccgcttacggtatcactaatgaggctgtggcgcacaatgacgggcttttatatctggatgaagtcggacagggcgcagatccgaaacacgtctataaatcggcgtacacgctgtttaacggcaagggaaagattcagggagccagagacggcggcaaccgtccgctggagagctggcggactgtggcaatcagtaccggtgaaaaagatatcgaaacattcctgctcagttccggcgtgaagattaatgccgggcagttagtccggctgcttaatatcccggttcagcgggcaacggagcttcacggctgcgaaacaggtaaacaccatgccgacactatcaaagtgaactgccgttctcactacggctcagcgggacgcgggtggatcaactggctttccgcgcacaaagaggatgcaaaaaccgcttaccgtgacgcacaaaagcggtggagcaaactgatcccggataactacggggagcaggttcaccgggcaagtgaccgttttgctgcggttgaggcagcgttactgaccggacgggtgatcaccggctggcgtgagcaggactgccgggatgcggttcaggcggtattcaatgtctggctggcagagttcggcaccggcaacaaagaaattgagcagataatcggacaggcggaggcattcctcaacgcacacggactgagccggttcgcaccactgccgtatgactgccgggacatgccaatccgggatctggccgggtacagaaagaaaggggatcacgacaatgacccgattgttttctacacctttccggcggcatttgagaaggaaatctctctgggcgtgaattacaaacaatttgccgaagtgctgaaaacagccggaatgctgataccgccgtccagtggcaggggctatcagcggaaaagcccgagaatagacgggcggcagattaacgtctatgtgctgcggtttatgccggaaacctcagacccggaggatgaaagttaa

SEQ ID NO: 281353 - DNA, 360 bp, Morganella morganii
atggcactaatcacaaaaaatttccgtgtgaatgcgctggccaatctgtttgccggggcggtttatcacgatatcaccacacgcaacagcggcgaatggttccggatgaatatcggcagcaaatccattgaagtagcgataaccgacggcgtgaaaggcatccggatgctggtggacagctatctgctggaagccctgcaacaacaatcacggacgtgggaaccggcagcggtacaggtactggaacaatgtaccgcgaacggctttatcaccgggttcgggcgtgagatatggcagagcatgattaacgatatgggcgacacactggcggacaacggaggtattaatgaaatccattga

SEQ ID NO: 281354 - DNA, 543 bp, Morganella morganii
atgagcgaataccgcaccgaagtcaccggttctgccgtggctgtgatgaaacgcaacgctgccggtaaatatcagcatatcgccctgataccgctggccgatattcccgcccgtgcggatgccggagagtgggacagtaacatgctgctggggctgcgtctgattgcgacttatttagaccacacacagggtgacaaagagaaagaattactttctttccgctggatggttgccgtgctgtatatccgtgaaaccaccgcaaagaacgggatgccgtactaccgcaatcacggggtcatgctgccgctcctgccggactgcgaacggatagcaatggtaaatcacatcgagggcgcaatgaccgaacgccacggttcagacaacgcggagcacatcgtcagcctgtacacctcaatgattgatggcagcggcacgttacgcctgtctgagtggggtactgacatcatggacgctatgcacgaagcactgacactggatgtggcaagcggcgtactggagcagccggaactgcggacacactga

SEQ ID NO: 281355 - DNA, 198 bp, Morganella morganii
atgaatccggaacaaaaacgcctgactgaacgattgctggaagtcccgcagatgagagcaggacagatgatcactctgcttactatctggctggaggctgagacggacaatgacacctcaaacatgattgttaccgccctgacggtggcgcgggaaattgaacagtctctgtctgaagctgcggagggcaaagtatga

SEQ ID NO: 281356 - DNA, 210 bp, Morganella morganii
atgaaaaccatcaaattatcggaaggtgacatggttcggtttcagtctgctttacatatcagtgaggaaattatcgcactgctgcttccggtgctgaccgctgtagaaaatgaggctgaacccgatacacacctgatggtcagggcaatcaaacgcattgcggctgaacagtatgaaaaactgagagtactggcggaggtgatgaaatga

SEQ ID NO: 281357 - DNA, 192 bp, Morganella morganii
atgagccagtcagtcattccgttggatgttgccgcctataaagcgcggcaggtcacatcactgtattccgtcattctggagcaggcattaaaagaatgctcaccggatttgttcgacctgataagtattgccagtgacatacattgcgatatctgccagtccctgagtcaggaaacgggagacaacaaatga

SEQ ID NO: 281358 - DNA, 198 bp, Morganella morganii
atgagcgcaaatatcaccttgcagcaggccgctgagcaggctcaccagttagaaattatcagcctgatgattgagtcctacccgcacaaattcacagatactgacattacggcgcttgcgtcactgatggtgaaattatccggaggcgtttcaggtttcctcagtgaaaaatccgcagcacgggagggcaaatcatga

SEQ ID NO: 281359 - DNA, 1047 bp, Morganella morganii
atggccttcacctcagcagtgtttggttccccaattccggggaatcaaaacacgggtatcaatcagattgccagccaggggaaaggctctttcctggacggcggtgtgccggttaaactggacagcctcacgaatactgtaacttcaacttacggtattaccggcaatcaatcggacaaacgttcgtccggccactcagccaatattttggctcagtcatcggctaaagtttcagccggtcaatcagagaaattttacgccggtctcaaatatgaaactccgacctatccggatatcccgaatcatggggagattacaccatttaaaggttttatcggggtcactacgcggggaggaattgagttttgtcagcccataaatgatagacgtgtagagttttgcgagtccataaaaaagggcagcgtttccaccaccctttgcgtgttcgatattaaatatcgagcaaatcagccattacagattagtcagtggctgaatgtctgcatatcggatatttcctgggaagctgaaaactttgatgataatcacttgtttttatcgtcagatgttcgttatagtgatcgggcaccggcaaaatccggtgtcaggatttgcaccctgaatatacaaacggcgacacatgacgcgccctgcgtctttttttgtgtccatgcccacgcacatctgaaaaatgcggtattatgccgtcctgattcaatggtggcgttggcagggcaaccgaaaggttggctggtttccgtttgtgccagtagtgcaaaccctgtcagcgtcaccacccctatagagatttgcacctctggtggtgactccgcgttaatacaaacggagatcatcgttatgatggctatccctgcccaaactcaattcaaattcctgtttctggcggtaaaacgcgcagacagcacagatattccgcaccgcatcgaagccacagcaccaaacgagcacagtgcccgcatgctgctggtacgcgattacatcctctcttttgccggacgtttaccggttcgtgaggtggccgcatga

SEQ ID NO: 281360 - DNA, 594 bp, Morganella morganii
atggaaaatttaaaaagtggctttaatgccacgagccaaactcactctaaatttgagtcagacgatattttgaatatcaactcagatgatatttcatttatccggtttgaaggtgtgcaggtacgggttgttaaaattaataatgagccgtggtttattgcgaaagatatttgcatggcgctagaaatggcagatcacttggtcgcactgcgccgcttggatgatgatgaaaagggggagtgtttaatacctacccttggcggcaaccaagtgatgcgctctgtatgcgaatccggcttctacaaactgattgcccgcagccgcaaagcaaccacgaaaggtacttttgcacatcggttcactaactgggtattccgggacgttatcccatctatccgcaagaccggcgcgtatggtgtgccattcggtgaactgaatgacctgacaaaacgtcagcagcagtacaaattaacctcatcacagcgtgggcgtgacctgcaatcatgcaagactgaaaaagccagcttacagcgtgaggaagtcgaactgtggcggaaatatcagcctgattttctcgatgaggaggtccactga

SEQ ID NO: 281361 - DNA, 405 bp, Morganella morganii
atgatgaaaaaaaaccgcccttgtggtggcggcttaaatctttcagatattgaaaattgccccgccattataactaaacgcacaccgaaaaaacagcgcggatatatttttatcgctggttctggtgttaatggtgtaaccgaaaatgacggactgaaatattgccgcttatcctcattccgcaactactgctctgaattagagcgcaaactgaatatcactctggagcgcatcgacgagccgaaccctgacggcattggtacgcactatcgctaccgcattcgcaaccagcaggacgcacaaaaggttattaaccacatcaacagccgcgcacatcatggcggctatgaggggctgtcaaagccacgcgctgaattaattttaagcctgtacccgaccgaataa

SEQ ID NO: 281362 - DNA, 237 bp, Morganella morganii
atgaagcaacaacgcaaacaacgcgctaaaatcaataccccataccctacttgcggcaatgcccgcaaacgccacactgccgattttttaggcatctcagacgcgacactcaaccgttgggaaaaagccggtaaaatcccgaaatctttcgagctggagaaaggcttatctgtctttgacgctgcggagatccgttcgtgggtggatgcgaagaaagcacagcgcgagggggtttaa

SEQ ID NO: 281363 - DNA, 657 bp, Morganella morganii
atgagtgggaagaaaagcatcttaaaggctgatatgttcgagaggttcttaatgcaaaattcatcgactatcaacgaagtatcgctggttatctttggattatcgccattcaccacagctaaaaatataccagaggatttaaaaccattcgtcactgaaaccagaatatatatgcgccgtagtctcaatacattgtctgatatttatggattacactttcagccaacaacggagtgttacatgcggttaatactcgccgtggctcatagatacataaacgaaaaaacgcccgacgtaattagtgaaagcataatcgagatggtgaaaactttcatttatattaataagtgggaggaacatatacgcgctattggcggtgaagaacttttgcgctcagttagcgatatccgaaaaacaggcaggggcgagcataaaaaaagtgaagaaatggaagggacaaataaaatgatgggactgctggttaaattacttgcatcaaaatcagatcggtatggtacacaggaaaatcctaaagtatctgaaatatataatgacgttttaaaaattgtcagttctgaggatttgaccaccagaggaatatccaggccaaccttttacaagaaaataaaactcgccttagaatccattcatgactga

SEQ ID NO: 281364 - DNA, 1269 bp, Morganella morganii
atgcctaaactcacagataaagagatccgggcgtggataaagtcaggcgagcggttcgagggcaaatcggacggtaacgggctgtatttacgtttcagacaaaatgaccgcatcccttcatggcggttcaggtataaactcgccgggaagtcccggacaatgaatcttgggtcatactccgatctctcactcgctaaagcccgggaactgaccaaggagttatctgcccgcgtatcgctgggctatgacgttgccggtgaaaagcaagaacgaaaggccgaagcactggcgaaaatcgaggccgagaaaaatgctatccgagtttgtgatctggctgctgaatactttgaacgtcagatactcccgcgctggaagcatccggacatactccgccgccgcattgataaagacatcaacccacgcatcggtgatatgaagctggaggacgtaaagccccgccatattgacgacatgttgaaagggatcgttgaccgtggtgcgccgactatcgcaactgacgttttacgctgggtgcgccgtatgttcgattacgcaattaagcggcagatgatagagattaatccctgctccgcctttgaagtggctgacgctggcggtaaagaagtatcacgggacagatggctgaccagagaagaactgatactggtactcagggcattccgcacatcaagtatcagccgacaaaatgaaatcagctttaaaatactgctggcgttatgtctgcggaaaatggagttatgcgccgcccgctgggaggagttcgatattgataatgctgtctggcatttccctgctgaacgcagtaaaaacggcgatgccgtagatattccgctgtgccctacagtcattgactggtttacagaactgaaatctatgtcctgcggcagtcagtacgttctgccggcgcggaagatgcaaagccggatgatcccccacattcaagaatccaccctacccgttgctttatccaaagtgcgccatgccctgcctgctgatatgcctaatttcaccattcacgacttccggcgtacagcacgtacacaccttgccgcgctgggtgttgatccctttgttgctgaacgctgcctgaatcatcggataaagggcgttgagggtatttataaccggcatgattactttgatgaacgacgggcagcattggcgcaatggtgcgccctgttgatatcgctggagaaaggcgaagattacaacgtgatcccgatgagcaagcggagaattcagaaatga

SEQ ID NO: 281365 - DNA, 900 bp, Morganella morganii
atgagcacattttttaagcagatatatcggtataccagaccacgggcgtacagacataatgaaaatatctggcctcatgtcaaaattgatcgtgcggcatcaggtgaaatatcatgtatcaggtataaaggcaaaacctatccgacagagtctctcagccagttgaaagacagcttctgcgggcctgtgttattgactgcaaccgggccgtcaatcaattcgtctgattttagtctggtgccttctgatttgcctgtgatgggcgtcaatggtgcgtattgtctgcataaacaagtgaatttttcgctgtatatcattgttgatatgcatttttttgatgcccgttccgatattatccgggaaattcttcaggataagaacgtattattatttataccagtctatggaatgattagaataattaatgagtatgacgaggtaaaatgtcgtatcgcgctgattgaagatgcgaattaccggatttatcaaaagaaaatagataaaacggagacgagatccttctataaaggaagtccggatgtctgtttttataaaaatactcaagtcagtttttcaaaagatatcagaataggtatttttgaaggagctacggttgtctactgggcttttcagattttatattttctcggttttgaaaaaattttgattgctggccttgatatgagtaattttcatctccctcgtttttatgagaatgaagacaataagcagccatcatttttggaaactgaaattgatagtattgttattccgagcttttcacatgcaagccagatatttaaagataaaaatataagtgtgattaatttatcaataaaaagtgcaataccggattttatttttgataaggttgattttaatgaatattttaagagatag

SEQ ID NO: 281366 - DNA, 1182 bp, Morganella morganii
atgaatattttaagagatagccaaaagatagagaaaatgtatttttttatattttcatcgtttttattttttagtgctatattttgtgggtttactaaagtaaataatttatttcatatcacaattattttattttacttaggggttgtttttaatccggatttgaagaaagtgtttttcactatgttgataaataaaaaatatttttttattttcacatgcttattttttatttactactcgcttacgaatatatggggaggtaatacacgcaacctgacatcgacactaacacatgggttttatctttttacctatttatcattactgattatttttctggaaaatgaaaaaacgcggtatgttaccttaaagtgtattgttatgggtgtttctgttctatgcctttatactctctttacggatcctgtattgctgatgagtcggcgtgttacagagagtaatcccgggccaagtaatgtgattgatttagccggatattgcggaattgccatccttatagctctgcttatatttaataaatgcaaagattatattatggtcttgtgtatattatcaatggttgttgtgatgtttttaacactaagccgcggcccgattatttctttctttgttgcattgattttactaatcagaataaccggtattagtaacagagcattatttattatgctgtttactatattgtttttttctggtgttatgcattattatgatatttttgagaaattagttaaccgttttacggatgtggtatattccggcggagtccgtatggatatatggtcacatgctcttggcctggtgaaggataatttattttttggccagggtgtagagtacaagctgagttttgttaataaattaaacgaaagtattacaacgacacatagcgtttatatgggaacgttactcaaaggtggaattattggctcagtgttatttcttctgatgattttttctggtgttatttcaggtgttaaacaattcatcctcggagaaagatatggcttggctattcttatttttatgctgatatttatttcctctcagggaatgtttgttattggtaatcctaatgagcaatggatattattttggttgccattagcaatagctatgagtaacctgactccggcagataaaaacaaaactgtataa

SEQ ID NO: 281367 - DNA, 1131 bp, Morganella morganii
atgaaaatagcattaattggtacaacagccgcatctcaattaaacttcagaaaggaactgattaaaaaattagtttcatcaggtcatgatgtattctgccttgctattgattattcagattcaacgcgagaaaaaatagctgatcttggtgctatgcctgtagactaccaacttagtcgctctggtataaatccattctctgatattataaatacaattaaattatttttaatattaaaaaaactacatctcgaccttgtattatcttatttctcaaagccagcaatttttgggtccttagccgctaagttagcaaaagtgccacaacgatatgccatgctggaaggtcttggttattgctttaccgaacagcctaatggattatcactaaaaacaaaaattataaaatcaattcaagtatctctctataaggtatcattttcaacgataaaagggcttatactacttaataaggatgaccacatagatttggttgaaagatacaaattaaatgtgacgacatttatctggggcggtattggattgaatcttgatgattttatcagaactgatgatgaagttaataaaaagatatcttttttattcattggtaggcttttaaaagaaaaaggaattcatgaatttattagtgccgcatcaaaaattaaaaaatcatacccagaagttgagtttattgtattgggtgatttagatagcgctaatccgggtagtttaactgagcaagagttaaattcccttattaaccatcatataattacttatccgggatttgtaaataacattcaagaatggatttcaaaaagtagtgtatttgttttaccctcttatcgtgaagggctacctcgcagtactcaagaagcgatggctatggggcttgctattataactactgatgttccagggtgcaaagatactgttatcgatggtttaaatggattaattgtaaaaccatggtccagtcaagatctctatgaaaaaatggtataccttattaagaatcctgaagctataaaaacaatgggaaaagaaagctattttatagctaaaaataattacgaccaaaataagaaaaataaagatcttttgaatttcttaaaaattgatacttaa

SEQ ID NO: 281368 - DNA, 1098 bp, Morganella morganii
atgaaaatcttatacttcattactggtcttggtatgggtggcgcagaaaaacaattaatttcaattattaacaattttaatgaagatcatgtcataaaaataatatcattatcctcccccgagaagatagctataacacctgatagtaataacatagaaataatatcactatctattaagaaaaatattttcagcctaataaaagcactaataaaagtaagacggataatactaaatttcaatcctaacattcttcatagtcatatgtttcatgcaaatatatttgctcggatattacatttaataataagaccatctgtattgatttgtactgcccatagcaaaaatgaaggtggaaaattaagaatgtttctttaccgcatcactgatccgctaacaacaatatcaacaaatgttagtcaagaagcagtgaacacctttatagaaaaaaaagccgtgaaaccaggaagaatgattccattatataatggaattgatactgatattttttcctataatagaatttccaggaaaatgaaacgagatgaaattggtgtagatgataatacgcctctaatactctctgtcggtcgattaacagaagctaaagactatcccaatttattctatgctttttccagcctcgagactcctgttcagcccaagctagtcattattggagatggtgaagaaaaagaaagattaaagaatctatctgaagaactaggtatatctgataatataatctggctgggtatccgccatgatgttcaggattggatgtctgcttgtgatctttttgttcttccatccgcctgggaaggttttggactggttgtcgcagaagcgatggcatgtaaaagagtcgtaattggtacagactcaggcggtgtcagtgaagttattggtgacgctggttttattattcctataaagaactctcaatccttgactgagtatataaacatggcactgagtctatcttcagaagagcgtcaagagttgggaaataaagcaagacaacacattattaataatttttcattgactaccatcagccaacaatggcttgatctttacaataaattatcaaaatga

SEQ ID NO: 281369 - DNA, 1167 bp, Morganella morganii
atgctgagagaaaaaaaaaactttctgtcgataaataaaaaaacattaattgccaccacaatagtattatgctacgtcttagagctaccatcaccaataacaatatacggggtacaattaattattttagcaatacttgcatcctttattttaataacaaaaaaaataaccacttttaataaaaaaagcatagtagttactatgtcttcaatgttaataattactatatttactatatttcattctttttatctggagcaccagcaattattaattgctcagtactgcagggttttattatggatatcatgctctttcattttttttaattatattaaaaacatgacgaagtacgagctacaaaaaagtataactattattatctggataatggcaattgcagtattcattcagtttatcgcttatcaagcctttaactatattatagactattccctattgcttggttcttccactccatcacgaattgtatttaatgtttttcgatcatccggaatcactgctgagccagcaattcattcaggtataatgataggtctaatctcattacattttatattattacaacgaatttcacttacaactatcattgcattaattagtatatttattaccttttctatagctggtatagttatggcattattttatataatagtagttttcagtataaaattaaacttaaaaaaaatatcaatcggaattattacactatctatcgctatagcattttcctatccatatcttactgacaggtatactaaatttgtaaataatcaagatggtagtaacaatacaaaaatagaaacaataaagaatatggttactaaacatgaaatattaattggtggttatggactgactggaaaaagtattaccgcccctcctttttatgaagggttatacgatatgacattctggggtacatctatagttatctttggtttacctatgggattactaattgatatactaggtttaattactatttcaagattaagatttaaacttagagataaggcactaataattatatctttattaaaaataacagcaccaaccttcatgttctttaatatatttattgtactaatttttgctattaactatcagtataaaaatgaaaagagaaaaattaccatatga

SEQ ID NO: 281370 - DNA, 831 bp, Morganella morganii
atgataaacatttttatcgatgttgataccatactatcaatttactccaccccagccttaataaaattaaacattaaacattttagctgggagcatttcaattataatgctaacttaggaaaaataaaaaggaaaatagcaagaagacttacaactaaattttccgacttaataatcacattaacaaacaaagatagagagacatggataaacaatggctatcataatacaaaagtaattactattaataaccccattactgttaataataaaagaaactcaagtgataatttaaaaaacaatattttccttgcagctgggaggttaactaaccaaaaaggatttgatttattattacattcttggtctttaattataaaaaataatcccggatggatactaaaaattgttggcgatggtgaagaaagagataatctaattaatttaattacattactaaatattaaaaattcagtagaactacatgatagaacaaacaatatatctcgttattataatgaagctagtttttttattttaagctctcgttttgaagggtttggacttgtgctattggaggcacagtcatatggattacccgtaatttcattcgattgtgagatgggaccatccgaaatcataaaacataatgaaactggctggttatgtgaaaatggaaacatttatgctctttctaatgctatcgaacatgcaattaatataaatgagaaggattatcaaacataccagaatgcctcaataataaattcatctagattcaatgttgataatataattgaaagctggtgtaatatcattaatataaaatag

SEQ ID NO: 281371 - DNA, 294 bp, Morganella morganii
atggccgctgttaaggtcgatttcaccgcccacacgggcaaagaccccgacagtgttattgcctttcagctcaacggttccgccgtcgataatcactttcgcatcatccgcgcgtaccccggtggtgcgcgccggtttgatgccgccggtggtggttccgttgttggtggcaatcacctgtccgtggtgagtaatcgtgctgtcgcccagcgccagcaggccgatagatccggcaccggagacattaatcgtgccgttgttttcaataacatccttatcacggttcgtgcctga

SEQ ID NO: 281372 - DNA, 864 bp, Morganella morganii
atggccctaacggatactaaagttcgttctgcaaaacctgaggagaaagagtattcacttgttgacggcgacggcatgtccttacttgtaaaacctaacggctcaaagtattggcgatttcgtttccgttttggcggtaaacagcatttgatggcgttcggcgtttatccggatgtttcgctggcggatgccaggaagaaaagggaagaagccagaaagctggtagctgctggtatcgatcctcgtgagcataaacgtgctgtgaaagaagagcagacgaaagagattattactttcgagaaggttgccagagagtggctcattaccaatcagaaatggtcggaagatcatgctaatcgcgtaaaaaggagccttgaggacaatatcttcccggcaattggcactcgcaatattactgaactgggtacccgcgatctgttaattcccattaaagccgtagagacatctggacgtcttgaagtggcttcccgtcttcaacagcgcaccacggccatcatgcgttatgcggtgcaaagcggtctaattgattataacccggcgcaagagatggcgggggcggttgcttccagcaatcgacagcatcgtccggctctggaattaaagcgcatccctgaattactccagaaaatagacggctataccggcaggccgctaacccgctgggcaactgaacttaccctgcttatctttattcgatccagtgagctacgttttgctcgctggtcagagctcgattttgaaacgtcaatgtggaccattccgcctgagcgagagcctattcccggcgtgaaacattctcagcgaggatcaaagatgcgtacaccttgtaagtatcccgcataa

SEQ ID NO: 281373 - DNA, 453 bp, Morganella morganii
atggaactaaaacgggtctatttacaacctcatctggtgccgctttcaaagcaggcgctggcgatcctgaagcagataaaacagttctgtggcgaacatgagctgatctttattggcgatcatgatccgcgtaagccaatgagtgaaaacaccgtaaacagtgcgctacgggtgatgggatatgacactaagattgaggtttgcggccacggcttccgtacaatggcctgtagttcgttaattgagtcaggactatggtcgaaggatgcggttgaaaggcagatgagccatatggaacgtaactcggtgcgggcggcatatatccataaagcggaacacttggatgagcgcaagctgatgttgcagtggtgggcggactttctggatgcgaatcgggagagagcgattacgccgtttgactatgcgaagatcaaccggggtaatggagagtga

SEQ ID NO: 281374 - DNA, 912 bp, Morganella morganii
atgggtacttgccagaaaaatgggctcatcatttcctttgtgcttcttataaccccaggactactatcactgtgtcaccttcttcctgttattcagtggttgccattgacctatgcaataggggggacaggtgtaacgggtaacgcagctggactcgcaagtctgagtttcataggactattgtgcggatggatattggctataatcattagtgatgtttttgctacaggagagaaattcagacagtggacagatatttccctcatcttaacagcagttggtaacggtattttctgggtatcagacagagaggtagctgtcggtaaaacagcatatgaggaaacaattacagatattaatgatgcagccaaatatcttcttgttcaggtgaaagactacagccgcatgtgtgacaatagcgggctttccgaaatgtcatcttatcagtgggcatcgtacattcaagaaacgctagaaaatattgccagtacgaaatcatctgttattgaatatgtaatgcctgaaaaccttgacaccttttacagaattcctgagtactatagcaatcaagtatctccggataaaatcagacaggaatttcaaaactacaataaaaaactatgtccaaataagtctctttcaaaagcaataacacaattgccaccaccttcccgatggtgccaaactccccctccagcgtactgtaatgccattcaagaggggaaatttaaaacaggcatgtcagaccgtttcgctgtcgccaatgaatgtgtaattacatcattattaatgtaccgccaaggtttattgaaaaaacaagctcgtttatccttaagtaaaatgcccctcattatagatggatgtgatttattgctatgtctttttttattggtgggaaaattgccaatgtaa

SEQ ID NO: 281375 - DNA, 1182 bp, Morganella morganii
atgatcgacctaaagactataaaaaaaagaattgagcatgctataaaaccgatggaaaaagcaggagtagatgaatacttctggggaatccgctcggaggcaggagactctctacctccctattacctagtatattttcttttagtagacttgcttgactttaattttaatggcccagaggaaaaggtggccttttcaatacctgtaaaaatagaaaacacaactctcattgtagaatatagaaaaatggggttaggcatttttataaaaaataaaaacgatgaggataaagcaaaagttattttgaaatgtatacaatctggagttaaagcaggcacggaatattttaattatattgccgatgaagcagccaaaacttctaacttgaatgttaataataatagcaatgagctttatgatcgcttctgccatttttttaattgctacgataacattgacaaacaaattataggaatagaagccaaaccagaggtacacgtacaaaacacccctaccttaactcttgataataagaattcattttccattcagactagtaatatttttgaaaatcataataaaatagctcatcttcgtaaagaggctatttggtatgcaatatctgctatagaatcttttttcaattggacggaacatgttttcattttaatagcaattttaaatggaaaaataaaaacaggtgttgatgtttctgataaaattggagaagagtggaaaacaaagtttaaactagctatcgatattaacactcccgaaataaaagttttttatgatcgtttgatcatacttagacagaaaataagaaattttgtttctcatggctcatttggaaaagatggacaaacattggaatttcattctccggttggtgctgtaccacttttgatgccacatcgtcaaaacaaagaacattttaaatttgggaacggtgttgattttgttgcccctgaagctatggagctattacaggaatttgtaaaaaatatgtggagtggtgatttattacccgctaaaatttatattgagtcaggaaatccattaattctttcttatgcgattaacggtaagtatgctaatgcgatgtcatccgaggatgacatgaacaattttgtcgaacatttgacacgtatatttgatgatgcctctaatatggactggtga

SEQ ID NO: 281376 - DNA, 3282 bp, Morganella morganii
atggacttatttgacctgttaacaattaaatttacctttcccgcgaaagctgcacctgcaagaaaagtgggtcggaatttagttcataagttactttgccgctcaacaacagtatcggctcaagtcagaaatgcaagtttcccaggatattttgaacttgttacgggtctaaagcctcctctagactatatctatttgaaagatccaaattccagagggaaatgctcagatggtgtagcttctcttaaagctaaggaaccatttacattcgaaaaatggcgagaagatactgaattaatctgggagcaatttccagagcaggtatttagcacttcacctgatgaaattaatgaacaatggcatcatcaatttcagtttagagaagacgatccagagcgccattatccaggtcttagaaaaccccaactgggtgcacttcatgcaatcgcaggctatttcgctactgatttgcaggtagaaccagctaccgtcgtactgcccactggaacgggaaaaacggaaacaatgctggctaccatgatataccagcgatgcgagcgaattttgctcatagtcccatctgactccctccgaacacaaatatccaaaaagttcatagatttaggatatttaccagagctaacagtcgttccgcctaacattgcactccctaatgtagctattattaagaagggaattcaggtagcggaagaggctaagcaattagctttagaatcaaacgtcttggttgctacgaccagcgttttgtctgcctgctccgaagcagcattaaatacactttgcgagtcgtgtagccatctttttgttgatgaggctcatcatatctcagcctcatcatggcagacaattcgtgaacgatttaaagacaaacgtgttgtgcagtttacagctaccccctttaggaatgataagaagtcccttggtggaaaaattatctataactacacgatgggggaagcccaacgagctggctattttacaaatgtaaatttgctgcctgtagaagagtattactctgaccttatggatcacgcaatcgcagatacagccgttggtcaactgcgcatagacttaaataatggccttgatcatttgattatggcccgtaccagcaataagcagcgagcagaacaaatatttactatttatcagaatattgtaccgaattttaatccaatcgttgttcattctgattatcctaaaacggaaataaaaaaacgtcttaataaattattatcaagacaatcaagaatcgttatttgcgtagacatgttgggagaaggttatgatctacccaacctgaaaattgcagctttacatgatcatcataagtctcttgcagtaactttgcagttcattggccgttttactcgtgtcaataaagcacagaaaatcggtcaagccagtgtagtcatgaatgttgcagaccctaatgttgaaggtgaattacagcatctatattcaacagatgccgattgggataacgtattaagacgactctctgaaggacgaattgccagggagattaggttgcaagaggtcgtggatgccttaaaaaggaaaggtgatttacacgatcagatttctctctggaatattgagccaagttgttctgtcatgttatttaaaacgtactgtgacaattgggagcctgaaagatacaaggagaaactgcctagattcgatgaatcctggcatgcaatagctgaagatgagaatttgcttgttgtgctagctgtccaggcaacttcagtccgatggggaaactacaaagatcttaaagataccaattataaaattctaattgctcattgggatcaagacagatccgccttgtttgtattctcaaatgactataaagcattccgagttgagaatctagtcagtactatttgtgatgataaatttgaagttgtcagtggtgaaaaagtctttaatgtatttaatggtattgaatatcctttggcaagaaatttaggcgcatcccaaattggggcaatcagctttactcaatactttggcccaaatgtcactgaggggctatcactaattgaagcatctcaatcaagcttaagcaatattgctgcattaggttatgaatccggaaaccgtgtaatctggggatgctcgcaacgcagaggtaaagtctggtcaccacaaaaaggtggcagcattgctgattggtgcaactgggttaagaaagcctgggacaagatttttagttctgaaccggatccaaacaatcttacgcgtaactttttgcgtccagtcccattacttgaaccctataatgaatatccaatatcagctcaatggggtgagtatttgcttactgcgttcgaagataaagttatttttcattttgatgctgtatctgcgcatttatatttagtagaggttaggactgctggaaagtttgacgatggtaatgtacgactcattttctctacagatgaaacgtcatctgaatataaattatctctcacgggaagtgctacagcaaaaggttatgcctatcagttgatatctggccctgaagtttttgtacagcgtggtgaatctgaaccggtatcactatcagagtatatggaaattgatccagtaatgattcattactccgatggttcattttcatacaacgctcatatagtccatgtaagccaaaatattggcctttatgacaaagacgaaattgtagcttttgattggcaaggaactgatgttcgagtggaatcaatgggctatactcgtgatccatcatccatccaatggcgttggtactgtgaaattaaagataattacgatgtcattattaatgatgatgggaaaggtgagtcagcagatttagtggggttgagaatagttgatgactgtattgttctctccttaatccattgcaaatattcaggttcagaagaagcaggagccagacttaaagacctttacgaagtatgtgggcaggcacagagatgcattcgttggaaacacttgaatctttcctatttataccaccacattaagcgtcgcgaggaacagtggcgatcgcgtggtcattctcgctttctgaaaggcactataaaagaccttgctgctatgaaagagcgctccagaatcacacctcttaaattccaagttgttattgttcaacctgggcttagagtaagtaaaattagtgaagaaggccttaagctacttggcagcacggcgctgtttatcaaaaaaacaacgatggcagatttagttgtcattggttctaaataa

SEQ ID NO: 281377 - DNA, 1149 bp, Morganella morganii
gtgattgacagtaaattagtagaatttgtcgagaaagatttttgtagtgttgtaaaagaccttacttcaggaaatcctaagataggaagtaaagattaccttacagaaggaagatttccaataattgatcaaggaagcaacttttgcagtggttatacaaactctaaagagcttttatgtaatatagagctaccatgtatcatttttggagatcataccagagtattaaagtatgttgataccccatttgctcttggagctgatggggtaaaagttctgaagccaataaagggattaagcgaaaaatatcttttttattttttaaaaaatttagatattccgtcagcgggatatagtaggcactttaaattcctgaaagaaaataatattaagtatccgttacagctaagtgagcaaaaacgtatcgtatctattcttgataaagccgatggtatacgccaaaaacgcgagcaagctattaaactggctgatgattttttacgtgctacgtttttggatatgtttggcgatcctgttgaaaacccaaaaaaattaaaaaaatcccctattactgaattggctgatatcatcacaggatttgcattcaaaagtaatgattacgttggtgattcatcagaatcggtacggctttgcagaggggcaaatacgcttacggggtatttagattgggctgatacaaaattctggccaaaaaataaactagaaaaactagataactatttaattaaggcaggtgatattatccttgctatggaccgtccgtggatatccaatgggttaaaagtatgcatatttcctgaaagtcagcgagaaacgtacttagttcagcgtgtagctaggttacgtcctcgcagtgaatcttatgtaaattatatttatagttgcattaaatcgcctgctttcgaaaaccattgctgcccaacagaaacaacggtgccacatatatctccagttgaacttaaaaactttgaagttttaattccacccgacaaactcatggataaattccattcgattgcatcaacaatcaataatagcttaaataaaatggcatcaggcgatattagtagcgacgctcttttatctaagttaagtcagcaggctttttcaggacatcttaagaggtaa

SEQ ID NO: 281378 - DNA, 1635 bp, Morganella morganii
atgatcaccggtgacttaaaaagtaaaatcgacgggctgtgggaagatttctgggtgggtggtatcacaaacccgctgaccgttatcgagcagatcacctacctgatgtactccaggatgctggatacccaggaacaacgggacgagaagcgtaagcaaatcgcaggcgttgattttaaaccacgctttgcgcctgagcagcaggagttccgcttcagccactacagcaaccttggctcggacgagatgatggaagttgtgcgcgacggcgtgttccagcatttccgtcagcttgggcaagctgaagatacgaaagtgacgttgctgggcaactttatgaaagatgctcgcctggagattgttaaaccgtcactgctgaccaaagccgtggaggtgatcaaaaacctgccgctggatcgtggcgacaccaaaggcgatctctacgaatacttgttaagcaagctgaccaccgccgggatcaacggtcagttccgcacgccacgccacattatccgcacaatggttgaaatgatggagccaaacccggcacgtggtgaaacgatctgcgatccggcctgtggtacgggcggttttctggcaaccagttatgagtacctgctggagaaatacagttcactggagtccattcataccgagattggcaccaacgaacgcggcgaattagaagagcaaaaaatctttaccggcgatctgctgacgccgtggcgtgaccatgtggataacaacatgttccacggttacgactttgataccaccatgctgcgtattgccgccatgaacctgattatgcacggagttgaagagccggatattcattatcaggacaccatgagccagagtttcagtaccaacttcccgcaggccagtaaaaacgcattcaacctgattctggcgaacccgccgtttactggttctctggatgaggaagatatcgactccacgctgtcggcgatggtgaaaaccaagaaaaccgagctgctgttcctggcgcgtattctgcaaatgttaaaagtgggcgggcgcagtgccactatcgtgccgcagggcgtattgtttggttccagcaaggcgcaccagtcgctgcgtaaaacgctggtggaagataaccaactggaagcggtgatcaacctgccttccggcgtatttaaaccttacgcgggtgtagcgacggcgatcctgatctttaccaaaggcggccagacggatgaggtctggttctacgatctacaaaacgacggctacagcctggatgacaagcgtaacccaataaaatacaacgatttgccgcatttattagcgagctggaagcattaccgtattttgcgagggctaccagttgataattttatgggcgagagatcagcctcgttgcttaagcagcaatatccggaagggattgatgctggtgttgattttaaagatcgcactcaggcggcgtttgtagtaccgaaagaggatattgcggcgcagaaatacgatctctctattaatcgttataaagaggtggtgtatcaggctgaggtatatgaagatccgaaggtgatactaaagcggttaaaagatttggaaaaagaaattctggcggatttggatgagctggaggggatgctgtga

SEQ ID NO: 281379 - DNA, 3414 bp, Morganella morganii
atgaagcagtctctcaattttgaaatgttgcgcagccagtggccggaactggcagaactcgcgtgtatggcggaacgctatgttcactccgatccggaaagctgtctggtcaagctgcgcaactacaccgaattgatggtgcgttggttataccgtcaggaacggctgcctgaaggcatcaaagcaaatctgtacgatttaatgaacgccgatgtgtttaccagcatgatgccggaagccatcatcatgaaaatggatgcgctgcgtatccacggcaaccgcgccgcgcacggtggacgtatcaaagccaaagatacctactggctgcttaaggaagcgtatttattaggtgtctggctatatgttcgttacgcccacggtaatgttgataactgccccaaattttctctccctccgttaacgcaatcttcaggtcgtgcagatgaaaaacgtctggaggatgcaatcagggctcaggatgaaagccgtgagcgcgaactggcgttacaacgcgcacttcagcaagagcaggaaaaagccgaacacctcacccagcgcctgaatgaagccagagctcgcaaccagcatgttgccgacatcctctctattgatgaagcggaaacccgccgccgcctgattgactcccgcctgcttgctgctgactggaatgtaggcgaagaacttaaaaataccgatcaggttacgcaggagcatcctgttaaagaacagcctactgcaactggcgacggttatgcggattatgtcttgtgggatgaagcgcataaaccgctggcggtggtggaagcaaaaaaaaccagcgtcaatgccgagcaggggcgagttcaggcccggttgtatgcggactggctggaaaaagaatatggtcagcgcccggttatcttctacaccaacggctacgacatttggctgtgggacgaccataaaactcatggttatcccccgcgtcgggtatttggcttctacagcaaggaaagcctgcaatatcttattcagcagcgagaaacccgtctgccactgaacagtgtgccgcacgttaaagataacgaaggtaaggccgttgccggacgtttgtatcagcttgaaaccattgcccgcgtcagcgaacggtttaccaataagtatcgacaatcgttaattgtacaggctaccggtacaggtaaaacccgcgtggcaattgcactaagcaaactgatgattgatgcccgctgggtaaaacgtgtcctgtttctttgcgaccgcaaagagctacgtaaacaggcggcgaatgcctttaatcagttcaccaatgagccgctgtatgtggtcggtaaatctaaaaaagcagacaggcagaacgccaggatctatatcgccacctatcccggcatgatgaaaatcatggatcattttgatgttggttatttcgatctgatcattgccgacgaatcccatcgttctatctacaacgtctacggcgatctgtttaagtattttgatgccctccagattggcctgacagccacgccaatcgacatggtgagtaaaaccactttcggcctgtttggttgtgaaggacgtatccctaccgccaactacagcctggaagatgccatcgccgataacaatctggttccctatgaggttgtcacgcacaccacagaattcctgcgcgaaggcatcaaacgggagaaattaagcgacgcacaaatccgcgaacttgaagaacagggtatcgatcctaatacgctggaatttgatggcaaggcgctggatgaggcaatttataacaaagacaccaaccgctatatcctgcgtaacctgatggaaaatggcctgaaagatcgggacggccaactgccaggtaaaaccatcattttcgcccgtaaccacaaacacgcgctgctgttgaatgaattgttcgacgatatgtacccgcagtttgccggacgcttctgccaggtcatcgacaactacgatccccgcgccgagcaactgattgacgattttaaagggctggatgaaagcaccaacaaagagctgaccatcgctatctctgttgacatgcttgataccggtattgatgttccggaaattgtgaatctggtctttgccaagccggtcaaatcgaaagtgaagttctggcagatgattggccgtggcacgcgcctctgttcgggactctacggctacgatgaaaatggcaaaccgctggataaacagaaattccgcatcttcgatcactggggcaactttgagtatcacgagctgcatactgaagaggccgaagtcacagctactaaatcgctggcacaaaaacgcttcgaagcgtgggttatgctgggggccgctgcgcagcgtaagttcgacaaacaggcggtggatttagtcgctcaccagctccgcgagcaaatcaacgcgctggatgaaaagtcgattgccgtgcaggaaaagtggcagcaaaaagcgcagtacagcgatgaaaaagtgctgcgccagctttccccgaaaacacagcaggatctgctatctgtcctggcccctctgatgcagtggctggacgttcgcgggcaaagcgatgccatgcgctttgatatggatattctggcggcgcaaactgcccgttataccaacccggaagagttggatgtgctctggccggtcatcatcgagaaagtggaacgtctgccgccgcatctgactcaggtgcagcaacagggacaacggattaatcaacttcgtgatttaggctggtggaagcaagccagcctggaagagctggaggatatccgcattcatctgcgcggtataatgcacctgatggagaaagatgcgacgccaaaatttggttcgatacaggtggatattaccgaagatgcaaacctaatccagacggaaacccgcaaaaccaacatccgctcaattgatttcaaactgtatcgtcagcaggttcagggagcgctggagccgctgttccagcaaaatccggtgctgaagaaaatccgcaacggcgagccggtgacgcaaagcgagctggatgaactggctaagctggtgctgatccagaaccctaacgttgatatccgggcgctgaaagagttctacccgcaagcgaccgccagcctggataaacttttgcgtaccattatcgggatggacagcgatgcggttgaagtgcgttttgcccagttcgccgctgacaacagcctgaccagccagcaactgcgcttcctgtcattgctgaaaaaccacatccgcgattacggcaccattgaaatgcggcaactttttgaacagccgtttacgcatatccacaacgaaggcgttactggcgtattcccggatctagagcagatcgtccggttgcaaaagatagtcgaagagctgggtgttgtgaccgacgcagcgacggtataa

SEQ ID NO: 281380 - DNA, 576 bp, Morganella morganii
atgcaagatacaatcgctcgctataattttttactcaaaacctaccaaagctggcttaccgatctgactaaactgactgtcaggcatggaatatgccatcagaatatttatcccagccattaccttacgctgtcgacactctacttcccggataccggccctgttcctgggatcgtaccacagtgcctgtaccgaatgatctataacaaaaccaagccagaaccgctgagtattcaaaatgatttacgtcttagcctggagactgacgggcaattgctttttactcacggaggccttgaaggtgtattgcttagcgagtgtgtcaggctcaagcaacgctcacttgccaataaactgataagcctgcttcagcagttcaataacgtggagtatcgccataagcttgtttggcttttctggtatgatcgtatgctcggagcgcctctcgacgactggctggagaaccttaagaaaatgaatgatgaagagttctgcttttggctgttacagcgtcaggaagaaaactcaaagctaacccatctaatggatgaatatgtgaattttacgcaccactga

SEQ ID NO: 281381 - DNA, 207 bp, Morganella morganii
atgaccatcaaaccttccttacttgaagaccaatttgtcgatatggctttcattacccgtctattaagcgtcagtgataagtggatataccgactcatcaaagatggtgtctttccgaaacccatcaagctagggcgcagttcccgctggctacaaagcgaaatagagtcctggttgcaggagcgcatcagccagtcccgtcagtaa

SEQ ID NO: 281382 - DNA, 579 bp, Morganella morganii; identical to SEQ ID NO: 240446

SEQ ID NO: 281383 - DNA, 876 bp, Morganella morganii
atggttcgggtagttcgtaatgatggtgaaatgataaaaatcctggaaaatgcactacagcgatacaatattaattgcccatcacatgcaggtgataagaattatcgcacctacctcgaacgtgtcagaaaacactgccagtctcttggtcataacgagcaggatttagacactttcttcgctgaggtggaaagctatcaatcattttccttccctacggaagttgatcttggatggtttaaaagtgatgctcgtgcgagcctgtggttggcatgtgaattatattctgaaacacaaggaatgacgttaggaacgggggttcttgatattttgtctccagattctttaccgcccgatcatcttgtcaggatacagaatatcaggaaggtaatttacagctggccgctgagtataacacctaaggagtttatgaaatctaaagcaatagaatgggctaaattaattgagcatgaagatctttttagtgatttttcctctcaagaaaatgatgtttctggttggttaaaaggttatctagacaaacatattccgtctttaggtgtgcgtgtttgtggtaattccagagacgaaactcttgcatggtgctacgcactatacttcgaatggagaaagaaaaactcagggtcacctgatacagtgagcttatttaaaattaagttcaaaagtgcatgggcaacacaaaagaataggttgaaaaacaaagtatataaaaagctaaagccactgaatatctacatttcagaagatgctcatcggatgttaaggacgttagccttagatgaatgcatatcaaacgataaggtagttgaacatgcaattatggctgcatacaaaaataaaagatcaaagcagtga

SEQ ID NO: 281384 - DNA, 876 bp, Morganella morganii
atgaaaaaatcagaaggtttgcaagccatcgagaaaccgttggcgtcactcccccatgctttcggcaaacacattcttgaccatatttacaagctcacttactacgaaccggtcatcggcatcatgggcaaaacaggtgcgggaaaatcgtcgctctgcaatgcgttgttccggagtgaggtcacgcccgtcagtgaagtcgatgcctgcactcgtgaagtgctgcgattgcgtctgagcagcggtgaacatagtctgatacttgtagatctacccggtgtcggtgagagtgagcaacgggataaagaatatgaatctttgtatcgtcgtatcctccctgagctggatctcatcctgtgggttatcaaagccgatgatcgcgctttctctgtggatgagcgcttctaccgacgagtgatgacgggttaccaacagcgaatactgtttgtcgttaaccaggctgacaaaatcgagccatgccatgaatggaactctgccagcaatactccttcacctaagcagtcggctaatatcaaggccaggctggagtccatttgccagctattttcagcgtcccatccggtgtgcgttgtctcagcccgaacaagctggaatctgccatcaatgatagaaaccatgatgcgttgccttccggatcgtgccaccagcccagtggcgacgcaattgcatgggaggctatgcaatgaaccggtaaaaaagcaggcacgtgagagtttcggcagcgcagtaggtgaggtgtttgattctgcggaagcggcatcatttattgccgcgccactaaaagcggtcattcgtacagtccgcgatgccgtagcatccgttgcccgtgccgtttgggactggattttcttctga

SEQ ID NO: 281385 - DNA, 702 bp, Morganella morganii
atgactcaggctgaacgccgccatgaccggcttgccgtcaggctgtcgttgattatcagccgtctggtggctggcgaaacactggatttgcgagcgctggcaatggaatttggtgtgtcggttcgaaccctacgccgggactttcgggaacggctgatgtatctggacctggagtatcgcaaaggccggtgccgtttgttatccggtagccgccaaagagaactcgcggtaatgacatttgcccgccagtcaggcgttgaagcactgtttcctgatatggataaccatctggtcagttcactgttgagcggatcaggggagtctccttgccttatctggcagggaacagcccaggtttcatccccggactcaggcatattcactcggttagtaagtgccgtatcggaacatcgaaaggtgacgctgctcggtaacggttgccggtgtacaggccttgctccctatcggctggttttgcgcgaaggcaagtggtatctgacaggcgagcatcaggcacggattgccgtctttcccctgaccgatattcgggcggtcacgctacacaaggatagctttagcccagatgtaatagtgcgcgacatcctctctcgcccggattttcttcaggctttaccacactttcgctttttccattcattgcttgtcgcaactgacgacgggcttatacctcagaaggaataa

SEQ ID NO: 281386 - DNA, 633 bp, Morganella morganii
atgaaattgcttaccactacagtgctggccgccagcctttgcctcggtactgttttttcggctgacgctggaaacaccgtcggcactgttaaagcctggcaatacatgcaggccgacggctggagatccgccgatggtatggatgacaacacgctgcacaacatgctctatcaggccagcgtgattgataactacccatggacgaagcagtttctgctacgtgtccgtggtggtggtgcaattttcctggccgataagaaaacccacaccattcgtcaactaaaactgagtcctgtcggtgaaacctacaatgatattgaaacggtttatcagggagatgataaaggggaaggctgctacttcgccattatagataaccagtcctcagccagatacgaagcggagcaaagtgttctatacagctatcctaaggtcgataatattgataacgaactggctaaagtcagggagaaattcagcccacaagtagttacggtcattccggataactgcgtaaataaacaacaacaggccgcattggcggctaagcgctcggaagaggatcggaagctacagcaatgggtggcgcagcaaagcctggcggaattgtgtcgtcgcacaggcaactgctaa

SEQ ID NO: 281387 - DNA, 549 bp, Morganella morganii
atgatggaccaagattatcagaaggttattgttatgcctttcaccataatgttaaagatatttgcgaagccagattgcaacaatatcctgccactcgttaatcgaactgctaaagttttatctctcattgtcggtttaatgttgtgccttccatcctccgcttacgcagatgaacagcgctatatcagcatccgcaacaccgatacggtgtggactcccggtaatatctgttcgtatcagttccgcctggataacggcggtagtggtatgggttttggcccattggctgtttcgctgcggctgaaagataagtcgggcaacacgctggctacgggaaccatggatgttgccccctttggtgacagtgatgccactcgttctcaggacgcttttctggagcatgaatgtgtcgaaaacgtcagcactgttgaaatcataaaggcgactgaagagcgcaacggctaccaggtcaggctgccactgtccattttcgacccacagtattaccagccactgtcagtatcggttgccgggaagaaggcatcataa

SEQ ID NO: 281388 - DNA, 474 bp, Morganella morganii
atgcctgaactgattttacccccgactttgccggtgaatgaacagcgtattatccgccgcgccatgtgcctgctggagaaatacctgcgccagcctggtgaacagtttcttgccgcgaattgtacgaaaacctggctacaactgcatctggcgcgacaggaacgagaagtctttatcgtactctacctcgataatcaacatcgcctgctggaacacgaaactctatttctcggcacgatcagccataccgaagttcatccccgtgaaattgtaaaatctgcactgcgccataacgcagcagcggtgatagtcgcccataaccatccgtcagggattacggatgcaagtaaggcagacagaaccatcaccgcccaaatcgtaaacgctctgggtctggtcgaggttcgggtgttggaccatttcattatcggtaatggcgaaatattgtcttttgctgaacggggctggctgtag

SEQ ID NO: 281389 - DNA, 327 bp, Morganella morganii
atggagaaaaacgatcccatcgaatgggggcttcgacgcgatatcacgccgcgtgtaggagcacggctggtacaggaaagaaatcaattgcattacctggctgaccgggccggtgtcaccggcatttttaatgaagctgagagccgcaaactgaatgcagcatttccgcatttcgtggagcagatggagttaatgctactctccggggaactaaacccccgttatgcgcactgtgtcaccctgtaccatgatggatttacctgtgaagctgacacgcttggctcttatggttacgtctacatcgtcatttaccctactcaacgctga

SEQ ID NO: 281390 - DNA, 342 bp, Morganella morganii
atgaaaactttacctgcatcaactctgcgggcggctaagccatgcccgacgcccgtagttgtctggcaaacgctacttacgcgcctgctggggcaacactatggcctgacgctgaacgacacgccgttcagtgatgagaacgttattcaggagcatatcaacgccggtattacgctggctgatgccgttaactttctggtggaaaagtacgaactggttcgtatcgatcgcagaggatttagcaggcaggaacaatcgccttatctgcgggctgtagacattttgcgggcgcgacaggcaacgggtctgttgcggcgaagtcatcatccttcgacgcgctga

SEQ ID NO: 281391 - DNA, 834 bp, Morganella morganii
atgcaaacagaagctgaagttttaaccgaccataatgagctgatttgttcaaccagtattgaacgcattgttacaggacgtgatgctgcgctgagcctgatagaaatcctgatccataagcttgatgatatctcgcggctaacctccagcatcggtggtgatgtggcggagcattgggcgatgcgacagggccattcctttgactgctggctgatgcaaccagtagataaagcgatgccggtgattacccgcaatatcgatcgcagtatctggcgcgatctcatgctgaagtccgggatgttgaccttgatggatgccgaagcccgcagccagtgggctaaaaacctagaggagggcgatcttccgaccatcagtgaaaccaacatcctgagtacctttgaacaactccaccacaataaacaggatgttttcgaacgtgggattattaacgtattcaaaggactaagctgggactataaaaccaacaatccctgttgtttcggcaagaagatcatcatcaacaatctggtgaagcacgaccgatggggctacagcctgaattggggctggcggcgcgatcagcttgccgatctggaacggatgttctacctgctggatgggaagaccattcccgataaccggcgtgatgtctccatccggtttatggattttgtgcgcgataatccgcatcagcagattttcgaagatgagttgttcactattcgctactttcagaagggcagtggacatatcacttttaaacgcttggatctggtggagaagatgaatgacatcgtagcgaagcactttccgggaatgttgcctgcgaaatga

SEQ ID NO: 281392 - DNA, 273 bp, Morganella morganii
atgttattaaacgaggtaatccctatgggttcgcttactaaacaaaccattagcgcacagatacctgttgagttggctgctgctgttgaaaatctggcaattgagttggaccgttctaagagctggattattaaagaagcgttgaccagtatgctggccgaaagagaacggcgtcatcagagcattcaggccggtcttgccgatgtggatgctggtcgcgtggtgagccactcggacatggtggattttgctaatcgcttaaagaaatcctga

SEQ ID NO: 281393 - DNA, 276 bp, Morganella morganii
atggaagtttattggacgcttaaagctcaggatgacctggagcgtatctaccgttttgcccttcagtacagccgccagcacgccgatgacgttttggatcgcctgatgactggttgtgctggtcttacagcgaatccggcaattggcatacagcagactcggtatgaacctcgtgaggtccgaaaagtattattcgatgattacgaggttcactacgaacttcgcgatagtgacatctatatcgtggatctctggcataccaaagaagaacgatga

SEQ ID NO: 281394 - DNA, 798 bp, Morganella morganii
atgttacagaacaacatcagacagctccgtacccagctatctatcactcagcgcgagctggcatttatggtcggcaccagccagcaacaaattcagcgtatcgaaactgggaaggttgcggcaaagctgagtcttgcacaggcaatatgcaatgccctggataaacctctaaacgtagtgttcccggaaagcgatcggttgataaacgacttccgcaagaagcatcgtaaaaccgatgaagatcttgaggcgatagccacaagcggtattgaaatggatagcggtctctggaccgtaaaactttggctacaggggcagcaggactatttgctgttgcccatttcagcagcggataagcggaggttttattattattttcaggaacaaaacaccccaaacacagaacgcttcttcgtttttgattcttccgagtatcgttatgcgttaaatatgcgtgaagtgatatttcatcagtttctgtctgatggctttgcccccatcgtgagcgaagaggatgatgcctacgaagacgattattttaatgtccatctcacgctggtaaacggcggaccagtgattccactgagtgttgagcctgatgcgccgcaaaacgaagagacggatgatatcggtcagttgaatgcgttctttgacacgctggattgcgagcctgaaacgacagatcgttatatgctaaccgacgaagatggagaagatgcttttatccgtattggttctattgctatggtgcgagtcgtacttgacgtgctggagcctgtggaagaagatgaagagtag

SEQ ID NO: 281395 - DNA, 969 bp, Morganella morganii
atgaaaaataaaataattgccatggcattggttgtgttgtcgggcaatgcgtatgcacattatgtggtcgaaaatgtaaaaacgaccaccaggatattttcatttgaactggttcataaatatctggccagtcatgagtttcatcaaaatacatgcagaagcacttatacaaataacaagctggaatcctgtgtgctgaattataaagtgacatccggcggtaatagtaaagtaattaaaaccggctttgttgatttgcggggagacggcagttttgatcaggaactgatgagtgcgacatctcattataatgcattacgggtggcagaggctcatggtgttgatttaacgcagcttgttgagattccgcgtgaagatattacgtcattgaccggcggcaacaacagatatacagtcgatacgtcatcggcggggcgcgtttgcaatgcagattcgccgtcaacctgtaaagattatgcagagtcaggttataccaataacacattagattttacgacgatgaaagatttacaggttgcctgtgaatttaccagcaaagacatatcggttaaaacgtcattatctgaggataatctgtatttgtatgatggtgcagccaatcagaaaatactgccttataactatgatgtggataatgtgtcggttgactgtgttaactggctttcaaccgcaatatcaaaagatgtcacgctgaagtatgaggttctggataaaacagcggctgatggcgacactcagctgacctgtaaattattcggtaataatgccggaacaacatcaccgtcatcatcaacgaataagatgactattcagggattctcgacgaaggacgagaattttaaaattccggaagcatttctgggattttatgtctcatcaccttcaggaagtgcgcaaacatcggtttcatttgactgcaacttcccgttatcaacagagattaaataa

SEQ ID NO: 281396 - DNA, 483 bp, Morganella morganii
atgagccggataaggtgtagaaataaatggatattaatactttttatctccgctggaataatgatatcttcttttttattgatatatatcgctggaaaaaatataaattatttttatactccttatgatatctttcatggagaaaaaagcctgagcttacgatcaaaatcaggagtgagcttcagattgggcgggatggtaaagaggaattcgatctatcgctctgctgatggcctaactattgcgtttattatatatgatgattctgcagagattaaagtaaattatcagggcattttgcctgatctttttaaagagggtcagggagttgttgcgcagggaacattatcagagaataacattttctatgcaacacagattttagcgaagcataatgcagattatgcccctcataccagtgcggattctgaaaacagccgatcttatgctccgaatactttttacgggagaacagcacaatga

SEQ ID NO: 281397 - DNA, 1953 bp, Morganella morganii
atgatccctgagatcggcagtatcttattatcattgtcactgtcattatctatattttcgattatttatcctctggccggtgttttgaaaaatgatccgtatttgatgcgaagtgctggtattttcacgctgagtagttttatttccttgttcggctctttaatttgccttgcttatgttataatcataaatgattttactgtaaaatatgtaattcagcattcaggaacacaacttcctctttattacaaaatagcatcagtttggggcggacaggaaggctctctgcttatgtgggtgttttttatgaatggatgggcagttttaaccgcactctttaataatatatttcctgtcattaaagttaaggtcttaattatattgtcacttattaattctggtgttatagcttttattctttttatttcaaacccttttgagcgctcacttccttttattcctctggaaggatattctttaaatccaatgcttcagaatgttatccagattattcaccctccactgatatatcttggttacacaggtttttcagttatttttgctttttctgttgtatctcttataaccggccgtattgatatattattatctgactggttgcacaggaaagctattatttcatgggtattcttaaccggaggtattttgtcaggagcattatgggcgtaccatatattgggttggggagggtggtggttttgggatcctgtggaaaatgcatcattaatgccgtggctagcagcaattgcattaattcattctttatatcttgccaggaaaaataatatatttatattatggcctgttttactgtctattattgtatttgcactttgccttactggtctttttttagttcgttcaggtattttagtttctgtacattcattttcgcctgatcctcatcagggtttgattttcttattatatttagctatggttattagtccttctttgattttatttgcattcaaaggtcagctgtttattttaaatcatagtgaaaaatataagtcaaaatcatttttttctaaagaacgcttactattatctgggaacattatattattatcagcgcttaccagcgtcatgcttggtacgtttcttccatttatttataagctaagtggggtaggtgctgtttccattgatatttcatttttcaacagaatatttggttttttatttattccgttttctctttcaattgctataacacctttaataaaatggagtaattatggtatacagcatatcagaggctatctgattgcgaacgttataataagtgtgatttcatcctccgttatagttgttttttattctgatgattattatttttcagtatggttttatctgtctttatctgtatttataattattattactataggggatgtatatatatatttattaagaaagggagttggctgcaaaaataagtatcgatatgcaggtatggtttcagcacatatgggtattccggttatggttattggtattattttcagcgaatattatgctgtgacaaaagatatcagtatagaaacaggaaaatatagttcaatttccgactatcaaatttattttgataaggttgatgttgtttataataaaggttatgttagtgaagttgttacagcagaactttataaagataataaactaattgctaaactttacccggataagagtttttatccggaaagaaatataaccattacaaatccggcagtgtaccatagtatatcagatgatctgcatattattcccggagaaaatatttcaggccatttatggacattcaggttatataaaaaaccatttatgtcatttatttggtttggcggatttcttattacttttggtgggatactgtgtttgttttacaaaaatacatatatagataatgagactgaatatgaaaaatag

SEQ ID NO: 281398 - DNA, 534 bp, Morganella morganii
atgaaaaatagagtgcttataatacctttaattattttttttatattaatatctttattttttataattatgtatagtaattattctcagaaagaaggcgaagagaatgagctgacctatgtgggtgtgccattatctgaggttaatattgaaccattttattacaaagacaaccctgttttttattttccggaaaaaaataaatatctgctgaatgtgtgggcgacatggtgcttgccatgtaaggcagagcataaatttttaaataaactacgagctgatggtgtaacaattgttgggattaattataacgataataaggagaaggcaacagactggctggtgaattatcaaaatccgtatttattaaattttattgttgaaagcaatattattgatataggagtaattatcaattcagtacctgaaacctttataattgaccagagtggcattattttatacagatataaaggaatgattgataatgagatatggattaataaattaaaacctatttttgatagtttatag

SEQ ID NO: 281399 - DNA, 603 bp, Morganella morganii
atgccatcattattgagaccgacttttttatctggtgttatattgcttattattgtttcaggaggggggtattatctttctggtggtggtattaagtatatgaactggcgtgactcattgatttcagaagcgacagtgaaaagaaatttagttagtgataaatttacttataaagagcttgatggttatattatgagtgtaaggtatcatttgatttataacaggaaggatatcttattatgggaaatgttaggtaagttgtctctgaataataacgatattgaaacggcattaatttcgtttaatcaggcatacataattagtgggagatatagtcataaagtactttatatacgggctttaatagagaaaaacacatatgagagcctggggaaagcacaaggtctgctggaagatatgcttattgattttccggaagacatgcaacttaacgaaatgctctctatctgttttgttctgcaaaagaaatattcttctgcggttttggtatggaataatatgatgggtatgttagacgttaatgattatcgttataatttactgaaaaatagattacaatattttaacaagaatattaattga

SEQ ID NO: 281400 - DNA, 669 bp, Morganella morganii
gtggtttgtacaaggcgtgaatttatgattggttccagtgctgttattatattagctgaattacagaattatgtatttgctacctcaaaaaaagaagtttcttcccattatgtattgattcatgatgagacgcgctgtaatggatgtaatttgtgtgttagcatctgccataaattcaaccatattccaaagggttacagtcgattagcaattgcaaaaattccagtgaaaataaatgataaagtaaccctgcattattttttccgacattcatgtcaacattgtgaaaatgctccgtgtattaaagtatgccctacaggtgcatcttatcaggataatgatggcattgttcagatagccacaacaaaatgtatcggctgtggctattgtatttcagcgtgtccttatcaagtccgttatctgaatccacaaacaaatattgctgataagtgtgatttctgtgctcaaacccgtctgtctaaaggacttattcctgtttgtgccaaagtttgccctgaaaatgcgttgatcttcggaagagaggataatccgattataagcgactggattaaaaaaaataaattctatcagtatcagtttggtggtacaggtaaacctaaaatattccgtcttgctcatatacattcattaatacaagaggatatatga

SEQ ID NO: 281401 - DNA, 774 bp, Morganella morganii
atgaacccagaaacgtttcaatctcagcttaacctatatcttcctatttattctataaattattggccgggttggtttgtagttctcattattgtattatgtatattttttcttatggttattattcatgcgctattgcgtctgcattttcgttcagaaggaaatatcaggccatacaaaaaagtatatctttatcctttatctatccgattatggcatgccattaatgcttttttatttattaccttgcttttgacaggaatgattaatcacttttcgattgttaactatcatattacagcggtttttataaagacacataaagttactgggtatttattaacagtggcttggtgtttttatattttatataatgccttttctggaaatagtcatcattatttctttaaacggccatttttaataagagaaatgataaaacaatttaatttttatttccatggtatatttagccataaaaattcaccttttgtcgctagtatagatataaagtttaatcccctccagcaagtagtatattcatttattatgtatctttttattcccttgttaattgttactggatttattttattgtatcctgataagattagttttatttttgatggtatgtctcataaggtacttgtgcttcattttattttgggattctttagcgttttctttattatatctcatgtttatttatgtacgacagggcggaaacttacggatatttttaaaggtatgtttgatgggtattatcgacattaa

SEQ ID NO: 281402 - DNA, 483 bp, Morganella morganii
atgactatgatgaacacgccagcaacaaaagaagctttcttgaaattcgtagaaggattaggcgacttaggtgtggtcagccctcgtacagcagataatatttcactggtagttactgcgatcactgggcatattcctgatgatgtacttgctactgaatgggatgtatctgctatcgtagattcattccagaaagaggctggtctcactgatagcaccgccaagacataccacagtcgctttaaaagtgcggtagataaatttattgatgtcactgaaggtaaggagctcaagcaagtggctaagagaaaatcaccagcaaaaagcaacattcaagatgaagatggtgttaagacattctcgttaccaatcccattacgtgaaaatctcatagttgctattgagaacttaccgcgtgatttgtctgaagaggaagctgagagaatcgctacgattattaaatcatttgctatcaggcaataa

SEQ ID NO: 281403 - DNA, 597 bp, Morganella morganii
atggcaaaaatagagttgagcggtgtgctgggtaaaacattcggtaaaacacatcagcgtcttgtcagtaccacgtccgaagccgtccgtgcgctgtgctgcaccatctctggatttgagcagttcctgaataccagcaaatcccgcggcttaacttatgcggtatttcgcgggaaaaagaatatcggggtggatgacctcggttttccggtgacggatgatgttatccggattgtgcctgtggtgatcggcagcaagcgcgggggattattccagactatattcggcgcggtgctggtggccgctgccggtcttatgactcccggcggcataattgcagcctttagcgccggtggtatggcgggctttatggctacaaccggcgcagcgatgatgctgggcggcattatccagatgctgtccccgcagccaaacgggatcgccatgaaagaccagggcgaaaataaaccgtcctatgcgttcggcgcaccgaccaacaccgtttctcagggctatccggtaccgatcggttacggtaaacgccgcatcggcggagccgttatctcagccggaatttacgtcgaagatcagcagtaa

SEQ ID NO: 281404 - DNA, 582 bp, Morganella morganii
atgaaagttattggctatattcttatgattgctggattgatagcaatggtttttgcaataaacatggacgtttcagtgtccacttacggcggtagggttaacaacataggtttaatgtctgacagacaaaattatctcatattcagtgcggtaatatttcttgctggggttattttaacaatattcggtagcaagaatgggcagtcttctggtgttgatgacattaagtgcaaatactgcgcggagttaataaaaccagatgcagttatttgtaagcattgtggtaaagaggttgaaaaaataaaagtaactgataccactgctttcaaatttacccccactgaaaacgatagcgtattctcattcagagattggccaccagagatttttattacaaatggtgagataaataaaaatactgtctatcagtttatttacgaattgaaaaaatcaaatcccaaattagatccgccgggtatagcgatgaagttcttcagagatttttcatccatagaaaaaggactgcctgataatttaacggatgagtttaaggaattaagaaaattagcattgcaacaataa

SEQ ID NO: 281405 - DNA, 759 bp, Morganella morganii
atgatcacaaatgattaccagaagctggaaccgggtaatgccgtccggctttttgaggttgacggtactgccttcggtgcgccggatgttttgcggttccatgcatacaatattcctcacacagaggcagagattactgccgctggtggtgcccctgaaaagctcccggcaaaatccatctggtggcagggcgaagagtaccgagcctggccggtgcagatcgaggggctggaagcatcaacaaccggctcaggtgcacagcctaagttatcggtggcaaatctggacggttctgtcactgcactgtgtctggcctacgatgacatgctgaaagcgaaagtcacgatacacgataccctggcgcactatctggatgctgataatttcccggacggtaacccggcagcagatccgacacaggaaaaagtctcggtcttttatatcgacagcaagtcctcagaaaccaatgaggttattgagtttgatttagccagcccgatggatttgcagggggtactgatccctacccggcaactgcatgcaatgtgtacctggtgcatacgcggcaaatacaaatccggtgacggttgtgattatgccgggcagaacgggtatttcgataagcacggcaaccgcgtggatgacccggcacaggatcagtgcagcggcatgctgaataccggctgctttccccgtttcgggaaaaataatccgattccgttcggcggctttccgggaacctcattactgaggaaataa

SEQ ID NO: 281406 - DNA, 3306 bp, Morganella morganii
atgtcaaaccttgcagatctgcgtgtcggcctgctgctgaacgatgccagtttccgttcaaatatcagcaacgcaatgaaccatgccgggcgtgaaacaaaacgcttttctgataaggcaaagcgggacgcaaaaggcattgaggatagttttaacggcatcagtaaaagcgtcaccaatgtggccggtaagctggcactcctggccggtggcgggttatctatcggcagcattctgtctgtttcacggcagtacagccaggcgctatctgatctcagtgctatcaccggcgcatctgccgaacagatgaagcgttatgatgacgccgcccgcagtatggggcgcacgactgagtttggtgccatcaaagttgctgatgcaatgaagttactggcatccgcaaaaccggcactgctgaatacagctggtgcgttggaagaggtaaccgcgaagtctatcaccctggctcaggcgtccggtattgaccttgtcgatgcggctaaatccctgtctctgagtcttaaccagtacggggcatcggcattatcagcagagcgttacattaacgtactggctgccggggcgaaatacggtgcatccgaaatcagtgaaacctctgaggcggtgaaaaactccggcaccgtggccgcacaggctgggatcagctttgaagaattgaatgcctcgattcaggtactggccgagaagggcatcaaaggtgccgaggccggacggatgctccgtaacgtgatccttgttctcgagcgctccgccgataaatcactgcgtccgtcagttgtcgggttgggtgcggcgctggataacctggataaaaagaattactcaaccacggcgtcggtaaagctgttcggcagagcgaacgtgagtgcggcagtaaacctgcgcgaaaacacggataagttgaaagaacttaccgccgcactgaccggcactgacactgcgtatgagcaggcaaatatcagggcgaataacctgaacggggatctggaattactggcaacctcatttgagggactggcactctctgtgggtcatagcactgacgggccgataagatcaggtattcagaatgtcaccgccgctgtgaatggactgacggataatttctcaacattagccagtattgttacatatgccgttttgccggtcatggcatccagaatgacgctgggtttacaggagcaggttaagagttggtacagcttagagtctgcaaccagaagcaccgcaaaagcacaggctgaggcatcacgaaaagctattactgatatagacaaggaaataagcagtattaatgaaagagggaaggtattaactcagaagcggaagttggcaataaaagaaggcactgaacttagcggttttaaagaaaagcgtttatcactggagcgtcaggaatcggagctacttaagcagcgtgaaatccatacgcgcaggctgtctgttgccactaatcagctctcaattagccagcgtgcactgactgtgtcagcatcggcaatgcgcagtgtttattctgcgctgggtggccctgttggagtaatcaccatagcggcttctgcgctgtattattttcataacaaagcccaggaagccagaaaaagtgcgactgacctaaaaaatgcaattattgaaaccacagatgcattgatgcaactgtcaaccactcaacttgaagtaaaagttatcgattttaaacaagcattcctcgagcaaaaaaatcaggtagcagaaattacttccgagttagagcaggtaaaaatgcaccgcgaggtgactgatgggttctggggggctggtggtacaaataaaaaacgtgatgaaaaaatagcgcgtcttagtgcagatcttgaaaatgccacaaaaaaattatatgacgttgatggtgttaatttaaaaaatgctgaaacggccttggaaaggctaaaatccggtgaaaagccgccggtaaaaaagaaggaagatgacaatccgccaccaaaagaggatcctattgcctccactggtaccaatgaattacccgataccaaatcaggtaaaaaagagcttaatcaatacaaacagttgcgtcatcagattgagtcagaacatgcaaccagccttgaaaagatttccctgagtgaatcggaaaccttggacaaactgaaagagctgcacaaatcaggaggcatgtctcagaaagagatgaaccggctttcgcttatcagtgctgagaattatcagcggcaacgggttattctggctgaaaaatattctccgacggcggctatgctgcgtgaggaaagcgaagcaaataaagagcttaagtccctacttgaatcacgcctgctgacagaggaagagtataaccgggcccgtcttcagctgacacaaaccaatcagcgcgaccggttgtcacagcaggcaaaagacctggctttgccgaatatctcacttgccggtgaagttgatcctgttgtgcaactgcgtaatcaactggaagaacaaaaggcgctttatcaggcgtattaccgtgatggtgttatcaacaaagagcggtatgaagcactggtggcgcaggcatctgagaaatcaaaagaggctcagattcaggccgctaaggaattgtatgctggtcagggtgcctggcagaagatgcagattaacctcattgatgctgttgagcaaaaaacggcgggttccctggccggaatgctgacaggaacaaaggggttttcggagggcttacgcgagctttcagcatcactggcggaatctatcattcaggatctgataaaaattgcgattcaggggcagataacgaacgccattaccggattgttcggtggatttggtggcagtacagccaacggatcaacggtccctatgccgccaaaaaatatttccgttatgccgcatgccaaaggtggcgtacataactctcccggattaagtcagtacagtaaccaggtcgtcagcagcccgacactgtttgcttttgccaaaggcggagcaccaaatgccgggctgatgggtgaggccggtccggaagctattatgccgctgaaacgcggcccggacggaaatctcggcgttaggatgtatggcgggaatggcgatacctcctcgccggtagttcatatccatattgacggtgaaggaaatcagcaggttcaggcatccggtggttatgagcagttcggccgggaagtagggcaatttgttgaccagcgctttcgcaaactgatggacaaggaaacgcgcccatctggttcagtctggaatctggttaaggggggcagatga

SEQ ID NO: 281407 - DNA, 321 bp, Morganella morganii
atggcaatcgtgcattacaactcaaaacacaatttgtcagcagtaaggatagtagcagccaccaaacgtacgagggagtcaagtggcgtgcaattcaatattattgtagaaataacaccaactaatcccgttgaaaattcgacctattatttttattcggcactgacaaagaggtggaacgaggttaaatacactattgttacgggtattatcaataagtatgatacttgttatatccttaatgatggtgatatctttcaacttaatacaattaataactgtgatagttacaacaagaacttaccattcccatttttataa

SEQ ID NO: 281408 - DNA, 549 bp, Morganella morganii
atgaaactattagctccattaggatatgtaaggataaagcacagtgaaaagcgctggtacgatttttatatacctgcgttattggctgcaatagctttgatagcgtaccattttattggctttaagctttcaggtgctagcgggcttactactcaaattaatgggctgatacaggttctaattggtttttatatagcagctttagcagcagttgctacgtttggaaactcatcaatagatgaggtcatgtcaggtacgccaccaactataatagaagaataccgagggctgccagttaaagtgtctttaactagaaggcggttcttgagttatctatttggctacctggcattggtttcattatgtttgttttgtttgggattaatcattaacttgggatcaatatttattacttcactggttagtaagagtgtattagtattcatgaagtatatttttttgtttatctattctttcttattaatgaatatcataactaccactttgcttggcttatattatctttctataagaattcaccaagattga

SEQ ID NO: 281409 - DNA, 936 bp, Morganella morganii
atgctatcgagctatgagagatgggtcactgtatttgattttttgattcaacctaagcatccagcctcaccggatattgaattttcagatgtggtaaaaaggattgagaaactttataaggaaggaagggctgttaggctttattctaatgaaacgcgtgcgtttagagtctctgattttcaacatgataagagtaaaggtcttttagttttattgattcaactaagtgataaaaatgcaacagaccctgcgttttcagatctagaaacaggagcattgcgtgtagagccgaagcttgctggtgaagggatagctgttgcttgtcatttaatgataaaaacgaagactttaaagaattcaaaagatttttatttaggtttgcttgagaatgtacctgggattagtcgatcaactttagagccgttttttaattatatcttaaaggaatcctttgagggtgttgattttaaaaatccaacaactcggagtgtttgtaaattatatccgacagttaaatttatacaccatgcttcaaaaaaacttaaagaattgctttcgggtagtaaaatgcaacatatcagattggtgagcacgagtgttgcaaaagaaatggataaagatccgtatgcactggttatagaaaaagcaatgaaaattaaagtagtaaagcaaccctcagcgaatgaaaaaatgccttttatacaaagaatgagggcttggggtagcaacaaaggctttaataaattaatgattagttataccaaggaaggcaagcaagatacgattgagcttgatagaaatgaagatgcggcaagtaagctttttggaaaatcagagagacttagactctctgatagcattggacaatgcgaggaaaaaattcattcagaaatgcttagtaaaatgaaagaattgatgactaaagaatttaagtaa

SEQ ID NO: 281410 - DNA, 432 bp, Morganella morganii
atggaaaatgattatgctacaccgctttttaatgcacgcattactcttggtttaacaaccgaagaggctggccagtatgtgcatgttactcgtaagacctgggagaagtgggaaagactggaggcatcaggtaaagcaccgccgcaagccaaggttgagttatttttttcaaaattagccaacttgggtaaatctaaagattacggtcatatggttgttatttttgacgaaaatttaatgcacttaggtgttgttgcagaaagtaattatctcggatttactgataatcataatggcactggagtgataaaagccatgaccattgactatttcacaaagcgacttggggttaatcgcatccaattcccaattagtgaaaatgctcacgtggttaaattctgtgaatcccacacaccaatctatgaagattag

SEQ ID NO: 281411 - DNA, 570 bp, Morganella morganii
gtgaacaaattcaaacacctgatgattgaccttgaaactatgggtaacaagccggattccgctatcgttgctattgctgctgtgccgttcgacatggtttccggtgtaactgatgatgcgcttttttatgaagtaatcgaccttcgcagcagcgaaaaatacagcggtagtatcgacgctgataccgtgctgtggtggctgggtaaaagcgataatgcccgtggtgaaatcattaacagcgaaaaggccattgaactgcctgacgcactgctcggccttagttcattcgtttctgagttctgtgaagaacgcgtacaggtatggggtaacggaagtaatttcgataatgtgatcctgcgtgctgcatacgaaaattgcgcaataactccattctggaaacactggaatgaccgggatgtgcgcaccatcgtcgagcttggccgcaatgccggcatcgacccgaaaaaagatttcccttttgttggtgaagcacacaatgcactggatgatgcgttgcaccaggtgaattacgtggtcgcaatccaccagcatttattaaaaaacctctaa

SEQ ID NO: 281412 - DNA, 660 bp, Morganella morganii
atgaaaataaacatgaacgaacgaataaaagctcgcagattgcagctcaacatgacccagcaatcccttgcaaaaattctaggggtttcgcgtgtgtctataaccaagtgggaaaccggggtgacaaaaccagacggagaaaatctccatatgctggctaaaactcttaacgtctccccagaatggttattgtttggagaaaatgaaccactttcctctgaattggtatccacaagaaagcccgtaaccgtcagacaaattcctgtcatttcggcagtccaggctggagaatggacatcgacttactcagcagcaactatcgatgatgtgatgagatgggttaacaccacagcgagagtgtcagatagtgcttttggtcttgatgttaaaggtgattcaatgacaaacccaatgggatcccctaccatcccagaagggtcaaccgtcattgttgaaactgaatacggatgccacgatgatctatatggcaaaattgttgttgcaatgcttgatggatcttcggaagcaaccataaaaaaactagtttgggatgctccatacacctacctcgttccactaaaccccaacttcaaaccaattatcgtaaacgggaattgccgaattatcggcagggtcgttcaggttattcaaaatatctag

SEQ ID NO: 281413 - DNA, 204 bp, Morganella morganii
atgttaaaacaagacgttcttattttttttggcggagtgcaaaagacggcaagggcactaaatataagccacccggcagtgtgtcgctggaaaagcgtgattccagagaagcaggcactaattatcgatcgcatcacgaaagggaaattaaagtattccccagccctttaccaacagcatagcagcacagaaaagcacggttaa

SEQ ID NO: 281414 - DNA, 465 bp, Morganella morganii
atgaagaatgaatcactgaaagaagtcgtaaaaaagatgtgctgtgccatgccgggtgggcgggaagcgctggccggtgcgctggggatgtcactgacgacattcaacaacaagctgtatgagaagaacggttgccggtttttcgacaatgatgaactggaggcaatggaagatctgaccaaaacccgtcacctggtcgaataccacatggaccgccacggcatgacaccaatgccggatgtgtcacccgaagatatcgacaaagttgaattatttgatatccggatgaccctttcagccttacgggcagatctggaattacatatcgataaaagtctgaaggacggaaagttaacccgggaggaagtcagggggatgtataaaaaatcaggaaaggtatttgcttactttttggggtttgtcgggagtcttgacgctgtattcggggttccggatgaaaagtga

SEQ ID NO: 281415 - DNA, 888 bp, Morganella morganii
atgagtatgattttaaccgcgcgcgccttgcagataaaaactggcaacgcgctgcgcaaactggtgctggtaaagctggcggataacgccaacgaccagggtgaatcgtggccgtctgtgccgtacatcgctgagcagtgcgaaatgtcagagcgttcagtgcagaaccacattaatgccctggtggaaatggggctggttcgtatcgaatcccggaaatcggccaacggtctgaaccagtcaaatatctatcatctgcgcctgaatactgtcgttgtgagtggtgaatctcctgcaccatatggtgcaaatcctgcgggggtgagtggtgcaaatggttccgggactggtgcagcagattcaccaggtggtgcaactggttccgatagtggtgcaggagctgcacccagaatcagtaatgatccagtcatagatccagataataaaaatattaatcctgttcgcggaaaagccaaaagcaaaaccgtgatgccggaaaactttgttccgacaccagaacacaccgagcaggccaaagccgccggtctggatattcaggacgagtttcagaaattcagcgactaccacgccagcaagggtacacaatacgctgactggaatgccggtttcagatactggctgaatacggccgccggatttaagcgcaaagcaaattcagagaacatcgacaccacagagcgcgaagaggcattcacccgcctgatcggctcccgttcaaaaccacgtaaccgcaccgaggaaatcgcgctggaaatggccgggaaaaccggcatccggacgcagaccgagtttatgggccgcaagacgtggattgatatctggaaacaggccacagagcaggccgcaaaagagcgggaggcagcatga

SEQ ID NO: 281416 - DNA, 249 bp, Morganella morganii
atgaacatgcgctcagaaagcaaagagatttacggcgtgaatgtgttcccggtgctggctgtcctgcatcagatccataagcaggggatattgcgcagtctgcgtaaaaactggaactggcgtaaccgtgcagtcaaagcttgtcatcgggcaaaacgtccggacttagtgcggtttttcaatattgaacatgagtattttttcattcgcaccgaagcaaggcgctaccagcgtgagggggttatctga

SEQ ID NO: 281417 - DNA, 201 bp, Morganella morganii
atgatatttgatcttaaattaccgcactggcagtcactggacacctgtccattctgtggtggtaaagctgaattatcttcggatggtgacggggtgtatgcaggatgttcacagaaagaatgcctcattcagccaatcacgcttacatacccgacaaaacgccaggcaatcagagcctggaatgtacgccacaaccaataa

SEQ ID NO: 281418 - DNA, 165 bp, Morganella morganii
atgactactgaacaactcgcagaattaaaacgcattgcactggaaaaacaccgtgaagctgaaaaggcaatgtatgcctatgcaaaagagtgtgacggtattgagcgcatggaagcatttgaagcatatgaaaacatcagaacagcgacgagggtgcgggaatga

SEQ ID NO: 281419 - DNA, 432 bp, Morganella morganii
atgaaaaccctaaaaacgagtgagctttccggtcgggcgctggattatgcggtagcactggcaattggtagttatgagttaatacctgttccgcctgatgctgacggaaaaaacgaaggatgggtattagcgccgaagaatttactatctcgtgggtataccttcccgccgaaggggaaggtatcggttgatttttttgtccgcaagtattcgggtgattgggctgaatgtggtccgttactggaaagctactgcattgagttgtttattggtgaagatttttaccgcgcaaccagaacatctaccgatcctcgcgataacactgattaccctcgaggctacggaagcaactataaagatgctgtttgtcgttttgttgtgctttatcgccttggtgacaccgtggaaattccggaggaattattgccatga

SEQ ID NO: 281420 - DNA, 438 bp, Morganella morganii
atgataaaaactgacacaggcattattactatcactgtggaacatgaccccggatggcttaccgcgcctttcccatgccatttccagtgctctggtggtcagcctgctgtccggagagaacgacattgcccaccccacgggtttccgcgcaaacagttcgagtaccacagcaaggtaagcccagcgtttacctgtccagatatacgtcacatcgccgcaccatacctggtcaggcactgtcactgcaaactgacgtccgaggtgattcgggatagcaatatgctcgtgtcccccacgtttatatcggtgaacaggctgctgacaactcaccagccccagctccttcataagacggccggcaagccatcgccccatccggaagcccctgtgtgtggccattgcggcgatacttcttgcacctgcggagccatgacttag

SEQ ID NO: 281421 - DNA, 1086 bp, Morganella morganii
atgaaattaaataaaatactgaattgcatgttagccgcactgctgattaccccttttgctggtattgcctgttcaagtctggcgattacggacagccagaatcaggtttatcagggcagaacgctggaattatctgaatcactaccttcatggataacgtattaccccaaaaatactgtttttcagaaaaaaacaccggatggtaaaaacgggatccgttatcagtctaagtacgaaattttggctgtttcgacagacatttactttgatggtgatgaccacaatatttttcagggacttaacagcggaggactttctttcagcgctaatatgatggatgaagctgagctgctgccgctcaaaccggctgactatgataaggcgatcccggttaccgcactcggagagtgggcgcttgctaatttctcagacgtcggggaagttaaaaaagcggtcagtgaaggttatttctgggctccggaattaaaaaatttcggcaacctgaaatcacctttccactatgcattttatgacaaaaatggcggtagtattgtggtggaagccagtgaaggaaagctgcatgtttatgataacccgaccagggttatgaccaacggaccggattttccgtggcatctgaaaaatctcaacaattatacacaactgactaatgtggatcgctcggtggcaacactgggtaacattaaggtatcgcagccggacagtggtattgcaacatctgctctgccttcatctgatacttcagtgggacgttttatccggggtgtttattattcaacttatgctcagaaagccggcaattcttctgaggctatgaatacactggcacatattatgaaccgtttcgatcgtactaaggatattaccaccgatacgatgactgaaagtggtagtaataccggaattgtcacatctgaatacacggtctggaccagtctgtctgatttgagtaacggtgtaatgatggtcagaggctataaggatattaactatacgtcctattcatttgaacaatttaaaggtacagataaaccggtctttaagaaaatcaatgtgagtaattga

SEQ ID NO: 281422 - DNA, 324 bp, Morganella morganii
atgattcgccggaaaatattttttatcagacatcgttaccgcctgccggacggatataataagtacgtgcgtgcaatactgctgatggtgctcctgctgtctggtccggcaggatgtaaccgggtcggtgcaccttcttttacactggtcgggtcatttgtcccctactggatactttgtgttatcgtggcattaatccttactgtgattatccgcgccggtttcatcagatggggtctcgatgatgttatgccattgcggttagtggtttacatctgcctgatgctgacgctgacatttcttttttctttactctttttatag

SEQ ID NO: 281423 - DNA, 1053 bp, Morganella morganii
atggccagtataaatcaaccgggaatcaggcgtaaaattgcgatcattattgctgtggtgatcattatggctgcagtcattaccggctggataaccctcagaatcagcagccttaacccactttctgaagatgcggtgattggtgcggatatagttaatatcagcagttcagtacccggccgtatcacttctctgaatgtcactgagaacggactggtcagaaaaggggacatattgctgactattgacccgtatatgtatcagttggcagcagaccaggccagagcagatctggaaatcgctgaagcgacaatgaatacccagcaccggaatgtggtcgccgagcaatctaattcaggtatcagtcaggatcagatacgcagtgctcaggcgaatctgaaactcgcaagccagacactggcccggctcacgccgctggaagcaaaaggctatgtcacacgccagcaactggatgatgcggcaacagcaaaacgcaatgctgagattatgttacaacaggctgaaaaacaatctgttgccgctgaagcgcttgtcagcaacacagatgctactgaggctctggttcgtgcgcgccgtgcagctttggctgttgccgaaagagaactggaaaatacggtgatccgggcccctcatgacggattagtcgtcggactgaatatcgcacccggcgagtatgtcatccctgatcaatctgtttttactctgattgataaccagcactggtatgcgtctgcttattataaagaaacggaactgaaacacataagtgtcggtgattgtgccaccgtatatgtgatgcaggatcgcaataaaatgatgaccggccgggtacagggaattggctggggagttatctcggaagatcagattaacctgccccgcagtctgccttacgtgcccaagtctctcaactgggtcagagtagaacagcgcttcccggtccggattatactcgataatccggatccccggttaatgcgggtcggtgcaacagcaactgtcacggtccgaagccagcatgattgccgataa

SEQ ID NO: 281424 - DNA, 1896 bp, Morganella morganii
atgattgccgataatacgtttcagagtatgttacgtcaggttaaggcggatttgcttcccttccccgggaggctggcaacggcctggcgcatcgggttattaagtgccctgatgtgctttgtggccatgttttacgggataccggaatccgctatcagttgttacctgattttatttgttatgaaacctgatgcggtcatcagcatgatcatggggggagccattcttattctggtcacgctggtcgtaggcattatactgctgattctgccttataccctcgagtctgttcctctgcgaatggcggtcctgattatcagttcatttttctttttatggctgggctcagcctctcagctgggagaagtaggcagtatcatcgctctggtcattgcatttattatggggcttatcgggatcgcaccaaacggagagctggcgacccgtgccattctctatgcctggttgatggtagcctcaccgatgctgttattgatcgtgttcaacctgctgataggacgctcacccgtaaaaattgtgtatgtgaatctggctgagcggttacgtctggcagaaacagccctgcgtgaacctgatgcaatccatcttcgccgggtacaaattgcgctggctgaaggtcaggccgataacgaacaacgggcaatgctgatccgggtcttccgtctgggaaaaggaagcgaaaatacctggctggcagcggcggtcaataacagctatcgtttgttactgacagtttccgggctggctgatactatccctgatgcccgccgtctgcaactggcaaaagcctgtcatgatatggcgcaaatactggacagctgtcggcagcctgtttattcatttccggataccggtaatccggactgtgaagttgaaaaagcactgacagacctggctgcaccgggtagtgaccgtctgccatccttaccaaaaacccccttttttgctgacgatgctttttccagtcctgttcactgctattttgccttaaaaaccacgctggccagtgttatctgttatatggcctacaccctgatggactggcaggacatccataccgcgatgattacctgttatgtggctgtgctggggacgactggtgaaaccgtacataagctgctcctgcgaattaccggctgcctgattggtgccggactcggtattgtctcactggtttttttggtaccggacatgagtaatttcggccagctgatgattctggtattctttgttctgctgctgtcagcctgggtgtctgcggggaatgagcgtatatcctacggcgggatccagattggtcttgcatttttacttacggtactgcatggtttttcaccaagtcatgatcttgatccggcgacaggcaggattatggggatactgatggggaacctggtcatctatattattttcagtctgatttggccggcctctattattgatgcagtccgtaaacgtatccgcctgacactgcaggatctggaggctctggcggcaataccctgccgggagcctgtgcgacggacgatacagacagcacgcattgaacaaagagtcgccagcgcccgcgattcgctgcggcttatgccgtttgaacctaaacatctgcggccgtcaacggctgagtttcatcgactggaaaaaatattaatcacccttgatgaaaccgggcaggcgctgttcatttcacagcaggataaccccgggatccggctgcgtttgcaggcattgtatctgagcacgcagccgccggctgataaacaacagacggtaaaaatatccggtgaccaacctattcccggagcatcagtgtgctcagacacagattcgcgggtagaacacaacttattaagactggaaggattattaaaatga

SEQ ID NO: 281425 - DNA, 1503 bp, Morganella morganii
atgagctggcttcacttaccaacagacaagattaaggccagaatcccccctgttgtcagcatattgttccttctcaatggctgtgtgaccgattcggtaaaccgcgctccggtatccccgtcggtaccgtggcacggagagcagcaaatacaggctggtgaacaggtccgtctttctctgtcaccacagacagaagctgacctgccgcaaattgatacagcacattcctaccagcttcctgagttaatcaacatggcccagctgaataatcccgatacgcgtatcgcctggcaacaagcccgtcaggctgcactggcggtgggtttaacagagtcactctttctgccggtgatcactgccagcgttgtcggcggataccagcattcacgtacccccttatctcatactatcggaaatcagagtaacctggagacgaattcacatgaagtcgtgcctgctttagtacttcagtggcttctcttcgatttcgggcagcggggggcgattatgaaggctgcggaacaaacatcctttgcggcgaatatgagctttaacagtattcatcagaagatcatttttgatgtaatgcgaacttactatcagtatggtgctgcacagacacggagagtgaacaccaatgagatgctgacaaatagtcagaagattctggaggctgcagaagcccgcagaaaacaaggtattgcaacaacagttgagctggctcaggcccgtcagttagtcgcgcaggctgaaatgaatctggtaatagccggtaataacgagcgggaggctcgtcagatgctgtattctgccctcggtattcccgccaatacccaaatgaaagtggatttccctgcgttcagcactgatctcacaccggttgatccgccgtcaccgaaagctattgaacaggccctggcacaacgtcctgacgtgctggccagctatgcactggcgaaagcagcaaaagaagagatcagtgcggcagaagccgactatttgccgaaaatttatctggcaggagcgctggctaccgggcacgggcagtttgatatacagggtctgccgtccattggtcagcagacctcagcatcaaacattctgataggcgtgacagtacccctgtatgacggaggcatgcgtgccgtccgggtgcaggaagcacggtccaggtcagattcggcagaggatgtatttaaaaaaaccagggatgacgcagcccgggaaattgtagtggccgcagatattctgcagtcagcaacagcctcaggtaaagcagcctcccacctggtcaacaccgccggggtaacttatgatgcagcactggaagcctataaacacggggttggtacaatcactgtagtgaatgaagcagctaacaacttactgaccgctcagcagatgaacaccgatgctcgcacagaagtgctgattgctgcggctaatctggcttttgttatgggggagatgacccggccggtgacattaacaggttcagactag

SEQ ID NO: 281426 - DNA, 942 bp, Morganella morganii
atgcttcatgattatctaaatgtaatggtgctatttttggtggttggcctgggatgcctgttgacccggaataaatggttagataaatcaagtaatagcctgtttaccaaactgctaattaatgtagctttaccctccacacttattttgtcgatcaacagtgattttacccgcagagaatttctggctttggtacctgatgtcattctgccggtgatggtgattttaagtttaatgatattgtctttttttacagccaaaatcattcagatagaaaagaaagacattggattatttattggcttgtgttcaatgagcagtactatattttttggtatccctattactttggcagtttatggcagtcatggtctgccttatgcattgatgacctatgcatcacaaactgtaatctactggacattaggtctttatctgctggagaaggattcatttgaaaagagcgatggtaagaatatctttcgtgtggtagtgaaggagattattaacatgccgctgatggctttttttgtcggcataactattttacttatggggatacctattcctcaggtcattaatgagttcctgagtactctggggggaatgacttcagcattagcgatgcttgttgtgggagccattatttatctttcgggcttaaaaaaaattacgattactaaggggcttatatctgtcgttatttttagattcattcttacccctgtgatggtagtgttgctcggtaagttattcgcgattgataatgatatgattaaaataacatctttaatttgttctttgcctattcctaataccacggtaattttggctgaaaaatataaagtgaataccgtttttgcgacagagtcgctttctgcttctattgcagcttatctggtatttctgcctgtgattttatttgttattcactcagtgtaa

SEQ ID NO: 281427 - DNA, 465 bp, Morganella morganii
atgaataaccggttatttaaacaagtcatggttgcctgtaccgccagtgcgctggtactgctccctgcatatgagggtgtggagtacaaaccataccgtgatgtggccggagtgctcaccgtatgttacggccacaccggcagcgatattcagatcggaaagctgtacacggactctgaatgcaaggcgttgctgcatgacgacctgacgaaagtccggcgcgcggttgacccgatgatcaaagtgccgattgacgacaatgccagagcggccatctattcatttgtctacaacgtcggcctctgcgcattcccgcgttccactatgctgcgtaaactcaatgctggtcatatcgccggtgcatgtgacgaaatgaatcgctggacgtttgccggtggtaagcagtggcagggtctgattaaccggcgcgagacggagaaagcggtatgccacggaaccctttaa

SEQ ID NO: 281428 - DNA, 438 bp, Morganella morganii
atgttcagcttgctgtcagttgaacaattagaagggcagcgaaaagacaatgtaatcaccgaaaagcaaaaggtgattgataacgcttacaccagtatcgatatttttaatcatgccgccgcagtaaacgccagcaggaatatgcaggcagaagctaaatcacaggagaagcagattgaataccgtaccattatccggaaagagcctacctgtaatctgtatattcctcagcctgtttctgatgggctgctcagccacgtctacgacacccgtgaatcagcaatgcgtttcgctcccggcatcgctgccacccgccgactgacatactgccaggtggttgaatggatagaaccgctgctgacggcgtcggaccaggcgaacgagcagttgatggatatccggaaagcagatgttgagcgaaacggtaagcctcgataa

SEQ ID NO: 281429 - DNA, 294 bp, Morganella morganii
atgaaagatattaattttattgtggggcaaaatatccgtgacttaaggcacagtaatggattgaccacaaagatgttagcccaaatgctgggagtatcacagcagcagatgtcaaggtatgaacgaggtattaataaaatagatgtcagtgttgtatttaagataataaatatatttcatatttcatatgagtctttatttcctcagtcagataccggtgatttttttcagacaaagcaatcaccgctttatatagatgcgatgacataccatgatgaatatccgtcatattaa

SEQ ID NO: 281430 - DNA, 471 bp, Morganella morganii
atgaatttatctgctgaccttttatcaccgttactgagtattgtcgttgcggtatataacggggagaaatttctcccccggttttttgactgtctgctgaaacagactcttcctgtccgggagctgatcatcgttaatgacggctcatcagataataccgcggacgtgttatgcgcatggaaggataaatttccgtcagtcacgattctgacccaaaaaaatcagggcgtgtcagtggcccgaaataccggatttgcgctggcaaaaggaaaatacaccgcctttcctgatattgacgatgttattcatccgcagatgtacagtcgtctgctgcaaattgcccttgcaggacagctggatgtggcaacctgtaacggtacgtatgtttatgaagacggggggaaccccggccgattttcccgcccggtcgcctgcgttccacggggggtatctccggtccggactggctga

SEQ ID NO: 281431 - DNA, 1236 bp, Morganella morganii
atgccgttgttaacataccgttctgtcgtccctctttttaccaaaagccattttcagttacccgggatcaccgcatttctgctcggtatctcactgccggtttccaatgcaatgatgaataccgcactgggactggttattatctgcctgctgcaacgccgggatttccgtttcacggtgccattgctccggcagccgctgatatggctgcccgccctgatgtttactttgctggcgatctctctgctgacccacagccatgactatggcccggtgatgacccgcaaatatatgaaactgttgtatgtgctgccgctggctctgttctttctgacagacaaacagcgtgttgtgctgtttatccgcggttttttactggcgaatgggggggtattagcggtcagtctgacctgcggtgcaggacacatgacgttatggggactgaatccggataatccggtggtgttcagacagcatatcacccagaatgtttttatgtcgtttgcggtactgttgtggctgtcccgcgcatttacacagccggggctgcgttgcgcagcatacggggtcgctgcagccctcggcaccctcaatattctgtttatggtacagggcaggaccggttatgtgtccctgctggcgggtaccggtatctggttattgctgacgttatcccgccggcagcgcgtggcggttttcgtatgcggtctgctggcgtgtctggtctttgtgctgacccccaacaaggcagctgagcgtctgacgctggggtttcaggaggtcagccgctgtgtgtccgcaccggcgggtcatgagtatcacgcctgtgataattcaatggggcagcgcaccgcgtttgtccgcgaatcatggcagctgataaaacaggcccctctgctgggaaatggtgccggcagtttctggtacggcgatcagaaaaccggttacagtgtccataacccgcataatgaatatctgctggcgactgtacagaccggtctggccgagctggttctgtttctcggctggatggcgtgttatttccgtgccgcacggtatcagacacctgcctgccgtgccctgtttattgcattactgggcagttatctggcctgtcatctgtttaattcctttctgctggactcatctgaagggcatctgtttgttattctggcgggcatactggcagccggtgtcgttaaacaccatttacccctgactgacggagccgactga

SEQ ID NO: 281432 - DNA, 1038 bp, Morganella morganii
atgtattactgcccccccttaatacggacactgaagcagcattatccgcaggcttttattgatattctggtttataagggaactgaaaccatactgaccggtaaccgggatatttattctgtctatacagccgaccgcaacctgaaacataacggtatccggtcaccataccggggagagaaagttctgtggcgcaatctgaagcagtggcattacgacctggttctcaatttatctgatcagtggcgggccgccttttattgtctcggcctcagacctgcattcagtatcgggttcagccggaaaaagcgttatcattttctgtggcggtactgccattccgcgctggtcgatacctcacagcaggcagtccgccatacggtactgaaccatctcagtatcctggccccgctgggattttcccgtgtgaatacgacggtcagcctgttctgggggacagagcatgaatggctggtcagacaactgcagcagcaataccatctggagcactatgtcctgatccagccggccgcccgctgggcatttaaaacctggtccccgtcatattttgccctggtcattaatcatctgacacatctcggcaaacaagttgtgctgaccggcggaccgtcaccggatgagcataatatcatacaggaaatcctgtcagcggtgacataccccgatcgtgttgtggatttgtgcgggcgcacggagttacctgacctggctctcctcatctcccgggctgatctgttcatcggtgttgattccgtaccgatgcatatggccacagcgctgaaaataccgtctgttgttttgtttggtccgactaacctgaatcagtggtatccgtggaatgcgccgcacacgttattatgggccggtgattaccggcaactgccggccccgggtgaggttaacaccggtacagatgaacgttatccggatgccattccgccacaggcggtcatacgggcggctgacgattgtctggcagacatggccggcaatacggccgcgccgcaaaaacaataa

SEQ ID NO: 281433 - DNA, 480 bp, Morganella morganii
atggaaaataaattatatctgacaacaacagtattattggccttatcatttatgcagtcagcccgggctgaattgcctgaatgtgaatcagtagtgaagggggtgaatcagcagttagagaaaaaaaataaagtgatgattaaagatgaaaaaaaactggcagctctgctaaaaacccttaaccggggtaacatattaccggctgaatatgttaccacagagcaggccgttaaactgggctggagcggtaaagctgaagattcattgtggagtatctggacactgaacaaaaaactactgggaggggatatctggcgcggtggcggactaccggaaaacatccggtggttcagtgccgatatttatagtgtacggggttttcgtggtccccagcgcctgatttacagtccggacagttctgcccgttatttaacctcagataatggcaccacgctggaaatcctgcctccctgccgataa

SEQ ID NO: 281434 - DNA, 231 bp, Morganella morganii
atgactgagcacgatttgcagtacctgcaggatatggcgactatcgcaataactgatcacagcagcagaaccaaaggccagcctgaagcatttgagggatttgtattggcaaacacaacacgatatctgcgcagaaaacctcctgatattactgtgaatggcagaaggggaaaccggggaggtatcctgcaggttaatacactattccgtgttacttcacccgcctgttga

SEQ ID NO: 281435 - DNA, 153 bp, Morganella morganii
atggaaccggatgaggaaggtcagtcctggctgttgtattgccatggtaaagaactgaaattctcccaccagaccgtgatcacagtctatgcatggaacgaaatgcaggaacggattaaaggccgtcaggtatcgaagaaagtgaaggagtga

SEQ ID NO: 281436 - DNA, 243 bp, Morganella morganii
atgaacgctgcacaaataacgcagagagtgccttgctggcgtgcattttcacctgtgtgccgtcagagtctgccgaccctgaccggaatatctgaattagtaatgtcgttctgcgaccgccgcctagagtgcgcagcaccagccaccgtaatacctgcctgtggtcagatgctgctccggatgggctgcactgccaaccataccatcgccctgagtcactccttcactttcttcgatacctga

SEQ ID NO: 281437 - DNA, 438 bp, Morganella morganii
atgaaacgtaagtcagttctcccgccggtagctacgacgatcactgttatttttctgatgactatctcatttattcttggcgctgcgcttactaagacgacagactttgatcctatagagcaaacgaaagtaaatgtttccaatttcctctcatatcccagtgcagcagaatttaaaaatatgacttatttcttcaataagaagaccggggctggaggagatttaggttacatttgcggtgaagttttcaccttcaataaggaagagctacccgcaggattcaggcgattcgtagtaaaagtatatgagccgcccaaggggctgacacttctctctttccctgttattgaggacggagatgatatgtttttatctgatcggataggcgaaatctgggatatgttctgtcataacaatcaaaacgaatattcacaatga

SEQ ID NO: 281438 - DNA, 144 bp, Morganella morganii
atgaaaactctgtttgtctgcttcggccttgcgcgcgtcggtattaaaacgagtaaagttttcattgtggagaatgacgaagctgatcggcagcgcatggactgccggatgtactgcacaccatccggaggcggcctttgctga

SEQ ID NO: 281439 - DNA, 324 bp, Morganella morganii
atgaaggatggaatttactacgttactttccgaagtaacctgcgagacgttggaaatggcactgtagttgtaaaaaatgagaccgttaacggtggtgactttgcatatgtgtatagaggctctgtcaacagaaaccaggctattctcatggtagaaagacatgataaaacagcaacatcggtatttggaaagattgataaatttaatcttattttaaatgtggctgagccagggaatggttatttactgaccggacatattgaaggtatgccgcaaatgcaaatttcaataagtgccaaatttatcggagatattaagggataa

SEQ ID NO: 281440 - DNA, 1575 bp, Morganella morganii
gtgaataaatacaaaatcagtaccaggctgacggccggattcggggtactcattatttgctcattactgatgatgatcagcgggatctggcaattatggcagacggacaaaaatgtacacaggatgacggcgtttccggtattgaaagagcggattgtggctgactggtatgcggctgtcagtgccagtactcagcgtgtttctgcacttgcgcagagtaccgatagttctctgggggagacctttgcagccgagaacattaaatcaggtaaagcggtctctgaattactgagcagattcagcgaactggtaaatacgccggaggaggaacattttcttaccacactgactgatatccgggctgcctatgtccgggcccgggacgaagtcacgtcggcaaacaggagaggtgagtatgatgttgccgggcaacggtattccgcagatttcataacagccgctcatgattatctggggatactgaatgagattcgggattatcagcgggacactatcagtctgatgaaatcggatatcgataaaaaaacgacagatggttatatttttctcggattactgggcttcatcattaccgtcgctggttccctgatggcatggcggctgagcctcagtatagtcacgccgcttaacagcgcgacgcggctgaccaaatcggttactgagggtgacctgactgcagaggtctgtatccgtggcagggatgaaactgccggtctgctgcattcagttcaggagatgacagttcggctgcgggatatagccgggaatgttcggcagggcgccgcagcagtctccggagcggcaactctgatgacggaggcaaatacggagctgtcaggaagaaccgaagaacagtctgctgcactgcaggaatctgccgcggctattgagcagttggcctcaacggtcaggcgcaatgcagataatgccggtcatgcggagttgctggttaaaacaacggcagagcaggctcgctccggtgctcagctgatggaaaacgtgattaaaacgatgcgggatattgagtctgcatcggacaaaatcgtggatattatcgctgttattgacggcattgcttttcagacgaatatactggctcttaatgccgcagtagaagcagccagagctggtgagcaggggcgcggatttgcggtggtggccggagaagtgcgtaatctggcacagaaaagctctgattctgcaaaagaaattaaaatgctgatcggtacttcagtacaaacggtggaagcaggacatattctggtggataaagccggagaagcgatgacagaaatagtcagcaatatcctgcaggtaagcgatttggtgactgaaattacagatgcgggacgagagcaggcacagggaatcgaccagataagtgtggcagtgagccagatggaacagtcaactcagcagaatgtgtcgctggtcagtgaagcatcttcagccatgttgtcacttcagcagcaggcagaacaactggagcaggtggtcagtatattccggttaccggatgattccggaatggctggtgaaaaaaatgacggatga

SEQ ID NO: 281441 - DNA, 135 bp, Morganella morganii
atgataaaagttaaacagaaagtattaaatgaaattatgataagaaatgagaaccggtgtgttttatttaaccagatactcaaacggatactcataaccccaaaaaataagaataagaaaatcatagttagttga

SEQ ID NO: 281442 - DNA, 456 bp, Morganella morganii
atggttctttctgccggttacacattcaatgccatgtctgtccgaaaacacccattacaggcagacaatatttcactgaagatatccgtggtacaaaacggactgattaccatcggttcaaaaaccagacgccggtttgtggacagtatggtaacgcccacaggacaattcataaaagtccgtttttcatcaccaatatattataccttttatagcttttatagcttttatagcttttatagctttctttctgttgtcagtaatccgggcaataatattacgacaatgaaaaatgtggcaaaaacaatagcgaaaaggctctgcggggtactgaataccgaggctcttaacagtaagatcaggttgctgagaataaaaaccgggggataccggaaaagggaacgttttaaaccgggagtagcatttcacttcggaaagccggatatcagtttttaa

SEQ ID NO: 281443 - DNA, 1170 bp, Morganella morganii
atgacaactttcacccctccattcagagctgatgttgttggcagctatcttcgccctgaatatttacatacggcgagatataatttcactaaaggtgaaatatcccgggatgaacttgagcttattgaaaataaagcaattattgaattgatcgggaaacaaaaagcagtaggactatcagttattacagatggtgagtttcgtcgtagttggtggcatttagattttatgtggggtctgagcggagttgaaaaatcaactctgtcaaaaggatatgaatttaatggacttgagacaaagcctgaaaccgctcgtctgaccggtaaaataagtgggatcaaccacccttttatccggcattttaaatttttactgccttttgcggagggagatattatcccccgcctgacgattccggccccggctcaattttttaaagaactatatcggcctgaaaatatagaaagtacccgacaattttaccctgagacagaggagttggttagtgacattgctaaggcatatcagacctttattgttgaattatatcaggcggggtgtcgtaatcttcaactcgatgattgtacatggggtatgatggttgattcacgctaccacaattcaggaattgccgaaaaagagcaaggcttaagctgtaattgccattcaaatcaaacgattatcagtaatgacttaaaagctttagctgaaacattactgatattgaataaccaggctattttaaatgcgccggatgaccttgttttgacaacacatgtctgccgcggaaattatcgttcaacatgggcggcaagcggaggttatgagcctattgccgaagtcctttttggccgtgaaaatgtatcagcttactatcttgagtttgatactgaccgggccggtgatttctcacctttaatacacgttactcagggtaaaaaagttgttcttggcctcatatcatcaaaaacaggaaaacttgaaaataaagctgaagttatcgcccgtatttatgaggcagccaaataccttccattagatcaattatgtttaagtacacaatgtggttttgcatctacagaagaagggaatgcgttatccgagcaacagcaatgggacaaaatagcgttggtgagcgaaattgccaaagaggtttggccggataattaa

SEQ ID NO: 281444 - DNA, 753 bp, Morganella morganii
atgaatgctgttgaagttaaaaatctggtgaaaaaatttcacagccagacggtgttgcaccatattgatctcaaggtgaaatccggtgaggtggtggcgattattggtcccagcggttccggtaaaacaacattgctgcgcagtattaatttgctggaacaacctgaggccggcactatcagtgtgggtgatattaccatagacaccctgggttcgttaaaccggcaaaaagggttaattcgtcagttgcgccaacatgtgggattcgtatttcagaactttaatctgtttcctcaccgtaccgtgctggagaacattattgaggggccggtgattgtgaaaggtgaactcaaaaccgcagcgacagtattagcgcgggaactgctggcgaaggtcggactgaccgggaaagaaaccagttacccgcgtagtttatccggtgggcagcagcagcgtgtggccatagcccgggcactggctatgcggccggaagtgattttgtttgatgagccgacttctgcgctcgaccctgagctggtgggggaggttctcagtacgatacgtcaactggcacaggagaaacgcacgatgatcattgtgactcatgaaatgagctttgcgcgtgatgtggctgaccgggtgatatttatggattcggggcgcattgtggagcagggaacagccaggcagttatttaccaatcctgagcaaccacgtacgcgtcagttccttgagaagtttctgactcaataa

SEQ ID NO: 281445 - DNA, 669 bp, Morganella morganii
atgcaagaaagtatccaactgattattgaatctttgccacatttgcttaaaggtgcagtatttacgctcgaactgagtattggcggcatgtttttcggcctgctgctgggctttcttctcgcgctgatgcgtatgtcgtcccggctgcctgttcgctggctggcacgtttttatatttccatttttcgcggtacgccactgattgcccaactttttatgatctactacggcctgccgcagtttggtattgagctgaacccggtccctgcagcgatgattggactgtcactcaataccgcagcttacacctcggaaacactgcgggcagccatcttttctatcgacaaaggtcagtgggaagccgctgcaagcatcggtatgacacgatggcagacgttacaccgggctattctgccgcaggctgtccgtgtggctttgccgccgctgagtaatagttttatcagcctggtgaaagatacgtccctggctgcgactattcaggtaccggaattattccgtcaggcacagttgattacttcgcggacgatggaagttttcaccatgtatctggcagcatcgctgatctactgggtgatggcgacggtactttccactatgcagaattattttgaagagcggcttaaccgccgggagagacagccgaaatga

SEQ ID NO: 281446 - DNA, 801 bp, Morganella morganii
atgaaattagcatttccgggacgcctggctctgatggggatgatggtgattgcatttgtggcagggaccagtgtgaagggttatgcagatgaaggtctgttaaacaaagtcaaagagcgcggtacactattggtaggcctggaagggacttacccgccgtttagttttcagggagacgatggaaaactcaccggatttgaagtggagttcgcagaagaactggcgaaacacctcggtgtaaaagcctcgctgaaaccaaccaaatgggacggtatgctggcgtcactggattccaaacgtattgatgtggttatcaaccaggccaccatctcaggtgaacgtaagaaaaaatatgatttctcaacgccttatactatctcaggtattcaggctttggtaaagaaaggtgatgagagtaatattaatacggcaactgacctggaaggtaagaaggtaggtgtcggtctggggtcaaactacgaagaatggttgcgccagaatgtacagggtgtcgatatccgcacctatgatgatgacccgacgaaatatcaggatctgcgtgtaggtcgtattgatgccattttggtagaccgcctggctgcattggatttgattaagaaaaccaaagatacgctggtcattaccggagagccattttcccgtcaggaagcgggtgtactgctgcgtaaaggcaacgaagatttgcttaatgccgttgatagtgccattagcgatatgcaaaaagatggtacgctgaaatccctgtcagataaatggtttggtacggatgtgactaagtaa

SEQ ID NO: 281447 - DNA, 300 bp, Morganella morganii
atgacctcctccctcataaattttgatcttcttgttaccctcatcattcctgaaatacatagattcaccgccgcaatggggcatgaaatgccagcagacgggctgatgatgttgtttatccggggcatgactgttgattacggtgatcaaaaactgttgttccgtgatggccggatgcggctggagctgggcgacgaggtaaaagcaatgaaagaacggcagcaggccgttaaacgagagcagaaagtggcgtcaatattggcgcgtgttgagaagatgagaaaaaacaaccaagtttaa

SEQ ID NO: 281448 - DNA, 2511 bp, Morganella morganii
atggaaatcgaaaaaataaagtatatggtaaacgatatggtccttgaaggaaaagtatcttctgatgttattaatatttttatcaaggaaaatggctcggttttacctttggaaagtattttatgggattacaagctagaattcgataattcaccacatggattcaaaaaaaccttaaaaagtattgtcagcctttataacacttatggtggatatataatttatggtataaatgaaaaaatcaaagatactcaatttgaagtgattggtattagtgaaaatcatatagaccaacaaaatctcaaaggtcaatttgataaatactttgggaaaagaatatctttggtttataaagaaataaaagttaaaattaatgataatgaaaaattaattggattattatatgtacctaaaagaaaacattccgaccgctcacttgctccaataatcgatgcttctgacgaaaaatcaaaatttattcttgaaaaaaacacagtgtacttcagagctgaagacgagtgtaaaaaagttattagcactgaagattttatttttatatcaagcgaaagattctttggagaaacatcgcttcagcgtagaacgcctagtgtatttatagatcataatttacctgacaagtcatttatttgcccagtatttgttggtcgcactgagatattaaatgaactatgggcatggttagcagatgaattacaacactctaaagttttagcagctgacggaggtaaaggaaaaacttctattgcataccagttttgtcagttattaattacaacaagagttgaaggtatagaacaaatcatatggttaacagcaaaaaataaacaattcaaagccgtttttaatgaatacatttctgtacccgagactcactttaacaatatagattctttattaaaagaaatatgtataagaacaggttcattagaacatcaccttgatgatttatctgtaacacagctaaccaaacaggcaaaaagtaaccttaaagaatatccatcatttattgtaattgacgatgttgattcaaatactccggaagagcaaaaacgtatactagatatggcacgattgatttcatctgagtcatcaaaaatactattaactacccgggtcaatagtatgtattctatagattcatcaatattaattcctggtatgcgcggtgatgattataaggaccttatcaatacactatgcgataggttaaaattacagaagttaaataacaagaatattgaaaaaattgaaaaagcatcagagggatcacctttattttcagaatccatattaagattatttaaacaaggtagttctatagattctgctatagctgactggacagggaaaagtggcgaagctgctcgagaggctgctttaaaaaaagaggttagcgaattatcgcttgaagcaaaaaaagttttagtcaccgtatgtacagttggctcatgttccaaaactgaaattagacagcttactgatttagaatacattgatattggtaaggctcttcaagatcttgaccttttatttttgttaaatagtacaccatttattgaatcagagcctcgttacgagtcatcatcctcaattagctatcttatagctaatatagttaatgaattaatcccagaagctcgtgcttttttaagtaaagtaaataaagtttctctaggtttacaatcaaactcaaggaaatatcatccaagagttggtgaagccgttcgtcaatgtaatgctttactaaaaaatatgcgatttatagatgcaagagaaacattacaaagcttaattagtgacccagaatttaaagaaaataaagatttatattatttatctgcatcaattgaatattctgaccctgattctgaaccaagagtagtcagtaacgcatttctaaatgcctatattaagggacagcgaaaacagcaattttttgaacaatggtatgatttttcatctagaaatgactctaactcaaccgttctagatatatgtaaaaatgctattaaatctggcattgatgattttcgatgggctgatagatatattgatattgcggaaaaaatcataccaacccttacaaataataataaaaaaaaggaactattattagattcttataaaatactcattagttctaaaaagaatagggggtatggaaaaaacagggacgaaatgaaggtaaaatcacaaaaactaatagaggaagttataaatatccatgacctcaccaatgatataaatggaaaggttaatattattttatatgcattggaaaatggagatatgagtacattcactattacaaatttaattagtgcctctcagaaatttagagaaagctctataaatgacaccctcctactggataaaattttcattgcactaacttcgacaagtgattcactgatgcaacaagaagtaaaaagaacagctatacttgaatccttaaatgaagagttattaaaacacgccataggaaactag

SEQ ID NO: 281449 - DNA, 1719 bp, Morganella morganii; identical to SEQ ID NO: 275845

SEQ ID NO: 281450 - DNA, 138 bp, Morganella morganii
atgggcggcagtattttccgccgtcatgtgatgcgggtcagtgcgcagcaggatgcacagcagcgcaacccgcagacacagaccggcacggcctacacccagatgacactgatgatgaacgctgaccgcgcaggctga

SEQ ID NO: 281451 - DNA, 1203 bp, Morganella morganii
atgacagcaaagtatttcgctatcctgacgaactacggcgcggcacagctggcgaacgctgtcgcgctgggtacgcagatgaacatttcaaaaatggcggtgggtgacggcggcggcacgctgccggtacctgatcccgcgcagacaaaattagtccgcgaaacccgccgtgcggtagtcaatcaggtatcgattgacgagaaaaacccgaatttcatcattgctgaacaggtgatccctgaaaatgagggcggctggtttatccgtgaaatcggtctgtttgatgataacggcgatttaatcgcggtcggcaacgccccggaaacttacaagccgaatttacaggaggggtctggccggacacaggttattcagatggtgctgatggtcagcagcactcaggctgtcacccttaaagtagatccgtccgtggtgctggcaacgcgggagtatgtgaccaaaagtgttgcagcggcgattcaggagtcagaggccagagcggcaaagacttatcagccgattggtgattatgttctgaatccattctttaagatggaaatgctgaaaaagattgataaggcggatattactcaacagcttggtaatgataccggcaaagttgtgtcacaacatttgctgacgactgaagtcggtaaattacagcctaaaggggattatgcttataaatccgatttaagtaccaaacgtgatgtaacaaatactatttttaaaacactttcataccagccatacgacacacaacttaactcaatttggttctttactaacgaagaaaatgcggattggcgccagggtatagcaagaagccgggacggtatgacgggatacagtaatttccggtcaggtcattccggtgatgttgcgcatacgaatgaattacttgggttttatcagcaatggcaggacgtaacaaaagaacgtcagggcggtgttgtttataacaataataccggcagaccgatctgtgtgttcgtgagaaccaagaaaagagaaacaccccatgcattaggtgtaggcgggacagttcagggtatcgccgttggcggtagctgggctggcgcaaatggtcaggaaatggaattgtcctgtttctttattgtgccccccggacacaattattccgcagattcatttctgggtaacagtggcaattttattggttattggtcggagttacgttaa

SEQ ID NO: 281452 - DNA, 384 bp, Morganella morganii
atgaatacacagataattacccagaaattttttaaggatgcaaccggcaaaatttggtgcattgatatcatgaaaatgaatcaggattcatgggaatcagaaatacaggaagggtggacagctgtcagcaaggatgaagcggataagatagccaatcctccgccgacaaaagcccagcttatcgaacaggccgaagctcaaaagcaatttttgatcgccgaagttcacaccgaaacagaaatgctccgggctaaactggcacttaagcgcatcaagccagacgaagaagccctgttaatcacttggctggattatctggatctgctggaagccgtggatacctccctcgcgccggatatcgactggccgcagaaaccacagtaa

SEQ ID NO: 281453 - DNA, 591 bp, Morganella morganii
atgtgtgatatactaaaagataattacattcgaatattgtacataatagcatgtggcgttattatttatatttgcaaaaaatatcaagccgatataattagcacaaatgagaatatgaatatattttcatattatgcttctgtagctactcttattgcattatttatttcaataatggagatcttatataatgttagtatcacaaaaagtattaaaacccgctctctatttaatcttactaggttcaaagatgcgacaggattaagttatgctcacgaatgtgtatcttactatgatcaatgtctcaatgaccttgcgacaaaaaagtacccacttatggtagctaattttactatagcaaaaaaattacatataagtctcgctaatcacttcatgacagatgtagacaaaaaagagtttaatgacaagaaaacgtcattagatgatttagaaaagaaaatactttcgacgcgtcatgctaatgcttcaaatcctttgggcaatgctcagattaaagaaattcaagaatctttgctcgatataaggcaagcgtttgaagtaaaatacacattcagaatatcagagggttaa

SEQ ID NO: 281454 - DNA, 294 bp, Morganella morganii
atgttaccaaattcaatttcaaattttgtaagtcagttaatttctgagactcagagtggtattattcactggaattatatttcagatgaagataaagtaataactaattaccacgggatgcagatcactttagattatgctttcgattacaacttagaaataggcgtccaaagattaagcatcatacaaaatgatggaagaaattttttctttcctatatcagaatatgattctggttatactttattgaaaaaactttataatgaagctcaagcttcagattttaaattctaa

SEQ ID NO: 281455 - DNA, 897 bp, Morganella morganii
atgtcacgaccatcaattaaaagcgctattatatttaaggctgagttaccctccgccgaggcattaagtaagcatttatcggaatgtttatttactgatattttggaatctcattatttcagttgtgggtttattccaaatatagtcacaaatgaagttgttaccccgattgagggtggttttttattatcatatcgtattgatgaaaaaatactgccaaaatctgttattgcgcgagaattgcacgaccgatcacaaaaactacgggatgaaggtattgagtttgacacaatggcactcaaagaaacaacctgtgccgagttattaaagcgtgcatttgtcaaaagcacgcacgttctggcgttgtacaacgaaaaagaccagtttcttgttgttgcaacttcacggaaacaacacgccagcatggttatttcttccctcattaaagcctgtggatctgtaaaaacagaaacaatccatatcgacggcgtttcaaaaggggttacaacccggcttgataatatgctgaacaataaagactccggtgactgctttggtgataaccttgagattggtagtttcttcttactggagcgaaagctggataagaaaaaagaagtcgttaaatacgatactgatttttattctgttcatggtgagctggaagaaagcctgaataataatttcaacgtttcaatggtcgaactgtcaaccggagatattacctttaaattaactgacaactttacatttaaaggcatcaagccagtaagcaaaattgaatttgatgataaagaccgtgtatttcgttatcgccatgaatgtgcactcatgctcttttatacatcaaatgcaattaacatcctgattgatttactgaaatacaaagaaaaataa

SEQ ID NO: 281456 - DNA, 192 bp, Morganella morganii; identical to SEQ ID NO: 279878

SEQ ID NO: 281457 - DNA, 249 bp, Morganella morganii
atgatcatgcgttcagaaagcaaagagatttacggcgtgagtgtgttcccggtgctggccgtcctgcatcaaatccgccggtggtgggtactgcgtgacctgaaagaccactggaacagccgccataaggtgatccgcatttgccgcagtcgtggctgggatgaccatatccggtttcagaacatcgagcggcagtatttcatgacccgcgccacagctaaatgctaccagcgcaagggggttatctga

SEQ ID NO: 281458 - DNA, 540 bp, Morganella morganii
atggcagttcatacgagtaatactcccggggagtataaagacagttggcaaacaccggagtggcttttcactgcattggatctggagttcggtttttatctggatgctgcagcgagtgatatcaatgcactttgttctcggtatctgactgaacaggatgatgctctcaaatcggagtgggtcagtcatggtgctatctggtgtaacccgccatacagcaacatccgtccgtgggtggaaaaggcagccgaacaatcccgcatgcagaatcagcctgtcgtaatgctggtaccggaagacatgtctgttggctggtttctggaggcactgaaaacggttgatgaaatccgggtaattaccggtggccgtatcaacttcgttaatcccgtcacgggtgaggagaaaaagggtaacagcaagggctccatgcttcttatctggcgtccgtttatcaccccgcgccggttgccttctttcgcgctgaaacaggatctggaatctatcggtaatcagtatctggcagaagtaagggcggcatag

SEQ ID NO: 281459 - DNA, 408 bp, Morganella morganii
atgaaacagcctttaaccctcacactcccgttcccgccgagcatgaacacttactggcgctccccatcacggggagccttaaaaggccgggtgctgatcagcgaaaacggccgccggttccgtctgaatgttatcgctgacatcctggagcattttaacggccggacaccgaaaccggtcaccggtgatatcagcctgaagccggtgctgttcccgccatcgaatcaccgccgggatctggataacttcatcaaggcgatacaggacgcactgacacatgccggtatctggaatgacgacagccaggtaaagcatcttgatattgaatggggtgaaaaagtcgctggtggtaaatccgtggtgacgatcagcccctatgtaaaacgcgcagtatacggctgcgcttaa

SEQ ID NO: 281460 - DNA, 156 bp, Morganella morganii
atgaaaccgccccgtacaacatctgttcgtcccgatgatgaaaagacacttgaagaactcaaagaagaagttgcgtatttacgtgcggaaaatgccgttctaaaaaagttggaagagctgaaaaaactaaaacaacaggcaaagaaaaaacgttag

SEQ ID NO: 281461 - DNA, 690 bp, Morganella morganii
atgacagcacaaatactacagataagtgaaacacaatttaaagtataccggcgcttattcagggatttattgttttctcacggccatacaatatggcccggctatgatatcgaaattgtactcaataactacattgaaaaaaatgaagcggaaatttttgctgaagatgataaatggcttaatgaaaagtgtaccgatttcaaatcaggtttgagtactgaagagccggttaaaacagcaacaacctacgccttatttttatactgcaaatccaaaaaagaatttcttaataattatcatgagaaagcaataagcagtataagtgaagcactttactatctgggatatagttgtggattactttcctccacaccagaaatatgtttaaacgcagcgtttcgttctgattacacactgtcctccgatgacccaaccgtaataaatgaacggaaaataaaaaatgaaatcattattttcctcagagaaaatatacattcgtatcactggcagacatacaaagatgcatacaacgatattctgaaaatgcttataaacaatgccccaaaatccggttttacattcacaccacaaacaccggtaaatgtgactgactggggaaatccgaaaagaccggacagagattcaaaatttttggcacaattatctgaaatattcagttcgtcaaaatga

SEQ ID NO: 281462 - DNA, 210 bp, Morganella morganii
atgaatgattctacggttattctccgtgtcggagacatgataaagaaactgaagatcgccaggtcaacgttatatgactggctgaaccggaattccccaaggtataatgccggatttcccagacctttccggttatccggaaaatcgattggctgggatgagtctgaagttaatgactggctaatacaaagaaaaaaagaccgatgttaa

SEQ ID NO: 281463 - DNA, 681 bp, Morganella morganii
atgaatgaatatgaaccaatattccgtagtacatgtgcattttatctgagatcattacattcaatttcagctaactacttagctgaaaataaaagtgatgaagaaatcaaaatacttaccgataattatataaacaaatatattgaattatcactggaccaggaggaattcgataactattattctgatgtcaatatccataatgttattgacctaaataataaactatcactcgatttatcaattatgtcatacatacgggcaacgcagttttacgcaaaaaatgattttaataatgcaaacatgcacattaataatgctttattccaaatcggattattgcatggttattaccttcaggcattatatgaagagcgatcatcagagcatatgtcaaaggctgcctccgaaaccgagaaagcaaaaaacagcaggcgaattaaaaaggaaattttagattatctgagtgagaacgccaggagatatccttggacatcaattgatgattgcatacctgagcttatcaatatgctgacggaaaaagcaaaagatacacgcgaatttaaaataaatcccaatacaatacgtactaatatcaaaaagtggacacggcgctcatcaaaaagtgaatcagacctggagtttcaggaacagttggctgagctgttttatccggaataa

SEQ ID NO: 281464 - DNA, 1212 bp, Morganella morganii
atggccttattaacaaatgctaaagcgaagcatatacaacccagtgacaagccattacctcacggcggggttaccggactttcacttcatccatcatcagcaaaaggccggggaaaatgggttttacgttatgtcagccccgtcaccggaaaacgacggaatgccggactgggtacgtacccggatatttcagttgcagacgcttcccgtctggcatctgttatgcgccagcagatcactgacggacttgacccgcttgagctgaaaaaatcagctgaactgacacctacaatacctacatttgaagaagctgccaggttactgcatactgaattattgcccggctggaaaaacaaaaaacacgctactcagtggataaccacgctggaacaatatatcttccctgtaatcggcaaatcagcgatagatacagttacgcctgtcgatatcgcctccgcgctgtccccggtctggctgaccagggctgaaacagcctccagaatcaaacagcgtattcacgctgttatgcagtggggatgggctcacggatactgcactgctaatcctgccgacgtcgtcacgcatctgttaccccggcaggtcagtgcgcatatccgtacagagcatcagccagccatgtcctggaaaaaactaccatattatcttgcagagtacgtcagaacagacgaaaggtacaatgtcacccgtgccttgctgttatttgttattctgactgcctgccgttccggggaggccagagccatgcaatggtgtgaaattgatttccgtcagcatgtctggacaattcctgcagaaagaatgaaggcgggtctgcagcacagggttcccttatctcagcaggctgtggatttactgcatagtctcagaggactacatgacaccctcgtttttccgtcaccgagaaaacagaccatcctcactgatatggttctcacttcgtttttgcgccggacacatgctcccagtgacagcagggggcgcacggcgacagctcatggctttcgttcaacattcagggattggtgttctgagcatggcataccccgcgatctggctgagagagcgcttgcgcatacagtgaagaataaagtggaagcggcttatcatcgtacagacctgcttgaacaacggcggccggtgatgcaacagtgggctgattttatcctgtcacaggaatatctgaaacaataa

SEQ ID NO: 281465 - DNA, 2169 bp, Morganella morganii
atgaataaagtcatatctgtatgcccgtattgtggtgccggttgtaaactgaatctttgtgttgaaaacggaaaaataatcaaagcagaaggtgctgatggtgttaccaaccaggggcagctgtgtctgaaagggttatatggctgggattttcttaatgataataagttactgacagccagaataaatcagccgatgatccgcagagaaaaaggtgcaccgtttgaagttgtcagctggcgggaggcgattaattataccgctcaccggctgaaacagatcaaagaaaagtacggtgcaaaatccattatgtgtacgggctcctcacgcggaaccggcaatgaaaccaactttgtgatgcagaaatttgcccgtgcagtattgggtaacaacaatgtggattgctgtgcccgggtgtgtcacggcccgtcagtggccggattacaggtgacattgggtaacggggcaatgagcaattccatcgcggatattgaacactccggttgcctgctggtattcgggtataactgtgcggattctcatcctattgtcgcccgccgggtgataaaagcaaaagagaacggcgcggaaattattgtctgcgacccgagaaaaatagaaacagctaaaattgccacacaataccttcctctgcggaacggtaccaatatggcgctggttaatgcgttcgcctataccttaatcgatgaaaatctgtatgacaaagattatgtcagccggtttacagagggatttgaggagtacaaaaaagccgttcaggattacagccctgaggtggttcaggatattaccggcattccggcctcacaaatccgtcaggcgatgagaacctacgcgcgtgcaaaaaccgcaaccattatgtgggggatgggggtgacacaattcgggcaggcggtggatgttgtcaaaggcctttccggactggcgttattaaccggcaatctgggaaaacccggtgtgggggttgcaccggtcagagggcagaataatgttcagggtgcctgtgatatgggggtactgcctaatatgttccccggctatcagaatgtgacagatgaaaatgtcagacgtaaatttgcgcaggcatgggggatcccgtatgaatcccttgacccggaggcgggctaccgtattacggaagtcccgcatctggccattgagggaaaggtaaaagcctattacatcatgggggaggatccgctgcagacagaagcggatttacaactcgtccgtaacgggtttgatgccctggaatttgtggtggtgcaggatatctttatgaccaaaacagcggaacaggccgatgttattctgccgtcaaccagctggggtgagcacggcggtatctttacctgcgctgacaggggctttcagcggtttgagaaagccattgaaccacatggaaatgtaaaacgggactgggaaattatcagtctgctggcgacagagatgggatacccgatgtcttatactgacaacaaagagatttgggatgaagtcagagagctgtgtccgctgttttacggtgtaacctatgaaaaactggaaggattggctcatattcagtggccgtgtccgtcagaagatcatccggggaccccctatctgtatcagaataatgcctttgataccccgtcaggcaaagggctgctgtttgccgcaccgtggcggaagccggcggaactgccggatgatgaatatccgctgatcctttccactgtccgtgaggtcgggcattattcatgccgttctatgaccggtaactgtaaggcgctggcatctctggctgacgaaccgggatatgtgcagatgcatccggaaaccgctggaaagctgggaattaaagaccaggatattgtgtgggtggagtcacgcagagggaaagtgatgtcccggtgcagtatcaatgaaacgattaataaaccagcggtttatatgacatatcagtggtggattggtgcctgtaatgagctgacacaggataatctggatccggtatccaaaacaccggaaactaaatactgtgcggcgagagtgatcagaattgatgagcagaaagaggccgaagctctcgtcaaagaaaaatatgctgtcatgcggaaccggttaatcggtttggttgaaacagcagaaagccagattcaataa

SEQ ID NO: 281466 - DNA, 561 bp, Morganella morganii
atgacggaggaagccgcgatcctctatgacggcctgcatgaagcatttcggacaatagatgatatttatcatcagttcgaaggcagagaatataaagaagtgctgacactgggctgtgtagatacgttcgccctcggctggttggaggtaaggctgacccagtttcagaggctttaccctcatgtggatatccgtctgcgtattaacaataatatcgtcaatattgctgcgggagggcttgatctggctatccggtttggtacctgtatatggccttcaacgaataatgataaaatattcgacgctccgtttggcgtgttgtgcgatcctgaaacagcgacgcggcttcgcgagccatgggatttgctcaacgaaaggctgcttcgttcctaccggataaatgaatgggaggactggttccgggctgccggtgaggacgtcgtcggcatcagaggtacggtctatgactcttcagtattgatggtccagaccgtcatacatgctggcggcgcggcgctggttcccttaaatatgtttacccgggagctcacattagggtag

SEQ ID NO: 281467 - DNA, 831 bp, Morganella morganii
ttgataaagaattcatggctcctattgttcttctgtacactttatgcagaggcatccccatctgaagaagtcgttatgacgggggggaaatattatgtgggtaatgtttttggtcagtatgactatgctgcgcgctctaatgtcatgttagacacattatggataatgcgtactgaagtcacattcaggttgtataccgacattcgtgaatgggctctggggcacggatatgagtttaacccgggttgtaacgggtcaatctatgaggactgcctgccccctgaaagagataatggcgagcatccagtcacgaatgttgaatggtcagatgcgatagtttttgcaaatgccctgagcgaaaaaacaggcctaaagccggtatatcttgatagtcagggtatacctgtccgtgacagtacccgctatgaagttacattggacacaaaagctaatggttatagattgcccacgtttgaggaatggcaagttgcagctcggggaggcgatttaggactaaaaaacgactcatatggttatagtttttccggcagtaagcattccgatatcgtcgcttggtttccggaatctgatgctccttattttggttcatctccggtacaacagctaaaaccaaatgcgctcgggctctatgatatgagcgggaatgtatcggaatgggtatatgctttctatacattaggcggtgtaaaaatgaattacttctgcggtgggagttttatgcttcccacaagcagtgtctcaagttgtgatacccacagtgctggttatgccctgcctgataccggcttcagactggtgaggaagttttga

SEQ ID NO: 281468 - DNA, 549 bp, Morganella morganii
ttgaaaaacactatctccttaattattttaatcgttatatttggaatgcgcccttcagtatctgaggctgctactcgcattcacctgaaaagtggggtgaataacattgatttaaatagtgatggtatacctgatgttattttctccgctatttatgacaacaatacatctcaccccggatcaacccttagtatatatatcagacaaaataacacctggtatattgtaccggtacctgatgatgatggttttacctggacagatttaaaactttcagcctctgtcctcaaaatcacaggtatagaactttatcgttataaaggcaaagcctatctggttcgtgcattaaaagattctggtcaggcaggtcgtggtgaccttacagactcatcaccggtaaaattttcacgattcctgctggcaaataacaatgatgatccgggaactgccgttttttactgggaatcagcgggtgtatatatcacgaaagactctttctatgatgtggatgaggcgtttaagtacctggaaatggagaaatttaagtga

SEQ ID NO: 281469 - DNA, 546 bp, Morganella morganii
gtgagaaaaatctgtcatctcctgcttttattgtttccgttctgtgcccaggcgggccatgaagtgcagtaccgacaaatgatcgacgactccctcagcaaacgccccctatgtctgggagaaaaacagtttccggtttcaattaggatgggaagcgatctctgggttaatgctaaaatggaagcacttgttgacgccggactacttacctcacatgttgagtctggatggaaaatctggaggctgacgccttatggccagaaatcattcagtaaacatcatgatttctgctatggaacaatgcgcgtaagaaaaataactgctcattcgacagataacgcaggcaccacaactgtcaattttacatactttatcccgtctctaccttcatgggcgaagaatcgctctatacgctttgctaatagcgacctcgacaatcttgttacgggagtcgatttagaacgttatcaggtgtccttctatgctgacaagcatgaggtgttacatatggttagtgaaccagagcaacttgatcttttgtattag

SEQ ID NO: 281470 - DNA, 813 bp, Morganella morganii
gtgtcgcgtgcgcagctgagtaccagggttaaccggccatcagactggcaggatcgcagacggcaatctcattttgacgacagtgaggtgttgtcgcggataaacacagcggttgctgacctgccgacgtacggctatcgccgtgtgtgggcagtgctgcgacgggagtcagaacgggatggtcaacctgtggttaatgcaaagcgggtgtatcgcgttatgaaagcgtaccatctgcttgttgagcgcaaacctgctgagcctgggaggaaactggcccataagggtcgtgtggcggtaggtgaaagtaaccagcgctggtgctcagatggttttgagttcaactgcgataacggcgaaaagctgcgggtaaccttcgcgcaggactgctgtgacagggagatcatagactgggcggcgagcacaggtggctatgacaaagagacggtgcaggatgttatgctgggcgcaatcgaaaaacgcttcggaaggcggctaccaacggagccactggaatggctgacggataatggttcggcttacagagcgcatgaaacacgtgcgttcgcccgtctgttggggcttgagccatgcacaacagcggtgaggagcccggaaagtaacggaatagcagaaagcttcgtaaagacgataaagcgggattacatcagcatcatgcccaaaccggacggtcggacggcggtgatgaatctggcggtggcgttcagtcattacaacgaacatcatccccacagcgcgctggggtatcgttcaccacgggaatatatacgtagaaagttatcgcaactgtaa

SEQ ID NO: 281471 - DNA, 396 bp, Morganella morganii
atgtttaataccagtcaaaaaaataagatggttgaagtattaacaggacctgagcgtcggcgtcgtcgcactccacaggaaaaaattgatattattcagcacactatgcaacccggcatgtctgtatcccacgttgcccgtttgtacggcattaatgccaatcagatttttaaatggcgtaagcagtatgaaaacggctctctgaccgttctgaaatccggtgaagatgtcgtgccggcctctgaactggcagcggccaataaacagatccgtgaacttcagcgtctgctcggtaaaaaaaccatggaagcggagctcctgaaagaagcggtggagtttggtcgggcaagaaaatggattgcgcatgcacccttgttgcctggggacgacgaataa

SEQ ID NO: 281472 - DNA, 351 bp, Morganella morganii
atggggtgttatgacgtgtctcggatactgtgtgtcgctcgggccgggttttatacgtggctgcataactcagtctcagcacgggataaggataaccagcgcctgctggcactcatccgtgactcttattcactgagtggaggtgtgtacggttatcgctggattcatggtgatctgaatgaaattggagagtcctgcggtaaaaaccgggtgaaccgtattatgcaactgaaccagatcaaagcggtgcgtggttataaagttccacgccgtatcaccggcagaccttctgttgttgctcctaatcgcgtgcaacggcagtttaccgtcgtgcgggccaatcaggtctga

SEQ ID NO: 281473 - DNA, 291 bp, Morganella morganii
atggttttcaaatcgagagatgatttaaaaaattttattcaggaacgcttactaccactgaaaattgagtgcggcgagcgccataaaatgtacatttttgattactatggtcaaataaaagatttagcccaaaagcttcgtcctgagatagtaatggaaatacaccctgatgctgaagaatggtccgcaggtgaagaggattctgggatgcattgggaatttgagaatctttctatcgatgcggacccacttgatactagtgtatttatggtcatgatatcagaacggtaa

SEQ ID NO: 281474 - DNA, 285 bp, Morganella morganii
atgatattgtttgatactctaaaagagaaatatccggaatctatggcttgggagtttggtgatagttcagacatggctaatgagcttgtaactcttatcctaaaaggaataaaaaccgcgtcctgtggctctgtccacttccccttatctgaaacagcactgattagagttgtccagttgctttcggtaaagctcaggtggaagattattcaggctttcatgtgtccggttccggttgtaatccagcatccagaacctggccatttctttcacctgactcagtga

SEQ ID NO: 281475 - DNA, 660 bp, Morganella morganii
atggaaattgatcatatttttatttgctgtgagaataaagcgcttgtggctgataccttagttaaaaaaggtatacttgaagggacgtcaaacaggcatattgggcaaggtactgctaatcgacgttttttctttcacaatatttttattgagtttatttatcttgaagatagtctaaatttgttgagcaataaaacattttcgaaacttgatattattcagcggataacagataagggagaatattattctccatttggtataggttgtcgtccaactgaacaagagaaaacacctacatttcctcattggcagtataatcctgattatctgccagatgggtattctattgatgttggaattgcatcacacaatgagccgctttggttttttttagacttttcaggacggccagatctggttcagaatgaaaaacgtcagccactcaatcatccttgtggtattaaagagttaaccagtatccagttaactattccaaaaataacgccactttctactacagcaaatttaatgaaaggaattgatggggttgaaataattcatggcgaaaaacataatctttctctcacattcgattttgccagacaaaagaaagtgataaccattaatcctgttcttccattaacaatatattattaa

SEQ ID NO: 281476 - DNA, 1284 bp, Morganella morganii
ttgacaacgggaacaacagacattgcgtcacataaccgaatcgaaacaaaaaaatggcttacggagtataatatctggttttatgcattatttggtactgcagtcggtgcaggaacgctttttcttcctgttcagttggggctttccggtccgcttgctatgctggttatgctgttcgtcgcattcccgtttacctattatccgcatctttgtcttgcccgttatatcatcagcagtgacagcccatccccgacactgctcagcgccacacaacaatattatggcatcaccgtagcccgtatcattaatgcgctctatacactaacctttttgctgattatctttgtttacgctatctctgtcaccaattcggcagacagtctgttgcggcagttctggcaggttcagctacccagacctttactggccatcatcgttgtttccgccctgcatggtctgttcctgttcgggaaacagaccacactgaaaataatgggaatgctggtcattccgctgataatctacctgacggttcttgccgtcacgttgatcagtcactgggacgttcagaatatcctgcgaatggctgacgatatacatatcgatacttcgtctctgaaagctctctggttattaatgccggtgatagttttttcattcagccatactccgatcatttccacatttgctaatcattgtaagcgcacttatggtgacgatgcggagtttcatataaagcagatagttaaacccagttatatgataatctgtattatcatcctgtttttcgttttcagttgtgtctttagtctttcaccatccgatattcagcagaccagggaaaaaaaccttacgatcctgaccgctgttgccggcaaaaacgccctgtattggattgctctgacagcaacaccggtagccattgttgctatgacaaaatcatttctcggcacatatttcggagttcttgaaggcgtaagggggctattcggcagagttaaccatggtaatctgcacaataaaaccagcaggaaacgggataaacttatcagcatcgggctgatttttatactcacccttctgatggtgctctggaatccgaatactctgaatgtcattgcagggatcagcgggcctatgatcgcgctcattctgttcattctgccggcactgtccttctggttggtcagaccattacatcgttaccgctctgtaaccagcctgatcgttctttgtaccggactgagtagtttcgggattgccgtttttaacttgtttaactaa

SEQ ID NO: 281477 - DNA, 582 bp, Morganella morganii
atgtatccttattcttataatgcggagtatcgccggttatttgaagacgttatagacagtgctgttacagagttccccagaacactggctctcaggattgatttacggtacccgcctgattacgtttatgaccggtcaaaccgtgaaataacccgttttattgaatcgctgaaagcacgactgtgtacagatacggacaggaaagctcagcgctggggcagggggctcagtcatcgtctgcggtatatctgggtgagagagtttggcggggtgagacaccggaagcattatcacctggtgttactgctcaataaagacatttatcacacagcaggccgctttaacggtgaagacagtctggcagggatgatacagcaggcctggtgcagtgcgctggggctgcgtattgagcgctatgcctgcctggtgcatttcccgggaaagggggcgatgtatctgtgttatcacagcccggattacatgactcagcgtgctgtactggttatgcggctggattatttagccaaagaccacacgaaagactatcacgatggttaccgatctgtggggaccagccggtaa

SEQ ID NO: 281478 - DNA, 1422 bp, Morganella morganii
atgaatagttatcccctgaatgtttttccggaattgctccggagtgcagtactgagtgttcatgaacagactcaggcccccgttccgctgattgcatcctcagttatcagtgcggtttcactgacctgtcagggctatgcagatgtgagagtgagggaacggattgtgtctccggtgtcgctgtttatgctggtaattgctgattccggtgagcgtaaaacaacggcagaccggttagtaatggcaccggtttatgcaatggatgaggcggaacagcagagtgccgggcaggatactgaactcagacgtgttgatgaacaaatctgggcggagaaaaagaagtctctgctggctgaaattcgcagaaaaacggcaaaagggattaatacagatgaaccggcagcgcaacttaaacaactttacgggcagaaaccggccgcaccgaaaataaggaagcggatttataataatacaacgccggaggcgctacagtatggcatgtatacaaaaagtcctcatgtcgggctgattgctgatgagggggctaatattttagatcgcagaataatgaatgatttgacctttcttaattccgtatgggacggggtaccttttcaggttgagcgtaaaaccggtgacagttttattattgatgacggccggatcacattatctgttatggtacagaaggctatctttgacagttatatgaaacggcagggtgataaagcgcggggaagtggtttttttgcccggtgcctgcctgtatttatcagtgacagtttatcgtcccggggaacccggtttatttcagacactccggtttatcgttattcactgacgccttttcatgagcggatggtcgaaataataaaccgggctccgggaggtaaaaaagtcatgctcagtttcagcgctcaggcgcagacagaatggaatgctgtttataattatattgaagagcagatggcccccggaatgccgtattatccggtctctgattgtgcctccaaattggctaataatattgcccgccttgcggcgttattttctttttttgcggatgacagtgatattatctctgagggcaatgtaaaagcggctgaagctgtttgtttctggtatatggatcagatgattcatattttttctcaccgtaacggagagtatgaaaaacagctgctcgactggctttctgtgaattatgataacacaagaagtgaatggataaggaaaaacgaaatcagacagtatggtccttccgtattacgaaaaggtaagctgctggatagtgtcctggcccggctggaaaaatatcgctgtatcagaattgacagaggattcaggtcagcagtgctcataggaaagggatattatttttataacaacccattcacaaatgagggcggtgattcagtataa

SEQ ID NO: 281479 - DNA, 222 bp, Morganella morganii
atgtcaaggaaagggaactgcctggataacgcggttgcagagaatttttttggtcttttaaaatcagaaatgtatcatggacatcattttcaggatgccgacgaactgattgaaaagattgatgaatatatagagtattacaataccagacggattaaagccaaattaaaaggcctgactccggttgaatatcgaaatcaggcctacaagccgcttaactaa

SEQ ID NO: 281480 - DNA, 543 bp, Morganella morganii
atgactgccattaattactatttcaaccatgagcacccgttacgtccgttcaccgggtctgattatgcgaacaaggattctttttcccctgacaatgcgctgcgtgtcgaacctgaaacatggactggattctggccgtgtgagcagaatggtacatgggttcttgttccggatcaccgtggcacaaaagtttatgacactgcaacttcgcaggagtcagaaattaaagagctcggcgaattgcctgatggtgtaaccactattgcgccggatgttgaatttccgaaatggaacggaaaaaagtgggtgacagataaagcagcgaaaaaggaaagtgatgtcggggcggtagaggcacaaaaacaatatctgctatcagaagctgccgaatcaatagctccgcttcaggatgctgttgagctggatatggcgacaccggaagaagagtccgccctgaaggtgtggaagaagtaccgagtgatgctcaaccgcgttgatacatctaccgcaccgaatatcacctggccggttgaaccaatttaa

SEQ ID NO: 281481 - DNA, 336 bp, Morganella morganii
atgcttcataccacgggccagtcattaaccagtgttatgagtcaggacggggctacaaaagcatttgcaggcgggcagagatttcataccagccctgaatctgtagaaataattacccctaacggttcaatcatcgttgaactgaccaataacggttatgtgaatgtcatcaataaaagtacagggctgttggctgaaataccacctaccagccttgagcagcaatctggggtgcatccgaagcggatgatgagccagaaaggtgtaactgatttggctaaatcagttgagacatccgttggcatgtttgccacctttccgcaccgcgccacctag

SEQ ID NO: 281482 - DNA, 228 bp, Morganella morganii
atggactattttttgacaagaggtgttggcagaatagggataatgttgcataaagaaacatgtaaaaagattaacctgacagaggataaaacttatcttggatactattttggtgaatatagcgctatccgggatgctaagaatattgctgttggtgaattaactctttgtccgcactgtatttttcttgcatgtggggggaatcatagtaatgagtgtctggactga

SEQ ID NO: 281483 - DNA, 186 bp, Morganella morganii
atgagtgtctggactgaacccacagccgcagacaaattctgtcctcacgacgaggcacgttcaaaggcctccggactaacgccgccgagcccggttatagagcacttcaatgtaatcgaagatatcggttctggccagatctctggttttatagatgtgttttctgatacgttcttttttcagtga

SEQ ID NO: 281484 - DNA, 387 bp, Morganella morganii
atggctgaacaactcaatcgaaaactgaaaggctgggctatattctaccaattcgttgattttaaggctaaagtcttcagttatatcgaccgtgtcgtgttctggaagctggctcactggctggcccgcaaataccgtacaggtatcacttccctgatgaggtggtggtgtgaatcaccgaaactgggtcagagcaaaacgtggtttttatttggtaaaaccaaccacggcaagattagtggcgaaatactgtaccagatggttggccaaggtaagaagtcgttccgctggtgtgtgcccgagggtaatccgtacctgagggtggaagtcagaaacacatatacatcgcactacactgaagtggcaatggcactagccagcgtttag

SEQ ID NO: 281485 - DNA, 423 bp, Morganella morganii
atgtcagtctataattcgaaaaatttcagtgaattatctgtattattgagcaccgttaaaggtgttggtgcagcgacggttgccgtgctactggctgaggatccggaacttggaacgttgtcacgacgtgaaattagtgcgcttattggggtagctccggtaaacagggattccggcacaatccgcggtcgccgaacggtatttggagggcgagcctccgtccgtgcagctctctatatgtcagccctggtcgggatgaggctcaacccggtaattaaagagttctatacaagcttggttgccacaggaaaatccaaaaaagttgcactgacggcctgcatcagaaaattgctggccatcctgaacgcaatgctgagaaggaatgaagaacggaatccgatgtatccccagcatgcttcgtag

SEQ ID NO: 281486 - DNA, 837 bp, Morganella morganii
atgaagctaaccgttttagttgacaataatacatttattgaccaatatcttattggtgagccgggagtatgttattttattgaatgtgatggaaataagatcctgtttgatactgggtattcggatgtttttttaaaaaatgcccaggtactacgtatcgatctatctgatttagattatattgttttttctcatggacataatgaccatacatggggattaaatcacttaactcaatactatgaccgattaaatcacaatccggaaaagaaaataaaactgatatgtcatcctgatgcattgacgcctaaatattatgacttaaagcctatcggaataaattacagattagaagaaaatgattttttctttgcaaaaatgtgtaccttagaaccactttatttatctgagcatgttatttttctcggacagataccgcggcgtaatagctttgaaccagccaaaccagtcggctatacatgtaattgtactggagagaaatcagatgattatgtacttgatgattcagctttagtagttaaagcctcaaatggattagttataataacaggatgttctcatgcaggaattattaatataattgaatatgccagagaaataacgggtgaagaaaatattatttctgtcattggtggatttcatctgcagaatgctagtcatagcatgttgtcaacaactggagaatatttaaaaactctagcgactgatttgctttacccttgtcattgtacagatttgacggcaaaaatatttttgtcagattatgtgaaaattaatgaggtgggcgttggtctcaatattaatttccctgtttga

SEQ ID NO: 281487 - DNA, 528 bp, Morganella morganii
atggcgaatttattaaagaaactttttggcaacaagaataaagataccagtgacgacacagcaactctttcagaatctgacctcacaattgcgcgagcgaataacgaattgcaactgcggacacaagccgcgatggatatgtgggggctcgatactgctgcgtgggatattgatcttaatacaggtacaatcaccttcactaatgacgaaaaagagatcgtagtcactgcacctgttcagatagttggcacctacgatacagaaaacagcacctggttatggggatgggtccatccatcagtcagcgagtcacttggagaatacgctcggcgcgtgcgctactttggtgaacagtacggcagagaaacactaactacacgcaaaattgctgcgtccatggatgatgcctgggagtttactgctcttgcctgtcacctcagtgatggccaaggtggttataggggcgtgtctggttcaacttgtgttttcatggtctatggttcggtgacgctcaacaaaagggattaa

SEQ ID NO: 281488 - DNA, 1026 bp, Morganella morganii
atgatcacgtttgagatgcatatggaaattaaaatcctgcacaagcagggaatgagcaaccgggctatcgccaggaaactggggatttcacgcaatacggtaagacgttacctgcgggctcagtgtgaacctgtgaaatatacgccacgtccggcaacagtttcacttctggacgagtaccgggattacatacgtcagcgtattgctgatgcacatccttataaaatcccggcgaccgttattgccagggaaataacagaacgtggctatcacggaggactctccattctcatagagtttatccgttcgctgaacagcacaacggcagagccagaacaggttgtccgttttgaaacagagccgggaaggcagatgcaggtagactggggaaccatgcgccacggtaaatcaccgcttcatgtgttcgttgctgtactgggttacagcagaatgctgtatatcgaattcactgacaatatgcgttacgacacactggaatcatgccaccgtaattctttcagcttcttcggcggcgttgtgcaggaagtgctgtatgacaacatgaaaactgtggtacttcagcgggatgcctatcagcccggacagcacaggttccatccttctctgtggcagttcggtaaagagatgggcttctctccccatctgtgtcgtcccttccgcgctcagaccaaagggaaagtagagaggatggtgcaatacacgcgcaacagcttctatatcccgctgatgacccggttgcgcccgatgggtattacggtcgataccgaaacagcaaaccggtatgggctgcggtggctgcatgaaattgccaatcagcgcaggcatgaaaccatccgcagtcgtccctgtgatcgctggcttgaagagcagcagtctatgctggctctgccgccggagaaaaaacagtatgaggtacagacagatgcaagtctgggcaccttcgactgtcatccgcgctatcatccgttatctgtcggtgatctgttctgcagaggagcggcataa

SEQ ID NO: 281489 - DNA, 600 bp, Morganella morganii
atgattgaaaatcatcttaacatattcataaaagcagcttttattgaaaatatggctctgagctttttccttggtatgtgcacgtttttagcagtatctaaagaagtaaaaacctcatttaaactggggttaacggttgtgactcttctcacgatagcaacccccattaataatctgatttataactatattctgcgtgaaaatgccattattccaggggttgatctgtcatttttatcatttgttacctttattgcagttttagctgcgttagtacaaattctggaaatgttcctggataaatttattccttcgctttaccactcattaggtgtttttttaccgttattaaccatacattgcgcaatctttggcgcgaccattttcatggttgaacggaactacaacgttatggagtccataacctacggagctggttgtggtattggttggttgctggcgattattgcgttagccggattacgtgaaaaaatgaaatactctgatatccctgccggacttcgtggcctgggtattacatttattaccgttggcttgatgtctctcgggtttatgtcattttcgggcataactttgtaa

SEQ ID NO: 281490 - DNA, 222 bp, Morganella morganii
atgaatacttgtcttaaaaaaagaatttatcagctaatcatcacagataagcctgagttatcggacagaatagatcatttcgatattgataccggagataaggtatgcagtgccagagtgtggctgatcgggcaagagttaccggtttatttcattttcgacagaattggggatgagttgcaactttcccatggtgttgattttgaatggactgaaaagtga

SEQ ID NO: 281491 - DNA, 141 bp, Morganella morganii
atggatcagaagaacagtatcagtgattacaccgaagcagatgataataaattagtaagaaaatttgaacaattaactgagcatccggatggttcagatctgatttattatctccgtgatgacagagaggatagcccttaa

SEQ ID NO: 281492 - DNA, 474 bp, Morganella morganii
gtgaccacggttccgccgctgggtattccggtgccggatatccgtgtgccgatacataccggaagtaatatcggcgtatcggatataccggatgttccggtaacgccggcaccggatgatacggattttaatgactatgtgattgttttttcgtcagacagcggaattaagcccatgtacatcgtgctgagcagtccccgtgataaaccgggtattgcctccggtaagggtaaaccggccggtgacaaatggcttgaggatgctggtaaggaatccggtgtgcctattcctgaccggattgcggataaactgcggggtcgaaaattcagaaattttgatgacttccggaagcagttctgggaaaaggtctcgaaagaccctgagttacttaagcaagttggaaatcaaaacaagacaaatattaaaaatgggaaagcatcttttgcacgaaagaaagatcgatcaggagggtga

SEQ ID NO: 281493 - DNA, 969 bp, Morganella morganii; identical to SEQ ID NO: 281395

SEQ ID NO: 281494 - DNA, 5259 bp, Morganella morganii
atgcagtaccgtaagcaggaactgctgcggattgccctgccgccgacactgcgcgctgaagcagcacagacagtgccggtaacggtcagtgtgctgaaagccaaatacggcctgaaatctctgcgctggtcagcgcctgaactactggcaaacggcggtgagatcaaacagaccgggctgaccacggcggatattacgctgccggcttatatctttgctaaccgcagcggcgaaccacagggctaccgcgtgacagccgtcggtgaagataacgagggtaacccttccaacaccgcagaaatgtgggtgaatgttattccgtctgtggaaactattactaaactgaccgttacgccgaaccagtcactggtggcgaataaccgtgatcagttcaccgctgtggcgctgttacagaatgacaagggcgaagtactgccgaataaagcagtgaccttcagtgtttccggcctgaaaaatccggaaggtgtcaccatttatgatgcggacggcaacaacggccagacactgaccgtgatctccgggccggacggcacggcgaccgtgaaaatcatcagtaagtccgccggtaaagcatcactgcaggcgaagatgcgtaacggtaacagccgttcggaatcgatcatctatattgcggatctcagtaccgcaaaaatcaaaacccttgagttaaccaataacaaagcagtggctgacggccaggcgaaaaacatcgccgtggcaacagtgactgaccagtttgataaccaggtggaaaacttcccgttaacggccagagcggataacggtgcaacagtcgttgatccgaaccagcagactgacgataacggccaggtcactatccgcttcagcagtgagaccgccggggattccaaactggtggttgaaggaacgggtacttcgaagagtgtgaccgcacagtttgtcgcggatatgagcaccgcacaaattcagagtgtgactactgaaaatgacggtgcggtggcaaacggacaggcgaagaacagtgtgctggtgacagtaactgataaccggaacaacccgctggcgggtgcaccggtcaccataagtgtcccgggaactgcccgttaccagactcagccggcaagcggaatgacggataaccaggggcgtctgcgtgtctatatcaccaataccaaagccggttctgaggattacaccttcagcattaataacagcagtgtcactaaacagctgttgtttaagccggatgaatccactgccaccattactgactcgcaactgaaaatcgtggctgacggtcagaaagctgacggcacatcggtaaaccgggtgcaggcgactgttctggatgcttatggtaaccgtatcccgggctacaccgtacagttcattactgacaacaatgcccagccgtcacaggctcagctgacaacggacggcaacggtgaaaccatttttgatctgacgaataccaaatccggtaaaacgaaggtcactgcacaggtgaacggtaaaacggcatccgttaatgtgacattcaccgctgacagcgccaccgcaaaaattgcggatatgactgtcacggcggatggcatgccggcaaacggcgaagcgaaaaacgcggtggaagttaccgtaacggatgcttccggtaacatcgtgccgtttgtggcggttcttttcaccgcagataacagcgcacagccgccatcacagtcactgatgacagatgagaacggtaaaatcttattcagtatgaccaataccgtggccacgcaggtcaatgtgactgcgaaagtgaacaccagtgagatgagtgcggtggtgacgtttaaggcagataccactaatccggatgccggtaaatcatcgctgtcggcaaatccgatggtcattgtggcggacggcagcactgagtcagcactgacgcttattctgaaagataaattcggcaacaatatcccttctcagggtgtggaatttaaatctgacctgacgggtagcacagtaagtacaacgacggaaaatccggacggaacttacagtgcaacactgacgggaaccaaatccggtaacgctaaaatcacgattgtactgaacggtaaagcgtttgcggttgcaccggttattgtaaaactgactgccgacagcacgaatccggatggcggcaaatcagcgatgagcgccgcgccggcaacgattgtggcgaataattcacaggaatcggtactgaaactgatcctgcgggatgctaacgataacctgatttccggccagacagtgacatttaccactgtactgaatggtgtgactatctccggtacggcagaggatcaggacggtatttataccgcaaacctgaaaggtactattgccggtacggcaccggttaaggtgtttgtcggcggtactgaactggcggtaaatgcagtgagtgttgaactgacagcagacagttcaaaaccggacagcggtaagtcagtcctggaagccgcacctgcgactatcgtggctgataatacaaaggaatcagtactcacactgaccctgcgtgatgtcaacggcaacctgatcccggggcagactgtcctgttcaaatcggatctgaacggtaccgttatcagcggcaccggtgaagataccgcaggtatctataccgcaacactgaaaggaaccaaatccggagatgcacatattaccgtcacactaaacggtaatgcattcaacgtgacaggaaccaccgtcacactgaccgcagacagcacgaatccggacaacggtaagtctgagctgacagcaacaccggacaccattgtcgcggacggcgctgacaaatcggtactgaaactgatcctgcgtgatgccaacgataacctgatcaccggacaggatgtggtgttcgttaccgacccggctaatgtctccgtcaccccggcagcagagaacaccggcggaacatatacagctgagctcaaaggaactcaggcgggtgttgtggctgtgaaggtcaaagtcaatggtactgaactgcctgcaacctcggtgaatgtgacactcatcggtgataaaacgcatccggatatcagtaaatcagaactgacagccactccggagacgatcgtggctgacggtaaagacggctcggcactgaaactcatcctgcgtgatgttaacggcaacctgatcaccgggcagaccgtcctgttcagcacggcgctcggaaataccgcaataacggacaatgcggaagcacagggcggtacctataccgcaacgctgaagggaacaacggccggaacagcgaccatcaaagtcagcttaaacgggactgaactgaccgggctgaccaaagatgtgacactgattggtgataaaactaaccctgatatcaccaaatctgaactgaccgccacaccggatacgatcgtggcagacggtaacgacggatcagcactgaaactcattctgcgcgatgtcaacggtaacctgatcaccgggcagaccgttctgttcagcacggcgctcggaaataccgcaataacggatgatgcggaagcacagggcggtacctataccgcgacgctgaaaggcacgacggccggtacggccaccatcaaagtcagcttaaacgggactgaactggcaggtattaccactgatgtaaaactgattggtgataaaaacaatccggacagcacgaaatctgagctgaccgcattaccgggccagattgtggctgacggcaaggacggggcagtactgaagcttatcctgcgcgatgtcaataacaacctgctgccgggccagaccgtggagttcattaccgcgctgggaaatacggcaataacggataatgacgaacctcaggatggcgtttataccgcgacactgaaagggacaactgccggtacagccacgattaaagtgaaggtaaacggtactgaactgacgggtatcagcgctgacgtgatactgattggtgacaaaaataatccggacgggactaaatcggaactgacggcattaccggatacgattgtggccaacggtactgctgaatcaaaactgaaactgattctgcgcgatatcaacggtaacctgatcaccggccaggaagtcattttcacatcaacgctggaaaataccacggtcggcggtacatctgaaaataccggcgggacatataccgccagcctgacagggacgacatccggtaaggcaacgatcggtgtgacggtcaatggtaccgcactgacgatcactgcggcagaggtcactctgacagcagataaggataatccggacagcggtaaatccgaactgacggcagctccggagacgatcgtggcaaataatacggatgaatcagtactgaaactgactctgcgtgatgtcaacggtaacctgatctccggacagacagttgagctcaaaaccgcgctggaaaatacagtgatcactatgacaccgggggatcaggatggtgtctataccgcaaccctgaaaggtacaaaagccggaacggcgactgtcactgtgacagttaacggaacggaactggcggggctgaccaaagatgtcacactgatcggagacaagaacaatccggacagcagtaaatcagagctggtggtaacaccggagacgattaccgctgatgatacagatacgtcagcactgaaactgattctgcgcgatgttaacaataacctgatcaccggacagacagttgaattcagtactgcgttagccaataccactatcaccgctaaaccggaagcaccgcagggttcgtacaatgctgtgctgaaagggaaaacagccggtaatgcggagatcaaagtgaaagtgaatggtgcagatttcggcgttgcatcaaaaacggtgaaactgatcgcggataagagtacggcaaaaatgattatcacgaacttaaatacggataaacatgcggttgccgatacggtatcggtcaataacttagagataaaagttgttgatgccaatgataacccgattagtggtgtgaatatcaaagttaccgaaaaaacacagcctgcaatggtgatgatagacaatgcggaaggtgttaccggtgcggacggggtatttaaaccgggcgtcagaagtaaaattcagaatgtcagtttatctgtatcggcaaaagatgcaggcggaatcgatatcactgaagattatgcactgatatttgacctggtgaaatttactctgaagtcagccatcgtaaccaattaa

SEQ ID NO: 281495 - DNA, 4188 bp, Morganella morganii
gtgacactctccgggcagcgttatctcggcgactaccacaacgacgaagaacaattcaaagcgctgatggataacggcatcaccttcggcaaaaaatataacctgaccccgggcgtggcgctgaccgcagagcagatggcgctgctgaccggcgacatggtgtggctggttgagaaaacggtcacactggcggacggcagcacagaaaccgtactggtgccgcaggtttatgccattctcaaagccggtgatttaaccggggacggcgctctgctggcagggaaaagcacacagtttacggtgaacggacagctggttaacagcggcagtattctcagtaaagatgccctgacggtcaatgccggggacattctcaatcagggcacggtcagcggcaatgatgtgctgcttaatgcgcagcgtgacctgaataacctcggcggtacactcatcggcggcaattccctgacggcaaatgcggaaaacatccgcagtgaaaccacgctgtcaggggatgcggataaccgtcacctcaaccgcatcgcgggcatttatgtgcagggggataacggtaaactcaccctgaacgcgaaagactcggtcacactgaccgcgactgatattgccgccaccggtaaagagagcaaaaccaccattaccgccgggaatgacatcacgctgggtacggtgaccaccacccggactgaaaacggcgactggggtaacgataactaccgtcacctcaccacacagacagaagttggttcacaactgcacggcggggagatcaccctgaacgccgggcgggatatgaacgccaccgccgcaacggctgatgcccaaaatgccctgacggtcactgccgggcgcgatattaacattcagtccggcaaagacgtttctgacctgactgagcacagtaaacagaccagtaaaggtctgctctccgcctcatcactggaaacccacgacgaagtacaccgtaccgatgcggtcagcagtcagttcggcggcggtaccgtcaccctgaaagccggtaataatcttaccgttgagggcagtcaggtgattgcggataacgacctgaccgtcacggccgggaacaatatcacggtcaccaccacggatgaagcccgtgaggaaacgcatctgcgcgaggagaaaaaattcggcctgatgggcaccggcggtatcggttttaccgtcggcaaacaggaaatgaaacagaccaccggcagcgacagccgtttcggcaaaggcagcacgctgggcagcacagaagggaatgtcagcctgaccgccggggaaaacctcactattcacggcagtgatgtggtggcggaaaaagacatccgtctctccggtcagtccgttgcggtcaccgccgctgaaaacacgcacaccgaactgaccaaaaccgaacagaaacagagcggatttacgctggcgctgagcggtgccgcaggcggagcactgaatacggcagtgcagacagcggatgacgcaaaagaaacggaaagcggccgcgtgaaagccctgcaaaacatcaaggcgggactatccggtgcccaggcgctggaagccggtcgtctggctgatgttcagggggatgcgggctcagccttcggcgtgaatctgtattacggcagcagctcttcatcatccgaaacggccacccggcagaccacggcacagggcagcagtgtcagcgcgggaaataatctgaccattaacgccaccggtaaaacgctgggcagcgggaatattgcggtcaccggtagtgagttacaggcgggcggcaatctcaccctgaatgcagagaatgatatcgccctgacctctgcgcagaacacacagaccgtggacggtaaaaacagcagcaaaggcagttcggtgggggtaggtatcacctttggttcgggcggtaccggtctgaatgttaacgccagtgtgaacaagggcaaaggctttgagaaaggcaacagtcagtttgctactgataccactgtgaacgcgggcaaaaccctgacgattaacagcggcaacgacaccacgctgaaaggcgcacaggcacagggtgaaaaagtcatcgtcagtgccggtggcaacctgacactgcagagtgagcaggcggttgataactacgactcgaaacaaaccagtctcagtgcagggggaagcaacggtctgagcagcggttcactgaatatctcggcaaaccgcgataagatgcacagtgaatacgaatcagtacagaaccagacgggtatttttgccggaaaagagggctttgaggttacggtcggcaaacacacgcagcttgacggcgcggtgattgcctcagcggcggacaaagacaaaaacaccctcgacaccggcacgctgggctttaacaatctggaaaacaaagcggaatatcaggtggagcaccagggcggcagcctgagctccggcggcgctgtcggcggtaacctggtatccaacctgggcagtgcactggctgtggcggataataaaaaagagagcagcagtaacaccactcatgcggcggtctcagacggtaaatggattatccgcgacactgaaaaccagaaacaggacgtggcagacctgagccgtgacacggacaacgcccactcagcccttaatcagatattcgataaagagaaagagcagaacagggtgaaagagcagcaactgctcggtgagataggtgttcaggtgattgatattgcccggacggaggcaaaaatcaaagccacggaaaaagcgaaggaaagctttgatatcagaaagtatagtaaggatgatatcgataaagcgaaagcaacgctggccgcagaaggtaaaagcacggataacgacgcgatcagtgcgctgttatttaacaacgaggttgaaaaaaacttagcggaatcgggcttcggtaccggcggcaagtatacccgcgccatgcaggctgccaccgcagcggtacagggtctgatgaacggtgacctgaatgcggcactggccaacggcgcggcaccatttattgccagtgaaatcaaaaacctgattccggataatgacgtcgacgtcaatctgaaacgcaccatcgcccacggcatcgccaacgcagcgctggcactggccaaaggggataacgccgccgcacaggccaccggtgctatgaccggcgaagccatcggtatcctggccgaatctgtctacaaaaaacagctgggcgaactgaccgaacaggaaaaagagaatgtcagcgcatgggctacgctggcatccggcctcgccggtggcttggtgggcggtgacacgcagagtgcggcaaactcggcacaggccgggaaaacgaccattgagaataatgcctttaatttagcaggaagaacgcaaaaagaaattgaatccagtattcagaaacaagttgatggtgttgatctggatgaaatatatggcgatgaccaaagtaaaaaagatgcttacagaaaaggcagagaacaaggggctaaagatggtttaaaggatggcgctattgaggttttagaaggcacggcaaactcaattattcatcctattgatacaattactgacctcggttcagcaatttggaattatgatcagacaattgatgccattaaaatttcagtaactcagtggaatgagctgtacgagtatgcaaaagtcaacgatccagagctggcagggcaaatggttggttctttacaaggaaaagtattaggcaatcttggtacaagtgttgtagtttctggtgcagcggcgaaaaccattcagaaagttgctcaacttaaaagtgggtcaatcaaaacaaatccaaatttgcattataaagatacaatagaaaaaatcggccctaaaaaggcttctgaaacttacttcagagtagaaggtggaggtagtggtacaaaaaccagccagaacagaataaatgtaaactctgatggtagtgttaaaataaattctggatgcagtggtcagctttgtgtgagcactaatggttcaaatcatgcttcttattatcttagtaataagagacctgatggttctgtagttgtctttgaaattgatgcaaacttacataagcaaataatggaatctgctatcccgcagagacctatacctggggttccaagagatcctaacgcacctaagatagtcgacccagtgtaa

SEQ ID NO: 281496 - DNA, 210 bp, Morganella morganii
atgagcggtaaacgttatcccgaagagtttaaaattgaagcagtcaagcaggttattgatcgcggtcattctgtttccagcgttgcaacacgtctcgatatcaccacccacagcctttacgcctggataaagaagtacggtccggactcaccactaataaagagcagtcagatgctcagaccgagatccgccgactccagaaggagctga

SEQ ID NO: 281497 - DNA, 588 bp, Morganella morganii
atgactctgaggtgtctgttaaacccgtggcgattcaaagtgctgcgtctggcgacctcgataaagcagggaaccgtaacggcatccctgatgctgaaaaaactggccagctaccccaagcaaaacggacttgccaaagcactgagagaaattggtcgcattgagcgaacgctgtttatgctcgactggttccgtgatcctgcactgcgtcggcgggtacaggcgggactgaataaaggtgaagcccgtaacgcactggctcgtgcggtattcatgcaccggctgggagaaatcagggaccgaaagccggaaaatcagagctatcgcgccagcggactgacgctgctgacagcggcgatctccctgtggaatacagtgtatatggaaagagcggtcgatgccctgaagcgtaaagggctaaagatcaacgagcaactgctgtcgtatttgtcgccgttaggctgggagcacatcaatctgacaggcgattatatctggaaaagcaaccggataccggcttccggtaagtttcgtcggctgaggcccgctaaaatagaaaggtcaaaaaacaaccttaacgtacaataa

SEQ ID NO: 281498 - DNA, 1140 bp, Morganella morganii
gtgtctgactccctgacacttcgtcccccggtgaacggtcataaaattcaccgtcattatctgcctgtctttaaaggcaaattaccggccattgcggcggtgcgccgtttttcggcggcactgtcccgtcatgactggaaccggaatcctcatatttataatctgcgctgtgaacgtaatcagcgggtctccgtgcgctcagagcggcgggagacctggtatgcgctggcactggcgatgatcgctaatgcggactacaacccggacagtgaggcactgtttgaggtgatgtgtccggtggaaacgctggctgcgcagtgcggccagctgcaccagtatgagaacggccgcaaaagttatgacccggtgctgcacgcgctgcatgactgggaagcggcaaatctgattattattcaccgtaactttgaccgagaggcgaaacagtacaaggcgatgcgcatctggctgcggcctgtgatgttctggaaccgaaacaagaaagagaaagcagttgccgacaatgaaaaaaatcgttttgatcacctgctttcggtggccgagaaattacccgttaaggcgctgcctgatctcattcgcgctatagtgcgaccggtacaaagcgatttcttgctggcggtagctgaggaaggaacagatgcccgcccggatatgaccccgcaggagttcttttttaaggggcttatcccagtggaatcttatgaaaagatgaaagagggtgagatggacggcactgattatccgttgtcgctggcaagtgatatggtgttgccgtggccctggagcctacctcgttatatcggtaacgtttcactcattggaacccataagggggttccgtggaagcaggataaaatcaaccactatgttgacttgtggttgccctggcgtattggctttgtacgtggcggcaaccattcaataacggcgggtattctggccggggaagggacgctgatcccagagcatgtttacgatatgtcctggctgtttgagctggttcgaacggacggcaatcactggtttgttggcggacacaaagccgaggcggttaagtcggggcggtcagctgcggtgtttgagatagggcggctgttagtggaaggagctaaagaacgttga

SEQ ID NO: 281499 - DNA, 258 bp, Morganella morganii
atggggcatcttgagtacagcgggcaactgcctgacggaaaaacggcggaaaacctcgtcacggatgatcttgagtatggtgagttatggtatcgtatttccggtgaaaaccgtctgttacgtgaaaatgatgacagttcagttactgatatgaattataccggttcactgtatgtttatacgatgaccggtgatgaggcgtattattttattttcggtgaggacggttttctggaaagtgtacagacagcgcaatga

SEQ ID NO: 281500 - DNA, 261 bp, Morganella morganii
atggaattgaaaaatagtatcagtgattacaccgaagccgagtttttggcttttgttaaaaaaatttttaacgtcgaaaatacatctgaagatgaagatataaaaaatattcttttatttaaaaaattaactgagcatccggatggctcagatctgatttattatcctcgagatggcagagaggatagccctgaaggagttgttaaagaagtaaaggaatggcgagccaaaaacggtaagcctggctttaaacaaagttaa

SEQ ID NO: 281501 - DNA, 2544 bp, Morganella morganii
atgagtggcggagacggtaacggttacaacagcggtgcccatgacactggtggtaatattaacggaggcccgaccggcatcggcgggaatggcggttcaacgagtggtggctctggttccggcagtggatggggtatcagtaatacgccgtacggcaatatttaccactatgacccggataagttcggcggaagtaattccggcggcggtaacggcgggtcctcatcatataactttgataaaaatccggaagcaggggccgcagtcagcaccggatatgtcggtgctactgcgctcgcactgactaaccgggccggtgtgttgggtatatctgtaaatatcggcgtacttggtgaggccgttgtcagtgcactggcggaattgggtttgtacatgtcagattttctgagtaaatacggaccgttaggtatgcgctttcttggtattttcggattactttatccggcaaaaatagaggaacccgagttatatgtcagtattaaggatgtggattttaataaacaaaaagtctacgggatcacaaccctgccggccggttttgttactgatgtaccggttacagatattcctgaaaatacctctgttcctgccagtgtactggcccagtcggtgattgatgaactgaccagagcgcataaaatcgccattacaccggtaagtcctacgccggtaccggtggttaaggctcagaaaacagaaacacccgatgtgtattctgttcaggttgtgccgggtatgccgccgatgcggattaaggtcaatgaaaacaaaaccagtaaaccggtaacagcagcaccggtgacaacgccggagattaaagcttatttaccggcaccggaaaaaaatcaatctcatcatgccatgatcgattttggcggtgaccatgagccgctttatatttcagttacaccaatccccaaaccggatgaggcggaaaaactggcggaggaagctgaaaaggcagaaaaggaatgggaaaaacagcacccggtggaagcggctgaaattaacgtatcaaaaaagaaaaaagcctatgatgcagtaattagtacaccattcggggcactgtgtaacgacccggttaaacatcctatgacgtataaaaggccaaaccacagagtggtttacggggcatatgaatatccgttattaccgccaactatcaccatcaatcgtcccgagaatgtggtgtactattcaaagaaaagctgggaaaccactcatccgctgccggtaccggtgacggagatcgaaaagcagcagcataagtatctgattgaggattataactatctcagcgaacagattaatcaggccagaaatctgactgaaaaggcaaaagaggaattaacgcaggcagagcgccggcttgaaactgaaaaagccaaagtcagaacagccaaagccgaagcagaaaaagctgaaagggcgaaggctgtcagtgagcagaaacagaagaccgaaaatgccctgtcacgtccggatgtttttgtactggatgccaaaaataccggtgatggtcagttatctgtttcaggcagcgggattatccaggttccgcaggctgcggaagaggcggtcggtaaattaggcggtctttcccgtatcgaaaacacggtcaaaagtgagttttctggcgcctttttatctgaagatcagttcagtgtcagtcttcctgctgatgccggtatcatgcttgctgttcctgcagaggatattgataccggtaaagggtatgcagaaaaatcgctgcgcggaaaatgggtgcgagaggaaaacggttttgtcttccggattgtaattgacggcagggttgatgcacagaacaatgtgaatgtcatagaggccacacaggataaagagaccggcctgtacacagtggctcttccctcaccgtttggtactattctgattaatccggaaaaaccgccggtgaccacggttccgccgctgggtattccggtgccggatatccgtgtgccggtacataccggaagtaatatcggtgtatcggatatatcggatgtgccgggaacaccggcgccggatgataccgattttaatgattatgtgattgtttttccggcagatagcggaattaagcccatttacatcgtgctgagcagtccccgtgataaaccgggtattgcctccggtaaggggaaacaggtcggtgaaaaatggcttgaagatgcagggaaggaatccggtgtacctattcctgaccggattgcggataaactgcggggtcgaaaattcaggaattttgatgacttccgtaagcagttctgggaagaagtatcgaaagaccctgaattacttaagcaatttaactcagcaaataaaggtaatgttaaggcggggaaggctcctgctccaaaagagtcagagcaggtaggtggacgaattaaatatgaacttcatcatgacaaatctatcagtgatgaaggagacgtctacgatttagacaatatccgtgttaccacgcctaagcgtcatattgatattcacagaggtaaataa

SEQ ID NO: 281502 - DNA, 525 bp, Morganella morganii
atggcgagctggtacaccgaaaatgtctccggggcgtcacttcaacgaccggaacttttacggctgcttgacgatgccgcacccggtgacattattcttatcgagcaggttgatcgcctttcacgcatggatgaggacggctggcagaaattaaagcaccttatcagtgaaaaaaacctggtggttgtcagtcttgacctcccgacaagccatatggcgctgacatcacctgccggtgatgagtttacccgggcaatgcttaaggcggttaacgggatgatgcttgatatgctggccgctattgcccgcaaagactacgaggatcgccgtcgtcgccagaaagaagggattgcgaaagcgaaggtggccggaaaataccggggacgccgggctgatgaacagttgcatcaaaaaatcatcgaacttcgtgtcaaaaacaaacagagtatccgtgataccgcaaggttgtgcgacgtctcagaacggacagttatacgggttgttaaattcagtgctggttcctga

SEQ ID NO: 281503 - DNA, 2433 bp, Morganella morganii
gtgaataaattattaataattacattgctaataccatcagtggttaatgctaaaaccatagatgatggtaaggttgaacagataaatgacagtgctacacattcagatataaccgtaatgcgaggtggaaccctatacttatcaaacggcactgtcaataatataatagtagatggtggctcgttctcaacctatgccgctccagaaggagctacgttaataataaataatatgacattaaaaaataaagggacgttttataccaagactcaattccctggcggcgaaattaacaaaaccattatagatgacaatggttttctatctgtaagctctggggcattggcctctggcacaataattaaaaatggcggcatccaaaaaataattgaatataacaacccttacaaagttagcgatagagataccgatgttaaccaaggaggtattcaacacattgtcagtggcacatctgaatccaccgaggtaagtggattgcaagtcattgatgtatgggacgctgatttttattcagctgatgctagtgatgattccaacaaaaataaataccagtcaagtggaaataaaagggaatcggcaatatcaaacaatgcaatgatattacaaggcggagtgcagtttgttcactccggagagtctaaaaatgcaacaatttacggtaaacaaattgttgatggtggattataccagttttacaatggcgagtggactaataaaaaaacaagtgataatgacattgactaccggcgtgaaggatccccaatatcaaccaatgcaatcataaaaaatgatggtgaacaaagaattgaaaacaatgggcgttctgaggggagtgaatttaatgattcatcatctcaatacattggaagtaattcatcatcaacaactacaactctaaaagacaaatcaactagtttagtgatgaatgcaggcagcttacttgggataacatccgttaataattcagcaaaaataaacatgaccacgggtaagaatgatgaatcagatgagcgtggtgcttatgctgaaagagtagttctctcaagcaaagaaagcgttttgaatataaaaaacagtgagtctggtgatttcgccttcgttaattcaattgaagggctgggaaatgtaagtcttttagattcaaatcataacaggctgataaccgattcagtatcaggagcgacatcattcacctttaacactgatatagaaaacaatctaagttcaaatcttattatcaataaatcaagtgaaggcagtcacattgttaatgttaaaaacaatggtggtcaaagtaccacaggcaaagaacgtgtcacactgattgaagataacagtggaaataatgccaaggcaacatttacgtcgggtaatgtagttgagctgggtgggtattcttactcagtacagaaagatggaagcaaaaataactggatactggcggcggaggaatcctccccggcaccaacaccaaaacccgttattaacgatacagccaaaaccattacaggactcgccagtacatcctacctgatgaatcaggcggaaatgaacacccttcgccagcgcatgggagacctgacgcgtgccagcgccaccgcgcaatctgacgtgtcaggtgcatgggggcggatatatggcggtaagtacaaaaccagcaataatgacaatctggctaaagccagtatgaactattacggcttccagcttggcggtgacatcaataccgtgcattacagcaatagtaaaaactatctgggggtgttcgcaggccacacaaccggaaaacccgactatgtccgcggagatgcgaccgcgacatcatggtatggcggcgtctatgacacattcatcgcggataatggattttatgtggattccgtagtgaaagtcggtcagtaccgcaaccactacaatctgaaagacagtcaggataatggcctgaatggaaaagggctgtctaatgttatgacgctgtcatctcaggcggggaaacgctttactctgacagaaaatgacgattacaacgtatatgcggaaccacaggcgcagctgacatactcccgcatagggtcatttaataccaccgcgtctaatggcctgcgggtgaaacaaggggcgtataactccaccgtggcacggataggtgcagtactgggaacgcagattaacaggcagtctgatatttatctgaaaacatcgtacctgcatgagttcagtaaagatgtggactatacactgaatgattccagggaatcatacggcgtgaaaggtgacggtctggaagcagggattggtatgaacgtcaaactgaatgacaacggatatctgtatgcggaaggggattacatcaacagtaaaacccactacacggggtctaaattcaatataggttatcgctacagcttctga

SEQ ID NO: 281504 - DNA, 366 bp, Morganella morganii
gtgattgatgtgaccaccacgctacgggaagccctcagcgagcgtgataatctgacactgaaacacgagcagacgtcagagcctcagtcgaaagcgacttcagacaaagcgtttgattttgaaaaagagtctgaaaaactgacaccgttggtcaatgatgccttgagtgagatacaagacgaaattgaccttcaatccctgattaatgactctatggcagagtttcagaatattcatcaggaactggtcaggcagcaggcgcgtgagcgactggctgagaagcaacgccagcaggaaaaagaacggcagcgactcgccgagcagaaacgacaaaagccggataaaggctggtcattttctcgatag

SEQ ID NO: 281505 - DNA, 585 bp, Morganella morganii
atgaacgatgagattaaaaaaattgccgcgctgattgggcatcagcaagcgcaggaaaagcgtgtggcggcgttgattgaagaatttcaggcggaatccgccaaattaagccgccaaacagcacaattggctcaggtgatccatgaactggacagtgcctccggtaagatgaccgacacgatcaggcaatcggtgagtaccgctttaactcaggttgaaaaagaactcaaacaaacgggattggcgcatcagaaacccgccgtcaatgtgctgaatcaggtggttacagcagctaatgaatccgtgagtgcaatgcgacgtgaaatgtcccgttatacgtggaagtctgccatttatatcgcattgacgatatttgcggtgatgggcgggtgtctttggggaatgtattattttatcaacagcggttatgaccgaattgcaaaaatgcagcgcatggaagcggtctggcagaaaaaagccccactggctgatatctccacgtgtgacggaaaaccttgtgtgaaagtggataccagtcagtcatacggcgataaaaaaaatacgtatctgattatcaaacaataa

SEQ ID NO: 281506 - DNA, 456 bp, Morganella morganii
atggtgattcctttgattagtggttcatgtttgtgtggctcagtgaaatttacgataaaaaatcagcccgagaaattttatagatgtcactgttcactatgccgaaggcaatctggagttggtcataatttagccaccatagtgaaaattgaagattttgattggcaaacttcgagtagtttcatttcctcgtggaaaaaggaaagtggatatcgaaatgacttttgtaattcatgtggttcgacagttccaaacgctttgagagatcagccctttgtatggctaccacttggattgcttgatgatgatatttccgctgactgctgtggtgatttttgcaccgatgattcgatgatgtgggattgtgtacgctcagcgaatagtaataagagtgcggtaaatagcctgttcgatttattgctcatgttgaatgttgtacaggctaattttgagtaa

SEQ ID NO: 281507 - DNA, 660 bp, Morganella morganii
atggtattctcacaaacttatccaactagagtatataagttggttattttcgattttgatggaaccttagcagattcctttcctttctttgtttcaactataaatcatctagctgacatgcattctttcaagaagatttatttagatgaggttgaatcttttagggaaatatcttcccgagagataatgaaaaatcttgggataccagtatggaaactacctgcgattactcagagttttataaaacttatgaaggtaaattcttcaaagattcctctatttgatcatacagatgaaatgcttgcacaccttaatgaacatggaattacagtaggattagtttcttcaaatggatacgaaaatgtgaccagtgttcttggttcaagctgtcgatactttagttactttgaatgcggtgcatctttttttggaaaagcatctaggttaaagcagcttttaaaaaaagcagactttaaaccatcagaaactatctatattggtgatcagattaccgattgtgaagcagctagaacggtaggaattgctttcggtgcagttttatggggttacagttcagaaaaacttttaaagaaactgtcacctgatgagatatttgaaaatgtgtctgccataaagaggattactgtcagcaaaaaataa

SEQ ID NO: 281508 - DNA, 1029 bp, Morganella morganii
atgttattacaagtcggtgaactggctaagcggacagggttaactattcgcacccttcatcactatgatgatatcggtttacttcagccttcggcccgctccgacgccggttaccgactttacagccgtcaagatattactcgcttataccaaattcaggcattgcgagggcttggaatgacattggcagaaattggcgcggttcttaatagtccaaacttggcactcgccccattaattgatcggcagattcaggcaatcgatcagatgatcattaagcagactcaactgcgctatcgtttgagcagtctcaaaaatcaactgatgaatggtgaagagctggaactggacaattggctaaaaacactggagcttatgtctatgtacgaaaaatattttacaaaagaggaacttgcagatctgacttttttacaggcagacagtaaacaacaaaaagaatgggaagcgcttgtcgtcgaagcgaatgcactctttaaggccggagaatcttctagtagtgaaactgcccaaaacctggcttcacgctggatgctgactctcgaacagaatacggctgctaatcctgaatggttggttaaattgaatagcatgcattcagctgaatcggcatttcaggaaaaattgggtgtgcatccggaagtggttgagtttctacttgaagcatttgccgagagtaagctgaacgtttttgcacgttatttatccgagcaggaatttgcttttatgaagcaaaattatgcacgtgagatgaaaaattggccccagttattgatcggattggagaaggccattcatgctgggattgaacctgacagtgaacaagcaaaatgtttagcacagcaatggctctccatgttgcaaggttacgcaggcaaaaatccggcgacacatgcgaagattcgcaatgccatgcaaaatgaaccaagtcttgccgagggaacctggctcaaacctaccactttgcaatttttagaaaaagcagtatcagctttaatgcgttgtgcttag

SEQ ID NO: 281509 - DNA, 414 bp, Morganella morganii
atggcacaggtatcaatcagtgaagcagctaggcttataggtaaaagtagaacaacactacaccgttatatatcaacaggaaaattgtccacatgtacagatgaacacggggcaaaaaaactagatacatcagagttattgcgcgtatttggtgcattcaaacatgttcaccaatcacacagtgacaatgtaacaactgaacagcatgtaacaacccaaagaacaactgacacagataaaacatctcaattggaacaagagattgaacacttaagacaactagttactgcgcagcaatcacacatagatagcttaaaacaagccatgttgttaattgaatccaaactaacgccaacaccagaccctatagcaccagtgccgactaaaaaattctggcaattctggaaaaaatag

SEQ ID NO: 281510 - DNA, 957 bp, Morganella morganii
atgtctgaattagttgttttcaaagcaaatgaattagcagtaagccgttatgaccttactgagcatgaaaccaaattgattttgtgtggtgtggcgttactcaatccaacaattgatgatcctaatgaagatcaacgaacggttgcatttacttatcagcaatacgcacaaatgatgggtttatcaaatgataatgcttatcagagattaaaaaacataactcgagaattgatgactcgcaccattgaaataatctatccaacaggacctatatctgagcgaatatttcagtgggtaaattacgcggagtttaatagggataagcaagcggtaaaacttagatttagtaaggaaatagtgccatatttatttcaattgaaaagatttattaaatataacctagagcacgtaaaagcctttgaaaacaagtattccatgcgcgtatatgaatggttattaaaggaattaactcaacgtaaaaccaataaagctaacattgaaataagccttaaagaattcaagtttatgttgatgctagaaaaaaattatcctgaatttaaaaaattcaatcattgggttttaaaaccaatagccaaagacttgaacgcttacagcaatatgacgttagttattgaaaagcgaggccgccctgctgacacgctgatctttcaggttgaactggataaacaaatagaccttgtgacggagctggaaaaagatccagtatcaaaaaaagaagataaggcaatccgtttaacgcctgaaaatcgtcttcatgaggggctaaaaacaacattgcatgatgctttaactgcaaaaattcagctgactagttttgaagcaaaattcctgagcgatatgcaaagcaagtacgatctcaacggctcatttacatggctgactcaaaaacaacgaaccacgctagagaaaatattggcaaaatacagacggctctga

SEQ ID NO: 281511 - DNA, 456 bp, Morganella morganii
atgaaaaacgaaaaacaggctaaatgggtggcagacagagtgcaatatatccgtggtttaaaagcaccgaatgagcaacaacgcttattggtgattttgcacgataaagcggataaaactgcccaagaaataaagacgctctcattgttaattcaggcggagcgggcagcagaaaaagcacaggaagcccgcgcgaaagtgatgaatcttattcaggcagagaagcgggcagaagccaaagccgcccgtaaagcgcgtgaccatgccctttatcaatcggcgggattactcattatggcagggttagtggacagtcaaacaggtaaaccggtggatgaccccgcgaaactactgggtgcattagccagcttacatgaattaccccgtgagaatcccaaatgggcagaatggaaaataaaagggcaagcattactcaataagaaaaaggaagattag

SEQ ID NO: 281512 - DNA, 837 bp, Morganella morganii
atgagaaatataatagctattattgtatttaattttatatttttcttatcttatgcgcaggaatccatcatcaaacctgaaaaaccggatatacaaaactggagttattccggacttgacggtaaatatgacagagaacaactcagaagaggtcttcaggtttaccaggagaaatgtcagtcctgtcatggtatgaaatatcttgaattttaccagctgacagatactgacggacccggattcacaccagaagaagctaaactgatagctgagggatatgttttcgctgatactgatgatatggggcaacctgttgaacgtccgggaatactcactgatttttttccatcaccttatttaaactcacaggaagcgagttatcttaataatggtaaagagccggtggatctgacatatatcacaaaagcacgaggatatgaaagaggttttccgcaatcattttttgatgcctttattccgtatgataaccatggctctgattatgtttatgcactcctgactggatatcctgataatacgtcagaaggtgatgcgtttgtatttaatcgttattatcccggcggattaatcgcaatgaataagcaacttcatgatggcgatgtaatatataaagataatataagtatggtcccggaaacagcagagcaatacgcaaaagatgtcactgcttttctggcctgggctgctgacccctaccgggaaagcagagcagaaaaaggatggatagttttaggatatctttcagtgcttcttatccttttatttatattgatgatgataaaaaataaaacaaaggaaaaaaatggaatcatataa

SEQ ID NO: 281513 - DNA, 1209 bp, Morganella morganii
atgcataaaattcctgaagcaaccgggaaaaatcccggtacatccgtgctgaagaaattcttattattgataaaaaaaataataaagctacctaagtcggccgggacgttatgggtctttggtgccggagccatattattggttatgctgactatacaggtagtgacaggactaatccttgcaatgtattatgtacccactgcagagcaggcatttgattccgtaattaatattataagaaatataaataatggtgaacttatcagaaatttgcatacgataggtgcgtcacttttctttatagcctgttatatacatatattcaggggaatgtactacagtgtttaccgccgtccatttattaaaatgtggatgataagtgtgacactgtatttgttgctgattataactgcatttttgggatatagtcttatctggggacaaaaaagttactgggcggctacggtaatgacggagttaagcaaagctattccgtttgttggtgaatctgtacatagttttattgttggcggtttttcagtaggaacacctatgcttggtcgtttttatgttctccattttcttataccactcattattattattttcactgtcatacatatacgttcggtgcagcttgcattttctaaagcaattaataaaccatttacggataatcagcaaagaaaactattatttaattatgaaataacaaatgaagacgcaataaaagtagttttatttttatttgtactgacctggtttgttttctttactccgcagtcattaatgcatgcggataattttataaaagcagacccggcagttacccccgaaattgtatccccggaatggtattttctgacactgttttcaatcttacgatgctttcctgatgagctggcaggaattacagcaatgtttggtgctgtctttgttttctatcttttaccatggctggatagatcaaagtctaagttcagaaattataatatatatttaaagattatattttttatctggattggcaacgccatttttttgggatggctgggatcacaggcattaagcggtcctgatttaattaactggctgactgataaagatacaggctgggtaaggcctgcatcccagctgtcaactgtaatttatttttcttattttttcattgtattaccatgcagaaaatttatagaaaagcaggattaa

SEQ ID NO: 281514 - DNA, 567 bp, Morganella morganii
atgaatggcaagagtggcaaaataatacaggatacctgtaagacattattaagccgcagaaaatgtatttacaggctgacacaactggtaggtactgtgggtattgctgtggctgtctggcctgtggcaatgagcttcgggcccgataaaagaagtttaatcagcagtggcccgatagatatcaatcttgagaatttgcaacccggacagacgataaaaaaagtatggagggataagctgatcatagtccggtatcgcacagagagcgaaatccttgctgcccgttcctccgatatatcagatcagcttgacccgcagccggatactgagagggtcagggagggtcatgaacaatggttagttgtttttggtaattgtccacacgcgggctgcataccacgtgaagtcagcggcaaaaatacaggatggatttgcccttgtcatggttctgagtttgatatatccggtcgtgttacaaaaggtccttcaactaaaaatctgggtattccggaatatatatttttgaatgaaggaacaatattacgggtaggtaccggtaatgcataa

SEQ ID NO: 281515 - DNA, 441 bp, Morganella morganii
atgaattttatgagaaatattttggtttttgcaggtgtgttgttactgatttcaccagttatggctgaaacacatgaggttttgatgaaaaacaggggaacagccggtccgatgatttatgagccggattatattgaaattaaccccggggatacgattaaatttgtccggactcataaaagtcataatgcagcctctattaaggaaatgtctccggaaggatataaaggctttataggtaaaattgaccaggaaatagaagtaaaatatgatgatactggttactacggaataaaatgcacacctcattatgcacagggaatgataatgctggttaaagttggtgacgctgaatttcctcagtcctatcgtgagttcaaagcaccaggattagctgataagcggtttaagaaaataatagaaatgaatgttgataaatga

SEQ ID NO: 281516 - DNA, 846 bp, Morganella morganii
atgacatttgactgctgtgaatccggatatacggataaatcgttaccggatgttttaccggtattaaatattgagcgtatcagcttccgtatcaggaaaaaaattattgttaacaatgtgtcagtaaaagtaaaaaaaggggaatttctcggtattatcggggcaaacggctcaggaaaaacaacactcatttccatgattgccggtctttataaacccttttcaggaaatgttgaatttaatggtaaaaaaataggattgtactcccgtcgtcaactggcacaaaaaatggcactggtagaacaacacgcggaaacaaccgaccatatgacagtaagtcaggttgtggggctgggcagaatacctcatctgagtcttctgaacccctggtctgaaaaagataatttacttatcaatgaaaccattaacaaaataggtatggaaggatttggtaacagatactggcagacattatccggaggagagcgtaaacgtacccatatcggcagagcgcttgcacaggaaccggaattattagtgatggatgagccaacaaatcatctggatgtcaggcatcagatagaattattgtctctgattaaatccctgaaactgacagtaattacatcattacatgatctgaatcatgcagcaatgttttgtgacagagtggctgttatgcaggaaggaaaactggttgctatagatatacctgataaaatatttactgcagagaatattaaattatattttggtatatcagctgttgtagaaacggaggggaataacaaaaattgttttatccgatataaatatccggaattagttaatcattctctcaactag

SEQ ID NO: 281517 - DNA, 1065 bp, Morganella morganii
atgtatttatcgtctgtgggatgctttccctttttacggtttgtggctaaaggtactttttattttttaattaccggcctgcttttatgtattgctgttttattgggtatttcaattggtgaaacagttattccgtggaaaaacgttatagaaacactgggaaataagattttcggattacattatgatgtggatactttagatgccggaattatatggaattaccggttaaccagggcaatagtttctgcatgctgtggtgcctgtcttgctgtctccggtgtggtgttacagtcgttgttgcgtaacccgctggcagacccttatcttctgggaatttctgcaggggcatcgacaggagcggtctctgtcgcattaatcggggttggtggcggaattatttcaatgtcttcaggtgcgtttgtcggggcactggttgcatttttatttgttgctgttcttacaacccttgcccgtggttcaagggaggcggtagcgactcagattatattagccggtattgcaagctcacaattatttaatgcgctcacctcgctgattatcacaaagtcagcgaatgctgagcaggcaagaggaattatgttttggttactcggcaacctgagcggagtacgctggcctgatgtggttcttgctgttcctgtgactctggccggcatcatggtgtgctgctgctatgtgagatcacttgatgcatttactttcggtgttcagtctgcggcatcactgggtattccggtaaaacggacgcaggcagttttgatcacggcgacaaccttaatgacagcaatcatggtatcgattgtcggcgcgattggtttcgtgggactggttgttccgcatgcaaccagattagttgttggccatcagcacaaccggcttttgcctgtaagtgcgatagcgggggcggttttcatgatatcagcagatgttatttcacgaattgttgtgacgggccaggttttgccaattggtgtcatcactgcattagtcggcgcaccgatatttgcagttattctggtaaggggacaacgggtaaaatga

SEQ ID NO: 281518 - DNA, 1047 bp, Morganella morganii
atgcttagtaacaatattaaaacaaaaaaacgaaaaataaaaaataaatttatcattagtacaagtagcctcttattattattctccggagtttcattttctgccaaaactgaatatccgatcacaattaagaactgcggaaaggatattacttttacaaaagcgcctgagcatgttgtaaccgtaggccagaacagcacagaaatcatgtatatgctgggacttgctgatcatgtcgcaggaacatcgctttggttttcccctgtcatggagcaattcaaggaacagaacgctaaaattgacattattgctgaaaatattccaacatttgaagggattatagctaaaaaacctgacatgatagcaaatcagttcgaatggcagataggcccagtgggagttgttgcaacttatgagcagtttgacgagttaaaggtccctgtttatacatctccggctgattgtgcaaaaggcaatgatgaggggggggatggtgtaagaaaagaaatgtttgatattaatcttgtttatcaggagattaatgatatagctaaaatatttgatgtccaggatcgtggtaatgagttggtaacctcgctgaaggaaagagagagattagcaaaagaaaaagtagcctctattaaatcaggaacttctgctgtattttggttttccagtgcagatttagaattagacccttatgttgccggaaatctgggcccagctgcttatattgccaaagaacttggcattaaaaatattattgattctgatgaagagtggccaactgttggttgggagacggttgcaaaggcaaatccatcaatgattgtattaggggagatgacccgccgacgttttccggctgatgactggaaagttaaaatggaatatctgaagtcagaccctgtaaccagtcttattcctgctgttaaaaataactatttacccgtgattgatgtgcagacaatgaatgcgggtatacgaacagttgacggattagagcaaattgcagatgcattattgaaatataatttggctgattaa

SEQ ID NO: 281519 - DNA, 399 bp, Morganella morganii
atggatgaagacagctggcagaaattaaaacaccttatcagtgaaaaaaacctggtgattgtcagtcttgaccttccgacgagccatatagcgctgacatcacctgccggtgatgagtttacccgggtaatgcttaaagcagttaacgggatgatgcttgatatgctggccgcgattgcccgcaaagactatgaggatcgacgccgccgccagaaagaagggattgcgaaagcgaaaatagccggaaaataccagggacgccgggctgatgagctgttgcataaaaaaatcatagagctcagggtcaaaaacaaagagagcatccgcgatacggcgaggttgtgcgacgtttcagaacggacagttatacgggttgttaaattcagtgctggttcctga

SEQ ID NO: 281520 - DNA, 150 bp, Morganella morganii
atgaagaaaacacgttctaccgagtcgcagattgtcagtattttaaagctggctgactccggcatgaaaatcgacgagatttgccgtcagaacgggatcagtaacgctacatatcgcatctatggacaacctccgttttgcaagtactga

SEQ ID NO: 281521 - DNA, 1788 bp, Morganella morganii
atgagcgaatcactgtacttccggacctgcgccagaatgcatcgggctaattacctgctaaaaggcttactaacgacattactgtcgcgggtcattacgctggcaggcattgtcgtgctgatagggatgttaccctggttttctggccaggacccggccatggcgctactgcgggcacgttctgctgaacaggaagcaaccccggaagcattagcagcgattcgccagtcactggggctcgagcaaggtccggtgcaactactgctcaactggctcagcggccttttgcagggagatgcaggcaactcctggatatcaggacgtccggtattgccaggaatggtacaggcaactcaggtgtcactgacgttgatgcttatttccgctggggtggctctggcgctgtcagcgatgatttgcctcccgactttttatcgcgggttacatggacagtcataccgttctacaggtttttttgcatcgatattcacggcattgcccgagtttcttctggcatcatttttactagtcgtcggtgcagtgtggctgaagtggttaccgccttatggctggaacggtctgcactatgcggtgttacctgcgctggccatggggatcccggccggcggctatctggggcggatattctcagatgctctggctgcaactttcagtgaaaactggataacgacctggacagtttcagggataccgcgccggcacatcatttgtgcagtgcttaagcgaactctctccaccattatgccgttaattggccttgttctggtttcattgacggggagcgcagtggcggttgaaaaagtctttgctattccggggctgggcagagcgacactgggagcggtggtcgcacaggatcttcctgcacttcaaaccggtgttctcttcctgctcattattgcttttatgttcggtatgctggctgcggcgagcagataccttattctcggacgtgctctgcgcacatcatctctgccggtgaccagtgaacaggatagaaaaaacgggcgtatgttacttgtgttgccggttgtctgtgccgtggcactatgcgtgcttctgcttagtggattaccacgtgacccctacacatctgaatttctgcgccttgcttccccgtccttttcactgccctttggcgccgatgccatgggacgcgatttgctcgccagagtcgcacacgggacggtgaatacctgcgttctcgcgctgattgtctcgtttatttgtctgatcctggggttagtgattggccatttcccacaaatatttgtggggccaaccgagatggcaaatgctttgcctccggttattgccggtttgcttgtgatttctgtcagcggtcccagcaattcaggtgcagcaatagcgatagtggctgtaggttgggctcctctggcgacacataccgcggcgctggcgaccgaaattcgtgccagaccttacatcaatatgctacctgttctgggtgttggctggctgcgtcagaatttgttttatgttttccctgcgttgatcggccctcttttccgtcatgctatgcttcgtttaccagggattgcactggcgttagcctcacttggttttcttggtctgggcgcatcccctcctgaacctgaatggggaagagtgctggcagaaggaatgccttatcttgaacgcgcatattgggtcgttctggccccagcattagcgcttgccgttttatcagtgatgggggtgagtctggcgggccttgctggtaaaaaaagtaaatgcgtacaatga

SEQ ID NO: 281522 - DNA, 1527 bp, Morganella morganii
atgaatacaggtaaaacctcctggcctgtttatggatttctctctgccaccctgttacttaccggctgttttaatgaagcacaggatgagtctgtcagtaccagcaaagagagaatcaaagttgcacatcttttgccgccccgttccggcctgactccactcagtgatgatgcgtttaaattatcgcgctggagtaccgctgaaaccctggtagtgctcaatagtacgggcgacgcacagccggcattgtcgactcaatggcagcaaatcaatgacacgacctggcgctttgaactgcgtccgaacgtcaggtttcatgataatacctctctgaccgcgcagtcggttgttaatgccctgaacgttgccgccactgccacgcctaaaccacgtattcttgatggagtaaaactcagtgtaaaagctgatggcgataatgctgttctggtgacaacagagagaaccgatccacttctgccacagcgactttccagccctcagttggcgattctgtccctgaatgcctataaagaaaatggtgtggtgagcccggtaaatacgggaaccgggccatttatcttacgccgcgtggatggcaccagcagtgcatctcttgatcgctttgatgcctactggggtgagaaggcgaaagccagcggtatcgatgcaagctttgtcccggatggtgcagcacgtgctgccgcattacgtaccggtaccgcagatattatcgaggcgatccccgtgtcccaggccccgcttctggatcagtcgctggttcatgaagtgcctatgccaagaaccaatacgctttatctcaatacagcgcacggtgtgatgaaagacccggcgatgcgtgctgcagttcgtgaagccattgatcgccggcaaattgtcgacaatgtttatgagaaacgtgcagacatcgccagagggcttcttggcccggccttaccatgggcggcacaattacgtaaaccggtgaccaacccggttcatcctgatgcacctgatggagccacaatcactctggcaacattcagcgatcgtgcggaattacccgaagcctctgtttatctggcgcaacagttaaccgctgccggatttaacgttaaacaagtggttcgcgaatatgcgcagatagaagctgatgcgctggctggaaagtttgatgcatttattctgtcgcgtgcaaccgtgctggactccggcgacccggttgcctacatgtacagtgattttgcctgtgaaggctcgttcaatatctcccagctgtgtcggccagagattgatgccgcactgaaaaaagccggagaaacacctgccggtgaggcccgccgccaagcgataatggaagccgagaatctgattctggccagtgatgcggccatccccatgctgcatgaacgtgttattcagggagagagtgcgacactaaaaaatgcgctacgtgaccctcgcgagcgcacgctgattaatagccagacggagttagttgctggcaaccagaatacgacaacacagtaa

SEQ ID NO: 281523 - DNA, 1245 bp, Morganella morganii
atgaccgatttgacttcagggaagcaagcacacacttctccccccttactgctggccagccagtttattttcaacaccggattttatgcggtggttccttttctggcccttttcctgcgcgataatatgctgttgtcaggcgccgcgattggcctcgtgctcggtctcagaaccttttcgcaacagggaatgtttctggtgggcggcgcacttaccgacagattcggcggtcgcgcaatcatcctctgcggctgcctggtccgaatcagcggatacctgttgcttgccaccagcgactcgttacagggggtgattctgggggcctgtctgaccggtattggtggtgcactcttctcgccggccattgaatcactgatggcgcaggcgggcacgcaaagtgaaaaggaaggcaagcgcagccgttcagaatggttcgcgttattttctgtttgtggagagctgggcgctgttatcgggccattgctgggtgcattgctgacaggctacagtttccagtacgtcgcgcttggtggtgctggcgtcttcctgtttgcactgatcgccctctatttcatgttgccgacagatggcgttcatagtcccagccttaacattgcaccctggtggacggcatttcagcaacgccgctttgttgcctttattgtcgcctacagtgcttacctgttcagctataaccagctttatctggcattacccgttgaactgcgtcgttccggaggaagtgaagcggatcttggtcccctgtttatgctggcctctgttctggttgttttcctgcagttaccgctggcacgattcgcccgacagcgaggtgccgagatgattttgcctgcagggtttttcctgctcgcattgtccttttttagtgtctcggtgttagctggtacaacgccgccagacaatgtgtggcgacttctcccggctgtttcactggttacactgcttacactgggccagatgatgattgttcccgtcggtatggatatgatccccgtttttgccagagataaaaatctgggtgcgcactatggggcactttcatccatgggcggcgtagcagtactgacaggaaattttgtctttggtagtctgctggattatgcactcaccccctctccgctggcttttatgccatggctgctgatgggttgtataccattatgcagcgctgtggccatgttatttattttacggacgtttaaaaccccctatgcaaatcaataa

SEQ ID NO: 281524 - DNA, 837 bp, Morganella morganii
atgagtattttatcacaaactgcatcctctcactttattcgggtagacagaatttcccgctttcgcagccgccccgttttcccctggcagaaagccacatccggtaatgccattctggaagatttttcactcacactgccccggcatgagtgtgtgggtctgctcggctgttccgggtgtgggaaatcaacgttactgaaagcgattctggctcttgaggcagtggatggcggtacgatttattgtgatggaaaggtagtcagaccgggttctgttcgcgccctgagatggtaccgtcgccgggttcagtatcttccccaggagccagccagtacactgcctcctgccatgcgtgtcaaggatgttctcagcgagccgataaggctcctgggtaataatggacgcagcgcatctccggatcttgccacggtgcttgagcaggttgaacttagcccgtcactcctcaacaaatacgccggatctctttccggtggtcaggctcagcgcgttgcactggcgagagcgttgatcattcagcccgattttttgctggctgatgagccggtaagcgggctggatcttccattacgtgaacagattaaagcgttgcttttacggataacgaaagaaaaccggatggggttactgcttgtttctcatgacatatctatgctggctggattatgcgacagaacgctggtcatggagaccggtaaaatcattgaagaccgtacgacgttgcaaatactgaatgagcctcatcatccgcatacacgccgattgctggatgcggtaccgggtcttttttatcatatcccgccacgggcatatgactga

SEQ ID NO: 281525 - DNA, 852 bp, Morganella morganii
atgttatgttattacatatcagtcagcggcgtatgctattatatgaacaattattttccttatccaatacccgttctggatgtaaaaggtatcagtatcgctacgggtaattacacactggttagtactgttagctttcgtcttatggaaggcgaaagggtctgtattataggttcatccggttcaggtaaatccctgacagcgaaagccatcattggcacattaccggccgagttatcattacaaggaagcattcgcattaacggttctgatgtcggtgggattcatccctcacaacggcctcaacatgcgctttgctccgccatctttcaggattcctccactgcgcttaacccgttaatgccggtgggtcgccagttgactctggcactgaacacaggtaatgacgcaatgctgtcatccttgctggatgcgctgcagttgagtggtatcccccaattgctctcccgttatcctgctgaactctctggcggccagcgtcagcggatttgtatcgcgctggcgctgatcggtaataatcgtctgctggttgctgatgaacctacaacggcactggatgtgattagccagcagcaggttctgcaagtattgagtcaacattcagcacgtattttgcccccggccctgttattcattactcacgatatcgccgttgccactcaactttgccagcgaggtattgttatggaaaaaggacaaattgtggaatgcggcactatgccccagcttctgaatgcgccggttcatccttatacacgcagacttgtgcaggccgcacggaccgctcaacttgcgtcagcgaaacatacccgtggggcactcaccggatga

SEQ ID NO: 281526 - DNA, 699 bp, Morganella morganii
atggatcgacacgacaaacttggataccgacttggattgatactgacgcgcctcaacaatggcgagtcactgaccgtgaggggtcttgctgacgaatttaacgtttgcgaaaaaacaatacggcgagatctgaccgagcgcctggcttatctgaatctgcttcgacagggcaaacagtatcgactgcctaaaggtattctaggacaacgcagcaacacggatttacgccgttttacccgtatcttcggtatcgaagggctgttcccgcgctgggaagatcgcctgctgaacgtgctactgggggataccgaaaacaatcccttcctgatcaagcaacgaccctatgagaattgcggtgctttcatgtccactcttaatgctatttccggggcgattcaggcatcccagaaaattgcgtttacctataaagacaagacgttttcggccactgaaccttatcgtgttgtgaatgaccgaggtctctggtatctggccgcccgacatgaaggaacgttgaagagttttgcagtttccacgatgacccatgtgcaggtcagcaatacgcgattcagtcctgatcccgttgtcagtcagcaggtggaacttgcggaaagcatctggtatggcgataaactcaccgaagtactgatcgctgtatcagcccgtgcggcatcccagtggcttttacgcctagtttaa

SEQ ID NO: 281527 - DNA, 3078 bp, Morganella morganii
atgtcaggaattctatttgtaaacataagcgatattcatgttaaagaatctaataaaaaaagagtattggaaaaactatcagcatttcaagactctctaattggattaaaaaaattaggcggttttgaaaaaataattctgcttgtatcaggtgatttagccttcagtggtaaaaaagcagagtatgatatattaagtaatgtttttgaagatttagcaactagttatgatttaattatgtgtgcaggaaatcatgaccatgactttagctcatatactgataacagtgtcagaaatcatcttctcaaaatggattcatcacaacaaaacgaagaatcaattgcattcatcacgaagggtatggcagattattatgaatttgagaaaaaatacgaaacaatatcatcaataaacacctctttgtctaaaacatatactctcacagcaaatgcagaaacaattaacatctccacaattaatactgcatggtgctcacaaataaaagagcatggtggtgacatatttttcccacctcagtacttaccaacggttcaaaaagggaaattgaatataattttctttcaccacccactagcctggtttgaacctaataatcaaaaagagatcagaaataatttacgaaccgattattcaataatccttactggccatgaacatcttagcgataattttaaagtgattggagaaaccagtaattgtttaatgattgaagccatgccatttgatgacacaactattgaaacaaatggatttacgacctttgaaatttttgataacgacattttgatcaagaactaccattggaatggcagtagctttgaagaagctaaggaaatcagaaaaagtgatgttatgaaaggtaactcaatttcaacatcaatatactcagtgcaatatgatttctataaaagccttctagatataggtgtaaatttcatacatcctgacaaagacattatagaccttaatgatgtttttgtttaccccaacctcaaaaaccttagcactgaagataagctagaaattaagaaaacatcatctgaaaccctatttaatagcgctcataataaaatattacttataggtgatgagtattgtggaaaatcaactttaataaaaaaactatttgttgactctatttctaaaaatttcctgccacttttaatagaaggtggttccattcgtaatggaggcgtagaatttgataaaatcatcaatcgccatgtcatcaaacaatatgaagggatcagtaaattagaatatgcctcctgctctctcacaaaagttctgctcttagatggatttgattttgtcaaaggagataaaaagtcaataaaagcttttctaacaagcgccgaatcgttatttgataagataatagtcactgttagtgacacattcgactttggaggaagcgatatattaggggagagttattttgatggcaaatatcaaaaatatgaaatcaacaaactaggttacaagcagagatacgaactagttaacaaatggaatcagctaaaagaagactgccaaaatgaaaaaagcgcattggtttataaaaataatgaagcggtcaaaaccataacaaaagttcttggcagaaattatatcccttccactcccttctttttactaacattactccaatccatggagtctggtaatcctctagaggtgagttctaatacatatggctattattaccaatatctcataacacaaagcttggggaattcatcagtaaaaaaagatgaactggacgaactcttcaattatataaaagaacttgcccattattattgcaaaagtaatctcaaagatgaatcaaaaactaacttgtgggacttcaataaatatttttgcgaagagtatggggttcagattgatttccacacaaggtttgagcttttaaagaaagccaaaataatcgaagaaaaagatggtgggtattataaattcaaatatccttatgtatattatttcttcattgcacaatatctttcagacactataaaatcagataacacaatacaaactattgatgcactagttagctctttgaacaagagaagaagcatgagcatcttaatgttcttaactcaccactcccgtgatgagtctattttggaaaaggttgtaacacaatccaaaacattattcatcaaatcacacccaacaaaaatggaaatggatgctgattttataaataagattgttgaaaaactaccagaactaccaataatctataaacaacagaatcggcttgactacagactggaacacgaagaagaaaaagatagaatagaagagggggaggccagtagttttgaatcagtattaaactctgaagaagaggatgatgtcagttataatacagcacaagtagaaaaggagaggagtgttatagaatcaagtgatttcataagagatactaaccttacatttaaatcattggaaatccttggacagctttctaggaattattatggttctttaaaagtaagtcaaaaaagaaaacttctagaagaagctatcaaagcaccattaagaactcttgattattacttttcaataatcgaggacaactctgacgctgcattagaattagttgaaaagaaaatccttgaaaaatatgatggaaaaattgattccacaacctcaaatgaggttaaagaaactgccagaagattctttttcgaaatgatcgttagcttaagttattttttcattacaaagatatcttcttctattggcagcgcaaacttgcaaaatataattgatgaaatatgtgatgaaataggttcaaactcaggcaagttaataaaactggcaactctcttagaattgggtaactcagtatccgtagaagacttcagacgtttcttttcaacaatggaaaaaaatcatctatcggatagattattaaaggcaattgttgtcaattatctgtatatgtttgagcgctccgatagcgaaacacagcagatatgccatatcacaggtatcaactacaggtctatatcaaaacagataggctttgatagaatcatttaa

SEQ ID NO: 281528 - DNA, 465 bp, Morganella morganii
atgcgtttttcatggaatgaaatacggaaagatacagagaaatatgacggagtaacctatctaaaagggactcaccctgtggtgtgtagaatgctcggactaagaaaccctggcggtgccaatacacatgcagattggaaagatgtgcagatcgatgatttccatatggcaaaaggatatcgtataaaaacggtggttggtgggtggtatgatattgatgtttgcatccagcttacagctgcatcatcaggagctattcttcttaaaattgctgattcagaaacatcggacggaatggattacgcgatcactcaagtcagtaagtcagaaggtaaaaaaactgcccgcctcagatattcaggaaggatttcttcaggtgcgtatatttatatcactggctctggtgttcagtttgaatctgtatgggataatgattcatatattcatgttgagcttgcagggtga

SEQ ID NO: 281529 - DNA, 1482 bp, Morganella morganii
atgaaaggaaatgtggctaaaacaggaagatcatttaaaaatagagttgattatatattaaaagatgatcacgatttcatttgtagtaatatgtcagcagataaaaataatgttagtgatttaactgaggagttcaaagctgtaagcagttttagacctgatataaaaaaaccagtttttcacgcctttttatctcttcccaagaatgaacatttaacagatgaaaaatggcaagagatagcaaaagactatttgaaagaaatgagtattgatatagaaaaacatcaatatatttgtgtgcgtcataaagatacagatcaagaccatatccatatagtggcaaacaggatcggccttgatggttctgtatggcacggtcagcactcagcatttaatacaatagcagcttgtgaacgtttggagataaagcacagcttaacgattaccaagagcttgcaggggcaaaaatcagacgtatcagcaccaactaagaacgagatcgagcaagccctacgtacaggagagaaaccagcccgtttagtgctacagaacgcactacaagcggctttagtcggtaagcctgatttgtctacgttcttggaacgtctgcaggctgtaggcatcgagccggcctttaacgttgcaagcactggcaacgtcgccggagtgtcatttggtatcaaaaataatgaaaaaaatattttcttcaagggatcatctcttggtaaaaaattcagttggaacacaattaaagcaaaggtgaaatatgacaaaaatagagatgatgaactcattagaagattcgcagcaagaaaaacagatgacgaaaatagtattggacgatcacctattgaaccaaatatcaatgacagtagagccgttgacggaatcaatgatgatactttcggagtcagtcagcacagcattaaatcagacacaacagacactaacaagagtgaacaactcattagaagcaacaacaacagctttaaattcagcgaaaaatataatagaccaacaaacaaaaagattggaagagcaacacataaagctgcacaaatactcaacagagttaaaaaacaatacaatcaaaaatcaaacaaaattaattatcaaggtggcttcaatagtgggatgtctaaatttagcggtggttctattggtaggatacttgatcatgcagaaacagccaacgcagccaccaatcaatttagactcaagagcggtagccgcttcaatagtagagcagctaagatcgaagaaataagacgtagacttggaatagaaaaacctattattcagccaaggaaaatacttaaagaagaaataaagaaaaagcctttaggttcgagtatgaatgaaaatagatttaaatcgaagttaaaagaagctcttaaaaaaggaaggccaaaaaatgaaacaatatccttacagaaggcagatgaacagaatttaaaatcaaaggcttttaattctctttaa

SEQ ID NO: 281530 - DNA, 372 bp, Morganella morganii
atgcgaacagatagaaaaagagggcgtatagaattaaatcacgaagaacgcagagatatatctatacagtttagagtaaacaaagcagagtttgaatatttaaaagagcttgttgaagcatccggccttgagagaggccattacatccgaagagaaatattaaactctgaaccagtgataaaaagaaaaatgcctgagtttgagcaatcgttatatagggaaatacaacatcaaggtaataatataaatcagattgctaaaaagctaaatacgaatgaagactttaaacaatctgtagccgcagaagctaactttgccataaagcaacttatgaaaagaatattaaaagcttgtgaggtttataccgtatga

SEQ ID NO: 281531 - DNA, 291 bp, Morganella morganii
atgaatgtagaaaacttaatgaatagtatgactatagaatataagctcgaaatactggcaagatttttttattacatagaacataacaaagatataccatttaatgaaatcaatagtgatgagcgagatttatgttattttgtggctcatagatatatacaagagaataaagctgatgagcttattgaagcattaattattgaaaatgataacgactacataagagcaacagatgattacattatccagaggaataaagaatgcgaacagatagaaaaagagggcgtatag

SEQ ID NO: 281532 - DNA, 714 bp, Morganella morganii
atgtatacagaacaggagccggaaaaaatatatgcatgttgtaataaagtaatcagggtactcggatttatttcattaatattaattgtttttggtcttacctgggggatgatttatgctccggaagacaggattcagggtaatggttaccgtattatttatttacatgtacctgctgcaattctttctgttattatttatatctttatggctttctgtgctgtattgaatatggcatgtggaataagattatttagctggctggcttcctctgcaatgctgacaggaatggtatctactataattgctttagttaccggagctatatgggggaaaccaatgtggggaacctggtgggtatgggatgccaggttaacatctgagcttattttattatttttatacatcagtattattgcactcaataattcatttaattatcaacggaatggtgaaaaaatagtaaatatatttattattatcggcttgattaatataccaattattcattactcagtggactggtggaataccctgcatcagggagcaacagatttacatgaaaccatagatataagtatgagggtacctttaaggattacaatagccggtttttttgtattgtttattacactgactctgatgcagctgaaaaatgttattctgcaagcagaaataaataaatattgggtatataagcatgttattaaataa

SEQ ID NO: 281533 - DNA, 669 bp, Morganella morganii
atgaatttactattcataaggaataatataaaagttctgtcgagaaatattaatcaacttgttagtccattattattttttatgattgtgatggttttttttccgctgggccttggtcaggatccagagttattgtctgctgtttcagtatctgttttctgggttgtcacaatgttgtcatcattattatcactggatcgtatttttaaagatgactacgaggatggaacactggagcaggtatatatttctgttaattcattttatttttttattatatctaagatatctgttcattggctgacttcttttctcccaataatattattttgtccggtaacagctgtttttttatcaatggaatatgataaactaataataatgattattgcattactattaggtactcctgttcttagtgtcattagtgccataggctcttcattaacgttatcccttaaaaagggcggttttctcatcagtataattacattaccactttatattcctgttcttatctggggatgcggagtcagtaatttatatcaaaataatcagcctgttgacggaggacttgctgttttggctttattatccgtaacaagttttattcttatgccttttgctatttctgctgtattaaagatacatattgctgatagcagataa

SEQ ID NO: 281534 - DNA, 642 bp, Morganella morganii
gtgttaagtatagaggaagtgacatttaaccaaagagagtccgttttatttgacagggtcagtcttgtattgaaatctggtgatgttgtcaggatagatggaagtaacggaacaggtaaaaccacattactgaaaataatcacaggaatgattattcctgattccggaaaagtaacctggaataataagtctatttataaattaaaagaggattactatagtaatataatctatcttgggcataaacttgcattaaagtatgatcttactgtatcagaaaatttacagttttattattctttaaaacgcagtgacaaaaagtatttaatattaaaaccgatactggataaattaaatctgactgactacagccattcattagttaagattttatctgaaggacaaaaaagacgtattgcattagcccggttatggttcagcagtgctcagttatggatattggatgaaccatttactgcaattgataaagatctgaaaagtaagctgaatgaattatttgacaaccacataaacaatggcggaatgattttgtatacttcacacaatgaaactataaaaaatagtattttattccgggtggataacgatccgatggctcaggaagtcatggaaactgaataa

SEQ ID NO: 281535 - DNA, 150 bp, Morganella morganii
atgaaaaagacacgttataccgaagaacagatagcatttgccctgaaacaggctgaaaccggtaccagggtagaggaagtgtgcagaaagatgggtatttctgaggccactttttacatctatggactacctccgttttgcaagtactga

SEQ ID NO: 281536 - DNA, 945 bp, Morganella morganii
atggataatctggatatagaaatagatggtttaaaaaaagtgaaggacataaataaagcaagggtgtttatatatgtttgctttgagatgctaaactatagatgtgatgagtttcagaggtttaatttttttaccaacgacaagagcatattgatgagggtaatatgtgacttggttgatagttatgataaccactataatagtcatataaagaacgcagttgaaataactgataaaataataataaatgaaaataactttaattggttgaaagataataaatatgctgtttattacctttggtcggagatgaatcagcttaacctaattaaagatcataatcaaagagcattgctaataagagacattaccgaaataaagaatgcattaaatatcaactggtcattgtctggcgataatgttaacacagatactattaaattcatttttaatcttattaatatgaataatagccagaaagtagatttcgttaataatattaaatattatttcaatgatgcacgtaattctcttggtgaaatttcatggctgtccattgacaataaaaacatttgtagttgggcatgggagtatataaaaaaatacaatcagaaagaacagcaggaatacggaaggaatgccggggtttactcaatttgctactttgatccacttaatgatgaagaaaaatactttgcgatacatgcatcactgagtacatggtattgccatcacagtgagaaaacattattccttaaaaatataacaaaagcgtataagcagagagaattcagagaaaaacgggaaaataaaaaaacactgagttgtattttggatacagatgttaaaactcatcttgaggaactggctgaaacctatgaaatgacgatcaccgatttggtgacccggttaattgagaatgagtacagaacaccgaaaaaataa

SEQ ID NO: 281537 - DNA, 213 bp, Morganella morganii
atgtctgtttttaaattaatggctaccacgctcggcgtggcaacggtggcgttagccacgtactgcgcctggctggctgcggctgaggcggcagacaaagaggatgccacttcagcggaaaaactggcggcagggctcagtgccgcgctggcctgctcagccgtgctgggcggtacccttgaccgtctgctgggccggctctttccccgctga

SEQ ID NO: 281538 - DNA, 249 bp, Morganella morganii
atgggtgatggttcgacacttcgagccatcaccttggaagacgtattttacattctccttctgaaagaaatcctgtcagaaaaagccaacttgctaataataaacccgacaatcgcaataacaaataaactaatattaccagccattattcctgaactcataccaatcaaaactgataatattaaggtgctgaatactattaaaaatacgcaccaacccggcggagcaccgtataatacagttgcttga

SEQ ID NO: 281539 - DNA, 729 bp, Morganella morganii
atggcaacttaccgtatcgaccccgacctcgcgtttatcggtcagtgcagcaatgaggaccttggtctgctggtctccgttctgacacacgacagcaaagacggcaaaaaacgtctggcggagtctctgaccacctcaccggaatatcagctcttttaccctgaccaccagaagtactggcctgccatctgtgccgaactgcaggccttcggggccaacagtctggtcatgctgctgcgcggcaacaagggcgtgctttaccgtgaaatcctgcacgatgtctgcgacaagctgaaagtgaaccacaacaaagaaagtccggtggaaaccaccgaactgaacctgctgatgaaagtactggagaaaagcctgcgggaaatgtcacaggacgaactggtccgttttgcggacggactgaaactgaatctgtccgcaccgactccccagcttatcctgctcgcggtgcaggccgccgtgaccagctccggtgtcgctgccctgcagtttgccacgattgctgctgtcggggtgattgaagccatgggcggtatcgccacctggggaacgctctttgccgctaaccgggctttgggggtactggccggtccggtcgggattgcgctgagctccgcctggctgatagccgatatcgccggtcccgcttaccgggtcaccgttccggcctgcatcattgtggcgtacctgcgccagaaggccctggcggcctga

SEQ ID NO: 281540 - DNA, 231 bp, Morganella morganii
atggtagaccaggcagggagcgccgttttccgggctgagcagaacggacagcagcctgcggtcaagcgaggggaacagcggggtgatatgggtgatatcggcaaagtacaggatatcgctgtctgtccggtacgggcgctgaccggcggccagccggtatccgccctgatgcggctcagtgtccagaaagaccaggcgctcactgaaatcccgctgcagcgtacgggctga

SEQ ID NO: 281541 - DNA, 1077 bp, Morganella morganii
atggctgataaagttaccgaagccgccgttgttggtggcgtggatacacataaagatctgcacgttgccgctgtcgtagatcagaacaataaagtcctggggacccagtatttctccacaacacgacaaggttaccggcagatgctggcatggatgacctcgtttgggatattaaagcgaattggcgttgagtgcacgggtacctatggttccgggctgcttcgctattttcagaacgccggattagaggttcttgaggtgactgcgccggatcgcatggagcgacgcaaacggggtaaaagtgacacgattgatgctgaatgtgccgctcatgcagcattctctggtatcaggacagtgactcccaaaacgcgtgatggcatgattgaatctctgcgggtattaaaaacttgccgaaaaacagcaatatcagcccgcaaagtcgctctccagattatccattccaatattatttctgccccggatgaattacgtgaacagctcagaaatatgacgcgcatgcagctcatcaggactttgggatcctggaagcctgatgccagtgaataccgcaatgttaccaacgtttatcgcatttcattaaagtcccttgcccgacgctatctcgagttacatgacgaaattgctgatctggatgtcatgattgcggcaattgtcgatgagctggcacctgaactgattaaacgtaatgctattggatacgaaagcgcctcgcagttgctgatcactgccggagacaatccccaacgactaaaatcagaatcaggctttgcagcactgtgcggtgtcagccctgtacctgtctcttctggaaaaacgaaccgttatcgacttaaccggggcggagatcgtgcagcgaatagtgcacttcacatcatcgccatcggacgtttacgaactgacgataaaacgaaggaatatgtcgccaggcgagtagccgaagggcatacaaaaatggaagcaatacgctgtctgaagcgctatatctcacgcgaagtttatacattactgcgaaatcaaaacagacaggtcaacagcatcccgataacggcttga

SEQ ID NO: 281542 - DNA, 798 bp, Morganella morganii
atgttgataagaaaagtatgtgatttggtgggtagttatgatgattactgcaacagttatattaaaagagcggttgagataactgatgatataataataagtgaaaataatttcaattggatgaaaggtaataaacatgctgtttattatctatgggcagagacagggcaacttcacttcattaaggatcgaagtcatcgagcgtcactaataaaagatattacagagataaaaaatacattaaacattaatgaatcattatctggtgataatattaatgcggatacgatgaaatttatttttaatcttattaacatgaataacagccagaaagtggaatttgttaacgatatgaaataccaattcaataatgcgcgtaattctctgggtgaaattgcatggctgtcccctgacaacaaacatatttgcagctgggcatgggagtatataaataaatacaatcagaaagaacagcaggagtatggaagatatgccgggatttacccggtttactactttgatccactgaatgatgaagaaaaatactttgcaatacatgcatcactgagtacatggcattgtcatcacagtgaaaaaacattattccttaaaaatataacaaaagcgtataagcagagagaattcagagaaaaacgggaaaataaaaaaacactgagttgtattctggatacagacgttaaaactcatcttgaggaactggctgaggcttatgaaatgacgattactgatttggtgacccggttaattgagaatgagtacagagcaccgaaaaaataa

SEQ ID NO: 281543 - DNA, 372 bp, Morganella morganii
ttgctgtccggcattagccatctcgcggccggtggcgctgaccagctgatacagcgtgtcataagtatatcggttttccggcaccactttctgattacgccagaagcgcgtctcctcggcatcattcgtcacacacagcacattaccgaccggatcatattcatagcgcagatcctgaaatatttttttccgtgccggatgttccgttttgacggcgagcaggcgctgggtctgcggttcataagtgtaagtggtcactacgccgttaccgtgctcctcgcgcaacttctgcccggcagcggaatacatcacagatttgatgatgattttttccgcgccgcctttcaccgtcacccggctggtgctcagtaa

SEQ ID NO: 281544 - DNA, 249 bp, Morganella morganii
atgctcaccaatggtggtgtatttatctggccagacatgattgaaacgtcacttccgatggttaacccgcataacggtaataatgcggaactgagtccggaagccgcaggcattgccgtgtgtttaatgacgttcagtatctggtcattccggactgaaagcgaagtattagttgagtatttttatcagttacgggactacgccctgcagcatgacgagtgtgccgctatttttcatctgattgattaa

SEQ ID NO: 281545 - DNA, 246 bp, Morganella morganii
atgggtgatatcggcaaagtacaggatatcgctgtctgtccggtagggacgctgaccggcagccagccggtatccgccctgatacggctccgtgtccagaaagaccaggcgctcactgaaatcccgctgcagcgtacgggccgaaacattaaactcacgggcgagctgtgccggatacagtgtttcgccgcggaacaggcggctgataatcatggccagccggaatgcaagccggtcatggcgtga

SEQ ID NO: 281546 - DNA, 333 bp, Morganella morganii
atggtagaccagacagggggcaccgttttccggactgagcagaacagacagcagcctgcggtcaagcgaggggaacagcggggtgatatgggtgatatcggcaaagtacagaatatcgctgtctgtccggtaaggacgctgaccggcggccagccggtatccgcccagatacggctccgtgtccagaaagaccaggcgctcactgaaatcccgctgcagtgtgcgggccgagacattaaactcacgggcaagctgtgccggatacagtgtttcgccgcggaacaggcggctgataatgatggccagcctgaatgcaagccggtcatggcgtga

SEQ ID NO: 281547 - DNA, 675 bp, Morganella morganii
atgcatacgtcagattcacgccatgaccggcttgcattccggctggccatgattatcagccgcctgttccgcggcgaaacactgtatccggcacagctcgcccgtgagtttaatgtttcggcccgtacgctgcagcgggatttcagtgagcgcctggtctttctggacacggagccgtatcagggcggataccggctggctgccggtcagcgtccctaccggacagacagcgatatcctgtactttgccgatatcacccatatcaccccgctgttcccctcacttgaccgcaggctgctgtccgtgctgctcagtccggaaaacggtgctccctgcctggtctaccatgagccaccgcagtccgccccgacactgttcggcggcttttatgtggtgacgcaggcgattgtccgcagacggctgctcagcttccgctgtgacggtcaggaccatgagggcatggctccctacaagctgatttattttcagcgggactggtatctgtgcggggaatggcagtctgccctgcgggtgttccggttcagtcagctgcagaacattgccgtgtccggacgccgcttccggcaggacaccgttatcgcacggacagtcatccggcccgaatttatcaccgcattgccccattatcagtttatccgttcattaatcacataa

SEQ ID NO: 281548 - DNA, 225 bp, Morganella morganii
atgaccgatcggcagccgcagatcggtaaagatgctgcgtgccaccagtgcccgctggttacacaacagaatttcgtccgcctgctgctcgtggacatcacccgcccgcaggatgttgtcatggtgccagcatgtccggataaaaccatctttgtggcgggtcatggtcagttcgtggtggtggtaagggttttccggatcgttaatctggcagtagccaactga

SEQ ID NO: 281549 - DNA, 366 bp, Morganella morganii
atgtccggcaggcagtcgcagatcaataaatatgctctgcgccacaaatgcccgttggttacgcaacagtatttcatccgcctgctgctggtggatattccccacccggaagatgttgtcatggtgccagcacgtccggataaaaccgtctttgtagcgtgtcatagtcagttcgtggtgatgatacggatccgctgcgttttcaatctggcaatggtctaccgatttaacgtaatgacggaaaccagccagaccaccggcagcttttaccacggcaggattgtccaggaaacgcagtacccgctcatctgtcagcagcggctgtgcatctgccggtaccagtccggacggaataccattcattga

SEQ ID NO: 281550 - DNA, 300 bp, Morganella morganii
atgatggataatctgtgtgaaatgtatcacggtgcattctgggaattcagcatgctcaccaacggtggcgcatttatctggcctgacatgattgaaacgtcactcccgatggttaacccgcataacggcaataatgcggaactgagtccggaagcggccggtatcgcggtctgtttgatgatgttcagtatctggtcattccggactgaaagcgaagtattagttgagtatttttaccggttacgtaactacgcccttcagcataaggaatgtgctgccatttttcgccttattgattaa

SEQ ID NO: 281551 - DNA, 216 bp, Morganella morganii
atggcgccctacaagctgatttactttcagcgggactggtatctgtgcggggaatggcagtctgccctgcgggtgttccggttcagtcatctgcagaatattgccgtgtccggacgccgtttccggcaggacaccgttatcgcacggacggtcacccggcccgaatttatcaccgcattgccccattatcagtttatccgttcattaatcacataa

SEQ ID NO: 281552 - DNA, 5691 bp, Morganella morganii
atgtctgaaactcttcaccgcacaggcgatactgctggagcctatgttctcaagtctctcgaggatatgcgtcgtaaactattagaccttactgcacgtaatagattgctcaactttccgattgataaaaagcattcttcactacgtattatcaacgaattgcccgatcagctttataaaaccttaataggcgataaagtgatgcagtttgtgccagtacccgatcctacaaaagctcagcttcaacaatatggctatctggggaaagatgaaaagcagtgtgaaattagtcttaaggctgcaccggatgcgaaagcttgggctgaaaaattaggtttacgtactgattttgagctgtttactgaggctcagcctaatgtgtctaattatgagtatcaggtgattaagaaagccagaaatactattgagcagtatctgcaaaataataatggcctgctttctggaattcgtcgtgctggagtcaatgcagatttaccaacacaacagcttgctatgttaatccaaaaacttggttataaggatcttggtgagtttgagcgtgacactaaggcggggataccactaagaactgcaagtattcaggcatctttgactgatgatgatatccaaacgcttcacttcccatcagaacttgaggcgctgctgcgctctattcatggtaaagcgaaaacctctatcgaggagactggagctggcatcctttatttggccttaggatttcttgaatggtatgagtctgatgactctaataaggaaagatatgcgccgttgtttgttattccggttactcttgaaagaggaaagttggactcggaagctgggctttatcgttatcacctgagctatactggtgaagatattctacccaatctgtctctcagagaaaaattacagagtgattttggtattgcgctgcctgtacttgatgaaaatacgcttccggaagcttactttcagcaggtgcaggcgatcattgagagaaataaaccacgctggtcggttcgtcgttatggtgcattgagcttactcaacttcagtaaaatgctgatgtatatcgacctggatccagcccgctggcccgctggcgaaaaaaatattgctaatcatgaagtgataaaacgccttttcacatcgcagacgggagaaggtgggagttcaggtgtttcagctgaatacatgattgatgagataaaccaaatccaccagcaattcccattgattgatgatgctgatagttctcagcacagtgcattgattgatgcggttatggggaaaagtctggtgattgaagggcctccaggtacggggaagtcacaaacaataactaacctaatagccgccgctattttaaacggtaaaaaagtcttgtttgtcgctgagaagcttgccgctttggaagtcgttaaaacacgtctggataaagcgggtttgggagatttttgcttggaattacatagtaataaatctcataagcgaaaagtgttagacgaaattcaaaagcgtattaataaccggtcattggatactcccccccttcatattgagtcagagattgctcgttatgaagagttaaaacgcgaattaaatgattatgcttacgaaattaatcagccatgggaaaatacaggccttactattcatgaaatattcactggtgcgtctcgttatcgccgaatgctcaatattgaaccgaaagatttacatatcgaggggttatctgggaaaaaactcgaccactttgctcaattgagacttaaggatcagatcgattcatttgttaaagttgttcatgaatttcgctcccaactgggggaacaagcacagctttctgatcacccgtggtacggggttaataatctagaaattcagctgtttgacagtaacggtattgttgctaatttagagaaatggcaatctgggttgagtagatggcagcagagtattggaattttcttcggaaaatatgaattatcgaaagaacagctgaatactcttactctgcagcagcagtttgtcgatgactcttgtcgtcttcctgctttatctgaattacttaactttgatgcattcaaacaactaaacgaagataataagcaccaattaagggaatggttacataattttgaagctgtccaatcgatctataaagagatggcgaatcatcttattgccgagaaacttaaagctctagaggttgctatagagctcccttatttttctgatattccaaaagattttggcgtttctgaaaatagcacgattggtgatgttgccagatttatcctttcttttgaacatctaaactcagcttttgagcaacattgggttaatctgtcagatttaattaattcactgcctgcagtgctgtcttcaaaaatgacacccgatctacagggatttaaatacattgttgaacttatcgatcttgtcgttcaaattcctccggagttacttaagcaacgtcacgaatgtttcgatgatgacgaaatagacgatatattagataatttggcagggcatatcacgccgctgattagtgctcatgagactttaaaagtgcactttaaactcgacgcaatacctcatgaggaagagctcaaaagtattgagtcagagttggcacgttcgggtatgttcagttggttaagtggttcgtggagacaggctaaacaatcattgttgaatttatcccaaggggtgaatgttccttggaaggtgctctataatcatttgcccttattacgtcagtatgtgtctgggctgcgtgagttagaacaagaaaatttcagtcgtgatttaggagatagctatcagggtattgatactccgcttgatagtttgaagcagctaagaaaatggtacaaaagcgtcaggatgacgtggggggtaggttttggtcctaatgttgcgttgggcagtgccttattggttcttgatagccaactgataaaaggtattcatcagctcaagcatcagggtattgccgatgatatcaatatcagcatcagaaaattatccgaactccatcagtttctacctaacatcgatgctttgaaagatggaaaaatagtattgattggtgatagcaacgggttaaaagaaattaatggaaggctgattagtgcattggcacctgtgcagcaatggtatagaaatgatgctatgtcgttgcgcgatgtaaaagaaaaaactgctttgctatgtaaattacagctgatgcaaaaccagcttaaggaaaaaccatcccctgaagagctttttggtgcacaagagcagcttcattttggttttgaaaagaaaaatgattatgcacattcggtgatagtaaatactttggcatttgatgatgcaataaagaagaatattcaatctgaagtgctactcagcatcatcaaacgtcttggggataaatgccatctggatatcctttacgatgacttgctccatcttagagaaatatggcaaagccaccttgctcagagagaaaactttatagcggagactcagctcgatatcgcacaatggcagttccgttgtaacgacagcttggcggagcttattacacgaaatgatgaagcaatagttaaaccccgctggctgaacggttggctcaactttaaccgtgtggcaaaagaaatacacgatcagggacttcaacttattcaaaatgcagtatttaaccgcgtattaccggttgagcagatagaaacaggtttaatgatgacgatttacgatcaattggctcgagagattgtgattgctcgtccacatttggtacgtatttctggtaatcagaggtctgtttctcaacagaccttccgtatgtatgataagaaactgaagctattgcaacgccagcgtatagcatcgattattgcccgtaatcaggttccacaagggaattcaggcgggaaaaaatccgcgtacactgagctcgcgctgatcaataatgaactcggtaaaaaaatgcgccatgtcccaatccgacaacttatcaatcgtgcggggagggcattaatccagcttaaaccctgttttatgatggggccgatgtcagtagctaattacctccagccaggagaaattgacttcgacttggtggtaatcgatgaagcttctcaggtcaaacctgaagatgcactgggtgtcatcgctcgcggtaaacaaatcgtcgtagtcggtgatccaaaacagttgcctccaactagtttcttcgatcgggctgattcggatgacggagaagatgaggatattgcggcagttagcctgacagatagtatcctcgatgcttcattgcctctatttccaatgcgccgccttcggtggcattaccgttcacaacatgaaaatttgattgcttattctaatcgtcatttctacgacagtgatttggtggtcttcccctcacctaatgcgcaatcggcagaatatggcattaaattttcacatgtgaaaaatggccgttttatcaatcagcacaatatagaagaagcgagagttatcgctttggctgtggctcaacatgcgatggagtatcctcagcaatcattgggtattgtggcgatgaactctaaacaacgcgatcaaatcgagagagctgttgatgagctatgccgtgaaaacccactgatagatactgcaattggtaagctgagggagcatgccgaccctatttttatcaagaaccttgagaacgttcagggggatgagcgagatgtcatcttcatctcctttacttatgggcccggagaggctggcgggcgtgtatttcaacgttttggtcctatcaactcagatgttggttggcgtcgtttaaatgtactcttcactcgttctcgtaagcgcatgcatgtatttagctcaatgcatgctgatgatatccaagtagcagaaagtacaaagcgcggggttaaagctttacgcggtttcctacactttgctgaaaaaggcaatatggatggtgtaggaatttctacaggaaaagctccggacagtgattttgaaatatcggtgattgatgcattgaaaactgcaggctttgactgtgatccacaagtgggtgttgcaggcttctttatagatattgctgttcgagacccaggtaaacctggccgttatttgatgggaattgaatgtgatggggcaacttatcactccgcaagatcagcacgcgaccgagaccgtttgcgacaagaggtcttggaaggcttaggttggacaatttctcgcatatggtcaacggactggttcagtaatccagatgaagttcttgggcctattatccgagaattgaatcaactcaaaacaacacatacagaggctcaaataattgttgaagagcatttctctggtgtattggtcgatgataaatactctaaagctgaggacgtagtcgattatagtcatgtgtccgagcccttgcattctcgtttagaaagatttgcccaggaaatcattgcagctgagtttccaaatgtctcctcagagcatcgtttgttgagacaatcgatgattgaagctttagttgagcaccagcctctttctaagtctgagtttgttgagcgtattcccaagtatttacgagatgccactgaacctaaagaggccagaatgttccttgatgcggttctcgaaattattgatgggcatgatgtggcggtgggattttaa

SEQ ID NO: 281553 - DNA, 1104 bp, Morganella morganii
ttggtctgctgcctgccgcaactgacggaacagttgcagatcacggcaccgcaggtcgggtttctggtcagtatctatgctgtggtggtcgccattaccgggcctgccatcacgctgatgctggggcgctataaccgcaaaacagttttgctggtgattatggcgatttttattatttccaatatcgcgtatgccattacgcatcagtatgatgtgattctgtttttccgtattttaccggcactgacgcacgcggtattttttgctattgccctggtggtggccgccaatgtggtgccgcctgcacgatctgcccatgcgattgccattgttttttccggggtggctgtcggcatggtgctgggaatgccgctcagtgcctttattgcggaaatgtttacactcaatgctgcgttctggttcggtgcgctgaccagtgtggttgcttttacggggatcgcgctgtttgtgccgtcattaccggtgacacaggcgctgaaagtgcgtgaacagctggcgattctgcaacgtcgtgatgtatggctgagtattgcggcagtgacactgattttttcggcgatgtttgcagggttcagttatatcgccggttatctcgtcactatcaccggtttttccaacaatacgaccagcgcattattggtggtgttcggcatcagtggttatttcggcaactttattttcagccggtatttacagcgcaatgtcattaaaaccacgtcactgtatccgctgctgtttatcctgatttacctggcggtctggctctgcggtccttcgccgcggctgatggtgccggtggtggtgctctggggaatactgcatacgtccgggctgattgtcagccagacccggctgctgtgtgaagccgggaacacgccggaatttgccaacagtctgtatatcggattttccaatctcgggatcaccctgggcgcaatggccggcgggcggatgatccgcagttttggcgttgaaaccattatctgggagggaattgtctttgcggcggcagcctttatcacaatacggctgaaagtccggcaacaggcggcacacaccgtctgccggccgctgatttggtga

SEQ ID NO: 281554 - DNA, 477 bp, Morganella morganii
atgaataaccgattatttaaaaaagtcatggccgcttgtgccgccggggcgattgccggtgcgctggtgctgatccccgcttatgagggtgtcgagtatacgccttattgtgatgtggctggagtgctcaccgtatgttacggacacaccggcagtgatattcagcccggcaagttgtatacggatgctgagtgtaaagcgctgctgcatgacgacctgacgaaagtccggctcgcggttgacccgatgatcaaagtgccgattgatgacaatacccgggcggccatctattcatttgtctacaacgtcggccccggcgcgttctcgcgctccactatgctgcgcaaactcaatgccggtgatatcgccggtgcatgtgacgaaatgaagcgctggacgtttgccggaggtaaacagtggcaggggctgatcaaccggcgcgagacggagaaagcggtatgccacggaaccctttaa

SEQ ID NO: 281555 - DNA, 324 bp, Morganella morganii
atgaaagatggtatttattttgtaaagtttagaagtaacttgcaagacttcggtgatgggacggtggtagttaaaaataacattgtcaacggcggtgactttgcttacctgtacagaggtacggtcagcgacagtaagataacgcttacggttgaaaggcatgatagaacagcaacatccgtgtttggagatgttgataaattcaacctcattttaaatgtttcggagtcaggtaataactatgtacttactggccatgtcgaaggtatgcagcagatgcagatttcaataagtgccaaatttatcggagatgttattggttaa

SEQ ID NO: 281556 - DNA, 1041 bp, Morganella morganii
atgaaaaacactgttaatttaaacagtattaatttagtcaacgacgactcactcagctatatcaaaaccctcccggacaattgcattgatttaatcgccactgaccctccgtattttcaggtaaaaacatgtgcctgggataaccagtggccggacgtttctgcttatctttcctggctggacgaaatgttggcagagttctggcgggtactgaaaccaaacggcagcctgtacctgttttgtggttcacgtctggcctcagatacagaaatgctgttacgggagaggttcagcgttctcagccatatcatatgggcgaaaccttccggaccgtggcggcggcaaaacaaagaaagcctgcgttgttttttcccgtctactgagcggatcctgtttgcagagcattatcagggaccggtaaaaggaaaaggcagtgagtaccaccagcggcgggatgaactgaagaaaaatgtgtttaccccgctgattgagtatttccggcaggcgcgtgatgcattgggtatcacggcaaaagaaattgaccaggcaaccggcaagcagatgtcttcacactggttcgggtacagtcagtggcagttaccgaatgaagcagattaccggaaattacaggtactttttcagcggacagctgcagagtgtcagcgaaataatccgttataccgtgaacataatgatctggtcagtgagcaacacacactcaggcgtgaatatcacgaactggcagatcagtattcgctgttacgtcgttactttacggtatcagttgatgtgccctataccgatgtgtggacattcccgccggttcagtattaccccggaaagcacccctgtgaaaaaccagccgcaatgatggagcacatcataaaagccagcagccgtgaaggtgatttggtcgctgatttctttatggggtccggagcgacactgaaagccgcactgaagcacaatcgccgcgttctgggtgtggagatggatacggagcggtttgagcagacgaagactgaaatagcgttattgtga

SEQ ID NO: 281557 - DNA, 246 bp, Morganella morganii
atgaatgtagcgattaaaaccgcaataggtttactcggcactcagcaaaaacttgcagatgcttgtggagtgactcagcaggcggtctataagtggttaaaaaataaatcccgggtatcgcctgagattgtccctctgattgtgaagtcaacgaatggcatcgttcgtgcctgcgaaatccgtcctgatttacctgagttatttggggaatgtcatgcatccgaaccaaaacacacagatgcctga

SEQ ID NO: 281558 - DNA, 708 bp, Morganella morganii
atgaaaacgacacttgcacaacgattaaaactagccaggaagcatgccaatctctctcagaaagagcttggagatgctattggcgtatcacaggcagcaatccagaaaattgaatccggaagcgctcaaacatcaacaaagttgattgagatagccggagcattatctgtacctgcagaatggctggcatacggcgatggggataacccgttactccctgccggcgatacctattcggttaagagtgagctggccgttcccacagttataaaggcttacaaagtcgaaattctcgatgttgaagccagcgctggacctggcgtgatggttttagatgattttattgaaaccattacagcaattgagtattcggcagaagaggcaaagagactgttcggtggaagaccggctgaaacaatcaagatgatcactgtcaaaggtgactctatggctgacaccttcgagccacgcgatcagatattcgttgatatgaccgttaaccattttgacggtgacggaatttatgtcttcattctggacaatcaactctacatcaaacgcctacaaatgcagtacaagcgccttgcagtgatatcagataacccgaaatatgaaacatggcacctgagcgaagaagctattgatggtgtattcatacaggccaaggtgttagttagtcagtccattaagtataaattccacggctaa

SEQ ID NO: 281559 - DNA, 1158 bp, Morganella morganii
atggcgacaatagaactaaagttgtcccctacgataattgaatggatagctaataaagaaggtgtaaccccaggtcaccttgcagagctcctcacccctaaaaaacctcacaaattacttgttggcgaagtatctaaaactgtagcagagaagctagcaaaaatagccggcataccattcggatatttatttttagattccccaccagaagttgaacctattgatataccagactttagaacaactataaatagtttggagttatctaaagatttcttcgatacttatagggatgttcaatataaaattgattggtataaagaatatttaaagaattctgacttatatgtggcattgccatttgttggtcaattctctataaaaaataccgtccatgacgttgctaaatctatatctaaagaaataaacttagatgttgaatctattattaaaaccgtgaattctacatcttactttggtgtggtaacaaatctacttgaaaacgcaggtatattagtctttaaaaatggcttggttggtaataacacacatcgacgcttagatatatctgagtttagagggttctgcattgtagataagtatacaccggctgtgtttgttaatggagcggatgcattttccgcccaagtgtttactttatttcatgaagtagcacatatatggataggaaagagcggtatatctgattgggattataataataagatcgagtctttttgtaataaagttgcggcagaaatactcatgccaactaatctttttagaagattatgggacgaagataaaaaagatattattgaagatgttaatgtaatcttcagtatgtctaaaacatttaaaatgagtacgtatgcagtggcaattaaagccaaaagcatagggctgattgatgatcttacgttctctaaaataagaaatgcctctttaaatcttggaaatgatagcaaaaaaggtccttctggtggcagtatattgaacactcttccatatagaaatagtcctaaaataactgacactatactttttagcgctgtcacgcaaagaatccccttaagagaggctggaaatcttttgaatgtaaaggcggatacggttatgaatctctacaaaaaaaggacttttactaatgttaaatag

SEQ ID NO: 281560 - DNA, 519 bp, Morganella morganii
atgttaaatagaagattcttaattgatagtaacgtctttataaactcgaaaaatttctattataactttggttactgcaaaatattttgggatttattactaacactacatcagaaaggtattgtttattcaattagttgtgtaaaaaatgaactaaatagtggtaatgatgaaatagttgattggataaaaaatgaagttcctgactccttttttgttccagagtttagttctacatcatggatcgttaattattcaaccataatgaactgggctcaatcatttggttttacggagaaggctaagcttgactttgctgacccaaaaaaagcagatgcatttcttattgctgaggctatgacctcaggaaattctatagtgacattcgagtcatttgatccaaataaccccagaaaaagagtcttaatacccaatgcagcaaaagctcatggggttgagacaatgacactgtatgaatttctacctttatttactcataataattttacgtgtaaataa

SEQ ID NO: 281561 - DNA, 189 bp, Morganella morganii
atggcgcatgaaattaaattggagacggcggccaataaagcagctcaattaaacgccttattgttcacgattagcggggaattcacaggtaacccgataaccgacaacctcattgaactggctcatgagttatctggcagcgtcgcctgctggctgattgaagaaaacgcacagagaaaggagtcgtga

SEQ ID NO: 281562 - DNA, 2136 bp, Morganella morganii
atgtcattgatggatacctttgttcaggtctttgaatttgatacccggcaggctgacagtgcatttgaccgtgttcagcgttcaacggatgacattatcgacgggatgaagcaggcgcagaatgccgcgcagcagggggcagattctctcggcggcgtgttcactgaactctggcaatcattacaggggctgtccggtgagcacgctgttgatttttccacgaacgcggctgatgtggcagagcagaccggggcggtaaaagcgcaggtggatgcggtaaccgattccctgtctgaactggaatctcagcaggcgggatctgatgccggatggcaggatattcaggcctcactgacgggtacggaggccggttatcaggcgctggttcaggcagtggcagcactgagcagtgacaccgccgttctgacagatgaggagagtcgcggtaatgcagtccggcagctgaccggtggcatcattaaagctctgcagggtgactataaagaactgatccggattgcggaggaggcccgcagaaagggtatcgaagccggagaaagtgaagctgatacccagaaaaaagttcagggtgagctggataaaacaaacgggaaatacaggaacgccggggaatttgttgccggatttgccaaaaaagcgctgacagccgtcggtctgtttatgagcgcctctgcccttgtcggtgagtctgttgcccgtgctgctgaaatcgaatcactggataaattcggcaaaaaaatcaatgttgccgcggcggatgtggatgcctttgccggatctgtggctgaactcggcggtacccgggaggctgctcaggcagatatggaagcaatggcgaagtcgtttggttttgccggtaactccatggaaaaaatcctgcggacggctgacaaagtgaagggaatgaagttcgataaggccaaagccacattgtcggcgcttggtgtgtcggatgataaaaccgttgagctgatgatgaaaggccgcaaagaactcgaacggatgatgggggtgcaaaaggaatattccggcatcaccagagagagcattgagcagtctgtcaaattcaacaaatcgatgcagagctttaaacagtcctccggtctgctgaaaaacagctttctggagatggtgatcccgatcctggcaaccggcctggaatgggtcagtaaatttgtcggtttctgcaaagaaaacaaaaccctgatcacggggttttttattgcagtcggtatcgcactggcaacctattacgttccgccgatgctcgcggctgcggcggccacactggcggcaacatggccgattattgccattattgcggtcatagccctgctggcggcagcgtttgcgctggtgtatgacgacatcatgaatttcatcgacggcaacgattcgatgattggccggatcctggataaataccccgcgctgaaaacggtcattcttgccttgtgggaggcttttaaagtcctgtttgattttattaaagcggtcgtgaaagttgtggcggatattgtggtggatgcgtacaacaccatgaataaagcgctgaatgactttatcggctggctgacaggcagtattaagggggtaatagcctggggtaaagacttcggaaaagtgttcagtgcagtttcagataccgtggttggtattttcaaatggctgtggaaacagatagaagcataccttggctggatcaacaaagggctggataagattaaagaaggctgggcggcttttaaaagctggttcggtgccggggatgatattgaggttgagcagaccgttaaccgcacagtgaatgaacaggggcagattgagtatgacatgccgccggataaaacgaccagcgaggaggatgcggccaaaatggcgcaggccatgaccgcgcagctgtacggcatgtcaaatcacccgctgaaccctgtcaccagtcaggcgatcagcaaccagtcagctgtccgtaatgaaacgaacgtcagtatcggtgagcttaaggttgaaacacaggcaacggatgcgcaggggatggcggcgggagctaaagatgcactcggctctcagttacaggatttggggcaccagacaaatacggggctggggaaatga

SEQ ID NO: 281563 - DNA, 369 bp, Morganella morganii; identical to SEQ ID NO: 278805

SEQ ID NO: 281564 - DNA, 459 bp, Morganella morganii
gtgacaaaactggcacaactgaaagccgtgtatgacgaattggcaaagaagcagcttaaggttggtttttttgcgcattcaaaatacccggacggcacacctgtcgcgtatgtggcggcgattcaggaactcggttatccggccggtgggatcccgccacgcccgtttatgcgcccggccatgacagaacacaaaccggaatacagcaacctgattgtccgggctgtgaaagccgcagtgaaaggcaatatcaccatcactgacggactgacgcaagtcggcgcaaaagcagcgggtgacgtgaagatgatgattaaatcggtcaccacgccaccgcttaaggatgccacggtagctgcccgtgcccggcggcacagtaaagggaaagcctccggtaagccgctggttgactccggcctgatgctgcaatccgtcacttttgccgtggaggataaataa

SEQ ID NO: 281565 - DNA, 429 bp, Morganella morganii; identical to SEQ ID NO: 278804

SEQ ID NO: 281566 - DNA, 354 bp, Morganella morganii
atgtctctgtatatctattgcaccctgtccaacgaccagaactatgccacaccggacggtccggtatttatcgccggtcaggctaatgtcatgaccagacacatgtacaccccgcgcggccgtgtgactgaaatcagtgatgaacagtacacgcagctgaaaaataaccacgtctttatgctgcataaagaaaacgggtttatcgcggtggagaaccgcagagaggatccggacaaagtggcgaccgatatggaagccagcgacaaatccgccccgctgaccgaagaacaactagtcgcggaggggacagagccgccggtcagcaacaacggcaaaaagaacagtaaaaaataa

SEQ ID NO: 281567 - DNA, 1068 bp, Morganella morganii
atgccagtcagtaaagaaaaattttatatgtccggtcgtgatatccgcagactcggacaactgaatattaagtcagatcagaagtggacatacggcgaactggatcagattggtttcggtggtctggccgcaatggactctgcgttaaccggcccggccgtgtccggcgggttcattcagcgtgagatgttgcagcatgtgctgccggggcttatccgtaccgcgacccgggtccgcgtgctggatgaaatcaccggtgtactgaatgccggtcagtggcatgacgaggagattatcctgaatgtggcgactccggccggtaaagcggagctgtacggcgatcataccaatatcccgctggcatcttacgggcaggatcaggaacatcgcggtattgtccgttttgaactgggtttccgtgtcggaaaactggaggaagcccgccagtcagcagccggatttgaggctgccgcagagaaacgcaatgctgttgccgaagcactggagcaggggcgggagcgtgtcggttactacgggtttaacagcccggacacccgcgtgtttggtctgctgaatgaaccgaatttaccggcgtatgagaccaccgccgcacgctggaaaggcggtacatttgccgctgttaccggtgatattacggccatgttctcgcgtctggagatgcagtccggcggtattatcaaagatgataccgttatcacgctgacgctgccgctgggttaccgctccgtactgagtgtggcaaaccctgtcgcccgtggtgaaacggtgtatcagtgggtaaaagagaactacccgaatatgcgttttgtgttctcaccggaattcgccggtgccaacggtggtgcggatgtggcctatatgttcgccgaaaacgtggatgatggctcaacggccaccagtgcggttcttctccaggtggtgccggtgaaataccagctgctggggtctgataatcagatcaagggatatctggaagatgccaccaacgcgacggccggtgtcattgtcacccgtccgtgggccattacccgcctgaccgggatctag

SEQ ID NO: 281568 - DNA, 480 bp, Morganella morganii
atggcaatcccgaataccgtggcgaacggcatgatttccggtgttatcggtgaaatcagccacaacggcccgacccgtgtaaccgcagcagtactcagctctgcggatgaaacgaaaaacctcttcggccgcgcttacacctggaaagacgattcggcagagttggttcagattggcggtaacggtgcgtttgcagggatcatgattaatccgaaagcgtaccgtatcggtgaggaatacgcccgtaacgggacgcagggggaatttcttactatgggtgaggtttacgccgaaatcaccgccggggtgaagaaaattaatgccccggtggtgttcagtccggcggacggctctcttacggcgaaatcagcagcaggaaccggagacagggttatcggttttgtcagccgtcatattgagtcagcggaatcaccgcacctgtgtgttatccgtctgacagagatcccgtatggggtgtaa

SEQ ID NO: 281569 - DNA, 792 bp, Morganella morganii
atgaagggcaaacccctgctgtatccggcagcggcccggagccgttatcagcgtgacatgtcacggcttatctgtgcgatggttgctgattatgaaaaggttttcagccgtctgcatgaagattttgacggcgtgactatggatgccagccttgccagtcagaccagaatctggctgaaccggctgaaacgtaagtgggataagatttttaacagtaaggccgcagagatggcggataagttcacctcacaggtggacatgaacgcacagcgcagcctgaacgattccctgaaacagctctccggcggtatcacgataaaaaccccggccatgccggaagccctgaaagacaaaatgattgccgcaacggcagaaaacgtatccctgattaaatccatcccgcagcagtttcattcccgtatcgagggcgcagcgttgcgttcggtcagccggatcggcagcggcagtaaaacgctgctggatgaaatacgggatatcggcggggtaacagagaaacgggcggcatttattgccgttgaccagacccggaaaattaccacggcggcaaactatgagcggatgaagtcagccgggatccgcaaagctgtctggcatcactcggcaggcagtgctgaaccgcgagaattacatctgcgtctggacggggaggtgtttgacctggataacccgccggtcattgatgaaaaaaccggtgagcgcggattacccggtcagttaccgaactgcaaatgcttctggacaccggtcatcgactttggtgaggagacatga

SEQ ID NO: 281570 - DNA, 1491 bp, Morganella morganii
atgtggccgttcagaaagcggaaaacagcagaggttgccgcacctaagcggtcagcattctcaacgcatttatattcagcactggccgccgaaacagggtttcaggggctgcatttgccacagccggttatgcggggcgtggcgatggacagtattgatggcacggttccggcatttaagggcggccaggtttacggtgtgccggaggcgcaggctgcctggtatgcttcccagatgttcatcggttacaacatgtgcgcggttattgccaaacactggctggtggacaaagcctgtaacatgcctgcgcgtgatgcgatccgtcaggggtatgacctggactgtgacggcggggacaatcacgacatcagcaaaacgttacggaagaaggataaaaaataccgtatccggcaccatatgaaagagctgatccacttcggtcgcgtgtacggcggcagactggcactatttctggttgagacatctaacccgcaggaatggtatgaaaatccgtttaaccctgatggcgtgacaaaaggcatgtacaaagggattaagcagatagatccgcaatgggtcacacccgatttaacggatgccaatttacaggatccggccagccctgatttttatgaaccgacgtactgggttatcggcggccgccggtaccacaaatcgcatttcgtgaagttcgtgccgttccctgtgccggacattctcaaacccacctataactatttcggcgtatccgttcccgaacgggtgtatgagcgtgtttatgcctctgagcgtactgccaacgaagcaccgcagctggcgatgacaaaacgcctgctgaccatcggtatggctgatgttgagggcatggatacaaagactatccacgaaaatatgctcgattttatggatatgcgggacaactacggcgttcagacggtcggggtgaatgatactgttcagcagtttgatacctcgctggcggatctggatgccacgattatgacgcagtatcagcttgttgccgctgccgcaaacgttcctgcaacaaaactgctcgggacaaccccgaaagggtttaactccaccggggaatacgaggaagccaactaccgagaagaactggaaagtattcaggccaatgacctggaggagctgctgcaacggcactatgacatgttacagcgcagtgaagggctgggaacggcggcgttgtcggttacctggcggccgctggacagcccgaccgctgtcgaaaacgccgatattcagcttaagcaggcgcagaccgattccgcgtatgcggcggtcggcgctgtcgacggactggatatccgcaaaaagctggcggcggataaggaatcggcattttacggtattgacgtgaacgaggacgattatgccccggaaaatacgggtacgaacccgccgggcggttatgaagggcaaacccctgctgtatccggcagcggcccggagccgttatcagcgtga

SEQ ID NO: 281571 - DNA, 537 bp, Morganella morganii
atgccccattacccagaaagcaaggataagatacgcaaccgccatcaccggtaccaccagctctgccacacgggcaatcgagcgcagaccgccgaaaataatcacgccgcagataaccaccagcagggcaccgacataaccggcatccgcaccaaaggccattttggacgcctgggcaatcgagttagcctgaaccgcgttaaagaccagcccgaacgcgatgatcaggaagacagaaaacaacacgcccatccagcgggctttcagtccgcgttccatataatatgccggtccgccgcgataatttccctggtcgtcccgtgttttataaagctgtgcgagtgtgctttcgataaaggatgttgccatcccgatcagggcgaccacccacatccagaagatagcaccggggccacccgcagtcagggcgatagccaccccggtcaggtttccggtaccgacccgcgcagccaggcttgtacaaagcgcctggaacggcgagatgccggatttatccgatttcttactgtgctttag

SEQ ID NO: 281572 - DNA, 1479 bp, Morganella morganii
atgacgattctattagaacgatattgttctcactgctttaaaaaaagcaatcaaaaaatcgcagaaaagaattacttaagaagaaatgtttatatttgtgataattgtcagaacttcactttagagtgcagaagcattggctgccaatgtatgactaaaggtgaattatcaaataaaaagaaacaagaaattaaagatcaactcaaagaaaacaaagttgacacaaataccattacaaatttgattaataaacatacaagctgggatgacgaattttgtgccgagcacgatggaactattggttcattcaaaaggctcaatatttcaatagatgaaataagtgactatcacgaaatcataaaaagagacagtataaatttagtcaaaattgggaaaatatctgcaacagcaattgctgtcggggcagcgactgtagctacagcaggaacagcatcagttgcggttgcctctgcattgggctcaactggattattaggggctgcgggaaccggaactctaatttctactttaagtggagcagctctggcaaatgcttcacttgctgcgattggtggctctgttgctggtggtacgctaattataactgcatgtggtgcagcattagggggaactattggtggtgcaatcacgaacaaatatattagtgaagactcatcatttagaataaaaaaattacatgaccaccctgcaagcaaggaaatcctatttatcaatgggtttttgcaggaaaatgaaattgatttccctgactggatagaacaacaaaagaaaataaataaaaatacaaaaatgtacggtgcctgttggtcttcctctaccaatacgaaattaggaaagaccttaatgagccctctcgggaaagacagaatagttgctgcaatttgtaatattggagcaaaaggtgggaaatttgcagccacaaaactagccatgttggcaaatgttgcatctattggctataccgcattagcgaacgattggcatgtgtcaatgtacagagcaggaaaaacgggggcactactagctgacattgtttcacgaactaatagtaagaattatgattttgcaggacactccctcggttctagagttatctattaccttcttgaatcattaaaaagcaactatgaacggcttaattcagataatatccacattgaaaatatatatttattaggaggtgctgtcggcaatgactctgcaagttgggagaatttagccagccttgtaaacggtaaaatatataattgttactctaccaatgatgacatattgaaatggatgtaccaaacagtaaatataaaattaagtaatcccattggctatagccctatagaaactaattcagaaaaaatcatcaatgtagattgttcagatattgtcaactcgcactttgattggaaaaaaaattactccagaattcatcaacgaattaccgaaatacatgcagtagcttag

SEQ ID NO: 281573 - DNA, 438 bp, Morganella morganii
gtggcgaaaattcccttcacagacagagaactagttagggcttggcgtaattctctaaatgtctcaaaatcggataaaagaacaaaccctcataggctattattattttatgcaattgaatgcggtctaaaagctgcatatttgaagcaaattaataaaacagtgattgactctgatatcgcacaacaattttcacatgacatcaataaattatgtgaaaagctatctataaatagctcatttatgcttcctcaatctttacgtatgaaagattgtaaggttaatagcaaagatgttattcgcacatgtaatccagcagagatcaatcaaatatggagatatggcggaactttagatggcattgaaaatgatatatttcttgaggaaaaactggaaaagttgaacaaaattatagaaaaggaacttaaaaatggctga

SEQ ID NO: 281574 - DNA, 2670 bp, Morganella morganii
atggctgattttattacttggctcgatattgaaagaaaagtaaaaagaaattttaaatttaaaaataaaatagaaaacattacagctatctattgctattcatcaggcatggaagttgaatatattaatgataaagaacatgctattgctgatttaaataaaatatttgatgatgaaattatccaaaatgaagataaattatttttatctgtggaaattggcgagccagaatatttaattgagttgatccctactgtaggtactaagaaagaaaatgacatagtttatccattatggcgtgaacatgtttacgttgaagatgcaaattttaagcagccagaatcctgggaagatggacctaaattctgtgcatttcattcatttaagggaggagttggacgtaccacatctttaatgacttatgcaagtgcagcattagaaaacaataatataaaaaaaatattattgattgatggtgatcttgaagctcctggtctaactttatggcttgatgcagaaaatgtgggaagagtaacttataccaattttttagaatcaattcaattttctgacggtaaatttgacgaaacaataaattttttcgctaaagaattaaggaagagctcaattagtattgatggaaattcaaaagaaatttttgttcttccttctgcattatctttagaaagtattatggacatgcctgtaacacctgatcatatttctaaaaacattgataatccttatatactaagtgatttattaagacttttaggcaataagcttgaagtggatgttattctaatagacttacgagctggtttaagtgaactttcaagtcctttaatctttgatcctagggttgaacacttttttgtttcaactattgccaaacagtcagttgttggcattggcgaagtattgaagaaaattcatagctcaacaaaaaacacctactctaatatgagcgataaacctacagtgataattagtatgctcacaaaattgcttcgagaatctgtcagttatacagaggcaattcaaatgatcaatgaagcatatcctactattcaagatgaagatattatttcgcaatcaatagagttattagaatttgattttgatgaaaacttaatgagtgtatccaatataaaagacgcactttctttactaaaaaaatcaagtatttacgacaacgccaaggattggattgcagacgttgaattgattgaatcatccgagagtaaccggagtatctatgacaacaatgatggactgcaacgattatatgatacatgtcaatcttttcagtttgctgagaataccagtgaagatgatatgttagttatcgatccaattcgaaatcttgcaaaaaactatgcagactcactaccgaatattgtctcaataggagctaaaggagcaggaaaaacatttacatacttacaagtttgcaaatcaaaaacatggagtaactttatatttaaagtaaacaaaaaagcatctgatattcatgcaaatatatttccatggatctcttcaaccaatcttaatgaaaacgttaggcaacaagtagcagcacagcgcgaagattgcctgactgaaatttcagcaagatcacccagtggtttatctcttaatgccaacaaaattactaatgcattagccagcaacaccactaattgggatgatttctggcagaatttattagtatccgagatagtaggtgaaaataaaacattaaaagatttaaataaccaccttataaatcttgataaatcaattgttttattagttgatggtatagaagatatactttttgcaccagaaaaaaatgaaaaccataactctgcaattagatcactactaaatttaccgaatgctatttctgacttacaggatagaagaataggaatgatttgttttgtgagagctgactatgtacagtcagcaatcaagcaaaatgttaatcaatacattgctaaatatcaacaatttagacttgaatggacaccggagtcatttttaagattagcttattggataagtgctaaagctgaaattatagaagccaatgaattggatgcagaatcaggtagtcttaattttttactaagcaatcttgagcgtctatgggggaaaaagttagggcgtgataattctaaagaggctagcaccgcaagatgggtttttgcggcgctatgtgatttaaatggtcgccttcaagctcgagatcttgttagattcctgaaattctcagcggataatatgctcaaagcaccttctaatggaattaaagtagagttttggttagatcgagttttagcaccagaagcgattagacgctcattaaattcttgcagccaagaaaaagtcgatgaagctgagaaagaaattaaacctttagaacagtggattaacagcttaaaaactgtatcatcagatttgaaaaaagttcctttcaacccacaagaggtgggattagaccttcctcttttaacctcgttaaaagaacttggcgtcatttacgaagatacagatcaaactaatgaagaacgcttttatttacctgaaatttaccgtacaggtttgcagttttcctcagcagttggtggaagacctcgagttcaagctctcttaaaacgtaatttgggtggtatcccgttctaa

SEQ ID NO: 281575 - DNA, 996 bp, Morganella morganii
atgaatgaaaatctttatcgcttgattgttgagtttcaaaataatgtccggactgctttaaagctcatgtatcggtccggcattaaaatgccgtcaagtcgctatgaatggattcaatatagtatacccggcgctggggagttagatggtggtattaaatattataaacatggcgccggatgcctcgtagaactgaattccgggaatatagattttgatttcggtgagcaaggagaaataggaggttttaattcctggtggttaacctgctttgccgagaagaatataacagcttacggtttcagaaattatgatgatgttgctgagcatctgaacaaagcgttaagtgacggagaactgattcgtccggatcatgatctttgctatattgccaatgttccatactcctacgctatagacatagacagcagaaatccgggagatatgcttccatgccgcaatcatgaccgtgtactgacacttcagattcattacttcgaaacagctgaactcatgtttagaaattacaataaactcaatcagaaaatgaaaaaaaatggccatctgagccagcgggaagaatttgatacgagaatttatttttctgcatggttaggttttttaggtgtggtctgtgagggctttcgaaagttaaacatacgagtcctgcttgaaaatgatcgccctgccagctttaaagacttattaccaatttcggatagcatcagaaaactgatgaaagaacattcggatccactccggatatacagaaataatatttttcatctcagagagaatactgaatttattcgccatttttttgatacagaagttgaacgcctttcatgggctcgtgagttacatttgctgcttgcaaagtttttctctcagtacagagtctgttgtgaagtacattatgtatttaatgggcgcaaaggtgaaagcgatttgacaaagaaaaaagtaatacgccgtaaaaaaacctctgaacattga

SEQ ID NO: 281576 - DNA, 1689 bp, Morganella morganii
atggataaaataacccgaattctcgaaaagctgaatcagcaacgcagtggtgaaacagtgacactggcagattttatgccgatgtcccttgccgaagtccgcagcctggcgggcagccgtttgtcccgtgaagaagcgcaactacttcaccgcgcggcaatcaaagaacagcagaacaacattctgtatactgcccgtgcgctgacccgcgccaacccgctgctgaaaaaagagatgggcgctgcccgcacttacggcgcgacgccgtacggctataacgacattatcatgccgcgtgccgatgagtttgccgcacccggcgcggtctcttccatgttctccccggccggctatctgactgagttgtaccgcgaagcccgtggcctgcatcagaaagacagtgtcaataatctggacaaacgccgtcctgacctggctaagctggtgttatctcaggaaaatctggataaagagatttccaccctgtcactggctaatgagcaactggaaacggcgctgatggcgcaagccggtcagacagacaaaaacaaatattatgaaaccctggcgacctcccgccgcagtggtgtaaccccgtataacgcgccgtttgaggggatccgtaacgccctggcacaacagaattttgttctgccggaccatgtgctgagtaaaggtgcggaatccgccgcacagatggcgttatacgccggtatctcaccggaactgtatgctattctgacagaaaagacagacggattaagtgaagcagcaaccgaagcgctgctgaagaaaaacttcccgggcgtcaatactgacagcctgatgaaccttgatgcgctggcaaattattacgggctgccgagggatgagattcaggcgttaccgagaatggattttagtaacaaacccgatttatccggtattccgtacggctcatcactgaaagatacacgcaatctgtacggaaaaaataaaatacagaaaataaaagcaaaggacgcgggcaatgatattgtttatacattaacccacaccgagctgaaaaatgaaaattcagacaaagcaaatttcgaatatattgaccttattccgctggatgacaaccaattttgtattaattttagtctacgttatttacacaacgatgctcacgaaatacgtatcggaatccagacatcaacatcgagttatccgaacgatctttattccgatagtacagtgaaaattgagaaaggaaaacactacagcatcccggtaacaattcctgccgccaaagtaacaccagaaatcaccatttcggtttccaccactgttattggcactcgctggtatggaaacagcacctttgctataattaaaacatacgcttctcctttatcactactccttctcaacaaaatcctgcgcctggccaaagccgccggtataaccccgccggaaacccagcgtgcattaacccgtctgaaactgaaagacaccgattcagacgcaaccgtactgcaccgcttctgtgaatttctgctctaccgtaaacgttacaatatcagcagcgatgatgctttaattctgagcggtgccactatcagcactgtcagttatgacgggcagctcagccagtttgaccggatgtttaataatccgccgcttaatggtgaggtttattcgctggggggggggaaaggttaa

SEQ ID NO: 281577 - DNA, 1200 bp, Morganella morganii
atgagggaaagccttggaataccagacacgccaaaaaacagaaaagtagcggcagagttacgtgccgctacctgctacaaaataaaaacaggtgaatttaattacgcaaatgaattccctgattcaaaaaatatcagcatgtattgcagttctggtaaaactgcaacatatggtgaaatagtaaaatcgtggttatcaataaaagaaatcgagatatccgcaagtacattgaagaaatacaagtcaatactgaatgctttatctaacttcattaaccataataaaattatatcatcattcacacatgaagatatactcttaataagaaaggaattattaactagcccgacacttgatactgaccataaaaacaatcgtctcggtagaagtgtttctacggttaataattatatgcggatattaaaaatggtttttgagtttgcttttaatggaggttacacaggaacaaacatattttcatctgtttcagagttaaaaaaggaacgcgtaccgccagacccaattaatcatgatgagttcggcaggctgcttaatgctgcaaataaccgccaagcagcaaatatgcttatcacatcagtttacaccggcatgcgccctggtgaattgtgtgccctggcatgggaagatatcgacttcaccgccaagacaatcacagttcgcaggaatatttcaattctcggacacttctctctcccgaaaacgaaagctggaacagatcgggtgatccacatgcttgaccctgtaattaactgcttgagagatcagatgctgctaacgaagatgacaggagaagacaaggttaccgttgcaaccagggagtatggaaaaacgagagaggacatttgcacatttgtttttcagccccaggttacagccagcaatggcattaaaacaaagttctattcccctggtggtttcggccaggtttggaatgcgctgataaagaaatccggcgttcgtcaccggaaagcttatcagacacgacacacatatgcctgctggatgttatctgccggtgcaaatcctgcattcattgccacgcaaatgggtcacgtatcatcaaagatgatccacgatgtgtacggagcatggatgaaggaaaatgatgccgaccagatagccattatgaacaacaatgccccacccatgccccaagcaagatataagaaagccatttaa

SEQ ID NO: 281578 - DNA, 237 bp, Morganella morganii
atggataacgttatcaatttagtgccagccagatgggtcactgagtccgtgctgatgaccattaccggcctgagaccagggacaattaaaaaagcccgagaaaactcctgggctgttggtcgcgagtatcttcacgtatcgccatacggaacccctaacgaaaagtcacaatgcatgtacaatcatgaggcgatcaattcgtggattgaaaagcaacgtaatgtacaaccgcaatag

SEQ ID NO: 281579 - DNA, 210 bp, Morganella morganii
atgacaccacaggaagcagagaacggacgcagacgaatagcaagggaatgcctgaaggaattaatgcagcacacatcagacgaacagcacaccgcaatactcgacaaatacacaccgaaatttaaaccacttaatcacctgcgctttccggcaaagagagtgctcgggtattacgtgcgtacgttacagaaggagatgagggatggataa

SEQ ID NO: 281580 - DNA, 369 bp, Morganella morganii
atgagacagattaaaataagctctggtgcgtggcaaaaagatttagagatggttgtcactgttatcgatgaggataaatttaaaactcagtgtgagcaagttaataaattttattgtgatgcagagtatagagctaagaaacatggaagtcatgaaaaggcgggtttcgccatgttctgcgctgagtgttttcaacaaatggcattcaataactttaaagacgaagaatggctgactaagcaattcgactggtctaaagataaaggaattgaagggtatccttcgttagatgatatgggcattcgaatcgatgaaattgagccatggtttattgattacgacgaaatggaaattacaggatggtgttaa

SEQ ID NO: 281581 - DNA, 153 bp, Morganella morganii
atgacaatcggatttgtattactactggtaatgcacggctctgctgtgcctgttaccgatgatatttatacactcgaagaatgtgagagccgcgcagtgcaggtaatgactgtgcggaatgttgaattagtatgtgcggaggttttcagatga

SEQ ID NO: 281582 - DNA, 582 bp, Morganella morganii
atgagcgatagagactttattgactggattgttattgtagcaggcgtactatcatcatcaggaataattgtttctgttgtcatttacttatgtcaaaaatcaagtgaaaataaaaaacaaaaagaaattgacatgaagttatttcattttattaaaatcaaggcacttgaccttgcaagtaaattagataaagttttgcatttagttaagaatgaaaatgaatatatgaatataaggatagagaatggaataatatgctacagtgagatattggaggatcaaaatattgcatattgtaaaatagacctaagaatttcaaataagaatgactttctagataggcatggagtgcaggcaagtctggacttatttaaattcatcatagagattgattcattaagtgaaatgttttttcataaaacatcatggtatataaaatatggaattgagcttttcggtcattatatacctgaaatatcagataactttcaatcagacgcagagatggatttactaattaatttcttaaatgaaactaaatataaaatcaagttaaatatcgataggttctccatcatgtag

SEQ ID NO: 281583 - DNA, 429 bp, Morganella morganii
atggcagctgatgctgaaaatcataaattattcacagaagcctgccggaaaaatcttgatacctatcagtccttatatgacgattcatcaaaaagtttatatgcccgcgttgatctgatttataactttgtctataaccaggaattaaaaaattaccgggccagttttaccggcgaacttcacgcaccgatgtatcgttacgacaattcaaagaataatacggaatatgattttgtccggaataaaatccggagcggactggatgaaaccagtaatgagatcaataacctgatctatgaacaaatgattgaaattctctacaaacccgcatatatgggtgaatcaaggcaccccggtaatattatgctgtcactggacagtgtcagaagagaaatggcaccggaactggtgctgaaactggttaaatag

SEQ ID NO: 281584 - DNA, 333 bp, Morganella morganii
atgaaaaagacaatattatctgtatcaccgtcggcagtctggcagacactgctgacttatctgctgcaacagcactacgacctcactttgaatgatacggaattcagcgatgagcgtgtcattgaggcctgcctcagccgggggatgtcgttgtgtgaggcactgaatgcctttgcagagaaatacgccctggtccgcactgaccggcgcaacaacggtatcactgagccgtcacacagtatcactgcgaccgatattctgcgggcacggaaggcaaccggtttgatagctcaccactgcaactatgccaccagcagacccgttaccgtataa

SEQ ID NO: 281585 - DNA, 1203 bp, Morganella morganii
atgagtgagctgagttatctggaaaagctgttggatggggttgaggtggcttgggtgcctctggaggatatagccaaaatttacgatggaacacaccagactcccaaatatacaagttccggagtccctttcgttagcgtgcaaaatattaaaaatctatatgatacggataagtttatttcatctgaggatttcgaaaaatacaagaacaaaccgcgcaagcatgatttgtttatgacgaggatcggcgatgtcggcacttgtgctattgtggaagatgataaaccattagcatactacgtaactcttgcattaatacgagttaatcaacaaattgcagtaccaggattcatacgtcatttaatagaaagtgggattggtaaggctgaattatataaaagaacacttatccacgcggtaccaatgaagattaatttaggcgaaattggtaaaattgttatccctattccttgccctgacaactcggaaaaatcccttgcgattcaatctgaaatcgtccggattctggatgcatttaccgcccttaccgctgagcttaccgctgagcttaccgctgagcttaccgcacgtaaaaaacagtacaactactatcgtgaccagttgctgagttttgatgacggcaaggtggagtggaaaacactgggagagattgcagaaaatctggactcaaaacgtaaacctataaccagtgggttgagagaaactggcaaaatcccatactacggcgcgtctggtattgtcgattatgtcagggattacatatttgacggtgattacttattagtttctgaggatggcgcaaatttaatagcccgtaatacgcctatagcatttagtattagtggtaaaacatgggtaaataatcatgctcacgtgcttaaatttgaaacttacgcggagagaaagtacgttgaatactatctgaatagtatcgatttaacttcttacatttctggtgcagcccaacctaagttgaataaaaagaatttagaaaatatcaaaattccaaatcccgccccaaaagaaaaagaacgcattgtagctatattagataaattcgatacattgaccagctccatcaccgaaggcttaccccgtgaaatcgagctgcgccaaaaacagtacgaatattaccgtgacttactgttcagctttccgaaaccggaatcggtgaacaactga

SEQ ID NO: 281586 - DNA, 519 bp, Morganella morganii
atgagcaggtttttaccttttattggccgtcagtatgaagacagtatctacggggtcaaagtgatgattctcggattatctcattatggcgacccggaggatgcctatccggaattcacaagagacgttatcgatgagaatgcgtactcaccgggaaaccggtttttcacacttctgactaatttactgcgtttatccaaagacgcgccggatgatactgaacgaagggcggcatgggagcaggtggctttttataactacatacaggatatcgtcgggataacaagccggatatcgccgacaccagaaatgtgggatgaggccaggcagccatttttaaacgtcgtgaaagaattaaaaccgcaaatcattatcgtcctggggacccagctgtgggaccagctaccggagatagacggtattgagtggtgctgggtaaaacaccccagttcaggaagcttttcctatgatgaagcgttcagcaatttcaaaaaagcgcttgaaaatataagaaaataa

SEQ ID NO: 281587 - DNA, 354 bp, Morganella morganii
atgagatattacaaaacgaaaaataatgaagtttatgcacttgaagataacgactctgcaaaagagtggataaaagaaaaagtgactgaaatcaccaaagaggaagcggataacatcacaaatccgcgaccaacgaaagaacaactgatcgcaaaagctgaatacgataaacaggcgctgattacagaggttcaggctgaaactcagttactgcaaacaaaactggcacttggccgtatcagtgataatgaaaaggcgcggttaaacgcctggctggattatctggacgaactggaggcagtggacgtatccaccgccccgaatattatctggccggtgaagccggtggtgtag

SEQ ID NO: 281588 - DNA, 741 bp, Morganella morganii
atgaaaacccctttaatatctgttataatgccagcctataatgctgaaaaatatatttctgacagcattgacagcgtcttaaatcaatcaatccaaaattttgaattgattattattgatgataattctcaagataatactacaaacataattaataaatataatgacccacgtatagtattaataataaattctaataatctaggtgtttcagaaaccagaaatattggtattagtgcagcaaatggaaagtatattgcgtttctcgacagtgatgatatttggcttcctcataaattgtcattacaaataatgtgcttaaatgatggctgggatgttgtttcttcaaattacattgcatttgaaagcaatgctgacaataagataaccgaacgaaaatcgccaagtataattagttattctgacatgctaaaatctaacttcattggaaatttgactggcatatataatgttcaaaaaataggaaaaatatatcaaaaaaaatcaggccatgaagactatattatgtggttagaaataataaaaaaatcaaagaaagcttactgcatacaagaacctttggctaaatatagattgcataattcttctttatcaagcaataagatgaaagcaataaaatggcaatggtcaatatatagaaatgagctaaagctatcactacctaaatctatttactatttttctcattatattattaatgcattaaaaaagagacgataa

SEQ ID NO: 281589 - DNA, 465 bp, Morganella morganii
atgccattgtcactgaattgctgcagcaaggtaaccaagagtatgaataacctgaatgttattatcgctgatgaccatcctattgttctgttcgggataaaaaagtccctggaacagctggaaacggttaatgttgttggtgaatttgaagattccacttcactcatcaataacttagcacgcctggacgcggatgttctgatcactgacctctccatgccgggagataaatacggtgatggcatcacgcttatcaagtatatcaagcgccattatcctgacctggcgattattgtgctgaccatgaacaataatccggcgatcctcagtgccgtactggacctcgatatcgaagggatcgtactgaagcagggtgcaccggctgatctgccgaaagcactgcctctttgcagaaaggaaagaaattcacccctgacagcgtttccaaactgctggaaaaagtga

SEQ ID NO: 281590 - DNA, 228 bp, Morganella morganii
atgcacaatatcgccaaccttcctaaagacgaaaaagacaaaattaatgccgatttagccgcagccggtatcgcgtacaaagaaaggctcggactgccgtatgatctgtacgaaacagaaagccagcagcccgagcatttacgcacgtacttcagagagagactggagcactacagggagatcgggaaaaggtttccgcgggggtttgagtatcagaaggaaggttaa

SEQ ID NO: 281591 - DNA, 540 bp, Morganella morganii
atgaccataattaattactattttgacgacaatcacccgctgcggccatatttcggcgatgactatgcaaacaaagactccttttcccctgtcaatgcgttgcgcatcgcacctgaatttaaggctgggtttcatccgtgcgagcgtgatggtgcatggattatgattccggatcaccgcagcacaaaagtttatgacattaccaccgcgcaagagtcagaaattaaagaactcggtgaattgccggacggcgtgacaactatcgcgccggatgtggattttccgaagtggaatggtaaaaagtgggtgactgacaaggccgcaaaaaaagaaagtgatattgcagcggcagaagcacaaaagcaatatcttattgctgaagctaccgccgcaatagctccgttacaggatgctgttgacctggagatttccacaccagaggaaatatcagtcctgaaagaatggaaaacatatcgggttatgctcaatcgtgttgatacatccaccgcaccagatatcacttggccgattaagccttaa

SEQ ID NO: 281592 - DNA, 1344 bp, Morganella morganii
atgaaaaacccaaaattaatagtgaagcctttcgcaaagaacgggcagaaaaacgtcatccctgaaaactacgaaaccagtatggaaagcaaccaggcaacatgggatcaggggttcggccagataactatgctccctgttgctgccggtggcttgccgccaaaaggtcaggattttaacggcatctttaaccagatctccgagaatatcgtttatctctctcagggtggccggtttaaattttcagcggagtacgcggaagcaatcggtggatacccgaagggcgcaatcctgcagtcagacgatgagaaaaaagaatatctgagcctgattgataacaacaaagtcgactttaatacatcgtccgatatcagcgcatcatggaaacttgttaacactgacgacctgttgtctcagatagccagcaaacagccgaaaggtgattacgcaactaagactgagcttaatagcgggctggcgggtaaacaaccaaccggagactacgccacaaaaacagaagtaaacagcaagctcgccaaagaccagaacggcgcagacatcccgaataaaccgaagtttatcgaaaaccttggtttgccggaattgctggataagaaggctgatgctgatattttcacctcgtcaccaataacaaaaatattcaactcaacaaaaacccatttcatccagctatcaaacggcggatattttgaggttaaacgcgtctcagatgatgtggcaacattccagttcaatccgcaaggcataatgaccgccggggaaattccgataagctttgtgtccgggtttaatgaagtgttcattggctcgattggtcatttcccgttccgcgctacacagttgcctaagaaatggtatgcacttaatggcgaccgcttcagcgtaacatctgcacagggtaaggcattgaaaggactgcccgcagaaatgaaatcagactgggggataacggagtccggcgggatgataaacctgccaaatattaaacaatctgacggacgcgtaccgtttttgcggcctatcaatggaacatcacgtttgccgggctcagtggagtctgattgccagcaggaaatgaccgggttcttcggcgggcgtgatgtcaggggagctagcgggtggacaagtttcttctggggggaaaatggcgtattcaggagcgtaaaaaaatcatctggtgcagggcaggctccgcaaactcaatctgttgaagctggagactggtctggtgtcgagtttaaagcatccaaccaggtaagaacgggtgatgaagttcgccctctaaatatcggcgtgactgtagcaatattcctcggagtttaa

SEQ ID NO: 281593 - DNA, 633 bp, Morganella morganii
atgattgacatcagagaaacattgctcagtcagtatgccaactcccccgtcattaccaccatccttaaaaaatccaacgaagccatagacccgaggcacagtgcggatgagttctgtaatctggctgttaacgttctgactgctcagggttttggtctggatatatggggaaggattgttggcattggcaggggcatatcgatacctgatccagacgctgattatttcgggttcgacgggactgaaaaatatctgccattcaaccaggctccgttttttggcgatatcaacggccaggcatcatatcagatggatgatgagacctatcgcgaggtcataatgatgaaggcatacgcgaatatagtgtgcgccacagccccgaatattaattcatttttgaaggcttcatttacccgtggccgggcgtattacctcatcaccggacacatgacagcgagatatgtatttgaataccggttatcagaattagagaaaaacctcatctacaaccacaacattttacctcgcccgagtggtgttgaaataagcatcaatgaattgccggtcaatgaatatttcgggttctataaaaccggattccagcctttcagtcaggctcctttcatgaaatag

SEQ ID NO: 281594 - DNA, 1191 bp, Morganella morganii
atgatcccaccggttgagataaccccgaaagggatactggcacccaccacacaggaagttaccgctggtctgtggcagcttatgcgcgggagctttggcgataacatcaacactgatgcagacacaccgcaggggcagttggtcgccacactgactgccattatcaccgatgaacgaaacttcatgatcgggttactgaacagcttcgacccgcgctatgcatccggaaccatgcaggacgctatcggctatatctactttttacagagaaaacaggcgacacgctcagtcgctgaattaacctttaccggcctgtccggaatgacggttccagccggttttgaagtgcaggatgagcaggggcggacatggttcacgaatgctgaggacactataaaaagcaccggaaccgtgacggttaatgccagttgtgccgatgccggaagtaatgacgctcccgcagggacaatcaaccggatcacccgcaacattaccggtgttgattcggtgaccaatgaaaaagcagccattccaggacgaaatgcagagtcccgccaggagtttgaattccgcagacagcaatctgtggctattaacggtaaaaataccaatcaggctacgtacggcgcagtgtccaatatcaaggatgttattgactgttacgttattgataacccgacggacgaaacggtaacggtgggaaaaacaaattacccgctcatccgaaattcaatcgcggtttctgtagtcggtggtgatgacgatgaaatagcaaagatgatcctgactaaagccggttccgggtgctcatttgtcggtaacaccgaagtgacgtatgaggataaagaaaacttcccgtacatgccgccgacatacaaggttaagttcatcaggcctgagtatatcccagtagagtttgtggtgacctttgaggataagcggctgctgacctatcaggagaaagaggcggttaaatcagccattctggaagagttcaaatcaggacgcggtaaagggcagatagcgcgtcggcttatcgccagcgattacatctgtactgtggctcagtctgcggccaaccggctgttgtcggttcaggtgagcaggaaggacggtcagataggcaattatgttgatttcggtattgatgagtttcctgtgctatcgccggacgatataaggatagagtga

SEQ ID NO: 281595 - DNA, 354 bp, Morganella morganii
atgaaaacactttttgttcaccctgacacatgggacttaactctcgacgtgtcggggaatattgccgtggcttccgatcagtacgcgatagcacagtccgtcgcgaacaagtgccgtgtgttcatgaaagacctgtactacgcgcaggaggacggcattccgtaccttgaggaaatattggggcgcaaccggttctcattgtctctgtaccggcagtatcttcaggacgcagctctttcagtgccgggagtggttaccgcaaaggtcgaactcagtactgcaaacgacagggttgtgcgcggccgcattttattcactgacaccaacgggagagagggggtattagaattatga

SEQ ID NO: 281596 - DNA, 696 bp, Morganella morganii
atgaaaaagcaattaaacgataatctcaagctcccgttctggccgcaggatttggcgggcggtgtccggtctcaggagatgataatcaacagcctgatcgggaaaatgggcacagtaaccatctgtaaaatcgtgaaggtgaaaggcggtggaaccggcgcggtcggaatggttgatatcctgccgatggtgttgcagatggatgccgggggaaatatttacgacaacgcggttatctacaacgtgccttatttccggtatcagggaggagcaaacgcggtgattattgacccgaagctgggagatatcggagtttgcctggtatgtacccgcgatatttccagagtgaagcgcaccaaaaagccagccgctccggacagtcacagaaaattcgactggtcggacagcctgtatatcggtggcattctgaacggagcaccggcgcaattcattcactttctggaaagcggaattgacgttgtgtcgaccggcgttatcacgatgaaaggcacagagatagtgctggatgcgcctgtgagaaccacagcaacgatgcaggcagctctggatatcaccgacaacaccgcatcaggaaacagccagacaatggcctctatgcgcgttacttacaacgggcacacccatcgcgagaacggccagggttccaacactaacgagcctaatcagcaggtttaa

SEQ ID NO: 281597 - DNA, 888 bp, Morganella morganii
atggcatttaaccggaaagtaatcaggctgactcttaccctgaacgggaaagatgagtcgttcacatcagacagccagaacaaactggaggctgtcggactgcgtatcagtgcggaaattaacttcggtaacgggatgcctgcgccgtcggccagactgcgggtttatggccttcctgctgaaacgatgaacaaattactgcggattcgatggaaggatttggatggtctgcgcgacagcgtcatggttgaggcgggtgatcagggtgaagacctcataaccgtattcaagggaggcataacgtttgcctaccctgattatgcagaggcgcccaatgtctcccttgttatcgaggctcaaactgctgtccttgaggccatgacaccaagtgatgctgagagctatgaaggcactcacgatgtcataaacatcatggggaacgtgtgcaggcgcattggttacacgctggaagacaacggagttaagcagccgcttgagaacgtctatctctgcaataccgacatcagcaaaataaagtggctggcagaggctgcaaacctcgatctgtatgttgagcaggggaatatcgccgtcaccaaaaaaggacagccaaggaaacttaaaattcccgttgtttcccctgactctggtctggttggctacccgacacctacaaaagaaggcgttcagtttaagtgtttcttcgaccctattgtccggttcggcggcattgtccgtatcaaagacagcattgtcgaacggtgtaatggagattggataacctacggtgtccgcgtaactctggagacagaaacagagggcgggcggtggttcatggacgtggcagcatatccaaggtggcaggatgaaaaagcaattaaacgataa

SEQ ID NO: 281598 - DNA, 273 bp, Morganella morganii
gtgataacagaaatccctctttcaccgacaccgaaccaatcactctcattcattctcggcggcagcacctacgacatcaccctcgaatcccggctcgacaaccttttcgctaccgtggtgaaggatggggaatacctggtatgcaaccgcatctgccggaatatgacttacatctgccagtggctgatatttgctgacacagtaggtaacacagacccggtttataccggccttggctcacgatacaggatggtgtggatagatggcatttaa

SEQ ID NO: 281599 - DNA, 750 bp, Morganella morganii
atgttcggactaccggaaatccccaactggaagggtattccagacgctgcgttagatgccggaatcagcttcggcggcgcgacactcatcaacaaactgttcggcaactactgggggatattcaatcagtacggagtgccgctgctgctggctgataacgtcctgtcattgcagtaccagaacacaagccgagtcgttagtgctccgattgagaaaggcgcattcgccagctataacaaagttgctgacccgttcaaggccactgtgcaactgagcaagggtagcggcggcgcgctggagcgtggcgcattcctggcgcaacttgaaatcctcgcaaaaagcaccctgaagtttatcgtcatcacgccggagtatgtctataagtgggcgaacattaccggttacgacttggttcgagaagcaagagacggcgcgacgctgattaaggtgaatgtacatctggaagaaatccgcgaagtcactgttaagtatgacgaggaaaaagtaaaaaatccggatgatgccaagaaaaaggacgcgggtgataaaactcaggcagctgaatctggctcgatggagggaacgcttcaggagttggctgatatttacaatgacccagacaagtcagcactgaagaagatatctgatagcgctcaggttatttataaggggctggaaagcgcatggggaaacctgaacaacatcggagaagaaacaaaatttatggttaaccagataaccggaggctga

SEQ ID NO: 281600 - DNA, 489 bp, Morganella morganii
atgacacttagttcgtttggtgagattgttgatggtgttaactatttatctgtagaagatatagcatttatcaataggtttctgattgagaagcaaacgccaaacgagcccgtggaaattattaatccaaatggacttagctcttcacaggcgagacctagcttaacgaaatattacgaacagacggatgacatgtttaaactgtcatccgttttgattgaaagccttatacaaaatcatccattcgccaatgctaataaacgcaccgcgatgatgtgcgggtatgtttttttgcttatgaacgggtacgaacttacggctccgggtgatgacattgtcacaatggcgtcaggtatcgcgtgtaaggagtatagtgcagaggatgttgaaaactggctttgctattggtcgcgaccatatgatgccagagaactatgcaggacggaaattgacgtgttgtcatgtgaagtcatcacgtttaaagattaa

SEQ ID NO: 281601 - DNA, 579 bp, Morganella morganii
atgagtaagttcttacagcagttaatcagtagcgctgtattatttgctggcattctgtattttatgggttatttcgatgagccggacacaacttatcagcggatagagtcagcgtctccagacaaagagcaatcattcgttggcgttgttagggggtacatcaaaaaaagtaatgatgccaaaaacgatcttcagatagctgcgctgaaaacagaaagaaatagaaagatttgccaagtattaaacggtaattattcggttaataactgggttggtaaagttaataagcttgggtctagtggtgacggcaagggtgttgtgaacattgagatagccaagggggtggtcatcaaaacatggaataacgatttttctgacggcggcagtaacaccctgattgaccaaaatacagccctgttccagagggcgctaaatttaaatgtaggtgatttggtgaaattttcggggtcgttcttcagggataaaaatgagtgcataagagaaacgtcgttaactcaaaacggcgggatgaccgagccagagtttgtattcaaatttagtgatatctcaaagttatga

SEQ ID NO: 281602 - DNA, 471 bp, Morganella morganii
atgttgaagagattaaccgctgggttgctgctactttcagttgctgcatgtgtcagtgcaaatggcaatacagaaccatcgacgaatatcgacgattctgtatatgattgcgattatttcttttttgataaaaaagataacgcagacaagattatggcggctgaaaaaaaaggaagggccagcttatacattgaaaatacagataacgatgctttatttcttatcgcaaccctttctgatgccacctctgtttccacgcctccattgcagtaccaggaaaaaagaacaaagggtgttgcttatgggtacgaatccatcaacggggacgtgtatcaactaattatatcgccaaaagtcgggcctatgctggctatagatgcaagagccgaaaacatcaaggttggcgctcttctgcgtaactgcactatacgctatacggttacagcgcacggtggggacgatgagttatga

SEQ ID NO: 281603 - DNA, 2472 bp, Morganella morganii
atggcgacgataattgacgcgctggttgtgacgctgaagcttgataatcgcggattcagcaatgaagtgaaaaaagcgaccgcagagaatgataagttgtcagcagcaatcgacaacgtcagtgattcgtctgccgacctcacgatcaccatcaaaaaccaggctgacgaaaccaaaaaggcagcgaagaagcaggacgacttcacgaagtctatcaacaacggcattaaggcaattggtgctttattcgcaacaatcatggcatcgtccggcctgtcaaaactcatctctgagatacagaaaagcaatgaccagctttatttcctgagcaaaaacctaggcatgagcgccactgagattaaaaagtggcagaacatggctgagatgtccggcggctctgcggatggtatggcggcgagcatgtccaacctcagcaaatcgctgtgggacttggtcactatcggggattcctcggtgctgccgtatttcaatgcgctgaatgtcggcgtggtggactccggcggcaagctgcgcgacctggatgctatactgctggatgtggccgacagtctttccggtatgtcacgtccgcaggcatacaacattgccaaaaacatgggctttgatgagggggcgatcaacaccctgctgcaaggtcgtgacgcaatgcaggagatgctggacacgcagcgcggtctggttatatccagtgaggaagagttggaaatcagccgtcagctcaacaaacagaatgcaaaagttaggcagggctgggaggggctgaaaaccctgctggcaaactacctgatgccgtcactgctgaaattttccgagatggtcaccggtgtgctgatgttcctcaataagaacagggacacggctgtaagcgtgtttaagggcatcggtattgtacttggtgttctgcttatcccgatggtgataaaagctgccacggcgtttttaggcatgttcgcggctatcggattggttcctctcgcgctgttcgctctcggtgccggtctctggctgctgtatgacgacttcaaaaagtggaaggctggcggcgagtcactgctgggtgagtattggaagaagtgggatgaaaccattactccaatagtgaagatgctggacgatttcaaggattggttcaaggacacaacaatcgggaagtggtttacagatcaggatggcaaccttgaaacatggaaagtggcgctcggtgcattcggcttgtggttcggcggcaaatgggttctcggcatcaccggcgggctgctgaaaataggcgcagggtttgctgcaatgtttgggtggccggggctgctggtcgctgggctggtgacagctctcggtatctggcaaatgaaactgaacgagctggatttatccccattaatgacggctgcagcagaggcaaagattaaattcgatgatctcaccaagagcatcaatatgtttcgcgatgccaaaaacggaattgataaagttcaggccggtatccgtgccggtagtgagatcatcccgggtggtagcttagctaagttggcaattgataataaaattgtcgacaaagtgaccggcaaagtcaaaaaagatgggttactaaagtcacttaatgacgctgcggttggtgcttattcttaccttgcaagcgggaaatcatccaactcctctgggtttactgcgactggggttgaggttccaaatcaagataaacgcatctataaaaccactaatggtgatgtcatcagggagggtgggtcaagggcttggcgcaacaataacccgagcaatatgatatggggggaaggcgccaagaaattaggtgcgattgggcatgattttaatgctcagggtcacgtcatggcgatatttccggacaaagaaactggggataaagccagggagtggatgctgtttgaaagtaactgggctaagcagcttgccactaaaagtgactacggcgccgggcttgggtatagggacaaaactctgtcccaagcactggcgagccactccccaccagaggcggcaaatgataccgctgcatatatccgcgacgcattggctgcggttggtggaaaagataaacgcatgggtgattacacaagcgatgagcgtagggcgatactcgacatcattgataaaaaagaaggttggggtgttggtaaagaatatgctgctaattctcccaaaaatattaatgcagagaggttgcttgaaaatatcgtcgcctttaaccagcagatctcgcagccgctaacgccaaatgcaatgcccggcattcagcaaacaatggcaaattcgcaggcgctacaatcaggctctaaatcggtcacgtataacattgattcaaaggttgaaaacttaaatgtgaatacctccgcgtcaacaataagcggtacggttactgatgctcgtgatgcgtggaggagtgacctgttccagacgatcacaccaatgagttaa

SEQ ID NO: 281604 - DNA, 171 bp, Morganella morganii
gtgaatgtctccgttatcgtgaaggatgtggtcgaatccggttatgccacgtacacggagctttcaacggtgctggggcttgaggacgcaatgaacctgctcgaaatccatcaggtgagcgagtacaacaagcgtcttattgaagagatacagaaagataacaggccgtaa

SEQ ID NO: 281605 - DNA, 411 bp, Morganella morganii
atggcactgaacagcaaaacaatcactatcgaaaaaggccgtgacgccgggaagatgtttgtcgttactgaaatgccggtaaccaaggcggataactgggcgatgagggcgatgttcgcgctggctaatgccggtatcgatatcggtgatgtcagcccgtcaatggggatgatgggtatcggccaggtggcgattaaagcccttgccaatatccgcgccgaggtcggtatcccgctgctgaatgaactgctggactgtgcgcagattgttccgtccggcggcaatgcacggcaaatcgaagtggacaccgatattcaggatatcaccactctgctgttgcttcgtaaagaagcgctcgttatccatatcggttttttaatgcaaggcggtgggtcagatttgagcagttaa

SEQ ID NO: 281606 - DNA, 447 bp, Morganella morganii
atgcctatgggtcataaccctaaaacaattacctccgctaatgcggtgttaatgctgcgttgtgaaggcgtttacgacgactatatccgcattcagggcttccaggcagataacgcgtgggagttcggcgaggcgaatatcggtgaaacacgtatgggggtcgacggcaaacagtccatcggctacaccccgcatgaaacaccatggacgctgtaccttgaagccaacagcgtgtcgactcaggtaatggagaatatccgcaaagacttcaacagcaacatggaaacccgctttattgagattatcgtggaaatgccgtcaatcggtaagcggtatcagggtaagggcggaatgacgacaatgaccggcggtgcaagcggcaagaaactgcttgatggcaccagctacaacttcaacatggtattcgaaggggctgaagaaatctga

SEQ ID NO: 281607 - DNA, 1461 bp, Morganella morganii
atgcaatcaattccggcaagcaagattgtcagtatcctgcccggtgtcgtcggcactggcggtaatccactggcgcttaatgcgctgtttatcacaaagaaacaacccgaggctatgctgggtgtgaaagcattcggctctgctgatctggttggtgaagtgttcggtatcagctccaaagagtacgaagcggctcaggtttattttaagggctttgataactgcactgtgcttcctgacacgctctatatcgcgtctatggtgacaactgcacaatcggccaaactggtcggtgcaaaagttcccacgcgcccacagagcgattttaacacgttaccgcagggtctggctctgaccatcgacgggaaaccggtatccgtcaccattgagggtgatgtgaacagctattcctctctggccgcagcggttgctacgtcgctgggtgaggccggaacatgcaaatatgacaccggcgcaaaagtgtttgtcattgagggggcaacaaaaggtgctgttggttcaatcatggcggctgagggtgagcttgctgagttcatggggctgactgaagctgacggtgctcaggcaaacaacggcattaatgccgataccattgaggaactgctgccgcgcatcaccaaagaaaccactaattttgtgtcaatcatggcgattgattttgcggcagatgagaagctcgcaatttcccgctgggtggcaatgcagaatgatcgctacctgcatgttctgtgtcagaccgataacaccaatggtgaactggaaactatcagcagtgccatcaaagaatctgatatcggcggcacatgtctgttttacggcaatcacaaacatggcgcatttatctgcgggtatgcggccagcctgaattttgatgaactgaacgggcgtaccaatctggcgttccgcagccaggaagggctcaccccgtccgtaacagatgatgccactgccgacaacctgatggcgatgggcttcaatttctacggcgcttacgccactgcaaacgaccgctttattttcgcttatcctggctctgtatcaggcaagtttaagtggatggacagctatgtaattcaggtgttcttcaacagccagctgcagcttgcgttgatgaccatgctgaagaacttcaaaaatattccgtacaacgattccggacgtgccattcaccgcgcagctgtgtctgatccggtgttccagatgcttaacttcggtggtattcagccgggtgttgacctgtcagagcagcagaaaaagcagatcaacatcgaagccgggtttgatgcggccgcacaactcaatacagcaggctggtgcctgaaaattgagaagacaccggcgcagacacgcggactgcgtaaatccatgccgctgaaactctggtatgccgacggcggcagcgtccagcaggtcaatctgccctcaatcaacgttcagtaa

SEQ ID NO: 281608 - DNA, 504 bp, Morganella morganii
atgggtgaaggtgctgctatggcgacaataagtgtaaccgaaagcgacatcctgactgagttgcgtcggtatctgattgagctgttcaactgcccggtggagcaggggtatcagaacaacgtcccgattcctgaaaatggcatcgttatgcacatgctgtttgagcgtgatctggattatacggctgattactggaattcggcggatgagcagatgacggcgcagcgatctgttgaggctacgttccagcttgatttttacggagcggaagcaaacagccgtgcgcgtgttgtcgccaacctgtggaagtcctcctataccaccgaccggatgacaaagtgtcagcctctggacaacggtcagccgagaaaggacgtgcttgttaaccaggccaatcagtacgaaaacaggatgatgctggacatcactctgcaatataaccccgaaacctcctatcacgtcgatagtgtcgacgaaatatccattaccactaccaatatctaa

SEQ ID NO: 281609 - DNA, 381 bp, Morganella morganii
atgattaaagtccgcgccctcgcaaataccgcaatccagtgtgtaaataaaaaccttcctgctgtgctgatggctaacgacggatatgagactgatgaggcaggagctaccatgccgaagttcaccagccacgacatttccgttcagttacaaagcctgagcacgcaagaccttgaacacctcggggttatcaaccagcaggggcagtttatttacggctacgcacgcggacagatctccgcgttgcgcagagccaaaaagcagggcgcggacaaactccggctcatggcatacggtgaagacgaagaatctgaatggcttgtcactcaggttattgagtcctatccgtcatgggtgaaggtgctgctatggcgacaataa

SEQ ID NO: 281610 - DNA, 558 bp, Morganella morganii
atggctaaaagcaagcttgaggaagcgctggagaagtacatgtcaggtactgctgtgacattgcgagcaggaattctcgaagacgctgtttacccagacggaactcaggttgctcaggttggttacattcaggagttcggcgcttccattaaccagcctgagcgaaccggaaccatctaccggaaagtcggaaaagacgggacactcagcagaggaggcaaattcgtcaaggcgaaaaactccaactttgcaacgcaacacaccattgcagcccacactgtcaatattcccccgaggccttatttcaggactgtgatcgcagagggtaaatcgacatggcctgtgattctggcgaagtcaattaaagagtatggcgatgttaaaacagcttttgatagcttaggtcgggtgatcaaaaacgagcttgaagcctctgttttaacatgggcatcgccacctaacgccccatcaacggtagcggcgaaagggttcaataagccattgattaaaagccatcagttatctgaatcattcgattacgaggtgaacgatgattaa

SEQ ID NO: 281611 - DNA, 471 bp, Morganella morganii
atgaaccgcagtctgatggagtatcgcagtcagcaggcgaaaggcagtgatgacggagctgttgtttttgatgttgataaattccgcgaggcttacccatctgcaaaaggcacggatactcaactgaacaacgctttcataaaagccggaatgctgctgcggaatgacaagcatagctgcgtctgcaatctggctgagcgagaaatgctgctgtttctgctggtcgctcatatggacacgctccaggcaaatattgacgagggtaacagtgcagtaggccgggcatccagtgcaagcgaaggtagtgtgtcagtgtcgcttgactatggcaccgcaacaaatggtgaaaagtggtacacgcaaacaccatacggcgctgaatactgggcgctcacaagtcggtacaggtcgtttctgtacacgctgggtgtcgccccgatgccggtgtggagaggtggttattatggctaa

SEQ ID NO: 281612 - DNA, 318 bp, Morganella morganii
atgtctgaagtaacagttgcctgcaaactggcgaacggcctgtatctggatgttggcgaaaaacgtgaagtggttaagggtttcgcaaacggcattaccgatgagaacggcttcggtctgactaatggtgtcgataaagcacactgggatgcatggtttgaagaaaacaaagaccgcgatctggtgaaaaacgggctgattttcgctcacgaaaaagtgaaggattccaaggctgaatcgaaagaaaaagcagcgcaaaaatccggcacggaaaaaatgaaacagaatactgaaggcgtgaaaaccgccgaggaataa

SEQ ID NO: 281613 - DNA, 996 bp, Morganella morganii
atgccattaaatttaaatgcgcttgagcaacgcgccgggattgtgtttgctaccggatataacactcaggagcttaccccgctggcgaaaagcatggcaatggacagtgagttagtcactgcgccgaacgccggtattttgtcactgttcacaacttacgttgatcctaagctgattgaggttctggtaaccccaatgcgtatggccgaaatcttcggtgaaacgaagaaaggcgactggacaacacaaaccgcgcatttcccggtaattgaatctaccggtgaagtgtccagctacggcgactacagcaataacggtcaggccggtgtcaacgtcaactggcctatgcgtcagccatatcactaccaggtggttattcaggtaggcgaaaaagaaatggcaatggccggagctgctaaaatcgactgggcatcccgcaagcagatcgccgccgctctcaccctgaataagttccagaacaaatcgtatatcttcggtattgacggacttgagaacgaaggcatcctgaactacaaggatgctctgccgaacgtcacctccacgccatgggaagcgatggacgggcagggggtttatgactccattcagggcaaactgtatgcggaactcattaagcagacagaaggccatgttgatgcgtcatctccgatggagctgttactttcgccaaaaaacgaagttaacctgcataaaacaaaccagtacaacgtcaacgtgtacgaccagctgaataaaaacttccctaacctgaaaatccgcagcattccggagttttcaactcaggccggtgaagttgttaagctgattgtccgtgagtacgaaggtcaggaaacattagacctgagttttactgagaaaatgcgcgttcacgccatgatccccgagctgtcatcatggaagcagaaacgctctcagggcacgttcggctgcgtggtttaccgccctctgttcattgcgtcaatgctggtttcttaa

SEQ ID NO: 281614 - DNA, 483 bp, Morganella morganii
atgggttttcaaaccaaaatgaataatgacctgccacttggcgtggctggtgacttcgcttctgctaacccgcgcttttcaatgctggccggtgaggggcaactgaaatctggtgctgacggggtaacggtaggtctgtttgcgtgggctgatgaaaaaggcctggtatcaaacaaaaagacggccggtgcgcttatcgggtttgttcaccgcaacaaccaggcacttattgctcagtacggcgcagaggcaacaatgctcgtaccagctgggagagaaatcacgctgatgacaggcggcgattacttcgttgagttggaagcgggcggaacacgcggccagtttattgtcgcagacgttgcgacagggaaagcaaaagcggtggataccatcaatcccgaagatgcgactgttgaagctaccccgtaccgtgtggcaaaaactgtcacttccggcctcactaaaatgtcaagctcactgtaa

SEQ ID NO: 281615 - DNA, 1191 bp, Morganella morganii
atgacaatgacagatcgcctcgctttcgacaggtcaatgcggagtaaagacggtaacggccacttaattgtggaacgcactgttttatccaaagcagcagtaaacccgtatcggggcaaagaaattccgggatttgaaagtctcgggcttgatcctgaaaaggtgtattacctgttgcgtgaccctgccgagttagagcgggcagcaaaaactttcagtaaaaagcagttactcatccggcacgttcccgtcgattcagacgaaccgcaaaaagaagacactatcggcactatcggctcagatatcacattcgagagcgggatgctgtacggcgatctgtgcgtgtgggacgggtatgcaattgacctgatagaaagcgaaaagatgaaagagctttccgctggctatgggtatacgcccgatatgacccccggggaatatgaagggcaacactatgacggagttatgcggaatattttcggtaaccacgtcgcattagtcgagcgcggcagaatcgggcgagacgcaatcatttcagaccatcagacagtcgatttggagacagagatgaaattaaagaaaggcgcgcttcccgaagtggctgcgcagattaaaaaggcgctggggatggatgctgatattcctgaaaaccagctccacgcaatcctcactgctgtaaagctcggcatggatgtgtcaccggaagatctggaaggcgcgaaagacgaagaagagaaaaaggcagaagaggcggctaaaaaggctcaggacgaggaagaggcgaagaaaaaagccactgacgaagaggaagccgaaaagaaagccaaagatgaagaagcggccaagaaacaggcttctgataacgaagaggaaagcaaaaaagctatggatgccgcactgtcagcaaccaaagacgacaccattaagcagatgactgccatgttcagcgctgtgcgtgacgtagagccgctggttggagttatcgcaatggatggcttcaccagtgctgatgacgtttataaatacgcactgaaacagaaaggcatcgcttgtgacggcgttaccggtgtaggccttgcatcaatggtgaagatggcaaaagacacagcatccaccgcaaaaccaaaggtagccatggatgcagacgcatttgcggatgagccgctggtttcccgcttcaaacaggcttaa

SEQ ID NO: 281616 - DNA, 795 bp, Morganella morganii
atgaaagcaatagcgaggaagaaaccgagtgatgcggtgatgcctgaaattaagccctcagcagccattgagggcgagtattacaggttactcatgggaattatcagggatatcaggaaagagcttgatgacgctctggtgagtgaatatcacgataaggcgaaacgtgagttagccaacgacggaatatctgactggatagctcacgttgctgattatctgcttgataagtggaaccggaaactggacggtctcggtaaagagatagcgaagttattcgttgataaaaccgtgacgaattatgacgcgcgattaacaagcctgctccggcgcaggggcttcaccgtcaagatgcaaaacagtgaaaaaacactggatgcgctgagggcggcgatgggtgagaacgttggtctgattaagtccatcgggacggaatatctgagtaaagttcagatgcatgtctggcagtctgtcaccggcgggtatgacctgaaaacactgacggataacctgcagcatgatttccacattgccagaaacagggctgcactgattgcgcgtgaccaggctaacaaagcacacgcagttattgagcaggcgcggcgcaaagagcttggcatcaaagaggccatctggattcactctcacgccggtaagcagccgcgagaatctcacgtgaaagcacacggtaagaaattcgatatcgagaaaggtatgtatatcgatggcgagtggatattacccggcgagaaaataaattgccggtgcggcagcaaggctatccttccattttaa

SEQ ID NO: 281617 - DNA, 1533 bp, Morganella morganii
atgaaattattcaaatggaaaaaacgcctgtccaagcgagaggcggagcttgctattgagcaggaaaagacaaggcaacttgagcttgaagcaaagaaaatagcttcacagactaggctgatgcagatgctggtcactgaagatgcaaaaaagcagcaaccggttcctctggaagccccgaagttatatccgggagttgttcctgatggcgagaagcctgctgtagcgatggacagtgaatgcgctcaaggggcatatcaatacgttggggctgatgctggattttaccccggatttctcggttatccgatgctggccgttatgtctcaatccagcgattaccgatgtgtgcctgaaactaccgcgaaggaaatgacccgtgaatggggcaagatcaaggctcgtgataccggcgatgagtctggcgataaatcagatattgtcgcgcaactaaatcaggcgctggaagactttaatatccgcgatctgttccgccggcatatcgaaaatgaaatgatatttgggcggtcgcaactctatatcgatatcaggggacaggaagataagcgccatttgccgcttctggtaaacgacaaaggcgtcccgaaaaactgcctcaatggcttttctgttatcgaacctatctggtcaacaccaagcatgtataactcgacagatccgaccgctgcggatttcttcgtgccgaccgagtggtttgttcttggtaagcaaacacacgcagacaggctgttgacactgattatgcgaccggtcagcgatattctgaaaccggcgtacaacttcagcggcttgtccatgcttcagctcatgaagccgtatgtcgagcgctggcagaggacaacggattcaataagtgatctgattaagtcgttttcgtttaccggtctcgcaactgatatgcaggacatcctgtctggcggcagcggggcaagcatggttctgcgggcgaaactattctcccagcttcgcgatagtcgcgggctgatgctgacagataaggaaaaagaggaattttttcagttcaacaccccgctttctggtctggatgcattacagcgccaggcgcaggaacagatgtcagccccaagccataccccaatggttaagctgctggggattacaccgaatggcctgaacgcaaacagtgatggtgagattcgtgtttactacgattacatctcatcgttgcaggaggcgcacctattacctcagctaaaggtgatcgtcgatatcattcagcttcacctgttcggaaagattcacgacggtatttattttgaattcacgccgctttaccagctggatgagaaagagacagcagaagtaaaccgaaccaacgcagaaacggcggaaaagctgtttaacattggcgcggtatcgggcgaagaagtccggaaaacgctggcgtctgacgaatcaagtaaattcagcggaattaaccctgatgaagtaataaccccgccattcggagtgccggactatgaaagcaatagcgaggaagaaaccgagtga

SEQ ID NO: 281618 - DNA, 1350 bp, Morganella morganii
atggcagatatcaatccgatatttaagccgtttatttcccctgcgcggtacaagatagctaagggtggcagggggagcggaaaatcgtggtcggtcgcccggctcctgatagagatagccaggagaggaaattaccggttcctgtgcgggcgtgagctgcaaaacagtatcggcgactcggttctcaagttgctcgaagatacgatagagcggcatggctaccgcgatgaatttgaggtgcaaagggcgtcgatatcacacgttcacaccggttcagaattcatgttctacgggataaaaaacaacccgacaaaaattaaatctctggaaggtgtggatatctgctggatggaagaagcggaggctgtaacgaaagaaagttgggacattctgatccccaccatccgcaagccgaactctgaaatatgggtgactttcaaccccaagaacatcctcgacgacacctatcagcgcttcattgtcagctccccgggtgacagcgtgatcctgactgttaactttgatgataatccacacttccctgatgttctccggaaagagatggaggaatgcaaagaacgggattacgaactgtaccgccatatctggctgggtgagccggtggcagattccgccctggcaattatcaagcccgcatggattgaggctgctgtcgatgctcatatcaaacttggctttgagccaagaggtaagcgcattgtcggattcgacgttgctgatgatggcgaggatgccaatgccacgatactccggcatggctcggtggctatcgaggtcatggagtggcgcgggcaggatgttatttacagtgccgaccacgtctatgattacggactgaaaaacaatgtggactccgttatttatgactcgataggtatgggtgccggggttaaggcgcagtttaaccgcaaagacaaccgcatccggactgtcggatttaatgccggggcatcagttgagaacccgaacagcaattatgttcaggggaaaacgaacaaagatatgttctccaacctgaaagcccagcagtggcagatggtcgctgaccggttttacaacacctggcgggcggtaacccatggcgacaaatatccggaagatcagctcatcagcatatccggtgacatgaaggatatcgaatacctcaaagccgagttatcacgccctcaggtcgattacgacaacaacggacgcgtgaaggttgagagcaaaaaggacatgaagaaacgcggcatccccagccctaacaaggcagatgctttcattatggctttcgcgaatgttcgcggaggactgcaaatcaaccccgcagcacttgcaggtatctga

SEQ ID NO: 281619 - DNA, 585 bp, Morganella morganii
atggcacagaagaaaccagagctcactaacgagcaaaaagttctttttgatgccctgacgaaactgcaacagaaattcgtgttaggcatcatgaaaggactgaatcagaccgatgcctacaaacaggctggcggcaaggctaagacggacgatatagcccgctcgtccgcatccacaatgttaacaaatgtaaacgttaaatcgtttctcgactcaatgaatcaggttgctgtctcagatgccattatgacgcgtcaggaagccttagagcggctatctgcaatcggacgtgcatctgtatcagaaatggttgagttcagtgagcacaacatggggaaggatgacgacggcaacccggtgatacaagccgtgtggcgattcaaagactccgcgctgcaaaacccgcaggcactggctgcaatatctgaactcactgccggtaaagacggcatcaagctgaagctgcacgacccgaaagctgcgataaagcaggttgctgaaatgcagggctgggaagcgccgaaagaaattaagcacgacatatccactcttccggcgctcggcgaactcttctcatcaaaataa

SEQ ID NO: 281620 - DNA, 249 bp, Morganella morganii
atgagcgacaaaacagaatttgcacggatagtccctgaggtaactcaggaagccgccactaattgggttattaaaggcattgatgacgcaatggagtattttgccacaaccggaacaaaagacgcagcaaagcaagttttagctatcgctcgtttcagggggcgggtaataaatcaggctctcattgctcaatatgcggatgcaacttatgacccgactaaccctgagaaagaaaaaacagaagagtag

SEQ ID NO: 281621 - DNA, 246 bp, Morganella morganii
atgaaattattaggaacaatgcgttttatcagcaatgctggtgatgtgtataaatatgagatttatcaggcacagggcgcctattttgcggttatttataagcaagaagacgtagtggataaaaatggcaccaatcaccacggggtgtgggtgcaaataaatggatgtcataatcttaccgagacaaatgtcccacattgtgaaatggcctgcgagtcacatttcgaaatcaattacaaaaagtaa

SEQ ID NO: 281622 - DNA, 393 bp, Morganella morganii
atgagtagcttcagattcagtaagcgcagtgaagataacctgaaaggcgtcaatcctgatctggtgaaagttatccgccggacattggaaattacgccggtcgatttcattgtcattgaggggttacgaaccgaggcacggcaaaagcaactggttgctgagaagaaatcacagaccatgaaaagccgacatctgaccggccatgccgtagacattattccggttaacaccaagtggcagattgaggaattcaagccgttgctgaaagccgttaaacaggctgctgatgagctgggtgtaaagctccggttcggcatcaactggaagaatgacccatcactgccgattgaaacccgtttcattgatgcgcctcatgttgagattccggcatga

SEQ ID NO: 281623 - DNA, 600 bp, Morganella morganii
gtggttggagacctgcacggatgctatcagttactgattgataggatgcaacaaattgattttgataaacaaactgacctaatcatttctgtaggtgacctgatagacaggggtgatcaaaacgtcgagtgtttagacttgctcaatgaaaagtggtttgcggctattcgtgggaatcatgagcaaatggcgattgatgccctgttcagcggtggtgacgtcaataactggctgtataacggcgggaactggtttttccttcaggactacgacaaagagattttatctcgggcatgtctggcgaaagccgaaaaactgcccctgattatcgaggtcatcacgaacggaaagaaggttgtaatcgcccatgctgattatccatcagatgaatacgagttcgggaagccagtagatgagcaggccgttatctggagccgtgaacgtgtggctgacgatatggcacgtgaaattaagggtgctgacctgtttattttcgggcacacgccaatgattaaaggtatcggaaggcgagccaatcaggaatatatcgatactggcgcagtattcggctatggcctgacgctgaggaaaatacaatga

SEQ ID NO: 281624 - DNA, 417 bp, Morganella morganii
atgacacgacaatacctacacaccaatgagcagaagcaggatatgtgcctgaacataatccggtcacttcgccaccatgacaccttcacggtcaagatggttgcgcaggccaccggcctcggcagcatgatagacgctaaatttgtccggctgctgcaggatatcggcagtgtccacgccgtgcgcaggaaaggtagtcaggtttattacgcttttgacgatcgcgcagcatccaaagtcagggcgtatttcagtagcctggcagaaaagccgaccccggtagctaaggcgaggatgactgcggtcgaggagaaagcatcacgtccaaaatccagaacccgtccgtttgagcctgggttcgggtggtcgttcatcaatgacattgacgcaatgctgcggggggtgcgctgtgggtga

SEQ ID NO: 281625 - DNA, 180 bp, Morganella morganii
atgtacaaaataacagcaatgatacacaagcctggcggactgccggcgagttggttccgccggtcaccgaagaaactcagtaagcgtgaatgtgaaaacatgatttaccgcagcaaagaagttggccggtcattcggtgacaaagttgtcctgactgattttaagtgtgaaaaggagtag

SEQ ID NO: 281626 - DNA, 264 bp, Morganella morganii
atgaagttagaattcaaagaagttaaccctcggattgggtctatttattacattgtaaagtggggggatattcgaatcggaactattactcgcgatgtgtgttgtggtgacatggtcattaataatgacttaccaggatttaagccaattaaaaataaattcagcgacatagaatctgcatctgattattacatagggctggtcactctgtttgctaaaaaggtcggggtgcaggaagccgtcaatgagccaaaggaatcctga

SEQ ID NO: 281627 - DNA, 810 bp, Morganella morganii
atgaaaagtaacgttgcatacgctgactttggagccgcacgacggcaagagaggccaacggtggcagatcttgataacgggtacagcaggatagcgcatgagatactggacgctaccatggcgtcaggattaagcgaaacagaactctgcatcatcatggctgtatggagaaaaacatacggctataacaaaaaaacagactggataagcaatgagcaatttgagtcgatgattatgaagcattccactcattgctcgacggctaaaaatcaacttatcaacaaaaaggttcttatccaggaaggtcgcagagtgggcattaataagaacattgatgagtggaaaacaaagaataacggattctgcaaaacattagctaaacctgctaaggaaaccttagcaacatctgctaaagcaactaagcggaaggtgctaaacacaaaagacaataatacaaaagacaagaaagacactcccctaacccctcaagagggggacggtgaaaaactgatttctgctaacagaaaaaatcagatcccctatctcgacatcatgaacgcattcaacgaatcagccggtgatagactgcctaacgcagaatcactgaatgacaaacgcaaacgggcgatatccaaattcctgaaagaactcaaagagccaacagtcgaagcggccagaaattattttgattatttcatggctaccgcaaagggattttactttggcgagaacgattcagggtggagggctagttttgactacctgcttcgcccggcaacggtattaaaaaccagggagggttcactgtga

SEQ ID NO: 281628 - DNA, 1110 bp, Morganella morganii
atgactaatctgagtgcaagtttcgcgccggactgggtctccccacctggcgaaaccatacttgatatttctgaagagcgcggatggtctcaatccgagctagctaaacgattagggtttagtgagaaacatttaagcttgctggtaaatgggaaagcatcccttaccacagatacagcagaaaaattggaacgcgtattaggtggatcttcggatttctggttgtccagagaagccaattaccaagcccataaatctagaattgaagctgctgagaagcatgcttcatgggagccatggctcgatgaagtgcctgttaaggatctgatggcttgtggggctatagagaaattaagaataatctctaagcataaattaaaaatagtcgagtcatgcctgaagttttttggcgtggcatctcctgatgaatggcgtgatatatatggcggaatgcaagtatcattcagaagaagccgagaagagcagtgcgatgtaggtgctatatcatcatggctgaggctaggagagcaggtgtctgaatctataaatgcgcctaagttcaataagagtaaatttgagaaagctctaaaagaaatacgtggattaactgtcgaaaaggccgaagttttcgggcctgccatgaaagagctattacttgagtctggcgtaattctcgtttttgttccagctataccgagatcacatgtcagcggcgtcgctaggtggataaaccctacaagaccattaattcaactttcactatatggaaaaacgaacgataagttttggttcacattcttccatgaggctgctcatatattacttcactctgataccaaagaggataaaaaatcaattttcttagatgaccctaacgctacaagatctcaagataaacatgagatagaagcgaacgaatgggcaggaaaatatttgataccagagaagtataataaatatcttccagatcttagaaacagagatgccgtcactcagttttctaaaatggtaggaattcacacaggaatagttgtcggaagattgcagcacgacgagcatatcccaattaattggatgaatgacctaaagcagagtctaagattcaaataa

SEQ ID NO: 281629 - DNA, 207 bp, Morganella morganii
atgcatctagatgaagaggacgttgtaaaggtggtaatggaagtaggtagcgcagtatttcgactactggataatactgacaccataaccaaagaaatgattgttgatgaacttgagcgatatcataaagaggtcacgaacacgctacataaaggtgctttacgtgatgctgctcaggtagttagatgcatgggtaatattagatag

SEQ ID NO: 281630 - DNA, 216 bp, Morganella morganii
atgaaagatatggaatcctgccctgtttgtggtgaaggtagcctccacccagcgcaggaagaagtcgagattgaatacaaatctgaaaagcactcggtcactctcatgtctcatatatgtgatgagtgcggctcagagattgctactcgcgaggacgcaaaacgcaacaaagatacggtgattgcactccatcaggagcgtgattctcgccagtga

SEQ ID NO: 281631 - DNA, 177 bp, Morganella morganii
atgaaatttgaagagataccagtaaatgcacagacggcggcgtttgaagcattcagggaaatagcagtcagagaagcatcattagtatctgacgagcacaaagaagaacaaaaagccagacttaataatctggctgaaagtttagctttggggtttgttaagctttacgaaagctag

SEQ ID NO: 281632 - DNA, 213 bp, Morganella morganii
atgacagaggaatacgaacacgcatcaatccgtgtagaaatggctagcgatgcgactatcagggattattttgcagccagggctatgaatgcattgattagcacaataccgatgcaatggtctttaatggggcaatctgaagatgaattccatattacagctcaatcagcctaccgcatggcagacgcaatgctcagagcaagggagaaataa

SEQ ID NO: 281633 - DNA, 288 bp, Morganella morganii
atggaatttaaaggcactccggggccgtggtcgcatgcagacagccgcggccttaatgaaacagcaggtggcgctattcacggcgacggtaaaacactttgcctgattcttggtaaaggcatcggaaaggaaaaagcgaccgctaatgcgaaactgatggcggcagcacctgagctacttgagcagttaatccgactgagagatataattgccagttactttcctgacgacgatgaccatctggatattgtagacaaagtaatccacaaagcactgggccgcgaatag

SEQ ID NO: 281634 - DNA, 600 bp, Morganella morganii; identical to SEQ ID NO: 278740

SEQ ID NO: 281635 - DNA, 360 bp, Morganella morganii
atgaaatttcaaaccgagagaacatgggctctgaacgataccgaaaaacggacagccggtgcctttgacaacttcattatttacctgacggccgctgttgtcgtctggctgttactgagcgctttatttcatactgcctggccgggtaatgatattccggttccggaaaatgagttacggataaaagacatactgcatgtgctgatgtatgtcataccgctgtcatttgccggaatcgccgccggtaatgtggccgtgtttttgttgcactatattctcaccccgctgacagaaatcacggtatacgggctgtccgttctgttccgtaaaatcatccgccgggggaaaagccatgaataa

SEQ ID NO: 281636 - DNA, 414 bp, Morganella morganii
atgacacttttgaaaaagatcaccatactcaaaatcgcggttattgctataatttgtatcatcatggcaaacgaaacccatgacatgaaagagagatttccttatttatttggtttggtttctttgtttatttcatctgtatatgtctttgcgtgttttaaaattgtagatgataaaaatatttctgttgaatattgtgtgttatccaatatggtagcgatttttgttttgtttcctctgatatattctatattctctggtttttttccggcaatagcctgcctctcattttcaataagctttgctgatattgcattttttcagttaaccatttataaatttgcgtatgacaaagccagtgatagccagatagttaaatggataatggctaatatgactaataaaaagaactaa

SEQ ID NO: 281637 - DNA, 207 bp, Morganella morganii
atggccgatgaagctgatatctctcaggctgagagtgatttcttgttgtctctgcatttaaataaacgaacacagtatcagggggaaagcgcggaatactgcaccggctgcggtgaggtgatcccggctgtccgccgccgggcactgccgggtgtgaggtattgtgttttctgtgcggaacaccgtgagcgaaccggcacccgctga

SEQ ID NO: 281638 - DNA, 204 bp, Morganella morganii
atgcgtgttctcaaatatggcgctttgatgtgtgtctgccttctcattgtcctgacgggttatctggcgatgcggagtattcagctggaaggggccagccttaaaacctgtgcgctgatatcagcgccattccttacctggcaggcttaccagaaagcctgtttctttgttcaaaaatccacgactgaaaggaaatcatcatga

SEQ ID NO: 281639 - DNA, 351 bp, Morganella morganii
atgaaaaacaagataatcattctctcaactgctgtcgcatttctgatgtctggcggtctggcatttgctggatttgacagtactccaccgcctcagtatgtaggcccgccattcggcagcactccacaacctgagtatctgagccagaagggggaacaagtaacgactaacgtgctattgcgccagattttggcggaagtgatgaagggtaacgctcagaaagcggataaccgctgcagcgatggcgagaagaactattctccgggttacatcatcagcgccggtaaaaaatcacttcgctgtgatgtggtgaagggttatccggagtgggtgagtgtggacaatgcctga

SEQ ID NO: 281640 - DNA, 597 bp, Morganella morganii
atgcctgaaaggataattgcactcgttgactatgaaaatatcggaacgcttgagaatatcagtctggctcgttatgaacgacttattttatttaccggaccaaaacaggattttatccgatttccggcggtaacgcatgcaggaaatatatctgtcagcgtgttccaggctccgtgtatttcgaaaaacaacgtagactttcatctggtacttgaaatgggccgactcagtgtcagtgcacctgacgggataacgttccatgttatttcgaacgacaagggatacgacagcgtgatagccctgctgcgcagtaccgggcgaccgtgctgccgtatcgcttcacccccaccagagcgtcagacgtcagaaccggaaccagccagtggcgacgaggtaagacgtctggcagacaacattcagttgcagagcaggaagtccagaaaaaatagaccagcgacgccaaaatccctcatcaactatatcagggctcactccggcaatatcggcaatgtcaccgtactcaaccaggtgaagcatgaactgatcaggagaaacctgataaccgtctatgaaaaaaccgtagtctggcgtgaataa

SEQ ID NO: 281641 - DNA, 396 bp, Morganella morganii
atgagtgatattaagaagaagttaagtgtagaagttagaacttattgggataaaaaacataaacctttgctgtttagtacaattggcgatcagttcaaagaaataaagtcagaagaaggttttgttaacataggtggttggatttctaaaaatataaatgatcttgacgcatttatttatagcgaccccaacaaaccagaatatatcggtttagttcctaatggggaagagtacgagccggaagagcctaaactattttctaaaaagataattaagaaaagtcagaataatgaaaggctggttttggattttctttcaatccttaacgacctaagtgatgatgatttgaagcgagtgatcattccaacggatattttggttagacttatgaagtaa

SEQ ID NO: 281642 - DNA, 801 bp, Morganella morganii
ttgtcatttgccggtagtgaaccatcattgcctataaataaatctttgatttcaaacggagaaaaaggagttatctcgaaagtaaaaataaaaaataatacgaaacatagtgatctaatggggtgtgtactatctgagttgggtgatttttactcagcttacagcggagtggtgctgttctgtgacccagactactacccttacctttgtaagaatgctgggctttttttcatggtttttgatcttagtagttgttcagcagatctagctgacgggcagctaaaacaaaaaattgaatctttaatgagtttgtcagtaaagaaattcatgcagattaaaagagagcttcttattagtaatggtattttgatgaggctgccatatcgtaattttatcaatccgttgctaagggagttctttgattctctaaagagggttcatgagattgatataggtaatcttgctgctgatataaagaaaataaaaaacgattgctataaaaaagtgtcagatgtaaatcccggtagaatatttgtagatgtaaacttgaataatttcgtttttggtcacgaatatcattcaaagcaaggtacgtcgtctgcaaatgggcacgttttactttgcgatgtaagctctaagtataggtttagtcataggatcgatgaatttaggcattttaatgtgcagaaaaggggtaagaaacccatatctggatcattttataactgccatgatacaagggaaagtgtaaataaggagactcatattaacatgtttacgagtgatttcatggagtattga

SEQ ID NO: 281643 - DNA, 642 bp, Morganella morganii; identical to SEQ ID NO: 126390

SEQ ID NO: 281644 - DNA, 924 bp, Morganella morganii
atgactaaaacaaaagggttacctcgtccgctgacgcactacgcttggctttccattgccacggctattgccactatcggactcaaaggtgtggcgtggaaaatgaccggttcggtcggtctgctatctgatgccatcgaatccgtagttaacctcacaggagccctaatggcgctctggatgctgaccttggctgcgcttccggccgatgagaaccatgcatatgggcacggcaaagccgaatatttctcgagtgctttcgaaggatttctgatcctattggcggcagccagtatcgcctataccgcagttgagcggatgttaactccacagccgcttgaggagattggtctcggattactggtttcaacagtcgcatcaatccttaattttgtgacggctcgcattttgttaagggctggcaggcagcacaactctatcactcttgaggcagatgctcatcacctgctgaccgatgtctggacgtcggtcggtgtcatttttggtgtcggactggtttatctgaccggctggttttgggtcgatccgatcgttgcattgctggtcgcagccaacatcgtttggactggttatcagcttatgagtcgttcagctgcaggtctgatggacgtatcgctacccacggaagaactcaaaaaaatcgagtcactgctggcaggatatcgtgaacaggggcttgatttccatgcactacgtacacgccaggctggcgggcgggcgtttatgacaatgcacatcctagttcctgggcgatggactgttcaatatgggcacgactgggccgagcgtatagagaatgatatccgcaccgcactgccttttatccatatcaccactcatgtggaaccgttggaagatcccgcgtcaatgaacgaccaaacgctcgacatttctgatcactaa

SEQ ID NO: 281645 - DNA, 162 bp, Morganella morganii
atgaaattgcgactctggaatctattaccccatgattacgctcctttttttcgtattcttcacatcattgtggcatttctaatattatcacaaattattaactctaatctgacagagaccgaagcaattggtgaacatagtcttgaaggagttataacctga

SEQ ID NO: 281646 - DNA, 498 bp, Morganella morganii
atgactatgaatcagctcacccaggctacagcccctaacactgcagcggcgaccagcgtatccccgctggagcagtcaggctcctcaaaaacgaaatttctgcagagccaaccagagttagccaaaagtaatgtcagaacggaagtctgtaacccggacaattacctgtcacaacgtatcagcgagcagcagggctatctgaatgagctgtatcactttaacgaccagtggcagcctgaacgtccgcagcggctgatggaattattgatggtcatagccggttatataccggaaacagccacaaactggcaggatgttgccgattttggcgataaaccacagattccttacgcaataatgcattgctggctggctgctatggaactggcgccacagctgtgcggtgaaaccggcaccgccgctgtcgcctatgtccgtgatgacctgaaaaaaaatatggcgtgtcagtgtgcactggcagctatggattgcgcctga

SEQ ID NO: 281647 - DNA, 378 bp, Morganella morganii
atgaaccggaaagaagcggtaattgctgcgctgcttattactgctgcctggtgggtatatgacacctaccgggataaccagcaactgaaggtgaataacacaacgttgtccggacagctgtcagcacagcagacgataaataccatcacgctttcagccgttgccatcagacaccgcgcagcactcgacaatatcaaagccaaacaggttgaggacacagagcatgtcaacgttaaaactgttatcaaaactgttttcaaagacagtgaatgcgctgctgctcctgttcccgctgatgctgtcagtgagttgcgcagatacgcgaccggaattaatacccgcgccagtgatatcgattccaccacaactgaccgctga

SEQ ID NO: 281648 - DNA, 726 bp, Morganella morganii
atggctagtcaaaatcttctctctgtgggtgccacttccagcgacacccctcaccagaccttcaacttcgaccacctgccagtgcgcaccgtcaaccgcgacggtgaaatctggttcatcgcagcggatgtttgcgctgcgcttgagatcgtcagctctcggcaagcagttggccgcctcgatgatgacgagaagggtgtatgcactgtatccacccccggcggtcggcaggaaatcatgatcgtcagcgagtccggcctatacagcctgatcctgaccagccgcaaggaagaggccaagcgcttcaagcgctggatcactcacgaagttttgccagccattcgcaagactggcgggtacggcaaccaagaccctgagcgcctcaagctggcgtttgctcttgcctccgaagtggctgaccaggccgcccgcacggtttttgaagcggtgatggcgggtgacgatgggtggaagcacgaccgctggatgttctccctgacctacgaccgcgacaacaagccaacggtgccttgggctaaagccattgaccgcgaagccatggtggtgtcactggctgaattgcctcgccgcctgctggagccgaacggcatgctgcccagcaacaaagaactggccgaactggctgcggcgtgcaatcaacgccttgcgcagcgcatggcgtatgaggccagcaaggcttctggaaccggagtaatgaagccttga

SEQ ID NO: 281649 - DNA, 1365 bp, Morganella morganii
ttgacaaccctgcccgacaacatcctgcaccctctcaaggccaagatcgtgggattccacgaggaagagaacgagtacagcttccaagtggaataccctgatccggtcatctgcccgaactgcgcggtttacggagaggtggtgcgctttggcaagaaggagatgaagttgcgcgacctgccgctgcatggacgctgggtcacgctctggttgatccggcgccgcttcctctgccgggcctgcaatggcacgttcagcccggccttgccggagatggccgagggccaccgaatgaccaaacggctgtccgactacatcatcaaggccgctgtgggtcgcaccaatagcgacgtgagccgcgaggttggcgtggacgaggcgatcatccgcaagctgttccgtgaccatgccgaggcgcagaaaggccgctacaagccttctgcgccccgtgtgctgggcattgatgagctgtacctgcaacgcacctaccgctgcgtgctgaccaacatcgaagaggaaaccatcatcgacctgttggagtcgcgcacgaagccgcaggtcacggcctacctgtcacgcctcaaagaccgcaaagacattgagattgtgtgcatggacatgtggaacccctaccgcgaggtggcgaaggcattgatgcctgatgccgccatcgtggtggacaagttccacatccagcgcatggccaatgaggccatggagaagatcaggaagggcatcaaggccggactgtcacagcaccggcgccgggcactcaagggcgaccgaaagctgatgctgatgcgtgagcatgacctcaaccccatgaaccgcatggtggtcgatacgtggctcaaccagttcccagaactcggtgccgcctaccgtctcaaggaagagttcctgaacatctggaatctggaaaacgagtctgacgccaaggaagagtaccggcgctggcattccagcctgaccccggaggagcgcccccagtgggcgccgctgaccacggcaatgagcaactgggaggcggaaatcttcgcctacttcggtgacggaaagcgcaataccaatgccttcaccgagtcgatgaaccggcaaatgaaagacctgaacagggccgcacggagcatgtcgttcgagatgttccgggccaagatgctgttctcggtcgagcacagaatgaagcgcaaggaaaagcctcgccgggaatcgcccttcacaatgggctatggcgtccctacggacgctgaccttgcacgagcggcacccgccatggtggacatgggggtgcctatagggaagctcttggagcgcttcttggagcctcccatcaacatcactacaccgccttcggaagccggttag

SEQ ID NO: 281650 - DNA, 792 bp, Morganella morganii
atgcacatcattgttttattaagcatcaactattttacaattgcatcaggactacgctttgggcttgctgtatctatattaacatatggattgtgtcattacatacgctataataatataatggcactcctatttattgttcttttttcatcatttatacactttactttgttatattttattctacccatattattttctatcttcataaaaatcaacttcagaacatttgttttattactaatactaggttttatatcatcattattcagtgatattgcatttagatttattgttaatataattcactatggtcgctcctatatagatggtgtatgggcctccagtgaagataaaaatttgcacggaaaaataagagttatactaaatcaaattccatttttcttttttcttcttttatttttgataacatcaagaaaaataaaatcatcattgttattttggatttgcatattcacatctcttacatatttttcatatactctattcactcgtctttcaagcatccctgtatttctaatgatattttatatattatcaaaagataaaatactaataattaaaaatataatcctaatttttgttttctcatactttatggtcgacacaatttatggttaccgacgtcagatattgctaggtgaaatgtggaaagctcctttttattcaccattaatctatattgtaaatcccaataatgattttgatatattaataaaagaagtagatcataatggattttggataaaaaatcctgtaaaaactaattag

SEQ ID NO: 281651 - DNA, 162 bp, Morganella morganii
atgagaacgttcaatttatggcgttggttatggggacgtgtatgggctttatctgaatggagcgggattggtcttggccgttttgctccctgggtttttcatcagatgatcggttgcaatgcgccggtaaaaaaaataaacagcgatagtcagagggattaa

SEQ ID NO: 281652 - DNA, 198 bp, Morganella morganii
atgtcattcaaacactatgcaacaacagcggccaacgcagaacgtgacggccattacaaagaagccggacgtaactgggcagatgcggccagactggccggaaaacgtgaaaatcagcagtgggcggaacgccgggcagagttttgcgcaaaagcagcaggaggccgctatgtcccggttgtcagcgaagcagtttaa

SEQ ID NO: 281653 - DNA, 195 bp, Morganella morganii
atgtcccggttgtcagcgaagcagtttaatgagcgttatccggtggggtcttattttatttatcagcctaaccgtattttacgcggcggcccgatggtcagaacgttaagccgggccaaagatgaagataaccggactattgtggaaatcgatagtgagccttattacaccgatattgattcattaaactgctga

SEQ ID NO: 281654 - DNA, 237 bp, Morganella morganii
atggggaaattgagaattaatcaaatcggtcttgtcagtgcaatttcaattgaaattgccaatcagcataacggcataaaaataagtcagtctcagttaaatgccatcattcaggctgcgaattctgttgttgcggcatttgatgaacctaatctgtgcagcagctgcaatgattggccccgtggtggttgcctgccgacatgtactgcttacgataaggggaatcgtcatgcgtaa

SEQ ID NO: 281655 - DNA, 315 bp, Morganella morganii
atgcgtaaatattggtgccctgtgtgtgaaaaaccactccctgctaaccagttggttataaatgtaggtgataaagtcaatttcaccatgcggagtatgaaagcgacgcgctcacataccaaagtctgttattcaaacaaggtgggaaagatagctgatatcaaaaatgaagttgctgacatcatttatcgcggcaaggtatatcaaatgaatatcagcagtctgagtcctgctggtgctccggggagtctgttgcgccttatcagtggtgaatgtgaatgcagttcgctgccggagggtactgctgatgattag

SEQ ID NO: 281656 - DNA, 309 bp, Morganella morganii
atggacagtgatcttttctttatattattgcagatagcagccggattttgggtgtattttgacgcttacagccatcgcatcggctcttatcgtgacagtgcgggtaaaaggtgcggctattctcccgtgttctggggggtgctgactcagttaatttggattattacactgccggtatatctgattatccgtaaaaaattattacagactgccgccgaacatccggccagcagtgataaaagcatcgggattttaatcatggcagccgtgggtggttttcttctctggtatttctggttccgatattaa

SEQ ID NO: 281657 - DNA, 924 bp, Morganella morganii
atggctatcgtaacccccgcgttaatcaaatcgctttttaccggctggaacggcgactttcaggacgggctggcggatgcaccaagtcagtatgaaaaaattgcgatgactgttccgagtaccacgaaatccaatacttacggctggctgggtaaatttccgggcatgcgtgaatggattggtaagcgtgttatcagtgatatgcagtcacatggctatcagctgattaaccgtccgtttgaaagtactgtcggcgttgaccgtgacgatatcgacgatgacaacatcgggatctattcaccgctctttaccgaaatgggccgcgcggcaggtgttcagccggatgagatgtgctttggtgcgctgaccaaaggtttcagcacactgtgttacgacaagcagaatttctttgataccgaccatccggtttacccgaatgttgacggcaccggcgatgcggaggttgtcagcaacattctggcagaagaaggttataccggtcagccgtggtttgttctggattgttcccgtgcggtcaagccaatcattttccagcagcgcaaagcgcctgaactggtggcaatggataaggtggatgatgaagaaaacttcatgcagaaactgatccgttatggtgtcgatacccgctgtgaagccggttattccttctggcagctggcttatgccgccaaagccgcactgaccgcagataacgtatggacggttatccagaacatgcgcagcttcaaatctgacggtggccgtccgctggcaatccgtcctactcatctggtggttccgccgtcaatggaaaaagcggccacgcagctgcttgagcgtgaactgacggttgacagtaaaggcggcaccatcagcaacgaaatgaaaggccgtcttgaactgattgtcggcgattacctttaa

SEQ ID NO: 281658 - DNA, 453 bp, Morganella morganii
atgagttacgcgaccctcgccgacatgtatgcacgttacagccgtgatgcgctgcatattctgacagatgtcaagattgacgactggcagagcctgtcaccggaggaacttcagagcgcccgggagcacctgatacaggtcgctcttgatgactcatcggcaacgattgacggttatattgacggtcgggccacactgcctcttgaaacagttcctgttgttctgatccgtattgcctgcgttctgacccgctttgcgcttgaagaaggggctgccactgaaaaggccacaaaagatgcggaagcggcaatccggctgctggaaaaagtttctgccggtgatgtcggtctgggtctcagtaaggatgcagagcgtccggccggaggtgatattgccgtcatcaccagtcagggcagtgtctggtcacgggacaaatcaaaggggtttatctga

SEQ ID NO: 281659 - DNA, 543 bp, Morganella morganii
atggctgctatcagtgatatctcagacaaccttatcaccggtattaacggcctgttcggtaacactctgcgccgggttgatacccatcccggccagtggagcgacagcgctgttaagttggttatcaatacattccccgccgtttatgtggcatggatgggcagccgtccgggggaaatccgcaatacagcaatttccacctgggcattgtttgtcagtgctcaggtgctcaatggccgacagaccgataagcccggtatttatcagattgtggagcggctgaccggctggctgaataaccgccgtatagaaccggcgggcatattcaccctgacgcagattgccaacctgtggagtgatatccagagcaatgccggggttgctgtttatggtctgtattttgatgcaccgcagctgctgcctgatgctgttgatgtcagcagcctggacgatttcgcaatccactatcagaaatgggtgcagcctgacggcacgccggaacaggaagcgctcatccgtttaccgatacaggaaaaaccatga

SEQ ID NO: 281660 - DNA, 1854 bp, Morganella morganii
atggccgcagagaacagaacaaaatttattgttgatctggtcgggaacgtcacccagcgtgcccggcagttcggggccagtatccgcagtctcggtactgaaggcagccgctcaatgcggctgttttccggtgcggtaacgggtgccaacagcattctggataagtttgacaataagctggccgggttcgtgaccggcggtggtctggcaatggccacaaagcgggttgccgaacatcagcaggcaatggttgagctggggacacaatacaatctgaccgctgaccagatgaatgcactggacgcacagattacccgggtggccggtaaccggaaattatcgtcttcagagctgatgcaggctgcaaatgcattcctgctgcaaacgaacaattacgatgccactattgcccaactggataacatcgcgctgagcattaccggcatcaaaatggaggctactgctgccggtactgaattaggcgggatgtttaattccggctataactccccggagaaaatgcgtaaatggctcgacggtgcagttacggccacacagttcggtaccggaaatctcaatgaccaactgagtgcattacgcagtatggggaaaaataccccgtggaaaaatcaggaagaccagatgcagatgctggcgctgatgcgtgttgccagtcaggaatttgatgatccttcacaggcatctgctgctgttcagggtttttttgataccgccgggacggcggacggacagaaaaaactgaaggcttacggcaatgtgaatatcaaaggtaaggacgggaagataaaatccccggctgacctgatgacggaaattatcaaagccggatacgggaaagaggataaccttaaacaggtgttttccggtgacacactgaaactgatgatggtgttcgccgaccccaaaaagcaggctcaactccgtgatgccgcaaaccccgccaatatccgtgatggttttcttgatgagaaagccacgcagaacgtgcagaccttcaatggtgccatgacctcactggtgaatgccggggagcgttttgcacagctgaagctggcaaagccggtgcaggatttggcggatgccattaatgacctgtccccggaagaactggataaatacgcagaaaccattgaaaaagcggcctacgcgataggtgcggccgttgccgcccgttatgcatggcgggcgggtaagagtatttataatttcgccaaaggtggcaggggcgccgccggtggccccggagccggtgggcttggtgacggtggcgtgacgtcggtttatgtaaccaactggcctgcaaattttggcgggcgtggctcatctggcggcggtggtggtatgggcggcgggctgggcaagacagccaatatggctatgaatgttccctttgtgggctggcttgcaagtgaagcaacaccatatgttgaaggtgcactggactgggggtttggggaaaatgaacaatacaaaaaaatgcgggacgctaaaacctggggcgaactctatgacgccacaataggtgatgctattaattccgtgtctgactggtcgtcagagcgtgatgacaaactcaaaaatgaaggtgtaaaacgcatttccccgtatctgaccggcgaaaataacaactcgttcggcaactggccgtccgcctatcccggacagcagttggcagcggccgccaaaccggcggagccggtcaaaccgcctgacgggcaaatccgggtgattgtggatgctgctcctgatttggtggtgaaaacaaaatccgtggagtcagagaacgttgatttacgggtcaataccggatacagcggcgggagtacaatgtaa

SEQ ID NO: 281661 - DNA, 309 bp, Morganella morganii
atgtcacgatataaagtattgaagaaatcctttatcaatggccgcctgctttatccgggtgaggaaattgagttcgacggcatggcggggagcaacctactgctgattgaaaccggtgagcgtgtagcggtgaatgaagataccaatgccggtaatgataatcacagtggtgatggcagcgcagataatgaactggccgcgctgcaggatcagtaccagcagctgtttgataagaaacctcatcacaatgccggtgccgaaaaactccgcgcagatattgacgcgaaacgtaaagaacttggggtttaa

SEQ ID NO: 281662 - DNA, 348 bp, Morganella morganii
atgaaaaccgtaaaaacaagtgagctttcaggccgggcgctggattatgcggtagcgctggcaattggtgccgaatttgagatgacgaagtacggcatttgcattgtcagtggcgatggattttttccatctttttactggagaatttgtggtgaattgctggaacactacatgattgatgtttcgttctgtgacgatgaagagcatgagccgtggagtgcaacatcgccattgttgatgggtgaatatttcactggagataacgcgaaaattgcaatctgccgcgcggtggttggaatatcaaaccttggcggcacggtggaaataccagaggagttgctgaaatga

SEQ ID NO: 281663 - DNA, 186 bp, Morganella morganii
atgaaggtctattttaatgatgttgcaacaatgactgttgagccggaaacgccagaagaaaggtccctgttgctgttgtggcataaatttaattgttcatacgacaccccttattcggagcttactggcagtaaggggatggcatcgttggtgatcgcagggataagcgactgcgacgaagagtag

SEQ ID NO: 281664 - DNA, 699 bp, Morganella morganii
atgtcagttaataaagagtatcagattgtgaatctaatgagagtaactctatctattatattttgtctcgtcatcttatttatgataatgaaatttctttgggattctgaatctgattcagttactagattttcagcattcttcactgcaatatcatcgctagggattttagccactataggtgtttatttgtggcaaaaaaacgataacaataaaaagcaaaaggaatttgatgaaaaattaattccgttaatcaaaaaaaagtcacagttaattctttacacaataaaaaaaatagaatcacttatagaaaaagaggggggaaataaaacacttttaataaataaagacacactaatcttaactgaaaatacttatcttatgaaaaaaaatcccttcagtgaatatttaaactccgtgaatttaaacatctacaacgatgatgataatgaaataaacaacaacaaactaaaactgagttctggcttatatcattacataagaagattgaatgatgaattcaattatatagtaaatagcttgaactcatatattgtgaccaatgttaattgcaaatcaggtaataacctgatatcaaatgttctctatagtaatgcagcaacaagaaataaaaataatttactgaatggcatagagatattagaggcgttcatagaggatgaactgaaatccatgtaa

SEQ ID NO: 281665 - DNA, 168 bp, Morganella morganii
gtgaaatttaaagtaggagataaagtgaaaatgaaaccgaatgattttcttgggcatatcgtagtgagatacaacggggaatatttagtaagaaaactgaatggcagtgaaggatggtaccaggaaaacgaactggagctggaggctgacaatgaacaaatatcgtga

SEQ ID NO: 281666 - DNA, 351 bp, Morganella morganii
atgaacaaatatcgtgacaaatcagactttgagattaataaggctgtggctgtcaatattaatggcactgacgctgttgtagagaagttcggtagaatatatatcagtgatagtgatgcgatggtgagcttcgacccctgcaacaacccgtatgacgcgatgccgattattttcgataataatatatcgttaatcttgagtcacaacgaatacccgttagcgacaaataacccatctggattattcagggatgcgctaccaccggaaaatgtagtgacaaataaaaaccctttacgcgccgctatggaattattcctgatgatgaaggatgcggagaatgaaaaagtatga

SEQ ID NO: 281667 - DNA, 192 bp, Morganella morganii
atgcgtatgtccgataaatattccagccctgcggcgtatgcgtggggtgtctttactgctgcttttggtgctctgtctctggatcaatgggctatcgttgccggtatcgtctgcaccatcgggacgttcctggtgaactggtattacaaacggaaagaattccaactgaaagccggagaacatcatgaataa

SEQ ID NO: 281668 - DNA, 930 bp, Morganella morganii
atgggggaggaaattaaaagtgatagagctatatattactctaaagctatatcaatagttgactcaattaacaaaaatactgaaatcgagaatgttttaaatttactcgatagcatttatattgaaacaattgactccctaacattcaaatatcaatcaataaataaaggattagaaaggttacttgaaggagtaaatttagactctgctttttcgctatcagaagaagaaagagaatatttcgaggataaagctaagagtttaaatgcattggctcagttggggatcagcgtcgaaatactctcacacgagcttgaagaaatggactcgatggtaacacgaggactaaattctttgccttcaaccgcgaaggaacaccccggtttcacattggctctgaatgcacatagatcattaacacaacaaatcaggtttttatcacctttgaaaatatctggatatcagtcaaggcagaaaatttcagggaaaaatataatggattatatcctgaaattttttggtgaccgctttgaaagacaacgtatttctattgagtttggtgatgattttaagaacatatctatcaatgatataccttcacgaatatatccaatttttactaatattataaataacgcaatgtattgggtgagtttgtccgataatcgtcttatcaaaatagattttgttaattctttagttataattgcaaatacaggccctgctatagacccagatgatattcctcgtttatttgaattgttttatagcaaaagagctaatggtcatggtgttgggctttatttatgtagggagaatttagctgtagcacaccacaaaatttggtattctgatccaaatgttgaagatgactatttaattaaagatggtgctaatttcgtaattaagttcaatggagtggagtcataa

SEQ ID NO: 281669 - DNA, 1746 bp, Morganella morganii
atggctataacaacttataattcccttgtgcagaaaactttttgtgataatgctattcgttcagtagtaatgatagatgacgattttattacttattctgactctatcaaagcacttaatagcgagataaaactagatccagtaaaaattgattcctcaaagcgtgctgctactctcgaagaatattttcaagccaagaatatgatctgtgatattgacaacggttcagtaaactttgatgttgaccgcatccgtaagtcagatttggttataatggattatcatttagataacaatgcaccggataaaactattacaatattaaaagaattaaaaaattctgatcatttgaatatgattgttatttatacaagagaggagctcaaaactgtttggatgcaaattgcttcttctctaagagggatcgaaaattgtaatgataaaatacttgaaacagaaaacgatgaattaattgaatactggcagagtgttattttacctgatttgatccacaaaggagaaagggcattaacgagggatgaaactgtactatatattcgagatgactgcctatgtaagcgcattaagaaagcaatccgaaatgatggaagctttacagagcaaaatgatattaattttattgctaagatgatttctgaatatgcagtcgccgaaaatgccgttattccagattatgtgacaaaaagtatggttgtaggggatattgccggtattaaatggattcaaagtggtaatatatttatcagtgtgttccataaggatcaagatgatcatgaaagtgatggtgagaggatttggcaaacactaaacgaatcattaattgaatggaaaccatcttactatcaaattatcaagtcggagattcaaaatactattgaagcagaagcactttctttcaataaccatttagctaatgatggttatggtcaagctggatggttgaatcaaattttaaattccgcttctgatgaaatcaaaaggaaaaacattgaatttgtttttagtaatttatctgaagaactttatgaaagattgaagggaaataaatctttaatagaattcattaatgatatttttgaaacatatacaactgattttaaaagtgatggagaagcgaaatcattagagtattgttcaaaacaaatgaatttacctgcaaatgcaagctcatttaatgagatgtatcatgctttaaacatgaatctgtcttctaaaaattttgaagaaggacatatttcaacaggcacaattttcttcgatactgaatctgaaaaatggtatttatgtgtttctgctgcttgcgatcttgtgcctgctcagggtaatgatccacaccataaaagattaagtcctcatcgtttaattaaggtgttagaacttttcaatgctaaccagaataaagcattacctaatgcagaacaatccaagtatatttatgtgattcacaagaatactagaaaatatttatctatatttgaaggcgataaaactttaccagtggttgattatatggttgttttaaatcacgggcatactgttccgggggaagagaaaaatatactttcggcggtattcttgagtagcatggatgacaatgtacaaaatgtacctgttaaactgaaattaaagtcccagcttcgaagtggttatgctgaacgatatcaagctattgcatcacaatatagttctagaattggtgtagattatgtatctatgatgccttaa

SEQ ID NO: 281670 - DNA, 477 bp, Morganella morganii
atgacggatttgtgtcatattcccggcacgatcatagacatagttgcgggtgtaattggcgtaactggctttatcaaacggggaaatatccggcagggaacagcgttgctgtccggcattggccatctcgcgcccggtggcgctgaccagctgatacagggtgtcgtaagtgtatcggttttccggcaccactttctgattatgccagaatcgcgtctcctcggcgctattggtcacacacagcacattgccgaccggatcgtattcataacgcagatcctgaaatatttttttccgtgccggatgttcggttttgacagcaatcaggcgctgggtttgcggttcataagtgtaagtggtcactacaccgttaccgtgctcctcacgaagtttctgcccggcagcggaatacgtcacagatttgataatgattttttccgcgccgcctttcactgtcacccggctggtgctcagtaa

SEQ ID NO: 281671 - DNA, 228 bp, Morganella morganii
atgccgagtatacattgtatgtcaaatggcagcgtgccgaaacctgacacctatacagcggttaatcagatgttcacctttcggttctttgctatcaaacgcatcgatcagaatgcaaaaccagaatgcaaagaggtacaagcgccggatttacggcccgcaaaattacagcttgtccgtgattatattttatcactggcaacacagattccagttaaggcggtgtga

SEQ ID NO: 281672 - DNA, 282 bp, Morganella morganii
atgttttgggtttcggctaatgatgattattctgattttcgtgaagatagtgccaatatcggtctgatgattaagcaaataaccttgattgccagaacactgactgagcaggttaatgatcttgattgcaaagcccgtttagcccccccccccagtgcaatcaaaagcctgataaacagagaaatgaaattattggtgttattagcgatatcaacaacgctgaattatcaatacagcaacttaaaagtgatttatacggaaacgaaccagagaaagaaataa

SEQ ID NO: 281673 - DNA, 312 bp, Morganella morganii
gtggtgtcgctggatttaattgattcattcagttcaccgtattatgaaaataatgaattactccgggctattgtttatcagggaaccaatttagtcagtgtactgaatattgtctctaaaacagagctggtggcgattgcaccgaaatggctgattcagctctattctcatgtgctgccgattcaggaagtgcagctgccgtgggataaagtcagccgtccggcgtttctgatctggcacgaggcgtgtacccgcgataaagggcatcagtggatgaaggcactgctgacgcagttcacacatcatatgtaa

SEQ ID NO: 281674 - DNA, 903 bp, Morganella morganii
atggggaaaggaatcgcctatcaatttaagagagaattccctaataattttaaagtatatcaagatgcgtgtaaggaaggttcatttaaaattggtgatatacttatagtaagtgagaagaaaaaattgattgtaaattttccaactaaggatacatggagaaaaaaatcacagtatgactttatttttcaagggctaaaacgattaaaaacagaaataataagtagaggtattacctccatatcaatcccaccgctcggatgtggcaatggtgggttggaatggtctcgtgttgagtctatgattaaagatgtttttgcagatctttcatctgtagatattgttttatttgcaccgatggttaaagatggtttttcagataaaaaaaatattcttaacgtaaggcatttgctcatcatatatgctgcaaaacatttgcaggataaaaaacggtatagctttaatagtttattttatatgtcacaaaaaatatcagaggttcgtttttttgattttagtatcaagtatggtcgtccattttctagtgatctcgataatgtaactaaagatattaaatccttgaaagaatactatggccatgattttgaagggtttatagataattatattaacacgcatctttccaaagatgttgaagtcaagtttaaaaaaataatacccaccttgaacatgtgtattggtttacttaatgattttcagtctaaagacgaatttagtattttgcctgaattatttgaaatgctatctgataatgatggtgaaataaatgacttatattttgatggtagcttagtcaaaaggaatattttttataaaatggtgagagccggaatcatacagcaagatattttgggtcaatataaaatagttaagccattgtaa

SEQ ID NO: 281675 - DNA, 579 bp, Morganella morganii
atggcatttcaaacaatgattcaaaatcaatcgtttctctatcatctcacatgcattgataatattgatagtattattactaatggtctctgttccagatcattattaggtaatgattttattgatgtggctgatagtgaaattattcaaggacgaggaattcaaacattagagactatggttccttttcatttttttgctaataatcctttcgatggaagagttaaggctgaccatgaagataaggtattttgccttatcgctgttcacagaaaatttgcaagagaaaataattggaagatcattccacagcatccattagcatcaacaggtttaaggttaatggattatgatgcaggttttgcagcaataaactgggagttaatgaataaaagagattataagaatattgagtgtaaatcagtttgtatggcggaatgtttgtctcctgaaacagttgaagcaaaaaattttgcttcgttttatgttaatgatgataaatcaaaaaaacatgttgagggattgctaaaagcatcgaatttgtctaaatttgtaaacattaatccagctatgtgttga

SEQ ID NO: 281676 - DNA, 294 bp, Morganella morganii
atgaccggtaagatgatactccgtccccgagagccggtaagtcagctgcgcagtgatatcctgaaatattattctcaggagcctgaaactgtatttatcggttatagtaaaaacggacggacactgggggtgggctatccggatccggtggtttctgtttatatatcagacggtgtaaatgataagattgatgaagaggttatcagccggacgagcaatgtaaaacagatcgctttattatccgtggtgaccatgttttgcagtaccgcaaacagggtgatttcgcctatgtga

SEQ ID NO: 281677 - DNA, 699 bp, Morganella morganii
  misc_feature (661)..(670): n is a, c, g, or t
atgaaatttttagataacacacctaattatttattttttactggaaaaggtggtgtgggtaaaacctctgtttcctgtgcgacagcaattaagttggctgaaaaagggaaaaaagttttactggtgagcactgatccagcttctaacgttgggcaagtattctctcaatcgataggcaacaatattaagccaataacattggttccaaatctatttgctattgaaatagatcctcaagccgcagccgaagaatatcgaaacaaaattattaatccaatcaaagaaagtttacctgaagcggtaattcaaagtattacggaacagctatcaggtgcctgtaccacagagattgcagcttttgatgaatttaccgggttgttaaccaataccgaaattacagagcaatttgaccatatcatttttgataccgcaccaacggggcataccatccgtttattacaactcccgagtgcatggagtgattttattagtaacaatcctgatggcgcgtcatgtttagggccaatgtctggtcttgataaacaacgtgagcagtacagcatggtggtggaagcgttgagtgataaatcactgacaaggctggtcttggttgcacgacctcagtctgccgcattgagggaagtcgcgagaacctatagcnnnnnnnnnnacatgacgcgccatcaggattgttactaa

SEQ ID NO: 281678 - DNA, 1254 bp, Morganella morganii
atgttacctttggattgtgataactgcccgcttactgtaaaattagttgtaagaacacaattgtttataagagtgaataataaattgaataaaatcaaggccatagatcttttttcaggtgcgggaggcttttcgttagccgctctggatctgggtattgaaattttagctgcaatagaacttgataacgatgcttgtaatacatacagaaaaaatttaattcaaaaaagagaaaatagcataaaattattaaataaagatattatgactatttcacctgatgagttaatgaatagcctacaacttaaagaaaaagagttggatctcatcatcggtgggccaccttgccaaggtttttcatcacacagaataaaaaatgctggtgttaacgatccaaggaatgaattacttattcgctactatgattttgtgaaaatatttcagcctaagatgtttcttgttgaaaatgtaccaggtttactttgggaaaaacataaagattatttaaataattttaaaatgcttgccgctaatagtggatataacatagtagggccattaaagttaaatgcaaaagattatggagtccctcaaaacagaaacagggtattcatcttaggtctcagagatgatatttttctcaacgaaggtgattggccaccttctccaactcatttcaaagataaaaaaccttattgggttaatgcttctgaaatatttgaaaaacctacaccttctattattgaaaaaattactgctgttttagggcaagatgtcgcacagaaattaaaatttaaaaatacgcttaaagaaaataagagtgatccaaataatattcatatgaatcatgctgattatatgattgaaagatttagtttgacaccaattaatggcagtcgggaagatgttgattttagattgccttgtcattcgaatggctatgttggtcataaagatgtttatggccggataaggctatcattacctggcccaacaataacgactggttgttttaatccttcaaagggccgtttcctacatccgtgggataaccatggaattactgtaaggcaggcggctagatttcaaacattcccggatgattacattttttctggaggcatcattagccaagggaaacaggtgggaaatgctgttcctgtaaatctagggaaaattcttctgaaatcttgtgttgaaataataatcaataactttcaaagggatgataaaaatgcagatgagatctcttag

SEQ ID NO: 281679 - DNA, 1968 bp, Morganella morganii
atggttattttttcaaaaagaaaagtggcggtatgtgttatggcagcactcgccgctcaggtgatggctgctcaggctgcaaataaagaagacgtgattgtggttaccaccgcatccggcttccagcagaaaattgaggatgctccggcatcaatttctgttatctctcgtgagcaactggaaaataaggcttatcgtgatgtaactgatgcattaaaagatgttcccggtgtattagttaccggtggcggcagtaaatcagatatcagtatccgcgggatggatgcgaaatacactatgatcttagtcgatggcaaacgggttgatacccggggcacccgtcctaatagtgataactccggtattgaacagggatggttaccgccgctgactgcgattgatcgcattgaagtggtgcgcggaccgatgtcttcactgtatggttcggatgccatgggcggggttatcaatattatcacgagaaaaatccagtcaaaatgggtcggtagtgtcagagctgaaacaactctgacagaacgaaaaaatgaaggtaacagcgtacagagcagtttatatgcagcaggtccgctaattgacggcaagttgggtatgaaagtcaatgcgctttattctcatcgtggtgaagacaaaattattgatggttttaaccgccagattatccgcagtggtggcggtacattgtcgtggacaccggatgaacaaaatactttagattttgatttcaaagttgatcggcaaaaccgtgactatcatcagggcaaatccacagaaggtgaagatggttatagccgttatgaacgtacaaattatgcgttaactcatgatggtgtatatgactgggggaatatcaatacgtttgttcagcgtgatgagtctaaaaacccggggcgtcagatgaaatatacagatactctggtaaaaaatcagacggtatttaattttgatacgcatacattaagtattggcggacaataccgctatgaagatctgaaagatgatagttcaaatcagctggaaggcggtgcgaacgcattaaatcgctacagctgggcattattcatggaagatgactggatgctgaccaatgattttaccctgaccggcggtttacgtatggataaggatgaaaactttggttcccattggacaccgcgtgtttatggtgtatggcatattgatgaaatgtggacattgaaaggcggagtctctgcgggctaccgttctccggatcttcgccaggtatcaccaaactggggacaaattaccggtggtggtggtgaccctgccattatcctcggtaatgccaatctgaaaccggaaaaaagcgttactgaagaaattggtattatctggaataatcaggataacctgaatcttggtttgacggtttataacactgattttaaagataaaatcatggagactcgggcttgtactgatggcgatggcaaaaaagcgcggggcgagtgtgtttaccaggggaaaaaatataaatttatcagtacccgtgaaaacgtagataaagcccggattaccggtgtggaagccacgatgaattgggatattattgataatcttgatttggcagcgaactataccttcacagattctgaacagcgcagcggcgattttaccggtaaaccattaaataaattaccgaaacacatgggtaatgccacgttaacctggaatatagatgctgactgggaaacatggacccgctataacttccgcggtaaaacatctgatttccgtggtcgccgcggcatgagtgacggtacgccatcatacggtttcatggatatcggagccagctataaggcatggaaagatgtgacgatagctgccggggtatacaatatcttcgataaacgtgttgattccgaaaattatggtgcagctcttgaaggccgccgttacaatatcggcctgaattataacttctga

SEQ ID NO: 281680 - DNA, 171 bp, Morganella morganii
atggaagttaatgcaattactattattttgggtatttgtttacttgtagctattgttgctgtacctgtatggaaaataagtattaggtttttttttaaaggtggtgtaaagaataaattgaagaatgtttcaattcatggtgattatactggacgagataaaaaaaattaa

SEQ ID NO: 281681 - DNA, 543 bp, Morganella morganii
atggaaattcttaataaattaaaaaaggtctttatttgtggcgattatgttggaagggataagtatgtttataatactaaccctacccaattgatgctattacaagaagaatatcaagaagaatttaaaaataaacagacatgtacagtcataattgatgaattaaatcactataatacgagaaagagcaaaatacgtgacttagaagataagcttagagttgctgggtattcttcattacttgatgacgcacgagagcttaaggagttagtatcaaaattaatagtacagtatcaatactatcgttcagcacaaaagataattgtttttttgttatcagatattcattcaatttttcaatataaaattaaaccatgtgtggttaaaaaagaacatgagacgaaaatattagaattaatatatttatatatagaatgtgcattaagtgaaaaattaggtataaatgctttagaaatatataataggcatttacgtggtatggttttctttcttacagggaactgtcatctggagtgggaataa

SEQ ID NO: 281682 - DNA, 498 bp, Morganella morganii
atgttattatataataaggcatttgatattaaccatactatactaaggatatgttcatggctattaaatagtaaagattctttaataagttatgaaaaaataaggatatttgattttttgatagctttcccggaatatatatctaaattatctttaggtaaggaattcgttaaagaacgagggaggttcaaagtattctctaattcttataataaatttgatgcgcaatcattatttcatcaaatggaaggggtccagaaatctgctatacactcactacttgcagtatcaattttggtaaaatctaataatggtctttatgaaataaaaaaaaataagttgcttgaagttggttttactgaaatcacagaatttaatagtataaataatgatgtgatcacatttatcagcaaaaatctagatgatttacctattacaggtaaatttggtgttaaggctgtcagtaaattgatgagttttaaatatgattgtatataa

SEQ ID NO: 281683 - DNA, 558 bp, Morganella morganii
atgaccttcgccgaacagatcaccgccttccgtcacttcttttatcagctgttcaaagctgatgcgctgccatttaccttcgccgcgtttaccaacgcgcttcatcggttcgaggatacgcagcgggctgtgcagcccttccatcagtgtcgcaccacgggcacaggcggtggaacgtccttccaggccgctttcgccgcccatgtttttcagggcttccgccagtggcgtgttataggcgatgtggtggtcgtgagagagcggatgatacgggttaccggcaatgcggatcacctgattggtttcgcggtcaacacgggcacggatcccgcactgcgtccagcagccgaagcactgggtcatcgataccgcctgtgcgttttccgcctgccagcctttcagggcattcccttccgggatcagcgagttaccgttaatgcggtgcagagtcactttaccggaagtaccgttcatcagcccgtcgacggcgcgtttcgccacatcgcggtaactgtaaccgaacgctgccagtccgccgatcgccaaacctgcttttaa

SEQ ID NO: 281684 - DNA, 1182 bp, Morganella morganii
atgggatttaaaggacatcagtttcagcggccagctttccgccggatagacacggtcaatatcactgccgtcagacaggcgcggcggataataggccggacacccgctgaaacgctcgccggtgatggcatggcggttctgcgccacttccgcgttccagatctgcagcggctgtttccactgcggcccggttttctccccgtcccagcctttttcatacggcgcaaaacggccgccgcggctgaagagataagccacacggctgatttcctctgctttcagcacctgctgcatgacaggcataatgcgatccaccccggacagacggatatccgcctctttggcttccggccccggtttttcgcccataaaggcggtattggcagccacacgcagatagtaatcctccgccgtgttcagcggataagtgttaccgtcattgtccgcgatagcattatcaccgaatcccggcagattcagggcttttgccaccgcaatacagaaggattccatcgcaaccggctgaccatccgccgtttttgccacacgcggcgcaacaaccggccagcgggcggtggtggctttggtctgtacaccggaccacggcgcactgaatccccagctttcaaagttgtgggtatccggcacaatgtaatcagccagcgcggtggtttcattcataaaggcatcgataccaataatcagcggcagatgcgccgggtctttcagtttctcttccatcacctgacggatccccgcaatgccgtacagcgggttggtcatattggtgatccaggctttcagcttgtgcggatacccttccagtgcggagccgagctgctcggtcagctgaccggctgccagcggataccacggcgctttggccggatacgggttctgaccggcggaaaccttgtttttgtattcatcggatttttcatagaccgacttactgcgcgccaggttcatgcctttcggcttcactttgcccgggaagctgtccattttgtagcacggcccgtcattagcgccgttaaacttgccgccgccgacagacacgccgcctttcaggttcatgttaccgatcagcgcattcagcatgatcaccgcccaggcgttatagaatccgttaccggacatcatcccgccgtgcgaaatgaccgccgcctgacggccgtatga

SEQ ID NO: 281685 - DNA, 495 bp, Morganella morganii
atgcaggttcaagggttgcggggagcgcgcgccccgcaacttaagaacaaaattgcccgcaagctggctgtgattgttcgccagcttatgcagaagttcagtgacccgatgaccgcccgagcactgctccagtcacagcagaactccgacgaggcaccctgcatcaagcgcgacgctgacctgacatttaatttttgtggttaccttgaagcactaccggagtccgaggatatgtatattggcaatgccaacatcattccacgtcaaccgcgtctgtatttatatcatgcccatctggcgtatgtggaagcccacgactacaggaatacccagagcctcaccatattcggtaaggggttgtctgccatgctgaaagagtacgggctaagttatgagaagcgcggaaaaaatcagggcatacaaaccaatctcgcactaaggaaggaaagcaacgctgactggttaccgaaatgcgatgaccccatagcgaaataa

SEQ ID NO: 281686 - DNA, 1686 bp, Morganella morganii
atgagcattattcacgtaaatcaaattggaagtaaaattaatgcgttatttgctgataaaattgatagcagtgatctcaattctacagataaagaaatacaaactaaaatattaacccgttgtctttctgcctacgcagtttattgcattggagatacatcgatagaagaagctgcgtcagcagttgttgatggtgcggaggataatggtattgatgcaattcattattctccttcaagtaaaagaatgatcattgttcaatctaaatggaaaaaagatggaactggagagcctgataacggtgatttaagaaagtttaaagatggtgtattggatctcattaatcttgaacttgataaatttaacaataaagtgaatcttaaaaagcagatgattgaaactgctttaggtgaatttgatacgaagttcgatcttgttttaattcatactggttcaaatactctaagtaaacataaccagcaagtaatggactcaatacttaatgagttaaacgatgctggtgatggtactagtgaagatgttgttagtttccaccatctaaatcaggcgataatacatagtgggctcgcatctggtatggatggtgaaccaatcgatcttgagattggtctctcgcaatggggaaaaattgaagaaccacatcaaggtttcttcgggattgtagccggcgaagaagttgcaaattggtgggtgaaaaaagggaaaagactatttgccaaaaatattagacaaatgttaggtgccactgaagtaaatgatgaagttaagagaacaattgaagaacaacctgaaaatttttggtattacaataacggtgtaacaattgttgctgaatccataaaaaaatcaatggttggtggaaatagtagagatattggttcatttaaagcgaataatattagtattgttaatggtgcacaaactgtaagcgtaattggtaaatatgcgcaggatggaggggcgaaccttaataaattacgtttacctatcaggttaatttcactagaaggagcgcctgaggactttggtgctagtgtgacaaaaactaacaaccgtcaaaataggatcgagagtagagactttgtctctttagatgacgaacaaatacgattgaaaaaagaactgtcactggaaggtattgagtataatatagtcaggagtgagaacgttaaaacttctgcctccataattgatttatctgaggcgaccattgcattggcttgcgcatctacacaagttggactggcagttcaggcgaaaagagaaattggtcgtttttatgacaatcttaagaaagcgccatataaaaccattttcaatccacaaaccaatggtatttacttgcgtaatacagttttcgccttgcggaaaatagatgaaattattggttcaatgattgcaaatctacctaaaaaatcaggtaaggaatatggagttcttgttcatggtaatagaatgttagcatttctaatttttagaacactggtagtccataaaattgcaaataactttgactttgatattaatacaattgactggcaggaaataacagcatgtatgcttgagaagttaatgttagaaattgaagagaactacaaagataaattccttgctactttatttaaaaatgcaagtatttgtaaggctatatctgagagaatttaa

SEQ ID NO: 281687 - DNA, 492 bp, Morganella morganii
atggatcatcagtatgttctgcgtggaaaccgcgtcaatccaatgaatcaatctgaaatatcacgacgagctatcgctttctgtgctgctttcggactaaatggtagaagcaaaagaaagaaaaaaaggggctttgatagagtgtttgaaacacttatcgagtacgggattactctcgactcaattgaagacggagtgtgggaaagattaacctacgacctaactattggtcattttgatcctagtacatttacaataagcgtgccgaatagggtatacgttaatgcctgtaaaggagagcgtgatgccctatttattattatgcacgaattaggtcatttcgtactgggtcatagagctgttctgcataaatcaaacaaacctccaatacaatgcgaggatgctgaatggcaagctgatacttttgccgatattgtactgtctcgtttggggtacgagacaaaacagctaacttttgacttttatatgtaa

SEQ ID NO: 281688 - DNA, 360 bp, Morganella morganii
atggctctcactgaatttggtaaggccgtacgaatagcgagattgaagactgaccaaacattgctttctatggctgaggaacttgaagtttcccctgcttttttgagtggactggaaaatggcaggaagaaagtttctaaaaaatgggtaaaactcattaccagcttttttgacaaaagaggttatgaaatagaaaatctccaagagttagctgatatttctaatgaatttgtcgaattagatggcctgtctatgcagcaaaagatgctagtggctggctttgcaaaatctccattgactccagagcaattgagaaaaatggctgaacttttgaaaaaagttaatgattcagaggaatga

SEQ ID NO: 281689 - DNA, 192 bp, Morganella morganii
atgttcgccacccggctgccattcaaaaacagcgacgagctgatgaagaccatcgacacgatcaataacagcggcatgggccgcgtgtggtttgctggtaaaggcagcgacagcgggtacaagatgaagcgcgaaatgctgccaccggcatacacgacaaattttagtcagttgccggtggtgaaaagttaa

SEQ ID NO: 281690 - DNA, 849 bp, Morganella morganii
atgattcataataatccttcattattagcttcaccactttctcctcgtggagaaaatgttttatataactctgctcctgatgcatatattttcaaggtcaaaaagtggcaccaaagtaattttgattcagtgacaaaagctcttgaagaagcaggaaaacaactgcgtaacactattgctaaaacagatgatgaaaatctagaattaacgtttactcggctttactcaatgataatgggcatatggattgaatcaagaattcatgtgttgctatatgaaaataaagcttttactgaattagaacgagctatcatatacaataagaatagtctggaagataagtggaatacagctttaattattgcagtaaaaaaaagtgtcagactaccattagaagatgaattgacagaggacaattgtgactttagcatatataatatctacaaaaaaatatctggctggatcaataaatatttctctgaaacaattacctaccgaaataaaatagcacatggtcaatggatatatccatttacatctcaaccccataactgggagaattcatctgactttaagattagtagtgaaatatctaaaggtattttaattcgctatgaaaatttcttatctataactgagcgtgggaaattacttaaagcaatatgtgctgcaattaataaccttgcaacgcaacgccgtcgtgattataaagttcaggattttaatgtgcatttccagataatatccagacacatcaataaacttagcaaaataaattatgaagagtacagaaacgatacccgccagagctatcttgctcagcaacaaaaaaatattcataccccatag

SEQ ID NO: 281691 - DNA, 858 bp, Morganella morganii
atgagtagaactaaaaaaagtgtaactgtaagatttttctctatagatgcaagtgatactttttttgataatttctctgctaattttcttgtaagtaatgaattatctgaaagtacaagaattgtaacaataaggaatacaaaaaattttataaaagcaactaataaaacaagtgatcagtactttattgccgtggtccgagagcgaaactcttggcaaacaaaagcaactagagatggtaatatttctggaattgcaattaatcagggaataataggagatccgtattatttttgtgtcgtgcctgacaaaaaggtaattctaggatttaccaccggcccgattggtagcttgaaaacagtagctagtgttgctttagagcagtttaaaacactgagaactgacaaaatcaccttatctctaattcctaaagagaaagaattctctgagtttttagagctttcagagtacaacagccttcattttaagattaactcatcgtcacttgttgatgtatccgatgatgcacctaagttaatcaaaaatcttagttcagctccatatattgagaataatgtacagttatctctagaccttgagtgcagtgatgagccagatggtattgttactaaagaaaatattatagagatcgtaaactatttatcagatagtgaatcctgcactgttttaaaagtaaaaggcaaaaatgagaatggtaaaaatgttaatctagactttggtaatgcttttataaattataggagtgagctcaatacaagaaataagtacattgatgaaagtacagcaatcaaagtactgagctctgcttggaatgaaagcccactacaggctcagtaa

SEQ ID NO: 281692 - DNA, 1515 bp, Morganella morganii
atgaaaggccgaaatattgagattaaaagattcaatactcctgataaagttataatccccaaaggctttactggcacagcattagcggacgttgttttaaggctaggtaagggccaaagcaatattatctatcgaaatcaaactgatcattgtgagaatacagcaaaatcgatagcatcacttattgataactacgaaacaacgctgggattggaagaggccgcagattatatagaacaatttatccataaagattttactcttgcatcaaaccttagaaaaggggtggcattccattacgggcccttaccaagctcagttagagttatggtagaaaatcttgtaaaagcaggagatattaattttattgtttgtactagcaccttagctgaaggtgtaaatttacccgcgaagaatctatttctcacaaaccccttcaggcccgttatggctcaaaaacccgtaaggcttgaggatgtaaagattagtaatataacaggacgagcaggaagaatggttgaacatttttcaggaaatattttcttgataaaccacgataaatggaactatcaagattattttgatgaaagtgaagagaaagaagaaaaaattccaacttattacaagacactaaacgaaagtttgttatctgtaatatctgcattacaaggcaattaccctcactcggattctaaccagtatcgattttatactatcgcaaataaacttattaaagaatttgagaatggtactttgaatgagaggctatcagccacagaattactgttaaatgatactgacaaaaatttattaattagtaatgtggaaaaagcacgtaattctttgattatcgcacctttcattttagaagctaatccaacaattggctatattcaacaaaataatttatcttattttttcagtcaattagaaagttatgataaatgggtattgcctcatcctaagtctaaggatttgtatgaatcattgatcagaatcgctagaaaactatatgaatctggtgtgtacataactagtgatgattactctattgagcacgttgcagtaatagctacaaaatggatctcaggaatgagtctaaaagaaattattgctgaacaaatagcatgggacacagaaaaatatactggttcaaatgttaatcaatcggtaagaaatgttattaaaataataaacaatgacataacattcagattaagaaacgccttaagctgttactatatattgctaactaatactatgaagttaaaaggtgttgataaaacatcagttaaactccacacatatctagagcttggcgcctgtgacgatagaatgattaaccttataaactttgggttgtcgagagaaacagccaaagaaattcaggagtcggtccctaaaggcattgagatcaaatcaatctatgatctggtcactttactgggcaaaggtttgttatcaaatgtccatccagtgacacagaaagaggtaaggtctttactgagcctgtag

SEQ ID NO: 281693 - DNA, 237 bp, Morganella morganii
atgaccgaaataaatgagttaaaaaaagagatcgagagtatgaaatctgagttggccgctcataaaattctcatttcctcactcttagtacatcttccgaagtcaattgatcgcgtcagattcatgtctgcgtgttctaaaatttcccaagctaatggggtggagcaaactgctgatttacttgcaaagctcggttatttcacgaggatattgttcgagcgagaaaagcataaatag

SEQ ID NO: 281694 - DNA, 216 bp, Morganella morganii
atggcagaagcaacggtaacagatgacttacttgatgtgattggggaaaccattaaaacgatgctgtccagcaccaaggaaaataccggggcatgcagagcgtccgacatcaaaaaggttgcctctgtgatttatgagacaaccaaacatttaagcgatgatagcgaagtcgatgatgctatttatgcttttctcgctcgaacaatatcctcgtga

SEQ ID NO: 281695 - DNA, 669 bp, Morganella morganii
atgaataaaaatgaagccattaatgacattgatgatttactggtaaatgcgtttaaccgagacttttggttaaatgtaaaagagcactttgagcaagggtatctggcagcagatgctgtatctaaaggttcttcccttaagttagaaaatccagaacagattcgattcagaccacaggctagacattatggattgaattctgcgttcaggcgtgcagccacatctgcggggttaatatgtcgtgatatgcagactaacccgaaaggtgagggttacgttgtagtggagtctggtggaatccagttgggtcgaattggtcttaatcacgatgaaaaaactatcagaagtgctaaacacagaaatttattagcgcaactaaataaggagttagaaggttatacatttgacttatttgatgtaaaaaatcactcagtacaatcagtggagacactaggcgttttattggtcaatgttaatccgccacaccattatcctcaggatgatatgctggacttaagggttgtagtcccgtatacaacgctgaaaggataccattataataaatcaataaatgaacttcttgaactctacaccggcgagaataagacaattattcctgatttagttttaccgaagcttaaaaagcgcctgaaggatcaggaaaaataa

SEQ ID NO: 281696 - DNA, 1218 bp, Morganella morganii
atgagagtcggcatttcaggttttcagcccgaaaggctaacacagataagagaagctagaggcttatcaaaaatcaatcttggtaggctggtagagcgttctccgtcaactataacaaaatgggaaaatggtaaccattctcctgatgcagaagtattgtatgaattaagcaaaattttaaattgccctgttacttggtttacaaaaccttatgtatctcaggtgtcacaagaagaaaaaaaacctgtttttttcagaacattatctgcgactgcgaaagatttatgcaaagcatctgaaatttatatggaatggtttcaggagttatcatcacatttccaagagtatgtagattacccagatgtaaatgttcctcatttatatgttgatgattatcgagcaatagacaatgaaactataattaaaatggcttatgaatgccgtaagttatgggggttaggtatagctcctatagatgacattttacttgtaatggagaatgcaggtattgtttgtgctcgttttgagcaaggtagctccatgatggatggttattcacaatggaatgaagcggaagaacgtccatatgtgatattagcatcagataaagataattactttagaagtcgttttgatgctgcacatgaattagggcatattgtattacacagatatattaataaattagattcagtgtgctttaaaccaatagaagaacaagctcatacatttgcatcccatttcatttttcccgaggaagcattttctgttgaattaccatcgtatccaacactagaaaattttgttgcattaaaaaatcgatgggggatttctgctcaagctatggttgttagagctaaaaattcagagctgatatctcaggttgaatatcaaaggctgtataaaagtatttctgctagaggctggaagaaaggtgagccattagatgatttaaggaaaccagaaacagtaagactgttatccagatgtctcaatttgttattagattctgggatgtttactaaaaaaggtttacttgaaacgttaaactttccaaaaggtgatattgaagacctttgttcagtacctaaaggttttttatcagaatcatccatacttgactttaaggctaaagttcagcttaaaaatagtttagaacgatctcaggatatcaaaatatctcagcaaaatgtggttagtttatttggaaagaagtag

SEQ ID NO: 281697 - DNA, 636 bp, Morganella morganii
gtggctggtgatgcgtccatcgttgaaaaggtctctgctgtttctaatgaggcatctgtagttattggagaatattggcagtatgccggtgttatagcccagtgcgttagtgcaatagctgttgtcgttggtgcatttattgctatcaggacgacaaccagaacgttgaatgccaatgcccaaacagcattactggctcaacaggctcatgcggatacagctaaaaaaactcaaacttcgatatttttatttgaaagtcgccacgaccaagggtttatagatggcctcaatgtattaagagagaggaatgaatcagggaagtcattcagggcttatatctatccatgcgaaggtcagacagaagaagaaaaagaagcagacaaaattgagaagagaaaaataggttattaccttaatttttttgaaagggtctcagtgtctataaaaaatggcatttatgatgagctaatgctgaagcaggttctatataatacagccataaaaaattatgacgtcgccgagccttttattaaagcattaagagagctgcatggcagtaaaacctattatcaggaatatgagtggttggttgataggtggaagcgagatcctctggaagttaataaaccacactaa

SEQ ID NO: 281698 - DNA, 1470 bp, Morganella morganii
atgctaaagaaattggcagttgggatgctgtttattgcaggaaccgcaaatgctgcaggatttgattgtgccaaggcatatagcaaggtggaaaagttaatttgtgacacaccttcactatcaaaggctgacgatgaactatatgtagactaccttcaggccaaactggtaacaggggatagtgctgaatttaagaagatagttagtcagaactggaagctaagagagaagaattgcgacaccgaacagtgccttcttgattggtacaaaagatcaactgagttatacagggatatagctggaagcaaaaatatctcatctccagcttcaggctgttatgaagagggtcagcaagtgacgctatctggcaccttggagagaacagtgttccccggcccgccaaattatgaaagcgtggaaagcggagataagccggaaacgtattggacacttaacaccaaagatccaattaagtgcgcaaagggaagtgctgattggggtaaaaaagaccagttccagctcattgtttccggtgatttctataaagagaatgagaaataccttggcagcaaggtgtctgtaacgggtaagttggcctactcggaaacagggcatcatcacaccccaataatgattggtgttgaatcaatgacccctataatgaaagataaggtagtgtcatcgccaaaaaaagatagctacggcctgccgattccaagaagcaacgcgtcattcaataacttttctacagttgcttccgaaataacaaacagcaatgagatgtcggcattaattcccagcaagaccaatgatatgaggtctgttagcattgcaggggtcattggccctgttaattcaacggcattgtattacgagtataagaaaaatgagattgttgctaataataaatataaaggtaagaaaataagggtcaccggcatagtagaaagtgttagtgaggattttacgggcggcggaattgtcaaaacaacatcccctgaaatgtttttgggtggaactatgtttaacgttaataaacaggacccttatgtcttaaatctaacccccggcgcaacggttgatatggtttgtattggtggcggattcatcatggatagcccagttttgagaagctgcgtggaatcagaaaagtactcagcggatggctctgacgcgcgagatgagatcgctaaagcaaaaaatgccatcatttacgcgctctacatgtcgtccgaggatatctttgaaaaacaatgcaagacaattgatggatgcttaaaatataaagatgtagcactgtctctcttcgccactgcgcgaaccaaaagtgaagatgacaaaaacaaactgttagttgcaatgaaaggtgcaaatctaaccaaaggcgacatagataggatatttaataatttcgatttgtttatgagaagcaacgaaaagttaatagaaaaaaaattcaacatgcactaa

SEQ ID NO: 281699 - DNA, 2448 bp, Morganella morganii
atggcgacgataattgacgcgctggttgtgacgctgaagcttgataatcgcggattcagcaatgaagtgaaaaaagcgaccgcagagaatgaccggctgtcggcagcaatcgacaatgtcagtgattcgtctgccgacctcactatcaccatcaaaaaccaggctgacgaaaccaaaaaggcagcgaagaagcaggacgacttcacgaagtccatcaacaatggcatcaaagcaattggtgctttattcgtaacaatcatggcatcgtccggcctgtcaaaactcatctctgagatacagaaaagcaatgaccagctttatttcctgagtaaaaacctcggcatgagcgccactgagattaaaaagtggcagaacatggctgaaatgtccggcggctccgctgatggtatggcggcgagcatgtccaacctcagcaaatcgctgtgggatttggtcactatcggggattcctcggtgctgccgtacttcaatgcgctgaatgtcggtttggtggactccggcggtaaactgcgcgacctcgacgctatcctactggatgtggctgacagcctttccggtatgtcccgaccgcaggcgtacaacattgcgaaaaatatgggctttgacgaagggacgattaacaccctgctgcaaggccgtgacgcaatgcaggaaatgctggacacacagcgcggcctggttatctccagcgaggaagaactggaaatcagccgtcagctcaacaaacagaatgcacaggtgcgtcaaggctgggaggggcttaaaactctgctggcaaactacctgatgccgtcactgttgaaattctccgagatggtaaccggagtgctgatgttcctgaacaaaaacagagacacggctgtaacggtatttaaggggattgggattgtacttggtgtcttgcttatcccgatggtgataaaagctgctacggcgtttttaggtatgtttggcgctatagggttggttcctcttgcgctcctggctctcggctctagcctgtggctgctgtatgacgacttcaaaaagtggaagagcggcggagaatcgctgctcggagaatattggaaaaagtgggatgaaaccattactccgatagtgaagatgctggacgatttcaaggattggttcaaagacacaacaatcggcaagtggttcacagatcaggacggcaaccttgaaacatggaaagtggcgctcggtgctttcggcctgtggtttgccggtaagtgggttgtcgggattaccggcggattgctgaaaataggtgccgggtttgctgcaatgtttgggtggccggggctattggtggccggactggtgacagccctcggcatctggcaaatgaagcttaacgagctggatttatccccattaatgacggctgcggcagaggcaaagattaaattcgatgacctcaccaagagcatcaatatgttccgcgatgccaaaaacggaattgataaagttcaggccggtatccgtgctggcagtgagatcatcccgggcggcaacatttttaaggcaggcattgataataagattgttgataaggtaatcgacaaggtcaggaaagacggatttctgaagtcagtgaatgacgctgcggttggtgcttattcttacctcgcaagcgccaaatctggtgacacttcggggtttactgcgtcaggtgttgaggttcctcattggaataaaagggtttttaaaacacaagatggagatgtaaaaagagaaggtggttccagatcatggagaaataacaatccaggtaatgttgaatatggtgattttgccaagaaatttggcgcgataggaaccgatggccgattcgctatattcccgactgaagaggcaggaaggaaagcgaaagagtatcttatattcgagagcaacggaggtcgccagctatcaaccaaaggtgattatggcgcaggacttgggtataaggacaagacactctctcaaatgctaactgcatatgccccgaaagaagaaaacatcacgaatggttatatcaaaagtgttctttctgctgttggtgttgaaaaaagaatgggggactacacttcggaagaaagagctgtgatcctggaggctatgaagaaagtggagggatgggatgctggtgatgaaactcgcgttggacagcctaagattgatgcggggagattgctggctaatttaacgtcatttaatcagcaaatatctcaacctctgacaccaaatgctatgcctggaattcaacagacgatggctaactcccaagcccttcaatcaagttctaaatctgtgacatacaacattgattccaaagttgaaaatctaaatgtgaatacctcatcatcaacaataagtggagctgttagcgacggcagtaatgcttggagagaaaatctgtttcagacgatcacaccaatgagctaa

SEQ ID NO: 281700 - DNA, 432 bp, Morganella morganii
atggctaaaagcaagcttgaggaaacgcttgagaagtacatgtcagacactgccgtaacgctgcgcgccggtattcttgaggaagcaaagtatccagatggtactcaggttgctcaggttggttacatccaggaatacggagcgccggaggcaaaaataccacctcgtccatttttcagggcggtcataaatgaaggaaagcaggcgtggcctgcaattctcgcatctggtgttgaacattatcagggggacgttaaatcagcgcttgccttgctgggtgagcaaattgttggcgagctttctcagtcggttcgtgactggaattctccgccaaacgcacctgcgactatcgccaagaaaggcttcaacaagccactgattgataccggtcagatggctaattcattcagctatgaggtgacagatgattaa

SEQ ID NO: 281701 - DNA, 1191 bp, Morganella morganii
atgacgatgacagatcgcctcgctttcgacaggtcaatgcggagtaaagacggtaacggccacttaattgtggagcgcactgttttatccaaagcagcagtaaacccgtatcggggcaaagaaattccgggctttgaaagtctcgggcttgatcctgaaaaggtgtattacctgttgcgtgaccctgccgagttagagcgagcagcaaaaactttcagtaaaaagcagttactcatccggcacgttcccgtcgattcagacgaaccgcaaaaagaagacactatcggcaccatcggctcagatatcacatttgagagcgggatgctgtacggcgacctgtgtgtatgggacgggtatgcaattgacctgatagaaagcgaaaagatgaaagagctttccgctggctatgggtatacgcccgatatgacccccggggaatatgaagggcaacactatgacggagttatgcggaatattttcggtaaccacgtcgcattagtcgagcgcggcagaatcgggcgagacgcaatcatttcagaccatcagacagtcgatttggagacagagatgaaattaaagaaaggcgcgcttcccgaagtggctgcgcagattaaaaaggcgctggggatggatgctgatattcctgaaagccagctccacgcaattttcactgctgtaaaactcggcatggacgtgtcaccggaagatctggttggcgctaaggacgaagatgacggcaaaaaagcggatgcggaacgcaagaagcttgaagaaacagaccgtgatgatcgtgacgcaaaagctgaagatgacgacgacaaaaaatctgaggacgaggacgataaaaaggccgaagacgaagatgataaagacaccaaaaaagccatggatgccgcactgtcagcaaccaaaaacgacaccattaagcagatgactgccatgttcagcgctgtgcgtgacgtagagccgctggttggagttatcgcaatggatggcttcaccagtgctgatgacgtttataaatacgcgctgaaacagaaaggcatcgcgtgtgacggtgtgaccggtgtcggacttgcctcaatggtgaagatggcaaaagacacagcatccaccgcaaaaccaaaggtagccatggacgcagacgcatttgcggatgagccgctggtttcccgcttcaaacaggcttaa

SEQ ID NO: 281702 - DNA, 1350 bp, Morganella morganii
atggctaatccctactttaaaccatttgcagcgagcgccccttataaggttgcttacggcggacgtggaagcggaaagtcgtatttcttcgctgagctggcaatcgaagtatcacgcagaataaaaacagtaattctgtgcactcgtgagtttcagggctcgattagtgattcggttcataaactgctctgcgaaaccatagaccggcttggctatggcagagagttcgagattcaaaaaaacaccattatccatctggctactggggcatcattcgtttttgccgggataaaaaataacgtcaccaaaattaaatccattcagggtgtcggtatctgctggattgaagaagctgaggccgtagtaaaggactcgtgggaagttttgctgccatccatacgtggcgataaaaatgccgaaatatgggttagcttcaacccgaaaaacattctcgatgacacctatcagagatttgttgtcaatcctccagagggcgcgatagtcctcaaggcaaactacgacgttaacccgcatttctatgacactccgcttcctaagcagatggaggaatgcagagagcgcgaccctgatttgtaccgccacatctggctgggtgagccggtagcagattctgcactggcaatcattaaaccggcatggattgaggctgctgtcgatgctcacatcaagcttggctttgagccgagaggtaagcgcattgtcggattcgacgttgctgatgatggtgaagatgctaacgccacgatactgcgtcatggctcggtggctatcgaggtcaatgaatggcgcggacaggatgttatttacagcgcggatcacgtttatgattacggccttaaaaataacgtggactccgttatctatgactcaataggtatgggggctggtgttaaagcgcagttcaaccgcaaagataaccgcatccgtacagtgggatttaatgccggcgcatcggttgaaaacccgaacagtgattacgttcagggcaagaccaataaagacatgttctccaacctgaaagcccagcaatggcagatggttgccgatcggttttacaacacctggcgggcggtaactcacggagacaaatatccggaagatcaactcatcagcatacctggtgatatgaaggatatcgagtatctcaaagccgaattgtcacgccctcaagtcgattacgacaacaacgggcgcgtgaaggttgagagtaaaaaggacatgaaaaaacgcggcatcccgagcccgaacaaggctgatgctttcataatggctttcgcgaatgttcgcggaggactgcaaatcaaccccgcagcacttgcaggtatctga

SEQ ID NO: 281703 - DNA, 525 bp, Morganella morganii
atggcactcacagataaacaggaaatgttttgtcgtgagtacctcgtagatttgaacgctacacaagcggctattcgtgcggggtacagcgataaaaccgcacgttcccaagctaaccgcatgttgacaaatgttgacattgaaaaacgaattcaggaattgatgaatgcccgcagtgagcgattagagataacggctgattatgttcttaatcgacttgtcgaaatagaccaaatggatgtactggatatcctccacgatgacggaggtattaagcctatccacgaatggcctaaagtttggcgcacatcattaagcggcatggacttagcggaaatgtttgagtctaaagatggtgagcgtgatttggtcggcattatgaagaaaataaaatggcctgacaaagtgaaaaaccttgagctattaggtaagcataaaaacgttagtgcctttgtggataaagtcgacctcaccgctgatgtcaaagttgagaatcgctctatcaaggatatcttcgatggctaa

SEQ ID NO: 281704 - DNA, 264 bp, Morganella morganii
atgacatcaagtaaatggtatcaccgcttgatatatcagcaggcgaaaagcgaggtagatatgcaggcaaacagaaaacctcacctgaaacttacatggcggggatggcaggcgcgactggaaagtcataacggagctgcaatatccataggggtaacaccacaagacgcccttcatgagttaagtgagtttaccggaatatcatttggtaaaccggctgtggctccttactttcgcactcacatagtaataaccccagactaa

SEQ ID NO: 281705 - DNA, 534 bp, Morganella morganii
atgactaaattaactgcacatcctgaactggatttccgggcaatgatttcagctaaaaatggggagccggtgacggatacatttaaaatagccgaagtatttaatcgccggcatgctgatattttaagagcacttgaaagatgccattgttctgatgaattccggagagcgcattttttcgtttccgagaaaatcaatgagttaggtatttttgataaaaaacagaaatattacatcatggattttagcggttttgtcatgctggttatggggtttagtggcgcagcggcagggcagataaaagaagcgtatatcaatgcatttaactggatgaaagataagctcagtgaaatgaatcgttcgcttgaggctgaaagtaacgcagtgatgcttgagtacatgaaagaaaaggatgtggccagcatgtcaggccgattacttaaccggtggggcagagtgaagaaaccatatcttttggcaaagatagatgatctgaaacaagagaggcagttactgctgccaagtgttgaatag

SEQ ID NO: 281706 - DNA, 192 bp, Morganella morganii
atgcaaccacatcaacagcgagtagtggatgaaaaagcagagcttgatgacaaaatttcaaagctcaccacatttactggtggggatatttttaaatccatccatcaggaagaccaggatttattaatcgaccagttgtcattaatggcgaaatattctcaggtactggaaaagcgaatctcccgcttctga

SEQ ID NO: 281707 - DNA, 225 bp, Morganella morganii
atggcgatattcaaccgtctgacaaaagaacagataaaacaggattatgaccactacggcctgtttatggggattgtgccaatttatgttggtgaccctaagggggagtgtcgtgtagctgtccgaaactggtggcctgactggctgcttgatttggcggatgccatacacagcctgaccccatatgactattgggcgataaagctcacaggtcagataaagtag

SEQ ID NO: 281708 - DNA, 450 bp, Morganella morganii
atggactggctgacaaaagctctggtcggtatctgcgtggtgctggtcatcggcctgctgcttatcctgcatctgtatggtgggctgaaggataattatcagctgctgtcctctcagtttgctgagcaggtcgccatcaacaaagactacaaatcccgcattcagtcgcttcacgaactcgacaccatgtacgcgcaggagttaaccaatgcaaaaactgaaattgatagcctgcgtgatgctgttaagtctggcgctaagcgcgtgtacatcaaagccgagtgtccagaggccggagccgataccaccgaaagcggacgcgatgaagccgccccacgacttagtgaagcaactgaacaggattattggcgtctcagagaaatgatggctgagaacgaaaagcagactctgtatctgcaggactacatcagaacggagtgtttacgataa

SEQ ID NO: 281709 - DNA, 249 bp, Morganella morganii
atgctgaaagagcctgcatatggctgcattgtcacattctcccgtaccggcggtggtcatgttggcttcgtggtaggtaagacagaatcaggtcagctgatggtgctgggcggcaatcagtcagatgcggtaaatatcaaagcattcggtaccgaccgtgttaccggttatcgctggccgtcaggcgtgccggtagataatcgtccgctgccggttggcaatgctgcgttgtcagtgaaagagtcgtga

SEQ ID NO: 281710 - DNA, 471 bp, Morganella morganii
atgaaaccaatactcgatatgtgctgcggcagccggatgtttatgcacgataagcaagatccgcgtgtgttgttcagtgatatcagaaatgaagaacataccctgtgtgatggccgtctgctggaaattacaccggatatcattgctgactttaaaaatctgccgttcccggatgaaacattttaccaggtactgtttgacccgccccacctcgttcgggtcggaaaaaatagctggatgtttaaaaaatacggttcacttgataagcactcatggcgttctgacttggccgctggtttcaaagaagcatttagggtgttgcggccacacggcagtttaatttttaagtggaatgaaacgcagatatgggcgagtcagattcttgagctgactgaatataaacctaccattgtgcagcgtgtcaggaagaacgataaaacacactggatggtattttataaggaaggatga

SEQ ID NO: 281711 - DNA, 261 bp, Morganella morganii
atgaaaactgaatatatctatatctgtgctcaggcgtactgcaatgaccaaggtagtggcatcgaatattacactgaccatgagcgttttgataatcgaaatgatgccattaaaaatggatggaaacagcgggaatcagatgatttcaacatcggcgttttgattaatggacgactcgtttcggtcgactggatagctaaaccaattgataccgaaccagaaacattacggaaaatcgaagatcaactgggcctgtgttaa

SEQ ID NO: 281712 - DNA, 528 bp, Morganella morganii
atgtcatatatagcaaccagtaccggaaaacatattgattttaccaatatcactccggatcagatttgtatcgaagatattgctcgcggcctgtctaatgaatgccgctttgccgggcaactggaaagtttctattccgtggcccagcattctgtatatgtcagccagattgtgccgccggagtgcgcactggaagcgctgctgcacgatgccgctgaggcgtatatcaaagatatcccctcgccgctgaaagccatgctgccggactacaaggccgtagaaaaacgcatagaagcggttattcgtgagaagttcggcctgccaccggtaatgactgtcgatgttcactatgccgatctggtcatgctggcgaccgaaaagcgggactttgaaatagaccccgtcagccactggccgatgctggattcagcaccaccgcatgatgacatcattatccagccactgacaccaccgcaggcatatcaccagtttatggcgcggtttaatgctctcatgttcggggcgtaa

SEQ ID NO: 281713 - DNA, 360 bp, Morganella morganii
atgaacaaatatcgtgacaaatcagactttgatattaataaggctgtggcagcttccctcggatgcaccgctgaatatgaaaacgaatcagttacagttttcagaaataataacggcgggatgcctctggttgtttcggccactgctgatagtcctgataacttcgacccctgcaataacccggatgacgcattccccctaattatcgatgtgaaattatcaattcatcctgatttttataacgactgtgagtcatggattgtcagaactgtgcatattcctcctgtaaaagataaaagtctgacaagggctatttgcattgcttatttaatgatgaaggatgcggagaatgaaaaatga

SEQ ID NO: 281714 - DNA, 267 bp, Morganella morganii
atgaatattaaattaggccaatacgttattacatcagacccacaccagttaatcctcagtgaaattaaaatagccaaagaaggaaagaacgccggacaggaagttacggcgaccattggctattacccaaaattggagcagttgattaaaaagataatcaccattgaagtgcgcaaggatgatattcagtcgcttcaggacatggctgataaaatcgacgaactgagcgtcaccctatcccgtcaaatccgggaagcacaaatctga

SEQ ID NO: 281715 - DNA, 351 bp, Morganella morganii
atgaaaacctcaacactgattgctaagctacaacaaattgataaaacagttcctttcgatgcagatgtagttaccggtgatgactggcaatttttagatatagcaagggtttatcacaatcccccacataccttcattgaatttaaggatatagaggatctcgggaacgacgataatgataccgatgaagctaaaagaaatgaggcatatgatgaaatttcagcccgcgcaggtatgcttgagcaagttataggtatgattaaacaaaatcctgatgcgcctcgccagcaaattctctcggaactagaattatttctaagtaaattaaacgaaatgatgaaagcactataa

SEQ ID NO: 281716 - DNA, 780 bp, Morganella morganii
atggaaaaagaaacaatggcaatattggaatccatccctaaagaagtttggcttcagttgtatagtgattcttctcaaccaatgctgagacagtttggtcgacttggcgaagatcttgccaaaacactcaggcttgttaccttccctatccagtgtacagcgtatatacaggacagggtcgatagagggttttccaaagcgttaaatcaagtgcccaaagaaagacaggtagcccctcccgaggggttggttttggatattgcagataaacttaaacatcatgattgcgaatctttagttggaaaactttacgttgaattattagctgcttcaatggacacagacagagcacatcaagcacacccagcatttttaccaataatagggcagttatcctctgatgaagcgctcttcttgctacgtttgtcagaaaaaacaccttcaatttatatcaaagataaaaagaattgggatgtggtaaatcaagaaaaaagggaagcctttttgagtaacgttacataccccataaatgatatagaaaccaaactattagacttagcacttaaaccagaagaattttattatcctgataatttttatatatatattgagcatcttaatgagttgggacttctggagtatagtaacgactattcaaatgaaaactgggatatctggaaagggattactgctggccagtataatatgtggtttattgaactaacaaaatttggacatctgttcttcgagtgctgcaatgccgccttagataatgcttaa

SEQ ID NO: 281717 - DNA, 306 bp, Morganella morganii
atgccctataaagaccccggaaactacaactggcttgtgggaatgctcattagcatcatgactcttctcggcactgccgcaagctgcgcctacaaggtgcttaacggagaaaaaataagctggggatttttctttcttcaggtgattgtctccatctttgccggtgcgatggtgtatctggcctccagttattaccagtgggtgccggagctggcaggcggcattgccggtcttgctggctggtctggcgctgaactgattaaaacccttgagaagcgacttttacggaaggtgagtgatgactga

SEQ ID NO: 281718 - DNA, 378 bp, Morganella morganii
atggactggctgacaaaagtgctggccggtatctgtgtggtgctggtcatcggcctgctgcttatcctgcacctgtatggtggactgaaagataatcaccaggcactgaaagataagcactctgcattgacggcggtaaataacatcaccctatctgctgtcgctatcaatcagcgtgtggctctcgacaacatcaaggccaaagagacagaggacacggagaatgtcaaaattaaaaccgttatcagaacggagtttaaagacagtgagtgcgctgttactcctgtttcccctagtattgttgggaagttgcagcaatacgaaagagacattcgttcccgcgccggtggtgccgattccgccacaactgaccgctga

SEQ ID NO: 281719 - DNA, 225 bp, Morganella morganii
atggcgatattcaaccggctgacaaaagaacagataaaacaggattacgaccactacggtttatttatgggggttgtgccaatttatgttggtgaccataagggcgagtgtcgtgtcgctgtgcgtaactggtggcctgactggctgcttgatttggcggatgccatacacagcctgaccccatatgactattgggcgataaagctcacaggtcagattaaataa

SEQ ID NO: 281720 - DNA, 186 bp, Morganella morganii
atgtttaaacatgaattaggtcaggttgtgcaggtcaccatcagcggcgaagaaggtcatgtgaaagcccgtgctgaatatcataacagtccgaatcagtatctcattcattatctggcagcggatggccgtggaactgatggctggtttgaggaaggtgagttgtccccggcagaacaacaataa

SEQ ID NO: 281721 - DNA, 552 bp, Morganella morganii
atgaaagtgacagtagagcataacggcaaaaccatttggtgtcgtgacagtgagagttgcactggtatgacatcacgcggatatctgacagacggtacacagcaaaaaattgttaccgccctgattgacgcactgacgcaggctaacggtgaaatgtcattgtcctgtccggtgggtgaggtttgtctgacattttcagatgaacaactgaaagggcttgcagaagagctgaagacgcatcgggtgcctgcgtcaccactgcacatctatccggatatcactatagatatccccaaaattaaggtagatggaagcctcgccccttcagataaaatcaatgataacagcattgaacgcctgagactattacagggacaaatcgaagcgtcgctggaatacatcaactccggtaagtgtaatgaccctgagaaggtggcaaccgcagacttggaatcactgctcagttatcaccaaagcaagttggattacgaacagggaaataaagaaaatcatccggttcgtcaatggggtaagtggcagcgtcacccatag

SEQ ID NO: 281722 - DNA, 855 bp, Morganella morganii
gtgaatttaccccacctggcacagaagttgtttaacacgcctcttgccatacacccgcagaaagcggaagtgattgtgtcatcactgacagaacggctcggtatcacgcaggtccgcagcaccatgatggaagacgatgacggatatttcagccgtaaagcacggaaagacagcgggtatgacgtgctggaaggtatcgcggttatcccggtctacggcacgctggttcagaaactcggcacactgcggccgtacagcggcatgaccggctatgacggtatccgccgggtatttctgaccgctgttaacgatccggaagtgaagggcatctgccttgatatcgattctcccggcggtgaagtggccggttgttttgacctggtcgatctgatttataccgaacgcggcaaaaaacccattcacgccattctgtccgaaaatgccttttccgctgcctacgcgattgccagcgctgcggacaaaatttttgtcccgcgcaccggcggtgtcggttcggtcggggtgattgtcattcactgtgactggtcacagcgtatcaaggatgacgggctgaaagtgtccattatcacctacgggaaccgtaaagcggaaagtaacccgtatgtggcgctgagtgacgaggcgaaagcggccattcagcatgatgtcgatgaaatggggcgtctgtttgtgagcactgtttcccgtaaccgcggactgtctgagacagtgatccgcaatacacaggccgcctgttatctggcagccgagggcgtacagatgggtctggctgatgtggttgccagtcctgatgtcgcatttcaggaactgatgaaagaatccggagtaatttaa

SEQ ID NO: 281723 - DNA, 612 bp, Morganella morganii
atggcagacaataagtttacctttgcacatctgatcggcctgggtaaaaaagccagagcctcggaagaggatgaagataaaaaagtccgcaaagccaaaggccgcaaagcggaagaggacgagcgcgacgaagatgcggaagacgatgaagatcgtgaggatgcagaagagcaggacgacgaaaagcagggacgcaaagctaagaaagccaaaaaagccgaaggcgacgacgatgatccggacgccgaagatgatgaagacgcagaaggtgatgacgaagacgacgatgaaaataaagatgtgaaaaaaggccgccgcgctgaacgcaaacgctgtgcccgcatctttggcagcaaggctgccgctggtcgtccggatatggccgcacatctggcattcaatacccgcatgtcttcatccgaagcgatcagcaccctgaaagcaatgggtgcggtacagcccgcaacacagcgcccatcgctcgacagccgcatgcgggcagagcagcaggtacgcatcagtccggatgctcaggcaccggcagcgggtaccgccgccgcgctggttcatcagatgaccagtctttataacagcaacaagggagcgaaataa

SEQ ID NO: 281724 - DNA, 1047 bp, Morganella morganii
atgaatattttcgataccaatgtattaatccaggttgttccgaatctgatgaccagtcagaactggctgttggataagtttttcccgaatatcgtggaatccgatactgaagaagtttccattgatgttgacgtcggtctgcgccgtctggctccgttcgtttcgccgctggtggaaggtaagctggtggaagcgcgtaagttccagaccaacagctttaaaccggcgtacatcaaagacaaacgtgcaccggatctgcgcaaacccatccgccgtcagattggtgagcgcatcggcggtcagtattctgccgctgaacgtgaaatgctgaacctgcagttcgagctgactgaccagattgacatgatcaaccgccgtctggaatggatggcggccagcgcactccagaccggtacggtgacagtaaccggtgaaggttatgaaactcaggttgtggatttcgggcgttcgtccgatctgactattgccctgagcggtgccgataaatggccggaaaccgtggaagcaggaaaaaccaacatcaaaccgactgatgacatcgaagactgggcgcagcgcatgctgaaggagtccggtgcggtggcgacagatatcgtcttcaccaccaaatcgtggaaagctttccgtctggacacatcggttaaggatagcgccattaccttccctgcgctttctccgttcggtaaccagattaaccccggtacgcaaatcaaaacaggtgctgtatacaaaggccgctggggcaattatgacctgtgggtatacaacgactggtttattgatccgctggacggtaaagaaaaaccgatgattgctgacggctcggtgattatgtcaggcgctgacctgatggggacccgtgcatttggtgccattatcgacccggcattcaattatggcccgatggcatatgcgccgaagtcctggctgcagcacgatccggcgcagcgttttattatggttcagtctgcaccgctggtcattccgagccgtgttaacgcatcactgtgtgccgttgtggtttaa

SEQ ID NO: 281725 - DNA, 372 bp, Morganella morganii
atggcgaataaaaaaaatacgccggagaaaccacaggagccgggcggcctgccgcccgagctgatggttcccggtcaggttaatccggtgaaggatccggagactgccggtagtgaaccggtaaccgaaaccgtatcagcgcagaatttcactccggaacctgacccggaagccgatggtgtgtatgtggtggtcaaaggccgcagtgtgcagcatgacggtgagttttaccgggaaaaccaacaaatcacgctggatgattctgatgcagcccgcctgattgatctgggcgtggtgatgtctctggaggcagtgcgggaaaaactggcgaaagccaacccgcccggcactgtaaccatcaatgggcgttga

SEQ ID NO: 281726 - DNA, 558 bp, Morganella morganii
atgaacgcagctaaagtccgcgaactggttgtggcgtcactgaaggggaaaaccaacgcagaggaccgtgtgtactccccgcgcgactggcccacaaccggcgcagagtatccgtgcatcatcgtgcagaccccgtttgatgaaaaacactccctcggtcgtaacgtgccgcagttcaacaccgtaactaccgtgcttatcaccggacgactggaagagttcgacagtgagggcagtgaaaccgctgatggggccatcagagcagaactggcgctggaagcactacgggagcagatttaccgggcggtcatcaacagttatgacctgacccggcagatccagcaatttcttgagatcaaatcaacgatagtcatcaactcagaaggtgaggggcatatcggtgagttactggtagagctgaaaatcgaatattaccaggggccggaggagttttacccggttgacgcggatccgcttaccggtatcgatatcagtgttcagatgcctgacggcagtccggaacatcgcgtctccatcgacctgactaatcaggagtaa

SEQ ID NO: 281727 - DNA, 894 bp, Morganella morganii
atggtaagttcgctacaaactcaattacaaaatgcgcaccaaattaaagctgttcttaaacaggtacataccacattcaagttacttgatggaagaagtgtcgaaactcttcttgtctatttgccttgctttgaggactcgaaaacatcgcatgatgctctcttcaaatgcataaaagaaagcattctacagaattttgtcttctcgtataaggaaattcaaaaaaaactaggtggaaccacccatactgcaatggaagacttgttcaagaaagctattaaaaaaattagtgcacatacagcaaaaggtgaacttggtgaactcattctatttactttgctagatgtctatattcaagcacctaaactactaagtaaaatatctatgaaaacaaatcccagaatgcctgtttttggagcagatgcagttcatgggcaattttttggagagaaatttagagtatacttgggagaatcaaagctccacaaaaatttcaaatcagcagctacagatgctactaactctatttttaatgcaaaaaataaatttgaagatgagttttggttgttggatagttatcttgactttcctaatttgacacctgaacttgaagagaaaattctaaaatctttgaatccttatagtaactgcttatcagataaaatccattcgccttgttttatcggattcacacagccagatattatttttgaggatgaaaagtcattttttcaacattatataaaactttctcataattatattgaagattttttcagtaaagctgaaaagcaaactttagatattaatgaaattacattactgatgttaccatttggatgtgttgatgaattagttgatgaattcatcacatatatgggaataacaaaatga

SEQ ID NO: 281728 - DNA, 624 bp, Morganella morganii
atgaataactggccggaaaccgtgagcaggcaatacagcggtgctgaacggatcatgagcatccttgatacgttcaatcaggccgtcagtattgatgattttactgaccaatttatcacagatgtatgggatgtcctgacggcaaaaagctacgggcttgatgtatgggggaagattgtcgggataggcagaaacattattgcccccatagagtctaattcattcggatttgcggacggatttacccccttcaatgacgctccgttctttgccggtattcaggaaacaaccaatgttcgccttggcgatgatgcataccgaactcttattttatgcaaagcattcagcaatatcagcatagctaccattccggaatttaatcggtttctgactatgttgttcaaggggcgaggagtggcattctgcagtaattacaaagaaatgacgatgggaattatatgcgcgtttgagctgcagccttatgaggcggcgatactacagaactatgatgtcatgcctgttccgagcggagtgagaatagaaatgcatgagctggtgccgccgtattttggttttgctgaagatgcctacccgtttaatgacggtactttttataaagggtga

SEQ ID NO: 281729 - DNA, 1221 bp, Morganella morganii
gtgacagtgaaaacaacagcggtcccgccggtcgtcatatcagattccgggattaatattccagataccgcagatgtcctgtccggcaggctgacggatatcattaatgccctgcccggtggggccagtgagtctctgacatctccgcaggggcaaatcgcaattactgatactgcaatcatagcgcaagtttacagcgatctggcccgtatcgttaaccaggtaaatccagattttgcacagggccggtttcaggacggtatagggagaatttatttcatagaccgcattgcggccacaaggacgacagttacagccctggtcaccggcgtgtacgggacaacactcccggcaggctctcaggcggtagatgtcaacaacatgatttacagtctggttaattcagtaaccattcctgcttccggaagaatagacgctgttttcgcctgcgataccaccggtgcaataacctgtggtgctggggagttaaaccgcatctacactgctgtttcaggttgggattcggttaataaccagtacgccggtgttttaggtgcacctgtcgaatcgcgggtctcgtttgaggcgagacgcagggaatcggttgccagaaactcaagaaaccaggatggctccacccgggcagctttactggaggtgaatggcgttacggatgcgtatgtctggtcaaacaggaaaggtgagtctgtcgtagttgatggggtcaccatagcctctcactctctttatgtcagcgtttacggaggagaggataaagacattgccgaagccttgttcaacacctgcaatcctggctgcaacatgaacggggagaaagaatttactgtttatgatgaaacctatgataaaccgcagcctcagtatgtcatgcaatggcatcaggccgttccggcaaaggtatattttaaagtcgaaatagataagtcgctgaatccgccaagcgatatcaccgagcaggtgaagcgcgtaatcactactgtttttttcggtcaatatcccaacatcagcaaggccaggattggcggcgatgttacagccggtcgttattatgccccggtcatcggaattcagcctgacagcgtgagcatattgtccctcggggtttcattagatggctcctcattttctccgtcagtacatatcccagtcagctcggtaccggttattgatgactccactatagaggtgacgcttgtatga

SEQ ID NO: 281730 - DNA, 357 bp, Morganella morganii
atgacatacgcaacgatcgctcttgatgaaaattgggactggaccattgataaaaacgggaatatagccacaaaaaccggcggagaggccgtagcgcaggatgtagccagcgcatgcgccacttttctcggggaagtgtattacaacgataaactcggaataccctatcagacagagatactcggtaaagctttctcatcggcatatctttctggaaagctggaggccgaggccagaagaatcgaacccgtgacggacgcagtagcgtccgttttctttgatagtgtcacaagaagggtttcggcaaaaataatgacgcaaaccggtgatggtgaaactcaggagattttattgtga

SEQ ID NO: 281731 - DNA, 705 bp, Morganella morganii
atgaacccagtatcttcaatagctgcattagggtctgatgccgacagcctgctttacaaccttgaatcattcctcagcggtaagcactttattgaaatcgtcatgataacggcagtgtacggcgaagcgccaaaccttaaagttgactttcttccgcttgttaccaggacaacaaataccggcgcaccaatccctaacgctcaggtttatggagccagtgtatggcgacttcagcgcggaagctcagcgattattatggatccggtggtcggtgatattggtatagctctttattgcgacaaagacagcgacaacgccaggcgtgaccgaatatcgggagcgcctaacacaacccgctgccacagccggattgatgcgctgtatcttggaggattgcttaatcagcagccggatcagtttattgaatttgcggatagcgctatcaatatcaccagcccgaatcctgttaatgtgacctgctcaaaggcgaccattatcgcaccggatggcgtgacagtggactctcctgactctcacttcaccgggaatataacggccgacggaaatatcactgataacgcagggtcgcaaagttccagcgtcaaggccctgcgtgatgcgtacaacaaacacaagcacccggtgaccggcgtagagtcgggagaaagtaccgtgaccagcaacgcaccggaggagaaggtatga

SEQ ID NO: 281732 - DNA, 867 bp, Morganella morganii
atgtacaggaataaccggctcaaatttgtattcagaacacggaatatccttataaatggccgcgatgacaacatcattacactggataactgccgtgcaaacgtgaagataaccaacggcggtatcgcgatgggcggcaatgcggagttcactatttatggacttagcggcgacctcattgcatccctgtgtaaggtaggcggctataccagaatgaaagagaacatggcggaaatggaagttgaaatatacgccaacgactctctcgcatactctggcggggtctactacgtcaacgcaaacatgaatgaagtcccgacggtaggtattaacttccggtctgccggaggatatgacctctctgtcagtgatgccccggattatgccttcaaaggaacgaggacactcagtgaaatactgaaagggatatgtgaaaaatcaggctacacctttatagatcgcggagtaaccggtacgcaaacgaacggtcattactcaggggcaccactgaaacagatccgcgacctgtgcgccaatgccattctcagttatgccatcagcgggaaaacagtgacggcatgggacaagataaaaaataaagtagcagaaacaagggccttggtttctgctgagaatggcctcattggatatccggtttacacccctgatggcctgactattcagactcagtattcaccatacatcgcacagggtgaacaactcaggctggaaacctctctgcctggtgcaagtggtgactatgccgcctaccttgtaactcattatcttacttcgtgggagaaaaacggggcctggcacacagtggccgttatcacgccgtttgtaccggaaaaggaaaaatcatga

SEQ ID NO: 281733 - DNA, 291 bp, Morganella morganii
atgatcaggatatcactaactcccggtaaagctcaggcgatacgtgtgacactggctggtcaggattgtcttattcggcttgtgcagcgtgactctggcctgtacatggatttaactgctaacgacaccgtcgttctgaccggtgttccatgcctgtatgccacacgcattgtcagatacaaatacctgccatttaaaggtgacctgtttttcctggataaagaagggtcaaatgatcctgttagtgacggtctcggaatccggtttaatctttattacgttgaggattag

SEQ ID NO: 281734 - DNA, 840 bp, Morganella morganii
atgagttttgcgtcactcaatgctgccagtatttttaatgcgatagggggcgggtctccgctctctattatgaccagcatcctgaagccgtcatacgttattaagtcagaggatggcagtgtcacattgccgtttgacggtctgaaaaatatcaccgccagcgggtccgctaatgtggttaccgcgccggtcgaaaaaggaaagtatcagacactgaataaggttaaggagcctaatcagataaagtgtgaaatcctactcgatggcctgaccggattctccggcaacatccccaatattttcaatatgaccctgacatctcagaatgcgtcactgaaaattattcaggaaatgattggtaaagctgcaatctataacatcgaaacgcctaaaggtaattatgacagttacgacctggttaactggtcatatcaggtatcaagtcagaccggcgtaaccctgcttacggtttcattgtatttcactgagatcatgcagcagatggaggtgactttggggtctccgcagtctcaggaaaagccaataaataatgaggactcccctggggttgatggagtagcaacaactgcagagcagcaggctggaacaggagcccccacggcagacacgctgagcaaagagagctcattcctcagtgatgccctggaatttgccaaggacacatacgacacagcatcaggcgcggtcaataaggctcttgattatgtggctggagaaattaattctgctatggatgccgtcaacgcatttgccaatgagtccccgtcagaaagggttgctcaacaggcgatagatgacttaacaaggaaggttctatga

SEQ ID NO: 281735 - DNA, 2112 bp, Morganella morganii
atgattgtcgagcagatgaaatacaagctctccgtggaaacggggggctttcttgatgctacccggaagataaaaaacgaaacggaggacatgaagaccaaggttaagcgcaataccggcgaagtcacaaaaggctttggtgagcttaatctgggtattcagaaattcagtaccgaagggaagaacgcatttaccagtgtaatgagcggcgcggctaaattccttggtgtggccgtcactctggaaggtgcaagacgtgcatttgtcagcacaacggattccctgattacgctgggtacacaggcggcgtggctggggatgaacgcaaagcatctggatgcctttaatcgcgcagctgagtctgtcggatcatcaagagaggctgttggttctgcacttggtcgcatgaatgagtgggacatctggagtaaaaccaacgtagggccagctccggcatatctggctgcaatgtaccagctgcaaagtgagtctgcagtaaacatcatgaacgggaagaatgctgaggagaaaacgctcagggcattcgaggcaataaaaagcctcaaaaatgaatcccgcgcgcagcagctttatacatctgcattgggcctgagtgatccggcactgtttcaggctattcgcagcggtgaataccagaaagcatttgaggagtataaggggaagtctctgtacactcccgaaatggaagcccaggcgaagcaggttaaaaaactcatgaccgacctgaatgccgaagcaaataacttcatgaataccatgtatgtgaatttcgcgcccaatgtaatttccggtcttaaatctctcaatgcatggattagcgaaaatcgtgatggcattgtcggcttctttaaggagtggaccggagttatgggtgatttggttgatgcatttggcggtgttgatgaggtattaaaggcacttgtagcctacaaaattgggggtatttacggattggcggcatatctcggcatgagaacgggtgatgcaacgacgccagaagagcaaagaaacagaccagaaatcagcaagggggtgttgttccgctctcttaattcccactactattcgccgtcgattggttttgagcatccactgactgacgaagggaaaaaaatccctataactcaggccgaatacgacaaatatatgagcagttacactgccgaagaacgcgcagatatggataaacgcggaaattactcacaggcagagcaacttaaaaatatcgacaacagccttcagcgtcttggtgatatcccacaactgctcggtgaggagttcgttaagtctcacacacaaaaaggacatgcccttagcgatttctctcaagggggaaattatggcgttgtgcttgataagcaatcgaaggcgccagctgctacaccagttgattcggcaggaaaagatgttatcggcggaaggttaggttctggcagaaagctaaaaagtggtgagacgtataaatacgaaaccggcgagtattacgacgcgaacggcaacattgttaaccctgtagaaacagacgccggaacaatatcaatggatcgcctgctggacgcggttgctttccgtgagtcgcgcggcaatccggcagctaaaaacccacactcaacggcaacaggagcatggcaatttgttgaagggacagccagagataacggattaaccgtaaaccactctgccggaattgatgaccgtctggaccctgaaaaggctagggccgcagccgatattctgatgcgtaaattgctaaaacaatacaacggaaacgttgctgatgcgctgtttgcgtacgcaggcggaggcggcggagtgaacagagtattgcgcggtgacaaaggtggattgaacaatgagtcggtggagtctgtttataagctggctgaatacttcgacggaattaatttcgaagcgtcaaaggttcaccagactttacaggcaccagggcaaccacaggcacagccacagttttacgtcaacaatatggaaataaacagccaacctgaatctgttgatgctctctcaaactccatacaggaacaagcatcccgcgccggaatgaatgtctcattcgatacaatggggaggtga

SEQ ID NO: 281736 - DNA, 411 bp, Morganella morganii
atgagaaagcaagagcggatcacgattgataatccggccagccgcgaccacggcaaaacatttgtaattactgaaaaaccggcatcagaggcatggagtatctcgcaggacctattccggatgatgggtgagacatctttcctgtcaatcccggatgatgttgtgctgatgggctgtgcgggtctggctactgtcggtaaatccgttcttgccgcctccggttctgccgtttccaatgagcttctggcgagaatgtttgatgacgtaaatatcgctatcgaaaatgacggcaagacagttgagcgagccgtcaatatcaaggcagacattgaagaaatcgacaccatcaaccagatccttgaccgggccttctatatcaactttgcgttcctaaagacagaccgcgagtaa

SEQ ID NO: 281737 - DNA, 429 bp, Morganella morganii
atgcctattgatattaccagtgctaactccaagttgcgctgtactgtgcctgcgctcttcccgaccgggttcgactttgacgacttcgcagctgaccgcatgtttgaaaccgcagcactgcagatgaaagaagatgtgatgagtgccgacggtaagtatcacgccggttttatttttaaccctgtggaattcactatcagcctgtctccgacatccgaggccggtaaaaacctcgaccagtggtacggtgctgagcgtgcaaccatcagcgcgtttgcctgcaacctgacactgaccgttccggcacttgatgccacctggaacttcgttaacggtgtgctgtattcatggaacccgacaccggtcggcgcacgtattctgcagccgcgtcaggctatcttccactttgaaagcgtaacacggagctga

SEQ ID NO: 281738 - DNA, 1467 bp, Morganella morganii
atgatcccattaacaaaagattttgccatttcatccaatgctatttccccggcgggaacgggtgttgatgctaatggcctgatgctgaccagcggtgacgcacttccgattccgctggcgacagttcagtatttccagaccgcaaaagatgtggctgaagtgttcggttacgattctgacgaatatgaatgtgcctcagtctattttgccgggtttaccggttcggcacagttacccgcgcagttgcttgttgtcggaattcccgctgctgcgacatctggcggtctttattccggctctaatgctgatgtgaccatgcagaccatcaatgctcttgaggccggaacaatcaagatttcagtggatggaaaatctcagaccagcagcaatattgacctgaccacggcgcaaagtcagtcagatgtggcaacagcgttacaggcagcgcttaccggtgtaactgtcacctggaacccaacatcagcacagtacgccatcaaatcagccacaaccggcgcaggaagctctgtagggtatgcctccggcgcgattgccacggcgcttaaactgactcaggcaggtggtgcaaaatcatcagccgggacagacacaatgacgctggctcaggttatggatcacgttgttgatacggaccagaattggtttggttttgcctctgctcaggcgctgactaacgagcagcaacttgaattagcgaagtggggagccggtcaggatgccggaaaccgctatctgtttgcaaccagcgtcagcaatggtgttgagagtaccctgtttgatgaatgcacgaaaaataattacggtggcgtgttcattatgcacggcgaaccgaaaaatgccttctctgctctcgcatgggctgctggtctggatttctccgcaacaaacgggcgggtgagttataaattccgccagtttaccggtatgtctgatcaggtggattcgctgaaagtggctaatgcactggaagcagcgggcgttaactattacggcaattattcatccaataaggtgttaaaaaattacgccgctaccggtgttattaccggtcagtttaagtggttggatacattcctggatcaggtgtggttaaaagcgaatctgatttccgcattttccaatctgttcaccaacaatcagagctattcattcactgaagccgggtacacagcagttaaagctgccgcccaggaccctctgcagcaggcgattaacttcggcgcaatccgtaaaggggtaacactggaccagtctcagattcagattatcaatcagcaggtcggtaaagacatttccgggtcactgttctctgacggatattacttccacatcccgaaacagcctgggtcaaaccgcattgagcgcacactgaaaggcgcggtcctgttctggactgacggacagctcatccagtcccttaatctgcaatccaccacggttttataa

SEQ ID NO: 281739 - DNA, 492 bp, Morganella morganii
atgcttacaaacgacctgacagagaacgaaatcattgatctgttggctgactttcttgaaccgattgttggcaaatgcttaggagcctacgctaaccggatgccaatggaagacgggcaattcgcgatgctgtctccgctgcgttacatccgccacacgacaacaaaggccacccagttaagcgatacaacggaaggcctgtccgaggttcgtcaacttgacgttcaggtggacatatacggcgagaatgccggagacagggctgtagctcttgaaacagtgtgggccagtgattacgcctaccgcaatacggatgagagaatcgctccgctttactcatccatgcctatgcgctccccgtttgtcgatgaatcccgtcagtggcttgagcgttacaccatcacattatccatgcaggttcacatcacgataaccgtcggtcaggactactttgccgatgtcgaattttcaactgtacaggtgaataaatga

SEQ ID NO: 281740 - DNA, 369 bp, Morganella morganii
atgaacctcagaggaatagccaacgggttgaccagccggattaactcgaatatcacagcgaccggcaggcggtataagggtgagactatcgggcccggcagaaagcccttgcctgagtattacccggatgaagatgtgatagtgcaacttcagccgctttctgacggcgatttaaagcacgtggacggcatgaacctgcaaggcctggtaaaggcactgtttataaacggctcttactacggggcgaatagggcacttaaaaagggtggcgatttgttcattattgacgatcaagaatggctggtcgttgatcccgttgagctttggcctgactggtcgagggtaatcgtatgcttacaaacgacctga

SEQ ID NO: 281741 - DNA, 453 bp, Morganella morganii
gtggcgcagactatcgttgatttcctgatgggagtggcggaaggggtatcgaaccacacagtgagcgccggttttatcaacggcgcaaattaccctgacggaacacctgtcgcagaagtagcaacaaagaacgaatacggcgttccgctgaatcatcagcctccgcgcccgttcttccgcaatgcaatatccgcagacagtgaaagctggaagcagatgtttgttgccggactacgtaccgggcacccgctgtcatccacgcttgaaattatcggtgaaactatcgcttccgatatccggaagagcatcaatgagctgtggagccctgaattgtccgctctcactatcgctatcaggcagaagcacgacaactactcagtgaagcctttgcttgatacccgctggatgtacgacaacgtgacatacaccgtagagaaaggggctgatttatga

SEQ ID NO: 281742 - DNA, 405 bp, Morganella morganii
atgaatgaagttgcgctgacggttagcgggttccgagaaagatatccggagtttgacaatgtggcagacgcagctgtggataatctttttggcattgccgggctctatctggacaacacctatcaaagcgtggtcactgacttaaagatgcgggagtctctgctttatatgcttgtcgcccacctttgttacatcctgcacggagataacaaaaagaacggcggcagcggcatggtgggcaggatttcatcagccagtgaaggaagcgtatctgtaagttccgatattggggctgttgctttccgtaatgcatggtacacgcaaagcccttacgggtggatgttctggcaggcgacaaaagtttacagaatgggggtatggttcagtggcgcagactatcgttga

SEQ ID NO: 281743 - DNA, 327 bp, Morganella morganii
atggcagcaaaaaacggaagttatgtagttggatgtaaattacccaatggtctgatcattcgcggtgccggtaagcagctcaagctgcagggtgcaaactcaagtcagattatcggtggttacggcaccactgagggtgttccagctgatatctgggatgacttcgctaaaaactttgctgactccgcaatgatccgcaatggcgtggtgtttgcagttggcgacatgaagtcagtcaaagatgcagcaacagagcgcgagaatgtaaaaaccggcctggagcagaaaagcgaaaaagataccgtgacgaaagccgacaaggagtaa

SEQ ID NO: 281744 - DNA, 1017 bp, Morganella morganii
atgaccccaacattacagcaatttttacaggtgacagccgagcgcggaattcactttcagccgacactgaaacatctggcatttgatgccgacccgcagccgactatgggtgctaacggtggtattcccgctatcgttgcaactttcattgatccgactatcgtcaacactctgtttgcggataaccgcgcagtgcagattatcggcagtgaagagaaaaaaggttcgtgggcgcaggattcattcatgattcagcgcgtcgaaggaactggtgatactgtggcgtatgacgactacagtgaccaggggggtattcaggtcacgtcagaatgggaaggtcgcgatgtttatcgcttccagactatggtgacgtatggcgaactggaacaggagcgctatggcctggctatgctgccgtatgtggcccgaaagcaggaagaagcgattcgcatcatcgaccaggacgcaaacaagttttacttctacggcgtttccggcctgcgtaactacggtctgctgaatgatccggcgctccctacaccaatcaccccgctgaccgttgacgggaaagtgacatggaaagacaaggccattattgatatttacaatgatgttcttgccatgtacgagaagttagttgcgcagactaatggtatcgtcggcgatggcgtaaacatggactccaacttagtccttgccctgtctaacaaggcatccgtatatgtcaaaaagtcgaatgaaatcttcggtaactcagtagagaaaatgctgaaggattcattccctaacctgaccattgaaaccgcgccgcagtattccaccgaatccggtgagctggctcagatgtttgttaaagaagcacgcggtcagaaatcaggttatgcggcgtacagtgagaaactgcgtactcacccgctgatcccgaacagctccagctataagcagaaatactctgccaccacttacggcaccgttattcagatgccggtgttctttgtgcagatgctcggcatctga

SEQ ID NO: 281745 - DNA, 495 bp, Morganella morganii
atgccttttcagtctgaagtgaaaatttatcgcggcgtcggtcaggttggtcagccagcttccgcatctccgattgttgcatttgcaggtggccccggtgctttccgtgcagataaatatggcgtgatgattgcaagctttgtcttccgttcagcgcctggcagtaaaatgctgaccaataaagcgccgtcagaagatgcaaaacctcttgggttcattcagaaccttgctcaggcaattatcaactaccgtgaaagccagtctatgaagatcgcttccggcgttgaagtctctccgaaggtggctggtgatttctgggctaaatcctcaacagtagccatcgaaggtcagaaggtattcgcgtcacttactgacgggtcaatcgccaccggcgcggcaggtgcaacagtagctggtcacgttgaaacagaatggaccgtttcacagggtgcggcaattggcgacctgatcattatttcttcatggagcaaataa

SEQ ID NO: 281746 - DNA, 1200 bp, Morganella morganii
atgcacattcagaccgatacctccgtgggaggccgtgccggaaagctgaggcgcaacatcgcatttgatgggaaatcagtgcgaacattcgacagtgacgggattatgcacgtctcccgcactccgatatcaaaagccaatgtttgccggtacatgggaaaagagattgacgattataaattgctcaatctacagccagacaagtattaccggttttaccgcgaccctgacgaattacgcagagccgcaccaaccttcaacaataaaccagttttaaaccagcacatcgcattctccatcatcaatccgcctaaagacgcaattgtcggcatgaccggcgacgatgccgtttttgaatcaccgtacttgtttcagtcgatgaccatcactgacggcgcaatgcaggcggggattgaatcagatcagcaccgtgaaatatcaccgtcctattactggcgggctgatatgacacccggggtaactccggatggtgaggagtatgacggagtgatgcgggatatcgtgtgcaaccacgttgccattgtaccggacggacgtaccggcccggatgttcttgtgtatgaccaaaaacctaaaggctataactttatgactaaattagagaaattctgggcagagaaaattaagccgttgctggctaatgatgccgatccggaagcgctcaaagacgagcttgataatcttgtgaaagacggcgagcagactcaggctgagcgcgataacgaatctgaagccatgcgcatcaaagagcgcgaggaacgcgagcgcaaagatcgtgagcgtgaccgtgcagaagatgatggcgataaggacgcgatcattgctcagctgcgtgccgaactggatgagctgaaaaagccagcagaagacgaagaagataaagttgaaaaggctgtcagcctggcaaccgactccctgcgccgggagtttaaagagctgcgtgaagcggagcgtatttgtgcgcagcatgtcgggacgctggcgtgcgattccgcagaagagctttatcgcgccactctgaagcacgcaggtattgatacaaaaggcgttcatgccagtgctctcaagccgatggtgcaaatgctttccaaccgccactcgctcgccaatgactctgctccggtgatgacccgtgacagtaaggcggacgtaatgaaaatgattcgtggggagaaataa

SEQ ID NO: 281747 - DNA, 792 bp, Morganella morganii
atggcaagaaaaccaaagcgactacggaccgttaactacaacgccggaaatatgaagtggtacaaatctgcacttacccgccttatccagtccatgaacaaagatgtaaaacaatccacgctgaatctctttgctgatcagataccgcccgtcgatgtggtgcggcatgcgctcggtcagctttctgatatctggctggagcggtttttatctcactccggaataatcagcgaggaaatggcagaccgcaccatcaaatcagccgatatcaacatgcaccagatggcaaaagccgccgacttcacaatcagtatgcgctggacgcctgaaatgcaacaggttaaggacgcagtgattgcggaaaatgtcagccttatcaaatcaattcctgagaaatatttcacagaggttgagggtatggtgtaccggagcattgcgcggggaggtgacaggaagggattggctgatgagatagaaaagagcttcggcaagcgtgacggaataacccgcaggcgggcggatattatcgccaaggaccagatccgtaaggcaaccagtgcactgactatcacaaggcaagaggcagccggtgtaacgcatgggatatggattcacacggcggggcaagccaatcccagacataagcatgtcgatgctcacggaaaagtattcaagctgtcacagggttatccgtgcggcaaaaatgggaagtatgttaaacccggggaggaaattaactgctcatgcacattcagaccgatacctccgtgggaggccgtgccggaaagctga

SEQ ID NO: 281748 - DNA, 1392 bp, Morganella morganii
atgaaatttaacataccgagttcggtattggatgaaccggttactcagcgggttcatgaaaaataccaacctttgccgggtgtggttccggagagcgatgctggtaaaatcgcgcttgcgatggactcaacgccttacgatgccatcaattctgcggttatggctaactctgacactgccgtgtttatggggttcccagcactggcgaccctggcgcaacagtctgagtattacaaccttgctcaggtagtggctgatgagatggtccgtaactggatcactattaagtcgagtgaggagaataaagaccgcgtagaccttctggacgaagcactgactaagtacgacattaagcgccttattcatgaatctgtgaagcaggatgcgttatttggagttgggcatatatttgtcggtgtagacgatcaggatttcagtctgcctcttgttctggatgccagggccattcccaaaggtgcaaaactgtcatttaaacctgttgacccgacattcacctacccagcgatgtacaacgctacaaacccgatggatcgaaatttctataaaccggaatcatggttcgtcatggggcagagagttcatgagtcgcgttttatcgatatcgtcagccgaccggtgccagatattctaaaaccatcgtataacttcgccggcttgtcactgactcagcttatgatgccgtatgtgaacgactggacggcaatgcgtcagaacgttatcaaaattgttcgcacgttgcgtatgcgggcactgaaaactgacatggaagcaaggtgccagaacactgctgagtttgataagcgaataaagttatttgtgcgtgaccaggataatttcggcgtgtgggcattggatagtgaggaggagtttttccatcagcagacaagcctgtccgagttatccaatttgctttcaaactaccaggagcagctttgcattcctgctcgaattaccaatttaaagctgctggggaacgctccggcaggattaaacgcgtcaggacagtcggagcttgatacatggcacgaaaccgtgtcagggatgcaggagcgcgacatcaggcgggcgctggaaaccatcatcaaaattatccaactggtagagtttggtgacattgacgaatctatttacttcgactttaacccgcttgatgaagtcagcgaaaaagacgctgccgatatcatccggacgaaagttgaaacgatagcggtcgccagtgactcgcagattatatctccggaagaggcgcgagcagcccttagcaatatcgaagggatggagttcatcaaggatatgtctgatgaggagtttgccgaatggcaagaaaaccaaagcgactacggaccgttaactacaacgccggaaatatga

SEQ ID NO: 281749 - DNA, 1527 bp, Morganella morganii
atggcaggaacaagtcgcagctcaatgagaaacttgcagactcttgaggcgtttaaacaacgacaaattgagagagcgagaaatagccttttagatttcaccctgtatacaaacccactgtatgagactggatggtttaacgaattactgtttgcagaattagaccagtttttagttgatgcagaggccggattaatgccccgcctgatgatatttgcacctccccgctcggggaaaagtgaagcggcatccagaaggttccctgcgtatgttcttgggaagcatcctaactggaatgtgatcgcctgctcctactcgtcagatctggctaacaggatgtcccgcgacacacagcgaattgttgattccgaccggtatgcagaagtatttcctgatgtccggcttaacggttcaaatgtccgtacagtggcaggcggagctatccgcacagctgaactgtgggaaaccataacatccgatggtcggcttcatggtggcgcgtacagggcggcaggggtgaacggcggcatcaccgggcagggtatgaatatcggtatcattgatgaccctgccaaggactacaaaacagcatcatcaccggtgtatcaggagtcagtcatcgactggtacgacaccacattttttacccgtgccgacccgaagataaacgggataatcatcatccttacccgatggcatcagaacgaccttgcgggtcagttactgaagcttgctgaatccggcggggaacaatggcgggttgtcagtttcccgatggaggccgaaaagcatgaagtccatgagcttaacggaaagaaatacagcctgagaaagccgggagaaatccttttccctgagcgcatgccccgtaagttcgttgataaagccaaacagcgcggctctctggtatggaatgccctgtaccagcagcgccctacagccaaaggcggaggcctgattaagtctgagtggttcggcgaatacaaagagcttccaccgcttaaatggcgggcaatattcgctgacacagcacagaaaataaaagaggttaacgacttctccgtgtttgagcactgggggttgggtgacgacggctatctgtatctcatcgatatgatccgaggcaagtgggaagccgacgaattgaaaaagagagcaatcgcattctggaacaaaagcaaatcactcggtaatggccgtctgcgatacatgggcattgaggataaagcatccggcaccggcctgatacagagcattaggaagggggcgatatgcccggtcagagcaatacagcgcagcactgataaatacacgcgccttatggactcacaggggtatatcgagtccggatacatcaagcttcctgcaggaatggatttcgttaatgacttccttgtggaaatggaggcgataaacccggactttaatacccacgacgaccagttagacccgatgatggacgctatcaacgaaatgaaaattagaggtggaggtggattccacatacctgacgaggttctgcaatga

SEQ ID NO: 281750 - DNA, 432 bp, Morganella morganii
atggcagtcgagaacgcagtttactccataactattcatctggattcaggtgcaacgcttaacggctatgtataccaaggtaacgcaattgatgatggattctggctcacctattccagcacggcagacatggggagcgcggtagtagtcagtcgtgaaaaaatccaatatatcgaaatcaccggagtggtagacacagcatgcgccagcgcccatggtgtcggtgatctgggtggttcgtcattacgttggtgcgggtgcaataaattttcagtagctaactataccggcatgaccgttcaccaacttcgtcagcttcagaaagacctgatagaagagtacactaataaccgtgacatagagtggttttcggagcaatcgaggctgattgatgccgctacacagatagcctactcgaaaggacgatattaa

SEQ ID NO: 281751 - DNA, 543 bp, Morganella morganii
atgcaatatccaaaagttattgttaacggcgtgtccgttcgtgttgatagtgaagggcgttacagtttgaatgatttacatgcggcggcggttctcaaaggcgaagccaacgagtcacaaaggccgggtaagtttatccggagtgccggagttaagcgctttgtttctgctctcgatgccagaggacaaaaaagtcctctgaaaggaaatcaatcacttaaggtagttaacggcggtaatgagcaaggcgtatgggctgctgaattattggcgatacgctatgcggcgtggattaagcctgagtttgaaatcagcgtatacgagacattccgcgaagcgacacttaacggcctgtcgaacatgaccatgcttaaccgccttgacctgctgattgccactgaaaagcaggagattagccactgcgcccgcagaatgaatagttggggcgttggcggacggaagaagtcactgactgacaccagagcaaatatcattgcgcagatggaccctgacatggtttcgctgatggaggcgcaccagtaa

SEQ ID NO: 281752 - DNA, 225 bp, Morganella morganii
atggcgatattcaaccgtctgacagaagaacagataaaacaggattacgaccactacgggttgtttatgggcattgtgccaatttatgttggtgaccctaaaggtgaatgtcgtgtcgctgtgcgtaactggtggcctgactggctgcttgatttggcggatgccatacacagcctgaccccatatgactattgggcgataaagctcacaggtcagattaaataa

SEQ ID NO: 281753 - DNA, 450 bp, Morganella morganii
atggactggctgacaaaagcgctggctggtatctgcggggtgctgatcatcggcctgctgcttatcctccatctgtatggtggtctgaaggataactaccggctgctgtcatctcagttcgatgagcaggtcgccatcaacaaagactacaaatcccgcattcagtcacttcacgaactcgacaccatgtacacgcaggagttaaccaatgccaaaactgagattgataacctgcgtgatgctgttaagtctggcactaggcgcgtgtacatcaaagccgagtgtccaaagagcggagccgataccaccgaaggcggaagcaatgaagccgccccacgacttagtgaagcaactgaacaagattattggcgtctcagagaaatgatagctgagaacgaaaagcagaccctgtatttgcaggactacatcaggatggagtgtttgcgataa

SEQ ID NO: 281754 - DNA, 204 bp, Morganella morganii
atgattgagaagccaatttattacatgtcagcagaaaggccatctgttgaagaaaatcattttttgctttgtataacttcagttactgatggaggtgctgaagctttatcttggaaaaagttctcagtaaaaccaacaaagcggcaggtgcgcaaattgactaagtttgtgcttaaccatattaagcagattcaggaggggtga

SEQ ID NO: 281755 - DNA, 345 bp, Morganella morganii
atggactacagcaaatgcaacttcgtgtcaatgtcacgacttgttactcgcttggggcacaacccaataatgcgggttaacgtaaaaagtggaaatgcgacactgagcaggtcggtaaatggcggtatgccctttgctttaatagggatagacgaagtaaaaaaagttatacgcgtgcagatgacagaaactgaaggaataaaagttcactacgatgctaaaacctgtatttttcatctcacaaaagtagctcatgagttaattatcgacggattcaactcagcgaagtcgaaagttatcaacctcgaaaaaggcgatgacggcgcttggtacggtaaattttag

SEQ ID NO: 281756 - DNA, 144 bp, Morganella morganii
atgaaaataacagtggatgtgacaacagaagagttaaaagaaatggaaacagacgaggctgaattgcacgaacatgttctttttgctcttgttgattacggcgatttttgcggcttcaacgttgaaataaacgtcactgactaa

SEQ ID NO: 281757 - DNA, 435 bp, Morganella morganii
atggcaacagagttaatttcatcaactgagcttgaattcatttcggtggaaacaaacaacttatctttccaccgtgatgattccatttcagaggatttttctatttctttggaaatatcagtatctatcgcagagagagcagatggtgaaaaccaatgcaagatatcaatgcaggttgaactgataggagcagaaaaagaatcacgtaatgaaaatgaacgcggggctgagtcatttagacttgacttaaccgttgactatattttcgatatcacaaatcgagagtcttttgattcatttagcgatgaagataaaataacaaccctatctaatgtcgtatacctagactttaggcagcgtataattgcaagcatggcatcaattggcgcaacaaagtttggaatgcctctatcgctaagaaagatacaaaaataa

SEQ ID NO: 281758 - DNA, 612 bp, Morganella morganii
atgattaattctacatttgacccagaaaactacactatttcagtgaaaaaagtaactgaggatggcgatacattctatatggcaacagttctggagataccagacctgcgagaatacgctgacaccagtgacttcgcgcgggatttaatgcttgattcgataacgacagcttttgaaatgtgcacggaaaatggcactaaattcccagaacctagctctaatatcgaacaacctaacgtaagcggaagggtaaccttaagactgtcaaaaacattacactacaattgcataacacatgcgcagtctgacggtgtaagcttaaatacgtttatttcgaattgcttgtcggctcacatagagaaacagatatctgaccaaactatgctgtcaaatattcaagctgcacttgtaaatgcaatgcacttttttgcaccatcctgcaacacaaggctcaggactcgtgatgttgaagatgctcattggcagcagggaagtatcatgtcaactgcaaaatttggcactcagtacgccttcggtggttcaaattttgataacgatagtcttattactaatgcaagagtggatagattaccaatatggcaacagagttaa

SEQ ID NO: 281759 - DNA, 669 bp, Morganella morganii
atgcggctaaaggcgatttttgacgccaaaaagaaagagcttgggctgtcccaggagtctcttggtgaagctattggcatggggcagagcgccgttgctcaattgctgaatggggttaacgctatcaacgcagagaatgcagcaaagctggctgtagcccttgatgtatcagttgatgattttagcccgtccctttcaaaagaaataagggccatgtataacgcccttgcatcacaaaaatcaaaatcagccagcgatagatattcatacccgcttttcaccaaagttcaggctggatgctttactgaaaacggaaactcatacacagacagggatgctgaatattggattcctacagcaaagaaagccagcaataaggcattttggctagaggttgaagggcactccatgactgccccgcagggcggaaaaccaagcttcccagaaggcatgctgatacttgttgaccctgaagaggatgttgatttcggggatttctgtgtggctcgcatgctaaacgatgagttcacgtttaagcgactgatcagggatggtggtgttgaatatttagagccgctgaacccgcgctatgacctgataactatcaatggcaactgccagatagtaggaaaggtggttaaatcacagtggcctgacgacacgttttag

SEQ ID NO: 281760 - DNA, 192 bp, Morganella morganii
atggaaagaatcccgcttacaacattcgccactgaggttggtcaacacaaaacggcagaaatgcttggcgttagacagagtgcaatcagtaaggcgattttaaaaaaacgaaacatctatgtaatcaaaaagcaggacgggacagttgaagcagaagaagtaaaaactttcccatcaggtaaaaacaattaa

SEQ ID NO: 281761 - DNA, 705 bp, Morganella morganii
atgatgcgtaaaaacattcaggcagctatttttgcacacgcagagcgtgaatatccccgcgagtgctgcggagtaatagctcaaaaatcccgggtggtgaaatactttccctgccgcaatgttgcgaccacgcaggaagagcacttcgtattatcaccggaggattacgccgctgctgaggattggggtacggtgaccggtattgtgcacagtcacccggatgctaccacccaaccgtcagaactggataaagcacagtgcgatgcccttggcgtgccgtggtatatcatcagctggccggaaggggatctgcggactgttcagccgcgcggtgaattaccattactcggtcggccgtttgtgctcgggtttacggactgctgggggctggtaatgagttggttcaagcaggagcgtggcattgaactgccggattaccgggtggattatcattggtgggagcagggcgaaaaccggtacaccgataactggcgggaggctggatttattcaggttgatgatccgcaacccggcgatatgattgtgatgcaggtacaggctccggttgccaatcatgccggtattttattgcctgacaacatgcttctgcatcacttatacggtcaccttagccagcggataccatatggcggttactggcgtgaccgtacagtgatggtactgcgtcatgagcaactgatatga

SEQ ID NO: 281762 - DNA, 4089 bp, Morganella morganii
atgacacaaatcacaggccgcaaaggtggcggtggcagcccgcgtgcgcccgtcgaacaaccggacgacttacagtccgtagccaaagccaaattgctgatcgccctcggtgaaggtgaatttgccggtgagctgaccgggaagaatatctttctggacggtaccccgctgctgaatgctgacggatcagaaaactttcccggcgtggtgtgggaataccgttccggcacccaggctcaaacctatattcaggggatgccggcggcggagaatgaaatcacagttggtaccacggtacaaagcagcacaccatgggcgcatgcgtttactaacccgcagttgtccgcggtccgcgtccgcctgaaatggccgtccctgttccgccaggaggataacggggatatggtcggcaacgaggtgaaatacgccattgatttgcagactgacggcggcagctggaaaaccgttgtggatggacgggtgaaaggtaaaaccacctcaggttatgagcgtactcaccgcattgatctgccgcagtcggccacatcctggacactgcgggtacggaaaatcacggaggatgccaacagtgccaaaattggtgacaccatggtgctgcagagttacaccgaggtgattgatgccaaactgacctatcctcacaccgcactgctgtatatcgagtttgattcaaagcagtttaacggctccatcccgcaggtcacctgtgagccgaagatgcgggttatccgcataccgtctaactatgatcctgaacaccgggcgtattccggtacctgggacggctcgtttaaatgggcgtggaccaataaccccgcctggatattttacgatattgtggtttccgatcgcttcggcctcggcgatcgcatcaaaatgcagaatatcgataaatgggagctgtaccgggttgcgcagtattgtgatcagccggtaccggacggcaagggcggcggcggtactgagccgcgctatatctgtgatgtgtatgtgcaggatcgtaatgaagcctataccgtgctgcgtgactttgcggctatcttccggggtatgacctactggggcggcaaccagattatcaccctggcggatatgccgcgtgacattgattacagttacaccaaagccaacgtgctggacggccgtttcacctattccggcagcagcagtaaggcccgctattcctccgcgctggtatcgtactcggatccgctgaacggctatgccgatgcgatggagccggtgtttgaaaatgagctggtttaccggttcggctttaatcagctggaaatgacggcaatcggctgtacccggcagtcagaggccaaccgtaaaggccgctggggcatactcaccaataacaaagaccgggtggtgacattcaaggtgggtctggatggcaatattccgcagccgggctacatcattgcggtggcggatgaaaacctgtccgggaaagtcaccggcggccgcgtcagtgcggtgaatggccggagtatcacactcgaccgtaaaccggatgccgcggcgggtgaccggctgatgctgaacctgccgtccggtaaatcacaggcccgcaccattcagatggtcacggataatgtgatcaccgttaccacggaatacagcgaaacgccggagccggaatgtgtctgggtaacggaatcagacgagctgtacgcccagcagtaccgggtggtgagcgtgactgagaatgatgacggtacgttcacgatatcggcggccatgcatgatccggacaaatacgaccggatagacaccggcgcggtactcgatgaacggccagtcagtgttattccgccgggcaaccagttcccgccgaaagatatcactgtcagctcttattctgtcgtgaaccaggggatcagcattgaaaccatgcaggtaacctggtcaccggcagagaacgcgattgcttatgaggcgcagtggcggcgtgatgacggcaactggatcaatgtgccgcgcaatgccaccacctcgtttgacgtgccaggggtctattcaggccgctatctggtgcgggtcagggcaatcaacgcagcggaaatctccagcggctgggggtattcagaggaaacccggctgaccggcaaggtgggtgatccgccgatgccgctgaacttccgggcgtccacactggtattcgggatcaaactgaactgggagttcgggaaattcacggaagatacactgaaaactgaaattcagtacagcaaaaccaacgatggtcagaatctgttgctgctggctgatgtgccgtacccgtcccgctctcacgaactggccggtctggccgccggtaccgcgttttatttccgcgcccggctggtggacaaaagtggtaattattcagcatggaccgattatgtcagggggatctctgaatttgatgcaggagaaatactggctgatttgtcagggaagataggccatgaccaattagcacaggacctgctgaccgaaatcaacagtaaagcggacagcagtgtggtcagtgctctggacgagcgtatgtcggatattggcggggaggtgactgaggcaacttctcaggtacaggcgttgtccggtaaactggacaaagtaaaggctgatttaacagagtcagttgttgttgatctggatctgtcagcattaagtgaaaatacttattacccggttattcttcctctgacgacctcccgccgctattacttcagggtatttcgtacactggggcaatacggagataacaaacccggttatgcaactcacggctccgggggctttgccatgattgttgagtggcaggtgagcggttcaggatgggggactcagtctgaaaaccgtattattgataatgttgactggcgatggacaaatcagtctcctgtcatgggccctgcgcagttgactcacagctcggtggaatatgtgtatttacgcggaggcgcaaaatatcagctgaccaggcataaaagtgtcagtcaccggattgtcactgatacttacacaggtaacgggcaatctgttacaccaaaaggttttgtcgccggtgaaataccggtgtccggtgaacagcggtttaatgccacagcaaatgcggtgaaccggcttgaaacgagtgtgacagaggtttcaggaagggtcacatcaacggctcagcaggtgacacgtctggaaagtcaggtcggggcggattcggcaaaaattgaacaaacctcaaaggttcttactgacttaaacggcaggatttctgcatcgtggacaatgaaagtccaactggacagcaaagggaataaggtcattacaggtatcggactggggtttaatgctcagggaaacagtcagtttcttgttaatgctcaaaattttgcagtgatatcgtcactgaacgggaaagtagtaaccccttttgttattcagaacggccaggcattttttaacgatgcgctaatcagccaggcaacaattgataagttactggtcggtaaccacatcagatcagtgaattatgaaacaggccggaacgggtattttctgaatgcgcagaccggaaatgcagaatttaacaatggagtgttcagagggaccctggacggtgtggacggtcgttttacggggacggtatatgcggagagactggtcggggatgttgcggttgccgcttcgtacccgcaggcatccgcacaaaatacacatggtggcgggggaggctggactacggcaacgtctgtaattacttacgcagggggaatgctttatgatatgacgttagtacttccttcgataactgccattattgaagataattccggcagcaatccgcgtccggtatcgggagaactgcggtttagtatacgtgtggatggggttggtcagcaggcaacttctcagtggtcaggacagagtgttatgggatcagctcatgcggttattcctcgtggacgaaagaatgtgaaaatagaaattgaagtgggagtcaggcataaaggcagggcacatgtggttctgagggaaggggttgtgatggccttcaaacgcagttccgcatcattcagatag

SEQ ID NO: 281763 - DNA, 336 bp, Morganella morganii; identical to SEQ ID NO: 278647

SEQ ID NO: 281764 - DNA, 453 bp, Morganella morganii
gtgaaacgacaagtaattagttttttactaataactatgatcacaataggcttcccgtcaattctgagctggaggccggatacctttttgctctctactttatatactgtctgtgggattatgttctcgataggactaggcctgatagtaacgttcaacatggctggggttaaaaacaaaacctatatcaacataatacgcaaaaacttaaaatcagtaagggattcatttttaagatattttattatctcaactacgtgtttagtgctggggcaatatctaaatggtgtcgatattaagtttgcagtgaagggaattggaataaccatatctccagcaatgttgtttttctcattaatattgtattcaattatattctttgttatcaatttcttagaggttcaaagattaagccaagatatcttcgataagattagtcaagaaactgactaa

SEQ ID NO: 281765 - DNA, 1047 bp, Morganella morganii
atggatagtgccaaagagcaaaatgataaaaagaaatctccaaaacctaaaactgtaaagctaagagcatttaaaattgaaaatcatgatgttagcaaaagttccagccctgcaaaacaacaggttttagctaaacttaccagtaccaccacagttaaagaaaggtgcatgattcttaattctgatgatcctaaaaaagaacaggatctcatatcttattaccaaacatcagatacaagcgggtctgttttttgcaatatgatgcgtgtcacgcctagtgagggagttgaaaaaataccagatctgctttttgaaaaaccatccttcacaatgaatgacctgcaaaatgcaaatatagacacatcagttgtctgtaaaaatcatttctacttctgcatgaatgataaatttttagttaccaatctacctttaaataaaacgatttcttcattgcaaacttatgtatgctggctggctaataatgaattaattgagtttactcctatgattgttaagaacaaacaaactcaattgaaagatctggagcttatgtcaataaaagactcgtcccccataaaaaatatggatgacgtgagtgaagagggagatcttagcgaaaatgacgaaaataaagctacaggtacatctgtagccaccacagaagaaaaaaatacgaagataagtctctctgcaactgtcattgatgctatcaaatccatcatcccatcatccatacctaattttaaagaaatagttgataagcaaatagtttcagctgagttattaataaaattcaacaaaccaagagacatggatgaagaagactatgctagaatactaggggcaactcttaagcctgtcagtgatttggataacatagtgtttaagcgaaaagatggcagaagagatgtcaaagggaaagaccttctgaaaataaaaaatgtactcattgatgtgactgaaaccggaaagcttgtagaccaaaaagtctttcaagaaatgagtaaatacttaattgagatagagagtgaaacgacaagtaattag

SEQ ID NO: 281766 - DNA, 468 bp, Morganella morganii
atgaagatcatctattttttactcaccataatgctgcttccggcagcatccatttccgcccaaacagaatacgaaggttcaccaccttcaaccccagaggaacaaagagagcttggtttgatgtatgtgggtaaaagtgatgaattggcatttcgatggttagaaaaagcagctaaccaaggtgacgttattgcacagaacaatgttgctgccatgtactcaaagggaatttgggtaaaaaaagacctacaaaaatcattgcactggtttaccctggccgcaagcagcaaatctaacgataaaggcccagtatcttttgctcagtttgccgttgggcacatgtatcttaacggacaaggcgtcagacaagacgcagtgaaagcaaagagttactttgggttagcgtgtgacaacggaatgcaggatggctgcaacgcctacaaagagctaaaccagcagggatactaa

SEQ ID NO: 281767 - DNA, 1398 bp, Morganella morganii
atgaccggaaataattttaaccaagttccacaaagcctcgaggctgagcaaagcgttatcggcgcattgctgctagacccacagggcgacagaagccagatggtgctatccagacttcagccggaaatgttttaccagatatcgcaccggcagatttacgaagctatccgcgagttaaatcgcagtggtaagcccattgacctgatcactgtcactgacgcactggaaagtgccggaaaatcgaaacagacaggcgggtttgcttacctggccgaagtgagcaagggcacaccgagtgcggcaaacatcgttgcttacgcaaacaccatccgtgacaaggctattgagcggcaggcaatcgagaaggccggagaaatacagcgtctgtttaccgaagccagtgttctcagcctggccgaaaaaatcgatatggctcaaacgatgctgtccgatgtggtggagaacagcaaaaccggacgacagtcaggactgacgaatatctctgctgtgctggatgagtgggttatcgaggttgaggagagattcaaagatcccgatgctaaccgcggcctgaagactggcattgcgccacttgatgccatgcttgcgccgaagttcattgttcgtggctccctgttcgtcgtcggtgcgcgtccgaagatgggtaaaaccacagttctgaccgaaatggctaaaaacgtttccgattccggattgccggtcgcgctgttctcgatggaaatgaccaacaagcagctggccgaacgaatgatcagccagaaatctggaatcagttccaatgccctgtatgacagcggtgatgagtacgagtgggggcttatcagcaaggcaatgggtgagttaagtgagcgcccgaacatctggctggatgatactccgggaatgacgctggcacacattcaggcggaatgcaggaaactgaaacgcaagacaggaaaaatcgggtttatcggcgttgactacctgacgctgatgaaggcaggcaaggcagaccggaacgatatcgcatacggcgaaataacgaagggtctgaagcagctggcgaaagaactcgataccaccgttgttctgctgacccaacttaaccgcaagctggaagacagggcagacaaacgacctatgccaagtgacagccgtgacaccggacaaatcgagcaggactgcgattactggctgggcatttacaaagattcagtctacaacgacaacgccgacaaaactcttacagagttgattgtgcgccttaatcggcacggtaaagcgggaacggcatacgtcgagcagaaaggcctgtgcatgtttgatatcgatcagactcaggcaatggtcagagccgaaccaccggcgcggcataacccaagacagaaggacttttga

SEQ ID NO: 281768 - DNA, 591 bp, Morganella morganii
ttggcacgtatggatgttatttattccaagattaaagcattgcaaagtttacgtaatgatttacaggatcgggtttgttttttaaaagatagcatcagtaaaaaagaatatgttttgcaattaaaaataccagaattaaaagaaaaaatatctcaatacatgaaggaaatattaagtaatgatattgaaaatattaaggatgagagtgataaggctgaattcagtaaaataactagtattgattttgatttttcttcaaacagaattatagttaataataaagtttctttttctgaaagctcgatgtactatcttaataatgctttacatattgcgttgttaaagttaagcttaatagatcctaatgtaagatttccacgcctgttaattctagatggtatagagaatgggggaatggaggatgctcgttcaaaaggtattcaaaaaactttaaaggatatatctgatgagtttagtatggtaagacaccaagttattattacaactaaaggaatatattctgaggttgataatgaacattatagggttggtctaaaatttacctctgcgaatcgtagtttgaatatgtaa

SEQ ID NO: 281769 - DNA, 135 bp, Morganella morganii
atgttgcgtaatcaaaatggagacgatgggtacacggttagctggattgactatcgttaccgcgcctacatggccggagttcgcagcagactgccgtaccagacaccgccaaaaggagatgaagatgaagggtaa

SEQ ID NO: 281770 - DNA, 330 bp, Morganella morganii
atgaaatggattaagacgagtgagcaattgccggaaatggaagtaccggtattagccggatggtttgaccgtaaaggtgagtttgcataccacgctttcatgcggtcagattcctgcggtgatggatgggtgtgggcgatttcatgcgacaacatgattagcctcggagatgagtttattgaggatgacgattattccaatattacccattggatgccgctgccacaaccaccggagggtgatgtacaaaataactgcaatgatacacaagcccggcggactgccggtgagctggttccgccggtcaccgaagaaactcagcaagcgtga

SEQ ID NO: 281771 - DNA, 201 bp, Morganella morganii
atgttcacagacatagcggcagcaatcgaagaagccagatatctcatgaacaccagtgggcaccatcatgctgtggtgcaatccagcgctggcgtgatgctggtaaggcttctttacgggcttggtgtagcggccagaagaaaggtgatgttttcaactgatgttgatggcatgggcgttgttattccggaggtaagatga

SEQ ID NO: 281772 - DNA, 1731 bp, Morganella morganii
atggcaaccgtagcagacgggatccggtacgccgagcaggtggttgccggagaaatagttacgggcgaactgatacgcctggcgtgtcagcggtttcttgatgatctggaatacggccctgagcgcggtatttatttcatggaggaacgcgcccggcatattctggatttttaccgattcgttccgcacgtcaaaggggcgatggcaggtaagccgattgagctgatgccgtggcatacctttattctgattaatatttttggttttgtgatcccgctggttgatgaactcagcggtgtggctcagtacgacgatgacggtgagccggtgctggttcgccggttcaggacggcctataacgaagttgcgcgtaaaaacgctaaatccaccctctcatccggtatcggtctgtacatgaccggcgctgacggtgagggtggcgccgaggtttactcggcggccaccacccgtgaccaggcccgtattgtgtttgaagatgcaaaaaacatggtcaaaaaggccaagagctcactcggccgcctgtttgaatttaataagctggcgatttaccaggagcggtctgcatccaagtttgagccgctgtccagtgacgcaaataacctcgacggcctgaatattcactgcggcattgtggacgaacttcatgcccacaaaacccgtgatgtgtgggatgtgctggaaaccgcgaccggtgcccgtctgcaatccctgctgtttgcgatcaccacggcggggtttaaccgcgagggcatttgctacgaactgcgggattacgccatcaaggtgctgcggggcgtggtggaggatgacacctttttcgcggcaatttacacaccggatgaggatgatgacccgttcgatgaaagcatctggataaaagccaatccggggctgggggtctgtaagcgttttgacgatatgcgccgcctggcgaaaaaggcaaaagagcagattgcggcccggcctaatttcctgaccaagcacctcaatatgtgggtgaataccgaatccgcctggatggataccggtaagtgggacagctgccctgaaaatgcgccggatgatgagctgaaaaattacccggtctgggttggtgtggatctgtcaaacaaaatcgatgtgaccgcagccgttaaagtgtatgaggatccgcgcggacaactgcatatgaagtgcaaattctggctgccggaggacagagtggtgactgcaccgaagcatatcgctgacctgtaccggaaatggggagctgccggtcatcttgaactgacggacggtgaggttgtcgatcacgacatcatcaaagccgacattctggcatggtgcgaaggtgaggatttacgtgaactcggttttgacccgtggagtgccgttcagttctcccgccgcctggcggaagaaggtattccgctggtggaggtggcgcagacggtgaaaaacctgtctgaatcgatgaaaaccgttcaggccgatgtatattccggcaaatttcatcatgaccacaacccggtaatgtcctggatgatgtctaacgtgacggtaaaaccggacagaaatgacaacattttcccgaacaaatcgacaccggaaaacaaaattgacgggccgtttgccctgtttactgccaaatcacgccagatggtgaacggcggggaacaggaacaaagtttgtccgatgttttatcttccaggggcttacgttcactctga

SEQ ID NO: 281773 - DNA, 480 bp, Morganella morganii
atgaagaatgaatcactgaaagaagtcgtaaaaaagatgtgctgcgccatgccgggtggacgggaagcgctggccggtgcgctgggcatgtcactgacgacattcaacaacaacctgtacgagaagaacggctgccggtttttcgacaatgacgagctggaagcgatggaagacctgaccaaaacccgtcacctggtcgaataccatatggaccggcacggtattacaccgatggaagcgatagaacccgaaaatatcgacgaagtggaattattcaaaatacagacaaacctgagctcccatcagggacaacttgcatcacttatccagaaaagccttgaagacgatgtgctgactccggaagagatgacagccatctataaaaaaatgaacaaggtattcgcctatgcgctgggttttgtcgcatcactgaaagcggtctacggggtgggaaatgattcaggtaaccagaaagggtga

SEQ ID NO: 281774 - DNA, 270 bp, Morganella morganii
atggcaaaactgaacatccgcaacagcgatatgcatgatctgctttttgactactatgttttcggcaaaacgtttatccggttggcgaagaaatacgggtgctcagacactcacatagggaaaaaactccagaaggcagaagggctggtggaaggaatgctcataatgggagatgtaaaactggaaatggacggtacatcacatcgtggaggtatgcggacatttatgaataaattacatgatttaaaaattaatgctttacgatcgtaa

SEQ ID NO: 281775 - DNA, 207 bp, Morganella morganii; identical to SEQ ID NO: 278094

SEQ ID NO: 281776 - DNA, 285 bp, Morganella morganii
gtggcaactatctaccgaagtaagaaatggctggccgctgtggctcagattgaatgctgcgtcctgtgtggtcgctatggaacccaggttgcacaccgcaatgaaggtaagggtatgggcttaaaagtcgatgacagcctcactgctgcgctgtgtcctcagtgtcatcataatatcgacaacggcggaagcatgagccgcatagagcgcaggcaggagatggacagggcaataatactgactatcagggagttgaccagaagggagctgatagcgccgaaatga

SEQ ID NO: 281777 - DNA, 366 bp, Morganella morganii
atgaaccaatatcatctaaagcttccgtggccgccgcaagccaaccacctatacacaatagcgagaggaagaaaggtaaagagcagtaaaggcagaatatttaacgaagcagtgaaagaccaaatcaccaaagcaaatcagcaattcaatttatccggcaagctaaaaatcaagatagtagccaacccgccagacctaagaaaacgcgacctggacaacctccttaaagccccgttagacgcactcacccaaagcggagttattgctgacgacagtatgttccgaagcatgagcattgatttcggtgaaaaggttaaaggcggctcgctggatgtcacgatatgggagataggggatgaaacctga

SEQ ID NO: 281778 - DNA, 201 bp, Morganella morganii
atgaaacctgaaatcacatcgataccggaaatgctggttaagcactacggaaacatgaccgcactggcgagcgagctgggaataaaccggaacaccgtcaggaagtttcaccgcgatacccggtgtgaaatgcacgttatctacaacggcgtgctgatgaccaaatccaagatgaaaggcaaccaggggaaaagcgaatga

SEQ ID NO: 281779 - DNA, 1629 bp, Morganella morganii
atgttaactattacaccaaaatttgcacaggaacgggcgctgaccatgttgcggcagtcgtggaaacagcatgcctcgttcatgatttacgcgccgaccggtgccggtaaaacagggctggccgcatttatgacggatggctttatatcgcaggggaggcgggttctttttgtggcaccgttcacggttttgatttcccagactgcgcaacgctttattgaatacgggcttcctgaggatgagattgcctatatctggcgtgatcacccgaaccgtgatccggcaaagcttattcagattgcctcagccgatacgctgatccgccgtgacttccctgacaatattgatctgctgattatcgacgaggcacatctgcgccggaaaaagattctggagcagatcacccgcctgaccacggaaactgggtgtaaggtggttggcctgtccggcacaccgttctccccgttcctcgggcattactacgaaaaactgataaagcccaccacgataaaagagcttatcgaacgcggtgatctgagtccttatgagttttacgccccgacaaagcccgatttgtcaggcgtgaaaagtacccgcagcgatgagtacggcagcgattacaaagaggacgaaatagccgcaatcatgtgtggtgccgatctggttggtgatctggtcagcaactggttaaaactgggtgagaatcagcccaccgtgtgcttctgcgtcaacgtcagccatgccaactttgtcacgatggaatttaacaaggcaggcattaatgctgaggttatgacggcaaacacaccacacgaagaccgtgatctgattattcaccggtttgaggcaggtgcgacaaaaataatggtgaacgtgggtgtgctggtcgccgggttcgacagtgatgtccgctgcataatctacgccagaccgacaaaatcggagatccgctggttacaggctatcggtcgtgctctgcgtccggccaaaggtaaagaccgtgcgattattctggatcactctggtacagttcaccgcctcgggtttccggaagacatcgagtatgacgatttgccgcgtaaaaatgacggtatgaaagaggccggatcttaccgtgagcaggagaaacgggagaagaagccgaaggaatgcacatcctgtcactacatgaagcctgccggtgtctacgtttgcccgaaatgcggatttaaaccgctggctggcgaaaatgtggaagtcgacacctcacgcagtattaaaaagatcggtaaaggtcagaagacctacacgatggcggataagcagagtttctattcccagctgctgtattaccggaatgcccgtgctgcacagggcaaggtgatgaatccgaaatgggtggataacacctaccgtgagaaattcggggtattcccgcgcggcatgcacaacacaccacaggagatcacaccggttgtcagtaacttcatacgtcacaaacagatccagtgggcgaaaatgtgccagaaacgggatgccgccgccaaagcagcagtacaggctggggcaaagcacacaccagaaagccgcactgacagcgtgcgccggttattggcggcgaaaccaactcagcaggggagtctgttatga

SEQ ID NO: 281780 - DNA, 165 bp, Morganella morganii
atgacaactactcaactatatgcacaagagtgcaaacagtctcagcgcaaatatatggcaatggcaaaagctgaccggtcatttccggaggcgagaaagctggcggtagatatggcactgctaaatcgcaaacacgcccgtgaatggtcgggattgccagtgtga

SEQ ID NO: 281781 - DNA, 216 bp, Morganella morganii
atggatcttacatttgagtgcaaaggcttttcaggggaaacgtggtacagcagcaacaaaatgagcattacgctatctggggttgttctcaatgggcacgttgaagcatcagacatcatcgaagaatactccgcaaagacgcttctcgaagaaattggcgatgaagacattatcaaatatctcaccggacagggttatgtggtagcggagaaataa

SEQ ID NO: 281782 - DNA, 489 bp, Morganella morganii
atggagcagagtgagttaaaaaaactaatggtatatagcccaaaatcaggagtttttacatgggttaatccaccacgcgtacattttagtttgcttggtgaggaagctggtcacccgtcaaatgacaaaaagaaatactggataatccagattaatggaaagaaattcaagcgttcacatctggcattcctatttatgaatggagaactccccaaaggagttgttgaccatataaatggaaattcgctggacgataggtggataaaccttcgagatacaacacaaattgttaataaccaaaacagaagagttggaaagcaaggaagaactctcccaatgggagttaggcagctaagaagcggcaagtacatggctcgaataggggcaaatggtaaatctatatctctcgggacattcagctcaatatgcgaggcggaatctgcctatttggctggcaaggagaaatatcatgaagcagcaatcatctga

SEQ ID NO: 281783 - DNA, 1269 bp, Morganella morganii
atgagtattcatagtgccgatacaaataaatcacccggactgaccagcggaaccatgcttgttatagcaacagtcgttggcggcggtatgttttctttgccgattgcgatggccggtgtctggttttccggtgccaccgttattttgattttagttgcaattatgatgttactgaccggtctgatgttagttgaagttaacctgcattttgaaccgggcgccagctttaataccttcaccaccgagttactgggcaaaaaatggaatattgtcgtgggtattgccttcgggtttgtactctatattctgacgtatgcctatatatccgggtcatccgctgttctgactcagacgatattgaaatataccggtgtcgccctgccgataaaagccgcggtcgtgattgtcgcctgtctggtggctgcgattgtctggtacagctcattatgggtcggacgtattaccaccattttaattttcggtaagtttatcgcgttctttgccaccttctccggactggttgcacacgtggaaattgccaatctgctggattccgcatcagtggcaatacccggaacgaaatatctgccttatgttctgatgacactgccgttctgtattatttcgttcggcttccacggtaacgtaccgagcctggtgaagttgtacggtaaaaccaaattccgctttattacccgttcaatcattatcgggacaatatttgcggtactgctgtatatcttctggctgggtgtcacgatgggcaatatcagccgcgccaacttctccccgattattgccaaaggcgggaacattgatgtgttcgttgaggctctcggcgggaggatgtcagggaaaaccatggatcttatcctgacattcttcggtaactttgcggtggccagttccctgctggcagcaacactcggcctgtttgactatattgccgacctgctgaactttaaaaatgacagcgccggtcgtttcaaaacagcagtagtgacgtatctgccaccggcggtggtgtgtttcttcttcccgaacggattcgtttatgccatcggttatgccggtctggcctttactatctggagtgtgattttaccgccgttcctggtaaaagcctcccgcaaacgctacagcgacagcgataccatttaccgttcgccgtgtaacagcgcggtactgaatctggtgattgtctgcggtgcgattgtgtatctgacggtcattctggatgtgttcggctggctgccggcatttaaataa

SEQ ID NO: 281784 - DNA, 792 bp, Morganella morganii
atggcaaacatgcgtgaagtccgccagttatgtgataaacacggcatcaaagtgttctacgatgcgacccgctgtgtggaaaacgcctacttcatcaaagagcaggaagaaggcttcgaagatgtctccattaaagacatcgttcacgaaatgttcagctacgctgacggttgtaccatgagtggtaagaaagactgtctggtgaacatcggtggtttcctgtgtatgaacgacgacgacatgttctctgctgcacgtgaactggttgtggtttatgaagggatgccttcttacggtggtctggccggtcgtgatatggaagcgatggctatcggtttacgcgaagcgatgcagttcgaatatatcgagcaccgcgtcaagcaggttcgttacctgggcgaaaaactgaaagcagccggtgtaccgattgttgagccggtcggcggccacgcagtattcctcgatgcacgccgtttctgcccgcatctgacccaggatgagttcccggcacagagcctggcagccagcatctacatggaaaccggtgtacgttctatggagcgcggtattatctccgcaggccgtaacaaagaaaccggcgaccatcaccgtccgaagctggaaaccgttcgtctgactattcctcgtcgtgtatacacctatgcacacatggatctggttgctgacggtattatcaaactgttcaaacacaaagaagacattaaagggctgaagttcgtatacgagccgaagcagttacgtttcttcactgcacgctttgattacgtgtaa

SEQ ID NO: 281785 - DNA, 459 bp, Morganella morganii; identical to SEQ ID NO: 278782

SEQ ID NO: 281786 - DNA, 441 bp, Morganella morganii
atgtataagaatattctggtaccgattgacacttctaataaagcactggttaaccatgtcatccctcacatcgaatctctttcaaagtttgatgacccgcacatacattttttagtcgttataccaagctacaaaatgtttatcggcctttcatacggcatagaaaaagaaatcattacagaagataatcaacgattgaagttagcagaagctgaccttaaaaatgaagtttcaagatttaatcttccggaagatcgggttcattatcatgcaattcttgacactccgatagatggaattttgactaccgcagaaaaaatacacgctgatttaataatcatcagctcaagatcaccaaatatttcaaccaaatatctacttgggtctactgcatcagctgtagtccgctatgcagaaacatccgtcctggttgtccgctaa

SEQ ID NO: 281787 - DNA, 891 bp, Morganella morganii
atgaaaaaactctctgggttaatcgctgcacctcatacaccttttgctgccgatggcagtgttaattatcctgtcattgataaaattgcagaacatcttattgcaactggtgttacaggtgcttacgtattaggaacaacaggagaaggtatccattgttctgtcgaagaacgcaaaaaagtcgctgaatactgggctgctgccagtcagggacaattagatataattgttcatacaggtgctctcagtattgcagacactatagagctatcccgtcatgctgaaacattagatattcaagctacatcagtgattggcccttgtttctttaaaccgggcaatgtagatgacttagttgaatattgtcgtttagcagcgatgaactcgccttctaaaggcttttattactaccactctactatgtcgggactaaacattgacatggaaaaatttttacaagcggcaggaaaaacaattccgaatttatccggaatgaaatttaattctcctgatatgtacgaatttcaacgttgcttacgtgttgatggcggtaaatacgacattccatttggtgtagatgaatttataccggcagggttagcgtgtggggcattaagcgctgtaggaagcacctataactatgctgctcctttatatcttgaaataattgataaatttaacaatggtgattacaaggggatcactgcgtgtatggataaagtaattgcaattattcgtgtgctggtagaatacggtggtgttgctgcaggtaaagttgcaatgcaattacatggcattgatgttggtgacccccgccgtccactacgcccattaactgcagcacaaaaaacggatgcactggcaaaatttaaagcagctggtttcctataa

SEQ ID NO: 281788 - DNA, 585 bp, Morganella morganii
ttgctggataagaagttcgataagaccggtgggaagattacaggacagacggatattgaggcaccaggcggtcgcacccagacactgaaagcaaaagctggcacatcggtataccaggagttgtaccttcaggataccttcgctgcatggtgggggattaccgctggtaacaagttaagcctggaaaacaggattacaagtaatacgcttactatcggtactgatggtttcaaaattgacggtaaagacattgcaactactgagcaacttttcggtgttggtcagacctacagaaacctgacgaccagccgtcaaaataaagtctggtacaccaacaccgacagcaagccccggattgttcatgtcgaatcaaacagaaccggcacacaataccctttcagtattgatattcagattattgatacgggtggacagtgtcgcggggattaccgctggacagcggcggatgaggtggtttctctgacggctatagttccgcccggcgcaagatatagcgtcaacggagggtggggacagccgacagaatggactgttattaacttctggctggagtactcgctatga

SEQ ID NO: 281789 - DNA, 363 bp, Morganella morganii; identical to SEQ ID NO: 277841

SEQ ID NO: 281790 - DNA, 213 bp, Morganella morganii
atgcaagtcgaaccaatcatcaccaccaacaatatgtcagcagacgaagttgcggcgtggatcactgaaaaagcccgggcgcttcaaaaactgcaatcactccgtgctgagcgtcaaagagagatccgtgaccacgagcgcacgatggcccgactcgatgaagacatcgccagatgggaagacctctgtgctttaacagtaaatccgcagtaa

SEQ ID NO: 281791 - DNA, 279 bp, Morganella morganii
atgcatccgaaccaaaacacactgatgcctgacaactattttcctgatgacggcaaatggattcaggaaatgctgttgcagttatcaccgggagccagaaacagggcgctggtggcttactcagcggtgtatcaggaacggtgggaagcagagcctattccgtacaggaaagacaacacagcacgcagggaagcgaataaacggctcagggaatacgtcaggaagtttaacagagccatgcagggttacaccgcagacccacagaaagttgcgggataa

SEQ ID NO: 281792 - DNA, 222 bp, Morganella morganii
gtgtacatccggggaaccaatgccgccggaaccaacagcgacaacacactgaaagcggatgatccgcgtaatgcgttttactggcgttttctggaaaacggcacatccaaaatggcaccacaaccgtttatccgtccggcatttgacggtaaagcggatgaggcagcggatctggcgctgagcaaactcagtcaggctatcgataaggtgctgagcggatga

SEQ ID NO: 281793 - DNA, 648 bp, Morganella morganii
atggaagactgggttgctgaggccggagactatgcggagcaaaccgcatctgcggtacagagcgccatgggcggtatggtgaataacatcactgacatgctgaacggtaacaaagccagctggcgcgactggtctgtggaagtccttaagtcaatccagaaaattctggttaacgctgcgattgtgaacagtattaagtccatgtctggtgtcggtggctggattggtgctgtcggtgacttcctgggaggtgctgcggcaaatgccaaaggcggagtttatgactccccgggcctgagtgcgtacagtaatcagatagtcagcaccccgacttattttgcgtttgccaaaggtgccgggctgatgggtgaggccggaccggaagcgattatgccgttaacacgggcggcggatggctctctcggtgtccgggcgatcggcagaaatcagaataccggttcagcagcaccacaggtgtttattaccattgacagtaacggcagcagccagacgcagtcgtcagctggttatgaacagtttggccgggagattgggcagtatgtagaccagcgttaccgggcgctgattaatacagatctgcggcccggcggtgccatctggtcggttgcgaaaggggcccgtcaatga

SEQ ID NO: 281794 - DNA, 291 bp, Morganella morganii
atgctgcagccacctcattttaacctgtttaaaacatataacccggttgcggcattacccctatcactcaacatacggaacactccgcagggggtggatatgcgcatgcctgacaaatattccagccctacagcgtacgcctgggggcttataacctctgcttttggcgttttatccttggatcagtgggctattgttgccgggattatctgtactgtcgggacgttcctggttaactggtattacaaacggaaggaattccagctgaaagccggagaacatcatgaataa

SEQ ID NO: 281795 - DNA, 477 bp, Morganella morganii
atgaataaccgattatttaaaaaagtcatggccgcttgtgccgccggggcgattgccggtgcgctggtgctgatccccgcatatgagggtgttgagtacaaaccttaccgtgatgtggccggagtgctcaccgtatgttatggccataccggcagtgatattcagcccggtaagttgtacacggacgcagagtgcaaggcgctgctacatgatgacctgacgaaagtccggcgcgcggttgatccgatgatcaaagtgtcgattgatgacaacacccgtgcggccatctattccttcgtttacaacgtagggcccggtgcgttctcgcgttctactatgctgcataaactcaatgccggtgacattacgggtgcatgtgacgaaatgaagcgctggacgtttgctggtggtaaacagtggcaggggttgattaaccggcgcgaaacggagaaagcgatatgccacggaaccctttaa

SEQ ID NO: 281796 - DNA, 384 bp, Morganella morganii
gtggcgaatccgaaactgtcattaaaagaactggcactcagtccaaaaaacgccttccgctcaaaaatggtgaaggtacctgaatggaacggtatcgccgttattctgcgggaaccatcttcggcagcctggctcagatggcgtgagctgatgaataccgacggggagggtgataaaaagttgtcggaggcagaacaggcacagcgcaatctgcgggctgatgtggtgatgttttctgatgtgctgctggatgaagataaagagcgggtgttcagtgatgacgacacggaaacggtgatggctgtttacgggccggttcatgcccgtctgctgaaacaggcacttgatctgatgaccacgccggatgaagcggaaaaaaagtag

SEQ ID NO: 281797 - DNA, 477 bp, Morganella morganii; identical to SEQ ID NO: 278606

SEQ ID NO: 281798 - DNA, 168 bp, Morganella morganii
atgagcctgtcgtattccaatgctcttattgttgctaatggtaaaaagccgcacacagctcttgtgttaagtgataacgaggtgattgatactgtggcggcgtatatgaaaaaggccgccctgtgcagcctttggaatgtgaactatccggaaattccggagagttga

SEQ ID NO: 281799 - DNA, 357 bp, Morganella morganii
atgaaaatgcattattacagagatgggaatggcgttgtatggggttatgacgatgatcaggtatccggtgggtttgttcgcgaaggcctggtgaaaataaccgaaaaagaagcagataaattaatcgctccgccgccgccaaccaaagagcaattgatcgaacgggctgaggctaaaaagcagcgactgatggctgaggccactgtagaaatggcaccactacaggatgccgatgatattggcgaggctacagatgaagaattatcgcaactgaaagcctggaaaaagtatcgggtaacactgaaccgtgtagatacatcacttgctcccgatattgattggcccgttaagccttaa

SEQ ID NO: 281800 - DNA, 363 bp, Morganella morganii
atgagcgagaataaccgcatgaccagtgtaccggactttctctccgagttagacgccggtgtgtttgaaaacaaactttctgctgcactgaatgaagtcgcttttggtaccaataagaacggcggtactggtgaagtacacgtgatttttaaattcactcagtcagatgaagaccgggtgaagatatctcacaaactgaaaatggttacaccgactaagcgcggtaaaaaatcggaagaggatacaaccgaaacaccgatgtgggtcggtaaaggcgggaaactcactattctaccggaagaccaagggcagttatttggtattgacggcagtatcgacgggaaattaaaagccattaattaa

SEQ ID NO: 281801 - DNA, 315 bp, Morganella morganii
atgaaaatgaaagaaaacccagacgtttgggatcaggtactgatgtatctgtctcagtacaaagaccagggcatatttgccgctctcgctgggtcggtggctatccttcgtggtcgctataacggcggaggatggaagaagaccatttttgacgggctgatgtgtgcaatcttcgcgtggttcgtgaaggacttgctggcgttactcggccttaatcctgatttagcgtatctgaccagtgtattcattggttatatcggtgtggatgcgctgagcaaaataatcaaaggcaaggcgggagtgagtgatgactga

SEQ ID NO: 281802 - DNA, 159 bp, Morganella morganii
atgccacggaaccctttaactttgatcatcattgctatcattctgctgacggtcagtctgttggcaggctgttacctgtattcgctcgagactcactgtaagccgctgccgggtaacccgctggacggtgtgattcattatgagtgtgaagcgccatga

SEQ ID NO: 281803 - DNA, 366 bp, Morganella morganii
atgagcaggaatggaaatcgcaaacctcgggtagagaaaaaaataacaaaatcagcaatggagttactgcttaagctacttccaagccggtaccagaaagaagatttttatttagacgatgaatgtaacgaatggcatatcggggagactgactactggggtgatttcgatgcttacgatgcattttttgaactacacaaaaacctgatcactgaaaccactgattgggaaggtgtagtcagagccggtgaaagtaatggtgataaaaccccatattattcaccgtggagactcagtaagaaagtggggaggcgcgaggttatttctcattgccgtaagcttgttaaagctggcgtagtttggtga

SEQ ID NO: 281804 - DNA, 327 bp, Morganella morganii
atggaaaatgcaaatccacgcaaatcgtttaaccggtttgtgtcaaatcatctgatggcaacagcccatcaggcactgagaagcaccacacagacagtggttgcaaaactgcttggtgtacacgactcaacagtcttacgcagaacagaaaagttaccggagatatgcgagacattggccgcagccggtatcacagattttgttttgccaggcgagaagaaaatcagtgaggaggagtatcggtttctgtggaagcagatcggcgaactctctctgatgagaacaaaagaaaacgccccggctgttggagcagcagaggcgcattaa

SEQ ID NO: 281805 - DNA, 222 bp, Morganella morganii
gtgtacatccggggaaccaatgccgccggaaccaacagtgataacacactgaaaacggacgatccgcgtaatgcgttttactggcggttcctggagaacggcacatccaaaatggcaccacaaccgtttatccgcccggcatttgacggtaaggcagatgaggccgcggatctggcgctgagcaaactcagtcaggctatcgataaggtgctgagcggatga

SEQ ID NO: 281806 - DNA, 1305 bp, Morganella morganii
atgaagtttaagttattatcggcagttattctgacagcactttctgccacggctttctctgcaactgaacagacattttctgatggtttaaaaattaaactcaacgaaaaaagcaccggttctgatttacgtatgtataaaggaaaaccggttttggctatttcgtctcctgataacagcaaaatttctcataactactttgacgaatttaatgtcggaaaagaaggtatgtatattggtaaccacaaaggcgccaataccattatcactgaagtggtcagccactcgccgtcattactgaaaggtaacattgatataatcggtaaacttggcaccctggttattgctaatcccaatggcattaccacaggttcaggctttggtgtttccaatacaaaaaatcttgaattagcaacagctgcaattgtcaattcatcagataccgcccgcgttgaaaccatgaagaacagtaatgatggtaaattaattattaatgataccaatattacagggctggataaggtatcattaatatccaataatatttctgttgaaaaaagcaaaattgacgttaaagagttaaatgtccatttattggcttctgcagaatatgaaacccgtcgtctttcaggtgaaagtgtgcatgaagatacctatgatatcactgaccgcaggaaaaaaaaggtaactattgtaagccgtggcccatcaaaactgagcatcgataataactcttcaatacttgctgataatataaatatcaatcttcttgaatctgaattccggaataatggttacatcggaggccgtgaaatcctgaatatccgttccgggaaaagtcacaccggtatttattcccgcatagataacggtgacattgttcatatgaagaactatggtactctcacagggaaaaaccttaagatagctgcttacgaccatggttatatggaaaaccatggaaaaataacttccagggctctgatgagttttgatttaaataacggcagcacattcgttaactacggtgacatcaataattatggtcgttacaacaacaatgaaacccgtatcacatttgattatggcacgtttgaaaacaatggaaaaatgagaagcaataatatagcaatcacaaatcacagcaacggaaaactccttaacaaaggttctttagatttcatgcatagtgatttcactgatcataaaaaatacacaaaaggcagtaaagaagatcagtcattcaattttatcagtaccggtaaatcacctgacaacgcccattataccgaagctgatttttaa

SEQ ID NO: 281807 - DNA, 558 bp, Morganella morganii
atgaaaaaaacattagctgcattatcattaatttctgctacgctattttccgcacacactgtggccgggccgggaagcactgaatatacctacaaaaacggcgataaaatccgtgtagccagcccggaagtccaaaccaaactgtttaaagatgaaacagggaaacccgttctgatcattaattcaccggatggtcgcgggatctcacacaacgttttcacggattataatgtcggtaaaaaaggactggtcattgataatgccgaaaatgccaaaaccattattaatgaagtgatcggtgaaaataaaacccgtctgcgcggcaataccctggttgcaggcggtaaagccagtctgctgattgttaacccgaacggtgtgctctgtcagagctgtacctcaaccaatacctcactctattctcagcgcaaaacactgccggtgatcatcaataccgcgcagaataacgaggtggtttttgatacccgcaaacaaacaggtaaatcagaccgtctgacggatatcagccataatatttctgtcacttcacctcgttga

SEQ ID NO: 281808 - DNA, 756 bp, Morganella morganii
atgtatccaatttcaacaggacagaatatcagattaaccggatatatttcatatcagggcaccgatggtatgatcggcgacttaaaagaatcagcgtcagtaaaacagtcgggtttatctgagcggttcactgaaatccgtaacagtgcagcagagtttttcacagcagtgaaaggtaaaataaataatgtatttgaaccattagggaattggataaataaaataacaatccgggaggaaaaaacgcaatctgacgctaatcagaacgcacggatggtgctgaaaatagcgcaggaaaacgtgccggggtatttaaataaagcccgcgcgtttctggataaaaatgaacctctggataccgctttactgaagatgttctcaaaagacatactgagaccattagtcacatttctgagtggtgcggataaaataaaaggtgcggataaacctgcagagatattcatgaccgaatttattcacaaagtaaacagcgggttatccgctgctgccggttgcggcccgaatccctctgaaaaagtaaatcagcttgcgtcaatctgtgatgatgacagggcaaaggagtatttagacacaaagaattttgaacaggacttcaaagcaagaatgatgacactgatgacggatattgaaggggtgattctgcctgatttgctgtctatcaaacctgaagaggtagtcgcccgggagaaactgcagactgataataatgcctggcgccggttacctgataactga

SEQ ID NO: 281809 - DNA, 228 bp, Morganella morganii
atgaactactcagccataataaggatagtgctgtattttcatcacagtgatgtggtgtcccggaaccccggtgcagcattatccgcatcaatggccgatatgccggatgacggttataaaaccatggtgtgtgccgaaagtgcgcggattaaccgccctatggcaccacagggcgataaaccgtcccttctctccgtccgtatccgtctgaacccgaaaatcggctga

SEQ ID NO: 281810 - DNA, 1182 bp, Morganella morganii
atggcgggcttcgcgggcttctttttcccgtgccattcgtgcctgtttggcttcaaagcggattttggcatctgcggcgcgttgggcttcttcgcggatctcaatgacctgtgctttttcctgacggtaatactgcaccagcggaatgttgctcgggcagacccaggcacaggcaccgcattcgatacagtcaaacagatggtgttgttcagctttttcgtgttcgttacctttactgaaccagtagagctgctgcggcagcaatccggccggacaggcatctgcacagtgactgcagcggatacaggcttcttccggtgcagccggctccatctcgtttgtggtcggtgccagaatgcagttacagatttttactaccggcacatcgagatccggcagtgtaaagcccatcagcgggccgcccatcacaaccatttgttcatgctgcggacggaaaccggcctgttgcagcaggaaacggaccggcgtacccagccgtgtccagaagtttcccggcgattcaaccgcttcgccggttaccgtcaccacgcgctgaatcagcggttcgccgtcggtaatggcgcgtttgatggcaaccacggttccgacgttctgcatcagtacgccgatatcagaggaacgtccgccggacggcacttcgcggccggtgagaattttggtcagctgtttggcaccgccggatgggtacttggtcgggatcacgcgcacgaaaatctgtttttccccggcagtgacctcgcgcagtgcggcaatcgcctccggtttattgtcttcaatgccgataaggacctgttccggcccaagaaggtgcatcagaatacggataccggtgagaatttccccggcatgctcctgcatcagacggtcatccgccgtgatataaggctcacactccgccgcattgataatcagggtgcggataagatcaccgcctcctttcagcttactggcggtcgggaagcccgcaccgccgagaccggcaatcccggcctggtgaatacggtcagtcagctctgttttggagagagtggtgaaatccgttgttttttctgccggatacggggtatccagcccatcagtccggatgcggacacacggcgcggtcagcccggacggatgcgcggtcacacaaggctccacggcagtcacggtgccggatga

SEQ ID NO: 281811 - DNA, 1422 bp, Morganella morganii
atgaatcagcaacaacgtattgcactgtttgtattagtcctcgccgggtttgtcaccattttcgatctgtttgttgtcaatgtggcgatagtcagtatcgaacgcggcttacaggccaatttcactgaactgacaccgattattgccgggtatgaactggcattcggccttctgctgatcaccggcgggcggctgggcgatatttacggacgccgccggttatatcaggtcggaatggccttttttacactcgcatcactattgtgcgctgccgcaccgacagccttattgctggtgattgcccgttttatccagggactggcggccgcattactgttcccgcaggtgtatgccggtatccgcctgaattttgatgaaaaacaggccggaaaagccttcggctggctgggcatgacgctgggactggccgcgattgccggtcaggcactggggggctggcttattaccctgaatctgtttgatatgggctggcggctgatttttctggttaatctccctgttggtattcttgctctggtattgtcccgccatttacaggagggacgcgctgcgggcggactcaccacggactggctgggtgtgctgttatccgccgcaggtattaccgcatttctgttaccgcttctgatgttaccggtgtggggtctgacactttccagtaccggattgctgcttacgggaatcgttctgttgttctgttttgtccgttatgagcagtatttatcatgcaccggacaaacgccgctgtttgatattgctgtactgagtaaccggccatttgttaccggcaccggcgctgtactgtgtgtctatgcaacctcatccgcatttccgctgatactttccctgttactgcaaaacggtatgggggctacaccgctggaagccgggctgatttttgtgccgtccagtatcggctttgttattgcctcctttatcactccacgaatgactatcagactgggcgaatcggtgatttattacagcgcatcagggtatgccgccagttatctggtattaatcgccgggctgaatctcctgccgcaaagcaccgcaaatacgatactcagcctgtttctgtttttggtcgggttcacacagggcatgattatgaccccgatgctgaacattgtgctgtcccgggttacaccggcacaggccgggatggcatccggactgacgtccacgttacaacagattggtgcggcaactggtgcaactgcggtatctattattttacagttttcactccggcacagcggagatactgtactgttatccgcccctgccgcggtttacagtatcagtctcgggttcaatgtgctgatggctctgtgtgccgcatatctgatttatcgcctgacacacgcccggcagccggaaatagtttcgtgtctgtag

SEQ ID NO: 281812 - DNA, 216 bp, Morganella morganii
atgaaaaaccgcattttgatagtgaccacactctttttatcttctgtatcacctgccggcctggcgaatgatgtgcgggtcagtgtgacgcatccgcaaacagtccgttctgcaccggtcattactctgccggggaaatttgtggcgaaaaatgaaattgctataggctcgccactgcaacaacagacggtaacggcggtgtttgcgcggcactga

SEQ ID NO: 281813 - DNA, 930 bp, Morganella morganii
atgaaataccaaaatgtgactgacacgcccggtgagaattcctatttcctcgtttttaatctgacagataccccgcaaacgcgggagacggttgttacgctgtgtaataacctgtccggtattctgcgcagcatccgtaaccgctttccgaaactggaagtcagttgtgtgatgggattcggggcggatgcgtggcaaaaactgtttccggatgcgggcaaaccccgtgagctgaatacctttgaagcgattaaaggaccgcgttttaccgccgtatccacccccggtgatatcttctttcatatccgcgccctgaatgtgtccgcctgttacgagctgggttccattatcagccgtgctctgagcggtgcagtgacctgtgaggatgaagttcacggcttccgttatatggacggacgcgcgattatcggctttgtcgacgggacagaaaacccggaatttgaggatgagcgcaaagattatgcggttatcggcgacgaagatccaaaattcgccggcggcagctatgcttttgtgcagaaatatattcacgatatggatgcctggcagagcctgagcaccgaagatcaggaaaaagtcatcggccgtcataaattcaatgatgtcgaactgaccgatgagcagaaaatcccgggctcccacaatgtggtgaccaatattcaggacgaagagggcaatgacctgaaaattgtccgcgccaatatgccgttctccaacccggccaaaaatgagcacggcacctattttatcggctacgcccgttatttctccaccacccgcagaatgctggaaaatatgtttgccggaaaagagaccggtgccaccgatgaattactgaaattcagtaccgccgtgaccggtacactgttctttattccgtcaccggctatgctggatgatgttgaataa

SEQ ID NO: 281814 - DNA, 360 bp, Morganella morganii
atgaccggtattgtccgtgagtggctggagcagggagaagccgaaaaactggagcagaaaaagcgccgcgatgccaaagcccggcaaaaaattgtcagccggatttttgctgatttacctcatatcgcacatccgggcggttattttttgtggatcccgttaccggaaaatgtgcgctgcgatgcggttatcagccgtctgagagcggccaatattgccgtcagtccggcggaatcttatgccgtaacccgcgatatcccgcaggctatccgtgtggctgtcagcacactgccgtatgatgacctggaatccgcactgatgacagtcagagacaccattttttacctgatggatttatga

SEQ ID NO: 281815 - DNA, 615 bp, Morganella morganii
atgaaacttggttctgttacagcatccccggcaccggacgtttcgttttcaccggagaatttagcggaatgcagaaaaacttcagatgtcagcctgatccgatactgtgaaaatctcgtatttaaggacagtaacttcactcagtttttacgttttaatggtgcgatgggtttagttaacagcactgattccgggcgcatactgctcaattgcattgagacattattacaatttaaatcagaaaagctgatggtgtatctcgcatcaccggaacttggtactgtccctcaccaggttaaagatgcagaaaatggtcgtggcacaggtgctgatttgcattgcaattttaatctggcagagcatcggaacggcgaaggtttgagtgaaaaacaatttcatgctgctattttgtatcatgaattagtacatgtcctccattgtctgcggggtgaatgtatacacgatatttctgcagattcttctgaagatctccttccgtcttacaaagaggcagaggaagaccggactattggtatcggtgctttcacatccgaagctatctctgaaaacatttttcgcacagaaataggtgttccgctgagaaattacagataa

SEQ ID NO: 281816 - DNA, 2121 bp, Morganella morganii
atggcttacgcacataaaaaacactttaataaaacattactggcattattactaacttcacaaagcacactggcattttccgcaatggattatgacgtttcaaagataaaagatattggtcagtctgctgctatatccgcagatggccgtgttattgccggcacttacgaaatctcaaatgataattaccgtccttttattattattgatggtaatgcagttgacctgagtaaatatgcagccggaaataacagtatttatatctccgggctttctgctgatggtaacatcgctaccggttatatcgttgatgtaaataacagatcaaattctgaaatgtatatttatgatgccaatactgacacggtgaatattcctgatcagcaggcatttaccagtgtcgcttcccagggtatttccggtgacggtaaaaccgttgtcggtattgcagacgaaaaagctttccgctttaccggacagggcggtattacattattagatccgtcagaaaccgcaacctccaccgccaacggcgttaattatgacggcagcgtgattgtcggccgctttatcagcggcagcggtcaggcatttaaatataccaatgataaaggcatggtttcactgggcacactgagagaaggtaatgcgggcgaatccggcgctaatgccgtatccgctgacgggcttgttaccgtgggctggtcaaatatcagtgaatatgaaacacatgcaatgagtcataccgataaagacggtatgcgtgatctcggcaccctgaagaaagataacagcggctattccagtgcctcatctgtttcgcatgacggacaatttatcgtgggctcatccgataatgaagatggtatcgcacgtggttttgtctacgtttcaggtgaaaaaaagatgtacgaactgaaaccaatacagggaagctttgaaggtgaatccagtgcggaagccatttctgcggatggcaaagtggtcgccggttatgttcagaatgacaataatgaaacaaccgctgttttatggaagctggactataaaccaccaatgaccccgctggagccgtcaaaaccggttgacccgactaaaccgctgactccgctggagccatcaaaaccggttacaccaactgaaccactgacaccgcctgagccaacaaaaccagttaacccagcatcagatcctatttatattattaaaacccgcgatacgttgacgaaaatggctgacagcaattatcaaattttggatttataccagactgcgctgtataacctcgcggaaagccgttgccagatgggtgacgacaattactgcgccggtctgttcacccaatacgataatgttcaccaaaacaaccgtgtagctaccggggtatttggttcattccgcttaccggctgaaaactggacactgggcgcatcactgaattttgccgtgaatacccgtctggccgatggctacgacacccgcggcaataatcatccgggtgttggcgcatggttgcgttatcaggaaaataaagacaattccggctttaacagtgaactttccgctgcatttttacagcaggatctggaaattacccgtcaggaacatcttggtacagaaaacggaaaaggtaattctgatatcaagggttactatgtgaagttcaccaccggttatggcattaccgtcagtgaaaatactctggtgacaccactggctgccattaaatatcataatgtcacccgtgccggatatacagaatcaaatggtatcgatttcccggcgacctatggccgtgccggaaataaaaaccttgatttacaactcggcgtggatttaaaacatcagtttaataagagcacagaactggatgcaggtattggtgcggatattaaactcagccataaacgcgatgcatttaccggccatattcagtatgtgaacgatggtgcttatatttatgatcgcggagacagccagagtgtaaaaccgtatgcccgtgccggtgtgaattactttatcactgagaactccactctccgcggcgatattggttatcacaccacggattaccgtaatgatggcttacaggtgggtctcagctattcataccactggtaa

SEQ ID NO: 281817 - DNA, 180 bp, Morganella morganii
atgcaaaatttcaaaacaacttatgaagataagatgatctgtttttcaaagaaaaaagtgatgttattatgtaagcgtaataataactctggatggtatggtgatatttttaatactaaaggacattttttatggcatattctgtttatttggttttatgaggtaagaatcagggactga

SEQ ID NO: 281818 - DNA, 864 bp, Morganella morganii
atgataaaaatcgtccgttatatcagtgtgctgaccgcactcatattattctctctgcctgtcagggcggatctttacagttatattacccgttcggaagggaagccgacaaatatcgattattactacaccatttccgcctggaacccgcctctgcgcggcagtaccaacccgtgtaaaatcgccggtctgaccaacaaatgctatgccaatattaaccaccggcatgtcaacggcgacaagggcggtattgcggatcgtaatgataaaacatttaaccaacgctgccgtaatatggatttaaatacactgcgtgatggctttgaggtctataaatatatttatgacaactgtttcggcggattaccctacagcggttcaaccaaccacatcggaaccgcgatccgcaatgaatgtgtcaccctttttctgacaccgacgcccaacggcggtaacggcgatatgtatccgggtgccatttgtggggtgtccccgcctccggggggaatttgcagctttgatctcgatcgtccgggcgcagtgctgaatcaccagaaagtggaggaaaatgccattaacggtaaccaggcatctgagtatctgacaatgaaatgcagtaaagacacgactgtcaggatttattccgtgaccgactcaagcgcccgtctgagactgaaaaataacctgtatacccggctgacactgaataactatctgcttgatgcccgcagcggcggcgtaccgatctacgtgcgggagggttatccgaacacagcgctgctgaaaagcacacttgaaacaaccggaccggtagagcccggttcattcttcggtaatatctccatcattatgactattgactga

SEQ ID NO: 281819 - DNA, 489 bp, Morganella morganii
atgcgatttttcaccaccgcgctgcttctgaccaccatcaccgcaccgggatactcatttgcggccgcacacagcgcctcggatattctgatctccggaaaactggtctcgccgccgccctgcaaagtgaacaacagcgaggaaattctggtcgattttcagcgtattcagataaagatgctggagaaatccgatatccgcagagaggtggatattccttttgtctgtgagcaggaatccggaaattttaaatattatctcaccgttgacgggccgcgggcacagttcaataacaagctgctgaaaaccaaccagaataatctgggctttaccgctgaactggccgggatgaaactggatttaggaaaagcgcaactggtgaacagccgccacctgacattcaccattgtgctgaccaaaaacccggacggtaacgtcacaccgggcgctttcagcggtaccggcactgtgacaatggagtatttctga

SEQ ID NO: 281820 - DNA, 492 bp, Morganella morganii
atgacactgaccatgcttttccgtaccggctgcgcggcactgctgtgcctgccgctgatggtctccggcggttcttatacttatatcgatgtgtatgtcgtcggtgaaattctcgcctctccctgcaaaataaatcagggaaaaaatattctggtgaattttaaagacgtgatcaccacgaagattgataacgacaattacagtgaaaaactcgattacctgatcgagtgtcaggataaccgcgcccgggggataaaaatgtatatcagcggtgcttcatcctccgtcgacagccgctacctttccaccagcgtcggggatctggcggtcaaatttcaggctgacaaccggttattgccgctgaatgagaaaataactgttcagtatccggttcagccggagattcgtgtcgtactggccaaaaaaccgggcgtcaaactcccggccggtgatttcagtgcaaatgccactatccatattgagtatgaataa

SEQ ID NO: 281821 - DNA, 282 bp, Morganella morganii
atgcccgatatcaccccgctgacacgcacagaaagacaaaagaccgcgatgaccttcgcgactttattaaaagatttcaaattgcctattcatgaagataataagcaactcaacaagctgatgaatgcattacagtcaggaaataaagacaccgccaatgcctacgatatggcgatgttacaagcctgttcctcatcactgaatatcaagtgctcggcactctcagcgatgatccgccagcataaggaaaacctctcaacaccgatcggcaatatgcgctga

SEQ ID NO: 281822 - DNA, 1062 bp, Morganella morganii
atgtcaaaattatacaacataataacaatgggcgattcatccggaaaagaaataacattgccttccggtaaatatcatattaataatatcgatattatcgaatccggtgacgcactgattcccttgtcactcccggtgccggattcatcactacagtatattgaggctgaattgcatgaagaccattattgtgtttcctgtatcactcacaacaatgaaattatcacgacagaagtcggctataacgcattattttcctatcagggaataccttttttcgccgtaaaagaacaacaggatacctggcatgaaagcattctgtctgtgacccaaaagaccgggacacaccgcagcaggttctccggacacacccgtttttatgctgtactgatagtatcggtcctgctaacagcagggttaatactcctgaaaaaccaaagcggaacagatacacaaagccatacgataagttacgaaaatattatacgcagctatataaataacaatgaatacattataaaagacaataatatccttgttttttcacccaccagaagcggcattgccggactgaaaaaagaactgccggattatactatttttgaggttaacaaaacagacgcaaagattgataaaaatgatattatcatcatgcctgattttaataagagaaaagaaatcgtttatatatatcaagaaaataaaataattacgactaaaactctcaatctccctgatgagttaagagatgacattactatcagggcattatcattcagtgatattgttaaattaataaatgaccggttcgatcaacactcaatccggtattctgtaaaaaaatcaggaaataccatttggattcacgcagataaaaggaaagacaaggaaacagagactattattaaggatatcaacaccacgatattctcagcaccggggaatacactggtacagtacagggaaatccgacacagcgaaccacgtcccggtgtctacggaacagataattatacattactatctgatagtcatatacattttaatttttctgataaataa

SEQ ID NO: 281823 - DNA, 858 bp, Morganella morganii
atgattaatattgaaccgtgttgcagtgatacggaaccggtttgccggggggaaggggttaataatcaggtggttgattttttatcggggataataaaaagaaaattaaaaaaacaggacgacaataatatttctgaatgtttttttaatcagtgtcaatatgataataaatactatcatgggaatatacttttctctgttcctgaggtaaaaaacagagattgtcacgatcccggaaattatgatattactctgatgtattcatcacctgataaaacaaaagacactgtattcaagaatgatatcagtcaatatattgtctgcaaaaatacgattgctgaaccatctgatgtgcctattgatactcatgctccggataataccactcaggataataccactcaggataatacgatagagccggaagaaacaggaaacatgccggcagaaaaagaatactatcccggtactgattgtggtgatacaaacagcattccggagcagggtattgcggcaacgctgccggaacagcctgtttttataaatcatcctctgtcaggggtaattccggaaagagagaaccactcgttgcggcattatgaaccggaaaaagcagctcaggaaaaaacatctcagacagtttatcattccgggaaaaatcagctgtctccggaattcagcagacctgattattattgttcttatcatttcagacaaaaatatcagccaccggagccggtttatatttacagagataatccgggggtgtttaaattagaaacatattcagaatccctgaagcgacgtctgaaatcagcagtaaatataaatggaattgatgatattgatataatataa

SEQ ID NO: 281824 - DNA, 870 bp, Morganella morganii
atgcactatgatacccaccagataatggattatctgagctgttatctgccggagaaaaaagaaagtaataagagaacgattaaatgtaatttgattaatactcaaaacatattggaagtgttaattgatgttgaatcttttctctctgatctgattggtaataatacgatcccctgggaaattattccggaaaattatcttattgaactactgaatgagaataagaaagagatccggctgccgtttttttcagcagagagttatttccctgaattccggacagaaaacattgctgttaatccaacccgtaaactcgctttccgtcagggaaatattgacttcattctgattggcgcccggggccggtttgatatcagcagcctgccgcagacgccggatcctgatgtcccggtaagtgcggggatttatatcggttcaacccggacattcaccggtgtgattcagcaaatcaatgaaggcgatatccttttcattacacaataccagcagtttctgagagcaggaggctattttcagatgacattgaagcaggagcaggagcaggagcaggacgagacagttatcactgaacggggaattgtcccgcaagcgccggtcaccccaccggaaaccaccctttttgacagccgcagagtaccggttcaggtggattttctgcagtaccgcagggtgtttccgctatcggaactgatggcgctgcaaccgggcgataaactggcactgccggcggcggataatcatctgatcacgctggaaatcagcggccagcgttttgcacagggggaactggtgcgtatcggggaacagtacgccgtggaaattcatcatatctttcataagggcggatga

SEQ ID NO: 281825 - DNA, 1500 bp, Morganella morganii
atgaatattagtataaataattcatcagaggttaatagctatcaatccgttgctgatgaagaaaatgactcactttctgatgaatatcaaagtctggagaaaatatatgaagtattaattcgtcatggtgaagtaaccgacagggaaagacgacttcatattgactggtataataaaataatcaataatcataataactcagataaaattaaaaaaagttcatggttggattgtcagtttatttttttatcagaaaaaatagatgccattataatgagtggtaatgatgttattaatacaaatgaacccattttaaatgttgaccataatgctattatgccattttatctggaacttgaaaaaataaatactatcttaacgaataaagatacgacagagaaacaggctatcactgcgattgagcaatataatgtgttaatcagcgagtatcaaaatatcaggatcctgacaccagaaggaaaaaaaatatggcgtaacgctatggatattaaagaccatattgatgactaccttatcagacgggaaatgattacattcggttactttgttgaccgtatggatattgcctcaaagtatagctataacattaatgttaagtattaccgtgacggcatgcagaaatacactaagttctatgaagaattggcaaagaaactaagttcatatggtgaatatatggacgggactgaggatgacggaaaaaaagtcaggataaaacagcatcgtttttatctggatctccagaatatcctgctggattattatcctgctaacggaaatctcgaaaacacaaaaggtgagaattgttctttatataagggacagtttgaaatagtcataggaaaagataaaaatgattgtagtatctatgtcgacggtgcgttgattgattccggcatcagctatgacaatgcctacaagaagatgtccttttttttatctgcctataaaagacctgcaaccggaacgcagataataaagaaaataaaaattgatgagaataaagaaaccggaaagccacaaaggataacagtaaccgccgatgtcattgcatatcctggtgcattaatgcgatggattgaaatagatcttaaggatgaacatatcagggacataaatggttatgctgaaaaatcattcgctgatattgcgctgtttgataagattaactgttctgatataaataaaaataatgagcaggaaaccttaaaaataaatgaggtatttaatcgtgaaatgaataacagttatatgaatcagagaaaggggcaggagaatgctatccgggttgaaattaacagtaaacttaattcatataatactattattgatggtataaaaaaagaattacagatgacgctggatgaatactctcagcgttataacacaatcaatagtaattacgataatatgctcaggaccattacaacaatgatcaatgaattggctcaggaacttaaaggttttctgcggttttaa

SEQ ID NO: 281826 - DNA, 1704 bp, Morganella morganii
atggatgttaaagctataaaagtaaattattcagacatgccggatattcaatcagaaacagttaagcagactgaaagtaagtcctctgttgatggcaataaaaaaggaattcacccgcaggcattagttcgtgaattaggtgaaagacataccggagatgctaaattaaaaccggcgttaaataaaagcagtcacaggagtaatgacattgcggcaaaaaataacgttacagtatttgaatctctggctttgctatcagatgttctgtccggtgagaaaaatatcagcagaaattcacatgaacatttcagtaaaaaaatactggacggaatgtggtcaccggaaaaagagcatggtcttataaagataatcaacgaacattctgatttactggtgaatcaccttgataaaatagctgactattatttcaatatgttaagtcatcctgatggcatggattcagcttcaaaggaagctgtgttcggtgataaaaccataaaattcagctcgaaatctgaattgatttcatttcttaaaactaaactggatacagctgattttctgaaaaatatggacagtgcagaaaattgtgctgataaaacaaagttactttttatatttcatgaaaaattaatgactttaccggtgatgaaagatattaccgggctaatgttatctgaaaaatcggaatcattaaaagccggactggatacgctgaataaggatgctgaaattcaggatatggcaagggaaagcctggaaatggctcagaatctgatttctgctcaggggaaatcaacaacagaatataataactctctgtcagttctgatggggaaactggctgacttacgtgacagcatttcacagcgtaagctggaaaatgacaaagagctggcacagttacagcaaaaaatgtctcaactgaaagtagataaagatattgcagaaattgaagagaaagtaaaaaaggcagagcgtcttcaggcattatttaaatggctcggaccattactgacagcggttatggcgttgctgacagtattaaccggcgggttgatggcaaaagcactggctgcagttattgttatcatgaccattgtcagtgaaattgttaaagcagccggtggcccggatattatggcaaaagtgatggagccggtgacaaaactggtcgaagtcattcagaaattcattaaaagtattgtcatggatattgccaaagcactgggtaaatcacctgaggagctgaaaaagctggaaaaaaccatggaaatagtggcaatggtactggctgttgtcgcggtcatggccttatttatggcggtggcatctgttgccggttcaattgccggaaaagtcggcggacaaatagtatccgaagtaactaaagaaacaataaagcaggcctgggttgaaataaaagcgatgttaatcagaattacgctgacgtcaacgattgtgaatagtgccagctctgttgttcaggcagacttgaaagcaaatattacccgtcagcgtgcagacctggatttggatcttgaattactggacagaataacggaactgatgaaccagataatggcaacattctcggaatcacaacaagagcttattgccttaaatgaaaaaataagtaagagcggtaaagaatcttttcagaggatgaaagcaatattgcagcaggggccattggctgtttaa

SEQ ID NO: 281827 - DNA, 759 bp, Morganella morganii
atgaatatcactatagcaggtaatgtatcaccttcagtttatataccggaagacggcaccgtttcaaaagaaaaaacagttttaccggaggaaaaaattaatccggaaatggtcagtgttgttaccgggaatattaatcatcagcaggataccgttgcggaaaaagcagcatccggtgatttcaggccattattacaggacgttatcccttctttattatctgattatgacaacaagcggatgggggcgatcctgacattatgcaatgtactgatgcaggatgcagttaagcagcaggagcggcgtaattcactggaagagcaggttgttgcccaggcaaaacaactgaaagaactgaagtatgaagaagcggattaccaggtggcggcagcggttaccggggcaattgtgtctgttgccgttgcggtcgccggtgcagccatatcaatcaaaggcattaaccctgcaaatccgggggtcatgacggcgaaaggttatatggggcaggcaacatccggtttgtcacaaacgataggccagcttttttctcagccgattcagtctatgggcacccggttacagggtgacggcgaagtggtacggggaaataaagaggtattgctcagcgccatgtccgcacataataaagtatcggatgatcagaaagcgttccagaaaaaattgctggatatgttgttccgtgagtttgataaccgcaaggcaaccgcagaaaacctgatcaacaatatgaaggtctga

SEQ ID NO: 281828 - DNA, 489 bp, Morganella morganii
atgaatctgaaaccggcaggtattttgctgatgagtttgtttatggcaccttatgcggcggcggaatccggcggtttaccgccggaagtcgtgcagttacagcagcaggcacaaagtggtgaggcgcaggcgcaatatcagctggcagtacgctatctcaggggagatggtgtggaaaaaaatgaggcgcaggcggtgacatggctggaaaaatcggccgcacaacataatgcggatgcactgtatgtgctgggatcgctgtatgcacacggaaacggtgtgacagaagataagaataaagcagttgaattctatgacaaagccagagagcagaatcatccgggggcacaatacatgctgggaataatgtatctggaaggaaaatatgttgccccgaattataaatatgcccgttacctgataggtgaagcctgtaaaggcggggcagacggtgcgtgtgatgcatattcccgtcttccaccgccgtaa

SEQ ID NO: 281829 - DNA, 540 bp, Morganella morganii
atgagtatgaaaaaaattgttctcgcactggctgtttcttctgttgtggcaatgactgcgcaggctgctaaccaggggagcggcaaagttaattttcatggtgaagtgattgatgcagcgtgttctatcgatgcaaacagcctgaagcagactgttgaactgggcagcgtggcaaaagtgcagttagcgaaaggtggtaaatcaacacctgttgatttcactattcagttgcataactgcgataccacaagcgcaggcagcgcaaccgtcagttttaatggcgtgaaaggtgatacagcggaaggcctggataaagcattcagcgttagtggcccggctaccggtgcactgggtgtcgtcgtgacggataccggcggtaatattatcgagccaaatacaagctcatctgcattcacattaaatgatggtgataaccaactgaatttcaaagcgtatatgcagggcgcatcaactgcatcaaaagctgttgcaccaggcgaatttacagcaacggctgacttcgtgatggcctatcagtaa

SEQ ID NO: 281830 - DNA, 570 bp, Morganella morganii
atgacattcccgagatgtgcgcacgcgttattactggccgggctgttatcggccgcagtgagtccgtccgcactttccgcaccgcgtaaagccggtgatgagatccggatgaaaatcaatatttccggttcagtcatcgccaccgggcggtgcacgtttaaaaactcatcaccgcaggtgattgaattcggtgatatccgttactcctctgtttccggggtgaacaatctgagcggcagttacaaacagccgctcagcagtgacatgacatgcagcggcgatacggcagggaatacccgtttccgtctggagtcaaaaagcggcgcgccggtcactgatggccattctcagttattgccggtgtatatcagcaatgatagaacaccgaatctggggatcaggctactggtcaacggcaaaccgcaggatgtaaatacagattttgtcatggatattcagcacttacctgtgcttgaaacagaactgattcagttgcatccggatgacaatacctggcagaacggccagtcgatttattctcatgccacattaattatgagctttaattag

SEQ ID NO: 281831 - DNA, 504 bp, Morganella morganii
atgatcaaaatactaccctttattttatccccgctgttgttatttaccgcgctttcagcgcaggcggcacagatcggggatcagtcagtgatccgtttcggcggcacattaagggcaatgacgatttgccgtgtcaataatgacctgatgattaccgctgattttaaaaacgtcgggattaataagctggacacggaagtctacagcctgccgctcagttacacactggactgtcccggtattaatccggccaataccttacggatgatctttatgacatcccgcccgtccgtgtctgatccgtcggcgattgaaagtgatgtcagtggtttgctggtgaggattctgaaggacggacaaccgctgaaattaaacacattttttaatattgatgatgttacgcagcagccaaagctggaagctcagttggtgaaagtaccgggtacggatttaacacaatccccgttccgggccaccggtacgctggtggcggagtatctgtag

SEQ ID NO: 281832 - DNA, 1659 bp, Morganella morganii
atggtttattcacgcggtttagtttttttctttttgttctggctgaccggatcactggtttttatccaaaattcaggcggatatgggctaagcctgccacagaactgcttttcatgggcaatgatggggatactgatattctctgtcagtctctctgttatccggaaaaagcagtacctggttatcactccggcgttgcgcttgtttgctgccggtgtggtgatactggcgttgccgctgctgtatacccgtcctgaatggcggctgaccggcggattgtattgggccggagcagccgcaggactattattctatctgtgttgtgtacaactgaaactgaacaaagatcaaatccgttttctggtgctgttatggctgtcggcctgcatggcgcatgcactacttgtattattgcaactgacaccagcgggcggatggataccctggccggttctcagcaatcgtccgtacggtgtttttcagcaggtcaatctgctggcaacgtttttgtcctgtggtatggcacttgctctgtttctctttttgctgccggaacagcggcaaagcggcatcagccgggggatatcagtatctgcactgcttattatgccgtgcgttctggtattgattcagtcccgtattggcttactgagcgcggttatcactgcggtgatgctgctgttgtcagttggtacgtacagaaggaaatattctgctgttatcctgctggctggtggtgtgattgcgggctggtggcttaaaaaccatacacagattggcgtgatatcacatctgaattcagatcacgccagactcgaaatgttcagcagcacatgggagatgctgaaacagcgcccgctgatcggctggggggctggtggtttcgagtatgtgtttcagatgttccgggtcttgcagggtaaatccacggaaggtacaggggttgttattcacccgcataatgaaattctgttttggggcgcagaaggtggtgttgtggcattaaccggcctggctctgattatcaccggcggggggctgatcatacagagagcgtggctggcgttttaccggggaaataatccgctgccgctgacattgtgtctgaccatattaccgttattactgcatacccagactgaatatccgtttggtttgtcagctctgcattttgcactgtgcttattattattgtctcaggctgacagagccactgcttcaccggcaaaaacactagcgttaccatcatttttcagcatgatagcggccggaaccggtgcgggaatgatttgtataatggcaggagcatttctgacaggaattattttaactgaaacagagcaacagggaatgcaggatatccgggcattgtcatcggtaccggaatttgtgctgataacgcaatatgagcgggttgaatttgatcgtcatgtacataaattaatgcagtttaatcagaccggggagccgcgattattagcagattaccgccgttgggctgtaaattatttgaaaaaacatacggataaaaatgtatatatctccctgattatgattttgcattatcagggagatagtgaagctgagaaatattatttaaatcaggccggacaattatttccgcaggatatccgttttttctccggcaggttattataa

SEQ ID NO: 281833 - DNA, 297 bp, Morganella morganii
atgaaagttacaaatatcaatggtagtggtaataataaatgcaaatgcgataactggatcaagcattgggaaaaatttagcggtaaaaaagcggataagtgttgtgtgaaagggtgtttatctgctgcgacagatggtgctcatgttcagaaatccggtagtactgatagaagttggtatatcgtacctttttgccacgcacataatacatctgctaaagatacaattcttgagttaaaagatggcacacatcttgtgtcagctaatgtttctgaaacatgtggtaaaaatcagtaa

SEQ ID NO: 281834 - DNA, 933 bp, Morganella morganii
atgagaatcagtgacattcccgggaatcaaacttatgttaatatactcaggccaaaagttgatggaaaaacagtaaacccgcttcagtttgacagaatggcagaaagaataaattatatacaaaatacaaccatggaatttaagctgaacaaaaatacatttactatcgatacccgggcgttaagtaagaatttacttgaaagtatctgtaagttcagtatgccgctgaaaaaacctgactctgttactaatctcaattttattttacacactgaagaaagtataaataaagggataaaagaatggcggaatcaggaaaaaaccacctttatttctgcctttattaaccggacgattgatcagacatgcagggcaaactatgtgaaaatagggaaaactgaaaaagaaaatctgtttaatgagatcaaagagacattcttccgtacaacagaactgaattccggctgtgcgcagtcctctgtaattcaggcactgaacaatgaaaaatcactggcagaaaatatcagtaaacttgatatagataatacaattccggataagacagaagatatcatgttatcaaaaatccggaatatggtaacaatatcacctgatcattctgtcagtactgaagaacggcaaaatcagcaaaaagatctggctgaatttaaccgtcagtataaagctgcactggccggagaaagaaccgcaataagagcagatatctataattatatagcagagaatatatttaatactttcttatgtgatcaattttatggcggaaattccggtgctgtcgagtttaatcaactcagggagattatcagtgaaatggttctcagcaaagcagtaccagtcagtgaatctgcccggttctttttttcagaactcccgctgtcagttatcacccgtttacctgacggtaattaa

SEQ ID NO: 281835 - DNA, 741 bp, Morganella morganii
atgcctgttcagggagtacagcagcatcaggtatctgtacatatggaagttaattcgcatggtactgcgggtgcggacagccaatcgtcatatgtcagttcatccgggattaaatccgttttattaaatgcgtggaatgcggtgaaatccgccgtttccggtatgttgtcatcatttggttcgcatctcagcggacagcagggcagtgataaaccgggcagagaaattgtgatagatatgtcttcgcggccggcgctgccattaccgggtatggatgttcagcttgaaaatagtatttatgagagcagtggcgagaatatctatgattcagtttatgctgccgtatcagagcgtccggagagtctttacgcttgcgttgatgatgcttttgttcgtgagcttgctgcacccccggtcccgggctcaccgcgcccgtcattaaccgaatcgatttacagtgaaattgaagaaccgcagtatgaggagattggtgaagagcaggctcagacaccgccaccggtgaatctttcaacccatccgttattatccgggtcgctttacagtgaaattgaagaaccgctgtatgcgaaaattggtgaaggtcaggatcagatttcgccgccggtaccggattcaccacgtccgtcattacggcagaccttagaaaatgcattatatgagagcagcgagtctctttatgataatgcggagtggataaacgcggagaagaaatggggataa

SEQ ID NO: 281836 - DNA, 429 bp, Morganella morganii
cctgtggccggtatcagcattgacccgctgatcgcgctgccggtcggcggcctggccggtgcgctgattatggggcgcatccgtcagtccaatcactttattacctccggactgagccggatggcaccggtggcaattatgctgctgggaacaggaaccctggcggggattatcgccaactccggtctgaaagatgtgttaattaacggcctgacggcgtccggtctgccatcctatctgctggcaccgatttccggggcactgatgtccatggcaaccgcgtccaccacagcaggtacggcggtggcatctgcggtgttcagctcaacgctgcttgatctgggtgtgagtgcgctggccggagccgcgatgatccacgccggtgcggtggtgctcgatcagatgccgcacggcagcttcttccatgcg

SEQ ID NO: 281837 - DNA, 360 bp, Morganella morganii
atggacacactgcagcaagcattacatcaatcattacaggcagttcaggcggagtcttccccggcattgatacacagcgggaaattactgaattttgcaccgtcacaaatttcacagttgcaggatgacctgcagtgcctgtacggcaatccgctgccgcgttttcctgaacctcaggatatcagcggcaagctggcggcggtacaacgcctgcaccggcaaattccggctcagaacgggattttatggcagcatttccggcaaaatgccgcagaactgaccgccgcagatgatgccgcactgaccgatgtattactccgctggctgttcacccgcctctctgccgcagaccatacctga

SEQ ID NO: 281838 - DNA, 2709 bp, Morganella morganii
atgaaactcaataaactttcctttctgatactttccgcaatggggatgtcgtacgcctctgccggttatgctgtaacacctgagccgattcccgcatttgacttcagcgatgaatcaaaacgtattgatgatattaaaaacggcggcagctatagcaatgcggatgctgatgtgctgacgaatgtcagtgcaggaaccgaattcacggtaaaaggttataaatacctgaccggcattgacatcaattactctgcggcaaaaaaaccgaatctcagatttcaggatgatacccacctgatcggcacaaccatcgggcattccacaacctacctgggtgattcactcagacaaaccccttttgataacagcagtgttatcggtattacactgaaagggattgatgcggaacacgtcgctaacctgcaaatgtctaacggcaccacttcctacaacaccactgtggatgcctttggtgtgatggaattacgcaccgcatctgacaccaaacagcgggtgtcagcttataatacccgtgtaaataaagacggtaagctgactgtcagttataacgcttatgccgaaaacaacctgattgacggcggtgaactgacgattcccggcggttaccccaaaaataccgctatcgtaaaaaacaatattattcgcaacggtggtacacaaataatctaccagggaactgccatcaataactatattaccggtcagggtagttaccagatggcatccggcctggcagaaaataactatatctatgacggtggctaccaaatggtatatgccggcggggataatgatgttgccgctctgaatacaaccatttatcagggcggcacccaaaggataaaatcaggtactgccgaagataacctggtgtacggtacacaaataattaccagccaccagggtgactggaagaacggacaatggatttcctcagaggatccaacagaaacacagggtgatacccctactgctcttaattcaacaataatggatagtggtgagcagattgtcagccgtatgggtaatgcagaaaatacacttatcgatggcggtaaacagcatgtcgaagagtatgccggtatcagagatacaactatccgtaatggtggcagcaccgttattgataatggcggctattcatttggtaaacttaatgttgaaaacggcagtgtaaccctgaagtcaggcggcaaacattactggactgaagatttcagtaccggcgcgtatgcacaacacatagaattgatgggtagtgaatcattgctttacatcacacctgatgacaatacttcagagtctgttgccacgattagtacactgaaaaacaatggcgtgactatttttggtgatatatccggaaataaccacaaacgttatagccaattaaacatcaaagaactctccggtaacggcctgtttgtgatgaacaccagcctcgcggacggcagcggggatttcctcagtatctcggataaaacagacggtaaatttggtgtccgtgttatggattccggtaaagcgctggtcagtaacaccaccgacccggatcgctatcatctgatccacgccgccggcagtcagaacgatacttttaccatgaccaacaagagtgtggatctcggggcgtataaatattatctgacacaggataaagattcagcggatgaatggtatctgtcacccaccaaggagactgcaccggtagatccggatccgaaaccagagccggaaccaaaaccagatccgaaaccagctcctgacccggaactgcctgatctctctgagccaagtaaaaccgcaatgatgattgccaacgccctgccgcaaatctggcggagtgaactgagcacgctgcgcgcccgtctcggtgagctgcgcaataatccgcaggtgaacctcggtgtctggtcgaaagtcaccggcggacgccacaatatcagtaataatgaagtcgcttaccgtcatgatatcagcgggattgtcgccggtggtgacaaaatgacagagctggaaaacggctatctctggagcggcattgtcgccgggtattctcactcctccctgaagatggataaaaacgacggtaccattaacagttacagtcttggggtttacaccacctggcagcacaaatccggcatctatgtggatggtgtggtgaaagccaaccatttccgcagtgattatgacgccagctttaatgaaggaaaaacctccgccaacagtaacaccaatggtatcggcttctcggttgaaaccggtaagtacttcgaaaaagagaattactttatcgaaccgtatgccatggtcgccgccttccgcagccagggcgcggattaccgctacagtaatgagatgagcatcaaagccgatgccgcccgctcgttcagcggtgagctcggtgccaccttcgggaaaaatttcgtgctggaaaacggtacacaaatcaaaccgtatatccgtgtggccgtgaaccatgaattcctgaaaaacggtgatgtggagctgaataaacaagggaagcgaaccaatgatatgtccggcacgaccgggaagtacggcattggtgttgatgcaaaactgaatgataactgggctgtctacggcgaattcaactacgccaacggcagtaaacaggaaacgccgtacagcggtttcctgggtgtgaattaccggttctga

SEQ ID NO: 281839 - DNA, 2361 bp, Morganella morganii
atgactgactctaatttttcccaaacggctgcatttatatggtcggtggctgacctgctgcgtggtgattttaaacaatctcagtacgggcgcgtgatactcccgttcactttactgcgccgcctcgaatgtgtgttggccgacaccaaagaaaccgttgtggcaaaagcggaagaattaaaaaaaagcccgctgccggaagatgctaaagagaaatttctgttgcgtgccagtggtctgacattcttcaatgcgtcgccgatggatctcggtaagatggggcagaatgatattaaagccaacctggaaaattatgttcagtcattttcagcggatgcgcgtgaaatcttcgaacattttaaattcagcgagtttgtcggtctgctggatgatgccaatttgctgtttaaagttgttaagaaatttgccaccaccgatctcagcccggagaaaatttccaatcatgatatggggctggtatttgaagaacttatccgccgttttgcagagagctccaacgagacagcaggggagcattttaccccgcgtgatattgttaatttaacgacgtcactggtattcctgaatgatgatgatgcgttgtcgaaagacggtattatccgcacgatttacgacccgaccgccggtacaggcggtttcctctccgccgggatggaatacgtccataaacaaaatccgaacgcggtgatgcgtgccttcgggcaggagctgaacccggaatcctacgctatctgtaaagcagatatgctgatcaagggtcaggacgtcagccgcatcaaactgggtaacactctctctaatgaccaattgccgcaggatcagttcgattacatgctctctaatccgccgtttggtgtggactggaaaaaggtggagggcgagattaacaaggaacatgcggaaaaaggctttaatggccgctttggtcccggtctgccgcgtgtttccgacggctcactgctgtttttgatgcacctgatcagtaaaatgcgtgacagctacagtgcggacggtaatttaaccaatggcgggcgtatcgggattatccttaatggctccccgctgtttaccggcagtgcgggcagtggtgagagtgaaatccgccgctacattctggaagcggatctgctggaaggcattgtcgcgttgccgactgatatgttttataacaccggcattgcaacgtatgtctggatcttatcgaacaacaaatctccggagcgtaaaggcaaagtgcagttgattgatggcactcatctgtacggtaagatgcgcaagtcactgggttccaaacgtaatttgatgggcgaagatgatatcaagctgatcacgcagaccttcggtgactttgaggtggtggattccaccactctggaagcactgggtctggaaaaagcggcagaacaaaaatccagccgtggtcgtcagtctgctacggtcaaaaccgaaacgccgaaaaccttcgccagtaaaatctttaacagcaccgattttggctatcgccgcctgaccattgagcgcccgctgcgtttatccgctcaggtcacagatgaggcgattgccggcctgcgctttgcaccgaagccgtttaatgcgccgatggagcgcctgtatgaggagtttgcagctcagtggggtgaagataactatggtgatttctcagaaacggaagccgaagcacgcgccatcattaaagccgaatttgccgaactgaaagagaagcagattaaagacctgctcgacagcaaattgtggctggcacagcgcgggttaatggaaaaagcgcagcagattcagacggcacttggtacgcaggcgggtggtaagacgctggtgagtaatgatttcaaccagtttcagttgacgctgaaaggggctgtcaaaaaggcgggtgtgaagctggatgcgaaagaaaataaacaatttattgatgccatcaccacgaagaatcccgacgccgagccggtggtgaagaagacgctgaaagaagatgctcaaccgctgtacggggcgtttgagtacaacggtaaagtggtcgagtttgaacaggacggcgatctgcgcgataacgaaaacgtgccgctggatccgaaactttcaaccagcgacctgattgaaacctattttaaagcagaagttcagccccatgtcgccgatgcctggattaatgccgataaacgcgatggcaaagacggtgaggtcggcattgtgggttacgaaattccgtttaaccgccatttttatgtctatcagccgccgcgtccgctatccgagattgatgccgacctggatgcggtcagcgccgagattatgaagctgctgcaggaggtacactcctga

SEQ ID NO: 281840 - DNA, 1377 bp, Morganella morganii
atggcaaaatataaggtgtatccggagtataaggattcgggggttgagtggctggggagaattccgagtaattggctggttattgcaactaaatatattgctcaattaacgccaagaaaatctaccatagcaagaagtaaattttccgaagcctgtagtttcgtaccgatggaaaaactaaaattcaactcattagttcttgatgaagagagaattattaatcaagtttatgatggttatacctattttgaagatggtgacattttaattgctaaagttacgccgtgttttgaaaataaaaatatggctgtagctgaaggtttgcttaatggtatcggctttggttcttctgaaatttatgtactacggtgcggtgataaagttcatcgaaaatttttattctatcgattgcaagaagatagttttatagcaattgcaattgcagccatgtcaggtgcaggagggctaaagcgtgttccatctgagacgataaactcctacttactcggtcttcctggatggttagaacaagtaaaaattacagattttctcgatcacgaaaccgcaagaatagacaaccttatcgaaaagcaacaacaactgattgaactgctaaaagaaaaacgtcaggcagtgattagccatgctgtgacaaaaggattaaatcctgatgtaccgatgaaagattcaggtgttgagtggttgggggaagtaccagagcattggactgtacgtagattaaaacatacggcaagcctgcagtcaggaattccgaaaggaaaagatctaacaggtaaaaatagtatttcggtgcctatgcttcgtgtagctaacgtgcaggatggttatcttgaccttgaagaaatacataatatagatattgaaccaaatcaattagaaagatatttgcttcgtgatggtgatgtattgatgaatgaggggggagataatgatcaattaggccgtggtacggtctgggcagcacaaatcgagaattgtattcatcaaaaccatgtttttgcaattaggccgaaaaatatcgaatcagaatggcttgatatgcttacccgagctgcttacgcaaagtttcatttctatcgggttgcaaaacaaagtacgaatctagcctcgatttcatcaacaaacattaaagaaacgccattacttattccgcctactgaagaaagaaataaaattataaaatttataaaatatcaactaaaaaaattaaaatcgactgaagaactgagtattacgcaaattgcgttattgcaagaacgccgcaccgccctgatctccgccgccgtcaccggaaaaatcgacgtccgcgattgggttgcccctgatacacagaaaacagaggaggctgccgcatga

SEQ ID NO: 281841 - DNA, 3249 bp, Morganella morganii
atgagtacggacagcaccaaagagctgatttttcaggacgaaataattgctcagatgatcgataaaggctgggttaaaggtaaatcagacggctacgaccgcgaacgtgcgctgtactcgcaggatgcgctgacctttgtgcaaaccactcagccgaaagagtgggaaaaatttgccaaaatttatcctaccgataccgaacgtcacttcctcgatgtgctggtggcgcaactgaaaaaagcggatatcaatgctacggatatgctgtcgcggacttacggtacgctcggtgtattacgtcatggtatcaaaagccataatgcgcggttttccctgtgccagtttaaaccggaacacactctcaatccggaaactctggcgcgctataaacaaaatatctgtcgtattgtccctgagctggtgtacagcccgcatgcatcaaaaatcgcatatgaagaaaccggtgtaaaggcgaagaaatggcgtattgacctggtcttgtttatcaatggcctgccggtagcaacgcaggagctgaagtctgaatttaaacagacggtgcaaaacgcgatgacgcaatataagaaaacgcgtttgccaaaagaccccggcaccaataaacctgagccgctgctgactttcaaacgcggggcgctggtgcattttgctgtcagccagtacgacgtgtttatgacgaccagacttgatggcgataaaaccttcttcctgccgtttaacaaagggacccatgatggcggagcaggcaatgatatcccggaagatgagaatgattacgccaccagttacctgtggaatgaggtgctgttgccggagaatctgctgaaaattctcgccagttttgtgcatctgcaaattgaagagaaagaagagtggaacggcctgaaaggcaagaaagagagcctgattttcccgcgttatcatcaatgggacgtggtgaataagctgatcactgctgcggtggcagaaggcaccggcaataaatatctggttcagcacagtgcggggtcaggtaaatccaactctattgcctggactgcccatcagctctcccgtctgtatgataagaaaggcgaaaaacagtttcattccgtgatcgtggtgacggatcgtactgtgcttgatgatcagttgcaggatactatctatcagtttgaacatcaggatggtgtggtcgggcgcatcaataacaaagaaggcgatggctccaaatcggagaaactggctgcggcgctggaaaattcgcagccgatcattatcgtcaccattcagaccttcccgtttgtattaaaggcgattgaaaacagcgtcagcctgaaacagcgtaaatacgcggtgattgccgatgaagcgcactcctcacaaagcggctctacggcacgccaactgaaggaagtgctgatgaccgaagaaacggatgatgatgtggtgatgtcgtcagaagatattctggatgctaccgtcgccgcacgtaaaggcagcaataacctgaattattatgcttttaccgccacaccaaaagccaaaacgctggagctgttcggtcgtcgccctgatccgtctgaaccggcgtcaaaaaccaacaaaccggaagcgttccacgtttactccatgcgtcaggccatcgaagagggttttattcttgatgttctgaagaattataccaactacaaagtcgcttataagctgctgcaaacgctgggtgaccctgattgtgaagtggacagtaaaaaggccaaaataaagctgaatcagtgggtcacgctgcacgatcataatgtatcgcagaaagtgaaagtgattgttgagcacttccgcaagcatgtcatgcacctgctgggtggtcaggcgaaagcaatggttgtgaccagttcgcgtaaagcggcagtacgctacaagctggcattcgataagtatatttctgataataaataccagaaaatcaatgcaatggtggcgttctccggtgaagtcgaattcaatgaggacgaccataacagccctgagctgcttaaccagaaattcactgaaagcaatatgaatcccgggctgaaaggccgggacatgcgcaaagcgtttgataccgatgactatcaggtcatgctggtggccaataaattccagaccggttttgaccagcctaaactgtgtgccatgtatgtcgataaagcgctgggcggcgtggaatgtgtacagacgctgtcacggctgaaccgcatctacccggggaaagcgcagtcaggcacgtttgtgctcgatttctataatgaaccggacgatattctgaatgctttccggccatattatcagacagcagaattaaacgatgtcagtgatcctcagcaggcttttgagctatttgaaaaactctgggctgccggtatttttcagtggagtgaagtagagcaattctgtgaagccttcttcaccaaaaataaatccaatgcagccatcagtaatatttgtaaacctgctgtccagcgctggaagctgcgttatgtctccgcgattgacgcgtatgttcaggagaaagcgatatttgaacgcacgaagaaaaccggtgacgccgtgctgatcaccaatgcggaaaataagtttaaagagtgcgagaaagaaaaaagtaagctggatatcttcaaaaaagatctcggcagttttgtccgcttttatgaatttatgtcgcaaattgttgattacgatgataaggacttagaaaagttaagcttgtttgcccgccatctgcgtccattgttgcatgaacagcgcatcgaagaagatgagattgatttaagtaatgtcgaaatgagccattaccgcctgtctaagctccatgaacagaacctgaagctgcaggaagatacggaagactataaactcacgccggttaatgatattggcaccgcgaaaccaaaagacaagaaagaagagtttttgtcgaatattctggcacgtcttaatgacctgtttattactgacaatctcactgataaagatatgatcaattatgctttcactgtgcgtgacaaactatcggaaaatcaggcggtgatgacgcagatagcgaacaatacccgtgaacaggccatgctgggagatttcccgaaagctattgatgatgccgttatggacagcaacgacgcccagcaggagatgatgatacaatatctgtctaatcctgagctggcgaaaggctttgcccgtgtggtgtttgatatgttgaagggtgcatga

SEQ ID NO: 281842 - DNA, 225 bp, Morganella morganii
atggattttatgtttttttttagtgagtcaagtagtggtggttttaattatgctgctgttttttctttatttggtgtggttattgcagctattttctctattagggcggtcttaataaatattaaaagtaaaaatgtagatgaagaaaggataaaatggagggagtcaataagaagagtatcgaatgatttggtttcattggttgaaaaggaaaaaaggaaatag

SEQ ID NO: 281843 - DNA, 345 bp, Morganella morganii
atgagacttaatccatctgatgaatatgatagagaaatattagtattggctaaggaaatagttgatggtgacaacggaaaaaatgattcttttatcaaggttataagcttcatgttgaaatatgattgggagagatgtaagttagaatctcgcttttttaaggtgttttatgaagtgaatgttaatggatgtggaaggttgacaaaaaatataataatagatgataatgacgtgacaattaatattgtcatgaaaggatgtggtattattttatatcaattctttattttctgctcagtggtgattagcataatcagcactgtgatgtattttcaatcaagatga

SEQ ID NO: 281844 - DNA, 1875 bp, Morganella morganii
atgttatttaattacaggaattattcaaaaaacgaatcaatcagcttagttattacgtcaaaacgaattgcaatgtatgataacctttatatgatgttcggggttattcctgctgccggtattattactaagatacttgagcctctctcatcgtcactccattggatgcccggtaaaatgaatgtcagtatcccgcccggatggcgggaactgaaaccaacagaactgaacttacctgacagtgccgttgacagcttcggttattataaagtaacaagcccggtaaccggtaaaatcattccgtcaatggggctgcaatcccgtattctgggaaaatttgaccatcaggataaaatacaaaatatcgcactatcctggactggcaccaatgacctccttgatattccggattatacgcaattaaataatggtaatattgcaccgcacctcgagccgttactgaatgccgtaaaatcattggctgtaaaaaataatttatccgcaaaagatattattatcaccggaaatagtctggggggcggactggttaatatcaatgcgaaagccagagatacactggcgaacgggttctttaaaaacagtaattacattgcgtttgccagcccttatattcatgatgacggttccgttctgaatatcggatttgaaaatgatgcagtattccgtattgccggagatgcgaattccttttttggtgcgctttccgggatcaaaccctttgtggtcaatccggatcggcattataaatcgactctcaataatgttatctcttttgatgacccgcactctcttaacctgatcggtggcggaaattatctcgcgaagtcgttactgaatatcccggtcggctggacacctcatgttatcaatatgatcacagacagctgggaacgtattgcggcctctgagttttatccgctgatgaataaagacagtgttattatcgtcgataacttatcccgcctgatgcgtaatatcaaatgggtaggtgatatttatccggataccggacattatggtaaaccggcatttatcctcggcaatcagtacagtaatatgttaaaaggaaataatgcaggtgattatatttcagccggaccgggcgatgataaaataaaacccggttatggtgcagacataatcaacggcggaaccggaacagatacactgttattacatggctatatcaaagactgggattgttacaaatcaggtgaatttgtatttttcataccgaaagacggcagcggaatgaaaaaagtcagacatattgaaaaagctgaattttcatccgaacctgataaggtctatttcattaataatacaccgggaaataaacccgtactttccgttaaaccggcaggaaatatccgttataaaaaatcagtgacaggtactgatgatgctgatgacttaaccggcagtgccgttttttccccggcaggcaacaatacactgcacgccctgaaaaccggcagtctgctggtcagcggacaaggcaatgatgtattgattggcaacgatggtaatgatgaattgtacagcggcgaggaaaatgattttctgtacggaggcaagggtaatgatattttatttggcgggacgggtgatgacatttttcattttgacaaaaacagcggcggaaaaacagatattatggatttcaatcagtatgcccgtgaccatgatgttattctgtttacatcagatatatttaaagatgtgaatgatgtactgtctcacggacgtaattcgggcgggaatgttgttattacaaattcagataatgttattaccatccatgattatacattagatatgttagctaaaaatcaggtgctgagcgttatctga

SEQ ID NO: 281845 - DNA, 2808 bp, Morganella morganii
atgaacaaaacagaaagcacgttacatacaaaaacaccgtcggtgacggtactgagcaaccgggggctggcgatacgcgatatcgtgtatcaccgtcacccggatacaccggaaaaaacagatgagcgcataacccgccatcagtttgatgcgcgcggttttttacagcagagcgctgatccgcgcatgcaggcctccgggctgaacaatttccgctatatcacctccctctccggacaggtgctgcgcacagaaagcgcggatgcgggaacatcactggcactgaatgatgcggcagggcggccggtgatcagcatcagtcagatccgcacggataacgggcaggatgatcgcagccgggcggtgactcagactttccggtatgaaggtgcggattcagccgggcgtccgctgagtattgcagagcagatcgccgggcagaatgctcaggtgactgagcgctttgtgtatgcgggcaacagtgaggcggaaaaagcgaaaaacctggcgggggtttgtacgcaccattatgatccggccgggctgctgcagacggacagcattgcgctgacgggtatcccgctgtcggtaacccgtcagttgctgaaagacgcagataatccggatatagcggttaactggccggaaagcaatccgcaggcattattgtcagccgaaaaatacaccacacagactacggcggatgccaccggtgcggtgctgaacaccaccgatgcggcgggtcatcagcagaaagtcacttatgatatcgccggattgctgagcaccagccgggtgacggtgaaaggcggcgcggaaaaaatcatcattaaatctgtgacgtattccgctgccgggcagaagctgcgtgaggagcacggtaacggtgtagtgactacgtacacttacgagccgcagacacagcgcctgatcgcggtgaaaaccgaacatccggcacggaaaaatgtatttcaggatctgcgttatgaatacgatccggtcggtaatgtgttgtgtgtcaccaatgacgccgaggagacgcgcttctggcataatcagaaagtggtgccggaaaaccgatacacctatgacacgctgtatcagttggtcagcgccaccgggcgtgaaatggctaatgccggacagcaaagcagttccctccctgatgtctccccgtttgataaagccacgtacaccaattacacccgcaactatgtctatgatcgtgccgggaatatgacgcagatccgtcactcagctccggcgaccaataataactacaccacggatattaccgtcagtcagcgcagcaaccgtgcggtactgaaaaccctgacagacacgccggagaaagcggaagccctgtttaccccgggcggacaacagacacaactccagccgggacaaaacctgtcctggacaacgcgcggtgagctgcagcaggttacgccggtggtgcgtaacggtgccgccggtgaccgcgaaagctaccgctatgatgcaggcagccagcgcatcctgaaaaccgccgtgcagaaaaccggtaacagcacacagaaacaacaggtgatctatctgccggggctggaactgcgcagcggcaaagaaaattatcaggtgatctgcgccggtgttgccgggcgggcacaggtgcggctgctgcactggccggacggcaaaaaagatcaccagcggttcagttatgacaatctgatcggcagcagcggcctggaaacggacggcgacggtaaactgctgagtcaggaagaatattatccgttcggcggtacgtccgtgctggtggctgatgcggacagtggtattgactacaaaacccaccgttattccggcaaagagcgggatgcgaccggactgtattactacggctaccgctactatcagccatgggcaggccgctggctgagctcagacccggcgggaaccattgacgggctgaatctgttccggatggtgaggaataatccggtgacgttaagggatgatgacggacggagacctatcagtgaaaacttcagtgaagaaaacggtgatatggtttatggccttgccggtttcagaggaagatatatttcttccgcactggggcgtccgtttttacctgacagtaaagacgcacctgcatcgataattgatttatataataatacggtatccggtcaggtattgatgagtatcgatatgaaaacattacagaatttcatgaaatcaccgggtaaatatgagaaaaagttatcaccgccggctgatataaaggaccgtgtacagaaaagcagagcatatcctttgtgggacagttatttttctgctggtgaaaaaaatgagaaatttaatgtacactctgtttataaagaggtcagaaaaaatcccggaagtacgcaatatcatgaatggcatatgtcgggggcacaatctgcaccgaaacttctctggaaaagaggaagtaagctggggatagaaattgcggcatccggtggcggtaataaaatccactttgctcttgatagtttaaatacagaggaaattatcagtaagtcaggaatgggcggacagtctattactgccagtgaattgcgctatgcttacaggaacagagaacggcttggcgcaaatatacatttttacaaagatgataatgaggttgacgctccgtgggtatcaaaccctgaacagtggaacacgtataaacctaaatcattatcggcagcaggtggacaattagtccggcagcataccggatttatggctcgtatacgtgcatcactcagccgcactttcaggagaaattaa

SEQ ID NO: 281846 - DNA, 4635 bp, Morganella morganii
atgaaaaaagaacgctttaaactctcttcgtcaggtaaggtggccgcgtggatggcgctggcctttgtcacgctgaacagtgcagccgcagggattgtggcagacggcggcccgaacggccccggcgtttctcaggtaaacggaacggatattgtcaatattacagcaccgaacagtaacgggctgtctcataaccagtatcttgattttaatgtggataatcagggggcggtctttaataacgccctgaccgccgggcagtcacaactggccggtatgctggaggccaataaaaacctgaacggacaggccgccggggtgatccttaacgaggtggtcagccgtaacccgtcgctgttgctgggacagcaggaagtgttcggtatggcggcggacctgatccttgccaacccgaacgggatcagttgtcagggctgcggctttatcaatactaataatgccgggctgatcgtgggtaatccgctgattgagaacgggatgatcagtgcgtacagtacgctggacaacacgaactcactgacgatcggcaataacgggatcacgaccggtaaggtgctggatctggtcgcgcctgcgattaatgccgacggggagatccgcgcggcggcactgaatgtgatcaccgggaacaataccgtttccgctgatttgcagaccatttcagccggtgaaaatgcagttccgctggacagctattatctgggcggcatgcgagccgggaaaatccgtctggtgaataccgcacagggcagcggcgtgaaactggccggtaatattgatgctgtgaatggtttcgatgcccggtcacagggcgctttaacactcaccggcgcacaggttaccggcggggatatccgcctgagcggcgatacgctgcgcaccgaaggacaattgcgtaatgaacatcaccggacagaggacaaacgcagcgggcagtcggtcaccggcgaaacccgtaaggggcgctacacccgcacctcgctggacggcaaaaatatcacgctggtggcacagcaggaagcccggctgaccggcactgatctgaacgggattgagattgccgttcaggccggaaccatcacgctcgacagcgaccaggttgcacagtcagacacccgcaccacaaatcagtggaagatgtcgtgggaaaataacgaaacccgcaaagatgaaagtatccggcaggaaaccagcaatctccgggctgacggtgatatccgcctggcggccaaaaccggtgatatcaccctgaaaggggcaacactggcggcaggaacgcatctcagtgcggatgctaaaggcgatatccggcttgagggcgtgaccaactcccgcactcagacggtgtccggcaataaacgcaatgagacagcaaaactgctcagcggtacacacgacgatatcacgtcaaaagagcaactggtgaaaaccgaactgaccgcaggcggcaatctgggactgaacgccggtcatgacatccgggctcaggcggcacaggtacgcgccggacaggatatgatcatcaacaccggcaataatctcaccatcggtacgcaaacggcgacacagcatcagggccacaaggagaacgtgacatcctggggcggtatcggcggcggctcccgtgaaaaccgggccaccacggaagagacagcacacggctctgacgttaccgcaggcggtaagctctggctttccggcggtaacggcgtgactgtcaccggcagcaaggtgaaaggtacacaggacagcctggtgcagaccgggcagggcgcgctggtgattgaaaacggcatcagccggacggcaaaacacattgataaccgtgatggcggcgcgtttaacatcacccgcagcacccttcgcgaaaacagtgaagatacccgcattgagcgcagcgagctgaaatcagacgctgacctgcggctggccgggaaaaatgatatcaccatcgccggaagcctgattgaaagtgcaggcacactgaaaattgataccctcggtgatatcaatgtccgtgcggcacaggcacaaaaacagtcagagaaaacagaaaccacgctgaaaatcagcgcctatgccaaagaggatgaggacaagcagtaccgcgccggtctcaacatcaatcatacccgtgatacgcagaagcaggattctgtcacgcagcagggcagtgaactcaaaggcggcagtgtttctgtcaccgccgggaaggatctcacgctgaccggctcttcactgaccacctcacagggggatgcggcactttccgctgaaaatatcaccctgaacgcagcggataaccgtgagatccggacacagcagaaaggggaatcacacggcggtatttatctgaccggcggtatggataaactcggcggcgggctgagcggcggtcatactgaaaccggtaagacacaggagcagcatcaggcggccacctccggcacacaggtgcagggcaatctcacgctgaccgccggtaaaaccctcttgcaggagggcgcatcacataaggtgggcggcgcttatacggaaaccgcacaaaactcggagcaccgggcggctcataacagtgaccgcaccacggaaacccgcaaaggcggcgaaggcagcctcgggatctcactggattacagcaaagtctcccgtccgctggccaaagccggtgaaaatatcgcggaaggcaatattgccggggtggctgacagtaccgccgccaccggattgccggatatcggtgttgatctgagcggcaaaggggaaaaccggcagaccatcagcgaaaacgcacaggcgaaaaccacttctgtgaatgcaggatcggttgccgtgaacacaacggatcgtgttcttgatgaaggaacacagtaccgggcggataacggcggtattgcgatcagcaccggcgattatcagtcagtggccgcagcagatacacatcatcagtcggaatctgtgacagagggcaaaggaagcctgcgtgtggcgacatccaccggacaggatgttgcgatcagcgcggaaggcagcggcggtcatcgtctggcaacagagagcagcagtaaagcggtaaccggttcgctgtcagcgaaaggggatatcaccgtgcaggcagggcgtgacgcggcattgcagggtgatacactgcgcagtgaggaaggacacgtttctgtccgtgccggtgacaatctgacgctggatcaggcgggtgatacacacagcaaaaccgtcagcggttatgacgccggggcgaaagtgaatgtggaatctattaacctgaaaaatgccggtggtggcctcagcggcggacgtgaagtgtacaacgaaagcggcacaacggcgaaaaccggggtgattgaaggcaaaaccggggtggtattacaggccggaaacgacctgaccgccaacggtactgatgtcagcagtgacggggatatcaccgtgaaaggcggacacaacacccggcttaacagcgcggagagcacgaataccatctccggccaccagtggcacggtgatgtgcaggctaatggcggtaaaacggagaccggaagcaaactcggcggcggtgcggatttcagtatcagcaaacagtctgaaaacgtgactgaccagcgcggcggcagtctgcgcagcggcggtactgtttctgtttctgcggacggtatgcgggatgatgcgctgcacctgaaaggcacgcagattgatgcacaaaataccgcactgactgcccgtgacggcggtattgtgattgaatccgcacagaaaaccacggataaagccaaccggaatgcgggcggaaacctgaatatcggtacgtcccgcagcacagaaaatccggaaaccggctcacggcatgacatcagtgccggtctgaagggcgggatcgacaaccagcagacggtcacacagaaaaatgcgctgactgacagcagtaatctgacactgaacagccgtaatgacacgcggattcagggcggaaaactgacggcggatactgtcagcggacgtgtcggcggtgatctgatcgtggaaagccggactaacaccgaatctgttctgaaagttgacgcggatctgtcggcggcacataccaatgatgagggcagcagtaccacctcaaaactggccaatgccggtacgccgaagttcgcggatgacatcaaagccggcctggaaaacgggctggataaagcggcggattctgtgcgggaaaatgccggagccggagccggtaccgtggcggacaaggtgaaatccggcctgacatccccgtccgggatgaatggtaaggtgaaagcatcctttgaaacccgctccactgagcaggtgggacagcaatccggtctgaccgcccgcgaacagggtaaactgcgtaccggcggcagcactatcctgacaggtgcggtgctggacggtctgccggatagcgggaacaccgaaatgcgttctgtggcggtcaaagaaaccggcacccgcattcacggcgaactcccgctcaacgccggacaggctgtcagtgcggttaaagacgggatcgtaaacggaaaatccccggtcggtatttctgtcactaatgatcacagcagtgtaaacagtaaagtaaaataa

SEQ ID NO: 281847 - DNA, 1560 bp, Morganella morganii
atgaacagagtgctgcgtttaacgacagataccggacgggcagatttttgtctggcaaatcaggacacgctgtcagcattgctccgtcagcatttcccggaaaaatatcagacactcttttccggtgcgcaaacgcagagtgatggttcggttatctggacatcccccctttccgggcatccggttccgctgtcatccgcagaaggagcggaagcacaacgataccaccggctgctggcagaacgcctgaatgatatccgtcttcaggccggacaactgcacgataaaaaaatcatcacagacgaagaacatcagttactggagaaagcctcggtattaccggacactgacagtgtttttattataaataatcagccggttatcacctggtggccgcgcaccacaccactcccggttgcaccggtcgccccggttgtccctgccgcggcagccacggcatccgcagtggctgcaacctccggcctcagacgctggtggtcacttctgttactgctcctgctgctgttactggccggcagtacttttttatggatgaaaggctgtaacaacaccataccgccggttattatgccggttcctgtacctgttgaagtcacgccgccggtaccggaacctgtaccaaccgcacctgaaccgccggtggtcgtgccccctccggaggaaccgccgccggaagaaccgcaggtcattgaaccggtaccagcaccggttcccgtggtgctgacaccggcggagcagtgtctgcgggaaaaaatccacgcggaaggtctgactgaaaccgccgcagcagaagcctgccgtctgctgctttccccgccgccggtcactccggcgaaaccggtggttaccgctaaaacaccggctcccgaaccggtaaagcctgttcctgtcaggaaagtctgtccggcgaaacggaaaccggaagatagcccgcaggtctttattatttttgatacctcttactcaatgatcctgagtctgaatctgacaaaaagtcagctgcagaaaatggggaccgtcgtcgatgaaattccgggattcgatgcggagccacgacgtatcagtgttgcgaagcgtgcagtcagtgatctgatcaaacgtattccgtccgatatggggatcacgctggtggtggcctctgattgcggaaaaatccgctctaccggcaatatgaccgccgctcagagaccggaattacagaggatcatccgctcactcgagcctgatgacggcacaccactggcggattccattacccgggtcaataaatccatcaaaaacaataaccgcgatacggtggttattttaatttccgatggagtggaaacctgcggaaaagatccgtgcgcagcggcggcaagcctgaaacgcgcgcacccgaaagccgtggtgaatgtcgtggatattatgggtgccggtgccggaaactgtgtagcccgcaataccggcggtaaagtctttacggcaagaaatgcggctgaaattgcacgtaagatgcaggaagcgatgaatgattatatccctgagggatgtaattaa

SEQ ID NO: 281848 - DNA, 489 bp, Morganella morganii
ttgaaactgttacctttgctggcggccgcagccgccttacttctggcgggctgtgcatccacggtggaagagtgtgatccgacaaccggggatgtcagcctgatcaaaaaattcaactgtaagtattcaggtacttacgacaaacgcgttgatatgaaagagcagacactcgcgcatgaaaaagagctgaatacggagtttaaagcggcgctggcggctatcgagaaagagaaaagcctggttaatgctgatctgaaaacacagcaggccagccagaaggcactgaatcagtccatgaataatctgctggtgcaggccagagcaaaatcgaagaaccgctctgatattcaggcacggattaataccattgaaaaacagctgaaagagagtcagaactcgcctgagcagtcaacaatggaaaaacagcttgaactggaaaacctgaaaaaccaggtgatggatttacaaaccgacctcggtcttaagtaa

SEQ ID NO: 281849 - DNA, 693 bp, Morganella morganii
atgaataaaaaacttatcaccacaatatgtctcgtttttacactggctctggcagggtgtcagaacacaacccggaataaagatgttgatccgcgcttacagcagaacgacgacattgagttcttcagcaaatccgggatgacagcctgtgcggccggggcagcagccggggctctggcctgtcttgcggtcagcagcgacaaccggagcgtctgtatgatagccgccgccgttgcgggctgcgggattggtatcggtaccaacgcctatcttgataaccagcgtaaaaaatacgccaataaagagcagcagttaaacgccatgatttccgatattcagcaggaaaacaaacggctgcaaagtgcctcttcaacagcaaaagccgttattgctgatgataagcgcgcactggcgaaaatttccgaagacatcagtcagaaacatctggataaagcggcggcagagaaaaaactgaaagggattgatgccaatattgccgcactgaataaaacactgacatcgatgaagaaacgtcagtctgagtggcaggaaatttccggaaaaagtgcggaacggggtatgaaaacctcaaaactggatacccagatcactgagatgaaaacacaggtgtcatcactgcagcaggaactggacagcctttatacccagcgctctgcaatcaaaatcagctga

SEQ ID NO: 281850 - DNA, 1557 bp, Morganella morganii
gtgaaatctgaattatcactgataaccctttccttaaccctgctctgcagcagtatcagccatgcagcgccgtgggaggaaaaatttgtcaatccgcagccgttacccggtgatgtgacgctgccgttcccgtgtgaaggcagtatggttttccggcaggtgtttatcccgctgaaccagccgttacaggattacagcattaccctcggccgcgaaggggatgagtggggctatctggaacaaacccgctctgagcatatcgcgggcagtttcacgtccggtgacggcaaaggccgttactatctgatggcaaaatatccggtgaccgatctgcaatacgccgcgctgcaaagtgtattacagagcggagagtgccccgtgccgtcaaataaactgcggctgccgcacgtcagtatcagctggaatgaggcggtacagtttgccgatcagtataaccagtggctgcgggcaaaccatccggaagccctgcccgcagaggacggtgccaaaggttttgtccggctgccgaccgaaaccgaatgggaatttgccgcccgcggcgggatcagcgtttccgcttccgagttccgcgacacccgttttccgatgccggaagggatcaggaactatgtctggtctgccggggcgcagtccgccaacggccagttacagctgacaggcctgttaaaacccaatccgctgggactgcatgacatgctcggcaacgtcgcggaaatgatgtttgagccgttccggctgaataaactcgaccgccagcacggccaggccgggggctttattgtccggggcggcagctatctcaccccggaaagcgatatccgcagcgcctggcgtcaggaagaggcgtattacaacgatcaggggccggtcagaaataaatacaccggcttccggctggtggtggtctccccggcgctgacctcacgcgaacgtatcaaaaccattgaacaggagtggctgaagctgggcacagatgccccggcggcagataacaccaaacccggagacaacaacggcacgctcagtaacctcaccgctatctctgaaaaagtacaggatgaagctgtccgtaatcagctgaccggcctgaaaaatgaactgaaagccaatgcacagctgcgggatgaacagcgtgatcaggctatccgcacctcactccagctcggcgcattcctgtgcaccaaactgaaagatgacggcgaattttacgatcgcctggcaacactgcaacagaaaaactgcacggcagagacaaaagacagcacctgcgaaaaacgtcaggagcaattggatgaacacaagaaagcccttgatttcgtggtcagttattacgctgacaccttagtcgatatggcaacaacctacgatgcctcactggtaaaaccacaggcagatatagtccggcaaacaatggaggccagaggaaaatcaaatttgcatacgtatttgtccgtctatgagaccaatctggagaattactggaagaccggcaaggtgtccaaaacagaatggctcgaatcatgtaagaaacaataa

SEQ ID NO: 281851 - DNA, 1236 bp, Morganella morganii
gtgtctttaaaaaacaatagcgccgccgcccccggcttttcattaacagctgtgctggcctggcgggatttgctgtatgacaggaaagtcgccctgtgcattattttctccctgacctcggtcattgcaccgctgctgcttctgttcggcctgaaaaacggcattatcacccagttacacgaccggctgatcaacgatccgcagaacctggaagtccggatgatcggcaacggcagttatccgcacgcctggtttgagtctctcgcccgccatccggaagtgcagtttgttattccgctgacccgcagcctgaacacccaggcggatctgatgacagacagccgtcattttgccgccaacgcggaaattatcccgacagcagaaggtgacccgctgctggacggtataccggctccggcggataaccgcagcctggtgctgtccgcctctgccgcggacaaaatgcaggtgcgcacaggggacacagtacgcatggtgatttcccgcaaactcagcggtgtcaatgaacgggcccggcagacattcaccgtcaccgccgtgctcagcgacagccgcttttccagaccggcggcctttgtgccgctgccggtgctggtggcagccgaagattaccgcgacggctttcaggctcccctgtttgatgtgaccaccggaaccgccccgccgccaaggacacagtttgccaaaggccggatctatgcccgcagccttgatgatatttcgccgctgaatgactggtttaatcagcagcatatcgatgtcgtcacccaaaaaagtcagatagattccgttaaagcgatcagctatgtcctgaatgtgattttttcagtgattatgtgggtgtcgctgtccggctgtatcgcctcgctgattggtgcgtttttagccaacattgaccgcaaacgtaaagatatggcggtactgcggctgctgggcttccgccgcaaagcggtcacgctttatatcattattcaggcgctgctgctgaccggcatcgcctttgtcatcggcctgtctctctatctggcgggcagttctgtctttaccaccctgctgggcagccatctgcctgataacgcctttgtgtgccgcctggatctcagcgatatcctgatcgccctgtccgctgcactgcttgtcgccctgagtgtcgcctggatcggggcattgcgcgcggccaatattcaacctgcggagagcttacgtgaaatctga

SEQ ID NO: 281852 - DNA, 693 bp, Morganella morganii
atgttacacattgagcagatgtccctgacccggcgcgataaacagcgtgacttccgtgtaactctgccgtcactgacgctggcaccgggggaaatcggtgccctgaccggcttcagcggctgcgggaaaagcacgctgctggagatgattggcctgatccttcagccggacaccctccggcgctatcagctggatgcacagaccgatatcacggcagacgtaacggagaatgatactgccgtcctcgccggactgcgcgcccggcactttggttttatgctgcaaaacggcgggctgctgccttacctgacggtccggcaaaatattcagctgccgcggcaggtagccgggttgcccgcagaatcatcactgactgaatcagcaattgaccatctgaatctgcggccgctgctgaatcattacccgaaacagctctccatcggggagcgccagcgggttgcgtttatccgcgccattgcccaccagcccgccattctgctggctgatgagccgactgccgcgctggatccggtgaatgcgcagtcgctgtactcactgatcaccggcatcgtgaaggaactgaaaattaccgcgctgattgtcagccatgactggactctggtggacaaattcggctttgcgcattaccacgcttacacggaagaaaacggtagtgtctttaaaaaacaatag

SEQ ID NO: 281853 - DNA, 1953 bp, Morganella morganii
atgaacacattacggttatccggattattattcagcggcgtactcctcgcctgctccgtctctgccgctgaacaaaaaccgctgttacagccgggcaaaaccacgctgtatcagcgcgtgctgacctacccgggctgtgagttatcagagcagattgccgccaaaggcaaagaacagcctgccttcagccgcttttatgtctatcagcgcgagaaacagggtgatgcggagtggctgctggtcggccccgataccttcggcaaaaccagcggctggatgaaagcagattgcacctcggaatggaaaatgcagctgacgctctccatcaccaaccctgcggggcgtaacccgttattattcctgaaagataaggccacactggaaaatattctcaatagtgataagccggaaacgcagtacaaaccgctgctggcggatgtaaacagccagaaagccaatccggcggtgctggccagagagccggattatcttatcaatcagaaatccaacttctatctgctgccggtgctggaatccgatgaggcattcaccgaggccggttataaagtgagaatgctgcgggtcgcctcggtttccgctgccgcaaaaccagctcccgctaccgccggtaagtccgccgaagataatatgatgcagggattttccgcctccgtggtgttcgttatcgattccacaatttcgatggatccgtacatcggccggaccaaagaagcgattgaaaaagtgtatgcgcagatcgaaaaagacaagatgctcgataaagtcaaattcggtctggtggcgttccgctccaatgtcaaagcggtgccgggcctcgaatacagcagcaaaatgttcgttaatcccaatgacgtgaaaaacggcgaggatttcctgaataaagtcaaagagctgcaccaggccacagtgtccagcagcagttttgatgaggatgcttatgccggggtgatgatggctctggatgatatcgactggacacgctacggcgcccgttacattgtgctgatcacagatgccggtgccctgggcggcgataacccgctgtcatccacggggcttgatgccgagcagatccgccaggaagccgcctaccggggcgtggtgctgtacacgctgcacctgaaaaccccgtcaggccataaaaatcacacctccgcacaggcacaatatgaagccctgaccctgaatccgttcctgcataaatcgctttattacccgattgattccggcaacgtgcagaacttcggggtcatggtggacagcctggcaaccgcgatcaccacccagatccgcatggcttatcagggaaacgaaacggtcggcagcgcatcggcggcagatccgaaatacagcgccacgaaaccgctgctcgatgatgcccatgacctcagctatgccatgcgtctggcatacctcggcggaaaacagggttcgaaagccccgtccgtgttcaaagcctggatcagtgaccgtgatgtgttacagcaaaatatcccgacaaccgaagtgcaggtgctgctgaccaaaagtgagctcagcgatttaagcgaggtcatgaaaaaaatcgtcaccgccgccaatgaaggcatgatttcaccggacaatatgtttgccaatctgcgctctattgccgccaccatggggaatgacccgtcaaaaatcaaacagagtgatgcggtgaaactgggcgagctcggcctgctcggggaatatgtcgaaaacctgccgtacctgagcgaagtgctcgggctggatgaggaaacctggaaaagctgggacggccttgagcaggagaaattcattcgccgcctgaataccaagcttcagtattatcagaaatataatgaggatgctgaccgctggatctcgctggcacccggcagtgatccccgtgaccacgtttaccctgtgccgctggagaacctgccttaa

SEQ ID NO: 281854 - DNA, 1125 bp, Morganella morganii
gtgtttaatccagaattaaagccgttacagcccgccagtcccggaaacgcccggttaaccatccggaactgggacggtgccggtgaaaacgtcacattaactattcagcgcaatcaggatcgcaactacctgaatgacgaaggacactgggtcggcaacgcctttgagcaccggctttcactcatcccggacggtgataactatcagatagacctggataaacagtttgtcgatccgctggtcaccaacatacagatggcctaccggctgacattgcgggatgacgaaggcaatcaggatatcggtaccctgaaaattcacagcggcgtgcagagctcacaggcgcagggacaccaggaagccatcaaatccggtgcggtactcagcagtacagcaccggtggccgctgccgcagagcctgctcctgaaccggagtccgcagagcaggaagagccggaaattctcccggatgacctgatcgcagagccggacatattgcaggccgctccggcagatgcaccggcgaaaaagaaaaaatcaccggccgggatcattatcgccgtcattctgctgctggcagttgccggtgccctggtgtggttctttgtcctgaaagacaagacagcggaaataccaccggtgccgcctgttccggctgaacagataaaaccggcagaagagccgccggcggctgaacctgaaccacagaaagaaccggcaccggaagaaccggcggtaacagagccgaaaccggatcctgaaccggtcgccgccggtgctgaaggcgcgtgcagcacagaaaatatgaaaaccggcaatgcgctggcgtttgtccagagctgtctgaaaagccacccgaccgacccggccatcctcagcaccattgaagcggcggtcgccaataaacagtgcgatgtggctcagcgcctttacgcttacaaagcccaggcgggtgacgccaaaatcgcctttaaatatgcacaggaatatgatcctgacgtaaaaaccccgggcgaatgtttctctgcggataaagaaaccgcgatttactggtatgaagcggctgtccgcagtgacccgcagaataccgaagccaaagcccgtcttgacgcgctgaagaaatag

SEQ ID NO: 281855 - DNA, 2727 bp, Morganella morganii
atgagtatcacagacgaaaaaacactgacagagagctggaatgccatctgccagaacgcggaacaagccatagactggatcacgacggtccgggaaaatgccccgcgcctgaatacggaagctgacaacctcatttaccgcctgagacgcgggcgtaatatggcgaaaaacctggcccgtgcaacacaaaaacccatgtcagtcggctttttcgggctgtcacaggccggaaaatcgtatctgatctccgcactggccgccggtaatgacggcgagctgaaaacccggatgtccggcaaagaacttaattttatcgatcacatcaacccgccgggcggcggaaaagaagccaccggactggtcacccgctttacccgcgcggctacacagggcaatgacgactatccggtggaactgcatctgtttcatgaaacggaaatcgtcaaaattctagccaacgcctacctgtatgattttaatcaggaaaaaatagattacaccctggatgagaaaaaactggcgaatttgctggtcacgctggaacagcagcgcgccactgcaccggtcgccgggatcacccgcgacgatatggtttcgctgtgggattatttaaaacgtcatgcggaaaacagccataaaaaactggcgctgagctactggccgaaagcagttgaactggcaccgtacctgactgtcccgcagcgggcaaaactgtttgccattctgtggggggaaatcggggagctcggcgaagcgtatatccgtttcagcaccacactggcacaggtcggccatgcggatatcgtgctggcaccgctcatttcgctggtcaaagaagcaaacggcgtgctgatccaggaagacagcatcatgaacgtggatatgctggagcggctgaacaaaaacaccgattcgcggattgaggtctgcccggtccgcgaaggacacaccggcgcaccagtgacgctgtcggtggcggaactcacggcactgaccgccgaactggtgatcccgctgctggatgccccgaataaaacgttatttgaggatgtcgaactgctcgatttcccgggctaccgcggccgtctcggcgtggaatccatggacggcgtgcgcagcgccgttgagagtgatgacgccaacccgctcgcccagctgatcctgcgcggaaaagtctcctacctgtttgagcgttacaccgacaaccaggaaatgaacgtgctggtggtctgtaccgcctcaaccaaacagtccgatgtcaaagaggtcggcggcgtgctgaccgaatggatcagcaatacccagggaaaagatccgcagacccgcgccaggcgcacctgcgggctgatctgggccatgacgatgtttgatctgcgcatcacccagtccctcaatcacaatgaacagctgctgcgccagtcctggggtaaaggcgggatgatcaaaatggcgatgctggagcggtttggtcagttcagctggatgtctgactggagcggtgaaaatccgtttgataacaccttcctcgtccgtaaaccgcgtgtgccgacaccgtttattgatattcagaacggtgcggaaaccgcctttgaggatgactgcggcgaacagctccgcctgatgaaacggacatttgcagaagatgaatttgtgcagcgccatatccgcaggccggaagacgcctgggatgccatgctgacactgaatgacggcggtatgacccggctggcggattatctggaaaccgtggcccgcaaatcactgaaaacggaccgcattgccgaacagctggaagagctgaaaaaagacctgatccgcaatcacctcgaaaaatggtatcaggccggtggtgaggaagcacttgaaagcaaacgtaaaaattccgagaccattatccgtttcctgcaaaaatttccgtatttgcagggcgcgctgatggattatctcctgcctgcccgtaaagatttatacgagctgtatatgcaggaagaaagcgccctgaacagaatcagagatccgaaaaaagcggatgaatatgagaatacggcatcggttttctctctgggcagccatgaatccggcagcggcattgatttattcagtgacacgccggtgcaggcgctgacggcggagccggaaaccccgcgcggacacggttatgaaatcatctatccgcagaaagttattgccttgtggatcaaccatctgcgcagtctgccggataatcacgccctgctctcttatctgaatattgagcaggaaattatggtgttgctggcggatgaactgatcaccgccatttcccggctcggcgcggaaaaacgactgacagccgcactcgccggaacagaagccgtcggcgtgctgcgcgataaactcgcggaatcccaggtatcacgggtatataacgtgctcggtgattttattacctggtttcatttcaaagacaaagacaccgtctgccctgacagcaaaatcaatcccggccataaaatttttgagcgtccggatgacagcaatgttgaatgggcaggtgatgagcgtcttgtccgcttaccgtcaaccccggtgaattataccttcctgtttgtgtatgactggcttatcgcgctggataccgtgatccgtgaaaacgccggtcactctgccggacgggaaatcagtgctgagcaaaatgcgcagttaggccggatcatacgtttaatgacagcatcgtctgtggagtaa

SEQ ID NO: 281856 - DNA, 2991 bp, Morganella morganii
atgctggcacaactgattgaccacagagacaaaatcaccctgatccgggacagtaatattcagttcctggatttcggtttcacattaccgcagcgtaaagagtacggcgaatttacccgtaaaggtgaaaacggcccgttactgcgcctgatttatgatgaacgcaatgatcactttgtgtttccctccccgggcaacagtgcaccggtggtcaccgaaccggaattcagctgttcgccggaagaatcactgaaattgctcaatgatatctggctgccgctgccgtttttccgctttaacccgccgcgcgccttttcaaaaggcccctataactgggctcgggcgatgttccaccagttgccggaacccgatgaggacggtcatacccaccgggttgtggtggcgtttgatacccgtatcgaaccgctgcgcgaaaacagtgtttacctggcaccgaatgaggatgatgtccggtcaggtatcggattttccctggcttatatgggacacgaggcggaagatttcctcgacctgccgtgggttgacagctggctgcgcgaactgttcagtgagcaggcggtatcggttttaaaactctatcacgatgaactggaagaggcgctggccggatttcagcatcaggcgcattatctcaatctgctccatatcctcggcgaaaccattaagctgccggaagtcaaaatcaatgaaaccaaatcccaggagccgccgattgaggtcgatctgatcctcgatgtcggtaactcacgcacctgcggaatcatcattgaagatcataaaaatgatgacaaaggactgacccagctctatgaactggcgctgcgtgacctgagtcagccttacaatgtctgcaatgagccgtttcagagccgcattgagtttgctcaggcggaattcggcaaacaggatttttccgtcagcagcgggcgcagcgatgcctttatgtggccgaccatcggccgcgtcggccctgaagcaaaccgcatggcatcacagcggctgggaaccgagggctccaccgggatctccagcccgaaacgctatctgtgggatgacagtccttattctccgggctggcgtttcagccgggctttcggccagacagaaaaagagccgctggcaaccgcgattccgatgacctatctcctcaatgattacggcgaaccgttgttccgcctgaaagaagatgaccggatgccggtgtttacaccgaactacagccgcagctcactgatgaccattatgctgacagagattctggcacaggcgctgacacagatgaacagccctgcgcagcgcctgaaaatgagccatgccagcgcaccgcgccacctgcggaatatcattctgaccattcccccggccatgccgaaaccggaacgggtgatttttgaaacctgcacggaaaacgcgctggggcttatctggaaagccatgggctggaacccggcggacaacgacctcaccttccgtggtaatgatgaagaatgcagactgccgctgccgtccattcatgtgaaatgggatgaagccacctgcggccagctggtgtatctctacaacgaaacccagatccacttcggcgagcggacagaagcttttttcaaaagccagatccgcgatgataaccggcagaaaaccggcgattccgtgctgaaaattgcctcggttgatatcggcggcggtaccaccgatctggtgatcacccgctacaaactggattccggcagcggcagcaacgtgaaaattatcccggcgcagctgttccgcgagggatttaaaatcgccggtgacgatattctgctggatgtgatccgcttatacgttctgccagccctgcgttcgtccctgacagacgccggtgtcagcgacgccgatgccctgatgtcctcactgttcggcagcgagggactggatgccggtcagcaggttctccgtcagcagcttacattacagattttcagcccggtcggactgaaaattctcagtctgtatgaaaattatgatccgctgaaaaacaacgacaatattgataccaccttcggcgcctttttatcacagcacccgacagacaaagtcatccgctatattgatgatgcagtcagcaaagagctgaacggcgcggaattttccgtgctcaatgtgccgttacaggtggattttgcccggctgcacggcgagtttatttccggtcagcgcatcaatatcacctccggcctgaaagctctgtgtgaagtgctgcactattattcctgcgatattctgctgctcaccggccgcccttcccgcctgccggggattcaggcgctgctcaaattattacagccggtgccgccgtcacgcattctgccgctgcacggctataaaaccggcggctggtatccgttcaacaaaaaaggccgcatcgacgacccgaaatccacggcggcggtcggggccatgctctgcctgctggcggaaaactcgcgcctgctgaacttctatttctccatcggcaatttccggtcttattcgacggtgcgctacctgggcatgctcgatagcaacaatgtcatcccggatgacgtggtctattaccggggtatcgatctggataccccggattatcagctggacaacaacatcagttttgaggcgcggggcgcagtccgcctcggcttccgtcagctgaataatacccgctggccggcatcaccgctctatacgctgcggataaaaaatccgaagctggcacagaaactcagtgttgaaaacggtgtgatcaatgtgaaattgcagctcgcccagcagagagccgcgcgggatgacagcaaaatgaatccggaacaatttattatttctgaagtcgcgatggcggatgcatccaatgtgaaaccacgggatctgagcttcagactcaacacgttagccgacagcgggattggtgaaaccaattactggatggacagcgggagtgtattagtcaaatga

SEQ ID NO: 281857 - DNA, 1557 bp, Morganella morganii
atgaataaaaccttcttacgcagcggcaggctggaaaaccacctcccgataggagagaacggccaggccatttatatttccgccctgcagctcagagaaacattgcggctgcaaaaaaagaataaaatcgcggattgcctcgccattccgcagccgaacgaaaccggcgaacgaattgactggtattctcccgtcgacggccctgttatttcctgggcaacggcgtctgatgaagaaaaagaaaatgcatatgctcagctgaataaatatcagaatgaactgcttcagttcagccaaaataaaaagaattctgagaataaagaatatcagctgttcggtgcactgctggaaaaaactattcagttcccggatgacgaacatatatatattgtcggcggtcagccggttattacgttctggggttttgtgaatgccgggaaacaatcgcgcacagatcccgtggcctgcctgaaacgctgcgccaaacccgcaccggttatcagcgatataccggaaccggccgcagcggttaaaaaatcgccgctgcgttttctgctgtggctgctgccgctgctgctgttactcggtgctgcgctgttcttcctgcgcggctgtcaggataccgtgaccgctccggcagtcaccaccggcaccctgcctgccgccgatccggtgatccccggcaaagagccggtaacggatccggtcattaacaccagcactgaaccgaaaacagatccggttctgaccggcgtcagccgtgttccggtgacacaggtagtgaccggacgtatcccggtatccggtgttatcaccgatcctgcggtcaccggcacggtaccgggcgctgacccggcaatcattgatccggccggtgtcgtcactgacggtaatgttgttactgacggcaatgttgtcactgacaatggtgtcgttactgacaacggcgccgtacccggcagtaacggggtgaccgatccggtcacggacaccgcaggaaatccggtggttgacccggccacacaacccggtgccgcagataacaccaataccaccaccgataatacaaatactgccggtgaccccgcagcacagaagaatcctgatccgcaaaccccgggtagcaccgcagttccgccggatctcacccccgcagctgacaacagcgctgccctgccgccgatcagcattccgccggatgcggtgcgcagcggttcggtgcagttccttaacgggcagtggaaagccggtgcgggaattcaggatcagaaaacagggaaggcactgagtcttcagtacaacatgaataatgaaggcaaaggcgaggtcgtgatgacccgcagcgacggcgtgacctgtaaggcaccggtttccgccgccatgaaatccggcacactgcatatcgataacagctcacaggccggatgcagcgacggctcagcctatcgcatgccggtcattacctgtcagcccggggcgaaaaatatcgccgaatgtcagggtgaatacaataaaaaccaaaaattccctatatccatgaaacgggagagtaactga

SEQ ID NO: 281858 - DNA, 390 bp, Morganella morganii
atgagtaaaaatatgttagctatgctggtggtatctgtctgtgcattcggcgcaatgacggcgtcagccgccggattgtcagataatatgaaaacgctgaacgcgaatctgcagatcgttgaaaaaacagatgatgcggcagcactgaaaactgcattgaccgacatgcgtgctgcggcacagagtgccagagaagaattaccggccaaactgaaaggtaaagcggcggacagcgcagaagtgaaggattaccatcatggttatgatgttctgaccggacaaattgatgaagcactgaaactgacggaagaaggtaaaattccggaagcaaaagccatggctgaacaatttaaagccacccgtggtgaataccacaagaagtaccgttaa

SEQ ID NO: 281859 - DNA, 195 bp, Morganella morganii
atgtctgttatcgttgtgatactaccgtttgcatttgctgcgcttctgtttccggcatgcgttatttactgctgttttcacaacatcagccagtcagacaacagcgtcatttatatcaggatcctgattggtgtcatggctgttgctgccgcggtttatattctggtgatgatgaatcaggtgtttttgtcgtga

SEQ ID NO: 281860 - DNA, 552 bp, Morganella morganii
atgttactgacaaaatacaaactgtggcagataccggcagtagcatcactgctgatgatgtccgcatccgggattgctgccgatggtacaattaattttaccggtgagtttatcacatccacctgtgatattaaatttgataatggtacaaatattgctgaagtcaatttaggtacatataacaccaaagcactggcgaatgtgggtgatctgacagccggcaaagaaataaaaatttcattaactgcctgccctgtaaaagataaaaacatcaatctggaatttacggcgaacaataccactgcggatggtcatacttataaagtgaccggaaccagtgctatctctgccagcgatatcggtgttgctctgtttaaggataatgctcaggtatcacagattatccctgcatctactcaggtgccggtgaccttaaccgatgatgccggtaatgccactatttatgcctctttcaagcgtattcagaataatggtgcgctggcagctgataaagtgaaatcaacagccacatttaatattaactatctgtaa

SEQ ID NO: 281861 - DNA, 687 bp, Morganella morganii
atgctgaataaaataaaaactattttactgatgttaattattccggcagttgtgcaggttgctcaggccagtgttgttctggaatctacccgcgttatttatgatgagaacaaaaaagacgcaacaataaccattaataatccggatgatcagccttacctgattcagtcctgggtggggtctgaggattcagatgccccggaagataattcattttttattactacaccgccgctgttccgcctggatgcggagcaatcgaacacactgcgtattgtttatatggaggacagaggaaaactgccgaaagataaacagtccgtattctggctgaatgtaaaagcaataccatcgacagaccccaacgcaaaaaatacattatccatctcgattaacagccggattaagctgttttatatccctgacggtttatctcaggacgattttgataccgcattcagaaagctgacatttactgtttccggaaaccgtctgaccgttaaaaacccgacaccttattatgtgacgatggcaaagttggctatcggcagccacgaaatagaaaagccgggaatggtttcacctcagagtgaaaaatcatttaccgtacccggaaatacagccggaaaaataagctggaatgcagttaacagctatggcggattaaccgaaactgcaacgcagtaa

SEQ ID NO: 281862 - DNA, 2523 bp, Morganella morganii
atgcaattacgtataaaagaaagaaataaaaaaatacggttatattgtattgtttcgatcctgtcatcggttattcctgttaaatacgcactggcagatgattactttgatccccgtgcattaagctatggcgcagggcagcctgttgctgatattgaagatctggaagccttttcccgtcccaacggccagcggccgggtaattatattgttgatatttacatcaataaccagcccgctgagcatacatcaattccttttgtactgaatacatcggataacaccatttatccggtatttctgaagaaacagctgacggactggggagtgaaattaacgccggatactgaagccgcatcagtaccggacgacgaagccgttgccgtcagtcgtcttatcccggatgcagacagtaagtttaatttctcactccagcggctggatatcagtattccgcaaatctatatcgataaaaaagcccgcggcagtatcagccctgaattatgggatcagggaataacagcggctatgctgaactataattttaccggttcggaaacacagctggattatgacaagaaagagcataccagtgagcagtttctgaatctgcgcagcggtattaattttgccggatggcggctgcgtaattattcaacatacagccggaataaccacagcaataaatggaacagtattcagacttacctgagtcatcagattgtatcaatgaaatctcagttttctgccggtgaagtcaacagctcaggcgatattttcgacagttttgtttataaaggtattttgcttgaatcggatgaaggcatgctgccggatagccagaaagggtttgctccggttgtccgcggtattgcaaacagcaatgcacaggttaccatccgccagaataacaatattatctatcagacatatgtttcacccggcgcgtttgaaattaatgatttatatccgacgtcgtacagcggtaacctggatgtgaccgttgaggaagcggacggcagcagacggacatttgtggtgccgttttcatcgctggcgattatgcagcgtgaaggaaatctgaaatattctgtcagcggcggtaggtatggtgtgaagaataatgccgatacttatcagccggaatttattcagacaacagcgatgtatggtctgccgcacgatattactatttacggcgggcaaattttctctgacaaatataattctgtcgcagccggtcttggtttcagtttaggcgaggccggggccgtttctgccgatgtgactcatgctgttacccgttataaagaccggcctgataaaaacagcgggcagtcttatcgttttcagtattccaaaagtatgacagaaagcggcaccatgctgacgctggccggttaccgttattccacaaaagagttttataccttcagcgaagcgaataattataaccagattcagtacaaccggcgttcccgttttcaggctaatttaaatcagtcgctggatcagtacggcagcctttatttaagtgcctatcagcaggattattgggggcgttccggaactgagcggaatttcagcgcgggctataacgccactgtcaataatatctcttatggtctgaactataactataacaaaatgccgtattcggaaactgaccatcagcttgcattcagtgtgaatattccgctgtcgaactggtatccgggcagcaataattatctgacctcaagtatgagtttctcccgtgaaggccgtaacaattttcaggccgggttcagcggtactgcacttgaaaataaccagttaaattataatgtcagccaaagttatgtcactaaagggcagggagccagcggtaatgcggatatcgcttacagcggtgcttacggcaatattaatgccggttacggttattcctctcactatcagcggattaattacggcgttcagggtggtattgttgcgcatccgtacggtattactttatcccagtcgtttggtgaaacactggcattagtcagagcgcctgacgcagataatatcagactcaaaaacctgaccggagtatcaacagactggcgtggttatgcggttgttccgtatatatcaccgtattcccgcaatgatattgcactggatgtggacagcctgggtgaggaaactgaaatcaccggtaacagcaaaacggttattccgacaaaaggtgcggttgttctggctgattttgatgtcagaaaaggtgtccgggtattaatcacgctgaccaataataaacaaaaaattccgtttggtgcggtggcagtgttaaccggcgggaagaccgcttcacaatctgatattaccgggattacgggggataacgggcttgtctatatgagcggaatgccggaatccggagaattactggttcagtggggtgcggataatcatcagcagtgcagggcccggtatttgatcccggaaacacagggaaataaaccggttaaacagataaatgcagagtgcctgtaa

SEQ ID NO: 281863 - DNA, 1053 bp, Morganella morganii
atgattatggagaagaaaatgaaatattatgcccctgtcctgttgatatctctgtgttacccgtctgtgatttctgcagcatcttatgatttgacactcgatattcagccggttgtttatacggcatctgaaaactcagtaaatatcggcggtgctctgaccggtaactggaatatccagaaaaaacaatctatgttctgttattattccggaaagatagataaagaaacgattatttccactgaaacatccagcggatatacaactgtttttgaaaatacctcgtatgatatttacgcgacaacacagcccgggatcggctggataatgggagcaaaagatggcggcagcggaggtgtctgggcaccgcttctggcagcaagagaaacacaggtttttccttatcccggcgggatcccggaatatgtggcacccggagcggatgtccggctggcttatgtccgtattcccggattactgaaccccggtaaaatcataatccccgggaaagatattgccaaagttaaatgttatcgtcagggaaagctgatggatacggcaacaatccggactgcggcagttgagatgaccattaaggcccgctcctgccgtatacagaccggcaaccagacagtgcagatgggcacattaacccggcaggcattttcagggctggcagtcggccagaatattgagcccggtaataccgcaaccatgaatttaagctgtgataaagacgttattccgtttgtcactatcagtgataataataatcctgccaatgtgagcgatattatttcattgtcatcaccgaccgcaacgaccaccgcaaaaggggtggcgtatcaggccttttataataatcagcttcagtctctgggaccgaaaagtccggataaaggaaccaaaaatcagtttcaggtcggacagataacaacggcggataatcaggccgtgccggttgcactgcagtttaaatatctgaagaccaataataccgtgaccgccggtgatgcaaatgcctctgttactttaacgttctcttatcagtaa

SEQ ID NO: 281864 - DNA, 549 bp, Morganella morganii
atgaataataaaacgttatctgcattatttttcattataccggcgctttttctggtcagttcccccgtaatggcagacagttcagtgattattaatctgaacggtaagattaaagaaggaacgtgtaaggtcagtaattatacgaaaaatgtctccctgaccggaggagctggtgagcggtataacagccgtctggttttcccccgtcccggcagtacaaccccgtctgttccttttactattgagctgaaagattgtgacccggcgctgaatgtctccatccgttttgacgggccggtactgaccgggcgtaatgatattctgatgctgacacagggggcgtcagtatcaaaaggtgccggtattcagattctggataaaaatgaaaacccgctggctatcgggcagaaaaataccctgacggctaatgtgaaaaaagacgaaacctatattttccctttctttgcccgctatatccgttacagcaatgattttgtcacagaaggcagtgctaacggcaaagtcgattttacctttatctacgaataa

SEQ ID NO: 281865 - DNA, 1269 bp, Morganella morganii
atgaaaaaaagtatattagccttaattatatcacctttatttattcatgccgcgaatgcagcatatacagatgttatatctcttccgctttcaaaggagattggtgcgccattgtttcatttctctgagaataaagctgaaggcgatcgtgaggtcggaatctctgagttaagacaggtaacagaacgtatcggaacgtatttatccgaaaattatgaatatattgatagtgccagagaagatattaaaaataatgtcgaaaaaggggtcaaaaaagatatcgcagaaagcatcgcgacagtttctgatcaattaatttctgatgtaaaggaaaaaaccattccggcatatattgatagcgtattgcctgacaaagtgaaaaatcaggtaagccagcagttagtccccatttatgacagaacggagtcactggaagagaaaaccagaaaaatggatgacaaactgaatattatcagaagtgacttacaggaattacctgatcaatttgcggaagctatgatcaaaccgatagaagaatttgaacgagggattgcagaaccatttgagcaacagaaaaagcaaattgaatcagctaaaatagtcacttctgcaatcatggatgcaacaaacaacctggaaacggatgttgataagctgaaaaataaagtccttgcagtggaactgcaggcgggctttgcaaaacagtcagcgtataccagtgagaaggatatccgcgaaaacaagaatcaacttagcgcccagtcccgggatattgcacaaaacaaaaaattgctcgaatccgctaaagtggtgacctccgctatcaccgatgctacgttagcgctggaagcggatgtggcgaagatggatacccgcatcagcaacgcatcaaaaaaagccggtacggccttaaatgtggctaatcaaaacacaaagagtattgatgggcagaaagtaaaagttgagaaaaacacgctggatatcctgaaaaaccgccaggatctgcgttctctggaaaaggatttacgtgaaaccaacgagcgtcttgataacggtctggcggccagtgcggcactgaatggcttattccagccgtatggtgtcggcaaactgaatatcactgcggctgtgggcggataccaatccactcaggcagtcgcagtgggaaccggttaccggttcaacgagaacatcgccgtgaagaccggtatggcatacaccggttcgaacgatgtgatgtacaacatggcttttaaccttgaatggtaa

SEQ ID NO: 281866 - DNA, 600 bp, Morganella morganii
atgaaaatcaccggtcaggcagtatctgttacagaattaattaaagatacatcagaaaagttcggaaacggcgggctcagtcgttttatctcgggtgtgaagaattcatcggagcaccagttctgctgcacaaaagagcaggctgaattgctgggaaccaaaaacattgcggccctgaaagatgtattcggacatattgttgcgggattggatatgaccccgtttaaaaatatctcagatgaaatcaggggataccgggagaaccagtcaattttctcacgtttctgcaaaggccgtgttctggataaaattcaggaacgatgcactaaaattattgcaatcaatgaggatctcaaccgttcccctgtattgctccgtgacgcaacactgccggattccgcggtttatacgaccaaagatattatggggaaacataaaacggaggggttttttgtgttacgtcagagcctgacggccggaaaggatggtactccggacaacctggcccgtccggatgtattcagtcaggtgaaaatcaagaccagtggtacagttgagctgccggcacctgagcagattgatgataaaaaaccggactaa

SEQ ID NO: 281867 - DNA, 573 bp, Morganella morganii
atgattttgataaaatcaaaatggatcattctggtattctcattatttatattatcaatgaatataaataaatcattggcaaatgaaagtgataataatggtgtgaaagttgcatctgatttaatcatgaagttaacatttgcagatagcattgataaaaagaatgaaattttaaatgaaataaaaaaaataaaagaagagaataaaacagatatgaatgtggctaacatttatatcagtgggctggtcggtgaaaaacaatatgatctcgcattatcagaaataaatgaaattagtaatgatgataaagaaggtcgtttttttttgttaaagtgcatgctaatggacaggctggaaaaaaaagaagtggctgactgttatacatcatatatagaaatcaaaaacaaaaagaaagaaaaagatattgattatataatggctctgtatttatcggggagtccgaagtatcaaacagaaaaagaagagtatataaaaaacagtaagtttgcagatgatcttcaaccattggatacaaaaagtaaaagagacgttttatcagaactattcccgtaa

SEQ ID NO: 281868 - DNA, 309 bp, Morganella morganii
atgtcagcattaagtaaaagtaatgcggcgaaagcagcaggttccggtaagttattattctggtgtgtaataacaaataatttaaatcataataagtatattctggaaatgaaaaaaggtgaatcatgggcaatgggtgtagatgatatacctatcggtagtgttgactttgatttcataaaatcagcgataacaccggaactaacagttgaatttggttacgtctatgacgcagggtatgccggtaatgtagttcctttcccaagaagttcaacaaaaacgataaaattaaataaatttaaatggtga

SEQ ID NO: 281869 - DNA, 1845 bp, Morganella morganii
atgacctcgccttatgcgctgtccgctgtcggactggccgtgttttccgcgttatcgtttagcgcttctgctaatactaaagatgatcagataattgtttctgctaaccgcttccagcagccggtttcgtccgtgctggctccggtaaccgttgtaacccgtgaagagatagataagtggcagtcgaattctgtcctggatgtgctaagaagactgccgggggtggatatcagccaaaatggtggcgttggtcagtttagtactctgtcaatccggggttctgaagcccgtcatactctcattcttatcgatggtatgcgcactaatcaggctggcgtttccggggcgtttgacatgagccaattgcctattgcacttgttcagcgaattgaatacataaggggctcccgctctgccatttatggttctgatgcagtcggtggtgtcatcaacataattacgacacggaaaaatccgggcacaacgttaaatgcaggaataggttcgcatggtttccagaattacaatgggtctaccatgcaaaaaataggtgaaaatacaacgctgagtgcggccggaagttatgtctatacgaagggatataatatcctggatgacacatcacctgtttatgaaccatcacacaataaacacggagcgatgagtaaatcgtggtggtttggtgttgatcatcagttatcggatgaaatgggtgtttttgcaagaacctatggctggaataacagaactacatacgcaccttcatttccagggggaacagatcagggtgagatctttaatcgcgccatagataccggccttcgtttcagccgcgggatgtatgatacacagttattggcaagctatagccatttgaaagattataactataactctgtatatggaaattacggtgctgactcgagtgtcgataattcaaaacagtataacatccagtggggcaaccacttttctattgaaaatggcggtataagtaccggggttgattggcagcgacaagaaattgatgcgaattcagcgtctgttctggataagcaaagtactgacaatacaggtatctatctgaccggacaaaaagaaattcagaagtttactctcgaaggtgctgtgcgcagcgaccatcactctgaatttggatggcactcaacctggcaggcaggtgctggctgggaatttattgacggctatcgtttgattggttcttatggtacggcatttaaagcaccaaacctggggcagttgtacagtagtaaatgggcacagggtaatcctaatctgaagccggaagaaagtaagcagtgggagattggcctagagggactgtcggggccattaagctggcgtttatctgcataccggaatgacatagataatcttattatctatgaaaataacaagtacctgaatgaaaatacggcaaaaataaaaggtgttgagtgggtcggtgaaatggataccggtattttccatcatcaactgacattgcagtatgttgatccgcgtaatggtaaagacgaaattctgcagcgcagagcaaaacagcaagtgaaatatcagcttgactgggtagttgcagatattgatatgggcgtcacgtatcaatatatcggaaaacgctatgacacggattggaataagtatccggcggagcgcgttgaacttagcggtgtcagtctttttgatgtgactgccgcatatccgatcactgaccatctgacaattcgtggtaaagtagctaacctgtttgataaagactacgagactgcgtatggctatcgaaccgctggccgcgaatacttcctcacaggaagctacaacttctga

SEQ ID NO: 281870 - DNA, 1080 bp, Morganella morganii
atgaaaacatccgccgctgtattacttttattcctgataatgatgagcagccgggccgcttatgccaactgcacggtcacagccacccagaccgctccgcccgtggtgctggatatttcatctgacctggccggaagcaccaccacagtatcaaaagtaacacagaccaattttaccggtccgtttacctgtgccacggtattattgcagctgtatccgaatacagtcgggatagactccccttttaataaccggacagcaacgattggttttaataacggcgcacaactcgttaatatcacgctgacatcactggcaaaaaataatgtcacaaatctggccgacggcactcacagcgggacagagctcaataccggtttcacactgcgttttgatctggtcaccacgccgacaggcaactacaccaaagtagcgggcaataccaccaccatcacgccggtcatttttgcctctgatgcttcgacgctggggctggtgggctggctggccgcgcttctcaataagattctgaagtttttactgacactgcaatggccggtcgatccgaatgatatgtttttgcagccggtgcagattacctataatccgccggtgaccacctgcacctttaccaatgccgggctgactgtcagtttgccgctgatgagtatcaacgccgttaaaaccacagataaggccggatataccccgttccggctcaattttacctgtgacggcctcctcccgggtaacaccgcgtcccgggatattgccatgttcctgtcgtcgtccaatttacagccgtccgataaaaccgtgctgaccaatacggtttccggcggtgcaggcggtgtcggtttccgggtagtacaggcaacgaatctcagcaacccggtgcagttttctgacaatgccaatgctcagggcagtgccaccagcattttcactgccgccaaaggcagcgcggtctcaccggctttctctgtcgatctcggtgcgtattactatccctacaatccgggcgctgtaacacaggggcagatgagcagctccgcgaccctggttttttcctacaactga

SEQ ID NO: 281871 - DNA, 633 bp, Morganella morganii
atgcctgaaataacatcattgctggcgtttgcgtttgttgctctggggatggtgctgagccccggacccaatatgatctatctgatttcccgttccatttgtcaggggaggcgggccggttttatttctctggctggtgtcgggctgggatttatcttttatatgctcagtgccgcgttcgggatcactgcgctggtgtttgctgttccttacgcgtatgacacgctgcggattgccggggcactgtatctgctgtatctcgcctggcaggccgtcagaccgggcggacgctctgcattcgctgtgcggacattgcctgccgacagtccgcgtaagctgtttatgatgggattgctgaccaatctggcgaacccgaaagtggcggtgatgtatttatcgctgctgccgcagtttattgtgccggggcacggcagtgtgctggtgcagtctctggcgctcggaacaacacaaattatgatcagtctgacagttaacggactgattattctgatggcaggctcggtgtctgtctttatgacgggccgtccgttctggcaggtggtacagcgctggctgatggggacggtgctggccgggctggctgtccggatggcgctggaatcccggcgctga

SEQ ID NO: 281872 - DNA, 2454 bp, Morganella morganii
atgacaaagatgaaagaaacggcgttgttcactgcgccgctgacgcggcgcgggtttgtcaaagcctccggtgcggctggcggactggcagttgcagcgggcgggttatccctcccgttcagccatgcggcgtctgccgctgaaattaccccggcacctgcggcggcttctgatgagaaagtggtctggagcgcctgtacggttaactgcggcagccgctgtccgttacggatgcatgtggttgacggcgaaatcagatatgttgaaaccgacaataccggtgatgatgtctacgaagatctgcatcaggtacgcgcctgtctgcgcggtcgttccatgcgccgccgggtgtacaatccggatcgcctgaaatacccgatgaaacgtgtgggtaaacgcggcgagaacaaattcgagcgcatcacctgggaagaggcgtttgataccatcgccggcaccatgaaacgtctgatccgcgattacggcaacgaatccatctatcttaactacggcaccggcaccctcggcggcaccatgaccaagtcctggccgccgggagcaacactgattgcccgtctgatgaactgctgcggcggttatctgaatcactacggtgactacagtaccgcgcagattgcggccggtctgaattacacttacggcggctgggcggacggtaacagcccgtcagatattgaaaacagcaagctggtggttctgttcggcaacaacccgggtgaaacccgcatgagcggcggcggtgtgacctattatgttgagcaggcacgcgaaaaatcaaatgcccgcatgattatcatcgatccgcgttataccgataccggtgcagggcgcgaggatgaatggatcccgatccgtccgggtacggatgccgcactggtcagcgcactggcgtatgtgatgatcaaagaagacctggtggataagccgttccttgacaaatattgtgtcggttatgacgaaaccaccatgcctgccggtgcaccggccaacggccactataaagcgtatattttaggtgaaggaccggacggcgtggcgaaaaccccggagtgggcagccaaaatcaccggtattccggcggcgcggattgtgaaactggcgcgggaaatcggtactgccaaaccggcgtatatcacccagggctggggcccgcagcgccgctcaaacggcgaaaccgcatcccgtgccattgccatgctctcaattctgaccggtaacgtggggattaacggcggtaacaccggtgcgcgtgaaggctcttacgcaatcccgtttgtccgcatgccgaccctgaccaacccggtgcaaaccagtatctccatgtttatgtggaccgatgccattctgcgcggcgaagagatgactgccacccgtgatggtgtgcgtggtaaagacaagctggatgtgccgatcaaaatggtctggaactatgccggtaactgcctggtgaaccagcattccgaaattaaccgcactcatgacatccttcaggatgagagcaagtgcgaaatgattgtggtgatcgataaccacctgacctcctccgccaaatatgcggatatcctgctgccggactgcaccgcttccgaacagatggatttctgcatggatgcctctgcgggcaacatggggtacgtgatttttgccgatcaggcaatcgaaccgcgctttgaaagccgcaatatttatgacatgaccagcgaaatcgctaaacggatgggggtaggtgagcagtttaccgaaggccgtacccaggaggagtggctgcgtcacctgtatgaacagtcccgcgccgcgctgccggaactgccggagtttgatgaattccgcaaacagggtattttcaaaaaacgtgacccgcagggacaccatgtggcgtaccgcgatttccgcaacgacccgcaggcaaacccgctgaccacgccgtcaggtaaaatcgagatctattccgcacagctggccgaactccgtgacacctgggaactgaatgaaggggatgaaatccatccgctgccggtgtattccgcaggctttgagcatgccggtgacccgcttcaggaaaaatacccgttacagatgaccggtttccactacaaatcccggactcactccacttacggcaacgttgatgtgctgaaagccgcctgtccgcaggaactgtggattaaccctgttgatgccgcgaaacgcgggattgcgcacggtgataacgtgaaggtcttcaatgatcgcggggaagtgcgcgtcaatgtgaaagtcacaccgcgtattctgccgggcgttgtcggtctgggtgaaggtgcatggtacagcccggacggcgatcgcatcgatcacgctggcagcattaacgtgttaaccactcagcgcccgtcgccgctggcgaaagggaatccgtcccattccaacctggttgaagtcgttaaggcctga

SEQ ID NO: 281873 - DNA, 729 bp, Morganella morganii
atgaacacccgatataaaacagtaatcagcactctgttcttactgattaccgcaacggcttccgctgatataaccgataccaaaattgatgcagcgctcagagaaagtaaacattatactgatataaagataagccagaaaggtacggaaatacgtcagaatctgatgcttgaaacggtcaaagcattaagtgcaacatctcagtctctgatgaataatatcgataaagcatcttcagattctgtttcaaccagcaataattatactgaccagaagttcgatgcaatcaataacgatattgagagtagcaaggcagatattctttcagaaagtcagacttatacaaataatcaggtcagtaatcttcatacaacaattaagcgctctgagagccaggccgtttcatcttcccggcagtacactgatacccgttttaatgagcttgaaacgtcaatgaatggccggtttaacttagttgaacagcagatgaataaaaatgctgaccgcgctaacgccggtattgcttctgttgcggcaatggccaacattccgtataccgataacacccgcttcagcatgggtctgggtgccggtaattaccgtaacggcaacgccgtcgccttcggcggacaactgcgtatggagaataacgttaatctgcgcacctctgtcagctggaacagcgaagacagcgccgtttatggtgcaggtgtcgcgttcgggttctga

SEQ ID NO: 281874 - DNA, 606 bp, Morganella morganii
atgaatgataatcttcctgaggcaccacagggcgaatttattctgttccgcagtggagatggtcagactcatgtcgaatgccgctttgaatccgatacgctgtggttatctcaggcatcaattgctgaactgtatggaaaagatgtccgtacaattaacgagcatcttgtgaatattttctctgagggagaacttgctcaaaacgcaaccatccggaaattccggatagttcgattagagggaaatcgacaggtttccagggagatagaccactatagcttacctgccattcttgctgtcggttatcgcgtccgctctgttcgcggcacacagtttcgccagtgggcaacacaaactttagaacagtatctgatcaaagggtttgtgatggacaatgaacgtctgaagaatccgcctgttggtcaatcagtcgtgcctgattactttgatgagatgctcgaacgcatccgtgatatccgcgccagtgagcggcgggtgtatttacgggtaaaagagatcttcacactggcggctgactacgaaccttcaaataaagaaaccacgcgtttctttcagaccattcaaaacaaactgcattttacctga

SEQ ID NO: 281875 - DNA, 1935 bp, Morganella morganii
atgtcctggtatccgtcccgcatttcaacccgcctgactatcgggggcatcctgctcctggccgtcaccactgccattatcattgttgttatgctgtggcggggtcagccccgcgttgtggaaattaatactgcattaattgaagaaaccggacgcggcctgacatccagggtcagtactattttatctcagacggacggaaaaactgtcagtctggcgcgcctggcggaagtgctgcccaatgatgaggcgctgtaccgctatatcccgcccaatctgattgaaagcaacagcctgatcaccggcggcgggatctggccggagccgggggcattcacgccgggaattgagaaacgcagctttttctgggcacggaatccggccggggaactggttttttctgatgagtacaatacagatggtgccggaaattatcacaatgaaagctggtaccggaatgcccgtgagcaatccacggaaagctgtttgtggtctgatgtttaccgcgatgccatttccggtgtgaatatggtgacctgtagtgtgccgtacaaaaccgacggaaaatttgccggtgtcgcgacaacggatatccgtctggataatatcgccgccattatgcagcaatacggtaacagcaccggcggctatgcttttgtgacagaccgccagggacagctgatctattttccgggtgatgacagtaagcaattcaaaacctttgatgagctggctgcacagtcagcctggctggcaccggtagcggcaagcctgaagcaaccacattctgagcaatccgctatcgacagtatccgcattgataatgacggacagctgaacaccgcttcacaggtgatgctgttcccgatggctgataccggatgggttatcggccttgtcacaccggaagcgcggatcaccgggctggcaaaagtgatgatgcaggatgtactggaagcactgctgccgattatggcgctgctgttactgggctcctggctgattgtccgccggttgatcacccgcctcgatgaaacccgtaaagccctcgatgatattgcgcacggagaaggcgacctgacacggcggatggaagtgcgtggtgccgatgagatctccgctatctcacaggcatttaatctgtttgccgataaaatatcatccatgttgctcacggtacgcagcagcagttctgttgttgccggaaataccgttaatcttgctgataataataacgagttatccgcccgggtcacacaacaggcggcagcgctggagcagagtgcttccgcgatggaagaactgaacgcgacagtgcgtcagaacagtgaaaatacccatcaggccgatgaactggcggaaaccaccgcacagaccgcaagccgctgcggggatatgatgcgtgatgtgatttcgacaatgaacagcgtcagtacatcatccggacgaatggttgaaatcgtgtcggtgatcgacagtattgcattccagaccaatattctggcactgaatgccgccgtcgaggcagcacgcgccggtgattccgggcggggctttgcggtagtggcaaccgaagtcagatcactggctcagcgcagcgcacaagcagcacaggagattaaggcgctgattgatgagtctgtgcagaatgtcaaaaccggcagtaatcaggtgcatgaagccggagaaacgctggcagatctggtgatggatgtgttgcaggtaagacagctgatgagtgatatccgtgttgccggtgaggagcagagcaaagggctggccgaggtaacgatggcagtctcagagatggataccacggtacagcagaatgccacactaattgatgatgccgcttcacggacacaaatcctgcgaagagaagccgaacagctttcgcagatggtatcagcctttaaattaccggaaccgcattaa

SEQ ID NO: 281876 - DNA, 762 bp, Morganella morganii
atgcaacaatcagaaaatatcagtcctcaggctccgtcactgccgaaaggcggcggtgcgctgacaggactttccggacaggcgggcgctgccggtccggacggcgcggcatcgttatctctgccgctgccaatcagtgccggacgcggctatgccccgtcactctctctcagctacagcagccaggccggtaacagcgcctttggtgcaggctgggatctcaatcttccggcgatcagccgccgtacccgcaaaggggttcctgcttatacggcagaggatgcgtttcttgatcctgccggtgaggttctggtaactatccccggagccgctaataaacgtcagacactgtttggtgtgaaactggccgtgtcgtatcagataacaacataccgttcccgggtggagcgcgatttcagccgcctggaatactggcagccggaaggcagcaccactgagccggatttctggctctggtatgccgcagacggtcaggtgcatttgctcggttatgaatccgccgcccgtatcagtgacggcagccatacggcacgctggttactgaacgcctcggtctccgccaccggtgagcagatctattaccgttaccgtgcggaagatgatatcaattccagtgatcaggaaaaagccgcccatcccggcagccacagccagcgctatctcagtgacgtccattacggtaatatcaccgcctggagacgctcgctgaaaaagcagaaggtacggatgtaccggcactga

SEQ ID NO: 281877 - DNA, 2883 bp, Morganella morganii
gtgaagctcccaagtgaaagtcataaacagaccatcattgtaaacgtcagttatcagggtatagagccactgagtgccagttcatattatcatttaacactggaaacaccgaaaatcagtgaaagcgttatatccctgcataccaccgcagacggtgcccagtatatggaatgggatgcttaccgcacccgcctgaataccctgtttgcccgtcagttaattgaaaaggcaaacaacggcattgatgcggtactgtcaccggaaacacaaaatctgcgtgaaccgaaaccgggacaggggacctatgtcacactgacactgaagccgtatgaccaggcaattcacggcagtgaccggacgtttacactttattacggtgatattttcacgagttccgacaaatttccggtttgcaacggtacactgagtgcggttagtaatacagaggtaaaattatttgttccgcgactagataacgcgaatggcaataaagataatttctatcttcagatggaataccagaaaaccacaacaaaccagatccgtctgcaccgtacaactgccgatataaaaaatccgcacggctggacactggataaaagctataacagcggcaccttctccggcctggaatccgtctccggcctgtcacaatccgatgaaccgatggatttcagcggtgccaatgccctctatttctgggaattgttctattataccccgatgatggtggccatgcgtctgttacaggagcagaactttactgaagccaaccgctggataagctatatctggcgccctgccgccagcggtgccggggactggcgtgtgcggccgctgaaagaagatacttcctggaacgccgatccgctggattcggttgacccggatgccgtcgcccagaatgacccgatgcactataaagtcagcaccctgatgaaactgctcgatctgctgattgcccgcggggacagcgcttaccgtatgctggaacgcgataccctgaccgaagccaaaatgtggtatatgcaggcgctggggctgctcggggataaaccgctgacccttatcagcagcgactggaacaatccgtcactgagtgatgcggccgaccagaccaaaaccaaacaacggcaggatgaaatcagccgtctgcgcagcggtggcctgctgccggaagtccgtaccgccaataccctgaccgggctgttcctgccgcagcagaacgaaaaactgctcggctactggcagaccctggaaatgcgcctgtttaatctgcgcaataatcttgccatcgacggtcagccgctctccctgccaatctttgccgcaccggccgacccggcggcgctgctcagtgccgcatcagccgcctccggcggaagcaaagccttaccatccgctgacggcattccggccatgcgcttcccgcaggcgctggacagtgcacgttcactgaccggacaactgatgcagttcggttccaccctccagggcctgattgagcgccaggatgcggaggccatgagtgaactgctgcaaaaccaggccggtgaactgatgctctcctccctgcgcatgcaggagcaggcactcgccgagctggatgccgagaagaaaaccctggaacagagccgtgccggggcacaatcccgctttgacagctaccgcacgctgtatgatgaaaatgtcagtgcggcagagcagcggaccatggatctgaacctctcatccgcagtactgagcacctccgttggcgtactggatatggccgccgctgccgctgatatggcgccgaacgtcttcggtatggccgtcgggggcagccgctgggggggtatcccgaaagcgattggctccggtatcggcctcgccgcggccgccaccaaaatcacggcggataatatcagccagtctgaagcatggcgccgccgtcaggaatgggaaatccagaaaaataatgcggattctgaagtcaaacagattgatgcccaactggaagccctggctgtccgccgtaccgccacagaaatgcagcgcgaccatctggaactccagcaggcacagacgcaggcacaactggaattcctgcagcgcaaattcagtaataaagcgctctacagttggttacgcggccgtctggcggctatctattaccgcttctatgacctgacagcagcccgctgcatgatggcagaagaagcctacaaatggcagaccggcgaagccacccgctacatcaaaccgggcgcatggcagagcagtaacgccgggctgatggccggtgaatctctgctgctgaacctggccgagatggagcaggcatggctgaaatgggatcaccgtgcactggaagtgacccgaaccgtttcgctggcagaagtgtacagcgctgataaggttgatctggccgcgaaaattgctgacctgctgaaaggcagtggttccggtaatactccggcggcaaccgggctctcaatgaccacggataaacgtctgcatgctgcatttaacctggaggcactgaagatcgcggaggactatcctgccgacctgggtaaaacccgccgtatcaaacagatcagtgtgaccttaccggcgctggtcgggccgtatcaggatgtgcgtgccgtgctcagctacggcggcagcacgaaactacctgacggctgcaaggccattgcggtctctcacggtatgaatgacgacggccagttccggctcgatttcaatgacggccactggctgccgtttgaaggcattgcggtggatgataataacagcctgtttctgagtttcccgggagcaacgggtgataagcagaaagccctgctgctcagcctgagcgatatcattatccatatccgctacaccatccgttaa

SEQ ID NO: 281878 - DNA, 948 bp, Morganella morganii
atgtcacgttgtgttacgcagacacccgtttcggcaggaaacaccgaatacttaaccgcttcagcgcggtgggaagcctgtaaaccgccttataccaatacagatatgaaagtttgtgttactgctgcggtctctatcctgaattatctcaaaaaatcgcgcagaacaaagtatgaaagagacaattttttgcggctcgatttcagccgtggcggtaaggttaccatttatgccgaatttcctaaagggatgcagcttaaaggacgtaaaccgggtcaatggcctgaattatcgctggcaatggcccgtgaaaaagcgcacgagattggcagggagggtttgtcagctgagtcagttcatggcgtcttagcgcgttatgaggcggatatggaggcgaaagtaaaacgtcataagcttagcgagggaagttttggtacttactgttgtcgtctgaaacaaattaagtctgcattcggggcaagagaagtattctgtgatgttaaatatacaaagcttattgatgtacttgatttatggattgacacaaagactaacagctacgcactggagttgtttgcagaattacggcgtgtctggaaatttggtgcaccgctctatgcaggtggcaaaaatattgccgcttcattgcctgatgattacgtttcatcccgggtgcaaaaaccaacacccacccggctctataccgatattgagtctatagcacagttatggattaatctcagtggttgtatttctcttcatcagagaaatgcacttcgctatatgatattaacaggagtgcgcccgattaatgtcagcaatcttaaatgggaatatattaataaagagatgacagaaattacgtatccggcaggaattaccgggatgcgtggtgcaatattttatttatactgtcatgatttggtgtctgtatcagggactctatag

SEQ ID NO: 281879 - DNA, 741 bp, Morganella morganii
atgacagaaattaccgatgtaaaattttccgatattgaaaatacctatcaaaaaataaattcctatgacaatggctatatttattatgaattcaggaattcttacgtcaatgtcattgattatttccgacggatgcgggatgccctttccctgggctatacacatcagaataacaagatccaaaatatagatgacagcgaattatatgacattatttataacgccggtaacattccggaaggcactaaagaagaaattctgaccaacttaagattgttgggtactcacagtctcgaattaaatgaaaatctcaatcgaaaatatttgcttgctgacattattactatgtcaaatgatgttacacattcaaatgacgaactaaataaactgataagtgaattcaaccagcgtatcagcgaccttactcacagtaaaataccattaagctcaaaagaaaataattattatcttcagagtaatttattcccgtctattgatgatctcatcagaaaacttcaggatgaaattaaaattttattatccagaattgaagataataataaattattgaaagttatcgttgaaataaatgaatgcatgttgtcaatgctggccgtgagtgcattatggttacataactcacaacgctttgatatctattttacaccggatgcaaatctcagcgggcttgacacgcttgttgctgaacaaaaacaatacttcaccagtttcggccgctga

SEQ ID NO: 281880 - DNA, 648 bp, Morganella morganii
atgtctttattcaccttctggcagccggaaatgctgacggagaactatcagcaccgggaagatgttaccgtactacaggaactgcgcggactatacaacaacgattttgatttttcttttccgccgggtccgtatttcggaccgctgaaaacggcaaaagtggtgttgtgttatgccaaccccagcgcggatgccctatcaaaggacactgtttcaaagagtcataaccgtgaattgctgctacagcagttacagggcgaccagccttatccgcagctcccgggctggaagcagtggtttttgccgcgcgctaaaaatttattcggcaatccaatcggagcagcagaaaaaaatattgctgtgttaaatttagtgccttacgcctcaggaaatatggacaatgtttctaaaatggccacctgtctgccttccgcatgggctgctcagcgctatctgcgggaaaccttaatcccgaaagcacagcgcggcgggattttactgatgatgtgccgttcagcacatttatgggggctgcgttcatcacatggctgcacaaatatactgattaacggggtccgtaacggcttttcagaagagattaaattacgcgcacaaaaatggatcaaagaacatattcagccaggctga

SEQ ID NO: 281881 - DNA, 462 bp, Morganella morganii
atgaaaaaaataatggcagggattatcattgttatgatgtcatgcactgtggcagcccgcggtctgacaaagagtgaaattgcttcggtggaaagcgtgattaaaaaaaacctggataacccggcatctgcccgtttttttcacggtgattttattgatgtcagcgatggtaatttatattgcgttcaggtcagtgaaaaaaatgcacacggacagtatggtgaaaaaaaactgttttccgttctcctgctgcaggatagtaaggatcgttataaggcatgggaagttgaccggttcaatgaaaataccctgtatccgcaggacataattgaagaagcctgtgttggtgcaggctataactataaaattgaggccggcgcagttaataacgcaaataaaaaacgccaaagtctgggtctgccgccggtggataaatcacagattataccgcacaggcggtaa

SEQ ID NO: 281882 - DNA, 927 bp, Morganella morganii
atgaaagataatgaattattctggatcttcagcgggctgttcgggttcctggcggtggcaacggttatcggcctgatcctgaaacagattaaaggaaacacctctgttatcagcaacctgaacgcccgtatccgcgcctggtggctgatgtgtattatcgccgcggtggctatcagcatcgggcccatcggctctgtggtgctgtttgcctttatgtccctgctggcactgcgtgagctcatcactctgacgccgacacaccgcgccgaccacggtgccctgttctggtgtttctttatcatcctgccggtgcagtatgtgctggtcggtgttcagtggtataacctgctggcggtctttatccccgtctatgccttcctgtttatcccgacccgcatggtgctctccggtgacacccgccacttcctggagcgcatggcaaaaatccagtggagtgtgatgattgcggtttactgcctcagttatgcccctgcgctgctggtactgccgattccggatttcacggataacatcaacctgctgctgtttctgatgatcgtggttcagatttctgacgtgctgcaatatgtattcggcaaactgttcggcaaacacccgattgtgccgaaactcagcccgaacaaaaccgttgaaggctttatcggcgggatcctcagtgccagctgtgtcggtatggcactgtggtgggccacaccgttcagcccgtgggcggcgtttctgctctcactgatgatttgcctggccggtttcgcgggcggattatgtatgtccgctatcaaacgggacagcgggatcaaagatttcggtgccatgattgaaggccacggcggtatgatggacagactggattccctctgcttcgcggccccggtcttcttccatgtgctgaaatatttttatacctga

SEQ ID NO: 281883 - DNA, 672 bp, Morganella morganii
atggaatcagaagaaatcagggaccgacgtccgatcaaagcccggcagacccgccgggcgacctcagccgcccgtctgctgcaacagcgcggtgcaaccccgaatggtatctctgttgccagttcagtctgtgcgttattcgctgctgccgccttttacggcgccctgaactgtgagataacggctctgcgcatcatcctgtttttgctggccgcactgatggtacagggacggctgatctgtaatctgctcgatggtatggtggcggttgaaggcggcctgcgcagccctgttggtgccgtatttaacgatttgccggaccgcgtttcggacagtctgatcctcatcggcgccggttacgggctggccggttttatcacttatgccccgcaactcggctgggccgctgcgctgatggcagtgatgaccgcctatgtccgggtgctcggcggcagttgtgagcagccgcagaaattttccggcccgatggctaaacagcaccggatggcgctgctgacagccggggccgttgccgcctgttttctcccgctgtatcaggctcagtggctgtttcttatcatactgtgggtgattaccctcggcgcactctggaccaccgtgcgccgtacccgcatactgatggctgatttacgtaaggaacataaaggatga

SEQ ID NO: 281884 - DNA, 918 bp, Morganella morganii
atgagtaaattaccgtataaaattattaatgatgaatttacagatggatatgaaagtaaagttattgaaacatatcatgaatgccctgaacgatggaagaaggcaataggtgataccttactatttcaattcggtgtttatgatactttatttccatcatgtttaataaacaccagaacatcattagatgaatcaggcatccgttattttgaacggcaattatttcttgctaatgtcacagggtataaccgacctgttatgaagagagtgcttgatgttggttgtggttggggatatatactgaaaattatggcagattatttccctgaatgcggttgtctggatggtattaatgtcagcgccagtcaattgcaatattgttctgaatattataaagaacaaaacttacaggacaggattaacctttatctatgcaatgccagtaatattaatttgttaccggatcatgatgaactttatgatcttgtcatcatccgtggtgttatttctcattttccgaatgatgtttatgaaaatacgatgaagaaaatccataccagattgagggtcggcgggaaagtcattatttcagataatttatataatacagaaccggaacactatatatctgatacacctgatgaggttgaccggctggcttgccgtcatcgtaagtcacaggcatattttagaaaggtgctggaagatagcggcttctttatcacggatttcagagtattaccttccaatattgatgttgtcagatggttgatggaatcaaagaaaaatattgaatgtcattttcctgaaggtactgatggtgcactggaggaattaagagttcttgcggaaaactggtctgtcgcattattaaaaaacaaggtgtcaacatacagtatcattttagagaaaagataa

SEQ ID NO: 281885 - DNA, 1041 bp, Morganella morganii
atggtaattgttatgtgtgaaaataaccatgagcaacgagtccgaaaatctatacccgttaaatatctttcagagaatgaaaataatcagtttaatagtgttaatggtatcaatatggcgccattgccttatcctaatggctggtttgctgcttatttcagccacaaattaaaaaaaggaaaagtgatccgggtgccgtattgcgggcaggatattgttttataccggacaatgtcaggtgttgcctgtgctatcgatccttattgtccgcatctcggagcgcatctgggatatggtgcttccgtggttggtgaggagatagtgtgtccgtttcatgggctgtcttttgactctgatggttattgttcccgtgtaccggaaggcgccgcagtaccaaaaatagcgctgacaaaacgttatttgcatgagactgatggcgttctttttgtctggagcaatgataagaatactccgccggactggatgctgcctgcacttaataccgccggcttttcacaaaaccgctatgaaacttaccaattacggggactttgtcaggatatgactgaaaatagtgcagatcctgctcatttttcctatttacacggactgaaagaagtttcgacaagttgtgagcaggatggctataaaataacatatagtatgaaagctaaggtattcgggcagcccgtacatatggtgatgaaatgctatggtctgggatatgcggtcggtgaagcatcattttcccgtctgggattaactgcacgaacacaggcattaggaactcagacagaacctctgtcatggacattccgtatgatagactcgatcagaatcaaccgtatcgcaggtctgccgcgatatatgcagaaaatagtctacgcaccgttaattttttttattcatcgctggtttgttgagacggtgaaagaagattttattgtctggcaaaacagaaaatacctccataaaccaggacttattccgggggaaaataatatggcggtttaccgtcgttgggttaagcagttttattaa

SEQ ID NO: 281886 - DNA, 1116 bp, Morganella morganii
atgaaattgattctcccttcattgcctcagccattctcttatgctatccatccggcatactccccggggaacaaaacaccgtataatgatcttgatgaatacgataataatcattttgaacaggttacgagaaattatgcagatcattttgagctttatgatacggatgaacaaagaaaaagattagctaatattcactgtagctggttaggagcactgatgtatccatccggtacggaagaattattacaggtgggtattgatttctgtatgtgggcatttgcttatgatgatgaatattgtgatgaaggagaagtatcatgccagcctgaaaaactaatccggtattcagcggaaatatggcggcaatttgaatccccggaacataagttatctgatgatcgttatgcactggctgcccgtgatttacgtatccggcttgataaatatgctaagccggaacaaactgcacgatttgtcgaatcaatgcgtatttatatgatggcggaaatgtggaaatctgttaatgcgacacccgtattaaatgattatatcggcatgcgggtaaccggtggcggtgcctggtcttttccgacactgggacatattattgcagatgtaaatattgcggcaaatgaatatgaacaccggaaagttagggctctgtttgaaatgctatcacatctgatggcctgggaaactgagcctcatgcttatctgaaagaaatgacccggggcgcaaattataaagaacataatttaatcagagtattgatgcgtgagcgtcaatatagttttgatgaggcaatagaagaatatctggatatgcgaaaatgcgttctgggtctttttcttcggttgaaagctgaagtggaaaaagaagcctctcagggagtgaatgaatatattgagtcagtgatccgttattatgtcggtgcggttatctggtcacaaaatacacgacgttataaatcaatgagtggttgttcagatgaaggttcattttcaggcggaacactgagtgcacagctatcagaatctgaatttacagaaacccgcccgctggatatcagtgcggtggcgtggtggtgggaatatgatcctctgcgcagatag

SEQ ID NO: 281887 - DNA, 177 bp, Morganella morganii; identical to SEQ ID NO: 277426

SEQ ID NO: 281888 - DNA, 378 bp, Morganella morganii
atgaactggaaagaaacggtaattgccgcgctgtttattgctgctgtctggtgggtatatgacatttaccgggataaccagcaactgaaggtgaataacacaacgttgtccggacagctgtcagcacaacagacgataaacaccatcacgctttcagccgttgccatcagacaccgcgtggcattcgacaacatcaaagccaaacaggaagagggcacggagaatgtcaaatttaagactgttatcaggacagtatttaaggacagcgaatgcgctgttgctcctgttcccgctgatgctgttagtgagttgcggaaatacgcggacggaatacgttcccgcgccggtggtgccgataccgccacaattgaccgctga

SEQ ID NO: 281889 - DNA, 189 bp, Morganella morganii
atgacgtgtagcaacaaaaaatgcacggatggcattgagattattgggtgctgctcaagcagagattgcgggtgcatgggctttccggtagcagctaaaaactgcgaagagtgcaacaaagagaacagactaccgacagataagcgtgttcttgagttgctgaattacgtcgagtggcttggcgactga

SEQ ID NO: 281890 - DNA, 162 bp, Morganella morganii
atggaattttacgaagtttacgtttaccagtatggcacatacttcagcgccatatgggttcatgcaaaagaccgtgaacatgccgaggaagaagttgaggcacttaacgctctggatggagaggtgtcattctctttaacaggtttagtgcaggaaaaataa

SEQ ID NO: 281891 - DNA, 264 bp, Morganella morganii
atgaaagttgaatatcttattgttggcggcgaagataatggcagtattataacaagagattctctcgtcaaaaaagtatctataataaaaaaactatccagttcttctatgccatctagttttggtcagcaatttgacgtattcagagagcgtattggcgaaaatgaatatgcgtatataattcagggctcacactttggggctgatataaaagaccttattaattcaactggattaactccaataccaaaagaattactctaa

SEQ ID NO: 281892 - DNA, 189 bp, Morganella morganii
gtgaaaaatgattttattttctatgcggtgtgcgatgagaatgggaaagtagtttgcattaataatagcaaatacccatcactaaaagcggtgttttatttgcgtgcagatgcagaaaaaatactccttaagaatcaagatgaacatcttcatatcgccgagattaacattaccgaggcaagccaatga

SEQ ID NO: 281893 - DNA, 387 bp, Morganella morganii
atgaacaaatatcgtgacaaatcagactttgagattaataaggctgtggctgttaacattaatggcgctgacgctgttgtggagaaattcgatataatatatatcaatcatactgatacgatggtgagcttcaacccctgcaacaatccatatgacgcaatgccgattgttattgagaataaaataacggtagcgtatgacaaactgtatgaaacctggtgcgctcatgtaggatctgtgatgagtggtgatggtgggtgggattattctattgaaccagtaataaactattgcgacgataattactatcgcgcagctatgatttgtttcctgatgatgaaggatacggagaatgaaaaagtgggcggaagcgtagaaattaaatga

SEQ ID NO: 281894 - DNA, 519 bp, Morganella morganii
atgagtgtaccgcaaacaaaagctgaactgcttttagctattgataaaaattttagtaaattaattagttacctcaacgcaatcccacctgaatttacttcagataactcaatggacgggcatgccaaaggaacggatatgagtgttcgtgacctcgtttcgtatctgatcggatggaatgctcttgttgtaaagtggatcactcacgatgctgaaggtctgcctgtcgactttccggaaacaggctataaatggaatcagcttggtcttcttgctcaaaaattttattcagattacagtgagttaagttatgagttgttagtaactgaacttcaggctgtaaaaaataaagttgtgacgcttattgatgagcgtaccgatgatattttgtatggaagaccatggtacacaaaatggactatggggagaatgatctcatttaacacatcttcgccttacgccaacgctaacggaagattaagaaagtgggcaaaaaataataatatcagtttaaagtaa

SEQ ID NO: 281895 - DNA, 567 bp, Morganella morganii
atgtccagacaatttatttattgcagagtgtccaccagcgaacaaacaacagagaaccagctcagtgctatccgacaacgtggttatgatgtaccagctaatcgcatagtcagtgaaactgtctcggggggaatacctacagcgagccgtaaggaattcagtaagctggttgataagctggaagaaggggatgaactcattgtattgaagatagatcgtttaggtcgtgatgctattgatgtcttatctacagtggagtctttaggggcaataggggtaaaagtgattagccttgatttaccggttcccgacctgagtaaaccagaaggaaagatgatgctgggaatgttctccgtctttgctgaatttgaaaagaacagaatcagagaaaggactttagaatcactgaatagactgaaagctgaaggtgttaaattaggacgaccagaagccacggaaaccaccgaaagagtacagcagtgtaaagctatgggtttatctcaggttcagacagctgatcatctgagggtttccgtgcgcactgtgaagcgtcattggcataaatag

SEQ ID NO: 281896 - DNA, 309 bp, Morganella morganii
atgattactacagtaacattttctcaggcagctaaaaaatttgggttcaaaaataaattatttatccaatggctattgaaatttggattgataaaaatatcttctaaggtagatgtatatgagaataaaaagagaggtaggaaatattataaatcgacacgctatgaaggtgattttattattaactcccttgctactccacgaaaaactatgagtggtagtattcctcagcaacatttggatgaacgtattatcgacgagtttactaaatgcatgaaaatataccaaaaaaccacaaaaaattcttaa

SEQ ID NO: 281897 - DNA, 1569 bp, Morganella morganii
atgattcaaccacacacttatctttatcagcgtaatggtatctactatttcaggctccggtttcgtaataaactatggaaatcggagagaagtacatcattatccctcagaaccagagacagaagaaccgcaatggcacactcaagacatataaaagctgcgctaaaagctattcatgcagataatcctgaattgacttacgaagagatgcgggggcatttgaaggacattgctgagtgggagttatctatggggcgttcagatctctttgagcatgatatgagagatatttatcgtgatcaatacggagatattggtataggtcttcaggatgctcttgcaagtgaaccactgagtattgaccagcatcgttatattaatgaagccctaaaggtaattaaggcgtgtataaaacgtattgaagctggagatagtcagccacttatagattatatagatggctttgataatactgataggccgaatagtcagccatcagtttcattatctgttggtacatgtggtgttagccgtctctttcagcagtatacagaagagaatgcacaaaactggaagcctgctactctgagagaaaataaagcagcctacacagtgttacttgaagtatttgattatctggggctcagtaatgacgctaacgctataacacgtattgatatgatcaaggtacgagatgttctccagaaattaccgaagaatcgtaagcagcgtttcaaaaatgaaccgttaggcagtttattgaatcgtatcggagatagtgaagataaaacggactatttggatgttgtcaccattaataataaatatctcaataaaatgtcagcagtttttaaatgggctgtaaacaatgacctgattaaaaaaaatatggctgaagggttggagcttaaggttcctcaacgcaaagcttctgagtcccgtagagcctttagcgctgaacaagtgaggcaactactagtcgctgctaaagggtattcacagaagactataggtaaaccttatcattattatgttactgcactggctgctattactggggcaaggcttaatgaagtagcacaacttcaggtaaaagacgttggaattactgaagtaggaactgtttatatacatattaatgaggatgacagtagtttacccggtaagagcataaagaatgtttacagtgaccgcactatccctttggttgatggtgcttatggatttactttatctgattttatcactcttgtggaagagcgtcgaagtagtgacggtaacgatgctatggtatttgatggtcttaagttgatgaagaacggttatggtgagcaggtgagtaaatggttcaatagaacattgttacctaaggttattgctgatcgagatggtctggcatttcattcgttccggcatacaatttcgaatcagttaaaacaatatggccttgaggtagcttatgctcaggcaatcatggggcatagctcagggacgataacatatgatcgttatggcaaagaagtcgaagtagatatcttgaaggaaaaacttacgcagatattgaaataa

SEQ ID NO: 281898 - DNA, 435 bp, Morganella morganii
atggtaaaaaaaatagcgattatcaccgttatattttttgcattacctgtaatgactcaggccaggtctgtaaaaaatattgaaataattgaatccggtgctatttatgacggagaagataatatatatgaaaaagaagcatgcaaaagttttattccggagaaaaaacagctcataacattcttcagactcgcagaggaatctaaagaaaacagatggttgcatgattattattctgcctgtatttcatacggaagtgttcagtttaaggatggacaatccggtaaatggacactccagtcaagtggccttgcatcagtcattctgaatgacggcagttccgtttattttttctataaagataacgcgtggaaagacccgaatgcctgcacttatggtttaggtgatgagccaaatcctgatcccgggtgttaa

SEQ ID NO: 281899 - DNA, 411 bp, Morganella morganii
atggtaaagagaagagatatcctgttatttgtcctgttttttgtaccggctattatgaatgctatgtctgtaaaaaatatagaaatagaaaattcaggaatcactgtcacaaaaaatccccctgcgggtgaagttaatgcctgtaaaaaattcacaccaaataaagaacaactgatcaattacttccggtcagcagaaacatcgtcagacatgtcatgggatcatgattattattcatcctgtatttcatacggcagtcttgaacttgaaaatggtcagaccggtaaatggcgaatatcatcaagcggtgccggcgatatccgcttttctgatggtaaatatatctgcctgttccgcgaaaagaatgaatgggttgactcttatttatgcggtgatgaacccgattgctga

SEQ ID NO: 281900 - DNA, 309 bp, Morganella morganii
atggcgaatgaaaaatatgatccgacatggagcggatatatgggcgattacctgcgcggaaaggtgggtatcaaccaacttaaacctcagcatgagttttttgatgctatcgggcttgaaaaggcactccgggataatgtgcagtatgaggcgctgatttcagcagaacaggccgtcgaaattcttgaggatataaaaccaccggagcctgttaaccgcggtgacagggaagctatgctgcgggatcgtaaccgtcaggcaaatccgctttcaacattttttaagtataccgaccctgttgcaccttaa

SEQ ID NO: 281901 - DNA, 423 bp, Morganella morganii
atgctgaatatggggatcggtatgcagggcctgaaagacggcattgtcaaaggtgttaaattctgtttggttttctcatttatttacagagggttggaatgggcatttaaggatgagtatcattttgcagatttcttagggaatgcgacagcagatatggcaaaaacagctttagttgctgcaggatcctgggctgtgggagcattttatttatctactgtagctgtcggggccagtattattgctgttggttttatagtccttcttgttggctttggcatcacagttgctttagactatatagataaaaaatatggattaagtgaaggtattattaaatatttaaaagaagaatccaaaagaaagccaagaactcctgaagctgatataaacaaaatcctccattcattcccaaggagttaa

SEQ ID NO: 281902 - DNA, 186 bp, Morganella morganii
atgccaagatggggaaaagtaattgtatccgtgcttattttcattatagcaacagctattagcacactagtttacgattacatcatctcattatttaaaatgatggatgtaattgtattttccggtccaattgcgattttatcgttagggatgccattttactctatgtgttttttgcaggtatga

SEQ ID NO: 281903 - DNA, 435 bp, Morganella morganii
atggtcagggatttgaccatgcccaaatggggaaaagcaatagcttcggtattctgtactattatatcaatggctatcggtgcactggtgtatagttatgttatttctttgttcaaaatggaaaatattattgttttttccgcaccaattataacagttgtgatatcgacaccacttttagtctatgttttctctgctggcataattgaattttcttttggtcaaaaatcaatcttttttaagatactaatgaaatataataaattcataatgagattcttattatatctgggtatagcagggttctttatcagcatacctgtttcctttttggtaaatatctaccttctcgataatggctataaaacatgtgacagaatctcatggaggtcaccaaccacctatgtaaaagacctgtcgctttgtggcaggtaa

SEQ ID NO: 281904 - DNA, 261 bp, Morganella morganii
atgttaccagcagcaagaatgggcgatttagcctgccattgcggatgtgtggaactgggttcatgtaacgtgtttaccaacaatatcccgcaaacctttctgggcgcgccggtatgttgttccattcacgttaaaagctgtatatgcacgtcttcatgtacggtattcgtcaataatatcccggctgcccgtgccggggattgcggcggatgtatcacgacagtggttaccggctcatgtaacgtgtttatcggccactga

SEQ ID NO: 281905 - DNA, 591 bp, Morganella morganii
atgtatttaatcaatatattcagaaaatgcggaatattattatattcctgtaaaatatctttatttatgcttttaggaatatttacatacgcgcatgcggaagttgtatgtgataataattgtaaaatgactgtggagtttaaaggggtatataaagaggatacgtgcgtcatttcaattaatggtgcatcaaataatgaaactgttttattgccgacaatttcacacagaacactggatcaacctcaaaaagaagccggatctacgttatttacagttgctttgaataactgtcccacagaagttgaagttaatctattctttaaaagttttgcgaacttaagtcctgtaacagaaaacctcaaaaacagagacggtgatgggtttgcaaaaaatgttgagctccggatccgggatggcaatgcgaaacatattgcgattgacaatcctgacgccgggcagctttataatataccagcagtaaattcatcggtacctaagaattattacgtatcttattttgctggtgaagatcctgttttaccgggtaatgtggaagctaaaacagtactcgaagtagtctataaataa

SEQ ID NO: 281906 - DNA, 2568 bp, Morganella morganii
atgctctgttcttttttatttccggccgtatcatttggtaacactacatcattgacagatgaaacgagtgcagatgataacaagatggaatataacgccggttttattcagggactgaatgttgatgtcgctgattacagttatggtaatcctgtaccggaaggaacctataccgttgacgttattctcaatgagaataacagagggaaacgtagtattatttttaaaaatattaccaataataagcgggctgatgcgtgttttacgcttgaacaaatagaagcactgggtatcactccggataaccgacagggtaatcaatctgatgataataaaaataataccagtgatgacggtctctgccatcctctgactttttatgtcagttatgcaaaagcctattataatacagcagatttaacattaaatatcacggttccgcaggccagtttgtcacaacagtataaagattatattgatccctcccgctgggatgaaggagtgactacactatttgttgattacaacctgaacagttatctgtccaataataaggtgggtaacggtaaagatactttttataataccaatattaactggatggccggttttaactacggcggatggcgtttcagaaaccgcagtaactcggtgtggtcaaaaaatgacagcttcagtaataaaaatattcaactctatgccgaaaccgatattacgccctggaaaagccgtttaacgctgggtgaaacctttaccagtggccgtatttttgattcttatggtatcaggggtgctgttctcggttcaaacacccgcatgcagccggattcccttaataactttacacccgttattaccggcatcgcagacagtaatgcccgggttttaattcgccagaataattacactatttatgaaaccaccgtcacgccggggccatttgaaattaaagactatggtgcaatgggaactaacgggacgttgcagctggtgattattgaggccgacgggcgtgaaaaggttcaggatgttgtcttttctgctccgccgatgatgctgcatccggatacgatacagtatgccatttccgccggggaattacgggatgattcaaccagtgattcaccggttgtgatagagggtgaattccttcagggtatcaataacttcttaacctggtataccggttttcagttatctgaaaactataaatctgtggctgtcggtaacgcactgaacacgcctcttggtggtatttcggtcgatatgacacatgcccgcagtgatctgaaagataaatcccagtcaggtgaatctttccgtatcagctacagccggttatttgaacaaaccgataccaaccttattgtatccagttatcgctattcaaacgatggttacctgaatttccgtgatgccacaatgatccgggaacgcggggaaaattacgacgataaaaaacgggatgatgaaggtcacttaattaatacttatcttggtgtcagagccaaaaaccagtattccattaatctgaatcagcgtttgtggggcagcagttcagtttctgtgatgggtaattattatgattactggacaaaccgggacccatcatcgcagtggagtatttcctatcagcaaagtctggggtatttctcttacagtctggcctatcagcgtgctaaaacaggtacggacagttatgacaatacctatatggctaacgtcaatattccgttctccgggggatatacttatcagccgttattcaacagcctgtctctgatggccacccgcaatgcggatggtaatacggcatttcagacctccgtttccggcagtcagggagagcagagtgaactgagttataaccttggtgcgacagcgaattcacactctgatgccagtgacagccttaatggttcagccaactaccggacatctctcgggaactatggtgttactgcatccatggataacaaatcaaaccgtcaggcatctgtctcagcaaacggcagtattgtcgcccatccgggcggggtcacgcttggtccgtctgtgggggattccgcgtttgccattatcgaagcaaaaggggcagaaggaacaaccgtactgagcggtaccggcagtaaagtggacggcagaggatacgctattgtgccttatctgaattcataccgggaaaaccaggtggggcttgatgccagtaaagccggaccggatgttgatctgattgatgaccaggtcgtggtggttccgcgtgatggttcggcgattgcagtgaagattaaaaccaatgtcggtaaaccggtcgttctgattgttaaagataaaaatggcagcttcctgccaatcggaaccaatatttatgatggcagcggggcatatcagactattgtcggtcaggccgggatggcttatctgcggggctgggatggcagcagcggagcattgtctgttaaatccggtacggttggcgaatgtgtgattaatccggagccgggtattgcacagaaaatatctgctgcaggggactctgtggtccgggtggaggttaaatgtatttaa

SEQ ID NO: 281907 - DNA, 765 bp, Morganella morganii
atgttggttaaattgataaaggcgttattgatttcttctcttttttccggctttgcatatagcgcggtagctatagagggaactcgtattatatttgaaggcggaaaaaaagagcaggtcgtcaggattaataacagagatgaaactcagccggcacttattcaggtatgggctgatgatggtattgatgttaacaatatcaataatcccaaactgccgtttgtgatcacacctccgataagccggatagaaccggggaaaggacagagtatccgtgtcatttataatggtacaacgcttcctcaggataaagaatcagtttattactttaatgttctggaaattccgccggaaaatcctgacagtaaaaatgcgtcacaacgtttagatatcgcatttaagaccagaattaagcttttttatcgtccggaaggattacttaaaggatctggcggtgttcggctggatgatctgaagtggagtgtggtcaatattccgggaaaaggcacagcattaaaagcagaaaatccatctccgtattttatttcgattgtcgcaataaaagcaaaaattaacggaaaagaaacagaactcagaggggatatgcttgctccgatgtcttcagaggtttatacacaaaatgacagtcagcagccattaaacggaagtatagctgattttacctatgcaattatgaacgactacggggctcaggttgtgactaaggttaccaaatcaggttcgggttataccatcgtcaaatag

SEQ ID NO: 281908 - DNA, 588 bp, Morganella morganii
atgaacaaattaaagttagcattattagttgctggtgctttagttgcaggtgtaagtacttctgcgctggctctgcagggcgatagccagggtactgtgaccttcaaaggtaagctgattacagaaacatgtcatattgaaggtcaaaaagaccagacagttatactggatgcagtttctattaaaacactggatgcggtgaataaagaaggtggattcaaaaactttaatattattgtgaactgccctgatgccaaaactgaatttaaagatgttggtatccactttgaacctgtcggtcagacaactgcctgggattcatcaaccggtaacctggaaaacgcctggaaatcagatggtactccggcgcaggatttactgtccgcagctaaaaatgtgcagatcaaaatctacaatactaacgataatcagactaaacacgccaaaattggtgaggttagcaaatggatgaccgccgcagcaccgggcgtaaatacatttacctatgcgggtggttactatgccactgctgcaactacaccgggtgaagtatttgcccgtgtgcagtacaccctggtttatcagtaa

SEQ ID NO: 281909 - DNA, 1017 bp, Morganella morganii
atgaaaataaaattactggcggctctggccgctctgggaatgtccggtaatgcgctggcttatggtaactgtaacatagtggatcctcttggttatcagattgaaacactccttataaaacccacaggtattattaaattacgggcagatgccgaagttagtccggtaaaggatattggtcgtgctgagtccgatccaacagctcttccggtaaaatggcaatgtgatggtgacagaatcatgctcagccgtcctctcagtggcgatcttgtaccttatcgaggttaccctggtatgtatgaaacaaatatcaccggtattggtgttaaattctttattacagcaccgggtggtagtacaggtggtttaatgccaatcgcgccgtataaagctgccggtaatgaagatggtgctacttatactaacctgattataaacagaggccgtattgttgcttatttttataaactggaaagtgctgtttcgttgagtacacgctccccggatcaaaatcttgttttagatccggttataattggccatacaaaaattgaaaacctgaatgcagtaatttacaaaatggatcctgtatttattgccggtgttcctgtgtgcaaggtagatgctcctttacctgttgacttcaatacagtaaatgcggctgatgtacgcaaaggtgtcgaaaaaacatttgaatttggcattaattgtgccaccgattatggcaactatgatattgctgcatcaatagaagcaatcaatgtgacaaatgatggcctgattcctgttgatgattataaattaaataatgaatcattaactatcgaaataagtgaatttggaagtaataaaaaaatcacggctgatggtaaaacaaaactatatctaaatgatattaaaagtggtatcaaagccaatttcaaatggcaggccaaactaaaaaaacaagcggataaaccttatccggctcaggggccattcagggcatcagctattataacccttgagatcaaataa

SEQ ID NO: 281910 - DNA, 1347 bp, Morganella morganii
atgaaaaacacaatctttgtcagtatagccagttatcgggatccggaattaattccgactataaaaagcatgatcgctcatgccgaaaatcctgaaaatatttttatatcagtatgctggcaagttgaagagaaaaatatatctgccttcactgatatcggtgcagtagaaatccactccgaatcagatgatcctgatgtatttacacttaactataatggcgcaattatccgtatccactatgtgcatatttatgaagcacggggagcctgctgggcccgttactgcgctgaaattgcatatagcaatgaagattatttcttacaaatagattcccattgccgttttattgaaaactgggataaagaaatcattgattattatcttcagttatgtgaagtaattgaaaaacctgttattaccggatacccaccttcgtatacaccggcaaccaaggacaaagaagaagtactcggcagcggtacatgccgtattgtctttaatgaatttactgactctgacatacctgcatttaaacctgtgggcatcaaaaatcaggaacattatgagcgtggcagctatattgccggtgggtttgctttttcttccggaaattttactattgatgttcctaatgatcctaacctgtttttcctgggcgaggaaatctccatgtcagccagagctttcacccggggttataatgttgtttatccggaaaaaatatttgtctggcattattacacacggaaagaatgcaataaaatatggggagatctcaaccaggaatccgttgataaaaaattggtgaaaaaaggctggtgggagtgggataaagcatcaaaacaacgggtccgttatctgcttggtatcgaggtcagtgacaacattgatctcggaaaatattgtcttggtaatgtccgtacactggagcaatttgaatatctgaccggaattcattttcgtgaacaattaattgttcaggaactgactaaagaccaaaagccctctatgttcagtgatattccggaatcacgggaagcctggctggccggactttacagcccgttccgtcagtcaatcaccattcagaaatcagaactggcagccaatgatgacagtatcgattactggtcattaggtgtatttactgaagataaccaactgattgctatgcagcgactgaccactgacgaaatggctgaacaagagtccggtaataataaagaaagttataaacttgaaattaaactgaaggataaaacgcatcttatccctaaaaaactcaggctggcccccttctttaccgactgcggctggggagaaacggtggagaaagtatggtaa

SEQ ID NO: 281911 - DNA, 657 bp, Morganella morganii
atggttaagattcattggggttttgttgataaagttgtttatatcaatcttgcagaaagaactgatcgccgggaaagtattgagtttcagatgaagaaagccggtataccgcagaataaaatcatacggtttgatgcgataaaaaacgagaatggtgcattagggtgtacactttctcatattggtgtcatggcaatggcagcggagaataactgggaaaatgttctcgttctggaagatgacatgattttcaatgatgatgatgaatcccgggacagaattaattattttttcagcagccttatgtctgcggaatgggatgcaggcttattgtcaggaagttatttctctctcaggcaggttcatggttgtttttatcagttatatttttcatttctggcgaatagctatattgttaaccagcattattttaaagtactgatggatgttttttcttcttcaaaagagtcgttaatgaacggaatcagaaggaaatattgttgtcttgactattactggaacaggttaatggaaaaggacaattggtatgctatctatccttgtgttggttatcagaagacggatatgagtaatatcgagaatacagaaacaaacagagaacatctttttgtccgtaaacttcatgaaatgaaataa

SEQ ID NO: 281912 - DNA, 216 bp, Morganella morganii
atgaataacaaaatttttgtcagcatagcaagttaccgggatccggaactgataccgacgataaaaaacatgatagcccatgctgctaaccctgagaatattgttatttcagtgtgctggcaggcggaagaacgggatatcactgtttttacagatatcggtgctgcggaaattgattccggctcagataatccggatattttccgccttgattaa

SEQ ID NO: 281913 - DNA, 174 bp, Morganella morganii
atgcagcgtctgaccactgatgaaatgtctgaacaggaatccggtgataataaagaaagttataaacttgaaattaaacagaaagagaaaacgcgtcttatcccggaaaaactcagactggctcccttctttgctgactgcggccggggagaaacagtggaaaaaggatggtaa

SEQ ID NO: 281914 - DNA, 1221 bp, Morganella morganii
atgagaaatgaaataaaccggtgcagtcgctggttacaggggatattttccctgtttttgctgctttttgctgtgacggcatttgctcagacagagacatttccccgtatgcagggatcggtcaccgataccgccggattgctgactgcatctgagcgcagcagtattgagcagaaactgaatgcactgcgcgagcagaccggtacgcagattgcggtactgacggtgaacactaccggctcgcgtgatattgaaagttatgcggaaaaagtctttaaccagtggcggttgggtcgtatcaacattgatgacggaattttattgctggtggcgtcagatgatcgcgcgatgcggattgaggtcggttacgggctggaaggggcggtgagtgatgcggtggcaaatcgtattctcaaagattatttcattccgaattttaaaatggggaattatgccggtggtattaatgacaccgtcgatgccctgattgccagagtcagcaatgaaccactgccacctgttaccactccggcattctttatcgccaaacaggcagggcccgtcggctggattgatattgtgcttggtgcggtactggccgcgagtgcgtatctgtggggggctttcctgtatggcatggtgaaacgctttaaactgaaagcggcaattccgatcgccattattctttatctgacctggtacgccggtggctttaataatccggccggaaacggtatccatttcggggaggattttctctacacagaattaccgcgctggagtcagttcctgttcctgaaaattttgccgttctggctggttatcgtcctcacctttacgatgtttatcgcagtcgttttcctgttcctgctctgcctgggcggggctatctggctgatcggaaaagtggtgaaaacaaaaaaaatgcgtatggccatcggctttggtgctttcggcacgcttttcgggtttattttcggtttgtcgtacggcggcagcacggcatttgcgctgttgtgcgggggcggattcggtctgtttatgggcatcggcaactatctcggcattgttaaatccggtggcgggggcggaggcggtcgtggtggccgtggcgggggcagcagcggcggtggttacagcgggggcagccggagcagcagccgatcttcatccgggggcggcggacgcagcggcggcggcggggcatccgggcgctggtaa

SEQ ID NO: 281915 - DNA, 132 bp, Morganella morganii
atgagttatctgtatttggcaatagaagttgaacaggataataacaaggataaaccatccttaccggtcgtgcttttccggcctgttatcagcgataccgaaaacatcggtatcgggtatattttccagtaa

SEQ ID NO: 281916 - DNA, 882 bp, Morganella morganii
atggataaggcattttgtactttcgatcaaaaagaatgggatgctgactcattctctaaattatctgaccgcagtattcaggatagaaaaggtaacttgttttgtcccggatgtaatgggaatgcctggttcaggaagggtaactacgggaacgagtctcctcatttttgcgcacaccatgatgaaaaaggttgccaatacggtacacaatatgaagctgttggtgaaggcgatagtgatagaaatataccgggaacagacgatgcaaatggtataattttagctttaggggcctccaaaaatgagggagtagatgtatcttctgctggctcgatcctcgaaggtaatgtttcagggcagaagtttgttcgcgggtattctgctaatgatggtcaaaaatatccggagcaggcttctttaaaaaaaattttactcagattagtaaaatcagatggaaaattttttgcagacaaatgctttgcgatgacagatggtaaccttaaaggactgccggaaagtggttctgaactattcgttaatttttctgatgtctttcatcgaagttcaataaatgaaaatgaatctcctttatacgatggtaaaaggcgaatttattggggatttatcagtgatgtcaggcaatcaaatgatggtaaagtttggttaaatgcaggtgatataagaaaaggtttgagtattaagctgcctgaaaatgcaattgatgaattcagaaaacgttttagagtggaaggtgattttgacatattggaaggttgtcatgcaattgttataggtacttgtatttatgcctcaaccggaaaaccaattattacttgtagtgaccttaattacattacgttacggcgctataaagcggattaa

SEQ ID NO: 281917 - DNA, 357 bp, Morganella morganii
atgaaaaaagcacttctctttttattactgggtattttctccggcggtcaggcgctggcggcaaatcaggtgatgtgttacacctatctgaaaaaagtcaaagacgttgaaatcgaaaacttaaaagtctggtgtatcggcaccaccgacggctcgcagggcggaatgcgtatcccggagctgctcagtatgggatataacgtggtggcaacggaaagcttcccgtatcagtattctgagggtggctatacctatgacggatccaaattactgctgatcgtcgaaaatgcaaaattcccgaatcagaatccggcagaaaaacccaaaaataactggaattttgataagtataaataa

SEQ ID NO: 281918 - DNA, 585 bp, Morganella morganii
gtggagaataccttattcagtcttcaccgggctgtcagtgaaaatccggaaaacggtactgagacggaggagtttacccgcacactggcaattcagtcattttgggttgaatcacagggacaggcaggcagcggtaaagtggggctggcattttgtcagggagaagatgataaagagcccatgctgcttgcttacatgcgtgatgacgacagtaatgagccaccgccggacgtggcggcgcagatgaactccggggaacgtgactatgcggaattgccgggagcttttttgctgacgatgaccgcgcagctgaattacacactgtgtatcatcgctgagaatgaagaaaccatcgtgctggacagtgatgccctgaaaaccctgctgacctatcttcagatactttacagcgaagacaacgaagcagatgaagaagaggacggaaatccggtcacgtattctgcggctgccgggacaatgcgcggcggcagtattgtggaaaaacccggcagtgccggaaaagtgataggttttctgattctggcggcggctattgtggcggttgtttactttatgcagacctga

SEQ ID NO: 281919 - DNA, 1002 bp, Morganella morganii
atgttacgcccgatacttcattctcttattattaccggttcactgagcctgagcgctttttcttatgcggatggcccgactctgtcgttaagtgtcagccagtccggcggttctgcacaaaatgatgatggctctcctgatgccacacgtccttctgaatccaaatcccgtattctgcctatctggggcgatgaagcccgcgcccggggttatgatcttcccgagccttttggtgtcggttataactatatgaatctgcggcaggatattgttgtggataaaatcggctttattatgccgaaaaatccggaattcggtaatgcgttaaatattaaagccggacatacccgggaaaaaagtgaaacgcatatgctgaaggtggattcctgggtccttccgtttatgaacgtgtatggtttatacggaaaaaccaaagggaaatcccataccacactggccggcggatcaattgatttcggcggcggctttgttatggatctgaatccgctgctgaaagaccagccgtttgacctcgactttgaaggtaaaacatacggtgccggtatgaccctggcgggagcgtatgaacagttctttacaacggttgatattaactacaccaaaaccaatctggatattctcgacggggatattaaagcactggtgatttctccgcgtgtcggttatgagtttgtattttcaccattaattgccggtcagggaaataccaaattacaggtctggaccggggccatgtatcaggatattacccagcgctttaaaggggatatcagcggactgagcttaccaccgcaattccagggtatgatcaatgcgctggaagatccggatatgaagtttgatgttaaacagcatcttgcccataaatggagcaacctggtcggagcccggttagaagtgacccgcaattttaatataatctcagaagtgggttttaataaccgtaacagtttctttatttccggagaattccgtttttaa

SEQ ID NO: 281920 - DNA, 1965 bp, Morganella morganii
atgaaatcagttaagtttgcattggcgccattgtccgccatggtgctgttatcgttctgtgcgcaggccggaactcaggggaataatgatgacacgattgttgttaaatcctcgaccattgaatccaccaccgttaatgaactggcaaattacgggaacaaattacaggttattacccgcgaggaaatccagcgttccgggccgtcatccgatttaaaccaggtattacagcaatatgtaccggggttatatgtttcgatgggacaaggggcttacggctacgggaaatattcctttatggggggccgcccggatgacaccttaattctgattgacggtgttcgtctgaataaccgcctgttcggcgggatctatctcgataccctgccgctgattgcgattgaccgcatcgaagtgttacagggggcgcagagtctctctttcggtactcaggcgatcagcggtgtgattaacattgtcaccaaaaaaccgacctcagaggtactgtccggtgagttcagtgtcggcgcggatacggacaaaggccgttacggtgaagggtatatcgagaaagcgtttgataacgatatcggcaaaaccggtctgatggcgtgggtaacccgcagtaaatcagatggttaccagccgtatcgcgacagtgattacaacggcacgatcggtcagaaaaagcgtggctatgacgtgacatctgttggtgttcaggttacccagactattgcggatgccgcacaattacagggattctaccagtacacgcaggctgatctggatatggtgacacctaaccaccaccgtcaggcgatgaacaagcgtgaccatcatctggccacggtttcctttgaacatttcctgacacaggacaccagctactcaatccgtgcacatcttaatgactggaatacccgttatgaccgcagccgctatctggcggacggctccgtggatatccagaatgacgattcttactggggattccaggactacggcgttcaggcacagatcaaatcttacctgttcggggataacgagtttgtcgtcgggacagataaccagtggtacaaaggtaaagatgaggtcatgaagatcgaaacggataccgcgaaagccaatgccctgtatttacaggtgcggccggatatccctgtcttaccggagctgaaaccaagtctcggcgtgcgttatgaacgctttgaaggtggccaggatgcaactgtctggatggcaagcaccaaatatgaagtgaatgaaaagctcaatttacgtggtcaggtgggaacagcatttaaactgccgaacgccgagcagttatatgtcaaagatgaaagtaagcaaaccattggtgatgccaacctgaaagcggaaaccagtaaaaacatcgaagccggttttgattatctgacgaagtgggaaaacggtggtgcctggcagtttggtgcaacggcctacgcccgtgaaatcaatgatctgatcacgacagtgaaagtcggtaaatacgataaatgggtgaacggtaacggtgaaatccgcaccaaaggcgtggtactggcgaccaaactgaactttgatgaatcctggtatgtctccggggatatcacccgtaactggctggataccaaaaacggcgcaacacttaacgatatcccggaactctttacccgcggccgcatcggttatgacgccccggcgaaacagtggggtgcggaactggctgcccgctatgtgggtgaactgaaatccggtggtgtggcttatggtcattacaccgtgtttgatgccagcgcgtatctgtatgtggatcatgcgcagcagcataagcttacgctgctggtggaaaacctgcttgaccgcgattatccggcgggtctgaccagtaacggtctggaaaaagtggacaacctcggtcgtccgttaaccgctgaactgcgttatacctaccgtttctga

SEQ ID NO: 281921 - DNA, 315 bp, Morganella morganii
atgagtatttataatttggtcgttaaggcaattaaagaaaagatgcagattcacgctacttatcagggcaaacaccgtgaaatgtgcccgcatgtaatcggaactaaaaacggccgggagcaggctttgttttttcagttttccggtgaaagcagtaagggacggatccctgaagaattaccggcctgctggcgctgtatcgtcattgctgagttagaagatgtaaagatagtcagcggtcagtggcatacaggtgacaatcatagccggcctcaggtttgtgttgataatattgatgagcaggtggatttttaa

SEQ ID NO: 281922 - DNA, 333 bp, Morganella morganii
atgaaaatcggcaaatacacggtttatgccccgtttctggcgggatgtgatgaatcagatctgtatcagcagttgcgcagcggtgaccgtatctggttatttgaccgggtcgccccttctgacgagaataatgagatggcagagcttatgatgggcacgatttttccggataggtgtttccgcatgctgcgtctgaataagaatgaaaaaagcatcagaatcattgaattcaaaggtcatcatctcagcaaacaacaggcgctggcatggcgcactgcacatccggtgatgtatccgcaaaaagcacaacagaattcacaggagcagaaatga

SEQ ID NO: 281923 - DNA, 528 bp, Morganella morganii
atgagagaaggattcatcgaaagaacaggccctttgctatttgcattcgtcacggagcaagacttttatgctataaacatttacaaacataatgattgggcagaaaataaaatattacaaacaatgcatgataattggccacaattaatatcagcttacaaagcgcccaatataacaaagatatctgaaactataacaccttcacaaaggacctctttgcgaaaaataaatggcaattcattttttactgcaaaagatggcacagtatatatgccaacaggtggaggaagtgtagctagtggatataatttatcaacaacaataaaggtaatgaggactagaagatatattaatattattagtgaaattctggattcattatctgaggaaataagaaaagccttactcaagtcaggatatttagagggtaaaaatatagatgcaaaattaataatattaaacacaggttatcttatatactttccaaaaaacgaactgatgttaaatatactacatactatatcataa

SEQ ID NO: 281924 - DNA, 1242 bp, Morganella morganii
atgcgagacagctttccaggattctatggagtcagtgaagattcgatcggtacagtatttactgcagaaaatacgatattcattttcgatgcgaatatactcctaactctctatcggtgcgaggaagaaactcgtaaccatttttttgaaatttggggaaacatcagaggaaaatgctggtttcctcaccaagtttgtctcgaatatcagcgtaatcgcttgaaagtagtaaaagacagccgtgatgcgttagataaaatacctaagaaaataaagagttcaattagtgagttaaaaactcatgtttttgatggtgagcataaccaaactatctctcgatattctaatttaaaaagtgagctttcagccctatttgcccaaatagatgagattgtttgtgcattttatgacaccagaattaatgccagaaaaaataatatcgattatttaaataaccatgatgtaatccgtgataaaattgatgaactaacggaaagtcgtatcggcccagctcctcaaaatcaaggagtgatagatgaattaaacaaatcagcgaaaattcgttacaagtacaacaccgggcctggatttgctgatagtgcggacaagaaaacaaatttttattcattcgatggcattaattatgatgctgaatatggggatttttatgtttggagtcaaattcttgaatatgtaggtgataatcaaggcagtaatgtggtatacgtttcaaatgatgctaaatctgatttctactataaaattgaaggtaaaatccgcggtcctaatgaatctcttcgtaccgaaataaaaaaatatggggcagcagaattcttgcttcaaaatatcgatacatttctccaccacgctaacactcatttgaatgcaagaatcgacgagtctgttattacagaactgacaaatgccagctttacagatgaagatgtcagcttgaaaattagaaatgaaataatatctgagcttgcagaaggaagcgaagctttaataaaaaatagagaatcagttgacgagctttatttattttacaacaaatacctggataaactaaattcctgtaaaatggaactcgaagagataaattcaattcctttatcagaattaaaaagagaaagaatacggaaattaatgatggataaggaaaaattaacaatgcgaataagtaatataaaaaatgttttaaatagtgtgggctcaaaaattatatcttcacaaggagcgtag

SEQ ID NO: 281925 - DNA, 1053 bp, Morganella morganii
gtgtttattcagatcaaaacattatgccgttccgggctttttctgtggctgacagccggactgagcttgtctgctatcgcagaggaaaattgtacattaatgacaccggaaaccacactccgtattcccggcggggttatcagtgcggctcatcatgtgccggtcggcggcgtgatcggggagacgatactgtctgacagtatcgatgtttatcagtgccggatagagcccggtaaagcgatcgagtttgtgctggtgggcggcatgccgggtaacaaaatacaacatgcctcagggcaaacaatccatgaacttcccggtggtattggttacagcctgggggcggtagcggagcatccggaatgtatgaagtcatcacgttatgtggatggccgtgactcgccggataacaacaatgccaataaacggctgtgtacgatcagcagcgggatggatccgtctcagccataccgggtgcgggttgcggtcaccctttataaactgaaaccgcagataacggcacatcatcccggcggctatctggggcaactctcaatgcgtgttgacggactgtggccgtgggaacggtatcatattgtagaatccgggttacatctgggcggatttacggtccggcaaaattcctgtgatcttgatccgcagacagacacagaagtggatttagggccggtatcacggacggatttcagcggtaaagggtctgttgcaccgggaagtatccgcaacctgactatcgcgctgcaatgcaactctctggcgcaggcggatatccggttgtcgggcagtgcgttcacggcaaaaaacagcccgggaacgctgaagctgacgcggggaaacggcagtgcgtccggggtgggcgtcaggttgctgcataacggcagaccggtcaccttcggggaagcgctttcgtttgatgaagtcactgctcagcgggccgtattgcggttacaggctgcttttgtacaaacaagggacagtattgtgccgggcacggcggaaacaattctgaattacaccattcgttaccagtaa

SEQ ID NO: 281926 - DNA, 2391 bp, Morganella morganii
atgcaactgaaaacaccttatttttttcttctggtgctgcttccggtttttttccccggaaaggccgtggcggcaccgtattttaatccggcggcactgggtctgaacggtgataacccggtgatggatcccgcgcagtttcagtatctgcgtgaacggcagtttcaggaagaagggcgctattttgtgtcagtcagggttaatcagcgggaaacgggcggccagtggctggaattttattatcatccgcagcaaaaaatattgctgccggtggtgacccgaaagcaatggctgatctggggattacggcctgatgcatcgtctgcatttgctgaaacggaaaacacggcaccggttgcagatattgccgggctggtcagcggggttgtgctgaattttgatgccgcccggcaggctctggatattacgatcccgcagcggttttttctgacagatgaacaacgggcagcggatgcttcattatgggaacccggaattactgcgtttatgctcaactatgattatcgcttttcccggcaaaacagccggttcagtgataacaccggacatactctgttactgcaaagtggttttaacaccgggttctggcggtttcgccatcacagcagagctgaataccgtgatgaaaaaatgacatggcagtcagaacggctgtggatgtaccgcgctatcgcacctctgcgcagtgagttacagctgggggaactgttcagcggtgatgtgttgtttgacagcctcgcattcagagggatccggctggcctcacaaggagatatgtatccgctgaatcagcaggggtatgcgccggttatccgcggtatcgccgggcagagtgcggaactgactatcaggcagcagggcatgattattcaccgtgaaactctacccgccggtgaatttgtgattgatgatctgaacagcacgtttcagggcacggtgctggatatcacccttgaggaagcagacggtactgtgcagcattttatgcagtatggtgccgccgttcctgtcatgcagcgggaagggcggcttaaatacacactggatgccggaaagcttaaccggtacggaaacagcaaaaaaccgttgtttgtgcagggcaccgcggcgtatggcatcaactctgttctgacattatacggcggcggttatgcggcacagcatgccctgagcagcggggcgggtgcgggtgttaatatgggggcggcaggcggggtttccgccgatattctgatgcgtcatacaacagcaaaacactatccgcgttaccggttaaattatcagaaattttttccgcttaccggaacgttggtgaatacaggggctgcccatgatcagcaatcaaggcaatggcaggcccggctgctgcaaccgttgcccggggattacggtacggtctcctcaggctgtcactatagccgcaggagcggataccgggctctgatcagccgtgatgccggctatttcagtcatatcgggcggatacattacggcctaaatgcacagtaccgtaccggcgggcagtttcggaaagcggataaacgggtctctttttcgctgtcagtaccgctggattttgccggacaatcagcccgcagccattttcattaccaccggcgggcaggaaaatcttctctgcaaacatctgttaatggtttgctgggtgaagagcagcgcctcggatactcggtcacgcaccgttatcagcagcaaaacacgacacattaccggggggcggaactgcgctggcgacatgatctggccgatatccgaggcagaattaaccacagccatgatcaaaacacgctgagcggggatattcagggcgggctgattattcatgaaaaaggcatcactttgtcacgcccgccgggggaaaccagcgggctggctgataccggtggtgccggggggattgccatggcatcccggattgccgcacggacagacagcgccggattcagtgtgattccgcaactgagccattatcaccggaatgttgtccgtatcgacccggaaaccctgccggataatgcggatgcggatgatccggttgtacaggtaatcccgtcaaaaggtgctgtggtgccagtccgttttgcggtgaacagtggtttccgtgcaatttttgcactgagaaccccgcagggtgtcgtaccgttcgctgcccgtgtaaaaatcagaaaagcagatggcagcagtgtcagtggtattaccggtgaggacggggaagtgtatctcagcgggttaccggctcaggggcgtttgcaggcgctctggggaaaaggggcacaggaacagtgtgaagtgaatttttcaatcccgccggaacagcagggattgctcactctcccgctgatgtgtcagtaa

SEQ ID NO: 281927 - DNA, 669 bp, Morganella morganii
atgaaaaactacgtcactttttttattatcatttacctgacaatgagtcagtcaatcgcagcggtagtcgttggcggaacccggtttatttatccgcaggataaaaaaatgctcactgttcctgttgataataccgataaaaacacagcttacttaattcagggctggattgaaaaagcggatggcattacaaagagtaaggatttcattcttaccccggttctctttcagctggatgcgggaaaaaaaggtatcctgcgtgtcatgcttaaacaagccgtctttccggaagacagagaaacattgctctggctgaatatccgggggattccggaaacagaagaacacagagaaaataaacttcaggttgttattaattcaaaatttaaattcttttatcgtccggcgggattaactgagcctgattataatgacctgaagtatgaacagaaaggaaataaaatcaatataattaataacacacctttccatattactgtcagggatattacggttaataataaagaacataccgtttccgacatgatcattccgttcgaatcattaaccataccgctaacagcgattcatcataatgacacgatcacagtcagttatatttctgatttcggcgggattatttccaaagctgtgatgtttaaaaaataa

SEQ ID NO: 281928 - DNA, 576 bp, Morganella morganii
atgtcttcattaaaaaacaaactattaatttcatctttattcttactgtcagttaattcatttgctgctgacggaaatgaaatcatcggagaacaacccgctgaggattacattccaatcagagggaatattgtatttaaaggtgagattacagactcaagctgcgatattgctcagaggaatatagaggtggatctgaaaagccattctgtcgcattgctgaaaaacaaagatgacaaaacaccggcagaacagtttgatattgttatagaaaattgttcattatccatgacatccttaaaaattaatatggctggtactgcacataaagataatgccacattgtttgcattggatgcagatgataaaagtgccggtaatgttggtattgctattaccgatatttccggtgccggtaatcatttgatgaaccctgcgggcggcgatcgcaatattacgctgaaaaatgattcacgggactacacgctgacctatagcgcagcctatcaggctactggcctggcaaccccgggaaagggtaatgccaccgttaattataccgtttcttacgagtaa

SEQ ID NO: 281929 - DNA, 1572 bp, Morganella morganii
atggaaataacctccgatcagaagcggacaatctgtgccatgctggctgaacaggccggacaccctgtccgcagcgcagaaatcacggccttgtgtgatgatgaaaccatccgcgccgccctgctcgtcctcagcagtctgattgacgtaaaataccgcgaagtatccgctgcactggccgcagccagcgctgaacatgaacgcaataatctgcagatgatgatgggcagtgcgctcactgacagcaccctttctgctccggcggatattcctgtcttacaaccggatacggctcatgccgtattccctcctgctgctgagcctgaacccctcattgttcctcccgcccctgaagagccggttatcacggataattccgcctcagaggaagaacaggcttctgcggaaattgaccgtttatccgcaatatttggtcagcatgcctttctgccggaggaccccgcagtccctgaaccggcagtgatccatccgggtaacccggagcctgacttcatttttgtctttaatgaacccgcagtggctgaaccgctgaactcctccgctgataacgatgccgccgaattcacttttgtatacaacgagcctgcagccgaaccagtgataccagctgctgacaacagcatcgcagagccagtcccggtatatcctgaaccggcgacagtaaatcagctgtatccggctgctgatgataaatcctcagaattcacctttgtgtacaacgaacctgcggcattatctgcgccaacagccgcagataatgccgcagataatactgtgttaaccgcctcggtattcagtgataagtctctgttcccggaacccgcagctctcagtgatccgctgaaagtcggtaactggctgtttgacgacccggataccgatgatacggataccccggttatcggtgaactccctgagtcagcacaatcactgtctgcaacagcatccggcgatactcttattaccggccagcagacgccggaaacatctgccggatcaaccagtgataccctgagggataacagctggtcattcagtgcagatgcccccccagctccgttacaggcagaatccgcagaacagaagccccgggggctgacggcactgtctgctgccgggaaagaggacattccgccacaggcagcaccggcaccagtccgggaatctgccggaaagacggtggttacaccagagtcctcacctgacaataagtctcgggcaacgatgccatcaccttccggacaacctgccgtccgtatcaaaatcggccgggccagattatccgaatcgttcagttcaccggtaaccgcaacgctggatgatggccggactgtcgccattctcggtatttatttccagcgtaatatcggcctgagttttaacgataaaaccggtattctgcacggtacaccgacagaatacggtgtgtttacggtacgggtggtatgggagctggcaccgaaaaaacggttttcctccgacatacactttgcggttgatcccggttcacacatttccactccgtcacctgccggttttcctccgcaatag

SEQ ID NO: 281930 - DNA, 312 bp, Morganella morganii
atggcgattttgattagtgccttactgtcaggctgttctgtgtttgataataatcatgggattaattgggggagtaatatttgcccggaaccatccactgatgaaattgcaacgtcggaacatcttaaaatcatggatggcaggacactgaaatgtcagttgcgcccttatgtcagtaacatggcctgtcagggcattacggacagaacggacgctgacggtatggtttgtcaggatgtatcaggaaatgggatgttatttatctttgatgataaaggggggcttgcaggacataaatcgctgcagaattga

SEQ ID NO: 281931 - DNA, 261 bp, Morganella morganii
atgttatcgaaaaaagctttaaaaacagcggtaaagcgggagcttgtcagttatcttatcgaacagtattcgatgagcatccgtcacgcctgccgggccttatcgctgagcagaacagtgtatttttacaaaccggatacccggcgggatgaaccggtgatacaggcgctgacagaggcggcagaacgctatccccgttacgggtttaaaaagctgtttcagattctgcacaggcagggcaacgggtggaatcataagtga

SEQ ID NO: 281932 - DNA, 228 bp, Morganella morganii
atgcgtaaagcacgatttactgaacatcagtttatcgctgttctgaagtccgtcgaagccggacggacagtcaaagatgtctgctgtgaagccggtatatccgaagtcagctactataaccggaaaaccaaatacggcggaatggaagcgtctgatattaaaaaattaaaagatcttgaggaagaaaaccggcatttaaaacagatgtttgctgacctgagtctttag

SEQ ID NO: 281933 - DNA, 150 bp, Morganella morganii
atgtttttatatattacgtatcacattaatatatttggtataaataatatgacacataaattaaaaggccgcgatggccgtatggtcgccattccccggggtaaacatggcattgaaaattcaagaggtagaattgaacctaaaggctga

SEQ ID NO: 281934 - DNA, 1116 bp, Morganella morganii
gtgatcctcgccgtgggcggcgcgattgttctgatgctggccgcgatgctcggcccgatcgctatgctgaaactcagtatgtcagttctcggcatcaagggtgccggtgcgtttggcctgttggctaaaggactgaaagccgtcggactggccttattcggtatcggaaaagccctgctgacgaacccgctgtttcttgccgccgccgtgatcgccggtatcgcctacgcaatatataaaaactgggactctgtcgccgcgttctttaaaaagctgtgggcggatattgtcagtgcctgtgatgccgcatggaaatggatagccagcatcatcagcagagcctgggagggaataaaaaattatttcctgaactacacccttgtcgggctgatttataaaaactgggacggtatcaaaaaatacatgtctgatctgtgggaaaccgtgaaaaccaccatcaaaaccaagtgggatcaaatcatcacggatattcagaacctcccggcaaccatgaagcaggccgcatctgacatgatagacagcgtcattaacggcattaacgaaaaatgggaagacctgaagaataaatttgccgaaataaagcaaatggcaaaagacgctcttacgccggactggctgaaggaagcaaaacaggatccgaagttcgtggcggcagtagaggccacaaaacagagcacaacaaccggcggcatccgcaatgccaactggacgataccggataagaaatttgccggggcctatgattccggcgggcatattccgcgcggccagtggggtattgtcggtgagaacgggccggaagtagtggacggcccggcaaatgtgaccggccggaaaaatacggcagcactggcaatgctggcactgagtacgctgtcccagccgatagccgcagcaccggcacaaaccgccggcggttctgtcagcagcgcgtattcatcacagcagaacgccgcgccggtcatcaacatctacccgacaccggcgcattctgcacaggatatcgccagtgaagttgcccgtcagctggacgcgcacgcccgccggcagcaggccagccgccgcagcggatacggtgacacagaggagttttaa

SEQ ID NO: 281935 - DNA, 2898 bp, Morganella morganii
atgagcagagaaaaggctttagaaaaattcaagaaagttcaggaacggtatattgctcgaaaagatactctttttgaagcaaatgaagctgaaagccgcttactggtaatagatgaggtcctaaacatactgggttggaataaagaagaatttacgccggaagcgtattgtagaacagcggggtatgccgattatatactgagtacggaaagaatacctcgccttgtggttgaagcaaaaaaaatcggtgtaaccttcggactccccaaaaacaccttaactttaaacgaatactctgttgcctatcttaaaaaagcattcaataagaaaatctctgaggtgatcgatcaggcacaaagatactgtgtcgaaaaagcggttcaatatgcattgatcacaaatggtgcagagtggtttgtttgcccaatgttaccaaaagcaggtaaaacaactgactcgatgaaaggtgtttattttgggaatatctttggagaggagttttcatttgatctcatgtataacctcatctccaaggagagcatagaaaagaataatctgaacagttatctctcagaactgaatcatgtaccgtcagaagtgtgttacatgctaaaagatcatgtccatgatttcatttggaatagtaacaaagacaatcaatggatcgatgatttttatgaaaattttttctcccagataacagagaacaatcagcggaaaatgctggaacactgctttgtcagtgactctaagttggatcagtttaaaggagaaataaaaagagcgttaaaagattcaaaacccagttttcttcctaatgatgcgttagacctctcaccttctgaaggtaaagaattcattctggagcatcatactggtaaagttatcatcattactggtgccgttggatgtggaaagaccactctggtgactaaatgtttagtagaagcaagacagcaaaagaacatatatgcgacaccaatcatcatagatttgataaatgatgtatcaaaatatagcattgatgtaaaaaacatcgtattcaattatctgcatgacaagataaaaaacgagtatgaaagcgagtttacattagatgaactacgtatcacatttgcgcatgaaattaaagtcttaaaaaacggcccctacaaggatatattttcccaaaatccggaaatgtttatggtcaaagaagcagaactactggagagggaaagcgccagccgacagagtctagtattaaaaatattccaaaagcgtgttaaggaaaataaatctgttattattgttattgataatgtcgaccgagcttctgaatcctttcaagaggaaatttatgcactatctcatttaataacccaagcatcgggtgcaacagtcatcatcacactcagggagttcaccttctttaagaataaagataaaggctttctagacgttaggccagaagacaagatcattcatctcaaatcaccagactttaacaaattaatttcgactaggataaagtatattaaagactttctaagtgaagactttaggattagagagtggagaaaaaaatatcagcttcaagatttcttgagtaaaatgaatttctacgctgatgtgctgaggaaaaatcttcaactgtcaaatgagagcatgcccattctggaaatattatcttccgtgtcttggcataatatcagaaacttttatcaattgattaaacacgtacactaccaattgggaaacgagtcagcatggcgtaaaaaggatgttatctccactctcacctaccatcctgatcacacggaaaaagcatatataccgaacgtttacctgccctatcagaacgtaaaccagtgctacttcctcaagttaagaatactctattttctgaatgatgcagtttcccccggcgaattggcaaaaggaattagccttgaaaggataatccggttcgcatcactttacgggtataaaaaagattggattagcaaagcaattgagagttcggttaaagaaaggattattgaatgtattgaactgccctctgacagtgacttcaacatagagtacaccgttagctcaacccatacattccgtatatcgcctttaggcacctgtttgatactcgatatctgccatacatcaatttatctgtctttaacatcactttatttgcctttccatgaaaaaaatccctataacgaagcaaaacaagaactcaccagactgattaacgcgatttataatgataagaatattaacaccaatcatgaaattattgatctggtagaagaaagtcagataccagttataatatcaaaatatctgtcatcagagtatttgagagaaaaactgactttttcattactgagaactcaaacagatgtactcttaacggaaaaaagtataaaccgactggtagcatcgttcagtcgtaatataggcaacaacgacgagtttaccgctaatcgtgagaaaagcgatcatagtaatctatccttcgatttcggcgatgaaattgaaaagaacagtgcatccagtgaagagatagacatcccgccttcattcaagccattatctcttgaaaatgtaatgtcctgcggaagtgagtatatccctctcatctttgtcgccttggtgatgcgagcttatcttggttttgagaccagcattggaactcagattacagaaacaattaacgatcacatagtaagtgatgacaataaaaaatatacaaataatgtttcacgcgcgctgcgttctaactctctaatcaaacagaaatggttgctgattaggacggatttgcatcctaaatttaggaagtttgcactgagcagtacttggcagtcagaatggattgaaatatttggtgaagaaccaccaaaaatcgaaatatga

SEQ ID NO: 281936 - DNA, 354 bp, Morganella morganii
ttgttttttgagggcatcgagggtatcacgcttattatcctccaggcgggaaatcatactatcaatacgcaaaagctgattttcaatttcacggcgctgattatcactcactacgcctctggaggttgttttgctgacatcaataacatagatcggatcaccttttttaatatgctggccttcacggacatattgttttgtgacaaatccctgggcatttgcatagatagtgacagcgcgcggataggtggtcacttcacccgtggcattaacctgacgggtgtaagatccgaaaataataaaaataagaaaaaccatcaggaatacggaacatgccgtcataattatccataa

SEQ ID NO: 281937 - DNA, 1260 bp, Morganella morganii
atggcattaagcgacgtagcagcaaggaacgcaaaacccggtaaaaagatgtacaaactgaccgacgaatatggcctgtatcttcaggtgaatccggccggtacaaagcgctggtattttaatttcgtatttgacggcaaacagagccggattgccttcggtggatatccgctggtgtcgctgtcacgcgcccgcgagaaacgcgatgaggcccgtctgatgatactggacggtgttcacccgaagcagaaacgcattgcggaaaaagaagtggaagaggacgcgctgaatacttttgagaaaatggcgcgggaatggtcacagcagatgctcagacggcggcgctggtcagaaacacatgcccggcgggtctggcgcgatctggaaaaacatgttctcccggcaatcggtgatcagcatgtggggatgctgaaaaccaaagatctgctggcaccactgcgggttgtggaagcgaatgaccgccttgagctggcctcgcggctgaaacagcggaccaccgacattatggggtatgcggttcagtgcggtctgattgaccgtaatccggcaaaggacatggcgggggcgctgatgccgccgcgtgtgacccaccgcccggcactgcggctggaacggctgccggagctgctgacacggctggattattacaacggccgtgagttaaccaaactggcgatacagttcacgctgctgacgttctcgcgctccagtgaaatccgccttgcccgctggtctgaattcgacacagaacgcgccatatggacgattccggcacagcgcacacctatccccggtgtgaaattctcttatcgcggcgcaaaaatgcagtcagaacacattgtgccgctgtcgcgtcagacactgctgattctggatgaaatccgcgccgtcagcggcggagaagggctgctttttcccggcgatcacagcctgataaaaccgatgagtgaaaataccgtaaacaacgccctgcgaacgttgggctataacaccgccaccgaactgtgcggccacggcttccgcaccatggcatgcagcgccctgattgagtcaggaaaatggtcacgggatgcggtagagcggcagatgagccatcaggagcgcaacgccgtccgtgccgcctatatccacaaggccgaacatattgtggagcgcaaactcatgatgcagtggtgggcggattacctcgatgcggtcagtcgcgaatttgttgtgccgtatgagtttgaaaacaactga

SEQ ID NO: 281938 - DNA, 858 bp, Morganella morganii
atggccttagataaagtagagtttgaggagtacaaacattatgaatcatattacttttgtaatgttattaaaaatatactaaatgatcaattgtcttatgttagagggttaaatgattattatggagatggtaactctgctgtatttaatatagcttttccaaagtggtctcattttcataattttatagagttcatatttgatgcaatatatgatgaatttttttataatatcaattattatagtcaacttgaaaaacacaaaaattatgatggtagagaaaattcttggccagaaaatttcactgttcacattacatcttttaacaatatacataaatcatatctacagtatttaaaaaacattaatgtcgtactatcgaaaagtacagtaagtgagttcgagcgttttttagatgtgttttatcgtagcgaagaatttcaagaatataaagaaaaaacaaccaaagaggttttctatattttatttgggaaccgacttattcttcagacttataatgaaatgattgcagaggttagaaggagcgattgggactctgcttattatgatgtaaaatttacaacaaagaatggttatcttaaaagggtagctattcctaaatgggtacaaaaagcagtatattatagagataaaggacgatgtgtgttctgtaaaaaagatttaacaggattaataaatatttataataaatctaattatgaccacattgttccattggctatatttggtattaatgatgtttctaatatccaactgctttgtgaatcttgtaataagaaaaaaaattcaaataattgtgagtcatcaaatgattattttccatggtatataatataa

SEQ ID NO: 281939 - DNA, 2034 bp, Morganella morganii
atgaataaatcagtaactgatgtagtggcacgatgccgccacaactgggcggcagtgatggcgatgctgaatattcccctgccaccggatggcagacacggcccctgtccagcctgtggcgggaaagatcgcttccggtttgatgacaaagccggtcgcggtacctggttctgtaatcagtgcggtcacggtgacgggctggatctggtggcactggtaaagcaatgcagtttgtccgaagcggcgcaactgacagaaaacaaagtgttggcagtgtcaacaccgcccgccagggaaaaaacccatcaccgccgggtgccgcaggagagaatcagccagatcctcagccacagcgaaatgcgcgaaagcccttatctcacggagaaaggactctctgcccggttgccctgcctgaccgcacagcaaaccctgcaaatcagtgatatcaccttcggcgaaggaagcctgttactcacgctgaacaataccgccggtgatcttaccggtgctcagttgattaacccggccggtgaaaagcggctgctgcccggctctcagcttaaagaggcgtttatcaccgtgcaatttccggaagcaccggagaccatcattatcacggagggttatgcgaccggtctgacgctcagcctgattagtacctcagcggccattgtggctgcggtttcagccaataatcttatcaatgtcgcgaatgcgttacgcaaccagcacccggaggccgttattattctggcaggcgatcatgatatccgcactgacggcacggccaataccggcaaagctctggcagagaaagccgcccgggcggtgaatggctgggtttctctgccgccggcggcctcgcagtgtgactgggatgatttccgccggcagcacggcattgaggccaccaaagccgccttttataaacagcgttaccagccgcagcgcgtcccggtgagctgcgttgattacaacgcgccgccgttccgcacctcccttccgctgcgtaaaggctctgacggctttgatacgcgccaggattatctcatcaagggctatctgcccggttcctccgttgccagcgcttacggtgccagcggctcttacaaatcatttctggcggtttcgtggggatgccatatcgcgaccggcaaaccgtgggcgggcaagccggtcacacagggcgcggtgatttatgttgtcggtgagggcggaatcggcgttccccgccgtatccgtgcatgggaacagacgctgaacggcggcagcccgatagattcactctaccgcgtggattgtccgatttttccggccagccctgacagcgtgcagcaggtgatacaagctgccaatgatgtgaaaaccacaacgggcatgccggtacgcctgatcatcctcgataccctcgcccgctgtttcggcgggtcggacgagaatgcggcgaaagatatgggggcattcattcaggggtgcgattttatcaaagccgccacgcaagccaccgtgctggttatccatcactccggcaaagatcaggataagggtgcgcggggttccagtgcgttccgtgccgcgctggatgtggagttccatgtgcgccgtgagggcgaagatccggctattatcctcagttgcaccaaaatgaaggatgcggaagagccgccgcgtcaggcctatgacctgcattccgtggatttgtatgtggatgaggacggtgatcaaatcacctcgctggtactgaatgatgaaggacgggaggcccgggatgatgacccggcatctgatccggatctggccggtgttccgcgcctgacagataaccatgttgcgctgtggcaggctatccgctcacggacagccaaaggcgaaagctgcacccgtgccgtgctgcgtgacgatatgaaagcaatgaattttgatgtctccaaaaaattctcccgctggctcgataagctggaaaaagacaatctgatcgcattccggggcgaggaaattatcccgctgccgcatcagatcaaagtgggggattaa

SEQ ID NO: 281940 - DNA, 177 bp, Morganella morganii
atgtatgatcacacccctctcacgcctgaagaactctctgaccagtgctgtgccctcgcgtttgccattatccggcttgaacatccctatgctgaagaactgctgatgtacgtcctgtgggaacgtatcaatacgcttaataccctgctgacaacggaggtgagcagcgatgaataa

SEQ ID NO: 281941 - DNA, 201 bp, Morganella morganii
atgtctgattacacgttattgcgggttcgggatctgatgaagaaaaccggctttaaacggtcatgggtttacgtgcagatggagcgcgggaaattcccgcgtccggtcagaatcggcggccgctccatcgcctgggtggaaagtgaagtaaatgaatggattgcatcgcacataaaaaaacgtgaggacgcacgcaagtga

SEQ ID NO: 281942 - DNA, 879 bp, Morganella morganii
atgagtaaattaaccagggaaatgaccacgctggcgaaacaggccggtggcagtttcaaaaccgtgcatgaccgtatccggattatggagagattcagccgtcacctgctcgcgctgaatatccagatcaaagatatccggcatctgaaatcaaagcatatcgaacagtttattgcggaccgtctgtcatccgggatcgccctgcgctcattgcagaatgaaatggccgcattacgctgcgttctccggacaggcggcagagataagctggctgaatcagaacgactgaccaataaagcgctcggattaagcggagcaagccgtgccggaacaaagctggcaatcacggaggatcgctttcaggccgcattgcaactggctcaggcgcgtgatgaaggctttgcctgtgcgttgcaacttgcccgtctgttaggtctgcgatcacaggaagcggtgcagtgcgcagcgtcaataaacaaatggaaaaatcagataaacactttccgctcaaccgtcaccgttgtgtttggtacaaaaggcggccgtccgcgggaagtacagattatcgaccggtacgctctgaaacaggcggtggaaaacgcgctgcgggttgcggaaggccgcaacggcagactgatcgataagccggatttaaaggccgcgatgaattactggcgcacgcataccgcacgtatcgggctgaccggctgctactcgccgcacagtctgcgttatgcacgggcgcaggattctatcgcgcattacctgtctcagggctattcccgcacggaagccagggcgctgacatcgatggatttaggccatggtgatggccgtggccgttatgtcgagcgcgtttacacacaaaaagaggattga

SEQ ID NO: 281943 - DNA, 288 bp, Morganella morganii
atgaacactgcttatccgcttaaaacactcaatcagttgcgtccgttgctggtcggctttcgtaaggctaacggaatgacgcaaaaagacgtctcagagaaactaggcgttacgcagcagacctatgcccgcctggaagctaatccggccagtgccagtattgaacgactattcaaagtattcacggtgttgggtgtcgaaatggtgctttctgccgggcaattctcagtgattcaggaatctgcggaaataccggataactctccggccagacgggagaaatggtaa

SEQ ID NO: 281944 - DNA, 1302 bp, Morganella morganii
atgagccggacacaacaacgtttagcaatatggatgaacggaatccgtgtcggattctgggaaaagatcagaggggaagaccggctgcactatctcccggagtgggttgctgatgaacaaggcagaccgctgtctctttcattaccgttcacgccgggtaatcaggtctggcgcggaaatgttgtgcgtgattactttgataatttattgccggatagtgaggatatccgcaggcgtctggcgatgcgctacagagcggaaagtctggaaccttttgacctgctggccgaactgggaagagattgtgtcggggcaattcaattgctgcatccggatgatgaaccgacagacttattttctgtcaattaccggccgctttcggaagcggacattgcagcgatactgcgtaataccacaacgtcaattcccggtcgtcatagcgatgatgaagagttgcggttatctatcgcaggtgcgcaggaaaaaacggctttactgtggaatgatggacaatggtgtttaccggaaggtaatacaccgacgactcatatcttcaaattaccgcttggcttagtcggcaatatgaaggcggatatgagcacatcagttgaaaatgaatggctgtgttcgctgatccttgaacactatggtattcctgtcgcaaaaacacagattgcgcagtttgaagaccagaaagtcttgattgtggatcgctttgaccggcgctggtcaactgacagacagtggattgtccgtttgccgcaggaggacatgtgtcaggcactgggcgtttcaccgctgcggaaatatcaggctgatggtggcccaggtatcacggatatcatgggaatactgagtcattccgagcaggcggagcaggatagagagaccttttttaaagcacagattattttctggctgatggccgccacagacgggcatgccaaaaacttcagtatttccatggaacctcaaaaccgttaccgtctgacgcctttgtatgatgttctatctgcatggccgctgattggtaatggtaataaccagattgcctggcagaaatgcaaattagcaatggctgtccggggaagtagtaactattacctgattagtaaaattcagcgccgtcattggatcagacatggcgagtcagttggatttgaaaaacaacaagttgaagcaatgctggatgacattatcgaccggacaccagaagtgattgagcgtgtgactgcgttgttgccggaggggtttccggttggagttgcggagggggtttttgagggggtgaaaggtaaataa

SEQ ID NO: 281945 - DNA, 189 bp, Morganella morganii
atgaaatcatcacaatccggttcgttccgtctttttcttacccgtcatatccgccgtcgtatttgtcagcgcggttatgcaccggcgcctgaaataaatgtactgtggcagcagcacggcagttctctgacatgggggcggctgatattgttgtgtcttgtggtgactgcgggaatgttatggttctga

SEQ ID NO: 281946 - DNA, 195 bp, Morganella morganii
atggcgatgcgttcagcatcgccggagcccgtacacacggagtggttcaggctgttggtgcgcatttttcagcgcagtctgttaaagagcgggacaacatcatctgttgatatgataaataatactacaactattaaatatgtcaatatctttagtattgacaaaaaatctgattttggtattaatatggtatga

SEQ ID NO: 281947 - DNA, 573 bp, Morganella morganii
gtgaaaggaaaaaacgttattattgttcacggttatactgcatcaccggcagataactggtttccgtggttaaaaaaagagctggcattgcttggtgccacagttgccgttcctgcgatgccggaaccgcattctcctgatccgcaaaaatggcagcaatgccttatcggcaacaatataacagcggatgaaaatacaatttttgtcgggcacagtcttggttgtattacggtgttgcgatatatcgctgaacatattccggaagggacaaaactgggtggttatattttagtctccggttttgattgcagtcaggaaacattacctgagttggaggcgcatgttcagtatcctctggattatactaagctgactgagatttccgataaaagagtttcagtcatatcttctgacgactgggtggtcagcccgcaggcatcgaaaacgctggcggagtcgttgcagactcagattattgttgaaaataacgccggacattttctggacagggaaggatatactgagtttccggtgctgcttaatatattcagaacggttttttctgcttcctga

SEQ ID NO: 281948 - DNA, 312 bp, Morganella morganii
atgaaaaatattattgtgactgttatgttgttatcttgtatttcttcggctactgtttatgctcgtgataaagatagtagttgctcagcttatgttaaaagtattcaattaaactatggtaattacaggttccatattgttgatgcaaccggattcaatataaaaaaaagcaatgattggtcatttacggctaaagataaagatatagcacaagtacttaatcttgcgtatatgttaaaacatccggtttgtatttattttgactattataaagattcttgggaaataacaaatgtggaactgaaaaattaa

SEQ ID NO: 281949 - DNA, 333 bp, Morganella morganii
atgaataaaattacatttatatttttccttactgtattttcggtaagtcccgtatttgctgatagtattccacaggataattcccgaaaaatcagacaagaaatcaagattatagagtttggatatgactcagcctatagccgtaatgggtatatttggataaaaacacctgttgatagtgaaacagcagattctgagttttatctgaaaaaatcaaatgatgctttgttgtatatttttacggtatacacacaaaaaaaatcattaaaaatagaatataaaccggggttaaataagtttaacgtaattgatagaataagcactatagattaa

SEQ ID NO: 281950 - DNA, 393 bp, Morganella morganii
atgcatacccgatttggttggcaacatgaatatgtgaatgctgcgggacatattgaccgtagtaccataattaatgcgaggcaggtcagatgggttaatggttcgattgatatgcataacacagaaatcagggataatccaaatgtcggggataatttacttcccgcagtcaatgctaattatttattacctaatcaggaggttgctaatctgccggttggttatttcagagattttgaagatgacccgaccagtttgcctttttcgttggatggttgccttaatttatctaagaaaggtcctgtatgtaaaagcgtaccttactctttattcaaggaaagtataatagatgagctgaatggccgtctttttattctttttcttagtgtataa

SEQ ID NO: 281951 - DNA, 459 bp, Morganella morganii
gtgccaactgggacgaagcccactaatttacgcgtcatctttcaatccgtggctgcgttggccgcactcagaaatccgggtcacatactgatgtatgctccccggatttcttcctttgccgccttgccacaaattgaaatctatagcgtaaagggactgtgccccggttccttctgcttgctgccttgctgcaaaccgaatgatttagccttagcattcggtatcatctttcggccacaaactgaaatctatagtgtaaaggtattgcagggagcctgttacgcgttttcttcccgcattttcagggttttctttacttttttctcaatgcgctggcgcttcagcggcgagagatggtcgataaacaatttgccgttgagatggtcgatttcatgctggaggcagcccgcctgtaatccttccgcctcaagagtatgctctgcaccgtttatatcctga

SEQ ID NO: 281952 - DNA, 414 bp, Morganella morganii
gtgaatggattaaaattgagtaaactgattatctctctgttactgattttttctctcttcattacggtcatatttctattcctgccgggaagcagagaatatacgaaattaaatatagtttactattatttatatacatttgatgaaataaaagaaatgccaataatatcaaatgactataaaataaaccatgagcctgtggacggaaattcagctgagtttaatgatattgttttttttaatgttgatataaagagaaacaatgaactctttgactatgttaaacggtcaggtttttcaggggagtttgaccaataccggaagagagaacgatgggttaaggataatacaaaaattgatattatcatcaatgaatcagaacaaaccacatcgttcctggcggaaaaaaattag

SEQ ID NO: 281953 - DNA, 552 bp, Morganella morganii
atgaataatataattaagtcgggtgatgattactttatcatagaaaaaatagtgccaaacgcaactgtatcactaccctttacagcaacgttatatcagatatatcgggtcgtttataatgtgtcatccgagcatgagctctatatagataatgaaagagttgactcactatccccaacatttaaacaacaattgaaatacattttaggatacgaaccaacaagcaaagaaacaaaaataaaaaaaataaaattggtttttgctggccactacacatcacttatagctattccgaaatcctcaataatatccatccctgacattttaacagaaccgaaatttcttgccttagagttattgagttatggggatgatgacataaaaaatataagactctacggtaatggaaatattacatttcattctgcaaatggcgggcttgatgacccaatagcaatggctcgttataataagaaaacaaaaaaactaacacagataaatagttcgggtgaattttcagcgttaatgagaacactttcagggcaactataa

SEQ ID NO: 281954 - DNA, 669 bp, Morganella morganii
atgataaaatataaaaaggaagtttttatattcatggttttattagttgtgctttttttcattaacatgaattatttcaatgaagtggtcttgttttcagaaaatgcaacccaaatatattatacagatgaaaataatgtatttaattttattatattgaattcattatcatttgctttcatttcaattttagcatttttaattgtaattaaattagtgaagccaactataagcagggttgtattattttataccgttgcttgttttatttttcttataacgctatctgttaaaaaaataataacaacaagctctgttgatttttatattgaaaagtatccactgtacctggtgtttacttacctgttctgcttcattatctcatcacttgtcattgtaataacaagttcaactaaatatagaagaataatagatgacatggatatgcgtcttaagtatctttttattcttttgtttcaatttatttggtatatgccggttctttttctttttcgtgaaagttcattaatccttctttttgtttttatacttccgataatattttacaacatagcgtgcttaaatcatttcaataaaaataaaatgatagtactttgggtttttgtcccttttattgccatctttattcctttttttctaaagaaataa

SEQ ID NO: 281955 - DNA, 345 bp, Morganella morganii
atgacactccccgttttcaggccgttaatgatatccgccacttttgtcttatgcagtgtatttgccggtaattgtcgtgctgagactgatttgccctgcgcgatgatctacaagatcaaagctgaggagcgggaagaccgtatgtgtttcagctggcggccgttacctgactgccctgcattgtgtcacccgtcaaaaagtgtgaaaaaatcggagaggtttcgttgtgtccgctctgataacccgttacccgataacgaaatcagtacattttgggatgtcactgttccggtgagttgtgaagcgacacttcctgtatttgcagtaccggacaccacaccataa

SEQ ID NO: 281956 - DNA, 213 bp, Morganella morganii
atgtttacgaaagcacgcattattttggggatttttgctgttattggtttgctgatgctgatgggcggcagttacttttatctttccggttattcacaggaaaaaagcggaatagtggtcaccggacaaattatcgatctgtctgttcaccgctcggatgacggtgcttcttattgccctgtggtgaaatacactgacgggcagcccggataa

SEQ ID NO: 281957 - DNA, 444 bp, Morganella morganii
atggatataaatagttctgcaatggaagggatatgtaatagtttaataaaagatttctatcaatactttgattggaatgatattggtattaattattctattattaacttgtctgataagtcagttaatgtactatcaagtgactacgattggttgctgacatactggggtgaggatgttgatttacttattaatgaaaggttgaaagcaggtatccattactggaataattattgcaatatattcaaagatataatgaagaaagggaaaaacaatgactataaaatagatttctgtaccaggcatggtaatatattggagttgatatcagttaatacggtatcaaagctgtcggttgcagacataatgacaatctataaatggaaaccaataatatctgattatgcgagcagattatgggataagaacagagatgtgatttga

SEQ ID NO: 281958 - DNA, 633 bp, Morganella morganii
atgccagtaaatgcgataggacagcaaccggtttgtgagacacagattacaggggaaagccggaatatttttcaggcgatagcggataagtttgtcgcggttgtgaacagctgtaagacattctccacgggatgcaatacacagaaagatcataatatacaaaaagcgtgtgaaaggctggctgctctgacgcgggctgaaccgaagtgttatataacggatgctatgaagcggggtgcagaaaaactcggtatggtattgccggataataagatttctgtcagcagtaacgcggatacatctgttgctgcatctatcggtaaattatctgtcttaaaaacaacagagtgttccgcacaggaattgcatgacatgctcagcaaacagcttggtaaatccggaacttcgcaggagatgcgtgaaaaaatacaaatggcactgggtaagtcggatacagctataaatcctgatgtatacactgacatggttgagcgtggtatgaataaacagaagagtattatcagtgccgatatattgaaagaacatcgcaggaatgaaattggcggtggtgcagtattagatagtgatactgttaaagaacttgaaaaattgagtaatagtttatcttcgtaa

SEQ ID NO: 281959 - DNA, 561 bp, Morganella morganii
atgtttattgctcctatagctaaacctgctcagcaatcaaacgaaggcatacattgctgtatcagttcatgggatcgtataaacgataaaagcttaccaccaaagataaaaatgggtgcgaattacatgaatagtcgtcttggccaaatggaagcaaaacgaaacggctatgactccacaattttcctcaatgaaacaggcaaagtttccgaaggcccaggatcctgtttattcattgtccgagataatgtcttaatcacaccatcactcacttcatcagttcttgagagtatcacacgcgataccatattaacattcgcccgtgacacccttaaattaaaagttgaagaacgggaaatagaccgcactgaactctatatttgtgatgaaatttttatgtgtggttctgctgtagaaatcctcccagtattatcagttgataaattaaatgttggtgacggttttaaaggaaaaataactaaacaaattgagtctttatattttgatatattaagaaataaatcaccagaatataaaaattggttaactggagtatattaa

SEQ ID NO: 281960 - DNA, 909 bp, Morganella morganii
atggcattgccagaaagaagatactatacattagataaggcaattaaagtcattggtaatgaaatagaattcagtgacctaattcatttcgcatcaattggtttattacagttatgcatcaaaatccctgctgctgggtttcatttttttaatgaaaatgatgaggtgtttaaaatagaaatagaatcaaattccactctgtggctagaggaagaatcacgacttgaaaatgaggctgaaataaaaaaaatcattgatgaatatggaaaaatcccagataaaaacagccagttaagttatagatattttcactatagttctgattattttagtataacagaggcatttgataatttacgaaatgaaaaaaagatagataaaatagatggcctagtggctataccacatacatcaatatcatctgatgaacttgacatagtaaatgaggtgactgatattattttggttgatagctttgatattcctagatgcgaaaattttaaaaaaaccagtgattatgcaccatctgatttttatttgtcagattggtatgaagccaaggtaaaagacttattaataacagatcatgaattaagcattctgatggatggtggacatattgttgacgagggattagctcgtaataattcaaatataaaaaactcaagatatgagaaaaaaacaaaaaataaagaacggacaacagcaaaccaagcaacgtatataaaatttctattgttgctatccgggttcactaatgatgaattaagacaatcaccacaaacattattagatttaatcagtaaaaaatccatcgctgctggaattgaaatgcctgtaatctctgataacacaatgaaagattggctctctagggcgagagatatacaaatacttcaaccaaaataa

SEQ ID NO: 281961 - DNA, 429 bp, Morganella morganii
atgatgaaaaaaaaccgcccttgtggtggcggcttaaatctttcagatattgaaaattgccccgccattataactatttccaccacagaacgcacgaagaaacgcacgccgaaaaagcaccgcgcccgtattgctgtacttggagcgggtacatccggaatcactgaaaacgacattctgcgccgctgcggattgtcgtcaggccggaattattgctcagaaattgaaaggctgaccggcatcacattgaaccgtgatgacgagccgaatccggacggtattgcgagccattaccgttacagtatcagtaaccgtcaggatgctcagaaggtgattaatctggttaataacagcgcacattatggtggctatcccgggttatcaaagcagcaagccgatatttatctgaacctgtacccgaccgaataa

SEQ ID NO: 281962 - DNA, 594 bp, Morganella morganii
atggaaaatttaaaaagtggctttaatgccaccagccaaactcaccctaaatttgagtcagacgatattttgaatatcaactcagatgatatttcatttatccggtttgaaggtgtgcaggtgcggattgttaaagttaataatgagccgtggtttattgctaaagatgtttgtgatgccttggaattatccaaccatagaatggcattgaaagcccttgattctgacgaaaagggggtaagtttaatttacacccctggcggaaagcagagagcaaatattgtctcggaatccggtttttataaactgattgcccgcagccgcaaagcaaccactaaaggcacttttgcacatcgtttcactaattgggtattccgggacgttatcccatctatccgcaagaccggcgcgtatggtgtgccgttcggtgaactgaatgacctgactaaacgtcagcagcagtacaaattaacctcatcacagcgcgggcgtgacctgcaatcatgcaagactgaaaaagccagcttgcagcgtgaggaagtcgaactgtggcggaaatatcagcctgattttctcgatgaggagatccactga

SEQ ID NO: 281963 - DNA, 261 bp, Morganella morganii
atgaacagccagttcccagacaactatcaccaaattcagtctgaaatatcaaaaattctcagcaatgacatgtcgctatttgcggaggagcgcagccgtgaccgcttgctcagaataagaaaaggaatggctcatattttgtgcgaggtattcccgcaaattgacgatccaaagaaacaggaactttgttattggctggaggcaatagcccgaatcagcggagctgaagccgcagatgtgaaagctgaggtggaagcatga

SEQ ID NO: 281964 - DNA, 375 bp, Morganella morganii
atgagtaacgtgatcccgttcagacagaaaaataacacgctggagaatctgacccgcgattttgctgccgcagtataccgttgccaccatcatgactacgaggacagttaccggctgacggagacgctgggcggtaataccacctgccgcgacatcccgccgtcagaatatatcgtgctgctgaccgactggtatttcatcgaaccactggcagaacaggcggaggattacgaagcggcagcagcggacgtactgacccgtgcagtagattcggggcgtttaactctggcgggtgaggcactgtatcagtcaatcctcagcatatcccgtgatatggccgctccggaaggaggcgcagacgatgaaatccattga

SEQ ID NO: 281965 - DNA, 471 bp, Morganella morganii
gtgagcagagaaattctcaccttaaagagaggtaacaaagtgataacaattcagtccgataccagcgcaccaaaaagcgcaccggataaaacgcagcaggaagccccgaagcagccgcagaagaaaaacaggacagaggcacatgcgaagaagcggaaacgccgtacagaccggatagcgcagcactggcctgtattcaccctgcagggatccagaccgctggcaataggtatcagggaacagatgattgccgatgctgaggcgcgggagctggatattaccggcgggcaaataaaacagggattacacgcttatattaaccggaaggtgtatcttagaactctcatgacgggcggcaatcgctttgatatgaacggacagcctaacggtgaaattacaccagagcaggcagatgccgctgaacaaaagttgcagggatggcaacacactaataagcaggatgaattatga

SEQ ID NO: 281966 - DNA, 381 bp, Morganella morganii
atgattattgacaaattagattggttaataaatgtaaagaaagagctgtatgataacaatggcagggacttatatgatattatttttgaaacgttagaaaaaaataaaatgacataccccacatttttaagtacggctagtgaagggcatggtttttctccttcagaaggtaatggttatgcattagaccaagattgggatatacctgatgaatttgatgaggttagttttatgtttggagactatgaaagttcgacgctttcacctcagaaatttgttgagttaatgcaggttataacagatagttatataactgagcatccagagaataaagaaacaatagagcgctctatgatgagacttaaagagcgctatacatga

SEQ ID NO: 281967 - DNA, 1728 bp, Morganella morganii
gtggcagacctgagccgtgacacggacaacgcccactctgcacttaatcagatatttgataaagagaaagagcagaaccgggtgaaagagcagcaactgctcggtgaaataggtgttcaggtgattgatattgcccggacacatgccaaagcgaatgcaacagaaaaagccaaagcagattttcagggtaaaaagtcgacagaggctgaatttaatcagcgggtagagaaatatctgacagagtcaggcttcggcaccggcggcaagtacacccgcgccatgcaggcagccaccgcagcggtacagggtctgatgaacggtgacctgaatgcggcactggccaacggcgcggccccgtttattgccaatgaaatcaaaaacctgattccggatgatgacgccgacgccaacctgaagcgcaccatcgcgcacggcatcgccaacgcagcactggcactggccaaaggtgaaaacgccgccgcacaggccaccggcgccatgaccggtgaagcggttggtatcctggccgaatatatctacaaaaaacagccgggcgaactgaccgaacaggaaaaagagaatatcagcgcttgggccaccctggcatccggcctcgccggtggtctggtgggcggagatacgcagagtgcggctaattcggcacaggccgggaaaacgacggttgaaaataactccttggttatgctggttcctgatattgatagctactcagaggattttaaaaactcaaatgacccgttatataaattaaccgatgcatatgttcatgagcttgaaataagggcagaatcaggtgaccaaggggcaataatagagctgcaacaacgagaaattgccgaagagaatgcaaaaacagcggttgttttgtatgcaactgttgtcggtggctactatacggcaactgctgcgcctgaaatcatcgctgctgcaaaagcaggtgcaattacctgtgcggaaaatccggtcttatgtgcaaaccaggtgggagcctggattattgaaatgctgggagctgatgcggcacctgcaggaatagcgataaccggaagtacagctacagcgaaacttactgttaatcaattatccgaattgtccgcgttaaagagtatgcagcagcagggcggtaaagtttcgccggaaatggtcagcaaatcactatcatcaaaatcaccttctaacccagcctcacagtcatccagcggtgcatcatttccttatgataagactaatgaaataaataaactaattccagaaaatcttaccaataaaattgcagagcataacactcaattaggtgtcttaaatcgcagacaagaaactatttccggagcccataaacaagacgcattcctagagtctgttgaaatgactggggctaaaataaatctaactataacggataaaaagtatcctggtttagtggagtatcaatatcaaattccagctgttaatggtagaggtcagcaaattggatttaaggcagagcaaacaaaaacaacatatgatcctacagtattgtctgactcaaaaattaacgatatgtcctataaggcttctcaaaaagcggagagttttttcaaaaacaatccagattataggcaatattcagctcaagttgatggttactggtttcaagtaactcaagatgcaaaaactggagaaattaacaacgcatttataacaatgccaccgagagataaaaaatga

SEQ ID NO: 281968 - DNA, 450 bp, Morganella morganii
atgtctaatagtattttatttcctattaaaactcttcctcggtttgaagacgtatttaatagtattgctgaaggttttgttaatctatccttaccaaatcagcaattgacaattggactgacagccaaaaaaggattaagtttggatgataagtttatatatatacatgaccattttgctggttacttttgctggttaagtttcaattttattgaagagagattacgagatgaagaagacattgaatattcctatatgggaagtgtttcagccaggggggagttaaatttaaaattttcggttttaattttatatgtaatatcactcacgttgaatccgagagttatttatgatgatagctatttggttcaatctaaagaaccttattcgtttcatgaattaaagccgtttgttgaagcatatataaaagaaatatatccggacatataa

SEQ ID NO: 281969 - DNA, 7947 bp, Morganella morganii
atgaacaaacactgttaccggattatttttaacaaagcccgccagatgatgatggtggtctccgaactggccaaaaatcacagcagcgataaatcccgcacacagagcggtgccggtatcaccccgctgaccgcggtgatttccccgctgcggctcagtatcatgctgctgctcggctggattgccctgccggtgatggctgacggcattgtggcggacggctccgcgcccggtaatcagcagccgaccgtgatctcctctgccaacggcacgccgcaggttaatattcaggcaccgaacagcgatggtgtctcccgtaaccagtacagtcagtttgatgtggacagcaaaggcgcgatcctcaacaacagtgcggtcaacacgcagacacaactgggcgggctggtcactgccaacccgtgggtggcaaagggggaagcgaatattatcctcaatgaggtcaacagcgccaatccgagtcagcttaacggctttgtcgaagtggccgggaaacgggctgatgtcattattgccaacccggcggggatcacctgtaacggctgtggttttatcaatgccggacagaccaccctggctgcggcacaggcattgctggagcagggccgggtcaaaggctttgatgtcgataaagggcagatagccatcaccggcaaaggcatgaatgatgcgcagagcaactatacccggctgataggccgtgcggtggaagtgaacgccaaactgcatgcacaggatctgaccatcaccaccgggcgcaacatcacggatgcgcagggtaatgtggtgacacaaaaagcggctgatggcactacgccggcctttgcgctggatgtggcggcggtcggcggtatgtatggcaataaaattaaactggtcggtactgaacacggcgtcggtgtgcgcaatgcgggcactatcggggcacaggccggtgaactgagtctgtccgctgacggcaaattacagaacagcggtattatgactgctgcaacggatgtgaaagcaacactgactgacaatatcaccaataccggtacagtcagtgccgggcgggatattcagcttaataccgccggggatacggataaccaaaaacagatcctggcgggacgccatatcaccgctgacagtcaggcgctgaacaatgccgcaggtgctgtgatggcagccggtgcggataaagacgggcggctgacacagaccggcgatatgaccctgaccgccgcgaaaggtgccacccttaacggacagcaactggcgcatgaccgcatggcggtcaccgcagccgatatctcgctggaaaacagccgcacggcagcgaaagacatggcgctgacctccgcctccggactgaacctgaaaaacgcggacgtttccgcctccggcacgctgaccgccgttgcgccggacggtattgataaccgcagcggcaaactgaccgccggtgcgctgcaactgaccgcccgcaaactggataacacacaggggcagataatccagaccggtacagatgatctgaaactgaaccacaaagacgggatcatcaataaagacggcacgatcgccgccaacagcaacaatatcacgctgaatgcagacagaaccgataaccaaaaaggccgcattcagcacgccggaaccggcaccgtcagcatcaccacgccggacttcaccggacaacacggtgtgattgtctccaacggtcatctgatgatgaaaggcggcaactatcagctggataacagcgaaaccacagcccgcacgatcaccggggagatgaacgcgctgtctcaccgcgacggcaaaatggtgcagcgtgacagcggtgcactgacactggcggtacagcacgccctcgataacactcagggggtgattgccggacaacatctgaccctcagcgcagagtcactgaacaaccagcgcggaaaacttcagggcagcgctgaggcacaactgaccgtcaccggaaaaacggataaccgcgacggggaactgcgcggcggcaaacagcttacactctctgcccgtgaactggacaacacgcagggcacggttgccggacatgaaaacgcagcgctgaccaccgacaccctcaccaacaccggcggcacactgattgccggtcagagcctgacggtcaccagcggcagcctcagcggtgacggtgatgtgttatcgtcaggggatatgtcactgaccctgaatgacgcgttcaccaaccggaaaaaggtacaggccaacgacagcctgaccatgactgtgaataacggcgttcagaatgaagccctgattcagggcggcaacgctgtcacgattgaaacctcagatctgaccaataaccgcgacgcggaaatcagtgcggacaacaccacgctgacagtacagaacaccctcaccaacaccggactgattgacggtgtgaatacccgcatcagcaccaaaacgctggataataccgccaccggacggatctacggtgacgatatcgcgcttcaggctgataccctcaataactccgcagccgcagacaaatcccgctcggcggtgattgccgcccgcaacagcctgaatatcggcaccaaaacgctgaacaacaccggacaaagcctgatttacagtcaggggctgctcaatatcggccgcagtctggatgcggactacagcgccaccggcagtgctgacctgtttaataacctcggatccaccctggaatcgcaggggaatatgacgctgaacatccgggaaatcaataatatcaataccaacttggtcacccgggttgaggtcaccggcaggcagaaaattcatgagggcgtactgaaaggtcagacgcagcgctttaactggaaagatatcgataccagccgcaaaaataagtacggcgttcatacggcggtgatgccggacggaacccgtaatgacgagttttatgaatataattacacccggacgattgaggatacgcaggttgtaagcactgaaccgggcgtgattcagtccggtacggatctgacgattaacagtgacaaactgctgaacaaagacagtcgtgtcctggcgggcggactgctgacaaccacgattggtgatttgcagaatattgccaccaaaggggtgcatattgtcacggatatcgggaaacagacccgctggtacgcgaaaaagaaaaaacggaaaatcggcggtaccaaaacctcgcagggcagggataacagccgttaccgtcccgccccggtcgtcaccgataccgacctcggcgtacataaatgggaaatgaatgcacagaccgacattcaggcggtggatacctccgggcgcacagccccggtgattattgatgtgccggtcacggctgaaaccggcggcaccacagcagacaccgtgatccgcaccggtaatgacacgataacgctgccgaacaacagcctgttcaatgtcagaccgggcagcgacagtcagtatctggtggaaactgacccgcgttttaccaaccgtaaaaaatggctgggcaccgattatatgcagcaggcgctgctcagcgatcacagtcagatgcacaaacgccttggtgacggttattacgagcagaagcttatcactgaccagatagtgacactctccgggcagcgttatctcggcgactaccgcaacgacgaagaacaattcaaagcgctgatggataacggcatcaccttcggcaaaaaatataacctgaccccgggcgtggcgctgaccgcagagcagatggcgctgctgaccggcgacatggtgtggctggttgagaaaaccgtcaccctggcggacggcagcaccgagaaagtgctggtaccgcaggtttatgcccgtgtgaaaccgggggatttaaccggtgacggcgcactgctggccggtaagagcactcaatttaccgtgaacgggcaactggtgaacagcggctctatcctcagtaaagatgccctgacggtcaatgccggggatattctcaatcagggaacaataagtggtaatgatgtgctgcttaacgcacagcgagacctgaataatatcggcggtacgctgactggcggcaattccctgacggcgaatgcagagactatccgcagtgaaagtacgctggcgggtgatgcggataaccgtcacctcaaccgcatcgcgggtatttatgtgcagggggataacggtaaactgaccctgaacgcgaaagattcggtcacgctgaccgcgaccgatattgccgccaccggtaaagacagcaaaaccaccattaccgccgggaatgacatcacactcaataccgtcaccaccacccggactgaaaacggtgactggggtaacgataactaccgtcacctcaccacacagacggaagttggttcacaactgcacggcggggatatctccctgaacgccgggcgggatatgaacgccaccgccgcaacggctgatgccgaaaatgccctgacggtcactgccgggcgcgatattaatattcagtccggcaaagacgtttctgacctgactgagcacagtaaacagaccagcaaagggcttctgtcctcctcatcactggaaacccacgacgaagtccaccgcactgacgcggtcagcagccagttcggcggcgacactgtcaccctgaaagccggtcataacctcaccgttgaggggagtcaggtgattgcggataacgacctgaccgccacggccgggaacaacatcacggtcaccaccacggatgaagcccgtgaggaaacgcatctgcgcgaggagaaaaaatccggcctgatgagttccggcggtatcggttttaccgtcggcaaacaggaaatgaagcagatcaccgacagagacagccgtttcggcaaaggcagcacactgggcagcacagaagggaatgtcagcctgaccgccggggaaaaccttactattcacggcagtgatgtggtggcggaaaaagacatcagcctgaccggtcagtccgttgcggtcaccgcggcggaaaacacgcacaccgaactgacgaaaaccgaacagaaacagagcggatttacgctggcgctgagcggtgttgcaggcggggcgctgaatacggctgtgcagacagcggatgacgcaaaagaaacggaaaacggccgcgtaaaagccctgcaaaatattaaagcgggattatccggcgcccaggcgctggaagccggtcgtctggccgatgttcagggggatgcgggctccgccttcggcgtgaatctgtcttacggcagcagttcctcatcatccgaaacgaccacccggcagaccacggcacagggcagcagtgtcagcgcgggaaataatctgaccattaacgccaccggaaaaaccccggacagcgggaatattgcggtcaccggcagtgagttgcaggcgggcggcaatctcaccctcaatgcagagaatgacatcgccctgacctcggcgcagaacacgcagaccgtggacggtaaaaacagcagtaaaggcagttcggtaggggtaggtatcacctttggttcgggcagtaccggtctgaatgtcaacgccagtgtgaacaaaggcaaagggttcgagaaaggcaacagccagtttgccaccgataccacggtgaacgcgggcaaaaccctgacgattaacagcggcaacgataccacgctgaaaggcgcacaggcacaaggcgaaaaagtcatcgtcagtgccggcggcaacctgacattgcagagtgagcaggcggttgataactatgactcgaaacaaaccagcctcagtgccgggggaagcatcggtctgagcagcggttcactgaatatctcggcaaaccgcgataagatgcacagtggatacgaatcagtacagaaccagacgggtatttatgccggaaaagagggctttgaggttacggtcggcaaacacacgcagcttgacggcgcggtgattgcctcggcggcggacaaagacaaaaacaccctcgacaccggcacgctgggctttaacaatctggaaaacaaagcggaatatcaggtggagcaccagggcggcagcctgggcaccggcggtgacctcggtgctcaggtgatttccaacctgggcaatgcgctggccgtggcggataacaaaaaagagagcagcagcaacaccactcatgcggcggtctcggacggcaaatggataatccgtgatactgaaaaccagaaacaggacgtggcagacctgagccgtgacacggacaacgcccactctgcacttaatcagatatttgataaagagaaagagcagaatcgggtgaaagagcagcaactgctcggtgaaattggtgttcaggtgatagatattgcccggacggaggcaaaaatcaacgccacggaaaaagcgaaggaaagctttgatatcagaaagtacagtaaggatgatatcgataacgccagagcggcactgacggcagacggtaaaaaaacggacgatgaagcgatcagtgcactgttatttaacaaagaggttgagaaaaacttagcagagtcaggcttcggcaccggcggcaagtacacccgcgccatgcaggccgccaccgcagcggtacagggtctgatgaacggagacctgaatgcggcactggccaacggcgcggcaccgtttattgccagtgaaatcaaaaatctgattccgggagatgacgccgacgccaatctgaaacgcaccatcgcccatggcatcgccaacgcggcgctggcactgaccaaaggtgaaaacgccgccgcacaggccaccggcgccatgaccggtgaagcggttggtatcctggccgaatatatctacaaaaaacagccgggcgaactgacggaacaggaaaaagagaatatcagcgcctgggccaccctggcatccggcctcgccggtggtctggtgggcggtgacacgcagagtgcggcgaactcggcacaggccgggaaaacgacggttgagaataattttttatttatggttactcccgacattgatattgcggcagaggatttaaaaaaatcaaacgatccactgtataaattaactggggaatatgtccgtgaacttgaaataagagcagagtcaggtgaccatggagcgataatagaactgcaacaacgcgaaattgcagaagaaaatacaaaaactgcgattaagttatatgcaattgctacagggggatactatgcggcgaccgttgcgccggaattagcaacagctgcaaaaacaggcgcaatagcatgcgctgaaaaccctgttttatgcgcaaaccagataggcgtctggattattgaaatgctgggagctgatgcaactccagcagggatagcaataactggtagtactgcaaccggaggtaagctaacatttgataaaatgaccgagctggcagcactgaagagtatgcagcaaaaaggtggagatatttcacctgatatggtcaataaaataatagttagtaattcggagattgttaaattaccggcgggaacaaaaggtactgtattgcagaatgcattagaaccgcatgaataccaacaagctttagatattgttaaatataaaggtggcagtttcaaaggtgctgaaaaagcaaatttccagggaattgatggatggttagatggcgttccggtccaactgaagttggttgaaggaaaaagcatcaatgcaattagacgcaatattgttagtggtgctaaagatatgcaaaaagcaggctatcagggagacttatacatagatgcatctaaaactggtgtgagtatgaaagaaatgatagaccattttaagcctggttcgcctgttagtaatgtaacaaaagaaggtacagtaaataatatatatattaaaacccaagatggttggcttaatgttacaagtggttcaattactaaaggtggagaaagataa

SEQ ID NO: 281970 - DNA, 1698 bp, Morganella morganii
atgaaaaacagagtgaccaaccgcatcttacccggcgcggtgcttatttttgtgaccggctctgctttcagtgcacccggtgatcagcagtttatccatcagcaacagcagcaggatgcactggaagaacaatttggtgccagggcaccggatgtccgtctggccgcaccggtggctccggccggtaagcttgcgtttcctcaggaaaccccctgctttgatattcagcaggtgacggtcagcgggacggaatctctgccgcactggctaccgttacagcgcatggccagtgagggcgcggggcggtgtcttggtgtgcagggcattaacctgctgatgtccgatatgcagaaccgcctgatcagccacggctgggtcaccacccgggtgctggcgccgcagcaggatctgacgcagggcactctgtcgctggttgtggtgccgggccgggtgcgtcaggtgcgtttcacggatgattctgacaaatacgcgacactttacactgccatgcctgcccgtgagggcaatgtgctggatctgcgggatattgagcagggactggaaaacttacagcgcctgccgaccgtggaagcctcgatggagctggtgcccggagaggaacccggtgaaagcgatattgtcattacccgcaaacagaaaaaaaggtggcggctcaatgcctgggtggataacaccggtacggacagcaccggaaaaaatcagggcgggctgatgtttgcgctggataatccgctttccctcagtgacctgttttatgtgaccgccacccgtgacctgctgtttaccggcgggaaagaatccgccaactacagtgcccactactctgtaccgttcggctacagccagttctctctgaccggcagcaaatacgattacgtgcagaccgtggcgctgctcaacggcgacgcgcgttacaaaggccgcagtgaaaccctcaatgcgcagttcagcaatgtgctgtaccgcgacgcgacggccaaaacctcactgaactacggcgtgaatctgcgtcagacccgcaactatattcaggaaactgaaattgagaaccagaaacgccgcaccagcacctggaaagtcggcctggatcaccggcagtacatcgggacatcggttctggatgcgggtatcagttatcagcgcgggacccgctggttcggcgcgatgccggcctgggaggagtaccgtcccgccggcagcgacgattacgccacggcactctcccgtatcttacagttctccgcctctctgacggtgccgtttacgctgggtgaacagcagtttcagtatcagggcgaatacctgcgccagctcagcggcacgccgctgaccccgcaggatcagttttccatcggcaaccgctggagcgtccgtggttttgacggtgaacggacactgagcagtgatgacggctggtatttccgcaataccctctcctggaacacgccgctgccgcagcagcaactgtatatcggtgcggactacggccgtgtcgacggtcataaccgcgactggctgatcggccggacactcgcgggtggtgtgctcggcctgcgcggggcgctgagcccggcgggactatcgtatgacttctctgtcggcacgccgttcgcgaaaccggacggattcaaaacggacaatgctgtcttcaattttaatgtgagctggcagtactga

SEQ ID NO: 281971 - DNA, 765 bp, Morganella morganii
atgtcgttaaaactacagcaggaatcaccatcagataatgatttatttgaaggtgaaagccataaaaaagtagctcaacatatggctgaagtattacgtgagagtgataataatattataggattagaaggcgaacttggctctggaaaatctaccatcataaattttttgaaagatgaactacgtggtgagtatatatttattgagttcgacgctgagcgttatcatcatggaaatacaaaaaaagcgctgattgaagttatttataaaggcctatccaatgttactggagtaaataaaaacaaactagatgaacatcgcaatagagcattaggtaatgttattgagtatgaaaaaaagataaaaagccagttaagttggtggactgttttatttgttcttttttctctattgtccgtgcaaactatcaggtatttatttattgacacaaatagtcttatttacaaagacaaacctgtgagcattacattattcattctggaatttctgatctttctctcacctgcaatacttcttatatttttatatttctataaaaagatagccccaaaaaagataaaaacaacgattggtgatctatttaaacgaaactcaactgataaaatatctgaaacatggatggtgagccgtgaagtcggtgctattgagcttcacgatgcactggccggttttacagagaaagacactcttccccatactttacgatttatttttataatagataacctcgacagaattatataa

SEQ ID NO: 281972 - DNA, 1770 bp, Morganella morganii
atggagcttattaccggagcaacaaatgaacgctttcgaattatcattccatattctgcacgtcaggtatcatcatctcttgatatggaaggctacagcgggcgagagtttattgcaaaacgcattcccgttactttcagtgtcccaccattgataactgctggatggcaaaacgcatttaaaacgatgtggactcaaacagttacggaatcagatgagtcatcatgcattgaagttattcaactaattgaacgttggcggcctctccaatatccacgtataacaccacgcctccttaagaaattggtaaatgacatttacactttaaatctgactgttccgggtacatcttcggatgaaaaattacgtttcgttcttatagcactttatatattaatggtgaaatatggtgatattgatatcagaacccttttacgtaacccatttcaaaatgaagaaaataaaccgcaagcaccggaagagcaagatgataaactaaaagcaaactatgctcaattaaagcgtatattcatcaatgatgagaaccgctggagtgagtttcttatgagcgtgcactaccaggctgctgcagaattagcgaggagtgaattgattgatacccctctcgttgaggcagtaaaagcaaaagacgcagatgctcttgaacgtcttgtcacaatgtggggtttcgcacatgcatggaatcgctgcgctgccagaatggatatgactgcatggttggaaacagttgctaatttaccccaaccgatacttagcctagtaaaacaaaaaatagaatactcaatacaagatcttaactcaaattacgctgtaaataataaagaagatttcaacctatctttcaatatttcacttatacgattaatcaatgaaaactcaataggcattgaggattttatgaaaaatcagcgtaattttattatcttagcgctcgatgagttagaatctgtatctgataacagtaacagggaaataactaatctacttactgaggcaaaccaatactcattaatatttggctccagtttgtttaatgatatggaatatgcaatacccggcagtatttacattcactatctaatagaaaatgaagaaaaatggaatggattaaaaattaaagatatgacattcagtgatgaatcaattgaagatataattatttctgcattgaatgaacataacatagatatatttaatcataatatcatcagactaattggcagtggtagcaagtctgtctatgatattattaatagaaacgaaggtataccagataaaatcattgaattagctaataaattttcaaataacttagccattagtgatataaatgattttagaaaattaatttttacaaaagagtggggtactatcaatcaacttaacttatacaataaccaaacgataataaaacaaaaccatccaactgaatttgcagcgcatataattgcacatatgataggaattaataatttctctggtattgaaagttacattgaaaacattaataacactgaatatgaaaaactccttactaattacttatcattcaaaaaaagctggcatggcattactgatgcactaaaaaatgaaaatgtgattccatttataaaaaactcaatatcacaattatttaacaatggaaagataactagactaactgtctcttatacacatctccgagcccacgagactaaggcgaatctcgtatgccgtcttctgcttgaaaaaaaacatcaaagacattaa

SEQ ID NO: 281973 - DNA, 1062 bp, Morganella morganii
atgactaatatgaaaattttgtttgtggaggataatcaacaggatcagcttctgtgctttaatgctgttgaggatttcaatgaagacaataattgtaatgtcgttattgattgttgtgataatgtagaagctgctttaattaaattaagtgggtcatattatgatggagctatcattgatatgaaattagcgaatgaaggtaatgaaggtaacgaagttcttgatgaaataaaacgtactttccgtaggattcctgtagccattatgactggaactcctgatgttataagtccagaagattttccattggttgaaatatataagaagggtgattctgaatatcagagtattatatctgaattatatatgatatacaagacagggctaactaaaataatgggaggaaagggggaaatagagaaaaagctaggtgagattttcataaataatattcttccacaaagaagtagctggatgggatatgcaaaaaaggatagtatcaaaactgaaaaagctcttcttagatacacgctaaatcatcttgttcagcttttagataatgatgttgaaacatgctttccagaagaaatgtatatctaccctttaatttcatctagcattagtataggctgtattttgcagaagaaaagtaataattgttattatattattatgaatccagcttgtgatcttgctgtacgaccaaacggaaactgtaatactgatagagcactcttagttgaaatacagcccgttgaagatgtatttactgatttcaattggagtaatttatcagtcggcaatagaaaagagttaaataaattatataaaaacaataagacagggtattatcattggctacctaaggttgatttttttcctgggggaacgatcaattttagaagagtatcaacatattctgaatgtgaattagataccgatttccataagtcaaatttacaaatatcaccatcatttattaaagatatcgtttcaagattttcatcctattatgcaaggcaaggacaaccagatatagagtatgatataatagcgcactaa

SEQ ID NO: 281974 - DNA, 2157 bp, Morganella morganii
gtggacgaaagtggcgcatatagaatacggcctgctggtcgtcatttattgacgattggaagagaattaatccaagacagttatgctgcagtagttgaattggttaaaaacgcttatgacgcagattcacagtgtgtagatgtgtgtttcatggcaaaaaatgatttttctggatatacagtcacaattcaagactatggacacgggatgtcaagagataccgtcatcagtaagtggatggtgccatcaaccagagataaattagagagaaaaaatagccctaaaggtcgggttatgcaaggtagaaagggagttggacgatatgctgcttctgtactcggttccgaccttttgctagaaactatttctgcggataaagaaaaaacgatagtatttgtcgaatgggatagttttgaaaatgctgactatcttgatgatgttgaaatattagtagaaagtgaaaaaacatctgagaacacaggaacattattaacaataactggtgatgaacagtatctttctgagtggaatgataaacaattcaataagttaaggtttgagcttaaaaaacttatatccccgactggaaccattgttagtaaagatactgttgatttcgagataaaattaaaaattttcggttttcaagatactccagatgtaaatgaaactattgagccatatcctatttttgatctttatgattatagaatatcaggaaaaataaatgctgatggaaaaggtaatctgaattattcactgcaaaaagcgaagaatacagttgatgatattgttgttattgatctaaataagccaacaggctgtggagatttgatttttgatattagagtatatgaccgtgaggctgatgcaattaattctttaatcaaccgagggctgaaagataagtatggaaactatgttgggaaacttcaagcaagacagcttttaaatgaatctaatggtataggtgtttatcgtaatggatttagaattagaccattaggagatgcggattttgattggttaaaattgaatgagcaacgtgttcaaaatccatcattacgtattggtagtaatcaagcaataggatacgtactaatccagtctgaagaatactcagggttgattgaaaaaagtgcacgagatggattacgtgaaaacttatcatatgaaaatctgaaatctataacaagaaatattatagggaaattagaagaacgtaggtttagttatcgacgtaaagcagggttgagtagatctgctttaaaagttgagagagaactagaaaagttattctcttttgatagtttgaaaaaagaaataaagaaaaaattacttgttggagggatgacggagaaagcagtcaatgatgttattgacttaattactttagaggaagaaacaaaagcaaacgttgctgatgatattcggaaggcagttgcaacttatcaaggacaagccactttagggaaaataattcatattgttcttcatgaaggtagacggccgttaagttattttaaaaatgagattccaagaatatctagatttcaacagaaattttcagatacaggagataatatttatttggataagatgatagatattgtttcaggcgtaagagataatgctattattttttctgatttatttaaacggttggatccgttatcaacaggcaatagagctaaaaagaaattattgaatattaaaaatgaaatcataaaaacattagatgtttttagacatgaaatgaaaataaataatatttcttttgaaataaatagtgggagtgatgttgtattactagcttggcctcaggatattcaagctgtttttgctaaccttattgacaatagtattttctggttaaaagaagttacacgtgaaagaaaaatagtaataaatattatagacaataatggaaatcttgactttattgatttcagagatactgggccaggaatagaatgttctttaattaaagatgaggttatttttgaacccgaattcagtactaaaccggacggaacaggaataggtttggctattgcaggtgaggcatcagcaagaaataatttagaattaaatgtattggactctgcagtaggcgcttattttagacttcaagtaaaggatattaataatgactaa

SEQ ID NO: 281975 - DNA, 1005 bp, Morganella morganii
atgcaaaatattacactcattggtatcgatctcggtaaacactcctttcatgtgcattgtcaggataaatcaggcaaagcgttgttacacaaaaaattcacgcgaaccaaactgattgaatttttagcgggatgttcatcagtgacggttgtgatggaggcctgcgtcggagcgcatttcatggcacgccggattgcagatttaggccatgaagcaaagctgatatctccgcaatttgtacgtccttttgttaaaagtaacaagaatgattttgttgatgccgaagctatatgtgaggcagcatctcgtccgtctatgagatttgtaaaaccgcgaacggaatcccagcaggctatgcgggctttgcatcggatcagagagtcattagtcagagacaaagttaaaacgaccaatcagatgcatgcatttttactggaattcggtatcagtatgccgaaaggtattgcagtaatcaggcggctttcaaccgtccttgcggaaaatgagataccaccttatctggctcagttactgctccggctgcatgatcattaccaatatttaatggttcagataacagaacaggaaaaagccctggaacatgaactgtcacgcgatgaaacagggaaaaatctgatgacaatccccggtatcggaccgataactgccagcgttttatcatctcagcttggtgatggcagacagtatggttgcagtcgtgactttgcggcatcgaccgggcttgtacctcgtcagtacagtactggcggaaaaaatacacttttgggaataagtaagcgcggagataaaaatcttcgccggttactggttcagtgcgcgcgggtctttattcagaggatagactttcagtctggtaaattggctgattgggtaagaactcaactggccagaaaacactcctgcgtggtgtgttgtgctctggctaacaaactagcccgaatagcctgggccataacgacacaaaaaaccgtgttcgagaagtaa

SEQ ID NO: 281976 - DNA, 492 bp, Morganella morganii
ttgaggaaattaaaatggcacccagaaaggaaaagaaaattaataataaatacaatatcattaaagcaccaatgtagatcatgcggactggaaaccaacatcataacgggtttagatatattcacgtttaatcgcagtgaaaataattacattccatttaatgagccaccgtcacaaaaaatcatacgtaacaatatccacagcgataccttgctatctaaagaaataggggaaataaaatttaacaccagacactcatcggtatattgtttccactgcaaaaaaacaataagcaataaagaacttgataattactatcaatacccagatgagtatgggttttacgacgatgaaattgatgacactataattaatataaatgacgccagggaaaatccaatttatactttttatataaaggatgatgataattatttagagtcagttagcgcatggttttttgataacaaacaagaatcaagaaaattttaa

SEQ ID NO: 281977 - DNA, 597 bp, Morganella morganii
atgccactgaaagcactgttaaataacgaattaatatattctttcatgtttgatgaacctgagtggttaaatttaaaaaaaaattataaaaatcaattattaaaaatggaatgctgcgggcatgatgctatacccaaaataagtcagttgggtaatttttactttgcacacaaaaaaagaggtgagtgctcatccgccagtgagagtatggagcatttatatttaaaatatctggtagctcgtctggcatatcagcatggatggacagtcaacacagaatttcatggagagacgcctgacggtgaaaaatggattgcagatatctattgtgaaaaagacaatgcaaaaatagcttttgagattcagatttcacaacaaagctatctagacttcaaatccagaacaaataaatatgctaaatctaatgtaagatgcatgtggttatataaaattagcaataggacatctcattttataaacaacatcccttcttcttatgaataccctgtatttgctattcaaaaaaacaaaagcgatgagttcatcattcctcaatttaaagtatcagtaaatgaattcattaatggcgttttttga

SEQ ID NO: 281978 - DNA, 339 bp, Morganella morganii
atgggcattgactgggataaacacctgctggggccgctgcataacgtctttgcggaaaaagtacgctgggaaccggtgaaaagtgccaaaggcgccggattttacgacatcgacggcatttttgaccgggcctatttccagaactatgaaagcatggacggtgaaagtggtatcaataccacccgtccgatcctcggtgtacgcgatgttatttttactgtgcctccggcgaaaggggatcgggtatttgtctacagcgtcagcactctgtttgtggtatccgatgtgcagccggacagtcacggcgggacacacctgatcctgaataaggtgaaataa

SEQ ID NO: 281979 - DNA, 549 bp, Morganella morganii
atgaatgcagccagagttcgtgagctcgttgtcgcggccctgaaggggaaaaccagcgcggaagaccgtgtgtattccccgcaggactggccgacaacaaatgcagaatacccctgcattatcgtgcagaccccgtttgatgaaaaacattcactcggccgtaacgttccgcagtttaacaccgtgaccacggtccgagtcaccggccgcctggaagagttcgatgaggcagaccggaacggcgccataaaagcagagctggctctcgaagccctgcgggaacagattgaacgggcggtaattaacagttatgagctgacccggaaaatccagcagttcctgaatatccgatctcagataaacatcagtgctgccggtgaaggccatatggcgcaactgctgatggatctggatatcgagtattaccaggggccggaggaattctacccggttgatgcggatccgctaaccggtatcgacatcagcgttcagatgcctgacggcagcccggaacatcacgtctccatcgacctgactaatcaggagtaa

SEQ ID NO: 281980 - DNA, 1881 bp, Morganella morganii
atggcgggtaatgcctttgattttgaactgaatgctgatgatcgtgcaagcggtcagattacggttctggaggaaaagatccgtagtctgaatccggcactggatgaggcgcgggataaactgaaactcggcggtgatgaatcagtaaccgggctgcgtggtatcggtgatttacttcgtgatgtatccgaggaggctaaatccggcgttcagagtatcggtgacatgatcccgccgctgaaaaactttggtgcgctggctggtaaaatgatgggggctggtggcatcggtgcgcttatcgtcggtggcggtaaaatagtcactcaaatggcagaggacggactaaaccgtaccacatcagcggccaataccggcatgacagttgaagaaagcacccgcctgattggcacattgcaacagcgtggcatgagcgagagtgatgcccgtaacactatggaaggtcagtacgagaagttcagtagtgcgattactgcaggcggcgataatgaaacgttagcggctatcagatctatcggggctgatattgttcagcgcaaagatggcagcgttgacatggaagcgacgctcaaaagccttgagtcggcaatcaaagtgcttcctgagcaccgaaactgggagcttcgggacagattaaaattaccccctgagcttattgcattattacgggaaggtaaatttcaggaaagactgaataaatcggatcaatacggcctgaccattgacggtgattacgcccagaaaatgactgaggttaacactcagttaaatgaagccagcgcaaaaatgaccggtgttgttaatcaggtggaaaaggtgctttatgagtttcttgatgcgcccagtaaggtaccggattttggtgatcttgatggcgccatgaaaaacatcaaagaacatcagatgcgtgtaaatgatacggaagataacttctatcatggtgataagcgtgaggatattattcgttgggctgctaaagacaaggagtacagggattcactaagttggtttgaggacttgcggatgactgccctcgacccggacgacaaaatgtatactgatatctataacaaatggagtgataaatgggaggaacagagggaacgagccgaagccggtaaaaacaagccagcattaaatagtaaggtgcctgataactgggtgcaggatgagacgtataatccaaatcggcgtggtttacgcaataataacccagggaatcttatagcggctcccaatagtgtggggtatgactatggaaataatcaccggtatgtgaagtttgcttcatcaagggacggtaatgcggcattgtcacgccagatcatgctggatgctgaaaggggactgaatacccttgatagtctgctcaggaaatatgccccagccagtgttggtaataacacgcagggatatatagacagagtttcaaagggtacgggatttaacccctatgagcggcttgatatgcacgatccccgcgttttagagaaaattattccgtacattataaaagttgaaaatattgagcagccatacagctatgaagaaatatcagcaggtattacggattctattatggatgaccgctgggctggtggcagaaatccttaccgagttcaggagcaacgcaatgcatttatgatgcaacaagagactgaatcagtggtacctgacttcaaaatagaaaaggatccgacccaggcattactggccttcaccgagcaattatcacaagttcttcaggaaaacaaggcgggcggcacattggaaattgtcctgactaacgcggaaaccggaacaaaaagtaccgtaaacgtgaagccaaaaggaagggttacaacagcgatgaatatgccgtag

SEQ ID NO: 281981 - DNA, 423 bp, Morganella morganii
atgaataaatacagatttaatccggaaaacaacatgttctacccatacagcatgaaagaaagctacgaagcttccggggactggcctgttgccggtgctgatgtcagtgaggatatttaccttaaatttatcggagaggcacctgatgggaaaaagttgggctcagataagaaaggcaatccggtgtgggttgatattccgcctttgagtagtgaagaatatattgagttggcggaaatcaaaaagcagtcccttattaccgaagccagacaaaaaactcagttatggcagactcagttaatgctcggcattattacagacggagataaagccactctcaaagaatggatgctgtatgtacagaaagtacaggcggcagacgtatccgccgccccggatattatctggccggttaagccttaa

SEQ ID NO: 281982 - DNA, 159 bp, Morganella morganii
atgaaagcccacgccggtaacaggagtgccaatcttgtcatgataaaagtcagagtggtggctgataaaatccttgatctgagaaatgcagatgctgtttcagccgcaggtattgatcttaatatccaaagctccacagaatcagaatgctttacgtaa

SEQ ID NO: 281983 - DNA, 1056 bp, Morganella morganii
ttgagtcggtacggtatttatgttcagcccgagacgggttcaaagcctttttacctggacgatgaacaatgtcagccactggcaaaactggggcagtttaagttttatttcccctatgaatccgcaaaattaaacagagtggagccggaaggggtctgggaatacatccgggaccgcaaagcatggcgcgctgtggttcccggtatgtccgactacaattgctttattgtggtgaaaaagggggctcacgccgccggaacttacggtctgaccggagttattcagttatggacagacaaactatggctggaagaaccatacatatatgtttatgcagaatgcggtgattactctgcctggggggatgatccctatggtaaattttttgtgtacgatgtgtatggcaccccaaaacccaaatccgctgcgggtaaatatggcattcagcttcgtggcatgaatggtgtcacaacgctgacggatttttccaagctgggttactgtgtgtgggccggtacggtttacagcgatggtaaaaagggaagcggcgctaaaatacccggatacgacatcagcaacgaaagtcgctatacaatctatgtcagaccaaaatcccaggcctgcacaatgttgagattcaggaattcaatctggactgacgttcctgcctatctgaatgtactgttattcgatcacaaccctgatttatccgttctgccaaaatacgggattcaaatttgtaaccagaatggaaagacaacctatacgagcaaatactgcccgttgatgggagggcagctgttatctgcaatgtctggtaattccaaatacaagactccctattttaatctggcaaactacggcacgttcgtctcttccatcaagaataaaaactacgacctggcagcgcttggcctgtatgtcagcggtaattattacgatgtccggtttctggcaacagtggactccggctggatgggggatatgtggacaaataacggtaatgtgcaggggatttataacacccactgtatcgacggtgatttatatttataa

SEQ ID NO: 281984 - DNA, 3207 bp, Morganella morganii
atgacacaaatcacaggccgcaaaggaggcggtggcagcccgcgcacgcccgtcgaacagccggacgatctacagtccgttgccaaagcaaaattgctgattgccctcggtgaaggtgaatttgccggtgagctgaccgggaaggctatttttctggacggtacgccgctgctgaatgctgacgggtcggaaaactttcccggcgtggtgtgggaataccgccccggtacccaggcgcaaacctatattcaggggatgccggctgcggagaatgaaatcacggttggtaccacagtgcagagcagcacaccgtgggcacatgcattcactaactcgcagttgtctgcggtccgcgtccgtctgaaatggccgtccctgttccggcaggaggataacggggatatggtcggcaacgaggtgaaatacgccattgatttgcagactgacggcggcagctgggaaactgctgtggacggccgggttaagggtaaaaccacctcaggttatgagcgcactcaccgtattgatctgccacagtctgcgacatcctggacactgcgggtgcggaaaatcacggcagatgccaacagcgccaaaataggcgacaccatggtgttacagagctacaccgaggtgattgatgccaaactgacttatccgcataccgcgctgctgtatatcgagtttgactcaaagcagtttaacggctcgattccgcaggtcacctgtgagccgaagatgcgggttatccgcataccgtcaaactatgatccggaacaccggacatattccggtacctgggacggctcgtttaaatgggcatggaccaataaccctgcctggatattctacgacattgtcatttccgatcgtttcggcctcggtgaccgtatcaaaattcagaatatcgataaatgggagttgtaccgcgttgcgcagtattgtgaccagccggtaccggacggcaaaggtggcagcggcactgagccgcgctatatctgtgatgtgtatgtgcaggatcgcaatgaagcctataccgtgctgcgggattttgcggccaccttccggggaatgacctactggggcggaaaccaaattatcaccctggcggatatgccgcgcgacattgattacagctacaccaaagccaacgtgctggacggtaaattcacctattccggcagcagcagtaaggcccgctattcctccgcgctggtgtcgtactccgatccgttaaacggctatgccgatgcgatggagccggtgtttgaaaacgaactggtttaccggttcggctttaatcagctggaaatgacggcgatcggctgtacccgccagtctgaggccaaccgcaaaggccgctggggcattctgaccaacaacaaagatcgcgtggtgacattcggcgtggggctggacggcaatattccgcagccgggctacatcatcgcggtggcggatgaaaacctgtccgggaaagtgaccggcggccgtgtcagtgcggtgaatggccggagtatcacactcgaccgcaaaccggatacggcgccgggtgaccggctgatgctgaatctgccttccggcaaatcacaggcccgcacgattcagatgatcacggataacgtgctcaccgttaccacggaatacagtgaaacgccggaaccggaatgtgtctgggtaacggaatcagacgagttgtacgcccagcagtaccgggtggtgagcgtgactgagaatgatgacggcacgttcacgatatcggcggccatgcatgatccggacaaatacgaccggatagataccggcgcggtactcgatgaacggccaatcagtgttattccgcccggcaaccagttcccgccgaagggtatcactatcagttcttactctgttgtgaatcaggggatcagcattgaaaccatgcaggtaacctggtcaccagcagagaatgccattgcctatgaggcgcagtggcggcgtgatgacggtaactggatcaatgtgccgcgtaatgccaccacttcatttgacgtgcccggggtctattcaggccgctatctggtgcgggtcagggcgataaatgcagcggaaatctccagcggctgggggtattcagaggaaacccggctgaccggcaaggtgggtgatccgccgatgccgctgaacttccgcgcggccacactggtattcgggatcaaactgaactgggaattcgggaaatttacggaagataccttgaaaaccgaaattcagtacagcaaaaccaacgatggtcagaatctgttactgctggccgatgtgccgtacccgtcccgctctcatgagcttgccggtctggccgccggtaccgcgttttatttccgcgcccgcctggtagataaaatcggaaatcagtccccctggactgagtttgtgcgcggtgtggccgactttgatgcatcaaccattattgatgaagtggccgccgggttgggcgactctcaaatcatcaaagacctgcagtcgcaggcggatgataacttcgaggccatcatcaacaatgccaacaacacatacggccagtggaattactggcagcgcgaaaccggctcgatgaaagcggaaattatcgaagtccgcaactacaccgtcacggaaaccacggcgctggccgggaaactggacgcggtacaggttaaagcagaagacggtctggcgctggcgcagaactccatccgcgcgcagtgggatatggccgccggtcaggcatcggtggttcacgatatgaaagtccggatccgttataacggtgaggattattccgctggtatggttatcggggctgagctgaaaggcggggaggtgaacacgcttatcggctttaacgcgcagaagttcgcattttataacccgtccagcaaatccatggatctgtttatgtacatggagggcggacagatctttatacgtgaggcatttatcaaccaggcctggcttaatgaagttgtcgttactgacaaaatgcagtcggagaactatgtaccggggaaaaccggttttctgatagacgcgaagggcggcaatgctgaatttaacagtgcgacatttcgcggaactcttgatgttcgcagcgcggcatcaggtggccggatggaaattaataacgcaaagatagatgtttttgatgaaaacaacgtgttgcgggtaaggatcgggaggttgtcttga

SEQ ID NO: 281985 - DNA, 579 bp, Morganella morganii
atggtgaaaatagaactaggtggtgtgttaggtaaaacttttggcaaaacgcatcagcgtttaataagcactacatcagaagctattcgggcgctatgttgcactattcctggttttgaacaattcctgaataccagtaaatcgcgcgggctgacttatgctttgttccgaggtaaaaaaaatatcggtgaagatgatctgggatttccggctactgatgatgtgatcaaaattatgccagtggttatcggaagcaagcggggcggattattccagactattttcggtgcagtgctggtggccgttgggtttggattaagctttaccccactggcttttgcgtccccatttctttacagcatggggtcagctatggctctgggcggcattattcagatgctgtcaccgcagccaaacgggatcgccatgaaagaccagggcgaaaataaaccgtcctatgcgttcggtgccccgacgaataccgtttctcagggctacccggtaccgatcggttacggtaaacgccgcatcggcggggccgttatctcagccggaatttacgtcgaagatcagcagtaa

SEQ ID NO: 281986 - DNA, 711 bp, Morganella morganii
atgatgcgtaaaaacattcaggcagccatttttgcccacgcagaacgtgaatacccccgcgagtgctgcggggtgatcgcgcaaaaatcccgggtggtgaaatactttccctgtcgtaatattgcggtcacaccggaagaacacttcgtgttatcgccggaggattacgccgttgctgaggattggggtacggtgaccggtattgtacacagtcacccggatgctaccacccggccgtcagaactggacaaagcacagtgcgatgctctcggtgtgccgtggtatatcatcagctggccggaaggggatctgcggactgttcagccgcgcggtgaattaccattactcggtcggccgtttgtgctcgggtttacggactgctggggtctggtaatgagctggtttcggcaggaacgcggcattgaactgccggattaccgagtggattatcattggtgggagcagggcgaaaaccggtacacagataactggcaggaggcgggatttattcaggttgacgacccgcaactcggtgatgtgatagtgatgcaggtacaggcacctgtcgctaatcatgccggtattctgctgggtgataatatactgctgcatcatttgtatggacacctgagtcagcgggttccgtatggcggttattggcgtgatcgcacagttatggtgctgagacataaattacacatgacaaaatga

SEQ ID NO: 281987 - DNA, 759 bp, Morganella morganii
atgatcacaaacgattaccagaagctggaaccgggtaatgccgtccggctttttgaggttgacggtaccgcgttcggtgcgccggatattttgcggttccatgcatacaacatcccacatacagaggcagaaattactgccgccggtggtgatccggaaaaattaccggcgaaatccatctggtggcagggagaggagtatcgggcctggcctgcgcagattgaagggatagaggcatccaccaccggatcaggcgcacagccgaagttatcggtggcaaacctcgacggttcaatcaccgcgctgtgtctggcatacgatgacatgctgaaagcgaaagtcacgatacacgacaccctggcgcattatctggacgcagcaaactttccggatggtaacccgtcggcagatcctgcccaggaaaaagtctcggtcttttatatcgacagcaaatcctcggaaaccaatgaggttatcgagtttgatttagccagcccgatggatttgcagggggtgttgatcccgacgcggcaactgcatgcaatgtgtacctggtgcatacgcggcaaatacaaatccggtgacggctgtgattatgccgggcagaacgggtattttgacaaacacggcaaccgcgtggatgacccggcacaggatcagtgcagcggcatgctgaataccggctgctttccccgtttcgggaaaaataatccgatcccgttcggcggctttccgggaacctcattactgaggaaataa

SEQ ID NO: 281988 - DNA, 2952 bp, Morganella morganii
atggctgacgttgcaagtttagcggttgcgttacacctcaacgcagccagttttaagtcagaggtggccgatgcttttggtacagcgtctgccggggcgaaaaaattcagccgggatgtcggcgcggattcggccagaacagcaaatgacctggcccgtgtttccgatgaggcgaaacggaccggtaacagtatcgcgcagatgggtaattcaggagcgcgatccgggttcgcgcagttacggtcatcactgaccaatatttcagccggtgcgaatgttgccggttcatccatcctcagtgcctttattccggcactggagcgggccgccaatgatgttgatcgccttggctccgctgtcagcaataagcgggcacaggatattgccgctgcggaaagtgcagtgcagatggcacaggcacaggtaaagcaggccggcagtgcaaagcaggctgcgcagtcacagattcagcttgcccggcggatgcgtgatgaggctgccgccaggcgggaacaggccatcgcgctggatgaatattatgccaggcaggcgagggtaaacaagcagcacggtgtcacggtttcgtatgccagagaacacgcggagaacgcgcgtgtaatcagtgaggcaaacattgcggaggaaaaagcaaaaaataaactccgcgcggcagcccgtagtctggttgatgcagagcgtaacgaggcatcaggtaagcgtaatctcacttccgccaccgctggcttgtcggcagcaaacagagaactgacattcgcacagcgtgcatccgcccaggcaggcggcctgctgaaaaacacctgggctatgctgggcggaacactcggcattggtttgatggccgccgccggtgctgccacttatctgtattcacaatacaaagaagcggaagaacggcaaaaggcgtttaatgccgctattcagaaaggcggggcggggctgaataattcggtataccagctgcgcacgctggctaatcagttgggcggaacggcggatgcgtacaaaacagtgacggcggcagcgactgccggtttttcaggctctatgctgcgtgaagtgtctgaattcggcgtgcagctggaaaaatccggcggcagcgccgatctcctgatcacaaagttatcatctattaacgagcagccgttgcagagcctgcgccagcttatcaatgaagggctggtttttgacgaggccacaataaaccggattgcgctgctggaacggcaggggaaactggaggaagccaaagaggttgccagaaatggtgcattaaatgccagtcgtgaacttaatcgtcagcagcaggaagcgaatgaacgacacgctgaaagtgtcagtgaaatagataagcgttatcagtttctgaacaacacgttgcgggattattcaaatacggcggccactgcccatatggtgtcataccatatgatgaatatggaaaaactgacacttcaggcggcagagctgattacagctgaccgaagagagcagcagcaaaaggagcagataaaaaacacccgcgaacagttagatgcgcagttgcagttaaactcagcgtataaagcgggcgcggataaacacgcggaaaagctgaaactgcagaatgccgcccgtgagcagctgaaatccggtcagatggatgcaaagcagtttgagcagacaatgaaggggatcgacagcctttacagttcactggataagaagggacacggcggcagtggtattccggaaggtcagcgccgtgcgcagcaacttatggagcagaccgccacactcagggcacagcttgctgaaaatgaaaagctgaccgcatccgaaagtaagctgattgcatttgagcaggagctggtcggcctggcaggtaaaaaactgaatgccgctcagaagagtgtgatggaaaacgccgggtcgatccgtactcagttgcagcttaacgctgggcttgaacgtgagattgccctgaaaggactgcgtaaaaagtttgatgatcagaactttgaaatagcgcagcgcacccgggccatgcagcaggaggcggataatcagcgtctgcaactcatgatgccgacagcagattatgacctgatgcttgaggaacagcggattgcggatgacttccgccagcgccggtatcagctggataaagaaatctcagataaaacctcgcagttatacaaagatcagaccgccgttctgaacgccgaacaacaaaagcagacagatatcgtccgtcaggccgcaaaagacaaagcagcgtcagaggcggactggcagggcgggttaaagcagggctggaaggatttcagtgacagcagcggcaatgcgtttgcaatgatgcgcaatgcgtcagcgaatgcgcttaacagcacatcatctatgttcactgactttctgaccaccggacgggcgaattttgccgactttacgaaatccatcctcaccgacatcacaaaaatgatcgtccagatgaccatttttaacgcgctgaagagcggcctgagcgggacatggctgggtgatgcgatggggatagcacccaatgcgaccggcggggtgtatacctccccggggctgagtgcatacagcaacagcattgtcagctcaccgaccgtgttcccgttcgccaaaggcggcgcacccaatatcggcctgatgggtgaagccggatctgaggcgattatgccgctaaaacgcggaccggacggtaaccttggtgtgcgtgcctatggtggcagtagtgccggtggtacggcgcctgtggttaatatccacatcgacagtgacggaaatcagcaggttcaggcatccggtggtcttgagcggttcggcagagatatagggcagtatgtcgaccagcggtaccgcgcactgatggacagggacacccgtcccggcggggctgtctggaatctggctaagggggggagatga

SEQ ID NO: 281989 - DNA, 321 bp, Morganella morganii
atgctttctctggaacgtgcaaaacagcaggtgagactggatcaggatttccatgatgaagatgagttgctgaaatcttatattattgccgccggccgcctggtggaaaatcataccaggcgcaccttaatcacggattctgatgaaagcccggatccggaaataaccctgatttataacggtgatattgaagtcgctatgctcctgctggtgggtaactggtatgcaaaccgcgaatcagttgtaactggtgaatctgtggcggtgttgccgatggcggttgatgcgctgctgcaaccttatgtgaggtacctggaatga

SEQ ID NO: 281990 - DNA, 408 bp, Morganella morganii
atgaaaaaaaacatattatcagtattgttatactcctcattgatcttgccagctacaggatttgcttctgaccttttaagtgtgcatatactgaatcaacagtcagggactccagcaagcaatgtcaatgtagtacttgaacaaaaacaaggtgaaagctggcatattttaaacacagcaaggacaaacaatgatggtagaataaaaaaactctggcccgacaatatcaatgaagaaaaagggatatatcgagttacatttaaaaccggtgagtattttaaaagtaacaatttaaaaagcttttttcctgaaatcccggtcgagttcaacatagaggatacaaaccagcattatcatataccactattattaagccaatatggatactctacctatcgtgggagttaa

SEQ ID NO: 281991 - DNA, 177 bp, Morganella morganii
atgaaaaaattaacagtatccatcggtaatctgggtagtgcggctaccggtgattatgtgagctttaatatctggcagggcggacaactgctggtcggtgataagactgacaacaacgtcaacgcacttataagcctcgcactcgcggggttttttattgcctgtaaatacatgtaa

SEQ ID NO: 281992 - DNA, 315 bp, Morganella morganii
atgacaactgaaaatgaaaaaaacagccaggtattaattgccccggctgatatgacaggagcagagctacatactcacttgtcaaaattattttatccatttgtcgcgtttaaacaaaagaccgaaatggtaaatcaccatattaatcttttgttattggccttaactgacgcggagaatgtggctaagacatctttagatatatccagccgctacccaggatccacccttcaagcggatctatgtcaaaattatcagcgggtgatggcattgcaagtttttctaaaaaacttcgcgccttttccggaagattaa

SEQ ID NO: 281993 - DNA, 441 bp, Morganella morganii
atgtctaagtatgcaaatttatggcagacaattggcagcacactctgtaagtatcataatgtcggtccatattcttttgagtggaatgaacccgtctcattttcaattcgtaaaaaagcacggtttttatttcttcttgaaattgcgctatatcagcatcgcgatacggagactgatatttggtacaaacagtcaccacaagaaacattatattcatttatttactctaaaattggcatgcttcctgagcaattcaatgaattaagtaacaaggcgaaattactggttttacaaaaaccgctttctgaatttaatcttccggaaaaggcgcgaagttttttagaaaaacttgcaatgccatcacccgctgataattttgacatagatccgcttgaagggtggatcctgggtagcggctggatatatctaaagatgtcttag

SEQ ID NO: 281994 - DNA, 2298 bp, Morganella morganii
atgacaaacattgagttaatccgggaggttaagcggagcgccgtaaattactggggcagtgtcctgtccgcatgtggtgttgatgtgccggaacgtgggaaacatggtgcatgcccggtctgcggcgggactgaccgctttcactttattgacgatcaccataacggtaactggttctgccgtcagtgtgatgcgccgaaccacggggacgggctggatttaatcgcaaaggtgaaagggatatccgttctcgatgcggccaaagaagtattacaggcgttatcactgccgttaccggaaccggccagacaggaggctccgaaatcagcggcaccgccgataacggaaaaggtccgtaagctggtggcacagacgactaccggacaatctgcctacctgactgcaaagaggcatacgtgccccgtcaggctgctggaggatggttctatgctgctggttatccggtgcggtgatgaagtgacaggcgcgcagattatccgcccggacggagagaaacggctgattgccggcacacggaaaaaaggcagctttatccctgtgtcagaactgcctgaaacggcggatacggtactgatagcggagggctatgcaaccgcgcttaccgtggcacaactgcatgacgggcttgtgctggcggccattgatgagggtaatttactgccggtgacagagtgggctgccggacgttacccggaggcgaaaatcatcattgcggcggacaacgatattaagcccggtcagccgaatgtggggaaaatctccgcagagaaagcggtaaaaagttttcaccgcggctgggtaacactgccgccgactaaggataaggcagactgggacgattaccggcagcagcacggaacggaagcggcaaaacaggcattcagtaaggggttgtatcaggtgaatagtaaaccggcagtgagcagcaaaaagccccggacagagaatctgacccagatggcggataatgaaaaagccctgctgctggccgggcgttatgacgggatcgccgtacatcaggaaagtgagggtttctatgtctatcaggcgggagtgtgggaaaaaatctcacacctcgaactgagccgggaaatgggaaaggtgtactgtgagcaccagaccaatttcagcaaacgggcggtaaacaatgtcgtggatgcgctgaaaattattgcgccggtgatgggtgaaccgtgtaaaagtgtgatcccgttttccaacggtgtttttgatatcgagacaaagcagttcaccgcacataagccggataattggctgctgaatcataacgggattgaatatacaccggcgaagcctgacgagaacctgcgggataatgcaccgcactttcatcagtggcttgaccatgccgcgagccatgacccgcataagatgaaacggatttttgccgcactgtatatggtgctggcgaaccgctatgactggcagttatttctggaaatcaccggggagggcggtagcggtaaaagtgtctttacccaggtggctacgttgctggccggacagcacaataccgccagcgggaacatggccgcactggactcagcacggggccgggcgcagtacgtggggaaaagtatgattaccctgcctgaccagccgaagtacaccggtgagggaacgggcatcaaagccattaccggcggggatgcggtggaaatcgacccgaaacacgaacagcagtacaccagtattatccgggcggtggtgattgccaccaacaacaccccgatgatattcactgaacgggcgggaggtgtggcacggcggcgggtgatcttccagttcaacaacaaagtgaaagaggaagacaaagacccgcatctgtccgaaaagatagcctgtgaaataccggttattgtccgtcgtctgctggctaactttgacgacccggaacacgcaaaatctctgctgacggaacagcgggacagcgacgaggctctggaagtcaaacgggcatccaatccggtactggatctgtgtgcggcgctggcgtttatcggtgaaccccgggggctggaaatgggcggcggacgtaaagccgaagatgaccgccagccaaggaaatacctgtatcacctgtatctgtcatttatcgaatatcaggggctggggcggccgctgagcgtaaccgagttcggcaaggcggtgaaagaagcggcgaaggagtataaatcggaatacctgacccggactatcaaaggcagacggcagaccaatgttcagttaactgagaaagctgaggagtttttgtaa

SEQ ID NO: 281995 - DNA, 327 bp, Morganella morganii
atggctgatatctacgattttattgtacggatggatctggacgcgatgagcacggacgaattacgcagcctgaaaagtgtgtcctctgatacctgtgacggtctgctgtccggcttaaaggcaatgggcgagtgtgcgttctgggcgtgtgcaggcagggattatccggagggacaggcaaaggacgatttgcgccgtatcggtgaatccctgatgtatctgccgcgcctgattgatgccatgcgtttcacggaagacgaggcgcagttcaaaatctatcagcgtgaaggcttcccgtacacggaggtgaacaatgacaaacattga

SEQ ID NO: 281996 - DNA, 189 bp, Morganella morganii
atgaaaaacaacgaattagcggtattattggaaaacccgatgatggatatccggaaactggaaaccctgctgaccacctggctggatgcggaagaagataccgaaaccgccaatatgatcagtatcgcactggactacgcggaccgggttcagattcagttggctgacgttctgagcgggggaaaataa

SEQ ID NO: 281997 - DNA, 189 bp, Morganella morganii
atgtctgatgctatctgtattgataccgcgaaacacaaagcaagtttagtgagttcgctttactgcgtcattctggaacaggcagcgaatgagtgttcaccggatttactcaacctgatttcaatagcctgtgacttaaaccagcagatcagccagtccttacgtgatgaagatgaggtgtcagcatga

SEQ ID NO: 281998 - DNA, 183 bp, Morganella morganii
atggctatgtataagtctacccaaactcaccctgaatttatatggcgtttcgctgaatgtcaggaaaataaagccacctatcaccacgtcaccgcacacactgaggatgaagcccgttcgctgcttcccggtctgccgttggtcttcactgcccgtatccgtcagggggtgaaccatgtctga

SEQ ID NO: 281999 - DNA, 189 bp, Morganella morganii
atggcaaccggcaatataaataacaaatcagaaaagaaaaacatccgctttccgcatgaattaattgaaaaaatcaacgaatgtgtggcacaacaaaattctataggaaatgattcaaacttctcatcttgggttattgatgcttgtgaaatgaaattgtctaagcaaaaatcacagaagaaaaaatag

SEQ ID NO: 282000 - DNA, 342 bp, Morganella morganii
atgacattcaaactacaagcattaagcagcaataaagaagatgtgtatgatgttgaagtttttgaaatatcaggccaagtaggaatatcctgtaactgccctgcaaatacattttgcaagcatgtaggggcattgtttactggcaagaccggcgttattttccctgccgaactcaataatgagaatgacattaatgcttcggttaatttgttacagtccagcgggctaactaaaaaatacgaatcattgatgactgaactggatgaactcaaagtcgagtacaaagagaataccgctgcaattaagaatgaattaaataacctatgtattccaactatataa

SEQ ID NO: 282001 - DNA, 702 bp, Morganella morganii
atgaaaaagaaaatgaccgtaatgggtcagggcgtcgctcaccctgaaatcagttcagtcactattctggttcagcacaaaactgaaccgagaattgacagccgcctgtttgccggacgcgttggaatacaacacgaaagtcttgtaaatgttattaaaaagaaccttagctgtttgcgtgagttgggttcattgccaagacatagtgaaaaagaattgtccgatttgaaatcgggaaaatcaaaacgcgggcgttctcagatttattacctgctcaatgaaaaccagttcgattttatgtgccgtattgtccgtggacgggatcacgaaaaaatgactcagtttaagctggatgttaccaaagcattcagtaagaagcgcgctgctgaacctatccgccgtgagtacctgcctcattatcatgagtcgcgtgatgcgctgagagatctgggcgcagaacgtcatcactatatcaatttagccaggacggaaaaccgtgccgctggattgctgacaggtgagcgtcacagtgctgatgaacagcagttagggttattggtttgtatgcagaaaatcgaacaggcggcatttcaggatgcaatgagtgccggattatcaccgactcaggcattacgtgaggtgagtaaacgtattgagcagtttgctatgctgatgagtccggtcagccggataggaggctga

SEQ ID NO: 282002 - DNA, 363 bp, Morganella morganii
gtggaagcctgtgtaaataatttaattgaactaatagaaaccccgtttatcgggttttttttctatatggagatcagcgttatgtcattaaaatttatgtcaccaacaccggaagagcgtcagctaattttaaatgaatatggtgagagatatgatcgccgtatcagggaaaaggaatgtgagcatataacaagcctgtcgcgttctcgcaggtggcagttagaaaatgaggataaatttcctaagcgtgtgccgctgggtaaaaattctgtttcatggttactgagtgatgtgctgttgtgggttcgcaatccaccggtggtggataacgtcaataatccacacagcagaaagctggattaa

SEQ ID NO: 282003 - DNA, 1422 bp, Morganella morganii
atggctggtgaaaataagctgagtgataaaaaattaaaatctatgcttggcaggtccagagatgcacaggttatggtctcagatggtaagggaatgtctgcgcgtgtatcaaaaaccggatgtgttagttttgtctatcaattccggttaccgggagcgtcaaaaaatactacctggctgacgcttggccgctatccggatttgtcactcagttccgccaggaagaaacgtgatgagtgtcgggcatggttggccgagggaaaagatccccgattagagctgagtattgatacgcgtgaaaataagccggtgactgttaaggatgtaatagatatctggtttgataaatacgttaaattaaaaagaaaaaatccggaaccgatatatcagagaattaataaacatctactgtctaaaataggtatgcatccacttaaaaatataacagaggatacatggatttcagtatttgataaggtaagtgaaacgtctcctgtggttgctaagattatgtttcaggaagtaaggcaagctattaactttactaatgctaaacggtataccaagtatttcacactgaataattttagcaccaataatattggcgaatttggaaacagaaaaagtcgatttttatcaaaagatgaaattcgggatatctggtttctgtcacatcaggaaataaataatctacatatacaaccccgtctgtgtcgcctgatcattatttctctggtattcggttgtcgtatatcagaagcaataaattcatcatgggatgaatgggattttaatgattgggtctggactgtacctgaacgaaacagtaagaacggacataaaataattcggccggtgccttataggatcagggggtggttgctggcacttaagagcgcatcatccgggcataaaagtatcctcgggttcgacttgctgcaaacgagagccagctcaatgggtcacacgctctggagcaatcttagtcatcaagagaaatggacgctacatgatttaaggcgcacatttgcaacatatacctgtgaacttggggttgatcattatgtgatagagcagttgttgggccatactctgccgggggttatggggatctataacagaagccagcagcttgataaaaagttagcggcactgaatttatgggtagagtacctggattcattactggatgaaaatatgataaaaataatcggaagagatgagttagacaatatccccgagattgacagggttattttagatagtgagtgtgaatatttaacctcattatctaaaaaggtaagggctgaaatgcaaaaacggaatgaattcccggaaaagaaaaaattctcaaatggattctcagcttatttattatctgatatcaatagctggattaatggctcgtggaagcctgtgtaa

SEQ ID NO: 282004 - DNA, 1653 bp, Morganella morganii
atgagtgtacaaatcttaggagcggacgggcgcccgctgcctccggctgccccgaaaatgaaatacggggcactgtccggcagtggccgggtaccgtatgacgcggcggattcattcagtgatcagatggcgaactggcagcctgcgctgtggtcgccggataatgaaattaacatctaccgtgaccgcattgtgtcacgtatgcgtgacctggcgcgaaatgacggctgggcgtccggctcaataacccgtgtcctggataatgcggtgggcgcctgttaccggccggtattcaaacccgattaccggatgctcaggcaactgaccggtaataaggcatttgatgcggtgtgggcagctgaatacagccggtttattaccgcgcactggcgctcatgggcgaatgacaaaggccggtactgtgatgttgaacgtaaacagaccgtatcgcagatgctgcggctggctttccgtcacaagttgctggacggtgacgcgctggcggttctgcagtaccgtcctgaccggcttggtcacggtaaggcccgttatgcgacgacagttcagattgttgaccccgatcgcctgagcaacccgcagcagaattttgatatgccgaatatacgcggcggggtggagattgacagcgacggtgccccgatcgcctatcacatccgcgaagcccatatgggcgactggtgggccggtaagaaaaccatgacctggaatcgcgtaccgcgtgaaacctcatgggggcgcccggtggtggtgcatgattttgatatggagcgcggtgctcagcaccgggggatcggtattctggcccctatcgttcagaagctgaaaatgctgattaagtacgatgaatcagaactggaggcggcaatcctcaacgctattttcggggcgtatatcgaatccccgtatgatgcgcagatggtggcttccgccctgggggataccggcgattttaccggtgatgaactcagtgcctaccagacactgcggacagaatactatcaggacaagcgactcaatcttcagaacggcgcacggatcccgcacctgttcccgaatgaaaaaatagtcacactgtccgccgcccggccgaccagtaattttgacggttttgagagtgcggtgctgcggaacatctctgcggcaaccggcctgtcagcccagcaggtcacacaggactggtctgatgttaactattcctctgcccgtgccgccatgctggaagcctggaaaaccctgacccgccgccgtgatgacttctcaaacggcttcgcacaaccgatagcagtggcctttgccgaagaaatccacgatgtggaagatgttccgttaccgaatgatgccccggactttatggacgcatcagcatcctactgccgcgcgcggtggatggggccggggcgcggctgggtggacccggtcgctgagaaaaaaggggccattctcagtatggaagccggtttttcaacactggaaatggaagtggctgaaaacatgggtgaggactgggaagagctggtcgatcagcgcagctatgaacttcagcggtttaaagagctcggattgccgccgcccagctgggcagtggcagaagagtttgcaccaaaccccgataacaaacaggaggcgaagtga

SEQ ID NO: 282005 - DNA, 552 bp, Morganella morganii
atgaaagtaacagtagaacacaacggcgaaatcatctggtaccgtgacaacaagaacggaacagggatgtcatcacgcggttatctgacagacggtacacagcagaagatcgttaccgccctgattgacgcactgacgcaggctaatggtgaaatatcattgtcccgtccggtgggtgaggtttgcctgacattatcagatgaacaactgaaagagattgcaaaagaggtgaaggcgcatcgggcatttatgccagcattgtatacatctcgggatatcactatagacagtccgaaaattaaggtcacaggtagtctcgctcccactgaaagaatagcaagtgccggcatcgactgtttagagacgatacagatggaatgtgaagcagcgctgaaatatataaagtctgagctgtgcaataacccagacaagctggcgacctgtgttattcagtcagtgatggattattgccggaaaaaattggctactgagccggaaaatgaagaaagtcatccgatttttctgtggggcaagtggcagcgtcacccatag

SEQ ID NO: 282006 - DNA, 309 bp, Morganella morganii
atggcaaagatggatgacaaagacctgaaagtcaccggtacagcatggggggtcatatttgccatatccctttacggtggcttagcccggtacattattgacaacaaacgcaacggctaccgctggagctggctgggggcaatcatgcagatgatggtttccgggttctccggcctgatgggtgggcttctttctgtggaactcaacgcttcgttttattacacggtatttgctgccggtatgtgtggcgctatgggttcttttgcactggacttcttttggtcaaaattctcaggcggtaaaaaatga

SEQ ID NO: 282007 - DNA, 255 bp, Morganella morganii
atgacagagaaaacacaggaagatgaaattacagagaaaataaataatattgagattcattacaacgtgatggctttcccggaatggtggaggcatggagtgaagtgtatgcatcctgaaagaggggtggtcacattaaatatcgcgcctgattgtgaatattggttcacaaataaatcaggggagcaggttgaaataccgagctggagaatttgcgaaatgtggccagtcccacaagcaaatgatgctaactga

SEQ ID NO: 282008 - DNA, 207 bp, Morganella morganii
atggaaccaacggattttgaaaagtggtgtgcgggtgagctgatgcgctcggtcaaatatatcattctcttcatggcgcacatcggcggggaattggtttattcccacaatgaaatcgagaagctgcacagtgcctacatggccggagttcgcagcagattgccgtaccagacaccgccaaaaggagatgaagatggaatggattaa

SEQ ID NO: 282009 - DNA, 318 bp, Morganella morganii
atgagcgtaaccacgttaaacgatttaactaatgcatggaacaaacaaataatggcaatcaccaagagaacccacgccgcagctggttatcctgataaaaagcgttggcgtgaaattgtgttggctcacaccaatagggtcatgcggagggatatgggcaaatgcgggagaaacagagcgtcccgtgttgcaggtgccttagagactaatgatttatggggtgcgatgatcagagcaaaccgcaagcactccggacttcctgaagttatttacacatttggtaattcagggacagcaaaaagccagagggaatcctga

SEQ ID NO: 282010 - DNA, 684 bp, Morganella morganii
atgactcttgatgaactgacattccataagcagataattgaacatgcaaccatgcccgaggggtttcgtttatctggatgggtgtacgttctgagcaatgagtttatgccgggtatttacaaggttggcatgaccactatctcgccagagataagagctaaagagctatcttctgctaccggcgttccggcgaaatttaaaatcgaagaaagctattactcaactgacccacttggcgatgaaaaactgattcaccaacatcttgctgattgcagggtgaatgagagtagagaatttttcagcggtgatctggaaaggattctgtctgtttgcaatgacataactgaatttagcacttctgcaccggtggaagagatcgcagaccattacgacatcatcagcactgagaagcttggaaagctaaatatcggagacctctttgattctcttggcattcaggtctttggttgtcggttggctgcggcagagaggctaatcaggattgctcatcagtttttaattgaaagcaacagaaaaagtagccggtctctttttttacaggatggaacggcttacgtcatcagaagccaggttgatcagatgtatgaaaaataccttgaagaaaccaacgggaaaggcaggccagcggagccagccaccgaggacacaggagtaccattttaa

SEQ ID NO: 282011 - DNA, 333 bp, Morganella morganii
atggaaaatgcaaatccacgcaaatcgtttaaccggtttgtgtcaaatcatctgatggcaacagctcatcaggcactgagaagcaccacacagacagtggttgcaaaactgctcggtgtacacgattcaacagtcttacgcagaacagaaaagttaccggagatatgcgagacattggccgcagccggtatcacggattttgttttgccaggcgagaagaaaatcagcgaagaagagtaccggtttctgtggaagcagatagcggaattctcattgtggaaaacgggaggttttcatgaatccaacggagttcatcaggaagaacatcattag

SEQ ID NO: 282012 - DNA, 531 bp, Morganella morganii
atgagcaaatcacatcctaaagttatcaaaagtagagagcaatacagagaatacatgaatgaattcatgtcgttttttgggaaaaatcttgatgacaatgaagacttaaaggatcgatatgagcttttaggtgtgcttatccaagattatgaaagaaaagaatttccgcctgaaaaaccatcagctattgacgctattctttttgaaatggatcagcgcgggctgtctcaaaaagatatggtcgtatacttcggttcaagacctaaggtgtccgaagttttgaatggcaaaagaggccttagcaaggccatgatgaaaaagcttaatagtggacttggcataccattggacatcctcattcagtcagcagatgacttgccagagcctgatattggagacctgattaaggttaccgggaatagcaaccaagagcaggaaaatctgcagtggggagagcctagctctgttgggaaactacaaaaactagtgatatcagtaccgccaacatgtgataagagtgtgatgcaatga

SEQ ID NO: 282013 - DNA, 417 bp, Morganella morganii
atgaaacttgtcaagatcaacgatgatacaattctgacattgcctctgttcctggaacatgtccccgctgggttcccgtcaccggcgacggactatatcgaggaacgcataaacctgaacagtgaactgatccgacacccggaaagtacctatttactcagggttgaaggtagttcgatgatagatgcgaatatctttgacggtgatgtggttatcgtggacagcgcggtaactgcggcagagggggatattgtgattgccagttttgacggagagtttactgtcaaaaaattgcaactgtcaccggtacctatgctgatcccgatgaatccggattatcagcctatcgtaatcagcagtgaacaggatttacagattttcggtgtggtcacctacatcatccatcgggcgcagtga

SEQ ID NO: 282014 - DNA, 483 bp, Morganella morganii
  misc_feature (449)..(458): n is a, c, g, or t
atgtcagatttaaaaaatacaatagatattattgaggaattggttaaatatctttttgaaccagagaaaataagcactctgctaccggctgttataatatttttaagctataaatatgagttttttacgggtgcattttataaaataaaaaataaaaagctcaacgaattatcattttacagggagaaaattaaaagtgaatcattagctaaatatataaatttgaaaattgatgaaataatagagaaaagagtgacaaaagtcaattgccataaagaaagaatggtctttatgtatgtttcttcatgcagagggaagtggcattatggtgatattgttttaagaaacattataagctatatccggataggaaaaaggttaagaatagatttcaaaaaatataaagaaaatagatccggttatgtgaggaaatttattttatatcttannnnnnnnnnctatcattatttcattttattttaa

SEQ ID NO: 282015 - DNA, 480 bp, Morganella morganii
gtggatagttatatatcttcattgccacaaaaaaatatcaatgttgtaattaatatgtttgctgccagtagtgaacgcagcctttccttatcacaggcaaaagagttagataaccgattaaattcgctgcatgacaatattactgttattatattagattataaaaacgagctatccgagaaaagcttcacgcatgctcatgtttacaattcactttcattgcagcattctatcgcgttaatatcaaaatcagatcttataatatctcctgatacatcaattgtgcatatttccgccgccttcagaaagaatttaatagcaatatacaaaaatgatatccacaataataaattgtggagccccggatacgaaaatgctgttcagctttttacatcaacatcaaaaatatatgaggatgacaatataattaatgagattatctcctctgcagaaaaaaaactgaaaacatataataaataa

SEQ ID NO: 282016 - DNA, 2211 bp, Morganella morganii
atgcacattacaaagctttccctagtaaattacagaaacttcaaaaatgtaaagttactttttaataagggaataaatacaataattggtgaaaatggttctggtaagactaacttattccgagcgatgagattaatgcttgataattcgataccccgttctgccactaagctcgctgaaggggatttttgtcgagcattaggtaactggcgaggacattggataattattagtatggagtttagtgacattgctgatgatgaagccagccaatcgctattccttcatggtttaggaaatgctgaggatgaggttgttactaaagcaacatacaatctgatcttcaggcctaaagcaaacatccgccaagcactggcacagcttccggaaaataatgtagatgctttagaaaactatttggaagttataactattgatgattatgaaaccgtccttactggcaaaagtgttgctgactttaataatccaattgtatataaaagtatagttggtgatttcgaaaaagtcatatttccagtacagttaaataatcctgacgttggaataaaattaccaaacattcttaatatgccaaatgaagtctcatttacctttattaaagccttaagagatgtagtatctgactttcatagcaataggcgcaatcccttgcttacgctattaaaacgtaagtcaggagcgattagtccggatgactttcggcctattgctaatttaattgggactttaaacagtaatattgaagatctatcagagatctgtgatgttcgtgatgatattgttactactatcagtgatacagtgggtgatacatattctcctaattctatttcaattcgttctggcttaacagacgatgcagatcagctttttcagtcattaaagctgtttgttggtgagtcagatgatgatcacgaggagtctatcaatgaaataagcttaggtggtgccaacctgttatttctcacgttaaagttacttgagtttaaataccaacaggcaaatcaatcaattgcaaactttttattgattgaagaacctgaagcacatatacatactcatattcaaaagtcacttttcgataatattaactacgaaaatactcagattatttattctacccattcttcacatatctcagaagtaagcaatatcaataatatgaatattattggcttcgccaatggtgtttgtgaggtatttcagccttcatcgggactcgaagaagaacaaattggttttgtacaacgatatctagatgcaatacgaagcaacttactattcgcgcgaagtgttgtcctagttgaaggtgatgctgaagaaattctaattcctattctagtaaaaaaagttctaggtttgagcttagatgaaattggtatcactttagttaatattagaagtacaggctttgagaatattgcaatgttattcaatgaaaaaaggattaagaaacgttgcagtattattactgatcttgatgaagcgttctttgatactacaattttgccaacggataactcggcaagtataaagaaaaaagagaaagctataggctctcaagaagcaggtttggctcggaaagtaaggcttgatagcttttgtttaaacaacccttgggttttaacttactatgcagatcatacttttgaagttgactttataaagtcatccaatgggtgttatcttaagaagatcgtcagggatatttatactaaaccagctacaaaagacatagctacaacggaactatcttcttctgatatagctacttcaggatctagagcgttaacaatggctaattatcaaggtaaaggttggtttgccattacactcggtaaagtgattgactttaaagtagccattccaaagtatattttcgatgctatcaagtttgctcatggggactttaatacagtacttactttcaaaatactcaagcatcgttatgaatcaatcgttgaatatgtcaaagatggtagaaaaatcatagagaagctagacatagaaggaaatacggctctaaaacaaaaatgggaaagatacttggctccatatgaaagtggtctggcgatatttactcctaagtggaaagcttttaactcaagaaatgatgatataaatattatcaaagctgatttaattaatgacctacctatggaacaaaatgatatattattgaggatctaa

SEQ ID NO: 282017 - DNA, 1797 bp, Morganella morganii
atgtttgtatgggatgaggacgacctaaatgatgaacaaatagccgctatacaacaagaaggaaatgtatttcttgaagcatgtcctggtagtgggaaaacaagaacactaacctacaaaatagctcttgagctgtcgaaattgaccaatgaaaaaaagtggattgtagcaattacatatacaaatagagcagctgatgagattcgtgaaaggattgagttattaggtgttaatacctcccagttatgggtaggaacgattcattctttttgtttagaatggattattaaaccctatggaatatatcatgacaagcttaaatatggcttcactatcattaactcttatgatagtgaagatttaataaccagtatttgccttagccttcgccctcaacaatatattacctactatcaatgttcgcattactatacaccaagaggtattaatattacaggaaatagtgggagcttagcagctagtgttctggatgcttatcatcagcaactagacgagaaccatcaaatagattttgaacaaatattgtatttctcttacgagcttttgagtaaaaaagtagctatatcaaggatactatccaatctattttcttacatatttatagatgagtatcaagatacgaaagagattcaatattcaattgtagcttgtataatgaaagatgaactagataagataaaagcatttatagttggtgatcctaaccaagctatatatacatcattgggtggttatgctatatcccattcagaacttgaatctttaactgacgctcaatttaccaaaatgtctttggataagaactatagaagttcacgaagaattatagaatattaccaaaattacaatgtaagcccgagagaaacaactgctgaaggtaaaaataagaattatcaaagcataataacttatgatcaagttactcacaaagatgatttagtagagaaagttagtcgatatattgaacacaatattaataactatggcatttctgaaaatgaaatttgtgttattgccccctggtggacgcacttagctgcactaacacgaaacctagttcatcgcttgcctcagtatagtttcgatggaccgggtttagttcctttttctcgagacgttgaaaatttctggtataagttaactagaatcattcttactgaaccgtcacctaatatgtatgtcaaacgtcttagatgggcattcgaaatattagatgatttagcactagcaatggtggatgttgaaccttttagcccaaaagatcttcttaaatccattaactctatttcaattgaagaggaagatgggcttacgtatcttcgtacatttttctaccagctatttgaaagcttagatttgaattttacactttatcctatgctacaagctcaccacgaatcctttttcaatagtactgaagatcggataaacagattgcgtaaagaaagtgaagagtttgcaaccaatattgagtcatttcgccgtgcgtttaaacctagaagtggaataaaggtatctacaattcatggagttaagggcggtgaatatgatgcagttatatcgtttggattgcttgaagggttagtaccaaactttaatgatatatccgaagacagagccatgaaacttctttatgtcatcgggtctagggctagaaaaaatctacatttgatctctgaaagaggaagaatgcaaggctttagtccaaatcaaactgaacgtacttccactgaagttctccaacgggtgcatttttcttatgatgattttacataa

SEQ ID NO: 282018 - DNA, 153 bp, Morganella morganii
atgggctggtttgaagccgctgacttaatcgttaaaggaatggaaggggcaatcgctgctaagaccgttacttacgatttcgaacgtctgatggaaggcgctaaactgctgaaatgctcagagtttggtgacgcaatcatcaaacacatgtaa

SEQ ID NO: 282019 - DNA, 174 bp, Morganella morganii
atgcgagaccggttgcaaaaccacagaaaaccgagtgtgtcatcaaagtactatgaaaggtatgactacttaatgaaaaggcgcgagatcatcagttactgggaaaaaaattactctctctataaaaatctgtgcggacacttagttcgcacagaccacgcctaccttgggtag

SEQ ID NO: 282020 - DNA, 525 bp, Morganella morganii
atggatattatacttggtgattttctcataaaaacaggtgcgtcattagtggctgggctgctgacggggtcagtggttgcatttttcacagcaagatacgcactaaagagattttataaagaaaagtggtgggaaaaaaaattaaacgcatttctggaagttactgaaaatatatacaaaataaagcgagcggaagattattggcttgccaaggaagaaagtaaaatatttaaggatgactcatttcagcagctatccccagaagaagaagaagaacttcgtactgagtattcatcaggaaggaaagagttaacaagaatatcacacctctcttcactcacgttatcgaaaaaagcatcaatgttgttattagcatatatatctgagtatgaaaagatttatccgtcatggtgggaagatgaaattagtagttttgatgtgactgttaaaagtgataaattaatcagtgatttactcaaagaaattattattgaagcaaaaaaagaattgaaaatagatggttga

SEQ ID NO: 282021 - DNA, 282 bp, Morganella morganii
atgtttaatcttgcacatgttaaaggtaacaatacaactggtgtgcatatgctccagcgtaatcgcaaaagtggtggtttttgcattagaaccagtcctgatacgttgaaagcgttcacatctgttgaaataccgcccgcataccgcacccttttcaagggaaaaaatgagctttatgaagctggaccatatgaatccattgaggaaggcgctaaagagttatgtctgtttattgagcggatctacggtattacgtgcatttgggatcctatgagaaaataa

SEQ ID NO: 282022 - DNA, 165 bp, Morganella morganii
atgaagatagacagcaaagccattctgctgacacagacgcagatggacgcattacggaagatccagcaggaagaacacaaccggtcaggactcgggattaagccgactctgcatgaagtcgcccggaaactggtggataaagcactgaagcaggtggaggggtaa

SEQ ID NO: 282023 - DNA, 681 bp, Morganella morganii
atgggaatattcacgttatcgcatttggtggggagccggaagaaaatgaaaaaacagaagaacgcagccgcgcagagtttcgggcatctgaccgccggagctgaaagcgacactacagacaatcagcaggttcagaatgccgccgccctgatggtttcagatgaccagccggaagccccgaagaaacacagccgcgctcacaatgtggcggtatcggaagaagcggcagcgagtccggcactggcggtacatctgctgcgtgagacagacttgtcctcaaagaaaatccgtgcccgtctgcgggatgaaccggaatacctgtcaaagttcaccgtgaagtacatggaagagaatgatccgacctgggaatttctcgacgatgaggaacgcgtcataaaggcattacaggtatcgtcacaacacggtgatatcaacggttatatgaccgcccggcatcaggcagtacaggcactgaaaaagatggaagagccgatgaccgaagatgaagtgcagaaaatgattgagcgcacccgtcaggcaatgaacgcatccaatccggatacacctgacaataccgaagcccggcagaaagccgatgaggaataccagcgcgatatggcgaaagcagcagagaagctgagagccacctacaaagaaaccggcgttactctgcggggctga

SEQ ID NO: 282024 - DNA, 324 bp, Morganella morganii
atggaggccctgcaccccggctgggagctgctggacgatgaggataagaacatgaccgcattccgctacagcacacagaacagcgacagtaacggctatacggcatcactgcgggcagccggtgagaagctggcacagtaccttgagccgatgacagaagcagaggtacaggctttaatccggcacaccacacagcggcacaacgaactacagacaccggagagtgttgcgcagcggatgtatgagtcagagcaggagaagcgcggagcagatgaggaaggtgaacggcagagaagggagtaccggcggcggtacggaccctga

SEQ ID NO: 282025 - DNA, 591 bp, Morganella morganii
atgaatttgatgagcatcagtcagtacgccagacatgccgggatgagccgtcaggcactgtacaactgggaagccaaacagggatttcctgccagagtggacgggaagattaaccaggctgcgtgtgatcagtatctggcccgttaccgtgacagccgtgatccccggataaaaaataataccccttcagttaaagcagcagtaccagctgacggcgtattggtcccgctgagtgtggcggagattaaacagcacattgcggccggtgcggaccgggtagccggaatggatgatcatgaacgggcaacactggcggcaaaggctgccgggctgtatctgagtgagggaccggataatccccctgtcacgtttggcggttaccgcctggctatcgtgaaaacgcctgagtgggaaaccgggcagatagtcgccggtggcgcgttcgggctgtctgcggacgatgtgatctttgaatgcagggattacaccctgaccctgatggacgatgaaacagagagtaccgctctgcgtgacgtggtgccctcactgctgtatgtgctggcagacgataccggactgcctgagaaataa

SEQ ID NO: 282026 - DNA, 1770 bp, Morganella morganii
atggggaataccctgaaactgggcggggacgaaacgctgaccggactgcgttctatcggtgaccagatccgtgatatgtctgactttgcgaaaaacggtacgcaacatatcggggatatggtaccgccgctgaaaatggtcggtgagctggcaaagaaaatagcattaccggcttctctcggcggtatggtgtatgccggatatgagaaaatcaccgaagaaggcaaacgtgccacggagataaagaatcaggctcgggatatgggctcaacgccggaggaggtgacccggctgtcaggtgtattgcaacagcggggcaaatcggaaggtgattcgaaccgcatcattaaagacctgtatgtcagactgtccaatgcggccgttgaagggcaggacaacgagcttaacgctgcctttgccagtctcggggcaccgattgtccggaagaaaaacggagcggtggatgtcgaggccacactgctgggactggaaaagcaactaccccggattgatgagtcccgtaaccatgcggttctggcaaaactggggctggatgaggatttactgcggatcatgcgtaacggtgaactgcgggaatacatgttcaaatccgataaactttacgggcgttcatcaaaagatatcgacaacctgagtaactttgatgacaaacggatagaagccggagcgattatcgacggactgaatactcagttagggaatatgtttgcggcgtattttgtcggtgatccgtatgacatgatggtggagcagcacaaaaaaggcgaagccaaccagaaagccctgtatcacggtaataaaaaagaagatatccggggtatggcgctgcgtgacaaaaaattcatgagcaccctgagtaccggagagctgtgggatatgcagttcggtttcccggatgaggatctggagaaaaagctcaacgaacagtttgagaaaaaatgggaagcagagcgggataaagcgctggggcagtacggactgaatcagaaaattgagggtattggcgcaaaagttccggataactggtcaatgacggacagcaaagatccgaatgtccgcgcctaccgtaacaataaccccggcaacgtccgctgggccagtaatgaagtggggcgggatcgtcccggcgtggatgccaacggcaacaaaaacgggtttgcacagttccgggatgaggcagacggccgggcagcactggcgcgtcagctgcttttatatatggatcgcggcaataacacggtaggaggtattcttcccatcttcgcgccgaagaaagacagaaacaacaccgaggaatatatccggctgctgtcaaagcatatgaacgtgaatccggatacgccgttggatctgtatgaccagaatgtactggctcagatgatgaatggcattatccggcaggaatcagacgcacagccgtacacttatcaggaaatgatggcttctattgacgatgcggtgaacagcccgaggtgggcggggctccggcatccggataaactggaagcacagcgtgagcggtgggccgctgaaaacgcagtcccggatataccggcaataaatcatcccgcacagccggatactcagcaaattgtggatgctttgtccaaagccatccgggaatcgctggccgccgggcaggagagtatccctattgaaattacgtttatcaatccggataccggcgtacgtcagactgtgaacacaaaaccaaaagggcgggtgactacggcaatgaattatccgtga

SEQ ID NO: 282027 - DNA, 1089 bp, Morganella morganii
atgaaaccggcaaaaaaagtggtgattgtaggcagtaaatttggagaggtttatctcaatgcatttatacaacctcaagacaaatggcatcttattggccttttttccaaaggtagcactcgttctcgagaattatctaaagcattcggtattccactttttactcgatttgatcaactacctgaaaaaatagatctagcttgtattgttgtgcgatcagccattgttggtggcgaaggtagccaacttgcgcaagcatttttacaacgggggatctcggttgtacaggaacatcctgtacatcctgatgaaattaccagactacaatcattagcagaaaaaatgcattgccactatatcgttaacagcctctatccacataataaagcaggacgtttatggatagaaaacacacagaagatatatcagcaaatacaacaacgaccagtgtggggacaaattatcacaagcaggcaattaatttattccgccttagatatatattgccaagcaatgaaattacaccctaatgatattacagtcacattagaaaaagataataccccgctacaatttctacgactatccaaccctactggtgatttgcttttatgcctacaaaaacatttgtcatctaacgatcctgatcagcatagcctcgtgatgcatcatatgatattaggctggccagctggttatttaactctcgctggaagttatgggccagtagaatggaataatgcgctttatattcatcatcaccaagatagtaaaaaagccatgtatcaatctcctgccacgatggagcttgatgaaccactgtttcattcatttcatactccaccaaatagttggcaggatgtgatggaatgtgaagcaccagaagctattaattacttactggcagagatagataaatgctggcaattacctaatgataaaaaaccaatgattttacaaccccattaccaattagctttatctcaattatggataaaaacattgcaaacagcaggtaaagccattgatggcacaattgcgccatttaagcgaatgaacttcaccaaaagtagtggacggagaaaataa

SEQ ID NO: 282028 - DNA, 498 bp, Morganella morganii
atgactacttcaaaagaatggaatggactatctcaaacacatatagcattaattaataaacatcaattatgttgcccaataaaattaggagaacttgcaaaagaattaggattaatagtcaagcttgcaacgctacctgctaatatttctggtgaaattaaagaaactaatggattaactacaatacgtataaatcgtcatgatgtaaaaaccagacagcgttacaccttggctcatgagatttctcacttcttgctacacaagcatcttctgcgtgaagggataactgatgatgttttatatcgttccgcccaatcaaataaaatcgaagctgaagctaataggttggcagccgatatcataatgccaatgcatcatattgacacttactttaagttgtactataaaggtcaaaaagattctatcttatatgaagctattgctgaaagtttgaatgtatcggtagttgctttaaaatatagacttggaataaaataa

SEQ ID NO: 282029 - DNA, 1824 bp, Morganella morganii
  misc_feature (1001)..(1010): n is a, c, g, or t
atgccaaaaggagtagggcaaatcattagcgttctggctattttattaatggggggaacttatgttccgattgatgtactacaaccagaagaacgtataaaccgcattgctaaaaatgctcagctttcattactcatcgtatctgatagcgatccatcctattcaatctatgctacattttgtaacaggattgtttggcaaaaagttcaaccctccgagaataaaccactacacaatatagatatatctcctcatcaagcagcttatgttatttatacttcaggttctactggagagcctaaaggtgttgttgtatcccatgccagcgcaatgaatacctgccttgatctcaatcggcgatataacatttcagacaaagatcgggtacttgccatatcagcactacattttgatctgtctgtttatgatattttcggtgttttaaatgccggagggactcttgtattagttaaagaagatgagcgccgtaatcctgatgcatggttacgacttattaaccaacataaaataacactttggaacagcgtacctgcactgtttgatatgttactaacctatgcagaaggaatagggtcatccattccacaatcgctgctattaatctatctctctggagattggattgggcttgatctcccgacacgttactataatttctgccctgatggacaaatagtcgccatgggaggtgccacagaagccgctatttggtctaactattttaatgtcacaacattagacccatcctggagctcgataccttatggatatcctttatccaaccaacgttatcgtattgttaatgctagaggagaagattgccctgattgggtatcaggagaactttggattggtggtgcaggcgttgcgttaggctacctaaacgatcccgaaaaaacagcacaacagtttgtaaaacaaaatggtgaaaattggtataaaacaggtgatatgggaagatatctccctggcggtatacnnnnnnnnnnccaagttaagattggcggataccgtatagaaccaggggaaattgatgctgcattcaataagcttcagggtgtgcaaaatgcgattacactatgccttggtaatggtaataaagaaaaagcattacactcttttgtgatactaaattcgggtaattaccaggatattatcagttcaaatagcaccttttctcccctctactatctgcgctcaaccccaataaatgtacaacaacaatcccaagaaacggcaatcatagctggatttttatatgattatcttactgaacaaaatattgatttcgacaacctcttgtcagaaaaaaaatcagcagatgaccatagcattatcgctagctatcagtcattaatggctaattggctaaatttaatagcacaatatccacaaactacactcaattcccccccaactaatagtacccagcgaacgctaatagaaaatttgcagcgccacaaaaacaatttaacagacatactcaaaggtaaaaaatcagctctaacactatttgatgatccctattggtcaccagaacaagtcactatgcgtattgatggaatgcactactccgaaaatttactacaacaaataagagaacttcatcattcactaaaaaggccaataaaaatcattcaattaggtgctagaagcggtatttcagcaaattatattctgcaacgattacccactaatatggttaccctactgctaactgatgagtctctttcaatggtaacgcaagctaaccaaaatttatcagattatcaaatagtgttagagctgattttttacctttga

SEQ ID NO: 282030 - DNA, 1209 bp, Morganella morganii
atggacgaaaaaaaactcaaagccctcgcggctgaactggccaaaggcctgaaaacggaagatgatctcaatcagctttccatgatgctcaaaaagctcaccgtcgaaaccgcactgaatgccgagctgactgaccatctcggtcatgagaaaaatgcttcaaaatcaggctctaatacccgtaacggatattcctctaaaacgatcctgacggatgacggtgagtttgaactgaccacaccccgtgaccgtgaagggacgtttgaaccacagttaatcaagaaaaatcagacacgtatcacgcgtatggacagccagatcctgtcactgtacgccaaaggcatgacaacccgtgacatcgttgccactttcaaagaaatgtatgatgcggatgtatcacccacgctgatatccaaagtgactgatgcggtcaaagagcaggtgaccgaatggcagaaccggccactggatgcggtctatcctattgtttatatggactgtattgttgtcaaagtccggcaggacggcagtgtgataaacaaagccgttttcctcgcgctgggcgttaacacagaaggccagaaagagcttcttggcatgtggctggcagaaaacgaaggcgcaaagttctggctcagcgtactgaccgagcttaaaaaccgggggcttcaggatatccttatcgcttgtgttgacggtctgaagggcttcccggacgcgataaacagcgtttatccgcagacgcacatccagctgtgcatcatccacatggtgcgtaacagcctgaaatacgtggtgtggaaggactataaagcggtgacagcgggtctgaaaacaatctaccaggctgcaaccgaagacgcagcgctgctggccctggataaattcgctggtatctgggatgaaaaatatccgcaaatcagcaaaagctggcgtgcgcactgggaaaacctgaacacgttcttcggctgtccgcctgatatccgtaaggctatttacacaacaaacgcgatagaatcactgaacagcgtgatccgccaggcgataaaaaaacgcaaagtattcccaaccgacgactcggtacggaaagtgatttacctggcgatcatggacgcctccaaaaaatggagtatgccgatccgaaactggcggctggccatgacacggtttattattgagttcggtgaccgcctgagcgatcacctttaa

SEQ ID NO: 282031 - DNA, 375 bp, Morganella morganii
ttgtttaaaggtattctgttttatttcaccatctgccagacgctccgcctggattttctggtaccgatccagccaggtattaaccgtgatttctttgccttttatttttgccatccgatcattgatcgccattacctgacggctccgctgttcagccagccgcagattagcctcaactgcaattattttggcctcttcctcattgtcaccgagataatggaatttcccggtgacgggatgtttgtaccgccagtacaccttgctggttttcctgctgaaaaacgggtacaggttggggatagtgatattatttttacggggtctggcagccatcagttaaaatcctttgcagtctgggattatcacttttgctga

SEQ ID NO: 282032 - DNA, 480 bp, Morganella morganii
atgttactggctgttgttaccggacagcgcctcggagatatttcagaaatgaagttccgtgatatatgggatgatcatctgcatgttatccagcaaaaaaccggaacacggcttgctatccccctctccctccggtgtcaggcactcaatatcagcctgcgggatgtgattgccggatgccgtgatctgtatgtcagcaaatatttagtccactacacacgaaacacatcacagtcacaacccggcggccaggtaaccgcaaataccctgaccaccaactttaaaaaagccagggataaaaccgatatcgattggggagaaggtacgcctgcaacatttcacgaaatgcggtcattgtctgagcgtttataccgggaacagggaattaatacccaaaacctactgggccataaaaaccagcagcaaactgataaatatcatgatgaccgcggcaaaggttggataaaagtgttgatataa

SEQ ID NO: 282033 - DNA, 522 bp, Morganella morganii
atgaaagatcaaggagaaaaaattttcatttcacctgacattaatagttttgccgaatggtatcgttctactcttccaagtgaattgagtcagaaaaattatattcgctttatatgggaattacttgatgcagcacaacaacaagaaattcttacccagttccatgatgtcttactggaagttcaagtcagtagacctaacagaatccaactcatctatgactttggtgatgtaattaattttatcgaaccagggcatggaacatcacggcgaggcattggagctttatttgccttagctgaaaatgacgccacattacgtatttggctggatcaacaaaactactcattcagtaactggcctagtacggaacttcagacaaccacaaaatatataattgaacatcacgaactatttcccagaatttgtaaatcatctaaatatatagaaaatagaatgcaagaattaaaaacaaagcaatcctctgaacctacaggagaaatttctgattctgatgattga

SEQ ID NO: 282034 - DNA, 150 bp, Morganella morganii
atgattgaaaaaacgagtataggagatccatatggaattacttctgcaagccgcgcaacagccgtaagaattaatattcatatatatcagcaattacactatatggataaattaaatttgatagataccgaagaagattgggttgattaa

SEQ ID NO: 282035 - DNA, 186 bp, Morganella morganii; identical to SEQ ID NO: 103826

SEQ ID NO: 282036 - DNA, 942 bp, Morganella morganii
atgttccggaatgtggctgggcagaaacaggattttgaacaatatcaccagatcggtgtggaagcattcggctacgataatattgatatcgagctggaacatattttaatgcagtatgattttttcagttcattacaccttacgccgtacattgaattaaaaataaataccgccggcagcgaagaagaattcagccggtttcgtcaggcactgagagagtattatcagccgtttctgccattctttgaggagccgtggctggttaaactgaaagagaaaccggagcagttattatccacaccgcacaagctgctggatatcgttaataaaaaagcgccccggctcagtgagtttctctctgaggcttccgccgcccgcttccgtcagttgctcgaatccctcaaccgcctgaaaattccgtacagtgtgacgccgggactgtatccggtgaataattactgtcacaccctgtttgaatggcgcaccacgcatcctgacagccacgatgagctgttatgccgcggcggccgttatgatgccagtgcgtcgcatctgctggataaacaggtggcggtcagcggttttgcgtttatgctcgacccgattattttcctgatccgcaaatgtcacaagcaactgctgcgtcagaatgcgaccgatgtggtgctgatcccggaaaacacccgtgccgccgggcatgcgctgatggtcggccgccgtctgcggatactgttcccgcatttcaccattaaaaatgactgctcggggatgcggatcagtacctgccgcaagaatgcggagcgcaacggcagccgttttatcattgtggtgccgtcagaggatgacaaagcgctggagctgactgataaagacaacggaatgattcagtttgtgaatgagaatgccatgatcggtgtgctgggacacagcgtaaactgctga

SEQ ID NO: 282037 - DNA, 369 bp, Morganella morganii
atgaacaaatatagtgacaaatcagactttgagatcaataaggccgtggctattgcgagcggccataaagttatgtcgtgcgaagaatcagtcatggcatacattgatagcgggtataagccattcgacccctgcaacaacccggcagatgcatggtctattattttaaaaaacagaatcagcattatcattccagggaatgaatatagtgatggttacagcactccatttgctgcaagcggatttgatgatgtttctcatataaccagaaatacatattatacggatgaggaatcattcaatcaaaacccattacgtgccgctatggaagtatttctgatgatgaaggatgcggagaatgaaagctga

SEQ ID NO: 282038 - DNA, 366 bp, Morganella morganii
atgagacaaattaaaataagctctggtgcgtggcaaaaagatttagagatggtcgtcactgttatcgatgaggataaatttaaaactcagtgtgagcaagttaataaattttattgtgatgcagagtatagagctaagaaacatggaagccatgaaaaggcgggtttcgccatgttctgtgctgagtgttttcagcaaatagcattcaataattttaaagatgaagaatggctgaccgagcaattcgactggtctaaagataaaggaattgaaggttatccttcgttagacgatatgggtattcgaattgatgaaattgagtcatggtttattgattatgacgaaattcaaattacaggatggtaa

SEQ ID NO: 282039 - DNA, 273 bp, Morganella morganii
atgtcgcgaccaatcgacttaatagcagatatcacggatgagtatatcgctatgcactttgaagggactaacttcggacacacaaattaccgcgatatcgtaggagaaggatgtttaaaggtaatggctggatatcacaacggatacacggcgcagtgcatattgataaatatggggctgaccacagagaaattacggctgactaagcgtggccgagaatttctgttctggcattttaactatcagccggttaatggccgaaagattgattag

SEQ ID NO: 282040 - DNA, 258 bp, Morganella morganii
atgtctaaattaacgaaagaagaaattaagtgggtcgcaggggtgcaggcggcattaaataaatatcccggcgaacgacttgggttttataccactggcgacagtaatattttcattttcgactcaacaaaatacgacaaaatatgccattacatggatgctaacagctgcgatttagcggaagcatctgaagcaatggatgcggacttaggagaggtgctgacttttcctgacttcgttcatagtgccgcaggttga

SEQ ID NO: 282041 - DNA, 192 bp, Morganella morganii
atgaaattcacagaatcagaaacaaacccaatgggtaacaagattcaatcaataaccatcggtgatatcactatttcacaattcggagacggccaattgtggcttgaggattccgttgctgatgactctggggcatttccggaaaaagacatcgccgatgttctcaagaagttttacgaaagcaacttttaa

SEQ ID NO: 282042 - DNA, 375 bp, Morganella morganii
atgaaagcaatatcaatcagacagccgtgggcgtggctgatcgtcaacgggcataaagacattgaaaaccgcagttggcgcacgaagtatcgcggccaggttcttgtccatgcatcacagggcgtaaaacgtagtgactatgacgctgcatattcccttgcttgccgcctcggaattaagttgccgtaccgttcagagtttgaaaccggcggaattgtcggggtaacgaccatcaccgactgcgtggagcaaagtgaatcgccgtggttctttggcgagaaaggtttcgtcctggcagatagccgaccgttaccgtttgtgcagatgaaagggcggttaagcttttttgaaacaggaatagagccggaggaatag

SEQ ID NO: 282043 - DNA, 198 bp, Morganella morganii
atgaaagaacctcacatacaccagcgtatcaccaatgacgaagccgataacctctgcactcactaccggcgcaagggatataacccggtgaagtcactgaatatcaatcctcagtatttcgacgttaccgtgtatctgccggtagtcaaatatctgaaaccgacaccacgagcaatggttaacaggatgtggcgatga

SEQ ID NO: 282044 - DNA, 294 bp, Morganella morganii
gtgaagaccaagcaaaccaaaatggagttaatccattacgaaaaaggcaaagataaaaagtcaaaaaagtacatggtgagtcatgacaacggaaaaacaaagctggagcaggagctgactgttacctgtgatttgttttttagccgcggcttcaaggttgaaatagccatggatgatttccctcgtttcgataatgaaactgaggcggtgctgaagtatgccgattggcttgagcgactcggaattgcattgcgccgtgaagcgaaaaaggcaattaagcgaggcataccatga

SEQ ID NO: 282045 - DNA, 147 bp, Morganella morganii
atgacatgtgcactatgcagtaaagaactggctgacgatgaagtttacgtgtgcgaccagtgcgccagcgaatgcccgcatctggaagtggccgagaagataaaaggagatagtgatgatcaaacgcatcctgggatatctgagtaa

SEQ ID NO: 282046 - DNA, 201 bp, Morganella morganii; identical to SEQ ID NO: 281771

SEQ ID NO: 282047 - DNA, 837 bp, Morganella morganii
atgagactcgcagatttaccaaaatacttttcaccgaagagtcctatgtttagcgactctccagccgctacagctactgattcactttcaattaccgatgtcatggcctcgcttggtttggcgaccgcaaaagcgtggatgggtattgaattgtttttggcgaaacacggaatcaatcagccggatgaagcggtggagagcctctatcaatatgcattaactcaggcgcataaatacagcgttatccaaaagcttgatgaggatgttagaacatcagttctgcaaatactcgcaaattatgcatttcaggattacgccaggagcgcggccagcaaaaagccatgccctgattgtgatggcggattcatcgaagcagaggtgttcactacaaaatcatccattaactttatggcaaaagaagatatggagtttgacaggggtgccggtctcaaggttattcctgcaaaatatgctagctttcgcagtgttcgcgagataaccaaggtagcctgcccgacctgtaagggtaaggcagttatcagccattcgtgccggtgcaacggccgtggtgaagtgctggataaaactgaaagtgaaaaacaaggtgtgccggtatataaaacgtgtccgaagtgttcagggcgcgggtattcaagactgaaattcaccgatgtgcttgagcaaataaacaaggtggtagcaatcccgaaaacatcaggctatgacaacatcaagccgatatttgaacatttagttgaagaatgcttcagggaggagtcgcaagctgaaaaaatacttcataaagtgacaagtggagattcgatttctattaattag

SEQ ID NO: 282048 - DNA, 198 bp, Morganella morganii
atgactgaaaaatacgaagtcacagcaaccaaaaaggacggcacgacatatcacggattgatgacaacgaaggaaccgcgcattactaacggactgattggcattgctggtctggacggctcatggacatatatcgcaccggatgaaataagcgacatcagatacattccggtgattgaggaaaagagtaaggaataa

SEQ ID NO: 282049 - DNA, 510 bp, Morganella morganii
atggcactcacagataaacaggaaatgttttgtcgtgagtacctcgtagatttgaacgctacacaggcggctattcgtgcggggtacagtgataaaaccgctaacagaatagccgctcagttattgtcaaaacttgacattggaaagcgcattcaggagctgaaatcagagcgcggtgagcgccttgaggtagatgcagattacgtactgaaacgcttagttgaaatagaccagatggacgttgcggacattctcctttctaacggcgagataaagccgattaaggactggcccaaagtgtggcgcataacactgtccggtatcgacgtaacggaaatcgcgggtgatactgccgggttgctgaagaaaataaaatggcccgacaaggtgaagaatcttgaattgctcggtaagcacatatctgtccaggcattccgtgagcaggttaaaaacgagcatgatgttgtcggcactctctctgacctgatggacgaactatcgagcaaataa

SEQ ID NO: 282050 - DNA, 267 bp, Morganella morganii
atgaatatctcagttacatcacaaaatgtacacaagcataagaaaaacatcaggcgagatgacctcgatggacttacttgttttatgcaaatggctgatagtgttcgcatcactgcatctttagagcatcaaccaatagtgacaggggttcttggtgagcctgacagcaaagaacaccatcaacttacatcatactggcgatgggaaaatgtcagcgctgtaaggttggttgatgtgctgtacgcaattgctacatttaataattga

SEQ ID NO: 282051 - DNA, 222 bp, Morganella morganii
atgaattccgcttggaaaatacaaaactcagatgaaattgttatctcaacatataaccctgctgaatacagcacagctgtcagttatcaagcggtgaaaaatcatgtcggcggtgaaaaatatgaaatcgtcatacaaacagggtgtgccaatatgtttggctgtgttcctgatgaaaacgtccaagtggcaactctaaaagattacatcaaagcaaattag

SEQ ID NO: 282052 - DNA, 366 bp, Morganella morganii
atgaaacgactgcaaaatgagctgagtgccctcgtcaaccgggggctggatcgtcatcttcgtcttgccgttaccggactgagccgcagcggcaagaccgcgtttattacctcgtttgttaatcagctgatgaatgtacagagcggtgcgcgtctgccgctgttttcggctgcccgtgacggccgcattctcggcgtgaaacgcatcccgcagcgggatctgggcgtcccacgctttgcctatgatgaaggacttgcctcactgtacggcacaccgccggactggccggtaccgacacgcggtgtcagcgaaatccgcctgaaactgcgttaccgccactcaggacagtctgctgcgccactttaa

SEQ ID NO: 282053 - DNA, 861 bp, Morganella morganii
gtggttgtggttcagggtgctatcgttgacggtcccgatgccccgggcatggccggcagtgatactatcgccgcacaactccgcgaagcccgtctggatccggaagtgaaagcgctggtactgcgggtgaacagcccgggcggcagtgtgacggcatcggagcagatccgtgcggaagtcgcggcactgaaacagagcggcaaggccgtggtggtttccatgggcggcgtggcagcttccggcggttactgggtctcaacaccggcaaactacattgttgcctcaccgagcaccattaccggctccatcggtattttcggcgtagtcaccacgtttgaggactcgctgagcgaaatcggcgtgcacactgacggcgtgtccacctcgccgctggccgatgccaccgtaaccaaagcactgacaccggaattctcagagctgatgcagctctatattgaaagcggctacagcaattttattaatctcgttgccaaatcccgtcacaagacgccggaggaagtggataaaattgcgcagggtcgtgtttgggtcggttcagatgccaaagctaacggtctggtcgacaaactcggtgattttgatgacgcggttgccaaagccgcagagctggcctctgttgagcatccggtactgaactggatgcagccggaaatgacattcattgacagactgcttgcggaaacggccggtaatgtgaaggtgacactgccgtcatcattgcagggactgatcccggcaccggtcggcgcacagctgacacaacaggcatcctttatgaaaatgctgacggatccgcagtaccgttatgcattctgcttaaattgcaccaatattcagtaa

SEQ ID NO: 282054 - DNA, 1191 bp, Morganella morganii
atgccgcgttctgtttactggctctctgccgccttagccttatttaccaccgggaatgccctggtgctttccgttgccgttcttatcgggtcacaactggcggaagatccggcacatgccacgatcccgctgctggcacaatatatcggcctgatttccgcctcagtgccgatggctcactttatgatgcgtttcggccgccgcgccgggtttattctcggtaatatcggcgggctggccggtgcattactggcaatcgccggtatttatacacacaacatgctgctgttttccgccggaacgttctttaccggtattgccatcggtaccgcccagcaataccgctttgccgcactggaggaagcccctgccgcactgcgggcaaaagctatcggcgtggtgatgagcggcgggattatcgccgtgctgatcggtccgtcactggcgatgtccacccggacactggtggcggcttatccgttcctcggcacgttcggcgcgctgacggctatttatctgatggcttttgttctgctgacatttttaccgctgaaagctcagcttcccgctcagatcagcgataccgcaaaaaaccgcccataccgtcagttatattcccagccgctgctgattctgatcgccgtggtcagtgccgccgggtatgcgctggtagtgtatatggtcggtgctttcccgctggcgatgaaagcgcagggatttgaattcccggcaattgcctttgtgtttcagtgtcatatactgggaatgtttgcgccctctttctttaccgggcagttaatcagccgggtcggggtaaaatgctttgtctggctgggagtgatttgcctgttaatcagcaatgcagtcagtctgaccagcagcagttacgcgcattttctcattgccatgacctcgctggggctggcgtggaactttattctgatcagcaccacgcatctgttgccgcgcacttataccggcaatgaacgggctaaaatccagggtgcgaccgattttcttatcttcagtttcggggcgctcggcagtctgctggccgggttcgccttctgttatgcgggctggtattccgtaaatgtcgccggattggcaaccggcattgtgattctggtagtgatgtttttactgcgccacagtatgaatgaatccccggcagaaaaggccgccgcctga

SEQ ID NO: 282055 - DNA, 741 bp, Morganella morganii
gtgagtactgttgatattaatgacctgaattataacgggatactgaaagacattaatctgtcattttccggcaaaagagtgatcggtattgtcgggcctaacggctccggtaaaacgactttattacggcatatttaccgggatatcaaaacccggggcaccgttttctttgataacacggatgtggctcagttttctgtcaaatcactcgcccgcaatatctcggtactgacgcagtttaatgaccaggtggaaggcaaactgaccattgaggaaattgtggtgatggggcggatgccgtacaaaaaacattacgtggattacagcgaccgggatttcgtgattgcagacaactacatggcattgtttggtctgcagaaaatgaaaaataaagagtatcacgcactgtccggtggtgagaaacagcgggtgatgctggcgaaatgtttttcccaggaaaccgatattatgatcctggatgagccgaccaaccacctggatatccgctataaagtggaagtaatgaaagcgctggccgcatcagaatccaccgtaattatgaccattcacgatattaatttatccgcaaaatactgtcagcatctgatcctgatgaatgacgggcaaatttatgcgcagggcacaccggcggaagtattaacccgggagtgcctgtttgatgtatttggtgtggaatttacggtattaccggtcgaagaccgtgtcgctatatttttataa

SEQ ID NO: 282056 - DNA, 348 bp, Morganella morganii
atgaaaaaattattattaggtactctggttatctccgcattattttccgtgacagccactgcggaaaataaaacagcacaggcttatgtcccggttgagttcagtgcaaagctggatggcaacgaatatcactttaaaccggaaacatcaccgcagcgtattgtctctctcagtcagatcaccaccgaaatgctgctggcgctggacttgggggaccgtatggtcggtaccgcttttctggaagagccgatttcgccaccggctgggcaaactcattctcaaaactggcactggaagccaataaaattgtgccggaaggggttgccgtttatgtgccggaatccatga

SEQ ID NO: 282057 - DNA, 1221 bp, Morganella morganii
atgtcagacagtcattgtttatcactttcattgccgccagcccgccggggatggttttccgttgttgcgctgactctcgcaacctttgctgtggtgactacggaaatgctgccggtcgggttactgacaccggttgcggcagagttccgggtgccacaggcgtatgtcagcctgatgctaaccataccagccctggtcgctgcactctgttcccctctgattattctgttcaccggccgcctgaaccgccgttatttactgatgatactgatgctgttattaatggtggccaatatctgtgcggcaacagccacccacttctctgttctggtcgcggccaggattattgtcgggctgagtatcggcgggatctgggcaatcgccggcggaatagctgtcaggctggtcgattcccggcatgtggcgcttgccacctctctgatatttgccggtgttgccgctgcatccgtactgggaattcccgccggggtgatcctcggtgaatgggtcggctggcgtggcgtgtttggtatcatgagcctgttttccctggcagtgttgctgctgatgctgaatcttccctctctgccgccggttcaggcaccggttgtccgtgattttctgacccaactccgccgcccggttatccggacaggcttgctgatcacattactgctggtgactgcccactttatggcatttacctttgtccgcccgcttctgcaacaggatcctcagttgcaggcacatgaactcagcgggttactggcgctgtatggcattgcaggtattgccggtaatttcgtgctggggttattgtccggtcgtcatctgttccgtgccgtattctgtgtcaccggcggtattgccctgagcctggctgggttactcctgttgcctgccgttcctgtatcacacaccatcattctcacgctctggggaatgacatacggcggcgtatctgtgacgctgatgaactggatgatccgctacagcgcacaagcgattgaaataaccgggtcactttatatcgcctttttcaacaccggtattgctgccggctctgctgccggtggcatgatggtgtctgcgttctccttacagggaaatgtcattgcagcactcatctgtgctgcaatagtgctgatattgatttgcgattttgttatccgcttataccggccgggacgtcaccggcaggccaatctcgatcaggtttaa

SEQ ID NO: 282058 - DNA, 948 bp, Morganella morganii
gtggcagataaaaatggtttactgctggataacttattcgatgtgctggtttttgtacgggtcagtgaaaccggtaatttcacatcagcagctgaaaaactacagatttcacgttccgctgccggaaaatgccttcagcgcctggaaaaccgtgtcagtacccgcctgcttcaccggaccacacggcggttgcgtctcacagaagagggcgaatgtttttatctgcatgccaaacggatattatccgaggtggatgatgcggaaaatgcattatatgaaggcagacaaaaaccttccggcacattgcgggtcgctgttcctgtggtttttggccgcaattatgtgatgccggtgatacaacagtatgccgcacaatggcccgatgttgatattgatgtcagtttttctgatgattactgtgatctgattcaggaaggtattgatgtggccgtgcgtatcggcggtaatgatgatagccgcctggtgcgtaaagttctggcgccgcatcgcctggtgacctgtgcgtcaccgggttatctggaacggcacggtatacctgaaacaccggaacagttagcagcacatgagtgtcttatcttccgccaccggggacgaaatgttccctggcagtttatgcgggataaaaacgttcagttgcatccggtcagcggccggttcagtctgggagataccggcgcggttcttgatgctgcactggctgatggcggaatttgccagttgggtgcttttctggccgggcctgagatagcgaaaggggcattgcagccggtactgactgcatttacaccgcccggagaacccgtgtgtgcggtatatccgtcaaaacaatttctggcgccgaaagtccgcgagtttctcaatacactggaaacacaatggcaggggaaagccatatgggaatccccgttaatcaatcataaggaataa

SEQ ID NO: 282059 - DNA, 492 bp, Morganella morganii
atgaatacgagtgaattaataatcccactatcaactatattaagcggtgtgttagtttttttaggaatatatgtactctctcctttagctataatattaagagattttttaatcctttacattttaaagaagtttataataaatcaaagttattatatgaaagtggatgcattgagtttagataaagcaaatcttgacttaatatataataaaagctcatcatattataatgatagatatgaaattgatttcaaagaagtaagtgaattggaatataaaaaatatatagatcaatataattttcataaaagaagattctctagcatccataatgaattgatatttaaacttaatttattaggaaggatttgcaaatactttaaacttgaagacttccaagatagtataaataaagatatagataaaaattacgatatccatttagagcgtttaaaaaaagacttattctggaaagaaaaagataaagaataa

SEQ ID NO: 282060 - DNA, 720 bp, Morganella morganii
atgtattcgatcatagcaatgctggctatttttctatcattttttgtaatttcgtttgcgtgtcaaaaagcaaatttattgccacatatcacgccagagtcgtcagaaaaaagatacctatttatcgatgggttgcgcggaatagccgcggttagcgtcgtagtaggccatatctggagggtcggtgtaaaaggtgtcgacctgaacggatattacatatcagagtgggctgattatgttgccgcctttggcgtccaagtgtttttttgtatcactggttttttattttttgaccaagttatcagaagaaaggcaacatttgattgggagaaattctatatagctcgtattaagagacttgccccactgttctttttaaccatgacagtgtgtatatttctaattattttgtcaaaattcagagagttatcatcattcacgtttggtgatatgtacagcgcaatgagtctgtatctttttggttttggaggacaagttgaaatacttggacaagactcaggattactaacagcagtaacatggaccttgccttttgaatggagattctatttattgttacccattgcttgtatagcaataaaaactaataaaatatctactaacatttgttgtttcaatggctgtactaagttttatcatagatgctatgaacatatggccttactttttgatcggagcggcttcagcatacgcatttaa

SEQ ID NO: 282061 - DNA, 252 bp, Morganella morganii
atgaaacagaaatatgtgtatcaatcgcctgaaaactatgcagaaaaagtaaatgacaatgacggaattaagcagctttccatcacatctatgctcgaggagttactgcgagaaatggatcaggatggtcatgatgtatctggaccaatgacggaactggtggcgctgaaaaactatgttacacacacggagaagcagaaagataccgtgcggaccgggctggagtttgcgctgtccgcactgaagaagtga

SEQ ID NO: 282062 - DNA, 1053 bp, Morganella morganii
gtgagcaacaatacaaatgagtctgatattgaaaaagaaataaatgataatatcaaagataatctgtcttcatttatgaaaagtacggcaaaaaacttaacttcatttattccatatggagataagattgttcagctttattctgattttaataaatattcagataataatgaaatgcagcgtcttctgaggtttttctatgggataaatcatgaagataatccaaatatgctcatagctttagggcctgagtatgcagaaatgctaatgaatttcgtcatgaaagatatggaaaatgataaaattgattattatgctaactttataataagcattagtggtaaggattattcagtttcagataagaaaaactatctctatattttaaataagatgactctttcatcgattcagcttatgaggtattactatatatcaaaaatgtatgacttatccggatataaaaatagagaatcgtttgagaacgccatagttaaaaaggtagctgggtttttctctatgaactacagtatattaatgaattatggattaattgaacagccaacgacattctattctggaagtgtagttaatgaatctcttatacaactgtctgagcttatttttgataaatccacacttactccggaatatataaacgaaaaagaaaaagatagatatgatgttgtgataatcaaaagcacctatagtggttgctattatcctgagattttagttgatcaactatctaataaaggtgttagtgtttgcgtggttgatgaaagccaatttgaaaaacatgagattttttctagcgtatatgtatcaacgagagagtcgaataaaaaagaaatagggaaagagtatattgatttggttattgaaggtgagggtaaattaagaagtgtgcctatggacttaaaggatgaaaatatacattctattaataaggactatatgtcaagagctgggttttctccaatatgcaaaataagattaactgaatcattaaatgaaatatcaaaaaaaataataacaatgcttgatgaatag

SEQ ID NO: 282063 - DNA, 786 bp, Morganella morganii
atgcttgaatgcctggctttagaaaataattgtatcaaggatgcgtggaactggacatatgaaaattggagttggggcttttttatagccgttctttcactatggtttacggctaaggccctaaaaaaaacagataaagccaataagttggctgaagtatctttagggctaacaaggacgtcaactaagattgccgaggaatcattacaagccgctaaacaatctatagacacgtctgtagaattgtatgaaaagcaaaaaaatgatgatgagaaatctcggcaatttataaatgggaagaaattatccgctaagaaaaaaatcattgaaaatgaaattattgattgctatatgaaatatatggggttttataatatttgccaggcaattaaaagccgaagtaattttgatataacactgggatgttttgctaaatcaatagttattgctattgataatgagcgaaatgatggagtaagaagtctgatttatttacctaaccttgatttttctaatgagtttcttgatgaattatattttttagatgaaccattggctgaaaaaatatcctcattaaaaggtcatgtatttcgttgctctaatttaataaatcatattgtaggatgtattgagcagtttgaagatgactatgaattccttaagaggtttgttaaaaaatttgaatatgagattgatgcctttaagtatgaattagagaaagtatataagttatgttctcccgatgaggtttcattagaagataaacacaagttatacactatgtga

SEQ ID NO: 282064 - DNA, 345 bp, Morganella morganii
atgacagctaaaaccccagcagaacgcaaagcagcacagcgtaaacgccagcgtagcgctggcatggtgattctgcagtggcagattgaggccgaagagcatgagatgatcaaacgtaactgtgcactgcgccgtccaggccgtgagccatacgacgaggccgagtatattcagatgctgatacgcaacgatgatgcgcggcttaagcgtgagattgcggagctgtcacagcgctgctgtggtaagtgtggtgaggcactgccggtcgctgagtgttgtctgtcaggtgatgccgaatgctggaacaccagagggtggcatgagataaaattgaaggtagaataa

SEQ ID NO: 282065 - DNA, 564 bp, Morganella morganii
gtggcacaggggttgtcaactactgctgccggggctggtctgattgcttcagcggttgcattggcgatcagtccgctgtcattcctggcagtcgctgacaaatttaaacgtgcgcgtcaaattgaagagtattctcagcgttttaaaaaatttggttatgaaggtgatagcttacttgcttctttccataaagaaaccggcgctattgatgcatcattaaccaccatcagtacggtgttaagttctgtatcggcaggtgttggtgcagctgcaactgcatcacttgtgggtgcaccgataagtgcgttggtaggtgctattacgggtattatttccggtatactggaagcctcaaaacaggcaatgtttgaacatgttgctaataaaatggctaataccattgctgaatgggaaaaaaaacatggtaaaaactattttgaaaatgggtatgacgcccgccactctgcatttttagaagataactttaagttattatctaaatataacgaggaatattctgttgaacgggccagttcaccaattaattcatcccagtgttgctga

SEQ ID NO: 282066 - DNA, 342 bp, Morganella morganii
atgacatcagcagaaattgaatgggccgattttgaaaaagtggaattgcgtgtcggtgtggtactgaccgcagagcttaatccgaaagcccgcaaacccgcctatatctttactgtggattttggagagtgcggggtgaaaacctccagcgcacaggttaccgcattatacaaaccggaagaattaaccgggcgtcaggtattatgtgtgtgtaattttgccccgaaacgggtggccggagtgaaatcagaagtgctgataaccggcgctgctaatgcggacggagatatcgttcttgcggagttttccctgccggtacctgccggtcaccgcctgatgtaa

SEQ ID NO: 282067 - DNA, 720 bp, Morganella morganii
atgaaacgacctgttatctcattacgtagctaccggcaggaaaccctggagcacagtcatgatgacatgtggcaactggtgctgggcggcagcggcgcaatggaactgactgtcggcagcgacagcggttcggtggagcagggacggatggcggcgatcccgccggggtatcaccaccgtttctgcggcaccggtcataaccgccaggtggtacttgaactgcctgcggacagcctcttcttcacttcccctgattctctgtggtctgtgctgccggatgccacccgtacttatgtggactggcttatcagttatccgcagatgattgaacagcatccggaaagtgcgcgtatcctgctggcagagcagcttgcggcgcaactgcagccggacgggcaggacaggcgctggctgcatactctgacacaacagctgaccgcgcgtcctgattacccgtggacggtcagtgaaatggcgtcgtgctgtgcactatcggccagtactcttcagcgccgcctgctggcggccaccggtaaaaccccggcggtttttctgactgaaatacgtctgcgccgggcacatcatcttatctgccataccccgctgacactgccggaaattgccctgcgctgcggttacagtacccaatcttccctgaccagtgctttccgccgcttttacggcgatacaccggccagtctgcgcataaaaaaagggtga

SEQ ID NO: 282068 - DNA, 555 bp, Morganella morganii
atgtgtattcagattgcggcaggttcggtcagcccggttatcaccctgtatatccgtgagctgggcggacatactgaaaacctggcgtttatcagcgggttaattgcctctgtgccggggctggccgcgctgatcagcgccccgcgcctcggaaaactgagtgaccggatagggccggataaggtactgatcgccatgctggcagtgtctgtgtttgttattctgccgatggcctgggtcacccattactggcagctgggtgccctgcgttttctgctcggcgccgtcaatgccgctctgctgcccgccgtccagaccctgattatttatcatatcacccatgaaattgccggacggattttcagctataaccaggcactgcgcgacgccggtaatgttacaggaccgttaatgggcgcctgggtggctgcgcatttcggcttcgcatctgtcttttatttcaccgctgcggttgtactgtttaatctgttttattcgtggtggtgcataaaatcgcagagcgccccgaaaattaaaccggccgatatcgggtag

SEQ ID NO: 282069 - DNA, 666 bp, Morganella morganii
gtgaaaatttttactaaaaataaaatgaaatttatttttgttttaatttttattattttaatgattatttactgtttttattttacagtatctgacgatacattttttaaatttttttcagatagtcttttgcctgaatttataggtgtatgtcttgagtttattgttatattgttttttattgactatatgcaaaaaaaagaggacaggaatagaaaaatcatatccgaaaaaaggttaagagagattttaatattttttttaagacatgttgatacgtatctaccagagaatattaagataagtgctaaatatcccagagttaatgataaagatgagtttttgtatggagtgcattataaaagaaatcaatgctacctgagcatattaattaacttctttaaagaaaacgaattatccaaaaatgatgagaataagataagaagtttttgtcaaagagaaattgcaactgtaagatgtttaactcctgtcgttgctactcttgatgatcaaaattttaagtcatgggttaggattatgttttatatggatgctatcattgctaatgaatatccagtagaagaatgtatgactaaaattattagtcatatgatgaagtttgaaaaagcatcatttgataacggctggcttattaaaggtgattaa

SEQ ID NO: 282070 - DNA, 807 bp, Morganella morganii
atgaaagagacgaaaaacacagaaagggacgctgcgtccgttttcttgagtaacaataggacgcaagaggcagaattgagtctgagattaaataacccgtgggttagtgcccaagaggttgctggattacctgatgtaccaacgacgtccagacgatcacgcgacctgttggaaaaggcaacggcagataagccattgttaaaaagaaagagaaaagggacgaaagcgacagaataccatgccgctgcattgcctattgctgcgatacgtgaactgttgcggctacagggtacagctaacgaaaaacaaagtgtcaacgataatcaggcatgcaaagctgatccatacagtggttacacattcgagcactttttagatgagtttgcattaatccctggttaccgggttcaggtttccgcaggcaacggctcaatcagtgaagatgacataggaacattaccttgccgacatctggccttccgccgtaagtggttacgatatagagggtttaaagaaagtgaattggtagttgtatgggctaaaggcgattcaatggagcctactataagtaataacaacactctgttaataaacaccgctcgtaccagaccaactgacggaaacatttatgttatcaggcaggaagatatgctgtgggttaagcgcgttcaaatattgctggatggctcatggttactgattagtgataacgatgcataccaacccctacagatcaaaccggatgcgatgcataatttccaagttataggtcaggttgtgaacattgcaaaggatgttggtgactga

SEQ ID NO: 282071 - DNA, 447 bp, Morganella morganii
atgaatgcaatatgtgatatcgcactgaaatggcagataaataacgccgacattgctgttgagaatgccgatatcgtgctggataactccgtgggtacgctggtgattatttccctgtttactgaccgccgggcgctggattctgatgtgctgcctgacggcggcactgaccggcgcggatggtggggggattcttatcagcaaaaccccatcggcagccggttatggctgctttcgcgggaaaaacagatgtcatctgttcttcgccgtgcaaagttctacgcggaggaagcccttgcgtggatgacggaagacggacatatccgcagtgcggcggtttcggccacgtccccggcggacggttttttattactgaatgttcagcttaccctgcctgacggcagcgtgttaccgctggagttcaaaacctttttaagcgggatttaa

SEQ ID NO: 282072 - DNA, 882 bp, Morganella morganii
atgttcggactcgacaataaatccggcattaacgtaatgccgccaatcgccccggccgacagtcagaccccgctgtggttcactgaaggtggtgccggactgtccgcaacctatccgggacaggactggtttaatcagattcaggctgaattacttaacatcctgaaagcggcggatattacgccccaaaaaggcacactgaatcagctggcctcagcgatttccaagcttgccagtgcttatgcgctttcggttgttcaggctacaggccagtctctgacgagcgtaatgagccagaaagcggttactgatggactaagcaaaaagttcgataatactggcgggaaaattaccggccagacagacatagagtcatctggcgggcgtgttcagacactgaaagcaaaagctggtacatctgtataccaggaactgtaccttcaggataccttcgctgcatggtggggaattaccttaggtaacaagttaagcctggaaaacagaatcacaggtaattcgctgactatcggcactgatggttttaagattgacgggaaggatattgcggctactgagcagcttttcggaattggtcagcgttatgttaatgtgacagcattgcggcagaataaagcgacatatacaaatccgggacctaaaccgattattgtttatattgagtcaaacagaaccgggaaagataagccattcagcattgatattacagttaatggcgagcgggtagcgtatcggtggacgaactcagatgaggttattgctttatcagcattggttccgcccggggccacatacagagtcaacggtggctgggcggcggatgtagaatgggtcgttattaatagatgggtggaattatcatga

SEQ ID NO: 282073 - DNA, 357 bp, Morganella morganii
atgaatatgaactattacaaagatgaaaataatcaggtatgggcctatgatgatgaacaggttgcaggcggatgggtgaaagatgggctgattaaaatcaccgaacaggaggctgatgaactgcgtaaccctcctccaaccaaagagcaacatattgagatggctaaccttaaaaagcagggtttaatgcttgaggtttgtgataaaaacagactgttgttagctaaacaggcaatgaaccgaatcaaaccaagcgagaaagagtatctggaacgctggtttgattatcttgatgaattggaagtggtagatacatcaaaggcgccggatattgaatggccttcaaaaccagtttaa

SEQ ID NO: 282074 - DNA, 1086 bp, Morganella morganii
atggattttaatttacggcactgtgtcattcatgaattagtgaaagaaagtggtaagcaaaaagttgagaccgatcttaaaccagttctcccaagtgacgatgaacacgtatgtcaattggtagagtctttgactgatcttataggtaaaaaagataatcaagccgcgcgaggaactttcgattccaaggatataaagttcaaagtacctactgcatttaaggcgtattacgatagcactcttacaccaaaagactttcatgaattctcattaatttgtatgagtgagttgtctcgtcaagctaaagaaccaactaggattgccgcttctggtggagccatagtctttgcccactatactcacggacagtcagatttccttctgattactatggttaagcagaaggatgcacttcgtttggatgaaaatctaaaaccagtgggaacagtccaaattgacttatcaaaaattaatcaggctgcacgtattaattttaaaaagttttaccagtttgaagtacttcccgatgatgaaaagccgacttacttggcatttgtaagcccaaagataaatcaggatgcatctgggtattttgttgcggctctggggtgttcagatagtgttccctcagcaaaagctacagagtcagttcttaatggtgtaagaagttactttgatgcaaacgtagatattaaggcgtacaagaacgttgcttatgatgctgtcctgtatcatctaaaagagaaaaaaccaggagaaacggcttctttagcagagattgaacatattgtaagacaagcagtgccagcaaataaacatgctcacatagataatttagtcgagtatctaaatggcgaagaaatgggggttccattagagtttgctatcaacaaggccgtagtaaatagaagaactaaagtaagaactaaatctaatggatgggaactaagttttgaaaagcgtttttttggtgagcaggctggcgctgtaattcagtatttacgaaatgataaaaagttaataatatctcagttagatgacgatactatcaaaaaattagaagatgcacttaagaacgaagggtag

SEQ ID NO: 282075 - DNA, 1287 bp, Morganella morganii
atgtcctcaatatattttgaaaagctggttgaattttacagagggttggggaaacctcctgttgttaactgcgtatttgaatatagaggacaattaactaaccaattcgatatatttaaagaactgtgggataactacgatcaaagaattgcagattttgaattatccttcaattcggattcttacggtacctattatgaagaccctttccctgaagatttgactgcaactattgatattatacttgtagtatcattacctgctggtgattttagatttattgagtcattagaagattttttactcatagataataatttgaatactggggtatgcgttgaaaatgtttatcttataaaagaaaactatttatttggtgaagctggggaagtgaatgaaaaagtttccaaaacattaaagctttcactttttattacagaactttatgagttggcaaattataatgatcgtgtagaacatagcggcttacttaaattggtatttatcgatacaggaaatgcaaaaaagacctctccaattgttattgagcccaaaatagacattgaaagcatttcattccccatggttgatttgactatttttgatagtttaaaagaaaataattctgataatgctcatgttcaagagaaacaagctatgtttagggtatctattattgagattctaaaagaattggatgatagtacgaataaatttaatttcttgattgaacactgggagttattaaaagaaacatattatggaaattttgagtgctatttaactaatttctcatttttaaagcaaaaaaaagaggcagcggaaaattatatgactgtttcttcaaaaatatcaggaactctctcatctatatcaggtaaactatttggattgccaatttcatttgcggttgcgatgattattttaaaaacggggaaatttgaaagtatattagcattattaggagggattgtaacatctatattgattgtacttaccatttacgatcaaagaaaagttcttgaatctattcgagtatctatagatgccctttttagccacacaaagtctccgcgtagtggagaacttgcaagtctgatttccaagcataaagaaaatctctattctcaagctaataggctagataccgcaatggctttcttaatagtattttcttttttgccgattattatttctattggcgtgtatatatataagtttcatccatctgtaattgtatatattgatggtttcgttaatacctttatgatccagttacttagttaa

SEQ ID NO: 282076 - DNA, 288 bp, Morganella morganii
atgatcaacatcagtggggatagcatgtcgccagctatcaacccaaaagatgttgtatttgttgacacccataactctttttttgacagtgatggtatttatgtttttacctttgaaaattcattatttattaaaagattacagcgcgtaaaaggtcgcaggctcgcagtgaaatctgataatgaagcttacgaaacgttttacattgaagaaaatgaaacccatgatctgcgcataatcggaaaagttataaaatccctccccattagaatgattgactttgcataa

SEQ ID NO: 282077 - DNA, 249 bp, Morganella morganii
atgaaattaggtgattacctgaaaaaacacggaatcagtcaatctgagttcgcaaaaattgtcggcgtcacgcagggctatgtcagccaggtggtcgcgggtaattattttttaaaaggcaaaaaagccattgattgggcttcaaaaacccaatggtttgtgactccacatgatctgaatccggatgattatccaaaccctcatgatggaattcctactgctgaatcagtattacagcaagccagttaa

SEQ ID NO: 282078 - DNA, 2739 bp, Morganella morganii
atgactctgacttacggatctgtatgctccggcatcgaagccgcttcggtcgcctgggagcctgtcggaatgaaacctctctggttcagcgaaattgaaccgttcccgtctgccgtgctggctgcgcactggccgcaggtggataacctgggcgatatgacaaaaatcgccgcagctgttcgcgccggtgatgtgcctgcgccggatctgctggtgggcggtacaccgtgccagacattcagcattgccgggctgcgcaaaggcctgaaagacgaacgcgggaaattaactctctcttacattgaattggcggacagtattgatgaaaaaagaaaagaaaacggtgaaaaaccagcaatcattgcctgggaaaacgttaagggagtgctcaaccacccagacaacccattcggatgtttcatttctgggttggctggagacgatgagccgtttgaacctggtccgcgacctgaacgcggtaaatcaagccaattctggacgtggaataaaaaaaccagtcagcacgttgcgagctggccggtctctggttgtgttattggaccaaaaagaactgtcgcgtggagggtcctcgatgctcaatatttcggagtcgcgcagcgacgctgtcgtgtgttcgttgtcgcaagtgctcgaacagacatcaatatctcagaaatactatttgagtacgaaagcgtgtgcggggatattgcgccgggcggagaaacgaggaaagaaattaccggcactcttacagcacgcactccagcgggcggcggcgggcctggaaccgatattgagtttaaaggcggattgattcctgcgagtccggatgcagagaactataccggcaatagcgacctcagccgagaagtggttgcagctctgaccaaaaacggtgtaggcgcaacaggtgcagacgacaaccaggcacaggcaggacatctgatatcggtagttggtacgttggctgcacactctttcactggtggagctggtgggcgtccggagggagcggctgctgggcattttatccctgtttttggtggcggtaactgcagtgggccgatagatgtagcggcttgtctgacagcaaaaggccagcgaatagactttgaagtagaaacctttgtggtacacggtactcaggatccggacgttaatcacgaactggcgcacacgctgggacgtaactacgggcaggaaaatgcctgcatttcatttgcagaaaacagccagggggaaatcaggctgcaaggtggtgacggccagattatcgggcctttatctacaggaggtggaaagccggggcagggatatccggcaatatctgactgtgtcggtatagtccgccgcctgacccctgtcgagtgcgagcggttacaggggttcccggataaccacaccctaatccgctggcgccgtaaagatgctgctgactgtccggatggtccgcgttaccgcgctatcggtaacagcatggcggtaccggttatgcgctggattggtgagcgtatccttgccgcgctgccggtacagcagatggccaaccaaccagaagtgaccaaaactaacgataaacctgaaagcacaggaattcctatgagctaccaactgattggcggccgctgtgagcatgccttaaaaaacctcccggataactccgtggattcaatcgtaactgatcccccgtatggaatcgggtttatgtcgaataaatgggactacgctgtgccgactgttgaacagtgggctgaatgcctgcgggtattaaagccgggtggtcacttactggcatttggcggcagccggacatatcaccgcctggtggtaaacattgaggatgctggttttgagatacgcgatcagattatgtggatttacggcagtggcttcccgaaatcgaaaaaccttgatggtgagcataagggcaaaggaacggcattaaaaccagcccatgagcccattgttatggcgcgtaagccgttcagcaccacgattttgaataatgttactgagtacggaaccggtgctctgaatattgacctgtgccgtgtaccgacagacgaaatgctggctggtggctcgggtggcttactgtctgatgttcgtgatggtaaagctcctgcagggaatgagtgggcgcagaacaatgaggggcgttggcctgcaaatattatccatgacggcagcgatgaagtgatagcggcatttcctgacgcaaaagggcagcagggaaaggtcagaaatgatggttcagacaatggcaataaagtgttcggcaagctgaaaaatgtagtttcaaacccggaaccacgcactgaatcggcgacatcggcggcaaggtttttttactgtgcaaaagtcagcaaatctgaccgtgatgcaggtatggatcggtttattgtcgcctcggcatccgaaatgaccggtggccgcgcagagggcagcgtcggaatcaataacccaagagcaggagccgggcgcaccagtggagcgaaaaacacacatccgacagtgaagcctgtggatttaatgcgctacctatgtcgcctggtaactcccgccggcgggactgttcttgatccgttcatggggtcgggcagtacaggcaaggccgccattactgaaggattccggtttattgggatcgagatggaccctgaccatctggttactgcggcggcccgtatcggtcatgcggtgaaggaaatagagaaaacaggggaggccgcgtga

SEQ ID NO: 282079 - DNA, 1782 bp, Morganella morganii
atggcagttttgtcgtatattgtgcatctcatagtattcttattgttctgctggtcagtgataaaacctccccaacagcctcttattacccttttattttactgctggacacattacatgtttgggacacctagtaaattacacgaatgcttaacggtaagcgatttatataaatttcttggttgtgatgaacaaagttttggcgatttcttatacgggcctacacttaagtaccgcacattcataatacctaagaaaggtggtggcgttcggaatattgttgctcctataaaaaagcttaagcagctacaaaataaaataaaaactgagttagagtcttactataaaccaaaggcctgtgtacatgggtttatttctgacaggaacgttgtttctaatgcccgacctcatatcagaaaagaatatgtactgaatatagatttagaaaatttctttggttcaataaatttcggaagagtgagtaagttatttcaaagtcaaccattaaatcttacgcactctgttgcaagtgtcctggctcatatgtgctgctataataaagtattacctcaaggtgctccaacctccccaattatatctaacatgatagcatttaagcttgatagacaattaaaagatctagccagtaaatctaactgtacatataccagatatgctgatgacattagtttttcttttactaaaagaaaaaaaaacctaccaacatctatagccttttttgatagtaaagataatttagttttaagtaaagtactgataaatacaattgagaataattggtttaaaataaacgaaaaaaaaaccagaattcaacaccggactcaaagacaatctgttactaatattacagtaaatgaaaaaataaatgttaataaaaaatttatacgccaaacatcttcaatgttgaacgcaatgattaaatatgggcccatagaagccgaacaagaatattttaaaaaatatcataaaggatatatagcaaaaagacaacatataaaaataaaagaaaaaccaggaaaattatttacccaaaaagtaaagggtcgaataaattatattaagttagtacgtggtgactcatgtgatatatggcgtaagctaatgtataaatataccatcgcaataggcaatccaaatgaaaaatataataaaagcctttgggatattatttcagaatcaacttatatcatttatgacatatcagatggaaatgatacacaaggcagtggttttttattaaaaaatattggcttaattacaaatcaacatgtgataagtggcattgaacaaaataacattgcagattacttgatgatttcatggctacctaacccaggtaaatcgtttatcaatttaaacttagcttggaaaaacactgaaaaagatttagcagttattacatccactgttatttttaatgatgcagttccactaatagcagaacctagccctgattactccgtaggagttgatatttttactattggataccctgcttatgatgcaagaagaaataatgcacccacaatcattaaagccaaaataacaggtcaatatacaagagaaggacagtctagaattgtgattgacgaagcaattgtccatggacatagtggtggagttgtcttaaatacggatggtcgagtgatcggtattgtagcaaatggaaatgcagaaggcgcgataagaaatacacctagtgcatttatccctatatcaacacttcttgaagaacacgaaaacagaacaagaactgaataa

SEQ ID NO: 282080 - DNA, 684 bp, Morganella morganii
atgacattcggtttttcggtacgcgatgaaaccggcaaaactatgtttaccccgaatggtgaatgttatgttttctatgcgaaatataatgtcggagcgggagcggccggagaaacaaaaacagatacagggatatcggttagcgcagacccacagccattattttttgttatcagctcctatatacaccgtgatccgcaagtcagtaatattccgctcggtgagttatctgtcgggaattactataatcagaataatgctcctaatcatgtgatcacagcatccggtaataaatctgttgtctatgtctttatgcccggatggtgggtagagcgtaaatacggatctcagaaatggggcgcgcgattttatgatgaaaacgggaaagtcagctggtgtggctggcaaaaacctctgcaaatagccggatatatcccgtcagaccccggcagcccacacacgttaaaaacagcgacctgtgcggtaatgatgcgctcactgggtcatgcctcactgtacgtaccttcaatcgaccgtgattttttggtgaaatttcacatgactgcttctgccatgaacggcagaacagaacaattatggctgatcgtaggcaggggcggtggctccggcgcatgggggtataccggtgatattccgtacatagacagcgccatttacgaataa

SEQ ID NO: 282081 - DNA, 264 bp, Morganella morganii
atgtcggcattcggaataagggcttttgatgatctggggcgcgataccgtgcacatggtatccaattttgtacaaccaatactgacaataaccggcagtggctccaaaacctatgaaatgccaccagggagtaagttatatgcattccccacaacggggatatggggtgcttttaatatgacggtatccgggaacacggtaacgtggtctgcaattcagtcgccgctgaaggtgatgattgtgttttctctgggggcaatatga

SEQ ID NO: 282082 - DNA, 693 bp, Morganella morganii
atgcgtaaaaacattcaggcggccattttttcacatgcagaacgtgaatatccccgtgagtgctgcggggtgatcgcgcaaaaatcccgtgtggtgaaatatttcccctgtcgcaatatcgcagtttctccggaggaacattttgtcttatcgccggaagattacgccgctgcggatgattggggaacggtgatcggtattgttcacagtcatccggatgccactacccagccgtcagaactggacaaagcacagtgcgatgctctcggtgtgccgtggtatatcgtcagctggccagagggggatctgcggactgttcagccgcgcggcgagctgccattacttggtcggccgtttgtgctcgggtttacggactgctgggggctggtgatgagctggttccggcaggaacacggcattgaactgccggattaccgggtggattatccctggtgggagcagggtgagaaccggtacgccgataactggcgggaagcggggtttattcaggtcgatgatccgcagcccggtgatgtcatcgtgatgcagatacaggcaccggtcgccaatcatgccggtattctgctggctgataatatgctgctgcatcatttatacggtcacctgagccagcgggtgccgtatggcggttattggcgcgaccgcacagtgatgatcctgcggaaaccataa

SEQ ID NO: 282083 - DNA, 306 bp, Morganella morganii
atgtcaaagttaagactgttatcaggacagtatttaaggacagcgaatgcgctgttgctcctgttcccgctgatgctgttagtgagctgcggaaatacgcggacggaatacgttcccgtaccggtggtgccgcttccgccgcaactgaccactgattgtgagcaggtagagataccggatgatctgacgttcggtggtgccgtagagctgctggctgatgctatgaaatacattgccaactgcaatcacgataaacgggcaatacgggagattgaagcggagaggcaaaaaaaagccccagaataa

SEQ ID NO: 282084 - DNA, 477 bp, Morganella morganii
atgaataaccgattatttaaaaaagtcatggccgcttgtgccgccggggcgattgccggtgcgctggtgctgatccccgcttatgagggtgtcgagtatacgccttatcgtgatgtggccggagtgctcaccgtatgttacggacacaccggtagtgatattcagcccggcaagttgtatacggatgctgagtgtaaagcgctgctgcatgacgacctgacgaaagtccggctcgcggttgacccgatgatcaaagtgccgattgatgacaatacccgggcggccatctattcatttgtctacaacgtcggccccggcgcgttctcgcgctccactatgctgcgcaaactcaatgccggtgatatcgccggtgcgtgtgacgaaatgaaacgctggacatttgtcggtggcaagcagtggcacggactgattaaccggcgggatacggagaacgcggtatgccacggaaccccttaa

SEQ ID NO: 282085 - DNA, 1041 bp, Morganella morganii
atgaagaacactgttaatttaaacagtgttaatttagtcaacgacgactcactcagctatatcagaaccctcccggacaattgcattgatttaatcgccactgacccgccgtattttcaggtaaaaacatgtgcctgggataaccagtggccggacgtttctgcttatttttcctggctggacgaaatgttggctgagttctggcgggtactgaaaccaaacggcagcctgtatctgttttgtggttcgcgtctggcctcagatacagaaatgctgttgcgggaaaggttcagtgttctcagccatatcatatgggcgaagccttccggcccgtggcggcggcaaaacaaagaaagcctgcgttgttttttcccgtctactgagcggatcctgtttgcagagcattatcaggggccggtaaaaggaaaaggcagtgagtaccaccagcggcaggatgaactgaagaaaaatgtgtttaccccgctgattgagtatttccggcaggcgcgtgatgcattgggtatcacagcaaaagaaattgaccaggcaaccggcaagcagatgtcttcacactggttcgggtacagtcagtggcagttaccgaatgaagcggattaccggaaattacaggcactttttcagcggacagctgcagagtgtcagcgaaataacccgttataccgtgaacataatgatctggtcagtgagcaacacacactcaggcgtgaatatcacgaactggcagatcagtatcagttgttacgccgctactttacggtatccgttgatgtaccttataccgatgtgtggactttcccgccggttcagtattatcccggaaagcacccctgtgaaaaaccggccacaatgatggagcacatcataaaagccagcagccgtgaaggtgacctggtcgctgatttctttatgggatctggagcgacactgaaagccgcactgaagcacaatcgccgcgttctgggtgtggagatggaaacggagcggtttgagcagacgaagactgaaatagcgttattgtga

SEQ ID NO: 282086 - DNA, 582 bp, Morganella morganii
atgaatctgataagaaaaatatggcattttttcggcctgtatcaatcacataaagtacgactgttacattgtgcagtcctgattttcgttgtggcgcaaatcattatcagtaactggatgaaaggcacaaaatcctccgttatacctccggtggattggacttatttcttcacatgggctcatgtcactattggtttttgcttatttttcattacattaatcttaattattgtatgcttctatgaaaggggaatgcggtatttttatccctatctttggggggatattgtcccattgaaaaatgatataaaacaactgatgaagctaaagctaccagacagcactccaaaagggcttgcagccgtagttcagggattggggcttggcgcgttatcgatagtcattatatccggaatggtttggttttttttgtggttacaacattcaccatcagcattagaggcccgaagtatccataaatcattaacagtgttaatagaaatttatatctatggacatggtggatttgggcttatccattttgttctgtggtataaaaaatcaaaaaacagtcatcagtaa

SEQ ID NO: 282087 - DNA, 402 bp, Morganella morganii
atgattctctatctcaaaattgcaactgatatcccggcgggtactgcaatcacgacccgctacatcatggacaaatacaaagtgtcacgcagtacaagccggaacgcattagctgtactggctcatataggtgctgctgaggaagtaagccgtatccacacagaaggtaccgcttactcactgtcacctgacgcggcagataaggcacagaaatacagaaagctggtgatcatcatgcgggaaaacccgaatgaggtccggcgcaacaacggcccgatcctgtccagtccggcagatatggcagagtgcgggtttgtatctgcgcataaccggttgtttattgtgctggcggcaaagcgccgggagatgaaacagagctgcgcagtatacggctgcgcttga

SEQ ID NO: 282088 - DNA, 303 bp, Morganella morganii
atgccagtaactacgcataccttaaaaatatcagataaatattttggcaaaatattgtgcggtgacaaaaaagcagaattcagacgcagtgatgatagatgttttaaaaaccgtgatttattggttctgcgcgagataaaagattgcggaagtcatcatgaatacaccggacgtgaattaacgtgtcggattactgatgtaacaaaaataagtggtgtttatcctgatttaaagggactacataatttttccatgctctctatttatgttattgattatagagaaggtgtaatccatgaataa

SEQ ID NO: 282089 - DNA, 570 bp, Morganella morganii; identical to SEQ ID NO: 280853

SEQ ID NO: 282090 - DNA, 288 bp, Morganella morganii; identical to SEQ ID NO: 279724

SEQ ID NO: 282091 - DNA, 192 bp, Morganella morganii
atgcgcatgcctgacaaatattccagccctacagcatacgcctggggacttataacctctgcttttggcgttttatctctggaccagtgggctattgttgccgggatcatctgtactgtcggaacgttcctggtgaactggtattacaaacggaaagaattccagctgaaagccggagaacatcatgaataa

SEQ ID NO: 282092 - DNA, 477 bp, Morganella morganii
atgaataaccgattatttaaaaaagtcatggccgcttgtgccgccggggcgattgccggagcgctggtgctgatccccgcgtatgagggtgttgagtacaaaccttaccgtgatgtggccggggtgctcaccgtatgttatggccataccggcagtgatattcagcccggcaagttgtacacggacgctgaatgtaaggcgctgctgcatgacgacctgacgaaagtccggcgcgcggttgacccgatgatcaaagtgccgattgatgacaatacccgggcggccatctattcatttgcatataacaccggaaccggtgcgttctcgcgttcgacaatgctgcggaaactcaatgccggtgatatcgcgggtgcctgtgacgaaatgaaacgctggacatttgccggtggtaagcagtggcagggtctgattaaccggcgcgaaacggagaaagcggtatgccacggaaccctttaa

SEQ ID NO: 282093 - DNA, 159 bp, Morganella morganii; identical to SEQ ID NO: 277743

SEQ ID NO: 282094 - DNA, 294 bp, Morganella morganii; identical to SEQ ID NO: 277742

SEQ ID NO: 282095 - DNA, 186 bp, Morganella morganii; identical to SEQ ID NO: 277741

SEQ ID NO: 282096 - DNA, 504 bp, Morganella morganii
atgtctaatatcagcaatctcggggacgcgtatcactggagtgttgcaaagattgctgaagcgttcggactgaaccggggtacggttaaaaagcggctgctcgatgcaaatgtggcgatagcaggaacagtacgaggcaatccggtgtatgccctccgcgatgtcggtccggtgatattcggtgctgacacagagaaagatccgtccggtattcaggatccggacaaaatgttcccgaaagaccgtaaagactggttccagtctgaaaacgaacgcatcaaacttgaaacctctctgcgccagctgatacctgctgaagaatctcaccgtgagatggcgaccatcatcaaagcgatagcccaggtgctggacacctggcctgaccgactggagcgtgaccacggctggcagcctgagcaaatcacacaggcacaggatgtggtggatgaactccgcgatctgctggcggtggaggtggaaaacgcagaggaagaaaacggatga

SEQ ID NO: 282097 - DNA, 2115 bp, Morganella morganii
atgagtacaggttatgcatcggcagcggaaatgcgccgggatgtctctgtgctgctgcgtccgccgcgccggatgccggtggcggaggccgttaaaaaatacatgcgggtgccgatgggcggcggcagtgcggtgcagtgggaagacaccctgacgccgtacattattgagccgatgaactgcctgacatcccggaaatatgatgcggtgatctttgtcggtccggcgcgtaccggtaaaaccgtggggcttatcgacggctggattgtctacacgatagtctgtgatccggctgattttctgctgattcagatgacggaagaaaaagcccgtgagcattcgaaaaagcgcctcgaccggacattccgtgcgagtccggaagtagctaaacggctgagcccgcgcaccaatgacaataacgtgcatgacaaaacattccgcgccggtaactacctgaaaatcggctggccgtccgtcaatatcatgtcctcatcggattaccggtttgtggcactgacggactatgaccggtttccggaagatatcgacggcgagggggatgcattctctctggcatcaaaacgtaccacaacatttatgtccgccgggatgacgctggtggaaagttcacccggacgggaaattactgatcagaaatggacgccgtcatcaccccatgaagcaccgccgaccaccggtattttatcgctgtacaaccgtggcgacaggcagcgctggtactggccgtgtccgcactgcggggaatactttcagccggtgtttgatgcggtggccggttaccgggatgacccggatccggtgacagccagtgaggcggcttatattgagtgcccgcactgcaccggacacatttccggcagcgaaaagcggaagctgaataatcgcggtgtctggctgaaagacggccaggatattgaccggtacggcaacattaccggcgatgcccgccgctcccgtatcgcgtcattctggatggagggaccggctgccgcctatcagacgctgtcccagctcgtttataaatatctcaccgccgaacaggaatatgagctcaccctgagcgaagaaaccctgaaaacggtgatcaatacggactgggggctgccgtaccggccgaaacatactcaggatcagcgcagggcagaagaactgctggcgcgggctgaggatctcgggatccgctgtgtgccggaaggtgtccgctttctggtggcaaccgtcgacgtgcaggccgggaaaaaccgccggtttgtggttcaggtcaccggctacggtgaaaaaggtgaacgctggattgtggacaggtttgatatcacccaatccctgcggacggacggcaacggcgagtgtgtccgtattcatcccggtgcctatccggaggactggaagctgctgataacagatgtgctggataaaacatatccgttgtccggacatccggcgatcagaatgcccgtcatgatgctgggggtggataccggcggtgaaagcggtgttactgataacgcgtatgctttctggcggcagtgccgccgtgacggcatcagccgcaaagtgtttctgttcaaggggggcagctgtaccggcgcaaaactgatcaccaaatcctatccggataacaccggacgctctgaccggcaggcgaaagccgccggggatgtgccgttatatctgctgcagactgacaacctgaaagaccgggtggctgctgcactgagccgtgatatgccgggcccgaattatgtgcattttccggactggctggatgactctttctatgacgaactgacctatgaggagcggctgaccagcggtaaatgggaaaagcccgggcggggcgcaaacgaagcctttgacctgatggtgtacgcccatgcactggtgatcataaaggggtacgagaaaatcaaatgggataaaccgccgccctgggcacggttacccgatattcctgttattccgcctgaaaacactgactcccccgacaatatcacccttatttcaacaaccggacccgcgaaaccgaagaaaccgaaaaaacggaaagcatcggcgtgggcccctgtttcatcatccggaggtggctggatatga

SEQ ID NO: 282098 - DNA, 219 bp, Morganella morganii; identical to SEQ ID NO: 277738

SEQ ID NO: 282099 - DNA, 1476 bp, Morganella morganii
atgaagctgatcgacagtgctatcggcctgattgcgccgggctggcaggcgtcccggatgcggtcccgcctgcagataaaagcctatgaggccgcgatgccgacccgtacccaccgcgcgcggcgggaatcccgtaacgcgaatcagctggtgaaatccggcggccggtcactgcgcgagcaggcccggtttctggatgacaaccacgaccttgtgatcggtctgctggataagctggaagagcgggtgattggtgcgaaaggcattattgttgagccgcagccgctgctgcgcggcggtgaactggcagatgatctggcaaaacagatccgtgcggcctggtcggaatggtctgtcagtccggatgtgaccggtcagtatacccgtccggtacttgaacggctgatggcgcgtacctggctgcgtgacggagaggtattcggtcagatggtgtccggacgggccaaaggtctgaggcgggaaaacggggtgcatttctggattgaggcgctggagccggactttgtgccgctgaatctggatgtgccgggcagcaatatctgccagggtgtgaaactcaatgagtgggggcggcctgtcagttacaacgtgtataaaaatatgccgtcagccctgtaccggtcgcaggatctgaaaaccatcgacgctgaaaacatgctgcacctgaagtttacccgccgcctgcatcagctgcgcgggcacagtctgttgtccggtattctgatccgcctgagtgccctgaaagattatgaggacgcggaactcaccgctgcccgtatcgctgcatcactcgggatgtacatcaaaaaaggggatatctataacggcgatgatgcatcagaggacagggaactgaacatcgagccgggcattatcttcgatgaactggcacccggtgaggatatcggcatggtcaaatctgaccgcccgaacccgaacctgcaatccttccgtaatggtcagctgcgtgcagtagccgccggcagccgcggcagttattccagtatttcacgtgattatgacggcacttacagcgcccagcgccaggagctggtggagtcttttgagggctacggcattttacaggatgcgtttgtggccgcagtgacccgcccgatgtaccgcagctggctgacaatggccgtggcggagggggtgattgatgtaccgccggatgttgatcccgcttctttaatgaatgcggtttacagcggcccggtgatgccgtggattgacccgctgaaagaggccaaagcctggcaggtgctgctgcgcggcggcggggcaaccgaaggggaatgggttcgggccagaggctccagccctgctgatacaaaacgccgccgtaaagcggaaattgatgaaaacagaaagctggggctggtgtttgacaccgatccggcgaatgacaaaggagcacctgacgatgccaaatcccgggacgatgacgagtaa

SEQ ID NO: 282100 - DNA, 2031 bp, Morganella morganii
atgccaaatcccgggacgatgacgagtaacccgaaagcatccgcaccggttaaaagctggttccgcatgaaagccgcggcggatacccaatcggcggacatttatatctatgacgagatcggcggctgggggatctcagcaaagcagttttcaaaagagctgctggcgctgggggatgtcagtcagattaacctgcatattcactcccccggcggcgaagtgtttgacgggatcgccatttataaccagctgaaaggccatgatgcaaagatcaccgtttatatcgacgggctggcggcctcaatggcctctgttattgccatggtcggtgacactgtgattatgccggaaaacgccatgatgatgatccacaaaccgtggggaattgcccggggggatgcggatgaaatgcgggattacgccgacctgctggataagctggaaaatgtgctgatcccggcgtatgtcgccaaaaccggcaaaacggcggaagagattgccgccatgttagaagaggaaacctggatgaacggcgatgaatgtctgtcacacgggtttgctgatcagcttactgacccggtacaggcgatggcctgtatcacatccaaacgtatcgaggactttactgctatgccacaggctattaaaaaccaggtatcaccgaaaaataccgctcagaccacaccggtttccgtgccggacccggcaccggtgacgcagcccgccgcaaccgtgactcagccggtcgcgcagccgggtaatgcagatgtacagaatcagatccgcgctcaggaacaagcccgtctgaacggcattaaggacttgttcgccatgttcggcggcaaacataatgatctgatggtggattgcgtgactgacacgcagtgctcactggaagacgcccgtgcgaaactgctggaaaaactgggggcagaatccacaccaagcaacaaaaataatgctcatatctacgcaggtaacggtaatttcaccggtgacggcatccgtgcatcggtcatgacccgtgccgggcacgaagaagcacagccggataacccgtataacagcatgacactgcgtgaactggcgcgtatgtcgctgacggagcgcggtattggtatcagcaccctgaacccgatgcagatggtcgctgcggcattcacacacagcacttcggatttcggcaatatcctgatggatgtggcttataaatccctgctgacgggctgggaagaggcggaagaaacctatgataagtggacgaagaaaggtcagctcagcgactttaaaaccgctcaccgtgtcggcctcggtggttttccgtcactgcgtcaggtgcgcgaaggggcagaatataaatacgtcaccacaggtgacaaggggcagaccattgcgctggcaacgtacggggaactgttcagtatcacccgccaggccatcatcaacgatgatatgaatgcgctgaccgatatcccgaacaaactcggccgggccgcaaaagccaccattggtgacctggtgtatgccgtgctgacagataacgggaaactgagtgacggcaaagccctgttcagtgctgatcataaaaatacgctgtccggcggcatggatgtggaaaccatcagcaaaggccgcacgctgatgcgccagcagaaagagggcgaacgtacgctgaatatccgcccggcctttatgctggtaccggcggcactggaaacacacgcacttcaggttgtcggttccggcagcgtgaaaggggcggatgtgaatgccaatatcattaacccgatccgcaatattgcggaaattatcactgagccgcgtctggacgataacagtgaaaaagactggtacatggctgcttctcagggcagtgacaccattgaagttgcctacctgaacggtatcgataccccgtacatcgatcagcaggaagggttcacctccgacggcgtgaccacgaaaatccgtattgatgccggcgtggcaccgctggattatcgcggaatgatccaggtgaaaggccggtaa

SEQ ID NO: 282101 - DNA, 342 bp, Morganella morganii
atggctaagaattatcagcagcaggggatgaccatcgcgattgttaacagcggaaccaaacccgttaccagcggttcactggtacaggttggctcactggccgcggtggcaattacagacattgccgccggtgcaaccggtgacggatttgccgaaggggttttccggctgcctaaaaaaaacgggctggtgcttaaagcgggggcggcggcttccgttaaagacggtcagttggtggataccggcggcgtggtgatcggcgtagcctgggaggatgcggctgccggtgacgcagatgccgctgtgaagattaacgtcttcccgccggcggcacagggataa

SEQ ID NO: 282102 - DNA, 279 bp, Morganella morganii
atgaccccgtttcagcagatgaagtcccggatggatgcactgacagcggaaaaaatgggggaagtcatttatctgaatgatcagcctgtctgtgctgttgagtttcattttcttccggaaatgggaccggtcagcggtgacggggtcagttacgtgattttcaccccgggggtcaccgcccgccggaatgacagggtcgttatcagcaatgcggagtacaccgtaacccgtgctctgcgctataacggcaagccccatatttttatcgagagtgaataa

SEQ ID NO: 282103 - DNA, 783 bp, Morganella morganii
  misc_feature (753)..(762): n is a, c, g, or t
atgccggtgaagttccgccgggataatcaacttacacagcatactcaaattacaacccctgcaagtgcatcaccaactcagctctatgaagcgctggccgcgataacaacaccactaaaagcacatgcagatggtgtcgccgtagcctctacagggatcatctgtgatggtgtattaacggcattaaaccccgataatctggggggattaaaaaatttcccgttgaaaaaaatactctctgcattaacggatctgccttgctggttactcaatgatgctcaggctgctgcatgggctgaatatgattaccgccatgaaaatatctctgatatggcatttgttacagtatcgacaggtgttggtggcggcttgattcagcaaggacaattacaggcaggaaaacgaggtattgcaggccatcttggccataccattgctgatcctcatggccctctttgcggctgtggtcgttatggatgtgtcgaagctatcgcttccggccgtgccattgcttcacaagctgtaaatgaacttgcagggaaagatgcgaaagctatttttgctgcctatcaccagggaagccttcaggcgaagacaataattgaaaactcagcaaatactatagctaatttagttgctgatattaaagcaacaatagatgccgactgtgttgttcttggtggaagtatcgggttagcaaacggatatattgagctcgttcaaacagctatcagacaacaaccggaggcattnnnnnnnnnncattacaggtgcctattttag

SEQ ID NO: 282104 - DNA, 1365 bp, Morganella morganii
atggatccagaaaaaataaataaaataaaaactaaacgccttagctggacatttagctcaaaagaatggaaaaattttagtaattttgctaaagaaaataatattacaccttccattgcattagcaacctgtttctcatctgtacttgcaagatggactggccaaaatagcttattactcaactttacattatttgatagaaagccattagcccctgcagttaataatattatagctgattttactaatgtcattcttttagaaatgaaaacagacaatcgaccattaatttcattatctaaagacaatcaaaatacatttattgaagcttggcaacattctgattattctggtattgatatcattagagaccttcgtaaaaatggcacccatccttatgggtgtcctgttgtctttactagccatattaatcaaccacttattgataaaaatatagaatctgtattaggttctataggatggggaatatcacaaaccccacaagtttggcttgatcacatggcaattaacaaaagtggaaatattgttttacagtgggattataacaatgacttgttccggaatgatgttataacaacaatatttgatgtttatatttctcgtatacgccaacttgccaacgatcctaatgcctggattgaaacccaacctgatttaattcctaaaaaacaattaaaaaatagaatatcagttatcaaaaaagataattcactattaccacatacactgcataagtctattttccataattattcaaattcatcaaaaattgctgtcattgatatcgactctcaggaatggagctacaaaaaattattatctaaagcaacaatactcagtgatcaaataatacaacaaggttataaaccagaagacagaattggtgtatgtatgccaaaaggagtagggcaaatcattagcgttctggctattttattaatggggggaacttatgttccgattgatgtactacaaccagaagaacgtataaaccgcattgctaaaaatgctcagctttcattactcatcgtatctgatagcgatccatcctattcaatctatgctacattttgtaacaggattgtttggcaaaaagttcaaccctccgagaataaaccactacacaatatagatatatctcctcatcaagcagcttatgttatttatacttcaggttctactggagagcctaaaggtgttgttgtatcccatgccagcgcaatgaatacctgccttgatctcaatcggcgatataacatttcagacaaagatcgggtacttgccatatcagcactacattttgatctgtctgtttatgatattttcggtgttttaaatgcctga

SEQ ID NO: 282105 - DNA, 2835 bp, Morganella morganii
  misc_feature (52)..(61): n is a, c, g, or t
  misc_feature (938)..(947): n is a, c, g, or t
  misc_feature (2784)..(2793): n is a, c, g, or t
atgcctgagccgccagcatttcattcagccgcggattgtcctgatgagcggnnnnnnnnnntaaatgccggagggactcttgtattagttaaagaagatgagcgccgtaatcctgatgcatggttacgacttattaaccaacataaaataacactttggaacagcgtacctgcactgtttgatatgttactaacctatgcagaaggaatagggtcatccattccacaatcgctgctattaatctatctctctggagattggattgggcttgatctcccgacacgttactataatttctgccctgatggacaaatagtcgccatgggaggtgccacagaagccgctatttggtctaactattttaatgtcacaacattagacccatcctggagctcgataccttatggatatcctttatccaaccaacgttatcgtattgttaatgctagaggagaagattgccctgattgggtatcaggagaactttggattggtggtgcaggcgttgcgttaggctacctaaacgatcccgaaaaaacagcacaacagtttgtaaaacaaaatggtgaaaattggtataaaacaggtgatatgggaagatatctccctggcggtatacttgaatttttaggaagacgtgaccgccaagttaagattggcggataccgtatagaaccaggggaaattgatgccgcattcaataagcttcagggtgtgcaaaatgcgattacactatgccttggtaatggtaataaagaaaaagcattacactcttttgtgatactaaattcgggtaattaccagaatattatcagttcaaatagcgccttttctcccctctactatctgcgctcaaccccaataaatgtacaacaacaatcccaagaaacggcaatcatagctggatttttatatgattatcttactgaacaaaatannnnnnnnnntgatttcgacaacctcttgtcagaaaaaaaatcagcagatgaccatggcattatcgctagctatcagtcattaatggctaattggctaaatttaatagcacaatatccacaaactacactcaattcccccccaactaatagtacccagcgaacgctaatagaaaatttgcagcgccacaaaaacaatttaacagacatactcaaaggtaaaaaatcagctctaacactatttgatgatccctattggtcaccagaacaagtcactatgcgtattgatggaatgcactactccttagaaaatttactacaacaaataagagaacttcatcattcactaaaaaggccaataaaaatcattcaattaggtgctagaagcggtatttcagcaaattatattctgcaacgattacccaataatatggttaccctactgctaactgatgagtctctttcaatggtaacgcaagctaaccaaaatttatcagattatcaaaatagttatgctgagcctcttacagaagtatttcttcataaaaatcgatatagtgcagatatcatttggatgaacaattatcttcatcgattagacagcccacaaaaagagatacaaaaattcgtttcactctgtgctccgagtggaatgatttttatacaagaagtgttacatgcccctgcacaatcactgataagcatctctttattacaacaaaatggtagtgatcctgctgatgaattattaacagcaaaaaaatgcaaagatatctttagcgcttctactgcgacttataaaagtgaaggagttaacggcgaaatattgacacagttataccaagcaccagaaaaaatttatttaccagataaaaataagctagagcatgatttgcgccaatttttaccagactatatgatcccaaaacatatttattttctaactgagttccccttaaccgcaaatggcaaaatagataaccaatcattaaaattgtattgtcaggaataccaagaagaatacctaaatcaacaacctatcaatggtaaagaacagatcatcataacaatatggcaaaagctccttggcaccaacaagatacaccgtcacagtcatttctttcgtgaagggggagatagcctagttgctattcgattgatctctgatttaaaccatattggctaccaagttgaactggagcatatctttgcttatccgatcctttctgattttgcacaaaatataaagcagagcgaagttttcgaaaaacagccagcaatttcacataacgaggcgtatagatacaatccatttccactcactgatattcagcaagcttacttagttggacggcaaaataattttacacttgggggtgttggtacacatttttttgtccattttatagcggaaaatttagatgtacctaaattagaacgtacaattaatcagttgatttctcgtcatgatatgttacgtggtgtcattattaatggacaacaacaagtacttaaaaaagttccttattattccgttaaaacgcattatatccctacagaaaaaagtgacgcttttctagtattacgagctcaacttgctaacattgtttatgatccagaaaattggcctttatttgctattcaagttatcaagaccaaagaacaaccagatcatatttttattagccttgataacttattccttgatggaatgagtatgcagatatttttcagtgagctaaaaacgctatatatggagccaaatcaccaatttatccctctagatattacttttcgagattatattgattgtgatgcctatccgattaacacacaaaatgattgggannnnnnnnnntttttttttaatgatacggcgaccaccgagatctacacgtaa

SEQ ID NO: 282106 - DNA, 756 bp, Morganella morganii
atgtgtataagagacagaaatgattgggaatattggttaacgcgtttaccacaattaccaccagccccacaattgccactaataaaagatccagcacagattgtgcaacctcgcttctcgcgtttacaaacatcattatctacttctgtttggcaagcactacaacaagttgctcaacaaaataatgttacgccagcagcacttttgattgctgcttattgcgccacattatccgcatggagtaaaagccctgagttaacaattaatttgacattatttaatcggcatcctgtacatcctcaaataaatgaagtacttggtgattttacctcattacaattactcgattggtatacctgtgatctttggtcaaacagtatctcaatgatgcaaaaacgtttacataaagatatgcaacatcgtagtgtttcagccattaaagtaatgcgtgaaatggcaattcaacgacagatgtctcatatagagatacctgtcgtttttacctgtgcattgggctataaacatgatgaaggttttctttctcatcattcatggctaaaacctgtttggggaatatcacaaacaccacaaacatggctagatcatcaagtatatgagtcagacggtgaattatatttaaactgggattttgtcgaacaattatttgactacacaaccattttttccatgttccagcaatatgaacatatactcactaaactggctactgaaccacaatcttggcaattgcgctaa

SEQ ID NO: 282107 - DNA, 1281 bp, Morganella morganii
atgacaaagcgaacctatgacaacaacggctggctcgaagtaaaagataaccccatctcaaaagttggggtttttgattatctgggggctgaaatcggcgcaccggagccggacaggatttacaaagtattccgaccaccggaagagttaggtagtgaagaaaccatcaaatcattccgcctgaccccgttcattgtcgatcacgaaatgctcggtaaaaacgccacaccggcagagaaaaaaggcattcagggggttatcggtgaaaacgtgtatttcgaacacccgtacctgaggggaaatatcaaaattttctctgatgccgccctgagtgatatcagtagcggaaagattgacctttcaccgggctaccgcagccggtatgacttcgacaaccccggcgtgtacgagggggaggcatacgaagttgttcagcgccacctgcgtggcaatcaccttgcattagtcgatgaagggcgcaccggcgctgacgtggctgtgcaggatcatcttgttgtaaccattgatacaaaggaacttattcgtatgagcgaagaagacaaagacaaaaaacagccgaccggtgacgagaacggatttacaccggagcaggttgaacaaattaaacaaatcgtcgtggccgcactggctgccggtacaccggcaacggatgaagacccggagaaaaaggaaacgactgacggcgatcctgatccggaaaagaaaacggcagatgccgaagccgaagcggaaaaagccgttgaagacgcagaagcggaagctgaaaaagcggaatccggtgacccggaagcgatagaggcggcggaagtggctatcgaaaccgcagaggaagcgattgccgaagctaaagaagaacttgaccaggcaaccaccgacagcctgacgcgtcgccttaagcgtctcaaacgcagtattgcgtccatggatgaaatgtcctcaatgaaacgcaaaattgcccgtctggaaaaagccagaccgaccatggacaccggcgaactgttaaagcagatcggggaacgtgacgcactggcgcacaagctgacgccgtttatcggggtatttgaccacgcaccaatgacgaaacagcaggtggcggaatacggcgtggaaaaactcggtatccgctgcgataagggcacggaaagtattgccctgaacgcctggatgcaggggcgcacaccggattcacaaaaagcgcatgcgacgatggataccgccgcaggcacggactcaattatgaaaaagtggggtgaaaaataa

SEQ ID NO: 282108 - DNA, 792 bp, Morganella morganii
atgaagggcaagccgctgcaatattcggcagcagcccaaagccgttaccagcgtgacatgtcacaactgattaaaggcatgattgccgattacgaaaagacgttcagcagtctgcatgaggattttgacggcgtgaccatggatgccagctttgccagccagaccaaaatctggctgaaccggctgaaacgcaagtgggataagatttttaacaatcaggccgcagagatggcggataagttcacctcgcaggtggacatgaacgcacagcgcagcctggacgattcactgaaacaactctccggcggtattacgataaaaaccccggccatgcccgaagccctgaaagacaaaatgattgccgcaacggcagaaaacgtatccctgattaaatccatcccgcagcagtttcattcccgtatcgagggcgcagcattgcgttcggtcagtcagaccggcagcggcagtaaaaccctgctggatgaaatacgggatatcggcggggtgacagagaaacgggctaattttattgccgttgaccagacccgcaaaattaccacggcggcgaactatgagcggatgaagtctgccgggatccgcaaagcgatatggcatcactcggcaggcagtgccgaaccgcgtgaattacatctgcgtctggacggggaagtattcgatctggataacccgccggtcattgatgaaaagaccggtgaacgcggattacccgggcagttaccgaactgcaaatgcttctggacaccggttatcgactttggtgaggagacatga

SEQ ID NO: 282109 - DNA, 1269 bp, Morganella morganii
atgacaaagcgaacctatgacaacaacggctggctcgaagtaaaagataaccccatctcaaaggctggggtttttgattatctggggtctgaaatcggtgcgccggagccggacaggatttacaaagtgttccggccgccggaggaacttgccagtgaagaaaccattaaatcattccgcctgaccccgttcattgtcgatcacgagatgctcggtaaaaacgccactccggctgagaaaaaagggattcagggcgttatcggcgaaaacgtgtattacgaccatccgtacctgcgggcaaacatcaaaatcttctcggatgcggcactgagcgacattgacagcggaaaaattgaactctcgccgggctaccgcagccggtatgactttgacaaccccggcgtatatgaggggcaggcatacgaagttatccagcgtcagctgcgcggcaatcaccttgcattagtcgatgaagggcgcaccggctctgacgtggctgtgcaggatcatcttgttgtaaccattgatacaaaggaacttattcgtatgaacgaagaagacaaaaaaaccacagacgacggcggttttacgccggagcaggtcgaacagattaaacaaatcgttgtgtctgcgctggctgccggtacaccggcaacggatgaagatcctgaaaaaaaggaaacgaccgacgaagagtctgatcctgaaaagaaaacggcagatgccggagccgatgcggaaaaagccgttgaaggcgcagaagcggaagccgaaaaagcggaatccggtgacccggaagcggtagaagcggcggaagtggcgattgaagccgcagaggaagccattgctgaagccaaagaagaacttgaccaggcaacaaccgacagtctgacccgtcgccttaaacgtctgaaacgcggtattgcgtctatggatgagatgtccgcgatgaaacgcaaaatcgcccgtctggagaaagccagaccgacgacggacaccggcgaattattaaagcagatcggtgagcgtgatgcactggcgcaaaagctgacaccgtttaccggggtgtttgaccatgcagcgatgacaaaacagcaggtggcggaatacggtgtggaaaaactcggtatccgttgcgataagggcacggaaagcattgctctgaatgcctggatgcaggggcgcacacctgactcacaaaaggcgcatgcgacgatggataccgccgcaggcacggactcaattatgaaaaaatggggtgagaaataa

SEQ ID NO: 282110 - DNA, 1491 bp, Morganella morganii; identical to SEQ ID NO: 281570

SEQ ID NO: 282111 - DNA, 1017 bp, Morganella morganii
atgaattacctgttaaccggctttgtccagaaagatgcccggatactgatgtttaatccgggtgcggagatcggtaatttccggaacggcacccgttatgttgtgagcgtggcgccgcagtgcatgaatggtattccgtccggtcgtgttccggcagatgcgcagccgctgctgacagatgagcgggtgcttcgtttcctggataatcccgccgtgataaaagccgccggcggactatccggatcccgtcactacgttaaatcagttggctactgccagattaatgatccggaaaacccttaccaccaccacgaactgaccatgacccgccacaaagatggttttatccggacatgctggcaccatgacaacatcttgcgggcgggtgatgtccaccagcagcaggcagacgaaattctgttacacaaccaacgggcgtttgtggcacgcagcatctttaccgatctgcggctgccggctggtcatcttcttaatccttccgatttgttcacctggtcggtgatgcgccgcgtcagtgatcatcttcctgcctttatcagctcatacatcctgatgcagaaaccggaggaagagataaccggcaccatgacagagcattccattgtccatcaatcgtgctcacacagccggattgttcaggaaatcgtagagaagataaagccggtcgttgttcctgagatagagccggagccgccagcaagttttatgcggatcccgaagttaaagcgctgggagtgtctgaaatacctgcagtgggtcaaaagccagccgtgttgtgtgtgcggccagcaggcggacgacccgcatcacatcatcggtcacggtaccggcggcacaggtacaaaagcacacgacatttttactatcccgctgtgccgggttcaccacgacgagttacaccgggatccggcagcatgggaagaaaagcacggcagtcagctggagttgttatttaagtttatgaaccggtcatacgggatcggtgtttttggttaa

SEQ ID NO: 282112 - DNA, 1038 bp, Morganella morganii
atgaaaaacactgttaatttaaacagtattaatttagtcaacgacgactcactcagctatatcaaaaccctcccggataattgcattgacttaatcgccactgacccgccgtattttcaggtaaaaacatgtgcctgggataatcagtggccggatgtttctgcttacctttcctggctggacgaaatgctggctgaattctggcgggtactgaaaccaaacggcagcctgtacctgttttgtggttcacgcctggcctcagatacagaaatactgttacgggagaggttctgcgttctcagtcatatcatatgggcgaaaccttccggcccgtggcggcggcaaaacaaagaaagcctgcgttgttttttcccgtctactgagcggctgctgtttgcagagcattatcaagggccggtaaaaggaaaaggcagtgagtaccatcagcggcgggatgaactgaagaaaaatgtgtttaccccgctgattgagtatttccggcaggcgcgtgatgcattgggtatcacggcaaaagaaattgaccaggcaaccggcaagcagatgtcttcacactggttcgggtacagtcagtggcagttaccgaatgaagcggattaccggaaattacaggcactttttcagcggacagctgcagagtgtcagcgaaataacccgttataccgtgaacataatgatctggtcagtgagcaacatacactcaggcgtgaatatcatgaactggcagatcagtatcagttgttgcgccgttacttcacggtatcagttgatgtgccttataccgatgtgtggacattcccgccggttcagttttaccccggaaagcacccctgtgaaaaaccggctgcaatgatggaacacatcataaaagccagcagccgcgaaggtgatctggtcgctgatttttttatgggatccggggcgacactgaaagccgcattgaagcacaaccgtcgcgttctgggtgtggaaatggaagcagaacggtttaagcagacggtatccgaaataacaaattaa

SEQ ID NO: 282113 - DNA, 429 bp, Morganella morganii
gtggacccgtccgattttccgttagagtctttccgtgccatctataaggcttttgccgcagtgcctgatgatgaaatttttatcattgcactggaagcactgaactacttttccccctgccgtggtgtctgcacaaattcagcgtggatgctggttgtcgcgcatatgctcgatctgaataagcggattgcagacggggaatcaccgaccggtgtcgtgaccagtgtcacgattgataaagtcagtgtgtcctacactgcgccgcctgccggttctgactggtcgcactggttcaagatgagtacctacggccagcagtttctggcgctgataaaacggtgcagtgtaccgcgttaccacggcggcggcggggaacgcgcggcatttcgcggcgcgttcgggcgcttcacgcggggaggtcaccggtga

SEQ ID NO: 282114 - DNA, 354 bp, Morganella morganii
atgcctctgtatatctattgcaccctgtccaacgaccagaactatgccacaccggacggtccggtatttatcgccggtcaggccaatgtcatgaccaaacacatgtacaccccgcgcggccgtgtgactgaaatcagtgatgaacagtacacgcagctgaaaaataaccacgtctttaagctgcataaagaaaacgggtttatcgcggtggaaaaccgcaaagaggatccggataaagtggcgaccgatatggaagccagtgacaaatccgccccgctgaccgaagaacaactgattgcggagggaaatgagccgccggtcagcaacaaagacaaaaagaacagtaaaaaataa

SEQ ID NO: 282115 - DNA, 429 bp, Morganella morganii; identical to SEQ ID NO: 278804

SEQ ID NO: 282116 - DNA, 354 bp, Morganella morganii
atgcctctgtatatctattgcaccctgtccaacgaccagaactatgccacaccggacggtccggtatttatcgccggtcaggctaatgtcatgaccagacacatgtacaccccgcgcggccgtgtgactgaaatcagtgatgaacagtacacgcagctgaaaaataaccacgtctttatgctgcataaagaaaacgggtttatcgcggtggagaaccgcagagaggatccggacaaagtggcgaccgatatggaagccagcgacaaatccgccccgctgaccgaagaacaactagtcgcggaggggacagagccgccggtcagcaacaacggcaaaaagaacagtaaaaaataa

SEQ ID NO: 282117 - DNA, 882 bp, Morganella morganii
atgttgcagcatgtgctgccggggcttatccgtaccgcgacccgggtccgcgtgctggatgaaatcaccggtgtactgaatgccggtcagtggcatgacgaggagattatcctgaatgtggcgactccggccggtaaagcggagctgtacggcgatcataccaatatcccgctggcatcttacgggcaggatcaggaacatcgcggtattgtccgttttgaactgggtttccgtgtcggaaaactggaggaagcccgccagtcagcagccggatttgaggctgccgcagagaaacgcaatgctgttgccgaagcactggagcaggggcgggagcgtgtcggttactacgggtttaacagcccggacacccgcgtgtttggtctgctgaatgaaccgaatttaccggcgtatgagaccaccgccgcacgctggaaaggcggtacatttgccgctgttaccggtgatattacggccatgttctcgcgtctggagatgcagtccggcggtattatcaaagatgataccgttatcacgctgacgctgccgctgggttaccgctccgtactgagtgtggcaaaccctgtcgcccgtggtgaaacggtgtatcagtgggtaaaagagaactacccgaatatgcgttttgtgttctcaccggaattcgccggtgccaacggtggtgcggatgtggcctatatgttcgccgaaaacgtggatgatggctcaacggccaccagtgcggttcttctccaggtggtgccggtgaaataccagctgctggggtctgataatcagatcaagggatatctggaagatgccaccaacgcgacggccggtgtcattgtcacccgtccgtgggccattacccgcctgaccgggatctag

SEQ ID NO: 282118 - DNA, 165 bp, Morganella morganii
atggtttcgcttaaaataggcagtggtagaagcctatcattagaaattatgttatctactattttttatgacagcttattgtttgaaataacagacgataatggtgaaaagataaattactcccttctcccaaaccgtatttctttcaaaaaaataagatattag

SEQ ID NO: 282119 - DNA, 894 bp, Morganella morganii; identical to SEQ ID NO: 279729

SEQ ID NO: 282120 - DNA, 1023 bp, Morganella morganii
gtgctcagagagcacaaatctgttacggatgtaatcagtgctgaacgtaaaaagctttgggaaaccgaggctcagattgccattactgaagagtccagaggtaagcgccagttaaccaaacaggagcagacgttgctggcaaataaagcggcagtactggctcagcatgagaaactggcactattgggtgatgaagttgttgctcaggaacgcctgaataaacttcaggatcaggctgataaatacgttaagcagcagactgaaaagcaaaatgcaatccgcgatactatcggcaaatcttcgcgcgaagcgcagcaggctctggagaggtcgcaaatcctctccgctcatcaggacaatccgcggctgaatgaaatgctggcggctcaggcagcaacgtatgcagcggaagaggaaaagcgggctgactggcttggtggtgcacagactgcgtggggggattaccgtgatgccgcactggattcaaatgcgcagatccagaatgccaccatggctgcactgaacggattttcaactgaactgacctctgtgctgacaaccggtaaagctaatttccgtgagttcaccacgtcgatactgaaaatgctgacagaaatttttgttaaaaaatcgattgttatgggaatggatgcgatggggtttaattttaccccaaatgccaaagggggcgtttatagctctccgtcactgagtgcgtacagtggccaggtggtacataccccgacaatgtttgcctttgcaaaaggtgctggtgttatgggggaagccggaccagaggggatttttccgctgcgccgtggtctggacggaaaactgggtgtagtggcgaaaatggctggtggaggtgatggtgtagttcagcattttaatatcaccattcaaaatgacggcagcaacgggcagatgggcccgcaggcgacacagcaaatcctgaagctggttgagcaaaaaaccaagcaggttattgcatctgaacgtcgtccgggcggagcaatggggtaa

SEQ ID NO: 282121 - DNA, 1062 bp, Morganella morganii
atgtgcggtcatggcctgcgccatttttgccgcgtcctcctcactgatcgttttttcaggtggcatgtcgtacccaatctgcccctgttcattcaccgtgcggttaacggtctggtcaacctcaatatcatcatcaccggcaccaaaccagcttttaaaggccgcccagccctctttaatcttattcagccctttgttgatccagccaaggtaagcttctatctgtttccacagccatttgaaaataccaaccacagcattggagacgttatcgaaaaccccctgaaagctttttccccagttccccagacttttgataaaaccgagcagccagttccacaacaatttaccggcgtcaataatgagattgaaagcatcagctgccgctttgccgacaataacggcaacatcaataatgaaattaaacagttttttgaaaacgtcccacagcgccagaatgacggctttcagtccgggatatttatccaggatccggccaatcatcgaatcgttaccgtcgatgaaattcatgatgtcgtcatacaccagcgcaaacgctgccgccagcagggctatgaccgcaataatggcaataatcggccatgttgccgccagtgtggccgccgcagccgcgagcatcggcggaacgtaataggttgccagtgcgataccgactgcaataaaaaatcccgtgatcagggttttgttttctttgcagaagccgacaaatttactgacccattccaggccggttgccaggatcgggatcaccatctccagaaagctgtttttcagcagaccggaggactgtttaaaactctgcatggatttgttgaatttgacagactgctcaatgctctctctggtgatgccggaatattccttttgcacccccatcatccgttcgagttctttgcggcctttcatcatcagctcaacggttttatcatccgacacaccgagcgcaccgagtgtggctttggccttatcgaatttcatcccctgcactttgtcagccgtccgcaggattttttccatggagttaccggcaaacccgaatga

SEQ ID NO: 282122 - DNA, 450 bp, Morganella morganii
atggccgcttgtgccgccggggcgattgccggtgcgctggtgctgatccccgcatatgagggtgttgagtacaaaccttaccgtgatgtggccggagtgctcaccgtatgttatggccataccggcagtgatattcagcccggcaagctgtacacggaagctgaatgcaaggccctgttgcatgacgacctgacgaaagtccggcgcgcggttgacccgatgatcaaagtgtcgattgatgacaacacccgtgcggccatctattccttcgtttacaacgtagggcccggtgcgttctcgcgttctacgatgctgcgtaaactcaatgccggtgacatcacgggtgcatgtgacgaaatgaagcgctggacgtttgctggtggtaaacagtggcaggggttgattaaccggcgcgaaacggagaaagcgatatgccacggaaccctttaa

SEQ ID NO: 282123 - DNA, 435 bp, Morganella morganii
atgagtgagattgcagctgatattgcccgtgactgtaacgtgaccctgaattttcaggcaacggataaaaatatcggtaactggtatttctgcggtccggcgctgaaacaggttgaacggctgcaggaagccggaaatgtgaaagcgttcattgatgatgatgtgctgtatgtcaaagacagtgataaggcgctttcaggaagactgcggatcctcagtcagaaaagcggcatggtcggtataccgaaagccacggagaaaggcgttgatgtcacctaccttatcgacggggaatcatcccttggtggcatgctgcgtctggacagcaaatacaatcccgccctgaacggggattacattatcgagcagctcagattcgatattgcttctcacgacgatcctttcttttatcaggcaacctgcaaacgggcctga

SEQ ID NO: 282124 - DNA, 495 bp, Morganella morganii
atgagcctggacgggatcacgctggtgccgcacagcgtatacgtgtgtgttgagggcggggaaagcggggaaattgcccgtgctctgctgcgcaccaaaacaatcggggcggctttcaacggcagtgaggaggttgaggttccagagccggtcagcggacagacctataccgtaaaatttgatcgcgctaaagagattgtcctgttctgccgcgtgacagtgaaaaaaacatcactggatgcgcagacggttattccggcggcggttgagtcatgggcccggggcgaaaccgaaggggatggcgggctggttgtcggccgcgaagtttccccgtttgaaatatcggccggtattaatgcttctgaaccgcgtctgtttgtcacacgggtggaactgtcaaccaacggtacggactggtcatccgatacttatccggtaaagctgactgaggttgccggaatcagacgcagtgcggtacaggtggtgtttgtatga

SEQ ID NO: 282125 - DNA, 237 bp, Morganella morganii
gtgaaagcgctgcgcggggaaatgctgcacaaacaggataaggggatcccgtactggaaaaccacttttggacgacaggctgatctgccgctgtttgaatccgcgttccgcgagcgtatgcgggaaattccgcaggtgaccgccgtggtgtcattcagagccacgctgaatgataacgaactgaactatgtggctgtcctgcagacagaatacgggagcattacgttaaatggctga

SEQ ID NO: 282126 - DNA, 183 bp, Morganella morganii
atgacgtacatgtactatgtcttcaattttaatccggacgagcgtctgcgcgttctgctggaaaactttgatctgatgccgcgcccgtccggggtgggtgtcagataccgtattgtgacgaaaaaagccttcggtcacggcgaaaaccgtaaaaacttcctggaaagtaacttcggagagtaa

SEQ ID NO: 282127 - DNA, 183 bp, Morganella morganii
atgacgtatatgtactacgtcttcaactttaatccggatgagcgtctgcgcgttctgctggaaaatttcgatctgatgccgcgcccgtccggggtgggtgtcaaataccgtattgtggcgaaaaaagctttcggccacggcgaacaccgtaaaaacttcctggaaagtaacttcggagaataa

SEQ ID NO: 282128 - DNA, 213 bp, Morganella morganii
atgatcgttaattcgttgccgtttactgaagcgctgcggaaacaggggatcggggtgcagcgggcgaccgccatccgtctcccgtattttgttaacgaccgcggcgattacgaacaaaacccgtcttttgattttaatgtgacttatacccgcacactccgtccggaaacggctgctgttaccgcactgtacccggatattcaccgcatataa

SEQ ID NO: 282129 - DNA, 474 bp, Morganella morganii
atgacgtttaaggacagtgacggcacggactatgttgtcggtcaggtatggggcaagaagggcgcaaatgcctatctgctgtatcagatccgcaaacgcatgagttttaccgaaaccctgaaagccgtgaaattactggttgataaatacccgcaggcgcggcgcaagctggtggaggataaagccaacggaccggcggtcatagatacgcttaaaaccactgtatcaggattggtgcccatagagccggacggcagtaaaatcgcccgtgctcacgcctgcaccgctgaatgggaagccgggaacgtctggctgccccataaagatattgcaccgtgggtcaccgaaacggtggaagaaatcacaacattcccgtttgccgggcacgatgacaccgtggatgccatgacacaggcactgcggtatctgttccagaagaaaggcggcggattcttttcacgcaagaggacataa

SEQ ID NO: 282130 - DNA, 282 bp, Morganella morganii
gtgacagtgaaaaaaacatcactggatgcgcagacggttattccggcggcggttgagtcatgggcccggggcgaaaccgaaggggatggcgggctggttgtcggccgcgaagtttccccgtttgaaatatcggccggtattaatgcttctgaaccgcgtctgtttgtcacacgggtggaactgtcaaccaacggtacggactggtcatccgatacttatccggtaaagctgactgaggttgccggaatcagacgcagtgcggtacaggtggtgtttgtatga

SEQ ID NO: 282131 - DNA, 192 bp, Morganella morganii
atgcgcaatatgcacaaaatttgtcagggcagaacggttatcatcatagctcaccgcttatcaacagtaaaaaatgcagatcgcattattgtgatggaaaaaggacaaattattgagcaaggaaaacacaaggatctcctctgtaatcctgaaagcctttatcactatttatatcagttacaatcagattag

SEQ ID NO: 282132 - DNA, 642 bp, Morganella morganii; identical to SEQ ID NO: 105789

SEQ ID NO: 282133 - DNA, 552 bp, Morganella morganii
atgatcttcataactacacagcgactcattattcgcgcatttaaaaacaaagatgcatctgcacttttcgattatctgtcttcacctcgcacaccttgttttcaagacgaaaaactcaattcactggatgatgcgataaaagagatcgacagacgaatccttgataacagccagtttgccgtttgccttaaagagactgatgaattaattggtcatctgtttgccgataatagagaagagtctgacagaaacacttggtcagtagggtggcattttaacaagagttacgaaggtaagggctatgctacagaatctgtcactgcactgtttcaatatttattttctgaaaaagaagccagacgcctttatgcatatgttgaagactacaatttggcctctcagaaactatgtgctcgcctccatatgcggcaggagggctgttttaaagaatttgtctcgttcatacaggatgatggtatagaaaaatatgatgatacatttattttcgctctactcaaaaaagagtgggagcagttattgagtaactactaa

SEQ ID NO: 282134 - DNA, 534 bp, Morganella morganii
gtgattcagttaagagaagctcagtacagtgatgccaatgcaattgcacatctgcatgccgccggatggcgagatacatataaaaatgtgatgtcttcagacttccttgaaaatcatgcgcagaatgagcgactttcccactggcagtctgtattgaaacaatgtagccaggatgtggctgtctttgtcgcagagaaagaaggtaacgttgaaggatttatatgtgcaatcctcaataaggacgctcagtggggtagttacatagacagcttacatgtaagttccgcactgcgaggtcagggaacaggaaaaaaattgctccatcatgcggcagaatggatatgcagcgaagattctaactcaccgctttatctgtgggtttttgaagataacgtcagagcctcacaactttacctgaagctgggaggcgttattacggagcatgcaatatccgatatgccttcgtcagataatgcccctgttttcagaatcagctggaaaaatgccactcaacttgtgatgagcacctgctga

SEQ ID NO: 282135 - DNA, 399 bp, Morganella morganii
atgaaattacttgttgttgcagttaccttactgtctgcatctgcaatagcggtagagcagtgtaagccggacgacacctgcgtatcatatgtaccatttaacgctaaagataaaaattttgagattaaatgtaaaaatatcgtagcccctgaaataaataaaaatcaatatgatatggttgagttatcttttgacatcattgaacctatcgatataaaagataaatcattaataggcgggtatagtttcgggactctttatattcttaacaagaagtacacagatttaagggcggacacgagtgtttcttctggtatgtctgtatatgttgatggcggagaacaagttaacgctgccaatgctctgatcagctgcgttaactcccttaattcaaagtag

SEQ ID NO: 282136 - DNA, 228 bp, Morganella morganii
atgactgaagtaacaaaaggaatgtgctgtgagggtgggcagacggttatcaaaattatggtgaataactgctgtaagtgttgctgcgggcataattgtgaggagccggaaaagccggagctgacatgtccgcctgtaccaacatgtccgccggtaacaccgaaaccaactcagtacccgacaacaccgatgccaacatttactgatgaggccacaacgccatattaa

SEQ ID NO: 282137 - DNA, 495 bp, Morganella morganii
atgggacaggggaaagagattacacaggatatgcagcggactatcacccgtctgtgtatcgagtgcgggctgctgctgttacagcacggtgcggaaagcatgctggtggaggagctggcgggacggacaggaaaggcgctgggggctgaccaggtggattgcgccatctcggcgaatgccattgtgctcaccactatcattgacgggcactgcctgacatccacccgcaaggtggtcgatcgcggtattaatatgcatatcgtcacagaagtgcagcatgtggtgatcctcgcagagcacggacatcttgactgcaaaggggtgcagaaaaaattcgcccatatgaaaccgctgcgctatccgcgctgggtgatggtgctgatggtggcactgtcctgtgcctggccgccacattctgggcatcggtgctggtggggatcatcggtatccagtggtcccgctggtggctggcacatccgaaagtctttaccgtag

SEQ ID NO: 282138 - DNA, 417 bp, Morganella morganii
atgagagcaacacattccatattcaatttttcacttgatgaagagattctgattcagttctcgtttgctaatgtcttagttgaaacagttgattcaagttctgaattacttaaaaaagaaatacgaattagcatccaggagaaagtagagatttttgactctgcacatgagagcgcaagatatagtagacctaagctccttgttgcattaggtgttcttagctttataactgggcggaatttttctgtttatgaagtaaccagttcaagctcttccgtttcgagtataaaagagaacaaaataaaggatgttaaatgtataatcgaaggagatgattattcaagtcaacttgaggctatttgtaatagtataaatgacgaaacaggttcaaaaaataccttattttttcattgttag

SEQ ID NO: 282139 - DNA, 1371 bp, Morganella morganii
atgaaaacaaaatcactctttcttctgataccgttattactatccggttgtgaccagacggtggtaaaagagatcggcattgaagaattgtcggagaacctgaacaacccggaatatattattatcgatacccggccggacagtttatatttcggctttaaagataaaggcgcggcccgcggcggccatattaaaggtgcgatgcagtttaccaccggctggctggattttatcgatgagaataagttcgatacgtttgtcgaagaaaaggggatttccaaagaaaaaaccctggtattttacgacagtgacccggattcactggaacgtattaccgccgaatttgctgccaaaggttttcaggtcagggcatttaaatcctttatccagtacagcaattctgatctgccgatggataaatacccgaattattttctgagtgtttctcccgcctgggttcaggccgcactgaacggtgaaaaaccggaaagttataccagtgatcaaaagccggtgatatttgaagtgtcgtggggggatgcagaacaatccaaatcctatgcaacgcatattaaaggcgctttccattttaatactgactggatagaaaatgcgccggtctggaatttatccgaacctgacgttatcaaaaataacctgctgaaaaacgggatccgcaaagataccccggttgtcgtctattctgaaaatcagatggcagcattgcgggtattatgggcactgaaatgggcgggtgttgaagatgtccgtttcctgaacggcggtttaaatgtctgggcggatgcggaattaccgactgaaactaccctgaatattccggtaccggttgcggatttcggcgcagaaattccggttaatccgcaggtcactattgccatgccggcggaagccatacagggtcagaaatccggccttaaactcatcagcaaccggacatgggatgaatataccggcaaaatctccggttatgactatattccgcgtaagggtgaaccggccggggcaatatggggattcggcggcaaaaattctaatgacatgtccgattactatgacccggacggcacattacgtaatccggaagagatttttgctttatggaaaacccagggtattgaaccgacagaccaggtcgcgttttactgcggtaccggctggcgggcaagtgtttcctggtttatgacccaactggcgggctgggaaaacagccggatttatgacggcggctggaatgcctggcagatggatccgacattaccggtattaaataatattcagagccaaaaaccggcggcactgaatgattatggtgaaataatcaaaaaaccgggacaatcctgtaaaagctga

SEQ ID NO: 282140 - DNA, 258 bp, Morganella morganii
atgatatggtttcaaaaagcagcagaacaaaattatgctaatgcgcaatataatcttggcatgatgtataaaaatggtgctgctggtgttcaggataacgtactggcaataaaatggtttctcaaagcagctgaacaaaatcacgcctctgcacaatttaatcttggtatgatgtatcagaatggtgatggcgttgaaaaaaatgaaaaagtggctcaggagtggtttcagaaagcagaacaacaaaaaaccaaatag

SEQ ID NO: 282141 - DNA, 2274 bp, Morganella morganii
atgaaaaaacggattttaacggcagtactgttattcagtggtgtatttctggcgggatgtgatgaaaaaacgccgccggctgagcagtattatattgtcagcgattttaacattcagttatttgatgataaaccggctgatgaatatgccggtattgtcagtaatataaaaaaaagcggcgataatacgtatctgcgtgctctgccggataaatcactgacctggtacacacaccggactgaaaacgttattcatccggataatgacggttattatactattgatatcaaccggttcagattaaataacgccaatccggataaaccgcagctcatttttgataaaaacagcgcctgcatacgggagtgtgccattacgatgacactgaaaccggtggcggaggacagcaatgaaatccggctgataaaagcaaaatacgcgatgctgaccgtactgctgtcggcaggatatttgtctcaggcggacgcatttatacaatatcctcaggccggttttaacggcagacacgttaatatcggctggccggacatatccccgcatagcctgaaactgaatttcagtgatacgctgactgaaataaaaccggatgatgatgacgatatcaaaacgtatttttcctggtttaatctgccatatcagccggataatatccgtgcttatcactataccggcagccgctatcataaaggcgtgataatcgcagtaaaagacagtgacccggtgacagatttacagccggttatcaaaaaaatgaatgcgaccgtatttgatgaaggacagggcgcggttttttattctgatacggaatcgctcaccggattgtattattattacgatgcaccggcgcgcgttctgtatcttgctgtattatctgatggtttcagagcggtttctgactcttttctccgtgattatacggttatccgcacactgaatccggataacgccggtattatggttcaggaaagtgatctggcagcagacagcgcgacgtttgagaaaaaattcaaatcaccgctgaatgatgatagtgataaagacagtctggccggaatagtgacagacaaggtgaataacgccattgtttcaccggaattctttttccgttatccggaaaatgcaacaaacggcagaataggaattagtttaagccgtttatccggtttctttacggataatccggtaactgtatttgcaacgttacataaagcaaccgttgcggaattgctgacggaactgaaaaaagaatatccgcagggccggatttaccgggatgtttttattaatgactcaccgccggttttttattttctgggggaaacaaataccggactgacactgaaatatacatttcagtcagagaatgacaccgggaatgacctgatgactcaggtcattatcgcgcagttattgcgtcagatttcgccattacagcttagtcctgttgatcctgttcggctgacgcattttcagcagtatcagatggacgagcgttatatgagcccgggatacagaaccacagaggataatgaatttatcagtttcaatagcctgttattgcgtgcagataccggtgaagtcattatccgtaatccgccggaaaatcataccgtctacacgagagaaaacggcctgattcaggcgcgtgatgctaatttaaagcatgatggcgataccctgagattgtataccggaaaaggcgaatttattgtcagcggcagacgttttgaatttaatgacgaggggaatgcggttaccgtgacacagtgctgcggaaccggggtatttgatctgaaccggcgaaagtggctggttgaaccaaagtttgcttatatagccgattataatggtttttatattgccaaagtgcatttccggcaacccgctaaggttatatttaatcaccggggtgacattctcggttacggaacatcaattatcacatcggccaaaaaccggcagatccttatctttgacggcacaattgacagcggccggtggcttaatgatgacggtacggcatcagaaaatccggtggttaccgaagccattacgttacagcagggaacattttatattatccgcatggatgaccggattatgctgttaaatgagcgggcggacgtcattattcctgcatttgattacagtaaatataaaaccgggaaaaccggtctgtggctctggtcggtcagagaagataaatgggtacagcctgatcttgaccggatattccggaacttatacggataa

SEQ ID NO: 282142 - DNA, 921 bp, Morganella morganii
atggataatgacgcaacaattcctgcaacagcgaccggcccgttgtttgactgtgacagtgagctgataaagctgattgcaggcagtaatcacgggcttgtccgtgcggaaaaggtcactgcggacaggctggggatttatattgaaaaccgggatatcaacgagctggcgatacagctttctgatacacggcaaaagccctcgccggaatcgccgggagcagggcaactgggctgggtgacttacaatatcaaagaaaataccctgacagcgacaggggcggatgtggagcatcccgtcccgctgaccttcagtgcagcgcagggtgaacggctgcaatcctgtctgaaaaaagagaaaacgtgtcagcagatcctcagtacgctccgctacgaaccctttattgccatgtcgccggaatggcgcgtcaccggcaaaggccgggcttatttttatgcagcaccggcggaacagtgccgtaatgataatgtctttgtggttccgggggatgtccttcaggtggtcggattgcggactacggaaccggtgaaaggggaaaaagagggctggctgctggtggcttacggcaatgcgcagggctggattaatgttaaccggctggcgtcacaggacgcgctgtgcgatgcggcaaccgaaaacgcggacaaacagtatcaggcgggcctgaaaaacagtaaaccgtcctcatacaaatacagtgtgacacaaaatcgtctgcgtttttatgatgctccggataagggctgtattaccggtgctgcggattttgtggtgaaagatgattcggtctgggtggatcgtcctcagccgtatcagggatttgttcatggccgttatatacatccggcgaccggtaaagtcacagagggatggctggaagcagacggacttaaaagatga

SEQ ID NO: 282143 - DNA, 312 bp, Morganella morganii
gtgaaaccttcagcacagcccggacatattgaccatataaaacaaaccaatatgggggttgtgtaccgttatattgatcgtgaaggccccatttcccgcatttcactctcgaaaaaagcacagctggcaccggcgagtatcaccaaaatcacccgtgagctgatggatgcgcatctggtccgggaaaccgagtttccgggattaggctttcgcggccgtccggcggtggggctgaaaacagattgtgacggctggcattttttatgtatccgcattaaccgggggaactggtttttgcgctgcgggaactga

SEQ ID NO: 282144 - DNA, 771 bp, Morganella morganii
atgttccggcgataccggttttctgttattaccgcatttctttttcttttatatacaagcgccgcgggagcagaggtatcgctcagctatttctatcagccggatggctcacgcaaaattgcgcctgacaatattactgcactgaccgggcagtttctcggcgtaccttaccgcgccggtcagctgattggctctcccggatcaccggaaattctggtggctgacctgaacgcgctcgattgtttcacttttctggattacaccgaagcactgaaacgcagcccgcagaagcaggatttccgcaacaggctgatgcacatccgttataaaaacggagaggtaaattactatcagcgccgtcattttttgtcggattgggtcagcggcccgcagcctgtggctcaggatatcacccggcaactgtcgccggattaccgggtgacacacaagatgctgaatcagaaaaaaaacggctcccgttatatcccggatattccggttacggcacgggatatcacctggctgccggtttccgcgctgacacccgctgtgctttcacaattgcggaccggtgattatatcggtatctattctgaccgtccggggctggatgtctcgcatgccggagttattatccgcaccccggacgggctgtttttacgcaatgcctcatcaaaacggaatgaacaacgggtcattgattcaccattacggacatatctgcaaaataaaacaggaattgtggtttatcgttcggctttttccccctga

SEQ ID NO: 282145 - DNA, 435 bp, Morganella morganii
atgaatatcttttacctttatattctgctctatcaggacaaaatcgtcgtccgggatgtcagaacgcaccgcgaaatgacaggaataccggaaacgccttttaccacaagccggctgctggtcggggatatgctctctgctgccaaaacactgcagaagacggtttcacgcctgacttccccgctgccgttgtggaaaaaaatattcagtccccgctacgcggtgctcgttcacccgatggaaatgcgcgaaggcggattatgcaatgtggaaaaacgtattttccgggaactggccggttttattgccccgcgaagaacaggtgcggtgacagcctatgtatgtgaccatcccgatatgcaaccggatcagctggtactcgatgtgatgtccggtaaatttaaactgacggatgaagaaaaaaacgccttctga

SEQ ID NO: 282146 - DNA, 519 bp, Morganella morganii
atgccaactccatgctatatctccatcgaaggtaaaacccagggcaatatcactgccggtgcgtttaccgctgaatccgtcggtaacatctatgtgcagggtcatgaagatgagatgctggtgcagcagtttgaccatatcgttaccgtcccgactgatccgcagtccggtcagccatccggccagcgtgcgcatcgtccgttcaaatttaccgttgcgctgaacaaagcggttccgctgctgtacaacgccctggccgccggggaaatgctgccgaaagtgcagctgaaatggtatcgcacctctgttgagggcaagcaggagcatttcttcaccacgtcgctggaagatgcgactattgtcaatatcgactgcaaaatgccgcactgccaggatccggccaaatcggactacacccaactgatcgaagtgtcactttcttaccgtaaaatcgactgggaacataccgttgccggcacctccggtgctgacgactggcgcgcaccaatcgaagcgtaa

SEQ ID NO: 282147 - DNA, 1938 bp, Morganella morganii
atgaaaaaaaaggttattgcaatccccgtgctgttggttattgcggcgggaatgacatactggtttttcgggtatgaggaaagattaccggagccgtcacaggaaaccctggactatataacaaaagagtttaacgacctgacgccggaagaagcagtaagaaaaatacagacacagaaagatcagtttgatttttttctcgggataagaggaaaagatgagctctatagccagagaaagacggtttcatctgaagatgaagaatacgaaaatgcattttctgttcttacgccggaagaatataagaataaatttaataaagcacttaaagaaataacgtttgttcaggatatagagcatggctattccactcttgatattattattccggtcatgccggcagagaaacaacttgtggtgaaaattaaaaaggtcacctacatggatggcagtgaagaaataaaagatataaaagtcaccaaagcagatgataatataagtttaaatacacagaaaaccattaaaagtattgatgccaatgttacattccggtatatcagtgaccttggccgttatcacctaacaccggataatccggaaatttcacagggcgactataaattaacactggtaaaaaaagataaaaattatctgaaatattcgctggatggtgagctggatattgtcagcgaaaatgttactgatgaaaagggtaaaatattatcatcatctgcctgttcaagaggggcggtcggccatgttgaaaaaatggagcgctttattaatggtacagcaaaagcggctgaaaaatacagcaagaacaaagatgaattaataaaaagagttgccggttattatgagcgctttgaacaggaaaccgacgaaccggcaacttacctggttgaatgtacctaccatggtacgccggaatcagtggttgtttacgctgcaaataagcaggatcgtgaagaacgggatattacactgacgccccgttataccagtctctacccggttattgaagatgagaaaacacaaaccttttatatcatcgaccaaaacggtaatgagataattaatcatggcaaggagggcgtgtacagtgtggggaacggttatttctttacccgccatactgagaataaaaaagatgagaatgacggtgaagagtatgaatcaacatactatcagattcataaactggatacagtaaataaaaagctggactatattatgcgcgccaatcgtgtatacagtttatctgatgatgcgtttgttgtctctgatggtaatagcatccggatatttaatgttaattatgctgaaccgatagtcatttccggtaaaaatacggaagcggatatcgttaatagtcatgatggcagttttgagtttttctattatgaagacagtaaaggaacacatgtcctgaatgataaaggtgaggaaattcttcctgtgtctgattaccggatggaaaaaggcggagacaatacaatcaaagtcagaaacagtatctttatggatgatatagcaacgaaagataaaagaatctattttatcaatgaagatgcaacaatccgcctgacattaaaaggctatgataaagccggtgaaatcagtaatgagatgataaagacagagaaagatgatttatacggattcgctgatgtaaaaggaaatgaagtggttgctccgggttatcaggaagcccgtgattttgataatggttatgctctggtgagaaaagatgaacagtggggcgtgattaataagcagggcgacgtggttattccgtttaaatacagtcatcataattccatgtcatccatgaacggactgatatcttacagtattgatggtaaacactacaccatgcaggaattactggacgcaaacggtgtgaaaacagacaaaataacagcagcagaacattaa

SEQ ID NO: 282148 - DNA, 483 bp, Morganella morganii
atgaaacggatcgtcaggaaaaatccattcagcttttccggtatgttacccggcctgctcgctatggccgccttcttttttgcgcaatatcagaccgataaatacattgaaagccgtccgcctgccgaacaggtggtttacaacaaaatcagtgccatgaaacaggcagccaaagcggcattgcggggacatgagtatcaggcggaaaccacaccggcggatgcagagcggcgcgcgttatcggagtcagcccgttatgcgggctataccggaacggcactggcactgctggcgctgctttttgccggagccgggtttatgcgcaaagagaataaaatcgccgcgcgtattgccctgctgtgcggcggtggtgtgattgtggcggagctgtttctgtttgccctgaccggcatcgccgtcattgcggtaattgcgattctggcggcggcactgctttccgccgattttttctcaatatgctga

SEQ ID NO: 282149 - DNA, 1200 bp, Morganella morganii
atgcttttattgcttgtttccttagtgggctaccatatggatttttttgaaaaaactaatgccgataaaaattcaataggttttacctatcaagattacgttgctttaaaacatgccttagagcttaaaccagaagaacacattggaattgaagtttatgatgatctccatcttgagagcatcgaagggcataaaacctttatccaagttaaacattcaatcaacaagtctaatataaccaataaagacatagatttatggaaaacattatataactggtcagaagcgataaagaccataagcgacaaaagcattagccttattttttacactaacaaaggtcttaccttagagcctggtatcgtgcaacttttgactaacgacactaaggacattgaaaaaataaaagatgaaatagaaaagatagaacaagaccataaaaataagtcagatgacctctataagtatatttctatcataaactcactcgatagcaattcttctaaacgtttatttagtagtataagttttcaatatagtgaagatgggatcatccgccaaataaaaacattactaaaaacattagcaatccctgatgataaaatagatgatgcttttaattatatttcaggttctttttttaaacataaatatgatctagttaaaaatcacaccaaaataaatataagttatgatgattttcgaaataatttgggaatagataggattattcaaatttcaagaaattgtataaataattttgaccaatactacgattttgaatctgcatacccaactaatattgaatcaaagatctcttacaaacaactcaaagatttggatttgaatagcgattcaatcgtaagatatataaatgaaatggccaaaacagaagctttcattcaaaaattgcaaagctctggagatttaacaactcaagaagaaagactaatatatcaaaaagcgcttgatgaatggcaatcacgtcattcagcaacgtatatacgaagccgttttacagaaataaatgaagagcatcttaataaagccttctctgtctatactgaattgacaggaaactgtaatattgtgctggataaaaatcaattacctaaatctatgactacaggaacgttcttactcctttcagataagcccaaaataggatggcttcaaaactgggagtcagtctataaatga

SEQ ID NO: 282150 - DNA, 447 bp, Morganella morganii
atgaaaatatataacaatgagcttttgggtatattctctttacaagaggtgttatcaatagcattaaatattgaaataagtaatgtaatgctaattttaccaattatatttcataagaaaagcttagattaccttgcccacaagagaaccaatacactatcttttcaagatctactattaaccaagcccgaaataatagtatccataaataaaagattctataatttccttccatcctcagttaattgtgtttcattgtgccttgaaaatggaatagctgaattagaacacggtaaattagcatttaaaaataagttaatattagatgatgcgctcccgtttattggcaaaagagccgtaaaaatacaggcagcatctataaatattgcacgtttattattagaggaaccacacaatatatatgacatttgtggagttagattataa

SEQ ID NO: 282151 - DNA, 291 bp, Morganella morganii
atgagcgaacagaacacagatggttatatgcaggttaattatccggttgatgcagttacgccggataagtttgcggaattgatcgggaaaacgtcgtcagcagtaaagacgatggttgataacaataagcttccgttgattaagtgggtgaaccctgatctgaaaggtaatgtgaaagcacgtggtgaaaactggatttacattccggaatttaatcgcgctatgcgtgatgccttccagaacagaccaaaagaattacgtgatgcttggctgctgtgggttggcctatga

SEQ ID NO: 282152 - DNA, 2310 bp, Morganella morganii
atgaccggaaaagtcattgatttcagcgtgcagccgccgccggaaccggcggtttttgcgtatgagtggaacaaaaagcgacatgaggcggtgctgggttttgagctgccgttgtctgccgaacagttacagcagcatcaggcattgcttaatgagattgagcggttgccgcgtatgctgcgctttccgttcagaaagcgttatgaaaaagttctgtcagaagagggggtgaagaaagcgcactattatctttacttcaccttttatcagaaagttcttccgcgaattaatgccgttaatgcccgcttttcatctgctgactcagggaggtttaacttgctgcctgagatgtcagataaagctgttaaagggctggcaaaacaattcgcgaaagcgttttttgagcgcattcacacattgattgatgaagtatcggcaatcagtccggaggctgtttttgagcctttgtatctttacgagctttacggaaaagtcgccgaagatgcaagggcactgcatgttaccccgatgtattacacaaaataccgcgagtgcacgattaccgataaaaacgttcactctgcacttgcccgcctggtcaatgaggattactggctacgccggttacgcacgcaccgtacccgctggcgtgaggggttatttatctcggtgatggcagttaataaaaacaagcgcccgtatgccagccgccaggcaattaatgatgtccgggcgcagcgtaaagcgaacgaagaatacctgaaacaaatggatattgaagacaccgaaaccggcgagcggtttgatttgtttgagaaagttatcggcagtatagccaatcctgagatccgccggatggaactaatggcgcagatccgcggcattgaaaatgttgcggtacagcgcggggatatcggtatgtttattaccatcactgtcccgtcaaaataccatccgactaaacttgtcggtaaaaaaggcgagaaaacagcgattattaaccggaactgggcggatgaggcgtacacaccgaaagatgctcaggcttatcttgttcgcgtctggtcaaacattcgtaccgctttcaaagattacggtctgaaagtttacggcgtgcgcgtggttgagccgcatcatgatgctaccccgcattggcatttattgctgtttaccgataaagccagccgtgcggcggtgattgatatcatgcgaaaaaaagccctcgccactgatggtgatgaaaaaggcgcaaaagaacaccgctttaagtgtgagcacatgaataaaggcggtgctatcagctacatagcgaaatacatttctaagaatatcgacggatacgcgctggacggcgaaaccgacttcgataccggaaaaccactgagcgacaccgccgcagccgtgaccgcctgggcggcaacatggcgtataccacagtttcatttttataacctgccgtcaaaaggcgcttaccgcgagtgccgcaagttgcgcggaatatctatcgctgagcaaattggtgatgtggcagagaaggtcagatttgccgcagacaaggggtattttgatgattacatcatttcacagggagggccttgtaccccgcgcaacctgcaaacaatccgggtggcgaggcgcaccgctgagcataaaaaccagtatgacgaggctgtgccggaggttttcgggatctattcaccatttggcggggatattattacgacccgcgaacgtaaataccggattgttaaaaaacgcgacagtcaaaatccggcatcggttgcagttggttttgattttaatcttttaaagggcggcatcgccgaccctcggagtcctgtcaataactgtggatcggtgatctcaaccgatggtgataaatcaccagatttagcaccaaactacggcatgacaggggttcaccaaataaaacagtggggttcatgcctgagtcataaggctgctgagaaagcggtgcatgcagtagaaacggtacaaaccgccagccgggttaattcccgcatcactttaagcgacaaagaaatcgcatttatcccggaaatacagaaattcatcgccactatggggcatgaaataccatcagacggactgatgatgatgtttatccgtggcatgaccgttgattacggtgatcaaaaactattgttccgtgatggccagatacggctggagctgggggaagaggtacaagagagaagcagggagaaactgcgcatggggaaagggcaaaaagtagccaactcattaattaaattaaaatatcgaaatacatttaatcaccataaataa

SEQ ID NO: 282153 - DNA, 1023 bp, Morganella morganii
atggctgttaaagtgatagaccttttttgtggcgcaggtgggttaactcatggtttgcagttagctgggcttgatgttgttgctggcattgaccttgaagaggattgccgtttcccatacgagaaaaacaataactcaatctttttacaacgggatgttacagatattaccggaaatgagttaattgacctttatggtgatgccgcaataaaagttttagctggttgtgccccatgtcagccattttctacctatacccaaggaaaggataaagctaaagataaaaaatggcctttactttatgaatttgaacgtctgataaaagaggtatctccagaaatcgtcactatggagaacgttcctgatgtgacaaaacataaggtatataatgatttttatgattctttagtgtcacaagggtattgtgtttgggcatctaaagttgattgtgttagatatggtattcctcaaaatagggtaaggcatgttcttttagcctctaaactgggtaatattgatttaattgaatatgaaaatataacaataaaaacagtaaaagatactataggacaattacctaaaattacagatggacagatacattcaacagataagttacatagggcaagtaaattaagtcctattaataaaaaaagaattatccattctcaacccggtggtacttggaaagactggccaaaagaattaatttcagcatgccatttaaaatcaagtgggaaaggttatgctagtgtctatggaagaatgtcatgggataagccaagcccaacaataacaactctttgttatggttttggtaatggaagatttggtcaccctgagcaaaatagagcaatctctttgagagaggcagcattattacaaacatttccaatggaatatttgttttttgaaaaagaatcagatctaactataagaagtatcggtaaaatgataggtaatgcggttcctgttgagttgggtaaaataataggaaagtcaatagttaaacatgttggttaa

SEQ ID NO: 282154 - DNA, 678 bp, Morganella morganii
atggatagctttagagaggattttgataatagatctggtgaaatctatgcatatcttgatttattgaaattccttgaaaatgctggttctgagatatgttccttagactccaaggaaaaatatccaatctcctcagatgttagaaaaacattaaagggagctgtctacattttattatataacttaattgaatcaacaatgagagaagccatttgttttattcatgagagcatttacgaaaaaaacatatcatttgataatctaaaagacacattgaaaatagaaattctcaatagaattaaaaatgaatcttgtgctataacagctcttgtttctaatttaaacaacaatctatcctgtgggattactattggaacctttaataaaaagaaattattttctggaaatattgacaatgatgaaataaataaaaaatctaaaatatatggattttcaacttctaccgattatattcatacaaaacatggagaaaaactatcaacagttaagagatacaggaatgatcttgcccatggcaatgaatcattctccggcataggtaaaaatgtatcatatcaagacttagaaaatacatccttagaggttattgcatatttagaacaaatcactcaaaatattgaaagatatataaacaatagtgagtttcttgaacattaa

SEQ ID NO: 282155 - DNA, 1143 bp, Morganella morganii
atggacattattgaacttaagtctaatcttgatacagagaatgatcctaagatcagggctgaaattcttgctcaactagaggtcatcaaacataatgcggaagatcaaattcgaactgaacaaaaagatgtcgattttgaaacaaaagaatttactattgagttattgattaataaatatcacagcggtcttgaagatgattctaacgaactctttgttcctgattatcagcgtgattttgtttggagtgaaaaaagacaatctcgtttaattgagtcacttatattaggatttccaatcccttatattttcactgctgatgttctatctgaagacccagatttagatggaagaattgaaattgttgatggttcacagagaataagaacattacatgcttttgtacataataaattacctctacaagatttaaagtcgttaaataaattaaatggatttactttccaagatctaccattatccagacaaagaagatttatgcgtattccagttagagttattgagttaagctctaagtgcaatgaagaaactagacgtgatttatttgaacgaattaactctggaagtgatattcttaaagatatggaggtccgaaaaggctcggaattaggttcaactaatttatacacatgtgtaataaaaccatgctcagaaattccattatttaaggaattagcaccattatctgaaactaaagaaaagcgtgacgaacgattagaatttacacttcgcttctttgcatatttagataattacaaaaactttgatcattccgttcgtgattttctgaatgactatatgcatgagaatgggaaaattggtgatgaaactcaagaattaatgatttctgaatttaaacatgttttagaatttgtaaataaatatttcccctgcggttttaaaaaaacagcaaatgcaaaatccacacctcgcgtaagatttgaatccttagcagtaggaacagcattagctttacgtgaattacctactctcaccccgaataatctagattggataatgtctgatgaatttaaaggattaacaacatcagatggtgccaacagcaaagtaaaagtaatagaaagaatagagtatgtacgtgataagttattaggagattaa

SEQ ID NO: 282156 - DNA, 543 bp, Morganella morganii
atgactgtgattaattattatttcaaccatgagcatccgttacacccgttcaccgggtctgattatgcgaacaaagattcctttgcgccagctaatgcgctgcgggttaaaccggaagcacagccggaattctggccttgtgaacaggatggcgcgtgggttcttgttcctgatcaccgtggaaaaaaagtttatgatacccgcaccgcgcaggagtcagaaattaaagatctgggtgagttgccggacggtgtaacgactatcgtgccggatgttgaatttccgaagtggaacggcaaaaggtgggtgacagataaagcggcgaaaaaggaaagtgatatcgcagcggcagaagcacaaaagcaatacctgattgccgaagtcaacaccgaaacccaaatgctgcaaacaaaactggcacttggccgcatcaaagaggatgaaaagactctgttaaacgcctggctggattatctggatttactggaagccgtggatacctccctcgcgcctgatatcgattggccggttaagccgcagtaa

SEQ ID NO: 282157 - DNA, 1116 bp, Morganella morganii
atgataacaagaattttttttcccgtaggacaaggtgcattttatgcggaaaaacatgaaaaatttaatatggtttatgactgtggaaatagatggaaaacaaaaaaatctcaagaagttgtcaggcaaagcttcacaaaagacgatataattaacatattatttatatcacatttggattatgatcatatctcattaataaaaacactaaaagatacagtgaaatcaattgaacgtgtagtgatgccattgctaagtagtgaacaaaaaatattaattagcgctacttatggaatggatgatgctgatatttatcatatggtaaatgaccctaaggtattttttggtaatgaaactaaattcacatatattgaacaatcaggagtaaaagaatttaacccagacgagaatccaatattctatgatgatttatctgagcgtatagctagtgggacaaaaattaaaatggggaacaatagtgctaactataactggtgttttattccatttaatattgaaaataaaacaagaagtaaagaattagaatgtaaattaaaaaaagcaggtttaaatgtcagtgagttaaaaacagactctctaaacacattgcgtaaattaatcgatacaaaaagtaagaataaaattaaaaaaatatatgagtctcttaatggtgatataaatgaaaactcattggtgatttactccggaccatatgatattagtagaaaatatgcaattttaaattatgatttagatcatgaaacattgtttagataccttgtgtcttgcgatcattacttagaattcccatgtgatagagtggcttgtgtttttactggtgacgttgatttaaatgaatttgatataacaaaagtgtttgggagttattggaacgcagtaggaactgttcagattccacatcatggttctttgcatagttttaaacctgattttttaaaatctaaaataatgtactgccctgtttcatttggaactgaaaataattatggacatccgtcttacaatgtgattagtgaaataataaaagaaatgtcatatgttataaaagtaaccgaaaaaatggattctggatatgtgcaatatattaatatataa

SEQ ID NO: 282158 - DNA, 1110 bp, Morganella morganii
atgacggattttttcctcaccggtactgtgagcaccccggcatattcgctttccgccggatccgtcaacatcaatgagcggattcaggggcggctgatttccctgtcactgacggataaccgcggatttgaggccgaccagctggacattgagatcgatgatgccgacggcaaaatgatgctgccgaagcgcggagaggtattatcgctgcacttaggctggaagaatgaaccgctgatttttaagggtaaatttaccgttgatgaaatagagcacagcggcccgcctgacaagctgaccatacgcgggcgtagtgcggatttccgttcgtcactgaacgccaagcgcgaggtgtcctatcacgaaaagacactgggtgacatcatcaccactattgcaaagcggaataacgtggagccggtgatcgagaaaaaactcgctgagattaaaatcgcccatatcgaccagaccaacgaatcagacggctcctttctggcgcggctcggcaaacaggagggcgctgttgcggccataaaaaacggccggttactgtttatgccgcagggcagcgggaaaaccgcgtccggcaaactgatcccgccgctgctgatcacccggtccgccggtgacggctaccgcttttcactggccgaccgtggcgcatacaccggcgttatcgcttcatggctgaacacccgcaagccaaagaaaaaagacgaggttaaagttaaacgtaagcggaagaccaaaaagaaaagcccggagaaaattaaaaaaccggatgaaccgcaaggggattatctggtcggtgacgaggggaatgtgctgacgctttcacacacttacgcgaacaaaaataatgctgaacgggcagcgaaagccgcctgggaaaaaatgcagcgcggcgttgcatcgttgtctctcaagctggcaaaaggccgggcggatatttacccggaaatgccggttaaagttcagggatttaagccggaaattgacggcgcagaatggatactgacgaaagtgtcgcactccctgaatgacagcgggtttacatctgccctggaatttgaagtgaaaatctctgatgttgaaatgggtgacggataa

SEQ ID NO: 282159 - DNA, 219 bp, Morganella morganii
atgatgaaatgtcctctttgcggcgaacttgcccgcacccgcagttcccgcgatgtcaccaccgaaacgaaagaacgttataaccaatgcatgaatattaattgcggtgcaacgttcgtcagtcatgaaacccttgcaagatatattacaaaacctcaactgatcggtgcggtggttcctcattcgattgataataagcaagtatcacttgggttttaa

SEQ ID NO: 282160 - DNA, 783 bp, Morganella morganii
gtgcgtctgaccggcgacagaacccgcgcaggtaccggacacacacactttaaactgaatcaggccggttttgagctgggtgcggataaatctgtcccgctggaaaacggcaaattatggctcggcgtctttaccggctataacgatgtcaaactgaagcatcagcgcggcggcgaaagcagcatcgacagtatcactgccggtggttacgccacctggttctcggataacggctggtatctcgatggtgtgctgaaatataaccatttcaataatgagttacgcgcggtttccaccaaccgcagcggcatccgcggggattattcacagaatgcctacggcgcatccgcagaagccggttactcctttgatctgccggaagccttctgggccgagccgtatgcccgcctgagctatatgcgtgcggacagcaaatcagttcacctgaacaataatatgcaggcaaaactggatgcacagcagtccctgcaatccgaactcggcctgcacgcaggcaaagatttcaccctgaacaatcaggtgatcatcaccccttacgccacactggcctggcagcatgagtttatcagcaataatgatgtgaccattaaccagcgcaatacgttcgacaccgatttctccggtgacagcctgaaagccggcggcgggttgactgtccgtttcactccgcagattcaggcgtatgcggaaatcgattaccgcaaaggcgacaaaacagaatcgccgctgcacggcaatatcggcgtgcgctacaacttttaa

SEQ ID NO: 282161 - DNA, 795 bp, Morganella morganii
atgagccaatatgaattagattattcattcagtgaagcatatcaaagtaccctgcgtaacatatctggtgaactccggaaacaagcagaagaaatcgcgtttatgcatctgcacaatcccggcgtgagactgaaatttctcagcgacatcgaccagttcatcgcaaaaaatgaatgggaagtaaaaaatgcctgcctgagcttatctgccggactggataacatcgaagatatgagagaactcctggcacaacagcacagagctattcagttacgggaggtcaggcaatatgcttacgtcgaagctgttaataatgaaaaaaatggcatcacaacccttcttttaaagcaggtgggttttgttggcggtggtatgcaggttatcgccggttacggtgcatgtgctgccagtgttggtttgctgtgcagttcattgagtgtcggactgattgctcagggcacgaataatatgtatgaaaatggttattatcttttgttcagggaaaataccagcggttatctgagagatggctacagatacgctgcgaaagaaatggggtacagtaactatgaagcagatatggcctacaatattgttgacctgacattatcagcaggaagcttggctaacccggtattgaaacccggagctttcaagttattcagttactatgatattgattttataacctcttttcaacagatgggaaagataggtattggttcagaaatattttttgattcagtcactatttattctgcatataaattaaataaagataataaaaatgaatga

SEQ ID NO: 282162 - DNA, 303 bp, Morganella morganii
atgttatctcttgcattgccttatatcaggaatgttcagtcgttaagtgctgaagaaaaaggtagtgatacttcgtgttactttgaggcggaattagtacacaatttaatgcacactttgcttacagcagatttttcagaacatgatttatggtttttgaataatcaggcaaaattctattttgaaaaatgtagtgaagatatatcgccaaactatagtcaacagattgaatgtattaaatatttatttggcatcgtcccgactgatctgagagttaaattattatggaatgatccggagtaa

SEQ ID NO: 282163 - DNA, 234 bp, Morganella morganii
atgaaactaaccagcaggctgctatcaccgataaacctgcctgagttaattcttgaacataggtctttttttcggtcatcaccagcccttgtttgcaaaaagctccttcatagcatgattttccaggctgacttccgcaaacagttttttaagtctggtattttcatctacaagccatttaaattttttaatatcaacagcttccataccaccgcattcgatttccaattgtaa

SEQ ID NO: 282164 - DNA, 1761 bp, Morganella morganii
atgacaagagatgattttaatagcgacactagagccgttggtcttgcaaggttagctaatagcctagaagaaacctatggttcttttattaatatggaaaataccaattctaaaggtgaggctagaagggaagttcttatcacaagatgtattgctgcgcatgcggtgagaatgtatggagatgaactcgaccctgaaattgctgctgcatcagtttgcgatggtagtgatgatggaggaattgatgctgtttatgtaaacccaagctctaaaaaacttattctagtgcaatcaaagtacataaaagatgggaatggctctgtaacaataaaagattttgggcgctttaaggatgcatgtgcgaaagttgtagctaacgatctaaattcatttaatgataggtttttagagcacaaagaagcagtgactactgctatcactagtagtagctataagtgtatatgtgtatttatttactcaggaacccaagggttaagctcagaggttattggagagattgatttttgggagaaaagccaaaacaaagctctgttgtttagggatttagaatctagggatgagtatacaatactatttgaaacacctaatgttactgacatatctactagcttaagtactcaatctaccggagctatagatataaacaatgtaatattagagtcgtatggtgagatcactgaaccttacggcgcaatctacggaacgattgctgcgagggtgatacatgattggtggaaaaaatataaatatgctctttttgagaaaaatataaggagtgtgttgggtgattcgacatcagtgaatgcagggattatgtccaccatcgaaaatagccctgagaatttttggtattataataacggaattactgcgacatatgaagaagtagatgagagcatagctaatgctggagcatctcgtaaaattggaatattcggttttaaaaaattaaacataataaatggggcgcaaactgtaagctctattggggctatatttgatagtatacccgatgataaaaaagacaaagctcgtgtaatgattaggtttataaatgcgaaagatccggtttttttaggtgacgtgactaagtacaacaacactcagaatagagttactggcagagatttcacgacacaaaggcctgagcagcaaaaaatacagagagaaataaatttcgtcggaggttatacatataagctcttacgacaagaagattcagggatagctgcttctaatgtaattgatatagatgattcattgaatgctctaatttgtgtatcaaagaaacctcaactgattgcaacgttaaagtctaatcgaggtcgtttttttgatacaacagaaggcaatctttacgaacaagttttcaatccaagaaatccgccatccggtctttctgttattaatgctgtaaacttgtacagagtatgctttgatattttaaaagatacaattactaaagcatctaactcatcagaagaagagtatagtaaaataccatcattgctgacgcatggtaactatgtattcatcagtattttaatgggtaaaatacaacctacaaatacagttaatggtataagcacctatgacaaaaatagcgtttctgttgatactctcgaactagctaaaaacatatttgaatatatccagtcaaattatcctaatagttatctggctagatttttccagaacaaagaaaaagtcgagcagataatttctcacttttcagcgtga

SEQ ID NO: 282165 - DNA, 405 bp, Morganella morganii
atggttgagtattatggttggataaacttaagtaattcaacgtacgaaagtgacaatgaagagatggatataattttgagcaaactatattcatacatatcaaactataaattagatgatacatctggttttattaatattcataaagtaaatggctctcatcagttactatttactggaaatacaaaccatttgtcacaggatgtaatagatatttttaatctttatgaatatatagcagagatagctataggatcttatggattactacatattagaaatgatgaatcaaaagatgcttttaatgagtttgaggtttttgttttagctagaggtaaaataaaaaaagaaaaagatcctttcttatcgccttgtataccagtaattgaggatgatgatgaatag

SEQ ID NO: 282166 - DNA, 8055 bp, Morganella morganii
atgaacaaacactgttaccggattatttttaacaaagcccgtcagatgatgatggtggtgtcagagctggcaaaaaatcacagcagcgataaatcccgctcacagaccggagagggtatgacctcactggcggcggttatttccccgttgcggctcggtatgatgctgctgctcggctgggttgcgctgccggtgatggcggacggtattgttgcggacggctcagcgccgggcaatcagcaaccgaccgtcatctcctctgccaacggcacgccacaggtcaatattcaggcgccgaacagtgacggagtctcccgcaaccagtacagtcagtttgatgtggacagcaaaggcgcgatcctcaataacagcgcggttaacacgcagacacagctgggcggtatggttaccgccaacccgtgggtggcaaagggggaggcaaaaattatcctcaatgaggtcaacagcgccaaccggagtcagcttaatggttttatcgaagtggccgggaaacgggcggatgtgattattgccaacccggcggggatcacctgtaacggctgcggttttatcaatgccgggcagaccaccatggccgcggcacaggcattgctggagcagggccgtgtcaaaggatttgatgtcgataaagggcagatagccattaccggaaaaggcatgaatgatgcgcagagcaactacacacggctgataggccgtgcggtggaagtgaacgccaaactgcatgcacaggatctgaccatcaccaccgggcgcaacatcacagatgcgcagggcaatgtggtgacacaaaaagcggctgacggcaccacaccggcctttgcgctggatgtggcggcggtcggcggtatgtatggcaataaaattaaactggtcggtaccgaacacggtgtcggtgtgcgcaatgcgggtactatcggggcacaggtcggggagctgagtctctccgctgacggcaaattacagaacagcggtattattaccgcagcgacggacgtgaaagcgacactgactgataatatcaccaataccggtacagtcagtgccgggcgggatattcagctcagcaccgccggggatacggataaccggaaacagatcctggcgggacgcaatatcacctcagacagccgggcgctgaacaatgccgcaggtgccgtgatggcagccggtgcggataaagacgggcggctgacacagaccggcgatatgactctgactgccgcgaaatcagcgacccttaacggacagcagctggcgcatgatcgcatggcggtcacggcagccaatatctcactggaaaacagccgcacggcagcgaaagacatggcgctgacctccgcctccgggctgaacctgaaaaacgcggacgtttccgcttccggtacgctgaccgcagttgcgccggacggtattgataaccgcagcggcaaactgaccgccggtgcgctgcaactgactgcccgcaaactggataacacacaggggcagataatccagaccggtacagatgatctgaaactggatcacaaagacggaattatcaataaagacggcacgatcgccgccaacagcaacaatatcacgctgaatgcagacagaaccgataaccaaaaaggccgtattcagcacgccggaaccggcaccgtcagcatcaccacgccggacttcaccggacaaaacggtgtgattgtctccaacggtcatctgatgatgaaaggcggcaactatcagctggataacagtgaaacctctgcccgcacgatcaccggggagatgaactccctgtctcaccgtgacggcaaaatggtgcagcgcgacagcggtgcactgacactggcggtacagcacgccctcgataacactcagggggtaattgccggacaacatctgaccctcagtgcagagtcactgagcaaccagcgcggaaaacttcagggcagcggtgaggcacaactgaccgtcaccggaaaaacggataaccgtgaaggggaactgcgcggcggcaaacagctgacattatctgcccgtgaactggataacacacagggcacggttgccggacatgaaaacgcggcgctgaccaccaataccctcaccaacaccggcggcacactgattgccggtcagagcctgacggtcaccagcggcagcctcagcggtgacggcgatgtgttatcgtcaggggacatgtcgctgacactgaatgacaccttcaccaaccggaaaaatgtacaggccaacggcagcctgaccatgtccgtgaataacggtgttcagaatgaggccctgattcagggcggcaacgccgtcacgattaacacagcacaactgaccaataaccacgacgcggaaatcagtgcggacaacaccacgctgacagtacagaacaccctcaccaacaccgggttgattgacggtgtgaatacccgcatcagcaccaaaacgctggataataccgccaccgggcggatctacggtgacgatatcgcgcttcaggctgataccctcaataactccgcaaccgcagacaaatcccgctcggcggtgattgcggcccgcaacagcctgaatatcggcaccaaaacgctgaacaataccggacagagcctgatttacagtcagggactgctgaatatcggccgcagcctggatgcggactaccgcgccaccggcagtgctgacctgtttaataacctaggatccaccctggaatcgcaggggaatatgacgctgaacatccgggaaatcaataatatcaataccaacctggtcacctgggttgaggtcaccggcaggcagaaaatacatgagggcgtactgaaaggtcagacacagcgctttaactggaaagatatcgataccagccgcaaaaataagtacggcgtccataccgcggtgatgccggacggaacccgtaatgacgagttttatgaatataactacacccggacgattgaggatacgcaggttgtaaccactgaaccgggcgtgattcagtccggtgcggacctgacgattaacagtgacaaactgctgaacaaagacagtcgtgtcctggcgggcggactgctgacaaccacgattggtgatttgcagaatattgccaccacaggggtgcatatcgtcacggatatcgggaaacagacccgctggtacgcgaaaaagaaaaaacggaaaatcggcggtaccaaaacctcgcagggccgggataacagccgttaccgtcccgcaccggtgatcaccgatactgacctcggcgtgcataaatgggaaatgaatgcacagaccgacattcaggcggtggatacctccgggcgcacagccccggtgattattgatgtgccggtcacggctgaaaccggcggcaccacagcagaaaccgtgatccgcaccggtaatggcacgataacgctgccaaacaacagcctgttcaatgtcagaccgggcagcgacagtcagtatctggtggaaactgacccgcgttttaccaaccgtaaaaaatggctgggcaccgattatatgcagcaggcgctgctcagtgatcacagccagatgcacaaacgcctcggtgacggctattacgagcagaagcttatcactgaccagatcgtgaaactctccgggcagcgttatctcggcgattaccgcaacgacgaagaacaattcaaagtgctgatggataacggcatcaccttcggcaaaaaatataacctgaccccgggcgtggcgctgaccgcagagcagatggcgctgctgaccggcgacatggtgtggctggttgagaaaaccatcacgctggcggacggcagcaccgagaaagtgctgataccgcaggtctatgcccgtgtgaaaccgggggatttaaccggtgacggcgcactgctggccggtaaaagcacacaatttaccgtgaacggtcaactggttaacagcggtacaatcctcagtaaagacgcactgacggtcaatgcaggggatattctcaatcagggaacaataagtggtaatgatgtgctgcttaatgcacagcgagacctgaataatatcggtggtacgctgactggcggcaattccctgacggcaaatgcggagactatccgcagtgaaagtacgctggcaggggatgcagataaccatcacctcaaccgcatcgctggcatttatgtgcagggggataacggcaagctgaccctgaatgcgaaagactcggtcacactgaccgcgaccgacattgccgccaccggcaaagacagcaaaaccaccattaccgccggaaatgacatcacgctgggaacggtgaccaccacccggactgaaaacggcgactggggtaacgataactaccgtcacctcaccacacagacagaagttggttcacaactgcacggcggggatatctccctgaacgccggacgggatatgaatgccaccgccgcaacggttgatgccaaaaatgccctgacggtcactgccgggcgcgatattaacattcagtccggcaaagacgtttctgacctgactgagcacagtaaacagaccagtaaaggtctgctctccgcctcatcgctggaaactcatgacgaagtacaccgcactgacgcggtcagcagccagttcggcggcgataccgtcacactgaaagccggtcataatctcaccgtcgaaggcagtcaggtgattgcggataacgacctgaccgccacggccgggaaaaatatcacggtcaccaccacggatgaagcccgtgaagaaacacatctgcgtgaggagaaaaaatccggcctgatgagctccggcggtatcggttttaccgtcggcaaacaggaaatgaagcagaccaccgacagcgacagccgttacggcaaaggcagcacgctcggcagcacagaagggaatgtcagcctgaccgccggggaaaacctcactattcacggcagtgatgtggtggcggaaaaagacatccgtctctccggacaatccgttgcggtcaccgcggctgaaaacacacacaccgaactgacgaaaaccgaacagaaacagagcggatttacactggcgctgagcggtgccgcaggcggggcgctgaataccgctgtacagacagcggataacgcaaaagaaaccgaaagcggccgcgtaaaagcgctgcagaatatcaaggcgggattatccggtgcccaggcgctggaagctggtcgcctggccgatgttcagggggatgcgggctcagccttcggcgtgaatctgtcttacggcagcagcagctcatcatccgaaacgaccacccggcagaccacggcacagggcagcagtgtcagtgcgggaaataatctgactattaatgccaccggaaaaaccccggacagcggtaatatcgtcgtcaccggcagtgagttgcaggcgggcggtaatctcaccctcaatgcagaaaatgatatcgccctgacctcggcacagaacacgcagaccgtggacggtaaaaacagcagcaaaggtagttcggtgggggtaggtatcacctttggttcgggcggtaccggtctgaatgttaacgccagcgtgaacaagggcaaagggttcgagaaaggtaacagtcagtttgccactgataccacagtgaacgcgggcaaaaccctgacgattaacagcggcaacgacaccacgctgaaaggtgcccaggcacagggtgaaaaagtcattgtcaataccggcggtaacctgacactgcagagtgagcaggcggttgataactacgactcgaaacaaaccagtctcagtgccgggggaagtatcggtctgagcagcggttcactgaatatttcggcaaaccgcgataagatgcacagtgaatacgaatcagtacagaaccagacgggtatttatgccggaaaagagggctttgaggttactgtcggcaaacacacgcagcttgacggcgcagtgattgcctcggcggcggataaagacaaaaacaccctcgacaccggtacgctgggctttaacaatctggaaaacaaagcggaatatcaggtggagcaccagggcggcggcctgggcaccggcggtgatctcggtgctcaggtgatttccaacctgggcaatgccctggccgtggcggataacaaaaaagagagcagcagcaacaccactcatgcggcggtctcggatggtaaatggattatccgcgacacggaaaaccagaaacaggacgtggcagacctgagccgtgacacggacaacgcccactctgcgctgaatcagatatttgataaagagaaagagcagaaccgggtaaaagagcagcaactgctcggtgaaattggtgttcaggtgattgatattgcccggacacatgccaaagccaatgcaacagaaaaagccaaagcagattttcagggtaaaaagccgacagaggccgaatttaatcagcgggttgaggaatatctgacagagtcaggtttcggcacgggtggtaaatatacccgcgccatgcaggcagccaccgcagcggtacagggtctgatgaacggtgacctgaatgcggcactggccaacggcgcggcaccgtttattgccaatgaaatcaaaaacctgattccggatgatgacgccgacgccaatctgaaacgcaccatcgctcacggcatcgccaacgcagcgctggctctggccaaaggcgaaaacgccgccgcacaggccaccggtgcaatgaccggcgaagcagttggtatcctggccgaatatatctacaaaaaacagccgggcgaactgaccgaacaggaaaaatcaaatatcagtgcctgggccaccctggcatccggcctcgccggcggactggtgggcggagatacgcagagtgcggctaattcggcacaagcagggaagattgtggttgagaataaccgcctgagtaccgatgaggaaacaaaacgaatcgataaacttgctaaaaacaatgagcaagaaaaattgcgttatcaagcagcagcctgtgcattaaccaagtgttcagctgaattttctgatgatgatccaaataaagctcttctccagcaattagagatgttagggaatagtgatgagttaaaaaattaccgagaaacactcgctttagaggagtatataaaaactaatattgttcctgtgatgaatggttattatccagtaacctatgaaacagtggaaaaactgtttcaatatactggtggagatgagtttgttgattcagtagcttatatcaataataagcacagcattacgactcgtgctggaggcgcattacaggttggatttgcggtaggtgaaggtgttttagcagtgacattatcgcctggttgtacaaccgtggttggttgtgcaccgagtgcagccttaacatggtcggctgttgacaatggtgtaacggggttatctgttgttaaagatggaaaatcttacacaactcaaacaggaaaagggctggctaagttacttaatatatctgaatcagatggtgatttgttgtttaatgcagcaacgggtttagccacagctaagggattaaataatctggcaaactcggtcggttcatcgacaggtaaatcggtatcaggtattactgcaagtgaggtaaaagagcttgaaaggctcattgcaaaaaatgaagcatcagctggaaaaggaacgactggggcagctagtaagtattctggtgatttaataaaagttaataaacctgatcctgctgcagatgcccttgcccaaagaattggtggtgaatctagagttcgatttgctaatgatagtagagaatttgacacaattagtgatttatatgtggctcaatctaagcctgctcttcagcaagtaaataaaagtgtgagagatcaaatgaaagcaacatttgaggcagctaaagataccaatcgatcagtatattatcactttgaaggtcagccatcccagtcggtaataaataaattgaatgagtatagcaaccgctatggaataaaagttgtaatagatacagagcctctcaatccaacaaaataa

SEQ ID NO: 282167 - DNA, 129 bp, Morganella morganii
atgagcgagaataaccgtatgaccaatgtcccggactttctctccgggttagatgccggtgtgtttgaaaacctaaattcaaaacctataccggtaaattcaaagcttaattactttattccgctttaa

SEQ ID NO: 282168 - DNA, 1089 bp, Morganella morganii
atgtctcaaaaaattacagcaatcaaagagccagtggttgagtacaaggacaagactcttcattatcgtattgcaaaagttatcggcgaaaatgtggatcaaaccttacaagagatgattgcggttgcgctgaaccgtctctttgcagttaaagaccgttaccaaactgtcagtgctgacagccatgatggcgaagatggtgatgttcagcaggcaagacaatttttgaataataaaattgagagatggagtatattatttaacgaattggttcgctacagtgacggagcaaataaaagtattataactattgatgaaagcgcttctttcttatcaatagaccaaatagcacctccaatttctgtggatggtaaaagacgtgagtttcttgattcaataatgcatatggcatttcttagaaatcatgttgtagtgattcagtctcctattctcagaactcgagagctggaaaagtacttaacgtggttgttaaagaaagccggtattatcacccaaggctctgtaatgctcaatgctgaaatacctaagcagcaaagagagaaaataatgaataataatacaaaaaaagttagaattggtacaccattggttgatacgcttagtgatatgcctgttgagaacgctagagaaacgataacttctgaatcaataaaaacaaatcatgtcaaagtaactccgaagggattagggttagatatcattaaggttctttttactgatagagagcgtgaaagctatgggcttacagatgatgtgttctcaggtgatgctattgataaaggtaatataaatgtttcggttgaaatcagttataattacaaagcaaagaaaacatcccaattaatcattaataatatcagccaagctttaaggcatagccatccagatgatgttgagttaacgctagataaagtggggaaaattaaaggcgatagtttagttatttctaagaagattaaacttaaatttattaatggaatagctgatccagaagagatgtatatgaaaattagagaatggttagttgaacaaattcggttaggcgaattagatgctgaagctgaataa

SEQ ID NO: 282169 - DNA, 567 bp, Morganella morganii
atgctgaagctgaataatattttcagggttatactgaccataattatctttctcagttcattctattatttttctgagcaagaaaggataaataacttaaatggttggttacaattgattatcggcgggggagttttgactcctttggtaacctacgcttggaatctaaaatcaaaatttgaaaaacttattgaaagtgaagggttgaactcagttcaaattgacaggttaagtaaaaaaatttcaaccttcacaagaaagattggatattggatactattttacgtttttagcgctgggatgatttttctattacaagtgtttaaggatgatatcgaatatgcaagatacttagcatcattgatgattgcattattattcatagcgatattatcattcatttcattacgtgattttgatatatcactatctcagttgaaatctgcaatcatcataagacgtaaaaaaaatgctgagaaagaagctttactcaaattactgaattctgatgacgaattcagtgacaaagaaaaagagtatttcaatcgttataataaagataaatga

SEQ ID NO: 282170 - DNA, 876 bp, Morganella morganii
atgacacctgagtacagaatcgatgctgaaaaaagaattactgaatatttaaaatctcaaaatctagaaaacataaaaaatatgcaggttgaacaaacatttaatgatttaggttttgaggttaacatttggaacgtcagaacaaaaaatgacggtaactggtgggttgctgaaggtgaaaacgtttctttaaacttatacactcaaaatgagtttttcttttctgctgatgaagcatattcttttcatttgggtataactcaacgattacaagcaaggcatcataatagcttcaaacatgttattgatgagttacctttagatatagatatgctttgctccattagccggagattaaatgcttctgctattgttctaaataacattaaggctcctgaagatattcaaagtattggactaacgtgtagagagagtatggttgagcttgctgctcatctttataaaactcatgaggatatattaaaaagagaaaatatcaaagctgctgatttcaaaaatatttgtcgagttattattgggttatatgccgcaggaaaacgtaattcaagcctcagaaaatattgtcgctcaacaatagagtctgcatgggatttttccgcagagacagttcactcttcaaataaaaatactcccgatgcaaaaatttgcctcatactgacttgcaccgcagtctcattaattcaaaatttattccttaaattcataggttttgataacgaaataaaatgtcctaactgtcatagcctagtaagtgaaatttacgagtctgaagaagacagtcagctacacgtagtatgcggagaatgtgggcaggtagtacaagtgctttcagaagaaactgataatcaatcataa

SEQ ID NO: 282171 - DNA, 1140 bp, Morganella morganii
atggatcttttctctcgtttatataaataccaatccacagataaacgcagccagctggaaaatttttgtacggaaggtttctgtgacattcttaaccggatgacaaaagaacagcagcgaaattttttaacaaaaatgggtgtttgtgctgattcagacacaaaaattaaatggcaaacgcaatatacgatcacggattcagaagggaaatcccgttatccggatttggtgggattgattgataattttgtcaggtatttgattgaagtaaaaattaatgcgtgtttcacacaaggcgtggatattaacggagattcattatctcagcttcagatttatgatcgctggttatctgctcattcaccggatgcctctgccggcacgttaattttactgactgataaaacgatgccggagcaaagttttgaagatattacatcttctgacttcggtataaaaaacagaaaattatggtattggcagtctgtttttgatcaacttacaatggtttcagatattcctcatgctgaagactataaaaaatttttatcaaagcagggattagcaatggatttacctacacggcaggattttgctgttatggagctcctctacagcggagccggaaaacggctggacggtttaacaaagagtgtatttaacagaataaaacaaaagtattcagcggaaactctgtttaactggagcactgaagataaatacagacatggaggcagtagtgaaaattggcagggagccatatgctggagttgggtcgtattgcggcgggaaccctatcagtatttctattgggggattcagtttcctgaatataatgaatgggatagcggagagtaccattctcagagtaaacggagtacatctccttgcctggtttttggctatatgtcgaaagatatagaatactgcaaacaggctatcgatctgttttcccgggtaccgggtgacgattattgtcccggaaagcttcctcctgataataatacagaagctattgtttttaatcagacgttacctctgagccacttactggacaataattataatctggacatgatagttgattggctttgcgacaaaattgataatgcactgaatatcataaaagaaccgaaatga

SEQ ID NO: 282172 - DNA, 2943 bp, Morganella morganii
atgtcttcgcattcaccattatctggtcatccttataaaaccgtcacactgcttctgcccgtgttgtttattccgctgccggggctggcagcagaagaaaaaaatcagcacctgggcgacattacgctccgtaatgaacagaccgctgctgacagcgccaaagataaaatctatgacaaaaatgtctctaccctgatcctcaccaaagaagaaatagagcgctataaaggcgcctctgccgccgatattcttaaaggcgccaacggggtattcagcggtgatgcccgcaatggtaacgcgctggatgtcaatatccgcggaatacaggggccgggccgtgtaccggtcaccatcgacggcaccgaacaggccgtgacggtgtaccggggttataacggtgccaataaccgtaactaccttgacccgatgctgatcagtgaaattgagattgaaaaaggcccgtcacttaacccgctcctgaaaacctcggtaggcggcggtgttgcaatgaagacactcaccatcaatgacgtggtaaaaaacggtgagcagtttggtgccgcactgatactggaaaacagcagtaacaccaccaaagcccggatacccaatccggggatcggggaagattaccgtcttgtggataatatgcagttcaattggtttatcattgacgaccccggcacccacttaaccccggaaaaccgcgataatgcccccgcactgaataatagtgattatgcctggcgactggcggtaggtacccgtcaggaaaatatggatctgttactggcttatgcctaccgtgaccggggaaattattttgccggtaaacgtcacagtgaaaattacaatggcaaaatatccaaagaagatatcggtattctgcgaacatctaataaaacctatgacccgtatatgccgtttgtgtcccgtatttaccgcaagggtaatgaagttcccaatacatcggcaaaaacggaatcctggctgataaaaaatacctggtatctgaatgatgaccacgcactgcaactcagctggcgcgatacccgctctgatttcggcgatattatgccttcacggctgggctggatccgcgctgaggataatattattccgcagtggccgctggctgacctgcatgcacaagccggttatcttcacctgaaatcccaaccggcacatcttgcctatgttgatgctgatatccgcctgtggaccaccctgaccaccagcaacactaactctgccggcggctggccgcgctacccgaaaaatatggacgacggctataaacagggggatatcagcactatcaatccggcaatcgacggcacactggtaaataccgctaccctgaatgtacagaatcagcgctacgggctggatttcagcaataagtttgctttcactccggaactgtcggtgacactggccgccaatatgcagtttgaacatctggacagcaataccagtatggaaaacgccgatctctttatgtttgcagtccctgcccgtaaaggccgccgctttgaatatcagcaatctgtcagtctggactggcagccggtctcctggctgtcacttagtgccggcggcagacaaaccgtatactggagtgtggatgatctctccaatgagtgcgccgcccgcaaagacccctactgcaaacaaaactatgaagttactggttattacctgaactatttccggaatatgaccgaagcagaatcactggtttataaaaagcggcaacagggcctgtggctcgaactgactccggaagaaagacaagcaatacagggaaaaatttttcagtctatatacccgaaatggcgtcgtgattatcttgataaccgaaaagaccggccaatggtacatgaacgggcattctggccggtggataccagtgacggacgcctgaaacagaaagaccggccggatatcgataacgcattgcggggtattgatccctataccgggcaggaaacctatctctatgaatatggcagcctccctatttcagcgggcgacagagaacttcaggcggtcactcacacctggaaagaaaaaccccgccgccaggccagcgcctggacaccgatgctgtctgcctcggtacatctgaccgatgatctgcgtctgtatggccgctatgcggaaaccgtacgtatgccgagtttgtttgaggatactgtcggcttttccgggatgtcgtacccgcatatcggttaccgttacaaaccggaacgtgcggtaactcatgaatacggtgttgtttttaacgggaaatcactgcttcatgctgaccgccatgcagatatccggctgaactacttccatacagatatccacaatgtctttgatcgtgataattattttcgttttacacaaatggataagcagatcctgaaagggattgaaatccaggcccgttatgatcatggctggatcttcagtgatctgggggtgacctataacctcaccaataaagtctgtgatgaaacatcccatgcctttatggatccgaccgggctgaaagatatcccgtcatgcattgacggtggttatccgggcgggttcctgcgcacccaaatccagccgcactactctgtgacctttaacctcggcgggcgtttattgcaggagtcattagaaatcggcagtcgctggctctaccacagcgcggtggaaaacagccaggagaaacgcctgatgggtattgttccgggaaaatacagcgattttaataactacccgatgcgctggaattcggtactgactgtggatgcttacgccaaatataaagtcacaccggatgttgccctcgaactgacggccaccaacctgaccaatgaatattacctcgacccgctcacccgttcgatgatgcctgcaccgggccgggccgtaaaattcaatgtttccgcgaggttctga

SEQ ID NO: 282173 - DNA, 813 bp, Morganella morganii
atgaatttctccatcctggtctctgtctattataaagagaatagtattttctttcatagtagtttagaaagcatattcaataatagcatccttcctcaggaaattattgttgtaaaagatgggccactatcacctgatttagataatgttctggaacattggcagaataggtatcctaatcttattaaaatcatatctatattacataactctggattagggaatgctttaaatgagggattaaaacattgtacgaatgaatggatatttcgtatggatactgatgatatctgtttatctgaccgctttgaaaaccaaattaaccttattaataataaacctgatgtttctcttatcggcgggaatattgaagaattcaatgaagatatgacgatatcaaacggtcagcggaatgttgcccgtgaacactatgacataattaaactcgctaaaaaacgcaatccatttaatcatatgaccgtcgctttcaggaaaagcgcagtcttagcagttggtggataccaacatcatttatatatggaagactataatctttggctcagaatgatcgctgcaggctataaaactcataatttgcaagatatcctggttaatgtccgagctggctcttctatggtttctcgccgcagaggtttaacatatataaaaagtgaatttcaacttgcgaagctaaaaataaaatctaaaatcgattctccattatctgcgactataatattttttatgcgcagtattccccgaattttacccacttcacttctcaatgttatttataaaaaattaagaaaatag

SEQ ID NO: 282174 - DNA, 1443 bp, Morganella morganii
atgaatgtttttacccggctcgcatatgcgatgggattgtcagtattactggctgcaggtgcagcagccaccccggtcgaacaatatacccaatatctgcccgccggtacaaacctggcgatgattgcgcagcgggtgggcgattctcagccaatcgtggaataccagggacagcagatggcgctgcccgccagtacccagaaagtggtgacggcacttgccgccctgttgcagctgggaccggatttccgttttaccaccagtctggaaaccaaaggacatgttgagggcaccaccctgaaaggggatttaatcacccgttttaccggtgatccgaccctcacccgtcagcagatccgtaatatggtcaatgaactgcgtaaagccggggtacaggccatcgacggtgatctggtgatcgatatctctgcctttgccagtcatgacaaagcaccgggctgggtgtggaatgatttaacccagtgcttcagtgccccgccgggtgccgcgatcatcgaccgtaactgcttttctgtaacactgtatccgggggaaaaacccggtgataccgcctatatccgcacctcggagtattatcctgtcaatatgttcagtgaggtcaaaacactcgaacgcggctctgccgaagggcgtttctgtgagctggatgtggtgccgggagaactgaaccgctataccatcaccggctgtatgaatcagcgcagcgaaccgctgccgctggcattcggtgtccagaacggcgcaagctacgccggggcgatcgtcaaaaatgaactgctccacgccggaatcaccctgagcggcaatgtccgccgtcagacccacccggaacaaccgggcaccgtactgatacaaacccaatccgctccgctgcatgctctgctgaccaaaatgctgaaaaagtccgacaatatgattgccgatgaagttttccgcaccatcggccgcagctactacggcgtgccgggtacctggcgttccggccagcaggctgtccgtcaggtactgaaagagaaagctggtattgatatgggcaataccgtgatggtggatggctccggattatcccgtcacaacctgatcaccccggcaaccatgatggaagtgctgcaatttatagccaaacatgatgatcagctgcagtttatcaaaatgctgccgctctccggctatgacggcacactgcaataccgcggtggtctgacagaagcgggcgttaacggcaagctctccgccaaaaccggctcattgcagggcgtgtataacctggccggattcctcaccaccgccagcggacagcgcattgcgttcgtgcagtttatttccgcttatgccgtcccgcctgccgagcagcgcagccgccgtgtgccgctggtccgctttgaggggcatttgtataaagatttataccggaattactga

SEQ ID NO: 282175 - DNA, 282 bp, Morganella morganii
atgatttctgacgatatcgtccggccggtggcattcctttcagattttcttcatatccgggccgcctcagtgctctgcaacccgaatgtaaagttcagtaaaaacgcctttcactgcatttttctgatgaaatatccgtattgtgctgtttttttacgacgcagcttacaggtattccacattgatgacttcatactcaacttcaccgcccggcgtctggatgacaaccacatcgtcaacctctttaccgataaggccgcgcgcaatcggggagttcactga

SEQ ID NO: 282176 - DNA, 408 bp, Morganella morganii
atgtcagtgaaacggaacgcagaaatcagagatgaatcagaacgtgcggagctgttaaaacagcagacggaagataacctgtctgctgcggataataatgactctgcagaatacgccgctctggcagaagagctgccgaatatcggtaaagcaatacagattctggatacaatacgggatgaaaaatatccggatgaggatgttgtgcagttactggaacatgtccgccggttactggataacgcgcagtccgcgctggatgagttccgggaatcggacattatgaatgaatttgaatacagcagtgaattcagcaatgccttcggcgacgatgatgcaaatgatgatgaggatgaatacagctgcggtttcggttatcagaatgaagatggtgaatacgaagactga

SEQ ID NO: 282177 - DNA, 363 bp, Morganella morganii
atgaatattaaatatagcgttaatgaagaagtcactgtaaaaaacgtcaatggctccggaagtaaatcacctaaatgtccgaattgtggtaactggattgaccattggaaaaatatttcaggagaaaaaggagaaacttgctcaatcgttggttgtacagaaaaagtcacagacatacagcgtatgcatggcgctcatacattgcgaccatatgcaaaaaatgatgactacaaaaatcatcaatatataattccaatgtgcccgtcacacaatggaaaaagaaatgaagagatgaaagtaaaagcaaacattactttcgtaagagctaatgtagcagaaagctgtggaaagaaagacaaatag

SEQ ID NO: 282178 - DNA, 2799 bp, Morganella morganii
atgaagataaagacgatcaatacgcttcccttttatatccttcctgtactgcttccgctgacgggccatgcggccacgattacctgtaacaccacactctatttctgcagcagtgcggagggggatgatgtggtggtgacaacggataaaaccgcgggtctgacgccattacagggctatggtgtctatctgaataacagcagctataacctgaagaatatcagcattaccacaacaggcagccaggctgatgccatattcagcaacggcaataacggcagccggtttatttccgccggtaccgtcaatattaaaacgaccggagacagtgcggatggtatcaacttaggtactctcggtggtgcgcgggcgtcactttcaccgtcggtgaatattgtcactttcctcggtaaaaaaggcgttattgaagcggaaggtatgggcgtccgtgcgaataataatctgggcaagggctcacagagtgttatcgtgctgggggacggttataccatcagacaaaccggcaaagagaccgataacagcacggaaggaaccggttatgcggtttatgccggtaaccgtgatgaggatatcggcgggtttggtctctgggatatgattttcgggaaaagaaataataacaaaggtgactcttatgtcattatcggcagcgatgccactatctcttcttctgcactctcgaaccggaattaccgcagtgcggcagtctatgccaataaaggcgggctgattcagctggggaataatgtcactgtcagtgcaccatccggtgaatattatctttttgcttccgcagaaaaacaaaacccgggaaccaacaacgccaatgatacggcagaggtacggccgggcactattttactgaacggcgatgtgaccttcagggaggtggcagataccgccagcgtggtcatgcacagtaaaggcgaaaaatcgctgattaaaagcggctatctgacgtatgagattgataaagacggtttaaaaattcagaaaaatattcaggagagcggcggtaaatttacgctggacggcaccctgctggcatcagagggagggacgattgcactgaatatgcgggacggttcttattttaacggtatgacccgcattgataatgatcagtcggtgattgacctgtctgtaagcggtgccgccagccgctggcaactggccggtgactcgtcgctgacacagttatcgctgacagacggggcggttctgctggcgcaccatgagaaagataatgtggtgactccgctgacgctgaccgggaatgtgaacaaccacagcgggattatcgatctggccggtaataaggacctgacggcaacggacaagctgacaacctttacggtcagcgggaattatctgggcggtaccgcaaaaccggatgcaagtaatgcgtatcccggcggtaacggtgtactgcgggttaatactctctggaacagtgatgactcctcgtataccgataagctgaacattaacggaacggcggatggtttcacccgtgtggatattaaaaacgggattatcggaaatgtggcgaagggtagcgcggataaattttctgtgccggtggtgaccgtcagtaaccataccgcaggatcgaatgctttttacggttttgcggataccgcaggggcagggcaggcgttactggtgcagaaagatgatcataattatgtctggcgtctgccgaaaaaagatcccggtaaacctgaccctgaaaaaccggatcccgaaaaacctgatccggtaaaaccggaggtaccggcctttaatatgatgccgcgtgccaatatggaactgggctataatcttgtccgttctctgcatgagcgcagcggcgagcagcagactgcccggtggggcgcttccgcacagggtgataatcaggtgtggggaaaactcatcggtaatctggaaagtaccgacgggaaaaaccgttacggatatcagtccaaattatggggtgcgcagttcggctatgatttcctgatcacggaagatgcagaaaccaaagcccgccgtcacagcggtgtgatggtgacctacctgaaagataacctgaacttctatgaccggaaatctgtccgctttaataaagcagcaaaacagtatgaaagctatgaagcccgcagcggtaaagggcagactgatactgttgccgccggcgcatacaccacagcatacagtgcagagggggcgtacaccgatctggtggcaaaccttgattacagccgtaacaaatatacctcgggcagggaatcggaaagcagcaaccactcgtgggggatggtgctgtccgctgaggccggtaaaccatttacactgacacaggatgagcagaccggcagcagctggataattgagccgcaggcccagttaatctggcagtaccggacattcacctcgtttaccaccgatcataatattaaggtggatcaggataaccgccacggattacgcggacgggccggggtaaggctggcacggcattctgataaaccgggcacggcgccgggaacactctatttcaccgcgaatgtgattcaggatttcgtgaatgcggataagggcacccgggtcggcaacagttatgtgaaagagaaaacaccgggcacaaccggcgaactgggggcgggtctgcaactgccgctgggtgacaatgctttcatgtatacagatgtgcgttactcacactcactcggcagcagccggggcgacagtgagggggtcagcggtaatatcggtatccgctggcagttctga

SEQ ID NO: 282179 - DNA, 2184 bp, Morganella morganii
atgactgatacttctcaatggctgtgtgacttctttggagacggaaatttactgaagctggacaggctgctagaaaacgttgaaaacgcctaccctgcggacttaaaagccgtcttactgccgctctacgagagcgcaactgacgctcagtggccgattattctgccctggtgcgatgctcatcgctgggtattttttgccgcagcagaaacggaacgcaccacactggaactcagcaatgtgctgaatgccaggctgggctctgccgatgttattgccggcagaaaggtgactttagtcccagcgcaaggagcgacgtcgctatctgaaacggctctgctgagacactgcccggccggatttatacgaatcgaattacttcccacaaaacagaaggataaaccggcaaaagagcgggtcttcgctgcgctcaaagacgttataacactgtttcgtgacaggccatcaatggtacgtacggtcaagcgcccctttgggcggatcttgagtgattttattctggcaagtagccaaaaagacgaaaccacaagcgacgctttactacaggaactgaagaacaatggcgcactttcgcggcgcaaccttatgctgctcgaactccaacaggcaggtaagttggaaagatgggacacgctgctgaatcacgattcacttgtggatttagtgcggggacgcattcccacaactctaatgaggatgctgctgaaagcataccagcaagtctattttacgcccgacagccacgggtatccgcaggtctccccggcggatcttcgcccgcaatgtctggcactacatcctctgtttacgcagatgcctttcttatcccaggatgacgctgacatagctacgtggaaaagttgggccaccggtgtgatgcttattggagaggtcaacctgctcaacgcgttgccagaacgtctgaaaaccgactggctgagtggattacacacttgggccagtcgaccgttcaacgttgtgagtccgccagatacgacagcgacggcgtcggtcccagatacattgcaacagcttgccgcatatctgcaagcctccctgacagctacgcaagaagagattaccagctacgcgcaaacactccacacgctggatcagcggttgatggagcaggcgatggcggtaccgctgctgaaaacactcattgaggaaatccgccatctgagcaatccgcaaatcgtgggctgggatatctgtttctcccgactgtgtcagtcagaaatcgatagtaacaacctagtgcaactggtcgcgctagaaagtgaaaactggcccgctaattcgtttcatgaagcgacgatgctccagttactatcaagtcaggttccaccagacgcgttcccaatcctgcgtaacgtgatgcctgcctttattgaatggcttgaacgtcatcaactcagtctgagtagcatgacgtggctgaagtggctggatgttcttgcgatggagcaaagcgtcagtcaggcggacattaagctagccgcgatggcgacggaccggttcctacaaggctccgttagccaggaagcgtatcaacagtccggtgccatgctggaattgatcgtagaacgagccagttctttccgcaacctgtctgcgttgtgcgagttaatcgaactcttccttgatgctccggtgcaggatctggcgacactcacctcgctttggctcagagttcagtcttttgtaggcggaatatgggcacgactggatccgactactcgcaccgttatgcgcaacttggcgacaggagtgctaggggaaggtgcagagagcgtatttccggctgagaaggatagcggtacggcagatgcagaagatgagttgccagacttatccggagccagagtagcgatttatagcctgacagaaggtgcagcgagacgcgcgaaacagatgctagaaacgctgttcgccgggctcagagtggagacctgccatgcgcacacggcaaccgataagctagttaatcaagcgaaacaggctgattacttcatcttttcggcaggcagtgccactcatcaggccttttacgcggtctcagcgcagcgcaaagatttaatctatccgacaggtaaaggtgctgggtcaatgctgaatgcatttattgatcatgttaaacaggccaacgtggttgcagcataa

SEQ ID NO: 282180 - DNA, 531 bp, Morganella morganii
atggaagaacaacgacaaattttcctgcatggcccactgggccagcgacatttgcgggaaattctgagcgcacagtttagtggcctaatcctctatccggaactaatctggctgatctcgccgtggatgagcaacttcgacgtaattgataatcgaggcggtcagtggagttttcttgatccttcttggggcgcccgaatgattagttttcaggaattactcgctaccgccgtcaacaatggctgtccgctacgcatcgtgacacgtgaagacacgcgcagcgtggtctttatcgagcgactactggcgcgcttatcacccgaccacgacatgcaatatatatatcacgagaacctgcacgccaaagggatgctgaccaaacacttctttctgaaaggctccatgaattacacctggagcggcgcaaatctgaacgatgagcatctgctgttttcaaccaataatacggttatttcagatgccttgattgaatttagcggccagtacacctttggagacacccatgactga

SEQ ID NO: 282181 - DNA, 4437 bp, Morganella morganii
atgtctacggctgatttgtcccacttgcaccaggcgctggacctgctcgaagagcgggaagcggaactgctggtctggggggatacggatggcgcatttacccatgccgatatcatctcactctttacccggcacctgccctacgaagatgccgattcgttactggaagagttgcagaatacagccatgctcttcagcgtcccgaccagcaaaggagagacgcgctaccgcacgcgtatggcggaatcggtccacttgttccgacaccagcgtcaatggttccgtgatcaaccgcttcagcgagcccgaacgctggtcgccgactaccgtttcgtccgtcgcccacgcaactatccgaaacgggaacttccggcgcaaacagtgctgaacaaatgggtcgacgtcccgtggatgaacgaaattaaacgccaggcgctttcccgactgatcggtaacttttctattgccggttttcaggaacgctcaaccgaacgtattttgcgcgcttggcactttcatagccatcatgctcacgcgaaagaagccaccggaactattgtctgtgctggtacggggagtggtaaaacgctggcgttctatctcccggcactcacttcgcttcttaatgatattcagcgcgacaacgcactgcgagtcaggacgctggcactgtatccgcgtaaagagctgcttaaagatcagttcatggaaacctggggcaaatgtcgtgagctcgacagtcaggccctggcactggcaggacgcaagattcgtattggctcttttttcggtgacaccccgttcagccatcaatacgcaacaaaagataaagacaaggatatgccctttgatttactccgttgcaccacaccaaaatgtccgggacaaatgcactggaaagcagaagatatcaaattgaaaagagagattcttcgttgtagtcactgcgatcatagcgtagacagtgacgaagtgatcctgacccgcgtctcgttaatgaaaaacccgcctgacatcctgtttaccaccaccgaaatgctcaatcagcacctcgggaacaaccaagcgaatcaactatttggcattggcatcggcgtaacgccgccgccggtagtcctgctggatgaagtacacacctatgtggggaatactggtgctcagacggcctatctgctgcgacgctggatgcaacttgcacgtagtcgcccccattttgtcggactgtcggcaacgctgagtgacgccgaacgattcttcgctgacctagtaggtgcgcataaaaaacatgtagctcttatcgaaccgaagatccacgaaatggaagatgaaggggcagaatatctactggcattacgcggcgatccggtttcacaaacagccctcctctcaacgactatccagaccagcatgctagcccggcgtattctggatacgaaaaggaaaaaatcgcgcggtacatgggggcaaaaaaccttcgttttcaccgacgatctggatgtcaataaccgactttatcatcaattatgtgacgccgaaggttggcggtcgcgcggtcaatacttattcgttgcgaaaccgccgctggccgctcagcgtctggaaacactgcaaaacagccatgcgctgactcaggcgggacagaactggcgtatcgcgcaggatattggtcacccacttgatgaaaatgaccgggccatcgtcgcccgaacgtccagtcaggacgtcggggtcgatcccagagcggaaatagtgattgcaaccgcgtctctggaggtgggctttaacgatccctccgttggcatggttatccagcataaagcgccacgtaacgttgcctcctatttgcagcgtaaagggcgtgccggtcgttcaagaaccatgcgtccgtggatggtcgcagtcctgtccgaatttggccgagaccgcgtcgtttatcaacgctatgaagaactcattaatccagagataaaagggcagtcgttgccgatgggcaacattcatatccagaaaatgcaggcagcaatggcgacacttgactggttgagcatgaagatccctggaagtaatatctggtcattgctgaataaaccgcagacaaagccagagtctctcgaccatcttgatcgtatgctccacctgattaccgccgtgagcgaacaacatgcatggcagcaggaattggagaagtatctgttctatgcgctgcgcatcactgacgagcaacttcagcgcgtactgtggtcgcctccccgttcgatcatgatggagttgctgccgacattaaaacgacaactcaccacccaatggtcgcggataggccaacctgaggcagaccgttcgacgggacgttccccgcttccggcctttattccttcagcgctattcagcgaactcaatctgccagaactggagatccatctcgagcgaaagttcaagaaacgcgaacatttgccctttattcagggtctgaaagagtttgcgccaggacgcatttctaaacgctatgccgtttattccgacaatgaagttgactggctgattccggacagctttgttccggtaatgaactgcgtttcaaatgttgattttgaaattgaacaggctttcggcgatacctggcagccagagtgtatcatcgagtgtgaaggtcagcctcctattagggtcattcgtccgatgcaggtgcttacgcgcgcgctacaattcgagcaaaatctcactgagaaaagcaactcgcaactgtgctggcataccctgtttaaccctgacgatcaggccgatccgctccccattcctgctggcccgtggatggacatcctccgttccatgacattctttacccaccagaatatgacacctctcgacgtcacgcgttacgccacccacgcaacagcctcgttacgcaataaaacaaagcaacatgcgcatgtgaacttcaggtgggtcgaccatggcgagcctgtcggggttggcgtacggcagtgggtggatggcgtccggctcagatttacgcttccgcccactctgctgcaacgcctccggcatgacccggccattcagcgcgcactacgaactctctatttccagcatcgaatcaaacatgaaccacgtttcgaatatgacacgttcaccgctgactggatctacgagtgctacctagctgcggttacgcgggaattggtcacgcagtcgtctctggctgacgctatcacggaattaaaaaccccggacggccaacgtagactggctgatatcgcggactctctcttccaggcagagaatatctttgaaaatagcgaggatggtgaagacgacgccgaaagccaggaactgcagcaacatttgcgcagcctgtttaaagagaccgacatccttaacatggtggacaagcacagcacgatcctgactcaggatctcagtgatgatctcgatttccagaactggttacagtgtctgctgacaacgacctttgccggagcggtcaaacaaaccagccacctgttactgccggatgtcgatgagcgcggtctgctggtggataccgaactcaacgacgaggtactggacgtctggctgaccgagtcagaacccggtggttgtggtatcattacccgtctggaagacgtttttcatcaggatccagtctccgtgcttaatctgtttattcgtagtttttccgccagcgactacgagcagatcgactacggcctgttcgagatgctttcgcgacttccctcttccaacgaactccaagaggccttgaactcaatacgtaaggccagcaactattcgcagcgccgtgaggccaacgctcacctcagaactctgctgaaggcgcaaggatttgcactcagtcacagttttatgtcagtgctgcacacgcggatcctacgcccgggcagtcgggcgtcacatgatgcgcagatgctgacatatctcatcgcatggcgggacctggaaaacaaagccggatacgaaattgctctgaatatttttgctcatacccaggcgacgcaagaactgcctggcgccagtgtgactaaagtttttgagcgtttttgcaaaattcagggaatgctctggcagcgaggtaatgccatccgtcagtcggttctcagctattacaacccctttaagtccggtaacaacctgactgaacgactgctgctaagctcactgtttcaacaaacggcgtgtatcatcagcatcagtgagagcgactggttagcacagttacatcacgccattacccaacacggctttgcagaattgcatgtgccgcgagagactcgccatcgtattgtcgaagtgatctctctgatacaggtgaccccgattgagtacttcggtttgcatctctacccccgcgcgtccgccgtggactatcaggatggcaatctggtgttacgtattgaactggccgaagcgctgctgtaa

SEQ ID NO: 282182 - DNA, 849 bp, Morganella morganii
atgaccaccttgcgccaacaactagctgaaatgcaaaaagaactcgatcttagcgttcaggctggtaaggcatcacaaatcatcgataaatgtaatctggtgtacagcaaaactaacaccattgccgataagtttgcattgcttaaacagcaatatcccgcccagcaacaactcccgcagggcattgcagttacctggaatgacgagcagcagagcgaactgatcgccgccgcgaacagcgtcaaaagtctcaagttacagtggggacgctggctgaaaaaccagtcggtaaacaatcccggcgaggaagaaaaccttgcagatcagaaagagtcgccacagaactctctagatgagacgccagtcgcgtcagaggaacctaccgcttatgacattatccaaaatgattccttgacccattgtgtcagccaactcggtaccctacacaaggccctgagcaaagaactaaaagatgcctgggatgtatggctggaagagttacatcagcaggttcatgtcgatgacaagacactgaatttccaaaaaaatgcgaacaaacttgacgatatcgcctccgactatgagcgtcgacgtcaggatttcaaaaacttaacgcagtgccaaccagtaagcggtgaaaagattgaccaaatcaaagcgctagccgaaaaactaaattccctgcgcggcatgatgaaaacagactggcctgacgtggtgcaagcatttttcaatagcattaatggcccgcagagtctccgcccgacgttaagtgccctgacgcccgaagtgcttgagtggttaagggatgaagagatgctggatgagttcgtgatcacaaggaaataa

SEQ ID NO: 282183 - DNA, 3195 bp, Morganella morganii
atgagtatcctagagtattggcccactcgagaaaatattgaacaatgtattcgctatgaagccgaagagttgcaggatcatgtcctgttagctgtacatgagccaatgctactcactcgacgtgatgtaaataaccaacaggaaaggttgcatgatgaagatctgtttaagcaattacttcgcactgagcgtgccatccccttaattggtcgctcaggaatgggaaaatcccatttagtacgctggctagactgtcgtttaaaaatgcatctcgctaaaaatggcacaagcgataagtgggaaatagtccgtattcctaaaaatgccagcttgcgtcaagtgcttttacgtatcatggacaatctggaaggagagtttttcgacagcgcacgcaaacgtgttgacgaagtatcagaagcctatcctgcaaaagaccttgcagaccttttattgacaatgatgtctcatcaattacaggaaatgaatgagtctgtcatgaaagaaggtaaggaactggaagaacaaggtataactattcctccagatcacctcgcttatatggagtctgtcatggaggaggtgcaaaacggcatctgcgacctcattacagatccgaactttaaactaaatctgttgaatcctaatcactgtattttcaaacgtgccagtcgtatgagagacaaccaagaagatagtgaagaggaatgtgataaaaatgatcttcagccggaagatttatattttatctttgaaccggacgatctatcagcccgagctcgccaatatttaaatcattcacaattgcacgaacctgatcacgttgacgcccgtgcccgggcagcccgagtcctcaatgaagcaatggacgctgcacagaaatctcttttcgcgcgacttttcacctttaatggtggttcttttcaggaactgttccaggagatacgcaaggaatttttaaaacaagatcgcagacttgtgatcttagtggaagatatgtcagccatttccgctattgaagatatactgatagatagcctgattgaagaagctgcacctgacggcgtgcaaacactttgtccgatacattctgttatcgccgtcaccgacaaatatcgaggttatcaacgtcgccaagaaacattgataacgagagctggttacgagtggattgttgaaaatactgaaaaagaaaataacgaagatcttatagtatccctttgtggtcgatatttgaacactgctcgttatggggccaacgatttaaagagcactccgggacaaggcacagacaactggccccccgtctggtctagcgaagagttccctgctgcactggaggattttggttactctactaagaaaaagtttccgctttttccattcaaccgcaatgctatcctggcactagcacataagcactgtcgtgaaaatggggaattagttttcaaccctcgcaaagtaattcaacgtatcctattagatattttacgagattgtagaactgaattagacaagtcacaatttccaccgataaacctcgcaggtattcatgccgatccagagatcgaagacaagatctcacagatggttgtcaaccgggttggcagttcagtatcgcttgccgctatctggggatacggtattgattcctacgatgaactacgtgaaaaattgcctagcagtgttgcgagtacatttggcctggatgaacttgcagcgcaacttaatggcaaagccccaacgaccgaacaggtaacgaagaacgcacgcgaaacaacgagcaaaacagacagcgcaacgataagtaaaaagcttgatgctcctgtgctcaaaccaaaagaagaggaaaaacccaccacaaaatccgaactacccttcattagggcggttcgtgcatgggtaaatgacaacgttattctaccgcaggatgttgcccgtgatttacgtgctgcactgaatgcctgttatgaaatgcatgcacagccagagttgttcggtatgtcttcgcgaccgccactgaaagaaggtcgttttacgttgatttctctaccaaaagcggcgtctgacccctcaagcattattacaagcttttactctgagcaagacctaaccgatacttcccgacgggtcgatgtgtataacgccgcggtagccctgctacgtatccagcattacaccaacttagagcaaggctttaattatcctgaggcacaggaagactacactcgctatcaaaatttcatccagtggtgggtgccgcaggctacggaaagtgccattaaccacttccgggcacgtaacttactggatgcaatgaaaaaacatctgcaaaaagctctgctgcttggactagtgaccggaaaagaagaacctgcagagatcgtcaacaccctctgccttacgcagaaaggcattggcagaactgaagggaaaaatataggtcgaacaccggtgagttccccatcggaaatctgtttcagagggattgaggagaccttacatccacacgctaactccagagtcgctgaggccagagtgcaagcgctctcaggatgggatgatgccagaaaagcgtggcttgagcaggttgccatcactgagcagggttcgggtgtgagcagtagtcgagcacttgatgccgacgtaatttactcagcactaaaaacattgtcaaaacagccgcttggtgcagaaattgaacgtgtagccctctcagtcaaacaggaacttgctagcacgctagaaaatgttcaactctttgccaacatcaaagatagcgacgatttcctcagccagttgaacgactggcagacgtttattgaaactgtgcgggccgagcactaccccaccggcagcgctcagtacaagccatcttcgtggatgttgggtgaaattgaagccctcagaaccgacgccgaggagagtctggcgacattaacttcattactttccattgaaaaacagaaagatagcgcgagactgtggttagaaatatgtcaacttgacggtgactacgtttcaagaatcaacagcgtacttgctcaatggaaactggtacaacctaagatcgcattcgcactccagcagatgaacgctaaaggggatatacagcaactgactcttgctctgaatagagtgaatgaccgtctgaaaacactggcgagcgatatcaccgcctctggagtcgatcaatga

SEQ ID NO: 282184 - DNA, 876 bp, Morganella morganii
atgtcaataattaacaacgcaaacccaggaagcggcctgatactgcttcctttaattgaacgggctcttcaaagtacacaggtaccgttgtctcaagactcgctcctcgcccgctatcgtcctgacaacctccccgctaacgacaacgcttgggggaaattaaaagagaacctgagtttctggtgcaatctgggactatggccgatgcgcgacgcaatggtgttaccgcttgaagaaaatgcgcatccactgacgtatcgcctgcttgactgcgcaattgatgcttgtcgcgaaaaaggcgttgctaatggaaatgaatgcgaaccgttgtggagggtgttgagttgcctattgagtcttcagcaacattcgctcgggggcctggaaccactcgctccgacgatcatcactaacaaagtgcataaatggttacccggtgaaaccatcaacaccaacaccgaaaagctagtgcgagaatttggccgttttctcggttttctcgagttattgccggacggcaattatgttaccgaccctaccagggccattcagtgttttctgccagaaatctttggcgacacgcgcaccctccccgccaaaatttttatggcaaacatggcggaggtcatgccgatgatggacggaggtcaatttagaaactccgttcatgttgtgatgcaaaaggagaaagactggatcgcaccggatgtcgacaatatttgcatcagcacatccgttgcgctgcaacgacttgaaaccagtaagcaaatcattctcaacaccggaagtgatgatgaaaatgtagtatcgctgcaactgccacaaggtaaaagtcgtcggataagtcagataacactgcgggagatgagtgcatga

SEQ ID NO: 282185 - DNA, 2481 bp, Morganella morganii
atggaagaagaatggtcacgcctgcagcaggcactaaccacctgttttagccaaggggtcacatttaaggatggcatcgaaaatcagtttctgaacagactgattcagatcatcactgatgcttcggcagggcatggtgatatttttgccggctacgccgatgcattacgtgcggcccatgtgagcggtattagcgagccgtggctccccttgccgccggaactgaccgacgttccggcacctgactggggcatgacaaagtcgcctgcaacgcaacaaattcaactggttgaagaagcagacctggcgctgaccagagccacctatctgcgtaaaatccgcaggaacttgctgcgcccagataccgatcccgcactgaagcgcctattacccgaggagccctggctgactcattatcagggattcggtcaacaggccgctattcggacgctactgacgtctgatgataactgtacgttgctggtgaatctgcctactagttgcggtaaaagtcttctcacccaactccaggcgctcagcgcaccgacaaacaccctcacgctggtgatcgtccctaccgtcgctctcgctattgagcaggctgacgacatacaaaaactgcttcgtggtaccgacctggatcatggtgggagttatgcttgggtcggaggacaagatcagcccgcacgtcaggcgattaaggaaagaatcaaagcgggaacacagcgtgtgctcttctgttccccggaagccgttcgctcttctttggttcctttgctgtttgagctttccagactgaatatgattggcgcgatcgtcatcgacgaagcgcatttgatcgatcaatggggcgcggagttccgccctgactttcagctgattgcccctatgattcgctcactgaaagcccagggaaaatgccgttttcgtacactgctactttcggcgacgtacagcaaaagcactcggaacattctggtcgaacagttccatgatgaaaatagcgaactgattgaagtgtcagctaattttctacgcccagagccggaatattttgtgcaccatgaggtaaatgaaaacacgcatcgtcagcgggtcgaacagttgctgatgaccttaccccgcccactaattttgtattgcactactcgctcagatgcagaaatgtggtctgtccgtctgaacgaattaggctactggcgaaccggcatattccacggacaaattgacaaaaacaatcgcaaacaattgatttcaaaatggaaaaatgaccaactcgatatcatggttgccacctctgcctttggggtagggatgaataaaaaggatattcgcagcatcatacatgctgccattccggaaagtatcgaccgttattaccaggactgcgggcgcgccgggcgtgacggtagatcctgccaggtacaccttgtatggcataatgcgcagatgaaaacggcaaaatcactggccgttgagacgctgatcggcgtagaaaaaggctttgctcgctggaaagcaatgtttgatgatcgcaaggaaagcccgattgctgactacatgatttcactaaacaccaagcccgttcatattgatcaccaaggcgataaaaatgaagcctggaaccgtcggacattgctgttaatgcaaagggccagactcatcaaactggtctttgctgatccgaaaattcctgacacccttcgagataatctggatgacgacaacacgcaactaagtgaatggttcgaaagctactataaccaagtccacatccgtcactgtgacgatgctcattatttagaagcgcactggaacacccatgtggagaagatccgccagtccgagttgaataaccgccgagcagcctttacggtaatggaaacatggttggaagaccctagcaaatcactttgtaaaatcctgcagaaattctatgaatatcagaaccatcctcccgagttaacctgtggaggatgcccaggatgtcgccagaaagggaaaggggcattttcccccaccgtaggctcagatgtacaaattttacgttccgagccaatgaaaaaagcactcttcgtaggtgccgaaaagaaagtgtattacaacgaaaacatgaagttgcattcgttgttaacggaacttcgtgtaactttgcggtctctggtcacctctggcaaatatgtatttattcgtgcggacaggcaagtgttcctccaattagagaagaacatggattcgctttcgcacttctggagcgcacagaaaattacatcgcctacatctgatggaccagagatcgtgatcatccctaacacggccaacgcgttcccgaacctacccgtgacacgctttgagcgaattattattgcgcctgagcatctcgcagatcctcagtacccacatcgaacatggtgtgcaagcgcaggtaattcattgtcgctggaaacttttatcaggcaactacaacatgtcaataattaa

SEQ ID NO: 282186 - DNA, 3108 bp, Morganella morganii
atgaacgtattacccattgggtcactggttgtctctgagcaatttgaaggcataggtaaagttgtcactgtcgatagtgatacaaataacgccacggttgctttttttgagtcaccggcgcaaccttacgcacggcaaaccgaagtttttttagaacaactcatcctcacgataccgcacgaagagacggtaatttattgcattgaaccacaaagcaaacgatgggccagagccagatttggcggttcgcgccccaaaggggattttctcgtcatctttcgcgaagatgatagtgcgactttgccaatcgacgaaatttttgttctgaacaaagcacctgataccccagtaaaccctgctgattttcttgccctccaagctaatgatgcaccgttctttttccctcaccgccaggcctttatcgagacttacatccagcaacgtgcaacctgccgagcaatggcatccatttccagtagtgccgttgaactcgaaccccaccagttggcggtggtacgccgtgtgctccaggataaaaatcctaaatatattctggccgatgaggttgggctggggaaaaccatcgaagccggtatggtcgtccgtgaacacgtattagaaactactggccacgtcagcatgcttattgcggttccagcaccgcttgttaaccagtggcgggaagaactgggtgaacgctttcaactgaaacaacttattattgatacctcgtcagccctcgcaggtttgcgacaaaatgaggtcacagaaggcatcgtaatttgcagccattctgatgcctgcaccttgattgaactaggattcccaccttcgcttatcgtggtcgatgaggttcaccagattgctccctggccatggtcaggagacaaagatgaacgttactacttcaacctgatcgctcagggttgccggaaggcccactacgttctgttactcacggggacacctctgcatggtcacgaaaggaacttcttgtcaatgttgcactgtattaatcccgaagcctaccaagtggatgaagcccatctgctagactttaccgaactggtaaaaaatcgtgaaaacctcggcgggatcttctcggggctagtgcctaccgtctcgaacgtcagcttacgccgtaatctggaaacactgcagcagcagttcccggaagatacaattctgatgacgctctgccaacaactcatcccgcttattgggacattttcatcaaataccccggagcgcgaagaagggatccgagatattcgccggcacctaggggaaaactatcgcattcatcatcgtatgttgcgaaaccgccgtcaggtttcactcagcttcgatgaaacgaaaaaccttaatctgaaccttctgtttcccgggctcaacggagccgcagagtgtcactggcattgcgatgggttagcattagacgagttgattgatgagtatcgttccttatcttcactgccacagaatacgcagtgggcaatgaatgaagactcatacctcttatggatcgacgatctcctgtcaagcccactctgcgtcatgcaacgcgctaaagtgcatttgggtgaatcggaacgcactcaggaagaacgagacctattagaacacattgtttctacagcaaaaaatgaacttaaggtaattgataacaagctagccatcaccctgaatgagtggctgcaaaagaatccgacaggaaaagccatcgtcttctgcgatcgtccggatctagcccaacatctggcaataaagctcgagttgctgctggagtatccgcaggagcgttatcagtcgggtcaccccctgatgtacctgaaaaacggaagccccattcgggtcctaatttgtgataaaagcggcgaagatggtctgaatctccatggaggtctgcgactggccgttcattacggtttaccgcgctcttgcagtcgcattgaacaacgccttggtcgtctgaacaggtacagtgcaaacctgaaaggtgtaaaacccgttcagagtctaatcctgaaaaaccacgccgaccgtggagtacgcaacatatgggccagcattctgaaagacagcattggcgtatttaataacaccatcgccagcctccaattcgtcctcgataattatctgaaaaatgcgtggcgaaatatctaccaagaagggccggtgacccttgaacgtattgccagcgaattcactggcgaacagggcattctggccaatgaaacgaacaaaattaacatgcaggaaaagttgcttgcgatggatgacgagattgccgaggcggcgatttttgcgcaacagatcagtgctgacgatcaccttgcggtagctcaatgtaatgcgctgaccaactggatcacacgtgcgttgcgttttcgcgctaccggcaccgcagaaaaaggtatcaagtttcagttcgaactatctgatcgcagtacagggacgctggttgattttaaaacctttctcaccacctgcatgctaagtttcgataaagaaggaggcaacccgccgtcaacgcatctgatgagcgctgaacgcattccatctatcgacgggataaccgtttatccattgcggtacgggcagccatttgtagatacgatctggcaactgttaaacttagatgctcgaggcagttctatggcgatactgcgtgtgatccccgggcaactgaaggaacccagttatttcttccagtctacctggcttgtcacccatcaccagacgcaggatacctactcacaacgccgcacagcagacgaactgtcccccccacgtattattcaacactggctttcctctgaaggtaaactagtgactaatccgcaggtgctggaacttctcaatggcgaatatgccaaccacgaaacatcgcagaaattctatgcagatatgaatctgcgccctaaactctggcaagaaattgaagagcttatctcaccgaactcctggaaagagatggtggaacgagtctatgccagtgaccgggaacaacaacaaaccgccctcggtgagcaggccgaactccagttaatggccgtcaaaggcgtggtggtgtgcagcaaaaatttactggaggaaatcgcctga

SEQ ID NO: 282187 - DNA, 234 bp, Morganella morganii
atgaagacttttgataccgaacttgcaatgaacattatatcgcattcgacaggtgggtttagttacgaaacccttgctagagcattgatgtcaaaagtaaaaattgaaaatactgaagatcttcttgaatactgtagagttttttgcctttcgcttgaagagcaaggcatgttgaggcgaaatcataagtgcccggattcacaagatgagtacttcgaatttatctctcattga

SEQ ID NO: 282188 - DNA, 222 bp, Morganella morganii
atgataatcaaaaaaatatccacaagtgactcctttgttagtcatagcggtctctgcgtactagctcccaaatcattttacttagatatctggtttgactgttatggctatacctctggcaaacggagcagtcagatagttaacaagaacttgcatcacttcttatttttgatggtggctgttacgattataatattaaatttcaatgagttgtatcattga

SEQ ID NO: 282189 - DNA, 2553 bp, Morganella morganii
atggatgctatattaaaagatgtgaaattaaagatcgctggtcataaaaaatccgacgatgctattatcacacgtctaaaaagattgatttcaactggtaatgcaatcatatttgttggggcgggtttctctaaagattcaaaaaatattttaggaaacgatataccattagctactgacctcgcattgaaaatttcagatcaagcagcaaaatatctagagggaatagattcagatccagaggttatatcagaagtacggatgtgtgatgatttaatggttgcatctgatttctatctaaataatataccaagaaaagaagatttattaaaattattgaaagactattttacaatacaagaggttactcaggaacagattgatatatttagtatgaaatggagaagaatttatactacaaattatgacaacgcgattgaacttagtctcaataaagcaagtaaatctgtaactccattaacacttgaagatataccaagtgaatataaattcactgaggatatttgtcttcatattaatggcagggttgagcgttctagagtagatgaccttgattcagccatcaagttgacaacttcatcttatttatctccggagcagttcattacatctaattggtatagacaatttaaaactgacattgagaattctagcgcaataatttttcttggttattcaatgtatgatattgatatacaaaaaatatttttcaataataaagagataaaagataagacattttttattactagagaaggaagtactaagtttcaaaattataaacttggaatgttcggggaaactctaaatataggtgtgaacggattttctgaaatagcgaaagaatgtataaatgattctcataaaaatgatggggaagtatttataaattcaatggatttattttctatagaagacgaagattatgatataagggattcggatattagtaagtttatggttttaggtatagttaatgatagttacattaatgaagtgacacgcaaaaacaatgaaacctctaaaataataataagagaggaggtggatagaataattgaacatataaaagattcatatgacattctgattacaagtgacctaggtaatgggaaaagtgttataactaaaattttgatgtcaaagttaactagactaggttactcttgttattaccatttgttcaatgattttaattttagtcaagatattgatgctttgtcacagcttaataaaaaaatagttatatttattgatgattataataactgtgtcgaagatgttagttatttaattgaaaattgcccttccaatatacaaatagtattaacaactcgacatttcggatacgagaaaacaaaacaacagttattatctatagatatgaagaatttcatgtctcataatattgatgagctttctgatgctgaagtagataactttattgatattgttgataatcttggtgagtggggagagaaatcaggggtatctagaaatgaaaaattagctgatcttgatgaatctgcaagacatcaactatcatttttattactaacaattttaaagtcagagtctattaagctaaaaattaaagaaataaccgatgttgctttgactgataaaaaatacaaagatactatctttgctattcttatattagatataattggccttaagttatctaaaccgttaatttcagatgttgcaacaaataatgaaatatttaattctgggttttctgaaaatgatggcgtgcggaatttatttaatattagcaatggtatgataaaaactaaatctagtacattatcaagatttttagttgcatatatgctggataaaaaatatgtggttaatcagatgcttgctgtgatagagcatgtttataaaataaacgtaactgccagggatcataatttatcggaattaataaaatcactccttagattttctattgttgaaaagctattacctcaaaaacggcatgaaataaattatttttatgaaaaagtaaaaggtatcattcctagtctcatgtacgaccctcatttttgggtgcaatatgcaatgtctatgataccatttaaggattatcctagtgccgaaaaatatctaaccacagcatattcattagccttaaggcgggatgattaccatactaggaatattgatacccaacgagctaggttacaccttttagttagtttgacaaaagaaggccatgaagcatttaatgagttcaaagctggtgatgatttaataaagttgattccaaatgatatctataaatatagacaaatatcaagatatagagatgtttatgagaaaatatatccaacatttaataataaacaaaaagttgattatgagcatgcagttaaacgaataataagggaatctaaaagtcaagatttaattgatgatgtaacgtataaaataggtgtaaattggttaaataaacttcgtgataacttgggaagaattattactcttattgaggaggatagagttttagcaaagaaagtttga

SEQ ID NO: 282190 - DNA, 141 bp, Morganella morganii; identical to SEQ ID NO: 278464

SEQ ID NO: 282191 - DNA, 192 bp, Morganella morganii
atgcgcatgtctgacaaatattccagccctacagcatacgcctggggacttataacctctgcttttggtgttttatctctggaccagtgggctattgttgccgggatcatctgtactgtcgggacgttcctggtgaactggtattacaagcggaaagaattccaactgaaagccggagaacatcatgaataa

SEQ ID NO: 282192 - DNA, 525 bp, Morganella morganii
atgaaaagggtaatcactgtattactcaacggctgggtgtgggcggtagtattcttcggtctgtggatgttcagcctgttatcggctgaaaaatcagaagggcagcacaaagacgatgtaatcaccgatcagcaaaaggtgattgataacgcttacaccagcatcgatatctttgaccgcgtgtccgcagcgaacgccaaccgcagcatgcgcatcgaggccaaatcacaggagaagcagattgaataccgcaccatcatccggaaagagcctacctgtaatctgtatattcctcagtctgtttctgacgggctgctcagccacgtctacgccatccgtgaatcagcaatgcgttccgctcccgacatcgctgacacaaccggtgctggctccgctaccacccgccgactgacatattgccaggcggttgagtggatagagccgctgctgacggcactggataaggctaacgggcagttaatggatatccggaaagcggatactgagagaaacagacgaaagtaa

SEQ ID NO: 282193 - DNA, 1008 bp, Morganella morganii
atgaaaccggattggggggtgttacagcaacagttcctcgccgagcattcagtaacgggaatatccccgaaagaatggtgtgagatacagggactgaattacgcaacagcgcgtaggtacatcaaaaagccaactgcgcagagtgcgcaaaaaactgcgcaaaagaaagtgcgcactgcgcagaaaaaagaatgcgcaaatgaaccggtgcgcaatagtgacataccggatgcgcagagtaatgaatccgacaatgcgcagaatgatgaaactgagttcaacctgcgcaattaccggctcacagacttacaggctcgtttcgtggctgagtatcttatcgacctgaaccggactgctgcatataaacgggcagggggaaagtgtgaggggcataacgcttacgcaagcgcgagtcagttatatagaaatattgaggtgaaccgggcgatacgggacgctctcgcagcgcgggaacgcagagccgaaatcacccaggacgcagtattaaaaatgtggtgggacattgccacagcagacccgacagaactgacggagtaccgccggttatgctgtcgccactgctggggctttggtttcaactaccaatggcgggactcgatagagtttgaggacgcagtcagtgaagcgactgcgaagaagcagaaggaaccaaacgacaggggcggctacggttacgacagcacactggatccgaatcctgattgtccccgctgcaatggtgccggtatcggtcgccctcatttccacgatacgcgggatttaaggggcgcaagccgccggttatttgccgggataaaagagggtaagttcggtaccgaggtgatcacccgtaatcaggatgaggcgctaaagatggttgcgcagcatttggggatggttaaaaaccggacggagtttaccggaaaagatggcgagccgatcaaagtggaagtggcaaacctgtcatcacaggaagccgcagacctgtataaaaaactgatggggtaa

SEQ ID NO: 282194 - DNA, 1620 bp, Morganella morganii
atgccgatcccattcccgtttgacttcaaaaatccggactacaatgcggtgtttgaatggcggatggagcggcttgtgcgcatccgtcagaatccggaagtgttgcctgcactcagggcattttacaaagataatccagcgcagttcattattgattggggaatgacaacagacccccgcaatatcgattacgggctgccggtgacgatcccttttctgctgttcccgaaacaggaagagtggatacactggattatggatcgccgcgataaccgcgagaacggcataaccgaaaagagccgcgaaatggggctgagctggacatctgtcggaatggcctgctctctttgcctgttcaatcaggaaatggtgatcggcttcggttcccgtaaagaggaatacgtagacagcaccggagacccgaaagcgctgttctggaaagcccgtaaatttgtggaaatgttgcctgctgaatttcgcggtggctgggatgagaaaaaacatgctccgtatatgcgtgttgagtttcccggtaccggcgcaatcatcaaaggtgaggccggtgataacatcggtcgtggtgaccgtaccacactctattttgtggatgaggctgcgttcctgcagcgtcctctgctgattgatgcggcgttgtcacagacaacccgttgccgtatcgacctgtcatcagttaacggcatggcgaatccgtttgcacaaaagcgtcacagtggccgcataccggtgtttacttttcactggcgcagtgacccgcgcaaagatgatgcctggtatcagaaagagtgcgagaagatagataaccccgttatcgtcgctcaggaactggatctgaactatcaggcgtctgccgaaggtgtgcttattcctgctgagtgggttcagtcggccattgatgcacacatcgcgttgggtatcgagccgaccggcacacggcagggcgcaatggatgttgcagatgagggtaaggataaaaacgcattctcatggcgctacggtttcctgttacagggcattgaagaatggagcggcaagggcagtgatatttacagctcagttgtgaaagtcttcgggtactgtgatgacaacggcctgacgtcattccggtttgatgaggatggccttggtgccggtgtgcgtggtgatgccaaagcgataaacgaactgcgcaaagcagaacggctgccgcgtattgaaacaaccccgttccgtggcagcggcggagtatttgatccggatgaagaagcggttcccggtgatgacatcagcaaggctcgtctgaacaaggatttctttgccaacgcgaaagcgcaaagctggtggcatctgcgcaaactgtttcgtaatacacaccgggcacgcaacgggatggattacgatcccgacgaaatcatttctatcagcggctccatcaggaacaaagacaaactggtggtagagctgtcacagccgacgtggactaaaaattctgtcggtaaaatcgtcattgataaacagccggacggcatgaagtcaccaaacctcgcagatgcggtgatgatcaactatgccccgatggaagatgacctcgatatctggggattactgggcagaagcaaatga

SEQ ID NO: 282195 - DNA, 1455 bp, Morganella morganii
atgacaaagaaaaaacagaacgcagtttctcaggccacggttgacggctatgagaactttgttgcgcgggtcggtatgcagacgcagaaccagcactcggcgtcaacataccgtcctaactggaccagtcgtaaccgcctgctgattgagtcagcatatcgttcatcctggattatcggggcggccgttgatacggtggctgacgatatgacccgtaaagggatccgtatcacatcgcagatggatgtcggcgaacgtgacgttatggagtcattgtttgatgaaatggaaatctgggagggactgaacaatatcatcaaatggtcgcggttatacggtggcgccgtggggatgattctgattgaggggcaggctccgttcacgccgctgcgtccgcagacggtgggtaaggggcgatttaaaggcattctgccgctggaccgctggcagattaaccctgattttaaccggcgtgtaaaagacatcggcaaggatcttggtaagcctgaattttacgacatcgtgacgaccgagaacggtattccggcgtggcgggttcatcacagccgcctgatccgtctcgacggtgtgacattgccgtaccagcagtcgaaagcagaaaacgaatggggaatgtcggttgttgaacgcatatttgaccgcctgacagcatttgacagcacatcggtgggtgcggctcagctggtgtacaaggcacatctccgtacatacaaagttaagcaactgcgcaaactgattgccctcggcggggagccttacgaggcgtttctgaaacaaatggatatggtccgacagttccagacaaacgaagggatgacgctgatggatactgatgatgagtttgaaactcactcatattcattcagcggacttgataacgtgctggcacggtttgctgagcagatcagcggtgcgaccggtattccgctggtccgcctgttcggtcagtctccgtctgggtttaataccggtgatgcggatctttccaactattacgacaatatcgcaacccagcaatcccgccgcctgaaacagcctctacggaaattgtttgaaattatccatatgtcggagttcggtaaaccactgccggatgattttacatttacatttaatccgctctggcaaatgtctgatctggataaatccacggtggcggtcaatgtcgttaacgcgattaacgctgcacaggacggtggcatgctgacccgtaaagcagcaatgtctgatctgcgggattcttcggatgtcaccggtatcggcggaaacataacggatgaggatattgataatgcggaagatgaagccccgccgcgcctcagtgatgtccacgcatcagcagtcagaccgggcggaaatccggtatcgaacgagcctacaaaagatagcgcaggaagtcgggcggataatcaacagtcgttacgatggttctaa

SEQ ID NO: 282196 - DNA, 597 bp, Morganella morganii
atgggggcattggatgattacagtgctctcatcgacggatgggcacggcgggtggcagaaacattcgcggaagacgtcgggctggataactcaaagcaatggatgcagcaaagccgggcaatgagccgcgagctcaggaagcagattgacggtgctccggtcgggcatgttatgcggtcaatagtcaatgagcagattaaatatattaaatcgttgccggcggaagccgctgatcgcgtgtatgacattcagaaccgtgccattgaggcggttgttaacggtgagcgacctgagcatttcgaacagatgattgctgaatcaggcaacatagcaaaatcccgcgcgaaactgattgccagaacagagaccggacgtgccacccaggcgctcacgcagagccgcgctcaggccgtcggatccccggggtatatctggcggacgtcaaaagacggtgatgtgcgtgattctcaccacaaaatggaaggaaaatatattccgtgggagcaacctccgactctcgacggtatgaccggacacgccggaacgcttccgaactgccgctgttactgcgaagtctcattttcagacacagagtaa

SEQ ID NO: 282197 - DNA, 1203 bp, Morganella morganii
atgaaatatttctttaagaccaggctgggtaacacccgctacgaactggccgacggttccctgttgtgtaaaaacgtcccgatcgcgcggacaggtactcagctttattcctcacgggatctgccgaaactcaccccggacagtcgcggggagattctggtggagcgtctgccggaagatgtgttcagtccggaaaccatggcctcatttgagggaatgacaataacactgctccatccgagcgatgacgatggcaatgtcatttttgtggataccgccaactggcgcgatctggctcaggggcatttgcagaatgtgcatcgcggcgagggggagcaatcagacctgatgttggcagatctcatcattaaagatgaactggcgattcaggaaatcaataacggcaacgatgaagtgtcctgcggttatgacgcgcaatatgagcagtcagcaccgggtaaggcacggcaggtaaaaatcgttggcaatcatgtggctcttgtccccaacggcagagccggaccacgttgtgcaattggagacagtatgtcaaagaacacacaaaacagtacctggtttaagcgcctgctgaatgcgcacagaaccaaagactctgccgcaatgcaggaagtattagacaatgcaccggaagcgctggtgggtgacgaaggcacgggggatttacccaaagccatcaatatcaatatcaccccgcagcagccgttgccgaaagaagaacctgaaatgccgaccggagatgaagaaccgccggcatgggcgaaaacgattattgcccgtctggataagctggaaggaaaaacagccgatgagggcgaaggtcaaccggataaggatccgaccggagactcagaggaagaaaccaatattaccggtgatgcggcctacaaagctgaattaattctgccgggggtggatatttccaaaccggccagaccgacggcattcaagcgtcatgtgctttcaaccgcggatcagagcatggtgcgtatggttgtcggggatgctgaaattaagcggctgcctaagtcaaccgtagatatggcatttaacgccgtggccgaaattgctaaaagccgcaatactgcgccttcccgtactgctgatgcccgtcgtgcatccggtaatcctatcgctgacctgaacaaatcaaacgctgatttctgggctaacagaggtaaataa

SEQ ID NO: 282198 - DNA, 492 bp, Morganella morganii
atgaattcaaaaccatacatgtaccggatgcctgcgggtattgccggggcagtttcacgttaccacgatctgaccgttgagccggtattactgaaatcggataccgcattccctgcctatggtctggccggtaaatatgaaggtgattattttgtgccgctggccgaaggggatacggcagctgttattcagggtatttacgtccgtccttatccgacgactgagacagctgattttatccggcaggtcgggaaggggaaaaacttcccgggggatgcgcttaaacgcggctatatgacggtgtctgttgcagacgccagctcactgaaaaaaggcggtaaggtatttgtgcgtgtaaaagcgacagatactgagcctgtcggctctttttctgatgccctcattgagggtgaaacggttgagctgcctgacgctcagtttaccggctccggcgatgccggtggcaatgctgaaatttcttacaagatttaa

SEQ ID NO: 282199 - DNA, 948 bp, Morganella morganii
atgccaatgattacatacgatcagcagacggttgacagcgccggtgcttttttagtcggcgaactggaacgtcttgatcagactatcaacctgccactggttcagtatacctacacccgggatattcagttccgtgaagatgtttctatcgcagatgatatttccagttttacccgtaccggttttgcggcagcgggatccggtgctaatccgaatggtaaaaactgggtaggcaaaacatccacagcactggcgggtatcaatgtggatatccagaaagaggggtttcctctgcagttatggggaatggagctcggctggactattgttgaattacaggccgctcagcaggttggtcgccctatcgattcgcaaaaacatgacggtatgacgctgaaatggaatatggatgcggatgagcaggtgtatatcggcgatgaaggtctgggggtaaaaggtctgctgaactttgacagcgtgactctgaataatgccgcgaagccgtgggctcagtctacagcagatgaaatccgtgacagtatcaataaaattctcagtgacgcctgggcggcttctgcctattccatggtgccgactgatcttctgctgccacctgagcagtttgcattgttatcatccactattgtgtcgagtgccggtaaccagtcattactgacttacctgcagacgaacaccatcgcatatcaccagaatggtatgccgctgaacatccgtgcagttaagtggctgaaaggtcgcggtattggtggtaaagatcgcatgatggcttacaccaatgataaaaagtacgtccgcttcccgctggttccgcttcagagcattccggtgcagtaccgcggtctgtatcagctggtcgcttactacggcaaactcggcgcagtagagccggtctatcgtgaatcactgtcctataccgacggtatctga

SEQ ID NO: 282200 - DNA, 348 bp, Morganella morganii
atgaaaattcaggtgaatacaccgtttaatctcacgatggaaagcggggaggtgatcagcctttctgcgggtgttcatgaagtcagtaaagaagttggtgaacactggtttaccctggcgcacagtaatgtgctgtcagctgatggcgctccggattaccggcagttatccgccgaacttcaggagcaaaatacggccttgcgggttcggctggaagaaaatgaacaggagatagctgttcttaaacaccagatcgaaacactgaaaaaccaatctgatacaaaccagacgggagcaggtgatggcaagaaatcaggcgctgccgacaatcgaacaggtaagaaatga

SEQ ID NO: 282201 - DNA, 408 bp, Morganella morganii
atggcaagaaatcaggcgctgccgacaatcgaacaggtaagaaatgattttccgctgtttgcggataaagaccggtttcctgacagccagatcacattccgtcttaatctcgccgataaactcctgagtgaaaaatcatccggcagggagttattcccgtactgggtggagctgtttgttgtgcattacctcacactctgggatgcagataatgtgtctgctgctatgggcggggtcggtggtgctgtcaccggagtggcatcttctgaatccgttgataaggtcagcgtcagttatgacaacagcatgactcttaaccctgatgccggattctggaataacagccggtatggtgccgaattttatgatctgctgatgctgttcggtgccggaggccgccagatatga

SEQ ID NO: 282202 - DNA, 549 bp, Morganella morganii
atgaaaaaaagcggaatacgtacacggattgataatgctgaaaaggtttttgaggcactgcgtcacctcggggatcgcgatgtactggtaggtattccggcagaagacagcgaccgggaggatacgccgttcggtaatgcggccataggttatctgaatgaaaccggatcaccggcacaaaatataccggcgcgtccgcatctgcagccgggcgtccggtctgttgatgaaaaaacggtaaccgaactgaagacagcggcaaatgccatcctggacggaaatatcagtaaggcagaaaacgccctgaaccgtgccggacagatagcagtgaacggtgtacaggcctttatcaccaatgctgatttcattccgctggcggacgatacagtggcatcacgcgcccgccggggacgctctggtgccatcagggaactgaaaaaccgcgccgccggtaatgaaccgaataatgcaaatgcaagaccacttattgacaccggaaaatacaggcagtcaataacttacgtggtcagaaataagaggggggaataa

SEQ ID NO: 282203 - DNA, 384 bp, Morganella morganii
atgccgacacttgacgtcacccgcgtattgttcaatccgcgattttgtgaccggtcactgacctacacgcggagatccgccggggttgatgatgacggctttcctgctccggctgacggggtggcaaagccgtttgccggggtggtgacagttgaccggtccgttgaggctcagatgcgcatgtccggccaggttgttaacggctgcattctggttgtcaccatcacgccgctgacagcgggcgataaagagcatctcggggatgtggtgaaatatcagggacgggattacctggtgaaatctgtcgatccctataccgcatacgggcgcggctttgtccaggcgcactgtgaactcatcccgtttgacgggggagcatcatga

SEQ ID NO: 282204 - DNA, 540 bp, Morganella morganii
atgaccacatcagaaacaccgggatggctactgccggacaatgaaccggtttatgacgaagaacttgaacgcctgatcagccgctgggttagtgccgtgtccggtcttgagaaaggtcgggtgctgccccgctgggtatcaaaacagccggcgcaactgccgccggaaacagactggtgcggattcgggatcaccgggatggcggaagacagcagtccggccatagtaccggccggtgcagagtcagccgaactgtggcgacatgaagaatttgaatgcatggcgtcattctacgggccggggagtcagcgttatattacccgtttccgggacggggtttcgttatcacagaataatgacgaactgggccgtaatggtctgtctgtcgttcgtcactccggcattacactgtttcccgagctcatcaataatcagtgggtgagacgctacgacatcaccgtaacactgcgccgtaaggtcgtgcgtgagtacggcatcaaaacgtttaccgacgcctctgtcacttttttcggagaataa

SEQ ID NO: 282205 - DNA, 1464 bp, Morganella morganii
atgcagggattacctgtttctaacatcgtcaatgtgacggtgaatatggctgcgcgtgctgctcagtcccgcaacttcgggtccctgctgatcctcggggcgggtaatgtgattgatgcacacgagcgcatccgccagtacaaatcacccgatgaaattctggctgacttcggcattgattcgccggaatacaaagccgcacagctttattactctcagtcgccgcgcccggtggactgcttcgtgggtaaatggaataaaacggccacaacggctatgctgcgcggctccattctgaccaaagcagagcaggcgattgcgaattttaacacgattgctgacggctcttttgatatcagcatcgctggtaaggtagccaaagtcagcggtgtggatctgacagccgaaaccaacctgaacggcgtggctgaacgggtatctgaaaagctgacagacgcacaggtggtatggaccggtgagcgcttcaccgtcacgctgactaaagccggtgagatgggttatccgtcagcgggtacggatggctcatacctcggcagcctgatgaagctggatgaaaatgccggtggtctgatcgtggcaccgcaggcggcagaaactgtacaggaagccgtggcagtgatgtcggatatttccggcggctggtacggtctgattatcgccgatgacagtctgagtgatgatgatgtgctggctgttgctgacctgattgagtccgatccgttgtcacgcatttacggccacacagtaatgaataccacggtgctggatgcggatattgatactgatatcggctcaaaactgaaagccgggaattattcccgcaccttctggcagtacacctccggtaaaaagtacgtggccgcctcgcttttcggtcgcatgtttaccgtgaattttaacggcaataacaccacgatcaccctgaaatttaagcaggagccgaccgtcacagcggaaactctgcgcgtatcgcaggccgccgctattgacgccaaaaacggcaacatgttcgtgaagtaccagaatgacacggccattatccagcagggtgtgatggctaacggcgattttattgatgaacgccacgggctggactggctgcagaactacgtgcagaacaacctgtataacctgctgtatacccgcacaactaaaattccgcagaccgatgaaggggtcacctctctgctgaccaatgttgagcagtcactggatcaggcggtaactaacggatttgtcgcaccggggctctggggcggagacccgttcggggcgctgaataccggcgatatgctgacaaaaggcagctatgtttatgcgccgccggtgtcaacacaggcacagtcagaccgtgaagcccgtaaggcgccggttattcagtgcgccattaaactcgccggagcaatccactacagcgacattatcattaacgtgaaccggtaa

SEQ ID NO: 282206 - DNA, 441 bp, Morganella morganii
atgtctacatattcttttattgatgtatccgcctctatcaccggggtgggcggcctgtttgaacttggctatggtgccggggtttccgaagaggggatcaccgtttccatggtggaagataaaaacaccatgacagtgggggctgacggtgaggttatgcattcacttcatgccggaaagggcggcacggtcacggtcgtgttactgaaaaccagtccggccaacgccaaactcagcatgatgtataacctgcagtctgcttcctcggccacctggggaaataacatcattactatccgcaacaaggtcagcaatgatgtcaccgtctgccgctcagtcgcatttaagcgcatccctgactggcagaatgcaaaaaccggtaacactgtatcgtgggtctttgactgcggtaaaactgacactctgctggggacgttctga

SEQ ID NO: 282207 - DNA, 450 bp, Morganella morganii
atggaatttatgattaacggcaatacttaccgatccgggaaactggacgcatttcagcagcaggatctggcattcgcgctagtccctgcattcggtgcggtggcgcctctgctgaaagatatcttaccggcatctgaagacggtaccggcggtgatgaaattgcggatgtccgcaaagaaaaactcatggattccctgccggttatccttcccgcactgacaacggcagtcagaacactggataaaaaatcacgtaaagaaatcaatgatatctgtctggatgtggtgacgcgccagaccggcaatcagtggtcgaaaatctattcaggcggcgtcctgatgtatgacgatatcaacggcattgagctgttacagattgtcggatacgtgattaaggactccctcggcagtttttttcccgcaccaccagagaacgacgcgcaagcctga

SEQ ID NO: 282208 - DNA, 2262 bp, Morganella morganii
atgagcagcgctgaaacactcagggacttcctggtctccctcggttttgatgttgatgagtccggggcgaaaaagttttcctcgattctcggggatgtcacatcgaaagcaatgaaagccggtgccgcaatcgaggccgctgcactgaccattgtgggattcacggcaaagatatctgacgggctggataaactgtactggcagtctcagcgtaccggtgcgaccgcaaataacatccgttctctgggatatgcggtcaaacaggctggtggtgatgttaacgggttcagccagtcagtagagcggctggcctctttcctgcgcaataatccgggcggcgagggattcctgcgcaacatgggtatccagacgcgggacgctaacggcaggctgcgggataccgcgtcactggttgccctgctgggtgacaagctggcaaaaatgccgatgtaccgggccaatcagtatgccggtatgctgggtatcgatgaaaacaccctgatggcaatgcgtcgcggcattcatggttattcatcagaatacgccctgatgatgaaagccatgggctttaaccctgacgcagctgcaaaacagggaaatgcgtttatgacgcagttctcaaagatgaaagccgctatggggatcggcagggataaaatcggtgccgaactggcgcgggtactgacgccgggcattgagcgttttacaaagctgtttattcagaacttcccgctgatagaaaaatttatcctgaaagtgaccggcgccatactgaaactgtccgatatcctggagcacttcgtgtaccggtcagtgagaggtatccgtgatctgatgggctggtgggagcggctcgacgaaagcaccaaaggcatgattaagacatttggtctggtgctggcggcatggtgggcactgaataaaggttttctgacatcaccagtgggactgatgatcgccgcactgaccgcgctgtttctgctctgggatgactatgaaacgtggaaagagggcggaaaatcggccatagactggtctcagtggaccggcacgattgagtctgtcaaaaaaacattcaaagaggtctggaaatatattaaggagatcgtaacgtcagtcggcggatgggagactatcttctggggatttgcgttgtttctgggcggtaaatggctgctcagcattctgggtaccgtcacccgcgttggtacctcactggcacttctggcaagctggcccggacttattattgccggtatgggggcgttactgatttaccatcagaagctgctggatcagatggacttcggcaagatgggcgaaatgaccggtgagctggtcgggaatatcggcaggctgaaaaaagcggttgaggaataccaggcgactgacagcctgaccattaaagccggaattgtgctgcaacaggccgggggtattatccctgtcccgttcgccagccagattggcacctttatgcgtaacggcactgtggatacggcgcttcaaaagctggggttcgggtcaacaggcggagctgattactccacgctggatggtgcagcacgcggcgtgaagaataacaacccgctcaatatgaacttcgcaaaacagcgcggtgcccggaaagaatccgggggcgcatttgcggtgtataactcggcctatgagggattgcagggtaatgtcaggcagctgatgatgtattttaacggcacttcggatgcggccggcagaaaaaaacttcagactatcagtgaaattgtcagtctgtgggcgccaaaaaatcacggcaaaaatgatcctgctgcgtacgccaaacgtgtctctgatgaaatgggtgtcggtatcaacgataaacttgatctcaatgatactgaggtgatgtatgcgcttatccgcgcgatgtcaattgtcgaaaacaacgggcagttcccttacccgaaagagctggtgacagcggccatcaccggtgcgccggatccaaccatcgccggtaatcgcggcgggggtatgcccgctaatggcggaatgatggaaaccgttgtgaccgggtttaatgacatgaagaaaaaaacgtcattcatgccacagcagttactccgaaatgactggagcgacaccaaaagcgtgtctattaatcaggtaaacaatatcaacgttaccggtgtttcagacccgcaggaggccgctggtctctcaggtgatgccgtcagtcgtaataaccagatactggtccgaaatttagagtcgaaggtgtga

SEQ ID NO: 282209 - DNA, 630 bp, Morganella morganii
atggatattttatcaaccctgttttcccagaatacccggaagattgagatgatcgtccccagcgtggttatctcggaaaaacactcagacagctcagagattactgagcatccggtacaggttccgggcggtgagggatttacagtcagtgatcatacttttgaccggccctcagaagtgacaatggaaatcggcttcgctggtggcggctcactgatcgacgggttcgatacgtccagtatgttcgatatctcaacggggctgaagcttggcagtagcccccgcgagatatatcagcaactgctggatttaaaagccagtaaaaagccgtttgatgtcattaccggcaagcgtgattacaaaaatatgctgatccgtgccatcgaagtcacgaccgataacaccagtgaaaatgtgctgatggtagttttaacactgagacaggtgattatcgttgagacgaaaaaaacgacagtcgctccggtggaaaatcaggcggttccggaagccacggggggaacagaggagcgtggtacagtaacacctaaaccggtaagagaaagttttttgagccggggtgaggatctgttcgggtcgttgtcggcattttttaatcctatgggaaaataa

SEQ ID NO: 282210 - DNA, 306 bp, Morganella morganii
atgactgaaattatagaaatacccttatcttcgcaaaatcagcaatttagtattcgtcttggtggcagtaattaccgtattcgcctgatacatcgtcagttttgcgggtgggttgctgacatgatggatcaggccggcacagaaatctttactggtgtaccgctggttagcggggcggatatcctggagccttaccggtatatggggtttaacggctctctgatttttgtctgtgatgaaacgtccggggaattatcattcagcgaatttggtcggaaaaacaggctttattttcgtgcagactga

SEQ ID NO: 282211 - DNA, 951 bp, Morganella morganii
atgtctaaaaactggatccgtgagtgccagattattgttgcagatgaaaatggcgacggtatagatctgtctgagttgcgggtcacgttcaatatcacccggccaaatacggcttaccctgcaacagcgattgtaaaggtgttcaacctgaacaaagagaccgaaaacaggctgcgacagtacgaatttaagcaaattattattgtggccggttataaagataacagtagtcagattttttccgggcagatccaatacacctatgccggtcgtgaaaatacaacagacacttatgtggttattcagtcagcggaaggcgatcaggcatacagtgaagcgattgtgtctcagacggtcgccgccggttacactcagccggacattgatacggcgctgatgaaagacctggaaaaatacgggatgaccgccgggctgcgtggtgagtatgatcaaacagtggcaccgcgcggtaaggtgctgttcggtatgcaccgggatgaaatgacctgttttgcgaagcagaataatgctgactggcgttacacgggtgacagcgttgatgtagtgccgaaagataactatatcaacgaaatcatcctgcattatgattccggccttatcggtacgccggagcagaccatcggcggcggcattaatgtgatgtgcatgattaaccccgatatcaaacccggcacgctgatccacctggacaatgccggtattaaccttgctggcctgtcaaataaagaaataggcatgaacggcggtcatgagggatctgtagagcaaccttcgccacttgatattgacggtgaatataaagtaatcaatgtaagctatttcggggatacccgtggaaactcctggtatcaggaattgatttgtattgcacggaacgaagaaacgttactgaatcagtctgcattgcaggcaatggcggtggaagcatga

SEQ ID NO: 282212 - DNA, 753 bp, Morganella morganii
atgatttcaaatgatgaacgagtagggcgcccggaggcgccttttttattgctgaaagaaaatattatgtctggtctgtttgtcggcctgccgtgcatcgttcagtcgtttaatccggatgctgtgacggtggaagcgcaaccggcgataaagtggacggtgactgagaacggtgagcaaaaaacagtgccgcttcctctgctggtggatgtgcctgtgattttcccgcgtggcggcggtgccacactgacattcccggtaaagcccggtgatgaatgttttgttgtatttgccgaccgctgtattgattactggtggcagtctggtggggtacaggaggctgttgatccgaggaaacataacctgtcagacggctttgcctgggtcggtccgatgtcacaggcggccaaaatcagcaacatcagtacttcagctgttcagttgcgcagtgatgacggaagtactcatatcgccattgataccggcagtaaaaacgtcactgtggtgacgcctgcaaaacttaccgccacggcggccggcggtacggaaatcacctcaccggaaattgtcctgaacggcaacgttacgattaacggtaatctgtcgcaggggatgggtgacagcggcggtaaggcgacaatgaacgggccggtaagtgtaaaacaagacgtaaccgcaggcggcgtaagcctgatgtcacacacgcatgggggtgttgaaaccggcggtggggatacaggagagccgaagtaa

SEQ ID NO: 282213 - DNA, 345 bp, Morganella morganii
atgcagtatcgcacagaagataacggtgattacactttcggtcacagccggtttagcaaagacactccggaaacggtcgctatggcagtaaaaagccggttgcggctctggcttggggaatggtttctggatgatcgtgaaggtacgccacatgctcagaaaggtctgggaaagaatcctgcgcagggttacgcattggcagtcaaagagcggatcctgaataccccgggcgtcacgaaaattacagcattcgggctggatatgaacacctcaatgcgcaaggtaaccattacggccaccatagacactctgtacggtgaaaccagtatcacaagtgagggataa

SEQ ID NO: 282214 - DNA, 1188 bp, Morganella morganii
atgttaaatatcgaaactgtcgggcttgcgccggttatcacagagaaaggcatcagcgcaccggattatccggcgatacttaaccggctgaaagagttgctcagactgatttacggcgatgatatttatatcgaaccggacagtaaagacgggcagatgctggcgatttatgccctggctgttcatgatgccaataatgcagtgataaccgcgtataactcactcagtccgtctacctctgccggtcaggcgctgtccaataacgtggcgattaatggactgtcccgtaatgcggagtcacattccacagtcgatgtcatcattaccgggcaggtgggtaccgttataaaaaatggcattgtacgcgattcagccggtaactcctggtcacttcctgattcggttgtgattggtacgcacggaaatatcacggtaaccgctgtttgtctgaagcccgggtctgttattgctctgcccggcgaggtcagccagatcggcacaccaacacgcgggtggcagtcagtcaccaatacagcaacggcaacagccggacgcagtgttgaaacggacggtgatctgcgtatccgccgccgtaaatccgtggcactgccgtccagaacggttcttgatggcgtcatcggttcagtcagccagatagccggtgtggcacgtctggctgcttttgaaaatgacaccggcaagacagattcccgtggtataccatcgcattcaatagcgcttattgttgatggcggtgatgcaaaaaatatcgcggaagtcattgccctgaaaaaaacaccgggtaccggaacattcgggaatgttgagataaaaattaccaatgattacggagttattttacctatccggttcagtcgcccgaaaagtgtaccggcattcgtccggatcaccattgaggcatttgaggggtataccacgctggtgggggataaaatccggaaagccgtcacggactatctgaataatctggacatcggaaccgatatttaccggacaaaattattttcaccggcaaacctccaggcagatccggaaggagggacattttatatttcccgtctggaaatcggcctgtccgctggcggggtatcggaaaacaatatcacgatgaaatataaccagttcgccacatgtcagacggataacgtggagatagtgacaacatga

SEQ ID NO: 282215 - DNA, 657 bp, Morganella morganii
atgagagactatttacgtctgattacgtcacagcatcaacccgcagataaatttgtcagtcacatcaatctcattaccaaatcactgtcagaaataactcggctttcactggatctgaataaatacttttctctcgatgaggccgtgggtgttcagttagatgttattggtgaatgggtaggcatatcacgatatatcagcacaccaataacgggggtgtatttttctctggatatggatgacatcggatttgatcagggggtatggaagcgggaatttgatgctgaaagcggatttaccgaactggacgacgaaacataccggacaatcatcagagttaaaattaaggccaaccactgggacggaacgtcagaatcactgatggaaatttaccgttctttgctgcccggaaaagacacccgcattttctttatcgataaccaagacatgacgatggatgttttcatcacgggttctgttatcgatgaagtgacgaaatccatcataaaacagggctatctcggtgtgaagccggaaggtgtccgcgttaatcagtattacattaactcagtaccgaaattaccgatctttggtttcgatatcactaatgactacattgccgggtttgataacggcggctttgcggtcccgctttaa

SEQ ID NO: 282216 - DNA, 624 bp, Morganella morganii
atgtcttacacaaccgatatccagaatgcacaatttgacgaaaacgggctggcgataatttctggttgggtcaaaatttaccgcgctcacccgtatacccgcgaatacattggtgcagcaatggataatgtcccctatggtggttcagtggtcggtgatgcttaccgtgatgagcctgaaataccgacagtgcccaatacggctatcgtccgcgcacctgatggtaaatcatggatgcatgtgcctgattatcgtggttctgtggcgtatgacaaagagacaaaacagcaggctgaaatcacagaactgggcaaactgcctgataacctgactctgagcgcccctgaaaccccatttgataaatggaatggtaaaaaatgggtgacggataagacagaacagcaggcgtatgagatcgctattgccgaaagtcataagcagtcattattggcagaagctgaacaggcaattgccatactggaacgtaaagtacgcctcggtatggcaacggataaagataaagcaaaattaactgaatgggaggttttcagtatcaaagctgttggtgttgatacttctctttcacccgatgtaagttggccaacaattcctattaaaaattaa

SEQ ID NO: 282217 - DNA, 519 bp, Morganella morganii
atgccaactccatgttatatctctattgaaggcaaaactcagggcaatatcaccgccggagcttttaccgctgagtctgtcggcaacatctatgtgcagggccatgaaaatgaaatgctggtacaggaatttgaccacgttgtgactgttccgacagatccgcagtccggtcagccatccggtcagcgtgcgcaccgtccgttcaaatttaccgttgcactgaacaaagcggttccgctgctgtacaacgccctggctgccggtgaaatgctgccgaaagttcagctgaaatggtaccgcacctcagttgaagggaagcaggagcatttcttcactacctcgctggaagatgcgactatcgtgaatatcgactgcaaaatgccgcactgccaggatccggccaaatcggattacacccaactgatcgaagtgtcactctcttaccgtaaaatcgactgggaacataccgttgcaggcacctccggtgctgacgactggcgtgcaccaatcgaagcgtaa

SEQ ID NO: 282218 - DNA, 363 bp, Morganella morganii
atgaaaactacgttatacaaagatttcacctttgaagccgcacactgtcttcccaatgtacctggaggccataaatgtggtcgcttacacggacactcttttgtcgtacgtcttgaaataaccggtgaagtagataagcataccggttggattatcgactttgccgaactaaaagcgatttttaagccgattttagagcgactggatcattattacctcaatgatatccctggcttggaaaacccgaccagtgaagtgctagctgaatggatctggaatcagattaaactacaactaccaatcctgagtgcagtagtcgtgaaagagacatgcaccgcaggatgtatttatcgaggcgaatag

SEQ ID NO: 282219 - DNA, 279 bp, Morganella morganii
atgggtaaagcccgttttactgagcatcagatcatcgctgtgattaagtcggttgaagccggacgaactgttaaagatgtctgccgggaagacggtatttctgaagccacctattacaaccggcagtccagatacggtagcatggcggcttgtgatattaaaaaggtccagggtcttgaggacgagaacctacgtctcaaacagatgtttgctgacccgagccttgagaactgggcgctgaaagacgatatcgaaaaaagctttaaaaccagcctttaa

SEQ ID NO: 282220 - DNA, 261 bp, Morganella morganii
gtgcggtatgtctggttaaagcgttcaatgaaagcgtttacccaactggaaaaactccctttttactacatgtttctctgcccattcaaccagtgccagagagataaatttcgtgtcgttaatggggtcatcacgcgtggtgtccggacgataatggtaaaccattttgctcaggttcagactccgataggcctgacggatactgagtgcgaacgtcgttatcagatgtgtgaccaccgcacgcttaaaggctggttttaa

SEQ ID NO: 282221 - DNA, 1128 bp, Morganella morganii
atgagtgaatatcgtgttcctgccttgcgaattagacaaggggaagagaggcaactttacagcctcgcgatagaaggtaaacaaattagtaaaatcgctgcaatatctcgtatccgccgcggcgaggagagtttgattggttatcaacgtccggaagtacgtaaccatattcgcgagatacagcgttatatcgaaagtgcgaatccgatgatccctaatccggtaattatcgcttttgataagcgtgtacgttttgaaccgcttaataataatggagacatggggtacttggtgatacctttttctgaagataaagattttgaaaaacccgggtttattgtggatggtcaacagcgtactgcagctttacgggatgcggaaatcagatcgtttatgatgccggtctctgcatttatagctaatgatgcggaagaacaacgcgaacagtttatgctggtcaattcaacgaaaccgctgccaaaaacgttgttatatgaactggcaccgcatacccatggtcgtctgccatcagatctacaaatacgtaagttcccttcactactgactcaacgactgaacttcagtgaaggcccacttgcagggcgtattaaaacggcgaccaatccggatggggttattgctgacaactcgatgatcaaaatgatcgatgccagtcttcgtgaaggagccttgtatcgtttccgtgacccagcgacagggttaggagatgaaaagaagatggttaaattattgaaaaatttctggtcggcggtggaaactgtctttacagatgactgggataaaaaaccacgttattctcgcttgctacatggtataggtattcttgcacttggtagtttgatggatgaaattgatcaggtacatcaggactataaaggtgaacctggttggaccgagatcccttcatatactcgctttgttcaagagctaaaccgaattaagccactttgtgcatggagtcacggggtatggaattttggcacagacatcgatggtcagcccgtcgttcgtaaatggaatgaattgcagaatctttcaaaagatatatctttggttactgattatttggtaaccaactatataaaaatcgtgaatgcagatatttga

SEQ ID NO: 282222 - DNA, 1251 bp, Morganella morganii
ttgtcgaagctaaaatattttttcccagatagtcaagattttatcgatcctagtttcgacttctttcgcgaaacacgaaatgagcatcgtgttcgccagcgtgatgatcattacccgcatgaagtgttcactcgtccttacgatggtatgctggtttctaaagcggtagttgatggccttggtagcggagagagtaaatatacacgtgcgcaacgtttgcgttatttccgcaatgggatgaagcactttttccgcttgccaaacaacatggaaactatgggggattgtggtgcattcacttatgtgaatcaggatattccgccatacagggtagaagaggttattgaattctacgaaacatcccgttttaactatggtgtttccttggatcatatcatctttggatatgagaaacctggggagatttttagtggtgaagtattggcggaatgtcgccgacgtcaagatatcacattgaccttggctcaggagtttttgaacaaatctcacaagaattgcttcacagcattcggtgttgcacatggatggagtaaaacctcctaccgtaaatccgtagaagcgctgttggcaatggggtataaaaatatcactatgggggggatggtgcctttgaaaacggcacagatactcgagacgttggaagaagtcaagccattactgaatagtgataaccgtgttcatttattaggcattgcacgaccggaaagctttgccgattttatcaggtatggcgtgaccagtatagattctactacgccgctacagcaggccttcaaggatcgaaaaaacaactaccatacactcgaagggccggcctataccgcagtgcgagttccacagttcgatgcgaatccaagtctgagtcggaaaattaagtctggtgtgattgatcaggatatcgcgcgtcatctggaaaaggatgctatgaacgcattgtttgaatacgagaaggactctatgtctcttgcacaaacgttggaaacggtactggcttatgaacgacttcatgcgggtgagaaggaagccgaaaaaatccgtgctgactacgaacgtacactgggtgagcgtccatggaggcaatgtcagtgtaatatctgcaagtccatcggcattaatgtcatcattttccgcggtgcagaacgtaaccgtcgtcgtggtttccataatattcaggtgctgtacagtcgcttacagcgaattttgtcacaacgctcagaggaattgtcatga

SEQ ID NO: 282223 - DNA, 285 bp, Morganella morganii
atggctaaatatattattcatacgtttactaatgaaaaattaagtaatttaagtgatttctcttttcagttgtcaaatgagttaaaagaattacccgtacgtgaaacacaaaaaagaattcgacgaagtcctgaagaggttgactattttattttaaaatttatgcaacatgagtctggtgttagtgcaacacaggctctgcgtgcttttcgtaattctgggaatgccttcgaagaaaaacgcttccgtgctgctttcaaagccctgcttgtttgcaaaccctga

SEQ ID NO: 282224 - DNA, 699 bp, Morganella morganii
atgtctgaatatgtagcaccaacatttaaaggtgaggcgtatcattgcccgcactgtaatgcgtattcacatatgttatggggagacttaaccagtaacagagcaaaaggctatccaaaagtgattagttacatatgcgctacttgctcgcactgcaacaaagaaaacatctggcgtgtaacgcaagcagtgtcatcgtcagactctgctcgttcatttttaagcagaagccaagatggatatatgatatatcctgacacaacgattgcaccagccccatctgacgatatgccagatgatattaaaaaagactatcttgaggccgcaagcatctaccaaaagtctccgcgtggcgctgtagcccttctccgcttagggttacagaaactttgcgtgcatctcggtggagaaggtaaaaatatcaatgctgatttagctaaattagctgaagatgaactggtatcgaaaaaactaatcagatccgccgatatcattcgtattgttggcaacaatgcggttcatccaggtactattagtgatgatgattttgaggatgtatcttttaagcttttcgcactcatcaacatgattgtccagcaaggtatcaccgaaccgaaagaaattgacaatatgttctggtcgatgccagaaggcccacggcaggcagcagaaaacagagataagccgaaacagaaataa

SEQ ID NO: 282225 - DNA, 267 bp, Morganella morganii
atgaaccaattagatatctatttgaaacaggatgatgtgaaagaccatcatcagaaaaagcaacgttttaagcttgtatacattgacgaggttgttcatggctcattcctgataacagagttctgcaatggtgaagtgaggcattacacacagaaatcaggtgaacagccggtgctaaataacacgcagccatacagcagcagtgattcgttttacccgtcactggcgattcacatttacgcatcagcgattggagatcagccctga

SEQ ID NO: 282226 - DNA, 534 bp, Morganella morganii
atgacttacgaccgattcaatcctgaatggcagcaaagcattctactggcgttttatcaccttaaaaacgggcatgtcaccagcgaagagtggcaagaactgtgcgccccatacaatacgtacaaagatttctatgacaacattatctacctgtccagaagcgacctgttggatatatccgaatgcccgaggtctaatgccgcagattcgcacgctatgaatatgccaatagtgttagaaccaagctggatcagcattacaaacaaagggattgatttcttacgtgcagacggtggacttggtgcgattctaaacgtcaatgtcataaagcttcacgatgacactctggaagcattaacttcctatattgacaggcttaacgtcagtgatgcagaaaaaagcgtattaaaaacagaactgaaaaaattgccagtagatggcctgcgtcatgtaatgacaaaagccatagatactgcgcttacgaatcccggcgagatactgagagtaatatctgccgctcttggtcagggctga

SEQ ID NO: 282227 - DNA, 252 bp, Morganella morganii
atgagcagagaatacccgcagtttaaactgaggatgccgccagaaatgcgggataagctaaagcaacgtgcagccataaatggacgctctgttaactctgagcttctgcaaatcattgaggatgcattgagtcaaccatctccagtatcaggttaccgaaatgacgctgagcgtatggcagaccaacaggcggaagcgctgaaaagatcagtgttcgacacgttggttaagctgtatggggataaaaaatga

SEQ ID NO: 282228 - DNA, 888 bp, Morganella morganii
atgacaagtatatcaacaatcaacgtacctttccacggcgacaatctgtatgtcgtcaattacaacggtcagccgtatgtgccaatgaagccaatcgttgaaggtatgggattaacatggcaatcgcagtttgagaaggtaaaacagcggttcaaatcaaccatcacggaaatcgtgatagttgccgcagacggtaaagagcgcaatatgctctgcttggctctgcgcaaacttgctggttggttacacaccatcagcccaaacaaagttaaacctgaaatccgtgacaaagtaatccgctatcaggaagagtgcgacgatgttctgtatgagtactggactaccggcgaggtgaagaaaaaaccaaacttccgccagtccactgcaaaagaactcatcccgttacgccagacagccgagcggcttatcgctcacggtgttggcaatatctaccctgacatctggaagtacgttcacgctgagttcggtgtacagcacattaacgaattgctgcctgagcaaattccgctagcgatctcgtatttggacgcgctggaaggtgagtatctttcgcagcagaaggcgcagcttgagccgaagctggatatcaattatccacttacctggtatccggataatttcccgtatgttgatatgtgcttttacaaacaagggcaactgagaataaccagatcggtgctggttgaaaccagaagcccgagtcgagaaattttcagcaaactgaaagccagtggttatgatgttacggcagcagaggctgaaattgcctcgctgaggcacttagtttccgaattatcatgggcgattgatagtatcggtggatttgttcagatgagagatcgaatcagtaaaacattcactgcataa

SEQ ID NO: 282229 - DNA, 555 bp, Morganella morganii
atgtatactctactgacacaacggaaaacgacaaagagggtaggcgtgcttactgaacatataatgacagacaaaaaaaatattatttttgattttttttatgcattttcaagacttgagtttttactgaaaaagcacaagttttattgcaaattggatagctatggtaacgcaggatcttcatggaaaaaatttattaaaaaaaataaagaaagattgaatgagaaagcggttccatccggtgcggatcttttaaatttatccccaggaaaacaagttatttcagttgttgatggtaaaaaaatcataagctggagtcatggtggttatacagttaatgaggacggcagtgactacttggagcaggtaatatttgccataaaagcagtaagaaataacctgtttcatggggggaaggagttaggtaatatcccaggtggggtagaatatgacgagcagagagatgttgatctgttgctaacaagtactttagttataacgcaaatagtaaaagaattgggttggagtcgggagttctcttttcagcaggaataa

SEQ ID NO: 282230 - DNA, 486 bp, Morganella morganii
gtgaagaagctattgatcagtattttactgagtactgtgccattggtcgcagttgcggaaggcgattaccgcgatgaaggaaactggtttataaaaaaagaaactaacaaactgactgataaaacagatgtttatgccatgcttagcccatcaagtggtagtggaaccttatttttaaggtgcgcgaataacaaaacagaggcttttttgtctgtagataattatcttggaagcggttatggcacaccaataacgacaagaatcgatggtggtaaacctatcaaatcctcttggagtatgggcgagggtggcgatgcagcctttgcgccaaaatcattggctttcattaaaagcattagcggcaagaaagaattgataattggctatagtccatacggaaaatcacaagtgatcgctgagtttaatttaaatggaatcgataaggttgcgagtgagatatcagtcgcttgcggctggaaaatgtag

SEQ ID NO: 282231 - DNA, 630 bp, Morganella morganii
atgggtgaactcagctctgaaattaaacggatagttgttctccctaaatatgattatactgatgatatagaaaagataactactaaaattaatgagttagaaagcaagataacagataataatgcctttaaagaatatacgttgagtttactgaacggaaaaataaaggaaatattcaaacggatgcctttaaaaggatttgaggatgcaactccgatattcaacaaggcaaaaaaaacacttgatttgataaataaaaatcaagttgaaaaaatgatagatattggaagtgcttctaactatatgtatgtacatgtagcttatttccttgcacttcacgaattggtaagagatagaaaagtaccgtgggttccacgattcttagtcattgaccagcccagcactccatattttagtactgctggtaaaaaaactgatgactttgcaagtcttgatgcagccctaaatgaaattaattcttttgttgagaaaatgcggtctcatggtggtttccaaataatactgttagagcatattgaagagtcttattggcttgacagagaaatgacgaactttactcttgttgataatgaattaagaggcagttatggtttaattcatttcaaataa

SEQ ID NO: 282232 - DNA, 336 bp, Morganella morganii; identical to SEQ ID NO: 278196

SEQ ID NO: 282233 - DNA, 450 bp, Morganella morganii
atggctgatatggggctggatttgtccggttttgctgaactgtcccgtgatctggaattactcagccgggctgaaaatacccgtgtgctgcgggaagcgacgaaagcggcagcggatatgctgcgggatgaggtccggcggagcgctcctgtcaggaccggaaaactggcgcgtaatatcgttaccggcggtcagcggagccgttataaaggtgaggttgtctcgggggtgtacatccggggaaccaatgccgccggaaccaacagtgataacacactgaaaacggacgatccgcgtaatgcgttttactggcgttttctggaaaacggcacatccaaaatggcaccacaaccgtttatccgtccggtatttgatggtaaggcggatgaggctgcggatctggcactgagcaaactcagtcaggctatcgataaggtgctgagcggatga

SEQ ID NO: 282234 - DNA, 270 bp, Morganella morganii
atggatgatgatatcgctcagactgagcagcagggctttctgctcatcctttgttgcttccgggaagctcaggaacaggctgctgtcattatccaccgggatcccttcaaacggcagccagtggccgtcattgaaatccagccggaactgaccgtcgtcattcataccgtgggagacggcaatggctttacagccgtccggcagtctgacatcgccgccgtaactgagcacggcacgcacatcctgatacggacctgtcagtgccggtaa

SEQ ID NO: 282235 - DNA, 270 bp, Morganella morganii
atggatgatgatatcgctcagactgagcagcagggctttctgcttatcacctgttgcccccgggaaactcagggtcagactgccattgttatccaccgggatcccttcaaacggcagccagtggccgtcgttgaaatccagccggaactgaccgtcgtcattcataccgtgggagacagcaatggctctgcagccgtccggcagtttcacatcaccgccgtaactgagcacagcacgcacatcctgatacggacctgtcagtgccggtaa

SEQ ID NO: 282236 - DNA, 477 bp, Morganella morganii
atgaagtatttatttataacaccttcttatttgagtaattccgacctcaattggacgactactgtttgggtgggtattttagggatacatgggactatagcagcactatcaataacatttatgggtatgtttgtaagccaagtttcacaatattcaaagcctggatttgaagatatatgtaaatcattattattaagaaaaagtcactttttgaaattcagtctaaattcaatatttagtttattaagcggaattattcttttatcctttggtggaggactgattgcttatattatttcagtcattatctctcttggctttatttttagttatggattaatgtacctaaggttatataccgttacagaaaacccaacaataatagatgattatctatttttggagttaaaatcaattggggaaatttaccattcatttaacattatcccgccctggcaaagcgccgcaaaaaggtga

SEQ ID NO: 282237 - DNA, 201 bp, Morganella morganii
atgaaaatcacagacgaagatattcaggctgcaattttaagttcaagtgaggactttctatttcaggtatgcgattcgcttgtgttttcccattacggattagatgaaatgccatcggacgaacaagaccgactttatgttgcgctggattcatggcttaagaaagcggctagtgaatttaagcggattcaggaggggtga

SEQ ID NO: 282238 - DNA, 249 bp, Morganella morganii
atggataaattaaccaagagcgaaacacagatattaatcgattacgtcaaggggatgattcaggataataaagaacccgagaaaaaggcagttattgcactatgcaatgaacttgagcgcattaataatttaagaccttttggatatttatcagtcactgcggcagtatgtttaagacgcggaggtaagacaattatcacacctgaaaataatggcaattgcatcccactctatcgcttagacaaataa

SEQ ID NO: 282239 - DNA, 369 bp, Morganella morganii
atgaacaaatatcgtgacaaatcagactttgatattaataaggctgtggctgaggaattaattcaatccggcttcattattggtgttgaatatcatgacaaacatatattagttagggataagtatgctaataattatccatttgccccatgcaacaacccagcggtcgcaatgccgattgttattgagaataagatagctattgccttttcatcgaacactggcaaatggtgcgcttatgctgggtacatgatgggtgatcgcggttgggatatttatgaaaggccgaccatcagtgcatttagtgatagttactatcgcgccgctatggaattattcctgataatgaaggatgtggagaatgaataa

SEQ ID NO: 282240 - DNA, 225 bp, Morganella morganii
atgaataaagaacaacagttgtttaaatgctgttcatgtaaaagtgaatttgagcgcgacattctcaccattcgtgagtctactcatatttgtttttcgtgcgtgggaataatcaataaccgggtcgacaggtttatgcgaaacaataaaaatccggatcggaaattatggcctgatggtgtaggctcaatgctttcaaattatatggaatatgaactgaggtga

SEQ ID NO: 282241 - DNA, 501 bp, Morganella morganii
atgctgcaaaagctggtggaagaaaagcagggcgaagtggtctccatcggtaaaatcgcggatatttatgcccatgtcggtatcaccaaaaaagtgaaagcgaccggtatcgatgcgttgtttgatgcatcactggaagagatgaaactggcgggtgataacaccatcgtgtttaccaactttgttgatttcgattcctcctacggccaccgccgtgatgtggcgggttatgccgctgcactggagctgtttgaccgtcgtctgccggaaatgctgaagctggtgaaagaggacgatattctgatcctgacagcagaccacggctgtgacccgacctggccgggtaccgatcatacccgcgaacatatccctgtgctggtgtacggaccgaaagtcaaaccgggctcactgggctaccgtgaaaccttcgcagacatcgggcagactgttgcatcctattttaatttatccccgatggattacggcaaaaacatgctgtaa

SEQ ID NO: 282242 - DNA, 690 bp, Morganella morganii
atgaaatctactgatagagtattagaggcatctataaaaaaaatagtaattaatcatctcttatttaaaggtaatgaattacaatctaacgatgaaacttttattataagtgagtttagtattgccaatttttccaggcgagtagatcttgttttggcgaaaaaggataatttttacgcatttgagattaaaagtgaatttgactcattagtaagacttgaagggcaagtcaatgaatacattgaacattttgataaagtgattgttgttacagtagagaaatatgtagaaaaggttttgaaattaacacctgtaacagttgcagtatgggaactatctaattttgatttaaaggtaataagaagaggcaaaataaataaaattaataataaacgtgtatttttgaaaatgatgacacattcagaattattgaatttagcaaaaaaatcagacgtaaaattagtagataaaaaaagaaaggtagtagaggagctactatataacttacctctaaaaacattaagaaaatcagcagtagaatatataaaatgtcgatataagaagcgaggtagtaattactacgataaattttattttgaatataaaaaaaataagaaaacatcagttagtgataataaaaaagaacctactaatatagattcatttattaatgtcttgggtgatttataa

SEQ ID NO: 282243 - DNA, 291 bp, Morganella morganii
atgctatatactgtcagccaatcgccatttcgtactgatatccaatcattactgaatctgttatcccctgaggatgacatcctttttaccgaagatggcgtaatcgcagcaacggaaggtaacccgttgttgcaggcgcttattcagtcgggtcatattccctgtgtgttgcgggaggatgccgaagcacgcggtttattaccgttcctttcgggcaaagtgagaatcacagactatactggttttgtggagctcacggtcacacacacgcaacattttgcgtgggaatag

SEQ ID NO: 282244 - DNA, 759 bp, Morganella morganii
atgaaatcactgtttaaagcgactgttgtcgcaacctcgctggcaatgacattaggtatgtcacaggcttatgcggataccgcgccgaagaaagaagaagtgaaactgaacagcgcatttaaaaccgcaagtcagcagaatgcttatgcgctgggtgcgtcactgggccgttatatggaaaatgccctgaatgagcagaaatccattggcctggatctggatcgcgatcagatgatggcgggtgttcaggatgcattcaataacaaaagcaaactgagtgatgaagagatcaaccagacgctgcgcggctttgaagagcaggtgaaaggtgccgctcaggaaaaaatggcgcgtgaggctactgaaaacaaagcagccggtgacaaataccgtgcggcattcgccaaagaaaaaggcgttgaaaaaacgaagagcggtgtgctctacaaatctgagaaagacggtaacggcgcatctccgaaagacactgacaccgttgttgttcattataaaggtgcattaatcgacggcactcagtttgacagctcttacgaccgtaacgagccgctgactatccgtctggacagcgtaatcaaaggctggaccgaaggtctgaagcagatgaagaaaggcggtcaagccaaactggtcatcccgccggaagcagcttacggcactgacggtgttccggggatccctgccaactccaccctggtctttgacgtcgagttactggatatcaaacctgcggccaaataa

SEQ ID NO: 282245 - DNA, 201 bp, Morganella morganii
atgagcagattaactcattcagaaccagaaaagcaatttaaatgcctcgtcattggtaatgaaccgtttcgttatgttgaaagcatacctgctggcggcatagcggacaactaccgggaagcaccggaaatggtagagcgggctgagctgaaagaatactggtcaaaatactattatcgcagcgggggtcagaatgcttaa

SEQ ID NO: 282246 - DNA, 528 bp, Morganella morganii
atgtcatatatagcaaccagtaccggaaaacatattgattttaccaatatcactccggatcagatttgtatcgaagatattgctcgcggcctgtctaatgaatgccgctttgccgggcaactggaaagtttctattctgtggcccagcattctgtatatgtcagccagattgtgccgccggagtgcgcactggaagcgctgctgcacgattccgctgaggcgtatatcaaagatatcccctcgccgctgaaagccatgctgccggactacaaggccgtagaaaaacacatagaagcggttattcgtgagaagttcggcctgccaccggtaatgactgtcgatgttcactatgccgatctggtcatgctggcggccgaaaagcgggactttgaaatagaccccgtcagccactggccgatgctggattcagcaccaccgcatgatgacatcattatccagccactgacaccaccgcaggcatatcaccagtttatggcgcggtttaatgccctcatgtttggggcgtaa

SEQ ID NO: 282247 - DNA, 261 bp, Morganella morganii
atgaaaattgaatatatctatatctgtgctcaggcgtactgcaatgaccaaggtagtggcatcgaatattacaccgacaatgagcgttttgataatcgaaatgatgccattaaaaatggatggaaacagcgggaatcagatgatttcaatatcggcgttttggttaatggacgactcgtttcggtcgactggatggctaaaccaattgataccaaaccagaaacattacggaaaatcgaagatcaactgggcctgtgttaa

SEQ ID NO: 282248 - DNA, 405 bp, Morganella morganii
atggatatcagaagcgaagagcatattttatgtgacggtcgtattttaaaaataacgccggatattattgctgactttaaaaacctcccgttcccggatgaaacattttaccaagtgctgtttgatccgcctcaccttgtccgagtcgggaaaaatagttggatgtttaaaaaatatggtgcactggataagcactcatggcgttctgaccttgctgccggtttcagcgaagcattcagggtgctgcggccacacggagcgctaatgtttaaatggaatgaaacacagatcccagttcgggaaatactggctctcactgacgaaaagccgacagcggttcagagagtcgggaagaacgataaaactcactggatgacattttataaaggagaagaaaatggataa

SEQ ID NO: 282249 - DNA, 240 bp, Morganella morganii
atgaataacatcgcaaaggctagaaaggaacttggtgtatcgcaagccaagttagcgcgcattttagggtggggggcttcacgtattgccaattacgaattaggcattcgcaccccaagtttgcatgactgtagattaattgtaatggcctttaagaaacaagggcttgcatattctttggatgatttattcccagttggtaactcccatgcatccgaaccaaaacacactgatgcctga

SEQ ID NO: 282250 - DNA, 423 bp, Morganella morganii
atggctaataaatttgaagcaatcgaaaaagcatcaaagggtgaaatcactatcgaaatgcgccctgtgtatgttgtatcaggtgccaatcatgcttacctcagccagggcggcgcactgaataaactggcctacattatcgctgaaaagcaatttcgtgcggaaggtaagcagacgaacgaaccggctcaaccacaccaatttgaggatggtacgaccgcatggaaagcaggagcaccacgggatgaatttatcgaacgaaaaaacgaagtgctgaacgaattaaaagcagcgctgcgccatgaaaacgaaattgtgaaattgaaagctgagtatcataaagcgaataaaaaattagtttccgctcaggaaaaagtttctgtcgccaaatggaaattgcagtcagccgctaaaaacaaataa

SEQ ID NO: 282251 - DNA, 258 bp, Morganella morganii
atgagccggcaggaagaagattacgaagtcggtgtgtacgacgacccgctgataaaggcgatccaccatgtggatgacggacgggattatacacagcggattattcacgatatgcggcaacggtattacatcagagcggggatataccttccccgcccaccagcaccacaggtcgttgcgccgaagttaaccccgacaatagcgggtaaaaagcggaataagaaagtcaggaaggtgagccatgaacaaacaatttga

SEQ ID NO: 282252 - DNA, 318 bp, Morganella morganii
atggaaacaactgatctgcacctggtgcaaattatcacagcggccggccacgacccatctgatattacagatgctgtctgggctgccggttacaggaaaacagactttaccattgagcaggtaatagaaatggcggttaatcagaccgctgataccgtgctgaacggcttccctgttgagacactgccgaaaacggtggatgacctcagtcagtaccacctgaacggtattatctttgaggcaaagtgggaaggtacgcccgcagcagtggcaaatgcagtattggtgaacgggtataaaagggagagtgaaaaatga

SEQ ID NO: 282253 - DNA, 207 bp, Morganella morganii
atgagcgataccagcaaacaagaatcaccgtggtttaaaaccagcgacctggcagaacggtatgaagtgaaaccccacacgatcagggtttgggctggcaacggaaaacaaagacgcgaaggtttcccgaagccacgctataaatcaagagaactacgatttcttaagcaggatatttttgactgggagaatggtaaacaattttag

SEQ ID NO: 282254 - DNA, 1263 bp, Morganella morganii
atgatgcattctatcatttataatttgtgtgagggcgatgtggcactaacggattcatggcttcggtctgcattaggcaaaccgacagacaaaatgataacaaaatcggaccgtgatgggctgtctgtcagggtaactccgaagggaaaaattatcttccaactgagatatcgctggaatggaaaggccgatcgaatcgatattggcacgtacccggccacaggcttaaaagaggccagagatatcgcgctattttatcgcagtgagctggagcagttacgtaatcccaaggtggtgaaacaaactaaaattgaaacagctattacagctaaaaccattgagggtgttctgcgtgactggtgggaaactgctgtaaaaaataagcatgtaaatgacaaagatgtattgcgaggctttgagatacacattttccctagaattggaaaaattccacatgatgatgcaagcttgcacatctggctctctttgcttgaggatattattaaaaaaacaccggcaaccggtggaaagctactgcaatatattaagctggctcataagtggggttgcagaagagggataattaaaaacagcccacttatggaggttaccgtttcagatcttggggtgaaatcaaaccaaggtgataggacacttaatgataatgagcttaggttgttattttctattattgataacccgtcatacagtttacgtaataaatgcctgattaagctgtgtttactgtttggttgccgtgtgggcgaattaattcgggcaaaagtcagtgattttgatctggtttccagggtgtggacggttccgccggaaaatcacaaatcaggaagaaaggtgaaaaaaccaataataaggccaattattgaacctgctgctgagttgatcagggacttggtttttcttggtgaagggagtgattatttaatgccttctccgtctggtgggcatatacataagggcgggcatgtttatatttgtgaatccctgaacaataaaatgaccagccagttaaaggattacgtaaaatggtctatacacgatttacgtaaaaccatgagaacaggtattgcagatctgacaatgcctcatgtggctgaaattatgctgggtcacaaattgccgggggtatggcaggtgtacgataagcacacctaccttgatgaacagcgcgaggcttatgagaaatggtgggataagctgactaaaattgtttaccattctcccagtcaaaaatatcctgcttaa

SEQ ID NO: 282255 - DNA, 498 bp, Morganella morganii
atgaggttactgcgcagatggggaaaggaatttttcctgctgctggtgattttatttattgcgtcacaggcgatggactactggcgcaaaccgcaggcaccggatttaaacacggtgccttcactgacactgacagacggcacaccagtgtccattgcacagatgagtgcggaaaaaccgttactggtctacttttgggcgtcctggtgcgggatctgcaaactgacctcgccgtcagtcagcgaactgtctgagtctggctacaatgtggtgacggttgctatccgctccggtgatgatgaccggctggcgaaagggatggcagcgaaaggttactattttccggtgattaatgatccggatggtcgtatctctcagctctggggcgtgaatgttacgccgacttttgtgatttatcacaaaggggagatagtcagttataccagcggctggaccagccagttgggtatgatggcccggttgtggctggcgaaataa

SEQ ID NO: 282256 - DNA, 2037 bp, Morganella morganii
atgcgttctgtattaacagcgtttgtgctgtttttgttcacgctgaccactgtgcatgcggctgataccggctggaccgaaatgccgcacaatgatcacgttcgtgtcagagtcacatcagatcagtggaaagacggaaaactgcgtcttctgctggccgttgaattacaacccggctggaaaacctactggcagtcaccgggcgaggggggcgttgcccctgaactgacatggcaggagacctccgctgacacacagtggttctggcccgcacctcagcgttttgacgtcgccgggctctccactcagggctacggcggcagtgtggtgttcccgctggaagtcacggcggctcaggcactgccggcgctcagcggaacactgaccttatccacatgcagtaatgtctgtatcctgaccgattatccggtctcactggatacgtctgaacccgcgccggacgattttgaccgccagtatgtgatggcgatgcagcaggtgccgcagaccggcggtgatatcaccatcggcggcagccgggtaaacggcggtacgctgacgatggcattgcaccgcccgggcggctggcaggatccgcagctgttttttaatgcggataaagaaactatttttgccgcgccgtcatttaccctttccggggataatctcaccgccaccgttaaagtgacggatgactggggtgaagtaccgtcagatctgaacggaaaaccgctgtcggttgttgtgacggatggtccggcagcgcaggcgctcaccacggtgatcggcagcgggccggatattgcggctgcatccggcagtgatacctcctttattatgctgttactgtttgcattactgggcgggctgatcctcaacgttatgccgtgtgttctgccggtgctggcgatgaaactcggcgctgtgctgtatgtggaaaaccgcgagcggcggatgatccgcacccagttcctggtctcctcctccggtattatggtctccttctggatcctcgcggcactggtgtcggtattacgcctgacacaaagtgcggtcggctggggtattcagttccagaacccgtggttcctcggctttatggtggtggtaaccttactgttcagtgccaatctgttcggtgttttctccatccgcctgagcagtaatgcaaccacaaaactggcgactgcgggcggcaaagggatgcgcggccactttatggaaggtatgtttgccacgctgctggcgaccccctgtaccgcgccgttcctcggtactgccgttgcgtttgcgctggtggccccgtattcacagctgtggatgatctttaccgcgctggggctggggatgagtctgccgtggctgctgatcgccgcgtttccgggaattgcccgtgtgctgccgcaaccgggccgctggatgaacggtctgcgtctggtgctgggagccatgatgtttatcacggcactgtggctgattagtctgcttattccgcacaccgggccggaaactgcagcggtgatggtgggggttgtgctgctggtgcttgcgctgctggctttccgccgtaccggtattaagcgcggatctgcggcactggtggcactgctggtggccggcggtgtctgggccggtatcaatatgacggatgaccggcagcagagcctggtcagcgatcaggtagactggcagccgctgacggaagaggcggtgaccactgcgctttctcaggggaaacgggtttttgtggatgtgaccgccgaatggtgcgtaacctgcaaagcaaacaaatacaatgtattattacgcgatgatgttcaggacgcactccgtgaaccggatgttgtcgcactgcgcggggactggaccaaaccgtcaccggatattaatgcgtttttacaaaagcgcgggcatctggcagtaccgtttaatcagatttacggccccgctttacctgatggtgaaatcttgtcaccattgctggataaagaaacactcttacatctgttaaatcagtcacaaggaattgaaccatga

SEQ ID NO: 282257 - DNA, 213 bp, Morganella morganii; identical to SEQ ID NO: 277444

SEQ ID NO: 282258 - DNA, 123 bp, Morganella morganii; identical to SEQ ID NO: 277442

SEQ ID NO: 282259 - DNA, 723 bp, Morganella morganii
gtgagtgatttgtataccgccgaaggtgttatcaacaaaaatagcctgtgggagcgttattatccccttatccggcacgaagccctgaagttgcaggtgagattaccggcaagcgttgatattgacgacttaattcaggccgggggtatcggcttgctgcatgcagtggagcgttttgacgccatgcagggggccacctttgcaacctatgcggtacaacggatccgcggggcaatgctggatgaattgcggggaagagattgggccccccgcagtgtgcgccgtcaggcgcgggaaataaccaaagccgtgcgtgcgctcgaacagtctctggggcgtgcagccacagagcaggaaatcgctgattcgttacagatggatatcgcagaataccgtcaggtcttaaccgataccaataacagccagctgttttcttacgatgagtggcacgaaatccacggtgagagctgcgaacctgtccgtgatgatgatgacgggggcaacccgctcggtttgttggtagacgagagtttgcgtcaccaggtggttgaggcgataaaacaactgcctgaacgtgaaaaactggttctgactctttactatcaggaagagctgaacctcaaggagataggcgcagtgctggaggtgggggaatcccgcgtcagccagttacacagccaggcaatcaaaaggctgcgggcgcgcttaaaatccatgaagtaa

SEQ ID NO: 282260 - DNA, 606 bp, Morganella morganii
atgcggttccagctttccagttgggaaaagaagggttccaaacaatactctgttgctaatcttagaagttacaaaacattccttacaggaagcaccaataggattatcaataacataacaaagaatggcggatttcttttctatgttggtgaggcgaagaaaagaggagtcgggaagcataatccgcaaggggtttataaatccagcttaaaagaggtgataaaacgccttgatgatgagtttaagactcaggatgcgcaatttttgatttttatggacgaccatgaaatgagaaaagagatagtaaagcgctctatatatgaaatgcatcagtgtgataagtatcagttggtagaggccccagttcaggttgacagcaaattgtatcaaactattcagtgtgcggattggctatgcgccatatatggtaaactgtcgtactttgatgtcgaacctgacagtaagccagagtatgagttatttaagatatactttggtgacaggatcgcaagcgcacaaaaaagaagcaatgtaagaaataatattaacaggccggcatccatgcaaaagatacaggcattaatgacaaagtttaatgataaataa

SEQ ID NO: 282261 - DNA, 126 bp, Morganella morganii
atgactatcgatactgtcgttatgatcgcccgtcagcttgatgtttcagtgaatgatctattaagtgattatctaacctcggaagataatcataaaataattacagaatatcattgtatgcactaa

SEQ ID NO: 282262 - DNA, 285 bp, Morganella morganii
atgctccgtattgaagttattttcagcagcaaccaaaaagagatagtaccaccgggcacatttgaggcgttggaaaaggaaatagaccgaaagctacgggctcagtatcaggatatgaacgtccgtattgcgtggggaaccaatgcagcgatgtcagtaactggcgggaaaaatgataaggataataaaaaaataaaagagatactgcaggagatttttgaggatggcagttgggtgccggaaatggaagacgccgctgatgatgtcggagattttgatcgataa

SEQ ID NO: 282263 - DNA, 1182 bp, Morganella morganii
atggataacccgttaacacattctgaagtcaccgttatcggcgggggaatgattggtgccgctacagccctgggactggctcaggccggttttcgtgtcactgtggctgagttacaggcaccggcaccgttcgatgctcagagccgccctgacgtgcggatttctgccatcagccgtgcgtctgctgagttactggagagtctcggggtatgggagcgtgtccgtgccatgcgttgtgtgccgtaccgcaccctggaaacctatgaggaaccggggtcggaagtgacgtttaccgcagagagcctcgggttacctgagctggggtatatggtggaaaacccggtgctgcagcgggcattgtgggagatgatcaccgctcatgagctgatcacctgtctgtgcccggcgcggttgcagagtatgacaaagcaatccggtgaatggttgctgacatttgataatggtgatgttatgaccacccggctggtgatcggcgcggacggtgcgaaatcacaggtcagaaccctggccggtatcggcagccgcggctggcagtatcgtcagtcctgcatgctgatcagcgtggataccgggcgtgaacagcaggatatcacctggcagcagtttttcccgtccggcccgcgtgcgtttctgccgttgtttgattcttacgcctcgctggtctggtatgactcaccggcgcgtatccggcagctcagtaaactgccgctgccgcaacttcaggctgaaatccgcacggcattccctgaacgcctcggggacgtcacaccgctggcctgtggctctttcccgctggtgcgacatcatgccgcccattatgtacaggacgggctggcgctgatcggtgatgcggcacataccatcaatccgctggccgggcagggagtgaacctgggttaccgtgatgcggataccctgctgaataccctgattgcggcgcgggagtgctgtgaggactggggcagtgaatccgttctcagacggtatgagcgccgccgccgtccggataacctgctgatgcaggccgggatggatgcgttttatctcactttcagtaataccctgccggggttacagccgttgcgtaatctggcactgacggtggcacaacgtgcaacaccattgaaaaagctggcgctgaaatatgcgctgggggtctga

SEQ ID NO: 282264 - DNA, 567 bp, Morganella morganii
atgctgaacctgaaatccgttttttgccatacacgtccctcagaaaaaacaccaaaaatcccggccggatattaccgtcccctcagtgcggaagcgttgctggcaacaccgcagcgtcagcggtggctggcttttctccgtgattcctcaccactgccgaaagctcagtttcagcactattatcagcagccgctgatgcattgcctgaccctgatgcagcagtttccgctgacagcggaggggacacacgcccgttcagggggaatggcggattacatgctggaaagcctgtcatacgcggtgcggctggcaaaggggcatatgttgccgctcggtgttccaccggaagagcaggctgcacaaagtactgcctggcacgcggtgattgtgtatgcggccatgttatcgcgttgggttatctctgtgatgtacatgttgagttggcaaacggaaaacgctggtttccgctggataatgcacctcctgagccttaccggttccggtttcttcccgcagcgccggatgatgcgcggcagagtgccggggctatgctggcgtggcggctaa

SEQ ID NO: 282265 - DNA, 447 bp, Morganella morganii
gtggcgttcatcattgatgtgtttgccggatacatcgtgggatggcgggtctcatcatccatggaaacggcattcgtgctggatgcactggagcaggcgttgtgggcccgtcggccgtccggcacaatccaccacagtgataaaggttctcagtatgtatcgctggcctacacgcagcggcttaaggaagccggcttactggcatcaacagggagtactggtgactcgtatgacaacgcgatggcggagagcatcaatggcctttacaaagcggaggtaatacaccgtaagcgctggaaaaaccggacagaagtggagctgtccacacttacgtgggtggactggtataacaatcgacgattgctggaaaggctgggccatatcccaccggcagaagcagaaaaagcttattatgcttccatcggaaacgatgatctggcagcctga

SEQ ID NO: 282266 - DNA, 1524 bp, Morganella morganii; identical to SEQ ID NO: 84817

SEQ ID NO: 282267 - DNA, 480 bp, Morganella morganii; identical to SEQ ID NO: 84818

SEQ ID NO: 282268 - DNA, 327 bp, Morganella morganii; identical to SEQ ID NO: 84819

SEQ ID NO: 282269 - DNA, 588 bp, Morganella morganii
atgacaaaaatagagctgggtggtgtattgggtaaaacctttggtaaaactcaccagcggcttgtctgtaccacgtctgaagctgtccgtgccttgtgctgcactattccgggatttgaacagttcctgaataccagcaaatcacgcggcttaacctatgcggtatttcgcgggaaaaagaatatcggggtcgatgacctgggttttccggtgactgacgatgtcatccggattgtgccggtggtgatcggcagcaagagtggcggattgcttcaggttattttcggtgcggtgctggtggctgctgcgttctggacaggcggtgcatcaatggctgcctgggaagcactgcaaacagggatggccatgacaggcgcatccatgatactgggtggcattattcagatgctgtccccgcagccaaacggtatagccatgaaagaccagggcgaaaataaaccatcctatgcgttcggcgcaccgacgaacaccgtttctcagggctatccggtaccgatcggttacggtaaacgccgcatcggcggagccgttatctcagccggaatttacgtcgaagatcagcagtaa

SEQ ID NO: 282270 - DNA, 657 bp, Morganella morganii
atgttgaaaaaactttttattgccacggttttgtttttaccaacatcactttcttttgcagcagcaggcgatcagaccctgacaatcggatacacccatcttaaatcagatggagtaaagaatactgttaatgggatgaacaacacgattggcggatatgccgaatcgctttcagatttctacgatcaaacctccgcatccacagctagttcctcagaccctagtggcatgttcgtcaattatcgatatgaatttgatgacaagttcgggattattggctccttttcttacgccacaaaggattatgacgcaaaagcgggagcaaaaggcccctattacaacaaggaattacgcgggaaagtttccgcagattatgcctctataaccgccggaccaacattccgttttaatgaatatgtaagtgtgtacggcatgattggtggtgcctataaaaaaattaattactcggtgaccgaatcaagctactacggaaaaagtaagtattcagataacgatagtaaatttgaagccgcattcggagcgggcgctcaatttaatatcaatggcggagctacgttagatttatcgtatttacattcaggctctggtgactggaaaacggatgcattttcaatcggtattggatataaattttaa

SEQ ID NO: 282271 - DNA, 702 bp, Morganella morganii
atgatgcgtaaaaacattcaggcagctatttttgcccacgcagaacgtgaatacccccgagagtgctgcggggtgatcgcgcaaaaatcccgtgtagtgaaatactttccctgccgcaatgtcgcggtcacgccggaagagcattttgtattatcgccggaggattacgccgctgcggatgattggggaacggtgatcggtattgttcacagtcacccggacgccaccactcagccgtcagaactggataaagcacagtgtgatgcccttggcgtgccgtggtacatcgtcagctggccggagggggatctgcggactgttcagccgcgcggtgaattaccattacttggtcggccgtttgtgctcgggtttacagattgctgggggctggtcatgagctggttccggcaggaacacggcattgaactgccggattaccgggtggattatccctggtgggagcagggcgaaaaccgttacgctgataactggcggaaagcggggtttattctggtcgactacccgcaacccggtgatgtgatagtgatgcaggtacaggcacctgtcgctaatcatgccggtattctgctggacgataatatgctcctgcatcacttatatggtcacctgagccagcgggtaccatatggcggttactggcgcgatcgcacggttatggtgctgagattcagcggatgttaa

SEQ ID NO: 282272 - DNA, 336 bp, Morganella morganii
atgattgaaacattcacctggtgtccccgtgtaaatcccacggaagacattacctacaaaacccgcagggctaagttcggtgatggttatgaacaggtgtccggagacggtcttaacccccgcagccagaaatggacactggaatttaccggcggggaagatcgcatcggtattatccgtcagtttatcgaccgtcatggcggcatcagagcgtttcagtggaagcctccaatggagcagacggggctttaccgttgcagtgagcacaaactgagcgtgttgagtaacaaaaaatacacgctgtcactgacttttgaacaggcatttaaaccatga

SEQ ID NO: 282273 - DNA, 3300 bp, Morganella morganii
atggcaggggcattaggtcgcttaaacattgacatgacgctgaacacggcccgttttaacagcgctattcagcagagtgagcggcaggctgtcaggttcggacagcaactgaccggccagttaaggatcgtcgttcgtgagcaggaaagcattgcggcgcaggctgcccgctcatcggcggctgtgtccggtttttttaagagcgctgcgacttttctgtcggtccgccaggtggtcagctatgcggacagctggacggagttacaaaaccgtctgaaactggtgacaggcagttcacaggaactcagcagagccaccactgatgtgtatgacatcgcacagaaaacacgtcagtccctggactcaaccgcacaggtataccagcggtttgcggataatgcagatcgcctggggctgagtcagcagcgcgtcgcctcactgacagatacggtatccaaagccgtggctgtttccggtgcaagtgcggcatctgctgaggctgcgctgatgcagttcggtcaggcactggcttccgggcagttacgggggcaggagcttaactccgtcatggaacagacgccgggtcttgccagagccattgctgacggtatgggagtcagtatcgggcaactccgtaaaatggcagcggacggcaataccagcattgagcagatcatcaccgcactggaaagagccaaaagcggcgtggatcagaaatttgccaccagtacagcgacggtcagccagtcattcaccaatctgcagtcagccatcacaaagtatgtgggcgaggccaataacagcagtggtgcgactcaggttttaaccgccggattatccggactggctgctaatctgggtgatgtcgttaaagtggcagaaacactggcagcagcggcgattgctgtaaaaatggcgaaatggacgcagacaatgcgcagtaatgctgcagaagcagggcgttcatcacaggcactgctgaaaagggcatttgcggagcgtgaccttgctgctgatgtatcacggcgcacccttgcggacaaaaatgcaatggcgaccgcccgctcggttgcactggaagaatataaggctgccaaaggcgctgatgcacaggcggcagcactgaaaaggctgacggcagtcaaaagtctggcgcggaaagccgcccttgatcatgcgcttgcactaaaagcggaaaatgcagcacaggccggaattaactcggcaagacgcggagcctctgccgctgcccgggggcttggcggcgcagtttctatgctgggcggcccggtagggatagtgaccggactgctgatcggcggaggaatggcatacagcaactaccggcagaaaacggaagaagcgaaacaggccagtctggagtttgctgaatcgcttgatgtgacagctgagtccctgaaaaaaatgtcagcaatagatcgtgctgcggcaattcagaaaatggccgatgctatcgatgctcagggcagtaaagaaaaagaactccgggatgagattgagcgcactaataaaatcatcagtgaaagcgcgcaaaaacgggataacgccggttcagttaccggattcggtcgcaacagttttgccgttcctgatcagatggcagcacagaatgccgccagagaaagaacgtatgcactgaaagagctgcaggatgcagaacagcagcacagtgagatggtggcgaagatggtacccctgttgcaggatttagaacgggcaacaggtaaggtatcggcagcctatgctgaatcagggaaatatctggttgatgtttcatcccggtcaaatgaactcatcagtaaaattaatctgcagggtacggcatacgacaatcttaccgcctctattcatcaggcaacgcaggcgcagcagcagttttctgcgcagtcactggttactgtgtcggatgatgcacaaaaatccattgacctgtcaaacagagcgatagcgaaagcaaatgcaaagggcagggagctggccagactgactgcggaagacatgctggcttcccggaaaatcacgcctgatatgaaggggtatgacaaggcactggatgctgaaatatccgcacagatggtgctgcaggaaaagcgcaatacccgcacaccgcgcaagtcaaaagtggactataagaagcagtataccgacatggtatctgagatggagaacaaactgtcttcgctgacagcggacggaaaaagtatccgtgagtacggcaccacctcatcatttaaggaatacgattccctgatggcggatatcgcccgtaatcaggagaagttttcacatttcggcaaagaggccaccgataaactcaaagcccaggcaaaagccattgatgaagtcgcacaggctaatgcggtggcaacgatgtcttacgaccggacaaaggaaatcgaacaactccggtttgagacagagcttatcgggaaaaaccggactgagcaggagcgtctgacctatttccgccagctggatttacaggttcagcagatgcgcgtcggtatgagcgataaaaatattgcagtcctcgaggcagagacacagaaaatccgggagcagtatgatgagtggctgaagcggcgcgagcttctccgtcagtcaccaacggaaggattcaaagccggcctgaaagacttcggggactccgccacggatgtgatgggcaatgtcagaaatatcaccaccggagcgctcaccagcatgacggacacactgaatacctttgtcatgaccggcaaagcctcattcggtgactttgcccgatccgttctgtcagatatcagcaaaatgctcctcaaaatggcgttatttaacgcggtcaaggccggaggttcagctatgggttttgatatgggctggatgagtaacggtcacgcctacggcgggtataccggacacggcgggaaatttgagccaaagggcattgtccacggcggtgagtttgtgtttaccaaagaagccaccgcaaggctgggtattgacaatctgtaccggctgatgaactccgcaaaaggatatgcttccggtggctatgtcggtgacagaatgccagctgtcgtcagcaaacactctctgccggcgataggcggcggggtgaatatgccggtcattatcggggatatccactttgagaataccggaaatcagaacagcggagccgggattgatactgccggtattaagcggcagctgaaatctgagattgtcagcataatcagcgatcaggctcagaggccgggaacgccgttgtggaatgcgatgaaagggggcaggtag

SEQ ID NO: 282274 - DNA, 237 bp, Morganella morganii
atgccggaacgccacctggaggaatacacggaattttaccggaaacagccgtttggtctgtggcgggaagattaccgcagtgcgcaggtggctcacattctggcattaataaaccgtgacccgaaatcgcaggctccggaactgacggacttcatgccgttctggaaacagtctgctgaggcaggcgacacggacagcgtgacagacagtgtgctggctaaccgcaatgccccgtga

SEQ ID NO: 282275 - DNA, 417 bp, Morganella morganii
atgtcaaagacaacactgcgcgatctgattttaaatcagcccgtgaaaatcaccccgtttacttatcttgaaaacacctttttcagcaaggagctggatgtcggcacgatgaactttattcagcgcagactgcgcgaaataaagaaagaactggcggaaaagcaggatatctacctcagtgaggatgatcctgagcagtatgaggatgcactccgccgtgtctatgatgagtttgaggtggcccggttactggctttccggctcagtgatgaggacgggaccctgctgtttgatgcggagaatgaggacgatctccgtgcactgaaccggctggggcagagttttgcggatgcggtttttactgccgggcaggataacagcgtaaaaaactcggaaaccggcgcagtttccagataa

SEQ ID NO: 282276 - DNA, 705 bp, Morganella morganii
atggcaaagcagccaaaaaaccacaaagcaaccccgttcctcggaacaaagctgtatgttcagaccggtgtcagtgaggaaacggcggttaccgcagtcaccctgcaaccggcaactgttacggttgagggcggtaaatttaaagcggatgacatgattgtgctgtcaggtctgggtgatctggacgggcgttatccggtcgcacaggcagacggtaacaccattacactgtgtgatgaggtggactggagcgaaaaaacgcaaccggaagatctgtcagaggcgaaagcgcagcgggtgttatgggccaacaacttctgtgcggtaaagagcttcagcaaagacggagccaccacggaacaggtggatgtcaccaccatctgcagtgacggcaaagagtttgaaccgggtgataccgattacggcaccatcaagctgaccttcttcctgcgttacggtaccagtgaggtacagcgtctgctgcggcgttatgagaataacaaggagaaattcgcggtcaaaatggtgctgacccgtgatgagggaaccattttttactacggctccatcgaaaccggcatgaacattgagggcagcgtcgggcagatggtggattccggcgtgtcggtaaaactgtcaggccgtgattacctgaacgttccgcagagcaaaacacaggaaccggagccgaccccaaagccgtaa

SEQ ID NO: 282277 - DNA, 345 bp, Morganella morganii
atgattattcaccggctgacagaagccctttcaccgctggccggaggaagggttttttttcaggtgctgccggagggaaaactgaaatatccggcaatggtgattcagtttgcgggtatcacgccgaacagcgcccttgaggatgcggatctggataattaccgggtccaggttgatgtgtacagcggagatcctgccgaactcatgacgctgcggaaacccgcagaggaagcagtgacggaaagcattccgttttctcaccggatcagcagtgagttcgggtttgaaccggacacaaagctgcaccggctcattcttgaatttaatatctcttcagatgaatag

SEQ ID NO: 282278 - DNA, 477 bp, Morganella morganii
atgggtagcgtcattatcaccggactgtctgaactgagccggaaaatgcaggatcttgaacgtaaagtcagcggaaatatcagccgccgcgccatgaataacggggcgaatgtgctgaaaaaagagattaagcaacgtgttcctgtgctggaaaaaacgacaccacggcgcagacgcgggaccgttaagcggaatatccgctcgaaaacacggatgcagcgtaacgggcaggtgaaaacccgcatctgggtaaaatcattaccgggtaaaaaagtgaaggcatttaagcaggcgaccggaaaaagtgctgcgctcaatcctgatgaccctttttactggtggttcgttgagttcggcacgtcaaaaatggcagctaaaccctttatgcggccgggatttgaggcgaagaaggaagcggctgcagaagcaattgtccgtacgctgaaagaggaaaccgaaaaggcaggtaacacatga

SEQ ID NO: 282279 - DNA, 339 bp, Morganella morganii
atggccggaaaatttgcacaccgtctgcggcatattatcacgctgcagaagcccgttccgaagcccggacggatcagtggtaatgaggttgtctgggaagatcacctgaaagatattcatgctgccgttgagccttaccgggggcgggaatacttttactcacagcaggtgcagagtgaaagcacgttacgggtgagactgcgctggtatccggatatcactccggatatgcgcattatgtatgcggggcgcgtgctgaatattgtttcagtgattgatccggaagaagcacaccgtgaacttcagctgatgtgtaaagagggggttaacgatgggtag

SEQ ID NO: 282280 - DNA, 327 bp, Morganella morganii
atgacagagattgtgacactggctgaggtcagggcgcatctgcgtatcgatcatgattttgatgatgcggacctgcagttaaaaaccaacgcggctaccgctgctgtgcttgatcatatcagggcatgggcggagcgtcatgactcagatgcggaaaaaatgaaggcttcaccggatatctggcgcgtgaaggatgcaatattactgctggtcggtatccgtgaccgcgaccgcgacggcgctgatattaacctttatccgcagggtatgctgccttatccggtgacggcgctgctgggaacgctgcataaaccggtaattttgtga

SEQ ID NO: 282281 - DNA, 957 bp, Morganella morganii
atgttaaacgagcgtgaaatatcactgataaaaaccattggtgaatcagtacgaagaaacgtgtctgagattgaaagcaggcttgagcagcggattgatgcgctgaaacaggaaaatgcatctctgtcagcgcaactggatcagctgcgtgctgataatgccccgcagccggaaccggtgacagaggaaaaggtaaaaacgatagcggaatcctgtctgaacggccggtctctgctgaataccggagatacggacagcctgatagaagaaaaggtcaggaaagcattcagcagtatcactgtgccggatcagcagtgtatcagggggatgattgccgaaatactgtcagaactcccggtgccgaaagatggtaaagacgggcgtgacggtaaggatggtaaagacggtaccagcatcacagcggaagatataaaaccgcttgtggaatccgttgtccggtctgctgtgtcagaactacctgtaccgaaagacggtaaagacggtaaagacgggcgtgacggtaaggacggcagagatgcctttgatattgaaatccttcccggtatcgacgaatcccggagttacgtccggggcacgatagcaactcacagtggcggcttatggcgggcacatgagcaaacgcagggtatgcgcggatgggagtgtattgtccgtggatacagcagccatctgattaccgtgaaagatatcaggacactgctgattaagtcgcagatgtcagacggggagacttttgaggcagagcacacgttcccggtgatgatatacaaaaatgtgtataaagccggggaaacctatcagcagggggatgttgtgacctggggcggttcgctgtggcactgtcacacaccgacatcagataagcccggcgagcttaattcagcgggatggacactgattgtgaaacgcggacgtgacggtaaggatgcaaaatga

SEQ ID NO: 282282 - DNA, 1332 bp, Morganella morganii
atggcgttatttaaaaaattaaccggactcttccgcaggggagtgaccggacacgggttccgttccgggtatgtccgtgagccgtttgccggagcctggcagatgaacgcagagctgggacgtgaggatgtgctgtcgtatcacccggtattttcctgcatcaccctgatagcctctgatattgccaaaatgccgctgctgttaaaaagaaaaaacagcaccggtatctggcagaacgtttccggcatgacccgctccgtcatgacgaaacccaacacattacagacacggaatcagttttttgagaactggatgaactccaagttaaccacgggaaatacgtacgtttttaaggaaagggacagtaaaggctcggtcacggcactgcatgtgcttgatccgcaccggatcaccccgcttatcacggatgccggtgaggtgttttatcagctgggtaccgataatgtcaccggtatcactcagtcagtcacggtaccggcaagggaaataatccatgaccggtttaactgtctgtaccacccgctgatcggactgccgccggtttatgcctgcgcattatccgcctcgcagggcacagcaattatgaaaaatgccacgcggctgtttatcaacggtggtaagcctggcggcattattgagatccccgggaaaatatcacaggaagacgcacttgaacttaagcagacatgggaagccagctacggtggtgagaatgccggtaaaaccggtctgctgacggagggagcaaaatacaataccgtctctgtcagtccggtggactcccaactggttgaacagctgcgcctgactgctgaaatcatctgctcggtgttccatgtgccgctgtacaaggtcggtctgggtgaggtgccgtcttacaacaacgtggaggcactggatcagcagtattactcacaatgtcttcagtcacacattgaggggattgaggtgctgctggcagagggattggatcttccggtgacggaaaaaatcgaatttgatcttgatgcgctgatgcgcatggacaccccgacgcggtttaaagcacacaatgaagcgattaaaggcggatggctggcaccgaacgaagccaggcgaaaagagaatcttgccccggtggagggcggtgacacaccgtatctgcagcagcagaactacagcctgtcagcgctctcaaagcgcgataacgcaccggataatccggagcctcctgaactgaaagaaaaaagcactgaaaaatccctgagtgagcatgaaatatcacacgcagagttgctgattaacgggagtatgtatgttaaacgagcgtga

SEQ ID NO: 282283 - DNA, 276 bp, Morganella morganii
atggctgaaattcagaaaatcaatgtcggcgcaaaaccggatgacggtacgggggacaccctgcgcgatgcgttcattaaggcaaacggcaactttgaagccttaaatgttgctccgcagaagggcgatcccggcccgaagggtgacaagggcgacaaaggtgataccggaccgcagggcgcgaaaggtgagcagggtgagccgggtaaggatttgtcggcagaactggccgcactgaccgcccgtgttgcggcactcgaaaagccggaaggctga

SEQ ID NO: 282284 - DNA, 1665 bp, Morganella morganii
atgatggttcactggtcaacagcatgtcctgactgggcggaacgtataaaacgcggacaatccattattccgccgccgatatatccggaacaggcggaaattgccctgagtatatttaaacaacttaaaattgttgacgctccgggcagcccgacgttcggtgaggcatgtgcccaatgggtatttgatctggtggccgcgctgttcggctcgtatgacgcacagaccggccgccggcatatcactgaagtatttgtactcataccgaagaaaaattccaagtccacgctggcggcggggatcatgatgaccgcactgctgctgaactggcggcaggcggcggggtacaccattattgccccgaccgttgaggtcgcaaccaatgctttcaatccggctcgtgacatggtgaagcgggatgatgtcctggatgatttgtgtcaggtacagacacacatccggacaattacccacatgacaagtgacaccacactgaaagtggtggcggctgatgctaataccgtatccgggattaaatcggtggggacactgattgatgagctgtggctgttcggtaaacaggctaacgcagaggatttgctgcgtgaggcgataggcggactggcatccagaccggaagggtttgtgatgtataccaccacccagtccaatgagccgccgtccggtgtgtttaagcaaaaactacaatatgcccgcgatgtgcgtgacggaaaaatccacgatcctaacttcctgccggtgatatttgaacacccgcctgacatggtgaagcgcggggatcacctgctggctgaaaacatggcaatggtgaaccccaatctgggttattcggtggatgaggcttttttactgcgggaataccgcaaagccaaagaatccggtgaggaatcgttccggggatttatggcgaagcacgccaatatcgaaatcgggctggcgctgcgttcagatcgctgggtcggagcagacttctgggagccgcaggcggataaaacgctgaccctggatgaaatactcacccggtcagaggtggtcacggtcggcattgacggcggcggcatggatgatttgctcggattgtcggtgatcggacgctgcaaagatacgcgccggtggctgtcatggtcccatgcatgggggcatccttctgtgtttgagcgccgcagaagcgaggtggctaagctgctcgattttgaaaaagacggcgacttcacgctggtaaaacaggcgggtgacgacacgaaagcggtggcggatatcactgaacgcatatatcagtcaggtctgctggataaaatcgggattgatcctgccggtatcggcggattactggacgaaatcgttcagcgcggtgttgagcaggacagcattgtcggtatttcccagggctggcgtcttggtggtgcaatacaaaccactgagcggaaactggcggaaaagatattgtttcacggcggacagccgctgatgaactggtgtgtgggaaatgccagagtggagccgaaaggtaacgcgatccttatcaccaaacaggccagcgggcgatcaaaaatagatccgctgatggcactgtttaacgctgtctcgctgatggcactgaaccccgaacccgccaaaaaacagtacaaagtgtttttcatataa

SEQ ID NO: 282285 - DNA, 462 bp, Morganella morganii
atgctgacagggcagaaaaagaaatttgctgatgccctgaaaaagggaatgacgcaacgggaagctgccgttgaagcgggttacagcgaaaaaacggccaaagtgaagggcagtcagttagccagagatccggacgtggttacttatcttgagaacagtgatgaggttaaccggggtgttaacccggaggttaacccaccgctgtctgacagggtgcgcctttcacaggccggtgattacccggatccactggcggtcatggcagaaatcatgatgaaaaacaaaggtgcggatcctaaattgtcactggaggctgctgcaaaactggctccttatctgtgcagtaagaagggggcgggcggcaaaaaagaagaaaaagcaaaggccgccaaaaaagcagaaaaccggtttccttcactggctccgccgaaactggtggtcaataacagcagggggcaatga

SEQ ID NO: 282286 - DNA, 219 bp, Morganella morganii
gtgagaaaaagcattttcatcaaaaggttgtacctgagtttcggcgcagacacagagctttggtacaccacaaggaagaatgattcccgtctttattcactatttcatgtcggtttctgccctgattattgtcccaatgtggggatgaaagcctttgtgattgatgtgaccctgccgttcctgattttcagtatcggttgggcgaagaaaagaaaataa

SEQ ID NO: 282287 - DNA, 225 bp, Morganella morganii
atgcgtatgtcagaaaaatactcaagccccgctgcatacttctgggggctgtttacaactgctgccggagcaacctcatcctggttaggtgatgtctctcttgagcagtgggctattgtcgccgggatcatctgtaccgtcggaacgttcctggttaactggtattacaaacgcaaagagtttcagttaaaagccggggaacatcatgaaaaaccgattatttaa

SEQ ID NO: 282288 - DNA, 177 bp, Morganella morganii
atgcgagataataatatgaaaaatgagaagatactccctttaatcaatgaagctaaaatggctgaatgggaactaaagtttgttgaaccacgcaaagtaaacaagcaggtcgctgataaggcattacctcaaaaacaaaactccacgttaaataaatgtgttagttatttctgttaa

SEQ ID NO: 282289 - DNA, 1296 bp, Morganella morganii
atgaccgctgaaattgcagtatacaataaaaccgcagttgctttagctgcggattccgccgtaacgatatctggcgggaatatgtataaaattaacaatggagctgaaaagcttttttctttaagtaaacatcaccctgttggcataatggtctatggagccggagatttgtgcggcgtcccttgggaaataatcataaaggcatacagaaaggaactgggtgataagtgttttgatgatataattgattattcaagtgatttttttgaattcttacgccgctcatcccatatcatttcagacgaaatgcgaaaagaacacttaggcttatcattttatagcgtttttttatcattaatggaacatatcaaaaaagatatcgttcaaccaatactgcaagataatggcagtgtcgacaatgtcgatacatgtgaattcattaagcgttcgtgtgaaaagtgtctcgaacgttttgatgacagcgaatttttttcaagttttgatgaatcagtcgttgctgaagctgttaattgtgccgcgccttatgctgatgagttatttacggagcatcttgcaactgatgacacagaaaaatttagaagtgaaattgttgatttattatcaaaaattttcgccttttctatctgcaaaatatcaccatttggccgcaatacgggcattgtcattgcaggatacggcgatagtcaatattttccgagtatattagcatttgatgtatatggctttttaggcgacaggatcattttgcaccacaatgaagggaagagttcttataatggtgaaagtggtgttactgcatacgctcaagaagaggaagtgcaggccttcatgcaaggaattagctctgagctggatggctacataaaaggtaatattgattccatttccgatgttgcaacacagagaatacaagatgaaattttgagcaaaatctcattgggtgatgatgaaaatgctctattattagatggtatacgtaacacattggatggttgtgtgctgggttgcgtccataatatcaacaaagtgattcatgagaattacattttaaaagtagttgaaatgattgagtttttaccaaaatccgaccttgggtacatggcagaatcattagttaacttgacagcgttcaaaagaaaggtttctaatgactctgaaacggttggtggcccaatagatgtagcgatcatctcaaaaggagatggttttgtatggataaaaagaaagcattattttgataaagaccttaaccatgattacttttgcaggaggtaa

SEQ ID NO: 282290 - DNA, 480 bp, Morganella morganii
atgaataaattattaacctcgctatcaattcttcttttcgcatcttattcttatgctaataatacgaaccacataagtgataatattaagtatggtccgttaacagaagaagaagaggtagctgttaaatcttgggtctcaaatgcattgaaagatggtgatagtgctaaatttaagcttggtgacaaagttatatcaattaatggtgaacctgaaccggtatactgtggtcttgtaaacgctaaaaactcgtatggcgcatattcgggatgggttatctttaaaagctttgttgcgagaaatgcctatggaaaaattattgctcctgttgaaattgggattaagcacggagatgatccagcaatgcaaattggcgatggtaaaatttttgaaaaggtattatttgatatgtgtttagaaaaaggatttttcaaaggcaactatttgaataaagaattaatcggcgaaaagaaaaattaa

SEQ ID NO: 282291 - DNA, 327 bp, Morganella morganii
atgaaaatattttttgtaatattttttatttccattctattgatatggttatcaaacttattgagtcgggtaagagcagagtactcaactgcaataaaaaataaaaacacacttatagaagaggctaccagtataaaaaacgccttggatacaaaagggatggaatcattatctgagtttgagattgaatgttataacaccgcgttatctaggctaaaaacactgaatagctataaaaagaaccacgccccagacaactacccattcttaaaggattggcctgatgaatatcaatgcatcaccaaggccaatcaatctacttgctaa

SEQ ID NO: 282292 - DNA, 324 bp, Morganella morganii
gtgagaatacagccaatcgttttcttaacgatgttgcaattaactccaattacgggctttagtaacagcacagcaacagtagaagacattatgattgtgtcaaaatacacagggatgtgcggcgtgttttctcagttaagcaaattccaagaatcaacaaaaatggacaatggtgatgagtttttggaaagatttttcaatactgaactttccagactgaacacaacgccagaggaatttataaaaaattgcaataaagctacggaaacttatgatggttacatggaaacctttaaaaagatgagtgacagtaaaagcaaataa

SEQ ID NO: 282293 - DNA, 2664 bp, Morganella morganii
atgtcgcagtctcttcagatcgccagcaacaatattactaaattctttggcgaaaacaccactgttaaaacatttacgagaatattcaatgattcggttgtaactataagtgaaaaccttgacggattaacggcagtgctgacggtggctgccactgttatcgggagccggtttgctggggcgatggcgttggccgcgaaagaaaaaatacagggagtaattgcagccagagcgttaagcgttgcagaagccgaggcaacaagatcggcagagttacatgccgctgctgaattaagggttgccaatgttgcgaaacaaagagctcttgatgaactcaggttagcaaaaaacctgagagatgttgcaataaccgagaatcaggttattgctgctgaacagcgcttgtcacaagcaagacaggcggcggctatagcaacgggaaattataattctgcactggcagctcatacggcggcgcagaatgcagcaggggcggcagcaaacagagccagcatcggaattggaacagctttgcgtggcgcacttagttttattggtgggcctgccggccttgctgtagccgctgcatcggcattgttttatttcagccagagagcgaaggaggcgagagacgacgccaataatcttgctgacagcgttaataccctgatcggtaaatttggtgaaatgagccgaattcagatagctgaggaaataggcaaggcaggagaaaaaatacctgaacttaccgaggctgtggctgaggctcagaaaaaatatgatgatcttacatatgccgttaatcgcaatcagcaaacggttgagcgttacggtgaatcaaccagagcaggcaaggaagcggcggcagcgttagcgattaatctggataggcaggccattgcagccggtgagctcgacagggctcagcagcgtttaagccagacacagaatatgatccgtatgggcagagctcagttgaacggggagcttctgaaaggtgctgatttactgaccgccgaagctaggacggctctacctaatgccggagccgcactccgtgcatatggaattgatttagaaaacgcgacgaaagcaaaacaaaagttcaattcagcaagcctgaaagttgaatggtcagatgctggcgctgacatgaaaaagacgcttgaacgtgaaattgaaatggctggcgcgaaggatgacgtagttaagcgtcaattacaggtcaaatattacgttgaagataaagggatatcagggcaggaagctgaaaaacttgctgaattagcggctaaagctggcgaggcaagcgaagcaaaaaaaaccggtattaaaacatcaagggaagccgcagccgaggcaaaaaaagaagccacagaagccgaaaagctcaaacagaagataactgacctggctaatgcgacgaaggttgcagagttggaaactaaagggctttcccgtgaggcagcaatccttgaggcagtgcagaagcttgggtcaaaggctaatgcagcacagatagccgaaataactgaacttgccggtaaggagtacgacctcactcagaagataaaagaccggaaagatgcctttgagcagaatcctagggtgaaagccgatcaggatatgaaactggctcaggagcaacttgagcgacaactgaaaggtgacctcatcactgaggagcagtatcaaaaacgcagcattgagctaaaagcggaacacgccagaaaaacagcggaaataaatgcgaaatcaactgtctcccccgttcaggaaatggcggcacaggttgatccggttcaggcgctggcaaatgagcatgctcagaaactggcactgattaaggattttgagaatcagaaagttattacggcgcaacaaagccttgaattaatgaatgctgcaaatactgagtatgaggatgcaaggcttaatgctcagtgggaaatctggcgtaatcagagtcaggccaatcaattcctggctgatgggctggatgcactaggccaacgctcatccaacgtactgacagggcttgttaccggcacacagaaccttaatgatgcatttcgtaatgtagcgtcaaccattattgatgaggctgttggggcgctcgttcagatggggatgcagcagattaaaaatatggttactgagaacgccatgcgtaaggcatcaagtgctcaggctatagctgacgccacggtaacaggctctgcaataaattccgcaatggcacccgctgccgcaacaaccagcattgcaacaatggggtcagcagctacatgggggatgatggccatgtcatccgccattccggcaatgatagctatcgccggtgcccgttacaacggcggccccgttgacgccaacaaaatgtaccgcgttggtgagaatggccagcctgaaatattcaaggcatcgaacgggcatcagtacatgataccaggtgacagcggaaaagttatcagtaaccggcagatgggtggtggaggcggtatcagtatgggggatatgcatttcaattttcaggttcaggctcccaatggcataacacagaaggaagtaacaatgataaccgggatggttaaaggtactgtttatgacatcctgatgacagagatcaggagcggtgcaatacaaggtaatcagcgctattaa

SEQ ID NO: 282294 - DNA, 330 bp, Morganella morganii
atggaagagtttaaatggcgtcctgaagatgcctaccaaattaataatgaaccgaaggtcagggtcgcgaaattcggcaatggctacgagcagagagccaaagacggaatcaataatcaccttaaaacatataacctggcattcataaaaccggtttcagccgggcgtgaaatagataactttctcagtaagcacggtgccgtcgaatcattcctgtggctgacaggggatgacagaaccctgcggacatttgtgtgccgtaactggcaggtaaccagaaagcaggctgtctggcagattgattgtgtgtttgaggaggtggttgcgtga

SEQ ID NO: 282295 - DNA, 699 bp, Morganella morganii
gtgagagatatcccatcagatatgcggattgcggttactcagattgaacaatcagcaatgcttaatttgtatgaagtggatttaagtcgcttcggcgggaatatataccgtttccatgacggaatgaacggcttgttgaaaccggttatttggcagggtaatcgatatgacccgtatccggttcaggtaactggtttcagcgtgacagcgcagggggcatcagcaaggccgaaaatgacattcgccaatattgacgggttgctgactgcaatcaataacgattatgacgatgcgctgggggcaatcgttatcagacggcaggttatggagcaatatcttgatgcagtaaattttccggatggaaacaatcaggcagatccgtcccgggaggctgtacagaaatttgtcattgagcaacgtgaaaattctgactcagatttcgttacatatgtacttgcgctgccgacagaaaccgataacgcgcagatacccgccagggttattcaggctgatatctgcccgtggcggtatcgtggacaggattgcgggtatgacggccctccggttgcagatgaaaaagatcagccaaccaatgacccgacaaaagatcaatgctctcataagtaccgtggctgcaaacttcgccactcatcagtattgccgtttggcgggtttctcggttccaacaaactaggttaa

SEQ ID NO: 282296 - DNA, 714 bp, Morganella morganii
atgattgaaggtgacattatcgcacacgcaaaagcggaaggcgtgaaggagtcgtgcggattggtttcaggagggatttatttcccgtgtaccaatattcaccctgacccggaaaattattttgaaatcagcacggaggaatggctgagggcggagagtcatgcagaagtgcaagttgtcgtgcacagccaccctggcggactgccattcttaagtgccggcgacagaggcatgcaggttaaaaccggactgccgtggtggctggtttgtgatgaccggttgcttaaatttaatccggttccgcgcctgctggggcgcgagtttaatcacggcgttcaggattgctacagcattatccgggatgcttaccatttgtgcggtatcggtcttgatgactttgatcggcgagataactggtggtacaccggtgacaatttgtatctggataacatcagcaggcaaggttttcaccaggttgatgagatacaggagggggacgttattcttatctgcctgggtacatcaaaaccttgtcatgcagcgctatatatcggtaatcaggagattcttcaccaccgccctgaccgtttgagcaagcgagatatttacggtggttactggtttaaattcacacacagcatatggagacacaaacagtggtcagactacagtttgcaggctatttacgccgatatggacgtcggtttgaattag

SEQ ID NO: 282297 - DNA, 567 bp, Morganella morganii
gtggtcagactacagtttgcaggctatttacgccgatatggacgtcggtttgaattagaggtcagcagtgcaggtgaggcattaagatgcctgtgttatcagattgacggattaaaacgggaaataaacagtggtcagttcagggtgcgcgttgccggtcgtgatatgacagagagcagcatcgcgaccggattaaatacaccgctcaatgaaggtgatgttgtcacgatagtaccggttatcggtggtgcaaaatcaggcggcttcctcggaattatcggcggagcggcgcttattgccgggtcattctttattcccggtggttttctggcgacgatgacatcgacagctatgtttgctgccggtgtcgggatagcggcagcaggggtggcgaccatgcttaccagaacaccgggggcacctaacttcagcgaaagtaattctgaaagtaaccagtatttcagttctctctctaacagaataggtcagggataccctgtcccgctttgctatggagaaatggttgttggttcaaatgttatttcacaggggttggagacagaataa

SEQ ID NO: 282298 - DNA, 3135 bp, Morganella morganii
atgggcaaaggcggcggcggtggaagcacaccaagactggttgatgacaatctgaaaaataagcaattcctgaatgttattgatttggtgtcagagggtcctattgaagggccggttggcggaatgcagggattcatgttgaacggaacgccggtagtcgataaacagggtaatccgaatattcgcggggttgaggttcagtggaaatctggcacgcagtctcagtccccgcttgatggcttcccgtttgtagaaaaagaaatacctgtgaacgtggaagtgaaaaaagaaacaccgatactgcgtgcggtatctgatcaggaggttgaccgcatccgctttacgttgggtgtttctgcgctggtgaaacaggatgataaaggtaatcaggaaaatacttctgttcagatgctcgtcgaaattaatgcaggcagcggatggatgacagagaaagaaattacaataggccctgggaagataagcgggcagtaccttgaatcgcatattattaatgcgccaaaacaaaagccgtttcagataagagtatcccgcctcactgaggatagtaaaagtgaccttctcaaaaatgggacggtgtgggccagctatacagaaatcacagatgctaaattctcatacccaaactccgctgtggttggtatgcgcattgataaatctcagtacggcgatactcctaaccgtacatatcatatcaaaggactgattgttcaggttccggataattatgacccggaaacacgcagctataacggtatatggacgggaaggtttaagcctgcatggacggacaatcccgcatggattttttacgatctggtgaccaatgagcgctacgggattggctccatgatggggagctttggttgtgaccggtttgctttatatgcgatagccaggtattgcgatgaaatggtttcagatggattcggtggcaaagagccgcgattcactttcaatgcctatattacctcacagcgaaaagcgaaagatgttattgatgatttagcatctgtatttcgcggtatgcctttatgggacgggttgcagttaacctgttttcaggacagagcagcagatcctgaatggacatacacaaattcaaatgttatcgacggaaaattcagctatacatcaacagctaaaagtgcaagacacaacgcaatagaggtttcatggattaatccggataacggctggcaggaagagagagaattcatacaggatgacgggcttatcatcagacttggcgggcttaatgttaagaaagtaacagctttcggttgtaccagccgggggcaggcccatcgtgtcggtaaatggattctggaaacagaaaagcttgagactgaaagtgtaacattctcaactttcagggagggtattaactgtcttccgggtgacatcattgaagtggctgatgattcatttgcgggttcaaaagtcggtggtcgggttttagatgttgttggcagcagagtaaaaacagatgcacctataaaatggtcttctggtgataagggatattttgcctaccttggcggcagcgggaagttcatcagaacagaaatatcatcagtagatggcgacattgttatcctgaagagcgaaccagccggactgcaaaaattcggtgtgttttctgtatcgaaaaacacgctgattacacgaatgttccgggttctgactattactgaagataaagacggtaactatcagtttaactgcattcttcacgaaccacaaaaagagcgcattgttgacgatggcgtcgatttcaccggcaatccatcgacacaaaatacggtcaggattcctgacattgagcgactttcagtagcctatatcaatgacagctctcaggtgcaggcgagagctatgtgggccacaacaacagttaaccgaaatattacttacgttgtctctgtttataaaaatgacaaggttgtccttaccggcgaaacgtctgatcttgaatattatttcaacggattggccgctggggaatatctggttggtgtacgcggcaaagataaaaatggaatgctgggaagcgagtcgaaagtgctgatggttattggtgcgccagcggccccttcgtttatcagggttgaatcaggcttctttgaagtgaaattgataccacatatcagtgccccgcacacactgaataccgagtttgaattttggttttccggtgagcagagaatcaccaacattaacaacattgaacaggaggctgaattccttggcagagcaaaagtatggtcaaaggggcagttaaaaccggggcatgattactggttttatgttcgcagtattaatgaatacgggaaatcgtattttgtggaggaaaaaggacaggccaataataacacgcaggaaattctggatgttgtacaaaaagagctcgaagactcagctatcatcaaagatctgcagtcgcaggcggatgacaacttcgaagccatcatcaataacgccaataacgcttacgggcagtggaattactggcagcgtgaaaacggttcgatgaaagccgaaattatcgaagtccgcaactacacggtcacggaaacaacggcacttgcagagaaactggatgcggtacaggttaaagctgaagacggtctggcgctggcgcagaactccatcaaagccgagtatgacatggagaaaggcacggcttcggcaatctggaagtcgctggtcagtattgtgtatgacggcgtgaattatgatgccggtatggtgattggcgcagagctgaaaggcggtaaggtcgataccatcatgggctttaacgctcagcagtttgcgttttataacccggtgaacgggaaaatggatctgttcatgtatatgaaggacggacagattttcatgaacgaagcctttattaacaaagcctggctcaacagcgtggttgttactgacaaaatgcagtcggagaactacgtaccgggtcagcagggttttattctggatgcaaaggctaataaattcgagttctttggcgggacgacaacaaatggaacctctattacagcagatggtattaaggtgtatgacaacaaacgtctgactgttattgttggtgatatatcggggtattaa

SEQ ID NO: 282299 - DNA, 321 bp, Morganella morganii
atggctcatggaattattgtatatgatgaacatggtaataaaatattagattccggcaaaagactcggcagattcgtcggctggcatgatgttaatcccgcaccggtcggtcagtttaaatacagctgggatcaccggaatctgttaccgatgggggagctttttgtctgggttaatccgagcttttggttcaatcataacggctggtgcgattgccgggttgaaaatggtgtaattgtttttgaaggtaatttaaagcgaaacgatgagcagagagctagggaaacttatatgcgcatattatatggtgttaaatcatga

SEQ ID NO: 282300 - DNA, 687 bp, Morganella morganii
atgactcacggttttatatgttttggtgacaccggccggatgcaaattgacggcactaatatagcgttagggctaatcagaaaacagtcgtttaattgtccgaaagtacaggatgcaggacagggaaccattaaagaggtttatttcccgactaaagtccacccaaacacacaaatgattgcagccagatcatcattctgggtcagaataggtggtcaggcgtttgacaatacgaataataatgcttttgtctctatgccttttcgcgacggctccggcggaaatatagaagtctgggagtttggtaacgcccctgttaaggtacgtaatcaaaaaatgggaatagttgtgataaacccggtaaccaatcaggtggtatataatactaactggggtgttgcaaatatactgcatgttcagcggctaaaactatggcctgatacaatgtggtctatgacaatgcctaataatggtaataactgtgcagttgtatttggtggcggcgctcagaaaagaacagattatgaagaatttatggaattcgagtcttatttctggcgaatgaatggatctaaactggaggtgcgtttgttggttgatacgtattccagaccgcatgcgtcacaatcttttgagtcatgtgatataccgctatatataatgataatagatacaacggggatataa

SEQ ID NO: 282301 - DNA, 267 bp, Morganella morganii
atgaatatattaaaattaatcacattaactgcaataaccatgctgacagcctgcagccataatgtatacaccaaaccagtggattgcaccgggcatatgtttgaggggctggataaccgacattactcagctaagctgacaaaatatgcaccggacagtaaacggtttttcagcacaggagatcctgttctggggttacatggttggatccgtatggatgcatttgacaaaattacatgtgttaaaggcaagggtacagaggactga

SEQ ID NO: 282302 - DNA, 276 bp, Morganella morganii
atggctaagtatcgtaagaagccagttgtcattgacgccattgaatggacaggtaaaaatttaaaagattgcatttcatttcttggtaattcttatggcggggtgaatacagatcgccgacctgacgggagaagtgagataacagttttaactcttgaaggtcagcatatagcgagtaaaggagattttcttattcgtggagttgccggtgaacattatccgtgcaagccgggaattttcaattcaacttatgatttagtgggggaacccgaatga

SEQ ID NO: 282303 - DNA, 468 bp, Morganella morganii
atgacgacaatcgcatgggatggcaaaacacttgcttctgatagccaatcgcaggttggaagcatgataacaagtatggtaagccgaaaaatacactgccctgataacgtgaaatggcaaatcaatgggagtgatattaaagccattggtatcgccggagacacttcttgtgtggatgaggtcgcagctaaattgcaatcaggcattacatatcagactgaatttacctctatcgttgatttctgcttgattggggtaactgtaagtgggtctgcatatggcctgagtaaagataaaggggatgtgttgccatcgatttttaaagttggcgatatgttttctatcggctctggtgacgcatacgcaatggcagcaatgaaaagcggtaagacagccgttgaagctgtcgagattgcggtatcgctagatgtctatagtggtggagagattcagtattttcagtgttga

SEQ ID NO: 282304 - DNA, 315 bp, Morganella morganii
atgaaaatgaaagaaaacccagacgtttgggatcaggtactgatgtatctgtctcagtacaaagaccagggcatatttgccgctctcgctgggtcggtggctatccttcgtggtcgctataacggcggaggatggaagaagaccatttttgacgggctgatgtgtgcaatcttcgcgtggttcgtgaaggacttgctggcgctactcggccttaatcctgatttggcgtatctgaccagtgtattcattggttatatcggtgtggatgcgctgagcaaaataatcaaaggcaaggcgggggtgagcgatgactga

SEQ ID NO: 282305 - DNA, 525 bp, Morganella morganii
atgaataactttatagaagccttagatacgtctatcaaaacaaaaaactggtattcagtgttatttatatccctgacactgcctgatatctgcggaaagatagagcatccagatttaaaatcatcaaaatcaagaacaatagaatggtacaataaatatctactaccaacgtacacgtcatttattggcccatcaagggatagacatgagtttttaagcggttctgatttctacgccctaagatgcgcatacctgcatgaagggagcgatgacatatcagaacaaaaagccagagatactctccaaaaatttagattcgtccaaccattatctgaaaacttttctatccattgcaatcaaatcaataactcactgcaactccaggttgataaatttggggcagatgttttgtctgccgtaaaatgctggatgaaagatatatcctcggatcagaataaaattagtaaaatagaaaaaatgctatttattcaaatgattgaaccatcaaaagggttttcaatttaa

SEQ ID NO: 282306 - DNA, 2952 bp, Morganella morganii; identical to SEQ ID NO: 281988

SEQ ID NO: 282307 - DNA, 153 bp, Morganella morganii; identical to SEQ ID NO: 282018

SEQ ID NO: 282308 - DNA, 129 bp, Morganella morganii
atgtttcagggggttcatcccttttttgtaatgaaccagaatgatgttaaaaatgccctcagtcgcctcagaaaccgttttaaactttcagaggggatttgggtgttaaggggtgtgtttgatgcttaa

SEQ ID NO: 282309 - DNA, 2073 bp, Morganella morganii
atgagtggcggagacggacgagaccacaacagcggtgcacatgataccggcggtaacattaacggcgggcctaccggaatcggtggcggcggtacgaacagcggagacggctggcatatagacaaagatggttctctgcatattgatataacagaaggaaaccagacaaagccggggccggggaaagaaggtaacggtaacggaggtgacggcagtaacagtggttcatcaaacagcgttactgttctgggtaattcaggttacgtgaatatggcgcacgcaggtgttccggctgcactttatcctgtcagcggtgtgttaacgatttctctgaactggtcagcgataacagcggctgtccgtgaggctattatcgggcttgatgcttacctgggggatgtactgaccagggttgctccttacgccggccgtttcctcggtattgttatcggcagcctgtggccgagtcagatagcccccgatccccaactgacatacaacctcaaagatccgcaggtcgataaagataacccttacagtgtgattgcattaccggcagagctggtgacagcggtgccggttaaggatattccgaaaaatacgacggttccggccagagtgctggctcaggcagtgattgatgaactggcaaaaacccgtccggtcactattactccggtgaaacccacaccggttccggttgtcagggcacaaaagactgacaaaccgaatgtctataccgcgcaggtggtgccgggtatgaaaccgatgcggctctatgtcactgctcctaaacgtgttaccccggaaaaatcccaggttatgcctaaccgtactccggcagtgaaacagtatttatcctctccggatgagagccgttcacatcatgctatcctggattttggcggcgaccatgagccggtttatatttctgtgacaaaacaacttaaaccggaagaagagaaaaaacaggcggaagaagcacgaaaagagtgggttgcggataatccggccggtgtgagcaaggtgctggcagacctcagcacactgattaatgccaaaaataagcaactggcggaaaaacagcagacgctgaagaacaagcaggcggagtttcaggcattcctggataagtatcagaatgccattccgtttgtgaaaaacggggttaacttcagagaaagagaacgcacgtttaaggctgaaatcgatcagattaacgcagatatcctcagtatccagaaagaactgacggatgctgccgggaataaggcactcaatgaaaaaacgctggctgagctgaacgaacaggaacgtaatcagaccaaaaccctggaagaggccgagaaagaactggccgcagctgatgcggcactgagcaaagcccgggcactggtgacggagaaggaaaagcagctggccgtgaagcagcaggcgctgaagagcaaacaggcggagtttcagtcgtttctggataaataccagcatgcgattccttttgtgaaacgagggattaatttcaagggaaaagaacgggattttcaggcggcaataggtcagctttccggcgaagtcggtcagcaggaaaaagctctgtcggatgcgatggagaaacgcagtaaagcggaaggtaagaaaaaagccgctgaggataaggtcaggacaaaacgggatgaaaaacgtaagcagcctggcacggccacagggaaaggtcagaaggtcggtgacaaatggcttcatgatgcaggcaaagaatccggtgtaccgatccctgaccggattgcggataaactgcggggtaagaagtttaataatttcgatgacttccggaagaagttctgggaagaagtatcgaaagaccctgagttagctaagcagtttagtcctagtaacaaaaatagaataagtcaggggttagctccacgagctagaaataaagatactgtcggtggtcgccgttcatttgagcttcaccatgataaaccgatcagtgaaggtggtggtgtttatgatattgataatatccgcgttaccacacctaagcgccatattgatattcacagaggtaaataa

SEQ ID NO: 282310 - DNA, 261 bp, Morganella morganii
atggaattaaaaaagagtatcagtgattacactgaaactgaatttaaaaaatttatcgaagctatcattaattgtgatggtgatgaaaaaacgcaagataataatttagaacattttattaatgtcactgaacatcctgatggttcagatctgatttattatccggaaaataataatgatggaagcgctgatgccattattaaagaaattaaaacctggcgatccaaaaatggtaagcccggctttaaacaagggcaataa

SEQ ID NO: 282311 - DNA, 153 bp, Morganella morganii
atgaaaaaacaaaaaacagggtatctgttgttatgtctgatttcggtggtattactggcggcttgtcaggccagctatgttcgggatgtgtccggcggcagcgtgagcaacgggcagtcggtcttatccggcaataccaccgctgtgaagtaa

SEQ ID NO: 282312 - DNA, 189 bp, Morganella morganii
atgaacaaacaggaaaaagctgtcctgaacatggctggattcttacggtcacaaagtctgctcttgctcgaaaagctcaatgaactggattcggataatctcgatgcggaaaccaatctgtgcgaagaactccacgaacggacagagttactgcagaaacagctgaaggcaaagctgggcgcggagtag

SEQ ID NO: 282313 - DNA, 402 bp, Morganella morganii
atgcgggcgacaaatatcggatggataacccgccggatagcctttatccggaagctgagcgaaaagaccgagcgtcagcgggaaattatccggctgctggatattgaaaaccggacatcactggagcaaaagcagcttcatgtgctcgcaaccgccgaaaagaaagaattacaacggcaggaaacacagcaacggcttgaggtacaggagcgtattgccggcagacgaaagcggcgcgaacgcaaccaccagatgtttttagccgccggtatgctgacaaaatccggtctggtcgataaagtcacgggaaagccgaattatgacccagaaatgctgacggcagcgttcaccgaatttaaccggaaactgagtcagaccgagaagggaagacagaaaaaatga

SEQ ID NO: 282314 - DNA, 939 bp, Morganella morganii
atggcaacctatcatttcagtgtgaagtttggtgcaaaaggacgcggcggagcgcatgcggattacatcacccgtgagggcaaatatcaggggcggggtgatttaattcacgcagagcacgggaatatgcccggctgggcacaggatgagccgcggcatttctggctggccgctgacctgttcgagcgcaaaaacgggtcagcataccgtgagtttgaaatcgcgctgcccagggagcttaacagggagcagcagactgacctgatccgcgagtttgtgaggcgtgagctgggtgagcgtcatgcgtatacgttcgcgatccataatccggcggccggtattgacggcggagagcagccccatgcccatgtgatgatgagtctgcgggtcaatgacggaattgagcgggcaccggatctgtattttaaacggtttaatgcgaagtatcctgaacggggcggtgcacaaaaagattcaggccacagcctgacattaagtgagcagcgtgaggctttggttgatttgcgggcacgctgggcagagacccataaccgttatcttgatgcgctcggcattgaaaacagccgtatcgatcaccgttccctggcggaacagggtgttgaccgtcagccggagtatcacctgggatttgaggcttcagggcggttaacggatgaggacagaacggcgataaaacagctcagggaacaaccggacattgagcgttacagtcaggaaaaaatgacgtatttcgattttcatgatgaaaaatggctggctgggtaccggcaggcgatggcggattaccgggaccggtttgagcaaagttttactgcggatttgaaacgggatattgcggaacaaaagcaggtgactgaccgtcattttgtcagagaaaagacgattgatcgggaacgggggtttggttatggcgattag

SEQ ID NO: 282315 - DNA, 294 bp, Morganella morganii
atggcagattacctcgttagagttgagttatacgatgcagatgcaggagactatgatgcattacatgaggcaatggagcttctgcacatgcataaatatttcagaacagacgcaatgaatgttaaatcattgcctaatggtacatatatcgggcaatctgcactttcagccccgagtttgcgtgatgcagttcaaagagcggccacgccattatcatcaaaaataccgtcaatattcgtgtgcgagttcagtagttgggcgtcgtatctatacccgtataattccaacgcctga

SEQ ID NO: 282316 - DNA, 162 bp, Morganella morganii
atgaaagaattggaagatttaataagtgcagtggcagaaaatgaaggcatttcacggcaggaggcaataaagctggttgtgaggttaatcaataacagacaatccagcttacctaaaggtgaccctgatttagagtcaggcgttggaattatacgggtatag

SEQ ID NO: 282317 - DNA, 327 bp, Morganella morganii
atggaaaatgcaaatccacgcaaatcgtttaaccggtttgtgtcaaatcatctgatggcaacagctcatcaggcactgagaagcaccacacagacagtggttgcaaaactgctcggtgtacacgattcaacagtcttacgcagaacagaaaagttaccggagatatgcgagacattggccgcagccggtatcacagattttgttttgccgggcgagaagaaaatcagcgaggaagagtaccggtttctgtggaagcagatcggcgaactctctctgatgagaacaaaagaaaacgccccggctgttggagcagcagaggcgcattaa

SEQ ID NO: 282318 - DNA, 237 bp, Morganella morganii
atgcgaagtaaagcaataagacgccatcacgagaaacgcctcaaatctaagcgcagtaaatattacaatgccggacacgccactaagcgcaacataggcatgtgctaccgcactcccgcactgtgtggttgctggatgtgcgctaatcacagaaaagtattcggcatgagcttcaaagaagttcgtgaccggcagcgctgcattgatactgagcaactgctgcaaaatatgcagtag

SEQ ID NO: 282319 - DNA, 390 bp, Morganella morganii
atgcaggagccgttaacaggcacagcaaccgcctcgttagcgggtgtctctattgttggtctatttgccggactggatgctggcgtagtgatcggggcattcgccggtgcggttgtattcgtactttcatcccgcgatatcaagttgtggcacagatggggctatttcgtcgtgtcattcatcattggtatttacggcgctgactttgttgccggtctgctgagtaagtttgtcagtgatcagccggtcgacaggtcagtgggggctatgtttgcttcggccggtctggtaggtgtactggtggcgatttcaaagccgggttcactcactgagtttattaacaaagtggtcggagcgactattgataaattcagagggggtggaagatga

SEQ ID NO: 282320 - DNA, 285 bp, Morganella morganii
atgatcctcccggacttatgggtttacaccaatttctttgtgtgtggcctggcggctatccggctgatgaattaccagcgcaacggcgcacaatacaagttcttaccatcactcatggcgtggctgttaatcgtggcctttggctcagtaccgctgcgcattctgacaaatgactattcccatgctgacccgtccgaggtggcgataaacgtcgccggatttattctggtgatgctggctggcgggaatgtgacgaaaatattcagaggtgcaaaaagtgactga

SEQ ID NO: 282321 - DNA, 483 bp, Morganella morganii
gtgactgaaccaaaatggattactgaagcccggaaagaaatcggcgtatcagaacacacagcagcaggttccgcagcagtagaccaaatgtggattgacagcaaactgcgaggactggttggcactgcgcgtaaagttccgtggtgtgccgggtttgtgaatgcctgcctggagcgtgccggtattcgttcgacccgctctgattcttcccgttcatatctggcgttcggtgacgcactgaaagagcctgcatatggttgcattgtcacattctcccgtgccggcggcggtcatgttggtttcgtggtcggcaagacagaatcaggtcaactgatggtgctgggcggtaatcagtccgatgcggtaaatatcaaagcattcggaaccgaccgtgttacaggttaccgctggccgtcaggtgttccggtggataatcgcccgctgccagtcggtaacgcagcgctgtcagtaaaagagtcatga

SEQ ID NO: 282322 - DNA, 198 bp, Morganella morganii; identical to SEQ ID NO: 282048

SEQ ID NO: 282323 - DNA, 135 bp, Morganella morganii; identical to SEQ ID NO: 34870

SEQ ID NO: 282324 - DNA, 3138 bp, Morganella morganii
atggcatggtgttactggcaggatctattatctgatttaccttctgccccatatttaccgataaagaattcatccattactgaacaacctcgttttacgactttccaacatcatgtttctatagcgcaatgggacaaattaaaacagaggtggaaaaagcatggtattacaccatcagcagggcttttaacactttttgctttagttttaggtcgctggacaaaatacccagcctttacactaaacttaactttctttaatcgtcaaccatggcacccagatgttacacaacttattggtgattttacctctgtactccctatagatatttatctagataacgactgtacattaaatgagtcaatggcaaaaatacagcgcagactttggcaacatttaagtaagtcccaagtaaatggtgtagagattttacgtgaatggggacgctataaaggggatagtagccaatctctgttacctattgtatttactagcatgttaggtatgacactagatggtgacaatattgatgaagcattaaatcagcttttcggccaacccgtatatagcttcgcgcaaacacctcaagtttggttagatcaccaagtaatggaaggaaaagaggggctaacattaaattggttctgcatggatgacatctttgctgacggtttattaacaatgatgttctctgattatcaaagcttgatcactcaattatgccaagatgaagataataatcaatcagttgataagattattgcgcaacttccttcatatcaacatttagcaatagataatcacctccaatcacgctatcaacaactcgagcaaacattggaaaatcatccgcaaatcaaacgtgctcatgctatggtaatggtaaaagacgatacgaaagtagagcctcctctacaattactgtttgaagcctcttctgatattccactatccgttattaaacagcccaattggttacctaatttactttcgccatcagcttcactcagtgacattattgaaaagagttggcaacgatttgaggaacgagcacggtatggcatatgtcacacactgtatcgaaatgctctttttaccgagctaaacacaccaatcaccctagctgaaatagtggctcgtttaaaagcaaagcctcagtatgagaggctacttagtcagtggctagatttattatgcctgcatcacttattaaccaaagagggtgatcagttttatgccacaacacagtttattaacttatgtttatctgccccagtatttcaacaacctgttaatgattgggaatatgtactttgggattaccttgaacaatcactaacccaacatgaattactctttagtggtaaggtttctcctctttcactactttttaattcagatgaaattaccacagcactatacgccaaacaccctgcactaaattatttaaatcaatgtgcaaaagatattgttagtgcaatggttggtgcaacatcttcactcaatattttagaaataggggcaggtacaggagctaccactcaaggtatagtcgcagtacttaagaatacgcattactcatacacctttactgatatatcacattacttccttgataaagcgcgaaaaaaattcactgctgtaggagaaatgcgctatcaactctttgatattaatgcaccaatacaattttctcatcatccagataatggctatgatctgatcattgcatctaatgtattacatgatgcatcacatatcggccacgcactaaaacggattagaagcctgttaaaacctcaaggctatttattatttatcgaagcaaccgagtgtcaaagtgctatgcaaatggcgactgttggctttattgagggattaagtgcatatcaagataagcgtatattgacgaataaagcgatgcttgatagtgaaagttggcatgatattttaatcaatactggttttgaaactattggtcaatggccccaaacagattcctcatctttgcgacaaacactctttttagcctctcccactcgtggaggaaaaccttatttaggtaaattacgtgattatttatctcattctcttgatcagaatatcgactcttttgagttgttccaatgtgaaaatattgaagcaacccttaatggcatagcaacatcatccgctcaagagctaaatgaacagatacaacctgttgcaatacctgatgtaccaaccaatatgattaatgaaatcattgcattatggtctgagttattaggtcgtgaggtcaatagtacaaatgatttcttccgttctggaggagatagtttgattgcaaccaaaatgatcagccaattacatcaacggggatatccagcaacattacaacagatttttacctatccatgcttagccgatttttgtgctcatttagagcaggaaaagcaatctcaacgagagtactcctctttgatacctctaagcgctgtatctgctccaaaaccttaccactactttatggtacatgcttctgatggtgatcccggtgtttacctacctcttgctgagtcgttaaataatacagtgtggggattaacagttacagatgcttcaaaactaactgatttggatacattgttatcattacatttatctagcataaaaacagcacaacagactggcccttatattcttattggttggtcatatggtgcttttattgccagttaccttgcagaacaactctcgcaacaaaatcattccgtattattagtattaatagatcccgtctatcgacatgattttattaaattttgtcatgatgactcagatagttcatcagatgaaaataagcagcttgcatgcactaaaagacttatgtcattcctacctgaaagtgacctaccattatctgatgatatcgcctgtttatggctggaagccaccaaccacccaacagaatggacatcacctgaaaaagagtggtaccaacgattaccgccacatacccaacatcactatttttcaggggagcactggtcaatactgcaagatcgcgctaccagcacacatctggccgaaatcattgatcagtgggtgcaacaaaaactttctaataacggatatccatccgaaggaggtaattaa

SEQ ID NO: 282325 - DNA, 210 bp, Morganella morganii
atgacaccacaggaagcagagaacggacgcagacgaatagcaagggaatgcctgaaggaattaatgcagtacacatcagacgaacaacacaccgcaatactcgacaaatacacaccgaaatttaaaccacttaaccacctgcgctttccggcaaagagagtgctcgggtattacgtgcgtacgttacagaaggagatgaaggatggataa

SEQ ID NO: 282326 - DNA, 1218 bp, Morganella morganii; identical to SEQ ID NO: 277968

SEQ ID NO: 282327 - DNA, 516 bp, Morganella morganii
atgatgccgatagaaaatgatggggtttttgtttccaatgatacaccaattaagatgggcgtaagtccgaacctaacctttgcagacaggaatggaactgttattatcctgacagatggctcgcttcaaccaaaagttaactatcagcaagcgcataaaacagagggtgggataaacgtgggaagaaaggagttttggcttggcataactgggattattataactgtagcagttgctatagttggctcagtgtggtctatagctaaccatgttaataactcaacaaatgaatcaagaagagaaatccaggcctctatcaatgcaaacaaacaagaagtggttgcattattaaatgccagcgatagtcgcaacaatgatcgattcaatcgtgtcgattctcaatttgacaaggttgacattaagttcgataaacttgaaacaaagattgatgataattttaaagatacaagtaaaaacatcaatgaaatcaaagatttaattgtaaaatctaagtag

SEQ ID NO: 282328 - DNA, 282 bp, Morganella morganii
atggcaacaattactgttattccaaagaaagacaacgcgaagaaccgccggttagcaaagcaaatggcgttctgggacagaaagcgtgcggagtatgcagcgaagcctaaaagccgctcagtggaggagattatcgattcaatcatcaagcctgaatgccatttcgaaacactggctcaggtggtgattgaaatgaagaagctgccggaagcaccacgcaagcggctgagaatgaaccgcaagccgattatgccgaacggtggcattacggccagagcatga

SEQ ID NO: 282329 - DNA, 396 bp, Morganella morganii
atgaaaataaaaatagtctacaaagaggtgcatcaacttgtactacagcgccttgaaggcggcgaggtagagcaagaaaacgaattacgatttacattaggcaccgaaatttatcacaacaaaaatgatgccacgttagctaaatttcgatacacagtaaccgccactcttagagatgaagtttcacttgagttaatttatgattttgcatttcaggcagatagtgagttaacagaagactttaatgggagcgacgcagccactatcatggcacctaacttagcgtacccatatataaaagcatatgttgagaatatttttttcatctctgggtataaaaaaattgtacttccatacattaactttttcgataacccattaaaaccggaacaataa

SEQ ID NO: 282330 - DNA, 300 bp, Morganella morganii
atgatactttataacgtcgaattaattagagatcattgcctcaagtatcatcaatgtaagggcgctatggacatgtgggaaaacagagttcgctctgcgacctggaagacttttagtgatgtaaaaaatgtattcaggacggctgattacactgatggtttgataatattcaatatccaaggaaatcatcacaggcttgtagttgaggctgttttccacgagggtgctgtcgccataaagtgggtcgggacgcattcagaatatgataaaaaatgcaaaaaaggtggctttaagttatga

SEQ ID NO: 282331 - DNA, 642 bp, Morganella morganii; identical to SEQ ID NO: 277233

SEQ ID NO: 282332 - DNA, 423 bp, Morganella morganii; identical to SEQ ID NO: 103759

SEQ ID NO: 282333 - DNA, 627 bp, Morganella morganii
atgattaagaaactaatttctttgattattttaatatcttttttttcttatggagaacctcctggagaagcccccctccctgtgactcctaaaataggtacagtagaaacagaggaaaatgatattaatagagctcaaggcagcaccgaaattttatttgatgaaaaaaatagctttcattctttgattgaaaaaaataatgaagcaatagaactactatcagctaaccaaaaaacattaacagaacagattataaatagtaaaatagacacttctgaaattaattattctacatgggctagtattttactcgcttgtgtaacagtcattataacaatattgagcgttattttagctataatatcaattgttgggtatagaaactttaagaaaagcattgaacttaatgtaagaaatatatctactactgtagcgaagaaagaaacttctattttaattgatgaagttgctaaaaaggaattaactaggttaattaatgaaggagcattagcaaaacatttagaggatgctgttgatatgatattccttagaatgaaggatagagaaagtaaaaatggatttgataaatatcctgaaatagatatagaaaaagaggatgttgagtaa

SEQ ID NO: 282334 - DNA, 201 bp, Morganella morganii
atgaagcctgaaatcacatcgataccggaaatgcttattaagcaccacggaaacatgaccgcactggcgaacgagttgggagtaaaccggcatacggtcaggaagtttcaccgtgatacccggtgcgaaatgcacgttatctacaacggcgtgctgatgaccaaatccaagatgaaaggcaaccaggggaaagagcaatga

SEQ ID NO: 282335 - DNA, 291 bp, Morganella morganii
atggcgaatttacgaaaagaggcgcgcggcagagagtgccagatccgaattccgggagtgtgtaacggaaattctgaaacggtggtgctggctcattatcggatgccgggattgtgcggtaccggaattaagtcaccggacatttttggcgcatgggcgtgcagtgcatgtcatgacgaaatcgaccggcgtacgcgcctcacagacgctgagtatgcaaaacagtgtcaccttgagggcgttatccggactcaggcgcagctgctggcagaggggaaaatatcggcatga

SEQ ID NO: 282336 - DNA, 528 bp, Morganella morganii
atgaaaagagtaattactgtgttgctcaacggctggctgtgggcggtggtgttcttcgggttatggatgttcagcttactgtcagcagaacaatcggaaggtcaacacaaagacaaggttatcactgaccagcaaaaggtgatttataacgcttacaccagcatcgatattttcgatcgcgtggcaaccgcaaacgccaaccggaatgttcaggcggaagccaaatcacaggagaaacagattgaataccgcacaatcatccggaaagaggctacctgcaatttgtatattcctcagcctgtttctgacgggttgctcagtcacgtctacgccatccgtgaatcagcaatgcgttccgctcccggcatcactgacacaaccggtactggcaccactgccacccgccgactgacatactgccaggtggttgaatggatagaaccgctgctgacggcgttggaccaggcaaacggacagttgatggatatccggaaagcggatgcggagcgaaacaggaagtccggataa

SEQ ID NO: 282337 - DNA, 141 bp, Morganella morganii
atgctgatcatcattgctatcattctgctgacggtcagcctgttggcaggctgttacctgtattcactcgagactaactgtaagccgctggcgggtaacccactggacggtgtgattcactatgagtgtgaagcgccatga

SEQ ID NO: 282338 - DNA, 363 bp, Morganella morganii
gtggccggggtgctcaccgtatgttacggccataccggtagtgatattcagcccggcaagctgtacacggacgctgaatgtaaggcgctgctgcatgacgacctgacgaaagtccggcgcgtggttgactcgatgattaaagtgccgattgatgacaatacccgggcggccatctattcatttgtctacaacgtcggcctcggcgcgttctcacgttcgacgatgctgcgcaaactcaatgccggtgatatcgccggtgtatgtgacgaaatgaaacgttggacatttgccggtggcaagcagtggcaggggctgatcaaccggcgcgagacggagaaagcggtatgccacggaaccctttaa

SEQ ID NO: 282339 - DNA, 291 bp, Morganella morganii
atgacaaatccaatgcaaatgccggaataccagtgccacaagcgagtccgggctttaaaaataaaaagaatcgactatgggtacagagatgcggacaaaggcaacccgtcgtgggtttgcgaaatcgtccctgaagatgacaattacccggcaattgaagtgtcagctgagtacgtaaaaaaacacaacccgcaggcgggtggatattacgttgtttatgaaaatggctatacgtccttcagcccggcagatgtattcgaatccgggtacacaccttgccgcgataactga

SEQ ID NO: 282340 - DNA, 378 bp, Morganella morganii
atgaactggaaagaagcggtaattgccgcgctgtttattgttgccgcctggtgggtatatgacacctaccgggataaccagcaactgaaggtgaataacacaacattatcaggccagttatcggcacagcaggtgataaacaccaccacgctttcagctgtttccatcaggcaccgcgtggcactcgacaatatcaaagacaaacaggaagaggacacggagaatgtcaaagtcaaaactgttatcaggacagtatttaaggacagtgaatgcgctgttgctcctgttcccactgatgctgttagtgagttgcggaaatacgcggacggaatacgtgcccgcaccggtggtgccgatcccgccacaactgaccgctga

SEQ ID NO: 282341 - DNA, 159 bp, Morganella morganii
atgccacggaaccctttaacactgatcatcattgctatcatcctgctgactactgctctgttggcgggttgttatctgtattcactcccgaatcactgtaagccgctgccgggtaaccaactggacggtgtgatccattatgagtgtgaatcgccatga

SEQ ID NO: 282342 - DNA, 909 bp, Morganella morganii
atgtccagaagagcaaaagccctgtcccgtgaaatgcatatccttgcccgtcaggccggagggagctttaaaaccattgcagaccgggtcaaaattgcagaacgggttgcggcagagctggccgggctgaatattcagatacgatctgttgagcagctgaaatcccgtcatattgaaatgtacattcatgcccgcagagaacagaatatcagtttacgcacctgtcaaaacgaaatgtcggctatccgggcgatatttcgtgttgccggacgtcataaactggctgatcctagacatgagcgcctcagtaatgaggcgctggggatttcaggtgccagcagggctggcacccgtaccgcgatatcggacgagcgctttcacgaagcgctcgctcggattgagccttatgatcagggagtggcattaaccatgcagttatcccgtagtctggggttgagaaatgaagaagccgtgcagtcagtaaaatcattacggacctggcaacaggcgcttaaaaacggtaaagatcgcgttcatgtggtttttggtacaaaaggaggcagaccccgtgaagcattagtgccggataaagcccgtgtattaacattaattaataaagccattgaatatgcggataaacataacggttatttaattaatcgtccgtcattacattcagccaaagatcgttatattaatgtgatgcgacggataggcggatttattcacgaagaatcaaatcatggtttacggtatgcctatgctcaggatgttgaaaaatattatctcagtcagggattcagtcaaaaagaagcttatgcattaacctccatggatttagggcatggtgacggtcgtggcgattatattaaacgggtttatagtcagaaaggggatattgaggaataa

SEQ ID NO: 282343 - DNA, 579 bp, Morganella morganii; identical to SEQ ID NO: 281985

SEQ ID NO: 282344 - DNA, 159 bp, Morganella morganii
atgccacggaaccctttagtgctgatcatcattgctatcatcctgctgacggcctgcctgttggcgggttgttatctgtattcactcgatactcactgtaagtcactgccgggtaacccgctggacggtgtgatctgttatgagtgtgaagcgccatga

SEQ ID NO: 282345 - DNA, 1056 bp, Morganella morganii
atgaaaagcactgttaatttaaacagtattaatttagtcaacgacgactcactcagctatatcaaaacccttccggacaattgcattgatttaatcgccacggacccgccgtattttcaggtaaaaacatgtgcctgggataaccagtggccggatgtttctgcttacctgtcctggctggatgaaatgcttgccgagttctggcgggtactgaaaccaaacggcagcctgtacctgttttgtggttcgcgtctggcctcggatacagaaatactgttacgggagaggttcagcgttctcagtcatatcatatgggcgaaaccttccggtccgtggcggcggcaaaacaaagaaaacctgcgttgttttttcccgtctactgagcggctgctgtttgcagagcattatcagggaccggtaaaaggaaaaggcagtgagtaccaccagcggcgggatgaactgaagaaaaatgtgtttactccgctgattgagtatttccggcaggcgcgtgatgcattgggtatcacggcaaaagaaattgaccaggcaaccggcaagcagatgtcttcacactggttcgggtacagtcagtggcagttaccgaatgaagcggattaccggaaattacaggtgctttttcagaggacagctgcagagtgtcagcgaaataacccgttataccgtgaacataatgatctggtcagtgagcaacatacactcaggcgcgaatatcacgaactggcaggtcagtatcagttattgcgccgttacttcacggtatcagttgatgtgccttataccgatgtgtggacattcccgccggttcagtattaccccggaaagcacccctgtgaaaaaccggccgcaatgatggagcacatcataaaagccagcagccgcgaaggcgatttggtcgctgatttctttatggggtccggagcgacactgaaagccgcactgaagcataaccgtcgcgttctgggtgtggagatggaagcggaacggtttgaacagactaaggcagaaataactcaactctccggaatttccggatag

SEQ ID NO: 282346 - DNA, 417 bp, Morganella morganii
gtgaacgggattgggtatttatcgaatatccgtcaggttaacggccctaaagggcagtttttaaccgcagtgattaatgcactcagtggaccggctgataaccctgtgtatgttcgttttgatacgacagtcgtcggggagaatacggtctcactggtcagacggtgtattaaagcggtggatgaggacaaaaaagtcctaaccgggtttacattaagtaacctggcttccgatattttcaccctgacaaaaggtgagcatgccggagaacagcgggtcagcctgaaagccaggctgctgaatattgactggattaaaatcggtaaagaagtggtatataaagccgagaaacaccagtcaacaccaccagagactgaacagccggtatccagagagtatgtggctgattctttttag

SEQ ID NO: 282347 - DNA, 669 bp, Morganella morganii
gtgtacgatgtgtatggcaccccaaaacccaaatccgctgcgggtaaatatggcattcagcttcgtggcatgaatggtgtcacaacgctgacggatttttccaagctgggttactgtgtgtgggccggtacggtttacagcgatggtaaaaagggaagcggcgctaaaatacccggatacgacatcagcaacgaaagtcgctatacaatctatgtcagaccaaaatcccaggcctgcacaatgttgagattcaggaattcaatctggactgacgttcctgcctatctgaatgtactgttattcgatcacaaccctgatttatccgttctgccaaaatacgggattcaaatttgtaaccagaatggaaagacaacctatacgagcaaatactgcccgttgatgggagggcagctgttatctgcaatgtctggtaattccaaatacaagactccctattttaatctggcaaactacggcacgttcgtctcttccatcaagaataaaaactacgacctggcagcgcttggcctgtatgtcagcggtaattattacgatgtccggtttctggcaacagtggactccggctggatgggggatatgtggacaaataacggtaatgtgcaggggatttataacacccactgtatcgacggtgatttatatttataa

SEQ ID NO: 282348 - DNA, 141 bp, Morganella morganii
atggggcattaccgtgatgcacaggcgatagccaccggggtgcagtataagccgacggccaataccaatgtgcgcctgaatgcgtcatggaataacggcggcgataccagtatcggcgccgggtttgcggtgggctggtaa

SEQ ID NO: 282349 - DNA, 441 bp, Morganella morganii; identical to SEQ ID NO: 103771

SEQ ID NO: 282350 - DNA, 486 bp, Morganella morganii
atgttttgtcgtgagtacctcgtagatttgaacgctacacaggcggctattcgtgcggggtacagtgataaaaccgctaacagaatagccgctcagttattgtcaaaacttgacattggaaagcgcattcaggagctgaaatcagagcgcggtgagcgccttgaggtagatgcagattacgtactgaaacgcttagttgaaatagaccagatggacgttgcggacattctcctttctaacggcgagataaagccgattaaggactggcccaaagtgtggcgcataacactgtccggtatcgacgtaacggaaatcgcgggtgatactgccgggttgctgaagaaaataaaatggcccgacaaggtgaagaatcttgaattgctcggtaagcacatatctgtccaggcattccgtgagcaggttaaaaacgagcatgatgttgtcggcactctctctgacctgatggacgaactatcgagcaaataa

SEQ ID NO: 282351 - DNA, 222 bp, Morganella morganii
atgaaagcaatatcaatcagacagccgtgggcatggctgatagtcaacgggcataaagacattgaaaaccgcagctggcgcacgaagtatcgcggtcaggttcttgttcatgcatcgcagggcgtaaagcagagtgactatgacgccgcgtatgctttggcttgccgcctcggaattaagcttccgcaccgcttagagtttgaaaccggcgggattgtctga

SEQ ID NO: 282352 - DNA, 417 bp, Morganella morganii
atgcagaccatcgattttatgccggatcgcttaaatgcagagcccacagtctttcgcggatttaccacccatgaaatgtttgccgccgccggtgtcggttgtgtgggcgggagcgttatcagtatcccgctgttaccgctggccgggtgggtgatcctgccgaccggcgcgttgataatgccgctgttggtggtgttttttggcggcacttttctgacccgtatcaaacgcggaaaaccggaaaattatctctaccgccgattgtcctggaaactgcaaaccgggtttgcccgcacattgccgctgaccggacggctgactgaaaaatccctcatcaccgtatctcagggctggtttttacgccggacgcaggcgctgtcactgtgccggtatatcgccggaggccgccatgagtaa

SEQ ID NO: 282353 - DNA, 195 bp, Morganella morganii
atgaaatggattaagtgctctgaaagaatgccggaagatgaaaccacagtattagttttcgggaatggcattacgtggattgccgatgttgatcacggtggtcggttttatccagatgaatttacgtttgaaagaaccattttggcagacgaaataacacactggatgatgctgccacaaccaccggaggagtga

SEQ ID NO: 282354 - DNA, 204 bp, Morganella morganii
atgacagagaaaatacaggagttgaagccatgcccgttttgtgggagtaatcgtatttttgtgtcgactcatggattcgatgaaaggccggattactacaaggttgagtgcaatgaatgtgagtctgaaacaggattcaagctcagcaagcatgccgcagttgccgcctggaaccgcagagcaccacaatgtgagaaggagtag

SEQ ID NO: 282355 - DNA, 453 bp, Morganella morganii
gtgccgtggcgactgggtgtgccggaaatggcgtatccggaagccctgatccccgggaaacgggaaatcgggtcacagcaccggggcaatatgtggggaaatctttatccgcgcagcggttttgtcacccagcaggacggagagaaagcagcagccgtggtggcgcagcgcgtggcagacattatcacccgcactggtcaggtgcatacctatgtgcccctgaaaggaaaccgccgggatggctactggccgccggaggcagtgacggagaataccggcacgaaaaaccaccaatggcagcgtctgtcaccggggctgaaaaaccgctgtgcggtgtttccggatgagagcggcccgcaggcgcaggacggcaattatgcctgggcactgtggcagccgtacagctgctgtaagcgcatggggcaaaaatttctgtacagcacaacgttttaa

SEQ ID NO: 282356 - DNA, 453 bp, Morganella morganii
gtgccgtggcggctcggtgtgccggaaatggcgtatccggaagcgataattcccgggaaacgggaaatcggggggcagagccggggcaacatgtggggaaatctctatccgcgcagcggttttgtcaaccagcaggacggggataaagcggcggctgtggtggcgcagcgcgtggcagatattatgacccgcaccgggcaggcgcatacctatgtgcccctgaaaggcaaccgccgggatggctattggccgccggacgcggtgacggagaataccgggacaaaaaaccataaatggcagcgcctgtcgccggggctgaaaaacagctgtgcggtgtttccggatgagggcggagcacaggcacaggacggtaattatgcctgggcattgtggcagccgtacagctgctgcaagcgcatggggcaaaaatttctgtacagcacaacgttttaa

SEQ ID NO: 282357 - DNA, 486 bp, Morganella morganii
atgttttgtcgtgagtacctcgtagatttgaacgctacacaggcggctattcgtgcggggtacagtgataaaaccgctaacagaatagccgctcagttattgtcaaaacttgacattggaaagcgcattcaggagctgaaatcagagcgcggtgagcgccttgaggtagatgcagattacgtactgaaacgcttagttgaaatagaccagatggacgttgcggacattctcctttctaacggcgagataaagccgattaaggactggcccaaagtgtggcgcataacactgtccggtatcgacgtaacggaaatcgcgggtgatactgccgggttgctgaagaaaataaaatggcccgacaaggtgaagaatcttgaattgctcggtaagcacatatctgtccaggcattccgggaccagattaaaagcgagcatgatgttgtcggcactctctctgacctgatggacgaactatcgggcaaataa

SEQ ID NO: 282358 - DNA, 366 bp, Morganella morganii
atggtgtaccggcgcggcgctatgcattatcgcgatatcatcctgctggcgcgcgagctaatgacccacggcattatcggtaaagccaaggtgcgcaaactccagcgcaacgaaggtaaagacgaatactccgacgagttccgcgccgtcgattacatcagtgccgcccgtgtgcatttcaacatcacccgtagcgaagcggaacaactcacaatgaccgagttcgtgatgatgctgaaagtgaaatatccggatgagaaaggcttcacgaaagatgagtatgaggctatcaccaaggccgatgatgcccgtaacgatgacttgattaagggcaagcgccggttggtgagcaggaagacagtctaa

SEQ ID NO: 282359 - DNA, 450 bp, Morganella morganii
atgaaagtccggatccgttacaacggtgaggactattccgccggtatggtgatcggggctgagctgaaaggtggtcaggtgaacacgcttatcgggtttaacgcgcagcagtttgcgttttataatccggtaaaaaaatcgatggatctgttcatgtacatgaaggacgggcaggtctttatgcgtgaggcgttcattaaccaggcatggctcaacagtgtggttgtcactgacaaaatgcagtcggagaactatgtgccgggtaaggctgggaatggtttccttattgatgccaaaaccggaaatgctgagtttaacagcgcaatatttcgcggaacgctcgatatccgcagcgcagcatcaggtggccggatggaaattaataacgcaaagatagatgtatttgatgaaaacaacgtgttacgggtcaggatcgggaggttgtcttga

SEQ ID NO: 282360 - DNA, 477 bp, Morganella morganii
atggccgccggtcaggcatcggtggttcacgatatgaaagtccggatccgttataacggtgaggattattccgctggtatggttatcggggctgagctgaaaggcggggaggtgaacacgcttatcggctttaacgcgcagaagttcgcattttataacccgtccagcaaatccatggatctgtttatgtacatggagggcggacagatctttatacgtgaggcatttatcaaccaggcctggcttaatgaagttgtcgttactgacaaaatgcagtcggagaactatgtaccggggaaaaccggttttctgatagacgcgaagggcggcaatgctgaatttaacagtgcgacatttcgcggaactcttgatgttcgcagcgcggcatcaggtggccggatggaaattaataacgcaaagatagatgtttttgatgaaaacaacgtgttgcgggtaaggatcgggaggttgtcttga

SEQ ID NO: 282361 - DNA, 453 bp, Morganella morganii
gtgccgtggcgactgggtgtgccggaaatggcgtatccggaagccctgatccccgggaaacgggaaatcgggtcacagcaccggggcaatatgtggggaaatctttatccgcgcagcggttttgtcacccagcaggacggagagaaagcagcagccgtggtggcgcagcgcgtggcagacattatcacccgcactggtcaggtgcatacctatgtgcccctgaaaggaaaccgccgggatggctattggccgccggacgcggtgacggagaataccgggacaaaaaaccataaatggcagcgcctgtcgccggggctgaaaaacagctgtgcggtgtttccggatgagggcggagcacaggcacaggacggtaattatgcctgggcattgtggcagccgtacagctgctgcaagcgcatggggcaaaaatttctgtacagcacaacgttttaa

SEQ ID NO: 282362 - DNA, 432 bp, Morganella morganii
atgacacgacaataccttcacaccaatgagcagaaacaggatatgtgcctgaaaataatccggtcacttcgccatcatgacaccttcacggtcaagatggtttcgcaggctaccggcctcggcagcatgatagacgctaaatttgtccggctgttgcaggatatcggcagtgtccacgccgtgcgcaggaaaggcagtcaggtttattacgcttttgacgatcgtgcggcatccaaagtcagggcgcatttcagcagcctggccgaaaagcctaccccggtagctaaggcgagggtgacggtggtcaaggagagagcgtcacgtccaaaatccagaacccgtccgtttgagcctgggttcgggtggtcgttcatcaatgaaattgacgcaatgctgcgggaggtgcgctgtggaatgccaactgtgcagtaa

SEQ ID NO: 282363 - DNA, 315 bp, Morganella morganii
atgatgcgtgtccgtgagacataccagaagggggcgaaaactacggagtcgcagctgatcaacgatctgtgcgaagtggatttactggtgctggatgatgtcggtgtgcagcgcaataacctgaacgaagagctgattatcttccaggtggtagaccgtcggttatcgaataaaaaaccggtaggcgtgctgaccaatctcaatttcgacgagctggcgaaggcgttgggtgatcgggttattgaccgcctgagaatgggatctccgaccgttatcaatttcacatgggaaagcttccgcagacaggttaagtag

SEQ ID NO: 282364 - DNA, 282 bp, Morganella morganii
atgacatcatcccgaataccgccctgcggacgccctgctcaccggggcagcaaactgaccgccgaaaatattctgtccgaggccggaaaactgttacaggaacagggaaaagtaccgtcgatccgcgtccttgccgcacagttgcaggtcgatccgatggcgatttattattacttccgcaataaacaggcattgctggaagccatcggcacaggccccggtgcaacaggagcttcagcggctggcagaaagttatctgcatctgctctatatttacagtga

SEQ ID NO: 282365 - DNA, 177 bp, Morganella morganii; identical to SEQ ID NO: 277426

SEQ ID NO: 282366 - DNA, 1014 bp, Morganella morganii
atggacggtgaaatctctataaaaataacaaatctatctgaaatttcagctgttttatatagaataaagcaaggtgagcagataggaatagaccaaatcgacctatccagcttggctaatgttaaaatcaaagcttatggcgacggcgaccaattttccggccagctaacatcgtcaatctgcagtggcttgcgcgattttcacacagaacttctgaaagtgtactgtataattagatatggttctgataacttaaggtatctgaaggattctgagaaagaagccctagaagtaatatttaagattgacccaggctgtacgcaaatacttgtagagatgaaggaattcatcagtgcctgtggtgacgcatttaagaaggtaactgaaggtatgaacggaaatttaaaagcaacatgctacattgctaccgtgcttactgttgccggatattttgcctttgataattattctgataggcaaaccaatttagaagcagcacaagcagaggcatcaactcagatagagcagcagcggattctgaaggatgctgtgcttgaggcattgaaaatcaatggtgaaaaaccaccaatgatcgatgaaatcgaaactaaagcatcgcaagcttatgaaaaagcacttaaaccactatcagatgcagataaagttgagatctattctgctggcaaggaatccgtgctaggcaataaagaacttaatgagttcatcgccaaccctacgccaaagctagaaacaagtgagtcaacaaaaatacttgaaattgaaggcataaaaagaagcccagaaaaattaactgtaacctgtagtgagagagggtcggatatctcatttactctgtacgttgatttgagttttatcaatcaaacagaagttgatattctatttgatgcatttaagaagaataaaccagtgtcggtgcaaggtagttacaaagaaagatctggtattatcgaacgagccaacgcatcaaccatcaccgtataccaacaaaattaa

SEQ ID NO: 282367 - DNA, 855 bp, Morganella morganii
atgcagtaccccggtttatttgattccttttattgtcagatggccactgtcggggaggagacaggaaaattgccggagtgccttcacacgattgcacagcatattcagagtaaccgggatcaccgggctgcattaattaaatcaatccgctatcccgttgcattgttagttgtttgttttctgatgaccacattaatgtttctgtttgttattcctgaatttgcaaaaatatatagctcattcggtgcggaacttccggctctgacacaatggctgatccgggtttccggtgttattaccggttacacaaccccggcaatgggtataatgactgcaattatatttatttatcatgtatttcggcgaagacatccggatattaaaaaaacagaatcaacctgtattctgcgtattccgtttatcagaaacattattatcttcagctgtgtctctcatattttccggatactggcaataacgcagcaatcaggcattacgcttatttcgggtattaatacacttattatgacaacaacacatccgttatataaagaggcattaactgtgatacgggaggacttgcttcacggaaaaacattcagccaatcaattaaacaatccgggttattcccatccctgtgccatgagctgattgccaccggtgaagccaccgggcaattcggacacttttttctctataccgcagactggtttaaatctctcgccttaaaccaaattcagacattttttaaaatactccagccggtactgtttatcctgctggcaattcttgttgctgttttattaattgcaatgtatttacctttattccggctcggtgaagttttagtctga

SEQ ID NO: 282368 - DNA, 1173 bp, Morganella morganii
atgtacgattttgatgaaataattgagcgcaaaagtgaccgctgccggaaatgggatcatcagtatgtctgttcccgcttcggggaggtcccgcaggatttcattccgctgtggatagcggatatggatttcaaatccccgccggcggtgattgagcggttcacgcaggtggcacagcacggtaccttcggctacacctggtgctttgatgaattttacgatgcggtggtccgcttccaggcagagcgccatcaggtcacggttctgcgggagtgggtgacactcagttacggtacggtttccaccctgcactatctggtgcaggcattctgtcagccgggcgactgtgtgatgatgaatacaccggtgtatgatccgttcgcccatgctgtgacccggcagaatgttaccgtgctgaccaatccactggtggcgcgggataaccgctatcaccttgattttgaccatattgaggcgcagatgcgcgaacaccggccgaaagtctggctgttctgctcgccgcacaatccgtccggccgtatctggacggcggcggaaataaaacaggtctcggatttgtgtctgcaatacggtgtgctgctggtgattgatgaagtgcatgcggaacatgtgctgtatggcagcttcaccggctgtctgcacccgggatgtgcagcgccggagaatctgatcctcctgacctcaccgaacaaagcctttaacctcggcgggctgaaaacctcttacagcatcattcccgacccggcactgcgggcacagttccgccgtcagctggagaaaaactccattacctcacctaatctgttcggggtatggggcattattgaggcttacaacaacagcacggactggctggatgagctgaacaactacctgagaggcaatgcggattatctgacacaggccgttgcagagcatttccctgactggcagatgatgcagccggaatcctcttacctcgcctgggtgaatatcagcgccaccggacgcacagcgacagaactgacactggattatgcccggcagaccggcgtggtggttgaggacggcagtcattatgtggcggatggtgaacagtatctgcggattaacttcggtacgccgcgcgcactgctggcggaagcggtaaatcgtctgaaaaacgcccggtaa

SEQ ID NO: 282369 - DNA, 1020 bp, Morganella morganii
atgtcaatcagtaaacaattgggtggaaaatggttagtccagtgcttccccaatggcagaaacggccgcaggatcagaaagcagttcgctaccaaaggcgaagcgattgcctatgagcgctacataaaagaacaagctgaagataagccctggcttggtgaaaaggttgaccggcgctcattgctggatttggtcgaaacatggtaccgctcacacggcgttacactgaatgacggagcaaggcggctatccgcaatgacgtttgcctgtgaagccatgggtagccctgccgccacagagtttaccgcaaagctgttttcttcctaccgtgaacaacggatcagcggaaagctgacccgttctgaccgggtgaaaaaagttaccccgcgcacggtcaatcttgaactggcttatttccgggccgtgttcaatgagctgtcgcgtattgatgaatggaacggtgaaaatccgttatcaaaaatccgcccatacaaaacagatgaacaggaaatggcattcctgtctgatgaagaaattatcagattgctggctgaatgcgagaatagttcagctccgcacttactgccggtggtgaatatttgtttatctaccggggcgagatggtcagaagccgaagaattatccggcggtcaggttaccaaaaatatgatcacctttaccaaaaccaaaggaaagcgtaaccgttccgtaccaatcagcgatgacctgtacgcatcactgccaaaatccaaaggctcaaagcctcttttcagttcctgttattctgcgttcagaactgctatcaaacgggctgaaattgaattaccagccgggcagctatctcacgttttacgtcatacattcgccagtcactttatgatgaacggcggtaatattctggtacttcagcgcatcctcgggcacaccgatattaaaatgacgatgcgttatgcacactttgccccggatcatcttaatgatgcaattgcgtttaatcctttagttaggttaaagatatga

SEQ ID NO: 282370 - DNA, 912 bp, Morganella morganii
atgagtacaactaaaaaaaaatctactacatctacacctacagatactgaaaatatcaatgatgctaatttagtagaaactgataatacagaaaagaaaaaaacatgttttgttataatgcccattgcagatcatcttgattatgataaaggccattttaatagagtatatgagtatttaattaaaccggcttgtaatgcagtgggttatgaagctgtcagagcagatgacagtaaagcctctcatatgattatgtttgatattttaaaaaaaatagtcgaatgtgatatggccatctgcgatttaagtactaaaaatgcaaatgtattttatgagttaggcctacggcaagcatttaataaaaaaaccattctaataacagatggaaatgaagacaccccttttgatattaatggttttagatatgttaaatactcacctaggttacgaatagatgaatgctctatcgatatcgcaaaaataactgacatgctaaatgaaaccattgccgcaccagataatgatgttaactctatcgttaagctactagaaatagagcctgcaaaaataactaaaaaggaattaaataaagaagaatcagccttatttccattgcttgtagaaatgaataacaaattaacctcgttatctaatgaagttaatcaagaaaaaatcatgccgcgcatagtggaaggagccgcatactttacaacagaaaaactcataaatcacggtagcattaaattcaaagacaccaccttagatgaatatacaatgaatggcgattaccttgggaagctaataaaaatcaacaattctgacctcattttcagaactgacaattcattatttgacaatagaataaataacacaccagagaatttatcaaaaatatatttgaaaattaaatag

SEQ ID NO: 282371 - DNA, 588 bp, Morganella morganii
atgggtaaatttcatttagatacgttcagtaaaagcggcccggtacttgaccgtatgatcgaggcttatggcttcagttctaagctgatgcttgcccaacacttcgacatggcttctagtagtctatcggggcgttatagaagggatacatttcctgctgatatggtggttcagtgcatggctgaaactggtgtcaccttagaatggctggctacaggcaaaggtaagatgtatgaaaatcagtcagttgatatcttgcgggtaacaaaccataagctgattgatggcaacctttttgaagccggtgacttaatgatcgacaaggttatatttggtgccggcaccccaatcccatcagaccctatcagcgtgcaggacggaaaaaattattacctggtagataaaaaacacggggatgtgttcgacgggcaatggctggtaaaaattgatggccggttcagcatccgcacacttacccggatgccgatgcaaaaagtccgtgtctccggttccggcatggcgtttgattgtgacctagctgatttaactgttgtcgggcgggttgtgaaaggtattgaggaatattga

SEQ ID NO: 282372 - DNA, 228 bp, Morganella morganii
atgcgtccaaacattacaatcgcggtacaggaaccatttctgccggtagacgagttttgccgccgtcatggcatggcactaacgacagtccgcgacatgatcagagatggccgtctgccagttcgtggtaagaacccgaatctgaagggcggaaaagtcttaatcaacatgctggcgctgactgttgaagctgccgcatcctgcaatatttcactggaagcgaagtga

SEQ ID NO: 282373 - DNA, 498 bp, Morganella morganii
atgtttgattatcaggtatccaaacaaaaccactttgaaaatgcgtgtattgcgttttctgcaaagcacaaaggtgacctggtccggattgcggagaacatcggaatgcgtccgcagatgctgcgcaacaaactgaacccggaacagccgcacatgctgacctgtcttgagctactgaaactgaccgacgaaacggaggacgcttcaatactggacggactgcttgagcaattgcagtgtcagccgtcagtaccggtcaatgagctgaaggaagggaatttcagcacctatttattacaaacaacggcagcggtgggaagtctggccggtgcagcggtttcagatagtcgcattaatgctgccagtgccaacgaaatgaaaagccgggtaaatacagcaattcgctgcctgacgctgatcggtgtgactatctcagcccgtttacacggcaccccgactttcgtgtccgccgtggatgcgataaccacgatgatgtga

SEQ ID NO: 282374 - DNA, 222 bp, Morganella morganii
atgaacggttgtttcaacccgagaaatattaaacaagcccggcgttatgcggttgaattgggtaagcaaagaagaaaggaagacaaagtaacaaaagaaattaaccgcgctatagagtttgctatttgtacagggcttaccataccagaaatacaaacactgttagccaatgcaataaaaaatattggtgacatttacgagttagaagaaatcccattctga

SEQ ID NO: 282375 - DNA, 132 bp, Morganella morganii
atgaatatccaatttcagcacaaactaaccggcgagtcagtcatgcgccattcacacaaaaaacacaccttcgcggataaagtaacgctgattgtttctttaatcgcgctggcctttctcattattaagtga

SEQ ID NO: 282376 - DNA, 348 bp, Morganella morganii
atgcaacagacttatgatatcggcgaaccacgcgcctttcctattccaatcagccagcgtacagatgggttaaaccatattgcaaaattacgttctgagcatttcggcgtggaaaataaagaactggaaaaattctttaaagaaatgcgtgaccgttttgacccgatgtatcaggacaataaaaaattccttggcgttattttatatatggcgaatatcgaaaaggaaaaacacaattgtaattacaatgatttcagtagtcaggaaatatttgacattgtaaaagcaattaaccatatcagagcaatcagcgcgatattaccgaagcacctcgttttaccgcagtaa

SEQ ID NO: 282377 - DNA, 252 bp, Morganella morganii
atgaccatacctgtacctgtttttatgccagccgaaagttgcgaagccgataactctgttgttattgaatgcgtgattaaacaaaaccgcatggatgaacgccgcacagttgctgatcgctatgcctcccgcatgcgcgttctcggcgcgatggccgttcgggacaagttggattgttatcagattgctgaactgcttgaaagtgaagcctgtgaatcagagcgccagattcaggagtggaaccatgcctga

SEQ ID NO: 282378 - DNA, 222 bp, Morganella morganii
atgcctgactatatcgaccattccgcagaaatgcaggagcaggttttagagcacagtatcaacgcgatagtaaatcgtcgcgttggtgattctctgtctgaatgcatcgactgcggccagccaataccggtacagcgccggttaaaagtaccgggctgccagcgctgtattgattgccaggcaacccatgaactgaaacagcaacattaccggagcgtgtga

SEQ ID NO: 282379 - DNA, 549 bp, Morganella morganii
atgatcagaattttctcgggggatatttcggatacatcccgtcatttacacccggtgtgcgatcactatttacagatgtcatccataccggccttacctcgccaatcaaaagagaagccaaaaactcatttgtcttccccggaacggcaaacagcgctgtcttcattggcaagtatttcgggtcaccgtgcaaaaaaagttcaacagtcttccgggtcccttcaatcgcattgcgaatatctgtctctagttcttcctgtgtctcccagtgatcccattcagatacttggtaaaagttcactgaccggacaatattttgagttacgcgctggattaattctctccgtaatccgggttctgtccaatcggttggacaattctttaacaggaggcgcgccaactcatttcgacattctcttgatggaagccagcgattttttacgtgctctgaaaccccgctcaaaaatgcgtagcaagcctcgtacatctcgttggctgataaaagccttacttcggttggagcaacgtcggcttgagttaaaaaaataa

SEQ ID NO: 282380 - DNA, 2088 bp, Morganella morganii
atgattatcacagccagttaccctgataaagaaaatcgattaccacgctgggataaaccattacagccgatagaacgtccgttcctgacctatgaggaaatacaggagcgtcagacacgcgctaaaaggctgaaacttgccgaacaaaggctgagtgaacaatcaaaaattgttcagatgcatgtgaataagctgattgatgaagtcggtaaaagccgtggtactgatgctgtgggcgcatttctggctaaaaactttcttgagcggattttgccacgtgtcgatttggttacagccaaatatcatctggcaaagaccgatcaggataactaccggtattttaactggtttaacaaactgcctgaccttaacagtaaaagtattgaatcattgtctcaggaaatagcagcctttatttataatgacctagcagaactggccgaaggaagaacggacgaaagcgatctcaaaatcatctggcagctttttatgcgtgctgctgctgttacccggtcttatcgtcaggaagtgcctttattttttaagctgaccgagcgtgaatttaacgaaaaagacgcttatgccgccatagccagaatgacatcagataaatggtggctaaacgcattgcgccgtcataacaatgcatggcgtgagcacctgcaaatagcattaaataatgtgagcaaaaagaaaagcatttatgccagcagggtaactatcagtgaatggcgggaacaaaagcggcggacacgcgaatttctcaaatctatggagctgaaagacgaggaaggaaaccgcgtcagcctgattgacaaattctatggcagttcagcaaatccggcgatccgcagaactgaaatgatggtgcggataagagggtttgaaaatatctgcaatgaactcggctatgtagctgagttttacacgttaacagcaccatcaaaatatcacgcgacgactcggcacgggcaccgtaaccgcaaatggaacggcagcagcccggcagacacacagaaatacctcagtaaagtatggagcaaaatccgggcaaaacttcaccgggatgatttgcggatctttggtattcgtgttgcagagcctcaccatgacggaaccccccactggcatatgcttttctttatgcgtccggaagaagcaccggcagtacagaaaatcctgcgtgactatgcctatcaggaagacttccacgaactgaccacacgtaaagtgctgaaagcgcggtttcatgccgaagtaatagatccggataaaggctctgctacgggctatgtcgccaaatacatatcaaaaaacgttgatgggtacgcaatggatgacgaaaaggacgatgaaagcggccagccgatgaaagaagcggccaaagctgccgctgcctggtctgcccggtggaatatccgtcagtttcagtttatcggcggtgcgccggtaacggtatacagagaactgcgcagaatggccgatcacgatacagcaacagggcttgatatcagctttgccgcagttcatgacgcggcagatcacggggactgggcgggatatatcaatgctcagggtggcccgttcgtgaagcgtgatgaattagtcgcccgtctttggtatgaggaaacagaagaaatgaatgattatggcgaggaaattatccgtattaagggggttttcactccgatagttggcatagacacgccgatcctgacccggcttaaacagtggaagattgtgccgaagttagacgacgcaaatgcggagtctgctgttagtggcgcgaacgcgccacctaggagttctgtcaataactgtacggaggcacggaggacgattaacggaaaagagaaaaaaatccggtctgtgatggcggatttacggtcaaccggcagagaaatcagcccggaacaggccgaaaaattgataagtggatcaggaattgtgatagacggccgggaaattaccctgctgccggatggtcagttgcggtaccgagccagcacaccggaaaaatatgaaaaatatagaaaaaaatctgcgtcaattttggcgcgggtcggcaaaatgcgttccggactgtga

SEQ ID NO: 282381 - DNA, 321 bp, Morganella morganii
atgagacaaaataaagtaaaattacgtgagttaacggctttatggaaaaataacatgcgcaagatgaaagtattttgtcctgtctgcgaagctgccgcagtaatacgtaaaagtaatcgcaaacaccgggagcttgccgatctgtattgcgcctgttctgatgttgagtgcggccatacctttgttttacaactgacgttttcccacactctcagccccagcgccaaagacaaagagcatttactggaaaaagccctgaccgggcttaattctgaacaccggcagatggcactaaatctgattaatgcgagtgtcgcctga

SEQ ID NO: 282382 - DNA, 1029 bp, Morganella morganii
atgagcaaaaaaaagttacggaagaccgcggctaaaacggccggcacaaaacggaatatgagcattatcaccctgggtaagcctgaacctattctgacaacccacacggactatcagaatatctggtatgacaacgattatgatcactatacgctgccgattgaccgcactgcgctggcgcagctggtaaacctgaacgcgcagcacggcggggtgattcatgcccgggccggtatggtgctgtccgattttatgggcggcggactgaaccatcaggatttacgggcatcctcacttgattatctgattttcggcgatacggccattctgaaactgcgtaattactggggtgaagtgaccggcctgcatgtcctgcccgcgctgtttatgcgccgacgcaaagatgatgattttgtgatattgcaggaaggggagccgatgatttacacgcctgacgatgtgatttatatgaagcagtacgacccgcaacagcaggtttacggcatcccggattatatcggcggtattcatgcggctttgctcaacagcgaagcgaccatcttccgccgccgctattaccacaacggggcgcacaccggcggcatgatttactgtaatgacccgatgctgactgatgaagtggaagacatgatcacagagaaattacagcacagtaaaggcattggtaactttgaaacgatgtttgtgcacatcccgaacggggacccggaggggattaaatttattccggtgggggatatttccgctaatgatgaattcagtaacgtaaaaaatatcagtgctcaggacgttctcaccgctcaccggttcccggcgggtctggccggtattattcccggcaatgtcggcggacttggcgacccgttgaaagcgcgggaggcataccggcaggatgaagttatcccggtgcagcggatgtttgcggatgcagtcaacagtgaccctgaaataccggaaaatcttaaactccgttttaaagaagatgccgcaggttcaggtgaaaaatga

SEQ ID NO: 282383 - DNA, 1779 bp, Morganella morganii
atggctaaacactctgatgcaaaaatacaggtcgcaaaatcactctatctgcggcgctatactccggcggaaatcgcggaggaattgaatctgcctaaccggcggatcgtttattactgggcgcagaaatggaactgggcggatatgctcagtcatgaaagcgtgattgaggcgataaaccgccgcgtggtgctgctgacagagcggaataataaaagtgacggggataaagacgagctggacaggctgatcgcccatcacgtcaaactgatgtcacagcagaataagcacaaagaaaagctggcagaggcaaaagcacaggcggaatccgggggcggttacaccacggatgaaaacggggaaccgcagaaaaagcgccggtataagaaaaacgatatttctgagctgacaccggaagattttcagcagtttgccgatgaaatgttgttcggctatcagaagcatctgcgcatcaatattaaaaagactatccgcaatatcctgaaatcccgccagattggcgcgacatggtattttgcgtttgaagcctttgaagatgccgtgttaaccggcgacccgcagatatttttatccgcgtcccggccacaggcggaggtcttccgctcatacatcgtcaatatcgcagagcagtatttcggcgtgaccctgaccggcaacccgatcagactgagcaacggcgcggagctgcgctttttatccaccaataaaaacaccgcacagtcctacagcgggcatctttattgtgatgaatatttttgggtcccggatttcaaaaagctgaacgaagtcgcttccgccatggccacacatgacaaatggcgcaccacttacttttcaacaccgagttcaaaaacccatccggcttacccgttctggacgggtgacgagtggcgcggtaccgatccgaaacgtaaaaatatggtattcccgacatttgaggatatgcaggacggcggcagggattgccctgacggccagtggcgttatgtcattaccattgaggacgctgtccgtaacggcttcaatctggccaccattgataagctgcgcaaccgctacaacaaagacacctttgacatgttgtatatgtgtgtgtttgtcgattccggtgcgtcagttttcaaatataacgacctggaaaaatgcgccgttgatatcgggctttgggatgatcacgacccggatgccgcgcgtcctttcggcaaccgtgaagtatggggcggctatgacccggcacgttccggcgatacctccacctttgttatcgttgccccgccggaaacccccggcgaaagtttccggattctggccacctactactggcagggtatggcatggaaacaccaggcaaaacagattgaggatctcaccaaacaataccggtttacccatatcggcattgataccactggtatcggccacggcgtgtatgaaatggtgtcagacttcgcaccacgtataaccacggccattcactacagccagaacaccaaaacacagctggtactcaaaatgattgaccttgtcgacgatcagcgcctggagtggaacgaggaacaaaaagagattctggccagtttcctcggcatccgccacaccatgaccggcaaaggcggagctatgacatttgttgccgaccgcagcaaagagacaggtcatgctgatgtgttctttgccacctctcacgcagtggccaacgaaccactgaacaacgaaaaacagcgtaaatcaaaataccgctttcaaaaggctgcatga

SEQ ID NO: 282384 - DNA, 759 bp, Morganella morganii
atgtcgcaattacgcacaacatggatctgcattgccacggaaggcgaaacagcagacgggcgcgaaattctgcatgaagaaatcatcgatatggcagaaacctacgacccgtcactgtacaccgccatgatatggccccggcatcatccgccgggagaggacagaggcgatccgctgggtgaagtgcttgaactcagagcggattacgacgacgaaggaacgctgcatctgtatgcaattcttcgcccgttttcgcggttgctggaaatgaacggacagaatcgcggagttttcacctctgtagagatgaatctcaattttcgaggtagcggcagaacctacttagacggattggcggtaacggacacaccggcaagcgttggtaccacaagattacatttcagtcggaacgataaaggaaatcggaaaatgacaacgaaagcaaaaaagacatggcgtcagcgtttcgggattgaagaaatgcccgcagcaacaccacctgaagaagcagtggatcaggaaaagttacaggcattagcgcaggcgctggcagatgcagaagcacgtattgccgaactggaatcggaactggcaaagacagtggaagacgttgaaaccgtaaaagaagtcgttgatacggaagaattcgccaaactgcgcgacaacctgcctgaactgacaaaatctttcagcaaagttgcaactaaaacccctgacaaaaacccgggcggtaagcgtaaagattttcagtttctctga

SEQ ID NO: 282385 - DNA, 1062 bp, Morganella morganii
atgttactaaacaatcgtgctcgtgaatttttagaaaagcacaaaacggggcttgaaaagtcctacggggtgaaagatgcgtcaaagtattttgcgctgacagacccgaaagaaatttcactgcgggcagcgttgctggatgaagtggatttcttaaacatgattacctgtattgatgttgatcagctttcaggacaggttatttctgtcggtaacccgggaatttttaccggccgccgccaggatggacgtttcatgcgtaaggtcggagtaagtggtaacgattatgcgttatcagaaactgattccggtgctgcattacgatgggatgttttgtcggtgtgggctaacgccggtggggaaaatgagtttttcgagcgtatgcaggcatttatcaatcagtcatttgctctggatatgctccgtatcgggtttaacggtacgcatgttgctgatgatactgatgcagataaatatccaaatggggaagacgtcaacattggctggcatcagatcgcaaaagactgggagggcggaaagcaggttattactacaccggtaacactggatgatgcaggggatttccgatctcttgatgctatggctcaggatattgtgaatacctgtattccggttcagttccgtaatgacccgcgcctgacggttctggtcggtgcagaactggtcgcggcagaacaaaaccgcctgtacaacgcagcagatcgcccaactgaaaaaattgcggcacagatgctgggtaccacgattgccggacgccctgcttatatcccgccgtttatgccgggtaagcgcatggtcgtcactatcccggcgaacctgcatatctatacgcaacgcaatacccgtcagcgcaaagctgaatttgtggaagaccgtaagcagtacgaaaacaaatacctgcgtaacgaggggtatgcgctggagtaccgggagttatacggggcatatgatgaatcagcggtaactatcggtaaggtgactgaacagtctgaaaaaatgaatattgttcaggaaactcacgatcaggacggtactgagtaa

SEQ ID NO: 282386 - DNA, 699 bp, Morganella morganii
atgttatcacccggacaacggcaccgcttaaatgttgagatgcggcagaaaatcgaaaagcaacaggcagttgccattgctgacggtgaaagcatgcatttgcaggcgcgggctgttgaccgggatgccgcacggctcaaagggttgacgatggccgaacgcacagagataaaaaagcgggaattcctgccgaactacctccccactgcgcaacgctatcttgatgagggaaaggtctataaaaacccgatcttctcctactgtgtcgtgtggctgtttgataccggggatttccagcagggactggattgggcggatatcgctattgagcagggacagctcaccccggggtttaaaagcggatttccggcttttgtggctgataccgtccttgagtgggcgcagcaggaaagcgaagccggaaactctgttgagccgtatttctcgcggacatttaaaaacgtcactgaaaagtggcgcatccacgaaaaaatacaagccaaatggtacaaattcgcggctctggaactgctgaaaggtgataacaccgaagcaaaagccagcgctatagataacacagaaacactggaactggcggattcgtaccttgcacgtgcgcatcagctgaaccataaaagcggtgtcagaacgcaccgggcgcgtattgcaatgcggatccgtgctctcaccgctgaataa

SEQ ID NO: 282387 - DNA, 453 bp, Morganella morganii
atgtttgacggaaacgacggcgattaccgggaagaaatcatcaccaataacggcttctggccggatgtggatttgcaggactttcagcgtagccgcgctattccgacagacatcagcgctgattttctggcagacgcgctgattgccacattgacggaggtcaacggcgaactatcagaagtacaaaaacaacaccaggcagacggatttgcaacggcacaggatgtgccgggtgtttcccgcaaaggccggaacgcgctgtgcgcgcagtacctgaaagcggtttttgccagggcaaaagcggatttactcggtgagtacacatccattgtcagccgggcgccgaacccgcagcaggaaagcccggaactgcgccgccggttgctggctgagtccgcactggtgatccgtaatatgaaaggccttaaacgtgccacggtaaaaacgatatga

SEQ ID NO: 282388 - DNA, 471 bp, Morganella morganii
atgagcaaattacagcagctgactgattttctgaaaaagaatctgccggacggtgtgtgttccgtggagttcagcagcgaaatggacagcattcagtttatcccggcgcagcgtgatctcggtaatggtcagtaccggatgcacattcagcaatataacgcggtaatcgcctgggggcgtttcccgtataagcaggtagacccgcgctatatcggcatcctgatcgatgcctggctgaatgaaacagacgatattgatgatattcagttggatttaaaccgtccgtcaatggatgttgatgttaatgacgaatatcaggccgttgtggttgttgaattacagcttgccgagaacgtcaatatgcgtgaagacaaaaaaggcattgtgccgatggacggcaagcgctggacactgtgtgagccggaacactggattgccgaagatgctgaaatcaccgggtcccggcaatga

SEQ ID NO: 282389 - DNA, 669 bp, Morganella morganii
atgatatcaggcggcttagatccggcgcagtttaaaaagttacaggaaaccctgaaacagctggacttaccgcagaaaaaacgccagcgactgttatggcggattgcgaaatacggcgtgatagcagcagcgaaacgtaatgtgagaaaccagcagaccccggacggtcagccgtgggaacaacgtaagggcaactggcgtaaaaagatgctgcgcaatatgccgaaactgctgcacatccgggaaatgccggaaacggaaagcgtccgcatctacctgaaaggcggtaaataccgcaacggtaaaaaggatattcccgccggggttgtcgggtactcacaacagcacggtatgagcgtcagcatcagtaaaagcagctttaaatcgcagcgggacaactcgcggaaagcgacaaaaaagcaggctaaaaggttgcgagaactgggctacaaagtccgcaagggaaaaggctggcgcaaaccggcgataaaagatatcgaaggtgcaatgagttttacacaggcggggctgttgatccgcatcctgagtgatgaagcacctaaaaattcatgggcgattgatgtgccgtcccgcgagtttttaggcatcagccaggatgattttgaaaaagcacttgcccggcagttacaagggattgggtttggttaa

SEQ ID NO: 282390 - DNA, 1119 bp, Morganella morganii
atgacatggccatttgtgcaggtcaatcagctgaaccagttgcagggcgagacaaaagaagtcgaacgcactgtgctgtttatcggcacaggaaaaaccaacaccggcaaaacggtatcagtgaacacgcagactgattttgacgatgtgctggggcgtgatgacagtaccctgaaaaatatcgtgatggccgcaatggcaaacgccggtcagaactggtccgggtatgtgcatgtgatagcagaggatgccgaaccgctggcatttgttgatgccgtcattgccgcgcaggatgtggccagcactgagggctatgtgctgacggtaccggcgacgaaagaaattatcgaagccgccaacacgctgcgggcgacactgattgcaaaatacggtcgctgggtctggtcgattctggccgtggacggtacgcaggaaaatgaaagctgggcggattacgttgcccgcgtgacagaactgcaaaaagggtttgccgcttcatctgtgcagctggtgccgaaattatggggcaaagaaccgggtgtactggccggtcgcctctgtaatcgtgcggtgaccattgctgacactccggcccgggtaaaaaccggtgcgctgatcgatatgggcgcggaacgtccggttgacggtaccgggaaagaaatcgaccttgctacgcttcaggcactggaaaagaaccgtatcagtgtgccgatgtggtatccggactatgacggcctgtactgggctgacggccgcacgctggatgttgagggcggtgattatcaggctattgagaatctgcgcatcgttgacaaagtggcgcgtaatgtccgcatccgggcgattgcaaaaatcggtgaccgcagcctgaacagcacaccgaacagcatcgaaacccacaaggcttatttttcccgcgtgatgcgtgaaatgtcccgttccagtgaaatcaacggtatcaccttcccgggtgagtgccgtccgccacaggacggtgatgtggtgattacgtggaaaacaaaaaccctggtcgctgtttatttcctcgtccgcacctacgagtgcccgaaagggattgaagccagcgttattctggatttgtcactggagaatgaataa

SEQ ID NO: 282391 - DNA, 459 bp, Morganella morganii
atgagtactaagcgtatttccggtcagtcctttgatttcaatctggacggctcattaattcatgtcgaaaaatcgacattaagcctcacggataacaccgctgcggcacagactcagggtgttccggacggctggatttcaggtgatgtctctgctgaaggtgaactggaattcagcaccaaagcattagccattctgaaagccaaagcgcgcacggcggggtcatggcgcagtattccggctgttgatctgatgtggtacgcaaaagccgggtcagaagaaatgaaagtggaagccttcggctgcaagctgatcctctctgacattctcgaccatgacccgaaaggcggcagcgtggttaatctgaaggtgaagtttgttgttaccagtccggattttgtccgaatcgccggcatcccgtatctggaatctgaactgacagataatttaatcggttaa

SEQ ID NO: 282392 - DNA, 294 bp, Morganella morganii
atggaagaacataacaaaacatttattacgttgttgattatgggcgcggtgatcgcgctggccaaaacactggccggggatgaaccgattactgtccggctgtttgtcagccgtatgattttgggatctgccgtgtcggtgatggccggtgcgctgctggtctggtggcctgatatcagtccgctggccgttaccggcatcggctcggcattgggtattgcaggttatcagtgcgttgaaatgtggctgaaaaagcgcggcagccggttactgacagggaagatggaaaaatga

SEQ ID NO: 282393 - DNA, 339 bp, Morganella morganii
atgacactcagcgaaaagcagtccctttttaccgtcatgatcgcccagctgattttatgggctaatgatcacggttaccgcctcacgtttggtgaggcatacagaacgccggaacaggcgaaactgaacgcgaaatccggcaaaggcatcagcaacagcctgcacactcagcgtctggctgtggattttaatctgttcatcaacggccagtataaaaccgataccccgagctatctgccgctgggtgaatactgggaatccatcggcggtacatggggcgggcgtttctcccgtccggacggaaatcatttcagccttgagcataacggggtgaagtga

SEQ ID NO: 282394 - DNA, 396 bp, Morganella morganii
atgattaaacaactcgcactgatcctcaccctgcttgcagcggccttcggtgcgggttggtgggtaaacgggctttatcacgatagcgtgcagctggcagttgaacgcgccgccaccgctgccggtgataaggcccggacagaatcacaggccatttcccgcgagtcttcgcggaaactggaaaaacagctggagagcatcgccaatgctgcccccaaagaaatcagaactgaaattattaagcctgtgtttactaatgtgtgcgttagccctgagtttgtcagcatgtacaacgacaaagctgccgccatcgagcgggctttatcaggaaaatttattaacaaaatgcccggtgaaattaccgagaatgaacggccagacggggaaagacgttag

SEQ ID NO: 282395 - DNA, 261 bp, Morganella morganii
atgagtaacccaatcatcttagaaatcgccggtaaagaaattcattttgagccgaatatgactgcctataacggtttcattaatgaaatggctatggataacaaagtcgccccggcacataactatctgagccgtattgtcgttaaagaacataaagccgacctggacgaactgctgaatatcccgggcgcggcattgcagattgcaacgtctgttaatgataagtacgcgccgaagctggatatcatcgtaaaaaactaa

SEQ ID NO: 282396 - DNA, 2082 bp, Morganella morganii
atgaactcactggattttacattaagcctgattgataacgtcaccaagcctttaaaacaggcaggcgcggcgttaaaaggctttgctgatgaaagccagaaagcctttaaacagactgcgatcggtgccgccggtctggccggcgcgatattctcaatgaaaggcctgcttgatcccgcgttacagatgaatgaagccctgcaaaccgcgagtttgcagggggttgatgattctgtgatgaaaaaagtcacccagtcagcaatggatttctccgcacagtacgggaaatcctctgttgaattcaccaaatcagcgctgaccatccgcaaagcgatcagcggcgtggcagacaacgaactcccgcacctgaccaccgtcaccaataccacggcggcagcactgaaaaccacctctgacgaagccactgcctatatggggcaaatgttttcgcagttttccacctatgccgatcaggtcggtaaaaatcagtttgctgaagaactggccgggaaagcggtttatatgtcacagacgttcggcacatccatgggcgaaattaccggcctgatggaaggtgcccgcgctgccggtaccaacttcgggattggtattgatgaacagcttgccgtcctgggcgaattgcagcggacactcggcacggaggccagcggagcctatgagggctttatgaccggcgcggcggatggtgcaaaaaaacttggtctgagctttgttgatgcttccggaaaaatgaactccatgccggaaatgctggaaaaactgcatcagaagtacggcgataatatcgacggcaaccttaaagcacagaaagagattgatgatgctttcggtgattctgccgtggtggtgaaacagctttatggtgatgtggatgtgttgcgaaaaaatatcacttcgctcggtgctaatgacggcctgaaacgcaccagggaaatggccgataaactggcggatccgtgggaacggctgatgtctatctgggaaacaatccgcattgccgtgggaatgaccttactgccggttatcactccgctgatcaacaaaatagcggaaggcggacaaacattagtccgctggctgacgctgttcccgaatatcgcaaaatggataggatatatcgtcggcgggataacgggactggccgctgccggtgccgcgcttaatgtggtgatcggtatatcgcggttgatatgggcggcactgaaagcggtctggattgcctgcaccgcagtaatgaaaatcggtaccgccgctgtctggctgtataacgcagccattaaagcatggaatatcactctgaaattcttacgcggcaccctgctggccgtccgcatggcagcagtcatggccggaatttcgtttaactttatgagcttgccgattctgctggtcattgctgccatagctctgctggggtacggaatttataaactgatccagaactgggatgaaatcaaagccgccattcaaaatacggcggtatttaaggcgctggcggctgctgtggcatgggtcggtgatatgttttccaaagtgtgggacggcataggcaaaggctggggcaaactctgtaaatggttcactgaattctcattatcggacacattttcggctatgggtgacagcatccgggatattttcggcaaggtctggacatggataaaacagacctttgcggatatctacaacggatttgttgaaaaactgaactacctgccgggcgtggatatcgccctgatggatgtgaacaacggcaccggtcaggcggcatcaccgctgccggatatggatgcagcaaccgccgcagaggttttccgtcagcagcaggtatttatgtctgcttatctgaatcagcaaccggcaccgccggtaaacagtcagcaactgctgaccggcggccaggtgaaagggattgataagagcggggtcggtaaaggtgttgcaggtaacactaccatcagtgaggacaacagccaacacatcggcaatgtcacctttaaagtggaaaatatgccgtcaccgcagcaattagcagaatacgagatgttacagcatggatag

SEQ ID NO: 282397 - DNA, 327 bp, Morganella morganii
atggatagcttatacattgatttactgatcactgaccgcgatttcaccctgaattcaggcaatgagccggtgctgtgtgataaccgggtatcaattgcacaggactgtgttcacgccattattgaaagcgggctggctacgcaactggtcggtgagcgcagcccggtattacgggctgatctgcgcaatcagatagaaatgctggttgaggatgatgatcgcatcgtgccgggcacggtccgggcaaatgaagaatcaccggtaaaactgtggataacggcggatacctatgatttcggccgcatcagtcagggagtggacttatga

SEQ ID NO: 282398 - DNA, 1182 bp, Morganella morganii
atgaacaaacccgatatcgactatgaaaaagtgctgcgtgacagcggcatgccggttaccgaagatgagatccgggcagagtttgaacagaccgttgccgatgaagggctgattaccaacacgtcccgcatgtccccgttctggcggctgataaccatcatcgtgattaatccggtgctctggctgaaagaagccctggtcaatgtggtgatgagaaatatgtacctcgccacggcatccggtgtctggctggacatgttcgcatggggtgtaaacctgaaacgtaaaccggcaaccgtagcttcaggggtaattcgattttacaaggccgccggtgcgccggtggtgacggtaccgaaaggcacggtgattcagacagaacggattgccggggtgatttacagcgtcagcaccacggaagcggcagaaataccggcgggaacacaaagcggtttgatcccggtaacggcagatgcgccaggcggcgctcataacctagcccccggatatttccgtattctgccggttgccgtggccggagttgaacgggtgcagaatgaggacgactggctgactacgccgggcggggatgcagaaagcaacaatgatttgcgtgatcgatgccggaatcagtacaacctggtcggaaactaccacacggacgcggtatacgcgggcatgattgccgggattgtcggcctgagcattgaccggattttctttctgcatgatgcgccacgcggtccgggcacggccaatgcttatttactgctggacagtggcgtgatcagtcagccgtttatcgacaaagtaaacgattatgtgaccaatcaggggcaccacggccacggtgatgatatgcaatgcatgccgctgccggaaacccatcatgatctggtgctgaccctgtttgtcgacaatatcgccaactttaccggcgagcagctggaacggctgaaaaaagaaaccgccgacatggtgcgatgcgcgttccgggaaaacagcttttatgacgtgaaacagacatggccttactcacggttttcgttttccaacctcgggcgggagctgcaccgggcatttccggatattcagtcgctgacattctcactcgctgacatcatcagtgaactgagtgtgccgcgcctgaaatcgctctctgtggtggtgaaaaatgtctga

SEQ ID NO: 282399 - DNA, 657 bp, Morganella morganii
atgtctgactttcaggaaaaactgaaacggctgcacctgccgtcatggatggataaaggagaaccggcgaaattactcgctgccctgcgccggttctggtctggcgtgtacggttggctgacatggccattgcagcagctggacgcggaaacctgcacggagggtctgctggccattctggcgtatcagcgggatattcaccggtttaacggggagccgcttgatctgttccgcaagcgggtgaagtttgcgtttatcaacgccaaagatgccggaagcgtggccgggtttatcgcgatatttgagcgcctcggcgtggggtatatcgaactgctggagcgccagccggatattgactgggacgttattatcctgcgggtcacagattcacaaatcgcgaaaaacgaagacctgttactgaacatcatccggcagtacgggcgcacctgtcgccgctaccggtttgaggtgatagtcagcaacacgctgaatatgaatgtcgggcacattcagggtgaatatatctgctaccacgcaaaattacaggaacctgttttatttatccggatcggcagcattgacgcagaaagccggttcagcagcgcgaaacttgaaagtaatcaggctgataacgccgtgtatcacgcgaaattatag

SEQ ID NO: 282400 - DNA, 1635 bp, Morganella morganii
atgtcatcagttatcacaaccgattttgagcgctggaaggcgcaggaagccgcgctcggcaaacccgttgcgctgaatgaatttgtttttgccaatgtgccggggctggatccgtcgaaagatatcagccgggatgaaaagttaccgccgtctgggcaaatcgtacaccgtcaggccgtcaacaaagccgggctggccagtgaaaacgcggttgcctacagcgtcacgctcggtactgatgcgggtgattttgtctttaactggattggtctggttaacaaagaatccggcaccctggccatgatcacccatgcaccggaacagcgcaaaatcaaaaccgttgacggcgttcagggtaacgttctcacccgctctttcctgctggaatttaacggtgctgccaaagaaacccaaataaccacctctgcggaaacatggcagattgattttaccgcccgtctggccggtatggatgaaatgcagcggctggccaaccgcgatatttacggcgcggccgcatttttcggtgatggtttccttgtcaccaaagccgccgaacaataccgggtcacaccgggaatggcttacatcgaagggctgcgcggcacactggaagaaatcaccacctttaataatttgcgtgataccaaaatttacgccgattttaccttccagggcaatctggtcagcaaatggcagacctttgtcaaagtcaccacggctaaaacgctggcgcattatcaggatgccgccggatttcagcattatgtcgccgttatcgccgaaatcgacccgaacgggaatattacggataagcgggtgaaaggtaccgcgattgatcgtgaactggaggagctgaaaaaagagttgccgaacacatatcagccgaaaggggattatcaacctgcggggagttacgtcactacggctagtttcagtctggaactgaataaaaagattgataaggccagtatttccgacgcgatggggaatgaccggaataaagtgccttcattggatttattttcaacgaaaataggtaatttgaactctggcttgtctgaaaaatttgataaaaccggcgggaaaattgccgggcagacggatatcgaggcaccaggaggacgtgttcaaacgctgaaagcgaaagcgggcacatcggtatatcaggaactgtatctccaggatactttcgctgcgtggtggggtattacagctggtaacaagctgagtctggaaaacaggattacaggtaatacactgactatcgggtctgatggtttcaaaattgatggtaaagatattgcgccgcttgacaagatcatcggtattggtcagtcctgggttgatgtgacatcaagccgtgaaaataaagcgacatatataaatcagaccagcaaaccgatagttgtttacattgaatcaaacagaactggatctttttcaggaactccggctcctttcagtattgatattgttgtgaataatatccgtgttgcttacagatggacgaatgttgatgaggttatttctctgagcgcaatagttcctccgggagctagttatagttgccgggggggttggggtactgagcaaatatggggagttatatcagcatggaaggaattaagatga

SEQ ID NO: 282401 - DNA, 375 bp, Morganella morganii
atggaaggaattaagatgaatatgaagttttacaaagataaagataacattgtttattcactttatgacgatggtgttgagccaaaaaaatggctgaatgtggatgccacagaaatatcacggaatgaggccttaaaattgttaaaacccataatgaccagggagcaattggtagttcaggctgagtatgaaaagcaatccagagtcactgaagccaaccaaaaaacccagctctggcagacacagctaatgctcggcatcatcaccgataaagataaagaaagcctcacagagtggatgctgtacgtgcaaaaagtccaggcagtggacacctcagccgccccggacatcatctggccggagaaactggaatga

SEQ ID NO: 282402 - DNA, 756 bp, Morganella morganii
atgagtaccccgcgctggcaccggcaaaatatgagcatggcggctgatatgccgccgatcacctgttcgatcctgccggtgcatccgtttgtctatggtgttggccagaccaatgaatccggcagctacttaagcccggtcaacgccgtgaaccatatcgccggaaaacttgccggagccggtcagatatcggtactggtgctgatggtcaccggcaaaacttttgcggaatttatgcagtcactttcggcattttcggcagtttttccgctgtcggtattttctcaggttgaacgaatggccagaacgacggaaacgctggcaacaacaaaaatgcagctgccgggcaaaatggccggtggtttgccgttgccgcagtcgctttccacgtcaaccagccgcatggctgggaatgcgcaactgattgaagcggccaaagctaccgccggtaaaccggtcagcacggacagcctgaaatcagcactctctgatttcggcaccctgaaagataacgctctgaaacagatgagtgacgcacttgccgggctgctgggaaaatcagccccggtatgggcgttttcaggaacggatgatgccacggtgctggctgaaaagatgaaaaaagacatcccggagccggatgccatttacacactggcgaccctgttcgccggtcacgaaattgatgcattaacaaggatgttaagcaatgcagacgatagtcctcgccctgaacggcgaagcgatcccgcttaa

SEQ ID NO: 282403 - DNA, 549 bp, Morganella morganii
atgcagacgatagtcctcgccctgaacggcgaagcgatcccgcttaagaatctgtcggtcacgccgtctatgatgttccaggacaaagaccagtccgggcaatcatccagtaccgccgtggcagagcaaggcataaaacccaaagaactccggataaccggcattctgccgttcacggaatcaaaagcactgacccgcctttttgcgctggcagaagccaaagacggcggcaacctgaaacgctaccgggtggccaatatgacggcccaggcaattaatttccggatcggtacgttcactaactccattgatgccagcaaaatcgaaggtaaacaggcgtggcaggtcacattcaccctgcgcgaacacctttctgtctctgaaaaacgagaggccagggcaaacagcaaagtggctgcgaaaaaacagggagccgccgccggtgccggtaaaaacggaaaagccggtgccggtgcgcaggaagaaccggaaaaactgacatggtttgaggaaaaagtcctgaagccggtcaatgacgcactggaataa

SEQ ID NO: 282404 - DNA, 366 bp, Morganella morganii
atgccggaagcatctagacaatttttagctagagatggacaaacatacgatatatttattgattacgaagaaatagaggtttatttgaacggaatcaaacaaggtagtattgaactaatgctagttgaaatggattttcccccatatgcttattactacatcatagatttagaccttcgacattgtcgaggtttgggtatcggtagggaatgtttgaaatttcacatcgaaattattggtgcacctatttgcgcagctgatcccgatgctcaaaaaatggatgacggaagccatttgatagatgatggtataggtttcatcgaaaaaatgcgcgaagaaaaaattgtatgtcctatcaataattaa

SEQ ID NO: 282405 - DNA, 168 bp, Morganella morganii
atgtctggtacacagtattcagaagttaaagaagtagtaggttcggctaaagcaaactctctgttagccgatggatggatactaattaatacttatgaagatactatgaagtttgatgatggtacaaccaaacttctgatcgtttatgttttaggaaagccaatttaa

SEQ ID NO: 282406 - DNA, 351 bp, Morganella morganii
atgaacaaatatcgtgacaaatcagactttgagattaataaggctgtgtttcgtgccgccagaataaaacataaatggtttagatttttaccgtatggtgtggttacttacaacatcaaaggtgattgggtaatcttcgacccatgcaataaccctgcggacgcaatgccgattattattgagaataagatatgtatggcatatgacgtattcgcagaagaacgggatggtggtaattgggtagcgcaacctgcatatggtttttctgatgaacgggtgagaagcgacagttactatcgtgcggctatgatttgcttcctgatgatgaaggatgcggagaatgaaagctga

SEQ ID NO: 282407 - DNA, 885 bp, Morganella morganii
atgactgctttttacaacgaaaacgatccgttcgctgctcagtggttacggaatctcattgctgccggtcatatagcgctgggcgtagtggacgaaaggagtattgaagatgtcacaccagatgacttacgcggattcacacaatgccacttcttcgccggtgtcggagtgtggtcacttgccctgcgccgagcaggatggccggataacaaaccggtatggacaggaagttgtccgtgccagcctttcagcgcggcaggcaaaggaaatgggtttgctgatgagcggcacctttggcctgcattcttccacctcatcagcgagtgcaaacctggcgttatctttggtgaacaggttgcaagcaaagacggcctcggatggctcgaccttgttcaaactgacttggaagcaacgaactacgccacagctgcggtcgatttatgcgctgcgggcttcggtgcaccgcatatcagacagcgattattctgggtggcccacgccactggcggggagcagccgaggagccggaaccggtggcaggaagggaggaatgaatattcagacagctgcgcagctggcaggctggacaacagcgagcgcctcggatggagagcgtggaggaacgggaattacgcaggggatgacgggaagcagcttgacgcagcagtcaaaaatgacactgccagtccgactaacggccaatggcgagatgctgactggttgctctgcagggatggcaagtggaggccagttgaaccaggaacattcccgctggctgatggggttgccggtagagtgggaaaactccgcgcctacggaaatgccatcgtcgcgccggtcacggaagagctcataagggcttatatgctgataacagaggaatga

SEQ ID NO: 282408 - DNA, 285 bp, Morganella morganii
atgtcagagtatttggttcgggttgagctctatgatgccggcattgaggattacgaatttcttcataatgcaatgtcaggaataggaatgtataagtttttacatatccaggggttagacttaaaagcgcttcctgatggcacatattttggtgcatctttactgactgctatagctttgcgtgacagggttttggctatttccagacctctgtcatctgacgagccgtcaatttttgttgcccaggttagtgattgggcgtcatgccttcactcgatgagctga

SEQ ID NO: 282409 - DNA, 345 bp, Morganella morganii
atggaacttgataagctggaagaattagcaacaaacgcattaggcgcaatgattgatgtaattaatcagaaaacggaagaattacgacaccttgatgtacgttacatggtgaaagaaaagagcgggaaactacccgagttttttgagctttcaggtgaatctcaggatgctgcccgtcatgttctggctgaaatgttactcgtcagttaccgccatgggcttaagctcacaagagatgaaatcactgaattgggccacaaggtaagaaaagcattcatgaccctggagaacgaccaaccaaaagcggagtgttgtgattcacgaatggcgcacgccgaaatttga

SEQ ID NO: 282410 - DNA, 153 bp, Morganella morganii
atgaaaacgaaagttacctgtccgttgtgtctgaggacatttgacccacgaataccggtaatgcacatcagtaagtatcacaaagatgccactgatgctcagttagcaaaaatcaggaatgttcgcagaaaggcgacatacgcaagcagctga

SEQ ID NO: 282411 - DNA, 246 bp, Morganella morganii
atgtctccggttataccgaatggcgcaacagtatcagttagcacgggacataaaaaagtcattgatggcggcgtgtacgccattgaacaagatgatctgttacgggtgaaaatattgatgcgccgcccaggtggtaaattaataatccgtagttttaattcatcagattaccccgatgaaatagcgaatgaagacgacgttaaaataatcggtcgcgtctttaactggtctgttatgggctggtaa

SEQ ID NO: 282412 - DNA, 213 bp, Morganella morganii
atgaaaaacaaacttatcgacaaggctattggcatggtgggcaaccaacggaaattggctgacgcctgtaacgtaaaacaacccacagtgtgggcttggttacacggacggaaaaaaccatctgccacaagcgcaaaacgtatcgaaatggtgacaaacggagccgttctggcgagtcagttaaggcctgacctgcatgaaatttttgggtga

SEQ ID NO: 282413 - DNA, 333 bp, Morganella morganii
atgaacgacgcaaatccacgcaaaacgttcaatcgttttgtgtcgaatcatctgattgcaacagcacatcaggcaatacgggaaacatcacaaacggtggtcgccagactgcttgatgttcacgactcaacaatcatgcgcagaacagaaaagctatcagactgctgcgaggtattggccgcagccggtatcacagattttgttttgcctggcgagaagaaaatcagcgaggaagagtaccggtttctgtggaagcagatagcggaattctcattgtggaaaacgggaggttttcatgaatccaacggagttcatcaggaagaacatcattag

SEQ ID NO: 282414 - DNA, 219 bp, Morganella morganii
atggaaccaacggattttgaaaagtggtgtgcgggtgagcttggctattcgccggagtgggtcatgatgcagcggaaaataaactttttcggcggacatgaatacagccatggtgagattgcgaaaagataccgcgcatggaatgccggagtttgcagcagactgccgtaccagacaccgccaaaaggagatgaagatgaagggcacgacgctgactga

SEQ ID NO: 282415 - DNA, 219 bp, Morganella morganii; identical to SEQ ID NO: 278021

SEQ ID NO: 282416 - DNA, 147 bp, Morganella morganii
atgacatgccaactatgcagtaaagaactggctgacgatgaagtttacgtgtgcgaccagtgcgccagcgaatgcccgcatctggaagtggccgagaagataaaaggagatggtgatgatcaaacgcatcctgggatatctgagtaa

SEQ ID NO: 282417 - DNA, 171 bp, Morganella morganii
atgtcacggaaccctttaacgctgataatcattactatcatcctgctgactactgctctgctgtcggtttgctatctgtattcactcccgaatcactgtaagccgctgccgggtaacccgctggacggtgtgatccattatgagtgtgagaacccacgggggctgctgtga

SEQ ID NO: 282418 - DNA, 255 bp, Morganella morganii
atggatattagtaatgttgtaagcacattaattatttgggctaaaaatgggcgtcgttacagaatagagataaacaaagatactaccaataataactattttgctattttatacgtacagcaggatatggatactaaggactttgggtcctgccctgtttggtgtcaaataaatggctatattcaattaggtggaattgatgttcaatcttgtgaaagcgaggcactgagagtgctgaaagaccaattgaaataa

SEQ ID NO: 282419 - DNA, 912 bp, Morganella morganii
ttgtccgatttactggtctctccggtaccgcatgaaggtgcggcactgttctgctctcaaactaacccgccgtttgataagggggaactgaaccgccgcatcctggaagatacccggacctgtgtgcagacacagcaatcccgtgccttttattatgatatccgcaataccgaccgctcggtgggggctgcgctctccggctttgtggcggaattgtacggcaacagcgggatcgccgcctcgccgctgaaactgcattttaccggcaccgccgggcagagtttcggggtctggaatgccgccgggattgaactgacgctcacgggcgatgccaacgactatgtcggtaaaggcatggcgggcgggcagattgttctgcatccgcatccgggttctgcctttgccgctcacgacaccacaattgccggaaatacctgtctgtatggtgccaccggcggcaaactctacgccgcaggccgtgccggagagcgctttgctgtccgtaactccggcgcactcgcggtggtcgaaggcgtcggtgataacggctgtgaatatatgaccggcgggattgtctgtgtgctcggcaaaaccggaattaacttcgcggccgggatgaccggcggattcgcttatctctatgatgaggacggcaccgccgccggacgtgtcaatcctgaaatggcggaaacccgcgatatcagcgggctgccggttctgcaggaacatttgcgcggcatgctggaagaccaccgccgcctgaccggttccgccagagcagacgcacttctcagagattggacagagcaggccgggcggtttatcctcgtcaagccgaaatctgcggatatttatgcacttgccggggtaacccgccacgcagacactgaattacggatccgggcacagtaa

SEQ ID NO: 282420 - DNA, 1419 bp, Morganella morganii
atgagccgcaatgtttatcagtttattgaattacagcgtacggatccgcaaaagctgccgctggcactccgtaaaaccgaatttatcgagatttatgagccgttttcgccgccgcaggtgaaagagcaggcgacccgctgcctcggctgtggtaatccgtactgtgaatggaaatgcccggtacataactatatccccaactggctgcggctggcggaggaaggccggattattgaggccgcagagctgtcacaccagaccaacagcctgccggaagtgtgcggccgggtgtgtccgcaggatcggttgtgcgaaggtgcctgtaccctgcatgacgagtttggcgcggtcaccatcggcaatattgaacgttatatcaccgataaagcctttgagatgggctggaaaccggatctctccgctgtccgtccgaccggaagaaaggtcgcggtgattggcgccggtcctgccgggctggcctgtgccgatgtgctgatccgcaacggcgtaaccccggtggtgtttgataaacacccggaaatcggcgggcttctcaccttcggtattccgtcgtttaagctggaaaaatccattatgcagcgccgccgtgagctgttcacagagatgggcgtggagtttcagctgaataccgagatcggaaaagagatcacgctcagtgagttacagcagaattatgatgccgtctttattggtgcgggcacctatcagtcgatgggcggcgggctgaaaaatgaagatgccgccggggtgtacagcgccctgccgtatctgatcggcaatacccgtcaggtgatggggttgccggatgatgattccgctccgtttattgacctgaagaataaacgcgtcgtggtactcggcggcggagatacggcaatggattgcctgcggaccgccatccgtcagggtgctgcagaagtgacctgtgtgtaccgccgggatgaggagaacatgccgggctcgcgccgtgaggtgaaaaatgccaaagaggaaggggttaatttccgttttaactgtcagccatccgccattgaaaccgatgcaacgggtaacgcctgtggtgtccgcgtattaaccacccggttgggtgatgcggacagcagcggccgccgtcagattgaaacggatgataattccgcctttgttattgatgccgatgcggtcattatcgcgttcggtttccggccgcacgcgatgccgtggctggacgctctcagtgtcacacgggatcagcagggccggatcagcgccccggcacaggcaacttatccgtttgaaacctccgtcagcggtatttttgccggcggggatgtggtacgcggctcggatctggtggttaccgccattgccgaaggccgccgggcggcagaaagtattctcgattatctgcacgtatga

SEQ ID NO: 282421 - DNA, 3543 bp, Morganella morganii
atgataaaaaataagaagctaagcaatccgttttccacaggcggtggtggtgttcattttgaagcgcatgtccaagcgtcatttgtcgcgctgatgcttaccggcgggcacgctccctgtcttccttgctggcccattgcagaaatcaaacttcagggcaagattgatggttttgatacagacgacctcgttgttgtcgtggaagacgtgaacagcaaggagcggcggaaacttctcgggcaggtcaagcattccattgccatcacgcagggcagcaccctgtttggggaggtgatgcaggccgcttggaatgacttcaaaaatcccaaggtattcacgcgagataaggatattattgcgctgatcactggaccgctcagcgcaaccgatgcacacaacgtgcaatggttgctaaaccaggcgagacataccaaaaatgttgatgagttttttagaaacgtccagcaagcaaatttcagcccacccaagagtgtcgagaaactggaggtcattcagcaccacctgaaggtattaaacggcggcaacgatgtttcaagagacgaactctatgacttcctgaaccatttccatctgctcggttacgatcttggtaacgagttcggtgttgttctgtctctgctacattcccatatttcccaattccaacagcagtatccgcagtgggtttggtcacgggttgtcgatgttgtacaaacatggaatcaagatgccggtacgatcacgcccggcaagctgccggaagaccttctggaagcatttaagcaaaaggccgtggcggaaatacccgaggaattcaaggcggcacaggagaaacctaaaaccaattgggctcagcacacggatgccacctatctggccttggcagttttgattggagcttggcaagacaaaagtcaatgcgaccttgaggtgataaccaaactgcttggcatcagttatgatgagtggttaaagaaggcgcgggaaatattacactgccctgacagcccgttgtctctcaaaaatggcatctggaaagttgttgatcgagtcgagctttggaaccagttgggatcgcgcatccttgatcagaacctcgatacgtttaggtcgcttgctgtttccgtactgaaggagccagaccccgtttttgaactacccgccgaagaacgatacgcggcaagcattcatggcaaggtactgaaatattcacacgtgttgcgaaaaggcattgccgagggtttggccattctgggtagccagccggagtcatgcgctaactgctcgcaagggaaagctgaagcaacctgcatattagtgatacgtgaacttctgactgatgctgacggtgttttgtggggcagcctgaatggtttgctgccaactatggccgaagctgccccaggtgaatttcttgatgcggtcgagaaggcgatgcgtatgacgccctgtccttttgatgagcttttttcccaggaaggcgacggcatcactggcggtaattatctaaccggtctgctctgggcgttggaggggctggcctgggatgaacaatacttggttcgcgtctgtgttgcgcttggtgaacttgccagccatgaccccggcggcaagtgggccaatcgtccatccaattcgcttgcaaccattttgctgccttggctgccgcaaactctggcatctgttgataaacgcaaggtggcggtgcggacgatcctgaatgaatggccgaatatcgcctggaatctgatcattcagcttcttcccggtcagcaccagacttcttctggatcacacaaaccaagctggcgcaagaccatccctgatgattgggaaaaaggggttacaaataacgaatattggcagcaggcatctttttacgcggaacttgcggtggctgccgcaggccaagatacctcccggctttccgcattgattgatcatttcgataacctacctgaacccgcttttgatcaacttctccaggctcttgcctcccaacctatttcagaactccccgaagaacaacgactttcgatttggaaccatctcacgaaattcacaaacaaacaccggcggttctctgatgcgaaatgggcattgcccgacgaactgattacccgcattgaacaagttgccgagaaactctcacccactaacccgttcaatttatatcagcacttttttacagatcgtgactttgatctctacgaaggtaatggcgattgggaggagcagcgcaagaaactcgaaatgcgacgtgaaacggccattttagaaatctttcagcaagatggtgttgagagtgttatccgatttgctgaatccgtttcttcggccaatcaggtagggtacgcgcttggcgttattgccgattcagtcattgaacaaactcttttgcctcacttcctagattcagcggacaacaggcacaaggcattggtgagcggttttatctggcggcgttaccacctcaaaggctggaggtggtgcgacgacatcaataaatttgattggtcgccggagcaagtgggccaattcttggcttgcttgccgtttaccaaaaaagcatgggatcgtgcttctgaatggcttcagacccacgagagtgaatattggatgcgcacaggcgcgaatgcctatcaggccgatggtgatcttgccattgcaattgagaaactgattgaacatggcaggccacatgcggcaatcaactgcttggacaggatgcgcaatgacaagcagccaatcgatagtaagcaatgtgttcgagcgttgctcgcggcactttcctccagtgagcccagctacggcatggacgggtatcagatcgtcgaactgatcaagtttcttcaggcagagccttcagttaacctggacgacctctttagagtcgagtgggcatatattcccttgctcgaccgtcatggaggagctgcaccccaactccttgaaagcaggctggccaatgaccccgagttcttttccgaggtaatccgactgatttaccgatccaagaaagaagatcagtccccgaaggaacccatcggggactccaaggcaatcgcaacaaatgcctggcggttgctccgtgagtggaagacaccgccggggtcacaagaagatggaacgttcagcgatgagcgtttcaccgaatggctccaaagggtaaaggaagtctgtacggaatctggccacttggaagttgcactcattaatattggcgaagtcttgattcacaccccacctgctccagacggcttatggatacaccgcgctgtcgctgctgcactgaatgaccgtgaggctgatgatatgcgtaatggctttagaacagggacatataactcacgcggagttcattgggttgacccaaccggcaaacaggagagagaactggctgaacagtttcggaataaagccgaagaaatagagaacgctgggtttcagcgatttgcagttaccttaagaggtttggcggacggttacgaccgcgaagctgaacgaattattaacgatcacaaagacagggaagatgagtaa

SEQ ID NO: 282422 - DNA, 999 bp, Morganella morganii
atgggactttatcgtatctttgacaaaaatcttacagcattagatagaacaacatatgctaaggagggattacaggagcgatatgatttacaagaggctatcaaaaaaaatatagaaattattgctccagattgtttggttatttctgaggagttctccgattgggaagatagtcggcgaagaatcgatttgttagctatagataagcatgcaaaccttgttgttattgaattgaagcgtgatgaaagtggcgctcatatggaattgcaggcattaagatatgctgcgatgatttcaacgatgagttttagtaaagcgtgtgaatgctacgaaaaatacctaagaagcaataatattgatattgatgctaaagaaagtattctcgattttgttgggtttgacgaaacagaattggccaaatttggtaaagatattcgtattatcctggcttctgctgatttcgacaaagaattaacaactacagcaatatggcttaatgataaagggctcgatatcaggtgtatcagactttcaccatataattttaataatgaaatattaattaatgtagagcaaattattcctgttcctgagttggaagagtatcaggtcagattcagagagaaacgtattgaacagattgccagcagccaacaatctgaaagagattattcagagtataaatataacggagttatatataataaacgaaaactggcacttgcactttttactgattggatagaaaaacataagcccactgactttaaggatcttaaagataagttaagctctgtcctgaaaaatagaacgatcgttctggcagaccaaatttcagaagaaataagaagtaggtttcatcttcaggaggattgccttgttgaacttacttcaggagaacgtattgccatctctaatcagtggggaataggaaatattgagagattgctcgattttgtccgggaagatggtttcattgttgaaaaagtagagcggtaa

SEQ ID NO: 282423 - DNA, 366 bp, Morganella morganii
atgattgatgttttaggtccagagaagcgcagacggcgaagtgttcaggaaaaaatcgccattgttcagcagagttttgagcccggaatgaccgtgtcgctggtcgcccgtcagcatggcgttgctgccagtcagctgttcctgtggcgtaagcagtatcaggaaggcagccttacagccgttgccgcaggagaacaggttgtgcccgcgtcggagctggcatctgcgatgaagcaaattaaagagctgcaacgcctgttgggcaagaaaaccatggaaaacgagctgctaaaagaagccgttgaatatggccgacaaaaaaagtggatagcgcacgtgcccttgttgccggaggatggcgaataa

SEQ ID NO: 282424 - DNA, 816 bp, Morganella morganii
atggcccgtcggtcgaaggactggcaggatcgtcggtgcaagcgcaagcctgatgatactgacgcgctggcccgtatccataccgttatcggcgatctgcccacctatggttatcgtcgggtatgggcactgctgcgcagacaatcagaaactgacgacatggcggtgatcaatgccaaacgcgtataccgcatcatgcgtcagaatgcgctgctgcttgagcgtaaaccggaaataccgccatcgaagcgggcgcatacagggaaagtggccgttggagaaagtaaccagcggtggtgctctgacggcttcgagttcagctgtgataacggtgaaaaactgcgggtcacgttcgctctggactgttgcgatcgcgaggcactttactgggcggccagtaacggtggatatgacagtgaaaccgtgcaggacgtcatgctgggtgccgtggagcgtcgtttcggtaacagcctgccgacatccccagttgagtggctgacagacaacggttcagcctaccgttcttatcagacgcgtcagttcgccagaatggtaggactggagcctaaacatacggcggtacgtagcccggaaagcaacgggatggcagagagcttcgtgaaaacgatgaagcgcgattacatcagcatcatgccgaaacccgacgggttaacagcggtaaagaaccttgcggaggccttcgaacattacaacgaatggcatccgcatagtgcactggggtatcgttcgccacgggaatatctgcggcggcgaaccagtaatgggttaagtgataaaaagtgtatggaaatatag

SEQ ID NO: 282425 - DNA, 663 bp, Morganella morganii
atgaaatttattaatcgttacagtgcaattgcactggcagttggtatgttgtcactgaatatgacggcacaggctgagactgtttccctgaatgccgccgcagcaccgcaggctgtgacagaaatagcggtgttacagcaggggcagtgggacagttttaataaacagcgcctggatgccatgatcgccaaagcaaaacaatcaccggcacatacctattatgcggtgtttgactttgataacaccacggcatttctggatattgaagaagcggtgatgatttatcagcttgagcacctgttatttgccatgacaccgcaggaactgaaatccgttattttcaaagatattccggccgggaatttttctgctgagttcaacaataaaaacggtaaaccggtcaatattgagaaggtcggagctgatattctggaaagctaccagtggctgtatgacaactatgatggcctgaagggtgataagccgctgtctgaaatcaaaaagtcgccgcattatcagaatttcatcaccaaaatgcgctatttatatgcggcaatcggcggcacatttgatcatgccgtttcctatccgtgggtcacctatttatttatttatgaatatgacaccggagcaggttgcggatattaccgccaaaaccattga

SEQ ID NO: 282426 - DNA, 2679 bp, Morganella morganii
gtgataggctcacaatggaataaatgggatttacacatacacagtcctctgacgtggttggccaacagctatactccggatgatattgaggattatgttcgcacgctaggggcgcatcatctgtccctcatcgccgttacgaactacttttatttccggcagaacgaactagaaatcgtccgggaggaaattactcggcagggtctggcgatcacggtacttgccaacgtggaatttcgtcttgatcagcagaaccgggatggccagttcattaacatccatattctcttttcagaaaagctttcaacccaacgtattaatgaagctctttcacacctgccgatcaggctgacggatggcggggggaagaatatctactgctgtgagaaaagcgttggcgacagcgggcatggtgttgataccattacggttgcactgtcagagctgacttcccatcttaattccgtacttcgccctttccaagactttctgattgccgtgtgccccaacggttacggcggataccgtccgggggccaccggccgatcggctgcagccgcgaccgagattgaccgccagggacagataattttcggtggtgccaccgatcgcgaattttatctgcgaaccgaccgttatcccggagccacaatcaaacctgtatttctgtgttcagatgcgcacagcgttgcacagattggcgggcgttatacgtgggttaaggcgctgccaacatttgagggactccgacaggctctgcttgaacccgaatcaagactgaagatcggagatgactggcaagccacctgcacacccaagactcactttagtaagatcgaggtggaaggtaccatttttgatggtcaggagatccgcttccggcaactggcaatcccgctaagccaagacatggttgccattatcggaggccggggaaccggaaaaagtctgctactggatgcgcttcgctcccgatttgccggagccgcagcgaggggaagtgagcaacgtgcggtgaatgtgcagaatctctgcgttgaattggacaaggcaaacggggaaaaggtgcgttttgatacgtattcagaaggatatgaataccttcacgtatcccagggtgagatcaaaaaactttgccaggagcccggtcttatcagcgatgaaattaaaaaaatgctgcggctgtcttctcaccatgaggccgatagtacgggggaactgctcaacgaaaacctcagtgcttggcgcgcatggcgtgagtttcttacctttaaaaatgagcgtaatgagccgatcaatacgcgtgcatttcaggaagcgcttgcgagaacggctcgggaaaaaattgatgtcctaacgagcactcgtaacagggaactgatcgcacagtttcgtgccaatagcggacagcaggccatcctgacacaggccagaaaacatgccaacgggctgcaaacagcgattgataccactgtccgggatctgattacaaagattgacgccgtcaatgctgccgtcgatgacggcatggttgtgccgtaccctgatttgtcattgctggccgccgctgtcgaaacaaagttggccagcattgacgatcagactgcccggcttgctgaggataatcgccatatcattgcgtcgtttcaggagcaagggctaggtcaggatattccaggattgctggagaaagtgcaggaatatcagctgcaggcagatcgggctgaggaacacctaggcactatcaacgcccgagagacacagtatcagcaggaattactccagcgaggcaaactggctaccgcatttattgacaagctgctggcaaagcaggcggttatcgatacttcctatgcctctctggctaccagaccgcacctgactgacgctcaacaagcgctcatccgagatattctgacggacattcgtatttatggccggccgcattttgatgtggcggcgttttacaacagcatgctggatcatatgaaccgcggccggttcagggcttccgccgaacagacgtctgttgaacggctaagcgatgtgttccgggtgcaaaccattgctgatttacatgcactgctctccaacgctgctgtaatagcactgccggaatgtcctgacagaaaactgtccattgaagaatttctgtggcgcagtgagtattttaatagtcagggtccgtatgccctcctgaacttcctcttcagtccggaacatatccagcaatacctgagcgtcagggcagagtttgaatacaagggaaaaaccgttgagaaactgtctgccggtcagcgcggaaccttttacgtctgtctcaaactggctacggatgcgtttggttcaccttttgtcttcgatcagccggaggatgatctggataacgatttcatcatgcacaatctggtgccgctgttccggaaaataaaacagtaccgtcaggtcatcatagtgactcataacgctaacctagtagtgaactgtgatgcagagcaggtgatcattgccacaaacgatgaagaagtgatcagttaccgagctggggcactggagtacggcgatcatgacgcaccaaacagcatgcgcagagcaatttgcgatgtgcttgaaggggggcgccacgcatttgaggctcgggagcagaaatacggtatgctctggctcaatcccttatag

SEQ ID NO: 282427 - DNA, 630 bp, Morganella morganii
atggatgccgttattcatttaatcaactgtgctgatttaccaggcaacaatatcaatttcatgcttgataatatgaattgtgaagtaaaatcttattcatctgagcaggcttttctgaaatattatgttaatacgccaaaagagcatgcccgtgaatgtattattctggaagtgggagaatcatctgctgaggcattctatcttatcgatgaactcaaacgcctgaaaagcattattcctgtgattgttatcaccgcttatccgtcttttgagacctgccgtcgtgcatttaaagcgggtattctggaattcttcaagaaaccgattaattcagagctgttagttaatgcgattcatgacgcatttaatcaatatgaaaatagcctcactaagtaccatagatatcaacgctttaaagataaattcagcaagttatctgcccgtgagaaagaggtcatggatatgattctggaaggaaataccagtaaagaagctgcacaaaaattatcattatcgccgcgtactgttgaagtacaccgttctaatatgtataccaagctgcgtattaaatcattactacaactggtgcaggaatatgatttctataaaaactattcagattcaatctga

SEQ ID NO: 282428 - DNA, 540 bp, Morganella morganii
atgcgcgtcatggatgacgcgcctgagcgcacagggaggtgtttacagcggcttttcgttttgccggttatcagcccggccccggtgctgagcgtttcacccccctttgttaacaacaggccaccgaaccaaagttcgcatcattccatccgcagcaaaagtaaaaggcagataaccggcagagagacgaaaagcatgcgcgtcatggatgacgcgcctgagcgcacagggaggtgtttacagcggcttttcgttttgccggttatcagcccggccccggtgctgagcgtttcacccccctttgttaacaacaggccaccgaaccaaagttcgcatcattccatccgcagcaaaagtaaaaggcagataaccggcagagagacgaaaagcatgcgcgtcatggatgacgcgcctgagcgcacagggaagtgtttacagcgacttttcgttttgccggttatcagcccggtcccggtgctgagcattccgccttctttattaacaacagactcaggtgctgagcattccccctctatttaa

SEQ ID NO: 282429 - DNA, 699 bp, Morganella morganii; identical to SEQ ID NO: 276966

SEQ ID NO: 282430 - DNA, 471 bp, Morganella morganii
atgccgggaccaccgaaaaccccgtcacacctgcgtttggtcaggggtaacccatcaaaacgcccgatcaataaaaaagaaccaaaaccgccttcaggggtacccccaactccgaaacattttaccaagcaggggaaatactggtttaagcggataggggaagaactcgacgccatgggcgtgatgagttcgatggatgccaaagcgctggagctgctgatcgaggcatacaccgaataccggcaacactgcgataccctggacgaagaaggttacacctacacaacacagagtgatggcggcccactgataaaagcacacccggtggcggcaatgaaagctgatgcatggaaacggatccgcgcgatgctctccgagttcggtatgaccccggcagcccgccagaaggtaaccattaacacaccagccgaagaagaccctttcgaggcatttctgaaacaaagaaaatga

SEQ ID NO: 282431 - DNA, 1329 bp, Morganella morganii
atgagtactgacaaaacccagattccggctgagtataaaagctggcgtaaatcggacacgacctggacactcggtctgttcggtactgctataggtgcaggggtactattcttcccgatccgtgccggttacggtggcctgatcccgattctgatcatgctggttctggcatatccgattgcgttcttatgtcaccgtgcattagcacgtttatgtctgtcaggcaaaaatccgtcaggcgatatcacagaaactgttgaagagcactttggtaaaggcggtggtgttgttatcactttcctgtacttcttcgcaatctgtccgctcctgtggatctacggcgtaaccatcaccaatacctttatggcattctgggaacagcagctgggcatgatgccgctgaaccggggtgtggttgcactgattctgctgttagcaatggctgtcattatttacttcggtaaagatctgatggtccgcgtcatgagctacctggtattcccgttcattgccagcctggtgctgttatctctggctctgatcccttactggaacacagccgtatttgaaagcgtgaacgcagacagcttccagctgttcggtcacagcggtatcctggtaacagtatggctgggtatttccatcatggtgttctctttcaacttctcaccaatcgtatcttctttcgtggtatcaaaacgtgaagaatacgaagcggcgtgcggtaaagatttcaccgagcaaaaagtgaacaaaatcatctcccgcgcaggtttactgatggtgggtgtggttatgttcttcgcattcagctgcctgttcgcgctgtctccggctaacatggctgaagcgaaagagatgaacgttcctgttctgacttacctggcttaccacttcaacaacgtgggcggcgctaacggtactctggcgactatcctggtctgggctgcaccaatcattgcactggttgcaatcttcaaatccttcttcggtcactacctgggtactctggaaggtatgaacggtctgttactgaaatttgcgttcggtggcgacaaaaacaaagtcagcgttggtaaactgaacctgatctctatggtgttcatcatgggttctacctggttcatcgcttacatcaacccgaacatcctggacctgattgaagcaatgggtgcaccaatcatcgcatcactgctgtgcttactgccaatgtatgctgttaaccgcgtaccggctctgagcaaatacaaaggtcaggcatctaactactttgttaccatcatcggtctgctgaccatcggtaacatcgtgttcaaactgttcgtataa

SEQ ID NO: 282432 - DNA, 708 bp, Morganella morganii
atgaaagagcgcggaataattttcaacgcagaaatggtacgcgccattcttgatggcaggaaaacgcaaacacggcgaatcatgaagccccagccaactccatgtgattacatagattggcgcgggaaagctcgtggcggtcatgtgtggccaagtaacatatttcggacaatgcttcatgtcgagggcgaactacagaacggcgacggtggctggaagggattggttggtgatgcctgtccgtttggtgatgttggtgatcgcctttgggtgcgtgaaacatggcagggtccgctagttgattatgaaaatgccaataaattatacaaagacccggagccatttcagacgacaaaaaactgcgtatataaagccgatggcggtactcaccctgagtattttgatgctgacgataacctgagatacggatggaaatcatcagcacaaatgccccgctgggcttctcgcatactgctggaaataaccggcgttcgtgttgagcggttgtgggatatcagccaagcagatgctattgcagaaggcgcaccgcccagccacccatctattgatgctgtatctcgtgaatatggcttccctgattttccacgctcgtggttcgggcaaacatggtggcatatctacggaaatgaaaattggcaggctaacccgtgggtgtgggttatcgaatttaagcagattcaggggtga

SEQ ID NO: 282433 - DNA, 846 bp, Morganella morganii
atgtcaaagccttctcatttcaaaactcccctccgttatcctgggggtaaagcaaaattctctccacatatagagcaaattctccgttgtaacgacttagtcggaggttgctatgcggaaccctatgctggtggagcaggtgttgctttggggttgctactcaacggtcttgttgaggacatttttattaatgatatagacccagcactttatgctttttggtcggctgttgtaaattataacgaatcattatgcgaaatgattaacgaaattcctgtaactattgagaactggcatatacagagagacatactacttaataatgataaatataatatgcttgaagtcgctttatcgactttctttttgaacaggacaaaccgctcaggcattctcaaagccggagttattggcggtaaagaacaaaaaggaaagtggaaattagatgccaggtttaataaacaggacttaaccaaaagaataaaactaattggcacctatagagataaaattcatgtatcgaatcttgatgctgtagattttctgatggctcaaaaaaattcattacctaagaaaagcctaatctatcttgatcctccctactatgttaagggcgccgaactatatcgcaacttttatcagcatgatgaccatgttaaaattgctaaaaccttgcgaaatatcacgcttccctggattgtttcttacgataacgttaatgaaataagagaaatctatcgaggccttaacatggctgattattcattaagttatacggctcaggataagaagaaagggcttgaagttattatttataatgacggggtaaatatccctgagatttga

SEQ ID NO: 282434 - DNA, 714 bp, Morganella morganii
atgtatagagtaaatcaaatcatcaaaacaataagtaaaatgaattcttatgctccctataatcaaataaataaaaaaagcaacttacttagaaaggttcaagtatattcatttctcacatcactcatttctcttgttttaatggtgataatggcagttatctataaaatttgtgaactccccaaggaaccattttttttacccgcactcgttctgtatgtcctcaattccgttgccggtatagtttatttgtttacacctataattccaggtgtgaagttcatgctcaacttcaaaggaaaaatttttagtgatctaatttgtgaaattgataatgatgaaaaaaatatagaaaaactgatgccttactcgttgactgaattaaactattcaatagattggttaaacattaagatgcaaagagtgaaatcaagaataaatgatttctttggggaaaaaactgccgtcttatcgataattgggttagcatactcagcagtgcaaggttttggtgggttagataaattgggtaataccatatcaaaagggatcttcaattccggcgcagcaaatacattaattgtatttggactggcttttcttttagggttatcacttggagcattagcacttaaaaatgtagcaaatcatttgcaatatctgaaagagatgattgaattagctaaaaaaataaagcaacagaataatgagtaa

SEQ ID NO: 282435 - DNA, 516 bp, Morganella morganii
atgaatattcaagaagcgttaaatatttttggattatctggtgatctgacagaaaatgatattaaaaaagcctacaaaaaagctgctttaaaatatcaccctgatcgtaatcctttaggtacggaactgatgaaagctgttaatgctgcgtttgattttttgatgaataatttagaaaatatcaataaatttcagagcgaagataaacaggatcactacaattacaccgaagaacttgaggaaattttatccacgctttccggtttaatggggattgtttatgaggtcattggtaattgggtttggatcagcggggaaactaaagaacataaagaaatactaaaaaaaatcggctgtaaatgggctatcaaaaagaagcaatggttttatcgtccggaagaacataaaagccgcagaaaccggaaagaacacagcattgatgaaatacgtgaaatgtatgggacaaacggacaaagggcagcgaaaggctggcagagagtagaaaacagggcataa

SEQ ID NO: 282436 - DNA, 552 bp, Morganella morganii
atgaaaaactttaaagaactctatcaatctgtttttgaaattgtgtgccgctgcctgggaaataattggcggattaatgggcttgatgaaaaaaacacatacagaataataataacatcaaatcaatttccgaagttttctatttacatcagggaagaaaaaaacagattttcaataaccggaagctatgactcccgagtgtacagagggaaaatatatacgtgtactgtatcaaaatacagaaatcctgtttatatagcagaagatattaaacggaaaataattgcattcgcgcatgatgaaatcaccgcggctaaagaaagtgaaaaaaaagcacaagatttaaaagaacaagataaaattgtaaaagggatgctgtcacaattactttctattcatagttatcctaattccggggttgttggcggattcagggcttgcaacggaattgatggaatgatccgggttaattacaccggatataaaattgaaatatgcgggttatcagtagataaccttataaaaatagcggggtttataaggcaattatga

SEQ ID NO: 282437 - DNA, 231 bp, Morganella morganii
atgattaaactaagtaaaggcagtaaaaattactatcttacccgtgaaaacggacagctggtttttattaaaaatattaaggtaagaaataaaaacgatgttaaagacggaagaaaaacagccaaaaaaatagtttataaaataagggtcggaatcgacccgttacctgaacaatcagatttaaatatttttgaatcgatgcttaatacatggagaattgaaaatgaatga

SEQ ID NO: 282438 - DNA, 198 bp, Morganella morganii
atgaatgaattaaaacggctaagggataaattaggattatctaacagtgaactttctgaactgatgggtttgtcagaacaaacgataaaaaatcgtatggcggctgattttaataaaaaaaccattagtaaattagaacttgagtttttaaaactactggctggagaacacgaaaaatattccattattgaaaaataa

SEQ ID NO: 282439 - DNA, 177 bp, Morganella morganii
atgaaaagtaataaagttaaaaaaccgtttgatatcccgagcttttcagaatcagtaaaaaaagatttcgaagctggtcttatcactctgaaagaagcggcaatagagttttataaaaacaataacacattttatgtagacatcgaatacacaaaaaaaaagctcggtattaggtaa

SEQ ID NO: 282440 - DNA, 237 bp, Morganella morganii
atgcgcttttgtgatttaaataaagataaatctgattattccattactgccatttttgaatataacggtttttttacttatcacgtccaaaaaaacggcgaaattgaccaggttgtcgagtttgatagtgatgcgaatgttacaagaacatcatttcagaaaaactcagaggaggaaaaagaagctatagcgtttatcagaagggtaagagagaaacatatttgttctgtagtttaa

SEQ ID NO: 282441 - DNA, 135 bp, Morganella morganii
atgtcagataagatgatagcagcagctaaggcatttgcaaagagggaaaaaacgacattcccaattatgagtataaaagagctgggttattttattgaagcgattagaacggagcgactgaaacaagtcaattaa

SEQ ID NO: 282442 - DNA, 486 bp, Morganella morganii
atgcctaatagatatcttataaaaatatttataccctttttagtgttctgtagcgcctcagcaaccgccgattgcttcgaccgcgccggacggtatcacggcatagatccggactacctgagggctatagcgtggcaggaatcaaggtttaaacataacgcaacaaacaaaaactatgatggttctttagatgtgggtatcatgcaaataaacaccaaaacactaaaaagcatacaacgtgaataccctggcttaaccaaagaacgattgatagatgaaccttgtctgaatatctttgtgggtagtatgttgctgaaaagaaatttcaatgcttatggccgtcgttggttatctgtcggaatgtataatgcaggaatgtcaaataaagaaaaagtgataaaaaatcgttataactacgcatcactgataaatcagcattacagagacttaaaggccggtaatatacaaagagtcatgatagattaa

SEQ ID NO: 282443 - DNA, 369 bp, Morganella morganii
atggagtctatcagaacaacgcttaagatccccgctaaggtagcggcaataattgagagtgttattcagcaccgtattgatagcggtgatgtcgatgatgtaccgattaaccggaatggtgttgcaatagagatgatgcggatcggtgcaaatgttttaaagaaaaggattgaaagtaatgatgaaattcaaaaagcctatgcaaaggaatttgaaataatcgctgctcttcttgtatcgtgcgattacttttccagattaaacgcaacagcttgctctaacatagatttttcaaaagataaagataaccctcatcttcaacaggtgagggatatggccgaagcaaaagctaaagaacttcttgcatag

SEQ ID NO: 282444 - DNA, 534 bp, Morganella morganii
atgcaaacagtaaccagtcgattaagatatgtaatgagtgaactaggtatcagacaggttgatattgcgagattaaccggggtatctgcacaggtcataagctatcttttagtcaatgatgtcaaaaaatcttactattcataccagttggctatcggactaggggtaaatcctgaatggctggcgaacggagaaggagaagttttcactccctcgtacacaaaactgccttactatgccagcattaccgatttgaaaaatcacattcccagcctcaaaaaaaagacagctgtaaaaaaatctaaccgtgccatctatagtttcagtcttaacttaaatgaccagtatgtaataatctgtggaatagctccggaatcagaaataaaagtaaaagagtacttttgtctttttgatgatcatcactttatatcaacaacagagatagacagcaaagaatgcctcctttgctgccagatattagagtggagaaaaagtaacctgaaaccagagaatactatgcaagaagttctttag

SEQ ID NO: 282445 - DNA, 339 bp, Morganella morganii
atgggaacgaaaatcatttctctgaaaaccgttctgagaaacgctttttcaaataaaaaatttgttactgcgctgggtgtgacttcattcgctgccggattaatgatgatgccgagcactcaggcattagctgatgatctgtttgctggcggtaaagaaactatcaatcaaacattcggaaaaggttcaaccgttatctggattttgtatattcttgaagtgctggcggctatctttgcttacgttaaaacgaagaacctggctgtgttcggcggaattgctgctgttatcgtattcgtcaacgtagtattcggtattatgcctggttccggtggctga

SEQ ID NO: 282446 - DNA, 573 bp, Morganella morganii
atggatatcaacttaaaaaaatcgtatgaaagaacgttagctgtcacagtcatagttttggttttcatgacgattttatcaataggttttaactataagttatattctgattaccgggctgttctcagtcaactggtcaataacaaacagacaattgtagaacctatgataaatgacgggaaaggattcagttttataggtgaacgcggggatgcccgttatctgcgtttaatggcaatgagttttgttgcattacgtttggatgttacagcgcaaactgttgaacacagtcatgagattttgatttcttacctgggcgaaaatctgagagaaaagctgatacctgttctttctcaggaaaagcaaagattaaaaatcaataatggcagttctgtgttttatctgaaaaaaatcaaggtcagcccgtcaaatggtatcgttgatatcagaggacttcttgaatacagctatggaataaatcccgttgaacccatagaaaaacattatcagttacgcatggaaacacgaaacgggcgactggaactcaccgactttgtggaactgcaaaaatga

SEQ ID NO: 282447 - DNA, 729 bp, Morganella morganii
atgaaaaaaaagatacgaaatattattactctttccctgcttttcctgtcagggagtgttcttgccgattctatatctatagacccaatgcagaagatttccactcagatcagcacagaggaacctaatgttattgcggtttataatgacaaaatagtatccatgacatcaaacagcggattgatactgagcagtaaaaaaacagctgacggcaagattatttttaccactaaatccaagaaacctttcaatgttgttgtggaaacggaaaccggttttacatttacgattaatgtaaaaccatcagccggatacagcggcgcatcactggttgtgtacaacaaacaagcgaaagggaacagcgaagcaacggcatttgaagaaaatagtctgagttattccggattaattacaaaaacgcttacacaatttgttaacggtaaagttcccagtggttttattgaaaccagacatgcaaatatacagctacctgctgcggtaacgcagtacctgaatgttcagggtgttaactcatggaacagtgccagttttgttgtcagtaaatacagggtgacaaatatttcatccggaaccattgagctgaatgagcgttatttgtggactcccggggttatcgccgtcagcttttcccctaatctgaccgttcttaaccccggtgcgggagtggatgcatacattgtgacaaaagggggggattatggccgttaa

SEQ ID NO: 282448 - DNA, 1371 bp, Morganella morganii
atggccgttaatataaactcttttgtcagaaaaaatcagaataaactttttgctattattcttgtggttgcggtaattgccgttgctgctgttttttatatcaataagaaagcatcagaacccaaggcacccaaagcagattttgaggatgaagtcttgctggaacctgatttaaccggtgcggtttcgaatactttcgataacaaagttgacgcgcagatcctgactgattcacagactatggcgagggagaacaaacaggctgtagctgaaatgacccggtcctataacgaagttcagaacaaacttaaagagaaagacaaggaattgtatgatctgaaaaagcggcttgatgagcttgaactgcaaaaaatcagcagtgcaccagttgctcctacaccggttaatcagcctccgttatcaaatgataatgaatcaaccattgaaaggataacaagaggcacatcagccggaaataccactcctcagcagcggatatcttacagtgcgccggtgccggttgccggacagctggaaaccaagacgttttcatatcgtgaccctgcaaaagaatccaaagcaaaagagcggttttacatacctaccggttccttttccaatgcaattatccttgaaggagctgatgctaatgcagccgtgacagcaaaagaaactgatacatcccctatgcaatttaagctgaccggtcagcttcatcttccgtcaaaccagcgttctgacaagctggaaaactgttttgtcactgcggcaacatacggcgatatttccagtgaaagagcgattgtccggttacagcgtctgtcttgcgtcataaacggtaaacacattgatacagctgtaaaaggtcatgtttccttttacggcaagaatggcatcaaagggataccggttatgaggaacggccagatattagggctggctttcacatccggtacgctgggcggctttggtagtgctatttcccaaataggacaaacaacagtaggtatcggggcagaacatacagtatcagccggtgaagttgcacaacaggcagccggaaaggggatgcagagcgcagcaaacaaacttgcggattattacattgcactggctgaacaatatcacccgattattcctatcggctctgcaaaccgtgttgaagttgtgtttcaagagggcttctgggctgaatttctggaggataaagagtctcaggagcaacccggagaaatgacagccgacggctcactgcaacctgatgaatttgaggataattcggacttaccgccggagctggttaatcagctgggtaatattaataacggccagctggatgaatttgttgcccctaataataaaaggaaataa

SEQ ID NO: 282449 - DNA, 585 bp, Morganella morganii
atgaaaaagatccttctttttgtattaccgcttttactttccgggtgtgccggtatgaacagtgattttgagttcagcaaaccggcaaaagattccggctactggatgcaacaagcggatgaaatgacgaacagtgacagcggatcaccggcagtttcagcagtaaacgccggtgacagtaataaatttaacctcagacaatacagactcattaacgttggcaatattcagctgccggttaaatttgtgacacagcaaccggcgggaggatatcgcccggtgccggacgcaccaatcagatcacagtcttttgcaatgaataaccgtccggctatcacaccggacggcaaccggcacgattctgtcagcagaacagtatccggtcagcctccggccagcagaactaccgcatcgtctgtgtgcagtcagcaacgttgttatcaggaagccgccgcaccttttgtcacaccggacaaaattcagcgggtctggattgcaccttatgtctcaccggataataacgttcatatcggtgaaattgtttatttcgtcagtgaggattctcactggttcggtatggagtaa

SEQ ID NO: 282450 - DNA, 2589 bp, Morganella morganii
atgaagctgagtgattttaatgtagttaagattatatctgacttattaggtgaaaaagatacatctaatgaaactgcggaatttttgaaagagcttgattatccgcatatcagtgatttattaccggttgttgggtatgataaagacagcggtatattttataaccgcaactcactcggttttattattgaggctcaacctttaattggagcaaatgaacaaatagttgaaggtctggacagaatattacaaaacaatatccccagagatcacccgttacaaattattttattaggcagtcaggcagtaaaagaacagcttgagtatgggctgcaaaatttctcatggaaaggccacagggcagaagaatgtaataatttaaccaggtctttttatctggatgctgctcagaataattttaagaataatgcagatcatccgctgacactcagggattaccggctgttttttgcttactcaataccggttaagaatgcaaatgatgtttcattaatgaaagtcaaggaaacacgacgttcattaatcagttcattaaacagtaacagcattcattgtcaggaaatgaatataaaccgcttttgtgctttggtcagggagattgttaattttcagtacggaaaattaagtgagtattcagatgagtatatcactgataaatatcttaataagcaactggttaactccggtactaaatatcttgtcaagcacgattatatcgaaataacaacaaataatattcgtggtgaaatgagaaaaagccgttctgtttctatgcatcttgattcaaatccgcatgagcactatttatggcagaatggtaatcttctggctgacctgatgaatccggacagggggatatcctatccgtttatttttaatatgactatatcaacagctgaccagctgaaaagtaacggggaggctaaccgaaaattctgggatctggaaaagaaagccaattcatcctttgctaaatttattcccagcacagtcagagaatttgaggaatggaagaatttaagaactaatctgcaaacaggtaataccgcattaagtcagtatcatttagggattcgttttttctgtccggatgatgatgatttgatgtctaaagaaactgagaaaatcaataaatcatttgaaagtcagggtcttaaaattgtccggagcgactttatgcagatgcgcggttttctggcatctgtcccgtttgcagtgacagacaatcctaagttatggaaagattttatcaccaccggttctgttctacgggctgagacatttcaggccgttaatctgctgcctattattgcagataacaaactgagccggtcaggtattgttttaccaagttaccgtaaccagattgctttccttgatttatttgatgaaagtctgcctaacactaattttaactggtttgaatcgggtacatccggtgcaggtaagtccgttgtttcacaggctatagcccgtcaggttttagacagaaacggtattttatccatctttgatattggtgattcctataaagctttttgtcagagtatgggcggaacatatattaacgggagtaccttaaggtttaatccgttcgccaacattactgacatagcgatgagtgcagagcgtgtacgtgatcagctcagtattctggcaagcccgaacgggatgctcgatgaagttcatgaaacactgatactggatgcaataacagaacagtttcctgaataccagcagggaatgcgcattgatcatgttgttgattatctgaaaaaacaccggaaccgtatacatgatcagcaggcaacccggataacagaccggatagacgaaatcgttctgttactcaccaaatacacgacaaaaggtatttacggtgagtttttcaactctgatgaaccgacattacgtgatgatatgcagtttgttgtcacagaactcggagatctccgttctaacggtaatttgctgatggctgtattgtttaccctgatgatctggtcagaaaatatgatgtaccggactgagcgcagtgtccggaaaatgaatattattgatgagggatggaagttactcagtgcgtccaacgataaaataagaacattcattgaagaaggttacagaacagcccggcggcataacgggtcatacgggactgtcactcagtccattaatgataaaaaccttagcactgcggctctggcttcctacaataatagcagttttaagtttacgctgatgcaggatgctaaatctttccaggcatttaaaaatgaagaacctaatgccttctcagaaatggaatttgagttaatcagtaaattccccccggccagacaagccggttacagttcattactggttaacgtgggggaatacagcagttttcacaggttattattagacccgctgacaaatgcattattttcatcaaaaggtgatgattttacatatcgtgaaaaacgcctgaaagaaggtgctgatattaaagatatcttatttgaaatgtctgagcgggataatggtgatctcgtcagatatctgcggagtaaacgctatgaataa

SEQ ID NO: 282451 - DNA, 351 bp, Morganella morganii
atgaataataaaatgaaagctttctttattattaatacactgctgactatcggctgtattatttcggttgttattttatatttaagtattcctaaattagcagtgtttgatatgaaaggaactacagatacatttcttaatcaggtcagtaaactgaacctgtctgattcagaacagcaggggttaatcaaaaaatatgagaaaagccttaatgctgttattaaggatgaatatcttgataaaaatacagtgatatttgtcagtggggcggttgtcagtaaaattgacgatgaaacaaagaatataaaatccggattagcaaaaaaaatgaaaggtgacagtgatgaatag

SEQ ID NO: 282452 - DNA, 624 bp, Morganella morganii
atgaataggacattaatcattacactttttattcttctttttccatccggtataacagctaaggaactaggttcagctggtaacgtctggaaaataaaagagcgtaatcttattactgtgatgaaagagcggttagcccaaaaattcaatggtcagactgatgagcagatacaggaagaactacgccgccgtaccgaagaacggtcgttacgtccggcaccggttgccggtatcacccgggccactgaaacagcggtacattactttgacccttctttcactctgacgaaagacatagcggatgataaaggcgttgtttttgccaggaaaggtgaggttttcaatccgtttgatatcagcgggtttacccagactcttgttttcattgatggtgatgatccggaacaaatcacctgggttaagcagtttaaaccgaaaacaatacggtcaaagataatcctggtaaacgggaacatcaaagataccgaagaactgctggatacccggatttattttgatcagctgggtgaacttacgggacgttttggcattaaacgggtgcctgcggttatagaggatgccggtgataataaaaatctgagaataacggaggtcggtttatga

SEQ ID NO: 282453 - DNA, 999 bp, Morganella morganii
atgaaaaaattactggctattctcactattgtgatgaccggtatcttattcacacggccagccgctgccggtgtactggagtgtgagggacgctggtttaatcccataacagatgtctgctggatgtgtatgtttccgatgagtctcggcagtgtcaaggtcagtcccagcattctgccggacacatccaatccggcatcacccattcagttttgcccggcgccgccgcctatttttcagcgtatcggaattgctatcgggttctgggagccgttcgcaacggttgatgtgacccgcgccccgacctgtatggtcaatatgggcggttttcagatcccgataagtaaagtcgggacaggtaaggcaacaaaatcagccggtgattccacaggaacattttaccatgtccactggtataaatatccgctgatatcctggctgaacattatagaaagtgctgcctgtatgcagggcggggaatatgacattgcttacctgacagagatagatccgatgtggaatgacgatgagctggcgttatttactaatccggaggctatcgtattcggtaatcctattgcacagctggcttgtgcagctgatgctgttgcgtcagaactcgggatgccgttagacccgcttttctggtgcgccggtgctcatggttcagtatatccgttcagcggcagtatcaatcatgaaagttccggcctgaacagttctgttcttatggccgaaaggatgaattttaaacttcaccggcaggggatcattatggactcaatcggggctgacagggctgtttgttttgaatatccgcagccgatagtaccgaaaagccgctaccgttatcagctggttaatcttgtcccggatgcaatgcagtgtcacccatacgggcggagtgttctgcgctggcagataggaaaagaacttccgacaacaaagaaaaactacggttatgttatctggaaaaaacgtaactgcgttattttatag

SEQ ID NO: 282454 - DNA, 423 bp, Morganella morganii
atgaaaaaaataattgcattactgttatctgtttcattttcctgttttgccggaaacgtatctgaatcaccggcaatggaaagtaatcagtatgaaactgcatactttctgtcggcctcaatacctgaaaaaacactggcttcattaatccgttcagctgagagcagaggtatacctgtttatttcaacgggcttattgatgacagcgtagataaaacagccaagtacattttatatcttgtcagaaagtataaaataaatggcattgaaatagatcctaatcgttttgaatactacggaataaaagctgtacccgcattagttaaacgctgcggggaaagatttgacataatttacggttcagtagcaataaaagaatctcttgaactgattgagtctgagggggaatgtgccaatgaataa

SEQ ID NO: 282455 - DNA, 1827 bp, Morganella morganii
atgaataacagaaaaaaaattatgatttctgcttttattctcagtgcttttttatctgcatcagtgtcagcggataagatgcgcgattcctcaaaagaaggtcacgacctcgggaaatcatcattgaatcaggcaaaatcatctatttcagattttaagcccgccgaagaatttgaaaattttaatggtaatcctgatgaaacccggtatcagaataatgatgccggactgagtaacgccggtaataaagagctttctgagtctgagctgggtaaaacggccagagaaagctttatcaataacccgaaagataaaatttcatgggacagtgatattctggttaacgctctggatataaaaaataaagctgatgtgatagctggcggttcatcggaagaatgtgtaaagcagacacagaatgaaacgtatttcacgaatcatatttgtgaaaaagaagaaaatataaacacaacctgtaccaaaaaagcggtggttaattttaaagaaaaagtgattgtgacaaaagaaacaaaaacatgggcgttcggtgacggtggccgtaatcctgatcattattcccgttcaggtgataattttacgtatgttttcccacatgaaggtaaaataacaaaagcaacttacagttcaaaaagtacatggggtagaggagctacagtcacatcaaatatactaggaacatctattacatataatactaaaaatgctaccagcggtcagttctggccgaataaagttaattttaaaaagggagaacattttgtagttacgcatcccgggagttacggttcagtgcagagtatcaccagttatcccctgcgcataactctgactattgaggtggaaaagaaagagattattcatgaaccctatattgtatgggttgaaaactgcccgattgataaaggtgaagctgttaaaataaaagaatggtgcagtcagaaaggtgaaacacgtaagtttgtaaaagatggtcgtcagtatgaagtatacagcgactgctgggaatactcggaagaatgggtaatcaatgatgcggatgacaatacctgtaagaaatatgaagatgatcctaactgcacaccgggtgaaagaaaatgtctgctgaaagtgggtaacagctgtatccgccatgaaattaaatatcagtgtcagcatactaccagaacggaggggtatgtctgcggcgggaaattttactgtgatgatggttcctgcgtggataccatcggcagtgagaataacgggtttgctgatgctgtaagtcagttggccgcacttgctcaggccggtaaggaaatggccggtctggacgaacagaatatgagagcgttcaccggtaaggctatgcattgccgtaaggccgcagccggattcagtaactgctgtaaatccagcggctggggtaatgatatcggtcttgcaagctgtaattcagaagaaaaagcgattggtaaagcaaaagaaaaagatattgttatatcggtagggacatattgctctaataaagttctgggtgtttgcttacagaaaaaaagttcatattgtgtttttgataataagcttgcgcggattgttcagtcagaggggaggctgaaacagctgggcattggtttcggcagtgcaaaaagcccggattgccgggggatatctatttatgaattacagaatttacggtttgataatatggatttttccgatttctttgatgaactgaacagtaatgtttcacttcctgatcaggataaattactgaatgaaattaatcagagggtacaggataagtttgaggaaggaatgaaaccatga

SEQ ID NO: 282456 - DNA, 777 bp, Morganella morganii
atgaaaatgatttcagctgcttttatattaactgtgtttatcatcagcccggtaagggctgatgtaaaaacgactgattatgatgagccggtcagctggcagttttataatcttcctgaaaaaaaagaagttaaagaaaaaccagtaataccggttaaaccggcggaaagtgaacaagaacaatatatgcgtcagatgaaagcagtgcaggaaaagatggaggcggcaaaagcaactgcgattatgaacccgacaacgaaaaatattgctgtttataaaacatatcaggattttttcaccgaaaaagccagtgttttttcatctcagtgggaaaaaaccttactcgaatatcctcatctggattacaacattcagaactcacattacaatgcaacggcagcggtaaaaacagcgaaagagcgagaggaacaagccgctgctgttaaaatcgttaatcagcaatacgggatattctttttttaccgtggcagtgaacctctggataatcagctggcaaaagtagtaaaggagttcagtcagcaatatgaattagccatcattccgataagtgtggacggcagaatatccgctgaatatcctgaatcaaaaacagataccggccaatttgaaaaaatgaatgtccggtatctaccggcgatctttcttgtagaaccgcgaaaaggggattttaagccattggcttacggcttcatttcacaggatgatttggcgcgaagaatgctgaacgtggtgacagattttaaaccaagaatctga

SEQ ID NO: 282457 - DNA, 549 bp, Morganella morganii
atgaaacataaaattcaggcgtatcttttatgcgccgggctgattttcagtatcaccggtcaggcaacaacattacaggaaattgaattgcttgaagcgaacaaaaatgaaactttcagtcagaaagggcattcagatgtacctatcagggaaaaaagatttatccgtttatctaccggtaaagaaatggatatttcagcatggcagattgttcactttataaaaagtgactgcccttattgtcaccagtttgatccgaccctgaaacaaatcagtgaaagtctgaatatgccggtattcgtttacagtttcgacgggatgggtgatgcctcttttccggttgcataccctgtaaatgatgatgttctccggacgttctttgcggaaatcccccgggccacgccgacatcatttctggttaatgtggatacactggtgacagttccgttatcgcagggagctgtatccgccaattcatttttacagcgcctcgatgaaagtttcatcctgattgaccggctgcaaaacgaagaagggatcattgaatga

SEQ ID NO: 282458 - DNA, 1362 bp, Morganella morganii
atgaaatatattaaaaagaaaatatccttactgctgacttgctgctttttatctcagccggtgaacgctgacgttaattcagatttaaatgatttttttaacaagctgggcggcggctctaatgttactcaggctggcgcatggcaggggcagtctgccggatatctgaccggtggtgcgctgtttgttcgtgtaccggttcgtaatatccagctgatatctgtcacactcccggatgtaaaagccggttgtggcggtattgatgcttatcttggcgcgttttcctttattaacagtgatcagataaaagcaatggcaaaacaaatcctcagtaatgcgctgggctatgcgtttgaccttgcacttgaaacaacaatgccacaggttaagtcagtcaaagattacttacagaggctggctcaggatatgaacagtctgaacgtgtcaacatgtcaggccgctcagggtattgtcggcggacttgcccctaaaacgcaggcaaccagtgagtttatatgtcagtcaatagcccagaatcacagtgtatttgcggattgggcggcatcccgtcaggggtgcggagccggtggtgaaacggataaagtctttaataaagccagccccgaagaacagaaaagaatcccgagaaataaaaatttaacctggtcctctttcgataagatagggcagtttatttccaatgaccgggagctgaaagagctgatgatgactgttgtcggaacagttatctatgataacaaggggaatctgaccatcattccttcactgggggcaaatgattcactgatcaatgccctgttatacggaggcgagactgaaatttacagatgtgatgatacatcacagtgcctgaaacccaaaaaatcagatttaaccatcacagcgaataaggctatggttgaacaggtgagagtcacgctgaaaagtatttttaataaagtcaaaaaagatcagcctcttgatgccaaagaaaaatcatttatccagagtacccgtattaaaattttacggtatatcattgatacagcatcactgaatatggatgaatcatttgttaccaatctgtctgaatatatagctcttgatattactctggcctatatcgacggacttatcgataccgtagaaatggccggtgctggttcattaaacagcgaagaagaaaataaacaatttcagggtaatttagccagcgtcagggaaaaactaggtcagcggctgagtaaaatccagataaagcaaaatgcatttctggacgcagataaccagttaatgatgttaagaaagcagttatctaactctgtttcgtctcagatgatgcaaaactactcatgggagtaa

SEQ ID NO: 282459 - DNA, 2817 bp, Morganella morganii
atgtcagccccattagagattacggttctgtacggtgttgatattgtctatcagacgtttcaggccgtagccgctattatgcagaatgacggataccatactttattattgttagctgaaagtattggtgttgctgcctgtatcgttaaatatataaaaactcaggatctgagaacattcggtctgtggggatttctgttcgtggttgtgtcagcggtacttctgactcctacaaaagatgtggtgatccgcgatctggcaaccccggctgtcgttaaaaaagtggataacgtaccggtcgggctggctgccccgttctggctgataacatctatcggaaacggtactgcgcgtatgtatgacacattctttgcgcagccggatgaactgcaatatacaaaaacagggctgctgtttggtcagaagttattgcaggacagctatacgctgggtatccgtgatccggaatttaatatgaatttcggggattacaccaataactgtattgttccggatatgcagctgaacaacaaatattctgtatctgatttgttcaatgacaataaggtttatgaaagaatattttcaaatgccagtccggtcaggggaatattttataaattcgccggcggcggggatgcgcagtacatgacctgtaaggatgctgcggccagacttttacctatccttgagaaagaggccggtaatcctaacagcgcgacgctgaaacagttagccgggaaatatgctgttggtgagaacggccagacaaataatgttcttttaccgagccggattgacagtgtttattcaaacatgattggttcaagccagggggcagttgatattcttaagcaaaatattgcaaccaatgctctgagacattccctcagccagtatccggctgctatggatggtacggctgacctgataaataacgcatcacagcaatcgctgatgaaaatgaagctggcacaattatccagttatgaaattgccggtgaaatgctgccgatgatgcatactgcatttttaacgctgatgatcggtattttcccgattatggtgctggcgttatttgttaaagaattatcatgggcggtggtgaaaaactatctcaacgttctggggagcctgatgttatgggctgtaatgtttgcgatttttaatcacgtcattaatacattatcggctcagacactacacggaaaaagtttctctctttctgttatggatactgaaattaaaaatgcaagctcactggcggggtatgccagctggcttatgcttaccattccgtttatcagtatgaagttgtttaccggactatcccagcagatagccagtgcaggatcatatcttggtaatgctttgatgagtgccacatctgcggatgccgccgctgtttctcatggtaactacaatatgggaaatatgagtctgcaaaatgttaacggctttaaaacagatttaaatcagtcttaccgggccggtatgagcagtatgcagacagaaacaggggggatggtcactacaacagaatcagggcaggtgatttatgaggctaatatgtctaagcttcctatgaagctcgacacatcttcggttctggattccagcttcagtaaggcaatgagtgcccagcaacgggaaaccgcaagttaccaggaaggctacagaagctctgtgactgatgcttacaatgcggccaccgctctcagtaataattttgcaagaagcggtgatatggaatccggtttaaccaaagaacagcgtgattctattgagcaagtcagacggcagagtcaggaagcacaaaacagccagagtagttctgactatacaagtagcgataaccgaacatattctcaaagttcagatagcttcggacttggtgcaggagcgtcagctggtgcaggggttggtacagacggaagcagtaaggttaaagctgatctgaaagctggcgcggatgcttcatatcggcatcaatggactgatgttaatgaggatagcgcagggcatggtaacagaacatctgaggataaacgggtatcagaaaacttctctgacagtaaatctgctcaggttatcaaaaatatgtctgatagcgatattgcgcgaatcagagacagcgaaagccggtcactggtatatgatttacgctccagccttaaccgcgccagtgaaaattatgccggttacagtgagagcctcagtaaagagaaaacaatctctcagcaggctaatctcacagagtcaagccgtctttctgcatctgaatctcttgaacatgaatttgctcagtttgttacccgcaaagagggtaaagaaaatgcaatcaacattctgacagacgcaggttcgccggagttaagagagcggcgggaacaacttaaagatgagtttacggataaaatagccagcgatattaaaaacggacattttgataatgaagccaaggttgtcgccagctataacggtatgagtgtacagggtgatgccggtaaatatagtgctgccgggtataaagaaaacagtagaaatctcgcaggtaaggccaatgaaggggggattatccggaatatcactacaatggatattgacggaaatcgtcagcaacagtcactcgttgatgggattaattacagtatgagttcagatgggcaggcaagtcaacaggagcaggctgtccgtttaggtaaagttgcagaaagtagtaatatggctgatgtgcataaaaaagtagctgaaaataaaaatgaaattgcagaaaggagaggtgaaaacaaacatatatacgatgataaatattaa

SEQ ID NO: 282460 - DNA, 504 bp, Morganella morganii
atgaaatttataacatttgttatgttggagtcttttgttgcggtgttatggttatttgtttttacaaataacgttatggcgattttattggtgattttgtgcgtgtcagcatggtttgggtatttttcaaagtattataggaagtcgcaaagaatcacaaaaaaaatgttgtctttttcttttttagttggggttttgttcatggttattggcgggagttttacagtatccatgaaagatacaactaatttcttatatcaaccggtaataataatatcattgttatcactattggttaatctgttttgtttttttgttataaagtttaacttgaagatttcaaaaggtagtagggaaatggagaatatatctgtttatgataaagatataaatccagcaacaggtttacctatgataaatggtatggattccgctggtaatccttgtggtagcgatttttccagacaccaccaagataatatgagctgggagcaacaaaaatga

SEQ ID NO: 282461 - DNA, 2058 bp, Morganella morganii
atgagcttagatgcaagaaatatgacgcaaggcggtcaggtcattaagtacatgattaacatgttcttgcagataacaaatatagttgcatattgggctgtgttagccgggtttacggccttctttggttatcttatttttgcaacaaaatggatttattttaaacatggggtctttttttactatataaaatgggttgttgctggttttggtaaaatcaatggtgacggaaatctggctaacaataaaaccatttatagtttctcatgggaaaattcagcaggaaaaatagttgaatttaaaagaacagcaggacagatattacaggatgaatattttctccgttgcgctgaattattgaaagaaaatgcaatggtggcatggggcgttggccttgctgcgtttcttggtgttctgtttgttgtatttaaatatcttggcagtagaggtgcggcacaacgtaagaacgaaattatgggggggcgttacctggctaaatcgatcaaagaggttaatcagtttctgaaagataataataaaaaatcagatttaaaaattggtgatctccatatggtcaaagacagcgaacagcaaaatattgcattacacggtacagttggtacggggaaaagtacaataattaatagctttcttgaacaggtaagaaaacgtaatcagcgagctgctatttatgataaggggaataattttattccgcttttttaccgggatggaaaagacgtcattcttaacccgctggatatccgttgtcctaattgggatctctggctggaatgcctggaccgttctgattttgaaacgttcgcacttccgttggttccggagggaaaaggtgatccgttctgggtgatgtctgcccgaaagctttttgtggccactgccgaaaaaatgcggtcagacccggaaaggtcaatacgtaaactgcttgataacttagtgagtatttcactggaagacttgcaggaatacgtaaaaaataccgatgcctcaagtctggtaagcggcagtattgaaaaaacggcgatgactatcaggggggtgcttggtgcttatgtaaacgctctgcgttactgtgagcatctgggggacggtaagggtaagccgttttcaatccgggaatgggtacataatgcggatcaggatgcatggatatttatttccagtgacgggcgtttacatgcttcattaaaacctctgataagtacctggctgaatattgctatgcaatcaatactggcattaaaccggagtcgtgaacggcgtatatggacgatgctggacgagctggcaagcttacatgagctgccgatacttcctgagtatatggctgaatcccgtaaatttggcggtgtgacccttatcggtgtgcaaaactttgctcagttagaggatgcgttcggggtacagaaagcaaggtcaatctgggatttatgtaataccacagtctatttccgtgccccgtccggctatatttccgaatgggtgcaaaaagagctgggagaaattcatcatctgaaattccaggatcagtacagttacggggttgatgctatacgtgatggtgtgaacttctccaaacctgatacccgggaaatgatagtaagctattctgatatccagaatcttaatgatctcgaatgctatgtttcattgctgggtgatgtaccgattgtaaaagtttcactcaaatataaagattatccggttattgcggaagggaaaattgaacatacttcttttgattacagtaaaatagaaaaagaagacgaaaaatttgaggatgaatttattgataatgttttaaacaaaaaggataagcctgacggaacaaagaataaaaatacacaacaggcaaacacaggttctgaggctgagataaaaccacctgttcagattaaagatacaccagtcaataccggtgaggaaagtcattcctctgttcgggaaaatgaaaaagataatgaactgaataagaatgaacctaatattatccggcataaaaaaatagaactggatgatgatttagggttgctttga

SEQ ID NO: 282462 - DNA, 4950 bp, Morganella morganii
atgctttcattatcaaaaataggtaactcagccggtgctgccagttattatgaacaaaaagataattactattttttaggtgatgctgccaccgaatggtttggtaaaggagcttccgggctgggtttaaccggcaatgtgaaacaacaggactttatcaacatacttgacggaaatttgtctacaggtgaaacactggcgcatatggttaacggaaaaaataagcatcaggctggttgggatcttacattttccgcacctaaaagtgtttctgttcttgctcttgttaatgaagataaagcggtgctggatgctcacagaaacgcagtgaccaagacacttgctatgattgaaaatatggcatcaagtcgtattatggagaaagggatatccggagtagaagaaactggtaatatcactgctgcattgtttattcatgatactaaccgtaatctggagcctcacctgcatactcacgcaattctggctaatatcaccgaaacacagtcgggaaaatggaaaacactgtcaaactctgtaaaagaggatacaaacacatttgtaaaaacaatttggcaaaatccggtagcattggggagtatttaccgccagttccttaaagctgatcttaaagaacaggggtacagctttattgaagccggtaaaaacggtcagtgggaaattgccggtgttccgacaactgaattttcaagccgccataaagagattattgattcagttggtgaaaatgccacggcaaaagaaaaaagcgttgctgccaaagatacccggcaaaaaaaagatttcacgaacatagatgaggtcaggaaagagtggaaaaaaactctggaaggtacgggatttaaccagagtgagattaaatctaataatacagaacaactgaatttagaagtggctgataacggagatataaaaaaaatcatccgatctgtcattcatggtcttgaaaaacaatccgcaaaattcacgtatgacaaattactgagtaacgttattaattcattatcaactgaccagttcagtgatttaaagaacttacgggaaaatataaagaatgaaattgattctgggtatcttgttccgctcaataaagaaggaacattacatacaacaatttttcaccttaaaaatgaaaccagcgttgtaaagtctgttacccagctcaataataaggattcattgcttaagacacaggataactcatcattgagcagatatctgactgcggataatggtagttttaaatctgtatccattattggaggtggttcatttctgattagttcagtcagtaaaataggtgagttggctactgagaatgaaagacaacacataattatcgcgccaagtgttaaagtaaaagaatttttgaaaaataaccttgaaaaaaataacactgttcttaccgtcaatgagtttttaaaagatggtggcgatacaggtaaaaaactaatttccctctatcagtctgagaatatgaagctggatgcagtgaatgatattttaaacaatgaaaagaaaaatgactcagtgatagtgtcaattgatacaaaaacaaaaaatagtgaaggattatttacggacgtgctcagaaaagccgaagtggataatttcatggtaattgataagaatgaaaataaaaaaacatacttcattaatgatgttgataaatctgacagggttaatctggctgcaaaacaatacatgacattatcactgaacaataaagatgcgatcattcaggttagtgatgacaaaacaaaaaacatggttaatgaacaggtcagaaacacgcttaaagataacgggtttctatcggataaaaaaatcactataagaaatgaaaacagagtttatcttgatgagtcaaaccgtaatctcaggaatacctataaaaagggttttattgttgagaatattaaggataaaacacgctcagagattattgaggttgataaatccaataacgtactggtgctgaaaaataatgacggtaagctgtctcagctgcaaatacccggtattaatggtgactataatctctatgagccgaaaaatcttgagttgcgggaaggtgaaaaaattaaaacctataaaggttttggtaatgtagagggtaacagctctttttctgtggttgcgattaaaaaaggtaattttattttcggggacagggttattatcgaaaatgatggtggtgaaaggactacaattaatcccggaaatgtcaatcagtttcactatggttacagtgaaacattcggaagttctgttggtaaagaacgaactgtaattgctctgatgaatgaaaaagatatcagcagcacaaatctgaataaaataaaacaaagcggtgatacgattattgcaattaccggtattgacagagaaaaaacggaaatgaagctgaataaagccgatatcagtatcagccatatacccactgtgaatacaaatatactggaaacactaaagactataaataacctgaaaaacgacacaatcagtgatctggataaggcactacagttaggtattgataaagcaagcagcggaaaggttttttttaacagtgcagcagcaatgatgaatgtcgctaacctcaatactgatttcagtatgagcgatattactgatgctatgagcaggatgatagaacagggtgagcttattccgctgaccagtaatgcactgaccgataattttatccgtaaagaaaccctggataatgaagttgcgattgtcagaaaaatatttgagggtaaaggcactgaatccccgcttctgaacggaaaagttaattttgataatacacatctgactaacagccagaaggccgccggtgagcttatcctgaaatcaaaagataagattatcgctatacagggctatgccggtgtcggtaaaacaacgcaatttaaaacggtggcaaaaaccctggccgctaatcgtcccgatattgagttgcgggggcttgcgccgactcacaaagctgtatccgagctgaaatcagcagggatcacatcacagactattgccagctttatacaggatacggccacgggtgaaagcaatcagaatttcagtaattcagtgtttatcatcgatgaaagttcaatgacaggtaacaaaacgatgcttggcctcatttcagtaatcacagaaaatggtggccgcattatcctgtccggggataaagatcagctgaaatcattcgatacaggttctccttttaagctgactcttgaacgcagcgcaatagaccatgtggtgatgaatgaaatagtccggcaatcaccggagctgaaaccagctgtggaagccattataaaggggaatcttgcggaatcccttgaggtcattaaaaatgttcagccgggtattgtgccgagagaaaacagtcagaaaatgccggtatcttctgttgtaaacctacgggggattgagcctgaaagatacacaggaatgatcgttagtgattatatgagccggacagctgaggccagaagtaatacgatgattatcacgccgataaatgcggacaggaataagataaatgaggatattcatgctgcattaagcaggagcggtgacctgggtaagagtatcactgtaccaacattacagcgtgtgaacagtcaggagtatgatctgcgtacacaaaaattctggagtgataataatgatggcatcgtgaaaattggtgatacttatcaccggattgatagtatcaataatgaaggtattatttcattagttaacacagaaacaggtaaagagtcatcgttatctttgcaggaacttgattcaagaaaagttgcggtatatcaggaacggaatattgaaataagccagggggaaaaaatcaggctgacagtaactgaccgggaacgtaatacattcaataatgatacaggtacggtaaaatcaatagacggaagcgtaattaatgttgattttaatggcaaagaaatcagtttttctccggctaaaaatatggcggaaaggcatctggattattcttatgcgataacatcatattcatcacagggggcttctgttccttacgttattgtttatgatggtgtgaccggcgggaaaagaaatttaactgcacttgataacacatacgttgaattatcccgcagtaaagaacatgtacaattatatattgatgatgctaatgaatgggcaaaacatatcggtaatcattcaggggttcgtcacaccgcacatgatatactgaacaaagctgataatattgccgctgaaaaagagctttccgcatggagcgaaagtaaagccatatcgcggggactggcagaaaagcttcctgaaatgctggttgatactgcccgttatgccggtaaacagcaggaattgttacttgccgtacataatgagttcggtgtacaccgtggcaattaccatatacctgtcggggtttttacaggtaacattgatactgataatgcctattacagcggagctgctgatggccagataattgtattaaataaaggtgataacaatctggatactgtcacctacaataaagatgaatttgataaagcaatccattcagagaaccgtgaaaatgccattgttattaatcttagtgaaccggaacagataagttcaccggatgaattactgacaaaagaagatattacaatcgctgaggtgcttaaagaaatgtctgtaaaagactctcaggaagatacagattttacaaaagatgaacaaaaagaattacttcttgatagcgggatagagtcactcaaagagattgagaaagagaaagatattacagccgaagctgaaaaagaagcagatattactgacaacaagcagattcgtcatgatgaggaaaatatactcagacacaatgaaaaagaattaatcaaagatatagatatccagatttaa

SEQ ID NO: 282463 - DNA, 207 bp, Morganella morganii
atgaaaagtaagcttgagtggttacagcagttacgccggtgcagttgtgatgatacactgacaaaggtcagtgaaaggattctcagtaaactgaccggtgatgaacgagatcggtttctgatggcatacgaccacaggcaggccgaaatagtaatgaataaactgtatgacaggattccggtttctgtctggaaattcgtcaaataa

SEQ ID NO: 282464 - DNA, 471 bp, Morganella morganii
atgagcgaactgacaaaagaacaagaatacgaaattgtctcatcgacactttcaagtctgacatcactacgtcgtttttgtaattcaaagtcgtatgactggctggaagaagtcaatgaaaagcttatgggacttattgatgaacgccgtgaagatgaagaaaaacgtaaagctgaattagaggagattgaaagccgcagactgaaagttatcgcatttgcggaagaattaggtctcagccctgatcagctgacagtttctgtttttgagcttgagcagcaaccgggaaaaaaagtaaaatccaaaaaaaacaataaaccgaaataccgctttacagacccggataccggaaaaactgaaacctggacaggtcagggaagaaagaaaaaaggattacagaaacttcttgatgccggtcacagtattgaggaatttttaattgaaacagataacagtaataaagactcataa

SEQ ID NO: 282465 - DNA, 594 bp, Morganella morganii
ttgaaacagataacagtaataaagactcataatctcatattagcattaatattttttattattacactgcccgtaacagggcagtgtaaacctttattcattggtgattcactgacatatgaactggcggtgagctacaaaaaccgtgcgccggttgatgctcgttttctggaaagcacagggttacaatcagtaaaattactggactggcaaaattatatacaggaaatgaatttcaggaaatacgatacgatttatgttgttcttggcaccaatgatctgatttctgaaagagagttaaatgactatcacaaaaaagccagacagtttatccgtgtgattaaaaaacaaaataacaatattgtctggttactcccaccaactttggaaaataacagaaaaaatcaaatgctggataataccagagctgcgattatcagtgctgcggccaaagaggggatcagaacattagatatgagaagcgcacttggagaacattatgtttccagtttaaacggtgtgagaatcagaacaaatgacggcattcatataacaagtcaaggtgctaattccgttataaatatgtttaattga

SEQ ID NO: 282466 - DNA, 705 bp, Morganella morganii; identical to SEQ ID NO: 8686

SEQ ID NO: 282467 - DNA, 441 bp, Morganella morganii; identical to SEQ ID NO: 191886

SEQ ID NO: 282468 - DNA, 852 bp, Morganella morganii
atggccgctaatcttaccgagactgctatacgtggattgaagacaaaaagtacgtcgtactacgtgtggagcaacagcgctcagcgtggcaccggcagacttggcgttaaggttcagccgtcaggcagcaaggttttttatttccgttactacgttgagaaagggaagaaagagaagttcatccagttgggcatctggcctgagatgaaactagtgacagccaacgagctggcgaaaaagtatggtgcctggcttgttgaaggaaaagaaccccagcaagagcttgagcaacagcgcctggccgaacagcacattatgcagatccatcgttctcagggatcatttgaagagctggtgcatggctacgttaacaagatgaaactcgacaacaagcggacctgggccgatgtgctgaagcgtcttgaaaaagagtgctattcagtcattcctcgcgagaccaaagcgaaggatgtcacgcccttacagattaagacgatcttgtctggcatcatccagcgcgatgcagtggtccatgcgaatcgaattcgttcctacctgatggcggcttttaactacggtcttaaagccgataacgatccgatgaataccagcgtgggtattacgttcggccttgaagttaatccggtatcggctataccgaagcagtcctcggcggagaaagtgggtgatacatggttaacgctggaagagctacgttttgtcatggaacagttcgctcaggcaactaacgttgggccgctgatgcagcacctaatccgcttctgtgtttatgctggcgggcagcgcccgtttgaaatgattgccagccagtggaacgcgattgactggtag

SEQ ID NO: 282469 - DNA, 273 bp, Morganella morganii
atgtatttccgggcttttaatcctgagtttaaagttttcacagcgcgagatttacgtcgcatttgtaaaacgctgatgggggaggcggggatcagcaaagagatccgcgaccgtatccagaatcacgctttgaatgacgtcagctcgaaacactatgatcgttatgattacttgcctgaaaagcgcagggcgcttgagatctgggaagatagggtcaacaactatcagcgacaacaggaaaacaacgttgtgaacttgtttggacggaggtaa

SEQ ID NO: 282470 - DNA, 615 bp, Morganella morganii
ttggcaaaatatgagcttaattcagcagaagagcggtatcaaccgggctctggagacctggtgctggctaataagttagggatcactgatgaagaggaaatggaggcgctggaatctggcctgctgctgatgctttatgaacagctatttatcgaaggccagccgccagcggcgctggcttttgaacatatcagtggctggcatcgtcaatggctggggaatgtgtatgattgggcagggaggttacgcaatgccaacctgactaaagacggttttcagtttgctgctgccgacaggattccgctgcttcttgctggtttcgagaggcagtttctctccaggtctggtgaactgaaatccatggctcgtccggagctggttagttatctggctgaatgccacgtggagtttattttgatccacccattcagagaaggtaacgggcgtctgtcgaggctactttgcgatgcactgtcggttatggcggggaagggcttactggattacagcctgtgggatgagcacaaagcgttttacttcaaggcaatacaggcgggtgtctcagggaactacagccctatgatgcaactggtgagcgatatcttgccagattaa

SEQ ID NO: 282471 - DNA, 159 bp, Morganella morganii
atgacaaaaaaaacagcatatagtcagatcaccaagactcaaatctaccgcgccgttgccagctcaaccgcgatcgaaaccggtgcttcagtgcaaaaaattgagcagcaactcaaaaaaaatcaggcacaggcgaaagccgttggcctcgcccgttaa

SEQ ID NO: 282472 - DNA, 708 bp, Morganella morganii
atggctaggccggactggagcgagctacaaaaacagttcctgtctgaccatgccgctacagggatatcaccgaaagagtggtgtgagtctcaggagttgaattacgcaaccgctcgcagacatatcaaaaaaccaactgcgcagaaaagcacgcaaaccgaaacccgaccagtgcgcaatgcgcaaaagcgcaaagtaacaaatcatcctccgtttgcactgggtaacagagccgcagttaagcactctggatattcaaagtacatgcctgactctgacgagttatttgaggatgccgctgggctggatttaattcaggagttactttttatccgtgcgaggacgctttcagtaacaaaggttcttggcaaattgcgcactgactttgagtcggcggaagaggccgaagtgcgcagcgaaatagcgcggcaactggttaatacggagcaggcattagaccggaatattgcccggatagagtcgctggaacggactatatcaacgcttggtctggataaagaaagcctgcttaaaattatcgcagatactaaataccgcaaagcagcaacgaacaaaattaatcttgagtccgataagcttggtcgcgagttggctgaagatgatgaaagcgataccccaacaccggttgcgataaatattaatgtggttgatgcgaggatcagagaagatgatagcgccgacccttaa

SEQ ID NO: 282473 - DNA, 1293 bp, Morganella morganii
atgatagcgccgacccttaatatccctcagtcacgttttttggctatgccacacaagttcagagcgtatgttgccgggttcggctctggtaaaacatgggttgggtgtggtggtatctgtaaaggcatgtgggaacacccaaggatcaaccaaggttatttcgcaccgacctatccgcagatacgcgacatattttacccgaccgtcgaggaagtggctttcgattggggcttaaaagtcaaaataaacgagagcaacaaagaggttcacttttacgagggtaagcggtatcgcggcacgacaatctgtcggtcgatggagaagccggagacaatcgtcggattcaaaattggtaacgcgctgattgatgagcttgatgtcatgaaagcggataaggctcaaaaagcatggcgtaaaatcattgcccgtatgcgctataaggttgacggactgcgcaacggcattgatgtcaccaccacaccggaaggctttaagttcgtttatcagcagttcgtgaaagctgtacgcgatagacctgaactgacaacgctctacggtctggtgcaggcttcaacgttcgacaatgaaaagaatcttccggctgattacattccttctctgatggattcttacccgccagagctaataaaggcatatctgcgcggacaattcacaaacctgaccagtggcaccatctatcacacctttgaccgcaggctgaataacagcgaggaagaagagcagccaggtgaaccgctgtatatcggaatggactttaacgttggaaaaatggctggagtggttcatgtgctgcgccttggattgcctcacgcggtaacagaaatcatcaacgcctacgatacaccggatatgatccgcattatcaaagagaggttctggctgtatgccgatggtgattaccaaaaggtgcgtgaaatttacatctaccctgatgcgtccggggaatccagaaaatccaataacgccagcgcaacagatcttgctcagcttcggcaagccggatttaacgtggtcgtcaatgcgtcaaacccaccagttaaagacagaattaactcaatgaatgccatgttctgtaatgcaaacggtgaccggcggtacaaggtgaatgttaagcgttgtccggtctacacggagtcgcttgagcagcaggtatgggctccgagtggagagcctgataaatctgctgataacgatcaccctaacgatgccggcgggtactacatcgtgaagcaattcccgatcattaagcgcccggcacaattctacttctaa

SEQ ID NO: 282474 - DNA, 1437 bp, Morganella morganii
gtgacaacaaaaaatgaagggctggaattgctcgtgaacagtgtcgccaatatggcggtgcaacgggcgttgtatgcatcaggcggcatttccagcaacacgaaaagaacgacgctctatcaggagttcggatatccggcagaactgtcattcactgattactacaatgcctatgagcgtaacgcagttgcacatgcagcagttcatcgcttgctggatgattgttggcaggataatccgaccatcattgatggtgatgaatcgaaagaaaacaaggaaacaacgctgtgggaatcctcggttaccaaactgctgaaaaaattctggccgcgaattaaggatgcagaccggcgcaatatggtcggtcactactcggcattggttatccagttaaaagacggcgcagactggagtgagccggtagatatcgccggggttaagcggttgggtgaaaaagcgctagttaacctgatcccgttatgggagccgcagctaaaagtaactgaatgggaaacggatatatcatccgagaattacggtaagccgaaatattacgattttgatgagcgacctgtcgggcaccagattcacggtccgataaagcaaaagaaaatacatccagacagggtgattattctgtgtgagggcgcagatgatgattatatgttttccggcatcccgctattgaaagccggattcaacaaactgctggatatcgaaaagatttccggtggcagcgctgagggattcctgaaaaacgccagccgtcagattgctgttgagttcgatgctactaccgatatgagcaacattgcgcaagcagcaaaggaagccgggtatgacgacatcggcgcggcaatggctgataaagtcgacaaacttaatcgtggtacagattcagcggcggtaatgcaggccgggcgcatgaatgtgctctctgttgctgctgctgatcctaatccatcatgggaagtagcagttcgtgaatttctgaccacaatacgcatccctttttctgagtttctcgggacacaaaccggcgtactggccggggacaaagatggtgcggcctatggtaagcgtctgaatggtcgccgctggggatttcagacaaagtatgttactgaaatcatcagtcgcctgtgtgttcttggcgttatctcgcaaccggagtcgggtgatatcaccctggcatggtctgacatgctggcaccgagtgaagctgacaaaatcgacaacatgatcaagatggcagatgctgcgtggaaatcacagcaggcattcggtatggcgatatttaccccgaatgaaatccgtgcagttggtgaacttgaaccaatcgaagatgatgcaccaccggaaaccggccccaaaggagatccgttagctgatgataaagaaccagaaaatagggtcaccgataataccgagaaataa

SEQ ID NO: 282475 - DNA, 405 bp, Morganella morganii
atggcactggtaaaaatcttagcaggaaacatttttgccggtgccgactttcataaactggaggtcggcgctgtctatgatgttaatgatgatctggcaaaaagctggattgtcagcggtaaggctgagcacacaaatgaaaaaagcggggaattgattttcgaagtttccacgccggttaagcacgaagtcgatgaccaattcacggcagagctggcaacagcgaaactcctgatcgcagaattggaagagaaaaacgctcagttgccggttatctctggcgagcttgccgaagccaatgaaaaggtatcggcgctcacagcagaattggaagagaaaaacgctcagattgatgcagtcaccgctgaactgaatacactgaaaaacggtaaaaaggcaaaataa

SEQ ID NO: 282476 - DNA, 699 bp, Morganella morganii; identical to SEQ ID NO: 282295

SEQ ID NO: 282477 - DNA, 714 bp, Morganella morganii; identical to SEQ ID NO: 282296

SEQ ID NO: 282478 - DNA, 567 bp, Morganella morganii; identical to SEQ ID NO: 282297

SEQ ID NO: 282479 - DNA, 348 bp, Morganella morganii
atgagaaatcaggaaggtatgcggctcacttatgggtttaccggtatgggcctaagaacgggtcatgcagcagattcgtcaactgacaaattacgagccaatgatcggcattatgggctacccggtacaggctggttactgatcgcattatcgcaacaatgctgtcctacagcctctgacgcgcttgcgtcagaggcttttacttataatgttgccagaatcttttcactctgcagtagtcggctgagaggcagaatgcttacttgcgagcatcacagtatcaccgctgaagatggcaagggcagcaactcccgcatggttgctagcgcctctgaaggccgaagataa

SEQ ID NO: 282480 - DNA, 684 bp, Morganella morganii
atgaacacactgacagtatctctggtaacaataatgatccctggtgtcattatggcactaatttatgatacctacactcaacataaatcctgggattcatttcgatatgttctgatgtcggttgtatttggtatcgttacttatctggcaatgcaggcagctgtgagcttatttcaactgattgcagggatcggtgataccaaatccataagctggagattactgtcggtctggtcaattcccaatgaggaaaagatagcaattaatccactggagatcttgctgggcgggctttgtgctatcccgttggggctgatagctgtctatcttgcaaccaagcgaacatttcatgaactattactacgtaagggtatttcaaataaatacggtgatgataatgcctttataaggtcggttgagatcatgcatagaaataccgggcaatgctacgttctgttgcatgaaaacaacatgctcattcatgggactgtctatctgtataacgaaaatgacaaaactcaggaactagggcttctaaatgcaactgtactcaattccgaaacgggagcagttctctggacgacggggtttatctatctttccaaagaatacggtaaaatggtcgtatttgaaaattacattgaggcttcaaatgtcaaagaatcagacaccgaaagcaactag

SEQ ID NO: 282481 - DNA, 864 bp, Morganella morganii
atgagaaatcaggaaggcttgcattcgctgcagggctcacttataggcttaccagaatgggcctcagaacaagttatgcagcaaattcgtcaactgacaaattacgagccaatgatcggtattatgggaaaaactggagcgggtaagtcctcattgtgcaatgctctgtttgcgagtgaggtatcgccggtcagcgacatatcagcctgtacccgtgaacctttgcgattccgtcagcaggttggcgaacactttatgaccatcgtcgacctgcccggcgtgggtgaaagcagagctcgtgataccgagtatgctgcgctgtaccacgaacaactcccccaactcgacttggtactgtggctgattaaggctgatgatcgggcgcttggagtggatgagcacttttattatcagataattggggaagcttaccgccataaggtgctgtttgttatcagtcagtcggataaggtcgagcccactagttgtggagagaaattgtccacgaaacagaaacaaaatatcagccgtaaaatctgtctgctacatgagttgttccagccggtaaatccgatctgtgcggtgtcggttcgtctgcaatggggactgcgggtaatggcggagcgtatgattcgttgcctgccacgcgaggccagcagtccggtggcggtacagcttagtgctccacttcgtaccgatgctgttaataaaaaagcccgtgacgattttggtgaaacggtcggctcggtactggacaccataagttccatgcccctgataccgtccccggttcggacagtcatccagtctgtacgcgacatcgtggtatcagtcgctcgtgcagtctggaatttcttcttctga

SEQ ID NO: 282482 - DNA, 432 bp, Morganella morganii
atgacccgtctggcttcacgctttggcgcagcaaatcttatccgtcgtgaccgtccgttaacccgcgaagaactgtttcgtgtagtgcccagtgttttcagcgaggacaaacacaaatctcgcagtgaacgatacacatatatacccacgatttctcttctcgacagtctacagagcgaaggctttcagccgttctttgcctgccagaccagagtgcgtgacccaggtcgccgcgagcacacaaagcacatgctgcgcctgcgtcgggaggggcaaattaccggcaagcaagttccggaaatcattctgctcaactctcatgacggcaccagctcgtatcagatgctgccgggattattccgtgcggtgtgccagaacggacttgtctgcggtgagtcgtttggcgaggtgcgggtgccgcatctatgttga

SEQ ID NO: 282483 - DNA, 1281 bp, Morganella morganii
atgaataccgatcaacccactttatgcaatcacggtgaccctgctggtcatgctccattattgattgaatacagagcaacatttcgagagtacttagcctgtcgtggatattcgaacagttacattcagcgttgcggggaagtcatggcacagttctcacgctggatgtcggagatgtacctgcacctgtgcgatgttaatgaggcattggttgaagaatttttgtaccaccgtgttcctgactatgttgatcctgtatcggggtacaggcgcaaccacggccgctcacctcttgtacatttattagttatgttgcgggcaacagatttaatcccaccccgaactcttgatatgacccccgtggccgtagaattacgccgttttgacgattatttgctgcaagcttgtggattggcactgcgtacccgtgaaagctacgtacgaattattggtcgatttctccgcgaaaaattcggtgccggagatatcaaattactcaatatcacccccaaagatgtccgggactaccttacctcgcaggccagcatctacaagatcccagccacttttggcatgattgtgtcaaacctgcgcggatatttccgatggcgtataacacagaatgatgatttgcatgctttggttgctgtcctgacaaatccggtacactggcggctgtcatctctgcctaagtcgctcagtaccgaagatattgaacaacttctgaattcacttgggcaggcggataaccccattagattacgtgctgatgccatggtgcgttgcgcactggatctcggtcttcgcgttagcgaaatcacccatctaagcctggatgatattgactgggaagctggaacaattacgctgcaccggacaaaaggccatcgtgatgatgtcatgccactgcctgcaacaacaggcaacgccatcgcagcatacctgcaaggcgggagaccgaagactttacatcggctgattttcgccagccacaaaatgccccgtgaatgccctatatgtaggtcagtcgtcggcactgccatacggcaggcatatgcacgtgccggactgcgatacaccagcgcgcatctgttacgccacacaatggccaacagattacttgcaacaggctcttcaattaaggaaattgccgatattttgcggcatcgctcattaaatgccacgcgcatctacgccaaactcgacagccgtaagctggcatgcgtagcccttccatggccgggtagttctgacattagcactacagggagccgggtatga

SEQ ID NO: 282484 - DNA, 969 bp, Morganella morganii
atgacgaacgatctgtccatacaagtcgagcactatctttccgaaaagcgcggcatgggctttgagatgagccatgccagctattgtttgcgcagtttctcccgatacatccagcaaactaattatcacgggccattgacacttgaattgatgactgaatgggcatcaaaagggcgatattctgaaaccgtaccagtcaccatggcccatggtcgcctgaaatatttacggccctttatgcgttggctgcagttgtcagaaccggatgctgaagtgccagacaattcaatatgcggacgaaagccaggccgtgggacaccacatatctacaacgagaaagagatcgaagaactgttggcagcagcgaggcggttaggtccggacaacagcattcgtggcctgctttacgaaaccctctttggccttctagccagtaccggattgcgtgtttccgaagccctgtcactacgaattagcgatgtagatctgaaccggggaatgttgataatccgacgcaccaagtttgggaagtcgcgttcagtagtgctgcatccaagtgcgaatgatgcgttgtatcaataccttagccatcgaaaatcagtgggggccgcatcggatgaaaatgctcattttttcatcgggttgcgcgtagatgtattggggaaaccattaaaagggcatcaggtgcgacaggtattcagagcattgcgccaggagttgggctggaacaatcgtggtacgcatcacgccccacgtatacacgatctacggcattcgtttgcggtcaggcgggttttactgtggcaacagcagggagtcgatgtggatcatgagatgttgtcattatcgacttatttagggcatgccaacatcgcggatacctactggtacctgcaggcggttccggagctgatggccgtttcagcaagacaatttgagatgagtatgccggaggtatgcgatgagtga

SEQ ID NO: 282485 - DNA, 1011 bp, Morganella morganii
atgagtgaatcgacgttaaaacagcctggtttcccggaaattgtgcagcaattttttactgagtacctggtaagacaaagagcacttagtcctcaaacggtcgcctgttatcgggatgcactcaagattttctttgagttttcagcgtcacagctacaccggcagcctgtagacatgaaactggtggacatcacgccaggccttattctgaagtttttggattatctggagtcagaacgccagaattcagtgcgaagtcgcaatctacgcctgacagccttgcgtacattcctcaggttcgccggacgacgggacattactgcgttgcacactgtagagcgtgcgcttggcgtgccaatgaaacgcttcgatcaaccgctgctcggccacttaacccgaccggaaatcctcgccatactggctcaccctggcgatcagtgggtctctcagcgcgatcacttgctgtttacgcttatctataacacgggagctcgggtgtctgaggtaatcaacatccgcgtcgttgatatcgtgcttgatggaaccgccagcgtacatctgaacggaaaaggtcggcgaaagcgaacaattccgttatggaaatccactgctggaataatacggacatggctgcgaactaacccggatatgcgtggcaatgcggcactgcttccagcccggtcgggccagccgatgtcacgagccaatgtgacacaacgtttgacacttgcggtcaatcgtgctgcagccattcaacccagtctgaagaacaagcgtgtttcaccacatatcctcaggcatacaacagccatgcatctcttacaaagcggagtttccttcaatctcatcgccctgtggctcggtcacgaaagtgtgaatacaacacaccgttatgttgaagccaacctgcaaatgaaggaagaagtgctttcccggcttgaagctccagacacttcattcaagagatttcgggcatcggatgatctactcaactttttgaaagcgctgtaa

SEQ ID NO: 282486 - DNA, 291 bp, Morganella morganii
gtgactcaggtgattgagggggcgtatgaagtactggggatttttgaccgtgtggaagagaaacgggatgctatgcagtcgctgatgttgccgccaccagcacaacgggctctggcacaggctgcactgacgtaccgttttggtgaggaccaccagccggtgacagcacctcagatactctccccacgccgctggcaggatgagagcaatgatctgtggaccacataccagcgtattcaggagaacctgattaagggcgggctcagtggtcggagtgcaaaaggcgggtga

SEQ ID NO: 282487 - DNA, 711 bp, Morganella morganii
atgacacaggcagagcgccgtcacgaccggctggctgtcaggctgtcactgataatcagccgcctggttgcaggtgaaacgctgaacatggcgcggctggctgcagagtttggtgtgtcagtccgtaccctgcgacgggattttcgcgaacggctgatgtacctcgaccttgagtatcgacgggggcaatgtcgcctgcgcagcaccggtgggggcgtacagggtgagcttgatgcgctgaccttcgcgcaccgggccggactggccgatatttttccggggctggaccggcgtctggcgggcatgctgctcactgcaggagggatgccctgcctggtgtggcaacccccacagtcagtgtcaccggccagctcgctggtgttttaccgcctcgtcagtgccattaccgcatgccagcgggtactgctgctggccgagggagagcgctgtgacgggctggccccgtaccgactgatttcattcgacggctgctggtacctcaccggtgaacttaacgggtatatcaccgtgcatcctctggcgaccatccatgcggtgacagtactcaacaccacgtttaccccgctaaaacgtctcagccagttaaccacacaggcgggctttatccgggcccttccgcacttcagctgtatccgcgaagtcctgtctcctgggccctctgaggaggaggcgggcaacacactgatttaa

SEQ ID NO: 282488 - DNA, 537 bp, Morganella morganii
atgacctggcattacgagaaaaatggcatacgtcacgacaatgtgactgaagacgacatcaccggcctgattatgcgcggtgaactgacagcatccactttggtatggcgacagggcatgacggagtggcagccaatctccgctaccccgctggcttcggcgctgctccacagcactacaccaccggcactgccaggaaaccgcattccgggcggagtggtatggacgctggcatttgctcccttcattggttatgcgctcgagctgtggacggcagggctgaacggaatgtcttttgacgaggcatatgaggccgtctcgggtgggcagtactggttcatcacgctgctgctcaatatcgcactggggtatctcgatgaacgacgcctgcgtaaggccggagtggataccaccacgttcggcaaacttgcctggctggtgccgttctatttgtggcggcgggcgaaaacccttggtcagaaaccggcttacttttgggtatggctggtgatgctgggcctgactatctgggcctga

SEQ ID NO: 282489 - DNA, 438 bp, Morganella morganii
atgaaaacgctgattaaaatacttggcattaccggcagccttctgctctgtgcaggagctcaggcccagccttataaccggacgctacctgcagtcgtcaatgacaacaacgggaacattttctggtgcgatgcgcatcgtcaggttaccggaaaatgcgaagccatgtctgttgaccgcctgggcgggatggtcacggtgcgttccgcaccctttaaagactgcgaaggcggcctgtggggctggataactatcatgcacaacgatgtgtcgaagggattcaccgttactccggacaagaaattcggtctcaccgtaaaagacctgtgccgtccgggcacgatagtgacctttaagcccaaccagaagaagccggaatatgacgacctggtggtactttaccagggcaaagagctgtttcgctaccgacgcttctga

SEQ ID NO: 282490 - DNA, 411 bp, Morganella morganii
atgctgaaaataatgacctctgctgtacccgccttcattctgtcacttgccgcattcagtgccggtgctgctcagcttccggcaagcctgatggataaagacaatcccggtcaggagtactggtgccagggaaacgatatcaacacctccatgtgctcactgaccggtttcagcgacgaccataaatttgccctgattcaggatttgcccggtccagcctgtgaagatttaagtttcgggattattgacctggtatttaacaccggacttaacatcccttatgacggtggtgactgcaagggagatgtaaaggccgggtttgttcgtggcacaaaagataatgccctgtatgtgaagattgtccggggcagcaaaactttacgcctgtataaggtgcagacgggtttctga

SEQ ID NO: 282491 - DNA, 459 bp, Morganella morganii
atgacgacacaaacgcaatgcgaattgatgcccgctaatgaacctcaatttgaccttactgcaacaccagtacctgacgaacagcgtcttgatttctggccgctgtactttggcgctatccctcagtggataacgctggaaccccgtattttcgcctggatggaccgcttctgtgatgaatacagcggtggtatctggtccttttacacgctcagtaatggcggcgcgtttatggcccctgatgctgagggagacgataaatggcatctgttcaacggcatgaacggcaattgtgcggaaatgagcgcagaagccgcaggtattgctgtctgcctgattgaatacagccatcacgcctgtcgcaccgaatgcgatgccatgacggagcactattaccgactacgggattacgctctgcagcactctgaatccagcgccattctgcgcattattgattga

SEQ ID NO: 282492 - DNA, 483 bp, Morganella morganii
atgatggaacagtcacttatcccaccagctccggcactaccactaaccgcacaacgcacggtaaaacgcgccttaacgctgcttgaccgacacctgcgcgaaacaggcgtggcattcacctccactcaggctgcccgtgactggctgaaactgaaaatggcgggactggagcgcgaagagtttatggtgctgtatctgaaccagcagaaccagttgattgcccatgaaatcctgtttgctggttctattagcagtaccgaggtacatcctcgtgaggtggtcaaacgcgccctgtacttcaatgcggcagcagtgatactggcgcataaccatccctccggtgacaccacgcccagcctggcagataagaccatcacgcagcgtctggtgcaggcgcttcagctcgttgatatccgtgtgcctgaccatctcatcgtcggtggagcgcagatattgtcgtttgctgaacacggtctgctttga

SEQ ID NO: 282493 - DNA, 222 bp, Morganella morganii
atgaaaattatcagtaaacgccgggcgatgacgatttaccgccagtatccggcctcccgcatttttcgatactccaccggtaagtaccagtggcacggcagtgtctgtcattacagcggtaaggtcgttcctgacatttccggcgtgctggcggtatacgccgaacgccgccaggaccgcaacgggccttatgcctgtctgatgagtatcactctgaactga

SEQ ID NO: 282494 - DNA, 318 bp, Morganella morganii
atgagcaacaccacatggggcctgcagcggggtatcacgccgcgcctgggagcacgtctggtacaggagggcaatcggctgcactatctggctgaccgggccagtatcaccggtaagtttagtgacgacgaatgtctcaagctggatgtggtatttccacattttatcagccagatagagtcaatgctgaccactggtgaactgaatccccgccatgcctactgcgtaatcttgtaccacaacggtttcacctgtgaagccgatacccttggcagttgcggctacgtatatatctccatttatcccacccaacgctaa

SEQ ID NO: 282495 - DNA, 342 bp, Morganella morganii
atgaaaactctacctgcaacaactcagcaggcggcgaagctatgtctgtcgcccgtggctgtctggcaaatgttactgatacgtctgctggaacagcactatggcctgacgctaaacgacactccattcagtgatgagacggttattcaggaacatatcgatgccggtatctccttggccgatgcagtcaacttcctggtggataagtacgaactggttcgtatcgatcgcagggggtttaactggcaggagcaatccccttatcttcgggcggtagatatcctgcgagcacgacaagcaactggcttgtttcgacggagccgtaataacgctgtatcgtga

SEQ ID NO: 282496 - DNA, 900 bp, Morganella morganii
atgcggattaaccggacagccgtactgattctgacatcactgttgctcagcgctcccggctatgcggaaaaataccgtgcaggtaatccggataccggcagtgatgtggtgatcgccaaaggggatattccgtcacctgaaaaattccgcccggtcgtggcggattacatgacgatgatggggaaacagacagctgcggctgaacatcagctgcaattgctgcaaaaagcgctggccgtgggggatatggcagctgcacggcaggcttatattcaggcacattatgattatgaggttatccgcgcggcagtggtggttttcggccacgctgaccgggtgattaaccctcatgccggctattttctcagccgcgagcaggatccgaaattcaccggatttcaccgcatcgaatatgcgctgtttgctcaaaatgatcccgcagccgctcaggccgccacagccgatctgctgcgcaatattaatgacctgaaacagcggatcgacgtggaaaccctccctgcggcaaagctggtgcagtctgcggatgacagtattgaactgattctcagcactaaactgagtggtgatgaaaaccgctacagccgttcagatctgtcagatatcgccgccaatattgaaggggcccggcgcattgtcagcgggctggcgccgttattatccgcaaaaaccaatgaggcactcagaaagcagtttgcgggaccggatgcggtcatggcccgttaccgggatacccgggggcagtatgcggaatatgagaaactgacaccggaagataaacagcaactctatgcagacctgacgctgctggcagaatctctggcacaactgcgcgctgaactgaaaatagacgtgtattacaaataccggaatgaaccatga

SEQ ID NO: 282497 - DNA, 1290 bp, Morganella morganii
atgaaacacggcaaagtgaatctgactgagacagaagagtctgtcagtctcagcaaacgaaataccctgaaatggctgggggcagggagtgtcctgttgtccggcgggttaccggctttttctgccgccgcagcaccggcggcgtgtgataacagcgcgcggctgcgggaaattccgtaccttggtaaacatcaggccggggttatcacaccggagcagaaagaggccatttttctgtcactgaatctgaccgttaaaacgctggatgaggttgaggatgttttccggcggctgaccggctgtattgcggaactgacccgcaaccgtcaggcggcggcaccgggcgatgacagaatgccgccggcggaatccgggattctcggtacggcactgactgcggatgcactgacagtgactgtctctctcggccactctctgtttgatgagcgcttcggcttatcgccactgaaaccgcaaaaatttaccgccatgacggcattcccgaacgaccggcttgatccggcctggtgcggcggggatatcctgctgcagttttgtgccaacagccgtgaaacggtgatttatgcactgcgtgaagtgttgcgccgcctctccggccgggtagctccgttgtggaaaattgacggttttctgccggcccgggatattgaatgccgcacaacaccggttaacctgtttggctttaaagacggtaccggcaatgccgatgccggtgatgatgccctgatgaacgacctggtctggatcaccggccaggaacccgcctgggcggaaaacggcagttatcaggcggtacgccttatccgttttgagctggaattctgggaccggacaccgctggaagatcaggaaaatgattttggccgtcacaaagccagcggtgcgccgatgggcaaagagcatgagtacgacgacccggactttaagcaggatccgcacggtgaccgggtcttatttgattcccacatgcgccgcgctgaaccgcgttccacagagcgacacgtggccaaactgcgccgccgcagctacagctactcgctggggctgaccccgtccgggcagctggatatggggctggtatttatctccttccagaaggatttgaaaaaaggctttatcgatacacagaaacggctgaacggtgaaccgcttgagcgttacatcaaaccgttcggcggcggatactatctggtattgccggggattacctcagaaaaaagctatctgggcgaggcactgattgctgccgcgagggatcagggcagataa

SEQ ID NO: 282498 - DNA, 756 bp, Morganella morganii
atgttcgacttgacaggtaaaatcgcagtggtttccggcggcgccaaagggatcgggcgcggcatcgtcaccgcgctgaaaaagggcggtgccaccattgttatcgccgatattgatgaaaaaaccggcagcgcaaccgctgcagagctgggaacagactttatggcactggatgtaacctctcagtctcagtgccgcgctgttatcagtaaggtcagagaaaagtacggtcgtctggatatcctctgctcaaataccggtattttcccgcaatgcaccatcaaatccatgacggagcaggactgggataccatgcagaaggtgaacgtgaaggggatgtttttcctggttcaggccgcgctgggtgtgatggaagaacaaaaatatggccggatcgtgattacctcttccattaccggtccggtcaccggctttccgggctggagccattacggtgcaagcaaagccgcacagcttggttttatgcgcagtgccgcgctggaatatgcccgtctcgggatcaccattaacgcagtccagccgggcaatatcctgactgaaggactgaaagcacagggtgaaacctatctggaccagatgcgtgccactattccgacgcacacgctcggtgagccggaagatatcggttatgctgcggcgttccttgcctctgatgaagctaaatacatcaccggacagaccatcattattgacggcggccagattttaccggaatccccggaagcactgctctga

SEQ ID NO: 282499 - DNA, 312 bp, Morganella morganii
atgaaaaaaaaattaattagcattatattattatttcctgttttatctgtagcagcaggtaactccactatagatgtgaatccacctgaaaagctaactgagatttcaaataagattgatgatgctgataatgaaagctttttaattgcatataatagaaacaatttgcagtttacaccaagcatcactccagttaaagatataaaaaaatgtgaaaagctcaaatcattactagaacaaccagaaataaaaagacaaatatattatggggatgttaaatttcagtgcctcacgataggtaatgacaaataa

SEQ ID NO: 282500 - DNA, 495 bp, Morganella morganii
atgcaaggcggtatagcggtaataaaagtcaatgatattgaagtaggcacaatgccgatctctctatatgaagatatagtcgagtccgttaaaaacaactggagaacccgtattgctgtttggttcagttatgttcagcttttatggaaaatggtactccggttatgttctcattatgttcaaaatattgtgattatttttgctttattaatgctttattctttttttaattcaacagaaactattcatttcattgatgagttcagaaatgcgccatcaaaggaaattgccggaaccattcatttcgttataaacataaatttcatccttacaggaatttcctacactttaagtttacttattaaagggacaccagaatttaaggatgcttatgaaagttctattgctaacaaaattcggaaagtgatggaagttccagcagaaggaaaggttagtatcatttacattcagggtaacggtgatgcagccggataa

SEQ ID NO: 282501 - DNA, 351 bp, Morganella morganii
atgtgggatgtcataacaaccgagcgctttgatgagtggtttcttgctcagagcgatgctctcagggagtctgtctatgaggctatgggcgtactggagaaattcggcccggctctaggtagaccgtatgttgatacgctaaacgattctgattttgccaatatgaaagagctgcgcatccagcatcatggtaatcctgtcagagcattttttgcgtttgatccttcacgccgcgctatcgttctttgtgcgggcgataaaaccggattaaacgaaaagcgcttttataaggacatgatcaaattggctgattcggaataccgtaaacatcttgcgaaactggagaaataa

SEQ ID NO: 282502 - DNA, 300 bp, Morganella morganii
atggctacctacagagaacttctggctaaagaaagtcctgaaatgcaagcgcgtgtagcggagcgggttgaagaggccagcctccagatcgcactaagcgctttgcgtgacgaactgaatatttcacaaacagagttagctacaattatgggagtaaaacagccatcggttgcccggatggaacaggccgacaatgatccgaggctatcaacgttgaagcgctatgtgaaagcgcttggtggagaattaagcctggatgtgacgctccctaccggaaaacgtgttgctttccatctgtaa

SEQ ID NO: 282503 - DNA, 666 bp, Morganella morganii
atgggtaagattttactggttgcatcagataagggcggggtagggaaaagcacttactccgttaatacggcttcaatgctggttaacaaaggtaaatcggtcatattactaaaagcagatacaaacaaagacgtattgagctggagtaaaaaaaggcaagaaaatggactgttaccaatccccgtatatgaggcatatgggaatataacaaaagaaataaatcgattgagcagactttgtgatgtgctaattgtggattgtccggggcatgacagccatgaattccgcagcgcactgacggtagctgatatcatggttacactgataaaaccctcatctgattttgaaagtgaaacacttaccagtgtaactgaaaaggtcagaatagctcaaaacacaaatcccaatctgcaaccgtgggtattaatgacacgtattaatccaagcaaaccacgacatacacagaaagccattgaactggataaaatactccgttctgacagtatttggattcagcctttaaagacaagaatatccgaactggatgtattcgaaaatgcatgtaatgaaggggcaggggtgcatgatgtcgcccgggcttccagtctcagtaatgccaaaggacagcttgagttggtaggtattgaattgggaattattgaatag

SEQ ID NO: 282504 - DNA, 285 bp, Morganella morganii
atggctttaaaactcaataccccaaagcttcctgaattgaatgaaccggcgactaacgcagagactgcgcgcttcattaccggggcaaataaaaaacccgtcacctcaaaagcaaagcttcttaattttcggttgaatgaaagctttgaaagtattctcgaatcaggggcaatgagaaccgggcagagtaagactactgtgctaaaggcggcacttgcagcatgggataatatggatgaaaaccaacaaaatcattggatacttgaatccgctaaaataggataa

SEQ ID NO: 282505 - DNA, 177 bp, Morganella morganii
atggctacatttttattctggattactatagttggtgcatttaccggacttattggtacttttattgtttttttcacatcaaataaatctgacataggaaaagatttaggcttaattggtgcgtcgcttgccggtttaggcgcattcagtttgttgtggatgagagcttttatttaa

SEQ ID NO: 282506 - DNA, 459 bp, Morganella morganii
atgactattatatacataattatcgcttttttaggtgtcgctgttttttttagtggtataggtgatgcgttcaaaggaaaaatatttcaaggtgctatcacgttgatgtttggtgcgagtatagctatattaggttgtgtatatgcatttgataatctcaaaaatgaaaattcaaaaaaacaggaagatttaaagaaaatagaacaatgtaatgccgtcagtaaacaatcagatggtataattgatattgatttttttaaatcaaaacaattaaattgtaaagatggaacaataatttttgtaagctcttctggatatgaggaagttaatgttcctgaaataaaaatacaaaaagagggcattggattaattgcgtattactcaacaccgatagttatgtttgtgattttcatctttttgatttataaggtttttatttacagggattatttggactga

SEQ ID NO: 282507 - DNA, 249 bp, Morganella morganii
atgaaaacaatcaccgtaacacaatcaatggctgctctggtcaagaatgacggaaaaaaatactcaccagcatatgaagaatacatgcgtaaacttccccgaaagagtaagttaccacaaggtaaatatttcagaggccgtattgctggcgctgtgattccaattatggatgaattctggaaatctgcctcagctcagacggacatacagttattccagaccatgtataaacaagcaaggagatattaa

SEQ ID NO: 282508 - DNA, 330 bp, Morganella morganii
atgaacactcaaaggctgtctcagttaatttttttgtttgaacgtatagggggcaacgaattaaccttagccgccgctgtcgccagaaaagcggttgaggaaatggaagaaaaagacctgactccggaaagaaaacatttgctgaataaccagttatgggggctggtcagcacgactatcgatcatgccggttatccggattattttaacgaagagctggaacagcttgagtatgagcttgccgggcgcgttctgaactatcgtcttttgcggggctggctaatccgcgcacccgatgcaccaaaatactttgaaaacttcattggctaa

SEQ ID NO: 282509 - DNA, 219 bp, Morganella morganii
atgtttactgttctagtgcttactcagcctgtaatttttgcattaaccatgtgggtatggctgcgccacaccaaaacagggaaattaaaatcactgttccgtgtcctggtgttttgtctgtttattctgacagcagccaccatcattatcatgctgaaaggacaccccgactattcccctaactatgttaccttgctgcatcagctgtccgccgcctga

SEQ ID NO: 282510 - DNA, 921 bp, Morganella morganii
gtgagtaatgtagcaaatatcaaaataaaaactcatcgtcactatgttcccgttttcaaaggaactctccctgatattgccgctgtacgccgcttttctgccgcgctttcccgtcatgactggaaccggaatcctcatatctatcagttgcgctgtgaacgtaatcagcgggtatctgtgcgttctgaacgccgggaaacctggtatgcgcttgcactggctatgattgccaatgctgattataaccctgacagtgaagcattgtttgaggtgatgtgcccggtggaaacactggcttcacaatgtggtcagctgcacctgtatgaaagtggccgtaagagttatgacccgatccttcatgcattgcatgattgggaatcagcaaatctgattatcatccaccgggattttgatcgtgaggcgaaacagtataaagctatgcgtatctggttgcggccggagttttttgcagggctgggattcagcctggttgcattgcgggatattgtgaccaagttccggcggtggatggaacgtaaaggactacgggaagaatatcagaaacgttatgccaggcatgttttgcgcctcagccggtcaaatgtggcttcactggacaaccggcacgcattgaagaatctgctcaaaaagttacggcatttagtgaccggtgatgatgaaactcttgagcgggaaaaaaagcatctggagaaagcgctgaaacagaaaaaggcacaattacaggcttcccgtccgaaagaggatgtacccggcgaagcctggcgactgtatgaacgttggaaacaaatacagcctatagctgttgtccgcagactcgaacagcggatcaaatcgctctatccgaccctgcgcggtgaactgttgtatcagtgttaccttgataaccttcctgacaattaa

SEQ ID NO: 282511 - DNA, 492 bp, Morganella morganii
gtgattactcatgatgatctgtgtgaaatagcggtgagattcctgcaaaacaacggatttcatgttgcttttggtgacagatttcagtccagcaacggtaccggggagcagcctgatgcaatcggattcagaagcggaaccagttgcctgattgaagcgaaagttagccgctctgattttcttgcagacaaaaataagtggttcagacagcatccggaaaaaggaatgggtgactggcgtttcttcatatcgccaccggatattattaacccggaagatttaccagctggctgggggctgctccacgtcaaaggcaggcgtgtgtacaaggttcacggatggcctccaaatacgtactggtatgacaaaaagccatttaaagccaacaaacaggcagagtgtgatcacatgtacagtgcgctgcgccggttacaaatacgcggacatcttcatgaaatctacgaaggcattccgaaaggagcaggtaaatga

SEQ ID NO: 282512 - DNA, 1500 bp, Morganella morganii
atggtcaatatagtcagtttctccggtggccgcacatcggcatatctggttcacctgatggaacagaaacgggtcagtgaaaacctgaatgtgaaatacgttttcatggataccggcgcagagcatccgaaaacctatgaattcatccgtaacgtggtcaggcagtggaatattgacctggtgtgtttacgtctggttgttgatccgaagctcaggaacgcgaacagctaccgcgtgatgaatgtcgatgaaatatgtgcagatctgcaaccctgggtagacgcctgcggtaaatatggcaccccttatgtgcatggtgcgttttgtactcggacaatgaagctggagccgttcgaacggtattgcaaagaaaattactcagatggatatcactcctggctcggaatacgggcagatgaaccacaccggttaaaaccacgtgatggtgtgtcgtatctggcggatatcagtgattttgataaacaggacattctcgactggtggagggagcagccatttgatctggatattcctgaacacctgggaaactgtgtgttctgcattaagaaagggataaacaaaattgcgctggccgcccgtgacgaaccggaaatggcagcacaattccgggaggtgatcacttccgatactgttcgtgtcgtcgaacgccaccagcaggaaaataaaatcatgtaccggggtaataactcgctcgatagcattattgctatgttttcagaccagagccgcgacgatatcgctgcaacgatacgcggggccggcggttacgactcaggctcatgttccgaatcctgcgaggcactgatttgtgatgcggtagaaactccggatctgcgctcagattacgtaattgagctggaagaactgcgtaataaacctgctcacatgctgaaagaggtcggtgaccagtggcggacgcctgatgcgctgtattggggtatcaacgccaagttcggcccgttcaccctcgacctgttcaccgacggccagaacagcaaatgcccgaattattacactgctgaagataacgcactgacacaggattggtcagaaatgctgaaagaactgggcggggcagcatacggcaacccgccatattcccgcagtagttatcacgataaacaggccgtaactggtgttcgtaacatcatggaacacgctcaggctatgcgtgagaaaggcggccggtacgtttttctgctgaaagcagcaacgagcgaagtgtggtggccggaatgggctgatcatgttgcattcatccgtggtcgtatcgggttcgatttaccagattggtttgtgccggcagacgaaaaacagaaaccgtcgggtgctttctttgccggtgcggttgtaatcctggataaggactggcagggagacaaaatcagttatatcagccgcgacgagctgatcgccatcggtgaactgtttatgcagcaggcgcattggctggtggagaaaacaggggaggccgcgtga

SEQ ID NO: 282513 - DNA, 249 bp, Morganella morganii
atgatcatgcgttcagaaagcaaagagatttacggtgtgagtgttgttcctgcgctggcggttctgcatcagcttacccggtggtgggttctgcgtgaccttaaccgcacctggtcagatgatcgcttttttgaaaagcacattcagcgccgtggctggctgcatattgcggatgcgttcacattccatagccggtatcagcgactgcgtgaagcggtgaaaacccaccagaacaagggggttatctga

SEQ ID NO: 282514 - DNA, 885 bp, Morganella morganii
atgagtatgattttaactgcgcgggctttgcagataaaaaccggtaacgcgctgcgcaaactggtgctggtcaaactggctgataatgccaacgaccagggcgagtcgtggccgtctgtgccgtacattgcagagcagtgcgaaatgtcagagcgctcagtacagaaccacattaacgccctggtcgaaatggggctggttcgtatcgaatcccgtaaatcggccaacggcctgaaccagtcaaatatctatcatctgcgtctgaatactgccgttgtgagtggtgaatctgctgcaccatatggtgcaaatcctgcgggggtgagtggtgcaaatggttccgggactggtgcagcagattcaccaggtggtgcaactggttccgatagtggtgcaggagctgcacccagaatcagtaatgatccagtcatagatccagataataaaaatattaatcctgttcgcggaaaagccaaaagcaaaaccgtgatgccggaaaacttcgccccgtcaccggaacacactgaacgggcaaaaactgccggattggatgttcaggatgagtttggcaaattcagggactaccacgccagcaagggtacccaatacaccgactggaacgcagggtttaattactggctgagacaggccgaagggtttaagcgcgccgcggactcaaaaaacatcgataccactgagtgcgatgaagtcttccggaaaatgttctcatcctccgactggaaaccggaaaaccgcgtacaggagctggtcgcaaaacacaaatcctacattgggcggatgaatgaaattgccggacgagcagcatttcgcgggtactggaaacaggccactgagcaggccgcaaaagaacgggaggcagcatga

SEQ ID NO: 282515 - DNA, 1356 bp, Morganella morganii
  misc_feature (1305)..(1343): n is a, c, g, or t
atgccaaaaggagtagggcaaatcattagcgttctggctattttattaatggggggaacttatgttccgattgatgtactacaaccagaagaacgtataaaccgcattgctaaaaatgctcagctttcattactcatcgtatctgatagcgatccatcctattcaatctatgctacattttgtaacaggattgtttggcaaaaagttcaaccctccgagaataaaccactacacaatatagatatatctcctcatcaagcagcttatgttatttatacttcaggttctactggagagcctaaaggtgttgttgtatcccatgccagcgcaatgaatacctgccttgatctcaatcggcgatataacatttcagacaaagatcgggtacttgccatatcagcactacattttgatctgtctgtttatgatattttcggtgttttaaatgccggagggactcttgtattagttaaagaagatgagcgccgtaatcctgatgcatggttacgacttattaaccaacataaaataacactttggaacagcgtacctgcactgtttgatatgttactaacctatgcagaaggaatagggtcatccattccacaatcgctgctattaatctatctctctggagattggattgggcttgatctcccgacacgttactataatttctgccctgatggacaaatagtcgccatgggaggtgccacagaagccgctatttggtctaactattttaatgtcacaacattagacccatcctggagctcgataccttatggatatcctttatccaaccaacgttatcgtattgttaatgctagaggagaagattgccctgattgggtatcaggagaactttggattggtggtgcaggcgttgcgttaggctacctaaacgatcccgaaaaaacagcacaacagtttgtaaaacaaaatggtgaaaattggtataaaacaggtgatatgggaagatatctccctggcggtatacttgaatttttaggaagacgtgaccgccaagttaagattggcggataccgtatagaaccaggggaaattgatgccgcattcaataagcttcagggtgtgcaaaatgcgattacactatgccttggtaatggtaataaagaaaaagcattacactcttttgtgatactaaattcgggtaattaccagaatattatcagttcaaatagcgccttttctcccctctactatctgcgctcaaccccaataaatgtacaacaacaatcccaagaaacggcaatcatagctggattcttatatgattatctnnnnnnnnnnnnnnnnnnnnnnnnnnnnnnnnnnnnnnngatttttatatga

SEQ ID NO: 282516 - DNA, 2091 bp, Morganella morganii
ttgcgccaatttttaccagactatatgatcccaaaacatatttattttctaactgagttccccttaaccgcaaatggcaaaatagataaccaatcattaaaattgtattgtcaggaataccaagaagaatacctaaatcaacaacctatcaatggtaaagaacagatcatcataacaatatggcaaaagctccttggcaccaacaagatacaccgtcacagtcatttctttcgtgaagggggagatagcctagttgctattcgattgatctctgatttaaaccatattggctaccaagttgaactggagcatatctttgcttatccgatcctttctgattttgcacaaaatataaagcagagcgaagttttcgaaaaacagccagcaatttcacataacgaggcgtatagatacaatccatttccactcactgatattcagcaagcttacttagttggacggcaaaataattttacacttgggggtgttggtacacatttttttgtccattttatagcggaaaatttagatgtacctaaattagaacgtacaattaatcagttgatttctcgtcatgatatgttacgtggtgtcattattaatggacaacaacaagtacttaaaaaagttccttattattccgttaaaacgcattatatccctacagaaaaaagtgacgcttttctagtattacgagctcaacttgctaacattgtttatgatccagaaaattggcctttatttgctattcaagttatcaagaccaaagaacaaccagatcatatttttattagccttgataacttattccttgatggaatgagtatgcagatatttttcagtgagctaaaaacgctatatatggagccaaatcaccaatttatccctctagatattacttttcgagattatattgattgtgatgcctatccgattaacacacaaaatgattgggaatattggttaacgcgtttaccacaattaccaccagccccacaattgccactaataaaagatccagcacagattgtgcaacctcgcttctcgcgtttacaaacatcattatctacttctgtttggcaagcactacaacaagttgctcaacaaaataatgttacgccagcagcacttttgattgctgcttattgcgccacattatccgcatggagtaaaagccctgagttaacaattaatttgacattatttaatcggcatcctgtacatcctcaaataaatgaagtacttggtgattttacctcattacaattactcgattggtatacctgtgatctttggtcaaacagtatctcaatgatgcaaaaacgtttacataaagatatgcaacatcgtagtgtttcagccattaaagtaatgcgtgaaatggcaattcaacgacagatgtctcatatagagatacctgtcgtttttacctgtgcattgggctataaacatgatgaaggttttctttctcatcattcatggctaaaacctgtttggggaatatcacaaacaccacaaacatggctagatcatcaagtatatgagtcagacggtgaattatatttaaactgggattttgtcgaacaattatttgactacacaaccattttttccatgttccagcaatatgaacatatactcactaaactggctactgaaccacaatcttggcaattgccactaaataaacttataccaagatgcaataatctcgtcatcaccccagttttcaatgccaaaaataatcaaaacacacattataaacaatctactgatacacaaaaaacaggtcagacaatacaaaaactacaacaacttgttaagcaagttattggaataacgttagcacctgaaacaaattttttcgaagcaggtgccagctctttacaattggttcaacttcatgcagcactacaaaaaaatggctatagccatattacaattactgatctgttcgctagtccaaatctaagtacattagcgcaattgctttggcaaaacacttcaccaacatgtgagcaatattccgaccgagacaaacacaaaaacaagagaaagaaacggttacaactacgaactcatagtagataa

SEQ ID NO: 282517 - DNA, 621 bp, Morganella morganii
atggaattatatcaaggtactcatggcgatcacatacttccctatcgggatagaattgctcagacagttagtaatactatcaatcagttccctcgcacaatggcattaagattggatcttcattacccacctattttggataatggtgatacggtatgctgttttcctaaccttgagccaggtgcaatatcacgcttcctagattcgtttaaagcgattctggaagcacatgaatatcgcagaaagtttgcagggatcagagttaacaaaaatgttgtacgtaatgtctgggcaagagaatattcgaagagtggtaaatgccatttccatatttgcttattcttcaacaaagatgcttactaccatttaggacatattaaacataatggtacacttcgcaatctgatagttagagcctggtacagtgctctcagattagaagttgaggattgtcgtgagcttgttcattttccggaaaattgtcggtatgtacttaacgtgaatgcgcctgattttgacatcatatataatgatcttcttttccggctggattatctaactaaacttgatacaaagatatttggtgagggtgatcgtaatttcggttgtagtagaaattaa

SEQ ID NO: 282518 - DNA, 549 bp, Morganella morganii
atggagatcgtcaacgatagtattgcaaataaagatgaacgtatttgcttgcatttctcgccagatgcaggacagaagtggattgcattttataatgaagttgaaacagaaatgcagctaattggttttctgtcagactttaaagattacgcatctaaagtcgctgaaaacatggcaagaattgctgcattgctacactatttcaatggtgatgaaggtgatatatctcttactgctgtagacgctgctatagagataagtagttggtacgtcaatgagtatataaagttattttccaaaccgcaggagggaaacatggttaataccgatgcagatgagctttattggtggataaaagagtattgcaatcaaaatttcataccctatatgaggaaaaataccatattgcaaaatggtccagatcggtttaggaaacgtagtaaagcaaacgaattattaagtatcctttactctcagggtaagataagtgcctataaaaaaggtaaaactctttttatccaaccaacaagtactttggatgttatttag

SEQ ID NO: 282519 - DNA, 750 bp, Morganella morganii
  misc_feature (717)..(726): n is a, c, g, or t
atgtcgggagatcgggagttccccatacatgtgttcccagcaagagtgggacatgcaatctatgaggtagtgcaacatactcaggcaccacttcccatggttgcagcagagatacttggtgtcatttctcttgcttgccagaacagaattgatgtttgtaggttgaataatctacgtggtccgacatcactttttattgtgacaattgcggaatcaggagaacggaaaagtacggtaagtaagttgttaatgaagcccatttaccaactagaggaacagttatttgatctatataaacaggaaataactaagtggcagtataacgtaaggattttcaaggcggaagagaaagccttgatatcaaaactgaagtcagagatccgaggtggaaaagatccaaccataacacgtcgaagtctgaatatgctgcaagatagttatcctgtggaacctgtcagatacaagttgacgtttaatgataccacaacagcggcgataaaagagtatctctgtggtgactggcgatcagttggaattttatcagatgaggctgggaccatatttaatggttatgcattaaatgaattaccgtttataaacaaaatgtgggatggcgcaacgtattcggtcgaaaggaaaaatgcacctgagaggttgataaaaaatgccagattgacattatccctgcaggttcagcctgtagttatcaatagatannnnnnnnnnatattgaaagaaaaggggatttag

SEQ ID NO: 282520 - DNA, 237 bp, Morganella morganii
atgaatacaacatctatcattccaacccctgaacaacgactgcaaatcttgcatgtctacggtgagaaaggtgaccgtctggtgcgggaaaaggagcgccagtatatcacttcgatttctcgctcaacagcctggaagctagaaagggttgggaagtttcctcgacgtaaatcacttggggctaagtcgtgtggctggttgcttagcgatctactctactggattaatgaacgctaa

SEQ ID NO: 282521 - DNA, 1491 bp, Morganella morganii
atgcaactacatgattttggtttcgttaattatgcagtgctgtttggttatttagcagcaatgctactcgttggtgtttatttctctaaacgccagaaaacagcagatgattattttcgtgccgggggacgggttcccggttgggctgccggcgtttctgtctttgcaactacattaagctcaattacctttatgtctattccggcgaaagcttatacctctgattggacttttattattggccaatatttagcgatcgccattttgccattagtattttatttctacatccctttctttagaaaattaaaaatcacctctgcttatgaatatttagaagcccgttttgatatacgaagtcgtttattcgccagcctgtcatttatgttatttcatattggtcgaattgcaattatcacttatttgaccgtactcgcattacgtcctttcatagggatagatccgattatattagttgtactgattagcctgttatgtattatttatacatggatgggagggattgaaggtgttatttggactgatgtcattcagggattattactttcaggtggtgctgttttaatctttatcatgatctgttttaaagttgatggaggaattagtgagatttttaccacaacagcacaagctgataaatttttcccagaagcacagttacgctggagctggactgacagtactattcctgtattaatgattggttttttatttgccaatattcaacaatttactgcaagccaagatgttgtccagcgctacattgtgactgattctatcgaacagactaaacgtactttaatcacaaatgctaaattagttgctgttattcctgttttcttttttgccattggttcagccctgtttgtgtattacaaacaaaatccaggtttgttacctgaaggttttaataccggaggtatcttacccttatttattgttacagaaatgccagtgggtatttccgggctaatcattgcagctatctttgccgctgctcaatcgagcatttccagtagcttaaacagtatttcaagttgctttaattctgatatctatattcgcttaagtaaagttgaacgacgttcagaacaaaaaatgaaagtcgccagattagttataattattgctggagtattcagtagcttagcaacaatttggttggttttatctgacgaatctgaaatatgggatgcttttaacagcttaatcggtttaatgggtggtcctatgaccggactatttatgttaggtatttttgttaaacgtgctaatgcaggtagtgcggtcgcaggcattatagtaagtatcattgctgtattagcagcccgttatggcagtgaccttaactttttcttctatggtgtaattggtgctatgtcagtagttattgttggtacaattactgcgccatttttctccgcagcaaaacaaatttcattggatgatagtgaaatatccgggaactaa

SEQ ID NO: 282522 - DNA, 1470 bp, Morganella morganii
atgaccgactccgctcgtaagagtagtttggaaacattaagaaagaacaaggccgaacttgatttcgccgttaaatcccagcaggggtatctggataataaaaataaaattatccaggccaatgaccgagaaaagaaaagccagcaggatctcaataagtacattgaggcgagcctctctcaggcagaaaaaagaacgcgggagcacgaaaagttaaaccgtgaaattgctgccaatgcaaaggctgcaaaagataccgcctctgcatctgacagtgaaaaaatcaggctatggacacctgatgaaatagcgaaagccagagctggtattgataaaaaatatgccgaccctaagacgccaaataaacgcgattatcgtgttgatgaaggaacaaaagcagaagaaacggccttaaaagagcaaattgcacttgaatcaaaattgcgcgtgctcagagagcacaaatctgttacggatgtaatcagtgctgaacgtaaaaagctttgggaaaccgaggctcagattgccattactgaagagtccagaggtaagcgccagttaaccaaacaggagcagacgttgctggcaaataaagcggcagtactggctcagcatgagaaactggcactattgggtgatgaagttgttgctcaggaacgcctgaataaacttcaggatcaggctgataaatacgttaagcagcagactgaaaagcaaaatgcaatccgcgatactatcggcaaatcttcgcgcgaagcgcagcaggctctggagaggtcgcaaatcctctccgctcatcaggacaatccgcggctgaatgaaatgctggcggctcaggcagcaacgtatgcagcggaagaggaaaagcgggctgactggcttggtggtgcacagactgcgtggggggattaccgtgatgccgcactggattcaaatgcgcagatccagaatgccaccatggctgcactgaacggattttcaactgaactgacctctgtgctgacaaccggtaaagctaatttccgtgagttcaccacgtcgatactgaaaatgctgacagaaatttttgttaaaaaatcgattgttatgggaatggatgcgatggggtttaattttaccccaaatgccaaagggggcgtttatagctctccgtcactgagtgcgtacagtggccaggtggtacataccccgacaatgtttgcctttgcaaaaggtgctggtgttatgggggaagccggaccagaggggatttttccgctgcgccgtggtctggacggaaaactgggtgtagtggcgaaaatggctggtggaggtgatggtgtagttcagcattttaatatcaccattcaaaatgacggcagcaacgggcagatgggcccgcaggcgacacagcaaatcctgaagctggttgagcaaaaaaccaagcaggttattgcatctgaacgtcgtccgggcggagcaatggggtaa

SEQ ID NO: 282523 - DNA, 441 bp, Morganella morganii; identical to SEQ ID NO: 277447

SEQ ID NO: 282524 - DNA, 678 bp, Morganella morganii
ttgattcacacggatactgcatactcagcgaattgtgagctcgatactcaggattcggcattatgcgaggcggcaaatggtggtgacgctggtgcccaggttacaatcggatcttattactactacggtaatggtgctcccatagattataaaacggcggctgactggtatacaaaagctgcggtacagggtaatgagtacgcacaatattctctgggggagatgtattttcagggggagggagtgcaacaggattaccggcaggctattgagtggtttcataaatcaggtgagcagggaaatgctggtgctcagtttcgtcttggtgctatctatgaagacggtgatggagttaatccggactttttaaaagcggcagagtggtataagaaagcagctgaacagggaaatgcattttctcaataccagcttgcgaaaatgtattattacgggaagggaatagaacagaattaccgcgttgcagcggagtggtataagaaagcggccgatcaaaaatatgcatttgcactggcaaagttggcagagatgcatctctctggtgaaggcgttgaaaaaagccaaccaaaggccgagtcattgtatgatgaagcatgttttggtgggtttcagtcggcatgtgacagccttgcgaagctgaataaaaaaaaccagcactaa

SEQ ID NO: 282525 - DNA, 321 bp, Morganella morganii
atggctcacgggattattgtatatgatgatcgcggtaataaaatattagattccggtaaaagactcggtcggttcgtcggctggcatgatattaatcctgcaccggtcggtcagtttaaatacagctgggatcaccggaacctgctccctatgggggagatttttgtctgggttaatccgagcttttggttcaatcataacggctggtgcgattgccgggttgaaaatggtgtaattgtttttgaaggtaatttaaagcgaaacgatgagcagagagccagggaaacttatatgcgcatattatatggtgttaaatcatga

SEQ ID NO: 282526 - DNA, 687 bp, Morganella morganii
atgactcacggttttatatgttttggtgacaccggccggatgcaaattgacggcactaatatagcgttagggctaatcagaaaacagtcgtttcattgtccgaaagtgcaggatgcaggacagggaaccattaaagaggtttattttcctgccagagttcatccgaaaacacaaatgatcgcagccagagcatcattctgggtcagaataggcggtcaggcgtttgacaatacgaataacaatgcttttgtctcgatgcctttccgcgacggtcccggcggaaatatagaaatctgggagtttggcaacgctcctgttaaggtgcgtaatcaaaaaacgggaatagttgtgataaacccgctaaccaatcaggtggtatataatactaactggggcgttgcaaatatactgcatgttcagcggcttaaactatggcctgatacaatgtggtctatgacaatgcctaataatggtaataactgtgcagttgtatttggcggtggtgctcagaaaagaacaaattatgatgaatatatggaattcgagtcttatttctggcgaatgaacggttctaaactggaagtacgtctgttggttgatacgtattccagaccgcatgcatcacaatcttttaaatcatgtgatataccgctatatataatgataatagatacaacggggatataa

SEQ ID NO: 282527 - DNA, 267 bp, Morganella morganii
atgaatatatcaaaattaatcacattagctgcaataactacgctgacagcctgcagccataatgtatacaccaaaccagtggattgcaccgggcatatgtttgaggggctggataaccggcattattcagctaagctgacaaaatatgcgccggacagtaaacggtttttcagtacaggtgatcctgttctgggtttgcatggctggatccgcatggatacgtttgacaaaattacatgtgttaaaggcaagagtacagaggactga

SEQ ID NO: 282528 - DNA, 330 bp, Morganella morganii
atggaaatattcacctggaaagttaaacccggcatgaacattgagagcgaaccccgtgttcgctctgttcgctttggtgatggctatgagcagcggcggccggatggttttaatactaaccttgaaaaatacagcattacattatcactaaagaatgctgaggctcaggttgtcagggcttttctggaaaaacatgcgggcgtgactacatttttctggaaaccccctcatcaaatgcatgtgatcacggtattatgccgcaaatggtcattttcagttggtgtactcagaactgagatcacggctgaatttgaacaaactattgcatga

SEQ ID NO: 282529 - DNA, 1020 bp, Morganella morganii
ttgaaggagcacaaatctgttacggatataatcagtgctgaacgtaaaaagctgtgggaaaccgaggctcagattgccattactgaagaggccagaggtaagcgccagttaaccaaacaggaacaggcactgctggctaataaagcggcggttctggctcagcatgagaaattggcactgctgggtgatgaagttgtcgcccaggaacgcctgaataaacttcaggatcaggctgataaatatgttaaacagcagactgaaaagcaaaatgctatccgtgacagtatcggaaaatcctcacgtgaggcgcaacaggctctggaacggtcgcaaattctctcagcacaccaggacaatccccgtctgaatgaaatgctggcggctcaggatgcaacatatgcagcagaagaggaaaaacgcgccaactggctggctggggcacagactgcatggggtgattaccgtgatgccgcactggattcaaatgctcagatccagaatgccactatggctgcactgaacggattctcaactgagctgacatccgttctgacaaccggtaaggctaacttccgggagttcaccacatctatactgaaaatgctgacagagatttttgttaaaaaatcgattgttatggggctggatgcgatggggtttaattttaccccaaacgctaaagggggcgtctatagctctccgtcactgagtgcgtacagtggtcagatagtgcataccccgacaatgtttgcctttgcaaaaggtgctggtgttatgggggaagccggaccagaggggatttttccgctgcgccgtggtctggacggaaaactcggtgtagtggctaaaatggctggtggaggtgatggtgtggttcagcattttcatatcaccatacaaaatgacggcagcaacgggcagatgggcccgcaggcgacacagcagatcctgaagttggttgagcaaaaaaccaagcaggttattgcatctgaacgtcgtccgggcggagcaatggggtag

SEQ ID NO: 282530 - DNA, 324 bp, Morganella morganii
atggcaaagaaacctgtttttaatgtatatcacgataccggtgagatagataatattatagattctcttgtatttgttattcactcggaaaaagttgatttttcaaaaacaagtatgtcgtttgacagtcgttacctgaagggcggtgaaaagataatagccgttcctatagtgactcatcgttcagaaatgaatggaaattaccctacggtaacaaatgtaaaagtaaacggtaatacagtaacgtgggtatatgagcatgacagcggtatggcaagtgccacggtgccaataattcacgtatttaaactaatggggagatga

SEQ ID NO: 282531 - DNA, 1056 bp, Morganella morganii
atgaaaaacactgttaatttaaacagtattaatttagtcaacgacgactcactcagctatatcaaaacccttccggacaattgcattgatttaatcgccacagacccgccgtattttcaggtaaaaacatgtgcctgggataaccagtggccggatgtttctgcttacctttcctggttggacgaaatgctggctgaattctggcgggtactgaaaccaaacggcagcctgtacctgttttgtggttcacgcctggcctcagatacagaaatactgttacgggagaggttcagcgttctcagtcatatcatatggacgaaaccttccggcccgtggcggcggcaaaacaaagaaaacctgcgttgtttttttccgtctactgagcggctgctgtttgcagagcattatcagggaccggtaaaaggaaaaggcagtgagtaccaccagcggcgggatgaactgaagaaaaatgtgtttactccgctgattgagtatttccggcaggcgcgtgatgcattgggtatcacggcaaaagaaattgaccaggcaaccggcaagcagatgtcttcacactggttcgggtacagtcagtggcagttaccgaatgaagcggattaccggaaattacaggtactttttcagaggacagctgcagagtgtcagcgaaataacccgttataccgtgaacataatgatctggtcagtgagcaacatacactcaggcgtgaatatcacgaactggcaggtcagtatcagttattacgccgttacttcacggtatcagttgatgtgccttataccgatgtgtggacattcccgccggttcagtattatcccggaaagcacccctgtgaaaaaccggccgcaatgatggagcacatcataaaagccagcagccgcgaaggcgatttggtcgctgatttctttatggggtccggagcgacactgaaagccgcactgaagcataaccgtcgcgtcctgggagtggaaatggaagcggaacggtttgaacagactaaggccgagataactcaactatccggaatttccggatag

SEQ ID NO: 282532 - DNA, 168 bp, Morganella morganii
atgagcctgtcgtattccaatgctcttattgttgctaatggtaaaaagccgcacacagctcttgtgttaagtgataacgaggtgattgatactgtggcggcgtatatgaaaaaggccgccctgtgcagcctttggaatgtgaactatccggaaattccggatagttga

SEQ ID NO: 282533 - DNA, 936 bp, Morganella morganii; identical to SEQ ID NO: 277542

SEQ ID NO: 282534 - DNA, 363 bp, Morganella morganii
atgagcgaaaataaccgcatgaccagtgtaccggactttctctccgagttagacgccggtatgtttgaaaacaaactttctgctgcactgaatgaagtcgcttttggtaccaataagaacggcggtaccggtgaagtacatgtgatttttaaattcactcagtcagatgaagaccgcgtgaaaatatctcacaaactgaaaatggttaccccgaccaagcgcggtaaaaaatcggaagaggatacaaccgaaacaccgatgtgggttggtaaaggtgggaaactcactattctgccggaagaccaggggcaattatttggtattgacggaagtgttgacgggaaattaaaagccgttaagtaa

SEQ ID NO: 282535 - DNA, 363 bp, Morganella morganii
gtgccccgtgcgcggttacttgtgaacagaggtaatctcccggccattgcactcggcacagctaaggttcagttgtcacgcaaacggcgtgataaacacggacgcggcagtgtactgaaaatcgggcggtttaagtttgaggatgcatttattcagcaactggcaaacggtcgctggcatgttatgcagcgcaccagtaactcacgttatccgattgatgtggtgaagatccccctggtaatcccgctgacacaggcatttacggatgaaacagaatcacttctgaaatccgatatgccgaaagaactcgggcaggcactgaaaaatcagctccggctgtatatcaaagcgaggctcccctga

SEQ ID NO: 282536 - DNA, 294 bp, Morganella morganii
atgtcaaagttaagactgttatcaggacagtatttaaggacagcgaatgcgctgttgctcctgttcccgctgatgctgttagtgagttgcggaaatacgcggacggaatacgttcccgcgccggtggtgccgataccgccacaattgaccgctgattgtccgcagccggttattcctgatgaacttacctacggcgatgtaatcctgttgctggctgatgccatgaagtcgatagctgactgtaatcacgataagcggtcaatacgggagatagaagcggagagaatgaagtaa

SEQ ID NO: 282537 - DNA, 186 bp, Morganella morganii; identical to SEQ ID NO: 277741

SEQ ID NO: 282538 - DNA, 612 bp, Morganella morganii
ttggtagaattgacaaaagtatttaggtatactccagaaatagctacttttctcgaagatattgatggagttttcccaacattagatctagcagatgaatggaataaactgaaattatcttcaagtgttaacaatggagtcaagccagagctaactatatatgaaaaaaatataaatctaattgactctgtatttggagaagctgtaaggttagctaaaagaaataaggaaaataatatcgctatcttatgtattaatccggaactgtttagcaaatatttaaatgtaggtagaattaataaaatgtatgaagctgtaacctcgcgcgaagaaacaataaagattgggagagcaaagggaattcctattttcagcatgcctgaatatgttgcaggacttcaatttgatatagtatatttaatacatgtagataggaatgaattaccggactctataacacataatggcgcttttagaagactagtatcacaagtctacttaggtgcgagtcgcgcacaaaaaatattaaagctagcatcctctgaagaaagaagaggatattcttcaatattagaatcagcattgaaaaatgaatcgttagttaaacgataa

SEQ ID NO: 282539 - DNA, 312 bp, Morganella morganii
atggacgaaaaggaactcaaagctctcgcggctgaattggccaaaggcctgaaaacggaagataacctcaatcagctttccatgatgctcaaaaagctcaccgtcgaaaccgcactgaatgccaagctgactgaccatctcggtcacgagaaaaatgcttcaaaatcaggctctaatacctctaacggatattcttctaaaatgatcctgacgaatgatggtgagtttgaactgccccgtgaccgtggaggagatttaaattatttttctatctactcaactgacatagcttcctgcataaaaacctcatga

SEQ ID NO: 282540 - DNA, 342 bp, Morganella morganii
atggctaagaattttcagcagcaggggatgaccatcgcgattgttaacagcggaaccaaacccgttaccagcggttcactggtacaggttggttcactggccgcggtggcaattacagacattgccgccggtgcaaccggtgacggatttgccgaaggggttttccggctgcctaaaaaaaacgggctggtgcttaaagcgggggcggcggcttccgttaaagacggtcagctggtggataccggcggcgtggtgatcggcgttgcctgggaggatgcggctgccggtgacgcaggtgccgctgtgaagattaatgtcttcccgccggcggcacagggataa

SEQ ID NO: 282541 - DNA, 279 bp, Morganella morganii; identical to SEQ ID NO: 278995

SEQ ID NO: 282542 - DNA, 477 bp, Morganella morganii
atgaataagcgattggttaaaaaggtaatggccgcttgtgctgccggggcaattgccggtgcgctggtgctgatccccgcatatgaaggtgttgagtatatgccttatcgtgatgtggccggagtgctcaccgtatgttatggccataccggcagtgatattcagcccggcaagctgtacacggacgctgaatgcaaggccctgttgcacgacgacctgacgaaagtccggcgtgcggttgacccgatgatcaaagtgccgattgatgacaatacccgggcggctatctattcatttgcatataacaccggaaccggtgcgttctcgcgttcgacaatgctgcggaaactcaatgccggtgatatcgcgggtgcctgtgacgaaatgaagcgctggacatttgccggtggtaagcagtggcaggggctgattaatcggcgtaaaacggagaaagcgatatgtcacggaaccctttaa

SEQ ID NO: 282543 - DNA, 261 bp, Morganella morganii
atgatcagcactgaacagggctttgccgtcactcagtttcccgttatctgtcagcacggcatacaccaggtcaccaatggtggcttttgcggcccggccgagtttgttcgggatatcggtcagcgcattcatatcatcgttgatgatggcctggcgggtgatactgaacagttccccgtacgttgccagcgcaatggtctgccccttgtcacctgtggtgacgtatttatattctgccccttcgcgcacctgacgcagtga

SEQ ID NO: 282544 - DNA, 219 bp, Morganella morganii
atgaccatagaagagattgacgatatgatccggcagtatgcggaggcagaacgcgctgtattacagggcagaagcatcacgatgaacggtcagagcatgtcgatggaaagcctgagtgaaatccgcaaagggcgggcatactgggagcgctgccgcagcggtttgttatcgtcccgctccggcaggccgggctataagctggcgaggtttccgcgatga

SEQ ID NO: 282545 - DNA, 255 bp, Morganella morganii; identical to SEQ ID NO: 277729

SEQ ID NO: 282546 - DNA, 192 bp, Morganella morganii
atgcgcatgtctgacaaatattccagccctacagcatacgcctggggacttataacctctgcttttggcgttttatctctggatcagtgggctattgttgccgggatcatctgtactgtcgggacgttcctggtgaactggtattacaaacggaaggaattccagctgaaagccggagaacatcatgaataa

SEQ ID NO: 282547 - DNA, 534 bp, Morganella morganii; identical to SEQ ID NO: 22864

SEQ ID NO: 282548 - DNA, 219 bp, Morganella morganii; identical to SEQ ID NO: 277738

SEQ ID NO: 282549 - DNA, 369 bp, Morganella morganii
atgcacgtccatttggtctttgtcacaaaataccggcgaaaaatatttgatcaggatgcaattgaaaaattgcgaggctactttgccagtgtttgtgctgattttgatgttgaactggttgaaatggatggggaacgggatcacgttcatttactgattaattacccgccaaaactggcgatatctaatctggttaacagccttaaaggggtatcgagtcgattacttcgacgtgatcgtcctgatattgcccaacgtgattactacaagggggttctttggtcgccgagttatttcgcggggagttgtggtggcgcaccaatatccattatccgccagtacattgagcaacaggaaacaccgagttag

SEQ ID NO: 282550 - DNA, 261 bp, Morganella morganii
atgtcggccggtgcagccatgatgctgggcggtgtggcacagatgctgacaccggtagcgaaacagccggatatgtcgcggggtgaggaagagaagggtaatacctatttcagtaacctcgaaaataccgtggcgcagggcgtggccgtacctgtggcctacgggcggattatgtgcgggtcgcgggtgatttcacagtccattgagattatggatgacagcgacggtactaatattgatgccggtaaacacggcgggtaa

SEQ ID NO: 282551 - DNA, 915 bp, Morganella morganii
atgaacacaacgccgtccgcaaatcagagtcacatacgcagttatattacactggcactggtggctatgatctggggcggcacgtttgtggccgggcggatcttatcgccggaaatcagcggattatttctcgccacacttcgtttcctgattgcctctgcggcactgtttcttatctttaagctgggcagaattccgtttgtccgcccgacggccgcccagtggcgcactatatttttgctcggattcttcgggatatttctctataacctgtttttcttttacggactgaaattcacacaggcatcccgggcatcgtttattgttgccggtaatccggcagtgatcgccctgattggttttttccgcttccgggaatccctgagtatcagcaaaatcgccggtattgtctgctgtctggccggggcgttttctattattttactgagccgtccggacctcagcggcggcggggaagataccctgacgggagatttgctgattgcgggctgtgttaccagctgggcggtgtacacggtattttcccggccggtgattacggcgctcgggccgttggttactgttgcctactctatttttgccggtaccggattactgctgctggcctctctctttaccggttcgtttaccgcagaagccgcagcggcgctgacaatgcgggatattctctcgctgctgttccttggcgtgatcgggtcggcgctggcgtattatttctattatgacgggatcggaaaactcggcgccacccgcaccggggtgtttattgccctgaatccgctgacggcggggctgtgcggctatttctttctgcaggagccgttaccgggcacggtgctggcggccggggcggtaattatctgcgggattgtgctggtcaaccggggaaaataa

SEQ ID NO: 282552 - DNA, 717 bp, Morganella morganii
atgattaactttactgaaattgatagcgacggtgaagtctgggaatcgtttgcccgtgattttctagaagaacttggcttttatattgaatccacaccagatagaggtgcagacggaggtaaagatcttttaatcacagagcaattgcaaggtcagttaaataaatataaatttcgttggcttgttagctgtaaacattatgcaacaagtaaaagatcagtttcagaaaaggatgagattaacatacaagaacgtattgatggattcaatgccgatggatttattggattttactcaacactaccaagtagtggtctaaattcaagactgacgcaattaaaagaaaatggaaaaataaaggattttagattctttgatgtagagatcatacataatgacaaaccaaacgaggtgatagcagtttattatgcgtgtaaaggtgattgtgataaacatttggaggattattactggaataaatatgaagcgattacgaaatggcaggatatcagtgatttatctatcccattgttctatctaaaatggattatggggacatttaatgagcttgagtctggaagaaaaatatatactaaagaagccttcaataaaacaaaggagataacgttagcgctatctcaaattgttatgagagaaatgacagaaaaagaaaaagaaagggttatggctttgaatttcttacctgattacatataa

SEQ ID NO: 282553 - DNA, 495 bp, Morganella morganii
atggttagtgatgttagtaaaaaatcaacatcagctaatgatggaaagaaaaaatcagaattaaataaaccaaaattggacaagacaaagttaaataaagatactgcaggcagtgaaagtactacgggaagtaaaaataccccggaaagtaagggtaacacagacagtaaagataccacaggtaagaaaaaaggtggtttttcacttaatgaattacattcattgctgacagatttttattctgaagagaaatttaaaattaattcaagagctcatgggtacaatcttaaattcatcagggagttatggtctgataataaagtaaatcaattatcagagcttatttctgaatccggggatttgattaatgaccatattgaagcaacagcagagtattatttctcacaaatggatagtgagcagttgggaaaaatgccggatggtgagctgaaaaataagttaaccggtaatggtgtgaaatttctttatatttaa

SEQ ID NO: 282554 - DNA, 555 bp, Morganella morganii
atgagaaaatttattctgtcagggattatggccgcattattatccggctgcgcaggtacaggaagtaaaacaccggaagcaccctggggctttacatgggggcagacgcccgcagaattaaaagccctgaatctggacgattttgactgcacaaaaacccgtgacggcgggcaattatgcagttcactggcatcaccggaggttgaaaagcaattctttatgatggtcttttcaccggaagggcaaaaattaaatgcaatatcccgcttcggtgtctggagccatgatcaggccgcattactgaatgagtacgataaagtaaatgcggagatggagaaaatctacggtaaaccggccgggataaatgaagaatatgatcgcaaaacgccgttcctggcaaaagtcgccaaaggaaaaatcgggcagtttaagcgcaaatatgaatcagaagataccgaggttgtggtgggcgtggtcagtaatgccaatctggtacagataaatgatgaaaaagatgtcacttatactgtgctgaccatgtatacactgaaataa

SEQ ID NO: 282555 - DNA, 1143 bp, Morganella morganii
atgcagatttaccgggtggtttttgaacggaaaagcagggcgattaatatctgttttttctttaatgcgctgggctccgggttactgatgccgctggcattactttactttgccgggaaaacactcagtgaaaaagaaattctttatctcggtacgattaaattctggtcattttcactggcctatttttttattattccgctgataagccggtttgacagtaaaaaaaccattgttttttcactattacttaaattgctgtcactgtcgtttttgtttatcggacaaacattttacctgtgtattgtggtgatgctggcaaacggtattgccacctccgtattttcagtagcagcaaaatactatattaaagccacctcagaaaatatcagtgaaagtttttcagtccggatgacactgaataataccggggcggcggttgcaccggtactcattacactgtgtgtctttttttcactgccttttacgtacgcattactgattttgaccgggattttcatgattggtattctcttcgcagcaaaactgcgttcttgccccagtgaaacgaaaaaccgtttttgttacctccatttttctgatctcaccggcagagacaccgttctgatctctgtggtcagcattatttttgccatgctgtattacagttttgaggtcattgtaccgctggaacttatccggtccggctctgagtatctgataggaccggttttgctgtttaatacgctggttattatcgcagggcaaatcccggtataccgttacttcacggagaagtggggtattactgctgcacttatggcggcaaccggtttatgcatttttttgtttattccgtggttctccggtatcgcggaacttccgggcctgttactgattgtactgggtgtcacgttgctggaaatgttttacggtgcgggtatcgatacattgattacactggcaaattcgccccgtaaaattgcggttctcgacggtctctccggtatttcactggcaattggtgcggcaatgacagcggcggtttacagcgattcgatactatttttaccgctggttattgcattatatatgcttgttgcggggatattgatattacgaaaatcgggccatcgtctgtaa

SEQ ID NO: 282556 - DNA, 372 bp, Morganella morganii
atgcttacacaggcattatatcttgccgccggccatgtcgtggttcgtccctgggcggattcacagggtgctattgatacctatctggaaaaacagcaactgaaacggcggataatggtggaattacccagcctgatggctgccccgctgattgtttctcagacagacctgattatcacattgccggaaaaaggggttacatctctttttaatatgcaggatttggtggtattcccggtgcctttccccgcgccgcagtatattttaagggcttattataatccggcattatgcaattcccccgggcaccagtggataaaagaacagattatggcaatatgttccggtagtaacaattatatcatccgctga

SEQ ID NO: 282557 - DNA, 480 bp, Morganella morganii
atgaaccgcacgtatataaaccccgtgattgcgggtttgaatgtccgttcggtattgattgatgtattcaaagaggcacagcatgccagtgaagttccgacgggatataacccagccctcgcaacaaagcaaccgtgtcagacactcaatatcagcctgcgggatgtgattgccggatgccgtgatctgtatgtcagcaaatatttagtccactacacacggattacatcacagtcacaacccggcggccaggtaaccgcaaataccctgaccaccaactttaaaaaagccagggataaaaccgatatcgactgggaaaaaggaacaccggcaacatttcatgaaatgcggtcattatcggagcgtttataccgggaacagggaattaatactaaaaacctgctgggccataaaaaccagcaacaaacagataaatatcatgatgatcgtggcaaaaattggataagggtgttgatctga

SEQ ID NO: 282558 - DNA, 402 bp, Morganella morganii
atgagagatattcaggtggcattagaacggtggggtaactgggcggcaacaggagagaataatctcggttatccgcatattgcggcgggatttaagggacttatcagcggcggtaattcaggtcgcctgttatgtaccgatacagacggcctgatgatcgacaatgctatcgcaaaattaaaaacagtccgtaaagatgaggaatatgacctggtcattgcgcattatatgtaccgtatatccaaacgggcgattgcccgcaaacaaaaaatcagtgagggccgggtccgccagatgatgcaggtcgcggaaggatttgtggatggttatctttacgccgccggtgctgctctggatatggatcatgaaataagtcatgtcaggccgtctttatgcaactaa

SEQ ID NO: 282559 - DNA, 471 bp, Morganella morganii
atggccggagaaaaaatctcaccggaatacgcaatgttacctgcgggcactatcgttaaatttggtgatatcggcgataccacggaaaaaatgaaacaactggtgaactgtaaagcactcggtgctaccggtcttaccggtggttttatcgatgtgaccacactcattgatactaataagcagtcaatttcggatttaccggaaggcccggaaaaatcactcggctttattgatgatccggcaaatgaaaactttgccgcattcctgaatgctgccgaaaaacgcgaaaccaaacagttttatttcgcactgcctaacggccggacagcaaccatgatcctggcattatcaggctgggaaatgaatgaaatcagtgcccctgccggggaagttattcagatcacggtgaaaggtaagcagaataatattgtctggggtaccaccaccgtctctcctgaagggggcaaataa

SEQ ID NO: 282560 - DNA, 345 bp, Morganella morganii
atgagcctgaaatcagcattattaaagccggatatgcatgttgaaaaacgcacattattcggtgctgaagtcaatcttatccgcctgaccgtcggccagcttgatcattatgaccgcgaagtccgggctgcaaccgaagccggtgattttggccgggtttctgtcgccggggcgaatttgatcttatcggccatttgtgatgaaaacggtaagccgctgaaggcctcggatttaccgacagcaaaacagctgattgatgcacacagtaatgcggcatttttaaccgccatgaaaacattgcagcaatattgctacggtacagtggaagacgccaaaaaaaactga

SEQ ID NO: 282561 - DNA, 2949 bp, Morganella morganii
atggctgacattgaaactctggcggctgcattacaccgcaatgcagcctcctttaaggcggacatggcggaggcgtacagcagtgcatccgcagactcgctgaagttcgcacagtctgccggtgcggatgcggctggtactgcaaataagctggcgctggtctctgatgaggcaaaacgtgccggtaatcatctggcgcaggcaggtgccggattcagtcagttcgctatcccgctgacaacgttactgaacagtctgaataccggcgggtcattgacgttctctgcactgatcccggcgctgggacaggcgctgaatgaaaccggtaaattaagtgctgagattgataataagcgcgcgaaggatattgcggcagcggaaagtgctctccggatggctcaggctcaggtacggcaggcagagagtgcaaaacaggcggctcagtcacagatccggctggccggtaatatgcgggatgaggccgtagcccgtcgcgaacaggcgctggcgctggatgcgtattatgcgaaaaaagccgcgctcagtaagcaggacggcaccgatgtttcttatgcaaaagaacacgcaagaaatgcggctgttatcagcaatgccaacattgcggagacaaatgcgaagttacaaatcgcaaatgcatcccgaagcctggcggatgctgagcgcagtgaagtcgcgggaaaacaaaacctggcgacggcgatcacccgggtggctgacgaaaacaaaaaactgagtgtttcacagcggctgaccgcgcaggcgagtggtctccttaaaagtacgtggggtatgctcggcggtctgccgggcgtggggctgatgctggcggctgacggaatttcttacctgtattcgcagtataaacaggcggaagaacggcaaaacgcctttacacaggcgatacagcagggcggcgcggggatcagtaactccgtttatcagctcagtgctctgacaaatcatctcggcggaacggctgaggcgtataaaacagtgacaaccgcagcgggggcgggtttttccggcacaatgttgcgggatatctctgagtttggtgtgcagctggaaaaatccggcggcagtgcggattatatgatctcaaaactggcatccattaatgaacagccgttgcagagtctgcggcagcttattaatgaagggttggcatttgatgagaacaccataagccggatcgccctgctggagcgtcagggggatgtggaagaggcaaaggaactggcccgtcagagtgcgctggatgccactaaaaaactgcatgaagaacagacccggattaatactgttcacgagaaaggcgttaaagagattgaggatcgctatgcgtccctgaatcagaatgcgagggatttttcagtcagcaccggtattgccagaattcaggcatccaatatggaaaaactgatgtggcaaatcggcaccacaatacaaaatgcagcactggaaaagcagcaaaaagagcagataaaagatacccgtgaacagttggatgttgagctgaaattaaactcagcacatcaggccggcagggacagaaacgcggaaaaacagcaactgcagaatgttgcccgtgaacagctgaaatccgggcagatggatgccgcgcagtttgaacagacgatgaaggggcttgataccctttacggttcatctgtgcaaaaaacatccggaagccgtggcagtgttataccggagggacagcgccggacacagcaactgatggagcagacggctgtactcagggcacaactggccgaaaacgaaaaactgacggaatcagaaaataaattaatcgcatttgaccgcgaattgctggatttatccggtaagaaaaatgatgccggtaaacgaagtgttcaggagaatgcggcggcaatccgttcagtactggaaacgaatgcggcgcttgagcgggaaatcgcgctcaaaaaattaagcagacaatatgatgaacaaaatcgtgatctgaaatcccggactgcgaccatgcagcaggaggcggataatcagagattacagggcacgatgtcgccgatcaattttgaactgatgcaaaaagagcaggagatagcggcggatttcggccggcgccgctatgaactggataaaaatgtcacggataaaacatcggatctgtatatcgcgcaaacaacgctcttcaatgaagagcaggaaaaacaactcagcattgtgcggcagactgccggtgaaaaagcccttaaggaagagagctggcaggaaggtttaaaacagggttggaaagatttcactgcggacagcggcagtgcatttgaaatgatgcgcggcgtatctgccagggcattaagcagcacctctgcattattttctgatttcctgttaaccgggcgtgccggttttgccgattttacccggtcgatcctgaccgatattgcgaaaatgatcattcagatgatgattttcaacagtattaaaggcgcactcggcgggacgtggcttggtaatttgatagggattgaaccgaacgcagcgggaggtgtttacagctctgcgggactgagttcatacagtaacagcattgtcagctcaccggtgttttttccggtcagtaacagcggtacacccacggtcgggctgatgggggaagcgggtgatgaagctatcatgccgctgaagcgcggacctgacggcaacctgggtgtcagagccttcggcggccgggctgcggctcccggaatcgccggtgcggcggcgcccgtggtgtatatcaccgtgtcgtcagaggggagcccgcagacacaggcgaccggcggatatgagcagttcggcagagaagtcgggcagtttgttgatcagcgttaccgctcactggtggcatcggatttacgtcccggcggggcaatctggaatgtggcgaaggggggaagatga

SEQ ID NO: 282562 - DNA, 708 bp, Morganella morganii
atgcgcaaaaacattcaggcggccatttttgcacatgcaaaacgtgattacccccgcgagtgctgtggggtgatcgcgcaaaagtcccgggtgatgaaatactttccctgccgcaatatcgcggtcacgccggaagagcattttgtcttatcgccggaggattacgccgctgcggaggattggggtacagtgaccggtattgttcacagtcatccggatgccaccacccggccgtcagaactggatagcgcacagtgcgatgccctcggtgtgccgtggtatatcgtcagctggccggaaggggatctgcggactgttcagccacgcggtgagcagccattacttgggcgaccttttgtgctcgggtttacggactgctgggggctggtaatgagctggttcaggcaggagcatggcattgaactgccggattaccgggtggattatccctggtgggagcagggcgaaaaccggtacacagataattggcgggaggcgggatttattcaggttgatgacccacaacctggggatatcattgtgatgcaggtgcaggcaccggtcgccaatcatgccggtattttgctgggtaataatatgctgctgcatcatttgtatggacacctgagccagcgggttccgtatggcggttattggcgtgatcgcacagttatggtactgagacacaaaatattcatgacaaactag

SEQ ID NO: 282563 - DNA, 651 bp, Morganella morganii
atgaaacccgcgaaagcgggttttttaatggaggagaaaatgtcacaggaaataatggcaaaaatagagctgggtggtgtattgggtaagacgttcggtaaaaaacatcagcgtcttgtcagtactacgtccgaagccgtccgggcgctgtgctgtactatttcgggctttgaacagttcctgaataccagcaaatcacgtgggttaacttacgcggtatttcgcgggaaaaagaatatcggggtggatgacctggatttcccgatgactgatgatgttatccggattgtgccggtggtgatcggcagcaagcgcggcgggttatttcagaccatttttggtgctgtattggtagctgtcggtgctgttgggatgttcacaccattcggtctggcgttaggcggagcctcgtggggcagttatatgatgcaggtaggtggcgcaatgatgctgggcggcgttatgcagatgctgtccccgcaaccaaacgggcttgccatgaaagaccagggcgagaataaaccgtcctatgcgttcggtgcaccgacgaacactgtttctcagggttacccggtaccgatcggctacggtaaacgccgcatcggtggggccgttatctctgccggtatttacgtcgaagatcagcagtaa

SEQ ID NO: 282564 - DNA, 1587 bp, Morganella morganii
atgatttacaccgacggcaccatagccattaatgccggttcaccgatcgtaaccggcaccggtacgcagtggaaaaagaatattcacggtgtggcccccggccagctcatcagtatcgagaacggcacagtaccgatcattatgatgatccgcgcggtaaacagtgataccgaactggtgttgtcattcaatgccccggtaacgctcagcggagcaaaatactccattgccaccacggtaccggataccatttcagatgcagcccgcaccatgtccgccaatcagggctatatcgtttactttcttcaggcaatgcagcagtggatgactgatacaggccaggtggagattgagctgccgaacggccagaaagtcacgctggaggatgtaaaagggttggcttcacaggaatgggttaacaatatgctcctgacaaacggggagctgacacagattcagtcaccggccaaaacgagagggatttatgttaatgataacggggatattggtggaaacctcggtcctcatcagaactggaaggtggacgggaatgcaaaagcccatttcagggaattagaagtaaaaagtccgggggattacaccggtattaatctggtaaaaggtgatggccgatatgtactgatagaaactaatccgcatgccggtagtgtatcaatgctgacgtttgcatacagaaatgcatcaggagaaaaccagcacgttattactataccgtatgactcaggtgcgctggctactcagacatatgtgaaatacagtacagggtttggtatcggttctgaggcgggtggtaaaggaattacagattttaatagtttcgttacgccaaccggtcagtactggtacggaaattcctcctcaaatattccccagactgttgtgggatttggtaccgcactggttacacggtattccaataatatttcgcatcatctgattattccgaactatggcggagggagttatctcgctatcagacgtaacaatggcggggcgatagaggatgtcgttgccctgacatccaatatgtatatcgtagacggcagtggatattataaaaaatcgtcgccaatcgttcaggtttaccctgatggccattacgagaccaatgatgaatctgaaggggctgaagtccgccgcatcggcaccggccagtatcacattaccggcatcctcggctacaactcagatggtgcatggggcgtaaacggcggtatttcggtaccgaaagataataacggccttgagctggtttatgtcgatgaccgcgtacagaaagatggcagtattatcatcgaaacctgtcaccgtcagcacgcgcatttaccggaacgtttccagaactggcggctgaaagaagtcaccccggaaggtgagcgtattttctatcaggacggcgaaccgtgtgatctgccggaatccacccgcctcgatgtgcgtgtggaaatgccgcagggctcagtgtggaatgtgaagcagcgtgaactggctgaacagatggagcgtgagcaggtagaacgtgaagcgcaggaagcagcagagcagggcgcagatacagaggaataa

SEQ ID NO: 282565 - DNA, 1359 bp, Morganella morganii
atggcaccaatagtcatcaatccaataagctattcaagattcaatgcgctagctacttatgctagaaacccacgagttaaatctcattctaatgagttagaatggtttgaaaccttagacgggaaagtattaggcatgttgttgtttgatactattgacaacgaatatactggaattatattcgctcgagatctaaataaaaaatatcgttttattggcatgactgaatttgacgataacagagctaaaacaaagaaaagattattaaataaaatacgtgaattatatccatccgctgacgaacaagggatacaaggtgatgaaagtgttgaaacaatggattttttcattgaccttaataaggaaaatattaactccgacttcattttagtaaagaacgcaccagaatattcagcagccaaaaacattatagaaccgctaatgagatggtacactgacatagatgggaattttgtagagcaatttcaaacaactgggtttaatcaacgggtttgggaggtacttctttactgtatatttactgaaaatgactgcgtgtttgatacatcattcaatgctccagattttaatttatcctatgttaatggattcaacagcataccattctcaatcgaggctactacagttaataaaccggtagatcgtagaggtcaaccaatcccaatgccagaggtaaacagggaaaatatagatgaatacaataatcttttggtaaattattttccaactcggtattctggtcctttgcttgcgaaactaaaaaagaaatattgggagcaggagcatgtttccggaaagccatttgcagttgctatagctgattgtcagttcaaaggtgctggtaatgttagtcatgacgcattgccattatacctttatggttttcaacaaaaagtgacatccgaaggtgttgaggagcgtgaaaatattggttgtcatatctggggaacaaaagaagttccatcaggcttctttgagctcgaaggggctgaaaacattagtgcaatattattctctccatcgagtgatattgataagttcaaccgaatgggattgaaagatggctttaatgacaataagtataaaatcagacgcacagtaaagtcacctaatattcatactggggagtttgaactcattacaaaaatagttccaaccaaaaaatataccgagacttgggatgaaggtttagtcgtttatcacaatcccaatgcattgcaccctttcccaatagatatattgccaaatgcaactcattatcatgtaattgatagtagattggttgtggagtttaatagcccccctataacagaagacatgtcagaaattataatataa

SEQ ID NO: 282566 - DNA, 177 bp, Morganella morganii
atgtcgctgatgactgcaaaacaaaaacacaccaaggaacaggttattgagttgttcaatcaggctgacatggatgaaaagcagattgagcagattgtgtcggagtggcgttggcgcagggagaacgccaaaacaagccgcattctccatcagtgcagaatgagactaccggcatga

SEQ ID NO: 282567 - DNA, 1056 bp, Morganella morganii
atgaaaaatgagatgcttaatgcctttgatgcacttgtgcctcattgcgaggtaagtgccgctttatgtgatgctgcctcaaaaggtttccttgatatacctttagatttgcactctatttgtacccgcattggtctaccacatgctagagctgccgatattgagcgttcgctgattgccgggcaagcatacgggatgttcaaacaatcaacgccccttacatgggtgataaatgactacaatcttgcgtctagtctagctcctttattactaggcgttcgtttgtacctctcacgtgcgaagcatatttatgctgctcgtcaacaggtgattgtgcaagttcacgatgaattaccgatactggccgcggagcaaccccgtgaattaatggagttgcatgctgagattgaacgagtatcactagaacaaatgattgataagtatcgtgatatgctcagtaaaaatctttcagagaacgcttggcagaaattttttgatcaaaatatatttattttgaccatgttgttttgtggaccagtacaccttgtttgcagccaatttcacgcacaaccaagtggaattacaggaaaaggtgcacaaataggcgactacctgtttcgtggtatgggacaggcattggctatcgtcgagatcaaaaaaccagataccccgctgattcaaaagagagagtatcgcagtggtggtggtgttcatgctcctgattcagagttaagtggtgctgtaagccaagtattataccaacgccactcacttcaatctgcttggagcattcatcgtgaaaatggtgagctttcaaatacaagacctgacaatacccgttgtgtcatcattgctggtacacttcctatcgagacaaaaatactacgctcattcgaaacattcaggtgtgctcatacaaacgttgaaataattacctttgatgaacttctacataaacttgaactattactcaacatcctcaccccaaaggatattttggagcctaatcggaaaaccaaattagacaacctaaatacggaacaaaattataagtaa

SEQ ID NO: 282568 - DNA, 2220 bp, Morganella morganii
atgtcaaaacataggggaatgctagcgaatgaagatgaaagcaaaacactacacgctcccacaatggcacgttcaagaggacaattggggtcagcctatgctcctggatcattctttacttttgaaggcggattaggagcatgtatttccattccagatttatcctcaacggaagatgacgcgcctatccaaccggaaacgaagtcacaaattgttctgagattgcaggagatttggcagagttggttcgctcgtgcatatgagattggaactggagagagtgaaatcgatcctcgtctttgcttggatgagtctcttctcaaaaggagtgtcgtggttccactagggggggatagcctgtcatttttaagtcccctaagaatggggtattctccagcaccgctgacttttgtttgtaacaaatgcaggcttttcaggagatttgaatcagttcaccagttagcggggagtatgggggagctgcgcaaggctcgttgttcagctgctgaggctaaaggtggatgcgagtggcgacaagtcgacgttatattcgtgcattggtccggtgagtggatgcctgtgactccaggcagatgggagtgggatgaacgtaataatgccataaggctatatggtgaagaatgtaaagtatgtggagggcaagatttcaaactcaatacagattcaccacgtatcggccagtggcatttttattgtgctaacccaaaatgtgggcataaaggaagcagttcatggcggcaaaatgaccgcttcacaacggggattttcaggaatcaacctggtatacctgttgccagacgccgtatggagccaatttcgtatcgtgcatcgtcagcgtattacgcacaatcagaacaattcgtactgtttcctgagtctgaacatcatctaatcacaatattagaaccacagcacgagactgaacttgctacctttatcggtacacagttccgatttgggggggggaaactttcgactgaagaaatgaaatcggctttattagctgctggtgaatatagtgaatggatatcgtatgaaaattggatgaaagtaagagagctagaaaaagataatccaactatgttgaagattgcagatgatgaaattaataaactgattactagatggactacaagtacacctccacttctgcggccaaatgccgatcttccatcggctgtaaaagagcgacttagacaacgtagcgaatataccagtcgttttgacccttttatccttgcggttgaacatgaagctttgaatcgaggcaaactttctgcccccggcgatgctgggcgggcgaagtttgtacgttttaaccatctggataaagatcttgcgccaaaaaatgtaaaagttaaggctatacaggaatctgagactaagcgtctaatgagtaaactcggaatcgctgatatgggattaattagggagttcgatctgtgccgatttacgcatggttacacccgagtttcggcaactcccgttctcaacaggcataatcaagatatgcccgtacgtttgaaattattcgaaccgttacgtaatggtaagcgacccatttatgttgtgacacaagcaaatgaggcattgtacgttcgtcttgatccagtagttgtttataagtggctccagtctatcggtgtgttagatctccctgaatgggatgaaagtaattccattaaattaggtgggaagattctagaggtaacgcagccttttggtcgttatttttctctcttaaaagaagatgaagcatcaacttatcgctatatttatacacttctgcatacctacgcgcatacactaatgaaaaacgtagcagaattatctggcttggatttagggtctatgggtgagtatatatttccgctagattttgcattcgtggtatatcgaaacggtaccactatggatcttggtaatttatcctctttgtggcgtaatgaaaataacagatttcttgcacgattgcttgagaactcgacacatcgttgcaattctggacgactatgtgatagcacggggggggcatgtcctgactgtattatgattccagagacgtcttgccttgctcagaatcagttattgtctcgtgcagtgttaaaaggagggcatccacctcgtgaggatgcaactcataaggggcaacgtatcaaaggtttccttgaaatagtgaatgatattgatgaaaaatga

SEQ ID NO: 282569 - DNA, 4194 bp, Morganella morganii
atgagccagcccacacttcgtgctaaccctgccgaaattagtgcaacactcaaggaagctgttgttgacagtctattaaatcttacgtacgcgcagctcagcgggcagggagaggcaggagaatatctttatggtgctcgaccaaggacacttttgaactctggttttctattaccacagcgtaacccgttaggagacgatgaggtaacatctcccatctgggtatcgtcacacggactgcagatgcagctcaatctttccgaatcttcaataataacggtccagcctaatctgtgtgtctatgtcagagttctaccccaagaagaagatctcacgaaaccgaattgctgcccagtatttatgttgcgcagagctattgttgacgaaattacggcagagcgtaaccgccaattggaaaaagcatgggaagaggttaaaggagcttatacttcaaaatggaaacatccagagtggggtactattcgctctcagattgtggaagaaatctatactgctagaggtattcctagacacttactaacatctgatttttcacaagatttcgtagaagttgaagtggaagtggaatcgtctagtgaaaaggatattccaggagaaggggctaaagaaggtatatttgtcaaagtaggggaaactttaccaataaaagacgaacattttgaaccgctaagtgttcctcataaatggatgaggttggatgttagtcttccgcctttacagattgatacatctaagtcttatgagactctcaaaagcaatattgctgaacatgcgatattaatgaatgcaactctatctgcgagactgcaggaatgggcgaaaagtgatgatcctaatgtaggtggaaaaaattggggatataggcatttggtaaatatccccgcaagccaatacactaaatgggatgatttcctcaatattgttcgcaattcaaagttacatatcgctttaccaagcattcaacttagttggaactttgaattgaacgaagattggctgacttcttccaagcgtagtttctttcttgctcttgagaatactagtagtataccgagtcagtatgaagatgagacggacgaagctatttttcttgtatcccttcaatttaaggttcccacttcacttcaccatcccctcaagcttgagcgtatcgatccatcttaccgttataacaagtacctaactcacccagcaataggccacaactgcggtattgttcaggtgaagtctgatgaagatttcaaagtattcgagacaaactggactcctcgttacatacagccacgcatcgttcctactagtgcaaatggagttctgcgtcatgtgcgttcactcgcaaagcctgagggattgaatggattagaacctctaataccagcaatgcgtgaatggattaacagtcttccctcgcaagtgaatcctgctgaaggattagatgcttctgatagagaaggaatcgctcgagaaggtggagctttcaggcaagatttgcagaaatggaccttcgaaatggatgcgatagccgtaggtttgaaatgtttggcggaatcgcatgcatcttggaaaatgcgaggatggcagtctgatcctaaagcgattgtctatgaagcgtggctagctacgaatgaaacaatggctgactttatgaagtcccgtttcggtaacgataaaggcgagtggcgtcttttccaactggcttttattatcgctaatatccccgcgttagcttcacgcatccctgagttttcacatttctatgatgagcgtagagatgatgctgttacattgctctattttgccaccggtggtggtaaatccgaggcattctttggacttttagttttcaatctcatgcttgatagactgagaggtaaacatcgtggtgtgacagccttaattcgctaccctttaaggttactgacgatccagcaagcacaaagatgcgcaggtgtacttgcacatggtgaacggattcgtaatcgctataggtatgggggagattcattagccataggtttttgggttgggagtggaggatctccaaataatcatcgtgaaaagggagttaaaagtatccctattgtgtcgtcggttcctcctgatttagctaatgagcagcttcttcgagctaaggattctaagtattcagcggcaatgcgtgcatggcgaaaattatcaaactgtccattttgtggtagtgaaactgcattgagattgtttgttgctcacggttatcagactttgggtcacgtttgtactgatattcgttgtgatttcaatggtggagattggaagcccttgccattttatatcgtcgatgaagatatctatgatttagcaccatcagtcttattaggtacagttgataaattagctcttattggtcattcaaaaaaaactattcggcgtatctatgctatgtttggagccgctccttgggttaatccccataatgggcgattacatgttccgaccaataatgatctagccgcagggccagcagcaaaaggcatggaaggagtatttcctgcctacagaaatggtaggcatatttttcacgatccgtttccaagcttgattattcaagatgaagctcacttgcttgatgagtcgctagggacttttgcaggcttatttgaatctaccctagatgcagtttttgaatatcttggtggctcccttaaagatcttgtggctgtgtgcgaccacgggcgtcggcgtcgttccaaggttattgcagcttcagccaccgtatcctctccagaaaggcagctagaacatctctatcaacgttcaattccagcagtgcagtttccagaacctggaccatctctgtatgagtctttctatgcaaaacctgcattggcagaagaagagctccgaaaaaagcatcccgacattgaggtcgcaagtcgacaggcacgtatatatacggcttttatgactaacggtaagccacacacatcaactagtgtcgcggttctatcagggtttcatttaactattagtcggctatttgacaaccttaccagtggtgctgagctgcaattccaaattgctcgtcagatgttagctggacatgtatcaaagggatcacttcaaaaactgcatacgcaggtgttatccgaggctaatgcttctgaattagctacgcttatcgacttgcaccgcattgcgctgacctatgtcactaataagaagggcggtgatcaaattatggcagcagaaactgaggagacgcgcaaacgacatattaacgaaggtattgagcttgggggactggacactcgtcttattaccggctcagtggagcaaggtgagattcaaagcgtggtggatactgcacaacggcgtgtcgccccaggagaaccactacctccgttaagagaacagctacgttccgttatcgcgacttcagctatctcacatggtgtcgacgtagatgagtttaactcaatgttctttgccggaatgccttctgacattgccgagtatatccaggcttcctctcgagttgggcgtacacatataggttttattgtccttgtcccgacgccacaacgtcgcagggataggcacatcgtgcatatattcgatatttttcatcgatttcttgaacgaatggtgcaacccgctgctattgatcgttgggcagaacgtgctatcgatcgcgtatatcctagcctattccaggcatatttgttgggtgttcgccctagtagtgaattaattcagctgcctgaaggggagaaagccagaactcctgattacagttttattccaaatgtacgcaaagagtttacttctcgaggtgattcatttattgatgaaataaacaagtttatagagttagcagtggggttgaacggtacctttgtacctgaaggtgaggagtactatcgtgatcgcattaatcaaaggactcgtaatctcattgtaaacgcttggagtagtccgatgtgggggaatggtaatatcgatacgtactttaatggtcaaacagatcccatgattaagccaatgacgtcgctacgcgatgttgatcaaacaggcatcatccaggcatcattcctagatgtaaatggcaaaaagcaatcaattgatgaaatacagttagtaatggatttccttcgtcatggtgtggctggcaatgatggttcggacaatgcatag

SEQ ID NO: 282570 - DNA, 2790 bp, Morganella morganii
atggcctcagcaaatcaacgtactgatccatgggatgcattaaggcgcaggcgcgaggaattagcaaagcgcacagctcatatgcgcggaattacacataaacccaaaaaaccatgcattaagccccttccagagccttcaccagctgctgaacctctatcttcaccagatcctgtcattcttcgtactcatgatgcactgctcccacttttcagagatgactcgctccaaccgagcaccccatcaagagctttagtgaggctggctgatctatatttacatgcagcacaacatcgcacacgacatattgcattagtttggccagcctctcttaaaacgctaactcttatacacgctctagcctctcttgttcgctggcaacatggtgataaacaaggcatccgcggattactatttccagtaaaaactaatgtgttcaattgtcttaaccacattcattttgatcgaaccagcattgttcatatagccaaagagttagctgaggccactacaaatccccgtgtcacccgctccatgccagataaggatgcttttttcttttctcttaatgatcataacctgtctcttatttttgaaaagcaggtcaacccgacgattggtgagttgttaccgctgtttctggcaacgcctaattttaagagttggacgtcctgccattcacgtcttcttgcactcattcgaaagaaacttttaaagcgagctcacgctaatgctttaaagcagtcaaactgttccatcctaggagatccccagactgcacctgatgctctttttgcactggatggacgcatgacaaagatagaacttcgtaaagcttgtgaggctttagctaagtgtggccctcctgaggttgtgatggtgcatgtttctcgttcccttcgtttcgaggctccagattggaaggcacaacttgctcgtttttgccttatgctggaggaagtttttcctaatttcccaccaggggtgatagtggttgcggatgaaccacatgtcgcttaccaactaaaaaataaactttgggaattaaattataaacgcgagaaagcgaatcagtggcatacacctcacgagtacattatttcaggtattccgagcacaataagtggtgatggcttgggcatggatgatacttatgaacccgagcatcctgcatcacgtgaatttatcattcatatagtagacgctgatattgcaaaagtcgcagataaactcctacatattgctagcactataccaggtggaaaaaagataggtaaacctctcattgaggcatcttcattcctttgtcgtctagccgcattaccctgtggtattcgacatatgtcggagtatctatctggttctgaaatatctgataggacgcgaattgcctttgactggcttcattatttaggtgctattaatgagtttgagcgtaatattggggttggagataaacgaccacttcttaatgattgcttggcgcgaggaactcagttatttggtaaatactatgaggctactccttttgctcgtaaactggctgatcttatctcaagtattgagacccgtaagaaaaatagagtagtcatagtatttacaaatgtattatatcggcggttggctgagcattttctttctgaatatgatgattatcctgaaggagtcacttataaatccttttatgaacgtatagatttattgtcagcagttcatctagaggaaaacctaaatggcctaaagggagccacacttatatttgcagggttaaatgaaaattgcttacgtttagtcctgaccgatgatcgaattcctcatcattcagtaatcctcttgactcagcaagctggcaagtttctacgtgctacactcaaacctattattgagcgaatgcctgagtttaaatcttacaaacccagaatggaatctatcttacgacagttacatgatttacccgaagatgcttcggttctttctactggcagttatacgttgcccacttttcgtgtcgaattgtcatcagatgtaccgattaacaaccaagaaattactcctagttcttgggctatccagctcgataacggagagagacaatatcgttatgaaacatctgaagtatatgtatatgagcctacttcaacatatgcatcggatacgggatttagagtatgccaagttcgttcgcttgaggccggagacaaagtttttatcatgtctgtcgaaatgcgtgagatggttgaacaagttttatcagacgcaggagtatcaatctactctgacaagaccttcgaatcagcgctgagaagttatcacgaacagatacaaaagcgtcttaatctgcgcttcgggcaagacaaacatacagataagattcgtaccattcgagaagaaatgcttgtgcttgctcctcaattgaaaagttatttacccagtttacaggctatgcgtcattggattgatcttgatcattcgtccgaaacacctttcgatcagcttcgtccacaagccccgatgcgtgaagacgtttttaaagcgtttgcacaagtgcttggatttacatcactggagattgcttaccagtggcagcgggttatcatacctatacgcaacactcgcaggctggatggccgccatgtaactgatatatatgcatacatgcttttacaaccagaatcagctatgtgtaacgcaaatattaaacgacaaactttggctagattgtttaatcaggcgcgcgcgaacgtagccactattgagcgtgtttaccctcttaaggaatttcagaaatga

SEQ ID NO: 282571 - DNA, 1737 bp, Morganella morganii
atgttacagtctgataagacacgatttcatcgcctggtacgagatctcagtgctgtcatgctggaatatcaactaggggctgatgcagttattggtagcgcgcttaaaaaatggtgcagtaattccttccctaaacttccccagtcttctttaccttttgtatatacattagagaatgaggatagtgtgtgtgcatttgttaactttgtgaaggagcaagagctgcttgaatctacttactggttctcctctgcttatgcccaacttttggaaaaagattaccgtaagcggttagcgatgttttttactcccccagcgttgacaagacgcttacttgatgatttatcagcgaatggtgtggatttttctgatagtagtttctgtgatcctgcttgcggtggcggtgcatttttagcaccaattgcaatgcgtatgaaagaagagcttttccgtaaaggcgcaaactcctatgaaataatcgatcacattaataataaattgttagggtttgataaagatataacactatgcgaattgtcaagacacttcttacttatggcattgtatgaagagattgtttccacaggaattcatcccaattttcaaatttaccacggtgattctcttttaaaaggcatggatttcatggggaaatttgatgtagtagtttgtaatcctcctttccggaaaatgtcaaaaatagaatacaataaatacatcgaaaatttttctgatgtcattgaagcacagccaaatttgtattcgcttttttttgctctatgtattaatatattaaagaaaaaaggcatttgcgcattaatcaccccaactagctttctatcgggacaatatttttctaaacttcgcagattcttattaagtcaaactagaatactttgcattggaatagtaaatgatcgtctcggtgtatttattgatgtgtctcaagaaacaactttgactttagcatgccgtgaaaactctggatgtactccatctaataaaactaaagtatctgtagtttcacgtgatggtaattacgttgacgtcggtgcgtgtgttctacctgcttgtggcgctgcgtggccaattcctcgaactgaaagcgacgttacgttgctgaaaaatgctagtaagtcatcggtgtccttggctgactatggatatgctgctcgtgtaggggctttcgtttggaaccgagatacacgtacaacttacgcgtcagcggaaagtgcctctaaagaatatagcgatgcaatcgtccctttactttggtcaagcgatattacgcaggatggtaggctgctgtttactggagctctaaagacaaacaacgaacattgttttgttaacatgggaaaaaaagatcatccttcaatcgtaaaaaatttttgtgtgatattacagcgtgtaacttccaatagccaatcgagacgactaattgcagccgctgttccaaaagaactttttgagacctacagtggtttcgttggcgaaaatcatacggttattcttgaacagattgtcatcgagccagagttagcgccaagccaattcgctgaactgttaaggacaccaatagtagacagatacttccgttgtatctcaggtgcaacaaatgtatcgattttcgagctgaaccaattgcgtctgcctgaaccagccaaactcaagtattatctttcacaggggaacaatatggctgattcggcccgtaaagctttggaagaaatgtga

SEQ ID NO: 282572 - DNA, 1119 bp, Morganella morganii
atgaatataatctgtaaagcgggattaatcgggttgttttgctccggagtcaatgcagaaacatttgatccggggaaaacatatccggctgtaaaattagcggaagtgtctccgccggcctgtgccgcatatcagccgatgccgcagagtttttcgtcggcggcagaccggaattatcagattgccgccaaaatatggcatgacgaagaagacggtttatatccgcagatgtaccagctgggggaacaggcggcaagagccggtcatcccggtgcgatgtatttaatggcacaattgtatacacggggagaaaataaaagtgttttttattcctatgctgagtctgacccgaaaaaagcagaacaatatctgaatgcactgatgacacaaggttattcagatgcattttatttgatggcgatgatcagaaacagcgggaagattaaaacaaaaacacctgcctcttattacttctggcaggcaatgctgaaaggccagccggatgcgtggttttatattgccaatctgcacattaactggaagcagaatgataaagcccgggattttttatattgcgcggcgaagaatggttccggagaggcacagcttaaactggcactggcttataatttaaccgcgaccacgcaggctgactgggataaagcctttaattatttatggcaggcggcaaaatcaggccagcggaaagcatacacggaattgccgaaatttaaccgcgactataaacaacaacaggggcgggattatctctccccggcatttttaaaacgggccggtcagattgcggacagtctgtacagtgcaagattccatgatgatccttaccggaaatcacaggggcgggatccgtcgacaagaggaacaccggcaaatcgttatccggcactggaaaatattctgccgttacctccggcacgtcttcctgcatggaacggggatttaaccccggcaatgtcaccgcaggatgcgtataactaccggcaggattacacgctgacacaactgaatgccatgctgggacggaaaaatgaaatccccggtaagcggtttattattgttaactgcgatgcccggggtatatgtaatgtcagagagtaa

SEQ ID NO: 282573 - DNA, 1080 bp, Morganella morganii
atgaataaaatgactttctccttactgttgctgtttccgttcctgtcggttcaggcggcaccggcagcattcgatattaataaaaagcaggaaaaaattaattttgtcactgtggcgacgccggtttgtcaggatgcccgccgttatgatccgccattaccgaaagatccggatgcgggtttatactaccgtgcagccaataaaatcaaaggtcagcgggataccgcgaatttccggaatatgtatatcctggcccgtaaatcggcagatatggggcactggaaagccaaactgctgatggcggatttatacctgcaaaaaacaccgaattattattatgaattcaaaccggatcaggcgcgggcttatattgatgaactgatgagtcagaatattcctgtggcattctatgaaatgagcaaaaaccggagtgccgggtatggcagctttaaaacgtcaccggcaccagcctcattttatctttaccgtgcggcagagttgggtaatccggatgcaatggtctcaatctctaatattttcctgattgtaaaacgtcataaagaatcccgtgcgttactggaatgcggatttaaatatggcggcggcgggtcggcagcaaacgggctggcaatcagtgagtcactgaatgccagaacgcaggaagactggatacgggctttttattatctgtatgccggcgctaaagcgggtgatcgtgaatcgatggctgaaatgcagatgcaggaagcggaataccagcaaaaaaatccggggcgttattatctgaatggtgagttcgtccgccgcgcgcaggttttatcgttagcgatgaatccgcaatttcaccatgatgatccgtaccggaaagccaaagggctgccataccgcgtcaaaggaaatatcgaactgaaatttccggaccttgagaaaattattccgttacctccggcaacattaccgccgtggaatgaggatattactgccggaatgagtacacaggatgcggcagattaccggactgattttgattatgaccgtctggtggcgaaagttcagctgacggggttaacaactaaataa

SEQ ID NO: 282574 - DNA, 1887 bp, Morganella morganii
atgaaaaaactaacttctgatatgacagaactacaatcaatgaatatcactgaagataatatctgtaagctcaaatcattgtttccagaagcttttaatgaagatggcattgattttgatgttttaaagcagcttttaggtaaaagtatagacgataaagaagagcgctacggcctgaattggcatggtaaacgacaggcacgccaacttgcgctcaccccttctagtgggaccttacgtccatgtaaagacgaaagcgttgattggtataacagcaaaaaccttatgatagagggggataatctcgaagttttaaagcttcttcaaaaaagctattctggtaaggttaagcttatttacatcgatccaccttataatacagggaaagatttcgtttatccagataattttcaagataatatgaaaaattatctggaaattactggtcaaatagaaaatggcaagaaaataagttctaatattgagaaaggcggtagatttcatacaaactggctcaatatgatctttccaaggttacaccttgcacgtaatcttttgaccgaagacggcgtgatttttatttctatggacgattcggaaatagataatttaaaaaagatttgtagtgaaatcttcggagatgataattttattgctaatattgtttggcaaaaaaaatattctccacaaaatgatgccacttattttagtgatatgcatgatcatatcttggtatatgctaaaaatgccaaattagcaaaaaatcaagaaaaaggttggtccattgatttgcttccaagaactgatagccaaaataaagcctacaaaaattatgataatgaccctagaggagagtggaaggccggtgacctttctgtaaagacctattcaaaagcaaatgattatgaaattactaccccttctgggcggatagtttctccacctgctggaacttgttggcgagtatcacaagagcgatttaaagaactcgttaatgataatcgcatttggtttggtcaggacggaaataatgttccagcaataaagcgattcttatcagacgtgcaggatggtatcgttccaacaacatggtggacgtatcaagaagttggtcataatcaagaggggaaacaagaactaaaaaaaataatgaaaggggatgatatattttttgatacaccaaaacctgtaaaattgattaaacgcattttagatttggcgacaaacaaagataagaatgcaattgtacttgatttttttgcagggtcagggacaacagcacaagctgtaatggaaaaaaatctagaagataatggtagtcggcgttttatattagttcaacttccagagccgatcgagagtataaaatataaaaccatcgcaaaaattacagctgaacgtattagaaaagcagggggtaatattaaatcactctcaaattcgaacatattagatacagggttcagactatttagcttagatacatcaaatataataccttgggatggccataaaaattcattatttcaacaattagaaaactatgctagcccaattaagcagggacgtaatgaggcggacttgcttattgaacttatgctcaaacgtggtatagacctgagtgtaaacattgaaagccgacaatttgatgggctgaccgtttcttgtgttgacggtggcaaattgattacctgctttgccagtaaaattccagcatcttcagttgaagaactgaccaagggggtcattgactggcataaaagtttgaaagcaggaaaagatagtgtctgttatttccttgatgacgcatttgaaaataacgttgctaaaacaaatctatgcgccattctggaacaatacggactgactaacctacacagcctgtaa

SEQ ID NO: 282575 - DNA, 1248 bp, Morganella morganii
atggctctcactgatgtcaaagtaagaaatgccaagcccaccgacaagcctttaaagctcactgacggcaacggcatgcatcttcttattcatcccaatggctccaaatactggcgtctacaataccgctttgcaggaaaacaaaagctactggctcttggggtctatcctgctgtctctcttgctgatgcccgtaaccgtagagatgatgccagaaaattaattgctgctggtattgacccctccgaaaagaaaaaatcagaaaaggtagagcaaagcggcgctcttgcttttgagtccgttgccagagactggcatgcaagcaacatcaaatggtcagaaacacatgctgaaagggtaatgaacagcctgagcaatcatgtgttccctgttattggtaaacgaaatattaccgacctcaaaacccgtgacctactccaacctattaaggcggctgaaaagtccgggcatcttgagattgctgctcgtctccagcaacgtatcaccgctatcatgcgatatgctgttcataacagtattatcgatagtaatcctgcacaggacttagcaggtgccattgcaacagcaaaacgagtccatcgcccggctcttccatttgaacgcattacagagcttctgagccgcattgagagctacagaggaagactgctaacccgcctcgctgttcaactcactttactgacttttgttcgttcaagtgagatgcgttttgcccgttggtctgaaattgatttcaagaatgcgctctggacgatacctgcagaacgtgacgaacttcaaggagtgaaacactccagccgtggctctaagatgaaaacccctcaccttgtcccattaagcaagcaggcaatagcaaccctgagagaaattcagaagctcagtggcgatcaggaaatcatcttcattggcgatcactatgcctataaaccaatgagtgaaaacaccgtcaacaatgcgcttcgtaaaatgggctacgacactaaaacggaagtttgtggacacgggtttagggcgatggcctgtagtgcgttgatcgaatcaggtttatggtcaagggatgctgttgagcgacaaatgagccatcaggagcgtaacaacgtccgcgctgcttacatccatcttgctgagcatctcgatgagcgtaggctaatgctacagtggtgggctgattatcttgatgccaatcttaacgatatgatcaggccgtttgagtttgcccacaggtga

SEQ ID NO: 282576 - DNA, 459 bp, Morganella morganii
gtgactggggcttccgaaaatggaatccatttgcagataaatatgctaactaaattagttttattaattacactcattatatttctgattttttcctactgttttttgtcaccaacccaatacttcccggcaacaaattacataaagtcattacttttgacccccgattttattcgtaatgctcctgataaggagctggcaacttattattatcacttttggggtgacagaggtcaggaaccatattcttctgtttattattgccaggataaaagtgatttccatacattgaaattaaaacttcatcaatatgctaactcacgaagaaaattaacttccattaataagacaacatatgtaaataaatacaataaaaatttatttgtttccattattgaaactaagaaagaccaactggattgtatatcactctcggagtacgaatacagttatgattaa

SEQ ID NO: 282577 - DNA, 576 bp, Morganella morganii
atgaatcttaaaaatacgacgattcgtgtcaggttatctgtcacatttggtgttctgatcgccattctggcgctggtttccggaatggcagtgatgaacctgtataaagacaaagagatgttcacgaattacgttaacgggacatatgcacttcaggttcaggcctatgaagtccgccatgcgacggaagagcgggctatcatgctgcgggatatgatcaatgcgactgataagaaagataaaacagaagaactgaaccgttttaaagaagaggacgggaaagtcagtaaaagaacgcagacactgctggatatggtcaatgagttcggcatggatccgcaggggcgggcgttgcttgataagatgatagcggatgaaaaacactatgccgccgtgacccgtgaagtgcttgaactcgatcagcagggacgtcatgaggaggcgattgcgaaaatgatggatgccgaatatgcggcatcggatgcctatatcctgtcattccgtgccagccgggatcacggtactgaaaccggtaatcagcttattcaggaatttaatacgaattatgagcgttag

SEQ ID NO: 282578 - DNA, 807 bp, Morganella morganii
atggttgagaggacgatccttaaatgggcgggctcaaaagtcggcattatggaacaactgcgcccacacctgccaaaaacaaaacgccttgttgagccgttcgctggttcctgtgctgtgatgatgaatactgactatgagcggtatttaattgccgatgtgaatgacgatttaattaccctgtatcaacaaattgcatcaaaaaatatcaattcagtaatagctaccaccagaagacttttcagaatggagtcttttcaaacaggatactatcttgaaagagacttttttaatgaagcgaggaatgcattaaaaccggatcatgtcgcagcttattttatttatttaaaccgccactgttataacggattgtgccgctacaataagaaaggtgggtttaatgtaccgtacggcaattataaaaaaacatactttccggaaaaagaaatccacgcttttgctacgaaagcacacaaagctgatattaaatgccagggctgggcggaaacactgttacagacctgcgccggtgacggtatttattgtgatcctccttatatgggaacctgttttactcggtaccacaccgcaggtttcaatgatgccgaccaggttgcgttggccgaagcgctgcaagcgatgcatgcgaccaaaggctatccggtcacggtgtcaaactcgctggccgcaaaagagctgtatgcggatttaggcttcacgatccatgaaatagaagcacctcgaaaaatatcggcgaacggaaaccgcaaaccggtcaaagaaattattgccacattcggggcgtaa

SEQ ID NO: 282579 - DNA, 222 bp, Morganella morganii
atgtctgacgaaattgaccgcgctaatgaccatgccgtgcttgtacttgaaagccaaatagccgccgctcgtatttattctaccggcgtatccgcatttgaatgtgagggatgcggtaagccaattcctgagtcacgccgcctcgctgtgatcggttgcaccatgtgcattgattgtcaggcaattgatgaactgaaaaataaacattatcggagtgtgtga

SEQ ID NO: 282580 - DNA, 1374 bp, Morganella morganii
atgcccaagaatattgcagtaatattagcatctggtacaggatcccgttttgaatcacgcataccaaaacagtttgtaaaattagccggtaaacctgtaattcaatatactattgaagctttcgagaactgtagtgcaattgatgaaattattattgtaagtaaagatgaatatattgatttcatctatgaaattgccacgaaaaatgaatttaaaaaaataaataaagttatttctggtggcaaagaaagatacgattcaacctgggctgcacttactgccacacctgacgaaaattgtaacctgattattcacgatgctgtaagaccttttgtcagcgaacgtatcatcaatgattgtatctctgcgttattaacatataatgccgttgatgttgttgtagatgcagttgataccattgtagaagtagaaaataatttcattgcaaatatacctgacagacgtaaattaaagcggggacaaacaccacaagcgtttaaaaaattcactctatcagatgcatataaaaaattccttaatgacccgaataaagcggcatctgatgattgcggcatagtaaaaaaatatctccctgatgaaaaaatatatactgtggcaggagaagaatctaatttcaagttaactcaccctcaagatttataccttgcagataatattattaaagatgggttgaacaacagaaatcagcgtgacaaaaaattagcttcagataaactaaaaaataaagttgctgtcattattggtggtagtagtggtattggtgaaagcttatctgttttatgtactaattataacatgaaagtttatgcgtgtagtagaaacttaaataatgttgacataactaataaagattctatcgataacttcttaaaagatgtaaaagaaaaggaaggaaaaatagatttcattattaatactgcaggcctattaattagaaaaccactaatatcacttcagacagaagaaatattggatagcatcaatattaactatacgggtgttataaatacaacactggcatcttatccgtatctcaaagaaagtaaaggtatgatcattcactttacttccagttcttttactaggggaagagctaactattctatttattcatcaacaaaagcagctgttgttaacttcacgcaagcaatgtctgaagagtggttgcctctcgatattaaaataaattgcattaacccggaacgaacagatacaccaatgagacgttcaaactttggaattgaaccaccagaaacgctgttatcttctgaagcagttgcagaatttactttagctgctatgacatttgagcatacaggacaaatatacagcataaaaaatgatttaatctaa

SEQ ID NO: 282581 - DNA, 900 bp, Morganella morganii
atgccttatttattcttaacgctggcggcgtgtttctggggcgggaactatgttgtcgggcatctattggtgacagaagccgacccggtgattttatcgcaactgcgctggctggtgacggcggttttactgatgacgctgtatttcagtcaggtgaaacagcagtgggaattcatgaaaaaggcaaaagggataattctgtttctgtcgttatgcggacaggttttattcccggtcacgctgtatatcggtctgcaatataccacagcgcttaatgctgctatttatatgtcggcaacgccgtcaattgttttactgatcaatgcactggtgtttaaagaaaaaattcaggggaaaaattatatcggcgtattattgagtacgttaggcgtaatttatctgatatttaaaggtaacctgaatttttcagaagtgatcagtcatctgaataaaggagatttgtgggcgctgggatcagctatcagctgggcgttatattgtgcttttttaagactgaaaccccgcgaggtgaagggtaatgcatttgtggctatcagctcggtgaccggcagcctgatgatgttaccaatactgattatttatctgttttcacatgattttcagatcagtaatataggtaattatgtctcgccgctgtttatatccgggcttgcttatctggttattttcccgtcatggctctcatacctgctgtggaataaaggtatcctgactatcggcgcaacaagaggggagattttctctcacctgatcccgctgagtggcggtttctttggtgttcttttcctcagtgaaaaattacacagtttccattttttaagtggtgctttaattatttccggaatttatttttgttcttctgcgaaaaaacaggggtaa

SEQ ID NO: 282582 - DNA, 318 bp, Morganella morganii; identical to SEQ ID NO: 131985

SEQ ID NO: 282583 - DNA, 219 bp, Morganella morganii; identical to SEQ ID NO: 131984

SEQ ID NO: 282584 - DNA, 843 bp, Morganella morganii
atgaccaaagcggagatcgccagcgctgttaatgaatggttcaacattgaaaattacagcgtcctgcaaaatttgacagtagaacaactttttcaagagattgaaaacaggattgtcgcttaccgcatggggcaaaacagtggggagttgcctcctgaaagccgtcgcaggcatcagaactattacgaagaactgattgaaggtaaggtcgtgtttggtgatgttttcggggggcctgaaaaaagactgtcttccagctatgccatcaagcctgtcacacatcaggggctatgggaggtggcgggttatgtggctgctttcgataaatacgttaacccggaaggaaaacccctacctcatatggaagtctcgcattatctgaaggaagccggggtaaataacgaagggttgatgcttgttcaaattaatctggcggaaacgtcatccgaagaaatcatcaatcacctgaaagtgatggtgcctgagtggaaagaacaactacaggctcctgagcctccagccagagattttcgctttggggtcagcaacctcaagagaatactcgattacaacatcattcccatcatggatttgctgttctgggcgcaggatgaagaggtcaggattggtatgccgcagcttaccagttttatctacccggacgagtttaaagacggtattcgtgatgttgagaaaatgaagtctacagaccatccgctggcagtaaaatatctgacaaagcttgctcactatcggtcttttgtcgattttacatacagatacgacgacagaagacactggaaggttcaggatctcatcactgacgaactcggtgaggactga

SEQ ID NO: 282585 - DNA, 966 bp, Morganella morganii
atggcacaggcaaaagaacgcaatattgaaatcagaactgccattgactccaaataccttttttgtgaggtcaaaaccaacggggtaccgggatatgataaccgggcaagtgcgctgagaggagatggtgccggcaccaccagcacaaactcttatatcgccatgagcaacggagtcaatgaattaacagtggaagtgggggcgctggactggtttgccgaaaatgccgcagagcttgagaataaagagagatttaatccggcggcatattgcaaagcggtgatgacactggttgattatgataacggtcagacggtgaatcttgctacgctggacatcagaattaatcaacggggactgccggaggcgtacctcaacggtgtaccggacaagacagccgtctttaacaaaaccacgtcacacccgacagaacgtgtcacaaaaaatagggttatacccggtgaaccagatatgcgtgcatatccggataatatgacgctttatcagtttactaagtctttcacggtttccggtcttccggactggcagtgggcacattcggagccgtataccggcagcccggaacaaattgccctgctgaaagaggcttacagtgaattgtggctgacgttaaaaaataaagacattaaaaaaatgagaagactctacacgcccgcagcagaatcgtgggccatcacaacacgaagtacggcagaagaaattctggattctcaggactataataccatttatgatgaaaaaaatgcggaaatgaagacgatagactgggataacttttatattatcccgatgaataacggaaaaatggtacagatggtctataaggaaacattatggttttcaccgctgggaataagttatattgacgaagacggagatgagagctcattctttttttccccgatattttcattggtgaacgggaaatatattccggttatttag

SEQ ID NO: 282586 - DNA, 1047 bp, Morganella morganii; identical to SEQ ID NO: 280216

SEQ ID NO: 282587 - DNA, 1503 bp, Morganella morganii
atggctatttttcatcttgattttaaaattgtgaaacgttctgaaggcaggtcttccgttgcgaaagcggcctatcatgctcgtatacgtataacagatgaaagaacaggtgatacgtatgattatagccgccgtaccgatttgtgcggacatttcatattagctcctgttaatgctccagaacatatcgtaaaagactctacagcattatggaatgaagttgagagggttgagcgccagaacaacggtcaaacagcccgttatttcgatgttgccatacctgctgagttaaacaatgacgacaagaaaagacttgtccttgagtattgtcagaaaaatttcgttgataaaggcatgattgccgatattgctttccacgatctcgatagtgataatcctcatgctcacgttatgttgacattaaaaaccataggcccggaaggttttggtaaaaaagaaagaagctggaacgacagaaaaatgtctgtgctctggcgtgagtcatgggcatcaatggctaacagctacctcgctgctgctggttcgccagaacgtattgatcatcgttcccttcaggcccagcacgaagaggctttagaaaaagcggcggctgctctggacaatgaagaacaagcgctatggcttgctaaagccgctgaaacaaaccgccctgcaatgaaacgtatccatagtgccagatggcgcagtaaagctgctcaagagcaaagagccgcagaacaggctgttcgtgatgctgccaagcaagaagccgttgaagtctacaaaacattcagtgagcttgatcttgaaattgttgttgatgtcagaagctttacgattacacatcttgctgaaccagaagagattgtattaccaaaaacaagctccagttcttctgccaatgaaacgcaaagacctgtacttgtagcaccacctcctcatactcgtatgcgaggtgttaaatcctatcgtgataaatccaaagtcagtaaggttgttgctggtaagaaaccattggtcagtatttctgattctggaacaaatactattctgaaaacatcctcctctcaccccctaaacagggcatccagaagcgcccctgaacgtgttaagacaaaacaggctattccacgtcaggataatatttttaaacgcttcacaactcttgtcattgattttttcaagcagaagtttgtatgggctaaagcaaacaaatcccaaattgatcttatcagtgaagaacatgataaacgtattgctgaaaactacgtctttgacgaggtattaggccgtcatatctctcgcactgaatatgagaaaaaagccaagtttaaccaagatgactataaaccaacaccggatgagatcaaccgtttcccaagtcgtcagaatagcgagcacaacaatgccaatagggacatgggtctcaatccgtcgatacatgaaaacaaaaaaaacaattcaccacaactgagaccatccagttatcgtgttaataaataa

SEQ ID NO: 282588 - DNA, 555 bp, Morganella morganii
atggggggcagttttttcctgggaatactctccggaaacttacaccaagtcgccatatacggagttgccgaacaattgtataaggctggtgtttatactatgactacggtatcaacaccactgataccttatatggccagaacccataactttaagctattctttaaaattacactgctatcagtttcagcaacatgtataggtagtctaattggtatattttttggtgatagtattattgctctgatatttgggaacggattttcagaggcatatacagttctgtgtatattcatgataacactaatagttagtattgttggaatacacttcggctaccctgcattgattccattaggaaaagcacgcattgcaaatattagtactatatgtggtggtcttttacaattaataatgtttggcaccttatattttctaaatattgagataacagctctgatcgttgctattctataccttttatgtgacagtttaatggctttcattcgtatttattactttatcagagaatatagaaaaacaaatgttatttag

SEQ ID NO: 282589 - DNA, 504 bp, Morganella morganii
atggggctgtgttttcctgtaaatgctatgtatcgtccccacaacaataaagcaatggagtatatacaaacaagatgccgaagccgttccggaagcgggatgatcgaccgtaagaatctgaagtttatggtatcggaactaaaacgcgggcaggctatttggtttgctccggatcaggactttggaactaaaggtactatcttcgccccttttttttcggtagctaatgcttctacatcaaaaggagtggcagctatagccaaattatcgaagtcgccgatacttactgcaacgatgataagaaataatgaaagtggtaagaggccttatgaattaataattggtaaagaaattgctgattttccgtgtggagatgacctggcagatgctgagaaactaaatcagattattgaggcagaaatcatgcatgctccggaccaatacttgtgggcacacagaaggtttaagaccagacctccgggagaaaattctctgtacaaataa

SEQ ID NO: 282590 - DNA, 471 bp, Morganella morganii
atgtctggcgcagaatacacaataatgatccgcttatgtaaactcatgcagcatggaaacctcattgccagtatatctcagtcggcactcgcagaagagcttaatatgagcaaatctaacgtgtgtaaatgctggaacaagctagtaaataaaggcattctggtcaaagaagggaagcataccatgataaacgcaaatctctttctgaaaggccagtacagaacattaaatgccacaaggaaagaatatgttaagaagtcgctgagaacgaccagtgaaggtataaaagacgtattcgtcaccgtttataaagatacggtacttacaaacaacgcagaaaaacccatcgataaaggagatgataaacctttactttctactcccgacgaagatattgactgggactctgtttcagaagatgacatttttgttgattatcctgaagatgttgatcaaaaagaaagaatatag

SEQ ID NO: 282591 - DNA, 252 bp, Morganella morganii
atgctgccgaaagttcagctgaaatggtaccgcacctcagttgaagggaagcaggagcatttcttcactacctcgctggaagatgcgactatcgtgaatatcgactgcaaaatgccgcactgccaggatccggccaaatcggattacacccaactgatcgaagtgtcactctcttaccgtaaaatcgactgggaacataccgttgcaggcacctccggtgctgacgactggcgtgcaccaatcgaagcgtaa

SEQ ID NO: 282592 - DNA, 267 bp, Morganella morganii
atgaaaaaatcacgttttaccgatagtcagatcatcgcgatcctgaagcaggccgaagccggaacaccggttcctgagttgtgccgcgagcacggtatgagcagcgcgagtttttataaatggcgttcacggttcggcgggatggatgcgtccatgatggcccgtctgaaagagcttgaggatgaaaaccggcgactgaaaaaaatgtatgccgaagaacgccttaaagccgagattattcaggaagccatgcaaaaaaagtggtaa

SEQ ID NO: 282593 - DNA, 837 bp, Morganella morganii
gtggtaaccgtgccgcagcgccgtgagctgcctcaggctgctgtggcgatcaggggcatcagtatccggcttgcgtgtaacgtgttttgcatcagtgaaagcggctaccgttaccagccggtactttgtgatgaaaatcagcagattgcagatttactgactgagctgacaacaaaaaataatcagtggggattcgggttgtgctttttatttttgcgaaatgtaaaaggcttccgctggaatcataaacgtgtgtatcgtatttattgtgagttaaaacttaatttacggattaaaccgaaaacccggattatccggttaccaccagcgccactgacggttcctgaaaaaataaatgaaacctggtcgatggattttatgcatgaccaactggatgatggccggtcattccggacattcaatgttattgatgactttaatcgtgaagcactggcaatagatgtggatttttcattaccggccggccgtgttatccgttcgctggagcaaattatagaatggcgtggaaaaccggattgtatccggtgtgacaacgggccggaatatctgagccatcagcttcaggaatgggcaataaagcagaaaataacgctgttatatatccagccgggaaagccgcagcagaatgcgtatattgagcgctttaaccggacaatgcgttatgactggctgaatcagactatttttagtcacatcagcgaagtgcaggaggtcgcgacaaattggttatggcattataatcatgagcggccacatatgggcctgggcggtattacgccaatgcagaagcgggctcagttaaccacattctactga

SEQ ID NO: 282594 - DNA, 3063 bp, Morganella morganii
gtgaataactgggaaaactacaccctgctgcatgaaaaccgcctgccgccgcgtgcctatttctttgcctatgataacgacaccgccgcacgcacttatcagcgtgagctgagtcagggctttaaactgctcagcgggcaatggcagttccgctattttgatcatccgctgcgtgtgccggaggcgttttatcacacgccaatgacagaatggtcatccatcactgtcccgaatatgtggcagatggaaggccacggacagctccagtataccgatgagggctggccgttcccgattgatgtgccgtttgttccgtcagataacccgaccggtgcctatcagcgcacgtttacgctggatgaaaactggtcacaacaacaggtcattattaaatttgacggcgttgaaacctattttgaagtctatgtgaacggccactatgccgggttcagcaaaggcagccgcctgaccgctgaatttgatatcaccgaatttgtcagcgccggggaaaacctgttatctgtccgcgtcatgcagtgggcggacagtacctatattgaagaccaggatatgtggtggatggcggggattttccgcgatgtgtatctgattgcacaaccgccggtacatgtccgtgatctgactgtccgcaccgattttgcgccggattaccgcagcgcccggctgaccgcctctgcggaaattgccggttctgcagaagggatgcagattgaggccgttttatatgatggcagcaccgtctgtttttcgcagaaaaaagcgctgactgctgacgatcataccatcacattcaccgcagatatcgcttccccgcgctgctggagtgcggaagatccgtatctgtatcacctgctggtccgcctgtcggacagcaacggcaatctgctcagtgtgatcccgcagcgggtgggattccgcgatattaaagtccgcaacggcctgttttatatcaataatcattatgtgaaattacacggcgtcaaccgccacgataatgatgaacacaaaggccgtgctgtcggcatccgccggatggagcaggatctgcggctgatgaagcagcacaatatcaatgctgtccgtaccgcgcactacccgaacgatccgcgcttttacgagctgtgcgatatttacggcctgtttgtgatggcggaaaccgatgtggaaacccacggttttgccaacgtcggtaatctcagtcagatcaccgatgatccgtcctgggagccggtgtatgtcgaccgcatccgccgccaggtgcatgcacagaaaaatcatccgtccgtgattatgtggtcgctcggtaatgaatccggttacggctgtaatatccgtgctatgtatgatgccgcaaaagccattgatgacacccgcctgatccactatgaagaagaccgtgatgccgatgtggtggatatcatcagcaccatgtattcccgtgtgcagatgatgaatgaattcggtgaatatccgcacccgaaaccgcgcattatctgtgaatatgcccacgccatgggcaacgggccgggcggactgagtgaatatcaggctgtgtttgaccgtcatgacgccattcagggacattttgtctgggaatggtgtgaccacggcattctggcacaggatgaacagggtcgtccgttctataaatatggcggtgactacggcgattacccgaacaactataacttctgcatggatggcctgatttttccggatcaaaccccgtccgccgggctgaaagaatataaacaagttatcgcaccggtaaaagtgcgcgattttgatgcaaacagcggcgaaatcaccattgaaaaccgtttctggttcagtacgctggcggaatgtcagagccgcgctgaatatattgctgacggtgacattattcacagtgaaattttatcactgcctgaactggccccccgcgaaagcgcccgtgttgccctgaacttaccggctgccgatggccgtgaaatgtttgtcaatatcatcgttacccgtctgaacgccacccgctacagtgctgcaggacacgaaatcgcggtttatcagttcccgctggcggcggcatccgcgccggtactgccgtttatccgccatgatgccacgccgctgacggtctgtgacgagcgcctggaaatgcatattcgcggttgtgatttcaccctcaccttctcaaacactgacggtaaattaatccgctgggaaaacagagggcaatccctgcttgctgccgcaccacggatgcgtttctttaaaccgatgattgataaccataaacaggaatatgaaggtttatggcatccggcacacctgcaaatcatgcaggaacatttccgtggcatggaaacggcacaggaaaacggccatgtgattgtcaccgtgaactctgtggttgcaccgccggtgtttgatttcggcatgcgctgtacttaccgctacaccattgcgccggacggccatgttgcggtgaccctcagtggtgagccgtacggcgattatccgcatgtgatcccgtgcatcggcatggatatggggatcgatgcccgttttgaccacgcggagtactacggacgcgggccgggcgagaactacgcggacagctgcaaagccaatcttatcggccgttatcagtcaccggtcagtgacctgttcgttaattacccgttcccgcagaacaacggcaaccatcaggacacccgctggctggcactgacggacaatcacggcagcggcctgtttgtgcgtcctgatcagccaatcaatttcagctgctggccatgccggggggaagaactccaccgtgcccaacatcagcatgaatggcagccggacggccatatcactctgaaccttgatcacgccctgaccgggttgggctctaactcctggggcagtgaagtcctcgacagttaccgtgtctatttccggccgttccgtttcggattcacactgctgccgtttaccgaaggcgactgccgtgcggaaacactggcaacactgcatttttcaggcgaaacacactcaggaggccgggcatga

SEQ ID NO: 282595 - DNA, 144 bp, Morganella morganii
atggcgagcctgagcttacagggacgtattcacagcgacttttcatttttaccggttatcgccggaatcaccggtgtcacaatccaccttcatgctatcagcgcggtggctgtaactccgccggtacagtatctgatgttttga

SEQ ID NO: 282596 - DNA, 780 bp, Morganella morganii
atgattgaattacaacatcagcggctgatggcgatggcagagcagttacagctcgacagcctgatcagcgcagcgccggtactctcccagcaggcggcggagcaggaatggagctacatggacttcctggaacatctgttacacgaggaaaaactggcacgtcatcagcgtaaacaggctatgtatacccgtatggccgccttcccggcagtcaaaacgttcgaagaatatgactttaccttcgcaaccggcgcaccgcaaaaacagctgcaatcattacggtcactgagcttcattgaacgtaatgagaatatagtgttactgggaccttccggtgtcgggaaaacgcatcttgccatcgcgatggggtatgaggcagtcagagctggtataaaagtccgttttacaatagcggcagatctgctgcttcagttgtcaacggctcagcgtcaggggcgctataaaacaacgcttcatcggggggggatgacacctaagctgctgattatagatgagataggttatcttccgttcagtcaggaagaagcaaaactgttcttccaggtcgtagcgaaacgttatgaaaaaaatgcaatgatcctgacgtcgaatctgccgttcgggcaatgggatcaaaccttcgctggggacgcagcactaacctcagcaatgctggacagaatattacatcactcccacgttgttcagataaaaggagaaagctaccgactgaagcaaaaacgtaaggccgggattatcgctgaagtgaatcctgagtaa

SEQ ID NO: 282597 - DNA, 615 bp, Morganella morganii
atgaaacgtgttgggataaaggctcaggtcggataccggagcccgcgggcacgtaaaggcgaggccagtattgtgtcgcccaacaggctccagcgacagttcaatccggatgctccggatgagcgttgggtaaccgacataacctatatcaggacccacgaaggctggctgtatcttgctgtggttgttgatctgttctcacgcaaaattatcggctggtccatgcaatcccggatgacaaaggacattgtcctgaacgcactgctaatggctgtatggcggcgtaatccccaaaaacaggtgctggttcattcggatcagggcagtcagtacacaagccatgagtggcagtcgttcctgaaatcacacggactggagggcagcatgagccgtcgcggtaactgccacgataatgcggttgcagaaagctttttccagttgttgaaacgcaaacggataaagaaaaagatctacggaacgcgggaggaagcccgcagcgatatttttgattacatcgaaatgttttataacagtaagcgtcggcatggttccagcaatcagatgtcaccgacagaatatgaaaaccagtattatcaacggctcggaagtgtctag

SEQ ID NO: 282598 - DNA, 324 bp, Morganella morganii
atgacagcaatttcgttaatcgtcggcagaaaaatcagggaactgaggcttcaccacagcttaactacccgacagcttgcacattcagccggtatctcacagcagcagatgtcccgttatgaacgaggcgttaaccgtattcacgttgatatcctgtacaggctccggctggtattcgggtgtaatattcatgactttttttcagatatcccgtcaccagcagaagcatcttattacgatgaatacggcgcggcggcgtctgcggtcattgagtctgcggtagatataaaggtgccgatccggaccgcagacaaggggcagtaa

SEQ ID NO: 282599 - DNA, 189 bp, Morganella morganii
atgagtaaaatttcccggattgtcctgaatacagtattaaactgccgggtggcagttttcggaatatgtaaaaacagaaagaaaagtaaaaccgtgaaatctgccattgtggcgggtgcattaagtttgttgttaccgctggcatgggacgtgacaattatgatgaggcaatccggggttgtacattaa

SEQ ID NO: 282600 - DNA, 360 bp, Morganella morganii
gtgcatatctgtacaccggagcagtatgccggtacggttatttcagccaggcgtaaagaactgggattatcaggtaagcagttaggtcagcagataggtgtaagtcagcagcaaatatcccgttatgagagtggaaaatctaatataacactttcacaactggtactgttatcagtagcattaggtatgtcattgcgccagtttatggacgagttttttttgttgtcagaaacggcggaagaagatttttctgatcaaaagaaggtgctgccttatctcagttaccctcctgatgttcttgaagatactattgcagctgaagttttggagagtgctcttctttttaaattaagcagataa

SEQ ID NO: 282601 - DNA, 576 bp, Morganella morganii
atgcgtaattatttaacctttcctgaagtgaatctcctactggaagcaacaaagaaaacatatcatccggaacgtaattattgtctgatttatatgagtttcattcatggttttcgtgtcagtgagatttgtgggctgcgactttccgatattgatctgcatgcccgtgaaatgtttttttctcggctgaaaaacggattttccaccgttcatcctattctgccggaagagtttattgttctgaagagctggctgaatgttaggccccgttatgcagataaagccagcgggaattttgtatttatgacatctaagggaaagccgttatcccagtatacagtttaccgcatgctgaggcggttgggaaaagaagcaggattgagtgttgatgttcatcctcatatgctgagacatgcctgcggttatgcgttagcagacagaagaatcgacacccgcttaatccaggattatcttggtcatattaacatttcgcacacagtccggtatacggcaagtaatcctttacgattcaaagggatatggaatgatttctgttctgaaaatgcaacaaaatga

SEQ ID NO: 282602 - DNA, 1149 bp, Morganella morganii
atgagtgagctgagttatctggaaaagctgctgaatgggacggagatcgaatggttgcctttatcttcactatgcaagctaataacgacaggaaaattgaatgcaaacgcaatggaagataatggggcttaccctttttttacgtgtaatgaagagccttacagaattaacacatatgcattcgacctggaggcaatactcatatcaggtaatggaagtcaggtagggcacttaaattactacaatggaaaatttaatgcatatcagagaacgtacatacttggagagtttaatgaaaatgtagatataatgtatctctattattatctaatgcatacattgaaacattatattcataaaaactcaaaaaaaggctctgttccatacataacaatgcctatgcttgagaattttacgttccccatcccttgccctgacaacatagaaaagtctctggcaatccagtctgaaatcgtccggattttggatacattcaccacccttaccgctgagcttaccgctgagcttaccgcacgtaagaaacaatacagttactatcgtgaccagctgctgagttttgatgatggtgaggtggagtggaaaacactgggtgagcttgcagaaaatctggactcaaaacgtaaacctataaccagtgggttgagagaaactggcaaaatcccatactacggcgcgtctggtattgtcgattatgtcagggattacatatttgacggtgattacttattagtctctgaggatggcgcaaatctaatagcccgtaatacgcctatagcatttagtattagtggtaaaacatgggtaaataatcatgcacatgtgcttaaatttgaaacttacgcggagagaaagtacgttgaatactatctgaatagtatcgacttaacttcttacatttctggtgcagctcaacctaagttgaataaaaagaatctggaaagtatcaaaattccaaatcctgccccaaaagaaaaagaacgcattgtggctatattagataaattcgatacattgaccaactctatcactgaaggcttgccccgtgaaatcgagttgcgccaaaagcagtacgaatattaccgtgatttactgttcagctttccgaaaccggaatctgtgaacaactga

SEQ ID NO: 282603 - DNA, 729 bp, Morganella morganii
atggcaacttaccgtatcgaccctgatctcgcctttatcggtcagtgcaacaatgaggatctcggtctgctggtctctgttctgacacacgacagcaaagacggcaaaaaacggctggcggagtctctgaccacctcaccggaatatcagctcttttaccctgaccatcagaagtactggcccgccatctgtgccgaactgcaggccttcggggccaacagcctggtcacgctgctgcgcggtaacaaaggcgtgctttaccgtgaaatcctgcacgatgtctgcgacaagctgaaagtgaaccacaacaaagaaagtccggtggaaaccaccgagcttaacctgctgatgaaagtactggagaaaagcctgcgggagatgtcacaggacgaactgatccgttttgcggacgggctgaaactgaatctgtccgcaccaaccccgcagcttattctgctcgcggtccaggcggctgtcgccagctccggagttgcagccctgcagtttgccactgttgctgctgtcggggtgattgaggccatgggcggtattgccacccggggtacactctttgccgccaaccgggcgctgggggtactggccggtccgatagggattgcactgagctccgcctggctgatagctgatatcgccggtcccgcttaccgggtcaccattccggcctgcattattgtggcgtacctgcgccagaaggccctggcggcctga

SEQ ID NO: 282604 - DNA, 675 bp, Morganella morganii
atgcatacgtcagattcacgccatgaccggcttgcgttccggctggccatgattatcagccgcctgttccggggcgaaacactgtatccagcacagctcgcccgtgagtttaatgtctcggcccgcacactgcagcgggatttcagtgagcgtctggtctttctggacactgagccgtatcagggcggataccggctggccgccggtcagcgcccgtacaggacagacagcgatatcctgtactttgccgatatcacccatatcaccccgctgttcccctcgcttgatcgcaggctgctgtccgtgctgctcagtccggaaaacggtgccccctgtccggtctaccatgagccaccgcaatccgccccgacgctgttcggcggcttttatgtagtgacgcaggcgattgtccggagacggctgctcagcttccgctgtgacggtcaggactatgaggggatggctccttacaagctgatttattttcagcgggactggtatctgtgcggggaatggcagtctgccctgcgggtgttccggttcagtcagctgcagaacattgccgtgtccggacgccgtttccggcaggatgcagttatcgcacaaacggtcacccggcccgaatttatcaccgcattaccccattatcagtttatccgttcattaatcacataa

SEQ ID NO: 282605 - DNA, 1077 bp, Morganella morganii
atgatgaaaacccggtttactgccgtcctgctgtctgccctgttgctgacagcctgtgacaacagtgacagcacgcctgcccctgacccgcgtcagcagcaggagattttgtcagtaaagcagctgatttacccgtatgaccgtaccgtcacgctcggcggcattctggataaccgccctgattgtatcgatccggaatgggataccctgaccgacgacaaaggacgggagctggtcagataccgctgtgactacacgactgcggctgccgtaaatcagataaatcagcaggttgaagcccgttatcagagagtactgagagactataccgggatcctcactaaagtcaccaaatggaagcctgccgatatgcgtacccgtaccggcgcgaatatcgaacagacagaaaaagagctggggatgatcaaaacactttccggttacgactggtctccgctgcgcagtgaaatcagtacaaacaatgatcacagttttaacctctctctttccggcggaaaactgtggtcccgtcagcccgctaaactgaccggagaacagaaagcgctggttgaacaatggaatgccgttactgaaccactgttatatggacagggctctgatatagatcgctggtttgaggattcttccggtgtcatcagcgcactggagaagaaactgactgacctgaaagcagtacaggcggaggaatacctgaaaggggataaccgccgccgggaagatgagtccgccctgacccggctgttggcagagctggaggccgcccatgcggaagcaaaagactggcggattacccaggaattatactggagtgtaaccgggcctgaccccgtatttatgggcggaaaatttctggtcagtgaccacaccggccagaatgagctggtaccttacagtccggtgacccgtggtccgatccgtcgtggtacggaaatgctcgcggatatttacggggataaaaccggaacggatttttatcggaatatgctggcattcgggttatatatgtatcaggtaaaagacatcaaagtgccgtccgtaaataccttaagctactga

SEQ ID NO: 282606 - DNA, 213 bp, Morganella morganii
atgtctgtttttaaattaatggccaccacgatcggcgtggcaaccgtggcgttagccacgtactgtgcctggcaggctgcggctgaggcggcaggcaaagaggatgccaccgcagcggaaaagctggcggccgggctcagtgcggcgctggcctgctcagccgtgctgggcggtacccttgaccgcctgctgggtcggctctttccccgctaa

SEQ ID NO: 282607 - DNA, 441 bp, Morganella morganii
atgacgttatcagcacttctgacgcaggagcccgcaaccatcaaaagcaatctggttcatccccggggcagagacacattctggcggttttatttcggcagcgtgccgggctggcagcacctggaaaacgatatttttaagatgatggataatctgtgtgacatttatcacggtgccttctgggaattcagcatgctcaccaacggcggcgcatttatctggcctgacatgattgaaacgtcactcccgatggttaacccgcataacggcaatgacgcggaactgagccctgaagcggcaggtatcgcggtatgcctcatcacttacagtctctggtcatttaaaaccgaaagtccggagatggtggagtatttttatcagttgcgggactacgccctgcagcatgaggagtgtgccgctattttccgtcttatcgattaa

SEQ ID NO: 282608 - DNA, 312 bp, Morganella morganii
atgaacaatacagcagtacccgcgtcaccggcggcagtctggcagacactgctgacttacctgctgcagcagcattacggcctcacactgaatgacacggaattcagtgatgagcgcgtgattgaggcctgcctctgccgggggatatcactgtgtgaagcactgaatgcccttgcagataaatacgctctggtccgcaccgaccggtgcaacagctgtatcactgcgaccgatattctgcgggcacggaaagcaactggtctgacagtacaccgcagaactcacaccaccagccgatacacctctgtataa

SEQ ID NO: 282609 - DNA, 837 bp, Morganella morganii
atgacccgtttagcctcccgcttcggcagggcgaatatcattcgtcgtgaccgcccgttaaccaccgaagaattatactgcaccgtacccagtgttttctctgcggaaaagcatgaatcccgcagtgaccgttacacctatattcccaccattaccctgcttgagagcctgcaaaaagaaggcttttacccgttctttgcctgtcagacccgggtccgtgacgacagtcgccgggagcataccaaacatatgctgcgccttcgccgtcataaccagatcaccggcgtccaggtaccggaaattattctgttaaacagccatgacggcaccagcagttatcagatgctgccgggattattccgtgcagtctgtcagaacgggctggtctgcggtgatacctttggtgaagtacgtgtaccccataaaggtaatgtcgtcgataaagtgattgaaggggcgtatgaagtgctggaaacgtttgatgcggtggctgaaaaacgcgaacagatgcagtccctgcggttaccgcctccggcacagcaggcgctggcacatgccgctatcacgtaccggttcggggatgaccaccagccggtcacggaagaacaggtgctgcaaccccgccggtgggaagataagaaggatgatctgtggacagtgtaccagcgtttacaggagaatctgattaaaggcgggctgtccggacggacagctaaggggaaacgatcacacacccgggccgtgaccggtattgatggtgatatccgtctgaataaagcgctgtgggtgatgacggagaaaatgtatgagcattttaaccggagtcattacgcgtga

SEQ ID NO: 282610 - DNA, 177 bp, Morganella morganii
atgtcactgatgaccacaaagcaaaaatacaccaaggaacaggttattgaattgtttaatcaggccggactggatgaaaggcagattgaacaaatcgtgacagagtggcgttggcgcagggatagcgcgaaaacccgcttagttctccaccagtgcaaaatgaggctaccggcatga

SEQ ID NO: 282611 - DNA, 492 bp, Morganella morganii
atgaataatgaccttttgaatgctcaaaaaaaattaagcatacaaaaaataataatgcgggaatcatcattttccgtaaataaaagtataaaagcggttttcttacaggaaatgttaaagaaaaatgatgcgtacattcagtcttatgagggcgtgccaaatatccatcttttgtctgtagaagatgagtcaagttttgcctatatttttgaatttgagtgtgcaactcgcgcggtgatgcttgatgatgaaggcaatccacctgacagtgatccttcaagtagcgagaccagtgagagagtgatgtatgttatatctgcaacattcgaagctgcatattcttcaaatgaaaggctgacagaggatgaactcagggcatttgcagagaaaaatgtgatgtatcatgtgtggccatactggagagagtatcttcaaaactcctgctccagactggacatcccgcgactacaagtaccaatgtttaaatgttag

SEQ ID NO: 282612 - DNA, 399 bp, Morganella morganii
atgaatttccatttaacagaagaccacttcctgtatgcgcaggaggatatgatatacaatgtcactgaggatattctgctgtccatggaaaaactgaatatttcaaaatctgaacttgccaatagagttgggaaaacaaaatcttatatttcccaattacttaatggttcaagaaatatgacatttcggactttttctgatatatgtctcgcgttgggtgtagaagtcaacatatcactgatggttgatgggaaagacgtgtcaattgcagaagaaaagcagtggcattcacaagatcctaaagacaattactatttgaatggtgcggtattgacgaaaacaattgaccttgccaagccttcatttaaaaaatatgaaagtgtaaattgttatgaataa

SEQ ID NO: 282613 - DNA, 336 bp, Morganella morganii
atggcatttaatgacatcgagttagcacagataaaccaatgcatggacttcttcatggagaaacgccgaccgccagagcacgtccgtgatgagtatgacctgatgtatgaaatcgcggggcaagcggtgtttatcaatgaaatccgtcacgtcatgggtcgcactgttgagacagagatagcgaagatagcgtttaatcgccagcagaacggctggaagctgtttgcaatcggtaagtccgggcaatgggaaggattgttcaccgacctcataccaacgttctcagacgcgattaaggtggtcgaggatgatgaagtggggattttcttcggctaa

SEQ ID NO: 282614 - DNA, 345 bp, Morganella morganii
atggaattatcaaacgaacgcaagtttcgtgaaatcgaaacaaaaatcctcaaagggattcactcaaccggcgcacgtgaaatcgcgcacagaacgggcatacacgaatcccaaatctcccggtggcagtcaccacaacataaagaaaatctcagcttcatacagcgctgtgcgcgtttactggcggcaattgaatatgagggcggggaagacatggttgtgttacagggtgatgaggccagggcgctgattcagatgctcggaaatatcagaacgccaaaaagaaaagccccggcggtaaccgaggctaagagtcaaatcaatttagtacttgatgaggactaa

SEQ ID NO: 282615 - DNA, 180 bp, Morganella morganii
atgtacaaaataactgcaatgatacacaagcccggcggactgccggtgagctggttccgccggtcaccgaagaaactcagcaagcgtgaatgtgaaaacatgatttaccgtagcaaagaagttggccggtcattcggtgacaaagtcgtcctgactgattttaagtgtgagaaggagtag

SEQ ID NO: 282616 - DNA, 441 bp, Morganella morganii
atgacagattatcaattcagcacatatgtggacatcatcaggcgatgcagagatgtcgaccaactcaccaacactgagatagcgctgcgctgcggctcgtcaaaggaaaacatgtgggtatacaccaaggcaatggtgaatatgggatgccttgtgaaagtcggcagtatccgtagcaaacaggggcacccagcaccgttatatgcggtatcgccacatgccgttacccgcctgtatcagcaccgaaatgaatcaagaagcaagccggaagcgcctgtcatccaggaggttgttattcctgaagagccgccaaagcacattaaattttgcgggaaggtggtcagcaaggcgtacatcactccggattttggccggtcagaaataaccagaattgacgcaatgctgcgggaggtacgctgtggaatgccaactgtgcagtaa

SEQ ID NO: 282617 - DNA, 228 bp, Morganella morganii; identical to SEQ ID NO: 202786

SEQ ID NO: 282618 - DNA, 1500 bp, Morganella morganii
atgacacttattaacctaaaggatctcgaggcccatctttggcatgcagcccatattatcactgggcctattgatgcgtcagattacaaaacgtacatattcccaatcctgttcttcaagcgcatttgtgacgtatatgacgaagaatttgccgatgcgatggagaaggttggggatgcagagcttgccaaggggaagatgtttcaccgcattcagataccagagaattgccactggcgcgatgttttcgctgagaccaaagacattggccaggccttaaaagactccttccgtggtatagaactggcaaaccctaaactgcacggcatttttggcgatgccagctggaccaataaagaacgcctttcagatgagttactggctacgctacttaatcacttcaataaggtgaacttgggtgttgcaagtgttcgtgacgatgatatgggccgcgcatacgagtatctaatcaaacgttttgcagacaaagccaacaagaaagccggtgagttctacaccccacgtactattgttcgcttgatggttaacattcttgatccaaaagctggtgagagtgtctacgatcccgcctgtggtactggtggtatgctgcttgaaactatccaccatgtaaaagaaaacggtggcgatccgcgcttgctaaaaattaaaggtcaggaaaaaaacctgactaccgaagccatcgcgcgaatgaacctcttcctgcacggtcaggaggatttcgatattgttcgcggggatacgctccgtgaacctaagtttttacaaagcgatcgtttagaaaccttcgactgcgttgttgccaacccaccatttagcttgaaggaatggggatacgatctgtggtcgaacgatccctatggccgtaagcaatacggtcttgcgcctaaaacaaatggtgattttgcttggatgcagcatatgtttgcttcacttaacggtaatgggcgtatggctgtcgtattacctcatggtgtgctgtttcgtggtggcgctgagggggtaattcgaaccaaattgctgcaagaaaatcgcattgtggcgattattggtgtcgcttccaatctgttctacggcactggtattcctgcgtgtattttggtgctgcgcaaatcacgcccggcaacgcataaagatcatgtattgatcattaatgctgaagaaatctataccaaggggcgtgcgcagaatacgctgtccaacaagcaggctgatgacatataccaaatttaccatagccttgctcaacaggggccggatgcaaaagaaatcgaaggcgttgcgcgctgggtccctctgaaggagattgaagagaatgacttcaatcttaatattgctcgttatgtgcaaaaaccactcgaagaagaaaccattactgtggaagaagcgctcaaagattttcaacggaagctggctgagctggaaaaagcagaagaggagctggaagccctgcttatcaaagaagggttcgaggtatga

SEQ ID NO: 282619 - DNA, 1491 bp, Morganella morganii
atgagtaacaaaaagctggaagagctgctctggggagccgccgaatttcttcgtggccaaattgacgcatcagactacaagcagtatgtctttcccttgctgttttataaacgcttgtcagatgtctatctggaagaatataacgaagtgctggaactccatgaaggtgatgctgaatacgccgccatgccgatgtttcaccgtttcaacattcctgctgaagccagttgggaaaaggtccgcaataccagcaaaaacattggtgaagcgatccagaatgcgcttcgactaatcgaagccaataacccgcgtttacatggcgtcttcggtgatgcacagtggaccaataaagagcgcctgcccgatcatctgctggctgatcttatcgagcatttcagtaaaattcctcttggcattaaatctgttgcccaggatgatctcggtgaagcctacgaatacctgattaaaaagttcgctgacgattccggccacacggcggcagagttctacaccaaccgaacagtggtgcatttaatgacgcgcattatgggcttaaaacctggtgaaacggcctatgatccaacatgcggcactggcgggatgttgctaaatgcagtgatggatctccgcgcaagaggggaagagtggcgctcggtacacctttatggccaggaagtgaacctgctgacctccgctatcgcgcgtatgaatatgttcctgcacgatatcgaagaatttgatgtgctgcgtggcgacaccttggctgagccaaagtttattgaaaacgatcggcttaagcagtttgatgtaatttttgccaacccgccgtactccatcaaaaaatggaatcgtgacaagtttgccgccgatccatatggtcgtaatctttacggtgtaccaccgcagggctgcgctgattatgctttttatactcatataatcaaaagcttaaaaccagattctggtcgcgccgccatgctctggccacatggagtgctgttccgtgattctgagcagaccattcgtaaacaggtcattgaatcagatattattgaagctgtgattggattggggccgaacctgttttacaactcgccaatggaatcttgtgtggttgtgcttaattgtaataaatcagccgatcgaaaaaacaaggtgttgtttatcaacggggttgagcatgtcacccgtgaacgagctcatagtcgtttatcttatgataacttaacggtgttatgcgaggcttactttacacctgaaaagcaaagcaatatcaccgcgttggtagagatcgacgttattaaagagaatctctataacctgtcgattccactgtatgtgcaagcacaaagtaacggtgatgcacataatattgaacatgcaattgaggcatggaaagtaagttgcactcaactaaaaaagcaaactaataaattattccaaagccttgcagagcttggatataacgttgaaagcaaggtagagcaataa

SEQ ID NO: 282620 - DNA, 1158 bp, Morganella morganii
atgacagaacagcaattacctgaaggctggcaaatggtgaagtttggcgatatcgctaaacatatctctaaacgagtggaaccgagcgagacagaccttgaaatttatgtcggtttggagcatttagactctgatagcctgaagatcaaacgtcatggtacacccagcgacgttgaaggacagaagcttttagtaaagaaaggccagattatttttggcaagcgtcgcgcttatcagcgaaaggtggcggtggcggattgggattgtatctgttcggctcatgcgatggtactggaagctaaccaacaaaatgttattccagaatttttgcctttttttatgcagtctgatgtgtttatgaaccgggcagtagcgatttcagaaggttcactatccccaacaattaaatggaaggtcctagagcaacaatgctttgaacttcctcctctgaaactacaacggtcttttctaaatattttaaaaaaagtacagagcatagatgaaaaatcctgtgctagcatctcattgttagatgatttaaataaaagcttattgacacagttgtttaaaagaaagaacacttcttggcaaacaaagccgttgggggatttgttcgaagtacaactcggcaaaatgctttccaaaaaggctaggcaagatattaacccaaaacgatatttaggtaatgctaatgtgcagtgggggagatttgaacttacagagttaaagtttatggactttactgaaaaagagatgagtaaattccggcttaaaaaaggagatattctagtttgtgaaggtggtgagataggaaggtctgccatttgggaaaatgaattagaggagtgctactatcaaaaagctctccatcgtttacgtcttcttaatagggaaaccataacacctgaattcatgctcatctatatggattatatgtttaatatttctcgagagttctcgtctcaaagtatggcgacaacaattgctcatataccaaaagaaaaattaataaacctccctgtttcgtatccagatttggctgagcaaaacagaatagttaattcagtttgcaaaatccagaaggcaaaagtgttgttagaggagaaagttaagggtatgacaaaaataaaacagtcaattcttactaaaggtgaataa

SEQ ID NO: 282621 - DNA, 3063 bp, Morganella morganii
atgtttaacgaacaaactgtcacagaaaatggaattatcgaccgtttaaaaggtttaagcggtgtcaagtggacatactgccacggcgaaaatctgcctaaacaagcgcaggatatcttcgttgatgagtggctaaaagacgcgctttgttcgttaaaccctgatatcgacaggcagccagattacgctgatgaggtcatctataagttgcgtggtgtggtgctggaagcccaccataccggtctggtaaaggccaatgaaaacttccaggaatggttgatggctgacaaaaccttgccttttggcgaaaatggcgaccatatcaccatcaatctgattgattttgacaatatagagaacaatcactttgtggtggcgcagcaggttcactatatcgcggccactgaagtctattttgatattgttctttatgtgaacggcataccgctagtagtgggcgaagttaaaaccgcaacacgccccagcgtgacctggcaagacggcgccgccgacttcatgggtggcaagaagtactattggaaaaatgttgaatctttctttgtacctaacttgctgtgctttgccagcgaaggtaaaacctttgcctatggtgccattaacgcccgagttaaagactgggggccctggcataatactgagcttcgtgatgatattctgccgggcctggcatcggtactcaacagctgcgagagtttgttaaatccacaaaccttattgcaactactggaatcttttgcattattttcaaccgtcaaaacaggcaaaaatactccacctaaacgcgttaaaatcctgccgcgttatccgcaatttgaagcagcaaaacaaatcgttgagcgtgttcgcagaggttatccaaagaaaggtctgatttggcatttccagggatcgggtaaatccttgctgatgctttacgctgctaaaatgctgcgtgccgacaatgcgttaaaaaacccgacggtactcatcgttgtggaccggcgagatctggacagccaaattaacgagacctttggtggggccgacgttaagaatctgattaaagttcaaagttgtaaaaagcttggcgaatacattgagcaggacagccgtggcattttgatcaccaccatctttaaatttaaagatatcgaaattgacgatagcaaccctaatggcctgaacaaccgtgacaacatcattgtgttggttgacgaagctcaccgtacccaggaagggggattaggcgagaaaatgcgctgggcgttgcccaatgcccacttctatggtctgactggcacaccgatttctggcattgatcgtaatacattcaagttgttcggtgctgaagaagatcctggtcgctatatgagccgctatagctataagcaatcgatccgtgacggcgcaactaacccggtgaagttcgaacctcggttggctgaactccgagtggatcgtgatgccatcaatgaagagttcgagcaacttgctacagaaaataacctggatgaagaagaaaaagcagcattgtccaggcgtgcaggcaagctggctattatgctgaaatctcccagacgtatggctgcggtgagtaatgatattgttgagcattttaccagccatgttatgccgaaaaagatgaaaggcatggttgtggtatacgatcgcgaagcctgcgtgcagatgtattatttgcttggtgaaaagcttggttttgatgcggttgaagtggttatgaacgttgaccaggctccggttaaagctgaagagggtggtaaaaaagataagctcaacaaggactggctcaaatggcatgacgaattggagctacctgttaaacaagccgatttcgaacgctggcagcacatcgatgcggaagagcaggtacagaaggatctgattgaatgctttaaagatcctgtgcatccgttacagcttatcatcgttaccgccaagctgcttacgggctttgatgcgccaatttgctactgcatgtacctcgataagcctctacgcgatcatactcttcttcaggccatgtgccgaaccaaccggttgtatgaaaccgatgatgcacgaaaagacatgggattaattatcgactacctcggcgttttcgaaaatctgcgtaccgctctggcctacaaccctgaagaaattgaaggggttgtagagggaatcgaggcatttaaagagctattgccgttacaactgaataaatgtctggccttcttccctggtgtggatcgttccatagaaggttttgaaggtattatggccgcacaagaatgcctgccaactaatgagaaacgtgatgaattcgctgccagctttggcgtgttatctaagttatggtcagctatcaatccagatccttttttaaccccttatcgtcaggactataaatggctggcgcaaatttatgaatctgtgcgtccggtggggcagacaggtgcgcttgtttgggctgcgctgggtcctgaaaccatcaaaatgatccatgagcatactgatatcaatcgtattcgcgatgatattgacgagttgatcatggatgagcacgcaatttttaccctgaccgctaaagaacaggaacaacgcgccaaacgcctggagattgatcttatggggcgtttgcgcggtagtcatgatcctaaatttgtggcattgggcgagcgcttggaaaaacttcgtcaggattatgaagctggtgttatcaaagctatcgactggttgaagggcctgttggatgctgcgaaggataccgtacaagccgagcgcgaaacgggcgagcgcccagtaactgaagctgataataaacaggctttgaccaagcttttcctcgaaacacgcccagaaactacccctaagttaatcggtgatgttgtagagcaaattgataaaatcgtgaaagcgacccgctttgatggctggcaaaattccaacagtggcccgcgagaaatccaaaaggcgcttttgttgactctggctcagtttggactagggaaagataaagagttgttccggaaagcgtatgggtacattgagggacattattga

SEQ ID NO: 282622 - DNA, 405 bp, Morganella morganii
atgcgcatgctgaaatgttaccttgggaataatcgtgacgggcacgttgtcactgctaaagacgctatgcagtcaccgggtaggatatggacctgtacttcctgcggctgtcagttgatacttcatgcgggttcatctggtgaggccccctggtttgaacatgaccagcgaacagtgacgacaaacgttctgatgcaatgtacccatctcgaccctgaagttaaagccgaagcccgatgccaaaaattacgcagtatcattggcggactggatgcacctgtaatggtgctgttctggcattgcgtgtggtgcggaaatcattacagtgggaaaaagcattgcacttcatgcggaacaggcatctacagtatcgaagaaactgacaagcaatcagatgcgaactga

SEQ ID NO: 282623 - DNA, 534 bp, Morganella morganii
atgatccattcaattttactcaaccattatcagacctggctggatgattttacccgcgtcagtctgtcccacggtttatgccagcagcacataacgcaatggcaccgactggcgataaccaccagctcaacattggacggaagcgtaatagaaatcgtcattccacagcgcctgctaccgatcacccgtaccgctcgactggaatcctgtactgtcgaccccggactaactaaaaacacagactatacccttctacccggcgtgctgctcagcgagtgttaccggctggggaagagccggttggcagatcagttacaaatgttattccggcttcatgtacagcccggtatgcgacagacgctgaccctactgtgctggtgtgaacttgcaacaggaaaggatatgagggaatggtatgcgctgcatctgccgctacctgaaatgctgaggcaatggcttacgataaaacaacgggcataccggggtctgaagacgctgacggaggattacattcgtgccacccggccactatga

SEQ ID NO: 282624 - DNA, 213 bp, Morganella morganii
atgaccattaaaccttccctgtctgaagaccaattcgtcaatatggctttcattacccatctcaccggactaaccgataaatggttctacaagctcatcaaagacggtgagtttccggcccccatcaagtttggtcgcagttcccgctggcggcagagtgaagtagaagcctggctgcaggcccgtatcgatgcatcacgctcacagcgctaa

SEQ ID NO: 282625 - DNA, 582 bp, Morganella morganii
atggactttccctggccctggaaccgaaaatatacgatgaactggttcctgctgtcgttactgaaccaccatcttgatcagctactagaacgttactcccgccttcagcccctcagactcgatttgttctatcagaatgacacatggcgttataaccatcacggatggtacgagacagaaagggaggtacgccagttaacagaacatctgatgttagagagcaacatcgtgggtcacttctgggtgctggagtgtacttcccgacacaaatgccatgcccatatcgtgatgtatcttgatggtcaccataaccaggccacctttccggtagctgaacaggcggggactgcctggcagaagattacacagggtgaggggtaccacaatcgctgtgatcgtaagaaatgctacgaagccgatatcacccgccccgtcaattacgatgatgctgcagccatcgacaacctgcgctacatcatcagctatctcgccaaggagaaatcaaaacacgggcagacttactacggggccagcgaggttccacccgcgagtggactgggcagaccgcgagggcttcgataa

SEQ ID NO: 282626 - DNA, 798 bp, Morganella morganii
atgtcagaacgaatcactttcaatataaccaattctgagactctgcgcgttgtagatgaatacagcaaaaaacagaagatctcacgatcgcaggttatttccacattgctggatgccaccgtttcggtactgaaagatattaatcgctattatcagcttgcggacgaacttaaggcccggctactgtctggtgtctaccagcaggatttgcctcgccgaagaaatgttgtagctgctgaaaagtattgtatggagatctgggagagtaagcttcaggttggaaaagggtatgactttgacagtgtcaatggcaaggtgcatgttcgcgaacataagcgacaccaccgccgggataatgcagttggcagggtcgaaaatcgacatattaaagagttctgtcagtcgctcctggaaaggtcagaacaggatgcccgctatgcttgttttatctataccgaaaggattgtttttgctgatctagaaacctctgaacactcttcatcgccagtaaaacttgcggcaggtgacgctgtaattttgctggcaaaagatgtggtttttaacgagtttttctttgatataggtaaggcgctttttatcaatgtggttgatcttatggcatacggtacaagtggtattccggagacgacaggagacccacgtgttcactgctgggtgccaatcctggttagtgggaaaaatgccgtgatagtcccagtgtacctgattgacccagctacggcaccgacgttaagaaaaccagacaacatcacagtggtctaccagggcaaaaagtaa

SEQ ID NO: 282627 - DNA, 807 bp, Morganella morganii
atgaacaaagccggaaaaatagcgtattcatggctaaaggcacagagcgatagcgaaaaaattcgatttattgcacaagcgctggggagtgtcgaatatcaggcgtttataaaacaacatcagcctgaaaagcagcatgcccacaatctacctttaagttttttgaaatggcatttgcctcagaaactagtggcctcctatcacggcaaggagatcgacctaagaagtgtgccggagatggttggcgataagctggaaattcggcatacctggatgccaacaggacagtttgctccttcgcgtcatggatcttacataccactgggaacccactttgcttgtactgctctgatgcaaccctttttgcaaaaacagcaggaaaaatgtctggagcaggcctggcaggcagcacttcccctgcttctgtcacctgacatcagtaataataatgaattcaccgctccatggctggattacgagccctatctcaatggtgaaacggatgtgtactttttactgaatgaacctcaggaaagagtcaagattggaatatcaggtaatctcaggcatcgcgtggataccttgaagcaacaacataataccagcctgagtcttatctccataatacccgcagggggtattgagacagaatccgcattacatcttttctttaaaaaatacaggttagatcagaagggacttggtagagagtggttttcttacacggatgaattatgcgaatttatcaatactctgaacacctatgcaatcaggagccactgcctaagagcttacggcattatctga

SEQ ID NO: 282628 - DNA, 909 bp, Morganella morganii
atgaaacgactccccacatgcgcagaagcaaaagcccacgctaaatacctttcacggtcgctcaatatcaatctaagctacacccgggatgcagtggcattacgttataactgccataactggtcggaactcagcacagtatttggtcagcttagcgataagtacatgtcgtgctatggccttgccagccatgaagaaaagcgtgtttttagccagcttctggcaccgtatatcgcagaattgcaaaatgccattcatcctgaccgccatgtgccggaaagcttgatacgtaagattgctgaaggccatgtttcccgggtatccggtaaagtcatgtcggctgtaatacgtgaatgcgaggattttcctcccacgacagttaaagacatcattgaactgcttgaattttatgatgatacggccagccgggtattagcaggacaccacagacagatcccgaccaataatccctggctggaaccttgggtatttggtgtgcgcttttatgcctattaccactttaatggcaagcaggtcaccatcttaagccgggagtgggatttagatattcatgatgcctacctgccacattcacgtgacagagtattttcacgcccatggtttcaagactatatgatcggctatctggcctacctcgtgaagcaatttatcggattgggttacgacggcaccgttaagatttgttgcattaataattatagcgcgctggattaccatcagaaaaaagcagcccccaacggtcgtgtggggctcaatcacttatacagagagttacttaatcgcgggggagaagaaaagtggtcgtttagtcaaaatggttataaacatgattttggtatcgagctcccgtttagcgcattgacctcattgaagaaaggaagaaaatga

SEQ ID NO: 282629 - DNA, 894 bp, Morganella morganii
atggagcatactacatttcataagaacctaaattttaacaagctgatcatcctcgattgcctgcctgaaaatgattatcaaacagcaaggcaccttcatgaaaatctaagcgacaaagggtttggaagtgggatttctttgcttaaggttcaggatgaaaatacatttcgagaagtattgcaagagataagggagatgttcaatcctgaattaaatgttggctttcaaccaattattcacattgaagctcatggtaattcacggtcaatggagttgccagataaaagttttattccctggaatgatcttgctgataatctcagaataattaataaacttatgggcaatcaacttatcacgtttattggaacctgtcatggttatcactttatctataaaaatcacacaattaaagaattcgcaccagtttatttttgcatagcacctctagaagaaattcccgcttgtgatattgaacattcagcacttactttctatgaaaacttatttttaacaggagatttaacacgttccgctaaccttttggattcaacaaaactttacacttacaattctgattatatgtttcatcgagcttttcatgaagccatgcaaaaaaatcatagagggaaagccttaaggatcagaagagaagccttaatcactgaagctattaagattatgggtgaagattggaaaaaaatgagtccaaaagataaacgtgattatctcaagaaagcacgagaattactggatgtttctttgaaaagtaaggaatcgctcagagcagagtttgaaaaattttcaatcggttacatgggttatatagatggggatgttttcgaagaaatttggaaacatatgaaccataacaaacaagggaaaatatattga

SEQ ID NO: 282630 - DNA, 558 bp, Morganella morganii
atgaacacgtcaccgtggaacaaagaccttaccctcggccaaaaaagaccacttcagatatctcatatctgggggatccgaatccggcttgagctagaaggtaaaacacgcgatttaactctattcaatatggccctggacagtaagctacgaggctgtgatctggtcaaactcaaagtatctgatgttgcatatggtagccctgtgcaatttgagataaccaaaggaacaagagaagctgttgctgcattgataaagcttgacaatttgcacagtaaagacttcttgttccggtctcgagtcagaactaatcagcacatatcaacccgacaacacaaccgaatctttcatgggtgggtagaaaagcttggtctcgaagactcgctttatagcgcacattccacgagaagaacaaaaccttacctgatctacaagaaaaccaagaatcttcgggtgatccaacttctgttgggccataagaaacaggaaagcgcagcccgttatctgggtattgaagtagatgatgcgttagagatctctgaatcgattgaagtctaa

SEQ ID NO: 282631 - DNA, 2412 bp, Morganella morganii
ttgccagaaaagtatggaaaagagctttatgaatttctaccagagttcagcaataatcataaattactagaggcttttattgatagcttgatatggcgagatattaaggctattgatttcgagaaaatcatacctttcatcaatgaacatgtttttgggtttgacaatagttttgatcattttctagaggcagtgatctctatttcaggtttagttgatcatccctttaatgctaatttcttgcatgattggctaaaagatcacactttgccaaatcgagattcgttttggactacaaaacttaaatataaatatagtgaagactcagcatttaggcatctaatcgattgggcgtgggacagaacagataaaagcttcatttcggatgagtcaatcgagctggttgcaactagtttatgctggtttttaacttctagtaaccgagaacttcgggattgctctaccaaggctttagtgagtttactcgagccaagaattcctgtactgagaaaaataattgataagttttatggtgtgaatgatccttacgtttgggaaagaatatttgcagttgcattaggatgtacattgcgaactgatgatgttaaagaactaaaatatttatccgaaactgtttaccaaaaggtattttgttctgagtgtgcgtatccaaatatattacttagagactatgcgagagagattcttgaatttgctaatcatcttggattggaacttgaaaacattgaattatccaagactaggccaccatacaacagcatttggcctgacgagattccttcaaaagaggaactagagtccctttatgataaagatccttatcggacactctggagctcgattatgggaggtggtgacttttcacgatatactattggaacaaattacaatcattcggattggtctggttgcaagtttaatgaaactcctattgatcgtaagcaagtttttaaaactttcaaatgtaaactaactgatcaacaaaaagagttgtatgatgccacagatcctgtcatttatgatgataaatgtgaagaaattaaatttggggatgttaagattaaatttggtagcgcgataggtagaaaaacacaggaagaaataaaggcgagcaaagaattatttaagaactctttgtcatacgacctgttaagtgagtttgaaaatgatatagagccatatctagatcataataataacctgctggaaacggataaacactttgatcttcgactagctgagcaatttatattcaatcgtgttgtggagcttggttgggatccggagaaacatggtaattttgaccgacaaataggaactggacgtggacgcagagagtcattccaagaacggattggtaaaaaataccaatggattgcttattatgaatacatggcaaggctagccgataattttattcgttttgaagggtatggtgacgaacgaaaggaaagtccatatcaagggccatgggagccttacgtaagagatatagatcccactatcttacttaaagaaactggaacgaaaaaaataagcaatcaagaaatgtggtggcttaatgatgaagtatttgattggacctgctctaatgaagactgggttaaaagctctgctactataactaatccatattctttgattgaagttaaagattataatggggatgaatggatagtattagaaagttatccatcatggaaagaaccaaaaattattggaaacgatgattgggggcacccacgaaaagaggtttggtgtcagataaaaagttatatcgttaaagttgaagaatttgaagattttagatgttgggcaatagctcaagactttatgggcaagtggatgccggaaggtactaatagataccaattatttaatagggagttctattggtccgaagcattcaagtttttcaaatcagattattatggtggctctgattggacttcggtatcagaccgagagtctggagctaagatagctgatgttagtgtcacttctattaattatttgtgggaagaagagttcgacaaatcaaaaatagaaacgttgagttttttgaagcctagcaacttaatctttgaaaagatgggtttaaaaagtggggaagtagagggtagcttcaatgataaaaatggaactatggtttgctttgcagctgaagctgtgcatgcttcaaagccgtatctacttgttaaaaaagaaccatttttagcaatgttaagtgataatggttttgaaatcgtttggacattattaggtgaaaaaggtgttatagggggctcacttacatcaagtcatcattatggccgacaggagtttagtggagcattttattatgaagaaaggcagctaacaggaagtcataaaactagcttaacgagataa

SEQ ID NO: 282632 - DNA, 666 bp, Morganella morganii
ttgcacaaattatacgggtctttgataacagctttgttaatttctggctgttcttatagtcctctggttccgccatcaggtcattttactaaacccgcagttggtgatattaatgatgttggtgttggggaggttattttttcatcagttgatggtgccagagttcctactgttaccgtgactcaggctgaaggtaagctttctatagtttctgctggtacttattgtgagtatgagcaaggctctgggaaatttattaacccagaaaataagaacgctgtacttttaaagacactaacaggcagagttgttgactcttcagggcaaaactatcttttttataataaagataaaaatgagatttcagtgggaaatggggctccatataattcatcagagatcggcattaaatacgaacaaaatggaatttgttttgttggtagcaactcattgaataaactcattgaatacaatggtaaaaatggagatgttcttagttttgtgtatagagaatttaatgggtcaatgtcaaggccgtcatttacaactgaattttcaatcaatactaatgaaaccaaaaacatcaggtataaaggggctatcattgaagtgaactcagccaatagtaatgaaataaaatataaaataatttctgattttaaataa

SEQ ID NO: 282633 - DNA, 192 bp, Morganella morganii
atgcagaaaagcacaaagaaacagactaaccgctactttaacggtacaccgacaacacgcctgatagtcacctgtgagcagtctgtcattgacgcggtagatagtcacattaagcgcagcaggtacatgcgtggcaaccgtgcagagtttgtcagacaggctatcattgagaagctggggcgtgaactttga

SEQ ID NO: 282634 - DNA, 2148 bp, Morganella morganii
atgattgttgagcagatgaaatttaaactggccgttgagactggtggctttcttgatgccaccaggaagataaaaaacgaaacggaggacatgaagaccagggttaagcgcaacaccggcgaagtcacaaaaggcttcggtgaacttaatctgggtattcagaaattcagtgccgaagggaagaacgccttcaccagtgtaatgagcggcgcggctaaattcctcggtgtagctgtcactctggaaggtgcaaggcgggcatttgtcagcacaacggattccctgattacactgggtacacaggcggcgtggctggggatgaacgccaaacatttagatgctttcgggcgggcagcagaatcaatcggctcctccaaagaagcggttagtggcatccttggcaagatgaacgattaccaaatctggaaaaaggtggggataggacaggcaccggaaaacctgaacgcattaaccaatctgcaggcaaggagtgccgtcaatatcacagaggcaaaaaatgctgaagagatgacgctaagggcgatggaagctatacggcaactccaaagtgaagatgaagccaaatactactatatgaatgcgctcggaggatcagacccggctttgttcagggctatacgcaacggcaagtatcaggcggctgttgaggaatataaagacaagtcatcttataccgaacaagcggaaagacaggcggaacaggtcagaaagataatgactgatctcaacgttgaagtgaaagcactgaatgatgcgttgtatctcaattttggggataaggccgttgaaaacctgaaaaagcttaccacatggataaatgaaaaccgggacggaatcatcgggtttttccgtgagttcagagacgttgccactgagcttattgatgcgctgggcggcatgagcggcacgcttgctattttaatcgcgtataagatgggcggacttccggcggctgcggctatggcctacgctatcgccgcagaaaaatcagataaaaatgaccagccgactaatctggaatcacggcttacaggctccggaatgtcgtcaccggcggttgcgaaaagctcgcccggccttttcttgcacccgctaatgcgcggctctgagcgagttcctatccgccctgagcaggacgctctttacatgaaaatgtattcagcggaagagcgtaagctgatggatgaaacggccaggtattcccgtgaagaacagttaaaaaatattcaggactatgagcagcactggtataccgtttcgtggctcaacgtggacaaagcggtcaaggaaaataaagaggcaaaagaagctgagcaccggcggcaattgctgttcggcaccggatcagataagccagtcaaatcaaatccggccggcggagcaaaaaggccagccggagaaagaaaaccgccaagctcctatcttggtgttgacatatacccgggaaagttaccacagggggtagaaaagccgtctggcattgtgcgtaaagaagagacttacggtcacttcatggatgagtacaccgacaaaagcggcaatgtcattaatccggttaaaacggacatgggcttcgcgtcaatggatcgcatccttgatgccgttactcagggtgaatccggctggaagcacgatgccaaaaacggcaaatcaaccgcgactggtttgtttcagttaacagatgctacagcacgggggatcgggctttcaatcgacggtggtaatgatgaacgccttgacccggaaaaagcacgggcaaaagtcgctattcattgggcgcgattacttaaaaaatacaatggtaacgtatttgatgcgcgtatggcctacggtatgggtgagcatgggtttgaccagttccttgccggtaaacgcaacataggcgaggaagcctataacggcgcggttgatatgacaaattactacgcaggcatgaaccgggcaggctcaatgacagagcagaggattaatcagatgggtggtgttcagcagccgactaatcagttttacgtcaataacatggaaataaacagccagcctgaatctgttgatgctctctcaaactccatccaggaacaggcatcacgcgcaggaatgaatgtctcattcgatacaatggggagatag

SEQ ID NO: 282635 - DNA, 366 bp, Morganella morganii
atgaagaaaaataatcatatcaaaaagggaaacgcctcactgccggaagtggtgcgggcgttcgccgctgcggtatatcgtgaccacagcgcggactatgacagcagctatcagttgacacagacagcggacggtataacccgcaccggaacagtgccgccgactgagtatatcgtcgcactgacagactggtttttcatcatgccgctggcagagaccacggcacattacgaagaaatcattattgattctatgcgaaaagcagtcaaaaacgggcggctgacacccgctggtgaagcgttatatcagatgatcctgctgaccggaaaagaggcggcaaaggaggctgcggatgaagtcaattga

SEQ ID NO: 282636 - DNA, 210 bp, Morganella morganii
atgaaaactatcaaattaagagatgtggaaatgatgcggtttgagtccgccttgcatgccagtgaggagattatcgcgttactgcttcctgtattaaccgctgtaaaaaacgaagctgaacccgatacacacctgatggtcagggcaatcaagcgtattgcggttgagcagtatgaaaaactgagagtgctggcggaggtgatgaaatga

SEQ ID NO: 282637 - DNA, 198 bp, Morganella morganii
atgagcgcaaatatcaccttgcagcaggccgctgaacaggctcaccagctagaaattatcagcctgatgattgagtcctacccgcacaaattcacagacggtgattttgctgtgcttgcgtcacttatggcgaagttatccggaagcgttgctgcttttctcattgaaaagtcagccatgccggagacaaccaaatga

SEQ ID NO: 282638 - DNA, 897 bp, Morganella morganii
atggcaacaaacagatcgaaagaggaatggaaaaatatttggcaaaaaaatggaattcctcagttagagttttgctcgatagaaagagcatctcagttactggattgtcaaaccgaggatatttatcattggattaatacaagtaagatattcccatccgtgttttttgagtccctaattaaagttaatattcatgcacacgtgacaggtgacgagatggcagaagaggaaataataggatttatttattctgaggtcagcaagcccacaaaaataagcattgattatggagttaaaggttattcaatgaatgaattggggaattattctgcggacccagaatttactgacaatagcgtacacaattatattaataacgtaaccagcttgcatataccgggctctattattgggctgtggactcctagttttttcgacccatggcacacgaaatcaagtcaaattattaattcacaaaatagcatatttatgcctcataaaatagataatgtgcattctatcatttacgtaacattattggatgacgtagaaatacatgcaagaaatctaatgctaacaagagatgatatagaaaggatttatatcgcagcacagaaaggtgaggaattaacaaccttaaaacctttatcaaatgaaaaagaaagtgttgccgaggaaaaaataacaattcaccaggtggatatgatttttgaccttctagggctgttaattaccgagtcagacccgttggtagcagtgagtgaaccggcaaaaataaaccgaaaattagcctcattagcggccaagaaaggtaagcagtgtaaaataccagaccccaaaacgtgggagaggtgggcaaataaacgtttgtcatctaagacttttcaaaactcctaa

SEQ ID NO: 282639 - DNA, 540 bp, Morganella morganii; identical to SEQ ID NO: 282428

SEQ ID NO: 282640 - DNA, 225 bp, Morganella morganii
atgcacaacatagccaacctgcctcaagacgaaaaagacaaaattaatgccgatttggccgcctccggtatcgcgtacaaagaaagactcggactgccgtatgacctgtacgaaacagaaaaccagcagcccgagcatttacgcccgtacttcagagagaggctggagcactacagggagatcgggaaaaggcttccgcgcgggttcgagtaccagaaggagtga

SEQ ID NO: 282641 - DNA, 450 bp, Morganella morganii
atgagtaagaaatacccaagtcacgaaatggatcggtttaatgttaggctccctgctgggatgagagacgatatagcaaagagggcagaggctaacggtaggtctatgaactcagagatagtccaaatccttgaggatgccttatacgacgtgaatattgtaaacacaaatcaatcaaatatgttctctggcgggcatacgatatcccttaaaaccaacgaagggaaagaggtcaaatttgaaattgatgacggggaaatggagagtgcttacaaagaggccgttagcactgttctgctaagacatatgcttcttagtgaggaaggctttgatgacgtcaaaaagaaagcgttggaatatatagaaaagcatagaaaagacaaaattaagaagtcagttaaaaaaatgggtgagcaaatgcaggaaatagcaaaaaaagaaaatgaatga

SEQ ID NO: 282642 - DNA, 180 bp, Morganella morganii
atgagtaacgaattacacactcaaactaaaagctctccatttagcctgcgtctgccagatagcatcaagaaggagttggagaaaaaagccaatttggattttatttctttaaattcagcgattgttatgcgtttagctaaatgtttacgagaagagaatgaatcaaatgaagttcaatga

SEQ ID NO: 282643 - DNA, 816 bp, Morganella morganii
atgaagttcaatgaaaaagacgaagccccgttggttgcagccttcggagcttctgataacgtcaagtcacccataggaaataacgtcatgaatactttaacaacgaccaaccaaaatgtcactatgtcaagtattgactttcttaacgagatcattaatccagctcgtgtttctgccggagaaacggaagttgaaaatagacatttcattgctcgtattgaggatgagattgatgatatcggggtcgcggaaaatttttacgtgaccacttctcagggcgcaaaacgcaaggtaaaagggtattcgcttaatatggagcaaatgactcttgttggaatgcgtgaatccaaggcggtgcgccgggctgttctggaaaaattgaaggatctgcaaaagccatctgtcgacccaatgactgccctgaatgatccgtcattcctgcgtagcactttgttaacctacaccgaaaaagtcattgagcttgaatcgcaggttgaagaaatgaagcccgatgttgaagccctgacccgcattgccaaatctcaaggttcaatgtgtgtgacggatgcagccaaacagttgcaggttaagccgaagtctctttttgacatcatgagccagtgtaaatggatttaccgccgcctcggtactccgtggattggttatcaggacaaaatccagcagggccttattgagcacaaagtaacggtgatcactaagtcggatggtgaggataaatctatcccgcaggttcgcgtcactccgaaagggctttctaaactggcaaaactgttaactcagggggcggcggcatga

SEQ ID NO: 282644 - DNA, 822 bp, Morganella morganii
atgagcgtatcaatttcaacaatcaacgtacctttccacggtgacaatctgtatgtcgtaaattacaacggtcagccatatgtgccgatgaagcctatcgttgaaggaatggggatggcatggggcgctcaatttgctaaattaaaacaacgctttagttcaagcgtttcggaaatcgaaatggttgctgaagatggcaaattgcgcaacatggtttgcattgcgcttagaaaattatccggctggctccacaccatcagcccgaacaaagttaaacctgaaatccgcgacaaagtaatccgctatcaggaagagtgcgacgatgttctgtatgagtactggactaccggcgaggtgaagaaaaagccaaacttccgccagtccacggctaaagagctcattccgttacgtcagacagctgaacgcctcattgctcacggtgtcggcaatatctacccggacatctggaaacacgttcacgctgagtttggtgtgcagcacattaacgagttgttaccggagcaaattccgctggcgatatcgtatctggatgcactggaaggtgagtatctgccgaaggatgacccacgagaagccactcacctttatgttaataaggatttaaacgtccacaatataaatgcactggcgaaacattacgaagcgatctacaccgcatggaaagtcgaattatatccagcattgcgtagtgtagactcaccgatcgctaccagattgtatgaccgcttcaaggatggttattctttcctcatgcgtctacaggaaagccttaacggtaagcaccctgcattaatcaattaa

SEQ ID NO: 282645 - DNA, 2469 bp, Morganella morganii
atggcacattctccatcaccgcaagtgaatatttcgcaccgaaagcagactataacgtctgacataacactcaaaccaacaagccagccaccgtgctggcttttttattggaagaaaaggcacatggctactatccctactcaaaatgcagtaccgagtgaagcaccgcgcgacctgaaattcaactcaggaaaaattgatgagttcgtgacatcgctggaacacgaatataaagaccggtttggccgctgtcatatgactatcgaaggcatgcgctggatattcgagcaactcatggcgcgcttcgaagtcgatattaaccaggcaatcattgccgctggttacatcccgatggacagcttccagctgggcgctgaaataacaaaacgcaatgaaattctgcgtgacgaaaccaccggtgaatattaccgctgggatggtgatttgccgaaatcagttccggctggctctactcctgaatctactggcggtgtcggcatgggggagtgggttggtgttggtgatgcgtcattacgcagtgaactcaagagcggtgacgggtctttggttggtcttggaggtggaaacacactatcagacctgactggaaagagaggggctgggttaataggtgcgagtgatggaagaacggtacaagagtttcttgttgcaaatgacagtgcagaataccgtgctaaaaatattgcaaaattatcgtctgttaattacatgatgagaacaaaacaatcgatcaatgttttattccacggagattcaatgactgccggttatgacaggtcttcaactgatgtcgtccctgcaaataatgatgactggccgacacacactcatgcttctgtaacctatccacagcgatttattgaattcatggatacgcagggtggtgtgaaaataaatccggtttatcgcgccaaatcaggatacacatcacgtgatgcatatcatgacccagcatggcagcataaccctaattgtgacatggcgtttgtaatgtacggcatcaatgactctaaagaagatgacggaatgactcatgaggagtacatgataaatatggagttaatcattcgtcgtttgatctcatggggcatgggagttgttgtatgtacatgcgccgttggcgggcagggggtacagcacccaaaatcacaggtatgggttcagcaagtcaaaaacatggccaagatatatggctgcgctcatttcgatgcccatgaagttcagtataaccgtatgtacggaagcgttcagtcagacggcactcactttaattcagctggttacattaagcttgctgaaatgctttcagctatgtgtcttgcgggagggttgctggaaacatatgaaagcgttaagcacgaggtgcaaatatggccaggggcagtaagtaatcacattggcttttgcaatcctgacgggaatgcagatatcagatataacgaatttgcgtatacaaataccgggctgaccggaatacttcctgcggggaagagatgtatattttcattccatttttaccaggatgttgaggctcttgatattgatattactgggtcatggtatgacggagggatgcgagcaattgctgggaattggtgggttggtgatagcgataaggttccgtactatagtgagtcaggaaccttgtctaatgacaggagtgtaggcctgcgccgtagttttaattcagcatcactttacaaaggaaactctgcctctaatggtgcacctagatttttggggtcaatatacgggagagggtggaaaacaataacattctttaatgaccttgatgggaatgcaacatcaaatcaatatattcaaatggttacattgcgccctgtaccactaagaaaagcaaatggagataattatggtcgcacagggacgcagattggtagcgttggtgttatgcgcaggctttatcctgattctcgcggcaaggatgatggggctccacccgcagtggcattcccaaaaataagaatgcctatgccagaagcactcaaggggattaccaacaataacggttcatcatattttgactgctcatcagttaaagtgataatcaaatgtgttggtggaacatttggtgcaggtgtaatggaggggacgttatataagtcatcagtcggtaatgggtttacatttacgccgacatttaaaacgggtggcgataactcatggcctatatttaaattcaaccgggttggaatgacgctggaaaatacgtataccgcaggctctgttggagtaaacatgccgatacgtaatatcatgttaaatacatcagaagtttcctatgatagtggacgcggtgatatgggggaatggataacaataacagctgactggtcagctgtatctggcggacaaaaaacagggtattgggatgttcaactgtggggtatagattttaacggttcgccgatggaaacggcatactaa

SEQ ID NO: 282646 - DNA, 1428 bp, Morganella morganii
atggatggtggtcagttgtgggtccacataaacgcccagctcggcgagggtgattatgccaatgccaggatggagttctggaaagtggatgataacaacgaggaaatttccggcaccagggaatcatataatcgtggatttccggcagcaccaaagacaaaaaactattacaaaacggaaaaattcacaccacaaggtgggtacggtcgatatgcattccagttaaccagactggaaaacagtaatgaccatagcatcctgaaactggagaaggcccacatcatccgccgcaggctcaatgagaagcatcaggacgatactcttgtccgtgtgaccgtaagggcgacagagaacccgacaagctcacgtgagcgcaaatataacgccctggtgacgcggcatgtgattagctatgacatggtcaaccgcaaagtggattacacagagcggccttcacgctcatttgcggatgcagtggcacatacgtggctggttaccggaaagcagcctgagaacactatcgacctgcacggattgtatgagatttacgccggactgcctgataaacgcctcgggtactttgattacacatttgatgatgaggatgtatcactcggtcagcgtgtcgagacgatctgcaacgtggcgcgggtgacggcattctttgataacggcgtactgacattttcccgtgaggaagagcggaaatatccggcggcggtgtttaaccggtcaaatatcaccggcaataacttccgcatctcatacgatatgtctctgccgggcgggaatgacggtgttgaggttgaatacgttaatcctcgcaccaacaaaaaaacctatctgaagtaccgcatcgaaaacggagcagtggtgaagggggcagcaaaaagcccgaataaaatcaccctgcacggatgcaggaacgaatatcaggccattgaccgtgcgcagttggaaatggacagactgatcagccagcggacaagcatcagcctgcaaacactggcagacggtgactatgtttatcccggcgatatggtcctggtggcagacagctacgacagtaaccagcagagcggacacgtcaccggcagaaacggcaatgtgttcagtaccagtgagcgcattgagttttccggcgacatggtggtgagcatcaccgatcacctcggtaattcatccggcgaatatccggcgcaggcacggactgatacggataaaggctttattgctgatattcctgatattcagctcaatatctatgacggacacaatattcagtcaccgtcacggtacatcatatcaaccgtcactgaaatggatgccatgcgctgggtagtctctgacaagaaaccggatgcagatggcacattctccatcaccgcaagtgaatatttcgcaccgaaagcagactataacgtctga

SEQ ID NO: 282647 - DNA, 960 bp, Morganella morganii
atgaataaattaatgatacgtgtggcggcgctgttttttctgctgatggtgtctcaatctgtatatgcaaaaggctgggtgggtgcaagatcaccttgtgcaaaaggaggtcacgaggtcagtccggggtcggggatggggatggattgtgaatggagacactctgccggtgcttattatggtgttaaccagcgtgttgagataagaccgaatatgtttaccgagggtgatgatcaggcttatgtgccgttttccggcctgtttgaattaaaaatgtactggtgtcccttaccggagaatatggatacctgcagcagagcaaacgggacattattgttatcgggtggtgtggttaagctgaactcttctatcccattgaaaaaacaggatattgttaagcggtttgccggtaacagatcgccatcagcaggcgggtattgtattacactcagtgacgttaataccggttatgaatacagaggtaatctgggttacgggcctgacggccggggtatattttgcggggatgtgtataaattacctatggaacccccgaaatgcctcctgaataatggcgctgatctggatgtcctgctgggtaaactggaacggaataatattgcggtaaaagccggttcatctgttcagtctgtttccaaagatatttcaataaactgcagcggaagtatggcttacaacgccaatatggaattgaagtataccccgctcatcgtcggtggtgaggaaatcatcagcacgacaacgaaggggctgggaatagctgttatctatagcggtaatgttgtcaggccggggaaaagctatccgctgagttatcagccgggtattcataccctgaagctgggttttgaagcagtgcgtgacccggctgttgcggcgacagacctgaaaaccggggattttacggcgaatgctgttttggttttcacggagcagtaa

SEQ ID NO: 282648 - DNA, 252 bp, Morganella morganii
atgacagggatctcatgcatattcacaaccccatcacgaagctggtacagacgcggaaaaagcgggattgagaatggtgagcaggtgaaattatccggtttcggaaactttgatctgcgggacaagaatcagcgtccgggccgtaaccctaaaacgggtgaagatattcctatcacagcccgtcgtgttgtcactttccgtccggggcagaaactgaaagccaaggtcgaaaaatcgacaccgaaagagtaa

SEQ ID NO: 282649 - DNA, 1257 bp, Morganella morganii
gtggggctttttgagcatggtatttttgagaggaaacccaacccgaccatgctgactgataccaagctgcgcaacctcaagccaaaggacaagctctacaaagtgaatgaccgtgacggcctctacgtggccatcacccctgcgggttcgatttcgttccgctacaactactcgatccacggcaggcaagagaccatcaccttcggccgctatggtgtcggagggatcacgctagcggaagctcgcgaacggctgggcgaagccaagaagatgatcgccgcagggaaatctccagccaaggagaaagcgcgggacaaagcccgcatcaaggatgctgagacattcggcgcgtgggccgagaagtggttgcgcggctatcaaatggcagattccacccgcgacatgcgccgtggaacatacgagcgagagctaaagccgaaattcagcaacaggaaactgatagaaattacccacgaggacttgcgggcgctgactgatgccatcgtggaacaaggcaggccatcaacggccgtgctttgccgcgaaattatgatgcaggtcttccgctgggctatcgaacgcggacagaaggttgagaacccggccgatttggtgcgcccgtcaactatcgccaagtttgagccgcgagatcgagcactgacgcccgaggaaattggcttgatgtaccagtacatggagcgtatcggcaccacaccttcaattcgagcggctgccaagctgctgttgctaacgatggttcgcaaaagcgaactgaccaacgcaacgtggaacgaaatcaatttcaccgacgcgctctggacaatccccaaggagcggatgaagcgccgcaatccccatttggtgttcctgtcgaggcaggcgctggatattttcatcgcgctgaagaccttcgccggcggttcggaatacattctgccatcacgttatgactcagacttgccgatgagcagcgcaacgctcaatcaggtgcttacccttacctatcggctggcccagaaggaagggcagtcacttggcaagtttggaccgcacgacttgcggcgcacagccagcacgctgttgcatgaggcgggctataacaccgactggatcgagaagtgccttgcgcacgaacagaagggcgttcgtgccatctacaacaaggccgagtaccgcgatcagcgccgggcgatgctccaagattgggccgacatgatcgacgagtggacaatcaggaagacccgcctcaaggactga

SEQ ID NO: 282650 - DNA, 231 bp, Morganella morganii
gtggaaaaagaattaaggagagcaagtaaagttctcattagcaaaaagcagctgctggagatgattccgctgtgcgagcgcacgatctacaactttgaaaagcaggggaaatttcctcagcgcattgcgctcagtagccgcaaggtcgtgtgggatttggcggaggtcgaggcatggattgatgcgtgcaaacattccagcccggcccctcgtcccggaatgggggcctga

SEQ ID NO: 282651 - DNA, 1059 bp, Morganella morganii
atgagtagccgaaacagcggtcttaagcccataggcgcggtaataggcgactctggcgggctactggaacgccttgaaaatatcaggaagcggaacagtgaccgaactccggctgctgaacgcggtagaccgtctaacgtctcgaccgtgcatgaacagatggaaagggcaaaagagcgggacaaagcgttgtcacttgtccgcaagcctccacaaggcgacgctcagccagatttttttgcgcccagcctttatgacgtgggcggccgcgacaatcgcagcgtcatggatgtggccgtgttccgtttatccaagaaggacaagcgagccggagaactgatccgctacgacctgccggatggatacgtggaagtgtccgcaggagcgcacggaatggcctccatttgggactacgacattgtgctgatgatggtgtctcacttgaccgaagctatgaaccgctatcgagaaggaaagggtggcaagccggggagagtgtttcggctgcatgttagcgacatcctcagatttgcccgacgtggtaacggtagtagccaggttaagggagtggaagccgcgctagatcggttgcgaggtactaccatcaagacagtgcgcgaaagcggcaagttccggacaaccgaagccgaggggctgatcgcgcgctatcgtgttctgtcacgcacggacaccaagaagataagttctgtcgagattgaagccccggagtggatttatcgagaagtcaccgagggcaagcggccggaggtacttacagtacaccgggactactttctgatcgagccgggcataggacgctttatctaccgactggctcgccgtgccgcaggcagggatagcgctaaatgggctttcaagaccctttacgaacgcagtggaagcggtggctcgttcaaaaaattctgtttcttccttcgcgggatcatcaaagccgatgacctgcctgaatatgccttgtgcgaagaagcggggaaggatggccctctactggtcatgaggcaccgcaattcctcgtcggaaccgctgggcggttcctaa

SEQ ID NO: 282652 - DNA, 327 bp, Morganella morganii; identical to SEQ ID NO: 147007

SEQ ID NO: 282653 - DNA, 1644 bp, Morganella morganii; identical to SEQ ID NO: 147008

SEQ ID NO: 282654 - DNA, 183 bp, Morganella morganii; identical to SEQ ID NO: 147009

SEQ ID NO: 282655 - DNA, 792 bp, Morganella morganii
atggaaatggaatcgcaaaaaacgtcggcttatgccgcccgaaaattcggtcgaggcgcggcgctcgctctagcaatggcgagcgcaggccttggtgtaagtctctacatggcaccggctccggcctatgccatctactgctcgaactgctctacgttctatcagcagatgtacgaatacgccgaagcggtgaatacgcaactgaacaccgcgcagcagttgcagacgcagatccagcagtacgacaacatgattaagcagggcatgtcactgcccagccgcatgttcaacaccatcactggcgacctccagcgcgtggccagcgtctacaactcggcgcagtcgctcggccgcaacatcagcaatctggacgaacagtttcgccagcagttcaagggctatgacagctatctgaactcgattggccaagggcaaaacaacatgccgcagcgctatcgggactgggcacaatccggcttcgataacgcccgcacggccatgcaggccgctggcgtgaatacccgcacattcgaggatgagaacgcgatgctggaccagttggtaagccgttcacagtcggccgttggtcgccagcaggccattcaagcagggaacgagattgcggcgcagaacgtgcagcagctccagaagctgcgcgatctggtggccacacagatcaccctgcaaggcaactacatggcgcagcaaaacgaacgacagtccgttagcgatgcctccgaacagcaattccgcagccgtgaaaatacacgcggcccgtctgaggggttctaa

SEQ ID NO: 282656 - DNA, 225 bp, Morganella morganii
atgaagacagctcaccgcatcagcgcattggccaatcaactcaacgaactgcaagcctgcctcggtcgagccagtggacggcctagcaagagcgttatggaagcccagcgcatagcggccgagctggcttcttcactcgaagagtggcaccttgaaacgctacacatccctgaaccggagcgtgacctttatcgcgcacagaatccctattacgctgcccactga

SEQ ID NO: 282657 - DNA, 210 bp, Morganella morganii
atggcacgaaaaaccctcgcagagcgccgttctgatgccctttcggagcttgaaatggcgaaagccagattggcaaaactcgacaatgaggcagccgaaagaatcggaagaattgcaataaagtcaggattggttaatcttgagcttacggacgatcaagtccgagaagaattcgacaaaatcgtggaaaggattagcaaggggaattga

SEQ ID NO: 282658 - DNA, 375 bp, Morganella morganii; identical to SEQ ID NO: 147010

SEQ ID NO: 282659 - DNA, 312 bp, Morganella morganii; identical to SEQ ID NO: 147011

SEQ ID NO: 282660 - DNA, 240 bp, Morganella morganii; identical to SEQ ID NO: 147012

SEQ ID NO: 282661 - DNA, 570 bp, Morganella morganii; identical to SEQ ID NO: 147013

SEQ ID NO: 282662 - DNA, 2157 bp, Morganella morganii; identical to SEQ ID NO: 147014

SEQ ID NO: 282663 - DNA, 669 bp, Morganella morganii; identical to SEQ ID NO: 147015

SEQ ID NO: 282664 - DNA, 228 bp, Morganella morganii; identical to SEQ ID NO: 147016

SEQ ID NO: 282665 - DNA, 822 bp, Morganella morganii
atgcgattagccagccgctttggtcgtataaaccagatacgccgtgaccggcctctgacccacgaagagctgatgagtcatgtccccagtgtgttcgggagtgacaagcatgaatctcgttcagacaggtacacctacatcccgaccattaccatcctcgaaagcctgcagcgcgaaggttttgagccgttctttgcctgccagacaaaggttcgcgaccagagcaagcgggaacacaccaaacacatgcttcgcctacgtcgtgccggtcaactgaccggacatcaggtgccggaaatcattttgctcaacagccatgacggctcatcaagctaccagatgttgccggggctatttcgaggcgtctgtaccaacggtctggtctgcggacagtcatttggcgaagtgcgggtaccacataaagggaatgttgttgagaaggtgattgaaggggcttacgaagtgctcggtgtgtttgaccgtgtggaggagaagcgcgatgcaatgcagtcactggcactgccagaaccagcccggaacgccctggcgaatgccgcgctgaagtatcgctttggtgaagaccaccagccggtcacggtatcgcagttgctgaccccacgtcgccgggaggactacagcgatgacctgtggaccgtataccagcgcgtgcaggagaacctgatgaaaggaggtctgtcagggcgaaccgctcaggggaaaagcagccgcacccgtgctgttatcggcattgacggcgatgtgaaactcaatcgcgccctgtgggttatggcagaaaacatgctcgaatttttcgggcgttaa

SEQ ID NO: 282666 - DNA, 342 bp, Morganella morganii
atgaaatctactgactcagagaacgattcatttctaaaatggggactgaattgtaatatgacaccttgctttggtgctcgtctggtacaggagggaaaccggctgcactatctggctgatcgggcctgcattaccggtgaattcagtaacgcagaatctttgaagttggatgaagtattcacacgttttatccgccaaatggaatcgatgctgaccactggtgaaatgaatcctcgctatgcccacagtgtcaccctgtaccacaacggtttcacctgcgaagccgatacccttggcagttgcggctacgtatacatcgctgtttaccccactcatcgttaa

SEQ ID NO: 282667 - DNA, 342 bp, Morganella morganii
atgaaaactctacctgcaacaaatccgcaggcggcgacgctatatctgtcgcctgtggcagtctggcaaatgctgcttgcacgcctgctggaacaacattatggcctgactctcaacgacacaccattcagtgatgaaacggtaattcaggaacatatcgatgccggtatatttttggctgatgctgttaattttctggtggaaaagtacgggctggttcgtattgatcgcaggggattcgactggcaagaacagtccccatatctgcgggcagtcgatattctgcgggcgcgacaggcaactggtttattgaaaagaaatcgtattagcgcggcacggtga

SEQ ID NO: 282668 - DNA, 1008 bp, Morganella morganii
atgggcaacagaatgtggatgatccgcggtgacggcggcaaactctatgacgatttccgtgataaacaaatcgtgggtatcggttggtctcaactggctccattagttaaacccggcctgtcccgagcccagttacttgccttatacctggaggcagatcccttaacaaagctgggaactgcgcgttctggtgcatcgcaggtctggcgttttgtgaatgagatccaaaagggtgattgggttattacctattcgccagccaaccgtacttatttgctaggcaaagttacttcagacttccaatatcatcctgaatgggtggaagaggggatgggtatcgctcggcaggttaaatggaatactcaagaaatcgaccgcgatagactgtctgttgctaccaaaaacacgttgggttctacgctgacagttttccagcttccagaatatgcgctagaagaacttttgcaggataagaaacccactgtagatgttattactctgagtccagttgtgatggatgaagatgaggtcgtttctgatccgcttcgcgatatggaaatgctggcgtttgagggtatcaaagatcgtatcaactctcttgactgggatgagatgcaaaatcttgttgccggagttttacgcagcatgggctataaaacgcaggtctcacctgcgggagctgatcggggtaaagacatcattgcttcacctgatggattcggttttgaaaatccacgtattatcgttgaggtaaaacatcgcagggagcaaatgggaagccaacagatacgcagctttatcggcggtcgccataaagacgatcgcgggctttatgtcagtacagggggttttacgaaagatgctcgatatgaagccgaccgttcgacgataccactgacgctctggacgcttgatgatctcgtccgggcgcttattgagaactacgagcaagttgatattgagaccaaacttttggtgcctctgaagaaaactttcttgcctgcgtga

SEQ ID NO: 282669 - DNA, 192 bp, Morganella morganii
atgcgcatgtccgacaaatattccagccctacagcatacgcctgggggcttataacctctgcctttggcattttatctctggatcagtgggctattgttgccgggatcatctgtactgtcggaacgttcctggtgaactggtattacaaacggaaagaattccagctgaaagccggagaacatcatgaataa

SEQ ID NO: 282670 - DNA, 477 bp, Morganella morganii
atgaataagcgattggttaaaaaggtaatggctgcttgtactgtcggggcaattgccggtgcgctggtgctgatccccgtatatgaaggtgttgagtatacgccttatcgtgatgtggccggagtgctcaccgtatgttatggccataccggcagtgatattcagcccggcaagctgtacacggacgctgaatgcaaggccttgttgcacgacgacctgacgaaagtccggcgcgcggttgatcctatgatcaaagtgccgattgatgacaatacccgggctgccatctattcatttgtttacaatgtcggccccggcgcgttctcgcgttcgacgatgctgcggaagctcaatgccggtgatatcgccggtgcgtgtgacgaaatgaagcgctggacattttccggtggtaagcggtggcagggtctgattaaccggcgcgagacggagaaagcgatatgtcacggaaccccataa

SEQ ID NO: 282671 - DNA, 141 bp, Morganella morganii
atgctgatcatcatcgctatcattcttctgacggcctgcctgctggcgggctgttatctgtattcactcgatactcactgtaagccactgccgggtaacccgctggacggtgtgatccattatgagtgtgaagctccatga

SEQ ID NO: 282672 - DNA, 3261 bp, Morganella morganii
atggcaaagcttcgtgagcttattattaaaatatcggcaaattcctcctcgtttcaggctgaaatagcgcgcgcctcacggatgggggagaattattaccggacgctggagcagggcgggcgcaaagcagcatcggcatcacgcgaaacgaaacgggcaatcagtgaactgaataatgagctttcatcaataaaatccacggtaaccggtgtcatgggggccatggccggtgcttttgccacgcagcagcttatcagttatgccgatacctggagtcagttaagcggccgtctgaaactggcctctgtgtctgcggaggatttcagccgtgctcagcaggaactgatgtcactgagccagcgtaccggcacgtcactggcggcaaataccaacctgtatgcccgtattgcacagtcgatgcgtgatgtgggttatgcctcgggggatgtggcaaaagtcactgaaaccatcgcaacttcactgaagctgtccggtgcaagcaccgaagaagccagctctgttattactcaactcagtcaggcactggcttccggtgttctgcgcggtgaagaatttaacgcggtgatggagaacggcggacggctggcaaaactgctggctgacgggatggggaccaccatcggcgggctgcgcgatatggcgcagagcgggcagctgactaccgataaaatcgttccgatcctgacaaatacggcacagctgcgcaaggaatttgagcagttaccacagaccgtcagtatggcttcgcaaaaggtggaaaatgcctttatggcatgggtgggcggagccaatgaggcatcgggcgcaaccagcacactgaccggtgcactgaatggtattgcaggaaatatagacaccatcgccactgttgcaggggcactggtcggggttggcctggcacggtatttcggtggactgaccgccagcgtggttaaagcatcctccggggtggtcagtgccgcaaaaggcgaggtcgctcttgcgcaggcccagctgcgcgggacacaaattgcggttgccagagcgcgtgcggcagagtaccgggcacaaaaatcactggcagctgcacgcggaaccgatgcgcaggcaggcgcagaaaagcggcttgccgctgtacaggcatccgttgcacgcaatattaacgcccgcaatatcgcacaaaacaacctgaataacgtcacatctgtcggttcacgtcttcttggtggtgcgctggggctggtcggtggtattccggggctggtgatgctgggtgccggtgcctggtacaccatgtaccagaagcaggagcaggcgagacaatcggcgcttgaatatgccggagctatcgatcaggttctggcaaatctgaacaaaatgacgctgccggaaacgtcagataatgcggggaaaaccaaagaagccctggctgcacaaaataaactggttgatgagcagcgtcagaaagtcgagggattaaaatcagagatagccgggtatcagcagatgctggcctcaccgggaccaagtatcaacggctatctgattaatcatctgatcagtcaggaggatgcggttaaatccctggcggctgcgcaggatgaactttctgttgaacagagcaggctcaatgagctgagcaaaaaatcggaagagattcagtcagcactgaaggcggtcgaaagtcagcgtgattttcttattcgtcagcagtctgctgcccagaataatatgcgtcattcattactgatggtgaatgcggagcatagcgaatttaaccggataatgtctgccggaaatcagatcctgactaaccgtctggctctggttaacagcccgatgcgtatcccggcagcgcctctcagcgaaaaacagcaggatttcattcagaaatcagagcgggacaaagaactgtccgcactgaccggggaagctcgtgttatccggcaggctgagtttgccgcagatgatatcggtctgctgaataaacccgaatttgccgataaccggcagaaatacattgataatcaggtggcagcctaccggaatcaggaaaatctgagtaaggaactgaaagcgggtaaaagcgcccagagtgctttcaataaagagcagaaagaagcggaacgtcaggcggagcagtatgcccgcaaaatggcggatctgagtgtggccacggaggttcagaaagtcagggccacgcagggggaaaaagccgcagagctgtatgcggctgcgcatgaggccggtaccaaatggacggatgagcagcgaaaagcgatccgcgcatcctctgttgccctggcggagtggacacaaaaggccgacgaggcggtcagaaagcagcgtgaaatggatgatgcgctgaaagcgatgcgtgacggcgcccgtaaattcagtgatgaagcggaacaaatcgataaaacccgtgggatgggcggaaaccggcgcagtttgtatgaagagcgccagcagattgatcgtgtttatgccaaatctgatcagggaaaaagtgcgaccgaagcttataaccgggagattgacgcgctcaacctgaaatatcagaaaataaaggaagttcagtctgactggaccagcggggttacccgggggatggaagactgggttgctgaggccggagactatgcggagcaaaccgcatctgcggtacagagcgccatgggcggtatggttaataacatcactgacatgctgaacggtaacaaagccagctggcgcgactggtcaatagatgtccttaaatccatccagaaaatactggtcaacgctgccatcgtgaacagcattaagtccatgtctggtgtcggtggctggattggtgctgtcggtaacttcctgggaggtgccgcggcaaatgccaagggcggggtttatgactccccgggcctgagtgcgtacagtaatcagatagtcagcaccccgacttattttgcgtttgccaaaggtgccgggctgatgggggaggccggaccggaagcgattatgccgttaacacgggcggcggatggctctctcggtgtccgggcgatcggcagaaatcagaataccggttctgcggcaccacaggtgtttattaccattgatagtaacggcagcagccagacgcagtcgtcagctggttatgaacagtttggccgggagattgggcagtatgtagaccagcgttaccgggcgctgattaatacagatctgcggcccggcggtgccatctggtcggttgcgaaaggggtccgccaatga

SEQ ID NO: 282673 - DNA, 132 bp, Morganella morganii
atgactatagatactgtcgttatgatcgctcatgtgcttcatgtttctgtaaacgagttactgagtgattaccttgcctcagagtacagtgacgttatgcttttaatgaaccatcgtaataccgacagatag

SEQ ID NO: 282674 - DNA, 537 bp, Morganella morganii
gtgggctcggagatgtgtataagagacagtactgtagcatctttacgcttgatgcttacaaacccagataaaaaatcatgggatgctgattatacaaaaagttttattgatctggctaactcagccgggattgaaacctattggatatcaaaccaaggttatattggaacatatgacaccccaatcacagctattgcaaaaaatagtcaacataaaaattttttaaagtacaaagactataactctgataatacaagtgatttctctcttcttaattatattaaaaaatctattgattcggctccacgcaagaaaaaactaatagtagtacacctttatgggtctcatcctaatgcctgtgaccgtataaaagattataaattaattacatctgtcaataatgaaaggtatagttatattaattgctatatctcatcaatccaaaaaacagatgttcttctgaaaaatatttatgatcttttaaatgaggaaaataaaaaaaatggagcaacatatctgtctcttatacacatctga

SEQ ID NO: 282675 - DNA, 372 bp, Morganella morganii
atgaacaaatatcgtgacaaatcagactttgagattaataaggctgtggctattgaaatgtttgggttgaatagagttatcgagaaaggtgattcaatttacatcgatgaatgtgattgcggcgccatgttcagtttcgacccctgcaacaacccagctgacgcaatgccgattgttattgagaatgggatatccctgataaaagaagatgaccactatattgcagcatcgaccgatgttggaattgaaggatatattggcgcgcctgaattaatgctatatggcttaggttggttgagtaaggacaaaaatctataccgcgccgctatggaagtattcctgatgatgaaagaggcggataatgaaatctga

SEQ ID NO: 282676 - DNA, 2169 bp, Morganella morganii; identical to SEQ ID NO: 277381

SEQ ID NO: 282677 - DNA, 678 bp, Morganella morganii
atgaatgactaccactctatttttaaaaatacttgcgaagagtatatctctttattaataaccaccctggaccctctatacccggataaaagtaaaaaagaaaaagaggaagttattgatgaaaaagtaaatgaatttttagaattatcacaggatgaagaagcattcaatgacgaatatgatgcttataatataaattatgtaatcaacttagatatcaggttgtctatttttctatctataatgtcatacatccgtgccacccggtattatgcagaaggcgattatatcaattcaaaccaccatattaatgaggccatatttaatgcaggaactgcttatggatattatatccagatattttctgaacagcactccactgagcatatgtcaaaagctgcatccaatactgaaaaagcaaaaaacagcagacgaataaagcaggaaattatcgatttcctgagtgataatgcgtggaaaaacgattggcagtcaattgataattgcatacccgaaatcatcgaaatgttgcagaaaaaagcaaatgccaccggggaatttaaaataaatcccaatacaatacgtactaatatcaaaaaatggtcccggagctcatcagaaagtcaatctgatcaagagtttcaggaaaatctggctgaaattttttcatctgaataa

SEQ ID NO: 282678 - DNA, 210 bp, Morganella morganii
atgagtgatactgttgttattctccgtatcggagacatgataaaaaaattaaaaattgccaagtcaacattgtatgactggatgaatatggattctcccaggtataatgccgaatttccccggcctttcagattatccggaaaatcaattggatgggatgaatctgaagttaatgactggatagcaaaaagaaaaaaagaacggtgttga

SEQ ID NO: 282679 - DNA, 693 bp, Morganella morganii
atgacagtaaaaacattgcaggtaagcgaaatacaatttgagacataccgcaatatgtacagaacatgccttattacccggggaggtaaggtctggccggatcacaatctcactgtgctgctagataattatgctgaaaaatatgaaggaaaaattcttgcaggcgatgaaagtaaagtcagcgatatatgtaccgcctatgaatcaaaaattgattctaaaaatcaggttaaatatgcgctaggctatagtgtatttttgtactataagtcaaagagggagtatctgaacaataaccacgaaaaggcattaagtgatatcagtgacgcattctattattttggcgttgccaggggcttaaattcatctgtacagaacataaattcctcccttagcggcccagaaaacatcgtaaataaaaacgatgatgccgaactcagcaataaaaaaataaaagaggaaatcattgcctttctcagagataacaaagaaaaacatcactggaaaacatataaagatgcctacaaggatatcgtcaaaatgttgtcagacaaagcctctgattcaaactttacttttacaccgataacactgttcaatattacttattggggaaacccgaaccggtcagacagagataaggattttttgaataaactagctaaaatattcagcacacctaagtacaaatag

SEQ ID NO: 282680 - DNA, 1152 bp, Morganella morganii
atgagacgaacatttacagcagaggaaaaagcctctgtttttgaactatggaagaacggaataggtttcagtgaaatagcgaatatcctgggttcaaaacccggaacgatcttcactatgttaagggatactggcggcataaaaccccatgagcgtaagcgggctgtagctcacctgacactgtctgagcgcgaggagatacgagctggtttgtcagccaaaatgagcattcgtgcgatagctactgcgctgaatcgtagtccttcgacgatctcacgtgaagttcagcgtaatcggggcagacgctattacaaagctgttgatgctaataaccgagccaacagaatggcgaaaaggccaaaaccgtgcttactggatcaaaatttactattgcgaaatcttgttctggaaaagctggagatgaaatggtctccagagcaaatatcaggatggttaaggcgaacaaagccacgtcaaaaaacgctgcgaatatcacctgagacaatttataaaacgctgtactttcgtagccgtgaagcgctacaccacctgaatatacagcatctgcgacgatcacatagccttcgccatggtaggcgtcatacccggaaaggcgaaagaggtacgattaacatagtgaacggaacaccaattcacgaacgttcccggaatatcgataacagacgctctctggggcattgggagggcgatttagtctcaggtacaaaaaactctcatatagccacacttgtagaccgaaaatcacgttatacgatcatccttagactcaggggcaaagattctgtctcagtaaatcaggctcttaccgacaaattcctgagtttaccgtcagaactcagaaaatcactgacatgggacagagggatggaactagccagacatctagaatttactgtcagcaccggcgttaaagtttacttctgcgatcctcagagtccttggcagcggggaacaaatgagaacacaaatgggctaattcggcagtactttcctaaaaagacatgtcttgcccaatatactcaacatgaactagatctggttgccgctcagctaaacagcagaccgagaaagacactgaagttcaaaacaccgaaagagataattgaaaggggtgttgcattgacagattga

SEQ ID NO: 282681 - DNA, 339 bp, Morganella morganii
atgagcggtgagcgttatcccgaagagtttaaaattgaagcagtcaaacaggttgttgatcgtggttattctgtttccagcgttgcaacacgtctcgatatcaccacccacagcctttacgcctggataaagaagtacggtccggattcttccactcataaagaacagtcagatgctcaggccgagatccgccgtctccagaaagagctgaagcgggttactgacgaacgggacatattaaaaaaagccgctgtagattcaatctgtcaatgcaacacccctttcaattatctctttcggtgttttgaacttcagtgtctttctcggtctgctgtttag

SEQ ID NO: 282682 - DNA, 222 bp, Morganella morganii
atgaataccatcaataccaccactacccctttcctgcttgacgaccctctcatggagatgaaagagatcacgaaattaaccggattaacggataagtggttttacaagctgatccagaaagggcagttcccgaaaccaattaagctgggaaaccgttcccggtggctgacaagtgaggttgacgcctggctgcaggcccgtattgcagagtcccgtgagtaa

SEQ ID NO: 282683 - DNA, 333 bp, Morganella morganii
atgagcaatatagcagcacccgcatcaccggcagctgtctggcagacactgctgacttacctgctgcaacagcactacggcctcactctgaatgacacggaatttagtgatgagcgcgtgattgaggcctgcctcagccgggggatgtcgttgtgtgaggcactgaatgcctttgcggggaaatacgcactggtccgcactgaccggtgcaacaacggtatcactgagccgtcacacggtatcactgcgaccgatattctgcgggcacggaaggcaaccggtctgataacactccgcagcagccatatcccccgcagacactgcaccgtataa

SEQ ID NO: 282684 - DNA, 273 bp, Morganella morganii
atgaaaataaaacgcaagactcacaacaagttatttcccacccgccgcctggcgttttatcagcactcggttatgtcggacgatggctatcttgagtgctattacgacaagtggtttctggtgctgtcatttctgccggttcttttaatcgggacgtttatggatggatttccgagtacatggcgaatgattacccgctattttacggagtggtactcgatggacggcctgaccaaagagcaaattcaggagctgcgctcatgtacaaaataa

SEQ ID NO: 282685 - DNA, 210 bp, Morganella morganii
atggaaccaacggattttgaaaagtggtgtgcgggtgagcttggctatgaacctgagtacatcatgaggcagagaaaagtattacagtccggggaatttacatacacaccatccggcatagaaaccagataccgcgcctacatggccggagtacgcagcagactgccgtaccagacaccgccaaaaggagatgaagatggaatggattaa

SEQ ID NO: 282686 - DNA, 360 bp, Morganella morganii
atggaatttaagggtacgccggggccgtggattatcactgatagcggcggctcaataatggacagcgaccagtttattatcgctacctttcgccggttagccgtcttgtgcaagtggcatgaaaaaggatttgagcactttagtgacgaaggtgccagtaaggatattggaacaattgccgcgaaggcgaacgctaatttaatagcggcagcgccgggaatgctggatgcgttgattaaaattgtcgagatgaaccagcagtatgcaatcgacaaatacggcgacgtaaaaaaggccgaagaaatgtcctgtgtactaacagcacgtcaggcaatcaacaaagcacttgggcgcatataa

SEQ ID NO: 282687 - DNA, 192 bp, Morganella morganii
atgaaattcacagaagcagaaacaaacccaatgggtaacaatattcagtcagtaactatcggtgatatcactatttcacaattcggatacggtaagttgtggcttgaggattccgcagatgatgactccggagcattcgatgaaaaggctatcgctgatgttcttaaaaagttttaccaaagcaacttttag

SEQ ID NO: 282688 - DNA, 258 bp, Morganella morganii
atgtctaaattaacgaaagaagaaattaagtgggtcagaggggtgcaggcggcattaaataaatatccaggtgagcgccttgggttttataccattggtgaccatcaggtatttctttacgactcatcaaggtatgacgaactttgccagtttcaggacaaacagggcgtagatttttgcgtagcggtcgaggcgctgggggctggtttcggggaacacatcagtttccctgatagcgtactgagtacagcgggttga

SEQ ID NO: 282689 - DNA, 522 bp, Morganella morganii
atgaataataatacaaaaaaagttagaattggtacaccattggttgatacgcttagtgatatgcctgttgagaacgctagagaaacgataacttctgaatcaataaaaacaaatcatgtcaaagtaactccgaagggattagggttagatatcattaaggttctttttactgatagagagcgtgaaagctatgggcttacagatgatgtgttctcaggtgatgctattgataaaggtaatataaatgtttcggttgaaatcagttataattacaaagcaaagaaaacatcccaattaatcattaataatatcagccaagctttaaggcatagccatccagatgatgttgagttaacgctagataaagtggggaaaattaaaggcgatagtttagttatttctaagaagattaaacttaaatttattaatggaatagctgatccagaagagatgtatatgaaaattagagaatggttagttgaacaaattcggttaggcgaattagatgctgaagctgaataa

SEQ ID NO: 282690 - DNA, 792 bp, Morganella morganii; identical to SEQ ID NO: 279042

SEQ ID NO: 282691 - DNA, 693 bp, Morganella morganii
atgacaccgcgtttagaatacggcgagatggtgatatccactgccgaaaatgattacctgtttcgcccgtcactggatgccatgacgcgaatcggtgagcctaaagagattgtgagtgcgtttacgcgattaaatggctcagaggtacaacaaattatagcgtctgccgtagacgcttacggagtggttcctgaatggctgattgcactgttaaataaaccggtttatgggcgcagcattttatcgacagcaatggacgtgatgcaggcatgttgtaacgatgactgttctgaggttatcggtgaatggcgggttggaaaatccggcatggtataccggttcggcgctatgcattatcgcgatatcatcctgctggcgcgcgagctaatgacccacggcattatcggtaaagctaaggtgcgcaaactccagcgcaacgaaggtaaagacgaatactccgacgagttccgcgccgtcgattacatcagtgccgcccgtgtgcatttcaacatcacccgcagcgaagcggaacaactcacaatgactgagttcgtgatgatgctgaaggcgaaatatcccgatgagaaaggtttcacgaaagatgagtatgaggctatcaccaaggccgatgatgtccgtaacgatgacctgattaagggcaagcgccggttggtgagcaggaagacagtttaa

SEQ ID NO: 282692 - DNA, 864 bp, Morganella morganii
atgcgctataaggttgacggactgcgcaatggcattgatgtcaccaccacgccggaagggtttaagttcgtttatcagcagttcgtgaaagctgtacgcgataaacctgaactgacaacgctctacggtctggtgcaggcttcaacgttcgacaatgaaaagaatctgccagcggattacattccgtcactgatggactcttacccgccagagctaatcaaagcatatctgcgcggacaattcacaaacctgaccagcggtaccatctatcacacctttgaccgccggctgaataacagcgaggaagaagagcagccaggggaaccgctgtatatcgggatggactttaacgttggaaaaatggctggtgtggttcatgtgctgcgccttggattgcctcacgcggtaacagaaatcattaacgcctacgatacaccggatatgatccgcattatcaaagaacggttctggctgtatgcagatggtgattatcacaaggtacgtgaaatttacatctaccctgatgcgtctggtgaatccagaaaatccaataacgccagtgcaacagatctggctcagcttcggcaagccggatttaacgtggtcgtcaatgcgtcaaacccaccggttaaagacagaattaactcaatgaacgccatgttctgtaatgcaaacggtgaccggcggtataaggtgaatgttaagcgttgcccggtctacacggagtcgcttgagcagcaggtatgggctccgaatggagagcctgataaatctgctgataacgatcaccccaacgatgcaggcggttattacatcgtgaagcagttcccgatcattaagcgtccggcacaattctacttctaa

SEQ ID NO: 282693 - DNA, 912 bp, Morganella morganii
atgtaccgcgatattgaaaaccggtatcacggactgaaaaaagcactccgccaactgttcgatctgtcattcagcggcagagaacgaaatcagaactcactctacagttacatcctcgctaaaaacgcacagaacgaaccggattcgcttatcagggttaacgctggggtttatgtctatgaactcgctgagcggcctgatgagtacgcgcggttccttgaacggctgcaatctattctggatgagtacctgcttgagggggggaatgaaaatctgtgggcgttcagccatgttgcggcggaatatgatcgcggcacactgaatgcgtataccaatctgtcgttgcagtcagaggtgtacgcatcacagaccacgctcacttacctgatgtcgcagcctgcataccagaaccagatagccgccacgtttatctcaacgttcagcgattggaaaggtatttctgatgccgcgcgtgccgacctgtcgaacatcatcggcacatcgatagccaggggcgtcaatccgcgagaaacagccagaatcgttagccaacggctggatgtctcaatgagcaatgcaaagcgcatagctcagacggagcaggtaggcgcgttacgtcgtgcaaactggaatgaaaccacatgggcgagtgagcggttagggctgagcaccggtctgctgtggttatctgcactgaaaccgacgacgcgcagttggcatgcagcacgacacggcagggtgttcactgttgaagaggttgaagcgttctatgctgacggtggtaaccggtttaactgctactgcgcgacacagccggtattactgaatgacgacggaacgatttacaacaaaggcattactgacaggctgacagcagagcgtaaagcctggtcaacagacgaagattcataa

SEQ ID NO: 282694 - DNA, 756 bp, Morganella morganii
atggcacaatgccctgatgataaaggcctggtgatgggtaatgcgggaattctccgtatcgcgcccggttgccccggcacggttcctgaacagtcagcgtttctgcgtctcggcgcactgactagtaaagggctggattacggtactgaaacggttacttccaaagcagacgacacaaaagggctgggcgaagccatcgtgaccggtctggatttaaccattaagtttgatggcgagctgaagcgcaaaggtgctgatggttccacgtctgcttttgatatcgccaaagaaatccttgctgaagtcaaggccagccgtcagccgtcatattgggtgcagctcgacatgaaaggtgatggcagtgatgtgattcaggggtatatgaacttcacatcatggtcgatggagttccctaccaaagaaatctccacgtactccggtgaactgaaagtcgcagacgctgacagctttgaatggctgcaggaagaaatcgtggttcagagcatcgcagccaaccccgcgacactgactgtgaaagccggtgaaacggcaacattcacggtcggatttaatccggttaacgcgacaaacaaaaattacgaggtggtcagcgataagcctaacttcgctaccgtcagtaagctactgaatgttgtcactgtcaccggtgtcgcagccggtaccgcgaatattacagtcacatcggaagatggcagtaagacggcgaaatgtgtcgttacagtcactgcggcctaa

SEQ ID NO: 282695 - DNA, 693 bp, Morganella morganii
atgacaccgcgtttagaatacggcgagatagtgatatccactgccgaaaatgattacctgttccgcccgtcgctggatgccatgacgcgaatcggtgagcctaaagagattgtgagtgcgtttacgcgattaaatggctcagaggtacaacaaattatagcgtctgccgtagacgcttacggagtggttcctgaatggctgattgcactgttaaataaaccggtttatgggcgcagcattttatcgacagcaatggacgtgatgcaggcatgttgtaacgatgactgttctgaggttatcggtgaatggcgggttggcaaatccggcatggtgtaccggcgcggcgctatgcattatcgcgatattatcctgttggcgcgtgagttaatgacccacggcattatcggtaaagccaaggtgcgcaaactccagcgcaatgaaggtaaagacgaatactccgacgagttccacgccgttgattacatcagtgccgcccgcgtgcatttcaacatcacccgcagcgaagcggaacaactcacaatgactgagttcgtgatgatgctgaaagcgaaatatccggatgagaaaggcttcacgaaagatgagtatgaggccatcaccaaagccgacgatgcccgtaatgatgatctgattaagggtaagcgccggttggtgagcaggaagaagatttaa

SEQ ID NO: 282696 - DNA, 2547 bp, Morganella morganii
atggctactatccctactcaaaatgcagtaccaagtgaagcgccgcgcgacctgaaatttaattcaggtaaaattgatgagttcgtgacatcgctggaacacgaatataaagatcggtttggccgctgtcatatgaccatagaaggcatgcgctggatattcgaacagctcatggagcgattcaaagtcgatattaaccaggcgatcattgccgccggttatatcccgatggacagcttccagcagggcgcagagattacaaagcgcaatgaaattctgcgtgatgaaaccaccggtgaatattaccgctgggatggtgatttgccgaaatccgttccggctggttcaacgcctgaatcggctggcggtgtcggcatggggtcgtgggttggtgttggtgatgccagtctgaggtcgcaactaaagaatggggaaggggagcttgtatccgttggtaacggaaaaaccgtagctgatttttcatctcacgaaagtggaagtggtgacgcccttatcgctgtaaaacaaccattccctggtgcaacaccaagatctcagcatgataaaaatgcggaaaacttatccatattagactttggtgcaattggcgatggagtaaatgatgattctacagcgctgcaaaactatatcaacgcttccagttttgatatatttgttccgcgcgatatgacactgtatatatcaaaaaacataacatctgatgacaaaataaaaatacacggtggcggcaaaatcattggcgataaaaataacaaaccatcattatcacttagtaatggcggggtgatagatggtatgtatttggaatcattatcaatcaatgctttcacaaacgaatcattggcgattaacgataaaaatgggttttccttcttaaataacaacggtgttgattatcatattactgttggcgctccatcatcatctgtaagaaatgtattagtcgctggtaataaggggatgttatctggtaacagggagtttccgtttttaaaattaattaacgttagtaattatgctgtttcaagaaacacaacgcaagaatatcattctcttatcactgtaattccgcacaggtctttttgtaattacaatggtgagatttcatttaataatgatgagtcatatatcccatttgaattgattggtgacagtgttaactgcataagcgggattaatatccacggaaatattctatcccatcaagtcaggaacgcgtcaacaagtgaagattatccgatacttaaatattgtaataatgtaactttatcagataatacactgatatttaattacccagttagtattgaatactgtagacatatcactatgagaaacaataaattggtgtctggttcatcatcttcatctctacggttctggtatagcaaaaactgcaatataattaataacgatttcaattttaactctagtgatgcagtatgtttgattttatcaggatataataacgcattagaaagaagtgaggccataagcgtatcaaataacaaatttaactcaaaaggaagattcataaatattgctgctggttcaaacaatatatccatcagcggtaatgatttaacgaacacggtggtgaacagtagtagtaatatatttgttagcgctgactccaaaaacgtttcagttttcggcaatagaaggattgcactatcatcaaacggtaatttaattcaagatgattcaggtgctgtcatcaccacatatccttcaaacaataatgttgtttcttctggtcagttagttgtaaaaaatttattcactggtaaagatgcagatttaaacaatagtgatacatatatcttttcgatatcgtcaccaaatgtttcatttttaaaagctaaatatgaaacagaacaggggtttgcggtatttaaaacaatgtctgagtggatgtctggatctaatgctgagttggcaataaacatgagcgcatttgattctgatgtcagtaaattttacgatagcgtgatgaatggtgggcttgcagattgctacggtggcgagttttattttagaccatcagcggcaattataaataatgtcggagaattattttgcagggactggacacttaaaggagatactggaactgactatgaaggttatagtacaccacacagaaacatagctaacggaatgatctctgagggagtttaccagacatttatattcaggtcaccacttgttgtggatggaaaaatgtatgattataaaagaacagggatagccagtaagggggtgtttgaagatggcattgaaccaagaatgtcaatcggtcagaaaaaggacggaaccataattattatatgtgttgatggtcgcagaagcgactcaccagggtgttcaatgctaagtcttgccaataaatttatatcacttggatgtaataatgcgttcaatacagacggtggtggtagcgccacgttgtggtataaaggaaagataattaacaagccaagcgacggcgcagaaagaaaaataccaactgttttttacgtgtaa

SEQ ID NO: 282697 - DNA, 2526 bp, Morganella morganii
atgaaaacaaaaaagaaacttttacacctttccattattgccgtcttatgttcaaccgtaccatcattagttatggcagaaacattttgcggcagccgtaaaaatgtgggcctgacaggaagcgcacctttcaccggtgaaatgaccgctgatgattgctatgaaattggtgcctgggtagaaggtaagccaacagattatgtcggcattgctcagaatctgaccatgctgagcggcagtaaactcagcgtactcggcctgtttgaggattctcaggttcagggcggcgctgaagtctggattgataaaacaacccatattgcctgggacggctatcacaccggtttcccggccaccggcagccgtattgatattcagagcggcggattaatccgtgttctggacggcggaacattaaaagattccgtactcaacggcggaaccgtttatgtcagtaataccggtaaagccgatgatccgggcaagtctgaaaataatatcgtcaacagcggcgggaaattatttatttacctgggcggggagtcaaccggtacacaggtcaatgacggcggttatgaatatgtccagcaggatggtaaatccctgaatacggtcgtgaataacggcggtgctcagatgctgaaatccggcgggtttgcggacagcaccattattaatgatggcggattacagcaactgcacggtaaaggttttgccgataataccctcgtaaacgccggagcacggcaatatgttgtcgatgattccaaagcaaccaatacaaccgttgacggcggccagcaatatattttcaatcagaatgcatctgcatctgccggtattgcagaatttaaccggataaaaaacggcggcgcccagattattaaaggtggcggacaagccattaataacgaattatatgacaccgccgtacaaagtatttacagcggctcctctgcgacagataccacgctgaatgatcgcgccaaaagctggctggcggcaggggcacagctcctcggcgtcacgactgttaatcagcagtcgcaggtacagctgactgccggttcagaagacaaactggcagcggatgccggagcttatgcggaaaatgttatcttatccggcccggacagcaccctgatggtgatcaccggtgataccgggaatgccgcttttgccggttcgctcagcggacagggtcaggtccggtttgttgcaccggtcaacgccgggtacagccatctgatcattgaaaatctctccggcagccagacattctatatgaacacggccattgcggagcaacagggtgattacctcaccatccgtaacggcagtggtgatcatgctctgaacctacaggattccggggctgaaattatccgtccggatgaagcacgtcttgatttaatcacggacgaaagcagcaatgcgcagttccgcctgagcgccctcgacggcactaatattaatgcggtggacggcgggacctatatgtactcgctctatcagcgtgatgagcaggacggcaaaatctggtatctggcagctcagaaagatgagccgggcgagcctgaaaaaccggttccgccggttgttccggacgataaaaccacaccatccaccgatgcggtgttatccatggctgccgcgccgcagctgatttttaatcacgaactcgacaatctgcggttccgccgcggcgaattacgggataatcagggcgatgcgggtgtctgggtgcgtctgaccggcgacagaacccgtgcaggcaccggacacacacactttaaactgaatcaggccggttttgagctgggtgcggataaatctgtcccgctggaaaacggcaaattgttgctcggcgtctttaccggctataacgatgtcaaactgaagcatcagcgcggcggcgaaagcagcatcgacagtattactgccggtggttatgccacctggttctcagataacggctggtacctcgatggtgtgctgaaatataaccatttcaataatgagttacgtgcggtttccaccaaccgcagcagcatccgcggagattattcacagaatgcttacggtgcatccgcagaggccggttacacctttgatctgccggaagccttctgggccgaaccgtatgcccgcctgagctatatgcgtgcggacagcaaatcagttcatctgaacaataatatgcaggcaaaactggatgcacagcagtccctgcaatccgaactcggcctgcacgcgggtaaagatttcaccctgaacaatcaggtgatcatcaccccttacgccacactggcctggcaacatgagtttatcagtaataatgatgtgaccattaaccagcgcaatacgttcgacaccgatttctccggtgacagcctgaaagccggcggcgggttgactgtccgtttcacaccgcagattcaggcgtatgcggaaatcgattaccgcaaaggcgacaaaacagaatcgccgctgcacggcaatatcggcgtgcgctacaacttttaa

SEQ ID NO: 282698 - DNA, 471 bp, Morganella morganii
atgacgactattgcatgggatggaaagacgcttgcatcagatagtcaggcgcaggcatctgacattatctgttctatgtccgaggtgaaaatataccagccacaggtcgatgagcgctggagtatctacggggaaactgtactggctatcgggtgttcaggtgattgtggggccgaggttgaactgaaaaaactgttatcgggcaatcttacctatgaatcaccgtttgttaagtcattctcattttccgcgcttgcagttgtcggagagaatcgcgcttacattatttacaaggcgaaggatgaagagaaagcggcgatatctctccagactgaaccttatgcagtaggtagcggtggtgttgttgcccgtgttgctatgcactgtggtaaagatgctgctgaatccgtagatattgcgatagccatggacccgcatagtggcggtaatattcagcgttatcagatttaa

SEQ ID NO: 282699 - DNA, 276 bp, Morganella morganii
atgagtaatcgtcacatgcacaccaaagagttttcgtataagtacgcggcatcaatcatcacggctgttagcgttggtgagaaaggcgcagcggtatcaataaaaacgaaagacggtagtgttttcgataccaactggcctctcgatgctttttttaacaaaaagccctctgtcggtaagtggctggtcgatggccacttcggtgagcggtttgtagttaccgaatctgaactaagcaaactcggtagcgagataactgatgaggccgctgattag

SEQ ID NO: 282700 - DNA, 534 bp, Morganella morganii
atgactactgctgtagttttgcctgaatttaattttcagaaaatggtaatggcatctgatgggcaggtattcactaccagcaaaaagattgccgattattttggtaagactcacaagaacgtactgagaaaaataaagcaaacaatcagcgattgccctgatgaatttgctgagctcaattttgagcccactgattacattgataaaaatggcgatatccagccaatgtataagttatcgaaagacggctatatgcttctggtaatgagtttcaccggcaaagcagcgatgcttattaagataaaatttatccaggcatttaactggatgattgagcaaatcaccagatggaaagacctgggcgaagaagcgcagcaccggcatgcactaaaggctgctaagtctgagctgaaaggtcgactgggtagtcagatgatgcatagtcgcaagaaagagaaaaaggcactgtccattgagtatgagcagatccttgcactgacgcagcctaagctaatttttactgatgcagaatag

SEQ ID NO: 282701 - DNA, 153 bp, Morganella morganii
atgaccaaagagcaagaacaagaaatgctcgattacataaatacagccaaagcagaaggctatcccggttatattccagaccagctgacagggcacgctcagatagttgaataccacggcagagtgtgggaatggtacaacctacagaaataa

SEQ ID NO: 282702 - DNA, 168 bp, Morganella morganii
atgaaacaggaacacgattcaatttctaaatctcctatcatcgggaaaagtcccgaggagatagtagagcatttcaataaatataacttcgtggacgatcacggacaccgccttgagttttgccaggacttcatcgacttaatccgggcggcaacagcgcctcgctaa

SEQ ID NO: 282703 - DNA, 378 bp, Morganella morganii
gtgacgtggacagaaaaggcgattgtcgcaactctggtgattatgcttgctgtggttgcctttttgtctgactcgcttggcgatgccagaaaagagcgagactcactatctgaaaagctgtcagcgcagcaggtgattaataccaccacattaaccgcagtcgccacctttcaccgcgtatcactcgacaacatcaaagccaaagaaacagagggcacggagaatgtcaaaattaaaaccgttatcagaacggagtttaaagacagcgagtgcgctgttactcctgtttcccctggcattgttgggaagttgcagcaatacgaaagagacattcgtgcccgcgccggtggtgccgatcccgccacaactgacggctga

SEQ ID NO: 282704 - DNA, 678 bp, Morganella morganii
gtggtgttggtttcagatatccgggtgccaaaaccgaagaataaccgggtccgatggctcgagccacgggaagcgaaacgcctgatcgatgaatgcagtgaacctcttaaatctgttgtgacatttgctctggctaccggcctgcggcgctccaatattattaacctggaatggtcacaaatagatatgccgagaaaagtagcgcggattcccccggatcagaccaaatcagggaaagcattgggtgttgctcttaacgacactgcgtgccgcgtcctgcgtgagcagataggcaatcacacaaagtatgtttttgtgcatacgaaggctaaaaacagatctgacggctcaatgactccggttgtcagaaaaatgcgcgttgacggtaatactgcgttcaggactgcacttaaacgtgccggtatagaaaacttccgttttcacgaccttcgccatacatgggcgagctggttaattcaggcaggagtaccgctgtccgtattgcagaaaatggggggatgggaatcaatagaaatggtacgccggtatgctcacctggcaccgggtcatctgagccagcatgcgcagcaaatcgatgctgtttttggtgaggatgtcccaaatatgtcccacccgaccctgatcgtggttggtgagcacaaaagaaaaacccgctaa

SEQ ID NO: 282705 - DNA, 1008 bp, Morganella morganii
atgtcgataaatgtgattttacgtaatgggatagcgctggtggcagtgctatcaagtatacctgcatatgcggcatgtacgaaaataaatcaaaatcctgttgttgtaaatatgcaaatgggaagggttattgtctcgccagatttacctgtcggtagtgttatcaaagaacaaccatttccaatgccatctaatgttggaatttacgcgtcatgtgatggacgaacacctatggaagctattgtgacagggatcggaatgactgaaggcgctaataaagtttatagcaccaacgtccctggcattggtttgcgattcgaaagaattggttctatttctatgatttacccggatgtttataaaataaagggtaatcccggacaaaaatttccagtgagcttagctgaatctacatttaaattacaagttattaaaattgcagaaaatacaggctctggaactattaatgcaggtgaatacactcggtatggctatcaagttacttctggtggtatgcctgctttaattactcgattagacgcaaatgccattaccatcgtgtcaccctcttgcaaaattaccataggtaaaaatcaagatgtaatcttaccgccggtgaaccgtacagagtttagaggtgaaggaacaacggctggtgaaaaacaattcccaattaatttactttgcaatggtgggatcagcatttcccctgattctattgccgtgaatatgacctttgatggaatcaaagcacctaataccccagaaaataaaggtgtattaaataatacggcaaaaaattctatggctcaggggattggtgttcaagtactaacggataagaacaaagagctagaatggggcaaaatttataaggtcggtgagttaactagcgcgcaaaataaagaaattcgtatgaattacatcgctcgttattatcagtttggctcaaaaatttctgccggtgaagtcgaagctaaaatgttattcaatattacttatgactaa

SEQ ID NO: 282706 - DNA, 2484 bp, Morganella morganii
atgaaacagcgagagttaataaataaatatagcaatacactctctgtgacctgcttcgtcaccgtatgtatgatgccaacattttatgcatggagtgctgaaggcacaacctacgaatttaatagtgggttcatagtaggcagtaaagataatgttgatttagaacgcttcaacacgactgcaatcagtgaaggtaagtactctgttgatgtatatactaacggaaattggaaaggtcgctatgatttaaatgttgttcaacaaaaagatggcaaattaggtgtctgttatacacccgctatgttgagtaattttggagttgattcagaaaaattaaatccgcaattgaatacgcaagagtctacttgttcctcgttgaatgagtggaatgcaatgaaggacgtaaacgatactttcagttcttcgaacctacgtctagatatttcagttccacaaatttacgagcagcgtttatcacgtggttatgtcgctccgcaattttgggaaaaaggtattcctgcgttaaatttagcgtatatggctaattattatgatagccatactagcggttctcaaggtcaaaatgatgccagtgcttatttaggacttaatgcaggtttatcggttgatggctggttactaaaacatattggtaatttaagttggcagcgttcaggaagtacgagttggaacagtaaccaaacctatctgcaaaagccgattgctgatatcaaatcaaaagtgactgccggccagttttatacggatggtgatctttttgacagtattgtgttacgcggggcaagaattgctactgatgacagcatgtatccagatggaatgacatcatatgcacccgaaattcgtggtgtcgcacaaagtaatgcattggtgactgttagtcagaacggttccattatttatcaaacctcagtaccacccggaccatttgtattgaacgatgtttatccatcgggttacggtaatgatttaaatgttacggtcaaagaagcagatggtagtgaaagtagctttagcgtgccttattcatcgttagcacagctgttacgtccagggtttactcgttaccaagtcgctgcggggaaatcagatactgatggtttgcataatcgcccgtatattgtgcagggaacaattcaacatggcttaaataataccttttcactctatggtggagtgactgcgtttgatgattatcaagcctatttaattgggacgggtgtaaatacgggtattggagctgttgcagttgacgttacacaatcacgaacagcattgaaagaccgtactgataatggtcaaagttatcgagtaacgtttaaccgtttaattactgaaacagatacgaatatctcgctagctgcatatcgttattcaacgaaagattacttcaacgtaaacgatgcattatatgcaattgattatgataaacgtggtattgcaaataacagatggcgtgaaaagaatggttttagctatacgataaaccaaaatctgcctgaagggtttggcggactttattttactgggcgtatctctagttattgggaacgatcaggaacggaaaagcaatatcaatttagctacaacaatcaatttcaacgagtttcttattctattaactttatgcgtgtttattcagacaataataatggaaagaaagatgaccgtattagcttaaatattaaccttcccctttattatggcgatagccgaagcacgacactaacatcaaatacaacgtttaataacgaaaaatttggctctactcagcttggggttaatggtgcatttgatgacgaaaataactggacttacgggctcaacactgcggcagcaaatggtggtgagtatagtgttgcaatgaacactggttatcgttcaccgtatgtttataccaatgctaactacagccaaggccaaggttataggcaatatggcttaggcgctaacggctctgtcgttatacattcgggcggtgtggttcttacaccaaatacgtcagcgacgatggctttgattgaagcagaaggggctgaaggggcatcaattacaagtgcgccgggtgtgcgggtgaataagggggggtatgctttagcaccttatgttagaccttatcgcatcaacaatattgaaattgaccctaaagggagccctgaagatattgtgtttaataatacctcagaacaagtggttccatatgaaggtagtattgttaaagtaaaatttggcacaaaagttgagcgtaatcgtacctttaatgttgtacgtctcgataaaaaaccaatgccattcggcgctgaagtgactaaccagcaaggcgaatcaattggtgtagttggacaaggcggtacagtatttattagtaatgaagaagcaaaaaatgcttatgtgaaatgggataacggtcagtgcgtattttctctggaagccggaaccagtaaggatagtgtatgtcgataa

SEQ ID NO: 282707 - DNA, 702 bp, Morganella morganii
atgaaagcaattgttttattcttctgcttcgttttcagtgcatcttcattagcgaataatattattgttaacggcacgcgatttatttatcctggaaatgaaaaagaaattaccgtgcaattaaataatacggcggataggccagcggtcgcacaagcatggttagataccggtgatgcatcggaaactccagatacaataaaaacaccatttcaaattacacctccaatatctcgtctggatgcaaaaggtggtcaaacactacgcattaaattgatggataaaaatgggatcccacaagataaggaaagtttatggtggctgaatatcttagatattccaccaacagtaaaaacagcaggaaaggaagatcaaaacttcttacagctagcaattcgttctcgatttaaatttatctatcgccctgttgggttaggtagtcgcgaattagcaccagaacaattagttgtgaatgctaatggcaataatctgactattaataatcctacgccattttttattaccattacaaaaatttcaaccgatggcaaaaatggattaacggataaggcggtaatgttagcacctaaaagtcaaacgtcagtggtattgaaaaaagcaattagagcaggtgaaagtgttgttttgaacaatatcaatgattacggtgcggatatagcagtaaaaacgactgctaaatag

SEQ ID NO: 282708 - DNA, 855 bp, Morganella morganii
atgaaatttaaactttcacaaattaccgtattggtagttagtgcgctttccgtatctgcgggagtagcggctactatcgataaaaccattcaaataaacaataacattcccggcccggttatcaccggagacagacatattaacgataccatcaaatatacaggcagcatcattaatagcccgaacacaaccacatttgtcggtcgtgaatctgagcgggaaggagatatgtattattcctacagaacggaaaatgatggctctcttacccggatcggtgtcgactatgactatgaatacttttattctgctgtagaaatcgacaccctggcgattacagattccagtgtccgtatcaacggtaaagctgataatttaaccgtcggtggtaaatcagttgtcactattaccggcagtgacgcctataataagtatcgcggtgcagactatgagaacccgtcaaaccctcagtcaacactgccgctgtatcgtaacggttatgacaataaccgccgggatgaaatcactgtcagcaccgggaacggtacttacaatgatgaatccaaacaatatttagatggcgaacatattggtgatgtcaaaaaaccagacaacagcaatgcaacattaaccatcaaaggcaccgatgttactgatgcccgtttaggcgcagataaaggtgaatacctggttgccaccggtgatacttttaacggcaaagcggaacagcatgtcggtgaaaattcactgtcacaaggtgcaacgtttaacggacaaagctcacaacacctcaaggtaaagacggcaaaaaagccgtatcccttgatgcaacctttaccggtactgccggtgtaa

SEQ ID NO: 282709 - DNA, 1872 bp, Morganella morganii
gtggatggttttgcagaaaataataccatcactaacaaagccactaaccgcggtaagcaggttgtcggcaaaaacggtactgccggtattaaaaatgacattaccaacggcagtcagtatgtggatggtcttgcagaaaacaataccatcaccaataaagctgataaacgtggtgagcaggttaccagcggtaccgccaacaataacaaactgaccaataccaatcagattgttaagaaaggcggcctggccaccgataacacccagaccggcaattctcacttaagcgttgaaaatggcggtgaagcgaaaaataacaccctcaacggtgatatcgatatgattgttgaggccaatggtaaagcgaccggcaaaactacttttaacggcaaaaaccatctggatctgtatgcggccaccaccaatggtgcgtatgtggaagatcttactctgagccagaccaaaggcaaaagctccgtcaccgtttatgaaggcactcaggaacacgatgccgtcactatcggtaccttaaacggtaaagcagcggtgaattttgaccaccggaccaatccggcaggccatactcagatgaatatcaataatctgggtaacaatgatccggcgcagtatgataacaccacgttagatttcaccatgaacagcaatatcctcaatggtaattctgactttatcaatactgataatgcttatggtcagcactatgtcaccatcattgagcggggcaccggtaaagaagccgttctgaatcgccctcagtctgctgatttcgcatatgtgaaaaacgtggccggtgacagcaatgcggtctttggtatgaaggatgcggacggcaaaatcctcaacctgatggatgccggtacttacattcataatattcagacccgtaccggtgccgataatgacaccacatggtcattcactgcaaccgatcgcctgacaccaagtgcccgtgcggtactcgcactgtccagtgcgccgcagctgatgtacaacaacgaagttgatcatctgcgtgcacgtctgcatatgctgcgtaccagcgacagtattgagaacggtctctggatgcagggtatcggcagcaataccaaagtggataaggatcagattcagtacaaactcagacacgccggtctggaactgggtgcggattatcagttagcgttaaacagtgacagcaaactggttctgggtggtttcaccggatttgataaaggtgatgtcaaaaatgactgggcaggtaccagtgatatcgacagctataccttcggtgcctatgccacttatctgaacagcaacggctggtatgcggatgcattactgaaatataaccactttgataataaactgaagacaacatccactaacggttatgatgtcagcagcgacaattactccacctctgtctgggggatggcgctggaaaccggttatacctttgccttcagtaatcagatctttatcacaccttacggacagttagcgtataaccgtatgggcagtaaagatatcaccctgaataatggtatggatgcggcaatcaagagccagacttcatttaccagcgaactgggtgtcaatgccggtaaagacttcagctttgataacggcctggtgttctctccgtatgtgaaagcggcgtggaatcatcagtatgaagacggtaacgaagttgaatttaaccgttacaacaccattaacctggatttatccggcagtaccggtaaattcggtgccggtttcaatgcccgctataacaacgtgaatatgttcatgaaattacagcacattgccggtgatgcagtttattcaccaatcaacggacagattggtatccgttataacttctga

SEQ ID NO: 282710 - DNA, 543 bp, Morganella morganii
atgcaatatccaaaagttattgttaacggcgtgtccgttcgtgttgatagtgaagggcgttacagtctgaatgatttacatgcggcggcggttctcaaaggcgaggccagcgagtcacaaaggccaggtaagtttatccggagtgccggagttaagcgctttgtttctgctctcgatgccagaggacaaaaaagtcctctgaaaggaaatcaatcacttaaggtagttaacggcggtaatgagcaaggcgtatgggctgctgaattactggcgatacgttatgcggcatggattaagcctgagtttgaaatcagcgtatacgagacattccgcgaagcgacgcttaacggcctgtcgaacatgaccatgcttaatcgccttgatctgctgattgctactgaaaagcaggagattagccattgcgcccgcaaaatgaatagttggggtgttggcggacggaagaagtcactgacagacaccagagcaaatatcattgcgcagatggaccctgatatggtttcgctgatggaggcgcaccaatga

SEQ ID NO: 282711 - DNA, 330 bp, Morganella morganii
atggacaccaagacaaaaataattgttgttattttgtttgctctggtgactgtgattgcgtgcttgggtgacgcactcggtgatgccagaaatgagcgtgactcgctatctgaaaagctatcagcccagcaggtgattaattccaccacattaaccgcagtcactacctttcatcgtatctctggggagaccatagatgccaagcgaaaaaacacactggacgcacagacagccaagaaagacgtcaaagttattcttgtgggtaatgactgtgcttccgttgctgctcctggtggtctcattgaccggatgcggcagtacaaagactga

SEQ ID NO: 282712 - DNA, 483 bp, Morganella morganii
atgactgaaccaaaatggattactgaagcccggaaagaaatcggtgtatcagagcacacagcagcaggttccgcagcagtagaccaaatgtggattgacagtaaactgcgtgggctggttggcactgcgcgtaaagtgccgtggtgtgccgggtttgtgaatgcctgcctggagcgcgccggaattcgctcgccccgctctgattcttcccgctcatatctggcgttcggtactgcactgaaagagcctgcatacggttgcattgtcacattctcccgtaccggcggcggtcatgttggcttcgtggtcggcaaaacagaatcaggtcagctgatggtgctgggcggcaaccagtcagacgcggtaaatatcaaagcattcggaaccgaccgtgttacaggttaccgctggccgtcaggtgttccggtggataatcgtccgctgccggtcggtaacgctgcgttgtcagtgaaagagtcgtga

SEQ ID NO: 282713 - DNA, 318 bp, Morganella morganii
atgaaacatatgaacaatacccctgattggttggatcagatattaaattatctctatcagtataaagaccaaggcgtgtttgccggactggctggagtggttgctatcctgcgcgggatgtacaacggcggcgggtggaaaaaaacattactggacggtgtcctgtgtgcattcctcggctggttcgctaaagacctgctggcctttatggggatgaatccagacctggcttatatcaccagtgtcatgatcgggtactggggcgtagagaaagtaagcggcatgattaaaggtaaagcgggagtaaataatgactga

SEQ ID NO: 282714 - DNA, 1713 bp, Morganella morganii
atggcaaagatacagcgcagactttggcaacatttaagtaagtcccaagtaaatggtgtagagattttacgcgaatggggacgctataaaggggatagtagccaatcgctgttacctattgtatttactagcatgttaggtatgacactagatggtgacaatattgatgaagcattaaatcagcttttcggtcaacccgtatatagcttcgcgcaaacacctcaagtttggttagatcaccaagtaatggaaggaaaagagggactaacattaaactggttctgcatggatgacatctttgccgacggtttattaacaatgatgttctctgattatcaaagcttgatcactcaattatgccaagatgaagataataatcaatcagttgataagattattgcacaactcccttcatatcaacatttagcaatagataatcacttccaatcacgctatcaacaactcgagcaaacattggaaaatcatccgcaaatcaaacgtgctcatgttatggtaaaagacgatacgaaagtagagtctcctctacaattactgtttgaagcctcttctgatattccactatccgttattaaacagcccaattggttacctaatttacttttgccatcagcttcactcagtgacattattgaaaagagttggcaacgatttgaggaacgagcacggtatggcatatgtcacacactgtatcgaaatactctttttaccgagctaaacacaccaatcaccctagctgaaatagtgactcgtttaaaagcaaagccacagtatgagaggctacttaatcagtggctagatttattatgcctgcatcacttattaaccaaagagggtgatcagttttatgccacaacacagtttattgacttatgtttatctgccccagtatttcaacaacctgttaatgattgggaatatgtactttgggattaccttgagcaatcactaacccaacatgaattactctttagtggtaaggtttctcctctttcactactttttaattcagatgaaattaccacagcactatacgccaaacaccctgcactaaattatttaaatcaatgtgcaaaagatattgttagtgcaatggttggtgcaacatcttcactcaatattttagaaataggggcaggaacaggagctaccactcaaggtatagtcgcagtacttaagaatacgcattactcatacacctttactgatatatcacattacttccttgataaagcgcgaaaaaaatttactgctgtaggagaaatgcgctatcaactctttgatattaatgcaccaatacaattttctcatcatccagataatggctatgatctgatcattgcatctaatgtattacatgatgcatcacatatcggccacgcactaaaacggattagaagcctgttaaaacctcaaggctatttattatttatcgaagcaaccgagtgtcaaagtgctatgcaaatggcgactgttggctttattgagggattaagtgcatatcaagataagcgtatattgacgaataaagcgatgcttgatagtgaaagttggcatgatattttaatcaatactggttttgaaactattggtcaatggccccaaacagattcctcgtctttgcgacaaacactctttttagcctctcccactcgtggaggaaaaccttatttaggtaaattacgtgactcttga

SEQ ID NO: 282715 - DNA, 612 bp, Morganella morganii
atgcttaacagcgtggtcaactctatcgttcaggtcggcgttgagatggctaaaaacttcatcctcggtcagacattaggcgttgccactcaggcggcaaatgcatcagcagctgttgctggcggcgctgcggcattagctgcatggactccggcggctattgcggcatctatcgcaacaatgggggcggcatctgcaagcggtctcggtgcgtatactgcggcacaggcgactggcgcggcaaccagtatcggaatgaaagcactgacgattgccggggcgcgtaaagatggtggtcctgtatctgccggtgaaatgtaccgggttggagagggcggcaagcctgagatattcaaagcgtcaaacggtaatcagtacatgattccgggcgataacggcaaggtcatcagtaaccgtgatatcggcggtggacaggtgccggtgacggtgaatatcaacgactattcatccggaggcagcaggattgatgctcaggccagacaggacagcaacggcatgaccatagatgtgtttatcgcggacatggacaacaaagggccgatgcatagcgccatcacacgaaacacaacagcatctgcgagggtgagatga

SEQ ID NO: 282716 - DNA, 477 bp, Morganella morganii
atgattatcgactatcctgactggcttcctctggcacagaagtcagacaaaaacatgaccatcgacaccggctacatgacagatcagccacaggtcggcgctccgatatttcagaaactgaccgatgacctgaaaacggtctggagtgtcacctggatattcacactggtacaggaacgggcgtttgctcagtggctgcgccatcctgattatctggataactgcaaccggtggttccggatgaaaatagacatcggcggcagcggattgcaggagcaggaattgcactttgtatcctacccggtgcagaccagcgttaacggcgcatcggttacatggacaggtcaggttatctgtaaaaacctgcataacgacgatgatgaattcggcgatgtgattatcgagttcccgccaccgttcggcagctggctggatgtcattgtcactgaaacactgccacggtgtaaggagggataa

SEQ ID NO: 282717 - DNA, 471 bp, Morganella morganii
atgccgacattgcgtgagttccgcgcacaacgaccaaatcgcatcctgtacgaaacactccagctatcacatccgtcattcggcgacatttacctgatcactcaccagattttcccgaagatactcggcgggattgaatacctgccgtgcaactttgagatgtcagagagccagcagagtaaaacgccgatcatcgacgcaagcgtaaaattcagccgtgtggcgcatgagtttaagcagaagctgaaagcgtggcggtcgtattcaaggatggtgccggtcgaggtgacttaccggctgtttgatgaggcagacaaaggtacagcaatcgtgcgctggaagctgtttgcaaaggatgtatcactggatgcggaagcggtttcaatgacactttcgatgaccaatccgctgaacaagaatgtcggccgcatttatgagccgcaggagtggccggggctggaggccgtatga

SEQ ID NO: 282718 - DNA, 393 bp, Morganella morganii
atgacgacagacgaatttacagacaggatgatcggggtgccgtgggttaaccgggcatgttcgtttactgcgtgtgactgctgggggctggtgacgctctattaccggtgcgttgtcggcgctgaaattcatcacgatagcggttatgaatctgacagtgattttatgacctgttatcaaaatgaggtgaatttctggaagccggaagagcatccggtaagtggcgggatatttgtggcttatgacgggtccgtgccggttcatgtcggtattgtgctcggcggagtggttctgcacagccgtggtgataacggacatgtccgcctggacagattactgaccattcagcggatatacagcaaagtggagtttatgacttatgccggtaattga

SEQ ID NO: 282719 - DNA, 990 bp, Morganella morganii
atgaatgaatcagagtttttgcaacgttggaaccaagaagagcctatgtatagagcatggggggactttgtcgtttccaatatatgtacggaactcgttgataataaatgccgcaatcttaatagctttttgaaacaaccagcgacgccaagagttaaagaaaaagaatctctaattgataaagcctttcatagattagaaaaatcatatgaagacccttataaagaaatcgaagataaagttggtgttagatttgttgtattgcttacatcggatatagatgatgtatgcgatgtaataaaaagaagtgataaatggttctataagacttcaagacattatgatgaagagcgcctaaatacacctttaatttttacatatcaatctgttcatttcatcgtaacagccaaacaatcatttgatcataatggagtatttattgaggaaggaattccttgtgaaatacaggtgagaactctattgcaacacgcttatgcagagttaacgcatgacgccatttataaagctaaaactatcgttgagcctgatatacatagaacggtagcaagaagtatggcattaattgaaacaactgatgattttttttgttcagttgctaaagccctgaacaattcacctgatgcttatataggaactcagaaaacactcgatcaactttatatgactttaataaaggaaaaaccaaataatcaaaaatcggccatattaatattggatacattcaaaaaaaccattgatgctgacatcataagtagattatacaaatttgttgaagatacacctgagttagaatcattgattcgtgatggtaaaaataaaagcagtttctatgaacagagtgttaccattttcgtttactggttaattaaaagacgtaagtctattttacagaaggaatggccgttagaatggagaattatacaaaaaatggcggctgacattggtgtttctcttgaaaggcaaatgtaa

SEQ ID NO: 282720 - DNA, 1092 bp, Morganella morganii
atgaatattagcaagttgagtattgataaaattattattcatcaaattcatcagcgagatgacgagggtttaaaagttgagcctacacgaggttcgtcttttatcacatttgatgaagatgccttgcagggatttaaatcccgagtaatagatgctcttggtgatggatcaaaagccgtcaaaatgaaaattatagagcacggtgaaggatatgtacctttcatggctaccaatttatttggtaaagaaggggatgaatatatcgatcaaacttataatatagcaaacaagctagctgatgcccaaacaagaagagcaatacccggaggcatcgttgttatattcactggtgactatggagtaaataagcgaaaatttatcggtataattaaagcagacatttacagtgcctatgaaaaaattgttgatccaaaaacaggtcaaatctcgttaaaatttgttgaagaaatacttcttactccctcaacaaaactctataagacagcaggttttttccaatcaagtaacactgctcaagaagatgatttgaacaaatcatgggatgtcatgatctctgattatcaaataagcaaatctgatggaaaagctgctgctcaatatttttatcaacatttcttaggttgcggctatcctgaaacaagtgctcgcacaacaaaaaacttttatgagaagactagtgatttcctaaatgaactagatataagctcagaaaaaagaaatgacttaaaaaacgccttggttacttatttgaagcatgagaaatccgatgtcatttcagcaaaagagtatgcagagagattcttcgatgatgaagttaaagatctttatcttgagtatgcaagcgaaagtggaattccacagacagcttttacaagagataacgaacatatcgaaagcaaattaaaaacaagaaagttaaattttagcaaaaacattaaaattacagccccagcagaagtttttaaaaataatatagttattgagtctacggaaggtgacttagataagaacggagaacctgcagaatggactactattcttattaaagataaaattatacttcaagaataa

SEQ ID NO: 282721 - DNA, 330 bp, Morganella morganii
atgcggatggataatggtccggagcttatatcactgacactggcacactgggcggaagagcatggagtgatactggaatttatgaaaccgcgtaaaccgactcagaacgcctttatcgaacgttttaaccggacataccggaccgaaatacttaatttttatctgttccggacactgaatgaagtacgggagatcacggaacactgggtaagggaatataactgggagcgtccacatgaattcctgaataatctgacaccggaagaagccgaaaataaatttaatttactgtgcggaatttgttggcaactacaagaatttcatatatga

SEQ ID NO: 282722 - DNA, 1296 bp, Morganella morganii
  misc_feature (1226)..(1272): n is a, c, g, or t
atgttacgtggtgtcattattaatggacaacaacaagtacttaaaaaagttccttattattccgttaaaacgcattatatccctacagaaaaaagtgacgcttttctagtattacgagctcaacttgctaacattgtttatgatccagaaaattggcctttatttgctattcaagttatcaagaccaaagaacaaccagatcatatttttattagccttgataacttattccttgatggaatgagtatgcagatatttttcagtgagctaaaaacgctatatatggagccaaatcaccaatttatccctctagatattacttttcgagattatattgattgtgatgcctatccgattaacacacaaaatgattgggaatattggttaacgcgtttaccacaattaccaccagccccacaattgccactaataaaagatccagcacagattgtgcaacctcgcttctcgcgtttacaaacatcattatctacttctgtttggcaagcactacaacaagttgctcaacaaaataatgttacgccagcagcacttttgattgctgcttattgcgccacattatccgcatggagtaaaagccctgagttaacaattaatttgacattatttaatcggcatcctgtacatcctcaaataaatgaagtacttggtgattttacctcattacaattactcgattggtatacctgtgatctttggtcaaacagtatctcaatgatgcaaaaacgtttacataaagatatgcaacatcgtagtgtttcagccattaaagtaatgcgtgaaatggcaattcaacgacagatgtctcatatagagatacctgtcgtttttacctgtgcattgggctataaacatgatgaaggttttctttctcatcattcatggctaaaacctgtttggggaatatcacaaacaccacaaacatggctagatcatcaagtatatgagtcagacggtgaattatatttaaactgggattttgtcgaacaattatttgactacacaaccattttttccatgttccagcaatatgaacatatactcactaaactggctactgaaccacaatcttggcaattgccactaaataaacttataccaagatgcaataatctcgtcatcaccccacttttcaatgccaaaaataatcaaaacacacattataaacaatctactgatacacaaaaaacaggtcagacaatacaaannnnnnnnnnnnnnnnnnnnnnnnnnnnnnnnnnnnnnnnnnnnnnnacaaaaactacaacaacttgttaa

SEQ ID NO: 282723 - DNA, 960 bp, Morganella morganii
atgcttacaattatcggtggctcaggcttcattggtactcgcctgtccacacaattacaaaaagacaatatcccgttcaaaatcgttgatattgagaaaagtgctgcatttcctgatcattgggaatttggggacgtcactaaaccggaatctctggttgagccactgacaggttccgacgttattattaatctggctgcaaagcacaaagataatgtgcatcctatcagtctttactatgatgtaaatgtcgatggtgctaaacatgtatgtgatgtcgcagctcagcttggaatcaaacatatcgtctttacatcttctgtggctgtttacggttttgttgaaaaagaaaccggtgaagatggtcaatatgagccattcaatgattacggtaaatccaaattagctgccgaacatgtctatgatgcctggcaggcagaagaaacagatcgcacactggtgacaatccgcccgactgtggtatttggtgaaaataaccgtggcaacgtctataatttattccgccagattgcatccggtcgtttccttatgattggtggtggtaaaaaccaaaaatcaatggcttatgttgaaaacattgccgcattcttaaaatttgctactacctttaattcaggccgccatgtatttaactatgtcgataaacctgattttaatatggaagaccttacagatataatctgcaaagcaatggataagcataagtctaatatccatgtaccatatagtgttggtctgttgggtggttactgcttcgacattctggcaaaagtgactggtaaggaattcccgataagcagcatccgcattaaaaaattctgtgcccgtactcagtttaaatctgattttattgctgataccggatttgttgccccggtaagcctggaacagggaattgctaatactgttctttatgagttcaaaaaaccaaaaagatga

SEQ ID NO: 282724 - DNA, 594 bp, Morganella morganii
atgaaaaaagtattattgacagcagttgctactacaattattggtgcatcatctgcttacgctgcaactgaaaatgcaggtggtggtcaagttaatttttatggtaaagtgacagacgtttcttgtactgtttcagttgatggtcaaggtagcgatgctaaagtttatttggcgccagtttcagtaaaagaggttcaagaagcaggtgcaaatacttatttaaaagcaaaaccatttgttattgatgtaacacaatgtcaaggtgttaatgatgataccgttttaaaggttaactggactggtggtaacgtattaaatggtgcttcaggtattaatgctggttatttagctaacactgttactggtgctgcggacggagctgaaaatatacaattagttttagcaacagatgctagctctaagttagaaaataaaatcgatcctaatagtgcaaagcaacctaaagcaacaacaactgaaattactgacggtagccgtttcacttatttcgtaggatatgcaacttcaacgcctaaagatgttacatctggtatcgtagaaagttatgcaacttacgaaattacttacgaataa

SEQ ID NO: 282725 - DNA, 2832 bp, Morganella morganii
atgagcaaaacagaaaacacgttacataaaaaaacaccgtcggtgacggtactgagcaaccgggggcaggtcgtacgcgatattgtgtatcaccgccatccggataccccggagaaaaccgatgagcgcattacctaccatcagtttgataaacgaggatttttagagaagagtgctgatccgcgtatgcaggcatccgggctgagcaatttccgctatgtcacctcactctccggacaggtgctgtgtacggaaagcgcggatgcgggaacatcgctgacactgaatgatgcggcagggcgactgatgatcagcatcagtcagatctgcacggataaggggcaggataactgcagcaaggccgtgactcagactttccggtatgaaggtgcggattcagccgggcgtctgctgagtatcactgaacagaccgccgggcaggacgctcaggtaactgaacgttttatgtatgcaggcaacagtgaggcggagaaagcaaaaaacctcgcgggtatctgtacacaccattatgatccggccgggctgatgcagacggacagcattgcgctgaccggcgtgccgttatccataacccgtcagttgctgaaagatgcggataagccggttagctggccggaaagcaatccgcaaacattattatctgctgaaaaatacaccacacaaaccattgcagatgcgaccggtgcggtgctgaacaccacggatgcggcgggtcatcagcaaaaagtgacttatgatatcgccggattactgcgcaccagccgggtgacggtgaaaggcggagcggaaaaaatcattatcaagtctgtgacgtattccgctgccgggcagaagctgtgtgaggagcacggtaacggtgtagtgaccacttacacttatgaaccgcaaacccagcgcctgattgctgtcaaaaccgaacatccggcacggaaaaaaatatttcaggatctgcgttatgaatacgatccggtcggcaatgtgctgtgtgtgaccaatagcgccgaggagacgcgattctggcataatcagaaagtggtgccggaaaaccgatacacttacgacaccctgtatcagctggtcagcgccaccgggcgcgagatggccaataccggacagcaacgcagttccctgccggatatttccccgtttgataaagccagttacgccaattacacccgcaactatatctatgatcgtgccgggaatatgacacaaatccgtcactcagcgcctgcgaccaataataactacaccacggatatcactgtcagtcagcgcagcaaccgcgcggtactgaaaaccctggcggacacaccggagaaagcggaagccctgttcaccccgggcgggcagcagacaaaattccagccgggacaaactctgtcatggactgcgcgcggcgagctgcaacaggttacgccggtggtgcgtaacggtgccgccggtgaccgtgaaagctaccgttatgatgcgggcagccagcgtattctgaaaaccgccgtgcagaaaaccggcaacagtacacagacacagcaggtgatctatctgccggggctggagctgtaccgcggaaaagaaaactatcaggtgatctgcgccggtgtcgccgggcgggcacaggtgcggctgctgcactggccggacggcaaaaaagatcaccagcggttcagttatgacaatctgatcggcagcagcggcctggaaacggacggcgacggtaaactgctgagccaggaggaatactatccgttcggcggcacggccgtgctggtggcggatgcggacagcggcattgactacaaaacccaccgttattccggcaaagagcgggatgcgaccgggctgtattactacggctaccgttactatcagccgtgggcagggcgctggctgagctcagacccggcgggaacggtcgacgggctgaatctgttccggatggtgaggaataatccggtgtctatgaaagatgaagatgggagggttgctgagtggcttgatttggcatatccgcgcgaaagaaacaacatggttgaacagatctataaagaaaatacggtcgtaaaaatgcatcatataaaatttacggcggagacaaaaaaaatactcgatgaaacagaagaaaatgaatttagtcttaagggacttaagcctaatgtcaaagaaaaaaaaatgaggggaatgaaatatactaatgcaaaactgaaatcctacgcggcacatgccggttttttaagtttatccgaaaaacgggaaccggtatttaagtctggctttattaatttcaccggtagtttaagtaataaaaatacttttcccggggttcatctgatcgatgaaaaagtgaaagccggatttgaggcgttttctccggcattactcaaaaccacaaaaaaatggcggccggaagtaagcctcggttattatcggatagaggatactaatgcctttgtatcggagataaaaaatagatattcagaatccggtacgccacttactgacgtagtggaaagcaggattagagagcatataaaaaataataataacatactccctaaaatggctgggattgctggtcttcatgctgaggtacaggcattaaattttgttgtgtcctcgatggagaaaggagaaagcgtagctggtaaactcagtgcaagttacatttatacccaacgtttggtcggtgctaaaaacgaagatttcccggcatgccataactgttcagggattatttcaggccttgaaaatgttatgacagggcgtgttaaaaatcatataaggctgacgcggagaaattcagtttcttaa

SEQ ID NO: 282726 - DNA, 2880 bp, Morganella morganii
atgaacaaaacagaaaacacgttacataaaaaaacaccgtcggtgacggtactgagcaaccggaggcaggctgtacgcaatattgggtatcaccgccatccggataccccggataaaactgatgaacgcattacccgccatcagtttgatgcgcgcggttttttgcagcagagtgctgatccgcgtatgcaggcgtccgggctgagcaatttccgctatatcacctcactctccggacaggtgctgcgtacggaaagcgcggatgcgggaacatcgctgacactaaatgatgcggcagggcgaccggcgaccagcatcagtcagatccgtacggataacgggcaggatgaccgcagccgggccgtgactcagactttccggtatgaaggtgcggattcagccgggcgtccgctgagtatcacggaacagaccgccgggcagaatgctcaggtaaccgagcgctttgtgtatgcaggcaacagtgaggcggagaaagccaaaaacctcgcgggggtctgtacacaccattatgatccggccggactgatgcagacggagagtattgcgctgaccaaagtgccgctgtcagtgacccgtcagttgctgagagatgcggataacccggttaactggccggaaaacaatccggagagtttgctgtcagctgaaaaatacaccacacaaaccattgcagatgcgaccggtgcggtgctgaataccacggatgcggcgggtcatcagcaaaaagtgacttatgatatcgccggattactgagtaccagccgggtgacggtgaaaggcggggcggagaaaatcattatcaagtctgtgacgtattccgctgccgggcagaagctgtgtgaggagcacggtaacggtgtagtgaccacttacacttatgaaccgcaaacccagcgcctgattgctgtcaaaaccgaacatccggcacggaaaaaaatatttcaggatctgcgttatgaatacgatccggtcggcaatgtgctgtgtgtgaccaatagcgccgaggagacgcgattctggcataatcagaaagtggtgccggaaaaccgatacacttacgacaccctgtatcagctggtcagcgccaccgggcgcgagatggccaataccggacagcaaagcagttccctccctgatatttccccgtttgataaagccagttacaccaattacacccgcaactatatttatgaccgtgccggaaatatgatgcaagtccgccattcagccccggcgactggtaataactacaccacggatatcaccgtcagtcagcgcagtaaccgcgcggtactgaaaaccctggcggacacaccggagaaagcggaagccctgtttaccccgggcggacaacagacacaactccagccgggacaaacactgtcctggacaacacgcggcgagctgcaacaggttacgccggtggtgcgcagcggtgctgccggtgatcgcgaaagttaccgttatgatgcgggcagccagcgcatcctgaaaaccgccgtacagaaaaccggcaacagcacacagacacagcgggtggtttatctgccggggctggagctgcgaagcggaaaagaaaactatcaggtgatctgcgccggtgttgccgggcgggcacaggtgcggctgctgcactggccggacggcaaaaaagatcaccagcggttcagttacgacaatctgatcggcagcagcggcctggaaacggatggcgacggtaacctgctgagtcaggaagaatattatccgttcggcggcacgtccgtgctggtggccggtgcggacagctgcattgactacaaaacccaccgttattccggcaaagagcgggatgcgaccgggctgtattactacggctaccgctattatcagccgtgggcagggcgctggctgagttcagatccggcgggaaccgttgacgggctgaatctgttccggatggtgaggaataatcctgtgacgttaagagatgatgacgggttaaaacctgttaataatatgccgccggcacctccgcttccggtctccggaggaacacctttaccgccgccacctcccgtgatgagcggagctccgttgcctccgcccccaatgccgggcggagcacaattacctccgccaccgccaacgatggcaggaggaaatccgccaccgccgccaatgatgggctcaaaaccaacaggagcaaaaaagaaatggactatcaaggaagaccctgcactgtataaacaacaaggcggagaatacccgtactattcatctttcagtatcactttgcagaaactgaatatcggccattacagtgaaattgatgatatggataaatttgtcagtgcatggagagataccggccgtaatatgaaacccgccgccagagatatcaatcatgagaaagccattgaggttcagtctgttatgggaaaaattgatgcggaatggtccgggtataataaagcaaatgtcagtgaaacatttcgtggtgatacgccggttattacaggaagttatccatggcttgccgattttattaaggaaaccggcaacagtgcggaggctgtgactaaagttatggattcggatattcggtctcagctgattatgtctacagcaaaagatccgggaatgggatatgtatcgaataaatcaattatgtggcattttgaactggaagaagggcatgccggtgtttctgaaggattgtatgcatcagaaggtgaggtgactttccctatctataacaaaatgaaggttacatcactgagttatattccggaaggacaatcttatatgaataatgcggaacggtttggtactgcacaccggtatattattaacgcaaaaatgttaccgaaatcataa

SEQ ID NO: 282727 - DNA, 1686 bp, Morganella morganii
atgagtaactcaatcgtcgagattgaggataccaaatgtatttttatcttcggttacaatgccgcagattcacatcctatcgtcgcccgtcgtattgttaaggcgaaagagaagggtgcacaaattattgtctgtgacccgcgctatattgaatcagcgcgtcttgctgacattcatttggcactgaaaaacggttcaaacattgcgcttatcaatgcgttagcgcatgtgattattgcggaaaacctgcacgataaagccttcattgacggccataccgagcagtttgaggaataccgcaagctggttgagccgtacacaccggagtccgtggaagcgatcaccggtctgaaagctgaggatatccgcaaaacggcccgtatgtatgcgaaagctgaaaatgcggtcattctgtggggtatgggtgtgacgcagttctatcagggtgtggaaactgtccgcgcactgaccagtctggcgttactgaccggcaacctgggtaaaccgcatgtcggtgtcggcccggtccgtggtcagaacaacgttcagggtgcctgtgatatgggcgcactgccgaacacactgccgggctatcagtatgtggaagacaaagccgcactggagaaatttgccaaattctggggcatcgaaaaaatgcctgccgaaaacggtattccgctgagtgaggttccgcactttatcgacgaaggcgtactgaaggcgcactacgtgatgggtgaggatccgcttcagactgaaccggatctggccactatccgccgcaccttcgataaactggagctgctgattgtccaggatatctttatgaccaaaaccgcgtcgattgctgacgtgattttccctgccacctcctggggggaacatgaaggtgtgtataccgcagcggatcgcgggttccagcgcttctataaagcggttgagccggtcggcgatgtgaaaccggactgggaaattatcagtctgatgtccactgccatgggttatccgatgcattacaacaacaccaaagagatctgggatgagttacgtgaactctgccctatctactatggtgcgacctacgaaaaaatggcggacctggcttatatccagtggccgtgccgcgatgtggcggacagcgatcagggtacagaatacctgtacgacggcggtatctttgatactccgaacggcaaaggtcagttctatacctgtgaatggcgtgcgccgatcgaccaggtcagtgatgactacccgatggtgctggccaccgtccgtgaagtggggcactactcctgccgctccatgaccggtaactgtaaagcactggcggcactggcggatgagccgggctatatccagatcaataccgcagatgctgcggcactggggattaaagatcaggaactggtctgggtggcatcccgtcagggtaaagttatcacccgcgcgaatgtcagtgagcgtcctaacaaaggggcggtttacatgacctatcagtggtggattggtgcgtgtaacgagctggtggcggaaaacctcagcccgattacaaaaacaccggagtataaatactgtgctgtccgcgtcgaaccgattgcggatcagaaacaggctgagcattatgttgttcaggaatataccggtattaagcgccgtctgcgtgaagcagcggaagggtgttaa

SEQ ID NO: 282728 - DNA, 603 bp, Morganella morganii
atgaaaatcaaagcaacacttcttgccgccgcaattttgctggcggggtgtcagactgcgccgcagaaaactgctcagaaccctcattatccttccggtaacggttttttactgactgcccggcagatgaacgcagcaaaggcatcctccgtcagtcccgaagatgatatctggggttatatccgcgatgaaatgaaaatgaacatcccggacaatgaccgcatacgcgccgaagaactttcttacctcgccaaaaagagctatctccacgatgtgacactgcgcgcagaaccttacatgtactggatcatcggtaaaatcgatgaacgtaacatgccgatggaactggttctgctgcccatagtggagagtgcttttaatccgcatgccacctcaccggcccaggctgccgggttatggcagattatcccgagtaccggcaaagcaagcgggctgaaccagaaccagtgggttgatgaccgccgtgatgtggctgcctccaccactgccgcgctggatttactggagcgcctgaataatatgttcggcggagactgggcactgaccctggccgcgtataacagcggcgaaggccgcgtataa

SEQ ID NO: 282729 - DNA, 1569 bp, Morganella morganii
atgtccgtacaatgccatttttcgcacttatcagtgacatttaacgatattccgctgtttgacaacatcagcggcacattaacccgtcaggttcaggggttgaccggtcataacgggcgcggtaaatccgtgctgatgtcgctgctcgcgcagcagcggcaaccggcctccggtacgatcagctggcaggtgccgttttattatgtgccgcagctgacccgcctttccggtatcacactggcggatgctctcggaaccgcagaaattctggccgcactgcgccgcacagaggacggcaccgccaccgcagaggattatgattttctggcggataaatgggatatgccacgacaacaacaatccctgctggaaagtgcgcagctggcgcatctcccggcggacaccctctgcacaagtctgagcggcggtgagcaaacccggctggcactctgccgtgcctttttacagccgtgtgccttcctgttactggacgaacccggaaaccatctggatgccgccggacgccgctggctcggtgagcaactacggaatcatccggccggcgcactggtgatcagccacgagcgccgcttgctcgacaccatgcagcggatttttgaactcactccgtctgctctggaagagtacggcggcaattacacccattatgccgagcagaaagcctttcagctcagcgcattacagagtgaggagaagcagttacagtcacagctgaacagagaaaaaacggagttacagcgcacactggaaaagaaagcacagcgccgccgtcagggcgagaaagtccgttcatccggctcctcctctgccctgctgctggatatgaaaaagaacaaagcggagaagcagcaatcaaaaataaccggccgtcatgaccgtgttatgactcagcttgacagccagcgccgggaagtaaatgagaaaatacagcatatcaccccgcagatgctggcctttaattataccggcgagcaaaaacgggtgcggatcaatacccgtgatctgattttgccgtccggcacacaagagcctctgtcactgaccatttccggtggtgaacactggcatattgccgggcgcaacggctgcggaaaatccacattactgaaagtactggcgggcctgctcacggcaaaatccggggagtactccctgcacggccgtctgcgatatctggatcagcacctggcgctgctgaataaagccctgccggtcacagaagcactgtgcgagtttgatccggccattccggcacaaacctggcgcacccatctgggtgcattgcggatccggggtgataaggggttaattccgctgtcacagttaagcggcggtgaacaactgaaagtcacattgctggcattaacattatccgaacctttgccggatattttattgctggatgagccggataaccacctggatctcgattcccggttattactggaaaatgtactgcgcagttataaaggggcattattactggtcagtcatgatgaggcatttactgaaaattgtgccattacccatacactggcattatcctga

SEQ ID NO: 282730 - DNA, 219 bp, Morganella morganii
gtgcttcctgcgggtatctctatgaaaaataacgttatgctgattttactctcgctgtcactggcggtcttcggcgtcattaccacagaagtggcggtgattggtctgctgcctgccgcaactgacggaacagttgcagatcacggcaccgcagggtcgggtttctggtcagtatctatgctgtggtggtcgccattaccgggcctgccatcacgctga

SEQ ID NO: 282731 - DNA, 1089 bp, Morganella morganii
atggcacaggttatcaatactaacgttctgtctctggttactcagaacaacttaaaccgttcacagggcgtattaggcactgcaattgagcgtctgtcttcaggtgcccgcatcaacagcgcaaaagatgacgctgcaggccaggcaatcgccaaccgtttcaccgctaacgtaaaaggcctggcacaggcttcccgtaacgctaacgacggtatctctatcgcacagaccgctgaaggtgctgttaacgaaatcaacgacaacatccagcgcatccgtgaactgactgttcaggcgaaaaacggcactaactccaagagcgatatcggttctatccaggaagaagtgaacgagcgtctgtcagaaatcaaacgtatttctgaacaaactcagttcaacggcattaaagtgctggagcagggcactaaaatgaatttccaggttggtgcaaacgatggtgaaatcattgaactggatatgcagaaaatcgatctggataaactgggtctgaaagatttcgaactgccggcttatactgctctgaaatcagatacagcgcttactacagcagaagcgaaagctgaagcagcgaaagtaaatgctactttcactaaagatgctgatttagacggacatgaactgtataaaacagcagatgaccgtgttattgctaaaaacacaaccacaaacaaatattatgaagtaaaaacctttgaagctaaaggtactactggtgatgatgcaatcacgggtaaactggttgtgggagctgagctgactgatatcaagtccaaagcagatgctgacaaagtcaacgatgcaaccaccaaaaaactggacgaagcactgaaaactgttgactcataccgttcaaaactgggtgcattccagaaccgtatgcagtctaccatcaacaacctgaacaactctgttaacaacctgagcgcagcacgcagccgtatccaggacgctgacttcgcaacagaagtgtctaacatgagccgtggtcagatcctgcagcaggcgggtaccgctgttctggcacaggcaaaccaggttcctcagggtgttctgagcctgttacgttaa

SEQ ID NO: 282732 - DNA, 519 bp, Morganella morganii
atgaaagttggccgttgtcctgtgtgtcattcagattttcatctggatgcgatcctcgaagatgatgccgcccgccggttgctggctaaactgaccgacctgcaatatggctgcgcccgtcatctggttgcctatatcggtcttttccgccgtgaaaagaacaacctgtcaaacagccgcgcgctgaaactggcagaggaagtgctggagcagtatccggcaaaccgggtactgagccatgcactcagtgaaaccgttgagcgcatccgcgaaaaacgcgcaaagggagatgttaaaccgctggcaaatcataactatctgaaaacggtgtatgaatcatcaaagcaggtgtattcacaaagcagcaatgtgaagtcacgggaaaaagaacaaacatccggttctgattccagggatgcttacttcagacaaatgcagcagtttggtgttgatttgggtacactacccggcggcaaagagtggttagagaaacaaaacggaggtttagatggacagtga

SEQ ID NO: 282733 - DNA, 246 bp, Morganella morganii
atgaaaacaacagaaacactgaaagagaagtatatccggtggcttaacggattaaaggcgaagaaggtggtgctgattacttttccgtgccctcactgcggcatggggattgaaacattaccggcgccgcgtcatgaagtcttggattcactgacttcctgccctttttgtgaatcagtttttatgaaaatggtttcagaaaaacgggttataaccggcaaatttttcgctgaaactaaccattga

SEQ ID NO: 282734 - DNA, 525 bp, Morganella morganii
atgagaaaagaaccttgtagtgctttgctagcacaaggcaaagaacccgtgatagaacggatcgctcaattaattcggcgctacccttctaggagcgcagccgctagggcttggggcataaacgtaaatactcttaatagctattttaagaatcaatctatacctccagtaccacgggagaacatactgcaacgtatagctgataatgaaggtgtcaccttggaatggcttcaggaagggaatagaaaaacaccaatatcaccaatatcaccaactattaatggagacagtgataaccttaatgaaatgctttcttttttaactccagaagagcgtcacaaacttgctgagatgcttgccagaaaaggggtggaaacaatactgcaattactttttgaggttgcaaaactatcttcccctgagcttgaaagagtcatccgattagccaaacaagtgagagagggggttattgatgggggttcggaaaatgatgtaaccaacccagcccataaacaggtcgggtaa

SEQ ID NO: 282735 - DNA, 135 bp, Morganella morganii
atgaaagcccgccgcctctgtgcgctgctttcatcacaggattacggtattgtaacagaagataagttaattctgacacgggaattcaaacgggaggtcagcggtgaaggacgccgtacaacacagcgaaagtga

SEQ ID NO: 282736 - DNA, 579 bp, Morganella morganii
gtggaaatcccgctgcgggggatcacccagacgcagataaaccccaaaattgagctgggcttcgccgccatcctgcgggccctgctgcgtcaggatccggatgtcattatggtgggggaaatccgggataaacccaccgccgagatggcaatcaaagcagctcataccggtcacctggtgctgtccactctgcatacaaactctgcggaggatacatattcacgactgaggcaactgggtattgatgaatatttcatgaaaacctgcatcaaactgatcattgcacagcgcctggtccgcctgttgtgtccgcgctgtaaaacgcagaaacagaaaacagaaaccgtgatactgagcagcggaaaaacacatcaactcaccccgtggcaggcaaacggttgtgatcactgcttttcaggctattacgggcgtaccgcctgctttgcatttctcactccgcaacacacaatgtcttcttctgccggtgaattacccggttcactgtttgatgccggtatcgcgctggcggaatcaggggtaaccacactcaatgagatttaccatatgcaggatatttaa

SEQ ID NO: 282737 - DNA, 270 bp, Morganella morganii
atggtgaaaatcagtgccgggccggtgaagtgtaatctgaccgggcgcggctcctcttccggcggacggtgcggccggagtatcatgaacggattgctgcgccctgcgtttttccggttcgcgcagtgcctgctgctcccgctctcgctgccgtttccgttgctgttgctgctccgccactttctgaaactcccgcagccgctgttcttcctgttgtttcagtcgtgtcatttcgcggtgccgctcttccggggtcagcgggcgcggtga

SEQ ID NO: 282738 - DNA, 1647 bp, Morganella morganii
atggattattactactcggaaacattaatgattgataaataccctggaattcatttgcttcaggatcatataggaacaaactatggagttccatgggatgacttcggatatatcattacgttcaaagtatattatgtaagagatattgataagataaaaattggcaatataaaaatgctttccaaagcaaatgaaaacacatcactttactttaaagaacatggtgaagaaattgagctaaaaattattaatattaatggcgcactgtctgaaaacaagttggtttcgattggtgaagatatagactattataaaaaaataaacacactatttcaaccagagaaaatagatgccctgctagaatctttatgtgatgctggatattttctcaggaatcaaggcgaatactctgaatggagtggatattcaggtagtttaatgagaggaagttcttctgctgcaattttgaaaaaaggatatcaaatagcactggggagatataatcctaaaactaaatttgagctgaacattgaaagcctaggtgatagttttgatcctattagttttaaattcaacatgaacagaaaggttgggaagtcaaatatctgccttataatcggaaagaatggtgttggcaaaacccatatattgaagagaataagtgaagttataacaggtgttacagacggtgaagagcacccaccttattttcacaagttaatagttattgcgcactcaccatttgaagacttctatacggaaaatgaaatattcaataagctaacggtaaaatattcacgggaaggctctttagctaacaaaaaaagcttgaaacgaaagcgtttacatgtaaatgaatactcttacatagggtttagaaatcaggatggaatctttgacccggaatacccagttttaaaaagcgttgaatcaattattaaaatactaagttatgatgaagaaaacgattggtggaatgataaaacgagatttcaacttctaaaagaaacattatccatttcaatagagtttgattcaatatcgatactggataatggtggtgatgaaatttgcataaacgaagaaactaaaatcaatagcatcaaagaaaacataaatttaaaaaaaggattaatctttaaaaaacacggtgccacaatccccctaagctcaggtcagaaaatttatacatatatgattccggcaataatatctgagcttgaagaagaaagtttattaatcctcgatgaacctgaactttacttacaccctgagcttgaagttggtttgataaatatgctcaagaacattttggatgaaacaaaatctttttctataattgccactcattcatcaatattgacacgtgaagttgaaagagatgcagtaactatattacgaaaaattgaagggaacaccaaagtatttagatcctcagttgaaacatatggggagtcaattgatgtaatagtctcggaagtattcgatgatgaatatgtaagcaagccttatcaaaaagagattgataaatattttattcgcgatagctcatctatttctgaaattaaggggtatatcggcaatgatgcattagcttatgcactttcaaaatcagatgatgacaagatgtcttttgaggatgaataa

SEQ ID NO: 282739 - DNA, 876 bp, Morganella morganii
atgaaatacttaggcgagctcatggaaaatcagccttgcacatggcttgatgcggcaagaggaagtaaaaaagagaatgttcaacaacttgaacgtatagctgcagaactatctgagaattatagctcatatgataacctgatagattctagtaatgatgcgctacctgagagtgcattcctacagcattctgatctattaattgaatattatgaaaaagcaccgaaggaattaaacaaattattacttgaaagaaggaatgaacacgaactttccttttgcccttactgtggaaacccaatgattcctgacactttagatcattttatccctaaaggaaaatggcctgaattttctattttccctaataatctagtacctcagtgtagaggctgtgctccagtaaaaggcgagcattattattgcattgaaaataacttagctatgtttatacatcctatttatttcaattttctggagaattttcgtttctcaatgaatgtctcattaaatactgaaagcaatgatatatctgtagtggtaaagttaaaaagaattatagaaactcaggctgatgaccaaaggcgagtgattattcatgcggaaaaattaaaaattaaatcacgaattattcattattgcaaaaaggaattccggcaatggaagagaagattggccaatgcaaaatttgacgtgagtacagcattaaaacaacgtttattagagattccacagtcagacattggaaaagattggcaaagtgcattttattctgccttgttacaaaatcaagagataattgattacatgaattccttgcatcctgcagaaaatttgcatcaacagtccaatcatgcggtagatttagatttttga

SEQ ID NO: 282740 - DNA, 1107 bp, Morganella morganii
atggattattatcttgatgaaagtggtagtactggtgatataattaataaaaaacttgatcttgactttgcgagtcaacctattttttcacatgcatgcattggtttgaaacctaatgaacgaaatgattttataaaacttataacatcattaaaagaaaagtatggttatgaagatgaattaaaatctcaagatgtttactataaaacacctgagtttatatatgagatatccagttacatgaaaaataaaaaaataaattttttatgtgaagtggttgataaaaaatataatatcgcagtatctatagttaatcatcaaatatttccacctaccgaaaatagctttaatgaggaaagccagtacataagaacgaagctcacagattatttggccttatacggagaccaagaagtatttgaaaatttcatgttactttgcctgaaaccatctgaagacaagttattgaaatcatttgaaacattgaagagttttttttcaaggaaatcctcgtatttccctgatgatgggttaacggtttcaatgattgatgagacaatagatgattataacatagccaaaaaaaaactaggctcagcgcaagctattagttattttattccaataccagattttgataataatagtcgaataattaatataacgccacatgtccaatgtttttataatataattgcaagagtaaataagcttcactcaagaaagttgagttccattacattgcatcatgatattcaaaaagaattttcatcctctatatcctattgttttgaaaaattaaaggaagttagcgttgataacgtccctcatattccaaatgcggattttaatctgacggaaatgccagtgctattatttgaggactcagaggaggttattgggattcaggcttctgatttgctgtctggcttcatgaataggtttacaaatggatttctttacaagaagatagatgttagtgaggtttatttaaaaacattcgataacctaacctattttaacaaatatcagcctcaccctttaggagtgaatttcgttctccctgaatcaattagaaatgaattgttcagaaaattcagattttaa

SEQ ID NO: 282741 - DNA, 867 bp, Morganella morganii
  misc_feature (427)..(436): n is a, c, g, or t
atgccccgcggaattatttttcatgatatcaaaaaaaacggaatattatgggatcttggtcccattcatcccgggtcatcactatattttttgcgttctgagggtaaaattcttaaggacttttctttaagcgcctgtggggtgaacgatggagtgatatatgatgtgcttctttcaaaacatttagccccttgggaattatctgtaggttcaaaggccttattaccattccagcgtagtgacgataagtggctcgctcgtactggatcaaatattgcagccctaggagcttctactgcctcagcaatcaaagctatgttgacggcaaccggtgaaaacatagaagatttctttttacgaatcgatactgatcgaaagaaattaaccacccagagttggagctcagaagactgggttgtattcgggnnnnnnnnnngcgccgcttacacacgcggggagcagattccctgcactaaaacgataatagaccaaacgctctattggggcgtagtcaaaagtgaggatgaagcgatatacattactgcactaattaacagtcctgcggtaatgaatgtgattgtatcccatcaacccagaggagcctttggggaacgacacatacacaagttggctttcgaccggacaccttcttatgaccaaggctcagctaaacatctcgacgttgttcgctcggcgaaggatttgatgaatcagtgggctaatcgtcgcatggaagctgacatatcccccatgctatctcctagtgttcacttaattactcgcagaaaaaagattcgtaatgcattagagtcattgcctgcatgggagccgtacgtggcagccactcaagctatatatgaaatttaa

SEQ ID NO: 282742 - DNA, 1095 bp, Morganella morganii
gtgaaaacacaacactgcctgccgattctgattattgccggattatggagctatccccgcgaaggtttcacggaagaatttgataccaccctgctggccggtgaatccgctaaaggggatatttcacgtttatatcaggaaaatacactgccgtccggcgatcagctgatggacgtttatgtcaataacacctggaaaggtcagtttaccgttgaagtaggggagcataataatgccctgaattttcagccggaggatattaataagctcgggctgaatctttctgataatgcgaaaaaattatccgcagagaaacagccggttccggtaaatgaactgacatccggactgacttatcacctgaataaaagtacattacggttagatttgtccgtgccgcaaatcggggtaaagaccgctgatgccggatatatcgacccggaattatgggatcacgggcagcccgctgttattctcggctataacgtcaattactataacgccagacaaaaaaagaataacaaacagagcaatgacagcttttttgccacggtaaactccgggctgaacctcggtgtctggcaattccgcgatgaatcggtttacacctcttattccggcggacataaaggctggaaaaataacagccgttatctttaccgtccgatcagccgtattttatctgcgctgacgctgggggatttttatacgccgccttctatgttcggcagctttaaattcagaggcgcatcactgggaacggatatgaatatgctgccgccgtccggccagggattcgcaccaatcatccggggtgttgctcagaccaacgccctcgtcagtatttaccagaacggcaatcttatttttcaggaaaacgtaccgccgggtgagtttatgttccgtgatattcagccgaccggcggcagcggcgatttttccgtcattattcaggaagcagacggacggaaagaatcatttaccgtccccttctccgctgtacccgatatgctgaaagagggaatttataattacagtctgaccgccggtcaggcacgcctggataatacaagggggaattccgttacgggctga

SEQ ID NO: 282743 - DNA, 3429 bp, Morganella morganii
gtgagattgaaccttgcctaccatggtcggaacacgaccttcgacgtgcctgaggcctctaagtttgatggtggcgcctatgctgcggacattaaggtccttgaagccctgcctgtgtggaccggtactccgaacggcctatcactctggcagaaccagaaggaggcaatagctctcggtgccgcctacgtccgcgtttcgcaacaaacgggtgaacccgaaggcgcccttgtcaagatgccgacgggtagcgggaaatcgggggtcatcgccgtgctgactcgatgcctccccaaggttcgacgtgcgctggtactaacgccaagggaaggccttgttcagcaaatgcacgccgatatccggcgcaggttttgggcgaacatgggatgcgcagagccgggtaacaaggtctggtcggactctggcgtcgaacctgcggcgatcgaaattctgctgccgaacagggctcgaaccgaacagatttgcaacatgttggaagctagcgaccgaaccgttcttgtaggcaccctccaagctctcgacaagatccggacagagcgagacaagttgaggcgtcaggctgctggcgttcagctaaatgaagcaaagttggcggaactcacacggctggaccgcatccttgatctgttgggcacgttcgatctcgtcgtcgtggacgaggggcactacgagccggcaccgtcgtggagccggagcgtcagagaacttgcgctgccaactatcctgcttagcgctacccccttccgcaacgactataaacttttcaccgtacgcggctcgttcgcctacaatttctcgtttctgaaggcggccgacgccaaaatcgtgagggacgtgtgcttcgccacgctagactcgcagaacggtagcgcgacggccatcaactgctttaacgaggatatcgaccaggcgttagccgacggcgacgcatcggccatcaagacctttgctgaccagctgctcgaactcgcacccttgcttactaaggaccgcccggccggttcaaaaatcatcgtgcgggccgcatcatggagcgcgctcgcgacgttgcagcccctccttgcggggagcaaacagacagacgcggtgctgatccatgaccaagtgggcaagggtgataaccgtaaattgcatccgcttcgcttcgtcacggtaagggaggcgcagaacaaggccggagaagcgaccttctggctgcaccaaacaaaattgcttgaaggcatcgacgatccgatgttcgtcgctgtcgctattttggatggtttcacgaacgaccgccagctcgtgcaacagatcggtcgggtgttgcgctcgaccgatgcgaagcgccagcaaatccagacggcgacggtggttgcacgcaacgccgagcagctcgcaaggctcaagaccagctgggcacaatacctggccttcgaagccgcaggggaggagaatcttgccagcatcattcccggcgaggcttatctgcccgagaggatcgtcccggcgatgccggatcaacagtatgttgatgggagcttccgccagagacttcctgtaacgggtccgttgcaccgtgatgatcttctggtcccccgccgcgcagcgattttcgccatcggtccggacttcgacgcgactcttgcggaaactgagacccgcgagggcatcgtcgcccgcaatcgcttcgtggtccaccccgtggacgatttgccggaaggagtctggggttggaccttcttctccgtcgacgaaagcccctacctcagtcgccattttgttacagaatggcagtttggggtcacgctaatggtgcggatcaacgaccgactgttcgtgttcgacaccgacggtgtgccgttcgatgccaacaagatcggcgtcacgcgtctggacaggcagatcctcgtccggctcttcggtccgagcagcaacgaccgtaaggtccgcatcaccaagctggctgccacatcgctcgaaatggcggaccgcgcgatccgggcgacgacgaccagcaccgcatctttcgaggatacgtttacggacttgctggatgcggtgctccttcctaccaacgtcgcgggatacgttggaggcaccgcacgctacttaggccttagccgttccaaggtcactgacgcgagtgtccgccgcgttggcgtcgatgagtacgtgaggtgggccaccgatatcgaccgcgagctcaccgccgcgacggcgggcaaccgggtgttcgatcgtttcgcgcagctcacaacaccggacccagaaaaggcgaagaacccccggaatatactgctcgatctgcagccgcttgacgactttggagcgttcatcgccgaccgtgagggtcagccgtcgacgccgaaggcgccgtccttgatcgacctctgcgccgacatcgacgacggccaattccaggttacgatgagtgatggcagcaagctgggctgctcgatcacttacaaccccaagtccggccgctacgcaatctcaagcgacgaactcaacgccattttccagcaaggcttctcggcttcgggtatggtcatgacgttaaccgagagaatcaacgccgagcaggcgtttcgcgtcctcaccgacgaggccgataaggtttacatgcatggcaaatgggccaaggcgcgggagatcgtgttggacagacgtgtcccggcactcgatgttgctgttgccgtaccggcgctgagagacacgttcgtggagaaaggagaagcagcatgggcgaacggcaacgtcagcaagtggcaaaaggagtcgattttcggactgactgccaaatacatcggcctcaccggcccggcacccgacgactacgccaaggcgctgcgggagttccctcttatcctccttgacgactacgccaaggcgctgcgggagttccctcttatcctccttgacgacgacggccaggagatggccgacttcattctggtctcagacagcaaggtggtgctgcttcacgcaaaagctctggggaaggacgacggtgacgaaagcgcctccgtgacggccatccaggaggttggacgccaggtggctgcatcgctagggttcttcctgacctcgtcgccccaaatcgagaacgatcggtggcagcgcgcatacaccgcgaacaagaccactatcccagcgccagcgtcgggaagtatccgcatcttccgcaacactggaggggtcgctcccgctgacgttgctgatacggtacgcacggcgttgcgtgatcgccgtattgccaaggaggtctggctcgtcgcaggccggttgctaaacattgagactgcgcgcaaccgtgcgttggcgaacactttgaccaaccggacgcggcaacttctcatgtacatcgacggcctgtcgacgacgtgcggccgcgcgaacgccaggctgaggatctttgcgcactag

SEQ ID NO: 282744 - DNA, 1227 bp, Morganella morganii
atgagcgacgaggaagcaagcaaatacccccatagcgccatatccacttggagtggatttgtctaccaaggcaaggtagcgctctatcattgtcttaagctaattaatcaaggagatagtgatttccagctacagcttgacagtacagatgatttcgcgatttacaaagataataatttaataagcgcacatcaggttaaagcaaaaattggtgattaccgcagtaattataaggaagccttagaaaaatcggcaacaataaaacttgatagaatcgcagggataaaaaggtattttcatatatctcaaccgattaacgatcatagtgattacattgatgctaatcacgaacgagttgaattctatcaatacggtgaaaatcgccactgtgaactagataagatagaagatctaaccaaagatattattaaagaaatctatacccgccaggcaatcgtttatgatgagagccttatagatgcaaattattgtctactatcagataaaatcagctctcacgcgctagctattcacacaaaaatacaaaatgatggtgacgctcagcgtaaagcagcttatgaatatagagtatctgccgcaagtatgcttgcagacattacggacgctagtccatatgaaagaaaggactattacgcgatcgagttaaagacgcgcctctatagtcacctagaagaaaggctcgcagaatcactctcggagatgtcggacgcggcctacgaaagagccaggcgtatctatacgcttataagaaaatctgagggcggcgatttcaagacactctgccaacttatgaaaccctcagagaagttttcacgcattcagaactcagatatacgccgatatacggatctcgtacacacctttaaagtcgatccaattttaaaacgactaccacattatttagacagcaacaataaattttacgcaccaacggcattatatttgctggaaccaacagataaaaaatactgtacttctgatattatcgcagaaataaaaaacaacgacgatctaggcaggcttttattcgaattcaataatcttattgcagccaaggctaatgagagtttcacaattgatactaattatactaattgctccgatataacttgcatcgatgttcaagatcgcatcgatagcaacattactaaaagtttatgcattagtattttaacaaaagaagacgcagaggcccgacttaaatga

SEQ ID NO: 282745 - DNA, 666 bp, Morganella morganii
atgattattaacctcatacatcaagccctagatgcacacaatttcctcaaagtacatgagaatgatacaacaagcttctatgttcgagagaatggtacagcgatacgatttgcagtcttgcacaggttagataatctaatgaagccaggtgatcttaatgcaaccatcaaccagtccgcacctgtggcatttatatctgatccagcatttaaaaagaattgcgatttaatatgtatccatcatctcgataagttggccgaattcaaaaactatgaagaacagatttttgaaatcgaagaagatccgcacttctacaaaaaatatgttctttactatagcgacacagaagttgaagccataaaagaattaaatttcaccaaactaaatgaattaatttcagataaaaagcacttcgatgcctacaaaaaagaacctacatcagccactaaatatagcgcagttgccaaaatattcattaagttgccttttttggaacttaatattaataaagtggaactagttccacttcgtttgcaaattgaggaagctgtggctgaagccgaccttactaagacgtataagacgatacaaaaacacggccaattaaatgcagaagatttgatcaaggaactgattagcgatgaactggcaaatatccaaaattga

SEQ ID NO: 282746 - DNA, 2340 bp, Morganella morganii
atgaactggcaaatatccaaaattgagatttcaagttttaaagctttcaaaaaaatccatctggatttcgggggagcatcacttttgaccctggatggacccaatggatttggcaaaactagcatattcgatgctattgagttattgttaactggcagaataaaacgaatctgccatctattttcaaccttaatgataggaaaacgaacgaattatgaagataatcttctttggaataatcgctcaggcaataatgaccttgcaatcaaaatcgagtttattaatggttcgaggaggcttactctagcaagacatactcccgcctcaaactttaacgagaagtcaaataatagagcggaccaatttacccactttactctttacgagctcccagagttcacctcaaacagctatgtagcagaaaatatccgcgacgaaaacttcattgagacactcttcggaaaaaacttcaaagagaacttttcatttttaaattatttggagcagggccaaaatcagctcctgcatacgcgagtagacaaacgtaaagaggcattgaacaatctctttaatattagtgacataaaggcagagactgataactgcaaaactatcgccttgcggcttacaaagttcatcggcgatcctaagcgtgctgcagatttatcaaggttagaaatagaggccagttcacttaagaaaatgattcaagctgatttgggatcaattggatacaaaaaaatctccacctcagtgctgcaaccagggtgggacaaagagaatcccttccccacctactctacagaaatccaaagagaatacattgaaaatatccacagtcttcaaaggctggctctgctaaagagtgcaatacagataagagataaaaatgaatcgattgaaaattttattgaacttaacaaggattcaataaaaagcttagcacgttttggcaatgatttaaacaagctggatggacttgaagccattaaaaaagaattgaatgaactgctcaaacgtgaaggaattataaaacgtggtgcaacagtcattaatgccgatgaggccaggagtcttagtggatgggcccaagggcgtttggaatggtttattgagcaaatagttatccgtgactcacttcaagaaaagagcaactctaataccaacgctgcaaccgagttgaatcgtttaaaagcagaactagttactgagcatactaaactctttcctgacgctcaggattgtccgctgtgtggtgcggactggcaatcccatgacactatgctgcaaaagattgaataccgatcaaagcaaatcaatgacgcattaaacgctgatggccagactctgttaactcttataggaataatggctacagagctggccataattgatgctcaacttaagagtctgaaagcgcagctatctgtcaactacaacagcgtcttacacaacgcactgctccgcgataaagctcggttgcctactattaaccaactcgtctccaactttcaaactttaggtgtagaactaaactattctttctccgaaaatgaggaggaggtggacacgagaattcagtctcttacagctttcatcagaagccagaaaacagctgagacagaacctttgccccaagattggagaaaggtcatcatggctgtctttaaagagctgcaggacttctatattgttgaacctcagttgttgaaagacaaagaactgtatatctcagctaaagcaaacgaggcacaaagcaaaaggctcagacaatgccttaataagctagagatcattaagaatgaaactaaagcagcacagatagctaaagaaaaagtcaataacctaaaggctactcttgagaaaacagaacgcaactactcagaacaaacaattgctgaaattgaactgattttccatatatatagcggacggcttatccaaaactatcagcgtggtttaggtctgttcattgaaagcaaggatggcaaagaactcaggttccttacagccgaaaaatccgagtatgatgcgattctatcaatgagctccggccaagtatctgcgctcagtctaggtttttttctttccctgaatcgggtttactcaaacgtaccactgattctgatcgatgacccgtcccagtcgcttgatgaggtgaatatcgcctctttgactgaccttcttcgctgtgagttcagcaatcgccagttgatcgtttcctcgcacgagagtgatatctccgcttatatgcgctaccggttcgccaaggccggtctaaacacccgctcattgaacatgcaacgcttggctaaggaagctttagtcgccgcggattga

SEQ ID NO: 282747 - DNA, 426 bp, Morganella morganii
atgtccaagacttccgattcacggttacgcaatgagggctttcgtaaagcagaggcttccctgagacttgaaggaagggaccccagtggtacgccactgtacgagtccattaaggcacgtattatttcaggtgagctgacgtatgagcaggggcgttcagagattcttgcatactacacaaaagcagatactgacgggcctgtgacagtgggagagatgctggtagaggaatttttaaaaccgctgaacatgtctcatgatgaactggcggaagctatgggtatttacaaacaggatgttgacgatattatctgcggtttgcgtcgtgttacggatgatgaggctcgcgttcttgctaccatatttggtaccgatgtggatttttggagcaatctgcaggaaatgcaatacaatcaagagaaatga

SEQ ID NO: 282748 - DNA, 1392 bp, Morganella morganii
atgaaaatagtaagtaagctcacctttttaggtattatccttttcttttctataaatgcctatgctggtcaattagatagtagcgggctacttgatattttattagataagtttcaacaagtagccagtacatggacaacagtaattgctgactatgcaaattggctcttctgggggctggtattaataagtatggtttggacatttggtatgatggcgatgcaaggggaagggttgacaggcgtacttgctgaaatagttcgcttttttgccgtcgttggttttttttattatcttttaatcaacggcccatccatatcgcaatccataattaattcaatgagacaacttgcagcaaacgcgttaggaataagtactggtatttctccatcaagcatagttgatatggcgtttgcgatattaacaaaggtcagttcagccgcatcaatttggtcgccaatgatatccacaattatgataacagtcgcgataatcgttttggtagtgatgtcccttatagcgataaatatgctaatcatgttggtttctgcatgggtgttatgctatgccggagttatattacttgggtttggtggttcgaaatggacctctgatatagcaattaattacttacgaactgttttatcgattggcattcaattattcacgatgacattaattattgggattggacaatcgtttatagatcaatatttttctcttattaaagatgatgttcctgatcttaatagtcttatcgttttgcttctggcgtcaattgtcctgttagtattaacgaataagctaccactgttgttatcaggtgttgtaggaggggcttctttacaagggattggtggatttggggcgggtatgattaccggcgcagccactactgccatcagtggtgctggagcaatggcaatgggggcatcagctcaagtcagcggtggagcctctgcattaaaggcagcgttcgagtctgcgcaagctgccatggccgaagaatctggttcaggcggtggaggcggttccggtggcggatttggcggcggggaagataccggttccgtagatacttctggcggccaaccctcaggcggttccggtggttcgtctgctgggagctgttcaggtagcgccagaggaggaagtcaggggtttgcttcattctcacgagctggccgcatggcaagccatatgggaagcagtatggctaacggaactgctgaataccagacaatgaagcgaagtagcgatgcttctcgtgtccaacggacaattggaggggagttggcgactcagatacgtaaacaaacagctactcgtcgggataacctcgaccatgatgattttgccggagatagcttatccggcaataataattcttga

SEQ ID NO: 282749 - DNA, 795 bp, Morganella morganii
atgaatttaaagttccgagtggtttcatcacaaagaaggattttagccgctaaaaaagctttaatagttcctttcgtggcgtccgtcatggcattaccggtgaaggccggaattcccgttattgatggcactaatgtggttcagaccacaatcagcgcagttaacaacgttcaggctgtgactaaacaaatccagcagtaccagacgcagctgcagcagtatgaaaacatgctgcagaacaccgtagctcctgcggcctatatctgggaccaggcaaattcaacaattaataaattgttgcaggtgcaggatacccttaattactacaagaatcaggccgggagtctcgatgcgtacctgaaacgatatcaggatgttaactactacaggtcatcaccttgctttaacagcaatgttgaatgtacctcgtctgaaattagcgcattgcgtgaagctgaacagaacagttcaggggcacgtaaaaaggccaatgacgcgctatttaaggtaattgacgaacagcagaacaccctgcagagcgatgctgataaccttgcagatttgcaaactcaggcaaccggctcacaagggcaaatggaagctattcaggccgctacccagcttgccagtgcgcagacaaaccagttactgcaaatccgctcgcttctggtagctcaacaaaacgctgcggcaacactggcacaggctcaggccgataaagaagcccaacaaatagctgctgatgagaaagtattagctggacagaacacaccaagcccgaagcgaatttggtga

SEQ ID NO: 282750 - DNA, 762 bp, Morganella morganii
atgataactggtaataaagttacacctactagtacagctctgcaggctagagtcattctgtaccaaccaagtcaacgtcccttggcgctgaagggacagtggatggagactagttttggtcgttgtcgagttaccggaagactaggacaacgtcatgcggatattgtcgaaacaatgctctatgtggccgagaaacgtcgagaaatttctgatggaggaatcgaattattagtagatccagcgaaagtacgccgaactctatccgatgcacaatacagttatgatcgaattaaaaaactacttgttgatctacgagtggcaactgttgaaatagtaacaccagatttagaaaaacacggttattccattctaggcggtttaattgaccatgtcgtgccctcaccaatgactaggcgtaatcctctaactggtggtgaacgtaacctgtggagagtgcgcttaggtgttgcattagtaatgttgttgaagcgagatttgcattttcatcatgatccaggccccattgctcgtcttcagcatggtattagccaagcagttgcacgtcatatattaacacataagcacgatcctaaaggcggctggcatattgatacattaattttagctgtcagtggtgaaggtactaataatatgacattacgtaactatcggcggagattaaaagaagatagcaaacaatttctagcgattggcattgagatacaaaattctaggataaaacgagctacaacggcccggtag

SEQ ID NO: 282751 - DNA, 858 bp, Morganella morganii
atgtcattgaacataatggaagcatttgaagctaagccacaaccaattgattacgtcttgcctaatttggctattggtactatcggagcgattgtttctccgggaggcgctggaaagtcaatgctggcattacaattggctgtgcagattacttgtggtgtagatcttttaaactttggtgaatattcgactgggttggtggcatatttacctgtggaggactctgaaaccatcgttcaccatcgtttatatgctttgggaaaatatctaacagcacgtcagcagcagattgtagctgataagctactggtccaacctttggtagggaagtgtccaaatattttcttgccggattggagcaacttgatcaatgaagtttcaaaaggtagacgtttaataattttggatactcttcgccgtttccaccaggaggatgagaataatagcgcagcaatgtccaaagtcattggaaagctagaaggtattgctgctgatactggatgttcgattatatttctacaccattcaaacaaaggcgctgccacgatgggggttggtgatatacagcaggcaagcaggggtagtagcgtcctggttgataatatacggtggcaatcttatctggcgggcatgaccgccttggaagcgaagacgtatggtatttctgatgatgttcgaggtcaatttgttagatttggaataaataaagcaaattatggagaacgtgcgccagatcgttggttacagagacatgaggggggagtattaagggtaacgcaactcaaatcgaagaataaaaaacaaatagcaaaagaatgtatgtcttcatggagtggtgcagaaaatgataactggtaa

SEQ ID NO: 282752 - DNA, 231 bp, Morganella morganii
atgcaaacaaaggcacatagcacgctcattaacagaaaaacacttctggaaatgatcccattgtcagcccgcactatttataaccttgaacagcgaggcgagtttcctcgccgtatagcacttactagccgaaatgttgcatggcagttatccgaagtagaacagtggattgcggatcgtaaatcagcaatgtttaaagcggccagacccggtgttgttttaggtaggtaa

SEQ ID NO: 282753 - DNA, 969 bp, Morganella morganii
  misc_feature (143)..(152): n is a, c, g, or t
atgaaaattactatctgggaaggctgtgacctcacagttgcagctgcaattaaattatttgtagagcgtagttatccgtactccatattttcacggaggtatccaatactgcgtctcatacaagaagttattgatccagcagnnnnnnnnnntgcttatgtaaattccctgccaccaagtcataaagactacatttctggagtaaatctaggatttagtgatgtacttaaaaaagtgggcttaaacgtcgtagtacaggcacaaagacttcttttgcgtaatttcgttctgactttagatcaacaaacttctcttgataaatgctttaccgctacgattgagtctcttattgaattagtcagtgagtgcgcatccaagcggccgaagaaatcctctcctgcaaaaggagtaactataaattcacagcgtaagctcggttattgcgagttctgcggtaatctaaccgaattttccaagttgatcagtgagatatcagaatttgttgctaacgataatgagttccccgttcatgaaaaacaggtccttagtcatcgatattgttctgaccataggcccaaactcaccaatggtctatggaatccaaaatacagacaaggaaagcggtctctcgaacagttcaataaagaattaataaggcttagacggcaatgcgctaaaccgcataaagctaacgcaaacacaggggatatattgattgatacctattttcatgagtggatgcagggccaaactttaaccccagcagatctagataaacttaggaatattgccagacgaatggttgactccaaattcactgatactaagaaaaaaataatcatattaaaacaccaaggttttaaccagtttgaaaccgcacaggttttagaaaaaaatcactacacaactatgacaaagcaggctgtgtccaaggccttagcgtctgtgaggaaagaattttatatttaa

SEQ ID NO: 282754 - DNA, 630 bp, Morganella morganii; identical to SEQ ID NO: 93794

SEQ ID NO: 282755 - DNA, 1680 bp, Morganella morganii
atgatggcctttggcggtgaaacaactgacaccgctcagcaaaagcctgaagggatagcgcccagcgaacctgtagctaataccgccccggctgaaaatgaaaccgaggagaagaagaaaaaaacaaacgaagaactggaaaacggcatacgctgggcaaccaacgataatgcagaaacgcccccaaaagaacgtatagacctggaagggttaattgcccggtttgggtacagagcagagaaagactatacggcgtatacgcttgatgggcaggatgcgttttacgattacggctcacatctgcgtatggctacccctgaagccagccagagtgacgagatgatcctggcggccgttcttaccgcggataagcaacatcatcgtggtattgaaatcaccggcagtgacgaatttaaagagcgagtgtttaaccttatcagtgaatacaacattgaggtgaaactgactaacccagaacaaagggttaaattgctcgaactcaaaaaagcaaatgaaacagcaaaagaaacggcaaaagaaaatgttgctgattcaaaagcgaataagcaggaaggggtaaacgaaaaggcaaattcatcagttcagcaaaatggaatgcgctgggaagaatcggcctctgtacaaccgaagaagcagaatgcatctgatactcaaaaggaagataaagctgcgggtgaatcctgggagaaaggcgttatcgtcgcgcatggacgtgctaagtatgagtggaaagatgatgaatccatgaactactttgtcaccctcaaaaatgaacatggagagaagacactctgggggaaagaccttgagagagcggttaaagatgctggtgtagacaccgaacgtcttgttacggtcagaaagctgggatttgtggatgttgaggtgaatgcacctgtccgtgatgaaagcaacaagatcgttcgttatgaaactatccagaccaaacgtaatgagtgggaagtaaaacctgtatacccacagccaacagcagggaatgaacaggcctataagccttctgaactggttccgtatgatgctgcaaccttccagaagctccgcacaacaattcagcagattaccggtgttgatctcagccgtgaggccgtgcctgaaaaagaactgtattggttcctgccgaatggtaagccagctcctgaaagcatgacaaaacccacaggctataaactccctcaagagtcaaaaaccgcgggtacacctttgctggtcgcaccgcataaaaaaggcgaacgacctgattattaccttgttgagtctcgtaaaggattcatgcaggggatcgcaaaggataaggaatctggcgagtaccatagcgtaattggtaaagtgaacaagcgtattgataaagatggaaactggaaaacgtatatgacactttcagcaatcaataaaaattctgaaagtggaattgttttgcacggatacggccatgttgatcagggaggtaaaaacctgctttacaaaaacacaattgcaaatgaaaaacagcctcagaatttacaaccggcctcagatgaggtaaaaaacaaaacagtaatgaagcagctttttcatccttctaatgctgcaaaaagaaaagatgatgaaaggagagaacagactcatgcaccagtcgcaaagtcagcgcctcggccataa

SEQ ID NO: 282756 - DNA, 513 bp, Morganella morganii; identical to SEQ ID NO: 21569

SEQ ID NO: 282757 - DNA, 213 bp, Morganella morganii; identical to SEQ ID NO: 119415

SEQ ID NO: 282758 - DNA, 411 bp, Morganella morganii; identical to SEQ ID NO: 119416

SEQ ID NO: 282759 - DNA, 714 bp, Morganella morganii; identical to SEQ ID NO: 119417

SEQ ID NO: 282760 - DNA, 1152 bp, Morganella morganii; identical to SEQ ID NO: 119418

SEQ ID NO: 282761 - DNA, 1350 bp, Morganella morganii; identical to SEQ ID NO: 119419

SEQ ID NO: 282762 - DNA, 705 bp, Morganella morganii; identical to SEQ ID NO: 119420

SEQ ID NO: 282763 - DNA, 531 bp, Morganella morganii; identical to SEQ ID NO: 96007

SEQ ID NO: 282764 - DNA, 390 bp, Morganella morganii; identical to SEQ ID NO: 119422

SEQ ID NO: 282765 - DNA, 495 bp, Morganella morganii; identical to SEQ ID NO: 119423

SEQ ID NO: 282766 - DNA, 3051 bp, Morganella morganii; identical to SEQ ID NO: 119424

SEQ ID NO: 282767 - DNA, 1209 bp, Morganella morganii; identical to SEQ ID NO: 119425

SEQ ID NO: 282768 - DNA, 651 bp, Morganella morganii; identical to SEQ ID NO: 119426

SEQ ID NO: 282769 - DNA, 2181 bp, Morganella morganii; identical to SEQ ID NO: 119427

SEQ ID NO: 282770 - DNA, 654 bp, Morganella morganii; identical to SEQ ID NO: 119428

SEQ ID NO: 282771 - DNA, 231 bp, Morganella morganii; identical to SEQ ID NO: 25792

SEQ ID NO: 282772 - DNA, 1056 bp, Morganella morganii; identical to SEQ ID NO: 119430

SEQ ID NO: 282773 - DNA, 498 bp, Morganella morganii; identical to SEQ ID NO: 119724

SEQ ID NO: 282774 - DNA, 1014 bp, Morganella morganii; identical to SEQ ID NO: 5004

SEQ ID NO: 282775 - DNA, 555 bp, Morganella morganii
atgaccaacagcaacgattccgtcacactgcgcctcatgactgagcatgaccttgcgatgctctatgagtggctaaatcgatctcatatcgtcgagtggtggggcggagaagaagcacgcccgacacttgctgacgtacaggaacagtacttgccaagcgttttagcgcaagagtccgtcactccatacattgcaatgctgaatggagagccgattgggtatgcccagtcgtacgttgctcttggaagcggggacggatggtgggaagaagaaaccgatccaggagtacgcggaatagaccagtcactggcgaatgcatcacaactgggcaaaggcttgggaaccaagctggttcgagctctggttgagttgctgttcaatgatcccgaggtcaccaagatccaaacggacccgtcgccgagcaacttgcgagcgatccgatgctacgagaaagcggggtttgagaggcaaggtaccgtaaccaccccagatggtccagccgtgtacatggttcaaacacgccaggcattcgagcgaacacgcagtgatgcctaa

SEQ ID NO: 282776 - DNA, 2898 bp, Morganella morganii; identical to SEQ ID NO: 119702

SEQ ID NO: 282777 - DNA, 606 bp, Morganella morganii; identical to SEQ ID NO: 107131

SEQ ID NO: 282778 - DNA, 2088 bp, Morganella morganii; identical to SEQ ID NO: 119357

SEQ ID NO: 282779 - DNA, 951 bp, Morganella morganii; identical to SEQ ID NO: 119358

SEQ ID NO: 282780 - DNA, 1308 bp, Morganella morganii; identical to SEQ ID NO: 119359

SEQ ID NO: 282781 - DNA, 396 bp, Morganella morganii; identical to SEQ ID NO: 95944

SEQ ID NO: 282782 - DNA, 351 bp, Morganella morganii; identical to SEQ ID NO: 119361

SEQ ID NO: 282783 - DNA, 654 bp, Morganella morganii; identical to SEQ ID NO: 119362

SEQ ID NO: 282784 - DNA, 258 bp, Morganella morganii; identical to SEQ ID NO: 119363

SEQ ID NO: 282785 - DNA, 333 bp, Morganella morganii; identical to SEQ ID NO: 119364

SEQ ID NO: 282786 - DNA, 435 bp, Morganella morganii; identical to SEQ ID NO: 119365

SEQ ID NO: 282787 - DNA, 546 bp, Morganella morganii; identical to SEQ ID NO: 119366

SEQ ID NO: 282788 - DNA, 744 bp, Morganella morganii; identical to SEQ ID NO: 25800

SEQ ID NO: 282789 - DNA, 210 bp, Morganella morganii; identical to SEQ ID NO: 119368

SEQ ID NO: 282790 - DNA, 219 bp, Morganella morganii; identical to SEQ ID NO: 119369

SEQ ID NO: 282791 - DNA, 684 bp, Morganella morganii; identical to SEQ ID NO: 119370

SEQ ID NO: 282792 - DNA, 258 bp, Morganella morganii; identical to SEQ ID NO: 25801

SEQ ID NO: 282793 - DNA, 1275 bp, Morganella morganii; identical to SEQ ID NO: 119372

SEQ ID NO: 282794 - DNA, 357 bp, Morganella morganii; identical to SEQ ID NO: 119373

SEQ ID NO: 282795 - DNA, 579 bp, Morganella morganii; identical to SEQ ID NO: 119374

SEQ ID NO: 282796 - DNA, 408 bp, Morganella morganii; identical to SEQ ID NO: 119375

SEQ ID NO: 282797 - DNA, 546 bp, Morganella morganii; identical to SEQ ID NO: 119376

SEQ ID NO: 282798 - DNA, 471 bp, Morganella morganii; identical to SEQ ID NO: 25802

SEQ ID NO: 282799 - DNA, 249 bp, Morganella morganii; identical to SEQ ID NO: 95962

SEQ ID NO: 282800 - DNA, 588 bp, Morganella morganii; identical to SEQ ID NO: 119379

SEQ ID NO: 282801 - DNA, 486 bp, Morganella morganii; identical to SEQ ID NO: 119380

SEQ ID NO: 282802 - DNA, 249 bp, Morganella morganii; identical to SEQ ID NO: 119381

SEQ ID NO: 282803 - DNA, 741 bp, Morganella morganii; identical to SEQ ID NO: 119382

SEQ ID NO: 282804 - DNA, 975 bp, Morganella morganii; identical to SEQ ID NO: 119383

SEQ ID NO: 282805 - DNA, 444 bp, Morganella morganii; identical to SEQ ID NO: 119384

SEQ ID NO: 282806 - DNA, 564 bp, Morganella morganii; identical to SEQ ID NO: 119385

SEQ ID NO: 282807 - DNA, 507 bp, Morganella morganii; identical to SEQ ID NO: 119386

SEQ ID NO: 282808 - DNA, 480 bp, Morganella morganii; identical to SEQ ID NO: 119387

SEQ ID NO: 282809 - DNA, 411 bp, Morganella morganii; identical to SEQ ID NO: 119388

SEQ ID NO: 282810 - DNA, 264 bp, Morganella morganii; identical to SEQ ID NO: 83557

SEQ ID NO: 282811 - DNA, 363 bp, Morganella morganii; identical to SEQ ID NO: 119390

SEQ ID NO: 282812 - DNA, 450 bp, Morganella morganii; identical to SEQ ID NO: 119391

SEQ ID NO: 282813 - DNA, 267 bp, Morganella morganii; identical to SEQ ID NO: 119392

SEQ ID NO: 282814 - DNA, 180 bp, Morganella morganii; identical to SEQ ID NO: 95978

SEQ ID NO: 282815 - DNA, 861 bp, Morganella morganii; identical to SEQ ID NO: 119394

SEQ ID NO: 282816 - DNA, 339 bp, Morganella morganii; identical to SEQ ID NO: 119395

SEQ ID NO: 282817 - DNA, 231 bp, Morganella morganii; identical to SEQ ID NO: 95981

SEQ ID NO: 282818 - DNA, 411 bp, Morganella morganii; identical to SEQ ID NO: 119397

SEQ ID NO: 282819 - DNA, 306 bp, Morganella morganii; identical to SEQ ID NO: 119398

SEQ ID NO: 282820 - DNA, 441 bp, Morganella morganii; identical to SEQ ID NO: 21629

SEQ ID NO: 282821 - DNA, 285 bp, Morganella morganii; identical to SEQ ID NO: 119400

SEQ ID NO: 282822 - DNA, 222 bp, Morganella morganii; identical to SEQ ID NO: 119401

SEQ ID NO: 282823 - DNA, 435 bp, Morganella morganii; identical to SEQ ID NO: 119402

SEQ ID NO: 282824 - DNA, 312 bp, Morganella morganii; identical to SEQ ID NO: 119403

SEQ ID NO: 282825 - DNA, 537 bp, Morganella morganii; identical to SEQ ID NO: 119404

SEQ ID NO: 282826 - DNA, 141 bp, Morganella morganii; identical to SEQ ID NO: 21635

SEQ ID NO: 282827 - DNA, 366 bp, Morganella morganii; identical to SEQ ID NO: 119406

SEQ ID NO: 282828 - DNA, 318 bp, Morganella morganii; identical to SEQ ID NO: 25804

SEQ ID NO: 282829 - DNA, 1980 bp, Morganella morganii; identical to SEQ ID NO: 119408

SEQ ID NO: 282830 - DNA, 501 bp, Morganella morganii; identical to SEQ ID NO: 119409

SEQ ID NO: 282831 - DNA, 780 bp, Morganella morganii; identical to SEQ ID NO: 119410

SEQ ID NO: 282832 - DNA, 1164 bp, Morganella morganii; identical to SEQ ID NO: 119411

SEQ ID NO: 282833 - DNA, 261 bp, Morganella morganii; identical to SEQ ID NO: 83582

SEQ ID NO: 282834 - DNA, 600 bp, Morganella morganii; identical to SEQ ID NO: 154770

SEQ ID NO: 282835 - DNA, 1758 bp, Morganella morganii
atgaccgttgagaagctgattaccgaccatatcgatatctggtcttctgccctgcaaacccgctccgcagccgggcgtggcagtaatggcaaaatcgatctctatggtattaagaaactgcgtgagctgattctggaactggcggtacgtggaaaactgatgccgcaggacccgaatgatgaaccggcatcggagttgcttaaacaaattgcgaaagaaaggaatgatttagttaagaataaagtgattaggaaacctaaagcacttgaacaaatcgcactagctaacacacccttcgatttacctgatggttgggaatggtgttatttaaatgatattggtaattggggggctggagccacaccaagccgctctaattcaaaatattataatggtgaaattccgtggtttaagtcaggtgaactctcctcagattttatttctgattcagaggagaaaatcactgaacttgccttgcaggagtgttcacttcgcgataataaagccggggatgtgttgattgcgatgtatggggcaacaattggtaagacatcgatcttaaatgttcgtggtacaactaatcaggcagtatgtgcctgtaccccatacagtgggatttctaatatatatttgttaaccgttttaaaagcttataagcgaatttttattggtatgggggctggtggagctcagccgaatatatcaagagaaaagcttattgctactgtatttgctcttccgcctaaagccgaacaaaaccgaatcatctgcaaggtcgatgaactaatgtccctttgcgatcaactggaacagcaatcgctgagcagtctggatgcacatcagcaactggtagaaactctgctggcaacgctgaccgacagccaagataccaaagagctttctgacaactgggcgcgaatcagccagtattttggcacgctgtttaccaccgaagccagtatcgatgcgcttaagcaaaccatcctgcaattggctgtgatgggaaaactggtgccgcaagaccctaacgacgaaccggcttctgagctgcttaaacgcattgaacaggaaaaagcggagctggtaaaagaagggaaaattaaaaaacaaaaaccgttgccgccaatttatgatgatgagaaaccgtttgagttgccacatggatgggagtggattcggtttggtgaaattttagcagagttaaagtatggaacttctcagaaatgtgattattcaactaatggatatcctgtcctgagaattcccaacgtggttggaggcgaaatatctttagaagatatgaagtttggtaagctatcagagcatgaagcgaaagagttatcattaaaaaaagatgatttaatttttattcgttcaaatggaagtctaagcattgttggtcagtgtactttattacgacaatctttagttgatcatgcttatgctggttatttaattcgtgcaaggatgtttagtgatttggtatgtgctgaatatatatcgttaatgatgaagacagtttttatccgcgatcaaatagagaaaccgatcagaacaactacgggtgttaagaatattaattcttctgaattatcaaatctaaaattagcccttccgcctttattaatgcagaaggtgattgtagaaaagactgatgttcttttgagtttttgtgaatcctttcaatctcgcctgcaatccgcccaacaaacccagctccatctggcgggcgcactcactgacgcaacattaaactaa

SEQ ID NO: 282836 - DNA, 423 bp, Morganella morganii
atgagtctaaaagaaattattgctgaacaaatagcatgggacacagaaaaatatactggttcaaatgttaatcaatcggtaagaaatgttattaaaataataaacaatgacataacattcagattaagaaacgccttaagctgttactatatattgctaactaatactatgaagttaaaaggtgttgataaaacatcagttaaactccacacatatctagagcttggcgcctgtgacgatagaatgattaaccttataaactttgggttgtcgagagaaacagccaaagaaattcaggagtcggtccctaaaggcattgagatcaaatcaatctatgatctggtcactttactggacaaaggtttgttatcaaatgtccatccagtgacacagaaagaggtaaggtctttactgagcctgtag

SEQ ID NO: 282837 - DNA, 471 bp, Morganella morganii
atggactatctaccagatttaattgagtttcaaggcgatttctctaattttattgaatctgtttatagtcactttgaagaagatatcctaaattctggaataacatttagaggattacctgtaaggccaagatattcacctgaatataaaaataaagaattaggtttttggcatctaacatcggaaggttctgataatagacaagaacaagatagaatccctgatttagaacgatgcaaaaggattaaatggatctcatggatgatccaaaatcatcaacactgtgatgtgcattgttgggaagaagcaagaaaaagcactagagaagtggttatttggcacgaatccgcaaagtatgttgtgatcctctcagaacgtagagactattggctccttaagactgcatacactgtaacttatagcagcaaagaaaggtctctgagaaacagcatggaacgagcaacatcttaa

SEQ ID NO: 282838 - DNA, 702 bp, Morganella morganii
ttggacaccagagcatttaatgtttattgtgatgaatcctgtcatctcttgaatgatcatcaaacagcaatggtacttggcgctacttggtgtccagacacagtaacaaaaaagatagggcgagatattcgtcagttaaaggtcaagttcaacttaaatccattttttgaaataaaatggactaaagtatccaattcaaaaattgatttttatctcgccttagttgattatttttttggaaatcctgcattaagatttaggtgtgtagttgttcctaacaaatcaaatttagatcatcaaagatttaatcaagaccataatacattttattataaaatgtttttttatgtattgaaaaacattattgaaagtaaccataaatatcgaatatatttagacattaaagatacccttggcatcgaaaaaattgaatcattaaaaaacatactgcacaacaatcaatatgattacaatcatgagtcaatagaaagaatacaacatgtcaggtctaatgaactagaaatattgcaattaacagatttgttcattggagcaattggttatatacatcgaggcctccatcaaaatgaagggaaaattaaattaataaatcgcattaaacatcatacaaataaagaacttcttcgtagtacattacctactgaacgtaagtttaatgtatttgtttgggagcctagataa

SEQ ID NO: 282839 - DNA, 441 bp, Morganella morganii
atgccggtttgccgggcaactggagagtttctattccgtggccagcactctgtatatgtcagccagattgtaccgccggaatgcgcactggaagcgctgctgcacgatgccgctgaggcgtatatcaaagatatcccctcgccgctgaaagccatgctgccggactacaaggccgtggaaaaacgcatagaagcggttatccgtgagaagttcggcctgccaccggtaatgactgtcgatgttcactatgccgatctggtcatgttggcgaccgaaaagcgggactttgaaatagacccaggcagccactggccgatgctggattcagccccaccacatgatgacatcattatccagccactgacaccaccgcaggcatatcaccagtttatggcccggtttgaaatgttgataacctcaccgtttcaggatgaggcgtaa

SEQ ID NO: 282840 - DNA, 132 bp, Morganella morganii
atgcgatttttcaccactatgctgcttctggcctgtattccgggatacgcgtttgcggcattacacagctccgcggatatccggatctccggatctccggaaaactggtaccgccgccgccctgcaaagtaa

SEQ ID NO: 282841 - DNA, 258 bp, Morganella morganii
atgaagatattgatttttttagttttgatgattatgtcaaacacatcattctcaaaatcactttttatcggtgattctctgacttacagtctggcatcaagtttttcaaaaatcgaacctgtagatgcgaaatttttagaaagcacaggactgaaatccgataacattcttagctggactgactacatagaaacaatggatttaagcaactatgacagaatatatattgtgttaggtatcaatgatatgataaactaa

SEQ ID NO: 282842 - DNA, 141 bp, Morganella morganii; identical to SEQ ID NO: 279936

SEQ ID NO: 282843 - DNA, 192 bp, Morganella morganii
atgcgcatgcctgacaaatattccagccctacagcatacgcctggggacttataacctctgcttttggcgttttatctctggaccagtgggctattgtcgccgggatcatctgtactgtcgggacgttcctggtgaactggtattacaaacggaaggaatttcagctgaaagccggagaacatcatgaataa

SEQ ID NO: 282844 - DNA, 618 bp, Morganella morganii
atggctgagtggaaaggggttccgtatctttttgatgtgactgatggcctatcagacaaactatcagtgttagtggaaagtatcccgcgggttatagtggaaacaccattttcttgggaaaccgttttgggatcactacttgctgcggctcttccgtcactaatagcatggaaggcattaagcgaaaaccgcaaacttattgaatatcaaaatacattatctaattctagggaaatgattaatttactgagaataacaacggcagtttatttgtcaaaaattgaacatatagctcagtcacttgagaaatattcattgatgatatcaaatggtgacggtgtaaataaagataaaattgtatattctataaatgatgatattaaaggcgtgaatcttgaatctaagaaattatctcttctacttaacgaaaatgttgggttgcaaaaggaatttttagaaaaaatagttaaattggatagtgatataaataatttacaaataattagtataaatggttctatagatgttcccatagagaaagataatattataaaaagtatagatatccttattagggatatgcgtataattttatttaatatagagaagcaatattga

SEQ ID NO: 282845 - DNA, 678 bp, Morganella morganii
atgattgagcacgatttgcagtacctgcgggatatggcgactatcgcaatgactgaccacagcagcagaaccaaaggccagcttgaagcatttgagggatttgtattggcaaacacaacgcgctacccgcgaagaaagccccgtgatattactgtgaacggcagaaaggtaagcagggagaccgaggcggtatcctgctggtcaacacactattccgtgttaccgatgccacctattgaccgggtggactatcagaactgttcctggcggcgggcaattatggaactggatgaggctgagcagtcctggctgctgtattgctatggtaaagaattgaagttctcacaccagacggctatcaccgcctatgtatggagcgaaatgcaggaacggattaaaggccgtcgggtgtcgaagaaagtaaaagaacgactcaggtcgctggtatggctggcagtgcaggattacgccctgaataaagacgggtattactatcagtctgagctggccgagctggtgggggtagcttctgataactggtgcaggaactacaaaacacactggcaggaactgttgcttatctgtaaaactctggactgcggggcattacggaaaatgagaaacaacagagcggaaatatggcgcaaaaatgcagctataacttgcaaaagtcaataa

SEQ ID NO: 282846 - DNA, 1017 bp, Morganella morganii
atgaattacctgttaaccggctttgtccaaaaagatgctcggatcctgatgtttaatccgggtgcggagatctgcaattttctgaacggtgcccgctacctggtgagcgcggcgccgcactcgatgaatggcattccgtccggcctggtaccggcagatgcacagccgctgctgacagatgagcgggtactgcgtttcctggataatcctgccgtgataaaagccgccggcggtctgtccggttcccgtcattacgttaaatctgtgggctactgccagattgatgatccggagaacccttatcaccatcacgaactgaccatgacccgccataaagacggttttatccggacgtgctggcaccatgacaacatcttgcgggcgggtgatgtccaccagcagcaggcggacgaaattctgttgtgtaaccagcgggcactggtggcgcgttgcatctttaccgagctgcggctgccgccaggccatattctcaatccgtctgatttattcacctggtccgtgatgcgccgcgtcagtgatcacctcccggcctttatctgctcatacattctgatgcagagaccggaagaagagataaccggcaccatgacagagcattccattgtccatcagccgcgctcacacagccggattgttcaggacatcgtagagcagataaaaccggtcgttgttcctgagatagagccggagccgccagcaagttttatgcggatcccgaagttaaagcgctgggagtgtcagaaatacctgcagtgggttaaaagccagccgtgttgtgtatgcgggcagcaggcagacgacccgcatcatattatcggccacggcaccggcggtaccggtacaaaagcacacgacatttttaccatcccgctgtgccgggttcaccacgacgagttacaccgggatccggcagcatgggaagcaaagcacggcagtcagctggagttgttatttaagtttatgaaccggtcatacgggatcggcgtttttggttaa

SEQ ID NO: 282847 - DNA, 789 bp, Morganella morganii
atgagcaatctgattattgtcgatggtattaatgtgcgccgggatatggctggtcgctattgcctgaatgatttgcaccgggccgctggtggagaggaaagacataagccgccttactggctgagaaatgcacagacagagcaacttattgccgagttgcaaatctgcgactcgggtacacagccggtaaatgtgctgcgtggtggcaccgaacagggcacctacgtgtgcaaagaattggtttatgcctatgcgatgtggatcagtccttcattcaatctgaaagtgatccgtacgttcgatgtggtggccggaacacagcaggcgatacagctggctgataaagttcatgccggagctatcctgctggagtccatggcaaaaacactgaatctgtcaaattcctcaaaactgggcgggtatcagaaactgcaaaaaatggctggtcttccggatctggctccctcctatgcaattgatgcaccggcgggcgcggtggatggttccagcagaccgacaacatccctgactacactgctgaaaaatcacaatgccgcattgtctgcgaccagagcatacaaacgccttgctgagctggggattgtggagcagaaagcccggctcggttcacgtggtacacagtgtctgttctggtcgataacgacgcggggactggcgtacggtaaaaatatgacatccccggcaaatccgcgggaaacgcagccgcatttttttgagagcaaatcagcggaacttctggcactgatgatgactccggcggtggcctga

SEQ ID NO: 282848 - DNA, 219 bp, Morganella morganii
atggtgcatttatacgtagatgctccgccggatgataagacagtacggatgaagtcatttatcgataagctggagctgattttttcagagggacaggtaacgccggatgagtttattggttgtgctgctgtggtgtataaaaaatacgaggatatagagaatatccctgaaatagcggcagaaataaaaaggattatgtcattgccggataagcagtaa

SEQ ID NO: 282849 - DNA, 909 bp, Morganella morganii
atgccaaccatcgacatcagccagttaccgccgccggacgtgatcgaaacgttagatttcgaacagattttcactgagcgcaaagccgcattgctggcctctctgccggaagaactgcgggcgccggtcgcccgtgtgctgcaactggaatccgagccgctgaccaaactgttacaggaaaatgcttaccgggaaatgctgctgcgccagcgggtcaatgaagccgcccgcgcctgtatggttgcctatgcctacggggcagatttggatcagctgggcgcgaataacaatgttccccggctggttatccgggaggctgacgacaccgtgatcccgccactgccggccgtttatgaatcagatgctgatttccggatgcgtattccgcaggcatttgagggaatgagcgttgccgggccggtcggtgcgtatgtttttcatgcccgcagcgcttccggactggtcgcggatgcctcggcaatcagcccggagcctgcctgtgtgaccgtcagtgtgctgtcacgcgagggtgacggtacggcatcgccggaactgctggctgtcgtcgataaggcgctgaatgatgaaaatgtgcgcccggtggctgaccgcgtcaccgtgcagtccgttgagattgtccgttacgccattgatgcggtgctttatctgttcccgacaccggaatccgaaccgattgaagcggcagcccgggaacggatagcgcggtatgtgaaagagcagcaccgtatcgggcgtgatatccggctgtcggccatttatgccgccctgcatgttgagggggttcagcgcgtcgaactgaaaagcccggcaaaagatatcgtgatcagtaatacccaggcatcattttgcactgatgtgacggtgacggtcggaggttccgatgagtag

SEQ ID NO: 282850 - DNA, 354 bp, Morganella morganii
  misc_feature (21)..(30): n is a, c, g, or t
atgcaaattggtgttcgcttnnnnnnnnnnttaagagaggagagagaaaaactcaggctgactcaaaccgaaatggcaaaaatttgtggcgttgctttcaggacatattgtgattatgaggccagtaaaacagagcccaaagcatcattacttatgaatctgaataagattaacgtggatattatgtatattctaacgggttgcagaattctgcaagaaaatatatcagttgatgaaacaagcctccttgataattaccgggctatgtctccggccgcgcggctgaatgttctggcggttgctgccgcttttgtgaaatcagaatctccggaaaacagggagcagggatgttaa

SEQ ID NO: 282851 - DNA, 186 bp, Morganella morganii
atgaaacacaataaacctatacaacgctcgcgtttacctaaaggaattgcatctaaaaacccggttccgatgcgcttatcaaccgacgaaaaggaggatttaaacattattgcgatgcgggaaagccgctccctgtccagcatggcaaggattatctaccttgaaggtctgaaaaaatttcgctga

SEQ ID NO: 282852 - DNA, 1170 bp, Morganella morganii
atggacatacgaaaattatttgtagctataagtaatgaattatcagcaaaatttgaaaaaacggtacaaataaaacataatggtggaaaaggagataatagagagaatgctttcattgaattccttaatgattacttaccaagtaaatatggagtaggacgcggagaggtaatttcgcctgaaaatgagattagtggcgagatggatattttaatttttgataaagcccaatgtccgttatttttaaaatccgagtctcactccttatatcccagagaaagtattttcggagctatcagtatgaaatcacatcttgatagtgaagaattaaaagatgcgtataagaacattgccagtttaaaaaaaacaatgttttcacaaaattttcaaaaatcgtccgcatctggattttcaacaggatttaaccctgttgtgcctgtaactgcaatttttgcttatgctgctaatagaagtcttaaagctatatcaaatcaagttaagatactagatgaagaactaactgatattaacctgagaccagattttattgttattcttggattaggtattatcggtcaaaaaggaagaatcagaggggattttaataaatataacttatctcaagaccgtgatgaactatcactgttgagagaaaccggaaggcatacacttttacgattttacattcaattccttgatgaattaaattcaataacacaaccagaattaaatcttaatttatattttgacatgccagcagtattaggcacgcacaaggttaaaggccataatagattaatatcatatattgatgacactgataacaaaatagttaaaagccttgcactttctgctatcgaaaaaataataaaagattcaaaaatagtaacattagaacaacattatataaactatctgggaacaataccgttaggagtcgaaaaattacaggatctatcctcatgtatatatgaatacaacccacgaaataaaccaaaattacagattgtatatgatgctgatggaattcccttttccgatgataatacatttcgaccaatatacattagaatagatggaaataattatgcagtagacttagctagtctgaatagtgatgattttgaagacaatcctgactttacagttgatgagctaatgtcacagtaa

SEQ ID NO: 282853 - DNA, 909 bp, Morganella morganii
atgccaaccatcgacatcagccagttaccgccgccggacgtgatcgaaacgttagatttcgaacagattttcactgagcgcaaagccgccttgctggcctctctgccggaagaactacggacgccggtcgcccgcgtgctgcaactggaatccgagccgctgaccaaactgttacaggaaaatgcttaccgggaaatgctgctgcgccagcgggtcaatgaagccgcccgcgcctgtatggtggcctatgcctacggggcagatttggatcagctgggcgcgaacaacaacgttccccggctggttgtccgggaggctgacgataccgtgatcccgccactgccggccgtttatgaatcggattctgatttccggatgcgcatcccacaggcgtttgaagggatgagtgttgccgggccggtcggcgcttatgtttttcatgcacgcagcgcttccggactggtcgcggatgcctcggcaatcagtccggagcctgcctgtgtgaccgtcagcgtgctgtcccgtgagggcgacggcacagcaccggcggaactgctggctgtcgtcgataaggcgctgaatgatgaaaatgtgcgcccggtggctgaccgcgtgaccgtgcagtccgttgaaattgtgaattattcgattgatgccgtgctgtatctgttcccgacacccgaatccgaaccgattgaggcagcagcccgtgaacagatcgcccggtatgtgaaagagcagcaccgtatcgggcgtgatatccggctgtcggccatttacgccgccctgcatgttgagggggttcagcgcgtcgaactgaaaagcccggcaaaagatatcgtgatcagcaatacccaggcgtcattttgtactgatgtgacggtgacggtcgggggttctgatgagtag

SEQ ID NO: 282854 - DNA, 687 bp, Morganella morganii; identical to SEQ ID NO: 282300

SEQ ID NO: 282855 - DNA, 180 bp, Morganella morganii
ttgggtttcaatctactgctgcgccacatgggctggtttgaagccgctgacttaatcgttaaaggaatggaaggggcaatcgctgccaaaaccgtcacctacgatttcgaacgtctgatggaaggcgctaaactcctgaaatgctcagagtttggtgacgcaatcatcaaacacatgtaa

SEQ ID NO: 282856 - DNA, 168 bp, Morganella morganii
atgattgcccttgcaaaagtggcagagagttccatagttgctgtagtgataaaaaagaaattgaaattccacatattgatttcatactttcaaaagctatccctcctgataaaaaagaaattagttttccgtattagaaataaatatgagttagagtacggccactag

SEQ ID NO: 282857 - DNA, 444 bp, Morganella morganii
atgaatacacaaaatcatcagttcgcggagcataccgcaattactgcctcagtggtcccggacgagttacgcatcggcttctggccgcagcactttggctccaccccacaatggataacccttgaacctcgcattttcgcctggatggatcggctgtgtgccgattaccacggtggtatctggcgtttttcgacactcagcaacggcggcgcttttatggctcccgagtcagagcacgatgagaagtggacattgttcaacagcttgaacggcaatggcgcagagcttaacagtgaagctgcagggatggtcgcctgtctgatggcttacaaccaccacgcctgtcgcaccgagtgtgacgcgatgactgaacactattatctcttacgcgactacgcgctaatccatccggaatgcagcgccattatgcatctaatcgactga

SEQ ID NO: 282858 - DNA, 849 bp, Morganella morganii
atgcttaaattcaattctgcgtggagatacgacgccccggccaccgctgatcccgtctttgttaacgaggtaatggacgaaataatccaatccattgttgctgagtgtagcaataagcgcatatatgaaatttttaaacgtcgattcgcacatgcatccggtagcccaactggtgaaagctctgatgaaggctgggcaaaaaccgacctttgggacgcaatgaaccgaacagcgcagaaaaacgttgttttgtttattgaggctttatatgacggactttgtgatctccatactgcaaatgtcaatgctcagcttccgcccctgcacttcgttaataagcatttagaatcgacgggatttgctataaaagaacctgacttattaatcaggataagcaaccatgagcctataccggttcctaccatagctccttcgtttgatgtgcaggccaatgaggtaattcaggcatcgttgagaaaatcggaagagcttcttgatgtaggaaatcatcgaggtgccgttcaggaagtatattggctgcttgaaaccattacaacggcttttaagggagtgcaaatggctgacggtaatgtatctggtaaatatttttcaaaaattattggagagatgcgtcagctaaaccgccataaaacactagatcaggtatctggctggttagtaaatatttatggatacctttcagcgcctggcggtggcggggtgcgtcatggtgccgatatattaaattatgacgagttgacggccagcgaggcgcggctattttgtgatctcgcccgtagctatatatcttattttttacatgaacatagcctgctacagagaacttag

SEQ ID NO: 282859 - DNA, 615 bp, Morganella morganii
atgggggctgcatcagccgttgccgtgccgctgatttataacacagtaaaagaagctatctgggaaactaaaaaaagaaaacgcgaagaacgatatatcgtaatgcaacttatttttatgctggacaaatatatatctcagtgtgagttcttgtcctataacgacggtatttacgaccctgaaaaagaatacaaggttacaggctatgttaaacctgaactgcaattatcatcggtaaagggtgactataaatatctggatgcagatatgctttacaggttgtacagcattgactcgaaatgtgctcaggtaatcagtgaactgtcaaaccttgatgactcttactttgatgatgcgcctgattgcactggctattatgccaggcggcaagagctctatgcaaagcacggcctgtatgtaatcgaactctcagagaatatttgccgtaaattccgtataaaacatgtttcatgggaagggggatttaacccggcagtctccatccgggaacgtttggttcagattcgcgcatcgaagtcccgtgccaatctgcgcagaatggaaatgaaggcgaagcgagtcgcagaaaagcagcgaaaattactgcaagggtag

SEQ ID NO: 282860 - DNA, 333 bp, Morganella morganii
atgcgccatcgtatgagtggtcgtcaattgaaccgcaacagcagccatcgccaagctatgtttcgtaacatggccggttctttagttcgtcacgaaattatcaagacgactttgcctaaggcaaaagaacaccgtcgtttagcattcgcccgtactcgtgataacgaaatcgtggcaaaactgttcaacgagctgggaccacgtttcgctcagcgtgcaggtggttacacccgcattctgaaatgtggtttccgtgctggtgacaatgctccaatggcttacattgagcttgttgaccgcgctgaatcccagactgaagcagcagcagagtaa

SEQ ID NO: 282861 - DNA, 1023 bp, Morganella morganii
gtggatgacaaagagccggagcagcgcggaaagcagccgggtaatccggaaagcgaagccgcagagcgccgtcaggcggcatttgaccgttttctccgtcatggtttcggtgaactgacagctgaagaacgccaggcggttaaagagctgcgtgcgcaggggacctccccggatgaaaaagggggctacactgtacccactcagatgctgaataaagtcgttgatcagatgaaagcctatggcggcattgcaggcatttcgcagattctgacaacttcaaacgggcaggatattacctggtcaacatcagacggcacagcggaagagggtgaactgctgggtgaaaacaccgcagccagcgaacaggatgtggaattcgggaccgccattctcggtgccaaaaaattgtcttccaaaattatccgtgtatccaatgagttgctgcaggacagcgggattgatattgaatcctacctcgcagcacggattgcgcagcgtatcggacgcggtgaggcgaaatatctggtgaaaggtaccggcgcaggcactccggtgcagccgaaggggctggatgcatccgttaccggcacggtcgatgcctctgccgtattcacctggaaagatattaatgccctgaaacacgccattgacccggcttaccgtaacaacccgaaattccgactggcttttaatgacagcaccctgaaagtgctcacggaaatggaggatggtaacaagcgtccgttgtggctgccggaaatcatcggtgttgctcccgcgacaattctgggtatgccgtatgtgattgatcaggcggttgacagtatggaagcaggcaagaaattcatcttctgtggtgactttgatcgcttcattgtccgccgtgtcacctatatgacgctgaaacgtctggtcgagcgttatgctgaatttgaccagaccgcgtttctggcgtttcaccgctttgactgttgtctggaagatacctcagcgattaaggcgctggtggcaaaagctgcctga

SEQ ID NO: 282862 - DNA, 792 bp, Morganella morganii
atgagcaatctgattattgttgacggtattaatgtgcgccgggacatggccggtcgctattgcctgaatgatttacaccgtgccgccgggggtgaagagcgccataagccatctaactttatgcggatggaatcaacacaggcattgtgttcagaaatcgaccgatgctcagatatgagcatcgcctctgtaaacaccattcgcggcggtacggagcaggggacatatgttgcccgtgaggttgtttatgcctatgccatgtggataagcccgctgttcaacctgaaggttatccgcacgttcgatgcggtggccggaacacagcaggcggtacagctggccgataaggtacaggcaggcgctatcctgctggagtccatggcaaaaacactgaatctgtcgaattcctcaaaactgggcgggtatcagaaactgcaaaaaatggccggtcttccggatctggctccctcctatgcgattgatgcaccggcgggcgcggtggatggctccagcagaccgacaacctctctgactacgctgctgaaaaatcacaatgcagctttgtctgcgactaaagcatacaaacgtcttgctgaactggggattgtcgaacagaaagcccgtccgggttcgaagggaacacaaaaactgttctggtctgtcacatcaaaggggcttctgtacggcaaaaatatcacatctccggcgaacccgagggaaacgcagccgcatttctttgagagcaaatcagcggaactgctggcactgatgatgactccggcggtggcctga
